United States Patent Application Publication US 2016/0319361 A1 - sequence listing, part 16

SEQ ID NO: 420703 - DNA, 30 bp, Artificial Sequence
  Synthetic oligonucleotide
gcctcttacttgcctaaccggcgcacgtga

SEQ ID NO: 420704 - DNA, 30 bp, Artificial Sequence
  Synthetic oligonucleotide
gttcggtctggcggctactatgtcacgtga

SEQ ID NO: 420705 - DNA, 30 bp, Artificial Sequence
  Synthetic oligonucleotide
ctatattgataaccaaatataacgacgtga

SEQ ID NO: 420706 - DNA, 31 bp, Artificial Sequence
  Synthetic oligonucleotide
gtaacgagcactattagatagttggacgtga

SEQ ID NO: 420707 - DNA, 30 bp, Artificial Sequence
  Synthetic oligonucleotide
aattatttcaggcgattaggcatgacgtga

SEQ ID NO: 420708 - DNA, 30 bp, Artificial Sequence
  Synthetic oligonucleotide
aacccgccggcatgaatgttgtatacgtga

SEQ ID NO: 420709 - DNA, 30 bp, Artificial Sequence
  Synthetic oligonucleotide
ggcgagtggaacgcaccgccctttacgtga

SEQ ID NO: 420710 - DNA, 30 bp, Artificial Sequence
  Synthetic oligonucleotide
ttaacgaattgattcagatatcaaccgtga

SEQ ID NO: 420711 - DNA, 30 bp, Artificial Sequence
  Synthetic oligonucleotide
agagcgcaaaagcacggtagggtaccgtga

SEQ ID NO: 420712 - DNA, 30 bp, Artificial Sequence
  Synthetic oligonucleotide
taacattcacgagagcaaattggcccgtga

SEQ ID NO: 420713 - DNA, 30 bp, Artificial Sequence
  Synthetic oligonucleotide
aactgatgagatccgggcagggtcccgtga

SEQ ID NO: 420714 - DNA, 30 bp, Artificial Sequence
  Synthetic oligonucleotide
tactagttggtctaagaggtttggccgtga

SEQ ID NO: 420715 - DNA, 30 bp, Artificial Sequence
  Synthetic oligonucleotide
aaacggactaggcatccgagatcagcgtga

SEQ ID NO: 420716 - DNA, 30 bp, Artificial Sequence
  Synthetic oligonucleotide
gatcacgactgtccatatagcgccgcgtga

SEQ ID NO: 420717 - DNA, 30 bp, Artificial Sequence
  Synthetic oligonucleotide
taaagtaggtctgtcaggggcagtgcgtga

SEQ ID NO: 420718 - DNA, 30 bp, Artificial Sequence
  Synthetic oligonucleotide
tagaacttgtcaacacgttcgacatcgtga

SEQ ID NO: 420719 - DNA, 30 bp, Artificial Sequence
  Synthetic oligonucleotide
accaccggtttttctgtcatgctatcgtga

SEQ ID NO: 420720 - DNA, 30 bp, Artificial Sequence
  Synthetic oligonucleotide
ggtaccaagcgggtggcccagtgctcgtga

SEQ ID NO: 420721 - DNA, 30 bp, Artificial Sequence
  Synthetic oligonucleotide
gatggggactagcttcccgcccggtcgtga

SEQ ID NO: 420722 - DNA, 30 bp, Artificial Sequence
  Synthetic oligonucleotide
gaaatctgtttctccttcattgggtcgtga

SEQ ID NO: 420723 - DNA, 30 bp, Artificial Sequence
  Synthetic oligonucleotide
cctaacttgcatccgcgtatcattaggtga

SEQ ID NO: 420724 - DNA, 30 bp, Artificial Sequence
  Synthetic oligonucleotide
aggcatgccagactgatccttgaacggtga

SEQ ID NO: 420725 - DNA, 31 bp, Artificial Sequence
  Synthetic oligonucleotide
tccagtctctctgcccacggtcagacggtga

SEQ ID NO: 420726 - DNA, 30 bp, Artificial Sequence
  Synthetic oligonucleotide
ctttaactataatgtggccagcgccggtga

SEQ ID NO: 420727 - DNA, 30 bp, Artificial Sequence
  Synthetic oligonucleotide
aagtgatcctaactttcccaattgcggtga

SEQ ID NO: 420728 - DNA, 30 bp, Artificial Sequence
  Synthetic oligonucleotide
cactagtgacgtattatcaacaatcggtga

SEQ ID NO: 420729 - DNA, 30 bp, Artificial Sequence
  Synthetic oligonucleotide
gttgggtatagttcggcaagttgtcggtga

SEQ ID NO: 420730 - DNA, 30 bp, Artificial Sequence
  Synthetic oligonucleotide
caggctcttctgtgtagccgacaagggtga

SEQ ID NO: 420731 - DNA, 30 bp, Artificial Sequence
  Synthetic oligonucleotide
cattaacgggtcgggtggaaaagagggtga

SEQ ID NO: 420732 - DNA, 30 bp, Artificial Sequence
  Synthetic oligonucleotide
ctttaggtggttcacgcgaacgtagggtga

SEQ ID NO: 420733 - DNA, 30 bp, Artificial Sequence
  Synthetic oligonucleotide
ttgaaggaatctcgtcacttcttagggtga

SEQ ID NO: 420734 - DNA, 30 bp, Artificial Sequence
  Synthetic oligonucleotide
gcgccgcaacgccttacacaaagcgggtga

SEQ ID NO: 420735 - DNA, 30 bp, Artificial Sequence
  Synthetic oligonucleotide
aaagcctcgttctccggaggcgaggggtga

SEQ ID NO: 420736 - DNA, 40 bp, Artificial Sequence
  Synthetic oligonucleotide
aagataatacattcatggtatggtcggtgatcgggggtga

SEQ ID NO: 420737 - DNA, 30 bp, Artificial Sequence
  Synthetic oligonucleotide
tggggggttttatctacagttcgggggtga

SEQ ID NO: 420738 - DNA, 30 bp, Artificial Sequence
  Synthetic oligonucleotide
ggagtgtatctccgccgtgtcatggggtga

SEQ ID NO: 420739 - DNA, 30 bp, Artificial Sequence
  Synthetic oligonucleotide
tttcgtacatataggctggcttatgggtga

SEQ ID NO: 420740 - DNA, 30 bp, Artificial Sequence
  Synthetic oligonucleotide
ctttacacgatggagtgacccgctgggtga

SEQ ID NO: 420741 - DNA, 30 bp, Artificial Sequence
  Synthetic oligonucleotide
tgaaatctccgcatggggccaacatggtga

SEQ ID NO: 420742 - DNA, 30 bp, Artificial Sequence
  Synthetic oligonucleotide
gttgttaagatatcgtactgcagatggtga

SEQ ID NO: 420743 - DNA, 30 bp, Artificial Sequence
  Synthetic oligonucleotide
tcaagacctgcctgccgcattaactggtga

SEQ ID NO: 420744 - DNA, 30 bp, Artificial Sequence
  Synthetic oligonucleotide
aacccgcgcaccattactggctgctggtga

SEQ ID NO: 420745 - DNA, 30 bp, Artificial Sequence
  Synthetic oligonucleotide
catactattggtattcattaaaggtggtga

SEQ ID NO: 420746 - DNA, 30 bp, Artificial Sequence
  Synthetic oligonucleotide
agctaaaacgcacgtctcctggggtggtga

SEQ ID NO: 420747 - DNA, 30 bp, Artificial Sequence
  Synthetic oligonucleotide
cttcgccaggacttataacaaggttggtga

SEQ ID NO: 420748 - DNA, 30 bp, Artificial Sequence
  Synthetic oligonucleotide
cgtgccagttagtaggttgcgtgttggtga

SEQ ID NO: 420749 - DNA, 30 bp, Artificial Sequence
  Synthetic oligonucleotide
catcacccacatgccctcttgtgttggtga

SEQ ID NO: 420750 - DNA, 30 bp, Artificial Sequence
  Synthetic oligonucleotide
atactttttgaatgtatgggcgtttggtga

SEQ ID NO: 420751 - DNA, 30 bp, Artificial Sequence
  Synthetic oligonucleotide
tttcatacaatttccttaatagaaatgtga

SEQ ID NO: 420752 - DNA, 30 bp, Artificial Sequence
  Synthetic oligonucleotide
cttaacctccggacgtttagcgcaatgtga

SEQ ID NO: 420753 - DNA, 30 bp, Artificial Sequence
  Synthetic oligonucleotide
ttttgttagaggaattgaattgcaatgtga

SEQ ID NO: 420754 - DNA, 30 bp, Artificial Sequence
  Synthetic oligonucleotide
acggcagaccatgtaccaagtaacatgtga

SEQ ID NO: 420755 - DNA, 30 bp, Artificial Sequence
  Synthetic oligonucleotide
atattagcaggaggattgaatgtcatgtga

SEQ ID NO: 420756 - DNA, 30 bp, Artificial Sequence
  Synthetic oligonucleotide
aaatcctcagggcgttaccaacatatgtga

SEQ ID NO: 420757 - DNA, 30 bp, Artificial Sequence
  Synthetic oligonucleotide
tacggtatatgtggtccaggctgtatgtga

SEQ ID NO: 420758 - DNA, 30 bp, Artificial Sequence
  Synthetic oligonucleotide
cagaatgattcttgggatcgacaactgtga

SEQ ID NO: 420759 - DNA, 30 bp, Artificial Sequence
  Synthetic oligonucleotide
tctaaacaccgctttcttggtgaactgtga

SEQ ID NO: 420760 - DNA, 30 bp, Artificial Sequence
  Synthetic oligonucleotide
gctagttcagaagcgccctccagcctgtga

SEQ ID NO: 420761 - DNA, 30 bp, Artificial Sequence
  Synthetic oligonucleotide
cagcccccaccccgtatgtagatgctgtga

SEQ ID NO: 420762 - DNA, 30 bp, Artificial Sequence
  Synthetic oligonucleotide
tatttgccaggccgctctcccgtgctgtga

SEQ ID NO: 420763 - DNA, 30 bp, Artificial Sequence
  Synthetic oligonucleotide
taaacccatttagaacaacggaatctgtga

SEQ ID NO: 420764 - DNA, 30 bp, Artificial Sequence
  Synthetic oligonucleotide
aaaaattgaacttatgttttgcacgtgtga

SEQ ID NO: 420765 - DNA, 30 bp, Artificial Sequence
  Synthetic oligonucleotide
taaagaagacgcatatggttcatcgtgtga

SEQ ID NO: 420766 - DNA, 30 bp, Artificial Sequence
  Synthetic oligonucleotide
gcaaggggacgccgcggtcggagggtgtga

SEQ ID NO: 420767 - DNA, 30 bp, Artificial Sequence
  Synthetic oligonucleotide
cttcgttacagcacggaaggcttggtgtga

SEQ ID NO: 420768 - DNA, 30 bp, Artificial Sequence
  Synthetic oligonucleotide
tttctagtagaatatggcggatctgtgtga

SEQ ID NO: 420769 - DNA, 30 bp, Artificial Sequence
  Synthetic oligonucleotide
aaatcaggggatggagatattgttgtgtga

SEQ ID NO: 420770 - DNA, 30 bp, Artificial Sequence
  Synthetic oligonucleotide
gcacatcaagcttggcacgtatttgtgtga

SEQ ID NO: 420771 - DNA, 30 bp, Artificial Sequence
  Synthetic oligonucleotide
tgctgttctcctccattccactccttgtga

SEQ ID NO: 420772 - DNA, 30 bp, Artificial Sequence
  Synthetic oligonucleotide
gacgctatcgagcaaaccggggggttgtga

SEQ ID NO: 420773 - DNA, 30 bp, Artificial Sequence
  Synthetic oligonucleotide
ctactgtgtgtgtgggaaacgtatttgtga

SEQ ID NO: 420774 - DNA, 30 bp, Artificial Sequence
  Synthetic oligonucleotide
atgtttattcggttgctatacagtttgtga

SEQ ID NO: 420775 - DNA, 30 bp, Artificial Sequence
  Synthetic oligonucleotide
tatgaagaccgttcacacgcacaaaattga

SEQ ID NO: 420776 - DNA, 30 bp, Artificial Sequence
  Synthetic oligonucleotide
gttatgccacatagcagaggctgcaattga

SEQ ID NO: 420777 - DNA, 30 bp, Artificial Sequence
  Synthetic oligonucleotide
ctgtcataaattgaagtactcatcaattga

SEQ ID NO: 420778 - DNA, 30 bp, Artificial Sequence
  Synthetic oligonucleotide
attgagatctctgaacggtataagaattga

SEQ ID NO: 420779 - DNA, 30 bp, Artificial Sequence
  Synthetic oligonucleotide
aagggacctgaaccagtgttacagaattga

SEQ ID NO: 420780 - DNA, 30 bp, Artificial Sequence
  Synthetic oligonucleotide
tgcatctcactggcagaggcattgaattga

SEQ ID NO: 420781 - DNA, 30 bp, Artificial Sequence
  Synthetic oligonucleotide
gaagctgagaatactagggtacataattga

SEQ ID NO: 420782 - DNA, 30 bp, Artificial Sequence
  Synthetic oligonucleotide
gcgaactatcattactagggtcataattga

SEQ ID NO: 420783 - DNA, 30 bp, Artificial Sequence
  Synthetic oligonucleotide
ccagccaggcattaccattagtataattga

SEQ ID NO: 420784 - DNA, 30 bp, Artificial Sequence
  Synthetic oligonucleotide
tggcattaaatatatagatagagtaattga

SEQ ID NO: 420785 - DNA, 30 bp, Artificial Sequence
  Synthetic oligonucleotide
aatgaggtcggacttaatagtagtaattga

SEQ ID NO: 420786 - DNA, 30 bp, Artificial Sequence
  Synthetic oligonucleotide
ttttacatgacattaaggctgcgtaattga

SEQ ID NO: 420787 - DNA, 30 bp, Artificial Sequence
  Synthetic oligonucleotide
gtgattcaatgatacgatccctgtaattga

SEQ ID NO: 420788 - DNA, 30 bp, Artificial Sequence
  Synthetic oligonucleotide
tccaaccttagttttcggcacggacattga

SEQ ID NO: 420789 - DNA, 30 bp, Artificial Sequence
  Synthetic oligonucleotide
aaattccttgaatatagccactgacattga

SEQ ID NO: 420790 - DNA, 30 bp, Artificial Sequence
  Synthetic oligonucleotide
agcagttaatagtatcgtaagttacattga

SEQ ID NO: 420791 - DNA, 30 bp, Artificial Sequence
  Synthetic oligonucleotide
tctaacttgatcggacacgtcgtccattga

SEQ ID NO: 420792 - DNA, 30 bp, Artificial Sequence
  Synthetic oligonucleotide
ttgtctgaaatctaggaaactatgcattga

SEQ ID NO: 420793 - DNA, 30 bp, Artificial Sequence
  Synthetic oligonucleotide
actttgcaattaaaggcgatcacagattga

SEQ ID NO: 420794 - DNA, 30 bp, Artificial Sequence
  Synthetic oligonucleotide
taacccagcatctcgttagccgccgattga

SEQ ID NO: 420795 - DNA, 30 bp, Artificial Sequence
  Synthetic oligonucleotide
aacatttcacatagcgcagcgggcgattga

SEQ ID NO: 420796 - DNA, 30 bp, Artificial Sequence
  Synthetic oligonucleotide
cgctaattcatccgccagggctgcgattga

SEQ ID NO: 420797 - DNA, 30 bp, Artificial Sequence
  Synthetic oligonucleotide
attcgagacctccaagctatagaggattga

SEQ ID NO: 420798 - DNA, 30 bp, Artificial Sequence
  Synthetic oligonucleotide
aaacctcgttacccatgcgcttaggattga

SEQ ID NO: 420799 - DNA, 30 bp, Artificial Sequence
  Synthetic oligonucleotide
gtgacccggatctacggagcgagggattga

SEQ ID NO: 420800 - DNA, 30 bp, Artificial Sequence
  Synthetic oligonucleotide
tgtctcgcccatagctatgcaactgattga

SEQ ID NO: 420801 - DNA, 30 bp, Artificial Sequence
  Synthetic oligonucleotide
caaacgtcctatgttttgttgagatattga

SEQ ID NO: 420802 - DNA, 30 bp, Artificial Sequence
  Synthetic oligonucleotide
gtgtaagagctataaattgtaatatattga

SEQ ID NO: 420803 - DNA, 30 bp, Artificial Sequence
  Synthetic oligonucleotide
ttaggcaaatcttttataaggtactattga

SEQ ID NO: 420804 - DNA, 30 bp, Artificial Sequence
  Synthetic oligonucleotide
tctaatcaacgacgccccagcagctattga

SEQ ID NO: 420805 - DNA, 30 bp, Artificial Sequence
  Synthetic oligonucleotide
atgcaacagactcggccgggccgctattga

SEQ ID NO: 420806 - DNA, 30 bp, Artificial Sequence
  Synthetic oligonucleotide
tgtgccaatcattcccagtttatctattga

SEQ ID NO: 420807 - DNA, 30 bp, Artificial Sequence
  Synthetic oligonucleotide
gacagtctgctacaaccagaagtctattga

SEQ ID NO: 420808 - DNA, 30 bp, Artificial Sequence
  Synthetic oligonucleotide
aaggtcgcggcaccggccgcacggtattga

SEQ ID NO: 420809 - DNA, 30 bp, Artificial Sequence
  Synthetic oligonucleotide
aatggataactcatacgacccttcacttga

SEQ ID NO: 420810 - DNA, 30 bp, Artificial Sequence
  Synthetic oligonucleotide
ggacttggaagaatcaggactcatacttga

SEQ ID NO: 420811 - DNA, 30 bp, Artificial Sequence
  Synthetic oligonucleotide
aatcaagaaacactttgcggttttacttga

SEQ ID NO: 420812 - DNA, 30 bp, Artificial Sequence
  Synthetic oligonucleotide
gcacttcacattagtggaactacaccttga

SEQ ID NO: 420813 - DNA, 30 bp, Artificial Sequence
  Synthetic oligonucleotide
atgaatgcgagcccaggtgagagaccttga

SEQ ID NO: 420814 - DNA, 30 bp, Artificial Sequence
  Synthetic oligonucleotide
ggcctctcagagtacgtttccaacccttga

SEQ ID NO: 420815 - DNA, 30 bp, Artificial Sequence
  Synthetic oligonucleotide
gcagtgggctcgtcgtgaaagggcccttga

SEQ ID NO: 420816 - DNA, 30 bp, Artificial Sequence
  Synthetic oligonucleotide
agggtaccaggcggggccgcgggcccttga

SEQ ID NO: 420817 - DNA, 30 bp, Artificial Sequence
  Synthetic oligonucleotide
taatcatggtatgtgtccttatgcccttga

SEQ ID NO: 420818 - DNA, 30 bp, Artificial Sequence
  Synthetic oligonucleotide
gagcggggcgaggtaggcctaaggccttga

SEQ ID NO: 420819 - DNA, 30 bp, Artificial Sequence
  Synthetic oligonucleotide
gctcttcaagcttaaagggctctgccttga

SEQ ID NO: 420820 - DNA, 30 bp, Artificial Sequence
  Synthetic oligonucleotide
caccggagagggtcgggtgggaaagcttga

SEQ ID NO: 420821 - DNA, 30 bp, Artificial Sequence
  Synthetic oligonucleotide
gccgtctactcttctcataatagagcttga

SEQ ID NO: 420822 - DNA, 30 bp, Artificial Sequence
  Synthetic oligonucleotide
gagaagcgctaatattataggcccgcttga

SEQ ID NO: 420823 - DNA, 30 bp, Artificial Sequence
  Synthetic oligonucleotide
gcactcttctagggaatacacagcgcttga

SEQ ID NO: 420824 - DNA, 30 bp, Artificial Sequence
  Synthetic oligonucleotide
gactcagagcagaagtcgacaggcgcttga

SEQ ID NO: 420825 - DNA, 30 bp, Artificial Sequence
  Synthetic oligonucleotide
gccttagactcgcccttaaaaatcgcttga

SEQ ID NO: 420826 - DNA, 30 bp, Artificial Sequence
  Synthetic oligonucleotide
cccaacacgattcatacagctcaggcttga

SEQ ID NO: 420827 - DNA, 30 bp, Artificial Sequence
  Synthetic oligonucleotide
tggtctctttgcgcgctggttgcggcttga

SEQ ID NO: 420828 - DNA, 30 bp, Artificial Sequence
  Synthetic oligonucleotide
gccccatccaagtggtccagtccatcttga

SEQ ID NO: 420829 - DNA, 30 bp, Artificial Sequence
  Synthetic oligonucleotide
gtaaattaattgagctgaaccaactcttga

SEQ ID NO: 420830 - DNA, 30 bp, Artificial Sequence
  Synthetic oligonucleotide
aaccatgatatgtaagggcgacagtcttga

SEQ ID NO: 420831 - DNA, 30 bp, Artificial Sequence
  Synthetic oligonucleotide
tctactagcctaggggtcatcgcgtcttga

SEQ ID NO: 420832 - DNA, 30 bp, Artificial Sequence
  Synthetic oligonucleotide
tggacatattcatgatgaaggccttcttga

SEQ ID NO: 420833 - DNA, 30 bp, Artificial Sequence
  Synthetic oligonucleotide
tcaccaggcccaatctttgtgccttcttga

SEQ ID NO: 420834 - DNA, 30 bp, Artificial Sequence
  Synthetic oligonucleotide
ttattgacacgtttaatctgagcaagttga

SEQ ID NO: 420835 - DNA, 30 bp, Artificial Sequence
  Synthetic oligonucleotide
gataatctgagcactagctgctgcagttga

SEQ ID NO: 420836 - DNA, 30 bp, Artificial Sequence
  Synthetic oligonucleotide
tggagtcaccaaatagaggctgcgagttga

SEQ ID NO: 420837 - DNA, 30 bp, Artificial Sequence
  Synthetic oligonucleotide
aagatatcgagtttaccgctctggagttga

SEQ ID NO: 420838 - DNA, 30 bp, Artificial Sequence
  Synthetic oligonucleotide
ctaccataaatgtaaccttgatctagttga

SEQ ID NO: 420839 - DNA, 30 bp, Artificial Sequence
  Synthetic oligonucleotide
gggcattgtgctcattcagtccaaggttga

SEQ ID NO: 420840 - DNA, 28 bp, Artificial Sequence
  Synthetic oligonucleotide
ggggcagcatcggtagagagcaggttga

SEQ ID NO: 420841 - DNA, 30 bp, Artificial Sequence
  Synthetic oligonucleotide
ccaggacctacgaaatgtgttcacggttga

SEQ ID NO: 420842 - DNA, 30 bp, Artificial Sequence
  Synthetic oligonucleotide
tgtctttacatcgggataccattcggttga

SEQ ID NO: 420843 - DNA, 30 bp, Artificial Sequence
  Synthetic oligonucleotide
aggcaggaggggtatcggggtgcgggttga

SEQ ID NO: 420844 - DNA, 30 bp, Artificial Sequence
  Synthetic oligonucleotide
cagcatccacggcataacaaatcgggttga

SEQ ID NO: 420845 - DNA, 30 bp, Artificial Sequence
  Synthetic oligonucleotide
ttattcctattaactttcttgcctggttga

SEQ ID NO: 420846 - DNA, 30 bp, Artificial Sequence
  Synthetic oligonucleotide
ttcttcctaatagcagcgtgaggtggttga

SEQ ID NO: 420847 - DNA, 30 bp, Artificial Sequence
  Synthetic oligonucleotide
aattgacctgaaaggactgtgtttggttga

SEQ ID NO: 420848 - DNA, 30 bp, Artificial Sequence
  Synthetic oligonucleotide
gtgacataatcactggacgatgcctgttga

SEQ ID NO: 420849 - DNA, 30 bp, Artificial Sequence
  Synthetic oligonucleotide
atcctcacgttgctatcccaaatctgttga

SEQ ID NO: 420850 - DNA, 30 bp, Artificial Sequence
  Synthetic oligonucleotide
actgagtagccaattaagcagtagtgttga

SEQ ID NO: 420851 - DNA, 30 bp, Artificial Sequence
  Synthetic oligonucleotide
gcaaacctagtgtgtaagcgacggtgttga

SEQ ID NO: 420852 - DNA, 30 bp, Artificial Sequence
  Synthetic oligonucleotide
gagtctgtagccacatttagtctgtgttga

SEQ ID NO: 420853 - DNA, 30 bp, Artificial Sequence
  Synthetic oligonucleotide
attgctcacggccgtgggtccgattgttga

SEQ ID NO: 420854 - DNA, 30 bp, Artificial Sequence
  Synthetic oligonucleotide
agggttgtattagtagataattattgttga

SEQ ID NO: 420855 - DNA, 30 bp, Artificial Sequence
  Synthetic oligonucleotide
catgcggccaagcatctctgtcgttgttga

SEQ ID NO: 420856 - DNA, 30 bp, Artificial Sequence
  Synthetic oligonucleotide
actgactctgcggatagagggggttgttga

SEQ ID NO: 420857 - DNA, 30 bp, Artificial Sequence
  Synthetic oligonucleotide
ggacgtatcgacccggcagagttttgttga

SEQ ID NO: 420858 - DNA, 30 bp, Artificial Sequence
  Synthetic oligonucleotide
cgtaaccttaaatttcggccaaacatttga

SEQ ID NO: 420859 - DNA, 30 bp, Artificial Sequence
  Synthetic oligonucleotide
agaaattagcacctaaatgacgacatttga

SEQ ID NO: 420860 - DNA, 30 bp, Artificial Sequence
  Synthetic oligonucleotide
cggcactcaaatagtatacacgagatttga

SEQ ID NO: 420861 - DNA, 30 bp, Artificial Sequence
  Synthetic oligonucleotide
ctcggggtcagtattgcttagacgatttga

SEQ ID NO: 420862 - DNA, 31 bp, Artificial Sequence
  Synthetic oligonucleotide
atgatgtacatagtctttagtgaggatttga

SEQ ID NO: 420863 - DNA, 30 bp, Artificial Sequence
  Synthetic oligonucleotide
tggcgattaaaccggggacgctggatttga

SEQ ID NO: 420864 - DNA, 30 bp, Artificial Sequence
  Synthetic oligonucleotide
ggaatcaataaaaaattcaaccatatttga

SEQ ID NO: 420865 - DNA, 30 bp, Artificial Sequence
  Synthetic oligonucleotide
tctcggagcagccactctcaatctatttga

SEQ ID NO: 420866 - DNA, 30 bp, Artificial Sequence
  Synthetic oligonucleotide
ctggatttccgctcgctccttagtatttga

SEQ ID NO: 420867 - DNA, 30 bp, Artificial Sequence
  Synthetic oligonucleotide
agtcgaagcggcaggtttagctgtatttga

SEQ ID NO: 420868 - DNA, 30 bp, Artificial Sequence
  Synthetic oligonucleotide
ctgatctaaggtagctccttcgttatttga

SEQ ID NO: 420869 - DNA, 30 bp, Artificial Sequence
  Synthetic oligonucleotide
gctaaacggtgtactcgacgagaactttga

SEQ ID NO: 420870 - DNA, 30 bp, Artificial Sequence
  Synthetic oligonucleotide
agtatcctggatacaggaaatacactttga

SEQ ID NO: 420871 - DNA, 30 bp, Artificial Sequence
  Synthetic oligonucleotide
tgttatgtgcacagctttcctccactttga

SEQ ID NO: 420872 - DNA, 30 bp, Artificial Sequence
  Synthetic oligonucleotide
ctctaggatccagagggtaaggacctttga

SEQ ID NO: 420873 - DNA, 30 bp, Artificial Sequence
  Synthetic oligonucleotide
ggcacacggcgcatgtcatcaggcctttga

SEQ ID NO: 420874 - DNA, 30 bp, Artificial Sequence
  Synthetic oligonucleotide
aacagttcagaattacatgggctgctttga

SEQ ID NO: 420875 - DNA, 30 bp, Artificial Sequence
  Synthetic oligonucleotide
tattttgttttaccccgcagtctgctttga

SEQ ID NO: 420876 - DNA, 30 bp, Artificial Sequence
  Synthetic oligonucleotide
caagaaggatggttttattctattctttga

SEQ ID NO: 420877 - DNA, 30 bp, Artificial Sequence
  Synthetic oligonucleotide
gcataataattgccaaaccgcaaagtttga

SEQ ID NO: 420878 - DNA, 30 bp, Artificial Sequence
  Synthetic oligonucleotide
atgtggtagaccatggcagaataagtttga

SEQ ID NO: 420879 - DNA, 30 bp, Artificial Sequence
  Synthetic oligonucleotide
ggtggaaagcgcatgcatgggagcgtttga

SEQ ID NO: 420880 - DNA, 30 bp, Artificial Sequence
  Synthetic oligonucleotide
gtataacgaagatcagggaatttcgtttga

SEQ ID NO: 420881 - DNA, 30 bp, Artificial Sequence
  Synthetic oligonucleotide
tttacgtggcattggaacagaacggtttga

SEQ ID NO: 420882 - DNA, 30 bp, Artificial Sequence
  Synthetic oligonucleotide
gccacgcgcgcagtgggcactccggtttga

SEQ ID NO: 420883 - DNA, 30 bp, Artificial Sequence
  Synthetic oligonucleotide
cactaacataagagaaagaatagggtttga

SEQ ID NO: 420884 - DNA, 30 bp, Artificial Sequence
  Synthetic oligonucleotide
ccattggtcgccgtgtggcaaggggtttga

SEQ ID NO: 420885 - DNA, 30 bp, Artificial Sequence
  Synthetic oligonucleotide
aacctgtacacggttaggtagggggtttga

SEQ ID NO: 420886 - DNA, 30 bp, Artificial Sequence
  Synthetic oligonucleotide
gcttgggatattatatgagaacgtgtttga

SEQ ID NO: 420887 - DNA, 30 bp, Artificial Sequence
  Synthetic oligonucleotide
catggagcgtggtgcaatatcattgtttga

SEQ ID NO: 420888 - DNA, 30 bp, Artificial Sequence
  Synthetic oligonucleotide
attaaactagtcaactaagcccttgtttga

SEQ ID NO: 420889 - DNA, 30 bp, Artificial Sequence
  Synthetic oligonucleotide
taacggtcaactatacgtgctcttgtttga

SEQ ID NO: 420890 - DNA, 30 bp, Artificial Sequence
  Synthetic oligonucleotide
gactctactttgtgtgaatcttttgtttga

SEQ ID NO: 420891 - DNA, 30 bp, Artificial Sequence
  Synthetic oligonucleotide
cacccgcgtacgcataacgctgaattttga

SEQ ID NO: 420892 - DNA, 30 bp, Artificial Sequence
  Synthetic oligonucleotide
aactactgctgtgtctaaacgacattttga

SEQ ID NO: 420893 - DNA, 30 bp, Artificial Sequence
  Synthetic oligonucleotide
cagtctgtgaagtagccgatttcattttga

SEQ ID NO: 420894 - DNA, 30 bp, Artificial Sequence
  Synthetic oligonucleotide
ctcctagctgcaggagctctgagattttga

SEQ ID NO: 420895 - DNA, 30 bp, Artificial Sequence
  Synthetic oligonucleotide
atggtaattccctgtccccaagtattttga

SEQ ID NO: 420896 - DNA, 30 bp, Artificial Sequence
  Synthetic oligonucleotide
ccaagggcgttctggagaaccgccttttga

SEQ ID NO: 420897 - DNA, 30 bp, Artificial Sequence
  Synthetic oligonucleotide
aaaaccccagtgctgaagacccgcttttga

SEQ ID NO: 420898 - DNA, 30 bp, Artificial Sequence
  Synthetic oligonucleotide
ggttgctagggtgactacctgaggttttga

SEQ ID NO: 420899 - DNA, 30 bp, Artificial Sequence
  Synthetic oligonucleotide
ggcaataccagatcgtttaggcggttttga

SEQ ID NO: 420900 - DNA, 30 bp, Artificial Sequence
  Synthetic oligonucleotide
tgttctaagcaggcagttgttcatttttga

SEQ ID NO: 420901 - DNA, 30 bp, Artificial Sequence
  Synthetic oligonucleotide
cgggtcctaaccgctggtagagatttttga

SEQ ID NO: 420902 - DNA, 30 bp, Artificial Sequence
  Synthetic oligonucleotide
ggccgtcaggtcataagtgtgtatttttga

SEQ ID NO: 420903 - DNA, 30 bp, Artificial Sequence
  Synthetic oligonucleotide
ggtgagtgtcgaaagtagtctcgtttttga

SEQ ID NO: 420904 - DNA, 30 bp, Artificial Sequence
  Synthetic oligonucleotide
ctcgcaatgtggcctcttccatttttttga

SEQ ID NO: 420905 - DNA, 30 bp, Artificial Sequence
  Synthetic oligonucleotide
tagaacttccataaggaaatcaaaaaaata

SEQ ID NO: 420906 - DNA, 30 bp, Artificial Sequence
  Synthetic oligonucleotide
tggttgatataatatgtaaacgaaaaaata

SEQ ID NO: 420907 - DNA, 30 bp, Artificial Sequence
  Synthetic oligonucleotide
gagaaacacggttaccgttggtaaaaaata

SEQ ID NO: 420908 - DNA, 30 bp, Artificial Sequence
  Synthetic oligonucleotide
cgcagggtgaaaaatcccagttaaaaaata

SEQ ID NO: 420909 - DNA, 30 bp, Artificial Sequence
  Synthetic oligonucleotide
cattgtggggtcaggtgctcaagaaaaata

SEQ ID NO: 420910 - DNA, 30 bp, Artificial Sequence
  Synthetic oligonucleotide
ttacaattagaagcagcgtggggaaaaata

SEQ ID NO: 420911 - DNA, 30 bp, Artificial Sequence
  Synthetic oligonucleotide
catgctcgcacagattacttgagcaaaata

SEQ ID NO: 420912 - DNA, 30 bp, Artificial Sequence
  Synthetic oligonucleotide
tgcctcgggttagtagaagttctcaaaata

SEQ ID NO: 420913 - DNA, 29 bp, Artificial Sequence
  Synthetic oligonucleotide
ccctgcaatgggtcaggtattataaaata

SEQ ID NO: 420914 - DNA, 30 bp, Artificial Sequence
  Synthetic oligonucleotide
gccttcttttatagccaatcgcctaaaata

SEQ ID NO: 420915 - DNA, 30 bp, Artificial Sequence
  Synthetic oligonucleotide
ttcggtcacgtatagagtgtcagtaaaata

SEQ ID NO: 420916 - DNA, 30 bp, Artificial Sequence
  Synthetic oligonucleotide
gcacgcttttactctgaaagctgtaaaata

SEQ ID NO: 420917 - DNA, 30 bp, Artificial Sequence
  Synthetic oligonucleotide
agccatgtactttcgggtgcatttaaaata

SEQ ID NO: 420918 - DNA, 30 bp, Artificial Sequence
  Synthetic oligonucleotide
gtcattagtggaaggactcgttttaaaata

SEQ ID NO: 420919 - DNA, 30 bp, Artificial Sequence
  Synthetic oligonucleotide
ccaacctcctgtgttgcgttgcaacaaata

SEQ ID NO: 420920 - DNA, 30 bp, Artificial Sequence
  Synthetic oligonucleotide
tcttaacataacatggatacgtaacaaata

SEQ ID NO: 420921 - DNA, 30 bp, Artificial Sequence
  Synthetic oligonucleotide
atatgaggtctaatcgttgcataccaaata

SEQ ID NO: 420922 - DNA, 30 bp, Artificial Sequence
  Synthetic oligonucleotide
ttcgcttggaacggctacggtgagcaaata

SEQ ID NO: 420923 - DNA, 30 bp, Artificial Sequence
  Synthetic oligonucleotide
ttcaactcaggtgccatctccccgcaaata

SEQ ID NO: 420924 - DNA, 30 bp, Artificial Sequence
  Synthetic oligonucleotide
gatgtactctgagtcgattaagaagaaata

SEQ ID NO: 420925 - DNA, 30 bp, Artificial Sequence
  Synthetic oligonucleotide
tcatcgatttttaaggcacctgcagaaata

SEQ ID NO: 420926 - DNA, 30 bp, Artificial Sequence
  Synthetic oligonucleotide
ttatgttggtgggacctcgagaacgaaata

SEQ ID NO: 420927 - DNA, 30 bp, Artificial Sequence
  Synthetic oligonucleotide
ggcctagaatatgacagggaccccgaaata

SEQ ID NO: 420928 - DNA, 30 bp, Artificial Sequence
  Synthetic oligonucleotide
catgtaagcgttgttactacgagcgaaata

SEQ ID NO: 420929 - DNA, 30 bp, Artificial Sequence
  Synthetic oligonucleotide
tccgccacgggccatcttcggatcgaaata

SEQ ID NO: 420930 - DNA, 30 bp, Artificial Sequence
  Synthetic oligonucleotide
ttaacgggctaaagacgatcaaatgaaata

SEQ ID NO: 420931 - DNA, 30 bp, Artificial Sequence
  Synthetic oligonucleotide
gacatccgtagggggcgagagtaataaata

SEQ ID NO: 420932 - DNA, 30 bp, Artificial Sequence
  Synthetic oligonucleotide
gccgcggaggatggaaacccccgataaata

SEQ ID NO: 420933 - DNA, 30 bp, Artificial Sequence
  Synthetic oligonucleotide
acatttccccggaactgcgaaggataaata

SEQ ID NO: 420934 - DNA, 30 bp, Artificial Sequence
  Synthetic oligonucleotide
ggcagcgattcgcgagagcatttataaata

SEQ ID NO: 420935 - DNA, 30 bp, Artificial Sequence
  Synthetic oligonucleotide
tcgggtcttcagataatttgatactaaata

SEQ ID NO: 420936 - DNA, 30 bp, Artificial Sequence
  Synthetic oligonucleotide
cagtcaccactggacaatactacctaaata

SEQ ID NO: 420937 - DNA, 30 bp, Artificial Sequence
  Synthetic oligonucleotide
gtgctcgtttggttgacgtccatctaaata

SEQ ID NO: 420938 - DNA, 30 bp, Artificial Sequence
  Synthetic oligonucleotide
taccggccgctttgcgaaaaatagtaaata

SEQ ID NO: 420939 - DNA, 30 bp, Artificial Sequence
  Synthetic oligonucleotide
gtacgccgagctgtggtaatcccgtaaata

SEQ ID NO: 420940 - DNA, 30 bp, Artificial Sequence
  Synthetic oligonucleotide
aaacgggaaacctggcaacgcaggtaaata

SEQ ID NO: 420941 - DNA, 30 bp, Artificial Sequence
  Synthetic oligonucleotide
acagaatctgtggcttggcattggtaaata

SEQ ID NO: 420942 - DNA, 30 bp, Artificial Sequence
  Synthetic oligonucleotide
taatagatttggcaaggagggcattaaata

SEQ ID NO: 420943 - DNA, 30 bp, Artificial Sequence
  Synthetic oligonucleotide
cagggcgtgtggtacgtctgggcttaaata

SEQ ID NO: 420944 - DNA, 30 bp, Artificial Sequence
  Synthetic oligonucleotide
cttataaaatctgtaaagagattttaaata

SEQ ID NO: 420945 - DNA, 30 bp, Artificial Sequence
  Synthetic oligonucleotide
gtatctcgggtttccgagaaggcaacaata

SEQ ID NO: 420946 - DNA, 30 bp, Artificial Sequence
  Synthetic oligonucleotide
ggtctgaagaaaggcggacaggcaacaata

SEQ ID NO: 420947 - DNA, 30 bp, Artificial Sequence
  Synthetic oligonucleotide
gggaaacgcttagtacccgggggaacaata

SEQ ID NO: 420948 - DNA, 30 bp, Artificial Sequence
  Synthetic oligonucleotide
tactcagcattgagtcctttgggaacaata

SEQ ID NO: 420949 - DNA, 30 bp, Artificial Sequence
  Synthetic oligonucleotide
atgacccggtaattcagtgggtccacaata

SEQ ID NO: 420950 - DNA, 30 bp, Artificial Sequence
  Synthetic oligonucleotide
gtttctatagttgaactaattatcacaata

SEQ ID NO: 420951 - DNA, 30 bp, Artificial Sequence
  Synthetic oligonucleotide
cttctggatgtcccaagcatgtttacaata

SEQ ID NO: 420952 - DNA, 30 bp, Artificial Sequence
  Synthetic oligonucleotide
gttttacagtagaccgaggagcgaccaata

SEQ ID NO: 420953 - DNA, 30 bp, Artificial Sequence
  Synthetic oligonucleotide
aatggttttcgtgagcggatcaacccaata

SEQ ID NO: 420954 - DNA, 30 bp, Artificial Sequence
  Synthetic oligonucleotide
atagtgtacgagcgtattaggcccccaata

SEQ ID NO: 420955 - DNA, 30 bp, Artificial Sequence
  Synthetic oligonucleotide
gcttaaggttaccgtgctgaaacgccaata

SEQ ID NO: 420956 - DNA, 30 bp, Artificial Sequence
  Synthetic oligonucleotide
tatccatggatacggcatacttggccaata

SEQ ID NO: 420957 - DNA, 30 bp, Artificial Sequence
  Synthetic oligonucleotide
ctattttacgtgaacacgaggactccaata

SEQ ID NO: 420958 - DNA, 30 bp, Artificial Sequence
  Synthetic oligonucleotide
ggtgcctggcagccctttggccaagcaata

SEQ ID NO: 420959 - DNA, 31 bp, Artificial Sequence
  Synthetic oligonucleotide
tcaattcgcgcgctaatgggggtacgcaata

SEQ ID NO: 420960 - DNA, 30 bp, Artificial Sequence
  Synthetic oligonucleotide
gaacgtacggcatgcttgccgtccgcaata

SEQ ID NO: 420961 - DNA, 30 bp, Artificial Sequence
  Synthetic oligonucleotide
atggcgcgaccatccgagagatgggcaata

SEQ ID NO: 420962 - DNA, 30 bp, Artificial Sequence
  Synthetic oligonucleotide
cctaccctgccaggggtggacgatgcaata

SEQ ID NO: 420963 - DNA, 30 bp, Artificial Sequence
  Synthetic oligonucleotide
ctgcttgtaatcgatgaatgtcgtgcaata

SEQ ID NO: 420964 - DNA, 30 bp, Artificial Sequence
  Synthetic oligonucleotide
ttagtgattgtttcatcaatttgtgcaata

SEQ ID NO: 420965 - DNA, 30 bp, Artificial Sequence
  Synthetic oligonucleotide
ggccccgaccacagtgtcggccttgcaata

SEQ ID NO: 420966 - DNA, 30 bp, Artificial Sequence
  Synthetic oligonucleotide
gttataatccccccaaggttggttgcaata

SEQ ID NO: 420967 - DNA, 30 bp, Artificial Sequence
  Synthetic oligonucleotide
agtctaacatgatgcgcgtaaacatcaata

SEQ ID NO: 420968 - DNA, 30 bp, Artificial Sequence
  Synthetic oligonucleotide
tatggaatccgtactgtggtcatatcaata

SEQ ID NO: 420969 - DNA, 30 bp, Artificial Sequence
  Synthetic oligonucleotide
attaggcctaaagcgtcccgatactcaata

SEQ ID NO: 420970 - DNA, 30 bp, Artificial Sequence
  Synthetic oligonucleotide
attgaaggtagtttcttacaggcctcaata

SEQ ID NO: 420971 - DNA, 30 bp, Artificial Sequence
  Synthetic oligonucleotide
aagagtctaggagcgcgcgctagctcaata

SEQ ID NO: 420972 - DNA, 30 bp, Artificial Sequence
  Synthetic oligonucleotide
cgcaagtgaaaaagagcagatggctcaata

SEQ ID NO: 420973 - DNA, 30 bp, Artificial Sequence
  Synthetic oligonucleotide
cccttgggcgatattactcgacagtcaata

SEQ ID NO: 420974 - DNA, 30 bp, Artificial Sequence
  Synthetic oligonucleotide
gcttcacgtctgcgttgtaggcagtcaata

SEQ ID NO: 420975 - DNA, 30 bp, Artificial Sequence
  Synthetic oligonucleotide
gaggtctatattgtacgtcagatgtcaata

SEQ ID NO: 420976 - DNA, 30 bp, Artificial Sequence
  Synthetic oligonucleotide
ttatcaatttctatcttgcatcattcaata

SEQ ID NO: 420977 - DNA, 30 bp, Artificial Sequence
  Synthetic oligonucleotide
acccgcctcaaatattaggaatattcaata

SEQ ID NO: 420978 - DNA, 30 bp, Artificial Sequence
  Synthetic oligonucleotide
tggtattttccggacgggtagcgttcaata

SEQ ID NO: 420979 - DNA, 30 bp, Artificial Sequence
  Synthetic oligonucleotide
cgcttgaatatatgtataataggttcaata

SEQ ID NO: 420980 - DNA, 30 bp, Artificial Sequence
  Synthetic oligonucleotide
ttactcggcaaatacaccggtttttcaata

SEQ ID NO: 420981 - DNA, 30 bp, Artificial Sequence
  Synthetic oligonucleotide
ctcatgaggtattgcggattaaaaagaata

SEQ ID NO: 420982 - DNA, 30 bp, Artificial Sequence
  Synthetic oligonucleotide
ttgatctaaggatctctaagagtaagaata

SEQ ID NO: 420983 - DNA, 30 bp, Artificial Sequence
  Synthetic oligonucleotide
caatacagctagcccttcggtgtaagaata

SEQ ID NO: 420984 - DNA, 30 bp, Artificial Sequence
  Synthetic oligonucleotide
gtactgagccatataaggctctacagaata

SEQ ID NO: 420985 - DNA, 30 bp, Artificial Sequence
  Synthetic oligonucleotide
ggactcggcaataggaaccgttcgagaata

SEQ ID NO: 420986 - DNA, 30 bp, Artificial Sequence
  Synthetic oligonucleotide
gttgccgtctccttgcaatgtaggagaata

SEQ ID NO: 420987 - DNA, 30 bp, Artificial Sequence
  Synthetic oligonucleotide
ttggcggagcgctgtacatttgggagaata

SEQ ID NO: 420988 - DNA, 30 bp, Artificial Sequence
  Synthetic oligonucleotide
actatcaatcaatgcacctagtggagaata

SEQ ID NO: 420989 - DNA, 30 bp, Artificial Sequence
  Synthetic oligonucleotide
ttgagacacgacgatattgattggagaata

SEQ ID NO: 420990 - DNA, 30 bp, Artificial Sequence
  Synthetic oligonucleotide
tcgaatagtaatgtttctggagttagaata

SEQ ID NO: 420991 - DNA, 30 bp, Artificial Sequence
  Synthetic oligonucleotide
cctaccgctacatgtgatggcaaacgaata

SEQ ID NO: 420992 - DNA, 30 bp, Artificial Sequence
  Synthetic oligonucleotide
aaatctactacggattgcttttaacgaata

SEQ ID NO: 420993 - DNA, 30 bp, Artificial Sequence
  Synthetic oligonucleotide
ccctggtgttgccgcgttagcgtccgaata

SEQ ID NO: 420994 - DNA, 30 bp, Artificial Sequence
  Synthetic oligonucleotide
gcatacatactcgtagctccctagcgaata

SEQ ID NO: 420995 - DNA, 30 bp, Artificial Sequence
  Synthetic oligonucleotide
gatcgctacaaacggcgttgcgcaggaata

SEQ ID NO: 420996 - DNA, 30 bp, Artificial Sequence
  Synthetic oligonucleotide
gcatccgtacaatacgtatcatcaggaata

SEQ ID NO: 420997 - DNA, 30 bp, Artificial Sequence
  Synthetic oligonucleotide
aattatgtaattgcctgcagtgtaggaata

SEQ ID NO: 420998 - DNA, 30 bp, Artificial Sequence
  Synthetic oligonucleotide
cctcctatatctcactgaggacgcggaata

SEQ ID NO: 420999 - DNA, 30 bp, Artificial Sequence
  Synthetic oligonucleotide
gattcccagttaacgctgccctgcggaata

SEQ ID NO: 421000 - DNA, 30 bp, Artificial Sequence
  Synthetic oligonucleotide
atctctaatggcttttgcggtacgggaata

SEQ ID NO: 421001 - DNA, 30 bp, Artificial Sequence
  Synthetic oligonucleotide
aacaaggctattttttcaataccgggaata

SEQ ID NO: 421002 - DNA, 30 bp, Artificial Sequence
  Synthetic oligonucleotide
aagtaatcgaatacaagcgctccgggaata

SEQ ID NO: 421003 - DNA, 30 bp, Artificial Sequence
  Synthetic oligonucleotide
ttttgcagttttatagcaaggaggggaata

SEQ ID NO: 421004 - DNA, 30 bp, Artificial Sequence
  Synthetic oligonucleotide
aaaagtaaggatgcgatacaaaatggaata

SEQ ID NO: 421005 - DNA, 30 bp, Artificial Sequence
  Synthetic oligonucleotide
tgacgactttcttggtgttgggctggaata

SEQ ID NO: 421006 - DNA, 30 bp, Artificial Sequence
  Synthetic oligonucleotide
attacatcttgccaagtacggagatgaata

SEQ ID NO: 421007 - DNA, 30 bp, Artificial Sequence
  Synthetic oligonucleotide
acaagattctggatggtcggagtatgaata

SEQ ID NO: 421008 - DNA, 30 bp, Artificial Sequence
  Synthetic oligonucleotide
aaatataggtctatactaatcagctgaata

SEQ ID NO: 421009 - DNA, 30 bp, Artificial Sequence
  Synthetic oligonucleotide
ggttcgcatacgcggcctaacgcgtgaata

SEQ ID NO: 421010 - DNA, 30 bp, Artificial Sequence
  Synthetic oligonucleotide
cacctcgttcatcctacgaggtcgtgaata

SEQ ID NO: 421011 - DNA, 30 bp, Artificial Sequence
  Synthetic oligonucleotide
gaacaacgaaagaagggcgaacggtgaata

SEQ ID NO: 421012 - DNA, 30 bp, Artificial Sequence
  Synthetic oligonucleotide
ccgccgttgtcgttcccagccgggtgaata

SEQ ID NO: 421013 - DNA, 30 bp, Artificial Sequence
  Synthetic oligonucleotide
gaatgggctgtgtaacgggggcattgaata

SEQ ID NO: 421014 - DNA, 30 bp, Artificial Sequence
  Synthetic oligonucleotide
gcaaattggtatgttatcattcgttgaata

SEQ ID NO: 421015 - DNA, 30 bp, Artificial Sequence
  Synthetic oligonucleotide
agaattctggtcagtgatgagatttgaata

SEQ ID NO: 421016 - DNA, 30 bp, Artificial Sequence
  Synthetic oligonucleotide
cgtgtgttcatagtcttcttgtcaataata

SEQ ID NO: 421017 - DNA, 30 bp, Artificial Sequence
  Synthetic oligonucleotide
catcctcgagtggcacccagcggaataata

SEQ ID NO: 421018 - DNA, 30 bp, Artificial Sequence
  Synthetic oligonucleotide
ctccaaaagcaaacggagtgaataataata

SEQ ID NO: 421019 - DNA, 30 bp, Artificial Sequence
  Synthetic oligonucleotide
gattaaatatctttgctaaacataataata

SEQ ID NO: 421020 - DNA, 30 bp, Artificial Sequence
  Synthetic oligonucleotide
ctgtggtggcgagccgcatcggccataata

SEQ ID NO: 421021 - DNA, 30 bp, Artificial Sequence
  Synthetic oligonucleotide
ttaacagtggggtgaacatgggccataata

SEQ ID NO: 421022 - DNA, 30 bp, Artificial Sequence
  Synthetic oligonucleotide
ggcatcaagcgctactaagtacgcataata

SEQ ID NO: 421023 - DNA, 30 bp, Artificial Sequence
  Synthetic oligonucleotide
ggagtaatatccgttctgcgctggataata

SEQ ID NO: 421024 - DNA, 30 bp, Artificial Sequence
  Synthetic oligonucleotide
tgtaattcaagccatactccttggataata

SEQ ID NO: 421025 - DNA, 30 bp, Artificial Sequence
  Synthetic oligonucleotide
caattcacgcctaccacctaaaatataata

SEQ ID NO: 421026 - DNA, 30 bp, Artificial Sequence
  Synthetic oligonucleotide
gactggtcggttatttcttcacatataata

SEQ ID NO: 421027 - DNA, 30 bp, Artificial Sequence
  Synthetic oligonucleotide
gtggctagaacattaagcctaagtataata

SEQ ID NO: 421028 - DNA, 30 bp, Artificial Sequence
  Synthetic oligonucleotide
ggacctgttgggatatgtaatggtataata

SEQ ID NO: 421029 - DNA, 30 bp, Artificial Sequence
  Synthetic oligonucleotide
ataaacctggaggtaaggcaaacactaata

SEQ ID NO: 421030 - DNA, 30 bp, Artificial Sequence
  Synthetic oligonucleotide
tgcacatgtacgtgtatgcttacactaata

SEQ ID NO: 421031 - DNA, 30 bp, Artificial Sequence
  Synthetic oligonucleotide
gtggtgaacgtagtgcttacagcactaata

SEQ ID NO: 421032 - DNA, 30 bp, Artificial Sequence
  Synthetic oligonucleotide
ctagtcaccaatattccgggaatcctaata

SEQ ID NO: 421033 - DNA, 29 bp, Artificial Sequence
  Synthetic oligonucleotide
gaaaggcataataacaaacattcctaata

SEQ ID NO: 421034 - DNA, 30 bp, Artificial Sequence
  Synthetic oligonucleotide
cgtttagtttgtattgcctgaccgctaata

SEQ ID NO: 421035 - DNA, 30 bp, Artificial Sequence
  Synthetic oligonucleotide
ggctgttgtggaagcaatcaaaatctaata

SEQ ID NO: 421036 - DNA, 30 bp, Artificial Sequence
  Synthetic oligonucleotide
ttaatccggcaggataatcacgatctaata

SEQ ID NO: 421037 - DNA, 30 bp, Artificial Sequence
  Synthetic oligonucleotide
ccaaatatacagccgtgcatggatctaata

SEQ ID NO: 421038 - DNA, 30 bp, Artificial Sequence
  Synthetic oligonucleotide
ggatgcaatattaggtaggaaattctaata

SEQ ID NO: 421039 - DNA, 30 bp, Artificial Sequence
  Synthetic oligonucleotide
ctcctagatcatgatggacgggttctaata

SEQ ID NO: 421040 - DNA, 30 bp, Artificial Sequence
  Synthetic oligonucleotide
ttgagcgcgttttcccggtaggcagtaata

SEQ ID NO: 421041 - DNA, 30 bp, Artificial Sequence
  Synthetic oligonucleotide
aacgatttatatcaatattgggacgtaata

SEQ ID NO: 421042 - DNA, 30 bp, Artificial Sequence
  Synthetic oligonucleotide
tacgagcatggtgcgagacgcggcgtaata

SEQ ID NO: 421043 - DNA, 30 bp, Artificial Sequence
  Synthetic oligonucleotide
tttggaatctgcagctcgtagttcgtaata

SEQ ID NO: 421044 - DNA, 30 bp, Artificial Sequence
  Synthetic oligonucleotide
tagtcaggattgtacctaacccaggtaata

SEQ ID NO: 421045 - DNA, 30 bp, Artificial Sequence
  Synthetic oligonucleotide
acgcacatgtctacgacagtcacggtaata

SEQ ID NO: 421046 - DNA, 30 bp, Artificial Sequence
  Synthetic oligonucleotide
atatcttatctcagccgcaatccggtaata

SEQ ID NO: 421047 - DNA, 30 bp, Artificial Sequence
  Synthetic oligonucleotide
ccgatttaggatgatccggattcggtaata

SEQ ID NO: 421048 - DNA, 30 bp, Artificial Sequence
  Synthetic oligonucleotide
gcggcaatacggaaatagatacgggtaata

SEQ ID NO: 421049 - DNA, 30 bp, Artificial Sequence
  Synthetic oligonucleotide
tagtagttctcaccagttggcttggtaata

SEQ ID NO: 421050 - DNA, 30 bp, Artificial Sequence
  Synthetic oligonucleotide
ggcaagcttcgcgcgttattccatgtaata

SEQ ID NO: 421051 - DNA, 30 bp, Artificial Sequence
  Synthetic oligonucleotide
gtcatattcatgggtattggtgatgtaata

SEQ ID NO: 421052 - DNA, 30 bp, Artificial Sequence
  Synthetic oligonucleotide
gtgtgttcgatgaccttgtattatgtaata

SEQ ID NO: 421053 - DNA, 30 bp, Artificial Sequence
  Synthetic oligonucleotide
tacccgacatgcgtcggtcccgttgtaata

SEQ ID NO: 421054 - DNA, 30 bp, Artificial Sequence
  Synthetic oligonucleotide
agtttacggactgggaagacgcacttaata

SEQ ID NO: 421055 - DNA, 30 bp, Artificial Sequence
  Synthetic oligonucleotide
gcggggtcgaactgattggtggccttaata

SEQ ID NO: 421056 - DNA, 30 bp, Artificial Sequence
  Synthetic oligonucleotide
gcgggcaatgaagctctcgcgccgttaata

SEQ ID NO: 421057 - DNA, 30 bp, Artificial Sequence
  Synthetic oligonucleotide
agccgattaacggatctaacttggttaata

SEQ ID NO: 421058 - DNA, 30 bp, Artificial Sequence
  Synthetic oligonucleotide
tagtctcgtcggagatatgtaatgttaata

SEQ ID NO: 421059 - DNA, 30 bp, Artificial Sequence
  Synthetic oligonucleotide
ttgattggctaacaagtggtaactttaata

SEQ ID NO: 421060 - DNA, 30 bp, Artificial Sequence
  Synthetic oligonucleotide
gtaccgatctcttacgtggctgctttaata

SEQ ID NO: 421061 - DNA, 30 bp, Artificial Sequence
  Synthetic oligonucleotide
gctggtcaggcccagacgtacagtttaata

SEQ ID NO: 421062 - DNA, 30 bp, Artificial Sequence
  Synthetic oligonucleotide
ttcgttacatgtaatggactttgtttaata

SEQ ID NO: 421063 - DNA, 30 bp, Artificial Sequence
  Synthetic oligonucleotide
gtagttatactcttgttactcgttttaata

SEQ ID NO: 421064 - DNA, 30 bp, Artificial Sequence
  Synthetic oligonucleotide
gtcccataccggggatatgtgaacaacata

SEQ ID NO: 421065 - DNA, 30 bp, Artificial Sequence
  Synthetic oligonucleotide
acaaattttgcaccatactgtcacaacata

SEQ ID NO: 421066 - DNA, 30 bp, Artificial Sequence
  Synthetic oligonucleotide
aaagtctggccgttgcccagtaccaacata

SEQ ID NO: 421067 - DNA, 30 bp, Artificial Sequence
  Synthetic oligonucleotide
acgtagataatcatatgatgacataacata

SEQ ID NO: 421068 - DNA, 30 bp, Artificial Sequence
  Synthetic oligonucleotide
gctccgaatgttggtctctccgttaacata

SEQ ID NO: 421069 - DNA, 30 bp, Artificial Sequence
  Synthetic oligonucleotide
cagcgttggggacgttcacggcaacacata

SEQ ID NO: 421070 - DNA, 30 bp, Artificial Sequence
  Synthetic oligonucleotide
gtttccatccatccgaatctggcacacata

SEQ ID NO: 421071 - DNA, 30 bp, Artificial Sequence
  Synthetic oligonucleotide
cctacgaatattttaggttatggacacata

SEQ ID NO: 421072 - DNA, 30 bp, Artificial Sequence
  Synthetic oligonucleotide
gtcctcaaagtccacattctggtacacata

SEQ ID NO: 421073 - DNA, 30 bp, Artificial Sequence
  Synthetic oligonucleotide
agccctcaccgacaattcacaagccacata

SEQ ID NO: 421074 - DNA, 30 bp, Artificial Sequence
  Synthetic oligonucleotide
gcgctgtcgatttagggctctcgccacata

SEQ ID NO: 421075 - DNA, 30 bp, Artificial Sequence
  Synthetic oligonucleotide
ttgtcgtgaatcaggaacacgctccacata

SEQ ID NO: 421076 - DNA, 30 bp, Artificial Sequence
  Synthetic oligonucleotide
aggtgttaggtatggcagccacagcacata

SEQ ID NO: 421077 - DNA, 30 bp, Artificial Sequence
  Synthetic oligonucleotide
tttaagtcttgtaactagattgagcacata

SEQ ID NO: 421078 - DNA, 30 bp, Artificial Sequence
  Synthetic oligonucleotide
ctaattacacgtaccgcttcgtcgcacata

SEQ ID NO: 421079 - DNA, 30 bp, Artificial Sequence
  Synthetic oligonucleotide
gtaaataatgttactggtctggatcacata

SEQ ID NO: 421080 - DNA, 30 bp, Artificial Sequence
  Synthetic oligonucleotide
gtttccgtcctactaattacccctcacata

SEQ ID NO: 421081 - DNA, 30 bp, Artificial Sequence
  Synthetic oligonucleotide
gatctgcattcaaagtaacatagtcacata

SEQ ID NO: 421082 - DNA, 30 bp, Artificial Sequence
  Synthetic oligonucleotide
caggtctaccgctggattacgcgtcacata

SEQ ID NO: 421083 - DNA, 30 bp, Artificial Sequence
  Synthetic oligonucleotide
atagatgaggggcctataggaattcacata

SEQ ID NO: 421084 - DNA, 30 bp, Artificial Sequence
  Synthetic oligonucleotide
tccgatgtcagtgaggagaaagttcacata

SEQ ID NO: 421085 - DNA, 30 bp, Artificial Sequence
  Synthetic oligonucleotide
atgtgggtttttaatgacgggggagacata

SEQ ID NO: 421086 - DNA, 30 bp, Artificial Sequence
  Synthetic oligonucleotide
atctaggacctaggtcgagcgtgagacata

SEQ ID NO: 421087 - DNA, 30 bp, Artificial Sequence
  Synthetic oligonucleotide
ctttactataacttctcgcatttagacata

SEQ ID NO: 421088 - DNA, 30 bp, Artificial Sequence
  Synthetic oligonucleotide
gttggttgatgcgtaacagtaaccgacata

SEQ ID NO: 421089 - DNA, 30 bp, Artificial Sequence
  Synthetic oligonucleotide
aaggtgagacacagctcgtctaccgacata

SEQ ID NO: 421090 - DNA, 30 bp, Artificial Sequence
  Synthetic oligonucleotide
cgtggcttacccaaatactgggcggacata

SEQ ID NO: 421091 - DNA, 30 bp, Artificial Sequence
  Synthetic oligonucleotide
gcggaatttaccgctgatacgcgggacata

SEQ ID NO: 421092 - DNA, 30 bp, Artificial Sequence
  Synthetic oligonucleotide
cccggaaattgatgagggtcgtctgacata

SEQ ID NO: 421093 - DNA, 31 bp, Artificial Sequence
  Synthetic oligonucleotide
ctgcattaaaggcaacgcactgaactacata

SEQ ID NO: 421094 - DNA, 30 bp, Artificial Sequence
  Synthetic oligonucleotide
gtcatcgtgtgctttcagaaggactacata

SEQ ID NO: 421095 - DNA, 30 bp, Artificial Sequence
  Synthetic oligonucleotide
cgtgctaggaaaaatattttggcctacata

SEQ ID NO: 421096 - DNA, 30 bp, Artificial Sequence
  Synthetic oligonucleotide
caggccaattgttctgcttcctcgtacata

SEQ ID NO: 421097 - DNA, 30 bp, Artificial Sequence
  Synthetic oligonucleotide
gggtgcgatagctatttcacttcgtacata

SEQ ID NO: 421098 - DNA, 30 bp, Artificial Sequence
  Synthetic oligonucleotide
atataaatatagatatacacttggtacata

SEQ ID NO: 421099 - DNA, 30 bp, Artificial Sequence
  Synthetic oligonucleotide
agagatatccacttcagcttcggttacata

SEQ ID NO: 421100 - DNA, 30 bp, Artificial Sequence
  Synthetic oligonucleotide
gaccttaatcggcatgatcggttcaccata

SEQ ID NO: 421101 - DNA, 30 bp, Artificial Sequence
  Synthetic oligonucleotide
caaagcaatggagacgctccagagaccata

SEQ ID NO: 421102 - DNA, 30 bp, Artificial Sequence
  Synthetic oligonucleotide
tattaatcacgcccacatcttttgaccata

SEQ ID NO: 421103 - DNA, 30 bp, Artificial Sequence
  Synthetic oligonucleotide
caactaccccatatccagagtattaccata

SEQ ID NO: 421104 - DNA, 30 bp, Artificial Sequence
  Synthetic oligonucleotide
ctatcttttccaaaccctgacgttaccata

SEQ ID NO: 421105 - DNA, 30 bp, Artificial Sequence
  Synthetic oligonucleotide
tttaaggatattcctccggcggcacccata

SEQ ID NO: 421106 - DNA, 30 bp, Artificial Sequence
  Synthetic oligonucleotide
ggcgcatcggttgtgtgtggttgacccata

SEQ ID NO: 421107 - DNA, 30 bp, Artificial Sequence
  Synthetic oligonucleotide
gagggtatcggatattttgcggtacccata

SEQ ID NO: 421108 - DNA, 30 bp, Artificial Sequence
  Synthetic oligonucleotide
attgccaggctttccggcgtgttacccata

SEQ ID NO: 421109 - DNA, 30 bp, Artificial Sequence
  Synthetic oligonucleotide
aatgatggcaaagaggagggccgccccata

SEQ ID NO: 421110 - DNA, 31 bp, Artificial Sequence
  Synthetic oligonucleotide
attgacaaccactctcgaagtgatccccata

SEQ ID NO: 421111 - DNA, 30 bp, Artificial Sequence
  Synthetic oligonucleotide
gggtctgctggaacaagaggactccccata

SEQ ID NO: 421112 - DNA, 30 bp, Artificial Sequence
  Synthetic oligonucleotide
gtcggatctccttcacataggacgcccata

SEQ ID NO: 421113 - DNA, 31 bp, Artificial Sequence
  Synthetic oligonucleotide
gctgtttgggattagaggtaaaccgcccata

SEQ ID NO: 421114 - DNA, 30 bp, Artificial Sequence
  Synthetic oligonucleotide
aatacacctttaatgtttatgcggcccata

SEQ ID NO: 421115 - DNA, 30 bp, Artificial Sequence
  Synthetic oligonucleotide
ccatttctggtgcatcaatgataagccata

SEQ ID NO: 421116 - DNA, 30 bp, Artificial Sequence
  Synthetic oligonucleotide
aacgaccgggagctcactatgatagccata

SEQ ID NO: 421117 - DNA, 30 bp, Artificial Sequence
  Synthetic oligonucleotide
gctacagtgacggtgtaccttatagccata

SEQ ID NO: 421118 - DNA, 30 bp, Artificial Sequence
  Synthetic oligonucleotide
atggggacgccagcgtacctatgcgccata

SEQ ID NO: 421119 - DNA, 30 bp, Artificial Sequence
  Synthetic oligonucleotide
tactggtggcagttgttgatactcgccata

SEQ ID NO: 421120 - DNA, 30 bp, Artificial Sequence
  Synthetic oligonucleotide
ttcgatagggtaataacgtggacggccata

SEQ ID NO: 421121 - DNA, 30 bp, Artificial Sequence
  Synthetic oligonucleotide
ttggtaacgtagcgtcgccgatttgccata

SEQ ID NO: 421122 - DNA, 30 bp, Artificial Sequence
  Synthetic oligonucleotide
gtactgtgattgggtctagccaaatccata

SEQ ID NO: 421123 - DNA, 30 bp, Artificial Sequence
  Synthetic oligonucleotide
atacaattgctcagatttagtacatccata

SEQ ID NO: 421124 - DNA, 30 bp, Artificial Sequence
  Synthetic oligonucleotide
gtaaccgggctagcgggtactatatccata

SEQ ID NO: 421125 - DNA, 30 bp, Artificial Sequence
  Synthetic oligonucleotide
gttgattcaaggtaattatgtcactccata

SEQ ID NO: 421126 - DNA, 30 bp, Artificial Sequence
  Synthetic oligonucleotide
cccactagttcgtgcgtacaggactccata

SEQ ID NO: 421127 - DNA, 30 bp, Artificial Sequence
  Synthetic oligonucleotide
acagattttgtcacgccactcccctccata

SEQ ID NO: 421128 - DNA, 30 bp, Artificial Sequence
  Synthetic oligonucleotide
aacgcggtgtgaacctgctacaggtccata

SEQ ID NO: 421129 - DNA, 30 bp, Artificial Sequence
  Synthetic oligonucleotide
aatcatctcggctgacattatcggtccata

SEQ ID NO: 421130 - DNA, 30 bp, Artificial Sequence
  Synthetic oligonucleotide
atcgttcttgtcgctgctgctctgtccata

SEQ ID NO: 421131 - DNA, 30 bp, Artificial Sequence
  Synthetic oligonucleotide
ggctccagcgtgagttatttttttagcata

SEQ ID NO: 421132 - DNA, 30 bp, Artificial Sequence
  Synthetic oligonucleotide
tagccgagcatgtttatgcgagtacgcata

SEQ ID NO: 421133 - DNA, 30 bp, Artificial Sequence
  Synthetic oligonucleotide
agggcacgcaccgtgtgtaggcagcgcata

SEQ ID NO: 421134 - DNA, 30 bp, Artificial Sequence
  Synthetic oligonucleotide
taggtgaattggcgtaccgaccggcgcata

SEQ ID NO: 421135 - DNA, 30 bp, Artificial Sequence
  Synthetic oligonucleotide
acctttagtatgaccgttataatgcgcata

SEQ ID NO: 421136 - DNA, 30 bp, Artificial Sequence
  Synthetic oligonucleotide
cttatagaggatcgatacgcgcctcgcata

SEQ ID NO: 421137 - DNA, 29 bp, Artificial Sequence
  Synthetic oligonucleotide
ccaggttcctacagtccgggcctcgcata

SEQ ID NO: 421138 - DNA, 30 bp, Artificial Sequence
  Synthetic oligonucleotide
tgttgtattgtgaaaaaatcctaaggcata

SEQ ID NO: 421139 - DNA, 30 bp, Artificial Sequence
  Synthetic oligonucleotide
agggacggccagatatcagtgtaaggcata

SEQ ID NO: 421140 - DNA, 30 bp, Artificial Sequence
  Synthetic oligonucleotide
ccccgggtgttccatttctcaagaggcata

SEQ ID NO: 421141 - DNA, 30 bp, Artificial Sequence
  Synthetic oligonucleotide
aaacatctatctaaccagtattgaggcata

SEQ ID NO: 421142 - DNA, 29 bp, Artificial Sequence
  Synthetic oligonucleotide
atgggataacctcggggcagataggcata

SEQ ID NO: 421143 - DNA, 30 bp, Artificial Sequence
  Synthetic oligonucleotide
caaccgtccccgcaatcgtaactaggcata

SEQ ID NO: 421144 - DNA, 30 bp, Artificial Sequence
  Synthetic oligonucleotide
gaatcagcatccttcgcccttatcggcata

SEQ ID NO: 421145 - DNA, 30 bp, Artificial Sequence
  Synthetic oligonucleotide
tatataagagtaggcaaagttgtcggcata

SEQ ID NO: 421146 - DNA, 30 bp, Artificial Sequence
  Synthetic oligonucleotide
ttaaacccttcccggtcgaggaaatgcata

SEQ ID NO: 421147 - DNA, 30 bp, Artificial Sequence
  Synthetic oligonucleotide
aggttgtgacagggcacgcacgcatgcata

SEQ ID NO: 421148 - DNA, 30 bp, Artificial Sequence
  Synthetic oligonucleotide
cgcatactaactatgaagtactcatgcata

SEQ ID NO: 421149 - DNA, 30 bp, Artificial Sequence
  Synthetic oligonucleotide
cggcgtttagcattacctttccgctgcata

SEQ ID NO: 421150 - DNA, 30 bp, Artificial Sequence
  Synthetic oligonucleotide
gtagtgtggatcttccctgaaggctgcata

SEQ ID NO: 421151 - DNA, 30 bp, Artificial Sequence
  Synthetic oligonucleotide
ttattcttccaatgcgatgggctctgcata

SEQ ID NO: 421152 - DNA, 30 bp, Artificial Sequence
  Synthetic oligonucleotide
atggcatctaagacgacgcgccagtgcata

SEQ ID NO: 421153 - DNA, 30 bp, Artificial Sequence
  Synthetic oligonucleotide
aaaattgtctccaagacaagcccgtgcata

SEQ ID NO: 421154 - DNA, 30 bp, Artificial Sequence
  Synthetic oligonucleotide
ggagttagatggcaatcccatatgtgcata

SEQ ID NO: 421155 - DNA, 30 bp, Artificial Sequence
  Synthetic oligonucleotide
aaagtgggtcagattttactttcttgcata

SEQ ID NO: 421156 - DNA, 30 bp, Artificial Sequence
  Synthetic oligonucleotide
tcgctaggagagcaacgacttcgttgcata

SEQ ID NO: 421157 - DNA, 30 bp, Artificial Sequence
  Synthetic oligonucleotide
attattataaatatagcaacgtaaatcata

SEQ ID NO: 421158 - DNA, 30 bp, Artificial Sequence
  Synthetic oligonucleotide
ttgtctttcgtcgaggggtatcgaatcata

SEQ ID NO: 421159 - DNA, 30 bp, Artificial Sequence
  Synthetic oligonucleotide
cggaccttaaaccttcataacataatcata

SEQ ID NO: 421160 - DNA, 30 bp, Artificial Sequence
  Synthetic oligonucleotide
gcgtattcggttagcctcttagtaatcata

SEQ ID NO: 421161 - DNA, 30 bp, Artificial Sequence
  Synthetic oligonucleotide
gacttgtataagactgcagatacgatcata

SEQ ID NO: 421162 - DNA, 30 bp, Artificial Sequence
  Synthetic oligonucleotide
tctattcaggtgtcctcaaaaaatatcata

SEQ ID NO: 421163 - DNA, 30 bp, Artificial Sequence
  Synthetic oligonucleotide
actcacctgacccttgggtatgatatcata

SEQ ID NO: 421164 - DNA, 30 bp, Artificial Sequence
  Synthetic oligonucleotide
actcaggtttacacagttttggctatcata

SEQ ID NO: 421165 - DNA, 30 bp, Artificial Sequence
  Synthetic oligonucleotide
ttatcgtttatgtgggttggtgttatcata

SEQ ID NO: 421166 - DNA, 30 bp, Artificial Sequence
  Synthetic oligonucleotide
tccgagtcgtttcgatcttggaaactcata

SEQ ID NO: 421167 - DNA, 30 bp, Artificial Sequence
  Synthetic oligonucleotide
gaacccgcggcaaaagctaacacactcata

SEQ ID NO: 421168 - DNA, 30 bp, Artificial Sequence
  Synthetic oligonucleotide
agcggataaagttgccaattgagactcata

SEQ ID NO: 421169 - DNA, 30 bp, Artificial Sequence
  Synthetic oligonucleotide
ggttgacgttatcacgtaggaggactcata

SEQ ID NO: 421170 - DNA, 30 bp, Artificial Sequence
  Synthetic oligonucleotide
acagctcttcagttggccaaattactcata

SEQ ID NO: 421171 - DNA, 30 bp, Artificial Sequence
  Synthetic oligonucleotide
ccaccgaggcacggggaacggaggctcata

SEQ ID NO: 421172 - DNA, 30 bp, Artificial Sequence
  Synthetic oligonucleotide
caccataagcggtagccactgactctcata

SEQ ID NO: 421173 - DNA, 30 bp, Artificial Sequence
  Synthetic oligonucleotide
aggtccggatactgacgctctaaagtcata

SEQ ID NO: 421174 - DNA, 30 bp, Artificial Sequence
  Synthetic oligonucleotide
tcccacgagtgcgtcgctagaaccgtcata

SEQ ID NO: 421175 - DNA, 30 bp, Artificial Sequence
  Synthetic oligonucleotide
tcaataacatatcagtcgtttcgcgtcata

SEQ ID NO: 421176 - DNA, 30 bp, Artificial Sequence
  Synthetic oligonucleotide
gaacaacttgccttagcttgttgggtcata

SEQ ID NO: 421177 - DNA, 30 bp, Artificial Sequence
  Synthetic oligonucleotide
aactcctacacatgggtcactaatgtcata

SEQ ID NO: 421178 - DNA, 30 bp, Artificial Sequence
  Synthetic oligonucleotide
caacactgtggattaaaacaggttgtcata

SEQ ID NO: 421179 - DNA, 30 bp, Artificial Sequence
  Synthetic oligonucleotide
aggctccgggcctatatcggggtcttcata

SEQ ID NO: 421180 - DNA, 30 bp, Artificial Sequence
  Synthetic oligonucleotide
tcagcgtgacgcgtgcgaagaaagttcata

SEQ ID NO: 421181 - DNA, 30 bp, Artificial Sequence
  Synthetic oligonucleotide
gccagtattgtatgtaattcgaagttcata

SEQ ID NO: 421182 - DNA, 30 bp, Artificial Sequence
  Synthetic oligonucleotide
acagtgatggaacctcgcactatgttcata

SEQ ID NO: 421183 - DNA, 30 bp, Artificial Sequence
  Synthetic oligonucleotide
tgtaacacccgggcaagtcgcattttcata

SEQ ID NO: 421184 - DNA, 30 bp, Artificial Sequence
  Synthetic oligonucleotide
gacaccaagggaatcaagtggaaaaagata

SEQ ID NO: 421185 - DNA, 30 bp, Artificial Sequence
  Synthetic oligonucleotide
accctgtaggtagcatactcccaaaagata

SEQ ID NO: 421186 - DNA, 30 bp, Artificial Sequence
  Synthetic oligonucleotide
atatgttgatctaagtcataataaaagata

SEQ ID NO: 421187 - DNA, 30 bp, Artificial Sequence
  Synthetic oligonucleotide
tacttatatggacttacacgttcaaagata

SEQ ID NO: 421188 - DNA, 30 bp, Artificial Sequence
  Synthetic oligonucleotide
tcaacgcatacttctccgaagagaaagata

SEQ ID NO: 421189 - DNA, 30 bp, Artificial Sequence
  Synthetic oligonucleotide
atctgacgttgtcttagtatccgaaagata

SEQ ID NO: 421190 - DNA, 30 bp, Artificial Sequence
  Synthetic oligonucleotide
cccttcgagaagtagtgcgtgagcaagata

SEQ ID NO: 421191 - DNA, 30 bp, Artificial Sequence
  Synthetic oligonucleotide
tgtactgatccgggagcgatagcgaagata

SEQ ID NO: 421192 - DNA, 30 bp, Artificial Sequence
  Synthetic oligonucleotide
acaattcgccccaaagttagccctaagata

SEQ ID NO: 421193 - DNA, 30 bp, Artificial Sequence
  Synthetic oligonucleotide
tagattgacattggacttgattctaagata

SEQ ID NO: 421194 - DNA, 30 bp, Artificial Sequence
  Synthetic oligonucleotide
aattgagctaggctgatgctaattaagata

SEQ ID NO: 421195 - DNA, 30 bp, Artificial Sequence
  Synthetic oligonucleotide
gccttgaagccaaccagaccgcttaagata

SEQ ID NO: 421196 - DNA, 30 bp, Artificial Sequence
  Synthetic oligonucleotide
gccgcgagaataaactgatgaacacagata

SEQ ID NO: 421197 - DNA, 30 bp, Artificial Sequence
  Synthetic oligonucleotide
gtggccttaaacgcattcgggtcacagata

SEQ ID NO: 421198 - DNA, 30 bp, Artificial Sequence
  Synthetic oligonucleotide
atagtccagtactgggtgtggacccagata

SEQ ID NO: 421199 - DNA, 30 bp, Artificial Sequence
  Synthetic oligonucleotide
taatttgacgacggatcgccgccccagata

SEQ ID NO: 421200 - DNA, 30 bp, Artificial Sequence
  Synthetic oligonucleotide
aaccgtttctaactagtgaagtcccagata

SEQ ID NO: 421201 - DNA, 30 bp, Artificial Sequence
  Synthetic oligonucleotide
gccgacaagcacgaccacagcatccagata

SEQ ID NO: 421202 - DNA, 30 bp, Artificial Sequence
  Synthetic oligonucleotide
ggctccccccaaccgcgttgggtccagata

SEQ ID NO: 421203 - DNA, 30 bp, Artificial Sequence
  Synthetic oligonucleotide
tagaaacaaggccatgctagttggcagata

SEQ ID NO: 421204 - DNA, 30 bp, Artificial Sequence
  Synthetic oligonucleotide
ggcctccgaaaagtttagatacttcagata

SEQ ID NO: 421205 - DNA, 30 bp, Artificial Sequence
  Synthetic oligonucleotide
tgcgcagagacaattgctcgagttcagata

SEQ ID NO: 421206 - DNA, 30 bp, Artificial Sequence
  Synthetic oligonucleotide
gtacgagtcataaggcggaccgttcagata

SEQ ID NO: 421207 - DNA, 30 bp, Artificial Sequence
  Synthetic oligonucleotide
ataattgatttaatttcataagaagagata

SEQ ID NO: 421208 - DNA, 30 bp, Artificial Sequence
  Synthetic oligonucleotide
gtttaacccctaacgggattttcagagata

SEQ ID NO: 421209 - DNA, 30 bp, Artificial Sequence
  Synthetic oligonucleotide
attaaaagagcggtttaggggcacgagata

SEQ ID NO: 421210 - DNA, 30 bp, Artificial Sequence
  Synthetic oligonucleotide
ctgacgcggactgaaaagattcaggagata

SEQ ID NO: 421211 - DNA, 30 bp, Artificial Sequence
  Synthetic oligonucleotide
tcatttattggcagtaaaggagcggagata

SEQ ID NO: 421212 - DNA, 30 bp, Artificial Sequence
  Synthetic oligonucleotide
ttatgaaccggttcctgtggtaatgagata

SEQ ID NO: 421213 - DNA, 30 bp, Artificial Sequence
  Synthetic oligonucleotide
ctagtcgcttataaaagtgtcattgagata

SEQ ID NO: 421214 - DNA, 30 bp, Artificial Sequence
  Synthetic oligonucleotide
gtgaactcagtgggttccattaaatagata

SEQ ID NO: 421215 - DNA, 31 bp, Artificial Sequence
  Synthetic oligonucleotide
tttctagacagtcgtctccgcacaatagata

SEQ ID NO: 421216 - DNA, 30 bp, Artificial Sequence
  Synthetic oligonucleotide
atgagggttcctccgtcttggcgatagata

SEQ ID NO: 421217 - DNA, 30 bp, Artificial Sequence
  Synthetic oligonucleotide
gaaagtcagagaatagaccgaatatagata

SEQ ID NO: 421218 - DNA, 30 bp, Artificial Sequence
  Synthetic oligonucleotide
agtatgcgattcaggtcgtcgcactagata

SEQ ID NO: 421219 - DNA, 30 bp, Artificial Sequence
  Synthetic oligonucleotide
acggcggagttaacatgagaagcctagata

SEQ ID NO: 421220 - DNA, 30 bp, Artificial Sequence
  Synthetic oligonucleotide
tttgtggtttttgtgcctgctgagtagata

SEQ ID NO: 421221 - DNA, 30 bp, Artificial Sequence
  Synthetic oligonucleotide
gttaggtcgacgtggaatacgcggtagata

SEQ ID NO: 421222 - DNA, 30 bp, Artificial Sequence
  Synthetic oligonucleotide
taagagttacgctcaattgagggttagata

SEQ ID NO: 421223 - DNA, 30 bp, Artificial Sequence
  Synthetic oligonucleotide
actaagaccgctaagcgtgtatcaacgata

SEQ ID NO: 421224 - DNA, 30 bp, Artificial Sequence
  Synthetic oligonucleotide
ctgtccgagcccaaaaatctgagaacgata

SEQ ID NO: 421225 - DNA, 30 bp, Artificial Sequence
  Synthetic oligonucleotide
ttcggtgcggacacgatgtggaccacgata

SEQ ID NO: 421226 - DNA, 30 bp, Artificial Sequence
  Synthetic oligonucleotide
gagtggttgtgaagagaccacggcacgata

SEQ ID NO: 421227 - DNA, 30 bp, Artificial Sequence
  Synthetic oligonucleotide
cggacaccgttcgatcctgcaccgacgata

SEQ ID NO: 421228 - DNA, 30 bp, Artificial Sequence
  Synthetic oligonucleotide
ttttaaatcggcttagggatgttgacgata

SEQ ID NO: 421229 - DNA, 30 bp, Artificial Sequence
  Synthetic oligonucleotide
aatactcaacgggaagccaccactacgata

SEQ ID NO: 421230 - DNA, 30 bp, Artificial Sequence
  Synthetic oligonucleotide
cctttacaaaacacgtctcgtgttacgata

SEQ ID NO: 421231 - DNA, 30 bp, Artificial Sequence
  Synthetic oligonucleotide
tggatagtaatttgacccggggcaccgata

SEQ ID NO: 421232 - DNA, 30 bp, Artificial Sequence
  Synthetic oligonucleotide
ataataccagtggatgaccaccagccgata

SEQ ID NO: 421233 - DNA, 30 bp, Artificial Sequence
  Synthetic oligonucleotide
ggatcggagctcacaagtcttgggccgata

SEQ ID NO: 421234 - DNA, 30 bp, Artificial Sequence
  Synthetic oligonucleotide
gaataaaagatcatacggtacacagcgata

SEQ ID NO: 421235 - DNA, 30 bp, Artificial Sequence
  Synthetic oligonucleotide
accctgtcacactgggcttgtgccgcgata

SEQ ID NO: 421236 - DNA, 30 bp, Artificial Sequence
  Synthetic oligonucleotide
cgtcgactgcacggaatatgacttgcgata

SEQ ID NO: 421237 - DNA, 30 bp, Artificial Sequence
  Synthetic oligonucleotide
gatgccaacacagttagatgcgcatcgata

SEQ ID NO: 421238 - DNA, 30 bp, Artificial Sequence
  Synthetic oligonucleotide
taaagcactaaagcgctcatggcatcgata

SEQ ID NO: 421239 - DNA, 30 bp, Artificial Sequence
  Synthetic oligonucleotide
tactgatgattgatagcgggaagatcgata

SEQ ID NO: 421240 - DNA, 30 bp, Artificial Sequence
  Synthetic oligonucleotide
gaaatccggtccggatgtaagtactcgata

SEQ ID NO: 421241 - DNA, 30 bp, Artificial Sequence
  Synthetic oligonucleotide
tcctctgtgggaagctcaaacttctcgata

SEQ ID NO: 421242 - DNA, 30 bp, Artificial Sequence
  Synthetic oligonucleotide
tgtctccccttgtaaacaatcgcgtcgata

SEQ ID NO: 421243 - DNA, 30 bp, Artificial Sequence
  Synthetic oligonucleotide
gtaatccttaagcattctccattttcgata

SEQ ID NO: 421244 - DNA, 30 bp, Artificial Sequence
  Synthetic oligonucleotide
ccgcctgtgtaataactattacaaaggata

SEQ ID NO: 421245 - DNA, 30 bp, Artificial Sequence
  Synthetic oligonucleotide
atacgtagggctggtggtagttaaaggata

SEQ ID NO: 421246 - DNA, 30 bp, Artificial Sequence
  Synthetic oligonucleotide
ttaccaccatttcgatcttatacaaggata

SEQ ID NO: 421247 - DNA, 31 bp, Artificial Sequence
  Synthetic oligonucleotide
taactattggctggtagccaggtcaaggata

SEQ ID NO: 421248 - DNA, 30 bp, Artificial Sequence
  Synthetic oligonucleotide
aaatagcctagctgacgtgtagtaaggata

SEQ ID NO: 421249 - DNA, 30 bp, Artificial Sequence
  Synthetic oligonucleotide
atacgcatctctatcggcggccacaggata

SEQ ID NO: 421250 - DNA, 30 bp, Artificial Sequence
  Synthetic oligonucleotide
tgtagcaacatcggtctgttgagcaggata

SEQ ID NO: 421251 - DNA, 30 bp, Artificial Sequence
  Synthetic oligonucleotide
aaatcgtaagggtggcaactccgcaggata

SEQ ID NO: 421252 - DNA, 30 bp, Artificial Sequence
  Synthetic oligonucleotide
accttgagctttccattagagcgcaggata

SEQ ID NO: 421253 - DNA, 30 bp, Artificial Sequence
  Synthetic oligonucleotide
tttgtgcaatggcctcggagctagaggata

SEQ ID NO: 421254 - DNA, 30 bp, Artificial Sequence
  Synthetic oligonucleotide
atataggtctccggctgtggatggaggata

SEQ ID NO: 421255 - DNA, 30 bp, Artificial Sequence
  Synthetic oligonucleotide
gttcgacctttgtcaccttaaaataggata

SEQ ID NO: 421256 - DNA, 30 bp, Artificial Sequence
  Synthetic oligonucleotide
tacaagccagcgtagtctagttctaggata

SEQ ID NO: 421257 - DNA, 30 bp, Artificial Sequence
  Synthetic oligonucleotide
acggcaccattccaacggcctggtaggata

SEQ ID NO: 421258 - DNA, 30 bp, Artificial Sequence
  Synthetic oligonucleotide
gaaatcaggcttcaggggttgcttaggata

SEQ ID NO: 421259 - DNA, 30 bp, Artificial Sequence
  Synthetic oligonucleotide
gctgtccagaaagtgaccccctgacggata

SEQ ID NO: 421260 - DNA, 30 bp, Artificial Sequence
  Synthetic oligonucleotide
ttaggcaagcatcttagggtgatacggata

SEQ ID NO: 421261 - DNA, 30 bp, Artificial Sequence
  Synthetic oligonucleotide
aaatacctaaagcactagctcctgcggata

SEQ ID NO: 421262 - DNA, 30 bp, Artificial Sequence
  Synthetic oligonucleotide
acgcattttaaatacgttggatctcggata

SEQ ID NO: 421263 - DNA, 30 bp, Artificial Sequence
  Synthetic oligonucleotide
atgaggtatcgacttatccccgttcggata

SEQ ID NO: 421264 - DNA, 30 bp, Artificial Sequence
  Synthetic oligonucleotide
tattttttataacccagggacgaagggata

SEQ ID NO: 421265 - DNA, 30 bp, Artificial Sequence
  Synthetic oligonucleotide
aaaagtcgtgacaaaatacgggaagggata

SEQ ID NO: 421266 - DNA, 30 bp, Artificial Sequence
  Synthetic oligonucleotide
tcttcctggtgcgccatttcgtaagggata

SEQ ID NO: 421267 - DNA, 30 bp, Artificial Sequence
  Synthetic oligonucleotide
gcttcttcaatactgatttgttcagggata

SEQ ID NO: 421268 - DNA, 30 bp, Artificial Sequence
  Synthetic oligonucleotide
atcggtggatatggggacgggctagggata

SEQ ID NO: 421269 - DNA, 30 bp, Artificial Sequence
  Synthetic oligonucleotide
aagaggttggtgtttatggaagtagggata

SEQ ID NO: 421270 - DNA, 30 bp, Artificial Sequence
  Synthetic oligonucleotide
aaccccgtaacactggttctcgacgggata

SEQ ID NO: 421271 - DNA, 30 bp, Artificial Sequence
  Synthetic oligonucleotide
cgtagttataggctctataaagccgggata

SEQ ID NO: 421272 - DNA, 30 bp, Artificial Sequence
  Synthetic oligonucleotide
gcagggttaggcgagtggctagccgggata

SEQ ID NO: 421273 - DNA, 30 bp, Artificial Sequence
  Synthetic oligonucleotide
aaccatgttaaaggcttttcgcctgggata

SEQ ID NO: 421274 - DNA, 30 bp, Artificial Sequence
  Synthetic oligonucleotide
gacggcagcgacagtaacgcggctgggata

SEQ ID NO: 421275 - DNA, 30 bp, Artificial Sequence
  Synthetic oligonucleotide
attcattgcacgtacagttcggttgggata

SEQ ID NO: 421276 - DNA, 30 bp, Artificial Sequence
  Synthetic oligonucleotide
tgcttttaaatcgattgacagaactggata

SEQ ID NO: 421277 - DNA, 30 bp, Artificial Sequence
  Synthetic oligonucleotide
ttcgcggttagacttcttcccgcgtggata

SEQ ID NO: 421278 - DNA, 30 bp, Artificial Sequence
  Synthetic oligonucleotide
caagaaacgtttgctacgattcggtggata

SEQ ID NO: 421279 - DNA, 30 bp, Artificial Sequence
  Synthetic oligonucleotide
aagaccaaggttttcgccaaacattggata

SEQ ID NO: 421280 - DNA, 30 bp, Artificial Sequence
  Synthetic oligonucleotide
ctacttttgaatttacgtcatcattggata

SEQ ID NO: 421281 - DNA, 30 bp, Artificial Sequence
  Synthetic oligonucleotide
tcaatgacgaggaacgcgtcttcttggata

SEQ ID NO: 421282 - DNA, 30 bp, Artificial Sequence
  Synthetic oligonucleotide
gatctagtcagcacgtgataaggttggata

SEQ ID NO: 421283 - DNA, 30 bp, Artificial Sequence
  Synthetic oligonucleotide
agtaatttattacgtgaagcgataatgata

SEQ ID NO: 421284 - DNA, 30 bp, Artificial Sequence
  Synthetic oligonucleotide
gcgtccaggatgcctagctaaggcatgata

SEQ ID NO: 421285 - DNA, 30 bp, Artificial Sequence
  Synthetic oligonucleotide
actgtgctgtacttcgagctaatcatgata

SEQ ID NO: 421286 - DNA, 30 bp, Artificial Sequence
  Synthetic oligonucleotide
ttaatgttatttcccaaacgtctcatgata

SEQ ID NO: 421287 - DNA, 30 bp, Artificial Sequence
  Synthetic oligonucleotide
ttacttcgcaccaatttggtgaagatgata

SEQ ID NO: 421288 - DNA, 30 bp, Artificial Sequence
  Synthetic oligonucleotide
ggaagtttcaagttcggtagctagatgata

SEQ ID NO: 421289 - DNA, 30 bp, Artificial Sequence
  Synthetic oligonucleotide
tgagcagagactgtttttaacgggatgata

SEQ ID NO: 421290 - DNA, 30 bp, Artificial Sequence
  Synthetic oligonucleotide
tgcctcacccctagggttatagatatgata

SEQ ID NO: 421291 - DNA, 30 bp, Artificial Sequence
  Synthetic oligonucleotide
aaatctgtcttggagacgaactatatgata

SEQ ID NO: 421292 - DNA, 30 bp, Artificial Sequence
  Synthetic oligonucleotide
tttgggagatcactaaattttgttatgata

SEQ ID NO: 421293 - DNA, 30 bp, Artificial Sequence
  Synthetic oligonucleotide
gattctaaacgaactgttagaaaactgata

SEQ ID NO: 421294 - DNA, 30 bp, Artificial Sequence
  Synthetic oligonucleotide
cccatgtaccgtgtcttactagacctgata

SEQ ID NO: 421295 - DNA, 30 bp, Artificial Sequence
  Synthetic oligonucleotide
atcaggtagtgtcctaataggtccctgata

SEQ ID NO: 421296 - DNA, 30 bp, Artificial Sequence
  Synthetic oligonucleotide
tcgtataagcgaggttgggcgagcctgata

SEQ ID NO: 421297 - DNA, 30 bp, Artificial Sequence
  Synthetic oligonucleotide
acccccgtggcgctttgaaggatcctgata

SEQ ID NO: 421298 - DNA, 30 bp, Artificial Sequence
  Synthetic oligonucleotide
agttaatcaacgatattatcgttcctgata

SEQ ID NO: 421299 - DNA, 30 bp, Artificial Sequence
  Synthetic oligonucleotide
aaacgacctgttgcgtccgccgcgctgata

SEQ ID NO: 421300 - DNA, 30 bp, Artificial Sequence
  Synthetic oligonucleotide
gcaaggggggcactcaactatatgctgata

SEQ ID NO: 421301 - DNA, 30 bp, Artificial Sequence
  Synthetic oligonucleotide
acagatgcctggctctcataagtgctgata

SEQ ID NO: 421302 - DNA, 30 bp, Artificial Sequence
  Synthetic oligonucleotide
atgtgcagacatagatctgaacctctgata

SEQ ID NO: 421303 - DNA, 30 bp, Artificial Sequence
  Synthetic oligonucleotide
ccaaaggggctctataattttgttctgata

SEQ ID NO: 421304 - DNA, 30 bp, Artificial Sequence
  Synthetic oligonucleotide
ggaaatgtgattcgaatactctcagtgata

SEQ ID NO: 421305 - DNA, 30 bp, Artificial Sequence
  Synthetic oligonucleotide
ttcagatattctatggtgcagcgagtgata

SEQ ID NO: 421306 - DNA, 30 bp, Artificial Sequence
  Synthetic oligonucleotide
atttcatttgtatgttttaagatagtgata

SEQ ID NO: 421307 - DNA, 30 bp, Artificial Sequence
  Synthetic oligonucleotide
atagagaggtatccactctacaatgtgata

SEQ ID NO: 421308 - DNA, 30 bp, Artificial Sequence
  Synthetic oligonucleotide
gaagctactcggcaatagggaattgtgata

SEQ ID NO: 421309 - DNA, 30 bp, Artificial Sequence
  Synthetic oligonucleotide
tgaacatccttcgtcggtagtgttgtgata

SEQ ID NO: 421310 - DNA, 30 bp, Artificial Sequence
  Synthetic oligonucleotide
tagctagggattcccctggggtgattgata

SEQ ID NO: 421311 - DNA, 30 bp, Artificial Sequence
  Synthetic oligonucleotide
tcacaagagaatggctcgcagctattgata

SEQ ID NO: 421312 - DNA, 30 bp, Artificial Sequence
  Synthetic oligonucleotide
ctggcgtgggcgttgagaaagctcttgata

SEQ ID NO: 421313 - DNA, 30 bp, Artificial Sequence
  Synthetic oligonucleotide
gtagggataacaacgtagagatcgttgata

SEQ ID NO: 421314 - DNA, 30 bp, Artificial Sequence
  Synthetic oligonucleotide
gaattatggctcatctagcctaggttgata

SEQ ID NO: 421315 - DNA, 30 bp, Artificial Sequence
  Synthetic oligonucleotide
attcgtattacccctaaggcgttgttgata

SEQ ID NO: 421316 - DNA, 30 bp, Artificial Sequence
  Synthetic oligonucleotide
cctgagtgaatctagggacacaatttgata

SEQ ID NO: 421317 - DNA, 30 bp, Artificial Sequence
  Synthetic oligonucleotide
cagccaagtcgcttctcaaccaccaatata

SEQ ID NO: 421318 - DNA, 30 bp, Artificial Sequence
  Synthetic oligonucleotide
ccagagtcattcgtccagaaaatcaatata

SEQ ID NO: 421319 - DNA, 26 bp, Artificial Sequence
  Synthetic oligonucleotide
gaggaaggtctttcaatttcaatata

SEQ ID NO: 421320 - DNA, 30 bp, Artificial Sequence
  Synthetic oligonucleotide
gcatagtcctagccataatagaagaatata

SEQ ID NO: 421321 - DNA, 30 bp, Artificial Sequence
  Synthetic oligonucleotide
gggggagggattttgggcccagggaatata

SEQ ID NO: 421322 - DNA, 30 bp, Artificial Sequence
  Synthetic oligonucleotide
accaattatgcggtgcccttgaataatata

SEQ ID NO: 421323 - DNA, 30 bp, Artificial Sequence
  Synthetic oligonucleotide
atgcgggtaaacatcggagtgtataatata

SEQ ID NO: 421324 - DNA, 30 bp, Artificial Sequence
  Synthetic oligonucleotide
aagattggaaacgaggcagtggctaatata

SEQ ID NO: 421325 - DNA, 30 bp, Artificial Sequence
  Synthetic oligonucleotide
acaagttgtaactgaaagaagcgtaatata

SEQ ID NO: 421326 - DNA, 30 bp, Artificial Sequence
  Synthetic oligonucleotide
atttcgcgggagacataggtaattaatata

SEQ ID NO: 421327 - DNA, 30 bp, Artificial Sequence
  Synthetic oligonucleotide
taggcagggtctggtgtcggtgtacatata

SEQ ID NO: 421328 - DNA, 30 bp, Artificial Sequence
  Synthetic oligonucleotide
tgctgcgatgagaacttttgtttacatata

SEQ ID NO: 421329 - DNA, 30 bp, Artificial Sequence
  Synthetic oligonucleotide
tcaattcttctgtccttataggaccatata

SEQ ID NO: 421330 - DNA, 30 bp, Artificial Sequence
  Synthetic oligonucleotide
ccctgttaccacgctactccaacccatata

SEQ ID NO: 421331 - DNA, 30 bp, Artificial Sequence
  Synthetic oligonucleotide
gagtacgtgcacgctgggctccgccatata

SEQ ID NO: 421332 - DNA, 30 bp, Artificial Sequence
  Synthetic oligonucleotide
cgtcgcgtaaacgtgcataccggccatata

SEQ ID NO: 421333 - DNA, 30 bp, Artificial Sequence
  Synthetic oligonucleotide
cttggctaccgtaagcgtttggagcatata

SEQ ID NO: 421334 - DNA, 30 bp, Artificial Sequence
  Synthetic oligonucleotide
gtgtctcgacgaaagttttcccatcatata

SEQ ID NO: 421335 - DNA, 30 bp, Artificial Sequence
  Synthetic oligonucleotide
gtcaccccgcctatgggcgagactcatata

SEQ ID NO: 421336 - DNA, 30 bp, Artificial Sequence
  Synthetic oligonucleotide
actagacatcgcggcaaccagaaagatata

SEQ ID NO: 421337 - DNA, 30 bp, Artificial Sequence
  Synthetic oligonucleotide
ggtgggcctgtgcaacccactaaagatata

SEQ ID NO: 421338 - DNA, 30 bp, Artificial Sequence
  Synthetic oligonucleotide
tggctattgttcaccgagattcaagatata

SEQ ID NO: 421339 - DNA, 30 bp, Artificial Sequence
  Synthetic oligonucleotide
attcggaaaacggacattttagtagatata

SEQ ID NO: 421340 - DNA, 30 bp, Artificial Sequence
  Synthetic oligonucleotide
tgaggaacctgatatggagtccacgatata

SEQ ID NO: 421341 - DNA, 30 bp, Artificial Sequence
  Synthetic oligonucleotide
gtcctataaatttgataatccttcgatata

SEQ ID NO: 421342 - DNA, 30 bp, Artificial Sequence
  Synthetic oligonucleotide
taaaatgctggcctttccggcgtggatata

SEQ ID NO: 421343 - DNA, 30 bp, Artificial Sequence
  Synthetic oligonucleotide
ccataatttatcatatgagtcaatgatata

SEQ ID NO: 421344 - DNA, 30 bp, Artificial Sequence
  Synthetic oligonucleotide
aagttgcgccttcatgggacggctgatata

SEQ ID NO: 421345 - DNA, 25 bp, Artificial Sequence
  Synthetic oligonucleotide
acacgggtggagagttgctgatata

SEQ ID NO: 421346 - DNA, 30 bp, Artificial Sequence
  Synthetic oligonucleotide
atttggagttatggccacgattgtgatata

SEQ ID NO: 421347 - DNA, 30 bp, Artificial Sequence
  Synthetic oligonucleotide
tttaaaggctaagtataacgagaatatata

SEQ ID NO: 421348 - DNA, 30 bp, Artificial Sequence
  Synthetic oligonucleotide
tcactcttattgcagttaaatgaatatata

SEQ ID NO: 421349 - DNA, 30 bp, Artificial Sequence
  Synthetic oligonucleotide
gaaaggtgttgtttgcgcggcggatatata

SEQ ID NO: 421350 - DNA, 30 bp, Artificial Sequence
  Synthetic oligonucleotide
agcggtatacgtacaaccgcgaactatata

SEQ ID NO: 421351 - DNA, 30 bp, Artificial Sequence
  Synthetic oligonucleotide
tacaaccggcggttcaaaaaaagctatata

SEQ ID NO: 421352 - DNA, 30 bp, Artificial Sequence
  Synthetic oligonucleotide
agctttaagtatttggtttggagctatata

SEQ ID NO: 421353 - DNA, 30 bp, Artificial Sequence
  Synthetic oligonucleotide
tacctccccccaggtagtgacatctatata

SEQ ID NO: 421354 - DNA, 30 bp, Artificial Sequence
  Synthetic oligonucleotide
ttatccgcagcacgtgtcatccagtatata

SEQ ID NO: 421355 - DNA, 30 bp, Artificial Sequence
  Synthetic oligonucleotide
acacgttcctgctgatatgggcagtatata

SEQ ID NO: 421356 - DNA, 30 bp, Artificial Sequence
  Synthetic oligonucleotide
ttctagcataggaccatacaatagtatata

SEQ ID NO: 421357 - DNA, 30 bp, Artificial Sequence
  Synthetic oligonucleotide
gccgtggatagaggcgctattacgtatata

SEQ ID NO: 421358 - DNA, 30 bp, Artificial Sequence
  Synthetic oligonucleotide
tttacagtacgggatatatcccggtatata

SEQ ID NO: 421359 - DNA, 30 bp, Artificial Sequence
  Synthetic oligonucleotide
catgccactaccctagcccgaccttatata

SEQ ID NO: 421360 - DNA, 30 bp, Artificial Sequence
  Synthetic oligonucleotide
cggatgtaccttttacgccgtggttatata

SEQ ID NO: 421361 - DNA, 30 bp, Artificial Sequence
  Synthetic oligonucleotide
ggtgtacgctatcaacgtagtgcaactata

SEQ ID NO: 421362 - DNA, 30 bp, Artificial Sequence
  Synthetic oligonucleotide
cgtgtgtgtagagttcctcgaggaactata

SEQ ID NO: 421363 - DNA, 30 bp, Artificial Sequence
  Synthetic oligonucleotide
aatggggaaagacctatttttggaactata

SEQ ID NO: 421364 - DNA, 30 bp, Artificial Sequence
  Synthetic oligonucleotide
ttgtatccgcattagcgggtggtcactata

SEQ ID NO: 421365 - DNA, 30 bp, Artificial Sequence
  Synthetic oligonucleotide
cccgacttctccgcgggaaagttcactata

SEQ ID NO: 421366 - DNA, 30 bp, Artificial Sequence
  Synthetic oligonucleotide
ttcaccggtgaggtgtgctgtcggactata

SEQ ID NO: 421367 - DNA, 30 bp, Artificial Sequence
  Synthetic oligonucleotide
aataaaattgagttgcaataagggactata

SEQ ID NO: 421368 - DNA, 30 bp, Artificial Sequence
  Synthetic oligonucleotide
attcgagagtctgactcacggaatactata

SEQ ID NO: 421369 - DNA, 30 bp, Artificial Sequence
  Synthetic oligonucleotide
atctactatcgcccgaaacagtatactata

SEQ ID NO: 421370 - DNA, 30 bp, Artificial Sequence
  Synthetic oligonucleotide
cagatacagcttattctcaaaggtactata

SEQ ID NO: 421371 - DNA, 30 bp, Artificial Sequence
  Synthetic oligonucleotide
cagccgatagtcgtccgggaatttactata

SEQ ID NO: 421372 - DNA, 30 bp, Artificial Sequence
  Synthetic oligonucleotide
cccgagactgcgggggccttgtttactata

SEQ ID NO: 421373 - DNA, 30 bp, Artificial Sequence
  Synthetic oligonucleotide
gcctaagggtagagatacagtctccctata

SEQ ID NO: 421374 - DNA, 30 bp, Artificial Sequence
  Synthetic oligonucleotide
tgatttgacccttgaggtaatttccctata

SEQ ID NO: 421375 - DNA, 30 bp, Artificial Sequence
  Synthetic oligonucleotide
gtttaataagaaataagagggtggcctata

SEQ ID NO: 421376 - DNA, 30 bp, Artificial Sequence
  Synthetic oligonucleotide
aagcctctgtgcgttttaggcactcctata

SEQ ID NO: 421377 - DNA, 30 bp, Artificial Sequence
  Synthetic oligonucleotide
tagattgctgggttgtgcctgcttcctata

SEQ ID NO: 421378 - DNA, 30 bp, Artificial Sequence
  Synthetic oligonucleotide
tccgaggccataattcagctttacgctata

SEQ ID NO: 421379 - DNA, 30 bp, Artificial Sequence
  Synthetic oligonucleotide
atgtctatcaggatgttaatgtccgctata

SEQ ID NO: 421380 - DNA, 30 bp, Artificial Sequence
  Synthetic oligonucleotide
tcagcggtctttactcggcgtaaggctata

SEQ ID NO: 421381 - DNA, 30 bp, Artificial Sequence
  Synthetic oligonucleotide
gcaatgttgctctgcagatgcacggctata

SEQ ID NO: 421382 - DNA, 30 bp, Artificial Sequence
  Synthetic oligonucleotide
gttgcccgccaaaatttaagcagggctata

SEQ ID NO: 421383 - DNA, 30 bp, Artificial Sequence
  Synthetic oligonucleotide
acctgatgttgtgagcgtcgatgggctata

SEQ ID NO: 421384 - DNA, 30 bp, Artificial Sequence
  Synthetic oligonucleotide
cgtgattatcgattcataatcactgctata

SEQ ID NO: 421385 - DNA, 30 bp, Artificial Sequence
  Synthetic oligonucleotide
agttctccgtatttcagggagactgctata

SEQ ID NO: 421386 - DNA, 30 bp, Artificial Sequence
  Synthetic oligonucleotide
tgggtttatatccggtcttcacgtgctata

SEQ ID NO: 421387 - DNA, 30 bp, Artificial Sequence
  Synthetic oligonucleotide
ataccaggacggtgcagccatcgtgctata

SEQ ID NO: 421388 - DNA, 30 bp, Artificial Sequence
  Synthetic oligonucleotide
tcttgtcgtactaacccaggcattgctata

SEQ ID NO: 421389 - DNA, 30 bp, Artificial Sequence
  Synthetic oligonucleotide
ctgcggacccggctaccggctgaatctata

SEQ ID NO: 421390 - DNA, 30 bp, Artificial Sequence
  Synthetic oligonucleotide
tgaaggattttacgtgtatgtctatctata

SEQ ID NO: 421391 - DNA, 30 bp, Artificial Sequence
  Synthetic oligonucleotide
agaccggtgtttttctgcgtagagtctata

SEQ ID NO: 421392 - DNA, 30 bp, Artificial Sequence
  Synthetic oligonucleotide
tgtggacgccgccggggacggttgtctata

SEQ ID NO: 421393 - DNA, 30 bp, Artificial Sequence
  Synthetic oligonucleotide
ggtttggaatccagtaaatacacttctata

SEQ ID NO: 421394 - DNA, 27 bp, Artificial Sequence
  Synthetic oligonucleotide
tactggctcggaagtgtattttctata

SEQ ID NO: 421395 - DNA, 30 bp, Artificial Sequence
  Synthetic oligonucleotide
tcccgaaaggtgagcaaagaacaaagtata

SEQ ID NO: 421396 - DNA, 30 bp, Artificial Sequence
  Synthetic oligonucleotide
aacaactacgcatcagtagttgtcagtata

SEQ ID NO: 421397 - DNA, 30 bp, Artificial Sequence
  Synthetic oligonucleotide
acgacgcatttttgtcagtgtctgagtata

SEQ ID NO: 421398 - DNA, 30 bp, Artificial Sequence
  Synthetic oligonucleotide
catatgttcgtacagtaaagtttgagtata

SEQ ID NO: 421399 - DNA, 30 bp, Artificial Sequence
  Synthetic oligonucleotide
atgggtcactagcgtttcccccatagtata

SEQ ID NO: 421400 - DNA, 30 bp, Artificial Sequence
  Synthetic oligonucleotide
gcatttctgcaatgctgcctccatagtata

SEQ ID NO: 421401 - DNA, 30 bp, Artificial Sequence
  Synthetic oligonucleotide
tatacgatatttttacccaagtgtagtata

SEQ ID NO: 421402 - DNA, 30 bp, Artificial Sequence
  Synthetic oligonucleotide
tgtaggaattctggtaatctgacacgtata

SEQ ID NO: 421403 - DNA, 30 bp, Artificial Sequence
  Synthetic oligonucleotide
atgtaatcaagcgacttattcgtacgtata

SEQ ID NO: 421404 - DNA, 30 bp, Artificial Sequence
  Synthetic oligonucleotide
gaagaggctaatgcatacaaggtacgtata

SEQ ID NO: 421405 - DNA, 30 bp, Artificial Sequence
  Synthetic oligonucleotide
tcgtacgggaatgtacactatgtacgtata

SEQ ID NO: 421406 - DNA, 30 bp, Artificial Sequence
  Synthetic oligonucleotide
agcatttccggcttgatccgcacccgtata

SEQ ID NO: 421407 - DNA, 30 bp, Artificial Sequence
  Synthetic oligonucleotide
gacggaaacgacttcttacgatcccgtata

SEQ ID NO: 421408 - DNA, 30 bp, Artificial Sequence
  Synthetic oligonucleotide
gtgtgacatttacctaaccagtagcgtata

SEQ ID NO: 421409 - DNA, 30 bp, Artificial Sequence
  Synthetic oligonucleotide
gaacgtgggtatgaagctctccaaggtata

SEQ ID NO: 421410 - DNA, 30 bp, Artificial Sequence
  Synthetic oligonucleotide
tttacttggaaacaaccaggataaggtata

SEQ ID NO: 421411 - DNA, 30 bp, Artificial Sequence
  Synthetic oligonucleotide
caatcgatctaattaaccatcacaggtata

SEQ ID NO: 421412 - DNA, 30 bp, Artificial Sequence
  Synthetic oligonucleotide
gtctgatctctctgtgcccaatcaggtata

SEQ ID NO: 421413 - DNA, 30 bp, Artificial Sequence
  Synthetic oligonucleotide
taatatagtacggactggcgctcaggtata

SEQ ID NO: 421414 - DNA, 30 bp, Artificial Sequence
  Synthetic oligonucleotide
tgtatgggattgctatctatatgaggtata

SEQ ID NO: 421415 - DNA, 30 bp, Artificial Sequence
  Synthetic oligonucleotide
gcatcgttgcggtagcttttttacggtata

SEQ ID NO: 421416 - DNA, 30 bp, Artificial Sequence
  Synthetic oligonucleotide
tttcaaaagttgcttgagttcgcgggtata

SEQ ID NO: 421417 - DNA, 30 bp, Artificial Sequence
  Synthetic oligonucleotide
accgtgatgccgcatccccgccggggtata

SEQ ID NO: 421418 - DNA, 30 bp, Artificial Sequence
  Synthetic oligonucleotide
taatgaaattcactagtatcccctggtata

SEQ ID NO: 421419 - DNA, 30 bp, Artificial Sequence
  Synthetic oligonucleotide
aaccaagcggagttttcaccggttggtata

SEQ ID NO: 421420 - DNA, 30 bp, Artificial Sequence
  Synthetic oligonucleotide
aattagtgagtgtggctcaaacaatgtata

SEQ ID NO: 421421 - DNA, 30 bp, Artificial Sequence
  Synthetic oligonucleotide
ctaataattactacggaaatccaatgtata

SEQ ID NO: 421422 - DNA, 30 bp, Artificial Sequence
  Synthetic oligonucleotide
ctgaaggtattagcgccgacggcatgtata

SEQ ID NO: 421423 - DNA, 30 bp, Artificial Sequence
  Synthetic oligonucleotide
tcataaggcaacgcgtcgcattgatgtata

SEQ ID NO: 421424 - DNA, 30 bp, Artificial Sequence
  Synthetic oligonucleotide
gtggaactgccacggttaacactatgtata

SEQ ID NO: 421425 - DNA, 30 bp, Artificial Sequence
  Synthetic oligonucleotide
tcctggccaagtttcgatccaggctgtata

SEQ ID NO: 421426 - DNA, 30 bp, Artificial Sequence
  Synthetic oligonucleotide
ggtgctcgtaacgtggataggccgtgtata

SEQ ID NO: 421427 - DNA, 30 bp, Artificial Sequence
  Synthetic oligonucleotide
gccctcaatgtgacttactagaggtgtata

SEQ ID NO: 421428 - DNA, 30 bp, Artificial Sequence
  Synthetic oligonucleotide
agtggtccaccagaaatcccccggtgtata

SEQ ID NO: 421429 - DNA, 30 bp, Artificial Sequence
  Synthetic oligonucleotide
tcgttcggagttataaattcgagttgtata

SEQ ID NO: 421430 - DNA, 30 bp, Artificial Sequence
  Synthetic oligonucleotide
gaccttgcgctttgggagcctggttgtata

SEQ ID NO: 421431 - DNA, 30 bp, Artificial Sequence
  Synthetic oligonucleotide
agcttaacgaatcgcttagtgtgttgtata

SEQ ID NO: 421432 - DNA, 30 bp, Artificial Sequence
  Synthetic oligonucleotide
gagctcagacttgccggtccaatttgtata

SEQ ID NO: 421433 - DNA, 29 bp, Artificial Sequence
  Synthetic oligonucleotide
ctttcctcacgtcctgagcgacaattata

SEQ ID NO: 421434 - DNA, 30 bp, Artificial Sequence
  Synthetic oligonucleotide
aagcttctgatcttaggtgacagaattata

SEQ ID NO: 421435 - DNA, 30 bp, Artificial Sequence
  Synthetic oligonucleotide
cttcttgacgggtgtcagcgcgacattata

SEQ ID NO: 421436 - DNA, 30 bp, Artificial Sequence
  Synthetic oligonucleotide
gaacaggcatacgacgtaactagcattata

SEQ ID NO: 421437 - DNA, 30 bp, Artificial Sequence
  Synthetic oligonucleotide
ggaaaaactaaccgcgctcgcggcattata

SEQ ID NO: 421438 - DNA, 30 bp, Artificial Sequence
  Synthetic oligonucleotide
gtactccctcggcttaagcgtatcattata

SEQ ID NO: 421439 - DNA, 30 bp, Artificial Sequence
  Synthetic oligonucleotide
aggcgttgatacgtgaactaacggattata

SEQ ID NO: 421440 - DNA, 30 bp, Artificial Sequence
  Synthetic oligonucleotide
cgccaggaacttggttgatgttatattata

SEQ ID NO: 421441 - DNA, 31 bp, Artificial Sequence
  Synthetic oligonucleotide
catttcttgacccgtctaacagcctattata

SEQ ID NO: 421442 - DNA, 30 bp, Artificial Sequence
  Synthetic oligonucleotide
ttatctcctggcgccagacaaagtattata

SEQ ID NO: 421443 - DNA, 30 bp, Artificial Sequence
  Synthetic oligonucleotide
acccgtccgctacggggatggcgtattata

SEQ ID NO: 421444 - DNA, 30 bp, Artificial Sequence
  Synthetic oligonucleotide
acatgaaaatcgttcatcaaaggtattata

SEQ ID NO: 421445 - DNA, 30 bp, Artificial Sequence
  Synthetic oligonucleotide
tgttacggaattagagttcacattattata

SEQ ID NO: 421446 - DNA, 30 bp, Artificial Sequence
  Synthetic oligonucleotide
ggaggttcgctgttctgacgcattattata

SEQ ID NO: 421447 - DNA, 30 bp, Artificial Sequence
  Synthetic oligonucleotide
ctcaaccacattggtacgagggaacttata

SEQ ID NO: 421448 - DNA, 30 bp, Artificial Sequence
  Synthetic oligonucleotide
ttccaacgcgacattgagcgtacacttata

SEQ ID NO: 421449 - DNA, 30 bp, Artificial Sequence
  Synthetic oligonucleotide
ggacacatcgaattaatacgcagacttata

SEQ ID NO: 421450 - DNA, 30 bp, Artificial Sequence
  Synthetic oligonucleotide
aaacacccaccatatcgcagcaggcttata

SEQ ID NO: 421451 - DNA, 30 bp, Artificial Sequence
  Synthetic oligonucleotide
agataatggactgattggtctatgcttata

SEQ ID NO: 421452 - DNA, 30 bp, Artificial Sequence
  Synthetic oligonucleotide
cttgttaaagagccgagcgccctgcttata

SEQ ID NO: 421453 - DNA, 31 bp, Artificial Sequence
  Synthetic oligonucleotide
gaaaatttcaacataattaagcactcttata

SEQ ID NO: 421454 - DNA, 30 bp, Artificial Sequence
  Synthetic oligonucleotide
gctgaagtgtcagacatatggattcttata

SEQ ID NO: 421455 - DNA, 30 bp, Artificial Sequence
  Synthetic oligonucleotide
aatactttcgcactccgagctaaagttata

SEQ ID NO: 421456 - DNA, 30 bp, Artificial Sequence
  Synthetic oligonucleotide
gttaagcgttggttaacacgcacagttata

SEQ ID NO: 421457 - DNA, 30 bp, Artificial Sequence
  Synthetic oligonucleotide
aatttggacggcagagttatctcagttata

SEQ ID NO: 421458 - DNA, 30 bp, Artificial Sequence
  Synthetic oligonucleotide
taggagggttttgtatcagtccgagttata

SEQ ID NO: 421459 - DNA, 30 bp, Artificial Sequence
  Synthetic oligonucleotide
gacgttagtttacgggatgcatccgttata

SEQ ID NO: 421460 - DNA, 30 bp, Artificial Sequence
  Synthetic oligonucleotide
aactcaagggccgtgtcactcctcgttata

SEQ ID NO: 421461 - DNA, 30 bp, Artificial Sequence
  Synthetic oligonucleotide
ctttcaataggcgtcgcttggtaggttata

SEQ ID NO: 421462 - DNA, 30 bp, Artificial Sequence
  Synthetic oligonucleotide
gaaacctgcggcgtggcggtagcggttata

SEQ ID NO: 421463 - DNA, 30 bp, Artificial Sequence
  Synthetic oligonucleotide
tatgcaattagcgggcggatattggttata

SEQ ID NO: 421464 - DNA, 30 bp, Artificial Sequence
  Synthetic oligonucleotide
gttaggagcagattctgagggatatttata

SEQ ID NO: 421465 - DNA, 30 bp, Artificial Sequence
  Synthetic oligonucleotide
tgaagtgcgtattcacttctactatttata

SEQ ID NO: 421466 - DNA, 30 bp, Artificial Sequence
  Synthetic oligonucleotide
atattcacgtgcgggccttaacagtttata

SEQ ID NO: 421467 - DNA, 30 bp, Artificial Sequence
  Synthetic oligonucleotide
tgacatgtgtcctttgtgaggcagtttata

SEQ ID NO: 421468 - DNA, 30 bp, Artificial Sequence
  Synthetic oligonucleotide
gaaaggatcacactccgcaaagcgtttata

SEQ ID NO: 421469 - DNA, 30 bp, Artificial Sequence
  Synthetic oligonucleotide
aagggcttataaacaatctcctcgtttata

SEQ ID NO: 421470 - DNA, 30 bp, Artificial Sequence
  Synthetic oligonucleotide
ggactcttaaaggctgtgtgcaggtttata

SEQ ID NO: 421471 - DNA, 30 bp, Artificial Sequence
  Synthetic oligonucleotide
attcccgcatgggacggatgctggtttata

SEQ ID NO: 421472 - DNA, 30 bp, Artificial Sequence
  Synthetic oligonucleotide
gcattattcgcccactttaaaatgtttata

SEQ ID NO: 421473 - DNA, 35 bp, Artificial Sequence
  Synthetic oligonucleotide
ggtgtacgtttatgacttgaagtaccccttttata

SEQ ID NO: 421474 - DNA, 30 bp, Artificial Sequence
  Synthetic oligonucleotide
aggccaaccactggagctcggcgttttata

SEQ ID NO: 421475 - DNA, 30 bp, Artificial Sequence
  Synthetic oligonucleotide
caaacagttcagatgtaccgagtttttata

SEQ ID NO: 421476 - DNA, 30 bp, Artificial Sequence
  Synthetic oligonucleotide
cctatagaaaagtgctcatgtgtttttata

SEQ ID NO: 421477 - DNA, 30 bp, Artificial Sequence
  Synthetic oligonucleotide
taggcgtgtttttacggtgcctcaaaacta

SEQ ID NO: 421478 - DNA, 30 bp, Artificial Sequence
  Synthetic oligonucleotide
taagttttgagggatattcatcgaaaacta

SEQ ID NO: 421479 - DNA, 30 bp, Artificial Sequence
  Synthetic oligonucleotide
agcatacattaatattcgagtataaaacta

SEQ ID NO: 421480 - DNA, 30 bp, Artificial Sequence
  Synthetic oligonucleotide
aggcagcagatctcccggatcttgaaacta

SEQ ID NO: 421481 - DNA, 30 bp, Artificial Sequence
  Synthetic oligonucleotide
tgaccgtgagttttgtggtcgttgaaacta

SEQ ID NO: 421482 - DNA, 30 bp, Artificial Sequence
  Synthetic oligonucleotide
ccaggagctttgactttttatgataaacta

SEQ ID NO: 421483 - DNA, 30 bp, Artificial Sequence
  Synthetic oligonucleotide
tgcaactcctccgtgacctgggttaaacta

SEQ ID NO: 421484 - DNA, 30 bp, Artificial Sequence
  Synthetic oligonucleotide
ccatataactttatcgttgcaccacaacta

SEQ ID NO: 421485 - DNA, 30 bp, Artificial Sequence
  Synthetic oligonucleotide
atgttcgataagttctgtgggggacaacta

SEQ ID NO: 421486 - DNA, 30 bp, Artificial Sequence
  Synthetic oligonucleotide
ttcttgtaaccctccccctggaagcaacta

SEQ ID NO: 421487 - DNA, 30 bp, Artificial Sequence
  Synthetic oligonucleotide
cgctttagatcgggaaattccccgcaacta

SEQ ID NO: 421488 - DNA, 30 bp, Artificial Sequence
  Synthetic oligonucleotide
ggtcgaagtacgtaacgtccttttcaacta

SEQ ID NO: 421489 - DNA, 30 bp, Artificial Sequence
  Synthetic oligonucleotide
cattattaccaaatttgcgtgttagaacta

SEQ ID NO: 421490 - DNA, 30 bp, Artificial Sequence
  Synthetic oligonucleotide
aaccggcaagttatggctcctaccgaacta

SEQ ID NO: 421491 - DNA, 30 bp, Artificial Sequence
  Synthetic oligonucleotide
acccctgtacgtgcatgaggcatcgaacta

SEQ ID NO: 421492 - DNA, 30 bp, Artificial Sequence
  Synthetic oligonucleotide
tacatagtttcttagggttcaaaggaacta

SEQ ID NO: 421493 - DNA, 30 bp, Artificial Sequence
  Synthetic oligonucleotide
cgcacgcatcggtggcctgagcctgaacta

SEQ ID NO: 421494 - DNA, 30 bp, Artificial Sequence
  Synthetic oligonucleotide
ccctgcttctgggacatctcaagtgaacta

SEQ ID NO: 421495 - DNA, 30 bp, Artificial Sequence
  Synthetic oligonucleotide
ctaacactaaggctgactcacccataacta

SEQ ID NO: 421496 - DNA, 30 bp, Artificial Sequence
  Synthetic oligonucleotide
ggttttagaatacgtacagaggcataacta

SEQ ID NO: 421497 - DNA, 30 bp, Artificial Sequence
  Synthetic oligonucleotide
acctgctagcgcaactatgctagataacta

SEQ ID NO: 421498 - DNA, 30 bp, Artificial Sequence
  Synthetic oligonucleotide
aaggcggaagtggccggatgaggataacta

SEQ ID NO: 421499 - DNA, 30 bp, Artificial Sequence
  Synthetic oligonucleotide
ttgctcagtcgtatcacagttaagtaacta

SEQ ID NO: 421500 - DNA, 30 bp, Artificial Sequence
  Synthetic oligonucleotide
gcagtttatccccaatgagcggggtaacta

SEQ ID NO: 421501 - DNA, 30 bp, Artificial Sequence
  Synthetic oligonucleotide
atattacttaatagagccatacattaacta

SEQ ID NO: 421502 - DNA, 30 bp, Artificial Sequence
  Synthetic oligonucleotide
gtttaaggtcattataattggcattaacta

SEQ ID NO: 421503 - DNA, 30 bp, Artificial Sequence
  Synthetic oligonucleotide
agtgtatctaatcgcgccattggttaacta

SEQ ID NO: 421504 - DNA, 30 bp, Artificial Sequence
  Synthetic oligonucleotide
gcatagaaggtgacttctagtgcaacacta

SEQ ID NO: 421505 - DNA, 30 bp, Artificial Sequence
  Synthetic oligonucleotide
ttgatgaagtatactactaattacacacta

SEQ ID NO: 421506 - DNA, 30 bp, Artificial Sequence
  Synthetic oligonucleotide
gaagctttgcaggccacagctgagacacta

SEQ ID NO: 421507 - DNA, 30 bp, Artificial Sequence
  Synthetic oligonucleotide
gagccacaccagcagtccatcaggacacta

SEQ ID NO: 421508 - DNA, 30 bp, Artificial Sequence
  Synthetic oligonucleotide
tgttttcatctgttagtgtgccaaccacta

SEQ ID NO: 421509 - DNA, 30 bp, Artificial Sequence
  Synthetic oligonucleotide
taaaacaagcgtcctctagtgtaaccacta

SEQ ID NO: 421510 - DNA, 30 bp, Artificial Sequence
  Synthetic oligonucleotide
gtataaaaagcgttttggtagacaccacta

SEQ ID NO: 421511 - DNA, 30 bp, Artificial Sequence
  Synthetic oligonucleotide
gattgcttacggcttcagcaagcaccacta

SEQ ID NO: 421512 - DNA, 31 bp, Artificial Sequence
  Synthetic oligonucleotide
gtttagtaacaaaagggacacggtaccacta

SEQ ID NO: 421513 - DNA, 30 bp, Artificial Sequence
  Synthetic oligonucleotide
gttcaggtagtgtatcccacattcccacta

SEQ ID NO: 421514 - DNA, 30 bp, Artificial Sequence
  Synthetic oligonucleotide
gttatctcaatggtgcaaccgcatccacta

SEQ ID NO: 421515 - DNA, 30 bp, Artificial Sequence
  Synthetic oligonucleotide
taataggagcgtatgttcatatctccacta

SEQ ID NO: 421516 - DNA, 30 bp, Artificial Sequence
  Synthetic oligonucleotide
ggtatataccttgcgcgcatgtgagcacta

SEQ ID NO: 421517 - DNA, 30 bp, Artificial Sequence
  Synthetic oligonucleotide
agtggtgcagccgatgctacgatggcacta

SEQ ID NO: 421518 - DNA, 30 bp, Artificial Sequence
  Synthetic oligonucleotide
ttggaatcctttctttaatgggaatcacta

SEQ ID NO: 421519 - DNA, 25 bp, Artificial Sequence
  Synthetic oligonucleotide
tactagcgcgctagcgggatcacta

SEQ ID NO: 421520 - DNA, 30 bp, Artificial Sequence
  Synthetic oligonucleotide
gcttttgtgagacaggagctggaaagacta

SEQ ID NO: 421521 - DNA, 30 bp, Artificial Sequence
  Synthetic oligonucleotide
ctccgtttttccggtaaccaacgaagacta

SEQ ID NO: 421522 - DNA, 30 bp, Artificial Sequence
  Synthetic oligonucleotide
caggtttataatgcaatgccggagagacta

SEQ ID NO: 421523 - DNA, 30 bp, Artificial Sequence
  Synthetic oligonucleotide
acttaatggttaaacgaaacatgtagacta

SEQ ID NO: 421524 - DNA, 30 bp, Artificial Sequence
  Synthetic oligonucleotide
aggaatatgtcgatgatctcacttagacta

SEQ ID NO: 421525 - DNA, 30 bp, Artificial Sequence
  Synthetic oligonucleotide
ttcctatgctgcgtcatctttggtcgacta

SEQ ID NO: 421526 - DNA, 30 bp, Artificial Sequence
  Synthetic oligonucleotide
accaccattcccagagaatgggaaggacta

SEQ ID NO: 421527 - DNA, 30 bp, Artificial Sequence
  Synthetic oligonucleotide
agctcttggagagggacgatgggaggacta

SEQ ID NO: 421528 - DNA, 30 bp, Artificial Sequence
  Synthetic oligonucleotide
ccggtcccttaagataaattcgtaggacta

SEQ ID NO: 421529 - DNA, 30 bp, Artificial Sequence
  Synthetic oligonucleotide
gcacctaacatgggtaggcccgctggacta

SEQ ID NO: 421530 - DNA, 30 bp, Artificial Sequence
  Synthetic oligonucleotide
ccctcaagatccggcgaccaatctggacta

SEQ ID NO: 421531 - DNA, 30 bp, Artificial Sequence
  Synthetic oligonucleotide
aaaattagcgcgcgagagttacgtggacta

SEQ ID NO: 421532 - DNA, 30 bp, Artificial Sequence
  Synthetic oligonucleotide
tgacgggtactcaaagcacccattggacta

SEQ ID NO: 421533 - DNA, 30 bp, Artificial Sequence
  Synthetic oligonucleotide
catgtgcgggcaaatagcattcgatgacta

SEQ ID NO: 421534 - DNA, 30 bp, Artificial Sequence
  Synthetic oligonucleotide
aattagacctggggagacaagacgtgacta

SEQ ID NO: 421535 - DNA, 30 bp, Artificial Sequence
  Synthetic oligonucleotide
gcagatcagacctgtcttcaggcaatacta

SEQ ID NO: 421536 - DNA, 30 bp, Artificial Sequence
  Synthetic oligonucleotide
ccccttccccacttgtgaccctcaatacta

SEQ ID NO: 421537 - DNA, 30 bp, Artificial Sequence
  Synthetic oligonucleotide
acaggtgatgcagcaatcagcaacatacta

SEQ ID NO: 421538 - DNA, 30 bp, Artificial Sequence
  Synthetic oligonucleotide
tgggaactctaatttgtccggtccatacta

SEQ ID NO: 421539 - DNA, 30 bp, Artificial Sequence
  Synthetic oligonucleotide
aatcgccgtctcctgatttcgcgcatacta

SEQ ID NO: 421540 - DNA, 30 bp, Artificial Sequence
  Synthetic oligonucleotide
aacagctgtcttaggaagcacggcatacta

SEQ ID NO: 421541 - DNA, 30 bp, Artificial Sequence
  Synthetic oligonucleotide
tccttttacgatcgagcattcaagatacta

SEQ ID NO: 421542 - DNA, 30 bp, Artificial Sequence
  Synthetic oligonucleotide
actgcttccggggcatcataacggatacta

SEQ ID NO: 421543 - DNA, 30 bp, Artificial Sequence
  Synthetic oligonucleotide
aagctcggcccagtgcagtgccatatacta

SEQ ID NO: 421544 - DNA, 30 bp, Artificial Sequence
  Synthetic oligonucleotide
aaaagaaggtggcaagcgcttcctatacta

SEQ ID NO: 421545 - DNA, 30 bp, Artificial Sequence
  Synthetic oligonucleotide
agttatgtatagttaacacactctatacta

SEQ ID NO: 421546 - DNA, 30 bp, Artificial Sequence
  Synthetic oligonucleotide
cccctaatttggcctagacacgttatacta

SEQ ID NO: 421547 - DNA, 30 bp, Artificial Sequence
  Synthetic oligonucleotide
ggtacattgaaacggccgaagcaactacta

SEQ ID NO: 421548 - DNA, 32 bp, Artificial Sequence
  Synthetic oligonucleotide
tgccaaacgcgtgttccttgcattaactacta

SEQ ID NO: 421549 - DNA, 30 bp, Artificial Sequence
  Synthetic oligonucleotide
ggtcatttcagtacattctcgatactacta

SEQ ID NO: 421550 - DNA, 30 bp, Artificial Sequence
  Synthetic oligonucleotide
ggatgttagctggttgcgaagctactacta

SEQ ID NO: 421551 - DNA, 30 bp, Artificial Sequence
  Synthetic oligonucleotide
tgaggccaaggaaggtcgtaggacctacta

SEQ ID NO: 421552 - DNA, 30 bp, Artificial Sequence
  Synthetic oligonucleotide
ggtatgtaacccgaagggctttgcctacta

SEQ ID NO: 421553 - DNA, 30 bp, Artificial Sequence
  Synthetic oligonucleotide
gatcttgggcataatgtctaagtcctacta

SEQ ID NO: 421554 - DNA, 30 bp, Artificial Sequence
  Synthetic oligonucleotide
ttttgctaggccaaggacctattcctacta

SEQ ID NO: 421555 - DNA, 30 bp, Artificial Sequence
  Synthetic oligonucleotide
acgtaaatttgaccataagggtctctacta

SEQ ID NO: 421556 - DNA, 30 bp, Artificial Sequence
  Synthetic oligonucleotide
tacttccaggttgggcagctataagtacta

SEQ ID NO: 421557 - DNA, 30 bp, Artificial Sequence
  Synthetic oligonucleotide
agaagtgactatgctctaggttcagtacta

SEQ ID NO: 421558 - DNA, 30 bp, Artificial Sequence
  Synthetic oligonucleotide
aatttccgtacaaataatcgtagagtacta

SEQ ID NO: 421559 - DNA, 30 bp, Artificial Sequence
  Synthetic oligonucleotide
gaatctgtcttaatcaagtcgtgcgtacta

SEQ ID NO: 421560 - DNA, 30 bp, Artificial Sequence
  Synthetic oligonucleotide
gacccagggctgactaacttccaggtacta

SEQ ID NO: 421561 - DNA, 30 bp, Artificial Sequence
  Synthetic oligonucleotide
gagctttgagcggtgattgcatcggtacta

SEQ ID NO: 421562 - DNA, 30 bp, Artificial Sequence
  Synthetic oligonucleotide
atgtgctgctagggtatgactgatgtacta

SEQ ID NO: 421563 - DNA, 30 bp, Artificial Sequence
  Synthetic oligonucleotide
gactttcacgaccggagtccttgtgtacta

SEQ ID NO: 421564 - DNA, 30 bp, Artificial Sequence
  Synthetic oligonucleotide
attaactacttaagagggaatattgtacta

SEQ ID NO: 421565 - DNA, 30 bp, Artificial Sequence
  Synthetic oligonucleotide
gtctccgtaaaatggtgcacctttgtacta

SEQ ID NO: 421566 - DNA, 30 bp, Artificial Sequence
  Synthetic oligonucleotide
gtattaaaggcaatagttttgatattacta

SEQ ID NO: 421567 - DNA, 30 bp, Artificial Sequence
  Synthetic oligonucleotide
atttaatggcaacggtttggcaacttacta

SEQ ID NO: 421568 - DNA, 30 bp, Artificial Sequence
  Synthetic oligonucleotide
gaactttatacgaacgtccgcagcttacta

SEQ ID NO: 421569 - DNA, 30 bp, Artificial Sequence
  Synthetic oligonucleotide
ctaataaaatcttggacttgaatcttacta

SEQ ID NO: 421570 - DNA, 30 bp, Artificial Sequence
  Synthetic oligonucleotide
cgcctgcaccagttcaatgccaggttacta

SEQ ID NO: 421571 - DNA, 30 bp, Artificial Sequence
  Synthetic oligonucleotide
gtacggatgactgatgtgtcgctgttacta

SEQ ID NO: 421572 - DNA, 30 bp, Artificial Sequence
  Synthetic oligonucleotide
atggacccccaggagagcttttctttacta

SEQ ID NO: 421573 - DNA, 30 bp, Artificial Sequence
  Synthetic oligonucleotide
aaggcagctcagggttgttgtggaaaccta

SEQ ID NO: 421574 - DNA, 30 bp, Artificial Sequence
  Synthetic oligonucleotide
ctggtggcagactagttacggataaaccta

SEQ ID NO: 421575 - DNA, 30 bp, Artificial Sequence
  Synthetic oligonucleotide
tgtgctgcgcacaactccttacgcaaccta

SEQ ID NO: 421576 - DNA, 30 bp, Artificial Sequence
  Synthetic oligonucleotide
tctctcctggagttgtacgatccgaaccta

SEQ ID NO: 421577 - DNA, 30 bp, Artificial Sequence
  Synthetic oligonucleotide
acagtcaaacagttagcgtaaaggaaccta

SEQ ID NO: 421578 - DNA, 30 bp, Artificial Sequence
  Synthetic oligonucleotide
attcagtgctttccccgcgttgaccaccta

SEQ ID NO: 421579 - DNA, 30 bp, Artificial Sequence
  Synthetic oligonucleotide
aataaatgacgtcaattgacaaagcaccta

SEQ ID NO: 421580 - DNA, 30 bp, Artificial Sequence
  Synthetic oligonucleotide
agaatttccatttcacatagtacgcaccta

SEQ ID NO: 421581 - DNA, 30 bp, Artificial Sequence
  Synthetic oligonucleotide
cattcattccattattaagtattgcaccta

SEQ ID NO: 421582 - DNA, 30 bp, Artificial Sequence
  Synthetic oligonucleotide
agcgacaagcatagcactaactgtcaccta

SEQ ID NO: 421583 - DNA, 30 bp, Artificial Sequence
  Synthetic oligonucleotide
tctggatacaaccctcgaggtcttcaccta

SEQ ID NO: 421584 - DNA, 30 bp, Artificial Sequence
  Synthetic oligonucleotide
cctggcgagtttgtttcttgacaagaccta

SEQ ID NO: 421585 - DNA, 30 bp, Artificial Sequence
  Synthetic oligonucleotide
attgttcgggacaaactctatcaagaccta

SEQ ID NO: 421586 - DNA, 30 bp, Artificial Sequence
  Synthetic oligonucleotide
gaaaatgcagttgataattattaagaccta

SEQ ID NO: 421587 - DNA, 30 bp, Artificial Sequence
  Synthetic oligonucleotide
ttgtaattaacgttaatcttgttagaccta

SEQ ID NO: 421588 - DNA, 30 bp, Artificial Sequence
  Synthetic oligonucleotide
ccggcactacactatccaagctacgaccta

SEQ ID NO: 421589 - DNA, 30 bp, Artificial Sequence
  Synthetic oligonucleotide
tcccttcaggtatgatgattagtcgaccta

SEQ ID NO: 421590 - DNA, 30 bp, Artificial Sequence
  Synthetic oligonucleotide
cactctgggctatcctgatacgatgaccta

SEQ ID NO: 421591 - DNA, 30 bp, Artificial Sequence
  Synthetic oligonucleotide
gacatcgtggtagatgagatatatgaccta

SEQ ID NO: 421592 - DNA, 30 bp, Artificial Sequence
  Synthetic oligonucleotide
atacgccatcacttagtcgggtatgaccta

SEQ ID NO: 421593 - DNA, 30 bp, Artificial Sequence
  Synthetic oligonucleotide
tcagagtattgaccgccggctttataccta

SEQ ID NO: 421594 - DNA, 30 bp, Artificial Sequence
  Synthetic oligonucleotide
ccagcgtctgtatccctctagtggtaccta

SEQ ID NO: 421595 - DNA, 30 bp, Artificial Sequence
  Synthetic oligonucleotide
ttcactcggaaaattcgaggatcttaccta

SEQ ID NO: 421596 - DNA, 30 bp, Artificial Sequence
  Synthetic oligonucleotide
tggaatacacggtaatattctagttaccta

SEQ ID NO: 421597 - DNA, 30 bp, Artificial Sequence
  Synthetic oligonucleotide
ctgaggaatgcggctgtatgttgttaccta

SEQ ID NO: 421598 - DNA, 30 bp, Artificial Sequence
  Synthetic oligonucleotide
agtgtgttgaccttctgaatataaacccta

SEQ ID NO: 421599 - DNA, 30 bp, Artificial Sequence
  Synthetic oligonucleotide
cacagtagtcgccatgggacgttaacccta

SEQ ID NO: 421600 - DNA, 30 bp, Artificial Sequence
  Synthetic oligonucleotide
ctccttagcgaaagccaaccagtcacccta

SEQ ID NO: 421601 - DNA, 30 bp, Artificial Sequence
  Synthetic oligonucleotide
gggttcgtaattcgaactctcgggacccta

SEQ ID NO: 421602 - DNA, 30 bp, Artificial Sequence
  Synthetic oligonucleotide
aacgcactgattggaggcagacatacccta

SEQ ID NO: 421603 - DNA, 30 bp, Artificial Sequence
  Synthetic oligonucleotide
gggcacagttgacgttaaccgcatacccta

SEQ ID NO: 421604 - DNA, 30 bp, Artificial Sequence
  Synthetic oligonucleotide
gcgggtagcccagagggtttaagaccccta

SEQ ID NO: 421605 - DNA, 30 bp, Artificial Sequence
  Synthetic oligonucleotide
tagctgcgatgcagataggtttccccccta

SEQ ID NO: 421606 - DNA, 30 bp, Artificial Sequence
  Synthetic oligonucleotide
gagggactggtgtaatcatttaggccccta

SEQ ID NO: 421607 - DNA, 30 bp, Artificial Sequence
  Synthetic oligonucleotide
agcgggaaaggggtcaatcacttgccccta

SEQ ID NO: 421608 - DNA, 30 bp, Artificial Sequence
  Synthetic oligonucleotide
tcaaccatcgggacacccctggttccccta

SEQ ID NO: 421609 - DNA, 30 bp, Artificial Sequence
  Synthetic oligonucleotide
ttgaccaaagacgtaaggccgcaagcccta

SEQ ID NO: 421610 - DNA, 30 bp, Artificial Sequence
  Synthetic oligonucleotide
attcttataaactatttactgaacgcccta

SEQ ID NO: 421611 - DNA, 30 bp, Artificial Sequence
  Synthetic oligonucleotide
gatgaccgagaaagtatttacctcgcccta

SEQ ID NO: 421612 - DNA, 30 bp, Artificial Sequence
  Synthetic oligonucleotide
gcttcccaccatgacgctaagaaggcccta

SEQ ID NO: 421613 - DNA, 30 bp, Artificial Sequence
  Synthetic oligonucleotide
gtttacggccggcatacaagagatgcccta

SEQ ID NO: 421614 - DNA, 30 bp, Artificial Sequence
  Synthetic oligonucleotide
agaaaatatgacatagctggactctcccta

SEQ ID NO: 421615 - DNA, 30 bp, Artificial Sequence
  Synthetic oligonucleotide
acattaaaaagaccttagttggcttcccta

SEQ ID NO: 421616 - DNA, 30 bp, Artificial Sequence
  Synthetic oligonucleotide
ggactccggacttgagatggtgaaagccta

SEQ ID NO: 421617 - DNA, 30 bp, Artificial Sequence
  Synthetic oligonucleotide
ttacttacttaaaatagcaatacaagccta

SEQ ID NO: 421618 - DNA, 30 bp, Artificial Sequence
  Synthetic oligonucleotide
gactctaagggggtcaccgttccaagccta

SEQ ID NO: 421619 - DNA, 30 bp, Artificial Sequence
  Synthetic oligonucleotide
aacgtactgtctaaaacttgcgtaagccta

SEQ ID NO: 421620 - DNA, 30 bp, Artificial Sequence
  Synthetic oligonucleotide
ctgcatgtggtaatgtggggttgcagccta

SEQ ID NO: 421621 - DNA, 30 bp, Artificial Sequence
  Synthetic oligonucleotide
ttccgtgatagcgttagaggcctcagccta

SEQ ID NO: 421622 - DNA, 30 bp, Artificial Sequence
  Synthetic oligonucleotide
gcacggcctgcacagtgtttacagagccta

SEQ ID NO: 421623 - DNA, 30 bp, Artificial Sequence
  Synthetic oligonucleotide
gcacttatgcgtaaagtgtccacgagccta

SEQ ID NO: 421624 - DNA, 30 bp, Artificial Sequence
  Synthetic oligonucleotide
ggcccaggctgttatcgcgttacgagccta

SEQ ID NO: 421625 - DNA, 30 bp, Artificial Sequence
  Synthetic oligonucleotide
accaaaggtcattatcactcagggagccta

SEQ ID NO: 421626 - DNA, 30 bp, Artificial Sequence
  Synthetic oligonucleotide
gtgtcaggctccagcggtctgttgagccta

SEQ ID NO: 421627 - DNA, 30 bp, Artificial Sequence
  Synthetic oligonucleotide
tgggcagttcgaggcctctggattagccta

SEQ ID NO: 421628 - DNA, 30 bp, Artificial Sequence
  Synthetic oligonucleotide
gacgcgtacccaaacccaaaggaacgccta

SEQ ID NO: 421629 - DNA, 30 bp, Artificial Sequence
  Synthetic oligonucleotide
aaaactttgggatggccggcgcaccgccta

SEQ ID NO: 421630 - DNA, 30 bp, Artificial Sequence
  Synthetic oligonucleotide
agatgatggtgataaggttttgcgcgccta

SEQ ID NO: 421631 - DNA, 30 bp, Artificial Sequence
  Synthetic oligonucleotide
catggtatagagcggcgttaacggcgccta

SEQ ID NO: 421632 - DNA, 30 bp, Artificial Sequence
  Synthetic oligonucleotide
agccctgcacccctgtccggacctcgccta

SEQ ID NO: 421633 - DNA, 30 bp, Artificial Sequence
  Synthetic oligonucleotide
gggggcctcctgcacagccgatcaggccta

SEQ ID NO: 421634 - DNA, 30 bp, Artificial Sequence
  Synthetic oligonucleotide
agttttggcacaaggtgcaggtgaggccta

SEQ ID NO: 421635 - DNA, 30 bp, Artificial Sequence
  Synthetic oligonucleotide
ggtattgccgtttttcttttatacggccta

SEQ ID NO: 421636 - DNA, 30 bp, Artificial Sequence
  Synthetic oligonucleotide
tgtacagaaagttaggacgctcccggccta

SEQ ID NO: 421637 - DNA, 30 bp, Artificial Sequence
  Synthetic oligonucleotide
atcgtgctagaaatcccattctggggccta

SEQ ID NO: 421638 - DNA, 30 bp, Artificial Sequence
  Synthetic oligonucleotide
aaaacccggatcgtggactttaatggccta

SEQ ID NO: 421639 - DNA, 30 bp, Artificial Sequence
  Synthetic oligonucleotide
ttgccccgcttgtaattgcaccgtggccta

SEQ ID NO: 421640 - DNA, 30 bp, Artificial Sequence
  Synthetic oligonucleotide
agtgtaagggttagatcttggtgtggccta

SEQ ID NO: 421641 - DNA, 30 bp, Artificial Sequence
  Synthetic oligonucleotide
aagacgactaggtacgggtcgtgctgccta

SEQ ID NO: 421642 - DNA, 30 bp, Artificial Sequence
  Synthetic oligonucleotide
ctagtttgcaatattcctaacgagtgccta

SEQ ID NO: 421643 - DNA, 30 bp, Artificial Sequence
  Synthetic oligonucleotide
tgtttgtctatgctgcgacctctgtgccta

SEQ ID NO: 421644 - DNA, 30 bp, Artificial Sequence
  Synthetic oligonucleotide
gtgcgcaaacaacatgaatatatttgccta

SEQ ID NO: 421645 - DNA, 30 bp, Artificial Sequence
  Synthetic oligonucleotide
tggattggacttaaatccaattcaatccta

SEQ ID NO: 421646 - DNA, 30 bp, Artificial Sequence
  Synthetic oligonucleotide
gttttttaaacgtggacccaaggaatccta

SEQ ID NO: 421647 - DNA, 30 bp, Artificial Sequence
  Synthetic oligonucleotide
tagttactggaaggtaccatggtaatccta

SEQ ID NO: 421648 - DNA, 30 bp, Artificial Sequence
  Synthetic oligonucleotide
aagttcgtaacgatggtcgttctcatccta

SEQ ID NO: 421649 - DNA, 30 bp, Artificial Sequence
  Synthetic oligonucleotide
attcgtgtggtcccttcacttttcatccta

SEQ ID NO: 421650 - DNA, 30 bp, Artificial Sequence
  Synthetic oligonucleotide
taaccaactctcaggataccaaagatccta

SEQ ID NO: 421651 - DNA, 30 bp, Artificial Sequence
  Synthetic oligonucleotide
aacctttgggcttcgccgaacaggatccta

SEQ ID NO: 421652 - DNA, 30 bp, Artificial Sequence
  Synthetic oligonucleotide
tgttacgaaatggcaggatggtaactccta

SEQ ID NO: 421653 - DNA, 30 bp, Artificial Sequence
  Synthetic oligonucleotide
ccggggacgctccatatactgtcactccta

SEQ ID NO: 421654 - DNA, 30 bp, Artificial Sequence
  Synthetic oligonucleotide
cgatagtctatctacagcatcggactccta

SEQ ID NO: 421655 - DNA, 30 bp, Artificial Sequence
  Synthetic oligonucleotide
atttaacattaatcagaattgaacctccta

SEQ ID NO: 421656 - DNA, 30 bp, Artificial Sequence
  Synthetic oligonucleotide
tgattaattggtgtgcacagcgccctccta

SEQ ID NO: 421657 - DNA, 30 bp, Artificial Sequence
  Synthetic oligonucleotide
ttgaaccgtcctaacaagcctcgcctccta

SEQ ID NO: 421658 - DNA, 30 bp, Artificial Sequence
  Synthetic oligonucleotide
tagtgacaagtgtacggcattttcctccta

SEQ ID NO: 421659 - DNA, 30 bp, Artificial Sequence
  Synthetic oligonucleotide
ctttcaggcaaacctctaggtactctccta

SEQ ID NO: 421660 - DNA, 30 bp, Artificial Sequence
  Synthetic oligonucleotide
gacccggtaaggagaaattttcgtctccta

SEQ ID NO: 421661 - DNA, 30 bp, Artificial Sequence
  Synthetic oligonucleotide
cgtgtagctctggctccgggcttagtccta

SEQ ID NO: 421662 - DNA, 30 bp, Artificial Sequence
  Synthetic oligonucleotide
aattctagttgtggctccaaatgcgtccta

SEQ ID NO: 421663 - DNA, 30 bp, Artificial Sequence
  Synthetic oligonucleotide
tattccatatgtgcccctgacaaggtccta

SEQ ID NO: 421664 - DNA, 30 bp, Artificial Sequence
  Synthetic oligonucleotide
catttgtcgtcccgaatttagtcggtccta

SEQ ID NO: 421665 - DNA, 30 bp, Artificial Sequence
  Synthetic oligonucleotide
atcgtgacccatacattatcatgggtccta

SEQ ID NO: 421666 - DNA, 30 bp, Artificial Sequence
  Synthetic oligonucleotide
tagttctgcactctatacttttgggtccta

SEQ ID NO: 421667 - DNA, 30 bp, Artificial Sequence
  Synthetic oligonucleotide
aacaatcgaccacacggtcctttggtccta

SEQ ID NO: 421668 - DNA, 30 bp, Artificial Sequence
  Synthetic oligonucleotide
aactctacctagtagcaatcttatgtccta

SEQ ID NO: 421669 - DNA, 30 bp, Artificial Sequence
  Synthetic oligonucleotide
tagcagcttgcgacatttctataattccta

SEQ ID NO: 421670 - DNA, 30 bp, Artificial Sequence
  Synthetic oligonucleotide
gtctctgtagggagcgcgacaggattccta

SEQ ID NO: 421671 - DNA, 30 bp, Artificial Sequence
  Synthetic oligonucleotide
cctgcttgctaaccctaggaacccttccta

SEQ ID NO: 421672 - DNA, 30 bp, Artificial Sequence
  Synthetic oligonucleotide
ttgatgcaaactgagtgccctcagttccta

SEQ ID NO: 421673 - DNA, 30 bp, Artificial Sequence
  Synthetic oligonucleotide
ggagttcattagaagccggtcacgttccta

SEQ ID NO: 421674 - DNA, 30 bp, Artificial Sequence
  Synthetic oligonucleotide
ttacagcataacaagttcctttcgttccta

SEQ ID NO: 421675 - DNA, 30 bp, Artificial Sequence
  Synthetic oligonucleotide
aatgaggttctaaccgaccactggttccta

SEQ ID NO: 421676 - DNA, 30 bp, Artificial Sequence
  Synthetic oligonucleotide
cgcctttataggactcatgaggtaaagcta

SEQ ID NO: 421677 - DNA, 30 bp, Artificial Sequence
  Synthetic oligonucleotide
attgtccagacagcttgccagctcaagcta

SEQ ID NO: 421678 - DNA, 30 bp, Artificial Sequence
  Synthetic oligonucleotide
gtcggatcttttaagaactttcagaagcta

SEQ ID NO: 421679 - DNA, 30 bp, Artificial Sequence
  Synthetic oligonucleotide
gataacgttgcttaaacacactagaagcta

SEQ ID NO: 421680 - DNA, 30 bp, Artificial Sequence
  Synthetic oligonucleotide
ttgcgtctacatacctaacggacgaagcta

SEQ ID NO: 421681 - DNA, 30 bp, Artificial Sequence
  Synthetic oligonucleotide
gtcccactgttttatgggatagggaagcta

SEQ ID NO: 421682 - DNA, 30 bp, Artificial Sequence
  Synthetic oligonucleotide
tatgtctctgtagaaaagcgggataagcta

SEQ ID NO: 421683 - DNA, 30 bp, Artificial Sequence
  Synthetic oligonucleotide
tatggcttctcgaaggcttgcagtaagcta

SEQ ID NO: 421684 - DNA, 30 bp, Artificial Sequence
  Synthetic oligonucleotide
tttgttaataccggttaagcaccacagcta

SEQ ID NO: 421685 - DNA, 30 bp, Artificial Sequence
  Synthetic oligonucleotide
aaattaccttaaccgtatgtacgacagcta

SEQ ID NO: 421686 - DNA, 30 bp, Artificial Sequence
  Synthetic oligonucleotide
accccactttctaaaatctttaaccagcta

SEQ ID NO: 421687 - DNA, 30 bp, Artificial Sequence
  Synthetic oligonucleotide
ctatagaccctgtgtctaaaggaccagcta

SEQ ID NO: 421688 - DNA, 30 bp, Artificial Sequence
  Synthetic oligonucleotide
ctatcgagagggtcttgacccttgcagcta

SEQ ID NO: 421689 - DNA, 31 bp, Artificial Sequence
  Synthetic oligonucleotide
gttcacggtagttcgtcatagctgagagcta

SEQ ID NO: 421690 - DNA, 30 bp, Artificial Sequence
  Synthetic oligonucleotide
gtacagggtccctaggagcatttagagcta

SEQ ID NO: 421691 - DNA, 30 bp, Artificial Sequence
  Synthetic oligonucleotide
agaggggctctttggagacgctaggagcta

SEQ ID NO: 421692 - DNA, 30 bp, Artificial Sequence
  Synthetic oligonucleotide
tagtgctcgcgggctccgcgaatggagcta

SEQ ID NO: 421693 - DNA, 30 bp, Artificial Sequence
  Synthetic oligonucleotide
cggtttttgggaaattgccccgtatagcta

SEQ ID NO: 421694 - DNA, 30 bp, Artificial Sequence
  Synthetic oligonucleotide
acgtatggtccctccatgaaggactagcta

SEQ ID NO: 421695 - DNA, 30 bp, Artificial Sequence
  Synthetic oligonucleotide
attcggtattcggtacccgtttcctagcta

SEQ ID NO: 421696 - DNA, 30 bp, Artificial Sequence
  Synthetic oligonucleotide
aaggattgttatcgtcgatcaatctagcta

SEQ ID NO: 421697 - DNA, 30 bp, Artificial Sequence
  Synthetic oligonucleotide
gataatcaatcgcctttgaggtagtagcta

SEQ ID NO: 421698 - DNA, 30 bp, Artificial Sequence
  Synthetic oligonucleotide
ggaccatgtctgtgcggtataaattagcta

SEQ ID NO: 421699 - DNA, 30 bp, Artificial Sequence
  Synthetic oligonucleotide
aatcacacgcattgtgtcagacattagcta

SEQ ID NO: 421700 - DNA, 30 bp, Artificial Sequence
  Synthetic oligonucleotide
atgaccggacataggtatttaacaacgcta

SEQ ID NO: 421701 - DNA, 30 bp, Artificial Sequence
  Synthetic oligonucleotide
caccgaaatttattgtcgagacacacgcta

SEQ ID NO: 421702 - DNA, 30 bp, Artificial Sequence
  Synthetic oligonucleotide
atatgcgacaatccttatccatagacgcta

SEQ ID NO: 421703 - DNA, 30 bp, Artificial Sequence
  Synthetic oligonucleotide
tagggacatctgtatttacctaggacgcta

SEQ ID NO: 421704 - DNA, 30 bp, Artificial Sequence
  Synthetic oligonucleotide
catatcttcgatatgtcggttgggacgcta

SEQ ID NO: 421705 - DNA, 30 bp, Artificial Sequence
  Synthetic oligonucleotide
gaacgtggaacgtaatatcgtttgacgcta

SEQ ID NO: 421706 - DNA, 30 bp, Artificial Sequence
  Synthetic oligonucleotide
ctcatttgttttcgttcagcggatacgcta

SEQ ID NO: 421707 - DNA, 30 bp, Artificial Sequence
  Synthetic oligonucleotide
ttaaaaattctgtctataataataccgcta

SEQ ID NO: 421708 - DNA, 30 bp, Artificial Sequence
  Synthetic oligonucleotide
tgaacagggtttgtacaccgatacccgcta

SEQ ID NO: 421709 - DNA, 30 bp, Artificial Sequence
  Synthetic oligonucleotide
gatcttcgcgcccgataaatccagccgcta

SEQ ID NO: 421710 - DNA, 30 bp, Artificial Sequence
  Synthetic oligonucleotide
caaaaattctgttagcaacatactccgcta

SEQ ID NO: 421711 - DNA, 30 bp, Artificial Sequence
  Synthetic oligonucleotide
ccgtctattttcacaaggattagtccgcta

SEQ ID NO: 421712 - DNA, 30 bp, Artificial Sequence
  Synthetic oligonucleotide
ggtattatggggaccgaagcaattccgcta

SEQ ID NO: 421713 - DNA, 30 bp, Artificial Sequence
  Synthetic oligonucleotide
gtcgaccggtgacgccttactcaagcgcta

SEQ ID NO: 421714 - DNA, 30 bp, Artificial Sequence
  Synthetic oligonucleotide
tggtacaagtcacgcaaggactcagcgcta

SEQ ID NO: 421715 - DNA, 30 bp, Artificial Sequence
  Synthetic oligonucleotide
ggcagtttgatttaaccgtactcagcgcta

SEQ ID NO: 421716 - DNA, 30 bp, Artificial Sequence
  Synthetic oligonucleotide
catttgcttatcttaaatcggcgagcgcta

SEQ ID NO: 421717 - DNA, 30 bp, Artificial Sequence
  Synthetic oligonucleotide
tgggagtttagtcacaacttcgtagcgcta

SEQ ID NO: 421718 - DNA, 30 bp, Artificial Sequence
  Synthetic oligonucleotide
tagtcaaaagcggagcagtagtaggcgcta

SEQ ID NO: 421719 - DNA, 30 bp, Artificial Sequence
  Synthetic oligonucleotide
gagagtctcccagagagctaaccggcgcta

SEQ ID NO: 421720 - DNA, 30 bp, Artificial Sequence
  Synthetic oligonucleotide
tctgtacagggcctaaagtttcgggcgcta

SEQ ID NO: 421721 - DNA, 30 bp, Artificial Sequence
  Synthetic oligonucleotide
tacatacgacggttctaatcagtggcgcta

SEQ ID NO: 421722 - DNA, 30 bp, Artificial Sequence
  Synthetic oligonucleotide
cctagttttccgtgcttagctattgcgcta

SEQ ID NO: 421723 - DNA, 30 bp, Artificial Sequence
  Synthetic oligonucleotide
ttgaatgtatccgggcattcgccatcgcta

SEQ ID NO: 421724 - DNA, 30 bp, Artificial Sequence
  Synthetic oligonucleotide
atggcgtgtgggtaccgtcaaggatcgcta

SEQ ID NO: 421725 - DNA, 30 bp, Artificial Sequence
  Synthetic oligonucleotide
tgagatagtctgcccacctttggcaggcta

SEQ ID NO: 421726 - DNA, 30 bp, Artificial Sequence
  Synthetic oligonucleotide
gtatcaggtttggtacctggggagaggcta

SEQ ID NO: 421727 - DNA, 30 bp, Artificial Sequence
  Synthetic oligonucleotide
cacatatatgcggcagagcctgagaggcta

SEQ ID NO: 421728 - DNA, 30 bp, Artificial Sequence
  Synthetic oligonucleotide
tcatgcccgcctggcaaccagccgaggcta

SEQ ID NO: 421729 - DNA, 30 bp, Artificial Sequence
  Synthetic oligonucleotide
attatcagtatcggtcgggaggataggcta

SEQ ID NO: 421730 - DNA, 30 bp, Artificial Sequence
  Synthetic oligonucleotide
tcgatcactgagcggtggagatgtaggcta

SEQ ID NO: 421731 - DNA, 30 bp, Artificial Sequence
  Synthetic oligonucleotide
acggtcctcaaatgggccgtgctacggcta

SEQ ID NO: 421732 - DNA, 30 bp, Artificial Sequence
  Synthetic oligonucleotide
ctccgtaaacttgcgttgtcgcgccggcta

SEQ ID NO: 421733 - DNA, 30 bp, Artificial Sequence
  Synthetic oligonucleotide
tctggacaagaacagtgggatcgccggcta

SEQ ID NO: 421734 - DNA, 30 bp, Artificial Sequence
  Synthetic oligonucleotide
caaccgaaacgtaactcagcgttgcggcta

SEQ ID NO: 421735 - DNA, 30 bp, Artificial Sequence
  Synthetic oligonucleotide
catgggtacagttgtaatccttatcggcta

SEQ ID NO: 421736 - DNA, 31 bp, Artificial Sequence
  Synthetic oligonucleotide
cgcaggaccccccagtcagataatagggcta

SEQ ID NO: 421737 - DNA, 30 bp, Artificial Sequence
  Synthetic oligonucleotide
gtcacttctgcggtagattcaatggggcta

SEQ ID NO: 421738 - DNA, 30 bp, Artificial Sequence
  Synthetic oligonucleotide
tattaagttacttatagagttatggggcta

SEQ ID NO: 421739 - DNA, 30 bp, Artificial Sequence
  Synthetic oligonucleotide
aaaatccccaggaaaatagtgtctgggcta

SEQ ID NO: 421740 - DNA, 29 bp, Artificial Sequence
  Synthetic oligonucleotide
ttcgcatggggtgccaactataatggcta

SEQ ID NO: 421741 - DNA, 30 bp, Artificial Sequence
  Synthetic oligonucleotide
tcccgtataaggtcgtaggtgtcatggcta

SEQ ID NO: 421742 - DNA, 30 bp, Artificial Sequence
  Synthetic oligonucleotide
tttaacgaggggagcattattccctggcta

SEQ ID NO: 421743 - DNA, 30 bp, Artificial Sequence
  Synthetic oligonucleotide
acgggagttcgtattctaattaagtggcta

SEQ ID NO: 421744 - DNA, 30 bp, Artificial Sequence
  Synthetic oligonucleotide
ataggcttaaaggggttggacgagtggcta

SEQ ID NO: 421745 - DNA, 30 bp, Artificial Sequence
  Synthetic oligonucleotide
cgaatcattcacaattcgtacaggtggcta

SEQ ID NO: 421746 - DNA, 30 bp, Artificial Sequence
  Synthetic oligonucleotide
agggaggatagacggtccggggtgtggcta

SEQ ID NO: 421747 - DNA, 30 bp, Artificial Sequence
  Synthetic oligonucleotide
gctgccccaccaggaatgtttggttggcta

SEQ ID NO: 421748 - DNA, 30 bp, Artificial Sequence
  Synthetic oligonucleotide
cctcaagtggtagttggtttttcgatgcta

SEQ ID NO: 421749 - DNA, 30 bp, Artificial Sequence
  Synthetic oligonucleotide
gctattcggtacacttaaactaggatgcta

SEQ ID NO: 421750 - DNA, 31 bp, Artificial Sequence
  Synthetic oligonucleotide
accaacctagcatccagctaaattgatgcta

SEQ ID NO: 421751 - DNA, 30 bp, Artificial Sequence
  Synthetic oligonucleotide
cattacggcggttatgtttaacatatgcta

SEQ ID NO: 421752 - DNA, 30 bp, Artificial Sequence
  Synthetic oligonucleotide
ttctgaaatgtgctcgagtttcaactgcta

SEQ ID NO: 421753 - DNA, 30 bp, Artificial Sequence
  Synthetic oligonucleotide
tgcagttggtcttcccttgggtaactgcta

SEQ ID NO: 421754 - DNA, 30 bp, Artificial Sequence
  Synthetic oligonucleotide
tatggtgctttatatttgagcctgctgcta

SEQ ID NO: 421755 - DNA, 30 bp, Artificial Sequence
  Synthetic oligonucleotide
ttaggatgagcagagccggtatccgtgcta

SEQ ID NO: 421756 - DNA, 30 bp, Artificial Sequence
  Synthetic oligonucleotide
ttaaccccgtagccgcgagctggcgtgcta

SEQ ID NO: 421757 - DNA, 30 bp, Artificial Sequence
  Synthetic oligonucleotide
acaatcattcacgctaaaatttgcgtgcta

SEQ ID NO: 421758 - DNA, 30 bp, Artificial Sequence
  Synthetic oligonucleotide
tcgctcatggcagtgagggttatggtgcta

SEQ ID NO: 421759 - DNA, 30 bp, Artificial Sequence
  Synthetic oligonucleotide
gggtagcgcgcttatatttttgtggtgcta

SEQ ID NO: 421760 - DNA, 30 bp, Artificial Sequence
  Synthetic oligonucleotide
atgagtatttactcctaacgcaatgtgcta

SEQ ID NO: 421761 - DNA, 30 bp, Artificial Sequence
  Synthetic oligonucleotide
taaagttcttatcgagcaaagcatgtgcta

SEQ ID NO: 421762 - DNA, 30 bp, Artificial Sequence
  Synthetic oligonucleotide
ctaggcttggtccgagagccttctgtgcta

SEQ ID NO: 421763 - DNA, 30 bp, Artificial Sequence
  Synthetic oligonucleotide
cacgtcagaattcgacttagtagattgcta

SEQ ID NO: 421764 - DNA, 30 bp, Artificial Sequence
  Synthetic oligonucleotide
tccagcgaatccctaccgaatgtattgcta

SEQ ID NO: 421765 - DNA, 30 bp, Artificial Sequence
  Synthetic oligonucleotide
ggctttagaggtaaattgggtgagttgcta

SEQ ID NO: 421766 - DNA, 30 bp, Artificial Sequence
  Synthetic oligonucleotide
acaccgtagctgcgaattacagtgttgcta

SEQ ID NO: 421767 - DNA, 30 bp, Artificial Sequence
  Synthetic oligonucleotide
gagtcgaaggctaaagggatacttttgcta

SEQ ID NO: 421768 - DNA, 30 bp, Artificial Sequence
  Synthetic oligonucleotide
gcttacagcactttaaattcgcgaaatcta

SEQ ID NO: 421769 - DNA, 30 bp, Artificial Sequence
  Synthetic oligonucleotide
cagccttctacgcgggctgtaaacaatcta

SEQ ID NO: 421770 - DNA, 30 bp, Artificial Sequence
  Synthetic oligonucleotide
gttgcagaagactgtacggactgcaatcta

SEQ ID NO: 421771 - DNA, 30 bp, Artificial Sequence
  Synthetic oligonucleotide
ggcctgcaaccgtaccctcaggtgaatcta

SEQ ID NO: 421772 - DNA, 30 bp, Artificial Sequence
  Synthetic oligonucleotide
gtgtaccgatatggtccgcccttgaatcta

SEQ ID NO: 421773 - DNA, 30 bp, Artificial Sequence
  Synthetic oligonucleotide
gaagtaaagggcgggttttattataatcta

SEQ ID NO: 421774 - DNA, 30 bp, Artificial Sequence
  Synthetic oligonucleotide
tctattgtaaccgagccctacgttaatcta

SEQ ID NO: 421775 - DNA, 30 bp, Artificial Sequence
  Synthetic oligonucleotide
ctagtagggtaagatgctagtggacatcta

SEQ ID NO: 421776 - DNA, 30 bp, Artificial Sequence
  Synthetic oligonucleotide
tatcccgcacattaagaattaaaccatcta

SEQ ID NO: 421777 - DNA, 30 bp, Artificial Sequence
  Synthetic oligonucleotide
atgtacctactcgagcacacggtccatcta

SEQ ID NO: 421778 - DNA, 30 bp, Artificial Sequence
  Synthetic oligonucleotide
aaccgacattcatcgatcgaatcgcatcta

SEQ ID NO: 421779 - DNA, 30 bp, Artificial Sequence
  Synthetic oligonucleotide
aaagatgtgattatgagcagcgggcatcta

SEQ ID NO: 421780 - DNA, 30 bp, Artificial Sequence
  Synthetic oligonucleotide
cgcccggagtcgggtttgctgctgcatcta

SEQ ID NO: 421781 - DNA, 30 bp, Artificial Sequence
  Synthetic oligonucleotide
gttcggcatggccagcatcgcttgcatcta

SEQ ID NO: 421782 - DNA, 30 bp, Artificial Sequence
  Synthetic oligonucleotide
gcaagtatagcccttagcgctaatcatcta

SEQ ID NO: 421783 - DNA, 30 bp, Artificial Sequence
  Synthetic oligonucleotide
ggccattgcagcggaacggcaaacgatcta

SEQ ID NO: 421784 - DNA, 30 bp, Artificial Sequence
  Synthetic oligonucleotide
gttgaactaaatgttgggtttatcgatcta

SEQ ID NO: 421785 - DNA, 30 bp, Artificial Sequence
  Synthetic oligonucleotide
atggactgatcgaaatacttacaggatcta

SEQ ID NO: 421786 - DNA, 30 bp, Artificial Sequence
  Synthetic oligonucleotide
caaataacctctcacctgtacttggatcta

SEQ ID NO: 421787 - DNA, 30 bp, Artificial Sequence
  Synthetic oligonucleotide
attttgttatttgctccatcgtgtgatcta

SEQ ID NO: 421788 - DNA, 30 bp, Artificial Sequence
  Synthetic oligonucleotide
tgtctcttgatgatgtagtttattgatcta

SEQ ID NO: 421789 - DNA, 30 bp, Artificial Sequence
  Synthetic oligonucleotide
gggattgaaaggtcacttttcacctatcta

SEQ ID NO: 421790 - DNA, 30 bp, Artificial Sequence
  Synthetic oligonucleotide
tgatagtttataaaagtatttctgtatcta

SEQ ID NO: 421791 - DNA, 30 bp, Artificial Sequence
  Synthetic oligonucleotide
gagaactcaatcatagaggtcttgtatcta

SEQ ID NO: 421792 - DNA, 30 bp, Artificial Sequence
  Synthetic oligonucleotide
aacagacaccccaaagtgaccgcttatcta

SEQ ID NO: 421793 - DNA, 30 bp, Artificial Sequence
  Synthetic oligonucleotide
attgatgcacgcatcactcaactttatcta

SEQ ID NO: 421794 - DNA, 30 bp, Artificial Sequence
  Synthetic oligonucleotide
ggaattagaatttaggcctatgaaactcta

SEQ ID NO: 421795 - DNA, 30 bp, Artificial Sequence
  Synthetic oligonucleotide
gttagtgccgtgaactaacgactaactcta

SEQ ID NO: 421796 - DNA, 30 bp, Artificial Sequence
  Synthetic oligonucleotide
tatgccgcgggtcaacgagttgtaactcta

SEQ ID NO: 421797 - DNA, 30 bp, Artificial Sequence
  Synthetic oligonucleotide
taaacacgtggaaccctccataggactcta

SEQ ID NO: 421798 - DNA, 30 bp, Artificial Sequence
  Synthetic oligonucleotide
gaatttattaaacatgtagccttgactcta

SEQ ID NO: 421799 - DNA, 30 bp, Artificial Sequence
  Synthetic oligonucleotide
ttgcagtcgatctcttagtctttgactcta

SEQ ID NO: 421800 - DNA, 30 bp, Artificial Sequence
  Synthetic oligonucleotide
tggcgcaattagggttaccagggtactcta

SEQ ID NO: 421801 - DNA, 30 bp, Artificial Sequence
  Synthetic oligonucleotide
agtacgtgacggtactatgctaaacctcta

SEQ ID NO: 421802 - DNA, 30 bp, Artificial Sequence
  Synthetic oligonucleotide
atcgtcttttttgggggttaatctcctcta

SEQ ID NO: 421803 - DNA, 30 bp, Artificial Sequence
  Synthetic oligonucleotide
gcgcggctaggatcacggtttggagctcta

SEQ ID NO: 421804 - DNA, 30 bp, Artificial Sequence
  Synthetic oligonucleotide
ggttgttagattctgggctcgttagctcta

SEQ ID NO: 421805 - DNA, 30 bp, Artificial Sequence
  Synthetic oligonucleotide
atcatccggcgtatccgcacaggcgctcta

SEQ ID NO: 421806 - DNA, 30 bp, Artificial Sequence
  Synthetic oligonucleotide
acgagtttggcgattttgagtgaggctcta

SEQ ID NO: 421807 - DNA, 30 bp, Artificial Sequence
  Synthetic oligonucleotide
gttaagtaggttcggtatactcgggctcta

SEQ ID NO: 421808 - DNA, 30 bp, Artificial Sequence
  Synthetic oligonucleotide
gagtggacgtagttccaggttatggctcta

SEQ ID NO: 421809 - DNA, 30 bp, Artificial Sequence
  Synthetic oligonucleotide
ctttaaacatagaattcaggagctgctcta

SEQ ID NO: 421810 - DNA, 30 bp, Artificial Sequence
  Synthetic oligonucleotide
atttactgaacttcgaacggcagctctcta

SEQ ID NO: 421811 - DNA, 30 bp, Artificial Sequence
  Synthetic oligonucleotide
gtaaaggcgaagtacagagccggctctcta

SEQ ID NO: 421812 - DNA, 30 bp, Artificial Sequence
  Synthetic oligonucleotide
aaaaaaccgttgtcacaccgtcagtctcta

SEQ ID NO: 421813 - DNA, 30 bp, Artificial Sequence
  Synthetic oligonucleotide
gttcatggatattcggtacaatattctcta

SEQ ID NO: 421814 - DNA, 30 bp, Artificial Sequence
  Synthetic oligonucleotide
cgctaaaccgtgtaacggtccatttctcta

SEQ ID NO: 421815 - DNA, 30 bp, Artificial Sequence
  Synthetic oligonucleotide
gattaccctcctcacaggaggaaaagtcta

SEQ ID NO: 421816 - DNA, 30 bp, Artificial Sequence
  Synthetic oligonucleotide
tatgagactcacactactagtaaaagtcta

SEQ ID NO: 421817 - DNA, 30 bp, Artificial Sequence
  Synthetic oligonucleotide
agaacgtaggttaatagactatgaagtcta

SEQ ID NO: 421818 - DNA, 30 bp, Artificial Sequence
  Synthetic oligonucleotide
aattcagcagaacgcactgcgataagtcta

SEQ ID NO: 421819 - DNA, 30 bp, Artificial Sequence
  Synthetic oligonucleotide
accaatgttaagacggcatggtacagtcta

SEQ ID NO: 421820 - DNA, 30 bp, Artificial Sequence
  Synthetic oligonucleotide
tcgcgtacattaaattgcgctttgagtcta

SEQ ID NO: 421821 - DNA, 30 bp, Artificial Sequence
  Synthetic oligonucleotide
agctctgaaagacataatgatgatagtcta

SEQ ID NO: 421822 - DNA, 30 bp, Artificial Sequence
  Synthetic oligonucleotide
ctacgaacgatgcggtagacgcgtagtcta

SEQ ID NO: 421823 - DNA, 30 bp, Artificial Sequence
  Synthetic oligonucleotide
tgaccgattcatgacgggaagtgtagtcta

SEQ ID NO: 421824 - DNA, 30 bp, Artificial Sequence
  Synthetic oligonucleotide
ttacaggcccctggtgggtatgttagtcta

SEQ ID NO: 421825 - DNA, 30 bp, Artificial Sequence
  Synthetic oligonucleotide
gatgccgctaggcgtagagggatacgtcta

SEQ ID NO: 421826 - DNA, 30 bp, Artificial Sequence
  Synthetic oligonucleotide
tgtgtgtagtacgacagctatttacgtcta

SEQ ID NO: 421827 - DNA, 30 bp, Artificial Sequence
  Synthetic oligonucleotide
tatgtcgcatcaagatgctatgagcgtcta

SEQ ID NO: 421828 - DNA, 30 bp, Artificial Sequence
  Synthetic oligonucleotide
acaagtacgaacagccactgtcatcgtcta

SEQ ID NO: 421829 - DNA, 30 bp, Artificial Sequence
  Synthetic oligonucleotide
tgttaatcttgcgttaataaagatcgtcta

SEQ ID NO: 421830 - DNA, 30 bp, Artificial Sequence
  Synthetic oligonucleotide
cccaattaggtaagctattagactcgtcta

SEQ ID NO: 421831 - DNA, 30 bp, Artificial Sequence
  Synthetic oligonucleotide
actgtatagcactagttcagttaaggtcta

SEQ ID NO: 421832 - DNA, 30 bp, Artificial Sequence
  Synthetic oligonucleotide
atgcataggccagttcccacgtcaggtcta

SEQ ID NO: 421833 - DNA, 30 bp, Artificial Sequence
  Synthetic oligonucleotide
atactttggaaaattgagttagtaggtcta

SEQ ID NO: 421834 - DNA, 30 bp, Artificial Sequence
  Synthetic oligonucleotide
attgtggttctaaggtgagagtacggtcta

SEQ ID NO: 421835 - DNA, 29 bp, Artificial Sequence
  Synthetic oligonucleotide
ggggggaaaggcgaacttgacccggtcta

SEQ ID NO: 421836 - DNA, 30 bp, Artificial Sequence
  Synthetic oligonucleotide
gtccgactgtatcacacctcgaggggtcta

SEQ ID NO: 421837 - DNA, 30 bp, Artificial Sequence
  Synthetic oligonucleotide
aataataggtaaaaccctacgttatgtcta

SEQ ID NO: 421838 - DNA, 30 bp, Artificial Sequence
  Synthetic oligonucleotide
acccgtgttctggttcgctatacctgtcta

SEQ ID NO: 421839 - DNA, 30 bp, Artificial Sequence
  Synthetic oligonucleotide
tccccgtgtgtacattcacggaagtgtcta

SEQ ID NO: 421840 - DNA, 30 bp, Artificial Sequence
  Synthetic oligonucleotide
attcaacctcggtcgatcaaaacgtgtcta

SEQ ID NO: 421841 - DNA, 30 bp, Artificial Sequence
  Synthetic oligonucleotide
ggttaattttcctaagattggaggtgtcta

SEQ ID NO: 421842 - DNA, 30 bp, Artificial Sequence
  Synthetic oligonucleotide
ttctaaggcctacttccgcagaattgtcta

SEQ ID NO: 421843 - DNA, 30 bp, Artificial Sequence
  Synthetic oligonucleotide
ccttttggttgggcttgggcagattgtcta

SEQ ID NO: 421844 - DNA, 30 bp, Artificial Sequence
  Synthetic oligonucleotide
gtaggacaaggcgatcttactccttgtcta

SEQ ID NO: 421845 - DNA, 30 bp, Artificial Sequence
  Synthetic oligonucleotide
tagtagggtggcttgggggttgcttgtcta

SEQ ID NO: 421846 - DNA, 30 bp, Artificial Sequence
  Synthetic oligonucleotide
gacagacgcgctatccattcgggttgtcta

SEQ ID NO: 421847 - DNA, 30 bp, Artificial Sequence
  Synthetic oligonucleotide
ttgtgtatcagaggtagaatagtttgtcta

SEQ ID NO: 421848 - DNA, 30 bp, Artificial Sequence
  Synthetic oligonucleotide
tttgcgataaattatctgctcttttgtcta

SEQ ID NO: 421849 - DNA, 30 bp, Artificial Sequence
  Synthetic oligonucleotide
tacttgattgacgagtcgtattaaattcta

SEQ ID NO: 421850 - DNA, 30 bp, Artificial Sequence
  Synthetic oligonucleotide
ggtgacgacattagaacctgtaacattcta

SEQ ID NO: 421851 - DNA, 30 bp, Artificial Sequence
  Synthetic oligonucleotide
cctcaatcagacgaaggattaaagattcta

SEQ ID NO: 421852 - DNA, 30 bp, Artificial Sequence
  Synthetic oligonucleotide
tacgagcagtggattcatgacaagattcta

SEQ ID NO: 421853 - DNA, 30 bp, Artificial Sequence
  Synthetic oligonucleotide
ctgctgtctttaacggagaagccgattcta

SEQ ID NO: 421854 - DNA, 30 bp, Artificial Sequence
  Synthetic oligonucleotide
gtttccacttcaatggattcgtcgattcta

SEQ ID NO: 421855 - DNA, 30 bp, Artificial Sequence
  Synthetic oligonucleotide
atgacttaacattctaggtcacggattcta

SEQ ID NO: 421856 - DNA, 30 bp, Artificial Sequence
  Synthetic oligonucleotide
taaactaaatgtaatacggtgtggattcta

SEQ ID NO: 421857 - DNA, 30 bp, Artificial Sequence
  Synthetic oligonucleotide
taggacaggcgggggacgcatgctattcta

SEQ ID NO: 421858 - DNA, 30 bp, Artificial Sequence
  Synthetic oligonucleotide
ttacagccgtctcaaggtcctgctattcta

SEQ ID NO: 421859 - DNA, 30 bp, Artificial Sequence
  Synthetic oligonucleotide
ctttcatacgatacggggcgacgtattcta

SEQ ID NO: 421860 - DNA, 30 bp, Artificial Sequence
  Synthetic oligonucleotide
gccctatggactccgggcatacttattcta

SEQ ID NO: 421861 - DNA, 30 bp, Artificial Sequence
  Synthetic oligonucleotide
gctctcagtttccctagactagttattcta

SEQ ID NO: 421862 - DNA, 30 bp, Artificial Sequence
  Synthetic oligonucleotide
tggataaacttaagtaaaggggaacttcta

SEQ ID NO: 421863 - DNA, 30 bp, Artificial Sequence
  Synthetic oligonucleotide
gaacacagccgcacgccggtggcacttcta

SEQ ID NO: 421864 - DNA, 30 bp, Artificial Sequence
  Synthetic oligonucleotide
gcatggacataatagaccccggagcttcta

SEQ ID NO: 421865 - DNA, 30 bp, Artificial Sequence
  Synthetic oligonucleotide
caaatgaccgttggcaggggcgctcttcta

SEQ ID NO: 421866 - DNA, 30 bp, Artificial Sequence
  Synthetic oligonucleotide
tatcatagcgcgcgatcgtcccaagttcta

SEQ ID NO: 421867 - DNA, 30 bp, Artificial Sequence
  Synthetic oligonucleotide
gtgactgtaatccaatcgataccagttcta

SEQ ID NO: 421868 - DNA, 30 bp, Artificial Sequence
  Synthetic oligonucleotide
tgggcggtcgaattccattcggcagttcta

SEQ ID NO: 421869 - DNA, 30 bp, Artificial Sequence
  Synthetic oligonucleotide
ttcatgtacgtcacttgagctcgagttcta

SEQ ID NO: 421870 - DNA, 30 bp, Artificial Sequence
  Synthetic oligonucleotide
actttcatggcgggggatatggtagttcta

SEQ ID NO: 421871 - DNA, 30 bp, Artificial Sequence
  Synthetic oligonucleotide
gcatagattgctttcggaccacgcgttcta

SEQ ID NO: 421872 - DNA, 30 bp, Artificial Sequence
  Synthetic oligonucleotide
agtatcaatattctgcacactcgggttcta

SEQ ID NO: 421873 - DNA, 30 bp, Artificial Sequence
  Synthetic oligonucleotide
cgtcacgtagcacatatggcctttgttcta

SEQ ID NO: 421874 - DNA, 30 bp, Artificial Sequence
  Synthetic oligonucleotide
ctcgcggcgtgaacatgatcacaatttcta

SEQ ID NO: 421875 - DNA, 30 bp, Artificial Sequence
  Synthetic oligonucleotide
accccttcaacaacacgcttacaatttcta

SEQ ID NO: 421876 - DNA, 30 bp, Artificial Sequence
  Synthetic oligonucleotide
atctaaatctacacggcctgaggatttcta

SEQ ID NO: 421877 - DNA, 30 bp, Artificial Sequence
  Synthetic oligonucleotide
cctgcgcaatttcagcagccggcctttcta

SEQ ID NO: 421878 - DNA, 30 bp, Artificial Sequence
  Synthetic oligonucleotide
cccctctctgtctcttgtttctcttttcta

SEQ ID NO: 421879 - DNA, 30 bp, Artificial Sequence
  Synthetic oligonucleotide
catcgcgcttatgaatgctctaaaaaagta

SEQ ID NO: 421880 - DNA, 26 bp, Artificial Sequence
  Synthetic oligonucleotide
gcgcagccgctcgactcgtaaaagta

SEQ ID NO: 421881 - DNA, 30 bp, Artificial Sequence
  Synthetic oligonucleotide
gattagcttcccagagacattaacaaagta

SEQ ID NO: 421882 - DNA, 30 bp, Artificial Sequence
  Synthetic oligonucleotide
ttgggaatgtgataacattccaccaaagta

SEQ ID NO: 421883 - DNA, 29 bp, Artificial Sequence
  Synthetic oligonucleotide
gtacgacgcgtgcctgttccggcaaagta

SEQ ID NO: 421884 - DNA, 30 bp, Artificial Sequence
  Synthetic oligonucleotide
cacagggtacttaccccacgctgcaaagta

SEQ ID NO: 421885 - DNA, 30 bp, Artificial Sequence
  Synthetic oligonucleotide
cggccggcttttatggaactcaggaaagta

SEQ ID NO: 421886 - DNA, 30 bp, Artificial Sequence
  Synthetic oligonucleotide
cggcgccatgggctagcgccactgaaagta

SEQ ID NO: 421887 - DNA, 30 bp, Artificial Sequence
  Synthetic oligonucleotide
acgagttccaccgcacatgtagaccaagta

SEQ ID NO: 421888 - DNA, 30 bp, Artificial Sequence
  Synthetic oligonucleotide
tgcgggtaatctaattgtccggagcaagta

SEQ ID NO: 421889 - DNA, 30 bp, Artificial Sequence
  Synthetic oligonucleotide
cgagtcgccaaacccgtcaaagatcaagta

SEQ ID NO: 421890 - DNA, 30 bp, Artificial Sequence
  Synthetic oligonucleotide
ttcctcaatcgtttacacgtgactcaagta

SEQ ID NO: 421891 - DNA, 30 bp, Artificial Sequence
  Synthetic oligonucleotide
aaaagtcttcaaggctccaagtctcaagta

SEQ ID NO: 421892 - DNA, 30 bp, Artificial Sequence
  Synthetic oligonucleotide
aggtttctccgcgttagcaacggagaagta

SEQ ID NO: 421893 - DNA, 30 bp, Artificial Sequence
  Synthetic oligonucleotide
ctttccatatggccggtatctctagaagta

SEQ ID NO: 421894 - DNA, 30 bp, Artificial Sequence
  Synthetic oligonucleotide
tattcgggctcctcgtgagtaacggaagta

SEQ ID NO: 421895 - DNA, 30 bp, Artificial Sequence
  Synthetic oligonucleotide
gaaggctcattatttccgaggcgataagta

SEQ ID NO: 421896 - DNA, 30 bp, Artificial Sequence
  Synthetic oligonucleotide
taacaaaggctctgtccacaggcctaagta

SEQ ID NO: 421897 - DNA, 30 bp, Artificial Sequence
  Synthetic oligonucleotide
atatctgattcgtgtacggagatctaagta

SEQ ID NO: 421898 - DNA, 30 bp, Artificial Sequence
  Synthetic oligonucleotide
ctagttttcttaccatcgcccctctaagta

SEQ ID NO: 421899 - DNA, 30 bp, Artificial Sequence
  Synthetic oligonucleotide
ttgatttaggctagtttcgcattctaagta

SEQ ID NO: 421900 - DNA, 30 bp, Artificial Sequence
  Synthetic oligonucleotide
ttgtgggagctgactacctatccgtaagta

SEQ ID NO: 421901 - DNA, 30 bp, Artificial Sequence
  Synthetic oligonucleotide
aaattcatcgctggtaagtttccgtaagta

SEQ ID NO: 421902 - DNA, 30 bp, Artificial Sequence
  Synthetic oligonucleotide
gaataggtcgtgattcaacttgggtaagta

SEQ ID NO: 421903 - DNA, 30 bp, Artificial Sequence
  Synthetic oligonucleotide
cagagtaacccgtacatatcgtggtaagta

SEQ ID NO: 421904 - DNA, 30 bp, Artificial Sequence
  Synthetic oligonucleotide
tttgccacggtcttctagacagtgtaagta

SEQ ID NO: 421905 - DNA, 30 bp, Artificial Sequence
  Synthetic oligonucleotide
tttggtcattgaaacatatgttccacagta

SEQ ID NO: 421906 - DNA, 30 bp, Artificial Sequence
  Synthetic oligonucleotide
tggtacaaggctctgagccaccgcacagta

SEQ ID NO: 421907 - DNA, 30 bp, Artificial Sequence
  Synthetic oligonucleotide
tagatattcagggcaaaacgcttcacagta

SEQ ID NO: 421908 - DNA, 30 bp, Artificial Sequence
  Synthetic oligonucleotide
atttttagggaaattgtcgacgcaccagta

SEQ ID NO: 421909 - DNA, 30 bp, Artificial Sequence
  Synthetic oligonucleotide
ttccgaagacgcagtcgctttagaccagta

SEQ ID NO: 421910 - DNA, 30 bp, Artificial Sequence
  Synthetic oligonucleotide
ttaataattaggacggatcacggaccagta

SEQ ID NO: 421911 - DNA, 30 bp, Artificial Sequence
  Synthetic oligonucleotide
gcagaaaattaccgtgggggaaacccagta

SEQ ID NO: 421912 - DNA, 30 bp, Artificial Sequence
  Synthetic oligonucleotide
tctggtgctgctgatcacctgtgcccagta

SEQ ID NO: 421913 - DNA, 30 bp, Artificial Sequence
  Synthetic oligonucleotide
gtagttttgttatacgtgaggttcccagta

SEQ ID NO: 421914 - DNA, 30 bp, Artificial Sequence
  Synthetic oligonucleotide
ctgttatgttagcaactacttactccagta

SEQ ID NO: 421915 - DNA, 30 bp, Artificial Sequence
  Synthetic oligonucleotide
aaatgggcagccttgcaggctagtccagta

SEQ ID NO: 421916 - DNA, 30 bp, Artificial Sequence
  Synthetic oligonucleotide
tgaatttgtaattcagcagggtaagcagta

SEQ ID NO: 421917 - DNA, 30 bp, Artificial Sequence
  Synthetic oligonucleotide
ggcgagtgttaatatcttccaggagcagta

SEQ ID NO: 421918 - DNA, 30 bp, Artificial Sequence
  Synthetic oligonucleotide
ttcggggtcttatgctattcacacgcagta

SEQ ID NO: 421919 - DNA, 30 bp, Artificial Sequence
  Synthetic oligonucleotide
gtaggaactgtgggtgttagacccgcagta

SEQ ID NO: 421920 - DNA, 30 bp, Artificial Sequence
  Synthetic oligonucleotide
agaataggtatcatcccatcttccgcagta

SEQ ID NO: 421921 - DNA, 30 bp, Artificial Sequence
  Synthetic oligonucleotide
gctgactgtcagagaggcgttcatgcagta

SEQ ID NO: 421922 - DNA, 30 bp, Artificial Sequence
  Synthetic oligonucleotide
gagcacgaccttcaaatgccggatgcagta

SEQ ID NO: 421923 - DNA, 30 bp, Artificial Sequence
  Synthetic oligonucleotide
cattttgccaatatcttctgttaatcagta

SEQ ID NO: 421924 - DNA, 30 bp, Artificial Sequence
  Synthetic oligonucleotide
ggcatcaagtgcatgggaaataactcagta

SEQ ID NO: 421925 - DNA, 30 bp, Artificial Sequence
  Synthetic oligonucleotide
catatcgttatccatggcattccctcagta

SEQ ID NO: 421926 - DNA, 30 bp, Artificial Sequence
  Synthetic oligonucleotide
agaagtgtcacacgcgactagtcctcagta

SEQ ID NO: 421927 - DNA, 30 bp, Artificial Sequence
  Synthetic oligonucleotide
tcttacggaaagccgacctgactgtcagta

SEQ ID NO: 421928 - DNA, 30 bp, Artificial Sequence
  Synthetic oligonucleotide
ttggaatgtttgcgccgcgcctcttcagta

SEQ ID NO: 421929 - DNA, 30 bp, Artificial Sequence
  Synthetic oligonucleotide
attcggacaagggagaagatgttttcagta

SEQ ID NO: 421930 - DNA, 30 bp, Artificial Sequence
  Synthetic oligonucleotide
tatatatggagctacagtatcaaaagagta

SEQ ID NO: 421931 - DNA, 30 bp, Artificial Sequence
  Synthetic oligonucleotide
caaagtacggcaatatgtaatcgcagagta

SEQ ID NO: 421932 - DNA, 30 bp, Artificial Sequence
  Synthetic oligonucleotide
ggggtacactgccgttctagtcgcagagta

SEQ ID NO: 421933 - DNA, 30 bp, Artificial Sequence
  Synthetic oligonucleotide
aatccaacttcttgctcgtgctcgagagta

SEQ ID NO: 421934 - DNA, 30 bp, Artificial Sequence
  Synthetic oligonucleotide
tgtttacatcggccattcgtaatgagagta

SEQ ID NO: 421935 - DNA, 30 bp, Artificial Sequence
  Synthetic oligonucleotide
tgatcgcttgttacggacgtcggtagagta

SEQ ID NO: 421936 - DNA, 30 bp, Artificial Sequence
  Synthetic oligonucleotide
tttctgacagcttaagtcccgcgacgagta

SEQ ID NO: 421937 - DNA, 30 bp, Artificial Sequence
  Synthetic oligonucleotide
gcttatttgtgacgccggcgaccccgagta

SEQ ID NO: 421938 - DNA, 30 bp, Artificial Sequence
  Synthetic oligonucleotide
tccacccgtggtaaaaggtccccccgagta

SEQ ID NO: 421939 - DNA, 30 bp, Artificial Sequence
  Synthetic oligonucleotide
cgttacctggagcgtttaaagagcggagta

SEQ ID NO: 421940 - DNA, 30 bp, Artificial Sequence
  Synthetic oligonucleotide
gctgcaaccacgtcaaaaagtttcggagta

SEQ ID NO: 421941 - DNA, 30 bp, Artificial Sequence
  Synthetic oligonucleotide
ctatttggcctggtgctcacagtgggagta

SEQ ID NO: 421942 - DNA, 30 bp, Artificial Sequence
  Synthetic oligonucleotide
cattttaggtatggtatctagttatgagta

SEQ ID NO: 421943 - DNA, 30 bp, Artificial Sequence
  Synthetic oligonucleotide
gctcactcactttggtgtaaaatctgagta

SEQ ID NO: 421944 - DNA, 30 bp, Artificial Sequence
  Synthetic oligonucleotide
tgcaaagtattacggaggatagtctgagta

SEQ ID NO: 421945 - DNA, 30 bp, Artificial Sequence
  Synthetic oligonucleotide
tcccttgttgtttaatgctcatagtgagta

SEQ ID NO: 421946 - DNA, 30 bp, Artificial Sequence
  Synthetic oligonucleotide
tccagcttttcagctataactatgtgagta

SEQ ID NO: 421947 - DNA, 30 bp, Artificial Sequence
  Synthetic oligonucleotide
gggcccggcgtcttattagaatattgagta

SEQ ID NO: 421948 - DNA, 30 bp, Artificial Sequence
  Synthetic oligonucleotide
agccgtcggcgcacaacgttctattgagta

SEQ ID NO: 421949 - DNA, 30 bp, Artificial Sequence
  Synthetic oligonucleotide
ccgaacgagcatgtttccgagtcttgagta

SEQ ID NO: 421950 - DNA, 30 bp, Artificial Sequence
  Synthetic oligonucleotide
gcaatcctcggttcgggcccacgttgagta

SEQ ID NO: 421951 - DNA, 30 bp, Artificial Sequence
  Synthetic oligonucleotide
tgcgccgcgacgtataccaaggtaatagta

SEQ ID NO: 421952 - DNA, 30 bp, Artificial Sequence
  Synthetic oligonucleotide
taaaaatgaccattctagtggcccatagta

SEQ ID NO: 421953 - DNA, 30 bp, Artificial Sequence
  Synthetic oligonucleotide
cttgacggaattgaatagggccgcatagta

SEQ ID NO: 421954 - DNA, 30 bp, Artificial Sequence
  Synthetic oligonucleotide
atcaccctactgcagagggacgggatagta

SEQ ID NO: 421955 - DNA, 30 bp, Artificial Sequence
  Synthetic oligonucleotide
aacatctgcctcctacgtatggtgatagta

SEQ ID NO: 421956 - DNA, 30 bp, Artificial Sequence
  Synthetic oligonucleotide
tgtctcgccgcgatctaaaacttgatagta

SEQ ID NO: 421957 - DNA, 30 bp, Artificial Sequence
  Synthetic oligonucleotide
attaattcagaaggctagggggcactagta

SEQ ID NO: 421958 - DNA, 30 bp, Artificial Sequence
  Synthetic oligonucleotide
gccgcttgcatatgttaggcgaccctagta

SEQ ID NO: 421959 - DNA, 30 bp, Artificial Sequence
  Synthetic oligonucleotide
atcaaaggttatgcatagtggctcctagta

SEQ ID NO: 421960 - DNA, 30 bp, Artificial Sequence
  Synthetic oligonucleotide
acaatttgcttactgaaaggtaagctagta

SEQ ID NO: 421961 - DNA, 30 bp, Artificial Sequence
  Synthetic oligonucleotide
ggtgttcgcagtttccaagaaaatctagta

SEQ ID NO: 421962 - DNA, 30 bp, Artificial Sequence
  Synthetic oligonucleotide
cacaggataggtgggtaccaccatctagta

SEQ ID NO: 421963 - DNA, 30 bp, Artificial Sequence
  Synthetic oligonucleotide
gagtccgtacaaaggcccccacttctagta

SEQ ID NO: 421964 - DNA, 30 bp, Artificial Sequence
  Synthetic oligonucleotide
acctctcaataaaaatatgtcgttctagta

SEQ ID NO: 421965 - DNA, 30 bp, Artificial Sequence
  Synthetic oligonucleotide
ttggtagctggtaacgcgtgttacgtagta

SEQ ID NO: 421966 - DNA, 30 bp, Artificial Sequence
  Synthetic oligonucleotide
tatgccgtgcacgattagcggcgcgtagta

SEQ ID NO: 421967 - DNA, 30 bp, Artificial Sequence
  Synthetic oligonucleotide
aagaaaccgcgacatggcatcctcgtagta

SEQ ID NO: 421968 - DNA, 30 bp, Artificial Sequence
  Synthetic oligonucleotide
attgcggcatgtggtttggcggcggtagta

SEQ ID NO: 421969 - DNA, 30 bp, Artificial Sequence
  Synthetic oligonucleotide
aggctggagcatacattccgtagggtagta

SEQ ID NO: 421970 - DNA, 30 bp, Artificial Sequence
  Synthetic oligonucleotide
atctcggccgtaatggaggttcatgtagta

SEQ ID NO: 421971 - DNA, 30 bp, Artificial Sequence
  Synthetic oligonucleotide
gtgtgtgagtagcagacatacaaattagta

SEQ ID NO: 421972 - DNA, 30 bp, Artificial Sequence
  Synthetic oligonucleotide
cgtacctaaatttgggcggactcattagta

SEQ ID NO: 421973 - DNA, 30 bp, Artificial Sequence
  Synthetic oligonucleotide
acctctgtctcagcgcactattcattagta

SEQ ID NO: 421974 - DNA, 30 bp, Artificial Sequence
  Synthetic oligonucleotide
gcttgcggctttttagggcctaacttagta

SEQ ID NO: 421975 - DNA, 30 bp, Artificial Sequence
  Synthetic oligonucleotide
aatgtcttacagccatggcagcacttagta

SEQ ID NO: 421976 - DNA, 30 bp, Artificial Sequence
  Synthetic oligonucleotide
tagagaggcagaaaccctaaagtcttagta

SEQ ID NO: 421977 - DNA, 30 bp, Artificial Sequence
  Synthetic oligonucleotide
gagcagcaccttttagtacggtagttagta

SEQ ID NO: 421978 - DNA, 30 bp, Artificial Sequence
  Synthetic oligonucleotide
atagagacttagataatctattcgttagta

SEQ ID NO: 421979 - DNA, 30 bp, Artificial Sequence
  Synthetic oligonucleotide
gatgattactcaggtaaattatctttagta

SEQ ID NO: 421980 - DNA, 30 bp, Artificial Sequence
  Synthetic oligonucleotide
tattgggaaagttctacagtaggaaacgta

SEQ ID NO: 421981 - DNA, 30 bp, Artificial Sequence
  Synthetic oligonucleotide
agaccatggtccgcatgttcagataacgta

SEQ ID NO: 421982 - DNA, 30 bp, Artificial Sequence
  Synthetic oligonucleotide
aacggtggatgtggctgagttgataacgta

SEQ ID NO: 421983 - DNA, 30 bp, Artificial Sequence
  Synthetic oligonucleotide
ttaatatgctcactttcacaatttaacgta

SEQ ID NO: 421984 - DNA, 30 bp, Artificial Sequence
  Synthetic oligonucleotide
cttacttgtggcgtctcgactttacacgta

SEQ ID NO: 421985 - DNA, 30 bp, Artificial Sequence
  Synthetic oligonucleotide
aattcggccatgcaattacggtgccacgta

SEQ ID NO: 421986 - DNA, 30 bp, Artificial Sequence
  Synthetic oligonucleotide
gggacttgattgtaggatgcagtccacgta

SEQ ID NO: 421987 - DNA, 30 bp, Artificial Sequence
  Synthetic oligonucleotide
gcagatgccgtcagtgtgtagacgcacgta

SEQ ID NO: 421988 - DNA, 30 bp, Artificial Sequence
  Synthetic oligonucleotide
gagtgtgggcaggagtacattcgtcacgta

SEQ ID NO: 421989 - DNA, 30 bp, Artificial Sequence
  Synthetic oligonucleotide
tagggagacttatagacaactatagacgta

SEQ ID NO: 421990 - DNA, 30 bp, Artificial Sequence
  Synthetic oligonucleotide
agcaagaacgtcgcccagtaggaggacgta

SEQ ID NO: 421991 - DNA, 30 bp, Artificial Sequence
  Synthetic oligonucleotide
ccacagcggcatacatagagtcatgacgta

SEQ ID NO: 421992 - DNA, 30 bp, Artificial Sequence
  Synthetic oligonucleotide
gaatttagcacaaatgtccgcactgacgta

SEQ ID NO: 421993 - DNA, 30 bp, Artificial Sequence
  Synthetic oligonucleotide
caatccacgcacttgacgcgcactgacgta

SEQ ID NO: 421994 - DNA, 30 bp, Artificial Sequence
  Synthetic oligonucleotide
acgcacctgattcagcaaggctgatacgta

SEQ ID NO: 421995 - DNA, 30 bp, Artificial Sequence
  Synthetic oligonucleotide
atttgagcctgcgcacggtggtgctacgta

SEQ ID NO: 421996 - DNA, 30 bp, Artificial Sequence
  Synthetic oligonucleotide
gcgcataacgaccttctatattcgtacgta

SEQ ID NO: 421997 - DNA, 30 bp, Artificial Sequence
  Synthetic oligonucleotide
cacctggacgtggtaccaatgaggtacgta

SEQ ID NO: 421998 - DNA, 30 bp, Artificial Sequence
  Synthetic oligonucleotide
agggattaagcccccgcccgtaggtacgta

SEQ ID NO: 421999 - DNA, 30 bp, Artificial Sequence
  Synthetic oligonucleotide
aatccggccattacgggatgtgtgtacgta

SEQ ID NO: 422000 - DNA, 30 bp, Artificial Sequence
  Synthetic oligonucleotide
tgccgcggcaactgtgacactagttacgta

SEQ ID NO: 422001 - DNA, 30 bp, Artificial Sequence
  Synthetic oligonucleotide
atagcttagccgcacacggaatgttacgta

SEQ ID NO: 422002 - DNA, 30 bp, Artificial Sequence
  Synthetic oligonucleotide
gtccggaaaaatcttgtattccgcaccgta

SEQ ID NO: 422003 - DNA, 30 bp, Artificial Sequence
  Synthetic oligonucleotide
tttatagatcccgattacagagtcaccgta

SEQ ID NO: 422004 - DNA, 30 bp, Artificial Sequence
  Synthetic oligonucleotide
tttaatttttaatcaagatcatggaccgta

SEQ ID NO: 422005 - DNA, 31 bp, Artificial Sequence
  Synthetic oligonucleotide
aatcgtttaggcaaggccaggtcataccgta

SEQ ID NO: 422006 - DNA, 30 bp, Artificial Sequence
  Synthetic oligonucleotide
gtattttgaagaaagtccagacggcccgta

SEQ ID NO: 422007 - DNA, 30 bp, Artificial Sequence
  Synthetic oligonucleotide
tcgcggcatcgactggtaagtgggcccgta

SEQ ID NO: 422008 - DNA, 30 bp, Artificial Sequence
  Synthetic oligonucleotide
tgtacgaagagggtaagattgcgtcccgta

SEQ ID NO: 422009 - DNA, 30 bp, Artificial Sequence
  Synthetic oligonucleotide
ctcgcgcacgaaagcctcgaggcagccgta

SEQ ID NO: 422010 - DNA, 30 bp, Artificial Sequence
  Synthetic oligonucleotide
ataaagcaatctacttagtggcagtccgta

SEQ ID NO: 422011 - DNA, 30 bp, Artificial Sequence
  Synthetic oligonucleotide
aacaaagtcggggaaccatgccattccgta

SEQ ID NO: 422012 - DNA, 30 bp, Artificial Sequence
  Synthetic oligonucleotide
catacgggcatatacataacctattccgta

SEQ ID NO: 422013 - DNA, 30 bp, Artificial Sequence
  Synthetic oligonucleotide
aggacgctggccacagcgctgtgttccgta

SEQ ID NO: 422014 - DNA, 30 bp, Artificial Sequence
  Synthetic oligonucleotide
ttgtcactacttcttgatgccctaagcgta

SEQ ID NO: 422015 - DNA, 30 bp, Artificial Sequence
  Synthetic oligonucleotide
agcaggcaacgcgatacttgtgagagcgta

SEQ ID NO: 422016 - DNA, 30 bp, Artificial Sequence
  Synthetic oligonucleotide
tcttatcatattatcggacgaccgagcgta

SEQ ID NO: 422017 - DNA, 30 bp, Artificial Sequence
  Synthetic oligonucleotide
gtggcactctgcacacttctagggagcgta

SEQ ID NO: 422018 - DNA, 30 bp, Artificial Sequence
  Synthetic oligonucleotide
caataattgggctcgccgtattggagcgta

SEQ ID NO: 422019 - DNA, 30 bp, Artificial Sequence
  Synthetic oligonucleotide
tatatagagcctgcaacgaaggtgagcgta

SEQ ID NO: 422020 - DNA, 30 bp, Artificial Sequence
  Synthetic oligonucleotide
gatataggtgtccgacgtctcaatagcgta

SEQ ID NO: 422021 - DNA, 30 bp, Artificial Sequence
  Synthetic oligonucleotide
gccctctaagggagactgataaaacgcgta

SEQ ID NO: 422022 - DNA, 30 bp, Artificial Sequence
  Synthetic oligonucleotide
ggcggacctcttctgggttccagacgcgta

SEQ ID NO: 422023 - DNA, 30 bp, Artificial Sequence
  Synthetic oligonucleotide
gtttcaaaggatctcaatcgcgaccgcgta

SEQ ID NO: 422024 - DNA, 30 bp, Artificial Sequence
  Synthetic oligonucleotide
ccacgcgtgtgtcatgatttgacccgcgta

SEQ ID NO: 422025 - DNA, 30 bp, Artificial Sequence
  Synthetic oligonucleotide
gcgtaccggagtgccagatggttccgcgta

SEQ ID NO: 422026 - DNA, 30 bp, Artificial Sequence
  Synthetic oligonucleotide
ttaatcttccagggtataagtaatcgcgta

SEQ ID NO: 422027 - DNA, 30 bp, Artificial Sequence
  Synthetic oligonucleotide
taggtagcggactgaatttaacgtggcgta

SEQ ID NO: 422028 - DNA, 30 bp, Artificial Sequence
  Synthetic oligonucleotide
acaaacccttggtagtgaccgggtggcgta

SEQ ID NO: 422029 - DNA, 30 bp, Artificial Sequence
  Synthetic oligonucleotide
cgctcggtaatgtaatctgcattatgcgta

SEQ ID NO: 422030 - DNA, 30 bp, Artificial Sequence
  Synthetic oligonucleotide
agattcattcaaagcctgtggacgtgcgta

SEQ ID NO: 422031 - DNA, 30 bp, Artificial Sequence
  Synthetic oligonucleotide
cccctatctcagcgtggctgtaggtgcgta

SEQ ID NO: 422032 - DNA, 30 bp, Artificial Sequence
  Synthetic oligonucleotide
tttccgagggcgtgtttacgtatgtgcgta

SEQ ID NO: 422033 - DNA, 30 bp, Artificial Sequence
  Synthetic oligonucleotide
tcactggacgacacagggcgcatttgcgta

SEQ ID NO: 422034 - DNA, 30 bp, Artificial Sequence
  Synthetic oligonucleotide
gagtagttcgctgatcaggattaaatcgta

SEQ ID NO: 422035 - DNA, 30 bp, Artificial Sequence
  Synthetic oligonucleotide
tcctaaagtcccctactcatttaaatcgta

SEQ ID NO: 422036 - DNA, 30 bp, Artificial Sequence
  Synthetic oligonucleotide
ccacagcaggtaagtatgtacttaatcgta

SEQ ID NO: 422037 - DNA, 30 bp, Artificial Sequence
  Synthetic oligonucleotide
gctcgcgatgtaacgtttgcgcacatcgta

SEQ ID NO: 422038 - DNA, 30 bp, Artificial Sequence
  Synthetic oligonucleotide
ttgtacttaagaagggcaattaatatcgta

SEQ ID NO: 422039 - DNA, 30 bp, Artificial Sequence
  Synthetic oligonucleotide
gctcgggtaagttctctctcaaaactcgta

SEQ ID NO: 422040 - DNA, 30 bp, Artificial Sequence
  Synthetic oligonucleotide
gacttcttgccgcaattcagtacactcgta

SEQ ID NO: 422041 - DNA, 30 bp, Artificial Sequence
  Synthetic oligonucleotide
catttgaaccgtctaatatacgggctcgta

SEQ ID NO: 422042 - DNA, 25 bp, Artificial Sequence
  Synthetic oligonucleotide
agagcaaaccgggccttgtctcgta

SEQ ID NO: 422043 - DNA, 30 bp, Artificial Sequence
  Synthetic oligonucleotide
tgctatcgacgtggcgtatgactagtcgta

SEQ ID NO: 422044 - DNA, 30 bp, Artificial Sequence
  Synthetic oligonucleotide
gacattgcgttgtcaagaaaggtagtcgta

SEQ ID NO: 422045 - DNA, 30 bp, Artificial Sequence
  Synthetic oligonucleotide
ctagtcgctcgtagcctacagtgcgtcgta

SEQ ID NO: 422046 - DNA, 30 bp, Artificial Sequence
  Synthetic oligonucleotide
cttcttctgtgaacttggattaaggtcgta

SEQ ID NO: 422047 - DNA, 30 bp, Artificial Sequence
  Synthetic oligonucleotide
gttaaaggacttagttctctcctggtcgta

SEQ ID NO: 422048 - DNA, 30 bp, Artificial Sequence
  Synthetic oligonucleotide
gatgcccctgtcgacgggcctggattcgta

SEQ ID NO: 422049 - DNA, 30 bp, Artificial Sequence
  Synthetic oligonucleotide
tgtttcagccccgcttgcgcattattcgta

SEQ ID NO: 422050 - DNA, 30 bp, Artificial Sequence
  Synthetic oligonucleotide
aacccggaggggaatcaggagctcttcgta

SEQ ID NO: 422051 - DNA, 30 bp, Artificial Sequence
  Synthetic oligonucleotide
cgacttagagttgaagctaataagttcgta

SEQ ID NO: 422052 - DNA, 30 bp, Artificial Sequence
  Synthetic oligonucleotide
attacgagcaatcgccaaacagatttcgta

SEQ ID NO: 422053 - DNA, 30 bp, Artificial Sequence
  Synthetic oligonucleotide
ccagagctaacgacgtgcatttatttcgta

SEQ ID NO: 422054 - DNA, 30 bp, Artificial Sequence
  Synthetic oligonucleotide
aagttataatactaattcattactttcgta

SEQ ID NO: 422055 - DNA, 30 bp, Artificial Sequence
  Synthetic oligonucleotide
gtagtttctgttgtctacgaagttttcgta

SEQ ID NO: 422056 - DNA, 30 bp, Artificial Sequence
  Synthetic oligonucleotide
aataatgggtttccatttgggtcaaaggta

SEQ ID NO: 422057 - DNA, 30 bp, Artificial Sequence
  Synthetic oligonucleotide
ctttacatcgtgcagtactgttacaaggta

SEQ ID NO: 422058 - DNA, 30 bp, Artificial Sequence
  Synthetic oligonucleotide
tgcgtggacttgatgttctttatcaaggta

SEQ ID NO: 422059 - DNA, 31 bp, Artificial Sequence
  Synthetic oligonucleotide
tgcttagaggccaggtgcaacaccgaaggta

SEQ ID NO: 422060 - DNA, 30 bp, Artificial Sequence
  Synthetic oligonucleotide
tcttggctctgcaccagagatctgaaggta

SEQ ID NO: 422061 - DNA, 30 bp, Artificial Sequence
  Synthetic oligonucleotide
cctttaaaaaattctctcagcttgaaggta

SEQ ID NO: 422062 - DNA, 30 bp, Artificial Sequence
  Synthetic oligonucleotide
aaatctcactggggtctataaatacaggta

SEQ ID NO: 422063 - DNA, 30 bp, Artificial Sequence
  Synthetic oligonucleotide
tatgtggatcccgtagacgttttacaggta

SEQ ID NO: 422064 - DNA, 30 bp, Artificial Sequence
  Synthetic oligonucleotide
gaccttgtcatttgttattactaccaggta

SEQ ID NO: 422065 - DNA, 30 bp, Artificial Sequence
  Synthetic oligonucleotide
tgagagcaatctgcggccatgcagcaggta

SEQ ID NO: 422066 - DNA, 30 bp, Artificial Sequence
  Synthetic oligonucleotide
tcagtcgtttacagctttaggccgcaggta

SEQ ID NO: 422067 - DNA, 30 bp, Artificial Sequence
  Synthetic oligonucleotide
gatagtgcaaagtattttatatcgcaggta

SEQ ID NO: 422068 - DNA, 30 bp, Artificial Sequence
  Synthetic oligonucleotide
ctccggcgacagggacggtatgtgcaggta

SEQ ID NO: 422069 - DNA, 30 bp, Artificial Sequence
  Synthetic oligonucleotide
gatttgcggcattagagttgaactcaggta

SEQ ID NO: 422070 - DNA, 30 bp, Artificial Sequence
  Synthetic oligonucleotide
tctggatcctgcatgcgcggatgtcaggta

SEQ ID NO: 422071 - DNA, 30 bp, Artificial Sequence
  Synthetic oligonucleotide
tcgtatacctaatctttttgctaagaggta

SEQ ID NO: 422072 - DNA, 30 bp, Artificial Sequence
  Synthetic oligonucleotide
gataattgggaagatgaattatcagaggta

SEQ ID NO: 422073 - DNA, 30 bp, Artificial Sequence
  Synthetic oligonucleotide
ctacccatcgccatggtttggggagaggta

SEQ ID NO: 422074 - DNA, 30 bp, Artificial Sequence
  Synthetic oligonucleotide
cagaattaaggggcttagtcaatcgaggta

SEQ ID NO: 422075 - DNA, 30 bp, Artificial Sequence
  Synthetic oligonucleotide
tcagaaggaaattagggttttcaggaggta

SEQ ID NO: 422076 - DNA, 30 bp, Artificial Sequence
  Synthetic oligonucleotide
acaataagacggagcacagcgcgggaggta

SEQ ID NO: 422077 - DNA, 30 bp, Artificial Sequence
  Synthetic oligonucleotide
cataacgactgtactaattagggggaggta

SEQ ID NO: 422078 - DNA, 30 bp, Artificial Sequence
  Synthetic oligonucleotide
aatcaattgagtattggcttggtggaggta

SEQ ID NO: 422079 - DNA, 30 bp, Artificial Sequence
  Synthetic oligonucleotide
gggacttcatcgggctaatcttctgaggta

SEQ ID NO: 422080 - DNA, 30 bp, Artificial Sequence
  Synthetic oligonucleotide
taaaaactaccaatgtgcgaggttgaggta

SEQ ID NO: 422081 - DNA, 30 bp, Artificial Sequence
  Synthetic oligonucleotide
acctgtccgtttaagagcacagcataggta

SEQ ID NO: 422082 - DNA, 30 bp, Artificial Sequence
  Synthetic oligonucleotide
cttatctgcacgtagtaatgagcataggta

SEQ ID NO: 422083 - DNA, 30 bp, Artificial Sequence
  Synthetic oligonucleotide
ccctcgagcacggcaaggtgtgtataggta

SEQ ID NO: 422084 - DNA, 30 bp, Artificial Sequence
  Synthetic oligonucleotide
cttaatatggtcatctaaatgaactaggta

SEQ ID NO: 422085 - DNA, 30 bp, Artificial Sequence
  Synthetic oligonucleotide
gcatccaaacagcacgcggccatctaggta

SEQ ID NO: 422086 - DNA, 30 bp, Artificial Sequence
  Synthetic oligonucleotide
tctgggatatttgaatattcactgtaggta

SEQ ID NO: 422087 - DNA, 30 bp, Artificial Sequence
  Synthetic oligonucleotide
cttgtcaaactacctttcgcgacttaggta

SEQ ID NO: 422088 - DNA, 30 bp, Artificial Sequence
  Synthetic oligonucleotide
ttattcaggggctcatgaacggcttaggta

SEQ ID NO: 422089 - DNA, 30 bp, Artificial Sequence
  Synthetic oligonucleotide
ctggttggtttggtctcagggcgttaggta

SEQ ID NO: 422090 - DNA, 30 bp, Artificial Sequence
  Synthetic oligonucleotide
gctgattcggaaggaacatgcatttaggta

SEQ ID NO: 422091 - DNA, 30 bp, Artificial Sequence
  Synthetic oligonucleotide
ggcagttgtactgcgcgtcaagtttaggta

SEQ ID NO: 422092 - DNA, 30 bp, Artificial Sequence
  Synthetic oligonucleotide
aactagctacgcgcctaaagtgtttaggta

SEQ ID NO: 422093 - DNA, 30 bp, Artificial Sequence
  Synthetic oligonucleotide
aaggttccggcttatcataacggaacggta

SEQ ID NO: 422094 - DNA, 30 bp, Artificial Sequence
  Synthetic oligonucleotide
aaggttcgttatactaaggacgtcacggta

SEQ ID NO: 422095 - DNA, 30 bp, Artificial Sequence
  Synthetic oligonucleotide
tgttctgtgggggaatgagtggcgacggta

SEQ ID NO: 422096 - DNA, 30 bp, Artificial Sequence
  Synthetic oligonucleotide
tgcctgcaagcggccgtggattggacggta

SEQ ID NO: 422097 - DNA, 30 bp, Artificial Sequence
  Synthetic oligonucleotide
tcatacttaataaagagtgcgcctacggta

SEQ ID NO: 422098 - DNA, 30 bp, Artificial Sequence
  Synthetic oligonucleotide
tacacacgtttcatgtacgttgctacggta

SEQ ID NO: 422099 - DNA, 30 bp, Artificial Sequence
  Synthetic oligonucleotide
ttgtatattcttagaaaaaggtctacggta

SEQ ID NO: 422100 - DNA, 30 bp, Artificial Sequence
  Synthetic oligonucleotide
ggtggggatttaggtgtgttggttacggta

SEQ ID NO: 422101 - DNA, 30 bp, Artificial Sequence
  Synthetic oligonucleotide
actaatataataaatggtgcaacaccggta

SEQ ID NO: 422102 - DNA, 30 bp, Artificial Sequence
  Synthetic oligonucleotide
tctgcaacgcaggtgtcgtctggaccggta

SEQ ID NO: 422103 - DNA, 30 bp, Artificial Sequence
  Synthetic oligonucleotide
gtggagtcgtaaaatgcatgggccccggta

SEQ ID NO: 422104 - DNA, 30 bp, Artificial Sequence
  Synthetic oligonucleotide
tgatttcggtattagtgcgtaagcccggta

SEQ ID NO: 422105 - DNA, 30 bp, Artificial Sequence
  Synthetic oligonucleotide
gtgaatatctccaaattggacagcccggta

SEQ ID NO: 422106 - DNA, 30 bp, Artificial Sequence
  Synthetic oligonucleotide
cacggcacgcttgttatgtatgttccggta

SEQ ID NO: 422107 - DNA, 30 bp, Artificial Sequence
  Synthetic oligonucleotide
gggtcgatccgtgctctctcacgcgcggta

SEQ ID NO: 422108 - DNA, 30 bp, Artificial Sequence
  Synthetic oligonucleotide
gttctagcccacccggcgtagggcgcggta

SEQ ID NO: 422109 - DNA, 30 bp, Artificial Sequence
  Synthetic oligonucleotide
aacctgcaaggcttggaattactcgcggta

SEQ ID NO: 422110 - DNA, 30 bp, Artificial Sequence
  Synthetic oligonucleotide
aaaaactccgggtatctgcgtgtggcggta

SEQ ID NO: 422111 - DNA, 30 bp, Artificial Sequence
  Synthetic oligonucleotide
actttgagcaggttttgggcgcatgcggta

SEQ ID NO: 422112 - DNA, 30 bp, Artificial Sequence
  Synthetic oligonucleotide
gataaagaaggtttctacgggaaatcggta

SEQ ID NO: 422113 - DNA, 30 bp, Artificial Sequence
  Synthetic oligonucleotide
tgtagtaaggaagcggcgttagcctcggta

SEQ ID NO: 422114 - DNA, 30 bp, Artificial Sequence
  Synthetic oligonucleotide
cagtgaaacgccacctgcggtaagtcggta

SEQ ID NO: 422115 - DNA, 30 bp, Artificial Sequence
  Synthetic oligonucleotide
atactgtttctaagggttcttaattcggta

SEQ ID NO: 422116 - DNA, 30 bp, Artificial Sequence
  Synthetic oligonucleotide
ccccatacactcagttcggtttattcggta

SEQ ID NO: 422117 - DNA, 30 bp, Artificial Sequence
  Synthetic oligonucleotide
tcggtcggtaagcccgaatcgctttcggta

SEQ ID NO: 422118 - DNA, 30 bp, Artificial Sequence
  Synthetic oligonucleotide
aactagtccgcatcattgtaagaaagggta

SEQ ID NO: 422119 - DNA, 30 bp, Artificial Sequence
  Synthetic oligonucleotide
ggacgcgactactggggtgcacccagggta

SEQ ID NO: 422120 - DNA, 30 bp, Artificial Sequence
  Synthetic oligonucleotide
gtcgaaagtctatggttgttgtgcagggta

SEQ ID NO: 422121 - DNA, 30 bp, Artificial Sequence
  Synthetic oligonucleotide
gagtgcacgacctagcgtgggaagagggta

SEQ ID NO: 422122 - DNA, 30 bp, Artificial Sequence
  Synthetic oligonucleotide
gacggtggtctttcgtcactccagagggta

SEQ ID NO: 422123 - DNA, 30 bp, Artificial Sequence
  Synthetic oligonucleotide
cgaagtttgtcctagtttatcgatagggta

SEQ ID NO: 422124 - DNA, 30 bp, Artificial Sequence
  Synthetic oligonucleotide
ctcaggcgttgctgcatgatgcctagggta

SEQ ID NO: 422125 - DNA, 30 bp, Artificial Sequence
  Synthetic oligonucleotide
tgagcgggagtatctagtttcacacgggta

SEQ ID NO: 422126 - DNA, 31 bp, Artificial Sequence
  Synthetic oligonucleotide
ggctcccttctcacgagcttgaccacgggta

SEQ ID NO: 422127 - DNA, 30 bp, Artificial Sequence
  Synthetic oligonucleotide
atctagagaatttgacgaaaagcacgggta

SEQ ID NO: 422128 - DNA, 30 bp, Artificial Sequence
  Synthetic oligonucleotide
tatttgaagattgttaaatcagcacgggta

SEQ ID NO: 422129 - DNA, 30 bp, Artificial Sequence
  Synthetic oligonucleotide
aatactgataaacagtatcgtgcacgggta

SEQ ID NO: 422130 - DNA, 30 bp, Artificial Sequence
  Synthetic oligonucleotide
acaatctagttggtgcggccctcacgggta

SEQ ID NO: 422131 - DNA, 30 bp, Artificial Sequence
  Synthetic oligonucleotide
tgggtcgcgtgatctacttcgcgacgggta

SEQ ID NO: 422132 - DNA, 30 bp, Artificial Sequence
  Synthetic oligonucleotide
tatcagcaacaaactctacctcgccgggta

SEQ ID NO: 422133 - DNA, 30 bp, Artificial Sequence
  Synthetic oligonucleotide
ggagagagggtgtggtattgatgccgggta

SEQ ID NO: 422134 - DNA, 30 bp, Artificial Sequence
  Synthetic oligonucleotide
actagcatccccctggcatcactccgggta

SEQ ID NO: 422135 - DNA, 30 bp, Artificial Sequence
  Synthetic oligonucleotide
ggacgcggcagagtggatggggtccgggta

SEQ ID NO: 422136 - DNA, 30 bp, Artificial Sequence
  Synthetic oligonucleotide
tattgcccgcccattttgtccttccgggta

SEQ ID NO: 422137 - DNA, 30 bp, Artificial Sequence
  Synthetic oligonucleotide
ggccggacataacttcctatcgagcgggta

SEQ ID NO: 422138 - DNA, 30 bp, Artificial Sequence
  Synthetic oligonucleotide
gtaagacgagtcggtcacatgtctcgggta

SEQ ID NO: 422139 - DNA, 30 bp, Artificial Sequence
  Synthetic oligonucleotide
gcagtatagcatgtcgcaaaatgtcgggta

SEQ ID NO: 422140 - DNA, 30 bp, Artificial Sequence
  Synthetic oligonucleotide
ttatagggtaataatggtagtccaggggta

SEQ ID NO: 422141 - DNA, 30 bp, Artificial Sequence
  Synthetic oligonucleotide
tctcgctctatcttggttaatcacggggta

SEQ ID NO: 422142 - DNA, 30 bp, Artificial Sequence
  Synthetic oligonucleotide
tgtgtgtgctccaatggcagatgcggggta

SEQ ID NO: 422143 - DNA, 30 bp, Artificial Sequence
  Synthetic oligonucleotide
cttgggtcttgtccgcaatgactcggggta

SEQ ID NO: 422144 - DNA, 30 bp, Artificial Sequence
  Synthetic oligonucleotide
ttcaaatcaatttaaactcattagggggta

SEQ ID NO: 422145 - DNA, 30 bp, Artificial Sequence
  Synthetic oligonucleotide
cataattggtagcttttgtacacgggggta

SEQ ID NO: 422146 - DNA, 30 bp, Artificial Sequence
  Synthetic oligonucleotide
gatttgaatcgtaaaccgtaaaggggggta

SEQ ID NO: 422147 - DNA, 30 bp, Artificial Sequence
  Synthetic oligonucleotide
ttgggcacgatcgattaacataatggggta

SEQ ID NO: 422148 - DNA, 30 bp, Artificial Sequence
  Synthetic oligonucleotide
aagtgatgcaatggatccgccgatggggta

SEQ ID NO: 422149 - DNA, 29 bp, Artificial Sequence
  Synthetic oligonucleotide
agctggattgtgaacgcgttttatgggta

SEQ ID NO: 422150 - DNA, 30 bp, Artificial Sequence
  Synthetic oligonucleotide
ggggatgcaccccttagctggaactgggta

SEQ ID NO: 422151 - DNA, 30 bp, Artificial Sequence
  Synthetic oligonucleotide
gccctttttgagggctttacaggctgggta

SEQ ID NO: 422152 - DNA, 30 bp, Artificial Sequence
  Synthetic oligonucleotide
gactatgtgcagacaaaactcggctgggta

SEQ ID NO: 422153 - DNA, 30 bp, Artificial Sequence
  Synthetic oligonucleotide
cttcgctgtgaatcttgacacctgtgggta

SEQ ID NO: 422154 - DNA, 30 bp, Artificial Sequence
  Synthetic oligonucleotide
cgcctatctcccgagcgcactgtgtgggta

SEQ ID NO: 422155 - DNA, 30 bp, Artificial Sequence
  Synthetic oligonucleotide
tcactaaacacggtcgtctatatttgggta

SEQ ID NO: 422156 - DNA, 30 bp, Artificial Sequence
  Synthetic oligonucleotide
ctactttagagcgaacacatgcaaatggta

SEQ ID NO: 422157 - DNA, 30 bp, Artificial Sequence
  Synthetic oligonucleotide
aaatgtgttctaaaccgatatagaatggta

SEQ ID NO: 422158 - DNA, 30 bp, Artificial Sequence
  Synthetic oligonucleotide
gcccaggttgtgccctgtggcctaatggta

SEQ ID NO: 422159 - DNA, 30 bp, Artificial Sequence
  Synthetic oligonucleotide
gaccgcacaaatccagttgtggtaatggta

SEQ ID NO: 422160 - DNA, 30 bp, Artificial Sequence
  Synthetic oligonucleotide
ggttttttatgatcgatcaaatgcatggta

SEQ ID NO: 422161 - DNA, 30 bp, Artificial Sequence
  Synthetic oligonucleotide
ttgagctaagcagacattaccaagatggta

SEQ ID NO: 422162 - DNA, 30 bp, Artificial Sequence
  Synthetic oligonucleotide
aaaagctacgtttggctacacgggatggta

SEQ ID NO: 422163 - DNA, 30 bp, Artificial Sequence
  Synthetic oligonucleotide
ttccgacacggttatgaccgcatgatggta

SEQ ID NO: 422164 - DNA, 30 bp, Artificial Sequence
  Synthetic oligonucleotide
ataagcgtgctacgctcaatccttatggta

SEQ ID NO: 422165 - DNA, 30 bp, Artificial Sequence
  Synthetic oligonucleotide
tcaggtcaatgatggggagggtgactggta

SEQ ID NO: 422166 - DNA, 30 bp, Artificial Sequence
  Synthetic oligonucleotide
gcttaccagtaaacgtgcaagctcctggta

SEQ ID NO: 422167 - DNA, 30 bp, Artificial Sequence
  Synthetic oligonucleotide
gcaaggattgaaatattgctggagctggta

SEQ ID NO: 422168 - DNA, 30 bp, Artificial Sequence
  Synthetic oligonucleotide
tatccggggaaaagagtccaatagctggta

SEQ ID NO: 422169 - DNA, 30 bp, Artificial Sequence
  Synthetic oligonucleotide
tatctcaacgggtagggacagtctctggta

SEQ ID NO: 422170 - DNA, 30 bp, Artificial Sequence
  Synthetic oligonucleotide
aacctgaacacttattgaattattctggta

SEQ ID NO: 422171 - DNA, 30 bp, Artificial Sequence
  Synthetic oligonucleotide
ttttacacacgggtacagaaacttctggta

SEQ ID NO: 422172 - DNA, 30 bp, Artificial Sequence
  Synthetic oligonucleotide
acccctccccggaaggttatccttctggta

SEQ ID NO: 422173 - DNA, 30 bp, Artificial Sequence
  Synthetic oligonucleotide
agtctgggtacgaagctgttggttctggta

SEQ ID NO: 422174 - DNA, 30 bp, Artificial Sequence
  Synthetic oligonucleotide
tgatgtagctggcgtttgctaggagtggta

SEQ ID NO: 422175 - DNA, 30 bp, Artificial Sequence
  Synthetic oligonucleotide
ttatcgccctaaaatgtcagcgaggtggta

SEQ ID NO: 422176 - DNA, 30 bp, Artificial Sequence
  Synthetic oligonucleotide
ttgctcaccaaacatccgcttgtggtggta

SEQ ID NO: 422177 - DNA, 30 bp, Artificial Sequence
  Synthetic oligonucleotide
gtcttgggtcgaaatataacagatgtggta

SEQ ID NO: 422178 - DNA, 30 bp, Artificial Sequence
  Synthetic oligonucleotide
gtgccttgttgcacctacagaggtgtggta

SEQ ID NO: 422179 - DNA, 30 bp, Artificial Sequence
  Synthetic oligonucleotide
tatcttgtttacctttgtatctgtgtggta

SEQ ID NO: 422180 - DNA, 30 bp, Artificial Sequence
  Synthetic oligonucleotide
aaagttgtaggcccggatcgtcaattggta

SEQ ID NO: 422181 - DNA, 30 bp, Artificial Sequence
  Synthetic oligonucleotide
cgtacacaggtctcctgttgcacattggta

SEQ ID NO: 422182 - DNA, 30 bp, Artificial Sequence
  Synthetic oligonucleotide
gattaatcagattacgccgccagattggta

SEQ ID NO: 422183 - DNA, 30 bp, Artificial Sequence
  Synthetic oligonucleotide
gcgtccctactcgttgacgtccgattggta

SEQ ID NO: 422184 - DNA, 30 bp, Artificial Sequence
  Synthetic oligonucleotide
tgtgagtagcgaccaaggattatattggta

SEQ ID NO: 422185 - DNA, 30 bp, Artificial Sequence
  Synthetic oligonucleotide
attgaacagcattaaagtacgagcttggta

SEQ ID NO: 422186 - DNA, 30 bp, Artificial Sequence
  Synthetic oligonucleotide
gatatcccgatatacaagtgacgcttggta

SEQ ID NO: 422187 - DNA, 30 bp, Artificial Sequence
  Synthetic oligonucleotide
gttaggtcatcgcccgggcttacgttggta

SEQ ID NO: 422188 - DNA, 30 bp, Artificial Sequence
  Synthetic oligonucleotide
atccatactacgaatttgtatgggttggta

SEQ ID NO: 422189 - DNA, 30 bp, Artificial Sequence
  Synthetic oligonucleotide
ttttgagatggaccgcgcccactgttggta

SEQ ID NO: 422190 - DNA, 30 bp, Artificial Sequence
  Synthetic oligonucleotide
ccggggtcggatgcgcggcctgctttggta

SEQ ID NO: 422191 - DNA, 30 bp, Artificial Sequence
  Synthetic oligonucleotide
actaaagaggtgcccacgcattttttggta

SEQ ID NO: 422192 - DNA, 30 bp, Artificial Sequence
  Synthetic oligonucleotide
accataaatataatagtaggagaaaatgta

SEQ ID NO: 422193 - DNA, 30 bp, Artificial Sequence
  Synthetic oligonucleotide
gaataaatctgagcgaccaggaacaatgta

SEQ ID NO: 422194 - DNA, 30 bp, Artificial Sequence
  Synthetic oligonucleotide
gataactacgtcaataaggaccagaatgta

SEQ ID NO: 422195 - DNA, 30 bp, Artificial Sequence
  Synthetic oligonucleotide
caacttttacgtcaacgtgacgagaatgta

SEQ ID NO: 422196 - DNA, 30 bp, Artificial Sequence
  Synthetic oligonucleotide
gacattgtacgcgttcgtcatgagaatgta

SEQ ID NO: 422197 - DNA, 30 bp, Artificial Sequence
  Synthetic oligonucleotide
ttaatgtttcggtggaagaaggcgaatgta

SEQ ID NO: 422198 - DNA, 30 bp, Artificial Sequence
  Synthetic oligonucleotide
gcccatagaatctacgttacagtgaatgta

SEQ ID NO: 422199 - DNA, 30 bp, Artificial Sequence
  Synthetic oligonucleotide
ttaccagaccgcacagtaatctaacatgta

SEQ ID NO: 422200 - DNA, 30 bp, Artificial Sequence
  Synthetic oligonucleotide
gcttctgacgctttggcctaaggacatgta

SEQ ID NO: 422201 - DNA, 30 bp, Artificial Sequence
  Synthetic oligonucleotide
tatattttctgcgtctaatctttacatgta

SEQ ID NO: 422202 - DNA, 30 bp, Artificial Sequence
  Synthetic oligonucleotide
tttccggtgcgaacccggaaggaccatgta

SEQ ID NO: 422203 - DNA, 30 bp, Artificial Sequence
  Synthetic oligonucleotide
gcgctatgttaacgttcatagcagcatgta

SEQ ID NO: 422204 - DNA, 30 bp, Artificial Sequence
  Synthetic oligonucleotide
gaataatgttccccttttatgcgtcatgta

SEQ ID NO: 422205 - DNA, 30 bp, Artificial Sequence
  Synthetic oligonucleotide
ttgggtttcttgtccctcatggtagatgta

SEQ ID NO: 422206 - DNA, 30 bp, Artificial Sequence
  Synthetic oligonucleotide
acgttacgactttcgtggagattagatgta

SEQ ID NO: 422207 - DNA, 30 bp, Artificial Sequence
  Synthetic oligonucleotide
cagggtatcgttaccactagtttcgatgta

SEQ ID NO: 422208 - DNA, 30 bp, Artificial Sequence
  Synthetic oligonucleotide
gcagaccccaggattgttgaaccggatgta

SEQ ID NO: 422209 - DNA, 30 bp, Artificial Sequence
  Synthetic oligonucleotide
tatcaatttagagaggccccacgtgatgta

SEQ ID NO: 422210 - DNA, 30 bp, Artificial Sequence
  Synthetic oligonucleotide
cgcagccctcgtagcgattatcgatatgta

SEQ ID NO: 422211 - DNA, 30 bp, Artificial Sequence
  Synthetic oligonucleotide
ctagcatgcccgtaacagatgagctatgta

SEQ ID NO: 422212 - DNA, 30 bp, Artificial Sequence
  Synthetic oligonucleotide
actaggcccggtttttacttgggctatgta

SEQ ID NO: 422213 - DNA, 30 bp, Artificial Sequence
  Synthetic oligonucleotide
gtggatattgggctgcagcacctctatgta

SEQ ID NO: 422214 - DNA, 30 bp, Artificial Sequence
  Synthetic oligonucleotide
atacttcgtagacgacctagcgcttatgta

SEQ ID NO: 422215 - DNA, 30 bp, Artificial Sequence
  Synthetic oligonucleotide
cgtatctgtgtaagatacgtagtttatgta

SEQ ID NO: 422216 - DNA, 30 bp, Artificial Sequence
  Synthetic oligonucleotide
aaagtggcaaattttgggtctgaaactgta

SEQ ID NO: 422217 - DNA, 30 bp, Artificial Sequence
  Synthetic oligonucleotide
aagaactccaatgggcatatagcgactgta

SEQ ID NO: 422218 - DNA, 30 bp, Artificial Sequence
  Synthetic oligonucleotide
tttattgacctttagctaaggaatactgta

SEQ ID NO: 422219 - DNA, 30 bp, Artificial Sequence
  Synthetic oligonucleotide
aggggaatcaaggttacacgcagtactgta

SEQ ID NO: 422220 - DNA, 29 bp, Artificial Sequence
  Synthetic oligonucleotide
gcatccgtcgacccggtaaagcacctgta

SEQ ID NO: 422221 - DNA, 30 bp, Artificial Sequence
  Synthetic oligonucleotide
ttgcgtagccgcatgtcaaggtgacctgta

SEQ ID NO: 422222 - DNA, 30 bp, Artificial Sequence
  Synthetic oligonucleotide
cagacgtcgattattatgcgactacctgta

SEQ ID NO: 422223 - DNA, 30 bp, Artificial Sequence
  Synthetic oligonucleotide
aatggtgtgtgtatatacggggaccctgta

SEQ ID NO: 422224 - DNA, 30 bp, Artificial Sequence
  Synthetic oligonucleotide
tggggtttacaactagtgtttgtccctgta

SEQ ID NO: 422225 - DNA, 30 bp, Artificial Sequence
  Synthetic oligonucleotide
tggcggtcaccatccctgggagcgcctgta

SEQ ID NO: 422226 - DNA, 30 bp, Artificial Sequence
  Synthetic oligonucleotide
gctccctctgtcatagagcgtcatcctgta

SEQ ID NO: 422227 - DNA, 30 bp, Artificial Sequence
  Synthetic oligonucleotide
ctcgacgcaagttgagggagtgctcctgta

SEQ ID NO: 422228 - DNA, 29 bp, Artificial Sequence
  Synthetic oligonucleotide
cccaatattgctaaacaataattcctgta

SEQ ID NO: 422229 - DNA, 30 bp, Artificial Sequence
  Synthetic oligonucleotide
gtacattctctgcactcagcgaacgctgta

SEQ ID NO: 422230 - DNA, 30 bp, Artificial Sequence
  Synthetic oligonucleotide
tttttagcgaggtgagaggcgatcgctgta

SEQ ID NO: 422231 - DNA, 30 bp, Artificial Sequence
  Synthetic oligonucleotide
ctggattgaagcatggtcatattcgctgta

SEQ ID NO: 422232 - DNA, 30 bp, Artificial Sequence
  Synthetic oligonucleotide
agcgtgggtggttgtggaagagaggctgta

SEQ ID NO: 422233 - DNA, 30 bp, Artificial Sequence
  Synthetic oligonucleotide
gtttccgtcgacggttttctagatgctgta

SEQ ID NO: 422234 - DNA, 30 bp, Artificial Sequence
  Synthetic oligonucleotide
tagatagctagtagttccacggctgctgta

SEQ ID NO: 422235 - DNA, 30 bp, Artificial Sequence
  Synthetic oligonucleotide
ctagttcagcgagttctactcccatctgta

SEQ ID NO: 422236 - DNA, 30 bp, Artificial Sequence
  Synthetic oligonucleotide
ttaacttatactcttcaacctcgatctgta

SEQ ID NO: 422237 - DNA, 30 bp, Artificial Sequence
  Synthetic oligonucleotide
cactgggagttcacctgaacgcactctgta

SEQ ID NO: 422238 - DNA, 30 bp, Artificial Sequence
  Synthetic oligonucleotide
agcgtttacaaggccaaagtggactctgta

SEQ ID NO: 422239 - DNA, 30 bp, Artificial Sequence
  Synthetic oligonucleotide
taggtttcttaaattggaagatcgtctgta

SEQ ID NO: 422240 - DNA, 30 bp, Artificial Sequence
  Synthetic oligonucleotide
gaattgacgtcaccatagagatggtctgta

SEQ ID NO: 422241 - DNA, 30 bp, Artificial Sequence
  Synthetic oligonucleotide
atcgatagcgtatcttcatttttgtctgta

SEQ ID NO: 422242 - DNA, 30 bp, Artificial Sequence
  Synthetic oligonucleotide
acggtttgggatctacaacgtaattctgta

SEQ ID NO: 422243 - DNA, 29 bp, Artificial Sequence
  Synthetic oligonucleotide
ttgggtctaccgtactttaatcttctgta

SEQ ID NO: 422244 - DNA, 30 bp, Artificial Sequence
  Synthetic oligonucleotide
atcaccgggtcttccaaggacaaaagtgta

SEQ ID NO: 422245 - DNA, 30 bp, Artificial Sequence
  Synthetic oligonucleotide
tgtacggcgcgcatcaaaatgataagtgta

SEQ ID NO: 422246 - DNA, 30 bp, Artificial Sequence
  Synthetic oligonucleotide
aattgctacggtccagacggattaagtgta

SEQ ID NO: 422247 - DNA, 30 bp, Artificial Sequence
  Synthetic oligonucleotide
cagtatttcgcctttttgaggtccagtgta

SEQ ID NO: 422248 - DNA, 30 bp, Artificial Sequence
  Synthetic oligonucleotide
ctggatcgattccattggtagagcagtgta

SEQ ID NO: 422249 - DNA, 30 bp, Artificial Sequence
  Synthetic oligonucleotide
gactggccagcccgtcagggaacgagtgta

SEQ ID NO: 422250 - DNA, 30 bp, Artificial Sequence
  Synthetic oligonucleotide
tagccaagcgttttacggacgctgagtgta

SEQ ID NO: 422251 - DNA, 30 bp, Artificial Sequence
  Synthetic oligonucleotide
gccctcaatacgacatttggtgttagtgta

SEQ ID NO: 422252 - DNA, 30 bp, Artificial Sequence
  Synthetic oligonucleotide
attccaacgttgtcttctgtggcacgtgta

SEQ ID NO: 422253 - DNA, 30 bp, Artificial Sequence
  Synthetic oligonucleotide
gcgggtttccagagcctctctcgacgtgta

SEQ ID NO: 422254 - DNA, 30 bp, Artificial Sequence
  Synthetic oligonucleotide
attgtggaattgctgtagtcagtccgtgta

SEQ ID NO: 422255 - DNA, 30 bp, Artificial Sequence
  Synthetic oligonucleotide
atcgaagtggtaccgctgccacagcgtgta

SEQ ID NO: 422256 - DNA, 30 bp, Artificial Sequence
  Synthetic oligonucleotide
taaaaattatcgcctcaattccggcgtgta

SEQ ID NO: 422257 - DNA, 30 bp, Artificial Sequence
  Synthetic oligonucleotide
ccgtcgctcgccctcctttgtgctcgtgta

SEQ ID NO: 422258 - DNA, 30 bp, Artificial Sequence
  Synthetic oligonucleotide
tctagggtcggggtgccggctattcgtgta

SEQ ID NO: 422259 - DNA, 30 bp, Artificial Sequence
  Synthetic oligonucleotide
ttttatgtattttcgtcactttgaggtgta

SEQ ID NO: 422260 - DNA, 30 bp, Artificial Sequence
  Synthetic oligonucleotide
acggttcctaaggtgccaacagtaggtgta

SEQ ID NO: 422261 - DNA, 30 bp, Artificial Sequence
  Synthetic oligonucleotide
cggtacttagtgacttacggtaacggtgta

SEQ ID NO: 422262 - DNA, 30 bp, Artificial Sequence
  Synthetic oligonucleotide
ccccggcaacacggggccgaagacggtgta

SEQ ID NO: 422263 - DNA, 30 bp, Artificial Sequence
  Synthetic oligonucleotide
ttagaggtttggtcaagaaagaccggtgta

SEQ ID NO: 422264 - DNA, 30 bp, Artificial Sequence
  Synthetic oligonucleotide
gcaatcccgcatggattccttagcggtgta

SEQ ID NO: 422265 - DNA, 30 bp, Artificial Sequence
  Synthetic oligonucleotide
taggagtcacgtgcacacgttagcggtgta

SEQ ID NO: 422266 - DNA, 30 bp, Artificial Sequence
  Synthetic oligonucleotide
tatattgtcttatctaaacgtgagggtgta

SEQ ID NO: 422267 - DNA, 30 bp, Artificial Sequence
  Synthetic oligonucleotide
tgagcatgccactggatgccatctggtgta

SEQ ID NO: 422268 - DNA, 30 bp, Artificial Sequence
  Synthetic oligonucleotide
gcaattagccagccggaccgtagatgtgta

SEQ ID NO: 422269 - DNA, 30 bp, Artificial Sequence
  Synthetic oligonucleotide
aagactccacgcatgccattcttatgtgta

SEQ ID NO: 422270 - DNA, 30 bp, Artificial Sequence
  Synthetic oligonucleotide
tacggactgttcatctgctggtcctgtgta

SEQ ID NO: 422271 - DNA, 30 bp, Artificial Sequence
  Synthetic oligonucleotide
tccataattgcttttcgtgctagctgtgta

SEQ ID NO: 422272 - DNA, 30 bp, Artificial Sequence
  Synthetic oligonucleotide
gagcaacttgaactcccaacgggctgtgta

SEQ ID NO: 422273 - DNA, 30 bp, Artificial Sequence
  Synthetic oligonucleotide
tcgctaccttagcgcgctgtgtgctgtgta

SEQ ID NO: 422274 - DNA, 30 bp, Artificial Sequence
  Synthetic oligonucleotide
ctgattgaatgtatctagataatctgtgta

SEQ ID NO: 422275 - DNA, 30 bp, Artificial Sequence
  Synthetic oligonucleotide
atggtaagagagtttcttacaaggtgtgta

SEQ ID NO: 422276 - DNA, 30 bp, Artificial Sequence
  Synthetic oligonucleotide
gactctaggtgaaggggtggtccaattgta

SEQ ID NO: 422277 - DNA, 30 bp, Artificial Sequence
  Synthetic oligonucleotide
atacatcactaagggtgcaactacattgta

SEQ ID NO: 422278 - DNA, 30 bp, Artificial Sequence
  Synthetic oligonucleotide
ggtaagtggaaatagtcacgctacattgta

SEQ ID NO: 422279 - DNA, 30 bp, Artificial Sequence
  Synthetic oligonucleotide
tagccgaggatgtgggattacaatattgta

SEQ ID NO: 422280 - DNA, 30 bp, Artificial Sequence
  Synthetic oligonucleotide
gagctatacatcatgcggaatgctattgta

SEQ ID NO: 422281 - DNA, 30 bp, Artificial Sequence
  Synthetic oligonucleotide
tcagttgtatgatggacggttggtattgta

SEQ ID NO: 422282 - DNA, 30 bp, Artificial Sequence
  Synthetic oligonucleotide
ataccgtgacggggactgcattgtattgta

SEQ ID NO: 422283 - DNA, 30 bp, Artificial Sequence
  Synthetic oligonucleotide
caacaaaagcgtgcctcgtcggaacttgta

SEQ ID NO: 422284 - DNA, 30 bp, Artificial Sequence
  Synthetic oligonucleotide
ccaatactagcccacacagggtcgcttgta

SEQ ID NO: 422285 - DNA, 30 bp, Artificial Sequence
  Synthetic oligonucleotide
accatgtaaactatcgtcgttcatcttgta

SEQ ID NO: 422286 - DNA, 30 bp, Artificial Sequence
  Synthetic oligonucleotide
ctgaccttcacctcggttagtacagttgta

SEQ ID NO: 422287 - DNA, 30 bp, Artificial Sequence
  Synthetic oligonucleotide
taatcattggcactgtacaatccagttgta

SEQ ID NO: 422288 - DNA, 30 bp, Artificial Sequence
  Synthetic oligonucleotide
gcgcttcaccaggctcacaagagagttgta

SEQ ID NO: 422289 - DNA, 30 bp, Artificial Sequence
  Synthetic oligonucleotide
gatggtccgagttttagccaaggagttgta

SEQ ID NO: 422290 - DNA, 30 bp, Artificial Sequence
  Synthetic oligonucleotide
ccaagccgttctgtagatttttaggttgta

SEQ ID NO: 422291 - DNA, 30 bp, Artificial Sequence
  Synthetic oligonucleotide
tgggaagcgaattggcagttgtttgttgta

SEQ ID NO: 422292 - DNA, 30 bp, Artificial Sequence
  Synthetic oligonucleotide
acaaatcgggcagtgacatatccatttgta

SEQ ID NO: 422293 - DNA, 30 bp, Artificial Sequence
  Synthetic oligonucleotide
attccgcacagacagaaggactcctttgta

SEQ ID NO: 422294 - DNA, 30 bp, Artificial Sequence
  Synthetic oligonucleotide
ctcgcagcaggttcggcgtgcatctttgta

SEQ ID NO: 422295 - DNA, 30 bp, Artificial Sequence
  Synthetic oligonucleotide
ttggcagtggtccccaggaggacgtttgta

SEQ ID NO: 422296 - DNA, 30 bp, Artificial Sequence
  Synthetic oligonucleotide
tgaggcgaggttgtttcgaggaattttgta

SEQ ID NO: 422297 - DNA, 30 bp, Artificial Sequence
  Synthetic oligonucleotide
gtaagaagttcgcccaatgctgattttgta

SEQ ID NO: 422298 - DNA, 30 bp, Artificial Sequence
  Synthetic oligonucleotide
atgggccaccgagagtgtaggtattttgta

SEQ ID NO: 422299 - DNA, 30 bp, Artificial Sequence
  Synthetic oligonucleotide
ccgatacttgtcgcgctgggtttttttgta

SEQ ID NO: 422300 - DNA, 30 bp, Artificial Sequence
  Synthetic oligonucleotide
tgttacaacgttattttgactctaaaatta

SEQ ID NO: 422301 - DNA, 30 bp, Artificial Sequence
  Synthetic oligonucleotide
atgtataaggtactattatccatcaaatta

SEQ ID NO: 422302 - DNA, 29 bp, Artificial Sequence
  Synthetic oligonucleotide
gcagacgatttgaggttgccctcaaatta

SEQ ID NO: 422303 - DNA, 30 bp, Artificial Sequence
  Synthetic oligonucleotide
gaaccgataccgtcctccagggagaaatta

SEQ ID NO: 422304 - DNA, 30 bp, Artificial Sequence
  Synthetic oligonucleotide
gttgtccttgcgtaacgacattgacaatta

SEQ ID NO: 422305 - DNA, 30 bp, Artificial Sequence
  Synthetic oligonucleotide
actgagatatgtcgtgttacacggcaatta

SEQ ID NO: 422306 - DNA, 30 bp, Artificial Sequence
  Synthetic oligonucleotide
cttcaaagtgggccacagaggctgcaatta

SEQ ID NO: 422307 - DNA, 30 bp, Artificial Sequence
  Synthetic oligonucleotide
cccggcttgggcattgagtgtcatcaatta

SEQ ID NO: 422308 - DNA, 30 bp, Artificial Sequence
  Synthetic oligonucleotide
aatcctgcccgttgataatgaactcaatta

SEQ ID NO: 422309 - DNA, 30 bp, Artificial Sequence
  Synthetic oligonucleotide
gccactgcgcccagcattcgtactcaatta

SEQ ID NO: 422310 - DNA, 30 bp, Artificial Sequence
  Synthetic oligonucleotide
tcggttcagtttcccatcatcagtcaatta

SEQ ID NO: 422311 - DNA, 30 bp, Artificial Sequence
  Synthetic oligonucleotide
atgctatggggccctgtgaacggtcaatta

SEQ ID NO: 422312 - DNA, 29 bp, Artificial Sequence
  Synthetic oligonucleotide
tgagccggggccatcatattaaagaatta

SEQ ID NO: 422313 - DNA, 30 bp, Artificial Sequence
  Synthetic oligonucleotide
cttagaaatcgtcagttgtcatgagaatta

SEQ ID NO: 422314 - DNA, 30 bp, Artificial Sequence
  Synthetic oligonucleotide
ggaaatgtgccctagcataatttagaatta

SEQ ID NO: 422315 - DNA, 30 bp, Artificial Sequence
  Synthetic oligonucleotide
tacttccgactgtgagataagttcgaatta

SEQ ID NO: 422316 - DNA, 30 bp, Artificial Sequence
  Synthetic oligonucleotide
cctcccggaaaggacgcagtccaggaatta

SEQ ID NO: 422317 - DNA, 30 bp, Artificial Sequence
  Synthetic oligonucleotide
ttacaacatagcggactgttaggggaatta

SEQ ID NO: 422318 - DNA, 30 bp, Artificial Sequence
  Synthetic oligonucleotide
ctgcactctgtacttattgaagatgaatta

SEQ ID NO: 422319 - DNA, 30 bp, Artificial Sequence
  Synthetic oligonucleotide
taagacatgtctattcaaagctttgaatta

SEQ ID NO: 422320 - DNA, 30 bp, Artificial Sequence
  Synthetic oligonucleotide
ctcccgtccgtctccatactggaataatta

SEQ ID NO: 422321 - DNA, 30 bp, Artificial Sequence
  Synthetic oligonucleotide
tcgctccatttctccattgtaacataatta

SEQ ID NO: 422322 - DNA, 30 bp, Artificial Sequence
  Synthetic oligonucleotide
gcagatcccggcatcgcgttattataatta

SEQ ID NO: 422323 - DNA, 30 bp, Artificial Sequence
  Synthetic oligonucleotide
cgcgagatgcggggaattcgcaactaatta

SEQ ID NO: 422324 - DNA, 30 bp, Artificial Sequence
  Synthetic oligonucleotide
tgagtaaggaagcatagtctatactaatta

SEQ ID NO: 422325 - DNA, 30 bp, Artificial Sequence
  Synthetic oligonucleotide
tagcagcaaaaagctcaagttgagtaatta

SEQ ID NO: 422326 - DNA, 30 bp, Artificial Sequence
  Synthetic oligonucleotide
acgtatgagcgaatggacgctgcgtaatta

SEQ ID NO: 422327 - DNA, 30 bp, Artificial Sequence
  Synthetic oligonucleotide
cgtaagcaggttctgcttcttcggtaatta

SEQ ID NO: 422328 - DNA, 30 bp, Artificial Sequence
  Synthetic oligonucleotide
agtactggatgcttgctccgctggtaatta

SEQ ID NO: 422329 - DNA, 30 bp, Artificial Sequence
  Synthetic oligonucleotide
gtcaaataatagtttacgtgttggtaatta

SEQ ID NO: 422330 - DNA, 30 bp, Artificial Sequence
  Synthetic oligonucleotide
ggtcggcgttcttgtccgtctatgtaatta

SEQ ID NO: 422331 - DNA, 30 bp, Artificial Sequence
  Synthetic oligonucleotide
atggagtttttctaatacaacctgtaatta

SEQ ID NO: 422332 - DNA, 30 bp, Artificial Sequence
  Synthetic oligonucleotide
tccctcgacggagtcgcttacttgtaatta

SEQ ID NO: 422333 - DNA, 30 bp, Artificial Sequence
  Synthetic oligonucleotide
tcctcaggtacactgaggtacaattaatta

SEQ ID NO: 422334 - DNA, 30 bp, Artificial Sequence
  Synthetic oligonucleotide
agccaggtgattgagacctgtgattaatta

SEQ ID NO: 422335 - DNA, 30 bp, Artificial Sequence
  Synthetic oligonucleotide
agaggtttccagcgttaaccataaacatta

SEQ ID NO: 422336 - DNA, 30 bp, Artificial Sequence
  Synthetic oligonucleotide
aaagacggagtagggttggcataaacatta

SEQ ID NO: 422337 - DNA, 30 bp, Artificial Sequence
  Synthetic oligonucleotide
tcggtctccggaatgccggagtaaacatta

SEQ ID NO: 422338 - DNA, 30 bp, Artificial Sequence
  Synthetic oligonucleotide
gctgctcggacgccatacagctgaacatta

SEQ ID NO: 422339 - DNA, 30 bp, Artificial Sequence
  Synthetic oligonucleotide
atataaccatgcaatctcggaacgacatta

SEQ ID NO: 422340 - DNA, 30 bp, Artificial Sequence
  Synthetic oligonucleotide
gcataattgggggatttggaatcgacatta

SEQ ID NO: 422341 - DNA, 30 bp, Artificial Sequence
  Synthetic oligonucleotide
gcagtgagggcagcggtttgttcgacatta

SEQ ID NO: 422342 - DNA, 30 bp, Artificial Sequence
  Synthetic oligonucleotide
aagcgtcctcgcgatagtgcctggacatta

SEQ ID NO: 422343 - DNA, 30 bp, Artificial Sequence
  Synthetic oligonucleotide
ttgggatctacacctaccgtaactacatta

SEQ ID NO: 422344 - DNA, 30 bp, Artificial Sequence
  Synthetic oligonucleotide
gatttaaggttcccatagagacaaccatta

SEQ ID NO: 422345 - DNA, 30 bp, Artificial Sequence
  Synthetic oligonucleotide
gctagtgctttaatacgcctccaaccatta

SEQ ID NO: 422346 - DNA, 30 bp, Artificial Sequence
  Synthetic oligonucleotide
acccgtgtctcgtaggttcggcaaccatta

SEQ ID NO: 422347 - DNA, 30 bp, Artificial Sequence
  Synthetic oligonucleotide
caatatataaatggactgctcgcaccatta

SEQ ID NO: 422348 - DNA, 30 bp, Artificial Sequence
  Synthetic oligonucleotide
atgctgcctcggtggaaccgctcaccatta

SEQ ID NO: 422349 - DNA, 30 bp, Artificial Sequence
  Synthetic oligonucleotide
gttgagcacttttgaactattactccatta

SEQ ID NO: 422350 - DNA, 30 bp, Artificial Sequence
  Synthetic oligonucleotide
tgcttgatgggtgctgtagcaaaagcatta

SEQ ID NO: 422351 - DNA, 30 bp, Artificial Sequence
  Synthetic oligonucleotide
gagtgtaaatgaacgtgacataaagcatta

SEQ ID NO: 422352 - DNA, 30 bp, Artificial Sequence
  Synthetic oligonucleotide
tagctcgcagtgaggaattaatcagcatta

SEQ ID NO: 422353 - DNA, 30 bp, Artificial Sequence
  Synthetic oligonucleotide
agttcctacagtttgtaatatagagcatta

SEQ ID NO: 422354 - DNA, 30 bp, Artificial Sequence
  Synthetic oligonucleotide
acatagccgtcgctatgtggctccgcatta

SEQ ID NO: 422355 - DNA, 30 bp, Artificial Sequence
  Synthetic oligonucleotide
ctcacgtttacgcagagaggtggggcatta

SEQ ID NO: 422356 - DNA, 30 bp, Artificial Sequence
  Synthetic oligonucleotide
cgggggtctcccgcgatgtagtgggcatta

SEQ ID NO: 422357 - DNA, 30 bp, Artificial Sequence
  Synthetic oligonucleotide
tgtttttacgctcggcgaaactatgcatta

SEQ ID NO: 422358 - DNA, 30 bp, Artificial Sequence
  Synthetic oligonucleotide
acaatcaactcattcagtcacgttgcatta

SEQ ID NO: 422359 - DNA, 30 bp, Artificial Sequence
  Synthetic oligonucleotide
gacttagtaggccgcagtgtgccatcatta

SEQ ID NO: 422360 - DNA, 30 bp, Artificial Sequence
  Synthetic oligonucleotide
gagctcttcagaagataacgaggatcatta

SEQ ID NO: 422361 - DNA, 30 bp, Artificial Sequence
  Synthetic oligonucleotide
acggccctccagagcgcgagcaggtcatta

SEQ ID NO: 422362 - DNA, 30 bp, Artificial Sequence
  Synthetic oligonucleotide
gcgaaaaagtttcgtctgttcatttcatta

SEQ ID NO: 422363 - DNA, 29 bp, Artificial Sequence
  Synthetic oligonucleotide
cgtgtttagatggtctatctatttcatta

SEQ ID NO: 422364 - DNA, 30 bp, Artificial Sequence
  Synthetic oligonucleotide
gagagtctacagtgtgcatgataaagatta

SEQ ID NO: 422365 - DNA, 30 bp, Artificial Sequence
  Synthetic oligonucleotide
agtagcggctgcggtccgatccgcagatta

SEQ ID NO: 422366 - DNA, 30 bp, Artificial Sequence
  Synthetic oligonucleotide
agtgtctcggttggctaatccacgagatta

SEQ ID NO: 422367 - DNA, 30 bp, Artificial Sequence
  Synthetic oligonucleotide
aattctgcattcgggtatgactggagatta

SEQ ID NO: 422368 - DNA, 30 bp, Artificial Sequence
  Synthetic oligonucleotide
aggttcaagttacttaccatcttgagatta

SEQ ID NO: 422369 - DNA, 30 bp, Artificial Sequence
  Synthetic oligonucleotide
ctacccgccagccacgtcactttgagatta

SEQ ID NO: 422370 - DNA, 30 bp, Artificial Sequence
  Synthetic oligonucleotide
gaatcctcagctaaatgccaaaatagatta

SEQ ID NO: 422371 - DNA, 30 bp, Artificial Sequence
  Synthetic oligonucleotide
tgactacgtgcgtgatattggactagatta

SEQ ID NO: 422372 - DNA, 30 bp, Artificial Sequence
  Synthetic oligonucleotide
aggtccgcaggtgttgcgagctctagatta

SEQ ID NO: 422373 - DNA, 30 bp, Artificial Sequence
  Synthetic oligonucleotide
ccaaattatgtataaaaacgttcacgatta

SEQ ID NO: 422374 - DNA, 30 bp, Artificial Sequence
  Synthetic oligonucleotide
ccctatgggacaccggtgcatcgacgatta

SEQ ID NO: 422375 - DNA, 30 bp, Artificial Sequence
  Synthetic oligonucleotide
ctgggtctttgatgtacagcatgtcgatta

SEQ ID NO: 422376 - DNA, 30 bp, Artificial Sequence
  Synthetic oligonucleotide
gattgataatcattcgtctatcaaggatta

SEQ ID NO: 422377 - DNA, 30 bp, Artificial Sequence
  Synthetic oligonucleotide
acttgttcctacacaaaatcccccggatta

SEQ ID NO: 422378 - DNA, 30 bp, Artificial Sequence
  Synthetic oligonucleotide
ataagggtcccgcctgagtaatccggatta

SEQ ID NO: 422379 - DNA, 30 bp, Artificial Sequence
  Synthetic oligonucleotide
gcgtcttactgcccctctcggccgggatta

SEQ ID NO: 422380 - DNA, 30 bp, Artificial Sequence
  Synthetic oligonucleotide
ctcctgatagactagcgtaatgcgggatta

SEQ ID NO: 422381 - DNA, 30 bp, Artificial Sequence
  Synthetic oligonucleotide
tgtggtgcatctgtaaatagggggggatta

SEQ ID NO: 422382 - DNA, 30 bp, Artificial Sequence
  Synthetic oligonucleotide
tggcttccgctgaagcgaggagatggatta

SEQ ID NO: 422383 - DNA, 30 bp, Artificial Sequence
  Synthetic oligonucleotide
catttgttactccttaaacgaagtggatta

SEQ ID NO: 422384 - DNA, 30 bp, Artificial Sequence
  Synthetic oligonucleotide
gacctatcgtgcaggtagcgcaggtgatta

SEQ ID NO: 422385 - DNA, 30 bp, Artificial Sequence
  Synthetic oligonucleotide
gggccttatgaaacaaaagtgaaaatatta

SEQ ID NO: 422386 - DNA, 30 bp, Artificial Sequence
  Synthetic oligonucleotide
taagtggttaggcaggcatgtcaaatatta

SEQ ID NO: 422387 - DNA, 30 bp, Artificial Sequence
  Synthetic oligonucleotide
tactttttgcggccaatggctacaatatta

SEQ ID NO: 422388 - DNA, 30 bp, Artificial Sequence
  Synthetic oligonucleotide
ggggtttaatcatatataatagtaatatta

SEQ ID NO: 422389 - DNA, 30 bp, Artificial Sequence
  Synthetic oligonucleotide
cgcacagccatttagttcccttgcatatta

SEQ ID NO: 422390 - DNA, 30 bp, Artificial Sequence
  Synthetic oligonucleotide
aacagcagtatcggttcttttaggatatta

SEQ ID NO: 422391 - DNA, 30 bp, Artificial Sequence
  Synthetic oligonucleotide
gcagcctcgttaaggaaccaacggatatta

SEQ ID NO: 422392 - DNA, 30 bp, Artificial Sequence
  Synthetic oligonucleotide
cagtgactccataatagatagtatatatta

SEQ ID NO: 422393 - DNA, 30 bp, Artificial Sequence
  Synthetic oligonucleotide
aagggaacatttattaggtgcattatatta

SEQ ID NO: 422394 - DNA, 30 bp, Artificial Sequence
  Synthetic oligonucleotide
gcctcatacggtttaaaagcatttatatta

SEQ ID NO: 422395 - DNA, 30 bp, Artificial Sequence
  Synthetic oligonucleotide
ctgtaaaggtccaaggtcttagaactatta

SEQ ID NO: 422396 - DNA, 30 bp, Artificial Sequence
  Synthetic oligonucleotide
cgacgcaaccccaaatgttgaacactatta

SEQ ID NO: 422397 - DNA, 30 bp, Artificial Sequence
  Synthetic oligonucleotide
agactcttttcgacgggtgtaagactatta

SEQ ID NO: 422398 - DNA, 30 bp, Artificial Sequence
  Synthetic oligonucleotide
tttcctttaggaactgtattgaacctatta

SEQ ID NO: 422399 - DNA, 30 bp, Artificial Sequence
  Synthetic oligonucleotide
gggggttaaggttcgaagatctccctatta

SEQ ID NO: 422400 - DNA, 30 bp, Artificial Sequence
  Synthetic oligonucleotide
tcagatagggtttgtgaatacggcctatta

SEQ ID NO: 422401 - DNA, 30 bp, Artificial Sequence
  Synthetic oligonucleotide
gatgcttccttacgatctagtggcctatta

SEQ ID NO: 422402 - DNA, 29 bp, Artificial Sequence
  Synthetic oligonucleotide
cttccgagcctctgaaggttttcctatta

SEQ ID NO: 422403 - DNA, 30 bp, Artificial Sequence
  Synthetic oligonucleotide
aaatctgctacctagaccacgcgtctatta

SEQ ID NO: 422404 - DNA, 30 bp, Artificial Sequence
  Synthetic oligonucleotide
tgtacagtgactgaaccttatcaagtatta

SEQ ID NO: 422405 - DNA, 30 bp, Artificial Sequence
  Synthetic oligonucleotide
gcagctatatgttcgagactcggagtatta

SEQ ID NO: 422406 - DNA, 30 bp, Artificial Sequence
  Synthetic oligonucleotide
gacccgctgttgcggctcactgtcgtatta

SEQ ID NO: 422407 - DNA, 30 bp, Artificial Sequence
  Synthetic oligonucleotide
gcaccgctattggtgagtgcccaggtatta

SEQ ID NO: 422408 - DNA, 30 bp, Artificial Sequence
  Synthetic oligonucleotide
gcagatattattcctgctatagaggtatta

SEQ ID NO: 422409 - DNA, 30 bp, Artificial Sequence
  Synthetic oligonucleotide
ggcctatattattcttgacctgcggtatta

SEQ ID NO: 422410 - DNA, 30 bp, Artificial Sequence
  Synthetic oligonucleotide
caccggtattatcgtttaccggtggtatta

SEQ ID NO: 422411 - DNA, 29 bp, Artificial Sequence
  Synthetic oligonucleotide
aaaacgttcccctacgtagcttggtatta

SEQ ID NO: 422412 - DNA, 31 bp, Artificial Sequence
  Synthetic oligonucleotide
ggcaagataataggtttggcatcctgtatta

SEQ ID NO: 422413 - DNA, 30 bp, Artificial Sequence
  Synthetic oligonucleotide
atggacaccgggatcgcaaaagttgtatta

SEQ ID NO: 422414 - DNA, 30 bp, Artificial Sequence
  Synthetic oligonucleotide
ttacgggcagtgtccaaatgggttgtatta

SEQ ID NO: 422415 - DNA, 30 bp, Artificial Sequence
  Synthetic oligonucleotide
tgacgactctacacagctacgtaattatta

SEQ ID NO: 422416 - DNA, 30 bp, Artificial Sequence
  Synthetic oligonucleotide
taggagccgtatcccaatagaacattatta

SEQ ID NO: 422417 - DNA, 30 bp, Artificial Sequence
  Synthetic oligonucleotide
tgagataggtcgccttccggacccttatta

SEQ ID NO: 422418 - DNA, 30 bp, Artificial Sequence
  Synthetic oligonucleotide
aaggcattaggctaccaacgaatcttatta

SEQ ID NO: 422419 - DNA, 30 bp, Artificial Sequence
  Synthetic oligonucleotide
cccacctgtcaatttcagcatatcttatta

SEQ ID NO: 422420 - DNA, 30 bp, Artificial Sequence
  Synthetic oligonucleotide
gaccgctgtgtgggtgattatatcttatta

SEQ ID NO: 422421 - DNA, 30 bp, Artificial Sequence
  Synthetic oligonucleotide
gcgtcattttgatccattagaatgttatta

SEQ ID NO: 422422 - DNA, 30 bp, Artificial Sequence
  Synthetic oligonucleotide
ccccgattaccagcaagtcggaatttatta

SEQ ID NO: 422423 - DNA, 30 bp, Artificial Sequence
  Synthetic oligonucleotide
ggatctaagaagcttgaacgagctttatta

SEQ ID NO: 422424 - DNA, 30 bp, Artificial Sequence
  Synthetic oligonucleotide
agaggtgcgcctgtagtttctattttatta

SEQ ID NO: 422425 - DNA, 30 bp, Artificial Sequence
  Synthetic oligonucleotide
gaattgtctgggtccgaaacactaaactta

SEQ ID NO: 422426 - DNA, 30 bp, Artificial Sequence
  Synthetic oligonucleotide
aactttctgaaacgaggcaagctcaactta

SEQ ID NO: 422427 - DNA, 30 bp, Artificial Sequence
  Synthetic oligonucleotide
gttgaagaccggcttatgttattcaactta

SEQ ID NO: 422428 - DNA, 30 bp, Artificial Sequence
  Synthetic oligonucleotide
gagaatgaccacgggtccatacctaactta

SEQ ID NO: 422429 - DNA, 30 bp, Artificial Sequence
  Synthetic oligonucleotide
gcggaccgcccaaccactttatgtaactta

SEQ ID NO: 422430 - DNA, 30 bp, Artificial Sequence
  Synthetic oligonucleotide
catgtactgatcgaagcagaaagacactta

SEQ ID NO: 422431 - DNA, 30 bp, Artificial Sequence
  Synthetic oligonucleotide
taacccttagaggtaggtttgcgacactta

SEQ ID NO: 422432 - DNA, 30 bp, Artificial Sequence
  Synthetic oligonucleotide
gctcgtcatgtccccgactcagtacactta

SEQ ID NO: 422433 - DNA, 30 bp, Artificial Sequence
  Synthetic oligonucleotide
tcagttctcttctccaccatcgaccactta

SEQ ID NO: 422434 - DNA, 30 bp, Artificial Sequence
  Synthetic oligonucleotide
ggttaaccacaaacgcagcaattccactta

SEQ ID NO: 422435 - DNA, 30 bp, Artificial Sequence
  Synthetic oligonucleotide
atgtcagtgctcaggtatacggcgcactta

SEQ ID NO: 422436 - DNA, 30 bp, Artificial Sequence
  Synthetic oligonucleotide
gttaacacgtgcacgtttcaccctcactta

SEQ ID NO: 422437 - DNA, 30 bp, Artificial Sequence
  Synthetic oligonucleotide
gagtctcttatcgtcagtacaggtcactta

SEQ ID NO: 422438 - DNA, 30 bp, Artificial Sequence
  Synthetic oligonucleotide
ggaggccggcccgttagccggtgagactta

SEQ ID NO: 422439 - DNA, 30 bp, Artificial Sequence
  Synthetic oligonucleotide
gaaagtccttcgcgttaagcttccgactta

SEQ ID NO: 422440 - DNA, 30 bp, Artificial Sequence
  Synthetic oligonucleotide
gggcaacataagttgatggcacgcgactta

SEQ ID NO: 422441 - DNA, 30 bp, Artificial Sequence
  Synthetic oligonucleotide
ataagcccctaaaatgttaccttcgactta

SEQ ID NO: 422442 - DNA, 30 bp, Artificial Sequence
  Synthetic oligonucleotide
ccaacagaaatcgtgaaaatttatgactta

SEQ ID NO: 422443 - DNA, 30 bp, Artificial Sequence
  Synthetic oligonucleotide
agtgaacactggattccgggcaaatactta

SEQ ID NO: 422444 - DNA, 30 bp, Artificial Sequence
  Synthetic oligonucleotide
cgcagccccgctgactaggctcaatactta

SEQ ID NO: 422445 - DNA, 30 bp, Artificial Sequence
  Synthetic oligonucleotide
cggattaaatgatatggattaatttactta

SEQ ID NO: 422446 - DNA, 30 bp, Artificial Sequence
  Synthetic oligonucleotide
gctataaaataagtttaatatgtttactta

SEQ ID NO: 422447 - DNA, 30 bp, Artificial Sequence
  Synthetic oligonucleotide
aactacgtcgccggattcgttccaacctta

SEQ ID NO: 422448 - DNA, 30 bp, Artificial Sequence
  Synthetic oligonucleotide
gcctaatcgctgtatgacagcagaacctta

SEQ ID NO: 422449 - DNA, 30 bp, Artificial Sequence
  Synthetic oligonucleotide
tctcgcttttaggtaaagtgtgtaacctta

SEQ ID NO: 422450 - DNA, 30 bp, Artificial Sequence
  Synthetic oligonucleotide
tttacagtccttttacgaatacacacctta

SEQ ID NO: 422451 - DNA, 30 bp, Artificial Sequence
  Synthetic oligonucleotide
gcgcatgactataggcctccattcacctta

SEQ ID NO: 422452 - DNA, 30 bp, Artificial Sequence
  Synthetic oligonucleotide
caacgggaggtctaatatggtcatacctta

SEQ ID NO: 422453 - DNA, 30 bp, Artificial Sequence
  Synthetic oligonucleotide
agtccatatgactgactaatgagtacctta

SEQ ID NO: 422454 - DNA, 30 bp, Artificial Sequence
  Synthetic oligonucleotide
tgattgtcgtggggcgtagtccttacctta

SEQ ID NO: 422455 - DNA, 30 bp, Artificial Sequence
  Synthetic oligonucleotide
cccctcatacaaattaaaatttacccctta

SEQ ID NO: 422456 - DNA, 30 bp, Artificial Sequence
  Synthetic oligonucleotide
tttaatccctccaggcgcgttaagccctta

SEQ ID NO: 422457 - DNA, 30 bp, Artificial Sequence
  Synthetic oligonucleotide
tagacgaaagtagttctcacgtcgccctta

SEQ ID NO: 422458 - DNA, 30 bp, Artificial Sequence
  Synthetic oligonucleotide
gataagtccgacaactttaagaggccctta

SEQ ID NO: 422459 - DNA, 30 bp, Artificial Sequence
  Synthetic oligonucleotide
aataacagactttagcgtcacttgccctta

SEQ ID NO: 422460 - DNA, 30 bp, Artificial Sequence
  Synthetic oligonucleotide
aaacgtatcaccgaatatctctatccctta

SEQ ID NO: 422461 - DNA, 30 bp, Artificial Sequence
  Synthetic oligonucleotide
atacgtatccaaagagacactggtccctta

SEQ ID NO: 422462 - DNA, 30 bp, Artificial Sequence
  Synthetic oligonucleotide
ggacttcggccagggggtaaccacgcctta

SEQ ID NO: 422463 - DNA, 30 bp, Artificial Sequence
  Synthetic oligonucleotide
caccacaaaaactcctcaagggacgcctta

SEQ ID NO: 422464 - DNA, 30 bp, Artificial Sequence
  Synthetic oligonucleotide
ccgctcgatctatgtctaaactgcgcctta

SEQ ID NO: 422465 - DNA, 30 bp, Artificial Sequence
  Synthetic oligonucleotide
taccacttagttgaggggtgagtggcctta

SEQ ID NO: 422466 - DNA, 30 bp, Artificial Sequence
  Synthetic oligonucleotide
aacttatggtcagagggttgtgctgcctta

SEQ ID NO: 422467 - DNA, 30 bp, Artificial Sequence
  Synthetic oligonucleotide
ggtgatgttcgatcaagagtacaatcctta

SEQ ID NO: 422468 - DNA, 30 bp, Artificial Sequence
  Synthetic oligonucleotide
ggagacgtctcaacacctgtgttatcctta

SEQ ID NO: 422469 - DNA, 30 bp, Artificial Sequence
  Synthetic oligonucleotide
atcgttctcgtttccacatgacactcctta

SEQ ID NO: 422470 - DNA, 30 bp, Artificial Sequence
  Synthetic oligonucleotide
cgactttttttaggatttctctcttcctta

SEQ ID NO: 422471 - DNA, 30 bp, Artificial Sequence
  Synthetic oligonucleotide
cataagataaggtcagtcttgtcaagctta

SEQ ID NO: 422472 - DNA, 30 bp, Artificial Sequence
  Synthetic oligonucleotide
gataatgttcgcatataaaacttcagctta

SEQ ID NO: 422473 - DNA, 30 bp, Artificial Sequence
  Synthetic oligonucleotide
tttcgtcaatgaactcaagatttcagctta

SEQ ID NO: 422474 - DNA, 30 bp, Artificial Sequence
  Synthetic oligonucleotide
aatggtaggcgccctttacggcagagctta

SEQ ID NO: 422475 - DNA, 30 bp, Artificial Sequence
  Synthetic oligonucleotide
tccgatcgacaaagcacagtgaggagctta

SEQ ID NO: 422476 - DNA, 30 bp, Artificial Sequence
  Synthetic oligonucleotide
aagaatttggaagattctttagggagctta

SEQ ID NO: 422477 - DNA, 30 bp, Artificial Sequence
  Synthetic oligonucleotide
tcaaaagtgctcaagtgtatgatgagctta

SEQ ID NO: 422478 - DNA, 30 bp, Artificial Sequence
  Synthetic oligonucleotide
cccccggccatagttcaggagcatagctta

SEQ ID NO: 422479 - DNA, 30 bp, Artificial Sequence
  Synthetic oligonucleotide
gtgaggcgctatggctagcttactagctta

SEQ ID NO: 422480 - DNA, 30 bp, Artificial Sequence
  Synthetic oligonucleotide
gaatcgccattttcgtaagaaagtagctta

SEQ ID NO: 422481 - DNA, 30 bp, Artificial Sequence
  Synthetic oligonucleotide
aggggaatttaaggatttctttcacgctta

SEQ ID NO: 422482 - DNA, 30 bp, Artificial Sequence
  Synthetic oligonucleotide
gaagtccgtcggatgaagaatggacgctta

SEQ ID NO: 422483 - DNA, 30 bp, Artificial Sequence
  Synthetic oligonucleotide
tggctattcgatgccaaatttctacgctta

SEQ ID NO: 422484 - DNA, 30 bp, Artificial Sequence
  Synthetic oligonucleotide
cctctgaatatttcaaaggggcagcgctta

SEQ ID NO: 422485 - DNA, 30 bp, Artificial Sequence
  Synthetic oligonucleotide
ttttagattaatgtagtcgtagagcgctta

SEQ ID NO: 422486 - DNA, 30 bp, Artificial Sequence
  Synthetic oligonucleotide
cggtcctaaggtatccggttcccgcgctta

SEQ ID NO: 422487 - DNA, 31 bp, Artificial Sequence
  Synthetic oligonucleotide
tagtggtttcgaggatatgcattggcgctta

SEQ ID NO: 422488 - DNA, 30 bp, Artificial Sequence
  Synthetic oligonucleotide
ataagtcacagccatagagcgactcgctta

SEQ ID NO: 422489 - DNA, 30 bp, Artificial Sequence
  Synthetic oligonucleotide
tatcgctgacaagcacaatagcctcgctta

SEQ ID NO: 422490 - DNA, 30 bp, Artificial Sequence
  Synthetic oligonucleotide
gctcccttctcacaggcaacagaaggctta

SEQ ID NO: 422491 - DNA, 30 bp, Artificial Sequence
  Synthetic oligonucleotide
cgtccgtaagcgcgccgttacgacggctta

SEQ ID NO: 422492 - DNA, 30 bp, Artificial Sequence
  Synthetic oligonucleotide
cccaccgcgcaccaatatatgtggggctta

SEQ ID NO: 422493 - DNA, 30 bp, Artificial Sequence
  Synthetic oligonucleotide
ctcaagggttcatctatagtaatgggctta

SEQ ID NO: 422494 - DNA, 30 bp, Artificial Sequence
  Synthetic oligonucleotide
cagtcttcaaatcacctgcaaagtggctta

SEQ ID NO: 422495 - DNA, 30 bp, Artificial Sequence
  Synthetic oligonucleotide
cttctccagctgagtaacaccaaatgctta

SEQ ID NO: 422496 - DNA, 30 bp, Artificial Sequence
  Synthetic oligonucleotide
gaatttaagggcatcgatgttgtatgctta

SEQ ID NO: 422497 - DNA, 30 bp, Artificial Sequence
  Synthetic oligonucleotide
gagctcagataaggcgcgatctcctgctta

SEQ ID NO: 422498 - DNA, 30 bp, Artificial Sequence
  Synthetic oligonucleotide
catatgcgacgttttgggtacatctgctta

SEQ ID NO: 422499 - DNA, 30 bp, Artificial Sequence
  Synthetic oligonucleotide
gggacgaagccttcctcggggatgtgctta

SEQ ID NO: 422500 - DNA, 30 bp, Artificial Sequence
  Synthetic oligonucleotide
acaaaccccggatattggcgtggttgctta

SEQ ID NO: 422501 - DNA, 30 bp, Artificial Sequence
  Synthetic oligonucleotide
ctcagtactattaaagcagactagatctta

SEQ ID NO: 422502 - DNA, 30 bp, Artificial Sequence
  Synthetic oligonucleotide
taaattacctggcggaatctaacgatctta

SEQ ID NO: 422503 - DNA, 30 bp, Artificial Sequence
  Synthetic oligonucleotide
gaaactgaccggctttaaccgccgatctta

SEQ ID NO: 422504 - DNA, 30 bp, Artificial Sequence
  Synthetic oligonucleotide
gtctgtatagtctggtgggccatgatctta

SEQ ID NO: 422505 - DNA, 30 bp, Artificial Sequence
  Synthetic oligonucleotide
tacgttgctcggccagatatacgtatctta

SEQ ID NO: 422506 - DNA, 30 bp, Artificial Sequence
  Synthetic oligonucleotide
tccgcaggagtctcagctaagcgtatctta

SEQ ID NO: 422507 - DNA, 30 bp, Artificial Sequence
  Synthetic oligonucleotide
ttcaaactgtcgcaatagaaagttatctta

SEQ ID NO: 422508 - DNA, 30 bp, Artificial Sequence
  Synthetic oligonucleotide
tgcctatacgacgcggggactaaactctta

SEQ ID NO: 422509 - DNA, 30 bp, Artificial Sequence
  Synthetic oligonucleotide
atagctccgattattcacaaacgactctta

SEQ ID NO: 422510 - DNA, 30 bp, Artificial Sequence
  Synthetic oligonucleotide
atgcattgccgccttaggcaatgactctta

SEQ ID NO: 422511 - DNA, 30 bp, Artificial Sequence
  Synthetic oligonucleotide
attaatgatgcggtatggttccgcctctta

SEQ ID NO: 422512 - DNA, 30 bp, Artificial Sequence
  Synthetic oligonucleotide
tacggtacgctattcagtcacgtcctctta

SEQ ID NO: 422513 - DNA, 30 bp, Artificial Sequence
  Synthetic oligonucleotide
gtgtagtgtccaagtcacggagtgctctta

SEQ ID NO: 422514 - DNA, 30 bp, Artificial Sequence
  Synthetic oligonucleotide
tatgagatgtactgtccgggcaatctctta

SEQ ID NO: 422515 - DNA, 30 bp, Artificial Sequence
  Synthetic oligonucleotide
tagcaacgtgggtatttcagttttctctta

SEQ ID NO: 422516 - DNA, 30 bp, Artificial Sequence
  Synthetic oligonucleotide
tacgtggtctgacacactcgcaaagtctta

SEQ ID NO: 422517 - DNA, 30 bp, Artificial Sequence
  Synthetic oligonucleotide
tgactgttacatagtatcggcagagtctta

SEQ ID NO: 422518 - DNA, 30 bp, Artificial Sequence
  Synthetic oligonucleotide
gattccgtatttctcagacctcgagtctta

SEQ ID NO: 422519 - DNA, 30 bp, Artificial Sequence
  Synthetic oligonucleotide
tgtcgttacaggcagacgcggtgagtctta

SEQ ID NO: 422520 - DNA, 30 bp, Artificial Sequence
  Synthetic oligonucleotide
aatgtaaaacgaggctaggttttcgtctta

SEQ ID NO: 422521 - DNA, 30 bp, Artificial Sequence
  Synthetic oligonucleotide
tgatgtgcgcgcaattgtactgaggtctta

SEQ ID NO: 422522 - DNA, 30 bp, Artificial Sequence
  Synthetic oligonucleotide
gaagcatgcatccggccggaaacggtctta

SEQ ID NO: 422523 - DNA, 30 bp, Artificial Sequence
  Synthetic oligonucleotide
ataaataacaattattcaaacctggtctta

SEQ ID NO: 422524 - DNA, 30 bp, Artificial Sequence
  Synthetic oligonucleotide
tctcggcctgagattacccgatatgtctta

SEQ ID NO: 422525 - DNA, 30 bp, Artificial Sequence
  Synthetic oligonucleotide
attatgtaatacccacgactatatgtctta

SEQ ID NO: 422526 - DNA, 30 bp, Artificial Sequence
  Synthetic oligonucleotide
atggtttcaacttgttggcagtttgtctta

SEQ ID NO: 422527 - DNA, 30 bp, Artificial Sequence
  Synthetic oligonucleotide
tgaattaatgattactttccacacttctta

SEQ ID NO: 422528 - DNA, 30 bp, Artificial Sequence
  Synthetic oligonucleotide
gctgagtagcatcttcggtattggttctta

SEQ ID NO: 422529 - DNA, 30 bp, Artificial Sequence
  Synthetic oligonucleotide
tcatagtcgcgactgactgcatctttctta

SEQ ID NO: 422530 - DNA, 30 bp, Artificial Sequence
  Synthetic oligonucleotide
ttctgaattttcacctctgggtaaaagtta

SEQ ID NO: 422531 - DNA, 30 bp, Artificial Sequence
  Synthetic oligonucleotide
tgataatgatttcacgcaaaatgaaagtta

SEQ ID NO: 422532 - DNA, 30 bp, Artificial Sequence
  Synthetic oligonucleotide
gtcaattccgcattaaaatgcttaaagtta

SEQ ID NO: 422533 - DNA, 30 bp, Artificial Sequence
  Synthetic oligonucleotide
cggacatacggaggcgttgcgtacaagtta

SEQ ID NO: 422534 - DNA, 30 bp, Artificial Sequence
  Synthetic oligonucleotide
gtaccgtttgggtcgcgttacagtaagtta

SEQ ID NO: 422535 - DNA, 30 bp, Artificial Sequence
  Synthetic oligonucleotide
gtatggactctgaatggtacttaacagtta

SEQ ID NO: 422536 - DNA, 30 bp, Artificial Sequence
  Synthetic oligonucleotide
acattttagatgttggagcacacccagtta

SEQ ID NO: 422537 - DNA, 30 bp, Artificial Sequence
  Synthetic oligonucleotide
cattttgtcgtaagaccccgagatcagtta

SEQ ID NO: 422538 - DNA, 30 bp, Artificial Sequence
  Synthetic oligonucleotide
gatgcattcttcacgaatacatatcagtta

SEQ ID NO: 422539 - DNA, 30 bp, Artificial Sequence
  Synthetic oligonucleotide
cactgtatttcagaacgagaagttcagtta

SEQ ID NO: 422540 - DNA, 30 bp, Artificial Sequence
  Synthetic oligonucleotide
tacagtttagcagtccgacacaaagagtta

SEQ ID NO: 422541 - DNA, 30 bp, Artificial Sequence
  Synthetic oligonucleotide
ttataacctgacttgggagccttagagtta

SEQ ID NO: 422542 - DNA, 30 bp, Artificial Sequence
  Synthetic oligonucleotide
gctttgtaaagtccggttaccgacgagtta

SEQ ID NO: 422543 - DNA, 30 bp, Artificial Sequence
  Synthetic oligonucleotide
gcggtatcatcaagtcgcgtggacgagtta

SEQ ID NO: 422544 - DNA, 30 bp, Artificial Sequence
  Synthetic oligonucleotide
tgatctaaatcgaaggatatctacgagtta

SEQ ID NO: 422545 - DNA, 30 bp, Artificial Sequence
  Synthetic oligonucleotide
gatcagctcggacgtttgcttgtcgagtta

SEQ ID NO: 422546 - DNA, 30 bp, Artificial Sequence
  Synthetic oligonucleotide
tccggtcatattgcgggtgcatgatagtta

SEQ ID NO: 422547 - DNA, 30 bp, Artificial Sequence
  Synthetic oligonucleotide
actccgaccatacgcgactcattatagtta

SEQ ID NO: 422548 - DNA, 30 bp, Artificial Sequence
  Synthetic oligonucleotide
aagacactgtaggcgacgagcagctagtta

SEQ ID NO: 422549 - DNA, 30 bp, Artificial Sequence
  Synthetic oligonucleotide
tcgataaacattgtgcgtgtgtggtagtta

SEQ ID NO: 422550 - DNA, 30 bp, Artificial Sequence
  Synthetic oligonucleotide
gtaccccaggcatgcattttttattagtta

SEQ ID NO: 422551 - DNA, 30 bp, Artificial Sequence
  Synthetic oligonucleotide
gaccttcacttgcggaatccacgaacgtta

SEQ ID NO: 422552 - DNA, 30 bp, Artificial Sequence
  Synthetic oligonucleotide
tctcgattgttgccaccgcttttaacgtta

SEQ ID NO: 422553 - DNA, 30 bp, Artificial Sequence
  Synthetic oligonucleotide
gcaacattgttcggcggcggcgtcacgtta

SEQ ID NO: 422554 - DNA, 30 bp, Artificial Sequence
  Synthetic oligonucleotide
caaaggataacggccctttcttctacgtta

SEQ ID NO: 422555 - DNA, 30 bp, Artificial Sequence
  Synthetic oligonucleotide
tggaagcgaaattgtattaaacaaccgtta

SEQ ID NO: 422556 - DNA, 30 bp, Artificial Sequence
  Synthetic oligonucleotide
cgtctcgctagtcacctggggggaccgtta

SEQ ID NO: 422557 - DNA, 30 bp, Artificial Sequence
  Synthetic oligonucleotide
ccaatattaaacagatgcttgttaccgtta

SEQ ID NO: 422558 - DNA, 30 bp, Artificial Sequence
  Synthetic oligonucleotide
tggtaaccgtgtactacttggttgccgtta

SEQ ID NO: 422559 - DNA, 30 bp, Artificial Sequence
  Synthetic oligonucleotide
tgcaaatatcaagttggggcggcagcgtta

SEQ ID NO: 422560 - DNA, 30 bp, Artificial Sequence
  Synthetic oligonucleotide
atcgtggtgccgacgattacagtagcgtta

SEQ ID NO: 422561 - DNA, 30 bp, Artificial Sequence
  Synthetic oligonucleotide
aactgccgacagtaaggtaatgtagcgtta

SEQ ID NO: 422562 - DNA, 30 bp, Artificial Sequence
  Synthetic oligonucleotide
acttgattaccggggtttgtcgacgcgtta

SEQ ID NO: 422563 - DNA, 30 bp, Artificial Sequence
  Synthetic oligonucleotide
gaatcaaacctataagacgaattcgcgtta

SEQ ID NO: 422564 - DNA, 30 bp, Artificial Sequence
  Synthetic oligonucleotide
caaaaacattgactaacgtcgacggcgtta

SEQ ID NO: 422565 - DNA, 30 bp, Artificial Sequence
  Synthetic oligonucleotide
gagacaaaatacactttcgcatgggcgtta

SEQ ID NO: 422566 - DNA, 30 bp, Artificial Sequence
  Synthetic oligonucleotide
gcctaaggtaccgctctttgcgctgcgtta

SEQ ID NO: 422567 - DNA, 30 bp, Artificial Sequence
  Synthetic oligonucleotide
cgtgcactcacgcactcaggcagtgcgtta

SEQ ID NO: 422568 - DNA, 30 bp, Artificial Sequence
  Synthetic oligonucleotide
tatcgcaatgccgtccaaaactttgcgtta

SEQ ID NO: 422569 - DNA, 30 bp, Artificial Sequence
  Synthetic oligonucleotide
aagttcatacaagacggaccttaatcgtta

SEQ ID NO: 422570 - DNA, 30 bp, Artificial Sequence
  Synthetic oligonucleotide
agatcggagtctctgacgtcctcctcgtta

SEQ ID NO: 422571 - DNA, 30 bp, Artificial Sequence
  Synthetic oligonucleotide
tgatggggactgggttgtcattattcgtta

SEQ ID NO: 422572 - DNA, 30 bp, Artificial Sequence
  Synthetic oligonucleotide
aggagttctatgatgcggtttggaaggtta

SEQ ID NO: 422573 - DNA, 30 bp, Artificial Sequence
  Synthetic oligonucleotide
ttaaccattcctgcctggaaacccaggtta

SEQ ID NO: 422574 - DNA, 30 bp, Artificial Sequence
  Synthetic oligonucleotide
agtagcatggctagagagactgtcaggtta

SEQ ID NO: 422575 - DNA, 30 bp, Artificial Sequence
  Synthetic oligonucleotide
ttgttctgccaaggatgtaaatataggtta

SEQ ID NO: 422576 - DNA, 30 bp, Artificial Sequence
  Synthetic oligonucleotide
caatcgtaccctgcggcgcgagctaggtta

SEQ ID NO: 422577 - DNA, 31 bp, Artificial Sequence
  Synthetic oligonucleotide
ataacctgtgataagcagcgatagtaggtta

SEQ ID NO: 422578 - DNA, 30 bp, Artificial Sequence
  Synthetic oligonucleotide
aatacgctgtttagatagtcggttaggtta

SEQ ID NO: 422579 - DNA, 30 bp, Artificial Sequence
  Synthetic oligonucleotide
taatgcagtaggtatacgctgatacggtta

SEQ ID NO: 422580 - DNA, 30 bp, Artificial Sequence
  Synthetic oligonucleotide
ggacataatcctcgggaacctgagcggtta

SEQ ID NO: 422581 - DNA, 30 bp, Artificial Sequence
  Synthetic oligonucleotide
cgacaagggttggtggggatatagcggtta

SEQ ID NO: 422582 - DNA, 30 bp, Artificial Sequence
  Synthetic oligonucleotide
ggtgagtgattaattcttcgggcgcggtta

SEQ ID NO: 422583 - DNA, 30 bp, Artificial Sequence
  Synthetic oligonucleotide
gtgcatgattaggttgaacctatgcggtta

SEQ ID NO: 422584 - DNA, 30 bp, Artificial Sequence
  Synthetic oligonucleotide
ggttttatccggttcatgaaccctcggtta

SEQ ID NO: 422585 - DNA, 30 bp, Artificial Sequence
  Synthetic oligonucleotide
atgcagattacgcttgccagccctcggtta

SEQ ID NO: 422586 - DNA, 30 bp, Artificial Sequence
  Synthetic oligonucleotide
gcaagtcagctctgattatattgtcggtta

SEQ ID NO: 422587 - DNA, 30 bp, Artificial Sequence
  Synthetic oligonucleotide
ccaccacccggcataggaattattcggtta

SEQ ID NO: 422588 - DNA, 30 bp, Artificial Sequence
  Synthetic oligonucleotide
caccccttgatggatcgtaacccagggtta

SEQ ID NO: 422589 - DNA, 30 bp, Artificial Sequence
  Synthetic oligonucleotide
gaatgaacttcgggggtggtggcagggtta

SEQ ID NO: 422590 - DNA, 30 bp, Artificial Sequence
  Synthetic oligonucleotide
atcgtctggttacctgcgttagacgggtta

SEQ ID NO: 422591 - DNA, 30 bp, Artificial Sequence
  Synthetic oligonucleotide
cgatcacatttgttcacgactggcgggtta

SEQ ID NO: 422592 - DNA, 30 bp, Artificial Sequence
  Synthetic oligonucleotide
caaatgactcgggtttgcctagtggggtta

SEQ ID NO: 422593 - DNA, 30 bp, Artificial Sequence
  Synthetic oligonucleotide
tcccgaaagccccactaatttactgggtta

SEQ ID NO: 422594 - DNA, 30 bp, Artificial Sequence
  Synthetic oligonucleotide
gccaaacaatcctctgattagtctgggtta

SEQ ID NO: 422595 - DNA, 30 bp, Artificial Sequence
  Synthetic oligonucleotide
atacagtcggggaacaccgtcagtgggtta

SEQ ID NO: 422596 - DNA, 30 bp, Artificial Sequence
  Synthetic oligonucleotide
tagtactggtacacacgcacgaaatggtta

SEQ ID NO: 422597 - DNA, 30 bp, Artificial Sequence
  Synthetic oligonucleotide
tcccgtatggtggatatttgcgcgtggtta

SEQ ID NO: 422598 - DNA, 30 bp, Artificial Sequence
  Synthetic oligonucleotide
cccgtcccgtcctgcgttaccctgtggtta

SEQ ID NO: 422599 - DNA, 30 bp, Artificial Sequence
  Synthetic oligonucleotide
gctatttcgaccctacgaccttaaatgtta

SEQ ID NO: 422600 - DNA, 30 bp, Artificial Sequence
  Synthetic oligonucleotide
tgtgcgtggacaaacgcagtgccaatgtta

SEQ ID NO: 422601 - DNA, 30 bp, Artificial Sequence
  Synthetic oligonucleotide
acagttcgaaacataccaaatggaatgtta

SEQ ID NO: 422602 - DNA, 30 bp, Artificial Sequence
  Synthetic oligonucleotide
gaatatatcatgagcggatggataatgtta

SEQ ID NO: 422603 - DNA, 30 bp, Artificial Sequence
  Synthetic oligonucleotide
tggatctctccccagtttactaacatgtta

SEQ ID NO: 422604 - DNA, 30 bp, Artificial Sequence
  Synthetic oligonucleotide
tagattgccactataaatggtaatatgtta

SEQ ID NO: 422605 - DNA, 30 bp, Artificial Sequence
  Synthetic oligonucleotide
cttaacttgcccgaggacgaggatatgtta

SEQ ID NO: 422606 - DNA, 30 bp, Artificial Sequence
  Synthetic oligonucleotide
gctttaacggcccgttaacggaaactgtta

SEQ ID NO: 422607 - DNA, 30 bp, Artificial Sequence
  Synthetic oligonucleotide
ccgtggcgcagcgtaataatacgactgtta

SEQ ID NO: 422608 - DNA, 31 bp, Artificial Sequence
  Synthetic oligonucleotide
tagtggttgcgcaagcctttgagtactgtta

SEQ ID NO: 422609 - DNA, 30 bp, Artificial Sequence
  Synthetic oligonucleotide
ttcgatccatgtcatttgaagttactgtta

SEQ ID NO: 422610 - DNA, 30 bp, Artificial Sequence
  Synthetic oligonucleotide
caaaaggtacagcacttgattcgcctgtta

SEQ ID NO: 422611 - DNA, 30 bp, Artificial Sequence
  Synthetic oligonucleotide
tcaggttgttttgtagattggattctgtta

SEQ ID NO: 422612 - DNA, 30 bp, Artificial Sequence
  Synthetic oligonucleotide
gttgaaagcctgagcgctatacttctgtta

SEQ ID NO: 422613 - DNA, 30 bp, Artificial Sequence
  Synthetic oligonucleotide
cccgtccgagtgaacctggtaaaggtgtta

SEQ ID NO: 422614 - DNA, 30 bp, Artificial Sequence
  Synthetic oligonucleotide
tttaccgaggagctgccgtccacggtgtta

SEQ ID NO: 422615 - DNA, 30 bp, Artificial Sequence
  Synthetic oligonucleotide
aattgctcacagatatacctgttggtgtta

SEQ ID NO: 422616 - DNA, 30 bp, Artificial Sequence
  Synthetic oligonucleotide
tctggatgttggaggaggtcaggtgtgtta

SEQ ID NO: 422617 - DNA, 30 bp, Artificial Sequence
  Synthetic oligonucleotide
ttgaatttcgctggtcagaccgcattgtta

SEQ ID NO: 422618 - DNA, 30 bp, Artificial Sequence
  Synthetic oligonucleotide
atacacagcacaggatcacaagacttgtta

SEQ ID NO: 422619 - DNA, 30 bp, Artificial Sequence
  Synthetic oligonucleotide
gtgatgatttaaaggtataatttcttgtta

SEQ ID NO: 422620 - DNA, 30 bp, Artificial Sequence
  Synthetic oligonucleotide
gtccataccggcgcatcatgggagttgtta

SEQ ID NO: 422621 - DNA, 30 bp, Artificial Sequence
  Synthetic oligonucleotide
tgcaaagagagaatggaacaaccgttgtta

SEQ ID NO: 422622 - DNA, 30 bp, Artificial Sequence
  Synthetic oligonucleotide
tatccgaggaagtgagccggttctttgtta

SEQ ID NO: 422623 - DNA, 30 bp, Artificial Sequence
  Synthetic oligonucleotide
tcagtggatcgatgggctagcgccaattta

SEQ ID NO: 422624 - DNA, 30 bp, Artificial Sequence
  Synthetic oligonucleotide
gtccctagggtagttgttttcaagaattta

SEQ ID NO: 422625 - DNA, 30 bp, Artificial Sequence
  Synthetic oligonucleotide
ccatgggcgactcaatataaccgtaattta

SEQ ID NO: 422626 - DNA, 29 bp, Artificial Sequence
  Synthetic oligonucleotide
aagaccgttgggtttggttcaaacattta

SEQ ID NO: 422627 - DNA, 30 bp, Artificial Sequence
  Synthetic oligonucleotide
atgttgtgagtcaccgttaaacaacattta

SEQ ID NO: 422628 - DNA, 30 bp, Artificial Sequence
  Synthetic oligonucleotide
ctcggaggcgatttatctgactaacattta

SEQ ID NO: 422629 - DNA, 30 bp, Artificial Sequence
  Synthetic oligonucleotide
actcatatcgttgaagagctggcacattta

SEQ ID NO: 422630 - DNA, 30 bp, Artificial Sequence
  Synthetic oligonucleotide
tcagcgccagtttccatagggacccattta

SEQ ID NO: 422631 - DNA, 30 bp, Artificial Sequence
  Synthetic oligonucleotide
ttctagatccaaggtcagaaactccattta

SEQ ID NO: 422632 - DNA, 30 bp, Artificial Sequence
  Synthetic oligonucleotide
taaaaccacggcgtgatttgaagtcattta

SEQ ID NO: 422633 - DNA, 30 bp, Artificial Sequence
  Synthetic oligonucleotide
tagttcgatgtccggcgggaggaagattta

SEQ ID NO: 422634 - DNA, 30 bp, Artificial Sequence
  Synthetic oligonucleotide
tctgagcgacttggaggtatgacagattta

SEQ ID NO: 422635 - DNA, 30 bp, Artificial Sequence
  Synthetic oligonucleotide
ttaaggcgtgtctcataagtggtagattta

SEQ ID NO: 422636 - DNA, 30 bp, Artificial Sequence
  Synthetic oligonucleotide
ttagtgggttcctcgagcacgatcgattta

SEQ ID NO: 422637 - DNA, 30 bp, Artificial Sequence
  Synthetic oligonucleotide
tagcttgcggtgcttctagctgtcgattta

SEQ ID NO: 422638 - DNA, 30 bp, Artificial Sequence
  Synthetic oligonucleotide
cgtggtagctctatcgtataaagggattta

SEQ ID NO: 422639 - DNA, 30 bp, Artificial Sequence
  Synthetic oligonucleotide
cattgggacctcttacgagctatggattta

SEQ ID NO: 422640 - DNA, 30 bp, Artificial Sequence
  Synthetic oligonucleotide
atgcgaaccgtgtaagatattgtggattta

SEQ ID NO: 422641 - DNA, 30 bp, Artificial Sequence
  Synthetic oligonucleotide
cataggttatcgacgggagataatgattta

SEQ ID NO: 422642 - DNA, 30 bp, Artificial Sequence
  Synthetic oligonucleotide
atacagtctgtcaagactcgaggatattta

SEQ ID NO: 422643 - DNA, 30 bp, Artificial Sequence
  Synthetic oligonucleotide
catatgagcagcttaagtgccaactattta

SEQ ID NO: 422644 - DNA, 30 bp, Artificial Sequence
  Synthetic oligonucleotide
acagactgtcggaagtacttgatctattta

SEQ ID NO: 422645 - DNA, 30 bp, Artificial Sequence
  Synthetic oligonucleotide
cgggcatccatacatcagacgttctattta

SEQ ID NO: 422646 - DNA, 30 bp, Artificial Sequence
  Synthetic oligonucleotide
gctccgcaataggtctccaccaggtattta

SEQ ID NO: 422647 - DNA, 30 bp, Artificial Sequence
  Synthetic oligonucleotide
ccaggttttcgtattaaaacggggtattta

SEQ ID NO: 422648 - DNA, 30 bp, Artificial Sequence
  Synthetic oligonucleotide
aacatacagactttagttatcctgtattta

SEQ ID NO: 422649 - DNA, 30 bp, Artificial Sequence
  Synthetic oligonucleotide
tgtgacatgaccaatgctggaaattattta

SEQ ID NO: 422650 - DNA, 30 bp, Artificial Sequence
  Synthetic oligonucleotide
gatcggtccggagggggcgatcattattta

SEQ ID NO: 422651 - DNA, 30 bp, Artificial Sequence
  Synthetic oligonucleotide
gcggacgtttgttatggtttcacttattta

SEQ ID NO: 422652 - DNA, 30 bp, Artificial Sequence
  Synthetic oligonucleotide
atgttgatgcaccagcgttaaagttattta

SEQ ID NO: 422653 - DNA, 30 bp, Artificial Sequence
  Synthetic oligonucleotide
gcataagacttgtagtctaggggttattta

SEQ ID NO: 422654 - DNA, 30 bp, Artificial Sequence
  Synthetic oligonucleotide
tcgtgagagtctccacttgataaaacttta

SEQ ID NO: 422655 - DNA, 30 bp, Artificial Sequence
  Synthetic oligonucleotide
gggcagtcgatgtagataccagaaacttta

SEQ ID NO: 422656 - DNA, 30 bp, Artificial Sequence
  Synthetic oligonucleotide
gagtataaggccaatagaattggaacttta

SEQ ID NO: 422657 - DNA, 30 bp, Artificial Sequence
  Synthetic oligonucleotide
agcagtttaacgaggtgtcagataacttta

SEQ ID NO: 422658 - DNA, 30 bp, Artificial Sequence
  Synthetic oligonucleotide
tgtatacattagatcgaggggtacacttta

SEQ ID NO: 422659 - DNA, 30 bp, Artificial Sequence
  Synthetic oligonucleotide
cgcatagggtcggtttgggcccggacttta

SEQ ID NO: 422660 - DNA, 30 bp, Artificial Sequence
  Synthetic oligonucleotide
ataaaggactttacttttgtatggacttta

SEQ ID NO: 422661 - DNA, 30 bp, Artificial Sequence
  Synthetic oligonucleotide
tagcgggagtttcctctgatggttacttta

SEQ ID NO: 422662 - DNA, 30 bp, Artificial Sequence
  Synthetic oligonucleotide
caccaaattggcgtaggaagcaaaccttta

SEQ ID NO: 422663 - DNA, 30 bp, Artificial Sequence
  Synthetic oligonucleotide
gggactactaggtggagtcttgaaccttta

SEQ ID NO: 422664 - DNA, 30 bp, Artificial Sequence
  Synthetic oligonucleotide
tggtttaataagagtggggtcagaccttta

SEQ ID NO: 422665 - DNA, 30 bp, Artificial Sequence
  Synthetic oligonucleotide
acggatgggttgagccgatgacgaccttta

SEQ ID NO: 422666 - DNA, 30 bp, Artificial Sequence
  Synthetic oligonucleotide
aaagggaccaatgggtatcagttcccttta

SEQ ID NO: 422667 - DNA, 30 bp, Artificial Sequence
  Synthetic oligonucleotide
cttaacagctccctcctcgtcaagccttta

SEQ ID NO: 422668 - DNA, 30 bp, Artificial Sequence
  Synthetic oligonucleotide
gagacttgtggacacgcaagttagccttta

SEQ ID NO: 422669 - DNA, 30 bp, Artificial Sequence
  Synthetic oligonucleotide
ttcattcatgctccgcatacagggccttta

SEQ ID NO: 422670 - DNA, 30 bp, Artificial Sequence
  Synthetic oligonucleotide
ggtgacattctcaagtcgaagctgccttta

SEQ ID NO: 422671 - DNA, 30 bp, Artificial Sequence
  Synthetic oligonucleotide
gcggggatacggtgggcgtagctgccttta

SEQ ID NO: 422672 - DNA, 30 bp, Artificial Sequence
  Synthetic oligonucleotide
tcccccccgcccggatagtgtctgccttta

SEQ ID NO: 422673 - DNA, 30 bp, Artificial Sequence
  Synthetic oligonucleotide
gaagaaggagatactagaaaaattccttta

SEQ ID NO: 422674 - DNA, 30 bp, Artificial Sequence
  Synthetic oligonucleotide
cccggtcatctaatatttaattaagcttta

SEQ ID NO: 422675 - DNA, 30 bp, Artificial Sequence
  Synthetic oligonucleotide
aaggcggccggcggttggcaacgggcttta

SEQ ID NO: 422676 - DNA, 30 bp, Artificial Sequence
  Synthetic oligonucleotide
caagtgcttggcttgtggcatttggcttta

SEQ ID NO: 422677 - DNA, 30 bp, Artificial Sequence
  Synthetic oligonucleotide
ttatagtaggtaactcaatcgaaatcttta

SEQ ID NO: 422678 - DNA, 30 bp, Artificial Sequence
  Synthetic oligonucleotide
ctttaacagacgttggaaatgagatcttta

SEQ ID NO: 422679 - DNA, 30 bp, Artificial Sequence
  Synthetic oligonucleotide
gcgaagacagtatcagacgctcgatcttta

SEQ ID NO: 422680 - DNA, 30 bp, Artificial Sequence
  Synthetic oligonucleotide
tagagtgcgcgatctctttcaatatcttta

SEQ ID NO: 422681 - DNA, 30 bp, Artificial Sequence
  Synthetic oligonucleotide
catgcgagtttagaaatttttcgctcttta

SEQ ID NO: 422682 - DNA, 30 bp, Artificial Sequence
  Synthetic oligonucleotide
aaaacggctagcataaaacgcggctcttta

SEQ ID NO: 422683 - DNA, 30 bp, Artificial Sequence
  Synthetic oligonucleotide
atacttagcccggttctcacagcgtcttta

SEQ ID NO: 422684 - DNA, 30 bp, Artificial Sequence
  Synthetic oligonucleotide
aggcgtagcgccagtccgtgaatgtcttta

SEQ ID NO: 422685 - DNA, 30 bp, Artificial Sequence
  Synthetic oligonucleotide
agcatatagagcatcgtcgcgatgtcttta

SEQ ID NO: 422686 - DNA, 30 bp, Artificial Sequence
  Synthetic oligonucleotide
gtgtgctaactcgatcgggcttattcttta

SEQ ID NO: 422687 - DNA, 30 bp, Artificial Sequence
  Synthetic oligonucleotide
gttaaggtgtatttctgtttttcttcttta

SEQ ID NO: 422688 - DNA, 30 bp, Artificial Sequence
  Synthetic oligonucleotide
ggggccccggagcaacgcatatgttcttta

SEQ ID NO: 422689 - DNA, 30 bp, Artificial Sequence
  Synthetic oligonucleotide
cattctccccggatccaacggggaagttta

SEQ ID NO: 422690 - DNA, 30 bp, Artificial Sequence
  Synthetic oligonucleotide
cttaattaggcaaacctatggggaagttta

SEQ ID NO: 422691 - DNA, 30 bp, Artificial Sequence
  Synthetic oligonucleotide
gcggccatatcaatggccaaatgaagttta

SEQ ID NO: 422692 - DNA, 30 bp, Artificial Sequence
  Synthetic oligonucleotide
tgtcgtcagacatcccgcttagtaagttta

SEQ ID NO: 422693 - DNA, 30 bp, Artificial Sequence
  Synthetic oligonucleotide
cattctggataagccctcgtatacagttta

SEQ ID NO: 422694 - DNA, 30 bp, Artificial Sequence
  Synthetic oligonucleotide
ttaaccctgtgattgttgctaagcagttta

SEQ ID NO: 422695 - DNA, 30 bp, Artificial Sequence
  Synthetic oligonucleotide
tatccgacttatccacgcccggtcagttta

SEQ ID NO: 422696 - DNA, 30 bp, Artificial Sequence
  Synthetic oligonucleotide
gcccacttgatataaggtattcagagttta

SEQ ID NO: 422697 - DNA, 30 bp, Artificial Sequence
  Synthetic oligonucleotide
ggtgcctccggtcttacgcccacgagttta

SEQ ID NO: 422698 - DNA, 30 bp, Artificial Sequence
  Synthetic oligonucleotide
gcacaaaacataaactggcaaagtagttta

SEQ ID NO: 422699 - DNA, 30 bp, Artificial Sequence
  Synthetic oligonucleotide
cacacttacctagctgacgtgtgtagttta

SEQ ID NO: 422700 - DNA, 30 bp, Artificial Sequence
  Synthetic oligonucleotide
ctattgctcgttatataagccctacgttta

SEQ ID NO: 422701 - DNA, 30 bp, Artificial Sequence
  Synthetic oligonucleotide
gttacgcctaggtaagatgaaaaccgttta

SEQ ID NO: 422702 - DNA, 30 bp, Artificial Sequence
  Synthetic oligonucleotide
tcttgagattcataggtagttttccgttta

SEQ ID NO: 422703 - DNA, 30 bp, Artificial Sequence
  Synthetic oligonucleotide
tgctttcaggtgaccggcacgtagcgttta

SEQ ID NO: 422704 - DNA, 30 bp, Artificial Sequence
  Synthetic oligonucleotide
tgatccaccttagaggttagctctcgttta

SEQ ID NO: 422705 - DNA, 30 bp, Artificial Sequence
  Synthetic oligonucleotide
cgctcgctctgtcatcgggagagtcgttta

SEQ ID NO: 422706 - DNA, 30 bp, Artificial Sequence
  Synthetic oligonucleotide
tattgaattaaaaacaacgaatttcgttta

SEQ ID NO: 422707 - DNA, 30 bp, Artificial Sequence
  Synthetic oligonucleotide
cagaaatcactccaatgtcactcaggttta

SEQ ID NO: 422708 - DNA, 30 bp, Artificial Sequence
  Synthetic oligonucleotide
aaaggacacgaccatttgatctcaggttta

SEQ ID NO: 422709 - DNA, 30 bp, Artificial Sequence
  Synthetic oligonucleotide
ggatttaaagaagctatccgcggaggttta

SEQ ID NO: 422710 - DNA, 30 bp, Artificial Sequence
  Synthetic oligonucleotide
cttaaaaggaccgtcctcacctgaggttta

SEQ ID NO: 422711 - DNA, 30 bp, Artificial Sequence
  Synthetic oligonucleotide
atccgtacaatcgaattcatatccggttta

SEQ ID NO: 422712 - DNA, 30 bp, Artificial Sequence
  Synthetic oligonucleotide
cgctatatcctttccaacgctgagggttta

SEQ ID NO: 422713 - DNA, 30 bp, Artificial Sequence
  Synthetic oligonucleotide
tcatgtacttatgagcgcactcctggttta

SEQ ID NO: 422714 - DNA, 30 bp, Artificial Sequence
  Synthetic oligonucleotide
aagtcacgtcttttcttagttcgtggttta

SEQ ID NO: 422715 - DNA, 30 bp, Artificial Sequence
  Synthetic oligonucleotide
gaaaaccccttggatgtggtcatatgttta

SEQ ID NO: 422716 - DNA, 30 bp, Artificial Sequence
  Synthetic oligonucleotide
gtttattaaaattttcggacaaactgttta

SEQ ID NO: 422717 - DNA, 30 bp, Artificial Sequence
  Synthetic oligonucleotide
ctctagcagcagcatttgtctccctgttta

SEQ ID NO: 422718 - DNA, 30 bp, Artificial Sequence
  Synthetic oligonucleotide
atggatcgttacggaatgtttatctgttta

SEQ ID NO: 422719 - DNA, 30 bp, Artificial Sequence
  Synthetic oligonucleotide
gggccccatgttcgaaccgacgtctgttta

SEQ ID NO: 422720 - DNA, 30 bp, Artificial Sequence
  Synthetic oligonucleotide
ccagttacgggggcctgtatcccgtgttta

SEQ ID NO: 422721 - DNA, 30 bp, Artificial Sequence
  Synthetic oligonucleotide
atgagttgtcgtacataaacacggtgttta

SEQ ID NO: 422722 - DNA, 30 bp, Artificial Sequence
  Synthetic oligonucleotide
tgactcttacggctaacaaagttgtgttta

SEQ ID NO: 422723 - DNA, 30 bp, Artificial Sequence
  Synthetic oligonucleotide
ggatcggcattacttaaccaaagttgttta

SEQ ID NO: 422724 - DNA, 30 bp, Artificial Sequence
  Synthetic oligonucleotide
agttatttcagtactggtttcatttgttta

SEQ ID NO: 422725 - DNA, 30 bp, Artificial Sequence
  Synthetic oligonucleotide
tcaactcattgtcaacaaagcttttgttta

SEQ ID NO: 422726 - DNA, 30 bp, Artificial Sequence
  Synthetic oligonucleotide
ttgagtgaaattgggactcgtcaaatttta

SEQ ID NO: 422727 - DNA, 30 bp, Artificial Sequence
  Synthetic oligonucleotide
ttgtatgctaatgatcctgatccaatttta

SEQ ID NO: 422728 - DNA, 30 bp, Artificial Sequence
  Synthetic oligonucleotide
tcgggtacttttcgggagcacgcaatttta

SEQ ID NO: 422729 - DNA, 30 bp, Artificial Sequence
  Synthetic oligonucleotide
gcttgaactcgtcacgctagtcgaatttta

SEQ ID NO: 422730 - DNA, 30 bp, Artificial Sequence
  Synthetic oligonucleotide
gagtgctcacaacactgtgcaataatttta

SEQ ID NO: 422731 - DNA, 30 bp, Artificial Sequence
  Synthetic oligonucleotide
atcagtgggcctagggaactatacatttta

SEQ ID NO: 422732 - DNA, 30 bp, Artificial Sequence
  Synthetic oligonucleotide
gatgctataagttcacgacgccccatttta

SEQ ID NO: 422733 - DNA, 30 bp, Artificial Sequence
  Synthetic oligonucleotide
ctcttcactcacggtcaggagaagatttta

SEQ ID NO: 422734 - DNA, 30 bp, Artificial Sequence
  Synthetic oligonucleotide
gtccgacagctgtggtcgataaatatttta

SEQ ID NO: 422735 - DNA, 30 bp, Artificial Sequence
  Synthetic oligonucleotide
tttgggtggggcgatgaagcgaaactttta

SEQ ID NO: 422736 - DNA, 30 bp, Artificial Sequence
  Synthetic oligonucleotide
atttgcgtttgtggggggggaacactttta

SEQ ID NO: 422737 - DNA, 30 bp, Artificial Sequence
  Synthetic oligonucleotide
gtgccgggtcgggttggtgagccactttta

SEQ ID NO: 422738 - DNA, 30 bp, Artificial Sequence
  Synthetic oligonucleotide
agacgtttgggttcggaagcgtgcctttta

SEQ ID NO: 422739 - DNA, 30 bp, Artificial Sequence
  Synthetic oligonucleotide
tgactcatggcctctcactcaatgctttta

SEQ ID NO: 422740 - DNA, 30 bp, Artificial Sequence
  Synthetic oligonucleotide
gagcgatatccgccgccaaccatgctttta

SEQ ID NO: 422741 - DNA, 30 bp, Artificial Sequence
  Synthetic oligonucleotide
caatgcagaatttatgtgtatctgctttta

SEQ ID NO: 422742 - DNA, 30 bp, Artificial Sequence
  Synthetic oligonucleotide
ggagttgtagctgcttcccccactctttta

SEQ ID NO: 422743 - DNA, 30 bp, Artificial Sequence
  Synthetic oligonucleotide
ttagttacacgagggagttgaaaagtttta

SEQ ID NO: 422744 - DNA, 30 bp, Artificial Sequence
  Synthetic oligonucleotide
tacaagattttgattgtgacctgagtttta

SEQ ID NO: 422745 - DNA, 30 bp, Artificial Sequence
  Synthetic oligonucleotide
aaatcgtttacaggcgatttgctagtttta

SEQ ID NO: 422746 - DNA, 30 bp, Artificial Sequence
  Synthetic oligonucleotide
ctacgaaaataagtttcggacacggtttta

SEQ ID NO: 422747 - DNA, 30 bp, Artificial Sequence
  Synthetic oligonucleotide
gcatttataagaaatcctaatggggtttta

SEQ ID NO: 422748 - DNA, 30 bp, Artificial Sequence
  Synthetic oligonucleotide
gagtaggtccgcgtaccaacatgggtttta

SEQ ID NO: 422749 - DNA, 30 bp, Artificial Sequence
  Synthetic oligonucleotide
cggtttgacttatagggtttattggtttta

SEQ ID NO: 422750 - DNA, 30 bp, Artificial Sequence
  Synthetic oligonucleotide
catgattaccgggcacatttgagtgtttta

SEQ ID NO: 422751 - DNA, 30 bp, Artificial Sequence
  Synthetic oligonucleotide
agacgcgcacagctacctaggcgtgtttta

SEQ ID NO: 422752 - DNA, 30 bp, Artificial Sequence
  Synthetic oligonucleotide
ccaatggcgctgataggtttgcgtgtttta

SEQ ID NO: 422753 - DNA, 30 bp, Artificial Sequence
  Synthetic oligonucleotide
cagccgttggctatagggttataattttta

SEQ ID NO: 422754 - DNA, 30 bp, Artificial Sequence
  Synthetic oligonucleotide
ggaacatatggccttctagaaacattttta

SEQ ID NO: 422755 - DNA, 30 bp, Artificial Sequence
  Synthetic oligonucleotide
gaactactaggagactgaaagggattttta

SEQ ID NO: 422756 - DNA, 30 bp, Artificial Sequence
  Synthetic oligonucleotide
atttgcgcagtgctggtttctctattttta

SEQ ID NO: 422757 - DNA, 29 bp, Artificial Sequence
  Synthetic oligonucleotide
ggttcgatgctgacgttccgaacttttta

SEQ ID NO: 422758 - DNA, 30 bp, Artificial Sequence
  Synthetic oligonucleotide
gaggtttgcgttggggccgaggacttttta

SEQ ID NO: 422759 - DNA, 30 bp, Artificial Sequence
  Synthetic oligonucleotide
gctgaaaaacttttaagtacggccttttta

SEQ ID NO: 422760 - DNA, 30 bp, Artificial Sequence
  Synthetic oligonucleotide
tccctagaggacacgattttatgcttttta

SEQ ID NO: 422761 - DNA, 30 bp, Artificial Sequence
  Synthetic oligonucleotide
aagattgagtcccgtggctacgtcttttta

SEQ ID NO: 422762 - DNA, 30 bp, Artificial Sequence
  Synthetic oligonucleotide
ggtttctggtggatggagggaacgttttta

SEQ ID NO: 422763 - DNA, 30 bp, Artificial Sequence
  Synthetic oligonucleotide
ggcgtttaggctgcctctgtaaggttttta

SEQ ID NO: 422764 - DNA, 30 bp, Artificial Sequence
  Synthetic oligonucleotide
caaagaaagaactgccgtggggggttttta

SEQ ID NO: 422765 - DNA, 30 bp, Artificial Sequence
  Synthetic oligonucleotide
cttaggggacagtactctccaactttttta

SEQ ID NO: 422766 - DNA, 30 bp, Artificial Sequence
  Synthetic oligonucleotide
gaaaaggtatcgtaggggattggtttttta

SEQ ID NO: 422767 - DNA, 30 bp, Artificial Sequence
  Synthetic oligonucleotide
gcctgtccaccagatgtgtggcaaaaaaac

SEQ ID NO: 422768 - DNA, 30 bp, Artificial Sequence
  Synthetic oligonucleotide
gcaaatctgggtgagcgtaacgaaaaaaac

SEQ ID NO: 422769 - DNA, 30 bp, Artificial Sequence
  Synthetic oligonucleotide
ggaaagtgttacaatatgtctacaaaaaac

SEQ ID NO: 422770 - DNA, 30 bp, Artificial Sequence
  Synthetic oligonucleotide
tcaagccgcatcatcctgcagagaaaaaac

SEQ ID NO: 422771 - DNA, 30 bp, Artificial Sequence
  Synthetic oligonucleotide
tcggacacggataattctttcggaaaaaac

SEQ ID NO: 422772 - DNA, 30 bp, Artificial Sequence
  Synthetic oligonucleotide
caaagcagctcagggcgggcaataaaaaac

SEQ ID NO: 422773 - DNA, 30 bp, Artificial Sequence
  Synthetic oligonucleotide
gttcgcgccgtacctctacgagtaaaaaac

SEQ ID NO: 422774 - DNA, 30 bp, Artificial Sequence
  Synthetic oligonucleotide
taagaagtgtggctggggttttccaaaaac

SEQ ID NO: 422775 - DNA, 30 bp, Artificial Sequence
  Synthetic oligonucleotide
ggcgcccggccctggtagggggtcaaaaac

SEQ ID NO: 422776 - DNA, 30 bp, Artificial Sequence
  Synthetic oligonucleotide
tgtaaaggtccactgtcttctaagaaaaac

SEQ ID NO: 422777 - DNA, 30 bp, Artificial Sequence
  Synthetic oligonucleotide
atcgcattgtctgctgcgcctcagaaaaac

SEQ ID NO: 422778 - DNA, 30 bp, Artificial Sequence
  Synthetic oligonucleotide
ttgctctctgtttctgattgcaggaaaaac

SEQ ID NO: 422779 - DNA, 30 bp, Artificial Sequence
  Synthetic oligonucleotide
ttatcttgccagatggcagctgataaaaac

SEQ ID NO: 422780 - DNA, 30 bp, Artificial Sequence
  Synthetic oligonucleotide
gattggaggataaatgtttaaactaaaaac

SEQ ID NO: 422781 - DNA, 30 bp, Artificial Sequence
  Synthetic oligonucleotide
gcactattcattccgtgggtcccacaaaac

SEQ ID NO: 422782 - DNA, 30 bp, Artificial Sequence
  Synthetic oligonucleotide
aaccgtgttggtaataaaaatatacaaaac

SEQ ID NO: 422783 - DNA, 30 bp, Artificial Sequence
  Synthetic oligonucleotide
cctcgacccaacacctgtttatcccaaaac

SEQ ID NO: 422784 - DNA, 30 bp, Artificial Sequence
  Synthetic oligonucleotide
cggttgtcagtctaaatacagtcgcaaaac

SEQ ID NO: 422785 - DNA, 30 bp, Artificial Sequence
  Synthetic oligonucleotide
tggggattgttttaaagctcggggcaaaac

SEQ ID NO: 422786 - DNA, 30 bp, Artificial Sequence
  Synthetic oligonucleotide
ggtatttagttctaaagttaccatcaaaac

SEQ ID NO: 422787 - DNA, 30 bp, Artificial Sequence
  Synthetic oligonucleotide
tatcgtgtctgcaagttacaagctcaaaac

SEQ ID NO: 422788 - DNA, 30 bp, Artificial Sequence
  Synthetic oligonucleotide
cttggtgtcagcatcccacgctttcaaaac

SEQ ID NO: 422789 - DNA, 30 bp, Artificial Sequence
  Synthetic oligonucleotide
cgggatatagatgtaaacctctaagaaaac

SEQ ID NO: 422790 - DNA, 30 bp, Artificial Sequence
  Synthetic oligonucleotide
actctgcggaatgtagcgttacgagaaaac

SEQ ID NO: 422791 - DNA, 30 bp, Artificial Sequence
  Synthetic oligonucleotide
aacttaggttaaactggaatgggagaaaac

SEQ ID NO: 422792 - DNA, 30 bp, Artificial Sequence
  Synthetic oligonucleotide
gtcctcttcgtagtccggacggtagaaaac

SEQ ID NO: 422793 - DNA, 30 bp, Artificial Sequence
  Synthetic oligonucleotide
caagaccagataccggtggagttagaaaac

SEQ ID NO: 422794 - DNA, 30 bp, Artificial Sequence
  Synthetic oligonucleotide
tttgttcacatgctgggggaccaggaaaac

SEQ ID NO: 422795 - DNA, 30 bp, Artificial Sequence
  Synthetic oligonucleotide
aaacagtggttagggccacaatatgaaaac

SEQ ID NO: 422796 - DNA, 30 bp, Artificial Sequence
  Synthetic oligonucleotide
gaatatccacctcaacggatgattgaaaac

SEQ ID NO: 422797 - DNA, 30 bp, Artificial Sequence
  Synthetic oligonucleotide
gtttatggcgatgaggcatacgttgaaaac

SEQ ID NO: 422798 - DNA, 30 bp, Artificial Sequence
  Synthetic oligonucleotide
ctattccgtgccctttctaggggataaaac

SEQ ID NO: 422799 - DNA, 31 bp, Artificial Sequence
  Synthetic oligonucleotide
tataaaggtcactacgtgggaaaactaaaac

SEQ ID NO: 422800 - DNA, 30 bp, Artificial Sequence
  Synthetic oligonucleotide
aagtgattgtatacctacaccttctaaaac

SEQ ID NO: 422801 - DNA, 30 bp, Artificial Sequence
  Synthetic oligonucleotide
ttctgtcgggcgggtgggctgcggtaaaac

SEQ ID NO: 422802 - DNA, 30 bp, Artificial Sequence
  Synthetic oligonucleotide
gcgatcgtaattatctttctcatgtaaaac

SEQ ID NO: 422803 - DNA, 31 bp, Artificial Sequence
  Synthetic oligonucleotide
tggtggcgaggcggcgcatccaagttaaaac

SEQ ID NO: 422804 - DNA, 30 bp, Artificial Sequence
  Synthetic oligonucleotide
ccttgcggccacatttagcagtgttaaaac

SEQ ID NO: 422805 - DNA, 30 bp, Artificial Sequence
  Synthetic oligonucleotide
gcgggcctgtcttcttagacttgttaaaac

SEQ ID NO: 422806 - DNA, 30 bp, Artificial Sequence
  Synthetic oligonucleotide
ggtctagagcccgcttgtgtaatttaaaac

SEQ ID NO: 422807 - DNA, 31 bp, Artificial Sequence
  Synthetic oligonucleotide
acaaaaacgccgtataggttctgtaacaaac

SEQ ID NO: 422808 - DNA, 30 bp, Artificial Sequence
  Synthetic oligonucleotide
gcttgaatcgcctacagagtatacacaaac

SEQ ID NO: 422809 - DNA, 30 bp, Artificial Sequence
  Synthetic oligonucleotide
aggaaacgataaaatatatagagcacaaac

SEQ ID NO: 422810 - DNA, 30 bp, Artificial Sequence
  Synthetic oligonucleotide
ggacgctagaataactctagcaagacaaac

SEQ ID NO: 422811 - DNA, 30 bp, Artificial Sequence
  Synthetic oligonucleotide
ttgagggcaacaacttagtacaggacaaac

SEQ ID NO: 422812 - DNA, 30 bp, Artificial Sequence
  Synthetic oligonucleotide
ctggacaggcacttcgaatatcggacaaac

SEQ ID NO: 422813 - DNA, 30 bp, Artificial Sequence
  Synthetic oligonucleotide
atctaacccggccagctagtccgtacaaac

SEQ ID NO: 422814 - DNA, 30 bp, Artificial Sequence
  Synthetic oligonucleotide
ttcggcacggatgggaggcctctaccaaac

SEQ ID NO: 422815 - DNA, 30 bp, Artificial Sequence
  Synthetic oligonucleotide
gcgcagaccattacatggtgggtaccaaac

SEQ ID NO: 422816 - DNA, 30 bp, Artificial Sequence
  Synthetic oligonucleotide
cactaagtaggcatatcttttaatccaaac

SEQ ID NO: 422817 - DNA, 30 bp, Artificial Sequence
  Synthetic oligonucleotide
tgcgcgtgaggttccagtaggcatccaaac

SEQ ID NO: 422818 - DNA, 30 bp, Artificial Sequence
  Synthetic oligonucleotide
gaattctcctattggaatacacctccaaac

SEQ ID NO: 422819 - DNA, 30 bp, Artificial Sequence
  Synthetic oligonucleotide
cacagagtaccccccgcaatccttccaaac

SEQ ID NO: 422820 - DNA, 30 bp, Artificial Sequence
  Synthetic oligonucleotide
gtatgtttgtcaatacttaactaagcaaac

SEQ ID NO: 422821 - DNA, 30 bp, Artificial Sequence
  Synthetic oligonucleotide
aggagactcagagatcgccgaagagcaaac

SEQ ID NO: 422822 - DNA, 30 bp, Artificial Sequence
  Synthetic oligonucleotide
cgtttgtagtctttcaccagtaacgcaaac

SEQ ID NO: 422823 - DNA, 30 bp, Artificial Sequence
  Synthetic oligonucleotide
tgacgcctccaaggtcgaatacccgcaaac

SEQ ID NO: 422824 - DNA, 30 bp, Artificial Sequence
  Synthetic oligonucleotide
atacaacaaaacttgttcttcttcgcaaac

SEQ ID NO: 422825 - DNA, 30 bp, Artificial Sequence
  Synthetic oligonucleotide
catccctctaggataagtaagttcgcaaac

SEQ ID NO: 422826 - DNA, 30 bp, Artificial Sequence
  Synthetic oligonucleotide
ttttaggaagtggctgcgtcttttgcaaac

SEQ ID NO: 422827 - DNA, 30 bp, Artificial Sequence
  Synthetic oligonucleotide
ctttgaataggggaagtcacgtaatcaaac

SEQ ID NO: 422828 - DNA, 30 bp, Artificial Sequence
  Synthetic oligonucleotide
tagtttgcagccaaatatccctcatcaaac

SEQ ID NO: 422829 - DNA, 30 bp, Artificial Sequence
  Synthetic oligonucleotide
ctattcagaagtggcaggaagtagtcaaac

SEQ ID NO: 422830 - DNA, 30 bp, Artificial Sequence
  Synthetic oligonucleotide
gaaacaacagttccgctctaaccgtcaaac

SEQ ID NO: 422831 - DNA, 30 bp, Artificial Sequence
  Synthetic oligonucleotide
gaccggtctccccgacaccattcaagaaac

SEQ ID NO: 422832 - DNA, 30 bp, Artificial Sequence
  Synthetic oligonucleotide
tgcatggaagtctcgcttgacagcagaaac

SEQ ID NO: 422833 - DNA, 30 bp, Artificial Sequence
  Synthetic oligonucleotide
cgtagcggtctcggagttttgttcagaaac

SEQ ID NO: 422834 - DNA, 30 bp, Artificial Sequence
  Synthetic oligonucleotide
gctttttcgccctaaagatcctcgagaaac

SEQ ID NO: 422835 - DNA, 30 bp, Artificial Sequence
  Synthetic oligonucleotide
ggattaatacattatgccaggattagaaac

SEQ ID NO: 422836 - DNA, 31 bp, Artificial Sequence
  Synthetic oligonucleotide
tcctcgtggtctcccagtgagacaacgaaac

SEQ ID NO: 422837 - DNA, 30 bp, Artificial Sequence
  Synthetic oligonucleotide
cccgcatgcttgctcgttgcatcacgaaac

SEQ ID NO: 422838 - DNA, 30 bp, Artificial Sequence
  Synthetic oligonucleotide
gccacttatttgtttacaaactcacgaaac

SEQ ID NO: 422839 - DNA, 30 bp, Artificial Sequence
  Synthetic oligonucleotide
tagagtctgcactcttcatgcgtacgaaac

SEQ ID NO: 422840 - DNA, 30 bp, Artificial Sequence
  Synthetic oligonucleotide
gtagtacgccctgtagcggttctccgaaac

SEQ ID NO: 422841 - DNA, 30 bp, Artificial Sequence
  Synthetic oligonucleotide
tgtaatctgtacggaggcttgcagcgaaac

SEQ ID NO: 422842 - DNA, 30 bp, Artificial Sequence
  Synthetic oligonucleotide
ccacaaatgcgcgttggaaacgagcgaaac

SEQ ID NO: 422843 - DNA, 30 bp, Artificial Sequence
  Synthetic oligonucleotide
acaactatgttactgaatggaaggcgaaac

SEQ ID NO: 422844 - DNA, 30 bp, Artificial Sequence
  Synthetic oligonucleotide
ttctttcgttaaaggggtacacctcgaaac

SEQ ID NO: 422845 - DNA, 30 bp, Artificial Sequence
  Synthetic oligonucleotide
ggaatttgatggagagcgacctttcgaaac

SEQ ID NO: 422846 - DNA, 30 bp, Artificial Sequence
  Synthetic oligonucleotide
tgtaattcagacaaccaatcttaaggaaac

SEQ ID NO: 422847 - DNA, 30 bp, Artificial Sequence
  Synthetic oligonucleotide
cctgactgtctaggagtcccgcacggaaac

SEQ ID NO: 422848 - DNA, 30 bp, Artificial Sequence
  Synthetic oligonucleotide
gcagttttatttacggccttcgacggaaac

SEQ ID NO: 422849 - DNA, 30 bp, Artificial Sequence
  Synthetic oligonucleotide
tggaacgcatccgcgtcggggagcggaaac

SEQ ID NO: 422850 - DNA, 30 bp, Artificial Sequence
  Synthetic oligonucleotide
atgtcttaatcctagaaacacggcggaaac

SEQ ID NO: 422851 - DNA, 30 bp, Artificial Sequence
  Synthetic oligonucleotide
gattcatatatctgtgagtaacagggaaac

SEQ ID NO: 422852 - DNA, 30 bp, Artificial Sequence
  Synthetic oligonucleotide
gatgcatccgccagctggccaacgggaaac

SEQ ID NO: 422853 - DNA, 30 bp, Artificial Sequence
  Synthetic oligonucleotide
ttgcgaagcttttagtcatctcggggaaac

SEQ ID NO: 422854 - DNA, 31 bp, Artificial Sequence
  Synthetic oligonucleotide
gaacaattttgtttcactgcagactggaaac

SEQ ID NO: 422855 - DNA, 30 bp, Artificial Sequence
  Synthetic oligonucleotide
gttacctaagccacgtaaggaggtggaaac

SEQ ID NO: 422856 - DNA, 30 bp, Artificial Sequence
  Synthetic oligonucleotide
acattgcgccgtgattttcacggtggaaac

SEQ ID NO: 422857 - DNA, 31 bp, Artificial Sequence
  Synthetic oligonucleotide
agtataacatggaccttggcaccttggaaac

SEQ ID NO: 422858 - DNA, 30 bp, Artificial Sequence
  Synthetic oligonucleotide
cttaacgacgttggcaggtacctctgaaac

SEQ ID NO: 422859 - DNA, 30 bp, Artificial Sequence
  Synthetic oligonucleotide
gtgttacatctacctgataccctctgaaac

SEQ ID NO: 422860 - DNA, 30 bp, Artificial Sequence
  Synthetic oligonucleotide
gggatttctggacgagtataattctgaaac

SEQ ID NO: 422861 - DNA, 30 bp, Artificial Sequence
  Synthetic oligonucleotide
gtgtcacgacatgctcttgttttctgaaac

SEQ ID NO: 422862 - DNA, 30 bp, Artificial Sequence
  Synthetic oligonucleotide
ttagagccatatgggtactcctcgtgaaac

SEQ ID NO: 422863 - DNA, 30 bp, Artificial Sequence
  Synthetic oligonucleotide
ctgcgaatacacgtaccacggaggtgaaac

SEQ ID NO: 422864 - DNA, 30 bp, Artificial Sequence
  Synthetic oligonucleotide
gtcaatctggcacgtggacaacggtgaaac

SEQ ID NO: 422865 - DNA, 30 bp, Artificial Sequence
  Synthetic oligonucleotide
gtatagccgcaatggacaggctattgaaac

SEQ ID NO: 422866 - DNA, 30 bp, Artificial Sequence
  Synthetic oligonucleotide
ggccagttagtttccaccgggtattgaaac

SEQ ID NO: 422867 - DNA, 30 bp, Artificial Sequence
  Synthetic oligonucleotide
ccgcagtacctccttcgttagtcaataaac

SEQ ID NO: 422868 - DNA, 30 bp, Artificial Sequence
  Synthetic oligonucleotide
ttagcttgaataagtacacttagaataaac

SEQ ID NO: 422869 - DNA, 30 bp, Artificial Sequence
  Synthetic oligonucleotide
gtgtctgcagcgcggtcaccaggaataaac

SEQ ID NO: 422870 - DNA, 30 bp, Artificial Sequence
  Synthetic oligonucleotide
agtcctggctcaatatcttggggaataaac

SEQ ID NO: 422871 - DNA, 30 bp, Artificial Sequence
  Synthetic oligonucleotide
gctttgccaagtcataagcgaaagataaac

SEQ ID NO: 422872 - DNA, 30 bp, Artificial Sequence
  Synthetic oligonucleotide
actggatggactggggactcccagataaac

SEQ ID NO: 422873 - DNA, 30 bp, Artificial Sequence
  Synthetic oligonucleotide
ataccttgagcggttgtttattagataaac

SEQ ID NO: 422874 - DNA, 30 bp, Artificial Sequence
  Synthetic oligonucleotide
aggccgcgcagtttccatagtgcgataaac

SEQ ID NO: 422875 - DNA, 30 bp, Artificial Sequence
  Synthetic oligonucleotide
aaaatggcagatcattatcgaaggataaac

SEQ ID NO: 422876 - DNA, 30 bp, Artificial Sequence
  Synthetic oligonucleotide
aggaaatgataagagtcgtttgggataaac

SEQ ID NO: 422877 - DNA, 30 bp, Artificial Sequence
  Synthetic oligonucleotide
catcttcagaggaaataaggtaatataaac

SEQ ID NO: 422878 - DNA, 30 bp, Artificial Sequence
  Synthetic oligonucleotide
ttagttttctgcgtattgcaaactataaac

SEQ ID NO: 422879 - DNA, 30 bp, Artificial Sequence
  Synthetic oligonucleotide
ggtcatacattctaccacgggcgtataaac

SEQ ID NO: 422880 - DNA, 30 bp, Artificial Sequence
  Synthetic oligonucleotide
taattctcaccgcaaccgacaggtataaac

SEQ ID NO: 422881 - DNA, 30 bp, Artificial Sequence
  Synthetic oligonucleotide
aatgctgtttttggccatggcaaactaaac

SEQ ID NO: 422882 - DNA, 30 bp, Artificial Sequence
  Synthetic oligonucleotide
gtgcatctacttccgacgtgtgaactaaac

SEQ ID NO: 422883 - DNA, 30 bp, Artificial Sequence
  Synthetic oligonucleotide
gcacttttcaaacaaggaataatactaaac

SEQ ID NO: 422884 - DNA, 30 bp, Artificial Sequence
  Synthetic oligonucleotide
aatgctcaaagccgtatgcgatacctaaac

SEQ ID NO: 422885 - DNA, 30 bp, Artificial Sequence
  Synthetic oligonucleotide
agtctgcaataaccgatgcaacctctaaac

SEQ ID NO: 422886 - DNA, 30 bp, Artificial Sequence
  Synthetic oligonucleotide
gcctggaggctctctagtgccgctctaaac

SEQ ID NO: 422887 - DNA, 30 bp, Artificial Sequence
  Synthetic oligonucleotide
aagtcggggtacctatactggattctaaac

SEQ ID NO: 422888 - DNA, 30 bp, Artificial Sequence
  Synthetic oligonucleotide
gagaaacatctcggattgcttgttctaaac

SEQ ID NO: 422889 - DNA, 30 bp, Artificial Sequence
  Synthetic oligonucleotide
aactcatcgaaatcccgagacaaagtaaac

SEQ ID NO: 422890 - DNA, 30 bp, Artificial Sequence
  Synthetic oligonucleotide
ctgttgtttccatgttagattgcagtaaac

SEQ ID NO: 422891 - DNA, 30 bp, Artificial Sequence
  Synthetic oligonucleotide
cgcagctagagatcggtccaagtagtaaac

SEQ ID NO: 422892 - DNA, 30 bp, Artificial Sequence
  Synthetic oligonucleotide
ttgaaggggttgggtttcagggtagtaaac

SEQ ID NO: 422893 - DNA, 30 bp, Artificial Sequence
  Synthetic oligonucleotide
ggtcgctactagtgttgagtgatcgtaaac

SEQ ID NO: 422894 - DNA, 30 bp, Artificial Sequence
  Synthetic oligonucleotide
catttacgatttcggtgtataccggtaaac

SEQ ID NO: 422895 - DNA, 30 bp, Artificial Sequence
  Synthetic oligonucleotide
tttgaatccgcatgttccgcgactgtaaac

SEQ ID NO: 422896 - DNA, 30 bp, Artificial Sequence
  Synthetic oligonucleotide
ggtacatctacttatgtatcatctgtaaac

SEQ ID NO: 422897 - DNA, 30 bp, Artificial Sequence
  Synthetic oligonucleotide
gagctgcatatgcagtgttcacggttaaac

SEQ ID NO: 422898 - DNA, 30 bp, Artificial Sequence
  Synthetic oligonucleotide
aaaccctcgggtaaagtacgttggttaaac

SEQ ID NO: 422899 - DNA, 30 bp, Artificial Sequence
  Synthetic oligonucleotide
caagttcccgccactcataaaagtttaaac

SEQ ID NO: 422900 - DNA, 30 bp, Artificial Sequence
  Synthetic oligonucleotide
tggataaacaaactacgggggggtttaaac

SEQ ID NO: 422901 - DNA, 30 bp, Artificial Sequence
  Synthetic oligonucleotide
agtgcccgagacgcggttggcgagaacaac

SEQ ID NO: 422902 - DNA, 30 bp, Artificial Sequence
  Synthetic oligonucleotide
gttggtctataactggcatggttgaacaac

SEQ ID NO: 422903 - DNA, 30 bp, Artificial Sequence
  Synthetic oligonucleotide
cactcctcggacggacgtcatttgaacaac

SEQ ID NO: 422904 - DNA, 30 bp, Artificial Sequence
  Synthetic oligonucleotide
ctaagtacatataggatcacgagacacaac

SEQ ID NO: 422905 - DNA, 30 bp, Artificial Sequence
  Synthetic oligonucleotide
tatggcgttctgaatgaatcctgacacaac

SEQ ID NO: 422906 - DNA, 30 bp, Artificial Sequence
  Synthetic oligonucleotide
gaagttccagcgaacgcgggcatacacaac

SEQ ID NO: 422907 - DNA, 30 bp, Artificial Sequence
  Synthetic oligonucleotide
gccaacaattgttatcttcaaacccacaac

SEQ ID NO: 422908 - DNA, 30 bp, Artificial Sequence
  Synthetic oligonucleotide
ggtgcgcagtacccatggccatcgcacaac

SEQ ID NO: 422909 - DNA, 30 bp, Artificial Sequence
  Synthetic oligonucleotide
ggcacaccttgtaatgtgttgtctcacaac

SEQ ID NO: 422910 - DNA, 30 bp, Artificial Sequence
  Synthetic oligonucleotide
attgtggtgtatctctgccccgttcacaac

SEQ ID NO: 422911 - DNA, 30 bp, Artificial Sequence
  Synthetic oligonucleotide
aagacggcaagactctgttgcctcgacaac

SEQ ID NO: 422912 - DNA, 30 bp, Artificial Sequence
  Synthetic oligonucleotide
aatacacatcgatagaacgtagtcgacaac

SEQ ID NO: 422913 - DNA, 30 bp, Artificial Sequence
  Synthetic oligonucleotide
ttgggtgtaagtcgaaccagtttcgacaac

SEQ ID NO: 422914 - DNA, 30 bp, Artificial Sequence
  Synthetic oligonucleotide
aacaaaagggttggggtcaggactgacaac

SEQ ID NO: 422915 - DNA, 30 bp, Artificial Sequence
  Synthetic oligonucleotide
taaccctcgctctcgatgtcggctgacaac

SEQ ID NO: 422916 - DNA, 30 bp, Artificial Sequence
  Synthetic oligonucleotide
tccgacatagttttggtccaatctgacaac

SEQ ID NO: 422917 - DNA, 30 bp, Artificial Sequence
  Synthetic oligonucleotide
tgcaggtttcagaaatatcaatttgacaac

SEQ ID NO: 422918 - DNA, 30 bp, Artificial Sequence
  Synthetic oligonucleotide
aatgtagacttctaacgttctaaatacaac

SEQ ID NO: 422919 - DNA, 30 bp, Artificial Sequence
  Synthetic oligonucleotide
tgtttttcaaggaagtcgacacgatacaac

SEQ ID NO: 422920 - DNA, 30 bp, Artificial Sequence
  Synthetic oligonucleotide
gatgttctttaattctcgtgacgatacaac

SEQ ID NO: 422921 - DNA, 30 bp, Artificial Sequence
  Synthetic oligonucleotide
ctatgcggtccagatcagagttgatacaac

SEQ ID NO: 422922 - DNA, 30 bp, Artificial Sequence
  Synthetic oligonucleotide
catggcttttttgtgctgacgatatacaac

SEQ ID NO: 422923 - DNA, 30 bp, Artificial Sequence
  Synthetic oligonucleotide
tagtcgttagagtacgtagtcacctacaac

SEQ ID NO: 422924 - DNA, 30 bp, Artificial Sequence
  Synthetic oligonucleotide
acatcgaatactcgatatgtaatgtacaac

SEQ ID NO: 422925 - DNA, 30 bp, Artificial Sequence
  Synthetic oligonucleotide
accaatcaagtagtatttgaggtgtacaac

SEQ ID NO: 422926 - DNA, 26 bp, Artificial Sequence
  Synthetic oligonucleotide
gagactcgtatcagaggtattacaac

SEQ ID NO: 422927 - DNA, 30 bp, Artificial Sequence
  Synthetic oligonucleotide
aacccgattcctacaacggcagcttacaac

SEQ ID NO: 422928 - DNA, 30 bp, Artificial Sequence
  Synthetic oligonucleotide
tgtcaaaaactattactgcaaggttacaac

SEQ ID NO: 422929 - DNA, 30 bp, Artificial Sequence
  Synthetic oligonucleotide
gtaggcctcgaacgcatacccggttacaac

SEQ ID NO: 422930 - DNA, 30 bp, Artificial Sequence
  Synthetic oligonucleotide
gtaatcaagcgtattacactagacaccaac

SEQ ID NO: 422931 - DNA, 30 bp, Artificial Sequence
  Synthetic oligonucleotide
gattcaagcccgagctacgtggccaccaac

SEQ ID NO: 422932 - DNA, 30 bp, Artificial Sequence
  Synthetic oligonucleotide
aggatgcagagattcgttcaaagcaccaac

SEQ ID NO: 422933 - DNA, 30 bp, Artificial Sequence
  Synthetic oligonucleotide
gcaaccacaggcacgacttgcgtgaccaac

SEQ ID NO: 422934 - DNA, 30 bp, Artificial Sequence
  Synthetic oligonucleotide
ctttgtcccgtcaacagttcggtgaccaac

SEQ ID NO: 422935 - DNA, 30 bp, Artificial Sequence
  Synthetic oligonucleotide
ccgtatttgcacaggatggtgcgtaccaac

SEQ ID NO: 422936 - DNA, 30 bp, Artificial Sequence
  Synthetic oligonucleotide
cggatagtttagttctatggctaacccaac

SEQ ID NO: 422937 - DNA, 30 bp, Artificial Sequence
  Synthetic oligonucleotide
ggtctcagttttctcttacccagagccaac

SEQ ID NO: 422938 - DNA, 30 bp, Artificial Sequence
  Synthetic oligonucleotide
gttataaacttagtaggttgcagagccaac

SEQ ID NO: 422939 - DNA, 30 bp, Artificial Sequence
  Synthetic oligonucleotide
tccgttaggcggatccgatctgccgccaac

SEQ ID NO: 422940 - DNA, 30 bp, Artificial Sequence
  Synthetic oligonucleotide
gcatgatgaacgcaagcagacgtggccaac

SEQ ID NO: 422941 - DNA, 30 bp, Artificial Sequence
  Synthetic oligonucleotide
tttgattcttagtacctatttgtggccaac

SEQ ID NO: 422942 - DNA, 30 bp, Artificial Sequence
  Synthetic oligonucleotide
aatcgcacattacgcagttcgcaatccaac

SEQ ID NO: 422943 - DNA, 30 bp, Artificial Sequence
  Synthetic oligonucleotide
tgggtacggatggaggcgattgcatccaac

SEQ ID NO: 422944 - DNA, 30 bp, Artificial Sequence
  Synthetic oligonucleotide
tcgtagaatgtgcggcgcagaccctccaac

SEQ ID NO: 422945 - DNA, 30 bp, Artificial Sequence
  Synthetic oligonucleotide
tctatatatagactatgcgcgagctccaac

SEQ ID NO: 422946 - DNA, 30 bp, Artificial Sequence
  Synthetic oligonucleotide
gcgacttctgagtggaggcatacgtccaac

SEQ ID NO: 422947 - DNA, 30 bp, Artificial Sequence
  Synthetic oligonucleotide
taactgtggagggccaacgacgcgtccaac

SEQ ID NO: 422948 - DNA, 30 bp, Artificial Sequence
  Synthetic oligonucleotide
ggttcttccaaagaaaagttccattccaac

SEQ ID NO: 422949 - DNA, 30 bp, Artificial Sequence
  Synthetic oligonucleotide
tagcccaagagctgtgatcactattccaac

SEQ ID NO: 422950 - DNA, 30 bp, Artificial Sequence
  Synthetic oligonucleotide
ggattaatgcgcggtttccagcgaagcaac

SEQ ID NO: 422951 - DNA, 31 bp, Artificial Sequence
  Synthetic oligonucleotide
tcccgttgtaaactcttgctccaccagcaac

SEQ ID NO: 422952 - DNA, 30 bp, Artificial Sequence
  Synthetic oligonucleotide
gacgctataagacgggtattctccagcaac

SEQ ID NO: 422953 - DNA, 30 bp, Artificial Sequence
  Synthetic oligonucleotide
tctaaatgggggcttggccgtcgcagcaac

SEQ ID NO: 422954 - DNA, 30 bp, Artificial Sequence
  Synthetic oligonucleotide
attaaagctaaggtacgaaccttgagcaac

SEQ ID NO: 422955 - DNA, 30 bp, Artificial Sequence
  Synthetic oligonucleotide
gcatggtgtgcgcgcacgaggcctagcaac

SEQ ID NO: 422956 - DNA, 30 bp, Artificial Sequence
  Synthetic oligonucleotide
gcaccactacacttaattaccacacgcaac

SEQ ID NO: 422957 - DNA, 30 bp, Artificial Sequence
  Synthetic oligonucleotide
tgttgaccgcgtattggggcgagacgcaac

SEQ ID NO: 422958 - DNA, 30 bp, Artificial Sequence
  Synthetic oligonucleotide
gcggtgacaccttatgcgccttcccgcaac

SEQ ID NO: 422959 - DNA, 30 bp, Artificial Sequence
  Synthetic oligonucleotide
cgtacagcgtaacttattttgagccgcaac

SEQ ID NO: 422960 - DNA, 30 bp, Artificial Sequence
  Synthetic oligonucleotide
gcaaactggtcctgagatgcgacgcgcaac

SEQ ID NO: 422961 - DNA, 30 bp, Artificial Sequence
  Synthetic oligonucleotide
gttagtagggttagctatcttgtgcgcaac

SEQ ID NO: 422962 - DNA, 30 bp, Artificial Sequence
  Synthetic oligonucleotide
gaactgcctacgtttagtctcccaggcaac

SEQ ID NO: 422963 - DNA, 30 bp, Artificial Sequence
  Synthetic oligonucleotide
ggtttgtcagaaactcccgccgtaggcaac

SEQ ID NO: 422964 - DNA, 30 bp, Artificial Sequence
  Synthetic oligonucleotide
ccgttatgcggcatagtggatctcggcaac

SEQ ID NO: 422965 - DNA, 30 bp, Artificial Sequence
  Synthetic oligonucleotide
tagcttaactttctgagaacatagggcaac

SEQ ID NO: 422966 - DNA, 30 bp, Artificial Sequence
  Synthetic oligonucleotide
cgacggttaagtgtgactcctaatggcaac

SEQ ID NO: 422967 - DNA, 30 bp, Artificial Sequence
  Synthetic oligonucleotide
cgaaaacgtagcccgtaatttcgatgcaac

SEQ ID NO: 422968 - DNA, 30 bp, Artificial Sequence
  Synthetic oligonucleotide
cgtagcatagttgaacccccgttctgcaac

SEQ ID NO: 422969 - DNA, 30 bp, Artificial Sequence
  Synthetic oligonucleotide
cggggttcgcgatgcccgccagcgtgcaac

SEQ ID NO: 422970 - DNA, 30 bp, Artificial Sequence
  Synthetic oligonucleotide
gctatctttttacaacgagcaaggtgcaac

SEQ ID NO: 422971 - DNA, 30 bp, Artificial Sequence
  Synthetic oligonucleotide
aaactataatgtaagtaacaccgttgcaac

SEQ ID NO: 422972 - DNA, 30 bp, Artificial Sequence
  Synthetic oligonucleotide
ccggctggatctacgaattgtatttgcaac

SEQ ID NO: 422973 - DNA, 28 bp, Artificial Sequence
  Synthetic oligonucleotide
ttccagttgggtcagctatccaatcaac

SEQ ID NO: 422974 - DNA, 30 bp, Artificial Sequence
  Synthetic oligonucleotide
gcgtagttctacgatgtagtggtaatcaac

SEQ ID NO: 422975 - DNA, 30 bp, Artificial Sequence
  Synthetic oligonucleotide
ggactggacttgagtcataagaccatcaac

SEQ ID NO: 422976 - DNA, 30 bp, Artificial Sequence
  Synthetic oligonucleotide
cccgtgttggtgtcgcaggtctcgatcaac

SEQ ID NO: 422977 - DNA, 30 bp, Artificial Sequence
  Synthetic oligonucleotide
gtgcgtacggtctatataattactatcaac

SEQ ID NO: 422978 - DNA, 30 bp, Artificial Sequence
  Synthetic oligonucleotide
tctcggttataacccgacgcgcgtatcaac

SEQ ID NO: 422979 - DNA, 30 bp, Artificial Sequence
  Synthetic oligonucleotide
accctcacttcagaatcatttttactcaac

SEQ ID NO: 422980 - DNA, 30 bp, Artificial Sequence
  Synthetic oligonucleotide
gaaaaagccgctgacgattatcccctcaac

SEQ ID NO: 422981 - DNA, 30 bp, Artificial Sequence
  Synthetic oligonucleotide
cttaaatgcggttttacgttgaagctcaac

SEQ ID NO: 422982 - DNA, 30 bp, Artificial Sequence
  Synthetic oligonucleotide
catcagtagtaacctctttggccgctcaac

SEQ ID NO: 422983 - DNA, 30 bp, Artificial Sequence
  Synthetic oligonucleotide
tactcatgacggcctcagcctgggctcaac

SEQ ID NO: 422984 - DNA, 30 bp, Artificial Sequence
  Synthetic oligonucleotide
ggcaagccccaccacccaggtgttctcaac

SEQ ID NO: 422985 - DNA, 30 bp, Artificial Sequence
  Synthetic oligonucleotide
cttatgtgaatacgtgggtgccacgtcaac

SEQ ID NO: 422986 - DNA, 30 bp, Artificial Sequence
  Synthetic oligonucleotide
ggctgataacacgtagctattaatgtcaac

SEQ ID NO: 422987 - DNA, 30 bp, Artificial Sequence
  Synthetic oligonucleotide
atatatatatacccaaaagggggtgtcaac

SEQ ID NO: 422988 - DNA, 30 bp, Artificial Sequence
  Synthetic oligonucleotide
tgattcctggttgatgccatatgtgtcaac

SEQ ID NO: 422989 - DNA, 30 bp, Artificial Sequence
  Synthetic oligonucleotide
gcttgagcagcggttagtttacaattcaac

SEQ ID NO: 422990 - DNA, 30 bp, Artificial Sequence
  Synthetic oligonucleotide
gtgtaaatatagcggctcataacattcaac

SEQ ID NO: 422991 - DNA, 30 bp, Artificial Sequence
  Synthetic oligonucleotide
gtcccgctacgtattttctttctattcaac

SEQ ID NO: 422992 - DNA, 30 bp, Artificial Sequence
  Synthetic oligonucleotide
aagccgttctacgtgtcttcgaacttcaac

SEQ ID NO: 422993 - DNA, 30 bp, Artificial Sequence
  Synthetic oligonucleotide
attcagtacagtggttcccgacgcttcaac

SEQ ID NO: 422994 - DNA, 30 bp, Artificial Sequence
  Synthetic oligonucleotide
attattgtcgaggtaatcacgcatttcaac

SEQ ID NO: 422995 - DNA, 30 bp, Artificial Sequence
  Synthetic oligonucleotide
agttcgcaatgtggaggacgatatttcaac

SEQ ID NO: 422996 - DNA, 30 bp, Artificial Sequence
  Synthetic oligonucleotide
aaggttcaggattttgcattttatttcaac

SEQ ID NO: 422997 - DNA, 30 bp, Artificial Sequence
  Synthetic oligonucleotide
tcagctgtgcgcaagttgaagggtttcaac

SEQ ID NO: 422998 - DNA, 30 bp, Artificial Sequence
  Synthetic oligonucleotide
aaatgctgactgggggcgtaaaaaaagaac

SEQ ID NO: 422999 - DNA, 30 bp, Artificial Sequence
  Synthetic oligonucleotide
gttccagcgatgcttccgtgataaaagaac

SEQ ID NO: 423000 - DNA, 30 bp, Artificial Sequence
  Synthetic oligonucleotide
tccctggggctagtggcttgggtaaagaac

SEQ ID NO: 423001 - DNA, 30 bp, Artificial Sequence
  Synthetic oligonucleotide
gttgctctgagttaccgtagccgcaagaac

SEQ ID NO: 423002 - DNA, 30 bp, Artificial Sequence
  Synthetic oligonucleotide
acgtggctctttgtcagggtcggcaagaac

SEQ ID NO: 423003 - DNA, 30 bp, Artificial Sequence
  Synthetic oligonucleotide
caaatctgggctaaggcgggaggtaagaac

SEQ ID NO: 423004 - DNA, 30 bp, Artificial Sequence
  Synthetic oligonucleotide
aaacactcaattacttattagattaagaac

SEQ ID NO: 423005 - DNA, 30 bp, Artificial Sequence
  Synthetic oligonucleotide
ttgaagtactgtgactaccggattaagaac

SEQ ID NO: 423006 - DNA, 30 bp, Artificial Sequence
  Synthetic oligonucleotide
ctagtgactgcaccttctcagacacagaac

SEQ ID NO: 423007 - DNA, 30 bp, Artificial Sequence
  Synthetic oligonucleotide
ttctccggctgctgctgggatagacagaac

SEQ ID NO: 423008 - DNA, 30 bp, Artificial Sequence
  Synthetic oligonucleotide
cagcctggcgggtagtcgattttacagaac

SEQ ID NO: 423009 - DNA, 30 bp, Artificial Sequence
  Synthetic oligonucleotide
ttgcgttggacgcgacaggtcatccagaac

SEQ ID NO: 423010 - DNA, 30 bp, Artificial Sequence
  Synthetic oligonucleotide
attgagacagctgcgggggttctgcagaac

SEQ ID NO: 423011 - DNA, 30 bp, Artificial Sequence
  Synthetic oligonucleotide
gtacaaggaaggccactattagtgcagaac

SEQ ID NO: 423012 - DNA, 31 bp, Artificial Sequence
  Synthetic oligonucleotide
aacaatttcgcatcgcgactctaatcagaac

SEQ ID NO: 423013 - DNA, 30 bp, Artificial Sequence
  Synthetic oligonucleotide
tcaaatatgtcttattaaggatacgagaac

SEQ ID NO: 423014 - DNA, 30 bp, Artificial Sequence
  Synthetic oligonucleotide
ccatgatttccaaccaactgacgcgagaac

SEQ ID NO: 423015 - DNA, 30 bp, Artificial Sequence
  Synthetic oligonucleotide
attctccagcgagatagtgctctcgagaac

SEQ ID NO: 423016 - DNA, 30 bp, Artificial Sequence
  Synthetic oligonucleotide
taattcattctggtgttcatatgggagaac

SEQ ID NO: 423017 - DNA, 30 bp, Artificial Sequence
  Synthetic oligonucleotide
cgacactgcacattccgtttattggagaac

SEQ ID NO: 423018 - DNA, 30 bp, Artificial Sequence
  Synthetic oligonucleotide
ttaacgtcttggggtgtacaaactgagaac

SEQ ID NO: 423019 - DNA, 30 bp, Artificial Sequence
  Synthetic oligonucleotide
attattgtgaatggttttacgaaatagaac

SEQ ID NO: 423020 - DNA, 30 bp, Artificial Sequence
  Synthetic oligonucleotide
gcacccgtatctggcagcgtgccatagaac

SEQ ID NO: 423021 - DNA, 30 bp, Artificial Sequence
  Synthetic oligonucleotide
aacgcatgagtcgcttggttaaagtagaac

SEQ ID NO: 423022 - DNA, 30 bp, Artificial Sequence
  Synthetic oligonucleotide
gagtcatccagtaatcaagggcgttagaac

SEQ ID NO: 423023 - DNA, 30 bp, Artificial Sequence
  Synthetic oligonucleotide
agagtggccagattcgtactctaaacgaac

SEQ ID NO: 423024 - DNA, 30 bp, Artificial Sequence
  Synthetic oligonucleotide
cttggctcttaagttgctatgagcacgaac

SEQ ID NO: 423025 - DNA, 30 bp, Artificial Sequence
  Synthetic oligonucleotide
gagagtgtctatgccacctgccgcacgaac

SEQ ID NO: 423026 - DNA, 30 bp, Artificial Sequence
  Synthetic oligonucleotide
tattcgctcaaggcgggctctgtaccgaac

SEQ ID NO: 423027 - DNA, 30 bp, Artificial Sequence
  Synthetic oligonucleotide
attgtcggcccagtcgtcagacatccgaac

SEQ ID NO: 423028 - DNA, 30 bp, Artificial Sequence
  Synthetic oligonucleotide
gcccaccaccttagcgcgcacactccgaac

SEQ ID NO: 423029 - DNA, 30 bp, Artificial Sequence
  Synthetic oligonucleotide
agcaatctcggcgtaagctcagttccgaac

SEQ ID NO: 423030 - DNA, 30 bp, Artificial Sequence
  Synthetic oligonucleotide
ccagttattttatgatacaagtaggcgaac

SEQ ID NO: 423031 - DNA, 30 bp, Artificial Sequence
  Synthetic oligonucleotide
ctgtgtcggcgatatacgcacacatcgaac

SEQ ID NO: 423032 - DNA, 30 bp, Artificial Sequence
  Synthetic oligonucleotide
aataagagttgttggaacaggttctcgaac

SEQ ID NO: 423033 - DNA, 30 bp, Artificial Sequence
  Synthetic oligonucleotide
gtgatgctgccgcttatgggtcggtcgaac

SEQ ID NO: 423034 - DNA, 30 bp, Artificial Sequence
  Synthetic oligonucleotide
tttccgaataaaagcaatcccgattcgaac

SEQ ID NO: 423035 - DNA, 30 bp, Artificial Sequence
  Synthetic oligonucleotide
cagctgctcgcactgctagaatgttcgaac

SEQ ID NO: 423036 - DNA, 30 bp, Artificial Sequence
  Synthetic oligonucleotide
gacagcttttaaaggatcaccgtttcgaac

SEQ ID NO: 423037 - DNA, 30 bp, Artificial Sequence
  Synthetic oligonucleotide
tttgggtgcgagaggtcctccataaggaac

SEQ ID NO: 423038 - DNA, 30 bp, Artificial Sequence
  Synthetic oligonucleotide
gatagcatgttaatatatccgggcaggaac

SEQ ID NO: 423039 - DNA, 30 bp, Artificial Sequence
  Synthetic oligonucleotide
aaataggatcgataatccttttgcaggaac

SEQ ID NO: 423040 - DNA, 30 bp, Artificial Sequence
  Synthetic oligonucleotide
gttctgatttacaaaacacacatgaggaac

SEQ ID NO: 423041 - DNA, 30 bp, Artificial Sequence
  Synthetic oligonucleotide
ggccagaatcacacgccgggtcctaggaac

SEQ ID NO: 423042 - DNA, 30 bp, Artificial Sequence
  Synthetic oligonucleotide
gattagccacgggagatggattgacggaac

SEQ ID NO: 423043 - DNA, 30 bp, Artificial Sequence
  Synthetic oligonucleotide
ggcacgcggcacgactgggcagtacggaac

SEQ ID NO: 423044 - DNA, 30 bp, Artificial Sequence
  Synthetic oligonucleotide
gagaggacatagatccggcactagcggaac

SEQ ID NO: 423045 - DNA, 30 bp, Artificial Sequence
  Synthetic oligonucleotide
tagtcagggtcaggccgactctagcggaac

SEQ ID NO: 423046 - DNA, 30 bp, Artificial Sequence
  Synthetic oligonucleotide
tacctctctatgacgcatgtatcgcggaac

SEQ ID NO: 423047 - DNA, 30 bp, Artificial Sequence
  Synthetic oligonucleotide
tattatcgccactcagggaaacggcggaac

SEQ ID NO: 423048 - DNA, 30 bp, Artificial Sequence
  Synthetic oligonucleotide
gcgtttacaagactcgctgaagggcggaac

SEQ ID NO: 423049 - DNA, 30 bp, Artificial Sequence
  Synthetic oligonucleotide
ttaggtctaggccagaaggcttctcggaac

SEQ ID NO: 423050 - DNA, 30 bp, Artificial Sequence
  Synthetic oligonucleotide
tgcgcttaagtagcccacgtaaaagggaac

SEQ ID NO: 423051 - DNA, 30 bp, Artificial Sequence
  Synthetic oligonucleotide
cagtctatagatcctgttttaacagggaac

SEQ ID NO: 423052 - DNA, 30 bp, Artificial Sequence
  Synthetic oligonucleotide
gtgtcctgttctctgtttggccacgggaac

SEQ ID NO: 423053 - DNA, 30 bp, Artificial Sequence
  Synthetic oligonucleotide
ttaacactactcactatgagacaggggaac

SEQ ID NO: 423054 - DNA, 30 bp, Artificial Sequence
  Synthetic oligonucleotide
aacggtttctattaccgcgggcctgggaac

SEQ ID NO: 423055 - DNA, 30 bp, Artificial Sequence
  Synthetic oligonucleotide
gagtcttcagcgcagtcataccaatggaac

SEQ ID NO: 423056 - DNA, 30 bp, Artificial Sequence
  Synthetic oligonucleotide
gtaagaggtttccttttgtgcaactggaac

SEQ ID NO: 423057 - DNA, 30 bp, Artificial Sequence
  Synthetic oligonucleotide
gattcggcaatcacgggttaggcctggaac

SEQ ID NO: 423058 - DNA, 30 bp, Artificial Sequence
  Synthetic oligonucleotide
gaaggagtgtagaactcctaacgctggaac

SEQ ID NO: 423059 - DNA, 30 bp, Artificial Sequence
  Synthetic oligonucleotide
acctcagtattgtttatttcacgctggaac

SEQ ID NO: 423060 - DNA, 30 bp, Artificial Sequence
  Synthetic oligonucleotide
gatttaccatttagttacctattctggaac

SEQ ID NO: 423061 - DNA, 30 bp, Artificial Sequence
  Synthetic oligonucleotide
cgaatgtgcgtcggttaattagagtggaac

SEQ ID NO: 423062 - DNA, 30 bp, Artificial Sequence
  Synthetic oligonucleotide
ggcctaagcccctataatcttatgtggaac

SEQ ID NO: 423063 - DNA, 30 bp, Artificial Sequence
  Synthetic oligonucleotide
caaccctttactatcggatgggtgtggaac

SEQ ID NO: 423064 - DNA, 30 bp, Artificial Sequence
  Synthetic oligonucleotide
actacacagcacagtaacactatttggaac

SEQ ID NO: 423065 - DNA, 30 bp, Artificial Sequence
  Synthetic oligonucleotide
gcttcttgggatcgtgtgaaattttggaac

SEQ ID NO: 423066 - DNA, 30 bp, Artificial Sequence
  Synthetic oligonucleotide
attctgcagactctgacaagtcaaatgaac

SEQ ID NO: 423067 - DNA, 30 bp, Artificial Sequence
  Synthetic oligonucleotide
tagccccctaagctgtgagatgaaatgaac

SEQ ID NO: 423068 - DNA, 30 bp, Artificial Sequence
  Synthetic oligonucleotide
agtctctatggcatctgagcggcaatgaac

SEQ ID NO: 423069 - DNA, 30 bp, Artificial Sequence
  Synthetic oligonucleotide
aatagattaatattgatggggcgaatgaac

SEQ ID NO: 423070 - DNA, 30 bp, Artificial Sequence
  Synthetic oligonucleotide
gcccacatgccgtgaaaaattcgaatgaac

SEQ ID NO: 423071 - DNA, 30 bp, Artificial Sequence
  Synthetic oligonucleotide
gaaatggtatagaatgtcggatacatgaac

SEQ ID NO: 423072 - DNA, 30 bp, Artificial Sequence
  Synthetic oligonucleotide
gactagtgacatgctagtagtgccatgaac

SEQ ID NO: 423073 - DNA, 30 bp, Artificial Sequence
  Synthetic oligonucleotide
atcgggctgatctagttttagcgcatgaac

SEQ ID NO: 423074 - DNA, 30 bp, Artificial Sequence
  Synthetic oligonucleotide
ctcattttggcttgtgtggagcagatgaac

SEQ ID NO: 423075 - DNA, 30 bp, Artificial Sequence
  Synthetic oligonucleotide
tatccagataccataattacaatgatgaac

SEQ ID NO: 423076 - DNA, 30 bp, Artificial Sequence
  Synthetic oligonucleotide
gtaggttataggactatacgtcctatgaac

SEQ ID NO: 423077 - DNA, 30 bp, Artificial Sequence
  Synthetic oligonucleotide
gataatgcagatgtcgggagcttactgaac

SEQ ID NO: 423078 - DNA, 30 bp, Artificial Sequence
  Synthetic oligonucleotide
ttttagacccctgaagagcttcacctgaac

SEQ ID NO: 423079 - DNA, 30 bp, Artificial Sequence
  Synthetic oligonucleotide
ttcgcgggttcgcttggttacctgctgaac

SEQ ID NO: 423080 - DNA, 30 bp, Artificial Sequence
  Synthetic oligonucleotide
aatccgacgttgactgcttagctgctgaac

SEQ ID NO: 423081 - DNA, 30 bp, Artificial Sequence
  Synthetic oligonucleotide
gctccagtaacctatgaccggctgctgaac

SEQ ID NO: 423082 - DNA, 30 bp, Artificial Sequence
  Synthetic oligonucleotide
tggtttggcctcagaaggccaggtctgaac

SEQ ID NO: 423083 - DNA, 30 bp, Artificial Sequence
  Synthetic oligonucleotide
gtataaaccttggcatcatcttttctgaac

SEQ ID NO: 423084 - DNA, 30 bp, Artificial Sequence
  Synthetic oligonucleotide
aagtgaattttttagttaactgccgtgaac

SEQ ID NO: 423085 - DNA, 30 bp, Artificial Sequence
  Synthetic oligonucleotide
cacatgcgaagcatgaaggttctcgtgaac

SEQ ID NO: 423086 - DNA, 30 bp, Artificial Sequence
  Synthetic oligonucleotide
acctcattacggttggcagtagaggtgaac

SEQ ID NO: 423087 - DNA, 30 bp, Artificial Sequence
  Synthetic oligonucleotide
gtaattagctcctgggcagcatgtgtgaac

SEQ ID NO: 423088 - DNA, 30 bp, Artificial Sequence
  Synthetic oligonucleotide
cattgcgcgtatcccgctcaacaattgaac

SEQ ID NO: 423089 - DNA, 30 bp, Artificial Sequence
  Synthetic oligonucleotide
tacatctacgggtatgactagtcattgaac

SEQ ID NO: 423090 - DNA, 31 bp, Artificial Sequence
  Synthetic oligonucleotide
catgtaaatgctcagccgggcggtattgaac

SEQ ID NO: 423091 - DNA, 30 bp, Artificial Sequence
  Synthetic oligonucleotide
gagtcagtcttttgttaattgcgcttgaac

SEQ ID NO: 423092 - DNA, 30 bp, Artificial Sequence
  Synthetic oligonucleotide
aagtgtgaggatacctttttcttcttgaac

SEQ ID NO: 423093 - DNA, 30 bp, Artificial Sequence
  Synthetic oligonucleotide
tagccagtatcggggtagcggacgttgaac

SEQ ID NO: 423094 - DNA, 30 bp, Artificial Sequence
  Synthetic oligonucleotide
ctgtaatcgcaagttttttatttgttgaac

SEQ ID NO: 423095 - DNA, 30 bp, Artificial Sequence
  Synthetic oligonucleotide
gcccagcttcacctaagggactctttgaac

SEQ ID NO: 423096 - DNA, 30 bp, Artificial Sequence
  Synthetic oligonucleotide
tttcatcgcaatatgtgccattctttgaac

SEQ ID NO: 423097 - DNA, 30 bp, Artificial Sequence
  Synthetic oligonucleotide
gcaggttaattatggttgtaccaaaataac

SEQ ID NO: 423098 - DNA, 30 bp, Artificial Sequence
  Synthetic oligonucleotide
tgtggtaccttataggttaccacaaataac

SEQ ID NO: 423099 - DNA, 30 bp, Artificial Sequence
  Synthetic oligonucleotide
ctggctctttcagtagccaagacaaataac

SEQ ID NO: 423100 - DNA, 30 bp, Artificial Sequence
  Synthetic oligonucleotide
agctacataatcgttggcgaattaaataac

SEQ ID NO: 423101 - DNA, 30 bp, Artificial Sequence
  Synthetic oligonucleotide
gcgctaatacctcgcccctcgggcaataac

SEQ ID NO: 423102 - DNA, 30 bp, Artificial Sequence
  Synthetic oligonucleotide
tcacatgcaccgggatattatggcaataac

SEQ ID NO: 423103 - DNA, 30 bp, Artificial Sequence
  Synthetic oligonucleotide
gcaccagctgtaacacgcgtaatcaataac

SEQ ID NO: 423104 - DNA, 29 bp, Artificial Sequence
  Synthetic oligonucleotide
agctcttaggtcgattctgggtcaataac

SEQ ID NO: 423105 - DNA, 29 bp, Artificial Sequence
  Synthetic oligonucleotide
agttggccgcactcctaagaaagaataac

SEQ ID NO: 423106 - DNA, 30 bp, Artificial Sequence
  Synthetic oligonucleotide
tcggacggagttgtcacataggtgaataac

SEQ ID NO: 423107 - DNA, 30 bp, Artificial Sequence
  Synthetic oligonucleotide
ctggtaattgagcggcactggttgaataac

SEQ ID NO: 423108 - DNA, 30 bp, Artificial Sequence
  Synthetic oligonucleotide
gactagtcggttagggttaggaataataac

SEQ ID NO: 423109 - DNA, 30 bp, Artificial Sequence
  Synthetic oligonucleotide
ataggtagcgccctagacttctaacataac

SEQ ID NO: 423110 - DNA, 30 bp, Artificial Sequence
  Synthetic oligonucleotide
ctcctccgcttgtgtaataggtaacataac

SEQ ID NO: 423111 - DNA, 30 bp, Artificial Sequence
  Synthetic oligonucleotide
taaatagcgaaggcgtacgcgacacataac

SEQ ID NO: 423112 - DNA, 30 bp, Artificial Sequence
  Synthetic oligonucleotide
ctactatatcaatgtaaggggggccataac

SEQ ID NO: 423113 - DNA, 30 bp, Artificial Sequence
  Synthetic oligonucleotide
catacggctggtctcaatatggcgcataac

SEQ ID NO: 423114 - DNA, 30 bp, Artificial Sequence
  Synthetic oligonucleotide
actgctggcttactgcctgcagatcataac

SEQ ID NO: 423115 - DNA, 30 bp, Artificial Sequence
  Synthetic oligonucleotide
cgatcgcctggcacatggctcgatcataac

SEQ ID NO: 423116 - DNA, 30 bp, Artificial Sequence
  Synthetic oligonucleotide
gttaagctaggagctataggatctcataac

SEQ ID NO: 423117 - DNA, 30 bp, Artificial Sequence
  Synthetic oligonucleotide
ctacccgatgcaaatcgtgtcaacgataac

SEQ ID NO: 423118 - DNA, 30 bp, Artificial Sequence
  Synthetic oligonucleotide
ttgtcgggtcggtataccaccaccgataac

SEQ ID NO: 423119 - DNA, 30 bp, Artificial Sequence
  Synthetic oligonucleotide
agagcgggggtcgcatgaccgtccgataac

SEQ ID NO: 423120 - DNA, 30 bp, Artificial Sequence
  Synthetic oligonucleotide
aaatgccttatccagggctgttttgataac

SEQ ID NO: 423121 - DNA, 30 bp, Artificial Sequence
  Synthetic oligonucleotide
attgagagttgtccgtgcaggtgctataac

SEQ ID NO: 423122 - DNA, 30 bp, Artificial Sequence
  Synthetic oligonucleotide
gttggctcaggcaatggacgtaggtataac

SEQ ID NO: 423123 - DNA, 30 bp, Artificial Sequence
  Synthetic oligonucleotide
aatccgggtgcacctcccatcatgtataac

SEQ ID NO: 423124 - DNA, 30 bp, Artificial Sequence
  Synthetic oligonucleotide
gtagacgttactgaggacctgtcttataac

SEQ ID NO: 423125 - DNA, 30 bp, Artificial Sequence
  Synthetic oligonucleotide
gggagttgccgcacggcaagccgttataac

SEQ ID NO: 423126 - DNA, 30 bp, Artificial Sequence
  Synthetic oligonucleotide
ataggttgcagtgcccctaatatttataac

SEQ ID NO: 423127 - DNA, 30 bp, Artificial Sequence
  Synthetic oligonucleotide
ttatcgacagtcgaaatcactgagactaac

SEQ ID NO: 423128 - DNA, 30 bp, Artificial Sequence
  Synthetic oligonucleotide
cgaggtcgacgtttgttcttactgactaac

SEQ ID NO: 423129 - DNA, 30 bp, Artificial Sequence
  Synthetic oligonucleotide
ggactactcctggggttgtcagatactaac

SEQ ID NO: 423130 - DNA, 30 bp, Artificial Sequence
  Synthetic oligonucleotide
acttgccttatgcaattatcaactactaac

SEQ ID NO: 423131 - DNA, 30 bp, Artificial Sequence
  Synthetic oligonucleotide
ttccttcacgcgagcaggagacgacctaac

SEQ ID NO: 423132 - DNA, 30 bp, Artificial Sequence
  Synthetic oligonucleotide
ccgttggaccactgatttattaagcctaac

SEQ ID NO: 423133 - DNA, 30 bp, Artificial Sequence
  Synthetic oligonucleotide
cccagtccatattacttgtcacggcctaac

SEQ ID NO: 423134 - DNA, 30 bp, Artificial Sequence
  Synthetic oligonucleotide
gggactgttacaagccccgggtggcctaac

SEQ ID NO: 423135 - DNA, 30 bp, Artificial Sequence
  Synthetic oligonucleotide
taggaacgttcatcatactgtagtcctaac

SEQ ID NO: 423136 - DNA, 30 bp, Artificial Sequence
  Synthetic oligonucleotide
gtacgacagcgtttctataaacaagctaac

SEQ ID NO: 423137 - DNA, 30 bp, Artificial Sequence
  Synthetic oligonucleotide
ttgtttggacaatgtaagtatacagctaac

SEQ ID NO: 423138 - DNA, 30 bp, Artificial Sequence
  Synthetic oligonucleotide
ctatacggttcagtgcccgcaggagctaac

SEQ ID NO: 423139 - DNA, 30 bp, Artificial Sequence
  Synthetic oligonucleotide
atggaagtccgtcatgtcaagcacgctaac

SEQ ID NO: 423140 - DNA, 30 bp, Artificial Sequence
  Synthetic oligonucleotide
gtcctaagtttagacaagaccttcgctaac

SEQ ID NO: 423141 - DNA, 30 bp, Artificial Sequence
  Synthetic oligonucleotide
ttgacgcatcaaggtctttctaaggctaac

SEQ ID NO: 423142 - DNA, 30 bp, Artificial Sequence
  Synthetic oligonucleotide
aatgtctggcagcatattccctaggctaac

SEQ ID NO: 423143 - DNA, 30 bp, Artificial Sequence
  Synthetic oligonucleotide
aatagccgggaggaggttccgctggctaac

SEQ ID NO: 423144 - DNA, 30 bp, Artificial Sequence
  Synthetic oligonucleotide
ttagttgacgaagctcaactgtttgctaac

SEQ ID NO: 423145 - DNA, 30 bp, Artificial Sequence
  Synthetic oligonucleotide
cagtttataaggatggttaagggatctaac

SEQ ID NO: 423146 - DNA, 30 bp, Artificial Sequence
  Synthetic oligonucleotide
tactcagctcgtctctgttctacctctaac

SEQ ID NO: 423147 - DNA, 30 bp, Artificial Sequence
  Synthetic oligonucleotide
atgctaatagaccgcaataatcggtctaac

SEQ ID NO: 423148 - DNA, 30 bp, Artificial Sequence
  Synthetic oligonucleotide
atgtgatcaattgggctttaattgtctaac

SEQ ID NO: 423149 - DNA, 30 bp, Artificial Sequence
  Synthetic oligonucleotide
atatcgaattaatcacttgaaggttctaac

SEQ ID NO: 423150 - DNA, 30 bp, Artificial Sequence
  Synthetic oligonucleotide
ttttcgtacttatagtctcctggaagtaac

SEQ ID NO: 423151 - DNA, 30 bp, Artificial Sequence
  Synthetic oligonucleotide
cagtcattcgccataaggttaaccagtaac

SEQ ID NO: 423152 - DNA, 30 bp, Artificial Sequence
  Synthetic oligonucleotide
gatgatacaggtttacggaatctgagtaac

SEQ ID NO: 423153 - DNA, 29 bp, Artificial Sequence
  Synthetic oligonucleotide
agtgtcgcactgcgtcgtgtcctagtaac

SEQ ID NO: 423154 - DNA, 30 bp, Artificial Sequence
  Synthetic oligonucleotide
cgtcagcgtgttctaaacctcccacgtaac

SEQ ID NO: 423155 - DNA, 30 bp, Artificial Sequence
  Synthetic oligonucleotide
gcccgtctcgtggtcgatcagcaccgtaac

SEQ ID NO: 423156 - DNA, 30 bp, Artificial Sequence
  Synthetic oligonucleotide
agctaagtagttacatattcctagcgtaac

SEQ ID NO: 423157 - DNA, 30 bp, Artificial Sequence
  Synthetic oligonucleotide
gattatgctcggtgttgctgtactcgtaac

SEQ ID NO: 423158 - DNA, 30 bp, Artificial Sequence
  Synthetic oligonucleotide
tatattcgcctcttactgtccgctcgtaac

SEQ ID NO: 423159 - DNA, 30 bp, Artificial Sequence
  Synthetic oligonucleotide
aataaaggttgtccatgagggagtcgtaac

SEQ ID NO: 423160 - DNA, 30 bp, Artificial Sequence
  Synthetic oligonucleotide
gttttatcaagcagccggaagcgtcgtaac

SEQ ID NO: 423161 - DNA, 30 bp, Artificial Sequence
  Synthetic oligonucleotide
ctatgccatccacaggtcgggaaaggtaac

SEQ ID NO: 423162 - DNA, 30 bp, Artificial Sequence
  Synthetic oligonucleotide
gtaatcccccacaccaccttgtcaggtaac

SEQ ID NO: 423163 - DNA, 30 bp, Artificial Sequence
  Synthetic oligonucleotide
cgcttagcattgccccgtatcgtaggtaac

SEQ ID NO: 423164 - DNA, 30 bp, Artificial Sequence
  Synthetic oligonucleotide
gtttgcataaacggagcataatgcggtaac

SEQ ID NO: 423165 - DNA, 30 bp, Artificial Sequence
  Synthetic oligonucleotide
tggttattcttgcgacagcctgtcggtaac

SEQ ID NO: 423166 - DNA, 30 bp, Artificial Sequence
  Synthetic oligonucleotide
gaaagcatctccgcggaatgaccgggtaac

SEQ ID NO: 423167 - DNA, 30 bp, Artificial Sequence
  Synthetic oligonucleotide
cgagtccaagacggacatttgcggggtaac

SEQ ID NO: 423168 - DNA, 30 bp, Artificial Sequence
  Synthetic oligonucleotide
gtgacctctgaggcgccccatgttggtaac

SEQ ID NO: 423169 - DNA, 30 bp, Artificial Sequence
  Synthetic oligonucleotide
ggtgtgttagggcttcgtcttacatgtaac

SEQ ID NO: 423170 - DNA, 30 bp, Artificial Sequence
  Synthetic oligonucleotide
tgtcgcgctcgaatggagctaatatgtaac

SEQ ID NO: 423171 - DNA, 30 bp, Artificial Sequence
  Synthetic oligonucleotide
gccctggaatgttgcgatggagtatgtaac

SEQ ID NO: 423172 - DNA, 30 bp, Artificial Sequence
  Synthetic oligonucleotide
tattgatccttatgcggcgtggtatgtaac

SEQ ID NO: 423173 - DNA, 30 bp, Artificial Sequence
  Synthetic oligonucleotide
acgcacgttatctacgccaaatgctgtaac

SEQ ID NO: 423174 - DNA, 30 bp, Artificial Sequence
  Synthetic oligonucleotide
ctagattaggtaagattgatacagtgtaac

SEQ ID NO: 423175 - DNA, 30 bp, Artificial Sequence
  Synthetic oligonucleotide
ccgttagtgggatgtagacagcagtgtaac

SEQ ID NO: 423176 - DNA, 30 bp, Artificial Sequence
  Synthetic oligonucleotide
ccgtctgctcgggttcttcaggtgtgtaac

SEQ ID NO: 423177 - DNA, 30 bp, Artificial Sequence
  Synthetic oligonucleotide
ctctagcggtcaaggactcgaggcattaac

SEQ ID NO: 423178 - DNA, 30 bp, Artificial Sequence
  Synthetic oligonucleotide
acttcatgagcgaccctgcacgggattaac

SEQ ID NO: 423179 - DNA, 30 bp, Artificial Sequence
  Synthetic oligonucleotide
agctttcacacttgcatataatctattaac

SEQ ID NO: 423180 - DNA, 30 bp, Artificial Sequence
  Synthetic oligonucleotide
cacagaacgcggtccatctatagtattaac

SEQ ID NO: 423181 - DNA, 30 bp, Artificial Sequence
  Synthetic oligonucleotide
aataaaaggggatatgcttagcaacttaac

SEQ ID NO: 423182 - DNA, 30 bp, Artificial Sequence
  Synthetic oligonucleotide
cttcattaccagctctgatgatcacttaac

SEQ ID NO: 423183 - DNA, 30 bp, Artificial Sequence
  Synthetic oligonucleotide
gccatctcggagcaatctccgtcacttaac

SEQ ID NO: 423184 - DNA, 30 bp, Artificial Sequence
  Synthetic oligonucleotide
taaagacgcttacggaagtaaccccttaac

SEQ ID NO: 423185 - DNA, 30 bp, Artificial Sequence
  Synthetic oligonucleotide
gaataagttgcgcgcagtcggagccttaac

SEQ ID NO: 423186 - DNA, 30 bp, Artificial Sequence
  Synthetic oligonucleotide
ctcgttagacagaccacgctaggccttaac

SEQ ID NO: 423187 - DNA, 30 bp, Artificial Sequence
  Synthetic oligonucleotide
aaaaagggctccgtccgcttgtgccttaac

SEQ ID NO: 423188 - DNA, 31 bp, Artificial Sequence
  Synthetic oligonucleotide
cactagttaaactgtatactgagcgcttaac

SEQ ID NO: 423189 - DNA, 30 bp, Artificial Sequence
  Synthetic oligonucleotide
gcccattgaatgggcctatgatcgcttaac

SEQ ID NO: 423190 - DNA, 30 bp, Artificial Sequence
  Synthetic oligonucleotide
ccggcagatggaatcttcgactcgcttaac

SEQ ID NO: 423191 - DNA, 30 bp, Artificial Sequence
  Synthetic oligonucleotide
gccaacttcagctgcaggaattcgcttaac

SEQ ID NO: 423192 - DNA, 30 bp, Artificial Sequence
  Synthetic oligonucleotide
agtaatgcctcattaaattgacggcttaac

SEQ ID NO: 423193 - DNA, 30 bp, Artificial Sequence
  Synthetic oligonucleotide
agtaggactagaactcatggcgggcttaac

SEQ ID NO: 423194 - DNA, 30 bp, Artificial Sequence
  Synthetic oligonucleotide
atttggtcgttatagagttgaacagttaac

SEQ ID NO: 423195 - DNA, 30 bp, Artificial Sequence
  Synthetic oligonucleotide
gtgtagttactaaaggaacggtccgttaac

SEQ ID NO: 423196 - DNA, 30 bp, Artificial Sequence
  Synthetic oligonucleotide
cttgaggacccgctagaggtataggttaac

SEQ ID NO: 423197 - DNA, 30 bp, Artificial Sequence
  Synthetic oligonucleotide
aatccactggcatagactataagggttaac

SEQ ID NO: 423198 - DNA, 29 bp, Artificial Sequence
  Synthetic oligonucleotide
gctggggtggttcaccgtggcgggttaac

SEQ ID NO: 423199 - DNA, 30 bp, Artificial Sequence
  Synthetic oligonucleotide
aagatggctacccatggatggctggttaac

SEQ ID NO: 423200 - DNA, 30 bp, Artificial Sequence
  Synthetic oligonucleotide
cttcgctacaaacgctatgtcattgttaac

SEQ ID NO: 423201 - DNA, 30 bp, Artificial Sequence
  Synthetic oligonucleotide
aaggatcgccaactatcgatggcatttaac

SEQ ID NO: 423202 - DNA, 30 bp, Artificial Sequence
  Synthetic oligonucleotide
ttgaagcgatcttcagacgctcgatttaac

SEQ ID NO: 423203 - DNA, 30 bp, Artificial Sequence
  Synthetic oligonucleotide
ataagaagaaagtacctcgtagagtttaac

SEQ ID NO: 423204 - DNA, 30 bp, Artificial Sequence
  Synthetic oligonucleotide
agcaaaggctgcggttctaactagtttaac

SEQ ID NO: 423205 - DNA, 30 bp, Artificial Sequence
  Synthetic oligonucleotide
gagtattttccaggcgtggtaccttttaac

SEQ ID NO: 423206 - DNA, 30 bp, Artificial Sequence
  Synthetic oligonucleotide
cgtattcatccatgtattaccccttttaac

SEQ ID NO: 423207 - DNA, 30 bp, Artificial Sequence
  Synthetic oligonucleotide
gtgagtcaacaccatggagattcttttaac

SEQ ID NO: 423208 - DNA, 30 bp, Artificial Sequence
  Synthetic oligonucleotide
ttgtaaggcttcgtctatgaattttttaac

SEQ ID NO: 423209 - DNA, 30 bp, Artificial Sequence
  Synthetic oligonucleotide
aagtattggaggcgccttatcctaaaacac

SEQ ID NO: 423210 - DNA, 30 bp, Artificial Sequence
  Synthetic oligonucleotide
gcttttagccctcgccggatcttaaaacac

SEQ ID NO: 423211 - DNA, 30 bp, Artificial Sequence
  Synthetic oligonucleotide
aacttctgtgctttgtaataaggcaaacac

SEQ ID NO: 423212 - DNA, 30 bp, Artificial Sequence
  Synthetic oligonucleotide
ttactgtcacctttcacgcgtggcaaacac

SEQ ID NO: 423213 - DNA, 30 bp, Artificial Sequence
  Synthetic oligonucleotide
gtccagtccttctcagaatagaggaaacac

SEQ ID NO: 423214 - DNA, 30 bp, Artificial Sequence
  Synthetic oligonucleotide
aacttgcgcagactcgcgagactacaacac

SEQ ID NO: 423215 - DNA, 30 bp, Artificial Sequence
  Synthetic oligonucleotide
aaaggtcgaggagtgtattcggtacaacac

SEQ ID NO: 423216 - DNA, 30 bp, Artificial Sequence
  Synthetic oligonucleotide
atggatgcacttgctcaagaggtccaacac

SEQ ID NO: 423217 - DNA, 30 bp, Artificial Sequence
  Synthetic oligonucleotide
aaatgaattcaaacaaaagaatttcaacac

SEQ ID NO: 423218 - DNA, 30 bp, Artificial Sequence
  Synthetic oligonucleotide
ttggactgggtcgtacaattgattgaacac

SEQ ID NO: 423219 - DNA, 30 bp, Artificial Sequence
  Synthetic oligonucleotide
gcctgtgctctgataaattcggttgaacac

SEQ ID NO: 423220 - DNA, 30 bp, Artificial Sequence
  Synthetic oligonucleotide
ggtttgaatttacctttcctaatataacac

SEQ ID NO: 423221 - DNA, 30 bp, Artificial Sequence
  Synthetic oligonucleotide
acccgcttgacaatgccgaggatataacac

SEQ ID NO: 423222 - DNA, 30 bp, Artificial Sequence
  Synthetic oligonucleotide
gtagtgaagctttcattccgggtctaacac

SEQ ID NO: 423223 - DNA, 30 bp, Artificial Sequence
  Synthetic oligonucleotide
aatattataccaagaaatgtggggtaacac

SEQ ID NO: 423224 - DNA, 30 bp, Artificial Sequence
  Synthetic oligonucleotide
cattatccataaagggggtagttgtaacac

SEQ ID NO: 423225 - DNA, 30 bp, Artificial Sequence
  Synthetic oligonucleotide
cgtcgtttgcagcagggtgtagattaacac

SEQ ID NO: 423226 - DNA, 30 bp, Artificial Sequence
  Synthetic oligonucleotide
ttcgacaattaaaaatttccgcgttaacac

SEQ ID NO: 423227 - DNA, 30 bp, Artificial Sequence
  Synthetic oligonucleotide
aaccatgtattgctagcgaagccaacacac

SEQ ID NO: 423228 - DNA, 30 bp, Artificial Sequence
  Synthetic oligonucleotide
ctggcacactatgaccccccactaacacac

SEQ ID NO: 423229 - DNA, 30 bp, Artificial Sequence
  Synthetic oligonucleotide
gaaagaaaccggtgggccctggtaacacac

SEQ ID NO: 423230 - DNA, 30 bp, Artificial Sequence
  Synthetic oligonucleotide
tatgttctggtgggtttgcatgtaacacac

SEQ ID NO: 423231 - DNA, 30 bp, Artificial Sequence
  Synthetic oligonucleotide
gtggacagggggaggcttctaggcacacac

SEQ ID NO: 423232 - DNA, 30 bp, Artificial Sequence
  Synthetic oligonucleotide
tccacagaaggacggtgtttggtcacacac

SEQ ID NO: 423233 - DNA, 30 bp, Artificial Sequence
  Synthetic oligonucleotide
gtacgatagggagacttcgccctgacacac

SEQ ID NO: 423234 - DNA, 30 bp, Artificial Sequence
  Synthetic oligonucleotide
gaggggaaccctcgccgtcctctgacacac

SEQ ID NO: 423235 - DNA, 30 bp, Artificial Sequence
  Synthetic oligonucleotide
aaacttagaacccaacggtgccatacacac

SEQ ID NO: 423236 - DNA, 31 bp, Artificial Sequence
  Synthetic oligonucleotide
agaatccggctctttgggttcgattacacac

SEQ ID NO: 423237 - DNA, 30 bp, Artificial Sequence
  Synthetic oligonucleotide
cttactatgtaccgggtaattagaccacac

SEQ ID NO: 423238 - DNA, 30 bp, Artificial Sequence
  Synthetic oligonucleotide
ggaggtagtggtagagggactttaccacac

SEQ ID NO: 423239 - DNA, 30 bp, Artificial Sequence
  Synthetic oligonucleotide
tatgatgagggattacgatgaaccccacac

SEQ ID NO: 423240 - DNA, 30 bp, Artificial Sequence
  Synthetic oligonucleotide
gggtgtaatagagccgggcaattcccacac

SEQ ID NO: 423241 - DNA, 30 bp, Artificial Sequence
  Synthetic oligonucleotide
atcgattatggcttgttagatctgccacac

SEQ ID NO: 423242 - DNA, 30 bp, Artificial Sequence
  Synthetic oligonucleotide
ggattcttgtagtaagtgtcatgtccacac

SEQ ID NO: 423243 - DNA, 30 bp, Artificial Sequence
  Synthetic oligonucleotide
ggttagatccatcgcatcctagtcgcacac

SEQ ID NO: 423244 - DNA, 30 bp, Artificial Sequence
  Synthetic oligonucleotide
tgtaccaaattccccgactgttcggcacac

SEQ ID NO: 423245 - DNA, 30 bp, Artificial Sequence
  Synthetic oligonucleotide
gcctgcgaggattgtattgaagatgcacac

SEQ ID NO: 423246 - DNA, 30 bp, Artificial Sequence
  Synthetic oligonucleotide
tatatttgtgaaattatcctcggatcacac

SEQ ID NO: 423247 - DNA, 30 bp, Artificial Sequence
  Synthetic oligonucleotide
gtatattagaaactatataatgtatcacac

SEQ ID NO: 423248 - DNA, 30 bp, Artificial Sequence
  Synthetic oligonucleotide
cttacgccgaagtgaactacaaggtcacac

SEQ ID NO: 423249 - DNA, 30 bp, Artificial Sequence
  Synthetic oligonucleotide
gctctcttcatactactcgcactttcacac

SEQ ID NO: 423250 - DNA, 30 bp, Artificial Sequence
  Synthetic oligonucleotide
gaatgaatcaccagggaggtcacaagacac

SEQ ID NO: 423251 - DNA, 30 bp, Artificial Sequence
  Synthetic oligonucleotide
ccttcctaagcgcccctgagagtgagacac

SEQ ID NO: 423252 - DNA, 30 bp, Artificial Sequence
  Synthetic oligonucleotide
acctacaaatcgggtatatccttgagacac

SEQ ID NO: 423253 - DNA, 30 bp, Artificial Sequence
  Synthetic oligonucleotide
gattaatacgggacagggtgtcaacgacac

SEQ ID NO: 423254 - DNA, 30 bp, Artificial Sequence
  Synthetic oligonucleotide
tatggtataattttattttcaggacgacac

SEQ ID NO: 423255 - DNA, 30 bp, Artificial Sequence
  Synthetic oligonucleotide
cattgctaattgaccatcagtggccgacac

SEQ ID NO: 423256 - DNA, 30 bp, Artificial Sequence
  Synthetic oligonucleotide
ttattgaaacgatctcactcacgtcgacac

SEQ ID NO: 423257 - DNA, 30 bp, Artificial Sequence
  Synthetic oligonucleotide
tttcaccactaacaccgagacacaggacac

SEQ ID NO: 423258 - DNA, 30 bp, Artificial Sequence
  Synthetic oligonucleotide
tctttgcctttgaaagctacccgaggacac

SEQ ID NO: 423259 - DNA, 30 bp, Artificial Sequence
  Synthetic oligonucleotide
gtaccgtgtgtatcggtacctataggacac

SEQ ID NO: 423260 - DNA, 30 bp, Artificial Sequence
  Synthetic oligonucleotide
cttcgcgaatactctatctaacgtggacac

SEQ ID NO: 423261 - DNA, 30 bp, Artificial Sequence
  Synthetic oligonucleotide
ctgatacgtagacagaaccatcttggacac

SEQ ID NO: 423262 - DNA, 30 bp, Artificial Sequence
  Synthetic oligonucleotide
atcggacatccgcaggtagactcatgacac

SEQ ID NO: 423263 - DNA, 30 bp, Artificial Sequence
  Synthetic oligonucleotide
gagaaggaagtgcagtatttcatctgacac

SEQ ID NO: 423264 - DNA, 30 bp, Artificial Sequence
  Synthetic oligonucleotide
ccattcgattcattcggggtctagtgacac

SEQ ID NO: 423265 - DNA, 30 bp, Artificial Sequence
  Synthetic oligonucleotide
ttgcgaatggcacggtttacgttgtgacac

SEQ ID NO: 423266 - DNA, 30 bp, Artificial Sequence
  Synthetic oligonucleotide
taaatacagtttggatcatctgattgacac

SEQ ID NO: 423267 - DNA, 30 bp, Artificial Sequence
  Synthetic oligonucleotide
tccccgtcacaatatacaatctattgacac

SEQ ID NO: 423268 - DNA, 30 bp, Artificial Sequence
  Synthetic oligonucleotide
aaccctatgtggaatagtgtaggttgacac

SEQ ID NO: 423269 - DNA, 30 bp, Artificial Sequence
  Synthetic oligonucleotide
cattcttcatagtatgtctgcaaaatacac

SEQ ID NO: 423270 - DNA, 30 bp, Artificial Sequence
  Synthetic oligonucleotide
cgtcttacttctgcttaccttgcaatacac

SEQ ID NO: 423271 - DNA, 30 bp, Artificial Sequence
  Synthetic oligonucleotide
gccttcttcaggagacgtgggtacatacac

SEQ ID NO: 423272 - DNA, 30 bp, Artificial Sequence
  Synthetic oligonucleotide
agcgggatttcattgcatatatgcatacac

SEQ ID NO: 423273 - DNA, 30 bp, Artificial Sequence
  Synthetic oligonucleotide
atattccgtaactagatggtagtcatacac

SEQ ID NO: 423274 - DNA, 30 bp, Artificial Sequence
  Synthetic oligonucleotide
agcctgttaggatttgttaccaagatacac

SEQ ID NO: 423275 - DNA, 30 bp, Artificial Sequence
  Synthetic oligonucleotide
atattactacgtagtgggacacctatacac

SEQ ID NO: 423276 - DNA, 30 bp, Artificial Sequence
  Synthetic oligonucleotide
tggcctttggttagcaacgatgaactacac

SEQ ID NO: 423277 - DNA, 30 bp, Artificial Sequence
  Synthetic oligonucleotide
taggtccaacccttatgtaaaacactacac

SEQ ID NO: 423278 - DNA, 30 bp, Artificial Sequence
  Synthetic oligonucleotide
caatgattcactgggacagtcctcctacac

SEQ ID NO: 423279 - DNA, 30 bp, Artificial Sequence
  Synthetic oligonucleotide
gtccgacgtgtatccaatagattcctacac

SEQ ID NO: 423280 - DNA, 30 bp, Artificial Sequence
  Synthetic oligonucleotide
caaagtacgtatcgcgcccggtagctacac

SEQ ID NO: 423281 - DNA, 30 bp, Artificial Sequence
  Synthetic oligonucleotide
ttgacagaaactaggtagattgtgctacac

SEQ ID NO: 423282 - DNA, 30 bp, Artificial Sequence
  Synthetic oligonucleotide
tggtctttccttggacctctaagcgtacac

SEQ ID NO: 423283 - DNA, 30 bp, Artificial Sequence
  Synthetic oligonucleotide
gagggtcattgacagcttatagcggtacac

SEQ ID NO: 423284 - DNA, 30 bp, Artificial Sequence
  Synthetic oligonucleotide
ggccctggtcggggcgcaattatggtacac

SEQ ID NO: 423285 - DNA, 30 bp, Artificial Sequence
  Synthetic oligonucleotide
ggtaagtgtatacaccaattttttgtacac

SEQ ID NO: 423286 - DNA, 30 bp, Artificial Sequence
  Synthetic oligonucleotide
atgcctttggctagaactccggtattacac

SEQ ID NO: 423287 - DNA, 30 bp, Artificial Sequence
  Synthetic oligonucleotide
ggatagtttgtctcaaaggcggcgttacac

SEQ ID NO: 423288 - DNA, 30 bp, Artificial Sequence
  Synthetic oligonucleotide
tgggcttaggtacggggaaatgcgttacac

SEQ ID NO: 423289 - DNA, 30 bp, Artificial Sequence
  Synthetic oligonucleotide
atgtcaatactgaaactcctacatttacac

SEQ ID NO: 423290 - DNA, 30 bp, Artificial Sequence
  Synthetic oligonucleotide
agtgttcgtcccgaaatgtaacctttacac

SEQ ID NO: 423291 - DNA, 30 bp, Artificial Sequence
  Synthetic oligonucleotide
aatcttcgttagacccatccggcaaaccac

SEQ ID NO: 423292 - DNA, 30 bp, Artificial Sequence
  Synthetic oligonucleotide
gttccaccgccctataggagaataaaccac

SEQ ID NO: 423293 - DNA, 30 bp, Artificial Sequence
  Synthetic oligonucleotide
gttcgcggcacgggcgataaaggcaaccac

SEQ ID NO: 423294 - DNA, 30 bp, Artificial Sequence
  Synthetic oligonucleotide
acagcaaagggagccacgggaaggaaccac

SEQ ID NO: 423295 - DNA, 30 bp, Artificial Sequence
  Synthetic oligonucleotide
ttgtgcatatactatccatgacggaaccac

SEQ ID NO: 423296 - DNA, 30 bp, Artificial Sequence
  Synthetic oligonucleotide
ctttccaattaaacggccgatcctaaccac

SEQ ID NO: 423297 - DNA, 30 bp, Artificial Sequence
  Synthetic oligonucleotide
accaaactgggctaccggaccagtaaccac

SEQ ID NO: 423298 - DNA, 30 bp, Artificial Sequence
  Synthetic oligonucleotide
atgtgccagtgctgaacgaagtaacaccac

SEQ ID NO: 423299 - DNA, 30 bp, Artificial Sequence
  Synthetic oligonucleotide
atattgtctcttcctaccacggaagaccac

SEQ ID NO: 423300 - DNA, 30 bp, Artificial Sequence
  Synthetic oligonucleotide
gaccgtaatgaggatgtactatcagaccac

SEQ ID NO: 423301 - DNA, 30 bp, Artificial Sequence
  Synthetic oligonucleotide
cactggtcaatagccttaacggtagaccac

SEQ ID NO: 423302 - DNA, 30 bp, Artificial Sequence
  Synthetic oligonucleotide
tagagttgatataccaagcgtttcgaccac

SEQ ID NO: 423303 - DNA, 30 bp, Artificial Sequence
  Synthetic oligonucleotide
cgttagaaatctggtcctcggccggaccac

SEQ ID NO: 423304 - DNA, 30 bp, Artificial Sequence
  Synthetic oligonucleotide
gtttaatatctattatgccgtcagtaccac

SEQ ID NO: 423305 - DNA, 30 bp, Artificial Sequence
  Synthetic oligonucleotide
taccaggctctataactactctagtaccac

SEQ ID NO: 423306 - DNA, 30 bp, Artificial Sequence
  Synthetic oligonucleotide
agacggcattttgctcggcagcgaacccac

SEQ ID NO: 423307 - DNA, 30 bp, Artificial Sequence
  Synthetic oligonucleotide
tgtatggatttcactagtgaaatgacccac

SEQ ID NO: 423308 - DNA, 30 bp, Artificial Sequence
  Synthetic oligonucleotide
tgcatcgacattagcagtcgtcatacccac

SEQ ID NO: 423309 - DNA, 30 bp, Artificial Sequence
  Synthetic oligonucleotide
gtagattcgtgcttgagctgcgatacccac

SEQ ID NO: 423310 - DNA, 30 bp, Artificial Sequence
  Synthetic oligonucleotide
cattgttaaacagtaacgcttagtccccac

SEQ ID NO: 423311 - DNA, 30 bp, Artificial Sequence
  Synthetic oligonucleotide
gcactcttggcaatgacgatacacgcccac

SEQ ID NO: 423312 - DNA, 30 bp, Artificial Sequence
  Synthetic oligonucleotide
cgaaatcgctctcgttcaacagacgcccac

SEQ ID NO: 423313 - DNA, 30 bp, Artificial Sequence
  Synthetic oligonucleotide
cagtccgttgcatcccgcaaagccgcccac

SEQ ID NO: 423314 - DNA, 30 bp, Artificial Sequence
  Synthetic oligonucleotide
gcctggcaatggcggatgctaatcgcccac

SEQ ID NO: 423315 - DNA, 30 bp, Artificial Sequence
  Synthetic oligonucleotide
aatatcataggggtaagtaacagggcccac

SEQ ID NO: 423316 - DNA, 30 bp, Artificial Sequence
  Synthetic oligonucleotide
gacaggcaagccactattttatatgcccac

SEQ ID NO: 423317 - DNA, 30 bp, Artificial Sequence
  Synthetic oligonucleotide
gtcttttctgcaagccaaaagggtgcccac

SEQ ID NO: 423318 - DNA, 30 bp, Artificial Sequence
  Synthetic oligonucleotide
atagctgtaagaaaaggtcgtgactcccac

SEQ ID NO: 423319 - DNA, 30 bp, Artificial Sequence
  Synthetic oligonucleotide
gcttagcagttttgaggaggtatgtcccac

SEQ ID NO: 423320 - DNA, 30 bp, Artificial Sequence
  Synthetic oligonucleotide
tgagaaagcagcaagctttcgcattcccac

SEQ ID NO: 423321 - DNA, 30 bp, Artificial Sequence
  Synthetic oligonucleotide
gttttgtctcggcatacacctcgttcccac

SEQ ID NO: 423322 - DNA, 30 bp, Artificial Sequence
  Synthetic oligonucleotide
aacgacaaagtatgcggcgttttttcccac

SEQ ID NO: 423323 - DNA, 30 bp, Artificial Sequence
  Synthetic oligonucleotide
tagacgcctaagatgtattctaacagccac

SEQ ID NO: 423324 - DNA, 30 bp, Artificial Sequence
  Synthetic oligonucleotide
agttcccccctccatagactgcagagccac

SEQ ID NO: 423325 - DNA, 30 bp, Artificial Sequence
  Synthetic oligonucleotide
actcggggccaaacctagggatggagccac

SEQ ID NO: 423326 - DNA, 30 bp, Artificial Sequence
  Synthetic oligonucleotide
ggacaaggttcagtagttccggggcgccac

SEQ ID NO: 423327 - DNA, 30 bp, Artificial Sequence
  Synthetic oligonucleotide
actaggagccgagatgcataacctcgccac

SEQ ID NO: 423328 - DNA, 30 bp, Artificial Sequence
  Synthetic oligonucleotide
cgcatcgaggcatatacaccaccaggccac

SEQ ID NO: 423329 - DNA, 30 bp, Artificial Sequence
  Synthetic oligonucleotide
ggagcgaggagaatggctgtatgaggccac

SEQ ID NO: 423330 - DNA, 30 bp, Artificial Sequence
  Synthetic oligonucleotide
cgtaggcgagcaagaagctcgttaggccac

SEQ ID NO: 423331 - DNA, 30 bp, Artificial Sequence
  Synthetic oligonucleotide
ttaatgaggcaaaaagttgctaacggccac

SEQ ID NO: 423332 - DNA, 30 bp, Artificial Sequence
  Synthetic oligonucleotide
ctaactagtctctgccttggtttcggccac

SEQ ID NO: 423333 - DNA, 30 bp, Artificial Sequence
  Synthetic oligonucleotide
tcgtacagaggcacgagcagtgggggccac

SEQ ID NO: 423334 - DNA, 30 bp, Artificial Sequence
  Synthetic oligonucleotide
ggagtgctgcatggcgtcgctgtatgccac

SEQ ID NO: 423335 - DNA, 30 bp, Artificial Sequence
  Synthetic oligonucleotide
tcgcaaagacggcttctctgctcctgccac

SEQ ID NO: 423336 - DNA, 30 bp, Artificial Sequence
  Synthetic oligonucleotide
ccatgtagcggagctcggttaggctgccac

SEQ ID NO: 423337 - DNA, 30 bp, Artificial Sequence
  Synthetic oligonucleotide
gattcggttgaaatcacagaatcaatccac

SEQ ID NO: 423338 - DNA, 30 bp, Artificial Sequence
  Synthetic oligonucleotide
gtattagagggcgatgtaaagctgatccac

SEQ ID NO: 423339 - DNA, 30 bp, Artificial Sequence
  Synthetic oligonucleotide
gccacggaggggttccttcaggtgatccac

SEQ ID NO: 423340 - DNA, 30 bp, Artificial Sequence
  Synthetic oligonucleotide
aagattcggtaacggaggagatctatccac

SEQ ID NO: 423341 - DNA, 30 bp, Artificial Sequence
  Synthetic oligonucleotide
ttactgattcaggtccaggactgtatccac

SEQ ID NO: 423342 - DNA, 30 bp, Artificial Sequence
  Synthetic oligonucleotide
aaatttacttttgtcgtattgaaactccac

SEQ ID NO: 423343 - DNA, 30 bp, Artificial Sequence
  Synthetic oligonucleotide
tcgattcaccttaaactcgctcaactccac

SEQ ID NO: 423344 - DNA, 30 bp, Artificial Sequence
  Synthetic oligonucleotide
ctctatggaagaagagcagaaacgctccac

SEQ ID NO: 423345 - DNA, 30 bp, Artificial Sequence
  Synthetic oligonucleotide
atccagtgagtagggcgacggatgctccac

SEQ ID NO: 423346 - DNA, 30 bp, Artificial Sequence
  Synthetic oligonucleotide
ttattgaatgcctgaatctagtgtctccac

SEQ ID NO: 423347 - DNA, 31 bp, Artificial Sequence
  Synthetic oligonucleotide
agtttccacccattgaaccacgacagtccac

SEQ ID NO: 423348 - DNA, 30 bp, Artificial Sequence
  Synthetic oligonucleotide
ttagactcaaactgtagaatactagtccac

SEQ ID NO: 423349 - DNA, 30 bp, Artificial Sequence
  Synthetic oligonucleotide
ggagttggtacccctggactgaaggtccac

SEQ ID NO: 423350 - DNA, 30 bp, Artificial Sequence
  Synthetic oligonucleotide
tatacgctatcccggctaagataggtccac

SEQ ID NO: 423351 - DNA, 30 bp, Artificial Sequence
  Synthetic oligonucleotide
tggtacggaatggcacctgacagggtccac

SEQ ID NO: 423352 - DNA, 30 bp, Artificial Sequence
  Synthetic oligonucleotide
tggagctgatagatacagttgtgggtccac

SEQ ID NO: 423353 - DNA, 30 bp, Artificial Sequence
  Synthetic oligonucleotide
aagttacccggagggtctgagtatgtccac

SEQ ID NO: 423354 - DNA, 30 bp, Artificial Sequence
  Synthetic oligonucleotide
cccgctgccggggtagatcggagtgtccac

SEQ ID NO: 423355 - DNA, 30 bp, Artificial Sequence
  Synthetic oligonucleotide
aggccgcgatgaacgcacgccttattccac

SEQ ID NO: 423356 - DNA, 30 bp, Artificial Sequence
  Synthetic oligonucleotide
actttggaagacggcgtatttaagttccac

SEQ ID NO: 423357 - DNA, 30 bp, Artificial Sequence
  Synthetic oligonucleotide
aagagcgatctactcgagtccgagttccac

SEQ ID NO: 423358 - DNA, 30 bp, Artificial Sequence
  Synthetic oligonucleotide
ctggggatgtgaaccagaccctggttccac

SEQ ID NO: 423359 - DNA, 30 bp, Artificial Sequence
  Synthetic oligonucleotide
ccaagccatgacgttactcattggttccac

SEQ ID NO: 423360 - DNA, 30 bp, Artificial Sequence
  Synthetic oligonucleotide
ttgttatatcagtagaaatggatgttccac

SEQ ID NO: 423361 - DNA, 30 bp, Artificial Sequence
  Synthetic oligonucleotide
tgggtttcaatacaacccattggaaagcac

SEQ ID NO: 423362 - DNA, 30 bp, Artificial Sequence
  Synthetic oligonucleotide
gcctgcttttcaacgttaccgacgaagcac

SEQ ID NO: 423363 - DNA, 30 bp, Artificial Sequence
  Synthetic oligonucleotide
attcacgtgagtattcggattccgaagcac

SEQ ID NO: 423364 - DNA, 30 bp, Artificial Sequence
  Synthetic oligonucleotide
tacgtcttataaatcttaaactataagcac

SEQ ID NO: 423365 - DNA, 30 bp, Artificial Sequence
  Synthetic oligonucleotide
ctgatatgaatgcgtattagctctaagcac

SEQ ID NO: 423366 - DNA, 30 bp, Artificial Sequence
  Synthetic oligonucleotide
cgctcagcataaatctaatgcagacagcac

SEQ ID NO: 423367 - DNA, 30 bp, Artificial Sequence
  Synthetic oligonucleotide
gtacattccaatgaagttctcatacagcac

SEQ ID NO: 423368 - DNA, 30 bp, Artificial Sequence
  Synthetic oligonucleotide
gttggttggcatagcaggcgcacccagcac

SEQ ID NO: 423369 - DNA, 30 bp, Artificial Sequence
  Synthetic oligonucleotide
cgttaccgagtacagccacagacccagcac

SEQ ID NO: 423370 - DNA, 30 bp, Artificial Sequence
  Synthetic oligonucleotide
ttttttcgtaaatgttcgggggggcagcac

SEQ ID NO: 423371 - DNA, 30 bp, Artificial Sequence
  Synthetic oligonucleotide
ttatcgacataccactggtttgggcagcac

SEQ ID NO: 423372 - DNA, 30 bp, Artificial Sequence
  Synthetic oligonucleotide
gttgttcagtcgaggcgcgaatctcagcac

SEQ ID NO: 423373 - DNA, 30 bp, Artificial Sequence
  Synthetic oligonucleotide
tccaagggcaagttgcaagttgcagagcac

SEQ ID NO: 423374 - DNA, 30 bp, Artificial Sequence
  Synthetic oligonucleotide
taatggtcaccactctagtccctagagcac

SEQ ID NO: 423375 - DNA, 30 bp, Artificial Sequence
  Synthetic oligonucleotide
aattatctacccttcattacggacgagcac

SEQ ID NO: 423376 - DNA, 30 bp, Artificial Sequence
  Synthetic oligonucleotide
cccgctttttaaacgctcaaagccgagcac

SEQ ID NO: 423377 - DNA, 30 bp, Artificial Sequence
  Synthetic oligonucleotide
tcaggctatgccctttaccggcgcgagcac

SEQ ID NO: 423378 - DNA, 30 bp, Artificial Sequence
  Synthetic oligonucleotide
ggatgtgactagagcccagccatcgagcac

SEQ ID NO: 423379 - DNA, 30 bp, Artificial Sequence
  Synthetic oligonucleotide
ctaattcacgaagaagtgcgctcggagcac

SEQ ID NO: 423380 - DNA, 30 bp, Artificial Sequence
  Synthetic oligonucleotide
agtcctatagtgttcaaatagactgagcac

SEQ ID NO: 423381 - DNA, 30 bp, Artificial Sequence
  Synthetic oligonucleotide
ttggggaccaataattaccgataatagcac

SEQ ID NO: 423382 - DNA, 30 bp, Artificial Sequence
  Synthetic oligonucleotide
agcttcacttgattgctggaaatgtagcac

SEQ ID NO: 423383 - DNA, 30 bp, Artificial Sequence
  Synthetic oligonucleotide
ggctataacggtctacacacgctaacgcac

SEQ ID NO: 423384 - DNA, 30 bp, Artificial Sequence
  Synthetic oligonucleotide
tccacatatctgggagttagtaacacgcac

SEQ ID NO: 423385 - DNA, 30 bp, Artificial Sequence
  Synthetic oligonucleotide
ccagcgtaaagagctagtccacgcacgcac

SEQ ID NO: 423386 - DNA, 30 bp, Artificial Sequence
  Synthetic oligonucleotide
cacagttggacacatgttccctgcacgcac

SEQ ID NO: 423387 - DNA, 30 bp, Artificial Sequence
  Synthetic oligonucleotide
tcaaggcaaaggatagtttcacatacgcac

SEQ ID NO: 423388 - DNA, 29 bp, Artificial Sequence
  Synthetic oligonucleotide
ctcactcttgcatcacatacaaaccgcac

SEQ ID NO: 423389 - DNA, 30 bp, Artificial Sequence
  Synthetic oligonucleotide
gcgtgtacccatggatcttcataaccgcac

SEQ ID NO: 423390 - DNA, 30 bp, Artificial Sequence
  Synthetic oligonucleotide
tcggcagttccagcggtattggcaccgcac

SEQ ID NO: 423391 - DNA, 30 bp, Artificial Sequence
  Synthetic oligonucleotide
tcaacggatgagaattaatactgaccgcac

SEQ ID NO: 423392 - DNA, 30 bp, Artificial Sequence
  Synthetic oligonucleotide
tcagctctgctagtgctcaaaacgccgcac

SEQ ID NO: 423393 - DNA, 30 bp, Artificial Sequence
  Synthetic oligonucleotide
cctgctgaataattaggggtattgccgcac

SEQ ID NO: 423394 - DNA, 30 bp, Artificial Sequence
  Synthetic oligonucleotide
ccttgaatacgcggcggatcgcatccgcac

SEQ ID NO: 423395 - DNA, 30 bp, Artificial Sequence
  Synthetic oligonucleotide
ttaattatgatccaggtatatcctccgcac

SEQ ID NO: 423396 - DNA, 30 bp, Artificial Sequence
  Synthetic oligonucleotide
ttttttgggctttgccaactgcgagcgcac

SEQ ID NO: 423397 - DNA, 30 bp, Artificial Sequence
  Synthetic oligonucleotide
tttcactggtgttatagtgaggacgcgcac

SEQ ID NO: 423398 - DNA, 30 bp, Artificial Sequence
  Synthetic oligonucleotide
ttcaggttaacaggtcaccttagcgcgcac

SEQ ID NO: 423399 - DNA, 30 bp, Artificial Sequence
  Synthetic oligonucleotide
tctaaggcagagccctcgacacgggcgcac

SEQ ID NO: 423400 - DNA, 30 bp, Artificial Sequence
  Synthetic oligonucleotide
agctacatgcgagattcaggaagctcgcac

SEQ ID NO: 423401 - DNA, 30 bp, Artificial Sequence
  Synthetic oligonucleotide
cggttaaaaacagccctttaagcgtcgcac

SEQ ID NO: 423402 - DNA, 30 bp, Artificial Sequence
  Synthetic oligonucleotide
gttcgcaaccgtaccagatgcggttcgcac

SEQ ID NO: 423403 - DNA, 30 bp, Artificial Sequence
  Synthetic oligonucleotide
gattactccatccatattggtaaaaggcac

SEQ ID NO: 423404 - DNA, 30 bp, Artificial Sequence
  Synthetic oligonucleotide
tagtttgtgggcagttgaatagccaggcac

SEQ ID NO: 423405 - DNA, 30 bp, Artificial Sequence
  Synthetic oligonucleotide
aaaaggattcggtgggcggggcgcaggcac

SEQ ID NO: 423406 - DNA, 30 bp, Artificial Sequence
  Synthetic oligonucleotide
attatcctagaacgcttatggcggaggcac

SEQ ID NO: 423407 - DNA, 30 bp, Artificial Sequence
  Synthetic oligonucleotide
gctgaaacgtccgtggatgcctggaggcac

SEQ ID NO: 423408 - DNA, 30 bp, Artificial Sequence
  Synthetic oligonucleotide
cgttccgaattgttcctagacctgaggcac

SEQ ID NO: 423409 - DNA, 30 bp, Artificial Sequence
  Synthetic oligonucleotide
gtcaccggttcgtactttaaaagtaggcac

SEQ ID NO: 423410 - DNA, 30 bp, Artificial Sequence
  Synthetic oligonucleotide
gtgctcacgcattatctactgcgtaggcac

SEQ ID NO: 423411 - DNA, 30 bp, Artificial Sequence
  Synthetic oligonucleotide
agtgtttacaccgctaacggaattaggcac

SEQ ID NO: 423412 - DNA, 30 bp, Artificial Sequence
  Synthetic oligonucleotide
ggttcagtggtgcgacacgaagcacggcac

SEQ ID NO: 423413 - DNA, 30 bp, Artificial Sequence
  Synthetic oligonucleotide
tattctcttggtatgagtagcgcacggcac

SEQ ID NO: 423414 - DNA, 30 bp, Artificial Sequence
  Synthetic oligonucleotide
taatctggcatatgtactgttcgacggcac

SEQ ID NO: 423415 - DNA, 30 bp, Artificial Sequence
  Synthetic oligonucleotide
taatcggaacatggctgttggacccggcac

SEQ ID NO: 423416 - DNA, 30 bp, Artificial Sequence
  Synthetic oligonucleotide
agaaatcaatatcctggaatggcccggcac

SEQ ID NO: 423417 - DNA, 30 bp, Artificial Sequence
  Synthetic oligonucleotide
gtctttccccctcaatcaaatctccggcac

SEQ ID NO: 423418 - DNA, 30 bp, Artificial Sequence
  Synthetic oligonucleotide
ccgatatcagcgtgccttaaacctcggcac

SEQ ID NO: 423419 - DNA, 35 bp, Artificial Sequence
  Synthetic oligonucleotide
ttattcaaaccattcttcacggactgcttcggcac

SEQ ID NO: 423420 - DNA, 30 bp, Artificial Sequence
  Synthetic oligonucleotide
gttcttgcttatggagtgtatgttcggcac

SEQ ID NO: 423421 - DNA, 30 bp, Artificial Sequence
  Synthetic oligonucleotide
ggttgttagcccggagaccgttttcggcac

SEQ ID NO: 423422 - DNA, 30 bp, Artificial Sequence
  Synthetic oligonucleotide
gcgagatgccctgattagtgtagagggcac

SEQ ID NO: 423423 - DNA, 30 bp, Artificial Sequence
  Synthetic oligonucleotide
tcctatgcattaacagcatatttagggcac

SEQ ID NO: 423424 - DNA, 30 bp, Artificial Sequence
  Synthetic oligonucleotide
cttcctagtcaggcgcactgctcggggcac

SEQ ID NO: 423425 - DNA, 30 bp, Artificial Sequence
  Synthetic oligonucleotide
tggtctttaatttcatagtgaaatgggcac

SEQ ID NO: 423426 - DNA, 30 bp, Artificial Sequence
  Synthetic oligonucleotide
aggcagcggccgggcggatgaaaatggcac

SEQ ID NO: 423427 - DNA, 30 bp, Artificial Sequence
  Synthetic oligonucleotide
atacgatcagtctatgcgcggccatggcac

SEQ ID NO: 423428 - DNA, 30 bp, Artificial Sequence
  Synthetic oligonucleotide
aacctgtccggaacccttgctgtatggcac

SEQ ID NO: 423429 - DNA, 30 bp, Artificial Sequence
  Synthetic oligonucleotide
attgtgtagtcccgctctttatgctggcac

SEQ ID NO: 423430 - DNA, 30 bp, Artificial Sequence
  Synthetic oligonucleotide
tgctctagttgaaatctgggacagtggcac

SEQ ID NO: 423431 - DNA, 30 bp, Artificial Sequence
  Synthetic oligonucleotide
tgtaattcggccgtatctgggacgtggcac

SEQ ID NO: 423432 - DNA, 30 bp, Artificial Sequence
  Synthetic oligonucleotide
gtacttctcatggttgtatacatgtggcac

SEQ ID NO: 423433 - DNA, 30 bp, Artificial Sequence
  Synthetic oligonucleotide
gggaagatctgatgttttagaagttggcac

SEQ ID NO: 423434 - DNA, 30 bp, Artificial Sequence
  Synthetic oligonucleotide
gatatgctatcagtccgtgcataaatgcac

SEQ ID NO: 423435 - DNA, 30 bp, Artificial Sequence
  Synthetic oligonucleotide
gtcctaggccatttaatttgagtaatgcac

SEQ ID NO: 423436 - DNA, 30 bp, Artificial Sequence
  Synthetic oligonucleotide
gtgctcaaactacacacgagacgtatgcac

SEQ ID NO: 423437 - DNA, 31 bp, Artificial Sequence
  Synthetic oligonucleotide
gattccaacgatacataaagcttttatgcac

SEQ ID NO: 423438 - DNA, 30 bp, Artificial Sequence
  Synthetic oligonucleotide
caggccctttgttgtcaacattagctgcac

SEQ ID NO: 423439 - DNA, 30 bp, Artificial Sequence
  Synthetic oligonucleotide
gaatagcagccctgccagtttaggctgcac

SEQ ID NO: 423440 - DNA, 30 bp, Artificial Sequence
  Synthetic oligonucleotide
tttacatttatccttggactttttctgcac

SEQ ID NO: 423441 - DNA, 30 bp, Artificial Sequence
  Synthetic oligonucleotide
gagataggtgtctattctatggtagtgcac

SEQ ID NO: 423442 - DNA, 30 bp, Artificial Sequence
  Synthetic oligonucleotide
tattcccaatcaaccacgacctacgtgcac

SEQ ID NO: 423443 - DNA, 30 bp, Artificial Sequence
  Synthetic oligonucleotide
gaaactcgaaacgaggcggtgcttgtgcac

SEQ ID NO: 423444 - DNA, 30 bp, Artificial Sequence
  Synthetic oligonucleotide
ggagagtcgatcatcgggatcccattgcac

SEQ ID NO: 423445 - DNA, 30 bp, Artificial Sequence
  Synthetic oligonucleotide
gctctacgaagcgcatatattccattgcac

SEQ ID NO: 423446 - DNA, 30 bp, Artificial Sequence
  Synthetic oligonucleotide
gataacagtcatgcatttaaaatattgcac

SEQ ID NO: 423447 - DNA, 30 bp, Artificial Sequence
  Synthetic oligonucleotide
aacatgcccccggcatggggccagttgcac

SEQ ID NO: 423448 - DNA, 30 bp, Artificial Sequence
  Synthetic oligonucleotide
ttatccgctaccgtaagtaacgcaaatcac

SEQ ID NO: 423449 - DNA, 30 bp, Artificial Sequence
  Synthetic oligonucleotide
gttatttaatcgccagggaaatccaatcac

SEQ ID NO: 423450 - DNA, 30 bp, Artificial Sequence
  Synthetic oligonucleotide
gtgaccgagcttgcggcgaagggcaatcac

SEQ ID NO: 423451 - DNA, 30 bp, Artificial Sequence
  Synthetic oligonucleotide
atcttgactctgggcccttgccggaatcac

SEQ ID NO: 423452 - DNA, 30 bp, Artificial Sequence
  Synthetic oligonucleotide
caatgtccgcgcgcgtataatatgaatcac

SEQ ID NO: 423453 - DNA, 30 bp, Artificial Sequence
  Synthetic oligonucleotide
aagaataacttctcgatctcccataatcac

SEQ ID NO: 423454 - DNA, 30 bp, Artificial Sequence
  Synthetic oligonucleotide
ctcgggactgtaagcccgagcattaatcac

SEQ ID NO: 423455 - DNA, 30 bp, Artificial Sequence
  Synthetic oligonucleotide
cagcatgccgcacctatggagacacatcac

SEQ ID NO: 423456 - DNA, 30 bp, Artificial Sequence
  Synthetic oligonucleotide
ttgacttttcaccaatccatatatcatcac

SEQ ID NO: 423457 - DNA, 30 bp, Artificial Sequence
  Synthetic oligonucleotide
gaggtcctaaaacagcatcgggctcatcac

SEQ ID NO: 423458 - DNA, 30 bp, Artificial Sequence
  Synthetic oligonucleotide
gggccggacataccccagccatctcatcac

SEQ ID NO: 423459 - DNA, 30 bp, Artificial Sequence
  Synthetic oligonucleotide
gttgcctgccagtggttcggaagtcatcac

SEQ ID NO: 423460 - DNA, 30 bp, Artificial Sequence
  Synthetic oligonucleotide
acgattaagctcgtagcagacaaagatcac

SEQ ID NO: 423461 - DNA, 30 bp, Artificial Sequence
  Synthetic oligonucleotide
acagacggcttctccgtgattccagatcac

SEQ ID NO: 423462 - DNA, 30 bp, Artificial Sequence
  Synthetic oligonucleotide
gctaatcgatagatcggaggtgacgatcac

SEQ ID NO: 423463 - DNA, 30 bp, Artificial Sequence
  Synthetic oligonucleotide
agttgatgtaattcgcaccgatacgatcac

SEQ ID NO: 423464 - DNA, 30 bp, Artificial Sequence
  Synthetic oligonucleotide
ctttggttaacagtccttggcaaggatcac

SEQ ID NO: 423465 - DNA, 30 bp, Artificial Sequence
  Synthetic oligonucleotide
tctgtgtaagtcatcgtgagcgcggatcac

SEQ ID NO: 423466 - DNA, 30 bp, Artificial Sequence
  Synthetic oligonucleotide
gacttgttcataaattattacagggatcac

SEQ ID NO: 423467 - DNA, 30 bp, Artificial Sequence
  Synthetic oligonucleotide
gactgacagttttaaccttccgaatatcac

SEQ ID NO: 423468 - DNA, 30 bp, Artificial Sequence
  Synthetic oligonucleotide
gtgttatcggtgttgcgaccccgatatcac

SEQ ID NO: 423469 - DNA, 30 bp, Artificial Sequence
  Synthetic oligonucleotide
gtttcacgctaaacattttaaagctatcac

SEQ ID NO: 423470 - DNA, 30 bp, Artificial Sequence
  Synthetic oligonucleotide
agccccgcgagtcaaggtaccttctatcac

SEQ ID NO: 423471 - DNA, 30 bp, Artificial Sequence
  Synthetic oligonucleotide
ggcgtaattcgatccatccagccttatcac

SEQ ID NO: 423472 - DNA, 30 bp, Artificial Sequence
  Synthetic oligonucleotide
ctaggggctttcaatggaagaggttatcac

SEQ ID NO: 423473 - DNA, 30 bp, Artificial Sequence
  Synthetic oligonucleotide
ccacgggcaggtgatgccgtattttatcac

SEQ ID NO: 423474 - DNA, 30 bp, Artificial Sequence
  Synthetic oligonucleotide
tggaattcgctacatatcctataaactcac

SEQ ID NO: 423475 - DNA, 30 bp, Artificial Sequence
  Synthetic oligonucleotide
gcttgatctgtgaggggtgcaggcactcac

SEQ ID NO: 423476 - DNA, 30 bp, Artificial Sequence
  Synthetic oligonucleotide
cgtttagtttacatgataaatatgactcac

SEQ ID NO: 423477 - DNA, 30 bp, Artificial Sequence
  Synthetic oligonucleotide
aggagaatcgaaatcaacggcttgactcac

SEQ ID NO: 423478 - DNA, 30 bp, Artificial Sequence
  Synthetic oligonucleotide
gtcgtcgatgattggcgtaactgtactcac

SEQ ID NO: 423479 - DNA, 30 bp, Artificial Sequence
  Synthetic oligonucleotide
gtccctggtcctgagcagcgcgcacctcac

SEQ ID NO: 423480 - DNA, 30 bp, Artificial Sequence
  Synthetic oligonucleotide
acccccatcggtggtagcgaccgtcctcac

SEQ ID NO: 423481 - DNA, 30 bp, Artificial Sequence
  Synthetic oligonucleotide
ttcctataaagtactttacctaacgctcac

SEQ ID NO: 423482 - DNA, 30 bp, Artificial Sequence
  Synthetic oligonucleotide
tggattccctccaaacgtggacacgctcac

SEQ ID NO: 423483 - DNA, 30 bp, Artificial Sequence
  Synthetic oligonucleotide
attgacttatccgcccgcctaggcgctcac

SEQ ID NO: 423484 - DNA, 30 bp, Artificial Sequence
  Synthetic oligonucleotide
cttgttattaataacataacccgggctcac

SEQ ID NO: 423485 - DNA, 30 bp, Artificial Sequence
  Synthetic oligonucleotide
ggttaccccctgcagcaagcgctggctcac

SEQ ID NO: 423486 - DNA, 30 bp, Artificial Sequence
  Synthetic oligonucleotide
ccatcctctcgcgtcaagtgtgtggctcac

SEQ ID NO: 423487 - DNA, 30 bp, Artificial Sequence
  Synthetic oligonucleotide
ggccacgtttatatagataaatgatctcac

SEQ ID NO: 423488 - DNA, 30 bp, Artificial Sequence
  Synthetic oligonucleotide
tgttgatgtgctattagaatattctctcac

SEQ ID NO: 423489 - DNA, 30 bp, Artificial Sequence
  Synthetic oligonucleotide
gggcttattgtgtaggtctaatgttctcac

SEQ ID NO: 423490 - DNA, 30 bp, Artificial Sequence
  Synthetic oligonucleotide
cagagcgcctttggaagcgcagcgagtcac

SEQ ID NO: 423491 - DNA, 30 bp, Artificial Sequence
  Synthetic oligonucleotide
gacagggaaggcgcatgtgaccgtagtcac

SEQ ID NO: 423492 - DNA, 30 bp, Artificial Sequence
  Synthetic oligonucleotide
gatgtcatgggcccaatatccggacgtcac

SEQ ID NO: 423493 - DNA, 30 bp, Artificial Sequence
  Synthetic oligonucleotide
ttatatagtggtggcctagacttacgtcac

SEQ ID NO: 423494 - DNA, 30 bp, Artificial Sequence
  Synthetic oligonucleotide
aagttattatttagagtgtatacccgtcac

SEQ ID NO: 423495 - DNA, 30 bp, Artificial Sequence
  Synthetic oligonucleotide
ggtctgctccccatgcgtctttcccgtcac

SEQ ID NO: 423496 - DNA, 30 bp, Artificial Sequence
  Synthetic oligonucleotide
aatgtactcactagcggtgattgccgtcac

SEQ ID NO: 423497 - DNA, 30 bp, Artificial Sequence
  Synthetic oligonucleotide
gacttcgcaagtgacttggtactccgtcac

SEQ ID NO: 423498 - DNA, 30 bp, Artificial Sequence
  Synthetic oligonucleotide
ttaaaggcagggccggttgggctgcgtcac

SEQ ID NO: 423499 - DNA, 30 bp, Artificial Sequence
  Synthetic oligonucleotide
gcaaatatatttactttcgtcaatcgtcac

SEQ ID NO: 423500 - DNA, 30 bp, Artificial Sequence
  Synthetic oligonucleotide
gttctgtaataacacgggtcaggtcgtcac

SEQ ID NO: 423501 - DNA, 30 bp, Artificial Sequence
  Synthetic oligonucleotide
tgcacagggcactcatttggtaacggtcac

SEQ ID NO: 423502 - DNA, 30 bp, Artificial Sequence
  Synthetic oligonucleotide
accgcgcctcgatccgctccttgcggtcac

SEQ ID NO: 423503 - DNA, 30 bp, Artificial Sequence
  Synthetic oligonucleotide
atttgaggggattaccaagtacggggtcac

SEQ ID NO: 423504 - DNA, 30 bp, Artificial Sequence
  Synthetic oligonucleotide
ctggtaattaaaggacttgatgtgggtcac

SEQ ID NO: 423505 - DNA, 30 bp, Artificial Sequence
  Synthetic oligonucleotide
actgcgtagttcactaatatccctggtcac

SEQ ID NO: 423506 - DNA, 30 bp, Artificial Sequence
  Synthetic oligonucleotide
ttatagtacctgaacagtgcgtaatgtcac

SEQ ID NO: 423507 - DNA, 30 bp, Artificial Sequence
  Synthetic oligonucleotide
agtgccgggtttcctatcattcagtgtcac

SEQ ID NO: 423508 - DNA, 30 bp, Artificial Sequence
  Synthetic oligonucleotide
tagggattagcctcgtcggctgattgtcac

SEQ ID NO: 423509 - DNA, 30 bp, Artificial Sequence
  Synthetic oligonucleotide
agcggccacgatttgtcttggacttgtcac

SEQ ID NO: 423510 - DNA, 30 bp, Artificial Sequence
  Synthetic oligonucleotide
gagaggtggaagtggattatactaattcac

SEQ ID NO: 423511 - DNA, 30 bp, Artificial Sequence
  Synthetic oligonucleotide
cctaggaatggtcggaatattgtaattcac

SEQ ID NO: 423512 - DNA, 30 bp, Artificial Sequence
  Synthetic oligonucleotide
attctacaaggtagatttagtagcattcac

SEQ ID NO: 423513 - DNA, 30 bp, Artificial Sequence
  Synthetic oligonucleotide
agtttttatgccagagaattacagattcac

SEQ ID NO: 423514 - DNA, 30 bp, Artificial Sequence
  Synthetic oligonucleotide
cttgaatgcggcgttatcccggagattcac

SEQ ID NO: 423515 - DNA, 30 bp, Artificial Sequence
  Synthetic oligonucleotide
taacaaactttagtaccactcccgattcac

SEQ ID NO: 423516 - DNA, 30 bp, Artificial Sequence
  Synthetic oligonucleotide
attcgtttcgggggcctgatgctgattcac

SEQ ID NO: 423517 - DNA, 30 bp, Artificial Sequence
  Synthetic oligonucleotide
ctcggggatcattccagtaccacacttcac

SEQ ID NO: 423518 - DNA, 30 bp, Artificial Sequence
  Synthetic oligonucleotide
gccccaacacacaatttttgttgccttcac

SEQ ID NO: 423519 - DNA, 30 bp, Artificial Sequence
  Synthetic oligonucleotide
tcaccggaacccctgtgtaacttccttcac

SEQ ID NO: 423520 - DNA, 30 bp, Artificial Sequence
  Synthetic oligonucleotide
aattgcttttaatcaacactccggcttcac

SEQ ID NO: 423521 - DNA, 30 bp, Artificial Sequence
  Synthetic oligonucleotide
cttgtttattttcttgtctggcggcttcac

SEQ ID NO: 423522 - DNA, 30 bp, Artificial Sequence
  Synthetic oligonucleotide
atcagcgaattctatatgggccaagttcac

SEQ ID NO: 423523 - DNA, 30 bp, Artificial Sequence
  Synthetic oligonucleotide
cagctggacagttgagttccggtagttcac

SEQ ID NO: 423524 - DNA, 30 bp, Artificial Sequence
  Synthetic oligonucleotide
tttttcgagccgctacttacaaaggttcac

SEQ ID NO: 423525 - DNA, 30 bp, Artificial Sequence
  Synthetic oligonucleotide
cttctttacacgcgcgtgaatcaggttcac

SEQ ID NO: 423526 - DNA, 30 bp, Artificial Sequence
  Synthetic oligonucleotide
ttatgctacaagcagcgcggtgaggttcac

SEQ ID NO: 423527 - DNA, 30 bp, Artificial Sequence
  Synthetic oligonucleotide
tactacttgtgtacaagaaccatggttcac

SEQ ID NO: 423528 - DNA, 30 bp, Artificial Sequence
  Synthetic oligonucleotide
tatggcctcctaacccagaacttggttcac

SEQ ID NO: 423529 - DNA, 30 bp, Artificial Sequence
  Synthetic oligonucleotide
gcccgctgttcatttaagttgcgtgttcac

SEQ ID NO: 423530 - DNA, 30 bp, Artificial Sequence
  Synthetic oligonucleotide
taagtactttggcatacaaaaggtgttcac

SEQ ID NO: 423531 - DNA, 30 bp, Artificial Sequence
  Synthetic oligonucleotide
cagctagctttgacaaaccgtcttgttcac

SEQ ID NO: 423532 - DNA, 30 bp, Artificial Sequence
  Synthetic oligonucleotide
tcgctaaagtcccaattgcccgttgttcac

SEQ ID NO: 423533 - DNA, 30 bp, Artificial Sequence
  Synthetic oligonucleotide
gaggtgtatatgcagaacttacaatttcac

SEQ ID NO: 423534 - DNA, 30 bp, Artificial Sequence
  Synthetic oligonucleotide
attcctcataattagattagtacatttcac

SEQ ID NO: 423535 - DNA, 30 bp, Artificial Sequence
  Synthetic oligonucleotide
tgtcaaatgctagaactccggtcatttcac

SEQ ID NO: 423536 - DNA, 30 bp, Artificial Sequence
  Synthetic oligonucleotide
atctgctcaaggattaaaggcgtatttcac

SEQ ID NO: 423537 - DNA, 30 bp, Artificial Sequence
  Synthetic oligonucleotide
tgctaggcatcatacggacaatactttcac

SEQ ID NO: 423538 - DNA, 30 bp, Artificial Sequence
  Synthetic oligonucleotide
agttagcccgagttagatgatatctttcac

SEQ ID NO: 423539 - DNA, 30 bp, Artificial Sequence
  Synthetic oligonucleotide
atagttgttcgtcgattatgatagtttcac

SEQ ID NO: 423540 - DNA, 30 bp, Artificial Sequence
  Synthetic oligonucleotide
accccaacaattgcgtttcgactgtttcac

SEQ ID NO: 423541 - DNA, 30 bp, Artificial Sequence
  Synthetic oligonucleotide
gcttgtcattataggccgtattattttcac

SEQ ID NO: 423542 - DNA, 30 bp, Artificial Sequence
  Synthetic oligonucleotide
catacttcgcctgtaagttttacaaaagac

SEQ ID NO: 423543 - DNA, 28 bp, Artificial Sequence
  Synthetic oligonucleotide
gatactccacgtgtccatcagaaaagac

SEQ ID NO: 423544 - DNA, 30 bp, Artificial Sequence
  Synthetic oligonucleotide
tttgaactttttaatccctgcaacaaagac

SEQ ID NO: 423545 - DNA, 30 bp, Artificial Sequence
  Synthetic oligonucleotide
aacccgctcttacctgtatgggccaaagac

SEQ ID NO: 423546 - DNA, 30 bp, Artificial Sequence
  Synthetic oligonucleotide
gtttcgggaacacccccctggttcaaagac

SEQ ID NO: 423547 - DNA, 30 bp, Artificial Sequence
  Synthetic oligonucleotide
ctctgggtggtcaccaacggtaggaaagac

SEQ ID NO: 423548 - DNA, 30 bp, Artificial Sequence
  Synthetic oligonucleotide
ttaatgccatatcctgtagtagtgaaagac

SEQ ID NO: 423549 - DNA, 30 bp, Artificial Sequence
  Synthetic oligonucleotide
ataacatctcgaaatcaacggcgtaaagac

SEQ ID NO: 423550 - DNA, 30 bp, Artificial Sequence
  Synthetic oligonucleotide
tgcacttggttctacgcccggctacaagac

SEQ ID NO: 423551 - DNA, 30 bp, Artificial Sequence
  Synthetic oligonucleotide
gagtatacgtcatgtagttcgtcccaagac

SEQ ID NO: 423552 - DNA, 30 bp, Artificial Sequence
  Synthetic oligonucleotide
gcgtaggtgtattacgttacgcggcaagac

SEQ ID NO: 423553 - DNA, 30 bp, Artificial Sequence
  Synthetic oligonucleotide
acgccactgtcatgctctagacctcaagac

SEQ ID NO: 423554 - DNA, 30 bp, Artificial Sequence
  Synthetic oligonucleotide
tttactgtttagcacgatccgcgtcaagac

SEQ ID NO: 423555 - DNA, 30 bp, Artificial Sequence
  Synthetic oligonucleotide
tccggcaccgggggtactgttaaagaagac

SEQ ID NO: 423556 - DNA, 30 bp, Artificial Sequence
  Synthetic oligonucleotide
acctcgtttcccagctgaggttgagaagac

SEQ ID NO: 423557 - DNA, 30 bp, Artificial Sequence
  Synthetic oligonucleotide
atggacaacttcatggctagatcggaagac

SEQ ID NO: 423558 - DNA, 30 bp, Artificial Sequence
  Synthetic oligonucleotide
aacaaactttagtaaggcttagtggaagac

SEQ ID NO: 423559 - DNA, 30 bp, Artificial Sequence
  Synthetic oligonucleotide
tgtgttctaggttcttagctctatgaagac

SEQ ID NO: 423560 - DNA, 30 bp, Artificial Sequence
  Synthetic oligonucleotide
ttcttgcgtacacggttcagaactgaagac

SEQ ID NO: 423561 - DNA, 30 bp, Artificial Sequence
  Synthetic oligonucleotide
taagtcgactagttttttccgcctgaagac

SEQ ID NO: 423562 - DNA, 30 bp, Artificial Sequence
  Synthetic oligonucleotide
aaaacaagcatcagcttgtgagaataagac

SEQ ID NO: 423563 - DNA, 30 bp, Artificial Sequence
  Synthetic oligonucleotide
ttgcgatcggacactgggcaggcgtaagac

SEQ ID NO: 423564 - DNA, 30 bp, Artificial Sequence
  Synthetic oligonucleotide
cttgcagaagcaaccgtttggtggtaagac

SEQ ID NO: 423565 - DNA, 34 bp, Artificial Sequence
  Synthetic oligonucleotide
gatactagaccaccacgtgtccatcagaacagac

SEQ ID NO: 423566 - DNA, 30 bp, Artificial Sequence
  Synthetic oligonucleotide
acactggcaccggcgcctgagctaacagac

SEQ ID NO: 423567 - DNA, 30 bp, Artificial Sequence
  Synthetic oligonucleotide
cttaatttatacttagagacatgcacagac

SEQ ID NO: 423568 - DNA, 30 bp, Artificial Sequence
  Synthetic oligonucleotide
gattagcatgttgtgattgacttcacagac

SEQ ID NO: 423569 - DNA, 30 bp, Artificial Sequence
  Synthetic oligonucleotide
cacgcttctttagagtggcctgatacagac

SEQ ID NO: 423570 - DNA, 30 bp, Artificial Sequence
  Synthetic oligonucleotide
cgccttggaggggacctagtctacccagac

SEQ ID NO: 423571 - DNA, 30 bp, Artificial Sequence
  Synthetic oligonucleotide
ataatcgaacaggagcgaccgggcccagac

SEQ ID NO: 423572 - DNA, 30 bp, Artificial Sequence
  Synthetic oligonucleotide
taagcatggtctgccgtactgccagcagac

SEQ ID NO: 423573 - DNA, 30 bp, Artificial Sequence
  Synthetic oligonucleotide
aagagcggatgatcagcgtttctagcagac

SEQ ID NO: 423574 - DNA, 30 bp, Artificial Sequence
  Synthetic oligonucleotide
tatttgtcgcgagtacttacaagggcagac

SEQ ID NO: 423575 - DNA, 30 bp, Artificial Sequence
  Synthetic oligonucleotide
ttgtatctcgcaaggccggatggtgcagac

SEQ ID NO: 423576 - DNA, 30 bp, Artificial Sequence
  Synthetic oligonucleotide
tagaattgatctgcctcggagtcctcagac

SEQ ID NO: 423577 - DNA, 30 bp, Artificial Sequence
  Synthetic oligonucleotide
ggtctagggtagacacgtagacggtcagac

SEQ ID NO: 423578 - DNA, 30 bp, Artificial Sequence
  Synthetic oligonucleotide
tgagggttaattttgcgcagcgggtcagac

SEQ ID NO: 423579 - DNA, 30 bp, Artificial Sequence
  Synthetic oligonucleotide
ttttgactgctaatgtgtactgggtcagac

SEQ ID NO: 423580 - DNA, 30 bp, Artificial Sequence
  Synthetic oligonucleotide
acaactgtggaccgagtgtcatggtcagac

SEQ ID NO: 423581 - DNA, 30 bp, Artificial Sequence
  Synthetic oligonucleotide
gagtctaacagagagtttctagtgtcagac

SEQ ID NO: 423582 - DNA, 30 bp, Artificial Sequence
  Synthetic oligonucleotide
taggcattgcagtagcatacattgtcagac

SEQ ID NO: 423583 - DNA, 30 bp, Artificial Sequence
  Synthetic oligonucleotide
tccttcttgttctttcagagttcttcagac

SEQ ID NO: 423584 - DNA, 30 bp, Artificial Sequence
  Synthetic oligonucleotide
tgctatgagattttcaacgggtgttcagac

SEQ ID NO: 423585 - DNA, 30 bp, Artificial Sequence
  Synthetic oligonucleotide
gagacacattgtaagctatttcaaagagac

SEQ ID NO: 423586 - DNA, 30 bp, Artificial Sequence
  Synthetic oligonucleotide
aaagtttggaagaagaacgcaaccagagac

SEQ ID NO: 423587 - DNA, 30 bp, Artificial Sequence
  Synthetic oligonucleotide
ccaaaaatcttgggtccgtgccgcagagac

SEQ ID NO: 423588 - DNA, 30 bp, Artificial Sequence
  Synthetic oligonucleotide
gactagcaaacggtaagcggtaggagagac

SEQ ID NO: 423589 - DNA, 30 bp, Artificial Sequence
  Synthetic oligonucleotide
gcagtctctaagtccatcatctggagagac

SEQ ID NO: 423590 - DNA, 30 bp, Artificial Sequence
  Synthetic oligonucleotide
attcactctgggcgtacctaactgagagac

SEQ ID NO: 423591 - DNA, 30 bp, Artificial Sequence
  Synthetic oligonucleotide
tctaattataagcggctgcgcttgagagac

SEQ ID NO: 423592 - DNA, 30 bp, Artificial Sequence
  Synthetic oligonucleotide
ccagtgcgcggatgcagcgggaaccgagac

SEQ ID NO: 423593 - DNA, 30 bp, Artificial Sequence
  Synthetic oligonucleotide
acttcgtccagtctcgctcccagccgagac

SEQ ID NO: 423594 - DNA, 30 bp, Artificial Sequence
  Synthetic oligonucleotide
gttttggacatcgagcgtggagagcgagac

SEQ ID NO: 423595 - DNA, 31 bp, Artificial Sequence
  Synthetic oligonucleotide
gcacaagtggcgctgctgtgaggttcgagac

SEQ ID NO: 423596 - DNA, 30 bp, Artificial Sequence
  Synthetic oligonucleotide
gggccttaataggttaagttcgcaggagac

SEQ ID NO: 423597 - DNA, 30 bp, Artificial Sequence
  Synthetic oligonucleotide
acggtactccagtaacccaaaaccggagac

SEQ ID NO: 423598 - DNA, 30 bp, Artificial Sequence
  Synthetic oligonucleotide
gggtcaggtaatcggtaatttaccggagac

SEQ ID NO: 423599 - DNA, 30 bp, Artificial Sequence
  Synthetic oligonucleotide
gcaagtgttccgcgagtatgcgccggagac

SEQ ID NO: 423600 - DNA, 30 bp, Artificial Sequence
  Synthetic oligonucleotide
aaaagagatgaagctgacaaatcgggagac

SEQ ID NO: 423601 - DNA, 30 bp, Artificial Sequence
  Synthetic oligonucleotide
tcagatccgaggggcggtgaaaggggagac

SEQ ID NO: 423602 - DNA, 30 bp, Artificial Sequence
  Synthetic oligonucleotide
ttaatcagtagttctaagttaaatggagac

SEQ ID NO: 423603 - DNA, 30 bp, Artificial Sequence
  Synthetic oligonucleotide
actatttcttttcgctttatatatggagac

SEQ ID NO: 423604 - DNA, 30 bp, Artificial Sequence
  Synthetic oligonucleotide
tatgcatattagtcgttcaaccgatgagac

SEQ ID NO: 423605 - DNA, 30 bp, Artificial Sequence
  Synthetic oligonucleotide
ggtattttatcggcctcttaattgtgagac

SEQ ID NO: 423606 - DNA, 30 bp, Artificial Sequence
  Synthetic oligonucleotide
tatcaagcggatccaacgtgtttttgagac

SEQ ID NO: 423607 - DNA, 30 bp, Artificial Sequence
  Synthetic oligonucleotide
cttttagtgctcttaaagaccttaatagac

SEQ ID NO: 423608 - DNA, 30 bp, Artificial Sequence
  Synthetic oligonucleotide
aatccatatagcaacgcatagcacatagac

SEQ ID NO: 423609 - DNA, 30 bp, Artificial Sequence
  Synthetic oligonucleotide
gtgcttatcaaggaaagccttgacatagac

SEQ ID NO: 423610 - DNA, 28 bp, Artificial Sequence
  Synthetic oligonucleotide
agtagttcggggccttagggccatagac

SEQ ID NO: 423611 - DNA, 30 bp, Artificial Sequence
  Synthetic oligonucleotide
caacgtttcttctgccgcaggtgcatagac

SEQ ID NO: 423612 - DNA, 30 bp, Artificial Sequence
  Synthetic oligonucleotide
acagtccatctctctccgactgagatagac

SEQ ID NO: 423613 - DNA, 30 bp, Artificial Sequence
  Synthetic oligonucleotide
cataccatgctataacgacgttagatagac

SEQ ID NO: 423614 - DNA, 30 bp, Artificial Sequence
  Synthetic oligonucleotide
aatttgttgtagcctaaagccgggatagac

SEQ ID NO: 423615 - DNA, 30 bp, Artificial Sequence
  Synthetic oligonucleotide
gtaccaaggtccaggacagcctctatagac

SEQ ID NO: 423616 - DNA, 30 bp, Artificial Sequence
  Synthetic oligonucleotide
attgtaacgaccatcttgcagacactagac

SEQ ID NO: 423617 - DNA, 30 bp, Artificial Sequence
  Synthetic oligonucleotide
gattaaactggtaagttaggttcactagac

SEQ ID NO: 423618 - DNA, 30 bp, Artificial Sequence
  Synthetic oligonucleotide
gtcgactgaggcctagctatgaccctagac

SEQ ID NO: 423619 - DNA, 30 bp, Artificial Sequence
  Synthetic oligonucleotide
catgttcccgttagcccaatccagctagac

SEQ ID NO: 423620 - DNA, 30 bp, Artificial Sequence
  Synthetic oligonucleotide
attggctatgcaccttaaaaaaaagtagac

SEQ ID NO: 423621 - DNA, 30 bp, Artificial Sequence
  Synthetic oligonucleotide
gagttaagccagcggcaagaagcagtagac

SEQ ID NO: 423622 - DNA, 30 bp, Artificial Sequence
  Synthetic oligonucleotide
ttcgggattgtagttagggagaccgtagac

SEQ ID NO: 423623 - DNA, 30 bp, Artificial Sequence
  Synthetic oligonucleotide
ggtatcatctaaaataatagctccgtagac

SEQ ID NO: 423624 - DNA, 30 bp, Artificial Sequence
  Synthetic oligonucleotide
ggccattataccgaaggctctatggtagac

SEQ ID NO: 423625 - DNA, 30 bp, Artificial Sequence
  Synthetic oligonucleotide
cttagtttgcccccgccagattatgtagac

SEQ ID NO: 423626 - DNA, 30 bp, Artificial Sequence
  Synthetic oligonucleotide
cgcaggaaggcatttagtcctcaattagac

SEQ ID NO: 423627 - DNA, 30 bp, Artificial Sequence
  Synthetic oligonucleotide
tgtctgggtgatgtagggatgcgattagac

SEQ ID NO: 423628 - DNA, 30 bp, Artificial Sequence
  Synthetic oligonucleotide
cacagtcagtgctgcgctgatttattagac

SEQ ID NO: 423629 - DNA, 30 bp, Artificial Sequence
  Synthetic oligonucleotide
tgcacacgtgttgaagatcagatcttagac

SEQ ID NO: 423630 - DNA, 30 bp, Artificial Sequence
  Synthetic oligonucleotide
gtagccagatgcgatatcgttatcttagac

SEQ ID NO: 423631 - DNA, 30 bp, Artificial Sequence
  Synthetic oligonucleotide
agatgagcgccagtgaccctaatgttagac

SEQ ID NO: 423632 - DNA, 30 bp, Artificial Sequence
  Synthetic oligonucleotide
tgcttgtacagcgtaacggtgcctttagac

SEQ ID NO: 423633 - DNA, 30 bp, Artificial Sequence
  Synthetic oligonucleotide
ttcctaatgtacttcaattcgagtttagac

SEQ ID NO: 423634 - DNA, 30 bp, Artificial Sequence
  Synthetic oligonucleotide
attcctgcatgtattagatttaaaaacgac

SEQ ID NO: 423635 - DNA, 30 bp, Artificial Sequence
  Synthetic oligonucleotide
ccagttctcatatcattggtaggaaacgac

SEQ ID NO: 423636 - DNA, 30 bp, Artificial Sequence
  Synthetic oligonucleotide
atggcgcatattcgccttgcgaccaacgac

SEQ ID NO: 423637 - DNA, 30 bp, Artificial Sequence
  Synthetic oligonucleotide
ttaacgccctgactgcctcggaccaacgac

SEQ ID NO: 423638 - DNA, 30 bp, Artificial Sequence
  Synthetic oligonucleotide
taggggttgttgcgcggtgtagcgaacgac

SEQ ID NO: 423639 - DNA, 30 bp, Artificial Sequence
  Synthetic oligonucleotide
gaagtaggttcttgtcgtcatgggaacgac

SEQ ID NO: 423640 - DNA, 30 bp, Artificial Sequence
  Synthetic oligonucleotide
agttctagcagatctgtatcgtgtaacgac

SEQ ID NO: 423641 - DNA, 30 bp, Artificial Sequence
  Synthetic oligonucleotide
agccacaggcgatgtgacatgatacacgac

SEQ ID NO: 423642 - DNA, 30 bp, Artificial Sequence
  Synthetic oligonucleotide
ctgatgtcgcctgcagaaaattcgcacgac

SEQ ID NO: 423643 - DNA, 30 bp, Artificial Sequence
  Synthetic oligonucleotide
taagtactaatctcccgaaaaatgcacgac

SEQ ID NO: 423644 - DNA, 30 bp, Artificial Sequence
  Synthetic oligonucleotide
gacagatagtaggagaaattaattcacgac

SEQ ID NO: 423645 - DNA, 30 bp, Artificial Sequence
  Synthetic oligonucleotide
acagaaacggtggaaagagaacgagacgac

SEQ ID NO: 423646 - DNA, 30 bp, Artificial Sequence
  Synthetic oligonucleotide
aggtggtaagtaggcccagatttagacgac

SEQ ID NO: 423647 - DNA, 31 bp, Artificial Sequence
  Synthetic oligonucleotide
tgagttctttgattcgattcaatacgacgac

SEQ ID NO: 423648 - DNA, 30 bp, Artificial Sequence
  Synthetic oligonucleotide
aaattccgaacaagcgttgcttgcgacgac

SEQ ID NO: 423649 - DNA, 30 bp, Artificial Sequence
  Synthetic oligonucleotide
gtcctgcggcaaagttggcccccggacgac

SEQ ID NO: 423650 - DNA, 30 bp, Artificial Sequence
  Synthetic oligonucleotide
agtttctttagtgtcgtagaaactgacgac

SEQ ID NO: 423651 - DNA, 30 bp, Artificial Sequence
  Synthetic oligonucleotide
ccgatagatgcgaacattttaggctacgac

SEQ ID NO: 423652 - DNA, 30 bp, Artificial Sequence
  Synthetic oligonucleotide
aagtcctggtgataaccttacgtctacgac

SEQ ID NO: 423653 - DNA, 30 bp, Artificial Sequence
  Synthetic oligonucleotide
gaaatttcaacatggaaggaccggtacgac

SEQ ID NO: 423654 - DNA, 31 bp, Artificial Sequence
  Synthetic oligonucleotide
ctcagagcgctaaagttacaaatggtacgac

SEQ ID NO: 423655 - DNA, 30 bp, Artificial Sequence
  Synthetic oligonucleotide
tgacctctcgtaatcgtagttatgtacgac

SEQ ID NO: 423656 - DNA, 30 bp, Artificial Sequence
  Synthetic oligonucleotide
gcgattgtcgtacgtctcgccatttacgac

SEQ ID NO: 423657 - DNA, 30 bp, Artificial Sequence
  Synthetic oligonucleotide
gcttccaatacgggggaggacctcaccgac

SEQ ID NO: 423658 - DNA, 30 bp, Artificial Sequence
  Synthetic oligonucleotide
acacggaactcgtataatatgtataccgac

SEQ ID NO: 423659 - DNA, 30 bp, Artificial Sequence
  Synthetic oligonucleotide
ttattctgaatcaacagaatacctaccgac

SEQ ID NO: 423660 - DNA, 30 bp, Artificial Sequence
  Synthetic oligonucleotide
gctgttgcgtgagatttctcacgtaccgac

SEQ ID NO: 423661 - DNA, 30 bp, Artificial Sequence
  Synthetic oligonucleotide
agacgtattattcgttaccctcatcccgac

SEQ ID NO: 423662 - DNA, 30 bp, Artificial Sequence
  Synthetic oligonucleotide
ctggtcattgattaatgaacagtcgccgac

SEQ ID NO: 423663 - DNA, 30 bp, Artificial Sequence
  Synthetic oligonucleotide
aagctatcttatagcagacgacaatccgac

SEQ ID NO: 423664 - DNA, 30 bp, Artificial Sequence
  Synthetic oligonucleotide
ttgcgcagtctgcaacaaatttcatccgac

SEQ ID NO: 423665 - DNA, 30 bp, Artificial Sequence
  Synthetic oligonucleotide
tggccacatacggggtagttatactccgac

SEQ ID NO: 423666 - DNA, 29 bp, Artificial Sequence
  Synthetic oligonucleotide
ggacaaccttctacacctacgcctccgac

SEQ ID NO: 423667 - DNA, 30 bp, Artificial Sequence
  Synthetic oligonucleotide
gctcatggtctcttcctgttaaagtccgac

SEQ ID NO: 423668 - DNA, 30 bp, Artificial Sequence
  Synthetic oligonucleotide
ggtagagcaacaaacaatgcctagtccgac

SEQ ID NO: 423669 - DNA, 30 bp, Artificial Sequence
  Synthetic oligonucleotide
accgatgcacagttttcgtggtggtccgac

SEQ ID NO: 423670 - DNA, 30 bp, Artificial Sequence
  Synthetic oligonucleotide
gttcaggtactatcctactcttgaagcgac

SEQ ID NO: 423671 - DNA, 30 bp, Artificial Sequence
  Synthetic oligonucleotide
tgcactgtgcggactagtgaagccagcgac

SEQ ID NO: 423672 - DNA, 30 bp, Artificial Sequence
  Synthetic oligonucleotide
taattccctctctgttaatcaacgcgcgac

SEQ ID NO: 423673 - DNA, 30 bp, Artificial Sequence
  Synthetic oligonucleotide
tggccgctacccaccctctaaaggcgcgac

SEQ ID NO: 423674 - DNA, 30 bp, Artificial Sequence
  Synthetic oligonucleotide
cgcgacagggtaagcacgtacatgcgcgac

SEQ ID NO: 423675 - DNA, 30 bp, Artificial Sequence
  Synthetic oligonucleotide
ggattgacacattcagacgacgtcggcgac

SEQ ID NO: 423676 - DNA, 30 bp, Artificial Sequence
  Synthetic oligonucleotide
cgacagtaccccccagcgacggagggcgac

SEQ ID NO: 423677 - DNA, 30 bp, Artificial Sequence
  Synthetic oligonucleotide
gagttgtgagtatcgctacgcatatgcgac

SEQ ID NO: 423678 - DNA, 30 bp, Artificial Sequence
  Synthetic oligonucleotide
gcataggaccgccgcacgcagaactgcgac

SEQ ID NO: 423679 - DNA, 30 bp, Artificial Sequence
  Synthetic oligonucleotide
attttcgccctgcctgagccggtctgcgac

SEQ ID NO: 423680 - DNA, 30 bp, Artificial Sequence
  Synthetic oligonucleotide
ttccctggatttgggcggaccgattgcgac

SEQ ID NO: 423681 - DNA, 30 bp, Artificial Sequence
  Synthetic oligonucleotide
gatgttttagggccacgtcgtataatcgac

SEQ ID NO: 423682 - DNA, 31 bp, Artificial Sequence
  Synthetic oligonucleotide
aaaatgtttctaacataggaagttaatcgac

SEQ ID NO: 423683 - DNA, 30 bp, Artificial Sequence
  Synthetic oligonucleotide
cttcatgcgagataggtctagcacatcgac

SEQ ID NO: 423684 - DNA, 30 bp, Artificial Sequence
  Synthetic oligonucleotide
gttggagatgttagtgcgatatacatcgac

SEQ ID NO: 423685 - DNA, 30 bp, Artificial Sequence
  Synthetic oligonucleotide
ccgatcctccggtatgcttgatggatcgac

SEQ ID NO: 423686 - DNA, 30 bp, Artificial Sequence
  Synthetic oligonucleotide
aaagtatgagttggcagattgctgatcgac

SEQ ID NO: 423687 - DNA, 30 bp, Artificial Sequence
  Synthetic oligonucleotide
taccgatcgaaagctgctcagactatcgac

SEQ ID NO: 423688 - DNA, 30 bp, Artificial Sequence
  Synthetic oligonucleotide
gactgccggttgtaaggcgacatactcgac

SEQ ID NO: 423689 - DNA, 30 bp, Artificial Sequence
  Synthetic oligonucleotide
gtatcaatcgctggtaattccctactcgac

SEQ ID NO: 423690 - DNA, 30 bp, Artificial Sequence
  Synthetic oligonucleotide
aggaaagcagtcgaaggttttcagctcgac

SEQ ID NO: 423691 - DNA, 30 bp, Artificial Sequence
  Synthetic oligonucleotide
gggatagtgaatttcgagcgtactctcgac

SEQ ID NO: 423692 - DNA, 30 bp, Artificial Sequence
  Synthetic oligonucleotide
tgggcagccgtgggcatccgcggggtcgac

SEQ ID NO: 423693 - DNA, 30 bp, Artificial Sequence
  Synthetic oligonucleotide
tgacaatcgccgcagagactcttggtcgac

SEQ ID NO: 423694 - DNA, 30 bp, Artificial Sequence
  Synthetic oligonucleotide
ttccaagtaggggttgtcccttatgtcgac

SEQ ID NO: 423695 - DNA, 30 bp, Artificial Sequence
  Synthetic oligonucleotide
ataccgggaagtagacctgaagaattcgac

SEQ ID NO: 423696 - DNA, 30 bp, Artificial Sequence
  Synthetic oligonucleotide
cactcgcggcgaaggggctctttattcgac

SEQ ID NO: 423697 - DNA, 30 bp, Artificial Sequence
  Synthetic oligonucleotide
tcagtttttacgccgcactggtagttcgac

SEQ ID NO: 423698 - DNA, 30 bp, Artificial Sequence
  Synthetic oligonucleotide
gcttcggtgcttgtgaagctggggttcgac

SEQ ID NO: 423699 - DNA, 30 bp, Artificial Sequence
  Synthetic oligonucleotide
tcctattgctccccgatcgactctttcgac

SEQ ID NO: 423700 - DNA, 30 bp, Artificial Sequence
  Synthetic oligonucleotide
tctcggagaggatgaaggtcctctttcgac

SEQ ID NO: 423701 - DNA, 30 bp, Artificial Sequence
  Synthetic oligonucleotide
acgagccgttcaattcagtcgggtttcgac

SEQ ID NO: 423702 - DNA, 30 bp, Artificial Sequence
  Synthetic oligonucleotide
tttcaatagcacagacctcttcaaaaggac

SEQ ID NO: 423703 - DNA, 30 bp, Artificial Sequence
  Synthetic oligonucleotide
gacaaaacagtgcctagactcggaaaggac

SEQ ID NO: 423704 - DNA, 30 bp, Artificial Sequence
  Synthetic oligonucleotide
cagttgcgaatggaacattgagtaaaggac

SEQ ID NO: 423705 - DNA, 30 bp, Artificial Sequence
  Synthetic oligonucleotide
cgccttgtcttagcaagtaaagacaaggac

SEQ ID NO: 423706 - DNA, 30 bp, Artificial Sequence
  Synthetic oligonucleotide
catcatacggcagacattccttgcaaggac

SEQ ID NO: 423707 - DNA, 30 bp, Artificial Sequence
  Synthetic oligonucleotide
accccccggtcggaggtgttttgcaaggac

SEQ ID NO: 423708 - DNA, 30 bp, Artificial Sequence
  Synthetic oligonucleotide
tgctagacctacgccgcgattttcaaggac

SEQ ID NO: 423709 - DNA, 30 bp, Artificial Sequence
  Synthetic oligonucleotide
ccagcttgtcgaatctggccccagaaggac

SEQ ID NO: 423710 - DNA, 30 bp, Artificial Sequence
  Synthetic oligonucleotide
gttcaggctccctacaaaactgcgaaggac

SEQ ID NO: 423711 - DNA, 30 bp, Artificial Sequence
  Synthetic oligonucleotide
tatctaagagccttgagaggaactaaggac

SEQ ID NO: 423712 - DNA, 30 bp, Artificial Sequence
  Synthetic oligonucleotide
gttagtaatcttgtcggttcggcacaggac

SEQ ID NO: 423713 - DNA, 30 bp, Artificial Sequence
  Synthetic oligonucleotide
ttttcaacatgagtagcatcttcacaggac

SEQ ID NO: 423714 - DNA, 30 bp, Artificial Sequence
  Synthetic oligonucleotide
tttacgccgtccgagtcagatagacaggac

SEQ ID NO: 423715 - DNA, 29 bp, Artificial Sequence
  Synthetic oligonucleotide
tcgcgtgcaactataaatcctagcaggac

SEQ ID NO: 423716 - DNA, 30 bp, Artificial Sequence
  Synthetic oligonucleotide
gtttggtaggtatccaacctggcgcaggac

SEQ ID NO: 423717 - DNA, 30 bp, Artificial Sequence
  Synthetic oligonucleotide
tgcgaacgttagccattaaattatcaggac

SEQ ID NO: 423718 - DNA, 30 bp, Artificial Sequence
  Synthetic oligonucleotide
ttctattgcccctcacgttgagctcaggac

SEQ ID NO: 423719 - DNA, 30 bp, Artificial Sequence
  Synthetic oligonucleotide
tattgagttccacgagagccggttcaggac

SEQ ID NO: 423720 - DNA, 30 bp, Artificial Sequence
  Synthetic oligonucleotide
ttcgttgtcaatcacccgtaggtagaggac

SEQ ID NO: 423721 - DNA, 30 bp, Artificial Sequence
  Synthetic oligonucleotide
cccaataggcatgcgcggcgcttagaggac

SEQ ID NO: 423722 - DNA, 30 bp, Artificial Sequence
  Synthetic oligonucleotide
aaggaggccttacaaatgacgtaggaggac

SEQ ID NO: 423723 - DNA, 30 bp, Artificial Sequence
  Synthetic oligonucleotide
ggtatcagagaaccccggggggtggaggac

SEQ ID NO: 423724 - DNA, 30 bp, Artificial Sequence
  Synthetic oligonucleotide
catatttatggtcgacctttcaatgaggac

SEQ ID NO: 423725 - DNA, 30 bp, Artificial Sequence
  Synthetic oligonucleotide
cgcttacgtaagtttgcacgcactgaggac

SEQ ID NO: 423726 - DNA, 30 bp, Artificial Sequence
  Synthetic oligonucleotide
cgtaatgtttgtccggtgcccacctaggac

SEQ ID NO: 423727 - DNA, 30 bp, Artificial Sequence
  Synthetic oligonucleotide
tgcgctgtaaagaggagtccttgctaggac

SEQ ID NO: 423728 - DNA, 30 bp, Artificial Sequence
  Synthetic oligonucleotide
tttacaatccgctgctctcgcgagtaggac

SEQ ID NO: 423729 - DNA, 30 bp, Artificial Sequence
  Synthetic oligonucleotide
ggttttggcgtatattatggcatgtaggac

SEQ ID NO: 423730 - DNA, 31 bp, Artificial Sequence
  Synthetic oligonucleotide
gttagacgagcggctcttctgattaacggac

SEQ ID NO: 423731 - DNA, 30 bp, Artificial Sequence
  Synthetic oligonucleotide
aggtttgtcactacagaaacagacacggac

SEQ ID NO: 423732 - DNA, 30 bp, Artificial Sequence
  Synthetic oligonucleotide
gctgatgcctctcgaccatttattacggac

SEQ ID NO: 423733 - DNA, 30 bp, Artificial Sequence
  Synthetic oligonucleotide
cctacacggacttatttggccctaccggac

SEQ ID NO: 423734 - DNA, 30 bp, Artificial Sequence
  Synthetic oligonucleotide
cgctccatggaacgaaatgcgcacccggac

SEQ ID NO: 423735 - DNA, 30 bp, Artificial Sequence
  Synthetic oligonucleotide
cgcactttctataggcgtaggtgcccggac

SEQ ID NO: 423736 - DNA, 30 bp, Artificial Sequence
  Synthetic oligonucleotide
ttctgcttaaccaagcttaggtaagcggac

SEQ ID NO: 423737 - DNA, 30 bp, Artificial Sequence
  Synthetic oligonucleotide
tattttaccttaagattgtcgtgggcggac

SEQ ID NO: 423738 - DNA, 30 bp, Artificial Sequence
  Synthetic oligonucleotide
ggtccctcgactggcgggggctctgcggac

SEQ ID NO: 423739 - DNA, 30 bp, Artificial Sequence
  Synthetic oligonucleotide
atcttcgcggggtgcgaagaatttgcggac

SEQ ID NO: 423740 - DNA, 30 bp, Artificial Sequence
  Synthetic oligonucleotide
gtagttcatcttcgttgctgcgaatcggac

SEQ ID NO: 423741 - DNA, 30 bp, Artificial Sequence
  Synthetic oligonucleotide
gtcgcagaaggcaaagtgtgcctctcggac

SEQ ID NO: 423742 - DNA, 30 bp, Artificial Sequence
  Synthetic oligonucleotide
gccgaacgctaccgggcattcagttcggac

SEQ ID NO: 423743 - DNA, 30 bp, Artificial Sequence
  Synthetic oligonucleotide
ttatattgcgcgatatgccctgcaagggac

SEQ ID NO: 423744 - DNA, 30 bp, Artificial Sequence
  Synthetic oligonucleotide
tctgccccacgcttacgtattgcaagggac

SEQ ID NO: 423745 - DNA, 30 bp, Artificial Sequence
  Synthetic oligonucleotide
tagtcactttaaacataccctgtaagggac

SEQ ID NO: 423746 - DNA, 30 bp, Artificial Sequence
  Synthetic oligonucleotide
cactgtaacctcgataccggtgtaagggac

SEQ ID NO: 423747 - DNA, 30 bp, Artificial Sequence
  Synthetic oligonucleotide
ttctgaaaagtggtagtgacgtagagggac

SEQ ID NO: 423748 - DNA, 30 bp, Artificial Sequence
  Synthetic oligonucleotide
gaacctcatctgaatatagattggagggac

SEQ ID NO: 423749 - DNA, 30 bp, Artificial Sequence
  Synthetic oligonucleotide
aatcctaaacaattgcgttctgatagggac

SEQ ID NO: 423750 - DNA, 30 bp, Artificial Sequence
  Synthetic oligonucleotide
atacagctcgtctgggagccagctagggac

SEQ ID NO: 423751 - DNA, 30 bp, Artificial Sequence
  Synthetic oligonucleotide
aaggtcacttgcacgcgaggcgctagggac

SEQ ID NO: 423752 - DNA, 30 bp, Artificial Sequence
  Synthetic oligonucleotide
tattgagagacaatggttgtatctagggac

SEQ ID NO: 423753 - DNA, 30 bp, Artificial Sequence
  Synthetic oligonucleotide
gacagcgccttggattttataacacgggac

SEQ ID NO: 423754 - DNA, 30 bp, Artificial Sequence
  Synthetic oligonucleotide
ttggcatactaaggggtgccggtgcgggac

SEQ ID NO: 423755 - DNA, 30 bp, Artificial Sequence
  Synthetic oligonucleotide
actgactgctactcaaagtattgtcgggac

SEQ ID NO: 423756 - DNA, 30 bp, Artificial Sequence
  Synthetic oligonucleotide
cgcggccccagagcagtcaacattcgggac

SEQ ID NO: 423757 - DNA, 30 bp, Artificial Sequence
  Synthetic oligonucleotide
atcgagcccaaggatatgtttgttcgggac

SEQ ID NO: 423758 - DNA, 30 bp, Artificial Sequence
  Synthetic oligonucleotide
aaactattctccggagaagagacaggggac

SEQ ID NO: 423759 - DNA, 30 bp, Artificial Sequence
  Synthetic oligonucleotide
ttcactcaccttgtccggacgcgaggggac

SEQ ID NO: 423760 - DNA, 30 bp, Artificial Sequence
  Synthetic oligonucleotide
tacgcgatgcgcgtactgtattccggggac

SEQ ID NO: 423761 - DNA, 30 bp, Artificial Sequence
  Synthetic oligonucleotide
cggtgaagtcaataagagaaacatggggac

SEQ ID NO: 423762 - DNA, 30 bp, Artificial Sequence
  Synthetic oligonucleotide
aagactgcactgaaacgctcgcttggggac

SEQ ID NO: 423763 - DNA, 30 bp, Artificial Sequence
  Synthetic oligonucleotide
cttatcgacgcgcgtgaccttccatgggac

SEQ ID NO: 423764 - DNA, 30 bp, Artificial Sequence
  Synthetic oligonucleotide
tggactcggtcgtcccctacttactgggac

SEQ ID NO: 423765 - DNA, 30 bp, Artificial Sequence
  Synthetic oligonucleotide
agtcacgtcctattcctggcgagctgggac

SEQ ID NO: 423766 - DNA, 30 bp, Artificial Sequence
  Synthetic oligonucleotide
gccaactagtaccccctatgtttctgggac

SEQ ID NO: 423767 - DNA, 30 bp, Artificial Sequence
  Synthetic oligonucleotide
attgattaattgttttgatgccggtgggac

SEQ ID NO: 423768 - DNA, 30 bp, Artificial Sequence
  Synthetic oligonucleotide
aatctagtgggggacatagttgtgtgggac

SEQ ID NO: 423769 - DNA, 30 bp, Artificial Sequence
  Synthetic oligonucleotide
gttagccgaatagtcacgtcggcaatggac

SEQ ID NO: 423770 - DNA, 30 bp, Artificial Sequence
  Synthetic oligonucleotide
atcacgtagaaggtaggaaacaacatggac

SEQ ID NO: 423771 - DNA, 30 bp, Artificial Sequence
  Synthetic oligonucleotide
gttcttgggaaaccacatacatacatggac

SEQ ID NO: 423772 - DNA, 30 bp, Artificial Sequence
  Synthetic oligonucleotide
tgacttccacatagatcatcaaccatggac

SEQ ID NO: 423773 - DNA, 30 bp, Artificial Sequence
  Synthetic oligonucleotide
ttagccgtagattgagtaaacgccatggac

SEQ ID NO: 423774 - DNA, 30 bp, Artificial Sequence
  Synthetic oligonucleotide
ctcgacttttggcgtggcaagattatggac

SEQ ID NO: 423775 - DNA, 30 bp, Artificial Sequence
  Synthetic oligonucleotide
aatcccttcgtacccccgaaaagcctggac

SEQ ID NO: 423776 - DNA, 30 bp, Artificial Sequence
  Synthetic oligonucleotide
gttcggtttataccctcgacattcctggac

SEQ ID NO: 423777 - DNA, 30 bp, Artificial Sequence
  Synthetic oligonucleotide
accgcgtacagtgttgtgggtgatctggac

SEQ ID NO: 423778 - DNA, 30 bp, Artificial Sequence
  Synthetic oligonucleotide
ggtttcctagtcaattgaggatatctggac

SEQ ID NO: 423779 - DNA, 30 bp, Artificial Sequence
  Synthetic oligonucleotide
agccaacctcttattcttacgaaagtggac

SEQ ID NO: 423780 - DNA, 30 bp, Artificial Sequence
  Synthetic oligonucleotide
tattgcttacaatttgggatacaagtggac

SEQ ID NO: 423781 - DNA, 30 bp, Artificial Sequence
  Synthetic oligonucleotide
atttgcggtattcgcgctcaaacagtggac

SEQ ID NO: 423782 - DNA, 30 bp, Artificial Sequence
  Synthetic oligonucleotide
gccaggtaaggttacaatttgggcgtggac

SEQ ID NO: 423783 - DNA, 30 bp, Artificial Sequence
  Synthetic oligonucleotide
ctttcgccgtcaactcttgggatggtggac

SEQ ID NO: 423784 - DNA, 30 bp, Artificial Sequence
  Synthetic oligonucleotide
tgatgggaataatgttctgagctggtggac

SEQ ID NO: 423785 - DNA, 30 bp, Artificial Sequence
  Synthetic oligonucleotide
gatgggtgtggtgtaacaatcattgtggac

SEQ ID NO: 423786 - DNA, 30 bp, Artificial Sequence
  Synthetic oligonucleotide
gcgcaagggctttttacggataaattggac

SEQ ID NO: 423787 - DNA, 30 bp, Artificial Sequence
  Synthetic oligonucleotide
gcctgccagaacttatcagttatattggac

SEQ ID NO: 423788 - DNA, 30 bp, Artificial Sequence
  Synthetic oligonucleotide
cgttactctgtaatgcggagggccttggac

SEQ ID NO: 423789 - DNA, 30 bp, Artificial Sequence
  Synthetic oligonucleotide
ttacagcagacaggtccgaatatcttggac

SEQ ID NO: 423790 - DNA, 30 bp, Artificial Sequence
  Synthetic oligonucleotide
atagatttgtgattttgtcgcgtcttggac

SEQ ID NO: 423791 - DNA, 30 bp, Artificial Sequence
  Synthetic oligonucleotide
aacgcggcgggaactgatcgtcagttggac

SEQ ID NO: 423792 - DNA, 30 bp, Artificial Sequence
  Synthetic oligonucleotide
ctctttgaagaagtcctgtagcggttggac

SEQ ID NO: 423793 - DNA, 30 bp, Artificial Sequence
  Synthetic oligonucleotide
gtaagacgcacgcaaatgaccaatttggac

SEQ ID NO: 423794 - DNA, 30 bp, Artificial Sequence
  Synthetic oligonucleotide
tgcgaccgtcacgggcgggcatacaatgac

SEQ ID NO: 423795 - DNA, 30 bp, Artificial Sequence
  Synthetic oligonucleotide
gtttaagccccccaggctactcataatgac

SEQ ID NO: 423796 - DNA, 30 bp, Artificial Sequence
  Synthetic oligonucleotide
gtatcctgcttgaagactcactttaatgac

SEQ ID NO: 423797 - DNA, 30 bp, Artificial Sequence
  Synthetic oligonucleotide
tcagggatcgtctttcccgcttttaatgac

SEQ ID NO: 423798 - DNA, 30 bp, Artificial Sequence
  Synthetic oligonucleotide
taccctgggcagggcagcagagaacatgac

SEQ ID NO: 423799 - DNA, 30 bp, Artificial Sequence
  Synthetic oligonucleotide
agtgtgcgctaataagaatacgcacatgac

SEQ ID NO: 423800 - DNA, 30 bp, Artificial Sequence
  Synthetic oligonucleotide
ttacaggctgcgcgtatgttctgacatgac

SEQ ID NO: 423801 - DNA, 30 bp, Artificial Sequence
  Synthetic oligonucleotide
cccgacctgtcatctgtcatgtgacatgac

SEQ ID NO: 423802 - DNA, 30 bp, Artificial Sequence
  Synthetic oligonucleotide
ccggagctacggggcctgtcagaccatgac

SEQ ID NO: 423803 - DNA, 30 bp, Artificial Sequence
  Synthetic oligonucleotide
acgtgcctaacgcgcatttgattccatgac

SEQ ID NO: 423804 - DNA, 30 bp, Artificial Sequence
  Synthetic oligonucleotide
gcgcaggggatactttaaatggcgcatgac

SEQ ID NO: 423805 - DNA, 30 bp, Artificial Sequence
  Synthetic oligonucleotide
aggaatcagtctctcaatacgaggcatgac

SEQ ID NO: 423806 - DNA, 30 bp, Artificial Sequence
  Synthetic oligonucleotide
aagctcggataacattggtagttgcatgac

SEQ ID NO: 423807 - DNA, 30 bp, Artificial Sequence
  Synthetic oligonucleotide
ctcagtggagcagcagattagtctcatgac

SEQ ID NO: 423808 - DNA, 30 bp, Artificial Sequence
  Synthetic oligonucleotide
tttatacctaggccaaggcaggtagatgac

SEQ ID NO: 423809 - DNA, 30 bp, Artificial Sequence
  Synthetic oligonucleotide
ggaggttacagtcttaattgaggatatgac

SEQ ID NO: 423810 - DNA, 30 bp, Artificial Sequence
  Synthetic oligonucleotide
ccaattggggtaaaagatcgttgatatgac

SEQ ID NO: 423811 - DNA, 30 bp, Artificial Sequence
  Synthetic oligonucleotide
ggttgggcttacagtctagtcaactatgac

SEQ ID NO: 423812 - DNA, 30 bp, Artificial Sequence
  Synthetic oligonucleotide
gcttaaaaggcttttctgtaagactatgac

SEQ ID NO: 423813 - DNA, 30 bp, Artificial Sequence
  Synthetic oligonucleotide
tcctgggtgcgttgggtatcaccctatgac

SEQ ID NO: 423814 - DNA, 30 bp, Artificial Sequence
  Synthetic oligonucleotide
gggcgattagtatgcggcgttcggtatgac

SEQ ID NO: 423815 - DNA, 30 bp, Artificial Sequence
  Synthetic oligonucleotide
tggcctagaactagagcgggacccactgac

SEQ ID NO: 423816 - DNA, 30 bp, Artificial Sequence
  Synthetic oligonucleotide
gctaggtatgagctcgagcatcagactgac

SEQ ID NO: 423817 - DNA, 30 bp, Artificial Sequence
  Synthetic oligonucleotide
ctcatgtagactccgcggacgtggactgac

SEQ ID NO: 423818 - DNA, 30 bp, Artificial Sequence
  Synthetic oligonucleotide
ggtttacgatccctcttggcataacctgac

SEQ ID NO: 423819 - DNA, 30 bp, Artificial Sequence
  Synthetic oligonucleotide
ttttgtactcccgcaaggtcgttacctgac

SEQ ID NO: 423820 - DNA, 30 bp, Artificial Sequence
  Synthetic oligonucleotide
tggcatccgctgagttgatggactcctgac

SEQ ID NO: 423821 - DNA, 30 bp, Artificial Sequence
  Synthetic oligonucleotide
gaaagtcatccgatgttatcaggtcctgac

SEQ ID NO: 423822 - DNA, 30 bp, Artificial Sequence
  Synthetic oligonucleotide
tcgggtgcgtttccattattggacgctgac

SEQ ID NO: 423823 - DNA, 30 bp, Artificial Sequence
  Synthetic oligonucleotide
cttctttgacatgatcggtcgctcgctgac

SEQ ID NO: 423824 - DNA, 30 bp, Artificial Sequence
  Synthetic oligonucleotide
aaatacgttgtagttattctttaggctgac

SEQ ID NO: 423825 - DNA, 30 bp, Artificial Sequence
  Synthetic oligonucleotide
tcaaattcgtcacttcattctacggctgac

SEQ ID NO: 423826 - DNA, 30 bp, Artificial Sequence
  Synthetic oligonucleotide
cactgggtgcactgtcaggcgcctgctgac

SEQ ID NO: 423827 - DNA, 30 bp, Artificial Sequence
  Synthetic oligonucleotide
ctgggtaatctgtgcgggttctagtctgac

SEQ ID NO: 423828 - DNA, 30 bp, Artificial Sequence
  Synthetic oligonucleotide
aataaccatgcctctataaggtggtctgac

SEQ ID NO: 423829 - DNA, 30 bp, Artificial Sequence
  Synthetic oligonucleotide
gcctggtatttgggcgcgtttatgtctgac

SEQ ID NO: 423830 - DNA, 30 bp, Artificial Sequence
  Synthetic oligonucleotide
gaatcagcaaacatttgcggggtgtctgac

SEQ ID NO: 423831 - DNA, 30 bp, Artificial Sequence
  Synthetic oligonucleotide
tgccgataaagcagttgatgcagaagtgac

SEQ ID NO: 423832 - DNA, 30 bp, Artificial Sequence
  Synthetic oligonucleotide
ccgatgggtgataaaaactgctccagtgac

SEQ ID NO: 423833 - DNA, 30 bp, Artificial Sequence
  Synthetic oligonucleotide
atttctgtggcgcgatggatcgtcagtgac

SEQ ID NO: 423834 - DNA, 30 bp, Artificial Sequence
  Synthetic oligonucleotide
tgtcactggtccttcgagtaggtcagtgac

SEQ ID NO: 423835 - DNA, 30 bp, Artificial Sequence
  Synthetic oligonucleotide
acttagtcggagtaaaataggttcagtgac

SEQ ID NO: 423836 - DNA, 30 bp, Artificial Sequence
  Synthetic oligonucleotide
gcaggtccgctccaggtattatggagtgac

SEQ ID NO: 423837 - DNA, 30 bp, Artificial Sequence
  Synthetic oligonucleotide
tcgtcagggccaatggaaagggtgagtgac

SEQ ID NO: 423838 - DNA, 30 bp, Artificial Sequence
  Synthetic oligonucleotide
atctccgctatattgccgatgacacgtgac

SEQ ID NO: 423839 - DNA, 30 bp, Artificial Sequence
  Synthetic oligonucleotide
ccgcatcacagtcacaggatctgccgtgac

SEQ ID NO: 423840 - DNA, 30 bp, Artificial Sequence
  Synthetic oligonucleotide
gaaacatctaaagaccggtcacgaggtgac

SEQ ID NO: 423841 - DNA, 30 bp, Artificial Sequence
  Synthetic oligonucleotide
taattgggtggttgacggcggcggggtgac

SEQ ID NO: 423842 - DNA, 30 bp, Artificial Sequence
  Synthetic oligonucleotide
gtcccgccccttggaggccgttctggtgac

SEQ ID NO: 423843 - DNA, 30 bp, Artificial Sequence
  Synthetic oligonucleotide
caagggctagtgatacggttataatgtgac

SEQ ID NO: 423844 - DNA, 30 bp, Artificial Sequence
  Synthetic oligonucleotide
tcgacccgtatgcgtgtatagagctgtgac

SEQ ID NO: 423845 - DNA, 30 bp, Artificial Sequence
  Synthetic oligonucleotide
ttagatctgttcagcctgttagacattgac

SEQ ID NO: 423846 - DNA, 30 bp, Artificial Sequence
  Synthetic oligonucleotide
cagaagttcaaaaagtgttaagcgattgac

SEQ ID NO: 423847 - DNA, 30 bp, Artificial Sequence
  Synthetic oligonucleotide
gttttttgacgccaaaaatactggattgac

SEQ ID NO: 423848 - DNA, 30 bp, Artificial Sequence
  Synthetic oligonucleotide
cccgtctttttcagtattctaactattgac

SEQ ID NO: 423849 - DNA, 30 bp, Artificial Sequence
  Synthetic oligonucleotide
cttccccagacacatgttgcttttattgac

SEQ ID NO: 423850 - DNA, 30 bp, Artificial Sequence
  Synthetic oligonucleotide
ctcccgcgtgcacaattcccactacttgac

SEQ ID NO: 423851 - DNA, 30 bp, Artificial Sequence
  Synthetic oligonucleotide
tcttcatatgatggttcgatttaccttgac

SEQ ID NO: 423852 - DNA, 30 bp, Artificial Sequence
  Synthetic oligonucleotide
cattagagtggcgcggaatgaactcttgac

SEQ ID NO: 423853 - DNA, 30 bp, Artificial Sequence
  Synthetic oligonucleotide
cagtttaattttaatcacaaagttcttgac

SEQ ID NO: 423854 - DNA, 30 bp, Artificial Sequence
  Synthetic oligonucleotide
ttaaaacatttggaaccgtatacagttgac

SEQ ID NO: 423855 - DNA, 30 bp, Artificial Sequence
  Synthetic oligonucleotide
cacagatttgtctccgccctaccagttgac

SEQ ID NO: 423856 - DNA, 30 bp, Artificial Sequence
  Synthetic oligonucleotide
aattttctccaggaatactccgacgttgac

SEQ ID NO: 423857 - DNA, 30 bp, Artificial Sequence
  Synthetic oligonucleotide
acataaacagagttcatagctttcgttgac

SEQ ID NO: 423858 - DNA, 30 bp, Artificial Sequence
  Synthetic oligonucleotide
ttcgactagcttaccgctcttttcgttgac

SEQ ID NO: 423859 - DNA, 30 bp, Artificial Sequence
  Synthetic oligonucleotide
aatagaggtgtcgtatgttggtaggttgac

SEQ ID NO: 423860 - DNA, 30 bp, Artificial Sequence
  Synthetic oligonucleotide
tgtacttgcgagaagacagggtcggttgac

SEQ ID NO: 423861 - DNA, 30 bp, Artificial Sequence
  Synthetic oligonucleotide
tagttataggtggaatcctagagggttgac

SEQ ID NO: 423862 - DNA, 30 bp, Artificial Sequence
  Synthetic oligonucleotide
taccaacctgaaggagtaatatttgttgac

SEQ ID NO: 423863 - DNA, 30 bp, Artificial Sequence
  Synthetic oligonucleotide
gatgaagcagatgcagggccttaatttgac

SEQ ID NO: 423864 - DNA, 30 bp, Artificial Sequence
  Synthetic oligonucleotide
ggtgtaaacttcctacttaatacatttgac

SEQ ID NO: 423865 - DNA, 30 bp, Artificial Sequence
  Synthetic oligonucleotide
agcaatggtgttagtttacaagcatttgac

SEQ ID NO: 423866 - DNA, 30 bp, Artificial Sequence
  Synthetic oligonucleotide
gtccgagcgggtgggggggtggcatttgac

SEQ ID NO: 423867 - DNA, 30 bp, Artificial Sequence
  Synthetic oligonucleotide
tcagctaaccggacctttggagtatttgac

SEQ ID NO: 423868 - DNA, 30 bp, Artificial Sequence
  Synthetic oligonucleotide
aatgactggagcattaactgctactttgac

SEQ ID NO: 423869 - DNA, 30 bp, Artificial Sequence
  Synthetic oligonucleotide
gtttaaaatacttggggtaagccctttgac

SEQ ID NO: 423870 - DNA, 30 bp, Artificial Sequence
  Synthetic oligonucleotide
gtcgaagcgcgtggttaaaacaggtttgac

SEQ ID NO: 423871 - DNA, 30 bp, Artificial Sequence
  Synthetic oligonucleotide
tcacacacttcatacgtcgcgtattttgac

SEQ ID NO: 423872 - DNA, 30 bp, Artificial Sequence
  Synthetic oligonucleotide
cccatctcctaatgataggttccttttgac

SEQ ID NO: 423873 - DNA, 30 bp, Artificial Sequence
  Synthetic oligonucleotide
tgcttgtttgttatgcgaacagcttttgac

SEQ ID NO: 423874 - DNA, 30 bp, Artificial Sequence
  Synthetic oligonucleotide
ctgcatatcaccagggtcgctctttttgac

SEQ ID NO: 423875 - DNA, 30 bp, Artificial Sequence
  Synthetic oligonucleotide
tccaagcgtcggtgggcctaataaaaatac

SEQ ID NO: 423876 - DNA, 30 bp, Artificial Sequence
  Synthetic oligonucleotide
tatctgtacgagagatacaactgaaaatac

SEQ ID NO: 423877 - DNA, 30 bp, Artificial Sequence
  Synthetic oligonucleotide
taggcctccatggtacggaagcagaaatac

SEQ ID NO: 423878 - DNA, 30 bp, Artificial Sequence
  Synthetic oligonucleotide
gcatttccaattgtgttattacctaaatac

SEQ ID NO: 423879 - DNA, 30 bp, Artificial Sequence
  Synthetic oligonucleotide
tatccttcagagtcagtaaaacgacaatac

SEQ ID NO: 423880 - DNA, 30 bp, Artificial Sequence
  Synthetic oligonucleotide
catttcgttataagctaggccctgcaatac

SEQ ID NO: 423881 - DNA, 30 bp, Artificial Sequence
  Synthetic oligonucleotide
agcctgggataaaattttcatcatcaatac

SEQ ID NO: 423882 - DNA, 30 bp, Artificial Sequence
  Synthetic oligonucleotide
ccagaatttggttgcttgagatcagaatac

SEQ ID NO: 423883 - DNA, 30 bp, Artificial Sequence
  Synthetic oligonucleotide
tagccatggcatacatgaacacgagaatac

SEQ ID NO: 423884 - DNA, 30 bp, Artificial Sequence
  Synthetic oligonucleotide
gtcatacatggaaaatgacgtatagaatac

SEQ ID NO: 423885 - DNA, 30 bp, Artificial Sequence
  Synthetic oligonucleotide
gaagttacgtagatcgtatcggccgaatac

SEQ ID NO: 423886 - DNA, 30 bp, Artificial Sequence
  Synthetic oligonucleotide
tcttttttcagtacaggtggcgtggaatac

SEQ ID NO: 423887 - DNA, 30 bp, Artificial Sequence
  Synthetic oligonucleotide
gatctgtcacttggggtggcactataatac

SEQ ID NO: 423888 - DNA, 30 bp, Artificial Sequence
  Synthetic oligonucleotide
ggtcgagtctacagttaaatattataatac

SEQ ID NO: 423889 - DNA, 30 bp, Artificial Sequence
  Synthetic oligonucleotide
taaacgcgaagggcagtctgtggctaatac

SEQ ID NO: 423890 - DNA, 30 bp, Artificial Sequence
  Synthetic oligonucleotide
atttgatgtagacacggagataggtaatac

SEQ ID NO: 423891 - DNA, 30 bp, Artificial Sequence
  Synthetic oligonucleotide
actttagtacaaggtacaggttcttaatac

SEQ ID NO: 423892 - DNA, 30 bp, Artificial Sequence
  Synthetic oligonucleotide
tctgccattagtcagcgccacagttaatac

SEQ ID NO: 423893 - DNA, 30 bp, Artificial Sequence
  Synthetic oligonucleotide
tgactatcaacatatcaattgggttaatac

SEQ ID NO: 423894 - DNA, 30 bp, Artificial Sequence
  Synthetic oligonucleotide
ctggccaagagggcctcctgttgttaatac

SEQ ID NO: 423895 - DNA, 30 bp, Artificial Sequence
  Synthetic oligonucleotide
gttatgctgaaagtacttcaaatttaatac

SEQ ID NO: 423896 - DNA, 30 bp, Artificial Sequence
  Synthetic oligonucleotide
cttcccaagctgctgttaaccgacacatac

SEQ ID NO: 423897 - DNA, 30 bp, Artificial Sequence
  Synthetic oligonucleotide
atgtctgtgggagtaagggtctagacatac

SEQ ID NO: 423898 - DNA, 30 bp, Artificial Sequence
  Synthetic oligonucleotide
gcgtatgacgcagtgcaacaagcgacatac

SEQ ID NO: 423899 - DNA, 30 bp, Artificial Sequence
  Synthetic oligonucleotide
tatgatggtatataactctgcctgacatac

SEQ ID NO: 423900 - DNA, 30 bp, Artificial Sequence
  Synthetic oligonucleotide
tctagaaaatagcaacggattagtacatac

SEQ ID NO: 423901 - DNA, 30 bp, Artificial Sequence
  Synthetic oligonucleotide
ttttctggcgacacttgattaggtacatac

SEQ ID NO: 423902 - DNA, 30 bp, Artificial Sequence
  Synthetic oligonucleotide
gcgctgtttgttggaactatctttacatac

SEQ ID NO: 423903 - DNA, 30 bp, Artificial Sequence
  Synthetic oligonucleotide
gtacattggaatgattagtttacaccatac

SEQ ID NO: 423904 - DNA, 30 bp, Artificial Sequence
  Synthetic oligonucleotide
taggccggctagtcgcgcagcgacccatac

SEQ ID NO: 423905 - DNA, 30 bp, Artificial Sequence
  Synthetic oligonucleotide
cttccaacggggagatattagaccccatac

SEQ ID NO: 423906 - DNA, 30 bp, Artificial Sequence
  Synthetic oligonucleotide
acgtctctgttgccttgacactgcccatac

SEQ ID NO: 423907 - DNA, 30 bp, Artificial Sequence
  Synthetic oligonucleotide
cctgtcatagtctggactgtcaagccatac

SEQ ID NO: 423908 - DNA, 30 bp, Artificial Sequence
  Synthetic oligonucleotide
cattgagcgatgccgcggtttccgccatac

SEQ ID NO: 423909 - DNA, 30 bp, Artificial Sequence
  Synthetic oligonucleotide
gagtgcccctagggggaggtagggccatac

SEQ ID NO: 423910 - DNA, 30 bp, Artificial Sequence
  Synthetic oligonucleotide
aaccaattacttgtatgatacaatccatac

SEQ ID NO: 423911 - DNA, 30 bp, Artificial Sequence
  Synthetic oligonucleotide
aactaggtgagattaaatagtaatccatac

SEQ ID NO: 423912 - DNA, 30 bp, Artificial Sequence
  Synthetic oligonucleotide
taagtagctaaccgtgttctagatccatac

SEQ ID NO: 423913 - DNA, 30 bp, Artificial Sequence
  Synthetic oligonucleotide
tcagtgggtagacactaagtctatccatac

SEQ ID NO: 423914 - DNA, 30 bp, Artificial Sequence
  Synthetic oligonucleotide
agagaggtgggacagtggctattagcatac

SEQ ID NO: 423915 - DNA, 30 bp, Artificial Sequence
  Synthetic oligonucleotide
tagtagcttgcagagtctggcagcgcatac

SEQ ID NO: 423916 - DNA, 30 bp, Artificial Sequence
  Synthetic oligonucleotide
gaattctagaagttgtgctagtgcgcatac

SEQ ID NO: 423917 - DNA, 30 bp, Artificial Sequence
  Synthetic oligonucleotide
gaaacgttaccggtatagaagttcgcatac

SEQ ID NO: 423918 - DNA, 30 bp, Artificial Sequence
  Synthetic oligonucleotide
tacggtcggaagcttaagccattggcatac

SEQ ID NO: 423919 - DNA, 30 bp, Artificial Sequence
  Synthetic oligonucleotide
atcccagctacgtttctgttcaatgcatac

SEQ ID NO: 423920 - DNA, 30 bp, Artificial Sequence
  Synthetic oligonucleotide
ctggatatattgggtctacttagtgcatac

SEQ ID NO: 423921 - DNA, 30 bp, Artificial Sequence
  Synthetic oligonucleotide
attaaataggactaggatatagttgcatac

SEQ ID NO: 423922 - DNA, 30 bp, Artificial Sequence
  Synthetic oligonucleotide
gtatttggtagactatggctgcgatcatac

SEQ ID NO: 423923 - DNA, 30 bp, Artificial Sequence
  Synthetic oligonucleotide
ggacaacgccgctagtgcggtgagtcatac

SEQ ID NO: 423924 - DNA, 30 bp, Artificial Sequence
  Synthetic oligonucleotide
ttctgatgatcagaaaacctttattcatac

SEQ ID NO: 423925 - DNA, 30 bp, Artificial Sequence
  Synthetic oligonucleotide
tcaagtaggtatgatcaaacagtttcatac

SEQ ID NO: 423926 - DNA, 30 bp, Artificial Sequence
  Synthetic oligonucleotide
cttcgatactttaggtccacattaagatac

SEQ ID NO: 423927 - DNA, 30 bp, Artificial Sequence
  Synthetic oligonucleotide
atccgctccagtacaatcacgttaagatac

SEQ ID NO: 423928 - DNA, 30 bp, Artificial Sequence
  Synthetic oligonucleotide
tccgaggaagcctagcagcagaagagatac

SEQ ID NO: 423929 - DNA, 30 bp, Artificial Sequence
  Synthetic oligonucleotide
tctcgtaggtaaagagcctggcggagatac

SEQ ID NO: 423930 - DNA, 30 bp, Artificial Sequence
  Synthetic oligonucleotide
gatgagcaaagatcaccacaagggagatac

SEQ ID NO: 423931 - DNA, 30 bp, Artificial Sequence
  Synthetic oligonucleotide
atctccctatgatactcttcaatgagatac

SEQ ID NO: 423932 - DNA, 30 bp, Artificial Sequence
  Synthetic oligonucleotide
acattattaatgatgggggtaaatagatac

SEQ ID NO: 423933 - DNA, 30 bp, Artificial Sequence
  Synthetic oligonucleotide
acaattttgttcgcagttgcgagacgatac

SEQ ID NO: 423934 - DNA, 30 bp, Artificial Sequence
  Synthetic oligonucleotide
tccgcttcaaacacacactcccgacgatac

SEQ ID NO: 423935 - DNA, 30 bp, Artificial Sequence
  Synthetic oligonucleotide
gaggcacattgcttttgaatcatacgatac

SEQ ID NO: 423936 - DNA, 30 bp, Artificial Sequence
  Synthetic oligonucleotide
gtaactagattgagggagttggtccgatac

SEQ ID NO: 423937 - DNA, 30 bp, Artificial Sequence
  Synthetic oligonucleotide
caagttttgtttcttaaggcgaatcgatac

SEQ ID NO: 423938 - DNA, 30 bp, Artificial Sequence
  Synthetic oligonucleotide
ggattatataagatgctctctcatcgatac

SEQ ID NO: 423939 - DNA, 30 bp, Artificial Sequence
  Synthetic oligonucleotide
gagcaggcattttctgaacatgctcgatac

SEQ ID NO: 423940 - DNA, 29 bp, Artificial Sequence
  Synthetic oligonucleotide
gagggcgcttattcgggtagacaggatac

SEQ ID NO: 423941 - DNA, 30 bp, Artificial Sequence
  Synthetic oligonucleotide
atgttggctggttatatgtgcataggatac

SEQ ID NO: 423942 - DNA, 30 bp, Artificial Sequence
  Synthetic oligonucleotide
ctaaggttatatctttaggtattaggatac

SEQ ID NO: 423943 - DNA, 30 bp, Artificial Sequence
  Synthetic oligonucleotide
aacaatatataaaggcttcaaatgggatac

SEQ ID NO: 423944 - DNA, 30 bp, Artificial Sequence
  Synthetic oligonucleotide
gtccggtcgggtcacggtgaaatgggatac

SEQ ID NO: 423945 - DNA, 30 bp, Artificial Sequence
  Synthetic oligonucleotide
aagagaccggagaggtaatctcgtggatac

SEQ ID NO: 423946 - DNA, 30 bp, Artificial Sequence
  Synthetic oligonucleotide
tctactcacgtcgggaaatacattggatac

SEQ ID NO: 423947 - DNA, 30 bp, Artificial Sequence
  Synthetic oligonucleotide
agtgaacgaattatcttcatggttggatac

SEQ ID NO: 423948 - DNA, 30 bp, Artificial Sequence
  Synthetic oligonucleotide
caatctgtttaaatgcgggagccatgatac

SEQ ID NO: 423949 - DNA, 30 bp, Artificial Sequence
  Synthetic oligonucleotide
ttctgtggtaacaggacctccgactgatac

SEQ ID NO: 423950 - DNA, 30 bp, Artificial Sequence
  Synthetic oligonucleotide
ggcgggtgtttgacagttttctactgatac

SEQ ID NO: 423951 - DNA, 30 bp, Artificial Sequence
  Synthetic oligonucleotide
tattacatgtgtggccttcaagcgtgatac

SEQ ID NO: 423952 - DNA, 30 bp, Artificial Sequence
  Synthetic oligonucleotide
tttggctcaattgtaattatgtcgtgatac

SEQ ID NO: 423953 - DNA, 30 bp, Artificial Sequence
  Synthetic oligonucleotide
cgcctcttagaccggaaagccttcatatac

SEQ ID NO: 423954 - DNA, 30 bp, Artificial Sequence
  Synthetic oligonucleotide
gtagtctatttatagttcgagcagatatac

SEQ ID NO: 423955 - DNA, 30 bp, Artificial Sequence
  Synthetic oligonucleotide
atgaaatcgtactgtcaaaggatgatatac

SEQ ID NO: 423956 - DNA, 30 bp, Artificial Sequence
  Synthetic oligonucleotide
acttgacattgcttgaaataattgatatac

SEQ ID NO: 423957 - DNA, 30 bp, Artificial Sequence
  Synthetic oligonucleotide
tggcatctcggttccccagggtgactatac

SEQ ID NO: 423958 - DNA, 30 bp, Artificial Sequence
  Synthetic oligonucleotide
agctatagctttttctatccatacctatac

SEQ ID NO: 423959 - DNA, 30 bp, Artificial Sequence
  Synthetic oligonucleotide
taggtctgctggatgattaaacccctatac

SEQ ID NO: 423960 - DNA, 30 bp, Artificial Sequence
  Synthetic oligonucleotide
tcaggttcactagtaattcgcggcctatac

SEQ ID NO: 423961 - DNA, 30 bp, Artificial Sequence
  Synthetic oligonucleotide
ggtccatgagccatactattccggctatac

SEQ ID NO: 423962 - DNA, 30 bp, Artificial Sequence
  Synthetic oligonucleotide
cccacaaggtatagaagcggcacagtatac

SEQ ID NO: 423963 - DNA, 30 bp, Artificial Sequence
  Synthetic oligonucleotide
atgtcttagtcgagccacaactcagtatac

SEQ ID NO: 423964 - DNA, 30 bp, Artificial Sequence
  Synthetic oligonucleotide
atctactcgagcgtcgtcaatctagtatac

SEQ ID NO: 423965 - DNA, 30 bp, Artificial Sequence
  Synthetic oligonucleotide
agaattattgcaggaccgtatgtagtatac

SEQ ID NO: 423966 - DNA, 30 bp, Artificial Sequence
  Synthetic oligonucleotide
tgcatgcatgtacatgtaactgtagtatac

SEQ ID NO: 423967 - DNA, 30 bp, Artificial Sequence
  Synthetic oligonucleotide
gggacttccgctggcggcaacggcgtatac

SEQ ID NO: 423968 - DNA, 30 bp, Artificial Sequence
  Synthetic oligonucleotide
agtcgacatagactttcggttgtcgtatac

SEQ ID NO: 423969 - DNA, 30 bp, Artificial Sequence
  Synthetic oligonucleotide
agggcttcgcggaacttttactatgtatac

SEQ ID NO: 423970 - DNA, 30 bp, Artificial Sequence
  Synthetic oligonucleotide
cttacctatccgaatgcttcaattgtatac

SEQ ID NO: 423971 - DNA, 30 bp, Artificial Sequence
  Synthetic oligonucleotide
taattaggagttcatctaacttgcttatac

SEQ ID NO: 423972 - DNA, 30 bp, Artificial Sequence
  Synthetic oligonucleotide
tagacgtacccgcccccagattagttatac

SEQ ID NO: 423973 - DNA, 30 bp, Artificial Sequence
  Synthetic oligonucleotide
gctgttttgagtcaagcgactgggttatac

SEQ ID NO: 423974 - DNA, 30 bp, Artificial Sequence
  Synthetic oligonucleotide
ccctaaagcgcagcgtcacgcttgttatac

SEQ ID NO: 423975 - DNA, 30 bp, Artificial Sequence
  Synthetic oligonucleotide
acttattgacagtcaggcgcctgtttatac

SEQ ID NO: 423976 - DNA, 30 bp, Artificial Sequence
  Synthetic oligonucleotide
caagattacggtgagaagagtcttttatac

SEQ ID NO: 423977 - DNA, 25 bp, Artificial Sequence
  Synthetic oligonucleotide
gagctctgaatgctaccaaaactac

SEQ ID NO: 423978 - DNA, 30 bp, Artificial Sequence
  Synthetic oligonucleotide
acaagtcggtttataaacatcgaaaactac

SEQ ID NO: 423979 - DNA, 30 bp, Artificial Sequence
  Synthetic oligonucleotide
agatcagaaatccgggcgttcataaactac

SEQ ID NO: 423980 - DNA, 30 bp, Artificial Sequence
  Synthetic oligonucleotide
cactacagcagcagtgtaccttacaactac

SEQ ID NO: 423981 - DNA, 30 bp, Artificial Sequence
  Synthetic oligonucleotide
tagatgaacgtagcaaacgtgcggaactac

SEQ ID NO: 423982 - DNA, 30 bp, Artificial Sequence
  Synthetic oligonucleotide
caccaataagtcggtcccgtggctaactac

SEQ ID NO: 423983 - DNA, 30 bp, Artificial Sequence
  Synthetic oligonucleotide
gattatttagatctcccgcgtggtaactac

SEQ ID NO: 423984 - DNA, 30 bp, Artificial Sequence
  Synthetic oligonucleotide
gttattagtcgctcctttgtaattaactac

SEQ ID NO: 423985 - DNA, 30 bp, Artificial Sequence
  Synthetic oligonucleotide
gtcctgagtagccgttaatacaaccactac

SEQ ID NO: 423986 - DNA, 30 bp, Artificial Sequence
  Synthetic oligonucleotide
aaagattagcatgcggcgtctgaccactac

SEQ ID NO: 423987 - DNA, 30 bp, Artificial Sequence
  Synthetic oligonucleotide
gggatggaattttcccgtcaaacccactac

SEQ ID NO: 423988 - DNA, 31 bp, Artificial Sequence
  Synthetic oligonucleotide
actgaccaacgcctgagctcatacgcactac

SEQ ID NO: 423989 - DNA, 30 bp, Artificial Sequence
  Synthetic oligonucleotide
cttccaccaaccgtcatagtcgcgcactac

SEQ ID NO: 423990 - DNA, 30 bp, Artificial Sequence
  Synthetic oligonucleotide
tgactcgtgcggggtttcagtactcactac

SEQ ID NO: 423991 - DNA, 30 bp, Artificial Sequence
  Synthetic oligonucleotide
gataagagttatgctaatccgctagactac

SEQ ID NO: 423992 - DNA, 30 bp, Artificial Sequence
  Synthetic oligonucleotide
gtctgtatcttattgtctaagttagactac

SEQ ID NO: 423993 - DNA, 30 bp, Artificial Sequence
  Synthetic oligonucleotide
ggaagttcctctgtgattttccccgactac

SEQ ID NO: 423994 - DNA, 30 bp, Artificial Sequence
  Synthetic oligonucleotide
ggctaactgagccctctattgggtgactac

SEQ ID NO: 423995 - DNA, 30 bp, Artificial Sequence
  Synthetic oligonucleotide
tagcagttgacctttttagagtttgactac

SEQ ID NO: 423996 - DNA, 30 bp, Artificial Sequence
  Synthetic oligonucleotide
attctacttacagctactgggtactactac

SEQ ID NO: 423997 - DNA, 30 bp, Artificial Sequence
  Synthetic oligonucleotide
cattttaaaataagaaacattaagtactac

SEQ ID NO: 423998 - DNA, 30 bp, Artificial Sequence
  Synthetic oligonucleotide
tgcggcattctgaaaagctatcgttactac

SEQ ID NO: 423999 - DNA, 31 bp, Artificial Sequence
  Synthetic oligonucleotide
atcgatttaaagtctattaactctttactac

SEQ ID NO: 424000 - DNA, 30 bp, Artificial Sequence
  Synthetic oligonucleotide
ttaacatgtatttattggctcgtttactac

SEQ ID NO: 424001 - DNA, 30 bp, Artificial Sequence
  Synthetic oligonucleotide
cggcgcgtggggagggcaagtcggacctac

SEQ ID NO: 424002 - DNA, 30 bp, Artificial Sequence
  Synthetic oligonucleotide
aatgaccctatctacgtatgaacaccctac

SEQ ID NO: 424003 - DNA, 30 bp, Artificial Sequence
  Synthetic oligonucleotide
cgagggtattgggatagagcttctccctac

SEQ ID NO: 424004 - DNA, 30 bp, Artificial Sequence
  Synthetic oligonucleotide
gttatcgaaccatgtgtatccgtggcctac

SEQ ID NO: 424005 - DNA, 30 bp, Artificial Sequence
  Synthetic oligonucleotide
tagtacaaaaggttgcagggatagtcctac

SEQ ID NO: 424006 - DNA, 30 bp, Artificial Sequence
  Synthetic oligonucleotide
cgccgcgttttggataggattccgtcctac

SEQ ID NO: 424007 - DNA, 30 bp, Artificial Sequence
  Synthetic oligonucleotide
atccaggatattcgaactatatattcctac

SEQ ID NO: 424008 - DNA, 30 bp, Artificial Sequence
  Synthetic oligonucleotide
cacgtattttgacgcagggatgcttcctac

SEQ ID NO: 424009 - DNA, 30 bp, Artificial Sequence
  Synthetic oligonucleotide
gagagatatccgctgagcagtcaaagctac

SEQ ID NO: 424010 - DNA, 30 bp, Artificial Sequence
  Synthetic oligonucleotide
gtagactaagcggtgtctacgccaagctac

SEQ ID NO: 424011 - DNA, 30 bp, Artificial Sequence
  Synthetic oligonucleotide
ttcagtggagtagggagtaaaggaagctac

SEQ ID NO: 424012 - DNA, 30 bp, Artificial Sequence
  Synthetic oligonucleotide
cagacactccgtcacggagtcttaagctac

SEQ ID NO: 424013 - DNA, 30 bp, Artificial Sequence
  Synthetic oligonucleotide
gaagtactctgcgctatgatgttaagctac

SEQ ID NO: 424014 - DNA, 30 bp, Artificial Sequence
  Synthetic oligonucleotide
tgaattcattgggtgcggagttccagctac

SEQ ID NO: 424015 - DNA, 30 bp, Artificial Sequence
  Synthetic oligonucleotide
gggtggtaggtggtgagaagtggtagctac

SEQ ID NO: 424016 - DNA, 30 bp, Artificial Sequence
  Synthetic oligonucleotide
aagttcttacgagttatcctcattagctac

SEQ ID NO: 424017 - DNA, 30 bp, Artificial Sequence
  Synthetic oligonucleotide
aactgaaatctaacccacgttaaacgctac

SEQ ID NO: 424018 - DNA, 30 bp, Artificial Sequence
  Synthetic oligonucleotide
tattccctatgccgggtagtcccgcgctac

SEQ ID NO: 424019 - DNA, 30 bp, Artificial Sequence
  Synthetic oligonucleotide
aactcgtagctaatgccagttccgcgctac

SEQ ID NO: 424020 - DNA, 30 bp, Artificial Sequence
  Synthetic oligonucleotide
tttgttctgaatcggggtcatatgcgctac

SEQ ID NO: 424021 - DNA, 30 bp, Artificial Sequence
  Synthetic oligonucleotide
aggaataatgcgatatgtaccttgcgctac

SEQ ID NO: 424022 - DNA, 30 bp, Artificial Sequence
  Synthetic oligonucleotide
gaaccattaactcacgccctctcgggctac

SEQ ID NO: 424023 - DNA, 30 bp, Artificial Sequence
  Synthetic oligonucleotide
gttactttgtacgaatatttaatgggctac

SEQ ID NO: 424024 - DNA, 30 bp, Artificial Sequence
  Synthetic oligonucleotide
tccgggggtgcatggggaaccagctgctac

SEQ ID NO: 424025 - DNA, 30 bp, Artificial Sequence
  Synthetic oligonucleotide
agtcatattgttatggtatctcgctgctac

SEQ ID NO: 424026 - DNA, 30 bp, Artificial Sequence
  Synthetic oligonucleotide
aattagccgtccaatggatttaggtgctac

SEQ ID NO: 424027 - DNA, 30 bp, Artificial Sequence
  Synthetic oligonucleotide
tggtttcggcagcgaaacgtaatgtgctac

SEQ ID NO: 424028 - DNA, 30 bp, Artificial Sequence
  Synthetic oligonucleotide
agctcatttccggttggcgccgtgtgctac

SEQ ID NO: 424029 - DNA, 30 bp, Artificial Sequence
  Synthetic oligonucleotide
taagtctcagcactacgtagctgcatctac

SEQ ID NO: 424030 - DNA, 30 bp, Artificial Sequence
  Synthetic oligonucleotide
acggttttcaaatgccctcattagatctac

SEQ ID NO: 424031 - DNA, 30 bp, Artificial Sequence
  Synthetic oligonucleotide
tgcgtaagtctctcaagagagagtatctac

SEQ ID NO: 424032 - DNA, 30 bp, Artificial Sequence
  Synthetic oligonucleotide
cttgagagtcgcttatatagggtcctctac

SEQ ID NO: 424033 - DNA, 30 bp, Artificial Sequence
  Synthetic oligonucleotide
aagaaattgcatcgtaatacctcgctctac

SEQ ID NO: 424034 - DNA, 30 bp, Artificial Sequence
  Synthetic oligonucleotide
atcgtcaacaccgccgtctaaatgctctac

SEQ ID NO: 424035 - DNA, 30 bp, Artificial Sequence
  Synthetic oligonucleotide
ctgtagtggatacatgttctagctctctac

SEQ ID NO: 424036 - DNA, 30 bp, Artificial Sequence
  Synthetic oligonucleotide
agaattagctgaccttgaacagttctctac

SEQ ID NO: 424037 - DNA, 30 bp, Artificial Sequence
  Synthetic oligonucleotide
tataccttatgccgtttgggtgttctctac

SEQ ID NO: 424038 - DNA, 30 bp, Artificial Sequence
  Synthetic oligonucleotide
gaggaccatgcatgggtaaatggcgtctac

SEQ ID NO: 424039 - DNA, 30 bp, Artificial Sequence
  Synthetic oligonucleotide
cggccagccaaccagacggcgttcgtctac

SEQ ID NO: 424040 - DNA, 30 bp, Artificial Sequence
  Synthetic oligonucleotide
caaatcactaaacgaagtagtatggtctac

SEQ ID NO: 424041 - DNA, 30 bp, Artificial Sequence
  Synthetic oligonucleotide
tacgtcctagcttgggcgaaagctgtctac

SEQ ID NO: 424042 - DNA, 30 bp, Artificial Sequence
  Synthetic oligonucleotide
gttcttatcagcttgcacctacgcttctac

SEQ ID NO: 424043 - DNA, 31 bp, Artificial Sequence
  Synthetic oligonucleotide
gagggttaatcaaagtgctaggggcttctac

SEQ ID NO: 424044 - DNA, 30 bp, Artificial Sequence
  Synthetic oligonucleotide
gtgggacgtataacgaccctcccgttctac

SEQ ID NO: 424045 - DNA, 30 bp, Artificial Sequence
  Synthetic oligonucleotide
gccgtctaaaaagatgaacgaaggttctac

SEQ ID NO: 424046 - DNA, 30 bp, Artificial Sequence
  Synthetic oligonucleotide
gagcatttttagcgatccccggtgttctac

SEQ ID NO: 424047 - DNA, 30 bp, Artificial Sequence
  Synthetic oligonucleotide
ttcggccagcgtctcgatacgggtttctac

SEQ ID NO: 424048 - DNA, 30 bp, Artificial Sequence
  Synthetic oligonucleotide
tccacacctggtcagttacgcgcaaagtac

SEQ ID NO: 424049 - DNA, 30 bp, Artificial Sequence
  Synthetic oligonucleotide
aataagggagtatcctctatatcaaagtac

SEQ ID NO: 424050 - DNA, 30 bp, Artificial Sequence
  Synthetic oligonucleotide
gtctacgatttctctaatggaatcaagtac

SEQ ID NO: 424051 - DNA, 30 bp, Artificial Sequence
  Synthetic oligonucleotide
aaaggttcgtcccacctgagttctaagtac

SEQ ID NO: 424052 - DNA, 30 bp, Artificial Sequence
  Synthetic oligonucleotide
ttctatgggcctattaggtgcaaacagtac

SEQ ID NO: 424053 - DNA, 30 bp, Artificial Sequence
  Synthetic oligonucleotide
aaatgcgcgacgcgtagacggtgacagtac

SEQ ID NO: 424054 - DNA, 30 bp, Artificial Sequence
  Synthetic oligonucleotide
tttgggagtggccgttatctaaaccagtac

SEQ ID NO: 424055 - DNA, 30 bp, Artificial Sequence
  Synthetic oligonucleotide
gaacccccttcgtgaggactttgccagtac

SEQ ID NO: 424056 - DNA, 30 bp, Artificial Sequence
  Synthetic oligonucleotide
tccagtcgggctgcgagggcattccagtac

SEQ ID NO: 424057 - DNA, 30 bp, Artificial Sequence
  Synthetic oligonucleotide
actttacttagtcaccacacaccgcagtac

SEQ ID NO: 424058 - DNA, 30 bp, Artificial Sequence
  Synthetic oligonucleotide
tcagtatctcgggtcactggagcgcagtac

SEQ ID NO: 424059 - DNA, 30 bp, Artificial Sequence
  Synthetic oligonucleotide
ctattctagttgtcacgcactgcgcagtac

SEQ ID NO: 424060 - DNA, 30 bp, Artificial Sequence
  Synthetic oligonucleotide
tggcaatgtaggaaggaagtgatgcagtac

SEQ ID NO: 424061 - DNA, 30 bp, Artificial Sequence
  Synthetic oligonucleotide
tacgacctgtgcggcgtcgccgatcagtac

SEQ ID NO: 424062 - DNA, 30 bp, Artificial Sequence
  Synthetic oligonucleotide
aatcttttcttggcagtaccacgtcagtac

SEQ ID NO: 424063 - DNA, 30 bp, Artificial Sequence
  Synthetic oligonucleotide
attgatgatacgatgacccggtttcagtac

SEQ ID NO: 424064 - DNA, 30 bp, Artificial Sequence
  Synthetic oligonucleotide
ccaaggccgggcactcacgcggcagagtac

SEQ ID NO: 424065 - DNA, 30 bp, Artificial Sequence
  Synthetic oligonucleotide
gggtttatcacggaaaatgatgcagagtac

SEQ ID NO: 424066 - DNA, 30 bp, Artificial Sequence
  Synthetic oligonucleotide
gccccattcctcatatagtgttcagagtac

SEQ ID NO: 424067 - DNA, 30 bp, Artificial Sequence
  Synthetic oligonucleotide
attacgtgccattgcgtcacggacgagtac

SEQ ID NO: 424068 - DNA, 30 bp, Artificial Sequence
  Synthetic oligonucleotide
actccggtagtcctacagacgtacgagtac

SEQ ID NO: 424069 - DNA, 30 bp, Artificial Sequence
  Synthetic oligonucleotide
agttgtgcatcggagggctattccgagtac

SEQ ID NO: 424070 - DNA, 30 bp, Artificial Sequence
  Synthetic oligonucleotide
ccagcagtcgtgcttaagtaacgcgagtac

SEQ ID NO: 424071 - DNA, 30 bp, Artificial Sequence
  Synthetic oligonucleotide
aagcctttcagaatcaataaggatgagtac

SEQ ID NO: 424072 - DNA, 30 bp, Artificial Sequence
  Synthetic oligonucleotide
ttaaaattggatccactggacggtgagtac

SEQ ID NO: 424073 - DNA, 30 bp, Artificial Sequence
  Synthetic oligonucleotide
agctcccgtgctctcacacgggaatagtac

SEQ ID NO: 424074 - DNA, 30 bp, Artificial Sequence
  Synthetic oligonucleotide
gagtcgatagtcatgagtacagcatagtac

SEQ ID NO: 424075 - DNA, 30 bp, Artificial Sequence
  Synthetic oligonucleotide
ggagatctaccgacgcctattcgatagtac

SEQ ID NO: 424076 - DNA, 30 bp, Artificial Sequence
  Synthetic oligonucleotide
gaaattggggtgttctcataagtatagtac

SEQ ID NO: 424077 - DNA, 30 bp, Artificial Sequence
  Synthetic oligonucleotide
tggcgcggcggtctcgcggacggctagtac

SEQ ID NO: 424078 - DNA, 30 bp, Artificial Sequence
  Synthetic oligonucleotide
acccgtgttcaacggaggcatcaaacgtac

SEQ ID NO: 424079 - DNA, 30 bp, Artificial Sequence
  Synthetic oligonucleotide
ttcggcggacaatttatgtcatcaacgtac

SEQ ID NO: 424080 - DNA, 30 bp, Artificial Sequence
  Synthetic oligonucleotide
ctgttgtatgcataggggagcggaacgtac

SEQ ID NO: 424081 - DNA, 30 bp, Artificial Sequence
  Synthetic oligonucleotide
agagccgtcctcattggccgttggacgtac

SEQ ID NO: 424082 - DNA, 30 bp, Artificial Sequence
  Synthetic oligonucleotide
gcaagactctacggggtcacgtcaccgtac

SEQ ID NO: 424083 - DNA, 30 bp, Artificial Sequence
  Synthetic oligonucleotide
tcgccccgatcttacgcctgatcgccgtac

SEQ ID NO: 424084 - DNA, 30 bp, Artificial Sequence
  Synthetic oligonucleotide
attcaccctatcgggattcacaatccgtac

SEQ ID NO: 424085 - DNA, 30 bp, Artificial Sequence
  Synthetic oligonucleotide
tagggcgaagtgtaagaatcaggtccgtac

SEQ ID NO: 424086 - DNA, 30 bp, Artificial Sequence
  Synthetic oligonucleotide
ttaacgcttcggccgtttttctcagcgtac

SEQ ID NO: 424087 - DNA, 31 bp, Artificial Sequence
  Synthetic oligonucleotide
gaagagttaagtgcatctgtcttacgcgtac

SEQ ID NO: 424088 - DNA, 30 bp, Artificial Sequence
  Synthetic oligonucleotide
aatttcgcttcaactgtggacttcgcgtac

SEQ ID NO: 424089 - DNA, 30 bp, Artificial Sequence
  Synthetic oligonucleotide
aacgctggctagtaaatgctaccggcgtac

SEQ ID NO: 424090 - DNA, 30 bp, Artificial Sequence
  Synthetic oligonucleotide
tgcaattcgaattgttatactgtggcgtac

SEQ ID NO: 424091 - DNA, 30 bp, Artificial Sequence
  Synthetic oligonucleotide
catgatgctgcccacggtaaaacctcgtac

SEQ ID NO: 424092 - DNA, 30 bp, Artificial Sequence
  Synthetic oligonucleotide
gcatctacacttgctgggtgtacctcgtac

SEQ ID NO: 424093 - DNA, 30 bp, Artificial Sequence
  Synthetic oligonucleotide
cgaagccacggttcgtgctgctgctcgtac

SEQ ID NO: 424094 - DNA, 30 bp, Artificial Sequence
  Synthetic oligonucleotide
ggcagtatatttcaacgataaacgtcgtac

SEQ ID NO: 424095 - DNA, 30 bp, Artificial Sequence
  Synthetic oligonucleotide
gtcggttagatagaataatggtattcgtac

SEQ ID NO: 424096 - DNA, 30 bp, Artificial Sequence
  Synthetic oligonucleotide
tttatctgtcccacctgtgactaaaggtac

SEQ ID NO: 424097 - DNA, 30 bp, Artificial Sequence
  Synthetic oligonucleotide
accgcggcagacggctgaagtgggaggtac

SEQ ID NO: 424098 - DNA, 30 bp, Artificial Sequence
  Synthetic oligonucleotide
tctcccgattaggtagcaaggcataggtac

SEQ ID NO: 424099 - DNA, 30 bp, Artificial Sequence
  Synthetic oligonucleotide
ctagcagcaggcagatatctgcctaggtac

SEQ ID NO: 424100 - DNA, 30 bp, Artificial Sequence
  Synthetic oligonucleotide
ttcgcgtaataacagactggccgtaggtac

SEQ ID NO: 424101 - DNA, 30 bp, Artificial Sequence
  Synthetic oligonucleotide
ggaatggtttgctcaaacgtgggtaggtac

SEQ ID NO: 424102 - DNA, 30 bp, Artificial Sequence
  Synthetic oligonucleotide
aaatatggaccaacaaccgcgattaggtac

SEQ ID NO: 424103 - DNA, 30 bp, Artificial Sequence
  Synthetic oligonucleotide
atttgtagtaagagattacccgttaggtac

SEQ ID NO: 424104 - DNA, 30 bp, Artificial Sequence
  Synthetic oligonucleotide
agtctacgcgacttgccttctgaacggtac

SEQ ID NO: 424105 - DNA, 30 bp, Artificial Sequence
  Synthetic oligonucleotide
aggtatcgcactaaccggatgacccggtac

SEQ ID NO: 424106 - DNA, 30 bp, Artificial Sequence
  Synthetic oligonucleotide
gcagtaagctcggaattgtggttccggtac

SEQ ID NO: 424107 - DNA, 30 bp, Artificial Sequence
  Synthetic oligonucleotide
taaccggggagaactgttagtttccggtac

SEQ ID NO: 424108 - DNA, 30 bp, Artificial Sequence
  Synthetic oligonucleotide
tagtgctcgaactgtttcaaagcgcggtac

SEQ ID NO: 424109 - DNA, 30 bp, Artificial Sequence
  Synthetic oligonucleotide
ttcgtggatagggggacaaatatgcggtac

SEQ ID NO: 424110 - DNA, 30 bp, Artificial Sequence
  Synthetic oligonucleotide
ttttcgctgatcccggcgatacttcggtac

SEQ ID NO: 424111 - DNA, 30 bp, Artificial Sequence
  Synthetic oligonucleotide
tatcattacaattgttacctcatagggtac

SEQ ID NO: 424112 - DNA, 30 bp, Artificial Sequence
  Synthetic oligonucleotide
cccgtccctttgcaaaagatccacgggtac

SEQ ID NO: 424113 - DNA, 30 bp, Artificial Sequence
  Synthetic oligonucleotide
tccatagtttagtcagcaggtagcgggtac

SEQ ID NO: 424114 - DNA, 30 bp, Artificial Sequence
  Synthetic oligonucleotide
gcgttttccctctcaacccgcttcgggtac

SEQ ID NO: 424115 - DNA, 30 bp, Artificial Sequence
  Synthetic oligonucleotide
accgtattagtactcatgcggccggggtac

SEQ ID NO: 424116 - DNA, 30 bp, Artificial Sequence
  Synthetic oligonucleotide
agggcttggactcatggcaagcgggggtac

SEQ ID NO: 424117 - DNA, 30 bp, Artificial Sequence
  Synthetic oligonucleotide
ggttacgtaacaaggagtcctttggggtac

SEQ ID NO: 424118 - DNA, 30 bp, Artificial Sequence
  Synthetic oligonucleotide
atgttaggcgcactcagcatttgtgggtac

SEQ ID NO: 424119 - DNA, 30 bp, Artificial Sequence
  Synthetic oligonucleotide
aagaagaccatccccacgcgggactggtac

SEQ ID NO: 424120 - DNA, 30 bp, Artificial Sequence
  Synthetic oligonucleotide
ctgtcagatcgtcgcttccttcgctggtac

SEQ ID NO: 424121 - DNA, 30 bp, Artificial Sequence
  Synthetic oligonucleotide
ttgcctccccgaagtccacgatgctggtac

SEQ ID NO: 424122 - DNA, 30 bp, Artificial Sequence
  Synthetic oligonucleotide
gcggagacttaggtacactcaatctggtac

SEQ ID NO: 424123 - DNA, 30 bp, Artificial Sequence
  Synthetic oligonucleotide
gagttctgcgctgtctagaaaaagtggtac

SEQ ID NO: 424124 - DNA, 30 bp, Artificial Sequence
  Synthetic oligonucleotide
gcctatgcctggctggtttctgattggtac

SEQ ID NO: 424125 - DNA, 30 bp, Artificial Sequence
  Synthetic oligonucleotide
ggtgcttaatgaatgcgcgtttattggtac

SEQ ID NO: 424126 - DNA, 30 bp, Artificial Sequence
  Synthetic oligonucleotide
gatctgacaaagatgtctatgacttggtac

SEQ ID NO: 424127 - DNA, 30 bp, Artificial Sequence
  Synthetic oligonucleotide
gccagctgtggtcttggaagtccttggtac

SEQ ID NO: 424128 - DNA, 30 bp, Artificial Sequence
  Synthetic oligonucleotide
tttgcgcttgaacacaggatgtgttggtac

SEQ ID NO: 424129 - DNA, 30 bp, Artificial Sequence
  Synthetic oligonucleotide
tggagcggcgttagatcactttgttggtac

SEQ ID NO: 424130 - DNA, 30 bp, Artificial Sequence
  Synthetic oligonucleotide
gttgcagattgaacgctagtatgaatgtac

SEQ ID NO: 424131 - DNA, 30 bp, Artificial Sequence
  Synthetic oligonucleotide
gtgtgtattaacagatgagatctaatgtac

SEQ ID NO: 424132 - DNA, 30 bp, Artificial Sequence
  Synthetic oligonucleotide
aaagtctaactatgtgattagttaatgtac

SEQ ID NO: 424133 - DNA, 30 bp, Artificial Sequence
  Synthetic oligonucleotide
gctccatctcctcagagataaatcatgtac

SEQ ID NO: 424134 - DNA, 30 bp, Artificial Sequence
  Synthetic oligonucleotide
actgcttgtcactctccagacctcatgtac

SEQ ID NO: 424135 - DNA, 30 bp, Artificial Sequence
  Synthetic oligonucleotide
agcgaactgcagggagttactaagatgtac

SEQ ID NO: 424136 - DNA, 30 bp, Artificial Sequence
  Synthetic oligonucleotide
tagatatcttatgtggagttatcgatgtac

SEQ ID NO: 424137 - DNA, 30 bp, Artificial Sequence
  Synthetic oligonucleotide
catttctcaatagcacgttgcgggatgtac

SEQ ID NO: 424138 - DNA, 30 bp, Artificial Sequence
  Synthetic oligonucleotide
gggacgtgagagtcatgggtaattatgtac

SEQ ID NO: 424139 - DNA, 30 bp, Artificial Sequence
  Synthetic oligonucleotide
atattagcacgtaactgaattcttatgtac

SEQ ID NO: 424140 - DNA, 30 bp, Artificial Sequence
  Synthetic oligonucleotide
aattctcgttttagaacctcggaactgtac

SEQ ID NO: 424141 - DNA, 30 bp, Artificial Sequence
  Synthetic oligonucleotide
gactagatgcgcttgatacactaactgtac

SEQ ID NO: 424142 - DNA, 30 bp, Artificial Sequence
  Synthetic oligonucleotide
attattgaagcattggatcttgccctgtac

SEQ ID NO: 424143 - DNA, 30 bp, Artificial Sequence
  Synthetic oligonucleotide
tggaccgcataagttgaagcaaggctgtac

SEQ ID NO: 424144 - DNA, 30 bp, Artificial Sequence
  Synthetic oligonucleotide
gataggtcacagggaggattgaggctgtac

SEQ ID NO: 424145 - DNA, 30 bp, Artificial Sequence
  Synthetic oligonucleotide
tgccaacttctcttgcgaactaggctgtac

SEQ ID NO: 424146 - DNA, 30 bp, Artificial Sequence
  Synthetic oligonucleotide
actatgaagcccggcatcggttcagtgtac

SEQ ID NO: 424147 - DNA, 30 bp, Artificial Sequence
  Synthetic oligonucleotide
gttcgactccagcttagtaccagcgtgtac

SEQ ID NO: 424148 - DNA, 30 bp, Artificial Sequence
  Synthetic oligonucleotide
gacactaatcgagggagattgatcgtgtac

SEQ ID NO: 424149 - DNA, 30 bp, Artificial Sequence
  Synthetic oligonucleotide
tatttgtggccaaaacgctaattcgtgtac

SEQ ID NO: 424150 - DNA, 30 bp, Artificial Sequence
  Synthetic oligonucleotide
gggatacacgccgcacggaccgcggtgtac

SEQ ID NO: 424151 - DNA, 30 bp, Artificial Sequence
  Synthetic oligonucleotide
cggtagaagccacatcagggttcggtgtac

SEQ ID NO: 424152 - DNA, 30 bp, Artificial Sequence
  Synthetic oligonucleotide
aatcaaatcgaggagcctaagctggtgtac

SEQ ID NO: 424153 - DNA, 30 bp, Artificial Sequence
  Synthetic oligonucleotide
caagaaaacagggagtcattcggtgtgtac

SEQ ID NO: 424154 - DNA, 30 bp, Artificial Sequence
  Synthetic oligonucleotide
cggacttaaccgtcgaacggcagattgtac

SEQ ID NO: 424155 - DNA, 30 bp, Artificial Sequence
  Synthetic oligonucleotide
ggtactctcctcccataagcttgattgtac

SEQ ID NO: 424156 - DNA, 30 bp, Artificial Sequence
  Synthetic oligonucleotide
atccgagtgatattaccgaaatccttgtac

SEQ ID NO: 424157 - DNA, 30 bp, Artificial Sequence
  Synthetic oligonucleotide
tccactaggcaactatttgcaagcttgtac

SEQ ID NO: 424158 - DNA, 30 bp, Artificial Sequence
  Synthetic oligonucleotide
attcttaacccagctatgtgtggcttgtac

SEQ ID NO: 424159 - DNA, 30 bp, Artificial Sequence
  Synthetic oligonucleotide
gttcggtacgaaaaatcgaaccggttgtac

SEQ ID NO: 424160 - DNA, 30 bp, Artificial Sequence
  Synthetic oligonucleotide
ttcaaggttcgctacgaaatagatttgtac

SEQ ID NO: 424161 - DNA, 30 bp, Artificial Sequence
  Synthetic oligonucleotide
gcatatgttgctgaatcgtgaaaaaattac

SEQ ID NO: 424162 - DNA, 30 bp, Artificial Sequence
  Synthetic oligonucleotide
gtccgggaatgcacgagtagttcaaattac

SEQ ID NO: 424163 - DNA, 30 bp, Artificial Sequence
  Synthetic oligonucleotide
attatatggctccagcgagcgcgaaattac

SEQ ID NO: 424164 - DNA, 30 bp, Artificial Sequence
  Synthetic oligonucleotide
attgcgggagggtctcttttcggaaattac

SEQ ID NO: 424165 - DNA, 30 bp, Artificial Sequence
  Synthetic oligonucleotide
gctatacgtaccccccgcggactaaattac

SEQ ID NO: 424166 - DNA, 30 bp, Artificial Sequence
  Synthetic oligonucleotide
agtcttgcagcacaccagcactccaattac

SEQ ID NO: 424167 - DNA, 30 bp, Artificial Sequence
  Synthetic oligonucleotide
tagacagaaaagctagcttctgtcaattac

SEQ ID NO: 424168 - DNA, 30 bp, Artificial Sequence
  Synthetic oligonucleotide
ttgcatacgcgcctgtcgcattggaattac

SEQ ID NO: 424169 - DNA, 30 bp, Artificial Sequence
  Synthetic oligonucleotide
ggctgcggagagtgcatgaaaactaattac

SEQ ID NO: 424170 - DNA, 30 bp, Artificial Sequence
  Synthetic oligonucleotide
atgaatctcgagttccaatttactaattac

SEQ ID NO: 424171 - DNA, 30 bp, Artificial Sequence
  Synthetic oligonucleotide
agctccaacagggtgttccggcctaattac

SEQ ID NO: 424172 - DNA, 30 bp, Artificial Sequence
  Synthetic oligonucleotide
gaccttaactccagtcagcaacgtaattac

SEQ ID NO: 424173 - DNA, 30 bp, Artificial Sequence
  Synthetic oligonucleotide
gttacaaggctattacgaagcacgcattac

SEQ ID NO: 424174 - DNA, 30 bp, Artificial Sequence
  Synthetic oligonucleotide
gggcatcccttcagcgtatattctcattac

SEQ ID NO: 424175 - DNA, 30 bp, Artificial Sequence
  Synthetic oligonucleotide
tttcctatggcaaatcgaatcaaagattac

SEQ ID NO: 424176 - DNA, 30 bp, Artificial Sequence
  Synthetic oligonucleotide
cccacaatgggagtatctcgtatagattac

SEQ ID NO: 424177 - DNA, 30 bp, Artificial Sequence
  Synthetic oligonucleotide
caatcaacttggagcggtggtctagattac

SEQ ID NO: 424178 - DNA, 30 bp, Artificial Sequence
  Synthetic oligonucleotide
gcggtgattgcttaaaagtatgtcgattac

SEQ ID NO: 424179 - DNA, 30 bp, Artificial Sequence
  Synthetic oligonucleotide
aaccttcagctgtatctaggtacggattac

SEQ ID NO: 424180 - DNA, 30 bp, Artificial Sequence
  Synthetic oligonucleotide
agtaagttgtaatatggtcaaatggattac

SEQ ID NO: 424181 - DNA, 30 bp, Artificial Sequence
  Synthetic oligonucleotide
tgcataccagttgatttacgcaatgattac

SEQ ID NO: 424182 - DNA, 30 bp, Artificial Sequence
  Synthetic oligonucleotide
agtctacgagcgtatgctccgccatattac

SEQ ID NO: 424183 - DNA, 30 bp, Artificial Sequence
  Synthetic oligonucleotide
accaattcaaactctatgtatccatattac

SEQ ID NO: 424184 - DNA, 30 bp, Artificial Sequence
  Synthetic oligonucleotide
taattacttggcttgcttgttggatattac

SEQ ID NO: 424185 - DNA, 30 bp, Artificial Sequence
  Synthetic oligonucleotide
gctagaatatggaggttaacgatatattac

SEQ ID NO: 424186 - DNA, 30 bp, Artificial Sequence
  Synthetic oligonucleotide
tagtcggtagacgagtctatagcgtattac

SEQ ID NO: 424187 - DNA, 30 bp, Artificial Sequence
  Synthetic oligonucleotide
tccagtgcccggaggtattgatcgtattac

SEQ ID NO: 424188 - DNA, 30 bp, Artificial Sequence
  Synthetic oligonucleotide
gccgtcagaccgacttacggttggtattac

SEQ ID NO: 424189 - DNA, 30 bp, Artificial Sequence
  Synthetic oligonucleotide
gtttacggtaatggtaccattgtgtattac

SEQ ID NO: 424190 - DNA, 30 bp, Artificial Sequence
  Synthetic oligonucleotide
tagaagggattatatgagaccgcttattac

SEQ ID NO: 424191 - DNA, 30 bp, Artificial Sequence
  Synthetic oligonucleotide
cagtgtgtcatcatcagggttagttattac

SEQ ID NO: 424192 - DNA, 30 bp, Artificial Sequence
  Synthetic oligonucleotide
taattaaggacaccctgtggtggttattac

SEQ ID NO: 424193 - DNA, 30 bp, Artificial Sequence
  Synthetic oligonucleotide
ggacactatcaacctcgatttttttattac

SEQ ID NO: 424194 - DNA, 30 bp, Artificial Sequence
  Synthetic oligonucleotide
ataggattttaagtatatcaccaaacttac

SEQ ID NO: 424195 - DNA, 30 bp, Artificial Sequence
  Synthetic oligonucleotide
gtgagcgaacaccagctagccctaacttac

SEQ ID NO: 424196 - DNA, 30 bp, Artificial Sequence
  Synthetic oligonucleotide
ccattgaattcccaagggagggccacttac

SEQ ID NO: 424197 - DNA, 30 bp, Artificial Sequence
  Synthetic oligonucleotide
taatgatatttggttagctgggcgacttac

SEQ ID NO: 424198 - DNA, 30 bp, Artificial Sequence
  Synthetic oligonucleotide
cgcatgcagcctgcaattgccgggacttac

SEQ ID NO: 424199 - DNA, 30 bp, Artificial Sequence
  Synthetic oligonucleotide
gcggtcctatggggccgtaagcctacttac

SEQ ID NO: 424200 - DNA, 30 bp, Artificial Sequence
  Synthetic oligonucleotide
cattctacaacggcagacaattctacttac

SEQ ID NO: 424201 - DNA, 30 bp, Artificial Sequence
  Synthetic oligonucleotide
caacctcctggtaagtgtgaaccaccttac

SEQ ID NO: 424202 - DNA, 30 bp, Artificial Sequence
  Synthetic oligonucleotide
gtgtggataatttgagttgcagcaccttac

SEQ ID NO: 424203 - DNA, 30 bp, Artificial Sequence
  Synthetic oligonucleotide
ctcactacaccggtgagcttatgaccttac

SEQ ID NO: 424204 - DNA, 30 bp, Artificial Sequence
  Synthetic oligonucleotide
atgagcgtagccgtgagttttaacccttac

SEQ ID NO: 424205 - DNA, 30 bp, Artificial Sequence
  Synthetic oligonucleotide
tggcagataaggggcaacagtatcccttac

SEQ ID NO: 424206 - DNA, 30 bp, Artificial Sequence
  Synthetic oligonucleotide
ctgtttggcttgcttgaaaatttcccttac

SEQ ID NO: 424207 - DNA, 30 bp, Artificial Sequence
  Synthetic oligonucleotide
tgattaatttactaagaagcttatccttac

SEQ ID NO: 424208 - DNA, 30 bp, Artificial Sequence
  Synthetic oligonucleotide
aagtataccctgagcatggaaggtccttac

SEQ ID NO: 424209 - DNA, 30 bp, Artificial Sequence
  Synthetic oligonucleotide
agtgtacagcctccgtctacaggtccttac

SEQ ID NO: 424210 - DNA, 30 bp, Artificial Sequence
  Synthetic oligonucleotide
gaggtctgacgctacaaattatgtccttac

SEQ ID NO: 424211 - DNA, 30 bp, Artificial Sequence
  Synthetic oligonucleotide
gatctttcagaacaatcccgaaaagcttac

SEQ ID NO: 424212 - DNA, 30 bp, Artificial Sequence
  Synthetic oligonucleotide
tggacatgactccaatagccgcaagcttac

SEQ ID NO: 424213 - DNA, 30 bp, Artificial Sequence
  Synthetic oligonucleotide
ggattaaggtatagcgccttcgaagcttac

SEQ ID NO: 424214 - DNA, 30 bp, Artificial Sequence
  Synthetic oligonucleotide
tatcgagccctagacttcgatagagcttac

SEQ ID NO: 424215 - DNA, 30 bp, Artificial Sequence
  Synthetic oligonucleotide
tagtcgaagcagggtccagtttacgcttac

SEQ ID NO: 424216 - DNA, 30 bp, Artificial Sequence
  Synthetic oligonucleotide
cagaacgttcgtgtcgcttcgccggcttac

SEQ ID NO: 424217 - DNA, 30 bp, Artificial Sequence
  Synthetic oligonucleotide
gagcttcctgggagctatcatcgggcttac

SEQ ID NO: 424218 - DNA, 30 bp, Artificial Sequence
  Synthetic oligonucleotide
cacaatcgggctagccatactagatcttac

SEQ ID NO: 424219 - DNA, 30 bp, Artificial Sequence
  Synthetic oligonucleotide
gaaacgtgggaggaaactggtctatcttac

SEQ ID NO: 424220 - DNA, 30 bp, Artificial Sequence
  Synthetic oligonucleotide
cgcggaccttgtacgcaccttcactcttac

SEQ ID NO: 424221 - DNA, 30 bp, Artificial Sequence
  Synthetic oligonucleotide
gctgccaaatcgatacgggccgtctcttac

SEQ ID NO: 424222 - DNA, 30 bp, Artificial Sequence
  Synthetic oligonucleotide
gaggagtctcgagtgtaaatagagtcttac

SEQ ID NO: 424223 - DNA, 30 bp, Artificial Sequence
  Synthetic oligonucleotide
gtggcctcaaacgggtatgaatagtcttac

SEQ ID NO: 424224 - DNA, 30 bp, Artificial Sequence
  Synthetic oligonucleotide
taaatcatcaactctcgtaggaattcttac

SEQ ID NO: 424225 - DNA, 30 bp, Artificial Sequence
  Synthetic oligonucleotide
gatagtgcagatcggtcctctcattcttac

SEQ ID NO: 424226 - DNA, 30 bp, Artificial Sequence
  Synthetic oligonucleotide
tataagtgcatcggacttctcccttcttac

SEQ ID NO: 424227 - DNA, 30 bp, Artificial Sequence
  Synthetic oligonucleotide
cagatgatggtggtcgcgtaatgttcttac

SEQ ID NO: 424228 - DNA, 30 bp, Artificial Sequence
  Synthetic oligonucleotide
aatggttgcgttagacaaccttcaagttac

SEQ ID NO: 424229 - DNA, 30 bp, Artificial Sequence
  Synthetic oligonucleotide
ttttaggaaactttccgaacaaccagttac

SEQ ID NO: 424230 - DNA, 30 bp, Artificial Sequence
  Synthetic oligonucleotide
tacgggatgcagtcattaggttccagttac

SEQ ID NO: 424231 - DNA, 30 bp, Artificial Sequence
  Synthetic oligonucleotide
ctctgaggtacgcgctagaagatcagttac

SEQ ID NO: 424232 - DNA, 30 bp, Artificial Sequence
  Synthetic oligonucleotide
ccgaattaacagtagcagctaagtagttac

SEQ ID NO: 424233 - DNA, 30 bp, Artificial Sequence
  Synthetic oligonucleotide
taagccgctagggaaacacttattagttac

SEQ ID NO: 424234 - DNA, 30 bp, Artificial Sequence
  Synthetic oligonucleotide
cagttatgttcagcatgctaggttagttac

SEQ ID NO: 424235 - DNA, 30 bp, Artificial Sequence
  Synthetic oligonucleotide
ttttgtaacgtatggatattaagccgttac

SEQ ID NO: 424236 - DNA, 30 bp, Artificial Sequence
  Synthetic oligonucleotide
agatggcttatgcccgacgccaagcgttac

SEQ ID NO: 424237 - DNA, 30 bp, Artificial Sequence
  Synthetic oligonucleotide
agaattgcggaagtaaatacggagcgttac

SEQ ID NO: 424238 - DNA, 30 bp, Artificial Sequence
  Synthetic oligonucleotide
cattccagtacgatgtgactacggcgttac

SEQ ID NO: 424239 - DNA, 30 bp, Artificial Sequence
  Synthetic oligonucleotide
ataatatatgtgtagtatgatgggcgttac

SEQ ID NO: 424240 - DNA, 30 bp, Artificial Sequence
  Synthetic oligonucleotide
aaggctcacgacccgttccatagtcgttac

SEQ ID NO: 424241 - DNA, 30 bp, Artificial Sequence
  Synthetic oligonucleotide
gtaacagccctcatataatgttaaggttac

SEQ ID NO: 424242 - DNA, 30 bp, Artificial Sequence
  Synthetic oligonucleotide
tacttgtatcgcaagaaggaaaccggttac

SEQ ID NO: 424243 - DNA, 30 bp, Artificial Sequence
  Synthetic oligonucleotide
gtagttcgattcctcgtgaggatcggttac

SEQ ID NO: 424244 - DNA, 30 bp, Artificial Sequence
  Synthetic oligonucleotide
tagtgttgacaatcggacagatatggttac

SEQ ID NO: 424245 - DNA, 30 bp, Artificial Sequence
  Synthetic oligonucleotide
acccagctataaaccccgaatcctggttac

SEQ ID NO: 424246 - DNA, 30 bp, Artificial Sequence
  Synthetic oligonucleotide
acactagtcacgtgcagatcatgtggttac

SEQ ID NO: 424247 - DNA, 30 bp, Artificial Sequence
  Synthetic oligonucleotide
ggggattggatttgcagaatggaatgttac

SEQ ID NO: 424248 - DNA, 30 bp, Artificial Sequence
  Synthetic oligonucleotide
gataaactcccgcgtgagaaagtatgttac

SEQ ID NO: 424249 - DNA, 30 bp, Artificial Sequence
  Synthetic oligonucleotide
aatagacccacaatgttacgtgtatgttac

SEQ ID NO: 424250 - DNA, 30 bp, Artificial Sequence
  Synthetic oligonucleotide
tacaatggcgggcaaaccacccactgttac

SEQ ID NO: 424251 - DNA, 30 bp, Artificial Sequence
  Synthetic oligonucleotide
aagagcattttgctgatgaaagtctgttac

SEQ ID NO: 424252 - DNA, 30 bp, Artificial Sequence
  Synthetic oligonucleotide
aacacggaattatgcgcacagcagtgttac

SEQ ID NO: 424253 - DNA, 30 bp, Artificial Sequence
  Synthetic oligonucleotide
gccgtactggatctccactgcgcgtgttac

SEQ ID NO: 424254 - DNA, 30 bp, Artificial Sequence
  Synthetic oligonucleotide
gcttgtcatgcggttcgttcaccttgttac

SEQ ID NO: 424255 - DNA, 30 bp, Artificial Sequence
  Synthetic oligonucleotide
ggttcgcaaaaagcctaggcgctttgttac

SEQ ID NO: 424256 - DNA, 30 bp, Artificial Sequence
  Synthetic oligonucleotide
ctccaattttcgggtgggcttgaaatttac

SEQ ID NO: 424257 - DNA, 30 bp, Artificial Sequence
  Synthetic oligonucleotide
cgtccgcggaagaatgccgaagcaatttac

SEQ ID NO: 424258 - DNA, 30 bp, Artificial Sequence
  Synthetic oligonucleotide
gtcagtatgatcctcaaatcgcagatttac

SEQ ID NO: 424259 - DNA, 30 bp, Artificial Sequence
  Synthetic oligonucleotide
ggccaaatcccatgggtgacttatatttac

SEQ ID NO: 424260 - DNA, 30 bp, Artificial Sequence
  Synthetic oligonucleotide
tgtactacgttgcataggtgtagtatttac

SEQ ID NO: 424261 - DNA, 30 bp, Artificial Sequence
  Synthetic oligonucleotide
gaatctattaagggcctcagtcgcctttac

SEQ ID NO: 424262 - DNA, 30 bp, Artificial Sequence
  Synthetic oligonucleotide
tcaattctaattgatattcggctcctttac

SEQ ID NO: 424263 - DNA, 30 bp, Artificial Sequence
  Synthetic oligonucleotide
ttagttgtatccttattatgtcagctttac

SEQ ID NO: 424264 - DNA, 30 bp, Artificial Sequence
  Synthetic oligonucleotide
attctgtgggactgcgttgcccggctttac

SEQ ID NO: 424265 - DNA, 30 bp, Artificial Sequence
  Synthetic oligonucleotide
gggatagctaaccgtaaaggcaatctttac

SEQ ID NO: 424266 - DNA, 30 bp, Artificial Sequence
  Synthetic oligonucleotide
atgctacgttcacttaaactgaatctttac

SEQ ID NO: 424267 - DNA, 30 bp, Artificial Sequence
  Synthetic oligonucleotide
tcttcggaggaatgctcaagtactctttac

SEQ ID NO: 424268 - DNA, 30 bp, Artificial Sequence
  Synthetic oligonucleotide
acggttgggccaaagagtgaacctctttac

SEQ ID NO: 424269 - DNA, 30 bp, Artificial Sequence
  Synthetic oligonucleotide
tgttaaattacccgttcatccagtctttac

SEQ ID NO: 424270 - DNA, 30 bp, Artificial Sequence
  Synthetic oligonucleotide
tttgtgtgaaaggtaggaagagttctttac

SEQ ID NO: 424271 - DNA, 30 bp, Artificial Sequence
  Synthetic oligonucleotide
tccgtggcgagtcttttgactaaagtttac

SEQ ID NO: 424272 - DNA, 30 bp, Artificial Sequence
  Synthetic oligonucleotide
gcccttgggcagccaggtttacaagtttac

SEQ ID NO: 424273 - DNA, 30 bp, Artificial Sequence
  Synthetic oligonucleotide
gggcagagataatccttttacgtcgtttac

SEQ ID NO: 424274 - DNA, 30 bp, Artificial Sequence
  Synthetic oligonucleotide
cggtggggtttctatatcctcacggtttac

SEQ ID NO: 424275 - DNA, 30 bp, Artificial Sequence
  Synthetic oligonucleotide
ttcataatacacgggctagtgctggtttac

SEQ ID NO: 424276 - DNA, 30 bp, Artificial Sequence
  Synthetic oligonucleotide
ctgttcgcacacgctcaacaccttgtttac

SEQ ID NO: 424277 - DNA, 30 bp, Artificial Sequence
  Synthetic oligonucleotide
gcaggtctgaatcccgagcgtgttgtttac

SEQ ID NO: 424278 - DNA, 30 bp, Artificial Sequence
  Synthetic oligonucleotide
tagtattagagacatgtttgcccattttac

SEQ ID NO: 424279 - DNA, 30 bp, Artificial Sequence
  Synthetic oligonucleotide
gtaaaccgcgggttcgggcaaagattttac

SEQ ID NO: 424280 - DNA, 30 bp, Artificial Sequence
  Synthetic oligonucleotide
aggggacgtatgcaggagcaggtattttac

SEQ ID NO: 424281 - DNA, 30 bp, Artificial Sequence
  Synthetic oligonucleotide
cacgccagtgggtatcctaccgccttttac

SEQ ID NO: 424282 - DNA, 30 bp, Artificial Sequence
  Synthetic oligonucleotide
gtggaagcacagccctcttgctccttttac

SEQ ID NO: 424283 - DNA, 30 bp, Artificial Sequence
  Synthetic oligonucleotide
tatggcgatgttggtgggccccgcttttac

SEQ ID NO: 424284 - DNA, 30 bp, Artificial Sequence
  Synthetic oligonucleotide
ccatggcagtagaactgtcggtagttttac

SEQ ID NO: 424285 - DNA, 30 bp, Artificial Sequence
  Synthetic oligonucleotide
agtctttttcacgatgaaggtccgttttac

SEQ ID NO: 424286 - DNA, 30 bp, Artificial Sequence
  Synthetic oligonucleotide
tgggcgttgatattaagtagatcgttttac

SEQ ID NO: 424287 - DNA, 30 bp, Artificial Sequence
  Synthetic oligonucleotide
ttccggggagagagagattggtcgttttac

SEQ ID NO: 424288 - DNA, 30 bp, Artificial Sequence
  Synthetic oligonucleotide
ctctgaagcttactccaggcacgaaaaacc

SEQ ID NO: 424289 - DNA, 30 bp, Artificial Sequence
  Synthetic oligonucleotide
ggctatagtatagtcccgcacgtaaaaacc

SEQ ID NO: 424290 - DNA, 30 bp, Artificial Sequence
  Synthetic oligonucleotide
taacgtcggctgaccctacgtgtaaaaacc

SEQ ID NO: 424291 - DNA, 30 bp, Artificial Sequence
  Synthetic oligonucleotide
ggggatcacgctcggggtatcgacaaaacc

SEQ ID NO: 424292 - DNA, 30 bp, Artificial Sequence
  Synthetic oligonucleotide
ctagggttaatagagggcttgcccaaaacc

SEQ ID NO: 424293 - DNA, 30 bp, Artificial Sequence
  Synthetic oligonucleotide
actatgggtacctgtaagttgatcaaaacc

SEQ ID NO: 424294 - DNA, 30 bp, Artificial Sequence
  Synthetic oligonucleotide
aacgattaccgttacttattactcaaaacc

SEQ ID NO: 424295 - DNA, 30 bp, Artificial Sequence
  Synthetic oligonucleotide
agagtggctaaccgcaggatctggaaaacc

SEQ ID NO: 424296 - DNA, 30 bp, Artificial Sequence
  Synthetic oligonucleotide
caacccacgtcaacgccatggaataaaacc

SEQ ID NO: 424297 - DNA, 30 bp, Artificial Sequence
  Synthetic oligonucleotide
caccgtgcgattgatcacgggacccaaacc

SEQ ID NO: 424298 - DNA, 30 bp, Artificial Sequence
  Synthetic oligonucleotide
agaatggatgtctgagaatggacccaaacc

SEQ ID NO: 424299 - DNA, 30 bp, Artificial Sequence
  Synthetic oligonucleotide
gatttatctccaagccaggaggcgcaaacc

SEQ ID NO: 424300 - DNA, 30 bp, Artificial Sequence
  Synthetic oligonucleotide
ggccggtttcgtccaatttgggctcaaacc

SEQ ID NO: 424301 - DNA, 30 bp, Artificial Sequence
  Synthetic oligonucleotide
tggttccctgttatgacagggagtcaaacc

SEQ ID NO: 424302 - DNA, 31 bp, Artificial Sequence
  Synthetic oligonucleotide
tcactagatgtcgtcagaaggctgtcaaacc

SEQ ID NO: 424303 - DNA, 30 bp, Artificial Sequence
  Synthetic oligonucleotide
ttatgggtcccgctctgcagactagaaacc

SEQ ID NO: 424304 - DNA, 30 bp, Artificial Sequence
  Synthetic oligonucleotide
ccctggatgcaaatgcagttcaacgaaacc

SEQ ID NO: 424305 - DNA, 30 bp, Artificial Sequence
  Synthetic oligonucleotide
gtaggtttcaccgagcgagtttccgaaacc

SEQ ID NO: 424306 - DNA, 30 bp, Artificial Sequence
  Synthetic oligonucleotide
tcattgaacagagtagtcctttgcgaaacc

SEQ ID NO: 424307 - DNA, 30 bp, Artificial Sequence
  Synthetic oligonucleotide
tctcttagcaacagttgaactatcgaaacc

SEQ ID NO: 424308 - DNA, 30 bp, Artificial Sequence
  Synthetic oligonucleotide
taatgtgggatagggtacccagcggaaacc

SEQ ID NO: 424309 - DNA, 30 bp, Artificial Sequence
  Synthetic oligonucleotide
cttgtcatttgcgcttccttcaatgaaacc

SEQ ID NO: 424310 - DNA, 30 bp, Artificial Sequence
  Synthetic oligonucleotide
gattgaggggaaaatggagtttatgaaacc

SEQ ID NO: 424311 - DNA, 30 bp, Artificial Sequence
  Synthetic oligonucleotide
gcggcgaataaggttatggttgaataaacc

SEQ ID NO: 424312 - DNA, 31 bp, Artificial Sequence
  Synthetic oligonucleotide
acagtgaagaaacgtcaaacggagctaaacc

SEQ ID NO: 424313 - DNA, 30 bp, Artificial Sequence
  Synthetic oligonucleotide
aattgaaagtcagtctgtactctctaaacc

SEQ ID NO: 424314 - DNA, 30 bp, Artificial Sequence
  Synthetic oligonucleotide
tgaatcaattgggccctttgtcagtaaacc

SEQ ID NO: 424315 - DNA, 27 bp, Artificial Sequence
  Synthetic oligonucleotide
acgcgctcagacggcgaatattaaacc

SEQ ID NO: 424316 - DNA, 30 bp, Artificial Sequence
  Synthetic oligonucleotide
taaccccatattgcactaggtacttaaacc

SEQ ID NO: 424317 - DNA, 30 bp, Artificial Sequence
  Synthetic oligonucleotide
cccttctcagcacggacgcattcttaaacc

SEQ ID NO: 424318 - DNA, 30 bp, Artificial Sequence
  Synthetic oligonucleotide
gcccggcgagattcgttattcctttaaacc

SEQ ID NO: 424319 - DNA, 30 bp, Artificial Sequence
  Synthetic oligonucleotide
gacttatagtgatattttgttttttaaacc

SEQ ID NO: 424320 - DNA, 30 bp, Artificial Sequence
  Synthetic oligonucleotide
gaaagccttcgtgggggttctaaaacaacc

SEQ ID NO: 424321 - DNA, 30 bp, Artificial Sequence
  Synthetic oligonucleotide
tcttcaatagtgtctcaaggacaaacaacc

SEQ ID NO: 424322 - DNA, 30 bp, Artificial Sequence
  Synthetic oligonucleotide
agggttacgccgcccctgggcgaaacaacc

SEQ ID NO: 424323 - DNA, 30 bp, Artificial Sequence
  Synthetic oligonucleotide
tccactcctactgtacataacctcacaacc

SEQ ID NO: 424324 - DNA, 30 bp, Artificial Sequence
  Synthetic oligonucleotide
ccacttatcgcggatataatagatacaacc

SEQ ID NO: 424325 - DNA, 30 bp, Artificial Sequence
  Synthetic oligonucleotide
ccataatagtgtcaaactttctttacaacc

SEQ ID NO: 424326 - DNA, 30 bp, Artificial Sequence
  Synthetic oligonucleotide
ctaagtatgacttcaagctcttaaccaacc

SEQ ID NO: 424327 - DNA, 30 bp, Artificial Sequence
  Synthetic oligonucleotide
ctcattcttaaactggggcatgccccaacc

SEQ ID NO: 424328 - DNA, 30 bp, Artificial Sequence
  Synthetic oligonucleotide
gctcgtgtgagtaggttgctgccgccaacc

SEQ ID NO: 424329 - DNA, 30 bp, Artificial Sequence
  Synthetic oligonucleotide
cccaataacagacggagcggatacgcaacc

SEQ ID NO: 424330 - DNA, 30 bp, Artificial Sequence
  Synthetic oligonucleotide
tatactttacgtgacgggatatccgcaacc

SEQ ID NO: 424331 - DNA, 30 bp, Artificial Sequence
  Synthetic oligonucleotide
ttggggtattgggaggcactattcgcaacc

SEQ ID NO: 424332 - DNA, 30 bp, Artificial Sequence
  Synthetic oligonucleotide
gcggtacgcgacggggggagcccggcaacc

SEQ ID NO: 424333 - DNA, 30 bp, Artificial Sequence
  Synthetic oligonucleotide
gattctctctaggagtgctgtccggcaacc

SEQ ID NO: 424334 - DNA, 30 bp, Artificial Sequence
  Synthetic oligonucleotide
ggtctacatcatctagtgcaacgggcaacc

SEQ ID NO: 424335 - DNA, 30 bp, Artificial Sequence
  Synthetic oligonucleotide
ggtggcactgacttaatcaggactgcaacc

SEQ ID NO: 424336 - DNA, 30 bp, Artificial Sequence
  Synthetic oligonucleotide
tcagatttgatactagtatacagtgcaacc

SEQ ID NO: 424337 - DNA, 30 bp, Artificial Sequence
  Synthetic oligonucleotide
cttgcaaacccagctatataacgtgcaacc

SEQ ID NO: 424338 - DNA, 30 bp, Artificial Sequence
  Synthetic oligonucleotide
ttaaatcgttcaaaaaatttgccatcaacc

SEQ ID NO: 424339 - DNA, 30 bp, Artificial Sequence
  Synthetic oligonucleotide
gtccttcaactagcgtttacactatcaacc

SEQ ID NO: 424340 - DNA, 30 bp, Artificial Sequence
  Synthetic oligonucleotide
tggaagttatctgtgggaaacttatcaacc

SEQ ID NO: 424341 - DNA, 30 bp, Artificial Sequence
  Synthetic oligonucleotide
tggcatatatatgattgaaggcactcaacc

SEQ ID NO: 424342 - DNA, 30 bp, Artificial Sequence
  Synthetic oligonucleotide
tggctcctgcgccaccgtttgcggtcaacc

SEQ ID NO: 424343 - DNA, 30 bp, Artificial Sequence
  Synthetic oligonucleotide
tgtattacgaggctggcacgtgggtcaacc

SEQ ID NO: 424344 - DNA, 30 bp, Artificial Sequence
  Synthetic oligonucleotide
gccgtcatcatccagtggcagtggtcaacc

SEQ ID NO: 424345 - DNA, 30 bp, Artificial Sequence
  Synthetic oligonucleotide
aacatgctggagacaatcaaattgtcaacc

SEQ ID NO: 424346 - DNA, 30 bp, Artificial Sequence
  Synthetic oligonucleotide
ctaatctatatattcttcctggcttcaacc

SEQ ID NO: 424347 - DNA, 30 bp, Artificial Sequence
  Synthetic oligonucleotide
gctgagcaggttcccagcgcattttcaacc

SEQ ID NO: 424348 - DNA, 30 bp, Artificial Sequence
  Synthetic oligonucleotide
gcggagtaggatgacacttcaggaagaacc

SEQ ID NO: 424349 - DNA, 30 bp, Artificial Sequence
  Synthetic oligonucleotide
acagcacgttttcattcgctatgaagaacc

SEQ ID NO: 424350 - DNA, 30 bp, Artificial Sequence
  Synthetic oligonucleotide
atcaaatgcgtgggagtatcgataagaacc

SEQ ID NO: 424351 - DNA, 30 bp, Artificial Sequence
  Synthetic oligonucleotide
tgtgggtgttctcagaaacttttaagaacc

SEQ ID NO: 424352 - DNA, 30 bp, Artificial Sequence
  Synthetic oligonucleotide
ccagcttgcacttactcgcgcaacagaacc

SEQ ID NO: 424353 - DNA, 30 bp, Artificial Sequence
  Synthetic oligonucleotide
ggtgctggaatggaatccttttacagaacc

SEQ ID NO: 424354 - DNA, 30 bp, Artificial Sequence
  Synthetic oligonucleotide
cgcctctactgatcagccacaacgagaacc

SEQ ID NO: 424355 - DNA, 30 bp, Artificial Sequence
  Synthetic oligonucleotide
gtgctttgttctgccagcttgatgagaacc

SEQ ID NO: 424356 - DNA, 30 bp, Artificial Sequence
  Synthetic oligonucleotide
ccgacaagcgcatagttctcggatagaacc

SEQ ID NO: 424357 - DNA, 30 bp, Artificial Sequence
  Synthetic oligonucleotide
gcgtgtcttgcttgattgcgctatagaacc

SEQ ID NO: 424358 - DNA, 30 bp, Artificial Sequence
  Synthetic oligonucleotide
gactaaaagcacgaggtaatttatagaacc

SEQ ID NO: 424359 - DNA, 30 bp, Artificial Sequence
  Synthetic oligonucleotide
ctgatatatcaagcagctaggggacgaacc

SEQ ID NO: 424360 - DNA, 30 bp, Artificial Sequence
  Synthetic oligonucleotide
agttttgaagcaagagcgctgaaccgaacc

SEQ ID NO: 424361 - DNA, 30 bp, Artificial Sequence
  Synthetic oligonucleotide
cagagggtgtatcggcacagcgtccgaacc

SEQ ID NO: 424362 - DNA, 30 bp, Artificial Sequence
  Synthetic oligonucleotide
atgttgaggttccatacaaacttccgaacc

SEQ ID NO: 424363 - DNA, 30 bp, Artificial Sequence
  Synthetic oligonucleotide
cgcaagagtccttcgaattaataaggaacc

SEQ ID NO: 424364 - DNA, 30 bp, Artificial Sequence
  Synthetic oligonucleotide
acccgttatgtttgtgcatcaagaggaacc

SEQ ID NO: 424365 - DNA, 31 bp, Artificial Sequence
  Synthetic oligonucleotide
gcgctgataatactcctccatttgaggaacc

SEQ ID NO: 424366 - DNA, 30 bp, Artificial Sequence
  Synthetic oligonucleotide
atactacgcgattgagctagttagggaacc

SEQ ID NO: 424367 - DNA, 30 bp, Artificial Sequence
  Synthetic oligonucleotide
ggacacaatattggtgacttccatggaacc

SEQ ID NO: 424368 - DNA, 30 bp, Artificial Sequence
  Synthetic oligonucleotide
ctagtttccaaggcaagcgacggtggaacc

SEQ ID NO: 424369 - DNA, 30 bp, Artificial Sequence
  Synthetic oligonucleotide
ccgatatagtcaggccccgcgaactgaacc

SEQ ID NO: 424370 - DNA, 30 bp, Artificial Sequence
  Synthetic oligonucleotide
aacagagggttagatagcccagcctgaacc

SEQ ID NO: 424371 - DNA, 31 bp, Artificial Sequence
  Synthetic oligonucleotide
cattagggaagagccttaacgcaggtgaacc

SEQ ID NO: 424372 - DNA, 30 bp, Artificial Sequence
  Synthetic oligonucleotide
tacttcctgcccgcgcccgagcggtgaacc

SEQ ID NO: 424373 - DNA, 30 bp, Artificial Sequence
  Synthetic oligonucleotide
ggtgaattgtttcaaggtttttattgaacc

SEQ ID NO: 424374 - DNA, 30 bp, Artificial Sequence
  Synthetic oligonucleotide
caaactttttgaagagatgttagttgaacc

SEQ ID NO: 424375 - DNA, 30 bp, Artificial Sequence
  Synthetic oligonucleotide
ttcgatcgtaactatagtcaggaaataacc

SEQ ID NO: 424376 - DNA, 30 bp, Artificial Sequence
  Synthetic oligonucleotide
taagttcgtgatggtccaatgtaaataacc

SEQ ID NO: 424377 - DNA, 30 bp, Artificial Sequence
  Synthetic oligonucleotide
gagagtatggcagccagtcagtcaataacc

SEQ ID NO: 424378 - DNA, 30 bp, Artificial Sequence
  Synthetic oligonucleotide
ttcggaagcttgttgagcgggctcataacc

SEQ ID NO: 424379 - DNA, 30 bp, Artificial Sequence
  Synthetic oligonucleotide
gggtcaagcaatctacgtagcgtcataacc

SEQ ID NO: 424380 - DNA, 30 bp, Artificial Sequence
  Synthetic oligonucleotide
aagtgctaatattattctcgttagataacc

SEQ ID NO: 424381 - DNA, 30 bp, Artificial Sequence
  Synthetic oligonucleotide
aacacaacgcgtgttgatcgcaggataacc

SEQ ID NO: 424382 - DNA, 30 bp, Artificial Sequence
  Synthetic oligonucleotide
tggtaggaacttcctaatacacggataacc

SEQ ID NO: 424383 - DNA, 30 bp, Artificial Sequence
  Synthetic oligonucleotide
tggtcacaatcttcgtaatcgttgataacc

SEQ ID NO: 424384 - DNA, 30 bp, Artificial Sequence
  Synthetic oligonucleotide
acaacgtgtcaccgactcctcggtataacc

SEQ ID NO: 424385 - DNA, 30 bp, Artificial Sequence
  Synthetic oligonucleotide
agcaatggttaagtcttatgtcaactaacc

SEQ ID NO: 424386 - DNA, 30 bp, Artificial Sequence
  Synthetic oligonucleotide
tgtcgtatgattattagctcgcacctaacc

SEQ ID NO: 424387 - DNA, 30 bp, Artificial Sequence
  Synthetic oligonucleotide
aggtttctgaacctgcagagagacctaacc

SEQ ID NO: 424388 - DNA, 30 bp, Artificial Sequence
  Synthetic oligonucleotide
gcgacaaaccccctcgcgcaaaccctaacc

SEQ ID NO: 424389 - DNA, 30 bp, Artificial Sequence
  Synthetic oligonucleotide
aaacaaatttcgacggtgccgaccctaacc

SEQ ID NO: 424390 - DNA, 30 bp, Artificial Sequence
  Synthetic oligonucleotide
ttaatgtactttcccggtacgttcctaacc

SEQ ID NO: 424391 - DNA, 30 bp, Artificial Sequence
  Synthetic oligonucleotide
gtcctgaaccactgtggggtcaatctaacc

SEQ ID NO: 424392 - DNA, 30 bp, Artificial Sequence
  Synthetic oligonucleotide
gggagagcgcatgaggaggtacctctaacc

SEQ ID NO: 424393 - DNA, 30 bp, Artificial Sequence
  Synthetic oligonucleotide
aacgttaacttgggttacgtttttctaacc

SEQ ID NO: 424394 - DNA, 30 bp, Artificial Sequence
  Synthetic oligonucleotide
tctggatgataagcaagggtataagtaacc

SEQ ID NO: 424395 - DNA, 30 bp, Artificial Sequence
  Synthetic oligonucleotide
aagaaatcctcggttggaaactcagtaacc

SEQ ID NO: 424396 - DNA, 30 bp, Artificial Sequence
  Synthetic oligonucleotide
gtttcaggctaatccacttcaggagtaacc

SEQ ID NO: 424397 - DNA, 30 bp, Artificial Sequence
  Synthetic oligonucleotide
tgatccgaagttgtttgcattagcgtaacc

SEQ ID NO: 424398 - DNA, 30 bp, Artificial Sequence
  Synthetic oligonucleotide
ttggacaactgtaatgtagaagcggtaacc

SEQ ID NO: 424399 - DNA, 30 bp, Artificial Sequence
  Synthetic oligonucleotide
agtgaacggctgtgtagcctggtggtaacc

SEQ ID NO: 424400 - DNA, 30 bp, Artificial Sequence
  Synthetic oligonucleotide
ggcatgtgtactgagctaccgcatgtaacc

SEQ ID NO: 424401 - DNA, 30 bp, Artificial Sequence
  Synthetic oligonucleotide
ctctcgcccccaagcgagacatgtgtaacc

SEQ ID NO: 424402 - DNA, 30 bp, Artificial Sequence
  Synthetic oligonucleotide
acccagccattgcaggtgttgtgtgtaacc

SEQ ID NO: 424403 - DNA, 30 bp, Artificial Sequence
  Synthetic oligonucleotide
ggggcgaggattttcaagctaattgtaacc

SEQ ID NO: 424404 - DNA, 30 bp, Artificial Sequence
  Synthetic oligonucleotide
atcgtgatagattctagcgggcccttaacc

SEQ ID NO: 424405 - DNA, 30 bp, Artificial Sequence
  Synthetic oligonucleotide
ttaatggcatgcggacctcagtccttaacc

SEQ ID NO: 424406 - DNA, 30 bp, Artificial Sequence
  Synthetic oligonucleotide
ccggttgattggcccgtcgtaggcttaacc

SEQ ID NO: 424407 - DNA, 30 bp, Artificial Sequence
  Synthetic oligonucleotide
accccgttattgcttatagagttgttaacc

SEQ ID NO: 424408 - DNA, 29 bp, Artificial Sequence
  Synthetic oligonucleotide
aaccgatatgaaatttcccatctttaacc

SEQ ID NO: 424409 - DNA, 30 bp, Artificial Sequence
  Synthetic oligonucleotide
ggtaagtagtaggattgaatatctttaacc

SEQ ID NO: 424410 - DNA, 30 bp, Artificial Sequence
  Synthetic oligonucleotide
cgccgaacggtttcgctgctctgaaacacc

SEQ ID NO: 424411 - DNA, 30 bp, Artificial Sequence
  Synthetic oligonucleotide
gtgatatgtgaattttgggaatacaacacc

SEQ ID NO: 424412 - DNA, 30 bp, Artificial Sequence
  Synthetic oligonucleotide
tatcatttcactggtgggtaagccaacacc

SEQ ID NO: 424413 - DNA, 30 bp, Artificial Sequence
  Synthetic oligonucleotide
ggaactagctaatttatgtgccgcaacacc

SEQ ID NO: 424414 - DNA, 30 bp, Artificial Sequence
  Synthetic oligonucleotide
gatggaatgtacgcttgtcccacgaacacc

SEQ ID NO: 424415 - DNA, 30 bp, Artificial Sequence
  Synthetic oligonucleotide
attggcgctaatggatccggcagtaacacc

SEQ ID NO: 424416 - DNA, 30 bp, Artificial Sequence
  Synthetic oligonucleotide
gttagatataatttagtttcgtgtaacacc

SEQ ID NO: 424417 - DNA, 30 bp, Artificial Sequence
  Synthetic oligonucleotide
cttgctcggatataactctaaggacacacc

SEQ ID NO: 424418 - DNA, 30 bp, Artificial Sequence
  Synthetic oligonucleotide
gtagaggctacgaagtgcatccggcacacc

SEQ ID NO: 424419 - DNA, 30 bp, Artificial Sequence
  Synthetic oligonucleotide
ggttttacagaagcttcgtttaaagacacc

SEQ ID NO: 424420 - DNA, 30 bp, Artificial Sequence
  Synthetic oligonucleotide
ggcatgcctgggtctgcaacgctagacacc

SEQ ID NO: 424421 - DNA, 30 bp, Artificial Sequence
  Synthetic oligonucleotide
ggcgacattatgcagctctggcgcgacacc

SEQ ID NO: 424422 - DNA, 30 bp, Artificial Sequence
  Synthetic oligonucleotide
tggtcatctgccctagtatattgcgacacc

SEQ ID NO: 424423 - DNA, 30 bp, Artificial Sequence
  Synthetic oligonucleotide
gactcatcacacagcttgttacaggacacc

SEQ ID NO: 424424 - DNA, 30 bp, Artificial Sequence
  Synthetic oligonucleotide
ttccggatatggaagttgctaatggacacc

SEQ ID NO: 424425 - DNA, 30 bp, Artificial Sequence
  Synthetic oligonucleotide
ctttcccaattaataaggatgcgtgacacc

SEQ ID NO: 424426 - DNA, 30 bp, Artificial Sequence
  Synthetic oligonucleotide
tttagggtccgtcgtcgtgccgaatacacc

SEQ ID NO: 424427 - DNA, 30 bp, Artificial Sequence
  Synthetic oligonucleotide
cattatatatactgctgaacatcatacacc

SEQ ID NO: 424428 - DNA, 30 bp, Artificial Sequence
  Synthetic oligonucleotide
gagtgtaagccaaactatagaagatacacc

SEQ ID NO: 424429 - DNA, 30 bp, Artificial Sequence
  Synthetic oligonucleotide
atggtatttcgagcgacttgtaggtacacc

SEQ ID NO: 424430 - DNA, 30 bp, Artificial Sequence
  Synthetic oligonucleotide
cactaatttccgaattgcgccgattacacc

SEQ ID NO: 424431 - DNA, 30 bp, Artificial Sequence
  Synthetic oligonucleotide
tactaaacttctcgacaaccttattacacc

SEQ ID NO: 424432 - DNA, 30 bp, Artificial Sequence
  Synthetic oligonucleotide
gtctagcccctaatgcgtcagatttacacc

SEQ ID NO: 424433 - DNA, 30 bp, Artificial Sequence
  Synthetic oligonucleotide
tgcgcccggaccgcgtggaagctttacacc

SEQ ID NO: 424434 - DNA, 30 bp, Artificial Sequence
  Synthetic oligonucleotide
aaaacgaatggctttgagagttacaccacc

SEQ ID NO: 424435 - DNA, 30 bp, Artificial Sequence
  Synthetic oligonucleotide
cgattaacgtatgcatcgctacgcaccacc

SEQ ID NO: 424436 - DNA, 30 bp, Artificial Sequence
  Synthetic oligonucleotide
gactctccaccacgccgaaaccgcaccacc

SEQ ID NO: 424437 - DNA, 30 bp, Artificial Sequence
  Synthetic oligonucleotide
ccggaatcctttttatcaattcgcaccacc

SEQ ID NO: 424438 - DNA, 30 bp, Artificial Sequence
  Synthetic oligonucleotide
ttgcatcggtaggtggtacatgataccacc

SEQ ID NO: 424439 - DNA, 30 bp, Artificial Sequence
  Synthetic oligonucleotide
ctgcagcggttactgggtaatattaccacc

SEQ ID NO: 424440 - DNA, 30 bp, Artificial Sequence
  Synthetic oligonucleotide
gggtgaagggatctgccgaccctacccacc

SEQ ID NO: 424441 - DNA, 30 bp, Artificial Sequence
  Synthetic oligonucleotide
aatagctctggacatctttgtttacccacc

SEQ ID NO: 424442 - DNA, 30 bp, Artificial Sequence
  Synthetic oligonucleotide
tgaatcagcgacacagcaacgttccccacc

SEQ ID NO: 424443 - DNA, 30 bp, Artificial Sequence
  Synthetic oligonucleotide
acagcgtgtattttacttcgatgggccacc

SEQ ID NO: 424444 - DNA, 30 bp, Artificial Sequence
  Synthetic oligonucleotide
ggtagtccaggatggttactccgtgccacc

SEQ ID NO: 424445 - DNA, 30 bp, Artificial Sequence
  Synthetic oligonucleotide
agtgatagtttacatgggtaagtatccacc

SEQ ID NO: 424446 - DNA, 30 bp, Artificial Sequence
  Synthetic oligonucleotide
aatcgtgattattacgggattacctccacc

SEQ ID NO: 424447 - DNA, 30 bp, Artificial Sequence
  Synthetic oligonucleotide
ttggcggctggctatttataccaaagcacc

SEQ ID NO: 424448 - DNA, 30 bp, Artificial Sequence
  Synthetic oligonucleotide
gtaactcaggagtgtttacagataagcacc

SEQ ID NO: 424449 - DNA, 30 bp, Artificial Sequence
  Synthetic oligonucleotide
ttagaatttaaaatgtaggcgctaagcacc

SEQ ID NO: 424450 - DNA, 30 bp, Artificial Sequence
  Synthetic oligonucleotide
tgggtactggtagaatccaccgacagcacc

SEQ ID NO: 424451 - DNA, 30 bp, Artificial Sequence
  Synthetic oligonucleotide
attcgagtacgtaggtcttaatgcagcacc

SEQ ID NO: 424452 - DNA, 30 bp, Artificial Sequence
  Synthetic oligonucleotide
ccgcgccaaaaaggatgctcttgcagcacc

SEQ ID NO: 424453 - DNA, 30 bp, Artificial Sequence
  Synthetic oligonucleotide
cctggtatccataatatgactatcagcacc

SEQ ID NO: 424454 - DNA, 30 bp, Artificial Sequence
  Synthetic oligonucleotide
aacaaaatatcgcccccgtgggatagcacc

SEQ ID NO: 424455 - DNA, 30 bp, Artificial Sequence
  Synthetic oligonucleotide
caattatttctatacggggggacacgcacc

SEQ ID NO: 424456 - DNA, 30 bp, Artificial Sequence
  Synthetic oligonucleotide
tcgtatgtgtcatcccttccctgacgcacc

SEQ ID NO: 424457 - DNA, 30 bp, Artificial Sequence
  Synthetic oligonucleotide
gagctgcccacacacgttagtttccgcacc

SEQ ID NO: 424458 - DNA, 30 bp, Artificial Sequence
  Synthetic oligonucleotide
ttgatcacagaccagcggctacccggcacc

SEQ ID NO: 424459 - DNA, 30 bp, Artificial Sequence
  Synthetic oligonucleotide
tcctacctctcatgtggctcgcccggcacc

SEQ ID NO: 424460 - DNA, 30 bp, Artificial Sequence
  Synthetic oligonucleotide
ttgtcccgcgcagaaggagtgtgcggcacc

SEQ ID NO: 424461 - DNA, 30 bp, Artificial Sequence
  Synthetic oligonucleotide
gttgatcagaaatataacgcaatcggcacc

SEQ ID NO: 424462 - DNA, 30 bp, Artificial Sequence
  Synthetic oligonucleotide
ggtgatggtcatggcatggaacggggcacc

SEQ ID NO: 424463 - DNA, 30 bp, Artificial Sequence
  Synthetic oligonucleotide
tttggcgggcaaatctgagttagctgcacc

SEQ ID NO: 424464 - DNA, 30 bp, Artificial Sequence
  Synthetic oligonucleotide
agacattggtcaccggggtacctctgcacc

SEQ ID NO: 424465 - DNA, 30 bp, Artificial Sequence
  Synthetic oligonucleotide
aatcattggccaatgccgctactttgcacc

SEQ ID NO: 424466 - DNA, 30 bp, Artificial Sequence
  Synthetic oligonucleotide
gtaagtagtaacctggacgcggacatcacc

SEQ ID NO: 424467 - DNA, 30 bp, Artificial Sequence
  Synthetic oligonucleotide
tataatgggggttgcgaacgcggcatcacc

SEQ ID NO: 424468 - DNA, 30 bp, Artificial Sequence
  Synthetic oligonucleotide
agcattacggggtagtgtatctatatcacc

SEQ ID NO: 424469 - DNA, 30 bp, Artificial Sequence
  Synthetic oligonucleotide
tatagaggatgctcccaccactgtatcacc

SEQ ID NO: 424470 - DNA, 30 bp, Artificial Sequence
  Synthetic oligonucleotide
aagcgtcctgtgactgcttggattatcacc

SEQ ID NO: 424471 - DNA, 30 bp, Artificial Sequence
  Synthetic oligonucleotide
tcaatatatgggatctgtgattttatcacc

SEQ ID NO: 424472 - DNA, 30 bp, Artificial Sequence
  Synthetic oligonucleotide
ttatttgcgtggatcgggcgacagctcacc

SEQ ID NO: 424473 - DNA, 30 bp, Artificial Sequence
  Synthetic oligonucleotide
gggtgaatgcgtcgatgcggccagctcacc

SEQ ID NO: 424474 - DNA, 30 bp, Artificial Sequence
  Synthetic oligonucleotide
aagtgtattgcgagcttttgtccgctcacc

SEQ ID NO: 424475 - DNA, 30 bp, Artificial Sequence
  Synthetic oligonucleotide
gacataggcagcgcgttctacgcagtcacc

SEQ ID NO: 424476 - DNA, 30 bp, Artificial Sequence
  Synthetic oligonucleotide
aagacggtaagattagttatccccgtcacc

SEQ ID NO: 424477 - DNA, 30 bp, Artificial Sequence
  Synthetic oligonucleotide
tcattaacattgaagtgcggaatcgtcacc

SEQ ID NO: 424478 - DNA, 30 bp, Artificial Sequence
  Synthetic oligonucleotide
tacgataaacgtcgtgcacgaaatgtcacc

SEQ ID NO: 424479 - DNA, 30 bp, Artificial Sequence
  Synthetic oligonucleotide
gtgaggcggccctggttataactattcacc

SEQ ID NO: 424480 - DNA, 30 bp, Artificial Sequence
  Synthetic oligonucleotide
tgtcttgtgcacttacccggtcgcttcacc

SEQ ID NO: 424481 - DNA, 30 bp, Artificial Sequence
  Synthetic oligonucleotide
cagtagagcacccacaatagggggttcacc

SEQ ID NO: 424482 - DNA, 30 bp, Artificial Sequence
  Synthetic oligonucleotide
tgacgaccgctgactgcttactggttcacc

SEQ ID NO: 424483 - DNA, 30 bp, Artificial Sequence
  Synthetic oligonucleotide
aggccctatgagtctatagctctgttcacc

SEQ ID NO: 424484 - DNA, 30 bp, Artificial Sequence
  Synthetic oligonucleotide
ctctgtggcgggtattgtgttgtgttcacc

SEQ ID NO: 424485 - DNA, 30 bp, Artificial Sequence
  Synthetic oligonucleotide
caaatccccgcgaataagacaattttcacc

SEQ ID NO: 424486 - DNA, 30 bp, Artificial Sequence
  Synthetic oligonucleotide
gtcatctggtggtgaaataccaaaaagacc

SEQ ID NO: 424487 - DNA, 30 bp, Artificial Sequence
  Synthetic oligonucleotide
tttagcgacacgagtctagtctgaaagacc

SEQ ID NO: 424488 - DNA, 30 bp, Artificial Sequence
  Synthetic oligonucleotide
cagagtgttagctccccaacacacaagacc

SEQ ID NO: 424489 - DNA, 30 bp, Artificial Sequence
  Synthetic oligonucleotide
ttatttagcatgagtatgagctacaagacc

SEQ ID NO: 424490 - DNA, 30 bp, Artificial Sequence
  Synthetic oligonucleotide
ggcccatgccgtatcacagggcccaagacc

SEQ ID NO: 424491 - DNA, 30 bp, Artificial Sequence
  Synthetic oligonucleotide
ggagtgtcggaaccacgtttctgcaagacc

SEQ ID NO: 424492 - DNA, 30 bp, Artificial Sequence
  Synthetic oligonucleotide
ggcagctggacgtacaagacatcgaagacc

SEQ ID NO: 424493 - DNA, 30 bp, Artificial Sequence
  Synthetic oligonucleotide
aaaacggccatgctgatctttagtaagacc

SEQ ID NO: 424494 - DNA, 30 bp, Artificial Sequence
  Synthetic oligonucleotide
agcagaaggtctctgctaatgcgtaagacc

SEQ ID NO: 424495 - DNA, 30 bp, Artificial Sequence
  Synthetic oligonucleotide
gatgattgcctgaaacccggacttaagacc

SEQ ID NO: 424496 - DNA, 30 bp, Artificial Sequence
  Synthetic oligonucleotide
tagcgggaagtaacaatgtcccttaagacc

SEQ ID NO: 424497 - DNA, 30 bp, Artificial Sequence
  Synthetic oligonucleotide
aacagaacgagcataatctgtgttaagacc

SEQ ID NO: 424498 - DNA, 30 bp, Artificial Sequence
  Synthetic oligonucleotide
tttagttcactagcgggcggaacacagacc

SEQ ID NO: 424499 - DNA, 30 bp, Artificial Sequence
  Synthetic oligonucleotide
tgttctatatacccgtctagcagacagacc

SEQ ID NO: 424500 - DNA, 30 bp, Artificial Sequence
  Synthetic oligonucleotide
aataacatacaacctttatcatgccagacc

SEQ ID NO: 424501 - DNA, 30 bp, Artificial Sequence
  Synthetic oligonucleotide
agaggtatgaaacggtacgtaacgcagacc

SEQ ID NO: 424502 - DNA, 30 bp, Artificial Sequence
  Synthetic oligonucleotide
tacccagtactacaagcgactccgcagacc

SEQ ID NO: 424503 - DNA, 30 bp, Artificial Sequence
  Synthetic oligonucleotide
gaaaaccggcagccgtcgctgatgcagacc

SEQ ID NO: 424504 - DNA, 30 bp, Artificial Sequence
  Synthetic oligonucleotide
gactatcaaagtttctacggcgatcagacc

SEQ ID NO: 424505 - DNA, 31 bp, Artificial Sequence
  Synthetic oligonucleotide
aagtatatatgaagactcatatgatcagacc

SEQ ID NO: 424506 - DNA, 30 bp, Artificial Sequence
  Synthetic oligonucleotide
acaatcattggtgttccttggcctcagacc

SEQ ID NO: 424507 - DNA, 30 bp, Artificial Sequence
  Synthetic oligonucleotide
cccaaaggtttgtccatgggctaagagacc

SEQ ID NO: 424508 - DNA, 30 bp, Artificial Sequence
  Synthetic oligonucleotide
taccacaatagacttcgaggtcagtagacc

SEQ ID NO: 424509 - DNA, 30 bp, Artificial Sequence
  Synthetic oligonucleotide
gaacggagtcgagtcttgggccattagacc

SEQ ID NO: 424510 - DNA, 30 bp, Artificial Sequence
  Synthetic oligonucleotide
ccgtgatgttatttgggaatcccttagacc

SEQ ID NO: 424511 - DNA, 30 bp, Artificial Sequence
  Synthetic oligonucleotide
gttaatacgaggtttttactatgttagacc

SEQ ID NO: 424512 - DNA, 30 bp, Artificial Sequence
  Synthetic oligonucleotide
atcaaatgtataagtgcacacctttagacc

SEQ ID NO: 424513 - DNA, 30 bp, Artificial Sequence
  Synthetic oligonucleotide
acgcgagtaaacgagtccggccatacgacc

SEQ ID NO: 424514 - DNA, 30 bp, Artificial Sequence
  Synthetic oligonucleotide
gtgccccatgtgttttctaaatatacgacc

SEQ ID NO: 424515 - DNA, 30 bp, Artificial Sequence
  Synthetic oligonucleotide
tagaatgtttgcaatattttaataccgacc

SEQ ID NO: 424516 - DNA, 30 bp, Artificial Sequence
  Synthetic oligonucleotide
tcagggtacgacgcgacgggagtcccgacc

SEQ ID NO: 424517 - DNA, 30 bp, Artificial Sequence
  Synthetic oligonucleotide
gtagatgtacattcggcgggttagccgacc

SEQ ID NO: 424518 - DNA, 30 bp, Artificial Sequence
  Synthetic oligonucleotide
ttcaatgaggatagtgggactaggccgacc

SEQ ID NO: 424519 - DNA, 30 bp, Artificial Sequence
  Synthetic oligonucleotide
aaattctacctgcacgtgagttatgcgacc

SEQ ID NO: 424520 - DNA, 30 bp, Artificial Sequence
  Synthetic oligonucleotide
aagaaccaacagtcacaatcagttgcgacc

SEQ ID NO: 424521 - DNA, 30 bp, Artificial Sequence
  Synthetic oligonucleotide
tcagcgtcgagtgtgtcgttgtgatcgacc

SEQ ID NO: 424522 - DNA, 30 bp, Artificial Sequence
  Synthetic oligonucleotide
gagggtttggattcaaacacgctctcgacc

SEQ ID NO: 424523 - DNA, 30 bp, Artificial Sequence
  Synthetic oligonucleotide
cagaggcaagtttgccaagcagtctcgacc

SEQ ID NO: 424524 - DNA, 30 bp, Artificial Sequence
  Synthetic oligonucleotide
gtaggcgtgcaatagacgcatcagtcgacc

SEQ ID NO: 424525 - DNA, 30 bp, Artificial Sequence
  Synthetic oligonucleotide
aacaatgggtccgcgcgacggtattcgacc

SEQ ID NO: 424526 - DNA, 30 bp, Artificial Sequence
  Synthetic oligonucleotide
gttgccacagtgttgaatttggaaaggacc

SEQ ID NO: 424527 - DNA, 30 bp, Artificial Sequence
  Synthetic oligonucleotide
cacatttgggccttagtgtatggcaggacc

SEQ ID NO: 424528 - DNA, 30 bp, Artificial Sequence
  Synthetic oligonucleotide
gcaacactgatccgttccgaaaataggacc

SEQ ID NO: 424529 - DNA, 30 bp, Artificial Sequence
  Synthetic oligonucleotide
gggcggggttagcggagagatacacggacc

SEQ ID NO: 424530 - DNA, 30 bp, Artificial Sequence
  Synthetic oligonucleotide
tcagggttctgtatacacgaatggcggacc

SEQ ID NO: 424531 - DNA, 30 bp, Artificial Sequence
  Synthetic oligonucleotide
agaggatggaagtcaggccttggtcggacc

SEQ ID NO: 424532 - DNA, 30 bp, Artificial Sequence
  Synthetic oligonucleotide
ggcagagatgtcacttcctcttgtcggacc

SEQ ID NO: 424533 - DNA, 30 bp, Artificial Sequence
  Synthetic oligonucleotide
aaccgaactacgcacaagttggaagggacc

SEQ ID NO: 424534 - DNA, 30 bp, Artificial Sequence
  Synthetic oligonucleotide
aattgaactatttgaggggcataagggacc

SEQ ID NO: 424535 - DNA, 30 bp, Artificial Sequence
  Synthetic oligonucleotide
cgttttttcataacggctgcgctagggacc

SEQ ID NO: 424536 - DNA, 30 bp, Artificial Sequence
  Synthetic oligonucleotide
gcggtcccagtctaaaacatgttagggacc

SEQ ID NO: 424537 - DNA, 30 bp, Artificial Sequence
  Synthetic oligonucleotide
gggttcttggggttgatgattcgcgggacc

SEQ ID NO: 424538 - DNA, 30 bp, Artificial Sequence
  Synthetic oligonucleotide
tcctaaactacttgcatttgcccggggacc

SEQ ID NO: 424539 - DNA, 30 bp, Artificial Sequence
  Synthetic oligonucleotide
agaagcggttgcaggcgaggagcggggacc

SEQ ID NO: 424540 - DNA, 30 bp, Artificial Sequence
  Synthetic oligonucleotide
cggctagctctccgctgtcgtgaatggacc

SEQ ID NO: 424541 - DNA, 30 bp, Artificial Sequence
  Synthetic oligonucleotide
aattaatctccagtaaacgcggactggacc

SEQ ID NO: 424542 - DNA, 30 bp, Artificial Sequence
  Synthetic oligonucleotide
gcctcgcaaccgcgggaatctcgctggacc

SEQ ID NO: 424543 - DNA, 30 bp, Artificial Sequence
  Synthetic oligonucleotide
aagtacgccatctgctctgatttgtggacc

SEQ ID NO: 424544 - DNA, 30 bp, Artificial Sequence
  Synthetic oligonucleotide
attcaggcgccttagctgatcgcttggacc

SEQ ID NO: 424545 - DNA, 30 bp, Artificial Sequence
  Synthetic oligonucleotide
tgttacccgtcgttatcaactatttggacc

SEQ ID NO: 424546 - DNA, 30 bp, Artificial Sequence
  Synthetic oligonucleotide
tacgaccagccaaatcgttcacaaatgacc

SEQ ID NO: 424547 - DNA, 30 bp, Artificial Sequence
  Synthetic oligonucleotide
ttggctagagtctcttccttcagaatgacc

SEQ ID NO: 424548 - DNA, 30 bp, Artificial Sequence
  Synthetic oligonucleotide
ctcaacctgcgcgacagtcgatacatgacc

SEQ ID NO: 424549 - DNA, 30 bp, Artificial Sequence
  Synthetic oligonucleotide
tataaggtttggaatcgctcctacatgacc

SEQ ID NO: 424550 - DNA, 30 bp, Artificial Sequence
  Synthetic oligonucleotide
ctattctcgtggtgcacatacccgatgacc

SEQ ID NO: 424551 - DNA, 30 bp, Artificial Sequence
  Synthetic oligonucleotide
atgatctccggtggcgggaccaacctgacc

SEQ ID NO: 424552 - DNA, 30 bp, Artificial Sequence
  Synthetic oligonucleotide
tatagcggcagccacggctacaccctgacc

SEQ ID NO: 424553 - DNA, 30 bp, Artificial Sequence
  Synthetic oligonucleotide
gcgcttcccgttggctatcagccgctgacc

SEQ ID NO: 424554 - DNA, 30 bp, Artificial Sequence
  Synthetic oligonucleotide
cgttctttaggaatggtaacttctctgacc

SEQ ID NO: 424555 - DNA, 30 bp, Artificial Sequence
  Synthetic oligonucleotide
cgttgcattatgatcgtggcgtgtctgacc

SEQ ID NO: 424556 - DNA, 30 bp, Artificial Sequence
  Synthetic oligonucleotide
ccgttgggctgaaattgtctgtttctgacc

SEQ ID NO: 424557 - DNA, 30 bp, Artificial Sequence
  Synthetic oligonucleotide
ggaaaatggttctgtcgagcatcagtgacc

SEQ ID NO: 424558 - DNA, 30 bp, Artificial Sequence
  Synthetic oligonucleotide
aaattgccgtgtttcaatgtgttcgtgacc

SEQ ID NO: 424559 - DNA, 30 bp, Artificial Sequence
  Synthetic oligonucleotide
agatgctgtcgtttggaagctggggtgacc

SEQ ID NO: 424560 - DNA, 30 bp, Artificial Sequence
  Synthetic oligonucleotide
gtggtatttatgtgtatgatgaaattgacc

SEQ ID NO: 424561 - DNA, 30 bp, Artificial Sequence
  Synthetic oligonucleotide
tatttcgtttacaagagagggcaattgacc

SEQ ID NO: 424562 - DNA, 30 bp, Artificial Sequence
  Synthetic oligonucleotide
gggccaatgcaacttgtctgatcattgacc

SEQ ID NO: 424563 - DNA, 30 bp, Artificial Sequence
  Synthetic oligonucleotide
gcagtcacacttagtaagactgtattgacc

SEQ ID NO: 424564 - DNA, 30 bp, Artificial Sequence
  Synthetic oligonucleotide
tccaagtatcgggtattagtacacttgacc

SEQ ID NO: 424565 - DNA, 30 bp, Artificial Sequence
  Synthetic oligonucleotide
tgtctctctgacgaccacgagcagttgacc

SEQ ID NO: 424566 - DNA, 30 bp, Artificial Sequence
  Synthetic oligonucleotide
cgcgttgtcaggcaacaacctaggttgacc

SEQ ID NO: 424567 - DNA, 30 bp, Artificial Sequence
  Synthetic oligonucleotide
aatccataatgaagtggtagggggttgacc

SEQ ID NO: 424568 - DNA, 30 bp, Artificial Sequence
  Synthetic oligonucleotide
gtttaaagttaggggcaaagattgttgacc

SEQ ID NO: 424569 - DNA, 30 bp, Artificial Sequence
  Synthetic oligonucleotide
cgaacgcagaaggctccgtgcgaaaatacc

SEQ ID NO: 424570 - DNA, 30 bp, Artificial Sequence
  Synthetic oligonucleotide
ccccggcgctagcccatatattggaatacc

SEQ ID NO: 424571 - DNA, 30 bp, Artificial Sequence
  Synthetic oligonucleotide
agtatctattattccacatagggagatacc

SEQ ID NO: 424572 - DNA, 30 bp, Artificial Sequence
  Synthetic oligonucleotide
acaggttccagccgccaattcctagatacc

SEQ ID NO: 424573 - DNA, 30 bp, Artificial Sequence
  Synthetic oligonucleotide
atcactcatggtgagcttaaacaggatacc

SEQ ID NO: 424574 - DNA, 30 bp, Artificial Sequence
  Synthetic oligonucleotide
atcgaatgctttttgcgcgttgttgatacc

SEQ ID NO: 424575 - DNA, 30 bp, Artificial Sequence
  Synthetic oligonucleotide
ctcctacgttcattcttaggtgcatatacc

SEQ ID NO: 424576 - DNA, 30 bp, Artificial Sequence
  Synthetic oligonucleotide
ggcggcgggatagagaccacgggatatacc

SEQ ID NO: 424577 - DNA, 30 bp, Artificial Sequence
  Synthetic oligonucleotide
tggatctcagtacgcgtatgcatatatacc

SEQ ID NO: 424578 - DNA, 30 bp, Artificial Sequence
  Synthetic oligonucleotide
aatacgcttttggagccgtattactatacc

SEQ ID NO: 424579 - DNA, 30 bp, Artificial Sequence
  Synthetic oligonucleotide
gctttctcaatcaagcaccacgtctatacc

SEQ ID NO: 424580 - DNA, 30 bp, Artificial Sequence
  Synthetic oligonucleotide
taatgcttaattggccaatcgaagtatacc

SEQ ID NO: 424581 - DNA, 30 bp, Artificial Sequence
  Synthetic oligonucleotide
tttccaattacaagaccgggcgagtatacc

SEQ ID NO: 424582 - DNA, 30 bp, Artificial Sequence
  Synthetic oligonucleotide
cattgctcgcttttccgcatcccgtatacc

SEQ ID NO: 424583 - DNA, 30 bp, Artificial Sequence
  Synthetic oligonucleotide
aagcgccgccacgagctttaagggtatacc

SEQ ID NO: 424584 - DNA, 30 bp, Artificial Sequence
  Synthetic oligonucleotide
acgttcggtaattagtccctggattatacc

SEQ ID NO: 424585 - DNA, 30 bp, Artificial Sequence
  Synthetic oligonucleotide
tgaagcagggtcctatcaattgattatacc

SEQ ID NO: 424586 - DNA, 30 bp, Artificial Sequence
  Synthetic oligonucleotide
agccgtagtgatccgggagcgggttatacc

SEQ ID NO: 424587 - DNA, 30 bp, Artificial Sequence
  Synthetic oligonucleotide
ggcatgcggcataggcgttaccaaactacc

SEQ ID NO: 424588 - DNA, 30 bp, Artificial Sequence
  Synthetic oligonucleotide
acgattatgtgtccacgggggatcactacc

SEQ ID NO: 424589 - DNA, 30 bp, Artificial Sequence
  Synthetic oligonucleotide
tccatgtcccgtacatttcgctgacctacc

SEQ ID NO: 424590 - DNA, 30 bp, Artificial Sequence
  Synthetic oligonucleotide
gcagttgttgagcatcatgacgaccctacc

SEQ ID NO: 424591 - DNA, 30 bp, Artificial Sequence
  Synthetic oligonucleotide
ccggtcacttgcctcggtgggtgccctacc

SEQ ID NO: 424592 - DNA, 30 bp, Artificial Sequence
  Synthetic oligonucleotide
tggagtttgacgcgactggtggagcctacc

SEQ ID NO: 424593 - DNA, 30 bp, Artificial Sequence
  Synthetic oligonucleotide
gttgacggagaaggcgtgatcccgcctacc

SEQ ID NO: 424594 - DNA, 30 bp, Artificial Sequence
  Synthetic oligonucleotide
gcgcgatttaggggttccagaaatcctacc

SEQ ID NO: 424595 - DNA, 30 bp, Artificial Sequence
  Synthetic oligonucleotide
taataatgtgtatttgatgtgggtcctacc

SEQ ID NO: 424596 - DNA, 30 bp, Artificial Sequence
  Synthetic oligonucleotide
atttcaaaatgtgaagctgtcaccgctacc

SEQ ID NO: 424597 - DNA, 30 bp, Artificial Sequence
  Synthetic oligonucleotide
agtaccgcatgcaggtacggacaggctacc

SEQ ID NO: 424598 - DNA, 30 bp, Artificial Sequence
  Synthetic oligonucleotide
tcatttcggaggcggcgcgatgaggctacc

SEQ ID NO: 424599 - DNA, 30 bp, Artificial Sequence
  Synthetic oligonucleotide
gtagttttagttacgcttatgacggctacc

SEQ ID NO: 424600 - DNA, 30 bp, Artificial Sequence
  Synthetic oligonucleotide
gatttacgggcaactaggaaatgggctacc

SEQ ID NO: 424601 - DNA, 30 bp, Artificial Sequence
  Synthetic oligonucleotide
agtgtggctattgggttgtagcttgctacc

SEQ ID NO: 424602 - DNA, 30 bp, Artificial Sequence
  Synthetic oligonucleotide
tcacaatatctttaccgacggcttgctacc

SEQ ID NO: 424603 - DNA, 30 bp, Artificial Sequence
  Synthetic oligonucleotide
ggtaccaacgcactgaaagttgttgctacc

SEQ ID NO: 424604 - DNA, 30 bp, Artificial Sequence
  Synthetic oligonucleotide
tatcgaactaagtcgattgtaaaatctacc

SEQ ID NO: 424605 - DNA, 30 bp, Artificial Sequence
  Synthetic oligonucleotide
taaatgtcgtcgtaaagtttatactctacc

SEQ ID NO: 424606 - DNA, 30 bp, Artificial Sequence
  Synthetic oligonucleotide
cctctaaagcccagctgacgcatttctacc

SEQ ID NO: 424607 - DNA, 30 bp, Artificial Sequence
  Synthetic oligonucleotide
tgcatgggttacttggattctatttctacc

SEQ ID NO: 424608 - DNA, 30 bp, Artificial Sequence
  Synthetic oligonucleotide
gcggggacctgccttccttttcaaagtacc

SEQ ID NO: 424609 - DNA, 30 bp, Artificial Sequence
  Synthetic oligonucleotide
ctacgtacgcgaatctttttcccaagtacc

SEQ ID NO: 424610 - DNA, 30 bp, Artificial Sequence
  Synthetic oligonucleotide
gacgattgggacgtcgtattgtgaagtacc

SEQ ID NO: 424611 - DNA, 30 bp, Artificial Sequence
  Synthetic oligonucleotide
aacaggcagcagcccagttttcacagtacc

SEQ ID NO: 424612 - DNA, 30 bp, Artificial Sequence
  Synthetic oligonucleotide
atgttgcgtaggggttaaaaagggagtacc

SEQ ID NO: 424613 - DNA, 30 bp, Artificial Sequence
  Synthetic oligonucleotide
ttctcatcatcacaaaagttgtatagtacc

SEQ ID NO: 424614 - DNA, 30 bp, Artificial Sequence
  Synthetic oligonucleotide
gcctgcatcttgtacagatgcggtagtacc

SEQ ID NO: 424615 - DNA, 30 bp, Artificial Sequence
  Synthetic oligonucleotide
taacgcatactatcctcaggtggtagtacc

SEQ ID NO: 424616 - DNA, 30 bp, Artificial Sequence
  Synthetic oligonucleotide
cacgccatttcatttactacagaacgtacc

SEQ ID NO: 424617 - DNA, 30 bp, Artificial Sequence
  Synthetic oligonucleotide
tttgagctatgctagtttaggatccgtacc

SEQ ID NO: 424618 - DNA, 30 bp, Artificial Sequence
  Synthetic oligonucleotide
gctgtcgtgctctacttatcttcgcgtacc

SEQ ID NO: 424619 - DNA, 30 bp, Artificial Sequence
  Synthetic oligonucleotide
gatgtacgactcgtccgaaccaatcgtacc

SEQ ID NO: 424620 - DNA, 30 bp, Artificial Sequence
  Synthetic oligonucleotide
atacgtacacagttgggcgttaatcgtacc

SEQ ID NO: 424621 - DNA, 30 bp, Artificial Sequence
  Synthetic oligonucleotide
ccgcttgagaaagcactagctcttcgtacc

SEQ ID NO: 424622 - DNA, 30 bp, Artificial Sequence
  Synthetic oligonucleotide
tagcatcgcataagacacagcgaaggtacc

SEQ ID NO: 424623 - DNA, 30 bp, Artificial Sequence
  Synthetic oligonucleotide
gagttcgataaccaacttcgttgaggtacc

SEQ ID NO: 424624 - DNA, 30 bp, Artificial Sequence
  Synthetic oligonucleotide
aaaaggaacgagctaaggttagagggtacc

SEQ ID NO: 424625 - DNA, 30 bp, Artificial Sequence
  Synthetic oligonucleotide
ttagactttcagccgggtaccgagggtacc

SEQ ID NO: 424626 - DNA, 30 bp, Artificial Sequence
  Synthetic oligonucleotide
cacccctaccctgtaagatactgtggtacc

SEQ ID NO: 424627 - DNA, 30 bp, Artificial Sequence
  Synthetic oligonucleotide
atagcggcgaaggctggggttagatgtacc

SEQ ID NO: 424628 - DNA, 30 bp, Artificial Sequence
  Synthetic oligonucleotide
agtaggtgtaggggcccttccggatgtacc

SEQ ID NO: 424629 - DNA, 30 bp, Artificial Sequence
  Synthetic oligonucleotide
gacacttcaattagcacagttggctgtacc

SEQ ID NO: 424630 - DNA, 30 bp, Artificial Sequence
  Synthetic oligonucleotide
agcaaaaggggggatgttattccgtgtacc

SEQ ID NO: 424631 - DNA, 30 bp, Artificial Sequence
  Synthetic oligonucleotide
attgaatcagatgcagttaatgtgtgtacc

SEQ ID NO: 424632 - DNA, 29 bp, Artificial Sequence
  Synthetic oligonucleotide
ggtccctggaatgtgggacaatttgtacc

SEQ ID NO: 424633 - DNA, 30 bp, Artificial Sequence
  Synthetic oligonucleotide
gttcacagcatggcgtttactgaaattacc

SEQ ID NO: 424634 - DNA, 30 bp, Artificial Sequence
  Synthetic oligonucleotide
tagtcttcaacggtgtcccccaccattacc

SEQ ID NO: 424635 - DNA, 30 bp, Artificial Sequence
  Synthetic oligonucleotide
ttaattcagcgtattaatttgcccattacc

SEQ ID NO: 424636 - DNA, 30 bp, Artificial Sequence
  Synthetic oligonucleotide
ctgtgccatatttcccattacacgattacc

SEQ ID NO: 424637 - DNA, 30 bp, Artificial Sequence
  Synthetic oligonucleotide
gaggaccatgtggctttcgcaaatattacc

SEQ ID NO: 424638 - DNA, 26 bp, Artificial Sequence
  Synthetic oligonucleotide
gagtggattactgagcacatattacc

SEQ ID NO: 424639 - DNA, 30 bp, Artificial Sequence
  Synthetic oligonucleotide
gtcgcttaagcacgaaacctctatattacc

SEQ ID NO: 424640 - DNA, 30 bp, Artificial Sequence
  Synthetic oligonucleotide
tagaatctcacctatcaggttaaacttacc

SEQ ID NO: 424641 - DNA, 30 bp, Artificial Sequence
  Synthetic oligonucleotide
cgtaccttttgatatgggtcagtacttacc

SEQ ID NO: 424642 - DNA, 30 bp, Artificial Sequence
  Synthetic oligonucleotide
gagtagtggagaactctgggtgcccttacc

SEQ ID NO: 424643 - DNA, 30 bp, Artificial Sequence
  Synthetic oligonucleotide
cggagaggtattgctgagacaggccttacc

SEQ ID NO: 424644 - DNA, 30 bp, Artificial Sequence
  Synthetic oligonucleotide
gattttaaacacaacgtccgctcgcttacc

SEQ ID NO: 424645 - DNA, 30 bp, Artificial Sequence
  Synthetic oligonucleotide
gcgaaattactttaataagcccggcttacc

SEQ ID NO: 424646 - DNA, 30 bp, Artificial Sequence
  Synthetic oligonucleotide
agaatagagtatcgagcggcatttcttacc

SEQ ID NO: 424647 - DNA, 30 bp, Artificial Sequence
  Synthetic oligonucleotide
aaggcgagttattagtaactcccagttacc

SEQ ID NO: 424648 - DNA, 30 bp, Artificial Sequence
  Synthetic oligonucleotide
cacgtagcttgcgatacagaggcagttacc

SEQ ID NO: 424649 - DNA, 31 bp, Artificial Sequence
  Synthetic oligonucleotide
tataagcaggaccattccggtcctcgttacc

SEQ ID NO: 424650 - DNA, 30 bp, Artificial Sequence
  Synthetic oligonucleotide
aggtggcagactccgttcactcaggttacc

SEQ ID NO: 424651 - DNA, 30 bp, Artificial Sequence
  Synthetic oligonucleotide
gcgttttagtaagtatttgcgtaggttacc

SEQ ID NO: 424652 - DNA, 30 bp, Artificial Sequence
  Synthetic oligonucleotide
agttagttatgatctgaggatggggttacc

SEQ ID NO: 424653 - DNA, 30 bp, Artificial Sequence
  Synthetic oligonucleotide
atggaccgtgcaaatcagtatctggttacc

SEQ ID NO: 424654 - DNA, 30 bp, Artificial Sequence
  Synthetic oligonucleotide
ataacgagttgctggctctgtattgttacc

SEQ ID NO: 424655 - DNA, 30 bp, Artificial Sequence
  Synthetic oligonucleotide
ccaagcggccacacaaaaagattatttacc

SEQ ID NO: 424656 - DNA, 30 bp, Artificial Sequence
  Synthetic oligonucleotide
gtgaaaaaatttaccggtgattcctttacc

SEQ ID NO: 424657 - DNA, 30 bp, Artificial Sequence
  Synthetic oligonucleotide
atcgggaatcatatgtcaggcaggtttacc

SEQ ID NO: 424658 - DNA, 30 bp, Artificial Sequence
  Synthetic oligonucleotide
gatcattcactttacaccgtgagttttacc

SEQ ID NO: 424659 - DNA, 30 bp, Artificial Sequence
  Synthetic oligonucleotide
agtagttgcaggagggaaggagaaaaaccc

SEQ ID NO: 424660 - DNA, 30 bp, Artificial Sequence
  Synthetic oligonucleotide
gggttgacatggccctgtgccctaaaaccc

SEQ ID NO: 424661 - DNA, 30 bp, Artificial Sequence
  Synthetic oligonucleotide
ggcccggtgctgtgtcagataatcaaaccc

SEQ ID NO: 424662 - DNA, 30 bp, Artificial Sequence
  Synthetic oligonucleotide
ggtgtagtctacaggcgcttcaagaaaccc

SEQ ID NO: 424663 - DNA, 30 bp, Artificial Sequence
  Synthetic oligonucleotide
atcctgatagtgttgtctcggcagaaaccc

SEQ ID NO: 424664 - DNA, 30 bp, Artificial Sequence
  Synthetic oligonucleotide
taagttaagatgccggaacatctgaaaccc

SEQ ID NO: 424665 - DNA, 30 bp, Artificial Sequence
  Synthetic oligonucleotide
ctgtgagttcggagtcccggtactaaaccc

SEQ ID NO: 424666 - DNA, 30 bp, Artificial Sequence
  Synthetic oligonucleotide
agatatcgtagtaccccggatggtaaaccc

SEQ ID NO: 424667 - DNA, 30 bp, Artificial Sequence
  Synthetic oligonucleotide
aatatagggggagccctgcatattaaaccc

SEQ ID NO: 424668 - DNA, 30 bp, Artificial Sequence
  Synthetic oligonucleotide
ctaatgaaggagtttggagctcgacaaccc

SEQ ID NO: 424669 - DNA, 30 bp, Artificial Sequence
  Synthetic oligonucleotide
gctacacttttgtaggatagctaccaaccc

SEQ ID NO: 424670 - DNA, 30 bp, Artificial Sequence
  Synthetic oligonucleotide
gcgactttgtaagggttgttcgttcaaccc

SEQ ID NO: 424671 - DNA, 30 bp, Artificial Sequence
  Synthetic oligonucleotide
cgatcgcgtcgcttcaaccccggagaaccc

SEQ ID NO: 424672 - DNA, 30 bp, Artificial Sequence
  Synthetic oligonucleotide
aaaattaagtgctgaaaccgtaaggaaccc

SEQ ID NO: 424673 - DNA, 30 bp, Artificial Sequence
  Synthetic oligonucleotide
tgccctcggaaggggcatagccaggaaccc

SEQ ID NO: 424674 - DNA, 30 bp, Artificial Sequence
  Synthetic oligonucleotide
gcaaggtgactcgcgcacgagcgggaaccc

SEQ ID NO: 424675 - DNA, 30 bp, Artificial Sequence
  Synthetic oligonucleotide
atcagttgtcatggatcaaagaatgaaccc

SEQ ID NO: 424676 - DNA, 30 bp, Artificial Sequence
  Synthetic oligonucleotide
ctgtggttctttaattcaactcttgaaccc

SEQ ID NO: 424677 - DNA, 30 bp, Artificial Sequence
  Synthetic oligonucleotide
gtctataagactatgcattgaggctaaccc

SEQ ID NO: 424678 - DNA, 30 bp, Artificial Sequence
  Synthetic oligonucleotide
aaattgaagaagacgaagttggtctaaccc

SEQ ID NO: 424679 - DNA, 29 bp, Artificial Sequence
  Synthetic oligonucleotide
acgtacgctagtcgtctctttcgtaaccc

SEQ ID NO: 424680 - DNA, 30 bp, Artificial Sequence
  Synthetic oligonucleotide
gtgcattgtgcaagatattcctacacaccc

SEQ ID NO: 424681 - DNA, 30 bp, Artificial Sequence
  Synthetic oligonucleotide
gggtgtgtttggcccaggaatcagacaccc

SEQ ID NO: 424682 - DNA, 30 bp, Artificial Sequence
  Synthetic oligonucleotide
tgtaggccattttgaagatgcaggacaccc

SEQ ID NO: 424683 - DNA, 30 bp, Artificial Sequence
  Synthetic oligonucleotide
aagttctaagacgggggctgcactacaccc

SEQ ID NO: 424684 - DNA, 30 bp, Artificial Sequence
  Synthetic oligonucleotide
aactcagcaagggacaggcacattacaccc

SEQ ID NO: 424685 - DNA, 30 bp, Artificial Sequence
  Synthetic oligonucleotide
gcaggcggaagcaatcagttgcttacaccc

SEQ ID NO: 424686 - DNA, 30 bp, Artificial Sequence
  Synthetic oligonucleotide
acaactcggttacatcagtgccccccaccc

SEQ ID NO: 424687 - DNA, 30 bp, Artificial Sequence
  Synthetic oligonucleotide
gtgccaaacgttcgacacggggtgccaccc

SEQ ID NO: 424688 - DNA, 30 bp, Artificial Sequence
  Synthetic oligonucleotide
gctgtaaatttattttagcgcccagcaccc

SEQ ID NO: 424689 - DNA, 30 bp, Artificial Sequence
  Synthetic oligonucleotide
gcatgctgaagggatagcgcttgagcaccc

SEQ ID NO: 424690 - DNA, 30 bp, Artificial Sequence
  Synthetic oligonucleotide
aatcgccctgaagtattgcaggccgcaccc

SEQ ID NO: 424691 - DNA, 30 bp, Artificial Sequence
  Synthetic oligonucleotide
gcagttgtctctgtaacatattgcgcaccc

SEQ ID NO: 424692 - DNA, 30 bp, Artificial Sequence
  Synthetic oligonucleotide
gggattggtcaggatagcaggagggcaccc

SEQ ID NO: 424693 - DNA, 30 bp, Artificial Sequence
  Synthetic oligonucleotide
gcaacccatataatttcttccgtggcaccc

SEQ ID NO: 424694 - DNA, 30 bp, Artificial Sequence
  Synthetic oligonucleotide
gcgcgggtgctccgggtaggcgtggcaccc

SEQ ID NO: 424695 - DNA, 30 bp, Artificial Sequence
  Synthetic oligonucleotide
gattggatattctctggagtagtatcaccc

SEQ ID NO: 424696 - DNA, 30 bp, Artificial Sequence
  Synthetic oligonucleotide
tgtagggtaagccttatgttcgtatcaccc

SEQ ID NO: 424697 - DNA, 30 bp, Artificial Sequence
  Synthetic oligonucleotide
gaaatatatatcaggatggtagggtcaccc

SEQ ID NO: 424698 - DNA, 30 bp, Artificial Sequence
  Synthetic oligonucleotide
cctttacgcgtagccgcgacgttgtcaccc

SEQ ID NO: 424699 - DNA, 30 bp, Artificial Sequence
  Synthetic oligonucleotide
ccgagccgcagcactccataaaattcaccc

SEQ ID NO: 424700 - DNA, 30 bp, Artificial Sequence
  Synthetic oligonucleotide
gagattcgccaaatgtttagggtaagaccc

SEQ ID NO: 424701 - DNA, 30 bp, Artificial Sequence
  Synthetic oligonucleotide
tctttgtgctcggccccctcgtacagaccc

SEQ ID NO: 424702 - DNA, 30 bp, Artificial Sequence
  Synthetic oligonucleotide
tgaagagtagttgtccctggcttcagaccc

SEQ ID NO: 424703 - DNA, 30 bp, Artificial Sequence
  Synthetic oligonucleotide
gtgtatgttgggaagcaaatacagagaccc

SEQ ID NO: 424704 - DNA, 30 bp, Artificial Sequence
  Synthetic oligonucleotide
atttatagccacaagctgcctgttagaccc

SEQ ID NO: 424705 - DNA, 30 bp, Artificial Sequence
  Synthetic oligonucleotide
cacttctttgttgagcgtgggaaacgaccc

SEQ ID NO: 424706 - DNA, 30 bp, Artificial Sequence
  Synthetic oligonucleotide
ccttttatgtgactgtcggaacagcgaccc

SEQ ID NO: 424707 - DNA, 30 bp, Artificial Sequence
  Synthetic oligonucleotide
cgggtctaagcaaccgtggatcggcgaccc

SEQ ID NO: 424708 - DNA, 30 bp, Artificial Sequence
  Synthetic oligonucleotide
gcgttaggaattgggtatacgtccggaccc

SEQ ID NO: 424709 - DNA, 30 bp, Artificial Sequence
  Synthetic oligonucleotide
ccataattactgaaaacagtagggggaccc

SEQ ID NO: 424710 - DNA, 30 bp, Artificial Sequence
  Synthetic oligonucleotide
tgaaactagttcaggagctaacctggaccc

SEQ ID NO: 424711 - DNA, 30 bp, Artificial Sequence
  Synthetic oligonucleotide
caaaacaattagcacttagaatttggaccc

SEQ ID NO: 424712 - DNA, 30 bp, Artificial Sequence
  Synthetic oligonucleotide
ctatgtaaagagtaagaaacttgaataccc

SEQ ID NO: 424713 - DNA, 30 bp, Artificial Sequence
  Synthetic oligonucleotide
gtctagttgggtctccgactttacataccc

SEQ ID NO: 424714 - DNA, 30 bp, Artificial Sequence
  Synthetic oligonucleotide
tccggaccgctatctaggacaccgataccc

SEQ ID NO: 424715 - DNA, 30 bp, Artificial Sequence
  Synthetic oligonucleotide
acatatacatgtctgttgggttcgataccc

SEQ ID NO: 424716 - DNA, 30 bp, Artificial Sequence
  Synthetic oligonucleotide
gcagggaaatgtcgttagatacggataccc

SEQ ID NO: 424717 - DNA, 30 bp, Artificial Sequence
  Synthetic oligonucleotide
tagaaagaatggctgctcttctggataccc

SEQ ID NO: 424718 - DNA, 30 bp, Artificial Sequence
  Synthetic oligonucleotide
ccttcctgggatgccaaggaaccactaccc

SEQ ID NO: 424719 - DNA, 30 bp, Artificial Sequence
  Synthetic oligonucleotide
gtgtcaaatactgatacaggaggactaccc

SEQ ID NO: 424720 - DNA, 30 bp, Artificial Sequence
  Synthetic oligonucleotide
atacagttgggaatgtagttgttactaccc

SEQ ID NO: 424721 - DNA, 30 bp, Artificial Sequence
  Synthetic oligonucleotide
aagtaaaggggacgtagcggcaaagtaccc

SEQ ID NO: 424722 - DNA, 30 bp, Artificial Sequence
  Synthetic oligonucleotide
ccgcgcagagtgtgataacggcccgtaccc

SEQ ID NO: 424723 - DNA, 30 bp, Artificial Sequence
  Synthetic oligonucleotide
ctaagcggctgggagcgtttagctgtaccc

SEQ ID NO: 424724 - DNA, 30 bp, Artificial Sequence
  Synthetic oligonucleotide
aagatgatagattgatgcgcaagtgtaccc

SEQ ID NO: 424725 - DNA, 30 bp, Artificial Sequence
  Synthetic oligonucleotide
ctatgtttaagcaccactctccgtgtaccc

SEQ ID NO: 424726 - DNA, 30 bp, Artificial Sequence
  Synthetic oligonucleotide
gtggttttctatagcctacaagggttaccc

SEQ ID NO: 424727 - DNA, 30 bp, Artificial Sequence
  Synthetic oligonucleotide
gtgcggagcgaattgccgtggttgttaccc

SEQ ID NO: 424728 - DNA, 30 bp, Artificial Sequence
  Synthetic oligonucleotide
aggttcgttcagctgtcagaacttttaccc

SEQ ID NO: 424729 - DNA, 30 bp, Artificial Sequence
  Synthetic oligonucleotide
gggtgacattcgggatggcagcttttaccc

SEQ ID NO: 424730 - DNA, 30 bp, Artificial Sequence
  Synthetic oligonucleotide
cctgtaatgttccgcgtataatttttaccc

SEQ ID NO: 424731 - DNA, 30 bp, Artificial Sequence
  Synthetic oligonucleotide
gtttgatgcttggtttttgacgtcaacccc

SEQ ID NO: 424732 - DNA, 30 bp, Artificial Sequence
  Synthetic oligonucleotide
aggtctattcaaacataatatcctaacccc

SEQ ID NO: 424733 - DNA, 30 bp, Artificial Sequence
  Synthetic oligonucleotide
aactggctcaatggcggcggtaaacacccc

SEQ ID NO: 424734 - DNA, 30 bp, Artificial Sequence
  Synthetic oligonucleotide
ttgcgcggaaccatgtaggcggtgcacccc

SEQ ID NO: 424735 - DNA, 30 bp, Artificial Sequence
  Synthetic oligonucleotide
cagaataaaagccttgcagggggtcacccc

SEQ ID NO: 424736 - DNA, 30 bp, Artificial Sequence
  Synthetic oligonucleotide
ggtgaccgactgattggcggatcagacccc

SEQ ID NO: 424737 - DNA, 30 bp, Artificial Sequence
  Synthetic oligonucleotide
atatttgctgcagatgtaattatagacccc

SEQ ID NO: 424738 - DNA, 30 bp, Artificial Sequence
  Synthetic oligonucleotide
cttcatgactagcttttcccgcacgacccc

SEQ ID NO: 424739 - DNA, 30 bp, Artificial Sequence
  Synthetic oligonucleotide
atatcacagtccgggtttgaggacgacccc

SEQ ID NO: 424740 - DNA, 30 bp, Artificial Sequence
  Synthetic oligonucleotide
tctttggatcgagtacggtaccaggacccc

SEQ ID NO: 424741 - DNA, 30 bp, Artificial Sequence
  Synthetic oligonucleotide
taggtaatcggcgcttagcggacggacccc

SEQ ID NO: 424742 - DNA, 30 bp, Artificial Sequence
  Synthetic oligonucleotide
ccttcggtatgttggcccggaagggacccc

SEQ ID NO: 424743 - DNA, 31 bp, Artificial Sequence
  Synthetic oligonucleotide
ttacgcattgaagggtgtaacttactacccc

SEQ ID NO: 424744 - DNA, 30 bp, Artificial Sequence
  Synthetic oligonucleotide
gagccctctttgaataacctaacctacccc

SEQ ID NO: 424745 - DNA, 30 bp, Artificial Sequence
  Synthetic oligonucleotide
atctccaaaggtatccgtgtggtcaccccc

SEQ ID NO: 424746 - DNA, 30 bp, Artificial Sequence
  Synthetic oligonucleotide
cctcgcactgttactgtcataccgaccccc

SEQ ID NO: 424747 - DNA, 30 bp, Artificial Sequence
  Synthetic oligonucleotide
tatgattttttaaaagtcgcgaataccccc

SEQ ID NO: 424748 - DNA, 30 bp, Artificial Sequence
  Synthetic oligonucleotide
gcatttggatacgtagttggctttaccccc

SEQ ID NO: 424749 - DNA, 30 bp, Artificial Sequence
  Synthetic oligonucleotide
tggctacctagagatagacaggcgcccccc

SEQ ID NO: 424750 - DNA, 30 bp, Artificial Sequence
  Synthetic oligonucleotide
ctcgtgggacccctggtggaaaaagccccc

SEQ ID NO: 424751 - DNA, 30 bp, Artificial Sequence
  Synthetic oligonucleotide
ggccttcttgtacgtgcggatctagccccc

SEQ ID NO: 424752 - DNA, 30 bp, Artificial Sequence
  Synthetic oligonucleotide
cgcggccacttggaattaggttccgccccc

SEQ ID NO: 424753 - DNA, 30 bp, Artificial Sequence
  Synthetic oligonucleotide
tttgggtacctccacgacatgtaggccccc

SEQ ID NO: 424754 - DNA, 30 bp, Artificial Sequence
  Synthetic oligonucleotide
aatggactagttatcaagaatacatccccc

SEQ ID NO: 424755 - DNA, 30 bp, Artificial Sequence
  Synthetic oligonucleotide
tattactgcttgtgcccggctcgatccccc

SEQ ID NO: 424756 - DNA, 30 bp, Artificial Sequence
  Synthetic oligonucleotide
cttcagatatctcgatgtcaccactccccc

SEQ ID NO: 424757 - DNA, 30 bp, Artificial Sequence
  Synthetic oligonucleotide
gaattgagtcaggtcccgagaacctccccc

SEQ ID NO: 424758 - DNA, 30 bp, Artificial Sequence
  Synthetic oligonucleotide
aagaatcaatgtatcattaaccgctccccc

SEQ ID NO: 424759 - DNA, 30 bp, Artificial Sequence
  Synthetic oligonucleotide
atttataactcgggacatattcagtccccc

SEQ ID NO: 424760 - DNA, 30 bp, Artificial Sequence
  Synthetic oligonucleotide
tgtagaggtcgggcataacatgtttccccc

SEQ ID NO: 424761 - DNA, 30 bp, Artificial Sequence
  Synthetic oligonucleotide
tcagctggatgtactgcaagacgaagcccc

SEQ ID NO: 424762 - DNA, 30 bp, Artificial Sequence
  Synthetic oligonucleotide
gatattctggttgcacgattaggcagcccc

SEQ ID NO: 424763 - DNA, 30 bp, Artificial Sequence
  Synthetic oligonucleotide
gctgcttcatgggtcctaggcctcagcccc

SEQ ID NO: 424764 - DNA, 30 bp, Artificial Sequence
  Synthetic oligonucleotide
aatacagaacgcgcccgcagttagagcccc

SEQ ID NO: 424765 - DNA, 30 bp, Artificial Sequence
  Synthetic oligonucleotide
atcctgacgattaatgcgcacacgagcccc

SEQ ID NO: 424766 - DNA, 30 bp, Artificial Sequence
  Synthetic oligonucleotide
caataccaagggtctgcttatctgagcccc

SEQ ID NO: 424767 - DNA, 30 bp, Artificial Sequence
  Synthetic oligonucleotide
actcccaggcacgaagccactctgagcccc

SEQ ID NO: 424768 - DNA, 30 bp, Artificial Sequence
  Synthetic oligonucleotide
ttttaaacgcataagcctacgaatagcccc

SEQ ID NO: 424769 - DNA, 30 bp, Artificial Sequence
  Synthetic oligonucleotide
tttaagggctctgtcctctaggttagcccc

SEQ ID NO: 424770 - DNA, 30 bp, Artificial Sequence
  Synthetic oligonucleotide
gcgagttctagatagagcgttgtacgcccc

SEQ ID NO: 424771 - DNA, 30 bp, Artificial Sequence
  Synthetic oligonucleotide
tcttggacgtgacagtctattcagcgcccc

SEQ ID NO: 424772 - DNA, 30 bp, Artificial Sequence
  Synthetic oligonucleotide
gaggtgacgcctacgcttgaggagcgcccc

SEQ ID NO: 424773 - DNA, 30 bp, Artificial Sequence
  Synthetic oligonucleotide
gacggttgacgaatatatataacgcgcccc

SEQ ID NO: 424774 - DNA, 30 bp, Artificial Sequence
  Synthetic oligonucleotide
ccgtggccacctaacctccataggcgcccc

SEQ ID NO: 424775 - DNA, 30 bp, Artificial Sequence
  Synthetic oligonucleotide
ccgctagattgccgcggatattggcgcccc

SEQ ID NO: 424776 - DNA, 30 bp, Artificial Sequence
  Synthetic oligonucleotide
agagacagtggggtttttattacaggcccc

SEQ ID NO: 424777 - DNA, 30 bp, Artificial Sequence
  Synthetic oligonucleotide
cactaggtcaagtttaggctactgggcccc

SEQ ID NO: 424778 - DNA, 30 bp, Artificial Sequence
  Synthetic oligonucleotide
aagggaaggcacaatatatccgaatgcccc

SEQ ID NO: 424779 - DNA, 30 bp, Artificial Sequence
  Synthetic oligonucleotide
aaggggcatctcgacgttacggaatgcccc

SEQ ID NO: 424780 - DNA, 30 bp, Artificial Sequence
  Synthetic oligonucleotide
gaactgtacctcaataggtgcacctgcccc

SEQ ID NO: 424781 - DNA, 30 bp, Artificial Sequence
  Synthetic oligonucleotide
gcatattcctacacaattgccatctgcccc

SEQ ID NO: 424782 - DNA, 30 bp, Artificial Sequence
  Synthetic oligonucleotide
tttgaagtagatactccacctgcgtgcccc

SEQ ID NO: 424783 - DNA, 30 bp, Artificial Sequence
  Synthetic oligonucleotide
ccgcgcactacccgtacgaactgttgcccc

SEQ ID NO: 424784 - DNA, 30 bp, Artificial Sequence
  Synthetic oligonucleotide
gtacatcggggcagcgcggaaagaatcccc

SEQ ID NO: 424785 - DNA, 30 bp, Artificial Sequence
  Synthetic oligonucleotide
cggtctactaaatgtctcagccgaatcccc

SEQ ID NO: 424786 - DNA, 30 bp, Artificial Sequence
  Synthetic oligonucleotide
agcatacggttatggggggtctgaatcccc

SEQ ID NO: 424787 - DNA, 30 bp, Artificial Sequence
  Synthetic oligonucleotide
atccatgttgatcgaacgggccccatcccc

SEQ ID NO: 424788 - DNA, 30 bp, Artificial Sequence
  Synthetic oligonucleotide
aacactacctgtacccggatcttcatcccc

SEQ ID NO: 424789 - DNA, 30 bp, Artificial Sequence
  Synthetic oligonucleotide
gcgcaagcccctgatgtgctagcgatcccc

SEQ ID NO: 424790 - DNA, 30 bp, Artificial Sequence
  Synthetic oligonucleotide
agagtctcggtgctacgcagtacgctcccc

SEQ ID NO: 424791 - DNA, 30 bp, Artificial Sequence
  Synthetic oligonucleotide
cgttagttactttatgtaggccggctcccc

SEQ ID NO: 424792 - DNA, 30 bp, Artificial Sequence
  Synthetic oligonucleotide
taacggattaggtgtgaagcaacagtcccc

SEQ ID NO: 424793 - DNA, 30 bp, Artificial Sequence
  Synthetic oligonucleotide
gtggttgcaaatgtgacatgccacgtcccc

SEQ ID NO: 424794 - DNA, 30 bp, Artificial Sequence
  Synthetic oligonucleotide
gcactgtgctctgtatcccacaaggtcccc

SEQ ID NO: 424795 - DNA, 30 bp, Artificial Sequence
  Synthetic oligonucleotide
ttattataaatcgaagcccggcaggtcccc

SEQ ID NO: 424796 - DNA, 30 bp, Artificial Sequence
  Synthetic oligonucleotide
cgacttttaacccactcaagggaggtcccc

SEQ ID NO: 424797 - DNA, 30 bp, Artificial Sequence
  Synthetic oligonucleotide
agcaaggacaggggcctgatggaggtcccc

SEQ ID NO: 424798 - DNA, 30 bp, Artificial Sequence
  Synthetic oligonucleotide
acgaacgtgaggtcccccctacgggtcccc

SEQ ID NO: 424799 - DNA, 30 bp, Artificial Sequence
  Synthetic oligonucleotide
gctacaaccaagaaagtcaaggttgtcccc

SEQ ID NO: 424800 - DNA, 30 bp, Artificial Sequence
  Synthetic oligonucleotide
cagaatcacaggctcggctcgaaattcccc

SEQ ID NO: 424801 - DNA, 30 bp, Artificial Sequence
  Synthetic oligonucleotide
cagtgtagcgaacttacgcaccgattcccc

SEQ ID NO: 424802 - DNA, 30 bp, Artificial Sequence
  Synthetic oligonucleotide
gttgcgcgttccatggggcgctgcttcccc

SEQ ID NO: 424803 - DNA, 30 bp, Artificial Sequence
  Synthetic oligonucleotide
gtattatgccaagaattttgggtgttcccc

SEQ ID NO: 424804 - DNA, 30 bp, Artificial Sequence
  Synthetic oligonucleotide
gtctccgtactgcttgggaccgatttcccc

SEQ ID NO: 424805 - DNA, 30 bp, Artificial Sequence
  Synthetic oligonucleotide
cgactaggtccgcgaatagcttgcaagccc

SEQ ID NO: 424806 - DNA, 30 bp, Artificial Sequence
  Synthetic oligonucleotide
cgttagcatcgactgcagtaactcaagccc

SEQ ID NO: 424807 - DNA, 30 bp, Artificial Sequence
  Synthetic oligonucleotide
gttgaaatagatgtccacccgccgaagccc

SEQ ID NO: 424808 - DNA, 30 bp, Artificial Sequence
  Synthetic oligonucleotide
gctagcccagaggatcctctagggaagccc

SEQ ID NO: 424809 - DNA, 30 bp, Artificial Sequence
  Synthetic oligonucleotide
gcgggattgtgtacgtcagaccataagccc

SEQ ID NO: 424810 - DNA, 30 bp, Artificial Sequence
  Synthetic oligonucleotide
taatcgcgcgattcttaggggtctaagccc

SEQ ID NO: 424811 - DNA, 30 bp, Artificial Sequence
  Synthetic oligonucleotide
cgtcgagctccgggcagtcacaaacagccc

SEQ ID NO: 424812 - DNA, 30 bp, Artificial Sequence
  Synthetic oligonucleotide
gggttcgggccagggggagccttacagccc

SEQ ID NO: 424813 - DNA, 30 bp, Artificial Sequence
  Synthetic oligonucleotide
cagcggcaggaaattaaaaaggtgcagccc

SEQ ID NO: 424814 - DNA, 30 bp, Artificial Sequence
  Synthetic oligonucleotide
cggacttggtgcagtcgaccggatcagccc

SEQ ID NO: 424815 - DNA, 30 bp, Artificial Sequence
  Synthetic oligonucleotide
gcttcctagttacatgctgtaactcagccc

SEQ ID NO: 424816 - DNA, 30 bp, Artificial Sequence
  Synthetic oligonucleotide
gagacgcacggaattttggcagaggagccc

SEQ ID NO: 424817 - DNA, 30 bp, Artificial Sequence
  Synthetic oligonucleotide
aatttttggaggggtttgtggcgggagccc

SEQ ID NO: 424818 - DNA, 30 bp, Artificial Sequence
  Synthetic oligonucleotide
ggttcgcgaagccgcttgtccttggagccc

SEQ ID NO: 424819 - DNA, 30 bp, Artificial Sequence
  Synthetic oligonucleotide
tagcccgtttgtactctgccctctgagccc

SEQ ID NO: 424820 - DNA, 30 bp, Artificial Sequence
  Synthetic oligonucleotide
acttcaggaattccgtcgttttaatagccc

SEQ ID NO: 424821 - DNA, 30 bp, Artificial Sequence
  Synthetic oligonucleotide
taacatttgggatcccccggcgcttagccc

SEQ ID NO: 424822 - DNA, 30 bp, Artificial Sequence
  Synthetic oligonucleotide
agatacagagttgcggcagtcgcttagccc

SEQ ID NO: 424823 - DNA, 30 bp, Artificial Sequence
  Synthetic oligonucleotide
ggtggaaacgcaatgcaagcatcgacgccc

SEQ ID NO: 424824 - DNA, 30 bp, Artificial Sequence
  Synthetic oligonucleotide
tattcattaaagtaacacagctttacgccc

SEQ ID NO: 424825 - DNA, 30 bp, Artificial Sequence
  Synthetic oligonucleotide
ctgttacgtcgggtacacagaacaccgccc

SEQ ID NO: 424826 - DNA, 30 bp, Artificial Sequence
  Synthetic oligonucleotide
gttgtctcagtgcggcagataggtccgccc

SEQ ID NO: 424827 - DNA, 30 bp, Artificial Sequence
  Synthetic oligonucleotide
cgttttgtgtttacctatataaaagcgccc

SEQ ID NO: 424828 - DNA, 30 bp, Artificial Sequence
  Synthetic oligonucleotide
gattcttaattatagagattagtagcgccc

SEQ ID NO: 424829 - DNA, 30 bp, Artificial Sequence
  Synthetic oligonucleotide
ctgggaaccggtccagtttagcacgcgccc

SEQ ID NO: 424830 - DNA, 30 bp, Artificial Sequence
  Synthetic oligonucleotide
tgttgataagacgccaaacggcttgcgccc

SEQ ID NO: 424831 - DNA, 30 bp, Artificial Sequence
  Synthetic oligonucleotide
aacaacattaaaggacctcttgagtcgccc

SEQ ID NO: 424832 - DNA, 30 bp, Artificial Sequence
  Synthetic oligonucleotide
cttctcgcccacttgctctcaaggtcgccc

SEQ ID NO: 424833 - DNA, 30 bp, Artificial Sequence
  Synthetic oligonucleotide
gccagacatcacagatctataatttcgccc

SEQ ID NO: 424834 - DNA, 30 bp, Artificial Sequence
  Synthetic oligonucleotide
atcaactctgaattcagcttaatttcgccc

SEQ ID NO: 424835 - DNA, 30 bp, Artificial Sequence
  Synthetic oligonucleotide
ggagggccagtacaggcctatgaaaggccc

SEQ ID NO: 424836 - DNA, 30 bp, Artificial Sequence
  Synthetic oligonucleotide
ccattgtcaactcttctgagtcgaaggccc

SEQ ID NO: 424837 - DNA, 30 bp, Artificial Sequence
  Synthetic oligonucleotide
agtcgtcggggggggttcagaaccaggccc

SEQ ID NO: 424838 - DNA, 30 bp, Artificial Sequence
  Synthetic oligonucleotide
attatcataccaaatgatccactcaggccc

SEQ ID NO: 424839 - DNA, 30 bp, Artificial Sequence
  Synthetic oligonucleotide
gggtaacgttgtcgggaggcagtcaggccc

SEQ ID NO: 424840 - DNA, 30 bp, Artificial Sequence
  Synthetic oligonucleotide
actccggttgggttaccggttttcaggccc

SEQ ID NO: 424841 - DNA, 30 bp, Artificial Sequence
  Synthetic oligonucleotide
tatcgatacaagtagggttagccgaggccc

SEQ ID NO: 424842 - DNA, 30 bp, Artificial Sequence
  Synthetic oligonucleotide
actgttgattattactcgggaggtaggccc

SEQ ID NO: 424843 - DNA, 30 bp, Artificial Sequence
  Synthetic oligonucleotide
cgcagagaatgcgtcgttgagaaacggccc

SEQ ID NO: 424844 - DNA, 30 bp, Artificial Sequence
  Synthetic oligonucleotide
catcgaatgcaaagagggataacacggccc

SEQ ID NO: 424845 - DNA, 30 bp, Artificial Sequence
  Synthetic oligonucleotide
tgccgtatcttttcacattcagtacggccc

SEQ ID NO: 424846 - DNA, 30 bp, Artificial Sequence
  Synthetic oligonucleotide
ctcataatatggcacccacggttacggccc

SEQ ID NO: 424847 - DNA, 30 bp, Artificial Sequence
  Synthetic oligonucleotide
aagggtcgatggctacaggggcagcggccc

SEQ ID NO: 424848 - DNA, 30 bp, Artificial Sequence
  Synthetic oligonucleotide
gggtgccgagctggactattcatgcggccc

SEQ ID NO: 424849 - DNA, 30 bp, Artificial Sequence
  Synthetic oligonucleotide
gaaggtctggggacatgtgcgctagggccc

SEQ ID NO: 424850 - DNA, 30 bp, Artificial Sequence
  Synthetic oligonucleotide
tgatttttttatgtgtcattatacgggccc

SEQ ID NO: 424851 - DNA, 30 bp, Artificial Sequence
  Synthetic oligonucleotide
attcgaacccaaggaatttttgccgggccc

SEQ ID NO: 424852 - DNA, 30 bp, Artificial Sequence
  Synthetic oligonucleotide
tggggagaaaaaggctaggaatccgggccc

SEQ ID NO: 424853 - DNA, 30 bp, Artificial Sequence
  Synthetic oligonucleotide
ttgtcgtataccgtctatttacgcgggccc

SEQ ID NO: 424854 - DNA, 30 bp, Artificial Sequence
  Synthetic oligonucleotide
cctattgtcttattttaatcagaggggccc

SEQ ID NO: 424855 - DNA, 30 bp, Artificial Sequence
  Synthetic oligonucleotide
aagctatgcgactggggtagataggggccc

SEQ ID NO: 424856 - DNA, 30 bp, Artificial Sequence
  Synthetic oligonucleotide
ggtgaccgagattaatgcggtcctgggccc

SEQ ID NO: 424857 - DNA, 30 bp, Artificial Sequence
  Synthetic oligonucleotide
aaaaacaaaggagtatataattaatggccc

SEQ ID NO: 424858 - DNA, 30 bp, Artificial Sequence
  Synthetic oligonucleotide
gatccgaagattggctcaaatgcatggccc

SEQ ID NO: 424859 - DNA, 30 bp, Artificial Sequence
  Synthetic oligonucleotide
aagtgtagacctctagatgcgtcatggccc

SEQ ID NO: 424860 - DNA, 30 bp, Artificial Sequence
  Synthetic oligonucleotide
ctcgagcaaggccaggtcaagagatggccc

SEQ ID NO: 424861 - DNA, 30 bp, Artificial Sequence
  Synthetic oligonucleotide
gagaatacatcgttttgagtattatggccc

SEQ ID NO: 424862 - DNA, 30 bp, Artificial Sequence
  Synthetic oligonucleotide
tcaatgtctttctaatgcactctctggccc

SEQ ID NO: 424863 - DNA, 30 bp, Artificial Sequence
  Synthetic oligonucleotide
tgtcggacgtgcgcgggtacaaagtggccc

SEQ ID NO: 424864 - DNA, 30 bp, Artificial Sequence
  Synthetic oligonucleotide
tcccgattacgtacgacaaggcagtggccc

SEQ ID NO: 424865 - DNA, 30 bp, Artificial Sequence
  Synthetic oligonucleotide
gccgtaaagggtcagttttcacattggccc

SEQ ID NO: 424866 - DNA, 30 bp, Artificial Sequence
  Synthetic oligonucleotide
cagcactcacgggtgatggatggttggccc

SEQ ID NO: 424867 - DNA, 30 bp, Artificial Sequence
  Synthetic oligonucleotide
gaaggtacagtaagcgtctttcacatgccc

SEQ ID NO: 424868 - DNA, 29 bp, Artificial Sequence
  Synthetic oligonucleotide
cccacataacaatcgctaatgccatgccc

SEQ ID NO: 424869 - DNA, 30 bp, Artificial Sequence
  Synthetic oligonucleotide
atagtcaaacgtcgatgcgtgttcatgccc

SEQ ID NO: 424870 - DNA, 30 bp, Artificial Sequence
  Synthetic oligonucleotide
acactttacagactatcttagacgatgccc

SEQ ID NO: 424871 - DNA, 30 bp, Artificial Sequence
  Synthetic oligonucleotide
ggatcaaaatagctctttttcactatgccc

SEQ ID NO: 424872 - DNA, 30 bp, Artificial Sequence
  Synthetic oligonucleotide
ccatcgggcaaacgcagtttagtactgccc

SEQ ID NO: 424873 - DNA, 30 bp, Artificial Sequence
  Synthetic oligonucleotide
atattgaagcctccgatacattgcctgccc

SEQ ID NO: 424874 - DNA, 30 bp, Artificial Sequence
  Synthetic oligonucleotide
acagattgggagcaattcttaatcctgccc

SEQ ID NO: 424875 - DNA, 30 bp, Artificial Sequence
  Synthetic oligonucleotide
cttcaggtgattacctttctcaagctgccc

SEQ ID NO: 424876 - DNA, 30 bp, Artificial Sequence
  Synthetic oligonucleotide
tgtccaagtttcgctttggaagaagtgccc

SEQ ID NO: 424877 - DNA, 30 bp, Artificial Sequence
  Synthetic oligonucleotide
taaaatataatggtcggttattttgtgccc

SEQ ID NO: 424878 - DNA, 30 bp, Artificial Sequence
  Synthetic oligonucleotide
cagcatagaaaattggtaaactaattgccc

SEQ ID NO: 424879 - DNA, 30 bp, Artificial Sequence
  Synthetic oligonucleotide
ttagtaaaaccggcagtgaagtgattgccc

SEQ ID NO: 424880 - DNA, 30 bp, Artificial Sequence
  Synthetic oligonucleotide
ggcgcttaggtataagggatggtcttgccc

SEQ ID NO: 424881 - DNA, 30 bp, Artificial Sequence
  Synthetic oligonucleotide
tattgtttgcttgcacctttgtagttgccc

SEQ ID NO: 424882 - DNA, 30 bp, Artificial Sequence
  Synthetic oligonucleotide
gtataatcttagataacgggtactttgccc

SEQ ID NO: 424883 - DNA, 30 bp, Artificial Sequence
  Synthetic oligonucleotide
tctaacaacacagtcttcaattctttgccc

SEQ ID NO: 424884 - DNA, 30 bp, Artificial Sequence
  Synthetic oligonucleotide
caattttctagcacagtcgtccgaaatccc

SEQ ID NO: 424885 - DNA, 30 bp, Artificial Sequence
  Synthetic oligonucleotide
taacagtatattagtaacataggcaatccc

SEQ ID NO: 424886 - DNA, 30 bp, Artificial Sequence
  Synthetic oligonucleotide
aacaccgagccgtcaccaggaacgaatccc

SEQ ID NO: 424887 - DNA, 30 bp, Artificial Sequence
  Synthetic oligonucleotide
gtttttacgtgacctacttgagggaatccc

SEQ ID NO: 424888 - DNA, 30 bp, Artificial Sequence
  Synthetic oligonucleotide
gatttctcatcgggagttgactgtaatccc

SEQ ID NO: 424889 - DNA, 30 bp, Artificial Sequence
  Synthetic oligonucleotide
acggtaacccgttgttggagtattaatccc

SEQ ID NO: 424890 - DNA, 30 bp, Artificial Sequence
  Synthetic oligonucleotide
ggtctcaacgaaggcccgtgcatgcatccc

SEQ ID NO: 424891 - DNA, 30 bp, Artificial Sequence
  Synthetic oligonucleotide
acttgcaccattctcagcacgctgcatccc

SEQ ID NO: 424892 - DNA, 30 bp, Artificial Sequence
  Synthetic oligonucleotide
gctcggtattagtgagaagtgtctgatccc

SEQ ID NO: 424893 - DNA, 30 bp, Artificial Sequence
  Synthetic oligonucleotide
caacttcacataccggtttgaacatatccc

SEQ ID NO: 424894 - DNA, 30 bp, Artificial Sequence
  Synthetic oligonucleotide
ctagagaataggatacctcattcatatccc

SEQ ID NO: 424895 - DNA, 30 bp, Artificial Sequence
  Synthetic oligonucleotide
tcgtaggacagtagagtatgactctatccc

SEQ ID NO: 424896 - DNA, 30 bp, Artificial Sequence
  Synthetic oligonucleotide
accagggttagaacaagcccttcgtatccc

SEQ ID NO: 424897 - DNA, 30 bp, Artificial Sequence
  Synthetic oligonucleotide
agtagaacccatcggttcctctggtatccc

SEQ ID NO: 424898 - DNA, 30 bp, Artificial Sequence
  Synthetic oligonucleotide
tgcatttaaaacgctgcttcttgttatccc

SEQ ID NO: 424899 - DNA, 30 bp, Artificial Sequence
  Synthetic oligonucleotide
atccctgaaaaccgggttgttgtaactccc

SEQ ID NO: 424900 - DNA, 30 bp, Artificial Sequence
  Synthetic oligonucleotide
ttatcccgctcccaccattagggcactccc

SEQ ID NO: 424901 - DNA, 30 bp, Artificial Sequence
  Synthetic oligonucleotide
aggttcccccggacagcgtattggactccc

SEQ ID NO: 424902 - DNA, 30 bp, Artificial Sequence
  Synthetic oligonucleotide
tggactctttgtaggggccaagatactccc

SEQ ID NO: 424903 - DNA, 30 bp, Artificial Sequence
  Synthetic oligonucleotide
gaggaatagggctaactcagaccacctccc

SEQ ID NO: 424904 - DNA, 31 bp, Artificial Sequence
  Synthetic oligonucleotide
gttgcgtcttgaaagctctatttagcctccc

SEQ ID NO: 424905 - DNA, 30 bp, Artificial Sequence
  Synthetic oligonucleotide
tttgccggtccttgtgtaaagacgcctccc

SEQ ID NO: 424906 - DNA, 30 bp, Artificial Sequence
  Synthetic oligonucleotide
tcgctctgtttgcacagatggactcctccc

SEQ ID NO: 424907 - DNA, 30 bp, Artificial Sequence
  Synthetic oligonucleotide
cgcacggacctagacttgcctgaagctccc

SEQ ID NO: 424908 - DNA, 30 bp, Artificial Sequence
  Synthetic oligonucleotide
gcccgattgcagttacagcatgtagctccc

SEQ ID NO: 424909 - DNA, 30 bp, Artificial Sequence
  Synthetic oligonucleotide
gtcgatggttctgcactccgtccggctccc

SEQ ID NO: 424910 - DNA, 31 bp, Artificial Sequence
  Synthetic oligonucleotide
gacaggagggagccatactatatctgctccc

SEQ ID NO: 424911 - DNA, 30 bp, Artificial Sequence
  Synthetic oligonucleotide
ccttggtcgcatgttcggctgacatctccc

SEQ ID NO: 424912 - DNA, 30 bp, Artificial Sequence
  Synthetic oligonucleotide
ctttgagggctctctgatttttactctccc

SEQ ID NO: 424913 - DNA, 30 bp, Artificial Sequence
  Synthetic oligonucleotide
ggtttgtcatgagagagaattcagtctccc

SEQ ID NO: 424914 - DNA, 30 bp, Artificial Sequence
  Synthetic oligonucleotide
gtgctgtcggggggaccacccgcgtctccc

SEQ ID NO: 424915 - DNA, 30 bp, Artificial Sequence
  Synthetic oligonucleotide
gtacgcagaaatcgacctgcactgtctccc

SEQ ID NO: 424916 - DNA, 30 bp, Artificial Sequence
  Synthetic oligonucleotide
gggaattcctcgtttcgatagcattctccc

SEQ ID NO: 424917 - DNA, 30 bp, Artificial Sequence
  Synthetic oligonucleotide
gtaaacgccagcggagtctgtcgttctccc

SEQ ID NO: 424918 - DNA, 30 bp, Artificial Sequence
  Synthetic oligonucleotide
gtgcattcgttgataagtggagaaagtccc

SEQ ID NO: 424919 - DNA, 30 bp, Artificial Sequence
  Synthetic oligonucleotide
gtatgattggaacggcggtggccaagtccc

SEQ ID NO: 424920 - DNA, 30 bp, Artificial Sequence
  Synthetic oligonucleotide
cagtctatgcctataagggactcaagtccc

SEQ ID NO: 424921 - DNA, 30 bp, Artificial Sequence
  Synthetic oligonucleotide
ttctctgcacgaatcgctatttcaagtccc

SEQ ID NO: 424922 - DNA, 30 bp, Artificial Sequence
  Synthetic oligonucleotide
ggaatataccatttgaaattcataagtccc

SEQ ID NO: 424923 - DNA, 30 bp, Artificial Sequence
  Synthetic oligonucleotide
gcttttgtgcgccggagataaaacagtccc

SEQ ID NO: 424924 - DNA, 30 bp, Artificial Sequence
  Synthetic oligonucleotide
tagcccactgacctggttaacagcagtccc

SEQ ID NO: 424925 - DNA, 30 bp, Artificial Sequence
  Synthetic oligonucleotide
ggaagataaaaactctgtcctgaacgtccc

SEQ ID NO: 424926 - DNA, 30 bp, Artificial Sequence
  Synthetic oligonucleotide
tcatgagtacgacacagggggccccgtccc

SEQ ID NO: 424927 - DNA, 30 bp, Artificial Sequence
  Synthetic oligonucleotide
cgcatacttcccgtcagtagggtccgtccc

SEQ ID NO: 424928 - DNA, 30 bp, Artificial Sequence
  Synthetic oligonucleotide
attcgaagtgcaacgtgtcgaactcgtccc

SEQ ID NO: 424929 - DNA, 30 bp, Artificial Sequence
  Synthetic oligonucleotide
agattaccggtctgaatgaccagtcgtccc

SEQ ID NO: 424930 - DNA, 30 bp, Artificial Sequence
  Synthetic oligonucleotide
atcagatgactatccctagtcaaaggtccc

SEQ ID NO: 424931 - DNA, 30 bp, Artificial Sequence
  Synthetic oligonucleotide
gaatattttcgtaaacgcacggaaggtccc

SEQ ID NO: 424932 - DNA, 30 bp, Artificial Sequence
  Synthetic oligonucleotide
ataaaggatctggactagtatggaggtccc

SEQ ID NO: 424933 - DNA, 30 bp, Artificial Sequence
  Synthetic oligonucleotide
actgtgcctgctggcacacggggcggtccc

SEQ ID NO: 424934 - DNA, 30 bp, Artificial Sequence
  Synthetic oligonucleotide
tattacagtatacggctggcgctcggtccc

SEQ ID NO: 424935 - DNA, 30 bp, Artificial Sequence
  Synthetic oligonucleotide
ggaaatagtgtctgtactgaatcgggtccc

SEQ ID NO: 424936 - DNA, 30 bp, Artificial Sequence
  Synthetic oligonucleotide
ctgccgcaacgtttcttcgatgatggtccc

SEQ ID NO: 424937 - DNA, 30 bp, Artificial Sequence
  Synthetic oligonucleotide
gcatacgtgttgcgcgggtcttatggtccc

SEQ ID NO: 424938 - DNA, 30 bp, Artificial Sequence
  Synthetic oligonucleotide
gatttaaggcacgcctgcttaagtggtccc

SEQ ID NO: 424939 - DNA, 30 bp, Artificial Sequence
  Synthetic oligonucleotide
cggggctcttctcgtatacacctatgtccc

SEQ ID NO: 424940 - DNA, 30 bp, Artificial Sequence
  Synthetic oligonucleotide
cattttaccgcgctggtaatactgtgtccc

SEQ ID NO: 424941 - DNA, 30 bp, Artificial Sequence
  Synthetic oligonucleotide
cggggcacaattaccttatcggcttgtccc

SEQ ID NO: 424942 - DNA, 30 bp, Artificial Sequence
  Synthetic oligonucleotide
gcagggttcggactattcagcttttgtccc

SEQ ID NO: 424943 - DNA, 30 bp, Artificial Sequence
  Synthetic oligonucleotide
tttagatccacgaacagcggactaattccc

SEQ ID NO: 424944 - DNA, 30 bp, Artificial Sequence
  Synthetic oligonucleotide
agtaggactggtacgaggcggattattccc

SEQ ID NO: 424945 - DNA, 30 bp, Artificial Sequence
  Synthetic oligonucleotide
ggccaacgtacaagccgctcttttattccc

SEQ ID NO: 424946 - DNA, 31 bp, Artificial Sequence
  Synthetic oligonucleotide
tgagtagaatgtaagcgttattcgccttccc

SEQ ID NO: 424947 - DNA, 30 bp, Artificial Sequence
  Synthetic oligonucleotide
acggttaatagcacgaccgtcggtcttccc

SEQ ID NO: 424948 - DNA, 30 bp, Artificial Sequence
  Synthetic oligonucleotide
tcacattttggtctggccaggcaagttccc

SEQ ID NO: 424949 - DNA, 30 bp, Artificial Sequence
  Synthetic oligonucleotide
acgcattagagaacgttcataagagttccc

SEQ ID NO: 424950 - DNA, 30 bp, Artificial Sequence
  Synthetic oligonucleotide
gaataaaattggtgttaatggcgagttccc

SEQ ID NO: 424951 - DNA, 30 bp, Artificial Sequence
  Synthetic oligonucleotide
cggatcatgaacgtcctgtacgtagttccc

SEQ ID NO: 424952 - DNA, 30 bp, Artificial Sequence
  Synthetic oligonucleotide
attaaagtggggagacgcatgagcgttccc

SEQ ID NO: 424953 - DNA, 30 bp, Artificial Sequence
  Synthetic oligonucleotide
cactttgaatccccagagattaaggttccc

SEQ ID NO: 424954 - DNA, 30 bp, Artificial Sequence
  Synthetic oligonucleotide
atgatggattaatctctgttgctggttccc

SEQ ID NO: 424955 - DNA, 30 bp, Artificial Sequence
  Synthetic oligonucleotide
taaacttggagacgacaaactcttgttccc

SEQ ID NO: 424956 - DNA, 30 bp, Artificial Sequence
  Synthetic oligonucleotide
gcgagctggtctaatgttgtttaatttccc

SEQ ID NO: 424957 - DNA, 30 bp, Artificial Sequence
  Synthetic oligonucleotide
cgcgcatattccgtgagtattatatttccc

SEQ ID NO: 424958 - DNA, 30 bp, Artificial Sequence
  Synthetic oligonucleotide
aattaaatggttttggtagtgttatttccc

SEQ ID NO: 424959 - DNA, 30 bp, Artificial Sequence
  Synthetic oligonucleotide
taagagactgcataaagaacggtctttccc

SEQ ID NO: 424960 - DNA, 30 bp, Artificial Sequence
  Synthetic oligonucleotide
atgatccgcctaatttactcttagtttccc

SEQ ID NO: 424961 - DNA, 30 bp, Artificial Sequence
  Synthetic oligonucleotide
gttctgaaagcgagacacggggcttttccc

SEQ ID NO: 424962 - DNA, 30 bp, Artificial Sequence
  Synthetic oligonucleotide
cgattcgaccaattcaacgctcgttttccc

SEQ ID NO: 424963 - DNA, 30 bp, Artificial Sequence
  Synthetic oligonucleotide
gcttcgtgaaatagaataatcacaaaagcc

SEQ ID NO: 424964 - DNA, 30 bp, Artificial Sequence
  Synthetic oligonucleotide
accgcgtgcaagacagcatggcccaaagcc

SEQ ID NO: 424965 - DNA, 30 bp, Artificial Sequence
  Synthetic oligonucleotide
ttgcacccatttccttgttcggtcaaagcc

SEQ ID NO: 424966 - DNA, 30 bp, Artificial Sequence
  Synthetic oligonucleotide
acatcgtatggggcgcataaggttaaagcc

SEQ ID NO: 424967 - DNA, 30 bp, Artificial Sequence
  Synthetic oligonucleotide
tacgttactgcgcggccaatgtttaaagcc

SEQ ID NO: 424968 - DNA, 30 bp, Artificial Sequence
  Synthetic oligonucleotide
ctaacaggaatgtgcggtagctaacaagcc

SEQ ID NO: 424969 - DNA, 30 bp, Artificial Sequence
  Synthetic oligonucleotide
gccagcctcttgacgaatgtcgcacaagcc

SEQ ID NO: 424970 - DNA, 30 bp, Artificial Sequence
  Synthetic oligonucleotide
aaattttcaagggggtttaaggagcaagcc

SEQ ID NO: 424971 - DNA, 30 bp, Artificial Sequence
  Synthetic oligonucleotide
tttattcagtttaggaacgaactgcaagcc

SEQ ID NO: 424972 - DNA, 30 bp, Artificial Sequence
  Synthetic oligonucleotide
gatccggaccaagctcgcacaggtcaagcc

SEQ ID NO: 424973 - DNA, 30 bp, Artificial Sequence
  Synthetic oligonucleotide
tcgtacaagacgctgctagtccgagaagcc

SEQ ID NO: 424974 - DNA, 30 bp, Artificial Sequence
  Synthetic oligonucleotide
caatgctcccaatgacgcacacacgaagcc

SEQ ID NO: 424975 - DNA, 30 bp, Artificial Sequence
  Synthetic oligonucleotide
gaaatcgaccacgagattgtgcacgaagcc

SEQ ID NO: 424976 - DNA, 30 bp, Artificial Sequence
  Synthetic oligonucleotide
cttacacgtggtacgtcgtggtaggaagcc

SEQ ID NO: 424977 - DNA, 30 bp, Artificial Sequence
  Synthetic oligonucleotide
ctgaacaattcagggccttgtattgaagcc

SEQ ID NO: 424978 - DNA, 30 bp, Artificial Sequence
  Synthetic oligonucleotide
gtttgtctggcggagcgtttgccataagcc

SEQ ID NO: 424979 - DNA, 30 bp, Artificial Sequence
  Synthetic oligonucleotide
taaagatgttctggatgccttagctaagcc

SEQ ID NO: 424980 - DNA, 30 bp, Artificial Sequence
  Synthetic oligonucleotide
ccaatttttcacacgccgtgaacgtaagcc

SEQ ID NO: 424981 - DNA, 30 bp, Artificial Sequence
  Synthetic oligonucleotide
aagaacgatatgctgatgttgatgtaagcc

SEQ ID NO: 424982 - DNA, 30 bp, Artificial Sequence
  Synthetic oligonucleotide
agcgccacggctaagactatataaacagcc

SEQ ID NO: 424983 - DNA, 30 bp, Artificial Sequence
  Synthetic oligonucleotide
tagaaagcgtcctgatatgcaggaacagcc

SEQ ID NO: 424984 - DNA, 30 bp, Artificial Sequence
  Synthetic oligonucleotide
tactcccattgatcgctgaaagtgacagcc

SEQ ID NO: 424985 - DNA, 30 bp, Artificial Sequence
  Synthetic oligonucleotide
cttattgggtctcctctgctaagtacagcc

SEQ ID NO: 424986 - DNA, 30 bp, Artificial Sequence
  Synthetic oligonucleotide
cgttaattttttgcggacccacgtacagcc

SEQ ID NO: 424987 - DNA, 30 bp, Artificial Sequence
  Synthetic oligonucleotide
aacaatcctacttgattttattttacagcc

SEQ ID NO: 424988 - DNA, 30 bp, Artificial Sequence
  Synthetic oligonucleotide
gatgagcggttgatacgacaggcaccagcc

SEQ ID NO: 424989 - DNA, 30 bp, Artificial Sequence
  Synthetic oligonucleotide
ttttcactacccattaaaggctgcccagcc

SEQ ID NO: 424990 - DNA, 30 bp, Artificial Sequence
  Synthetic oligonucleotide
gctttatctgcttatactacaggtccagcc

SEQ ID NO: 424991 - DNA, 30 bp, Artificial Sequence
  Synthetic oligonucleotide
ttcagattcttggagccgcttattccagcc

SEQ ID NO: 424992 - DNA, 30 bp, Artificial Sequence
  Synthetic oligonucleotide
gttctattgcatcagacttctttagcagcc

SEQ ID NO: 424993 - DNA, 30 bp, Artificial Sequence
  Synthetic oligonucleotide
caactcacagaaccggcacaatacgcagcc

SEQ ID NO: 424994 - DNA, 30 bp, Artificial Sequence
  Synthetic oligonucleotide
tcgcattcgctccgcgtaagctacgcagcc

SEQ ID NO: 424995 - DNA, 30 bp, Artificial Sequence
  Synthetic oligonucleotide
ggctgtgatgcataagtagagatcgcagcc

SEQ ID NO: 424996 - DNA, 30 bp, Artificial Sequence
  Synthetic oligonucleotide
atcgctgcatcgaggtctgcagaggcagcc

SEQ ID NO: 424997 - DNA, 30 bp, Artificial Sequence
  Synthetic oligonucleotide
atcccaaggccggaagcagtaactgcagcc

SEQ ID NO: 424998 - DNA, 30 bp, Artificial Sequence
  Synthetic oligonucleotide
tcggtggggtacactgtaacgaaatcagcc

SEQ ID NO: 424999 - DNA, 30 bp, Artificial Sequence
  Synthetic oligonucleotide
aatggtaagccatcaggcgatcaatcagcc

SEQ ID NO: 425000 - DNA, 30 bp, Artificial Sequence
  Synthetic oligonucleotide
tgatccttggggggttctctcccatcagcc

SEQ ID NO: 425001 - DNA, 30 bp, Artificial Sequence
  Synthetic oligonucleotide
ttcaaataccaggggaacggttactcagcc

SEQ ID NO: 425002 - DNA, 30 bp, Artificial Sequence
  Synthetic oligonucleotide
tgtgtgtcctactgagtagcctgctcagcc

SEQ ID NO: 425003 - DNA, 30 bp, Artificial Sequence
  Synthetic oligonucleotide
atccggctctaagggagagggctctcagcc

SEQ ID NO: 425004 - DNA, 30 bp, Artificial Sequence
  Synthetic oligonucleotide
ccaaaaatagattgcacgccatggtcagcc

SEQ ID NO: 425005 - DNA, 30 bp, Artificial Sequence
  Synthetic oligonucleotide
ggcagggacgcacctaaacggcattcagcc

SEQ ID NO: 425006 - DNA, 30 bp, Artificial Sequence
  Synthetic oligonucleotide
gttgttcgccgcttcgctggggattcagcc

SEQ ID NO: 425007 - DNA, 30 bp, Artificial Sequence
  Synthetic oligonucleotide
gctaatagtacatattcgagtacttcagcc

SEQ ID NO: 425008 - DNA, 27 bp, Artificial Sequence
  Synthetic oligonucleotide
ttgcctgccgagtaaggccgaagagcc

SEQ ID NO: 425009 - DNA, 30 bp, Artificial Sequence
  Synthetic oligonucleotide
tccccgcgtcgatggtcttttcgaagagcc

SEQ ID NO: 425010 - DNA, 30 bp, Artificial Sequence
  Synthetic oligonucleotide
tctcgcagcgtacatacgcccaagagagcc

SEQ ID NO: 425011 - DNA, 30 bp, Artificial Sequence
  Synthetic oligonucleotide
gattggaaaccttgatcaagcgttagagcc

SEQ ID NO: 425012 - DNA, 30 bp, Artificial Sequence
  Synthetic oligonucleotide
aaccagcctttgtttacatatatacgagcc

SEQ ID NO: 425013 - DNA, 30 bp, Artificial Sequence
  Synthetic oligonucleotide
aaaagacactcccgtggtggggagcgagcc

SEQ ID NO: 425014 - DNA, 30 bp, Artificial Sequence
  Synthetic oligonucleotide
cttctacctagtttatgtttacgtcgagcc

SEQ ID NO: 425015 - DNA, 30 bp, Artificial Sequence
  Synthetic oligonucleotide
ggacttttgaagattagcgcgtttcgagcc

SEQ ID NO: 425016 - DNA, 30 bp, Artificial Sequence
  Synthetic oligonucleotide
gacagtttaagagtacttgtgacaggagcc

SEQ ID NO: 425017 - DNA, 30 bp, Artificial Sequence
  Synthetic oligonucleotide
agcatcggtgacaggaacaactcaggagcc

SEQ ID NO: 425018 - DNA, 30 bp, Artificial Sequence
  Synthetic oligonucleotide
tcccgctttcgtaccgaatcggacggagcc

SEQ ID NO: 425019 - DNA, 30 bp, Artificial Sequence
  Synthetic oligonucleotide
tgccgacgtagaaataaaaattccggagcc

SEQ ID NO: 425020 - DNA, 30 bp, Artificial Sequence
  Synthetic oligonucleotide
gcaaaaagcgcttgttcttgctgcggagcc

SEQ ID NO: 425021 - DNA, 30 bp, Artificial Sequence
  Synthetic oligonucleotide
cattaacaggccacgagcctgctgggagcc

SEQ ID NO: 425022 - DNA, 30 bp, Artificial Sequence
  Synthetic oligonucleotide
cgcacgcgacagaattttagcgtgggagcc

SEQ ID NO: 425023 - DNA, 30 bp, Artificial Sequence
  Synthetic oligonucleotide
gagagatagtaagcattgcacttgggagcc

SEQ ID NO: 425024 - DNA, 30 bp, Artificial Sequence
  Synthetic oligonucleotide
gcaggaaaagctggcaattgccttggagcc

SEQ ID NO: 425025 - DNA, 30 bp, Artificial Sequence
  Synthetic oligonucleotide
ctctttgtcctgtgttggttgtcatgagcc

SEQ ID NO: 425026 - DNA, 30 bp, Artificial Sequence
  Synthetic oligonucleotide
tcactaatgtccacgtttttccagtgagcc

SEQ ID NO: 425027 - DNA, 30 bp, Artificial Sequence
  Synthetic oligonucleotide
agtcgacctggtttgtaagccaggtgagcc

SEQ ID NO: 425028 - DNA, 30 bp, Artificial Sequence
  Synthetic oligonucleotide
gtcggctagccatcgtgatatatgtgagcc

SEQ ID NO: 425029 - DNA, 30 bp, Artificial Sequence
  Synthetic oligonucleotide
ttacacttaggagtggttaaccgttgagcc

SEQ ID NO: 425030 - DNA, 30 bp, Artificial Sequence
  Synthetic oligonucleotide
ttgattccagagtctgatggctaaatagcc

SEQ ID NO: 425031 - DNA, 30 bp, Artificial Sequence
  Synthetic oligonucleotide
acagccccaacgaatgaacaggcaatagcc

SEQ ID NO: 425032 - DNA, 30 bp, Artificial Sequence
  Synthetic oligonucleotide
gtatattcaacaagtgttagcttaatagcc

SEQ ID NO: 425033 - DNA, 30 bp, Artificial Sequence
  Synthetic oligonucleotide
gtaatggcatcttcgttaatgtagatagcc

SEQ ID NO: 425034 - DNA, 30 bp, Artificial Sequence
  Synthetic oligonucleotide
cggcgttttcacggtagcaaaatgatagcc

SEQ ID NO: 425035 - DNA, 30 bp, Artificial Sequence
  Synthetic oligonucleotide
gcattcttagggctatcttgtttgatagcc

SEQ ID NO: 425036 - DNA, 30 bp, Artificial Sequence
  Synthetic oligonucleotide
ggggattctagacgaggattcgctatagcc

SEQ ID NO: 425037 - DNA, 30 bp, Artificial Sequence
  Synthetic oligonucleotide
acaacaaaacctgcggtcgagtaactagcc

SEQ ID NO: 425038 - DNA, 30 bp, Artificial Sequence
  Synthetic oligonucleotide
tttcccgttaatacgcggcacttactagcc

SEQ ID NO: 425039 - DNA, 30 bp, Artificial Sequence
  Synthetic oligonucleotide
tggtaattgaatttatttccgactctagcc

SEQ ID NO: 425040 - DNA, 30 bp, Artificial Sequence
  Synthetic oligonucleotide
ttcctgtggtgagcgagggtagacgtagcc

SEQ ID NO: 425041 - DNA, 30 bp, Artificial Sequence
  Synthetic oligonucleotide
gccatgagtaaattcatgtagggcgtagcc

SEQ ID NO: 425042 - DNA, 30 bp, Artificial Sequence
  Synthetic oligonucleotide
gtgcgtcgatgacacgacggagtcgtagcc

SEQ ID NO: 425043 - DNA, 30 bp, Artificial Sequence
  Synthetic oligonucleotide
aacatgtccaggttgtactagtaggtagcc

SEQ ID NO: 425044 - DNA, 30 bp, Artificial Sequence
  Synthetic oligonucleotide
cagtctttcagatcaatactaacggtagcc

SEQ ID NO: 425045 - DNA, 30 bp, Artificial Sequence
  Synthetic oligonucleotide
ggcctgagagtatcggcaaatgcggtagcc

SEQ ID NO: 425046 - DNA, 30 bp, Artificial Sequence
  Synthetic oligonucleotide
ctgacctacggtcagtccatatcggtagcc

SEQ ID NO: 425047 - DNA, 30 bp, Artificial Sequence
  Synthetic oligonucleotide
tgaaaatctttcggcttaatcgttgtagcc

SEQ ID NO: 425048 - DNA, 30 bp, Artificial Sequence
  Synthetic oligonucleotide
gtcgaactgggattcacgtcactcttagcc

SEQ ID NO: 425049 - DNA, 30 bp, Artificial Sequence
  Synthetic oligonucleotide
ttggtgcgttctgcggcagtagtcttagcc

SEQ ID NO: 425050 - DNA, 30 bp, Artificial Sequence
  Synthetic oligonucleotide
actgtcttatttgaatggcttacaaacgcc

SEQ ID NO: 425051 - DNA, 30 bp, Artificial Sequence
  Synthetic oligonucleotide
atattgaggcattaagtgttagtaaacgcc

SEQ ID NO: 425052 - DNA, 30 bp, Artificial Sequence
  Synthetic oligonucleotide
cctcctttgatagtcaataaatgcaacgcc

SEQ ID NO: 425053 - DNA, 30 bp, Artificial Sequence
  Synthetic oligonucleotide
aatccggggatggtacgcggtctcaacgcc

SEQ ID NO: 425054 - DNA, 30 bp, Artificial Sequence
  Synthetic oligonucleotide
cttttctcgcctccttgttgaattaacgcc

SEQ ID NO: 425055 - DNA, 30 bp, Artificial Sequence
  Synthetic oligonucleotide
ggattcaaggttcaagaagacgaacacgcc

SEQ ID NO: 425056 - DNA, 30 bp, Artificial Sequence
  Synthetic oligonucleotide
aacataaaataccgtgcggttatacacgcc

SEQ ID NO: 425057 - DNA, 30 bp, Artificial Sequence
  Synthetic oligonucleotide
tgtgccaaagctgccaagaaactacacgcc

SEQ ID NO: 425058 - DNA, 30 bp, Artificial Sequence
  Synthetic oligonucleotide
ccggatgccggcacgcggtgtctccacgcc

SEQ ID NO: 425059 - DNA, 30 bp, Artificial Sequence
  Synthetic oligonucleotide
cactacggcgcgcgtcatcacacgcacgcc

SEQ ID NO: 425060 - DNA, 30 bp, Artificial Sequence
  Synthetic oligonucleotide
tcgcgggcaggttatcatgtatggcacgcc

SEQ ID NO: 425061 - DNA, 30 bp, Artificial Sequence
  Synthetic oligonucleotide
cgcgcagactagtcaatgtccttgcacgcc

SEQ ID NO: 425062 - DNA, 30 bp, Artificial Sequence
  Synthetic oligonucleotide
tagtctaaacaaagtctaaactcagacgcc

SEQ ID NO: 425063 - DNA, 30 bp, Artificial Sequence
  Synthetic oligonucleotide
cgtatacacctatacgctaccaacgacgcc

SEQ ID NO: 425064 - DNA, 30 bp, Artificial Sequence
  Synthetic oligonucleotide
atgtttagacattctcacggacccgacgcc

SEQ ID NO: 425065 - DNA, 30 bp, Artificial Sequence
  Synthetic oligonucleotide
aggggagagtggtatggctatagggacgcc

SEQ ID NO: 425066 - DNA, 30 bp, Artificial Sequence
  Synthetic oligonucleotide
tgcgtgcccggcgctcgctaccatgacgcc

SEQ ID NO: 425067 - DNA, 30 bp, Artificial Sequence
  Synthetic oligonucleotide
ataggagacggatccaacgcaactgacgcc

SEQ ID NO: 425068 - DNA, 30 bp, Artificial Sequence
  Synthetic oligonucleotide
aggcttacggtgctccacgagagatacgcc

SEQ ID NO: 425069 - DNA, 30 bp, Artificial Sequence
  Synthetic oligonucleotide
atcggtcatcagcatgaccaccgatacgcc

SEQ ID NO: 425070 - DNA, 30 bp, Artificial Sequence
  Synthetic oligonucleotide
ccttgtgagagagttgcagcagtgtacgcc

SEQ ID NO: 425071 - DNA, 30 bp, Artificial Sequence
  Synthetic oligonucleotide
tagcaattagacgtccggatggtttacgcc

SEQ ID NO: 425072 - DNA, 30 bp, Artificial Sequence
  Synthetic oligonucleotide
atttgagatactaaattggtcctcaccgcc

SEQ ID NO: 425073 - DNA, 30 bp, Artificial Sequence
  Synthetic oligonucleotide
gcgatagttgtatagtgggccactaccgcc

SEQ ID NO: 425074 - DNA, 30 bp, Artificial Sequence
  Synthetic oligonucleotide
gacgcatcagccagcttataaggtaccgcc

SEQ ID NO: 425075 - DNA, 30 bp, Artificial Sequence
  Synthetic oligonucleotide
gcctgcgtagcgcagtttccggcggccgcc

SEQ ID NO: 425076 - DNA, 30 bp, Artificial Sequence
  Synthetic oligonucleotide
acattattaaaggagaggggttgggccgcc

SEQ ID NO: 425077 - DNA, 30 bp, Artificial Sequence
  Synthetic oligonucleotide
agcaacgaactagcattgaattctgccgcc

SEQ ID NO: 425078 - DNA, 30 bp, Artificial Sequence
  Synthetic oligonucleotide
gttctttagattcccaagttaagtgccgcc

SEQ ID NO: 425079 - DNA, 30 bp, Artificial Sequence
  Synthetic oligonucleotide
tggtgtctggcccgatccctcagtgccgcc

SEQ ID NO: 425080 - DNA, 30 bp, Artificial Sequence
  Synthetic oligonucleotide
taccacgcaatctgcaccagcatatccgcc

SEQ ID NO: 425081 - DNA, 30 bp, Artificial Sequence
  Synthetic oligonucleotide
atgcgcctgtaatatactctattatccgcc

SEQ ID NO: 425082 - DNA, 30 bp, Artificial Sequence
  Synthetic oligonucleotide
ttttctgagcggggggttgccaactccgcc

SEQ ID NO: 425083 - DNA, 30 bp, Artificial Sequence
  Synthetic oligonucleotide
tcaacggtaagtgccaaccagcactccgcc

SEQ ID NO: 425084 - DNA, 30 bp, Artificial Sequence
  Synthetic oligonucleotide
gtccacgaaacaccccccgtcgactccgcc

SEQ ID NO: 425085 - DNA, 30 bp, Artificial Sequence
  Synthetic oligonucleotide
ccttggctccgcattcggaatctaagcgcc

SEQ ID NO: 425086 - DNA, 30 bp, Artificial Sequence
  Synthetic oligonucleotide
actcgcaaccgtgagcgcccggacagcgcc

SEQ ID NO: 425087 - DNA, 30 bp, Artificial Sequence
  Synthetic oligonucleotide
atggcgtatgctctatttcccacgagcgcc

SEQ ID NO: 425088 - DNA, 30 bp, Artificial Sequence
  Synthetic oligonucleotide
ggccgccttcaatatagacacgcgagcgcc

SEQ ID NO: 425089 - DNA, 30 bp, Artificial Sequence
  Synthetic oligonucleotide
gtatattgtaagagtcatgcttggagcgcc

SEQ ID NO: 425090 - DNA, 30 bp, Artificial Sequence
  Synthetic oligonucleotide
aagtctgatattccatcgtgggatagcgcc

SEQ ID NO: 425091 - DNA, 30 bp, Artificial Sequence
  Synthetic oligonucleotide
gtaggcgcgccggctcggtatggtagcgcc

SEQ ID NO: 425092 - DNA, 30 bp, Artificial Sequence
  Synthetic oligonucleotide
cgtgagctagcagcgcatagtcaacgcgcc

SEQ ID NO: 425093 - DNA, 30 bp, Artificial Sequence
  Synthetic oligonucleotide
ttctcgagactaacggtagatagacgcgcc

SEQ ID NO: 425094 - DNA, 30 bp, Artificial Sequence
  Synthetic oligonucleotide
agtgtaggcatactaacgcacttaggcgcc

SEQ ID NO: 425095 - DNA, 30 bp, Artificial Sequence
  Synthetic oligonucleotide
aatgtgttgggaaaaacttgaaggggcgcc

SEQ ID NO: 425096 - DNA, 30 bp, Artificial Sequence
  Synthetic oligonucleotide
ggcgtagaatggattctagtcaatggcgcc

SEQ ID NO: 425097 - DNA, 30 bp, Artificial Sequence
  Synthetic oligonucleotide
ccatatattggttatgggtgttatggcgcc

SEQ ID NO: 425098 - DNA, 30 bp, Artificial Sequence
  Synthetic oligonucleotide
gtacgaacctcgtattttttacaatgcgcc

SEQ ID NO: 425099 - DNA, 30 bp, Artificial Sequence
  Synthetic oligonucleotide
gttctaaatggctgttaaaggacatgcgcc

SEQ ID NO: 425100 - DNA, 30 bp, Artificial Sequence
  Synthetic oligonucleotide
ttcttaggcaaccatgacgtgcgatgcgcc

SEQ ID NO: 425101 - DNA, 30 bp, Artificial Sequence
  Synthetic oligonucleotide
gtaaatgggcgtccagttccaggatgcgcc

SEQ ID NO: 425102 - DNA, 30 bp, Artificial Sequence
  Synthetic oligonucleotide
cacaaggcgtgcgaaagttcggtatgcgcc

SEQ ID NO: 425103 - DNA, 30 bp, Artificial Sequence
  Synthetic oligonucleotide
ttcctatagtgcagcttcagcccctgcgcc

SEQ ID NO: 425104 - DNA, 30 bp, Artificial Sequence
  Synthetic oligonucleotide
cctgcgaagcctcgccaacggagctgcgcc

SEQ ID NO: 425105 - DNA, 30 bp, Artificial Sequence
  Synthetic oligonucleotide
gaggctgcagctaatctgatgacgtgcgcc

SEQ ID NO: 425106 - DNA, 30 bp, Artificial Sequence
  Synthetic oligonucleotide
atgcgggacgtaggactatggacttgcgcc

SEQ ID NO: 425107 - DNA, 30 bp, Artificial Sequence
  Synthetic oligonucleotide
ttatgagagcgcaactccgccccttgcgcc

SEQ ID NO: 425108 - DNA, 30 bp, Artificial Sequence
  Synthetic oligonucleotide
acgaagttgtcctgttgatggacaatcgcc

SEQ ID NO: 425109 - DNA, 30 bp, Artificial Sequence
  Synthetic oligonucleotide
cataaccgattgtcagaattggcaatcgcc

SEQ ID NO: 425110 - DNA, 30 bp, Artificial Sequence
  Synthetic oligonucleotide
gattcgattattagttggtgtcgtatcgcc

SEQ ID NO: 425111 - DNA, 30 bp, Artificial Sequence
  Synthetic oligonucleotide
cgccatgccctcggcgctgtagttatcgcc

SEQ ID NO: 425112 - DNA, 30 bp, Artificial Sequence
  Synthetic oligonucleotide
aaaatctagagtcgcaaggacttactcgcc

SEQ ID NO: 425113 - DNA, 30 bp, Artificial Sequence
  Synthetic oligonucleotide
cggcacgcacgacgtcttagagctctcgcc

SEQ ID NO: 425114 - DNA, 30 bp, Artificial Sequence
  Synthetic oligonucleotide
acgttacttcggacattcgataaagtcgcc

SEQ ID NO: 425115 - DNA, 30 bp, Artificial Sequence
  Synthetic oligonucleotide
aatgagggtactttcgctcttaaagtcgcc

SEQ ID NO: 425116 - DNA, 30 bp, Artificial Sequence
  Synthetic oligonucleotide
tagatatccttactgataaagcaattcgcc

SEQ ID NO: 425117 - DNA, 30 bp, Artificial Sequence
  Synthetic oligonucleotide
aacgtgtggccattttgaagtcaattcgcc

SEQ ID NO: 425118 - DNA, 30 bp, Artificial Sequence
  Synthetic oligonucleotide
aattcaataatcaagaggttgttattcgcc

SEQ ID NO: 425119 - DNA, 30 bp, Artificial Sequence
  Synthetic oligonucleotide
ttttgccgggcagttgagcgctgcttcgcc

SEQ ID NO: 425120 - DNA, 30 bp, Artificial Sequence
  Synthetic oligonucleotide
gcccggacgccaatcagagtcatcttcgcc

SEQ ID NO: 425121 - DNA, 30 bp, Artificial Sequence
  Synthetic oligonucleotide
gggcaatacgcacgggggcatttcttcgcc

SEQ ID NO: 425122 - DNA, 30 bp, Artificial Sequence
  Synthetic oligonucleotide
attgtcgtctatgataccttgcggttcgcc

SEQ ID NO: 425123 - DNA, 30 bp, Artificial Sequence
  Synthetic oligonucleotide
actaggctccattagttaagcaatttcgcc

SEQ ID NO: 425124 - DNA, 30 bp, Artificial Sequence
  Synthetic oligonucleotide
ataggcgagccaacggtatgtcttttcgcc

SEQ ID NO: 425125 - DNA, 30 bp, Artificial Sequence
  Synthetic oligonucleotide
ttctagtcgatcgacggcatagcaaaggcc

SEQ ID NO: 425126 - DNA, 30 bp, Artificial Sequence
  Synthetic oligonucleotide
cccgtggacctcacgctctttttaaaggcc

SEQ ID NO: 425127 - DNA, 30 bp, Artificial Sequence
  Synthetic oligonucleotide
gtcaggccagtacagtaataatccaaggcc

SEQ ID NO: 425128 - DNA, 30 bp, Artificial Sequence
  Synthetic oligonucleotide
ctatgagattaacaagggacatccaaggcc

SEQ ID NO: 425129 - DNA, 30 bp, Artificial Sequence
  Synthetic oligonucleotide
gttagttttataacgagggctttcaaggcc

SEQ ID NO: 425130 - DNA, 30 bp, Artificial Sequence
  Synthetic oligonucleotide
gtactggctataggccgaaacaagaaggcc

SEQ ID NO: 425131 - DNA, 30 bp, Artificial Sequence
  Synthetic oligonucleotide
ggagcataagctcctgagcgcgagaaggcc

SEQ ID NO: 425132 - DNA, 30 bp, Artificial Sequence
  Synthetic oligonucleotide
gtgtcgcgttagcgtttgacatcgaaggcc

SEQ ID NO: 425133 - DNA, 30 bp, Artificial Sequence
  Synthetic oligonucleotide
gaaggtacgctctgtgcttcaaggaaggcc

SEQ ID NO: 425134 - DNA, 30 bp, Artificial Sequence
  Synthetic oligonucleotide
gtctgtttcagttagccagtgaataaggcc

SEQ ID NO: 425135 - DNA, 30 bp, Artificial Sequence
  Synthetic oligonucleotide
tgtatccaaagagggtctgcttataaggcc

SEQ ID NO: 425136 - DNA, 30 bp, Artificial Sequence
  Synthetic oligonucleotide
tcaacatatactttctctgcctcacaggcc

SEQ ID NO: 425137 - DNA, 30 bp, Artificial Sequence
  Synthetic oligonucleotide
atatcaaagtaggcttgtcttggacaggcc

SEQ ID NO: 425138 - DNA, 30 bp, Artificial Sequence
  Synthetic oligonucleotide
cctagcatcgacgcggccgaagcccaggcc

SEQ ID NO: 425139 - DNA, 30 bp, Artificial Sequence
  Synthetic oligonucleotide
gttcataggtcgttggtacctgcccaggcc

SEQ ID NO: 425140 - DNA, 30 bp, Artificial Sequence
  Synthetic oligonucleotide
tccattccacgcatgtggtggagccaggcc

SEQ ID NO: 425141 - DNA, 30 bp, Artificial Sequence
  Synthetic oligonucleotide
cgcgcaccttattttaatgtctcgcaggcc

SEQ ID NO: 425142 - DNA, 30 bp, Artificial Sequence
  Synthetic oligonucleotide
gaatgttctagacagtacgcttcagaggcc

SEQ ID NO: 425143 - DNA, 30 bp, Artificial Sequence
  Synthetic oligonucleotide
taaaaaatttgggtacgtcagcgagaggcc

SEQ ID NO: 425144 - DNA, 30 bp, Artificial Sequence
  Synthetic oligonucleotide
gtatatgtaggtcgactaatcatagaggcc

SEQ ID NO: 425145 - DNA, 30 bp, Artificial Sequence
  Synthetic oligonucleotide
aatctattcgctaaggcatgatccgaggcc

SEQ ID NO: 425146 - DNA, 30 bp, Artificial Sequence
  Synthetic oligonucleotide
cttccacagtctatggcaacgtaggaggcc

SEQ ID NO: 425147 - DNA, 30 bp, Artificial Sequence
  Synthetic oligonucleotide
ttcgcagagcttaggtctcgaggggaggcc

SEQ ID NO: 425148 - DNA, 30 bp, Artificial Sequence
  Synthetic oligonucleotide
ccatatgctgagatttatgcagtggaggcc

SEQ ID NO: 425149 - DNA, 30 bp, Artificial Sequence
  Synthetic oligonucleotide
cgcaatagtttaggtctagaacctgaggcc

SEQ ID NO: 425150 - DNA, 30 bp, Artificial Sequence
  Synthetic oligonucleotide
tgatttcgccagcatctatggagtgaggcc

SEQ ID NO: 425151 - DNA, 30 bp, Artificial Sequence
  Synthetic oligonucleotide
cttgacaatctccacaaatgggttgaggcc

SEQ ID NO: 425152 - DNA, 30 bp, Artificial Sequence
  Synthetic oligonucleotide
cttgcacggagtgagcggtgagcataggcc

SEQ ID NO: 425153 - DNA, 30 bp, Artificial Sequence
  Synthetic oligonucleotide
agcataaggctcaaaaagcccgcataggcc

SEQ ID NO: 425154 - DNA, 30 bp, Artificial Sequence
  Synthetic oligonucleotide
tgaggaaatctaaaagaggcgttataggcc

SEQ ID NO: 425155 - DNA, 30 bp, Artificial Sequence
  Synthetic oligonucleotide
aaaaatgctaacgaaaagctgtactaggcc

SEQ ID NO: 425156 - DNA, 30 bp, Artificial Sequence
  Synthetic oligonucleotide
aaggggccacctcaatatggcccctaggcc

SEQ ID NO: 425157 - DNA, 30 bp, Artificial Sequence
  Synthetic oligonucleotide
atattctacactggaacctgcccctaggcc

SEQ ID NO: 425158 - DNA, 30 bp, Artificial Sequence
  Synthetic oligonucleotide
aggggcatatttatgcgtaaacgctaggcc

SEQ ID NO: 425159 - DNA, 30 bp, Artificial Sequence
  Synthetic oligonucleotide
gcgctcttggaaggagtacgggggtaggcc

SEQ ID NO: 425160 - DNA, 30 bp, Artificial Sequence
  Synthetic oligonucleotide
tcttaaatggggggttaacctaattaggcc

SEQ ID NO: 425161 - DNA, 30 bp, Artificial Sequence
  Synthetic oligonucleotide
cgttggctagtatgtagtgcctgttaggcc

SEQ ID NO: 425162 - DNA, 30 bp, Artificial Sequence
  Synthetic oligonucleotide
agggtgagcggacgcttcttattttaggcc

SEQ ID NO: 425163 - DNA, 30 bp, Artificial Sequence
  Synthetic oligonucleotide
attattatgtatttgacgggctccacggcc

SEQ ID NO: 425164 - DNA, 30 bp, Artificial Sequence
  Synthetic oligonucleotide
caggtggtagcgccacggttccgcacggcc

SEQ ID NO: 425165 - DNA, 30 bp, Artificial Sequence
  Synthetic oligonucleotide
gaataaaggccagagtatggggtcacggcc

SEQ ID NO: 425166 - DNA, 30 bp, Artificial Sequence
  Synthetic oligonucleotide
gacatatgtacaaacgtcagaatcccggcc

SEQ ID NO: 425167 - DNA, 30 bp, Artificial Sequence
  Synthetic oligonucleotide
ttctctatatctaatagagtaggagcggcc

SEQ ID NO: 425168 - DNA, 30 bp, Artificial Sequence
  Synthetic oligonucleotide
ttcaatggtatcatatatcgttgcgcggcc

SEQ ID NO: 425169 - DNA, 30 bp, Artificial Sequence
  Synthetic oligonucleotide
ctagcatacgattatatataaggggcggcc

SEQ ID NO: 425170 - DNA, 30 bp, Artificial Sequence
  Synthetic oligonucleotide
caccgctctctggtcattcccggggcggcc

SEQ ID NO: 425171 - DNA, 30 bp, Artificial Sequence
  Synthetic oligonucleotide
cgcgtactacatttacgttaggtggcggcc

SEQ ID NO: 425172 - DNA, 30 bp, Artificial Sequence
  Synthetic oligonucleotide
ttccattctcttcgtacatagattgcggcc

SEQ ID NO: 425173 - DNA, 30 bp, Artificial Sequence
  Synthetic oligonucleotide
gcttaggtgctgtgggtcaccgttgcggcc

SEQ ID NO: 425174 - DNA, 30 bp, Artificial Sequence
  Synthetic oligonucleotide
tccgtagcttctaaggcccctcaatcggcc

SEQ ID NO: 425175 - DNA, 30 bp, Artificial Sequence
  Synthetic oligonucleotide
tttgtgggacacaacacggctcagtcggcc

SEQ ID NO: 425176 - DNA, 30 bp, Artificial Sequence
  Synthetic oligonucleotide
ttccggcacacgcttgcgcacagaagggcc

SEQ ID NO: 425177 - DNA, 30 bp, Artificial Sequence
  Synthetic oligonucleotide
ccatggttcgaacaggccgacataagggcc

SEQ ID NO: 425178 - DNA, 30 bp, Artificial Sequence
  Synthetic oligonucleotide
gttggtacacccttggcgttgctaagggcc

SEQ ID NO: 425179 - DNA, 30 bp, Artificial Sequence
  Synthetic oligonucleotide
acctatgtgcacaaacgacacgacagggcc

SEQ ID NO: 425180 - DNA, 30 bp, Artificial Sequence
  Synthetic oligonucleotide
atggaagttacgtgcctttctcgtagggcc

SEQ ID NO: 425181 - DNA, 30 bp, Artificial Sequence
  Synthetic oligonucleotide
aagtcggtctcacgtagcagctgtagggcc

SEQ ID NO: 425182 - DNA, 30 bp, Artificial Sequence
  Synthetic oligonucleotide
ggttttatccatagacccagcaaacgggcc

SEQ ID NO: 425183 - DNA, 30 bp, Artificial Sequence
  Synthetic oligonucleotide
ctgagttcagtacagtgatttcaacgggcc

SEQ ID NO: 425184 - DNA, 30 bp, Artificial Sequence
  Synthetic oligonucleotide
taacaagcggggacctaagtcttacgggcc

SEQ ID NO: 425185 - DNA, 30 bp, Artificial Sequence
  Synthetic oligonucleotide
gcatagatcgcatatgtcccgcaccgggcc

SEQ ID NO: 425186 - DNA, 27 bp, Artificial Sequence
  Synthetic oligonucleotide
tggggattcccctgtgtgacaggggcc

SEQ ID NO: 425187 - DNA, 30 bp, Artificial Sequence
  Synthetic oligonucleotide
ttagcccccttctttcatgcaagaggggcc

SEQ ID NO: 425188 - DNA, 30 bp, Artificial Sequence
  Synthetic oligonucleotide
gacgtatatcaaggttaaacgtacggggcc

SEQ ID NO: 425189 - DNA, 30 bp, Artificial Sequence
  Synthetic oligonucleotide
tagaagggtatttaaaattcagcgggggcc

SEQ ID NO: 425190 - DNA, 30 bp, Artificial Sequence
  Synthetic oligonucleotide
gcacaacattaaggtggggtcaggggggcc

SEQ ID NO: 425191 - DNA, 30 bp, Artificial Sequence
  Synthetic oligonucleotide
cttcgtactccgtaacaagtcatgggggcc

SEQ ID NO: 425192 - DNA, 30 bp, Artificial Sequence
  Synthetic oligonucleotide
ggcagggctttgacaacacaaaaatgggcc

SEQ ID NO: 425193 - DNA, 30 bp, Artificial Sequence
  Synthetic oligonucleotide
catgtgagaatctgatttgacgcaatggcc

SEQ ID NO: 425194 - DNA, 30 bp, Artificial Sequence
  Synthetic oligonucleotide
cataaacgttgatatacgtgctacatggcc

SEQ ID NO: 425195 - DNA, 30 bp, Artificial Sequence
  Synthetic oligonucleotide
tatttgcgccgatgaaactgacccatggcc

SEQ ID NO: 425196 - DNA, 30 bp, Artificial Sequence
  Synthetic oligonucleotide
ccttaagccattaacggcgacggcatggcc

SEQ ID NO: 425197 - DNA, 30 bp, Artificial Sequence
  Synthetic oligonucleotide
ggaaaaatttgttgagagcggctcatggcc

SEQ ID NO: 425198 - DNA, 30 bp, Artificial Sequence
  Synthetic oligonucleotide
taggacttttgcaggtcatggaagatggcc

SEQ ID NO: 425199 - DNA, 30 bp, Artificial Sequence
  Synthetic oligonucleotide
ggcgtcaggcgcggtagttctacgatggcc

SEQ ID NO: 425200 - DNA, 30 bp, Artificial Sequence
  Synthetic oligonucleotide
cagcggctccatcactaaaataatatggcc

SEQ ID NO: 425201 - DNA, 30 bp, Artificial Sequence
  Synthetic oligonucleotide
gggtcagcgagcctatcaacggatatggcc

SEQ ID NO: 425202 - DNA, 30 bp, Artificial Sequence
  Synthetic oligonucleotide
gggggtgaaaatcaagggcgtgatatggcc

SEQ ID NO: 425203 - DNA, 30 bp, Artificial Sequence
  Synthetic oligonucleotide
actagggcatattgccgcggatctatggcc

SEQ ID NO: 425204 - DNA, 30 bp, Artificial Sequence
  Synthetic oligonucleotide
taggagactcgggtctttccgattatggcc

SEQ ID NO: 425205 - DNA, 30 bp, Artificial Sequence
  Synthetic oligonucleotide
caccccgcctggaggggggcaacactggcc

SEQ ID NO: 425206 - DNA, 30 bp, Artificial Sequence
  Synthetic oligonucleotide
gaccttaaaatctacggttttagactggcc

SEQ ID NO: 425207 - DNA, 30 bp, Artificial Sequence
  Synthetic oligonucleotide
gttttattcccggactcaccaaccctggcc

SEQ ID NO: 425208 - DNA, 30 bp, Artificial Sequence
  Synthetic oligonucleotide
cctctttcaggtgtgacaaagatcctggcc

SEQ ID NO: 425209 - DNA, 30 bp, Artificial Sequence
  Synthetic oligonucleotide
caggagagccggtctagaccagctctggcc

SEQ ID NO: 425210 - DNA, 30 bp, Artificial Sequence
  Synthetic oligonucleotide
ctcgtgtacggttcctgtcatgttctggcc

SEQ ID NO: 425211 - DNA, 30 bp, Artificial Sequence
  Synthetic oligonucleotide
tacagcaatattggaaactagaacgtggcc

SEQ ID NO: 425212 - DNA, 30 bp, Artificial Sequence
  Synthetic oligonucleotide
agatgtaatgctcttacagatacggtggcc

SEQ ID NO: 425213 - DNA, 30 bp, Artificial Sequence
  Synthetic oligonucleotide
gatcctgcgccctgtacagcatcggtggcc

SEQ ID NO: 425214 - DNA, 30 bp, Artificial Sequence
  Synthetic oligonucleotide
cagtgggcaatcggtcaagacgaattggcc

SEQ ID NO: 425215 - DNA, 30 bp, Artificial Sequence
  Synthetic oligonucleotide
tcatgggatagatgctacgcagacttggcc

SEQ ID NO: 425216 - DNA, 30 bp, Artificial Sequence
  Synthetic oligonucleotide
tgcacgctaggcgaaccggactacttggcc

SEQ ID NO: 425217 - DNA, 30 bp, Artificial Sequence
  Synthetic oligonucleotide
ggtcatcccaatcagttcgagttcaatgcc

SEQ ID NO: 425218 - DNA, 30 bp, Artificial Sequence
  Synthetic oligonucleotide
tgccagggctttgccaaagcaaagaatgcc

SEQ ID NO: 425219 - DNA, 30 bp, Artificial Sequence
  Synthetic oligonucleotide
tcggtcatcggactatgttccgggaatgcc

SEQ ID NO: 425220 - DNA, 30 bp, Artificial Sequence
  Synthetic oligonucleotide
ctccatagagtccggtactactctaatgcc

SEQ ID NO: 425221 - DNA, 30 bp, Artificial Sequence
  Synthetic oligonucleotide
ggctgcttgttagtcaacggtagtaatgcc

SEQ ID NO: 425222 - DNA, 30 bp, Artificial Sequence
  Synthetic oligonucleotide
attagagtcaattaacgtaccgttaatgcc

SEQ ID NO: 425223 - DNA, 30 bp, Artificial Sequence
  Synthetic oligonucleotide
gcccaagtttcccacatcgatggacatgcc

SEQ ID NO: 425224 - DNA, 30 bp, Artificial Sequence
  Synthetic oligonucleotide
ctcccatatacggcgctgcctgaccatgcc

SEQ ID NO: 425225 - DNA, 30 bp, Artificial Sequence
  Synthetic oligonucleotide
ctaataagggacctggaaacaccccatgcc

SEQ ID NO: 425226 - DNA, 30 bp, Artificial Sequence
  Synthetic oligonucleotide
gtattgtgtcatagaaagacagagcatgcc

SEQ ID NO: 425227 - DNA, 30 bp, Artificial Sequence
  Synthetic oligonucleotide
ctcacttggcacgtactaacctctcatgcc

SEQ ID NO: 425228 - DNA, 30 bp, Artificial Sequence
  Synthetic oligonucleotide
tgtcctacgaaaccccattccgcggatgcc

SEQ ID NO: 425229 - DNA, 30 bp, Artificial Sequence
  Synthetic oligonucleotide
aacgggtaccaaagcacgtgcttggatgcc

SEQ ID NO: 425230 - DNA, 30 bp, Artificial Sequence
  Synthetic oligonucleotide
accccggctcgtcgcgagaacccatatgcc

SEQ ID NO: 425231 - DNA, 30 bp, Artificial Sequence
  Synthetic oligonucleotide
agcggtatatgtcgtcgtaagacgtatgcc

SEQ ID NO: 425232 - DNA, 30 bp, Artificial Sequence
  Synthetic oligonucleotide
ctagatcatccgtcatacctccattatgcc

SEQ ID NO: 425233 - DNA, 30 bp, Artificial Sequence
  Synthetic oligonucleotide
gaagctcttaatagttgtagcacttatgcc

SEQ ID NO: 425234 - DNA, 30 bp, Artificial Sequence
  Synthetic oligonucleotide
tgcctatcttgagtagtgcccccaactgcc

SEQ ID NO: 425235 - DNA, 30 bp, Artificial Sequence
  Synthetic oligonucleotide
aattgttcggaaaactggccaagaactgcc

SEQ ID NO: 425236 - DNA, 30 bp, Artificial Sequence
  Synthetic oligonucleotide
tgggataagacgctcatcagtcgaactgcc

SEQ ID NO: 425237 - DNA, 30 bp, Artificial Sequence
  Synthetic oligonucleotide
tagacttaatgtccggctgaacgcactgcc

SEQ ID NO: 425238 - DNA, 30 bp, Artificial Sequence
  Synthetic oligonucleotide
ttttagctgaagactttattaaaccctgcc

SEQ ID NO: 425239 - DNA, 30 bp, Artificial Sequence
  Synthetic oligonucleotide
ccccgtaatcccttcacccaagaccctgcc

SEQ ID NO: 425240 - DNA, 30 bp, Artificial Sequence
  Synthetic oligonucleotide
tgtataggaagcttttgcctatatcctgcc

SEQ ID NO: 425241 - DNA, 30 bp, Artificial Sequence
  Synthetic oligonucleotide
ggttgtcggtacccgataacgtatcctgcc

SEQ ID NO: 425242 - DNA, 30 bp, Artificial Sequence
  Synthetic oligonucleotide
catgggccagggaaccttcattatcctgcc

SEQ ID NO: 425243 - DNA, 30 bp, Artificial Sequence
  Synthetic oligonucleotide
agaaggagttcgtcagccaggggtcctgcc

SEQ ID NO: 425244 - DNA, 30 bp, Artificial Sequence
  Synthetic oligonucleotide
atgtcatcataggtctagcattcagctgcc

SEQ ID NO: 425245 - DNA, 30 bp, Artificial Sequence
  Synthetic oligonucleotide
ggactttttcttgctttggcgtgagctgcc

SEQ ID NO: 425246 - DNA, 30 bp, Artificial Sequence
  Synthetic oligonucleotide
ttatcattgcagccattggcaatagctgcc

SEQ ID NO: 425247 - DNA, 30 bp, Artificial Sequence
  Synthetic oligonucleotide
ttactggaccactcgtgacaaaacgctgcc

SEQ ID NO: 425248 - DNA, 30 bp, Artificial Sequence
  Synthetic oligonucleotide
aaggacaataatgccgcatcagacgctgcc

SEQ ID NO: 425249 - DNA, 30 bp, Artificial Sequence
  Synthetic oligonucleotide
ccaagtacgtatctttcgtcaaccgctgcc

SEQ ID NO: 425250 - DNA, 30 bp, Artificial Sequence
  Synthetic oligonucleotide
cgggctctacaatcgcatgagggcgctgcc

SEQ ID NO: 425251 - DNA, 30 bp, Artificial Sequence
  Synthetic oligonucleotide
gtttttaacgagacgcccaagtaggctgcc

SEQ ID NO: 425252 - DNA, 30 bp, Artificial Sequence
  Synthetic oligonucleotide
catattacatagactatccagggggctgcc

SEQ ID NO: 425253 - DNA, 30 bp, Artificial Sequence
  Synthetic oligonucleotide
tggtacaatagtctgtgagctgaatctgcc

SEQ ID NO: 425254 - DNA, 30 bp, Artificial Sequence
  Synthetic oligonucleotide
ccgcattgggctgcaagagactactctgcc

SEQ ID NO: 425255 - DNA, 30 bp, Artificial Sequence
  Synthetic oligonucleotide
cttttttgtcaggcgcatgagttgtctgcc

SEQ ID NO: 425256 - DNA, 30 bp, Artificial Sequence
  Synthetic oligonucleotide
tcgtgttgcactcatgtcggagtttctgcc

SEQ ID NO: 425257 - DNA, 30 bp, Artificial Sequence
  Synthetic oligonucleotide
aatgagtgaagtcccgttcgcttttctgcc

SEQ ID NO: 425258 - DNA, 30 bp, Artificial Sequence
  Synthetic oligonucleotide
cggcgcggaaggctgcggattaacagtgcc

SEQ ID NO: 425259 - DNA, 30 bp, Artificial Sequence
  Synthetic oligonucleotide
ctcttcggtgacagttggacatagagtgcc

SEQ ID NO: 425260 - DNA, 30 bp, Artificial Sequence
  Synthetic oligonucleotide
attcaattaggagtggcaacgaatagtgcc

SEQ ID NO: 425261 - DNA, 30 bp, Artificial Sequence
  Synthetic oligonucleotide
tcctgttcgctattgagggcacatagtgcc

SEQ ID NO: 425262 - DNA, 30 bp, Artificial Sequence
  Synthetic oligonucleotide
ggttgtaagttctagactgccattagtgcc

SEQ ID NO: 425263 - DNA, 30 bp, Artificial Sequence
  Synthetic oligonucleotide
gacttttctgcaaactgatatgttagtgcc

SEQ ID NO: 425264 - DNA, 30 bp, Artificial Sequence
  Synthetic oligonucleotide
tgtcatgtgattgtcatgaacaaacgtgcc

SEQ ID NO: 425265 - DNA, 30 bp, Artificial Sequence
  Synthetic oligonucleotide
agtccgctaagggttcccggtcaacgtgcc

SEQ ID NO: 425266 - DNA, 30 bp, Artificial Sequence
  Synthetic oligonucleotide
gcgggctgcggtcgtccaccgttccgtgcc

SEQ ID NO: 425267 - DNA, 30 bp, Artificial Sequence
  Synthetic oligonucleotide
aggtaccattcacggcggtacacgcgtgcc

SEQ ID NO: 425268 - DNA, 30 bp, Artificial Sequence
  Synthetic oligonucleotide
ctcaaaagtaggtaggtggacgcgcgtgcc

SEQ ID NO: 425269 - DNA, 30 bp, Artificial Sequence
  Synthetic oligonucleotide
gtgtgagtcgctagggcctacaatcgtgcc

SEQ ID NO: 425270 - DNA, 30 bp, Artificial Sequence
  Synthetic oligonucleotide
ttgtcatagggggacgatggatttcgtgcc

SEQ ID NO: 425271 - DNA, 30 bp, Artificial Sequence
  Synthetic oligonucleotide
gttgtcggacatccgccagataaaggtgcc

SEQ ID NO: 425272 - DNA, 30 bp, Artificial Sequence
  Synthetic oligonucleotide
tttgaattagctaaaaaccacggaggtgcc

SEQ ID NO: 425273 - DNA, 30 bp, Artificial Sequence
  Synthetic oligonucleotide
acatccgaaagcatggctcgcaacggtgcc

SEQ ID NO: 425274 - DNA, 30 bp, Artificial Sequence
  Synthetic oligonucleotide
aacctaatgtcagttagggaaatcggtgcc

SEQ ID NO: 425275 - DNA, 30 bp, Artificial Sequence
  Synthetic oligonucleotide
accaaagtaaaacgcactgagccgggtgcc

SEQ ID NO: 425276 - DNA, 30 bp, Artificial Sequence
  Synthetic oligonucleotide
agcggagacgacagccaggtcctgggtgcc

SEQ ID NO: 425277 - DNA, 30 bp, Artificial Sequence
  Synthetic oligonucleotide
ttgtacactgtcgtatcattaaaatgtgcc

SEQ ID NO: 425278 - DNA, 30 bp, Artificial Sequence
  Synthetic oligonucleotide
tagccagctgtacaccgggtgacatgtgcc

SEQ ID NO: 425279 - DNA, 30 bp, Artificial Sequence
  Synthetic oligonucleotide
ccgagtagtgacctgccggacagctgtgcc

SEQ ID NO: 425280 - DNA, 30 bp, Artificial Sequence
  Synthetic oligonucleotide
ccacggtctgtcagtcttgatttctgtgcc

SEQ ID NO: 425281 - DNA, 31 bp, Artificial Sequence
  Synthetic oligonucleotide
aaggctttacttcggggaagctcccattgcc

SEQ ID NO: 425282 - DNA, 30 bp, Artificial Sequence
  Synthetic oligonucleotide
agacgttttttcacaagcgtatctattgcc

SEQ ID NO: 425283 - DNA, 30 bp, Artificial Sequence
  Synthetic oligonucleotide
tgatggtcaaggacgcgtggcagacttgcc

SEQ ID NO: 425284 - DNA, 30 bp, Artificial Sequence
  Synthetic oligonucleotide
atctatatgcgtgggactgtggcccttgcc

SEQ ID NO: 425285 - DNA, 30 bp, Artificial Sequence
  Synthetic oligonucleotide
ggtcctagcttagaccctgagagccttgcc

SEQ ID NO: 425286 - DNA, 30 bp, Artificial Sequence
  Synthetic oligonucleotide
agatttggatgaggctatgcttttcttgcc

SEQ ID NO: 425287 - DNA, 30 bp, Artificial Sequence
  Synthetic oligonucleotide
gcacattaatagggcttccagccagttgcc

SEQ ID NO: 425288 - DNA, 31 bp, Artificial Sequence
  Synthetic oligonucleotide
tctgggttcttggtcctcagctaccgttgcc

SEQ ID NO: 425289 - DNA, 30 bp, Artificial Sequence
  Synthetic oligonucleotide
ccgcgctgggggcaggacacccgcgttgcc

SEQ ID NO: 425290 - DNA, 30 bp, Artificial Sequence
  Synthetic oligonucleotide
acatcgacacggagacgcagagaggttgcc

SEQ ID NO: 425291 - DNA, 30 bp, Artificial Sequence
  Synthetic oligonucleotide
gcaattcggggggtgccaaaaacggttgcc

SEQ ID NO: 425292 - DNA, 30 bp, Artificial Sequence
  Synthetic oligonucleotide
agtagtaagttattgcatcaccgggttgcc

SEQ ID NO: 425293 - DNA, 30 bp, Artificial Sequence
  Synthetic oligonucleotide
atagaattttgagcactggaaatggttgcc

SEQ ID NO: 425294 - DNA, 30 bp, Artificial Sequence
  Synthetic oligonucleotide
atttccgagatctgagtaatcagatttgcc

SEQ ID NO: 425295 - DNA, 30 bp, Artificial Sequence
  Synthetic oligonucleotide
atagcgagtacgatttattagacgtttgcc

SEQ ID NO: 425296 - DNA, 30 bp, Artificial Sequence
  Synthetic oligonucleotide
aagcgtatcagctggttggcgaggtttgcc

SEQ ID NO: 425297 - DNA, 30 bp, Artificial Sequence
  Synthetic oligonucleotide
atgactaaggtattataagttaggtttgcc

SEQ ID NO: 425298 - DNA, 30 bp, Artificial Sequence
  Synthetic oligonucleotide
gcacctcgttgaaattaaacgaattttgcc

SEQ ID NO: 425299 - DNA, 30 bp, Artificial Sequence
  Synthetic oligonucleotide
cctaaattgtcaatcttataacgttttgcc

SEQ ID NO: 425300 - DNA, 30 bp, Artificial Sequence
  Synthetic oligonucleotide
caggctcaaagcatatgactattttttgcc

SEQ ID NO: 425301 - DNA, 30 bp, Artificial Sequence
  Synthetic oligonucleotide
gcgagtttctacgcctagcacttttttgcc

SEQ ID NO: 425302 - DNA, 30 bp, Artificial Sequence
  Synthetic oligonucleotide
tcacaactttttctgggaaattcaaaatcc

SEQ ID NO: 425303 - DNA, 30 bp, Artificial Sequence
  Synthetic oligonucleotide
tgtggccggtgtataccaggttaacaatcc

SEQ ID NO: 425304 - DNA, 30 bp, Artificial Sequence
  Synthetic oligonucleotide
cgagcttgggctatctggcaaagacaatcc

SEQ ID NO: 425305 - DNA, 30 bp, Artificial Sequence
  Synthetic oligonucleotide
ggtccggcgcggatgggcaaataccaatcc

SEQ ID NO: 425306 - DNA, 30 bp, Artificial Sequence
  Synthetic oligonucleotide
aaagtaagtgagtacgaacatacgcaatcc

SEQ ID NO: 425307 - DNA, 30 bp, Artificial Sequence
  Synthetic oligonucleotide
attagcatcttagacaagtaatgtcaatcc

SEQ ID NO: 425308 - DNA, 30 bp, Artificial Sequence
  Synthetic oligonucleotide
gataagctttaccataggaacaaggaatcc

SEQ ID NO: 425309 - DNA, 30 bp, Artificial Sequence
  Synthetic oligonucleotide
tcttatgcgccgggtttcggtcaggaatcc

SEQ ID NO: 425310 - DNA, 30 bp, Artificial Sequence
  Synthetic oligonucleotide
gttatagccttggaggatatttaggaatcc

SEQ ID NO: 425311 - DNA, 27 bp, Artificial Sequence
  Synthetic oligonucleotide
ctatactcacgagtcctaaatgaatcc

SEQ ID NO: 425312 - DNA, 30 bp, Artificial Sequence
  Synthetic oligonucleotide
ccagattggtcagttaaggagaaataatcc

SEQ ID NO: 425313 - DNA, 30 bp, Artificial Sequence
  Synthetic oligonucleotide
tcttaggctctataggccagaacataatcc

SEQ ID NO: 425314 - DNA, 30 bp, Artificial Sequence
  Synthetic oligonucleotide
gtgtcggcggcctccgaagacatctaatcc

SEQ ID NO: 425315 - DNA, 30 bp, Artificial Sequence
  Synthetic oligonucleotide
ataagagcttgggctacgtagttctaatcc

SEQ ID NO: 425316 - DNA, 30 bp, Artificial Sequence
  Synthetic oligonucleotide
tctggggttgcgggaggtcattagtaatcc

SEQ ID NO: 425317 - DNA, 30 bp, Artificial Sequence
  Synthetic oligonucleotide
aattcaaaaaatgcctttccagaaacatcc

SEQ ID NO: 425318 - DNA, 30 bp, Artificial Sequence
  Synthetic oligonucleotide
gtcggtaatgctgaccatgtaataacatcc

SEQ ID NO: 425319 - DNA, 30 bp, Artificial Sequence
  Synthetic oligonucleotide
tacttaccccagaaccacagaatcacatcc

SEQ ID NO: 425320 - DNA, 30 bp, Artificial Sequence
  Synthetic oligonucleotide
tttggattcgcatttgtatgggcgacatcc

SEQ ID NO: 425321 - DNA, 30 bp, Artificial Sequence
  Synthetic oligonucleotide
tgaaattatactcatcacttagatacatcc

SEQ ID NO: 425322 - DNA, 30 bp, Artificial Sequence
  Synthetic oligonucleotide
gtgtcctatctggtttagacttaaccatcc

SEQ ID NO: 425323 - DNA, 30 bp, Artificial Sequence
  Synthetic oligonucleotide
tgcagacttttccctgcgcgaagcccatcc

SEQ ID NO: 425324 - DNA, 30 bp, Artificial Sequence
  Synthetic oligonucleotide
gggcgtcctagcattccacaatggccatcc

SEQ ID NO: 425325 - DNA, 30 bp, Artificial Sequence
  Synthetic oligonucleotide
tcctgacgctacatcggatgagtagcatcc

SEQ ID NO: 425326 - DNA, 30 bp, Artificial Sequence
  Synthetic oligonucleotide
gaccaggggaaacgcgtggttcacgcatcc

SEQ ID NO: 425327 - DNA, 30 bp, Artificial Sequence
  Synthetic oligonucleotide
aatggctaggccggtcacaagtgcgcatcc

SEQ ID NO: 425328 - DNA, 30 bp, Artificial Sequence
  Synthetic oligonucleotide
tactgaaactagcaccttgtcatcgcatcc

SEQ ID NO: 425329 - DNA, 30 bp, Artificial Sequence
  Synthetic oligonucleotide
taggttattcaggtatacaaactcgcatcc

SEQ ID NO: 425330 - DNA, 30 bp, Artificial Sequence
  Synthetic oligonucleotide
aggggtccttggttcgcaagggtcgcatcc

SEQ ID NO: 425331 - DNA, 30 bp, Artificial Sequence
  Synthetic oligonucleotide
gtgatccgttaagactctacttcggcatcc

SEQ ID NO: 425332 - DNA, 30 bp, Artificial Sequence
  Synthetic oligonucleotide
caccaacttggtcggtttgatagtgcatcc

SEQ ID NO: 425333 - DNA, 30 bp, Artificial Sequence
  Synthetic oligonucleotide
aggtatgtgagcaggaagaccaaatcatcc

SEQ ID NO: 425334 - DNA, 30 bp, Artificial Sequence
  Synthetic oligonucleotide
ataggcctgcttcgggataatggttcatcc

SEQ ID NO: 425335 - DNA, 30 bp, Artificial Sequence
  Synthetic oligonucleotide
caacaccgaacaggccgtaatttttcatcc

SEQ ID NO: 425336 - DNA, 30 bp, Artificial Sequence
  Synthetic oligonucleotide
cacaatcctaggtcagggttttaaagatcc

SEQ ID NO: 425337 - DNA, 30 bp, Artificial Sequence
  Synthetic oligonucleotide
gcaagatgatccggggatgcacgaagatcc

SEQ ID NO: 425338 - DNA, 30 bp, Artificial Sequence
  Synthetic oligonucleotide
ttcgcctaatattaaggtcctcacagatcc

SEQ ID NO: 425339 - DNA, 30 bp, Artificial Sequence
  Synthetic oligonucleotide
ccctgtcggccaaccgcagaccgcagatcc

SEQ ID NO: 425340 - DNA, 30 bp, Artificial Sequence
  Synthetic oligonucleotide
atccatggttagggctgtttgttgagatcc

SEQ ID NO: 425341 - DNA, 30 bp, Artificial Sequence
  Synthetic oligonucleotide
tgctagtagtttagatatctcctacgatcc

SEQ ID NO: 425342 - DNA, 30 bp, Artificial Sequence
  Synthetic oligonucleotide
accaacccgtggtaccatttagtacgatcc

SEQ ID NO: 425343 - DNA, 30 bp, Artificial Sequence
  Synthetic oligonucleotide
gaccggctgcacaagatcaacacccgatcc

SEQ ID NO: 425344 - DNA, 30 bp, Artificial Sequence
  Synthetic oligonucleotide
aactcgatggactcgttgcttacgcgatcc

SEQ ID NO: 425345 - DNA, 30 bp, Artificial Sequence
  Synthetic oligonucleotide
cctgtcgcaatgactaggcaccggcgatcc

SEQ ID NO: 425346 - DNA, 30 bp, Artificial Sequence
  Synthetic oligonucleotide
tgcatccaggtaaatttcgccagaggatcc

SEQ ID NO: 425347 - DNA, 30 bp, Artificial Sequence
  Synthetic oligonucleotide
acaacagccctgcgattaagcagaggatcc

SEQ ID NO: 425348 - DNA, 30 bp, Artificial Sequence
  Synthetic oligonucleotide
agaattaaaacgggacctcttgcgggatcc

SEQ ID NO: 425349 - DNA, 30 bp, Artificial Sequence
  Synthetic oligonucleotide
atccagtgtgtggttgttttaggtggatcc

SEQ ID NO: 425350 - DNA, 30 bp, Artificial Sequence
  Synthetic oligonucleotide
cccggcattattggggataaacaaatatcc

SEQ ID NO: 425351 - DNA, 30 bp, Artificial Sequence
  Synthetic oligonucleotide
gcatcccactggctatgaatcgaaatatcc

SEQ ID NO: 425352 - DNA, 30 bp, Artificial Sequence
  Synthetic oligonucleotide
gaactctacaatagatggttttcaatatcc

SEQ ID NO: 425353 - DNA, 30 bp, Artificial Sequence
  Synthetic oligonucleotide
gttgcagtaggatggggcaacagaatatcc

SEQ ID NO: 425354 - DNA, 30 bp, Artificial Sequence
  Synthetic oligonucleotide
ctagtgcagtagatataatcactaatatcc

SEQ ID NO: 425355 - DNA, 30 bp, Artificial Sequence
  Synthetic oligonucleotide
attaaccgtgcagagtcatcgatcatatcc

SEQ ID NO: 425356 - DNA, 30 bp, Artificial Sequence
  Synthetic oligonucleotide
tccgtttctgacttcctctaatagctatcc

SEQ ID NO: 425357 - DNA, 30 bp, Artificial Sequence
  Synthetic oligonucleotide
agctaagtggctctgtgaatcgggctatcc

SEQ ID NO: 425358 - DNA, 30 bp, Artificial Sequence
  Synthetic oligonucleotide
atgctacttaggttgtcgacgctgctatcc

SEQ ID NO: 425359 - DNA, 30 bp, Artificial Sequence
  Synthetic oligonucleotide
ataacactgttataaagtataagtctatcc

SEQ ID NO: 425360 - DNA, 30 bp, Artificial Sequence
  Synthetic oligonucleotide
tagtggggtaacgatggtagaggtctatcc

SEQ ID NO: 425361 - DNA, 30 bp, Artificial Sequence
  Synthetic oligonucleotide
tagtatcttaggcgtgggacctaagtatcc

SEQ ID NO: 425362 - DNA, 30 bp, Artificial Sequence
  Synthetic oligonucleotide
taatctgaaccgggggcgacaatagtatcc

SEQ ID NO: 425363 - DNA, 30 bp, Artificial Sequence
  Synthetic oligonucleotide
gacgagccagttatagcgatgtacgtatcc

SEQ ID NO: 425364 - DNA, 30 bp, Artificial Sequence
  Synthetic oligonucleotide
cagctcttcagtgtagtaaacgtcgtatcc

SEQ ID NO: 425365 - DNA, 30 bp, Artificial Sequence
  Synthetic oligonucleotide
tccgacgtctgggggagaccaccggtatcc

SEQ ID NO: 425366 - DNA, 30 bp, Artificial Sequence
  Synthetic oligonucleotide
tacctgcctggtacactccaatgtgtatcc

SEQ ID NO: 425367 - DNA, 30 bp, Artificial Sequence
  Synthetic oligonucleotide
gggcgcctattcagctactattgtgtatcc

SEQ ID NO: 425368 - DNA, 30 bp, Artificial Sequence
  Synthetic oligonucleotide
gatgtcattcagcggcattctattgtatcc

SEQ ID NO: 425369 - DNA, 30 bp, Artificial Sequence
  Synthetic oligonucleotide
cgtagggtcgtattcgatccatttgtatcc

SEQ ID NO: 425370 - DNA, 30 bp, Artificial Sequence
  Synthetic oligonucleotide
ttacgcatgattgttgagagaacattatcc

SEQ ID NO: 425371 - DNA, 30 bp, Artificial Sequence
  Synthetic oligonucleotide
ttagacgtaagtaggcagggatcattatcc

SEQ ID NO: 425372 - DNA, 30 bp, Artificial Sequence
  Synthetic oligonucleotide
ggggccacatggttgcttggaggattatcc

SEQ ID NO: 425373 - DNA, 30 bp, Artificial Sequence
  Synthetic oligonucleotide
gccctacatacttctcccgaccacttatcc

SEQ ID NO: 425374 - DNA, 30 bp, Artificial Sequence
  Synthetic oligonucleotide
gcggatggtaaaaaaggctgaaccttatcc

SEQ ID NO: 425375 - DNA, 30 bp, Artificial Sequence
  Synthetic oligonucleotide
tcggacgcctgcttctgctggagcttatcc

SEQ ID NO: 425376 - DNA, 30 bp, Artificial Sequence
  Synthetic oligonucleotide
aaggataaccgcctcgttgatcatttatcc

SEQ ID NO: 425377 - DNA, 30 bp, Artificial Sequence
  Synthetic oligonucleotide
aggaataactgtagttattgccctttatcc

SEQ ID NO: 425378 - DNA, 30 bp, Artificial Sequence
  Synthetic oligonucleotide
ttggtggggaagctaatttcttttttatcc

SEQ ID NO: 425379 - DNA, 30 bp, Artificial Sequence
  Synthetic oligonucleotide
taactttgatcctcgtcatactgaaactcc

SEQ ID NO: 425380 - DNA, 30 bp, Artificial Sequence
  Synthetic oligonucleotide
gatcgtcgcaatcataggatgttcaactcc

SEQ ID NO: 425381 - DNA, 30 bp, Artificial Sequence
  Synthetic oligonucleotide
cacctttttaacagttcactacggaactcc

SEQ ID NO: 425382 - DNA, 30 bp, Artificial Sequence
  Synthetic oligonucleotide
tatccctccagcaaaggcagctataactcc

SEQ ID NO: 425383 - DNA, 30 bp, Artificial Sequence
  Synthetic oligonucleotide
taggcgacggttggctaagtgtgtaactcc

SEQ ID NO: 425384 - DNA, 30 bp, Artificial Sequence
  Synthetic oligonucleotide
aagacctgtagggcaaataattttaactcc

SEQ ID NO: 425385 - DNA, 30 bp, Artificial Sequence
  Synthetic oligonucleotide
tattgtcacggaatcatccgctggcactcc

SEQ ID NO: 425386 - DNA, 30 bp, Artificial Sequence
  Synthetic oligonucleotide
ctgatctattagtccactttgacggactcc

SEQ ID NO: 425387 - DNA, 30 bp, Artificial Sequence
  Synthetic oligonucleotide
ttagcgtggcattcttataggaatgactcc

SEQ ID NO: 425388 - DNA, 30 bp, Artificial Sequence
  Synthetic oligonucleotide
gtctgtttctgggcaatgaaactctactcc

SEQ ID NO: 425389 - DNA, 30 bp, Artificial Sequence
  Synthetic oligonucleotide
gtcctgggtgtaatggttactaagtactcc

SEQ ID NO: 425390 - DNA, 30 bp, Artificial Sequence
  Synthetic oligonucleotide
caccttgcgatccttcgatgtcagtactcc

SEQ ID NO: 425391 - DNA, 30 bp, Artificial Sequence
  Synthetic oligonucleotide
gtgataggggtacccctatatttgtactcc

SEQ ID NO: 425392 - DNA, 30 bp, Artificial Sequence
  Synthetic oligonucleotide
atcctgttactgtgacggcacacttactcc

SEQ ID NO: 425393 - DNA, 30 bp, Artificial Sequence
  Synthetic oligonucleotide
tggacacggtccatctgactatcttactcc

SEQ ID NO: 425394 - DNA, 30 bp, Artificial Sequence
  Synthetic oligonucleotide
gtcgactataagtgggaaatttgttactcc

SEQ ID NO: 425395 - DNA, 30 bp, Artificial Sequence
  Synthetic oligonucleotide
taccttcccgtccaactcttactttactcc

SEQ ID NO: 425396 - DNA, 30 bp, Artificial Sequence
  Synthetic oligonucleotide
acatagataaaactcagctactcaacctcc

SEQ ID NO: 425397 - DNA, 30 bp, Artificial Sequence
  Synthetic oligonucleotide
tttgtccaaaatgctgcgctcatgacctcc

SEQ ID NO: 425398 - DNA, 30 bp, Artificial Sequence
  Synthetic oligonucleotide
tctcacttcaatttctggtctctgacctcc

SEQ ID NO: 425399 - DNA, 30 bp, Artificial Sequence
  Synthetic oligonucleotide
ctggaggtaaaattaggttaacttacctcc

SEQ ID NO: 425400 - DNA, 30 bp, Artificial Sequence
  Synthetic oligonucleotide
gatagggccatatattgacctataccctcc

SEQ ID NO: 425401 - DNA, 30 bp, Artificial Sequence
  Synthetic oligonucleotide
atcaagtatgaaggaggttttgacccctcc

SEQ ID NO: 425402 - DNA, 30 bp, Artificial Sequence
  Synthetic oligonucleotide
actccgccggacgaagctactcccccctcc

SEQ ID NO: 425403 - DNA, 30 bp, Artificial Sequence
  Synthetic oligonucleotide
gtgtagctgtgatcggcccatctcccctcc

SEQ ID NO: 425404 - DNA, 30 bp, Artificial Sequence
  Synthetic oligonucleotide
ccctattggcagggtataggtgtcccctcc

SEQ ID NO: 425405 - DNA, 30 bp, Artificial Sequence
  Synthetic oligonucleotide
aaaggcgtgtaccgcttgtattaagcctcc

SEQ ID NO: 425406 - DNA, 30 bp, Artificial Sequence
  Synthetic oligonucleotide
agctattactacgacccatagaacgcctcc

SEQ ID NO: 425407 - DNA, 30 bp, Artificial Sequence
  Synthetic oligonucleotide
ccctgtatttatggtgttacacccgcctcc

SEQ ID NO: 425408 - DNA, 30 bp, Artificial Sequence
  Synthetic oligonucleotide
atgaacaggaccttaagaggcagtgcctcc

SEQ ID NO: 425409 - DNA, 30 bp, Artificial Sequence
  Synthetic oligonucleotide
gagcaccgtgaattggatttgtttgcctcc

SEQ ID NO: 425410 - DNA, 30 bp, Artificial Sequence
  Synthetic oligonucleotide
tcggctttgaaacatttggagtcttcctcc

SEQ ID NO: 425411 - DNA, 30 bp, Artificial Sequence
  Synthetic oligonucleotide
cctaggatcttcatgttaatggtttcctcc

SEQ ID NO: 425412 - DNA, 30 bp, Artificial Sequence
  Synthetic oligonucleotide
cactatgttcggccagctactgtcagctcc

SEQ ID NO: 425413 - DNA, 30 bp, Artificial Sequence
  Synthetic oligonucleotide
ttggtccctgctaccgcgccgcggagctcc

SEQ ID NO: 425414 - DNA, 30 bp, Artificial Sequence
  Synthetic oligonucleotide
tagctggtgtaaccctggcagcgtagctcc

SEQ ID NO: 425415 - DNA, 30 bp, Artificial Sequence
  Synthetic oligonucleotide
tttgcatagagttttcgtcgcggtagctcc

SEQ ID NO: 425416 - DNA, 30 bp, Artificial Sequence
  Synthetic oligonucleotide
ttgttagagtattacttttcatgtagctcc

SEQ ID NO: 425417 - DNA, 30 bp, Artificial Sequence
  Synthetic oligonucleotide
aagggcgcacagtagcttcgtggacgctcc

SEQ ID NO: 425418 - DNA, 30 bp, Artificial Sequence
  Synthetic oligonucleotide
aggttaacagttccgcggatttaccgctcc

SEQ ID NO: 425419 - DNA, 30 bp, Artificial Sequence
  Synthetic oligonucleotide
ggttactcccgcgacaaatcttgaggctcc

SEQ ID NO: 425420 - DNA, 30 bp, Artificial Sequence
  Synthetic oligonucleotide
gtgtcacaacagcgtttgcagaatggctcc

SEQ ID NO: 425421 - DNA, 30 bp, Artificial Sequence
  Synthetic oligonucleotide
agcgcagtttgcacagtgagtaatggctcc

SEQ ID NO: 425422 - DNA, 30 bp, Artificial Sequence
  Synthetic oligonucleotide
cggagtagagatgggcctgcggcatgctcc

SEQ ID NO: 425423 - DNA, 30 bp, Artificial Sequence
  Synthetic oligonucleotide
aaactaagagtggtaagtgtcgactgctcc

SEQ ID NO: 425424 - DNA, 30 bp, Artificial Sequence
  Synthetic oligonucleotide
atagttgggtgttgaagtcggacttgctcc

SEQ ID NO: 425425 - DNA, 30 bp, Artificial Sequence
  Synthetic oligonucleotide
tctgcgtttgacgagcgaagggtttgctcc

SEQ ID NO: 425426 - DNA, 30 bp, Artificial Sequence
  Synthetic oligonucleotide
cgctactatcccactgaagtataaatctcc

SEQ ID NO: 425427 - DNA, 30 bp, Artificial Sequence
  Synthetic oligonucleotide
ccggtaagaatgacgccgcatgcaatctcc

SEQ ID NO: 425428 - DNA, 30 bp, Artificial Sequence
  Synthetic oligonucleotide
ttagcgtaccgagtttgaacacgaatctcc

SEQ ID NO: 425429 - DNA, 30 bp, Artificial Sequence
  Synthetic oligonucleotide
attcgtgacaggtagacggaaaatatctcc

SEQ ID NO: 425430 - DNA, 30 bp, Artificial Sequence
  Synthetic oligonucleotide
gctcgtttgttccgtttagagagtatctcc

SEQ ID NO: 425431 - DNA, 30 bp, Artificial Sequence
  Synthetic oligonucleotide
gcaggcctgtttaagagagctcgactctcc

SEQ ID NO: 425432 - DNA, 30 bp, Artificial Sequence
  Synthetic oligonucleotide
cagagtaccggtccgcggccaccgctctcc

SEQ ID NO: 425433 - DNA, 30 bp, Artificial Sequence
  Synthetic oligonucleotide
attgcggttgagcatcatcaggaagtctcc

SEQ ID NO: 425434 - DNA, 30 bp, Artificial Sequence
  Synthetic oligonucleotide
tttaagtcggaattcaagtgggaagtctcc

SEQ ID NO: 425435 - DNA, 30 bp, Artificial Sequence
  Synthetic oligonucleotide
gcacactctctgtctagtctctcagtctcc

SEQ ID NO: 425436 - DNA, 30 bp, Artificial Sequence
  Synthetic oligonucleotide
tatatgtatctagccgtaagcagggtctcc

SEQ ID NO: 425437 - DNA, 30 bp, Artificial Sequence
  Synthetic oligonucleotide
cggcaaacctggaggtcccgaggtgtctcc

SEQ ID NO: 425438 - DNA, 30 bp, Artificial Sequence
  Synthetic oligonucleotide
aaggtccttatcaaaaggtagaaattctcc

SEQ ID NO: 425439 - DNA, 30 bp, Artificial Sequence
  Synthetic oligonucleotide
aatggagtggctcatggaggcatattctcc

SEQ ID NO: 425440 - DNA, 30 bp, Artificial Sequence
  Synthetic oligonucleotide
tgtatccgcttacatctcagatagttctcc

SEQ ID NO: 425441 - DNA, 30 bp, Artificial Sequence
  Synthetic oligonucleotide
cggttcttcccttcacataagccgttctcc

SEQ ID NO: 425442 - DNA, 30 bp, Artificial Sequence
  Synthetic oligonucleotide
tatcagtggctttgaggcaaccggttctcc

SEQ ID NO: 425443 - DNA, 30 bp, Artificial Sequence
  Synthetic oligonucleotide
cgactccgtagtccaacctatgggttctcc

SEQ ID NO: 425444 - DNA, 30 bp, Artificial Sequence
  Synthetic oligonucleotide
aattggtcccgtgttgaattctggttctcc

SEQ ID NO: 425445 - DNA, 30 bp, Artificial Sequence
  Synthetic oligonucleotide
acactcctagacagtgaggaacatttctcc

SEQ ID NO: 425446 - DNA, 30 bp, Artificial Sequence
  Synthetic oligonucleotide
acctttgcatcctctttgcagcatttctcc

SEQ ID NO: 425447 - DNA, 30 bp, Artificial Sequence
  Synthetic oligonucleotide
agtattccaaggacatttggtcttttctcc

SEQ ID NO: 425448 - DNA, 30 bp, Artificial Sequence
  Synthetic oligonucleotide
ttggccgtctctctggacatggttttctcc

SEQ ID NO: 425449 - DNA, 30 bp, Artificial Sequence
  Synthetic oligonucleotide
agtcacttaggtctcggtcctcaaaagtcc

SEQ ID NO: 425450 - DNA, 30 bp, Artificial Sequence
  Synthetic oligonucleotide
tacctagtaggccgggtttttagaaagtcc

SEQ ID NO: 425451 - DNA, 30 bp, Artificial Sequence
  Synthetic oligonucleotide
ggctgcggttatttaactgtgggaaagtcc

SEQ ID NO: 425452 - DNA, 30 bp, Artificial Sequence
  Synthetic oligonucleotide
tgtggtaggaatatgacgatcataaagtcc

SEQ ID NO: 425453 - DNA, 30 bp, Artificial Sequence
  Synthetic oligonucleotide
tttgctcgcgttatccagtggcgcaagtcc

SEQ ID NO: 425454 - DNA, 30 bp, Artificial Sequence
  Synthetic oligonucleotide
ggtgaatcttccaaaggtattaggaagtcc

SEQ ID NO: 425455 - DNA, 30 bp, Artificial Sequence
  Synthetic oligonucleotide
cggctatattcccttaaggacgataagtcc

SEQ ID NO: 425456 - DNA, 30 bp, Artificial Sequence
  Synthetic oligonucleotide
gaaaggcataacccattcaacattaagtcc

SEQ ID NO: 425457 - DNA, 30 bp, Artificial Sequence
  Synthetic oligonucleotide
taatgtttcgactcagacatgaaacagtcc

SEQ ID NO: 425458 - DNA, 30 bp, Artificial Sequence
  Synthetic oligonucleotide
cggccaatttttgcgggtgacacgcagtcc

SEQ ID NO: 425459 - DNA, 30 bp, Artificial Sequence
  Synthetic oligonucleotide
ctagataaactccatgctagcacgcagtcc

SEQ ID NO: 425460 - DNA, 30 bp, Artificial Sequence
  Synthetic oligonucleotide
ttctaagttgcgatgtccgcagggcagtcc

SEQ ID NO: 425461 - DNA, 30 bp, Artificial Sequence
  Synthetic oligonucleotide
tacgatactgtcgtcagagcgcttcagtcc

SEQ ID NO: 425462 - DNA, 30 bp, Artificial Sequence
  Synthetic oligonucleotide
caagcactttcacacgcttgatccgagtcc

SEQ ID NO: 425463 - DNA, 30 bp, Artificial Sequence
  Synthetic oligonucleotide
cggatgtcagcgaaaagtcggccggagtcc

SEQ ID NO: 425464 - DNA, 30 bp, Artificial Sequence
  Synthetic oligonucleotide
aacttcgttaatgagtgatgcgcggagtcc

SEQ ID NO: 425465 - DNA, 30 bp, Artificial Sequence
  Synthetic oligonucleotide
tgactcagcgtgttatacgtaagggagtcc

SEQ ID NO: 425466 - DNA, 30 bp, Artificial Sequence
  Synthetic oligonucleotide
cggtgttcgatctaggctaaacgggagtcc

SEQ ID NO: 425467 - DNA, 25 bp, Artificial Sequence
  Synthetic oligonucleotide
tgtttacggtttcctaactgagtcc

SEQ ID NO: 425468 - DNA, 30 bp, Artificial Sequence
  Synthetic oligonucleotide
attactcgacgatgcagttccagtgagtcc

SEQ ID NO: 425469 - DNA, 30 bp, Artificial Sequence
  Synthetic oligonucleotide
gggtctgttctgtcataatgtacatagtcc

SEQ ID NO: 425470 - DNA, 30 bp, Artificial Sequence
  Synthetic oligonucleotide
attatgcatgcagattcatctcagtagtcc

SEQ ID NO: 425471 - DNA, 30 bp, Artificial Sequence
  Synthetic oligonucleotide
atttcttccatatcgttattcacgtagtcc

SEQ ID NO: 425472 - DNA, 30 bp, Artificial Sequence
  Synthetic oligonucleotide
tgtggccgttctgcctatcactcgtagtcc

SEQ ID NO: 425473 - DNA, 30 bp, Artificial Sequence
  Synthetic oligonucleotide
ctcctttgaagcgacgtaatgagttagtcc

SEQ ID NO: 425474 - DNA, 30 bp, Artificial Sequence
  Synthetic oligonucleotide
cgaaatatcgggaccgtctttatttagtcc

SEQ ID NO: 425475 - DNA, 30 bp, Artificial Sequence
  Synthetic oligonucleotide
gcagtaagtgaccctcaaattccaacgtcc

SEQ ID NO: 425476 - DNA, 30 bp, Artificial Sequence
  Synthetic oligonucleotide
cgtctcaagcagcctggcaaacgaacgtcc

SEQ ID NO: 425477 - DNA, 30 bp, Artificial Sequence
  Synthetic oligonucleotide
actacgagagggcggcgacacgagacgtcc

SEQ ID NO: 425478 - DNA, 30 bp, Artificial Sequence
  Synthetic oligonucleotide
tagacgtaagcactgtatcgagcaccgtcc

SEQ ID NO: 425479 - DNA, 30 bp, Artificial Sequence
  Synthetic oligonucleotide
ggtacgggtgggacgtatacgaacccgtcc

SEQ ID NO: 425480 - DNA, 30 bp, Artificial Sequence
  Synthetic oligonucleotide
accctagtggagccaccctggatcccgtcc

SEQ ID NO: 425481 - DNA, 30 bp, Artificial Sequence
  Synthetic oligonucleotide
acaaaatgaaccaccggctaaaggccgtcc

SEQ ID NO: 425482 - DNA, 30 bp, Artificial Sequence
  Synthetic oligonucleotide
ctaggatgggatcctagccacactccgtcc

SEQ ID NO: 425483 - DNA, 30 bp, Artificial Sequence
  Synthetic oligonucleotide
accgcttggcatgagactaatcgtccgtcc

SEQ ID NO: 425484 - DNA, 30 bp, Artificial Sequence
  Synthetic oligonucleotide
aagcctctagtgacgtctggttttccgtcc

SEQ ID NO: 425485 - DNA, 30 bp, Artificial Sequence
  Synthetic oligonucleotide
aagacgacacattgcgaagcttgagcgtcc

SEQ ID NO: 425486 - DNA, 30 bp, Artificial Sequence
  Synthetic oligonucleotide
ggcggtttgacaaggggattatccgcgtcc

SEQ ID NO: 425487 - DNA, 30 bp, Artificial Sequence
  Synthetic oligonucleotide
ctcagaaacacgagatatctattcgcgtcc

SEQ ID NO: 425488 - DNA, 30 bp, Artificial Sequence
  Synthetic oligonucleotide
atcgcacaaaatggaccaataccggcgtcc

SEQ ID NO: 425489 - DNA, 30 bp, Artificial Sequence
  Synthetic oligonucleotide
gcattgatttgattcggaaccaagtcgtcc

SEQ ID NO: 425490 - DNA, 30 bp, Artificial Sequence
  Synthetic oligonucleotide
acagaggtcagttgtatctgtctttcgtcc

SEQ ID NO: 425491 - DNA, 30 bp, Artificial Sequence
  Synthetic oligonucleotide
ttaacaacctgttcgcgtctgcgcaggtcc

SEQ ID NO: 425492 - DNA, 30 bp, Artificial Sequence
  Synthetic oligonucleotide
tgcgcccgtggtcagtccagaaagaggtcc

SEQ ID NO: 425493 - DNA, 30 bp, Artificial Sequence
  Synthetic oligonucleotide
cttactttcacaatcgtcgcaaggaggtcc

SEQ ID NO: 425494 - DNA, 30 bp, Artificial Sequence
  Synthetic oligonucleotide
tggagacacaagggcgtgcacgggaggtcc

SEQ ID NO: 425495 - DNA, 30 bp, Artificial Sequence
  Synthetic oligonucleotide
gggcgccgtgttccggatggggggaggtcc

SEQ ID NO: 425496 - DNA, 30 bp, Artificial Sequence
  Synthetic oligonucleotide
gggggtgcataccgtcttaatgggaggtcc

SEQ ID NO: 425497 - DNA, 30 bp, Artificial Sequence
  Synthetic oligonucleotide
ggtttgcgagcggctgcagggatgaggtcc

SEQ ID NO: 425498 - DNA, 30 bp, Artificial Sequence
  Synthetic oligonucleotide
tcaaagaagtcggaatcatgtgataggtcc

SEQ ID NO: 425499 - DNA, 31 bp, Artificial Sequence
  Synthetic oligonucleotide
ttggggattcaccacctaattgggtaggtcc

SEQ ID NO: 425500 - DNA, 30 bp, Artificial Sequence
  Synthetic oligonucleotide
tttaactcagggtggacgtgcattaggtcc

SEQ ID NO: 425501 - DNA, 30 bp, Artificial Sequence
  Synthetic oligonucleotide
caatttagtaaactgtgtaatgcacggtcc

SEQ ID NO: 425502 - DNA, 30 bp, Artificial Sequence
  Synthetic oligonucleotide
ttaattgctctgggggatagagtacggtcc

SEQ ID NO: 425503 - DNA, 30 bp, Artificial Sequence
  Synthetic oligonucleotide
ctgcgatgggatctgcctctctaccggtcc

SEQ ID NO: 425504 - DNA, 30 bp, Artificial Sequence
  Synthetic oligonucleotide
aatacgaattcgactaactttatccggtcc

SEQ ID NO: 425505 - DNA, 30 bp, Artificial Sequence
  Synthetic oligonucleotide
cataacaatcacttcggaagcctgcggtcc

SEQ ID NO: 425506 - DNA, 30 bp, Artificial Sequence
  Synthetic oligonucleotide
taaccgcacgaattaagtcacgtgcggtcc

SEQ ID NO: 425507 - DNA, 30 bp, Artificial Sequence
  Synthetic oligonucleotide
acctgaccgtcaccagtatataatcggtcc

SEQ ID NO: 425508 - DNA, 30 bp, Artificial Sequence
  Synthetic oligonucleotide
ttactccaaatgtgttcttaaaaagggtcc

SEQ ID NO: 425509 - DNA, 30 bp, Artificial Sequence
  Synthetic oligonucleotide
gaatcttgattaactttaaatagagggtcc

SEQ ID NO: 425510 - DNA, 30 bp, Artificial Sequence
  Synthetic oligonucleotide
tcagaatagaattttttatcgaacgggtcc

SEQ ID NO: 425511 - DNA, 30 bp, Artificial Sequence
  Synthetic oligonucleotide
ccccgtacggtgttgtatgttaccgggtcc

SEQ ID NO: 425512 - DNA, 30 bp, Artificial Sequence
  Synthetic oligonucleotide
gctagttgcacaaatagggaacccgggtcc

SEQ ID NO: 425513 - DNA, 30 bp, Artificial Sequence
  Synthetic oligonucleotide
caagtctccgtactgagtacttgcgggtcc

SEQ ID NO: 425514 - DNA, 30 bp, Artificial Sequence
  Synthetic oligonucleotide
cttatggttttaactcatctagaggggtcc

SEQ ID NO: 425515 - DNA, 30 bp, Artificial Sequence
  Synthetic oligonucleotide
aagcgcgagtcccgttaagtcatggggtcc

SEQ ID NO: 425516 - DNA, 31 bp, Artificial Sequence
  Synthetic oligonucleotide
ttgtctccgtgtgcgagaaatagatgggtcc

SEQ ID NO: 425517 - DNA, 30 bp, Artificial Sequence
  Synthetic oligonucleotide
ccggactaggtccataactgcagtgggtcc

SEQ ID NO: 425518 - DNA, 30 bp, Artificial Sequence
  Synthetic oligonucleotide
gtaccctgcgaggaacccgtagactggtcc

SEQ ID NO: 425519 - DNA, 30 bp, Artificial Sequence
  Synthetic oligonucleotide
cctaccgtttgggccgattctttctggtcc

SEQ ID NO: 425520 - DNA, 30 bp, Artificial Sequence
  Synthetic oligonucleotide
acgaacttgtcctattagtgctattggtcc

SEQ ID NO: 425521 - DNA, 30 bp, Artificial Sequence
  Synthetic oligonucleotide
gccgagtaatacttgtaggcaatttggtcc

SEQ ID NO: 425522 - DNA, 30 bp, Artificial Sequence
  Synthetic oligonucleotide
acctagttttggttctgggggtaaatgtcc

SEQ ID NO: 425523 - DNA, 30 bp, Artificial Sequence
  Synthetic oligonucleotide
ggtgttagaaaaagtggagttctaatgtcc

SEQ ID NO: 425524 - DNA, 30 bp, Artificial Sequence
  Synthetic oligonucleotide
gcgggtacatagtgctagcatcctatgtcc

SEQ ID NO: 425525 - DNA, 30 bp, Artificial Sequence
  Synthetic oligonucleotide
ctccccaaattttaagtacgaggtatgtcc

SEQ ID NO: 425526 - DNA, 30 bp, Artificial Sequence
  Synthetic oligonucleotide
ctatcccccgcatgtcatccggttatgtcc

SEQ ID NO: 425527 - DNA, 30 bp, Artificial Sequence
  Synthetic oligonucleotide
catcaatgaagcggatactaggaactgtcc

SEQ ID NO: 425528 - DNA, 30 bp, Artificial Sequence
  Synthetic oligonucleotide
atgatttactcatttagttagtacctgtcc

SEQ ID NO: 425529 - DNA, 30 bp, Artificial Sequence
  Synthetic oligonucleotide
ggtgccatcaggcctgaatgtcccctgtcc

SEQ ID NO: 425530 - DNA, 30 bp, Artificial Sequence
  Synthetic oligonucleotide
gtaaataaggttgagtatgcaaagctgtcc

SEQ ID NO: 425531 - DNA, 30 bp, Artificial Sequence
  Synthetic oligonucleotide
cgtagtaccacggtcgtctttattctgtcc

SEQ ID NO: 425532 - DNA, 30 bp, Artificial Sequence
  Synthetic oligonucleotide
ggactaatagtagacttatgaaaagtgtcc

SEQ ID NO: 425533 - DNA, 30 bp, Artificial Sequence
  Synthetic oligonucleotide
tgattcactcttttgcaggtgggagtgtcc

SEQ ID NO: 425534 - DNA, 30 bp, Artificial Sequence
  Synthetic oligonucleotide
tgtgtccttgcaattgcaaccactgtgtcc

SEQ ID NO: 425535 - DNA, 29 bp, Artificial Sequence
  Synthetic oligonucleotide
accatatgactccgtcaaagcaattgtcc

SEQ ID NO: 425536 - DNA, 30 bp, Artificial Sequence
  Synthetic oligonucleotide
ttgtctgtgaaggattactctcacttgtcc

SEQ ID NO: 425537 - DNA, 31 bp, Artificial Sequence
  Synthetic oligonucleotide
ggcctagtcaggagcgtgggtggacttgtcc

SEQ ID NO: 425538 - DNA, 30 bp, Artificial Sequence
  Synthetic oligonucleotide
aatagtattggtcatgtacagggcttgtcc

SEQ ID NO: 425539 - DNA, 30 bp, Artificial Sequence
  Synthetic oligonucleotide
accgatttataactgaaagttcctttgtcc

SEQ ID NO: 425540 - DNA, 30 bp, Artificial Sequence
  Synthetic oligonucleotide
ttccgaacgctgatatcactgagtttgtcc

SEQ ID NO: 425541 - DNA, 30 bp, Artificial Sequence
  Synthetic oligonucleotide
aatagtagcaaccgcggcgttacgaattcc

SEQ ID NO: 425542 - DNA, 30 bp, Artificial Sequence
  Synthetic oligonucleotide
tcaacaactctagaacctgtagggaattcc

SEQ ID NO: 425543 - DNA, 30 bp, Artificial Sequence
  Synthetic oligonucleotide
accacgacgtgcaaatgtggatataattcc

SEQ ID NO: 425544 - DNA, 30 bp, Artificial Sequence
  Synthetic oligonucleotide
atgcgctttgtatatctcgttactaattcc

SEQ ID NO: 425545 - DNA, 30 bp, Artificial Sequence
  Synthetic oligonucleotide
gatattgtaagttttatggcaggtaattcc

SEQ ID NO: 425546 - DNA, 30 bp, Artificial Sequence
  Synthetic oligonucleotide
ggtatctttcgcgcatgttcacttaattcc

SEQ ID NO: 425547 - DNA, 30 bp, Artificial Sequence
  Synthetic oligonucleotide
tgttacgaccacggatacccgtgacattcc

SEQ ID NO: 425548 - DNA, 30 bp, Artificial Sequence
  Synthetic oligonucleotide
tcgaatctttatttgcaactaatacattcc

SEQ ID NO: 425549 - DNA, 30 bp, Artificial Sequence
  Synthetic oligonucleotide
gctttgcgtaacctgccatgggagcattcc

SEQ ID NO: 425550 - DNA, 29 bp, Artificial Sequence
  Synthetic oligonucleotide
ttaaacccacagggtaaagttagcattcc

SEQ ID NO: 425551 - DNA, 30 bp, Artificial Sequence
  Synthetic oligonucleotide
agttggtacgcagaatggctcgggcattcc

SEQ ID NO: 425552 - DNA, 30 bp, Artificial Sequence
  Synthetic oligonucleotide
gtccaccatcctgttaagtggtttcattcc

SEQ ID NO: 425553 - DNA, 30 bp, Artificial Sequence
  Synthetic oligonucleotide
tcatgctacgttaaaggttcttaagattcc

SEQ ID NO: 425554 - DNA, 30 bp, Artificial Sequence
  Synthetic oligonucleotide
gctgagttctgtcactggactgcagattcc

SEQ ID NO: 425555 - DNA, 30 bp, Artificial Sequence
  Synthetic oligonucleotide
ataccagagatccccatgcggggagattcc

SEQ ID NO: 425556 - DNA, 30 bp, Artificial Sequence
  Synthetic oligonucleotide
agcccaactttggttggctacgtagattcc

SEQ ID NO: 425557 - DNA, 30 bp, Artificial Sequence
  Synthetic oligonucleotide
actactcgagttcaagaaagtactgattcc

SEQ ID NO: 425558 - DNA, 30 bp, Artificial Sequence
  Synthetic oligonucleotide
gggatgagtatgggcgctagatgtgattcc

SEQ ID NO: 425559 - DNA, 30 bp, Artificial Sequence
  Synthetic oligonucleotide
gataatacagttcatgacagaaaatattcc

SEQ ID NO: 425560 - DNA, 30 bp, Artificial Sequence
  Synthetic oligonucleotide
gcttatggaaaatagtcatcctcatattcc

SEQ ID NO: 425561 - DNA, 30 bp, Artificial Sequence
  Synthetic oligonucleotide
tttacagcagggttaaaatagatatattcc

SEQ ID NO: 425562 - DNA, 30 bp, Artificial Sequence
  Synthetic oligonucleotide
aagtaaagtggtgggattctcgggtattcc

SEQ ID NO: 425563 - DNA, 30 bp, Artificial Sequence
  Synthetic oligonucleotide
tccaccttcatgtttggaggcacttattcc

SEQ ID NO: 425564 - DNA, 30 bp, Artificial Sequence
  Synthetic oligonucleotide
gacgcaagcatcggcagatggtcaacttcc

SEQ ID NO: 425565 - DNA, 30 bp, Artificial Sequence
  Synthetic oligonucleotide
aaaatgggctatctttgctgcttaacttcc

SEQ ID NO: 425566 - DNA, 30 bp, Artificial Sequence
  Synthetic oligonucleotide
cttgtggaaagagctgtgagtgggacttcc

SEQ ID NO: 425567 - DNA, 30 bp, Artificial Sequence
  Synthetic oligonucleotide
aggcggcgttggtacacactaaatacttcc

SEQ ID NO: 425568 - DNA, 30 bp, Artificial Sequence
  Synthetic oligonucleotide
aagatcagtttaaagtcgcgacgtacttcc

SEQ ID NO: 425569 - DNA, 30 bp, Artificial Sequence
  Synthetic oligonucleotide
gaccgggcacaagcttgcggtgttacttcc

SEQ ID NO: 425570 - DNA, 30 bp, Artificial Sequence
  Synthetic oligonucleotide
tcgaggcgtgaggggggagtgaaaccttcc

SEQ ID NO: 425571 - DNA, 30 bp, Artificial Sequence
  Synthetic oligonucleotide
gttacttcatattggcaatgggaaccttcc

SEQ ID NO: 425572 - DNA, 30 bp, Artificial Sequence
  Synthetic oligonucleotide
tactgtgtgagcatgtacggacagccttcc

SEQ ID NO: 425573 - DNA, 30 bp, Artificial Sequence
  Synthetic oligonucleotide
agggagactacgtctgtggagactccttcc

SEQ ID NO: 425574 - DNA, 30 bp, Artificial Sequence
  Synthetic oligonucleotide
agctcttcgcaattaactttgggtccttcc

SEQ ID NO: 425575 - DNA, 30 bp, Artificial Sequence
  Synthetic oligonucleotide
aaggatgatttataagcccatgaagcttcc

SEQ ID NO: 425576 - DNA, 30 bp, Artificial Sequence
  Synthetic oligonucleotide
gaaaaccctaataattaaaaggtagcttcc

SEQ ID NO: 425577 - DNA, 30 bp, Artificial Sequence
  Synthetic oligonucleotide
gcgtttagaggtcagcacttgttagcttcc

SEQ ID NO: 425578 - DNA, 30 bp, Artificial Sequence
  Synthetic oligonucleotide
aaacttcatgccgtatcaattaccgcttcc

SEQ ID NO: 425579 - DNA, 30 bp, Artificial Sequence
  Synthetic oligonucleotide
ggtagatcaaaacttccagtatccgcttcc

SEQ ID NO: 425580 - DNA, 30 bp, Artificial Sequence
  Synthetic oligonucleotide
acagttggtgacggaccttatgtcgcttcc

SEQ ID NO: 425581 - DNA, 30 bp, Artificial Sequence
  Synthetic oligonucleotide
ctcgtccaatctttacggccaaaggcttcc

SEQ ID NO: 425582 - DNA, 30 bp, Artificial Sequence
  Synthetic oligonucleotide
gccccaggaacggcattttagcttgcttcc

SEQ ID NO: 425583 - DNA, 30 bp, Artificial Sequence
  Synthetic oligonucleotide
tcacggctaaatcccgcgatttttgcttcc

SEQ ID NO: 425584 - DNA, 30 bp, Artificial Sequence
  Synthetic oligonucleotide
cccacgccagtttgcatcctcacatcttcc

SEQ ID NO: 425585 - DNA, 30 bp, Artificial Sequence
  Synthetic oligonucleotide
ggtaaaacataaacgtttatcgcatcttcc

SEQ ID NO: 425586 - DNA, 30 bp, Artificial Sequence
  Synthetic oligonucleotide
cactggctcacattctttgatagatcttcc

SEQ ID NO: 425587 - DNA, 30 bp, Artificial Sequence
  Synthetic oligonucleotide
gagaccgtcaacattcacggacgatcttcc

SEQ ID NO: 425588 - DNA, 30 bp, Artificial Sequence
  Synthetic oligonucleotide
cgacgtttacttacaaaatccggatcttcc

SEQ ID NO: 425589 - DNA, 30 bp, Artificial Sequence
  Synthetic oligonucleotide
tagtaactctagaacaggaaaatatcttcc

SEQ ID NO: 425590 - DNA, 30 bp, Artificial Sequence
  Synthetic oligonucleotide
cagaccaggcagggggaagccaactcttcc

SEQ ID NO: 425591 - DNA, 30 bp, Artificial Sequence
  Synthetic oligonucleotide
gcggaaggatgcagattactgacgtcttcc

SEQ ID NO: 425592 - DNA, 30 bp, Artificial Sequence
  Synthetic oligonucleotide
ttcaaatatggttatagctaacattcttcc

SEQ ID NO: 425593 - DNA, 30 bp, Artificial Sequence
  Synthetic oligonucleotide
ggagtaaccagagtttttgtatattcttcc

SEQ ID NO: 425594 - DNA, 30 bp, Artificial Sequence
  Synthetic oligonucleotide
ctttgaagctatgtgcaaagattttcttcc

SEQ ID NO: 425595 - DNA, 30 bp, Artificial Sequence
  Synthetic oligonucleotide
gtgtttgagttatcatgcggaggaagttcc

SEQ ID NO: 425596 - DNA, 30 bp, Artificial Sequence
  Synthetic oligonucleotide
tcaagcgaacgggagttcaacttcagttcc

SEQ ID NO: 425597 - DNA, 30 bp, Artificial Sequence
  Synthetic oligonucleotide
tggcaaatgatgttgcagccaaagagttcc

SEQ ID NO: 425598 - DNA, 30 bp, Artificial Sequence
  Synthetic oligonucleotide
tgttcgatctttatagttgcaccgagttcc

SEQ ID NO: 425599 - DNA, 30 bp, Artificial Sequence
  Synthetic oligonucleotide
tgccttcctatcgtcggccgcccgagttcc

SEQ ID NO: 425600 - DNA, 30 bp, Artificial Sequence
  Synthetic oligonucleotide
cttttgagagaacaaacagtgcatagttcc

SEQ ID NO: 425601 - DNA, 30 bp, Artificial Sequence
  Synthetic oligonucleotide
ccgcgagaatccgatggatgtgttagttcc

SEQ ID NO: 425602 - DNA, 30 bp, Artificial Sequence
  Synthetic oligonucleotide
tgtatgactgtccaatctggcccccgttcc

SEQ ID NO: 425603 - DNA, 30 bp, Artificial Sequence
  Synthetic oligonucleotide
ttctagaccgataggattactagccgttcc

SEQ ID NO: 425604 - DNA, 30 bp, Artificial Sequence
  Synthetic oligonucleotide
taggcgccgatatgagctataatccgttcc

SEQ ID NO: 425605 - DNA, 30 bp, Artificial Sequence
  Synthetic oligonucleotide
ccagcgccatgcactattactactcgttcc

SEQ ID NO: 425606 - DNA, 30 bp, Artificial Sequence
  Synthetic oligonucleotide
ggggagcacgatgtgttaattgctcgttcc

SEQ ID NO: 425607 - DNA, 30 bp, Artificial Sequence
  Synthetic oligonucleotide
cagacatgcttttcctatcaggttcgttcc

SEQ ID NO: 425608 - DNA, 30 bp, Artificial Sequence
  Synthetic oligonucleotide
ggcagaaaccgcgctgcaaggtacggttcc

SEQ ID NO: 425609 - DNA, 30 bp, Artificial Sequence
  Synthetic oligonucleotide
cctcagggatcgcattcgctccagggttcc

SEQ ID NO: 425610 - DNA, 30 bp, Artificial Sequence
  Synthetic oligonucleotide
cacacaaaagtgggagccggagctggttcc

SEQ ID NO: 425611 - DNA, 30 bp, Artificial Sequence
  Synthetic oligonucleotide
cggaagtggaaaccggacccctttggttcc

SEQ ID NO: 425612 - DNA, 30 bp, Artificial Sequence
  Synthetic oligonucleotide
gtctaggagaggtaacttgtcctatgttcc

SEQ ID NO: 425613 - DNA, 30 bp, Artificial Sequence
  Synthetic oligonucleotide
cccggtacattgaggccacgtaagtgttcc

SEQ ID NO: 425614 - DNA, 30 bp, Artificial Sequence
  Synthetic oligonucleotide
tactaattccttgaaaacacaccgtgttcc

SEQ ID NO: 425615 - DNA, 31 bp, Artificial Sequence
  Synthetic oligonucleotide
acccgattatggaatttggaataaaatttcc

SEQ ID NO: 425616 - DNA, 30 bp, Artificial Sequence
  Synthetic oligonucleotide
gttcttttgccgccaacttaaccaatttcc

SEQ ID NO: 425617 - DNA, 30 bp, Artificial Sequence
  Synthetic oligonucleotide
cttcatagtgggaaaattcggcccatttcc

SEQ ID NO: 425618 - DNA, 30 bp, Artificial Sequence
  Synthetic oligonucleotide
aggggacaatccgcgccagcgatcatttcc

SEQ ID NO: 425619 - DNA, 30 bp, Artificial Sequence
  Synthetic oligonucleotide
gttagcgtaaaatacgacgacaggatttcc

SEQ ID NO: 425620 - DNA, 30 bp, Artificial Sequence
  Synthetic oligonucleotide
ggtgcattggagacacggatcggtatttcc

SEQ ID NO: 425621 - DNA, 30 bp, Artificial Sequence
  Synthetic oligonucleotide
gatgtacgacccggccaataatttatttcc

SEQ ID NO: 425622 - DNA, 30 bp, Artificial Sequence
  Synthetic oligonucleotide
gactgaacaagatgatgccgttaactttcc

SEQ ID NO: 425623 - DNA, 30 bp, Artificial Sequence
  Synthetic oligonucleotide
gtaagtcccaacgacagtttaacactttcc

SEQ ID NO: 425624 - DNA, 30 bp, Artificial Sequence
  Synthetic oligonucleotide
atggttgatagtccaattctagccctttcc

SEQ ID NO: 425625 - DNA, 30 bp, Artificial Sequence
  Synthetic oligonucleotide
agtctgatgcatcgagcggggatcctttcc

SEQ ID NO: 425626 - DNA, 30 bp, Artificial Sequence
  Synthetic oligonucleotide
acattgtagcgcggcgcgtccttcctttcc

SEQ ID NO: 425627 - DNA, 30 bp, Artificial Sequence
  Synthetic oligonucleotide
catctttcagattcggctagttcgctttcc

SEQ ID NO: 425628 - DNA, 30 bp, Artificial Sequence
  Synthetic oligonucleotide
atgggattcgaaccgaggcaagctctttcc

SEQ ID NO: 425629 - DNA, 30 bp, Artificial Sequence
  Synthetic oligonucleotide
acttagtccacaactaaccgctttctttcc

SEQ ID NO: 425630 - DNA, 30 bp, Artificial Sequence
  Synthetic oligonucleotide
tattgtacccgagtcaatatcaaagtttcc

SEQ ID NO: 425631 - DNA, 30 bp, Artificial Sequence
  Synthetic oligonucleotide
tgaaaggttgaatactccccccgagtttcc

SEQ ID NO: 425632 - DNA, 30 bp, Artificial Sequence
  Synthetic oligonucleotide
tgacacgacgcaagtgatggcttagtttcc

SEQ ID NO: 425633 - DNA, 30 bp, Artificial Sequence
  Synthetic oligonucleotide
gtgcgctgaggccggaaattcgacgtttcc

SEQ ID NO: 425634 - DNA, 30 bp, Artificial Sequence
  Synthetic oligonucleotide
gaaggattcttcagcctgacactcgtttcc

SEQ ID NO: 425635 - DNA, 30 bp, Artificial Sequence
  Synthetic oligonucleotide
ccgcatggatatctcttgagataggtttcc

SEQ ID NO: 425636 - DNA, 30 bp, Artificial Sequence
  Synthetic oligonucleotide
cagacgccttcatcgttcaaacgggtttcc

SEQ ID NO: 425637 - DNA, 30 bp, Artificial Sequence
  Synthetic oligonucleotide
gaccgtcccctgtccggaaatggggtttcc

SEQ ID NO: 425638 - DNA, 30 bp, Artificial Sequence
  Synthetic oligonucleotide
ttgacgtatcttgagttcagcgcattttcc

SEQ ID NO: 425639 - DNA, 30 bp, Artificial Sequence
  Synthetic oligonucleotide
gcgttagtcgagacgagtctgcgattttcc

SEQ ID NO: 425640 - DNA, 30 bp, Artificial Sequence
  Synthetic oligonucleotide
taactgaatgccgtgttacgatcgttttcc

SEQ ID NO: 425641 - DNA, 30 bp, Artificial Sequence
  Synthetic oligonucleotide
tagtcacaggaccacagcgtttcgttttcc

SEQ ID NO: 425642 - DNA, 30 bp, Artificial Sequence
  Synthetic oligonucleotide
atatgcgagggaacctctcgatggttttcc

SEQ ID NO: 425643 - DNA, 30 bp, Artificial Sequence
  Synthetic oligonucleotide
ccgggtcccttgggtaatcgactgttttcc

SEQ ID NO: 425644 - DNA, 30 bp, Artificial Sequence
  Synthetic oligonucleotide
cgggaactctttcaataaaacattttttcc

SEQ ID NO: 425645 - DNA, 30 bp, Artificial Sequence
  Synthetic oligonucleotide
tctgtacaaaacggcagggtctcaaaaagc

SEQ ID NO: 425646 - DNA, 30 bp, Artificial Sequence
  Synthetic oligonucleotide
tgaagtatgcttttcagagtagtaaaaagc

SEQ ID NO: 425647 - DNA, 30 bp, Artificial Sequence
  Synthetic oligonucleotide
ctttctacggggcgccgaaaggacaaaagc

SEQ ID NO: 425648 - DNA, 31 bp, Artificial Sequence
  Synthetic oligonucleotide
agcggcatcatttgcgtatacgtacaaaagc

SEQ ID NO: 425649 - DNA, 30 bp, Artificial Sequence
  Synthetic oligonucleotide
aagtcatgctggtgacgccatctcaaaagc

SEQ ID NO: 425650 - DNA, 30 bp, Artificial Sequence
  Synthetic oligonucleotide
gtcagaacgcctcgtgacgtggtgaaaagc

SEQ ID NO: 425651 - DNA, 30 bp, Artificial Sequence
  Synthetic oligonucleotide
tttctcgaaaggtcagctggcttgaaaagc

SEQ ID NO: 425652 - DNA, 30 bp, Artificial Sequence
  Synthetic oligonucleotide
tccaacatggaagtgacggagaataaaagc

SEQ ID NO: 425653 - DNA, 30 bp, Artificial Sequence
  Synthetic oligonucleotide
tccacacatatgaggtagtcagataaaagc

SEQ ID NO: 425654 - DNA, 30 bp, Artificial Sequence
  Synthetic oligonucleotide
tggccaaagctgtcacatctctctaaaagc

SEQ ID NO: 425655 - DNA, 30 bp, Artificial Sequence
  Synthetic oligonucleotide
gttgacgagttggccattagacgacaaagc

SEQ ID NO: 425656 - DNA, 30 bp, Artificial Sequence
  Synthetic oligonucleotide
gctcggatgtgagcgcacagcccccaaagc

SEQ ID NO: 425657 - DNA, 30 bp, Artificial Sequence
  Synthetic oligonucleotide
aatccgtaacaacccattaaagcccaaagc

SEQ ID NO: 425658 - DNA, 30 bp, Artificial Sequence
  Synthetic oligonucleotide
gacgcaggtctacgaatactgtcccaaagc

SEQ ID NO: 425659 - DNA, 30 bp, Artificial Sequence
  Synthetic oligonucleotide
gagaaatcacttcgcaatgatcggcaaagc

SEQ ID NO: 425660 - DNA, 30 bp, Artificial Sequence
  Synthetic oligonucleotide
gtgactatttcagaacgatcgcatcaaagc

SEQ ID NO: 425661 - DNA, 30 bp, Artificial Sequence
  Synthetic oligonucleotide
atgtgtccagccgggtcttagtctcaaagc

SEQ ID NO: 425662 - DNA, 30 bp, Artificial Sequence
  Synthetic oligonucleotide
caatccagtcttttatacctccgagaaagc

SEQ ID NO: 425663 - DNA, 30 bp, Artificial Sequence
  Synthetic oligonucleotide
tttcatgaacaagtgtcctgtatagaaagc

SEQ ID NO: 425664 - DNA, 30 bp, Artificial Sequence
  Synthetic oligonucleotide
aattgacttcgttagatttttgtagaaagc

SEQ ID NO: 425665 - DNA, 30 bp, Artificial Sequence
  Synthetic oligonucleotide
agtgggcaatatctggaaagcttcgaaagc

SEQ ID NO: 425666 - DNA, 30 bp, Artificial Sequence
  Synthetic oligonucleotide
gatgagcggacaattcttatataataaagc

SEQ ID NO: 425667 - DNA, 30 bp, Artificial Sequence
  Synthetic oligonucleotide
taaagacctattaagtgaaaaagctaaagc

SEQ ID NO: 425668 - DNA, 30 bp, Artificial Sequence
  Synthetic oligonucleotide
tatacctcattacctcaaagtagttaaagc

SEQ ID NO: 425669 - DNA, 30 bp, Artificial Sequence
  Synthetic oligonucleotide
gatgaatgaggagagtgtggtaaaacaagc

SEQ ID NO: 425670 - DNA, 30 bp, Artificial Sequence
  Synthetic oligonucleotide
aactcattaacttcatcggcggcaacaagc

SEQ ID NO: 425671 - DNA, 30 bp, Artificial Sequence
  Synthetic oligonucleotide
gcagatcacagtgtacattagaacacaagc

SEQ ID NO: 425672 - DNA, 30 bp, Artificial Sequence
  Synthetic oligonucleotide
atcaatgaatcgtcacgtctttacacaagc

SEQ ID NO: 425673 - DNA, 30 bp, Artificial Sequence
  Synthetic oligonucleotide
tcattaaacgtccgcgttaaaagcacaagc

SEQ ID NO: 425674 - DNA, 30 bp, Artificial Sequence
  Synthetic oligonucleotide
taggtaagcctatggacacttatcacaagc

SEQ ID NO: 425675 - DNA, 30 bp, Artificial Sequence
  Synthetic oligonucleotide
attagtatggtagtccaggtcgggacaagc

SEQ ID NO: 425676 - DNA, 30 bp, Artificial Sequence
  Synthetic oligonucleotide
actctacctgtgcagccggctagcccaagc

SEQ ID NO: 425677 - DNA, 30 bp, Artificial Sequence
  Synthetic oligonucleotide
ttgggccggtatgcttacagagtagcaagc

SEQ ID NO: 425678 - DNA, 30 bp, Artificial Sequence
  Synthetic oligonucleotide
agcaatgccagctatgctcaaagcgcaagc

SEQ ID NO: 425679 - DNA, 30 bp, Artificial Sequence
  Synthetic oligonucleotide
atgctccgattcgtcatctttggcgcaagc

SEQ ID NO: 425680 - DNA, 30 bp, Artificial Sequence
  Synthetic oligonucleotide
ttccgtgtttatcgttggttggatgcaagc

SEQ ID NO: 425681 - DNA, 30 bp, Artificial Sequence
  Synthetic oligonucleotide
cctagcttggctctcgctttgcttgcaagc

SEQ ID NO: 425682 - DNA, 30 bp, Artificial Sequence
  Synthetic oligonucleotide
actggacaaaggataactggtaaatcaagc

SEQ ID NO: 425683 - DNA, 30 bp, Artificial Sequence
  Synthetic oligonucleotide
ctggtagtctatcaatgattaaagtcaagc

SEQ ID NO: 425684 - DNA, 30 bp, Artificial Sequence
  Synthetic oligonucleotide
cggcgaccaacaccgcttatgtattcaagc

SEQ ID NO: 425685 - DNA, 30 bp, Artificial Sequence
  Synthetic oligonucleotide
tcgaatgttctttttaataggggttcaagc

SEQ ID NO: 425686 - DNA, 30 bp, Artificial Sequence
  Synthetic oligonucleotide
acagctcttgatagaccctgtatttcaagc

SEQ ID NO: 425687 - DNA, 30 bp, Artificial Sequence
  Synthetic oligonucleotide
taacgtacagtgaccgttctgataagaagc

SEQ ID NO: 425688 - DNA, 30 bp, Artificial Sequence
  Synthetic oligonucleotide
tgaacatgggctcggcccttactaagaagc

SEQ ID NO: 425689 - DNA, 30 bp, Artificial Sequence
  Synthetic oligonucleotide
tcatacgtgcataggggtttgttaagaagc

SEQ ID NO: 425690 - DNA, 30 bp, Artificial Sequence
  Synthetic oligonucleotide
tgcgggagcgaattcggctacgccagaagc

SEQ ID NO: 425691 - DNA, 30 bp, Artificial Sequence
  Synthetic oligonucleotide
cctgggacaatctgccgctttgccagaagc

SEQ ID NO: 425692 - DNA, 30 bp, Artificial Sequence
  Synthetic oligonucleotide
ttattaggttcatttgcaggaaggagaagc

SEQ ID NO: 425693 - DNA, 30 bp, Artificial Sequence
  Synthetic oligonucleotide
tgcggtgggctttctagcgcaagtagaagc

SEQ ID NO: 425694 - DNA, 30 bp, Artificial Sequence
  Synthetic oligonucleotide
gtggctgtcttgttttccgcgtgacgaagc

SEQ ID NO: 425695 - DNA, 30 bp, Artificial Sequence
  Synthetic oligonucleotide
gtaccgttacgagcactttcgtgccgaagc

SEQ ID NO: 425696 - DNA, 30 bp, Artificial Sequence
  Synthetic oligonucleotide
ggtgacagtctgctgattatgcttcgaagc

SEQ ID NO: 425697 - DNA, 30 bp, Artificial Sequence
  Synthetic oligonucleotide
ctttgagaggaatcgtgtaccgttcgaagc

SEQ ID NO: 425698 - DNA, 30 bp, Artificial Sequence
  Synthetic oligonucleotide
tggcatcacaaaacggaggggtcaggaagc

SEQ ID NO: 425699 - DNA, 30 bp, Artificial Sequence
  Synthetic oligonucleotide
gatcacctcggacgagccttcataggaagc

SEQ ID NO: 425700 - DNA, 30 bp, Artificial Sequence
  Synthetic oligonucleotide
actttgtagatctgaaagccgcacggaagc

SEQ ID NO: 425701 - DNA, 30 bp, Artificial Sequence
  Synthetic oligonucleotide
taaaagattaagacgtcaatagctggaagc

SEQ ID NO: 425702 - DNA, 30 bp, Artificial Sequence
  Synthetic oligonucleotide
cagcatgtggtaatgatctctgactgaagc

SEQ ID NO: 425703 - DNA, 30 bp, Artificial Sequence
  Synthetic oligonucleotide
ccccttaactgcaacaattgtagctgaagc

SEQ ID NO: 425704 - DNA, 27 bp, Artificial Sequence
  Synthetic oligonucleotide
tatgtgtgctgctcatttttctgaagc

SEQ ID NO: 425705 - DNA, 30 bp, Artificial Sequence
  Synthetic oligonucleotide
accttgtgtttgggcacggggtcgtgaagc

SEQ ID NO: 425706 - DNA, 30 bp, Artificial Sequence
  Synthetic oligonucleotide
ctcgccctcaaggatgaagggcggtgaagc

SEQ ID NO: 425707 - DNA, 30 bp, Artificial Sequence
  Synthetic oligonucleotide
ttcattacgctggaatgtgggggttgaagc

SEQ ID NO: 425708 - DNA, 30 bp, Artificial Sequence
  Synthetic oligonucleotide
tactcgccacgcgtcaagtgaaaaataagc

SEQ ID NO: 425709 - DNA, 30 bp, Artificial Sequence
  Synthetic oligonucleotide
atcccatgagtatttaagcgagaaataagc

SEQ ID NO: 425710 - DNA, 30 bp, Artificial Sequence
  Synthetic oligonucleotide
tgacgttggtgattaaagcttgtaataagc

SEQ ID NO: 425711 - DNA, 30 bp, Artificial Sequence
  Synthetic oligonucleotide
atcagttatgaaaaaaccatatacataagc

SEQ ID NO: 425712 - DNA, 30 bp, Artificial Sequence
  Synthetic oligonucleotide
ataatcgttcagtgttgttgggccataagc

SEQ ID NO: 425713 - DNA, 30 bp, Artificial Sequence
  Synthetic oligonucleotide
attcttaacttcctgtaacatgccataagc

SEQ ID NO: 425714 - DNA, 30 bp, Artificial Sequence
  Synthetic oligonucleotide
cttggtgtcgggcttgcagaagtcataagc

SEQ ID NO: 425715 - DNA, 30 bp, Artificial Sequence
  Synthetic oligonucleotide
gttacctcctaccttgccatggtcataagc

SEQ ID NO: 425716 - DNA, 30 bp, Artificial Sequence
  Synthetic oligonucleotide
caatccctgtggcctttgacaacgataagc

SEQ ID NO: 425717 - DNA, 30 bp, Artificial Sequence
  Synthetic oligonucleotide
cttgcctttatgtttacaaaatgtataagc

SEQ ID NO: 425718 - DNA, 30 bp, Artificial Sequence
  Synthetic oligonucleotide
cggacagtattcaggttttaatttataagc

SEQ ID NO: 425719 - DNA, 30 bp, Artificial Sequence
  Synthetic oligonucleotide
tgttttatgagttgtgtctgatttataagc

SEQ ID NO: 425720 - DNA, 30 bp, Artificial Sequence
  Synthetic oligonucleotide
gataggcgcacgcaggtccactaactaagc

SEQ ID NO: 425721 - DNA, 30 bp, Artificial Sequence
  Synthetic oligonucleotide
tgtaaggcgtacatgcgctctgcgctaagc

SEQ ID NO: 425722 - DNA, 30 bp, Artificial Sequence
  Synthetic oligonucleotide
caaattgacagcacaggtaggtatctaagc

SEQ ID NO: 425723 - DNA, 28 bp, Artificial Sequence
  Synthetic oligonucleotide
cccaggtgtgggactcgcaagagtaagc

SEQ ID NO: 425724 - DNA, 30 bp, Artificial Sequence
  Synthetic oligonucleotide
gcccttagttgttacaaacatggcgtaagc

SEQ ID NO: 425725 - DNA, 30 bp, Artificial Sequence
  Synthetic oligonucleotide
aggaccgcaaacagtctccccccggtaagc

SEQ ID NO: 425726 - DNA, 30 bp, Artificial Sequence
  Synthetic oligonucleotide
atctgacgtggtcggtggcgatcggtaagc

SEQ ID NO: 425727 - DNA, 30 bp, Artificial Sequence
  Synthetic oligonucleotide
gttatttaaaaacagggcacctgggtaagc

SEQ ID NO: 425728 - DNA, 30 bp, Artificial Sequence
  Synthetic oligonucleotide
taactgttaccatgtggcagccgtgtaagc

SEQ ID NO: 425729 - DNA, 30 bp, Artificial Sequence
  Synthetic oligonucleotide
agctatcagctgacgatgctccgtgtaagc

SEQ ID NO: 425730 - DNA, 30 bp, Artificial Sequence
  Synthetic oligonucleotide
gctgcgaccgcggctaaacagcgattaagc

SEQ ID NO: 425731 - DNA, 30 bp, Artificial Sequence
  Synthetic oligonucleotide
tactttgtgcgatgtttttattacttaagc

SEQ ID NO: 425732 - DNA, 30 bp, Artificial Sequence
  Synthetic oligonucleotide
gcttagtcttccttcagcgtacggttaagc

SEQ ID NO: 425733 - DNA, 30 bp, Artificial Sequence
  Synthetic oligonucleotide
gtgtcgcagattggaactcgattgttaagc

SEQ ID NO: 425734 - DNA, 30 bp, Artificial Sequence
  Synthetic oligonucleotide
gggccctacgcgacgtgcggtagtttaagc

SEQ ID NO: 425735 - DNA, 30 bp, Artificial Sequence
  Synthetic oligonucleotide
ttgcttttaagtatatagtgctgtttaagc

SEQ ID NO: 425736 - DNA, 30 bp, Artificial Sequence
  Synthetic oligonucleotide
gtgccgcaacatggggtccttcgaaacagc

SEQ ID NO: 425737 - DNA, 30 bp, Artificial Sequence
  Synthetic oligonucleotide
aagtaaagttcgctgttagtggagaacagc

SEQ ID NO: 425738 - DNA, 30 bp, Artificial Sequence
  Synthetic oligonucleotide
attctagtgactgcgtcatacacgaacagc

SEQ ID NO: 425739 - DNA, 30 bp, Artificial Sequence
  Synthetic oligonucleotide
gaccctggtctgcccaactattcacacagc

SEQ ID NO: 425740 - DNA, 30 bp, Artificial Sequence
  Synthetic oligonucleotide
gaggtgtccaaggacgctccggcccacagc

SEQ ID NO: 425741 - DNA, 30 bp, Artificial Sequence
  Synthetic oligonucleotide
tctcctggtgggtagccgtttcggcacagc

SEQ ID NO: 425742 - DNA, 30 bp, Artificial Sequence
  Synthetic oligonucleotide
aataccttttatttagggggatggcacagc

SEQ ID NO: 425743 - DNA, 30 bp, Artificial Sequence
  Synthetic oligonucleotide
cccactctatcgacgtgatcgatgcacagc

SEQ ID NO: 425744 - DNA, 30 bp, Artificial Sequence
  Synthetic oligonucleotide
cgcatgcactgttccaggaaagctcacagc

SEQ ID NO: 425745 - DNA, 30 bp, Artificial Sequence
  Synthetic oligonucleotide
tcgcactgtagtgaaagtcccagtcacagc

SEQ ID NO: 425746 - DNA, 30 bp, Artificial Sequence
  Synthetic oligonucleotide
tatacaacgcaggcggtccgtagtcacagc

SEQ ID NO: 425747 - DNA, 30 bp, Artificial Sequence
  Synthetic oligonucleotide
cagtagagagctagtgtattccaagacagc

SEQ ID NO: 425748 - DNA, 30 bp, Artificial Sequence
  Synthetic oligonucleotide
gcacgaatctaactgaagtacgtcgacagc

SEQ ID NO: 425749 - DNA, 30 bp, Artificial Sequence
  Synthetic oligonucleotide
ttgacataaggccacgtatgggaggacagc

SEQ ID NO: 425750 - DNA, 30 bp, Artificial Sequence
  Synthetic oligonucleotide
ttgacataaggccacgtatgtgaggacagc

SEQ ID NO: 425751 - DNA, 30 bp, Artificial Sequence
  Synthetic oligonucleotide
gcattgcctaatgcttcattctaggacagc

SEQ ID NO: 425752 - DNA, 30 bp, Artificial Sequence
  Synthetic oligonucleotide
cgttttccataaggtagcattccggacagc

SEQ ID NO: 425753 - DNA, 30 bp, Artificial Sequence
  Synthetic oligonucleotide
gtaatgatccgttatcctccaactgacagc

SEQ ID NO: 425754 - DNA, 30 bp, Artificial Sequence
  Synthetic oligonucleotide
tgtttggcttctggcgtccattctgacagc

SEQ ID NO: 425755 - DNA, 30 bp, Artificial Sequence
  Synthetic oligonucleotide
cattttagaacagtataaactggtgacagc

SEQ ID NO: 425756 - DNA, 30 bp, Artificial Sequence
  Synthetic oligonucleotide
acgctatatgctaacggcgcatcgtacagc

SEQ ID NO: 425757 - DNA, 30 bp, Artificial Sequence
  Synthetic oligonucleotide
gagttcgtgatgcgaactgaaatgtacagc

SEQ ID NO: 425758 - DNA, 30 bp, Artificial Sequence
  Synthetic oligonucleotide
caataaaatcgggcaaataaattttacagc

SEQ ID NO: 425759 - DNA, 30 bp, Artificial Sequence
  Synthetic oligonucleotide
cggaggcaatcgtttttatccttttacagc

SEQ ID NO: 425760 - DNA, 30 bp, Artificial Sequence
  Synthetic oligonucleotide
gcaaattcgaatagcaccacgcgcaccagc

SEQ ID NO: 425761 - DNA, 30 bp, Artificial Sequence
  Synthetic oligonucleotide
gtactggactaactgcctgctgggaccagc

SEQ ID NO: 425762 - DNA, 30 bp, Artificial Sequence
  Synthetic oligonucleotide
taaatggcccaagggcgttccgataccagc

SEQ ID NO: 425763 - DNA, 30 bp, Artificial Sequence
  Synthetic oligonucleotide
gaacatcagttagactctttcactaccagc

SEQ ID NO: 425764 - DNA, 30 bp, Artificial Sequence
  Synthetic oligonucleotide
ttagaactaagccaaggggggtctaccagc

SEQ ID NO: 425765 - DNA, 30 bp, Artificial Sequence
  Synthetic oligonucleotide
cagattattcccctttatacatgtaccagc

SEQ ID NO: 425766 - DNA, 30 bp, Artificial Sequence
  Synthetic oligonucleotide
ctccaacttgcatgtacgtgtgtacccagc

SEQ ID NO: 425767 - DNA, 30 bp, Artificial Sequence
  Synthetic oligonucleotide
aaactcgtgctcgacaccctaccccccagc

SEQ ID NO: 425768 - DNA, 30 bp, Artificial Sequence
  Synthetic oligonucleotide
aggtacacggagcgatttaatgtgcccagc

SEQ ID NO: 425769 - DNA, 30 bp, Artificial Sequence
  Synthetic oligonucleotide
ggaaaggattttaggcctgcaaatcccagc

SEQ ID NO: 425770 - DNA, 30 bp, Artificial Sequence
  Synthetic oligonucleotide
tgatcaggtccgttctagcatgctcccagc

SEQ ID NO: 425771 - DNA, 30 bp, Artificial Sequence
  Synthetic oligonucleotide
ttactatgggtagtcagaaggatggccagc

SEQ ID NO: 425772 - DNA, 30 bp, Artificial Sequence
  Synthetic oligonucleotide
caccagctttctgccgccagccatgccagc

SEQ ID NO: 425773 - DNA, 30 bp, Artificial Sequence
  Synthetic oligonucleotide
catcatttacgccgggttaggactgccagc

SEQ ID NO: 425774 - DNA, 30 bp, Artificial Sequence
  Synthetic oligonucleotide
aggccctgaaccatctattatcaatccagc

SEQ ID NO: 425775 - DNA, 30 bp, Artificial Sequence
  Synthetic oligonucleotide
gtgggccagtcagaggcggcctattccagc

SEQ ID NO: 425776 - DNA, 30 bp, Artificial Sequence
  Synthetic oligonucleotide
aaacacaaattctgtcgcggagcttccagc

SEQ ID NO: 425777 - DNA, 30 bp, Artificial Sequence
  Synthetic oligonucleotide
gtcgagatatactatgtcgtcgcaagcagc

SEQ ID NO: 425778 - DNA, 30 bp, Artificial Sequence
  Synthetic oligonucleotide
tatctccctgggaagtagttcagaagcagc

SEQ ID NO: 425779 - DNA, 30 bp, Artificial Sequence
  Synthetic oligonucleotide
tgttataagggggatacggtgaccagcagc

SEQ ID NO: 425780 - DNA, 30 bp, Artificial Sequence
  Synthetic oligonucleotide
gatacttctacagctaacggatggagcagc

SEQ ID NO: 425781 - DNA, 30 bp, Artificial Sequence
  Synthetic oligonucleotide
atcagaagacgaacatgtgagagtagcagc

SEQ ID NO: 425782 - DNA, 30 bp, Artificial Sequence
  Synthetic oligonucleotide
gattaatatatgcgttagtaacgtagcagc

SEQ ID NO: 425783 - DNA, 30 bp, Artificial Sequence
  Synthetic oligonucleotide
cggcgctctatggtaaacatacgtagcagc

SEQ ID NO: 425784 - DNA, 30 bp, Artificial Sequence
  Synthetic oligonucleotide
ttcatcgaggggactgttttcaaacgcagc

SEQ ID NO: 425785 - DNA, 30 bp, Artificial Sequence
  Synthetic oligonucleotide
atgtgctttatagcgattgcgcaacgcagc

SEQ ID NO: 425786 - DNA, 30 bp, Artificial Sequence
  Synthetic oligonucleotide
accatacagttccgaccgtgctaacgcagc

SEQ ID NO: 425787 - DNA, 30 bp, Artificial Sequence
  Synthetic oligonucleotide
gacatgtgtcgcttgtacccaggacgcagc

SEQ ID NO: 425788 - DNA, 30 bp, Artificial Sequence
  Synthetic oligonucleotide
ttaaactgaccggcaccacgaggtcgcagc

SEQ ID NO: 425789 - DNA, 30 bp, Artificial Sequence
  Synthetic oligonucleotide
aaagtctttacctatcggctataaggcagc

SEQ ID NO: 425790 - DNA, 30 bp, Artificial Sequence
  Synthetic oligonucleotide
agaggacccacgaactccatctgaggcagc

SEQ ID NO: 425791 - DNA, 30 bp, Artificial Sequence
  Synthetic oligonucleotide
atattgtctataggtgcataacctggcagc

SEQ ID NO: 425792 - DNA, 30 bp, Artificial Sequence
  Synthetic oligonucleotide
ttggagcttatcgtctccaatgactgcagc

SEQ ID NO: 425793 - DNA, 30 bp, Artificial Sequence
  Synthetic oligonucleotide
acggaccttatgaggtgttttttttgcagc

SEQ ID NO: 425794 - DNA, 30 bp, Artificial Sequence
  Synthetic oligonucleotide
tattgtcagagttaggcgcagtgcatcagc

SEQ ID NO: 425795 - DNA, 30 bp, Artificial Sequence
  Synthetic oligonucleotide
accagtgttgctcgaacgctcgcgatcagc

SEQ ID NO: 425796 - DNA, 30 bp, Artificial Sequence
  Synthetic oligonucleotide
gggcgttttgtcagttattctgggatcagc

SEQ ID NO: 425797 - DNA, 30 bp, Artificial Sequence
  Synthetic oligonucleotide
aactgttgtgacacgcaggcacaactcagc

SEQ ID NO: 425798 - DNA, 30 bp, Artificial Sequence
  Synthetic oligonucleotide
gcctattacacacttgggacgcacctcagc

SEQ ID NO: 425799 - DNA, 30 bp, Artificial Sequence
  Synthetic oligonucleotide
gattcgcggtcagtggcctgtggcctcagc

SEQ ID NO: 425800 - DNA, 30 bp, Artificial Sequence
  Synthetic oligonucleotide
ccgcctagctgagagcagcaaccgctcagc

SEQ ID NO: 425801 - DNA, 30 bp, Artificial Sequence
  Synthetic oligonucleotide
tcttcaagttgcaaatgggtagggctcagc

SEQ ID NO: 425802 - DNA, 30 bp, Artificial Sequence
  Synthetic oligonucleotide
ccggcacaggtgacgtcgactgcggtcagc

SEQ ID NO: 425803 - DNA, 30 bp, Artificial Sequence
  Synthetic oligonucleotide
tgtttttgcctagggtgtggtcgtgtcagc

SEQ ID NO: 425804 - DNA, 30 bp, Artificial Sequence
  Synthetic oligonucleotide
gagatttcgcggaaatatgagaaattcagc

SEQ ID NO: 425805 - DNA, 30 bp, Artificial Sequence
  Synthetic oligonucleotide
gagatttcgctgaaatatgagaaattcagc

SEQ ID NO: 425806 - DNA, 30 bp, Artificial Sequence
  Synthetic oligonucleotide
gtagcaggcggtcaatcaggcggattcagc

SEQ ID NO: 425807 - DNA, 30 bp, Artificial Sequence
  Synthetic oligonucleotide
ggtcttaatttgggttcctagcgcttcagc

SEQ ID NO: 425808 - DNA, 30 bp, Artificial Sequence
  Synthetic oligonucleotide
aggtaaagttaacgcacgcatctcttcagc

SEQ ID NO: 425809 - DNA, 30 bp, Artificial Sequence
  Synthetic oligonucleotide
gttgaatgggtgcagctggaaaggttcagc

SEQ ID NO: 425810 - DNA, 30 bp, Artificial Sequence
  Synthetic oligonucleotide
gtataggtggagacgccgactgatttcagc

SEQ ID NO: 425811 - DNA, 30 bp, Artificial Sequence
  Synthetic oligonucleotide
gtaatcctactggtatgttcagctttcagc

SEQ ID NO: 425812 - DNA, 30 bp, Artificial Sequence
  Synthetic oligonucleotide
taattataggaactatggcgataaaagagc

SEQ ID NO: 425813 - DNA, 30 bp, Artificial Sequence
  Synthetic oligonucleotide
caatacgagtctgattaacaaaccaagagc

SEQ ID NO: 425814 - DNA, 30 bp, Artificial Sequence
  Synthetic oligonucleotide
gattcgcacgtagatcatcctgggaagagc

SEQ ID NO: 425815 - DNA, 30 bp, Artificial Sequence
  Synthetic oligonucleotide
gaaataagtaaagatccccagcataagagc

SEQ ID NO: 425816 - DNA, 30 bp, Artificial Sequence
  Synthetic oligonucleotide
cgcatgctagacgcggattgttgacagagc

SEQ ID NO: 425817 - DNA, 30 bp, Artificial Sequence
  Synthetic oligonucleotide
actcgttgtacgctgccgcgatctcagagc

SEQ ID NO: 425818 - DNA, 30 bp, Artificial Sequence
  Synthetic oligonucleotide
ttacatgtgccgcaagaggactgggagagc

SEQ ID NO: 425819 - DNA, 30 bp, Artificial Sequence
  Synthetic oligonucleotide
caattctactatacgaggtcgtgggagagc

SEQ ID NO: 425820 - DNA, 30 bp, Artificial Sequence
  Synthetic oligonucleotide
gtaatagttatctagtacaagtctgagagc

SEQ ID NO: 425821 - DNA, 30 bp, Artificial Sequence
  Synthetic oligonucleotide
gcgctcggcaaaatatcttgcacatagagc

SEQ ID NO: 425822 - DNA, 30 bp, Artificial Sequence
  Synthetic oligonucleotide
cagggttcatgccgagcagtgtgctagagc

SEQ ID NO: 425823 - DNA, 30 bp, Artificial Sequence
  Synthetic oligonucleotide
cccgcttaggctgaggtagtaacgtagagc

SEQ ID NO: 425824 - DNA, 30 bp, Artificial Sequence
  Synthetic oligonucleotide
gagttagtaatgtctacatgtaaaacgagc

SEQ ID NO: 425825 - DNA, 30 bp, Artificial Sequence
  Synthetic oligonucleotide
atcaaaaaatgattgagcaagccaacgagc

SEQ ID NO: 425826 - DNA, 30 bp, Artificial Sequence
  Synthetic oligonucleotide
tacgcattatgaagcttattatcgacgagc

SEQ ID NO: 425827 - DNA, 30 bp, Artificial Sequence
  Synthetic oligonucleotide
taccagcactgaaaaatatgccgcccgagc

SEQ ID NO: 425828 - DNA, 30 bp, Artificial Sequence
  Synthetic oligonucleotide
ctatattcccctagctggaaatgcccgagc

SEQ ID NO: 425829 - DNA, 30 bp, Artificial Sequence
  Synthetic oligonucleotide
ttgacgtgaagcttcgacggatgtccgagc

SEQ ID NO: 425830 - DNA, 30 bp, Artificial Sequence
  Synthetic oligonucleotide
gagggacagaacacgagtctaaaagcgagc

SEQ ID NO: 425831 - DNA, 30 bp, Artificial Sequence
  Synthetic oligonucleotide
gctcaggatccgctaggcaatgcagcgagc

SEQ ID NO: 425832 - DNA, 30 bp, Artificial Sequence
  Synthetic oligonucleotide
ttgcaagcgcgagcttcgtcgggagcgagc

SEQ ID NO: 425833 - DNA, 30 bp, Artificial Sequence
  Synthetic oligonucleotide
gcagagcagttcggcacgcagccggcgagc

SEQ ID NO: 425834 - DNA, 31 bp, Artificial Sequence
  Synthetic oligonucleotide
ggagggacccgaattggacattccggcgagc

SEQ ID NO: 425835 - DNA, 30 bp, Artificial Sequence
  Synthetic oligonucleotide
ttgaagctattaatgcctactaatgcgagc

SEQ ID NO: 425836 - DNA, 30 bp, Artificial Sequence
  Synthetic oligonucleotide
ttatcgaggactgcgtgagatcatgcgagc

SEQ ID NO: 425837 - DNA, 30 bp, Artificial Sequence
  Synthetic oligonucleotide
ctgaccaacagatcgaaaagtcaatcgagc

SEQ ID NO: 425838 - DNA, 30 bp, Artificial Sequence
  Synthetic oligonucleotide
atggggctctaagtattagtaggatcgagc

SEQ ID NO: 425839 - DNA, 30 bp, Artificial Sequence
  Synthetic oligonucleotide
cctaattaccggatgcacaatgtctcgagc

SEQ ID NO: 425840 - DNA, 30 bp, Artificial Sequence
  Synthetic oligonucleotide
gacacagttgccacgtggctgctgtcgagc

SEQ ID NO: 425841 - DNA, 30 bp, Artificial Sequence
  Synthetic oligonucleotide
gttgacggggcaccacgtaaattttcgagc

SEQ ID NO: 425842 - DNA, 30 bp, Artificial Sequence
  Synthetic oligonucleotide
gcagagctagacatttaatgcctaaggagc

SEQ ID NO: 425843 - DNA, 30 bp, Artificial Sequence
  Synthetic oligonucleotide
tctatagttagctttagaagggtaaggagc

SEQ ID NO: 425844 - DNA, 30 bp, Artificial Sequence
  Synthetic oligonucleotide
tagcttaaaatccctttgtttgtgaggagc

SEQ ID NO: 425845 - DNA, 30 bp, Artificial Sequence
  Synthetic oligonucleotide
atttattactttaaggttgccatccggagc

SEQ ID NO: 425846 - DNA, 30 bp, Artificial Sequence
  Synthetic oligonucleotide
cggatctttgctgtttaccagtatcggagc

SEQ ID NO: 425847 - DNA, 30 bp, Artificial Sequence
  Synthetic oligonucleotide
aactgccaaaacgcaacagtgaaagggagc

SEQ ID NO: 425848 - DNA, 30 bp, Artificial Sequence
  Synthetic oligonucleotide
ggacggagtgtcctaacccgtcaagggagc

SEQ ID NO: 425849 - DNA, 30 bp, Artificial Sequence
  Synthetic oligonucleotide
ttatcaatcgtggagcggatcacagggagc

SEQ ID NO: 425850 - DNA, 30 bp, Artificial Sequence
  Synthetic oligonucleotide
gcctaggcagttcgctatcagttcgggagc

SEQ ID NO: 425851 - DNA, 30 bp, Artificial Sequence
  Synthetic oligonucleotide
actccgtgaattggggggcgagaggggagc

SEQ ID NO: 425852 - DNA, 30 bp, Artificial Sequence
  Synthetic oligonucleotide
cgaaattggaccacttcagttagtgggagc

SEQ ID NO: 425853 - DNA, 30 bp, Artificial Sequence
  Synthetic oligonucleotide
ttcttgtacataaacaaggggtcatggagc

SEQ ID NO: 425854 - DNA, 30 bp, Artificial Sequence
  Synthetic oligonucleotide
gctgctcctagagcaatcctttgatggagc

SEQ ID NO: 425855 - DNA, 30 bp, Artificial Sequence
  Synthetic oligonucleotide
gattacatttacgagttggtcgactggagc

SEQ ID NO: 425856 - DNA, 30 bp, Artificial Sequence
  Synthetic oligonucleotide
cagcgttcaatcgctctcctggagtggagc

SEQ ID NO: 425857 - DNA, 30 bp, Artificial Sequence
  Synthetic oligonucleotide
ttgggttggatttgctcccgaaattggagc

SEQ ID NO: 425858 - DNA, 30 bp, Artificial Sequence
  Synthetic oligonucleotide
ttttactaattgctatgattttcttggagc

SEQ ID NO: 425859 - DNA, 30 bp, Artificial Sequence
  Synthetic oligonucleotide
tggacggaggcagacttgcatagcatgagc

SEQ ID NO: 425860 - DNA, 30 bp, Artificial Sequence
  Synthetic oligonucleotide
caccagcttttccggtggcgtttcatgagc

SEQ ID NO: 425861 - DNA, 30 bp, Artificial Sequence
  Synthetic oligonucleotide
gaatcatggctctgtgtggatcatatgagc

SEQ ID NO: 425862 - DNA, 30 bp, Artificial Sequence
  Synthetic oligonucleotide
tgtccagggagccgttaggattctatgagc

SEQ ID NO: 425863 - DNA, 30 bp, Artificial Sequence
  Synthetic oligonucleotide
gatgatgttaaccagggtataacactgagc

SEQ ID NO: 425864 - DNA, 30 bp, Artificial Sequence
  Synthetic oligonucleotide
cccgctaatgctgttcgcccaagtctgagc

SEQ ID NO: 425865 - DNA, 30 bp, Artificial Sequence
  Synthetic oligonucleotide
gttgaaggacatcagctttgtacagtgagc

SEQ ID NO: 425866 - DNA, 30 bp, Artificial Sequence
  Synthetic oligonucleotide
tgggagcggcgtaggcgcatcagagtgagc

SEQ ID NO: 425867 - DNA, 30 bp, Artificial Sequence
  Synthetic oligonucleotide
tgtgtcagtcatcaggtagcaccggtgagc

SEQ ID NO: 425868 - DNA, 30 bp, Artificial Sequence
  Synthetic oligonucleotide
acgcacatgtggcagtcagctagggtgagc

SEQ ID NO: 425869 - DNA, 30 bp, Artificial Sequence
  Synthetic oligonucleotide
atcatttctccgctcggaagaggtgtgagc

SEQ ID NO: 425870 - DNA, 30 bp, Artificial Sequence
  Synthetic oligonucleotide
gagtgacaaataataacttattgattgagc

SEQ ID NO: 425871 - DNA, 30 bp, Artificial Sequence
  Synthetic oligonucleotide
gggacgcggtactcgggctaatagttgagc

SEQ ID NO: 425872 - DNA, 30 bp, Artificial Sequence
  Synthetic oligonucleotide
ctggagtcgtttcagcgaacacggttgagc

SEQ ID NO: 425873 - DNA, 30 bp, Artificial Sequence
  Synthetic oligonucleotide
gcatactaatgccgagttgaatatttgagc

SEQ ID NO: 425874 - DNA, 30 bp, Artificial Sequence
  Synthetic oligonucleotide
gaagttcgaggtacatttgattgtttgagc

SEQ ID NO: 425875 - DNA, 30 bp, Artificial Sequence
  Synthetic oligonucleotide
tgaacatttaattacggcaggtttttgagc

SEQ ID NO: 425876 - DNA, 30 bp, Artificial Sequence
  Synthetic oligonucleotide
ggaatgacgttactgcaatagaaaaatagc

SEQ ID NO: 425877 - DNA, 30 bp, Artificial Sequence
  Synthetic oligonucleotide
atgatgagacccgactacgcgccaaatagc

SEQ ID NO: 425878 - DNA, 30 bp, Artificial Sequence
  Synthetic oligonucleotide
tagcacgacattttcggggacggaaatagc

SEQ ID NO: 425879 - DNA, 30 bp, Artificial Sequence
  Synthetic oligonucleotide
agatcctatccgaagccgtgtgtaaatagc

SEQ ID NO: 425880 - DNA, 30 bp, Artificial Sequence
  Synthetic oligonucleotide
tgctggattaagccttaagattctaatagc

SEQ ID NO: 425881 - DNA, 30 bp, Artificial Sequence
  Synthetic oligonucleotide
tgggataggatccctctttaacgtaatagc

SEQ ID NO: 425882 - DNA, 30 bp, Artificial Sequence
  Synthetic oligonucleotide
attagtttaacccatctggcaattaatagc

SEQ ID NO: 425883 - DNA, 30 bp, Artificial Sequence
  Synthetic oligonucleotide
acacaggtcatctgaagcagcgcacatagc

SEQ ID NO: 425884 - DNA, 30 bp, Artificial Sequence
  Synthetic oligonucleotide
atatcattggagtcagcgctaagacatagc

SEQ ID NO: 425885 - DNA, 30 bp, Artificial Sequence
  Synthetic oligonucleotide
gctatgtcgtacattccacgattccatagc

SEQ ID NO: 425886 - DNA, 30 bp, Artificial Sequence
  Synthetic oligonucleotide
ggaggcatgtatggtttgaatcagcatagc

SEQ ID NO: 425887 - DNA, 30 bp, Artificial Sequence
  Synthetic oligonucleotide
ggcatacgggatggggtatgggagcatagc

SEQ ID NO: 425888 - DNA, 30 bp, Artificial Sequence
  Synthetic oligonucleotide
tttaagatgtcgggcgtggcattgcatagc

SEQ ID NO: 425889 - DNA, 30 bp, Artificial Sequence
  Synthetic oligonucleotide
acccaatgtaaacaggagttgcatcatagc

SEQ ID NO: 425890 - DNA, 30 bp, Artificial Sequence
  Synthetic oligonucleotide
gcgcctttgtatgtaaaaaccggtcatagc

SEQ ID NO: 425891 - DNA, 30 bp, Artificial Sequence
  Synthetic oligonucleotide
aatcagaattattcagattgcgaggatagc

SEQ ID NO: 425892 - DNA, 30 bp, Artificial Sequence
  Synthetic oligonucleotide
attggcaggtattgaaatatggaatatagc

SEQ ID NO: 425893 - DNA, 30 bp, Artificial Sequence
  Synthetic oligonucleotide
ttaggctatggttttaggtggagatatagc

SEQ ID NO: 425894 - DNA, 30 bp, Artificial Sequence
  Synthetic oligonucleotide
gagttcactcgtggcgtatcgtgatatagc

SEQ ID NO: 425895 - DNA, 30 bp, Artificial Sequence
  Synthetic oligonucleotide
gggactatataatactatgtaagctatagc

SEQ ID NO: 425896 - DNA, 30 bp, Artificial Sequence
  Synthetic oligonucleotide
tggaggattgcgcggtggactcagtatagc

SEQ ID NO: 425897 - DNA, 30 bp, Artificial Sequence
  Synthetic oligonucleotide
agattcatacacttaattaagcattatagc

SEQ ID NO: 425898 - DNA, 30 bp, Artificial Sequence
  Synthetic oligonucleotide
ccagctttttagaatgcgtttggttatagc

SEQ ID NO: 425899 - DNA, 30 bp, Artificial Sequence
  Synthetic oligonucleotide
gatgccaaactttccgattagggaactagc

SEQ ID NO: 425900 - DNA, 30 bp, Artificial Sequence
  Synthetic oligonucleotide
gtatgaacgacatagttatctataactagc

SEQ ID NO: 425901 - DNA, 30 bp, Artificial Sequence
  Synthetic oligonucleotide
aggtagtaagcctgacgcattcagactagc

SEQ ID NO: 425902 - DNA, 29 bp, Artificial Sequence
  Synthetic oligonucleotide
aaaagtctaccccgcgggccagtactagc

SEQ ID NO: 425903 - DNA, 30 bp, Artificial Sequence
  Synthetic oligonucleotide
tgtggtcaatggttgtcgtctccacctagc

SEQ ID NO: 425904 - DNA, 30 bp, Artificial Sequence
  Synthetic oligonucleotide
tgaaggttagggtcctttagagaccctagc

SEQ ID NO: 425905 - DNA, 30 bp, Artificial Sequence
  Synthetic oligonucleotide
aagtaccgctcctatgcgctaatgcctagc

SEQ ID NO: 425906 - DNA, 30 bp, Artificial Sequence
  Synthetic oligonucleotide
ttgggattcatacatcgtgatggagctagc

SEQ ID NO: 425907 - DNA, 30 bp, Artificial Sequence
  Synthetic oligonucleotide
actaaggattgagacggtatgcgcgctagc

SEQ ID NO: 425908 - DNA, 30 bp, Artificial Sequence
  Synthetic oligonucleotide
gaagattgctgcggtatactaggcgctagc

SEQ ID NO: 425909 - DNA, 30 bp, Artificial Sequence
  Synthetic oligonucleotide
aaataatggatgtaatattatgaggctagc

SEQ ID NO: 425910 - DNA, 30 bp, Artificial Sequence
  Synthetic oligonucleotide
gatatggtcttgaaagccatttaggctagc

SEQ ID NO: 425911 - DNA, 30 bp, Artificial Sequence
  Synthetic oligonucleotide
gctatctgatgtgccaagtcatgggctagc

SEQ ID NO: 425912 - DNA, 30 bp, Artificial Sequence
  Synthetic oligonucleotide
gttcagtgtgtgtcgattgaaagatctagc

SEQ ID NO: 425913 - DNA, 30 bp, Artificial Sequence
  Synthetic oligonucleotide
ctgtatacggcaggtgccaagtcctctagc

SEQ ID NO: 425914 - DNA, 30 bp, Artificial Sequence
  Synthetic oligonucleotide
acggttgaggtctacatcaggtcctctagc

SEQ ID NO: 425915 - DNA, 30 bp, Artificial Sequence
  Synthetic oligonucleotide
ggtgtgggtaaaatcattatagcgtctagc

SEQ ID NO: 425916 - DNA, 30 bp, Artificial Sequence
  Synthetic oligonucleotide
ccagacgataggcgcaggatggcttctagc

SEQ ID NO: 425917 - DNA, 30 bp, Artificial Sequence
  Synthetic oligonucleotide
aagttccagtgtagaagcctgggttctagc

SEQ ID NO: 425918 - DNA, 30 bp, Artificial Sequence
  Synthetic oligonucleotide
gctgctacaatgaaaacgcgctgttctagc

SEQ ID NO: 425919 - DNA, 30 bp, Artificial Sequence
  Synthetic oligonucleotide
tcctacaatcgttttggcaaaatttctagc

SEQ ID NO: 425920 - DNA, 30 bp, Artificial Sequence
  Synthetic oligonucleotide
actccgtgttttaaagccgatgaaagtagc

SEQ ID NO: 425921 - DNA, 30 bp, Artificial Sequence
  Synthetic oligonucleotide
gtctagtaagcccgaattatttaaagtagc

SEQ ID NO: 425922 - DNA, 30 bp, Artificial Sequence
  Synthetic oligonucleotide
gatggttccattcgccggacggcgagtagc

SEQ ID NO: 425923 - DNA, 30 bp, Artificial Sequence
  Synthetic oligonucleotide
aatatacatgcgacatgcggtcgtagtagc

SEQ ID NO: 425924 - DNA, 30 bp, Artificial Sequence
  Synthetic oligonucleotide
tactggactctatgctcgcacacacgtagc

SEQ ID NO: 425925 - DNA, 30 bp, Artificial Sequence
  Synthetic oligonucleotide
attatgagtgagaacccagtgccacgtagc

SEQ ID NO: 425926 - DNA, 30 bp, Artificial Sequence
  Synthetic oligonucleotide
tccttataaattatttgcgtatgacgtagc

SEQ ID NO: 425927 - DNA, 30 bp, Artificial Sequence
  Synthetic oligonucleotide
aagaacaggactgccagcacgtatcgtagc

SEQ ID NO: 425928 - DNA, 30 bp, Artificial Sequence
  Synthetic oligonucleotide
aaaggcgcaaagctggttcgttatcgtagc

SEQ ID NO: 425929 - DNA, 30 bp, Artificial Sequence
  Synthetic oligonucleotide
ttgcacaagacgacatacagcgaaggtagc

SEQ ID NO: 425930 - DNA, 30 bp, Artificial Sequence
  Synthetic oligonucleotide
tcttcagactttttggctccactaggtagc

SEQ ID NO: 425931 - DNA, 30 bp, Artificial Sequence
  Synthetic oligonucleotide
gtccaactatttttaggtacattcggtagc

SEQ ID NO: 425932 - DNA, 30 bp, Artificial Sequence
  Synthetic oligonucleotide
aatggtgctccggaacgaggtgagggtagc

SEQ ID NO: 425933 - DNA, 30 bp, Artificial Sequence
  Synthetic oligonucleotide
tgtagttttgtaattgcgagtttatgtagc

SEQ ID NO: 425934 - DNA, 30 bp, Artificial Sequence
  Synthetic oligonucleotide
aagtatgaattgcgttgtaatcactgtagc

SEQ ID NO: 425935 - DNA, 30 bp, Artificial Sequence
  Synthetic oligonucleotide
gtaatcgccgtaccagcaactgcgtgtagc

SEQ ID NO: 425936 - DNA, 30 bp, Artificial Sequence
  Synthetic oligonucleotide
accccttagaccgagccgtagttgtgtagc

SEQ ID NO: 425937 - DNA, 30 bp, Artificial Sequence
  Synthetic oligonucleotide
tttggttaactgtctgctacgcattgtagc

SEQ ID NO: 425938 - DNA, 30 bp, Artificial Sequence
  Synthetic oligonucleotide
tacggatggctagaataatagttttgtagc

SEQ ID NO: 425939 - DNA, 30 bp, Artificial Sequence
  Synthetic oligonucleotide
ctataggtagggcgcctaatgcaaattagc

SEQ ID NO: 425940 - DNA, 30 bp, Artificial Sequence
  Synthetic oligonucleotide
ctgatatccagctatttcagggaaattagc

SEQ ID NO: 425941 - DNA, 31 bp, Artificial Sequence
  Synthetic oligonucleotide
actatcatcccctagttttaaaccaattagc

SEQ ID NO: 425942 - DNA, 29 bp, Artificial Sequence
  Synthetic oligonucleotide
cgacctaggccgatttcaggtgaattagc

SEQ ID NO: 425943 - DNA, 30 bp, Artificial Sequence
  Synthetic oligonucleotide
tgtgtgcaccgctaatacgggctaattagc

SEQ ID NO: 425944 - DNA, 30 bp, Artificial Sequence
  Synthetic oligonucleotide
aatacctggaaataccagaggcagattagc

SEQ ID NO: 425945 - DNA, 30 bp, Artificial Sequence
  Synthetic oligonucleotide
ctctgaggtgagcagtagatactgattagc

SEQ ID NO: 425946 - DNA, 30 bp, Artificial Sequence
  Synthetic oligonucleotide
atcatcatactcagagactgcggtattagc

SEQ ID NO: 425947 - DNA, 30 bp, Artificial Sequence
  Synthetic oligonucleotide
tgtgttcagacagtgggttggccacttagc

SEQ ID NO: 425948 - DNA, 30 bp, Artificial Sequence
  Synthetic oligonucleotide
cacgttgcacttgatgtagtaccgcttagc

SEQ ID NO: 425949 - DNA, 30 bp, Artificial Sequence
  Synthetic oligonucleotide
cttttacggccattcgttctcactcttagc

SEQ ID NO: 425950 - DNA, 30 bp, Artificial Sequence
  Synthetic oligonucleotide
agtaaagtgttacaaaatgtaattcttagc

SEQ ID NO: 425951 - DNA, 30 bp, Artificial Sequence
  Synthetic oligonucleotide
ataagtggttattctagacaaaaagttagc

SEQ ID NO: 425952 - DNA, 30 bp, Artificial Sequence
  Synthetic oligonucleotide
cggtgtgctcagaactcatagcgcgttagc

SEQ ID NO: 425953 - DNA, 30 bp, Artificial Sequence
  Synthetic oligonucleotide
tggccattgtgtgccacgaaaaaggttagc

SEQ ID NO: 425954 - DNA, 30 bp, Artificial Sequence
  Synthetic oligonucleotide
tagtgaggtatttactctcgaaaggttagc

SEQ ID NO: 425955 - DNA, 30 bp, Artificial Sequence
  Synthetic oligonucleotide
tgggggatgaaatagagtgatcgggttagc

SEQ ID NO: 425956 - DNA, 30 bp, Artificial Sequence
  Synthetic oligonucleotide
gtcccattattcactcggcgatatgttagc

SEQ ID NO: 425957 - DNA, 30 bp, Artificial Sequence
  Synthetic oligonucleotide
tctattcgtcgtgtaggctcacgtgttagc

SEQ ID NO: 425958 - DNA, 30 bp, Artificial Sequence
  Synthetic oligonucleotide
accttcctcttctaaatatggagatttagc

SEQ ID NO: 425959 - DNA, 30 bp, Artificial Sequence
  Synthetic oligonucleotide
tgtaatattctgaatacattgagctttagc

SEQ ID NO: 425960 - DNA, 30 bp, Artificial Sequence
  Synthetic oligonucleotide
attgtttgggtattacgtattgcgtttagc

SEQ ID NO: 425961 - DNA, 30 bp, Artificial Sequence
  Synthetic oligonucleotide
attattgatgtagtccaaacactaaaacgc

SEQ ID NO: 425962 - DNA, 30 bp, Artificial Sequence
  Synthetic oligonucleotide
gagtaaacttctcaaatcaatgcgaaacgc

SEQ ID NO: 425963 - DNA, 30 bp, Artificial Sequence
  Synthetic oligonucleotide
agtttggcagagaccaaggtcaataaacgc

SEQ ID NO: 425964 - DNA, 30 bp, Artificial Sequence
  Synthetic oligonucleotide
tgtttgctctgagagcgggtctgtaaacgc

SEQ ID NO: 425965 - DNA, 30 bp, Artificial Sequence
  Synthetic oligonucleotide
caataggagtgatagtctgtccttaaacgc

SEQ ID NO: 425966 - DNA, 30 bp, Artificial Sequence
  Synthetic oligonucleotide
gtattacggtaccacggggattttaaacgc

SEQ ID NO: 425967 - DNA, 30 bp, Artificial Sequence
  Synthetic oligonucleotide
gcttatgtcgtattattcgagatacaacgc

SEQ ID NO: 425968 - DNA, 30 bp, Artificial Sequence
  Synthetic oligonucleotide
gagcttaccgttaaaaaccgaagccaacgc

SEQ ID NO: 425969 - DNA, 30 bp, Artificial Sequence
  Synthetic oligonucleotide
gtttgggaggacagtacgtatatccaacgc

SEQ ID NO: 425970 - DNA, 30 bp, Artificial Sequence
  Synthetic oligonucleotide
ggtacctctatccaggtgttcccgcaacgc

SEQ ID NO: 425971 - DNA, 30 bp, Artificial Sequence
  Synthetic oligonucleotide
tccctgcggatctttcagtgatggcaacgc

SEQ ID NO: 425972 - DNA, 30 bp, Artificial Sequence
  Synthetic oligonucleotide
gcctatatagctgtaacaaaaggtcaacgc

SEQ ID NO: 425973 - DNA, 30 bp, Artificial Sequence
  Synthetic oligonucleotide
ttatgaatccgatatccttgtctagaacgc

SEQ ID NO: 425974 - DNA, 30 bp, Artificial Sequence
  Synthetic oligonucleotide
atgcgccacgttaggcaacctgcggaacgc

SEQ ID NO: 425975 - DNA, 30 bp, Artificial Sequence
  Synthetic oligonucleotide
gtcttagtcgaccattgacagtcggaacgc

SEQ ID NO: 425976 - DNA, 30 bp, Artificial Sequence
  Synthetic oligonucleotide
gcacttccctttcgaccgtaaagggaacgc

SEQ ID NO: 425977 - DNA, 30 bp, Artificial Sequence
  Synthetic oligonucleotide
taggcagcagtctccgtatgtgctgaacgc

SEQ ID NO: 425978 - DNA, 30 bp, Artificial Sequence
  Synthetic oligonucleotide
tcgaagcaggtgagacctgcacgtgaacgc

SEQ ID NO: 425979 - DNA, 30 bp, Artificial Sequence
  Synthetic oligonucleotide
accaaggttgtaaagggcttgggtgaacgc

SEQ ID NO: 425980 - DNA, 30 bp, Artificial Sequence
  Synthetic oligonucleotide
acggcggattcttccatggtactataacgc

SEQ ID NO: 425981 - DNA, 30 bp, Artificial Sequence
  Synthetic oligonucleotide
gcgacctggtgcggtagcaacttataacgc

SEQ ID NO: 425982 - DNA, 30 bp, Artificial Sequence
  Synthetic oligonucleotide
tcttaggcttaagctcaaaaatactaacgc

SEQ ID NO: 425983 - DNA, 30 bp, Artificial Sequence
  Synthetic oligonucleotide
tgaacgtggactgcagtagaacgctaacgc

SEQ ID NO: 425984 - DNA, 30 bp, Artificial Sequence
  Synthetic oligonucleotide
gcggtagagtgtaaatggaccgtctaacgc

SEQ ID NO: 425985 - DNA, 30 bp, Artificial Sequence
  Synthetic oligonucleotide
cgcgttctgccctgtttatctttctaacgc

SEQ ID NO: 425986 - DNA, 30 bp, Artificial Sequence
  Synthetic oligonucleotide
attaacgcagtgaccttagaaaagtaacgc

SEQ ID NO: 425987 - DNA, 30 bp, Artificial Sequence
  Synthetic oligonucleotide
gacttttcatgggaaggtgcaccgtaacgc

SEQ ID NO: 425988 - DNA, 30 bp, Artificial Sequence
  Synthetic oligonucleotide
ccgggacgctgttcacgactagcgtaacgc

SEQ ID NO: 425989 - DNA, 30 bp, Artificial Sequence
  Synthetic oligonucleotide
cccatgaagccgtccatggttgtgtaacgc

SEQ ID NO: 425990 - DNA, 30 bp, Artificial Sequence
  Synthetic oligonucleotide
ttcaaaagggatgatccaacgaattaacgc

SEQ ID NO: 425991 - DNA, 30 bp, Artificial Sequence
  Synthetic oligonucleotide
ctttatttggctcaattaactaattaacgc

SEQ ID NO: 425992 - DNA, 30 bp, Artificial Sequence
  Synthetic oligonucleotide
cgccgcatagtctatcataggccttaacgc

SEQ ID NO: 425993 - DNA, 30 bp, Artificial Sequence
  Synthetic oligonucleotide
gtgtggcgcgtacgtcggttctaaacacgc

SEQ ID NO: 425994 - DNA, 30 bp, Artificial Sequence
  Synthetic oligonucleotide
atggggattatccaagcatggataacacgc

SEQ ID NO: 425995 - DNA, 30 bp, Artificial Sequence
  Synthetic oligonucleotide
gggctgcgcttgcaacccaaacccacacgc

SEQ ID NO: 425996 - DNA, 30 bp, Artificial Sequence
  Synthetic oligonucleotide
agattaatgtcatcgcgtcggagcacacgc

SEQ ID NO: 425997 - DNA, 30 bp, Artificial Sequence
  Synthetic oligonucleotide
gcttcagtagtggtgataacgtcgacacgc

SEQ ID NO: 425998 - DNA, 30 bp, Artificial Sequence
  Synthetic oligonucleotide
atgctaaaacacactcactccgggacacgc

SEQ ID NO: 425999 - DNA, 30 bp, Artificial Sequence
  Synthetic oligonucleotide
gtttgcggagaaatctactaccatacacgc

SEQ ID NO: 426000 - DNA, 30 bp, Artificial Sequence
  Synthetic oligonucleotide
gaggtcataaaaggggagctctgtacacgc

SEQ ID NO: 426001 - DNA, 30 bp, Artificial Sequence
  Synthetic oligonucleotide
aagcaaagtgatttcattcacaaaccacgc

SEQ ID NO: 426002 - DNA, 30 bp, Artificial Sequence
  Synthetic oligonucleotide
gaagcgcgggctgttgtgtttcaaccacgc

SEQ ID NO: 426003 - DNA, 30 bp, Artificial Sequence
  Synthetic oligonucleotide
tgattattgaaagagtttttaatgccacgc

SEQ ID NO: 426004 - DNA, 30 bp, Artificial Sequence
  Synthetic oligonucleotide
gttgtttggcaattgggcgagcttccacgc

SEQ ID NO: 426005 - DNA, 30 bp, Artificial Sequence
  Synthetic oligonucleotide
acatcatttgacctgagcgctcttccacgc

SEQ ID NO: 426006 - DNA, 30 bp, Artificial Sequence
  Synthetic oligonucleotide
tatctgcaccatgctgtcgcccacgcacgc

SEQ ID NO: 426007 - DNA, 30 bp, Artificial Sequence
  Synthetic oligonucleotide
gaccttattagtcacgtggtaagcgcacgc

SEQ ID NO: 426008 - DNA, 30 bp, Artificial Sequence
  Synthetic oligonucleotide
tatgacaaacctcccaacccgtaggcacgc

SEQ ID NO: 426009 - DNA, 30 bp, Artificial Sequence
  Synthetic oligonucleotide
cagccatggccatacatactggatgcacgc

SEQ ID NO: 426010 - DNA, 30 bp, Artificial Sequence
  Synthetic oligonucleotide
tttatatcccaatccttgtcgtatgcacgc

SEQ ID NO: 426011 - DNA, 30 bp, Artificial Sequence
  Synthetic oligonucleotide
tgcaaattattgtattatgatgcatcacgc

SEQ ID NO: 426012 - DNA, 29 bp, Artificial Sequence
  Synthetic oligonucleotide
gtaccggaagctacggcgagggatcacgc

SEQ ID NO: 426013 - DNA, 30 bp, Artificial Sequence
  Synthetic oligonucleotide
tagacctcttttaatagataggactcacgc

SEQ ID NO: 426014 - DNA, 30 bp, Artificial Sequence
  Synthetic oligonucleotide
tcacgtgcggcactctgggattactcacgc

SEQ ID NO: 426015 - DNA, 30 bp, Artificial Sequence
  Synthetic oligonucleotide
ggtcagcagccgaagagagtgacctcacgc

SEQ ID NO: 426016 - DNA, 30 bp, Artificial Sequence
  Synthetic oligonucleotide
agacggctaacgtgccggcggaagtcacgc

SEQ ID NO: 426017 - DNA, 30 bp, Artificial Sequence
  Synthetic oligonucleotide
gcacattatacatcgtataaaaattcacgc

SEQ ID NO: 426018 - DNA, 30 bp, Artificial Sequence
  Synthetic oligonucleotide
atgacgctcccaaggcacgaaagttcacgc

SEQ ID NO: 426019 - DNA, 30 bp, Artificial Sequence
  Synthetic oligonucleotide
tacgtacggctagtattcatttgttcacgc

SEQ ID NO: 426020 - DNA, 30 bp, Artificial Sequence
  Synthetic oligonucleotide
ccaccgtaacccgcgtcgattaaaagacgc

SEQ ID NO: 426021 - DNA, 30 bp, Artificial Sequence
  Synthetic oligonucleotide
tgtggatgcaagacaaggttgtgaagacgc

SEQ ID NO: 426022 - DNA, 30 bp, Artificial Sequence
  Synthetic oligonucleotide
gacaagtagactactaaacgattaagacgc

SEQ ID NO: 426023 - DNA, 31 bp, Artificial Sequence
  Synthetic oligonucleotide
catcacgctgtatatatgcacatccagacgc

SEQ ID NO: 426024 - DNA, 30 bp, Artificial Sequence
  Synthetic oligonucleotide
ggacatggtcgagtctctaggatcagacgc

SEQ ID NO: 426025 - DNA, 30 bp, Artificial Sequence
  Synthetic oligonucleotide
ccctttaacgaacgtgtaggacggagacgc

SEQ ID NO: 426026 - DNA, 30 bp, Artificial Sequence
  Synthetic oligonucleotide
aaagaaatgtaggcaattatttatagacgc

SEQ ID NO: 426027 - DNA, 30 bp, Artificial Sequence
  Synthetic oligonucleotide
actgatttctcgtcaggggaacctagacgc

SEQ ID NO: 426028 - DNA, 30 bp, Artificial Sequence
  Synthetic oligonucleotide
gggttcttatgcctggcccaggctagacgc

SEQ ID NO: 426029 - DNA, 30 bp, Artificial Sequence
  Synthetic oligonucleotide
gcctcccgaacataaaagtgcagtagacgc

SEQ ID NO: 426030 - DNA, 30 bp, Artificial Sequence
  Synthetic oligonucleotide
ctaaactcaagcttagatatgggtagacgc

SEQ ID NO: 426031 - DNA, 30 bp, Artificial Sequence
  Synthetic oligonucleotide
ttgtgctcagcgaaattcgtgaaccgacgc

SEQ ID NO: 426032 - DNA, 30 bp, Artificial Sequence
  Synthetic oligonucleotide
gaagtttcatggacacccttgatccgacgc

SEQ ID NO: 426033 - DNA, 30 bp, Artificial Sequence
  Synthetic oligonucleotide
cgcgaggtgattatgcctcctgtccgacgc

SEQ ID NO: 426034 - DNA, 30 bp, Artificial Sequence
  Synthetic oligonucleotide
tcgacaaaatagagtgaccggaatcgacgc

SEQ ID NO: 426035 - DNA, 30 bp, Artificial Sequence
  Synthetic oligonucleotide
gaagtttataacagtaggacttgaggacgc

SEQ ID NO: 426036 - DNA, 30 bp, Artificial Sequence
  Synthetic oligonucleotide
aggcgaaacaccgactaaacgataggacgc

SEQ ID NO: 426037 - DNA, 30 bp, Artificial Sequence
  Synthetic oligonucleotide
agcaggtcaaggggtccgtaccgcggacgc

SEQ ID NO: 426038 - DNA, 30 bp, Artificial Sequence
  Synthetic oligonucleotide
ttcttggaccctgcagagctaggcggacgc

SEQ ID NO: 426039 - DNA, 30 bp, Artificial Sequence
  Synthetic oligonucleotide
gcctagaggcacccccccagatcgggacgc

SEQ ID NO: 426040 - DNA, 30 bp, Artificial Sequence
  Synthetic oligonucleotide
acacatggggagccaaaaatggggggacgc

SEQ ID NO: 426041 - DNA, 30 bp, Artificial Sequence
  Synthetic oligonucleotide
gtatggcgggctgataagtacatgggacgc

SEQ ID NO: 426042 - DNA, 30 bp, Artificial Sequence
  Synthetic oligonucleotide
caatgcgtacttagacgtccgcatggacgc

SEQ ID NO: 426043 - DNA, 30 bp, Artificial Sequence
  Synthetic oligonucleotide
agacatggtcttatgacaaagattggacgc

SEQ ID NO: 426044 - DNA, 30 bp, Artificial Sequence
  Synthetic oligonucleotide
cgcgaggaggcattttgaattcttggacgc

SEQ ID NO: 426045 - DNA, 30 bp, Artificial Sequence
  Synthetic oligonucleotide
agtctccgggtcgtgtggcccaactgacgc

SEQ ID NO: 426046 - DNA, 30 bp, Artificial Sequence
  Synthetic oligonucleotide
cagcgacaggaaacaaacaatcattgacgc

SEQ ID NO: 426047 - DNA, 30 bp, Artificial Sequence
  Synthetic oligonucleotide
cgtacaggcttattcagaaacggaatacgc

SEQ ID NO: 426048 - DNA, 30 bp, Artificial Sequence
  Synthetic oligonucleotide
aaaaataccgaggacgttaaatgaatacgc

SEQ ID NO: 426049 - DNA, 30 bp, Artificial Sequence
  Synthetic oligonucleotide
gccggcggaacttattttgtgtcgatacgc

SEQ ID NO: 426050 - DNA, 30 bp, Artificial Sequence
  Synthetic oligonucleotide
aaaatatgagccaaaacatcgaatatacgc

SEQ ID NO: 426051 - DNA, 30 bp, Artificial Sequence
  Synthetic oligonucleotide
tctggggcaccctgtgctttaaaactacgc

SEQ ID NO: 426052 - DNA, 30 bp, Artificial Sequence
  Synthetic oligonucleotide
aatctgggacggaagcggacggaactacgc

SEQ ID NO: 426053 - DNA, 30 bp, Artificial Sequence
  Synthetic oligonucleotide
gggtagaggggtctttggtgctcactacgc

SEQ ID NO: 426054 - DNA, 30 bp, Artificial Sequence
  Synthetic oligonucleotide
cgaggttaacagcatcgtcggaacctacgc

SEQ ID NO: 426055 - DNA, 31 bp, Artificial Sequence
  Synthetic oligonucleotide
ataagggctagcgtagggccctcacctacgc

SEQ ID NO: 426056 - DNA, 30 bp, Artificial Sequence
  Synthetic oligonucleotide
gcaaaacatctctcatctgttgtgctacgc

SEQ ID NO: 426057 - DNA, 30 bp, Artificial Sequence
  Synthetic oligonucleotide
agactcggaattccctgcaattatctacgc

SEQ ID NO: 426058 - DNA, 30 bp, Artificial Sequence
  Synthetic oligonucleotide
tcttctgacaccggtgcgattgctctacgc

SEQ ID NO: 426059 - DNA, 30 bp, Artificial Sequence
  Synthetic oligonucleotide
gattgctcaggggcaacaagttctctacgc

SEQ ID NO: 426060 - DNA, 30 bp, Artificial Sequence
  Synthetic oligonucleotide
tgaacgcaccatcgataggtcagtctacgc

SEQ ID NO: 426061 - DNA, 30 bp, Artificial Sequence
  Synthetic oligonucleotide
cgtttagtagccggttcaatatttctacgc

SEQ ID NO: 426062 - DNA, 30 bp, Artificial Sequence
  Synthetic oligonucleotide
tgtattagatgactaatgaacggggtacgc

SEQ ID NO: 426063 - DNA, 30 bp, Artificial Sequence
  Synthetic oligonucleotide
tttaggggagccaagcgtcggctggtacgc

SEQ ID NO: 426064 - DNA, 30 bp, Artificial Sequence
  Synthetic oligonucleotide
atggcgtgtgactatcccccacatgtacgc

SEQ ID NO: 426065 - DNA, 30 bp, Artificial Sequence
  Synthetic oligonucleotide
caccagtccttgattcgggagactgtacgc

SEQ ID NO: 426066 - DNA, 30 bp, Artificial Sequence
  Synthetic oligonucleotide
ggataggatagatctctcgagcacttacgc

SEQ ID NO: 426067 - DNA, 30 bp, Artificial Sequence
  Synthetic oligonucleotide
ttccaaaaccccaaccggccgccgttacgc

SEQ ID NO: 426068 - DNA, 28 bp, Artificial Sequence
  Synthetic oligonucleotide
gatcgcgtcgttccatcacgcgttacgc

SEQ ID NO: 426069 - DNA, 30 bp, Artificial Sequence
  Synthetic oligonucleotide
gacctgtcgcgtgttaaaattaggttacgc

SEQ ID NO: 426070 - DNA, 30 bp, Artificial Sequence
  Synthetic oligonucleotide
ctagcccgtgtccgaatccgggggttacgc

SEQ ID NO: 426071 - DNA, 30 bp, Artificial Sequence
  Synthetic oligonucleotide
gtaggcaatctcttaaattaactgttacgc

SEQ ID NO: 426072 - DNA, 30 bp, Artificial Sequence
  Synthetic oligonucleotide
ctttattgccttcttcgctatcttttacgc

SEQ ID NO: 426073 - DNA, 30 bp, Artificial Sequence
  Synthetic oligonucleotide
tacatgtaggacgctgaaagacccaaccgc

SEQ ID NO: 426074 - DNA, 30 bp, Artificial Sequence
  Synthetic oligonucleotide
cagccaacaatggggtttgaccccaaccgc

SEQ ID NO: 426075 - DNA, 30 bp, Artificial Sequence
  Synthetic oligonucleotide
gagtgctaacaacggaactgcggcaaccgc

SEQ ID NO: 426076 - DNA, 30 bp, Artificial Sequence
  Synthetic oligonucleotide
gattcacaatcggtgaattatctcaaccgc

SEQ ID NO: 426077 - DNA, 30 bp, Artificial Sequence
  Synthetic oligonucleotide
gtaggtttgctgcaggaacaccttaaccgc

SEQ ID NO: 426078 - DNA, 30 bp, Artificial Sequence
  Synthetic oligonucleotide
tgttatgccgctatgaggcgatcacaccgc

SEQ ID NO: 426079 - DNA, 30 bp, Artificial Sequence
  Synthetic oligonucleotide
ctactgactcgtaagtttatgcgacaccgc

SEQ ID NO: 426080 - DNA, 30 bp, Artificial Sequence
  Synthetic oligonucleotide
cgctgttctaatagctgttcgtttcaccgc

SEQ ID NO: 426081 - DNA, 30 bp, Artificial Sequence
  Synthetic oligonucleotide
tttttctagctgcggatcatctgagaccgc

SEQ ID NO: 426082 - DNA, 30 bp, Artificial Sequence
  Synthetic oligonucleotide
tttggaacccgacggtcagtcatagaccgc

SEQ ID NO: 426083 - DNA, 30 bp, Artificial Sequence
  Synthetic oligonucleotide
gggaacgcagaaaaactatttagcgaccgc

SEQ ID NO: 426084 - DNA, 30 bp, Artificial Sequence
  Synthetic oligonucleotide
agtcgcgttaagcagcgttttcgcgaccgc

SEQ ID NO: 426085 - DNA, 30 bp, Artificial Sequence
  Synthetic oligonucleotide
tattttctgttcttaacctcgttcgaccgc

SEQ ID NO: 426086 - DNA, 30 bp, Artificial Sequence
  Synthetic oligonucleotide
gtacagctcgaggcccttcctcttgaccgc

SEQ ID NO: 426087 - DNA, 30 bp, Artificial Sequence
  Synthetic oligonucleotide
aggtcgcattgtgacgcgagggcctaccgc

SEQ ID NO: 426088 - DNA, 30 bp, Artificial Sequence
  Synthetic oligonucleotide
ggcctcatcgagtgcctactcttctaccgc

SEQ ID NO: 426089 - DNA, 30 bp, Artificial Sequence
  Synthetic oligonucleotide
gctagttcgagcacttgagcaaagtaccgc

SEQ ID NO: 426090 - DNA, 30 bp, Artificial Sequence
  Synthetic oligonucleotide
gcagaccagccggcccaccaatgttaccgc

SEQ ID NO: 426091 - DNA, 30 bp, Artificial Sequence
  Synthetic oligonucleotide
tatcttattaggtgaacgggcaccacccgc

SEQ ID NO: 426092 - DNA, 30 bp, Artificial Sequence
  Synthetic oligonucleotide
tgcaaacacagtaacgcagagtagacccgc

SEQ ID NO: 426093 - DNA, 30 bp, Artificial Sequence
  Synthetic oligonucleotide
gcctgacaacttcgccccgttacgccccgc

SEQ ID NO: 426094 - DNA, 30 bp, Artificial Sequence
  Synthetic oligonucleotide
gtaaccctcgaggtacctgcgcatccccgc

SEQ ID NO: 426095 - DNA, 30 bp, Artificial Sequence
  Synthetic oligonucleotide
aaatatgcgagaacgacatattatccccgc

SEQ ID NO: 426096 - DNA, 30 bp, Artificial Sequence
  Synthetic oligonucleotide
cattcggacgcgtaagccatccgagcccgc

SEQ ID NO: 426097 - DNA, 30 bp, Artificial Sequence
  Synthetic oligonucleotide
ttacggcaataatccccgtttgccgcccgc

SEQ ID NO: 426098 - DNA, 30 bp, Artificial Sequence
  Synthetic oligonucleotide
tttattagcaaacatgtcagacgttcccgc

SEQ ID NO: 426099 - DNA, 30 bp, Artificial Sequence
  Synthetic oligonucleotide
ctcggatatagcataagcgttaaaagccgc

SEQ ID NO: 426100 - DNA, 28 bp, Artificial Sequence
  Synthetic oligonucleotide
aatcagctcttggatacgattaagccgc

SEQ ID NO: 426101 - DNA, 30 bp, Artificial Sequence
  Synthetic oligonucleotide
cccggccttagtgggtccaaatgcagccgc

SEQ ID NO: 426102 - DNA, 30 bp, Artificial Sequence
  Synthetic oligonucleotide
aggctatttggcagttattaggtcagccgc

SEQ ID NO: 426103 - DNA, 30 bp, Artificial Sequence
  Synthetic oligonucleotide
ctgtgcatctatttcattggaacacgccgc

SEQ ID NO: 426104 - DNA, 30 bp, Artificial Sequence
  Synthetic oligonucleotide
tcttgtcgccgggatttaggcatacgccgc

SEQ ID NO: 426105 - DNA, 30 bp, Artificial Sequence
  Synthetic oligonucleotide
ttggacctatggtttttgcctctccgccgc

SEQ ID NO: 426106 - DNA, 30 bp, Artificial Sequence
  Synthetic oligonucleotide
acaagtgacgcctttgtcgtggatcgccgc

SEQ ID NO: 426107 - DNA, 30 bp, Artificial Sequence
  Synthetic oligonucleotide
ttgttatgcgcggagatatagtagggccgc

SEQ ID NO: 426108 - DNA, 30 bp, Artificial Sequence
  Synthetic oligonucleotide
aataaatatctgggactaaggtagggccgc

SEQ ID NO: 426109 - DNA, 30 bp, Artificial Sequence
  Synthetic oligonucleotide
tcccataccgcgttcattcttgaatgccgc

SEQ ID NO: 426110 - DNA, 30 bp, Artificial Sequence
  Synthetic oligonucleotide
attggacccatgagttgtgatacatgccgc

SEQ ID NO: 426111 - DNA, 30 bp, Artificial Sequence
  Synthetic oligonucleotide
gccggcgtagtggctaacaaatattgccgc

SEQ ID NO: 426112 - DNA, 30 bp, Artificial Sequence
  Synthetic oligonucleotide
tagaaaagcgttattcacgtaggttgccgc

SEQ ID NO: 426113 - DNA, 31 bp, Artificial Sequence
  Synthetic oligonucleotide
ctatggggggctatatagtaacccaatccgc

SEQ ID NO: 426114 - DNA, 30 bp, Artificial Sequence
  Synthetic oligonucleotide
atgggtcgagcgtaacggacttgaatccgc

SEQ ID NO: 426115 - DNA, 30 bp, Artificial Sequence
  Synthetic oligonucleotide
ggacatcggccaccgctcatttcgatccgc

SEQ ID NO: 426116 - DNA, 30 bp, Artificial Sequence
  Synthetic oligonucleotide
agaaacgctcgcacgtagaaagctatccgc

SEQ ID NO: 426117 - DNA, 30 bp, Artificial Sequence
  Synthetic oligonucleotide
agcactgggtgataatacggttgtatccgc

SEQ ID NO: 426118 - DNA, 30 bp, Artificial Sequence
  Synthetic oligonucleotide
gttcgccacccacccgtaacggttatccgc

SEQ ID NO: 426119 - DNA, 30 bp, Artificial Sequence
  Synthetic oligonucleotide
tgagaactcctcattcgacaaggactccgc

SEQ ID NO: 426120 - DNA, 30 bp, Artificial Sequence
  Synthetic oligonucleotide
gtctgcgtgcgccgacccatcggactccgc

SEQ ID NO: 426121 - DNA, 30 bp, Artificial Sequence
  Synthetic oligonucleotide
aatgacggttttgcactagctcttctccgc

SEQ ID NO: 426122 - DNA, 30 bp, Artificial Sequence
  Synthetic oligonucleotide
tttcaatcttgtagagagaattaagtccgc

SEQ ID NO: 426123 - DNA, 30 bp, Artificial Sequence
  Synthetic oligonucleotide
ccgatacgcatcagccaaaacaaattccgc

SEQ ID NO: 426124 - DNA, 30 bp, Artificial Sequence
  Synthetic oligonucleotide
atgctttgagtccgtcccttccgattccgc

SEQ ID NO: 426125 - DNA, 30 bp, Artificial Sequence
  Synthetic oligonucleotide
gggatagcggaatggcaactcatattccgc

SEQ ID NO: 426126 - DNA, 30 bp, Artificial Sequence
  Synthetic oligonucleotide
gacccgacgcgacttgctgggttattccgc

SEQ ID NO: 426127 - DNA, 30 bp, Artificial Sequence
  Synthetic oligonucleotide
atttgtgggcgaattacccacgcaaagcgc

SEQ ID NO: 426128 - DNA, 30 bp, Artificial Sequence
  Synthetic oligonucleotide
attagtattcgaaatggacacggaaagcgc

SEQ ID NO: 426129 - DNA, 30 bp, Artificial Sequence
  Synthetic oligonucleotide
tccggggtatcctattgttcttacaagcgc

SEQ ID NO: 426130 - DNA, 30 bp, Artificial Sequence
  Synthetic oligonucleotide
tcccagaacttaatctgcgctatcaagcgc

SEQ ID NO: 426131 - DNA, 30 bp, Artificial Sequence
  Synthetic oligonucleotide
cggtctcacgacgtcgttcaggtgaagcgc

SEQ ID NO: 426132 - DNA, 30 bp, Artificial Sequence
  Synthetic oligonucleotide
ggatctctcttttcgagacacgcacagcgc

SEQ ID NO: 426133 - DNA, 30 bp, Artificial Sequence
  Synthetic oligonucleotide
gatgaatgaggttccgctggcgcacagcgc

SEQ ID NO: 426134 - DNA, 30 bp, Artificial Sequence
  Synthetic oligonucleotide
accaaagaacgagtacactggaaccagcgc

SEQ ID NO: 426135 - DNA, 30 bp, Artificial Sequence
  Synthetic oligonucleotide
gtgtacttcatttgcgtacttccgcagcgc

SEQ ID NO: 426136 - DNA, 30 bp, Artificial Sequence
  Synthetic oligonucleotide
gaattccataatatcctaaactggcagcgc

SEQ ID NO: 426137 - DNA, 30 bp, Artificial Sequence
  Synthetic oligonucleotide
tatcgagagatccagctttaggtgcagcgc

SEQ ID NO: 426138 - DNA, 30 bp, Artificial Sequence
  Synthetic oligonucleotide
cacgagcctgcagtgcgaatcagtcagcgc

SEQ ID NO: 426139 - DNA, 30 bp, Artificial Sequence
  Synthetic oligonucleotide
aatttggtgaggttcctcgcgaaagagcgc

SEQ ID NO: 426140 - DNA, 30 bp, Artificial Sequence
  Synthetic oligonucleotide
gcactattcttcaagatcttgggggagcgc

SEQ ID NO: 426141 - DNA, 30 bp, Artificial Sequence
  Synthetic oligonucleotide
cttcccgtttattgtgtttgactggagcgc

SEQ ID NO: 426142 - DNA, 30 bp, Artificial Sequence
  Synthetic oligonucleotide
agattcgtgtttacattttgctatgagcgc

SEQ ID NO: 426143 - DNA, 30 bp, Artificial Sequence
  Synthetic oligonucleotide
gccgcacactatgataattattatgagcgc

SEQ ID NO: 426144 - DNA, 30 bp, Artificial Sequence
  Synthetic oligonucleotide
ttattttccaaccaagatgtttactagcgc

SEQ ID NO: 426145 - DNA, 30 bp, Artificial Sequence
  Synthetic oligonucleotide
cgcatgacacttggagcccccagctagcgc

SEQ ID NO: 426146 - DNA, 30 bp, Artificial Sequence
  Synthetic oligonucleotide
ttttaaattttaagaacagtatgctagcgc

SEQ ID NO: 426147 - DNA, 30 bp, Artificial Sequence
  Synthetic oligonucleotide
gagccaactcgtggaaattatatctagcgc

SEQ ID NO: 426148 - DNA, 30 bp, Artificial Sequence
  Synthetic oligonucleotide
aggctctggtacatgttattatcgtagcgc

SEQ ID NO: 426149 - DNA, 30 bp, Artificial Sequence
  Synthetic oligonucleotide
attatggaggccataaatgccaggtagcgc

SEQ ID NO: 426150 - DNA, 30 bp, Artificial Sequence
  Synthetic oligonucleotide
gtttgcaaagccatttaagtctggtagcgc

SEQ ID NO: 426151 - DNA, 30 bp, Artificial Sequence
  Synthetic oligonucleotide
aaacgtctggaggtccgcaccgattagcgc

SEQ ID NO: 426152 - DNA, 30 bp, Artificial Sequence
  Synthetic oligonucleotide
actttagaaggcagctattaacgttagcgc

SEQ ID NO: 426153 - DNA, 30 bp, Artificial Sequence
  Synthetic oligonucleotide
cagcggatttgacggcaggttctttagcgc

SEQ ID NO: 426154 - DNA, 30 bp, Artificial Sequence
  Synthetic oligonucleotide
ggccaggccggtggtggacggtcaacgcgc

SEQ ID NO: 426155 - DNA, 30 bp, Artificial Sequence
  Synthetic oligonucleotide
acctgtccctgtaggaaggagggcacgcgc

SEQ ID NO: 426156 - DNA, 30 bp, Artificial Sequence
  Synthetic oligonucleotide
gatgcgatttataatgtagcaaagacgcgc

SEQ ID NO: 426157 - DNA, 30 bp, Artificial Sequence
  Synthetic oligonucleotide
gggttaagaacccttactctgttgacgcgc

SEQ ID NO: 426158 - DNA, 30 bp, Artificial Sequence
  Synthetic oligonucleotide
cgcttgtttccagtctttatcactacgcgc

SEQ ID NO: 426159 - DNA, 30 bp, Artificial Sequence
  Synthetic oligonucleotide
tcatattacccagtagggtgtactacgcgc

SEQ ID NO: 426160 - DNA, 30 bp, Artificial Sequence
  Synthetic oligonucleotide
gaaaagagcggatccgattaagctacgcgc

SEQ ID NO: 426161 - DNA, 30 bp, Artificial Sequence
  Synthetic oligonucleotide
acatgtttttgccaagttggatctacgcgc

SEQ ID NO: 426162 - DNA, 30 bp, Artificial Sequence
  Synthetic oligonucleotide
ttctatatttggaggcgaaaccttacgcgc

SEQ ID NO: 426163 - DNA, 30 bp, Artificial Sequence
  Synthetic oligonucleotide
attatatgcttatatctgtggctgccgcgc

SEQ ID NO: 426164 - DNA, 30 bp, Artificial Sequence
  Synthetic oligonucleotide
cctcgatcataatgtttcgttggtccgcgc

SEQ ID NO: 426165 - DNA, 30 bp, Artificial Sequence
  Synthetic oligonucleotide
cactctggaacgcgggaattaatagcgcgc

SEQ ID NO: 426166 - DNA, 30 bp, Artificial Sequence
  Synthetic oligonucleotide
ccaatctagggtctatgcatggtagcgcgc

SEQ ID NO: 426167 - DNA, 30 bp, Artificial Sequence
  Synthetic oligonucleotide
gtgtgtcgcaggagacaaattactgcgcgc

SEQ ID NO: 426168 - DNA, 30 bp, Artificial Sequence
  Synthetic oligonucleotide
ctttaagccagacaagctattgctgcgcgc

SEQ ID NO: 426169 - DNA, 30 bp, Artificial Sequence
  Synthetic oligonucleotide
ctcggtggtctatatgcccggtgtgcgcgc

SEQ ID NO: 426170 - DNA, 30 bp, Artificial Sequence
  Synthetic oligonucleotide
ggcattcttagttctattgtgcaatcgcgc

SEQ ID NO: 426171 - DNA, 30 bp, Artificial Sequence
  Synthetic oligonucleotide
tttacaggtatatattccttttaatcgcgc

SEQ ID NO: 426172 - DNA, 30 bp, Artificial Sequence
  Synthetic oligonucleotide
caatgggtctcagtgcttcggaattcgcgc

SEQ ID NO: 426173 - DNA, 30 bp, Artificial Sequence
  Synthetic oligonucleotide
ctagcttgcaacgcgagcaacacttcgcgc

SEQ ID NO: 426174 - DNA, 30 bp, Artificial Sequence
  Synthetic oligonucleotide
gagagagcttctgcgatttcacaaaggcgc

SEQ ID NO: 426175 - DNA, 30 bp, Artificial Sequence
  Synthetic oligonucleotide
gccactgatagagtgatgttgctcaggcgc

SEQ ID NO: 426176 - DNA, 30 bp, Artificial Sequence
  Synthetic oligonucleotide
actagacagctgcatacggacgtcaggcgc

SEQ ID NO: 426177 - DNA, 30 bp, Artificial Sequence
  Synthetic oligonucleotide
gtgctagatggcccgtacgatcttaggcgc

SEQ ID NO: 426178 - DNA, 30 bp, Artificial Sequence
  Synthetic oligonucleotide
acaggactatctttgtggacccaccggcgc

SEQ ID NO: 426179 - DNA, 30 bp, Artificial Sequence
  Synthetic oligonucleotide
tgtcggagtatgaagtaggcttgccggcgc

SEQ ID NO: 426180 - DNA, 30 bp, Artificial Sequence
  Synthetic oligonucleotide
attcgacggttggttatagggccgcggcgc

SEQ ID NO: 426181 - DNA, 30 bp, Artificial Sequence
  Synthetic oligonucleotide
cttgcttaggacacccaaggactgcggcgc

SEQ ID NO: 426182 - DNA, 30 bp, Artificial Sequence
  Synthetic oligonucleotide
taaattcgttgtttagatctcaaagggcgc

SEQ ID NO: 426183 - DNA, 30 bp, Artificial Sequence
  Synthetic oligonucleotide
tagttactttgcagtaaagcaatagggcgc

SEQ ID NO: 426184 - DNA, 30 bp, Artificial Sequence
  Synthetic oligonucleotide
ccgcggttcacgtgggaccgcagggggcgc

SEQ ID NO: 426185 - DNA, 30 bp, Artificial Sequence
  Synthetic oligonucleotide
accggtccactgctggttttgagggggcgc

SEQ ID NO: 426186 - DNA, 30 bp, Artificial Sequence
  Synthetic oligonucleotide
actgttaaaagaccgagcgtttaatggcgc

SEQ ID NO: 426187 - DNA, 30 bp, Artificial Sequence
  Synthetic oligonucleotide
gtacggtcagtaagggggtcagactggcgc

SEQ ID NO: 426188 - DNA, 30 bp, Artificial Sequence
  Synthetic oligonucleotide
ccggacggaacttctaactcagtctggcgc

SEQ ID NO: 426189 - DNA, 30 bp, Artificial Sequence
  Synthetic oligonucleotide
tcaacgatgatacagacacgtccgtggcgc

SEQ ID NO: 426190 - DNA, 30 bp, Artificial Sequence
  Synthetic oligonucleotide
gcagttgacaagaaggactgcaggtggcgc

SEQ ID NO: 426191 - DNA, 30 bp, Artificial Sequence
  Synthetic oligonucleotide
ataacaatttataaccagagacggtggcgc

SEQ ID NO: 426192 - DNA, 30 bp, Artificial Sequence
  Synthetic oligonucleotide
cgtgtggctctagattatgtacggtggcgc

SEQ ID NO: 426193 - DNA, 30 bp, Artificial Sequence
  Synthetic oligonucleotide
ttgcagcgcctgactgcgaaaatgtggcgc

SEQ ID NO: 426194 - DNA, 30 bp, Artificial Sequence
  Synthetic oligonucleotide
tgtagatgtcaatctcaagtgttttggcgc

SEQ ID NO: 426195 - DNA, 30 bp, Artificial Sequence
  Synthetic oligonucleotide
taattaccgacttaagttttggaaatgcgc

SEQ ID NO: 426196 - DNA, 30 bp, Artificial Sequence
  Synthetic oligonucleotide
gcctgtgcgtgtacgtatcagagaatgcgc

SEQ ID NO: 426197 - DNA, 31 bp, Artificial Sequence
  Synthetic oligonucleotide
gaatcttattacgggatcagcaggaatgcgc

SEQ ID NO: 426198 - DNA, 30 bp, Artificial Sequence
  Synthetic oligonucleotide
tataatatcgattttaggggtatgatgcgc

SEQ ID NO: 426199 - DNA, 30 bp, Artificial Sequence
  Synthetic oligonucleotide
ttgcacgccgcttcagtttaagctatgcgc

SEQ ID NO: 426200 - DNA, 30 bp, Artificial Sequence
  Synthetic oligonucleotide
gagcgctggtttaacagcggtcgactgcgc

SEQ ID NO: 426201 - DNA, 30 bp, Artificial Sequence
  Synthetic oligonucleotide
tgtgtgaatagtgctgctatctgactgcgc

SEQ ID NO: 426202 - DNA, 30 bp, Artificial Sequence
  Synthetic oligonucleotide
accgcaatgtagatgtaagatctactgcgc

SEQ ID NO: 426203 - DNA, 30 bp, Artificial Sequence
  Synthetic oligonucleotide
gatcacccacaggccgtttggggcctgcgc

SEQ ID NO: 426204 - DNA, 30 bp, Artificial Sequence
  Synthetic oligonucleotide
acgcagcccatgctgtatgcgtaggtgcgc

SEQ ID NO: 426205 - DNA, 30 bp, Artificial Sequence
  Synthetic oligonucleotide
taagccttggctatggctgtgagggtgcgc

SEQ ID NO: 426206 - DNA, 30 bp, Artificial Sequence
  Synthetic oligonucleotide
cagccacgtccatgtcgcaagacattgcgc

SEQ ID NO: 426207 - DNA, 30 bp, Artificial Sequence
  Synthetic oligonucleotide
gcagaatttcggctcattcacgatttgcgc

SEQ ID NO: 426208 - DNA, 30 bp, Artificial Sequence
  Synthetic oligonucleotide
agaagtgatacgccgagcgcggaaaatcgc

SEQ ID NO: 426209 - DNA, 30 bp, Artificial Sequence
  Synthetic oligonucleotide
ttaacaacatcatttggccttaggaatcgc

SEQ ID NO: 426210 - DNA, 30 bp, Artificial Sequence
  Synthetic oligonucleotide
gcgccagtcggtcgaccattccctaatcgc

SEQ ID NO: 426211 - DNA, 30 bp, Artificial Sequence
  Synthetic oligonucleotide
gctaatagtatctgattaagagctaatcgc

SEQ ID NO: 426212 - DNA, 30 bp, Artificial Sequence
  Synthetic oligonucleotide
attaaccccttggttcgtccattacatcgc

SEQ ID NO: 426213 - DNA, 30 bp, Artificial Sequence
  Synthetic oligonucleotide
cgttctattaccgattgatactagcatcgc

SEQ ID NO: 426214 - DNA, 30 bp, Artificial Sequence
  Synthetic oligonucleotide
agtgattttacggggcagatttagcatcgc

SEQ ID NO: 426215 - DNA, 30 bp, Artificial Sequence
  Synthetic oligonucleotide
gacctgtgcatctctaccttcacgcatcgc

SEQ ID NO: 426216 - DNA, 30 bp, Artificial Sequence
  Synthetic oligonucleotide
tcaagcaaggacaagcgtggctcgcatcgc

SEQ ID NO: 426217 - DNA, 31 bp, Artificial Sequence
  Synthetic oligonucleotide
tcagctctattgcgtcgtctcagggcatcgc

SEQ ID NO: 426218 - DNA, 30 bp, Artificial Sequence
  Synthetic oligonucleotide
ttcccacggtatacctcatacgggcatcgc

SEQ ID NO: 426219 - DNA, 30 bp, Artificial Sequence
  Synthetic oligonucleotide
gagtgaaaatagcgtagatacgtgcatcgc

SEQ ID NO: 426220 - DNA, 30 bp, Artificial Sequence
  Synthetic oligonucleotide
gctagttcgctggtctgcattggagatcgc

SEQ ID NO: 426221 - DNA, 30 bp, Artificial Sequence
  Synthetic oligonucleotide
tatagcagatgacgcctaattgctgatcgc

SEQ ID NO: 426222 - DNA, 30 bp, Artificial Sequence
  Synthetic oligonucleotide
cataagactgccggagcaggtagtgatcgc

SEQ ID NO: 426223 - DNA, 30 bp, Artificial Sequence
  Synthetic oligonucleotide
tggttccatgagtctggtattaaatatcgc

SEQ ID NO: 426224 - DNA, 30 bp, Artificial Sequence
  Synthetic oligonucleotide
agcactcaggacagctggtgtgaatatcgc

SEQ ID NO: 426225 - DNA, 30 bp, Artificial Sequence
  Synthetic oligonucleotide
gtccgttacggcattttcttctactatcgc

SEQ ID NO: 426226 - DNA, 30 bp, Artificial Sequence
  Synthetic oligonucleotide
accgatagtaagcaagatctgatctatcgc

SEQ ID NO: 426227 - DNA, 30 bp, Artificial Sequence
  Synthetic oligonucleotide
ctttcacatatctttcattacttctatcgc

SEQ ID NO: 426228 - DNA, 30 bp, Artificial Sequence
  Synthetic oligonucleotide
tccacattcctgacctgacttccgtatcgc

SEQ ID NO: 426229 - DNA, 30 bp, Artificial Sequence
  Synthetic oligonucleotide
gaaagttattcatccggtcgactgtatcgc

SEQ ID NO: 426230 - DNA, 30 bp, Artificial Sequence
  Synthetic oligonucleotide
taacttcgaaactcggactgctgaactcgc

SEQ ID NO: 426231 - DNA, 30 bp, Artificial Sequence
  Synthetic oligonucleotide
atcagctccggtacgtcctatgagactcgc

SEQ ID NO: 426232 - DNA, 30 bp, Artificial Sequence
  Synthetic oligonucleotide
tgaggtaaatttgcttgggtaatgactcgc

SEQ ID NO: 426233 - DNA, 30 bp, Artificial Sequence
  Synthetic oligonucleotide
ggagtgtatcagcgaagttcgaatactcgc

SEQ ID NO: 426234 - DNA, 30 bp, Artificial Sequence
  Synthetic oligonucleotide
gcccctaccacctcgaggattgcacctcgc

SEQ ID NO: 426235 - DNA, 30 bp, Artificial Sequence
  Synthetic oligonucleotide
aggatagggagccagtcgcgtttacctcgc

SEQ ID NO: 426236 - DNA, 30 bp, Artificial Sequence
  Synthetic oligonucleotide
cgctgtcacttagtaacttcgcaccctcgc

SEQ ID NO: 426237 - DNA, 30 bp, Artificial Sequence
  Synthetic oligonucleotide
ctactctgatagcacgctagaactgctcgc

SEQ ID NO: 426238 - DNA, 30 bp, Artificial Sequence
  Synthetic oligonucleotide
ccattacgatgtggggttaaaggatctcgc

SEQ ID NO: 426239 - DNA, 30 bp, Artificial Sequence
  Synthetic oligonucleotide
ttggacaatatacacgaggtactgtctcgc

SEQ ID NO: 426240 - DNA, 30 bp, Artificial Sequence
  Synthetic oligonucleotide
ttctccagcaatcttgtttgagcttctcgc

SEQ ID NO: 426241 - DNA, 30 bp, Artificial Sequence
  Synthetic oligonucleotide
accgctcgacgtgacttccttacaagtcgc

SEQ ID NO: 426242 - DNA, 30 bp, Artificial Sequence
  Synthetic oligonucleotide
ataggacaaggtaaagtcccgataagtcgc

SEQ ID NO: 426243 - DNA, 30 bp, Artificial Sequence
  Synthetic oligonucleotide
tacagtggggccgcagaactaaacagtcgc

SEQ ID NO: 426244 - DNA, 31 bp, Artificial Sequence
  Synthetic oligonucleotide
attgaactcacggagacgcatccacagtcgc

SEQ ID NO: 426245 - DNA, 30 bp, Artificial Sequence
  Synthetic oligonucleotide
cgggcgatggaggccggcatggccagtcgc

SEQ ID NO: 426246 - DNA, 30 bp, Artificial Sequence
  Synthetic oligonucleotide
ccggggcgttctcgcttaaggaatagtcgc

SEQ ID NO: 426247 - DNA, 30 bp, Artificial Sequence
  Synthetic oligonucleotide
atgtaatgagagctccatgtttttagtcgc

SEQ ID NO: 426248 - DNA, 30 bp, Artificial Sequence
  Synthetic oligonucleotide
catagcgctcgatcctgcggcaaccgtcgc

SEQ ID NO: 426249 - DNA, 30 bp, Artificial Sequence
  Synthetic oligonucleotide
tgggtaagacaacacaataggcagcgtcgc

SEQ ID NO: 426250 - DNA, 30 bp, Artificial Sequence
  Synthetic oligonucleotide
caccccttgtgttatcgccagggaggtcgc

SEQ ID NO: 426251 - DNA, 30 bp, Artificial Sequence
  Synthetic oligonucleotide
acagcaacagacggtaattgcgacggtcgc

SEQ ID NO: 426252 - DNA, 30 bp, Artificial Sequence
  Synthetic oligonucleotide
ttgcaatcgactattcacttatgcggtcgc

SEQ ID NO: 426253 - DNA, 30 bp, Artificial Sequence
  Synthetic oligonucleotide
ctgtggtctatcatttaatgctatggtcgc

SEQ ID NO: 426254 - DNA, 30 bp, Artificial Sequence
  Synthetic oligonucleotide
ttcgcatccgacgaagtttttgctggtcgc

SEQ ID NO: 426255 - DNA, 30 bp, Artificial Sequence
  Synthetic oligonucleotide
tttactgatatctgctaactgagtggtcgc

SEQ ID NO: 426256 - DNA, 30 bp, Artificial Sequence
  Synthetic oligonucleotide
ggtcagtttacgaacccgacttgatgtcgc

SEQ ID NO: 426257 - DNA, 30 bp, Artificial Sequence
  Synthetic oligonucleotide
ccgggcgacacgctctgtgagttatgtcgc

SEQ ID NO: 426258 - DNA, 30 bp, Artificial Sequence
  Synthetic oligonucleotide
cccagtgcgattcgacaaggcttctgtcgc

SEQ ID NO: 426259 - DNA, 30 bp, Artificial Sequence
  Synthetic oligonucleotide
acgcgttagtgcatgcattaagcgattcgc

SEQ ID NO: 426260 - DNA, 30 bp, Artificial Sequence
  Synthetic oligonucleotide
ttctatggggtggaccgaagccatattcgc

SEQ ID NO: 426261 - DNA, 30 bp, Artificial Sequence
  Synthetic oligonucleotide
ttaaggcattcgacgtagttgtatattcgc

SEQ ID NO: 426262 - DNA, 29 bp, Artificial Sequence
  Synthetic oligonucleotide
taacgtatcacctggaccagggacttcgc

SEQ ID NO: 426263 - DNA, 30 bp, Artificial Sequence
  Synthetic oligonucleotide
ggggtgtaattacgccatcttgcccttcgc

SEQ ID NO: 426264 - DNA, 30 bp, Artificial Sequence
  Synthetic oligonucleotide
tccacagaatcgttagactaatttcttcgc

SEQ ID NO: 426265 - DNA, 30 bp, Artificial Sequence
  Synthetic oligonucleotide
cgcggggttcgtgcactacacaacgttcgc

SEQ ID NO: 426266 - DNA, 30 bp, Artificial Sequence
  Synthetic oligonucleotide
tttccagtctcttgaaacgtgagcgttcgc

SEQ ID NO: 426267 - DNA, 30 bp, Artificial Sequence
  Synthetic oligonucleotide
gacccaggcgatatgaccctattcgttcgc

SEQ ID NO: 426268 - DNA, 30 bp, Artificial Sequence
  Synthetic oligonucleotide
attaacctgcgatctggccttttcgttcgc

SEQ ID NO: 426269 - DNA, 30 bp, Artificial Sequence
  Synthetic oligonucleotide
gggggccctggggacggaatggctgttcgc

SEQ ID NO: 426270 - DNA, 30 bp, Artificial Sequence
  Synthetic oligonucleotide
cagatcaaaagtcgactttttctctttcgc

SEQ ID NO: 426271 - DNA, 30 bp, Artificial Sequence
  Synthetic oligonucleotide
aaaagggaccataattggaatgggtttcgc

SEQ ID NO: 426272 - DNA, 30 bp, Artificial Sequence
  Synthetic oligonucleotide
agccaccaccgttccggtatcgtgtttcgc

SEQ ID NO: 426273 - DNA, 30 bp, Artificial Sequence
  Synthetic oligonucleotide
gttttgattatatgtcgtgacttgtttcgc

SEQ ID NO: 426274 - DNA, 30 bp, Artificial Sequence
  Synthetic oligonucleotide
ctcttgatcctcaagtttcccttttttcgc

SEQ ID NO: 426275 - DNA, 30 bp, Artificial Sequence
  Synthetic oligonucleotide
gcggaattcgcgcggctgtttagaaaaggc

SEQ ID NO: 426276 - DNA, 30 bp, Artificial Sequence
  Synthetic oligonucleotide
aaaattgaactttgggtccgaaacaaaggc

SEQ ID NO: 426277 - DNA, 30 bp, Artificial Sequence
  Synthetic oligonucleotide
ccagcggggattatttcttctggcaaaggc

SEQ ID NO: 426278 - DNA, 30 bp, Artificial Sequence
  Synthetic oligonucleotide
gaaaaggcttcggtaaaagtattcaaaggc

SEQ ID NO: 426279 - DNA, 30 bp, Artificial Sequence
  Synthetic oligonucleotide
gagtagagggcaaccgagctggggaaaggc

SEQ ID NO: 426280 - DNA, 30 bp, Artificial Sequence
  Synthetic oligonucleotide
tccggtttgtcgctagcatggcataaaggc

SEQ ID NO: 426281 - DNA, 30 bp, Artificial Sequence
  Synthetic oligonucleotide
ggggaatcagcatttctcacccgtaaaggc

SEQ ID NO: 426282 - DNA, 30 bp, Artificial Sequence
  Synthetic oligonucleotide
ggcatcacggggataggcagctgtaaaggc

SEQ ID NO: 426283 - DNA, 30 bp, Artificial Sequence
  Synthetic oligonucleotide
aaccatcgccttcaatgattatcacaaggc

SEQ ID NO: 426284 - DNA, 30 bp, Artificial Sequence
  Synthetic oligonucleotide
tagtgtatactatctggagccttacaaggc

SEQ ID NO: 426285 - DNA, 30 bp, Artificial Sequence
  Synthetic oligonucleotide
ccctagtgtacccttccactgtaccaaggc

SEQ ID NO: 426286 - DNA, 30 bp, Artificial Sequence
  Synthetic oligonucleotide
tttacggaactattgtccggaacgcaaggc

SEQ ID NO: 426287 - DNA, 30 bp, Artificial Sequence
  Synthetic oligonucleotide
acatcatattgggttacggcacggcaaggc

SEQ ID NO: 426288 - DNA, 30 bp, Artificial Sequence
  Synthetic oligonucleotide
gtttcactcagccgacttgaccaagaaggc

SEQ ID NO: 426289 - DNA, 30 bp, Artificial Sequence
  Synthetic oligonucleotide
atccaccaaagtcatgagcgaacagaaggc

SEQ ID NO: 426290 - DNA, 29 bp, Artificial Sequence
  Synthetic oligonucleotide
agtaactaccgccatctaattgagaaggc

SEQ ID NO: 426291 - DNA, 30 bp, Artificial Sequence
  Synthetic oligonucleotide
ttgaggttactgtattggcaaatcgaaggc

SEQ ID NO: 426292 - DNA, 30 bp, Artificial Sequence
  Synthetic oligonucleotide
gtttaccatagacccgactacagggaaggc

SEQ ID NO: 426293 - DNA, 30 bp, Artificial Sequence
  Synthetic oligonucleotide
attctgacacgccgtcgatgagtggaaggc

SEQ ID NO: 426294 - DNA, 30 bp, Artificial Sequence
  Synthetic oligonucleotide
gtccctcgcctgattattcggcatgaaggc

SEQ ID NO: 426295 - DNA, 30 bp, Artificial Sequence
  Synthetic oligonucleotide
gtctttcgtttgaccctggccgatgaaggc

SEQ ID NO: 426296 - DNA, 30 bp, Artificial Sequence
  Synthetic oligonucleotide
atgtcaggttgttacttggctctctaaggc

SEQ ID NO: 426297 - DNA, 30 bp, Artificial Sequence
  Synthetic oligonucleotide
gcttagcgtctggcgaaagccaagtaaggc

SEQ ID NO: 426298 - DNA, 30 bp, Artificial Sequence
  Synthetic oligonucleotide
aggaatgtcggggccacccgtcattaaggc

SEQ ID NO: 426299 - DNA, 30 bp, Artificial Sequence
  Synthetic oligonucleotide
ttcaggaaagtatatgcactgccttaaggc

SEQ ID NO: 426300 - DNA, 30 bp, Artificial Sequence
  Synthetic oligonucleotide
ttgctttacctttaggtgccatcttaaggc

SEQ ID NO: 426301 - DNA, 30 bp, Artificial Sequence
  Synthetic oligonucleotide
tccgggtccaggtctaataatatttaaggc

SEQ ID NO: 426302 - DNA, 30 bp, Artificial Sequence
  Synthetic oligonucleotide
cgttctttaaggccagctatggtttaaggc

SEQ ID NO: 426303 - DNA, 30 bp, Artificial Sequence
  Synthetic oligonucleotide
ggagttgcccgcaactattatccaacaggc

SEQ ID NO: 426304 - DNA, 30 bp, Artificial Sequence
  Synthetic oligonucleotide
agatttagatgtacattgtctagaacaggc

SEQ ID NO: 426305 - DNA, 30 bp, Artificial Sequence
  Synthetic oligonucleotide
cagttaaaactcggtagcaaactcacaggc

SEQ ID NO: 426306 - DNA, 30 bp, Artificial Sequence
  Synthetic oligonucleotide
tacattctagcgggagctcgggatacaggc

SEQ ID NO: 426307 - DNA, 30 bp, Artificial Sequence
  Synthetic oligonucleotide
tttcgacccgctcagtgatcctatacaggc

SEQ ID NO: 426308 - DNA, 30 bp, Artificial Sequence
  Synthetic oligonucleotide
ggctctattgcaccttgagctacaccaggc

SEQ ID NO: 426309 - DNA, 30 bp, Artificial Sequence
  Synthetic oligonucleotide
cacagtattttcgtcctatccgtaccaggc

SEQ ID NO: 426310 - DNA, 30 bp, Artificial Sequence
  Synthetic oligonucleotide
aacacgacgacgcgcttccgtatcccaggc

SEQ ID NO: 426311 - DNA, 30 bp, Artificial Sequence
  Synthetic oligonucleotide
ctagtaggcccccggggcgctgtgccaggc

SEQ ID NO: 426312 - DNA, 30 bp, Artificial Sequence
  Synthetic oligonucleotide
taacccgcagtggttctttgtcgtccaggc

SEQ ID NO: 426313 - DNA, 30 bp, Artificial Sequence
  Synthetic oligonucleotide
caaattactaggcgcctttggacagcaggc

SEQ ID NO: 426314 - DNA, 30 bp, Artificial Sequence
  Synthetic oligonucleotide
catggcactgccgttattgcggcagcaggc

SEQ ID NO: 426315 - DNA, 30 bp, Artificial Sequence
  Synthetic oligonucleotide
ggatttaccctaacgagatcgcccgcaggc

SEQ ID NO: 426316 - DNA, 30 bp, Artificial Sequence
  Synthetic oligonucleotide
ttgacccttagtataggattagaggcaggc

SEQ ID NO: 426317 - DNA, 30 bp, Artificial Sequence
  Synthetic oligonucleotide
atacgcagggattcgactaagcatgcaggc

SEQ ID NO: 426318 - DNA, 30 bp, Artificial Sequence
  Synthetic oligonucleotide
ttcggcctaaatcacgggcactaatcaggc

SEQ ID NO: 426319 - DNA, 30 bp, Artificial Sequence
  Synthetic oligonucleotide
tgaatcagataggtcgcaacgacctcaggc

SEQ ID NO: 426320 - DNA, 30 bp, Artificial Sequence
  Synthetic oligonucleotide
acccggtgatgacgataccctatctcaggc

SEQ ID NO: 426321 - DNA, 30 bp, Artificial Sequence
  Synthetic oligonucleotide
gttatctggttggtgttgtatatgtcaggc

SEQ ID NO: 426322 - DNA, 30 bp, Artificial Sequence
  Synthetic oligonucleotide
agtttaagcctcgcatcaaggtaaagaggc

SEQ ID NO: 426323 - DNA, 30 bp, Artificial Sequence
  Synthetic oligonucleotide
atggacatatgaagttttacatcaagaggc

SEQ ID NO: 426324 - DNA, 30 bp, Artificial Sequence
  Synthetic oligonucleotide
tattggggctaaagcagcatagcgagaggc

SEQ ID NO: 426325 - DNA, 30 bp, Artificial Sequence
  Synthetic oligonucleotide
gataggtatagcccacttcactatagaggc

SEQ ID NO: 426326 - DNA, 30 bp, Artificial Sequence
  Synthetic oligonucleotide
ctatcctccgttacgggaagtccacgaggc

SEQ ID NO: 426327 - DNA, 30 bp, Artificial Sequence
  Synthetic oligonucleotide
caagcaaagcccgtgtctatagaccgaggc

SEQ ID NO: 426328 - DNA, 30 bp, Artificial Sequence
  Synthetic oligonucleotide
aagctatcaaccatttctgtgacccgaggc

SEQ ID NO: 426329 - DNA, 30 bp, Artificial Sequence
  Synthetic oligonucleotide
tcttataatccctttagcttttcccgaggc

SEQ ID NO: 426330 - DNA, 30 bp, Artificial Sequence
  Synthetic oligonucleotide
tcaagtacttcagtacaatcaaagcgaggc

SEQ ID NO: 426331 - DNA, 30 bp, Artificial Sequence
  Synthetic oligonucleotide
cggccagtctagccatgggggcttcgaggc

SEQ ID NO: 426332 - DNA, 30 bp, Artificial Sequence
  Synthetic oligonucleotide
acacgtccgcagtactcccctagaggaggc

SEQ ID NO: 426333 - DNA, 30 bp, Artificial Sequence
  Synthetic oligonucleotide
cttactagggtaaccaagggtgtaggaggc

SEQ ID NO: 426334 - DNA, 30 bp, Artificial Sequence
  Synthetic oligonucleotide
caatgctacaagatacaatgttacggaggc

SEQ ID NO: 426335 - DNA, 30 bp, Artificial Sequence
  Synthetic oligonucleotide
gtgtaccttgccaggatttccatgggaggc

SEQ ID NO: 426336 - DNA, 30 bp, Artificial Sequence
  Synthetic oligonucleotide
gggatcgccctcggagcaaaactgggaggc

SEQ ID NO: 426337 - DNA, 30 bp, Artificial Sequence
  Synthetic oligonucleotide
gagtagcagccacaatggcggaatggaggc

SEQ ID NO: 426338 - DNA, 30 bp, Artificial Sequence
  Synthetic oligonucleotide
acaagggggtagcttgttgttaatggaggc

SEQ ID NO: 426339 - DNA, 30 bp, Artificial Sequence
  Synthetic oligonucleotide
gcttacttctctccgtcgaagtttggaggc

SEQ ID NO: 426340 - DNA, 30 bp, Artificial Sequence
  Synthetic oligonucleotide
ggagaagcgcgttggccacatttatgaggc

SEQ ID NO: 426341 - DNA, 30 bp, Artificial Sequence
  Synthetic oligonucleotide
tagcgactttcgcagagtaatctctgaggc

SEQ ID NO: 426342 - DNA, 30 bp, Artificial Sequence
  Synthetic oligonucleotide
cctcaggagacattgattgatccttgaggc

SEQ ID NO: 426343 - DNA, 30 bp, Artificial Sequence
  Synthetic oligonucleotide
tattggtaatccatgatctccataataggc

SEQ ID NO: 426344 - DNA, 30 bp, Artificial Sequence
  Synthetic oligonucleotide
gtataatatgtctttgtgctcataataggc

SEQ ID NO: 426345 - DNA, 30 bp, Artificial Sequence
  Synthetic oligonucleotide
aggctactgctatacggtatggtaataggc

SEQ ID NO: 426346 - DNA, 30 bp, Artificial Sequence
  Synthetic oligonucleotide
acggtaatacagtgacgcaataccataggc

SEQ ID NO: 426347 - DNA, 30 bp, Artificial Sequence
  Synthetic oligonucleotide
cggctggatgcaataatagacacgataggc

SEQ ID NO: 426348 - DNA, 30 bp, Artificial Sequence
  Synthetic oligonucleotide
gtagagaactgattaggcgcttcgataggc

SEQ ID NO: 426349 - DNA, 30 bp, Artificial Sequence
  Synthetic oligonucleotide
ctttgaacagagatcgtcactctgataggc

SEQ ID NO: 426350 - DNA, 30 bp, Artificial Sequence
  Synthetic oligonucleotide
ataggcagggtactgggcaacactataggc

SEQ ID NO: 426351 - DNA, 30 bp, Artificial Sequence
  Synthetic oligonucleotide
aatctggtgtcggtctcgagatgtataggc

SEQ ID NO: 426352 - DNA, 30 bp, Artificial Sequence
  Synthetic oligonucleotide
attgcccggatttttttgctgattataggc

SEQ ID NO: 426353 - DNA, 30 bp, Artificial Sequence
  Synthetic oligonucleotide
atcatttcgttcgttttgctagcactaggc

SEQ ID NO: 426354 - DNA, 30 bp, Artificial Sequence
  Synthetic oligonucleotide
cacatttcacagtcgttcagtaacctaggc

SEQ ID NO: 426355 - DNA, 30 bp, Artificial Sequence
  Synthetic oligonucleotide
atttattcttttctgtcctatgacctaggc

SEQ ID NO: 426356 - DNA, 30 bp, Artificial Sequence
  Synthetic oligonucleotide
ctctaaacgactgtctggccaaccctaggc

SEQ ID NO: 426357 - DNA, 30 bp, Artificial Sequence
  Synthetic oligonucleotide
ccctcttttcggcgatcgagaatcctaggc

SEQ ID NO: 426358 - DNA, 30 bp, Artificial Sequence
  Synthetic oligonucleotide
atgctcaactacggttaaaaaccgctaggc

SEQ ID NO: 426359 - DNA, 30 bp, Artificial Sequence
  Synthetic oligonucleotide
gctttcagaagtggcacggtactgctaggc

SEQ ID NO: 426360 - DNA, 30 bp, Artificial Sequence
  Synthetic oligonucleotide
ggttcttactgcgcaacgaccccagtaggc

SEQ ID NO: 426361 - DNA, 30 bp, Artificial Sequence
  Synthetic oligonucleotide
acagctcataacaacgtccccacggtaggc

SEQ ID NO: 426362 - DNA, 30 bp, Artificial Sequence
  Synthetic oligonucleotide
gcatccggatatcaagtaatcaatgtaggc

SEQ ID NO: 426363 - DNA, 30 bp, Artificial Sequence
  Synthetic oligonucleotide
tacgatatgcatttcgtatggactgtaggc

SEQ ID NO: 426364 - DNA, 30 bp, Artificial Sequence
  Synthetic oligonucleotide
taaaactttccagacagtggccaattaggc

SEQ ID NO: 426365 - DNA, 30 bp, Artificial Sequence
  Synthetic oligonucleotide
acgaatagcttctaattcacgtaattaggc

SEQ ID NO: 426366 - DNA, 30 bp, Artificial Sequence
  Synthetic oligonucleotide
tccgtatttgtcctgacacacgggttaggc

SEQ ID NO: 426367 - DNA, 30 bp, Artificial Sequence
  Synthetic oligonucleotide
gctcaccactggttggactcgcttttaggc

SEQ ID NO: 426368 - DNA, 30 bp, Artificial Sequence
  Synthetic oligonucleotide
tatgaaggggttcaaggttgtagcaacggc

SEQ ID NO: 426369 - DNA, 30 bp, Artificial Sequence
  Synthetic oligonucleotide
tggcgtcgcagctagtatggtgcgaacggc

SEQ ID NO: 426370 - DNA, 30 bp, Artificial Sequence
  Synthetic oligonucleotide
gggtttaaaatgtcggcggtaaggaacggc

SEQ ID NO: 426371 - DNA, 30 bp, Artificial Sequence
  Synthetic oligonucleotide
atttcttggacctattgctgctggaacggc

SEQ ID NO: 426372 - DNA, 30 bp, Artificial Sequence
  Synthetic oligonucleotide
gcatctgtgctatagagaagcgtgaacggc

SEQ ID NO: 426373 - DNA, 30 bp, Artificial Sequence
  Synthetic oligonucleotide
ttccttttgatgacacgtgcgcataacggc

SEQ ID NO: 426374 - DNA, 30 bp, Artificial Sequence
  Synthetic oligonucleotide
aaccgacttccatttgcccactgtaacggc

SEQ ID NO: 426375 - DNA, 30 bp, Artificial Sequence
  Synthetic oligonucleotide
acatgtatagcagagtcatcggaacacggc

SEQ ID NO: 426376 - DNA, 30 bp, Artificial Sequence
  Synthetic oligonucleotide
gaaaacaaagggactctatgtatccacggc

SEQ ID NO: 426377 - DNA, 30 bp, Artificial Sequence
  Synthetic oligonucleotide
aataagctgtggaaggtagtggtccacggc

SEQ ID NO: 426378 - DNA, 30 bp, Artificial Sequence
  Synthetic oligonucleotide
cctcaagcagtacgcagagagcagcacggc

SEQ ID NO: 426379 - DNA, 30 bp, Artificial Sequence
  Synthetic oligonucleotide
gctataaggaatcggcctggaacgcacggc

SEQ ID NO: 426380 - DNA, 30 bp, Artificial Sequence
  Synthetic oligonucleotide
ctgcagtatcaactgacgctgttgcacggc

SEQ ID NO: 426381 - DNA, 30 bp, Artificial Sequence
  Synthetic oligonucleotide
ttcaaagtctcctctggttctgctcacggc

SEQ ID NO: 426382 - DNA, 30 bp, Artificial Sequence
  Synthetic oligonucleotide
ttgaggctgacattaggggttccagacggc

SEQ ID NO: 426383 - DNA, 30 bp, Artificial Sequence
  Synthetic oligonucleotide
ggttaacaaggttaggaccccggagacggc

SEQ ID NO: 426384 - DNA, 30 bp, Artificial Sequence
  Synthetic oligonucleotide
actacgatctattagcgtactcacgacggc

SEQ ID NO: 426385 - DNA, 30 bp, Artificial Sequence
  Synthetic oligonucleotide
gtcagagcggcattgctatcgcccgacggc

SEQ ID NO: 426386 - DNA, 27 bp, Artificial Sequence
  Synthetic oligonucleotide
tccgagatagtgcattccttcgacggc

SEQ ID NO: 426387 - DNA, 30 bp, Artificial Sequence
  Synthetic oligonucleotide
gtgtagagtatatcatcctaaaaggacggc

SEQ ID NO: 426388 - DNA, 30 bp, Artificial Sequence
  Synthetic oligonucleotide
tgaagacaatatgaattgccctcggacggc

SEQ ID NO: 426389 - DNA, 30 bp, Artificial Sequence
  Synthetic oligonucleotide
attccttttgaatgcttagtacaatacggc

SEQ ID NO: 426390 - DNA, 30 bp, Artificial Sequence
  Synthetic oligonucleotide
aaagatatccccggatgaagcggttacggc

SEQ ID NO: 426391 - DNA, 30 bp, Artificial Sequence
  Synthetic oligonucleotide
gcttgagccattcgtggtgttaaaaccggc

SEQ ID NO: 426392 - DNA, 30 bp, Artificial Sequence
  Synthetic oligonucleotide
acctgccggtccacttaagttagaaccggc

SEQ ID NO: 426393 - DNA, 30 bp, Artificial Sequence
  Synthetic oligonucleotide
acggcggtatacttattttatgctaccggc

SEQ ID NO: 426394 - DNA, 30 bp, Artificial Sequence
  Synthetic oligonucleotide
cgctggtcgcccaaaccggggtgtaccggc

SEQ ID NO: 426395 - DNA, 30 bp, Artificial Sequence
  Synthetic oligonucleotide
actcaattggttagtgaaatgggacccggc

SEQ ID NO: 426396 - DNA, 30 bp, Artificial Sequence
  Synthetic oligonucleotide
acagccccgatagtttgcatggtacccggc

SEQ ID NO: 426397 - DNA, 30 bp, Artificial Sequence
  Synthetic oligonucleotide
ttcggtgtgtatatttgcctacgccccggc

SEQ ID NO: 426398 - DNA, 30 bp, Artificial Sequence
  Synthetic oligonucleotide
attggaggtaatatatgcggaaagcccggc

SEQ ID NO: 426399 - DNA, 30 bp, Artificial Sequence
  Synthetic oligonucleotide
cgctgtattcagggtcggatatccgccggc

SEQ ID NO: 426400 - DNA, 30 bp, Artificial Sequence
  Synthetic oligonucleotide
gtcagatacctagcgccgggaagcgccggc

SEQ ID NO: 426401 - DNA, 30 bp, Artificial Sequence
  Synthetic oligonucleotide
caatgtttctctcccggagaatagtccggc

SEQ ID NO: 426402 - DNA, 30 bp, Artificial Sequence
  Synthetic oligonucleotide
cacgtggactgtgaggtggtgcggtccggc

SEQ ID NO: 426403 - DNA, 30 bp, Artificial Sequence
  Synthetic oligonucleotide
ctttggatgctcttgcctatgatttccggc

SEQ ID NO: 426404 - DNA, 30 bp, Artificial Sequence
  Synthetic oligonucleotide
gaacatctctggcagcaggcttaaagcggc

SEQ ID NO: 426405 - DNA, 30 bp, Artificial Sequence
  Synthetic oligonucleotide
aactaggctcttcagggataggcaagcggc

SEQ ID NO: 426406 - DNA, 30 bp, Artificial Sequence
  Synthetic oligonucleotide
actgaagtttctctgcccccagccagcggc

SEQ ID NO: 426407 - DNA, 30 bp, Artificial Sequence
  Synthetic oligonucleotide
agcaagtccaacatacggacggccagcggc

SEQ ID NO: 426408 - DNA, 30 bp, Artificial Sequence
  Synthetic oligonucleotide
aggcggcgttatgccgcggtatgcagcggc

SEQ ID NO: 426409 - DNA, 30 bp, Artificial Sequence
  Synthetic oligonucleotide
tctgagcggcctgtgtcgaccatgagcggc

SEQ ID NO: 426410 - DNA, 30 bp, Artificial Sequence
  Synthetic oligonucleotide
cggcagcgctagttgcgcacagtgagcggc

SEQ ID NO: 426411 - DNA, 30 bp, Artificial Sequence
  Synthetic oligonucleotide
cgtactcaccaggtattagccaatagcggc

SEQ ID NO: 426412 - DNA, 30 bp, Artificial Sequence
  Synthetic oligonucleotide
gctagcgctctttcgcgtagtagtagcggc

SEQ ID NO: 426413 - DNA, 30 bp, Artificial Sequence
  Synthetic oligonucleotide
cgcggcgcacaacacttcaccggtagcggc

SEQ ID NO: 426414 - DNA, 30 bp, Artificial Sequence
  Synthetic oligonucleotide
agagaatgcagaaacgacattggtagcggc

SEQ ID NO: 426415 - DNA, 30 bp, Artificial Sequence
  Synthetic oligonucleotide
acgtcacgaaaccgctataccgttagcggc

SEQ ID NO: 426416 - DNA, 30 bp, Artificial Sequence
  Synthetic oligonucleotide
gttcagcagttaccggatgcttttagcggc

SEQ ID NO: 426417 - DNA, 30 bp, Artificial Sequence
  Synthetic oligonucleotide
gctagcctggtgtaggggtctgcacgcggc

SEQ ID NO: 426418 - DNA, 30 bp, Artificial Sequence
  Synthetic oligonucleotide
ggaggagtataggtcgttatactacgcggc

SEQ ID NO: 426419 - DNA, 30 bp, Artificial Sequence
  Synthetic oligonucleotide
tatagaaggtcaaaggatgcactccgcggc

SEQ ID NO: 426420 - DNA, 30 bp, Artificial Sequence
  Synthetic oligonucleotide
tatagtgccaaagccggcacgccgcgcggc

SEQ ID NO: 426421 - DNA, 30 bp, Artificial Sequence
  Synthetic oligonucleotide
tggattggttaagcgcagtacacaggcggc

SEQ ID NO: 426422 - DNA, 30 bp, Artificial Sequence
  Synthetic oligonucleotide
gctcccaggtcgacacgcatcccaggcggc

SEQ ID NO: 426423 - DNA, 30 bp, Artificial Sequence
  Synthetic oligonucleotide
tagagatccccttaacatcaaaagggcggc

SEQ ID NO: 426424 - DNA, 30 bp, Artificial Sequence
  Synthetic oligonucleotide
atttggtcttcacactggcttggtggcggc

SEQ ID NO: 426425 - DNA, 30 bp, Artificial Sequence
  Synthetic oligonucleotide
gccaattctttgccctcgctttcatgcggc

SEQ ID NO: 426426 - DNA, 30 bp, Artificial Sequence
  Synthetic oligonucleotide
attacaaccatctgaggatgtttctgcggc

SEQ ID NO: 426427 - DNA, 30 bp, Artificial Sequence
  Synthetic oligonucleotide
caaattaaccccctgctggacacttgcggc

SEQ ID NO: 426428 - DNA, 30 bp, Artificial Sequence
  Synthetic oligonucleotide
gctcaatcgagatttgtttagcaaatcggc

SEQ ID NO: 426429 - DNA, 30 bp, Artificial Sequence
  Synthetic oligonucleotide
aatcgtaggatagtaagagtgccaatcggc

SEQ ID NO: 426430 - DNA, 30 bp, Artificial Sequence
  Synthetic oligonucleotide
gcaacgattcggaggtcccgcataatcggc

SEQ ID NO: 426431 - DNA, 30 bp, Artificial Sequence
  Synthetic oligonucleotide
gtactctcccgtccgtccgtcaggatcggc

SEQ ID NO: 426432 - DNA, 30 bp, Artificial Sequence
  Synthetic oligonucleotide
gtgtcttaacgtacactgccgtggatcggc

SEQ ID NO: 426433 - DNA, 30 bp, Artificial Sequence
  Synthetic oligonucleotide
tcagagacgccacagttgcagtgtatcggc

SEQ ID NO: 426434 - DNA, 30 bp, Artificial Sequence
  Synthetic oligonucleotide
gcaccatgggaaaagtcagtggttatcggc

SEQ ID NO: 426435 - DNA, 30 bp, Artificial Sequence
  Synthetic oligonucleotide
gtgtcgaatgttagggaggtaatagtcggc

SEQ ID NO: 426436 - DNA, 30 bp, Artificial Sequence
  Synthetic oligonucleotide
acggccatgcttggggattaagaggtcggc

SEQ ID NO: 426437 - DNA, 30 bp, Artificial Sequence
  Synthetic oligonucleotide
atctagggctcaaaagatttagtggtcggc

SEQ ID NO: 426438 - DNA, 30 bp, Artificial Sequence
  Synthetic oligonucleotide
gccctccccattttggccagcaatgtcggc

SEQ ID NO: 426439 - DNA, 30 bp, Artificial Sequence
  Synthetic oligonucleotide
gaagtgcgtggggtgacgcatacattcggc

SEQ ID NO: 426440 - DNA, 30 bp, Artificial Sequence
  Synthetic oligonucleotide
acaatgattgggcagaagcgccgattcggc

SEQ ID NO: 426441 - DNA, 30 bp, Artificial Sequence
  Synthetic oligonucleotide
cactgcagctctctggcgacgcgattcggc

SEQ ID NO: 426442 - DNA, 30 bp, Artificial Sequence
  Synthetic oligonucleotide
ttggtattctatttccgtaagtacttcggc

SEQ ID NO: 426443 - DNA, 30 bp, Artificial Sequence
  Synthetic oligonucleotide
ttaggccttgcaacatggcatgccttcggc

SEQ ID NO: 426444 - DNA, 30 bp, Artificial Sequence
  Synthetic oligonucleotide
gcggggttgttggtgtatatatgcttcggc

SEQ ID NO: 426445 - DNA, 30 bp, Artificial Sequence
  Synthetic oligonucleotide
tgtttcgggccacatagccgtctcttcggc

SEQ ID NO: 426446 - DNA, 30 bp, Artificial Sequence
  Synthetic oligonucleotide
gttgataatccgcagttggcaatgttcggc

SEQ ID NO: 426447 - DNA, 30 bp, Artificial Sequence
  Synthetic oligonucleotide
agtgtgggcccgcggtcgacgcgtttcggc

SEQ ID NO: 426448 - DNA, 28 bp, Artificial Sequence
  Synthetic oligonucleotide
gaacttgtaaggcggcataattttcggc

SEQ ID NO: 426449 - DNA, 30 bp, Artificial Sequence
  Synthetic oligonucleotide
gcgcgatctggtggtactttcattttcggc

SEQ ID NO: 426450 - DNA, 30 bp, Artificial Sequence
  Synthetic oligonucleotide
cccggggaagcgaggcgtcgagttttcggc

SEQ ID NO: 426451 - DNA, 30 bp, Artificial Sequence
  Synthetic oligonucleotide
ccgggaacgggtcgcgaaaggtaaaagggc

SEQ ID NO: 426452 - DNA, 30 bp, Artificial Sequence
  Synthetic oligonucleotide
tcggctgtccatttttgggtatcaaagggc

SEQ ID NO: 426453 - DNA, 30 bp, Artificial Sequence
  Synthetic oligonucleotide
gtgggcctcatccagtatttgtacaagggc

SEQ ID NO: 426454 - DNA, 30 bp, Artificial Sequence
  Synthetic oligonucleotide
gcgggttcccggaaacattgaagcaagggc

SEQ ID NO: 426455 - DNA, 30 bp, Artificial Sequence
  Synthetic oligonucleotide
tctaacgtggtacccaacactagtaagggc

SEQ ID NO: 426456 - DNA, 30 bp, Artificial Sequence
  Synthetic oligonucleotide
ctccctttatcgctaagccccgcacagggc

SEQ ID NO: 426457 - DNA, 30 bp, Artificial Sequence
  Synthetic oligonucleotide
tgccttagtactgtaacggccaagcagggc

SEQ ID NO: 426458 - DNA, 30 bp, Artificial Sequence
  Synthetic oligonucleotide
ctctgttgcccagtatatcggaagcagggc

SEQ ID NO: 426459 - DNA, 30 bp, Artificial Sequence
  Synthetic oligonucleotide
agcctaaaacctggattgacctggcagggc

SEQ ID NO: 426460 - DNA, 30 bp, Artificial Sequence
  Synthetic oligonucleotide
atttgtccgcgaaatgttcaattgcagggc

SEQ ID NO: 426461 - DNA, 30 bp, Artificial Sequence
  Synthetic oligonucleotide
ggctgcccaggtcacactgtgaatcagggc

SEQ ID NO: 426462 - DNA, 30 bp, Artificial Sequence
  Synthetic oligonucleotide
cccggatgccagcctccttctattcagggc

SEQ ID NO: 426463 - DNA, 30 bp, Artificial Sequence
  Synthetic oligonucleotide
tccctcctctaaatcgccattattcagggc

SEQ ID NO: 426464 - DNA, 30 bp, Artificial Sequence
  Synthetic oligonucleotide
tgtgggggaggacaatcctcaaacgagggc

SEQ ID NO: 426465 - DNA, 30 bp, Artificial Sequence
  Synthetic oligonucleotide
ggacgcattttcgtagcgagttacgagggc

SEQ ID NO: 426466 - DNA, 30 bp, Artificial Sequence
  Synthetic oligonucleotide
agtggtattggggggtaggctggggagggc

SEQ ID NO: 426467 - DNA, 30 bp, Artificial Sequence
  Synthetic oligonucleotide
aatcttcacgcaagggttaaagttgagggc

SEQ ID NO: 426468 - DNA, 30 bp, Artificial Sequence
  Synthetic oligonucleotide
aatatttgcggccgagcggggaaatagggc

SEQ ID NO: 426469 - DNA, 30 bp, Artificial Sequence
  Synthetic oligonucleotide
gaaacgaccacttctaccttgacatagggc

SEQ ID NO: 426470 - DNA, 30 bp, Artificial Sequence
  Synthetic oligonucleotide
cattcgctgcacggcggggcgtgctagggc

SEQ ID NO: 426471 - DNA, 30 bp, Artificial Sequence
  Synthetic oligonucleotide
tattctttgtaaccgcgatatcggtagggc

SEQ ID NO: 426472 - DNA, 30 bp, Artificial Sequence
  Synthetic oligonucleotide
tctataattgtgaattggccgcgttagggc

SEQ ID NO: 426473 - DNA, 30 bp, Artificial Sequence
  Synthetic oligonucleotide
tcccccggcaaaagttttgagcacacgggc

SEQ ID NO: 426474 - DNA, 30 bp, Artificial Sequence
  Synthetic oligonucleotide
agaactctactaagagccagacgcacgggc

SEQ ID NO: 426475 - DNA, 30 bp, Artificial Sequence
  Synthetic oligonucleotide
agtgccaacctaacccgtcgatcgacgggc

SEQ ID NO: 426476 - DNA, 30 bp, Artificial Sequence
  Synthetic oligonucleotide
gaaggggagcccttgggtatgtcgacgggc

SEQ ID NO: 426477 - DNA, 30 bp, Artificial Sequence
  Synthetic oligonucleotide
tatggattaggatattttaatatgacgggc

SEQ ID NO: 426478 - DNA, 30 bp, Artificial Sequence
  Synthetic oligonucleotide
tattctgcctgtaagacaagtactacgggc

SEQ ID NO: 426479 - DNA, 30 bp, Artificial Sequence
  Synthetic oligonucleotide
gaactactatgggccaatcccataccgggc

SEQ ID NO: 426480 - DNA, 30 bp, Artificial Sequence
  Synthetic oligonucleotide
agcctgtttcgcccatcaaataccccgggc

SEQ ID NO: 426481 - DNA, 30 bp, Artificial Sequence
  Synthetic oligonucleotide
gtgtaatggctctttggcctggggccgggc

SEQ ID NO: 426482 - DNA, 30 bp, Artificial Sequence
  Synthetic oligonucleotide
aacccttctgtcgaggtaatgctcgcgggc

SEQ ID NO: 426483 - DNA, 30 bp, Artificial Sequence
  Synthetic oligonucleotide
gtgaatagggaacttagtggggaggcgggc

SEQ ID NO: 426484 - DNA, 30 bp, Artificial Sequence
  Synthetic oligonucleotide
cgtgtagccgatcggtcttagacggcgggc

SEQ ID NO: 426485 - DNA, 30 bp, Artificial Sequence
  Synthetic oligonucleotide
ccagttcagctggtgactgttccggcgggc

SEQ ID NO: 426486 - DNA, 30 bp, Artificial Sequence
  Synthetic oligonucleotide
cccgccgggggtacgtccttgatggcgggc

SEQ ID NO: 426487 - DNA, 30 bp, Artificial Sequence
  Synthetic oligonucleotide
gcgagaccctggtgtgcggacggtgcgggc

SEQ ID NO: 426488 - DNA, 30 bp, Artificial Sequence
  Synthetic oligonucleotide
ggttttttaggaatctacggacgatcgggc

SEQ ID NO: 426489 - DNA, 30 bp, Artificial Sequence
  Synthetic oligonucleotide
cggttgcttgtttgcaatgagtcgtcgggc

SEQ ID NO: 426490 - DNA, 30 bp, Artificial Sequence
  Synthetic oligonucleotide
tgtacgagttgtaccagaaaaatgtcgggc

SEQ ID NO: 426491 - DNA, 30 bp, Artificial Sequence
  Synthetic oligonucleotide
ggaatgttctgttgatcaaggggttcgggc

SEQ ID NO: 426492 - DNA, 30 bp, Artificial Sequence
  Synthetic oligonucleotide
ctattagaccatgaaggctggtgttcgggc

SEQ ID NO: 426493 - DNA, 30 bp, Artificial Sequence
  Synthetic oligonucleotide
tgattctaagggataggcgatgacaggggc

SEQ ID NO: 426494 - DNA, 30 bp, Artificial Sequence
  Synthetic oligonucleotide
gctgtattcatcgcatcaatttccaggggc

SEQ ID NO: 426495 - DNA, 30 bp, Artificial Sequence
  Synthetic oligonucleotide
tgtggcaacgtgttgaagccgggcaggggc

SEQ ID NO: 426496 - DNA, 30 bp, Artificial Sequence
  Synthetic oligonucleotide
gtcgggttcttgtaggaaccacctaggggc

SEQ ID NO: 426497 - DNA, 30 bp, Artificial Sequence
  Synthetic oligonucleotide
aaagctggtttgttggtgagttctaggggc

SEQ ID NO: 426498 - DNA, 30 bp, Artificial Sequence
  Synthetic oligonucleotide
tataaggaatggacatgggaaacacggggc

SEQ ID NO: 426499 - DNA, 30 bp, Artificial Sequence
  Synthetic oligonucleotide
agctaggggttggtggtaaagtgacggggc

SEQ ID NO: 426500 - DNA, 30 bp, Artificial Sequence
  Synthetic oligonucleotide
tagcacctaacaatctatttaggccggggc

SEQ ID NO: 426501 - DNA, 30 bp, Artificial Sequence
  Synthetic oligonucleotide
agcctctctgaaagtcctaatgtccggggc

SEQ ID NO: 426502 - DNA, 30 bp, Artificial Sequence
  Synthetic oligonucleotide
gttggtaacggaccacgctgtagtcggggc

SEQ ID NO: 426503 - DNA, 30 bp, Artificial Sequence
  Synthetic oligonucleotide
tcattcctttaaagttaattaggtcggggc

SEQ ID NO: 426504 - DNA, 30 bp, Artificial Sequence
  Synthetic oligonucleotide
gagcgctgctcaccttggaataaagggggc

SEQ ID NO: 426505 - DNA, 30 bp, Artificial Sequence
  Synthetic oligonucleotide
gttttaaataagacggtggtcgaagggggc

SEQ ID NO: 426506 - DNA, 30 bp, Artificial Sequence
  Synthetic oligonucleotide
ttgttcgtcgatgggcgagtgtgagggggc

SEQ ID NO: 426507 - DNA, 30 bp, Artificial Sequence
  Synthetic oligonucleotide
tcgttaaattcatctactacgttagggggc

SEQ ID NO: 426508 - DNA, 30 bp, Artificial Sequence
  Synthetic oligonucleotide
atatttctgggtccaacggtccacgggggc

SEQ ID NO: 426509 - DNA, 30 bp, Artificial Sequence
  Synthetic oligonucleotide
gtttcgcgagccatgaactttcacgggggc

SEQ ID NO: 426510 - DNA, 30 bp, Artificial Sequence
  Synthetic oligonucleotide
agtccgcaccagcataaagtgtgcgggggc

SEQ ID NO: 426511 - DNA, 30 bp, Artificial Sequence
  Synthetic oligonucleotide
tttgtatgttgtgaagaatgttgggggggc

SEQ ID NO: 426512 - DNA, 30 bp, Artificial Sequence
  Synthetic oligonucleotide
cactgcccattctggattcggaaatggggc

SEQ ID NO: 426513 - DNA, 30 bp, Artificial Sequence
  Synthetic oligonucleotide
atcccgattcactctcattggcaatggggc

SEQ ID NO: 426514 - DNA, 30 bp, Artificial Sequence
  Synthetic oligonucleotide
acagcggccttctgtacggaagtctggggc

SEQ ID NO: 426515 - DNA, 30 bp, Artificial Sequence
  Synthetic oligonucleotide
agacgtgcggcaggtttcaaggagtggggc

SEQ ID NO: 426516 - DNA, 30 bp, Artificial Sequence
  Synthetic oligonucleotide
ggctatggaccgcagtaactgaggtggggc

SEQ ID NO: 426517 - DNA, 30 bp, Artificial Sequence
  Synthetic oligonucleotide
aattccagcttggtatgcaaaatgtggggc

SEQ ID NO: 426518 - DNA, 30 bp, Artificial Sequence
  Synthetic oligonucleotide
cggctctttaggagtgagtatcattggggc

SEQ ID NO: 426519 - DNA, 30 bp, Artificial Sequence
  Synthetic oligonucleotide
ctaaagccgaggcgatcagcgatttggggc

SEQ ID NO: 426520 - DNA, 30 bp, Artificial Sequence
  Synthetic oligonucleotide
taagtttaggttttagtaatttccatgggc

SEQ ID NO: 426521 - DNA, 30 bp, Artificial Sequence
  Synthetic oligonucleotide
ccacggcttctataggggaaaaaactgggc

SEQ ID NO: 426522 - DNA, 30 bp, Artificial Sequence
  Synthetic oligonucleotide
cgtacgtatttttacgaaggtacactgggc

SEQ ID NO: 426523 - DNA, 30 bp, Artificial Sequence
  Synthetic oligonucleotide
attcgcaagctcccgaatgtcggactgggc

SEQ ID NO: 426524 - DNA, 30 bp, Artificial Sequence
  Synthetic oligonucleotide
attagttgccaagtctaagcgcccctgggc

SEQ ID NO: 426525 - DNA, 30 bp, Artificial Sequence
  Synthetic oligonucleotide
taagacccggcccacctcgctggcctgggc

SEQ ID NO: 426526 - DNA, 30 bp, Artificial Sequence
  Synthetic oligonucleotide
gtaggttcagttgccggcagtaaagtgggc

SEQ ID NO: 426527 - DNA, 30 bp, Artificial Sequence
  Synthetic oligonucleotide
aacgagtgagctggctgacaagtagtgggc

SEQ ID NO: 426528 - DNA, 30 bp, Artificial Sequence
  Synthetic oligonucleotide
aatctataaagtcgccccagaaccgtgggc

SEQ ID NO: 426529 - DNA, 30 bp, Artificial Sequence
  Synthetic oligonucleotide
taaagtttgtctttatgttgcgccgtgggc

SEQ ID NO: 426530 - DNA, 30 bp, Artificial Sequence
  Synthetic oligonucleotide
ttatgagactaaaagagtttccgggtgggc

SEQ ID NO: 426531 - DNA, 30 bp, Artificial Sequence
  Synthetic oligonucleotide
gtagtttgggatcaaattcggcggttgggc

SEQ ID NO: 426532 - DNA, 30 bp, Artificial Sequence
  Synthetic oligonucleotide
actggttgcacaaatgttaacaatttgggc

SEQ ID NO: 426533 - DNA, 30 bp, Artificial Sequence
  Synthetic oligonucleotide
agatccgccgcgtatcttctgccaaatggc

SEQ ID NO: 426534 - DNA, 30 bp, Artificial Sequence
  Synthetic oligonucleotide
tttctaagtttagtatctactagaaatggc

SEQ ID NO: 426535 - DNA, 30 bp, Artificial Sequence
  Synthetic oligonucleotide
gcagcgttggaaatccggataggaaatggc

SEQ ID NO: 426536 - DNA, 30 bp, Artificial Sequence
  Synthetic oligonucleotide
tgtttgcgtgacacgaaaaagtgaaatggc

SEQ ID NO: 426537 - DNA, 30 bp, Artificial Sequence
  Synthetic oligonucleotide
ggaaccgggtaaaccgcccttaacaatggc

SEQ ID NO: 426538 - DNA, 30 bp, Artificial Sequence
  Synthetic oligonucleotide
aagcttgctcgcacgccgagctacaatggc

SEQ ID NO: 426539 - DNA, 30 bp, Artificial Sequence
  Synthetic oligonucleotide
ggagaaggctgggggctcttactcaatggc

SEQ ID NO: 426540 - DNA, 30 bp, Artificial Sequence
  Synthetic oligonucleotide
atcggtttatgccttgcgctattcaatggc

SEQ ID NO: 426541 - DNA, 30 bp, Artificial Sequence
  Synthetic oligonucleotide
ttctagggactcaatcaatttaagaatggc

SEQ ID NO: 426542 - DNA, 30 bp, Artificial Sequence
  Synthetic oligonucleotide
gatccgtgtataacgcttttcggtaatggc

SEQ ID NO: 426543 - DNA, 30 bp, Artificial Sequence
  Synthetic oligonucleotide
gtagcatgggtagtaaggcacgcccatggc

SEQ ID NO: 426544 - DNA, 30 bp, Artificial Sequence
  Synthetic oligonucleotide
ggctggtcgtatggtgatgggacgcatggc

SEQ ID NO: 426545 - DNA, 30 bp, Artificial Sequence
  Synthetic oligonucleotide
ccgaattaaggcttcagtatatggcatggc

SEQ ID NO: 426546 - DNA, 30 bp, Artificial Sequence
  Synthetic oligonucleotide
gcccgtcaaaggcggaccggctgtcatggc

SEQ ID NO: 426547 - DNA, 30 bp, Artificial Sequence
  Synthetic oligonucleotide
aagtgcctagtcagaccgccatttcatggc

SEQ ID NO: 426548 - DNA, 30 bp, Artificial Sequence
  Synthetic oligonucleotide
cagctgctcgaccgcacggacttagatggc

SEQ ID NO: 426549 - DNA, 30 bp, Artificial Sequence
  Synthetic oligonucleotide
ttcatttttggatatagtcgcatcgatggc

SEQ ID NO: 426550 - DNA, 30 bp, Artificial Sequence
  Synthetic oligonucleotide
catgctgcccagagactcggagtcgatggc

SEQ ID NO: 426551 - DNA, 30 bp, Artificial Sequence
  Synthetic oligonucleotide
agtggtacgttcgtgtatccaacggatggc

SEQ ID NO: 426552 - DNA, 30 bp, Artificial Sequence
  Synthetic oligonucleotide
tctggtcggatggtctgaaggtcggatggc

SEQ ID NO: 426553 - DNA, 30 bp, Artificial Sequence
  Synthetic oligonucleotide
taaggtctcaggcgtcattcattggatggc

SEQ ID NO: 426554 - DNA, 30 bp, Artificial Sequence
  Synthetic oligonucleotide
ccccgaatttaaattggatacggatatggc

SEQ ID NO: 426555 - DNA, 30 bp, Artificial Sequence
  Synthetic oligonucleotide
agaattcccaggagttcagccctctatggc

SEQ ID NO: 426556 - DNA, 30 bp, Artificial Sequence
  Synthetic oligonucleotide
aaatccgagctaaagcaaggggggtatggc

SEQ ID NO: 426557 - DNA, 30 bp, Artificial Sequence
  Synthetic oligonucleotide
tgaggctggatatgccgtaaatattatggc

SEQ ID NO: 426558 - DNA, 30 bp, Artificial Sequence
  Synthetic oligonucleotide
taatcgccagtgagatcataagccactggc

SEQ ID NO: 426559 - DNA, 30 bp, Artificial Sequence
  Synthetic oligonucleotide
atcttgtcaccttacattgtaacgactggc

SEQ ID NO: 426560 - DNA, 30 bp, Artificial Sequence
  Synthetic oligonucleotide
caagtataggttcgggttaaacatactggc

SEQ ID NO: 426561 - DNA, 29 bp, Artificial Sequence
  Synthetic oligonucleotide
ggttgaggatcgcctttgccggacctggc

SEQ ID NO: 426562 - DNA, 30 bp, Artificial Sequence
  Synthetic oligonucleotide
catggtatttttttatagaattgacctggc

SEQ ID NO: 426563 - DNA, 30 bp, Artificial Sequence
  Synthetic oligonucleotide
cagtacgtacaatgccccggcgtacctggc

SEQ ID NO: 426564 - DNA, 30 bp, Artificial Sequence
  Synthetic oligonucleotide
gatagttggtgaagttgacgtgtacctggc

SEQ ID NO: 426565 - DNA, 31 bp, Artificial Sequence
  Synthetic oligonucleotide
gagccaagcatctgtgagattcagagctggc

SEQ ID NO: 426566 - DNA, 30 bp, Artificial Sequence
  Synthetic oligonucleotide
ttgagttctagccctatgagtctagctggc

SEQ ID NO: 426567 - DNA, 30 bp, Artificial Sequence
  Synthetic oligonucleotide
gttatcgtatcttgtaaagttgccgctggc

SEQ ID NO: 426568 - DNA, 30 bp, Artificial Sequence
  Synthetic oligonucleotide
taatccctgcaccggcagctcctcgctggc

SEQ ID NO: 426569 - DNA, 30 bp, Artificial Sequence
  Synthetic oligonucleotide
ttagtataacacgaaatcgcggtggctggc

SEQ ID NO: 426570 - DNA, 30 bp, Artificial Sequence
  Synthetic oligonucleotide
gcagggtacgcagatagagtccatgctggc

SEQ ID NO: 426571 - DNA, 30 bp, Artificial Sequence
  Synthetic oligonucleotide
acaaacagcttctcttaatagaaatctggc

SEQ ID NO: 426572 - DNA, 30 bp, Artificial Sequence
  Synthetic oligonucleotide
acagtcgtccacgaactggtcacatctggc

SEQ ID NO: 426573 - DNA, 30 bp, Artificial Sequence
  Synthetic oligonucleotide
aaaaacaacgaattcaagcattcatctggc

SEQ ID NO: 426574 - DNA, 30 bp, Artificial Sequence
  Synthetic oligonucleotide
ttaagtactttttttaaagacgtctctggc

SEQ ID NO: 426575 - DNA, 30 bp, Artificial Sequence
  Synthetic oligonucleotide
actcgtatataacatctgttcttctctggc

SEQ ID NO: 426576 - DNA, 30 bp, Artificial Sequence
  Synthetic oligonucleotide
ggccgttcgccagctgagcataaaagtggc

SEQ ID NO: 426577 - DNA, 30 bp, Artificial Sequence
  Synthetic oligonucleotide
gaccgttaccagtaaagaacttcaagtggc

SEQ ID NO: 426578 - DNA, 30 bp, Artificial Sequence
  Synthetic oligonucleotide
gtcttttgaatcttggcacagggcagtggc

SEQ ID NO: 426579 - DNA, 30 bp, Artificial Sequence
  Synthetic oligonucleotide
gtcattttacgatatgtctgggatagtggc

SEQ ID NO: 426580 - DNA, 30 bp, Artificial Sequence
  Synthetic oligonucleotide
gtaaactgtagaacgccttggtgacgtggc

SEQ ID NO: 426581 - DNA, 30 bp, Artificial Sequence
  Synthetic oligonucleotide
attaacatgttttcatatgtattacgtggc

SEQ ID NO: 426582 - DNA, 30 bp, Artificial Sequence
  Synthetic oligonucleotide
agtactcatcagacccgggcaagccgtggc

SEQ ID NO: 426583 - DNA, 30 bp, Artificial Sequence
  Synthetic oligonucleotide
agctcagacctgataccatggttgcgtggc

SEQ ID NO: 426584 - DNA, 30 bp, Artificial Sequence
  Synthetic oligonucleotide
acgatcagttctcacatgtgcagaggtggc

SEQ ID NO: 426585 - DNA, 30 bp, Artificial Sequence
  Synthetic oligonucleotide
gcatcttttctgccgtatgttggaggtggc

SEQ ID NO: 426586 - DNA, 30 bp, Artificial Sequence
  Synthetic oligonucleotide
tgaaaacccacagcgcggttctgaggtggc

SEQ ID NO: 426587 - DNA, 30 bp, Artificial Sequence
  Synthetic oligonucleotide
tctcgaagggaaaagacgagttacggtggc

SEQ ID NO: 426588 - DNA, 30 bp, Artificial Sequence
  Synthetic oligonucleotide
aatacgtatatgactatattagccggtggc

SEQ ID NO: 426589 - DNA, 30 bp, Artificial Sequence
  Synthetic oligonucleotide
agctacgacgcaatgacatgactcggtggc

SEQ ID NO: 426590 - DNA, 29 bp, Artificial Sequence
  Synthetic oligonucleotide
ggtgttgcgtaagggcgtgtgtgggtggc

SEQ ID NO: 426591 - DNA, 30 bp, Artificial Sequence
  Synthetic oligonucleotide
tatgccgggtggctctaccagtctggtggc

SEQ ID NO: 426592 - DNA, 30 bp, Artificial Sequence
  Synthetic oligonucleotide
acggcagggtggattaaatatcgtggtggc

SEQ ID NO: 426593 - DNA, 30 bp, Artificial Sequence
  Synthetic oligonucleotide
agtatccgtcttaattgtaatattggtggc

SEQ ID NO: 426594 - DNA, 30 bp, Artificial Sequence
  Synthetic oligonucleotide
agttacggcaccaagaaaagtgttggtggc

SEQ ID NO: 426595 - DNA, 30 bp, Artificial Sequence
  Synthetic oligonucleotide
aggagaaacagggcatatggttttggtggc

SEQ ID NO: 426596 - DNA, 30 bp, Artificial Sequence
  Synthetic oligonucleotide
aaaaactgtgtactgtagtcaacgtgtggc

SEQ ID NO: 426597 - DNA, 30 bp, Artificial Sequence
  Synthetic oligonucleotide
catctgcttaataggggatgcaggtgtggc

SEQ ID NO: 426598 - DNA, 30 bp, Artificial Sequence
  Synthetic oligonucleotide
gtgactgatatggtgcgtttgagttgtggc

SEQ ID NO: 426599 - DNA, 30 bp, Artificial Sequence
  Synthetic oligonucleotide
aactacttaggagtcgtcacctcaattggc

SEQ ID NO: 426600 - DNA, 30 bp, Artificial Sequence
  Synthetic oligonucleotide
tgatacagtggactaacgagttacattggc

SEQ ID NO: 426601 - DNA, 30 bp, Artificial Sequence
  Synthetic oligonucleotide
ttacactcagtggggttagactcgattggc

SEQ ID NO: 426602 - DNA, 30 bp, Artificial Sequence
  Synthetic oligonucleotide
taacgttttcaaggtcgcggcgtacttggc

SEQ ID NO: 426603 - DNA, 30 bp, Artificial Sequence
  Synthetic oligonucleotide
atggcgcccgggataaagtttgtacttggc

SEQ ID NO: 426604 - DNA, 30 bp, Artificial Sequence
  Synthetic oligonucleotide
cgcccagcctatgcacagctcacgcttggc

SEQ ID NO: 426605 - DNA, 30 bp, Artificial Sequence
  Synthetic oligonucleotide
ggggacttcgacgaatactgttatcttggc

SEQ ID NO: 426606 - DNA, 30 bp, Artificial Sequence
  Synthetic oligonucleotide
gatgaagttggacgaggggccgttcttggc

SEQ ID NO: 426607 - DNA, 30 bp, Artificial Sequence
  Synthetic oligonucleotide
atttacttgttaggtgttcagtaggttggc

SEQ ID NO: 426608 - DNA, 30 bp, Artificial Sequence
  Synthetic oligonucleotide
gttctggttatacgagtcaaacgggttggc

SEQ ID NO: 426609 - DNA, 30 bp, Artificial Sequence
  Synthetic oligonucleotide
catcctccctgtaccggctcatgggttggc

SEQ ID NO: 426610 - DNA, 30 bp, Artificial Sequence
  Synthetic oligonucleotide
aataccactattcatacgaattgggttggc

SEQ ID NO: 426611 - DNA, 30 bp, Artificial Sequence
  Synthetic oligonucleotide
ttacttgataggcagaaatcgatggttggc

SEQ ID NO: 426612 - DNA, 30 bp, Artificial Sequence
  Synthetic oligonucleotide
accaaacagtcttttttataacttgttggc

SEQ ID NO: 426613 - DNA, 30 bp, Artificial Sequence
  Synthetic oligonucleotide
caccaagaggattttggataggttgttggc

SEQ ID NO: 426614 - DNA, 30 bp, Artificial Sequence
  Synthetic oligonucleotide
cagaatttccatacttatgatgactttggc

SEQ ID NO: 426615 - DNA, 30 bp, Artificial Sequence
  Synthetic oligonucleotide
acgtgatcgaaacaatgtccactctttggc

SEQ ID NO: 426616 - DNA, 30 bp, Artificial Sequence
  Synthetic oligonucleotide
gtggcaggcggtagtccttagaggtttggc

SEQ ID NO: 426617 - DNA, 31 bp, Artificial Sequence
  Synthetic oligonucleotide
tatactagatacccgcgtgacgaattttggc

SEQ ID NO: 426618 - DNA, 30 bp, Artificial Sequence
  Synthetic oligonucleotide
taatccggtagttaggctgattattttggc

SEQ ID NO: 426619 - DNA, 30 bp, Artificial Sequence
  Synthetic oligonucleotide
ggactaccataggaagccaggtacaaatgc

SEQ ID NO: 426620 - DNA, 30 bp, Artificial Sequence
  Synthetic oligonucleotide
taagttgtcttccctgcaagcagcaaatgc

SEQ ID NO: 426621 - DNA, 30 bp, Artificial Sequence
  Synthetic oligonucleotide
agtatctggaataacaggtgtagtaaatgc

SEQ ID NO: 426622 - DNA, 30 bp, Artificial Sequence
  Synthetic oligonucleotide
agtcacagcacatttggaaggtgtaaatgc

SEQ ID NO: 426623 - DNA, 30 bp, Artificial Sequence
  Synthetic oligonucleotide
tccgtttatagtttcggattgtgtaaatgc

SEQ ID NO: 426624 - DNA, 30 bp, Artificial Sequence
  Synthetic oligonucleotide
ataattttaataaggagcggagcacaatgc

SEQ ID NO: 426625 - DNA, 30 bp, Artificial Sequence
  Synthetic oligonucleotide
gaaacaagtgcactgtgtgaattacaatgc

SEQ ID NO: 426626 - DNA, 30 bp, Artificial Sequence
  Synthetic oligonucleotide
actgaacagcacgtaggttctgtccaatgc

SEQ ID NO: 426627 - DNA, 30 bp, Artificial Sequence
  Synthetic oligonucleotide
ttggcttagccatcagggcgatggcaatgc

SEQ ID NO: 426628 - DNA, 30 bp, Artificial Sequence
  Synthetic oligonucleotide
attcttgtgcgacggggcattttagaatgc

SEQ ID NO: 426629 - DNA, 30 bp, Artificial Sequence
  Synthetic oligonucleotide
ctcagggcgtatgtaagtctgagggaatgc

SEQ ID NO: 426630 - DNA, 30 bp, Artificial Sequence
  Synthetic oligonucleotide
cgcacatgcttgataacataagtggaatgc

SEQ ID NO: 426631 - DNA, 30 bp, Artificial Sequence
  Synthetic oligonucleotide
tcaccacacgtttcgcgggagactgaatgc

SEQ ID NO: 426632 - DNA, 30 bp, Artificial Sequence
  Synthetic oligonucleotide
gcatgctcattcataggagattttgaatgc

SEQ ID NO: 426633 - DNA, 30 bp, Artificial Sequence
  Synthetic oligonucleotide
gccaaattggaatgtcatacaggataatgc

SEQ ID NO: 426634 - DNA, 30 bp, Artificial Sequence
  Synthetic oligonucleotide
cccttcacacagctggaagtaggataatgc

SEQ ID NO: 426635 - DNA, 30 bp, Artificial Sequence
  Synthetic oligonucleotide
acggtcaaccatacatagtgctgataatgc

SEQ ID NO: 426636 - DNA, 31 bp, Artificial Sequence
  Synthetic oligonucleotide
ggttggtgttaggtataagttattataatgc

SEQ ID NO: 426637 - DNA, 31 bp, Artificial Sequence
  Synthetic oligonucleotide
actggagctcctgtacaacggcagctaatgc

SEQ ID NO: 426638 - DNA, 30 bp, Artificial Sequence
  Synthetic oligonucleotide
ccagtagcctgggccttgatagggtaatgc

SEQ ID NO: 426639 - DNA, 30 bp, Artificial Sequence
  Synthetic oligonucleotide
atcggagttatctcatcattactgtaatgc

SEQ ID NO: 426640 - DNA, 30 bp, Artificial Sequence
  Synthetic oligonucleotide
taaatttctacttcttcagcggacacatgc

SEQ ID NO: 426641 - DNA, 30 bp, Artificial Sequence
  Synthetic oligonucleotide
aggtacagtaaagaaacccgttgcacatgc

SEQ ID NO: 426642 - DNA, 30 bp, Artificial Sequence
  Synthetic oligonucleotide
ctaaattcatttaaaataaccaatacatgc

SEQ ID NO: 426643 - DNA, 30 bp, Artificial Sequence
  Synthetic oligonucleotide
accgccccaagttcgcagcttgatacatgc

SEQ ID NO: 426644 - DNA, 30 bp, Artificial Sequence
  Synthetic oligonucleotide
gtccactcgaggctcgttgcgcgtacatgc

SEQ ID NO: 426645 - DNA, 30 bp, Artificial Sequence
  Synthetic oligonucleotide
cagaggattataatcgccggtgttacatgc

SEQ ID NO: 426646 - DNA, 30 bp, Artificial Sequence
  Synthetic oligonucleotide
agactgaggcctacaggactgataccatgc

SEQ ID NO: 426647 - DNA, 30 bp, Artificial Sequence
  Synthetic oligonucleotide
ggcaaagcttcgctatttataatgccatgc

SEQ ID NO: 426648 - DNA, 30 bp, Artificial Sequence
  Synthetic oligonucleotide
gaaggcttttgtcggctcgcggaggcatgc

SEQ ID NO: 426649 - DNA, 30 bp, Artificial Sequence
  Synthetic oligonucleotide
gttcattcaggaccccatcctgaggcatgc

SEQ ID NO: 426650 - DNA, 30 bp, Artificial Sequence
  Synthetic oligonucleotide
tacctctgaagtataaccgcccgggcatgc

SEQ ID NO: 426651 - DNA, 30 bp, Artificial Sequence
  Synthetic oligonucleotide
actcttaccctatagtcaggtcttgcatgc

SEQ ID NO: 426652 - DNA, 30 bp, Artificial Sequence
  Synthetic oligonucleotide
gggcactaactactggctggccactcatgc

SEQ ID NO: 426653 - DNA, 30 bp, Artificial Sequence
  Synthetic oligonucleotide
gagtatggcggtcgagatccgggctcatgc

SEQ ID NO: 426654 - DNA, 30 bp, Artificial Sequence
  Synthetic oligonucleotide
gtcctcatttgaacgttagagatctcatgc

SEQ ID NO: 426655 - DNA, 30 bp, Artificial Sequence
  Synthetic oligonucleotide
ttatcgacaactaacctttactcgtcatgc

SEQ ID NO: 426656 - DNA, 30 bp, Artificial Sequence
  Synthetic oligonucleotide
tggcctgaagacggcggtttactgtcatgc

SEQ ID NO: 426657 - DNA, 30 bp, Artificial Sequence
  Synthetic oligonucleotide
ctgactggtgcccagtcatagttgtcatgc

SEQ ID NO: 426658 - DNA, 30 bp, Artificial Sequence
  Synthetic oligonucleotide
attcctcgtagtgttaagaatttgtcatgc

SEQ ID NO: 426659 - DNA, 30 bp, Artificial Sequence
  Synthetic oligonucleotide
tagatagtcttcccggagtttttttcatgc

SEQ ID NO: 426660 - DNA, 30 bp, Artificial Sequence
  Synthetic oligonucleotide
agtacaagatcctccttacctgcaagatgc

SEQ ID NO: 426661 - DNA, 30 bp, Artificial Sequence
  Synthetic oligonucleotide
ttttgcacttttttaatgttgttaagatgc

SEQ ID NO: 426662 - DNA, 30 bp, Artificial Sequence
  Synthetic oligonucleotide
cgattgataggacaaactgcccgcagatgc

SEQ ID NO: 426663 - DNA, 30 bp, Artificial Sequence
  Synthetic oligonucleotide
gcagggtatcttgtttaaatgaagagatgc

SEQ ID NO: 426664 - DNA, 30 bp, Artificial Sequence
  Synthetic oligonucleotide
tggtagcattctaacttgaatccgagatgc

SEQ ID NO: 426665 - DNA, 30 bp, Artificial Sequence
  Synthetic oligonucleotide
tgctgccgacgctatagcaataggagatgc

SEQ ID NO: 426666 - DNA, 30 bp, Artificial Sequence
  Synthetic oligonucleotide
tacagcttgaatgaccctatctatagatgc

SEQ ID NO: 426667 - DNA, 30 bp, Artificial Sequence
  Synthetic oligonucleotide
cagcatccttggtcataatcacaacgatgc

SEQ ID NO: 426668 - DNA, 28 bp, Artificial Sequence
  Synthetic oligonucleotide
atacgatgttggtacttaagaacgatgc

SEQ ID NO: 426669 - DNA, 30 bp, Artificial Sequence
  Synthetic oligonucleotide
cctacccctggggattgatcggaacgatgc

SEQ ID NO: 426670 - DNA, 30 bp, Artificial Sequence
  Synthetic oligonucleotide
ctctttaaggcgactgcttcataacgatgc

SEQ ID NO: 426671 - DNA, 30 bp, Artificial Sequence
  Synthetic oligonucleotide
ggctttgagcgcaggatgtaaccacgatgc

SEQ ID NO: 426672 - DNA, 30 bp, Artificial Sequence
  Synthetic oligonucleotide
gcacaatgagtgggtactgcccaccgatgc

SEQ ID NO: 426673 - DNA, 30 bp, Artificial Sequence
  Synthetic oligonucleotide
gtcatattacttcatgaaatggttcgatgc

SEQ ID NO: 426674 - DNA, 30 bp, Artificial Sequence
  Synthetic oligonucleotide
cgcccattcttatgtatgccgaacggatgc

SEQ ID NO: 426675 - DNA, 30 bp, Artificial Sequence
  Synthetic oligonucleotide
ccgtaccatggtttacgatatcacggatgc

SEQ ID NO: 426676 - DNA, 30 bp, Artificial Sequence
  Synthetic oligonucleotide
attctacaaatatactcctggtagggatgc

SEQ ID NO: 426677 - DNA, 30 bp, Artificial Sequence
  Synthetic oligonucleotide
ttcgaaaataggtcttcgtgaaaatgatgc

SEQ ID NO: 426678 - DNA, 30 bp, Artificial Sequence
  Synthetic oligonucleotide
caaatccgtactactaagttgcaatgatgc

SEQ ID NO: 426679 - DNA, 30 bp, Artificial Sequence
  Synthetic oligonucleotide
tactttcaaattgactatgaggaatgatgc

SEQ ID NO: 426680 - DNA, 30 bp, Artificial Sequence
  Synthetic oligonucleotide
cgtatgcctgcccgtcaagcgttatgatgc

SEQ ID NO: 426681 - DNA, 30 bp, Artificial Sequence
  Synthetic oligonucleotide
tcatcgtaaacgatccaatcgttatgatgc

SEQ ID NO: 426682 - DNA, 30 bp, Artificial Sequence
  Synthetic oligonucleotide
ttatgtgaagaagcacacccatcctgatgc

SEQ ID NO: 426683 - DNA, 30 bp, Artificial Sequence
  Synthetic oligonucleotide
ttatcttaggctgtcagagatcgctgatgc

SEQ ID NO: 426684 - DNA, 30 bp, Artificial Sequence
  Synthetic oligonucleotide
cttgtcaacacgggcggaagcggctgatgc

SEQ ID NO: 426685 - DNA, 30 bp, Artificial Sequence
  Synthetic oligonucleotide
gcacatcgagagttcatgttcatctgatgc

SEQ ID NO: 426686 - DNA, 30 bp, Artificial Sequence
  Synthetic oligonucleotide
acgtcttaccaaatatggtatatctgatgc

SEQ ID NO: 426687 - DNA, 30 bp, Artificial Sequence
  Synthetic oligonucleotide
gtttcatcttacaagtcatcactttgatgc

SEQ ID NO: 426688 - DNA, 30 bp, Artificial Sequence
  Synthetic oligonucleotide
gttttgcggacttataagattccaatatgc

SEQ ID NO: 426689 - DNA, 30 bp, Artificial Sequence
  Synthetic oligonucleotide
ggatcagactgcatagaggtcacgatatgc

SEQ ID NO: 426690 - DNA, 30 bp, Artificial Sequence
  Synthetic oligonucleotide
tgtccgcgggatctctgttttgcgatatgc

SEQ ID NO: 426691 - DNA, 30 bp, Artificial Sequence
  Synthetic oligonucleotide
agaattccggcagaacgatgcattatatgc

SEQ ID NO: 426692 - DNA, 30 bp, Artificial Sequence
  Synthetic oligonucleotide
tgacaagtcatagacgggcgggccctatgc

SEQ ID NO: 426693 - DNA, 30 bp, Artificial Sequence
  Synthetic oligonucleotide
attcagagtggactacagatactgctatgc

SEQ ID NO: 426694 - DNA, 30 bp, Artificial Sequence
  Synthetic oligonucleotide
tgggaatggagcagtaaagggtctctatgc

SEQ ID NO: 426695 - DNA, 30 bp, Artificial Sequence
  Synthetic oligonucleotide
gcgaatgtgaagctaatcaacacagtatgc

SEQ ID NO: 426696 - DNA, 30 bp, Artificial Sequence
  Synthetic oligonucleotide
gcttcaagcattgtcgggacgggagtatgc

SEQ ID NO: 426697 - DNA, 30 bp, Artificial Sequence
  Synthetic oligonucleotide
aaagtattttagtgttagccctgagtatgc

SEQ ID NO: 426698 - DNA, 30 bp, Artificial Sequence
  Synthetic oligonucleotide
tatagcttacaggaagtaaaaggcgtatgc

SEQ ID NO: 426699 - DNA, 30 bp, Artificial Sequence
  Synthetic oligonucleotide
caggtttggtatgggggacgcgaggtatgc

SEQ ID NO: 426700 - DNA, 30 bp, Artificial Sequence
  Synthetic oligonucleotide
acagcgcaggcaaaacaacaggatgtatgc

SEQ ID NO: 426701 - DNA, 30 bp, Artificial Sequence
  Synthetic oligonucleotide
atcatcaccgttagacccatgtaattatgc

SEQ ID NO: 426702 - DNA, 30 bp, Artificial Sequence
  Synthetic oligonucleotide
gtaggagttactaccaatgctacattatgc

SEQ ID NO: 426703 - DNA, 30 bp, Artificial Sequence
  Synthetic oligonucleotide
gttcatcagcacataagaacgtggttatgc

SEQ ID NO: 426704 - DNA, 30 bp, Artificial Sequence
  Synthetic oligonucleotide
gtcgccatagctagatcacctatgttatgc

SEQ ID NO: 426705 - DNA, 30 bp, Artificial Sequence
  Synthetic oligonucleotide
gacgcatcaaggtcgcggtaagctttatgc

SEQ ID NO: 426706 - DNA, 30 bp, Artificial Sequence
  Synthetic oligonucleotide
agcagtagtgtggtttattagagtttatgc

SEQ ID NO: 426707 - DNA, 30 bp, Artificial Sequence
  Synthetic oligonucleotide
gcagtctggagaggtgacatttgtttatgc

SEQ ID NO: 426708 - DNA, 30 bp, Artificial Sequence
  Synthetic oligonucleotide
cttagctacctcctgcacagccttttatgc

SEQ ID NO: 426709 - DNA, 30 bp, Artificial Sequence
  Synthetic oligonucleotide
attgatatggctagacccactgtaaactgc

SEQ ID NO: 426710 - DNA, 30 bp, Artificial Sequence
  Synthetic oligonucleotide
aatcggggaccttgagcggtcgtcaactgc

SEQ ID NO: 426711 - DNA, 30 bp, Artificial Sequence
  Synthetic oligonucleotide
cgaaagtacgaggtctaaaagaagaactgc

SEQ ID NO: 426712 - DNA, 30 bp, Artificial Sequence
  Synthetic oligonucleotide
tactggcgttagcatggttagtcgaactgc

SEQ ID NO: 426713 - DNA, 30 bp, Artificial Sequence
  Synthetic oligonucleotide
gagatgaattctcaagggaaccataactgc

SEQ ID NO: 426714 - DNA, 29 bp, Artificial Sequence
  Synthetic oligonucleotide
gcagggttcgattgtcgtccggacactgc

SEQ ID NO: 426715 - DNA, 30 bp, Artificial Sequence
  Synthetic oligonucleotide
agcatgatcaagcatgtgtcgatacactgc

SEQ ID NO: 426716 - DNA, 30 bp, Artificial Sequence
  Synthetic oligonucleotide
gccgttcgcgggctgtctgaacagcactgc

SEQ ID NO: 426717 - DNA, 30 bp, Artificial Sequence
  Synthetic oligonucleotide
ataataaagaaggggcgtttgcttcactgc

SEQ ID NO: 426718 - DNA, 29 bp, Artificial Sequence
  Synthetic oligonucleotide
gtcccctaagggagtgtttggttcactgc

SEQ ID NO: 426719 - DNA, 30 bp, Artificial Sequence
  Synthetic oligonucleotide
caattctcagcagtatgtggataagactgc

SEQ ID NO: 426720 - DNA, 30 bp, Artificial Sequence
  Synthetic oligonucleotide
ttaggcctatagacacttgagttggactgc

SEQ ID NO: 426721 - DNA, 30 bp, Artificial Sequence
  Synthetic oligonucleotide
tttagtctcatggacaaagctgctgactgc

SEQ ID NO: 426722 - DNA, 30 bp, Artificial Sequence
  Synthetic oligonucleotide
gatgatgctcatgcgtattgataatactgc

SEQ ID NO: 426723 - DNA, 30 bp, Artificial Sequence
  Synthetic oligonucleotide
taaagaggcccagccagtaggacatactgc

SEQ ID NO: 426724 - DNA, 30 bp, Artificial Sequence
  Synthetic oligonucleotide
tataatagacatgcgatagcattatactgc

SEQ ID NO: 426725 - DNA, 30 bp, Artificial Sequence
  Synthetic oligonucleotide
ttttactttggaacactctcgaggtactgc

SEQ ID NO: 426726 - DNA, 30 bp, Artificial Sequence
  Synthetic oligonucleotide
gcaatacctcaaaaggcgttggtgtactgc

SEQ ID NO: 426727 - DNA, 30 bp, Artificial Sequence
  Synthetic oligonucleotide
gttgcagagaacctctaattataaacctgc

SEQ ID NO: 426728 - DNA, 30 bp, Artificial Sequence
  Synthetic oligonucleotide
cactctaggttgttcatagtagcgacctgc

SEQ ID NO: 426729 - DNA, 30 bp, Artificial Sequence
  Synthetic oligonucleotide
caggagataaaccgctaggaaatgacctgc

SEQ ID NO: 426730 - DNA, 30 bp, Artificial Sequence
  Synthetic oligonucleotide
atgatgttgctcatcggcatcacaccctgc

SEQ ID NO: 426731 - DNA, 30 bp, Artificial Sequence
  Synthetic oligonucleotide
atctctacataataatcgagtcttccctgc

SEQ ID NO: 426732 - DNA, 30 bp, Artificial Sequence
  Synthetic oligonucleotide
catggcgggtccgaatttgcacaagcctgc

SEQ ID NO: 426733 - DNA, 30 bp, Artificial Sequence
  Synthetic oligonucleotide
actgtgattgattaagaagtacgcgcctgc

SEQ ID NO: 426734 - DNA, 30 bp, Artificial Sequence
  Synthetic oligonucleotide
tagccaaggttgttggcgccaagtgcctgc

SEQ ID NO: 426735 - DNA, 30 bp, Artificial Sequence
  Synthetic oligonucleotide
acagatgtcaagcgatgcgctggtgcctgc

SEQ ID NO: 426736 - DNA, 30 bp, Artificial Sequence
  Synthetic oligonucleotide
tagggttctaaatattaaccagcttcctgc

SEQ ID NO: 426737 - DNA, 30 bp, Artificial Sequence
  Synthetic oligonucleotide
cctatttactgcactgtttcagtttcctgc

SEQ ID NO: 426738 - DNA, 30 bp, Artificial Sequence
  Synthetic oligonucleotide
ttgcgctccccggaagtcgggtgcagctgc

SEQ ID NO: 426739 - DNA, 30 bp, Artificial Sequence
  Synthetic oligonucleotide
gggggaccttctacacttgtagagagctgc

SEQ ID NO: 426740 - DNA, 30 bp, Artificial Sequence
  Synthetic oligonucleotide
gaaatcgcaacaaacaggcattgacgctgc

SEQ ID NO: 426741 - DNA, 30 bp, Artificial Sequence
  Synthetic oligonucleotide
aacaataattgcgaactggggcagcgctgc

SEQ ID NO: 426742 - DNA, 30 bp, Artificial Sequence
  Synthetic oligonucleotide
acgaatatttcgtctcggccatatcgctgc

SEQ ID NO: 426743 - DNA, 30 bp, Artificial Sequence
  Synthetic oligonucleotide
attatgattgcaaagattacacttcgctgc

SEQ ID NO: 426744 - DNA, 30 bp, Artificial Sequence
  Synthetic oligonucleotide
ataaacgcgtctgggcaagacatcggctgc

SEQ ID NO: 426745 - DNA, 30 bp, Artificial Sequence
  Synthetic oligonucleotide
ggcaattaggggacggcagaattgggctgc

SEQ ID NO: 426746 - DNA, 30 bp, Artificial Sequence
  Synthetic oligonucleotide
tggcatctcgcgttgcattaagttggctgc

SEQ ID NO: 426747 - DNA, 30 bp, Artificial Sequence
  Synthetic oligonucleotide
tgcagaccattacctacacagtttggctgc

SEQ ID NO: 426748 - DNA, 30 bp, Artificial Sequence
  Synthetic oligonucleotide
ttgttggagccctgacgtatgaattgctgc

SEQ ID NO: 426749 - DNA, 30 bp, Artificial Sequence
  Synthetic oligonucleotide
aaactgcccaattcggttacgataatctgc

SEQ ID NO: 426750 - DNA, 30 bp, Artificial Sequence
  Synthetic oligonucleotide
ttttgtcaataaggcctaatcctaatctgc

SEQ ID NO: 426751 - DNA, 30 bp, Artificial Sequence
  Synthetic oligonucleotide
ataaaaatttgcttagattataacatctgc

SEQ ID NO: 426752 - DNA, 30 bp, Artificial Sequence
  Synthetic oligonucleotide
cctttgaagggcagccgggatcagatctgc

SEQ ID NO: 426753 - DNA, 30 bp, Artificial Sequence
  Synthetic oligonucleotide
gctaaatttatggacttggtcaggatctgc

SEQ ID NO: 426754 - DNA, 30 bp, Artificial Sequence
  Synthetic oligonucleotide
caacttacggttcctgagcataatatctgc

SEQ ID NO: 426755 - DNA, 30 bp, Artificial Sequence
  Synthetic oligonucleotide
ccatccactatatcatagttcggactctgc

SEQ ID NO: 426756 - DNA, 30 bp, Artificial Sequence
  Synthetic oligonucleotide
tttgccactgaactggcggctgacctctgc

SEQ ID NO: 426757 - DNA, 30 bp, Artificial Sequence
  Synthetic oligonucleotide
gggccaaaaccggccggatccgcgctctgc

SEQ ID NO: 426758 - DNA, 30 bp, Artificial Sequence
  Synthetic oligonucleotide
aatgtttcaaggggtgtccccactctctgc

SEQ ID NO: 426759 - DNA, 30 bp, Artificial Sequence
  Synthetic oligonucleotide
cagcagataaacctcgagtgggctctctgc

SEQ ID NO: 426760 - DNA, 30 bp, Artificial Sequence
  Synthetic oligonucleotide
gatgacgcttggtcttgcaacttagtctgc

SEQ ID NO: 426761 - DNA, 30 bp, Artificial Sequence
  Synthetic oligonucleotide
attgatgggactccattcttgcccgtctgc

SEQ ID NO: 426762 - DNA, 30 bp, Artificial Sequence
  Synthetic oligonucleotide
gagcagccccctaagtcgtgtcaggtctgc

SEQ ID NO: 426763 - DNA, 30 bp, Artificial Sequence
  Synthetic oligonucleotide
aatttgggatcacagagtagaccggtctgc

SEQ ID NO: 426764 - DNA, 30 bp, Artificial Sequence
  Synthetic oligonucleotide
ggaacaatttatggaaccttaagggtctgc

SEQ ID NO: 426765 - DNA, 29 bp, Artificial Sequence
  Synthetic oligonucleotide
aatattgtgtgcgacttaggtctgtctgc

SEQ ID NO: 426766 - DNA, 30 bp, Artificial Sequence
  Synthetic oligonucleotide
acgttctttattagcgagtgcacattctgc

SEQ ID NO: 426767 - DNA, 31 bp, Artificial Sequence
  Synthetic oligonucleotide
tccgtccgatgttctatttgggtagttctgc

SEQ ID NO: 426768 - DNA, 30 bp, Artificial Sequence
  Synthetic oligonucleotide
ctattttgcacagctaacaaaccgttctgc

SEQ ID NO: 426769 - DNA, 30 bp, Artificial Sequence
  Synthetic oligonucleotide
tacgcacgctcgtctgaacgatggttctgc

SEQ ID NO: 426770 - DNA, 30 bp, Artificial Sequence
  Synthetic oligonucleotide
tctgggaggctgaaatttaatagtttctgc

SEQ ID NO: 426771 - DNA, 30 bp, Artificial Sequence
  Synthetic oligonucleotide
gtactgacccaatcacctttttaaaagtgc

SEQ ID NO: 426772 - DNA, 30 bp, Artificial Sequence
  Synthetic oligonucleotide
ttctatatgtagcataaatggcacaagtgc

SEQ ID NO: 426773 - DNA, 30 bp, Artificial Sequence
  Synthetic oligonucleotide
ggaccccggcccccctacactgataagtgc

SEQ ID NO: 426774 - DNA, 30 bp, Artificial Sequence
  Synthetic oligonucleotide
acatccgaacaccaggaaatttataagtgc

SEQ ID NO: 426775 - DNA, 30 bp, Artificial Sequence
  Synthetic oligonucleotide
ggtgaactttttatattaaccggacagtgc

SEQ ID NO: 426776 - DNA, 30 bp, Artificial Sequence
  Synthetic oligonucleotide
actgttggtttactatagatccgccagtgc

SEQ ID NO: 426777 - DNA, 30 bp, Artificial Sequence
  Synthetic oligonucleotide
ttctcagtttctcaacacgtttcgcagtgc

SEQ ID NO: 426778 - DNA, 30 bp, Artificial Sequence
  Synthetic oligonucleotide
agttcctttcgcacggtccctaatcagtgc

SEQ ID NO: 426779 - DNA, 30 bp, Artificial Sequence
  Synthetic oligonucleotide
tacgtcctggcggacaaaacgcctcagtgc

SEQ ID NO: 426780 - DNA, 30 bp, Artificial Sequence
  Synthetic oligonucleotide
gaatcaattagtttccacgcactcgagtgc

SEQ ID NO: 426781 - DNA, 30 bp, Artificial Sequence
  Synthetic oligonucleotide
agaatatattcttgacatagttaggagtgc

SEQ ID NO: 426782 - DNA, 30 bp, Artificial Sequence
  Synthetic oligonucleotide
aggagtcgggaagggtagggcccggagtgc

SEQ ID NO: 426783 - DNA, 30 bp, Artificial Sequence
  Synthetic oligonucleotide
attcgcaaccttattctgctaggggagtgc

SEQ ID NO: 426784 - DNA, 30 bp, Artificial Sequence
  Synthetic oligonucleotide
agtaatttgtgtgacccgctctaatagtgc

SEQ ID NO: 426785 - DNA, 30 bp, Artificial Sequence
  Synthetic oligonucleotide
ggccccaacggtgggcctttcttatagtgc

SEQ ID NO: 426786 - DNA, 30 bp, Artificial Sequence
  Synthetic oligonucleotide
cgatgcgtccgtataaagagaacctagtgc

SEQ ID NO: 426787 - DNA, 30 bp, Artificial Sequence
  Synthetic oligonucleotide
ttacgcaccccgtccctaggatcctagtgc

SEQ ID NO: 426788 - DNA, 30 bp, Artificial Sequence
  Synthetic oligonucleotide
ccctggatcgtttgtgttggcaggtagtgc

SEQ ID NO: 426789 - DNA, 30 bp, Artificial Sequence
  Synthetic oligonucleotide
tgttttggttgtgcatatgttcgttagtgc

SEQ ID NO: 426790 - DNA, 30 bp, Artificial Sequence
  Synthetic oligonucleotide
gccgtgatgtacgacctagtgatttagtgc

SEQ ID NO: 426791 - DNA, 30 bp, Artificial Sequence
  Synthetic oligonucleotide
gtgctggggactttcaaatacggaacgtgc

SEQ ID NO: 426792 - DNA, 30 bp, Artificial Sequence
  Synthetic oligonucleotide
actactctatggtgtaaactatcgacgtgc

SEQ ID NO: 426793 - DNA, 30 bp, Artificial Sequence
  Synthetic oligonucleotide
taaccgggtcgtatattgtaggggacgtgc

SEQ ID NO: 426794 - DNA, 30 bp, Artificial Sequence
  Synthetic oligonucleotide
ctgggagcgtgctcggttgactatacgtgc

SEQ ID NO: 426795 - DNA, 30 bp, Artificial Sequence
  Synthetic oligonucleotide
tgctgtaccgtgaaattttaggagccgtgc

SEQ ID NO: 426796 - DNA, 30 bp, Artificial Sequence
  Synthetic oligonucleotide
tttcccgctgcttgttaatagcttccgtgc

SEQ ID NO: 426797 - DNA, 30 bp, Artificial Sequence
  Synthetic oligonucleotide
cacggtagcacctctacgataaaagcgtgc

SEQ ID NO: 426798 - DNA, 30 bp, Artificial Sequence
  Synthetic oligonucleotide
acgcgctcccgcggaattgttccagcgtgc

SEQ ID NO: 426799 - DNA, 31 bp, Artificial Sequence
  Synthetic oligonucleotide
aggcatacgcttattctctatgagagcgtgc

SEQ ID NO: 426800 - DNA, 30 bp, Artificial Sequence
  Synthetic oligonucleotide
cccggcttatatgaaatcgtgttagcgtgc

SEQ ID NO: 426801 - DNA, 30 bp, Artificial Sequence
  Synthetic oligonucleotide
tcactacacggtgcagtcataccggcgtgc

SEQ ID NO: 426802 - DNA, 30 bp, Artificial Sequence
  Synthetic oligonucleotide
tgctatgtgctaggcgcacacccggcgtgc

SEQ ID NO: 426803 - DNA, 30 bp, Artificial Sequence
  Synthetic oligonucleotide
ctatactcgaattgttcggtacgggcgtgc

SEQ ID NO: 426804 - DNA, 30 bp, Artificial Sequence
  Synthetic oligonucleotide
agtcacggcagtacgtggcgttgggcgtgc

SEQ ID NO: 426805 - DNA, 30 bp, Artificial Sequence
  Synthetic oligonucleotide
cgtagatctttcggtacttggatggcgtgc

SEQ ID NO: 426806 - DNA, 30 bp, Artificial Sequence
  Synthetic oligonucleotide
cgcccatggttccccagtcggaaatcgtgc

SEQ ID NO: 426807 - DNA, 30 bp, Artificial Sequence
  Synthetic oligonucleotide
atttccagtgtgtacttgaacagatcgtgc

SEQ ID NO: 426808 - DNA, 30 bp, Artificial Sequence
  Synthetic oligonucleotide
gccctaatacgatcgggccacagatcgtgc

SEQ ID NO: 426809 - DNA, 29 bp, Artificial Sequence
  Synthetic oligonucleotide
taacgttttgttactcgaggctctcgtgc

SEQ ID NO: 426810 - DNA, 30 bp, Artificial Sequence
  Synthetic oligonucleotide
gtcagcatatagcaaacaatcctgtcgtgc

SEQ ID NO: 426811 - DNA, 30 bp, Artificial Sequence
  Synthetic oligonucleotide
cctaacgtaggcacctaaatgggaaggtgc

SEQ ID NO: 426812 - DNA, 30 bp, Artificial Sequence
  Synthetic oligonucleotide
gaaagacacttggcagattacataaggtgc

SEQ ID NO: 426813 - DNA, 30 bp, Artificial Sequence
  Synthetic oligonucleotide
gggacccgagcatggcccgggttcaggtgc

SEQ ID NO: 426814 - DNA, 30 bp, Artificial Sequence
  Synthetic oligonucleotide
gtcataacggccgattgtgccaagaggtgc

SEQ ID NO: 426815 - DNA, 30 bp, Artificial Sequence
  Synthetic oligonucleotide
tctggtcgttaaagagcttcacttaggtgc

SEQ ID NO: 426816 - DNA, 30 bp, Artificial Sequence
  Synthetic oligonucleotide
gcacggcataaggctgtgcaatcacggtgc

SEQ ID NO: 426817 - DNA, 30 bp, Artificial Sequence
  Synthetic oligonucleotide
tgtcatagagatgtttgtagtttacggtgc

SEQ ID NO: 426818 - DNA, 30 bp, Artificial Sequence
  Synthetic oligonucleotide
ttgcacagtccgtacaatggaaaccggtgc

SEQ ID NO: 426819 - DNA, 30 bp, Artificial Sequence
  Synthetic oligonucleotide
aactcgctgcaactctaaagaatccggtgc

SEQ ID NO: 426820 - DNA, 30 bp, Artificial Sequence
  Synthetic oligonucleotide
ttagggatggcctcgctgcagacgcggtgc

SEQ ID NO: 426821 - DNA, 30 bp, Artificial Sequence
  Synthetic oligonucleotide
ctaaccaatgtaacgtccgtttctcggtgc

SEQ ID NO: 426822 - DNA, 30 bp, Artificial Sequence
  Synthetic oligonucleotide
aaatattatgtctgatttcatgaagggtgc

SEQ ID NO: 426823 - DNA, 30 bp, Artificial Sequence
  Synthetic oligonucleotide
aacacagtttgcctgacgaaaacagggtgc

SEQ ID NO: 426824 - DNA, 30 bp, Artificial Sequence
  Synthetic oligonucleotide
acgacattgcgacgcatcaacgcagggtgc

SEQ ID NO: 426825 - DNA, 30 bp, Artificial Sequence
  Synthetic oligonucleotide
tgttcgcccataccgggaagcttagggtgc

SEQ ID NO: 426826 - DNA, 30 bp, Artificial Sequence
  Synthetic oligonucleotide
aaggacagagcaactgtaaagattgggtgc

SEQ ID NO: 426827 - DNA, 30 bp, Artificial Sequence
  Synthetic oligonucleotide
tttcatgaagaacgtgccatacaatggtgc

SEQ ID NO: 426828 - DNA, 30 bp, Artificial Sequence
  Synthetic oligonucleotide
atcagagtggtgtggattggttcatggtgc

SEQ ID NO: 426829 - DNA, 30 bp, Artificial Sequence
  Synthetic oligonucleotide
gcacgcaccattaatcagtaacggtggtgc

SEQ ID NO: 426830 - DNA, 30 bp, Artificial Sequence
  Synthetic oligonucleotide
tttataagctgactagcatgtatgtggtgc

SEQ ID NO: 426831 - DNA, 30 bp, Artificial Sequence
  Synthetic oligonucleotide
tcaatcaccgttcgtcttaggtcttggtgc

SEQ ID NO: 426832 - DNA, 30 bp, Artificial Sequence
  Synthetic oligonucleotide
gatgtaggtcctctgggggggggttggtgc

SEQ ID NO: 426833 - DNA, 30 bp, Artificial Sequence
  Synthetic oligonucleotide
caattggtggcctctccgaggtaaatgtgc

SEQ ID NO: 426834 - DNA, 30 bp, Artificial Sequence
  Synthetic oligonucleotide
tactaagtaactttcagttgcacaatgtgc

SEQ ID NO: 426835 - DNA, 30 bp, Artificial Sequence
  Synthetic oligonucleotide
gctgagcttagatagaaagctccaatgtgc

SEQ ID NO: 426836 - DNA, 30 bp, Artificial Sequence
  Synthetic oligonucleotide
accgtgcttgctagaaaattgttaatgtgc

SEQ ID NO: 426837 - DNA, 30 bp, Artificial Sequence
  Synthetic oligonucleotide
tagatgagcgccctgtgcccggttatgtgc

SEQ ID NO: 426838 - DNA, 30 bp, Artificial Sequence
  Synthetic oligonucleotide
aggttttaaacaaccatcagtgttatgtgc

SEQ ID NO: 426839 - DNA, 30 bp, Artificial Sequence
  Synthetic oligonucleotide
tcccggcactacgtgactacgtaactgtgc

SEQ ID NO: 426840 - DNA, 30 bp, Artificial Sequence
  Synthetic oligonucleotide
tacaccggatcatgtggccttcgtctgtgc

SEQ ID NO: 426841 - DNA, 30 bp, Artificial Sequence
  Synthetic oligonucleotide
cataaggctttctatttcgtgtaagtgtgc

SEQ ID NO: 426842 - DNA, 30 bp, Artificial Sequence
  Synthetic oligonucleotide
gtgtgtcggtcccagacggtttgggtgtgc

SEQ ID NO: 426843 - DNA, 30 bp, Artificial Sequence
  Synthetic oligonucleotide
tacggatttggataccctctcgttgtgtgc

SEQ ID NO: 426844 - DNA, 30 bp, Artificial Sequence
  Synthetic oligonucleotide
aggtttcgtgctgacgtcttcagattgtgc

SEQ ID NO: 426845 - DNA, 30 bp, Artificial Sequence
  Synthetic oligonucleotide
ttgttgtaattgggctactttaccttgtgc

SEQ ID NO: 426846 - DNA, 30 bp, Artificial Sequence
  Synthetic oligonucleotide
gtggacgctaaccctgaatgccagttgtgc

SEQ ID NO: 426847 - DNA, 28 bp, Artificial Sequence
  Synthetic oligonucleotide
ttcgctcgtataataaccatggttgtgc

SEQ ID NO: 426848 - DNA, 30 bp, Artificial Sequence
  Synthetic oligonucleotide
atcctgtattgcccagaaatggtcaattgc

SEQ ID NO: 426849 - DNA, 30 bp, Artificial Sequence
  Synthetic oligonucleotide
ccccagctcgtttatattaacccgaattgc

SEQ ID NO: 426850 - DNA, 30 bp, Artificial Sequence
  Synthetic oligonucleotide
attttaagtgaatgcgccgagcgtaattgc

SEQ ID NO: 426851 - DNA, 30 bp, Artificial Sequence
  Synthetic oligonucleotide
aacctagggtatcgtagtacttttaattgc

SEQ ID NO: 426852 - DNA, 30 bp, Artificial Sequence
  Synthetic oligonucleotide
attcgactttagaatggaaattcacattgc

SEQ ID NO: 426853 - DNA, 30 bp, Artificial Sequence
  Synthetic oligonucleotide
aacgcgtcaacatgagctggtagacattgc

SEQ ID NO: 426854 - DNA, 30 bp, Artificial Sequence
  Synthetic oligonucleotide
tttctgatgatcagaatggagtaccattgc

SEQ ID NO: 426855 - DNA, 30 bp, Artificial Sequence
  Synthetic oligonucleotide
gaacccggatgttcaatggaatcgcattgc

SEQ ID NO: 426856 - DNA, 30 bp, Artificial Sequence
  Synthetic oligonucleotide
taaatgggataattaataggcaggcattgc

SEQ ID NO: 426857 - DNA, 30 bp, Artificial Sequence
  Synthetic oligonucleotide
tagcatcaagcgtcatatatgggagattgc

SEQ ID NO: 426858 - DNA, 30 bp, Artificial Sequence
  Synthetic oligonucleotide
gccgctagcataagagaatggtgagattgc

SEQ ID NO: 426859 - DNA, 30 bp, Artificial Sequence
  Synthetic oligonucleotide
aatagcctacacttgacagttatggattgc

SEQ ID NO: 426860 - DNA, 29 bp, Artificial Sequence
  Synthetic oligonucleotide
ccattgcgtaacgtgagcaaattgattgc

SEQ ID NO: 426861 - DNA, 30 bp, Artificial Sequence
  Synthetic oligonucleotide
ctctgggaaggctctgtgcgttttgattgc

SEQ ID NO: 426862 - DNA, 30 bp, Artificial Sequence
  Synthetic oligonucleotide
gtggtatcgctgagctcaatcaaatattgc

SEQ ID NO: 426863 - DNA, 30 bp, Artificial Sequence
  Synthetic oligonucleotide
gcacttcatttattccaacaacaatattgc

SEQ ID NO: 426864 - DNA, 30 bp, Artificial Sequence
  Synthetic oligonucleotide
gaagtccatgtaacgtagtcagcctattgc

SEQ ID NO: 426865 - DNA, 30 bp, Artificial Sequence
  Synthetic oligonucleotide
ataataatccccttgcgaaagtgctattgc

SEQ ID NO: 426866 - DNA, 30 bp, Artificial Sequence
  Synthetic oligonucleotide
gcagttttttagtgcaaatccgtctattgc

SEQ ID NO: 426867 - DNA, 30 bp, Artificial Sequence
  Synthetic oligonucleotide
gcgcactcaataaaactacctgattattgc

SEQ ID NO: 426868 - DNA, 30 bp, Artificial Sequence
  Synthetic oligonucleotide
gatctcccgttagcactgaccggttattgc

SEQ ID NO: 426869 - DNA, 30 bp, Artificial Sequence
  Synthetic oligonucleotide
gactctgggtaaacgccctctggttattgc

SEQ ID NO: 426870 - DNA, 30 bp, Artificial Sequence
  Synthetic oligonucleotide
gtgctagtgagctgtttcttaccaacttgc

SEQ ID NO: 426871 - DNA, 30 bp, Artificial Sequence
  Synthetic oligonucleotide
tcttggtgcagccgaggaatatccacttgc

SEQ ID NO: 426872 - DNA, 30 bp, Artificial Sequence
  Synthetic oligonucleotide
agatttctgaacatgcaccagcggacttgc

SEQ ID NO: 426873 - DNA, 30 bp, Artificial Sequence
  Synthetic oligonucleotide
ggtaccagcaagtacgtaactatgacttgc

SEQ ID NO: 426874 - DNA, 30 bp, Artificial Sequence
  Synthetic oligonucleotide
ttaaaatgcaccgaagcaaatgatacttgc

SEQ ID NO: 426875 - DNA, 30 bp, Artificial Sequence
  Synthetic oligonucleotide
ggtcatggactgcatagaagctgaccttgc

SEQ ID NO: 426876 - DNA, 30 bp, Artificial Sequence
  Synthetic oligonucleotide
atatcgccctcgaaatgggtcccgccttgc

SEQ ID NO: 426877 - DNA, 30 bp, Artificial Sequence
  Synthetic oligonucleotide
aatgacgcgcaaacaggctcggctccttgc

SEQ ID NO: 426878 - DNA, 30 bp, Artificial Sequence
  Synthetic oligonucleotide
agccaagtgagtcagccctcgagtccttgc

SEQ ID NO: 426879 - DNA, 30 bp, Artificial Sequence
  Synthetic oligonucleotide
ggcgcattccctgcacggggaaccgcttgc

SEQ ID NO: 426880 - DNA, 30 bp, Artificial Sequence
  Synthetic oligonucleotide
tatgtaatattgttgcatagaatcgcttgc

SEQ ID NO: 426881 - DNA, 30 bp, Artificial Sequence
  Synthetic oligonucleotide
agctagtcatctggtcagcagtaggcttgc

SEQ ID NO: 426882 - DNA, 30 bp, Artificial Sequence
  Synthetic oligonucleotide
gacgaggcgcagggggcctaatcggcttgc

SEQ ID NO: 426883 - DNA, 30 bp, Artificial Sequence
  Synthetic oligonucleotide
cccgtctgttctggacaccactaatcttgc

SEQ ID NO: 426884 - DNA, 30 bp, Artificial Sequence
  Synthetic oligonucleotide
acatctctgtagacccggttgtcatcttgc

SEQ ID NO: 426885 - DNA, 30 bp, Artificial Sequence
  Synthetic oligonucleotide
caatgcagttattgaccggacaaacgttgc

SEQ ID NO: 426886 - DNA, 30 bp, Artificial Sequence
  Synthetic oligonucleotide
gattaacaatgtttcgaccttgaacgttgc

SEQ ID NO: 426887 - DNA, 30 bp, Artificial Sequence
  Synthetic oligonucleotide
tgcaacgccgtattgaggtccatacgttgc

SEQ ID NO: 426888 - DNA, 30 bp, Artificial Sequence
  Synthetic oligonucleotide
acggcgctgccgtggtgttttaaccgttgc

SEQ ID NO: 426889 - DNA, 30 bp, Artificial Sequence
  Synthetic oligonucleotide
cgtacgacctgcctatggctgttgcgttgc

SEQ ID NO: 426890 - DNA, 30 bp, Artificial Sequence
  Synthetic oligonucleotide
gatataccagctacgagcatacatcgttgc

SEQ ID NO: 426891 - DNA, 30 bp, Artificial Sequence
  Synthetic oligonucleotide
ttcagttataaccggaccgcaaaaggttgc

SEQ ID NO: 426892 - DNA, 30 bp, Artificial Sequence
  Synthetic oligonucleotide
gggttttatacgacgcggctaaaaggttgc

SEQ ID NO: 426893 - DNA, 30 bp, Artificial Sequence
  Synthetic oligonucleotide
gagacatatcttgaactgagctccggttgc

SEQ ID NO: 426894 - DNA, 30 bp, Artificial Sequence
  Synthetic oligonucleotide
catgacagtatgccgcctcggaggggttgc

SEQ ID NO: 426895 - DNA, 30 bp, Artificial Sequence
  Synthetic oligonucleotide
tattcgttcgctctaccgataagtggttgc

SEQ ID NO: 426896 - DNA, 30 bp, Artificial Sequence
  Synthetic oligonucleotide
aacctgtaaaatggtttccaatcatgttgc

SEQ ID NO: 426897 - DNA, 30 bp, Artificial Sequence
  Synthetic oligonucleotide
tgaaaatcgaagcttacatgtttatgttgc

SEQ ID NO: 426898 - DNA, 30 bp, Artificial Sequence
  Synthetic oligonucleotide
tatcatgatgcaggccacattccctgttgc

SEQ ID NO: 426899 - DNA, 30 bp, Artificial Sequence
  Synthetic oligonucleotide
gtcctaagtggggctgatctaatctgttgc

SEQ ID NO: 426900 - DNA, 30 bp, Artificial Sequence
  Synthetic oligonucleotide
actttacacctaatttcccactagtgttgc

SEQ ID NO: 426901 - DNA, 30 bp, Artificial Sequence
  Synthetic oligonucleotide
actactctgtgttgatttggcacgtgttgc

SEQ ID NO: 426902 - DNA, 30 bp, Artificial Sequence
  Synthetic oligonucleotide
caggttgttacaactcgtaaattgtgttgc

SEQ ID NO: 426903 - DNA, 30 bp, Artificial Sequence
  Synthetic oligonucleotide
cgtattgatatggttcttggatattgttgc

SEQ ID NO: 426904 - DNA, 30 bp, Artificial Sequence
  Synthetic oligonucleotide
cacggctactggtgatggaacgcaatttgc

SEQ ID NO: 426905 - DNA, 30 bp, Artificial Sequence
  Synthetic oligonucleotide
ctagctctttcaggtttgctgtgaatttgc

SEQ ID NO: 426906 - DNA, 30 bp, Artificial Sequence
  Synthetic oligonucleotide
gatcagacgatcagcaaaatcaacatttgc

SEQ ID NO: 426907 - DNA, 30 bp, Artificial Sequence
  Synthetic oligonucleotide
aaggctgtgggtgggaaccgccacatttgc

SEQ ID NO: 426908 - DNA, 30 bp, Artificial Sequence
  Synthetic oligonucleotide
ttcagcggtgctctggggttccccatttgc

SEQ ID NO: 426909 - DNA, 30 bp, Artificial Sequence
  Synthetic oligonucleotide
atcacagagttgaatcggggggccatttgc

SEQ ID NO: 426910 - DNA, 30 bp, Artificial Sequence
  Synthetic oligonucleotide
gtcctctctggtacttcagtaggcatttgc

SEQ ID NO: 426911 - DNA, 30 bp, Artificial Sequence
  Synthetic oligonucleotide
accttggtgttcatgttcacatgcatttgc

SEQ ID NO: 426912 - DNA, 30 bp, Artificial Sequence
  Synthetic oligonucleotide
tgtttctctttagctttcgattgcatttgc

SEQ ID NO: 426913 - DNA, 30 bp, Artificial Sequence
  Synthetic oligonucleotide
ggtgtttgtccttggagaggttgcatttgc

SEQ ID NO: 426914 - DNA, 30 bp, Artificial Sequence
  Synthetic oligonucleotide
ccgcattccaaattaggaccaatcatttgc

SEQ ID NO: 426915 - DNA, 30 bp, Artificial Sequence
  Synthetic oligonucleotide
aaaagtacgttaagtaaggtctagatttgc

SEQ ID NO: 426916 - DNA, 30 bp, Artificial Sequence
  Synthetic oligonucleotide
gggattctattgatggtgaacaggatttgc

SEQ ID NO: 426917 - DNA, 30 bp, Artificial Sequence
  Synthetic oligonucleotide
taccgttaaggtttattttcgtggatttgc

SEQ ID NO: 426918 - DNA, 30 bp, Artificial Sequence
  Synthetic oligonucleotide
gaacttcagtccgcatattggagtatttgc

SEQ ID NO: 426919 - DNA, 30 bp, Artificial Sequence
  Synthetic oligonucleotide
gtaatcctactgcgaacctttggtatttgc

SEQ ID NO: 426920 - DNA, 30 bp, Artificial Sequence
  Synthetic oligonucleotide
attatttaggacggaccaagaaaactttgc

SEQ ID NO: 426921 - DNA, 30 bp, Artificial Sequence
  Synthetic oligonucleotide
tacaggccgtcagcgctatctagactttgc

SEQ ID NO: 426922 - DNA, 30 bp, Artificial Sequence
  Synthetic oligonucleotide
ttaccgaaggtttttaatatattcctttgc

SEQ ID NO: 426923 - DNA, 30 bp, Artificial Sequence
  Synthetic oligonucleotide
gcagttcgtgggttactatcgttcctttgc

SEQ ID NO: 426924 - DNA, 30 bp, Artificial Sequence
  Synthetic oligonucleotide
attcgcgtgagtaccatatggttcctttgc

SEQ ID NO: 426925 - DNA, 30 bp, Artificial Sequence
  Synthetic oligonucleotide
gtagttactgacgcgcccacccagctttgc

SEQ ID NO: 426926 - DNA, 30 bp, Artificial Sequence
  Synthetic oligonucleotide
ctagcgaagcttgcaatggattagctttgc

SEQ ID NO: 426927 - DNA, 30 bp, Artificial Sequence
  Synthetic oligonucleotide
tagcattcggtgactgacctgacgctttgc

SEQ ID NO: 426928 - DNA, 30 bp, Artificial Sequence
  Synthetic oligonucleotide
cagaacacgcagctatccctagtggtttgc

SEQ ID NO: 426929 - DNA, 30 bp, Artificial Sequence
  Synthetic oligonucleotide
aaataggtctagtggctgctgcgtgtttgc

SEQ ID NO: 426930 - DNA, 30 bp, Artificial Sequence
  Synthetic oligonucleotide
cgggtgtctttacatgcaaatatattttgc

SEQ ID NO: 426931 - DNA, 30 bp, Artificial Sequence
  Synthetic oligonucleotide
gggtgttaaggcaatacggcatagttttgc

SEQ ID NO: 426932 - DNA, 30 bp, Artificial Sequence
  Synthetic oligonucleotide
gactcaacattcggacgaaatgcgttttgc

SEQ ID NO: 426933 - DNA, 30 bp, Artificial Sequence
  Synthetic oligonucleotide
gagcttttaattggtctacgtttgttttgc

SEQ ID NO: 426934 - DNA, 30 bp, Artificial Sequence
  Synthetic oligonucleotide
tatcgtaaatatgatcatccgactttttgc

SEQ ID NO: 426935 - DNA, 30 bp, Artificial Sequence
  Synthetic oligonucleotide
gcagatgaataactgggcggtgctttttgc

SEQ ID NO: 426936 - DNA, 30 bp, Artificial Sequence
  Synthetic oligonucleotide
gcagccgggaagcgaatagaaaaaaaaatc

SEQ ID NO: 426937 - DNA, 30 bp, Artificial Sequence
  Synthetic oligonucleotide
ccaggcggtttcgcaatggcataaaaaatc

SEQ ID NO: 426938 - DNA, 30 bp, Artificial Sequence
  Synthetic oligonucleotide
tactaccctgttccgtcttacataaaaatc

SEQ ID NO: 426939 - DNA, 30 bp, Artificial Sequence
  Synthetic oligonucleotide
gacgctgatagctccaccatagagaaaatc

SEQ ID NO: 426940 - DNA, 30 bp, Artificial Sequence
  Synthetic oligonucleotide
ggtcttaagctcacatggtatacgaaaatc

SEQ ID NO: 426941 - DNA, 30 bp, Artificial Sequence
  Synthetic oligonucleotide
ttcggtttgcgcaaccgcccggcgaaaatc

SEQ ID NO: 426942 - DNA, 30 bp, Artificial Sequence
  Synthetic oligonucleotide
tagtctttgttcaagttatatctgaaaatc

SEQ ID NO: 426943 - DNA, 30 bp, Artificial Sequence
  Synthetic oligonucleotide
atatagggcgagaggcagtgccataaaatc

SEQ ID NO: 426944 - DNA, 30 bp, Artificial Sequence
  Synthetic oligonucleotide
ctagtgagtacagagcctttccataaaatc

SEQ ID NO: 426945 - DNA, 30 bp, Artificial Sequence
  Synthetic oligonucleotide
caaacccattagtatagatttagtaaaatc

SEQ ID NO: 426946 - DNA, 30 bp, Artificial Sequence
  Synthetic oligonucleotide
catctgtactaatattccggacgtaaaatc

SEQ ID NO: 426947 - DNA, 30 bp, Artificial Sequence
  Synthetic oligonucleotide
gaggtttggcgcctagagcagggtaaaatc

SEQ ID NO: 426948 - DNA, 30 bp, Artificial Sequence
  Synthetic oligonucleotide
gggctcagccctgaggcactaagacaaatc

SEQ ID NO: 426949 - DNA, 30 bp, Artificial Sequence
  Synthetic oligonucleotide
ccaccctgtaagcgcttgggaaggcaaatc

SEQ ID NO: 426950 - DNA, 30 bp, Artificial Sequence
  Synthetic oligonucleotide
actggactagactacatttccaatcaaatc

SEQ ID NO: 426951 - DNA, 31 bp, Artificial Sequence
  Synthetic oligonucleotide
atatctggcactaggggtccttaatcaaatc

SEQ ID NO: 426952 - DNA, 30 bp, Artificial Sequence
  Synthetic oligonucleotide
ccagcggaacttttatgacagcatcaaatc

SEQ ID NO: 426953 - DNA, 30 bp, Artificial Sequence
  Synthetic oligonucleotide
aaaagattactcgggtaaacctatcaaatc

SEQ ID NO: 426954 - DNA, 30 bp, Artificial Sequence
  Synthetic oligonucleotide
tggtgtatctacacaatcttttatcaaatc

SEQ ID NO: 426955 - DNA, 30 bp, Artificial Sequence
  Synthetic oligonucleotide
cgccaacatatggagcaaagccttcaaatc

SEQ ID NO: 426956 - DNA, 30 bp, Artificial Sequence
  Synthetic oligonucleotide
tttcatatcatgatcttccttggagaaatc

SEQ ID NO: 426957 - DNA, 30 bp, Artificial Sequence
  Synthetic oligonucleotide
tgtaatggggtatcttccccatacgaaatc

SEQ ID NO: 426958 - DNA, 30 bp, Artificial Sequence
  Synthetic oligonucleotide
cacccttccctatccctctggatcgaaatc

SEQ ID NO: 426959 - DNA, 30 bp, Artificial Sequence
  Synthetic oligonucleotide
aaaacacctagaggaggggcattggaaatc

SEQ ID NO: 426960 - DNA, 30 bp, Artificial Sequence
  Synthetic oligonucleotide
atccgttccagatcattttataatgaaatc

SEQ ID NO: 426961 - DNA, 30 bp, Artificial Sequence
  Synthetic oligonucleotide
ttaacgttccctgggacccgagttgaaatc

SEQ ID NO: 426962 - DNA, 30 bp, Artificial Sequence
  Synthetic oligonucleotide
gaggggcaagttggtgtccactcataaatc

SEQ ID NO: 426963 - DNA, 30 bp, Artificial Sequence
  Synthetic oligonucleotide
cacctgcagtccttgaacttcgactaaatc

SEQ ID NO: 426964 - DNA, 30 bp, Artificial Sequence
  Synthetic oligonucleotide
aactcggcaatggtaagctttatgtaaatc

SEQ ID NO: 426965 - DNA, 30 bp, Artificial Sequence
  Synthetic oligonucleotide
atacgacagcggcaatccgttttgtaaatc

SEQ ID NO: 426966 - DNA, 30 bp, Artificial Sequence
  Synthetic oligonucleotide
gcaggatcaactgagtcaaataattaaatc

SEQ ID NO: 426967 - DNA, 30 bp, Artificial Sequence
  Synthetic oligonucleotide
ttattatgggccaatggttgataaacaatc

SEQ ID NO: 426968 - DNA, 30 bp, Artificial Sequence
  Synthetic oligonucleotide
ttacaaaacgactagcgtccgtggacaatc

SEQ ID NO: 426969 - DNA, 30 bp, Artificial Sequence
  Synthetic oligonucleotide
cccagggaccgacgtatagattctacaatc

SEQ ID NO: 426970 - DNA, 30 bp, Artificial Sequence
  Synthetic oligonucleotide
cgccgacattatccggtaggatttacaatc

SEQ ID NO: 426971 - DNA, 30 bp, Artificial Sequence
  Synthetic oligonucleotide
tgcgtagtattacctcccagatctccaatc

SEQ ID NO: 426972 - DNA, 30 bp, Artificial Sequence
  Synthetic oligonucleotide
taagtgccgtaaaacactgaatgtccaatc

SEQ ID NO: 426973 - DNA, 30 bp, Artificial Sequence
  Synthetic oligonucleotide
atttattgcactcggcggtcttgcgcaatc

SEQ ID NO: 426974 - DNA, 30 bp, Artificial Sequence
  Synthetic oligonucleotide
ttaaattgggacggatggtaagatgcaatc

SEQ ID NO: 426975 - DNA, 30 bp, Artificial Sequence
  Synthetic oligonucleotide
gagaagatctagtagacattcactgcaatc

SEQ ID NO: 426976 - DNA, 30 bp, Artificial Sequence
  Synthetic oligonucleotide
gatcaattgcgttcgcatatgagatcaatc

SEQ ID NO: 426977 - DNA, 30 bp, Artificial Sequence
  Synthetic oligonucleotide
ccgttgtatggagaagggatcttatcaatc

SEQ ID NO: 426978 - DNA, 30 bp, Artificial Sequence
  Synthetic oligonucleotide
ctccttcgtgccgtactagctaactcaatc

SEQ ID NO: 426979 - DNA, 30 bp, Artificial Sequence
  Synthetic oligonucleotide
ggagatctggaacgttcacctatctcaatc

SEQ ID NO: 426980 - DNA, 30 bp, Artificial Sequence
  Synthetic oligonucleotide
gccggtggtttcccgcccgataagtcaatc

SEQ ID NO: 426981 - DNA, 30 bp, Artificial Sequence
  Synthetic oligonucleotide
atcatgtgcgagttctgcaggacgtcaatc

SEQ ID NO: 426982 - DNA, 30 bp, Artificial Sequence
  Synthetic oligonucleotide
gtcaagacgagtggacgcaacgcgtcaatc

SEQ ID NO: 426983 - DNA, 30 bp, Artificial Sequence
  Synthetic oligonucleotide
cattcggcggtctggtgcataggttcaatc

SEQ ID NO: 426984 - DNA, 30 bp, Artificial Sequence
  Synthetic oligonucleotide
ggttctgcagctaccacaggattttcaatc

SEQ ID NO: 426985 - DNA, 30 bp, Artificial Sequence
  Synthetic oligonucleotide
tacccaacagtggtacgcctgttttcaatc

SEQ ID NO: 426986 - DNA, 30 bp, Artificial Sequence
  Synthetic oligonucleotide
agcatgcctatgagccattcactaagaatc

SEQ ID NO: 426987 - DNA, 30 bp, Artificial Sequence
  Synthetic oligonucleotide
gtattctcaattgtagcagtactaagaatc

SEQ ID NO: 426988 - DNA, 30 bp, Artificial Sequence
  Synthetic oligonucleotide
tctcgcgtattttcaatttcttgcagaatc

SEQ ID NO: 426989 - DNA, 30 bp, Artificial Sequence
  Synthetic oligonucleotide
caacgtcagcgcaatctcgaatagagaatc

SEQ ID NO: 426990 - DNA, 31 bp, Artificial Sequence
  Synthetic oligonucleotide
tatacttagcctttggattgtcacgagaatc

SEQ ID NO: 426991 - DNA, 30 bp, Artificial Sequence
  Synthetic oligonucleotide
cctggcagtggatacggtttaaggagaatc

SEQ ID NO: 426992 - DNA, 30 bp, Artificial Sequence
  Synthetic oligonucleotide
acttaactgtcctgcagacaacggagaatc

SEQ ID NO: 426993 - DNA, 30 bp, Artificial Sequence
  Synthetic oligonucleotide
tatggctgtttaccaaatgtagggagaatc

SEQ ID NO: 426994 - DNA, 30 bp, Artificial Sequence
  Synthetic oligonucleotide
aattcgtactaaacgtccgatactagaatc

SEQ ID NO: 426995 - DNA, 30 bp, Artificial Sequence
  Synthetic oligonucleotide
gagtggatttgacgatgctaaattagaatc

SEQ ID NO: 426996 - DNA, 30 bp, Artificial Sequence
  Synthetic oligonucleotide
tttgtatgactctgacacgggtaacgaatc

SEQ ID NO: 426997 - DNA, 30 bp, Artificial Sequence
  Synthetic oligonucleotide
cccgtatggcctcagggagggtcacgaatc

SEQ ID NO: 426998 - DNA, 30 bp, Artificial Sequence
  Synthetic oligonucleotide
attgtagggatctctcgcgatcgacgaatc

SEQ ID NO: 426999 - DNA, 30 bp, Artificial Sequence
  Synthetic oligonucleotide
gatcaatcggctctttatactgaccgaatc

SEQ ID NO: 427000 - DNA, 30 bp, Artificial Sequence
  Synthetic oligonucleotide
accaacatgtacctaataactgcgcgaatc

SEQ ID NO: 427001 - DNA, 30 bp, Artificial Sequence
  Synthetic oligonucleotide
ctaaatggactaagaggaagcttgcgaatc

SEQ ID NO: 427002 - DNA, 30 bp, Artificial Sequence
  Synthetic oligonucleotide
agtcgtccctggtctacttttgatcgaatc

SEQ ID NO: 427003 - DNA, 30 bp, Artificial Sequence
  Synthetic oligonucleotide
gccctatgctcaacatcgcggtatcgaatc

SEQ ID NO: 427004 - DNA, 30 bp, Artificial Sequence
  Synthetic oligonucleotide
ctttttggcgggccaaccacggttcgaatc

SEQ ID NO: 427005 - DNA, 30 bp, Artificial Sequence
  Synthetic oligonucleotide
ggcaagcccggagtcaatggcgcaggaatc

SEQ ID NO: 427006 - DNA, 30 bp, Artificial Sequence
  Synthetic oligonucleotide
acccgcgggaaaataatcacacctggaatc

SEQ ID NO: 427007 - DNA, 30 bp, Artificial Sequence
  Synthetic oligonucleotide
tactatgcgcacaggccatttcctggaatc

SEQ ID NO: 427008 - DNA, 30 bp, Artificial Sequence
  Synthetic oligonucleotide
gcggcgacctgaagcaagagctttggaatc

SEQ ID NO: 427009 - DNA, 30 bp, Artificial Sequence
  Synthetic oligonucleotide
cggatatatgaggcgcagtctcaatgaatc

SEQ ID NO: 427010 - DNA, 30 bp, Artificial Sequence
  Synthetic oligonucleotide
tatcagagttgagcaaacttctaatgaatc

SEQ ID NO: 427011 - DNA, 30 bp, Artificial Sequence
  Synthetic oligonucleotide
tcgaacgtagtgaactgtatatactgaatc

SEQ ID NO: 427012 - DNA, 30 bp, Artificial Sequence
  Synthetic oligonucleotide
cagatgctttcatcgtaaagacgctgaatc

SEQ ID NO: 427013 - DNA, 30 bp, Artificial Sequence
  Synthetic oligonucleotide
tccgtcactgttcaaaatagcctctgaatc

SEQ ID NO: 427014 - DNA, 30 bp, Artificial Sequence
  Synthetic oligonucleotide
agctgtagtagctgggtatagaagtgaatc

SEQ ID NO: 427015 - DNA, 30 bp, Artificial Sequence
  Synthetic oligonucleotide
tttgacatctgtaggggcgatgcgtgaatc

SEQ ID NO: 427016 - DNA, 30 bp, Artificial Sequence
  Synthetic oligonucleotide
ttgggctttatcgctaaagcgctgtgaatc

SEQ ID NO: 427017 - DNA, 30 bp, Artificial Sequence
  Synthetic oligonucleotide
ctaagatcggtttaatacgacgtttgaatc

SEQ ID NO: 427018 - DNA, 30 bp, Artificial Sequence
  Synthetic oligonucleotide
attgtaaggtatatgactaaacaaataatc

SEQ ID NO: 427019 - DNA, 30 bp, Artificial Sequence
  Synthetic oligonucleotide
gatcagccccactgtaatgacgaaataatc

SEQ ID NO: 427020 - DNA, 30 bp, Artificial Sequence
  Synthetic oligonucleotide
ttagctgtcatacgaggttcatgaataatc

SEQ ID NO: 427021 - DNA, 30 bp, Artificial Sequence
  Synthetic oligonucleotide
gcagagttaattttaagagcgaatataatc

SEQ ID NO: 427022 - DNA, 30 bp, Artificial Sequence
  Synthetic oligonucleotide
tgttgatgaaatctatcagaccatataatc

SEQ ID NO: 427023 - DNA, 30 bp, Artificial Sequence
  Synthetic oligonucleotide
tcgcgcactggtttgataaccggtataatc

SEQ ID NO: 427024 - DNA, 30 bp, Artificial Sequence
  Synthetic oligonucleotide
ttacatcttcgtaatgcacggcaactaatc

SEQ ID NO: 427025 - DNA, 30 bp, Artificial Sequence
  Synthetic oligonucleotide
gggccgctgacactcctgtatccactaatc

SEQ ID NO: 427026 - DNA, 30 bp, Artificial Sequence
  Synthetic oligonucleotide
tgcattaaggccattacgctggcactaatc

SEQ ID NO: 427027 - DNA, 30 bp, Artificial Sequence
  Synthetic oligonucleotide
gtctgtgacagaactccgctaggactaatc

SEQ ID NO: 427028 - DNA, 30 bp, Artificial Sequence
  Synthetic oligonucleotide
atagccatgtaatgtatgtgtcacctaatc

SEQ ID NO: 427029 - DNA, 30 bp, Artificial Sequence
  Synthetic oligonucleotide
gtccggctggccccgtcacacactctaatc

SEQ ID NO: 427030 - DNA, 29 bp, Artificial Sequence
  Synthetic oligonucleotide
tccggggggtgcgggatgtacgtctaatc

SEQ ID NO: 427031 - DNA, 30 bp, Artificial Sequence
  Synthetic oligonucleotide
acactggctactgtccagccgctagtaatc

SEQ ID NO: 427032 - DNA, 30 bp, Artificial Sequence
  Synthetic oligonucleotide
ggtcgcggacgacaatgtgcaaccgtaatc

SEQ ID NO: 427033 - DNA, 30 bp, Artificial Sequence
  Synthetic oligonucleotide
aagattacatcatgtaattatggcgtaatc

SEQ ID NO: 427034 - DNA, 30 bp, Artificial Sequence
  Synthetic oligonucleotide
cgggagatgatcgcccgggccctcgtaatc

SEQ ID NO: 427035 - DNA, 30 bp, Artificial Sequence
  Synthetic oligonucleotide
tttggattctgttgccggggtttcgtaatc

SEQ ID NO: 427036 - DNA, 30 bp, Artificial Sequence
  Synthetic oligonucleotide
atcacagacagttctcgaaccttggtaatc

SEQ ID NO: 427037 - DNA, 30 bp, Artificial Sequence
  Synthetic oligonucleotide
gtcttatatgtttagtcctagcatgtaatc

SEQ ID NO: 427038 - DNA, 30 bp, Artificial Sequence
  Synthetic oligonucleotide
gaagttatctagggtatataaactgtaatc

SEQ ID NO: 427039 - DNA, 30 bp, Artificial Sequence
  Synthetic oligonucleotide
atgatatttggtttttgagtacctgtaatc

SEQ ID NO: 427040 - DNA, 30 bp, Artificial Sequence
  Synthetic oligonucleotide
agcacgctcctagttactttgcgtgtaatc

SEQ ID NO: 427041 - DNA, 30 bp, Artificial Sequence
  Synthetic oligonucleotide
tccacttcttcgccatagtctacattaatc

SEQ ID NO: 427042 - DNA, 30 bp, Artificial Sequence
  Synthetic oligonucleotide
gtcataaatagaccggtagtggtattaatc

SEQ ID NO: 427043 - DNA, 30 bp, Artificial Sequence
  Synthetic oligonucleotide
ccctgcagagatcaggacaaggccttaatc

SEQ ID NO: 427044 - DNA, 30 bp, Artificial Sequence
  Synthetic oligonucleotide
caacggtcgggcggcagctggctcttaatc

SEQ ID NO: 427045 - DNA, 30 bp, Artificial Sequence
  Synthetic oligonucleotide
tcaaaagacgcgtcctccccgttcttaatc

SEQ ID NO: 427046 - DNA, 30 bp, Artificial Sequence
  Synthetic oligonucleotide
gttgtcggcatagctgcaaaccacaacatc

SEQ ID NO: 427047 - DNA, 30 bp, Artificial Sequence
  Synthetic oligonucleotide
gtattgaattcagttggcaagctcaacatc

SEQ ID NO: 427048 - DNA, 30 bp, Artificial Sequence
  Synthetic oligonucleotide
ttgactgcgtgtggtgaaaatttcaacatc

SEQ ID NO: 427049 - DNA, 30 bp, Artificial Sequence
  Synthetic oligonucleotide
catgaacgcagtttacagatgcataacatc

SEQ ID NO: 427050 - DNA, 30 bp, Artificial Sequence
  Synthetic oligonucleotide
ttaaacttcatatacggtttacgtaacatc

SEQ ID NO: 427051 - DNA, 30 bp, Artificial Sequence
  Synthetic oligonucleotide
gtagtaagcgccagctagagattacacatc

SEQ ID NO: 427052 - DNA, 30 bp, Artificial Sequence
  Synthetic oligonucleotide
gctgtcccgagttagctttagcagcacatc

SEQ ID NO: 427053 - DNA, 30 bp, Artificial Sequence
  Synthetic oligonucleotide
atcaagttacataagtggaggacagacatc

SEQ ID NO: 427054 - DNA, 30 bp, Artificial Sequence
  Synthetic oligonucleotide
ttgacggtgatattcgtactcaccgacatc

SEQ ID NO: 427055 - DNA, 30 bp, Artificial Sequence
  Synthetic oligonucleotide
agatcgcagtttagtatacaagtggacatc

SEQ ID NO: 427056 - DNA, 30 bp, Artificial Sequence
  Synthetic oligonucleotide
tatctcgactcagcgcacggggatgacatc

SEQ ID NO: 427057 - DNA, 30 bp, Artificial Sequence
  Synthetic oligonucleotide
tgatttcttcgacgagacgcctcatacatc

SEQ ID NO: 427058 - DNA, 30 bp, Artificial Sequence
  Synthetic oligonucleotide
taaattgcaacctgaaaagccacctacatc

SEQ ID NO: 427059 - DNA, 30 bp, Artificial Sequence
  Synthetic oligonucleotide
tcctgacattgacttgggaaactctacatc

SEQ ID NO: 427060 - DNA, 30 bp, Artificial Sequence
  Synthetic oligonucleotide
aatccgatatatatttaatttgcgtacatc

SEQ ID NO: 427061 - DNA, 30 bp, Artificial Sequence
  Synthetic oligonucleotide
atgatgataagctggctctattattacatc

SEQ ID NO: 427062 - DNA, 30 bp, Artificial Sequence
  Synthetic oligonucleotide
ctagactcgggatgcggaggttaaaccatc

SEQ ID NO: 427063 - DNA, 30 bp, Artificial Sequence
  Synthetic oligonucleotide
agtcctaaaaatggagagtattcaaccatc

SEQ ID NO: 427064 - DNA, 30 bp, Artificial Sequence
  Synthetic oligonucleotide
cggctttgtcgctgcggtacttagaccatc

SEQ ID NO: 427065 - DNA, 30 bp, Artificial Sequence
  Synthetic oligonucleotide
ggtttggaaaggtatgtgcgggggaccatc

SEQ ID NO: 427066 - DNA, 30 bp, Artificial Sequence
  Synthetic oligonucleotide
agtcaacgactctgtcgtgcctataccatc

SEQ ID NO: 427067 - DNA, 30 bp, Artificial Sequence
  Synthetic oligonucleotide
actacagtcctttatgcgtgccaacccatc

SEQ ID NO: 427068 - DNA, 30 bp, Artificial Sequence
  Synthetic oligonucleotide
ggacgcagtgtagttgagcacgggcccatc

SEQ ID NO: 427069 - DNA, 30 bp, Artificial Sequence
  Synthetic oligonucleotide
ttgttgttgagagggtccggtcgagccatc

SEQ ID NO: 427070 - DNA, 30 bp, Artificial Sequence
  Synthetic oligonucleotide
cgcagccactattaggaaatcgccgccatc

SEQ ID NO: 427071 - DNA, 30 bp, Artificial Sequence
  Synthetic oligonucleotide
gagtctgtgcagaagtctagtgaggccatc

SEQ ID NO: 427072 - DNA, 30 bp, Artificial Sequence
  Synthetic oligonucleotide
gaactgtatgacttcagcttgtaggccatc

SEQ ID NO: 427073 - DNA, 30 bp, Artificial Sequence
  Synthetic oligonucleotide
caagtgccgctagagatcttagatgccatc

SEQ ID NO: 427074 - DNA, 30 bp, Artificial Sequence
  Synthetic oligonucleotide
aaagtcttcagccaaaggactctatccatc

SEQ ID NO: 427075 - DNA, 30 bp, Artificial Sequence
  Synthetic oligonucleotide
cgaaagttgctcccataaccggtatccatc

SEQ ID NO: 427076 - DNA, 30 bp, Artificial Sequence
  Synthetic oligonucleotide
tgcaccaggctaatggtagcgtactccatc

SEQ ID NO: 427077 - DNA, 30 bp, Artificial Sequence
  Synthetic oligonucleotide
atagtcacaggtttacagagccgctccatc

SEQ ID NO: 427078 - DNA, 30 bp, Artificial Sequence
  Synthetic oligonucleotide
tctcgtattcactagtgttaatgctccatc

SEQ ID NO: 427079 - DNA, 30 bp, Artificial Sequence
  Synthetic oligonucleotide
agtacgacggtgttagcaccataaagcatc

SEQ ID NO: 427080 - DNA, 30 bp, Artificial Sequence
  Synthetic oligonucleotide
acattgtcgtcgtttgtccaatgaagcatc

SEQ ID NO: 427081 - DNA, 30 bp, Artificial Sequence
  Synthetic oligonucleotide
cggcagggctgtctcgttcggggcagcatc

SEQ ID NO: 427082 - DNA, 30 bp, Artificial Sequence
  Synthetic oligonucleotide
ggtcgcacatgtctgtataaccagagcatc

SEQ ID NO: 427083 - DNA, 30 bp, Artificial Sequence
  Synthetic oligonucleotide
aatactaggtttggatcctatgctagcatc

SEQ ID NO: 427084 - DNA, 30 bp, Artificial Sequence
  Synthetic oligonucleotide
ccaccgggataatcagttataagacgcatc

SEQ ID NO: 427085 - DNA, 30 bp, Artificial Sequence
  Synthetic oligonucleotide
aatcgcaatcgaaatgctactggacgcatc

SEQ ID NO: 427086 - DNA, 30 bp, Artificial Sequence
  Synthetic oligonucleotide
gcctgttgttatcttgcgtttacccgcatc

SEQ ID NO: 427087 - DNA, 30 bp, Artificial Sequence
  Synthetic oligonucleotide
gtctttaaaaagacgtaccggctgcgcatc

SEQ ID NO: 427088 - DNA, 30 bp, Artificial Sequence
  Synthetic oligonucleotide
gttttgcccaggtgtacgccggctcgcatc

SEQ ID NO: 427089 - DNA, 30 bp, Artificial Sequence
  Synthetic oligonucleotide
tctggcacatataggtcggaattaggcatc

SEQ ID NO: 427090 - DNA, 30 bp, Artificial Sequence
  Synthetic oligonucleotide
ttgtagcagatggtgactagccacggcatc

SEQ ID NO: 427091 - DNA, 30 bp, Artificial Sequence
  Synthetic oligonucleotide
attgaaggctgcacaggtctttacggcatc

SEQ ID NO: 427092 - DNA, 30 bp, Artificial Sequence
  Synthetic oligonucleotide
ctttctagacacatggttaccagcggcatc

SEQ ID NO: 427093 - DNA, 30 bp, Artificial Sequence
  Synthetic oligonucleotide
acagtgcccttagaaacatctcggggcatc

SEQ ID NO: 427094 - DNA, 30 bp, Artificial Sequence
  Synthetic oligonucleotide
ttgaagtgttgatacgatgtcaatggcatc

SEQ ID NO: 427095 - DNA, 30 bp, Artificial Sequence
  Synthetic oligonucleotide
accgcttgagttgagcctttcactggcatc

SEQ ID NO: 427096 - DNA, 30 bp, Artificial Sequence
  Synthetic oligonucleotide
ctcgttactcaacagagcctgcgtggcatc

SEQ ID NO: 427097 - DNA, 30 bp, Artificial Sequence
  Synthetic oligonucleotide
ggttcgcactaaatttgaaccattggcatc

SEQ ID NO: 427098 - DNA, 30 bp, Artificial Sequence
  Synthetic oligonucleotide
atctttccagtttgacacgcgacatgcatc

SEQ ID NO: 427099 - DNA, 30 bp, Artificial Sequence
  Synthetic oligonucleotide
tcggctggccaattgacaccggcatgcatc

SEQ ID NO: 427100 - DNA, 30 bp, Artificial Sequence
  Synthetic oligonucleotide
ggaatgcccaacatagtgttgatgtgcatc

SEQ ID NO: 427101 - DNA, 30 bp, Artificial Sequence
  Synthetic oligonucleotide
ctattactcgtacgccttgacgcttgcatc

SEQ ID NO: 427102 - DNA, 30 bp, Artificial Sequence
  Synthetic oligonucleotide
caaatacttctgatcatgcggtgttgcatc

SEQ ID NO: 427103 - DNA, 30 bp, Artificial Sequence
  Synthetic oligonucleotide
gaagattggaccgtcgtccgaacaatcatc

SEQ ID NO: 427104 - DNA, 30 bp, Artificial Sequence
  Synthetic oligonucleotide
ccagtgcggattcctgtcgagagaatcatc

SEQ ID NO: 427105 - DNA, 30 bp, Artificial Sequence
  Synthetic oligonucleotide
atttggattcgtctgctgtgtgtaatcatc

SEQ ID NO: 427106 - DNA, 30 bp, Artificial Sequence
  Synthetic oligonucleotide
tccggaattacggttgaattaaacatcatc

SEQ ID NO: 427107 - DNA, 29 bp, Artificial Sequence
  Synthetic oligonucleotide
acgtatctgtctgatttctgtacatcatc

SEQ ID NO: 427108 - DNA, 30 bp, Artificial Sequence
  Synthetic oligonucleotide
cgccattaacgagaccgttgtctcatcatc

SEQ ID NO: 427109 - DNA, 30 bp, Artificial Sequence
  Synthetic oligonucleotide
atgaaggccaattgtttgcagacgatcatc

SEQ ID NO: 427110 - DNA, 30 bp, Artificial Sequence
  Synthetic oligonucleotide
acgggcagcaaatttgatccgttgatcatc

SEQ ID NO: 427111 - DNA, 30 bp, Artificial Sequence
  Synthetic oligonucleotide
cactaagagcgcactacttagtttatcatc

SEQ ID NO: 427112 - DNA, 30 bp, Artificial Sequence
  Synthetic oligonucleotide
acgctttgctgacattttagtaaactcatc

SEQ ID NO: 427113 - DNA, 30 bp, Artificial Sequence
  Synthetic oligonucleotide
ctcccatagttatggggtgaataactcatc

SEQ ID NO: 427114 - DNA, 30 bp, Artificial Sequence
  Synthetic oligonucleotide
aattacccacccatatatttcacactcatc

SEQ ID NO: 427115 - DNA, 30 bp, Artificial Sequence
  Synthetic oligonucleotide
aaggttgaacaagtccgtcacaacctcatc

SEQ ID NO: 427116 - DNA, 30 bp, Artificial Sequence
  Synthetic oligonucleotide
catttttcaactagatatcaatagctcatc

SEQ ID NO: 427117 - DNA, 30 bp, Artificial Sequence
  Synthetic oligonucleotide
caataggcacaatcatgagtacggctcatc

SEQ ID NO: 427118 - DNA, 30 bp, Artificial Sequence
  Synthetic oligonucleotide
taatgagtattgagatttccaaaagtcatc

SEQ ID NO: 427119 - DNA, 30 bp, Artificial Sequence
  Synthetic oligonucleotide
cctgtttggtcgcactcccaccaagtcatc

SEQ ID NO: 427120 - DNA, 30 bp, Artificial Sequence
  Synthetic oligonucleotide
agcctgtgcattagctatggttcagtcatc

SEQ ID NO: 427121 - DNA, 30 bp, Artificial Sequence
  Synthetic oligonucleotide
cccgtagcttcctgcaaactgctagtcatc

SEQ ID NO: 427122 - DNA, 30 bp, Artificial Sequence
  Synthetic oligonucleotide
cggattcatctctatacttcaattgtcatc

SEQ ID NO: 427123 - DNA, 30 bp, Artificial Sequence
  Synthetic oligonucleotide
tcgccactcactcaggaggccacattcatc

SEQ ID NO: 427124 - DNA, 30 bp, Artificial Sequence
  Synthetic oligonucleotide
ggggaatacgagatggtgtatacattcatc

SEQ ID NO: 427125 - DNA, 30 bp, Artificial Sequence
  Synthetic oligonucleotide
acattcggtcctgcgcctcagaacttcatc

SEQ ID NO: 427126 - DNA, 30 bp, Artificial Sequence
  Synthetic oligonucleotide
cgtccctctgatttaaaagtattgttcatc

SEQ ID NO: 427127 - DNA, 30 bp, Artificial Sequence
  Synthetic oligonucleotide
cattacgatacgagtctttcaactttcatc

SEQ ID NO: 427128 - DNA, 30 bp, Artificial Sequence
  Synthetic oligonucleotide
ggcttcatccaattcacgatggctttcatc

SEQ ID NO: 427129 - DNA, 30 bp, Artificial Sequence
  Synthetic oligonucleotide
ggttcttagattagctccttacgtttcatc

SEQ ID NO: 427130 - DNA, 30 bp, Artificial Sequence
  Synthetic oligonucleotide
ataatcgagaaggctacgggcccaaagatc

SEQ ID NO: 427131 - DNA, 30 bp, Artificial Sequence
  Synthetic oligonucleotide
gctattgcatcgatcagttatgacaagatc

SEQ ID NO: 427132 - DNA, 30 bp, Artificial Sequence
  Synthetic oligonucleotide
gcaagccagtctcgttcgttttacaagatc

SEQ ID NO: 427133 - DNA, 30 bp, Artificial Sequence
  Synthetic oligonucleotide
gttcagtaaagagtcacggacgagaagatc

SEQ ID NO: 427134 - DNA, 30 bp, Artificial Sequence
  Synthetic oligonucleotide
atcagtcatgcaaccgctcgagataagatc

SEQ ID NO: 427135 - DNA, 30 bp, Artificial Sequence
  Synthetic oligonucleotide
caatattttgaaaggcccgcggataagatc

SEQ ID NO: 427136 - DNA, 30 bp, Artificial Sequence
  Synthetic oligonucleotide
gcctaacgtttttttttaagtagtaagatc

SEQ ID NO: 427137 - DNA, 30 bp, Artificial Sequence
  Synthetic oligonucleotide
actatgtgtattatgcgagtttttaagatc

SEQ ID NO: 427138 - DNA, 30 bp, Artificial Sequence
  Synthetic oligonucleotide
aatgaagcgcatcattttgatttacagatc

SEQ ID NO: 427139 - DNA, 30 bp, Artificial Sequence
  Synthetic oligonucleotide
tgcttagcatgccgacagtggcaccagatc

SEQ ID NO: 427140 - DNA, 30 bp, Artificial Sequence
  Synthetic oligonucleotide
tttctaaggacaattgacttcacgcagatc

SEQ ID NO: 427141 - DNA, 30 bp, Artificial Sequence
  Synthetic oligonucleotide
cttggcctctactccttcccaaggcagatc

SEQ ID NO: 427142 - DNA, 30 bp, Artificial Sequence
  Synthetic oligonucleotide
agcaggtctaacccacgctgagatcagatc

SEQ ID NO: 427143 - DNA, 30 bp, Artificial Sequence
  Synthetic oligonucleotide
tgggatcggcagcagctcagccccgagatc

SEQ ID NO: 427144 - DNA, 30 bp, Artificial Sequence
  Synthetic oligonucleotide
gtaatcgtagaacgactagtattcgagatc

SEQ ID NO: 427145 - DNA, 30 bp, Artificial Sequence
  Synthetic oligonucleotide
tatcgtcgaagacggcccgagcaggagatc

SEQ ID NO: 427146 - DNA, 30 bp, Artificial Sequence
  Synthetic oligonucleotide
gtctgtccggagccgcgttaaaatgagatc

SEQ ID NO: 427147 - DNA, 30 bp, Artificial Sequence
  Synthetic oligonucleotide
ctcaaccttacgtgtgtaatcgatgagatc

SEQ ID NO: 427148 - DNA, 30 bp, Artificial Sequence
  Synthetic oligonucleotide
agtttattttaatcgtggtcataatagatc

SEQ ID NO: 427149 - DNA, 30 bp, Artificial Sequence
  Synthetic oligonucleotide
ccaattgtcggccgaaaccgactatagatc

SEQ ID NO: 427150 - DNA, 30 bp, Artificial Sequence
  Synthetic oligonucleotide
aatatgctttatcgttacgtaaggtagatc

SEQ ID NO: 427151 - DNA, 30 bp, Artificial Sequence
  Synthetic oligonucleotide
gcaacccgtcaactcgcaacaatgtagatc

SEQ ID NO: 427152 - DNA, 30 bp, Artificial Sequence
  Synthetic oligonucleotide
ggacgggcattgtctgtgcgtatttagatc

SEQ ID NO: 427153 - DNA, 30 bp, Artificial Sequence
  Synthetic oligonucleotide
tcctttgggctgttctaccggcgcacgatc

SEQ ID NO: 427154 - DNA, 30 bp, Artificial Sequence
  Synthetic oligonucleotide
accccgttcgggacataagtaacgacgatc

SEQ ID NO: 427155 - DNA, 30 bp, Artificial Sequence
  Synthetic oligonucleotide
tcaatacgtgttgtcctgcgctcgacgatc

SEQ ID NO: 427156 - DNA, 30 bp, Artificial Sequence
  Synthetic oligonucleotide
cattctgtcgacagtttacattggacgatc

SEQ ID NO: 427157 - DNA, 30 bp, Artificial Sequence
  Synthetic oligonucleotide
tttcattatgtaatttataacctgacgatc

SEQ ID NO: 427158 - DNA, 30 bp, Artificial Sequence
  Synthetic oligonucleotide
ccaaaaacagctctaaaggtggacccgatc

SEQ ID NO: 427159 - DNA, 30 bp, Artificial Sequence
  Synthetic oligonucleotide
gcctccaccaatgatacttgtcggccgatc

SEQ ID NO: 427160 - DNA, 30 bp, Artificial Sequence
  Synthetic oligonucleotide
gaggaagcgtatccacttaatgtgccgatc

SEQ ID NO: 427161 - DNA, 30 bp, Artificial Sequence
  Synthetic oligonucleotide
ttgtgctctttatagtacatgcatccgatc

SEQ ID NO: 427162 - DNA, 30 bp, Artificial Sequence
  Synthetic oligonucleotide
tggcagggagtgcggtcgaagcgagcgatc

SEQ ID NO: 427163 - DNA, 30 bp, Artificial Sequence
  Synthetic oligonucleotide
aatcttagcccatatctggtaatagcgatc

SEQ ID NO: 427164 - DNA, 30 bp, Artificial Sequence
  Synthetic oligonucleotide
gtacgcttcgctccgatcggaaacgcgatc

SEQ ID NO: 427165 - DNA, 30 bp, Artificial Sequence
  Synthetic oligonucleotide
ggtacgtacttgcgatcccataacgcgatc

SEQ ID NO: 427166 - DNA, 30 bp, Artificial Sequence
  Synthetic oligonucleotide
ctatttggtcactttgcatactcggcgatc

SEQ ID NO: 427167 - DNA, 30 bp, Artificial Sequence
  Synthetic oligonucleotide
ggtgctggtcctaggacggatatggcgatc

SEQ ID NO: 427168 - DNA, 30 bp, Artificial Sequence
  Synthetic oligonucleotide
tcaagtggaggctcttaacgccatgcgatc

SEQ ID NO: 427169 - DNA, 30 bp, Artificial Sequence
  Synthetic oligonucleotide
taggcgtcacacgctttatgtagtgcgatc

SEQ ID NO: 427170 - DNA, 30 bp, Artificial Sequence
  Synthetic oligonucleotide
aaataataatttacggtttattgtgcgatc

SEQ ID NO: 427171 - DNA, 30 bp, Artificial Sequence
  Synthetic oligonucleotide
accttttaacgctctggcgtcgaatcgatc

SEQ ID NO: 427172 - DNA, 30 bp, Artificial Sequence
  Synthetic oligonucleotide
cttaaattaaggtgtgaaaagttttcgatc

SEQ ID NO: 427173 - DNA, 30 bp, Artificial Sequence
  Synthetic oligonucleotide
ctttatctactctcacttattaaaaggatc

SEQ ID NO: 427174 - DNA, 30 bp, Artificial Sequence
  Synthetic oligonucleotide
gcgcatctgtcttcgcattaataaaggatc

SEQ ID NO: 427175 - DNA, 30 bp, Artificial Sequence
  Synthetic oligonucleotide
gtggtccagtttcatctattttaaaggatc

SEQ ID NO: 427176 - DNA, 30 bp, Artificial Sequence
  Synthetic oligonucleotide
cggccctggtattgtgttaggccaaggatc

SEQ ID NO: 427177 - DNA, 30 bp, Artificial Sequence
  Synthetic oligonucleotide
gtactgtggctacttgcgtagtccaggatc

SEQ ID NO: 427178 - DNA, 30 bp, Artificial Sequence
  Synthetic oligonucleotide
ctttatcggtatgaactttgattcaggatc

SEQ ID NO: 427179 - DNA, 30 bp, Artificial Sequence
  Synthetic oligonucleotide
gagctggacacttcaccgcggcggaggatc

SEQ ID NO: 427180 - DNA, 30 bp, Artificial Sequence
  Synthetic oligonucleotide
tggttggtatcgcagattccgcctaggatc

SEQ ID NO: 427181 - DNA, 30 bp, Artificial Sequence
  Synthetic oligonucleotide
ttaggtccaagaaccaacatgagtaggatc

SEQ ID NO: 427182 - DNA, 30 bp, Artificial Sequence
  Synthetic oligonucleotide
atctgattcctcagggaggtagttaggatc

SEQ ID NO: 427183 - DNA, 30 bp, Artificial Sequence
  Synthetic oligonucleotide
tgatctttagcccatctcaaataacggatc

SEQ ID NO: 427184 - DNA, 30 bp, Artificial Sequence
  Synthetic oligonucleotide
tccccgactcgaccaactcacacccggatc

SEQ ID NO: 427185 - DNA, 30 bp, Artificial Sequence
  Synthetic oligonucleotide
tctaggtaaaagccggatgggttccggatc

SEQ ID NO: 427186 - DNA, 30 bp, Artificial Sequence
  Synthetic oligonucleotide
tggcatcgagcatacagtcttgcgcggatc

SEQ ID NO: 427187 - DNA, 30 bp, Artificial Sequence
  Synthetic oligonucleotide
ctgactactcacgaagcgatttatcggatc

SEQ ID NO: 427188 - DNA, 30 bp, Artificial Sequence
  Synthetic oligonucleotide
aagacacccccttatatggatgaagggatc

SEQ ID NO: 427189 - DNA, 30 bp, Artificial Sequence
  Synthetic oligonucleotide
taaacacttaatgggaccccatgagggatc

SEQ ID NO: 427190 - DNA, 30 bp, Artificial Sequence
  Synthetic oligonucleotide
gtaaagtatctggtacgttacgacgggatc

SEQ ID NO: 427191 - DNA, 30 bp, Artificial Sequence
  Synthetic oligonucleotide
ttagcattcaagcttgcgtagacggggatc

SEQ ID NO: 427192 - DNA, 30 bp, Artificial Sequence
  Synthetic oligonucleotide
aaggaggattcaatcgggcccgtggggatc

SEQ ID NO: 427193 - DNA, 30 bp, Artificial Sequence
  Synthetic oligonucleotide
gggtctagtcctccaaatggtactgggatc

SEQ ID NO: 427194 - DNA, 30 bp, Artificial Sequence
  Synthetic oligonucleotide
gaggttcgcactggtgcctttcgtgggatc

SEQ ID NO: 427195 - DNA, 30 bp, Artificial Sequence
  Synthetic oligonucleotide
gagggggtcaggggcggttgcgaatggatc

SEQ ID NO: 427196 - DNA, 30 bp, Artificial Sequence
  Synthetic oligonucleotide
cctatatttcttttcgcgacccgatggatc

SEQ ID NO: 427197 - DNA, 30 bp, Artificial Sequence
  Synthetic oligonucleotide
aggccttataaaatgacctccatatggatc

SEQ ID NO: 427198 - DNA, 30 bp, Artificial Sequence
  Synthetic oligonucleotide
ccctgtaggtaaagaacttcggactggatc

SEQ ID NO: 427199 - DNA, 30 bp, Artificial Sequence
  Synthetic oligonucleotide
ctttgagtcaaattagagcagacctggatc

SEQ ID NO: 427200 - DNA, 30 bp, Artificial Sequence
  Synthetic oligonucleotide
cgtctatcaaaataatggcatttctggatc

SEQ ID NO: 427201 - DNA, 30 bp, Artificial Sequence
  Synthetic oligonucleotide
aatcttcttaagttcctcgataagtggatc

SEQ ID NO: 427202 - DNA, 30 bp, Artificial Sequence
  Synthetic oligonucleotide
ccacgacacgccttcgccgatacgtggatc

SEQ ID NO: 427203 - DNA, 30 bp, Artificial Sequence
  Synthetic oligonucleotide
tatatatgcgttaaatcatctagttggatc

SEQ ID NO: 427204 - DNA, 30 bp, Artificial Sequence
  Synthetic oligonucleotide
cggcaaggatatatatacccgggttggatc

SEQ ID NO: 427205 - DNA, 30 bp, Artificial Sequence
  Synthetic oligonucleotide
agcttccagaggtagatcgtgtaaatgatc

SEQ ID NO: 427206 - DNA, 30 bp, Artificial Sequence
  Synthetic oligonucleotide
ggtatttcggggaaatgctagacaatgatc

SEQ ID NO: 427207 - DNA, 30 bp, Artificial Sequence
  Synthetic oligonucleotide
aagaaactctactaggggggctgaatgatc

SEQ ID NO: 427208 - DNA, 30 bp, Artificial Sequence
  Synthetic oligonucleotide
atcgttgcgccctccactggagtaatgatc

SEQ ID NO: 427209 - DNA, 30 bp, Artificial Sequence
  Synthetic oligonucleotide
tgtactcgacgagcatgccgattaatgatc

SEQ ID NO: 427210 - DNA, 30 bp, Artificial Sequence
  Synthetic oligonucleotide
ttatagacggcagcccgagaacgcatgatc

SEQ ID NO: 427211 - DNA, 30 bp, Artificial Sequence
  Synthetic oligonucleotide
gctaaattaccgtttggtcttacgatgatc

SEQ ID NO: 427212 - DNA, 30 bp, Artificial Sequence
  Synthetic oligonucleotide
ctgcaattctggaaaaggggttggatgatc

SEQ ID NO: 427213 - DNA, 30 bp, Artificial Sequence
  Synthetic oligonucleotide
cacagagcaatctccatgcggctgatgatc

SEQ ID NO: 427214 - DNA, 30 bp, Artificial Sequence
  Synthetic oligonucleotide
tctattagaacatgggtggcattgatgatc

SEQ ID NO: 427215 - DNA, 29 bp, Artificial Sequence
  Synthetic oligonucleotide
tggacatctcgcacggccgagatatgatc

SEQ ID NO: 427216 - DNA, 30 bp, Artificial Sequence
  Synthetic oligonucleotide
agtattcgtacgcactgttactctatgatc

SEQ ID NO: 427217 - DNA, 30 bp, Artificial Sequence
  Synthetic oligonucleotide
acttatttccgtcgggtacgatgactgatc

SEQ ID NO: 427218 - DNA, 30 bp, Artificial Sequence
  Synthetic oligonucleotide
gtgtctcaaatctacgggatcatactgatc

SEQ ID NO: 427219 - DNA, 30 bp, Artificial Sequence
  Synthetic oligonucleotide
gggaggatattgacgtcattgcagctgatc

SEQ ID NO: 427220 - DNA, 30 bp, Artificial Sequence
  Synthetic oligonucleotide
tgtcccaatgctacaggcgtagcgctgatc

SEQ ID NO: 427221 - DNA, 30 bp, Artificial Sequence
  Synthetic oligonucleotide
cgtgtctagtgggtactcccccgtctgatc

SEQ ID NO: 427222 - DNA, 30 bp, Artificial Sequence
  Synthetic oligonucleotide
tctaaccgtctcagcgatagatgtctgatc

SEQ ID NO: 427223 - DNA, 30 bp, Artificial Sequence
  Synthetic oligonucleotide
cttctatcagaattggacgtcattctgatc

SEQ ID NO: 427224 - DNA, 30 bp, Artificial Sequence
  Synthetic oligonucleotide
acactaaaatttaatcgtgaagccgtgatc

SEQ ID NO: 427225 - DNA, 30 bp, Artificial Sequence
  Synthetic oligonucleotide
gacatgtacccctggattgtgacggtgatc

SEQ ID NO: 427226 - DNA, 30 bp, Artificial Sequence
  Synthetic oligonucleotide
ttgttaaaagccggtctgtacctggtgatc

SEQ ID NO: 427227 - DNA, 30 bp, Artificial Sequence
  Synthetic oligonucleotide
acattgttgttcgctgtcagattggtgatc

SEQ ID NO: 427228 - DNA, 30 bp, Artificial Sequence
  Synthetic oligonucleotide
aatccttcaaaatcaaagattagtgtgatc

SEQ ID NO: 427229 - DNA, 30 bp, Artificial Sequence
  Synthetic oligonucleotide
tcacctcgggcctaccagtgtcaattgatc

SEQ ID NO: 427230 - DNA, 30 bp, Artificial Sequence
  Synthetic oligonucleotide
gttccttgcacattcggttccggattgatc

SEQ ID NO: 427231 - DNA, 30 bp, Artificial Sequence
  Synthetic oligonucleotide
tttacgtgtcggaggtcagctatattgatc

SEQ ID NO: 427232 - DNA, 30 bp, Artificial Sequence
  Synthetic oligonucleotide
ttctgatgtgtatcgatcctgaagttgatc

SEQ ID NO: 427233 - DNA, 30 bp, Artificial Sequence
  Synthetic oligonucleotide
ggcatcgagagagcggactttaggttgatc

SEQ ID NO: 427234 - DNA, 30 bp, Artificial Sequence
  Synthetic oligonucleotide
agcgggacaaacatccctgagtctttgatc

SEQ ID NO: 427235 - DNA, 30 bp, Artificial Sequence
  Synthetic oligonucleotide
cgcagtaagggcggttatcgagaaaatatc

SEQ ID NO: 427236 - DNA, 30 bp, Artificial Sequence
  Synthetic oligonucleotide
gacgttgtgcgatcggtgcggctaaatatc

SEQ ID NO: 427237 - DNA, 30 bp, Artificial Sequence
  Synthetic oligonucleotide
tagataagtcgtagtccttggaggaatatc

SEQ ID NO: 427238 - DNA, 30 bp, Artificial Sequence
  Synthetic oligonucleotide
acccccaagtacgtccgggtccggaatatc

SEQ ID NO: 427239 - DNA, 30 bp, Artificial Sequence
  Synthetic oligonucleotide
aataggcgataccggtcgcatatgaatatc

SEQ ID NO: 427240 - DNA, 30 bp, Artificial Sequence
  Synthetic oligonucleotide
ggaatatatcccttgcacttagttaatatc

SEQ ID NO: 427241 - DNA, 30 bp, Artificial Sequence
  Synthetic oligonucleotide
ttcgcctccggcacttactagcaacatatc

SEQ ID NO: 427242 - DNA, 30 bp, Artificial Sequence
  Synthetic oligonucleotide
aagaatggcagggggtatatatcacatatc

SEQ ID NO: 427243 - DNA, 30 bp, Artificial Sequence
  Synthetic oligonucleotide
tttgttaattagtgtgtgtagtcacatatc

SEQ ID NO: 427244 - DNA, 30 bp, Artificial Sequence
  Synthetic oligonucleotide
ctgcgatataaactcatttaaagacatatc

SEQ ID NO: 427245 - DNA, 30 bp, Artificial Sequence
  Synthetic oligonucleotide
ttgttgtttttactcgatgattggcatatc

SEQ ID NO: 427246 - DNA, 30 bp, Artificial Sequence
  Synthetic oligonucleotide
ggccctacacggtatccacatttgcatatc

SEQ ID NO: 427247 - DNA, 30 bp, Artificial Sequence
  Synthetic oligonucleotide
tacgaattaatattccacaagactcatatc

SEQ ID NO: 427248 - DNA, 30 bp, Artificial Sequence
  Synthetic oligonucleotide
tgctaggtatgccgcgcacactgtcatatc

SEQ ID NO: 427249 - DNA, 30 bp, Artificial Sequence
  Synthetic oligonucleotide
atctgccatagctcatctgattaagatatc

SEQ ID NO: 427250 - DNA, 30 bp, Artificial Sequence
  Synthetic oligonucleotide
agtcgcggttaccctttgataccagatatc

SEQ ID NO: 427251 - DNA, 30 bp, Artificial Sequence
  Synthetic oligonucleotide
aggatgttcgcacgtatacagaccgatatc

SEQ ID NO: 427252 - DNA, 30 bp, Artificial Sequence
  Synthetic oligonucleotide
agggggtagccttccgaggccctggatatc

SEQ ID NO: 427253 - DNA, 30 bp, Artificial Sequence
  Synthetic oligonucleotide
aaatgggctccttttacctgtctggatatc

SEQ ID NO: 427254 - DNA, 30 bp, Artificial Sequence
  Synthetic oligonucleotide
cagcggagattctacggatccaatgatatc

SEQ ID NO: 427255 - DNA, 30 bp, Artificial Sequence
  Synthetic oligonucleotide
tcaggaaacctcaaggttcaagaatatatc

SEQ ID NO: 427256 - DNA, 30 bp, Artificial Sequence
  Synthetic oligonucleotide
gtggtcatggcaacgccatgcacatatatc

SEQ ID NO: 427257 - DNA, 30 bp, Artificial Sequence
  Synthetic oligonucleotide
acggagtttcgcgaggtaggcagatatatc

SEQ ID NO: 427258 - DNA, 30 bp, Artificial Sequence
  Synthetic oligonucleotide
gtgggacttttatagtcgttagactatatc

SEQ ID NO: 427259 - DNA, 30 bp, Artificial Sequence
  Synthetic oligonucleotide
gcagggccggggtcatgcgccccctatatc

SEQ ID NO: 427260 - DNA, 30 bp, Artificial Sequence
  Synthetic oligonucleotide
gatatagctacgggtatagaccgctatatc

SEQ ID NO: 427261 - DNA, 30 bp, Artificial Sequence
  Synthetic oligonucleotide
tgcttgcgacgcagtgtaccgctgtatatc

SEQ ID NO: 427262 - DNA, 29 bp, Artificial Sequence
  Synthetic oligonucleotide
tagcctgtaaatttaatagctcttatatc

SEQ ID NO: 427263 - DNA, 30 bp, Artificial Sequence
  Synthetic oligonucleotide
tcgacgttttatagccggtgcatttatatc

SEQ ID NO: 427264 - DNA, 30 bp, Artificial Sequence
  Synthetic oligonucleotide
caggggggggcaaccgatttataaactatc

SEQ ID NO: 427265 - DNA, 30 bp, Artificial Sequence
  Synthetic oligonucleotide
gtcaacagttttggccgaatttcaactatc

SEQ ID NO: 427266 - DNA, 30 bp, Artificial Sequence
  Synthetic oligonucleotide
acggtagacgtttctttggtagtaactatc

SEQ ID NO: 427267 - DNA, 30 bp, Artificial Sequence
  Synthetic oligonucleotide
tccgatagaggaatagtccattagactatc

SEQ ID NO: 427268 - DNA, 30 bp, Artificial Sequence
  Synthetic oligonucleotide
attgacgggagggcttccagaacgactatc

SEQ ID NO: 427269 - DNA, 30 bp, Artificial Sequence
  Synthetic oligonucleotide
ggatcttaccaaagtcggatgctgactatc

SEQ ID NO: 427270 - DNA, 30 bp, Artificial Sequence
  Synthetic oligonucleotide
ggggctcagaggccgcacccagaccctatc

SEQ ID NO: 427271 - DNA, 30 bp, Artificial Sequence
  Synthetic oligonucleotide
ctgccacttcgactcagtgcgctccctatc

SEQ ID NO: 427272 - DNA, 30 bp, Artificial Sequence
  Synthetic oligonucleotide
aaaccggttccatggattagacgtcctatc

SEQ ID NO: 427273 - DNA, 30 bp, Artificial Sequence
  Synthetic oligonucleotide
gtatggagtggctagattatacacgctatc

SEQ ID NO: 427274 - DNA, 30 bp, Artificial Sequence
  Synthetic oligonucleotide
agcgagcgacattttacaacgcacgctatc

SEQ ID NO: 427275 - DNA, 30 bp, Artificial Sequence
  Synthetic oligonucleotide
agagtgatggatcgcttcgaacgcgctatc

SEQ ID NO: 427276 - DNA, 30 bp, Artificial Sequence
  Synthetic oligonucleotide
cacgccgctgagccaccagcgctggctatc

SEQ ID NO: 427277 - DNA, 30 bp, Artificial Sequence
  Synthetic oligonucleotide
ttatcaaagtggaaaagcacacgatctatc

SEQ ID NO: 427278 - DNA, 30 bp, Artificial Sequence
  Synthetic oligonucleotide
ttagaaatcatccgcccaaaaatatctatc

SEQ ID NO: 427279 - DNA, 30 bp, Artificial Sequence
  Synthetic oligonucleotide
aaaagcctaccgccttaggacgactctatc

SEQ ID NO: 427280 - DNA, 30 bp, Artificial Sequence
  Synthetic oligonucleotide
gtgcgtcagcaatttgttttattgtctatc

SEQ ID NO: 427281 - DNA, 30 bp, Artificial Sequence
  Synthetic oligonucleotide
atgacttatgtctcaatcgacaattctatc

SEQ ID NO: 427282 - DNA, 30 bp, Artificial Sequence
  Synthetic oligonucleotide
ataaggtaccgcctgcggtattcttctatc

SEQ ID NO: 427283 - DNA, 30 bp, Artificial Sequence
  Synthetic oligonucleotide
agctatatccttcagcgcaagcaaagtatc

SEQ ID NO: 427284 - DNA, 30 bp, Artificial Sequence
  Synthetic oligonucleotide
attcgactccaggaaaggcaataaagtatc

SEQ ID NO: 427285 - DNA, 30 bp, Artificial Sequence
  Synthetic oligonucleotide
ctgacaagggcactcggggacgcaagtatc

SEQ ID NO: 427286 - DNA, 30 bp, Artificial Sequence
  Synthetic oligonucleotide
cagcaggctgacgctgaaaggggaagtatc

SEQ ID NO: 427287 - DNA, 30 bp, Artificial Sequence
  Synthetic oligonucleotide
ttgtatgcgccatcatcgccagacagtatc

SEQ ID NO: 427288 - DNA, 30 bp, Artificial Sequence
  Synthetic oligonucleotide
aatatattgcagcagtcgctacgtagtatc

SEQ ID NO: 427289 - DNA, 30 bp, Artificial Sequence
  Synthetic oligonucleotide
ggccagtgggggggatgaggttttagtatc

SEQ ID NO: 427290 - DNA, 30 bp, Artificial Sequence
  Synthetic oligonucleotide
ttgttgagattcatcgcattggtacgtatc

SEQ ID NO: 427291 - DNA, 30 bp, Artificial Sequence
  Synthetic oligonucleotide
cactgcaatgagggtcgtgcgtcccgtatc

SEQ ID NO: 427292 - DNA, 30 bp, Artificial Sequence
  Synthetic oligonucleotide
gcgcttcctgcactaaccgggcgccgtatc

SEQ ID NO: 427293 - DNA, 30 bp, Artificial Sequence
  Synthetic oligonucleotide
ctttcaatttgctaggtacgatgtcgtatc

SEQ ID NO: 427294 - DNA, 30 bp, Artificial Sequence
  Synthetic oligonucleotide
ggcaaagtaaggcactatgcccaaggtatc

SEQ ID NO: 427295 - DNA, 30 bp, Artificial Sequence
  Synthetic oligonucleotide
ggcaactgactatgcgcactcgccggtatc

SEQ ID NO: 427296 - DNA, 30 bp, Artificial Sequence
  Synthetic oligonucleotide
tgcgaagatgaaattacagggcgcggtatc

SEQ ID NO: 427297 - DNA, 30 bp, Artificial Sequence
  Synthetic oligonucleotide
ggaagctctgcagcttatctagcgggtatc

SEQ ID NO: 427298 - DNA, 30 bp, Artificial Sequence
  Synthetic oligonucleotide
tgggttatagggtctacggggtatggtatc

SEQ ID NO: 427299 - DNA, 30 bp, Artificial Sequence
  Synthetic oligonucleotide
accgtgtcatgttacggtaaatctggtatc

SEQ ID NO: 427300 - DNA, 30 bp, Artificial Sequence
  Synthetic oligonucleotide
ggacctagtcgtacagaagaccttggtatc

SEQ ID NO: 427301 - DNA, 30 bp, Artificial Sequence
  Synthetic oligonucleotide
tcagggctcatctggcttccggttggtatc

SEQ ID NO: 427302 - DNA, 30 bp, Artificial Sequence
  Synthetic oligonucleotide
tccgtttaagatctgaatagcgaatgtatc

SEQ ID NO: 427303 - DNA, 30 bp, Artificial Sequence
  Synthetic oligonucleotide
atagagggggacaccactggatgatgtatc

SEQ ID NO: 427304 - DNA, 30 bp, Artificial Sequence
  Synthetic oligonucleotide
aattgatcctgagcagccactttatgtatc

SEQ ID NO: 427305 - DNA, 30 bp, Artificial Sequence
  Synthetic oligonucleotide
ctacagtaaattgtgtcacttgcctgtatc

SEQ ID NO: 427306 - DNA, 30 bp, Artificial Sequence
  Synthetic oligonucleotide
caaaatactgtaacaagcttgtcctgtatc

SEQ ID NO: 427307 - DNA, 30 bp, Artificial Sequence
  Synthetic oligonucleotide
ttaggaaggtctggaattgactcgtgtatc

SEQ ID NO: 427308 - DNA, 30 bp, Artificial Sequence
  Synthetic oligonucleotide
gaattgcgtccgttcggttgaatgtgtatc

SEQ ID NO: 427309 - DNA, 30 bp, Artificial Sequence
  Synthetic oligonucleotide
attattgtgtggaggccaacttattgtatc

SEQ ID NO: 427310 - DNA, 30 bp, Artificial Sequence
  Synthetic oligonucleotide
tatagctgaaccgttgccggaatgattatc

SEQ ID NO: 427311 - DNA, 30 bp, Artificial Sequence
  Synthetic oligonucleotide
tcggaatgaccgtgcgatatgaatattatc

SEQ ID NO: 427312 - DNA, 30 bp, Artificial Sequence
  Synthetic oligonucleotide
gaatgtgaacatggttaaagtactattatc

SEQ ID NO: 427313 - DNA, 30 bp, Artificial Sequence
  Synthetic oligonucleotide
gtcaaagattaggttgaccgtcgtattatc

SEQ ID NO: 427314 - DNA, 30 bp, Artificial Sequence
  Synthetic oligonucleotide
gtgtcccggaccaaatctccgcttattatc

SEQ ID NO: 427315 - DNA, 30 bp, Artificial Sequence
  Synthetic oligonucleotide
ctagatggaaaaagtaagtaatttattatc

SEQ ID NO: 427316 - DNA, 30 bp, Artificial Sequence
  Synthetic oligonucleotide
atctacccgcgatctttcaacaaccttatc

SEQ ID NO: 427317 - DNA, 30 bp, Artificial Sequence
  Synthetic oligonucleotide
ttgcggtaaggctgactgctgaaccttatc

SEQ ID NO: 427318 - DNA, 30 bp, Artificial Sequence
  Synthetic oligonucleotide
cagtgtctgttccaaagactagcgcttatc

SEQ ID NO: 427319 - DNA, 30 bp, Artificial Sequence
  Synthetic oligonucleotide
acatcccctaccaacccaacgtgtcttatc

SEQ ID NO: 427320 - DNA, 30 bp, Artificial Sequence
  Synthetic oligonucleotide
atgagcttcagcgaaatgatatttcttatc

SEQ ID NO: 427321 - DNA, 30 bp, Artificial Sequence
  Synthetic oligonucleotide
tgggaatacgttagcaaatgatgagttatc

SEQ ID NO: 427322 - DNA, 30 bp, Artificial Sequence
  Synthetic oligonucleotide
gatcttcaatgtgtgtgcccattagttatc

SEQ ID NO: 427323 - DNA, 30 bp, Artificial Sequence
  Synthetic oligonucleotide
agttcaaactcatatgggtagaccgttatc

SEQ ID NO: 427324 - DNA, 30 bp, Artificial Sequence
  Synthetic oligonucleotide
ggtatccgtgtactaagctgcagcgttatc

SEQ ID NO: 427325 - DNA, 30 bp, Artificial Sequence
  Synthetic oligonucleotide
tcactaccttgacgaggagtgttcgttatc

SEQ ID NO: 427326 - DNA, 30 bp, Artificial Sequence
  Synthetic oligonucleotide
tgtcgttgacgtttctaggtggaggttatc

SEQ ID NO: 427327 - DNA, 30 bp, Artificial Sequence
  Synthetic oligonucleotide
gaacagtgcgttcgaacgagttctgttatc

SEQ ID NO: 427328 - DNA, 30 bp, Artificial Sequence
  Synthetic oligonucleotide
tttttccgtctacatgcgattcgtgttatc

SEQ ID NO: 427329 - DNA, 31 bp, Artificial Sequence
  Synthetic oligonucleotide
tagacggctcggttgcgaaattcgctttatc

SEQ ID NO: 427330 - DNA, 30 bp, Artificial Sequence
  Synthetic oligonucleotide
aggtattcaaggatatccttgggctttatc

SEQ ID NO: 427331 - DNA, 30 bp, Artificial Sequence
  Synthetic oligonucleotide
ccgttttgtcgtgaaccgacgctctttatc

SEQ ID NO: 427332 - DNA, 30 bp, Artificial Sequence
  Synthetic oligonucleotide
tttattctgccattctcgataacgtttatc

SEQ ID NO: 427333 - DNA, 30 bp, Artificial Sequence
  Synthetic oligonucleotide
attaggagagcagggtcagataggtttatc

SEQ ID NO: 427334 - DNA, 30 bp, Artificial Sequence
  Synthetic oligonucleotide
gaaatagttacggaaagaaattggtttatc

SEQ ID NO: 427335 - DNA, 30 bp, Artificial Sequence
  Synthetic oligonucleotide
tacttagcgagtcccaaccgagattttatc

SEQ ID NO: 427336 - DNA, 30 bp, Artificial Sequence
  Synthetic oligonucleotide
cgccctacggtaacagcgctgcaaaaactc

SEQ ID NO: 427337 - DNA, 30 bp, Artificial Sequence
  Synthetic oligonucleotide
ctttagttatcaaactggttggcaaaactc

SEQ ID NO: 427338 - DNA, 30 bp, Artificial Sequence
  Synthetic oligonucleotide
tgggtaccctgataaccccactgcaaactc

SEQ ID NO: 427339 - DNA, 30 bp, Artificial Sequence
  Synthetic oligonucleotide
gtattgcagcgagactacttagcgaaactc

SEQ ID NO: 427340 - DNA, 30 bp, Artificial Sequence
  Synthetic oligonucleotide
ccaaggtgatctttgagaactactaaactc

SEQ ID NO: 427341 - DNA, 30 bp, Artificial Sequence
  Synthetic oligonucleotide
gttatggcctacccctctatcggtaaactc

SEQ ID NO: 427342 - DNA, 30 bp, Artificial Sequence
  Synthetic oligonucleotide
tgggtttcgagccgcgtatttgtacaactc

SEQ ID NO: 427343 - DNA, 30 bp, Artificial Sequence
  Synthetic oligonucleotide
gctatcctacggtcataggcgacccaactc

SEQ ID NO: 427344 - DNA, 30 bp, Artificial Sequence
  Synthetic oligonucleotide
gttaaataggccacctggccgtgccaactc

SEQ ID NO: 427345 - DNA, 30 bp, Artificial Sequence
  Synthetic oligonucleotide
gcagagtgcttgttgagcgcggtccaactc

SEQ ID NO: 427346 - DNA, 30 bp, Artificial Sequence
  Synthetic oligonucleotide
gtatgggaccggcttgtatggaagcaactc

SEQ ID NO: 427347 - DNA, 30 bp, Artificial Sequence
  Synthetic oligonucleotide
aaagttaaggcaatatagtagcagcaactc

SEQ ID NO: 427348 - DNA, 30 bp, Artificial Sequence
  Synthetic oligonucleotide
gttaaactcatcgcacaataagtgcaactc

SEQ ID NO: 427349 - DNA, 30 bp, Artificial Sequence
  Synthetic oligonucleotide
aacgacttggatatttccacccctcaactc

SEQ ID NO: 427350 - DNA, 30 bp, Artificial Sequence
  Synthetic oligonucleotide
accggtgcatgaatagagtcccctcaactc

SEQ ID NO: 427351 - DNA, 30 bp, Artificial Sequence
  Synthetic oligonucleotide
ggcctggcttaagtcggcctgatagaactc

SEQ ID NO: 427352 - DNA, 30 bp, Artificial Sequence
  Synthetic oligonucleotide
ttccatttactagctatattgctagaactc

SEQ ID NO: 427353 - DNA, 30 bp, Artificial Sequence
  Synthetic oligonucleotide
ggaagagccggtaggggggtagaggaactc

SEQ ID NO: 427354 - DNA, 30 bp, Artificial Sequence
  Synthetic oligonucleotide
actcgtgctttgaagttatcggtggaactc

SEQ ID NO: 427355 - DNA, 30 bp, Artificial Sequence
  Synthetic oligonucleotide
tcacggtgtaaacctgtatgatgtgaactc

SEQ ID NO: 427356 - DNA, 30 bp, Artificial Sequence
  Synthetic oligonucleotide
aatgtctcacccttggctcatgaataactc

SEQ ID NO: 427357 - DNA, 30 bp, Artificial Sequence
  Synthetic oligonucleotide
agtgtttctgagtatagcgtctcataactc

SEQ ID NO: 427358 - DNA, 30 bp, Artificial Sequence
  Synthetic oligonucleotide
caggagctttacattctattatcctaactc

SEQ ID NO: 427359 - DNA, 30 bp, Artificial Sequence
  Synthetic oligonucleotide
gttatgctaagaaaaaggctttggtaactc

SEQ ID NO: 427360 - DNA, 30 bp, Artificial Sequence
  Synthetic oligonucleotide
attttcctattacaggtctagggttaactc

SEQ ID NO: 427361 - DNA, 30 bp, Artificial Sequence
  Synthetic oligonucleotide
acgtacggttatcggagttaaatttaactc

SEQ ID NO: 427362 - DNA, 30 bp, Artificial Sequence
  Synthetic oligonucleotide
tgatataagcagagcggttaatccacactc

SEQ ID NO: 427363 - DNA, 30 bp, Artificial Sequence
  Synthetic oligonucleotide
gttagtatttagaaggccgtcaagacactc

SEQ ID NO: 427364 - DNA, 30 bp, Artificial Sequence
  Synthetic oligonucleotide
aaacgaaagatatgatatctatatacactc

SEQ ID NO: 427365 - DNA, 30 bp, Artificial Sequence
  Synthetic oligonucleotide
gacagtcatgaggtaatccgtcctacactc

SEQ ID NO: 427366 - DNA, 30 bp, Artificial Sequence
  Synthetic oligonucleotide
gtcgtccttgatgtggattactcaccactc

SEQ ID NO: 427367 - DNA, 30 bp, Artificial Sequence
  Synthetic oligonucleotide
atgttgatctgattgtgccactccccactc

SEQ ID NO: 427368 - DNA, 30 bp, Artificial Sequence
  Synthetic oligonucleotide
aaatattggtgttctgggtctaagccactc

SEQ ID NO: 427369 - DNA, 30 bp, Artificial Sequence
  Synthetic oligonucleotide
ttatcgccaaacgggctcgcaactccactc

SEQ ID NO: 427370 - DNA, 30 bp, Artificial Sequence
  Synthetic oligonucleotide
agaaggacgcgagagctccatagagcactc

SEQ ID NO: 427371 - DNA, 30 bp, Artificial Sequence
  Synthetic oligonucleotide
agagttaacatggtcgcttgtggagcactc

SEQ ID NO: 427372 - DNA, 30 bp, Artificial Sequence
  Synthetic oligonucleotide
ggcttaaattagagttcagttggagcactc

SEQ ID NO: 427373 - DNA, 30 bp, Artificial Sequence
  Synthetic oligonucleotide
aatttcgttcgggcatgtttagtagcactc

SEQ ID NO: 427374 - DNA, 30 bp, Artificial Sequence
  Synthetic oligonucleotide
accatcgggaactgtatcgtcgccgcactc

SEQ ID NO: 427375 - DNA, 30 bp, Artificial Sequence
  Synthetic oligonucleotide
ttatttaagtgtcgtatgaattgcgcactc

SEQ ID NO: 427376 - DNA, 30 bp, Artificial Sequence
  Synthetic oligonucleotide
caacttgctagttaggggactctcgcactc

SEQ ID NO: 427377 - DNA, 30 bp, Artificial Sequence
  Synthetic oligonucleotide
tattggaaagcgtgttagcgacgggcactc

SEQ ID NO: 427378 - DNA, 30 bp, Artificial Sequence
  Synthetic oligonucleotide
ctgtccataatgggatgacaggtatcactc

SEQ ID NO: 427379 - DNA, 30 bp, Artificial Sequence
  Synthetic oligonucleotide
aaccggtacatatcatttcctggctcactc

SEQ ID NO: 427380 - DNA, 30 bp, Artificial Sequence
  Synthetic oligonucleotide
cccgtcgacagggggtcccggtagtcactc

SEQ ID NO: 427381 - DNA, 30 bp, Artificial Sequence
  Synthetic oligonucleotide
ggacgccgacctaatatcgcttgttcactc

SEQ ID NO: 427382 - DNA, 30 bp, Artificial Sequence
  Synthetic oligonucleotide
gtcagggagcaacaatttgatcagagactc

SEQ ID NO: 427383 - DNA, 30 bp, Artificial Sequence
  Synthetic oligonucleotide
cagccccgacgattccccgttacgagactc

SEQ ID NO: 427384 - DNA, 30 bp, Artificial Sequence
  Synthetic oligonucleotide
aaatagcttagaacacagcatgggagactc

SEQ ID NO: 427385 - DNA, 30 bp, Artificial Sequence
  Synthetic oligonucleotide
tgctgttaaagaacttatgccgtgagactc

SEQ ID NO: 427386 - DNA, 30 bp, Artificial Sequence
  Synthetic oligonucleotide
atgtatgcaggagtgtacaagagtagactc

SEQ ID NO: 427387 - DNA, 30 bp, Artificial Sequence
  Synthetic oligonucleotide
atgtcccagacgatctcggttttacgactc

SEQ ID NO: 427388 - DNA, 30 bp, Artificial Sequence
  Synthetic oligonucleotide
gaacctcaagtcgacggaggaaaccgactc

SEQ ID NO: 427389 - DNA, 30 bp, Artificial Sequence
  Synthetic oligonucleotide
atgtagaaagcatgggtttcctatcgactc

SEQ ID NO: 427390 - DNA, 30 bp, Artificial Sequence
  Synthetic oligonucleotide
tggagtagacattttgcgtttattcgactc

SEQ ID NO: 427391 - DNA, 30 bp, Artificial Sequence
  Synthetic oligonucleotide
tatgtaatgacctcttggcccatgggactc

SEQ ID NO: 427392 - DNA, 30 bp, Artificial Sequence
  Synthetic oligonucleotide
gtataggggccaagaggcacacgtggactc

SEQ ID NO: 427393 - DNA, 30 bp, Artificial Sequence
  Synthetic oligonucleotide
caggggctcagcattcgctatcactgactc

SEQ ID NO: 427394 - DNA, 30 bp, Artificial Sequence
  Synthetic oligonucleotide
gggagcaggtgcaccagtctgttgtgactc

SEQ ID NO: 427395 - DNA, 30 bp, Artificial Sequence
  Synthetic oligonucleotide
gcccgtttctacaaaatatggtaaatactc

SEQ ID NO: 427396 - DNA, 30 bp, Artificial Sequence
  Synthetic oligonucleotide
cggatacttaggcgttcggggtcaatactc

SEQ ID NO: 427397 - DNA, 30 bp, Artificial Sequence
  Synthetic oligonucleotide
gatcttaccaaggaccttaatataatactc

SEQ ID NO: 427398 - DNA, 30 bp, Artificial Sequence
  Synthetic oligonucleotide
ttaaactaattaatcacagcactaatactc

SEQ ID NO: 427399 - DNA, 30 bp, Artificial Sequence
  Synthetic oligonucleotide
atatgtacgttcgggtgggaccacatactc

SEQ ID NO: 427400 - DNA, 30 bp, Artificial Sequence
  Synthetic oligonucleotide
cgctggcggtctctcagtcatatactactc

SEQ ID NO: 427401 - DNA, 30 bp, Artificial Sequence
  Synthetic oligonucleotide
cgttataagtcctccgacaacctcctactc

SEQ ID NO: 427402 - DNA, 30 bp, Artificial Sequence
  Synthetic oligonucleotide
ggacttgagataggcggcgtcgagctactc

SEQ ID NO: 427403 - DNA, 30 bp, Artificial Sequence
  Synthetic oligonucleotide
gtttatggcaacaggtggcaagggctactc

SEQ ID NO: 427404 - DNA, 30 bp, Artificial Sequence
  Synthetic oligonucleotide
ttgttttaacgccttggtatttggctactc

SEQ ID NO: 427405 - DNA, 30 bp, Artificial Sequence
  Synthetic oligonucleotide
ccgctaacctatctgggataacaagtactc

SEQ ID NO: 427406 - DNA, 30 bp, Artificial Sequence
  Synthetic oligonucleotide
cacccggcgctagtataataccaagtactc

SEQ ID NO: 427407 - DNA, 30 bp, Artificial Sequence
  Synthetic oligonucleotide
aaagaattattttaagagagttaagtactc

SEQ ID NO: 427408 - DNA, 30 bp, Artificial Sequence
  Synthetic oligonucleotide
agatacagatgtatagcgatcccagtactc

SEQ ID NO: 427409 - DNA, 30 bp, Artificial Sequence
  Synthetic oligonucleotide
ggttttgaaagtatgacgtaggtagtactc

SEQ ID NO: 427410 - DNA, 30 bp, Artificial Sequence
  Synthetic oligonucleotide
ccggtgtctcgcctcatacaaggcgtactc

SEQ ID NO: 427411 - DNA, 30 bp, Artificial Sequence
  Synthetic oligonucleotide
gacgtaccctcaacgttaagcatcgtactc

SEQ ID NO: 427412 - DNA, 31 bp, Artificial Sequence
  Synthetic oligonucleotide
tcgattccaggcagaagtggtacttgtactc

SEQ ID NO: 427413 - DNA, 30 bp, Artificial Sequence
  Synthetic oligonucleotide
agtcgacacttatagctatttatattactc

SEQ ID NO: 427414 - DNA, 30 bp, Artificial Sequence
  Synthetic oligonucleotide
atgattacgttggggtacttaaacttactc

SEQ ID NO: 427415 - DNA, 30 bp, Artificial Sequence
  Synthetic oligonucleotide
aatgaagccaggttggccagtcgcttactc

SEQ ID NO: 427416 - DNA, 30 bp, Artificial Sequence
  Synthetic oligonucleotide
acctctttcatttagttaggctgcttactc

SEQ ID NO: 427417 - DNA, 30 bp, Artificial Sequence
  Synthetic oligonucleotide
ttgtaagttaatttagcgaatgagttactc

SEQ ID NO: 427418 - DNA, 30 bp, Artificial Sequence
  Synthetic oligonucleotide
ttcggttctaccaaagaggacacgttactc

SEQ ID NO: 427419 - DNA, 30 bp, Artificial Sequence
  Synthetic oligonucleotide
aatcgtggacataatatttcatgtttactc

SEQ ID NO: 427420 - DNA, 30 bp, Artificial Sequence
  Synthetic oligonucleotide
ccagtccctaggggtggacattgtttactc

SEQ ID NO: 427421 - DNA, 30 bp, Artificial Sequence
  Synthetic oligonucleotide
tcctggacagacgcgcaaacttgtttactc

SEQ ID NO: 427422 - DNA, 30 bp, Artificial Sequence
  Synthetic oligonucleotide
gagtacgaccccacccgtaccgcacacctc

SEQ ID NO: 427423 - DNA, 30 bp, Artificial Sequence
  Synthetic oligonucleotide
aattccgcggtaatctgcccaggccacctc

SEQ ID NO: 427424 - DNA, 30 bp, Artificial Sequence
  Synthetic oligonucleotide
tgtcatgtgatatttttatatttgcacctc

SEQ ID NO: 427425 - DNA, 30 bp, Artificial Sequence
  Synthetic oligonucleotide
ccaaacgtaacacttcacgcccttcacctc

SEQ ID NO: 427426 - DNA, 30 bp, Artificial Sequence
  Synthetic oligonucleotide
gactagtagaactaacctgtccttcacctc

SEQ ID NO: 427427 - DNA, 30 bp, Artificial Sequence
  Synthetic oligonucleotide
tcgtacctaaaggccagttaatcagacctc

SEQ ID NO: 427428 - DNA, 30 bp, Artificial Sequence
  Synthetic oligonucleotide
tctctctgtcctactagaacaatcgacctc

SEQ ID NO: 427429 - DNA, 30 bp, Artificial Sequence
  Synthetic oligonucleotide
tccccataacttcttcttatgctcgacctc

SEQ ID NO: 427430 - DNA, 30 bp, Artificial Sequence
  Synthetic oligonucleotide
ggcaacaaactgtaacatgcacgggacctc

SEQ ID NO: 427431 - DNA, 30 bp, Artificial Sequence
  Synthetic oligonucleotide
cgtttatgatcacggggtttatctgacctc

SEQ ID NO: 427432 - DNA, 30 bp, Artificial Sequence
  Synthetic oligonucleotide
gtaggtataatacaatctaggtgtgacctc

SEQ ID NO: 427433 - DNA, 31 bp, Artificial Sequence
  Synthetic oligonucleotide
gaataataatctaccagcatcgtaatacctc

SEQ ID NO: 427434 - DNA, 30 bp, Artificial Sequence
  Synthetic oligonucleotide
ggtgtaccggggacgagaaggacatacctc

SEQ ID NO: 427435 - DNA, 30 bp, Artificial Sequence
  Synthetic oligonucleotide
ttgaccctgcgcaagtgtggaccatacctc

SEQ ID NO: 427436 - DNA, 30 bp, Artificial Sequence
  Synthetic oligonucleotide
aaaatactgtcccggccgacctgctacctc

SEQ ID NO: 427437 - DNA, 30 bp, Artificial Sequence
  Synthetic oligonucleotide
atttctatttcaaccgggttaacgtacctc

SEQ ID NO: 427438 - DNA, 30 bp, Artificial Sequence
  Synthetic oligonucleotide
atggtggtacacacgtgcaagccgtacctc

SEQ ID NO: 427439 - DNA, 30 bp, Artificial Sequence
  Synthetic oligonucleotide
tctatatgttatcggacctacgtgtacctc

SEQ ID NO: 427440 - DNA, 30 bp, Artificial Sequence
  Synthetic oligonucleotide
aactagattcggtcttcaagacattacctc

SEQ ID NO: 427441 - DNA, 30 bp, Artificial Sequence
  Synthetic oligonucleotide
gtaccggggaacgccgtttttgattacctc

SEQ ID NO: 427442 - DNA, 30 bp, Artificial Sequence
  Synthetic oligonucleotide
tcctgcggcagaaatgcgtaagacaccctc

SEQ ID NO: 427443 - DNA, 30 bp, Artificial Sequence
  Synthetic oligonucleotide
taggaaagcatagagagtttcggcaccctc

SEQ ID NO: 427444 - DNA, 30 bp, Artificial Sequence
  Synthetic oligonucleotide
ggaataccggcctcgtttggtatcaccctc

SEQ ID NO: 427445 - DNA, 30 bp, Artificial Sequence
  Synthetic oligonucleotide
gcttgaagagaccactctgctgagaccctc

SEQ ID NO: 427446 - DNA, 30 bp, Artificial Sequence
  Synthetic oligonucleotide
cccatcgtagggcgccagaataggaccctc

SEQ ID NO: 427447 - DNA, 30 bp, Artificial Sequence
  Synthetic oligonucleotide
gagtctggtaggctacctgtccggaccctc

SEQ ID NO: 427448 - DNA, 30 bp, Artificial Sequence
  Synthetic oligonucleotide
agcgttttaattcgcggccgggggaccctc

SEQ ID NO: 427449 - DNA, 30 bp, Artificial Sequence
  Synthetic oligonucleotide
agacgtaatagggtgcgtaagattaccctc

SEQ ID NO: 427450 - DNA, 30 bp, Artificial Sequence
  Synthetic oligonucleotide
cacgcggtcttgtgctacccccaccccctc

SEQ ID NO: 427451 - DNA, 31 bp, Artificial Sequence
  Synthetic oligonucleotide
tattactacgggcggacactaaaggcccctc

SEQ ID NO: 427452 - DNA, 30 bp, Artificial Sequence
  Synthetic oligonucleotide
cggtattgaatagtcttaagtctgcccctc

SEQ ID NO: 427453 - DNA, 30 bp, Artificial Sequence
  Synthetic oligonucleotide
taacttaccccggaagactctattcccctc

SEQ ID NO: 427454 - DNA, 30 bp, Artificial Sequence
  Synthetic oligonucleotide
caccccccggatctatcccaggttcccctc

SEQ ID NO: 427455 - DNA, 30 bp, Artificial Sequence
  Synthetic oligonucleotide
tgccacgttcggcacgccctgaaggccctc

SEQ ID NO: 427456 - DNA, 30 bp, Artificial Sequence
  Synthetic oligonucleotide
gcccgaacccgtccgatacaatgtgccctc

SEQ ID NO: 427457 - DNA, 30 bp, Artificial Sequence
  Synthetic oligonucleotide
gtgctggacggtattggattacaatccctc

SEQ ID NO: 427458 - DNA, 30 bp, Artificial Sequence
  Synthetic oligonucleotide
gccatatgttagtgtcagatttaatccctc

SEQ ID NO: 427459 - DNA, 30 bp, Artificial Sequence
  Synthetic oligonucleotide
agcgtgcaattacgtgtcctgatatccctc

SEQ ID NO: 427460 - DNA, 30 bp, Artificial Sequence
  Synthetic oligonucleotide
agtttaagtacggcttctagaaggtccctc

SEQ ID NO: 427461 - DNA, 30 bp, Artificial Sequence
  Synthetic oligonucleotide
gaccgagtttcctgggttgcgtaaagcctc

SEQ ID NO: 427462 - DNA, 30 bp, Artificial Sequence
  Synthetic oligonucleotide
ctcaagtgccagcggcagcgcccaagcctc

SEQ ID NO: 427463 - DNA, 30 bp, Artificial Sequence
  Synthetic oligonucleotide
ccgcagtcctgcgactcacagcgcagcctc

SEQ ID NO: 427464 - DNA, 30 bp, Artificial Sequence
  Synthetic oligonucleotide
gtcgccgaaccaataagttggggcagcctc

SEQ ID NO: 427465 - DNA, 30 bp, Artificial Sequence
  Synthetic oligonucleotide
tggtcagttcttccgaataccagtagcctc

SEQ ID NO: 427466 - DNA, 30 bp, Artificial Sequence
  Synthetic oligonucleotide
ggacgctggcaagcgcgcggtcgtagcctc

SEQ ID NO: 427467 - DNA, 30 bp, Artificial Sequence
  Synthetic oligonucleotide
gggccccagacgtatgcgcctaaaggcctc

SEQ ID NO: 427468 - DNA, 30 bp, Artificial Sequence
  Synthetic oligonucleotide
tcaagagtaacatatatacgctgtggcctc

SEQ ID NO: 427469 - DNA, 30 bp, Artificial Sequence
  Synthetic oligonucleotide
tcattggacggcagggcagaaggatgcctc

SEQ ID NO: 427470 - DNA, 30 bp, Artificial Sequence
  Synthetic oligonucleotide
aagaacaacggttttccgtacggatgcctc

SEQ ID NO: 427471 - DNA, 30 bp, Artificial Sequence
  Synthetic oligonucleotide
agatatccgctagggtgcctgggatgcctc

SEQ ID NO: 427472 - DNA, 30 bp, Artificial Sequence
  Synthetic oligonucleotide
gaacgccaaccggcggcggtgtgatgcctc

SEQ ID NO: 427473 - DNA, 30 bp, Artificial Sequence
  Synthetic oligonucleotide
ttttgacccttagtcaacagggtatgcctc

SEQ ID NO: 427474 - DNA, 30 bp, Artificial Sequence
  Synthetic oligonucleotide
atctttatgtgtcggagttctaagtgcctc

SEQ ID NO: 427475 - DNA, 30 bp, Artificial Sequence
  Synthetic oligonucleotide
caggggagtgtcaccccacttccgtgcctc

SEQ ID NO: 427476 - DNA, 30 bp, Artificial Sequence
  Synthetic oligonucleotide
tatcatcttggttaggatggccggtgcctc

SEQ ID NO: 427477 - DNA, 30 bp, Artificial Sequence
  Synthetic oligonucleotide
gttctccctctcgaggtagcggtgtgcctc

SEQ ID NO: 427478 - DNA, 30 bp, Artificial Sequence
  Synthetic oligonucleotide
gacgagctaccacgggtcccgtaaatcctc

SEQ ID NO: 427479 - DNA, 30 bp, Artificial Sequence
  Synthetic oligonucleotide
tgggcgccaggacttgataggcgaatcctc

SEQ ID NO: 427480 - DNA, 30 bp, Artificial Sequence
  Synthetic oligonucleotide
atctcatcactaaacgcaaatataatcctc

SEQ ID NO: 427481 - DNA, 30 bp, Artificial Sequence
  Synthetic oligonucleotide
agtaagtttgtcattttcagtttcatcctc

SEQ ID NO: 427482 - DNA, 30 bp, Artificial Sequence
  Synthetic oligonucleotide
ccggcagtcttttataaaacaaagatcctc

SEQ ID NO: 427483 - DNA, 30 bp, Artificial Sequence
  Synthetic oligonucleotide
aaatatagctggactaggatttctatcctc

SEQ ID NO: 427484 - DNA, 30 bp, Artificial Sequence
  Synthetic oligonucleotide
caccgagtgaactacccatgatttatcctc

SEQ ID NO: 427485 - DNA, 30 bp, Artificial Sequence
  Synthetic oligonucleotide
gctctgcagaaggttgcgaatgccctcctc

SEQ ID NO: 427486 - DNA, 30 bp, Artificial Sequence
  Synthetic oligonucleotide
gccgttatgctgtgccctaaagtcctcctc

SEQ ID NO: 427487 - DNA, 30 bp, Artificial Sequence
  Synthetic oligonucleotide
acttccctttagcccctaatctcgctcctc

SEQ ID NO: 427488 - DNA, 30 bp, Artificial Sequence
  Synthetic oligonucleotide
cttcatccaatcgcgcgtttgagcgtcctc

SEQ ID NO: 427489 - DNA, 30 bp, Artificial Sequence
  Synthetic oligonucleotide
acatcatttcaatcggcgttgctcgtcctc

SEQ ID NO: 427490 - DNA, 30 bp, Artificial Sequence
  Synthetic oligonucleotide
ccctgagtgcagtccatgaagacggtcctc

SEQ ID NO: 427491 - DNA, 30 bp, Artificial Sequence
  Synthetic oligonucleotide
atgctggaggcactgttttctggtgtcctc

SEQ ID NO: 427492 - DNA, 30 bp, Artificial Sequence
  Synthetic oligonucleotide
tatgctacacactataaggatattgtcctc

SEQ ID NO: 427493 - DNA, 30 bp, Artificial Sequence
  Synthetic oligonucleotide
ttgggtggacccacaaagcctattgtcctc

SEQ ID NO: 427494 - DNA, 30 bp, Artificial Sequence
  Synthetic oligonucleotide
tgatcaggacgaatgcgctacgttgtcctc

SEQ ID NO: 427495 - DNA, 30 bp, Artificial Sequence
  Synthetic oligonucleotide
agctgttcgtgtagggataacttgttcctc

SEQ ID NO: 427496 - DNA, 31 bp, Artificial Sequence
  Synthetic oligonucleotide
agcccaattgcttaggtaaacatatttcctc

SEQ ID NO: 427497 - DNA, 30 bp, Artificial Sequence
  Synthetic oligonucleotide
gttgaacggattaacgcaaaaattttcctc

SEQ ID NO: 427498 - DNA, 30 bp, Artificial Sequence
  Synthetic oligonucleotide
gattggataatgaggatcgtcacaaagctc

SEQ ID NO: 427499 - DNA, 30 bp, Artificial Sequence
  Synthetic oligonucleotide
aatgcagggcgactcagtaaagcaaagctc

SEQ ID NO: 427500 - DNA, 30 bp, Artificial Sequence
  Synthetic oligonucleotide
gaaaagagatgtacctcggtggccaagctc

SEQ ID NO: 427501 - DNA, 30 bp, Artificial Sequence
  Synthetic oligonucleotide
ttcgtagagacttgcactcgagtcaagctc

SEQ ID NO: 427502 - DNA, 30 bp, Artificial Sequence
  Synthetic oligonucleotide
tgtcagttcggcttctcgtccaggaagctc

SEQ ID NO: 427503 - DNA, 30 bp, Artificial Sequence
  Synthetic oligonucleotide
tactctccgaaccgtaataacatgaagctc

SEQ ID NO: 427504 - DNA, 30 bp, Artificial Sequence
  Synthetic oligonucleotide
atttacccctaggcaacatgctgtaagctc

SEQ ID NO: 427505 - DNA, 30 bp, Artificial Sequence
  Synthetic oligonucleotide
gttcacgcgatgtgttcaagcaggcagctc

SEQ ID NO: 427506 - DNA, 30 bp, Artificial Sequence
  Synthetic oligonucleotide
ctcgttatatgaaaaaattcttgtcagctc

SEQ ID NO: 427507 - DNA, 30 bp, Artificial Sequence
  Synthetic oligonucleotide
gctggggaaggaattgtattatgcgagctc

SEQ ID NO: 427508 - DNA, 30 bp, Artificial Sequence
  Synthetic oligonucleotide
agagagatccgatggatatcgacggagctc

SEQ ID NO: 427509 - DNA, 30 bp, Artificial Sequence
  Synthetic oligonucleotide
aaagcatcgtttacgctcaacgtggagctc

SEQ ID NO: 427510 - DNA, 30 bp, Artificial Sequence
  Synthetic oligonucleotide
taagtgcctacgacccctgttgctgagctc

SEQ ID NO: 427511 - DNA, 30 bp, Artificial Sequence
  Synthetic oligonucleotide
atccgtattggaaatgatcagcaatagctc

SEQ ID NO: 427512 - DNA, 30 bp, Artificial Sequence
  Synthetic oligonucleotide
agtccctgctcaggttctgcacactagctc

SEQ ID NO: 427513 - DNA, 30 bp, Artificial Sequence
  Synthetic oligonucleotide
tttactcggtaatccctccggagttagctc

SEQ ID NO: 427514 - DNA, 30 bp, Artificial Sequence
  Synthetic oligonucleotide
tagtgcgggtttgtgattaatggttagctc

SEQ ID NO: 427515 - DNA, 30 bp, Artificial Sequence
  Synthetic oligonucleotide
aagttaggtcaatggtcactgtacacgctc

SEQ ID NO: 427516 - DNA, 30 bp, Artificial Sequence
  Synthetic oligonucleotide
ggccatgaatggtggaacacggccacgctc

SEQ ID NO: 427517 - DNA, 30 bp, Artificial Sequence
  Synthetic oligonucleotide
ataaggcctgcaagacggcctttcacgctc

SEQ ID NO: 427518 - DNA, 30 bp, Artificial Sequence
  Synthetic oligonucleotide
ccacgccctagtgggtctcctaagacgctc

SEQ ID NO: 427519 - DNA, 30 bp, Artificial Sequence
  Synthetic oligonucleotide
cgacccaaccgtaaaccagtataaccgctc

SEQ ID NO: 427520 - DNA, 30 bp, Artificial Sequence
  Synthetic oligonucleotide
ctgcctcactaggtttgcttatcaccgctc

SEQ ID NO: 427521 - DNA, 30 bp, Artificial Sequence
  Synthetic oligonucleotide
tctggttccttgcctctgtaacctccgctc

SEQ ID NO: 427522 - DNA, 30 bp, Artificial Sequence
  Synthetic oligonucleotide
actagccgcataagctagcattctccgctc

SEQ ID NO: 427523 - DNA, 30 bp, Artificial Sequence
  Synthetic oligonucleotide
aaatcatagaggttttgttttgcagcgctc

SEQ ID NO: 427524 - DNA, 30 bp, Artificial Sequence
  Synthetic oligonucleotide
gccagagttcacgggacctataaatcgctc

SEQ ID NO: 427525 - DNA, 30 bp, Artificial Sequence
  Synthetic oligonucleotide
ttaacgcactcgaacatttaaatatcgctc

SEQ ID NO: 427526 - DNA, 30 bp, Artificial Sequence
  Synthetic oligonucleotide
tgggcgcattgctctaccgatcactcgctc

SEQ ID NO: 427527 - DNA, 30 bp, Artificial Sequence
  Synthetic oligonucleotide
gcgtagtttcgagcgtcatattcgtcgctc

SEQ ID NO: 427528 - DNA, 30 bp, Artificial Sequence
  Synthetic oligonucleotide
gttcaatatcctataaccctaacttcgctc

SEQ ID NO: 427529 - DNA, 30 bp, Artificial Sequence
  Synthetic oligonucleotide
tgtcttgtataacggagatttgaaaggctc

SEQ ID NO: 427530 - DNA, 30 bp, Artificial Sequence
  Synthetic oligonucleotide
tttaacattaggatgagtcatcccaggctc

SEQ ID NO: 427531 - DNA, 30 bp, Artificial Sequence
  Synthetic oligonucleotide
cgagtcgtttgtaagtcgtttagcaggctc

SEQ ID NO: 427532 - DNA, 30 bp, Artificial Sequence
  Synthetic oligonucleotide
ccaccacagctgcaatcattgtgcaggctc

SEQ ID NO: 427533 - DNA, 30 bp, Artificial Sequence
  Synthetic oligonucleotide
aactggatgaggcaatatgatgagaggctc

SEQ ID NO: 427534 - DNA, 30 bp, Artificial Sequence
  Synthetic oligonucleotide
ttgtttgcctgcattgcaatctcgaggctc

SEQ ID NO: 427535 - DNA, 30 bp, Artificial Sequence
  Synthetic oligonucleotide
taaatcgagttgtaaggttgacataggctc

SEQ ID NO: 427536 - DNA, 30 bp, Artificial Sequence
  Synthetic oligonucleotide
ctgagccctattggagaatagtttaggctc

SEQ ID NO: 427537 - DNA, 30 bp, Artificial Sequence
  Synthetic oligonucleotide
cgtcatcaagacttaaccaggtttaggctc

SEQ ID NO: 427538 - DNA, 30 bp, Artificial Sequence
  Synthetic oligonucleotide
caaaatcacacagggagtgtgccgcggctc

SEQ ID NO: 427539 - DNA, 30 bp, Artificial Sequence
  Synthetic oligonucleotide
ttcatcttgtctgagaatttatggcggctc

SEQ ID NO: 427540 - DNA, 30 bp, Artificial Sequence
  Synthetic oligonucleotide
gacccattattacgggaaggttcagggctc

SEQ ID NO: 427541 - DNA, 30 bp, Artificial Sequence
  Synthetic oligonucleotide
ctctgtatgtggcgatgatcttgagggctc

SEQ ID NO: 427542 - DNA, 30 bp, Artificial Sequence
  Synthetic oligonucleotide
acttaggtctatgcccggtggaacgggctc

SEQ ID NO: 427543 - DNA, 30 bp, Artificial Sequence
  Synthetic oligonucleotide
gggaatgcagtgcctaagcagcccgggctc

SEQ ID NO: 427544 - DNA, 30 bp, Artificial Sequence
  Synthetic oligonucleotide
agcaactgggcatggtgtggcatcgggctc

SEQ ID NO: 427545 - DNA, 30 bp, Artificial Sequence
  Synthetic oligonucleotide
aataggggtgaaacagcataagaggggctc

SEQ ID NO: 427546 - DNA, 30 bp, Artificial Sequence
  Synthetic oligonucleotide
tccagcgcgcattaattctcatgggggctc

SEQ ID NO: 427547 - DNA, 30 bp, Artificial Sequence
  Synthetic oligonucleotide
tgaacatactgaccctgactgctggggctc

SEQ ID NO: 427548 - DNA, 30 bp, Artificial Sequence
  Synthetic oligonucleotide
tttggttcatctgggcgccgtctggggctc

SEQ ID NO: 427549 - DNA, 30 bp, Artificial Sequence
  Synthetic oligonucleotide
taccgctaggcatacatgctgtcatggctc

SEQ ID NO: 427550 - DNA, 30 bp, Artificial Sequence
  Synthetic oligonucleotide
attgaacggggactagcaaacttatggctc

SEQ ID NO: 427551 - DNA, 30 bp, Artificial Sequence
  Synthetic oligonucleotide
catcagtcggtcacactataattctggctc

SEQ ID NO: 427552 - DNA, 30 bp, Artificial Sequence
  Synthetic oligonucleotide
cttataagtttactctctcgaccgtggctc

SEQ ID NO: 427553 - DNA, 30 bp, Artificial Sequence
  Synthetic oligonucleotide
cacagagttgtcctataggatttgtggctc

SEQ ID NO: 427554 - DNA, 30 bp, Artificial Sequence
  Synthetic oligonucleotide
taccttgaatcgcgcacgggccgttggctc

SEQ ID NO: 427555 - DNA, 30 bp, Artificial Sequence
  Synthetic oligonucleotide
aatgtgccggtgcagaagctcctaatgctc

SEQ ID NO: 427556 - DNA, 30 bp, Artificial Sequence
  Synthetic oligonucleotide
tgtccacctgacctctccccgagcatgctc

SEQ ID NO: 427557 - DNA, 30 bp, Artificial Sequence
  Synthetic oligonucleotide
taaattgacaccagcccacaatgcatgctc

SEQ ID NO: 427558 - DNA, 30 bp, Artificial Sequence
  Synthetic oligonucleotide
ccctaaacacttgcactccgctgcatgctc

SEQ ID NO: 427559 - DNA, 30 bp, Artificial Sequence
  Synthetic oligonucleotide
aaacacatacaagcgggaagcatcatgctc

SEQ ID NO: 427560 - DNA, 30 bp, Artificial Sequence
  Synthetic oligonucleotide
gccggtcgacctgccatacgcatgatgctc

SEQ ID NO: 427561 - DNA, 30 bp, Artificial Sequence
  Synthetic oligonucleotide
ttcgagccgctcaaccgcttgtctatgctc

SEQ ID NO: 427562 - DNA, 30 bp, Artificial Sequence
  Synthetic oligonucleotide
agtactagctaatctgccgctattatgctc

SEQ ID NO: 427563 - DNA, 30 bp, Artificial Sequence
  Synthetic oligonucleotide
aaatatttggcatacactagtgaactgctc

SEQ ID NO: 427564 - DNA, 30 bp, Artificial Sequence
  Synthetic oligonucleotide
ttggcgataacttaatgttgcgggctgctc

SEQ ID NO: 427565 - DNA, 30 bp, Artificial Sequence
  Synthetic oligonucleotide
agctacctatggaatttagagctgctgctc

SEQ ID NO: 427566 - DNA, 30 bp, Artificial Sequence
  Synthetic oligonucleotide
aaacgtataagcctatacgtctaggtgctc

SEQ ID NO: 427567 - DNA, 30 bp, Artificial Sequence
  Synthetic oligonucleotide
ccgttagaggataagcggcagtcggtgctc

SEQ ID NO: 427568 - DNA, 30 bp, Artificial Sequence
  Synthetic oligonucleotide
cgtcccgtcacgttagaagagagggtgctc

SEQ ID NO: 427569 - DNA, 30 bp, Artificial Sequence
  Synthetic oligonucleotide
atcattccaacagtgagtatagaattgctc

SEQ ID NO: 427570 - DNA, 30 bp, Artificial Sequence
  Synthetic oligonucleotide
aacgaatatcgagtgtttcgtttgttgctc

SEQ ID NO: 427571 - DNA, 30 bp, Artificial Sequence
  Synthetic oligonucleotide
cggcgactggacgccacagagtgaaatctc

SEQ ID NO: 427572 - DNA, 30 bp, Artificial Sequence
  Synthetic oligonucleotide
gccttaacgcttctattgatgatcaatctc

SEQ ID NO: 427573 - DNA, 30 bp, Artificial Sequence
  Synthetic oligonucleotide
cagctacggtgaaggcaatgtctcaatctc

SEQ ID NO: 427574 - DNA, 30 bp, Artificial Sequence
  Synthetic oligonucleotide
ggcttaggtgcgcaggggggagtcaatctc

SEQ ID NO: 427575 - DNA, 30 bp, Artificial Sequence
  Synthetic oligonucleotide
ctgggtcgcggatctgtagcttagaatctc

SEQ ID NO: 427576 - DNA, 30 bp, Artificial Sequence
  Synthetic oligonucleotide
gctgctaacgccggggggtcgaggaatctc

SEQ ID NO: 427577 - DNA, 30 bp, Artificial Sequence
  Synthetic oligonucleotide
ctccgataggtgttatacaagcggaatctc

SEQ ID NO: 427578 - DNA, 30 bp, Artificial Sequence
  Synthetic oligonucleotide
agacatttcggatttgtcaatgataatctc

SEQ ID NO: 427579 - DNA, 30 bp, Artificial Sequence
  Synthetic oligonucleotide
ctgcattgatggtggcaacaatataatctc

SEQ ID NO: 427580 - DNA, 30 bp, Artificial Sequence
  Synthetic oligonucleotide
atgcgccatgtatcgtatctaggacatctc

SEQ ID NO: 427581 - DNA, 30 bp, Artificial Sequence
  Synthetic oligonucleotide
gggccttcgggacggggaccaattcatctc

SEQ ID NO: 427582 - DNA, 31 bp, Artificial Sequence
  Synthetic oligonucleotide
gggtgttggaggtgctctgctgattcatctc

SEQ ID NO: 427583 - DNA, 30 bp, Artificial Sequence
  Synthetic oligonucleotide
acgaccgaattcaaggttattaaagatctc

SEQ ID NO: 427584 - DNA, 30 bp, Artificial Sequence
  Synthetic oligonucleotide
gattcaccaagtgcaggtcagtgagatctc

SEQ ID NO: 427585 - DNA, 30 bp, Artificial Sequence
  Synthetic oligonucleotide
atgatttattcccccgggtcagccgatctc

SEQ ID NO: 427586 - DNA, 30 bp, Artificial Sequence
  Synthetic oligonucleotide
gttcatggcagtgctaaatcacgggatctc

SEQ ID NO: 427587 - DNA, 30 bp, Artificial Sequence
  Synthetic oligonucleotide
tctcggggtgtttcgtgaacggtggatctc

SEQ ID NO: 427588 - DNA, 30 bp, Artificial Sequence
  Synthetic oligonucleotide
gaaggattgtttagcgaccgcaatgatctc

SEQ ID NO: 427589 - DNA, 30 bp, Artificial Sequence
  Synthetic oligonucleotide
tctacttgtgactcaagcttatatgatctc

SEQ ID NO: 427590 - DNA, 30 bp, Artificial Sequence
  Synthetic oligonucleotide
ctcacctctttgaaccaaccttctgatctc

SEQ ID NO: 427591 - DNA, 30 bp, Artificial Sequence
  Synthetic oligonucleotide
ggaagtgctccccatgatttgcagtatctc

SEQ ID NO: 427592 - DNA, 30 bp, Artificial Sequence
  Synthetic oligonucleotide
cttaaaagcccgggagctagtcagtatctc

SEQ ID NO: 427593 - DNA, 30 bp, Artificial Sequence
  Synthetic oligonucleotide
atacagttggcttatacgctcgcttatctc

SEQ ID NO: 427594 - DNA, 30 bp, Artificial Sequence
  Synthetic oligonucleotide
atttcttctcttattatgtatcaaactctc

SEQ ID NO: 427595 - DNA, 30 bp, Artificial Sequence
  Synthetic oligonucleotide
aggactgatcataaccggaccagcactctc

SEQ ID NO: 427596 - DNA, 30 bp, Artificial Sequence
  Synthetic oligonucleotide
acaacgctattaatagagtttttgactctc

SEQ ID NO: 427597 - DNA, 30 bp, Artificial Sequence
  Synthetic oligonucleotide
atatcagtgaaatataattgcgatactctc

SEQ ID NO: 427598 - DNA, 30 bp, Artificial Sequence
  Synthetic oligonucleotide
atacacgcttcgctcaacaggtgacctctc

SEQ ID NO: 427599 - DNA, 30 bp, Artificial Sequence
  Synthetic oligonucleotide
cgcagataatatctccaacgggtgcctctc

SEQ ID NO: 427600 - DNA, 30 bp, Artificial Sequence
  Synthetic oligonucleotide
acggttgaagttgccagagtccgggctctc

SEQ ID NO: 427601 - DNA, 30 bp, Artificial Sequence
  Synthetic oligonucleotide
atataacttggagaaacgcttttggctctc

SEQ ID NO: 427602 - DNA, 30 bp, Artificial Sequence
  Synthetic oligonucleotide
ttctacgagcaaccgctacagtttgctctc

SEQ ID NO: 427603 - DNA, 30 bp, Artificial Sequence
  Synthetic oligonucleotide
tttgactgggttatgcgaggtatatctctc

SEQ ID NO: 427604 - DNA, 30 bp, Artificial Sequence
  Synthetic oligonucleotide
gaattttgatcacgctaataatactctctc

SEQ ID NO: 427605 - DNA, 29 bp, Artificial Sequence
  Synthetic oligonucleotide
gggagaataattgttattgtgtgtctctc

SEQ ID NO: 427606 - DNA, 30 bp, Artificial Sequence
  Synthetic oligonucleotide
tttaaatgttagacctcagggtaaagtctc

SEQ ID NO: 427607 - DNA, 30 bp, Artificial Sequence
  Synthetic oligonucleotide
catttgtaactcaaggtatacgacagtctc

SEQ ID NO: 427608 - DNA, 30 bp, Artificial Sequence
  Synthetic oligonucleotide
ttgattatatcggatatcagcgacagtctc

SEQ ID NO: 427609 - DNA, 30 bp, Artificial Sequence
  Synthetic oligonucleotide
acccacaaatagaaacgttctcgcagtctc

SEQ ID NO: 427610 - DNA, 30 bp, Artificial Sequence
  Synthetic oligonucleotide
cattgtatcctctacgtgaccttcagtctc

SEQ ID NO: 427611 - DNA, 30 bp, Artificial Sequence
  Synthetic oligonucleotide
tatcctgttactatgaactgtgggagtctc

SEQ ID NO: 427612 - DNA, 30 bp, Artificial Sequence
  Synthetic oligonucleotide
tgttaatgagacagctgcagtcctagtctc

SEQ ID NO: 427613 - DNA, 30 bp, Artificial Sequence
  Synthetic oligonucleotide
tcttctaggcttattgaaaagtctagtctc

SEQ ID NO: 427614 - DNA, 30 bp, Artificial Sequence
  Synthetic oligonucleotide
ttgagcagggtaagcgatccgcttagtctc

SEQ ID NO: 427615 - DNA, 30 bp, Artificial Sequence
  Synthetic oligonucleotide
agtgctagctacaaggctgagcggcgtctc

SEQ ID NO: 427616 - DNA, 30 bp, Artificial Sequence
  Synthetic oligonucleotide
acccccttaagaaacgccatagatcgtctc

SEQ ID NO: 427617 - DNA, 30 bp, Artificial Sequence
  Synthetic oligonucleotide
gttgcgtacgatgaggcgaacgttcgtctc

SEQ ID NO: 427618 - DNA, 30 bp, Artificial Sequence
  Synthetic oligonucleotide
gggataccaacctagaatggtctaggtctc

SEQ ID NO: 427619 - DNA, 30 bp, Artificial Sequence
  Synthetic oligonucleotide
gaactttagagtgtaccatccaacggtctc

SEQ ID NO: 427620 - DNA, 30 bp, Artificial Sequence
  Synthetic oligonucleotide
acgaaagtctgcgacgcttgtgagggtctc

SEQ ID NO: 427621 - DNA, 30 bp, Artificial Sequence
  Synthetic oligonucleotide
gctaaaacaagtccagttatacggggtctc

SEQ ID NO: 427622 - DNA, 30 bp, Artificial Sequence
  Synthetic oligonucleotide
cgctattcgtgtgtgacctcgcggggtctc

SEQ ID NO: 427623 - DNA, 30 bp, Artificial Sequence
  Synthetic oligonucleotide
ccaggtgtcgagactcagagccctggtctc

SEQ ID NO: 427624 - DNA, 30 bp, Artificial Sequence
  Synthetic oligonucleotide
gcagttccagtatatataacaaactgtctc

SEQ ID NO: 427625 - DNA, 30 bp, Artificial Sequence
  Synthetic oligonucleotide
gtaagcaagcaagggcgtgctcactgtctc

SEQ ID NO: 427626 - DNA, 30 bp, Artificial Sequence
  Synthetic oligonucleotide
acgtcaaggcgggctctccaaacctgtctc

SEQ ID NO: 427627 - DNA, 30 bp, Artificial Sequence
  Synthetic oligonucleotide
agtttgttactttactgttgctagtgtctc

SEQ ID NO: 427628 - DNA, 30 bp, Artificial Sequence
  Synthetic oligonucleotide
ttaccgacagccactttcctgtggtgtctc

SEQ ID NO: 427629 - DNA, 30 bp, Artificial Sequence
  Synthetic oligonucleotide
gtttggcctgcgctccccgcgcgaattctc

SEQ ID NO: 427630 - DNA, 30 bp, Artificial Sequence
  Synthetic oligonucleotide
cgggccgtaactcggcaagaatgcattctc

SEQ ID NO: 427631 - DNA, 30 bp, Artificial Sequence
  Synthetic oligonucleotide
aactaatagatactgctttgcggtattctc

SEQ ID NO: 427632 - DNA, 30 bp, Artificial Sequence
  Synthetic oligonucleotide
gataccgttggctagaagcagggtattctc

SEQ ID NO: 427633 - DNA, 30 bp, Artificial Sequence
  Synthetic oligonucleotide
accatggcgtagtggccacatggtattctc

SEQ ID NO: 427634 - DNA, 30 bp, Artificial Sequence
  Synthetic oligonucleotide
gttcggtgtcttcaaccccagccacttctc

SEQ ID NO: 427635 - DNA, 30 bp, Artificial Sequence
  Synthetic oligonucleotide
gcagtgcttgtataattatccggacttctc

SEQ ID NO: 427636 - DNA, 30 bp, Artificial Sequence
  Synthetic oligonucleotide
catatcgattgtggagtcagatgacttctc

SEQ ID NO: 427637 - DNA, 30 bp, Artificial Sequence
  Synthetic oligonucleotide
ttttcccgtgaattcgcgagctagcttctc

SEQ ID NO: 427638 - DNA, 30 bp, Artificial Sequence
  Synthetic oligonucleotide
ggactatgacagggctggccgtagcttctc

SEQ ID NO: 427639 - DNA, 30 bp, Artificial Sequence
  Synthetic oligonucleotide
cgcagttttctactgtacaggacgcttctc

SEQ ID NO: 427640 - DNA, 30 bp, Artificial Sequence
  Synthetic oligonucleotide
gcggggctatttcggcaggtataagttctc

SEQ ID NO: 427641 - DNA, 30 bp, Artificial Sequence
  Synthetic oligonucleotide
accttctattggacttgacggagcgttctc

SEQ ID NO: 427642 - DNA, 30 bp, Artificial Sequence
  Synthetic oligonucleotide
gaacattgagtatgattatgctaggttctc

SEQ ID NO: 427643 - DNA, 30 bp, Artificial Sequence
  Synthetic oligonucleotide
gcaaactattcggtctaccacagggttctc

SEQ ID NO: 427644 - DNA, 30 bp, Artificial Sequence
  Synthetic oligonucleotide
tacacagttggttaccactgggtggttctc

SEQ ID NO: 427645 - DNA, 30 bp, Artificial Sequence
  Synthetic oligonucleotide
tctggagtcaaagacgacagtccgtttctc

SEQ ID NO: 427646 - DNA, 30 bp, Artificial Sequence
  Synthetic oligonucleotide
gcaagtgccagacgtcacggtttgtttctc

SEQ ID NO: 427647 - DNA, 30 bp, Artificial Sequence
  Synthetic oligonucleotide
acctgatcatggcagaaagacccttttctc

SEQ ID NO: 427648 - DNA, 30 bp, Artificial Sequence
  Synthetic oligonucleotide
tgtttgtattgtcgaacacgcatttttctc

SEQ ID NO: 427649 - DNA, 30 bp, Artificial Sequence
  Synthetic oligonucleotide
gacccctactgagttctggaaacaaaagtc

SEQ ID NO: 427650 - DNA, 30 bp, Artificial Sequence
  Synthetic oligonucleotide
ttgggtgcgcttctcaagcatccaaaagtc

SEQ ID NO: 427651 - DNA, 30 bp, Artificial Sequence
  Synthetic oligonucleotide
aaaggtacacacgttgccaccgcaaaagtc

SEQ ID NO: 427652 - DNA, 34 bp, Artificial Sequence
  Synthetic oligonucleotide
gatactagaccaccacgtgtccatcagaaaagtc

SEQ ID NO: 427653 - DNA, 30 bp, Artificial Sequence
  Synthetic oligonucleotide
aaaagtccatatatgataaatgaacaagtc

SEQ ID NO: 427654 - DNA, 30 bp, Artificial Sequence
  Synthetic oligonucleotide
gaatagtcgtgggatgtttgcaatcaagtc

SEQ ID NO: 427655 - DNA, 30 bp, Artificial Sequence
  Synthetic oligonucleotide
ttcatgcgctttgattggagcggtcaagtc

SEQ ID NO: 427656 - DNA, 30 bp, Artificial Sequence
  Synthetic oligonucleotide
atggccgagcatatgaatagcattcaagtc

SEQ ID NO: 427657 - DNA, 30 bp, Artificial Sequence
  Synthetic oligonucleotide
actacactaacgaagccggcatgagaagtc

SEQ ID NO: 427658 - DNA, 30 bp, Artificial Sequence
  Synthetic oligonucleotide
cagtgcaacgggggtcccagcatcgaagtc

SEQ ID NO: 427659 - DNA, 30 bp, Artificial Sequence
  Synthetic oligonucleotide
gttaggtttgggtgagctagaccggaagtc

SEQ ID NO: 427660 - DNA, 30 bp, Artificial Sequence
  Synthetic oligonucleotide
gtaaaacggcttccggtgtaggcggaagtc

SEQ ID NO: 427661 - DNA, 30 bp, Artificial Sequence
  Synthetic oligonucleotide
tgtacaccgagcaggaacatcattgaagtc

SEQ ID NO: 427662 - DNA, 30 bp, Artificial Sequence
  Synthetic oligonucleotide
ggcttaacgactctaagccttgttgaagtc

SEQ ID NO: 427663 - DNA, 30 bp, Artificial Sequence
  Synthetic oligonucleotide
taagcgatgaaccgtcgcagctgataagtc

SEQ ID NO: 427664 - DNA, 30 bp, Artificial Sequence
  Synthetic oligonucleotide
gaccagtggaaaaaatgctttgtataagtc

SEQ ID NO: 427665 - DNA, 30 bp, Artificial Sequence
  Synthetic oligonucleotide
taaacaacgcatagcccgattttataagtc

SEQ ID NO: 427666 - DNA, 30 bp, Artificial Sequence
  Synthetic oligonucleotide
atagcaaattcacgccgtcgactgtaagtc

SEQ ID NO: 427667 - DNA, 30 bp, Artificial Sequence
  Synthetic oligonucleotide
ggtaacgctggaaggctaaagcgttaagtc

SEQ ID NO: 427668 - DNA, 30 bp, Artificial Sequence
  Synthetic oligonucleotide
ttatggcgcatggtttgtggactttaagtc

SEQ ID NO: 427669 - DNA, 30 bp, Artificial Sequence
  Synthetic oligonucleotide
agaagggacgaagaatggatttacacagtc

SEQ ID NO: 427670 - DNA, 30 bp, Artificial Sequence
  Synthetic oligonucleotide
ccccagcttggacatgcggaaagcacagtc

SEQ ID NO: 427671 - DNA, 30 bp, Artificial Sequence
  Synthetic oligonucleotide
gcggatgctctactacaagatgagacagtc

SEQ ID NO: 427672 - DNA, 30 bp, Artificial Sequence
  Synthetic oligonucleotide
tattagttgcgccgcgataaactgacagtc

SEQ ID NO: 427673 - DNA, 30 bp, Artificial Sequence
  Synthetic oligonucleotide
ttgcctgctgatttgtttttgttgacagtc

SEQ ID NO: 427674 - DNA, 30 bp, Artificial Sequence
  Synthetic oligonucleotide
gagaatctacccgagggggactttacagtc

SEQ ID NO: 427675 - DNA, 30 bp, Artificial Sequence
  Synthetic oligonucleotide
taaccggttagtctatagtttccaccagtc

SEQ ID NO: 427676 - DNA, 30 bp, Artificial Sequence
  Synthetic oligonucleotide
tctgataatcgtttaggtccccgaccagtc

SEQ ID NO: 427677 - DNA, 30 bp, Artificial Sequence
  Synthetic oligonucleotide
ccaattttcgggcaaaatggagacccagtc

SEQ ID NO: 427678 - DNA, 30 bp, Artificial Sequence
  Synthetic oligonucleotide
ccctgtatcttagtatgtcatgacccagtc

SEQ ID NO: 427679 - DNA, 30 bp, Artificial Sequence
  Synthetic oligonucleotide
tagtgcatagcggtccccccgctcccagtc

SEQ ID NO: 427680 - DNA, 30 bp, Artificial Sequence
  Synthetic oligonucleotide
gtagactcgctcttatctcgcgagccagtc

SEQ ID NO: 427681 - DNA, 30 bp, Artificial Sequence
  Synthetic oligonucleotide
ctcatagatcacgtgtgcttttatccagtc

SEQ ID NO: 427682 - DNA, 30 bp, Artificial Sequence
  Synthetic oligonucleotide
agctaaactgagaggttactgactccagtc

SEQ ID NO: 427683 - DNA, 30 bp, Artificial Sequence
  Synthetic oligonucleotide
atatataactctggagtcagctttccagtc

SEQ ID NO: 427684 - DNA, 30 bp, Artificial Sequence
  Synthetic oligonucleotide
tacatgatcgctattgttgtggaagcagtc

SEQ ID NO: 427685 - DNA, 30 bp, Artificial Sequence
  Synthetic oligonucleotide
cacatgtgatggaccgaccacaacgcagtc

SEQ ID NO: 427686 - DNA, 30 bp, Artificial Sequence
  Synthetic oligonucleotide
gacatttaaccacattatcaaggcgcagtc

SEQ ID NO: 427687 - DNA, 30 bp, Artificial Sequence
  Synthetic oligonucleotide
tagatacaattatacattgatagtgcagtc

SEQ ID NO: 427688 - DNA, 30 bp, Artificial Sequence
  Synthetic oligonucleotide
accaacggactcggactcatcgttgcagtc

SEQ ID NO: 427689 - DNA, 30 bp, Artificial Sequence
  Synthetic oligonucleotide
attgcctcgtaaggtgatttataatcagtc

SEQ ID NO: 427690 - DNA, 30 bp, Artificial Sequence
  Synthetic oligonucleotide
ccggactgatcacgagattccttatcagtc

SEQ ID NO: 427691 - DNA, 30 bp, Artificial Sequence
  Synthetic oligonucleotide
gagtcaattccatcgcgaggtagctcagtc

SEQ ID NO: 427692 - DNA, 30 bp, Artificial Sequence
  Synthetic oligonucleotide
ttcccgacaggtgataagcctttctcagtc

SEQ ID NO: 427693 - DNA, 30 bp, Artificial Sequence
  Synthetic oligonucleotide
cagtaatgaagcactagtgttgagtcagtc

SEQ ID NO: 427694 - DNA, 30 bp, Artificial Sequence
  Synthetic oligonucleotide
cgagtggctgctaaaagtttgacgtcagtc

SEQ ID NO: 427695 - DNA, 30 bp, Artificial Sequence
  Synthetic oligonucleotide
agacttttattgagattctgaataagagtc

SEQ ID NO: 427696 - DNA, 30 bp, Artificial Sequence
  Synthetic oligonucleotide
acggcacataaggaatccattccgagagtc

SEQ ID NO: 427697 - DNA, 30 bp, Artificial Sequence
  Synthetic oligonucleotide
ctcttccgaactccggttcgcggacgagtc

SEQ ID NO: 427698 - DNA, 30 bp, Artificial Sequence
  Synthetic oligonucleotide
ccatatgcttgccactctctgtgacgagtc

SEQ ID NO: 427699 - DNA, 30 bp, Artificial Sequence
  Synthetic oligonucleotide
tatcccctggctacccggatgatacgagtc

SEQ ID NO: 427700 - DNA, 30 bp, Artificial Sequence
  Synthetic oligonucleotide
gctttttccagatttagtatttctcgagtc

SEQ ID NO: 427701 - DNA, 30 bp, Artificial Sequence
  Synthetic oligonucleotide
ccggcaaccaatcccgtcacagaaggagtc

SEQ ID NO: 427702 - DNA, 30 bp, Artificial Sequence
  Synthetic oligonucleotide
aacccgagtattcgacaactggacggagtc

SEQ ID NO: 427703 - DNA, 30 bp, Artificial Sequence
  Synthetic oligonucleotide
caacaccagtcttagcgttaagccggagtc

SEQ ID NO: 427704 - DNA, 30 bp, Artificial Sequence
  Synthetic oligonucleotide
caccctacactgccgtcttgtgccggagtc

SEQ ID NO: 427705 - DNA, 30 bp, Artificial Sequence
  Synthetic oligonucleotide
gcgcttatagaattattcccgctcggagtc

SEQ ID NO: 427706 - DNA, 30 bp, Artificial Sequence
  Synthetic oligonucleotide
gtgagtgttcagaaaaggttcttcggagtc

SEQ ID NO: 427707 - DNA, 30 bp, Artificial Sequence
  Synthetic oligonucleotide
ttggctatgcccttgggctataatggagtc

SEQ ID NO: 427708 - DNA, 30 bp, Artificial Sequence
  Synthetic oligonucleotide
ggaataccgtatacctttaggcatggagtc

SEQ ID NO: 427709 - DNA, 30 bp, Artificial Sequence
  Synthetic oligonucleotide
gacttgagcccacctctagcctaatgagtc

SEQ ID NO: 427710 - DNA, 30 bp, Artificial Sequence
  Synthetic oligonucleotide
aatatagaatacggctttccatattgagtc

SEQ ID NO: 427711 - DNA, 30 bp, Artificial Sequence
  Synthetic oligonucleotide
aacgagcaggtccgctttgcactttgagtc

SEQ ID NO: 427712 - DNA, 30 bp, Artificial Sequence
  Synthetic oligonucleotide
ggtggtaggagtggttttagaaaaatagtc

SEQ ID NO: 427713 - DNA, 30 bp, Artificial Sequence
  Synthetic oligonucleotide
aaaagtacggcaatcgagccccaaatagtc

SEQ ID NO: 427714 - DNA, 30 bp, Artificial Sequence
  Synthetic oligonucleotide
atctgggtaatataaccttgtttaatagtc

SEQ ID NO: 427715 - DNA, 30 bp, Artificial Sequence
  Synthetic oligonucleotide
gtactttttgcttataaccccgccatagtc

SEQ ID NO: 427716 - DNA, 30 bp, Artificial Sequence
  Synthetic oligonucleotide
cattcacatcaactacggggacgcatagtc

SEQ ID NO: 427717 - DNA, 30 bp, Artificial Sequence
  Synthetic oligonucleotide
ctgcgcacgtgcgacctccaagggatagtc

SEQ ID NO: 427718 - DNA, 30 bp, Artificial Sequence
  Synthetic oligonucleotide
ctcgtttggttcccgttcagggatatagtc

SEQ ID NO: 427719 - DNA, 30 bp, Artificial Sequence
  Synthetic oligonucleotide
gcacacgacaagcgtggagacgctatagtc

SEQ ID NO: 427720 - DNA, 30 bp, Artificial Sequence
  Synthetic oligonucleotide
ttttgggagtgccacttacggacactagtc

SEQ ID NO: 427721 - DNA, 30 bp, Artificial Sequence
  Synthetic oligonucleotide
ttcctagtgtcttcccgaaaccgcctagtc

SEQ ID NO: 427722 - DNA, 30 bp, Artificial Sequence
  Synthetic oligonucleotide
agtgactcaatcctcgcaaaggatctagtc

SEQ ID NO: 427723 - DNA, 30 bp, Artificial Sequence
  Synthetic oligonucleotide
tactgccatcattttgagactgcagtagtc

SEQ ID NO: 427724 - DNA, 30 bp, Artificial Sequence
  Synthetic oligonucleotide
agttatgaaacgcgtggttgagtcgtagtc

SEQ ID NO: 427725 - DNA, 30 bp, Artificial Sequence
  Synthetic oligonucleotide
tgttttatagttgctgttgaagtggtagtc

SEQ ID NO: 427726 - DNA, 30 bp, Artificial Sequence
  Synthetic oligonucleotide
ttgtgttgattggggatccgatgattagtc

SEQ ID NO: 427727 - DNA, 30 bp, Artificial Sequence
  Synthetic oligonucleotide
aacaggtgcaactaaggccctgacttagtc

SEQ ID NO: 427728 - DNA, 30 bp, Artificial Sequence
  Synthetic oligonucleotide
agcgccacttattgacttggcagcttagtc

SEQ ID NO: 427729 - DNA, 30 bp, Artificial Sequence
  Synthetic oligonucleotide
attcaacagtagttgatcgagctcttagtc

SEQ ID NO: 427730 - DNA, 30 bp, Artificial Sequence
  Synthetic oligonucleotide
tgtacgtcgggcaaaatagataatttagtc

SEQ ID NO: 427731 - DNA, 29 bp, Artificial Sequence
  Synthetic oligonucleotide
aatgaacgggagagcttggggatttagtc

SEQ ID NO: 427732 - DNA, 30 bp, Artificial Sequence
  Synthetic oligonucleotide
cagacgtgggaatcataggtatcaaacgtc

SEQ ID NO: 427733 - DNA, 30 bp, Artificial Sequence
  Synthetic oligonucleotide
gttacgacgactctcacgcaaaacaacgtc

SEQ ID NO: 427734 - DNA, 30 bp, Artificial Sequence
  Synthetic oligonucleotide
ccgctgcatgtagtacgggtatagaacgtc

SEQ ID NO: 427735 - DNA, 30 bp, Artificial Sequence
  Synthetic oligonucleotide
attaggtgattctaatacttcaggaacgtc

SEQ ID NO: 427736 - DNA, 30 bp, Artificial Sequence
  Synthetic oligonucleotide
caattgggagctattcgcattctgaacgtc

SEQ ID NO: 427737 - DNA, 30 bp, Artificial Sequence
  Synthetic oligonucleotide
aaaggctcacgtaaaatgaagtctaacgtc

SEQ ID NO: 427738 - DNA, 30 bp, Artificial Sequence
  Synthetic oligonucleotide
aatttctatacaacggatgacgaacacgtc

SEQ ID NO: 427739 - DNA, 30 bp, Artificial Sequence
  Synthetic oligonucleotide
gccattgggatatattaagattaacacgtc

SEQ ID NO: 427740 - DNA, 30 bp, Artificial Sequence
  Synthetic oligonucleotide
agcttctgaatgatagtctttaaccacgtc

SEQ ID NO: 427741 - DNA, 30 bp, Artificial Sequence
  Synthetic oligonucleotide
atatagtggtaaagaccgtggactcacgtc

SEQ ID NO: 427742 - DNA, 30 bp, Artificial Sequence
  Synthetic oligonucleotide
gctgatgcgtaggggctcaagagtcacgtc

SEQ ID NO: 427743 - DNA, 30 bp, Artificial Sequence
  Synthetic oligonucleotide
acctggttacagtccggtgcaattcacgtc

SEQ ID NO: 427744 - DNA, 30 bp, Artificial Sequence
  Synthetic oligonucleotide
ggtcttcttgtacgcttacaaacagacgtc

SEQ ID NO: 427745 - DNA, 30 bp, Artificial Sequence
  Synthetic oligonucleotide
tcctaataaacgaatggcccattagacgtc

SEQ ID NO: 427746 - DNA, 30 bp, Artificial Sequence
  Synthetic oligonucleotide
gaccctggtagctcgatttagtgcgacgtc

SEQ ID NO: 427747 - DNA, 30 bp, Artificial Sequence
  Synthetic oligonucleotide
ggaggatgcccttggaggtcggtcgacgtc

SEQ ID NO: 427748 - DNA, 30 bp, Artificial Sequence
  Synthetic oligonucleotide
tacatccaattcggctaacgcaaggacgtc

SEQ ID NO: 427749 - DNA, 30 bp, Artificial Sequence
  Synthetic oligonucleotide
gattggaacacccgcgacaataaggacgtc

SEQ ID NO: 427750 - DNA, 30 bp, Artificial Sequence
  Synthetic oligonucleotide
cgatgctatgatcggagcagtcaggacgtc

SEQ ID NO: 427751 - DNA, 30 bp, Artificial Sequence
  Synthetic oligonucleotide
gtaacaattctaagcgtgttttaggacgtc

SEQ ID NO: 427752 - DNA, 30 bp, Artificial Sequence
  Synthetic oligonucleotide
atcttctagctgtaagaattgcaatacgtc

SEQ ID NO: 427753 - DNA, 30 bp, Artificial Sequence
  Synthetic oligonucleotide
tccgcgtagtacgcaaagctgagatacgtc

SEQ ID NO: 427754 - DNA, 30 bp, Artificial Sequence
  Synthetic oligonucleotide
tgactgtatgtcaagagacgagcctacgtc

SEQ ID NO: 427755 - DNA, 30 bp, Artificial Sequence
  Synthetic oligonucleotide
tttatcttattaacccctttagattacgtc

SEQ ID NO: 427756 - DNA, 30 bp, Artificial Sequence
  Synthetic oligonucleotide
agctcccctggaaaaagctctttaaccgtc

SEQ ID NO: 427757 - DNA, 30 bp, Artificial Sequence
  Synthetic oligonucleotide
gaattgtctgttactcattgttacaccgtc

SEQ ID NO: 427758 - DNA, 30 bp, Artificial Sequence
  Synthetic oligonucleotide
tacggttatagcgacgtacggaccaccgtc

SEQ ID NO: 427759 - DNA, 30 bp, Artificial Sequence
  Synthetic oligonucleotide
ctttaacggggactgcggagtcgacccgtc

SEQ ID NO: 427760 - DNA, 30 bp, Artificial Sequence
  Synthetic oligonucleotide
tacaaggtctctctccggtcgcgtcccgtc

SEQ ID NO: 427761 - DNA, 30 bp, Artificial Sequence
  Synthetic oligonucleotide
tactagggaggaatacgcctatgtcccgtc

SEQ ID NO: 427762 - DNA, 30 bp, Artificial Sequence
  Synthetic oligonucleotide
gcggaaatcatttagagcaggaaagccgtc

SEQ ID NO: 427763 - DNA, 30 bp, Artificial Sequence
  Synthetic oligonucleotide
ctgcagccgagtcagcggcttcacgccgtc

SEQ ID NO: 427764 - DNA, 30 bp, Artificial Sequence
  Synthetic oligonucleotide
ggattttcttaagctgtcttttgcgccgtc

SEQ ID NO: 427765 - DNA, 30 bp, Artificial Sequence
  Synthetic oligonucleotide
cttataagggttagtagtgtgagggccgtc

SEQ ID NO: 427766 - DNA, 30 bp, Artificial Sequence
  Synthetic oligonucleotide
tatgagcggtgtgagagagacaatgccgtc

SEQ ID NO: 427767 - DNA, 30 bp, Artificial Sequence
  Synthetic oligonucleotide
gtttatagcaacataaatttgagctccgtc

SEQ ID NO: 427768 - DNA, 30 bp, Artificial Sequence
  Synthetic oligonucleotide
aagagggcttctgtactgcctcattccgtc

SEQ ID NO: 427769 - DNA, 30 bp, Artificial Sequence
  Synthetic oligonucleotide
gcttatccgtctggttcgcgggcttccgtc

SEQ ID NO: 427770 - DNA, 30 bp, Artificial Sequence
  Synthetic oligonucleotide
ataagctgccttgataaacggtcaagcgtc

SEQ ID NO: 427771 - DNA, 30 bp, Artificial Sequence
  Synthetic oligonucleotide
gtagagtatactttcggtgtttgaagcgtc

SEQ ID NO: 427772 - DNA, 30 bp, Artificial Sequence
  Synthetic oligonucleotide
gaatcctgcgggtgggccaatttcagcgtc

SEQ ID NO: 427773 - DNA, 30 bp, Artificial Sequence
  Synthetic oligonucleotide
attggggctatcacttggcatacgagcgtc

SEQ ID NO: 427774 - DNA, 30 bp, Artificial Sequence
  Synthetic oligonucleotide
ccctctggattacagttatctctgagcgtc

SEQ ID NO: 427775 - DNA, 30 bp, Artificial Sequence
  Synthetic oligonucleotide
aagtcttgtaacaagcgtacagatagcgtc

SEQ ID NO: 427776 - DNA, 30 bp, Artificial Sequence
  Synthetic oligonucleotide
attgacaaaatgtacggtagcatacgcgtc

SEQ ID NO: 427777 - DNA, 30 bp, Artificial Sequence
  Synthetic oligonucleotide
gtcccatcagggttttctgtgttacgcgtc

SEQ ID NO: 427778 - DNA, 30 bp, Artificial Sequence
  Synthetic oligonucleotide
gtcatacattgtggcagtagtacccgcgtc

SEQ ID NO: 427779 - DNA, 30 bp, Artificial Sequence
  Synthetic oligonucleotide
cccgtggtgctcaattcgactgaaggcgtc

SEQ ID NO: 427780 - DNA, 30 bp, Artificial Sequence
  Synthetic oligonucleotide
gtgccgaacacaacatgacgcacaggcgtc

SEQ ID NO: 427781 - DNA, 30 bp, Artificial Sequence
  Synthetic oligonucleotide
ctatttgccaagacgcgagtctccggcgtc

SEQ ID NO: 427782 - DNA, 30 bp, Artificial Sequence
  Synthetic oligonucleotide
attttattgtagcggcgaggttccggcgtc

SEQ ID NO: 427783 - DNA, 30 bp, Artificial Sequence
  Synthetic oligonucleotide
gagtccacgacattgcagggggctggcgtc

SEQ ID NO: 427784 - DNA, 30 bp, Artificial Sequence
  Synthetic oligonucleotide
ccgaacagcggacctggacgcaaatgcgtc

SEQ ID NO: 427785 - DNA, 30 bp, Artificial Sequence
  Synthetic oligonucleotide
ctgatgtgatcttatctcatattatgcgtc

SEQ ID NO: 427786 - DNA, 30 bp, Artificial Sequence
  Synthetic oligonucleotide
tgactactccgcaactcacgttcctgcgtc

SEQ ID NO: 427787 - DNA, 30 bp, Artificial Sequence
  Synthetic oligonucleotide
gacacagttacgcaatgaggaatctgcgtc

SEQ ID NO: 427788 - DNA, 30 bp, Artificial Sequence
  Synthetic oligonucleotide
cttaaaaccattgcgggccgcatgtgcgtc

SEQ ID NO: 427789 - DNA, 30 bp, Artificial Sequence
  Synthetic oligonucleotide
cctgggattcagagtctaggcttttgcgtc

SEQ ID NO: 427790 - DNA, 30 bp, Artificial Sequence
  Synthetic oligonucleotide
tccccgttagtcaatgggttgcgcatcgtc

SEQ ID NO: 427791 - DNA, 30 bp, Artificial Sequence
  Synthetic oligonucleotide
attcacattcgctgccaagtcggcatcgtc

SEQ ID NO: 427792 - DNA, 30 bp, Artificial Sequence
  Synthetic oligonucleotide
cggtatttactctgggtctatttgatcgtc

SEQ ID NO: 427793 - DNA, 30 bp, Artificial Sequence
  Synthetic oligonucleotide
actgctttctgtacggcggaagctatcgtc

SEQ ID NO: 427794 - DNA, 30 bp, Artificial Sequence
  Synthetic oligonucleotide
gagtagagtcaatagacatcgtgtatcgtc

SEQ ID NO: 427795 - DNA, 30 bp, Artificial Sequence
  Synthetic oligonucleotide
gcaatagtgtatcacatcggtgcactcgtc

SEQ ID NO: 427796 - DNA, 30 bp, Artificial Sequence
  Synthetic oligonucleotide
ttgtaagcaagtgagggaaatagactcgtc

SEQ ID NO: 427797 - DNA, 30 bp, Artificial Sequence
  Synthetic oligonucleotide
atattcaggggtatgaaaccatacctcgtc

SEQ ID NO: 427798 - DNA, 30 bp, Artificial Sequence
  Synthetic oligonucleotide
cccatttagcttgtacgtgctgcgctcgtc

SEQ ID NO: 427799 - DNA, 30 bp, Artificial Sequence
  Synthetic oligonucleotide
ttaagatgggtatcggagcgccaagtcgtc

SEQ ID NO: 427800 - DNA, 30 bp, Artificial Sequence
  Synthetic oligonucleotide
ctgttccaatgcgccaccgatttagtcgtc

SEQ ID NO: 427801 - DNA, 30 bp, Artificial Sequence
  Synthetic oligonucleotide
gaaccgagtctgggatagccggtcgtcgtc

SEQ ID NO: 427802 - DNA, 30 bp, Artificial Sequence
  Synthetic oligonucleotide
aactatgagacgcaggattgtcgtgtcgtc

SEQ ID NO: 427803 - DNA, 30 bp, Artificial Sequence
  Synthetic oligonucleotide
tcggcgttcctagattacggagcattcgtc

SEQ ID NO: 427804 - DNA, 30 bp, Artificial Sequence
  Synthetic oligonucleotide
actagatcgcgagctgtccggttcttcgtc

SEQ ID NO: 427805 - DNA, 30 bp, Artificial Sequence
  Synthetic oligonucleotide
aacctgacggtgtaaactatcgcgttcgtc

SEQ ID NO: 427806 - DNA, 30 bp, Artificial Sequence
  Synthetic oligonucleotide
atgggacacgcctaggtgttcgcgttcgtc

SEQ ID NO: 427807 - DNA, 30 bp, Artificial Sequence
  Synthetic oligonucleotide
gctcgtctaactccaggtttttaaaaggtc

SEQ ID NO: 427808 - DNA, 30 bp, Artificial Sequence
  Synthetic oligonucleotide
aagacgcccacagttcgcatattaaaggtc

SEQ ID NO: 427809 - DNA, 30 bp, Artificial Sequence
  Synthetic oligonucleotide
cgattttagtaggctttgacagccaaggtc

SEQ ID NO: 427810 - DNA, 30 bp, Artificial Sequence
  Synthetic oligonucleotide
cccgtcagcgcgcagacgggtccgaaggtc

SEQ ID NO: 427811 - DNA, 30 bp, Artificial Sequence
  Synthetic oligonucleotide
ttctcgtgcgaatcgcgcgcagataaggtc

SEQ ID NO: 427812 - DNA, 30 bp, Artificial Sequence
  Synthetic oligonucleotide
ctctctccaaggaggatgacgacccaggtc

SEQ ID NO: 427813 - DNA, 30 bp, Artificial Sequence
  Synthetic oligonucleotide
tgcgggccgcattgatatctgttccaggtc

SEQ ID NO: 427814 - DNA, 30 bp, Artificial Sequence
  Synthetic oligonucleotide
caccccattcagtgggctgacaggcaggtc

SEQ ID NO: 427815 - DNA, 30 bp, Artificial Sequence
  Synthetic oligonucleotide
atctcgttacaaacgtgaacacggcaggtc

SEQ ID NO: 427816 - DNA, 30 bp, Artificial Sequence
  Synthetic oligonucleotide
ggctcgccctgcatagggcgctcagaggtc

SEQ ID NO: 427817 - DNA, 30 bp, Artificial Sequence
  Synthetic oligonucleotide
tcaaagtatactatttcctgtcgcgaggtc

SEQ ID NO: 427818 - DNA, 30 bp, Artificial Sequence
  Synthetic oligonucleotide
ctcagacagggaatgatgcttcatgaggtc

SEQ ID NO: 427819 - DNA, 30 bp, Artificial Sequence
  Synthetic oligonucleotide
ggtacggcacttggtgggaagattgaggtc

SEQ ID NO: 427820 - DNA, 30 bp, Artificial Sequence
  Synthetic oligonucleotide
gggtccatgccccgtcacgccaactaggtc

SEQ ID NO: 427821 - DNA, 30 bp, Artificial Sequence
  Synthetic oligonucleotide
ccgttacgtcacagacattagcactaggtc

SEQ ID NO: 427822 - DNA, 30 bp, Artificial Sequence
  Synthetic oligonucleotide
agctcccgaggacgcagattatactaggtc

SEQ ID NO: 427823 - DNA, 30 bp, Artificial Sequence
  Synthetic oligonucleotide
gcaacctttaccgagcgtgggaattaggtc

SEQ ID NO: 427824 - DNA, 30 bp, Artificial Sequence
  Synthetic oligonucleotide
cggggcgttttaaacacaacgtattaggtc

SEQ ID NO: 427825 - DNA, 30 bp, Artificial Sequence
  Synthetic oligonucleotide
tactgactccagtgtagttctacttaggtc

SEQ ID NO: 427826 - DNA, 30 bp, Artificial Sequence
  Synthetic oligonucleotide
gatcggggctactcttttaggatttaggtc

SEQ ID NO: 427827 - DNA, 30 bp, Artificial Sequence
  Synthetic oligonucleotide
gctattcaggcatctgcaaggttttaggtc

SEQ ID NO: 427828 - DNA, 30 bp, Artificial Sequence
  Synthetic oligonucleotide
tcatttggcagagtgatgttcagaacggtc

SEQ ID NO: 427829 - DNA, 30 bp, Artificial Sequence
  Synthetic oligonucleotide
atcctctcggactgcagagcgggaacggtc

SEQ ID NO: 427830 - DNA, 30 bp, Artificial Sequence
  Synthetic oligonucleotide
ggcacgagtcgaatgaatcgattaacggtc

SEQ ID NO: 427831 - DNA, 30 bp, Artificial Sequence
  Synthetic oligonucleotide
acttctctctctcttacatacagcacggtc

SEQ ID NO: 427832 - DNA, 30 bp, Artificial Sequence
  Synthetic oligonucleotide
cattcaggttcatcacggtcctatacggtc

SEQ ID NO: 427833 - DNA, 30 bp, Artificial Sequence
  Synthetic oligonucleotide
gtctccatggttacgaggtatgaaccggtc

SEQ ID NO: 427834 - DNA, 30 bp, Artificial Sequence
  Synthetic oligonucleotide
tggcctaggttcgcggaacttggaccggtc

SEQ ID NO: 427835 - DNA, 30 bp, Artificial Sequence
  Synthetic oligonucleotide
tctgtactcacacacaactttttaccggtc

SEQ ID NO: 427836 - DNA, 30 bp, Artificial Sequence
  Synthetic oligonucleotide
cctgtctacggcagtttcgctgacccggtc

SEQ ID NO: 427837 - DNA, 30 bp, Artificial Sequence
  Synthetic oligonucleotide
ggcggaaagtaggtaatgcaagccccggtc

SEQ ID NO: 427838 - DNA, 30 bp, Artificial Sequence
  Synthetic oligonucleotide
ggctgcacagggcaatggtctttcccggtc

SEQ ID NO: 427839 - DNA, 30 bp, Artificial Sequence
  Synthetic oligonucleotide
gtcggagggagattataactcaatccggtc

SEQ ID NO: 427840 - DNA, 30 bp, Artificial Sequence
  Synthetic oligonucleotide
atttcggttcaggaatagctaactccggtc

SEQ ID NO: 427841 - DNA, 30 bp, Artificial Sequence
  Synthetic oligonucleotide
ctaaacctttattgttttaatactccggtc

SEQ ID NO: 427842 - DNA, 30 bp, Artificial Sequence
  Synthetic oligonucleotide
agtgtcgcgcagagagactaacgtccggtc

SEQ ID NO: 427843 - DNA, 30 bp, Artificial Sequence
  Synthetic oligonucleotide
gtacttcacgtatgggtactgggtccggtc

SEQ ID NO: 427844 - DNA, 30 bp, Artificial Sequence
  Synthetic oligonucleotide
taaaaaagcgcataacggtcgcaagcggtc

SEQ ID NO: 427845 - DNA, 30 bp, Artificial Sequence
  Synthetic oligonucleotide
ccaaggtttaatgcaagcccgcacgcggtc

SEQ ID NO: 427846 - DNA, 30 bp, Artificial Sequence
  Synthetic oligonucleotide
tcattgtgtgaatccgaacggaccgcggtc

SEQ ID NO: 427847 - DNA, 30 bp, Artificial Sequence
  Synthetic oligonucleotide
cttccttctcgtcataacgaaccggcggtc

SEQ ID NO: 427848 - DNA, 30 bp, Artificial Sequence
  Synthetic oligonucleotide
gacgcgggagctgtcgtcttacgggcggtc

SEQ ID NO: 427849 - DNA, 30 bp, Artificial Sequence
  Synthetic oligonucleotide
cggacgtttgagtcatgacaaagtgcggtc

SEQ ID NO: 427850 - DNA, 30 bp, Artificial Sequence
  Synthetic oligonucleotide
gtcttatgatgaagattttcagttgcggtc

SEQ ID NO: 427851 - DNA, 30 bp, Artificial Sequence
  Synthetic oligonucleotide
gcgtacggacaaaggcaaaaggtatcggtc

SEQ ID NO: 427852 - DNA, 30 bp, Artificial Sequence
  Synthetic oligonucleotide
gttaaatgcaattgttcgttttcctcggtc

SEQ ID NO: 427853 - DNA, 30 bp, Artificial Sequence
  Synthetic oligonucleotide
gggaccatgtcgcggtcttcggagtcggtc

SEQ ID NO: 427854 - DNA, 30 bp, Artificial Sequence
  Synthetic oligonucleotide
tacagagtggtgccgggaactccttcggtc

SEQ ID NO: 427855 - DNA, 30 bp, Artificial Sequence
  Synthetic oligonucleotide
gatgtaaacgctgggtaacccgtaagggtc

SEQ ID NO: 427856 - DNA, 30 bp, Artificial Sequence
  Synthetic oligonucleotide
gtatttcaggaaaaggagccgtcgagggtc

SEQ ID NO: 427857 - DNA, 30 bp, Artificial Sequence
  Synthetic oligonucleotide
ggttatgcacgagtccatgctcggagggtc

SEQ ID NO: 427858 - DNA, 30 bp, Artificial Sequence
  Synthetic oligonucleotide
cccgcgccagtttgcaataattggagggtc

SEQ ID NO: 427859 - DNA, 30 bp, Artificial Sequence
  Synthetic oligonucleotide
agctcgcacggagcctgtgtcgtgagggtc

SEQ ID NO: 427860 - DNA, 30 bp, Artificial Sequence
  Synthetic oligonucleotide
gaaagattttctgtgaacgctcgtagggtc

SEQ ID NO: 427861 - DNA, 30 bp, Artificial Sequence
  Synthetic oligonucleotide
ggcaaacctgcgggctgctgatgtagggtc

SEQ ID NO: 427862 - DNA, 30 bp, Artificial Sequence
  Synthetic oligonucleotide
aattttatgtaaggataacggcttagggtc

SEQ ID NO: 427863 - DNA, 30 bp, Artificial Sequence
  Synthetic oligonucleotide
tagggctttccatactggtggagacgggtc

SEQ ID NO: 427864 - DNA, 30 bp, Artificial Sequence
  Synthetic oligonucleotide
cggcaggtataccgactcttcatacgggtc

SEQ ID NO: 427865 - DNA, 30 bp, Artificial Sequence
  Synthetic oligonucleotide
ctaccttattgacacgtgctttagcgggtc

SEQ ID NO: 427866 - DNA, 30 bp, Artificial Sequence
  Synthetic oligonucleotide
tttcatatgaaagatgacgggtcgcgggtc

SEQ ID NO: 427867 - DNA, 30 bp, Artificial Sequence
  Synthetic oligonucleotide
gtaacgggcggttctagggggcggcgggtc

SEQ ID NO: 427868 - DNA, 30 bp, Artificial Sequence
  Synthetic oligonucleotide
gcgagcggcaatgcgccgtcctttcgggtc

SEQ ID NO: 427869 - DNA, 30 bp, Artificial Sequence
  Synthetic oligonucleotide
agagaattcttagatggagtccggggggtc

SEQ ID NO: 427870 - DNA, 30 bp, Artificial Sequence
  Synthetic oligonucleotide
gggtacgattgtgacacccttcggggggtc

SEQ ID NO: 427871 - DNA, 30 bp, Artificial Sequence
  Synthetic oligonucleotide
cagagtatttcacagcctttatggggggtc

SEQ ID NO: 427872 - DNA, 30 bp, Artificial Sequence
  Synthetic oligonucleotide
tctctatttgatgacatctcgttgggggtc

SEQ ID NO: 427873 - DNA, 30 bp, Artificial Sequence
  Synthetic oligonucleotide
gttttaccggaccggtaatactaatgggtc

SEQ ID NO: 427874 - DNA, 30 bp, Artificial Sequence
  Synthetic oligonucleotide
cttccgcaagccgatcgataacgatgggtc

SEQ ID NO: 427875 - DNA, 30 bp, Artificial Sequence
  Synthetic oligonucleotide
ggcctccagctggtacccatatactgggtc

SEQ ID NO: 427876 - DNA, 30 bp, Artificial Sequence
  Synthetic oligonucleotide
acagcccaggagtaggtgagaccctgggtc

SEQ ID NO: 427877 - DNA, 30 bp, Artificial Sequence
  Synthetic oligonucleotide
gaatctgccgtgctgttcactaggtgggtc

SEQ ID NO: 427878 - DNA, 30 bp, Artificial Sequence
  Synthetic oligonucleotide
aagtgccagacagcgcttcgcgtgtgggtc

SEQ ID NO: 427879 - DNA, 30 bp, Artificial Sequence
  Synthetic oligonucleotide
tgcaaccattaccgcaatttggaaatggtc

SEQ ID NO: 427880 - DNA, 30 bp, Artificial Sequence
  Synthetic oligonucleotide
gaaccacgtattctaagtttttgcatggtc

SEQ ID NO: 427881 - DNA, 30 bp, Artificial Sequence
  Synthetic oligonucleotide
cttcggtagtatatgaccgcgacgatggtc

SEQ ID NO: 427882 - DNA, 30 bp, Artificial Sequence
  Synthetic oligonucleotide
atactacgtgctaattcagaacctatggtc

SEQ ID NO: 427883 - DNA, 30 bp, Artificial Sequence
  Synthetic oligonucleotide
caatgtttcattgaagagaaatgtatggtc

SEQ ID NO: 427884 - DNA, 30 bp, Artificial Sequence
  Synthetic oligonucleotide
aagtgatgtgattgtttatataaactggtc

SEQ ID NO: 427885 - DNA, 30 bp, Artificial Sequence
  Synthetic oligonucleotide
agattcagagacgagcggcccatactggtc

SEQ ID NO: 427886 - DNA, 30 bp, Artificial Sequence
  Synthetic oligonucleotide
caagtgtaatcctccgcgttactactggtc

SEQ ID NO: 427887 - DNA, 30 bp, Artificial Sequence
  Synthetic oligonucleotide
gcaaagctagctgcgtttaaggtactggtc

SEQ ID NO: 427888 - DNA, 30 bp, Artificial Sequence
  Synthetic oligonucleotide
caaggcgcataataaaaccatctcctggtc

SEQ ID NO: 427889 - DNA, 30 bp, Artificial Sequence
  Synthetic oligonucleotide
atcacgctgaatatcatagtccccgtggtc

SEQ ID NO: 427890 - DNA, 30 bp, Artificial Sequence
  Synthetic oligonucleotide
agttcctgggacacgccaccttccgtggtc

SEQ ID NO: 427891 - DNA, 30 bp, Artificial Sequence
  Synthetic oligonucleotide
tttcaattaatccggactttcgcggtggtc

SEQ ID NO: 427892 - DNA, 30 bp, Artificial Sequence
  Synthetic oligonucleotide
aaagaaaatatgctagtaggtttggtggtc

SEQ ID NO: 427893 - DNA, 30 bp, Artificial Sequence
  Synthetic oligonucleotide
gcagtgttgaaccccattagataattggtc

SEQ ID NO: 427894 - DNA, 30 bp, Artificial Sequence
  Synthetic oligonucleotide
tgccgtgtacatgcaacaagaccattggtc

SEQ ID NO: 427895 - DNA, 30 bp, Artificial Sequence
  Synthetic oligonucleotide
tatcagctttggggtactgtagtattggtc

SEQ ID NO: 427896 - DNA, 30 bp, Artificial Sequence
  Synthetic oligonucleotide
taaatagtgagagttgtctacaccttggtc

SEQ ID NO: 427897 - DNA, 30 bp, Artificial Sequence
  Synthetic oligonucleotide
tattaaattagacctgcacgttttttggtc

SEQ ID NO: 427898 - DNA, 30 bp, Artificial Sequence
  Synthetic oligonucleotide
actagtccagcggtagttcgcagaaatgtc

SEQ ID NO: 427899 - DNA, 30 bp, Artificial Sequence
  Synthetic oligonucleotide
ccagtttttcgagcaccacaacgaaatgtc

SEQ ID NO: 427900 - DNA, 30 bp, Artificial Sequence
  Synthetic oligonucleotide
cgccgtgcgcctggcgctcagaagaatgtc

SEQ ID NO: 427901 - DNA, 30 bp, Artificial Sequence
  Synthetic oligonucleotide
tacgaggtcgggagaatttatttgaatgtc

SEQ ID NO: 427902 - DNA, 30 bp, Artificial Sequence
  Synthetic oligonucleotide
gtttttccaaacgagagatttcataatgtc

SEQ ID NO: 427903 - DNA, 30 bp, Artificial Sequence
  Synthetic oligonucleotide
aaagcacataggtttcatacatataatgtc

SEQ ID NO: 427904 - DNA, 30 bp, Artificial Sequence
  Synthetic oligonucleotide
cacatcagataacgtgttgttcggcatgtc

SEQ ID NO: 427905 - DNA, 30 bp, Artificial Sequence
  Synthetic oligonucleotide
tcatgatagggcccccgatggatgcatgtc

SEQ ID NO: 427906 - DNA, 30 bp, Artificial Sequence
  Synthetic oligonucleotide
atcgctcggggccagagagatctgcatgtc

SEQ ID NO: 427907 - DNA, 30 bp, Artificial Sequence
  Synthetic oligonucleotide
gcgacgcatcggcattcaggagtgcatgtc

SEQ ID NO: 427908 - DNA, 30 bp, Artificial Sequence
  Synthetic oligonucleotide
ctctgcagccgacataatcgcgatcatgtc

SEQ ID NO: 427909 - DNA, 30 bp, Artificial Sequence
  Synthetic oligonucleotide
tgtaatataaagattgtctaggcggatgtc

SEQ ID NO: 427910 - DNA, 30 bp, Artificial Sequence
  Synthetic oligonucleotide
aagtttagtcagggaatcgaaactgatgtc

SEQ ID NO: 427911 - DNA, 30 bp, Artificial Sequence
  Synthetic oligonucleotide
cgagactttacgacgcgtagttttgatgtc

SEQ ID NO: 427912 - DNA, 30 bp, Artificial Sequence
  Synthetic oligonucleotide
tatcaatgcctcagatttgatttatatgtc

SEQ ID NO: 427913 - DNA, 30 bp, Artificial Sequence
  Synthetic oligonucleotide
cagcaggattactcagtcaaggcctatgtc

SEQ ID NO: 427914 - DNA, 30 bp, Artificial Sequence
  Synthetic oligonucleotide
attctctagtcagggtacctttcgtatgtc

SEQ ID NO: 427915 - DNA, 30 bp, Artificial Sequence
  Synthetic oligonucleotide
atgctccgcaggcccattgagatgtatgtc

SEQ ID NO: 427916 - DNA, 30 bp, Artificial Sequence
  Synthetic oligonucleotide
gtacctgttacatatgcttggccttatgtc

SEQ ID NO: 427917 - DNA, 30 bp, Artificial Sequence
  Synthetic oligonucleotide
tcgttctatgggacgggaacgatttatgtc

SEQ ID NO: 427918 - DNA, 30 bp, Artificial Sequence
  Synthetic oligonucleotide
gccggagggacccggagggcggtttatgtc

SEQ ID NO: 427919 - DNA, 30 bp, Artificial Sequence
  Synthetic oligonucleotide
aggcatgttggcactaggtttttgactgtc

SEQ ID NO: 427920 - DNA, 30 bp, Artificial Sequence
  Synthetic oligonucleotide
gcaggtagcgcaaggggcgttgaccctgtc

SEQ ID NO: 427921 - DNA, 30 bp, Artificial Sequence
  Synthetic oligonucleotide
atttgatgtgctacgctttcatcgcctgtc

SEQ ID NO: 427922 - DNA, 30 bp, Artificial Sequence
  Synthetic oligonucleotide
gttcaggtagtaggcgtagaaaggcctgtc

SEQ ID NO: 427923 - DNA, 30 bp, Artificial Sequence
  Synthetic oligonucleotide
atgcacacagagtcccgttaggatcctgtc

SEQ ID NO: 427924 - DNA, 30 bp, Artificial Sequence
  Synthetic oligonucleotide
tatcttagttcaagacgggtagctcctgtc

SEQ ID NO: 427925 - DNA, 30 bp, Artificial Sequence
  Synthetic oligonucleotide
tctcttctgtagctggacgtatccgctgtc

SEQ ID NO: 427926 - DNA, 30 bp, Artificial Sequence
  Synthetic oligonucleotide
aggttacggccgtttagcaatcgggctgtc

SEQ ID NO: 427927 - DNA, 30 bp, Artificial Sequence
  Synthetic oligonucleotide
tctatctaatgtctgtaaatgggggctgtc

SEQ ID NO: 427928 - DNA, 30 bp, Artificial Sequence
  Synthetic oligonucleotide
tcctacaggagctctcaggcaatggctgtc

SEQ ID NO: 427929 - DNA, 30 bp, Artificial Sequence
  Synthetic oligonucleotide
ccacaccaatctcttacgtggattgctgtc

SEQ ID NO: 427930 - DNA, 30 bp, Artificial Sequence
  Synthetic oligonucleotide
actcaggtaaaaaaattcaattcatctgtc

SEQ ID NO: 427931 - DNA, 30 bp, Artificial Sequence
  Synthetic oligonucleotide
tcatttcccacattcaacccattgtctgtc

SEQ ID NO: 427932 - DNA, 30 bp, Artificial Sequence
  Synthetic oligonucleotide
cccaaggagtcgacaactgattaaagtgtc

SEQ ID NO: 427933 - DNA, 30 bp, Artificial Sequence
  Synthetic oligonucleotide
aacttggaacagggggcgtcacacagtgtc

SEQ ID NO: 427934 - DNA, 30 bp, Artificial Sequence
  Synthetic oligonucleotide
caaactagtcagaccggacctaccagtgtc

SEQ ID NO: 427935 - DNA, 30 bp, Artificial Sequence
  Synthetic oligonucleotide
aatcgcagcagctcgagagtcagcagtgtc

SEQ ID NO: 427936 - DNA, 30 bp, Artificial Sequence
  Synthetic oligonucleotide
acagcatgatttggcgaccgctatagtgtc

SEQ ID NO: 427937 - DNA, 30 bp, Artificial Sequence
  Synthetic oligonucleotide
ccatatgaccttatggaggttggtagtgtc

SEQ ID NO: 427938 - DNA, 30 bp, Artificial Sequence
  Synthetic oligonucleotide
tccataagccgcagttgttcgcaacgtgtc

SEQ ID NO: 427939 - DNA, 30 bp, Artificial Sequence
  Synthetic oligonucleotide
tggaccgagttcactttaaaggcccgtgtc

SEQ ID NO: 427940 - DNA, 30 bp, Artificial Sequence
  Synthetic oligonucleotide
cggtgcgatagaattcttaagtcccgtgtc

SEQ ID NO: 427941 - DNA, 30 bp, Artificial Sequence
  Synthetic oligonucleotide
cggttgtggtataggaccctgcgccgtgtc

SEQ ID NO: 427942 - DNA, 30 bp, Artificial Sequence
  Synthetic oligonucleotide
tatggagtaattgattgccaccggcgtgtc

SEQ ID NO: 427943 - DNA, 30 bp, Artificial Sequence
  Synthetic oligonucleotide
acgattatttcgcaaatgtagcatcgtgtc

SEQ ID NO: 427944 - DNA, 30 bp, Artificial Sequence
  Synthetic oligonucleotide
gttggatatagggaacgggcattaggtgtc

SEQ ID NO: 427945 - DNA, 30 bp, Artificial Sequence
  Synthetic oligonucleotide
gcatctgggggggtctcagggtccggtgtc

SEQ ID NO: 427946 - DNA, 30 bp, Artificial Sequence
  Synthetic oligonucleotide
gtaaacacacgataacggcgcacgggtgtc

SEQ ID NO: 427947 - DNA, 30 bp, Artificial Sequence
  Synthetic oligonucleotide
ctcttgcgtaccccagaaagtcctggtgtc

SEQ ID NO: 427948 - DNA, 30 bp, Artificial Sequence
  Synthetic oligonucleotide
gtcctgatttaatcggacggtcgatgtgtc

SEQ ID NO: 427949 - DNA, 30 bp, Artificial Sequence
  Synthetic oligonucleotide
cgccgcttacggggttgacgcgtgtgtgtc

SEQ ID NO: 427950 - DNA, 30 bp, Artificial Sequence
  Synthetic oligonucleotide
atgtatagcttaaggttatcgtaaattgtc

SEQ ID NO: 427951 - DNA, 30 bp, Artificial Sequence
  Synthetic oligonucleotide
agtgagtgtttcgttagatcgaagattgtc

SEQ ID NO: 427952 - DNA, 30 bp, Artificial Sequence
  Synthetic oligonucleotide
catgttgtaagtttgaggtgggtgattgtc

SEQ ID NO: 427953 - DNA, 30 bp, Artificial Sequence
  Synthetic oligonucleotide
cgcctagcacttccagcggaacctattgtc

SEQ ID NO: 427954 - DNA, 30 bp, Artificial Sequence
  Synthetic oligonucleotide
ctccatatacccgtgccctaatttattgtc

SEQ ID NO: 427955 - DNA, 30 bp, Artificial Sequence
  Synthetic oligonucleotide
ctaacatcgtgggtgtcggaataacttgtc

SEQ ID NO: 427956 - DNA, 30 bp, Artificial Sequence
  Synthetic oligonucleotide
gtttggaagtattggcgcatataccttgtc

SEQ ID NO: 427957 - DNA, 30 bp, Artificial Sequence
  Synthetic oligonucleotide
attggattggaggaaattttttcccttgtc

SEQ ID NO: 427958 - DNA, 30 bp, Artificial Sequence
  Synthetic oligonucleotide
tctgcttggcctggttgccaaggccttgtc

SEQ ID NO: 427959 - DNA, 30 bp, Artificial Sequence
  Synthetic oligonucleotide
gagtccactatgcttttcgcattccttgtc

SEQ ID NO: 427960 - DNA, 30 bp, Artificial Sequence
  Synthetic oligonucleotide
atacacttccgcggcggaggtaagcttgtc

SEQ ID NO: 427961 - DNA, 30 bp, Artificial Sequence
  Synthetic oligonucleotide
tgcgacatgcagcagcttctagagcttgtc

SEQ ID NO: 427962 - DNA, 30 bp, Artificial Sequence
  Synthetic oligonucleotide
gggcagggtcggacaacgggagggcttgtc

SEQ ID NO: 427963 - DNA, 30 bp, Artificial Sequence
  Synthetic oligonucleotide
gagtgtaacataccccgatcttctcttgtc

SEQ ID NO: 427964 - DNA, 30 bp, Artificial Sequence
  Synthetic oligonucleotide
tgttgaacgtccctggccatgtgtcttgtc

SEQ ID NO: 427965 - DNA, 30 bp, Artificial Sequence
  Synthetic oligonucleotide
ggaagaagatcctgccctcggccagttgtc

SEQ ID NO: 427966 - DNA, 30 bp, Artificial Sequence
  Synthetic oligonucleotide
gattttactcaatgaagtatagccgttgtc

SEQ ID NO: 427967 - DNA, 30 bp, Artificial Sequence
  Synthetic oligonucleotide
gccgacggccgatcgtccccgtaggttgtc

SEQ ID NO: 427968 - DNA, 30 bp, Artificial Sequence
  Synthetic oligonucleotide
aagtgcaacttattagatataagggttgtc

SEQ ID NO: 427969 - DNA, 30 bp, Artificial Sequence
  Synthetic oligonucleotide
ggtgcgtgtggggttcttttttgggttgtc

SEQ ID NO: 427970 - DNA, 30 bp, Artificial Sequence
  Synthetic oligonucleotide
cagtgctgacgaactcgccgtatggttgtc

SEQ ID NO: 427971 - DNA, 30 bp, Artificial Sequence
  Synthetic oligonucleotide
tgatgttaccaatttcgcgggctggttgtc

SEQ ID NO: 427972 - DNA, 30 bp, Artificial Sequence
  Synthetic oligonucleotide
aatggtacatgtagtacgatagtggttgtc

SEQ ID NO: 427973 - DNA, 30 bp, Artificial Sequence
  Synthetic oligonucleotide
ttaagaaactatgcagcatacgatgttgtc

SEQ ID NO: 427974 - DNA, 30 bp, Artificial Sequence
  Synthetic oligonucleotide
agaatttgagtggggcgcacacttgttgtc

SEQ ID NO: 427975 - DNA, 30 bp, Artificial Sequence
  Synthetic oligonucleotide
cgcagaatccaaaagttatcgtactttgtc

SEQ ID NO: 427976 - DNA, 30 bp, Artificial Sequence
  Synthetic oligonucleotide
gaaccccaaatctgcaggcgttgctttgtc

SEQ ID NO: 427977 - DNA, 30 bp, Artificial Sequence
  Synthetic oligonucleotide
gctcaccctaacgcggcgggcttctttgtc

SEQ ID NO: 427978 - DNA, 30 bp, Artificial Sequence
  Synthetic oligonucleotide
catgcatctatacatcatgctaattttgtc

SEQ ID NO: 427979 - DNA, 30 bp, Artificial Sequence
  Synthetic oligonucleotide
acttatggcacttataatgccagttttgtc

SEQ ID NO: 427980 - DNA, 30 bp, Artificial Sequence
  Synthetic oligonucleotide
aaagttgctaggtagcattcacgttttgtc

SEQ ID NO: 427981 - DNA, 30 bp, Artificial Sequence
  Synthetic oligonucleotide
ctgtagcgcaagagaagcagctgttttgtc

SEQ ID NO: 427982 - DNA, 30 bp, Artificial Sequence
  Synthetic oligonucleotide
gcggatttttcatcttaacggggaaaattc

SEQ ID NO: 427983 - DNA, 30 bp, Artificial Sequence
  Synthetic oligonucleotide
gtcatataaagggggctgactaacaaattc

SEQ ID NO: 427984 - DNA, 30 bp, Artificial Sequence
  Synthetic oligonucleotide
tcaagcagctgcgcatgcctagggaaattc

SEQ ID NO: 427985 - DNA, 30 bp, Artificial Sequence
  Synthetic oligonucleotide
aatgtaccggacagcgataatagtaaattc

SEQ ID NO: 427986 - DNA, 30 bp, Artificial Sequence
  Synthetic oligonucleotide
attatttttcgcccgaccaggggtaaattc

SEQ ID NO: 427987 - DNA, 30 bp, Artificial Sequence
  Synthetic oligonucleotide
attaccatgggagatgcatactgtaaattc

SEQ ID NO: 427988 - DNA, 30 bp, Artificial Sequence
  Synthetic oligonucleotide
gaaaggtagagaccatggaggaaacaattc

SEQ ID NO: 427989 - DNA, 30 bp, Artificial Sequence
  Synthetic oligonucleotide
gcattccgtgaaacgccgtataaacaattc

SEQ ID NO: 427990 - DNA, 30 bp, Artificial Sequence
  Synthetic oligonucleotide
aaaaccatttcttgttctatttcacaattc

SEQ ID NO: 427991 - DNA, 30 bp, Artificial Sequence
  Synthetic oligonucleotide
acctttaggcacggaaggcaatagcaattc

SEQ ID NO: 427992 - DNA, 30 bp, Artificial Sequence
  Synthetic oligonucleotide
ctctgatgtgcagggaagtcctagcaattc

SEQ ID NO: 427993 - DNA, 30 bp, Artificial Sequence
  Synthetic oligonucleotide
gaatttaccaacggagatgtttggcaattc

SEQ ID NO: 427994 - DNA, 30 bp, Artificial Sequence
  Synthetic oligonucleotide
ggcgcggctgcgcactaggggattcaattc

SEQ ID NO: 427995 - DNA, 30 bp, Artificial Sequence
  Synthetic oligonucleotide
tcttccgtacgtagagggagatttcaattc

SEQ ID NO: 427996 - DNA, 30 bp, Artificial Sequence
  Synthetic oligonucleotide
cgatgttacgccgccaaacaccgagaattc

SEQ ID NO: 427997 - DNA, 30 bp, Artificial Sequence
  Synthetic oligonucleotide
tctgaagcgctggacagctttcgagaattc

SEQ ID NO: 427998 - DNA, 30 bp, Artificial Sequence
  Synthetic oligonucleotide
cgcgcataaatgcgcttccgcatagaattc

SEQ ID NO: 427999 - DNA, 30 bp, Artificial Sequence
  Synthetic oligonucleotide
cccgccttcataaaaactgttagcgaattc

SEQ ID NO: 428000 - DNA, 30 bp, Artificial Sequence
  Synthetic oligonucleotide
tttaaggatcagacgcaccctgcggaattc

SEQ ID NO: 428001 - DNA, 30 bp, Artificial Sequence
  Synthetic oligonucleotide
gacagttgtccgatgggtgtttcggaattc

SEQ ID NO: 428002 - DNA, 30 bp, Artificial Sequence
  Synthetic oligonucleotide
attgtgaacaaaagtttcgcaaatgaattc

SEQ ID NO: 428003 - DNA, 30 bp, Artificial Sequence
  Synthetic oligonucleotide
cgctctactttttaagagtagcgtgaattc

SEQ ID NO: 428004 - DNA, 30 bp, Artificial Sequence
  Synthetic oligonucleotide
acactaataggagtgcaggaagaataattc

SEQ ID NO: 428005 - DNA, 30 bp, Artificial Sequence
  Synthetic oligonucleotide
tgaattggaagttcgagcgggagaacattc

SEQ ID NO: 428006 - DNA, 30 bp, Artificial Sequence
  Synthetic oligonucleotide
tggtaataccgctagggttaagtaacattc

SEQ ID NO: 428007 - DNA, 30 bp, Artificial Sequence
  Synthetic oligonucleotide
ggccttggtaacttatcgaagaacacattc

SEQ ID NO: 428008 - DNA, 30 bp, Artificial Sequence
  Synthetic oligonucleotide
ggctatacggaagggacccttctcacattc

SEQ ID NO: 428009 - DNA, 30 bp, Artificial Sequence
  Synthetic oligonucleotide
ctacatgatgcctatagcatgttcacattc

SEQ ID NO: 428010 - DNA, 30 bp, Artificial Sequence
  Synthetic oligonucleotide
gatttacggaccgtaatgacctagacattc

SEQ ID NO: 428011 - DNA, 30 bp, Artificial Sequence
  Synthetic oligonucleotide
tctttgggctagaatgatgacgggacattc

SEQ ID NO: 428012 - DNA, 30 bp, Artificial Sequence
  Synthetic oligonucleotide
atgctccgtcgaatcgcaagcgctacattc

SEQ ID NO: 428013 - DNA, 30 bp, Artificial Sequence
  Synthetic oligonucleotide
aatttatcgttaatcgtgaaaagtacattc

SEQ ID NO: 428014 - DNA, 30 bp, Artificial Sequence
  Synthetic oligonucleotide
atgctctttaccaagggactgagtacattc

SEQ ID NO: 428015 - DNA, 30 bp, Artificial Sequence
  Synthetic oligonucleotide
gggagctatctggggacggacttcccattc

SEQ ID NO: 428016 - DNA, 30 bp, Artificial Sequence
  Synthetic oligonucleotide
ggagctaggagcgggagctatgggccattc

SEQ ID NO: 428017 - DNA, 30 bp, Artificial Sequence
  Synthetic oligonucleotide
catccaatcctgggggccttcgccgcattc

SEQ ID NO: 428018 - DNA, 30 bp, Artificial Sequence
  Synthetic oligonucleotide
cagaatgcgagtggattttgcacggcattc

SEQ ID NO: 428019 - DNA, 30 bp, Artificial Sequence
  Synthetic oligonucleotide
aatcaaatcagccggtactgctcggcattc

SEQ ID NO: 428020 - DNA, 30 bp, Artificial Sequence
  Synthetic oligonucleotide
gaaaggccgtcaaccaagcctggggcattc

SEQ ID NO: 428021 - DNA, 30 bp, Artificial Sequence
  Synthetic oligonucleotide
aggctcgagtagaatgaatcactggcattc

SEQ ID NO: 428022 - DNA, 30 bp, Artificial Sequence
  Synthetic oligonucleotide
cggagactgattccgcagttattggcattc

SEQ ID NO: 428023 - DNA, 30 bp, Artificial Sequence
  Synthetic oligonucleotide
tctacgacaggccccggcgaagatgcattc

SEQ ID NO: 428024 - DNA, 30 bp, Artificial Sequence
  Synthetic oligonucleotide
tcgccttacttggatcgttatcgtgcattc

SEQ ID NO: 428025 - DNA, 30 bp, Artificial Sequence
  Synthetic oligonucleotide
ggggtaattccagggccgactttctcattc

SEQ ID NO: 428026 - DNA, 30 bp, Artificial Sequence
  Synthetic oligonucleotide
agaaggatgtggtgtctcaccccgtcattc

SEQ ID NO: 428027 - DNA, 30 bp, Artificial Sequence
  Synthetic oligonucleotide
ggatacccccaacctcaggatatgtcattc

SEQ ID NO: 428028 - DNA, 30 bp, Artificial Sequence
  Synthetic oligonucleotide
gtatattttgctaaggtaaataaaagattc

SEQ ID NO: 428029 - DNA, 30 bp, Artificial Sequence
  Synthetic oligonucleotide
ttatatagagatccgggggcgggaagattc

SEQ ID NO: 428030 - DNA, 30 bp, Artificial Sequence
  Synthetic oligonucleotide
cccggcttgctgtcatagaatataagattc

SEQ ID NO: 428031 - DNA, 30 bp, Artificial Sequence
  Synthetic oligonucleotide
tgattgacgcgaatttgaatggagagattc

SEQ ID NO: 428032 - DNA, 30 bp, Artificial Sequence
  Synthetic oligonucleotide
ataggcgataggggtatcccattgagattc

SEQ ID NO: 428033 - DNA, 30 bp, Artificial Sequence
  Synthetic oligonucleotide
cgtgtgacgtcgctgaaccattatagattc

SEQ ID NO: 428034 - DNA, 30 bp, Artificial Sequence
  Synthetic oligonucleotide
tagattctcatataagagagttatagattc

SEQ ID NO: 428035 - DNA, 30 bp, Artificial Sequence
  Synthetic oligonucleotide
cttctccggattagctataatattagattc

SEQ ID NO: 428036 - DNA, 30 bp, Artificial Sequence
  Synthetic oligonucleotide
aagggttttagatgcagtactcaacgattc

SEQ ID NO: 428037 - DNA, 30 bp, Artificial Sequence
  Synthetic oligonucleotide
cagaaagctgcgtgtgtcccaatacgattc

SEQ ID NO: 428038 - DNA, 30 bp, Artificial Sequence
  Synthetic oligonucleotide
gactgtttaggaaaagtatgggcccgattc

SEQ ID NO: 428039 - DNA, 30 bp, Artificial Sequence
  Synthetic oligonucleotide
tgaagcgatcaggaattatacctgcgattc

SEQ ID NO: 428040 - DNA, 30 bp, Artificial Sequence
  Synthetic oligonucleotide
aatgtcgctgcatgctctcccttgcgattc

SEQ ID NO: 428041 - DNA, 30 bp, Artificial Sequence
  Synthetic oligonucleotide
gacatatagtaattgcacgaagttcgattc

SEQ ID NO: 428042 - DNA, 30 bp, Artificial Sequence
  Synthetic oligonucleotide
tgggtcgagcggccacggaacagaggattc

SEQ ID NO: 428043 - DNA, 30 bp, Artificial Sequence
  Synthetic oligonucleotide
attgtacgcgtgttgtgacggggaggattc

SEQ ID NO: 428044 - DNA, 30 bp, Artificial Sequence
  Synthetic oligonucleotide
aggtcggagttcaagaaacgttacggattc

SEQ ID NO: 428045 - DNA, 30 bp, Artificial Sequence
  Synthetic oligonucleotide
gcacgtcttttttcatctgccaccggattc

SEQ ID NO: 428046 - DNA, 30 bp, Artificial Sequence
  Synthetic oligonucleotide
taatttaaaaactacactaaatgcggattc

SEQ ID NO: 428047 - DNA, 30 bp, Artificial Sequence
  Synthetic oligonucleotide
gttctgcaggcagtactaaccatcggattc

SEQ ID NO: 428048 - DNA, 30 bp, Artificial Sequence
  Synthetic oligonucleotide
gatgtttcggaagtttgcttatagggattc

SEQ ID NO: 428049 - DNA, 30 bp, Artificial Sequence
  Synthetic oligonucleotide
gccgtctagggctcggctacaaggggattc

SEQ ID NO: 428050 - DNA, 31 bp, Artificial Sequence
  Synthetic oligonucleotide
tttcaggggttagaccccatggatgggattc

SEQ ID NO: 428051 - DNA, 31 bp, Artificial Sequence
  Synthetic oligonucleotide
acagctcggactcagacttagctatggattc

SEQ ID NO: 428052 - DNA, 30 bp, Artificial Sequence
  Synthetic oligonucleotide
aatcgtaatgcgtcaactggcgttggattc

SEQ ID NO: 428053 - DNA, 30 bp, Artificial Sequence
  Synthetic oligonucleotide
gggtacgattcgtagagtaattactgattc

SEQ ID NO: 428054 - DNA, 30 bp, Artificial Sequence
  Synthetic oligonucleotide
attacaaaaaccgttctgtctagttgattc

SEQ ID NO: 428055 - DNA, 30 bp, Artificial Sequence
  Synthetic oligonucleotide
accagggtgaagttcgggggtcaaatattc

SEQ ID NO: 428056 - DNA, 30 bp, Artificial Sequence
  Synthetic oligonucleotide
gtgtcttgatgagtcgcgggtccaatattc

SEQ ID NO: 428057 - DNA, 30 bp, Artificial Sequence
  Synthetic oligonucleotide
gccgaggacgacaattcggaagcaatattc

SEQ ID NO: 428058 - DNA, 30 bp, Artificial Sequence
  Synthetic oligonucleotide
ctcacgcctagttttatagccaacatattc

SEQ ID NO: 428059 - DNA, 30 bp, Artificial Sequence
  Synthetic oligonucleotide
gagaacggtttaactggcaaaatcatattc

SEQ ID NO: 428060 - DNA, 30 bp, Artificial Sequence
  Synthetic oligonucleotide
atagacttcttagtaaagggcctcatattc

SEQ ID NO: 428061 - DNA, 30 bp, Artificial Sequence
  Synthetic oligonucleotide
agtagctatacttatcgggtaatgatattc

SEQ ID NO: 428062 - DNA, 30 bp, Artificial Sequence
  Synthetic oligonucleotide
atcactctgtgataacgtcgtaatatattc

SEQ ID NO: 428063 - DNA, 30 bp, Artificial Sequence
  Synthetic oligonucleotide
cggtgtcggcttaacgtcatgcgactattc

SEQ ID NO: 428064 - DNA, 30 bp, Artificial Sequence
  Synthetic oligonucleotide
cgcaatccttgatagacatttggactattc

SEQ ID NO: 428065 - DNA, 30 bp, Artificial Sequence
  Synthetic oligonucleotide
acatgggatgatgttccgtccatactattc

SEQ ID NO: 428066 - DNA, 30 bp, Artificial Sequence
  Synthetic oligonucleotide
catacaataattactacatggtggctattc

SEQ ID NO: 428067 - DNA, 30 bp, Artificial Sequence
  Synthetic oligonucleotide
gggcaaggatattgggaacgcctgctattc

SEQ ID NO: 428068 - DNA, 30 bp, Artificial Sequence
  Synthetic oligonucleotide
cccctaggggagatagggtcacatctattc

SEQ ID NO: 428069 - DNA, 30 bp, Artificial Sequence
  Synthetic oligonucleotide
cataatatagtatgataataagcagtattc

SEQ ID NO: 428070 - DNA, 30 bp, Artificial Sequence
  Synthetic oligonucleotide
cacgagaaggttgagttgcaaagggtattc

SEQ ID NO: 428071 - DNA, 30 bp, Artificial Sequence
  Synthetic oligonucleotide
acagcgactgttcggtcatgaagggtattc

SEQ ID NO: 428072 - DNA, 30 bp, Artificial Sequence
  Synthetic oligonucleotide
gtaccagtacatgcatgtcgtgatgtattc

SEQ ID NO: 428073 - DNA, 30 bp, Artificial Sequence
  Synthetic oligonucleotide
tcgcctgatgcaagaccgctatctgtattc

SEQ ID NO: 428074 - DNA, 30 bp, Artificial Sequence
  Synthetic oligonucleotide
agaagctgaaaggcatatcggagcttattc

SEQ ID NO: 428075 - DNA, 30 bp, Artificial Sequence
  Synthetic oligonucleotide
tacaccattaaatttgcagggcgcttattc

SEQ ID NO: 428076 - DNA, 30 bp, Artificial Sequence
  Synthetic oligonucleotide
cattacgcttcgtgagcttatttcttattc

SEQ ID NO: 428077 - DNA, 30 bp, Artificial Sequence
  Synthetic oligonucleotide
tccgagtggtagcgtaccgtttatttattc

SEQ ID NO: 428078 - DNA, 30 bp, Artificial Sequence
  Synthetic oligonucleotide
atcctttgaatcaagaggaacgctttattc

SEQ ID NO: 428079 - DNA, 30 bp, Artificial Sequence
  Synthetic oligonucleotide
agacatacatctgcgtataggcgtttattc

SEQ ID NO: 428080 - DNA, 30 bp, Artificial Sequence
  Synthetic oligonucleotide
caccccctgaatatctagattcgtttattc

SEQ ID NO: 428081 - DNA, 30 bp, Artificial Sequence
  Synthetic oligonucleotide
cccattagtgggcatacttgtaacaacttc

SEQ ID NO: 428082 - DNA, 30 bp, Artificial Sequence
  Synthetic oligonucleotide
tgctttaccgttatttgcaatattaacttc

SEQ ID NO: 428083 - DNA, 30 bp, Artificial Sequence
  Synthetic oligonucleotide
tcagcagttaaggcaactacaacgcacttc

SEQ ID NO: 428084 - DNA, 30 bp, Artificial Sequence
  Synthetic oligonucleotide
tctacattctcatacccgtagcggcacttc

SEQ ID NO: 428085 - DNA, 30 bp, Artificial Sequence
  Synthetic oligonucleotide
ttacaattatgacacgatatccttcacttc

SEQ ID NO: 428086 - DNA, 30 bp, Artificial Sequence
  Synthetic oligonucleotide
aagtagttaaagacgaccagggaagacttc

SEQ ID NO: 428087 - DNA, 30 bp, Artificial Sequence
  Synthetic oligonucleotide
agtcatatagattacaatgaggcagacttc

SEQ ID NO: 428088 - DNA, 30 bp, Artificial Sequence
  Synthetic oligonucleotide
actagttaaaaggctacacagtcagacttc

SEQ ID NO: 428089 - DNA, 30 bp, Artificial Sequence
  Synthetic oligonucleotide
ggcgataagtgtggaatggcaagcgacttc

SEQ ID NO: 428090 - DNA, 30 bp, Artificial Sequence
  Synthetic oligonucleotide
ttcggtgacgctggaaagttgtctgacttc

SEQ ID NO: 428091 - DNA, 30 bp, Artificial Sequence
  Synthetic oligonucleotide
tttgcatgtaccccctcggtcaaatacttc

SEQ ID NO: 428092 - DNA, 30 bp, Artificial Sequence
  Synthetic oligonucleotide
gatggatagttactacgatgccaatacttc

SEQ ID NO: 428093 - DNA, 30 bp, Artificial Sequence
  Synthetic oligonucleotide
aggcttactccgctagtacggcaatacttc

SEQ ID NO: 428094 - DNA, 30 bp, Artificial Sequence
  Synthetic oligonucleotide
accggccacggtactcgactatactacttc

SEQ ID NO: 428095 - DNA, 30 bp, Artificial Sequence
  Synthetic oligonucleotide
gggagagtggcgaggagatagatctacttc

SEQ ID NO: 428096 - DNA, 30 bp, Artificial Sequence
  Synthetic oligonucleotide
ctgcaacacgaagccgcccagaagtacttc

SEQ ID NO: 428097 - DNA, 30 bp, Artificial Sequence
  Synthetic oligonucleotide
aaaccgtaaacattcgtgatgacgtacttc

SEQ ID NO: 428098 - DNA, 30 bp, Artificial Sequence
  Synthetic oligonucleotide
catgaaccagtatgccgttgtttttacttc

SEQ ID NO: 428099 - DNA, 30 bp, Artificial Sequence
  Synthetic oligonucleotide
gagcgaatccgcgtaggcatgtaaaccttc

SEQ ID NO: 428100 - DNA, 30 bp, Artificial Sequence
  Synthetic oligonucleotide
gtcgatgcaccatctgcggctccaaccttc

SEQ ID NO: 428101 - DNA, 30 bp, Artificial Sequence
  Synthetic oligonucleotide
cctgcggcttccccagtcttaagaaccttc

SEQ ID NO: 428102 - DNA, 30 bp, Artificial Sequence
  Synthetic oligonucleotide
cttcgctgtctgaggcatcatctaaccttc

SEQ ID NO: 428103 - DNA, 30 bp, Artificial Sequence
  Synthetic oligonucleotide
tttacgtagtacagaagcgcgcgtaccttc

SEQ ID NO: 428104 - DNA, 30 bp, Artificial Sequence
  Synthetic oligonucleotide
tagactgtcctcgttaatattgaccccttc

SEQ ID NO: 428105 - DNA, 30 bp, Artificial Sequence
  Synthetic oligonucleotide
tgcgggtttggcgaaaggtcacttcccttc

SEQ ID NO: 428106 - DNA, 30 bp, Artificial Sequence
  Synthetic oligonucleotide
gaataaactcagtggtaggtagaagccttc

SEQ ID NO: 428107 - DNA, 30 bp, Artificial Sequence
  Synthetic oligonucleotide
cctggttcgatcactatagtattggccttc

SEQ ID NO: 428108 - DNA, 30 bp, Artificial Sequence
  Synthetic oligonucleotide
ttattggactacgtcaggtagtgtgccttc

SEQ ID NO: 428109 - DNA, 30 bp, Artificial Sequence
  Synthetic oligonucleotide
gacggtgcccctgcgacgggtaaatccttc

SEQ ID NO: 428110 - DNA, 30 bp, Artificial Sequence
  Synthetic oligonucleotide
ctacgttgcggctgcgtgacaggatccttc

SEQ ID NO: 428111 - DNA, 30 bp, Artificial Sequence
  Synthetic oligonucleotide
ctacctccattcgcgatccgtctctccttc

SEQ ID NO: 428112 - DNA, 30 bp, Artificial Sequence
  Synthetic oligonucleotide
ttgccccaattgatgcactgcgagtccttc

SEQ ID NO: 428113 - DNA, 30 bp, Artificial Sequence
  Synthetic oligonucleotide
aacgacaaccggcgctacagaaggtccttc

SEQ ID NO: 428114 - DNA, 30 bp, Artificial Sequence
  Synthetic oligonucleotide
ggtagaccatcgtccggagcataaagcttc

SEQ ID NO: 428115 - DNA, 30 bp, Artificial Sequence
  Synthetic oligonucleotide
agtgggccactggtgtccgcgccaagcttc

SEQ ID NO: 428116 - DNA, 30 bp, Artificial Sequence
  Synthetic oligonucleotide
tacgcataacaacggcggcccacgagcttc

SEQ ID NO: 428117 - DNA, 30 bp, Artificial Sequence
  Synthetic oligonucleotide
aaatgaaacctcgaaccagtccttagcttc

SEQ ID NO: 428118 - DNA, 30 bp, Artificial Sequence
  Synthetic oligonucleotide
tggtcctgtcggtagggggcggttagcttc

SEQ ID NO: 428119 - DNA, 30 bp, Artificial Sequence
  Synthetic oligonucleotide
ttgggcaaatagaatagttcgggacgcttc

SEQ ID NO: 428120 - DNA, 30 bp, Artificial Sequence
  Synthetic oligonucleotide
attcgcaataactagaaaggttaccgcttc

SEQ ID NO: 428121 - DNA, 30 bp, Artificial Sequence
  Synthetic oligonucleotide
gcgaagtcgcctcgtacagaagcgcgcttc

SEQ ID NO: 428122 - DNA, 30 bp, Artificial Sequence
  Synthetic oligonucleotide
agcgcacagtatcgagtatgtctgcgcttc

SEQ ID NO: 428123 - DNA, 30 bp, Artificial Sequence
  Synthetic oligonucleotide
gggtcttagccagctaaacacttgcgcttc

SEQ ID NO: 428124 - DNA, 30 bp, Artificial Sequence
  Synthetic oligonucleotide
cgagaggccggttcagtaacctttcgcttc

SEQ ID NO: 428125 - DNA, 30 bp, Artificial Sequence
  Synthetic oligonucleotide
attgctaatagccgtaacattggaggcttc

SEQ ID NO: 428126 - DNA, 30 bp, Artificial Sequence
  Synthetic oligonucleotide
gtctaatgtaagacgtgaatatccggcttc

SEQ ID NO: 428127 - DNA, 30 bp, Artificial Sequence
  Synthetic oligonucleotide
ctgccgggaaagcatacgaccagcggcttc

SEQ ID NO: 428128 - DNA, 30 bp, Artificial Sequence
  Synthetic oligonucleotide
aattgggttactttgggatatggcggcttc

SEQ ID NO: 428129 - DNA, 30 bp, Artificial Sequence
  Synthetic oligonucleotide
gccccaaggtctatcgaattcaagggcttc

SEQ ID NO: 428130 - DNA, 30 bp, Artificial Sequence
  Synthetic oligonucleotide
ccctgccggacaccgcgttttgggggcttc

SEQ ID NO: 428131 - DNA, 30 bp, Artificial Sequence
  Synthetic oligonucleotide
actagcttcttccggaaacggcgatgcttc

SEQ ID NO: 428132 - DNA, 30 bp, Artificial Sequence
  Synthetic oligonucleotide
aatagaacatctggtggagttcgctgcttc

SEQ ID NO: 428133 - DNA, 30 bp, Artificial Sequence
  Synthetic oligonucleotide
acagggacacgagatcgcacagtctgcttc

SEQ ID NO: 428134 - DNA, 30 bp, Artificial Sequence
  Synthetic oligonucleotide
gagaaagcattgcaaagcgccatgtgcttc

SEQ ID NO: 428135 - DNA, 30 bp, Artificial Sequence
  Synthetic oligonucleotide
tttctaaaggtatagaacggtgtgtgcttc

SEQ ID NO: 428136 - DNA, 30 bp, Artificial Sequence
  Synthetic oligonucleotide
acgttgtcaacccaggtgaacacttgcttc

SEQ ID NO: 428137 - DNA, 30 bp, Artificial Sequence
  Synthetic oligonucleotide
tcgcagatctcctctgtgtcgcacatcttc

SEQ ID NO: 428138 - DNA, 30 bp, Artificial Sequence
  Synthetic oligonucleotide
ggacttcggttgcagtgaactctgatcttc

SEQ ID NO: 428139 - DNA, 30 bp, Artificial Sequence
  Synthetic oligonucleotide
ggtgcgctgcactcatgaagcaatatcttc

SEQ ID NO: 428140 - DNA, 30 bp, Artificial Sequence
  Synthetic oligonucleotide
ggtcttagtcacatcagcgaagctatcttc

SEQ ID NO: 428141 - DNA, 30 bp, Artificial Sequence
  Synthetic oligonucleotide
acctaaaacgtaggctctcagaaactcttc

SEQ ID NO: 428142 - DNA, 30 bp, Artificial Sequence
  Synthetic oligonucleotide
attagtctgacccaggctgcggtactcttc

SEQ ID NO: 428143 - DNA, 30 bp, Artificial Sequence
  Synthetic oligonucleotide
gtcgtcccagaatcggcgtaatagctcttc

SEQ ID NO: 428144 - DNA, 30 bp, Artificial Sequence
  Synthetic oligonucleotide
aattgacgacatagcgatcgcgtgctcttc

SEQ ID NO: 428145 - DNA, 30 bp, Artificial Sequence
  Synthetic oligonucleotide
gagtacggttgccgcgctctaagagtcttc

SEQ ID NO: 428146 - DNA, 30 bp, Artificial Sequence
  Synthetic oligonucleotide
cgaggtacacagggctaatattttgtcttc

SEQ ID NO: 428147 - DNA, 30 bp, Artificial Sequence
  Synthetic oligonucleotide
cactgactagtgcaaagtccctaattcttc

SEQ ID NO: 428148 - DNA, 30 bp, Artificial Sequence
  Synthetic oligonucleotide
atccggccgagtcgggacatacacttcttc

SEQ ID NO: 428149 - DNA, 30 bp, Artificial Sequence
  Synthetic oligonucleotide
atttacaggcttggtcgccatatgttcttc

SEQ ID NO: 428150 - DNA, 30 bp, Artificial Sequence
  Synthetic oligonucleotide
tactattcaatggtgtcctttgatttcttc

SEQ ID NO: 428151 - DNA, 30 bp, Artificial Sequence
  Synthetic oligonucleotide
acggtaatttaactccgcagcacaaagttc

SEQ ID NO: 428152 - DNA, 30 bp, Artificial Sequence
  Synthetic oligonucleotide
agatgtttccaacatcttgttggaaagttc

SEQ ID NO: 428153 - DNA, 30 bp, Artificial Sequence
  Synthetic oligonucleotide
cagcgcagttacgtttgtaaagtcaagttc

SEQ ID NO: 428154 - DNA, 30 bp, Artificial Sequence
  Synthetic oligonucleotide
tcgacagctacctaccgtcaagagaagttc

SEQ ID NO: 428155 - DNA, 30 bp, Artificial Sequence
  Synthetic oligonucleotide
agtgaaaacaagcagactcgcttgaagttc

SEQ ID NO: 428156 - DNA, 30 bp, Artificial Sequence
  Synthetic oligonucleotide
gatctcacatgcgggtcatattataagttc

SEQ ID NO: 428157 - DNA, 30 bp, Artificial Sequence
  Synthetic oligonucleotide
gattggacataacgggtaaatggacagttc

SEQ ID NO: 428158 - DNA, 30 bp, Artificial Sequence
  Synthetic oligonucleotide
ccaccgaactggattggtaaattccagttc

SEQ ID NO: 428159 - DNA, 30 bp, Artificial Sequence
  Synthetic oligonucleotide
gattatgattatgcgcgaaagttccagttc

SEQ ID NO: 428160 - DNA, 30 bp, Artificial Sequence
  Synthetic oligonucleotide
cggaatgttactcgctctgatgagcagttc

SEQ ID NO: 428161 - DNA, 30 bp, Artificial Sequence
  Synthetic oligonucleotide
cagtctgataattgttgcaactcgcagttc

SEQ ID NO: 428162 - DNA, 30 bp, Artificial Sequence
  Synthetic oligonucleotide
acatgtccagatctgtgggcttttcagttc

SEQ ID NO: 428163 - DNA, 30 bp, Artificial Sequence
  Synthetic oligonucleotide
acagctctactttcattttaacgagagttc

SEQ ID NO: 428164 - DNA, 30 bp, Artificial Sequence
  Synthetic oligonucleotide
aaaaccttttaagtgcaagctggagagttc

SEQ ID NO: 428165 - DNA, 30 bp, Artificial Sequence
  Synthetic oligonucleotide
tagctttatctctagactgtcggcgagttc

SEQ ID NO: 428166 - DNA, 30 bp, Artificial Sequence
  Synthetic oligonucleotide
cagagaactgttttctcttatatcgagttc

SEQ ID NO: 428167 - DNA, 30 bp, Artificial Sequence
  Synthetic oligonucleotide
ggaagtgagtccggattctctattgagttc

SEQ ID NO: 428168 - DNA, 30 bp, Artificial Sequence
  Synthetic oligonucleotide
acacgaaacacacagctattagtctagttc

SEQ ID NO: 428169 - DNA, 30 bp, Artificial Sequence
  Synthetic oligonucleotide
tttagctcagaccgatgaccggagtagttc

SEQ ID NO: 428170 - DNA, 30 bp, Artificial Sequence
  Synthetic oligonucleotide
gcgtctagcacgcattaggccttgtagttc

SEQ ID NO: 428171 - DNA, 30 bp, Artificial Sequence
  Synthetic oligonucleotide
ccatgctggtcgtgtccaggatcttagttc

SEQ ID NO: 428172 - DNA, 30 bp, Artificial Sequence
  Synthetic oligonucleotide
taaaagagtgtcttgttgtggggaacgttc

SEQ ID NO: 428173 - DNA, 30 bp, Artificial Sequence
  Synthetic oligonucleotide
gtttcttaatccgtaggtaggtctacgttc

SEQ ID NO: 428174 - DNA, 30 bp, Artificial Sequence
  Synthetic oligonucleotide
agaatatcctgtgccggcgttccaccgttc

SEQ ID NO: 428175 - DNA, 30 bp, Artificial Sequence
  Synthetic oligonucleotide
tatctctggggtgttgaagcctccccgttc

SEQ ID NO: 428176 - DNA, 30 bp, Artificial Sequence
  Synthetic oligonucleotide
ggaatcgagctaccacctctgggcccgttc

SEQ ID NO: 428177 - DNA, 30 bp, Artificial Sequence
  Synthetic oligonucleotide
atagaaggcagatcgtttaaccctccgttc

SEQ ID NO: 428178 - DNA, 30 bp, Artificial Sequence
  Synthetic oligonucleotide
ttttgccatgggcgacccgacattccgttc

SEQ ID NO: 428179 - DNA, 30 bp, Artificial Sequence
  Synthetic oligonucleotide
gttcttttatggtttagctgaaaagcgttc

SEQ ID NO: 428180 - DNA, 30 bp, Artificial Sequence
  Synthetic oligonucleotide
ccgcatcgcgcattgagcagtcgcgcgttc

SEQ ID NO: 428181 - DNA, 30 bp, Artificial Sequence
  Synthetic oligonucleotide
aggatccgagccggcaccaggtcggcgttc

SEQ ID NO: 428182 - DNA, 30 bp, Artificial Sequence
  Synthetic oligonucleotide
ggtagtattcttttccgagtggctgcgttc

SEQ ID NO: 428183 - DNA, 30 bp, Artificial Sequence
  Synthetic oligonucleotide
gctatcgctaacacccttgcaagtgcgttc

SEQ ID NO: 428184 - DNA, 30 bp, Artificial Sequence
  Synthetic oligonucleotide
tttgcgagtactgtctcggtaaaatcgttc

SEQ ID NO: 428185 - DNA, 30 bp, Artificial Sequence
  Synthetic oligonucleotide
cagttaggagggattaggggtccatcgttc

SEQ ID NO: 428186 - DNA, 30 bp, Artificial Sequence
  Synthetic oligonucleotide
atttcgtaagtgttgttcataagatcgttc

SEQ ID NO: 428187 - DNA, 30 bp, Artificial Sequence
  Synthetic oligonucleotide
gcagactacaggggtgtaaaccactcgttc

SEQ ID NO: 428188 - DNA, 30 bp, Artificial Sequence
  Synthetic oligonucleotide
tacagcggaaagatagattttctgtcgttc

SEQ ID NO: 428189 - DNA, 30 bp, Artificial Sequence
  Synthetic oligonucleotide
aggcagtgccctctgcaaggtatttcgttc

SEQ ID NO: 428190 - DNA, 30 bp, Artificial Sequence
  Synthetic oligonucleotide
ggctttaacttcacgaggcgtttaaggttc

SEQ ID NO: 428191 - DNA, 30 bp, Artificial Sequence
  Synthetic oligonucleotide
ggccaatcttccgcgatgccacacaggttc

SEQ ID NO: 428192 - DNA, 30 bp, Artificial Sequence
  Synthetic oligonucleotide
accagaggctttcatgtaataggcaggttc

SEQ ID NO: 428193 - DNA, 30 bp, Artificial Sequence
  Synthetic oligonucleotide
agatatgctgggacgcgtcaattcaggttc

SEQ ID NO: 428194 - DNA, 30 bp, Artificial Sequence
  Synthetic oligonucleotide
cctactttgatccgtttcgataagaggttc

SEQ ID NO: 428195 - DNA, 30 bp, Artificial Sequence
  Synthetic oligonucleotide
cacagaatctaggaatatacatggaggttc

SEQ ID NO: 428196 - DNA, 30 bp, Artificial Sequence
  Synthetic oligonucleotide
acggtgttgacataaccaacgactaggttc

SEQ ID NO: 428197 - DNA, 30 bp, Artificial Sequence
  Synthetic oligonucleotide
tactatgctagacaatacagcgctaggttc

SEQ ID NO: 428198 - DNA, 30 bp, Artificial Sequence
  Synthetic oligonucleotide
ctgtcgagtttgatcgaagtcggtaggttc

SEQ ID NO: 428199 - DNA, 30 bp, Artificial Sequence
  Synthetic oligonucleotide
gtataacagtacatctggccatgtaggttc

SEQ ID NO: 428200 - DNA, 30 bp, Artificial Sequence
  Synthetic oligonucleotide
gcgattaaaaccttaggaacttcccggttc

SEQ ID NO: 428201 - DNA, 30 bp, Artificial Sequence
  Synthetic oligonucleotide
ggcggagtattgcccgaacatccgcggttc

SEQ ID NO: 428202 - DNA, 30 bp, Artificial Sequence
  Synthetic oligonucleotide
atatttagatagttgttggtcgatcggttc

SEQ ID NO: 428203 - DNA, 30 bp, Artificial Sequence
  Synthetic oligonucleotide
aacgtagccaacaaggtctacgttcggttc

SEQ ID NO: 428204 - DNA, 30 bp, Artificial Sequence
  Synthetic oligonucleotide
acgacaaacgcacgagaacatctagggttc

SEQ ID NO: 428205 - DNA, 30 bp, Artificial Sequence
  Synthetic oligonucleotide
gggaatctatgtcgattattacccgggttc

SEQ ID NO: 428206 - DNA, 30 bp, Artificial Sequence
  Synthetic oligonucleotide
tactcatcacttttggtggcagcggggttc

SEQ ID NO: 428207 - DNA, 30 bp, Artificial Sequence
  Synthetic oligonucleotide
cccgttttcctaagtagcataagggggttc

SEQ ID NO: 428208 - DNA, 30 bp, Artificial Sequence
  Synthetic oligonucleotide
gccccaccgcaataagccactgtggggttc

SEQ ID NO: 428209 - DNA, 30 bp, Artificial Sequence
  Synthetic oligonucleotide
ggaagtcgcaagtcagctcagaatgggttc

SEQ ID NO: 428210 - DNA, 30 bp, Artificial Sequence
  Synthetic oligonucleotide
tgaaataggtggggttgcagagatgggttc

SEQ ID NO: 428211 - DNA, 30 bp, Artificial Sequence
  Synthetic oligonucleotide
cctccatagcttatagacagagctgggttc

SEQ ID NO: 428212 - DNA, 30 bp, Artificial Sequence
  Synthetic oligonucleotide
aagttagcgacggagataattagtgggttc

SEQ ID NO: 428213 - DNA, 30 bp, Artificial Sequence
  Synthetic oligonucleotide
cccgttaacacgtagggttcgattgggttc

SEQ ID NO: 428214 - DNA, 30 bp, Artificial Sequence
  Synthetic oligonucleotide
caaggtattccgggccagcagtaatggttc

SEQ ID NO: 428215 - DNA, 30 bp, Artificial Sequence
  Synthetic oligonucleotide
ttatgacctttgtttacttcccgatggttc

SEQ ID NO: 428216 - DNA, 30 bp, Artificial Sequence
  Synthetic oligonucleotide
gcgtggacagaacctcgagacgtatggttc

SEQ ID NO: 428217 - DNA, 31 bp, Artificial Sequence
  Synthetic oligonucleotide
tcgattacacgttcacagggtgaactggttc

SEQ ID NO: 428218 - DNA, 30 bp, Artificial Sequence
  Synthetic oligonucleotide
gttatatgagccgtgaggagaacctggttc

SEQ ID NO: 428219 - DNA, 30 bp, Artificial Sequence
  Synthetic oligonucleotide
atcacggtaataggcacgctggcctggttc

SEQ ID NO: 428220 - DNA, 30 bp, Artificial Sequence
  Synthetic oligonucleotide
aacaaagtcgtcgtttccaatctctggttc

SEQ ID NO: 428221 - DNA, 30 bp, Artificial Sequence
  Synthetic oligonucleotide
ccatatatcctaccccccgaaatgtggttc

SEQ ID NO: 428222 - DNA, 30 bp, Artificial Sequence
  Synthetic oligonucleotide
cgcgctgatgaccccccatttcgttggttc

SEQ ID NO: 428223 - DNA, 30 bp, Artificial Sequence
  Synthetic oligonucleotide
ggtgggaagaacccgcggcattaaatgttc

SEQ ID NO: 428224 - DNA, 30 bp, Artificial Sequence
  Synthetic oligonucleotide
tctcgaggcccatcgggcaaggcaatgttc

SEQ ID NO: 428225 - DNA, 30 bp, Artificial Sequence
  Synthetic oligonucleotide
aggcagacaactggctcttcgcccatgttc

SEQ ID NO: 428226 - DNA, 30 bp, Artificial Sequence
  Synthetic oligonucleotide
gaaggtgaaattctttcggaacgcatgttc

SEQ ID NO: 428227 - DNA, 30 bp, Artificial Sequence
  Synthetic oligonucleotide
attctcggacccattgcaggtctgatgttc

SEQ ID NO: 428228 - DNA, 30 bp, Artificial Sequence
  Synthetic oligonucleotide
ggttaagttggtcttgtagatagtatgttc

SEQ ID NO: 428229 - DNA, 30 bp, Artificial Sequence
  Synthetic oligonucleotide
gaggggatacaggacacaggtcaactgttc

SEQ ID NO: 428230 - DNA, 30 bp, Artificial Sequence
  Synthetic oligonucleotide
tatatgagcggggatcggtaccgactgttc

SEQ ID NO: 428231 - DNA, 30 bp, Artificial Sequence
  Synthetic oligonucleotide
gatatgcttacggtacgagctaacctgttc

SEQ ID NO: 428232 - DNA, 30 bp, Artificial Sequence
  Synthetic oligonucleotide
cccggcaacataaaacgggtgcacctgttc

SEQ ID NO: 428233 - DNA, 30 bp, Artificial Sequence
  Synthetic oligonucleotide
gtggagaccacgtttttaaaaacgctgttc

SEQ ID NO: 428234 - DNA, 30 bp, Artificial Sequence
  Synthetic oligonucleotide
gtagttgcagcgcggagagactaagtgttc

SEQ ID NO: 428235 - DNA, 30 bp, Artificial Sequence
  Synthetic oligonucleotide
attgcaccaggccgtcgcttggccgtgttc

SEQ ID NO: 428236 - DNA, 30 bp, Artificial Sequence
  Synthetic oligonucleotide
ccgtgtcctggtacagctaaattcgtgttc

SEQ ID NO: 428237 - DNA, 30 bp, Artificial Sequence
  Synthetic oligonucleotide
gtgcgttggacggggaaggctttcgtgttc

SEQ ID NO: 428238 - DNA, 30 bp, Artificial Sequence
  Synthetic oligonucleotide
gggctctgcaaatcactcgtgcttgtgttc

SEQ ID NO: 428239 - DNA, 30 bp, Artificial Sequence
  Synthetic oligonucleotide
tgtaggaagcctagattgtactttgtgttc

SEQ ID NO: 428240 - DNA, 30 bp, Artificial Sequence
  Synthetic oligonucleotide
aagcccggacactcgtacatggaattgttc

SEQ ID NO: 428241 - DNA, 30 bp, Artificial Sequence
  Synthetic oligonucleotide
gagagtcagttaaaatcctggggattgttc

SEQ ID NO: 428242 - DNA, 30 bp, Artificial Sequence
  Synthetic oligonucleotide
aatcttaatgggggatgctcgaccttgttc

SEQ ID NO: 428243 - DNA, 30 bp, Artificial Sequence
  Synthetic oligonucleotide
gtcacttaaaaacccgtcgtatccttgttc

SEQ ID NO: 428244 - DNA, 30 bp, Artificial Sequence
  Synthetic oligonucleotide
gtaaataacatccaacaccggttcttgttc

SEQ ID NO: 428245 - DNA, 30 bp, Artificial Sequence
  Synthetic oligonucleotide
cagattgtctctgggtttgtatagttgttc

SEQ ID NO: 428246 - DNA, 30 bp, Artificial Sequence
  Synthetic oligonucleotide
ataacagctcagagcactatgtagttgttc

SEQ ID NO: 428247 - DNA, 30 bp, Artificial Sequence
  Synthetic oligonucleotide
cccggacgaatcggccggggaactttgttc

SEQ ID NO: 428248 - DNA, 30 bp, Artificial Sequence
  Synthetic oligonucleotide
gcgaatcgtaacgaaaccttctgtttgttc

SEQ ID NO: 428249 - DNA, 30 bp, Artificial Sequence
  Synthetic oligonucleotide
tggagacctaaaactgagcagattttgttc

SEQ ID NO: 428250 - DNA, 30 bp, Artificial Sequence
  Synthetic oligonucleotide
ctaccgtcagacggtgtaaatagaaatttc

SEQ ID NO: 428251 - DNA, 30 bp, Artificial Sequence
  Synthetic oligonucleotide
ataattttgacgaaatacccgaacaatttc

SEQ ID NO: 428252 - DNA, 30 bp, Artificial Sequence
  Synthetic oligonucleotide
acttcaccctcaatcaagctggacaatttc

SEQ ID NO: 428253 - DNA, 30 bp, Artificial Sequence
  Synthetic oligonucleotide
atatgatagtaatatcgataacgcaatttc

SEQ ID NO: 428254 - DNA, 30 bp, Artificial Sequence
  Synthetic oligonucleotide
agtcgtgaagagcagtcagaaatcaatttc

SEQ ID NO: 428255 - DNA, 30 bp, Artificial Sequence
  Synthetic oligonucleotide
atggcatgacacgtaggtcatatcaatttc

SEQ ID NO: 428256 - DNA, 30 bp, Artificial Sequence
  Synthetic oligonucleotide
acgggagtttgtgttttacgcgagaatttc

SEQ ID NO: 428257 - DNA, 30 bp, Artificial Sequence
  Synthetic oligonucleotide
gctccctacgaatgagctaattagaatttc

SEQ ID NO: 428258 - DNA, 30 bp, Artificial Sequence
  Synthetic oligonucleotide
gaaaagcgcgtatttcgataaccgaatttc

SEQ ID NO: 428259 - DNA, 30 bp, Artificial Sequence
  Synthetic oligonucleotide
tcaaggctcgcggattgaatcgcgaatttc

SEQ ID NO: 428260 - DNA, 30 bp, Artificial Sequence
  Synthetic oligonucleotide
aatcagtgttctggatttgatactaatttc

SEQ ID NO: 428261 - DNA, 30 bp, Artificial Sequence
  Synthetic oligonucleotide
agtcacaacatgtcattgtgtagtaatttc

SEQ ID NO: 428262 - DNA, 30 bp, Artificial Sequence
  Synthetic oligonucleotide
gtagatatagcaaccttaaccttacatttc

SEQ ID NO: 428263 - DNA, 30 bp, Artificial Sequence
  Synthetic oligonucleotide
cagtctatcccaaaacgacagttacatttc

SEQ ID NO: 428264 - DNA, 30 bp, Artificial Sequence
  Synthetic oligonucleotide
ggttggacgcggccattgtgagtccatttc

SEQ ID NO: 428265 - DNA, 30 bp, Artificial Sequence
  Synthetic oligonucleotide
cgtctaagactgacactgagcatgcatttc

SEQ ID NO: 428266 - DNA, 30 bp, Artificial Sequence
  Synthetic oligonucleotide
atcgtgcaatgaaacgttaatgatcatttc

SEQ ID NO: 428267 - DNA, 30 bp, Artificial Sequence
  Synthetic oligonucleotide
atggagattctgggtccttatagtcatttc

SEQ ID NO: 428268 - DNA, 30 bp, Artificial Sequence
  Synthetic oligonucleotide
gtccaggggcctttccacgatcgagatttc

SEQ ID NO: 428269 - DNA, 30 bp, Artificial Sequence
  Synthetic oligonucleotide
ggttttgcatgcgctatatgactagatttc

SEQ ID NO: 428270 - DNA, 30 bp, Artificial Sequence
  Synthetic oligonucleotide
gtggtgttgaaccctgagggcgtagatttc

SEQ ID NO: 428271 - DNA, 30 bp, Artificial Sequence
  Synthetic oligonucleotide
gactattaatggattaagcacggcgatttc

SEQ ID NO: 428272 - DNA, 30 bp, Artificial Sequence
  Synthetic oligonucleotide
tagatgaggcctagagcctctgtcgatttc

SEQ ID NO: 428273 - DNA, 30 bp, Artificial Sequence
  Synthetic oligonucleotide
gtaggagcgttaatgtaaggatcggatttc

SEQ ID NO: 428274 - DNA, 30 bp, Artificial Sequence
  Synthetic oligonucleotide
tcaacccgctaggggccagaaagggatttc

SEQ ID NO: 428275 - DNA, 30 bp, Artificial Sequence
  Synthetic oligonucleotide
tgttcgatgagtttgcattggtttgatttc

SEQ ID NO: 428276 - DNA, 30 bp, Artificial Sequence
  Synthetic oligonucleotide
gggaccagaatttcagagtgtgtatatttc

SEQ ID NO: 428277 - DNA, 30 bp, Artificial Sequence
  Synthetic oligonucleotide
cggtcaggcaggactgccgcgcggtatttc

SEQ ID NO: 428278 - DNA, 30 bp, Artificial Sequence
  Synthetic oligonucleotide
acatacagttcggtattcctagggtatttc

SEQ ID NO: 428279 - DNA, 30 bp, Artificial Sequence
  Synthetic oligonucleotide
aaaatggttagatgtggacaatggtatttc

SEQ ID NO: 428280 - DNA, 30 bp, Artificial Sequence
  Synthetic oligonucleotide
caaccgtcgccggtctggtttgtgtatttc

SEQ ID NO: 428281 - DNA, 30 bp, Artificial Sequence
  Synthetic oligonucleotide
ctcaagaacacgttctgaaatccaactttc

SEQ ID NO: 428282 - DNA, 30 bp, Artificial Sequence
  Synthetic oligonucleotide
tactaggcggcgcgttgcgcggtaactttc

SEQ ID NO: 428283 - DNA, 30 bp, Artificial Sequence
  Synthetic oligonucleotide
agctcttggatccaccaccaatccactttc

SEQ ID NO: 428284 - DNA, 30 bp, Artificial Sequence
  Synthetic oligonucleotide
gatgatgcggcacccggatagtgcactttc

SEQ ID NO: 428285 - DNA, 30 bp, Artificial Sequence
  Synthetic oligonucleotide
gacagattcgatacctatggggtcactttc

SEQ ID NO: 428286 - DNA, 30 bp, Artificial Sequence
  Synthetic oligonucleotide
gataaacagctctgaggtgtccatactttc

SEQ ID NO: 428287 - DNA, 30 bp, Artificial Sequence
  Synthetic oligonucleotide
ccgtcttaagaaagtgttctcactactttc

SEQ ID NO: 428288 - DNA, 30 bp, Artificial Sequence
  Synthetic oligonucleotide
taaagcttaacatttgacatgtttcctttc

SEQ ID NO: 428289 - DNA, 30 bp, Artificial Sequence
  Synthetic oligonucleotide
ataggtagctgagagttcaagcacgctttc

SEQ ID NO: 428290 - DNA, 30 bp, Artificial Sequence
  Synthetic oligonucleotide
gggaacgacggaatactatatcgggctttc

SEQ ID NO: 428291 - DNA, 30 bp, Artificial Sequence
  Synthetic oligonucleotide
atcttactggtgttaacaaatggggctttc

SEQ ID NO: 428292 - DNA, 30 bp, Artificial Sequence
  Synthetic oligonucleotide
tgcaatagaaaccatcgcgtctgctctttc

SEQ ID NO: 428293 - DNA, 30 bp, Artificial Sequence
  Synthetic oligonucleotide
agggtgtcctatacctatacggtctctttc

SEQ ID NO: 428294 - DNA, 30 bp, Artificial Sequence
  Synthetic oligonucleotide
gtacgtgtgtcacaaacgcaggtgtctttc

SEQ ID NO: 428295 - DNA, 30 bp, Artificial Sequence
  Synthetic oligonucleotide
caatgattcgattcattcgacaggagtttc

SEQ ID NO: 428296 - DNA, 30 bp, Artificial Sequence
  Synthetic oligonucleotide
ggggacccacggcgtcggatggggagtttc

SEQ ID NO: 428297 - DNA, 30 bp, Artificial Sequence
  Synthetic oligonucleotide
agtttaaataatgtgtagaacgtgagtttc

SEQ ID NO: 428298 - DNA, 30 bp, Artificial Sequence
  Synthetic oligonucleotide
atggctctcggctggggaaaccttagtttc

SEQ ID NO: 428299 - DNA, 30 bp, Artificial Sequence
  Synthetic oligonucleotide
tcccttctccagcgaatgccccttagtttc

SEQ ID NO: 428300 - DNA, 30 bp, Artificial Sequence
  Synthetic oligonucleotide
ggatgtggcgtggcaccgggacgacgtttc

SEQ ID NO: 428301 - DNA, 30 bp, Artificial Sequence
  Synthetic oligonucleotide
gcgcgcgtcgttacctccattttacgtttc

SEQ ID NO: 428302 - DNA, 30 bp, Artificial Sequence
  Synthetic oligonucleotide
ccctgtggttcaagttctaaaaggcgtttc

SEQ ID NO: 428303 - DNA, 30 bp, Artificial Sequence
  Synthetic oligonucleotide
atggattgaccctcaaaagcgctgcgtttc

SEQ ID NO: 428304 - DNA, 30 bp, Artificial Sequence
  Synthetic oligonucleotide
gggcgttcctggacgggggttgtgcgtttc

SEQ ID NO: 428305 - DNA, 30 bp, Artificial Sequence
  Synthetic oligonucleotide
cgccgatcttgaagtttacatttgcgtttc

SEQ ID NO: 428306 - DNA, 30 bp, Artificial Sequence
  Synthetic oligonucleotide
gtataatgctagcttagagacgatcgtttc

SEQ ID NO: 428307 - DNA, 30 bp, Artificial Sequence
  Synthetic oligonucleotide
gtttttaagccacagacgtcccgtcgtttc

SEQ ID NO: 428308 - DNA, 30 bp, Artificial Sequence
  Synthetic oligonucleotide
aaagaatctgcggatccttgcaaaggtttc

SEQ ID NO: 428309 - DNA, 30 bp, Artificial Sequence
  Synthetic oligonucleotide
atatccggggactctcgtcctagaggtttc

SEQ ID NO: 428310 - DNA, 30 bp, Artificial Sequence
  Synthetic oligonucleotide
tttggagaacggggaattttctgaggtttc

SEQ ID NO: 428311 - DNA, 30 bp, Artificial Sequence
  Synthetic oligonucleotide
gtgtttgcactctctaacggccccggtttc

SEQ ID NO: 428312 - DNA, 30 bp, Artificial Sequence
  Synthetic oligonucleotide
ttagtcatggtctcgacctaggtcggtttc

SEQ ID NO: 428313 - DNA, 30 bp, Artificial Sequence
  Synthetic oligonucleotide
aagaattccaaggtcaggactaggggtttc

SEQ ID NO: 428314 - DNA, 30 bp, Artificial Sequence
  Synthetic oligonucleotide
gcgctgatcaatatttgtgcatggggtttc

SEQ ID NO: 428315 - DNA, 30 bp, Artificial Sequence
  Synthetic oligonucleotide
catgatcaagacataggagcccaatgtttc

SEQ ID NO: 428316 - DNA, 30 bp, Artificial Sequence
  Synthetic oligonucleotide
aattgcttccaaatataccccgaatgtttc

SEQ ID NO: 428317 - DNA, 30 bp, Artificial Sequence
  Synthetic oligonucleotide
atctgcgctatcggagaagtataatgtttc

SEQ ID NO: 428318 - DNA, 30 bp, Artificial Sequence
  Synthetic oligonucleotide
gccagtgacttactccgtaacttatgtttc

SEQ ID NO: 428319 - DNA, 30 bp, Artificial Sequence
  Synthetic oligonucleotide
gtataagggagcaaatccatcttatgtttc

SEQ ID NO: 428320 - DNA, 30 bp, Artificial Sequence
  Synthetic oligonucleotide
atgtttttgtaggtccgtggcaactgtttc

SEQ ID NO: 428321 - DNA, 30 bp, Artificial Sequence
  Synthetic oligonucleotide
tttctaggaatggctgtcatgttctgtttc

SEQ ID NO: 428322 - DNA, 30 bp, Artificial Sequence
  Synthetic oligonucleotide
gttttgactcgggccggcttagggtgtttc

SEQ ID NO: 428323 - DNA, 30 bp, Artificial Sequence
  Synthetic oligonucleotide
attatactccacttacttatgaattgtttc

SEQ ID NO: 428324 - DNA, 30 bp, Artificial Sequence
  Synthetic oligonucleotide
gcgaggtgggctagtttggagccttgtttc

SEQ ID NO: 428325 - DNA, 30 bp, Artificial Sequence
  Synthetic oligonucleotide
ggaattggttatccaggcatgagttgtttc

SEQ ID NO: 428326 - DNA, 30 bp, Artificial Sequence
  Synthetic oligonucleotide
tcgcgacgccgatacttaactgtttgtttc

SEQ ID NO: 428327 - DNA, 30 bp, Artificial Sequence
  Synthetic oligonucleotide
caattcatatcagcggtcctggaaattttc

SEQ ID NO: 428328 - DNA, 30 bp, Artificial Sequence
  Synthetic oligonucleotide
gagcggctgtctaacagtgattagattttc

SEQ ID NO: 428329 - DNA, 30 bp, Artificial Sequence
  Synthetic oligonucleotide
tgaagtaatctaactagcaccgggattttc

SEQ ID NO: 428330 - DNA, 30 bp, Artificial Sequence
  Synthetic oligonucleotide
tatgcacgcccgaagttagcaatgattttc

SEQ ID NO: 428331 - DNA, 30 bp, Artificial Sequence
  Synthetic oligonucleotide
gtcccgcattcattcctgccccatattttc

SEQ ID NO: 428332 - DNA, 30 bp, Artificial Sequence
  Synthetic oligonucleotide
taggaagtcagggtggcacggtatattttc

SEQ ID NO: 428333 - DNA, 30 bp, Artificial Sequence
  Synthetic oligonucleotide
gtagaaggagtgagaccacagattattttc

SEQ ID NO: 428334 - DNA, 30 bp, Artificial Sequence
  Synthetic oligonucleotide
ggtaagtcagtcttagtttcacttattttc

SEQ ID NO: 428335 - DNA, 30 bp, Artificial Sequence
  Synthetic oligonucleotide
ttgcctaatggcgctaaaattgttattttc

SEQ ID NO: 428336 - DNA, 30 bp, Artificial Sequence
  Synthetic oligonucleotide
gagttaagaggttgctatgcatcacttttc

SEQ ID NO: 428337 - DNA, 30 bp, Artificial Sequence
  Synthetic oligonucleotide
gattacacatttcgaaggtttggacttttc

SEQ ID NO: 428338 - DNA, 30 bp, Artificial Sequence
  Synthetic oligonucleotide
gcaagggagtatctagccaacagccttttc

SEQ ID NO: 428339 - DNA, 30 bp, Artificial Sequence
  Synthetic oligonucleotide
gaggtaattcagacctcgccgatgcttttc

SEQ ID NO: 428340 - DNA, 30 bp, Artificial Sequence
  Synthetic oligonucleotide
tatagcggcgtccacgattgggtgcttttc

SEQ ID NO: 428341 - DNA, 30 bp, Artificial Sequence
  Synthetic oligonucleotide
agtttatgtagttgtacccccagtcttttc

SEQ ID NO: 428342 - DNA, 30 bp, Artificial Sequence
  Synthetic oligonucleotide
gcgaaagtgaagactcggtcctgtcttttc

SEQ ID NO: 428343 - DNA, 30 bp, Artificial Sequence
  Synthetic oligonucleotide
caaagctcaaccactgcacgtgttcttttc

SEQ ID NO: 428344 - DNA, 30 bp, Artificial Sequence
  Synthetic oligonucleotide
ggaaggaaaggctttattgcgaaagttttc

SEQ ID NO: 428345 - DNA, 30 bp, Artificial Sequence
  Synthetic oligonucleotide
ggagatgccacgctgctctcggccgttttc

SEQ ID NO: 428346 - DNA, 30 bp, Artificial Sequence
  Synthetic oligonucleotide
aatccggagggtatgcagtatggcgttttc

SEQ ID NO: 428347 - DNA, 30 bp, Artificial Sequence
  Synthetic oligonucleotide
gtgcggccatgccggaccgctcaggttttc

SEQ ID NO: 428348 - DNA, 30 bp, Artificial Sequence
  Synthetic oligonucleotide
atcgatcccgctgctgaggacagtgttttc

SEQ ID NO: 428349 - DNA, 30 bp, Artificial Sequence
  Synthetic oligonucleotide
ggtggacattacaagatacggagtgttttc

SEQ ID NO: 428350 - DNA, 30 bp, Artificial Sequence
  Synthetic oligonucleotide
agcacataatggactgtctccggatttttc

SEQ ID NO: 428351 - DNA, 30 bp, Artificial Sequence
  Synthetic oligonucleotide
aacgtcgccgccccacttaaaaattttttc

SEQ ID NO: 428352 - DNA, 31 bp, Artificial Sequence
  Synthetic oligonucleotide
aaggtggtttgctaggactagcaattttttc

SEQ ID NO: 428353 - DNA, 30 bp, Artificial Sequence
  Synthetic oligonucleotide
atcggtccaatatcgaaagcccattttttc

SEQ ID NO: 428354 - DNA, 30 bp, Artificial Sequence
  Synthetic oligonucleotide
aaaggtaatttcatgagggggacttttttc

SEQ ID NO: 428355 - DNA, 30 bp, Artificial Sequence
  Synthetic oligonucleotide
tgaatattggtcagcgcgatctcttttttc

SEQ ID NO: 428356 - DNA, 30 bp, Artificial Sequence
  Synthetic oligonucleotide
tacggtatagacgtcagcctattttttttc

SEQ ID NO: 428357 - DNA, 30 bp, Artificial Sequence
  Synthetic oligonucleotide
cagcctatgagtcctgtaggttaaaaaaag

SEQ ID NO: 428358 - DNA, 30 bp, Artificial Sequence
  Synthetic oligonucleotide
tgacggaaatggcctggggccggaaaaaag

SEQ ID NO: 428359 - DNA, 30 bp, Artificial Sequence
  Synthetic oligonucleotide
cggctacctttattccagaatataaaaaag

SEQ ID NO: 428360 - DNA, 30 bp, Artificial Sequence
  Synthetic oligonucleotide
acaaactccgacttgatgaggttaaaaaag

SEQ ID NO: 428361 - DNA, 30 bp, Artificial Sequence
  Synthetic oligonucleotide
aacgtaaagttggatcgcctgcacaaaaag

SEQ ID NO: 428362 - DNA, 30 bp, Artificial Sequence
  Synthetic oligonucleotide
gaaatgaaccaagtttgacattgcaaaaag

SEQ ID NO: 428363 - DNA, 30 bp, Artificial Sequence
  Synthetic oligonucleotide
cgaagtcctaccctcacgcggcataaaaag

SEQ ID NO: 428364 - DNA, 30 bp, Artificial Sequence
  Synthetic oligonucleotide
gagtccgcaagctttactaggacacaaaag

SEQ ID NO: 428365 - DNA, 30 bp, Artificial Sequence
  Synthetic oligonucleotide
ttcctctccacagatcgaaattcacaaaag

SEQ ID NO: 428366 - DNA, 30 bp, Artificial Sequence
  Synthetic oligonucleotide
ctgcgtgaccgtaatggtgacggagaaaag

SEQ ID NO: 428367 - DNA, 30 bp, Artificial Sequence
  Synthetic oligonucleotide
gaacagcgctctttgagcgtaagggaaaag

SEQ ID NO: 428368 - DNA, 30 bp, Artificial Sequence
  Synthetic oligonucleotide
ctggtaattattcgaaaatggtgggaaaag

SEQ ID NO: 428369 - DNA, 30 bp, Artificial Sequence
  Synthetic oligonucleotide
agtggggtctaatggccccattgggaaaag

SEQ ID NO: 428370 - DNA, 30 bp, Artificial Sequence
  Synthetic oligonucleotide
gagtaccacttaattgtacattctgaaaag

SEQ ID NO: 428371 - DNA, 30 bp, Artificial Sequence
  Synthetic oligonucleotide
ctataatccagtgtgagctggattgaaaag

SEQ ID NO: 428372 - DNA, 30 bp, Artificial Sequence
  Synthetic oligonucleotide
acagtgtaggtagagcgtttacttgaaaag

SEQ ID NO: 428373 - DNA, 30 bp, Artificial Sequence
  Synthetic oligonucleotide
aatgatacttatggcctcttacaataaaag

SEQ ID NO: 428374 - DNA, 30 bp, Artificial Sequence
  Synthetic oligonucleotide
ttttccggggtttgggtacacagataaaag

SEQ ID NO: 428375 - DNA, 29 bp, Artificial Sequence
  Synthetic oligonucleotide
tcagcttgcgctcgatgaattgataaaag

SEQ ID NO: 428376 - DNA, 30 bp, Artificial Sequence
  Synthetic oligonucleotide
gtttttatacggattatccccttataaaag

SEQ ID NO: 428377 - DNA, 30 bp, Artificial Sequence
  Synthetic oligonucleotide
gtttctagctcatggtcttaaaactaaaag

SEQ ID NO: 428378 - DNA, 30 bp, Artificial Sequence
  Synthetic oligonucleotide
cgggtgtcgctgcagcagcgcgactaaaag

SEQ ID NO: 428379 - DNA, 30 bp, Artificial Sequence
  Synthetic oligonucleotide
caaccgtgtcgcagtcaaacatcctaaaag

SEQ ID NO: 428380 - DNA, 30 bp, Artificial Sequence
  Synthetic oligonucleotide
atcaatcaggatccggacgcgaagtaaaag

SEQ ID NO: 428381 - DNA, 30 bp, Artificial Sequence
  Synthetic oligonucleotide
ggtgtgggcactgcaaccggactgtaaaag

SEQ ID NO: 428382 - DNA, 30 bp, Artificial Sequence
  Synthetic oligonucleotide
actcgcgcagggactataatctcttaaaag

SEQ ID NO: 428383 - DNA, 30 bp, Artificial Sequence
  Synthetic oligonucleotide
taccaatcggaatgcatctcacgttaaaag

SEQ ID NO: 428384 - DNA, 30 bp, Artificial Sequence
  Synthetic oligonucleotide
aattagagcgttgtagtcacttgaacaaag

SEQ ID NO: 428385 - DNA, 30 bp, Artificial Sequence
  Synthetic oligonucleotide
gacgtttccgccatcttttaaaagacaaag

SEQ ID NO: 428386 - DNA, 30 bp, Artificial Sequence
  Synthetic oligonucleotide
tacctccttagtgaccgagaggctacaaag

SEQ ID NO: 428387 - DNA, 30 bp, Artificial Sequence
  Synthetic oligonucleotide
gttgatggtcgtctcggcggccatccaaag

SEQ ID NO: 428388 - DNA, 30 bp, Artificial Sequence
  Synthetic oligonucleotide
atataattgcgtatacccttggcagcaaag

SEQ ID NO: 428389 - DNA, 30 bp, Artificial Sequence
  Synthetic oligonucleotide
gagctcttatccaaccaccagcacgcaaag

SEQ ID NO: 428390 - DNA, 30 bp, Artificial Sequence
  Synthetic oligonucleotide
aagttgccatcatttaattatcccgcaaag

SEQ ID NO: 428391 - DNA, 30 bp, Artificial Sequence
  Synthetic oligonucleotide
taacgcgcacgtgccatcggtcgatcaaag

SEQ ID NO: 428392 - DNA, 30 bp, Artificial Sequence
  Synthetic oligonucleotide
ttcaatctcgaaatacaattttattcaaag

SEQ ID NO: 428393 - DNA, 30 bp, Artificial Sequence
  Synthetic oligonucleotide
ggggggcaccagcggtgctccccttcaaag

SEQ ID NO: 428394 - DNA, 30 bp, Artificial Sequence
  Synthetic oligonucleotide
ttttacggttgggtgaaatattgttcaaag

SEQ ID NO: 428395 - DNA, 30 bp, Artificial Sequence
  Synthetic oligonucleotide
ttgtcggtttaccggattcctccaagaaag

SEQ ID NO: 428396 - DNA, 30 bp, Artificial Sequence
  Synthetic oligonucleotide
tgattacctcggaagcagcctggaagaaag

SEQ ID NO: 428397 - DNA, 30 bp, Artificial Sequence
  Synthetic oligonucleotide
tattggggcggtgcgccgtctttaagaaag

SEQ ID NO: 428398 - DNA, 30 bp, Artificial Sequence
  Synthetic oligonucleotide
gctgaatgcagctcataagtgttcagaaag

SEQ ID NO: 428399 - DNA, 30 bp, Artificial Sequence
  Synthetic oligonucleotide
aaactaacatcggttcgtaagaagagaaag

SEQ ID NO: 428400 - DNA, 30 bp, Artificial Sequence
  Synthetic oligonucleotide
aattctattggcctagaatggcgtagaaag

SEQ ID NO: 428401 - DNA, 30 bp, Artificial Sequence
  Synthetic oligonucleotide
gcgattgctttcggaccacagacccgaaag

SEQ ID NO: 428402 - DNA, 30 bp, Artificial Sequence
  Synthetic oligonucleotide
tatttggactgatgccacatattccgaaag

SEQ ID NO: 428403 - DNA, 30 bp, Artificial Sequence
  Synthetic oligonucleotide
ttgacgtagtattcatgcattacgcgaaag

SEQ ID NO: 428404 - DNA, 30 bp, Artificial Sequence
  Synthetic oligonucleotide
ctttcatgcgacctcttcatctcgcgaaag

SEQ ID NO: 428405 - DNA, 30 bp, Artificial Sequence
  Synthetic oligonucleotide
tttggtgcttcctccactgcggggcgaaag

SEQ ID NO: 428406 - DNA, 30 bp, Artificial Sequence
  Synthetic oligonucleotide
gttcaagccatgggtaaactttgtcgaaag

SEQ ID NO: 428407 - DNA, 30 bp, Artificial Sequence
  Synthetic oligonucleotide
gtgtagcgacgtctcctgatgcttcgaaag

SEQ ID NO: 428408 - DNA, 30 bp, Artificial Sequence
  Synthetic oligonucleotide
acctgctaagtgggcattactgagggaaag

SEQ ID NO: 428409 - DNA, 30 bp, Artificial Sequence
  Synthetic oligonucleotide
ctccacttatgtcgtttaggggtgggaaag

SEQ ID NO: 428410 - DNA, 30 bp, Artificial Sequence
  Synthetic oligonucleotide
cgaagagtgactaataacgtgcgtggaaag

SEQ ID NO: 428411 - DNA, 30 bp, Artificial Sequence
  Synthetic oligonucleotide
tttggcaccatgttcacacgtagatgaaag

SEQ ID NO: 428412 - DNA, 30 bp, Artificial Sequence
  Synthetic oligonucleotide
tatgcccacatcttatgcatgggttgaaag

SEQ ID NO: 428413 - DNA, 30 bp, Artificial Sequence
  Synthetic oligonucleotide
acaatgttgccggccttggtatgcataaag

SEQ ID NO: 428414 - DNA, 30 bp, Artificial Sequence
  Synthetic oligonucleotide
ctcaccgtagtttatggcttgttcataaag

SEQ ID NO: 428415 - DNA, 30 bp, Artificial Sequence
  Synthetic oligonucleotide
gtttaggccggccacgatgtccagataaag

SEQ ID NO: 428416 - DNA, 30 bp, Artificial Sequence
  Synthetic oligonucleotide
cggttttctatcccaggacaccggataaag

SEQ ID NO: 428417 - DNA, 30 bp, Artificial Sequence
  Synthetic oligonucleotide
ggtttgtagcaatcccaggtttgtataaag

SEQ ID NO: 428418 - DNA, 30 bp, Artificial Sequence
  Synthetic oligonucleotide
tacatatgatgtccttcggttacactaaag

SEQ ID NO: 428419 - DNA, 30 bp, Artificial Sequence
  Synthetic oligonucleotide
atacagtctgactttatttatgacctaaag

SEQ ID NO: 428420 - DNA, 30 bp, Artificial Sequence
  Synthetic oligonucleotide
gaattttgttcgatcacggcagagctaaag

SEQ ID NO: 428421 - DNA, 30 bp, Artificial Sequence
  Synthetic oligonucleotide
gatatggataggctgtcaacgccgctaaag

SEQ ID NO: 428422 - DNA, 30 bp, Artificial Sequence
  Synthetic oligonucleotide
catcagactggggcagcgcctctgctaaag

SEQ ID NO: 428423 - DNA, 30 bp, Artificial Sequence
  Synthetic oligonucleotide
gttctttgaactaatcccttaggcgtaaag

SEQ ID NO: 428424 - DNA, 30 bp, Artificial Sequence
  Synthetic oligonucleotide
ataacgctggctgatttgattgtcgtaaag

SEQ ID NO: 428425 - DNA, 30 bp, Artificial Sequence
  Synthetic oligonucleotide
ggggcccgacaaaattgaaatagtgtaaag

SEQ ID NO: 428426 - DNA, 30 bp, Artificial Sequence
  Synthetic oligonucleotide
ccgtgaaaggtctaacggtggcgtgtaaag

SEQ ID NO: 428427 - DNA, 30 bp, Artificial Sequence
  Synthetic oligonucleotide
ttggaatgatctccaggtgaatcattaaag

SEQ ID NO: 428428 - DNA, 29 bp, Artificial Sequence
  Synthetic oligonucleotide
aatcatcttcgatcttggatgccttaaag

SEQ ID NO: 428429 - DNA, 30 bp, Artificial Sequence
  Synthetic oligonucleotide
ggccgtcgctcatcacactcgcatttaaag

SEQ ID NO: 428430 - DNA, 30 bp, Artificial Sequence
  Synthetic oligonucleotide
tgtgagggtagttaatctctatatttaaag

SEQ ID NO: 428431 - DNA, 30 bp, Artificial Sequence
  Synthetic oligonucleotide
aaatacatcggtgagagtgcatgtttaaag

SEQ ID NO: 428432 - DNA, 30 bp, Artificial Sequence
  Synthetic oligonucleotide
tctcagaagtgatacatagctcaaaacaag

SEQ ID NO: 428433 - DNA, 30 bp, Artificial Sequence
  Synthetic oligonucleotide
aagacttgcggtcgccgtagtgcgaacaag

SEQ ID NO: 428434 - DNA, 30 bp, Artificial Sequence
  Synthetic oligonucleotide
gtgtcactgtacggtaacgtatggaacaag

SEQ ID NO: 428435 - DNA, 30 bp, Artificial Sequence
  Synthetic oligonucleotide
agttaggcttatgttaaggtttttaacaag

SEQ ID NO: 428436 - DNA, 30 bp, Artificial Sequence
  Synthetic oligonucleotide
tatccccacaccttgttggggaatcacaag

SEQ ID NO: 428437 - DNA, 30 bp, Artificial Sequence
  Synthetic oligonucleotide
ccgatgatgaccgtaaacatctctcacaag

SEQ ID NO: 428438 - DNA, 30 bp, Artificial Sequence
  Synthetic oligonucleotide
ccgatgattaccgtaaacatctctcacaag

SEQ ID NO: 428439 - DNA, 30 bp, Artificial Sequence
  Synthetic oligonucleotide
gtctttatgatcaatatcctcatagacaag

SEQ ID NO: 428440 - DNA, 30 bp, Artificial Sequence
  Synthetic oligonucleotide
aatctataacaaatatcttataatgacaag

SEQ ID NO: 428441 - DNA, 30 bp, Artificial Sequence
  Synthetic oligonucleotide
ccccctcgtacccactgagcagatgacaag

SEQ ID NO: 428442 - DNA, 30 bp, Artificial Sequence
  Synthetic oligonucleotide
ggcttaatcgggcagcgggtctctgacaag

SEQ ID NO: 428443 - DNA, 30 bp, Artificial Sequence
  Synthetic oligonucleotide
agtatggcgtagcgagtagtgtactacaag

SEQ ID NO: 428444 - DNA, 30 bp, Artificial Sequence
  Synthetic oligonucleotide
gttgcgcttcagttgtagattatgtacaag

SEQ ID NO: 428445 - DNA, 30 bp, Artificial Sequence
  Synthetic oligonucleotide
tatgaatgtccctcaatcatagtttacaag

SEQ ID NO: 428446 - DNA, 30 bp, Artificial Sequence
  Synthetic oligonucleotide
ttaagactggtcagtgagtctctaaccaag

SEQ ID NO: 428447 - DNA, 30 bp, Artificial Sequence
  Synthetic oligonucleotide
tgttcgtacgacgcaacaagatacaccaag

SEQ ID NO: 428448 - DNA, 30 bp, Artificial Sequence
  Synthetic oligonucleotide
ataaggggcctaatggtttcatgtaccaag

SEQ ID NO: 428449 - DNA, 30 bp, Artificial Sequence
  Synthetic oligonucleotide
ttaagtgtatagcacgtgcataatcccaag

SEQ ID NO: 428450 - DNA, 30 bp, Artificial Sequence
  Synthetic oligonucleotide
attccttccagctagcacggtcatcccaag

SEQ ID NO: 428451 - DNA, 30 bp, Artificial Sequence
  Synthetic oligonucleotide
gttttggatcgaatcaaacattatcccaag

SEQ ID NO: 428452 - DNA, 30 bp, Artificial Sequence
  Synthetic oligonucleotide
ctagggctgggaaattgactaacagccaag

SEQ ID NO: 428453 - DNA, 30 bp, Artificial Sequence
  Synthetic oligonucleotide
gcatctatcttatagtatacggtcgccaag

SEQ ID NO: 428454 - DNA, 30 bp, Artificial Sequence
  Synthetic oligonucleotide
aggggacgcaacgcgcttagagaggccaag

SEQ ID NO: 428455 - DNA, 30 bp, Artificial Sequence
  Synthetic oligonucleotide
gtttggggtggaatggtagacgaggccaag

SEQ ID NO: 428456 - DNA, 30 bp, Artificial Sequence
  Synthetic oligonucleotide
cgttggagccgacgtagtgtatcggccaag

SEQ ID NO: 428457 - DNA, 30 bp, Artificial Sequence
  Synthetic oligonucleotide
gtttatatacactagcataatggggccaag

SEQ ID NO: 428458 - DNA, 30 bp, Artificial Sequence
  Synthetic oligonucleotide
agccggcgatttatgacgagcattgccaag

SEQ ID NO: 428459 - DNA, 30 bp, Artificial Sequence
  Synthetic oligonucleotide
gaatcggagtatacatgttctagatccaag

SEQ ID NO: 428460 - DNA, 30 bp, Artificial Sequence
  Synthetic oligonucleotide
aaacacttgttcttgtattaaatctccaag

SEQ ID NO: 428461 - DNA, 30 bp, Artificial Sequence
  Synthetic oligonucleotide
cttcagttctctttggaggccaggtccaag

SEQ ID NO: 428462 - DNA, 30 bp, Artificial Sequence
  Synthetic oligonucleotide
ctctcattgacggtattagtatggtccaag

SEQ ID NO: 428463 - DNA, 31 bp, Artificial Sequence
  Synthetic oligonucleotide
aataggttagcgattttgcacacattccaag

SEQ ID NO: 428464 - DNA, 30 bp, Artificial Sequence
  Synthetic oligonucleotide
gaacacgcgctcacttgagatcccagcaag

SEQ ID NO: 428465 - DNA, 30 bp, Artificial Sequence
  Synthetic oligonucleotide
aggtacttgagttccggcgacagcagcaag

SEQ ID NO: 428466 - DNA, 30 bp, Artificial Sequence
  Synthetic oligonucleotide
cggctagtacgcgatgacgcgtcgagcaag

SEQ ID NO: 428467 - DNA, 30 bp, Artificial Sequence
  Synthetic oligonucleotide
aaccatgataggtactttggacggagcaag

SEQ ID NO: 428468 - DNA, 30 bp, Artificial Sequence
  Synthetic oligonucleotide
tgcggcgggacggtaggctccttgagcaag

SEQ ID NO: 428469 - DNA, 30 bp, Artificial Sequence
  Synthetic oligonucleotide
ttctcctggggttatcccacggatagcaag

SEQ ID NO: 428470 - DNA, 30 bp, Artificial Sequence
  Synthetic oligonucleotide
aactatcatgctgtcaaccgtagtagcaag

SEQ ID NO: 428471 - DNA, 30 bp, Artificial Sequence
  Synthetic oligonucleotide
aattgattcttaagtagggtcaaacgcaag

SEQ ID NO: 428472 - DNA, 30 bp, Artificial Sequence
  Synthetic oligonucleotide
acatgcttttccgacgtcaggacacgcaag

SEQ ID NO: 428473 - DNA, 30 bp, Artificial Sequence
  Synthetic oligonucleotide
taaatcgaaacgcagggtagggcccgcaag

SEQ ID NO: 428474 - DNA, 30 bp, Artificial Sequence
  Synthetic oligonucleotide
tctccagttaggcgtgacaccgtgcgcaag

SEQ ID NO: 428475 - DNA, 30 bp, Artificial Sequence
  Synthetic oligonucleotide
taggcctgcgactagcataacgttcgcaag

SEQ ID NO: 428476 - DNA, 30 bp, Artificial Sequence
  Synthetic oligonucleotide
ggtctgatttgaagtgcattgaaaggcaag

SEQ ID NO: 428477 - DNA, 30 bp, Artificial Sequence
  Synthetic oligonucleotide
tgcggcattaccactcagaggccaggcaag

SEQ ID NO: 428478 - DNA, 30 bp, Artificial Sequence
  Synthetic oligonucleotide
cttccatcggtagggctaagtcccggcaag

SEQ ID NO: 428479 - DNA, 30 bp, Artificial Sequence
  Synthetic oligonucleotide
gaagtcccatccgattttctaggcggcaag

SEQ ID NO: 428480 - DNA, 30 bp, Artificial Sequence
  Synthetic oligonucleotide
gacccgtctaggtagactggaacgggcaag

SEQ ID NO: 428481 - DNA, 30 bp, Artificial Sequence
  Synthetic oligonucleotide
ccccttaggttgccggagaaagggggcaag

SEQ ID NO: 428482 - DNA, 30 bp, Artificial Sequence
  Synthetic oligonucleotide
ttacatgttttcttcccgggtatgggcaag

SEQ ID NO: 428483 - DNA, 30 bp, Artificial Sequence
  Synthetic oligonucleotide
gcagttatttgtgcgctcgcaggtggcaag

SEQ ID NO: 428484 - DNA, 30 bp, Artificial Sequence
  Synthetic oligonucleotide
ttaaagtactgttcctattataaatgcaag

SEQ ID NO: 428485 - DNA, 30 bp, Artificial Sequence
  Synthetic oligonucleotide
ctcttattcatgcgctaaaagatatgcaag

SEQ ID NO: 428486 - DNA, 30 bp, Artificial Sequence
  Synthetic oligonucleotide
gtcggttaccgcgccaagcccaactgcaag

SEQ ID NO: 428487 - DNA, 30 bp, Artificial Sequence
  Synthetic oligonucleotide
atttaccttgaaaacaggctgaactgcaag

SEQ ID NO: 428488 - DNA, 30 bp, Artificial Sequence
  Synthetic oligonucleotide
tacaaaacgcgaaggagtataggttgcaag

SEQ ID NO: 428489 - DNA, 30 bp, Artificial Sequence
  Synthetic oligonucleotide
cccgttgagcgtatcacaggactttgcaag

SEQ ID NO: 428490 - DNA, 30 bp, Artificial Sequence
  Synthetic oligonucleotide
tagcgcgtacgctatccgctcttttgcaag

SEQ ID NO: 428491 - DNA, 30 bp, Artificial Sequence
  Synthetic oligonucleotide
ggaatggtcgtgatgacgatgcaaatcaag

SEQ ID NO: 428492 - DNA, 30 bp, Artificial Sequence
  Synthetic oligonucleotide
cttgtaattatcagatttttagtaatcaag

SEQ ID NO: 428493 - DNA, 30 bp, Artificial Sequence
  Synthetic oligonucleotide
tgtacacaagatgtgcaccacgccatcaag

SEQ ID NO: 428494 - DNA, 30 bp, Artificial Sequence
  Synthetic oligonucleotide
aagaggtatcgggaatggacattcatcaag

SEQ ID NO: 428495 - DNA, 30 bp, Artificial Sequence
  Synthetic oligonucleotide
gagcccgaaggaagggcgaagggtatcaag

SEQ ID NO: 428496 - DNA, 30 bp, Artificial Sequence
  Synthetic oligonucleotide
ggaaatccttttgaggcttgtgacctcaag

SEQ ID NO: 428497 - DNA, 30 bp, Artificial Sequence
  Synthetic oligonucleotide
gtaagtactgagcattgcaattagctcaag

SEQ ID NO: 428498 - DNA, 30 bp, Artificial Sequence
  Synthetic oligonucleotide
ggaatccggggtggggggactcatctcaag

SEQ ID NO: 428499 - DNA, 30 bp, Artificial Sequence
  Synthetic oligonucleotide
ctcctcgggtgtcccttatgtggtctcaag

SEQ ID NO: 428500 - DNA, 30 bp, Artificial Sequence
  Synthetic oligonucleotide
gccagatagacagtggacgccacagtcaag

SEQ ID NO: 428501 - DNA, 30 bp, Artificial Sequence
  Synthetic oligonucleotide
ggtgttaccgtcgatggtgccttagtcaag

SEQ ID NO: 428502 - DNA, 30 bp, Artificial Sequence
  Synthetic oligonucleotide
ttccgctggtactcccggaatgccgtcaag

SEQ ID NO: 428503 - DNA, 30 bp, Artificial Sequence
  Synthetic oligonucleotide
aatcgcccctttcgacgcccattcgtcaag

SEQ ID NO: 428504 - DNA, 30 bp, Artificial Sequence
  Synthetic oligonucleotide
cttagtcctcggtcatctcctccattcaag

SEQ ID NO: 428505 - DNA, 30 bp, Artificial Sequence
  Synthetic oligonucleotide
agtaacacggcgatatcgataagattcaag

SEQ ID NO: 428506 - DNA, 30 bp, Artificial Sequence
  Synthetic oligonucleotide
gtctttacgcaagacatcctatccttcaag

SEQ ID NO: 428507 - DNA, 30 bp, Artificial Sequence
  Synthetic oligonucleotide
gaagaaagacaccggtgccattccttcaag

SEQ ID NO: 428508 - DNA, 30 bp, Artificial Sequence
  Synthetic oligonucleotide
ttcgttcgaaggcgcgccttgctcttcaag

SEQ ID NO: 428509 - DNA, 30 bp, Artificial Sequence
  Synthetic oligonucleotide
aacacccaaggtgttcgtaacacgttcaag

SEQ ID NO: 428510 - DNA, 30 bp, Artificial Sequence
  Synthetic oligonucleotide
tcgtgcccgtttctatttcttatgttcaag

SEQ ID NO: 428511 - DNA, 30 bp, Artificial Sequence
  Synthetic oligonucleotide
acagtttcatggttatccgaaacaaagaag

SEQ ID NO: 428512 - DNA, 30 bp, Artificial Sequence
  Synthetic oligonucleotide
ctgttagagtcaattcatgatcacaagaag

SEQ ID NO: 428513 - DNA, 30 bp, Artificial Sequence
  Synthetic oligonucleotide
gtcagtgtactaacaggagcacccaagaag

SEQ ID NO: 428514 - DNA, 30 bp, Artificial Sequence
  Synthetic oligonucleotide
attagatcgtgcatcaagcaaatcaagaag

SEQ ID NO: 428515 - DNA, 30 bp, Artificial Sequence
  Synthetic oligonucleotide
atcggtgttggacagtttccacataagaag

SEQ ID NO: 428516 - DNA, 30 bp, Artificial Sequence
  Synthetic oligonucleotide
ggggatagtacgtaggttaggccgcagaag

SEQ ID NO: 428517 - DNA, 30 bp, Artificial Sequence
  Synthetic oligonucleotide
attgcacgtgttctttggtagaggcagaag

SEQ ID NO: 428518 - DNA, 30 bp, Artificial Sequence
  Synthetic oligonucleotide
acagttcacaacggtgacgaaacagagaag

SEQ ID NO: 428519 - DNA, 30 bp, Artificial Sequence
  Synthetic oligonucleotide
ttgttcgagcgtgacatggctttggagaag

SEQ ID NO: 428520 - DNA, 30 bp, Artificial Sequence
  Synthetic oligonucleotide
ggttcccctgtatgtagtcccgttgagaag

SEQ ID NO: 428521 - DNA, 30 bp, Artificial Sequence
  Synthetic oligonucleotide
gttgtccttattatcatcggacaatagaag

SEQ ID NO: 428522 - DNA, 30 bp, Artificial Sequence
  Synthetic oligonucleotide
ataaatattggtttttctcggatatagaag

SEQ ID NO: 428523 - DNA, 30 bp, Artificial Sequence
  Synthetic oligonucleotide
gtccacttcatctgtttaacagtatagaag

SEQ ID NO: 428524 - DNA, 30 bp, Artificial Sequence
  Synthetic oligonucleotide
ccatgcggatatatttacgccccctagaag

SEQ ID NO: 428525 - DNA, 30 bp, Artificial Sequence
  Synthetic oligonucleotide
cgtttagagacgttaatttgcgattagaag

SEQ ID NO: 428526 - DNA, 30 bp, Artificial Sequence
  Synthetic oligonucleotide
tatccaatgggcattagtccccaaacgaag

SEQ ID NO: 428527 - DNA, 30 bp, Artificial Sequence
  Synthetic oligonucleotide
agagatattcggtaacggtctagaacgaag

SEQ ID NO: 428528 - DNA, 30 bp, Artificial Sequence
  Synthetic oligonucleotide
gatcggtcttcggttgcgaaacgaacgaag

SEQ ID NO: 428529 - DNA, 30 bp, Artificial Sequence
  Synthetic oligonucleotide
ttcggtctatatgcttgtttcggaacgaag

SEQ ID NO: 428530 - DNA, 30 bp, Artificial Sequence
  Synthetic oligonucleotide
cggctaatggtccgacacggtaccacgaag

SEQ ID NO: 428531 - DNA, 30 bp, Artificial Sequence
  Synthetic oligonucleotide
acttgcggtgcagcggttctttgcacgaag

SEQ ID NO: 428532 - DNA, 30 bp, Artificial Sequence
  Synthetic oligonucleotide
gcactcggtggcaattttcgaaagacgaag

SEQ ID NO: 428533 - DNA, 30 bp, Artificial Sequence
  Synthetic oligonucleotide
gactgcatggcactcgaatgcgtgacgaag

SEQ ID NO: 428534 - DNA, 30 bp, Artificial Sequence
  Synthetic oligonucleotide
cgtctcgggaaatggcaggacgttacgaag

SEQ ID NO: 428535 - DNA, 30 bp, Artificial Sequence
  Synthetic oligonucleotide
agcgccacgcactgtgcaatggcaccgaag

SEQ ID NO: 428536 - DNA, 30 bp, Artificial Sequence
  Synthetic oligonucleotide
cgccgtcacttgaccctcgtggacccgaag

SEQ ID NO: 428537 - DNA, 30 bp, Artificial Sequence
  Synthetic oligonucleotide
gatgcatttacgcatcatttgtccccgaag

SEQ ID NO: 428538 - DNA, 30 bp, Artificial Sequence
  Synthetic oligonucleotide
ttatagcaggacactctaggcttgccgaag

SEQ ID NO: 428539 - DNA, 30 bp, Artificial Sequence
  Synthetic oligonucleotide
tagctcacacacctcggagacactccgaag

SEQ ID NO: 428540 - DNA, 30 bp, Artificial Sequence
  Synthetic oligonucleotide
tcgagtccgatattaagcctatgtccgaag

SEQ ID NO: 428541 - DNA, 30 bp, Artificial Sequence
  Synthetic oligonucleotide
ttgaaggtttctgcttaccggtcagcgaag

SEQ ID NO: 428542 - DNA, 30 bp, Artificial Sequence
  Synthetic oligonucleotide
aaaaattcaagtcgcacatgtatagcgaag

SEQ ID NO: 428543 - DNA, 40 bp, Artificial Sequence
  Synthetic oligonucleotide
tggttaataagtagtttgcgaagcactaccctttgcgaag

SEQ ID NO: 428544 - DNA, 30 bp, Artificial Sequence
  Synthetic oligonucleotide
ctttggcattatttgatatctgcatcgaag

SEQ ID NO: 428545 - DNA, 30 bp, Artificial Sequence
  Synthetic oligonucleotide
cttatcaatgagctaggtcacccctcgaag

SEQ ID NO: 428546 - DNA, 30 bp, Artificial Sequence
  Synthetic oligonucleotide
ccgtctctgtgagacgttcgtatctcgaag

SEQ ID NO: 428547 - DNA, 30 bp, Artificial Sequence
  Synthetic oligonucleotide
ttagcttttactgaccttttgcattcgaag

SEQ ID NO: 428548 - DNA, 30 bp, Artificial Sequence
  Synthetic oligonucleotide
ctttcgttggatccgggcgtgcgcaggaag

SEQ ID NO: 428549 - DNA, 30 bp, Artificial Sequence
  Synthetic oligonucleotide
tacctttggagggccgccttttgcaggaag

SEQ ID NO: 428550 - DNA, 30 bp, Artificial Sequence
  Synthetic oligonucleotide
agtgtcccattcctagatacggcacggaag

SEQ ID NO: 428551 - DNA, 30 bp, Artificial Sequence
  Synthetic oligonucleotide
cattacaccggggaagcacccgtccggaag

SEQ ID NO: 428552 - DNA, 30 bp, Artificial Sequence
  Synthetic oligonucleotide
gcggcatcgtccgcttcagtgtagcggaag

SEQ ID NO: 428553 - DNA, 30 bp, Artificial Sequence
  Synthetic oligonucleotide
cccgaggtggcagctgccacttggcggaag

SEQ ID NO: 428554 - DNA, 30 bp, Artificial Sequence
  Synthetic oligonucleotide
atagtggaaccgctaggtcgttctcggaag

SEQ ID NO: 428555 - DNA, 30 bp, Artificial Sequence
  Synthetic oligonucleotide
tcggttctgttgcaagcacagtgtcggaag

SEQ ID NO: 428556 - DNA, 30 bp, Artificial Sequence
  Synthetic oligonucleotide
gagaggcataagcagaaacttggcgggaag

SEQ ID NO: 428557 - DNA, 30 bp, Artificial Sequence
  Synthetic oligonucleotide
cagcatggtatttaatatccacgggggaag

SEQ ID NO: 428558 - DNA, 30 bp, Artificial Sequence
  Synthetic oligonucleotide
tatgaatacgtcgaatggtagtcatggaag

SEQ ID NO: 428559 - DNA, 30 bp, Artificial Sequence
  Synthetic oligonucleotide
atttgttatggcatcaagaaactatggaag

SEQ ID NO: 428560 - DNA, 30 bp, Artificial Sequence
  Synthetic oligonucleotide
atcggttcgtacgcgggaatgccctggaag

SEQ ID NO: 428561 - DNA, 30 bp, Artificial Sequence
  Synthetic oligonucleotide
cagcacgaaagattctcgggcgcctggaag

SEQ ID NO: 428562 - DNA, 30 bp, Artificial Sequence
  Synthetic oligonucleotide
gacgccttctcttaacgagtctcctggaag

SEQ ID NO: 428563 - DNA, 30 bp, Artificial Sequence
  Synthetic oligonucleotide
ttaacaggcttttgtcatttctgctggaag

SEQ ID NO: 428564 - DNA, 30 bp, Artificial Sequence
  Synthetic oligonucleotide
atactcggttatctaagaagtatgtggaag

SEQ ID NO: 428565 - DNA, 30 bp, Artificial Sequence
  Synthetic oligonucleotide
agattcgtttctgtatgatctaattggaag

SEQ ID NO: 428566 - DNA, 30 bp, Artificial Sequence
  Synthetic oligonucleotide
gcttggccggtggtcgggccaagttggaag

SEQ ID NO: 428567 - DNA, 30 bp, Artificial Sequence
  Synthetic oligonucleotide
cgaagcgcgacacgttatacgtgttggaag

SEQ ID NO: 428568 - DNA, 29 bp, Artificial Sequence
  Synthetic oligonucleotide
tattgtaaaactgcgaatacctttggaag

SEQ ID NO: 428569 - DNA, 30 bp, Artificial Sequence
  Synthetic oligonucleotide
gaaagctatacgggttccgcagaaatgaag

SEQ ID NO: 428570 - DNA, 30 bp, Artificial Sequence
  Synthetic oligonucleotide
tgattttagccaactcctgatgtgatgaag

SEQ ID NO: 428571 - DNA, 30 bp, Artificial Sequence
  Synthetic oligonucleotide
tccacaggctgacgtcggacattgatgaag

SEQ ID NO: 428572 - DNA, 30 bp, Artificial Sequence
  Synthetic oligonucleotide
gcggtctgaccggcactagctttgatgaag

SEQ ID NO: 428573 - DNA, 30 bp, Artificial Sequence
  Synthetic oligonucleotide
ctgcagttcctgggttacagtagtatgaag

SEQ ID NO: 428574 - DNA, 30 bp, Artificial Sequence
  Synthetic oligonucleotide
cattgggggttctggaggcacattatgaag

SEQ ID NO: 428575 - DNA, 30 bp, Artificial Sequence
  Synthetic oligonucleotide
atacgagatgttgctgttcctgttatgaag

SEQ ID NO: 428576 - DNA, 29 bp, Artificial Sequence
  Synthetic oligonucleotide
tttatgataatatcttaaatagactgaag

SEQ ID NO: 428577 - DNA, 30 bp, Artificial Sequence
  Synthetic oligonucleotide
aaaactcgatgctctaaatcgtccctgaag

SEQ ID NO: 428578 - DNA, 30 bp, Artificial Sequence
  Synthetic oligonucleotide
aaatacaatctttctgtattgttagtgaag

SEQ ID NO: 428579 - DNA, 30 bp, Artificial Sequence
  Synthetic oligonucleotide
tatctcaggcgaatctttggtttagtgaag

SEQ ID NO: 428580 - DNA, 30 bp, Artificial Sequence
  Synthetic oligonucleotide
gtaattagagtagccgcatatcacgtgaag

SEQ ID NO: 428581 - DNA, 30 bp, Artificial Sequence
  Synthetic oligonucleotide
gccctggtgctaaagattaagcatgtgaag

SEQ ID NO: 428582 - DNA, 30 bp, Artificial Sequence
  Synthetic oligonucleotide
tataaaatttcagtgttaggtggtgtgaag

SEQ ID NO: 428583 - DNA, 30 bp, Artificial Sequence
  Synthetic oligonucleotide
gtactcgctttggggaatagtattgtgaag

SEQ ID NO: 428584 - DNA, 30 bp, Artificial Sequence
  Synthetic oligonucleotide
tcgagtattagtccccagctatacttgaag

SEQ ID NO: 428585 - DNA, 30 bp, Artificial Sequence
  Synthetic oligonucleotide
ctccaactcatcacatgatagcagttgaag

SEQ ID NO: 428586 - DNA, 30 bp, Artificial Sequence
  Synthetic oligonucleotide
tggagactgctcctagcggtaggaaataag

SEQ ID NO: 428587 - DNA, 30 bp, Artificial Sequence
  Synthetic oligonucleotide
cccaattaaagattcaaggcagtcaataag

SEQ ID NO: 428588 - DNA, 30 bp, Artificial Sequence
  Synthetic oligonucleotide
gcaataattatatgcatatcattcaataag

SEQ ID NO: 428589 - DNA, 30 bp, Artificial Sequence
  Synthetic oligonucleotide
tttgattgacagggggaataaaggaataag

SEQ ID NO: 428590 - DNA, 30 bp, Artificial Sequence
  Synthetic oligonucleotide
caagagccggggacgtacacccttaataag

SEQ ID NO: 428591 - DNA, 30 bp, Artificial Sequence
  Synthetic oligonucleotide
ttcatggattgaggtgtaggttaacataag

SEQ ID NO: 428592 - DNA, 30 bp, Artificial Sequence
  Synthetic oligonucleotide
tctgggttaacggggcgccgcagacataag

SEQ ID NO: 428593 - DNA, 31 bp, Artificial Sequence
  Synthetic oligonucleotide
gagcactagtaagcttatggtcgtacataag

SEQ ID NO: 428594 - DNA, 30 bp, Artificial Sequence
  Synthetic oligonucleotide
agcagtttgtagagagtattcgtacataag

SEQ ID NO: 428595 - DNA, 30 bp, Artificial Sequence
  Synthetic oligonucleotide
ttatagatgtcctggggcatcagccataag

SEQ ID NO: 428596 - DNA, 30 bp, Artificial Sequence
  Synthetic oligonucleotide
tttatcttcatagtacggcgtgctcataag

SEQ ID NO: 428597 - DNA, 30 bp, Artificial Sequence
  Synthetic oligonucleotide
aatgtacattttgctagaggcacagataag

SEQ ID NO: 428598 - DNA, 30 bp, Artificial Sequence
  Synthetic oligonucleotide
gggtagccgcagttgtgaacattagataag

SEQ ID NO: 428599 - DNA, 30 bp, Artificial Sequence
  Synthetic oligonucleotide
gtgttctactctcattttgtcttagataag

SEQ ID NO: 428600 - DNA, 30 bp, Artificial Sequence
  Synthetic oligonucleotide
agttaggatcttgtgcattctgccgataag

SEQ ID NO: 428601 - DNA, 30 bp, Artificial Sequence
  Synthetic oligonucleotide
ctctaaggttgagtggaccagtaggataag

SEQ ID NO: 428602 - DNA, 30 bp, Artificial Sequence
  Synthetic oligonucleotide
taatactgagcgcaccgctcctcggataag

SEQ ID NO: 428603 - DNA, 30 bp, Artificial Sequence
  Synthetic oligonucleotide
taggagcgaaatggcgggcagcgggataag

SEQ ID NO: 428604 - DNA, 30 bp, Artificial Sequence
  Synthetic oligonucleotide
gtacaatgtcccagttctatgcgggataag

SEQ ID NO: 428605 - DNA, 30 bp, Artificial Sequence
  Synthetic oligonucleotide
accccggcctcgatcttgacttgggataag

SEQ ID NO: 428606 - DNA, 30 bp, Artificial Sequence
  Synthetic oligonucleotide
gatacttataactagtacctccaatataag

SEQ ID NO: 428607 - DNA, 30 bp, Artificial Sequence
  Synthetic oligonucleotide
gacagtattgtcaatatggcggaatataag

SEQ ID NO: 428608 - DNA, 30 bp, Artificial Sequence
  Synthetic oligonucleotide
ccggttacttaaccgtggttaggatataag

SEQ ID NO: 428609 - DNA, 30 bp, Artificial Sequence
  Synthetic oligonucleotide
aggttgaggaagcagtcatggtgatataag

SEQ ID NO: 428610 - DNA, 30 bp, Artificial Sequence
  Synthetic oligonucleotide
tcgtgatataaattacagcggtgctataag

SEQ ID NO: 428611 - DNA, 30 bp, Artificial Sequence
  Synthetic oligonucleotide
gaggtgggtcaaccgaagctttagtataag

SEQ ID NO: 428612 - DNA, 30 bp, Artificial Sequence
  Synthetic oligonucleotide
aagaaatcgttacattgtaaccggtataag

SEQ ID NO: 428613 - DNA, 30 bp, Artificial Sequence
  Synthetic oligonucleotide
ttgctgcgacctgctaaaggcttgtataag

SEQ ID NO: 428614 - DNA, 30 bp, Artificial Sequence
  Synthetic oligonucleotide
atgtaatacctgtcctggggaaattataag

SEQ ID NO: 428615 - DNA, 30 bp, Artificial Sequence
  Synthetic oligonucleotide
tgcttgagtgaggcgagtatttacactaag

SEQ ID NO: 428616 - DNA, 31 bp, Artificial Sequence
  Synthetic oligonucleotide
gagaagacaaattcgtatttgtcggactaag

SEQ ID NO: 428617 - DNA, 30 bp, Artificial Sequence
  Synthetic oligonucleotide
gcctaggtgctccttcaggagatgactaag

SEQ ID NO: 428618 - DNA, 31 bp, Artificial Sequence
  Synthetic oligonucleotide
ataaaccctcacttcggccgagagtactaag

SEQ ID NO: 428619 - DNA, 30 bp, Artificial Sequence
  Synthetic oligonucleotide
cgtaacacgtgaccgccatacggccctaag

SEQ ID NO: 428620 - DNA, 30 bp, Artificial Sequence
  Synthetic oligonucleotide
gcgctgtatccccggaaaggtggccctaag

SEQ ID NO: 428621 - DNA, 30 bp, Artificial Sequence
  Synthetic oligonucleotide
gtgtcttcggttcgttctgagatccctaag

SEQ ID NO: 428622 - DNA, 30 bp, Artificial Sequence
  Synthetic oligonucleotide
caggcacaaaggtactgatattctcctaag

SEQ ID NO: 428623 - DNA, 30 bp, Artificial Sequence
  Synthetic oligonucleotide
cctagttagcaattgtattccttagctaag

SEQ ID NO: 428624 - DNA, 30 bp, Artificial Sequence
  Synthetic oligonucleotide
tgggtagaagggtacatttcgcgggctaag

SEQ ID NO: 428625 - DNA, 30 bp, Artificial Sequence
  Synthetic oligonucleotide
ttttaattaaggtgcataaagttggctaag

SEQ ID NO: 428626 - DNA, 30 bp, Artificial Sequence
  Synthetic oligonucleotide
tttaatctacggacaggattcagtgctaag

SEQ ID NO: 428627 - DNA, 30 bp, Artificial Sequence
  Synthetic oligonucleotide
attacacccggcgggaagatcctctctaag

SEQ ID NO: 428628 - DNA, 30 bp, Artificial Sequence
  Synthetic oligonucleotide
tcttattaaggacttgcccactgttctaag

SEQ ID NO: 428629 - DNA, 30 bp, Artificial Sequence
  Synthetic oligonucleotide
ttcttcgaggtacacgagcgtgtttctaag

SEQ ID NO: 428630 - DNA, 30 bp, Artificial Sequence
  Synthetic oligonucleotide
tcacggtcgcttgtgattatttgaagtaag

SEQ ID NO: 428631 - DNA, 30 bp, Artificial Sequence
  Synthetic oligonucleotide
ctggttatacgaatgaataggtgcagtaag

SEQ ID NO: 428632 - DNA, 30 bp, Artificial Sequence
  Synthetic oligonucleotide
agccagttgaatatcattagtgtcagtaag

SEQ ID NO: 428633 - DNA, 30 bp, Artificial Sequence
  Synthetic oligonucleotide
taatctctctttgcagaagctttcagtaag

SEQ ID NO: 428634 - DNA, 30 bp, Artificial Sequence
  Synthetic oligonucleotide
aaaagttattcacgtgcaggactgagtaag

SEQ ID NO: 428635 - DNA, 30 bp, Artificial Sequence
  Synthetic oligonucleotide
tttccggtctctctgtgccgctctagtaag

SEQ ID NO: 428636 - DNA, 30 bp, Artificial Sequence
  Synthetic oligonucleotide
agatcgtccattgttgcagggacacgtaag

SEQ ID NO: 428637 - DNA, 30 bp, Artificial Sequence
  Synthetic oligonucleotide
ataggatgatatttcggacttagacgtaag

SEQ ID NO: 428638 - DNA, 30 bp, Artificial Sequence
  Synthetic oligonucleotide
aaaggatacgttactattaaatgacgtaag

SEQ ID NO: 428639 - DNA, 30 bp, Artificial Sequence
  Synthetic oligonucleotide
attgcgcctcccctgggcgaatcccgtaag

SEQ ID NO: 428640 - DNA, 30 bp, Artificial Sequence
  Synthetic oligonucleotide
aacgagcgcgccgtacgttagtagcgtaag

SEQ ID NO: 428641 - DNA, 30 bp, Artificial Sequence
  Synthetic oligonucleotide
gcatgtctgtggatgggaatatcaggtaag

SEQ ID NO: 428642 - DNA, 30 bp, Artificial Sequence
  Synthetic oligonucleotide
ttctgggccctcatgcagacggagggtaag

SEQ ID NO: 428643 - DNA, 30 bp, Artificial Sequence
  Synthetic oligonucleotide
gcaatttcatctattccagtgatgggtaag

SEQ ID NO: 428644 - DNA, 30 bp, Artificial Sequence
  Synthetic oligonucleotide
tatgccaggaatctaccttgaaaatgtaag

SEQ ID NO: 428645 - DNA, 30 bp, Artificial Sequence
  Synthetic oligonucleotide
ttaagattggagacgcattttccatgtaag

SEQ ID NO: 428646 - DNA, 30 bp, Artificial Sequence
  Synthetic oligonucleotide
gcggtggatcattatgggcagtcatgtaag

SEQ ID NO: 428647 - DNA, 30 bp, Artificial Sequence
  Synthetic oligonucleotide
caattgtcgccattcttcactatctgtaag

SEQ ID NO: 428648 - DNA, 30 bp, Artificial Sequence
  Synthetic oligonucleotide
gtcctctagcgatgtattccatcgtgtaag

SEQ ID NO: 428649 - DNA, 30 bp, Artificial Sequence
  Synthetic oligonucleotide
tttagagccttacaagacactctgtgtaag

SEQ ID NO: 428650 - DNA, 30 bp, Artificial Sequence
  Synthetic oligonucleotide
gcctcggtcggcgtgggatttttttgtaag

SEQ ID NO: 428651 - DNA, 30 bp, Artificial Sequence
  Synthetic oligonucleotide
ttatatgagtctgatctttttataattaag

SEQ ID NO: 428652 - DNA, 30 bp, Artificial Sequence
  Synthetic oligonucleotide
atggaaaccgcgccctcctgatccattaag

SEQ ID NO: 428653 - DNA, 30 bp, Artificial Sequence
  Synthetic oligonucleotide
gttttttagacagtggtgaatacgattaag

SEQ ID NO: 428654 - DNA, 30 bp, Artificial Sequence
  Synthetic oligonucleotide
aacaccgggtcttaaaagccagcgattaag

SEQ ID NO: 428655 - DNA, 30 bp, Artificial Sequence
  Synthetic oligonucleotide
acccatatattaccttcaaggcttattaag

SEQ ID NO: 428656 - DNA, 30 bp, Artificial Sequence
  Synthetic oligonucleotide
taagaaaatcgagattaatggtttattaag

SEQ ID NO: 428657 - DNA, 30 bp, Artificial Sequence
  Synthetic oligonucleotide
cttaaatctcagtgtaccaccgctcttaag

SEQ ID NO: 428658 - DNA, 30 bp, Artificial Sequence
  Synthetic oligonucleotide
gcgggacagtacggccaagagagagttaag

SEQ ID NO: 428659 - DNA, 30 bp, Artificial Sequence
  Synthetic oligonucleotide
tccgagtgaccaagccccagattagttaag

SEQ ID NO: 428660 - DNA, 30 bp, Artificial Sequence
  Synthetic oligonucleotide
tgtgtcatttatataatggcgttcgttaag

SEQ ID NO: 428661 - DNA, 30 bp, Artificial Sequence
  Synthetic oligonucleotide
ttattcccgaccttcgtaaatatggttaag

SEQ ID NO: 428662 - DNA, 30 bp, Artificial Sequence
  Synthetic oligonucleotide
gaaaggggggatagtctaaagggatttaag

SEQ ID NO: 428663 - DNA, 30 bp, Artificial Sequence
  Synthetic oligonucleotide
ctcattgaggggtctctacctagctttaag

SEQ ID NO: 428664 - DNA, 30 bp, Artificial Sequence
  Synthetic oligonucleotide
ggaatcagtctatcatgatcccgctttaag

SEQ ID NO: 428665 - DNA, 30 bp, Artificial Sequence
  Synthetic oligonucleotide
gccaaacgtctagaagtaggcgtttttaag

SEQ ID NO: 428666 - DNA, 30 bp, Artificial Sequence
  Synthetic oligonucleotide
ctcgtctaaatcccaatagggctaaaacag

SEQ ID NO: 428667 - DNA, 30 bp, Artificial Sequence
  Synthetic oligonucleotide
cagcccgtttatattataaaacggcaacag

SEQ ID NO: 428668 - DNA, 30 bp, Artificial Sequence
  Synthetic oligonucleotide
gtaagagggcacccctgcaatcggcaacag

SEQ ID NO: 428669 - DNA, 30 bp, Artificial Sequence
  Synthetic oligonucleotide
cgcatggcacccctgctacaaatgcaacag

SEQ ID NO: 428670 - DNA, 30 bp, Artificial Sequence
  Synthetic oligonucleotide
cgtgccttggacagcaccgtacaagaacag

SEQ ID NO: 428671 - DNA, 30 bp, Artificial Sequence
  Synthetic oligonucleotide
gacggtgcaataccgtcaccgctggaacag

SEQ ID NO: 428672 - DNA, 30 bp, Artificial Sequence
  Synthetic oligonucleotide
cacgtttacgcgaacattcactctgaacag

SEQ ID NO: 428673 - DNA, 30 bp, Artificial Sequence
  Synthetic oligonucleotide
gtgttcctcgcgtaggcatagccctaacag

SEQ ID NO: 428674 - DNA, 30 bp, Artificial Sequence
  Synthetic oligonucleotide
cttgggattacacctcggtgcgcctaacag

SEQ ID NO: 428675 - DNA, 30 bp, Artificial Sequence
  Synthetic oligonucleotide
actatttctagaacaaaaactgcttaacag

SEQ ID NO: 428676 - DNA, 30 bp, Artificial Sequence
  Synthetic oligonucleotide
ttcaggtattatttccttgtgctttaacag

SEQ ID NO: 428677 - DNA, 30 bp, Artificial Sequence
  Synthetic oligonucleotide
tcagacacaaaagggctgcgccaaacacag

SEQ ID NO: 428678 - DNA, 30 bp, Artificial Sequence
  Synthetic oligonucleotide
cgtaaagttgctcacggtgggttaacacag

SEQ ID NO: 428679 - DNA, 30 bp, Artificial Sequence
  Synthetic oligonucleotide
ggattgctaaacagtgatctaaacacacag

SEQ ID NO: 428680 - DNA, 30 bp, Artificial Sequence
  Synthetic oligonucleotide
tactccccagcggtaagatgcgagacacag

SEQ ID NO: 428681 - DNA, 30 bp, Artificial Sequence
  Synthetic oligonucleotide
atctttgaatctagttatcatacgacacag

SEQ ID NO: 428682 - DNA, 30 bp, Artificial Sequence
  Synthetic oligonucleotide
caatgggcgtgtaagggttgacgtacacag

SEQ ID NO: 428683 - DNA, 30 bp, Artificial Sequence
  Synthetic oligonucleotide
ttgaggttttaatgaaccgcgggtacacag

SEQ ID NO: 428684 - DNA, 30 bp, Artificial Sequence
  Synthetic oligonucleotide
tgacctgtaaatcctagcattattacacag

SEQ ID NO: 428685 - DNA, 30 bp, Artificial Sequence
  Synthetic oligonucleotide
attacattatttagagtgccccttacacag

SEQ ID NO: 428686 - DNA, 30 bp, Artificial Sequence
  Synthetic oligonucleotide
aaacccatttcaagtaaaaatccaccacag

SEQ ID NO: 428687 - DNA, 30 bp, Artificial Sequence
  Synthetic oligonucleotide
atcatgcgacgtattcatggccgagcacag

SEQ ID NO: 428688 - DNA, 30 bp, Artificial Sequence
  Synthetic oligonucleotide
actaaagacggtctatggacactagcacag

SEQ ID NO: 428689 - DNA, 30 bp, Artificial Sequence
  Synthetic oligonucleotide
tgtgtaccgcgaagatttacactagcacag

SEQ ID NO: 428690 - DNA, 30 bp, Artificial Sequence
  Synthetic oligonucleotide
ttcaactgggtgcctctgcggatcgcacag

SEQ ID NO: 428691 - DNA, 30 bp, Artificial Sequence
  Synthetic oligonucleotide
cctgaatggcgatccgggttcttcgcacag

SEQ ID NO: 428692 - DNA, 30 bp, Artificial Sequence
  Synthetic oligonucleotide
ggactaatacctttaattcacgcggcacag

SEQ ID NO: 428693 - DNA, 30 bp, Artificial Sequence
  Synthetic oligonucleotide
acgggctctgtataaatgtagaactcacag

SEQ ID NO: 428694 - DNA, 30 bp, Artificial Sequence
  Synthetic oligonucleotide
cccctgtcctggggaagcaattggtcacag

SEQ ID NO: 428695 - DNA, 30 bp, Artificial Sequence
  Synthetic oligonucleotide
tagagggaagcgtctcagtatccttcacag

SEQ ID NO: 428696 - DNA, 31 bp, Artificial Sequence
  Synthetic oligonucleotide
gaaagtcagtgggttcggaatctgaagacag

SEQ ID NO: 428697 - DNA, 30 bp, Artificial Sequence
  Synthetic oligonucleotide
cttccgtatcagcgactgcttgacagacag

SEQ ID NO: 428698 - DNA, 30 bp, Artificial Sequence
  Synthetic oligonucleotide
cgctcagttggatactatatggtcagacag

SEQ ID NO: 428699 - DNA, 30 bp, Artificial Sequence
  Synthetic oligonucleotide
acgtcaggatctgtgagatattcgagacag

SEQ ID NO: 428700 - DNA, 30 bp, Artificial Sequence
  Synthetic oligonucleotide
gaaactatatgccctgatatggctagacag

SEQ ID NO: 428701 - DNA, 30 bp, Artificial Sequence
  Synthetic oligonucleotide
ggcgatttaacggaacgtagcagtagacag

SEQ ID NO: 428702 - DNA, 30 bp, Artificial Sequence
  Synthetic oligonucleotide
ggtgcgaggttaaaatactggccacgacag

SEQ ID NO: 428703 - DNA, 30 bp, Artificial Sequence
  Synthetic oligonucleotide
tgaattttcacagcacgtgcgcggcgacag

SEQ ID NO: 428704 - DNA, 30 bp, Artificial Sequence
  Synthetic oligonucleotide
actcgaggttccggtggctagactcgacag

SEQ ID NO: 428705 - DNA, 29 bp, Artificial Sequence
  Synthetic oligonucleotide
tttcatcgatgcagatgggtactcgacag

SEQ ID NO: 428706 - DNA, 30 bp, Artificial Sequence
  Synthetic oligonucleotide
ctgctggggcaccttccttcttttcgacag

SEQ ID NO: 428707 - DNA, 30 bp, Artificial Sequence
  Synthetic oligonucleotide
ctgggccgtcaaaagtctctcacgggacag

SEQ ID NO: 428708 - DNA, 30 bp, Artificial Sequence
  Synthetic oligonucleotide
aaacgcgcggcatatcctgaaactggacag

SEQ ID NO: 428709 - DNA, 30 bp, Artificial Sequence
  Synthetic oligonucleotide
tcgccaggggagcactgtcttattggacag

SEQ ID NO: 428710 - DNA, 30 bp, Artificial Sequence
  Synthetic oligonucleotide
atttcagggggtagctccttacttggacag

SEQ ID NO: 428711 - DNA, 30 bp, Artificial Sequence
  Synthetic oligonucleotide
taaaagattgtcaaccgttctgttggacag

SEQ ID NO: 428712 - DNA, 30 bp, Artificial Sequence
  Synthetic oligonucleotide
ggtctctgtaagtcagaatttgttggacag

SEQ ID NO: 428713 - DNA, 30 bp, Artificial Sequence
  Synthetic oligonucleotide
ttagacgcgacgtatcgtgtaacatgacag

SEQ ID NO: 428714 - DNA, 30 bp, Artificial Sequence
  Synthetic oligonucleotide
acctatacatggtgtggtgcgtgatgacag

SEQ ID NO: 428715 - DNA, 30 bp, Artificial Sequence
  Synthetic oligonucleotide
attgggaggggcggcccaaaaaacatacag

SEQ ID NO: 428716 - DNA, 30 bp, Artificial Sequence
  Synthetic oligonucleotide
accaggagtgccttagaatactctatacag

SEQ ID NO: 428717 - DNA, 30 bp, Artificial Sequence
  Synthetic oligonucleotide
gtttcagggattataccgtaacgtatacag

SEQ ID NO: 428718 - DNA, 30 bp, Artificial Sequence
  Synthetic oligonucleotide
gccagtgggttgcatggacactgtatacag

SEQ ID NO: 428719 - DNA, 30 bp, Artificial Sequence
  Synthetic oligonucleotide
ataggccgcctaggagcttctgttatacag

SEQ ID NO: 428720 - DNA, 30 bp, Artificial Sequence
  Synthetic oligonucleotide
acattaggcgcactttagaaaccactacag

SEQ ID NO: 428721 - DNA, 30 bp, Artificial Sequence
  Synthetic oligonucleotide
tacgtaagcattgccagtgttgcactacag

SEQ ID NO: 428722 - DNA, 30 bp, Artificial Sequence
  Synthetic oligonucleotide
tattagaaagctatatgatcgggactacag

SEQ ID NO: 428723 - DNA, 30 bp, Artificial Sequence
  Synthetic oligonucleotide
aaatttaaagccccgacacaacatctacag

SEQ ID NO: 428724 - DNA, 30 bp, Artificial Sequence
  Synthetic oligonucleotide
tgcgacgccgataacttcgcagacgtacag

SEQ ID NO: 428725 - DNA, 30 bp, Artificial Sequence
  Synthetic oligonucleotide
cagtcccgcgtgtactcggaggacgtacag

SEQ ID NO: 428726 - DNA, 30 bp, Artificial Sequence
  Synthetic oligonucleotide
gatcgctcttgaccatgttacccggtacag

SEQ ID NO: 428727 - DNA, 30 bp, Artificial Sequence
  Synthetic oligonucleotide
gaaatctcagaccagggttgtttcttacag

SEQ ID NO: 428728 - DNA, 30 bp, Artificial Sequence
  Synthetic oligonucleotide
gaggtcgggatgcgcgctcttgtgttacag

SEQ ID NO: 428729 - DNA, 30 bp, Artificial Sequence
  Synthetic oligonucleotide
aaaaacactacgggatttgcggctttacag

SEQ ID NO: 428730 - DNA, 30 bp, Artificial Sequence
  Synthetic oligonucleotide
aaactgtatagggagatggtttctttacag

SEQ ID NO: 428731 - DNA, 30 bp, Artificial Sequence
  Synthetic oligonucleotide
gttgaacgcagacagaacgcaccaaaccag

SEQ ID NO: 428732 - DNA, 30 bp, Artificial Sequence
  Synthetic oligonucleotide
ctcgcacatgtggtcggagtgcgaaaccag

SEQ ID NO: 428733 - DNA, 30 bp, Artificial Sequence
  Synthetic oligonucleotide
gcctcgttcgcatctatgagaaggaaccag

SEQ ID NO: 428734 - DNA, 30 bp, Artificial Sequence
  Synthetic oligonucleotide
gacactgttacggagtactccggtaaccag

SEQ ID NO: 428735 - DNA, 30 bp, Artificial Sequence
  Synthetic oligonucleotide
gcaggatacagggcgatggtaatcgaccag

SEQ ID NO: 428736 - DNA, 30 bp, Artificial Sequence
  Synthetic oligonucleotide
gtccggactcactttgtagagtcataccag

SEQ ID NO: 428737 - DNA, 30 bp, Artificial Sequence
  Synthetic oligonucleotide
ttggttaccgttaatgtagaggtataccag

SEQ ID NO: 428738 - DNA, 30 bp, Artificial Sequence
  Synthetic oligonucleotide
tcaatcggggtcatcgcgcgtaactaccag

SEQ ID NO: 428739 - DNA, 30 bp, Artificial Sequence
  Synthetic oligonucleotide
cctaggctctagcatattaaattctaccag

SEQ ID NO: 428740 - DNA, 30 bp, Artificial Sequence
  Synthetic oligonucleotide
ttgtgtacagccgctgactgtacgtaccag

SEQ ID NO: 428741 - DNA, 30 bp, Artificial Sequence
  Synthetic oligonucleotide
gtgctcctgatcacccacgggccttaccag

SEQ ID NO: 428742 - DNA, 30 bp, Artificial Sequence
  Synthetic oligonucleotide
cgtcacggtcgggtttcgagcttttaccag

SEQ ID NO: 428743 - DNA, 30 bp, Artificial Sequence
  Synthetic oligonucleotide
gagacgggtatgcaaatagttgcaacccag

SEQ ID NO: 428744 - DNA, 30 bp, Artificial Sequence
  Synthetic oligonucleotide
tatgcggtctaagactgacaaagcacccag

SEQ ID NO: 428745 - DNA, 30 bp, Artificial Sequence
  Synthetic oligonucleotide
cggcgtagtgattgacaggcgtggacccag

SEQ ID NO: 428746 - DNA, 30 bp, Artificial Sequence
  Synthetic oligonucleotide
actttcgcatgtctgtgatggacaccccag

SEQ ID NO: 428747 - DNA, 30 bp, Artificial Sequence
  Synthetic oligonucleotide
gtgtgcactgtatatttttgaagcccccag

SEQ ID NO: 428748 - DNA, 30 bp, Artificial Sequence
  Synthetic oligonucleotide
acattagttgaagtgacggcaggcccccag

SEQ ID NO: 428749 - DNA, 30 bp, Artificial Sequence
  Synthetic oligonucleotide
cccctctgactgatccttcatggcccccag

SEQ ID NO: 428750 - DNA, 30 bp, Artificial Sequence
  Synthetic oligonucleotide
ctaccagggtcttccctggtatatccccag

SEQ ID NO: 428751 - DNA, 30 bp, Artificial Sequence
  Synthetic oligonucleotide
gacggattgccctggcggcagacagcccag

SEQ ID NO: 428752 - DNA, 30 bp, Artificial Sequence
  Synthetic oligonucleotide
agtatctaactgacccaagcaggcgcccag

SEQ ID NO: 428753 - DNA, 30 bp, Artificial Sequence
  Synthetic oligonucleotide
attactcgtcctagacaggtttgatcccag

SEQ ID NO: 428754 - DNA, 30 bp, Artificial Sequence
  Synthetic oligonucleotide
gaaactcattgtgaagcaattttatcccag

SEQ ID NO: 428755 - DNA, 30 bp, Artificial Sequence
  Synthetic oligonucleotide
ggcatttaacatatggatgctaagtcccag

SEQ ID NO: 428756 - DNA, 30 bp, Artificial Sequence
  Synthetic oligonucleotide
gggttttctaggacttggatctcgtcccag

SEQ ID NO: 428757 - DNA, 30 bp, Artificial Sequence
  Synthetic oligonucleotide
aagtaattatcacgtcatgatgattcccag

SEQ ID NO: 428758 - DNA, 30 bp, Artificial Sequence
  Synthetic oligonucleotide
ggccaaagttaatgtttgtaaagttcccag

SEQ ID NO: 428759 - DNA, 30 bp, Artificial Sequence
  Synthetic oligonucleotide
tagcactgacgcaaagcggacaaaagccag

SEQ ID NO: 428760 - DNA, 30 bp, Artificial Sequence
  Synthetic oligonucleotide
attaaggaaagttggggtgcaccgagccag

SEQ ID NO: 428761 - DNA, 30 bp, Artificial Sequence
  Synthetic oligonucleotide
gttattcgagcttgccaattacggagccag

SEQ ID NO: 428762 - DNA, 30 bp, Artificial Sequence
  Synthetic oligonucleotide
gtagatgattacttcctcgtatggagccag

SEQ ID NO: 428763 - DNA, 30 bp, Artificial Sequence
  Synthetic oligonucleotide
tattgagcgtacggtgttcctatgagccag

SEQ ID NO: 428764 - DNA, 30 bp, Artificial Sequence
  Synthetic oligonucleotide
tatgaaataccaatgatcacaattagccag

SEQ ID NO: 428765 - DNA, 30 bp, Artificial Sequence
  Synthetic oligonucleotide
cgtagctaaatatcatgctacagacgccag

SEQ ID NO: 428766 - DNA, 30 bp, Artificial Sequence
  Synthetic oligonucleotide
ttcgatcgtgtcagggtccgcatacgccag

SEQ ID NO: 428767 - DNA, 30 bp, Artificial Sequence
  Synthetic oligonucleotide
gggtattttcgcacagcgcccacgcgccag

SEQ ID NO: 428768 - DNA, 30 bp, Artificial Sequence
  Synthetic oligonucleotide
atatttgctgtttgtgggggtgcgcgccag

SEQ ID NO: 428769 - DNA, 30 bp, Artificial Sequence
  Synthetic oligonucleotide
ctgttaggatggcccccctgaaatcgccag

SEQ ID NO: 428770 - DNA, 30 bp, Artificial Sequence
  Synthetic oligonucleotide
agcactgtatgagtgggagagtccggccag

SEQ ID NO: 428771 - DNA, 30 bp, Artificial Sequence
  Synthetic oligonucleotide
tgctgtatctgtataggggcctcgggccag

SEQ ID NO: 428772 - DNA, 30 bp, Artificial Sequence
  Synthetic oligonucleotide
aagttatcgttgaggattgtgactggccag

SEQ ID NO: 428773 - DNA, 30 bp, Artificial Sequence
  Synthetic oligonucleotide
atctgattcccgattgatcgcgctggccag

SEQ ID NO: 428774 - DNA, 30 bp, Artificial Sequence
  Synthetic oligonucleotide
tgaagattcttgctctcctagtaatgccag

SEQ ID NO: 428775 - DNA, 30 bp, Artificial Sequence
  Synthetic oligonucleotide
cgctgcgttcggcacggccagtgatgccag

SEQ ID NO: 428776 - DNA, 30 bp, Artificial Sequence
  Synthetic oligonucleotide
tcgaacgcactagcaggcccgacttgccag

SEQ ID NO: 428777 - DNA, 30 bp, Artificial Sequence
  Synthetic oligonucleotide
gatccgagcagccattgagggtcgatccag

SEQ ID NO: 428778 - DNA, 31 bp, Artificial Sequence
  Synthetic oligonucleotide
gagatcgggctgttcatagcttcggatccag

SEQ ID NO: 428779 - DNA, 30 bp, Artificial Sequence
  Synthetic oligonucleotide
gaggtctcgattttaacacgagacctccag

SEQ ID NO: 428780 - DNA, 30 bp, Artificial Sequence
  Synthetic oligonucleotide
gccccggcttttatataagatcccctccag

SEQ ID NO: 428781 - DNA, 30 bp, Artificial Sequence
  Synthetic oligonucleotide
aatctatgttggtgtaacgatgggctccag

SEQ ID NO: 428782 - DNA, 30 bp, Artificial Sequence
  Synthetic oligonucleotide
gatgttcattcctcttgaccaatgctccag

SEQ ID NO: 428783 - DNA, 30 bp, Artificial Sequence
  Synthetic oligonucleotide
caattcgtcgcgcgcctctttttgctccag

SEQ ID NO: 428784 - DNA, 30 bp, Artificial Sequence
  Synthetic oligonucleotide
cgtcacagcaccgatgtgggggaagtccag

SEQ ID NO: 428785 - DNA, 30 bp, Artificial Sequence
  Synthetic oligonucleotide
atctattatggggctgccgccgccgtccag

SEQ ID NO: 428786 - DNA, 30 bp, Artificial Sequence
  Synthetic oligonucleotide
gctcccgtgttcctgaggaccagcgtccag

SEQ ID NO: 428787 - DNA, 29 bp, Artificial Sequence
  Synthetic oligonucleotide
accacttttcactaagggccagggtccag

SEQ ID NO: 428788 - DNA, 30 bp, Artificial Sequence
  Synthetic oligonucleotide
ggaccggacccgctaacatacggggtccag

SEQ ID NO: 428789 - DNA, 30 bp, Artificial Sequence
  Synthetic oligonucleotide
gagtttagtcttcgggctgctcatgtccag

SEQ ID NO: 428790 - DNA, 30 bp, Artificial Sequence
  Synthetic oligonucleotide
tttggtgcacgtagttttggtaaattccag

SEQ ID NO: 428791 - DNA, 30 bp, Artificial Sequence
  Synthetic oligonucleotide
gtttaccgctagcgctgatcccaattccag

SEQ ID NO: 428792 - DNA, 30 bp, Artificial Sequence
  Synthetic oligonucleotide
cgactgtgtcgccaacgggcgacattccag

SEQ ID NO: 428793 - DNA, 30 bp, Artificial Sequence
  Synthetic oligonucleotide
tatgcccgcgcagacaagatctccttccag

SEQ ID NO: 428794 - DNA, 30 bp, Artificial Sequence
  Synthetic oligonucleotide
gtgtcagtatatgcgggatgcactttccag

SEQ ID NO: 428795 - DNA, 30 bp, Artificial Sequence
  Synthetic oligonucleotide
aacactctagcaacgtggttcagtttccag

SEQ ID NO: 428796 - DNA, 30 bp, Artificial Sequence
  Synthetic oligonucleotide
tatctttatcatactgtattccgtttccag

SEQ ID NO: 428797 - DNA, 30 bp, Artificial Sequence
  Synthetic oligonucleotide
gttggaaggttcgtaagttgtcttttccag

SEQ ID NO: 428798 - DNA, 30 bp, Artificial Sequence
  Synthetic oligonucleotide
ggttgtatctgacccaagctcaaaaagcag

SEQ ID NO: 428799 - DNA, 30 bp, Artificial Sequence
  Synthetic oligonucleotide
agttttgtttaaccatcccaaagcaagcag

SEQ ID NO: 428800 - DNA, 30 bp, Artificial Sequence
  Synthetic oligonucleotide
aagctaagtcattgataagttagcaagcag

SEQ ID NO: 428801 - DNA, 30 bp, Artificial Sequence
  Synthetic oligonucleotide
cctgcagacccattcttgacgagacagcag

SEQ ID NO: 428802 - DNA, 30 bp, Artificial Sequence
  Synthetic oligonucleotide
aaatgtctcgaaatgagttatcgacagcag

SEQ ID NO: 428803 - DNA, 30 bp, Artificial Sequence
  Synthetic oligonucleotide
ctgtttcagtggtaagcttccctccagcag

SEQ ID NO: 428804 - DNA, 30 bp, Artificial Sequence
  Synthetic oligonucleotide
agagatggtgctcctggcacgactcagcag

SEQ ID NO: 428805 - DNA, 30 bp, Artificial Sequence
  Synthetic oligonucleotide
accggtccttggatataagggtctcagcag

SEQ ID NO: 428806 - DNA, 30 bp, Artificial Sequence
  Synthetic oligonucleotide
gttatgcggtgacttaactcgattcagcag

SEQ ID NO: 428807 - DNA, 30 bp, Artificial Sequence
  Synthetic oligonucleotide
gggcccggctactctggcctggaagagcag

SEQ ID NO: 428808 - DNA, 30 bp, Artificial Sequence
  Synthetic oligonucleotide
ttcagagatgacgtcttataaagcgagcag

SEQ ID NO: 428809 - DNA, 30 bp, Artificial Sequence
  Synthetic oligonucleotide
atgcttcatgggtttgcttggggcgagcag

SEQ ID NO: 428810 - DNA, 30 bp, Artificial Sequence
  Synthetic oligonucleotide
catatatagcagcgcacatgcgcggagcag

SEQ ID NO: 428811 - DNA, 30 bp, Artificial Sequence
  Synthetic oligonucleotide
gcgattattgagacgcttttcgtggagcag

SEQ ID NO: 428812 - DNA, 30 bp, Artificial Sequence
  Synthetic oligonucleotide
gccactggtcatttaggttaacctgagcag

SEQ ID NO: 428813 - DNA, 30 bp, Artificial Sequence
  Synthetic oligonucleotide
ggatcctgtcttgctgcattgtgtgagcag

SEQ ID NO: 428814 - DNA, 30 bp, Artificial Sequence
  Synthetic oligonucleotide
aaaaagaggtttttgaagccttaatagcag

SEQ ID NO: 428815 - DNA, 30 bp, Artificial Sequence
  Synthetic oligonucleotide
aaagtaaacgctctcccttgttcctagcag

SEQ ID NO: 428816 - DNA, 30 bp, Artificial Sequence
  Synthetic oligonucleotide
gaaatacgcggaaaaccacttgtctagcag

SEQ ID NO: 428817 - DNA, 30 bp, Artificial Sequence
  Synthetic oligonucleotide
ctacttgtatagtgttagggtacgtagcag

SEQ ID NO: 428818 - DNA, 30 bp, Artificial Sequence
  Synthetic oligonucleotide
taaggcatgggatagacgccagtgtagcag

SEQ ID NO: 428819 - DNA, 30 bp, Artificial Sequence
  Synthetic oligonucleotide
aggggtaggcattgggcgcatcattagcag

SEQ ID NO: 428820 - DNA, 30 bp, Artificial Sequence
  Synthetic oligonucleotide
tttaaaatacagggcccacgaggaacgcag

SEQ ID NO: 428821 - DNA, 30 bp, Artificial Sequence
  Synthetic oligonucleotide
ggctgtgtacgcaaattttcgggcacgcag

SEQ ID NO: 428822 - DNA, 30 bp, Artificial Sequence
  Synthetic oligonucleotide
ccttcacaaaatcgtctgttgttcacgcag

SEQ ID NO: 428823 - DNA, 30 bp, Artificial Sequence
  Synthetic oligonucleotide
cccgcacagggacgcatctaaacgacgcag

SEQ ID NO: 428824 - DNA, 30 bp, Artificial Sequence
  Synthetic oligonucleotide
gaaagcgcgtctctgtgtggagcgacgcag

SEQ ID NO: 428825 - DNA, 30 bp, Artificial Sequence
  Synthetic oligonucleotide
agtttcagaggcctaatcgtatcgacgcag

SEQ ID NO: 428826 - DNA, 30 bp, Artificial Sequence
  Synthetic oligonucleotide
cgcaatattggtgtctacctcttgacgcag

SEQ ID NO: 428827 - DNA, 28 bp, Artificial Sequence
  Synthetic oligonucleotide
ggaatgttctcctctatgcgatacgcag

SEQ ID NO: 428828 - DNA, 30 bp, Artificial Sequence
  Synthetic oligonucleotide
tgtgctgcaaaccgaaaatagtatacgcag

SEQ ID NO: 428829 - DNA, 30 bp, Artificial Sequence
  Synthetic oligonucleotide
tgtttagagaacggcgttcaagctacgcag

SEQ ID NO: 428830 - DNA, 30 bp, Artificial Sequence
  Synthetic oligonucleotide
atcctgaactcgtatgttggttgtccgcag

SEQ ID NO: 428831 - DNA, 30 bp, Artificial Sequence
  Synthetic oligonucleotide
tagattccatgataagacgagtcagcgcag

SEQ ID NO: 428832 - DNA, 30 bp, Artificial Sequence
  Synthetic oligonucleotide
gcaaaaattatatatgatgtattcgcgcag

SEQ ID NO: 428833 - DNA, 30 bp, Artificial Sequence
  Synthetic oligonucleotide
gcactagatagtggtattctcccatcgcag

SEQ ID NO: 428834 - DNA, 30 bp, Artificial Sequence
  Synthetic oligonucleotide
accctgctaaatgcgcttggtacctcgcag

SEQ ID NO: 428835 - DNA, 30 bp, Artificial Sequence
  Synthetic oligonucleotide
tttttaacctatgggaagggcgtctcgcag

SEQ ID NO: 428836 - DNA, 30 bp, Artificial Sequence
  Synthetic oligonucleotide
aaatcccacagtggcgtaccagcgtcgcag

SEQ ID NO: 428837 - DNA, 30 bp, Artificial Sequence
  Synthetic oligonucleotide
agggggaaatacttatgcagttattcgcag

SEQ ID NO: 428838 - DNA, 30 bp, Artificial Sequence
  Synthetic oligonucleotide
ctgggaattggtcgttccaggccttcgcag

SEQ ID NO: 428839 - DNA, 30 bp, Artificial Sequence
  Synthetic oligonucleotide
gcaaccgatatagcgctagtgggttcgcag

SEQ ID NO: 428840 - DNA, 30 bp, Artificial Sequence
  Synthetic oligonucleotide
gttcatatgccagaataacgatacaggcag

SEQ ID NO: 428841 - DNA, 30 bp, Artificial Sequence
  Synthetic oligonucleotide
gaaccccgaggtctatgcgtctacaggcag

SEQ ID NO: 428842 - DNA, 30 bp, Artificial Sequence
  Synthetic oligonucleotide
aactgcgcaaccttcgagccccgcaggcag

SEQ ID NO: 428843 - DNA, 30 bp, Artificial Sequence
  Synthetic oligonucleotide
acggcgcgtcccgtcgacatttgcaggcag

SEQ ID NO: 428844 - DNA, 30 bp, Artificial Sequence
  Synthetic oligonucleotide
tgtcatactcaggcactctttagtaggcag

SEQ ID NO: 428845 - DNA, 30 bp, Artificial Sequence
  Synthetic oligonucleotide
aatcacttactgttaatatacattaggcag

SEQ ID NO: 428846 - DNA, 30 bp, Artificial Sequence
  Synthetic oligonucleotide
gccttagtgcaactctgcgttgggcggcag

SEQ ID NO: 428847 - DNA, 30 bp, Artificial Sequence
  Synthetic oligonucleotide
atcggtgtatttacgtacgataaagggcag

SEQ ID NO: 428848 - DNA, 30 bp, Artificial Sequence
  Synthetic oligonucleotide
caattctcgccggattgcggcaatgggcag

SEQ ID NO: 428849 - DNA, 30 bp, Artificial Sequence
  Synthetic oligonucleotide
aaggctagccacagcacccaggctgggcag

SEQ ID NO: 428850 - DNA, 30 bp, Artificial Sequence
  Synthetic oligonucleotide
ggcgtgatgggctacaatgcggttgggcag

SEQ ID NO: 428851 - DNA, 30 bp, Artificial Sequence
  Synthetic oligonucleotide
aacgcgctacagcctggggtctttgggcag

SEQ ID NO: 428852 - DNA, 30 bp, Artificial Sequence
  Synthetic oligonucleotide
cccgggatctaaacagtagcaagatggcag

SEQ ID NO: 428853 - DNA, 30 bp, Artificial Sequence
  Synthetic oligonucleotide
caacgtcgcgttttttgtttaccgtggcag

SEQ ID NO: 428854 - DNA, 30 bp, Artificial Sequence
  Synthetic oligonucleotide
aattcgtcttatggtggagtgatgtggcag

SEQ ID NO: 428855 - DNA, 30 bp, Artificial Sequence
  Synthetic oligonucleotide
gccgggacacgtaattaacagtgttggcag

SEQ ID NO: 428856 - DNA, 30 bp, Artificial Sequence
  Synthetic oligonucleotide
gctctgtctataaaacgcggtgtcatgcag

SEQ ID NO: 428857 - DNA, 30 bp, Artificial Sequence
  Synthetic oligonucleotide
aagactaagttcgcgcgacggttcatgcag

SEQ ID NO: 428858 - DNA, 30 bp, Artificial Sequence
  Synthetic oligonucleotide
tataggagctaatgcggcggtgagatgcag

SEQ ID NO: 428859 - DNA, 30 bp, Artificial Sequence
  Synthetic oligonucleotide
taaaatccccgctaagcacgctcgatgcag

SEQ ID NO: 428860 - DNA, 30 bp, Artificial Sequence
  Synthetic oligonucleotide
tcttcagggtatcattgaatacatatgcag

SEQ ID NO: 428861 - DNA, 30 bp, Artificial Sequence
  Synthetic oligonucleotide
tgccgctggtaactgagtaactatatgcag

SEQ ID NO: 428862 - DNA, 30 bp, Artificial Sequence
  Synthetic oligonucleotide
ctcctcgtggcacgttgtacaaaactgcag

SEQ ID NO: 428863 - DNA, 30 bp, Artificial Sequence
  Synthetic oligonucleotide
gaagcttagggatatgtaactacactgcag

SEQ ID NO: 428864 - DNA, 30 bp, Artificial Sequence
  Synthetic oligonucleotide
ggccacgtttccgtgggaagctacctgcag

SEQ ID NO: 428865 - DNA, 30 bp, Artificial Sequence
  Synthetic oligonucleotide
aatatttgtcttaatagaaaagagctgcag

SEQ ID NO: 428866 - DNA, 30 bp, Artificial Sequence
  Synthetic oligonucleotide
acattttctagctaggatctatggctgcag

SEQ ID NO: 428867 - DNA, 30 bp, Artificial Sequence
  Synthetic oligonucleotide
ttgggttgtctagtcggattttaagtgcag

SEQ ID NO: 428868 - DNA, 30 bp, Artificial Sequence
  Synthetic oligonucleotide
ggatttagttattttggcgaaatagtgcag

SEQ ID NO: 428869 - DNA, 30 bp, Artificial Sequence
  Synthetic oligonucleotide
taagcgtaaaaggcgaggtcggacgtgcag

SEQ ID NO: 428870 - DNA, 30 bp, Artificial Sequence
  Synthetic oligonucleotide
aataaacctgctcatcgagtctccgtgcag

SEQ ID NO: 428871 - DNA, 30 bp, Artificial Sequence
  Synthetic oligonucleotide
gcacacggtgcgtcaattttctgcttgcag

SEQ ID NO: 428872 - DNA, 30 bp, Artificial Sequence
  Synthetic oligonucleotide
gtgaaggccatacgcatacgtatcttgcag

SEQ ID NO: 428873 - DNA, 30 bp, Artificial Sequence
  Synthetic oligonucleotide
gatagatcccagagatcaatttggttgcag

SEQ ID NO: 428874 - DNA, 30 bp, Artificial Sequence
  Synthetic oligonucleotide
gtagttgctggacgcggtatcctgttgcag

SEQ ID NO: 428875 - DNA, 30 bp, Artificial Sequence
  Synthetic oligonucleotide
atatcgatagtagatgtgaaaaaaaatcag

SEQ ID NO: 428876 - DNA, 30 bp, Artificial Sequence
  Synthetic oligonucleotide
aaataagtaacgggctgaagtaaaaatcag

SEQ ID NO: 428877 - DNA, 31 bp, Artificial Sequence
  Synthetic oligonucleotide
cttttgtgtaaagatattgaatgtcaatcag

SEQ ID NO: 428878 - DNA, 30 bp, Artificial Sequence
  Synthetic oligonucleotide
gcaagtttcatgttacgccaaggacatcag

SEQ ID NO: 428879 - DNA, 30 bp, Artificial Sequence
  Synthetic oligonucleotide
ctgaaacacatgcagcgctgaagccatcag

SEQ ID NO: 428880 - DNA, 30 bp, Artificial Sequence
  Synthetic oligonucleotide
ttagaaattgtcaatggtgacgggcatcag

SEQ ID NO: 428881 - DNA, 30 bp, Artificial Sequence
  Synthetic oligonucleotide
agaaccagcagcgctgctgataatcatcag

SEQ ID NO: 428882 - DNA, 30 bp, Artificial Sequence
  Synthetic oligonucleotide
actacggtaccgcccattgggcgcgatcag

SEQ ID NO: 428883 - DNA, 30 bp, Artificial Sequence
  Synthetic oligonucleotide
atttactaatgtgtgtaaatttgcgatcag

SEQ ID NO: 428884 - DNA, 30 bp, Artificial Sequence
  Synthetic oligonucleotide
gtagcgttcggttattgaacgcaggatcag

SEQ ID NO: 428885 - DNA, 30 bp, Artificial Sequence
  Synthetic oligonucleotide
ataagccgttggcctgatcatagatatcag

SEQ ID NO: 428886 - DNA, 30 bp, Artificial Sequence
  Synthetic oligonucleotide
gtaacgcggcggggaccatcgggctatcag

SEQ ID NO: 428887 - DNA, 30 bp, Artificial Sequence
  Synthetic oligonucleotide
gcgcttaacttgacgggagtagtgtatcag

SEQ ID NO: 428888 - DNA, 30 bp, Artificial Sequence
  Synthetic oligonucleotide
accctcgcacaacctttccggcattatcag

SEQ ID NO: 428889 - DNA, 30 bp, Artificial Sequence
  Synthetic oligonucleotide
cacgtcacaaaacgcgtggacggttatcag

SEQ ID NO: 428890 - DNA, 30 bp, Artificial Sequence
  Synthetic oligonucleotide
tgaattttggaagccgccaggtcaactcag

SEQ ID NO: 428891 - DNA, 30 bp, Artificial Sequence
  Synthetic oligonucleotide
ttagtttcggttgagtggaatactactcag

SEQ ID NO: 428892 - DNA, 30 bp, Artificial Sequence
  Synthetic oligonucleotide
gtgtctgagtgatcgcctcctacacctcag

SEQ ID NO: 428893 - DNA, 30 bp, Artificial Sequence
  Synthetic oligonucleotide
gcataattttccatgataaccagccctcag

SEQ ID NO: 428894 - DNA, 30 bp, Artificial Sequence
  Synthetic oligonucleotide
atatacatcagcgggccgcacccgcctcag

SEQ ID NO: 428895 - DNA, 30 bp, Artificial Sequence
  Synthetic oligonucleotide
aatgagcgcgtcgttcattttatgcctcag

SEQ ID NO: 428896 - DNA, 30 bp, Artificial Sequence
  Synthetic oligonucleotide
ccatcagagtttacgactgcgggtcctcag

SEQ ID NO: 428897 - DNA, 30 bp, Artificial Sequence
  Synthetic oligonucleotide
gctcgaactcaggtgaaacactgagctcag

SEQ ID NO: 428898 - DNA, 30 bp, Artificial Sequence
  Synthetic oligonucleotide
tgccagcacgtggccaatacccgcgctcag

SEQ ID NO: 428899 - DNA, 30 bp, Artificial Sequence
  Synthetic oligonucleotide
cttatgtttgtttccttggcacaggctcag

SEQ ID NO: 428900 - DNA, 30 bp, Artificial Sequence
  Synthetic oligonucleotide
tacctcggcgatgtctaacgcacggctcag

SEQ ID NO: 428901 - DNA, 30 bp, Artificial Sequence
  Synthetic oligonucleotide
gaatgcatgtcagctgtttctgcggctcag

SEQ ID NO: 428902 - DNA, 30 bp, Artificial Sequence
  Synthetic oligonucleotide
gtagtaactcacactgaccggcaatctcag

SEQ ID NO: 428903 - DNA, 30 bp, Artificial Sequence
  Synthetic oligonucleotide
aggtagacgcgccctataaatcaatctcag

SEQ ID NO: 428904 - DNA, 30 bp, Artificial Sequence
  Synthetic oligonucleotide
tgctccatttgatcggttcataggtctcag

SEQ ID NO: 428905 - DNA, 30 bp, Artificial Sequence
  Synthetic oligonucleotide
gtcctcttaatggcggaagacactagtcag

SEQ ID NO: 428906 - DNA, 30 bp, Artificial Sequence
  Synthetic oligonucleotide
aaaacttaatctacccctctttttagtcag

SEQ ID NO: 428907 - DNA, 30 bp, Artificial Sequence
  Synthetic oligonucleotide
gtacggttctgttaaagtaacagacgtcag

SEQ ID NO: 428908 - DNA, 30 bp, Artificial Sequence
  Synthetic oligonucleotide
caattaagacctatttggtccggacgtcag

SEQ ID NO: 428909 - DNA, 30 bp, Artificial Sequence
  Synthetic oligonucleotide
cttaaaggggtcactccgcgggaccgtcag

SEQ ID NO: 428910 - DNA, 30 bp, Artificial Sequence
  Synthetic oligonucleotide
gtatgacagcgattttcccacgcccgtcag

SEQ ID NO: 428911 - DNA, 30 bp, Artificial Sequence
  Synthetic oligonucleotide
accctgtacatgggtggtggcgcccgtcag

SEQ ID NO: 428912 - DNA, 30 bp, Artificial Sequence
  Synthetic oligonucleotide
tgggtttggtccagattcgccaggcgtcag

SEQ ID NO: 428913 - DNA, 30 bp, Artificial Sequence
  Synthetic oligonucleotide
ttacttggtagcatgcggtaaagaggtcag

SEQ ID NO: 428914 - DNA, 30 bp, Artificial Sequence
  Synthetic oligonucleotide
tccagtgagaaataatgtgggggcggtcag

SEQ ID NO: 428915 - DNA, 30 bp, Artificial Sequence
  Synthetic oligonucleotide
cttatctgtgggcgcgccgtggcgggtcag

SEQ ID NO: 428916 - DNA, 30 bp, Artificial Sequence
  Synthetic oligonucleotide
ctgagattagtttacccgaatgcgggtcag

SEQ ID NO: 428917 - DNA, 30 bp, Artificial Sequence
  Synthetic oligonucleotide
gcacctcgttcggtccgtgtgcgtggtcag

SEQ ID NO: 428918 - DNA, 30 bp, Artificial Sequence
  Synthetic oligonucleotide
agccctgatcataccagtctcgactgtcag

SEQ ID NO: 428919 - DNA, 30 bp, Artificial Sequence
  Synthetic oligonucleotide
tctgatcactcgcccccccgtatctgtcag

SEQ ID NO: 428920 - DNA, 30 bp, Artificial Sequence
  Synthetic oligonucleotide
tgtcgcctgtgacttagcccggcgtgtcag

SEQ ID NO: 428921 - DNA, 30 bp, Artificial Sequence
  Synthetic oligonucleotide
actcctggcccgttggccataaggtgtcag

SEQ ID NO: 428922 - DNA, 30 bp, Artificial Sequence
  Synthetic oligonucleotide
gtttagaggaggccgatgaaccggtgtcag

SEQ ID NO: 428923 - DNA, 30 bp, Artificial Sequence
  Synthetic oligonucleotide
gtcggctcaaccgtgtttagagggtgtcag

SEQ ID NO: 428924 - DNA, 30 bp, Artificial Sequence
  Synthetic oligonucleotide
gactatcctagtagagcgcccggaattcag

SEQ ID NO: 428925 - DNA, 30 bp, Artificial Sequence
  Synthetic oligonucleotide
gcggtgggtgtgttttgtttttgcattcag

SEQ ID NO: 428926 - DNA, 30 bp, Artificial Sequence
  Synthetic oligonucleotide
ttatggtcccactggccttcacagattcag

SEQ ID NO: 428927 - DNA, 30 bp, Artificial Sequence
  Synthetic oligonucleotide
ttaagttttcccgcctgttatgcgattcag

SEQ ID NO: 428928 - DNA, 30 bp, Artificial Sequence
  Synthetic oligonucleotide
taggtggggtggcgctcgctttcgattcag

SEQ ID NO: 428929 - DNA, 30 bp, Artificial Sequence
  Synthetic oligonucleotide
gtgccgatgatgtgatgcggcaggattcag

SEQ ID NO: 428930 - DNA, 30 bp, Artificial Sequence
  Synthetic oligonucleotide
tggacagctaggggcactggacgtattcag

SEQ ID NO: 428931 - DNA, 30 bp, Artificial Sequence
  Synthetic oligonucleotide
gtttctgtgtctgaagatgaaattattcag

SEQ ID NO: 428932 - DNA, 30 bp, Artificial Sequence
  Synthetic oligonucleotide
cccattcgtttagatcacggagttattcag

SEQ ID NO: 428933 - DNA, 30 bp, Artificial Sequence
  Synthetic oligonucleotide
gcaagattatagcaactcatgtaccttcag

SEQ ID NO: 428934 - DNA, 30 bp, Artificial Sequence
  Synthetic oligonucleotide
taggctcgtgaagaagatgatttccttcag

SEQ ID NO: 428935 - DNA, 30 bp, Artificial Sequence
  Synthetic oligonucleotide
gagaaacgattcgcccagcgggcgcttcag

SEQ ID NO: 428936 - DNA, 30 bp, Artificial Sequence
  Synthetic oligonucleotide
catgtccaggccactggcacttatcttcag

SEQ ID NO: 428937 - DNA, 30 bp, Artificial Sequence
  Synthetic oligonucleotide
taacggttctattatgacacgtcagttcag

SEQ ID NO: 428938 - DNA, 30 bp, Artificial Sequence
  Synthetic oligonucleotide
ttaaaagtcttaatttctctaagagttcag

SEQ ID NO: 428939 - DNA, 30 bp, Artificial Sequence
  Synthetic oligonucleotide
ccgtgactgtttcctgactcagtcgttcag

SEQ ID NO: 428940 - DNA, 30 bp, Artificial Sequence
  Synthetic oligonucleotide
aaagttttatattagactttggcggttcag

SEQ ID NO: 428941 - DNA, 30 bp, Artificial Sequence
  Synthetic oligonucleotide
gtgattctgtgggaggttctttgggttcag

SEQ ID NO: 428942 - DNA, 30 bp, Artificial Sequence
  Synthetic oligonucleotide
ctttcccttttagtcacatgcaatgttcag

SEQ ID NO: 428943 - DNA, 30 bp, Artificial Sequence
  Synthetic oligonucleotide
atttcgcaaagatagatgttttgtgttcag

SEQ ID NO: 428944 - DNA, 30 bp, Artificial Sequence
  Synthetic oligonucleotide
attactctacgggtctcatccacatttcag

SEQ ID NO: 428945 - DNA, 30 bp, Artificial Sequence
  Synthetic oligonucleotide
gctcgttacaacttccgcgaatgatttcag

SEQ ID NO: 428946 - DNA, 30 bp, Artificial Sequence
  Synthetic oligonucleotide
ccccatcttcgcccaactactctctttcag

SEQ ID NO: 428947 - DNA, 30 bp, Artificial Sequence
  Synthetic oligonucleotide
cagacgcacgaatggaaaaaattctttcag

SEQ ID NO: 428948 - DNA, 30 bp, Artificial Sequence
  Synthetic oligonucleotide
tatattcggggggtgaagtctcagtttcag

SEQ ID NO: 428949 - DNA, 30 bp, Artificial Sequence
  Synthetic oligonucleotide
gacgcacgaataattattcccgcgtttcag

SEQ ID NO: 428950 - DNA, 30 bp, Artificial Sequence
  Synthetic oligonucleotide
agtctcctcttgacagggcgcctttttcag

SEQ ID NO: 428951 - DNA, 30 bp, Artificial Sequence
  Synthetic oligonucleotide
caccgtcaagactcagcagtcaaaaaagag

SEQ ID NO: 428952 - DNA, 30 bp, Artificial Sequence
  Synthetic oligonucleotide
gaccggtctcctggaccggcaatcaaagag

SEQ ID NO: 428953 - DNA, 30 bp, Artificial Sequence
  Synthetic oligonucleotide
cgacccagttctatcccataggtcaaagag

SEQ ID NO: 428954 - DNA, 30 bp, Artificial Sequence
  Synthetic oligonucleotide
ggcgcgcgtctctcaaagtaaaggaaagag

SEQ ID NO: 428955 - DNA, 30 bp, Artificial Sequence
  Synthetic oligonucleotide
ttttaggtccccaatacgaagttgaaagag

SEQ ID NO: 428956 - DNA, 30 bp, Artificial Sequence
  Synthetic oligonucleotide
tttttaggcttgtcggaatcatctaaagag

SEQ ID NO: 428957 - DNA, 30 bp, Artificial Sequence
  Synthetic oligonucleotide
cagtcctaatgtcagacaggtggtaaagag

SEQ ID NO: 428958 - DNA, 30 bp, Artificial Sequence
  Synthetic oligonucleotide
tagggctggtctctaacaatgtaacaagag

SEQ ID NO: 428959 - DNA, 30 bp, Artificial Sequence
  Synthetic oligonucleotide
ttgataaggtgtaagtggacctgacaagag

SEQ ID NO: 428960 - DNA, 30 bp, Artificial Sequence
  Synthetic oligonucleotide
agacggtcctcaggtaggataggccaagag

SEQ ID NO: 428961 - DNA, 30 bp, Artificial Sequence
  Synthetic oligonucleotide
gcgctggtaagtctgacaacatgccaagag

SEQ ID NO: 428962 - DNA, 30 bp, Artificial Sequence
  Synthetic oligonucleotide
aatatgacagttactttagaactccaagag

SEQ ID NO: 428963 - DNA, 30 bp, Artificial Sequence
  Synthetic oligonucleotide
aaccactgtctacccgaatgactgcaagag

SEQ ID NO: 428964 - DNA, 30 bp, Artificial Sequence
  Synthetic oligonucleotide
gtttgctctcaatgaaggtgacccgaagag

SEQ ID NO: 428965 - DNA, 30 bp, Artificial Sequence
  Synthetic oligonucleotide
ctcgacgacaggtggtttgtcgccgaagag

SEQ ID NO: 428966 - DNA, 30 bp, Artificial Sequence
  Synthetic oligonucleotide
tgctatcggtgctgcggtatatcggaagag

SEQ ID NO: 428967 - DNA, 30 bp, Artificial Sequence
  Synthetic oligonucleotide
tagctgaacatgccttgtactctctaagag

SEQ ID NO: 428968 - DNA, 30 bp, Artificial Sequence
  Synthetic oligonucleotide
tgtacttcaggtaccggtgcagaaacagag

SEQ ID NO: 428969 - DNA, 30 bp, Artificial Sequence
  Synthetic oligonucleotide
cttaaaagagctgttggcttaggaacagag

SEQ ID NO: 428970 - DNA, 30 bp, Artificial Sequence
  Synthetic oligonucleotide
gtttcaggtataggaggtactataacagag

SEQ ID NO: 428971 - DNA, 30 bp, Artificial Sequence
  Synthetic oligonucleotide
ccattacttttagggctcgtggccacagag

SEQ ID NO: 428972 - DNA, 30 bp, Artificial Sequence
  Synthetic oligonucleotide
ctggaccagtctactgaaatgccgacagag

SEQ ID NO: 428973 - DNA, 30 bp, Artificial Sequence
  Synthetic oligonucleotide
tgggccggttggacatgaatcgaaccagag

SEQ ID NO: 428974 - DNA, 30 bp, Artificial Sequence
  Synthetic oligonucleotide
atgcacgcgctagtacagtaaataccagag

SEQ ID NO: 428975 - DNA, 30 bp, Artificial Sequence
  Synthetic oligonucleotide
caccaggcaccgcatcgcggttaagcagag

SEQ ID NO: 428976 - DNA, 30 bp, Artificial Sequence
  Synthetic oligonucleotide
tcggataaatcaaagtctaagtcagcagag

SEQ ID NO: 428977 - DNA, 30 bp, Artificial Sequence
  Synthetic oligonucleotide
tttttctcctaggaggttatcggagcagag

SEQ ID NO: 428978 - DNA, 30 bp, Artificial Sequence
  Synthetic oligonucleotide
gcacagttctcaaaggggacgctagcagag

SEQ ID NO: 428979 - DNA, 30 bp, Artificial Sequence
  Synthetic oligonucleotide
ctctatccggtttcctcgcaacacgcagag

SEQ ID NO: 428980 - DNA, 30 bp, Artificial Sequence
  Synthetic oligonucleotide
cgagtattacttgatatcgtgagggcagag

SEQ ID NO: 428981 - DNA, 30 bp, Artificial Sequence
  Synthetic oligonucleotide
tatagggtcgaattgttcgaggtggcagag

SEQ ID NO: 428982 - DNA, 30 bp, Artificial Sequence
  Synthetic oligonucleotide
tatgcaaggataaccctttgtcatgcagag

SEQ ID NO: 428983 - DNA, 30 bp, Artificial Sequence
  Synthetic oligonucleotide
aagaggactttaggttccgtatctgcagag

SEQ ID NO: 428984 - DNA, 30 bp, Artificial Sequence
  Synthetic oligonucleotide
tcgcaatctttttgtctcagccttgcagag

SEQ ID NO: 428985 - DNA, 30 bp, Artificial Sequence
  Synthetic oligonucleotide
ttcttcagcggaggagagcacttatcagag

SEQ ID NO: 428986 - DNA, 30 bp, Artificial Sequence
  Synthetic oligonucleotide
aggtcagaaaagcgctgcacctgctcagag

SEQ ID NO: 428987 - DNA, 40 bp, Artificial Sequence
  Synthetic oligonucleotide
tatacacccaaataaagtagatagcataatcaagtcagag

SEQ ID NO: 428988 - DNA, 30 bp, Artificial Sequence
  Synthetic oligonucleotide
gatccgaacccaggcagctgatggtcagag

SEQ ID NO: 428989 - DNA, 30 bp, Artificial Sequence
  Synthetic oligonucleotide
gtagtccggtagtttgaagttggttcagag

SEQ ID NO: 428990 - DNA, 30 bp, Artificial Sequence
  Synthetic oligonucleotide
cttactagtctggtaacagacgtttcagag

SEQ ID NO: 428991 - DNA, 30 bp, Artificial Sequence
  Synthetic oligonucleotide
atattttgaatgttggacaagaaaagagag

SEQ ID NO: 428992 - DNA, 30 bp, Artificial Sequence
  Synthetic oligonucleotide
tgtctcgtggatacaggggttaaaagagag

SEQ ID NO: 428993 - DNA, 30 bp, Artificial Sequence
  Synthetic oligonucleotide
tcaccgcggcgcttagagtattcaagagag

SEQ ID NO: 428994 - DNA, 30 bp, Artificial Sequence
  Synthetic oligonucleotide
ggaattactggttttaagacaataagagag

SEQ ID NO: 428995 - DNA, 30 bp, Artificial Sequence
  Synthetic oligonucleotide
ctatgacgggcgcgatcggttttgagagag

SEQ ID NO: 428996 - DNA, 30 bp, Artificial Sequence
  Synthetic oligonucleotide
ttcagggacttcaccgcttctcctagagag

SEQ ID NO: 428997 - DNA, 30 bp, Artificial Sequence
  Synthetic oligonucleotide
acggaataagttttataacatgttagagag

SEQ ID NO: 428998 - DNA, 30 bp, Artificial Sequence
  Synthetic oligonucleotide
cgacatcggggaaaaaaaaggaaacgagag

SEQ ID NO: 428999 - DNA, 30 bp, Artificial Sequence
  Synthetic oligonucleotide
cttgcgtgtagtaacgcagttacacgagag

SEQ ID NO: 429000 - DNA, 30 bp, Artificial Sequence
  Synthetic oligonucleotide
tcaatgtaggacagcaaggtaatacgagag

SEQ ID NO: 429001 - DNA, 30 bp, Artificial Sequence
  Synthetic oligonucleotide
acgttgtcctcttcaatatcttaccgagag

SEQ ID NO: 429002 - DNA, 30 bp, Artificial Sequence
  Synthetic oligonucleotide
ggtcgcaagcctcatattatgcgcggagag

SEQ ID NO: 429003 - DNA, 30 bp, Artificial Sequence
  Synthetic oligonucleotide
cggcgggaaccaatgggatctcatggagag

SEQ ID NO: 429004 - DNA, 30 bp, Artificial Sequence
  Synthetic oligonucleotide
cggtcctctagtcgtctgtccgtttgagag

SEQ ID NO: 429005 - DNA, 30 bp, Artificial Sequence
  Synthetic oligonucleotide
aaagagaccacggcgtaactttgcatagag

SEQ ID NO: 429006 - DNA, 30 bp, Artificial Sequence
  Synthetic oligonucleotide
tcaaccctgactccatgtttttagatagag

SEQ ID NO: 429007 - DNA, 30 bp, Artificial Sequence
  Synthetic oligonucleotide
taattgttatgctgctaagccgggatagag

SEQ ID NO: 429008 - DNA, 30 bp, Artificial Sequence
  Synthetic oligonucleotide
ctatactatttcagtgccggggggatagag

SEQ ID NO: 429009 - DNA, 30 bp, Artificial Sequence
  Synthetic oligonucleotide
ctggtatggcaccagtagacatggatagag

SEQ ID NO: 429010 - DNA, 30 bp, Artificial Sequence
  Synthetic oligonucleotide
cgagtcagtgtgaccggctctaatatagag

SEQ ID NO: 429011 - DNA, 30 bp, Artificial Sequence
  Synthetic oligonucleotide
ctgcactcgtgtaatatggatcatatagag

SEQ ID NO: 429012 - DNA, 30 bp, Artificial Sequence
  Synthetic oligonucleotide
agtaaatatattatgttactaaacctagag

SEQ ID NO: 429013 - DNA, 30 bp, Artificial Sequence
  Synthetic oligonucleotide
tagactgacacggccttgttttctctagag

SEQ ID NO: 429014 - DNA, 30 bp, Artificial Sequence
  Synthetic oligonucleotide
gaattggtactcacgaaactgcttctagag

SEQ ID NO: 429015 - DNA, 30 bp, Artificial Sequence
  Synthetic oligonucleotide
aagtcggcaggttcattggggcacgtagag

SEQ ID NO: 429016 - DNA, 30 bp, Artificial Sequence
  Synthetic oligonucleotide
tttagacttcacccttcacatactgtagag

SEQ ID NO: 429017 - DNA, 30 bp, Artificial Sequence
  Synthetic oligonucleotide
cttttcgatgttagtctctcatagttagag

SEQ ID NO: 429018 - DNA, 30 bp, Artificial Sequence
  Synthetic oligonucleotide
atttgttacattggcactgttgggttagag

SEQ ID NO: 429019 - DNA, 30 bp, Artificial Sequence
  Synthetic oligonucleotide
gtagacgcactcgtatctatgcgtttagag

SEQ ID NO: 429020 - DNA, 30 bp, Artificial Sequence
  Synthetic oligonucleotide
gaactcgttgggaatgttcatcgtttagag

SEQ ID NO: 429021 - DNA, 30 bp, Artificial Sequence
  Synthetic oligonucleotide
gacattaggctctggaggtgatcaaacgag

SEQ ID NO: 429022 - DNA, 30 bp, Artificial Sequence
  Synthetic oligonucleotide
attcaccttcttttgatgcacgtaaacgag

SEQ ID NO: 429023 - DNA, 30 bp, Artificial Sequence
  Synthetic oligonucleotide
taaacacctacttcgtctaggttcaacgag

SEQ ID NO: 429024 - DNA, 30 bp, Artificial Sequence
  Synthetic oligonucleotide
cagatttggtcaagcttgtgaggacacgag

SEQ ID NO: 429025 - DNA, 30 bp, Artificial Sequence
  Synthetic oligonucleotide
ttcttgtgcccctttaactttgtacacgag

SEQ ID NO: 429026 - DNA, 30 bp, Artificial Sequence
  Synthetic oligonucleotide
gattcggcttagagcacccagcggcacgag

SEQ ID NO: 429027 - DNA, 30 bp, Artificial Sequence
  Synthetic oligonucleotide
ttgtgtatggactagtcagtaactcacgag

SEQ ID NO: 429028 - DNA, 30 bp, Artificial Sequence
  Synthetic oligonucleotide
gttgctttagtctctaccgtaagtcacgag

SEQ ID NO: 429029 - DNA, 30 bp, Artificial Sequence
  Synthetic oligonucleotide
gcgcgagtggcaggtatattctgtcacgag

SEQ ID NO: 429030 - DNA, 30 bp, Artificial Sequence
  Synthetic oligonucleotide
ccgcccttgcataattttatagctgacgag

SEQ ID NO: 429031 - DNA, 30 bp, Artificial Sequence
  Synthetic oligonucleotide
attcaccatcgtaggggacaacagtacgag

SEQ ID NO: 429032 - DNA, 30 bp, Artificial Sequence
  Synthetic oligonucleotide
tgtacaccaattgggtgtctgtggtacgag

SEQ ID NO: 429033 - DNA, 30 bp, Artificial Sequence
  Synthetic oligonucleotide
caggtcatttcttgttactggttcaccgag

SEQ ID NO: 429034 - DNA, 30 bp, Artificial Sequence
  Synthetic oligonucleotide
ggttgctgctggactcaggttctacccgag

SEQ ID NO: 429035 - DNA, 30 bp, Artificial Sequence
  Synthetic oligonucleotide
actcgtactgctttggtcggtcggcccgag

SEQ ID NO: 429036 - DNA, 30 bp, Artificial Sequence
  Synthetic oligonucleotide
tatctttaaggttaagtcaacctagccgag

SEQ ID NO: 429037 - DNA, 30 bp, Artificial Sequence
  Synthetic oligonucleotide
ctctttttatattccctattggttgccgag

SEQ ID NO: 429038 - DNA, 30 bp, Artificial Sequence
  Synthetic oligonucleotide
cgccgtttgaaaacggctctgagatccgag

SEQ ID NO: 429039 - DNA, 30 bp, Artificial Sequence
  Synthetic oligonucleotide
aagtggccaggtaatacgcgcttatccgag

SEQ ID NO: 429040 - DNA, 30 bp, Artificial Sequence
  Synthetic oligonucleotide
gtcaattctcgatttttaggtggcagcgag

SEQ ID NO: 429041 - DNA, 30 bp, Artificial Sequence
  Synthetic oligonucleotide
ccggtgtgcacacttaggtgcccgagcgag

SEQ ID NO: 429042 - DNA, 30 bp, Artificial Sequence
  Synthetic oligonucleotide
taaatccatcgctactcgcaattgagcgag

SEQ ID NO: 429043 - DNA, 30 bp, Artificial Sequence
  Synthetic oligonucleotide
gtttcgtaactggttgtgctgcatagcgag

SEQ ID NO: 429044 - DNA, 30 bp, Artificial Sequence
  Synthetic oligonucleotide
tcggttggattcgatgtatgcgatagcgag

SEQ ID NO: 429045 - DNA, 30 bp, Artificial Sequence
  Synthetic oligonucleotide
agtgatggtgctcgcgggacaaatcgcgag

SEQ ID NO: 429046 - DNA, 30 bp, Artificial Sequence
  Synthetic oligonucleotide
ttccatatatgtctgctcaaatcaggcgag

SEQ ID NO: 429047 - DNA, 30 bp, Artificial Sequence
  Synthetic oligonucleotide
ttatgaggggtgcgtttcaccggcggcgag

SEQ ID NO: 429048 - DNA, 30 bp, Artificial Sequence
  Synthetic oligonucleotide
atatactttatatcaatgccgtcgggcgag

SEQ ID NO: 429049 - DNA, 31 bp, Artificial Sequence
  Synthetic oligonucleotide
gaaggaccatcctgtagcataatttggcgag

SEQ ID NO: 429050 - DNA, 30 bp, Artificial Sequence
  Synthetic oligonucleotide
aaattctccgagcccggatacctatgcgag

SEQ ID NO: 429051 - DNA, 30 bp, Artificial Sequence
  Synthetic oligonucleotide
tcagtacagatgagtgtatataagtgcgag

SEQ ID NO: 429052 - DNA, 30 bp, Artificial Sequence
  Synthetic oligonucleotide
gttctaacaacttggcgtatggattgcgag

SEQ ID NO: 429053 - DNA, 30 bp, Artificial Sequence
  Synthetic oligonucleotide
gcccttcagggctttcgcgtggcaatcgag

SEQ ID NO: 429054 - DNA, 30 bp, Artificial Sequence
  Synthetic oligonucleotide
gaaaagacacggggaccatcggccctcgag

SEQ ID NO: 429055 - DNA, 30 bp, Artificial Sequence
  Synthetic oligonucleotide
atcgagcctattgctctgttcggtctcgag

SEQ ID NO: 429056 - DNA, 30 bp, Artificial Sequence
  Synthetic oligonucleotide
tttagttatgttacgtgcaggcgagtcgag

SEQ ID NO: 429057 - DNA, 30 bp, Artificial Sequence
  Synthetic oligonucleotide
accacattagtatgagtaggtctggtcgag

SEQ ID NO: 429058 - DNA, 30 bp, Artificial Sequence
  Synthetic oligonucleotide
ggaccaggttaaggatgcaattttgtcgag

SEQ ID NO: 429059 - DNA, 30 bp, Artificial Sequence
  Synthetic oligonucleotide
gctatagctccgaagtcccgcaacttcgag

SEQ ID NO: 429060 - DNA, 30 bp, Artificial Sequence
  Synthetic oligonucleotide
cgcggcaacgagacaaagagtttcttcgag

SEQ ID NO: 429061 - DNA, 30 bp, Artificial Sequence
  Synthetic oligonucleotide
aagatagagcggtgtttgtgttagttcgag

SEQ ID NO: 429062 - DNA, 30 bp, Artificial Sequence
  Synthetic oligonucleotide
tgacctgcgatacgtgtgtgcagaaaggag

SEQ ID NO: 429063 - DNA, 30 bp, Artificial Sequence
  Synthetic oligonucleotide
ccagtgggaaagagttgtgtagacaaggag

SEQ ID NO: 429064 - DNA, 30 bp, Artificial Sequence
  Synthetic oligonucleotide
tcgcaggttaactggagtcttcccaaggag

SEQ ID NO: 429065 - DNA, 30 bp, Artificial Sequence
  Synthetic oligonucleotide
ttataatgtcggaagccgccggtcaaggag

SEQ ID NO: 429066 - DNA, 30 bp, Artificial Sequence
  Synthetic oligonucleotide
ccgcgggttcggcgccaggtgtagaaggag

SEQ ID NO: 429067 - DNA, 30 bp, Artificial Sequence
  Synthetic oligonucleotide
agccgggcgttgtagattggggtgaaggag

SEQ ID NO: 429068 - DNA, 30 bp, Artificial Sequence
  Synthetic oligonucleotide
gatcgccgacaccctcatccaactaaggag

SEQ ID NO: 429069 - DNA, 30 bp, Artificial Sequence
  Synthetic oligonucleotide
ctctgttcttgcgtgcctccataccaggag

SEQ ID NO: 429070 - DNA, 30 bp, Artificial Sequence
  Synthetic oligonucleotide
gatatcttcacccgtctagcataccaggag

SEQ ID NO: 429071 - DNA, 30 bp, Artificial Sequence
  Synthetic oligonucleotide
actgtctgccagtggggggtggcccaggag

SEQ ID NO: 429072 - DNA, 30 bp, Artificial Sequence
  Synthetic oligonucleotide
aaagtgttaaactattaggagagccaggag

SEQ ID NO: 429073 - DNA, 30 bp, Artificial Sequence
  Synthetic oligonucleotide
ccttacggagtatcacaattatggcaggag

SEQ ID NO: 429074 - DNA, 30 bp, Artificial Sequence
  Synthetic oligonucleotide
cctatgaggccttcacgtaaatcggaggag

SEQ ID NO: 429075 - DNA, 30 bp, Artificial Sequence
  Synthetic oligonucleotide
agtgaccgaaaaggttcgttgccataggag

SEQ ID NO: 429076 - DNA, 30 bp, Artificial Sequence
  Synthetic oligonucleotide
gtttcatagttgataagtggcggctaggag

SEQ ID NO: 429077 - DNA, 25 bp, Artificial Sequence
  Synthetic oligonucleotide
tcgaaatgttgcaccgttctaggag

SEQ ID NO: 429078 - DNA, 30 bp, Artificial Sequence
  Synthetic oligonucleotide
gtcttcacggggctacctgtcgtaacggag

SEQ ID NO: 429079 - DNA, 30 bp, Artificial Sequence
  Synthetic oligonucleotide
ataatttgcaatcggtcgagcaccacggag

SEQ ID NO: 429080 - DNA, 30 bp, Artificial Sequence
  Synthetic oligonucleotide
ccgaaacaggggtttaatggagtgacggag

SEQ ID NO: 429081 - DNA, 30 bp, Artificial Sequence
  Synthetic oligonucleotide
catagtgttgcattttgtcttgtgacggag

SEQ ID NO: 429082 - DNA, 30 bp, Artificial Sequence
  Synthetic oligonucleotide
tggaagtcacgttctcggtgtgatccggag

SEQ ID NO: 429083 - DNA, 30 bp, Artificial Sequence
  Synthetic oligonucleotide
gcactcgatagcccttgggtacctccggag

SEQ ID NO: 429084 - DNA, 30 bp, Artificial Sequence
  Synthetic oligonucleotide
tttaaaaaatatgatagatggtgatcggag

SEQ ID NO: 429085 - DNA, 30 bp, Artificial Sequence
  Synthetic oligonucleotide
gccgataagaatttctgtgacttatcggag

SEQ ID NO: 429086 - DNA, 30 bp, Artificial Sequence
  Synthetic oligonucleotide
acgcttcattgatggttacttatctcggag

SEQ ID NO: 429087 - DNA, 30 bp, Artificial Sequence
  Synthetic oligonucleotide
ttcagatagcactgcacgacgttctcggag

SEQ ID NO: 429088 - DNA, 30 bp, Artificial Sequence
  Synthetic oligonucleotide
tgcccggctacttatagcgggacgtcggag

SEQ ID NO: 429089 - DNA, 30 bp, Artificial Sequence
  Synthetic oligonucleotide
agcagtttttgagcgcgggactgcagggag

SEQ ID NO: 429090 - DNA, 30 bp, Artificial Sequence
  Synthetic oligonucleotide
ctgatgtgcggagacatcagcactagggag

SEQ ID NO: 429091 - DNA, 30 bp, Artificial Sequence
  Synthetic oligonucleotide
aaagacacgggtcaagcgttccaacgggag

SEQ ID NO: 429092 - DNA, 30 bp, Artificial Sequence
  Synthetic oligonucleotide
gaggaccgttcaacgggactataacgggag

SEQ ID NO: 429093 - DNA, 30 bp, Artificial Sequence
  Synthetic oligonucleotide
gagtgaaattttttatcggagatgcgggag

SEQ ID NO: 429094 - DNA, 30 bp, Artificial Sequence
  Synthetic oligonucleotide
aactggttcccaatattatgcattcgggag

SEQ ID NO: 429095 - DNA, 30 bp, Artificial Sequence
  Synthetic oligonucleotide
agggtctgggcccccccgagttgcggggag

SEQ ID NO: 429096 - DNA, 30 bp, Artificial Sequence
  Synthetic oligonucleotide
cttatttacttggaactagctgctggggag

SEQ ID NO: 429097 - DNA, 30 bp, Artificial Sequence
  Synthetic oligonucleotide
cgcaagcaggaagcaccccacagtggggag

SEQ ID NO: 429098 - DNA, 30 bp, Artificial Sequence
  Synthetic oligonucleotide
gtcacgtgtgacaccgttttttaatgggag

SEQ ID NO: 429099 - DNA, 30 bp, Artificial Sequence
  Synthetic oligonucleotide
aacgagggttcaagacttgcgcagtgggag

SEQ ID NO: 429100 - DNA, 30 bp, Artificial Sequence
  Synthetic oligonucleotide
taaccgggttattaaccgcggagttgggag

SEQ ID NO: 429101 - DNA, 30 bp, Artificial Sequence
  Synthetic oligonucleotide
tattaagcctatatcggcgccgcaatggag

SEQ ID NO: 429102 - DNA, 30 bp, Artificial Sequence
  Synthetic oligonucleotide
atgtgtttggacccaagagattagatggag

SEQ ID NO: 429103 - DNA, 30 bp, Artificial Sequence
  Synthetic oligonucleotide
tcgtgatgggctatcccggtggttatggag

SEQ ID NO: 429104 - DNA, 30 bp, Artificial Sequence
  Synthetic oligonucleotide
taacggcgtttaatgggtcataccctggag

SEQ ID NO: 429105 - DNA, 30 bp, Artificial Sequence
  Synthetic oligonucleotide
tttctcggcgcactcaatactggcctggag

SEQ ID NO: 429106 - DNA, 30 bp, Artificial Sequence
  Synthetic oligonucleotide
caggtctcagtctcacgtagcgacgtggag

SEQ ID NO: 429107 - DNA, 30 bp, Artificial Sequence
  Synthetic oligonucleotide
tatcctttgagcagcggccgctccgtggag

SEQ ID NO: 429108 - DNA, 30 bp, Artificial Sequence
  Synthetic oligonucleotide
aatcaatgggggtttcagtctgaggtggag

SEQ ID NO: 429109 - DNA, 30 bp, Artificial Sequence
  Synthetic oligonucleotide
gaatattaaatcatcatgccctatgtggag

SEQ ID NO: 429110 - DNA, 30 bp, Artificial Sequence
  Synthetic oligonucleotide
acagtacatagggatgtgacgcctgtggag

SEQ ID NO: 429111 - DNA, 30 bp, Artificial Sequence
  Synthetic oligonucleotide
ggcacttaccatacattcctgctattggag

SEQ ID NO: 429112 - DNA, 30 bp, Artificial Sequence
  Synthetic oligonucleotide
ctcatgtgccatttgttaagtaacttggag

SEQ ID NO: 429113 - DNA, 30 bp, Artificial Sequence
  Synthetic oligonucleotide
accgggatcttggaccaggttgacttggag

SEQ ID NO: 429114 - DNA, 30 bp, Artificial Sequence
  Synthetic oligonucleotide
gaatctcgggcggctgtcacgcttttggag

SEQ ID NO: 429115 - DNA, 30 bp, Artificial Sequence
  Synthetic oligonucleotide
agtcacctatttgaagagtgtcaaaatgag

SEQ ID NO: 429116 - DNA, 30 bp, Artificial Sequence
  Synthetic oligonucleotide
tacgcaaagttatcgggggacttaaatgag

SEQ ID NO: 429117 - DNA, 30 bp, Artificial Sequence
  Synthetic oligonucleotide
tatttagtaccgtgattttatgtcaatgag

SEQ ID NO: 429118 - DNA, 30 bp, Artificial Sequence
  Synthetic oligonucleotide
aacaatatctactattatgctaggaatgag

SEQ ID NO: 429119 - DNA, 30 bp, Artificial Sequence
  Synthetic oligonucleotide
gactacggtgggcaaattacgagtaatgag

SEQ ID NO: 429120 - DNA, 30 bp, Artificial Sequence
  Synthetic oligonucleotide
actttatgcatcaaagaacctacccatgag

SEQ ID NO: 429121 - DNA, 30 bp, Artificial Sequence
  Synthetic oligonucleotide
cggttttcgactttatccgtgtggcatgag

SEQ ID NO: 429122 - DNA, 30 bp, Artificial Sequence
  Synthetic oligonucleotide
ttactcttgttttagtaataggttcatgag

SEQ ID NO: 429123 - DNA, 30 bp, Artificial Sequence
  Synthetic oligonucleotide
tcagtgcatgtattggggggaaaagatgag

SEQ ID NO: 429124 - DNA, 30 bp, Artificial Sequence
  Synthetic oligonucleotide
ccttgggggacactgaacgcagcagatgag

SEQ ID NO: 429125 - DNA, 30 bp, Artificial Sequence
  Synthetic oligonucleotide
tctcggcgacataacgacgctttagatgag

SEQ ID NO: 429126 - DNA, 30 bp, Artificial Sequence
  Synthetic oligonucleotide
gttttatcagtgtaatgtggcgcggatgag

SEQ ID NO: 429127 - DNA, 30 bp, Artificial Sequence
  Synthetic oligonucleotide
gctgattatttcgcgcaggaaggggatgag

SEQ ID NO: 429128 - DNA, 30 bp, Artificial Sequence
  Synthetic oligonucleotide
tttacctcacctgtgtaatgccgtgatgag

SEQ ID NO: 429129 - DNA, 30 bp, Artificial Sequence
  Synthetic oligonucleotide
aaattgtacgggtgaatacaaaaatatgag

SEQ ID NO: 429130 - DNA, 30 bp, Artificial Sequence
  Synthetic oligonucleotide
tcctttcgacacatagcagccgaatatgag

SEQ ID NO: 429131 - DNA, 30 bp, Artificial Sequence
  Synthetic oligonucleotide
ttatttacccaaccgggcaattactatgag

SEQ ID NO: 429132 - DNA, 30 bp, Artificial Sequence
  Synthetic oligonucleotide
aaaatccatacatattagaaagagtatgag

SEQ ID NO: 429133 - DNA, 30 bp, Artificial Sequence
  Synthetic oligonucleotide
ggcactcatgggggaggaagctcaactgag

SEQ ID NO: 429134 - DNA, 30 bp, Artificial Sequence
  Synthetic oligonucleotide
catgataaacacttctcgcatggaactgag

SEQ ID NO: 429135 - DNA, 30 bp, Artificial Sequence
  Synthetic oligonucleotide
gtctgtatccgactttccctgaagactgag

SEQ ID NO: 429136 - DNA, 30 bp, Artificial Sequence
  Synthetic oligonucleotide
tgcccgacggtacttatcgattggactgag

SEQ ID NO: 429137 - DNA, 30 bp, Artificial Sequence
  Synthetic oligonucleotide
catggtgcgtatgtactataggcacctgag

SEQ ID NO: 429138 - DNA, 30 bp, Artificial Sequence
  Synthetic oligonucleotide
ttcacctttctagttttttgtgaccctgag

SEQ ID NO: 429139 - DNA, 30 bp, Artificial Sequence
  Synthetic oligonucleotide
gaaatgaactgtttttagcacctccctgag

SEQ ID NO: 429140 - DNA, 30 bp, Artificial Sequence
  Synthetic oligonucleotide
ccaggttatgatttatggaatcgtcctgag

SEQ ID NO: 429141 - DNA, 30 bp, Artificial Sequence
  Synthetic oligonucleotide
tatgcatcacacatgagggtgcacgctgag

SEQ ID NO: 429142 - DNA, 30 bp, Artificial Sequence
  Synthetic oligonucleotide
tccttggttcaaagcggcggcttcgctgag

SEQ ID NO: 429143 - DNA, 30 bp, Artificial Sequence
  Synthetic oligonucleotide
ttattatatccaactgtcaatgaggctgag

SEQ ID NO: 429144 - DNA, 30 bp, Artificial Sequence
  Synthetic oligonucleotide
gggtcgttctaagaatacggtgaatctgag

SEQ ID NO: 429145 - DNA, 30 bp, Artificial Sequence
  Synthetic oligonucleotide
agaagggttttttactctagggagtctgag

SEQ ID NO: 429146 - DNA, 30 bp, Artificial Sequence
  Synthetic oligonucleotide
aacccgttccacgccctgatatggtctgag

SEQ ID NO: 429147 - DNA, 30 bp, Artificial Sequence
  Synthetic oligonucleotide
ttcctatctaattgatggaagggttctgag

SEQ ID NO: 429148 - DNA, 30 bp, Artificial Sequence
  Synthetic oligonucleotide
ttcttttctcagcctagcccgaacagtgag

SEQ ID NO: 429149 - DNA, 30 bp, Artificial Sequence
  Synthetic oligonucleotide
ctacggcgctggggcaacggatgcagtgag

SEQ ID NO: 429150 - DNA, 30 bp, Artificial Sequence
  Synthetic oligonucleotide
tattatgggcgcactgggcgaatcagtgag

SEQ ID NO: 429151 - DNA, 30 bp, Artificial Sequence
  Synthetic oligonucleotide
gaaccatagcgagaatacagacagagtgag

SEQ ID NO: 429152 - DNA, 26 bp, Artificial Sequence
  Synthetic oligonucleotide
ctagcgtttttctgagttatagtgag

SEQ ID NO: 429153 - DNA, 30 bp, Artificial Sequence
  Synthetic oligonucleotide
agtaagaaaaagactcgcattcaaggtgag

SEQ ID NO: 429154 - DNA, 31 bp, Artificial Sequence
  Synthetic oligonucleotide
agcagtactatgctaggcgcactcaggtgag

SEQ ID NO: 429155 - DNA, 30 bp, Artificial Sequence
  Synthetic oligonucleotide
tggccttactagtggcaacggcagggtgag

SEQ ID NO: 429156 - DNA, 30 bp, Artificial Sequence
  Synthetic oligonucleotide
attgcgatttaccgaattttttactgtgag

SEQ ID NO: 429157 - DNA, 30 bp, Artificial Sequence
  Synthetic oligonucleotide
ccaccacaaccgggctgtgccgagtgtgag

SEQ ID NO: 429158 - DNA, 30 bp, Artificial Sequence
  Synthetic oligonucleotide
gatgtagttggcagggggcgggcgtgtgag

SEQ ID NO: 429159 - DNA, 30 bp, Artificial Sequence
  Synthetic oligonucleotide
cgaaacccgtagatcattccatgttgtgag

SEQ ID NO: 429160 - DNA, 30 bp, Artificial Sequence
  Synthetic oligonucleotide
aatcactgtggtatggatttccctattgag

SEQ ID NO: 429161 - DNA, 30 bp, Artificial Sequence
  Synthetic oligonucleotide
aaacagaacttttgtctttcgagtattgag

SEQ ID NO: 429162 - DNA, 30 bp, Artificial Sequence
  Synthetic oligonucleotide
aatagtaatagattcaccttacttattgag

SEQ ID NO: 429163 - DNA, 30 bp, Artificial Sequence
  Synthetic oligonucleotide
tgtcttactctcatacaaaggttacttgag

SEQ ID NO: 429164 - DNA, 30 bp, Artificial Sequence
  Synthetic oligonucleotide
atggttatcacgctgcagtccaagcttgag

SEQ ID NO: 429165 - DNA, 30 bp, Artificial Sequence
  Synthetic oligonucleotide
tattctgggtctgccgaccgcaagcttgag

SEQ ID NO: 429166 - DNA, 30 bp, Artificial Sequence
  Synthetic oligonucleotide
gagtggatgaggcatctgccgctagttgag

SEQ ID NO: 429167 - DNA, 30 bp, Artificial Sequence
  Synthetic oligonucleotide
atcggttcccgtccttctggtacatttgag

SEQ ID NO: 429168 - DNA, 30 bp, Artificial Sequence
  Synthetic oligonucleotide
aaacactaagtattccggtcctgatttgag

SEQ ID NO: 429169 - DNA, 30 bp, Artificial Sequence
  Synthetic oligonucleotide
aacgctgtggacgctatctgcagctttgag

SEQ ID NO: 429170 - DNA, 30 bp, Artificial Sequence
  Synthetic oligonucleotide
atggaccgcgctctgtcacgctgctttgag

SEQ ID NO: 429171 - DNA, 30 bp, Artificial Sequence
  Synthetic oligonucleotide
ttatccgaattggtgccaacgttctttgag

SEQ ID NO: 429172 - DNA, 30 bp, Artificial Sequence
  Synthetic oligonucleotide
aagtgccactgggcgggggctcggtttgag

SEQ ID NO: 429173 - DNA, 30 bp, Artificial Sequence
  Synthetic oligonucleotide
tcacgtacccccgaatgcagcataaaatag

SEQ ID NO: 429174 - DNA, 30 bp, Artificial Sequence
  Synthetic oligonucleotide
atctgctagacaggctacgcacccaaatag

SEQ ID NO: 429175 - DNA, 30 bp, Artificial Sequence
  Synthetic oligonucleotide
ttagtatcggacatcctttgaatcaaatag

SEQ ID NO: 429176 - DNA, 30 bp, Artificial Sequence
  Synthetic oligonucleotide
ttgtttagtagaaaagtttctttcaaatag

SEQ ID NO: 429177 - DNA, 30 bp, Artificial Sequence
  Synthetic oligonucleotide
cataacgagtccttccggttgacgaaatag

SEQ ID NO: 429178 - DNA, 30 bp, Artificial Sequence
  Synthetic oligonucleotide
ccagaccggttgcaggtagagcataaatag

SEQ ID NO: 429179 - DNA, 30 bp, Artificial Sequence
  Synthetic oligonucleotide
gaacgacattttcgatctaacggtaaatag

SEQ ID NO: 429180 - DNA, 30 bp, Artificial Sequence
  Synthetic oligonucleotide
atttatgccgcttacaggcctattaaatag

SEQ ID NO: 429181 - DNA, 30 bp, Artificial Sequence
  Synthetic oligonucleotide
aaaaagacgttgagaccatgttttaaatag

SEQ ID NO: 429182 - DNA, 30 bp, Artificial Sequence
  Synthetic oligonucleotide
ggcttgggcggttcggtttgggctcaatag

SEQ ID NO: 429183 - DNA, 30 bp, Artificial Sequence
  Synthetic oligonucleotide
ccagttcggggactcagactgcaagaatag

SEQ ID NO: 429184 - DNA, 30 bp, Artificial Sequence
  Synthetic oligonucleotide
cacatagaatactaggacgctggcgaatag

SEQ ID NO: 429185 - DNA, 30 bp, Artificial Sequence
  Synthetic oligonucleotide
gttatacatttgctgcaaccaatcgaatag

SEQ ID NO: 429186 - DNA, 30 bp, Artificial Sequence
  Synthetic oligonucleotide
tgtttatttaaaaacctcagcactgaatag

SEQ ID NO: 429187 - DNA, 30 bp, Artificial Sequence
  Synthetic oligonucleotide
attgtttagtccggggtgtgacaataatag

SEQ ID NO: 429188 - DNA, 30 bp, Artificial Sequence
  Synthetic oligonucleotide
taccgtcgaccgccacgtggaaactaatag

SEQ ID NO: 429189 - DNA, 30 bp, Artificial Sequence
  Synthetic oligonucleotide
tcaattcttaaaaattttggccactaatag

SEQ ID NO: 429190 - DNA, 30 bp, Artificial Sequence
  Synthetic oligonucleotide
tggaggccagcgtaaccataagactaatag

SEQ ID NO: 429191 - DNA, 30 bp, Artificial Sequence
  Synthetic oligonucleotide
aacaaaccatgtttggccattaagtaatag

SEQ ID NO: 429192 - DNA, 30 bp, Artificial Sequence
  Synthetic oligonucleotide
ggctgctaactgccgttttatacgtaatag

SEQ ID NO: 429193 - DNA, 30 bp, Artificial Sequence
  Synthetic oligonucleotide
gttacttacgaacctggtgttccgtaatag

SEQ ID NO: 429194 - DNA, 30 bp, Artificial Sequence
  Synthetic oligonucleotide
gagtgcttctagggacggctaatgtaatag

SEQ ID NO: 429195 - DNA, 30 bp, Artificial Sequence
  Synthetic oligonucleotide
cataagggacctaggtgttccatgtaatag

SEQ ID NO: 429196 - DNA, 30 bp, Artificial Sequence
  Synthetic oligonucleotide
gtgtccacgcttggtctgccacattaatag

SEQ ID NO: 429197 - DNA, 30 bp, Artificial Sequence
  Synthetic oligonucleotide
tgtgggatcggctacgaaggggattaatag

SEQ ID NO: 429198 - DNA, 30 bp, Artificial Sequence
  Synthetic oligonucleotide
gataattagtttaaatgccaaagttaatag

SEQ ID NO: 429199 - DNA, 30 bp, Artificial Sequence
  Synthetic oligonucleotide
atctgtcactgttgcggtcttcgttaatag

SEQ ID NO: 429200 - DNA, 30 bp, Artificial Sequence
  Synthetic oligonucleotide
cggaatatgaaacctggcccctgttaatag

SEQ ID NO: 429201 - DNA, 30 bp, Artificial Sequence
  Synthetic oligonucleotide
caaaaaactccttagcatgttgacacatag

SEQ ID NO: 429202 - DNA, 30 bp, Artificial Sequence
  Synthetic oligonucleotide
gcagtcaagaggggccctgttgccacatag

SEQ ID NO: 429203 - DNA, 30 bp, Artificial Sequence
  Synthetic oligonucleotide
ttattcacctgagcttcggagggcacatag

SEQ ID NO: 429204 - DNA, 30 bp, Artificial Sequence
  Synthetic oligonucleotide
ttagagataaggatcttttgatgcacatag

SEQ ID NO: 429205 - DNA, 30 bp, Artificial Sequence
  Synthetic oligonucleotide
ccctggaccgtttttcgccccgcgacatag

SEQ ID NO: 429206 - DNA, 30 bp, Artificial Sequence
  Synthetic oligonucleotide
ctgttgcacttatcgcgtcataggacatag

SEQ ID NO: 429207 - DNA, 30 bp, Artificial Sequence
  Synthetic oligonucleotide
gtagcctacgacggtgtcttttacccatag

SEQ ID NO: 429208 - DNA, 30 bp, Artificial Sequence
  Synthetic oligonucleotide
tttaaatggatacatatagcttccccatag

SEQ ID NO: 429209 - DNA, 30 bp, Artificial Sequence
  Synthetic oligonucleotide
aaggaatgattctattcagagaatccatag

SEQ ID NO: 429210 - DNA, 30 bp, Artificial Sequence
  Synthetic oligonucleotide
ttcgatttttttaatgaagggagagcatag

SEQ ID NO: 429211 - DNA, 30 bp, Artificial Sequence
  Synthetic oligonucleotide
cagtcgcggcgttatgggtcggaggcatag

SEQ ID NO: 429212 - DNA, 30 bp, Artificial Sequence
  Synthetic oligonucleotide
tcatactctttagggatcgataatgcatag

SEQ ID NO: 429213 - DNA, 30 bp, Artificial Sequence
  Synthetic oligonucleotide
ggcgcacaatcacgtcaataacgtgcatag

SEQ ID NO: 429214 - DNA, 30 bp, Artificial Sequence
  Synthetic oligonucleotide
gccgcgccaacgatctctataggatcatag

SEQ ID NO: 429215 - DNA, 30 bp, Artificial Sequence
  Synthetic oligonucleotide
ttctccttgtttttgggctacgtatcatag

SEQ ID NO: 429216 - DNA, 30 bp, Artificial Sequence
  Synthetic oligonucleotide
tttcatacctctcaaaataagtgctcatag

SEQ ID NO: 429217 - DNA, 30 bp, Artificial Sequence
  Synthetic oligonucleotide
catgctttacccgcggaggtgtgctcatag

SEQ ID NO: 429218 - DNA, 30 bp, Artificial Sequence
  Synthetic oligonucleotide
attttactagcgaacccaaaatgcagatag

SEQ ID NO: 429219 - DNA, 30 bp, Artificial Sequence
  Synthetic oligonucleotide
gaagccccacacgtcgaccttaaacgatag

SEQ ID NO: 429220 - DNA, 30 bp, Artificial Sequence
  Synthetic oligonucleotide
ccactattcattcgtctgttaagccgatag

SEQ ID NO: 429221 - DNA, 30 bp, Artificial Sequence
  Synthetic oligonucleotide
tgttttaggaggaatatgagggcgcgatag

SEQ ID NO: 429222 - DNA, 30 bp, Artificial Sequence
  Synthetic oligonucleotide
gccgttttttgaaatcttatgtctcgatag

SEQ ID NO: 429223 - DNA, 30 bp, Artificial Sequence
  Synthetic oligonucleotide
cttctgcatcgtacggtagccggtcgatag

SEQ ID NO: 429224 - DNA, 30 bp, Artificial Sequence
  Synthetic oligonucleotide
cgcgacgcactgctcggtccagcaggatag

SEQ ID NO: 429225 - DNA, 30 bp, Artificial Sequence
  Synthetic oligonucleotide
gtttcagctctagcccatattgtaggatag

SEQ ID NO: 429226 - DNA, 30 bp, Artificial Sequence
  Synthetic oligonucleotide
tttttggatatggaagagatactcggatag

SEQ ID NO: 429227 - DNA, 30 bp, Artificial Sequence
  Synthetic oligonucleotide
ggggtttgctgattccctggcgcgggatag

SEQ ID NO: 429228 - DNA, 30 bp, Artificial Sequence
  Synthetic oligonucleotide
gagaaaatcccgctttaggggttgggatag

SEQ ID NO: 429229 - DNA, 30 bp, Artificial Sequence
  Synthetic oligonucleotide
gcgtgctctgactaacgggtccctggatag

SEQ ID NO: 429230 - DNA, 30 bp, Artificial Sequence
  Synthetic oligonucleotide
tttggtgaacggaacacatccacatgatag

SEQ ID NO: 429231 - DNA, 30 bp, Artificial Sequence
  Synthetic oligonucleotide
gcgggcgccaactgccacttctactgatag

SEQ ID NO: 429232 - DNA, 30 bp, Artificial Sequence
  Synthetic oligonucleotide
aatctagtctcggtaacactggtctgatag

SEQ ID NO: 429233 - DNA, 30 bp, Artificial Sequence
  Synthetic oligonucleotide
aaatctccgggttccacgagccagtgatag

SEQ ID NO: 429234 - DNA, 30 bp, Artificial Sequence
  Synthetic oligonucleotide
cattcgggccgtacacaattccgttgatag

SEQ ID NO: 429235 - DNA, 30 bp, Artificial Sequence
  Synthetic oligonucleotide
agtgatgcctccgggatacataaaatatag

SEQ ID NO: 429236 - DNA, 30 bp, Artificial Sequence
  Synthetic oligonucleotide
catcttactaatgatgagcataccatatag

SEQ ID NO: 429237 - DNA, 30 bp, Artificial Sequence
  Synthetic oligonucleotide
tttgcttgataaagcgaagcacccatatag

SEQ ID NO: 429238 - DNA, 30 bp, Artificial Sequence
  Synthetic oligonucleotide
ccggggcctgagtctcttgactatatatag

SEQ ID NO: 429239 - DNA, 30 bp, Artificial Sequence
  Synthetic oligonucleotide
ggttctcaagcaccccctgaaagactatag

SEQ ID NO: 429240 - DNA, 30 bp, Artificial Sequence
  Synthetic oligonucleotide
tctagagtgcatttgcttccagtactatag

SEQ ID NO: 429241 - DNA, 30 bp, Artificial Sequence
  Synthetic oligonucleotide
tttgtatgaagacttttagcgcgcctatag

SEQ ID NO: 429242 - DNA, 30 bp, Artificial Sequence
  Synthetic oligonucleotide
tcatctttttgcttcataacaggcctatag

SEQ ID NO: 429243 - DNA, 30 bp, Artificial Sequence
  Synthetic oligonucleotide
gagcctatccagcccatgaggccgctatag

SEQ ID NO: 429244 - DNA, 30 bp, Artificial Sequence
  Synthetic oligonucleotide
aacggcgtaggtactcgtagatgtctatag

SEQ ID NO: 429245 - DNA, 30 bp, Artificial Sequence
  Synthetic oligonucleotide
ttttccgaattaggacatcctaaggtatag

SEQ ID NO: 429246 - DNA, 30 bp, Artificial Sequence
  Synthetic oligonucleotide
cttgttgcaggctttagaagccaggtatag

SEQ ID NO: 429247 - DNA, 30 bp, Artificial Sequence
  Synthetic oligonucleotide
ataaatgactctctttatgtcacggtatag

SEQ ID NO: 429248 - DNA, 30 bp, Artificial Sequence
  Synthetic oligonucleotide
aagactgcgcgcgaatcaggaaatgtatag

SEQ ID NO: 429249 - DNA, 30 bp, Artificial Sequence
  Synthetic oligonucleotide
ggtagtcattatccgcagcgttatgtatag

SEQ ID NO: 429250 - DNA, 30 bp, Artificial Sequence
  Synthetic oligonucleotide
tcgcagattaggctcagattgagtgtatag

SEQ ID NO: 429251 - DNA, 30 bp, Artificial Sequence
  Synthetic oligonucleotide
catatatatgcgggcaatgtattattatag

SEQ ID NO: 429252 - DNA, 31 bp, Artificial Sequence
  Synthetic oligonucleotide
ggtagagatgtcataatgttaagtcttatag

SEQ ID NO: 429253 - DNA, 30 bp, Artificial Sequence
  Synthetic oligonucleotide
ccattcggcagcagcaccttagagttatag

SEQ ID NO: 429254 - DNA, 30 bp, Artificial Sequence
  Synthetic oligonucleotide
aacttcgctagccgcaggcgtacgttatag

SEQ ID NO: 429255 - DNA, 30 bp, Artificial Sequence
  Synthetic oligonucleotide
ggagctgggaatttttcgggttcgttatag

SEQ ID NO: 429256 - DNA, 30 bp, Artificial Sequence
  Synthetic oligonucleotide
atctggtcgcctatgaaacatatgttatag

SEQ ID NO: 429257 - DNA, 30 bp, Artificial Sequence
  Synthetic oligonucleotide
cggcttgacttgcgacttaatcctttatag

SEQ ID NO: 429258 - DNA, 30 bp, Artificial Sequence
  Synthetic oligonucleotide
tgttgcggccataaaaggcgggctttatag

SEQ ID NO: 429259 - DNA, 30 bp, Artificial Sequence
  Synthetic oligonucleotide
accgactgccagggaatcgctgaaaactag

SEQ ID NO: 429260 - DNA, 30 bp, Artificial Sequence
  Synthetic oligonucleotide
agtgcatttagagtactagctttaaactag

SEQ ID NO: 429261 - DNA, 30 bp, Artificial Sequence
  Synthetic oligonucleotide
tatatgtacacgaacttgcataacaactag

SEQ ID NO: 429262 - DNA, 30 bp, Artificial Sequence
  Synthetic oligonucleotide
atccagtccacgcagaaacaccgcaactag

SEQ ID NO: 429263 - DNA, 30 bp, Artificial Sequence
  Synthetic oligonucleotide
gaagtgcttttagtatctagttgcaactag

SEQ ID NO: 429264 - DNA, 30 bp, Artificial Sequence
  Synthetic oligonucleotide
ttgaccttctcatgtgcggaccctaactag

SEQ ID NO: 429265 - DNA, 30 bp, Artificial Sequence
  Synthetic oligonucleotide
gaagccagaagttgacgttcgcgtaactag

SEQ ID NO: 429266 - DNA, 30 bp, Artificial Sequence
  Synthetic oligonucleotide
attatatggcctaaagattgaagacactag

SEQ ID NO: 429267 - DNA, 30 bp, Artificial Sequence
  Synthetic oligonucleotide
ctcagagggctacgatacagcgtccactag

SEQ ID NO: 429268 - DNA, 30 bp, Artificial Sequence
  Synthetic oligonucleotide
ccccgtattatattgggtacaaggcactag

SEQ ID NO: 429269 - DNA, 30 bp, Artificial Sequence
  Synthetic oligonucleotide
tcagagaaccgcgtacgatcgttgcactag

SEQ ID NO: 429270 - DNA, 30 bp, Artificial Sequence
  Synthetic oligonucleotide
atgcagagggtttccgttgggacggactag

SEQ ID NO: 429271 - DNA, 30 bp, Artificial Sequence
  Synthetic oligonucleotide
gcaatttttcgacggggttgaagggactag

SEQ ID NO: 429272 - DNA, 30 bp, Artificial Sequence
  Synthetic oligonucleotide
tgtaccaataataccacaggctttgactag

SEQ ID NO: 429273 - DNA, 30 bp, Artificial Sequence
  Synthetic oligonucleotide
gaaggtttacaagactgcctcaggtactag

SEQ ID NO: 429274 - DNA, 30 bp, Artificial Sequence
  Synthetic oligonucleotide
aacaccttctagtatttctagcggtactag

SEQ ID NO: 429275 - DNA, 30 bp, Artificial Sequence
  Synthetic oligonucleotide
tgactcgggtatttgtagtggccttactag

SEQ ID NO: 429276 - DNA, 30 bp, Artificial Sequence
  Synthetic oligonucleotide
ttctgatgtggctaattaaagcaaacctag

SEQ ID NO: 429277 - DNA, 30 bp, Artificial Sequence
  Synthetic oligonucleotide
cgatctgggtggtattgccataacacctag

SEQ ID NO: 429278 - DNA, 30 bp, Artificial Sequence
  Synthetic oligonucleotide
gtttttcgattaatcgacgaaaggacctag

SEQ ID NO: 429279 - DNA, 30 bp, Artificial Sequence
  Synthetic oligonucleotide
ccgcgatctattacgcgctattggacctag

SEQ ID NO: 429280 - DNA, 30 bp, Artificial Sequence
  Synthetic oligonucleotide
gatcttggtgtactggataggtatacctag

SEQ ID NO: 429281 - DNA, 30 bp, Artificial Sequence
  Synthetic oligonucleotide
cgctccccgttataaagaatgcggccctag

SEQ ID NO: 429282 - DNA, 30 bp, Artificial Sequence
  Synthetic oligonucleotide
tgagaatcgagtttcatagtgggtccctag

SEQ ID NO: 429283 - DNA, 30 bp, Artificial Sequence
  Synthetic oligonucleotide
gcccaaaagggcgtgttacggaaagcctag

SEQ ID NO: 429284 - DNA, 30 bp, Artificial Sequence
  Synthetic oligonucleotide
aaagttgtagtggcattgtacacagcctag

SEQ ID NO: 429285 - DNA, 30 bp, Artificial Sequence
  Synthetic oligonucleotide
attgacgcctttacatagggcagagcctag

SEQ ID NO: 429286 - DNA, 30 bp, Artificial Sequence
  Synthetic oligonucleotide
aacagtgttccagggaccacatgagcctag

SEQ ID NO: 429287 - DNA, 30 bp, Artificial Sequence
  Synthetic oligonucleotide
ttcgaatgcaggaacgagatattagcctag

SEQ ID NO: 429288 - DNA, 30 bp, Artificial Sequence
  Synthetic oligonucleotide
ttgtgaagtacgcaaaggcacaccgcctag

SEQ ID NO: 429289 - DNA, 30 bp, Artificial Sequence
  Synthetic oligonucleotide
agagccagtcgttagttgcagttctcctag

SEQ ID NO: 429290 - DNA, 30 bp, Artificial Sequence
  Synthetic oligonucleotide
catacacgggagtccggattatagtcctag

SEQ ID NO: 429291 - DNA, 30 bp, Artificial Sequence
  Synthetic oligonucleotide
tcttgggtcattttcaactggcggtcctag

SEQ ID NO: 429292 - DNA, 30 bp, Artificial Sequence
  Synthetic oligonucleotide
gttcggaagcctgagggaatgcgcagctag

SEQ ID NO: 429293 - DNA, 30 bp, Artificial Sequence
  Synthetic oligonucleotide
cgtgctgctcatatggtcggactcagctag

SEQ ID NO: 429294 - DNA, 30 bp, Artificial Sequence
  Synthetic oligonucleotide
ggttgaatggcagcttcacagttcagctag

SEQ ID NO: 429295 - DNA, 30 bp, Artificial Sequence
  Synthetic oligonucleotide
cagatagcgtctatataaccgcagagctag

SEQ ID NO: 429296 - DNA, 30 bp, Artificial Sequence
  Synthetic oligonucleotide
gccctcctattgaaggcgggagagagctag

SEQ ID NO: 429297 - DNA, 30 bp, Artificial Sequence
  Synthetic oligonucleotide
tttgactctgttacaagcacgaatagctag

SEQ ID NO: 429298 - DNA, 30 bp, Artificial Sequence
  Synthetic oligonucleotide
taagctaccctatgcgttgcaacacgctag

SEQ ID NO: 429299 - DNA, 30 bp, Artificial Sequence
  Synthetic oligonucleotide
aactatgaatatgacgtggcatgacgctag

SEQ ID NO: 429300 - DNA, 30 bp, Artificial Sequence
  Synthetic oligonucleotide
ttcgtataagagtagtctagaccgcgctag

SEQ ID NO: 429301 - DNA, 30 bp, Artificial Sequence
  Synthetic oligonucleotide
ttgaaagaaagcatcgcgcgtctgcgctag

SEQ ID NO: 429302 - DNA, 30 bp, Artificial Sequence
  Synthetic oligonucleotide
caaaattctacatgtcagtggtctcgctag

SEQ ID NO: 429303 - DNA, 30 bp, Artificial Sequence
  Synthetic oligonucleotide
ggcgcgagaacagccttggacttaggctag

SEQ ID NO: 429304 - DNA, 30 bp, Artificial Sequence
  Synthetic oligonucleotide
gaggtacagatcgcacaccatcagggctag

SEQ ID NO: 429305 - DNA, 30 bp, Artificial Sequence
  Synthetic oligonucleotide
ggccgtattccttattaggtataatgctag

SEQ ID NO: 429306 - DNA, 30 bp, Artificial Sequence
  Synthetic oligonucleotide
gaggggagctacactggttgcacatgctag

SEQ ID NO: 429307 - DNA, 30 bp, Artificial Sequence
  Synthetic oligonucleotide
gtactttcggtctcgtagtctctatgctag

SEQ ID NO: 429308 - DNA, 30 bp, Artificial Sequence
  Synthetic oligonucleotide
agttcgcttcgttccatccacacctgctag

SEQ ID NO: 429309 - DNA, 30 bp, Artificial Sequence
  Synthetic oligonucleotide
acaaaattgccttggagcggttcaatctag

SEQ ID NO: 429310 - DNA, 30 bp, Artificial Sequence
  Synthetic oligonucleotide
tggtaagcgctgtgaaccatgaacatctag

SEQ ID NO: 429311 - DNA, 31 bp, Artificial Sequence
  Synthetic oligonucleotide
taccggaggggtcacactagcccacatctag

SEQ ID NO: 429312 - DNA, 30 bp, Artificial Sequence
  Synthetic oligonucleotide
acatggcaaagtgaaaacttatatatctag

SEQ ID NO: 429313 - DNA, 30 bp, Artificial Sequence
  Synthetic oligonucleotide
ttatgttgtaagcaactgccttatatctag

SEQ ID NO: 429314 - DNA, 30 bp, Artificial Sequence
  Synthetic oligonucleotide
aaatcgtcacggtaaccctcggtactctag

SEQ ID NO: 429315 - DNA, 30 bp, Artificial Sequence
  Synthetic oligonucleotide
aatattactgggtcttaaatctagctctag

SEQ ID NO: 429316 - DNA, 30 bp, Artificial Sequence
  Synthetic oligonucleotide
tcggagctcccaatactaaaacctctctag

SEQ ID NO: 429317 - DNA, 30 bp, Artificial Sequence
  Synthetic oligonucleotide
aaacaacggctgttgtgaaatgcagtctag

SEQ ID NO: 429318 - DNA, 30 bp, Artificial Sequence
  Synthetic oligonucleotide
tcacccttcaattaacgatttatagtctag

SEQ ID NO: 429319 - DNA, 30 bp, Artificial Sequence
  Synthetic oligonucleotide
cttaggaggctcgcgggcagcttcgtctag

SEQ ID NO: 429320 - DNA, 30 bp, Artificial Sequence
  Synthetic oligonucleotide
gtaaaggtcactcggtggcggtaggtctag

SEQ ID NO: 429321 - DNA, 30 bp, Artificial Sequence
  Synthetic oligonucleotide
gaacatcggggtgcgggcgcttaggtctag

SEQ ID NO: 429322 - DNA, 30 bp, Artificial Sequence
  Synthetic oligonucleotide
aaatgttgccccgccccgaattatgtctag

SEQ ID NO: 429323 - DNA, 30 bp, Artificial Sequence
  Synthetic oligonucleotide
ttcggtcccacacgtgacacttgtgtctag

SEQ ID NO: 429324 - DNA, 30 bp, Artificial Sequence
  Synthetic oligonucleotide
ataaggcgcccagacttatttgttgtctag

SEQ ID NO: 429325 - DNA, 30 bp, Artificial Sequence
  Synthetic oligonucleotide
gtctctaaaggaagcaacagtgtattctag

SEQ ID NO: 429326 - DNA, 30 bp, Artificial Sequence
  Synthetic oligonucleotide
ctcgaaggcgccaaaacggtcggcttctag

SEQ ID NO: 429327 - DNA, 30 bp, Artificial Sequence
  Synthetic oligonucleotide
agcacttaatgggttccgtgagagttctag

SEQ ID NO: 429328 - DNA, 30 bp, Artificial Sequence
  Synthetic oligonucleotide
gtgagtttgacgattgaatgggggttctag

SEQ ID NO: 429329 - DNA, 30 bp, Artificial Sequence
  Synthetic oligonucleotide
aggcggtcccttaatttattcaatttctag

SEQ ID NO: 429330 - DNA, 30 bp, Artificial Sequence
  Synthetic oligonucleotide
tctatcttattacttggcttgtacaagtag

SEQ ID NO: 429331 - DNA, 30 bp, Artificial Sequence
  Synthetic oligonucleotide
atttcgcaagtagatttctttggtaagtag

SEQ ID NO: 429332 - DNA, 30 bp, Artificial Sequence
  Synthetic oligonucleotide
tatttcttcgtcggtagcatctgtaagtag

SEQ ID NO: 429333 - DNA, 30 bp, Artificial Sequence
  Synthetic oligonucleotide
ttcttatgctaggctgcccgttgtaagtag

SEQ ID NO: 429334 - DNA, 30 bp, Artificial Sequence
  Synthetic oligonucleotide
ctaatttaaactgatttagagtttaagtag

SEQ ID NO: 429335 - DNA, 30 bp, Artificial Sequence
  Synthetic oligonucleotide
ggactgggctaatacggcctggtacagtag

SEQ ID NO: 429336 - DNA, 30 bp, Artificial Sequence
  Synthetic oligonucleotide
atccctgtgtagatattgtagcttcagtag

SEQ ID NO: 429337 - DNA, 30 bp, Artificial Sequence
  Synthetic oligonucleotide
atcccggcatcggttatatcatttcagtag

SEQ ID NO: 429338 - DNA, 30 bp, Artificial Sequence
  Synthetic oligonucleotide
cgaggcatcgtagcatactcggatgagtag

SEQ ID NO: 429339 - DNA, 30 bp, Artificial Sequence
  Synthetic oligonucleotide
ccacgccgacgttcactacagcaatagtag

SEQ ID NO: 429340 - DNA, 30 bp, Artificial Sequence
  Synthetic oligonucleotide
gcggcaagacactgaacacgcacatagtag

SEQ ID NO: 429341 - DNA, 30 bp, Artificial Sequence
  Synthetic oligonucleotide
agaattttatcaacgtaaagtgcatagtag

SEQ ID NO: 429342 - DNA, 30 bp, Artificial Sequence
  Synthetic oligonucleotide
tcaatttttgacaaagacggagactagtag

SEQ ID NO: 429343 - DNA, 30 bp, Artificial Sequence
  Synthetic oligonucleotide
gcgtgcaggccccgggatcacgtctagtag

SEQ ID NO: 429344 - DNA, 30 bp, Artificial Sequence
  Synthetic oligonucleotide
aaaaatgttccgcagttgtctgattagtag

SEQ ID NO: 429345 - DNA, 30 bp, Artificial Sequence
  Synthetic oligonucleotide
tacgtccagaacgctgtcatctattagtag

SEQ ID NO: 429346 - DNA, 30 bp, Artificial Sequence
  Synthetic oligonucleotide
gggttaggtattaacaaacttcaaacgtag

SEQ ID NO: 429347 - DNA, 30 bp, Artificial Sequence
  Synthetic oligonucleotide
ttgggtgatgcgccacgcacctacacgtag

SEQ ID NO: 429348 - DNA, 30 bp, Artificial Sequence
  Synthetic oligonucleotide
agcttatgttttccctatgacgccacgtag

SEQ ID NO: 429349 - DNA, 30 bp, Artificial Sequence
  Synthetic oligonucleotide
acgaccggattctccttacgtagcacgtag

SEQ ID NO: 429350 - DNA, 30 bp, Artificial Sequence
  Synthetic oligonucleotide
cgagtagtacttgcgcaatcgttcacgtag

SEQ ID NO: 429351 - DNA, 30 bp, Artificial Sequence
  Synthetic oligonucleotide
gaatgatgtaggggggttctggagacgtag

SEQ ID NO: 429352 - DNA, 30 bp, Artificial Sequence
  Synthetic oligonucleotide
cgcttgtaatcgaggcgccgttagacgtag

SEQ ID NO: 429353 - DNA, 30 bp, Artificial Sequence
  Synthetic oligonucleotide
atgtcgcgttcagttatagcctctacgtag

SEQ ID NO: 429354 - DNA, 30 bp, Artificial Sequence
  Synthetic oligonucleotide
ccgcagttaacccatacccgttttacgtag

SEQ ID NO: 429355 - DNA, 30 bp, Artificial Sequence
  Synthetic oligonucleotide
gggaaggcaggtgccagcgccagaccgtag

SEQ ID NO: 429356 - DNA, 30 bp, Artificial Sequence
  Synthetic oligonucleotide
tggcggctgcgcgcactaaacttaccgtag

SEQ ID NO: 429357 - DNA, 30 bp, Artificial Sequence
  Synthetic oligonucleotide
agagtacctcacgtttataacgtcccgtag

SEQ ID NO: 429358 - DNA, 30 bp, Artificial Sequence
  Synthetic oligonucleotide
cctgctgggtagctcgcgcgagctccgtag

SEQ ID NO: 429359 - DNA, 30 bp, Artificial Sequence
  Synthetic oligonucleotide
ataaaaggtgctcatagtctgtttgcgtag

SEQ ID NO: 429360 - DNA, 31 bp, Artificial Sequence
  Synthetic oligonucleotide
cagtcacagctcaccgtggcagaaatcgtag

SEQ ID NO: 429361 - DNA, 30 bp, Artificial Sequence
  Synthetic oligonucleotide
ttatattgtgatacgaggtgtcaatcgtag

SEQ ID NO: 429362 - DNA, 30 bp, Artificial Sequence
  Synthetic oligonucleotide
cgtaacgaacgtgaagaggtgctatcgtag

SEQ ID NO: 429363 - DNA, 30 bp, Artificial Sequence
  Synthetic oligonucleotide
aagttcgtatgatgggcctaggtgtcgtag

SEQ ID NO: 429364 - DNA, 30 bp, Artificial Sequence
  Synthetic oligonucleotide
gtaagaagtaccaccgggtgtgacaggtag

SEQ ID NO: 429365 - DNA, 30 bp, Artificial Sequence
  Synthetic oligonucleotide
ggtcattatggtttggacacgtacaggtag

SEQ ID NO: 429366 - DNA, 30 bp, Artificial Sequence
  Synthetic oligonucleotide
tttaccaaagacgcgagttgcgccaggtag

SEQ ID NO: 429367 - DNA, 30 bp, Artificial Sequence
  Synthetic oligonucleotide
acttgccggacggcctttgtcattaggtag

SEQ ID NO: 429368 - DNA, 30 bp, Artificial Sequence
  Synthetic oligonucleotide
ggagaaaggaacaagacacgtggacggtag

SEQ ID NO: 429369 - DNA, 30 bp, Artificial Sequence
  Synthetic oligonucleotide
tgtaccggtcaccgggattcggcccggtag

SEQ ID NO: 429370 - DNA, 30 bp, Artificial Sequence
  Synthetic oligonucleotide
caaaactacctaggcgcccgtcagcggtag

SEQ ID NO: 429371 - DNA, 30 bp, Artificial Sequence
  Synthetic oligonucleotide
catactgcgtcataactatgacatcggtag

SEQ ID NO: 429372 - DNA, 30 bp, Artificial Sequence
  Synthetic oligonucleotide
atatattaaggacgggtaatgcgcgggtag

SEQ ID NO: 429373 - DNA, 30 bp, Artificial Sequence
  Synthetic oligonucleotide
ctccctcaccaaagatgtagcctcgggtag

SEQ ID NO: 429374 - DNA, 30 bp, Artificial Sequence
  Synthetic oligonucleotide
cgcttaatggcgcgcttcccatcggggtag

SEQ ID NO: 429375 - DNA, 30 bp, Artificial Sequence
  Synthetic oligonucleotide
taaattaatttagaagaattgtcggggtag

SEQ ID NO: 429376 - DNA, 30 bp, Artificial Sequence
  Synthetic oligonucleotide
ttcagcggggcacgcgagttttgggggtag

SEQ ID NO: 429377 - DNA, 30 bp, Artificial Sequence
  Synthetic oligonucleotide
ggtatgaggtccgtgcagatgatggggtag

SEQ ID NO: 429378 - DNA, 30 bp, Artificial Sequence
  Synthetic oligonucleotide
tattgtggttgatctaatcttatggggtag

SEQ ID NO: 429379 - DNA, 30 bp, Artificial Sequence
  Synthetic oligonucleotide
cagatttagcactagtaacaatatgggtag

SEQ ID NO: 429380 - DNA, 30 bp, Artificial Sequence
  Synthetic oligonucleotide
gctaatgactaatagcactgtgcatggtag

SEQ ID NO: 429381 - DNA, 30 bp, Artificial Sequence
  Synthetic oligonucleotide
aagttaaatccggacctattatactggtag

SEQ ID NO: 429382 - DNA, 30 bp, Artificial Sequence
  Synthetic oligonucleotide
aactcaagccctctcctgtcttactggtag

SEQ ID NO: 429383 - DNA, 30 bp, Artificial Sequence
  Synthetic oligonucleotide
ctgggcgggttatcgttttttcagtggtag

SEQ ID NO: 429384 - DNA, 30 bp, Artificial Sequence
  Synthetic oligonucleotide
gtcctccttgttgggccaacgtggtggtag

SEQ ID NO: 429385 - DNA, 30 bp, Artificial Sequence
  Synthetic oligonucleotide
tttctccgtataattcatgacgattggtag

SEQ ID NO: 429386 - DNA, 30 bp, Artificial Sequence
  Synthetic oligonucleotide
ctcagacattcatgatcaatcaaaatgtag

SEQ ID NO: 429387 - DNA, 30 bp, Artificial Sequence
  Synthetic oligonucleotide
tccgtgatgccggttcaagcactcatgtag

SEQ ID NO: 429388 - DNA, 30 bp, Artificial Sequence
  Synthetic oligonucleotide
actgacaagttgtatacctagtcgatgtag

SEQ ID NO: 429389 - DNA, 30 bp, Artificial Sequence
  Synthetic oligonucleotide
gaatgatactagtaggctgtatttatgtag

SEQ ID NO: 429390 - DNA, 30 bp, Artificial Sequence
  Synthetic oligonucleotide
ttgttttagttcatgttcgctcaactgtag

SEQ ID NO: 429391 - DNA, 30 bp, Artificial Sequence
  Synthetic oligonucleotide
attgcgccgttgcgtgcatttcgactgtag

SEQ ID NO: 429392 - DNA, 30 bp, Artificial Sequence
  Synthetic oligonucleotide
atactcttaacgtggccttatcgcctgtag

SEQ ID NO: 429393 - DNA, 30 bp, Artificial Sequence
  Synthetic oligonucleotide
gttaaaaaggaatgttatagttatctgtag

SEQ ID NO: 429394 - DNA, 30 bp, Artificial Sequence
  Synthetic oligonucleotide
agtgatttcggggaaggtagttgtctgtag

SEQ ID NO: 429395 - DNA, 30 bp, Artificial Sequence
  Synthetic oligonucleotide
ataatcacagggtgggtaagacttctgtag

SEQ ID NO: 429396 - DNA, 30 bp, Artificial Sequence
  Synthetic oligonucleotide
ggacttttcccatgacattttgaagtgtag

SEQ ID NO: 429397 - DNA, 30 bp, Artificial Sequence
  Synthetic oligonucleotide
cacggggctgctttctttccataattgtag

SEQ ID NO: 429398 - DNA, 30 bp, Artificial Sequence
  Synthetic oligonucleotide
attactttattgccagaggtgacattgtag

SEQ ID NO: 429399 - DNA, 30 bp, Artificial Sequence
  Synthetic oligonucleotide
cttcaccccaagtacccgcgtggcttgtag

SEQ ID NO: 429400 - DNA, 30 bp, Artificial Sequence
  Synthetic oligonucleotide
agattagtaatgagaccgacaattttgtag

SEQ ID NO: 429401 - DNA, 30 bp, Artificial Sequence
  Synthetic oligonucleotide
catttcttaccctgtgatctttttttgtag

SEQ ID NO: 429402 - DNA, 30 bp, Artificial Sequence
  Synthetic oligonucleotide
tcactatggcgtatttccatctaaaattag

SEQ ID NO: 429403 - DNA, 30 bp, Artificial Sequence
  Synthetic oligonucleotide
cggcgtggggtatcggggtgaacaaattag

SEQ ID NO: 429404 - DNA, 30 bp, Artificial Sequence
  Synthetic oligonucleotide
tagctatatagtagagcaattctcaattag

SEQ ID NO: 429405 - DNA, 30 bp, Artificial Sequence
  Synthetic oligonucleotide
ataatgaggtcatggaggagtttcaattag

SEQ ID NO: 429406 - DNA, 30 bp, Artificial Sequence
  Synthetic oligonucleotide
cccgaaggaatcctcaccgtaattaattag

SEQ ID NO: 429407 - DNA, 30 bp, Artificial Sequence
  Synthetic oligonucleotide
atggaaaatgactactggattctccattag

SEQ ID NO: 429408 - DNA, 30 bp, Artificial Sequence
  Synthetic oligonucleotide
aaacatcttttggttatgccggtccattag

SEQ ID NO: 429409 - DNA, 30 bp, Artificial Sequence
  Synthetic oligonucleotide
tcgccggtggctgatacaagcgagcattag

SEQ ID NO: 429410 - DNA, 30 bp, Artificial Sequence
  Synthetic oligonucleotide
tatatacgcaacaaaccggtgaggcattag

SEQ ID NO: 429411 - DNA, 30 bp, Artificial Sequence
  Synthetic oligonucleotide
gttaagcccatgccgtacccagatcattag

SEQ ID NO: 429412 - DNA, 30 bp, Artificial Sequence
  Synthetic oligonucleotide
ttgagtcggtcacacaacttttgagattag

SEQ ID NO: 429413 - DNA, 30 bp, Artificial Sequence
  Synthetic oligonucleotide
tagtagacactcgctactcgactcgattag

SEQ ID NO: 429414 - DNA, 30 bp, Artificial Sequence
  Synthetic oligonucleotide
atatactctaggggcagtccagtggattag

SEQ ID NO: 429415 - DNA, 30 bp, Artificial Sequence
  Synthetic oligonucleotide
aattggcatttcgtcgacgggtcatattag

SEQ ID NO: 429416 - DNA, 30 bp, Artificial Sequence
  Synthetic oligonucleotide
catcccgagctccagttaagcggatattag

SEQ ID NO: 429417 - DNA, 30 bp, Artificial Sequence
  Synthetic oligonucleotide
cgtgtttccctaccctaaggtctatattag

SEQ ID NO: 429418 - DNA, 30 bp, Artificial Sequence
  Synthetic oligonucleotide
acgaagtcattaggacatctgggctattag

SEQ ID NO: 429419 - DNA, 30 bp, Artificial Sequence
  Synthetic oligonucleotide
ggattttggcgaggcatcgcatgctattag

SEQ ID NO: 429420 - DNA, 30 bp, Artificial Sequence
  Synthetic oligonucleotide
tatttattccttcgtatagggatctattag

SEQ ID NO: 429421 - DNA, 30 bp, Artificial Sequence
  Synthetic oligonucleotide
ccgagttgagttatctcgtatttgtattag

SEQ ID NO: 429422 - DNA, 30 bp, Artificial Sequence
  Synthetic oligonucleotide
tcattcttggtaacttaagtatcttattag

SEQ ID NO: 429423 - DNA, 30 bp, Artificial Sequence
  Synthetic oligonucleotide
aactaacctatcctaaggacttcttattag

SEQ ID NO: 429424 - DNA, 30 bp, Artificial Sequence
  Synthetic oligonucleotide
ctgtatatggtgttatacgtacgttattag

SEQ ID NO: 429425 - DNA, 30 bp, Artificial Sequence
  Synthetic oligonucleotide
ttatccgcacaatgcgtgtgtcaaacttag

SEQ ID NO: 429426 - DNA, 30 bp, Artificial Sequence
  Synthetic oligonucleotide
attgttaaaacactcgatggtttaacttag

SEQ ID NO: 429427 - DNA, 30 bp, Artificial Sequence
  Synthetic oligonucleotide
ttactcgaagcactcacatagtgcacttag

SEQ ID NO: 429428 - DNA, 30 bp, Artificial Sequence
  Synthetic oligonucleotide
gagacactccggtttgattatacaccttag

SEQ ID NO: 429429 - DNA, 30 bp, Artificial Sequence
  Synthetic oligonucleotide
ccaaacaaggaggctgttctattcccttag

SEQ ID NO: 429430 - DNA, 31 bp, Artificial Sequence
  Synthetic oligonucleotide
ctctagtgtgggtaagcgctagaagccttag

SEQ ID NO: 429431 - DNA, 30 bp, Artificial Sequence
  Synthetic oligonucleotide
gtcatcaaatctataccgtcacaggcttag

SEQ ID NO: 429432 - DNA, 30 bp, Artificial Sequence
  Synthetic oligonucleotide
ggattgccttggcccgggacaatggcttag

SEQ ID NO: 429433 - DNA, 30 bp, Artificial Sequence
  Synthetic oligonucleotide
agctccccccaccgaggttagcttgcttag

SEQ ID NO: 429434 - DNA, 30 bp, Artificial Sequence
  Synthetic oligonucleotide
tagcagggtcggtagggggtattctcttag

SEQ ID NO: 429435 - DNA, 30 bp, Artificial Sequence
  Synthetic oligonucleotide
aatcttgtagtagtgaaccgtgtttcttag

SEQ ID NO: 429436 - DNA, 30 bp, Artificial Sequence
  Synthetic oligonucleotide
gtcctcggagaccggtcaaccaccagttag

SEQ ID NO: 429437 - DNA, 30 bp, Artificial Sequence
  Synthetic oligonucleotide
gaccgcttcctgcactcttggtgcagttag

SEQ ID NO: 429438 - DNA, 30 bp, Artificial Sequence
  Synthetic oligonucleotide
ggactaaggtgattcacttctcaacgttag

SEQ ID NO: 429439 - DNA, 30 bp, Artificial Sequence
  Synthetic oligonucleotide
gtacctcaggtggtcacggtaatacgttag

SEQ ID NO: 429440 - DNA, 30 bp, Artificial Sequence
  Synthetic oligonucleotide
aacttacaaagaattttgagaaaccgttag

SEQ ID NO: 429441 - DNA, 30 bp, Artificial Sequence
  Synthetic oligonucleotide
catccgttctacatacaacccaaccgttag

SEQ ID NO: 429442 - DNA, 30 bp, Artificial Sequence
  Synthetic oligonucleotide
gaatcattaccattttgagtgaagcgttag

SEQ ID NO: 429443 - DNA, 30 bp, Artificial Sequence
  Synthetic oligonucleotide
tgccattgcgtgtcagatcttttgcgttag

SEQ ID NO: 429444 - DNA, 30 bp, Artificial Sequence
  Synthetic oligonucleotide
tgcgacgtccacaacgcatctgatcgttag

SEQ ID NO: 429445 - DNA, 30 bp, Artificial Sequence
  Synthetic oligonucleotide
gagtcttccaaaagattgttcggtcgttag

SEQ ID NO: 429446 - DNA, 30 bp, Artificial Sequence
  Synthetic oligonucleotide
cggggctgcttcgattctacgggtcgttag

SEQ ID NO: 429447 - DNA, 30 bp, Artificial Sequence
  Synthetic oligonucleotide
ccgggatagacttcgcgctacgttcgttag

SEQ ID NO: 429448 - DNA, 30 bp, Artificial Sequence
  Synthetic oligonucleotide
taacccaagcctcagtggtagtgaggttag

SEQ ID NO: 429449 - DNA, 30 bp, Artificial Sequence
  Synthetic oligonucleotide
gattttcttactaagtacaggataggttag

SEQ ID NO: 429450 - DNA, 30 bp, Artificial Sequence
  Synthetic oligonucleotide
ttttcaaagttggggtggtggataggttag

SEQ ID NO: 429451 - DNA, 30 bp, Artificial Sequence
  Synthetic oligonucleotide
tttctatcagactcacccggtctgggttag

SEQ ID NO: 429452 - DNA, 30 bp, Artificial Sequence
  Synthetic oligonucleotide
aagtttcacaaagacacagtgggtggttag

SEQ ID NO: 429453 - DNA, 30 bp, Artificial Sequence
  Synthetic oligonucleotide
caataagaaacctacagacgatcatgttag

SEQ ID NO: 429454 - DNA, 30 bp, Artificial Sequence
  Synthetic oligonucleotide
ttctcttccatttaggcataatgatgttag

SEQ ID NO: 429455 - DNA, 30 bp, Artificial Sequence
  Synthetic oligonucleotide
tctaccaacccatctacatcgcagtgttag

SEQ ID NO: 429456 - DNA, 30 bp, Artificial Sequence
  Synthetic oligonucleotide
cgcacactagcgggagcgggtccgtgttag

SEQ ID NO: 429457 - DNA, 30 bp, Artificial Sequence
  Synthetic oligonucleotide
caagttctgaaatacttcgagtcgtgttag

SEQ ID NO: 429458 - DNA, 30 bp, Artificial Sequence
  Synthetic oligonucleotide
gctattgcttcactcattagttggtgttag

SEQ ID NO: 429459 - DNA, 30 bp, Artificial Sequence
  Synthetic oligonucleotide
aagtcccatgtcatcccctgcatgtgttag

SEQ ID NO: 429460 - DNA, 30 bp, Artificial Sequence
  Synthetic oligonucleotide
aactttctccgaaatggatcgagaatttag

SEQ ID NO: 429461 - DNA, 30 bp, Artificial Sequence
  Synthetic oligonucleotide
tgctagttacgggtaagcaccgtcatttag

SEQ ID NO: 429462 - DNA, 28 bp, Artificial Sequence
  Synthetic oligonucleotide
gatgtattgtccgttaagcgcactttag

SEQ ID NO: 429463 - DNA, 30 bp, Artificial Sequence
  Synthetic oligonucleotide
cggtaggttctccgagtgacatgactttag

SEQ ID NO: 429464 - DNA, 30 bp, Artificial Sequence
  Synthetic oligonucleotide
acttatgccctttctagatatatcctttag

SEQ ID NO: 429465 - DNA, 30 bp, Artificial Sequence
  Synthetic oligonucleotide
cctgggcaatggtgacgaacagtcctttag

SEQ ID NO: 429466 - DNA, 30 bp, Artificial Sequence
  Synthetic oligonucleotide
ggttattggctgacggcataaacgctttag

SEQ ID NO: 429467 - DNA, 29 bp, Artificial Sequence
  Synthetic oligonucleotide
agggaggtcccggcggaggggcgctttag

SEQ ID NO: 429468 - DNA, 30 bp, Artificial Sequence
  Synthetic oligonucleotide
aaaagcgggacgccatagccacttctttag

SEQ ID NO: 429469 - DNA, 30 bp, Artificial Sequence
  Synthetic oligonucleotide
aagacgacatgccactagatgacagtttag

SEQ ID NO: 429470 - DNA, 30 bp, Artificial Sequence
  Synthetic oligonucleotide
tggtctgtgacctcggcacctacagtttag

SEQ ID NO: 429471 - DNA, 30 bp, Artificial Sequence
  Synthetic oligonucleotide
tatcccgggtaataggtaaaatcagtttag

SEQ ID NO: 429472 - DNA, 30 bp, Artificial Sequence
  Synthetic oligonucleotide
ctagtgggagtgaatgtgtttggagtttag

SEQ ID NO: 429473 - DNA, 30 bp, Artificial Sequence
  Synthetic oligonucleotide
ttgctatccacaacgagttcttgagtttag

SEQ ID NO: 429474 - DNA, 30 bp, Artificial Sequence
  Synthetic oligonucleotide
atacagcgagcgcccgctgagcacgtttag

SEQ ID NO: 429475 - DNA, 30 bp, Artificial Sequence
  Synthetic oligonucleotide
agagtctgcatcttttctacaatcgtttag

SEQ ID NO: 429476 - DNA, 30 bp, Artificial Sequence
  Synthetic oligonucleotide
gcaagaaatggcgtggcaatgtaggtttag

SEQ ID NO: 429477 - DNA, 30 bp, Artificial Sequence
  Synthetic oligonucleotide
gtaaggccctggtgaaaatttgcggtttag

SEQ ID NO: 429478 - DNA, 30 bp, Artificial Sequence
  Synthetic oligonucleotide
tactacattgaagagtagatttcggtttag

SEQ ID NO: 429479 - DNA, 30 bp, Artificial Sequence
  Synthetic oligonucleotide
cgcactttaggtctggacacgtgggtttag

SEQ ID NO: 429480 - DNA, 30 bp, Artificial Sequence
  Synthetic oligonucleotide
atcctccgcgcattgcacagtatggtttag

SEQ ID NO: 429481 - DNA, 30 bp, Artificial Sequence
  Synthetic oligonucleotide
ggacagcgaccggcgaagtcttttgtttag

SEQ ID NO: 429482 - DNA, 30 bp, Artificial Sequence
  Synthetic oligonucleotide
atccggattttccggtggattggattttag

SEQ ID NO: 429483 - DNA, 30 bp, Artificial Sequence
  Synthetic oligonucleotide
tacaacaggtttttgcgaatgatattttag

SEQ ID NO: 429484 - DNA, 30 bp, Artificial Sequence
  Synthetic oligonucleotide
agaaactcgccaggttcatccgtattttag

SEQ ID NO: 429485 - DNA, 30 bp, Artificial Sequence
  Synthetic oligonucleotide
cttgctcctcggtctcccctgttattttag

SEQ ID NO: 429486 - DNA, 30 bp, Artificial Sequence
  Synthetic oligonucleotide
tggaagatacttcgccggtttttattttag

SEQ ID NO: 429487 - DNA, 30 bp, Artificial Sequence
  Synthetic oligonucleotide
tgaattcagtgacaagcggcgagcttttag

SEQ ID NO: 429488 - DNA, 30 bp, Artificial Sequence
  Synthetic oligonucleotide
tgccttccacttgtgcggcttggcttttag

SEQ ID NO: 429489 - DNA, 30 bp, Artificial Sequence
  Synthetic oligonucleotide
gatagcccagaactccacatctagttttag

SEQ ID NO: 429490 - DNA, 30 bp, Artificial Sequence
  Synthetic oligonucleotide
gtggagtcacttaacggggaaacgttttag

SEQ ID NO: 429491 - DNA, 30 bp, Artificial Sequence
  Synthetic oligonucleotide
acctcagcccgtcggcggaccacgttttag

SEQ ID NO: 429492 - DNA, 30 bp, Artificial Sequence
  Synthetic oligonucleotide
ctagatttgaagctggatcggtcgttttag

SEQ ID NO: 429493 - DNA, 30 bp, Artificial Sequence
  Synthetic oligonucleotide
tgcccggactgtggcccgccgaatttttag

SEQ ID NO: 429494 - DNA, 30 bp, Artificial Sequence
  Synthetic oligonucleotide
tacaatagcatcaataactcgagtttttag

SEQ ID NO: 429495 - DNA, 30 bp, Artificial Sequence
  Synthetic oligonucleotide
tactcacaggcccacggcgttagaaaaacg

SEQ ID NO: 429496 - DNA, 30 bp, Artificial Sequence
  Synthetic oligonucleotide
ttactgataggtcagaaatcgttaaaaacg

SEQ ID NO: 429497 - DNA, 30 bp, Artificial Sequence
  Synthetic oligonucleotide
agagcccgtcacggcccctcttccaaaacg

SEQ ID NO: 429498 - DNA, 30 bp, Artificial Sequence
  Synthetic oligonucleotide
aaagattagtctcacgcgtcgcgcaaaacg

SEQ ID NO: 429499 - DNA, 30 bp, Artificial Sequence
  Synthetic oligonucleotide
cttgatatccgaagagctattgagaaaacg

SEQ ID NO: 429500 - DNA, 30 bp, Artificial Sequence
  Synthetic oligonucleotide
tttaaatacatgtaatgggacacgaaaacg

SEQ ID NO: 429501 - DNA, 30 bp, Artificial Sequence
  Synthetic oligonucleotide
agaagttggggatgtcagcggtataaaacg

SEQ ID NO: 429502 - DNA, 30 bp, Artificial Sequence
  Synthetic oligonucleotide
aatttttgcacggggactttccctaaaacg

SEQ ID NO: 429503 - DNA, 30 bp, Artificial Sequence
  Synthetic oligonucleotide
tttcataaagggatcatcatctttaaaacg

SEQ ID NO: 429504 - DNA, 30 bp, Artificial Sequence
  Synthetic oligonucleotide
gtaaaccgtggcgtcggttggcgacaaacg

SEQ ID NO: 429505 - DNA, 30 bp, Artificial Sequence
  Synthetic oligonucleotide
accccgtacatctaccctaggggacaaacg

SEQ ID NO: 429506 - DNA, 30 bp, Artificial Sequence
  Synthetic oligonucleotide
gctgtcaagtttgattatcgcaggcaaacg

SEQ ID NO: 429507 - DNA, 30 bp, Artificial Sequence
  Synthetic oligonucleotide
taagttagtcagcatggtttgaatcaaacg

SEQ ID NO: 429508 - DNA, 30 bp, Artificial Sequence
  Synthetic oligonucleotide
aagtctaagtagcattgtgggtaagaaacg

SEQ ID NO: 429509 - DNA, 29 bp, Artificial Sequence
  Synthetic oligonucleotide
ggttccgctttctattcgtactagaaacg

SEQ ID NO: 429510 - DNA, 31 bp, Artificial Sequence
  Synthetic oligonucleotide
ctgtgctgccagatagtatgtataggaaacg

SEQ ID NO: 429511 - DNA, 30 bp, Artificial Sequence
  Synthetic oligonucleotide
gagaagtttgcatgacccggcagggaaacg

SEQ ID NO: 429512 - DNA, 30 bp, Artificial Sequence
  Synthetic oligonucleotide
ggtcttgtggtgctcaaggtgatggaaacg

SEQ ID NO: 429513 - DNA, 30 bp, Artificial Sequence
  Synthetic oligonucleotide
aatcttccatttaagcgggtctctgaaacg

SEQ ID NO: 429514 - DNA, 30 bp, Artificial Sequence
  Synthetic oligonucleotide
ttatcgaggtatatgctcacaagtgaaacg

SEQ ID NO: 429515 - DNA, 30 bp, Artificial Sequence
  Synthetic oligonucleotide
cctcggtagcgtcccggggctcttgaaacg

SEQ ID NO: 429516 - DNA, 30 bp, Artificial Sequence
  Synthetic oligonucleotide
agtatttcaatcgcggacgattaataaacg

SEQ ID NO: 429517 - DNA, 30 bp, Artificial Sequence
  Synthetic oligonucleotide
agaatactccttatatgactgccataaacg

SEQ ID NO: 429518 - DNA, 30 bp, Artificial Sequence
  Synthetic oligonucleotide
ggattactccgacccagtggagcataaacg

SEQ ID NO: 429519 - DNA, 30 bp, Artificial Sequence
  Synthetic oligonucleotide
acttcttgcacgcttcctccaggataaacg

SEQ ID NO: 429520 - DNA, 30 bp, Artificial Sequence
  Synthetic oligonucleotide
agtttaaccctacggcccaaaatataaacg

SEQ ID NO: 429521 - DNA, 30 bp, Artificial Sequence
  Synthetic oligonucleotide
caaagagccttattatggattatataaacg

SEQ ID NO: 429522 - DNA, 30 bp, Artificial Sequence
  Synthetic oligonucleotide
ttacagtcctgtacacagggcgtctaaacg

SEQ ID NO: 429523 - DNA, 30 bp, Artificial Sequence
  Synthetic oligonucleotide
ctcctggcgcgcatgtgagctcattaaacg

SEQ ID NO: 429524 - DNA, 30 bp, Artificial Sequence
  Synthetic oligonucleotide
tcgcccttacgtacatgtaccacttaaacg

SEQ ID NO: 429525 - DNA, 30 bp, Artificial Sequence
  Synthetic oligonucleotide
actaccttacttctttatgatgcttaaacg

SEQ ID NO: 429526 - DNA, 30 bp, Artificial Sequence
  Synthetic oligonucleotide
acatcgtgtactgtggtcgccgtttaaacg

SEQ ID NO: 429527 - DNA, 30 bp, Artificial Sequence
  Synthetic oligonucleotide
gacccggctaatcgggtgtctgaaacaacg

SEQ ID NO: 429528 - DNA, 30 bp, Artificial Sequence
  Synthetic oligonucleotide
cacctgacgtgtttgtatagcaagacaacg

SEQ ID NO: 429529 - DNA, 30 bp, Artificial Sequence
  Synthetic oligonucleotide
agcgaatttgtatctatggaggagacaacg

SEQ ID NO: 429530 - DNA, 30 bp, Artificial Sequence
  Synthetic oligonucleotide
tgcgatcccgatgggtcagtatggacaacg

SEQ ID NO: 429531 - DNA, 30 bp, Artificial Sequence
  Synthetic oligonucleotide
tggtttatataaggtaatctaattacaacg

SEQ ID NO: 429532 - DNA, 30 bp, Artificial Sequence
  Synthetic oligonucleotide
cgacctttggggccctcgctgggaccaacg

SEQ ID NO: 429533 - DNA, 30 bp, Artificial Sequence
  Synthetic oligonucleotide
ctctactctgaattacaagatagcccaacg

SEQ ID NO: 429534 - DNA, 30 bp, Artificial Sequence
  Synthetic oligonucleotide
tctgggcgaagagtcgcaaactagccaacg

SEQ ID NO: 429535 - DNA, 30 bp, Artificial Sequence
  Synthetic oligonucleotide
atcagttaccactaggacatgtggccaacg

SEQ ID NO: 429536 - DNA, 30 bp, Artificial Sequence
  Synthetic oligonucleotide
cataggttataacgggctggttggccaacg

SEQ ID NO: 429537 - DNA, 30 bp, Artificial Sequence
  Synthetic oligonucleotide
ggtaattccattcctcgcgaactgccaacg

SEQ ID NO: 429538 - DNA, 30 bp, Artificial Sequence
  Synthetic oligonucleotide
cagtaacgttgacattcgtaatatccaacg

SEQ ID NO: 429539 - DNA, 30 bp, Artificial Sequence
  Synthetic oligonucleotide
aaatcgactctacatcttaattgtccaacg

SEQ ID NO: 429540 - DNA, 30 bp, Artificial Sequence
  Synthetic oligonucleotide
aagtcgcatatgagtgagggggcagcaacg

SEQ ID NO: 429541 - DNA, 30 bp, Artificial Sequence
  Synthetic oligonucleotide
attatagcggggcggttcaggcgagcaacg

SEQ ID NO: 429542 - DNA, 30 bp, Artificial Sequence
  Synthetic oligonucleotide
gtccattcacaggtgcccgtatccgcaacg

SEQ ID NO: 429543 - DNA, 30 bp, Artificial Sequence
  Synthetic oligonucleotide
gcaccttactaggcgagcagccgcgcaacg

SEQ ID NO: 429544 - DNA, 30 bp, Artificial Sequence
  Synthetic oligonucleotide
atgcaatcgcgctttgccataacggcaacg

SEQ ID NO: 429545 - DNA, 30 bp, Artificial Sequence
  Synthetic oligonucleotide
gtccgcagatcaggcctgacctcggcaacg

SEQ ID NO: 429546 - DNA, 30 bp, Artificial Sequence
  Synthetic oligonucleotide
gttccgaatcccttagtattggatgcaacg

SEQ ID NO: 429547 - DNA, 30 bp, Artificial Sequence
  Synthetic oligonucleotide
ccggattccttcccctttatattatcaacg

SEQ ID NO: 429548 - DNA, 30 bp, Artificial Sequence
  Synthetic oligonucleotide
gcatggacaaatctagataccaactcaacg

SEQ ID NO: 429549 - DNA, 30 bp, Artificial Sequence
  Synthetic oligonucleotide
aaaccacgagagtcactagctgactcaacg

SEQ ID NO: 429550 - DNA, 30 bp, Artificial Sequence
  Synthetic oligonucleotide
cttccaggtcactgtatttgaacgtcaacg

SEQ ID NO: 429551 - DNA, 30 bp, Artificial Sequence
  Synthetic oligonucleotide
gcgcaatgcgttagcgtctcaccgtcaacg

SEQ ID NO: 429552 - DNA, 30 bp, Artificial Sequence
  Synthetic oligonucleotide
tcacgcttatcactaggacggttttcaacg

SEQ ID NO: 429553 - DNA, 30 bp, Artificial Sequence
  Synthetic oligonucleotide
cttttgggccaaaaggccccggtgagaacg

SEQ ID NO: 429554 - DNA, 30 bp, Artificial Sequence
  Synthetic oligonucleotide
tccttctactgttatgcttatgttagaacg

SEQ ID NO: 429555 - DNA, 30 bp, Artificial Sequence
  Synthetic oligonucleotide
ccgctcagcgcatgtcgatgtgaacgaacg

SEQ ID NO: 429556 - DNA, 30 bp, Artificial Sequence
  Synthetic oligonucleotide
ctacaacggatgatgccgtagatacgaacg

SEQ ID NO: 429557 - DNA, 30 bp, Artificial Sequence
  Synthetic oligonucleotide
gatatcatgtgctccccccgccaccgaacg

SEQ ID NO: 429558 - DNA, 30 bp, Artificial Sequence
  Synthetic oligonucleotide
tctcaacgcagcaaagtaccagaccgaacg

SEQ ID NO: 429559 - DNA, 30 bp, Artificial Sequence
  Synthetic oligonucleotide
tcgccgacggtttcgggctctttccgaacg

SEQ ID NO: 429560 - DNA, 30 bp, Artificial Sequence
  Synthetic oligonucleotide
ctcggtcgtcgcttatcgctagggcgaacg

SEQ ID NO: 429561 - DNA, 30 bp, Artificial Sequence
  Synthetic oligonucleotide
ctggggctgcctcgtgaaagaatgcgaacg

SEQ ID NO: 429562 - DNA, 30 bp, Artificial Sequence
  Synthetic oligonucleotide
aactattcagacgctttccatgctcgaacg

SEQ ID NO: 429563 - DNA, 29 bp, Artificial Sequence
  Synthetic oligonucleotide
ctcttggatattttaggctcgccggaacg

SEQ ID NO: 429564 - DNA, 30 bp, Artificial Sequence
  Synthetic oligonucleotide
gtcggacaacggcagtgaattttcggaacg

SEQ ID NO: 429565 - DNA, 30 bp, Artificial Sequence
  Synthetic oligonucleotide
aaggtgggtacaagggtaaagaatggaacg

SEQ ID NO: 429566 - DNA, 30 bp, Artificial Sequence
  Synthetic oligonucleotide
gtgggtgcaggcctcggcgatactggaacg

SEQ ID NO: 429567 - DNA, 30 bp, Artificial Sequence
  Synthetic oligonucleotide
gaagccgggcactctgtcgagtgtggaacg

SEQ ID NO: 429568 - DNA, 30 bp, Artificial Sequence
  Synthetic oligonucleotide
tattggataggtgtcatggcgacatgaacg

SEQ ID NO: 429569 - DNA, 30 bp, Artificial Sequence
  Synthetic oligonucleotide
agttctgacagtcaatcggggtcctgaacg

SEQ ID NO: 429570 - DNA, 30 bp, Artificial Sequence
  Synthetic oligonucleotide
gtatgttctgcatttagtttactctgaacg

SEQ ID NO: 429571 - DNA, 30 bp, Artificial Sequence
  Synthetic oligonucleotide
ctcagcgttctgagtggcgttgggtgaacg

SEQ ID NO: 429572 - DNA, 30 bp, Artificial Sequence
  Synthetic oligonucleotide
acagtgttatagtcggggataccaataacg

SEQ ID NO: 429573 - DNA, 30 bp, Artificial Sequence
  Synthetic oligonucleotide
tgcagcccggaccattagatgtgaataacg

SEQ ID NO: 429574 - DNA, 30 bp, Artificial Sequence
  Synthetic oligonucleotide
cccgcccgtgtcttggtattgaacataacg

SEQ ID NO: 429575 - DNA, 30 bp, Artificial Sequence
  Synthetic oligonucleotide
aaatcctaatacgcagttaagcacataacg

SEQ ID NO: 429576 - DNA, 30 bp, Artificial Sequence
  Synthetic oligonucleotide
tctagtctgaatcaggcggttgacataacg

SEQ ID NO: 429577 - DNA, 30 bp, Artificial Sequence
  Synthetic oligonucleotide
tatgttctaactttcatggtcagcataacg

SEQ ID NO: 429578 - DNA, 30 bp, Artificial Sequence
  Synthetic oligonucleotide
tttagaggacctcctatcgcgggcataacg

SEQ ID NO: 429579 - DNA, 30 bp, Artificial Sequence
  Synthetic oligonucleotide
taacagctccgactgagcgcgtgcataacg

SEQ ID NO: 429580 - DNA, 30 bp, Artificial Sequence
  Synthetic oligonucleotide
agccgtaccttaagttggtattgcataacg

SEQ ID NO: 429581 - DNA, 30 bp, Artificial Sequence
  Synthetic oligonucleotide
gattttagtgagttcaactcgtgtataacg

SEQ ID NO: 429582 - DNA, 30 bp, Artificial Sequence
  Synthetic oligonucleotide
caccctatatttaagctttgttgactaacg

SEQ ID NO: 429583 - DNA, 30 bp, Artificial Sequence
  Synthetic oligonucleotide
cagcacggtaaaaaagtgctaatactaacg

SEQ ID NO: 429584 - DNA, 30 bp, Artificial Sequence
  Synthetic oligonucleotide
agggtacaatccattggacgatcgctaacg

SEQ ID NO: 429585 - DNA, 30 bp, Artificial Sequence
  Synthetic oligonucleotide
gttcactaccaaggggtcattgggctaacg

SEQ ID NO: 429586 - DNA, 30 bp, Artificial Sequence
  Synthetic oligonucleotide
agctgattttaggttcaacctaatctaacg

SEQ ID NO: 429587 - DNA, 30 bp, Artificial Sequence
  Synthetic oligonucleotide
ctggactctgtccggtatctcactctaacg

SEQ ID NO: 429588 - DNA, 30 bp, Artificial Sequence
  Synthetic oligonucleotide
cactgagtctttatcctgagctgtctaacg

SEQ ID NO: 429589 - DNA, 30 bp, Artificial Sequence
  Synthetic oligonucleotide
gtaggacccgggacgaatcggatcgtaacg

SEQ ID NO: 429590 - DNA, 30 bp, Artificial Sequence
  Synthetic oligonucleotide
tagtgcgtccgcggattagcgttcgtaacg

SEQ ID NO: 429591 - DNA, 30 bp, Artificial Sequence
  Synthetic oligonucleotide
agggtcgcgcggcagtggttctcggtaacg

SEQ ID NO: 429592 - DNA, 30 bp, Artificial Sequence
  Synthetic oligonucleotide
gtatagtgcacctcgtttctgcgattaacg

SEQ ID NO: 429593 - DNA, 30 bp, Artificial Sequence
  Synthetic oligonucleotide
gattcttcaaattggaacgcaaggttaacg

SEQ ID NO: 429594 - DNA, 30 bp, Artificial Sequence
  Synthetic oligonucleotide
cagtcccaacggctccgcctgtaaaacacg

SEQ ID NO: 429595 - DNA, 30 bp, Artificial Sequence
  Synthetic oligonucleotide
gtgatgtgtgtcggtatcaaatcaaacacg

SEQ ID NO: 429596 - DNA, 30 bp, Artificial Sequence
  Synthetic oligonucleotide
atcccatactccgttgtggccggaaacacg

SEQ ID NO: 429597 - DNA, 30 bp, Artificial Sequence
  Synthetic oligonucleotide
ggctcgtcggcagaaatgaaaccgaacacg

SEQ ID NO: 429598 - DNA, 30 bp, Artificial Sequence
  Synthetic oligonucleotide
cagtatttgaattcccgacggaggaacacg

SEQ ID NO: 429599 - DNA, 30 bp, Artificial Sequence
  Synthetic oligonucleotide
attgtcacaatcttatccttactgaacacg

SEQ ID NO: 429600 - DNA, 30 bp, Artificial Sequence
  Synthetic oligonucleotide
ggatgggtccgttgtggcgaacgtaacacg

SEQ ID NO: 429601 - DNA, 30 bp, Artificial Sequence
  Synthetic oligonucleotide
tcatagaaatatgacctttagtgccacacg

SEQ ID NO: 429602 - DNA, 30 bp, Artificial Sequence
  Synthetic oligonucleotide
tctcctggacgttcgacacggctgcacacg

SEQ ID NO: 429603 - DNA, 30 bp, Artificial Sequence
  Synthetic oligonucleotide
atctcttgtagcccatgaaaggatcacacg

SEQ ID NO: 429604 - DNA, 30 bp, Artificial Sequence
  Synthetic oligonucleotide
aaatctagcgcagtgggacttggtcacacg

SEQ ID NO: 429605 - DNA, 30 bp, Artificial Sequence
  Synthetic oligonucleotide
tacccgtcctgttttaaatttttcgacacg

SEQ ID NO: 429606 - DNA, 30 bp, Artificial Sequence
  Synthetic oligonucleotide
tgatcgatttatcaatcttaaacggacacg

SEQ ID NO: 429607 - DNA, 30 bp, Artificial Sequence
  Synthetic oligonucleotide
gtgcagtaaatacgtactgtgtcggacacg

SEQ ID NO: 429608 - DNA, 30 bp, Artificial Sequence
  Synthetic oligonucleotide
ttccttctacgaagtccagaatgggacacg

SEQ ID NO: 429609 - DNA, 30 bp, Artificial Sequence
  Synthetic oligonucleotide
aatgcgctcaacagttttttgatggacacg

SEQ ID NO: 429610 - DNA, 30 bp, Artificial Sequence
  Synthetic oligonucleotide
cgttcgtgatgcggtcgtttgtctgacacg

SEQ ID NO: 429611 - DNA, 30 bp, Artificial Sequence
  Synthetic oligonucleotide
gtgtatagatgattaagcttatttgacacg

SEQ ID NO: 429612 - DNA, 30 bp, Artificial Sequence
  Synthetic oligonucleotide
ttccattccgaatatttgacttagtacacg

SEQ ID NO: 429613 - DNA, 30 bp, Artificial Sequence
  Synthetic oligonucleotide
atattctgggtattatgacgtaggtacacg

SEQ ID NO: 429614 - DNA, 30 bp, Artificial Sequence
  Synthetic oligonucleotide
gcgctttggattctttaaaatctttacacg

SEQ ID NO: 429615 - DNA, 30 bp, Artificial Sequence
  Synthetic oligonucleotide
cggggatcttagcaagtgtctcacaccacg

SEQ ID NO: 429616 - DNA, 30 bp, Artificial Sequence
  Synthetic oligonucleotide
ttaagttctatatatgtatgccccaccacg

SEQ ID NO: 429617 - DNA, 30 bp, Artificial Sequence
  Synthetic oligonucleotide
attatgcctgataggttatttttcaccacg

SEQ ID NO: 429618 - DNA, 30 bp, Artificial Sequence
  Synthetic oligonucleotide
gcagcccctgtaatatcctgtgcgaccacg

SEQ ID NO: 429619 - DNA, 30 bp, Artificial Sequence
  Synthetic oligonucleotide
gatggcagacacggtattcgcaggaccacg

SEQ ID NO: 429620 - DNA, 30 bp, Artificial Sequence
  Synthetic oligonucleotide
cggatgttaaggcccgcagttgggaccacg

SEQ ID NO: 429621 - DNA, 30 bp, Artificial Sequence
  Synthetic oligonucleotide
aactacagggagtacgaggcaattaccacg

SEQ ID NO: 429622 - DNA, 30 bp, Artificial Sequence
  Synthetic oligonucleotide
cggtaacggggacgaccattgtcccccacg

SEQ ID NO: 429623 - DNA, 30 bp, Artificial Sequence
  Synthetic oligonucleotide
ccccatacttctagcgtatacacgcccacg

SEQ ID NO: 429624 - DNA, 30 bp, Artificial Sequence
  Synthetic oligonucleotide
atcatttaatctggagaggaaggtcccacg

SEQ ID NO: 429625 - DNA, 30 bp, Artificial Sequence
  Synthetic oligonucleotide
tgtgtgagactatctgcgtgttcagccacg

SEQ ID NO: 429626 - DNA, 30 bp, Artificial Sequence
  Synthetic oligonucleotide
ggctgccgatcgtagagattagacgccacg

SEQ ID NO: 429627 - DNA, 30 bp, Artificial Sequence
  Synthetic oligonucleotide
atttattggagtggaacttcacgggccacg

SEQ ID NO: 429628 - DNA, 30 bp, Artificial Sequence
  Synthetic oligonucleotide
tatccttttaacgcaagtgtatgggccacg

SEQ ID NO: 429629 - DNA, 30 bp, Artificial Sequence
  Synthetic oligonucleotide
gccttagtcttacccgcggctatggccacg

SEQ ID NO: 429630 - DNA, 30 bp, Artificial Sequence
  Synthetic oligonucleotide
cagcgcactgtcgggggtgcttgtgccacg

SEQ ID NO: 429631 - DNA, 30 bp, Artificial Sequence
  Synthetic oligonucleotide
attgtcactatgaaatctacccttgccacg

SEQ ID NO: 429632 - DNA, 30 bp, Artificial Sequence
  Synthetic oligonucleotide
catctgatcacaacgcgtgatagatccacg

SEQ ID NO: 429633 - DNA, 30 bp, Artificial Sequence
  Synthetic oligonucleotide
aggcacgacagtcgcttcttaccgtccacg

SEQ ID NO: 429634 - DNA, 30 bp, Artificial Sequence
  Synthetic oligonucleotide
taaagttaaaggctgcaaagggggtccacg

SEQ ID NO: 429635 - DNA, 30 bp, Artificial Sequence
  Synthetic oligonucleotide
tgaggctaaccacggagcactccaagcacg

SEQ ID NO: 429636 - DNA, 30 bp, Artificial Sequence
  Synthetic oligonucleotide
gaccgatcacgtgtgcccacgcgaagcacg

SEQ ID NO: 429637 - DNA, 30 bp, Artificial Sequence
  Synthetic oligonucleotide
caggttgaagagtcatgagcacgcagcacg

SEQ ID NO: 429638 - DNA, 30 bp, Artificial Sequence
  Synthetic oligonucleotide
gaaatacaccagggtccaatggtcagcacg

SEQ ID NO: 429639 - DNA, 30 bp, Artificial Sequence
  Synthetic oligonucleotide
aatctgtcctggtcacgagaagcgagcacg

SEQ ID NO: 429640 - DNA, 30 bp, Artificial Sequence
  Synthetic oligonucleotide
gatatctggcaggcctgtgcccggagcacg

SEQ ID NO: 429641 - DNA, 30 bp, Artificial Sequence
  Synthetic oligonucleotide
attccaaatatgaatcgcgatggtagcacg

SEQ ID NO: 429642 - DNA, 30 bp, Artificial Sequence
  Synthetic oligonucleotide
ttaacgacgaggttgagtataggacgcacg

SEQ ID NO: 429643 - DNA, 30 bp, Artificial Sequence
  Synthetic oligonucleotide
gtgaaacgatgcagtaagcgcaaccgcacg

SEQ ID NO: 429644 - DNA, 30 bp, Artificial Sequence
  Synthetic oligonucleotide
tagcaagacgcgaatgcaacgaaccgcacg

SEQ ID NO: 429645 - DNA, 30 bp, Artificial Sequence
  Synthetic oligonucleotide
gctacatacgcggtactaagccaccgcacg

SEQ ID NO: 429646 - DNA, 30 bp, Artificial Sequence
  Synthetic oligonucleotide
ttacacatacatagcattgactatcgcacg

SEQ ID NO: 429647 - DNA, 30 bp, Artificial Sequence
  Synthetic oligonucleotide
ccgacgtatgcggtcattaatactcgcacg

SEQ ID NO: 429648 - DNA, 30 bp, Artificial Sequence
  Synthetic oligonucleotide
aatcagtaaaatcagctatccagtcgcacg

SEQ ID NO: 429649 - DNA, 30 bp, Artificial Sequence
  Synthetic oligonucleotide
tatgcgtgacaccggtccgggtttcgcacg

SEQ ID NO: 429650 - DNA, 30 bp, Artificial Sequence
  Synthetic oligonucleotide
tgtacgcacggtcagtattaaacaggcacg

SEQ ID NO: 429651 - DNA, 30 bp, Artificial Sequence
  Synthetic oligonucleotide
attggtgggatggcgagagcatcaggcacg

SEQ ID NO: 429652 - DNA, 30 bp, Artificial Sequence
  Synthetic oligonucleotide
ctttttagatgtagatactggttaggcacg

SEQ ID NO: 429653 - DNA, 30 bp, Artificial Sequence
  Synthetic oligonucleotide
tataaaagccttctacgagaagcgggcacg

SEQ ID NO: 429654 - DNA, 30 bp, Artificial Sequence
  Synthetic oligonucleotide
ctattccattatcctttaagatggggcacg

SEQ ID NO: 429655 - DNA, 30 bp, Artificial Sequence
  Synthetic oligonucleotide
gatttggtcagaactgcgcttcactgcacg

SEQ ID NO: 429656 - DNA, 30 bp, Artificial Sequence
  Synthetic oligonucleotide
tgtacgagcagttaaccccttaagtgcacg

SEQ ID NO: 429657 - DNA, 30 bp, Artificial Sequence
  Synthetic oligonucleotide
tgtcaactaacgcgtacagccttttgcacg

SEQ ID NO: 429658 - DNA, 30 bp, Artificial Sequence
  Synthetic oligonucleotide
agcaacagacaggatgcaaatagcatcacg

SEQ ID NO: 429659 - DNA, 30 bp, Artificial Sequence
  Synthetic oligonucleotide
acgcgacgtttttcgaaatccgagatcacg

SEQ ID NO: 429660 - DNA, 30 bp, Artificial Sequence
  Synthetic oligonucleotide
cacacgccgggagctgatcatgagatcacg

SEQ ID NO: 429661 - DNA, 30 bp, Artificial Sequence
  Synthetic oligonucleotide
atatctttggacgctattgtcgctatcacg

SEQ ID NO: 429662 - DNA, 30 bp, Artificial Sequence
  Synthetic oligonucleotide
tgatgaacgtggcacacagcaggtatcacg

SEQ ID NO: 429663 - DNA, 30 bp, Artificial Sequence
  Synthetic oligonucleotide
attcggtttacttgactaactattatcacg

SEQ ID NO: 429664 - DNA, 30 bp, Artificial Sequence
  Synthetic oligonucleotide
tatggatggacactgagaggtgttatcacg

SEQ ID NO: 429665 - DNA, 30 bp, Artificial Sequence
  Synthetic oligonucleotide
gtccccggtggtggttataagtaactcacg

SEQ ID NO: 429666 - DNA, 30 bp, Artificial Sequence
  Synthetic oligonucleotide
cctatctagtcaaactgagattaactcacg

SEQ ID NO: 429667 - DNA, 30 bp, Artificial Sequence
  Synthetic oligonucleotide
atacggtggattatagctacaggcctcacg

SEQ ID NO: 429668 - DNA, 30 bp, Artificial Sequence
  Synthetic oligonucleotide
ttgcacactgggataagccctctcctcacg

SEQ ID NO: 429669 - DNA, 30 bp, Artificial Sequence
  Synthetic oligonucleotide
cccaagtgtgcacttttggcgtagctcacg

SEQ ID NO: 429670 - DNA, 30 bp, Artificial Sequence
  Synthetic oligonucleotide
aacctgaagtgattatcgggtaatctcacg

SEQ ID NO: 429671 - DNA, 30 bp, Artificial Sequence
  Synthetic oligonucleotide
ataccgacgcttgcaaccgagaatgtcacg

SEQ ID NO: 429672 - DNA, 29 bp, Artificial Sequence
  Synthetic oligonucleotide
aatcgattgtggctggaaagtgtgtcacg

SEQ ID NO: 429673 - DNA, 30 bp, Artificial Sequence
  Synthetic oligonucleotide
tccgggtgagttctggcagctcaattcacg

SEQ ID NO: 429674 - DNA, 30 bp, Artificial Sequence
  Synthetic oligonucleotide
aaatcttggagagaaagtgccatcttcacg

SEQ ID NO: 429675 - DNA, 30 bp, Artificial Sequence
  Synthetic oligonucleotide
aatatgtttgaaatacctttagcgttcacg

SEQ ID NO: 429676 - DNA, 30 bp, Artificial Sequence
  Synthetic oligonucleotide
gtgccgcaactttatgcgatacctttcacg

SEQ ID NO: 429677 - DNA, 30 bp, Artificial Sequence
  Synthetic oligonucleotide
tgggatcagctgtcagctcaggttttcacg

SEQ ID NO: 429678 - DNA, 30 bp, Artificial Sequence
  Synthetic oligonucleotide
cttcgttttggcagtggcgactttttcacg

SEQ ID NO: 429679 - DNA, 30 bp, Artificial Sequence
  Synthetic oligonucleotide
cccctcaggggaggcgagacctaaaagacg

SEQ ID NO: 429680 - DNA, 30 bp, Artificial Sequence
  Synthetic oligonucleotide
accgtagccggctgctcagggacaaagacg

SEQ ID NO: 429681 - DNA, 30 bp, Artificial Sequence
  Synthetic oligonucleotide
gaatttgtgcatcagaggttcggaaagacg

SEQ ID NO: 429682 - DNA, 30 bp, Artificial Sequence
  Synthetic oligonucleotide
cggcagacgttcggactgttccacaagacg

SEQ ID NO: 429683 - DNA, 30 bp, Artificial Sequence
  Synthetic oligonucleotide
cccgcatcacgtggggtcctatacaagacg

SEQ ID NO: 429684 - DNA, 30 bp, Artificial Sequence
  Synthetic oligonucleotide
cggtgcttcgaggggaggtcatagaagacg

SEQ ID NO: 429685 - DNA, 30 bp, Artificial Sequence
  Synthetic oligonucleotide
tttagtatagggctgtacctaagacagacg

SEQ ID NO: 429686 - DNA, 30 bp, Artificial Sequence
  Synthetic oligonucleotide
ttcggacaccaccgccagattttccagacg

SEQ ID NO: 429687 - DNA, 30 bp, Artificial Sequence
  Synthetic oligonucleotide
tctgagtcggttctcgtgttttagcagacg

SEQ ID NO: 429688 - DNA, 30 bp, Artificial Sequence
  Synthetic oligonucleotide
agcgcctttggacgttttttgttgcagacg

SEQ ID NO: 429689 - DNA, 30 bp, Artificial Sequence
  Synthetic oligonucleotide
tacctgtgcagggccaagcccagtcagacg

SEQ ID NO: 429690 - DNA, 30 bp, Artificial Sequence
  Synthetic oligonucleotide
gggagaaagcccctttccttcaaagagacg

SEQ ID NO: 429691 - DNA, 30 bp, Artificial Sequence
  Synthetic oligonucleotide
gacttgtatgatgttagtgggaaggagacg

SEQ ID NO: 429692 - DNA, 30 bp, Artificial Sequence
  Synthetic oligonucleotide
ggtaggccacaacgctgatgtcaggagacg

SEQ ID NO: 429693 - DNA, 30 bp, Artificial Sequence
  Synthetic oligonucleotide
atatgtttagaccatatttacatggagacg

SEQ ID NO: 429694 - DNA, 30 bp, Artificial Sequence
  Synthetic oligonucleotide
cttaggggtttgccacattgtcatgagacg

SEQ ID NO: 429695 - DNA, 30 bp, Artificial Sequence
  Synthetic oligonucleotide
cacgggctctttctggcaggctgtgagacg

SEQ ID NO: 429696 - DNA, 30 bp, Artificial Sequence
  Synthetic oligonucleotide
atatccttcgttttagacggaagatagacg

SEQ ID NO: 429697 - DNA, 30 bp, Artificial Sequence
  Synthetic oligonucleotide
ctccggtttagcggcgttcctcgatagacg

SEQ ID NO: 429698 - DNA, 30 bp, Artificial Sequence
  Synthetic oligonucleotide
ttcacttctttgcaaaataactcctagacg

SEQ ID NO: 429699 - DNA, 30 bp, Artificial Sequence
  Synthetic oligonucleotide
ggggtagattaataagagctttcctagacg

SEQ ID NO: 429700 - DNA, 30 bp, Artificial Sequence
  Synthetic oligonucleotide
cacgtagtctgtcattgttgctggacgacg

SEQ ID NO: 429701 - DNA, 30 bp, Artificial Sequence
  Synthetic oligonucleotide
tggtaaacctatattggtttgtggacgacg

SEQ ID NO: 429702 - DNA, 30 bp, Artificial Sequence
  Synthetic oligonucleotide
acattctcaggagtaatcctcttgacgacg

SEQ ID NO: 429703 - DNA, 31 bp, Artificial Sequence
  Synthetic oligonucleotide
ggatgcggcaccgtacgacaggttgacgacg

SEQ ID NO: 429704 - DNA, 30 bp, Artificial Sequence
  Synthetic oligonucleotide
aaccaggatgggggagctgcgcctacgacg

SEQ ID NO: 429705 - DNA, 30 bp, Artificial Sequence
  Synthetic oligonucleotide
acgctgtgtacaacggacggtcctacgacg

SEQ ID NO: 429706 - DNA, 30 bp, Artificial Sequence
  Synthetic oligonucleotide
tcttagaaacgctcttcatactaaccgacg

SEQ ID NO: 429707 - DNA, 30 bp, Artificial Sequence
  Synthetic oligonucleotide
ctacaaaacatcgagtatggttcaccgacg

SEQ ID NO: 429708 - DNA, 30 bp, Artificial Sequence
  Synthetic oligonucleotide
atctagtggaacctgtatgttctcccgacg

SEQ ID NO: 429709 - DNA, 30 bp, Artificial Sequence
  Synthetic oligonucleotide
cggagaacggagtttatagcctggccgacg

SEQ ID NO: 429710 - DNA, 30 bp, Artificial Sequence
  Synthetic oligonucleotide
cggcagctacttagttgcctagatccgacg

SEQ ID NO: 429711 - DNA, 30 bp, Artificial Sequence
  Synthetic oligonucleotide
gaaaattagtggcacatcacctatccgacg

SEQ ID NO: 429712 - DNA, 30 bp, Artificial Sequence
  Synthetic oligonucleotide
gaagaccttgttaaatagctgtttccgacg

SEQ ID NO: 429713 - DNA, 30 bp, Artificial Sequence
  Synthetic oligonucleotide
cacaacattccgaccacgaggaaagcgacg

SEQ ID NO: 429714 - DNA, 30 bp, Artificial Sequence
  Synthetic oligonucleotide
caaggacacggaccatttatacaagcgacg

SEQ ID NO: 429715 - DNA, 30 bp, Artificial Sequence
  Synthetic oligonucleotide
atagcatctgcgccggtgatggaagcgacg

SEQ ID NO: 429716 - DNA, 30 bp, Artificial Sequence
  Synthetic oligonucleotide
ccggccgtactccatactcctcgagcgacg

SEQ ID NO: 429717 - DNA, 30 bp, Artificial Sequence
  Synthetic oligonucleotide
tacgggaatactgctcgcaatggagcgacg

SEQ ID NO: 429718 - DNA, 30 bp, Artificial Sequence
  Synthetic oligonucleotide
ttaatggttatgtggaacagtcacgcgacg

SEQ ID NO: 429719 - DNA, 30 bp, Artificial Sequence
  Synthetic oligonucleotide
ttgtataaggaattccattaatatgcgacg

SEQ ID NO: 429720 - DNA, 30 bp, Artificial Sequence
  Synthetic oligonucleotide
taaggggtggtcaatttgattctgtcgacg

SEQ ID NO: 429721 - DNA, 30 bp, Artificial Sequence
  Synthetic oligonucleotide
aataccggattgtcctggtcacgttcgacg

SEQ ID NO: 429722 - DNA, 30 bp, Artificial Sequence
  Synthetic oligonucleotide
gtattaggggaaaatgtcaatttttcgacg

SEQ ID NO: 429723 - DNA, 30 bp, Artificial Sequence
  Synthetic oligonucleotide
actccgagtcatccagcgtggaaaaggacg

SEQ ID NO: 429724 - DNA, 30 bp, Artificial Sequence
  Synthetic oligonucleotide
agagttcgttttccaagcccaggaaggacg

SEQ ID NO: 429725 - DNA, 30 bp, Artificial Sequence
  Synthetic oligonucleotide
ttaacaaaatttagattcgaaagcaggacg

SEQ ID NO: 429726 - DNA, 30 bp, Artificial Sequence
  Synthetic oligonucleotide
cggagcgcaggtggggcgggtagcaggacg

SEQ ID NO: 429727 - DNA, 30 bp, Artificial Sequence
  Synthetic oligonucleotide
gtccaatctaaatagccgggatcgaggacg

SEQ ID NO: 429728 - DNA, 30 bp, Artificial Sequence
  Synthetic oligonucleotide
atatggagttcacctccgttgaataggacg

SEQ ID NO: 429729 - DNA, 30 bp, Artificial Sequence
  Synthetic oligonucleotide
aaacactacatctgctttcatcgtaggacg

SEQ ID NO: 429730 - DNA, 30 bp, Artificial Sequence
  Synthetic oligonucleotide
atactcgatccaatgcatctttttaggacg

SEQ ID NO: 429731 - DNA, 30 bp, Artificial Sequence
  Synthetic oligonucleotide
agtcagtccgcggaaataatgccacggacg

SEQ ID NO: 429732 - DNA, 30 bp, Artificial Sequence
  Synthetic oligonucleotide
tgaagtttagaagttccaatgctacggacg

SEQ ID NO: 429733 - DNA, 30 bp, Artificial Sequence
  Synthetic oligonucleotide
gttttaaagaaccagttgagtggccggacg

SEQ ID NO: 429734 - DNA, 30 bp, Artificial Sequence
  Synthetic oligonucleotide
acctgtctagggccgctgcagttccggacg

SEQ ID NO: 429735 - DNA, 30 bp, Artificial Sequence
  Synthetic oligonucleotide
aagaatattacacataaagggcaagggacg

SEQ ID NO: 429736 - DNA, 30 bp, Artificial Sequence
  Synthetic oligonucleotide
gtatgcgacctatgggtttgggaagggacg

SEQ ID NO: 429737 - DNA, 30 bp, Artificial Sequence
  Synthetic oligonucleotide
agcacgtgggtaatgtctatctgagggacg

SEQ ID NO: 429738 - DNA, 30 bp, Artificial Sequence
  Synthetic oligonucleotide
atgctaagtgttttgcgtcagtgagggacg

SEQ ID NO: 429739 - DNA, 30 bp, Artificial Sequence
  Synthetic oligonucleotide
gccctgcatacactgaatgatatagggacg

SEQ ID NO: 429740 - DNA, 30 bp, Artificial Sequence
  Synthetic oligonucleotide
attttagaccgcagggcgatggtagggacg

SEQ ID NO: 429741 - DNA, 30 bp, Artificial Sequence
  Synthetic oligonucleotide
tgggcgcggggttctaaccggcccgggacg

SEQ ID NO: 429742 - DNA, 30 bp, Artificial Sequence
  Synthetic oligonucleotide
gccagggctgtagggtgagtgggcgggacg

SEQ ID NO: 429743 - DNA, 30 bp, Artificial Sequence
  Synthetic oligonucleotide
taggacttgtgtgctatgaacacggggacg

SEQ ID NO: 429744 - DNA, 30 bp, Artificial Sequence
  Synthetic oligonucleotide
ctaagacgggatgtgccaagaggggggacg

SEQ ID NO: 429745 - DNA, 30 bp, Artificial Sequence
  Synthetic oligonucleotide
attttagttccgtactcacggatggggacg

SEQ ID NO: 429746 - DNA, 30 bp, Artificial Sequence
  Synthetic oligonucleotide
accctcatgagggaggacagtctggggacg

SEQ ID NO: 429747 - DNA, 30 bp, Artificial Sequence
  Synthetic oligonucleotide
tatacaataggcgggttgtggtttgggacg

SEQ ID NO: 429748 - DNA, 30 bp, Artificial Sequence
  Synthetic oligonucleotide
tgtatgaacccctgcggatgtcgatggacg

SEQ ID NO: 429749 - DNA, 30 bp, Artificial Sequence
  Synthetic oligonucleotide
taaccgtttgtaggtacgcttgactggacg

SEQ ID NO: 429750 - DNA, 30 bp, Artificial Sequence
  Synthetic oligonucleotide
gaaaatagcagtcgacctaaccgctggacg

SEQ ID NO: 429751 - DNA, 30 bp, Artificial Sequence
  Synthetic oligonucleotide
tagattccagacaaagctgaattctggacg

SEQ ID NO: 429752 - DNA, 30 bp, Artificial Sequence
  Synthetic oligonucleotide
gttaggaaggaccccgtagctgtgtggacg

SEQ ID NO: 429753 - DNA, 30 bp, Artificial Sequence
  Synthetic oligonucleotide
ctatcgctcagcacactcaggtattggacg

SEQ ID NO: 429754 - DNA, 30 bp, Artificial Sequence
  Synthetic oligonucleotide
cagcataacgtcatctacatcgccatgacg

SEQ ID NO: 429755 - DNA, 30 bp, Artificial Sequence
  Synthetic oligonucleotide
acaactggtccatatattcgcttcatgacg

SEQ ID NO: 429756 - DNA, 30 bp, Artificial Sequence
  Synthetic oligonucleotide
ggcgtttgcaacgcggccggaatgatgacg

SEQ ID NO: 429757 - DNA, 30 bp, Artificial Sequence
  Synthetic oligonucleotide
cgcggttctcatctctggaataatatgacg

SEQ ID NO: 429758 - DNA, 30 bp, Artificial Sequence
  Synthetic oligonucleotide
gcacgaaatccgtctcactgatctatgacg

SEQ ID NO: 429759 - DNA, 30 bp, Artificial Sequence
  Synthetic oligonucleotide
gcaccacgggattcactttaatttatgacg

SEQ ID NO: 429760 - DNA, 30 bp, Artificial Sequence
  Synthetic oligonucleotide
atctagtgataatagcaactacacctgacg

SEQ ID NO: 429761 - DNA, 30 bp, Artificial Sequence
  Synthetic oligonucleotide
caagtattaaggaatggtatcttcctgacg

SEQ ID NO: 429762 - DNA, 30 bp, Artificial Sequence
  Synthetic oligonucleotide
cggccttatacctaagacaagtcgctgacg

SEQ ID NO: 429763 - DNA, 30 bp, Artificial Sequence
  Synthetic oligonucleotide
tctccgatatctaaaggatatattctgacg

SEQ ID NO: 429764 - DNA, 30 bp, Artificial Sequence
  Synthetic oligonucleotide
ctacttcacgcggacgttggtattctgacg

SEQ ID NO: 429765 - DNA, 30 bp, Artificial Sequence
  Synthetic oligonucleotide
gctggccgggtctgacgtagatttctgacg

SEQ ID NO: 429766 - DNA, 30 bp, Artificial Sequence
  Synthetic oligonucleotide
aagacttagggggcattccgctttctgacg

SEQ ID NO: 429767 - DNA, 30 bp, Artificial Sequence
  Synthetic oligonucleotide
cgagagtatttggttatctattttctgacg

SEQ ID NO: 429768 - DNA, 30 bp, Artificial Sequence
  Synthetic oligonucleotide
gtcccgagtggaccgtcgtaaatagtgacg

SEQ ID NO: 429769 - DNA, 30 bp, Artificial Sequence
  Synthetic oligonucleotide
gtgggaaatcgaaataactgggtagtgacg

SEQ ID NO: 429770 - DNA, 30 bp, Artificial Sequence
  Synthetic oligonucleotide
tgatccaaggtcatctgaacactggtgacg

SEQ ID NO: 429771 - DNA, 30 bp, Artificial Sequence
  Synthetic oligonucleotide
cgaacgtctggcaacacgtgtcatgtgacg

SEQ ID NO: 429772 - DNA, 30 bp, Artificial Sequence
  Synthetic oligonucleotide
gtatgtgtagattgatgccgcgaattgacg

SEQ ID NO: 429773 - DNA, 30 bp, Artificial Sequence
  Synthetic oligonucleotide
ctactgaacagaccagtagctctattgacg

SEQ ID NO: 429774 - DNA, 30 bp, Artificial Sequence
  Synthetic oligonucleotide
aaatctctattgtgggtagctctattgacg

SEQ ID NO: 429775 - DNA, 30 bp, Artificial Sequence
  Synthetic oligonucleotide
gattccgcgggctggcgaagacacttgacg

SEQ ID NO: 429776 - DNA, 30 bp, Artificial Sequence
  Synthetic oligonucleotide
cagctctatgcgggggttgggtgcttgacg

SEQ ID NO: 429777 - DNA, 30 bp, Artificial Sequence
  Synthetic oligonucleotide
cggtattgcataaatgggtttgtcttgacg

SEQ ID NO: 429778 - DNA, 30 bp, Artificial Sequence
  Synthetic oligonucleotide
atatggaaaacggtggaaaatccgttgacg

SEQ ID NO: 429779 - DNA, 30 bp, Artificial Sequence
  Synthetic oligonucleotide
accgactcgctatacgcaagaatgttgacg

SEQ ID NO: 429780 - DNA, 30 bp, Artificial Sequence
  Synthetic oligonucleotide
cgctggtcaccacacaggtcgatgttgacg

SEQ ID NO: 429781 - DNA, 30 bp, Artificial Sequence
  Synthetic oligonucleotide
aaatagagcaagtgaggacaagttttgacg

SEQ ID NO: 429782 - DNA, 30 bp, Artificial Sequence
  Synthetic oligonucleotide
ccgagggttatgatgccaagtataaatacg

SEQ ID NO: 429783 - DNA, 30 bp, Artificial Sequence
  Synthetic oligonucleotide
aggagccgacatctgtctggctccaatacg

SEQ ID NO: 429784 - DNA, 30 bp, Artificial Sequence
  Synthetic oligonucleotide
aatttgctcagggttagattagataatacg

SEQ ID NO: 429785 - DNA, 30 bp, Artificial Sequence
  Synthetic oligonucleotide
gttcctaggttataagcctgtaaacatacg

SEQ ID NO: 429786 - DNA, 30 bp, Artificial Sequence
  Synthetic oligonucleotide
cgggcgcggtagtgttacggaacacatacg

SEQ ID NO: 429787 - DNA, 30 bp, Artificial Sequence
  Synthetic oligonucleotide
attcagtggaccattaccgttccacatacg

SEQ ID NO: 429788 - DNA, 30 bp, Artificial Sequence
  Synthetic oligonucleotide
gacgcgatgccgtttgaccgaggccatacg

SEQ ID NO: 429789 - DNA, 30 bp, Artificial Sequence
  Synthetic oligonucleotide
ggacattctttagcgcacgccacgcatacg

SEQ ID NO: 429790 - DNA, 30 bp, Artificial Sequence
  Synthetic oligonucleotide
ttatgtaaatttatcgatatagctcatacg

SEQ ID NO: 429791 - DNA, 30 bp, Artificial Sequence
  Synthetic oligonucleotide
agtatgtaggtatggacataggctcatacg

SEQ ID NO: 429792 - DNA, 30 bp, Artificial Sequence
  Synthetic oligonucleotide
aaaacacgaagttgtattgctattcatacg

SEQ ID NO: 429793 - DNA, 30 bp, Artificial Sequence
  Synthetic oligonucleotide
ggtcaaagtttcatgataaacacagatacg

SEQ ID NO: 429794 - DNA, 30 bp, Artificial Sequence
  Synthetic oligonucleotide
gttaatggtataagcttcgggccagatacg

SEQ ID NO: 429795 - DNA, 30 bp, Artificial Sequence
  Synthetic oligonucleotide
agttgtttgataacccgctcagcagatacg

SEQ ID NO: 429796 - DNA, 30 bp, Artificial Sequence
  Synthetic oligonucleotide
agatttctgtcctagtttagaagagatacg

SEQ ID NO: 429797 - DNA, 30 bp, Artificial Sequence
  Synthetic oligonucleotide
aatgacatgaagagacctggggaggatacg

SEQ ID NO: 429798 - DNA, 30 bp, Artificial Sequence
  Synthetic oligonucleotide
gacctaagcaacggcgcgcgtagggatacg

SEQ ID NO: 429799 - DNA, 30 bp, Artificial Sequence
  Synthetic oligonucleotide
ggttcacgataccagcatcagtgggatacg

SEQ ID NO: 429800 - DNA, 30 bp, Artificial Sequence
  Synthetic oligonucleotide
gtgaataggacatgagcgctattggatacg

SEQ ID NO: 429801 - DNA, 30 bp, Artificial Sequence
  Synthetic oligonucleotide
gtctagccacgtatcctgtgcgctgatacg

SEQ ID NO: 429802 - DNA, 30 bp, Artificial Sequence
  Synthetic oligonucleotide
gccattccgttccctccttggattgatacg

SEQ ID NO: 429803 - DNA, 30 bp, Artificial Sequence
  Synthetic oligonucleotide
caggaatttaacattccctggccatatacg

SEQ ID NO: 429804 - DNA, 30 bp, Artificial Sequence
  Synthetic oligonucleotide
tactgacgccgacacactgtgccgtatacg

SEQ ID NO: 429805 - DNA, 31 bp, Artificial Sequence
  Synthetic oligonucleotide
tggttacattggcccgcacttgctttatacg

SEQ ID NO: 429806 - DNA, 30 bp, Artificial Sequence
  Synthetic oligonucleotide
aaccgttcagccttgacaggtggcactacg

SEQ ID NO: 429807 - DNA, 30 bp, Artificial Sequence
  Synthetic oligonucleotide
agtctttgtgattcactaggcttcactacg

SEQ ID NO: 429808 - DNA, 30 bp, Artificial Sequence
  Synthetic oligonucleotide
cctctcagatgcatccgcaaatagactacg

SEQ ID NO: 429809 - DNA, 30 bp, Artificial Sequence
  Synthetic oligonucleotide
tcactctttcaccgctgaccggggactacg

SEQ ID NO: 429810 - DNA, 30 bp, Artificial Sequence
  Synthetic oligonucleotide
tcttttgggttgcacttcaagccacctacg

SEQ ID NO: 429811 - DNA, 30 bp, Artificial Sequence
  Synthetic oligonucleotide
ttccggcttggcgccaaacccgtacctacg

SEQ ID NO: 429812 - DNA, 30 bp, Artificial Sequence
  Synthetic oligonucleotide
ggtaggctacgtagtaattacgggcctacg

SEQ ID NO: 429813 - DNA, 30 bp, Artificial Sequence
  Synthetic oligonucleotide
tccttactccgtcttgtaagttatcctacg

SEQ ID NO: 429814 - DNA, 30 bp, Artificial Sequence
  Synthetic oligonucleotide
acaggtgaataggtatttttatctcctacg

SEQ ID NO: 429815 - DNA, 30 bp, Artificial Sequence
  Synthetic oligonucleotide
atttccggtcggtcgctccaatgagctacg

SEQ ID NO: 429816 - DNA, 30 bp, Artificial Sequence
  Synthetic oligonucleotide
ggatagtaatttacttatctttacgctacg

SEQ ID NO: 429817 - DNA, 30 bp, Artificial Sequence
  Synthetic oligonucleotide
agcggaacaggcgttccagagcctgctacg

SEQ ID NO: 429818 - DNA, 30 bp, Artificial Sequence
  Synthetic oligonucleotide
cgatcgaacataataagccgcagtgctacg

SEQ ID NO: 429819 - DNA, 30 bp, Artificial Sequence
  Synthetic oligonucleotide
ctaaggcaccgatatggtttataatctacg

SEQ ID NO: 429820 - DNA, 30 bp, Artificial Sequence
  Synthetic oligonucleotide
gataacgatcacgttagtatgcgatctacg

SEQ ID NO: 429821 - DNA, 30 bp, Artificial Sequence
  Synthetic oligonucleotide
ggtcggcatcgtaacggaaaatgctctacg

SEQ ID NO: 429822 - DNA, 30 bp, Artificial Sequence
  Synthetic oligonucleotide
gactctcgaatccaggggctacagtctacg

SEQ ID NO: 429823 - DNA, 30 bp, Artificial Sequence
  Synthetic oligonucleotide
gtctaactaataggagtatagtcgtctacg

SEQ ID NO: 429824 - DNA, 30 bp, Artificial Sequence
  Synthetic oligonucleotide
ctatatcataaattcgtcaaatattctacg

SEQ ID NO: 429825 - DNA, 30 bp, Artificial Sequence
  Synthetic oligonucleotide
agcgcttgctcgtaccactagagcagtacg

SEQ ID NO: 429826 - DNA, 30 bp, Artificial Sequence
  Synthetic oligonucleotide
gaaacggtattgctggtgtcttgcagtacg

SEQ ID NO: 429827 - DNA, 30 bp, Artificial Sequence
  Synthetic oligonucleotide
aagacaatcctgggtgtcacggtcagtacg

SEQ ID NO: 429828 - DNA, 30 bp, Artificial Sequence
  Synthetic oligonucleotide
tttttcctagcgagggtgtaccgacgtacg

SEQ ID NO: 429829 - DNA, 30 bp, Artificial Sequence
  Synthetic oligonucleotide
acagaaatatgctcctcgcttccccgtacg

SEQ ID NO: 429830 - DNA, 30 bp, Artificial Sequence
  Synthetic oligonucleotide
tcgcgacggttcatgacgcagatgcgtacg

SEQ ID NO: 429831 - DNA, 30 bp, Artificial Sequence
  Synthetic oligonucleotide
gcatacgagtcacagttgtgttatcgtacg

SEQ ID NO: 429832 - DNA, 30 bp, Artificial Sequence
  Synthetic oligonucleotide
acttgagtatttttcatagatatcggtacg

SEQ ID NO: 429833 - DNA, 30 bp, Artificial Sequence
  Synthetic oligonucleotide
gcctgctctaaaactacgggccgtggtacg

SEQ ID NO: 429834 - DNA, 30 bp, Artificial Sequence
  Synthetic oligonucleotide
ttatatttaagggtcacttcagcatgtacg

SEQ ID NO: 429835 - DNA, 30 bp, Artificial Sequence
  Synthetic oligonucleotide
tatcatatagccagcaggtacatatgtacg

SEQ ID NO: 429836 - DNA, 30 bp, Artificial Sequence
  Synthetic oligonucleotide
cgaatgtataaaattcctgaacgctgtacg

SEQ ID NO: 429837 - DNA, 30 bp, Artificial Sequence
  Synthetic oligonucleotide
tttcggatggcttaaatgcccctctgtacg

SEQ ID NO: 429838 - DNA, 30 bp, Artificial Sequence
  Synthetic oligonucleotide
ataacatttatcagcgggtatgcgtgtacg

SEQ ID NO: 429839 - DNA, 30 bp, Artificial Sequence
  Synthetic oligonucleotide
gttagcttcaccctgacgaagttgtgtacg

SEQ ID NO: 429840 - DNA, 30 bp, Artificial Sequence
  Synthetic oligonucleotide
cgggacttttttggctggaatatttgtacg

SEQ ID NO: 429841 - DNA, 30 bp, Artificial Sequence
  Synthetic oligonucleotide
ggcattacgttactttacttcacaattacg

SEQ ID NO: 429842 - DNA, 30 bp, Artificial Sequence
  Synthetic oligonucleotide
attgtgagtgttgtagacaagtcaattacg

SEQ ID NO: 429843 - DNA, 30 bp, Artificial Sequence
  Synthetic oligonucleotide
tcgagactgcagctgctttctggcattacg

SEQ ID NO: 429844 - DNA, 30 bp, Artificial Sequence
  Synthetic oligonucleotide
taaaagggtttgatccctacgtatattacg

SEQ ID NO: 429845 - DNA, 30 bp, Artificial Sequence
  Synthetic oligonucleotide
aaatcacgtcacatacaccagtgtattacg

SEQ ID NO: 429846 - DNA, 30 bp, Artificial Sequence
  Synthetic oligonucleotide
ttttgatgttgtggtggcctttttattacg

SEQ ID NO: 429847 - DNA, 30 bp, Artificial Sequence
  Synthetic oligonucleotide
aatccattatgcacggtgagagtccttacg

SEQ ID NO: 429848 - DNA, 30 bp, Artificial Sequence
  Synthetic oligonucleotide
gttagaaggaaggcaccgcctgagcttacg

SEQ ID NO: 429849 - DNA, 30 bp, Artificial Sequence
  Synthetic oligonucleotide
aattgtttgtgcgggactacccggcttacg

SEQ ID NO: 429850 - DNA, 30 bp, Artificial Sequence
  Synthetic oligonucleotide
tccaagtagtccgcaagataaagtcttacg

SEQ ID NO: 429851 - DNA, 30 bp, Artificial Sequence
  Synthetic oligonucleotide
cagcttcggacgtacgtttggcgcgttacg

SEQ ID NO: 429852 - DNA, 30 bp, Artificial Sequence
  Synthetic oligonucleotide
tgcacattagaaagccttaacagggttacg

SEQ ID NO: 429853 - DNA, 30 bp, Artificial Sequence
  Synthetic oligonucleotide
aggaatgtagcgccggctgcgagggttacg

SEQ ID NO: 429854 - DNA, 30 bp, Artificial Sequence
  Synthetic oligonucleotide
gttccaatttgagctggttgacatgttacg

SEQ ID NO: 429855 - DNA, 30 bp, Artificial Sequence
  Synthetic oligonucleotide
caccagcttcggctgcgacataaatttacg

SEQ ID NO: 429856 - DNA, 30 bp, Artificial Sequence
  Synthetic oligonucleotide
tgtggagtatagtgcccttcccactttacg

SEQ ID NO: 429857 - DNA, 30 bp, Artificial Sequence
  Synthetic oligonucleotide
cgacaagcgcgtacctttaggctctttacg

SEQ ID NO: 429858 - DNA, 30 bp, Artificial Sequence
  Synthetic oligonucleotide
gcgcgaacccgcagcgcttttacgtttacg

SEQ ID NO: 429859 - DNA, 30 bp, Artificial Sequence
  Synthetic oligonucleotide
gacctagtcttagtgtggttaaggtttacg

SEQ ID NO: 429860 - DNA, 30 bp, Artificial Sequence
  Synthetic oligonucleotide
tagatggatgcgcttgcagcacattttacg

SEQ ID NO: 429861 - DNA, 30 bp, Artificial Sequence
  Synthetic oligonucleotide
aattcgatatacttgtcgcgccattttacg

SEQ ID NO: 429862 - DNA, 30 bp, Artificial Sequence
  Synthetic oligonucleotide
taaacaaaaaatgttgtacccgattttacg

SEQ ID NO: 429863 - DNA, 30 bp, Artificial Sequence
  Synthetic oligonucleotide
aataccattataggtatctgggaaaaaccg

SEQ ID NO: 429864 - DNA, 30 bp, Artificial Sequence
  Synthetic oligonucleotide
tggcgccctaggcttgtaacggacaaaccg

SEQ ID NO: 429865 - DNA, 30 bp, Artificial Sequence
  Synthetic oligonucleotide
aaagaatcaagtccttattgatacaaaccg

SEQ ID NO: 429866 - DNA, 30 bp, Artificial Sequence
  Synthetic oligonucleotide
gtgtcttcgtatgtataattcttgaaaccg

SEQ ID NO: 429867 - DNA, 30 bp, Artificial Sequence
  Synthetic oligonucleotide
gacgctgcttacatctggtgtcataaaccg

SEQ ID NO: 429868 - DNA, 30 bp, Artificial Sequence
  Synthetic oligonucleotide
ccccattaaaggggctctcacttccaaccg

SEQ ID NO: 429869 - DNA, 30 bp, Artificial Sequence
  Synthetic oligonucleotide
tcaccggaggcagcggatcagtagcaaccg

SEQ ID NO: 429870 - DNA, 30 bp, Artificial Sequence
  Synthetic oligonucleotide
cagcgcaaacggacaataagaacgcaaccg

SEQ ID NO: 429871 - DNA, 30 bp, Artificial Sequence
  Synthetic oligonucleotide
ctctgcgcgtcacggactcagtctcaaccg

SEQ ID NO: 429872 - DNA, 30 bp, Artificial Sequence
  Synthetic oligonucleotide
tagggagggttggctcggccgattcaaccg

SEQ ID NO: 429873 - DNA, 30 bp, Artificial Sequence
  Synthetic oligonucleotide
gcgtatcgtggtctgcctttagcagaaccg

SEQ ID NO: 429874 - DNA, 30 bp, Artificial Sequence
  Synthetic oligonucleotide
tggttcacatacagatgcttacccgaaccg

SEQ ID NO: 429875 - DNA, 30 bp, Artificial Sequence
  Synthetic oligonucleotide
acgcagacccgcctagcaataggcgaaccg

SEQ ID NO: 429876 - DNA, 30 bp, Artificial Sequence
  Synthetic oligonucleotide
caaatctgtagggtctacagtgtcgaaccg

SEQ ID NO: 429877 - DNA, 30 bp, Artificial Sequence
  Synthetic oligonucleotide
ttctgacctgtagggggttctttggaaccg

SEQ ID NO: 429878 - DNA, 30 bp, Artificial Sequence
  Synthetic oligonucleotide
tacagcaacaacctgtgcctagttgaaccg

SEQ ID NO: 429879 - DNA, 30 bp, Artificial Sequence
  Synthetic oligonucleotide
agtcactgtggcgcggttcacatctaaccg

SEQ ID NO: 429880 - DNA, 30 bp, Artificial Sequence
  Synthetic oligonucleotide
ccatttgtacttcgtaatgtatggtaaccg

SEQ ID NO: 429881 - DNA, 30 bp, Artificial Sequence
  Synthetic oligonucleotide
cattaacggagcgggataatctggtaaccg

SEQ ID NO: 429882 - DNA, 30 bp, Artificial Sequence
  Synthetic oligonucleotide
aagtcggtggttccttgtcgcttttaaccg

SEQ ID NO: 429883 - DNA, 30 bp, Artificial Sequence
  Synthetic oligonucleotide
gcatggagcttggagtgctactacacaccg

SEQ ID NO: 429884 - DNA, 30 bp, Artificial Sequence
  Synthetic oligonucleotide
cctgatgcagcaagagctcagaccacaccg

SEQ ID NO: 429885 - DNA, 30 bp, Artificial Sequence
  Synthetic oligonucleotide
taggttaccccagttcggagtcggacaccg

SEQ ID NO: 429886 - DNA, 30 bp, Artificial Sequence
  Synthetic oligonucleotide
tgttctgaaacttcttgtataaccccaccg

SEQ ID NO: 429887 - DNA, 30 bp, Artificial Sequence
  Synthetic oligonucleotide
taagtgatcatgaagggtaattccccaccg

SEQ ID NO: 429888 - DNA, 30 bp, Artificial Sequence
  Synthetic oligonucleotide
ggcatgccttgttattcaacaggcccaccg

SEQ ID NO: 429889 - DNA, 30 bp, Artificial Sequence
  Synthetic oligonucleotide
gtattcgtgcggggcggcgtcgtcccaccg

SEQ ID NO: 429890 - DNA, 30 bp, Artificial Sequence
  Synthetic oligonucleotide
gcaccgtgcgaccttggatcagagccaccg

SEQ ID NO: 429891 - DNA, 30 bp, Artificial Sequence
  Synthetic oligonucleotide
caagttacggaaaacggtactacgccaccg

SEQ ID NO: 429892 - DNA, 30 bp, Artificial Sequence
  Synthetic oligonucleotide
cagtcaagcacaggtgagtaaaggccaccg

SEQ ID NO: 429893 - DNA, 30 bp, Artificial Sequence
  Synthetic oligonucleotide
aacagactagtttaaatgttatccgcaccg

SEQ ID NO: 429894 - DNA, 30 bp, Artificial Sequence
  Synthetic oligonucleotide
catcatgtccccgcatcgaaatgcgcaccg

SEQ ID NO: 429895 - DNA, 30 bp, Artificial Sequence
  Synthetic oligonucleotide
agggtatcgcgggccggggagttcgcaccg

SEQ ID NO: 429896 - DNA, 30 bp, Artificial Sequence
  Synthetic oligonucleotide
gctcagctagaggcatcctttgaggcaccg

SEQ ID NO: 429897 - DNA, 30 bp, Artificial Sequence
  Synthetic oligonucleotide
tataactcaatatcttaattataggcaccg

SEQ ID NO: 429898 - DNA, 30 bp, Artificial Sequence
  Synthetic oligonucleotide
taattcgctatagacgcactcttggcaccg

SEQ ID NO: 429899 - DNA, 30 bp, Artificial Sequence
  Synthetic oligonucleotide
ttcatatgagtcaggtttccagatgcaccg

SEQ ID NO: 429900 - DNA, 30 bp, Artificial Sequence
  Synthetic oligonucleotide
ctgttccgagcgttggcagggtatgcaccg

SEQ ID NO: 429901 - DNA, 30 bp, Artificial Sequence
  Synthetic oligonucleotide
ttaaggtagtaatagtattggattgcaccg

SEQ ID NO: 429902 - DNA, 30 bp, Artificial Sequence
  Synthetic oligonucleotide
gactctgagatccccccgacgctgtcaccg

SEQ ID NO: 429903 - DNA, 30 bp, Artificial Sequence
  Synthetic oligonucleotide
gatttctaggggtttttgctaaacagaccg

SEQ ID NO: 429904 - DNA, 30 bp, Artificial Sequence
  Synthetic oligonucleotide
tgcttatcacgccgtacttaccgcagaccg

SEQ ID NO: 429905 - DNA, 30 bp, Artificial Sequence
  Synthetic oligonucleotide
ctgttatatagtgcttgagttacgagaccg

SEQ ID NO: 429906 - DNA, 30 bp, Artificial Sequence
  Synthetic oligonucleotide
aaaatgccatggcttcgttgcttgagaccg

SEQ ID NO: 429907 - DNA, 30 bp, Artificial Sequence
  Synthetic oligonucleotide
gtgtgtcatagggtctgcgaagctagaccg

SEQ ID NO: 429908 - DNA, 30 bp, Artificial Sequence
  Synthetic oligonucleotide
ttgtatacgttcggagcgtacaatcgaccg

SEQ ID NO: 429909 - DNA, 30 bp, Artificial Sequence
  Synthetic oligonucleotide
cttatctcacacaatatgatgcttcgaccg

SEQ ID NO: 429910 - DNA, 30 bp, Artificial Sequence
  Synthetic oligonucleotide
ggactggatagaccccagtccataggaccg

SEQ ID NO: 429911 - DNA, 30 bp, Artificial Sequence
  Synthetic oligonucleotide
tttgagtctgggtcaacaactataggaccg

SEQ ID NO: 429912 - DNA, 30 bp, Artificial Sequence
  Synthetic oligonucleotide
gtgtattagctatccattgagttaggaccg

SEQ ID NO: 429913 - DNA, 30 bp, Artificial Sequence
  Synthetic oligonucleotide
tggagggtggcgggttccggcgacggaccg

SEQ ID NO: 429914 - DNA, 30 bp, Artificial Sequence
  Synthetic oligonucleotide
attttacctggagtagttattgacggaccg

SEQ ID NO: 429915 - DNA, 30 bp, Artificial Sequence
  Synthetic oligonucleotide
gatgtcccgtgacaatccctgcagggaccg

SEQ ID NO: 429916 - DNA, 30 bp, Artificial Sequence
  Synthetic oligonucleotide
gtaagaccgggtcgttactttcagggaccg

SEQ ID NO: 429917 - DNA, 30 bp, Artificial Sequence
  Synthetic oligonucleotide
ctttagaaacgcattgtcgaatagggaccg

SEQ ID NO: 429918 - DNA, 30 bp, Artificial Sequence
  Synthetic oligonucleotide
ttttgtgatacatcaagtaaggttggaccg

SEQ ID NO: 429919 - DNA, 30 bp, Artificial Sequence
  Synthetic oligonucleotide
ggggcccagggacatcacacataatgaccg

SEQ ID NO: 429920 - DNA, 30 bp, Artificial Sequence
  Synthetic oligonucleotide
cacgctccaactaagaagatcctatgaccg

SEQ ID NO: 429921 - DNA, 30 bp, Artificial Sequence
  Synthetic oligonucleotide
actgtatgtttcataaagtaccgctgaccg

SEQ ID NO: 429922 - DNA, 30 bp, Artificial Sequence
  Synthetic oligonucleotide
cacatcggtgacttcggttccgcttgaccg

SEQ ID NO: 429923 - DNA, 30 bp, Artificial Sequence
  Synthetic oligonucleotide
tgttttctaccggcgaagcgaacaataccg

SEQ ID NO: 429924 - DNA, 30 bp, Artificial Sequence
  Synthetic oligonucleotide
tcatcacaatcagtctttcactgaataccg

SEQ ID NO: 429925 - DNA, 30 bp, Artificial Sequence
  Synthetic oligonucleotide
ctttccatgtatggacagcgaatgataccg

SEQ ID NO: 429926 - DNA, 30 bp, Artificial Sequence
  Synthetic oligonucleotide
gcggggccaggcctgttctacgtgataccg

SEQ ID NO: 429927 - DNA, 30 bp, Artificial Sequence
  Synthetic oligonucleotide
gcactgtactgtatctctgagcttataccg

SEQ ID NO: 429928 - DNA, 30 bp, Artificial Sequence
  Synthetic oligonucleotide
atcatatcgtttagagcactggtgctaccg

SEQ ID NO: 429929 - DNA, 30 bp, Artificial Sequence
  Synthetic oligonucleotide
atgggttacagctacggagtcattctaccg

SEQ ID NO: 429930 - DNA, 30 bp, Artificial Sequence
  Synthetic oligonucleotide
tactgcgcgattcacgcgacgtttctaccg

SEQ ID NO: 429931 - DNA, 30 bp, Artificial Sequence
  Synthetic oligonucleotide
gtcgcgttgcagtgcacataccacgtaccg

SEQ ID NO: 429932 - DNA, 30 bp, Artificial Sequence
  Synthetic oligonucleotide
tataaaagagttgatcgtggatgggtaccg

SEQ ID NO: 429933 - DNA, 30 bp, Artificial Sequence
  Synthetic oligonucleotide
tagtagaaatgatttaacgtaatggtaccg

SEQ ID NO: 429934 - DNA, 30 bp, Artificial Sequence
  Synthetic oligonucleotide
cgctcgcacgtgaattgacaacgtgtaccg

SEQ ID NO: 429935 - DNA, 30 bp, Artificial Sequence
  Synthetic oligonucleotide
tactacgtctgcgctcgttattgattaccg

SEQ ID NO: 429936 - DNA, 30 bp, Artificial Sequence
  Synthetic oligonucleotide
aggatatcctgaccatggacggtattaccg

SEQ ID NO: 429937 - DNA, 30 bp, Artificial Sequence
  Synthetic oligonucleotide
gaataatgaatgcgtccgactcccttaccg

SEQ ID NO: 429938 - DNA, 30 bp, Artificial Sequence
  Synthetic oligonucleotide
cggataaggttatactcggaactcttaccg

SEQ ID NO: 429939 - DNA, 30 bp, Artificial Sequence
  Synthetic oligonucleotide
ctaaaggatacagatttaaattctttaccg

SEQ ID NO: 429940 - DNA, 30 bp, Artificial Sequence
  Synthetic oligonucleotide
tagtagatgatatattaaataggtttaccg

SEQ ID NO: 429941 - DNA, 30 bp, Artificial Sequence
  Synthetic oligonucleotide
aacattttcgaaatgggcagtcttttaccg

SEQ ID NO: 429942 - DNA, 30 bp, Artificial Sequence
  Synthetic oligonucleotide
tagcgagagtcatctagtattgttttaccg

SEQ ID NO: 429943 - DNA, 30 bp, Artificial Sequence
  Synthetic oligonucleotide
tcctgcggtgccggaagggtactaaacccg

SEQ ID NO: 429944 - DNA, 30 bp, Artificial Sequence
  Synthetic oligonucleotide
tcttagttccacttatttgaacccaacccg

SEQ ID NO: 429945 - DNA, 30 bp, Artificial Sequence
  Synthetic oligonucleotide
cagatggagggcaaggttcgatggaacccg

SEQ ID NO: 429946 - DNA, 30 bp, Artificial Sequence
  Synthetic oligonucleotide
cgcaagtacgcgggctgatattggaacccg

SEQ ID NO: 429947 - DNA, 30 bp, Artificial Sequence
  Synthetic oligonucleotide
ttgagtctagtgatttctagattgaacccg

SEQ ID NO: 429948 - DNA, 30 bp, Artificial Sequence
  Synthetic oligonucleotide
agcgcaccttggccgggtggaggtaacccg

SEQ ID NO: 429949 - DNA, 30 bp, Artificial Sequence
  Synthetic oligonucleotide
ccattatcggcgttcgggtattgtaacccg

SEQ ID NO: 429950 - DNA, 30 bp, Artificial Sequence
  Synthetic oligonucleotide
gtcctgttttcagttgattagcgacacccg

SEQ ID NO: 429951 - DNA, 30 bp, Artificial Sequence
  Synthetic oligonucleotide
agacacatctgacaccaacaatttcacccg

SEQ ID NO: 429952 - DNA, 30 bp, Artificial Sequence
  Synthetic oligonucleotide
ggtctgtagagaccttcaacttcggacccg

SEQ ID NO: 429953 - DNA, 30 bp, Artificial Sequence
  Synthetic oligonucleotide
tacggagccccacggtacactctggacccg

SEQ ID NO: 429954 - DNA, 30 bp, Artificial Sequence
  Synthetic oligonucleotide
agccgtcgctgagcaaggaaactttacccg

SEQ ID NO: 429955 - DNA, 30 bp, Artificial Sequence
  Synthetic oligonucleotide
cacgcacggaccttaattacataaaccccg

SEQ ID NO: 429956 - DNA, 30 bp, Artificial Sequence
  Synthetic oligonucleotide
tttaagcctcgggggcaatgcgagaccccg

SEQ ID NO: 429957 - DNA, 30 bp, Artificial Sequence
  Synthetic oligonucleotide
agcgatttccaataggttgcagataccccg

SEQ ID NO: 429958 - DNA, 30 bp, Artificial Sequence
  Synthetic oligonucleotide
cgccgcactccatgtgtttgggctaccccg

SEQ ID NO: 429959 - DNA, 30 bp, Artificial Sequence
  Synthetic oligonucleotide
gagtaccgcaagacgtcaaatgctaccccg

SEQ ID NO: 429960 - DNA, 30 bp, Artificial Sequence
  Synthetic oligonucleotide
gccaactgcagcactgcttcgtgtaccccg

SEQ ID NO: 429961 - DNA, 30 bp, Artificial Sequence
  Synthetic oligonucleotide
gttttgatctagtctgacattgaggccccg

SEQ ID NO: 429962 - DNA, 30 bp, Artificial Sequence
  Synthetic oligonucleotide
tttgataatatcatcgacttagcggccccg

SEQ ID NO: 429963 - DNA, 30 bp, Artificial Sequence
  Synthetic oligonucleotide
cgcgaccgaggggctgaagagtactccccg

SEQ ID NO: 429964 - DNA, 30 bp, Artificial Sequence
  Synthetic oligonucleotide
ccacctccggggaacacagtagtgtccccg

SEQ ID NO: 429965 - DNA, 30 bp, Artificial Sequence
  Synthetic oligonucleotide
tatagcgtacgggtgatttattattccccg

SEQ ID NO: 429966 - DNA, 30 bp, Artificial Sequence
  Synthetic oligonucleotide
cttttaggttatgacatgcgggcttccccg

SEQ ID NO: 429967 - DNA, 30 bp, Artificial Sequence
  Synthetic oligonucleotide
cgttacgaaggagtgaaagcgttaagcccg

SEQ ID NO: 429968 - DNA, 30 bp, Artificial Sequence
  Synthetic oligonucleotide
acgagttgggtaggagtgtgcgcgagcccg

SEQ ID NO: 429969 - DNA, 29 bp, Artificial Sequence
  Synthetic oligonucleotide
atatactaggctcacaatttatgagcccg

SEQ ID NO: 429970 - DNA, 30 bp, Artificial Sequence
  Synthetic oligonucleotide
cacggtcggttgtacctggggaaccgcccg

SEQ ID NO: 429971 - DNA, 30 bp, Artificial Sequence
  Synthetic oligonucleotide
aaattgggagcccaaccgagccgccgcccg

SEQ ID NO: 429972 - DNA, 30 bp, Artificial Sequence
  Synthetic oligonucleotide
gtctatcggttggtgctctacatgcgcccg

SEQ ID NO: 429973 - DNA, 30 bp, Artificial Sequence
  Synthetic oligonucleotide
tgctatgggtagaggtctacagtcggcccg

SEQ ID NO: 429974 - DNA, 30 bp, Artificial Sequence
  Synthetic oligonucleotide
gagtgtcagagtaagatcgccaagggcccg

SEQ ID NO: 429975 - DNA, 30 bp, Artificial Sequence
  Synthetic oligonucleotide
gtaaggagccctcactccagcaggggcccg

SEQ ID NO: 429976 - DNA, 30 bp, Artificial Sequence
  Synthetic oligonucleotide
ggtcgtgtagagttgacgattattggcccg

SEQ ID NO: 429977 - DNA, 30 bp, Artificial Sequence
  Synthetic oligonucleotide
ggtctggccgaggccgtcgatcttggcccg

SEQ ID NO: 429978 - DNA, 30 bp, Artificial Sequence
  Synthetic oligonucleotide
tgatattacgatgagcgcatcatatgcccg

SEQ ID NO: 429979 - DNA, 30 bp, Artificial Sequence
  Synthetic oligonucleotide
cggcagtgacgtgcaccaatgatatgcccg

SEQ ID NO: 429980 - DNA, 30 bp, Artificial Sequence
  Synthetic oligonucleotide
cctctttcgctacacgacctagtatgcccg

SEQ ID NO: 429981 - DNA, 30 bp, Artificial Sequence
  Synthetic oligonucleotide
agtcccgaatttgaatactcagactgcccg

SEQ ID NO: 429982 - DNA, 30 bp, Artificial Sequence
  Synthetic oligonucleotide
tgggtaggatccggacagtccaagtgcccg

SEQ ID NO: 429983 - DNA, 30 bp, Artificial Sequence
  Synthetic oligonucleotide
atcttcgggggttacgtatagaattgcccg

SEQ ID NO: 429984 - DNA, 30 bp, Artificial Sequence
  Synthetic oligonucleotide
ttcgactcattaggctaatacctttgcccg

SEQ ID NO: 429985 - DNA, 30 bp, Artificial Sequence
  Synthetic oligonucleotide
cgtcacgttttaacggtcgatcgaatcccg

SEQ ID NO: 429986 - DNA, 30 bp, Artificial Sequence
  Synthetic oligonucleotide
gagccccatagggcatccaagttaatcccg

SEQ ID NO: 429987 - DNA, 30 bp, Artificial Sequence
  Synthetic oligonucleotide
ccggcttctcctaccgtggtaatcatcccg

SEQ ID NO: 429988 - DNA, 30 bp, Artificial Sequence
  Synthetic oligonucleotide
aattgttatgagggtcgtgtacagatcccg

SEQ ID NO: 429989 - DNA, 30 bp, Artificial Sequence
  Synthetic oligonucleotide
aattcttgttcttagcaaagtcgtatcccg

SEQ ID NO: 429990 - DNA, 30 bp, Artificial Sequence
  Synthetic oligonucleotide
gaccctaactatacacatatatgtatcccg

SEQ ID NO: 429991 - DNA, 30 bp, Artificial Sequence
  Synthetic oligonucleotide
gaaccgggttagaaagagcattgtatcccg

SEQ ID NO: 429992 - DNA, 30 bp, Artificial Sequence
  Synthetic oligonucleotide
ggggggtatcgggtcgtgtattaactcccg

SEQ ID NO: 429993 - DNA, 30 bp, Artificial Sequence
  Synthetic oligonucleotide
tagtctactttatcatttgttatactcccg

SEQ ID NO: 429994 - DNA, 30 bp, Artificial Sequence
  Synthetic oligonucleotide
ggcctggatttctggactaatgcgctcccg

SEQ ID NO: 429995 - DNA, 30 bp, Artificial Sequence
  Synthetic oligonucleotide
tctttactggaccatactgcttcgctcccg

SEQ ID NO: 429996 - DNA, 30 bp, Artificial Sequence
  Synthetic oligonucleotide
tgcaaatagtttggccgctgctgtctcccg

SEQ ID NO: 429997 - DNA, 30 bp, Artificial Sequence
  Synthetic oligonucleotide
agcaataagttttgttccgcggaagtcccg

SEQ ID NO: 429998 - DNA, 30 bp, Artificial Sequence
  Synthetic oligonucleotide
ttcgcggccctaacactgctttgagtcccg

SEQ ID NO: 429999 - DNA, 30 bp, Artificial Sequence
  Synthetic oligonucleotide
cgatcattaggacgctccgtgactgtcccg

SEQ ID NO: 430000 - DNA, 30 bp, Artificial Sequence
  Synthetic oligonucleotide
tgcgtcgagaacgcatgaggtcctgtcccg

SEQ ID NO: 430001 - DNA, 30 bp, Artificial Sequence
  Synthetic oligonucleotide
gacttgaaactaaggaaatgccaattcccg

SEQ ID NO: 430002 - DNA, 30 bp, Artificial Sequence
  Synthetic oligonucleotide
agagacccaagtgatgagccgggattcccg

SEQ ID NO: 430003 - DNA, 30 bp, Artificial Sequence
  Synthetic oligonucleotide
gatctctcgcgctgtgtcacggccttcccg

SEQ ID NO: 430004 - DNA, 30 bp, Artificial Sequence
  Synthetic oligonucleotide
ctactaataataaactctgcgggcttcccg

SEQ ID NO: 430005 - DNA, 30 bp, Artificial Sequence
  Synthetic oligonucleotide
ggtgcggccttgctgaaattgaagttcccg

SEQ ID NO: 430006 - DNA, 30 bp, Artificial Sequence
  Synthetic oligonucleotide
tggattcaacgtagtgcagcaatgttcccg

SEQ ID NO: 430007 - DNA, 30 bp, Artificial Sequence
  Synthetic oligonucleotide
gccctttttgctccacgcgaacaaaagccg

SEQ ID NO: 430008 - DNA, 30 bp, Artificial Sequence
  Synthetic oligonucleotide
gccggcgaagcgtccttgcacgaaaagccg

SEQ ID NO: 430009 - DNA, 30 bp, Artificial Sequence
  Synthetic oligonucleotide
ttattgctaacatcggtgcagtgaaagccg

SEQ ID NO: 430010 - DNA, 30 bp, Artificial Sequence
  Synthetic oligonucleotide
gtcgcatgatgtgccggaccactcaagccg

SEQ ID NO: 430011 - DNA, 29 bp, Artificial Sequence
  Synthetic oligonucleotide
attttagggcacacccctgttagaagccg

SEQ ID NO: 430012 - DNA, 30 bp, Artificial Sequence
  Synthetic oligonucleotide
tagcccaggaagtcacgggttacgaagccg

SEQ ID NO: 430013 - DNA, 30 bp, Artificial Sequence
  Synthetic oligonucleotide
gcaaagacagccgtaccttccgtgaagccg

SEQ ID NO: 430014 - DNA, 30 bp, Artificial Sequence
  Synthetic oligonucleotide
gattaggcctgtggccggaatagacagccg

SEQ ID NO: 430015 - DNA, 30 bp, Artificial Sequence
  Synthetic oligonucleotide
agtatagtatcagcttcgatggacgagccg

SEQ ID NO: 430016 - DNA, 30 bp, Artificial Sequence
  Synthetic oligonucleotide
caaccgtacacgtgccctccaatcgagccg

SEQ ID NO: 430017 - DNA, 30 bp, Artificial Sequence
  Synthetic oligonucleotide
ttctgtgtgtactagtctcagcaggagccg

SEQ ID NO: 430018 - DNA, 30 bp, Artificial Sequence
  Synthetic oligonucleotide
tgcacgtagcttttacgcaccgaggagccg

SEQ ID NO: 430019 - DNA, 30 bp, Artificial Sequence
  Synthetic oligonucleotide
gccgcaatttaatatttaagtggggagccg

SEQ ID NO: 430020 - DNA, 30 bp, Artificial Sequence
  Synthetic oligonucleotide
gcacgtacaatttaccctattctggagccg

SEQ ID NO: 430021 - DNA, 30 bp, Artificial Sequence
  Synthetic oligonucleotide
gaccgctgcctgtgatttcctgatgagccg

SEQ ID NO: 430022 - DNA, 30 bp, Artificial Sequence
  Synthetic oligonucleotide
ggtgctggactcttagtaagtgcatagccg

SEQ ID NO: 430023 - DNA, 30 bp, Artificial Sequence
  Synthetic oligonucleotide
actatggtattatcccgatcattatagccg

SEQ ID NO: 430024 - DNA, 30 bp, Artificial Sequence
  Synthetic oligonucleotide
tttgtacatttccagtgttcggtgtagccg

SEQ ID NO: 430025 - DNA, 30 bp, Artificial Sequence
  Synthetic oligonucleotide
cgtggatactaggtattcccgttgtagccg

SEQ ID NO: 430026 - DNA, 30 bp, Artificial Sequence
  Synthetic oligonucleotide
ttttacaaggttgtaggttgcggaacgccg

SEQ ID NO: 430027 - DNA, 30 bp, Artificial Sequence
  Synthetic oligonucleotide
gggggttggaggtctgccgcgctaacgccg

SEQ ID NO: 430028 - DNA, 30 bp, Artificial Sequence
  Synthetic oligonucleotide
aggatgtagctgaaggaacatggaccgccg

SEQ ID NO: 430029 - DNA, 30 bp, Artificial Sequence
  Synthetic oligonucleotide
gtggtctagaatagatatttactcccgccg

SEQ ID NO: 430030 - DNA, 30 bp, Artificial Sequence
  Synthetic oligonucleotide
gcccggttttaaaaaataattctcccgccg

SEQ ID NO: 430031 - DNA, 30 bp, Artificial Sequence
  Synthetic oligonucleotide
cggcaatggcacgatatttggttgccgccg

SEQ ID NO: 430032 - DNA, 30 bp, Artificial Sequence
  Synthetic oligonucleotide
tagggtccagtagaagaggttactccgccg

SEQ ID NO: 430033 - DNA, 30 bp, Artificial Sequence
  Synthetic oligonucleotide
ttttgcaacacgcacaaccaccccgcgccg

SEQ ID NO: 430034 - DNA, 30 bp, Artificial Sequence
  Synthetic oligonucleotide
aggcaatagtcagagcgttactaggcgccg

SEQ ID NO: 430035 - DNA, 31 bp, Artificial Sequence
  Synthetic oligonucleotide
ccgcagtaataccccgaacggtatctcgccg

SEQ ID NO: 430036 - DNA, 30 bp, Artificial Sequence
  Synthetic oligonucleotide
gataagcccggtttccagcaatcgtcgccg

SEQ ID NO: 430037 - DNA, 30 bp, Artificial Sequence
  Synthetic oligonucleotide
actagataagtttagcagctcgggtcgccg

SEQ ID NO: 430038 - DNA, 30 bp, Artificial Sequence
  Synthetic oligonucleotide
ttctttaagcttgcgattagcatttcgccg

SEQ ID NO: 430039 - DNA, 30 bp, Artificial Sequence
  Synthetic oligonucleotide
ggccgtaagcttataagcaaagaaaggccg

SEQ ID NO: 430040 - DNA, 30 bp, Artificial Sequence
  Synthetic oligonucleotide
ggttaggtgatggttaggccggtcaggccg

SEQ ID NO: 430041 - DNA, 30 bp, Artificial Sequence
  Synthetic oligonucleotide
atgaatcagatgcgggacccatggaggccg

SEQ ID NO: 430042 - DNA, 30 bp, Artificial Sequence
  Synthetic oligonucleotide
gtggtcgatcatctcaataagaggcggccg

SEQ ID NO: 430043 - DNA, 30 bp, Artificial Sequence
  Synthetic oligonucleotide
tgagttatctgataagaaacactgcggccg

SEQ ID NO: 430044 - DNA, 30 bp, Artificial Sequence
  Synthetic oligonucleotide
ggtgcgggctaagagcttctctctcggccg

SEQ ID NO: 430045 - DNA, 30 bp, Artificial Sequence
  Synthetic oligonucleotide
gttcctggcagccctccgtttgcagggccg

SEQ ID NO: 430046 - DNA, 30 bp, Artificial Sequence
  Synthetic oligonucleotide
aatcagtctttgcacttcagaagagggccg

SEQ ID NO: 430047 - DNA, 30 bp, Artificial Sequence
  Synthetic oligonucleotide
gtggcgccatatgacgccgggaacgggccg

SEQ ID NO: 430048 - DNA, 30 bp, Artificial Sequence
  Synthetic oligonucleotide
aaacgtccccgagatgactttccggggccg

SEQ ID NO: 430049 - DNA, 30 bp, Artificial Sequence
  Synthetic oligonucleotide
gaattattcatttagtgggccatggggccg

SEQ ID NO: 430050 - DNA, 30 bp, Artificial Sequence
  Synthetic oligonucleotide
aaagaatgattttggtggagcatggggccg

SEQ ID NO: 430051 - DNA, 30 bp, Artificial Sequence
  Synthetic oligonucleotide
attatcatttcggcaagaaatgtggggccg

SEQ ID NO: 430052 - DNA, 30 bp, Artificial Sequence
  Synthetic oligonucleotide
cttaggtgagcagttataatattggggccg

SEQ ID NO: 430053 - DNA, 30 bp, Artificial Sequence
  Synthetic oligonucleotide
tgcgcccagcgcagcggttgtgatgggccg

SEQ ID NO: 430054 - DNA, 30 bp, Artificial Sequence
  Synthetic oligonucleotide
cgcggttcctcaaaccggctagctgggccg

SEQ ID NO: 430055 - DNA, 30 bp, Artificial Sequence
  Synthetic oligonucleotide
gtatatagttggaaacgagttgttgggccg

SEQ ID NO: 430056 - DNA, 30 bp, Artificial Sequence
  Synthetic oligonucleotide
gattctttgtacaatatacggttatggccg

SEQ ID NO: 430057 - DNA, 30 bp, Artificial Sequence
  Synthetic oligonucleotide
gtattgtccgatcgccgccgatgctggccg

SEQ ID NO: 430058 - DNA, 30 bp, Artificial Sequence
  Synthetic oligonucleotide
aaccttttaatgcagatctaagcgtggccg

SEQ ID NO: 430059 - DNA, 30 bp, Artificial Sequence
  Synthetic oligonucleotide
tacaaaacattgtggacaatactttggccg

SEQ ID NO: 430060 - DNA, 30 bp, Artificial Sequence
  Synthetic oligonucleotide
taagctcttaaagaacgtaagtaaatgccg

SEQ ID NO: 430061 - DNA, 30 bp, Artificial Sequence
  Synthetic oligonucleotide
agagttttcaactaattacagacgatgccg

SEQ ID NO: 430062 - DNA, 30 bp, Artificial Sequence
  Synthetic oligonucleotide
gactgaagccgaagaggtatgtggatgccg

SEQ ID NO: 430063 - DNA, 30 bp, Artificial Sequence
  Synthetic oligonucleotide
gctgactgtctatcagcatagagtctgccg

SEQ ID NO: 430064 - DNA, 30 bp, Artificial Sequence
  Synthetic oligonucleotide
gaccggatcctaatcagttaccttctgccg

SEQ ID NO: 430065 - DNA, 30 bp, Artificial Sequence
  Synthetic oligonucleotide
gaaatactgagttgtcatagtcttctgccg

SEQ ID NO: 430066 - DNA, 30 bp, Artificial Sequence
  Synthetic oligonucleotide
gtactacggtgggggggtctggtcgtgccg

SEQ ID NO: 430067 - DNA, 30 bp, Artificial Sequence
  Synthetic oligonucleotide
gaaacgacctgtgacggtcgattggtgccg

SEQ ID NO: 430068 - DNA, 30 bp, Artificial Sequence
  Synthetic oligonucleotide
taaaagatggctgcgaagtaaaatgtgccg

SEQ ID NO: 430069 - DNA, 30 bp, Artificial Sequence
  Synthetic oligonucleotide
cttggtaaatgtttcctggaataattgccg

SEQ ID NO: 430070 - DNA, 30 bp, Artificial Sequence
  Synthetic oligonucleotide
attatatgaagtccgcttacagcattgccg

SEQ ID NO: 430071 - DNA, 30 bp, Artificial Sequence
  Synthetic oligonucleotide
tcgtttacgatattaaagcgagcgttgccg

SEQ ID NO: 430072 - DNA, 30 bp, Artificial Sequence
  Synthetic oligonucleotide
ttatttacagtccggtacggggatttgccg

SEQ ID NO: 430073 - DNA, 30 bp, Artificial Sequence
  Synthetic oligonucleotide
gatcccgtaagcagctggatcgctttgccg

SEQ ID NO: 430074 - DNA, 30 bp, Artificial Sequence
  Synthetic oligonucleotide
tacaacacggcggatgtataatctttgccg

SEQ ID NO: 430075 - DNA, 30 bp, Artificial Sequence
  Synthetic oligonucleotide
aatgtcgatgaagagctgaagtataatccg

SEQ ID NO: 430076 - DNA, 30 bp, Artificial Sequence
  Synthetic oligonucleotide
tttgttggcaagatggggtggggacatccg

SEQ ID NO: 430077 - DNA, 30 bp, Artificial Sequence
  Synthetic oligonucleotide
ttttggcgaagttccttaaatggacatccg

SEQ ID NO: 430078 - DNA, 30 bp, Artificial Sequence
  Synthetic oligonucleotide
gtgactcagatgcgcgctttatttcatccg

SEQ ID NO: 430079 - DNA, 30 bp, Artificial Sequence
  Synthetic oligonucleotide
agatatgccggtgaaacgtatctagatccg

SEQ ID NO: 430080 - DNA, 30 bp, Artificial Sequence
  Synthetic oligonucleotide
caatatcgtgatttcgcgcaatcggatccg

SEQ ID NO: 430081 - DNA, 30 bp, Artificial Sequence
  Synthetic oligonucleotide
tggtatgtattattaatacttacatatccg

SEQ ID NO: 430082 - DNA, 30 bp, Artificial Sequence
  Synthetic oligonucleotide
cgaacaccaccaggcagcgagtcatatccg

SEQ ID NO: 430083 - DNA, 30 bp, Artificial Sequence
  Synthetic oligonucleotide
ggctttcgctcgcatgatctgtcatatccg

SEQ ID NO: 430084 - DNA, 30 bp, Artificial Sequence
  Synthetic oligonucleotide
cttttaaaactctcacgcagccgatatccg

SEQ ID NO: 430085 - DNA, 30 bp, Artificial Sequence
  Synthetic oligonucleotide
taatgagtcctatggagtcgtggatatccg

SEQ ID NO: 430086 - DNA, 30 bp, Artificial Sequence
  Synthetic oligonucleotide
aaattctactcgagtagttgagtttatccg

SEQ ID NO: 430087 - DNA, 30 bp, Artificial Sequence
  Synthetic oligonucleotide
atctgttcccggatcgtttactcgactccg

SEQ ID NO: 430088 - DNA, 30 bp, Artificial Sequence
  Synthetic oligonucleotide
ctaaccgcttcatgacgttaggaacctccg

SEQ ID NO: 430089 - DNA, 30 bp, Artificial Sequence
  Synthetic oligonucleotide
tcagatcatgaatgatttcgcagacctccg

SEQ ID NO: 430090 - DNA, 30 bp, Artificial Sequence
  Synthetic oligonucleotide
tttatctgtgtacgttcacaggtccctccg

SEQ ID NO: 430091 - DNA, 30 bp, Artificial Sequence
  Synthetic oligonucleotide
attattgaccagggtcgccaggatcctccg

SEQ ID NO: 430092 - DNA, 30 bp, Artificial Sequence
  Synthetic oligonucleotide
gaaaatgcgggacaaattcctcaggctccg

SEQ ID NO: 430093 - DNA, 30 bp, Artificial Sequence
  Synthetic oligonucleotide
cgcgaatcacactggggcggtatggctccg

SEQ ID NO: 430094 - DNA, 30 bp, Artificial Sequence
  Synthetic oligonucleotide
aataatcggctcatagcttctcatgctccg

SEQ ID NO: 430095 - DNA, 30 bp, Artificial Sequence
  Synthetic oligonucleotide
cttcagtgccgggtaatcagtgctgctccg

SEQ ID NO: 430096 - DNA, 30 bp, Artificial Sequence
  Synthetic oligonucleotide
aaatttgagcaaaaagaagtgaactctccg

SEQ ID NO: 430097 - DNA, 30 bp, Artificial Sequence
  Synthetic oligonucleotide
aatggtacatgattcggagcacattctccg

SEQ ID NO: 430098 - DNA, 30 bp, Artificial Sequence
  Synthetic oligonucleotide
ctcggtaaggcctaataagccccttctccg

SEQ ID NO: 430099 - DNA, 30 bp, Artificial Sequence
  Synthetic oligonucleotide
cccatccggtacggtgaagtttcttctccg

SEQ ID NO: 430100 - DNA, 30 bp, Artificial Sequence
  Synthetic oligonucleotide
aataatcgagctctgagatatagttctccg

SEQ ID NO: 430101 - DNA, 30 bp, Artificial Sequence
  Synthetic oligonucleotide
aagcggtaccttcgctctgcgaaaagtccg

SEQ ID NO: 430102 - DNA, 30 bp, Artificial Sequence
  Synthetic oligonucleotide
ccgagcagcacagcaggcacttaaagtccg

SEQ ID NO: 430103 - DNA, 30 bp, Artificial Sequence
  Synthetic oligonucleotide
gagtgaatagatacacctaacgtaagtccg

SEQ ID NO: 430104 - DNA, 30 bp, Artificial Sequence
  Synthetic oligonucleotide
ttgtatgccatttacgtcatccgcagtccg

SEQ ID NO: 430105 - DNA, 30 bp, Artificial Sequence
  Synthetic oligonucleotide
atgccggaccctcgtgcgattaggcgtccg

SEQ ID NO: 430106 - DNA, 30 bp, Artificial Sequence
  Synthetic oligonucleotide
ttcagctcgggtaaagtcgaatttcgtccg

SEQ ID NO: 430107 - DNA, 30 bp, Artificial Sequence
  Synthetic oligonucleotide
cgcagcggtccccaacaaactcccggtccg

SEQ ID NO: 430108 - DNA, 30 bp, Artificial Sequence
  Synthetic oligonucleotide
gcactaggttacaaggtctatactggtccg

SEQ ID NO: 430109 - DNA, 30 bp, Artificial Sequence
  Synthetic oligonucleotide
cacgatatgtatggtgatgctactggtccg

SEQ ID NO: 430110 - DNA, 30 bp, Artificial Sequence
  Synthetic oligonucleotide
aaagatcgccgaaaccacctgtttggtccg

SEQ ID NO: 430111 - DNA, 30 bp, Artificial Sequence
  Synthetic oligonucleotide
ccaatcttttctcaagcacttttgtgtccg

SEQ ID NO: 430112 - DNA, 30 bp, Artificial Sequence
  Synthetic oligonucleotide
tggtgattctgtcgttagcgaccttgtccg

SEQ ID NO: 430113 - DNA, 30 bp, Artificial Sequence
  Synthetic oligonucleotide
ctcatggtggtgtcagttaagtaaattccg

SEQ ID NO: 430114 - DNA, 30 bp, Artificial Sequence
  Synthetic oligonucleotide
caattgaaattcggaggtttttcaattccg

SEQ ID NO: 430115 - DNA, 30 bp, Artificial Sequence
  Synthetic oligonucleotide
tcgcgcataccgtataatcttataattccg

SEQ ID NO: 430116 - DNA, 30 bp, Artificial Sequence
  Synthetic oligonucleotide
tttgtgtctgcctttgttaagctaattccg

SEQ ID NO: 430117 - DNA, 30 bp, Artificial Sequence
  Synthetic oligonucleotide
attttcatgccgctactaattcatattccg

SEQ ID NO: 430118 - DNA, 30 bp, Artificial Sequence
  Synthetic oligonucleotide
agaatctatacctgctataagtgtattccg

SEQ ID NO: 430119 - DNA, 30 bp, Artificial Sequence
  Synthetic oligonucleotide
cgcccgtagactttaccgccaggccttccg

SEQ ID NO: 430120 - DNA, 30 bp, Artificial Sequence
  Synthetic oligonucleotide
gcatgtagtcctaaggagtaagagcttccg

SEQ ID NO: 430121 - DNA, 30 bp, Artificial Sequence
  Synthetic oligonucleotide
ctcttagctaaaagggacagttttcttccg

SEQ ID NO: 430122 - DNA, 30 bp, Artificial Sequence
  Synthetic oligonucleotide
tacacgggtcgcataggatcttaagttccg

SEQ ID NO: 430123 - DNA, 30 bp, Artificial Sequence
  Synthetic oligonucleotide
gcacggaaacttcgacatgaattagttccg

SEQ ID NO: 430124 - DNA, 30 bp, Artificial Sequence
  Synthetic oligonucleotide
gggacaccgggatgtatttttgaggttccg

SEQ ID NO: 430125 - DNA, 30 bp, Artificial Sequence
  Synthetic oligonucleotide
ctgtgaggcactgtaacataatcggttccg

SEQ ID NO: 430126 - DNA, 30 bp, Artificial Sequence
  Synthetic oligonucleotide
gccgaagcttaatattagatcctggttccg

SEQ ID NO: 430127 - DNA, 30 bp, Artificial Sequence
  Synthetic oligonucleotide
ttggggtccggcctcgttctcgtggttccg

SEQ ID NO: 430128 - DNA, 30 bp, Artificial Sequence
  Synthetic oligonucleotide
acttagcaatggcagtaggcacgtgttccg

SEQ ID NO: 430129 - DNA, 30 bp, Artificial Sequence
  Synthetic oligonucleotide
agaacgttgaaattagtgcatcttgttccg

SEQ ID NO: 430130 - DNA, 30 bp, Artificial Sequence
  Synthetic oligonucleotide
ctgtattttcatgcatagtagttctttccg

SEQ ID NO: 430131 - DNA, 30 bp, Artificial Sequence
  Synthetic oligonucleotide
atagcgatagttctcaccgtgcattttccg

SEQ ID NO: 430132 - DNA, 30 bp, Artificial Sequence
  Synthetic oligonucleotide
ttcacggacgcggtcggtaagccaaaagcg

SEQ ID NO: 430133 - DNA, 30 bp, Artificial Sequence
  Synthetic oligonucleotide
actacttacggtatggggtgttgcaaagcg

SEQ ID NO: 430134 - DNA, 30 bp, Artificial Sequence
  Synthetic oligonucleotide
ctaagagagggacgtttacgcacgaaagcg

SEQ ID NO: 430135 - DNA, 30 bp, Artificial Sequence
  Synthetic oligonucleotide
gttaatctctgggcgtgctttccgaaagcg

SEQ ID NO: 430136 - DNA, 30 bp, Artificial Sequence
  Synthetic oligonucleotide
gagaggtttacagtttattgccggaaagcg

SEQ ID NO: 430137 - DNA, 30 bp, Artificial Sequence
  Synthetic oligonucleotide
gggtttactagtatccacgcgtataaagcg

SEQ ID NO: 430138 - DNA, 30 bp, Artificial Sequence
  Synthetic oligonucleotide
ataatacagagacgtggagaacgtaaagcg

SEQ ID NO: 430139 - DNA, 30 bp, Artificial Sequence
  Synthetic oligonucleotide
agaagctcggcgccgcattgcgcacaagcg

SEQ ID NO: 430140 - DNA, 30 bp, Artificial Sequence
  Synthetic oligonucleotide
atgtggccggtcagcgctcctgcacaagcg

SEQ ID NO: 430141 - DNA, 30 bp, Artificial Sequence
  Synthetic oligonucleotide
gggagaggagagagcggcgcaagccaagcg

SEQ ID NO: 430142 - DNA, 30 bp, Artificial Sequence
  Synthetic oligonucleotide
agacccgtgcaatcactgggtcggcaagcg

SEQ ID NO: 430143 - DNA, 30 bp, Artificial Sequence
  Synthetic oligonucleotide
gtgagtatcggctttgccgaggtgcaagcg

SEQ ID NO: 430144 - DNA, 30 bp, Artificial Sequence
  Synthetic oligonucleotide
aaacctgatgttagcgggtcgcatcaagcg

SEQ ID NO: 430145 - DNA, 30 bp, Artificial Sequence
  Synthetic oligonucleotide
cgcggtgcatataccgcgggtcacgaagcg

SEQ ID NO: 430146 - DNA, 30 bp, Artificial Sequence
  Synthetic oligonucleotide
gcacgcaggtgctactcagcgtacgaagcg

SEQ ID NO: 430147 - DNA, 30 bp, Artificial Sequence
  Synthetic oligonucleotide
tgcggggttaggcacccgccgtggtaagcg

SEQ ID NO: 430148 - DNA, 30 bp, Artificial Sequence
  Synthetic oligonucleotide
cttactctctcctcaacgggctattaagcg

SEQ ID NO: 430149 - DNA, 30 bp, Artificial Sequence
  Synthetic oligonucleotide
ttctgtgcggtgaagggcgcattttaagcg

SEQ ID NO: 430150 - DNA, 30 bp, Artificial Sequence
  Synthetic oligonucleotide
gttggatgattcactgcgtgccacacagcg

SEQ ID NO: 430151 - DNA, 30 bp, Artificial Sequence
  Synthetic oligonucleotide
ggtagaggcacgtgcggcggagtcacagcg

SEQ ID NO: 430152 - DNA, 30 bp, Artificial Sequence
  Synthetic oligonucleotide
aagaccctttctgacatatcaggtacagcg

SEQ ID NO: 430153 - DNA, 30 bp, Artificial Sequence
  Synthetic oligonucleotide
agggatttaagacctgtttggcgcccagcg

SEQ ID NO: 430154 - DNA, 30 bp, Artificial Sequence
  Synthetic oligonucleotide
gtcccgggtgtttgtgcgatcgggccagcg

SEQ ID NO: 430155 - DNA, 30 bp, Artificial Sequence
  Synthetic oligonucleotide
actagaaactcctttgagacaagagcagcg

SEQ ID NO: 430156 - DNA, 30 bp, Artificial Sequence
  Synthetic oligonucleotide
agcactcgcgtttagtccggtagagcagcg

SEQ ID NO: 430157 - DNA, 30 bp, Artificial Sequence
  Synthetic oligonucleotide
tatggtttggctggggatggcaaggcagcg

SEQ ID NO: 430158 - DNA, 30 bp, Artificial Sequence
  Synthetic oligonucleotide
aattcattggttccgtaagactaggcagcg

SEQ ID NO: 430159 - DNA, 30 bp, Artificial Sequence
  Synthetic oligonucleotide
ttacttggatattcatatagctaggcagcg

SEQ ID NO: 430160 - DNA, 30 bp, Artificial Sequence
  Synthetic oligonucleotide
cttcgtagtcgcaggacataactggcagcg

SEQ ID NO: 430161 - DNA, 30 bp, Artificial Sequence
  Synthetic oligonucleotide
gtttttcacaatggggcaaatcatgcagcg

SEQ ID NO: 430162 - DNA, 30 bp, Artificial Sequence
  Synthetic oligonucleotide
gcgtgtgggggggaggaggtgcggtcagcg

SEQ ID NO: 430163 - DNA, 30 bp, Artificial Sequence
  Synthetic oligonucleotide
ggcagcaaccaagatcccggtcggtcagcg

SEQ ID NO: 430164 - DNA, 30 bp, Artificial Sequence
  Synthetic oligonucleotide
ctcgattcgcacgcctcaatatgttcagcg

SEQ ID NO: 430165 - DNA, 30 bp, Artificial Sequence
  Synthetic oligonucleotide
cattcgctgaacgagcaacaatcgagagcg

SEQ ID NO: 430166 - DNA, 30 bp, Artificial Sequence
  Synthetic oligonucleotide
cttcttgagtatgcgcggctgcctagagcg

SEQ ID NO: 430167 - DNA, 30 bp, Artificial Sequence
  Synthetic oligonucleotide
ctcatgcacttcagtgaaggatctagagcg

SEQ ID NO: 430168 - DNA, 30 bp, Artificial Sequence
  Synthetic oligonucleotide
cggtaccaataattgcccgtatcacgagcg

SEQ ID NO: 430169 - DNA, 30 bp, Artificial Sequence
  Synthetic oligonucleotide
aacgttatcggcgattgtccacggcgagcg

SEQ ID NO: 430170 - DNA, 30 bp, Artificial Sequence
  Synthetic oligonucleotide
gagctgacatgtatagtaagatttcgagcg

SEQ ID NO: 430171 - DNA, 30 bp, Artificial Sequence
  Synthetic oligonucleotide
atcatacctaggcgcgcagggtttcgagcg

SEQ ID NO: 430172 - DNA, 30 bp, Artificial Sequence
  Synthetic oligonucleotide
agtagcaccactaatatgctctcaggagcg

SEQ ID NO: 430173 - DNA, 30 bp, Artificial Sequence
  Synthetic oligonucleotide
acaaggagtacggttcatgaccacggagcg

SEQ ID NO: 430174 - DNA, 30 bp, Artificial Sequence
  Synthetic oligonucleotide
tttaacggataaccctgaggtcccggagcg

SEQ ID NO: 430175 - DNA, 30 bp, Artificial Sequence
  Synthetic oligonucleotide
taattctcaatcgggcgcccctagggagcg

SEQ ID NO: 430176 - DNA, 30 bp, Artificial Sequence
  Synthetic oligonucleotide
gaccatgcccggggttgcgggcatggagcg

SEQ ID NO: 430177 - DNA, 30 bp, Artificial Sequence
  Synthetic oligonucleotide
ccttagcatcaaacgtaatgtgttggagcg

SEQ ID NO: 430178 - DNA, 30 bp, Artificial Sequence
  Synthetic oligonucleotide
tgacaaggcctaaatgtttggcgatgagcg

SEQ ID NO: 430179 - DNA, 30 bp, Artificial Sequence
  Synthetic oligonucleotide
ttttcacagagtgttatacctgtatgagcg

SEQ ID NO: 430180 - DNA, 30 bp, Artificial Sequence
  Synthetic oligonucleotide
cgggtataccaggttttgaagttatgagcg

SEQ ID NO: 430181 - DNA, 30 bp, Artificial Sequence
  Synthetic oligonucleotide
gcaacaacatctcttgtcttaagctgagcg

SEQ ID NO: 430182 - DNA, 30 bp, Artificial Sequence
  Synthetic oligonucleotide
taattttgacgtatctggagtcgctgagcg

SEQ ID NO: 430183 - DNA, 30 bp, Artificial Sequence
  Synthetic oligonucleotide
agtgggtccctgcatgcgcagacgtgagcg

SEQ ID NO: 430184 - DNA, 30 bp, Artificial Sequence
  Synthetic oligonucleotide
aatccacctcactatcacgattggtgagcg

SEQ ID NO: 430185 - DNA, 30 bp, Artificial Sequence
  Synthetic oligonucleotide
aaggggtttgacgctagacatccaatagcg

SEQ ID NO: 430186 - DNA, 30 bp, Artificial Sequence
  Synthetic oligonucleotide
cgcgcgaatgcgatcatattgcgcatagcg

SEQ ID NO: 430187 - DNA, 30 bp, Artificial Sequence
  Synthetic oligonucleotide
gtgggcgcttaagacacacggatcatagcg

SEQ ID NO: 430188 - DNA, 30 bp, Artificial Sequence
  Synthetic oligonucleotide
ctgactaaacaaggttggtcaaggatagcg

SEQ ID NO: 430189 - DNA, 30 bp, Artificial Sequence
  Synthetic oligonucleotide
ccccataatcaagtgtgaaagtctatagcg

SEQ ID NO: 430190 - DNA, 30 bp, Artificial Sequence
  Synthetic oligonucleotide
aatactcagcacagattacctttcctagcg

SEQ ID NO: 430191 - DNA, 30 bp, Artificial Sequence
  Synthetic oligonucleotide
tagctttgagccatcaatggacagctagcg

SEQ ID NO: 430192 - DNA, 30 bp, Artificial Sequence
  Synthetic oligonucleotide
ggggggacaactgttttcgcagcagtagcg

SEQ ID NO: 430193 - DNA, 30 bp, Artificial Sequence
  Synthetic oligonucleotide
agcgcgttgcgggcggcgttcttagtagcg

SEQ ID NO: 430194 - DNA, 30 bp, Artificial Sequence
  Synthetic oligonucleotide
acggggaaagctacgtctcaaaacgtagcg

SEQ ID NO: 430195 - DNA, 30 bp, Artificial Sequence
  Synthetic oligonucleotide
ataagtaatctagccttcctccacgtagcg

SEQ ID NO: 430196 - DNA, 30 bp, Artificial Sequence
  Synthetic oligonucleotide
caggcgtgcctttgaaaagcttacgtagcg

SEQ ID NO: 430197 - DNA, 30 bp, Artificial Sequence
  Synthetic oligonucleotide
tacggttctcccggctgtcgtagcgtagcg

SEQ ID NO: 430198 - DNA, 29 bp, Artificial Sequence
  Synthetic oligonucleotide
ttccacattgtggttaggcttgggtagcg

SEQ ID NO: 430199 - DNA, 30 bp, Artificial Sequence
  Synthetic oligonucleotide
tgattgaaggatgcggcttcgtctgtagcg

SEQ ID NO: 430200 - DNA, 30 bp, Artificial Sequence
  Synthetic oligonucleotide
atatattcgccgaaatcacgcagtgtagcg

SEQ ID NO: 430201 - DNA, 27 bp, Artificial Sequence
  Synthetic oligonucleotide
tattatgggtccaccgaagaattagcg

SEQ ID NO: 430202 - DNA, 30 bp, Artificial Sequence
  Synthetic oligonucleotide
tacttaatacgtataatgtagacgttagcg

SEQ ID NO: 430203 - DNA, 31 bp, Artificial Sequence
  Synthetic oligonucleotide
atacccgagcaaaacggaagataaaaacgcg

SEQ ID NO: 430204 - DNA, 30 bp, Artificial Sequence
  Synthetic oligonucleotide
ctgacgagttatacaccggggcgtaacgcg

SEQ ID NO: 430205 - DNA, 30 bp, Artificial Sequence
  Synthetic oligonucleotide
gggtagcgctccgtatgaaattttaacgcg

SEQ ID NO: 430206 - DNA, 30 bp, Artificial Sequence
  Synthetic oligonucleotide
cagttcatttctacgtctgaatcacacgcg

SEQ ID NO: 430207 - DNA, 30 bp, Artificial Sequence
  Synthetic oligonucleotide
gaggcaatgtatggagactcatagcacgcg

SEQ ID NO: 430208 - DNA, 30 bp, Artificial Sequence
  Synthetic oligonucleotide
gaaatgtaatatagacgttgatagcacgcg

SEQ ID NO: 430209 - DNA, 30 bp, Artificial Sequence
  Synthetic oligonucleotide
ggtaggtgtgtagattcagcttatcacgcg

SEQ ID NO: 430210 - DNA, 30 bp, Artificial Sequence
  Synthetic oligonucleotide
cgtcatgctccaggtatacacaaagacgcg

SEQ ID NO: 430211 - DNA, 30 bp, Artificial Sequence
  Synthetic oligonucleotide
catcatatggagccttccactggagacgcg

SEQ ID NO: 430212 - DNA, 30 bp, Artificial Sequence
  Synthetic oligonucleotide
gagatggcagtggtggttcggtcggacgcg

SEQ ID NO: 430213 - DNA, 30 bp, Artificial Sequence
  Synthetic oligonucleotide
gtggtctatctaaggaacttactggacgcg

SEQ ID NO: 430214 - DNA, 30 bp, Artificial Sequence
  Synthetic oligonucleotide
tgcgcaacggacgtgctaaacttggacgcg

SEQ ID NO: 430215 - DNA, 30 bp, Artificial Sequence
  Synthetic oligonucleotide
gaagcaattcccgagaatagtgatgacgcg

SEQ ID NO: 430216 - DNA, 30 bp, Artificial Sequence
  Synthetic oligonucleotide
gatacaggttagttttagccgcactacgcg

SEQ ID NO: 430217 - DNA, 30 bp, Artificial Sequence
  Synthetic oligonucleotide
cgatgcctaccgaatggcttggagtacgcg

SEQ ID NO: 430218 - DNA, 30 bp, Artificial Sequence
  Synthetic oligonucleotide
actagataccgcatggtctctagttacgcg

SEQ ID NO: 430219 - DNA, 30 bp, Artificial Sequence
  Synthetic oligonucleotide
gcagaaatgcgctccgggttcccaaccgcg

SEQ ID NO: 430220 - DNA, 30 bp, Artificial Sequence
  Synthetic oligonucleotide
tatcgtaaatgtggcatatagtgcaccgcg

SEQ ID NO: 430221 - DNA, 30 bp, Artificial Sequence
  Synthetic oligonucleotide
ttcagcgttggatcatcggatacgaccgcg

SEQ ID NO: 430222 - DNA, 30 bp, Artificial Sequence
  Synthetic oligonucleotide
ctaatttaccgtggggacagcccacccgcg

SEQ ID NO: 430223 - DNA, 30 bp, Artificial Sequence
  Synthetic oligonucleotide
tatgctcgtgttagaaccataaatcccgcg

SEQ ID NO: 430224 - DNA, 30 bp, Artificial Sequence
  Synthetic oligonucleotide
tatcttgtaagcacatacgtactcgccgcg

SEQ ID NO: 430225 - DNA, 30 bp, Artificial Sequence
  Synthetic oligonucleotide
gtctgaatgtactcggctcgcctcgccgcg

SEQ ID NO: 430226 - DNA, 30 bp, Artificial Sequence
  Synthetic oligonucleotide
gcccgtcaagccagttcatcaacggccgcg

SEQ ID NO: 430227 - DNA, 30 bp, Artificial Sequence
  Synthetic oligonucleotide
gtgtgacggctgataccatttccggccgcg

SEQ ID NO: 430228 - DNA, 30 bp, Artificial Sequence
  Synthetic oligonucleotide
gacactagagctagaaactgtcgggccgcg

SEQ ID NO: 430229 - DNA, 30 bp, Artificial Sequence
  Synthetic oligonucleotide
aggctacggcggctgaattaatgggccgcg

SEQ ID NO: 430230 - DNA, 30 bp, Artificial Sequence
  Synthetic oligonucleotide
ccaatgcgcgcttggcgctaggctgccgcg

SEQ ID NO: 430231 - DNA, 30 bp, Artificial Sequence
  Synthetic oligonucleotide
ggctagaaggccgccactgtcaaatccgcg

SEQ ID NO: 430232 - DNA, 30 bp, Artificial Sequence
  Synthetic oligonucleotide
gaacgaataccaatttgttttttctccgcg

SEQ ID NO: 430233 - DNA, 30 bp, Artificial Sequence
  Synthetic oligonucleotide
gattgtcgtctggttaccttcagaagcgcg

SEQ ID NO: 430234 - DNA, 30 bp, Artificial Sequence
  Synthetic oligonucleotide
tggtccgaactgtctagaattcgaagcgcg

SEQ ID NO: 430235 - DNA, 30 bp, Artificial Sequence
  Synthetic oligonucleotide
ggttcgaatctgaaacttgtatagagcgcg

SEQ ID NO: 430236 - DNA, 30 bp, Artificial Sequence
  Synthetic oligonucleotide
tgcagcgggtgctcgacgactatgagcgcg

SEQ ID NO: 430237 - DNA, 30 bp, Artificial Sequence
  Synthetic oligonucleotide
tcttgctgatcggcgttatactatagcgcg

SEQ ID NO: 430238 - DNA, 30 bp, Artificial Sequence
  Synthetic oligonucleotide
tttaagtcctttcaaccggttgctagcgcg

SEQ ID NO: 430239 - DNA, 30 bp, Artificial Sequence
  Synthetic oligonucleotide
ttaaaccgacgctttcgtatgcgacgcgcg

SEQ ID NO: 430240 - DNA, 30 bp, Artificial Sequence
  Synthetic oligonucleotide
atagtcatgttgcatacataaacaggcgcg

SEQ ID NO: 430241 - DNA, 30 bp, Artificial Sequence
  Synthetic oligonucleotide
agtccgagggttttaggtgcgttaggcgcg

SEQ ID NO: 430242 - DNA, 30 bp, Artificial Sequence
  Synthetic oligonucleotide
cgagacgtagccaaccttcttttaggcgcg

SEQ ID NO: 430243 - DNA, 30 bp, Artificial Sequence
  Synthetic oligonucleotide
aatagcgcggcgattgggagctagggcgcg

SEQ ID NO: 430244 - DNA, 30 bp, Artificial Sequence
  Synthetic oligonucleotide
tggcgtgtcgcttcgtgtatgcgatgcgcg

SEQ ID NO: 430245 - DNA, 30 bp, Artificial Sequence
  Synthetic oligonucleotide
tgggcgctgccgggctaagcgacctgcgcg

SEQ ID NO: 430246 - DNA, 30 bp, Artificial Sequence
  Synthetic oligonucleotide
gccactaagcggctagagacggggtgcgcg

SEQ ID NO: 430247 - DNA, 30 bp, Artificial Sequence
  Synthetic oligonucleotide
ttgggtctcgtgttgatacgcgtttgcgcg

SEQ ID NO: 430248 - DNA, 30 bp, Artificial Sequence
  Synthetic oligonucleotide
ttccggcactggatgttggcgcccatcgcg

SEQ ID NO: 430249 - DNA, 30 bp, Artificial Sequence
  Synthetic oligonucleotide
atttagtgacagaccgactggcgcatcgcg

SEQ ID NO: 430250 - DNA, 30 bp, Artificial Sequence
  Synthetic oligonucleotide
gccagttaggtaaagcgagtactcatcgcg

SEQ ID NO: 430251 - DNA, 30 bp, Artificial Sequence
  Synthetic oligonucleotide
ttggccaaccagttgaatcgaagtatcgcg

SEQ ID NO: 430252 - DNA, 30 bp, Artificial Sequence
  Synthetic oligonucleotide
gcagccacactacctaaccagtgtatcgcg

SEQ ID NO: 430253 - DNA, 30 bp, Artificial Sequence
  Synthetic oligonucleotide
caggagacgctgcttcagtacgcgctcgcg

SEQ ID NO: 430254 - DNA, 30 bp, Artificial Sequence
  Synthetic oligonucleotide
gaattggtcttacccatgacttgtctcgcg

SEQ ID NO: 430255 - DNA, 30 bp, Artificial Sequence
  Synthetic oligonucleotide
ggaaaatacggggctctttatcgggtcgcg

SEQ ID NO: 430256 - DNA, 30 bp, Artificial Sequence
  Synthetic oligonucleotide
aaggacctattggccctaacgtctgtcgcg

SEQ ID NO: 430257 - DNA, 30 bp, Artificial Sequence
  Synthetic oligonucleotide
tcaggcgccccgcgtccagcaatattcgcg

SEQ ID NO: 430258 - DNA, 30 bp, Artificial Sequence
  Synthetic oligonucleotide
agcaaatagggtcaccacttactattcgcg

SEQ ID NO: 430259 - DNA, 30 bp, Artificial Sequence
  Synthetic oligonucleotide
ccgtcagttcaaagtcaagaggctttcgcg

SEQ ID NO: 430260 - DNA, 29 bp, Artificial Sequence
  Synthetic oligonucleotide
cccagtcccctgggtcgctccaaaaggcg

SEQ ID NO: 430261 - DNA, 30 bp, Artificial Sequence
  Synthetic oligonucleotide
tagccaggcgggggattcggtctaaaggcg

SEQ ID NO: 430262 - DNA, 30 bp, Artificial Sequence
  Synthetic oligonucleotide
ccttattctgcgcctgtcgtctcacaggcg

SEQ ID NO: 430263 - DNA, 30 bp, Artificial Sequence
  Synthetic oligonucleotide
aatggtattgatagcgcttgcatacaggcg

SEQ ID NO: 430264 - DNA, 30 bp, Artificial Sequence
  Synthetic oligonucleotide
ccgacgtgggacgtgatgaaaacccaggcg

SEQ ID NO: 430265 - DNA, 30 bp, Artificial Sequence
  Synthetic oligonucleotide
gatcagaggcagctcgtattaaagcaggcg

SEQ ID NO: 430266 - DNA, 31 bp, Artificial Sequence
  Synthetic oligonucleotide
ttattactcgacgatgtacgtagggcaggcg

SEQ ID NO: 430267 - DNA, 30 bp, Artificial Sequence
  Synthetic oligonucleotide
cgcatcgtaagtccctcttgcaaagaggcg

SEQ ID NO: 430268 - DNA, 30 bp, Artificial Sequence
  Synthetic oligonucleotide
gtggattgtgctctaagcgcagcggaggcg

SEQ ID NO: 430269 - DNA, 30 bp, Artificial Sequence
  Synthetic oligonucleotide
tatatgaagggcgtgtgaatatctgaggcg

SEQ ID NO: 430270 - DNA, 30 bp, Artificial Sequence
  Synthetic oligonucleotide
gtgacgctcatcatctcgggcccataggcg

SEQ ID NO: 430271 - DNA, 30 bp, Artificial Sequence
  Synthetic oligonucleotide
gccggcgtgtgtgtccgattcgcctaggcg

SEQ ID NO: 430272 - DNA, 30 bp, Artificial Sequence
  Synthetic oligonucleotide
cagtttacgccagcgtgcaaggcctaggcg

SEQ ID NO: 430273 - DNA, 30 bp, Artificial Sequence
  Synthetic oligonucleotide
tattcttctgggaggtttttttagtaggcg

SEQ ID NO: 430274 - DNA, 30 bp, Artificial Sequence
  Synthetic oligonucleotide
tgtgtccatagctggatcacctggtaggcg

SEQ ID NO: 430275 - DNA, 30 bp, Artificial Sequence
  Synthetic oligonucleotide
agcagggggccggtcggacccaattaggcg

SEQ ID NO: 430276 - DNA, 30 bp, Artificial Sequence
  Synthetic oligonucleotide
cgtcctatgcttgcgatcgtcttttaggcg

SEQ ID NO: 430277 - DNA, 30 bp, Artificial Sequence
  Synthetic oligonucleotide
gagaatgccgcaggcaagcgtttaacggcg

SEQ ID NO: 430278 - DNA, 30 bp, Artificial Sequence
  Synthetic oligonucleotide
gacgggcggatatacttgaatgacacggcg

SEQ ID NO: 430279 - DNA, 30 bp, Artificial Sequence
  Synthetic oligonucleotide
gttccgcacagtatggccttgctcacggcg

SEQ ID NO: 430280 - DNA, 30 bp, Artificial Sequence
  Synthetic oligonucleotide
tgttattccatagtcagaatacctacggcg

SEQ ID NO: 430281 - DNA, 30 bp, Artificial Sequence
  Synthetic oligonucleotide
tgtcaacggtcaggtcgattcagtacggcg

SEQ ID NO: 430282 - DNA, 30 bp, Artificial Sequence
  Synthetic oligonucleotide
ctgctagggatgcacggcatgggaccggcg

SEQ ID NO: 430283 - DNA, 30 bp, Artificial Sequence
  Synthetic oligonucleotide
gtctcgcctcggcgtcgcctcaggccggcg

SEQ ID NO: 430284 - DNA, 30 bp, Artificial Sequence
  Synthetic oligonucleotide
ctccatgcgagatcccgctctcatccggcg

SEQ ID NO: 430285 - DNA, 30 bp, Artificial Sequence
  Synthetic oligonucleotide
gctcgagtccgccgtcaagattcagcggcg

SEQ ID NO: 430286 - DNA, 30 bp, Artificial Sequence
  Synthetic oligonucleotide
cttaacccagcggaagtgtgccacgcggcg

SEQ ID NO: 430287 - DNA, 30 bp, Artificial Sequence
  Synthetic oligonucleotide
tatatatcatgctccaaaacgatcgcggcg

SEQ ID NO: 430288 - DNA, 30 bp, Artificial Sequence
  Synthetic oligonucleotide
tagatcagggccatggaagcggaggcggcg

SEQ ID NO: 430289 - DNA, 30 bp, Artificial Sequence
  Synthetic oligonucleotide
gtacgtcggcccattaggtcgagggcggcg

SEQ ID NO: 430290 - DNA, 30 bp, Artificial Sequence
  Synthetic oligonucleotide
cggtgccatagtccggtcccgacctcggcg

SEQ ID NO: 430291 - DNA, 30 bp, Artificial Sequence
  Synthetic oligonucleotide
atgcctaccacgtagttcgtgttgtcggcg

SEQ ID NO: 430292 - DNA, 30 bp, Artificial Sequence
  Synthetic oligonucleotide
ccctttacttgtcagaaatccagttcggcg

SEQ ID NO: 430293 - DNA, 30 bp, Artificial Sequence
  Synthetic oligonucleotide
acaccacaggtgatacggcaggtttcggcg

SEQ ID NO: 430294 - DNA, 30 bp, Artificial Sequence
  Synthetic oligonucleotide
gcaaagcgttatcggggtatgccaagggcg

SEQ ID NO: 430295 - DNA, 30 bp, Artificial Sequence
  Synthetic oligonucleotide
agggagggttagtatagcacaggaagggcg

SEQ ID NO: 430296 - DNA, 30 bp, Artificial Sequence
  Synthetic oligonucleotide
gccggctttgacaattggaatctaagggcg

SEQ ID NO: 430297 - DNA, 30 bp, Artificial Sequence
  Synthetic oligonucleotide
ggcaatcaggcaccgagcctaagcagggcg

SEQ ID NO: 430298 - DNA, 30 bp, Artificial Sequence
  Synthetic oligonucleotide
acaagggcgtcagaggattggacgagggcg

SEQ ID NO: 430299 - DNA, 30 bp, Artificial Sequence
  Synthetic oligonucleotide
cataattggctggtaagcgaaggtagggcg

SEQ ID NO: 430300 - DNA, 30 bp, Artificial Sequence
  Synthetic oligonucleotide
atcttgcttatagggggttcttgtagggcg

SEQ ID NO: 430301 - DNA, 30 bp, Artificial Sequence
  Synthetic oligonucleotide
ttggggtggttgaaatcgctggtacgggcg

SEQ ID NO: 430302 - DNA, 30 bp, Artificial Sequence
  Synthetic oligonucleotide
attccaaccggtgtgtaggtcctccgggcg

SEQ ID NO: 430303 - DNA, 30 bp, Artificial Sequence
  Synthetic oligonucleotide
tacgcgtcacatgacaacgcagggcgggcg

SEQ ID NO: 430304 - DNA, 30 bp, Artificial Sequence
  Synthetic oligonucleotide
gcgctcccgcaaaacgaaaccagaggggcg

SEQ ID NO: 430305 - DNA, 30 bp, Artificial Sequence
  Synthetic oligonucleotide
acgtttagtggcaggtaacggccgggggcg

SEQ ID NO: 430306 - DNA, 30 bp, Artificial Sequence
  Synthetic oligonucleotide
aaaatcgtggatggatctcgatcgggggcg

SEQ ID NO: 430307 - DNA, 30 bp, Artificial Sequence
  Synthetic oligonucleotide
gtaactgccactagtacgttttggggggcg

SEQ ID NO: 430308 - DNA, 30 bp, Artificial Sequence
  Synthetic oligonucleotide
aaactgtggggcgttctcgattatggggcg

SEQ ID NO: 430309 - DNA, 30 bp, Artificial Sequence
  Synthetic oligonucleotide
gccattcaaggtctttatagatttggggcg

SEQ ID NO: 430310 - DNA, 30 bp, Artificial Sequence
  Synthetic oligonucleotide
tactaactctctcttttagtcagctgggcg

SEQ ID NO: 430311 - DNA, 30 bp, Artificial Sequence
  Synthetic oligonucleotide
ggtctatttggtgcaacaccgtgctgggcg

SEQ ID NO: 430312 - DNA, 30 bp, Artificial Sequence
  Synthetic oligonucleotide
gacccgaaggttttgcgctgaatctgggcg

SEQ ID NO: 430313 - DNA, 30 bp, Artificial Sequence
  Synthetic oligonucleotide
gcagacctcgccatggttttcttgtgggcg

SEQ ID NO: 430314 - DNA, 30 bp, Artificial Sequence
  Synthetic oligonucleotide
agtacgccttataagtataggtattgggcg

SEQ ID NO: 430315 - DNA, 30 bp, Artificial Sequence
  Synthetic oligonucleotide
cattcttgtcgcgtaagcggctgttgggcg

SEQ ID NO: 430316 - DNA, 30 bp, Artificial Sequence
  Synthetic oligonucleotide
atgaataattgcaacagctgcgaaatggcg

SEQ ID NO: 430317 - DNA, 30 bp, Artificial Sequence
  Synthetic oligonucleotide
tgatccgattgcctaaataaataaatggcg

SEQ ID NO: 430318 - DNA, 30 bp, Artificial Sequence
  Synthetic oligonucleotide
aaatttttccagtataaggtgtaaatggcg

SEQ ID NO: 430319 - DNA, 30 bp, Artificial Sequence
  Synthetic oligonucleotide
attgacgtatgctgcattgtctagatggcg

SEQ ID NO: 430320 - DNA, 30 bp, Artificial Sequence
  Synthetic oligonucleotide
tcacagttggcgcgaataacccgtatggcg

SEQ ID NO: 430321 - DNA, 30 bp, Artificial Sequence
  Synthetic oligonucleotide
gacctttggctctggcaaaccgtactggcg

SEQ ID NO: 430322 - DNA, 30 bp, Artificial Sequence
  Synthetic oligonucleotide
aggcctgctactaccgcgttattgctggcg

SEQ ID NO: 430323 - DNA, 30 bp, Artificial Sequence
  Synthetic oligonucleotide
gaccaaccataactgttgcgcggtctggcg

SEQ ID NO: 430324 - DNA, 30 bp, Artificial Sequence
  Synthetic oligonucleotide
aaatgtacggccgctacgttttcagtggcg

SEQ ID NO: 430325 - DNA, 30 bp, Artificial Sequence
  Synthetic oligonucleotide
atcacacgagccccgattatcggcttggcg

SEQ ID NO: 430326 - DNA, 30 bp, Artificial Sequence
  Synthetic oligonucleotide
tggatacacctcttaagaccactcttggcg

SEQ ID NO: 430327 - DNA, 30 bp, Artificial Sequence
  Synthetic oligonucleotide
tgcagctgcggatcaggttaacctttggcg

SEQ ID NO: 430328 - DNA, 30 bp, Artificial Sequence
  Synthetic oligonucleotide
aacagcactttgaatacggtcattttggcg

SEQ ID NO: 430329 - DNA, 30 bp, Artificial Sequence
  Synthetic oligonucleotide
tacggggttctatctgaactcgccaatgcg

SEQ ID NO: 430330 - DNA, 30 bp, Artificial Sequence
  Synthetic oligonucleotide
aaacactaggatctggatgggtccaatgcg

SEQ ID NO: 430331 - DNA, 30 bp, Artificial Sequence
  Synthetic oligonucleotide
cgtatacccaccactcagccacgcaatgcg

SEQ ID NO: 430332 - DNA, 30 bp, Artificial Sequence
  Synthetic oligonucleotide
tcggtggcagaccgagtataggtcaatgcg

SEQ ID NO: 430333 - DNA, 30 bp, Artificial Sequence
  Synthetic oligonucleotide
aacgattggtagtagtatacgtcacatgcg

SEQ ID NO: 430334 - DNA, 30 bp, Artificial Sequence
  Synthetic oligonucleotide
accaccgggtcttgacagccaagacatgcg

SEQ ID NO: 430335 - DNA, 30 bp, Artificial Sequence
  Synthetic oligonucleotide
atcgtatagctaatcgcggctcagcatgcg

SEQ ID NO: 430336 - DNA, 30 bp, Artificial Sequence
  Synthetic oligonucleotide
gctagccaaggagcggtccacgcgcatgcg

SEQ ID NO: 430337 - DNA, 30 bp, Artificial Sequence
  Synthetic oligonucleotide
agtcgttagaacgctggggcctatcatgcg

SEQ ID NO: 430338 - DNA, 30 bp, Artificial Sequence
  Synthetic oligonucleotide
tgcagcgatatatcagacaagtctcatgcg

SEQ ID NO: 430339 - DNA, 30 bp, Artificial Sequence
  Synthetic oligonucleotide
gagacagacacatgcacaaattgtcatgcg

SEQ ID NO: 430340 - DNA, 30 bp, Artificial Sequence
  Synthetic oligonucleotide
aaaacgggttgcgttcaggcacttcatgcg

SEQ ID NO: 430341 - DNA, 30 bp, Artificial Sequence
  Synthetic oligonucleotide
cgtgttaggcggacacgcgcttaagatgcg

SEQ ID NO: 430342 - DNA, 30 bp, Artificial Sequence
  Synthetic oligonucleotide
tggccaatatgccggaaagtgaacgatgcg

SEQ ID NO: 430343 - DNA, 30 bp, Artificial Sequence
  Synthetic oligonucleotide
gctcttcatcagctcccgtagaccgatgcg

SEQ ID NO: 430344 - DNA, 30 bp, Artificial Sequence
  Synthetic oligonucleotide
cagctcctggtgggtacatatgaggatgcg

SEQ ID NO: 430345 - DNA, 30 bp, Artificial Sequence
  Synthetic oligonucleotide
acggttaactccgctgttactagggatgcg

SEQ ID NO: 430346 - DNA, 30 bp, Artificial Sequence
  Synthetic oligonucleotide
tctactccaaaataatgtttggttgatgcg

SEQ ID NO: 430347 - DNA, 26 bp, Artificial Sequence
  Synthetic oligonucleotide
tttaacacaagcgggcagagtatgcg

SEQ ID NO: 430348 - DNA, 30 bp, Artificial Sequence
  Synthetic oligonucleotide
tagtactattctgaaaagacgtggtatgcg

SEQ ID NO: 430349 - DNA, 30 bp, Artificial Sequence
  Synthetic oligonucleotide
cagcttgaagtttgtctattgttgtatgcg

SEQ ID NO: 430350 - DNA, 30 bp, Artificial Sequence
  Synthetic oligonucleotide
gtgagtttcatacgttagtacgcttatgcg

SEQ ID NO: 430351 - DNA, 30 bp, Artificial Sequence
  Synthetic oligonucleotide
catagcactttaggactaccagggactgcg

SEQ ID NO: 430352 - DNA, 30 bp, Artificial Sequence
  Synthetic oligonucleotide
tcattaggttaaaatataactgaacctgcg

SEQ ID NO: 430353 - DNA, 30 bp, Artificial Sequence
  Synthetic oligonucleotide
gcggtgattgggggccattgggcccctgcg

SEQ ID NO: 430354 - DNA, 30 bp, Artificial Sequence
  Synthetic oligonucleotide
ttcggggccgttagtacaggcaatcctgcg

SEQ ID NO: 430355 - DNA, 30 bp, Artificial Sequence
  Synthetic oligonucleotide
gtaccgccggtaggttatgtccaagctgcg

SEQ ID NO: 430356 - DNA, 30 bp, Artificial Sequence
  Synthetic oligonucleotide
caagcaactatgtacttgtaaatctctgcg

SEQ ID NO: 430357 - DNA, 30 bp, Artificial Sequence
  Synthetic oligonucleotide
gagtttacgtgatcggctttttcgtctgcg

SEQ ID NO: 430358 - DNA, 30 bp, Artificial Sequence
  Synthetic oligonucleotide
atttacgagagaagtacgtgaatgtctgcg

SEQ ID NO: 430359 - DNA, 30 bp, Artificial Sequence
  Synthetic oligonucleotide
cccgggcggggctacgtttacaattctgcg

SEQ ID NO: 430360 - DNA, 30 bp, Artificial Sequence
  Synthetic oligonucleotide
tatacacgcattctgaagaataattctgcg

SEQ ID NO: 430361 - DNA, 30 bp, Artificial Sequence
  Synthetic oligonucleotide
atataaagtcgtgatgctctagattctgcg

SEQ ID NO: 430362 - DNA, 30 bp, Artificial Sequence
  Synthetic oligonucleotide
aattaacggcggttctcctcgataagtgcg

SEQ ID NO: 430363 - DNA, 30 bp, Artificial Sequence
  Synthetic oligonucleotide
ggtgcatacatataggcataattaagtgcg

SEQ ID NO: 430364 - DNA, 30 bp, Artificial Sequence
  Synthetic oligonucleotide
taggacaatcgtagacccagaggcagtgcg

SEQ ID NO: 430365 - DNA, 30 bp, Artificial Sequence
  Synthetic oligonucleotide
cttggtgtgtccacgacggtttggagtgcg

SEQ ID NO: 430366 - DNA, 30 bp, Artificial Sequence
  Synthetic oligonucleotide
gtgtagctagaagacgcgtaccttagtgcg

SEQ ID NO: 430367 - DNA, 30 bp, Artificial Sequence
  Synthetic oligonucleotide
cgcatggctgctcacgaacgaggacgtgcg

SEQ ID NO: 430368 - DNA, 30 bp, Artificial Sequence
  Synthetic oligonucleotide
agtttctcggggcacttaggtaggcgtgcg

SEQ ID NO: 430369 - DNA, 30 bp, Artificial Sequence
  Synthetic oligonucleotide
aatactggccctaaccatagacggcgtgcg

SEQ ID NO: 430370 - DNA, 30 bp, Artificial Sequence
  Synthetic oligonucleotide
aacgcactgacctcgctcttggggcgtgcg

SEQ ID NO: 430371 - DNA, 30 bp, Artificial Sequence
  Synthetic oligonucleotide
gctgcggcccactccctgagaggtcgtgcg

SEQ ID NO: 430372 - DNA, 30 bp, Artificial Sequence
  Synthetic oligonucleotide
ttaattgggcgtggggcacgtcccggtgcg

SEQ ID NO: 430373 - DNA, 30 bp, Artificial Sequence
  Synthetic oligonucleotide
gttaatttggtctagtaaaagaagggtgcg

SEQ ID NO: 430374 - DNA, 30 bp, Artificial Sequence
  Synthetic oligonucleotide
gagtgcccacggcggggggctgagggtgcg

SEQ ID NO: 430375 - DNA, 40 bp, Artificial Sequence
  Synthetic oligonucleotide
gcatttgtaggccggggggtcccgccccggttctggtgcg

SEQ ID NO: 430376 - DNA, 30 bp, Artificial Sequence
  Synthetic oligonucleotide
acgtctcccctcctaagcgcccgatgtgcg

SEQ ID NO: 430377 - DNA, 30 bp, Artificial Sequence
  Synthetic oligonucleotide
ttaaccgaccataggacgcaatattgtgcg

SEQ ID NO: 430378 - DNA, 30 bp, Artificial Sequence
  Synthetic oligonucleotide
cagcaattaatgtagctcgtttcaattgcg

SEQ ID NO: 430379 - DNA, 29 bp, Artificial Sequence
  Synthetic oligonucleotide
gttttattggacgaatatgcggaattgcg

SEQ ID NO: 430380 - DNA, 30 bp, Artificial Sequence
  Synthetic oligonucleotide
gtatacaatacgtcgcagatccttattgcg

SEQ ID NO: 430381 - DNA, 30 bp, Artificial Sequence
  Synthetic oligonucleotide
aattacgggttcgttgccagttcacttgcg

SEQ ID NO: 430382 - DNA, 30 bp, Artificial Sequence
  Synthetic oligonucleotide
tgaaaatgtcaatcctctgttcgacttgcg

SEQ ID NO: 430383 - DNA, 32 bp, Artificial Sequence
  Synthetic oligonucleotide
tttgttgtgtagttttactcctctaccttgcg

SEQ ID NO: 430384 - DNA, 30 bp, Artificial Sequence
  Synthetic oligonucleotide
cttctacttagcaatcattttcagcttgcg

SEQ ID NO: 430385 - DNA, 30 bp, Artificial Sequence
  Synthetic oligonucleotide
tgccttccttcggtatacttcgaagttgcg

SEQ ID NO: 430386 - DNA, 30 bp, Artificial Sequence
  Synthetic oligonucleotide
atttcgcgccgtcggcaacgttccgttgcg

SEQ ID NO: 430387 - DNA, 30 bp, Artificial Sequence
  Synthetic oligonucleotide
atagcagcaacccgctctcgctgcgttgcg

SEQ ID NO: 430388 - DNA, 30 bp, Artificial Sequence
  Synthetic oligonucleotide
cattggtgacgggctaatccgggggttgcg

SEQ ID NO: 430389 - DNA, 30 bp, Artificial Sequence
  Synthetic oligonucleotide
gggtgtctccggtgagggtaattggttgcg

SEQ ID NO: 430390 - DNA, 30 bp, Artificial Sequence
  Synthetic oligonucleotide
ataaaggtggtgggacttaacgctgttgcg

SEQ ID NO: 430391 - DNA, 30 bp, Artificial Sequence
  Synthetic oligonucleotide
tgtagccaacttggcatgcagggtgttgcg

SEQ ID NO: 430392 - DNA, 30 bp, Artificial Sequence
  Synthetic oligonucleotide
gacagcgtcctgtcccgttagagatttgcg

SEQ ID NO: 430393 - DNA, 30 bp, Artificial Sequence
  Synthetic oligonucleotide
tcctttctaacaaaggatgaaacctttgcg

SEQ ID NO: 430394 - DNA, 30 bp, Artificial Sequence
  Synthetic oligonucleotide
ccctttcggtatggtcttatatcctttgcg

SEQ ID NO: 430395 - DNA, 29 bp, Artificial Sequence
  Synthetic oligonucleotide
ttatacctcattcgtagattagctttgcg

SEQ ID NO: 430396 - DNA, 30 bp, Artificial Sequence
  Synthetic oligonucleotide
caaaatgaatcgcggactgttggctttgcg

SEQ ID NO: 430397 - DNA, 30 bp, Artificial Sequence
  Synthetic oligonucleotide
cctgcttataatgtcgagcatagttttgcg

SEQ ID NO: 430398 - DNA, 30 bp, Artificial Sequence
  Synthetic oligonucleotide
cctatgtggtgttcaggcaagaacaaatcg

SEQ ID NO: 430399 - DNA, 30 bp, Artificial Sequence
  Synthetic oligonucleotide
aacagaatctaaacgtatatttggaaatcg

SEQ ID NO: 430400 - DNA, 30 bp, Artificial Sequence
  Synthetic oligonucleotide
atttacttaaactgggcttcgcataaatcg

SEQ ID NO: 430401 - DNA, 30 bp, Artificial Sequence
  Synthetic oligonucleotide
gattttaaacatcaaaactgcgctaaatcg

SEQ ID NO: 430402 - DNA, 30 bp, Artificial Sequence
  Synthetic oligonucleotide
tggagtcggtttaggcagctcctgcaatcg

SEQ ID NO: 430403 - DNA, 30 bp, Artificial Sequence
  Synthetic oligonucleotide
atagtttcccgggcagtcaggttagaatcg

SEQ ID NO: 430404 - DNA, 30 bp, Artificial Sequence
  Synthetic oligonucleotide
aactaccatacctttgagcatgaggaatcg

SEQ ID NO: 430405 - DNA, 30 bp, Artificial Sequence
  Synthetic oligonucleotide
ggcgcgaaaagataatgcgagtttgaatcg

SEQ ID NO: 430406 - DNA, 30 bp, Artificial Sequence
  Synthetic oligonucleotide
tttgccactacaatcgtaaatacataatcg

SEQ ID NO: 430407 - DNA, 30 bp, Artificial Sequence
  Synthetic oligonucleotide
tcatttgggaaatgctggacgttctaatcg

SEQ ID NO: 430408 - DNA, 30 bp, Artificial Sequence
  Synthetic oligonucleotide
ttcacgttaggtaacgcttactagtaatcg

SEQ ID NO: 430409 - DNA, 30 bp, Artificial Sequence
  Synthetic oligonucleotide
gttcctacaacaatatctctaacgtaatcg

SEQ ID NO: 430410 - DNA, 30 bp, Artificial Sequence
  Synthetic oligonucleotide
gcaaggcctcgatcaacggtaacgtaatcg

SEQ ID NO: 430411 - DNA, 30 bp, Artificial Sequence
  Synthetic oligonucleotide
aatcattaactgtatagaatcaggtaatcg

SEQ ID NO: 430412 - DNA, 30 bp, Artificial Sequence
  Synthetic oligonucleotide
gaccttaaatagggtaacgcaatgtaatcg

SEQ ID NO: 430413 - DNA, 30 bp, Artificial Sequence
  Synthetic oligonucleotide
cgcagtacagctgtacgaaacgtgtaatcg

SEQ ID NO: 430414 - DNA, 30 bp, Artificial Sequence
  Synthetic oligonucleotide
ggacgcgtgcaaagcggatagccttaatcg

SEQ ID NO: 430415 - DNA, 30 bp, Artificial Sequence
  Synthetic oligonucleotide
ccgacggcgattatgaacgttccttaatcg

SEQ ID NO: 430416 - DNA, 30 bp, Artificial Sequence
  Synthetic oligonucleotide
atcaattaataaaggttggaatcttaatcg

SEQ ID NO: 430417 - DNA, 30 bp, Artificial Sequence
  Synthetic oligonucleotide
gtcaaaaaggcatgtgacgcgtggacatcg

SEQ ID NO: 430418 - DNA, 30 bp, Artificial Sequence
  Synthetic oligonucleotide
cttcggttctcggggacgagcgtgacatcg

SEQ ID NO: 430419 - DNA, 30 bp, Artificial Sequence
  Synthetic oligonucleotide
tttaaatctagcccggttgggttgacatcg

SEQ ID NO: 430420 - DNA, 30 bp, Artificial Sequence
  Synthetic oligonucleotide
ctcgaggataggggaccggtggatacatcg

SEQ ID NO: 430421 - DNA, 30 bp, Artificial Sequence
  Synthetic oligonucleotide
catgaatggcacgggatctacgggccatcg

SEQ ID NO: 430422 - DNA, 30 bp, Artificial Sequence
  Synthetic oligonucleotide
atttctatcggccccggtaagcctccatcg

SEQ ID NO: 430423 - DNA, 30 bp, Artificial Sequence
  Synthetic oligonucleotide
tcactaatgttgctgtgccaagcagcatcg

SEQ ID NO: 430424 - DNA, 30 bp, Artificial Sequence
  Synthetic oligonucleotide
agcccagcgagggttgcttgacaatcatcg

SEQ ID NO: 430425 - DNA, 30 bp, Artificial Sequence
  Synthetic oligonucleotide
tcaaaatacgcatgcaagctcacatcatcg

SEQ ID NO: 430426 - DNA, 30 bp, Artificial Sequence
  Synthetic oligonucleotide
agcccgattttcttcttattgatctcatcg

SEQ ID NO: 430427 - DNA, 30 bp, Artificial Sequence
  Synthetic oligonucleotide
ttccagcgacatcagacagcgcacagatcg

SEQ ID NO: 430428 - DNA, 30 bp, Artificial Sequence
  Synthetic oligonucleotide
tcttttaaggtttcttgacgacggagatcg

SEQ ID NO: 430429 - DNA, 31 bp, Artificial Sequence
  Synthetic oligonucleotide
aaaaaccaccggggggtgaccgtggagatcg

SEQ ID NO: 430430 - DNA, 30 bp, Artificial Sequence
  Synthetic oligonucleotide
agtatttgcttggccaggacatttagatcg

SEQ ID NO: 430431 - DNA, 30 bp, Artificial Sequence
  Synthetic oligonucleotide
ttctgtcaatgatatggtatgggccgatcg

SEQ ID NO: 430432 - DNA, 30 bp, Artificial Sequence
  Synthetic oligonucleotide
acctcgcagttcttattcgtctagcgatcg

SEQ ID NO: 430433 - DNA, 30 bp, Artificial Sequence
  Synthetic oligonucleotide
gcgcccgcttattgtaaatggattcgatcg

SEQ ID NO: 430434 - DNA, 30 bp, Artificial Sequence
  Synthetic oligonucleotide
atatgtgcgttgtttttaaacgttcgatcg

SEQ ID NO: 430435 - DNA, 30 bp, Artificial Sequence
  Synthetic oligonucleotide
tatcgcacttaaacgtttgaaaccggatcg

SEQ ID NO: 430436 - DNA, 30 bp, Artificial Sequence
  Synthetic oligonucleotide
aacgtagatggtccgtggttgatcggatcg

SEQ ID NO: 430437 - DNA, 30 bp, Artificial Sequence
  Synthetic oligonucleotide
tataccgacacacaaccttagtggggatcg

SEQ ID NO: 430438 - DNA, 30 bp, Artificial Sequence
  Synthetic oligonucleotide
ttcccgtcaagtattacgggggtgggatcg

SEQ ID NO: 430439 - DNA, 30 bp, Artificial Sequence
  Synthetic oligonucleotide
gttccaatcgattttgtttgattgggatcg

SEQ ID NO: 430440 - DNA, 30 bp, Artificial Sequence
  Synthetic oligonucleotide
gaaggacctcgggacgtcctcggtggatcg

SEQ ID NO: 430441 - DNA, 30 bp, Artificial Sequence
  Synthetic oligonucleotide
tcctgagccccgttagcataataatgatcg

SEQ ID NO: 430442 - DNA, 30 bp, Artificial Sequence
  Synthetic oligonucleotide
gttcgtgttgtgtaacttttacggtgatcg

SEQ ID NO: 430443 - DNA, 30 bp, Artificial Sequence
  Synthetic oligonucleotide
gatcctgctttctgtttagatagaatatcg

SEQ ID NO: 430444 - DNA, 30 bp, Artificial Sequence
  Synthetic oligonucleotide
aattagttgttttcgctggcagccatatcg

SEQ ID NO: 430445 - DNA, 30 bp, Artificial Sequence
  Synthetic oligonucleotide
ttattcaatcctctatgggcgggcatatcg

SEQ ID NO: 430446 - DNA, 30 bp, Artificial Sequence
  Synthetic oligonucleotide
gttcacagcaagcgtatgacttgcatatcg

SEQ ID NO: 430447 - DNA, 30 bp, Artificial Sequence
  Synthetic oligonucleotide
ctgctacgcgcgccggatctttgcatatcg

SEQ ID NO: 430448 - DNA, 31 bp, Artificial Sequence
  Synthetic oligonucleotide
gtcctttgttctaatttgtctaatcatatcg

SEQ ID NO: 430449 - DNA, 30 bp, Artificial Sequence
  Synthetic oligonucleotide
ttacactggtggtgcccgatttagatatcg

SEQ ID NO: 430450 - DNA, 30 bp, Artificial Sequence
  Synthetic oligonucleotide
ctccagcgtgacgtcaaagcgacgatatcg

SEQ ID NO: 430451 - DNA, 30 bp, Artificial Sequence
  Synthetic oligonucleotide
gacttgtacaggtaatattcaaatatatcg

SEQ ID NO: 430452 - DNA, 30 bp, Artificial Sequence
  Synthetic oligonucleotide
ggagaacttatatagatataaattatatcg

SEQ ID NO: 430453 - DNA, 30 bp, Artificial Sequence
  Synthetic oligonucleotide
gcgacaggcgttgtacctcgcacactatcg

SEQ ID NO: 430454 - DNA, 30 bp, Artificial Sequence
  Synthetic oligonucleotide
ctgtgacaatagtttgcagatccactatcg

SEQ ID NO: 430455 - DNA, 30 bp, Artificial Sequence
  Synthetic oligonucleotide
tcgcttgtcacagtagatcgagcactatcg

SEQ ID NO: 430456 - DNA, 30 bp, Artificial Sequence
  Synthetic oligonucleotide
ttatgaacgaagcgaggggccttcctatcg

SEQ ID NO: 430457 - DNA, 30 bp, Artificial Sequence
  Synthetic oligonucleotide
ctaccacctaaatttcatacgtctctatcg

SEQ ID NO: 430458 - DNA, 30 bp, Artificial Sequence
  Synthetic oligonucleotide
tagcccgccactatacacctagtagtatcg

SEQ ID NO: 430459 - DNA, 30 bp, Artificial Sequence
  Synthetic oligonucleotide
ataaagcgacgccaagatatggtagtatcg

SEQ ID NO: 430460 - DNA, 27 bp, Artificial Sequence
  Synthetic oligonucleotide
ggtgtgtggtaatccagccgcgtatcg

SEQ ID NO: 430461 - DNA, 30 bp, Artificial Sequence
  Synthetic oligonucleotide
tcggtttctcatgtaagcgcaggcgtatcg

SEQ ID NO: 430462 - DNA, 30 bp, Artificial Sequence
  Synthetic oligonucleotide
ggtcaggaaggatgtacgcactgcgtatcg

SEQ ID NO: 430463 - DNA, 30 bp, Artificial Sequence
  Synthetic oligonucleotide
gccggatttttttagacttcacatgtatcg

SEQ ID NO: 430464 - DNA, 30 bp, Artificial Sequence
  Synthetic oligonucleotide
aagtcttggccgcttcaaggttcattatcg

SEQ ID NO: 430465 - DNA, 30 bp, Artificial Sequence
  Synthetic oligonucleotide
taccatttggtatcataaactagattatcg

SEQ ID NO: 430466 - DNA, 30 bp, Artificial Sequence
  Synthetic oligonucleotide
catgcaatgtccgcttaattcctgttatcg

SEQ ID NO: 430467 - DNA, 30 bp, Artificial Sequence
  Synthetic oligonucleotide
acgttaggtttatccactcctactttatcg

SEQ ID NO: 430468 - DNA, 30 bp, Artificial Sequence
  Synthetic oligonucleotide
gcccacatatgcggttacttcgctttatcg

SEQ ID NO: 430469 - DNA, 30 bp, Artificial Sequence
  Synthetic oligonucleotide
cgcgattgcacgcctgtatatcgtttatcg

SEQ ID NO: 430470 - DNA, 30 bp, Artificial Sequence
  Synthetic oligonucleotide
aaggattggagggaacggtactttttatcg

SEQ ID NO: 430471 - DNA, 30 bp, Artificial Sequence
  Synthetic oligonucleotide
caagttccggtggcgtgtaagcaaaactcg

SEQ ID NO: 430472 - DNA, 30 bp, Artificial Sequence
  Synthetic oligonucleotide
atttggtgtggtgcaattatgtaaaactcg

SEQ ID NO: 430473 - DNA, 31 bp, Artificial Sequence
  Synthetic oligonucleotide
tgtctgacaggctcagtaacgggacaactcg

SEQ ID NO: 430474 - DNA, 30 bp, Artificial Sequence
  Synthetic oligonucleotide
ttggaagcggctaggccgactcccaactcg

SEQ ID NO: 430475 - DNA, 30 bp, Artificial Sequence
  Synthetic oligonucleotide
agttagctacgcttgcatggcgccaactcg

SEQ ID NO: 430476 - DNA, 30 bp, Artificial Sequence
  Synthetic oligonucleotide
gacatgtggaagagactatgtatcaactcg

SEQ ID NO: 430477 - DNA, 30 bp, Artificial Sequence
  Synthetic oligonucleotide
ataagggcatttaaaagtttgtttaactcg

SEQ ID NO: 430478 - DNA, 30 bp, Artificial Sequence
  Synthetic oligonucleotide
gggtccgcagcaatccgctgtatacactcg

SEQ ID NO: 430479 - DNA, 30 bp, Artificial Sequence
  Synthetic oligonucleotide
gcacccgcgatgtttgtatttacccactcg

SEQ ID NO: 430480 - DNA, 30 bp, Artificial Sequence
  Synthetic oligonucleotide
gagtgtgcaattgggcagaatggccactcg

SEQ ID NO: 430481 - DNA, 30 bp, Artificial Sequence
  Synthetic oligonucleotide
tgcaatcatgactccctgccccagcactcg

SEQ ID NO: 430482 - DNA, 30 bp, Artificial Sequence
  Synthetic oligonucleotide
acaactgcgaccaagcggtcgctagactcg

SEQ ID NO: 430483 - DNA, 30 bp, Artificial Sequence
  Synthetic oligonucleotide
ataggttcgcttccgatgcgacacgactcg

SEQ ID NO: 430484 - DNA, 30 bp, Artificial Sequence
  Synthetic oligonucleotide
tttccgcgatcacaggaggcgtacgactcg

SEQ ID NO: 430485 - DNA, 30 bp, Artificial Sequence
  Synthetic oligonucleotide
gataattggcgtcctttgtctcgggactcg

SEQ ID NO: 430486 - DNA, 30 bp, Artificial Sequence
  Synthetic oligonucleotide
cctctatttacgctgataaaagtatactcg

SEQ ID NO: 430487 - DNA, 30 bp, Artificial Sequence
  Synthetic oligonucleotide
aactacctcatatgccgctcggcctactcg

SEQ ID NO: 430488 - DNA, 30 bp, Artificial Sequence
  Synthetic oligonucleotide
tcaaagagcgcagatgggagattgtactcg

SEQ ID NO: 430489 - DNA, 30 bp, Artificial Sequence
  Synthetic oligonucleotide
acaggcttctggtctcggtacggaacctcg

SEQ ID NO: 430490 - DNA, 30 bp, Artificial Sequence
  Synthetic oligonucleotide
gacgaatcgtaccgtagcgtgatcacctcg

SEQ ID NO: 430491 - DNA, 30 bp, Artificial Sequence
  Synthetic oligonucleotide
cagaatttgaaaaccttagcaaatacctcg

SEQ ID NO: 430492 - DNA, 30 bp, Artificial Sequence
  Synthetic oligonucleotide
cttcgtggacgtggatgggataatacctcg

SEQ ID NO: 430493 - DNA, 30 bp, Artificial Sequence
  Synthetic oligonucleotide
gtatttttagctgtctaacacgatacctcg

SEQ ID NO: 430494 - DNA, 30 bp, Artificial Sequence
  Synthetic oligonucleotide
gcacaagatatctatgtagtgtaaccctcg

SEQ ID NO: 430495 - DNA, 30 bp, Artificial Sequence
  Synthetic oligonucleotide
gataaatcgggttcccacaaggcaccctcg

SEQ ID NO: 430496 - DNA, 30 bp, Artificial Sequence
  Synthetic oligonucleotide
ggcgtactttgagactttgggttcccctcg

SEQ ID NO: 430497 - DNA, 30 bp, Artificial Sequence
  Synthetic oligonucleotide
tgtgtagtcatagccaattgtaagccctcg

SEQ ID NO: 430498 - DNA, 30 bp, Artificial Sequence
  Synthetic oligonucleotide
gtcgtctttcggggtaacggcacgccctcg

SEQ ID NO: 430499 - DNA, 30 bp, Artificial Sequence
  Synthetic oligonucleotide
gtggtcggtgttatttataatcggccctcg

SEQ ID NO: 430500 - DNA, 30 bp, Artificial Sequence
  Synthetic oligonucleotide
gatctaggcctgagaggctcaatgccctcg

SEQ ID NO: 430501 - DNA, 30 bp, Artificial Sequence
  Synthetic oligonucleotide
gtcttgtccccgcagatttgacatccctcg

SEQ ID NO: 430502 - DNA, 30 bp, Artificial Sequence
  Synthetic oligonucleotide
cgattaggtccacgtgtgcatagtccctcg

SEQ ID NO: 430503 - DNA, 30 bp, Artificial Sequence
  Synthetic oligonucleotide
atattaacaaacctacatgccggtccctcg

SEQ ID NO: 430504 - DNA, 30 bp, Artificial Sequence
  Synthetic oligonucleotide
gtaaatttctaacataggggcggagcctcg

SEQ ID NO: 430505 - DNA, 30 bp, Artificial Sequence
  Synthetic oligonucleotide
ggtccaaggtgaaatcgcgctctagcctcg

SEQ ID NO: 430506 - DNA, 30 bp, Artificial Sequence
  Synthetic oligonucleotide
tataatgagtgtaagccatcgtgcgcctcg

SEQ ID NO: 430507 - DNA, 30 bp, Artificial Sequence
  Synthetic oligonucleotide
ttccgacgcaatgtgtgtaatggggcctcg

SEQ ID NO: 430508 - DNA, 30 bp, Artificial Sequence
  Synthetic oligonucleotide
gggtgtgccccctagcaccgctgggcctcg

SEQ ID NO: 430509 - DNA, 30 bp, Artificial Sequence
  Synthetic oligonucleotide
aactgggatttggctgattttcatgcctcg

SEQ ID NO: 430510 - DNA, 30 bp, Artificial Sequence
  Synthetic oligonucleotide
ggcgaggatgtacccgttggtgaatcctcg

SEQ ID NO: 430511 - DNA, 30 bp, Artificial Sequence
  Synthetic oligonucleotide
agacctgatgtctctgacgccggctcctcg

SEQ ID NO: 430512 - DNA, 30 bp, Artificial Sequence
  Synthetic oligonucleotide
tcgtaactccgtcgcatgcactcttcctcg

SEQ ID NO: 430513 - DNA, 30 bp, Artificial Sequence
  Synthetic oligonucleotide
acccaagattccaaccttaatttaagctcg

SEQ ID NO: 430514 - DNA, 28 bp, Artificial Sequence
  Synthetic oligonucleotide
ttaccgacagcaacggtgctagagctcg

SEQ ID NO: 430515 - DNA, 30 bp, Artificial Sequence
  Synthetic oligonucleotide
atacagtctatgctttcccaagcacgctcg

SEQ ID NO: 430516 - DNA, 30 bp, Artificial Sequence
  Synthetic oligonucleotide
gatatatagctaagcagctagcagcgctcg

SEQ ID NO: 430517 - DNA, 30 bp, Artificial Sequence
  Synthetic oligonucleotide
tgaacgacgcatgttcacgcaattcgctcg

SEQ ID NO: 430518 - DNA, 30 bp, Artificial Sequence
  Synthetic oligonucleotide
gtataataaactccctccgtaagaggctcg

SEQ ID NO: 430519 - DNA, 30 bp, Artificial Sequence
  Synthetic oligonucleotide
cgacaccggggttttgtacttcacggctcg

SEQ ID NO: 430520 - DNA, 30 bp, Artificial Sequence
  Synthetic oligonucleotide
tgaagccagacggcgccccgtagcggctcg

SEQ ID NO: 430521 - DNA, 30 bp, Artificial Sequence
  Synthetic oligonucleotide
gggccggaccgggtgccttcgaggggctcg

SEQ ID NO: 430522 - DNA, 30 bp, Artificial Sequence
  Synthetic oligonucleotide
agcccctaagagccacggagccgatgctcg

SEQ ID NO: 430523 - DNA, 30 bp, Artificial Sequence
  Synthetic oligonucleotide
gaaattcacagtctaaaacaattatgctcg

SEQ ID NO: 430524 - DNA, 30 bp, Artificial Sequence
  Synthetic oligonucleotide
acgaattcgtactgagcacgcggctgctcg

SEQ ID NO: 430525 - DNA, 30 bp, Artificial Sequence
  Synthetic oligonucleotide
aatccgacaatcgcggaccccgggtgctcg

SEQ ID NO: 430526 - DNA, 30 bp, Artificial Sequence
  Synthetic oligonucleotide
ttaatagcatagcagcggaacatttgctcg

SEQ ID NO: 430527 - DNA, 30 bp, Artificial Sequence
  Synthetic oligonucleotide
cctcgatatgaataaaaccataacatctcg

SEQ ID NO: 430528 - DNA, 30 bp, Artificial Sequence
  Synthetic oligonucleotide
gacaatttcaccctacggcgcgtgatctcg

SEQ ID NO: 430529 - DNA, 30 bp, Artificial Sequence
  Synthetic oligonucleotide
accgaaggacgcttgggggatatactctcg

SEQ ID NO: 430530 - DNA, 30 bp, Artificial Sequence
  Synthetic oligonucleotide
gcggtaaactggcgtgtaccacgtctctcg

SEQ ID NO: 430531 - DNA, 30 bp, Artificial Sequence
  Synthetic oligonucleotide
aactaagacgtcaacggagaatgtctctcg

SEQ ID NO: 430532 - DNA, 30 bp, Artificial Sequence
  Synthetic oligonucleotide
tgcgggaaccgtgatgatgctagagtctcg

SEQ ID NO: 430533 - DNA, 30 bp, Artificial Sequence
  Synthetic oligonucleotide
caagtcgctcatttgagcggacacgtctcg

SEQ ID NO: 430534 - DNA, 30 bp, Artificial Sequence
  Synthetic oligonucleotide
taacatgaccttgacaggactcacgtctcg

SEQ ID NO: 430535 - DNA, 30 bp, Artificial Sequence
  Synthetic oligonucleotide
tttttccgtgaccaggtttgttacgtctcg

SEQ ID NO: 430536 - DNA, 30 bp, Artificial Sequence
  Synthetic oligonucleotide
ttagcgcatctgaccgatgggcctgtctcg

SEQ ID NO: 430537 - DNA, 30 bp, Artificial Sequence
  Synthetic oligonucleotide
gttcagagtcatctacatgcctttgtctcg

SEQ ID NO: 430538 - DNA, 30 bp, Artificial Sequence
  Synthetic oligonucleotide
gccattattggtatcatccctgaattctcg

SEQ ID NO: 430539 - DNA, 30 bp, Artificial Sequence
  Synthetic oligonucleotide
atgccggtttatttgtcggtaagcttctcg

SEQ ID NO: 430540 - DNA, 30 bp, Artificial Sequence
  Synthetic oligonucleotide
tatgcaaattcactggtaatgttacagtcg

SEQ ID NO: 430541 - DNA, 30 bp, Artificial Sequence
  Synthetic oligonucleotide
tgtagcgcagacgttggccaggcccagtcg

SEQ ID NO: 430542 - DNA, 30 bp, Artificial Sequence
  Synthetic oligonucleotide
accgtgatgcacgactcattgtgccagtcg

SEQ ID NO: 430543 - DNA, 30 bp, Artificial Sequence
  Synthetic oligonucleotide
atctacggtggtatggtctcgtcgcagtcg

SEQ ID NO: 430544 - DNA, 30 bp, Artificial Sequence
  Synthetic oligonucleotide
agatgacacttacgtttgtatggtcagtcg

SEQ ID NO: 430545 - DNA, 31 bp, Artificial Sequence
  Synthetic oligonucleotide
ggcatactgaatcacttacgtaattcagtcg

SEQ ID NO: 430546 - DNA, 30 bp, Artificial Sequence
  Synthetic oligonucleotide
gagttccacctaatgagaccaccagagtcg

SEQ ID NO: 430547 - DNA, 30 bp, Artificial Sequence
  Synthetic oligonucleotide
gttatcgaagaggtttctaccctggagtcg

SEQ ID NO: 430548 - DNA, 30 bp, Artificial Sequence
  Synthetic oligonucleotide
cagccattctcaaattaccgatggtagtcg

SEQ ID NO: 430549 - DNA, 30 bp, Artificial Sequence
  Synthetic oligonucleotide
tccaatggggtagcatccccgtggtagtcg

SEQ ID NO: 430550 - DNA, 30 bp, Artificial Sequence
  Synthetic oligonucleotide
atatttgagctgttggtcaaatgttagtcg

SEQ ID NO: 430551 - DNA, 30 bp, Artificial Sequence
  Synthetic oligonucleotide
cggaaacacatggctcaagagtcaacgtcg

SEQ ID NO: 430552 - DNA, 30 bp, Artificial Sequence
  Synthetic oligonucleotide
cggttttaacttcgaaggtgtttcacgtcg

SEQ ID NO: 430553 - DNA, 30 bp, Artificial Sequence
  Synthetic oligonucleotide
gcacataactcggttgtgatcaagacgtcg

SEQ ID NO: 430554 - DNA, 30 bp, Artificial Sequence
  Synthetic oligonucleotide
cagttgttaaccgtcattagtattccgtcg

SEQ ID NO: 430555 - DNA, 30 bp, Artificial Sequence
  Synthetic oligonucleotide
atatgtcgcactcccgcagacgatgcgtcg

SEQ ID NO: 430556 - DNA, 30 bp, Artificial Sequence
  Synthetic oligonucleotide
tgtctttccaccttaaaatgaactgcgtcg

SEQ ID NO: 430557 - DNA, 30 bp, Artificial Sequence
  Synthetic oligonucleotide
ttacgaacgcaaggccgggcccctgcgtcg

SEQ ID NO: 430558 - DNA, 30 bp, Artificial Sequence
  Synthetic oligonucleotide
tcttcatatccgtacggagaccgtgcgtcg

SEQ ID NO: 430559 - DNA, 30 bp, Artificial Sequence
  Synthetic oligonucleotide
gcgccataatttagaacgacttttgcgtcg

SEQ ID NO: 430560 - DNA, 30 bp, Artificial Sequence
  Synthetic oligonucleotide
taacattttagaacccgtccgtcatcgtcg

SEQ ID NO: 430561 - DNA, 30 bp, Artificial Sequence
  Synthetic oligonucleotide
acacgacagtcactgaaggtcaagtcgtcg

SEQ ID NO: 430562 - DNA, 30 bp, Artificial Sequence
  Synthetic oligonucleotide
gggtgccacgcgtcccgaacgacgtcgtcg

SEQ ID NO: 430563 - DNA, 30 bp, Artificial Sequence
  Synthetic oligonucleotide
attgcccgcgcgccattaccgtgaaggtcg

SEQ ID NO: 430564 - DNA, 30 bp, Artificial Sequence
  Synthetic oligonucleotide
agtgattcgaatcgtagttcgtacaggtcg

SEQ ID NO: 430565 - DNA, 30 bp, Artificial Sequence
  Synthetic oligonucleotide
tggcagatcccgtactggccttccaggtcg

SEQ ID NO: 430566 - DNA, 30 bp, Artificial Sequence
  Synthetic oligonucleotide
tggtaacgatgtgaatcgctggagaggtcg

SEQ ID NO: 430567 - DNA, 30 bp, Artificial Sequence
  Synthetic oligonucleotide
gttctcattattcgtgttttcgggaggtcg

SEQ ID NO: 430568 - DNA, 30 bp, Artificial Sequence
  Synthetic oligonucleotide
gaataatgcatgccaacacgtactaggtcg

SEQ ID NO: 430569 - DNA, 30 bp, Artificial Sequence
  Synthetic oligonucleotide
tccaccgttcaaccgcgtgtcgctaggtcg

SEQ ID NO: 430570 - DNA, 30 bp, Artificial Sequence
  Synthetic oligonucleotide
agaaagcactagagctcttggaaacggtcg

SEQ ID NO: 430571 - DNA, 30 bp, Artificial Sequence
  Synthetic oligonucleotide
gccgaaggggtcctggcggccccgcggtcg

SEQ ID NO: 430572 - DNA, 30 bp, Artificial Sequence
  Synthetic oligonucleotide
gctagacacttctgtgcaagcgttcggtcg

SEQ ID NO: 430573 - DNA, 30 bp, Artificial Sequence
  Synthetic oligonucleotide
cgttttatatattgaaggtgatttcggtcg

SEQ ID NO: 430574 - DNA, 30 bp, Artificial Sequence
  Synthetic oligonucleotide
aatgaggcttctgggttgctgcaagggtcg

SEQ ID NO: 430575 - DNA, 30 bp, Artificial Sequence
  Synthetic oligonucleotide
tagcgcacatgttcaatgtttatagggtcg

SEQ ID NO: 430576 - DNA, 30 bp, Artificial Sequence
  Synthetic oligonucleotide
tgtatgtccgctgaggatggcaactggtcg

SEQ ID NO: 430577 - DNA, 30 bp, Artificial Sequence
  Synthetic oligonucleotide
taatcaggggggtaccggtttctctggtcg

SEQ ID NO: 430578 - DNA, 30 bp, Artificial Sequence
  Synthetic oligonucleotide
gaccactttagctgaggtatatagtggtcg

SEQ ID NO: 430579 - DNA, 30 bp, Artificial Sequence
  Synthetic oligonucleotide
catgacggttagagatttttgcaaatgtcg

SEQ ID NO: 430580 - DNA, 30 bp, Artificial Sequence
  Synthetic oligonucleotide
cgccgctcaggctttttcaagacaatgtcg

SEQ ID NO: 430581 - DNA, 30 bp, Artificial Sequence
  Synthetic oligonucleotide
gcccaatattcaactcctggcctcatgtcg

SEQ ID NO: 430582 - DNA, 30 bp, Artificial Sequence
  Synthetic oligonucleotide
gtatgcgcttttaatatctatgtgatgtcg

SEQ ID NO: 430583 - DNA, 30 bp, Artificial Sequence
  Synthetic oligonucleotide
ggtacactggacgcggctaatttgatgtcg

SEQ ID NO: 430584 - DNA, 30 bp, Artificial Sequence
  Synthetic oligonucleotide
tcctagtagcgctgccttgacactatgtcg

SEQ ID NO: 430585 - DNA, 30 bp, Artificial Sequence
  Synthetic oligonucleotide
tattctactcaaaaacaggaatctatgtcg

SEQ ID NO: 430586 - DNA, 30 bp, Artificial Sequence
  Synthetic oligonucleotide
gtctatagcggccgggtcaaagaactgtcg

SEQ ID NO: 430587 - DNA, 30 bp, Artificial Sequence
  Synthetic oligonucleotide
gatcgaggttaatctcacggctccctgtcg

SEQ ID NO: 430588 - DNA, 30 bp, Artificial Sequence
  Synthetic oligonucleotide
gaaagcagataaacgtttagtttgctgtcg

SEQ ID NO: 430589 - DNA, 30 bp, Artificial Sequence
  Synthetic oligonucleotide
tatatcaggccgagaaaggttactctgtcg

SEQ ID NO: 430590 - DNA, 30 bp, Artificial Sequence
  Synthetic oligonucleotide
aaggctctgggaggtgaatgtatggtgtcg

SEQ ID NO: 430591 - DNA, 30 bp, Artificial Sequence
  Synthetic oligonucleotide
aataaggtctatcatgaaggtagcttgtcg

SEQ ID NO: 430592 - DNA, 30 bp, Artificial Sequence
  Synthetic oligonucleotide
gtttctgacgcatgtggctatggcttgtcg

SEQ ID NO: 430593 - DNA, 30 bp, Artificial Sequence
  Synthetic oligonucleotide
ttaaatttaccctaacagtagttcttgtcg

SEQ ID NO: 430594 - DNA, 30 bp, Artificial Sequence
  Synthetic oligonucleotide
gtatatgtcgtaagtaagacggcgttgtcg

SEQ ID NO: 430595 - DNA, 30 bp, Artificial Sequence
  Synthetic oligonucleotide
gcacatttgggtattaagaatattttgtcg

SEQ ID NO: 430596 - DNA, 30 bp, Artificial Sequence
  Synthetic oligonucleotide
attcattcctgaatttgggccaacaattcg

SEQ ID NO: 430597 - DNA, 30 bp, Artificial Sequence
  Synthetic oligonucleotide
cgcggacttttgcgacgggtttacaattcg

SEQ ID NO: 430598 - DNA, 30 bp, Artificial Sequence
  Synthetic oligonucleotide
aattgaaatacctgatggcccctcaattcg

SEQ ID NO: 430599 - DNA, 30 bp, Artificial Sequence
  Synthetic oligonucleotide
tgttattaatataggtcctttgggaattcg

SEQ ID NO: 430600 - DNA, 30 bp, Artificial Sequence
  Synthetic oligonucleotide
gttccgacggctcagaactctctgaattcg

SEQ ID NO: 430601 - DNA, 30 bp, Artificial Sequence
  Synthetic oligonucleotide
gtacaatttgtgctcgttacggctaattcg

SEQ ID NO: 430602 - DNA, 30 bp, Artificial Sequence
  Synthetic oligonucleotide
cgggtctcccgtggggtcctctttaattcg

SEQ ID NO: 430603 - DNA, 30 bp, Artificial Sequence
  Synthetic oligonucleotide
gtaggtttgatcagacggtctccccattcg

SEQ ID NO: 430604 - DNA, 30 bp, Artificial Sequence
  Synthetic oligonucleotide
aacttacctgcaagctcgaagaggcattcg

SEQ ID NO: 430605 - DNA, 30 bp, Artificial Sequence
  Synthetic oligonucleotide
gagttggcgtcggaagctaattgcgattcg

SEQ ID NO: 430606 - DNA, 30 bp, Artificial Sequence
  Synthetic oligonucleotide
gaacggccaaacacgagagctttcgattcg

SEQ ID NO: 430607 - DNA, 30 bp, Artificial Sequence
  Synthetic oligonucleotide
tcaagagaatctatggttataagggattcg

SEQ ID NO: 430608 - DNA, 30 bp, Artificial Sequence
  Synthetic oligonucleotide
gtggcagttgttagcggtgatttggattcg

SEQ ID NO: 430609 - DNA, 30 bp, Artificial Sequence
  Synthetic oligonucleotide
aaggaccctggtgaaattacaagatattcg

SEQ ID NO: 430610 - DNA, 30 bp, Artificial Sequence
  Synthetic oligonucleotide
gcgtctctatgcggctcgaatctatattcg

SEQ ID NO: 430611 - DNA, 30 bp, Artificial Sequence
  Synthetic oligonucleotide
ttacttcaaaaggcagatcaaccgtattcg

SEQ ID NO: 430612 - DNA, 30 bp, Artificial Sequence
  Synthetic oligonucleotide
ctgctgcatacgagttcattgttaacttcg

SEQ ID NO: 430613 - DNA, 30 bp, Artificial Sequence
  Synthetic oligonucleotide
tgcacacgtagtctattaattgtcacttcg

SEQ ID NO: 430614 - DNA, 30 bp, Artificial Sequence
  Synthetic oligonucleotide
aatcttagaaaatgcaactacgctacttcg

SEQ ID NO: 430615 - DNA, 30 bp, Artificial Sequence
  Synthetic oligonucleotide
tataacatcaggcatggctgttttacttcg

SEQ ID NO: 430616 - DNA, 30 bp, Artificial Sequence
  Synthetic oligonucleotide
aaaacacagtcgcgggtaagcttgccttcg

SEQ ID NO: 430617 - DNA, 30 bp, Artificial Sequence
  Synthetic oligonucleotide
gtggaagttacatatgtatcgggtccttcg

SEQ ID NO: 430618 - DNA, 30 bp, Artificial Sequence
  Synthetic oligonucleotide
gccttggttataacgctgggtgaagcttcg

SEQ ID NO: 430619 - DNA, 30 bp, Artificial Sequence
  Synthetic oligonucleotide
aatatacagttaatggtaagggtcgcttcg

SEQ ID NO: 430620 - DNA, 30 bp, Artificial Sequence
  Synthetic oligonucleotide
cggtctctcgaggccgatattacggcttcg

SEQ ID NO: 430621 - DNA, 30 bp, Artificial Sequence
  Synthetic oligonucleotide
cggttcccgcacaagggctgaaaatcttcg

SEQ ID NO: 430622 - DNA, 30 bp, Artificial Sequence
  Synthetic oligonucleotide
caaaagattttgtaagggggcgcctcttcg

SEQ ID NO: 430623 - DNA, 30 bp, Artificial Sequence
  Synthetic oligonucleotide
caagatttttagttgaaaggcgcgtcttcg

SEQ ID NO: 430624 - DNA, 30 bp, Artificial Sequence
  Synthetic oligonucleotide
agttgttaggaaggttttccgacaagttcg

SEQ ID NO: 430625 - DNA, 30 bp, Artificial Sequence
  Synthetic oligonucleotide
tgcacaagttcctggaatgctgtaagttcg

SEQ ID NO: 430626 - DNA, 30 bp, Artificial Sequence
  Synthetic oligonucleotide
tttgcgagacgggttttaaacttaagttcg

SEQ ID NO: 430627 - DNA, 30 bp, Artificial Sequence
  Synthetic oligonucleotide
agttcggccacgttatggttagccagttcg

SEQ ID NO: 430628 - DNA, 30 bp, Artificial Sequence
  Synthetic oligonucleotide
ttgctctcacgtggaggatgcgatagttcg

SEQ ID NO: 430629 - DNA, 30 bp, Artificial Sequence
  Synthetic oligonucleotide
ctgtgtgttttgatttcctttggtagttcg

SEQ ID NO: 430630 - DNA, 30 bp, Artificial Sequence
  Synthetic oligonucleotide
agtgctcggtcttggaagattacacgttcg

SEQ ID NO: 430631 - DNA, 30 bp, Artificial Sequence
  Synthetic oligonucleotide
agagtggtattagcttctaactaccgttcg

SEQ ID NO: 430632 - DNA, 30 bp, Artificial Sequence
  Synthetic oligonucleotide
aatacatacctactcttgacagcccgttcg

SEQ ID NO: 430633 - DNA, 30 bp, Artificial Sequence
  Synthetic oligonucleotide
taatgtggtgactcgtgttgggcgcgttcg

SEQ ID NO: 430634 - DNA, 30 bp, Artificial Sequence
  Synthetic oligonucleotide
tagcgaaaccgcgctttttggaggcgttcg

SEQ ID NO: 430635 - DNA, 30 bp, Artificial Sequence
  Synthetic oligonucleotide
tcttttactagtggtcgtggaaatcgttcg

SEQ ID NO: 430636 - DNA, 30 bp, Artificial Sequence
  Synthetic oligonucleotide
atgggttacccctaaaacttatatcgttcg

SEQ ID NO: 430637 - DNA, 30 bp, Artificial Sequence
  Synthetic oligonucleotide
gttatcccatataccaacgttgttcgttcg

SEQ ID NO: 430638 - DNA, 30 bp, Artificial Sequence
  Synthetic oligonucleotide
gcagaccaggtaagggttctcaaaggttcg

SEQ ID NO: 430639 - DNA, 30 bp, Artificial Sequence
  Synthetic oligonucleotide
gatcgcatctccacgatagatgcaggttcg

SEQ ID NO: 430640 - DNA, 30 bp, Artificial Sequence
  Synthetic oligonucleotide
cttttaaacccgaacaaaaccatcggttcg

SEQ ID NO: 430641 - DNA, 30 bp, Artificial Sequence
  Synthetic oligonucleotide
ttggctgtgtcatgagtcctaccgggttcg

SEQ ID NO: 430642 - DNA, 30 bp, Artificial Sequence
  Synthetic oligonucleotide
tactacggattcgccccgaatcatggttcg

SEQ ID NO: 430643 - DNA, 30 bp, Artificial Sequence
  Synthetic oligonucleotide
ggtacagttacgccacacaccattggttcg

SEQ ID NO: 430644 - DNA, 30 bp, Artificial Sequence
  Synthetic oligonucleotide
gtacgtagaatattagaacccgttggttcg

SEQ ID NO: 430645 - DNA, 30 bp, Artificial Sequence
  Synthetic oligonucleotide
gtatgtttggatatgggggcagtatgttcg

SEQ ID NO: 430646 - DNA, 30 bp, Artificial Sequence
  Synthetic oligonucleotide
ttcggtttgtaccgcattgacacctgttcg

SEQ ID NO: 430647 - DNA, 30 bp, Artificial Sequence
  Synthetic oligonucleotide
gcctggctgctgtgagccgaaccctgttcg

SEQ ID NO: 430648 - DNA, 30 bp, Artificial Sequence
  Synthetic oligonucleotide
ccacattggtcggggaacgtatcgtgttcg

SEQ ID NO: 430649 - DNA, 30 bp, Artificial Sequence
  Synthetic oligonucleotide
ggacggtttcttaagctgacagcttgttcg

SEQ ID NO: 430650 - DNA, 30 bp, Artificial Sequence
  Synthetic oligonucleotide
ccatgcagcttagcgtcatgttgttgttcg

SEQ ID NO: 430651 - DNA, 30 bp, Artificial Sequence
  Synthetic oligonucleotide
ttgttctgaccactcagatatgaaatttcg

SEQ ID NO: 430652 - DNA, 30 bp, Artificial Sequence
  Synthetic oligonucleotide
cctcgcttgcggaagacgctgaacatttcg

SEQ ID NO: 430653 - DNA, 30 bp, Artificial Sequence
  Synthetic oligonucleotide
ctgtcttaatcaagtgtttcgaccatttcg

SEQ ID NO: 430654 - DNA, 30 bp, Artificial Sequence
  Synthetic oligonucleotide
gacccttaaatccacaattaccgcatttcg

SEQ ID NO: 430655 - DNA, 30 bp, Artificial Sequence
  Synthetic oligonucleotide
cagttgttcaggcgcttcccgctcatttcg

SEQ ID NO: 430656 - DNA, 30 bp, Artificial Sequence
  Synthetic oligonucleotide
gttcacaaagcggtccggatattcatttcg

SEQ ID NO: 430657 - DNA, 30 bp, Artificial Sequence
  Synthetic oligonucleotide
tcttgcgattctacgctgggcccgatttcg

SEQ ID NO: 430658 - DNA, 30 bp, Artificial Sequence
  Synthetic oligonucleotide
aaatacataccgactatagcagcgatttcg

SEQ ID NO: 430659 - DNA, 30 bp, Artificial Sequence
  Synthetic oligonucleotide
tgctgtcggcgcttgggacatgatatttcg

SEQ ID NO: 430660 - DNA, 30 bp, Artificial Sequence
  Synthetic oligonucleotide
tctttgccacggtctctgaaaagtatttcg

SEQ ID NO: 430661 - DNA, 30 bp, Artificial Sequence
  Synthetic oligonucleotide
cagccaacgcccctatgaacaattatttcg

SEQ ID NO: 430662 - DNA, 30 bp, Artificial Sequence
  Synthetic oligonucleotide
agcaacagttctttctcacggtgcctttcg

SEQ ID NO: 430663 - DNA, 30 bp, Artificial Sequence
  Synthetic oligonucleotide
gcaacgccgcctactaatcgtaggctttcg

SEQ ID NO: 430664 - DNA, 30 bp, Artificial Sequence
  Synthetic oligonucleotide
cccagttgaggtggagctccatatctttcg

SEQ ID NO: 430665 - DNA, 30 bp, Artificial Sequence
  Synthetic oligonucleotide
agtccgtcctacgtacagtactccgtttcg

SEQ ID NO: 430666 - DNA, 30 bp, Artificial Sequence
  Synthetic oligonucleotide
ttggggattagtcgagctaggattgtttcg

SEQ ID NO: 430667 - DNA, 30 bp, Artificial Sequence
  Synthetic oligonucleotide
aaatgcctagagcagaaccaggtattttcg

SEQ ID NO: 430668 - DNA, 30 bp, Artificial Sequence
  Synthetic oligonucleotide
tccggtagatatcgttcgcagccgttttcg

SEQ ID NO: 430669 - DNA, 30 bp, Artificial Sequence
  Synthetic oligonucleotide
cgcgtgtgttagaaaggtttacctttttcg

SEQ ID NO: 430670 - DNA, 30 bp, Artificial Sequence
  Synthetic oligonucleotide
actcgcaggagcaagaaggtgagtttttcg

SEQ ID NO: 430671 - DNA, 30 bp, Artificial Sequence
  Synthetic oligonucleotide
cttgcaatgccggtgactgtaaaaaaaagg

SEQ ID NO: 430672 - DNA, 30 bp, Artificial Sequence
  Synthetic oligonucleotide
cgtggagtgttaaccgcctctaaaaaaagg

SEQ ID NO: 430673 - DNA, 30 bp, Artificial Sequence
  Synthetic oligonucleotide
ttttggttcgcatattctttcgacaaaagg

SEQ ID NO: 430674 - DNA, 30 bp, Artificial Sequence
  Synthetic oligonucleotide
ctgattgttgctaaagactagcccaaaagg

SEQ ID NO: 430675 - DNA, 30 bp, Artificial Sequence
  Synthetic oligonucleotide
aagtccttaatagaattccaggagaaaagg

SEQ ID NO: 430676 - DNA, 30 bp, Artificial Sequence
  Synthetic oligonucleotide
gatcttcaagagatccgctcctagaaaagg

SEQ ID NO: 430677 - DNA, 30 bp, Artificial Sequence
  Synthetic oligonucleotide
gagtagcacaccccatccttatcgaaaagg

SEQ ID NO: 430678 - DNA, 30 bp, Artificial Sequence
  Synthetic oligonucleotide
gagtcttatggtaaaatgcacagtaaaagg

SEQ ID NO: 430679 - DNA, 30 bp, Artificial Sequence
  Synthetic oligonucleotide
tgcctcattttggacgtgagtcgtaaaagg

SEQ ID NO: 430680 - DNA, 30 bp, Artificial Sequence
  Synthetic oligonucleotide
gtcccggtaagtgtggtttgtgcccaaagg

SEQ ID NO: 430681 - DNA, 30 bp, Artificial Sequence
  Synthetic oligonucleotide
tggacgcacgctatctgggataagcaaagg

SEQ ID NO: 430682 - DNA, 30 bp, Artificial Sequence
  Synthetic oligonucleotide
aaaccttggtcgcggtgtactaggcaaagg

SEQ ID NO: 430683 - DNA, 30 bp, Artificial Sequence
  Synthetic oligonucleotide
gacgtgagcataccgtgcgatgggcaaagg

SEQ ID NO: 430684 - DNA, 30 bp, Artificial Sequence
  Synthetic oligonucleotide
caaaatctacgttttattcggaccgaaagg

SEQ ID NO: 430685 - DNA, 30 bp, Artificial Sequence
  Synthetic oligonucleotide
cgcggtctagtccctttagagtccgaaagg

SEQ ID NO: 430686 - DNA, 30 bp, Artificial Sequence
  Synthetic oligonucleotide
ggttaagcatctcgagagccgagcgaaagg

SEQ ID NO: 430687 - DNA, 30 bp, Artificial Sequence
  Synthetic oligonucleotide
aacatttacttggtgcgttggtaggaaagg

SEQ ID NO: 430688 - DNA, 30 bp, Artificial Sequence
  Synthetic oligonucleotide
gtcaaaaggaatgtaagcaccggggaaagg

SEQ ID NO: 430689 - DNA, 30 bp, Artificial Sequence
  Synthetic oligonucleotide
tgtattggttgaatggcgggtcttgaaagg

SEQ ID NO: 430690 - DNA, 30 bp, Artificial Sequence
  Synthetic oligonucleotide
ccccggggcgttccaagttttacataaagg

SEQ ID NO: 430691 - DNA, 30 bp, Artificial Sequence
  Synthetic oligonucleotide
tattttggcttggcccggggatgataaagg

SEQ ID NO: 430692 - DNA, 29 bp, Artificial Sequence
  Synthetic oligonucleotide
gctctatgaaagggcacagacgctaaagg

SEQ ID NO: 430693 - DNA, 30 bp, Artificial Sequence
  Synthetic oligonucleotide
gagtaataggcaattgaccatacgtaaagg

SEQ ID NO: 430694 - DNA, 30 bp, Artificial Sequence
  Synthetic oligonucleotide
agggcagcttttcgtcggtcagattaaagg

SEQ ID NO: 430695 - DNA, 30 bp, Artificial Sequence
  Synthetic oligonucleotide
ggttatggagcggagacgcgtatttaaagg

SEQ ID NO: 430696 - DNA, 30 bp, Artificial Sequence
  Synthetic oligonucleotide
gctgatgaccaccgatctcgctgaacaagg

SEQ ID NO: 430697 - DNA, 30 bp, Artificial Sequence
  Synthetic oligonucleotide
tgtggaccggacgtttagtaggtcacaagg

SEQ ID NO: 430698 - DNA, 30 bp, Artificial Sequence
  Synthetic oligonucleotide
aactggggcgtatactttttttagacaagg

SEQ ID NO: 430699 - DNA, 30 bp, Artificial Sequence
  Synthetic oligonucleotide
ccatacttacgattcactaactggacaagg

SEQ ID NO: 430700 - DNA, 30 bp, Artificial Sequence
  Synthetic oligonucleotide
aattaggtttggtaactggacaatacaagg

SEQ ID NO: 430701 - DNA, 30 bp, Artificial Sequence
  Synthetic oligonucleotide
ttaccctactgtctcgtactgagtacaagg

SEQ ID NO: 430702 - DNA, 30 bp, Artificial Sequence
  Synthetic oligonucleotide
gacttgaggtggggatggggttaaccaagg

SEQ ID NO: 430703 - DNA, 30 bp, Artificial Sequence
  Synthetic oligonucleotide
gattttacgccccggagaggtttaccaagg

SEQ ID NO: 430704 - DNA, 30 bp, Artificial Sequence
  Synthetic oligonucleotide
tttattgaaaacgctaattacgcgccaagg

SEQ ID NO: 430705 - DNA, 30 bp, Artificial Sequence
  Synthetic oligonucleotide
ggtactattgtaactgaccgtggcgcaagg

SEQ ID NO: 430706 - DNA, 30 bp, Artificial Sequence
  Synthetic oligonucleotide
tccctataccattaatcgggtctggcaagg

SEQ ID NO: 430707 - DNA, 30 bp, Artificial Sequence
  Synthetic oligonucleotide
actcctaaaatacgagcaagtactgcaagg

SEQ ID NO: 430708 - DNA, 30 bp, Artificial Sequence
  Synthetic oligonucleotide
ggttttatccagagcttgccgtaatcaagg

SEQ ID NO: 430709 - DNA, 30 bp, Artificial Sequence
  Synthetic oligonucleotide
gcgcgggcttatgggggatttcgctcaagg

SEQ ID NO: 430710 - DNA, 30 bp, Artificial Sequence
  Synthetic oligonucleotide
ggataaaaataagtacttatagagtcaagg

SEQ ID NO: 430711 - DNA, 30 bp, Artificial Sequence
  Synthetic oligonucleotide
tttgagtctttatacattgaactgtcaagg

SEQ ID NO: 430712 - DNA, 30 bp, Artificial Sequence
  Synthetic oligonucleotide
tacgcatgatacgtaacgcggacttcaagg

SEQ ID NO: 430713 - DNA, 30 bp, Artificial Sequence
  Synthetic oligonucleotide
gtttgactagattttaggggtatttcaagg

SEQ ID NO: 430714 - DNA, 30 bp, Artificial Sequence
  Synthetic oligonucleotide
gagtgctattggcatgaaaagagaagaagg

SEQ ID NO: 430715 - DNA, 30 bp, Artificial Sequence
  Synthetic oligonucleotide
attaagctattctgcattttaataagaagg

SEQ ID NO: 430716 - DNA, 30 bp, Artificial Sequence
  Synthetic oligonucleotide
gaaacggatatatcagaatgtgtaagaagg

SEQ ID NO: 430717 - DNA, 30 bp, Artificial Sequence
  Synthetic oligonucleotide
tcaccttatgaaaagatgtcaaacagaagg

SEQ ID NO: 430718 - DNA, 30 bp, Artificial Sequence
  Synthetic oligonucleotide
aaaagtttcgcgtttttggcctatagaagg

SEQ ID NO: 430719 - DNA, 30 bp, Artificial Sequence
  Synthetic oligonucleotide
ccctaagttggtatcagaaagcaccgaagg

SEQ ID NO: 430720 - DNA, 30 bp, Artificial Sequence
  Synthetic oligonucleotide
tgtttacaggctgactttcgcgagcgaagg

SEQ ID NO: 430721 - DNA, 30 bp, Artificial Sequence
  Synthetic oligonucleotide
gtcgtaaggttgacgggacaggcgcgaagg

SEQ ID NO: 430722 - DNA, 30 bp, Artificial Sequence
  Synthetic oligonucleotide
attcctcgtttctgtccacacgtaggaagg

SEQ ID NO: 430723 - DNA, 30 bp, Artificial Sequence
  Synthetic oligonucleotide
ggttgactatgtccaggggcctccggaagg

SEQ ID NO: 430724 - DNA, 30 bp, Artificial Sequence
  Synthetic oligonucleotide
tttctaagttctgagcaagacagcggaagg

SEQ ID NO: 430725 - DNA, 30 bp, Artificial Sequence
  Synthetic oligonucleotide
gtatccatctgggagccttggacgggaagg

SEQ ID NO: 430726 - DNA, 30 bp, Artificial Sequence
  Synthetic oligonucleotide
gctagacgcgtgccaggggaacggggaagg

SEQ ID NO: 430727 - DNA, 30 bp, Artificial Sequence
  Synthetic oligonucleotide
taataacaaacgctggactttaatggaagg

SEQ ID NO: 430728 - DNA, 30 bp, Artificial Sequence
  Synthetic oligonucleotide
agcttgaccagagttatcgtgtatggaagg

SEQ ID NO: 430729 - DNA, 30 bp, Artificial Sequence
  Synthetic oligonucleotide
gcgacacgtattaacagtgccgctggaagg

SEQ ID NO: 430730 - DNA, 30 bp, Artificial Sequence
  Synthetic oligonucleotide
aagtgggtgtatcgcggctataggtgaagg

SEQ ID NO: 430731 - DNA, 30 bp, Artificial Sequence
  Synthetic oligonucleotide
taccgctgtcgctgggcagtagtgtgaagg

SEQ ID NO: 430732 - DNA, 30 bp, Artificial Sequence
  Synthetic oligonucleotide
tatcctttaatttacgtccatgtgtgaagg

SEQ ID NO: 430733 - DNA, 30 bp, Artificial Sequence
  Synthetic oligonucleotide
tactgcaatagtgttctgtatacttgaagg

SEQ ID NO: 430734 - DNA, 30 bp, Artificial Sequence
  Synthetic oligonucleotide
aataggatgatccgaacgatagtttgaagg

SEQ ID NO: 430735 - DNA, 30 bp, Artificial Sequence
  Synthetic oligonucleotide
acgatcagccaggtgtccggagcaataagg

SEQ ID NO: 430736 - DNA, 30 bp, Artificial Sequence
  Synthetic oligonucleotide
taacaagctcgcagttacccgagaataagg

SEQ ID NO: 430737 - DNA, 30 bp, Artificial Sequence
  Synthetic oligonucleotide
ttccaccctgggctcaaaccaggaataagg

SEQ ID NO: 430738 - DNA, 30 bp, Artificial Sequence
  Synthetic oligonucleotide
taacatgccaagctacgcacgtacataagg

SEQ ID NO: 430739 - DNA, 30 bp, Artificial Sequence
  Synthetic oligonucleotide
ggggaaggattgatatgttatcggataagg

SEQ ID NO: 430740 - DNA, 30 bp, Artificial Sequence
  Synthetic oligonucleotide
tagaatcgtgtggggctattttctataagg

SEQ ID NO: 430741 - DNA, 30 bp, Artificial Sequence
  Synthetic oligonucleotide
ttgcaagcggtatttggttacggtataagg

SEQ ID NO: 430742 - DNA, 30 bp, Artificial Sequence
  Synthetic oligonucleotide
gtgtacaggattttacatcatcttataagg

SEQ ID NO: 430743 - DNA, 30 bp, Artificial Sequence
  Synthetic oligonucleotide
ttcgtaataaataatggggcatcactaagg

SEQ ID NO: 430744 - DNA, 30 bp, Artificial Sequence
  Synthetic oligonucleotide
ctacaacatgtgagaaatgattcactaagg

SEQ ID NO: 430745 - DNA, 30 bp, Artificial Sequence
  Synthetic oligonucleotide
caatcttagagtctgcatccagagctaagg

SEQ ID NO: 430746 - DNA, 30 bp, Artificial Sequence
  Synthetic oligonucleotide
tcgcctcacaacgggtgaacacggctaagg

SEQ ID NO: 430747 - DNA, 30 bp, Artificial Sequence
  Synthetic oligonucleotide
gaatacttctcctaaaaggtgaatctaagg

SEQ ID NO: 430748 - DNA, 30 bp, Artificial Sequence
  Synthetic oligonucleotide
gctcgcagtctaagacctgtgtatctaagg

SEQ ID NO: 430749 - DNA, 30 bp, Artificial Sequence
  Synthetic oligonucleotide
gtccgtaacgcacgtttttccactctaagg

SEQ ID NO: 430750 - DNA, 30 bp, Artificial Sequence
  Synthetic oligonucleotide
tgtgagcgtgcagctttggaagttctaagg

SEQ ID NO: 430751 - DNA, 30 bp, Artificial Sequence
  Synthetic oligonucleotide
ttctgggttatagtacaaacattagtaagg

SEQ ID NO: 430752 - DNA, 30 bp, Artificial Sequence
  Synthetic oligonucleotide
gaacctgcgagtgatggactatccgtaagg

SEQ ID NO: 430753 - DNA, 30 bp, Artificial Sequence
  Synthetic oligonucleotide
gtctagctagcaaccgatttgcaggtaagg

SEQ ID NO: 430754 - DNA, 30 bp, Artificial Sequence
  Synthetic oligonucleotide
ttcggccgctctcgactcgattgggtaagg

SEQ ID NO: 430755 - DNA, 30 bp, Artificial Sequence
  Synthetic oligonucleotide
ctaaaaccgtgtgaattttcggctgtaagg

SEQ ID NO: 430756 - DNA, 30 bp, Artificial Sequence
  Synthetic oligonucleotide
caattatctcaaacaattctaagattaagg

SEQ ID NO: 430757 - DNA, 30 bp, Artificial Sequence
  Synthetic oligonucleotide
tatattttataactggcaacgtccttaagg

SEQ ID NO: 430758 - DNA, 30 bp, Artificial Sequence
  Synthetic oligonucleotide
gaggtatgcacgttagcgtctaagttaagg

SEQ ID NO: 430759 - DNA, 30 bp, Artificial Sequence
  Synthetic oligonucleotide
gtagcgacctcgaccccgattgatttaagg

SEQ ID NO: 430760 - DNA, 30 bp, Artificial Sequence
  Synthetic oligonucleotide
ggggaatcgggttcgttagtacctttaagg

SEQ ID NO: 430761 - DNA, 30 bp, Artificial Sequence
  Synthetic oligonucleotide
gacattcatgctttttagttagtaaacagg

SEQ ID NO: 430762 - DNA, 30 bp, Artificial Sequence
  Synthetic oligonucleotide
aatctgggctgtactccctgaatcaacagg

SEQ ID NO: 430763 - DNA, 30 bp, Artificial Sequence
  Synthetic oligonucleotide
gaaaacgatctttcctcacaggataacagg

SEQ ID NO: 430764 - DNA, 30 bp, Artificial Sequence
  Synthetic oligonucleotide
tttatttggataggaggtggagctaacagg

SEQ ID NO: 430765 - DNA, 30 bp, Artificial Sequence
  Synthetic oligonucleotide
ccgggttttcccacatacctgttacacagg

SEQ ID NO: 430766 - DNA, 30 bp, Artificial Sequence
  Synthetic oligonucleotide
cgtggtacgatctgtggagacaaccacagg

SEQ ID NO: 430767 - DNA, 29 bp, Artificial Sequence
  Synthetic oligonucleotide
caaatacaagctttgtgaaaacgcacagg

SEQ ID NO: 430768 - DNA, 30 bp, Artificial Sequence
  Synthetic oligonucleotide
agtaccgcacataggtgcgaatccgacagg

SEQ ID NO: 430769 - DNA, 30 bp, Artificial Sequence
  Synthetic oligonucleotide
gccgccctagtaatggaatgacaggacagg

SEQ ID NO: 430770 - DNA, 30 bp, Artificial Sequence
  Synthetic oligonucleotide
cggcggggtatgagggtctactaggacagg

SEQ ID NO: 430771 - DNA, 30 bp, Artificial Sequence
  Synthetic oligonucleotide
gctacccgtcgggtgcagaggtcggacagg

SEQ ID NO: 430772 - DNA, 30 bp, Artificial Sequence
  Synthetic oligonucleotide
tttagatttaaaatgttaagttctgacagg

SEQ ID NO: 430773 - DNA, 30 bp, Artificial Sequence
  Synthetic oligonucleotide
acaacaaacaaagagcaagtacgatacagg

SEQ ID NO: 430774 - DNA, 30 bp, Artificial Sequence
  Synthetic oligonucleotide
gtgtggttccgtcagcgactctgatacagg

SEQ ID NO: 430775 - DNA, 30 bp, Artificial Sequence
  Synthetic oligonucleotide
ttggccagaaaaaagctacttccctacagg

SEQ ID NO: 430776 - DNA, 30 bp, Artificial Sequence
  Synthetic oligonucleotide
ttccattgatgcctgcaatcaggctacagg

SEQ ID NO: 430777 - DNA, 30 bp, Artificial Sequence
  Synthetic oligonucleotide
ggactcagtgtactatagatatattacagg

SEQ ID NO: 430778 - DNA, 30 bp, Artificial Sequence
  Synthetic oligonucleotide
gttcttaagggtcgatattgctcgaccagg

SEQ ID NO: 430779 - DNA, 30 bp, Artificial Sequence
  Synthetic oligonucleotide
ggtggtgatatgtggataatatataccagg

SEQ ID NO: 430780 - DNA, 30 bp, Artificial Sequence
  Synthetic oligonucleotide
gagtcatattatggccataaaactaccagg

SEQ ID NO: 430781 - DNA, 30 bp, Artificial Sequence
  Synthetic oligonucleotide
attgtcgcctttagctactctatacccagg

SEQ ID NO: 430782 - DNA, 30 bp, Artificial Sequence
  Synthetic oligonucleotide
gatggggtttaatattacggagtacccagg

SEQ ID NO: 430783 - DNA, 30 bp, Artificial Sequence
  Synthetic oligonucleotide
ggccctgtagtcactcaattggaccccagg

SEQ ID NO: 430784 - DNA, 30 bp, Artificial Sequence
  Synthetic oligonucleotide
ctaacgttttcctcgtttgcatacgccagg

SEQ ID NO: 430785 - DNA, 30 bp, Artificial Sequence
  Synthetic oligonucleotide
gagtgagcctgtcggttgtatcgatccagg

SEQ ID NO: 430786 - DNA, 30 bp, Artificial Sequence
  Synthetic oligonucleotide
ggatgatctggtctgggggtaaactccagg

SEQ ID NO: 430787 - DNA, 30 bp, Artificial Sequence
  Synthetic oligonucleotide
tctaacatatctagtttctagatgtccagg

SEQ ID NO: 430788 - DNA, 29 bp, Artificial Sequence
  Synthetic oligonucleotide
gagactgcacaaccttgttattgtccagg

SEQ ID NO: 430789 - DNA, 30 bp, Artificial Sequence
  Synthetic oligonucleotide
cggtgcaatttctccaaggtatattccagg

SEQ ID NO: 430790 - DNA, 30 bp, Artificial Sequence
  Synthetic oligonucleotide
ctggccgcaacgtgtttgttagaaagcagg

SEQ ID NO: 430791 - DNA, 30 bp, Artificial Sequence
  Synthetic oligonucleotide
gttcagtaaccatcggtagcatgcagcagg

SEQ ID NO: 430792 - DNA, 30 bp, Artificial Sequence
  Synthetic oligonucleotide
gatctggtgattgtccccgcgaagagcagg

SEQ ID NO: 430793 - DNA, 30 bp, Artificial Sequence
  Synthetic oligonucleotide
ttcacctggtactccattgtcgagagcagg

SEQ ID NO: 430794 - DNA, 30 bp, Artificial Sequence
  Synthetic oligonucleotide
tttttgagtgctcccgttacctcgagcagg

SEQ ID NO: 430795 - DNA, 30 bp, Artificial Sequence
  Synthetic oligonucleotide
aatccggagcagggctaggttactagcagg

SEQ ID NO: 430796 - DNA, 30 bp, Artificial Sequence
  Synthetic oligonucleotide
ggaatcgatgatgctgctgtggctagcagg

SEQ ID NO: 430797 - DNA, 30 bp, Artificial Sequence
  Synthetic oligonucleotide
cggcacgcggtatgcgggctgcgtagcagg

SEQ ID NO: 430798 - DNA, 30 bp, Artificial Sequence
  Synthetic oligonucleotide
cgaataacggtagcgtgccttacacgcagg

SEQ ID NO: 430799 - DNA, 30 bp, Artificial Sequence
  Synthetic oligonucleotide
gggacgtcataaacttgtgctccacgcagg

SEQ ID NO: 430800 - DNA, 30 bp, Artificial Sequence
  Synthetic oligonucleotide
gattttcgagcgtaatcatactcacgcagg

SEQ ID NO: 430801 - DNA, 30 bp, Artificial Sequence
  Synthetic oligonucleotide
cttgtacttcgtgaaagagggagacgcagg

SEQ ID NO: 430802 - DNA, 30 bp, Artificial Sequence
  Synthetic oligonucleotide
gtcgcacgagcttattctagacaccgcagg

SEQ ID NO: 430803 - DNA, 30 bp, Artificial Sequence
  Synthetic oligonucleotide
catttcatgaagacggcggtacagcgcagg

SEQ ID NO: 430804 - DNA, 30 bp, Artificial Sequence
  Synthetic oligonucleotide
gctcgcacggtggtaaaatataggcgcagg

SEQ ID NO: 430805 - DNA, 30 bp, Artificial Sequence
  Synthetic oligonucleotide
tctataacgtagaacctaggctggcgcagg

SEQ ID NO: 430806 - DNA, 30 bp, Artificial Sequence
  Synthetic oligonucleotide
cccaatctgcttgagctttgccgaggcagg

SEQ ID NO: 430807 - DNA, 30 bp, Artificial Sequence
  Synthetic oligonucleotide
aataaaatcatgggccagcacataggcagg

SEQ ID NO: 430808 - DNA, 30 bp, Artificial Sequence
  Synthetic oligonucleotide
ctggaaggaagaggctccataggatgcagg

SEQ ID NO: 430809 - DNA, 30 bp, Artificial Sequence
  Synthetic oligonucleotide
cgagctggagcgggggacgcggggtgcagg

SEQ ID NO: 430810 - DNA, 30 bp, Artificial Sequence
  Synthetic oligonucleotide
tatgtaatttatgtaaaaggctggtgcagg

SEQ ID NO: 430811 - DNA, 30 bp, Artificial Sequence
  Synthetic oligonucleotide
gggattaggtgtgggtctttagattgcagg

SEQ ID NO: 430812 - DNA, 30 bp, Artificial Sequence
  Synthetic oligonucleotide
gagaggtaactgggattattcgcttgcagg

SEQ ID NO: 430813 - DNA, 30 bp, Artificial Sequence
  Synthetic oligonucleotide
ccactttatcaggtccgcgaagccatcagg

SEQ ID NO: 430814 - DNA, 30 bp, Artificial Sequence
  Synthetic oligonucleotide
cctatacgctgcgacttacggaatatcagg

SEQ ID NO: 430815 - DNA, 30 bp, Artificial Sequence
  Synthetic oligonucleotide
ggggatacgagatacgactgtactatcagg

SEQ ID NO: 430816 - DNA, 30 bp, Artificial Sequence
  Synthetic oligonucleotide
ccggaacgcggcttgtccctcctactcagg

SEQ ID NO: 430817 - DNA, 30 bp, Artificial Sequence
  Synthetic oligonucleotide
tattccgatataaggcgctaccggctcagg

SEQ ID NO: 430818 - DNA, 30 bp, Artificial Sequence
  Synthetic oligonucleotide
tactatggaacaaggggtagctggctcagg

SEQ ID NO: 430819 - DNA, 30 bp, Artificial Sequence
  Synthetic oligonucleotide
tggcttcgttcggtatcccgtaaggtcagg

SEQ ID NO: 430820 - DNA, 30 bp, Artificial Sequence
  Synthetic oligonucleotide
ggcctttggtatcgggcaccgggggtcagg

SEQ ID NO: 430821 - DNA, 30 bp, Artificial Sequence
  Synthetic oligonucleotide
gtatacactgaaccaaagtcgctattcagg

SEQ ID NO: 430822 - DNA, 30 bp, Artificial Sequence
  Synthetic oligonucleotide
acatgacgaagacaaacaagaaatttcagg

SEQ ID NO: 430823 - DNA, 30 bp, Artificial Sequence
  Synthetic oligonucleotide
agaaatagattgtgcaaacatcatttcagg

SEQ ID NO: 430824 - DNA, 30 bp, Artificial Sequence
  Synthetic oligonucleotide
gcacatgcaaatgtgaagagcattttcagg

SEQ ID NO: 430825 - DNA, 30 bp, Artificial Sequence
  Synthetic oligonucleotide
gcgatggtgggtcccttaggtggaaagagg

SEQ ID NO: 430826 - DNA, 30 bp, Artificial Sequence
  Synthetic oligonucleotide
tttgctcttcctcggcaagcgtgaaagagg

SEQ ID NO: 430827 - DNA, 30 bp, Artificial Sequence
  Synthetic oligonucleotide
acattatcctggcatcaatggaagaagagg

SEQ ID NO: 430828 - DNA, 30 bp, Artificial Sequence
  Synthetic oligonucleotide
tcttagtcggctcactcttcgtcgaagagg

SEQ ID NO: 430829 - DNA, 30 bp, Artificial Sequence
  Synthetic oligonucleotide
ttgaggacacggccactaaaagttaagagg

SEQ ID NO: 430830 - DNA, 30 bp, Artificial Sequence
  Synthetic oligonucleotide
tggagacagtttgtttcttgaaaacagagg

SEQ ID NO: 430831 - DNA, 30 bp, Artificial Sequence
  Synthetic oligonucleotide
aattttctagctggagtattaagccagagg

SEQ ID NO: 430832 - DNA, 30 bp, Artificial Sequence
  Synthetic oligonucleotide
aattgaaaacggtgcatttttcatcagagg

SEQ ID NO: 430833 - DNA, 30 bp, Artificial Sequence
  Synthetic oligonucleotide
catgaataataatatggacgccgtcagagg

SEQ ID NO: 430834 - DNA, 30 bp, Artificial Sequence
  Synthetic oligonucleotide
accctgggtgcttgtacggaggtagagagg

SEQ ID NO: 430835 - DNA, 30 bp, Artificial Sequence
  Synthetic oligonucleotide
gaccggtagtccctacggtatgacgagagg

SEQ ID NO: 430836 - DNA, 30 bp, Artificial Sequence
  Synthetic oligonucleotide
ttccgttcaatgaagcgtccctaggagagg

SEQ ID NO: 430837 - DNA, 30 bp, Artificial Sequence
  Synthetic oligonucleotide
gactctcattcctcagttagcaatgagagg

SEQ ID NO: 430838 - DNA, 30 bp, Artificial Sequence
  Synthetic oligonucleotide
gatagccagcacccaggtgccgatgagagg

SEQ ID NO: 430839 - DNA, 30 bp, Artificial Sequence
  Synthetic oligonucleotide
gttaaacattgtccctcacttccatagagg

SEQ ID NO: 430840 - DNA, 30 bp, Artificial Sequence
  Synthetic oligonucleotide
acgcccggaagggcttcgttgtactagagg

SEQ ID NO: 430841 - DNA, 30 bp, Artificial Sequence
  Synthetic oligonucleotide
ctcttgcggatccgttggcaccagtagagg

SEQ ID NO: 430842 - DNA, 30 bp, Artificial Sequence
  Synthetic oligonucleotide
ctcaaagttaatcaggcagcgaggtagagg

SEQ ID NO: 430843 - DNA, 30 bp, Artificial Sequence
  Synthetic oligonucleotide
tttccaggattgccgtatggcatgtagagg

SEQ ID NO: 430844 - DNA, 30 bp, Artificial Sequence
  Synthetic oligonucleotide
gcaggggcctcactttacgaggccacgagg

SEQ ID NO: 430845 - DNA, 30 bp, Artificial Sequence
  Synthetic oligonucleotide
aaacttaatggggttgggggaggcacgagg

SEQ ID NO: 430846 - DNA, 30 bp, Artificial Sequence
  Synthetic oligonucleotide
aggagcagtatccttaatgcagggacgagg

SEQ ID NO: 430847 - DNA, 30 bp, Artificial Sequence
  Synthetic oligonucleotide
cctggccaccgaaattagcgagggacgagg

SEQ ID NO: 430848 - DNA, 30 bp, Artificial Sequence
  Synthetic oligonucleotide
ggcaagtagtgcctatagcccactacgagg

SEQ ID NO: 430849 - DNA, 30 bp, Artificial Sequence
  Synthetic oligonucleotide
atctgcacgtgctcgtctttagctacgagg

SEQ ID NO: 430850 - DNA, 30 bp, Artificial Sequence
  Synthetic oligonucleotide
ggggcgtgcatccgcttcgtagcaccgagg

SEQ ID NO: 430851 - DNA, 30 bp, Artificial Sequence
  Synthetic oligonucleotide
attgccggcatgtatacaccggcaccgagg

SEQ ID NO: 430852 - DNA, 30 bp, Artificial Sequence
  Synthetic oligonucleotide
ccgcttgcacagctgagcaccaccccgagg

SEQ ID NO: 430853 - DNA, 30 bp, Artificial Sequence
  Synthetic oligonucleotide
cccgtgattggctggacataggcgccgagg

SEQ ID NO: 430854 - DNA, 30 bp, Artificial Sequence
  Synthetic oligonucleotide
tggtttctggcaggcctgacagggccgagg

SEQ ID NO: 430855 - DNA, 30 bp, Artificial Sequence
  Synthetic oligonucleotide
aaagatgatttgctgctccgccaagcgagg

SEQ ID NO: 430856 - DNA, 31 bp, Artificial Sequence
  Synthetic oligonucleotide
tctttgtggcaaaggtagtattcaagcgagg

SEQ ID NO: 430857 - DNA, 31 bp, Artificial Sequence
  Synthetic oligonucleotide
ctgactaggcctctaatggcgcaacgcgagg

SEQ ID NO: 430858 - DNA, 30 bp, Artificial Sequence
  Synthetic oligonucleotide
ttaacccggctgtttccattcaacgcgagg

SEQ ID NO: 430859 - DNA, 30 bp, Artificial Sequence
  Synthetic oligonucleotide
agatgctttccggggcaatctaccgcgagg

SEQ ID NO: 430860 - DNA, 30 bp, Artificial Sequence
  Synthetic oligonucleotide
tatggcccatgctcacgcacgcgggcgagg

SEQ ID NO: 430861 - DNA, 30 bp, Artificial Sequence
  Synthetic oligonucleotide
atggcgcattacgcgttatacgtttcgagg

SEQ ID NO: 430862 - DNA, 30 bp, Artificial Sequence
  Synthetic oligonucleotide
gtgcggtgatcccgcctctaaaaaaggagg

SEQ ID NO: 430863 - DNA, 30 bp, Artificial Sequence
  Synthetic oligonucleotide
cagaatccaatccaggtcttctcaaggagg

SEQ ID NO: 430864 - DNA, 30 bp, Artificial Sequence
  Synthetic oligonucleotide
cgatcgtggagcgctgtggcgataaggagg

SEQ ID NO: 430865 - DNA, 30 bp, Artificial Sequence
  Synthetic oligonucleotide
ggggcggaggatcagatggacgacaggagg

SEQ ID NO: 430866 - DNA, 30 bp, Artificial Sequence
  Synthetic oligonucleotide
gctttcacgcgcggctgtgaaagcaggagg

SEQ ID NO: 430867 - DNA, 30 bp, Artificial Sequence
  Synthetic oligonucleotide
ggccacgggtgcgcagaatccgcgaggagg

SEQ ID NO: 430868 - DNA, 30 bp, Artificial Sequence
  Synthetic oligonucleotide
taaggtgtagtcacttgggacatgaggagg

SEQ ID NO: 430869 - DNA, 30 bp, Artificial Sequence
  Synthetic oligonucleotide
atatggtttgaaccgagtagtagtaggagg

SEQ ID NO: 430870 - DNA, 30 bp, Artificial Sequence
  Synthetic oligonucleotide
ccagcaagctgcctccatggcgaccggagg

SEQ ID NO: 430871 - DNA, 30 bp, Artificial Sequence
  Synthetic oligonucleotide
ggaatatcttgggtaccctgtccccggagg

SEQ ID NO: 430872 - DNA, 30 bp, Artificial Sequence
  Synthetic oligonucleotide
gaaacggcgacgcacatggtctgtcggagg

SEQ ID NO: 430873 - DNA, 30 bp, Artificial Sequence
  Synthetic oligonucleotide
ggcagcaccaagcgttgaacccttcggagg

SEQ ID NO: 430874 - DNA, 30 bp, Artificial Sequence
  Synthetic oligonucleotide
cccgctgttaccacgggtggagaagggagg

SEQ ID NO: 430875 - DNA, 30 bp, Artificial Sequence
  Synthetic oligonucleotide
tgtcattttgggggcctctacgtagggagg

SEQ ID NO: 430876 - DNA, 30 bp, Artificial Sequence
  Synthetic oligonucleotide
cccgagaggcagacgtatccgtgcgggagg

SEQ ID NO: 430877 - DNA, 30 bp, Artificial Sequence
  Synthetic oligonucleotide
tagggccccgcacttggaaaggaggggagg

SEQ ID NO: 430878 - DNA, 30 bp, Artificial Sequence
  Synthetic oligonucleotide
atcgggaagctcatgctactcccggggagg

SEQ ID NO: 430879 - DNA, 30 bp, Artificial Sequence
  Synthetic oligonucleotide
tttatcttatacgatgtatcatctgggagg

SEQ ID NO: 430880 - DNA, 30 bp, Artificial Sequence
  Synthetic oligonucleotide
tggagggtaagttgcgcatccggtgggagg

SEQ ID NO: 430881 - DNA, 30 bp, Artificial Sequence
  Synthetic oligonucleotide
gtcctaacacgctggtcaagcgttgggagg

SEQ ID NO: 430882 - DNA, 30 bp, Artificial Sequence
  Synthetic oligonucleotide
tctcggattggtgggttgaccctatggagg

SEQ ID NO: 430883 - DNA, 30 bp, Artificial Sequence
  Synthetic oligonucleotide
atctagtcaaagagaactaatcactggagg

SEQ ID NO: 430884 - DNA, 30 bp, Artificial Sequence
  Synthetic oligonucleotide
cgcattacacccgtcgttgttcgctggagg

SEQ ID NO: 430885 - DNA, 30 bp, Artificial Sequence
  Synthetic oligonucleotide
tttgtgcactcaattcgacaagtctggagg

SEQ ID NO: 430886 - DNA, 30 bp, Artificial Sequence
  Synthetic oligonucleotide
cccgtcatgtaaccatggtctccgtggagg

SEQ ID NO: 430887 - DNA, 30 bp, Artificial Sequence
  Synthetic oligonucleotide
ttgtcacttagtattaggggtttgtggagg

SEQ ID NO: 430888 - DNA, 30 bp, Artificial Sequence
  Synthetic oligonucleotide
ggcctgataccggaggtttgttattggagg

SEQ ID NO: 430889 - DNA, 30 bp, Artificial Sequence
  Synthetic oligonucleotide
acccctgtacgaactgggctacgttggagg

SEQ ID NO: 430890 - DNA, 30 bp, Artificial Sequence
  Synthetic oligonucleotide
aaatgtatggatacagccgttccgatgagg

SEQ ID NO: 430891 - DNA, 30 bp, Artificial Sequence
  Synthetic oligonucleotide
attctggtcattaatgtggttgatatgagg

SEQ ID NO: 430892 - DNA, 30 bp, Artificial Sequence
  Synthetic oligonucleotide
cggccagcgccttttcgttggcgactgagg

SEQ ID NO: 430893 - DNA, 30 bp, Artificial Sequence
  Synthetic oligonucleotide
ttctgagcctaacgtacctagatactgagg

SEQ ID NO: 430894 - DNA, 30 bp, Artificial Sequence
  Synthetic oligonucleotide
ctggcttttgcggtggatcaccacctgagg

SEQ ID NO: 430895 - DNA, 30 bp, Artificial Sequence
  Synthetic oligonucleotide
gtctgtggcggagcacattcctggctgagg

SEQ ID NO: 430896 - DNA, 30 bp, Artificial Sequence
  Synthetic oligonucleotide
aatgtggtcacgcccataacccccgtgagg

SEQ ID NO: 430897 - DNA, 30 bp, Artificial Sequence
  Synthetic oligonucleotide
tgacccaggtctgcactaaaggctgtgagg

SEQ ID NO: 430898 - DNA, 30 bp, Artificial Sequence
  Synthetic oligonucleotide
gggtgctggtgtgggtacacgggtgtgagg

SEQ ID NO: 430899 - DNA, 30 bp, Artificial Sequence
  Synthetic oligonucleotide
tatttgattagtcctggggcggttgtgagg

SEQ ID NO: 430900 - DNA, 30 bp, Artificial Sequence
  Synthetic oligonucleotide
ctaaagacatgtagctctgcgcaattgagg

SEQ ID NO: 430901 - DNA, 29 bp, Artificial Sequence
  Synthetic oligonucleotide
ataaagggcgctccgttaccagcttgagg

SEQ ID NO: 430902 - DNA, 30 bp, Artificial Sequence
  Synthetic oligonucleotide
tgtttgaaagtacgctaagttcatttgagg

SEQ ID NO: 430903 - DNA, 30 bp, Artificial Sequence
  Synthetic oligonucleotide
gtttatcgagaagccgttacatatttgagg

SEQ ID NO: 430904 - DNA, 30 bp, Artificial Sequence
  Synthetic oligonucleotide
ttaccgtgatatgtgcaaatatatttgagg

SEQ ID NO: 430905 - DNA, 30 bp, Artificial Sequence
  Synthetic oligonucleotide
aaatggttacgcgttgcggtgcgtttgagg

SEQ ID NO: 430906 - DNA, 30 bp, Artificial Sequence
  Synthetic oligonucleotide
tgacttttatcggatattatctttttgagg

SEQ ID NO: 430907 - DNA, 30 bp, Artificial Sequence
  Synthetic oligonucleotide
ctgtagacttgttacctatgtgtaaatagg

SEQ ID NO: 430908 - DNA, 30 bp, Artificial Sequence
  Synthetic oligonucleotide
gatcttgtgaaaaactgtctgttaaatagg

SEQ ID NO: 430909 - DNA, 30 bp, Artificial Sequence
  Synthetic oligonucleotide
ggctcagccacttcttcacgccccaatagg

SEQ ID NO: 430910 - DNA, 30 bp, Artificial Sequence
  Synthetic oligonucleotide
ccacgcgctgcgcacaagagaatcaatagg

SEQ ID NO: 430911 - DNA, 30 bp, Artificial Sequence
  Synthetic oligonucleotide
gatttgcagaattgcctttctagtaatagg

SEQ ID NO: 430912 - DNA, 30 bp, Artificial Sequence
  Synthetic oligonucleotide
ctcctacacctcacgccatgaggtaatagg

SEQ ID NO: 430913 - DNA, 30 bp, Artificial Sequence
  Synthetic oligonucleotide
ctttaggtccgcggctgttccattaatagg

SEQ ID NO: 430914 - DNA, 30 bp, Artificial Sequence
  Synthetic oligonucleotide
gaccactcaagcgtctgatccacacatagg

SEQ ID NO: 430915 - DNA, 30 bp, Artificial Sequence
  Synthetic oligonucleotide
aaagccatgaaactaacaggcgggcatagg

SEQ ID NO: 430916 - DNA, 30 bp, Artificial Sequence
  Synthetic oligonucleotide
agaccaggaaatgacggggacccagatagg

SEQ ID NO: 430917 - DNA, 30 bp, Artificial Sequence
  Synthetic oligonucleotide
tcccgagtggcacgcggtcacggagatagg

SEQ ID NO: 430918 - DNA, 30 bp, Artificial Sequence
  Synthetic oligonucleotide
aacccgttggtattccactcggcggatagg

SEQ ID NO: 430919 - DNA, 30 bp, Artificial Sequence
  Synthetic oligonucleotide
gcccgagtactctcagaatcacgggatagg

SEQ ID NO: 430920 - DNA, 30 bp, Artificial Sequence
  Synthetic oligonucleotide
tcgatccgcgtatgcgaggctcgggatagg

SEQ ID NO: 430921 - DNA, 30 bp, Artificial Sequence
  Synthetic oligonucleotide
ttggccaagagaacaccgaaggtggatagg

SEQ ID NO: 430922 - DNA, 30 bp, Artificial Sequence
  Synthetic oligonucleotide
ttgggtattccgactctcagttctgatagg

SEQ ID NO: 430923 - DNA, 30 bp, Artificial Sequence
  Synthetic oligonucleotide
aaggtatatgatattatctgcaaatatagg

SEQ ID NO: 430924 - DNA, 30 bp, Artificial Sequence
  Synthetic oligonucleotide
gtagtttcacggtcctacgataactatagg

SEQ ID NO: 430925 - DNA, 30 bp, Artificial Sequence
  Synthetic oligonucleotide
gatttttcgtccaattaagccctctatagg

SEQ ID NO: 430926 - DNA, 30 bp, Artificial Sequence
  Synthetic oligonucleotide
gtttttaaacctaccatgccttagtatagg

SEQ ID NO: 430927 - DNA, 30 bp, Artificial Sequence
  Synthetic oligonucleotide
aaaggctaaccccaaccggggatttatagg

SEQ ID NO: 430928 - DNA, 30 bp, Artificial Sequence
  Synthetic oligonucleotide
cgactttcaacagctgacgtagtaactagg

SEQ ID NO: 430929 - DNA, 30 bp, Artificial Sequence
  Synthetic oligonucleotide
agaccgttatcggcccgcagacacactagg

SEQ ID NO: 430930 - DNA, 30 bp, Artificial Sequence
  Synthetic oligonucleotide
agtaagccgcggctcagacctgagactagg

SEQ ID NO: 430931 - DNA, 30 bp, Artificial Sequence
  Synthetic oligonucleotide
ggaaccgcattttttccggcatcgactagg

SEQ ID NO: 430932 - DNA, 30 bp, Artificial Sequence
  Synthetic oligonucleotide
aaattgtgatcgcgacattaactgactagg

SEQ ID NO: 430933 - DNA, 30 bp, Artificial Sequence
  Synthetic oligonucleotide
tctgcagaggtcacctttctagatactagg

SEQ ID NO: 430934 - DNA, 30 bp, Artificial Sequence
  Synthetic oligonucleotide
ttctcgggcaattataaatcgagtactagg

SEQ ID NO: 430935 - DNA, 30 bp, Artificial Sequence
  Synthetic oligonucleotide
tgaacaagtacctaggcagtccttactagg

SEQ ID NO: 430936 - DNA, 30 bp, Artificial Sequence
  Synthetic oligonucleotide
aatagtgcactctctatggagaaccctagg

SEQ ID NO: 430937 - DNA, 30 bp, Artificial Sequence
  Synthetic oligonucleotide
aagggctcagttttttcttactatcctagg

SEQ ID NO: 430938 - DNA, 30 bp, Artificial Sequence
  Synthetic oligonucleotide
agtatttatataaaaaatgagcccgctagg

SEQ ID NO: 430939 - DNA, 30 bp, Artificial Sequence
  Synthetic oligonucleotide
atacagcactacactgcgtcgagcgctagg

SEQ ID NO: 430940 - DNA, 30 bp, Artificial Sequence
  Synthetic oligonucleotide
gcccgcgctagctatgactaaaaggctagg

SEQ ID NO: 430941 - DNA, 30 bp, Artificial Sequence
  Synthetic oligonucleotide
agggcgcattattttttggaggtggctagg

SEQ ID NO: 430942 - DNA, 30 bp, Artificial Sequence
  Synthetic oligonucleotide
cccaaccgggggtattatacataatctagg

SEQ ID NO: 430943 - DNA, 30 bp, Artificial Sequence
  Synthetic oligonucleotide
acaagacttgtatagtcaatggcatctagg

SEQ ID NO: 430944 - DNA, 30 bp, Artificial Sequence
  Synthetic oligonucleotide
caaccacttatccacggttcggtatctagg

SEQ ID NO: 430945 - DNA, 30 bp, Artificial Sequence
  Synthetic oligonucleotide
tcgttcaacacaagtaccgggcgctctagg

SEQ ID NO: 430946 - DNA, 30 bp, Artificial Sequence
  Synthetic oligonucleotide
cccctagcgtgccccaattcataaagtagg

SEQ ID NO: 430947 - DNA, 30 bp, Artificial Sequence
  Synthetic oligonucleotide
aaatgtttagtgtgatgaagtatgagtagg

SEQ ID NO: 430948 - DNA, 30 bp, Artificial Sequence
  Synthetic oligonucleotide
aacgcgttcttctacaatgctggtagtagg

SEQ ID NO: 430949 - DNA, 30 bp, Artificial Sequence
  Synthetic oligonucleotide
ctctatctggatgttgctggttgtagtagg

SEQ ID NO: 430950 - DNA, 30 bp, Artificial Sequence
  Synthetic oligonucleotide
cattagcctccgggatccaatattagtagg

SEQ ID NO: 430951 - DNA, 30 bp, Artificial Sequence
  Synthetic oligonucleotide
tgtagcctcaatttgacggtgtttagtagg

SEQ ID NO: 430952 - DNA, 30 bp, Artificial Sequence
  Synthetic oligonucleotide
gatgaccacgagcctttgtgacaacgtagg

SEQ ID NO: 430953 - DNA, 30 bp, Artificial Sequence
  Synthetic oligonucleotide
tacgctcctcagctttagtttgaacgtagg

SEQ ID NO: 430954 - DNA, 30 bp, Artificial Sequence
  Synthetic oligonucleotide
aattttattccaggtgtaaggagacgtagg

SEQ ID NO: 430955 - DNA, 30 bp, Artificial Sequence
  Synthetic oligonucleotide
gcatatcatgtcttaagttggtgccgtagg

SEQ ID NO: 430956 - DNA, 30 bp, Artificial Sequence
  Synthetic oligonucleotide
ataaaaagacgtcgcgcagtcaagcgtagg

SEQ ID NO: 430957 - DNA, 30 bp, Artificial Sequence
  Synthetic oligonucleotide
gctttgtatactattggagagacgcgtagg

SEQ ID NO: 430958 - DNA, 30 bp, Artificial Sequence
  Synthetic oligonucleotide
tcaaggtaatacgcttgatgtccgcgtagg

SEQ ID NO: 430959 - DNA, 30 bp, Artificial Sequence
  Synthetic oligonucleotide
tttaacatttaacgatagcacgctcgtagg

SEQ ID NO: 430960 - DNA, 30 bp, Artificial Sequence
  Synthetic oligonucleotide
gtttgttttcgtcggtctagagttcgtagg

SEQ ID NO: 430961 - DNA, 30 bp, Artificial Sequence
  Synthetic oligonucleotide
gcaaccgcgtttatattgctatttcgtagg

SEQ ID NO: 430962 - DNA, 30 bp, Artificial Sequence
  Synthetic oligonucleotide
ataactaggatccagaggggtacaggtagg

SEQ ID NO: 430963 - DNA, 30 bp, Artificial Sequence
  Synthetic oligonucleotide
ttcgattagtgtgaccaagaaagcggtagg

SEQ ID NO: 430964 - DNA, 30 bp, Artificial Sequence
  Synthetic oligonucleotide
taatacgatggttttaaccggtgcggtagg

SEQ ID NO: 430965 - DNA, 30 bp, Artificial Sequence
  Synthetic oligonucleotide
ctatctgtccgtcttctattgcatggtagg

SEQ ID NO: 430966 - DNA, 30 bp, Artificial Sequence
  Synthetic oligonucleotide
ctcattggcatataacggtattctggtagg

SEQ ID NO: 430967 - DNA, 30 bp, Artificial Sequence
  Synthetic oligonucleotide
aaacacgggcattatgtcatgtgtggtagg

SEQ ID NO: 430968 - DNA, 30 bp, Artificial Sequence
  Synthetic oligonucleotide
gtctactcgggacgtgagcctgtatgtagg

SEQ ID NO: 430969 - DNA, 30 bp, Artificial Sequence
  Synthetic oligonucleotide
gacgttgtagaatttatatctgactgtagg

SEQ ID NO: 430970 - DNA, 30 bp, Artificial Sequence
  Synthetic oligonucleotide
tgagcagtgagcctctgctggggctgtagg

SEQ ID NO: 430971 - DNA, 30 bp, Artificial Sequence
  Synthetic oligonucleotide
tgcatttatgaagtgcgagttatctgtagg

SEQ ID NO: 430972 - DNA, 30 bp, Artificial Sequence
  Synthetic oligonucleotide
gacttttgtaaggtgattacttcgtgtagg

SEQ ID NO: 430973 - DNA, 30 bp, Artificial Sequence
  Synthetic oligonucleotide
ttgggtagacgcgataagacggcttgtagg

SEQ ID NO: 430974 - DNA, 30 bp, Artificial Sequence
  Synthetic oligonucleotide
acctataaagggtagaggaaatcttgtagg

SEQ ID NO: 430975 - DNA, 30 bp, Artificial Sequence
  Synthetic oligonucleotide
cgttcccttctacaacgcgcaaagattagg

SEQ ID NO: 430976 - DNA, 30 bp, Artificial Sequence
  Synthetic oligonucleotide
attgtgtaaagtatgttggatcagattagg

SEQ ID NO: 430977 - DNA, 30 bp, Artificial Sequence
  Synthetic oligonucleotide
agttaggggacacgcatgggggggattagg

SEQ ID NO: 430978 - DNA, 30 bp, Artificial Sequence
  Synthetic oligonucleotide
tccaagatacgctagctggagcatattagg

SEQ ID NO: 430979 - DNA, 31 bp, Artificial Sequence
  Synthetic oligonucleotide
gaattacatgcaagtgggacaacctattagg

SEQ ID NO: 430980 - DNA, 30 bp, Artificial Sequence
  Synthetic oligonucleotide
cgcacgtcagtaacctatagagctattagg

SEQ ID NO: 430981 - DNA, 30 bp, Artificial Sequence
  Synthetic oligonucleotide
gtggaacggagctaacctttatttattagg

SEQ ID NO: 430982 - DNA, 30 bp, Artificial Sequence
  Synthetic oligonucleotide
caaggtcattgcgtacgctacgcacttagg

SEQ ID NO: 430983 - DNA, 30 bp, Artificial Sequence
  Synthetic oligonucleotide
taggtaaaatcacttgtggctcaccttagg

SEQ ID NO: 430984 - DNA, 30 bp, Artificial Sequence
  Synthetic oligonucleotide
cttcattattaagcctggaacacccttagg

SEQ ID NO: 430985 - DNA, 30 bp, Artificial Sequence
  Synthetic oligonucleotide
gtgcgcgcccagtgggaattacatcttagg

SEQ ID NO: 430986 - DNA, 30 bp, Artificial Sequence
  Synthetic oligonucleotide
caaaagcacagctcttaaaagcttcttagg

SEQ ID NO: 430987 - DNA, 30 bp, Artificial Sequence
  Synthetic oligonucleotide
aaggtgggtggttattctgcgtttcttagg

SEQ ID NO: 430988 - DNA, 30 bp, Artificial Sequence
  Synthetic oligonucleotide
acccatagtaagtcccggggccgcgttagg

SEQ ID NO: 430989 - DNA, 30 bp, Artificial Sequence
  Synthetic oligonucleotide
ttactggcacttcaaactgttaaggttagg

SEQ ID NO: 430990 - DNA, 30 bp, Artificial Sequence
  Synthetic oligonucleotide
tactttcatcggttctttcacccggttagg

SEQ ID NO: 430991 - DNA, 30 bp, Artificial Sequence
  Synthetic oligonucleotide
ccccgtatgctcggtcttagagatgttagg

SEQ ID NO: 430992 - DNA, 30 bp, Artificial Sequence
  Synthetic oligonucleotide
gtggatcgttaataaacgctgagatttagg

SEQ ID NO: 430993 - DNA, 30 bp, Artificial Sequence
  Synthetic oligonucleotide
cccataatggacatcggttggttatttagg

SEQ ID NO: 430994 - DNA, 30 bp, Artificial Sequence
  Synthetic oligonucleotide
gctaggtatagacatgataagcactttagg

SEQ ID NO: 430995 - DNA, 30 bp, Artificial Sequence
  Synthetic oligonucleotide
atacttgtcattctaaccaagatctttagg

SEQ ID NO: 430996 - DNA, 30 bp, Artificial Sequence
  Synthetic oligonucleotide
agtcgctggtgttagtcagaactctttagg

SEQ ID NO: 430997 - DNA, 30 bp, Artificial Sequence
  Synthetic oligonucleotide
tgacatggcataaacgagttatagtttagg

SEQ ID NO: 430998 - DNA, 30 bp, Artificial Sequence
  Synthetic oligonucleotide
tgggcgcgctttcaacaattagggtttagg

SEQ ID NO: 430999 - DNA, 30 bp, Artificial Sequence
  Synthetic oligonucleotide
aagatgtcgtatacgagccctttgtttagg

SEQ ID NO: 431000 - DNA, 30 bp, Artificial Sequence
  Synthetic oligonucleotide
tattatctcggtaccgtccgaacttttagg

SEQ ID NO: 431001 - DNA, 30 bp, Artificial Sequence
  Synthetic oligonucleotide
aatcatagggcaggtggagtgccttttagg

SEQ ID NO: 431002 - DNA, 29 bp, Artificial Sequence
  Synthetic oligonucleotide
cttctcatggataagtctcatgttttagg

SEQ ID NO: 431003 - DNA, 30 bp, Artificial Sequence
  Synthetic oligonucleotide
ggattagtgttgacgcgatgttgttttagg

SEQ ID NO: 431004 - DNA, 30 bp, Artificial Sequence
  Synthetic oligonucleotide
ccataccctcaggcgaaccacgtttttagg

SEQ ID NO: 431005 - DNA, 30 bp, Artificial Sequence
  Synthetic oligonucleotide
cagcaatgacaggctatcggtgtaaaacgg

SEQ ID NO: 431006 - DNA, 30 bp, Artificial Sequence
  Synthetic oligonucleotide
tccgttttacctactgcccggaggaaacgg

SEQ ID NO: 431007 - DNA, 30 bp, Artificial Sequence
  Synthetic oligonucleotide
gactgatatgcgtcacgttactctaaacgg

SEQ ID NO: 431008 - DNA, 30 bp, Artificial Sequence
  Synthetic oligonucleotide
taatcttcatttcgcgaccttagtaaacgg

SEQ ID NO: 431009 - DNA, 30 bp, Artificial Sequence
  Synthetic oligonucleotide
aaaggaaaccgaggtaattttcttaaacgg

SEQ ID NO: 431010 - DNA, 30 bp, Artificial Sequence
  Synthetic oligonucleotide
ctctttcatttagcgatcctctaacaacgg

SEQ ID NO: 431011 - DNA, 30 bp, Artificial Sequence
  Synthetic oligonucleotide
gaatggtctaattggttgaataaccaacgg

SEQ ID NO: 431012 - DNA, 30 bp, Artificial Sequence
  Synthetic oligonucleotide
caacgttggaagcattaagtacaccaacgg

SEQ ID NO: 431013 - DNA, 30 bp, Artificial Sequence
  Synthetic oligonucleotide
agcttctcgtgcaaatagctcgggcaacgg

SEQ ID NO: 431014 - DNA, 30 bp, Artificial Sequence
  Synthetic oligonucleotide
aactttgagttaagcagagacgtgcaacgg

SEQ ID NO: 431015 - DNA, 30 bp, Artificial Sequence
  Synthetic oligonucleotide
tttccatgtattagtctggatgatcaacgg

SEQ ID NO: 431016 - DNA, 30 bp, Artificial Sequence
  Synthetic oligonucleotide
ttcctggtaccctcgtaaaacattcaacgg

SEQ ID NO: 431017 - DNA, 30 bp, Artificial Sequence
  Synthetic oligonucleotide
atggcggtgtgcgaagggttcaaagaacgg

SEQ ID NO: 431018 - DNA, 30 bp, Artificial Sequence
  Synthetic oligonucleotide
aatattcactttacccagctaagggaacgg

SEQ ID NO: 431019 - DNA, 30 bp, Artificial Sequence
  Synthetic oligonucleotide
gagaagcaggcatatgctgggctggaacgg

SEQ ID NO: 431020 - DNA, 30 bp, Artificial Sequence
  Synthetic oligonucleotide
ttcgcacgggggtcaattgagcatgaacgg

SEQ ID NO: 431021 - DNA, 30 bp, Artificial Sequence
  Synthetic oligonucleotide
tggctatcgttaccccggcaggatgaacgg

SEQ ID NO: 431022 - DNA, 30 bp, Artificial Sequence
  Synthetic oligonucleotide
acatgaacatggatagccaatattgaacgg

SEQ ID NO: 431023 - DNA, 30 bp, Artificial Sequence
  Synthetic oligonucleotide
gattgttcctttgggagagtaccataacgg

SEQ ID NO: 431024 - DNA, 30 bp, Artificial Sequence
  Synthetic oligonucleotide
ccgcctagattaagtcgggccgcataacgg

SEQ ID NO: 431025 - DNA, 30 bp, Artificial Sequence
  Synthetic oligonucleotide
cagcacttttagtggttgactgcctaacgg

SEQ ID NO: 431026 - DNA, 30 bp, Artificial Sequence
  Synthetic oligonucleotide
tttgacgatcactagcagtcatggtaacgg

SEQ ID NO: 431027 - DNA, 30 bp, Artificial Sequence
  Synthetic oligonucleotide
gaagatgagtcagatccttctaattaacgg

SEQ ID NO: 431028 - DNA, 30 bp, Artificial Sequence
  Synthetic oligonucleotide
tacagttcagccctatgggaaggttaacgg

SEQ ID NO: 431029 - DNA, 30 bp, Artificial Sequence
  Synthetic oligonucleotide
attatggatcggacgataagtctttaacgg

SEQ ID NO: 431030 - DNA, 30 bp, Artificial Sequence
  Synthetic oligonucleotide
tcgcgcgcgttcgtggcattataaacacgg

SEQ ID NO: 431031 - DNA, 30 bp, Artificial Sequence
  Synthetic oligonucleotide
gtataccggtagactggatgcggaacacgg

SEQ ID NO: 431032 - DNA, 30 bp, Artificial Sequence
  Synthetic oligonucleotide
cctagtaagaatatactacgtgacacacgg

SEQ ID NO: 431033 - DNA, 30 bp, Artificial Sequence
  Synthetic oligonucleotide
gtttccccatgactatccgtgtgcacacgg

SEQ ID NO: 431034 - DNA, 30 bp, Artificial Sequence
  Synthetic oligonucleotide
ctcggtttggaactagggtacgtcacacgg

SEQ ID NO: 431035 - DNA, 30 bp, Artificial Sequence
  Synthetic oligonucleotide
gcaatccgggggaaccctgataagacacgg

SEQ ID NO: 431036 - DNA, 30 bp, Artificial Sequence
  Synthetic oligonucleotide
tatgcgaagtctgacagagcgcagacacgg

SEQ ID NO: 431037 - DNA, 30 bp, Artificial Sequence
  Synthetic oligonucleotide
aatgtgcatgtgagaaaggttacgacacgg

SEQ ID NO: 431038 - DNA, 30 bp, Artificial Sequence
  Synthetic oligonucleotide
ctcacgacggaccgtagctcaccgacacgg

SEQ ID NO: 431039 - DNA, 30 bp, Artificial Sequence
  Synthetic oligonucleotide
agatttctcgggaattgagtactgacacgg

SEQ ID NO: 431040 - DNA, 30 bp, Artificial Sequence
  Synthetic oligonucleotide
ccaggtgctcctgtccgtagatatacacgg

SEQ ID NO: 431041 - DNA, 30 bp, Artificial Sequence
  Synthetic oligonucleotide
aaatgcctgaaagtctaacagcgtacacgg

SEQ ID NO: 431042 - DNA, 30 bp, Artificial Sequence
  Synthetic oligonucleotide
gtgtatacaggctcttgaagacttacacgg

SEQ ID NO: 431043 - DNA, 30 bp, Artificial Sequence
  Synthetic oligonucleotide
tcgtaagaggttacggcgaatggaccacgg

SEQ ID NO: 431044 - DNA, 30 bp, Artificial Sequence
  Synthetic oligonucleotide
ctggtctcctttaattggcactcgccacgg

SEQ ID NO: 431045 - DNA, 30 bp, Artificial Sequence
  Synthetic oligonucleotide
tcgaggaacgccatgtagctctcgccacgg

SEQ ID NO: 431046 - DNA, 30 bp, Artificial Sequence
  Synthetic oligonucleotide
cgttaaacgatcccgattggcttgccacgg

SEQ ID NO: 431047 - DNA, 30 bp, Artificial Sequence
  Synthetic oligonucleotide
tactgcgtgtttcctatagagaaagcacgg

SEQ ID NO: 431048 - DNA, 29 bp, Artificial Sequence
  Synthetic oligonucleotide
aaaggggaatcagcgattagacagcacgg

SEQ ID NO: 431049 - DNA, 30 bp, Artificial Sequence
  Synthetic oligonucleotide
taaggatagcaccatgcgtctacagcacgg

SEQ ID NO: 431050 - DNA, 30 bp, Artificial Sequence
  Synthetic oligonucleotide
atgactgattcatcaatcatcatcgcacgg

SEQ ID NO: 431051 - DNA, 30 bp, Artificial Sequence
  Synthetic oligonucleotide
aaatggtcgcaggtgagtacggtcgcacgg

SEQ ID NO: 431052 - DNA, 30 bp, Artificial Sequence
  Synthetic oligonucleotide
tgcgtgtaacaggatagcaagactgcacgg

SEQ ID NO: 431053 - DNA, 30 bp, Artificial Sequence
  Synthetic oligonucleotide
caagaaaaatcaactctgtactgtgcacgg

SEQ ID NO: 431054 - DNA, 30 bp, Artificial Sequence
  Synthetic oligonucleotide
acaaagaacctctcttacattcaatcacgg

SEQ ID NO: 431055 - DNA, 30 bp, Artificial Sequence
  Synthetic oligonucleotide
gtatgcctaccgcaaaaatggtaatcacgg

SEQ ID NO: 431056 - DNA, 30 bp, Artificial Sequence
  Synthetic oligonucleotide
gcgggttgtagtcagcacgatcactcacgg

SEQ ID NO: 431057 - DNA, 30 bp, Artificial Sequence
  Synthetic oligonucleotide
atgttactcacaactcggatgaggtcacgg

SEQ ID NO: 431058 - DNA, 30 bp, Artificial Sequence
  Synthetic oligonucleotide
gtattaggtgaatcgtagtcggcttcacgg

SEQ ID NO: 431059 - DNA, 30 bp, Artificial Sequence
  Synthetic oligonucleotide
taaagatatgtagcgtaataccaaagacgg

SEQ ID NO: 431060 - DNA, 30 bp, Artificial Sequence
  Synthetic oligonucleotide
ctagatagagctatgatctgcttaagacgg

SEQ ID NO: 431061 - DNA, 30 bp, Artificial Sequence
  Synthetic oligonucleotide
ggatcctgaatcgggagggtcctgagacgg

SEQ ID NO: 431062 - DNA, 30 bp, Artificial Sequence
  Synthetic oligonucleotide
gcctcagaacggtgtcctcatgatagacgg

SEQ ID NO: 431063 - DNA, 30 bp, Artificial Sequence
  Synthetic oligonucleotide
aaggtttacaggtttagatattatagacgg

SEQ ID NO: 431064 - DNA, 30 bp, Artificial Sequence
  Synthetic oligonucleotide
tattcagtcaaaatagtttgtaatcgacgg

SEQ ID NO: 431065 - DNA, 30 bp, Artificial Sequence
  Synthetic oligonucleotide
aagtcttttgtgttgggcgaccatcgacgg

SEQ ID NO: 431066 - DNA, 30 bp, Artificial Sequence
  Synthetic oligonucleotide
tactgggcctctaccttgtgccgtcgacgg

SEQ ID NO: 431067 - DNA, 30 bp, Artificial Sequence
  Synthetic oligonucleotide
gaatgtagtggtctagtagtgggtcgacgg

SEQ ID NO: 431068 - DNA, 30 bp, Artificial Sequence
  Synthetic oligonucleotide
cagacgtgctaggtcagacggagaggacgg

SEQ ID NO: 431069 - DNA, 30 bp, Artificial Sequence
  Synthetic oligonucleotide
gtcattaggatggaaggcagagccggacgg

SEQ ID NO: 431070 - DNA, 30 bp, Artificial Sequence
  Synthetic oligonucleotide
aacagtggaacaccttgtatatccggacgg

SEQ ID NO: 431071 - DNA, 30 bp, Artificial Sequence
  Synthetic oligonucleotide
attgcacttatgtaggcagtacgcggacgg

SEQ ID NO: 431072 - DNA, 30 bp, Artificial Sequence
  Synthetic oligonucleotide
cctatgcagtaatgtcggctatagggacgg

SEQ ID NO: 431073 - DNA, 30 bp, Artificial Sequence
  Synthetic oligonucleotide
ccatggctccaatcgaggactttgggacgg

SEQ ID NO: 431074 - DNA, 30 bp, Artificial Sequence
  Synthetic oligonucleotide
tagaagcgactacctcatcagaaatgacgg

SEQ ID NO: 431075 - DNA, 30 bp, Artificial Sequence
  Synthetic oligonucleotide
ttttgtacgaaggtatacaaaatatgacgg

SEQ ID NO: 431076 - DNA, 30 bp, Artificial Sequence
  Synthetic oligonucleotide
ggacccctgatcgtcaaggggttatgacgg

SEQ ID NO: 431077 - DNA, 30 bp, Artificial Sequence
  Synthetic oligonucleotide
ggtgtttgtatcatcgatcagttctgacgg

SEQ ID NO: 431078 - DNA, 30 bp, Artificial Sequence
  Synthetic oligonucleotide
taaggtcggatctagtgacccgcgtgacgg

SEQ ID NO: 431079 - DNA, 30 bp, Artificial Sequence
  Synthetic oligonucleotide
aactccatgtatgcctctatggattgacgg

SEQ ID NO: 431080 - DNA, 30 bp, Artificial Sequence
  Synthetic oligonucleotide
agtaccttcaagcggatggtgtgttgacgg

SEQ ID NO: 431081 - DNA, 30 bp, Artificial Sequence
  Synthetic oligonucleotide
acggatagtagtgcagcgcgtgtaatacgg

SEQ ID NO: 431082 - DNA, 30 bp, Artificial Sequence
  Synthetic oligonucleotide
catcgtactgatgtggatttaaacatacgg

SEQ ID NO: 431083 - DNA, 30 bp, Artificial Sequence
  Synthetic oligonucleotide
ccactatggggctcgaggcgaaatatacgg

SEQ ID NO: 431084 - DNA, 30 bp, Artificial Sequence
  Synthetic oligonucleotide
ttgctgtagatccgcattcacaatatacgg

SEQ ID NO: 431085 - DNA, 30 bp, Artificial Sequence
  Synthetic oligonucleotide
gctaccatcgtcagggtacacagtatacgg

SEQ ID NO: 431086 - DNA, 30 bp, Artificial Sequence
  Synthetic oligonucleotide
agagtacgggagggggccagtcttatacgg

SEQ ID NO: 431087 - DNA, 30 bp, Artificial Sequence
  Synthetic oligonucleotide
tagtacggtgccctcttaatagaactacgg

SEQ ID NO: 431088 - DNA, 30 bp, Artificial Sequence
  Synthetic oligonucleotide
aggttagttttgcgaagaggattcctacgg

SEQ ID NO: 431089 - DNA, 30 bp, Artificial Sequence
  Synthetic oligonucleotide
tcctggatgcaaactcttttaacgctacgg

SEQ ID NO: 431090 - DNA, 30 bp, Artificial Sequence
  Synthetic oligonucleotide
agagactagattgccagtcggtcgctacgg

SEQ ID NO: 431091 - DNA, 30 bp, Artificial Sequence
  Synthetic oligonucleotide
tatgcacacggggccggggcgaggctacgg

SEQ ID NO: 431092 - DNA, 30 bp, Artificial Sequence
  Synthetic oligonucleotide
gtcggatctagcgctcagaaccggctacgg

SEQ ID NO: 431093 - DNA, 30 bp, Artificial Sequence
  Synthetic oligonucleotide
gggggctatgatcatgtaatgctgctacgg

SEQ ID NO: 431094 - DNA, 30 bp, Artificial Sequence
  Synthetic oligonucleotide
acaggggatccttcctagaatcctctacgg

SEQ ID NO: 431095 - DNA, 30 bp, Artificial Sequence
  Synthetic oligonucleotide
aaacgcggcttgcttcatgaccaagtacgg

SEQ ID NO: 431096 - DNA, 30 bp, Artificial Sequence
  Synthetic oligonucleotide
cgttcagggtattataggaggtcagtacgg

SEQ ID NO: 431097 - DNA, 30 bp, Artificial Sequence
  Synthetic oligonucleotide
ccacctcactgaaagtacgcactagtacgg

SEQ ID NO: 431098 - DNA, 30 bp, Artificial Sequence
  Synthetic oligonucleotide
gtctttataaaattctgagcagacgtacgg

SEQ ID NO: 431099 - DNA, 30 bp, Artificial Sequence
  Synthetic oligonucleotide
tgacggaccgttagacacacgggggtacgg

SEQ ID NO: 431100 - DNA, 30 bp, Artificial Sequence
  Synthetic oligonucleotide
tgactaatacgaggcttttcagtggtacgg

SEQ ID NO: 431101 - DNA, 30 bp, Artificial Sequence
  Synthetic oligonucleotide
aaactgtaagacccactttgtgtggtacgg

SEQ ID NO: 431102 - DNA, 28 bp, Artificial Sequence
  Synthetic oligonucleotide
cgtcccccatccttgattgtatgtacgg

SEQ ID NO: 431103 - DNA, 30 bp, Artificial Sequence
  Synthetic oligonucleotide
gaattcgatacgttaggggttactgtacgg

SEQ ID NO: 431104 - DNA, 30 bp, Artificial Sequence
  Synthetic oligonucleotide
gagaacagttacctggtcgtaaaattacgg

SEQ ID NO: 431105 - DNA, 30 bp, Artificial Sequence
  Synthetic oligonucleotide
ctatttctagtcaagcctagcaaattacgg

SEQ ID NO: 431106 - DNA, 30 bp, Artificial Sequence
  Synthetic oligonucleotide
cggtgagcctattttggatccccattacgg

SEQ ID NO: 431107 - DNA, 30 bp, Artificial Sequence
  Synthetic oligonucleotide
ttcgctctaatctaatggcggcacttacgg

SEQ ID NO: 431108 - DNA, 30 bp, Artificial Sequence
  Synthetic oligonucleotide
gactatgtatttgttttttaaggcttacgg

SEQ ID NO: 431109 - DNA, 30 bp, Artificial Sequence
  Synthetic oligonucleotide
attacgtacgacaaagctaaccatttacgg

SEQ ID NO: 431110 - DNA, 30 bp, Artificial Sequence
  Synthetic oligonucleotide
gaagagtcaggcatctggtaatcaaaccgg

SEQ ID NO: 431111 - DNA, 30 bp, Artificial Sequence
  Synthetic oligonucleotide
agtaataatatacgcagacgaataaaccgg

SEQ ID NO: 431112 - DNA, 30 bp, Artificial Sequence
  Synthetic oligonucleotide
attcagaccgcaatctctcgggacaaccgg

SEQ ID NO: 431113 - DNA, 30 bp, Artificial Sequence
  Synthetic oligonucleotide
ggtcgggagggaggttgagcgagcaaccgg

SEQ ID NO: 431114 - DNA, 30 bp, Artificial Sequence
  Synthetic oligonucleotide
cctaagtgagcaccggcggtgagcaaccgg

SEQ ID NO: 431115 - DNA, 30 bp, Artificial Sequence
  Synthetic oligonucleotide
gcggtttgcgtgaccagcggggtcaaccgg

SEQ ID NO: 431116 - DNA, 30 bp, Artificial Sequence
  Synthetic oligonucleotide
gtgtaggacttgcacacgggggggaaccgg

SEQ ID NO: 431117 - DNA, 30 bp, Artificial Sequence
  Synthetic oligonucleotide
aggggcgtcgttctattaattgaacaccgg

SEQ ID NO: 431118 - DNA, 30 bp, Artificial Sequence
  Synthetic oligonucleotide
tgtcattagtagttacttcagccacaccgg

SEQ ID NO: 431119 - DNA, 30 bp, Artificial Sequence
  Synthetic oligonucleotide
atgttttgacgggcttacccacaccaccgg

SEQ ID NO: 431120 - DNA, 30 bp, Artificial Sequence
  Synthetic oligonucleotide
ccggaaaagtagatttaactacttcaccgg

SEQ ID NO: 431121 - DNA, 30 bp, Artificial Sequence
  Synthetic oligonucleotide
ttgataggcagatttctaatacaagaccgg

SEQ ID NO: 431122 - DNA, 30 bp, Artificial Sequence
  Synthetic oligonucleotide
cgtcaacctagtacgttttcaacagaccgg

SEQ ID NO: 431123 - DNA, 30 bp, Artificial Sequence
  Synthetic oligonucleotide
cctgaccgcaaggtctctaagagagaccgg

SEQ ID NO: 431124 - DNA, 30 bp, Artificial Sequence
  Synthetic oligonucleotide
aaagtccacaggcacgtccttctagaccgg

SEQ ID NO: 431125 - DNA, 30 bp, Artificial Sequence
  Synthetic oligonucleotide
aagtatttttatcagctgccctacgaccgg

SEQ ID NO: 431126 - DNA, 30 bp, Artificial Sequence
  Synthetic oligonucleotide
gggtatgggaactatctagttcgcgaccgg

SEQ ID NO: 431127 - DNA, 30 bp, Artificial Sequence
  Synthetic oligonucleotide
gggcagttaccatcgtatgtcctcgaccgg

SEQ ID NO: 431128 - DNA, 30 bp, Artificial Sequence
  Synthetic oligonucleotide
ggctgtgctccaggggaaaaaaaggaccgg

SEQ ID NO: 431129 - DNA, 30 bp, Artificial Sequence
  Synthetic oligonucleotide
ttagtgttagccaaatggtgcacggaccgg

SEQ ID NO: 431130 - DNA, 30 bp, Artificial Sequence
  Synthetic oligonucleotide
ccctggcagcttcgactccggtgggaccgg

SEQ ID NO: 431131 - DNA, 30 bp, Artificial Sequence
  Synthetic oligonucleotide
agagcaagttacgtcagatgccctgaccgg

SEQ ID NO: 431132 - DNA, 30 bp, Artificial Sequence
  Synthetic oligonucleotide
aagggttgggattatgggagggctgaccgg

SEQ ID NO: 431133 - DNA, 30 bp, Artificial Sequence
  Synthetic oligonucleotide
gacccgctaaggcacgcctaatactaccgg

SEQ ID NO: 431134 - DNA, 30 bp, Artificial Sequence
  Synthetic oligonucleotide
ataaatacatctggagacgggaagtaccgg

SEQ ID NO: 431135 - DNA, 30 bp, Artificial Sequence
  Synthetic oligonucleotide
gaatcggatgcccactccgactggtaccgg

SEQ ID NO: 431136 - DNA, 30 bp, Artificial Sequence
  Synthetic oligonucleotide
ggtagcttggccacacatggtttgtaccgg

SEQ ID NO: 431137 - DNA, 30 bp, Artificial Sequence
  Synthetic oligonucleotide
gcaaagtgaggtcacccagtcaattaccgg

SEQ ID NO: 431138 - DNA, 30 bp, Artificial Sequence
  Synthetic oligonucleotide
tcgcatccgcgcctgacccctccaacccgg

SEQ ID NO: 431139 - DNA, 30 bp, Artificial Sequence
  Synthetic oligonucleotide
gtatttgcctggaagctcactggaacccgg

SEQ ID NO: 431140 - DNA, 30 bp, Artificial Sequence
  Synthetic oligonucleotide
taacctcccctttatacatgcgccacccgg

SEQ ID NO: 431141 - DNA, 30 bp, Artificial Sequence
  Synthetic oligonucleotide
gagcaccgtgtgtgcgttcgtaaaccccgg

SEQ ID NO: 431142 - DNA, 30 bp, Artificial Sequence
  Synthetic oligonucleotide
gctgtagttgtacttgagtttaaaccccgg

SEQ ID NO: 431143 - DNA, 30 bp, Artificial Sequence
  Synthetic oligonucleotide
cggatcgtacacagagttatgttcccccgg

SEQ ID NO: 431144 - DNA, 30 bp, Artificial Sequence
  Synthetic oligonucleotide
tgctcatattctagctctaataatccccgg

SEQ ID NO: 431145 - DNA, 30 bp, Artificial Sequence
  Synthetic oligonucleotide
gagttcgcgttaatgtattctccagcccgg

SEQ ID NO: 431146 - DNA, 30 bp, Artificial Sequence
  Synthetic oligonucleotide
cgtccaaataccccagtcgtaaccgcccgg

SEQ ID NO: 431147 - DNA, 30 bp, Artificial Sequence
  Synthetic oligonucleotide
cttccattcaatgacgggacaggcgcccgg

SEQ ID NO: 431148 - DNA, 30 bp, Artificial Sequence
  Synthetic oligonucleotide
taatatcattagcaaacagattcggcccgg

SEQ ID NO: 431149 - DNA, 30 bp, Artificial Sequence
  Synthetic oligonucleotide
ggttttcaagcgtggacctacgtggcccgg

SEQ ID NO: 431150 - DNA, 30 bp, Artificial Sequence
  Synthetic oligonucleotide
gcgctggattgggaaagtaaggttgcccgg

SEQ ID NO: 431151 - DNA, 30 bp, Artificial Sequence
  Synthetic oligonucleotide
gactttacaaagatatctagtgttgcccgg

SEQ ID NO: 431152 - DNA, 30 bp, Artificial Sequence
  Synthetic oligonucleotide
gggggtcagggggggcactgggcatcccgg

SEQ ID NO: 431153 - DNA, 30 bp, Artificial Sequence
  Synthetic oligonucleotide
tgcatggctgtgattaaagaccgctcccgg

SEQ ID NO: 431154 - DNA, 30 bp, Artificial Sequence
  Synthetic oligonucleotide
atgtgaggcacttgtgtgccatagtcccgg

SEQ ID NO: 431155 - DNA, 30 bp, Artificial Sequence
  Synthetic oligonucleotide
acctttccaaggcttctccgttcgtcccgg

SEQ ID NO: 431156 - DNA, 30 bp, Artificial Sequence
  Synthetic oligonucleotide
caagtgtagatcttcaggttgcaaagccgg

SEQ ID NO: 431157 - DNA, 30 bp, Artificial Sequence
  Synthetic oligonucleotide
agtacagtaggattggatcaatccagccgg

SEQ ID NO: 431158 - DNA, 30 bp, Artificial Sequence
  Synthetic oligonucleotide
gtccggatcaaatcgccacgatgcagccgg

SEQ ID NO: 431159 - DNA, 30 bp, Artificial Sequence
  Synthetic oligonucleotide
agcccaacagcgaaaattggatgacgccgg

SEQ ID NO: 431160 - DNA, 30 bp, Artificial Sequence
  Synthetic oligonucleotide
gcaccgatttcgataataatttagcgccgg

SEQ ID NO: 431161 - DNA, 30 bp, Artificial Sequence
  Synthetic oligonucleotide
cttaaagttatataacctggtacgcgccgg

SEQ ID NO: 431162 - DNA, 30 bp, Artificial Sequence
  Synthetic oligonucleotide
cgtaatatgtgaaatgtgtgggcgcgccgg

SEQ ID NO: 431163 - DNA, 30 bp, Artificial Sequence
  Synthetic oligonucleotide
ctgggtgggcccgccgaaggacggcgccgg

SEQ ID NO: 431164 - DNA, 30 bp, Artificial Sequence
  Synthetic oligonucleotide
gaattaaggtaccttggtgatgctcgccgg

SEQ ID NO: 431165 - DNA, 30 bp, Artificial Sequence
  Synthetic oligonucleotide
agtagttcctaggcttgcgaacgtcgccgg

SEQ ID NO: 431166 - DNA, 30 bp, Artificial Sequence
  Synthetic oligonucleotide
cttcgccggacctattgattgtgcggccgg

SEQ ID NO: 431167 - DNA, 30 bp, Artificial Sequence
  Synthetic oligonucleotide
ggatcgccctggtaatcttttatcggccgg

SEQ ID NO: 431168 - DNA, 30 bp, Artificial Sequence
  Synthetic oligonucleotide
gagagtccagttacaaccctacagggccgg

SEQ ID NO: 431169 - DNA, 30 bp, Artificial Sequence
  Synthetic oligonucleotide
gaaatttgttatctctcgccggcgggccgg

SEQ ID NO: 431170 - DNA, 30 bp, Artificial Sequence
  Synthetic oligonucleotide
tcttgaaaatactcccgctttaggggccgg

SEQ ID NO: 431171 - DNA, 30 bp, Artificial Sequence
  Synthetic oligonucleotide
tgccgaaccatcggcggcagcatgggccgg

SEQ ID NO: 431172 - DNA, 30 bp, Artificial Sequence
  Synthetic oligonucleotide
cagcactctgggtagccctgagctggccgg

SEQ ID NO: 431173 - DNA, 30 bp, Artificial Sequence
  Synthetic oligonucleotide
tttacagattgtatctacgactgtggccgg

SEQ ID NO: 431174 - DNA, 30 bp, Artificial Sequence
  Synthetic oligonucleotide
taagcggacgcataaagattgggatgccgg

SEQ ID NO: 431175 - DNA, 30 bp, Artificial Sequence
  Synthetic oligonucleotide
taaagcatccggtagcgaatccgctgccgg

SEQ ID NO: 431176 - DNA, 30 bp, Artificial Sequence
  Synthetic oligonucleotide
gcttgggtcgtctattggcggatctgccgg

SEQ ID NO: 431177 - DNA, 30 bp, Artificial Sequence
  Synthetic oligonucleotide
tgaggtgcactgcaaacgcataattgccgg

SEQ ID NO: 431178 - DNA, 30 bp, Artificial Sequence
  Synthetic oligonucleotide
cataagtggtccgatatgtgtacaatccgg

SEQ ID NO: 431179 - DNA, 30 bp, Artificial Sequence
  Synthetic oligonucleotide
gaccggaccagcatgacacatgcaatccgg

SEQ ID NO: 431180 - DNA, 30 bp, Artificial Sequence
  Synthetic oligonucleotide
tctttgtactactccgcctggaccatccgg

SEQ ID NO: 431181 - DNA, 30 bp, Artificial Sequence
  Synthetic oligonucleotide
cttcaaatagtttacggggactcgatccgg

SEQ ID NO: 431182 - DNA, 30 bp, Artificial Sequence
  Synthetic oligonucleotide
ctcccacaggctaaatacgaaaggatccgg

SEQ ID NO: 431183 - DNA, 30 bp, Artificial Sequence
  Synthetic oligonucleotide
gtcagtgcatccaatgctatccatatccgg

SEQ ID NO: 431184 - DNA, 30 bp, Artificial Sequence
  Synthetic oligonucleotide
gactacgttatatcttgacggacgctccgg

SEQ ID NO: 431185 - DNA, 30 bp, Artificial Sequence
  Synthetic oligonucleotide
tattttcaccacacatcaacgaacgtccgg

SEQ ID NO: 431186 - DNA, 30 bp, Artificial Sequence
  Synthetic oligonucleotide
tgtcgcatggtcctgtgttaaaaggtccgg

SEQ ID NO: 431187 - DNA, 30 bp, Artificial Sequence
  Synthetic oligonucleotide
aattcgtccacttaatggaatccggtccgg

SEQ ID NO: 431188 - DNA, 30 bp, Artificial Sequence
  Synthetic oligonucleotide
ctctgtactggtctcggcatatgtgtccgg

SEQ ID NO: 431189 - DNA, 30 bp, Artificial Sequence
  Synthetic oligonucleotide
tagagtaagtggcgggacctaagattccgg

SEQ ID NO: 431190 - DNA, 30 bp, Artificial Sequence
  Synthetic oligonucleotide
tcaaacaatgcttgtgtaattgtattccgg

SEQ ID NO: 431191 - DNA, 30 bp, Artificial Sequence
  Synthetic oligonucleotide
gccgggtccggccgactgtttccgttccgg

SEQ ID NO: 431192 - DNA, 30 bp, Artificial Sequence
  Synthetic oligonucleotide
gatttgttgcctagttcaacgaggttccgg

SEQ ID NO: 431193 - DNA, 30 bp, Artificial Sequence
  Synthetic oligonucleotide
ataccagtcccctcacgaggggtgttccgg

SEQ ID NO: 431194 - DNA, 30 bp, Artificial Sequence
  Synthetic oligonucleotide
gttgacctggactccgttctgaatttccgg

SEQ ID NO: 431195 - DNA, 30 bp, Artificial Sequence
  Synthetic oligonucleotide
accttcttcagcacactacttgttttccgg

SEQ ID NO: 431196 - DNA, 30 bp, Artificial Sequence
  Synthetic oligonucleotide
agtcccgggacggtagtagcttgtaagcgg

SEQ ID NO: 431197 - DNA, 30 bp, Artificial Sequence
  Synthetic oligonucleotide
aagggctaaatattagctcagcaacagcgg

SEQ ID NO: 431198 - DNA, 30 bp, Artificial Sequence
  Synthetic oligonucleotide
ggggggttttaggatctcaggtaacagcgg

SEQ ID NO: 431199 - DNA, 30 bp, Artificial Sequence
  Synthetic oligonucleotide
tatcggttattatactggatataccagcgg

SEQ ID NO: 431200 - DNA, 30 bp, Artificial Sequence
  Synthetic oligonucleotide
gtattccgaagaaatcgctgtaggcagcgg

SEQ ID NO: 431201 - DNA, 31 bp, Artificial Sequence
  Synthetic oligonucleotide
ttcggtcatcccaatgtaatgcgggcagcgg

SEQ ID NO: 431202 - DNA, 30 bp, Artificial Sequence
  Synthetic oligonucleotide
agttcagctaacggctgctgaattcagcgg

SEQ ID NO: 431203 - DNA, 30 bp, Artificial Sequence
  Synthetic oligonucleotide
aagcggtggctaactgacctagtagagcgg

SEQ ID NO: 431204 - DNA, 30 bp, Artificial Sequence
  Synthetic oligonucleotide
tcatgtttttaattaatgggtgtcgagcgg

SEQ ID NO: 431205 - DNA, 30 bp, Artificial Sequence
  Synthetic oligonucleotide
gccaaattttgtggaaaaccttgggagcgg

SEQ ID NO: 431206 - DNA, 30 bp, Artificial Sequence
  Synthetic oligonucleotide
accaaaaaggctacgcaaaccatggagcgg

SEQ ID NO: 431207 - DNA, 30 bp, Artificial Sequence
  Synthetic oligonucleotide
tgcgattgaatattaaaagggatggagcgg

SEQ ID NO: 431208 - DNA, 30 bp, Artificial Sequence
  Synthetic oligonucleotide
attaaggctagggtagacacagatgagcgg

SEQ ID NO: 431209 - DNA, 30 bp, Artificial Sequence
  Synthetic oligonucleotide
gttaagtccacatctgcgaagtgtgagcgg

SEQ ID NO: 431210 - DNA, 30 bp, Artificial Sequence
  Synthetic oligonucleotide
ttcatacctccctcgtttttgtttgagcgg

SEQ ID NO: 431211 - DNA, 30 bp, Artificial Sequence
  Synthetic oligonucleotide
agagctctaaacatccaagaataatagcgg

SEQ ID NO: 431212 - DNA, 30 bp, Artificial Sequence
  Synthetic oligonucleotide
gactaacgcttgctacggaaagtatagcgg

SEQ ID NO: 431213 - DNA, 31 bp, Artificial Sequence
  Synthetic oligonucleotide
ttaggacgtctcgaacggggcacgctagcgg

SEQ ID NO: 431214 - DNA, 30 bp, Artificial Sequence
  Synthetic oligonucleotide
cacaatattcacaacttggcattctagcgg

SEQ ID NO: 431215 - DNA, 30 bp, Artificial Sequence
  Synthetic oligonucleotide
atctctgggagctcgcgaccagaaacgcgg

SEQ ID NO: 431216 - DNA, 30 bp, Artificial Sequence
  Synthetic oligonucleotide
tagtggatgccattatgtggactaacgcgg

SEQ ID NO: 431217 - DNA, 30 bp, Artificial Sequence
  Synthetic oligonucleotide
ggttcatagctcgcatgctttgtaacgcgg

SEQ ID NO: 431218 - DNA, 30 bp, Artificial Sequence
  Synthetic oligonucleotide
gaaacctactagtacacccagcccacgcgg

SEQ ID NO: 431219 - DNA, 30 bp, Artificial Sequence
  Synthetic oligonucleotide
ggaaagaacacaatcggcattagcacgcgg

SEQ ID NO: 431220 - DNA, 30 bp, Artificial Sequence
  Synthetic oligonucleotide
gagtgggtatatcggccgattgagacgcgg

SEQ ID NO: 431221 - DNA, 30 bp, Artificial Sequence
  Synthetic oligonucleotide
gcaattgcgggggtttgtgcgtagacgcgg

SEQ ID NO: 431222 - DNA, 30 bp, Artificial Sequence
  Synthetic oligonucleotide
acgaaaggaactagtctttaatggacgcgg

SEQ ID NO: 431223 - DNA, 30 bp, Artificial Sequence
  Synthetic oligonucleotide
tcagatgcgtacaccctagaggtgacgcgg

SEQ ID NO: 431224 - DNA, 30 bp, Artificial Sequence
  Synthetic oligonucleotide
ctaacattggaaactgtaccagatacgcgg

SEQ ID NO: 431225 - DNA, 30 bp, Artificial Sequence
  Synthetic oligonucleotide
ctggcttagaaggtatggcaggatacgcgg

SEQ ID NO: 431226 - DNA, 30 bp, Artificial Sequence
  Synthetic oligonucleotide
cccaaccgttgcccctaaaatcgcccgcgg

SEQ ID NO: 431227 - DNA, 30 bp, Artificial Sequence
  Synthetic oligonucleotide
gaggtgggggggggcacaaccggcccgcgg

SEQ ID NO: 431228 - DNA, 30 bp, Artificial Sequence
  Synthetic oligonucleotide
tcctagcacctaagctcgggggatccgcgg

SEQ ID NO: 431229 - DNA, 30 bp, Artificial Sequence
  Synthetic oligonucleotide
tgcagatagggtagttgcaattatccgcgg

SEQ ID NO: 431230 - DNA, 30 bp, Artificial Sequence
  Synthetic oligonucleotide
ttgcgcttgacgcggttcacgtttccgcgg

SEQ ID NO: 431231 - DNA, 30 bp, Artificial Sequence
  Synthetic oligonucleotide
agatattttggccaacacccagaggcgcgg

SEQ ID NO: 431232 - DNA, 30 bp, Artificial Sequence
  Synthetic oligonucleotide
ccataatcacccgcagccatctgggcgcgg

SEQ ID NO: 431233 - DNA, 30 bp, Artificial Sequence
  Synthetic oligonucleotide
tttgttacttgatgggacgaatctgcgcgg

SEQ ID NO: 431234 - DNA, 30 bp, Artificial Sequence
  Synthetic oligonucleotide
cgtcctcccggtggccacactattgcgcgg

SEQ ID NO: 431235 - DNA, 30 bp, Artificial Sequence
  Synthetic oligonucleotide
ttcccggccctattcccctaagttgcgcgg

SEQ ID NO: 431236 - DNA, 29 bp, Artificial Sequence
  Synthetic oligonucleotide
atttaagggaataggggcaaacatcgcgg

SEQ ID NO: 431237 - DNA, 30 bp, Artificial Sequence
  Synthetic oligonucleotide
gagggggccaatggccggggtgcctcgcgg

SEQ ID NO: 431238 - DNA, 30 bp, Artificial Sequence
  Synthetic oligonucleotide
gcaaacttaatagaaagtctcatgtcgcgg

SEQ ID NO: 431239 - DNA, 30 bp, Artificial Sequence
  Synthetic oligonucleotide
aagtgcctaatttatgttaggctgtcgcgg

SEQ ID NO: 431240 - DNA, 30 bp, Artificial Sequence
  Synthetic oligonucleotide
aaaatgcgggagcgtcgaggaggttcgcgg

SEQ ID NO: 431241 - DNA, 30 bp, Artificial Sequence
  Synthetic oligonucleotide
gttccgcaagaaatgctggcagaaaggcgg

SEQ ID NO: 431242 - DNA, 30 bp, Artificial Sequence
  Synthetic oligonucleotide
caggtatccgctatgttatagtacaggcgg

SEQ ID NO: 431243 - DNA, 30 bp, Artificial Sequence
  Synthetic oligonucleotide
tttcttggcgacattcggaacatgaggcgg

SEQ ID NO: 431244 - DNA, 30 bp, Artificial Sequence
  Synthetic oligonucleotide
aaggcatgttgcgcaacgccagataggcgg

SEQ ID NO: 431245 - DNA, 30 bp, Artificial Sequence
  Synthetic oligonucleotide
ctttcgggattgattgatagatataggcgg

SEQ ID NO: 431246 - DNA, 30 bp, Artificial Sequence
  Synthetic oligonucleotide
tggtgaattggaggtcgaatttttaggcgg

SEQ ID NO: 431247 - DNA, 30 bp, Artificial Sequence
  Synthetic oligonucleotide
catattatccgtaatcagtggagacggcgg

SEQ ID NO: 431248 - DNA, 30 bp, Artificial Sequence
  Synthetic oligonucleotide
gagaaacagagtataatctgttagcggcgg

SEQ ID NO: 431249 - DNA, 30 bp, Artificial Sequence
  Synthetic oligonucleotide
ttagatagaaacgcgcaaggaccgcggcgg

SEQ ID NO: 431250 - DNA, 30 bp, Artificial Sequence
  Synthetic oligonucleotide
tcacttgtttgaaactatggtgcgcggcgg

SEQ ID NO: 431251 - DNA, 30 bp, Artificial Sequence
  Synthetic oligonucleotide
ttgctggggtcgtatggggcgcggcggcgg

SEQ ID NO: 431252 - DNA, 30 bp, Artificial Sequence
  Synthetic oligonucleotide
ccaaaatgagatgttcgaagctgagggcgg

SEQ ID NO: 431253 - DNA, 30 bp, Artificial Sequence
  Synthetic oligonucleotide
ttcaggttcgcgaatgttttaaacgggcgg

SEQ ID NO: 431254 - DNA, 30 bp, Artificial Sequence
  Synthetic oligonucleotide
tcggcggattatgggtccgaggacgggcgg

SEQ ID NO: 431255 - DNA, 30 bp, Artificial Sequence
  Synthetic oligonucleotide
gtctgtattaacaaggtcgtgggcgggcgg

SEQ ID NO: 431256 - DNA, 30 bp, Artificial Sequence
  Synthetic oligonucleotide
aacgctggtctaccagcgaattatgggcgg

SEQ ID NO: 431257 - DNA, 30 bp, Artificial Sequence
  Synthetic oligonucleotide
tatgaacttaactgtcatcagcaatggcgg

SEQ ID NO: 431258 - DNA, 30 bp, Artificial Sequence
  Synthetic oligonucleotide
ccgcctattctatcagagtacacatggcgg

SEQ ID NO: 431259 - DNA, 30 bp, Artificial Sequence
  Synthetic oligonucleotide
tgggacgcatctgtgttttgtgcatggcgg

SEQ ID NO: 431260 - DNA, 30 bp, Artificial Sequence
  Synthetic oligonucleotide
aacccctctgaagttaacgaggcctggcgg

SEQ ID NO: 431261 - DNA, 30 bp, Artificial Sequence
  Synthetic oligonucleotide
attattagtgcgtatatgcctttgtggcgg

SEQ ID NO: 431262 - DNA, 31 bp, Artificial Sequence
  Synthetic oligonucleotide
tgctgagtaccaccatgttgacgtttggcgg

SEQ ID NO: 431263 - DNA, 30 bp, Artificial Sequence
  Synthetic oligonucleotide
cacaggcgaccaagaccgaagtacatgcgg

SEQ ID NO: 431264 - DNA, 30 bp, Artificial Sequence
  Synthetic oligonucleotide
accactatcaagtataagtctggcatgcgg

SEQ ID NO: 431265 - DNA, 30 bp, Artificial Sequence
  Synthetic oligonucleotide
ggttattaaccgccttctgattgcatgcgg

SEQ ID NO: 431266 - DNA, 30 bp, Artificial Sequence
  Synthetic oligonucleotide
tcaccataatggtgactgcacaggatgcgg

SEQ ID NO: 431267 - DNA, 30 bp, Artificial Sequence
  Synthetic oligonucleotide
agtaaacgcaacaaacctgagtctatgcgg

SEQ ID NO: 431268 - DNA, 30 bp, Artificial Sequence
  Synthetic oligonucleotide
attcgcgaaccgtttacacggttactgcgg

SEQ ID NO: 431269 - DNA, 30 bp, Artificial Sequence
  Synthetic oligonucleotide
cagggttctttaattcgtaccaccctgcgg

SEQ ID NO: 431270 - DNA, 30 bp, Artificial Sequence
  Synthetic oligonucleotide
ctgacctctttggggcgaataacgctgcgg

SEQ ID NO: 431271 - DNA, 30 bp, Artificial Sequence
  Synthetic oligonucleotide
gcttctcatttttagtttatgcatctgcgg

SEQ ID NO: 431272 - DNA, 30 bp, Artificial Sequence
  Synthetic oligonucleotide
tcctgtctaggattcattgaagaagtgcgg

SEQ ID NO: 431273 - DNA, 30 bp, Artificial Sequence
  Synthetic oligonucleotide
gtaatcgctcttttaatgcattcagtgcgg

SEQ ID NO: 431274 - DNA, 30 bp, Artificial Sequence
  Synthetic oligonucleotide
gacgcgcacaatataacttagcgagtgcgg

SEQ ID NO: 431275 - DNA, 30 bp, Artificial Sequence
  Synthetic oligonucleotide
gtatgtacgtgaccaaggatactcgtgcgg

SEQ ID NO: 431276 - DNA, 30 bp, Artificial Sequence
  Synthetic oligonucleotide
tatagactgatgtagtgagctctcgtgcgg

SEQ ID NO: 431277 - DNA, 30 bp, Artificial Sequence
  Synthetic oligonucleotide
ctgggccttatcgatgagggaacggtgcgg

SEQ ID NO: 431278 - DNA, 30 bp, Artificial Sequence
  Synthetic oligonucleotide
gctatgtgagttacatggagtatggtgcgg

SEQ ID NO: 431279 - DNA, 30 bp, Artificial Sequence
  Synthetic oligonucleotide
tgatttgcgtcccaggggcacacattgcgg

SEQ ID NO: 431280 - DNA, 30 bp, Artificial Sequence
  Synthetic oligonucleotide
aacaagctgtgcggtcttgtgcccttgcgg

SEQ ID NO: 431281 - DNA, 30 bp, Artificial Sequence
  Synthetic oligonucleotide
gctataacgcctcatcgacggtcaaatcgg

SEQ ID NO: 431282 - DNA, 30 bp, Artificial Sequence
  Synthetic oligonucleotide
tttgagggagagacgccggaaggaaatcgg

SEQ ID NO: 431283 - DNA, 30 bp, Artificial Sequence
  Synthetic oligonucleotide
ttcgcagtaacgcgtaagtacctaaatcgg

SEQ ID NO: 431284 - DNA, 30 bp, Artificial Sequence
  Synthetic oligonucleotide
ggactctcagtgggattgcctgccaatcgg

SEQ ID NO: 431285 - DNA, 30 bp, Artificial Sequence
  Synthetic oligonucleotide
aatgtgtaaattagggtcaaactcaatcgg

SEQ ID NO: 431286 - DNA, 30 bp, Artificial Sequence
  Synthetic oligonucleotide
tgttgaagcgcgtcgtttcataagaatcgg

SEQ ID NO: 431287 - DNA, 30 bp, Artificial Sequence
  Synthetic oligonucleotide
gtcgttttaattagggcaacaagtaatcgg

SEQ ID NO: 431288 - DNA, 30 bp, Artificial Sequence
  Synthetic oligonucleotide
ttgattgctatgattgtcgaaggtaatcgg

SEQ ID NO: 431289 - DNA, 30 bp, Artificial Sequence
  Synthetic oligonucleotide
cagcaagttcttagtggcgtaggacatcgg

SEQ ID NO: 431290 - DNA, 30 bp, Artificial Sequence
  Synthetic oligonucleotide
gtacacgtttgcgatgtcttatgacatcgg

SEQ ID NO: 431291 - DNA, 30 bp, Artificial Sequence
  Synthetic oligonucleotide
tatgttatggagggtgctggtgcgcatcgg

SEQ ID NO: 431292 - DNA, 30 bp, Artificial Sequence
  Synthetic oligonucleotide
aagaatcgccgaactgcaaatgtgcatcgg

SEQ ID NO: 431293 - DNA, 30 bp, Artificial Sequence
  Synthetic oligonucleotide
gtcaacgtcacttcgtaaagacttcatcgg

SEQ ID NO: 431294 - DNA, 30 bp, Artificial Sequence
  Synthetic oligonucleotide
acaggcccgtcgggttgttgtctagatcgg

SEQ ID NO: 431295 - DNA, 30 bp, Artificial Sequence
  Synthetic oligonucleotide
attccaactggaccgggtcaacgcgatcgg

SEQ ID NO: 431296 - DNA, 30 bp, Artificial Sequence
  Synthetic oligonucleotide
gaagttgattttaactacggtatatatcgg

SEQ ID NO: 431297 - DNA, 30 bp, Artificial Sequence
  Synthetic oligonucleotide
attgtgtattcttcccaacggaactatcgg

SEQ ID NO: 431298 - DNA, 30 bp, Artificial Sequence
  Synthetic oligonucleotide
ccccggctagacgagtccacaccctatcgg

SEQ ID NO: 431299 - DNA, 30 bp, Artificial Sequence
  Synthetic oligonucleotide
taaatatagtggattgccccgatgtatcgg

SEQ ID NO: 431300 - DNA, 30 bp, Artificial Sequence
  Synthetic oligonucleotide
aaggtataatagccaattctagattatcgg

SEQ ID NO: 431301 - DNA, 30 bp, Artificial Sequence
  Synthetic oligonucleotide
acatttaatttcgtgaaaggggtttatcgg

SEQ ID NO: 431302 - DNA, 30 bp, Artificial Sequence
  Synthetic oligonucleotide
agatgcagaaattagagtggaaagactcgg

SEQ ID NO: 431303 - DNA, 30 bp, Artificial Sequence
  Synthetic oligonucleotide
tgttagaagcgtattttcggagtacctcgg

SEQ ID NO: 431304 - DNA, 30 bp, Artificial Sequence
  Synthetic oligonucleotide
gcagccgttaatgcgtccaacccgcctcgg

SEQ ID NO: 431305 - DNA, 30 bp, Artificial Sequence
  Synthetic oligonucleotide
ggaacaattagtttgtattaacggcctcgg

SEQ ID NO: 431306 - DNA, 30 bp, Artificial Sequence
  Synthetic oligonucleotide
ccggatagtcatgatgctcagcaagctcgg

SEQ ID NO: 431307 - DNA, 30 bp, Artificial Sequence
  Synthetic oligonucleotide
cttactgagccggataactatccagctcgg

SEQ ID NO: 431308 - DNA, 30 bp, Artificial Sequence
  Synthetic oligonucleotide
aaatatgtgtggtggaacttagcagctcgg

SEQ ID NO: 431309 - DNA, 30 bp, Artificial Sequence
  Synthetic oligonucleotide
tttcagggtgggtgtttacacgcagctcgg

SEQ ID NO: 431310 - DNA, 30 bp, Artificial Sequence
  Synthetic oligonucleotide
acatctagaatcgtacgatttggagctcgg

SEQ ID NO: 431311 - DNA, 30 bp, Artificial Sequence
  Synthetic oligonucleotide
atgtttggcggagcacaaaatgacgctcgg

SEQ ID NO: 431312 - DNA, 30 bp, Artificial Sequence
  Synthetic oligonucleotide
tgattcaaaacagggttcctctccgctcgg

SEQ ID NO: 431313 - DNA, 30 bp, Artificial Sequence
  Synthetic oligonucleotide
agcaccgtcagagtgcaacttagcgctcgg

SEQ ID NO: 431314 - DNA, 30 bp, Artificial Sequence
  Synthetic oligonucleotide
ttactgggccgaaaattctgacctgctcgg

SEQ ID NO: 431315 - DNA, 30 bp, Artificial Sequence
  Synthetic oligonucleotide
cactttacacatgatggaaaatgtgctcgg

SEQ ID NO: 431316 - DNA, 30 bp, Artificial Sequence
  Synthetic oligonucleotide
cttagcgatactagcatttttaaatctcgg

SEQ ID NO: 431317 - DNA, 30 bp, Artificial Sequence
  Synthetic oligonucleotide
ccttcgtaggcggcccacgcaggctctcgg

SEQ ID NO: 431318 - DNA, 30 bp, Artificial Sequence
  Synthetic oligonucleotide
tgtctctgagggggacgcaacctctctcgg

SEQ ID NO: 431319 - DNA, 30 bp, Artificial Sequence
  Synthetic oligonucleotide
cgccccatgaggacggaggctttctctcgg

SEQ ID NO: 431320 - DNA, 30 bp, Artificial Sequence
  Synthetic oligonucleotide
gaaatgaatattaggagccattagtctcgg

SEQ ID NO: 431321 - DNA, 30 bp, Artificial Sequence
  Synthetic oligonucleotide
ttatgatccatcctgcgggaactgtctcgg

SEQ ID NO: 431322 - DNA, 30 bp, Artificial Sequence
  Synthetic oligonucleotide
aggtctacgttcagttatccatgttctcgg

SEQ ID NO: 431323 - DNA, 30 bp, Artificial Sequence
  Synthetic oligonucleotide
tgtttcatagacggaatataaaaaagtcgg

SEQ ID NO: 431324 - DNA, 30 bp, Artificial Sequence
  Synthetic oligonucleotide
ttacgagtcgcactgtctatagaaagtcgg

SEQ ID NO: 431325 - DNA, 30 bp, Artificial Sequence
  Synthetic oligonucleotide
gttcatttttttgtcactgttgacagtcgg

SEQ ID NO: 431326 - DNA, 30 bp, Artificial Sequence
  Synthetic oligonucleotide
caacagataactcattcagttaatagtcgg

SEQ ID NO: 431327 - DNA, 30 bp, Artificial Sequence
  Synthetic oligonucleotide
cgatatcacttgttgacacgagaccgtcgg

SEQ ID NO: 431328 - DNA, 30 bp, Artificial Sequence
  Synthetic oligonucleotide
tgttcgtaggacttgcgtactaagcgtcgg

SEQ ID NO: 431329 - DNA, 30 bp, Artificial Sequence
  Synthetic oligonucleotide
acggcgctctgggtcatcaatacgcgtcgg

SEQ ID NO: 431330 - DNA, 30 bp, Artificial Sequence
  Synthetic oligonucleotide
ttgtcgattacgctgttagcattgcgtcgg

SEQ ID NO: 431331 - DNA, 30 bp, Artificial Sequence
  Synthetic oligonucleotide
gcttcagtgtaaacatccaggaatcgtcgg

SEQ ID NO: 431332 - DNA, 30 bp, Artificial Sequence
  Synthetic oligonucleotide
ctacctgcaggacaagtcagtgatcgtcgg

SEQ ID NO: 431333 - DNA, 30 bp, Artificial Sequence
  Synthetic oligonucleotide
tgaattatcagtacactgtggcggggtcgg

SEQ ID NO: 431334 - DNA, 30 bp, Artificial Sequence
  Synthetic oligonucleotide
cggtaggttcggttggtagcaatgggtcgg

SEQ ID NO: 431335 - DNA, 30 bp, Artificial Sequence
  Synthetic oligonucleotide
gagcgcttgggggcaataaaatttggtcgg

SEQ ID NO: 431336 - DNA, 30 bp, Artificial Sequence
  Synthetic oligonucleotide
gacgtaacctgtacgagctactttggtcgg

SEQ ID NO: 431337 - DNA, 30 bp, Artificial Sequence
  Synthetic oligonucleotide
gaggtaggtagcgcccgttcctttggtcgg

SEQ ID NO: 431338 - DNA, 30 bp, Artificial Sequence
  Synthetic oligonucleotide
ccccctttatactacgttaacaaatgtcgg

SEQ ID NO: 431339 - DNA, 30 bp, Artificial Sequence
  Synthetic oligonucleotide
tcgcgtactgcaatgacgtagagatgtcgg

SEQ ID NO: 431340 - DNA, 30 bp, Artificial Sequence
  Synthetic oligonucleotide
ctcggatagtggtagcgactatgatgtcgg

SEQ ID NO: 431341 - DNA, 30 bp, Artificial Sequence
  Synthetic oligonucleotide
tgactccgccattcggaaaacgtatgtcgg

SEQ ID NO: 431342 - DNA, 30 bp, Artificial Sequence
  Synthetic oligonucleotide
actcccacagagcagtttaatttatgtcgg

SEQ ID NO: 431343 - DNA, 30 bp, Artificial Sequence
  Synthetic oligonucleotide
tctgacgtgcagttctaacggaactgtcgg

SEQ ID NO: 431344 - DNA, 30 bp, Artificial Sequence
  Synthetic oligonucleotide
gtttctaaatctatacacggggggtgtcgg

SEQ ID NO: 431345 - DNA, 30 bp, Artificial Sequence
  Synthetic oligonucleotide
ctactggtttgagtggcttatatcattcgg

SEQ ID NO: 431346 - DNA, 30 bp, Artificial Sequence
  Synthetic oligonucleotide
attccactgtttccgacagtcctcattcgg

SEQ ID NO: 431347 - DNA, 30 bp, Artificial Sequence
  Synthetic oligonucleotide
ctattctcagccggcattgatgagattcgg

SEQ ID NO: 431348 - DNA, 30 bp, Artificial Sequence
  Synthetic oligonucleotide
cattgtagttccgacgcattatcgattcgg

SEQ ID NO: 431349 - DNA, 30 bp, Artificial Sequence
  Synthetic oligonucleotide
tgcagctgttatggatgtttatcgattcgg

SEQ ID NO: 431350 - DNA, 30 bp, Artificial Sequence
  Synthetic oligonucleotide
tgtccgatattaccataggtaaggattcgg

SEQ ID NO: 431351 - DNA, 30 bp, Artificial Sequence
  Synthetic oligonucleotide
aataatggacgggcccaggtgcggattcgg

SEQ ID NO: 431352 - DNA, 30 bp, Artificial Sequence
  Synthetic oligonucleotide
tccctcagtcagaactgggggcatattcgg

SEQ ID NO: 431353 - DNA, 30 bp, Artificial Sequence
  Synthetic oligonucleotide
ttaataaacctgataatccgaacacttcgg

SEQ ID NO: 431354 - DNA, 30 bp, Artificial Sequence
  Synthetic oligonucleotide
aacacacgaagtggtgtgtaagcccttcgg

SEQ ID NO: 431355 - DNA, 30 bp, Artificial Sequence
  Synthetic oligonucleotide
ggtaggcacccaaagcgttgtcctcttcgg

SEQ ID NO: 431356 - DNA, 30 bp, Artificial Sequence
  Synthetic oligonucleotide
ggctgtggcgggtggaggcgggttcttcgg

SEQ ID NO: 431357 - DNA, 30 bp, Artificial Sequence
  Synthetic oligonucleotide
acaatgatagaggtagcatataaggttcgg

SEQ ID NO: 431358 - DNA, 30 bp, Artificial Sequence
  Synthetic oligonucleotide
ctgtatgccgagtgactctcttatgttcgg

SEQ ID NO: 431359 - DNA, 30 bp, Artificial Sequence
  Synthetic oligonucleotide
ataagactgagacgcgaagtcgctgttcgg

SEQ ID NO: 431360 - DNA, 30 bp, Artificial Sequence
  Synthetic oligonucleotide
atgagtatagatagctatgagcgtgttcgg

SEQ ID NO: 431361 - DNA, 30 bp, Artificial Sequence
  Synthetic oligonucleotide
gtccggggtatatttcgcgatcgtgttcgg

SEQ ID NO: 431362 - DNA, 30 bp, Artificial Sequence
  Synthetic oligonucleotide
gccaagtggagagcgacaccgaaatttcgg

SEQ ID NO: 431363 - DNA, 30 bp, Artificial Sequence
  Synthetic oligonucleotide
tcaagacatctgggcgtcttctcatttcgg

SEQ ID NO: 431364 - DNA, 30 bp, Artificial Sequence
  Synthetic oligonucleotide
ctgatgtaatgctcggagtacatatttcgg

SEQ ID NO: 431365 - DNA, 30 bp, Artificial Sequence
  Synthetic oligonucleotide
gcgattactgttctcagagattactttcgg

SEQ ID NO: 431366 - DNA, 30 bp, Artificial Sequence
  Synthetic oligonucleotide
tacagaaaaggactttatatgtcctttcgg

SEQ ID NO: 431367 - DNA, 30 bp, Artificial Sequence
  Synthetic oligonucleotide
aacagcgatgtgaaactcataaagtttcgg

SEQ ID NO: 431368 - DNA, 30 bp, Artificial Sequence
  Synthetic oligonucleotide
aggtcccaagttatgtgaagccattttcgg

SEQ ID NO: 431369 - DNA, 30 bp, Artificial Sequence
  Synthetic oligonucleotide
aacatggatccttttggtgagacttttcgg

SEQ ID NO: 431370 - DNA, 30 bp, Artificial Sequence
  Synthetic oligonucleotide
ttggccggtcgcttagcgagtcgaaaaggg

SEQ ID NO: 431371 - DNA, 30 bp, Artificial Sequence
  Synthetic oligonucleotide
aagtagtagggagcaccgctgatgaaaggg

SEQ ID NO: 431372 - DNA, 31 bp, Artificial Sequence
  Synthetic oligonucleotide
ccgagtggaggacccttattcactgaaaggg

SEQ ID NO: 431373 - DNA, 30 bp, Artificial Sequence
  Synthetic oligonucleotide
tcaacgtaccttttcgagcgacctaaaggg

SEQ ID NO: 431374 - DNA, 30 bp, Artificial Sequence
  Synthetic oligonucleotide
taattcggtaggtcagaaaactatcaaggg

SEQ ID NO: 431375 - DNA, 30 bp, Artificial Sequence
  Synthetic oligonucleotide
actcggactctttgagacaacgcagaaggg

SEQ ID NO: 431376 - DNA, 30 bp, Artificial Sequence
  Synthetic oligonucleotide
aatatcttccttgcatacggccgagaaggg

SEQ ID NO: 431377 - DNA, 30 bp, Artificial Sequence
  Synthetic oligonucleotide
aacttcgcaacactcctagaggtagaaggg

SEQ ID NO: 431378 - DNA, 31 bp, Artificial Sequence
  Synthetic oligonucleotide
aaggttttcgtccactctcatcatcgaaggg

SEQ ID NO: 431379 - DNA, 30 bp, Artificial Sequence
  Synthetic oligonucleotide
tgtccagcgggcgggggaattccggaaggg

SEQ ID NO: 431380 - DNA, 30 bp, Artificial Sequence
  Synthetic oligonucleotide
tgttgctgatgtcaacacggagcataaggg

SEQ ID NO: 431381 - DNA, 29 bp, Artificial Sequence
  Synthetic oligonucleotide
tttatataattgatacgataatataaggg

SEQ ID NO: 431382 - DNA, 30 bp, Artificial Sequence
  Synthetic oligonucleotide
gcacctgcattaacccttgcgtactaaggg

SEQ ID NO: 431383 - DNA, 30 bp, Artificial Sequence
  Synthetic oligonucleotide
ttcaactttccgcttacgattcagtaaggg

SEQ ID NO: 431384 - DNA, 30 bp, Artificial Sequence
  Synthetic oligonucleotide
ctctcccgtcaggtaagaccactgtaaggg

SEQ ID NO: 431385 - DNA, 30 bp, Artificial Sequence
  Synthetic oligonucleotide
cttgacggtacactatgctataattaaggg

SEQ ID NO: 431386 - DNA, 30 bp, Artificial Sequence
  Synthetic oligonucleotide
taagagaaagaagcccattgaatttaaggg

SEQ ID NO: 431387 - DNA, 30 bp, Artificial Sequence
  Synthetic oligonucleotide
tttttgaaggcgttaactttcgtcacaggg

SEQ ID NO: 431388 - DNA, 30 bp, Artificial Sequence
  Synthetic oligonucleotide
actgaggtcatcacatatagttggacaggg

SEQ ID NO: 431389 - DNA, 30 bp, Artificial Sequence
  Synthetic oligonucleotide
ctaattcctgcttactcaattctgacaggg

SEQ ID NO: 431390 - DNA, 30 bp, Artificial Sequence
  Synthetic oligonucleotide
tacccactccgcataccaggtaccccaggg

SEQ ID NO: 431391 - DNA, 30 bp, Artificial Sequence
  Synthetic oligonucleotide
taggttttaccgccagggaatagcccaggg

SEQ ID NO: 431392 - DNA, 30 bp, Artificial Sequence
  Synthetic oligonucleotide
ttacggtcggtggcgaatttggagccaggg

SEQ ID NO: 431393 - DNA, 30 bp, Artificial Sequence
  Synthetic oligonucleotide
cacttttggttagaatatcagaggccaggg

SEQ ID NO: 431394 - DNA, 30 bp, Artificial Sequence
  Synthetic oligonucleotide
atggtagaaccgggcgcgccacggccaggg

SEQ ID NO: 431395 - DNA, 30 bp, Artificial Sequence
  Synthetic oligonucleotide
gtgaagaactttacgacacgggggccaggg

SEQ ID NO: 431396 - DNA, 30 bp, Artificial Sequence
  Synthetic oligonucleotide
tatcccgaagggtgttggctctctccaggg

SEQ ID NO: 431397 - DNA, 30 bp, Artificial Sequence
  Synthetic oligonucleotide
ttctatcttctcgacggaataccagcaggg

SEQ ID NO: 431398 - DNA, 30 bp, Artificial Sequence
  Synthetic oligonucleotide
tgacgctggtaattaggacgcggagcaggg

SEQ ID NO: 431399 - DNA, 30 bp, Artificial Sequence
  Synthetic oligonucleotide
aagatattagcaaacccagtgggcgcaggg

SEQ ID NO: 431400 - DNA, 30 bp, Artificial Sequence
  Synthetic oligonucleotide
tcgggtagttttcttgtgtgggaggcaggg

SEQ ID NO: 431401 - DNA, 30 bp, Artificial Sequence
  Synthetic oligonucleotide
aattgtcacggtcacgtaggataggcaggg

SEQ ID NO: 431402 - DNA, 30 bp, Artificial Sequence
  Synthetic oligonucleotide
gtgactaatgtcgagccaggggcggcaggg

SEQ ID NO: 431403 - DNA, 30 bp, Artificial Sequence
  Synthetic oligonucleotide
atccttttgtggtttccttcgcatgcaggg

SEQ ID NO: 431404 - DNA, 30 bp, Artificial Sequence
  Synthetic oligonucleotide
caaatgataggcgtccaagagcagtcaggg

SEQ ID NO: 431405 - DNA, 30 bp, Artificial Sequence
  Synthetic oligonucleotide
atcggtagtatcgtacgcagtcggtcaggg

SEQ ID NO: 431406 - DNA, 30 bp, Artificial Sequence
  Synthetic oligonucleotide
gagggaatgacctttaggcttcgaagaggg

SEQ ID NO: 431407 - DNA, 30 bp, Artificial Sequence
  Synthetic oligonucleotide
cggcctttagcgtactatcagccgagaggg

SEQ ID NO: 431408 - DNA, 30 bp, Artificial Sequence
  Synthetic oligonucleotide
ccacatacggtgggtagacaggtgagaggg

SEQ ID NO: 431409 - DNA, 30 bp, Artificial Sequence
  Synthetic oligonucleotide
tcgcagtctctgcgattaaacgttagaggg

SEQ ID NO: 431410 - DNA, 30 bp, Artificial Sequence
  Synthetic oligonucleotide
gaggggggaatggtcggagcttttagaggg

SEQ ID NO: 431411 - DNA, 30 bp, Artificial Sequence
  Synthetic oligonucleotide
cccctaggcacattggtgagtgagcgaggg

SEQ ID NO: 431412 - DNA, 30 bp, Artificial Sequence
  Synthetic oligonucleotide
gcgggacgttagaatgtacgaatgcgaggg

SEQ ID NO: 431413 - DNA, 30 bp, Artificial Sequence
  Synthetic oligonucleotide
taagcctcctctcaaggtgagagaggaggg

SEQ ID NO: 431414 - DNA, 27 bp, Artificial Sequence
  Synthetic oligonucleotide
tgaacggccatctatattttaggaggg

SEQ ID NO: 431415 - DNA, 30 bp, Artificial Sequence
  Synthetic oligonucleotide
gcacgcggcgcggtcaaatccgccggaggg

SEQ ID NO: 431416 - DNA, 30 bp, Artificial Sequence
  Synthetic oligonucleotide
gcatgctggtgtattcctgtctgcggaggg

SEQ ID NO: 431417 - DNA, 30 bp, Artificial Sequence
  Synthetic oligonucleotide
tcctattccgcgagcagtctcgagggaggg

SEQ ID NO: 431418 - DNA, 30 bp, Artificial Sequence
  Synthetic oligonucleotide
cacggcactcgtcggcatgggtatggaggg

SEQ ID NO: 431419 - DNA, 30 bp, Artificial Sequence
  Synthetic oligonucleotide
tatgcgagtgtgtcttatttcccatgaggg

SEQ ID NO: 431420 - DNA, 30 bp, Artificial Sequence
  Synthetic oligonucleotide
acagacggcgtcaacctctgattctgaggg

SEQ ID NO: 431421 - DNA, 30 bp, Artificial Sequence
  Synthetic oligonucleotide
tctagaaggccctcaccaggggattgaggg

SEQ ID NO: 431422 - DNA, 30 bp, Artificial Sequence
  Synthetic oligonucleotide
cctgttacaggccgggtcctcagttgaggg

SEQ ID NO: 431423 - DNA, 30 bp, Artificial Sequence
  Synthetic oligonucleotide
tcaaatgaaaattctattggtttttgaggg

SEQ ID NO: 431424 - DNA, 30 bp, Artificial Sequence
  Synthetic oligonucleotide
tcatctggctagagaccatcgaacataggg

SEQ ID NO: 431425 - DNA, 30 bp, Artificial Sequence
  Synthetic oligonucleotide
agcgggaaggatatgctggcacccataggg

SEQ ID NO: 431426 - DNA, 30 bp, Artificial Sequence
  Synthetic oligonucleotide
gaattctggacggcaaataaagggataggg

SEQ ID NO: 431427 - DNA, 30 bp, Artificial Sequence
  Synthetic oligonucleotide
gtcttagctatgcagtattcatgtataggg

SEQ ID NO: 431428 - DNA, 30 bp, Artificial Sequence
  Synthetic oligonucleotide
tatcagccggtagcgtactggatcctaggg

SEQ ID NO: 431429 - DNA, 30 bp, Artificial Sequence
  Synthetic oligonucleotide
cttatttactagtcagtagctagtctaggg

SEQ ID NO: 431430 - DNA, 30 bp, Artificial Sequence
  Synthetic oligonucleotide
cggagtctatgtcgggaatctgttctaggg

SEQ ID NO: 431431 - DNA, 30 bp, Artificial Sequence
  Synthetic oligonucleotide
aaccctagagcgaggaactgttaagtaggg

SEQ ID NO: 431432 - DNA, 30 bp, Artificial Sequence
  Synthetic oligonucleotide
ttcacattgtcgggaggggtggacgtaggg

SEQ ID NO: 431433 - DNA, 30 bp, Artificial Sequence
  Synthetic oligonucleotide
gtcattttagacccacgtaattgcgtaggg

SEQ ID NO: 431434 - DNA, 30 bp, Artificial Sequence
  Synthetic oligonucleotide
gcctgttgctacgctattaagcgggtaggg

SEQ ID NO: 431435 - DNA, 30 bp, Artificial Sequence
  Synthetic oligonucleotide
ggtcttggatatgaggggcagcttgtaggg

SEQ ID NO: 431436 - DNA, 30 bp, Artificial Sequence
  Synthetic oligonucleotide
cagggttcacagacctcatagcaattaggg

SEQ ID NO: 431437 - DNA, 30 bp, Artificial Sequence
  Synthetic oligonucleotide
cgtacgttatctaatttctagtcattaggg

SEQ ID NO: 431438 - DNA, 30 bp, Artificial Sequence
  Synthetic oligonucleotide
acacccctggacgtgagttacgtattaggg

SEQ ID NO: 431439 - DNA, 30 bp, Artificial Sequence
  Synthetic oligonucleotide
tgtgcccccgtgctcgtgggcgcgttaggg

SEQ ID NO: 431440 - DNA, 30 bp, Artificial Sequence
  Synthetic oligonucleotide
ggttaaaagagttatgcgtgacatttaggg

SEQ ID NO: 431441 - DNA, 30 bp, Artificial Sequence
  Synthetic oligonucleotide
actcaacgctcgtatctgcatcctttaggg

SEQ ID NO: 431442 - DNA, 30 bp, Artificial Sequence
  Synthetic oligonucleotide
atcggtcgagacgtttactttcttttaggg

SEQ ID NO: 431443 - DNA, 30 bp, Artificial Sequence
  Synthetic oligonucleotide
tagtcgggagtgaggcgctagcaaaacggg

SEQ ID NO: 431444 - DNA, 30 bp, Artificial Sequence
  Synthetic oligonucleotide
atagccgtaggttacgtgtcaagaaacggg

SEQ ID NO: 431445 - DNA, 30 bp, Artificial Sequence
  Synthetic oligonucleotide
ggcccgtcgttgcgtaagacgctcaacggg

SEQ ID NO: 431446 - DNA, 30 bp, Artificial Sequence
  Synthetic oligonucleotide
actaagtattcgcaaaaccatatgaacggg

SEQ ID NO: 431447 - DNA, 30 bp, Artificial Sequence
  Synthetic oligonucleotide
ttaaagctcccccggtattgcgataacggg

SEQ ID NO: 431448 - DNA, 30 bp, Artificial Sequence
  Synthetic oligonucleotide
gtcttccagacacccagtggcgctaacggg

SEQ ID NO: 431449 - DNA, 30 bp, Artificial Sequence
  Synthetic oligonucleotide
tgtgctggtaagaagtcatagggtaacggg

SEQ ID NO: 431450 - DNA, 30 bp, Artificial Sequence
  Synthetic oligonucleotide
cattctggtcccgacgttttttgtaacggg

SEQ ID NO: 431451 - DNA, 30 bp, Artificial Sequence
  Synthetic oligonucleotide
gacatatagctacggtgaaactaacacggg

SEQ ID NO: 431452 - DNA, 30 bp, Artificial Sequence
  Synthetic oligonucleotide
tgccctgtatcatgaacgctgttccacggg

SEQ ID NO: 431453 - DNA, 30 bp, Artificial Sequence
  Synthetic oligonucleotide
agagtgttattctgctggagtttccacggg

SEQ ID NO: 431454 - DNA, 30 bp, Artificial Sequence
  Synthetic oligonucleotide
agtggacttattcttaaggataagcacggg

SEQ ID NO: 431455 - DNA, 30 bp, Artificial Sequence
  Synthetic oligonucleotide
ttccgtcatactcaaaatttaaggcacggg

SEQ ID NO: 431456 - DNA, 30 bp, Artificial Sequence
  Synthetic oligonucleotide
ttggtcttgcaactggatgggcggcacggg

SEQ ID NO: 431457 - DNA, 30 bp, Artificial Sequence
  Synthetic oligonucleotide
ataatgatagttgtacgtatttgtcacggg

SEQ ID NO: 431458 - DNA, 30 bp, Artificial Sequence
  Synthetic oligonucleotide
ctaatacctgaggcatctcaccgagacggg

SEQ ID NO: 431459 - DNA, 30 bp, Artificial Sequence
  Synthetic oligonucleotide
agttccgccctggaaactaacggagacggg

SEQ ID NO: 431460 - DNA, 30 bp, Artificial Sequence
  Synthetic oligonucleotide
tagtgtagctctgacttggacctagacggg

SEQ ID NO: 431461 - DNA, 30 bp, Artificial Sequence
  Synthetic oligonucleotide
gaggcttatgccaactaatattccgacggg

SEQ ID NO: 431462 - DNA, 30 bp, Artificial Sequence
  Synthetic oligonucleotide
ccgccgaaacagtttattggccaggacggg

SEQ ID NO: 431463 - DNA, 30 bp, Artificial Sequence
  Synthetic oligonucleotide
ggctacttacgttatcctgttaatgacggg

SEQ ID NO: 431464 - DNA, 30 bp, Artificial Sequence
  Synthetic oligonucleotide
atcccggcgtatggcaaaagaactgacggg

SEQ ID NO: 431465 - DNA, 30 bp, Artificial Sequence
  Synthetic oligonucleotide
gaagattttggactcgacgttagtgacggg

SEQ ID NO: 431466 - DNA, 30 bp, Artificial Sequence
  Synthetic oligonucleotide
ccttatcgtcctaaaagcggacttgacggg

SEQ ID NO: 431467 - DNA, 30 bp, Artificial Sequence
  Synthetic oligonucleotide
tggcttaagcagacgtgatatccatacggg

SEQ ID NO: 431468 - DNA, 30 bp, Artificial Sequence
  Synthetic oligonucleotide
atggctacgagttcttaatttccatacggg

SEQ ID NO: 431469 - DNA, 30 bp, Artificial Sequence
  Synthetic oligonucleotide
gccttcggcgcagtaggagagacctacggg

SEQ ID NO: 431470 - DNA, 30 bp, Artificial Sequence
  Synthetic oligonucleotide
cccgttattcacagcgtcgaatagtacggg

SEQ ID NO: 431471 - DNA, 30 bp, Artificial Sequence
  Synthetic oligonucleotide
caaccgatgggacgcgcatgcgcgtacggg

SEQ ID NO: 431472 - DNA, 30 bp, Artificial Sequence
  Synthetic oligonucleotide
aaatgtaacgggtcggcatataggtacggg

SEQ ID NO: 431473 - DNA, 30 bp, Artificial Sequence
  Synthetic oligonucleotide
ttctcgtctattattataaatggttacggg

SEQ ID NO: 431474 - DNA, 30 bp, Artificial Sequence
  Synthetic oligonucleotide
aacgtaactgtctattgttaccaaaccggg

SEQ ID NO: 431475 - DNA, 30 bp, Artificial Sequence
  Synthetic oligonucleotide
atgatatatgcatttacgcgtataaccggg

SEQ ID NO: 431476 - DNA, 30 bp, Artificial Sequence
  Synthetic oligonucleotide
agggaagctcccggcattaagtacaccggg

SEQ ID NO: 431477 - DNA, 30 bp, Artificial Sequence
  Synthetic oligonucleotide
gtttaggtttgattacgtgaatccaccggg

SEQ ID NO: 431478 - DNA, 30 bp, Artificial Sequence
  Synthetic oligonucleotide
gtgggagatcatttctttacgaaacccggg

SEQ ID NO: 431479 - DNA, 30 bp, Artificial Sequence
  Synthetic oligonucleotide
atagctctgtgtggactttagcaacccggg

SEQ ID NO: 431480 - DNA, 30 bp, Artificial Sequence
  Synthetic oligonucleotide
gtcaagtttatcctaggatacatgcccggg

SEQ ID NO: 431481 - DNA, 30 bp, Artificial Sequence
  Synthetic oligonucleotide
gtcctcgtgggggtccggtttatagccggg

SEQ ID NO: 431482 - DNA, 30 bp, Artificial Sequence
  Synthetic oligonucleotide
taaaggacctaggatggtttgaacgccggg

SEQ ID NO: 431483 - DNA, 30 bp, Artificial Sequence
  Synthetic oligonucleotide
tgatcaatgaaatcctttacggacgccggg

SEQ ID NO: 431484 - DNA, 30 bp, Artificial Sequence
  Synthetic oligonucleotide
agaagttaatcaaccgccggggaggccggg

SEQ ID NO: 431485 - DNA, 30 bp, Artificial Sequence
  Synthetic oligonucleotide
tttattccattaacgaaattaacggccggg

SEQ ID NO: 431486 - DNA, 30 bp, Artificial Sequence
  Synthetic oligonucleotide
gcaaatgcggttggccgtcgagtatccggg

SEQ ID NO: 431487 - DNA, 30 bp, Artificial Sequence
  Synthetic oligonucleotide
ggttagcagacagaaggggtccactccggg

SEQ ID NO: 431488 - DNA, 30 bp, Artificial Sequence
  Synthetic oligonucleotide
tttcgattagtcttaatatgaggctccggg

SEQ ID NO: 431489 - DNA, 30 bp, Artificial Sequence
  Synthetic oligonucleotide
caatccagcactaccggaactggctccggg

SEQ ID NO: 431490 - DNA, 30 bp, Artificial Sequence
  Synthetic oligonucleotide
ttttgacgctgaactgccgtagtctccggg

SEQ ID NO: 431491 - DNA, 30 bp, Artificial Sequence
  Synthetic oligonucleotide
aaatatactttagggactaatacgtccggg

SEQ ID NO: 431492 - DNA, 30 bp, Artificial Sequence
  Synthetic oligonucleotide
ggattcaaacatctcatatggtcgtccggg

SEQ ID NO: 431493 - DNA, 30 bp, Artificial Sequence
  Synthetic oligonucleotide
atagaacggagggattagaattggtccggg

SEQ ID NO: 431494 - DNA, 30 bp, Artificial Sequence
  Synthetic oligonucleotide
ccaatttggggataccagcattcttccggg

SEQ ID NO: 431495 - DNA, 30 bp, Artificial Sequence
  Synthetic oligonucleotide
accacaagggttaccctgctagcaagcggg

SEQ ID NO: 431496 - DNA, 30 bp, Artificial Sequence
  Synthetic oligonucleotide
cctttcacgtataccctgccatacagcggg

SEQ ID NO: 431497 - DNA, 30 bp, Artificial Sequence
  Synthetic oligonucleotide
aggggggggctagcattgtaaggcagcggg

SEQ ID NO: 431498 - DNA, 30 bp, Artificial Sequence
  Synthetic oligonucleotide
atgaccccgacgtgaggtattgcgagcggg

SEQ ID NO: 431499 - DNA, 30 bp, Artificial Sequence
  Synthetic oligonucleotide
agtcccctcatggccgaaatccatagcggg

SEQ ID NO: 431500 - DNA, 30 bp, Artificial Sequence
  Synthetic oligonucleotide
tatggttgatatctctcgcaggttagcggg

SEQ ID NO: 431501 - DNA, 30 bp, Artificial Sequence
  Synthetic oligonucleotide
aatcgtcattaagagtcaggcctgcgcggg

SEQ ID NO: 431502 - DNA, 30 bp, Artificial Sequence
  Synthetic oligonucleotide
gagggataaaggtgtttaggcaatcgcggg

SEQ ID NO: 431503 - DNA, 25 bp, Artificial Sequence
  Synthetic oligonucleotide
ctagacgatactgcatcctcgcggg

SEQ ID NO: 431504 - DNA, 30 bp, Artificial Sequence
  Synthetic oligonucleotide
gtctcctggatggccggggctttaggcggg

SEQ ID NO: 431505 - DNA, 30 bp, Artificial Sequence
  Synthetic oligonucleotide
aagctagtgccggagtttgagcccggcggg

SEQ ID NO: 431506 - DNA, 30 bp, Artificial Sequence
  Synthetic oligonucleotide
agaaattttgaggtaatcttagccggcggg

SEQ ID NO: 431507 - DNA, 30 bp, Artificial Sequence
  Synthetic oligonucleotide
gcttacccttatgcgtcggtgtatggcggg

SEQ ID NO: 431508 - DNA, 30 bp, Artificial Sequence
  Synthetic oligonucleotide
tgttatggtatgcacccgtcataatgcggg

SEQ ID NO: 431509 - DNA, 30 bp, Artificial Sequence
  Synthetic oligonucleotide
ttaactcactcccatctaggatgatgcggg

SEQ ID NO: 431510 - DNA, 30 bp, Artificial Sequence
  Synthetic oligonucleotide
tcgcaccaaatgtgagtttggccctgcggg

SEQ ID NO: 431511 - DNA, 30 bp, Artificial Sequence
  Synthetic oligonucleotide
ccgttgcatacagcctattagttctgcggg

SEQ ID NO: 431512 - DNA, 30 bp, Artificial Sequence
  Synthetic oligonucleotide
tatgtttcattaacggccagcctgtgcggg

SEQ ID NO: 431513 - DNA, 30 bp, Artificial Sequence
  Synthetic oligonucleotide
ggcgcctaaggcgggcggtgcacttgcggg

SEQ ID NO: 431514 - DNA, 30 bp, Artificial Sequence
  Synthetic oligonucleotide
caaagctaccgaagcggcactggttgcggg

SEQ ID NO: 431515 - DNA, 30 bp, Artificial Sequence
  Synthetic oligonucleotide
ccgcgatgtggcacccaaaaagtttgcggg

SEQ ID NO: 431516 - DNA, 30 bp, Artificial Sequence
  Synthetic oligonucleotide
ctcatacttttgcggggtcctatgatcggg

SEQ ID NO: 431517 - DNA, 30 bp, Artificial Sequence
  Synthetic oligonucleotide
tttatagcgcaaaaagtaccatatatcggg

SEQ ID NO: 431518 - DNA, 30 bp, Artificial Sequence
  Synthetic oligonucleotide
gatcattgctctaccgactggctactcggg

SEQ ID NO: 431519 - DNA, 30 bp, Artificial Sequence
  Synthetic oligonucleotide
actatgggttagtgggcggtgaccctcggg

SEQ ID NO: 431520 - DNA, 30 bp, Artificial Sequence
  Synthetic oligonucleotide
ggacggggccttaagggggctggcctcggg

SEQ ID NO: 431521 - DNA, 30 bp, Artificial Sequence
  Synthetic oligonucleotide
gtaggccagctgcaggatatcctcctcggg

SEQ ID NO: 431522 - DNA, 30 bp, Artificial Sequence
  Synthetic oligonucleotide
tttaaggtgggtccataataagtcctcggg

SEQ ID NO: 431523 - DNA, 30 bp, Artificial Sequence
  Synthetic oligonucleotide
gtatttccgtgcgtacggttcatgctcggg

SEQ ID NO: 431524 - DNA, 30 bp, Artificial Sequence
  Synthetic oligonucleotide
aagtatatcctacatctatctttgctcggg

SEQ ID NO: 431525 - DNA, 30 bp, Artificial Sequence
  Synthetic oligonucleotide
aaattgggatgtttgagtagttatctcggg

SEQ ID NO: 431526 - DNA, 30 bp, Artificial Sequence
  Synthetic oligonucleotide
ttccagggggaaagatcatagcctctcggg

SEQ ID NO: 431527 - DNA, 30 bp, Artificial Sequence
  Synthetic oligonucleotide
tttgtcgcgtccagcaatcacaccgtcggg

SEQ ID NO: 431528 - DNA, 30 bp, Artificial Sequence
  Synthetic oligonucleotide
cctgctcacccggctttggtacgggtcggg

SEQ ID NO: 431529 - DNA, 30 bp, Artificial Sequence
  Synthetic oligonucleotide
aatgccaactaaaaatgctatcgggtcggg

SEQ ID NO: 431530 - DNA, 30 bp, Artificial Sequence
  Synthetic oligonucleotide
catatgccccggtactcaatgaatgtcggg

SEQ ID NO: 431531 - DNA, 30 bp, Artificial Sequence
  Synthetic oligonucleotide
ttaagattgcggggtatgactccattcggg

SEQ ID NO: 431532 - DNA, 30 bp, Artificial Sequence
  Synthetic oligonucleotide
gtttctcgtctctcgtgatatgcattcggg

SEQ ID NO: 431533 - DNA, 30 bp, Artificial Sequence
  Synthetic oligonucleotide
accttccgggtcggtccacgagagttcggg

SEQ ID NO: 431534 - DNA, 30 bp, Artificial Sequence
  Synthetic oligonucleotide
cgcagtgccaccgaaagcggaaggttcggg

SEQ ID NO: 431535 - DNA, 30 bp, Artificial Sequence
  Synthetic oligonucleotide
tatacgcccggtgttttacatggaaagggg

SEQ ID NO: 431536 - DNA, 30 bp, Artificial Sequence
  Synthetic oligonucleotide
gtgagtaagaacgtcaaccccttaaagggg

SEQ ID NO: 431537 - DNA, 30 bp, Artificial Sequence
  Synthetic oligonucleotide
gactccttaccctagaaaatgtggaagggg

SEQ ID NO: 431538 - DNA, 30 bp, Artificial Sequence
  Synthetic oligonucleotide
aaatcattaataccccacctaggacagggg

SEQ ID NO: 431539 - DNA, 30 bp, Artificial Sequence
  Synthetic oligonucleotide
gcggttgaaaaattctgggttttacagggg

SEQ ID NO: 431540 - DNA, 30 bp, Artificial Sequence
  Synthetic oligonucleotide
ggacggcttgagtttctaaatgcgcagggg

SEQ ID NO: 431541 - DNA, 30 bp, Artificial Sequence
  Synthetic oligonucleotide
ccgcacccatttttacaagaggttcagggg

SEQ ID NO: 431542 - DNA, 30 bp, Artificial Sequence
  Synthetic oligonucleotide
tttcaacggctacctttgattaacgagggg

SEQ ID NO: 431543 - DNA, 29 bp, Artificial Sequence
  Synthetic oligonucleotide
actcagggatatagtggcaagtggagggg

SEQ ID NO: 431544 - DNA, 30 bp, Artificial Sequence
  Synthetic oligonucleotide
gcactttccaccaggaggcccactgagggg

SEQ ID NO: 431545 - DNA, 30 bp, Artificial Sequence
  Synthetic oligonucleotide
ggttcctggcatggaagcataccttagggg

SEQ ID NO: 431546 - DNA, 30 bp, Artificial Sequence
  Synthetic oligonucleotide
agaagcagggataagaattaaccaacgggg

SEQ ID NO: 431547 - DNA, 30 bp, Artificial Sequence
  Synthetic oligonucleotide
catggcttctctgccgcttgcggaacgggg

SEQ ID NO: 431548 - DNA, 30 bp, Artificial Sequence
  Synthetic oligonucleotide
taccactcgcactcatcactggtaacgggg

SEQ ID NO: 431549 - DNA, 30 bp, Artificial Sequence
  Synthetic oligonucleotide
gatatatattaggaacgacttttaacgggg

SEQ ID NO: 431550 - DNA, 30 bp, Artificial Sequence
  Synthetic oligonucleotide
accgacgtactatgtgcgcaaaccacgggg

SEQ ID NO: 431551 - DNA, 30 bp, Artificial Sequence
  Synthetic oligonucleotide
gtggcgtacacgggcctaaaggtgacgggg

SEQ ID NO: 431552 - DNA, 30 bp, Artificial Sequence
  Synthetic oligonucleotide
ctcatacgtcccgtggcttcgcaaccgggg

SEQ ID NO: 431553 - DNA, 30 bp, Artificial Sequence
  Synthetic oligonucleotide
tacctttagacgcctgggcggttaccgggg

SEQ ID NO: 431554 - DNA, 30 bp, Artificial Sequence
  Synthetic oligonucleotide
tctgggtgacgcccttgttaccacccgggg

SEQ ID NO: 431555 - DNA, 30 bp, Artificial Sequence
  Synthetic oligonucleotide
gttatccatcacggagtagggtttccgggg

SEQ ID NO: 431556 - DNA, 30 bp, Artificial Sequence
  Synthetic oligonucleotide
gcttacagggggcaacttaatgacgcgggg

SEQ ID NO: 431557 - DNA, 30 bp, Artificial Sequence
  Synthetic oligonucleotide
gtaggggtctgccctatcaccaccgcgggg

SEQ ID NO: 431558 - DNA, 30 bp, Artificial Sequence
  Synthetic oligonucleotide
gtttgtcgaaatccccgaaatctcgcgggg

SEQ ID NO: 431559 - DNA, 30 bp, Artificial Sequence
  Synthetic oligonucleotide
aaaatcttgggggggccccttacggcgggg

SEQ ID NO: 431560 - DNA, 30 bp, Artificial Sequence
  Synthetic oligonucleotide
cccgcagagggtcggaggggtagggcgggg

SEQ ID NO: 431561 - DNA, 30 bp, Artificial Sequence
  Synthetic oligonucleotide
cggtcctcagcggcgggcgacggggcgggg

SEQ ID NO: 431562 - DNA, 30 bp, Artificial Sequence
  Synthetic oligonucleotide
aaaggtgattccctttactttctggcgggg

SEQ ID NO: 431563 - DNA, 31 bp, Artificial Sequence
  Synthetic oligonucleotide
gaaaagccgcacatttccgtatagtgcgggg

SEQ ID NO: 431564 - DNA, 30 bp, Artificial Sequence
  Synthetic oligonucleotide
tccgtatctcccgttttttgttgtgcgggg

SEQ ID NO: 431565 - DNA, 30 bp, Artificial Sequence
  Synthetic oligonucleotide
tggatttaggaggtggagctggttgcgggg

SEQ ID NO: 431566 - DNA, 30 bp, Artificial Sequence
  Synthetic oligonucleotide
ccgcacgcgctacccaagggatactcgggg

SEQ ID NO: 431567 - DNA, 30 bp, Artificial Sequence
  Synthetic oligonucleotide
gcagacaggatttatatcgtgacctcgggg

SEQ ID NO: 431568 - DNA, 30 bp, Artificial Sequence
  Synthetic oligonucleotide
tacgtgtacatggacatgtgtttctcgggg

SEQ ID NO: 431569 - DNA, 30 bp, Artificial Sequence
  Synthetic oligonucleotide
agatttcaagttcaagcggtgacgtcgggg

SEQ ID NO: 431570 - DNA, 30 bp, Artificial Sequence
  Synthetic oligonucleotide
gtaataatcttgggaccgggattgtcgggg

SEQ ID NO: 431571 - DNA, 30 bp, Artificial Sequence
  Synthetic oligonucleotide
acactgttacaacagggattggattcgggg

SEQ ID NO: 431572 - DNA, 30 bp, Artificial Sequence
  Synthetic oligonucleotide
attcatcaaggcgcaagtccaccttcgggg

SEQ ID NO: 431573 - DNA, 30 bp, Artificial Sequence
  Synthetic oligonucleotide
aaaggtctccacgttccacctctttcgggg

SEQ ID NO: 431574 - DNA, 30 bp, Artificial Sequence
  Synthetic oligonucleotide
gtcaaatttgttccaccgtcttgaaggggg

SEQ ID NO: 431575 - DNA, 30 bp, Artificial Sequence
  Synthetic oligonucleotide
gaccgccaattttgagctatattcaggggg

SEQ ID NO: 431576 - DNA, 30 bp, Artificial Sequence
  Synthetic oligonucleotide
aatttgtacggccaagcccggaagaggggg

SEQ ID NO: 431577 - DNA, 30 bp, Artificial Sequence
  Synthetic oligonucleotide
tttagtatttttagtcgggccacgaggggg

SEQ ID NO: 431578 - DNA, 30 bp, Artificial Sequence
  Synthetic oligonucleotide
agagacctacccgataaacgatctaggggg

SEQ ID NO: 431579 - DNA, 30 bp, Artificial Sequence
  Synthetic oligonucleotide
ggagttttgccgaagctccgtaaagggggg

SEQ ID NO: 431580 - DNA, 30 bp, Artificial Sequence
  Synthetic oligonucleotide
tccctacggctgccgagtaaaccagggggg

SEQ ID NO: 431581 - DNA, 30 bp, Artificial Sequence
  Synthetic oligonucleotide
atcaaacatttgtcagagtctggagggggg

SEQ ID NO: 431582 - DNA, 30 bp, Artificial Sequence
  Synthetic oligonucleotide
gccagaccttgcttgtattagtgagggggg

SEQ ID NO: 431583 - DNA, 30 bp, Artificial Sequence
  Synthetic oligonucleotide
gcccaatctcacctactataggacgggggg

SEQ ID NO: 431584 - DNA, 30 bp, Artificial Sequence
  Synthetic oligonucleotide
aatgtcgaaaacctcgcggtctccgggggg

SEQ ID NO: 431585 - DNA, 30 bp, Artificial Sequence
  Synthetic oligonucleotide
tcaaaagacggttaggggtgccaggggggg

SEQ ID NO: 431586 - DNA, 30 bp, Artificial Sequence
  Synthetic oligonucleotide
actcgggttggacttagcgctccggggggg

SEQ ID NO: 431587 - DNA, 30 bp, Artificial Sequence
  Synthetic oligonucleotide
catattaagctcatgacgcatctggggggg

SEQ ID NO: 431588 - DNA, 30 bp, Artificial Sequence
  Synthetic oligonucleotide
gctctttgcgactctggatccgtggggggg

SEQ ID NO: 431589 - DNA, 30 bp, Artificial Sequence
  Synthetic oligonucleotide
gaagtaaacagcgcctacccacatgggggg

SEQ ID NO: 431590 - DNA, 30 bp, Artificial Sequence
  Synthetic oligonucleotide
cgcggagggtagcgcctgggtactgggggg

SEQ ID NO: 431591 - DNA, 30 bp, Artificial Sequence
  Synthetic oligonucleotide
caccccgcgtcatgaggcaaacaatggggg

SEQ ID NO: 431592 - DNA, 30 bp, Artificial Sequence
  Synthetic oligonucleotide
cacctcggcttttaatttgcgtaatggggg

SEQ ID NO: 431593 - DNA, 30 bp, Artificial Sequence
  Synthetic oligonucleotide
atagtgccctgtatttagaattcatggggg

SEQ ID NO: 431594 - DNA, 30 bp, Artificial Sequence
  Synthetic oligonucleotide
tcggtacacaagttcgccgccatatggggg

SEQ ID NO: 431595 - DNA, 30 bp, Artificial Sequence
  Synthetic oligonucleotide
gagcgcaggcggtgctctactcgctggggg

SEQ ID NO: 431596 - DNA, 31 bp, Artificial Sequence
  Synthetic oligonucleotide
gtatcttgttatctgagacgtgtgctggggg

SEQ ID NO: 431597 - DNA, 30 bp, Artificial Sequence
  Synthetic oligonucleotide
ctactttttgggcagggtctgccgtggggg

SEQ ID NO: 431598 - DNA, 30 bp, Artificial Sequence
  Synthetic oligonucleotide
tcgaggcgggatatctctttggggtggggg

SEQ ID NO: 431599 - DNA, 30 bp, Artificial Sequence
  Synthetic oligonucleotide
ttatacgtgcggcctccgactatgtggggg

SEQ ID NO: 431600 - DNA, 30 bp, Artificial Sequence
  Synthetic oligonucleotide
ctagattttagtcttatagtatcttggggg

SEQ ID NO: 431601 - DNA, 30 bp, Artificial Sequence
  Synthetic oligonucleotide
cataggctttttgaccttgcaaaaatgggg

SEQ ID NO: 431602 - DNA, 30 bp, Artificial Sequence
  Synthetic oligonucleotide
ctgcagggctcatctcgatagagaatgggg

SEQ ID NO: 431603 - DNA, 30 bp, Artificial Sequence
  Synthetic oligonucleotide
gaaatcccacaggcaggaagaggcatgggg

SEQ ID NO: 431604 - DNA, 30 bp, Artificial Sequence
  Synthetic oligonucleotide
tctcccgaccgtgtagcccgccgtatgggg

SEQ ID NO: 431605 - DNA, 30 bp, Artificial Sequence
  Synthetic oligonucleotide
cacgaaggagggtcggtctaaggtatgggg

SEQ ID NO: 431606 - DNA, 30 bp, Artificial Sequence
  Synthetic oligonucleotide
tgacctgcttcctgtgtattatcactgggg

SEQ ID NO: 431607 - DNA, 30 bp, Artificial Sequence
  Synthetic oligonucleotide
tagaaggtactctatgtgaacatactgggg

SEQ ID NO: 431608 - DNA, 30 bp, Artificial Sequence
  Synthetic oligonucleotide
gtagaagccagcaacttttcaaacctgggg

SEQ ID NO: 431609 - DNA, 30 bp, Artificial Sequence
  Synthetic oligonucleotide
aattaaaagtggttagataacgccctgggg

SEQ ID NO: 431610 - DNA, 30 bp, Artificial Sequence
  Synthetic oligonucleotide
gttacggtgctccgggtacgggccctgggg

SEQ ID NO: 431611 - DNA, 30 bp, Artificial Sequence
  Synthetic oligonucleotide
acggtccggttggggcatattagcctgggg

SEQ ID NO: 431612 - DNA, 30 bp, Artificial Sequence
  Synthetic oligonucleotide
gttgaggttggactgcgactcatcctgggg

SEQ ID NO: 431613 - DNA, 30 bp, Artificial Sequence
  Synthetic oligonucleotide
ttagttcgtacggtaacggccacgctgggg

SEQ ID NO: 431614 - DNA, 30 bp, Artificial Sequence
  Synthetic oligonucleotide
ccgcactctcggatttctggaggtctgggg

SEQ ID NO: 431615 - DNA, 30 bp, Artificial Sequence
  Synthetic oligonucleotide
tgcctcgtggcaaggcccgctttagtgggg

SEQ ID NO: 431616 - DNA, 30 bp, Artificial Sequence
  Synthetic oligonucleotide
agaatacaaaggtgactaactgccgtgggg

SEQ ID NO: 431617 - DNA, 30 bp, Artificial Sequence
  Synthetic oligonucleotide
gcacaccacatgcaatcttagcgcgtgggg

SEQ ID NO: 431618 - DNA, 30 bp, Artificial Sequence
  Synthetic oligonucleotide
tatccacgcccttaagtgacacaggtgggg

SEQ ID NO: 431619 - DNA, 30 bp, Artificial Sequence
  Synthetic oligonucleotide
gatgaaaaaatatgcattctggatgtgggg

SEQ ID NO: 431620 - DNA, 30 bp, Artificial Sequence
  Synthetic oligonucleotide
tcatgctgttagcgagtcgacaaattgggg

SEQ ID NO: 431621 - DNA, 27 bp, Artificial Sequence
  Synthetic oligonucleotide
ttatgcaagatcatgttcccattgggg

SEQ ID NO: 431622 - DNA, 30 bp, Artificial Sequence
  Synthetic oligonucleotide
aaactttcgatacccccgtgctacttgggg

SEQ ID NO: 431623 - DNA, 30 bp, Artificial Sequence
  Synthetic oligonucleotide
ttttgcattattatgcgagctgccttgggg

SEQ ID NO: 431624 - DNA, 30 bp, Artificial Sequence
  Synthetic oligonucleotide
gccacatcgcattggaatgcatccttgggg

SEQ ID NO: 431625 - DNA, 30 bp, Artificial Sequence
  Synthetic oligonucleotide
cagttgctcttgttcgtatttttgttgggg

SEQ ID NO: 431626 - DNA, 30 bp, Artificial Sequence
  Synthetic oligonucleotide
ctgacagggtgtaactggtctcgtttgggg

SEQ ID NO: 431627 - DNA, 30 bp, Artificial Sequence
  Synthetic oligonucleotide
gagcgactcagaacatggtctaaaaatggg

SEQ ID NO: 431628 - DNA, 30 bp, Artificial Sequence
  Synthetic oligonucleotide
tatccgtgagcgcgaggtacgcaaaatggg

SEQ ID NO: 431629 - DNA, 30 bp, Artificial Sequence
  Synthetic oligonucleotide
ggtgcctatgctcggccgtcggcaaatggg

SEQ ID NO: 431630 - DNA, 30 bp, Artificial Sequence
  Synthetic oligonucleotide
gatgtctgggcctcaagatgtaacaatggg

SEQ ID NO: 431631 - DNA, 30 bp, Artificial Sequence
  Synthetic oligonucleotide
accccagttcgggcagcagatcctaatggg

SEQ ID NO: 431632 - DNA, 30 bp, Artificial Sequence
  Synthetic oligonucleotide
tgtacactcctgttagagtgcattaatggg

SEQ ID NO: 431633 - DNA, 30 bp, Artificial Sequence
  Synthetic oligonucleotide
acaaaaactgtggttacacacgcgcatggg

SEQ ID NO: 431634 - DNA, 30 bp, Artificial Sequence
  Synthetic oligonucleotide
taataataaagcaaccacgccgtagatggg

SEQ ID NO: 431635 - DNA, 30 bp, Artificial Sequence
  Synthetic oligonucleotide
tgcaaccatcacagtaatctctgggatggg

SEQ ID NO: 431636 - DNA, 30 bp, Artificial Sequence
  Synthetic oligonucleotide
gcgtttgggtatgggttaaccggtgatggg

SEQ ID NO: 431637 - DNA, 30 bp, Artificial Sequence
  Synthetic oligonucleotide
gtgggtcggttcgcacgggccgaatatggg

SEQ ID NO: 431638 - DNA, 30 bp, Artificial Sequence
  Synthetic oligonucleotide
gaatttaaggtatccgagacgacatatggg

SEQ ID NO: 431639 - DNA, 30 bp, Artificial Sequence
  Synthetic oligonucleotide
gactacggctggacccaaacatcatatggg

SEQ ID NO: 431640 - DNA, 30 bp, Artificial Sequence
  Synthetic oligonucleotide
tccctgtagggagactaaataggatatggg

SEQ ID NO: 431641 - DNA, 30 bp, Artificial Sequence
  Synthetic oligonucleotide
agtttttcactctttgcctttgtatatggg

SEQ ID NO: 431642 - DNA, 30 bp, Artificial Sequence
  Synthetic oligonucleotide
ttctcggctcggtttccgtgtcgttatggg

SEQ ID NO: 431643 - DNA, 30 bp, Artificial Sequence
  Synthetic oligonucleotide
tctatgggcacaccgtcgatccccactggg

SEQ ID NO: 431644 - DNA, 30 bp, Artificial Sequence
  Synthetic oligonucleotide
atacccaggaagtgattagttgagactggg

SEQ ID NO: 431645 - DNA, 30 bp, Artificial Sequence
  Synthetic oligonucleotide
cgcgaggcaggtccaggcaacaggactggg

SEQ ID NO: 431646 - DNA, 30 bp, Artificial Sequence
  Synthetic oligonucleotide
gttggcataccttaagtacacagtactggg

SEQ ID NO: 431647 - DNA, 30 bp, Artificial Sequence
  Synthetic oligonucleotide
gtctggatggattgttccgtccttactggg

SEQ ID NO: 431648 - DNA, 30 bp, Artificial Sequence
  Synthetic oligonucleotide
atacgacctgtgcgtgattacccacctggg

SEQ ID NO: 431649 - DNA, 30 bp, Artificial Sequence
  Synthetic oligonucleotide
taatcggtgtgtataagaattagacctggg

SEQ ID NO: 431650 - DNA, 30 bp, Artificial Sequence
  Synthetic oligonucleotide
tttatattggtaaaaaggtatttacctggg

SEQ ID NO: 431651 - DNA, 30 bp, Artificial Sequence
  Synthetic oligonucleotide
gaaccgtcaggccgtgttccccaccctggg

SEQ ID NO: 431652 - DNA, 30 bp, Artificial Sequence
  Synthetic oligonucleotide
gtggaatccatgtgtccatctgaccctggg

SEQ ID NO: 431653 - DNA, 30 bp, Artificial Sequence
  Synthetic oligonucleotide
atacgtttcaggcataaatactgccctggg

SEQ ID NO: 431654 - DNA, 30 bp, Artificial Sequence
  Synthetic oligonucleotide
atcagacacccacgaaaaggcgcagctggg

SEQ ID NO: 431655 - DNA, 30 bp, Artificial Sequence
  Synthetic oligonucleotide
gcccggttggcagggcttgggtgagctggg

SEQ ID NO: 431656 - DNA, 30 bp, Artificial Sequence
  Synthetic oligonucleotide
ttctgtatgcaaggtcagaacatagctggg

SEQ ID NO: 431657 - DNA, 30 bp, Artificial Sequence
  Synthetic oligonucleotide
tacggcagggcccgtttcgtctacgctggg

SEQ ID NO: 431658 - DNA, 30 bp, Artificial Sequence
  Synthetic oligonucleotide
agttccacttagcgccgggcgttcgctggg

SEQ ID NO: 431659 - DNA, 30 bp, Artificial Sequence
  Synthetic oligonucleotide
ggctttcgatccatgttggtcagggctggg

SEQ ID NO: 431660 - DNA, 30 bp, Artificial Sequence
  Synthetic oligonucleotide
gccactagggctttaagcccagatgctggg

SEQ ID NO: 431661 - DNA, 30 bp, Artificial Sequence
  Synthetic oligonucleotide
ggcggcaacatccgaatccgcaggtctggg

SEQ ID NO: 431662 - DNA, 30 bp, Artificial Sequence
  Synthetic oligonucleotide
aacccacacggaaatggggaaggttctggg

SEQ ID NO: 431663 - DNA, 30 bp, Artificial Sequence
  Synthetic oligonucleotide
cactaccgaagagtggaccacgaaagtggg

SEQ ID NO: 431664 - DNA, 30 bp, Artificial Sequence
  Synthetic oligonucleotide
taatttatattacgtacttctgggagtggg

SEQ ID NO: 431665 - DNA, 30 bp, Artificial Sequence
  Synthetic oligonucleotide
tgattcaggaagtaaactgtgattagtggg

SEQ ID NO: 431666 - DNA, 30 bp, Artificial Sequence
  Synthetic oligonucleotide
gcttggcctgcaatccacaaataacgtggg

SEQ ID NO: 431667 - DNA, 30 bp, Artificial Sequence
  Synthetic oligonucleotide
gccgaccccctgattcatacttcccgtggg

SEQ ID NO: 431668 - DNA, 30 bp, Artificial Sequence
  Synthetic oligonucleotide
cccgatgtggggtggggacctaagcgtggg

SEQ ID NO: 431669 - DNA, 30 bp, Artificial Sequence
  Synthetic oligonucleotide
tgggtcttcacaccacctctagagcgtggg

SEQ ID NO: 431670 - DNA, 30 bp, Artificial Sequence
  Synthetic oligonucleotide
ctgtgtcacacccttcagaacatgcgtggg

SEQ ID NO: 431671 - DNA, 30 bp, Artificial Sequence
  Synthetic oligonucleotide
atatccgggggcgagtaacccccaggtggg

SEQ ID NO: 431672 - DNA, 30 bp, Artificial Sequence
  Synthetic oligonucleotide
agtggccgttccggaggagttccaggtggg

SEQ ID NO: 431673 - DNA, 30 bp, Artificial Sequence
  Synthetic oligonucleotide
acagaacgcagcgatcgagttaacggtggg

SEQ ID NO: 431674 - DNA, 30 bp, Artificial Sequence
  Synthetic oligonucleotide
tcggctccatcacttgagcaacacggtggg

SEQ ID NO: 431675 - DNA, 30 bp, Artificial Sequence
  Synthetic oligonucleotide
ctctaccgctgttattgtatgtacggtggg

SEQ ID NO: 431676 - DNA, 30 bp, Artificial Sequence
  Synthetic oligonucleotide
ccaatcgtacgctcacttcatcagggtggg

SEQ ID NO: 431677 - DNA, 30 bp, Artificial Sequence
  Synthetic oligonucleotide
tgtgtccactgatttcgtgcaccgggtggg

SEQ ID NO: 431678 - DNA, 30 bp, Artificial Sequence
  Synthetic oligonucleotide
gttacaggttgttctttgtagaggggtggg

SEQ ID NO: 431679 - DNA, 30 bp, Artificial Sequence
  Synthetic oligonucleotide
gtatgtcttcgacgcgcaaacatgggtggg

SEQ ID NO: 431680 - DNA, 30 bp, Artificial Sequence
  Synthetic oligonucleotide
gaccgctacttttttgatagcatgggtggg

SEQ ID NO: 431681 - DNA, 30 bp, Artificial Sequence
  Synthetic oligonucleotide
gccattttgcaaactaggaaataatgtggg

SEQ ID NO: 431682 - DNA, 30 bp, Artificial Sequence
  Synthetic oligonucleotide
tattccaggtattttatacgtatatgtggg

SEQ ID NO: 431683 - DNA, 30 bp, Artificial Sequence
  Synthetic oligonucleotide
acagataaaagattgtttattatatgtggg

SEQ ID NO: 431684 - DNA, 30 bp, Artificial Sequence
  Synthetic oligonucleotide
tgtaataaggcttcgtgcaaacgctgtggg

SEQ ID NO: 431685 - DNA, 30 bp, Artificial Sequence
  Synthetic oligonucleotide
ttcactgtcaaatcgtccggcgcgtgtggg

SEQ ID NO: 431686 - DNA, 30 bp, Artificial Sequence
  Synthetic oligonucleotide
tcaataccccgattaggtcccttgtgtggg

SEQ ID NO: 431687 - DNA, 30 bp, Artificial Sequence
  Synthetic oligonucleotide
aagtatcacggcctgttcctacattgtggg

SEQ ID NO: 431688 - DNA, 30 bp, Artificial Sequence
  Synthetic oligonucleotide
gggcgataccggttcggtggatattgtggg

SEQ ID NO: 431689 - DNA, 30 bp, Artificial Sequence
  Synthetic oligonucleotide
caataatgttcttgtgatcggacttgtggg

SEQ ID NO: 431690 - DNA, 30 bp, Artificial Sequence
  Synthetic oligonucleotide
gcgtgcgatagtctgtatcgcgcttgtggg

SEQ ID NO: 431691 - DNA, 30 bp, Artificial Sequence
  Synthetic oligonucleotide
acgcgacattccacacaggcttgttgtggg

SEQ ID NO: 431692 - DNA, 30 bp, Artificial Sequence
  Synthetic oligonucleotide
gatgtaaccatacgtgaagaataaattggg

SEQ ID NO: 431693 - DNA, 30 bp, Artificial Sequence
  Synthetic oligonucleotide
cggcgcccgggccgcccgccgacaattggg

SEQ ID NO: 431694 - DNA, 30 bp, Artificial Sequence
  Synthetic oligonucleotide
gcgaagggtgggtagcccgacccaattggg

SEQ ID NO: 431695 - DNA, 30 bp, Artificial Sequence
  Synthetic oligonucleotide
aatcggtcgggtctatgaacctacattggg

SEQ ID NO: 431696 - DNA, 30 bp, Artificial Sequence
  Synthetic oligonucleotide
ggcccaacacaggatctaagcgccattggg

SEQ ID NO: 431697 - DNA, 30 bp, Artificial Sequence
  Synthetic oligonucleotide
gcctggatgagtcgcgtatcgtagattggg

SEQ ID NO: 431698 - DNA, 30 bp, Artificial Sequence
  Synthetic oligonucleotide
gcgtcgctgcatacgcctcacgcgattggg

SEQ ID NO: 431699 - DNA, 30 bp, Artificial Sequence
  Synthetic oligonucleotide
accccttcagagattaaaaaatcgattggg

SEQ ID NO: 431700 - DNA, 30 bp, Artificial Sequence
  Synthetic oligonucleotide
tgtaatactttttggaagtaaaggattggg

SEQ ID NO: 431701 - DNA, 30 bp, Artificial Sequence
  Synthetic oligonucleotide
gagatcaggatcattgttaattttattggg

SEQ ID NO: 431702 - DNA, 30 bp, Artificial Sequence
  Synthetic oligonucleotide
tatactcgtgccagtaaacagtcacttggg

SEQ ID NO: 431703 - DNA, 30 bp, Artificial Sequence
  Synthetic oligonucleotide
ccacccagtagtggcggatgattacttggg

SEQ ID NO: 431704 - DNA, 30 bp, Artificial Sequence
  Synthetic oligonucleotide
tacccggcctatggtgtgacaaagcttggg

SEQ ID NO: 431705 - DNA, 30 bp, Artificial Sequence
  Synthetic oligonucleotide
ctgattacgcacgttactagtgtgcttggg

SEQ ID NO: 431706 - DNA, 30 bp, Artificial Sequence
  Synthetic oligonucleotide
tcttgaattgtaagaatccaacaagttggg

SEQ ID NO: 431707 - DNA, 30 bp, Artificial Sequence
  Synthetic oligonucleotide
aattccaagcgacctgagaactaagttggg

SEQ ID NO: 431708 - DNA, 30 bp, Artificial Sequence
  Synthetic oligonucleotide
tgtttatatcgcagggccgcatgagttggg

SEQ ID NO: 431709 - DNA, 30 bp, Artificial Sequence
  Synthetic oligonucleotide
tgacggtcaggtccgaaccaaaacgttggg

SEQ ID NO: 431710 - DNA, 30 bp, Artificial Sequence
  Synthetic oligonucleotide
attcgtgtgcgcgggtaaacatccgttggg

SEQ ID NO: 431711 - DNA, 30 bp, Artificial Sequence
  Synthetic oligonucleotide
ttagttctatgtgcagaactgcgcgttggg

SEQ ID NO: 431712 - DNA, 30 bp, Artificial Sequence
  Synthetic oligonucleotide
tgttccaagtcgggtaaaacgaaatttggg

SEQ ID NO: 431713 - DNA, 30 bp, Artificial Sequence
  Synthetic oligonucleotide
ttcagcatcactaggtacatttcatttggg

SEQ ID NO: 431714 - DNA, 30 bp, Artificial Sequence
  Synthetic oligonucleotide
tttatcaccctccttttgaataactttggg

SEQ ID NO: 431715 - DNA, 30 bp, Artificial Sequence
  Synthetic oligonucleotide
aataccctcagcatttcagtggactttggg

SEQ ID NO: 431716 - DNA, 30 bp, Artificial Sequence
  Synthetic oligonucleotide
cccccggccaaaagttaaatatcttttggg

SEQ ID NO: 431717 - DNA, 30 bp, Artificial Sequence
  Synthetic oligonucleotide
cacattaccattttcggatcggtaaaatgg

SEQ ID NO: 431718 - DNA, 30 bp, Artificial Sequence
  Synthetic oligonucleotide
ggtagaggtgtcagttttttggtaaaatgg

SEQ ID NO: 431719 - DNA, 30 bp, Artificial Sequence
  Synthetic oligonucleotide
aaaccacgctcagcacgaatggtcaaatgg

SEQ ID NO: 431720 - DNA, 30 bp, Artificial Sequence
  Synthetic oligonucleotide
tccgctgacaggtcgatcctgtcgaaatgg

SEQ ID NO: 431721 - DNA, 30 bp, Artificial Sequence
  Synthetic oligonucleotide
tactggtatcttggatcattacataaatgg

SEQ ID NO: 431722 - DNA, 30 bp, Artificial Sequence
  Synthetic oligonucleotide
attgtagagaacgccgatgattttaaatgg

SEQ ID NO: 431723 - DNA, 30 bp, Artificial Sequence
  Synthetic oligonucleotide
tttcgactgtcatgcgcgaccatacaatgg

SEQ ID NO: 431724 - DNA, 30 bp, Artificial Sequence
  Synthetic oligonucleotide
gaaaaccctgattccttcggaacgcaatgg

SEQ ID NO: 431725 - DNA, 30 bp, Artificial Sequence
  Synthetic oligonucleotide
gcatcgacctgttcccccagcagtcaatgg

SEQ ID NO: 431726 - DNA, 30 bp, Artificial Sequence
  Synthetic oligonucleotide
tccttggagaatcatgaggacgttcaatgg

SEQ ID NO: 431727 - DNA, 30 bp, Artificial Sequence
  Synthetic oligonucleotide
aaatagctcttgggacgtacgaaagaatgg

SEQ ID NO: 431728 - DNA, 30 bp, Artificial Sequence
  Synthetic oligonucleotide
ctgtgagcgactggtatgggaggcgaatgg

SEQ ID NO: 431729 - DNA, 30 bp, Artificial Sequence
  Synthetic oligonucleotide
gcgcctttcccctatatgatatgtgaatgg

SEQ ID NO: 431730 - DNA, 30 bp, Artificial Sequence
  Synthetic oligonucleotide
tttcactcaacgatttatggttgtgaatgg

SEQ ID NO: 431731 - DNA, 30 bp, Artificial Sequence
  Synthetic oligonucleotide
tctcccagcgaaaaaggtttattataatgg

SEQ ID NO: 431732 - DNA, 30 bp, Artificial Sequence
  Synthetic oligonucleotide
cttatacggcgttgccggtacaggtaatgg

SEQ ID NO: 431733 - DNA, 30 bp, Artificial Sequence
  Synthetic oligonucleotide
taagaccttgaccttttgcgggtgtaatgg

SEQ ID NO: 431734 - DNA, 30 bp, Artificial Sequence
  Synthetic oligonucleotide
agcgttttcttccaagatgcgcgttaatgg

SEQ ID NO: 431735 - DNA, 30 bp, Artificial Sequence
  Synthetic oligonucleotide
tgtgggttcttgcttagtcagacaacatgg

SEQ ID NO: 431736 - DNA, 30 bp, Artificial Sequence
  Synthetic oligonucleotide
gagtgaaccgtaagctggcggacaacatgg

SEQ ID NO: 431737 - DNA, 30 bp, Artificial Sequence
  Synthetic oligonucleotide
atgtggtcaaaggccccaggaggcacatgg

SEQ ID NO: 431738 - DNA, 30 bp, Artificial Sequence
  Synthetic oligonucleotide
tttcacgtgtcttcgttgcaacggacatgg

SEQ ID NO: 431739 - DNA, 30 bp, Artificial Sequence
  Synthetic oligonucleotide
ttactggcccatccagcgtagggtacatgg

SEQ ID NO: 431740 - DNA, 30 bp, Artificial Sequence
  Synthetic oligonucleotide
tctatagctaagccccagatttgtacatgg

SEQ ID NO: 431741 - DNA, 30 bp, Artificial Sequence
  Synthetic oligonucleotide
aagtaaacgcttgcaaccttcaaaccatgg

SEQ ID NO: 431742 - DNA, 30 bp, Artificial Sequence
  Synthetic oligonucleotide
tgttacgccagcgtatacacatacccatgg

SEQ ID NO: 431743 - DNA, 30 bp, Artificial Sequence
  Synthetic oligonucleotide
actacggtaagagtggtctattacccatgg

SEQ ID NO: 431744 - DNA, 30 bp, Artificial Sequence
  Synthetic oligonucleotide
gaacggagtctccgtccgagggaagcatgg

SEQ ID NO: 431745 - DNA, 30 bp, Artificial Sequence
  Synthetic oligonucleotide
gttagctgcataggatagttcggagcatgg

SEQ ID NO: 431746 - DNA, 30 bp, Artificial Sequence
  Synthetic oligonucleotide
ttatcttggtaacgatttagtcacgcatgg

SEQ ID NO: 431747 - DNA, 30 bp, Artificial Sequence
  Synthetic oligonucleotide
acttgaacagccacaaacatcatggcatgg

SEQ ID NO: 431748 - DNA, 30 bp, Artificial Sequence
  Synthetic oligonucleotide
tatgctatggtcgacacggggatggcatgg

SEQ ID NO: 431749 - DNA, 30 bp, Artificial Sequence
  Synthetic oligonucleotide
actatgacaacggctagatcctgtgcatgg

SEQ ID NO: 431750 - DNA, 30 bp, Artificial Sequence
  Synthetic oligonucleotide
atgtaattatgttaaatacagggatcatgg

SEQ ID NO: 431751 - DNA, 30 bp, Artificial Sequence
  Synthetic oligonucleotide
aattacggctaactttaaacttggtcatgg

SEQ ID NO: 431752 - DNA, 30 bp, Artificial Sequence
  Synthetic oligonucleotide
tgtaggaggcttttctccattaattcatgg

SEQ ID NO: 431753 - DNA, 30 bp, Artificial Sequence
  Synthetic oligonucleotide
caaccaaaagggtttggctggttttcatgg

SEQ ID NO: 431754 - DNA, 30 bp, Artificial Sequence
  Synthetic oligonucleotide
ctttacataccttcaggttctgagagatgg

SEQ ID NO: 431755 - DNA, 30 bp, Artificial Sequence
  Synthetic oligonucleotide
gactcacaatgaggtgcagtgacacgatgg

SEQ ID NO: 431756 - DNA, 30 bp, Artificial Sequence
  Synthetic oligonucleotide
tattggaccttcggatagttgggacgatgg

SEQ ID NO: 431757 - DNA, 30 bp, Artificial Sequence
  Synthetic oligonucleotide
cgcagacgcggctccaaatccttccgatgg

SEQ ID NO: 431758 - DNA, 30 bp, Artificial Sequence
  Synthetic oligonucleotide
cccccctcctgtcatggccaaaagcgatgg

SEQ ID NO: 431759 - DNA, 30 bp, Artificial Sequence
  Synthetic oligonucleotide
tctatatacggtttgccgggtaagcgatgg

SEQ ID NO: 431760 - DNA, 30 bp, Artificial Sequence
  Synthetic oligonucleotide
ttccgttacgtgtaacgaaaggtaggatgg

SEQ ID NO: 431761 - DNA, 30 bp, Artificial Sequence
  Synthetic oligonucleotide
tacgtcattaggcgcacagtacgcggatgg

SEQ ID NO: 431762 - DNA, 30 bp, Artificial Sequence
  Synthetic oligonucleotide
cgtcatagattcggaaatgggcgcggatgg

SEQ ID NO: 431763 - DNA, 30 bp, Artificial Sequence
  Synthetic oligonucleotide
tttaggtcaaggctgtgccgcctcggatgg

SEQ ID NO: 431764 - DNA, 30 bp, Artificial Sequence
  Synthetic oligonucleotide
taggcctattacgctgttatcccgggatgg

SEQ ID NO: 431765 - DNA, 30 bp, Artificial Sequence
  Synthetic oligonucleotide
gaactcgacacgttctttaagtgctgatgg

SEQ ID NO: 431766 - DNA, 30 bp, Artificial Sequence
  Synthetic oligonucleotide
aactcggaggacagcagttcgtagtgatgg

SEQ ID NO: 431767 - DNA, 30 bp, Artificial Sequence
  Synthetic oligonucleotide
caccggcacttattgtacggcacgtgatgg

SEQ ID NO: 431768 - DNA, 35 bp, Artificial Sequence
  Synthetic oligonucleotide
aactacccaagtaactagcagtaggcgggtgatgg

SEQ ID NO: 431769 - DNA, 30 bp, Artificial Sequence
  Synthetic oligonucleotide
gcacccggtcagggatatacctggtgatgg

SEQ ID NO: 431770 - DNA, 30 bp, Artificial Sequence
  Synthetic oligonucleotide
acgagcctgcactgctagaacttgtgatgg

SEQ ID NO: 431771 - DNA, 30 bp, Artificial Sequence
  Synthetic oligonucleotide
cgttttggttaggggcctaatttttgatgg

SEQ ID NO: 431772 - DNA, 30 bp, Artificial Sequence
  Synthetic oligonucleotide
ctactcggtgctgcttacggataaatatgg

SEQ ID NO: 431773 - DNA, 30 bp, Artificial Sequence
  Synthetic oligonucleotide
ccctgcttatttatgactctagagatatgg

SEQ ID NO: 431774 - DNA, 30 bp, Artificial Sequence
  Synthetic oligonucleotide
caatttcgatgttatgctcgcaatatatgg

SEQ ID NO: 431775 - DNA, 30 bp, Artificial Sequence
  Synthetic oligonucleotide
tacacctgttcccagttcagagctatatgg

SEQ ID NO: 431776 - DNA, 30 bp, Artificial Sequence
  Synthetic oligonucleotide
gaaataatagttgtgatttcagaactatgg

SEQ ID NO: 431777 - DNA, 30 bp, Artificial Sequence
  Synthetic oligonucleotide
tattgatcttcgcgctgcaatgtgctatgg

SEQ ID NO: 431778 - DNA, 30 bp, Artificial Sequence
  Synthetic oligonucleotide
cttttcgctggaattctctcagatctatgg

SEQ ID NO: 431779 - DNA, 30 bp, Artificial Sequence
  Synthetic oligonucleotide
agagccactaagatcgtcttcattctatgg

SEQ ID NO: 431780 - DNA, 30 bp, Artificial Sequence
  Synthetic oligonucleotide
cgtagaccgtaacggagacagccagtatgg

SEQ ID NO: 431781 - DNA, 30 bp, Artificial Sequence
  Synthetic oligonucleotide
ggcgttttcagtcgtactgaacacgtatgg

SEQ ID NO: 431782 - DNA, 30 bp, Artificial Sequence
  Synthetic oligonucleotide
cagctgaagcggcgtcatcagacggtatgg

SEQ ID NO: 431783 - DNA, 31 bp, Artificial Sequence
  Synthetic oligonucleotide
tagccggtaggtcgcatcaacctctgtatgg

SEQ ID NO: 431784 - DNA, 30 bp, Artificial Sequence
  Synthetic oligonucleotide
agttcggattaaccgacacttcgtgtatgg

SEQ ID NO: 431785 - DNA, 30 bp, Artificial Sequence
  Synthetic oligonucleotide
cctgcccgctatattttcgccacattatgg

SEQ ID NO: 431786 - DNA, 30 bp, Artificial Sequence
  Synthetic oligonucleotide
ttgtcgatatggagctatatagacttatgg

SEQ ID NO: 431787 - DNA, 30 bp, Artificial Sequence
  Synthetic oligonucleotide
caaagcttcggggatattcgccgcttatgg

SEQ ID NO: 431788 - DNA, 30 bp, Artificial Sequence
  Synthetic oligonucleotide
gaagtctgttgggtctcgggtgtgttatgg

SEQ ID NO: 431789 - DNA, 30 bp, Artificial Sequence
  Synthetic oligonucleotide
cattgaaggccggtgctaaaacatttatgg

SEQ ID NO: 431790 - DNA, 30 bp, Artificial Sequence
  Synthetic oligonucleotide
gactgtgggagaccattctttcctttatgg

SEQ ID NO: 431791 - DNA, 30 bp, Artificial Sequence
  Synthetic oligonucleotide
taaggccacagggattgggctattttatgg

SEQ ID NO: 431792 - DNA, 30 bp, Artificial Sequence
  Synthetic oligonucleotide
gtaattggataatagctgagccttttatgg

SEQ ID NO: 431793 - DNA, 30 bp, Artificial Sequence
  Synthetic oligonucleotide
gcagcattgtgcaggcgccgaacaaactgg

SEQ ID NO: 431794 - DNA, 30 bp, Artificial Sequence
  Synthetic oligonucleotide
tgcaaggcggccgctatcggcgcaaactgg

SEQ ID NO: 431795 - DNA, 30 bp, Artificial Sequence
  Synthetic oligonucleotide
ccgttcgttttttttgcttggagaaactgg

SEQ ID NO: 431796 - DNA, 30 bp, Artificial Sequence
  Synthetic oligonucleotide
taacgacgtgtcacctacggctgcaactgg

SEQ ID NO: 431797 - DNA, 30 bp, Artificial Sequence
  Synthetic oligonucleotide
gggctcttgattttgtgctttgagaactgg

SEQ ID NO: 431798 - DNA, 30 bp, Artificial Sequence
  Synthetic oligonucleotide
aagatagaagggcagttatatccgaactgg

SEQ ID NO: 431799 - DNA, 30 bp, Artificial Sequence
  Synthetic oligonucleotide
atcgccgcaaaggtcaggatcgataactgg

SEQ ID NO: 431800 - DNA, 30 bp, Artificial Sequence
  Synthetic oligonucleotide
ttacccgtaaccggcgtctcagtacactgg

SEQ ID NO: 431801 - DNA, 30 bp, Artificial Sequence
  Synthetic oligonucleotide
agatgtgggatcaaggttcattaggactgg

SEQ ID NO: 431802 - DNA, 30 bp, Artificial Sequence
  Synthetic oligonucleotide
gggtaaaatttgggggtggtttaggactgg

SEQ ID NO: 431803 - DNA, 30 bp, Artificial Sequence
  Synthetic oligonucleotide
tgggcgtatcttgggcctttcccggactgg

SEQ ID NO: 431804 - DNA, 30 bp, Artificial Sequence
  Synthetic oligonucleotide
aataaattaggattgttgctatgggactgg

SEQ ID NO: 431805 - DNA, 30 bp, Artificial Sequence
  Synthetic oligonucleotide
ggcggctggtgtagcatcaggcctgactgg

SEQ ID NO: 431806 - DNA, 30 bp, Artificial Sequence
  Synthetic oligonucleotide
tgtggacaaaaagtgacagttacatactgg

SEQ ID NO: 431807 - DNA, 30 bp, Artificial Sequence
  Synthetic oligonucleotide
aaaacggtcctatgagtccttggatactgg

SEQ ID NO: 431808 - DNA, 30 bp, Artificial Sequence
  Synthetic oligonucleotide
aaagagaataggtgcatctcttcctactgg

SEQ ID NO: 431809 - DNA, 30 bp, Artificial Sequence
  Synthetic oligonucleotide
aatcttatcagggcctgactacagtactgg

SEQ ID NO: 431810 - DNA, 30 bp, Artificial Sequence
  Synthetic oligonucleotide
tggaatagctagacgatcatgctgtactgg

SEQ ID NO: 431811 - DNA, 30 bp, Artificial Sequence
  Synthetic oligonucleotide
ttcttgctagggaaatgttattcttactgg

SEQ ID NO: 431812 - DNA, 30 bp, Artificial Sequence
  Synthetic oligonucleotide
ttgcgacgatcacccatcagacgcacctgg

SEQ ID NO: 431813 - DNA, 30 bp, Artificial Sequence
  Synthetic oligonucleotide
taggtcgaaagactcgggtttcgaccctgg

SEQ ID NO: 431814 - DNA, 30 bp, Artificial Sequence
  Synthetic oligonucleotide
gacaacaggaatctccacagcctaccctgg

SEQ ID NO: 431815 - DNA, 30 bp, Artificial Sequence
  Synthetic oligonucleotide
cccgcaagggtgcaccagtttaagccctgg

SEQ ID NO: 431816 - DNA, 30 bp, Artificial Sequence
  Synthetic oligonucleotide
tatcgcctttggttcagccgctatccctgg

SEQ ID NO: 431817 - DNA, 30 bp, Artificial Sequence
  Synthetic oligonucleotide
gaggatcactcaatgagccgcggtccctgg

SEQ ID NO: 431818 - DNA, 30 bp, Artificial Sequence
  Synthetic oligonucleotide
atcgatctctgggcggcccacgttccctgg

SEQ ID NO: 431819 - DNA, 30 bp, Artificial Sequence
  Synthetic oligonucleotide
gatgcgacgagacttaccggcagagcctgg

SEQ ID NO: 431820 - DNA, 30 bp, Artificial Sequence
  Synthetic oligonucleotide
ataccgtcggcacgaggaaatgccgcctgg

SEQ ID NO: 431821 - DNA, 30 bp, Artificial Sequence
  Synthetic oligonucleotide
gcccacgggtactcgggtcggtaggcctgg

SEQ ID NO: 431822 - DNA, 30 bp, Artificial Sequence
  Synthetic oligonucleotide
atattatccgaagttaccacgccggcctgg

SEQ ID NO: 431823 - DNA, 30 bp, Artificial Sequence
  Synthetic oligonucleotide
cgcatgtaattaaattgttactcggcctgg

SEQ ID NO: 431824 - DNA, 30 bp, Artificial Sequence
  Synthetic oligonucleotide
atggtaacggacggtgctacgcgggcctgg

SEQ ID NO: 431825 - DNA, 30 bp, Artificial Sequence
  Synthetic oligonucleotide
gatccgtctacaggtttgggtagtgcctgg

SEQ ID NO: 431826 - DNA, 30 bp, Artificial Sequence
  Synthetic oligonucleotide
tatttgggctcatatctagtgtgtgcctgg

SEQ ID NO: 431827 - DNA, 30 bp, Artificial Sequence
  Synthetic oligonucleotide
gccatctcgtgagggatattcattgcctgg

SEQ ID NO: 431828 - DNA, 30 bp, Artificial Sequence
  Synthetic oligonucleotide
ttaccggctacttgacgatgcgttgcctgg

SEQ ID NO: 431829 - DNA, 30 bp, Artificial Sequence
  Synthetic oligonucleotide
aaagctcggataccgttgttccaatcctgg

SEQ ID NO: 431830 - DNA, 30 bp, Artificial Sequence
  Synthetic oligonucleotide
ctgcccaggaacacaaaatactaatcctgg

SEQ ID NO: 431831 - DNA, 30 bp, Artificial Sequence
  Synthetic oligonucleotide
gttgatatcagctctgttatgaactcctgg

SEQ ID NO: 431832 - DNA, 30 bp, Artificial Sequence
  Synthetic oligonucleotide
aaccctctagtcgtgttatagcactcctgg

SEQ ID NO: 431833 - DNA, 30 bp, Artificial Sequence
  Synthetic oligonucleotide
ttcacatttttgaaagtgccgtcctcctgg

SEQ ID NO: 431834 - DNA, 30 bp, Artificial Sequence
  Synthetic oligonucleotide
ggacatttatgctagtcacctggttcctgg

SEQ ID NO: 431835 - DNA, 30 bp, Artificial Sequence
  Synthetic oligonucleotide
tatcggttcgctacaagtatgtaaagctgg

SEQ ID NO: 431836 - DNA, 30 bp, Artificial Sequence
  Synthetic oligonucleotide
agtcttggggtccacggtagtccgagctgg

SEQ ID NO: 431837 - DNA, 30 bp, Artificial Sequence
  Synthetic oligonucleotide
tccctcggtcgtgttagtcccgtgagctgg

SEQ ID NO: 431838 - DNA, 30 bp, Artificial Sequence
  Synthetic oligonucleotide
gcctttatgagaggcacaacaaaacgctgg

SEQ ID NO: 431839 - DNA, 30 bp, Artificial Sequence
  Synthetic oligonucleotide
ggttgccagggacgggctgggctccgctgg

SEQ ID NO: 431840 - DNA, 30 bp, Artificial Sequence
  Synthetic oligonucleotide
acggagaggtcgcaatagctggcaggctgg

SEQ ID NO: 431841 - DNA, 30 bp, Artificial Sequence
  Synthetic oligonucleotide
gaaactgagtcggacctggctctaggctgg

SEQ ID NO: 431842 - DNA, 30 bp, Artificial Sequence
  Synthetic oligonucleotide
gaaccacgcgttcgacacctaagcggctgg

SEQ ID NO: 431843 - DNA, 30 bp, Artificial Sequence
  Synthetic oligonucleotide
cgtcctacagaagttgaacgatgcggctgg

SEQ ID NO: 431844 - DNA, 30 bp, Artificial Sequence
  Synthetic oligonucleotide
ctctagggagcgtaccatgcctagggctgg

SEQ ID NO: 431845 - DNA, 30 bp, Artificial Sequence
  Synthetic oligonucleotide
ggcgtagaaataggtcccactaggggctgg

SEQ ID NO: 431846 - DNA, 30 bp, Artificial Sequence
  Synthetic oligonucleotide
gtaagcgctccatggttatatgtgggctgg

SEQ ID NO: 431847 - DNA, 30 bp, Artificial Sequence
  Synthetic oligonucleotide
ccggcttctggatcgagacgccctggctgg

SEQ ID NO: 431848 - DNA, 30 bp, Artificial Sequence
  Synthetic oligonucleotide
tacctgaatctgacggtgtaacttggctgg

SEQ ID NO: 431849 - DNA, 30 bp, Artificial Sequence
  Synthetic oligonucleotide
tgggaagaagttgctctagtaggatgctgg

SEQ ID NO: 431850 - DNA, 30 bp, Artificial Sequence
  Synthetic oligonucleotide
aaagggaccggacgtagccagtcgtgctgg

SEQ ID NO: 431851 - DNA, 30 bp, Artificial Sequence
  Synthetic oligonucleotide
gcaacgtgttgcgtagaataagtttgctgg

SEQ ID NO: 431852 - DNA, 30 bp, Artificial Sequence
  Synthetic oligonucleotide
ttgtcagaagcggtataatgataaatctgg

SEQ ID NO: 431853 - DNA, 30 bp, Artificial Sequence
  Synthetic oligonucleotide
aacctcgtggtggactccggtacaatctgg

SEQ ID NO: 431854 - DNA, 30 bp, Artificial Sequence
  Synthetic oligonucleotide
catctctattgcaccccaggaaccatctgg

SEQ ID NO: 431855 - DNA, 30 bp, Artificial Sequence
  Synthetic oligonucleotide
cctatgggtagatcccatttttccatctgg

SEQ ID NO: 431856 - DNA, 30 bp, Artificial Sequence
  Synthetic oligonucleotide
aagggcctcccgcggataaaatgcatctgg

SEQ ID NO: 431857 - DNA, 30 bp, Artificial Sequence
  Synthetic oligonucleotide
ctttgtatttcttgaaggtgtttcatctgg

SEQ ID NO: 431858 - DNA, 30 bp, Artificial Sequence
  Synthetic oligonucleotide
ggagtttataaccctaggtgtttgatctgg

SEQ ID NO: 431859 - DNA, 30 bp, Artificial Sequence
  Synthetic oligonucleotide
ctgggcacttttggttccgttactatctgg

SEQ ID NO: 431860 - DNA, 30 bp, Artificial Sequence
  Synthetic oligonucleotide
agaattgagccgctggccattaaactctgg

SEQ ID NO: 431861 - DNA, 30 bp, Artificial Sequence
  Synthetic oligonucleotide
ttgtcaacgacaactgtaggaatactctgg

SEQ ID NO: 431862 - DNA, 30 bp, Artificial Sequence
  Synthetic oligonucleotide
taaagagcctttcaacccttgtgcctctgg

SEQ ID NO: 431863 - DNA, 30 bp, Artificial Sequence
  Synthetic oligonucleotide
ttgttggcaatctagaccgcatggctctgg

SEQ ID NO: 431864 - DNA, 30 bp, Artificial Sequence
  Synthetic oligonucleotide
tgtgaacgccgcgcagtagacatcgtctgg

SEQ ID NO: 431865 - DNA, 30 bp, Artificial Sequence
  Synthetic oligonucleotide
gaatttcccattgagccgttagaggtctgg

SEQ ID NO: 431866 - DNA, 30 bp, Artificial Sequence
  Synthetic oligonucleotide
cgctagcctccaacgaccgcctgggtctgg

SEQ ID NO: 431867 - DNA, 30 bp, Artificial Sequence
  Synthetic oligonucleotide
tattatgatatgtgatcatatttggtctgg

SEQ ID NO: 431868 - DNA, 30 bp, Artificial Sequence
  Synthetic oligonucleotide
gagacgacaagcacgagcaggtttgtctgg

SEQ ID NO: 431869 - DNA, 30 bp, Artificial Sequence
  Synthetic oligonucleotide
tttatggaatctcacgcctcgtgattctgg

SEQ ID NO: 431870 - DNA, 30 bp, Artificial Sequence
  Synthetic oligonucleotide
atctttgtgaaagcaatatgaatcttctgg

SEQ ID NO: 431871 - DNA, 30 bp, Artificial Sequence
  Synthetic oligonucleotide
ccgctagatagacccatggcttagttctgg

SEQ ID NO: 431872 - DNA, 30 bp, Artificial Sequence
  Synthetic oligonucleotide
agcgataacaacgtcacggcagcgttctgg

SEQ ID NO: 431873 - DNA, 30 bp, Artificial Sequence
  Synthetic oligonucleotide
agataaatctctcacgcaagtcttttctgg

SEQ ID NO: 431874 - DNA, 30 bp, Artificial Sequence
  Synthetic oligonucleotide
cggagcagtacatttatcacctttttctgg

SEQ ID NO: 431875 - DNA, 30 bp, Artificial Sequence
  Synthetic oligonucleotide
actattgctctccgtgtcaggccaaagtgg

SEQ ID NO: 431876 - DNA, 30 bp, Artificial Sequence
  Synthetic oligonucleotide
tttcacgacttatgtcattggtccaagtgg

SEQ ID NO: 431877 - DNA, 30 bp, Artificial Sequence
  Synthetic oligonucleotide
ttgatcataggcgtgctgcgtttcaagtgg

SEQ ID NO: 431878 - DNA, 30 bp, Artificial Sequence
  Synthetic oligonucleotide
gttcattcctagtcgcccatcagtaagtgg

SEQ ID NO: 431879 - DNA, 30 bp, Artificial Sequence
  Synthetic oligonucleotide
ttctcctggatccgtttgcgcgaacagtgg

SEQ ID NO: 431880 - DNA, 30 bp, Artificial Sequence
  Synthetic oligonucleotide
aaacctcggatcctacacgtgggacagtgg

SEQ ID NO: 431881 - DNA, 30 bp, Artificial Sequence
  Synthetic oligonucleotide
ccgtatgggtaacacgggggtattcagtgg

SEQ ID NO: 431882 - DNA, 30 bp, Artificial Sequence
  Synthetic oligonucleotide
tgggttttgtacttacatgatcacgagtgg

SEQ ID NO: 431883 - DNA, 30 bp, Artificial Sequence
  Synthetic oligonucleotide
attcagcagacgccaaacagaagttagtgg

SEQ ID NO: 431884 - DNA, 30 bp, Artificial Sequence
  Synthetic oligonucleotide
ggacagacgcagtatacctaattttagtgg

SEQ ID NO: 431885 - DNA, 30 bp, Artificial Sequence
  Synthetic oligonucleotide
cggatatcacgacggatgacctacacgtgg

SEQ ID NO: 431886 - DNA, 30 bp, Artificial Sequence
  Synthetic oligonucleotide
gcgaatttggctacgacacctcgcacgtgg

SEQ ID NO: 431887 - DNA, 30 bp, Artificial Sequence
  Synthetic oligonucleotide
aatcagcataggaatgactaatgcacgtgg

SEQ ID NO: 431888 - DNA, 30 bp, Artificial Sequence
  Synthetic oligonucleotide
ttcgggaaaccgcagcaatcaccgacgtgg

SEQ ID NO: 431889 - DNA, 30 bp, Artificial Sequence
  Synthetic oligonucleotide
cttaccctccctaaaattaatgcgacgtgg

SEQ ID NO: 431890 - DNA, 30 bp, Artificial Sequence
  Synthetic oligonucleotide
aagatgttctgtaacctttgtggtacgtgg

SEQ ID NO: 431891 - DNA, 30 bp, Artificial Sequence
  Synthetic oligonucleotide
ttttgacttctcatcgctgaggttacgtgg

SEQ ID NO: 431892 - DNA, 30 bp, Artificial Sequence
  Synthetic oligonucleotide
attagtaggaggctccggggggttacgtgg

SEQ ID NO: 431893 - DNA, 30 bp, Artificial Sequence
  Synthetic oligonucleotide
ttcggggttcatgccagttaaacaccgtgg

SEQ ID NO: 431894 - DNA, 30 bp, Artificial Sequence
  Synthetic oligonucleotide
taggtgccacagcactatgaagtaccgtgg

SEQ ID NO: 431895 - DNA, 30 bp, Artificial Sequence
  Synthetic oligonucleotide
ttcgctagagcgggtgaggggttaccgtgg

SEQ ID NO: 431896 - DNA, 30 bp, Artificial Sequence
  Synthetic oligonucleotide
aacgctccattgaacattcaataagcgtgg

SEQ ID NO: 431897 - DNA, 30 bp, Artificial Sequence
  Synthetic oligonucleotide
actctgcgtgaaaaggacatttgagcgtgg

SEQ ID NO: 431898 - DNA, 30 bp, Artificial Sequence
  Synthetic oligonucleotide
gagtctttatcgatacctcgtgtagcgtgg

SEQ ID NO: 431899 - DNA, 30 bp, Artificial Sequence
  Synthetic oligonucleotide
tatacgccggcatctgcgctattagcgtgg

SEQ ID NO: 431900 - DNA, 30 bp, Artificial Sequence
  Synthetic oligonucleotide
aaatttggaccattaagcttctatgcgtgg

SEQ ID NO: 431901 - DNA, 30 bp, Artificial Sequence
  Synthetic oligonucleotide
tacccgttaccgccatgaccttctgcgtgg

SEQ ID NO: 431902 - DNA, 30 bp, Artificial Sequence
  Synthetic oligonucleotide
aaaatgtgattcagtcgttgcagtgcgtgg

SEQ ID NO: 431903 - DNA, 30 bp, Artificial Sequence
  Synthetic oligonucleotide
ccctatcctacgcaatacaacacatcgtgg

SEQ ID NO: 431904 - DNA, 30 bp, Artificial Sequence
  Synthetic oligonucleotide
gtctaccgtcacgctttaaactcatcgtgg

SEQ ID NO: 431905 - DNA, 30 bp, Artificial Sequence
  Synthetic oligonucleotide
tttgtcttacgcccaaatcacatatcgtgg

SEQ ID NO: 431906 - DNA, 30 bp, Artificial Sequence
  Synthetic oligonucleotide
caccgtcggatagaacggagtgtatcgtgg

SEQ ID NO: 431907 - DNA, 30 bp, Artificial Sequence
  Synthetic oligonucleotide
gaccttctatttccccgttacgattcgtgg

SEQ ID NO: 431908 - DNA, 30 bp, Artificial Sequence
  Synthetic oligonucleotide
acctcttattcagtccataaggattcgtgg

SEQ ID NO: 431909 - DNA, 30 bp, Artificial Sequence
  Synthetic oligonucleotide
tgccagattaccggagcgttgttaaggtgg

SEQ ID NO: 431910 - DNA, 29 bp, Artificial Sequence
  Synthetic oligonucleotide
attcgtgtatggatattgaagccaggtgg

SEQ ID NO: 431911 - DNA, 30 bp, Artificial Sequence
  Synthetic oligonucleotide
gagtcctatggactccggcaacctaggtgg

SEQ ID NO: 431912 - DNA, 30 bp, Artificial Sequence
  Synthetic oligonucleotide
atggacacgttacactctgaacgtaggtgg

SEQ ID NO: 431913 - DNA, 30 bp, Artificial Sequence
  Synthetic oligonucleotide
aagataggtgtcttccatcattttaggtgg

SEQ ID NO: 431914 - DNA, 30 bp, Artificial Sequence
  Synthetic oligonucleotide
attcggggtgacttattcggtagccggtgg

SEQ ID NO: 431915 - DNA, 30 bp, Artificial Sequence
  Synthetic oligonucleotide
attaggtgaacccggttccgagctcggtgg

SEQ ID NO: 431916 - DNA, 30 bp, Artificial Sequence
  Synthetic oligonucleotide
gctcgtgttacctcgtcaaaaatagggtgg

SEQ ID NO: 431917 - DNA, 30 bp, Artificial Sequence
  Synthetic oligonucleotide
ttatttcactacatcgcgctaatagggtgg

SEQ ID NO: 431918 - DNA, 30 bp, Artificial Sequence
  Synthetic oligonucleotide
caccttcagaacagttataacgtagggtgg

SEQ ID NO: 431919 - DNA, 30 bp, Artificial Sequence
  Synthetic oligonucleotide
accgggctcatcctgactaacggcgggtgg

SEQ ID NO: 431920 - DNA, 30 bp, Artificial Sequence
  Synthetic oligonucleotide
gatggtcatcgttcgatggcgccggggtgg

SEQ ID NO: 431921 - DNA, 30 bp, Artificial Sequence
  Synthetic oligonucleotide
tgtgtggtgctaagcccttaaagggggtgg

SEQ ID NO: 431922 - DNA, 30 bp, Artificial Sequence
  Synthetic oligonucleotide
atgcccgtgctatgttctatttgggggtgg

SEQ ID NO: 431923 - DNA, 30 bp, Artificial Sequence
  Synthetic oligonucleotide
aaccactattgtggggacaaatatgggtgg

SEQ ID NO: 431924 - DNA, 30 bp, Artificial Sequence
  Synthetic oligonucleotide
aaactgataggataaaagctcgctgggtgg

SEQ ID NO: 431925 - DNA, 30 bp, Artificial Sequence
  Synthetic oligonucleotide
ggttgacagtatttaccactcgttgggtgg

SEQ ID NO: 431926 - DNA, 30 bp, Artificial Sequence
  Synthetic oligonucleotide
gtttacgagtctaggttcacctgatggtgg

SEQ ID NO: 431927 - DNA, 30 bp, Artificial Sequence
  Synthetic oligonucleotide
ttcagttactgtatgaaagctaagtggtgg

SEQ ID NO: 431928 - DNA, 30 bp, Artificial Sequence
  Synthetic oligonucleotide
tccggggtacgagtggaaaacccgtggtgg

SEQ ID NO: 431929 - DNA, 30 bp, Artificial Sequence
  Synthetic oligonucleotide
gtctatgactaaaaacacctctggtggtgg

SEQ ID NO: 431930 - DNA, 30 bp, Artificial Sequence
  Synthetic oligonucleotide
ttcgttacattctttccgaatccttggtgg

SEQ ID NO: 431931 - DNA, 30 bp, Artificial Sequence
  Synthetic oligonucleotide
tcatgcgtttctgggaacttgttttggtgg

SEQ ID NO: 431932 - DNA, 30 bp, Artificial Sequence
  Synthetic oligonucleotide
ggtgacacgccgagcatcatactaatgtgg

SEQ ID NO: 431933 - DNA, 30 bp, Artificial Sequence
  Synthetic oligonucleotide
gtattctattatcttgttacagtaatgtgg

SEQ ID NO: 431934 - DNA, 30 bp, Artificial Sequence
  Synthetic oligonucleotide
acgcaagcgcactatggagatcacatgtgg

SEQ ID NO: 431935 - DNA, 30 bp, Artificial Sequence
  Synthetic oligonucleotide
aaatacgattccggaccgggaccgatgtgg

SEQ ID NO: 431936 - DNA, 30 bp, Artificial Sequence
  Synthetic oligonucleotide
ctcgtcgggggccatccactgggtatgtgg

SEQ ID NO: 431937 - DNA, 30 bp, Artificial Sequence
  Synthetic oligonucleotide
ggccaggaagaactgctgccggacctgtgg

SEQ ID NO: 431938 - DNA, 30 bp, Artificial Sequence
  Synthetic oligonucleotide
gggttaccggtaatccttattaccgtgtgg

SEQ ID NO: 431939 - DNA, 30 bp, Artificial Sequence
  Synthetic oligonucleotide
cttgcttcaaacttctatctgatcgtgtgg

SEQ ID NO: 431940 - DNA, 30 bp, Artificial Sequence
  Synthetic oligonucleotide
gtattaggtctatcctacttctgattgtgg

SEQ ID NO: 431941 - DNA, 30 bp, Artificial Sequence
  Synthetic oligonucleotide
ccgcttaataggcacgctcacatattgtgg

SEQ ID NO: 431942 - DNA, 30 bp, Artificial Sequence
  Synthetic oligonucleotide
tgagtgatatgtcgggaagaggtattgtgg

SEQ ID NO: 431943 - DNA, 30 bp, Artificial Sequence
  Synthetic oligonucleotide
aaatgacgatcagaagcgctaggcttgtgg

SEQ ID NO: 431944 - DNA, 30 bp, Artificial Sequence
  Synthetic oligonucleotide
ggattcatcaaacggtatgattagttgtgg

SEQ ID NO: 431945 - DNA, 30 bp, Artificial Sequence
  Synthetic oligonucleotide
ttgtatcctctgaccgtaccgtttttgtgg

SEQ ID NO: 431946 - DNA, 30 bp, Artificial Sequence
  Synthetic oligonucleotide
ttcaagttattcttacatgcgacaaattgg

SEQ ID NO: 431947 - DNA, 30 bp, Artificial Sequence
  Synthetic oligonucleotide
ggaaaaggaacgtgtgtaagccgaaattgg

SEQ ID NO: 431948 - DNA, 25 bp, Artificial Sequence
  Synthetic oligonucleotide
tcaaaactagaaatatgacaattgg

SEQ ID NO: 431949 - DNA, 30 bp, Artificial Sequence
  Synthetic oligonucleotide
ccttggcggtggacgcttcgtgataattgg

SEQ ID NO: 431950 - DNA, 30 bp, Artificial Sequence
  Synthetic oligonucleotide
tggtacctctctggctcagactgtaattgg

SEQ ID NO: 431951 - DNA, 30 bp, Artificial Sequence
  Synthetic oligonucleotide
tccactatgccacggtaattgtttaattgg

SEQ ID NO: 431952 - DNA, 30 bp, Artificial Sequence
  Synthetic oligonucleotide
taggttctatggatatgctcataacattgg

SEQ ID NO: 431953 - DNA, 30 bp, Artificial Sequence
  Synthetic oligonucleotide
atagcccgcgaacctttcgggtaacattgg

SEQ ID NO: 431954 - DNA, 30 bp, Artificial Sequence
  Synthetic oligonucleotide
atctttgatgatggctcggcaaggcattgg

SEQ ID NO: 431955 - DNA, 30 bp, Artificial Sequence
  Synthetic oligonucleotide
tttggccaatgagtattcatgaggcattgg

SEQ ID NO: 431956 - DNA, 30 bp, Artificial Sequence
  Synthetic oligonucleotide
gatcactttagcaccgtggagttgcattgg

SEQ ID NO: 431957 - DNA, 30 bp, Artificial Sequence
  Synthetic oligonucleotide
cgattaactgtcaaactgtatgctcattgg

SEQ ID NO: 431958 - DNA, 30 bp, Artificial Sequence
  Synthetic oligonucleotide
tcgcgatgggcacaacgttaaggtcattgg

SEQ ID NO: 431959 - DNA, 30 bp, Artificial Sequence
  Synthetic oligonucleotide
ttaaaaacatcaagtccgtaatgtcattgg

SEQ ID NO: 431960 - DNA, 30 bp, Artificial Sequence
  Synthetic oligonucleotide
gccacacgctgtcaagatacgacagattgg

SEQ ID NO: 431961 - DNA, 30 bp, Artificial Sequence
  Synthetic oligonucleotide
tgagattgtcaagggctattttacgattgg

SEQ ID NO: 431962 - DNA, 30 bp, Artificial Sequence
  Synthetic oligonucleotide
aagtcgcgaccaatcccgttcggcgattgg

SEQ ID NO: 431963 - DNA, 30 bp, Artificial Sequence
  Synthetic oligonucleotide
ctcggcgcttgattttcatcctgcgattgg

SEQ ID NO: 431964 - DNA, 30 bp, Artificial Sequence
  Synthetic oligonucleotide
aatgcgccaggaccagaccttttcgattgg

SEQ ID NO: 431965 - DNA, 30 bp, Artificial Sequence
  Synthetic oligonucleotide
gccggtgtctaccggttaagactggattgg

SEQ ID NO: 431966 - DNA, 30 bp, Artificial Sequence
  Synthetic oligonucleotide
gtgtaagcactctacagacgtacatattgg

SEQ ID NO: 431967 - DNA, 30 bp, Artificial Sequence
  Synthetic oligonucleotide
ctttgaaagatgggccaagagctatattgg

SEQ ID NO: 431968 - DNA, 30 bp, Artificial Sequence
  Synthetic oligonucleotide
caacacaaaccgtgactcgcagcgtattgg

SEQ ID NO: 431969 - DNA, 30 bp, Artificial Sequence
  Synthetic oligonucleotide
aataggatgacacatctgcgtaggtattgg

SEQ ID NO: 431970 - DNA, 30 bp, Artificial Sequence
  Synthetic oligonucleotide
aaatcaatttgctttgcgtgtctgtattgg

SEQ ID NO: 431971 - DNA, 30 bp, Artificial Sequence
  Synthetic oligonucleotide
gaagctcaactaactcaggcgttaacttgg

SEQ ID NO: 431972 - DNA, 30 bp, Artificial Sequence
  Synthetic oligonucleotide
cgttattcgactgacacagacgtcacttgg

SEQ ID NO: 431973 - DNA, 30 bp, Artificial Sequence
  Synthetic oligonucleotide
tccgtaaattaaggacgagatgagacttgg

SEQ ID NO: 431974 - DNA, 30 bp, Artificial Sequence
  Synthetic oligonucleotide
ttccggctgcgttctttgctgatgacttgg

SEQ ID NO: 431975 - DNA, 30 bp, Artificial Sequence
  Synthetic oligonucleotide
tcgttcttctcggtggaaggcttgacttgg

SEQ ID NO: 431976 - DNA, 30 bp, Artificial Sequence
  Synthetic oligonucleotide
cgtacacctgcatatgttgtatgtacttgg

SEQ ID NO: 431977 - DNA, 30 bp, Artificial Sequence
  Synthetic oligonucleotide
acactcacttccatacataccagaccttgg

SEQ ID NO: 431978 - DNA, 30 bp, Artificial Sequence
  Synthetic oligonucleotide
ctagcgtaatatagggggggagccccttgg

SEQ ID NO: 431979 - DNA, 30 bp, Artificial Sequence
  Synthetic oligonucleotide
taaaggttttgttatccatattctccttgg

SEQ ID NO: 431980 - DNA, 30 bp, Artificial Sequence
  Synthetic oligonucleotide
ctgtgagtatttgacgaccccagcgcttgg

SEQ ID NO: 431981 - DNA, 30 bp, Artificial Sequence
  Synthetic oligonucleotide
atcccactctaaatgacatagcgcgcttgg

SEQ ID NO: 431982 - DNA, 30 bp, Artificial Sequence
  Synthetic oligonucleotide
ggttccttatggttagctgttcgcgcttgg

SEQ ID NO: 431983 - DNA, 30 bp, Artificial Sequence
  Synthetic oligonucleotide
ggtggcagtttaatcattgtgggcgcttgg

SEQ ID NO: 431984 - DNA, 30 bp, Artificial Sequence
  Synthetic oligonucleotide
tgacgctacgacacgagtaacactgcttgg

SEQ ID NO: 431985 - DNA, 30 bp, Artificial Sequence
  Synthetic oligonucleotide
cgccgagcgcccaaactgtctgaatcttgg

SEQ ID NO: 431986 - DNA, 30 bp, Artificial Sequence
  Synthetic oligonucleotide
gacgtcatttctgtaagttcggactcttgg

SEQ ID NO: 431987 - DNA, 30 bp, Artificial Sequence
  Synthetic oligonucleotide
ttgaacgtagaaccttaatgatactcttgg

SEQ ID NO: 431988 - DNA, 30 bp, Artificial Sequence
  Synthetic oligonucleotide
gaacgtagctattatggatgcatctcttgg

SEQ ID NO: 431989 - DNA, 30 bp, Artificial Sequence
  Synthetic oligonucleotide
gtaggtttggtcatcaaaagcccttcttgg

SEQ ID NO: 431990 - DNA, 30 bp, Artificial Sequence
  Synthetic oligonucleotide
aaaccagaatagtgatggatttgttcttgg

SEQ ID NO: 431991 - DNA, 30 bp, Artificial Sequence
  Synthetic oligonucleotide
gcacaacaacgggtgctgactaacagttgg

SEQ ID NO: 431992 - DNA, 30 bp, Artificial Sequence
  Synthetic oligonucleotide
taacggctaatagctaggtaggacagttgg

SEQ ID NO: 431993 - DNA, 30 bp, Artificial Sequence
  Synthetic oligonucleotide
cggttctgagagtcgaagtaacccagttgg

SEQ ID NO: 431994 - DNA, 30 bp, Artificial Sequence
  Synthetic oligonucleotide
ccggtggtgtcgagtggtggccggagttgg

SEQ ID NO: 431995 - DNA, 30 bp, Artificial Sequence
  Synthetic oligonucleotide
gccgggtcgtatacttaaatgcatagttgg

SEQ ID NO: 431996 - DNA, 29 bp, Artificial Sequence
  Synthetic oligonucleotide
gatccgctattacatgttgaactagttgg

SEQ ID NO: 431997 - DNA, 30 bp, Artificial Sequence
  Synthetic oligonucleotide
tattcgaaaaatggctgtttcagtagttgg

SEQ ID NO: 431998 - DNA, 30 bp, Artificial Sequence
  Synthetic oligonucleotide
ccttctccgtacttattgcgacgacgttgg

SEQ ID NO: 431999 - DNA, 30 bp, Artificial Sequence
  Synthetic oligonucleotide
tgtatctgaattaagcttggcgaccgttgg

SEQ ID NO: 432000 - DNA, 30 bp, Artificial Sequence
  Synthetic oligonucleotide
ctggtcagacacggcttggcgccccgttgg

SEQ ID NO: 432001 - DNA, 30 bp, Artificial Sequence
  Synthetic oligonucleotide
tagactacgggctcgatacgaccgcgttgg

SEQ ID NO: 432002 - DNA, 30 bp, Artificial Sequence
  Synthetic oligonucleotide
cgttctaattccgtcactataccgcgttgg

SEQ ID NO: 432003 - DNA, 31 bp, Artificial Sequence
  Synthetic oligonucleotide
gatcaacgacacgtccgtagcatggcgttgg

SEQ ID NO: 432004 - DNA, 30 bp, Artificial Sequence
  Synthetic oligonucleotide
gagctttagtccgggggtgaggccggttgg

SEQ ID NO: 432005 - DNA, 30 bp, Artificial Sequence
  Synthetic oligonucleotide
tacgtcggtatcggagctgcaggcggttgg

SEQ ID NO: 432006 - DNA, 30 bp, Artificial Sequence
  Synthetic oligonucleotide
agcccgcctcccctatgggcctagggttgg

SEQ ID NO: 432007 - DNA, 30 bp, Artificial Sequence
  Synthetic oligonucleotide
cagtctttcagcttggtgcggttgggttgg

SEQ ID NO: 432008 - DNA, 30 bp, Artificial Sequence
  Synthetic oligonucleotide
gaacgttagcacgttaaactgtgtggttgg

SEQ ID NO: 432009 - DNA, 30 bp, Artificial Sequence
  Synthetic oligonucleotide
accgtaattgtagagcgacgccactgttgg

SEQ ID NO: 432010 - DNA, 30 bp, Artificial Sequence
  Synthetic oligonucleotide
gatttgggatcatagtttgagtactgttgg

SEQ ID NO: 432011 - DNA, 30 bp, Artificial Sequence
  Synthetic oligonucleotide
gactacgcaaggtacctacttaggtgttgg

SEQ ID NO: 432012 - DNA, 30 bp, Artificial Sequence
  Synthetic oligonucleotide
atctatatcaaggtgggcaccacaatttgg

SEQ ID NO: 432013 - DNA, 30 bp, Artificial Sequence
  Synthetic oligonucleotide
gaacgtggagtttgtacctccggcatttgg

SEQ ID NO: 432014 - DNA, 30 bp, Artificial Sequence
  Synthetic oligonucleotide
ttagcatttcctccacaaggtatcatttgg

SEQ ID NO: 432015 - DNA, 30 bp, Artificial Sequence
  Synthetic oligonucleotide
gggaacaaactaacacgccaaccgatttgg

SEQ ID NO: 432016 - DNA, 30 bp, Artificial Sequence
  Synthetic oligonucleotide
gccgtcccggtcgattcagaggcgatttgg

SEQ ID NO: 432017 - DNA, 30 bp, Artificial Sequence
  Synthetic oligonucleotide
tatgggtcttttaggatctggtggatttgg

SEQ ID NO: 432018 - DNA, 30 bp, Artificial Sequence
  Synthetic oligonucleotide
ggaaaggcagagccgagtcagactatttgg

SEQ ID NO: 432019 - DNA, 30 bp, Artificial Sequence
  Synthetic oligonucleotide
cagacccggtgaaccgtcgcctctatttgg

SEQ ID NO: 432020 - DNA, 30 bp, Artificial Sequence
  Synthetic oligonucleotide
tacatgggtggcctctctagaccactttgg

SEQ ID NO: 432021 - DNA, 30 bp, Artificial Sequence
  Synthetic oligonucleotide
catgttcgtatatcgtaccacccgctttgg

SEQ ID NO: 432022 - DNA, 30 bp, Artificial Sequence
  Synthetic oligonucleotide
gacttgtctcctgcacacggggaagtttgg

SEQ ID NO: 432023 - DNA, 30 bp, Artificial Sequence
  Synthetic oligonucleotide
aattacaaaatacctaatgaaacagtttgg

SEQ ID NO: 432024 - DNA, 30 bp, Artificial Sequence
  Synthetic oligonucleotide
tcgatttgctcgcttatgaccagagtttgg

SEQ ID NO: 432025 - DNA, 30 bp, Artificial Sequence
  Synthetic oligonucleotide
attaaaaaacgaaggtaggcagtagtttgg

SEQ ID NO: 432026 - DNA, 30 bp, Artificial Sequence
  Synthetic oligonucleotide
ggccttgactgcggcccctgtcccgtttgg

SEQ ID NO: 432027 - DNA, 30 bp, Artificial Sequence
  Synthetic oligonucleotide
taaaacaatcgcgagccggaggcggtttgg

SEQ ID NO: 432028 - DNA, 30 bp, Artificial Sequence
  Synthetic oligonucleotide
ctttaattgtggtttcttaacagggtttgg

SEQ ID NO: 432029 - DNA, 30 bp, Artificial Sequence
  Synthetic oligonucleotide
gcggataatgaaactgcgttccgtgtttgg

SEQ ID NO: 432030 - DNA, 29 bp, Artificial Sequence
  Synthetic oligonucleotide
aacaagtaggctccaaatcaggtgtttgg

SEQ ID NO: 432031 - DNA, 30 bp, Artificial Sequence
  Synthetic oligonucleotide
tgtcggagtaccgtcttgctataattttgg

SEQ ID NO: 432032 - DNA, 30 bp, Artificial Sequence
  Synthetic oligonucleotide
cttatttgatccatggtctgttgattttgg

SEQ ID NO: 432033 - DNA, 30 bp, Artificial Sequence
  Synthetic oligonucleotide
tacaagaggtgcaggtagccagacttttgg

SEQ ID NO: 432034 - DNA, 30 bp, Artificial Sequence
  Synthetic oligonucleotide
gatttggcaggcaatttggtggccttttgg

SEQ ID NO: 432035 - DNA, 30 bp, Artificial Sequence
  Synthetic oligonucleotide
atcgcctggtgcaaatttagcgtcttttgg

SEQ ID NO: 432036 - DNA, 30 bp, Artificial Sequence
  Synthetic oligonucleotide
tgcagcggtgcaccatgattgacgttttgg

SEQ ID NO: 432037 - DNA, 30 bp, Artificial Sequence
  Synthetic oligonucleotide
gttattcagtggccataactgattttttgg

SEQ ID NO: 432038 - DNA, 30 bp, Artificial Sequence
  Synthetic oligonucleotide
ctatcgacgttaagttagctctttttttgg

SEQ ID NO: 432039 - DNA, 30 bp, Artificial Sequence
  Synthetic oligonucleotide
ggaagatcatataatatacaaataaaaatg

SEQ ID NO: 432040 - DNA, 30 bp, Artificial Sequence
  Synthetic oligonucleotide
ggctcaggggggctgatatgaaggaaaatg

SEQ ID NO: 432041 - DNA, 30 bp, Artificial Sequence
  Synthetic oligonucleotide
gaagcttatataggtcgtcttgggaaaatg

SEQ ID NO: 432042 - DNA, 30 bp, Artificial Sequence
  Synthetic oligonucleotide
tgattatactctttgcggggagtgaaaatg

SEQ ID NO: 432043 - DNA, 30 bp, Artificial Sequence
  Synthetic oligonucleotide
ggcctctcggctgcacaatagagtaaaatg

SEQ ID NO: 432044 - DNA, 30 bp, Artificial Sequence
  Synthetic oligonucleotide
atgggtccagtggctcctctcgagcaaatg

SEQ ID NO: 432045 - DNA, 30 bp, Artificial Sequence
  Synthetic oligonucleotide
gggcaattccgccttgattctgagcaaatg

SEQ ID NO: 432046 - DNA, 30 bp, Artificial Sequence
  Synthetic oligonucleotide
cagatggatcagacaatagatacgcaaatg

SEQ ID NO: 432047 - DNA, 30 bp, Artificial Sequence
  Synthetic oligonucleotide
taaggcacggagtgccttttagcgcaaatg

SEQ ID NO: 432048 - DNA, 30 bp, Artificial Sequence
  Synthetic oligonucleotide
ctaagtgtgccgagtgtaagcttgcaaatg

SEQ ID NO: 432049 - DNA, 30 bp, Artificial Sequence
  Synthetic oligonucleotide
gacagtgtctgcatcggctgctctcaaatg

SEQ ID NO: 432050 - DNA, 30 bp, Artificial Sequence
  Synthetic oligonucleotide
taaacatcttggatccagtttgtcgaaatg

SEQ ID NO: 432051 - DNA, 30 bp, Artificial Sequence
  Synthetic oligonucleotide
gtgatgggttacatagtaccctaggaaatg

SEQ ID NO: 432052 - DNA, 30 bp, Artificial Sequence
  Synthetic oligonucleotide
cccattgcacagcacccttgggcggaaatg

SEQ ID NO: 432053 - DNA, 30 bp, Artificial Sequence
  Synthetic oligonucleotide
cgcagctttcctcaagatccatcggaaatg

SEQ ID NO: 432054 - DNA, 30 bp, Artificial Sequence
  Synthetic oligonucleotide
gattaatgattctaaagactaagggaaatg

SEQ ID NO: 432055 - DNA, 30 bp, Artificial Sequence
  Synthetic oligonucleotide
atttgtttaagtgccaagaattatgaaatg

SEQ ID NO: 432056 - DNA, 30 bp, Artificial Sequence
  Synthetic oligonucleotide
tccatcaaagcttcttactttgaataaatg

SEQ ID NO: 432057 - DNA, 30 bp, Artificial Sequence
  Synthetic oligonucleotide
gcgtcgttaattctaagatgtcactaaatg

SEQ ID NO: 432058 - DNA, 30 bp, Artificial Sequence
  Synthetic oligonucleotide
gtcaaatctctgtctaggtccacctaaatg

SEQ ID NO: 432059 - DNA, 30 bp, Artificial Sequence
  Synthetic oligonucleotide
ttgcgtggtgttgtcatcgatgtctaaatg

SEQ ID NO: 432060 - DNA, 30 bp, Artificial Sequence
  Synthetic oligonucleotide
ctcgcgggtcacagaagcacatcgtaaatg

SEQ ID NO: 432061 - DNA, 30 bp, Artificial Sequence
  Synthetic oligonucleotide
taattggtgcgctattactacttgtaaatg

SEQ ID NO: 432062 - DNA, 30 bp, Artificial Sequence
  Synthetic oligonucleotide
ctaatcttagattggcaaaatccttaaatg

SEQ ID NO: 432063 - DNA, 30 bp, Artificial Sequence
  Synthetic oligonucleotide
tgagctcgctagtgctcggtagcttaaatg

SEQ ID NO: 432064 - DNA, 30 bp, Artificial Sequence
  Synthetic oligonucleotide
aagcggtgggggacattaagaatttaaatg

SEQ ID NO: 432065 - DNA, 30 bp, Artificial Sequence
  Synthetic oligonucleotide
acgcgttgatataacaaccctgtttaaatg

SEQ ID NO: 432066 - DNA, 30 bp, Artificial Sequence
  Synthetic oligonucleotide
gttcttagtcgaacactcatcgtaacaatg

SEQ ID NO: 432067 - DNA, 30 bp, Artificial Sequence
  Synthetic oligonucleotide
taggttctcgtcaaggatttacacacaatg

SEQ ID NO: 432068 - DNA, 30 bp, Artificial Sequence
  Synthetic oligonucleotide
atgcagtcacccttagcgggcgctacaatg

SEQ ID NO: 432069 - DNA, 30 bp, Artificial Sequence
  Synthetic oligonucleotide
aataataaagccggtcaggtggaaccaatg

SEQ ID NO: 432070 - DNA, 30 bp, Artificial Sequence
  Synthetic oligonucleotide
atctatggtcgttctgtatcggtcccaatg

SEQ ID NO: 432071 - DNA, 30 bp, Artificial Sequence
  Synthetic oligonucleotide
agacacaactgaccgcgtcccaagccaatg

SEQ ID NO: 432072 - DNA, 30 bp, Artificial Sequence
  Synthetic oligonucleotide
tgaaatctgccgtaagccgtagcgccaatg

SEQ ID NO: 432073 - DNA, 30 bp, Artificial Sequence
  Synthetic oligonucleotide
ttgtcctcaccattcataatatcgccaatg

SEQ ID NO: 432074 - DNA, 30 bp, Artificial Sequence
  Synthetic oligonucleotide
gggttaacgcaacgcattcatggagcaatg

SEQ ID NO: 432075 - DNA, 30 bp, Artificial Sequence
  Synthetic oligonucleotide
atagtttgttgtgcgtgaacatccgcaatg

SEQ ID NO: 432076 - DNA, 30 bp, Artificial Sequence
  Synthetic oligonucleotide
ggtcagtcgcatgtggtagccttcgcaatg

SEQ ID NO: 432077 - DNA, 30 bp, Artificial Sequence
  Synthetic oligonucleotide
atcaaatgatgacggtttggcttcgcaatg

SEQ ID NO: 432078 - DNA, 30 bp, Artificial Sequence
  Synthetic oligonucleotide
cccagtgaggcctgcattctgtatgcaatg

SEQ ID NO: 432079 - DNA, 30 bp, Artificial Sequence
  Synthetic oligonucleotide
gattataccgcttaaccctactttgcaatg

SEQ ID NO: 432080 - DNA, 30 bp, Artificial Sequence
  Synthetic oligonucleotide
taaagagcaacacttagtgcactatcaatg

SEQ ID NO: 432081 - DNA, 30 bp, Artificial Sequence
  Synthetic oligonucleotide
agtctacccttcgggtgctgcaactcaatg

SEQ ID NO: 432082 - DNA, 30 bp, Artificial Sequence
  Synthetic oligonucleotide
ttttggtcccaggagccgggatcctcaatg

SEQ ID NO: 432083 - DNA, 30 bp, Artificial Sequence
  Synthetic oligonucleotide
tgtgcgctctggccaatgtaaatctcaatg

SEQ ID NO: 432084 - DNA, 30 bp, Artificial Sequence
  Synthetic oligonucleotide
cattcttctaaacagtgtatcatctcaatg

SEQ ID NO: 432085 - DNA, 30 bp, Artificial Sequence
  Synthetic oligonucleotide
gaatgaattcacgtacgtacgcgaagaatg

SEQ ID NO: 432086 - DNA, 30 bp, Artificial Sequence
  Synthetic oligonucleotide
caagcagtagttggcgtggcattcagaatg

SEQ ID NO: 432087 - DNA, 30 bp, Artificial Sequence
  Synthetic oligonucleotide
tattgaaagaagcgctcagacgctagaatg

SEQ ID NO: 432088 - DNA, 30 bp, Artificial Sequence
  Synthetic oligonucleotide
gttgcgtgcgtacaatgacggtttagaatg

SEQ ID NO: 432089 - DNA, 30 bp, Artificial Sequence
  Synthetic oligonucleotide
tatctctttttgcgacggctagaacgaatg

SEQ ID NO: 432090 - DNA, 30 bp, Artificial Sequence
  Synthetic oligonucleotide
taatttgttcatacaacaccctcgcgaatg

SEQ ID NO: 432091 - DNA, 30 bp, Artificial Sequence
  Synthetic oligonucleotide
ggatgaagttgttcggttgtgaggcgaatg

SEQ ID NO: 432092 - DNA, 30 bp, Artificial Sequence
  Synthetic oligonucleotide
aatttttcagagtacttgatagatcgaatg

SEQ ID NO: 432093 - DNA, 30 bp, Artificial Sequence
  Synthetic oligonucleotide
ctggccagggcgtgcaggttcgcaggaatg

SEQ ID NO: 432094 - DNA, 30 bp, Artificial Sequence
  Synthetic oligonucleotide
ttcaaagtccaaggtggccgtgcaggaatg

SEQ ID NO: 432095 - DNA, 30 bp, Artificial Sequence
  Synthetic oligonucleotide
ttcgcgcagacgacgctgctcgccggaatg

SEQ ID NO: 432096 - DNA, 30 bp, Artificial Sequence
  Synthetic oligonucleotide
tagatagttttgttatagcatggcggaatg

SEQ ID NO: 432097 - DNA, 30 bp, Artificial Sequence
  Synthetic oligonucleotide
aaaactagtgtactggggccatgcggaatg

SEQ ID NO: 432098 - DNA, 30 bp, Artificial Sequence
  Synthetic oligonucleotide
tttggtcctcagttgtattctctcggaatg

SEQ ID NO: 432099 - DNA, 30 bp, Artificial Sequence
  Synthetic oligonucleotide
gatcgcagttgcattgacgctgagggaatg

SEQ ID NO: 432100 - DNA, 30 bp, Artificial Sequence
  Synthetic oligonucleotide
tccggccggcatagcgacgcaaatggaatg

SEQ ID NO: 432101 - DNA, 30 bp, Artificial Sequence
  Synthetic oligonucleotide
atttattcacgtcactaacgattatgaatg

SEQ ID NO: 432102 - DNA, 30 bp, Artificial Sequence
  Synthetic oligonucleotide
gttttactggaattctgtatacactgaatg

SEQ ID NO: 432103 - DNA, 30 bp, Artificial Sequence
  Synthetic oligonucleotide
gtactcaacgcgaggcagaaattctgaatg

SEQ ID NO: 432104 - DNA, 30 bp, Artificial Sequence
  Synthetic oligonucleotide
ctccgaagcgaaacttaagaattctgaatg

SEQ ID NO: 432105 - DNA, 30 bp, Artificial Sequence
  Synthetic oligonucleotide
gtgtcgtatcacgtaagggacaggtgaatg

SEQ ID NO: 432106 - DNA, 30 bp, Artificial Sequence
  Synthetic oligonucleotide
cattacaacacctgcgatatggtgtgaatg

SEQ ID NO: 432107 - DNA, 30 bp, Artificial Sequence
  Synthetic oligonucleotide
aattatgaattaataaccttggattgaatg

SEQ ID NO: 432108 - DNA, 30 bp, Artificial Sequence
  Synthetic oligonucleotide
caatatggcaagtgcaacacgatttgaatg

SEQ ID NO: 432109 - DNA, 30 bp, Artificial Sequence
  Synthetic oligonucleotide
gattaggagccaatttgcactatcataatg

SEQ ID NO: 432110 - DNA, 30 bp, Artificial Sequence
  Synthetic oligonucleotide
ccatcttatgtccgggaggtggcgataatg

SEQ ID NO: 432111 - DNA, 30 bp, Artificial Sequence
  Synthetic oligonucleotide
ttgtaggaccgcagggtcggtgggataatg

SEQ ID NO: 432112 - DNA, 30 bp, Artificial Sequence
  Synthetic oligonucleotide
atttttgatacgttagggttatggataatg

SEQ ID NO: 432113 - DNA, 30 bp, Artificial Sequence
  Synthetic oligonucleotide
aaaggtcctagcctagatcgcggtataatg

SEQ ID NO: 432114 - DNA, 30 bp, Artificial Sequence
  Synthetic oligonucleotide
gtttcatcatcgtggtggccatttataatg

SEQ ID NO: 432115 - DNA, 30 bp, Artificial Sequence
  Synthetic oligonucleotide
attcccagggattagttgctcagactaatg

SEQ ID NO: 432116 - DNA, 30 bp, Artificial Sequence
  Synthetic oligonucleotide
ccatagtggaccgggcgcgtagtactaatg

SEQ ID NO: 432117 - DNA, 30 bp, Artificial Sequence
  Synthetic oligonucleotide
tcgatagatgtgtcccgttacttcctaatg

SEQ ID NO: 432118 - DNA, 30 bp, Artificial Sequence
  Synthetic oligonucleotide
atactaacaactccgcgacgtccgctaatg

SEQ ID NO: 432119 - DNA, 30 bp, Artificial Sequence
  Synthetic oligonucleotide
ttaaacgataaattagggccgctgctaatg

SEQ ID NO: 432120 - DNA, 30 bp, Artificial Sequence
  Synthetic oligonucleotide
tggtcaccggagccagccttggtgctaatg

SEQ ID NO: 432121 - DNA, 30 bp, Artificial Sequence
  Synthetic oligonucleotide
ttcgaccatgcattcaaggctgtgctaatg

SEQ ID NO: 432122 - DNA, 30 bp, Artificial Sequence
  Synthetic oligonucleotide
tattccttcctatccacagcctctctaatg

SEQ ID NO: 432123 - DNA, 30 bp, Artificial Sequence
  Synthetic oligonucleotide
gtctctggttccggaagttgcaaagtaatg

SEQ ID NO: 432124 - DNA, 30 bp, Artificial Sequence
  Synthetic oligonucleotide
aactatggacgggcactgtaggtagtaatg

SEQ ID NO: 432125 - DNA, 30 bp, Artificial Sequence
  Synthetic oligonucleotide
ttgaacttgttgaattttgctttggtaatg

SEQ ID NO: 432126 - DNA, 30 bp, Artificial Sequence
  Synthetic oligonucleotide
ggttattttgggcttaaatagcttgtaatg

SEQ ID NO: 432127 - DNA, 30 bp, Artificial Sequence
  Synthetic oligonucleotide
agatatgtggtacaagttaacgccttaatg

SEQ ID NO: 432128 - DNA, 30 bp, Artificial Sequence
  Synthetic oligonucleotide
aagcgctctcgctagggcggtgccttaatg

SEQ ID NO: 432129 - DNA, 30 bp, Artificial Sequence
  Synthetic oligonucleotide
ggagtccaatatgggtttctccgcttaatg

SEQ ID NO: 432130 - DNA, 30 bp, Artificial Sequence
  Synthetic oligonucleotide
cctctggacttacaataacggggcttaatg

SEQ ID NO: 432131 - DNA, 30 bp, Artificial Sequence
  Synthetic oligonucleotide
taagtgcatgtatgttgtgatatgttaatg

SEQ ID NO: 432132 - DNA, 30 bp, Artificial Sequence
  Synthetic oligonucleotide
ttttccccacgaaacactatattgttaatg

SEQ ID NO: 432133 - DNA, 30 bp, Artificial Sequence
  Synthetic oligonucleotide
atctcgttcgactctcaacaccgtttaatg

SEQ ID NO: 432134 - DNA, 30 bp, Artificial Sequence
  Synthetic oligonucleotide
taaatcatctagccctaagtcggtttaatg

SEQ ID NO: 432135 - DNA, 30 bp, Artificial Sequence
  Synthetic oligonucleotide
cccaatgttccagcaacctcttgtttaatg

SEQ ID NO: 432136 - DNA, 30 bp, Artificial Sequence
  Synthetic oligonucleotide
tgtacaatgtccgacacgtgctcaaacatg

SEQ ID NO: 432137 - DNA, 30 bp, Artificial Sequence
  Synthetic oligonucleotide
tatgtctacacaatgttcttttgaaacatg

SEQ ID NO: 432138 - DNA, 30 bp, Artificial Sequence
  Synthetic oligonucleotide
aaccggatgtttacgtttattgtaaacatg

SEQ ID NO: 432139 - DNA, 30 bp, Artificial Sequence
  Synthetic oligonucleotide
atatgtcaagacaacaattcccacaacatg

SEQ ID NO: 432140 - DNA, 30 bp, Artificial Sequence
  Synthetic oligonucleotide
gggcaatgacatgttgtagggtacaacatg

SEQ ID NO: 432141 - DNA, 30 bp, Artificial Sequence
  Synthetic oligonucleotide
cggatatgttatggatctagttacaacatg

SEQ ID NO: 432142 - DNA, 30 bp, Artificial Sequence
  Synthetic oligonucleotide
cgataccgatatccgcattaccggaacatg

SEQ ID NO: 432143 - DNA, 30 bp, Artificial Sequence
  Synthetic oligonucleotide
tggtcctctgtcctacagtacttgaacatg

SEQ ID NO: 432144 - DNA, 30 bp, Artificial Sequence
  Synthetic oligonucleotide
ttatatacgttacttgggataggtaacatg

SEQ ID NO: 432145 - DNA, 30 bp, Artificial Sequence
  Synthetic oligonucleotide
ggaacgccgcgcgtcttatattgccacatg

SEQ ID NO: 432146 - DNA, 30 bp, Artificial Sequence
  Synthetic oligonucleotide
cataatatgaaacgcagaaccgggcacatg

SEQ ID NO: 432147 - DNA, 30 bp, Artificial Sequence
  Synthetic oligonucleotide
cgcttgatgtgatggcggtcgtatcacatg

SEQ ID NO: 432148 - DNA, 30 bp, Artificial Sequence
  Synthetic oligonucleotide
aaagcgttacgtgaagatcacgcagacatg

SEQ ID NO: 432149 - DNA, 30 bp, Artificial Sequence
  Synthetic oligonucleotide
aaaaaatggtgaggacccgtggtagacatg

SEQ ID NO: 432150 - DNA, 30 bp, Artificial Sequence
  Synthetic oligonucleotide
catgtgtacccgacgattagtcacgacatg

SEQ ID NO: 432151 - DNA, 30 bp, Artificial Sequence
  Synthetic oligonucleotide
cccctccttttgcgatgtaagactgacatg

SEQ ID NO: 432152 - DNA, 30 bp, Artificial Sequence
  Synthetic oligonucleotide
gctttagggtttaggttgactggatacatg

SEQ ID NO: 432153 - DNA, 30 bp, Artificial Sequence
  Synthetic oligonucleotide
aaattattccaaatatggaccatgtacatg

SEQ ID NO: 432154 - DNA, 31 bp, Artificial Sequence
  Synthetic oligonucleotide
tgtaagcgtggtatttgtgtcagtttacatg

SEQ ID NO: 432155 - DNA, 30 bp, Artificial Sequence
  Synthetic oligonucleotide
ggtggctttaagaatgacatacgcaccatg

SEQ ID NO: 432156 - DNA, 30 bp, Artificial Sequence
  Synthetic oligonucleotide
aatgctaagtgtttgaggcgatgcaccatg

SEQ ID NO: 432157 - DNA, 30 bp, Artificial Sequence
  Synthetic oligonucleotide
cgaatggttatatgtatctccttcaccatg

SEQ ID NO: 432158 - DNA, 30 bp, Artificial Sequence
  Synthetic oligonucleotide
tgtgccttatacccctaagtggagaccatg

SEQ ID NO: 432159 - DNA, 30 bp, Artificial Sequence
  Synthetic oligonucleotide
tgtgttttatctattgtaggggtgaccatg

SEQ ID NO: 432160 - DNA, 30 bp, Artificial Sequence
  Synthetic oligonucleotide
ttatgagaacggttgcgttatcaacccatg

SEQ ID NO: 432161 - DNA, 30 bp, Artificial Sequence
  Synthetic oligonucleotide
tagaaacattcgttgggatgcatacccatg

SEQ ID NO: 432162 - DNA, 30 bp, Artificial Sequence
  Synthetic oligonucleotide
cagataagctctatggtggccacccccatg

SEQ ID NO: 432163 - DNA, 30 bp, Artificial Sequence
  Synthetic oligonucleotide
gctgttaatactttaagcttaggccccatg

SEQ ID NO: 432164 - DNA, 30 bp, Artificial Sequence
  Synthetic oligonucleotide
ttatactctctcaggggtctaagtcccatg

SEQ ID NO: 432165 - DNA, 30 bp, Artificial Sequence
  Synthetic oligonucleotide
tactctcattcccaaaatttagcagccatg

SEQ ID NO: 432166 - DNA, 30 bp, Artificial Sequence
  Synthetic oligonucleotide
gagggtctaccgcttataatgatagccatg

SEQ ID NO: 432167 - DNA, 30 bp, Artificial Sequence
  Synthetic oligonucleotide
actcttctaagcccataaaagatggccatg

SEQ ID NO: 432168 - DNA, 30 bp, Artificial Sequence
  Synthetic oligonucleotide
cttaaccagtccttatatcgcactgccatg

SEQ ID NO: 432169 - DNA, 30 bp, Artificial Sequence
  Synthetic oligonucleotide
ggtatgcaaatgagcataaatcgtgccatg

SEQ ID NO: 432170 - DNA, 30 bp, Artificial Sequence
  Synthetic oligonucleotide
actctcaagtatggcagtctctactccatg

SEQ ID NO: 432171 - DNA, 30 bp, Artificial Sequence
  Synthetic oligonucleotide
ctcctcatttacggccgtggttgctccatg

SEQ ID NO: 432172 - DNA, 30 bp, Artificial Sequence
  Synthetic oligonucleotide
cgagagatgaaccgggccatggtctccatg

SEQ ID NO: 432173 - DNA, 30 bp, Artificial Sequence
  Synthetic oligonucleotide
gtactcaaagagtggttgaaattctccatg

SEQ ID NO: 432174 - DNA, 30 bp, Artificial Sequence
  Synthetic oligonucleotide
agaattggtttcaaagcatggaagtccatg

SEQ ID NO: 432175 - DNA, 30 bp, Artificial Sequence
  Synthetic oligonucleotide
gtcgtgcacagggcaagctccgcttccatg

SEQ ID NO: 432176 - DNA, 30 bp, Artificial Sequence
  Synthetic oligonucleotide
gcacggttcaggcccatacaacgttccatg

SEQ ID NO: 432177 - DNA, 30 bp, Artificial Sequence
  Synthetic oligonucleotide
tggcaacgtgtaaccccaagtggttccatg

SEQ ID NO: 432178 - DNA, 30 bp, Artificial Sequence
  Synthetic oligonucleotide
gacacgcggtacgcggacggcgcaagcatg

SEQ ID NO: 432179 - DNA, 30 bp, Artificial Sequence
  Synthetic oligonucleotide
gttcagacgaaacctcagtagtcaagcatg

SEQ ID NO: 432180 - DNA, 30 bp, Artificial Sequence
  Synthetic oligonucleotide
cctcgcggctcacgcaatggcataagcatg

SEQ ID NO: 432181 - DNA, 30 bp, Artificial Sequence
  Synthetic oligonucleotide
ttgcaaaatgaggcaattggtcacagcatg

SEQ ID NO: 432182 - DNA, 30 bp, Artificial Sequence
  Synthetic oligonucleotide
ccgggaaatggtccccgttcgcggagcatg

SEQ ID NO: 432183 - DNA, 30 bp, Artificial Sequence
  Synthetic oligonucleotide
ctggcatatgggtagatatgagggagcatg

SEQ ID NO: 432184 - DNA, 30 bp, Artificial Sequence
  Synthetic oligonucleotide
gcagattggcagatccggacctgtagcatg

SEQ ID NO: 432185 - DNA, 30 bp, Artificial Sequence
  Synthetic oligonucleotide
ttatccgtcgacactccggaataccgcatg

SEQ ID NO: 432186 - DNA, 30 bp, Artificial Sequence
  Synthetic oligonucleotide
ttccatatatcgtccactagactccgcatg

SEQ ID NO: 432187 - DNA, 30 bp, Artificial Sequence
  Synthetic oligonucleotide
tataactttttcgaggttctgtagcgcatg

SEQ ID NO: 432188 - DNA, 30 bp, Artificial Sequence
  Synthetic oligonucleotide
agatagaaaaatggttttattcggcgcatg

SEQ ID NO: 432189 - DNA, 30 bp, Artificial Sequence
  Synthetic oligonucleotide
gatctacggcagtgaatttccatgcgcatg

SEQ ID NO: 432190 - DNA, 30 bp, Artificial Sequence
  Synthetic oligonucleotide
aacaaattcccttgcttgatgtgtcgcatg

SEQ ID NO: 432191 - DNA, 30 bp, Artificial Sequence
  Synthetic oligonucleotide
gttgcaatggtgaatagcttacccggcatg

SEQ ID NO: 432192 - DNA, 30 bp, Artificial Sequence
  Synthetic oligonucleotide
gccggtgtgctaaaatttgaatgcggcatg

SEQ ID NO: 432193 - DNA, 30 bp, Artificial Sequence
  Synthetic oligonucleotide
cggctcccggacacacggcgattcggcatg

SEQ ID NO: 432194 - DNA, 30 bp, Artificial Sequence
  Synthetic oligonucleotide
tgcgcttcgcaaatctgttcgaagggcatg

SEQ ID NO: 432195 - DNA, 30 bp, Artificial Sequence
  Synthetic oligonucleotide
cgaacgctgatcgccgcagaaatgggcatg

SEQ ID NO: 432196 - DNA, 30 bp, Artificial Sequence
  Synthetic oligonucleotide
cgtattcgtaccagttgttgtctatgcatg

SEQ ID NO: 432197 - DNA, 30 bp, Artificial Sequence
  Synthetic oligonucleotide
caccacattattggcttacagctgtgcatg

SEQ ID NO: 432198 - DNA, 30 bp, Artificial Sequence
  Synthetic oligonucleotide
ctagcggcaaattctgacggatacatcatg

SEQ ID NO: 432199 - DNA, 30 bp, Artificial Sequence
  Synthetic oligonucleotide
tcaccccgacaacaccccaagggcatcatg

SEQ ID NO: 432200 - DNA, 30 bp, Artificial Sequence
  Synthetic oligonucleotide
ggtgtatggtggtggatttcgatcatcatg

SEQ ID NO: 432201 - DNA, 30 bp, Artificial Sequence
  Synthetic oligonucleotide
cacatagagtcaatcgttagtcatatcatg

SEQ ID NO: 432202 - DNA, 30 bp, Artificial Sequence
  Synthetic oligonucleotide
gccgtattgagccagtagtctggactcatg

SEQ ID NO: 432203 - DNA, 30 bp, Artificial Sequence
  Synthetic oligonucleotide
ttgtttgagtacacttactagggcctcatg

SEQ ID NO: 432204 - DNA, 30 bp, Artificial Sequence
  Synthetic oligonucleotide
tttgataggttatcttcgcctctcctcatg

SEQ ID NO: 432205 - DNA, 30 bp, Artificial Sequence
  Synthetic oligonucleotide
taccatatcagggcgcttcggttagtcatg

SEQ ID NO: 432206 - DNA, 30 bp, Artificial Sequence
  Synthetic oligonucleotide
gagacccgaggtaggatatgcagcgtcatg

SEQ ID NO: 432207 - DNA, 30 bp, Artificial Sequence
  Synthetic oligonucleotide
gattatttttgtaaggggacagttgtcatg

SEQ ID NO: 432208 - DNA, 30 bp, Artificial Sequence
  Synthetic oligonucleotide
gattgtcaggagttgcagcgaatattcatg

SEQ ID NO: 432209 - DNA, 30 bp, Artificial Sequence
  Synthetic oligonucleotide
tcccgtcgcgggtcgccaagcatattcatg

SEQ ID NO: 432210 - DNA, 30 bp, Artificial Sequence
  Synthetic oligonucleotide
gacttttacgccttgggcgatgccttcatg

SEQ ID NO: 432211 - DNA, 30 bp, Artificial Sequence
  Synthetic oligonucleotide
tatactttggttgtggtaacagggttcatg

SEQ ID NO: 432212 - DNA, 30 bp, Artificial Sequence
  Synthetic oligonucleotide
gaatactcatcgggggcttaacgtttcatg

SEQ ID NO: 432213 - DNA, 30 bp, Artificial Sequence
  Synthetic oligonucleotide
agaatgtctctgctcctacccggtttcatg

SEQ ID NO: 432214 - DNA, 30 bp, Artificial Sequence
  Synthetic oligonucleotide
ctctgagattgaagcgtttcatttttcatg

SEQ ID NO: 432215 - DNA, 30 bp, Artificial Sequence
  Synthetic oligonucleotide
tttactttacgaagatctatggacaagatg

SEQ ID NO: 432216 - DNA, 30 bp, Artificial Sequence
  Synthetic oligonucleotide
actggaatggaggctttggctggcaagatg

SEQ ID NO: 432217 - DNA, 30 bp, Artificial Sequence
  Synthetic oligonucleotide
cccacgcgcgggatcctcggtcagaagatg

SEQ ID NO: 432218 - DNA, 30 bp, Artificial Sequence
  Synthetic oligonucleotide
ttagttagactgccgggcctgtagaagatg

SEQ ID NO: 432219 - DNA, 30 bp, Artificial Sequence
  Synthetic oligonucleotide
ctctgtttagattgatcgcgtccgaagatg

SEQ ID NO: 432220 - DNA, 30 bp, Artificial Sequence
  Synthetic oligonucleotide
tcagagataattgagttaatattgaagatg

SEQ ID NO: 432221 - DNA, 30 bp, Artificial Sequence
  Synthetic oligonucleotide
gatttccataaaactgacagtcgtaagatg

SEQ ID NO: 432222 - DNA, 30 bp, Artificial Sequence
  Synthetic oligonucleotide
ctcccgttggccgtgacactctcccagatg

SEQ ID NO: 432223 - DNA, 30 bp, Artificial Sequence
  Synthetic oligonucleotide
tggactacgcatagttatgcacagcagatg

SEQ ID NO: 432224 - DNA, 29 bp, Artificial Sequence
  Synthetic oligonucleotide
gttaacgcgctataagatccacagagatg

SEQ ID NO: 432225 - DNA, 30 bp, Artificial Sequence
  Synthetic oligonucleotide
caccacctttgtatgatgtcaggcgagatg

SEQ ID NO: 432226 - DNA, 30 bp, Artificial Sequence
  Synthetic oligonucleotide
agcgcatcaatcgggacccatatggagatg

SEQ ID NO: 432227 - DNA, 30 bp, Artificial Sequence
  Synthetic oligonucleotide
ggtatccgcgaagtagggttttaatagatg

SEQ ID NO: 432228 - DNA, 30 bp, Artificial Sequence
  Synthetic oligonucleotide
cggctgggcgctctccatagtatatagatg

SEQ ID NO: 432229 - DNA, 30 bp, Artificial Sequence
  Synthetic oligonucleotide
ggatactttgctgtgtctcatttatagatg

SEQ ID NO: 432230 - DNA, 30 bp, Artificial Sequence
  Synthetic oligonucleotide
aaaacgcgttcataagtctggcactagatg

SEQ ID NO: 432231 - DNA, 30 bp, Artificial Sequence
  Synthetic oligonucleotide
gagtttgttgagtttccgtgttagtagatg

SEQ ID NO: 432232 - DNA, 30 bp, Artificial Sequence
  Synthetic oligonucleotide
acctgtatggagaaatcgctgcattagatg

SEQ ID NO: 432233 - DNA, 30 bp, Artificial Sequence
  Synthetic oligonucleotide
gtcatgcgtacgtccccgcgggattagatg

SEQ ID NO: 432234 - DNA, 30 bp, Artificial Sequence
  Synthetic oligonucleotide
tgcgtattgacatgagcgcaattttagatg

SEQ ID NO: 432235 - DNA, 30 bp, Artificial Sequence
  Synthetic oligonucleotide
ttgattgtagacctcttggtattttagatg

SEQ ID NO: 432236 - DNA, 30 bp, Artificial Sequence
  Synthetic oligonucleotide
aaaaacgggtatatctctgcaacaacgatg

SEQ ID NO: 432237 - DNA, 30 bp, Artificial Sequence
  Synthetic oligonucleotide
attcataaagtgcatactgctggaacgatg

SEQ ID NO: 432238 - DNA, 30 bp, Artificial Sequence
  Synthetic oligonucleotide
ctactataattcattggagcacagacgatg

SEQ ID NO: 432239 - DNA, 30 bp, Artificial Sequence
  Synthetic oligonucleotide
gggcttgtcagccacaagatattgacgatg

SEQ ID NO: 432240 - DNA, 30 bp, Artificial Sequence
  Synthetic oligonucleotide
tttcagccactgtgaattaacagtacgatg

SEQ ID NO: 432241 - DNA, 30 bp, Artificial Sequence
  Synthetic oligonucleotide
cagaggctgcgcaaacgttcatgtacgatg

SEQ ID NO: 432242 - DNA, 30 bp, Artificial Sequence
  Synthetic oligonucleotide
gatttcttgcagtccggtagaattacgatg

SEQ ID NO: 432243 - DNA, 30 bp, Artificial Sequence
  Synthetic oligonucleotide
ggtcggtagccgcggccattaccaccgatg

SEQ ID NO: 432244 - DNA, 30 bp, Artificial Sequence
  Synthetic oligonucleotide
cttggaaatgacccggtgtgcgatccgatg

SEQ ID NO: 432245 - DNA, 30 bp, Artificial Sequence
  Synthetic oligonucleotide
ttcagactacggtcgctatcaactccgatg

SEQ ID NO: 432246 - DNA, 30 bp, Artificial Sequence
  Synthetic oligonucleotide
tagatgacaagctatcccccgtcggcgatg

SEQ ID NO: 432247 - DNA, 30 bp, Artificial Sequence
  Synthetic oligonucleotide
gagttggataatatcttcaacatggcgatg

SEQ ID NO: 432248 - DNA, 30 bp, Artificial Sequence
  Synthetic oligonucleotide
ttaagtcttagcggttaatctcctgcgatg

SEQ ID NO: 432249 - DNA, 30 bp, Artificial Sequence
  Synthetic oligonucleotide
aaacgttttaagacgtatctggaatcgatg

SEQ ID NO: 432250 - DNA, 30 bp, Artificial Sequence
  Synthetic oligonucleotide
gcactggggactacatggatgtcatcgatg

SEQ ID NO: 432251 - DNA, 31 bp, Artificial Sequence
  Synthetic oligonucleotide
tcaaatttagctacggagaggcggctcgatg

SEQ ID NO: 432252 - DNA, 30 bp, Artificial Sequence
  Synthetic oligonucleotide
ccagtctctagagagcagctgaagtcgatg

SEQ ID NO: 432253 - DNA, 30 bp, Artificial Sequence
  Synthetic oligonucleotide
cattttgactcatgtactttcgcgtcgatg

SEQ ID NO: 432254 - DNA, 30 bp, Artificial Sequence
  Synthetic oligonucleotide
catggtcctaatggcgtagcaaattcgatg

SEQ ID NO: 432255 - DNA, 30 bp, Artificial Sequence
  Synthetic oligonucleotide
tgtttttgtgatgttgctcttaagaggatg

SEQ ID NO: 432256 - DNA, 30 bp, Artificial Sequence
  Synthetic oligonucleotide
cactctatatttctgtgtgtgtttaggatg

SEQ ID NO: 432257 - DNA, 30 bp, Artificial Sequence
  Synthetic oligonucleotide
tattcgtctgataccaggcatcaccggatg

SEQ ID NO: 432258 - DNA, 30 bp, Artificial Sequence
  Synthetic oligonucleotide
tcagtacagtttttgagttcttcccggatg

SEQ ID NO: 432259 - DNA, 30 bp, Artificial Sequence
  Synthetic oligonucleotide
acgcctcagcaaaatgaccatggccggatg

SEQ ID NO: 432260 - DNA, 30 bp, Artificial Sequence
  Synthetic oligonucleotide
gctccggcccgggcattttaaatccggatg

SEQ ID NO: 432261 - DNA, 30 bp, Artificial Sequence
  Synthetic oligonucleotide
actcgcctctctgtattatctactcggatg

SEQ ID NO: 432262 - DNA, 30 bp, Artificial Sequence
  Synthetic oligonucleotide
aaatggataacaagtatgttagaagggatg

SEQ ID NO: 432263 - DNA, 30 bp, Artificial Sequence
  Synthetic oligonucleotide
tgagtaagcccaaccctttctgaagggatg

SEQ ID NO: 432264 - DNA, 30 bp, Artificial Sequence
  Synthetic oligonucleotide
aacacgacggtgggggctggggcagggatg

SEQ ID NO: 432265 - DNA, 30 bp, Artificial Sequence
  Synthetic oligonucleotide
tctggacttgaagtattggtttcagggatg

SEQ ID NO: 432266 - DNA, 30 bp, Artificial Sequence
  Synthetic oligonucleotide
atgtacacatagctacggtaaatggggatg

SEQ ID NO: 432267 - DNA, 30 bp, Artificial Sequence
  Synthetic oligonucleotide
ttgagttgttgaacttctatgattgggatg

SEQ ID NO: 432268 - DNA, 30 bp, Artificial Sequence
  Synthetic oligonucleotide
tcaggaggtcgctttcaggtccttgggatg

SEQ ID NO: 432269 - DNA, 30 bp, Artificial Sequence
  Synthetic oligonucleotide
tgggtctgaattgtctacgcagtatggatg

SEQ ID NO: 432270 - DNA, 30 bp, Artificial Sequence
  Synthetic oligonucleotide
aacccaagcagcatatccagaccgtggatg

SEQ ID NO: 432271 - DNA, 30 bp, Artificial Sequence
  Synthetic oligonucleotide
gtttttgctaaatgaatgcaccggtggatg

SEQ ID NO: 432272 - DNA, 30 bp, Artificial Sequence
  Synthetic oligonucleotide
tctgtcgttacacatcctacccggtggatg

SEQ ID NO: 432273 - DNA, 30 bp, Artificial Sequence
  Synthetic oligonucleotide
gtgttaatctggtatagcgtatggtggatg

SEQ ID NO: 432274 - DNA, 30 bp, Artificial Sequence
  Synthetic oligonucleotide
agacggtgcttattacccccgtggtggatg

SEQ ID NO: 432275 - DNA, 30 bp, Artificial Sequence
  Synthetic oligonucleotide
tcgtctcgcggcgcatgtgttttactgatg

SEQ ID NO: 432276 - DNA, 30 bp, Artificial Sequence
  Synthetic oligonucleotide
ggaagttatcttttagaaggattgctgatg

SEQ ID NO: 432277 - DNA, 30 bp, Artificial Sequence
  Synthetic oligonucleotide
tctcgcctcgggcagatcgtattgctgatg

SEQ ID NO: 432278 - DNA, 30 bp, Artificial Sequence
  Synthetic oligonucleotide
tatacattaagaggctctgctaatctgatg

SEQ ID NO: 432279 - DNA, 30 bp, Artificial Sequence
  Synthetic oligonucleotide
cgaatattgtcgaaatgcaaacttctgatg

SEQ ID NO: 432280 - DNA, 30 bp, Artificial Sequence
  Synthetic oligonucleotide
cgaagtcccttgcgttcactataagtgatg

SEQ ID NO: 432281 - DNA, 30 bp, Artificial Sequence
  Synthetic oligonucleotide
gcgccggttctacccaccgttgcagtgatg

SEQ ID NO: 432282 - DNA, 30 bp, Artificial Sequence
  Synthetic oligonucleotide
ggggacggggctgcttagtagtgagtgatg

SEQ ID NO: 432283 - DNA, 30 bp, Artificial Sequence
  Synthetic oligonucleotide
gtacgccgtatttctaacgtatccgtgatg

SEQ ID NO: 432284 - DNA, 30 bp, Artificial Sequence
  Synthetic oligonucleotide
cccccgcaaaaaatcttcgacctggtgatg

SEQ ID NO: 432285 - DNA, 30 bp, Artificial Sequence
  Synthetic oligonucleotide
agtaaatatggtcatcctagtcttgtgatg

SEQ ID NO: 432286 - DNA, 30 bp, Artificial Sequence
  Synthetic oligonucleotide
tttattatgagcgccgcaagtggattgatg

SEQ ID NO: 432287 - DNA, 30 bp, Artificial Sequence
  Synthetic oligonucleotide
accccaattaaaaccagtctcctattgatg

SEQ ID NO: 432288 - DNA, 30 bp, Artificial Sequence
  Synthetic oligonucleotide
gcgcactttttcggaaaggctgtattgatg

SEQ ID NO: 432289 - DNA, 30 bp, Artificial Sequence
  Synthetic oligonucleotide
tttctaggtgcatgttacccattattgatg

SEQ ID NO: 432290 - DNA, 30 bp, Artificial Sequence
  Synthetic oligonucleotide
attgacgaaagcgacggtagccggttgatg

SEQ ID NO: 432291 - DNA, 30 bp, Artificial Sequence
  Synthetic oligonucleotide
aagtatccttcagggctcgacgtgttgatg

SEQ ID NO: 432292 - DNA, 30 bp, Artificial Sequence
  Synthetic oligonucleotide
taggtcgaggtgagttccatcactttgatg

SEQ ID NO: 432293 - DNA, 30 bp, Artificial Sequence
  Synthetic oligonucleotide
tgtattactgtgccctaaagcaacaatatg

SEQ ID NO: 432294 - DNA, 30 bp, Artificial Sequence
  Synthetic oligonucleotide
gcacctatctctcaactgttaagcaatatg

SEQ ID NO: 432295 - DNA, 30 bp, Artificial Sequence
  Synthetic oligonucleotide
tcttacggaagtgtctgatagcgcaatatg

SEQ ID NO: 432296 - DNA, 30 bp, Artificial Sequence
  Synthetic oligonucleotide
ggacttaattgtagctactggatcaatatg

SEQ ID NO: 432297 - DNA, 30 bp, Artificial Sequence
  Synthetic oligonucleotide
acagagtaagtttctcaaatatagaatatg

SEQ ID NO: 432298 - DNA, 30 bp, Artificial Sequence
  Synthetic oligonucleotide
acagaacgtacagcggaccgttcgaatatg

SEQ ID NO: 432299 - DNA, 30 bp, Artificial Sequence
  Synthetic oligonucleotide
tctttgctccgcattcttaatatgaatatg

SEQ ID NO: 432300 - DNA, 30 bp, Artificial Sequence
  Synthetic oligonucleotide
atagttatctttcggattgtcttgaatatg

SEQ ID NO: 432301 - DNA, 30 bp, Artificial Sequence
  Synthetic oligonucleotide
tttaccacgtttaacccattgttgaatatg

SEQ ID NO: 432302 - DNA, 30 bp, Artificial Sequence
  Synthetic oligonucleotide
ttggctagtaatttggcgtcgcctaatatg

SEQ ID NO: 432303 - DNA, 30 bp, Artificial Sequence
  Synthetic oligonucleotide
cgctagtatgggacatttcgcagacatatg

SEQ ID NO: 432304 - DNA, 30 bp, Artificial Sequence
  Synthetic oligonucleotide
caattacgattcttccccagggcccatatg

SEQ ID NO: 432305 - DNA, 30 bp, Artificial Sequence
  Synthetic oligonucleotide
tacatgctccttcgcatagccctgcatatg

SEQ ID NO: 432306 - DNA, 30 bp, Artificial Sequence
  Synthetic oligonucleotide
tttagagagggcggttgcttaaatcatatg

SEQ ID NO: 432307 - DNA, 29 bp, Artificial Sequence
  Synthetic oligonucleotide
cttagtctaaatgactacctgctcatatg

SEQ ID NO: 432308 - DNA, 30 bp, Artificial Sequence
  Synthetic oligonucleotide
gtcagcggagccaccagaagatttcatatg

SEQ ID NO: 432309 - DNA, 30 bp, Artificial Sequence
  Synthetic oligonucleotide
gtccccgtctctgtaatagaaaacgatatg

SEQ ID NO: 432310 - DNA, 30 bp, Artificial Sequence
  Synthetic oligonucleotide
ctttgacgcctgagactagacgacgatatg

SEQ ID NO: 432311 - DNA, 30 bp, Artificial Sequence
  Synthetic oligonucleotide
gattatgcaggtacaaaactgcgcgatatg

SEQ ID NO: 432312 - DNA, 30 bp, Artificial Sequence
  Synthetic oligonucleotide
tatatgataagaacccctctcactgatatg

SEQ ID NO: 432313 - DNA, 30 bp, Artificial Sequence
  Synthetic oligonucleotide
gggcataatggcccccacaggtttgatatg

SEQ ID NO: 432314 - DNA, 30 bp, Artificial Sequence
  Synthetic oligonucleotide
aagccatagcagatgatgtctaaatatatg

SEQ ID NO: 432315 - DNA, 30 bp, Artificial Sequence
  Synthetic oligonucleotide
aagttcgaggattcatggaaggcatatatg

SEQ ID NO: 432316 - DNA, 30 bp, Artificial Sequence
  Synthetic oligonucleotide
gcggccatcctaatgggccttatgtatatg

SEQ ID NO: 432317 - DNA, 31 bp, Artificial Sequence
  Synthetic oligonucleotide
caactgctctgggtaaaggagccattatatg

SEQ ID NO: 432318 - DNA, 30 bp, Artificial Sequence
  Synthetic oligonucleotide
cccggcagggcgttgcacggtcattatatg

SEQ ID NO: 432319 - DNA, 30 bp, Artificial Sequence
  Synthetic oligonucleotide
gcgcatctacggccccaggccgattatatg

SEQ ID NO: 432320 - DNA, 30 bp, Artificial Sequence
  Synthetic oligonucleotide
aattcagacctgcgaatcctggcaactatg

SEQ ID NO: 432321 - DNA, 30 bp, Artificial Sequence
  Synthetic oligonucleotide
tgggcagtataattgttctttcccactatg

SEQ ID NO: 432322 - DNA, 30 bp, Artificial Sequence
  Synthetic oligonucleotide
tattctagagatcgttcataagtcactatg

SEQ ID NO: 432323 - DNA, 30 bp, Artificial Sequence
  Synthetic oligonucleotide
gcttcaagacaaggcgcagtggagactatg

SEQ ID NO: 432324 - DNA, 30 bp, Artificial Sequence
  Synthetic oligonucleotide
catcttaattaaccgaacattcggactatg

SEQ ID NO: 432325 - DNA, 30 bp, Artificial Sequence
  Synthetic oligonucleotide
ggtcctggtctcctggcgatcagtactatg

SEQ ID NO: 432326 - DNA, 30 bp, Artificial Sequence
  Synthetic oligonucleotide
gaccttagaggggagaatctagttactatg

SEQ ID NO: 432327 - DNA, 30 bp, Artificial Sequence
  Synthetic oligonucleotide
tcctcctttatgacttgacgaatacctatg

SEQ ID NO: 432328 - DNA, 30 bp, Artificial Sequence
  Synthetic oligonucleotide
gtaactaagctccaaacatctcaccctatg

SEQ ID NO: 432329 - DNA, 30 bp, Artificial Sequence
  Synthetic oligonucleotide
attgggacgggtctgacgaatatccctatg

SEQ ID NO: 432330 - DNA, 30 bp, Artificial Sequence
  Synthetic oligonucleotide
ccgtaatcaggactgaggccttcagctatg

SEQ ID NO: 432331 - DNA, 29 bp, Artificial Sequence
  Synthetic oligonucleotide
gcacgctacataatagacagggcgctatg

SEQ ID NO: 432332 - DNA, 30 bp, Artificial Sequence
  Synthetic oligonucleotide
cgccattagaaatccgcaggctttgctatg

SEQ ID NO: 432333 - DNA, 30 bp, Artificial Sequence
  Synthetic oligonucleotide
cgacattgggaattcccgtgaaaatctatg

SEQ ID NO: 432334 - DNA, 30 bp, Artificial Sequence
  Synthetic oligonucleotide
agtccttttcggcgcctttaactatctatg

SEQ ID NO: 432335 - DNA, 30 bp, Artificial Sequence
  Synthetic oligonucleotide
ggtcttgcatattttgggatattatctatg

SEQ ID NO: 432336 - DNA, 30 bp, Artificial Sequence
  Synthetic oligonucleotide
ggatatagactctatttagtttagtctatg

SEQ ID NO: 432337 - DNA, 30 bp, Artificial Sequence
  Synthetic oligonucleotide
cctatcctatgaactaggccatattctatg

SEQ ID NO: 432338 - DNA, 30 bp, Artificial Sequence
  Synthetic oligonucleotide
catacgttaaatgatatgctgcgttctatg

SEQ ID NO: 432339 - DNA, 30 bp, Artificial Sequence
  Synthetic oligonucleotide
gaaacccgcggaccgtttatactttctatg

SEQ ID NO: 432340 - DNA, 30 bp, Artificial Sequence
  Synthetic oligonucleotide
gcatcgactcgtagagcgcatataagtatg

SEQ ID NO: 432341 - DNA, 30 bp, Artificial Sequence
  Synthetic oligonucleotide
agtgtacgcgccgtgggtttagacagtatg

SEQ ID NO: 432342 - DNA, 30 bp, Artificial Sequence
  Synthetic oligonucleotide
ttggctagtggtgtcgcataccgcagtatg

SEQ ID NO: 432343 - DNA, 30 bp, Artificial Sequence
  Synthetic oligonucleotide
gcatcaaaggcctgacatgactgcagtatg

SEQ ID NO: 432344 - DNA, 30 bp, Artificial Sequence
  Synthetic oligonucleotide
tagggtctagcatgtccgctttaccgtatg

SEQ ID NO: 432345 - DNA, 30 bp, Artificial Sequence
  Synthetic oligonucleotide
atatgtgggtacccttagtggggccgtatg

SEQ ID NO: 432346 - DNA, 29 bp, Artificial Sequence
  Synthetic oligonucleotide
ctttaagtcggtttacatgagtccgtatg

SEQ ID NO: 432347 - DNA, 30 bp, Artificial Sequence
  Synthetic oligonucleotide
gcacagatcgggtacaaactttatcgtatg

SEQ ID NO: 432348 - DNA, 30 bp, Artificial Sequence
  Synthetic oligonucleotide
gtgattcacaaggtcgtgattctaggtatg

SEQ ID NO: 432349 - DNA, 30 bp, Artificial Sequence
  Synthetic oligonucleotide
catgatgcgccaccggttagaggcggtatg

SEQ ID NO: 432350 - DNA, 30 bp, Artificial Sequence
  Synthetic oligonucleotide
cgcaggctcaggcctcagtagggcggtatg

SEQ ID NO: 432351 - DNA, 30 bp, Artificial Sequence
  Synthetic oligonucleotide
tagacatctgacgcgttgcccgcgggtatg

SEQ ID NO: 432352 - DNA, 30 bp, Artificial Sequence
  Synthetic oligonucleotide
tcaaatgacggcgtcacctgttggggtatg

SEQ ID NO: 432353 - DNA, 30 bp, Artificial Sequence
  Synthetic oligonucleotide
aattgactgtaacccctgtggcgtggtatg

SEQ ID NO: 432354 - DNA, 30 bp, Artificial Sequence
  Synthetic oligonucleotide
tcgaccttaatgacgcgttaacagtgtatg

SEQ ID NO: 432355 - DNA, 30 bp, Artificial Sequence
  Synthetic oligonucleotide
gaaggctaacgcctcgaaggacagtgtatg

SEQ ID NO: 432356 - DNA, 30 bp, Artificial Sequence
  Synthetic oligonucleotide
gggcagtctacggtagcgtcctagtgtatg

SEQ ID NO: 432357 - DNA, 30 bp, Artificial Sequence
  Synthetic oligonucleotide
tgccggagtgcaacaccgagtcggtgtatg

SEQ ID NO: 432358 - DNA, 30 bp, Artificial Sequence
  Synthetic oligonucleotide
ccaatttcatgggctactcgctattgtatg

SEQ ID NO: 432359 - DNA, 30 bp, Artificial Sequence
  Synthetic oligonucleotide
cacaaaagagtctgccgtttgctttgtatg

SEQ ID NO: 432360 - DNA, 30 bp, Artificial Sequence
  Synthetic oligonucleotide
gggttcatatattctatagtgaaaattatg

SEQ ID NO: 432361 - DNA, 31 bp, Artificial Sequence
  Synthetic oligonucleotide
acccacacgggctggaattcaccgaattatg

SEQ ID NO: 432362 - DNA, 30 bp, Artificial Sequence
  Synthetic oligonucleotide
cggtcgggcgacgaaccgggacacattatg

SEQ ID NO: 432363 - DNA, 30 bp, Artificial Sequence
  Synthetic oligonucleotide
ttacattattggtaatcatccgtcattatg

SEQ ID NO: 432364 - DNA, 30 bp, Artificial Sequence
  Synthetic oligonucleotide
ccaaaggatctccttaattttgagattatg

SEQ ID NO: 432365 - DNA, 30 bp, Artificial Sequence
  Synthetic oligonucleotide
cggataacttattcacgcatacggattatg

SEQ ID NO: 432366 - DNA, 30 bp, Artificial Sequence
  Synthetic oligonucleotide
tataaaacaaatgcacgcgaccatattatg

SEQ ID NO: 432367 - DNA, 30 bp, Artificial Sequence
  Synthetic oligonucleotide
gcacctcggctgctagaatacggtattatg

SEQ ID NO: 432368 - DNA, 30 bp, Artificial Sequence
  Synthetic oligonucleotide
tggatactctgtcgccggcaccttattatg

SEQ ID NO: 432369 - DNA, 30 bp, Artificial Sequence
  Synthetic oligonucleotide
gaatatacgtcttcacagctttaacttatg

SEQ ID NO: 432370 - DNA, 30 bp, Artificial Sequence
  Synthetic oligonucleotide
agtacatggacaggtcgcttttaacttatg

SEQ ID NO: 432371 - DNA, 30 bp, Artificial Sequence
  Synthetic oligonucleotide
cgccattcgtgataagtggcacaccttatg

SEQ ID NO: 432372 - DNA, 30 bp, Artificial Sequence
  Synthetic oligonucleotide
gtacatacttagccatgagaagcccttatg

SEQ ID NO: 432373 - DNA, 30 bp, Artificial Sequence
  Synthetic oligonucleotide
ctgtatatctgaaagcgctgtggccttatg

SEQ ID NO: 432374 - DNA, 30 bp, Artificial Sequence
  Synthetic oligonucleotide
aacactctgagagggggcttcgagcttatg

SEQ ID NO: 432375 - DNA, 30 bp, Artificial Sequence
  Synthetic oligonucleotide
gagtaaacattattgattcccgggcttatg

SEQ ID NO: 432376 - DNA, 30 bp, Artificial Sequence
  Synthetic oligonucleotide
ctctatcatatgaaaacgcggctgcttatg

SEQ ID NO: 432377 - DNA, 30 bp, Artificial Sequence
  Synthetic oligonucleotide
aacaagggtgatatttgcgtggtgcttatg

SEQ ID NO: 432378 - DNA, 30 bp, Artificial Sequence
  Synthetic oligonucleotide
ggatttctgcgcgacagacgtgtgcttatg

SEQ ID NO: 432379 - DNA, 27 bp, Artificial Sequence
  Synthetic oligonucleotide
tccaatccatcggcggaattgcttatg

SEQ ID NO: 432380 - DNA, 30 bp, Artificial Sequence
  Synthetic oligonucleotide
cactgttatttgacctccaactaagttatg

SEQ ID NO: 432381 - DNA, 30 bp, Artificial Sequence
  Synthetic oligonucleotide
catccaccaaattatgacggtgcagttatg

SEQ ID NO: 432382 - DNA, 30 bp, Artificial Sequence
  Synthetic oligonucleotide
ggttggtcatctatcccacgtagcgttatg

SEQ ID NO: 432383 - DNA, 30 bp, Artificial Sequence
  Synthetic oligonucleotide
taattaatgagccatgtattagaggttatg

SEQ ID NO: 432384 - DNA, 30 bp, Artificial Sequence
  Synthetic oligonucleotide
ttctccggcacgcaacggtaataggttatg

SEQ ID NO: 432385 - DNA, 30 bp, Artificial Sequence
  Synthetic oligonucleotide
accgcaaatgaggggtgtttttcggttatg

SEQ ID NO: 432386 - DNA, 30 bp, Artificial Sequence
  Synthetic oligonucleotide
aaaaatatgggggtttacaccagggttatg

SEQ ID NO: 432387 - DNA, 30 bp, Artificial Sequence
  Synthetic oligonucleotide
taacgaagccgctcaaggtcctctgttatg

SEQ ID NO: 432388 - DNA, 30 bp, Artificial Sequence
  Synthetic oligonucleotide
gccatgttgttcgggctagcggaatttatg

SEQ ID NO: 432389 - DNA, 30 bp, Artificial Sequence
  Synthetic oligonucleotide
tgaatacctaccccggaggagacatttatg

SEQ ID NO: 432390 - DNA, 30 bp, Artificial Sequence
  Synthetic oligonucleotide
gaccgcttatggagtagggtctgatttatg

SEQ ID NO: 432391 - DNA, 30 bp, Artificial Sequence
  Synthetic oligonucleotide
gtattttaactcgacatatctctatttatg

SEQ ID NO: 432392 - DNA, 30 bp, Artificial Sequence
  Synthetic oligonucleotide
gtactaaccaattcaagaacacattttatg

SEQ ID NO: 432393 - DNA, 30 bp, Artificial Sequence
  Synthetic oligonucleotide
cacgggatgccacattagaggcattttatg

SEQ ID NO: 432394 - DNA, 30 bp, Artificial Sequence
  Synthetic oligonucleotide
tagcagtttgggccggactaagcttttatg

SEQ ID NO: 432395 - DNA, 30 bp, Artificial Sequence
  Synthetic oligonucleotide
tgcccccgctcggttaggaaaatttttatg

SEQ ID NO: 432396 - DNA, 30 bp, Artificial Sequence
  Synthetic oligonucleotide
accagactgaaccgggtagaagtttttatg

SEQ ID NO: 432397 - DNA, 30 bp, Artificial Sequence
  Synthetic oligonucleotide
tttcttgcgtggcagaggcgtagcaaactg

SEQ ID NO: 432398 - DNA, 30 bp, Artificial Sequence
  Synthetic oligonucleotide
gagtacatactttagttcgcgtgcaaactg

SEQ ID NO: 432399 - DNA, 30 bp, Artificial Sequence
  Synthetic oligonucleotide
attgcctattcgtcagatttttcgaaactg

SEQ ID NO: 432400 - DNA, 30 bp, Artificial Sequence
  Synthetic oligonucleotide
gcacagcgtagttaaacgtcccggaaactg

SEQ ID NO: 432401 - DNA, 30 bp, Artificial Sequence
  Synthetic oligonucleotide
aatcaggggggcaatagaggtcgtaaactg

SEQ ID NO: 432402 - DNA, 30 bp, Artificial Sequence
  Synthetic oligonucleotide
cgcaaacgtttgatacaccttggtaaactg

SEQ ID NO: 432403 - DNA, 30 bp, Artificial Sequence
  Synthetic oligonucleotide
gcctgtgtgcaagcgtaattgcaacaactg

SEQ ID NO: 432404 - DNA, 30 bp, Artificial Sequence
  Synthetic oligonucleotide
aatgacacagagggaggttagcaccaactg

SEQ ID NO: 432405 - DNA, 30 bp, Artificial Sequence
  Synthetic oligonucleotide
gaggacgaatcacagagtccattccaactg

SEQ ID NO: 432406 - DNA, 30 bp, Artificial Sequence
  Synthetic oligonucleotide
tcaagaataggtcctcgctaacggcaactg

SEQ ID NO: 432407 - DNA, 30 bp, Artificial Sequence
  Synthetic oligonucleotide
gtcctgcatgttcgcggttatagtcaactg

SEQ ID NO: 432408 - DNA, 30 bp, Artificial Sequence
  Synthetic oligonucleotide
tagttccttgttaatgaagactgtcaactg

SEQ ID NO: 432409 - DNA, 30 bp, Artificial Sequence
  Synthetic oligonucleotide
tgattgctccgatcgttaacttgtcaactg

SEQ ID NO: 432410 - DNA, 30 bp, Artificial Sequence
  Synthetic oligonucleotide
agaattataggacaaacgtagaaagaactg

SEQ ID NO: 432411 - DNA, 30 bp, Artificial Sequence
  Synthetic oligonucleotide
gagatttcctacctctagagcaccgaactg

SEQ ID NO: 432412 - DNA, 30 bp, Artificial Sequence
  Synthetic oligonucleotide
ctctatagtacggtgtgacggttcgaactg

SEQ ID NO: 432413 - DNA, 30 bp, Artificial Sequence
  Synthetic oligonucleotide
gacagcatacaccattttatgtgggaactg

SEQ ID NO: 432414 - DNA, 30 bp, Artificial Sequence
  Synthetic oligonucleotide
tccaatttgaggggagctgctgatgaactg

SEQ ID NO: 432415 - DNA, 30 bp, Artificial Sequence
  Synthetic oligonucleotide
attgagaaggtttcgctgaccagtgaactg

SEQ ID NO: 432416 - DNA, 30 bp, Artificial Sequence
  Synthetic oligonucleotide
gggtgtccgtccggatggatccgataactg

SEQ ID NO: 432417 - DNA, 30 bp, Artificial Sequence
  Synthetic oligonucleotide
gcaatttacttatgtatcaaatactaactg

SEQ ID NO: 432418 - DNA, 30 bp, Artificial Sequence
  Synthetic oligonucleotide
ggagggactcttgtgattacgtggtaactg

SEQ ID NO: 432419 - DNA, 30 bp, Artificial Sequence
  Synthetic oligonucleotide
agactgtgtggacctcaaggttcaacactg

SEQ ID NO: 432420 - DNA, 30 bp, Artificial Sequence
  Synthetic oligonucleotide
cgtatgtatccctgtcgcacgtgaacactg

SEQ ID NO: 432421 - DNA, 30 bp, Artificial Sequence
  Synthetic oligonucleotide
atacaaatcagggaggtggtggagacactg

SEQ ID NO: 432422 - DNA, 30 bp, Artificial Sequence
  Synthetic oligonucleotide
tgtccggtatcttgccaatgtccgacactg

SEQ ID NO: 432423 - DNA, 30 bp, Artificial Sequence
  Synthetic oligonucleotide
cccggggcggtttaagtggacgggacactg

SEQ ID NO: 432424 - DNA, 30 bp, Artificial Sequence
  Synthetic oligonucleotide
tctcagtggttttcagctgttagtacactg

SEQ ID NO: 432425 - DNA, 30 bp, Artificial Sequence
  Synthetic oligonucleotide
ctcaataacgacagccgtactcgtacactg

SEQ ID NO: 432426 - DNA, 30 bp, Artificial Sequence
  Synthetic oligonucleotide
tcatccatttacggtactaggtcaccactg

SEQ ID NO: 432427 - DNA, 30 bp, Artificial Sequence
  Synthetic oligonucleotide
gggttcaatttatgtgtagaagtaccactg

SEQ ID NO: 432428 - DNA, 30 bp, Artificial Sequence
  Synthetic oligonucleotide
cattcgctactaggactgagctacccactg

SEQ ID NO: 432429 - DNA, 30 bp, Artificial Sequence
  Synthetic oligonucleotide
gcttacttttaggggaacgtgcgcccactg

SEQ ID NO: 432430 - DNA, 30 bp, Artificial Sequence
  Synthetic oligonucleotide
tcctgcggtttttaaagcaggccagcactg

SEQ ID NO: 432431 - DNA, 30 bp, Artificial Sequence
  Synthetic oligonucleotide
tttactgccacacagggatatcgcgcactg

SEQ ID NO: 432432 - DNA, 30 bp, Artificial Sequence
  Synthetic oligonucleotide
ccaggccgtaactctcgcggccaggcactg

SEQ ID NO: 432433 - DNA, 30 bp, Artificial Sequence
  Synthetic oligonucleotide
tatctctattcctgggccatggaggcactg

SEQ ID NO: 432434 - DNA, 30 bp, Artificial Sequence
  Synthetic oligonucleotide
agcgtctggtgcccaagcaatttggcactg

SEQ ID NO: 432435 - DNA, 31 bp, Artificial Sequence
  Synthetic oligonucleotide
cccttggactgccccgtttatcgatgcactg

SEQ ID NO: 432436 - DNA, 30 bp, Artificial Sequence
  Synthetic oligonucleotide
ccacgagaggattaggagctgagtgcactg

SEQ ID NO: 432437 - DNA, 30 bp, Artificial Sequence
  Synthetic oligonucleotide
tcattctcgtttatagaacgtgttgcactg

SEQ ID NO: 432438 - DNA, 30 bp, Artificial Sequence
  Synthetic oligonucleotide
ctatcctctacagaacgaaggacatcactg

SEQ ID NO: 432439 - DNA, 30 bp, Artificial Sequence
  Synthetic oligonucleotide
ttagaattgacacactgaaaggcatcactg

SEQ ID NO: 432440 - DNA, 30 bp, Artificial Sequence
  Synthetic oligonucleotide
actaatgacttcaggtcggggtcatcactg

SEQ ID NO: 432441 - DNA, 30 bp, Artificial Sequence
  Synthetic oligonucleotide
tagtggttgctagccggtctgctctcactg

SEQ ID NO: 432442 - DNA, 30 bp, Artificial Sequence
  Synthetic oligonucleotide
tgccaagcagggttttggcgcaggtcactg

SEQ ID NO: 432443 - DNA, 30 bp, Artificial Sequence
  Synthetic oligonucleotide
gaaaacctacggggaatgattccaagactg

SEQ ID NO: 432444 - DNA, 30 bp, Artificial Sequence
  Synthetic oligonucleotide
ctatcagtagatgacagatggcaccgactg

SEQ ID NO: 432445 - DNA, 30 bp, Artificial Sequence
  Synthetic oligonucleotide
gaagaggccagcgtgcgaataagccgactg

SEQ ID NO: 432446 - DNA, 30 bp, Artificial Sequence
  Synthetic oligonucleotide
tttagtcctaaaagtaagaggtagcgactg

SEQ ID NO: 432447 - DNA, 30 bp, Artificial Sequence
  Synthetic oligonucleotide
acggagaaccggtcgcgactagtgcgactg

SEQ ID NO: 432448 - DNA, 30 bp, Artificial Sequence
  Synthetic oligonucleotide
ggcataaggccttgtctttcggccggactg

SEQ ID NO: 432449 - DNA, 30 bp, Artificial Sequence
  Synthetic oligonucleotide
tatctaaatttgctaatcacacgcggactg

SEQ ID NO: 432450 - DNA, 30 bp, Artificial Sequence
  Synthetic oligonucleotide
actagaggtaacaattgcatgttcggactg

SEQ ID NO: 432451 - DNA, 30 bp, Artificial Sequence
  Synthetic oligonucleotide
tcgcatttattatcagactcgctgggactg

SEQ ID NO: 432452 - DNA, 30 bp, Artificial Sequence
  Synthetic oligonucleotide
ctagtttgcaccagtaccttatatggactg

SEQ ID NO: 432453 - DNA, 30 bp, Artificial Sequence
  Synthetic oligonucleotide
acatataagtttagacgagggcaatgactg

SEQ ID NO: 432454 - DNA, 30 bp, Artificial Sequence
  Synthetic oligonucleotide
ggttttttatatgattacccgcgatgactg

SEQ ID NO: 432455 - DNA, 30 bp, Artificial Sequence
  Synthetic oligonucleotide
gaaaattacctttactcaattgaaatactg

SEQ ID NO: 432456 - DNA, 30 bp, Artificial Sequence
  Synthetic oligonucleotide
gctaattaacttgctcaattgcacatactg

SEQ ID NO: 432457 - DNA, 30 bp, Artificial Sequence
  Synthetic oligonucleotide
cacgtggccttggcagccagtggcatactg

SEQ ID NO: 432458 - DNA, 30 bp, Artificial Sequence
  Synthetic oligonucleotide
agctggtagcggcagcaagtagtcatactg

SEQ ID NO: 432459 - DNA, 30 bp, Artificial Sequence
  Synthetic oligonucleotide
aaaaagctacccgggttaatcgggatactg

SEQ ID NO: 432460 - DNA, 30 bp, Artificial Sequence
  Synthetic oligonucleotide
tgcttgattagggtgctgtattaactactg

SEQ ID NO: 432461 - DNA, 30 bp, Artificial Sequence
  Synthetic oligonucleotide
atgttttctgaatggtcaaaaatactactg

SEQ ID NO: 432462 - DNA, 30 bp, Artificial Sequence
  Synthetic oligonucleotide
aactcgtactctaggggcacttccctactg

SEQ ID NO: 432463 - DNA, 30 bp, Artificial Sequence
  Synthetic oligonucleotide
aacactcgctctgcctaaattgggctactg

SEQ ID NO: 432464 - DNA, 30 bp, Artificial Sequence
  Synthetic oligonucleotide
cgctatcttccaaacgtacatgtgctactg

SEQ ID NO: 432465 - DNA, 30 bp, Artificial Sequence
  Synthetic oligonucleotide
tccgtgaaaccgcaggcacgtcatctactg

SEQ ID NO: 432466 - DNA, 30 bp, Artificial Sequence
  Synthetic oligonucleotide
atggaaattcgctttttcatggatctactg

SEQ ID NO: 432467 - DNA, 30 bp, Artificial Sequence
  Synthetic oligonucleotide
gggtccattagattaatggagtatctactg

SEQ ID NO: 432468 - DNA, 30 bp, Artificial Sequence
  Synthetic oligonucleotide
gttagggcctttaacagtaatgttctactg

SEQ ID NO: 432469 - DNA, 30 bp, Artificial Sequence
  Synthetic oligonucleotide
atacggagatttcttttacgaatagtactg

SEQ ID NO: 432470 - DNA, 30 bp, Artificial Sequence
  Synthetic oligonucleotide
tttagcgtcaagttatgaatgaccgtactg

SEQ ID NO: 432471 - DNA, 30 bp, Artificial Sequence
  Synthetic oligonucleotide
tgggtgtggtttcctttgatccttgtactg

SEQ ID NO: 432472 - DNA, 30 bp, Artificial Sequence
  Synthetic oligonucleotide
gagtgcagcgtacgtcagtcgtgattactg

SEQ ID NO: 432473 - DNA, 30 bp, Artificial Sequence
  Synthetic oligonucleotide
ctatagacatcggagattggcaggttactg

SEQ ID NO: 432474 - DNA, 30 bp, Artificial Sequence
  Synthetic oligonucleotide
taaaaactcccgtacaattactggttactg

SEQ ID NO: 432475 - DNA, 30 bp, Artificial Sequence
  Synthetic oligonucleotide
gagggacatacgaagcggaaatatttactg

SEQ ID NO: 432476 - DNA, 30 bp, Artificial Sequence
  Synthetic oligonucleotide
cactgtcttgaaaagggagttattttactg

SEQ ID NO: 432477 - DNA, 30 bp, Artificial Sequence
  Synthetic oligonucleotide
ggcatcgctggttgcccggtactaaacctg

SEQ ID NO: 432478 - DNA, 30 bp, Artificial Sequence
  Synthetic oligonucleotide
actgagcgccagtggttctgctggaacctg

SEQ ID NO: 432479 - DNA, 30 bp, Artificial Sequence
  Synthetic oligonucleotide
gttaggaaataagcaggagtctcacacctg

SEQ ID NO: 432480 - DNA, 30 bp, Artificial Sequence
  Synthetic oligonucleotide
taacgccactgacggtacacgcgagacctg

SEQ ID NO: 432481 - DNA, 30 bp, Artificial Sequence
  Synthetic oligonucleotide
actggtttctccaacccccacgaggacctg

SEQ ID NO: 432482 - DNA, 30 bp, Artificial Sequence
  Synthetic oligonucleotide
catcgtgtccagacggcgcggacatacctg

SEQ ID NO: 432483 - DNA, 30 bp, Artificial Sequence
  Synthetic oligonucleotide
gtggattcccggcctctggttgtctacctg

SEQ ID NO: 432484 - DNA, 30 bp, Artificial Sequence
  Synthetic oligonucleotide
aggtggcttgacgcggggggatagtacctg

SEQ ID NO: 432485 - DNA, 30 bp, Artificial Sequence
  Synthetic oligonucleotide
cagcggggcactaggctattacgcaccctg

SEQ ID NO: 432486 - DNA, 30 bp, Artificial Sequence
  Synthetic oligonucleotide
ggacaaactggtacagtttcctagaccctg

SEQ ID NO: 432487 - DNA, 30 bp, Artificial Sequence
  Synthetic oligonucleotide
tcccggcagcctatccgcttgcggaccctg

SEQ ID NO: 432488 - DNA, 30 bp, Artificial Sequence
  Synthetic oligonucleotide
aaacagagcagaggcatcaacgcccccctg

SEQ ID NO: 432489 - DNA, 30 bp, Artificial Sequence
  Synthetic oligonucleotide
cgttacagctcgcgatcgtcttagcccctg

SEQ ID NO: 432490 - DNA, 30 bp, Artificial Sequence
  Synthetic oligonucleotide
gggttggcggcatgtttgtttattcccctg

SEQ ID NO: 432491 - DNA, 30 bp, Artificial Sequence
  Synthetic oligonucleotide
cttacctttatgccgagtacgagcgccctg

SEQ ID NO: 432492 - DNA, 30 bp, Artificial Sequence
  Synthetic oligonucleotide
ctcatttgtacgctaaagctgatggccctg

SEQ ID NO: 432493 - DNA, 30 bp, Artificial Sequence
  Synthetic oligonucleotide
gaatgcagcacacgggaagcacatgccctg

SEQ ID NO: 432494 - DNA, 30 bp, Artificial Sequence
  Synthetic oligonucleotide
ctcatggagtatggcgattgtactgccctg

SEQ ID NO: 432495 - DNA, 30 bp, Artificial Sequence
  Synthetic oligonucleotide
ccacccaagaatcagtggtacaattccctg

SEQ ID NO: 432496 - DNA, 30 bp, Artificial Sequence
  Synthetic oligonucleotide
cccctggggaccggcggaacagaaagcctg

SEQ ID NO: 432497 - DNA, 30 bp, Artificial Sequence
  Synthetic oligonucleotide
gtaattcgtttcagatggggtgcacgcctg

SEQ ID NO: 432498 - DNA, 30 bp, Artificial Sequence
  Synthetic oligonucleotide
ctaatgtcctaagaacatgaatcacgcctg

SEQ ID NO: 432499 - DNA, 30 bp, Artificial Sequence
  Synthetic oligonucleotide
tgttggcgtaagcaacaaaaggcccgcctg

SEQ ID NO: 432500 - DNA, 30 bp, Artificial Sequence
  Synthetic oligonucleotide
ccacctgggcacagcaagcaaagccgcctg

SEQ ID NO: 432501 - DNA, 30 bp, Artificial Sequence
  Synthetic oligonucleotide
cagatttaaaggcgcccgcaacgccgcctg

SEQ ID NO: 432502 - DNA, 30 bp, Artificial Sequence
  Synthetic oligonucleotide
gagggattgacgggctaaccctttcgcctg

SEQ ID NO: 432503 - DNA, 30 bp, Artificial Sequence
  Synthetic oligonucleotide
tttttcgtggctactaaagcatcaggcctg

SEQ ID NO: 432504 - DNA, 30 bp, Artificial Sequence
  Synthetic oligonucleotide
accgctccccattgccatcgctcaggcctg

SEQ ID NO: 432505 - DNA, 30 bp, Artificial Sequence
  Synthetic oligonucleotide
aaccatacacatgccacaaattagggcctg

SEQ ID NO: 432506 - DNA, 30 bp, Artificial Sequence
  Synthetic oligonucleotide
cacaggcatgacactacggcctctggcctg

SEQ ID NO: 432507 - DNA, 30 bp, Artificial Sequence
  Synthetic oligonucleotide
ctgatcgctttgatcgagcactttggcctg

SEQ ID NO: 432508 - DNA, 30 bp, Artificial Sequence
  Synthetic oligonucleotide
gtgaactacatctgaattagtgtatgcctg

SEQ ID NO: 432509 - DNA, 30 bp, Artificial Sequence
  Synthetic oligonucleotide
agtccttcatcttcaagagtgtgctgcctg

SEQ ID NO: 432510 - DNA, 30 bp, Artificial Sequence
  Synthetic oligonucleotide
ggttttcaaacgcttgatcgcctgtgcctg

SEQ ID NO: 432511 - DNA, 30 bp, Artificial Sequence
  Synthetic oligonucleotide
tgttttccgtgcaaacttagaccttgcctg

SEQ ID NO: 432512 - DNA, 30 bp, Artificial Sequence
  Synthetic oligonucleotide
tggttgaagggcagtctacatatttgcctg

SEQ ID NO: 432513 - DNA, 30 bp, Artificial Sequence
  Synthetic oligonucleotide
cttccgagttggcacggcggtaatatcctg

SEQ ID NO: 432514 - DNA, 30 bp, Artificial Sequence
  Synthetic oligonucleotide
tgtctcctcgcctgggtataactactcctg

SEQ ID NO: 432515 - DNA, 30 bp, Artificial Sequence
  Synthetic oligonucleotide
gcaccctgtcgatttcgttgactactcctg

SEQ ID NO: 432516 - DNA, 30 bp, Artificial Sequence
  Synthetic oligonucleotide
ggatagcttaaagtggatgggatcctcctg

SEQ ID NO: 432517 - DNA, 30 bp, Artificial Sequence
  Synthetic oligonucleotide
atagcagtatccgcacggtcacatctcctg

SEQ ID NO: 432518 - DNA, 30 bp, Artificial Sequence
  Synthetic oligonucleotide
attgtttcgacatcactcttagaagtcctg

SEQ ID NO: 432519 - DNA, 30 bp, Artificial Sequence
  Synthetic oligonucleotide
tgcggattgcactggaaactgttagtcctg

SEQ ID NO: 432520 - DNA, 30 bp, Artificial Sequence
  Synthetic oligonucleotide
agggtaggccttagtgaagagtccgtcctg

SEQ ID NO: 432521 - DNA, 30 bp, Artificial Sequence
  Synthetic oligonucleotide
ggatgcaattcccttataccgacggtcctg

SEQ ID NO: 432522 - DNA, 30 bp, Artificial Sequence
  Synthetic oligonucleotide
aaatccttccgagtctcttcaggggtcctg

SEQ ID NO: 432523 - DNA, 30 bp, Artificial Sequence
  Synthetic oligonucleotide
tccggcaccaaggaccaagtttctgtcctg

SEQ ID NO: 432524 - DNA, 30 bp, Artificial Sequence
  Synthetic oligonucleotide
attagactgtgacccgaaggtatattcctg

SEQ ID NO: 432525 - DNA, 30 bp, Artificial Sequence
  Synthetic oligonucleotide
gagtaatataaggctatttatgagttcctg

SEQ ID NO: 432526 - DNA, 30 bp, Artificial Sequence
  Synthetic oligonucleotide
gttagtttgaatcgaggctaagggttcctg

SEQ ID NO: 432527 - DNA, 30 bp, Artificial Sequence
  Synthetic oligonucleotide
gcggagcgtagtccaacaacataaaagctg

SEQ ID NO: 432528 - DNA, 30 bp, Artificial Sequence
  Synthetic oligonucleotide
tcactggtatagtgcagtgaggacaagctg

SEQ ID NO: 432529 - DNA, 30 bp, Artificial Sequence
  Synthetic oligonucleotide
tgtttataaaggaatctggcttggaagctg

SEQ ID NO: 432530 - DNA, 30 bp, Artificial Sequence
  Synthetic oligonucleotide
cgctgcgtagaggtttgggtggataagctg

SEQ ID NO: 432531 - DNA, 30 bp, Artificial Sequence
  Synthetic oligonucleotide
gttcagcaaatcgcccgtcaggctaagctg

SEQ ID NO: 432532 - DNA, 30 bp, Artificial Sequence
  Synthetic oligonucleotide
ggatttacgatggttaaggactagcagctg

SEQ ID NO: 432533 - DNA, 30 bp, Artificial Sequence
  Synthetic oligonucleotide
ttagggttcattaacgattgtggagagctg

SEQ ID NO: 432534 - DNA, 30 bp, Artificial Sequence
  Synthetic oligonucleotide
acaattgacggctaagtaaagtcggagctg

SEQ ID NO: 432535 - DNA, 30 bp, Artificial Sequence
  Synthetic oligonucleotide
aaatcacgcgattcgtcgggatgtgagctg

SEQ ID NO: 432536 - DNA, 30 bp, Artificial Sequence
  Synthetic oligonucleotide
tgatttcccagcgatatatggaactagctg

SEQ ID NO: 432537 - DNA, 30 bp, Artificial Sequence
  Synthetic oligonucleotide
tgtatcttctgtgctgagtgtgagtagctg

SEQ ID NO: 432538 - DNA, 30 bp, Artificial Sequence
  Synthetic oligonucleotide
catactaagttttctcccgggatgtagctg

SEQ ID NO: 432539 - DNA, 30 bp, Artificial Sequence
  Synthetic oligonucleotide
aaccacaataatttccactctatgtagctg

SEQ ID NO: 432540 - DNA, 30 bp, Artificial Sequence
  Synthetic oligonucleotide
aacaaggttttaagggtaatacaaacgctg

SEQ ID NO: 432541 - DNA, 30 bp, Artificial Sequence
  Synthetic oligonucleotide
gcgtagtgattgtatgagcgtgaaacgctg

SEQ ID NO: 432542 - DNA, 30 bp, Artificial Sequence
  Synthetic oligonucleotide
actaacccgcgcatgataaccagcacgctg

SEQ ID NO: 432543 - DNA, 30 bp, Artificial Sequence
  Synthetic oligonucleotide
agtagcataccgggataggcccgcacgctg

SEQ ID NO: 432544 - DNA, 30 bp, Artificial Sequence
  Synthetic oligonucleotide
ttagcgtggttaatatatttacggacgctg

SEQ ID NO: 432545 - DNA, 30 bp, Artificial Sequence
  Synthetic oligonucleotide
gtgaatttgggttaagacctatggacgctg

SEQ ID NO: 432546 - DNA, 30 bp, Artificial Sequence
  Synthetic oligonucleotide
cggggcatcactagcgtccaacctacgctg

SEQ ID NO: 432547 - DNA, 30 bp, Artificial Sequence
  Synthetic oligonucleotide
attagttggcgaccgcatgatcgaccgctg

SEQ ID NO: 432548 - DNA, 30 bp, Artificial Sequence
  Synthetic oligonucleotide
caatgtttctgtgatccttgttgaccgctg

SEQ ID NO: 432549 - DNA, 30 bp, Artificial Sequence
  Synthetic oligonucleotide
ggaatgattagcgcctggatagctccgctg

SEQ ID NO: 432550 - DNA, 30 bp, Artificial Sequence
  Synthetic oligonucleotide
tagagcgatcttagccagtcggttccgctg

SEQ ID NO: 432551 - DNA, 30 bp, Artificial Sequence
  Synthetic oligonucleotide
agattatacctatcgtataataaagcgctg

SEQ ID NO: 432552 - DNA, 30 bp, Artificial Sequence
  Synthetic oligonucleotide
aagggggcgtatctatttttaagagcgctg

SEQ ID NO: 432553 - DNA, 30 bp, Artificial Sequence
  Synthetic oligonucleotide
cccgaaactccgacaagttgtactgcgctg

SEQ ID NO: 432554 - DNA, 30 bp, Artificial Sequence
  Synthetic oligonucleotide
gcattgaaactatgcagcaggcgtgcgctg

SEQ ID NO: 432555 - DNA, 30 bp, Artificial Sequence
  Synthetic oligonucleotide
aaaatataaggtgcgtcaagataatcgctg

SEQ ID NO: 432556 - DNA, 30 bp, Artificial Sequence
  Synthetic oligonucleotide
ctggcctataggacgcgcggccagtcgctg

SEQ ID NO: 432557 - DNA, 30 bp, Artificial Sequence
  Synthetic oligonucleotide
gatcagtcccggcatgcaagcccttcgctg

SEQ ID NO: 432558 - DNA, 30 bp, Artificial Sequence
  Synthetic oligonucleotide
agttttgcgatggtatttattagttcgctg

SEQ ID NO: 432559 - DNA, 29 bp, Artificial Sequence
  Synthetic oligonucleotide
tgaccgccaacacatcaatttgcaggctg

SEQ ID NO: 432560 - DNA, 30 bp, Artificial Sequence
  Synthetic oligonucleotide
gagcattccggtcaatgtcctttcaggctg

SEQ ID NO: 432561 - DNA, 30 bp, Artificial Sequence
  Synthetic oligonucleotide
gcgtcagccaccacggttcgtgataggctg

SEQ ID NO: 432562 - DNA, 30 bp, Artificial Sequence
  Synthetic oligonucleotide
agttttgttaggcacccaaggaaacggctg

SEQ ID NO: 432563 - DNA, 30 bp, Artificial Sequence
  Synthetic oligonucleotide
gctactccactcactcccgccccacggctg

SEQ ID NO: 432564 - DNA, 30 bp, Artificial Sequence
  Synthetic oligonucleotide
gttacaaacaagtggcgacattgacggctg

SEQ ID NO: 432565 - DNA, 30 bp, Artificial Sequence
  Synthetic oligonucleotide
gtgtgagctcgttcaaacatggaccggctg

SEQ ID NO: 432566 - DNA, 30 bp, Artificial Sequence
  Synthetic oligonucleotide
tcgtggttcttgcagtccagagcccggctg

SEQ ID NO: 432567 - DNA, 30 bp, Artificial Sequence
  Synthetic oligonucleotide
ccaagactgggaacggccgccttccggctg

SEQ ID NO: 432568 - DNA, 30 bp, Artificial Sequence
  Synthetic oligonucleotide
tggtggcgataaagacggcgctcgcggctg

SEQ ID NO: 432569 - DNA, 30 bp, Artificial Sequence
  Synthetic oligonucleotide
ttgtcgtacacgaacacaagtgacgggctg

SEQ ID NO: 432570 - DNA, 30 bp, Artificial Sequence
  Synthetic oligonucleotide
ggggacggggttatgactgtcgtggggctg

SEQ ID NO: 432571 - DNA, 30 bp, Artificial Sequence
  Synthetic oligonucleotide
ttttttctaacggatcgaggagctgggctg

SEQ ID NO: 432572 - DNA, 30 bp, Artificial Sequence
  Synthetic oligonucleotide
gaaaaccatcggagtgaaagccgatggctg

SEQ ID NO: 432573 - DNA, 30 bp, Artificial Sequence
  Synthetic oligonucleotide
cctacgggccggccctacttaggatggctg

SEQ ID NO: 432574 - DNA, 30 bp, Artificial Sequence
  Synthetic oligonucleotide
ctgcactgccaagttggaaaagactggctg

SEQ ID NO: 432575 - DNA, 30 bp, Artificial Sequence
  Synthetic oligonucleotide
attgttacccgacgtagttggcggtggctg

SEQ ID NO: 432576 - DNA, 30 bp, Artificial Sequence
  Synthetic oligonucleotide
ccgggcgggttggtgagtcatcggtggctg

SEQ ID NO: 432577 - DNA, 30 bp, Artificial Sequence
  Synthetic oligonucleotide
accaaatggtttcgtagcgaactcatgctg

SEQ ID NO: 432578 - DNA, 30 bp, Artificial Sequence
  Synthetic oligonucleotide
ccgcttgacgtgcagctataaaatatgctg

SEQ ID NO: 432579 - DNA, 30 bp, Artificial Sequence
  Synthetic oligonucleotide
tttgttcaaagtgagttgggcgctatgctg

SEQ ID NO: 432580 - DNA, 30 bp, Artificial Sequence
  Synthetic oligonucleotide
acgatagaccccttagggattcgactgctg

SEQ ID NO: 432581 - DNA, 30 bp, Artificial Sequence
  Synthetic oligonucleotide
gcagtacgagcgagtagtacgtgactgctg

SEQ ID NO: 432582 - DNA, 30 bp, Artificial Sequence
  Synthetic oligonucleotide
gattgcgcaagacctggggacttactgctg

SEQ ID NO: 432583 - DNA, 30 bp, Artificial Sequence
  Synthetic oligonucleotide
actaggccacagtaggctggaacgctgctg

SEQ ID NO: 432584 - DNA, 30 bp, Artificial Sequence
  Synthetic oligonucleotide
gtcgggtgaagtggggcgttggcgctgctg

SEQ ID NO: 432585 - DNA, 30 bp, Artificial Sequence
  Synthetic oligonucleotide
atatttaacttacaactagagttgctgctg

SEQ ID NO: 432586 - DNA, 30 bp, Artificial Sequence
  Synthetic oligonucleotide
cggcttgtgtaaatgataccctatctgctg

SEQ ID NO: 432587 - DNA, 30 bp, Artificial Sequence
  Synthetic oligonucleotide
gttcgaagtgcaacactcaaaggagtgctg

SEQ ID NO: 432588 - DNA, 30 bp, Artificial Sequence
  Synthetic oligonucleotide
cactaagcataaatatgctggtacgtgctg

SEQ ID NO: 432589 - DNA, 30 bp, Artificial Sequence
  Synthetic oligonucleotide
aatcaggtaccccagacctcacaggtgctg

SEQ ID NO: 432590 - DNA, 30 bp, Artificial Sequence
  Synthetic oligonucleotide
ttccgcaatcttgagacatcctatgtgctg

SEQ ID NO: 432591 - DNA, 30 bp, Artificial Sequence
  Synthetic oligonucleotide
atttgttgttcccaattgaagatattgctg

SEQ ID NO: 432592 - DNA, 30 bp, Artificial Sequence
  Synthetic oligonucleotide
gagtgtggcaaagtcttgtgtatgttgctg

SEQ ID NO: 432593 - DNA, 30 bp, Artificial Sequence
  Synthetic oligonucleotide
aatgtcttttagtgttggaaaaatttgctg

SEQ ID NO: 432594 - DNA, 30 bp, Artificial Sequence
  Synthetic oligonucleotide
gccatttcttgcaacgatatctgtttgctg

SEQ ID NO: 432595 - DNA, 30 bp, Artificial Sequence
  Synthetic oligonucleotide
caggttatatctaagtctagtaaaaatctg

SEQ ID NO: 432596 - DNA, 30 bp, Artificial Sequence
  Synthetic oligonucleotide
ctttttacccatacgagcattgttaatctg

SEQ ID NO: 432597 - DNA, 30 bp, Artificial Sequence
  Synthetic oligonucleotide
aatctgcgttatacgggggctaaacatctg

SEQ ID NO: 432598 - DNA, 30 bp, Artificial Sequence
  Synthetic oligonucleotide
ggggatctcacacttatccgaggccatctg

SEQ ID NO: 432599 - DNA, 30 bp, Artificial Sequence
  Synthetic oligonucleotide
gtcgtgagcctgtcgttgctcatccatctg

SEQ ID NO: 432600 - DNA, 30 bp, Artificial Sequence
  Synthetic oligonucleotide
acaccatgtcttgcctaggtgatccatctg

SEQ ID NO: 432601 - DNA, 30 bp, Artificial Sequence
  Synthetic oligonucleotide
ccaagtctaaaataagtaacggcgcatctg

SEQ ID NO: 432602 - DNA, 30 bp, Artificial Sequence
  Synthetic oligonucleotide
agcgacttgagacccgctctttcgcatctg

SEQ ID NO: 432603 - DNA, 30 bp, Artificial Sequence
  Synthetic oligonucleotide
tctccaacgtaagtagggggttttcatctg

SEQ ID NO: 432604 - DNA, 30 bp, Artificial Sequence
  Synthetic oligonucleotide
tattacccagactttcacggcaaagatctg

SEQ ID NO: 432605 - DNA, 30 bp, Artificial Sequence
  Synthetic oligonucleotide
agactgtcgtaatgcagcagaatagatctg

SEQ ID NO: 432606 - DNA, 30 bp, Artificial Sequence
  Synthetic oligonucleotide
aaacggctttgatagggctctgtagatctg

SEQ ID NO: 432607 - DNA, 30 bp, Artificial Sequence
  Synthetic oligonucleotide
tcgggctccttcaggccgacgaccgatctg

SEQ ID NO: 432608 - DNA, 30 bp, Artificial Sequence
  Synthetic oligonucleotide
ctctatgaggccttgacgagatatgatctg

SEQ ID NO: 432609 - DNA, 30 bp, Artificial Sequence
  Synthetic oligonucleotide
tctatgtagtggggttctggtcttgatctg

SEQ ID NO: 432610 - DNA, 30 bp, Artificial Sequence
  Synthetic oligonucleotide
tgcggattctttcgtgggtgtcaatatctg

SEQ ID NO: 432611 - DNA, 30 bp, Artificial Sequence
  Synthetic oligonucleotide
agcggcccaccgggacccttgaactatctg

SEQ ID NO: 432612 - DNA, 30 bp, Artificial Sequence
  Synthetic oligonucleotide
aaatactgtttgatatccgtaagctatctg

SEQ ID NO: 432613 - DNA, 30 bp, Artificial Sequence
  Synthetic oligonucleotide
ctcagggctctgatatcggttgagtatctg

SEQ ID NO: 432614 - DNA, 30 bp, Artificial Sequence
  Synthetic oligonucleotide
taaccgtatcctgcaaaccagctgtatctg

SEQ ID NO: 432615 - DNA, 30 bp, Artificial Sequence
  Synthetic oligonucleotide
ataatatgttttaacagcgaccgttatctg

SEQ ID NO: 432616 - DNA, 30 bp, Artificial Sequence
  Synthetic oligonucleotide
gatacccctttcaatggccccggttatctg

SEQ ID NO: 432617 - DNA, 30 bp, Artificial Sequence
  Synthetic oligonucleotide
tgcaaattgctagagcgaagggaaactctg

SEQ ID NO: 432618 - DNA, 30 bp, Artificial Sequence
  Synthetic oligonucleotide
gtagagacacagttgatccaaacaactctg

SEQ ID NO: 432619 - DNA, 30 bp, Artificial Sequence
  Synthetic oligonucleotide
tccgttattctctctatagccagaactctg

SEQ ID NO: 432620 - DNA, 30 bp, Artificial Sequence
  Synthetic oligonucleotide
aatacgacttggggtcgcctgcccactctg

SEQ ID NO: 432621 - DNA, 30 bp, Artificial Sequence
  Synthetic oligonucleotide
gagtcaatccggctcgtaggtctgactctg

SEQ ID NO: 432622 - DNA, 30 bp, Artificial Sequence
  Synthetic oligonucleotide
ccgcaagctgagggccccgttgcccctctg

SEQ ID NO: 432623 - DNA, 30 bp, Artificial Sequence
  Synthetic oligonucleotide
gaacatgcccgagcaggcggccagcctctg

SEQ ID NO: 432624 - DNA, 30 bp, Artificial Sequence
  Synthetic oligonucleotide
aagcccacttcgtgtctaattgggcctctg

SEQ ID NO: 432625 - DNA, 30 bp, Artificial Sequence
  Synthetic oligonucleotide
caccatccttcgtgcaaagtgtggcctctg

SEQ ID NO: 432626 - DNA, 30 bp, Artificial Sequence
  Synthetic oligonucleotide
tagtcggaggtcatctgggactatcctctg

SEQ ID NO: 432627 - DNA, 30 bp, Artificial Sequence
  Synthetic oligonucleotide
ctagggcatccagcatcgtagtatcctctg

SEQ ID NO: 432628 - DNA, 30 bp, Artificial Sequence
  Synthetic oligonucleotide
aaagaacgagtttgtaggcagtgtcctctg

SEQ ID NO: 432629 - DNA, 30 bp, Artificial Sequence
  Synthetic oligonucleotide
aattacacgaaagctgtcaagtttcctctg

SEQ ID NO: 432630 - DNA, 30 bp, Artificial Sequence
  Synthetic oligonucleotide
tgcaaccgttttgagcccgttagagctctg

SEQ ID NO: 432631 - DNA, 30 bp, Artificial Sequence
  Synthetic oligonucleotide
ctcccccgataggcccgattatcggctctg

SEQ ID NO: 432632 - DNA, 30 bp, Artificial Sequence
  Synthetic oligonucleotide
gcaaggaaataggtttccggttgggctctg

SEQ ID NO: 432633 - DNA, 30 bp, Artificial Sequence
  Synthetic oligonucleotide
ctgattaccgggtctcgatgcggatctctg

SEQ ID NO: 432634 - DNA, 30 bp, Artificial Sequence
  Synthetic oligonucleotide
tcattgtgggtaagaagatatagctctctg

SEQ ID NO: 432635 - DNA, 30 bp, Artificial Sequence
  Synthetic oligonucleotide
tgccgtatagtccggtacaatgagtctctg

SEQ ID NO: 432636 - DNA, 30 bp, Artificial Sequence
  Synthetic oligonucleotide
ttacgcttgtgcaaagatcatctttctctg

SEQ ID NO: 432637 - DNA, 30 bp, Artificial Sequence
  Synthetic oligonucleotide
gccctctttataaaaatccaacaaagtctg

SEQ ID NO: 432638 - DNA, 30 bp, Artificial Sequence
  Synthetic oligonucleotide
atatatgataatcagagtaccttaagtctg

SEQ ID NO: 432639 - DNA, 30 bp, Artificial Sequence
  Synthetic oligonucleotide
aatcaatgttcccagactgagcacagtctg

SEQ ID NO: 432640 - DNA, 30 bp, Artificial Sequence
  Synthetic oligonucleotide
tagggcagtaggtcatcgtagggcagtctg

SEQ ID NO: 432641 - DNA, 30 bp, Artificial Sequence
  Synthetic oligonucleotide
cttaccctcctggtgtcagaactcagtctg

SEQ ID NO: 432642 - DNA, 30 bp, Artificial Sequence
  Synthetic oligonucleotide
catcaacaacggcaagaccaccagagtctg

SEQ ID NO: 432643 - DNA, 30 bp, Artificial Sequence
  Synthetic oligonucleotide
gccgtgcgcactcgtcagtatttgagtctg

SEQ ID NO: 432644 - DNA, 30 bp, Artificial Sequence
  Synthetic oligonucleotide
aaggttttgtggtgagcccattctagtctg

SEQ ID NO: 432645 - DNA, 30 bp, Artificial Sequence
  Synthetic oligonucleotide
tgatcgcgtatccttttggtgcgtagtctg

SEQ ID NO: 432646 - DNA, 30 bp, Artificial Sequence
  Synthetic oligonucleotide
gacgaagcgcgaggtgttagttcacgtctg

SEQ ID NO: 432647 - DNA, 29 bp, Artificial Sequence
  Synthetic oligonucleotide
ttgatgttagtgctaatacttgccgtctg

SEQ ID NO: 432648 - DNA, 30 bp, Artificial Sequence
  Synthetic oligonucleotide
aaaatggctagagcgtaggaagtccgtctg

SEQ ID NO: 432649 - DNA, 30 bp, Artificial Sequence
  Synthetic oligonucleotide
atctcagtaccacgagtagttgaaggtctg

SEQ ID NO: 432650 - DNA, 30 bp, Artificial Sequence
  Synthetic oligonucleotide
tttggttcttccaaaagtatttaaggtctg

SEQ ID NO: 432651 - DNA, 30 bp, Artificial Sequence
  Synthetic oligonucleotide
tccgcattcggcgcgtaggtgtccggtctg

SEQ ID NO: 432652 - DNA, 30 bp, Artificial Sequence
  Synthetic oligonucleotide
gcttagttattgatgctatggtctggtctg

SEQ ID NO: 432653 - DNA, 30 bp, Artificial Sequence
  Synthetic oligonucleotide
gagaaagtgagttgagccgcgtcatgtctg

SEQ ID NO: 432654 - DNA, 30 bp, Artificial Sequence
  Synthetic oligonucleotide
tagcgcccgtggccgtggttgctatgtctg

SEQ ID NO: 432655 - DNA, 30 bp, Artificial Sequence
  Synthetic oligonucleotide
gtgtgacaaagtccagcaggcttatgtctg

SEQ ID NO: 432656 - DNA, 30 bp, Artificial Sequence
  Synthetic oligonucleotide
atcataggggttattgtccgcaactgtctg

SEQ ID NO: 432657 - DNA, 30 bp, Artificial Sequence
  Synthetic oligonucleotide
atatttcaactgctgctgttttggtgtctg

SEQ ID NO: 432658 - DNA, 30 bp, Artificial Sequence
  Synthetic oligonucleotide
taatctgagatgctcagtgaggattgtctg

SEQ ID NO: 432659 - DNA, 30 bp, Artificial Sequence
  Synthetic oligonucleotide
tcaaactatccgctacggtattgttgtctg

SEQ ID NO: 432660 - DNA, 30 bp, Artificial Sequence
  Synthetic oligonucleotide
gtttccaagctgtctggagtggtttgtctg

SEQ ID NO: 432661 - DNA, 30 bp, Artificial Sequence
  Synthetic oligonucleotide
ccagtcaaggcaactgcacggagaattctg

SEQ ID NO: 432662 - DNA, 30 bp, Artificial Sequence
  Synthetic oligonucleotide
tgtacgggtttatagaatttgggaattctg

SEQ ID NO: 432663 - DNA, 30 bp, Artificial Sequence
  Synthetic oligonucleotide
aactccggggtaaaagaattcgtaattctg

SEQ ID NO: 432664 - DNA, 30 bp, Artificial Sequence
  Synthetic oligonucleotide
aacggtggtggttacatacggttaattctg

SEQ ID NO: 432665 - DNA, 30 bp, Artificial Sequence
  Synthetic oligonucleotide
ccgtggcctaccgtagcacttttaattctg

SEQ ID NO: 432666 - DNA, 30 bp, Artificial Sequence
  Synthetic oligonucleotide
tcaagtacaacagcgcttgtaagcattctg

SEQ ID NO: 432667 - DNA, 30 bp, Artificial Sequence
  Synthetic oligonucleotide
tttgattatttgtttaggctaattattctg

SEQ ID NO: 432668 - DNA, 30 bp, Artificial Sequence
  Synthetic oligonucleotide
caagtgattcgtgctcttttcaaacttctg

SEQ ID NO: 432669 - DNA, 30 bp, Artificial Sequence
  Synthetic oligonucleotide
atactgaggccttgtttttattgacttctg

SEQ ID NO: 432670 - DNA, 30 bp, Artificial Sequence
  Synthetic oligonucleotide
gtgccgtaaaaccttgagatcaatcttctg

SEQ ID NO: 432671 - DNA, 30 bp, Artificial Sequence
  Synthetic oligonucleotide
gagatcgggggaattgtccgagctcttctg

SEQ ID NO: 432672 - DNA, 30 bp, Artificial Sequence
  Synthetic oligonucleotide
gcacggactgtttccataccccttcttctg

SEQ ID NO: 432673 - DNA, 30 bp, Artificial Sequence
  Synthetic oligonucleotide
gttgaaccggtaagacgataagttcttctg

SEQ ID NO: 432674 - DNA, 30 bp, Artificial Sequence
  Synthetic oligonucleotide
cttgggaggttggccttttacaacgttctg

SEQ ID NO: 432675 - DNA, 28 bp, Artificial Sequence
  Synthetic oligonucleotide
ctctattgtctaaagcttgaacgttctg

SEQ ID NO: 432676 - DNA, 30 bp, Artificial Sequence
  Synthetic oligonucleotide
gcccttggacgttcgacaaacctggttctg

SEQ ID NO: 432677 - DNA, 30 bp, Artificial Sequence
  Synthetic oligonucleotide
cgaccacgggccccaccgtatgtggttctg

SEQ ID NO: 432678 - DNA, 30 bp, Artificial Sequence
  Synthetic oligonucleotide
atttatgtcgtgcaccgtcatagtgttctg

SEQ ID NO: 432679 - DNA, 30 bp, Artificial Sequence
  Synthetic oligonucleotide
ggggtttgctcctaggcttacgcatttctg

SEQ ID NO: 432680 - DNA, 30 bp, Artificial Sequence
  Synthetic oligonucleotide
tgcgtataatattgcatcgatgcatttctg

SEQ ID NO: 432681 - DNA, 30 bp, Artificial Sequence
  Synthetic oligonucleotide
ggaggaataatgacattgccgtcatttctg

SEQ ID NO: 432682 - DNA, 30 bp, Artificial Sequence
  Synthetic oligonucleotide
aaaggagcgcagagctgtacactctttctg

SEQ ID NO: 432683 - DNA, 30 bp, Artificial Sequence
  Synthetic oligonucleotide
acaaaggcctaacacagaccactctttctg

SEQ ID NO: 432684 - DNA, 30 bp, Artificial Sequence
  Synthetic oligonucleotide
tgagtgtaaccccgtaatgtcttctttctg

SEQ ID NO: 432685 - DNA, 30 bp, Artificial Sequence
  Synthetic oligonucleotide
cactacgtcatcagcacgcaaaggtttctg

SEQ ID NO: 432686 - DNA, 30 bp, Artificial Sequence
  Synthetic oligonucleotide
aaccaccatatcgaagtaaggaggtttctg

SEQ ID NO: 432687 - DNA, 30 bp, Artificial Sequence
  Synthetic oligonucleotide
agtttcagtacccggccgcctacttttctg

SEQ ID NO: 432688 - DNA, 30 bp, Artificial Sequence
  Synthetic oligonucleotide
ttgagcgtggtcaaaaggcggcacaaagtg

SEQ ID NO: 432689 - DNA, 29 bp, Artificial Sequence
  Synthetic oligonucleotide
ctttagatttgagggaacatgcgaaagtg

SEQ ID NO: 432690 - DNA, 30 bp, Artificial Sequence
  Synthetic oligonucleotide
tgtttttcgtaatcaaaagtatcgaaagtg

SEQ ID NO: 432691 - DNA, 30 bp, Artificial Sequence
  Synthetic oligonucleotide
gactttcatttgtgtctcgtcgttaaagtg

SEQ ID NO: 432692 - DNA, 30 bp, Artificial Sequence
  Synthetic oligonucleotide
atagacctttactgccttctggcccaagtg

SEQ ID NO: 432693 - DNA, 30 bp, Artificial Sequence
  Synthetic oligonucleotide
catactagcctttgcatgtgcagccaagtg

SEQ ID NO: 432694 - DNA, 30 bp, Artificial Sequence
  Synthetic oligonucleotide
atatatacccgagtaatacatattcaagtg

SEQ ID NO: 432695 - DNA, 30 bp, Artificial Sequence
  Synthetic oligonucleotide
aattttggcggattcgtctttattcaagtg

SEQ ID NO: 432696 - DNA, 30 bp, Artificial Sequence
  Synthetic oligonucleotide
gtcagatgcattctgatcctcggcgaagtg

SEQ ID NO: 432697 - DNA, 30 bp, Artificial Sequence
  Synthetic oligonucleotide
gatacattagtgaggacggtggcggaagtg

SEQ ID NO: 432698 - DNA, 30 bp, Artificial Sequence
  Synthetic oligonucleotide
ccaagccctggggcaggccatcgataagtg

SEQ ID NO: 432699 - DNA, 30 bp, Artificial Sequence
  Synthetic oligonucleotide
ttaaacttttaaatcgctgaactataagtg

SEQ ID NO: 432700 - DNA, 30 bp, Artificial Sequence
  Synthetic oligonucleotide
aaccgggtcttatgctcaatatagtaagtg

SEQ ID NO: 432701 - DNA, 30 bp, Artificial Sequence
  Synthetic oligonucleotide
taaatgtcagtagccgtcaaagggtaagtg

SEQ ID NO: 432702 - DNA, 30 bp, Artificial Sequence
  Synthetic oligonucleotide
gataaaggtcccggtatggtgcattaagtg

SEQ ID NO: 432703 - DNA, 30 bp, Artificial Sequence
  Synthetic oligonucleotide
gtaaagcgacttgaaataacatgttaagtg

SEQ ID NO: 432704 - DNA, 30 bp, Artificial Sequence
  Synthetic oligonucleotide
tcaatggaaggaaccgtagtaatttaagtg

SEQ ID NO: 432705 - DNA, 30 bp, Artificial Sequence
  Synthetic oligonucleotide
tatcctgagcaaatggaccgtttttaagtg

SEQ ID NO: 432706 - DNA, 30 bp, Artificial Sequence
  Synthetic oligonucleotide
accaggctaaaatgagctgctccaacagtg

SEQ ID NO: 432707 - DNA, 30 bp, Artificial Sequence
  Synthetic oligonucleotide
taagttctcttggctgattaggcaacagtg

SEQ ID NO: 432708 - DNA, 30 bp, Artificial Sequence
  Synthetic oligonucleotide
tcgttctagggaacaaacaccgtaacagtg

SEQ ID NO: 432709 - DNA, 30 bp, Artificial Sequence
  Synthetic oligonucleotide
ttttcacacgccatcgaggtaatgacagtg

SEQ ID NO: 432710 - DNA, 30 bp, Artificial Sequence
  Synthetic oligonucleotide
ttcggaagagctttagtcaacgctacagtg

SEQ ID NO: 432711 - DNA, 30 bp, Artificial Sequence
  Synthetic oligonucleotide
tagcttagaattgcttacttgctgccagtg

SEQ ID NO: 432712 - DNA, 30 bp, Artificial Sequence
  Synthetic oligonucleotide
gaacgctggtgtattcaatcatgcgcagtg

SEQ ID NO: 432713 - DNA, 30 bp, Artificial Sequence
  Synthetic oligonucleotide
attttctcagcaattaccgaccttgcagtg

SEQ ID NO: 432714 - DNA, 30 bp, Artificial Sequence
  Synthetic oligonucleotide
cggctctatcccggtgcgggatcatcagtg

SEQ ID NO: 432715 - DNA, 30 bp, Artificial Sequence
  Synthetic oligonucleotide
ccagtctctcagggacggaggagctcagtg

SEQ ID NO: 432716 - DNA, 30 bp, Artificial Sequence
  Synthetic oligonucleotide
ctttgccggaaagtgcacgagtattcagtg

SEQ ID NO: 432717 - DNA, 30 bp, Artificial Sequence
  Synthetic oligonucleotide
cgattcgtctcagtcgccaaggaaagagtg

SEQ ID NO: 432718 - DNA, 30 bp, Artificial Sequence
  Synthetic oligonucleotide
atggcgcggccccgatgccctgcaagagtg

SEQ ID NO: 432719 - DNA, 30 bp, Artificial Sequence
  Synthetic oligonucleotide
gtacggggcttggggatggatggcagagtg

SEQ ID NO: 432720 - DNA, 30 bp, Artificial Sequence
  Synthetic oligonucleotide
gccattcttgctagaattttttatagagtg

SEQ ID NO: 432721 - DNA, 30 bp, Artificial Sequence
  Synthetic oligonucleotide
cgtatcgcgtccgctacagattcacgagtg

SEQ ID NO: 432722 - DNA, 30 bp, Artificial Sequence
  Synthetic oligonucleotide
gatatggcgctcaataatatcagacgagtg

SEQ ID NO: 432723 - DNA, 30 bp, Artificial Sequence
  Synthetic oligonucleotide
gccattcgtactcgagaagctggacgagtg

SEQ ID NO: 432724 - DNA, 30 bp, Artificial Sequence
  Synthetic oligonucleotide
cgctgtgcttctgggaattgttaccgagtg

SEQ ID NO: 432725 - DNA, 30 bp, Artificial Sequence
  Synthetic oligonucleotide
ggtatttctactacgtatacaaaaggagtg

SEQ ID NO: 432726 - DNA, 30 bp, Artificial Sequence
  Synthetic oligonucleotide
gagcggcggagtcaatcccttacaggagtg

SEQ ID NO: 432727 - DNA, 30 bp, Artificial Sequence
  Synthetic oligonucleotide
ttaatttcaagtcgctacagtacgggagtg

SEQ ID NO: 432728 - DNA, 30 bp, Artificial Sequence
  Synthetic oligonucleotide
taatgctacaagaacggcaatttgggagtg

SEQ ID NO: 432729 - DNA, 30 bp, Artificial Sequence
  Synthetic oligonucleotide
tcccaatcttcggtacccctctttggagtg

SEQ ID NO: 432730 - DNA, 30 bp, Artificial Sequence
  Synthetic oligonucleotide
attggttaaaggctccaagcgtttggagtg

SEQ ID NO: 432731 - DNA, 30 bp, Artificial Sequence
  Synthetic oligonucleotide
taagttcatcgcatattaagcgaatgagtg

SEQ ID NO: 432732 - DNA, 30 bp, Artificial Sequence
  Synthetic oligonucleotide
tctatgatctagctaacctatgtatgagtg

SEQ ID NO: 432733 - DNA, 30 bp, Artificial Sequence
  Synthetic oligonucleotide
tgtcgcgcaaggggtgtaccctactgagtg

SEQ ID NO: 432734 - DNA, 30 bp, Artificial Sequence
  Synthetic oligonucleotide
ataggtcgagtactccgtcatcattgagtg

SEQ ID NO: 432735 - DNA, 30 bp, Artificial Sequence
  Synthetic oligonucleotide
ggttctgttattgtgtaataatattgagtg

SEQ ID NO: 432736 - DNA, 30 bp, Artificial Sequence
  Synthetic oligonucleotide
ctgacgcgcattttgtatcgtctttgagtg

SEQ ID NO: 432737 - DNA, 31 bp, Artificial Sequence
  Synthetic oligonucleotide
tatttcggtaatttgaaaaatggaaatagtg

SEQ ID NO: 432738 - DNA, 30 bp, Artificial Sequence
  Synthetic oligonucleotide
gctacgaaggacaccgagagacacatagtg

SEQ ID NO: 432739 - DNA, 30 bp, Artificial Sequence
  Synthetic oligonucleotide
ccgatcctagatagtcggagcagtatagtg

SEQ ID NO: 432740 - DNA, 30 bp, Artificial Sequence
  Synthetic oligonucleotide
gttcgagtgtggccagtaaaagcactagtg

SEQ ID NO: 432741 - DNA, 30 bp, Artificial Sequence
  Synthetic oligonucleotide
tgttagggtccctaactcttatcactagtg

SEQ ID NO: 432742 - DNA, 30 bp, Artificial Sequence
  Synthetic oligonucleotide
cacattaaacggtgaggtaggtcactagtg

SEQ ID NO: 432743 - DNA, 30 bp, Artificial Sequence
  Synthetic oligonucleotide
gatagtcctcttagtacggtgcgactagtg

SEQ ID NO: 432744 - DNA, 30 bp, Artificial Sequence
  Synthetic oligonucleotide
aacgttctcactttacgtgactgactagtg

SEQ ID NO: 432745 - DNA, 30 bp, Artificial Sequence
  Synthetic oligonucleotide
ctttatgcattcttgtattacaacctagtg

SEQ ID NO: 432746 - DNA, 30 bp, Artificial Sequence
  Synthetic oligonucleotide
ccaacaacggctacggtagttcacctagtg

SEQ ID NO: 432747 - DNA, 30 bp, Artificial Sequence
  Synthetic oligonucleotide
ttcgggttactaccaaaataggtcctagtg

SEQ ID NO: 432748 - DNA, 30 bp, Artificial Sequence
  Synthetic oligonucleotide
atttggctgtgagactaaatcttcctagtg

SEQ ID NO: 432749 - DNA, 30 bp, Artificial Sequence
  Synthetic oligonucleotide
gaccgcacacaagctaaggcaggtctagtg

SEQ ID NO: 432750 - DNA, 25 bp, Artificial Sequence
  Synthetic oligonucleotide
ccgtgattgagtactttatgtagtg

SEQ ID NO: 432751 - DNA, 30 bp, Artificial Sequence
  Synthetic oligonucleotide
gcaactatctgtgggtgcacaagtgtagtg

SEQ ID NO: 432752 - DNA, 30 bp, Artificial Sequence
  Synthetic oligonucleotide
gtttgtgtattcattttatctcgcttagtg

SEQ ID NO: 432753 - DNA, 30 bp, Artificial Sequence
  Synthetic oligonucleotide
gtaggagccacgcctatgagactcttagtg

SEQ ID NO: 432754 - DNA, 30 bp, Artificial Sequence
  Synthetic oligonucleotide
caagtatttgggtttggcgtatcgttagtg

SEQ ID NO: 432755 - DNA, 30 bp, Artificial Sequence
  Synthetic oligonucleotide
ttcgtgttggctaatctcaattggttagtg

SEQ ID NO: 432756 - DNA, 30 bp, Artificial Sequence
  Synthetic oligonucleotide
tataagtgtcattggtgttccatgttagtg

SEQ ID NO: 432757 - DNA, 30 bp, Artificial Sequence
  Synthetic oligonucleotide
gtcaactgtgagcactaatagtgtttagtg

SEQ ID NO: 432758 - DNA, 30 bp, Artificial Sequence
  Synthetic oligonucleotide
gatttcagtacttggtcaaaaattttagtg

SEQ ID NO: 432759 - DNA, 30 bp, Artificial Sequence
  Synthetic oligonucleotide
actttccaacacggcttttcgtcaaacgtg

SEQ ID NO: 432760 - DNA, 30 bp, Artificial Sequence
  Synthetic oligonucleotide
cgttgacgcgcgttcttgtcgggaaacgtg

SEQ ID NO: 432761 - DNA, 30 bp, Artificial Sequence
  Synthetic oligonucleotide
cttcttgtaaagaggcgactcgacaacgtg

SEQ ID NO: 432762 - DNA, 30 bp, Artificial Sequence
  Synthetic oligonucleotide
catcattgttgttgttcgttaggcaacgtg

SEQ ID NO: 432763 - DNA, 30 bp, Artificial Sequence
  Synthetic oligonucleotide
atatgtcaggagcatgtcttaaagaacgtg

SEQ ID NO: 432764 - DNA, 30 bp, Artificial Sequence
  Synthetic oligonucleotide
gcattactggtccctctctaagggaacgtg

SEQ ID NO: 432765 - DNA, 30 bp, Artificial Sequence
  Synthetic oligonucleotide
ggcgtacgtggtgcgatgtagcgtaacgtg

SEQ ID NO: 432766 - DNA, 30 bp, Artificial Sequence
  Synthetic oligonucleotide
gccgtagaaccctagggttagggtaacgtg

SEQ ID NO: 432767 - DNA, 30 bp, Artificial Sequence
  Synthetic oligonucleotide
gatcgagagttgatacggctgcaacacgtg

SEQ ID NO: 432768 - DNA, 30 bp, Artificial Sequence
  Synthetic oligonucleotide
gaagatcgttaagcggcttgtggacacgtg

SEQ ID NO: 432769 - DNA, 30 bp, Artificial Sequence
  Synthetic oligonucleotide
tagcttgtcgcactcctgcgcgaccacgtg

SEQ ID NO: 432770 - DNA, 30 bp, Artificial Sequence
  Synthetic oligonucleotide
tacatgcgttttgcatgtgtgtatcacgtg

SEQ ID NO: 432771 - DNA, 30 bp, Artificial Sequence
  Synthetic oligonucleotide
tgaattacagcttccgtctgctgtcacgtg

SEQ ID NO: 432772 - DNA, 30 bp, Artificial Sequence
  Synthetic oligonucleotide
ccgatttgggtacgtaaacgtgttcacgtg

SEQ ID NO: 432773 - DNA, 30 bp, Artificial Sequence
  Synthetic oligonucleotide
gagtaaagatacacgccctactttcacgtg

SEQ ID NO: 432774 - DNA, 30 bp, Artificial Sequence
  Synthetic oligonucleotide
tagttcgataccaccctacgatgagacgtg

SEQ ID NO: 432775 - DNA, 30 bp, Artificial Sequence
  Synthetic oligonucleotide
gaggatttttacgatggtcggcccgacgtg

SEQ ID NO: 432776 - DNA, 30 bp, Artificial Sequence
  Synthetic oligonucleotide
ttggtggatgtagccgcccgaatggacgtg

SEQ ID NO: 432777 - DNA, 31 bp, Artificial Sequence
  Synthetic oligonucleotide
cagttggacacggaaaagctgtgtggacgtg

SEQ ID NO: 432778 - DNA, 30 bp, Artificial Sequence
  Synthetic oligonucleotide
cagcactagctatggccttgtttatacgtg

SEQ ID NO: 432779 - DNA, 30 bp, Artificial Sequence
  Synthetic oligonucleotide
acgggtagagccgcgcaaacccactacgtg

SEQ ID NO: 432780 - DNA, 30 bp, Artificial Sequence
  Synthetic oligonucleotide
tcgagggcagcctatcgttaagactacgtg

SEQ ID NO: 432781 - DNA, 30 bp, Artificial Sequence
  Synthetic oligonucleotide
tttttgactactggcacatacaggtacgtg

SEQ ID NO: 432782 - DNA, 30 bp, Artificial Sequence
  Synthetic oligonucleotide
agacttcacgaacgcgttgagtattacgtg

SEQ ID NO: 432783 - DNA, 30 bp, Artificial Sequence
  Synthetic oligonucleotide
tggttcaggaaatccatagacgcttacgtg

SEQ ID NO: 432784 - DNA, 30 bp, Artificial Sequence
  Synthetic oligonucleotide
taacagttaaaaccggttatggaaaccgtg

SEQ ID NO: 432785 - DNA, 30 bp, Artificial Sequence
  Synthetic oligonucleotide
caggaggaatcttttctgatgaacaccgtg

SEQ ID NO: 432786 - DNA, 30 bp, Artificial Sequence
  Synthetic oligonucleotide
ctaccccgatcgactaggtggaccaccgtg

SEQ ID NO: 432787 - DNA, 30 bp, Artificial Sequence
  Synthetic oligonucleotide
tgccctcgctcactagtagaagggaccgtg

SEQ ID NO: 432788 - DNA, 30 bp, Artificial Sequence
  Synthetic oligonucleotide
gctagtacggtacgaaacacgtataccgtg

SEQ ID NO: 432789 - DNA, 30 bp, Artificial Sequence
  Synthetic oligonucleotide
tgttgatttgatcgacctacatgtaccgtg

SEQ ID NO: 432790 - DNA, 30 bp, Artificial Sequence
  Synthetic oligonucleotide
ttaaatataagggagtgctagtgacccgtg

SEQ ID NO: 432791 - DNA, 30 bp, Artificial Sequence
  Synthetic oligonucleotide
ctctaaccggcctgatcacatgcccccgtg

SEQ ID NO: 432792 - DNA, 30 bp, Artificial Sequence
  Synthetic oligonucleotide
gggatccaacccctaggcagttgccccgtg

SEQ ID NO: 432793 - DNA, 30 bp, Artificial Sequence
  Synthetic oligonucleotide
agttttaaactgaatataatatcgcccgtg

SEQ ID NO: 432794 - DNA, 30 bp, Artificial Sequence
  Synthetic oligonucleotide
ctggacacagggattttaaggtggcccgtg

SEQ ID NO: 432795 - DNA, 30 bp, Artificial Sequence
  Synthetic oligonucleotide
tgtctatcctatacgctgtggtggcccgtg

SEQ ID NO: 432796 - DNA, 30 bp, Artificial Sequence
  Synthetic oligonucleotide
ttgattccagcatgtgatccttgtcccgtg

SEQ ID NO: 432797 - DNA, 30 bp, Artificial Sequence
  Synthetic oligonucleotide
gggccgggtttaaaaccattagttcccgtg

SEQ ID NO: 432798 - DNA, 30 bp, Artificial Sequence
  Synthetic oligonucleotide
cacacacccgcacttgatgccgttcccgtg

SEQ ID NO: 432799 - DNA, 30 bp, Artificial Sequence
  Synthetic oligonucleotide
agctatactcgcgctgtattatacgccgtg

SEQ ID NO: 432800 - DNA, 30 bp, Artificial Sequence
  Synthetic oligonucleotide
agtataatcgaccttactttcagcgccgtg

SEQ ID NO: 432801 - DNA, 30 bp, Artificial Sequence
  Synthetic oligonucleotide
ttcgaatcttaacggcactatccggccgtg

SEQ ID NO: 432802 - DNA, 30 bp, Artificial Sequence
  Synthetic oligonucleotide
tttctcccgcgaaagtccgcacgtgccgtg

SEQ ID NO: 432803 - DNA, 30 bp, Artificial Sequence
  Synthetic oligonucleotide
ggcttcaatattacggcgcgcacctccgtg

SEQ ID NO: 432804 - DNA, 30 bp, Artificial Sequence
  Synthetic oligonucleotide
gcgcacccattccggctctggagctccgtg

SEQ ID NO: 432805 - DNA, 30 bp, Artificial Sequence
  Synthetic oligonucleotide
gacctcagggcgttattaaacggcagcgtg

SEQ ID NO: 432806 - DNA, 30 bp, Artificial Sequence
  Synthetic oligonucleotide
gccctttgcgtaggatacaggtctagcgtg

SEQ ID NO: 432807 - DNA, 30 bp, Artificial Sequence
  Synthetic oligonucleotide
gcataaatttaatgagatgagcgtagcgtg

SEQ ID NO: 432808 - DNA, 30 bp, Artificial Sequence
  Synthetic oligonucleotide
acgtagcgtcacggactgtctcaacgcgtg

SEQ ID NO: 432809 - DNA, 30 bp, Artificial Sequence
  Synthetic oligonucleotide
cgccgtaagggaacgtcagttgtacgcgtg

SEQ ID NO: 432810 - DNA, 30 bp, Artificial Sequence
  Synthetic oligonucleotide
gacgtataaaccgttcatgtccgccgcgtg

SEQ ID NO: 432811 - DNA, 30 bp, Artificial Sequence
  Synthetic oligonucleotide
taggatcgaccctactacatgcgccgcgtg

SEQ ID NO: 432812 - DNA, 30 bp, Artificial Sequence
  Synthetic oligonucleotide
ctcctttcgtcaactattccctggcgcgtg

SEQ ID NO: 432813 - DNA, 30 bp, Artificial Sequence
  Synthetic oligonucleotide
gctaaggaactttagcttgtcaccggcgtg

SEQ ID NO: 432814 - DNA, 30 bp, Artificial Sequence
  Synthetic oligonucleotide
atggctgaacgcagttggacgcccggcgtg

SEQ ID NO: 432815 - DNA, 30 bp, Artificial Sequence
  Synthetic oligonucleotide
tgtaccttttcgttatccgcgtccggcgtg

SEQ ID NO: 432816 - DNA, 30 bp, Artificial Sequence
  Synthetic oligonucleotide
ggctgtgcacaccttgaactatgcggcgtg

SEQ ID NO: 432817 - DNA, 30 bp, Artificial Sequence
  Synthetic oligonucleotide
accaagtgaatatgacgatattgcggcgtg

SEQ ID NO: 432818 - DNA, 30 bp, Artificial Sequence
  Synthetic oligonucleotide
gcgcacggctcgctacgaggaaagggcgtg

SEQ ID NO: 432819 - DNA, 30 bp, Artificial Sequence
  Synthetic oligonucleotide
acatcaatgggttccgtagctccgggcgtg

SEQ ID NO: 432820 - DNA, 30 bp, Artificial Sequence
  Synthetic oligonucleotide
ccccttagcccatcactccgccatggcgtg

SEQ ID NO: 432821 - DNA, 30 bp, Artificial Sequence
  Synthetic oligonucleotide
tgtattgtaagagcgctggaagctggcgtg

SEQ ID NO: 432822 - DNA, 30 bp, Artificial Sequence
  Synthetic oligonucleotide
gtagcgtagtgcatggaaggctctggcgtg

SEQ ID NO: 432823 - DNA, 30 bp, Artificial Sequence
  Synthetic oligonucleotide
acaccatcatccggtgcttgatgtggcgtg

SEQ ID NO: 432824 - DNA, 30 bp, Artificial Sequence
  Synthetic oligonucleotide
gcggtcgcttcgcgcagctgttttggcgtg

SEQ ID NO: 432825 - DNA, 30 bp, Artificial Sequence
  Synthetic oligonucleotide
cttgcaacatagcgagcgtgttttggcgtg

SEQ ID NO: 432826 - DNA, 30 bp, Artificial Sequence
  Synthetic oligonucleotide
ttgtgatagcgtcgcatgtcaacctgcgtg

SEQ ID NO: 432827 - DNA, 29 bp, Artificial Sequence
  Synthetic oligonucleotide
cacatcagacacgacctatggcgtgcgtg

SEQ ID NO: 432828 - DNA, 30 bp, Artificial Sequence
  Synthetic oligonucleotide
gacgctcaaagccaccggcgtctgtgcgtg

SEQ ID NO: 432829 - DNA, 30 bp, Artificial Sequence
  Synthetic oligonucleotide
tctcggctcatatagactattatttgcgtg

SEQ ID NO: 432830 - DNA, 30 bp, Artificial Sequence
  Synthetic oligonucleotide
tcagcttcgtggtatttaggtacaatcgtg

SEQ ID NO: 432831 - DNA, 30 bp, Artificial Sequence
  Synthetic oligonucleotide
gcgttgatggttcaattaagcgcaatcgtg

SEQ ID NO: 432832 - DNA, 30 bp, Artificial Sequence
  Synthetic oligonucleotide
tagccgcagatcgggtgtcgtggcatcgtg

SEQ ID NO: 432833 - DNA, 30 bp, Artificial Sequence
  Synthetic oligonucleotide
tgaaaagtcgctgggcacattttgatcgtg

SEQ ID NO: 432834 - DNA, 30 bp, Artificial Sequence
  Synthetic oligonucleotide
catagtgtcttcggttcttctaccctcgtg

SEQ ID NO: 432835 - DNA, 30 bp, Artificial Sequence
  Synthetic oligonucleotide
atttcgccggaagtgattcaggggctcgtg

SEQ ID NO: 432836 - DNA, 30 bp, Artificial Sequence
  Synthetic oligonucleotide
gcaactctgcggtaattattctgagtcgtg

SEQ ID NO: 432837 - DNA, 30 bp, Artificial Sequence
  Synthetic oligonucleotide
cgggcagtctcacgatgtacagacgtcgtg

SEQ ID NO: 432838 - DNA, 29 bp, Artificial Sequence
  Synthetic oligonucleotide
ttaagctacagagttaatgttccgtcgtg

SEQ ID NO: 432839 - DNA, 30 bp, Artificial Sequence
  Synthetic oligonucleotide
gcgttaccattcacgaaataaaaggtcgtg

SEQ ID NO: 432840 - DNA, 30 bp, Artificial Sequence
  Synthetic oligonucleotide
tactgaccttccagggcctcctgggtcgtg

SEQ ID NO: 432841 - DNA, 30 bp, Artificial Sequence
  Synthetic oligonucleotide
ctattagaaagataccacttttgggtcgtg

SEQ ID NO: 432842 - DNA, 30 bp, Artificial Sequence
  Synthetic oligonucleotide
cagcgccccagacgccctcattgattcgtg

SEQ ID NO: 432843 - DNA, 30 bp, Artificial Sequence
  Synthetic oligonucleotide
cccaaatgcatgaacgaatgcatattcgtg

SEQ ID NO: 432844 - DNA, 30 bp, Artificial Sequence
  Synthetic oligonucleotide
tgccgtgtattggcatgtttacgaaaggtg

SEQ ID NO: 432845 - DNA, 30 bp, Artificial Sequence
  Synthetic oligonucleotide
gagggacacgtagtgcagacaatcaaggtg

SEQ ID NO: 432846 - DNA, 30 bp, Artificial Sequence
  Synthetic oligonucleotide
tgagtcattttctataatgcgtctaaggtg

SEQ ID NO: 432847 - DNA, 30 bp, Artificial Sequence
  Synthetic oligonucleotide
aaatgattttcgaacagatgagttaaggtg

SEQ ID NO: 432848 - DNA, 30 bp, Artificial Sequence
  Synthetic oligonucleotide
ctatgtggccagtgtcttgataaacaggtg

SEQ ID NO: 432849 - DNA, 30 bp, Artificial Sequence
  Synthetic oligonucleotide
gtctcaagcggcgctcggacagcccaggtg

SEQ ID NO: 432850 - DNA, 30 bp, Artificial Sequence
  Synthetic oligonucleotide
cccttgcgctgcgctcgtgacgcccaggtg

SEQ ID NO: 432851 - DNA, 30 bp, Artificial Sequence
  Synthetic oligonucleotide
atctgtattgcgcgagactgtagccaggtg

SEQ ID NO: 432852 - DNA, 30 bp, Artificial Sequence
  Synthetic oligonucleotide
aggctaaaggacacggccaatgtccaggtg

SEQ ID NO: 432853 - DNA, 30 bp, Artificial Sequence
  Synthetic oligonucleotide
tgtaactacagcatatcgcatatgcaggtg

SEQ ID NO: 432854 - DNA, 30 bp, Artificial Sequence
  Synthetic oligonucleotide
caaaagctttgacgagcactagtgcaggtg

SEQ ID NO: 432855 - DNA, 30 bp, Artificial Sequence
  Synthetic oligonucleotide
ttaacgctaccgctctgtggttcagaggtg

SEQ ID NO: 432856 - DNA, 30 bp, Artificial Sequence
  Synthetic oligonucleotide
ggtcgtttaacgtgcatgaacacggaggtg

SEQ ID NO: 432857 - DNA, 30 bp, Artificial Sequence
  Synthetic oligonucleotide
tcaaaacggggccggtccgtgggggaggtg

SEQ ID NO: 432858 - DNA, 30 bp, Artificial Sequence
  Synthetic oligonucleotide
taccaggtatggatcagcgcgatataggtg

SEQ ID NO: 432859 - DNA, 30 bp, Artificial Sequence
  Synthetic oligonucleotide
gatccgcgttcacaccggatgacgtaggtg

SEQ ID NO: 432860 - DNA, 30 bp, Artificial Sequence
  Synthetic oligonucleotide
acgaagtcagtaattatttaatggtaggtg

SEQ ID NO: 432861 - DNA, 30 bp, Artificial Sequence
  Synthetic oligonucleotide
tcaagatactttaaacctccccattaggtg

SEQ ID NO: 432862 - DNA, 30 bp, Artificial Sequence
  Synthetic oligonucleotide
ataagctcattatatattggccattaggtg

SEQ ID NO: 432863 - DNA, 30 bp, Artificial Sequence
  Synthetic oligonucleotide
taggaagtaaacgaggttcccatttaggtg

SEQ ID NO: 432864 - DNA, 30 bp, Artificial Sequence
  Synthetic oligonucleotide
ttgcgtggttaactaaatgtataaacggtg

SEQ ID NO: 432865 - DNA, 30 bp, Artificial Sequence
  Synthetic oligonucleotide
gcagcaatgacagtattgtcgtgaacggtg

SEQ ID NO: 432866 - DNA, 30 bp, Artificial Sequence
  Synthetic oligonucleotide
cgcaattggaggtcgcgcagaataacggtg

SEQ ID NO: 432867 - DNA, 30 bp, Artificial Sequence
  Synthetic oligonucleotide
ccctctccaaagaacgagattaagacggtg

SEQ ID NO: 432868 - DNA, 30 bp, Artificial Sequence
  Synthetic oligonucleotide
gaccgcagataacctcgttgacggacggtg

SEQ ID NO: 432869 - DNA, 30 bp, Artificial Sequence
  Synthetic oligonucleotide
ttaccaccccatgacggcctttatacggtg

SEQ ID NO: 432870 - DNA, 30 bp, Artificial Sequence
  Synthetic oligonucleotide
cttttcgtggttcgttcatcaagtacggtg

SEQ ID NO: 432871 - DNA, 30 bp, Artificial Sequence
  Synthetic oligonucleotide
acttagtgtagcagactatccgtcccggtg

SEQ ID NO: 432872 - DNA, 30 bp, Artificial Sequence
  Synthetic oligonucleotide
attagacacatgcggcaccggattccggtg

SEQ ID NO: 432873 - DNA, 30 bp, Artificial Sequence
  Synthetic oligonucleotide
catagaactcagttttagtcagttccggtg

SEQ ID NO: 432874 - DNA, 30 bp, Artificial Sequence
  Synthetic oligonucleotide
tgcggcgggccgagaagtttcagagcggtg

SEQ ID NO: 432875 - DNA, 30 bp, Artificial Sequence
  Synthetic oligonucleotide
ataggtgacttatgtaccacccccgcggtg

SEQ ID NO: 432876 - DNA, 28 bp, Artificial Sequence
  Synthetic oligonucleotide
tgtcgctgatatgtgactctccgcggtg

SEQ ID NO: 432877 - DNA, 30 bp, Artificial Sequence
  Synthetic oligonucleotide
gtcaaggtgttactccgggcgagcgcggtg

SEQ ID NO: 432878 - DNA, 30 bp, Artificial Sequence
  Synthetic oligonucleotide
tatagtcgagtacgactaggcagggcggtg

SEQ ID NO: 432879 - DNA, 30 bp, Artificial Sequence
  Synthetic oligonucleotide
agtagagatatcacttaacgtggggcggtg

SEQ ID NO: 432880 - DNA, 30 bp, Artificial Sequence
  Synthetic oligonucleotide
cgtgtatatagttcacctgccgcatcggtg

SEQ ID NO: 432881 - DNA, 30 bp, Artificial Sequence
  Synthetic oligonucleotide
ttttgcgacaggcgccttatagcgtcggtg

SEQ ID NO: 432882 - DNA, 30 bp, Artificial Sequence
  Synthetic oligonucleotide
ggaagccagccatcgcatcctatgtcggtg

SEQ ID NO: 432883 - DNA, 30 bp, Artificial Sequence
  Synthetic oligonucleotide
actcgttgagacatgaagtgtgtgtcggtg

SEQ ID NO: 432884 - DNA, 30 bp, Artificial Sequence
  Synthetic oligonucleotide
cttctgcacagttggagaagtatttcggtg

SEQ ID NO: 432885 - DNA, 30 bp, Artificial Sequence
  Synthetic oligonucleotide
caccatgggaccgggtcccccaaaagggtg

SEQ ID NO: 432886 - DNA, 30 bp, Artificial Sequence
  Synthetic oligonucleotide
gtgttacgagcagtgtaatatagcagggtg

SEQ ID NO: 432887 - DNA, 30 bp, Artificial Sequence
  Synthetic oligonucleotide
gtccacagttgttgttttacgggccgggtg

SEQ ID NO: 432888 - DNA, 30 bp, Artificial Sequence
  Synthetic oligonucleotide
cataatgtggagaacagtgtcctccgggtg

SEQ ID NO: 432889 - DNA, 30 bp, Artificial Sequence
  Synthetic oligonucleotide
tgttcgcggggggaccagagggagcgggtg

SEQ ID NO: 432890 - DNA, 30 bp, Artificial Sequence
  Synthetic oligonucleotide
gtatatcgtgacatctactggcttcgggtg

SEQ ID NO: 432891 - DNA, 30 bp, Artificial Sequence
  Synthetic oligonucleotide
aattccattccgggtaaacaacgaggggtg

SEQ ID NO: 432892 - DNA, 30 bp, Artificial Sequence
  Synthetic oligonucleotide
aatcagggggcccggcttgcggtcggggtg

SEQ ID NO: 432893 - DNA, 30 bp, Artificial Sequence
  Synthetic oligonucleotide
cttatggcgcggtacatatatttcggggtg

SEQ ID NO: 432894 - DNA, 30 bp, Artificial Sequence
  Synthetic oligonucleotide
attgccgaggcgccggggccgaagggggtg

SEQ ID NO: 432895 - DNA, 30 bp, Artificial Sequence
  Synthetic oligonucleotide
ttcagattggcagccaggccccggggggtg

SEQ ID NO: 432896 - DNA, 30 bp, Artificial Sequence
  Synthetic oligonucleotide
cgggcagaaccagtgcagggaatgggggtg

SEQ ID NO: 432897 - DNA, 30 bp, Artificial Sequence
  Synthetic oligonucleotide
cgatcttacgaacgtcgagcacatggggtg

SEQ ID NO: 432898 - DNA, 30 bp, Artificial Sequence
  Synthetic oligonucleotide
ttcgcatgcgcggcaggacattatggggtg

SEQ ID NO: 432899 - DNA, 30 bp, Artificial Sequence
  Synthetic oligonucleotide
gccacagtccccagtagggattatggggtg

SEQ ID NO: 432900 - DNA, 30 bp, Artificial Sequence
  Synthetic oligonucleotide
ggggtgagaattagaaagtcgcgtggggtg

SEQ ID NO: 432901 - DNA, 30 bp, Artificial Sequence
  Synthetic oligonucleotide
cttatatctaacgatatgctgtgatgggtg

SEQ ID NO: 432902 - DNA, 30 bp, Artificial Sequence
  Synthetic oligonucleotide
tcgggtcaaaagtggctcctggcttgggtg

SEQ ID NO: 432903 - DNA, 30 bp, Artificial Sequence
  Synthetic oligonucleotide
tgaattggttgccgattcgcccaaatggtg

SEQ ID NO: 432904 - DNA, 30 bp, Artificial Sequence
  Synthetic oligonucleotide
caacggcatgcagccgcatacacaatggtg

SEQ ID NO: 432905 - DNA, 30 bp, Artificial Sequence
  Synthetic oligonucleotide
tatcgtcctttgagggcagtatgaatggtg

SEQ ID NO: 432906 - DNA, 30 bp, Artificial Sequence
  Synthetic oligonucleotide
tatgtctggtatttgaagtgtgacatggtg

SEQ ID NO: 432907 - DNA, 30 bp, Artificial Sequence
  Synthetic oligonucleotide
gccactggtagcagcgcgactgggatggtg

SEQ ID NO: 432908 - DNA, 30 bp, Artificial Sequence
  Synthetic oligonucleotide
ggttcgagcgcatttccccaatcactggtg

SEQ ID NO: 432909 - DNA, 30 bp, Artificial Sequence
  Synthetic oligonucleotide
gggtatgagaatgatatctaaatactggtg

SEQ ID NO: 432910 - DNA, 30 bp, Artificial Sequence
  Synthetic oligonucleotide
gccgctggaaaatctccagattccctggtg

SEQ ID NO: 432911 - DNA, 30 bp, Artificial Sequence
  Synthetic oligonucleotide
acggacggcgcacaggttccctgcctggtg

SEQ ID NO: 432912 - DNA, 30 bp, Artificial Sequence
  Synthetic oligonucleotide
aaattgcagcagtattggcgcgtggtggtg

SEQ ID NO: 432913 - DNA, 30 bp, Artificial Sequence
  Synthetic oligonucleotide
ggtacggactgcttaacacccgaattggtg

SEQ ID NO: 432914 - DNA, 30 bp, Artificial Sequence
  Synthetic oligonucleotide
gggtcctagctgaaacgagacatattggtg

SEQ ID NO: 432915 - DNA, 30 bp, Artificial Sequence
  Synthetic oligonucleotide
cggcactgttatactggtggtatattggtg

SEQ ID NO: 432916 - DNA, 30 bp, Artificial Sequence
  Synthetic oligonucleotide
cagtgatcattcatgacctgcaggttggtg

SEQ ID NO: 432917 - DNA, 30 bp, Artificial Sequence
  Synthetic oligonucleotide
gacccccactgcctgtataccgggttggtg

SEQ ID NO: 432918 - DNA, 30 bp, Artificial Sequence
  Synthetic oligonucleotide
attggattaagtcttttgagacatttggtg

SEQ ID NO: 432919 - DNA, 30 bp, Artificial Sequence
  Synthetic oligonucleotide
taactaattgtcatgcccgctgttttggtg

SEQ ID NO: 432920 - DNA, 30 bp, Artificial Sequence
  Synthetic oligonucleotide
cgatacacccagaggggttctacaaatgtg

SEQ ID NO: 432921 - DNA, 30 bp, Artificial Sequence
  Synthetic oligonucleotide
tgtggtttattgatatacacttcaaatgtg

SEQ ID NO: 432922 - DNA, 30 bp, Artificial Sequence
  Synthetic oligonucleotide
ctatttttgcgtaggctgaaatcgaatgtg

SEQ ID NO: 432923 - DNA, 30 bp, Artificial Sequence
  Synthetic oligonucleotide
gcccccgaactggggcgagttgataatgtg

SEQ ID NO: 432924 - DNA, 30 bp, Artificial Sequence
  Synthetic oligonucleotide
ctctcggtctcgcttcgatgagctaatgtg

SEQ ID NO: 432925 - DNA, 30 bp, Artificial Sequence
  Synthetic oligonucleotide
agtgtttatcgccgcaccggaggacatgtg

SEQ ID NO: 432926 - DNA, 30 bp, Artificial Sequence
  Synthetic oligonucleotide
aagtgggggttgtcccccttcagccatgtg

SEQ ID NO: 432927 - DNA, 30 bp, Artificial Sequence
  Synthetic oligonucleotide
tcgtaatcgtgatgtgggcctttccatgtg

SEQ ID NO: 432928 - DNA, 30 bp, Artificial Sequence
  Synthetic oligonucleotide
aggtctcggtaggctactgactagcatgtg

SEQ ID NO: 432929 - DNA, 30 bp, Artificial Sequence
  Synthetic oligonucleotide
accaggtactgttatggtacgcggcatgtg

SEQ ID NO: 432930 - DNA, 30 bp, Artificial Sequence
  Synthetic oligonucleotide
ctcatgggccttcccagtagtgggcatgtg

SEQ ID NO: 432931 - DNA, 30 bp, Artificial Sequence
  Synthetic oligonucleotide
aatttgacttacaggttccggtatcatgtg

SEQ ID NO: 432932 - DNA, 30 bp, Artificial Sequence
  Synthetic oligonucleotide
gaaatggacctctgcttgggttgagatgtg

SEQ ID NO: 432933 - DNA, 30 bp, Artificial Sequence
  Synthetic oligonucleotide
gatattaagaatccgggtgttgtagatgtg

SEQ ID NO: 432934 - DNA, 30 bp, Artificial Sequence
  Synthetic oligonucleotide
aatctcggagggtcacataagtacgatgtg

SEQ ID NO: 432935 - DNA, 30 bp, Artificial Sequence
  Synthetic oligonucleotide
aaaacatggccgtagctatgccaggatgtg

SEQ ID NO: 432936 - DNA, 29 bp, Artificial Sequence
  Synthetic oligonucleotide
tgcttctaactatttatatgtgtgatgtg

SEQ ID NO: 432937 - DNA, 30 bp, Artificial Sequence
  Synthetic oligonucleotide
tatttcgttactactacagtcattgatgtg

SEQ ID NO: 432938 - DNA, 30 bp, Artificial Sequence
  Synthetic oligonucleotide
ataccttcatagggaacattgtgatatgtg

SEQ ID NO: 432939 - DNA, 30 bp, Artificial Sequence
  Synthetic oligonucleotide
gaagaatttacacaggtccgcttatatgtg

SEQ ID NO: 432940 - DNA, 30 bp, Artificial Sequence
  Synthetic oligonucleotide
tatgcgagcattgtacggtaagtctatgtg

SEQ ID NO: 432941 - DNA, 30 bp, Artificial Sequence
  Synthetic oligonucleotide
ccgattccgacgcggaacggggggtatgtg

SEQ ID NO: 432942 - DNA, 30 bp, Artificial Sequence
  Synthetic oligonucleotide
tccagcttatatgtaacggatcattatgtg

SEQ ID NO: 432943 - DNA, 30 bp, Artificial Sequence
  Synthetic oligonucleotide
gcgaccgaccggtacacttcgcacactgtg

SEQ ID NO: 432944 - DNA, 30 bp, Artificial Sequence
  Synthetic oligonucleotide
ttaaaattcagacattcgggcatcactgtg

SEQ ID NO: 432945 - DNA, 30 bp, Artificial Sequence
  Synthetic oligonucleotide
tgacttttatgatataatacagggactgtg

SEQ ID NO: 432946 - DNA, 30 bp, Artificial Sequence
  Synthetic oligonucleotide
aatctctgcctcttttaaaatagtactgtg

SEQ ID NO: 432947 - DNA, 30 bp, Artificial Sequence
  Synthetic oligonucleotide
agcagtccttcgtgaaccttaagacctgtg

SEQ ID NO: 432948 - DNA, 30 bp, Artificial Sequence
  Synthetic oligonucleotide
gaacccgtcaggggtctacttatacctgtg

SEQ ID NO: 432949 - DNA, 30 bp, Artificial Sequence
  Synthetic oligonucleotide
tgacacgataggggctaaaacgtacctgtg

SEQ ID NO: 432950 - DNA, 30 bp, Artificial Sequence
  Synthetic oligonucleotide
acatgaggcctgtgctttgtttaccctgtg

SEQ ID NO: 432951 - DNA, 30 bp, Artificial Sequence
  Synthetic oligonucleotide
ctaggatggcagagcaccagaacccctgtg

SEQ ID NO: 432952 - DNA, 30 bp, Artificial Sequence
  Synthetic oligonucleotide
caccaatcattacacatcacgcggcctgtg

SEQ ID NO: 432953 - DNA, 30 bp, Artificial Sequence
  Synthetic oligonucleotide
taatgttgggagggaattaggctgcctgtg

SEQ ID NO: 432954 - DNA, 30 bp, Artificial Sequence
  Synthetic oligonucleotide
gtccactctgctaagttggtccgtgctgtg

SEQ ID NO: 432955 - DNA, 30 bp, Artificial Sequence
  Synthetic oligonucleotide
tcaaacctctaagtgtttacttaatctgtg

SEQ ID NO: 432956 - DNA, 30 bp, Artificial Sequence
  Synthetic oligonucleotide
ggctcttctttatcggctacagagtctgtg

SEQ ID NO: 432957 - DNA, 30 bp, Artificial Sequence
  Synthetic oligonucleotide
tgcacgcgagccgattcgatttagtctgtg

SEQ ID NO: 432958 - DNA, 30 bp, Artificial Sequence
  Synthetic oligonucleotide
gaagaggccaccacttcgtagggaagtgtg

SEQ ID NO: 432959 - DNA, 30 bp, Artificial Sequence
  Synthetic oligonucleotide
cactcagcagataattctgataacagtgtg

SEQ ID NO: 432960 - DNA, 30 bp, Artificial Sequence
  Synthetic oligonucleotide
gagacaggcggattttcgtgacccagtgtg

SEQ ID NO: 432961 - DNA, 30 bp, Artificial Sequence
  Synthetic oligonucleotide
acaggccacgtgctacagattccaggtgtg

SEQ ID NO: 432962 - DNA, 30 bp, Artificial Sequence
  Synthetic oligonucleotide
attatctttagtccatacgatttatgtgtg

SEQ ID NO: 432963 - DNA, 30 bp, Artificial Sequence
  Synthetic oligonucleotide
tgaatattttaatattaaaaagactgtgtg

SEQ ID NO: 432964 - DNA, 30 bp, Artificial Sequence
  Synthetic oligonucleotide
ggcgtgtgtggtgctcatagacagtgtgtg

SEQ ID NO: 432965 - DNA, 30 bp, Artificial Sequence
  Synthetic oligonucleotide
aacgagtaaaatgcgcaaaatgggtgtgtg

SEQ ID NO: 432966 - DNA, 30 bp, Artificial Sequence
  Synthetic oligonucleotide
tgcaccttaaaagcttgtgttagaattgtg

SEQ ID NO: 432967 - DNA, 30 bp, Artificial Sequence
  Synthetic oligonucleotide
gggatgctattccgctcataacgaattgtg

SEQ ID NO: 432968 - DNA, 30 bp, Artificial Sequence
  Synthetic oligonucleotide
gtggttaagaccttcggtcggtgaattgtg

SEQ ID NO: 432969 - DNA, 30 bp, Artificial Sequence
  Synthetic oligonucleotide
actcagctcagattattgctgctcattgtg

SEQ ID NO: 432970 - DNA, 30 bp, Artificial Sequence
  Synthetic oligonucleotide
cttggttggcggtaccgttcggtcattgtg

SEQ ID NO: 432971 - DNA, 30 bp, Artificial Sequence
  Synthetic oligonucleotide
ttaggaaaccgtgtgaaagcgtttattgtg

SEQ ID NO: 432972 - DNA, 30 bp, Artificial Sequence
  Synthetic oligonucleotide
aattcgaatgtgttaagttcagaacttgtg

SEQ ID NO: 432973 - DNA, 30 bp, Artificial Sequence
  Synthetic oligonucleotide
tacgcaggaacaccaaagcgaacacttgtg

SEQ ID NO: 432974 - DNA, 30 bp, Artificial Sequence
  Synthetic oligonucleotide
aatagaggcgggacactggagacacttgtg

SEQ ID NO: 432975 - DNA, 30 bp, Artificial Sequence
  Synthetic oligonucleotide
ggagtttataactgtaatattacacttgtg

SEQ ID NO: 432976 - DNA, 30 bp, Artificial Sequence
  Synthetic oligonucleotide
aattgaattcatgtgtttcagggacttgtg

SEQ ID NO: 432977 - DNA, 30 bp, Artificial Sequence
  Synthetic oligonucleotide
cgtatgttactttgacagcagtgacttgtg

SEQ ID NO: 432978 - DNA, 30 bp, Artificial Sequence
  Synthetic oligonucleotide
ggaaatctattcgccgcatagtgacttgtg

SEQ ID NO: 432979 - DNA, 30 bp, Artificial Sequence
  Synthetic oligonucleotide
aagccattatagtaaaaagtggaccttgtg

SEQ ID NO: 432980 - DNA, 30 bp, Artificial Sequence
  Synthetic oligonucleotide
agccccttaagtcaattgttgtaccttgtg

SEQ ID NO: 432981 - DNA, 30 bp, Artificial Sequence
  Synthetic oligonucleotide
atcgaattgacgttccgcggccttcttgtg

SEQ ID NO: 432982 - DNA, 30 bp, Artificial Sequence
  Synthetic oligonucleotide
atcttggcgacacttttacttggagttgtg

SEQ ID NO: 432983 - DNA, 30 bp, Artificial Sequence
  Synthetic oligonucleotide
acacaattccggtaagaaacgcaggttgtg

SEQ ID NO: 432984 - DNA, 30 bp, Artificial Sequence
  Synthetic oligonucleotide
aagcggcgcaccaacggtattcgggttgtg

SEQ ID NO: 432985 - DNA, 30 bp, Artificial Sequence
  Synthetic oligonucleotide
gatgaagcccattgtcgtaaggatgttgtg

SEQ ID NO: 432986 - DNA, 30 bp, Artificial Sequence
  Synthetic oligonucleotide
atgaaggactcttaatcaactgctgttgtg

SEQ ID NO: 432987 - DNA, 30 bp, Artificial Sequence
  Synthetic oligonucleotide
taaaggtgttggttttactcacttgttgtg

SEQ ID NO: 432988 - DNA, 30 bp, Artificial Sequence
  Synthetic oligonucleotide
aatgtataggtgcttcgtatctaatttgtg

SEQ ID NO: 432989 - DNA, 30 bp, Artificial Sequence
  Synthetic oligonucleotide
tcaacgacccgattggcgcgttgatttgtg

SEQ ID NO: 432990 - DNA, 30 bp, Artificial Sequence
  Synthetic oligonucleotide
atacacatgcaagggccgttatactttgtg

SEQ ID NO: 432991 - DNA, 30 bp, Artificial Sequence
  Synthetic oligonucleotide
tctaatcagtatatactaacaacgtttgtg

SEQ ID NO: 432992 - DNA, 30 bp, Artificial Sequence
  Synthetic oligonucleotide
gctggcagcgaacagcatctcttgtttgtg

SEQ ID NO: 432993 - DNA, 30 bp, Artificial Sequence
  Synthetic oligonucleotide
accacggcattcgcacaccgattttttgtg

SEQ ID NO: 432994 - DNA, 30 bp, Artificial Sequence
  Synthetic oligonucleotide
gatccagaaatgagatcttcctaaaaattg

SEQ ID NO: 432995 - DNA, 30 bp, Artificial Sequence
  Synthetic oligonucleotide
gacgctcccttcatcaacaccagaaaattg

SEQ ID NO: 432996 - DNA, 30 bp, Artificial Sequence
  Synthetic oligonucleotide
gcttaataggattcaggacttggaaaattg

SEQ ID NO: 432997 - DNA, 30 bp, Artificial Sequence
  Synthetic oligonucleotide
attaatagatcgcttaatccgttaaaattg

SEQ ID NO: 432998 - DNA, 30 bp, Artificial Sequence
  Synthetic oligonucleotide
cagggatttaaaaatagcgggcgcaaattg

SEQ ID NO: 432999 - DNA, 30 bp, Artificial Sequence
  Synthetic oligonucleotide
ggtcctgtaatactgcgaatcctcaaattg

SEQ ID NO: 433000 - DNA, 30 bp, Artificial Sequence
  Synthetic oligonucleotide
actggtcgcaggtgcataatgttcaaattg

SEQ ID NO: 433001 - DNA, 30 bp, Artificial Sequence
  Synthetic oligonucleotide
gagcgatcggaaaataactatcggaaattg

SEQ ID NO: 433002 - DNA, 30 bp, Artificial Sequence
  Synthetic oligonucleotide
gcacttactctgtcgtttttccctaaattg

SEQ ID NO: 433003 - DNA, 30 bp, Artificial Sequence
  Synthetic oligonucleotide
acactgaccaagaccgcctctcaacaattg

SEQ ID NO: 433004 - DNA, 30 bp, Artificial Sequence
  Synthetic oligonucleotide
gaatctaactgtgaaagcgaggaacaattg

SEQ ID NO: 433005 - DNA, 30 bp, Artificial Sequence
  Synthetic oligonucleotide
ctcctgtcttcggagagcgcttaccaattg

SEQ ID NO: 433006 - DNA, 30 bp, Artificial Sequence
  Synthetic oligonucleotide
tcgctgttatctaagagtcctgtgcaattg

SEQ ID NO: 433007 - DNA, 30 bp, Artificial Sequence
  Synthetic oligonucleotide
ggttgtaaagcagcccaccatggtcaattg

SEQ ID NO: 433008 - DNA, 30 bp, Artificial Sequence
  Synthetic oligonucleotide
agactgccgtctaccccggcctaagaattg

SEQ ID NO: 433009 - DNA, 30 bp, Artificial Sequence
  Synthetic oligonucleotide
tattcgaacggaaaggccccgtaagaattg

SEQ ID NO: 433010 - DNA, 30 bp, Artificial Sequence
  Synthetic oligonucleotide
tttatataggtggacatcgttggagaattg

SEQ ID NO: 433011 - DNA, 30 bp, Artificial Sequence
  Synthetic oligonucleotide
ggtgtaatactcgatccgtgtagtgaattg

SEQ ID NO: 433012 - DNA, 30 bp, Artificial Sequence
  Synthetic oligonucleotide
gatatcaaactatactggaggaggtaattg

SEQ ID NO: 433013 - DNA, 30 bp, Artificial Sequence
  Synthetic oligonucleotide
tacaagggatataaggtttcttggtaattg

SEQ ID NO: 433014 - DNA, 30 bp, Artificial Sequence
  Synthetic oligonucleotide
tgtgtaagtgcccgtctccgagtgtaattg

SEQ ID NO: 433015 - DNA, 30 bp, Artificial Sequence
  Synthetic oligonucleotide
ttgcatgtgcacatggtatagaattaattg

SEQ ID NO: 433016 - DNA, 30 bp, Artificial Sequence
  Synthetic oligonucleotide
atttactttaactcgccctccatttaattg

SEQ ID NO: 433017 - DNA, 30 bp, Artificial Sequence
  Synthetic oligonucleotide
ctcctcaaatcactcgtagtggtaacattg

SEQ ID NO: 433018 - DNA, 30 bp, Artificial Sequence
  Synthetic oligonucleotide
acagatctggtagccgcgtcacagacattg

SEQ ID NO: 433019 - DNA, 30 bp, Artificial Sequence
  Synthetic oligonucleotide
caatatcttcgagtcgtattgtagacattg

SEQ ID NO: 433020 - DNA, 30 bp, Artificial Sequence
  Synthetic oligonucleotide
gccttaatgcaagtctacttgcatacattg

SEQ ID NO: 433021 - DNA, 30 bp, Artificial Sequence
  Synthetic oligonucleotide
catttgcggtttgcggcaaaacaaccattg

SEQ ID NO: 433022 - DNA, 30 bp, Artificial Sequence
  Synthetic oligonucleotide
acgcttgcacggtaggccatgagtccattg

SEQ ID NO: 433023 - DNA, 30 bp, Artificial Sequence
  Synthetic oligonucleotide
atcacaagcatgaatcctgtcattccattg

SEQ ID NO: 433024 - DNA, 30 bp, Artificial Sequence
  Synthetic oligonucleotide
ctttgacttttaagtaaacttacagcattg

SEQ ID NO: 433025 - DNA, 30 bp, Artificial Sequence
  Synthetic oligonucleotide
tcctaactaccacctcttgttttagcattg

SEQ ID NO: 433026 - DNA, 30 bp, Artificial Sequence
  Synthetic oligonucleotide
ggtagtgaaccctctgttctatccgcattg

SEQ ID NO: 433027 - DNA, 30 bp, Artificial Sequence
  Synthetic oligonucleotide
tatgactctattccgagggagctcgcattg

SEQ ID NO: 433028 - DNA, 30 bp, Artificial Sequence
  Synthetic oligonucleotide
gaattggatcacactgtgtgagcggcattg

SEQ ID NO: 433029 - DNA, 30 bp, Artificial Sequence
  Synthetic oligonucleotide
gatcgtataaaattgggacttggggcattg

SEQ ID NO: 433030 - DNA, 30 bp, Artificial Sequence
  Synthetic oligonucleotide
aagttatttatagcgcttggatgggcattg

SEQ ID NO: 433031 - DNA, 30 bp, Artificial Sequence
  Synthetic oligonucleotide
tcgctttttggagtatagtgttatgcattg

SEQ ID NO: 433032 - DNA, 30 bp, Artificial Sequence
  Synthetic oligonucleotide
aagtatactggtacaccagtggttgcattg

SEQ ID NO: 433033 - DNA, 30 bp, Artificial Sequence
  Synthetic oligonucleotide
tgtcatgggcgtaacgaggcggcatcattg

SEQ ID NO: 433034 - DNA, 30 bp, Artificial Sequence
  Synthetic oligonucleotide
cgagtgcatgatctaacgtcatactcattg

SEQ ID NO: 433035 - DNA, 29 bp, Artificial Sequence
  Synthetic oligonucleotide
gattgaaatcgcgctgtcgcggctcattg

SEQ ID NO: 433036 - DNA, 30 bp, Artificial Sequence
  Synthetic oligonucleotide
ctgaaatatgtcaactgcggcttgtcattg

SEQ ID NO: 433037 - DNA, 30 bp, Artificial Sequence
  Synthetic oligonucleotide
gtatgctatatagcagtgacgatttcattg

SEQ ID NO: 433038 - DNA, 30 bp, Artificial Sequence
  Synthetic oligonucleotide
cacgattaacgagtcgctgcatcaagattg

SEQ ID NO: 433039 - DNA, 30 bp, Artificial Sequence
  Synthetic oligonucleotide
tttcttagccgccaatttgcgggaagattg

SEQ ID NO: 433040 - DNA, 30 bp, Artificial Sequence
  Synthetic oligonucleotide
cgaattgattggttcagaatctgcagattg

SEQ ID NO: 433041 - DNA, 30 bp, Artificial Sequence
  Synthetic oligonucleotide
atatgttaggtgacataacggtagagattg

SEQ ID NO: 433042 - DNA, 30 bp, Artificial Sequence
  Synthetic oligonucleotide
caacgcaactcgttccgcgtaagacgattg

SEQ ID NO: 433043 - DNA, 30 bp, Artificial Sequence
  Synthetic oligonucleotide
atcataacgtctatctaacagggacgattg

SEQ ID NO: 433044 - DNA, 30 bp, Artificial Sequence
  Synthetic oligonucleotide
ttgcccttattatggagtcaagaccgattg

SEQ ID NO: 433045 - DNA, 30 bp, Artificial Sequence
  Synthetic oligonucleotide
tattatgaaggggagtcgtcgcagcgattg

SEQ ID NO: 433046 - DNA, 30 bp, Artificial Sequence
  Synthetic oligonucleotide
gtcacggtagtagtggtagagactcgattg

SEQ ID NO: 433047 - DNA, 30 bp, Artificial Sequence
  Synthetic oligonucleotide
tattgagttcgtgggttctataaaggattg

SEQ ID NO: 433048 - DNA, 30 bp, Artificial Sequence
  Synthetic oligonucleotide
tttgtggaaagtacctacataggaggattg

SEQ ID NO: 433049 - DNA, 30 bp, Artificial Sequence
  Synthetic oligonucleotide
atattcgccgaggagcgatctgccggattg

SEQ ID NO: 433050 - DNA, 30 bp, Artificial Sequence
  Synthetic oligonucleotide
tcggttttagacacggtagcccgtggattg

SEQ ID NO: 433051 - DNA, 30 bp, Artificial Sequence
  Synthetic oligonucleotide
tcctaaaacgtacttcaccattaatgattg

SEQ ID NO: 433052 - DNA, 30 bp, Artificial Sequence
  Synthetic oligonucleotide
aactgcttcaggtcgcatcaggcatgattg

SEQ ID NO: 433053 - DNA, 30 bp, Artificial Sequence
  Synthetic oligonucleotide
aaagagaccacccgccggtttggatgattg

SEQ ID NO: 433054 - DNA, 30 bp, Artificial Sequence
  Synthetic oligonucleotide
tccggcgacacctcttggctttagtgattg

SEQ ID NO: 433055 - DNA, 30 bp, Artificial Sequence
  Synthetic oligonucleotide
aatacttctggtatggcaccagggtgattg

SEQ ID NO: 433056 - DNA, 30 bp, Artificial Sequence
  Synthetic oligonucleotide
aacacttattcagtaatctgctaaatattg

SEQ ID NO: 433057 - DNA, 30 bp, Artificial Sequence
  Synthetic oligonucleotide
gagttagtgtttaaagcgctcagaatattg

SEQ ID NO: 433058 - DNA, 30 bp, Artificial Sequence
  Synthetic oligonucleotide
taggctcttcggggattgctaataatattg

SEQ ID NO: 433059 - DNA, 30 bp, Artificial Sequence
  Synthetic oligonucleotide
tcgctagcggcgccctcgccaaacatattg

SEQ ID NO: 433060 - DNA, 30 bp, Artificial Sequence
  Synthetic oligonucleotide
gcgtgtgatccgtcaagttacggcatattg

SEQ ID NO: 433061 - DNA, 30 bp, Artificial Sequence
  Synthetic oligonucleotide
tggtcttttagagccacgtggtagatattg

SEQ ID NO: 433062 - DNA, 30 bp, Artificial Sequence
  Synthetic oligonucleotide
gtgtgatttagaggattaaggacgatattg

SEQ ID NO: 433063 - DNA, 30 bp, Artificial Sequence
  Synthetic oligonucleotide
gttggtttaatgtaaactctacatatattg

SEQ ID NO: 433064 - DNA, 31 bp, Artificial Sequence
  Synthetic oligonucleotide
gcttggaagaagggtaccgaacattatattg

SEQ ID NO: 433065 - DNA, 30 bp, Artificial Sequence
  Synthetic oligonucleotide
tacgcgcttttaagaaatgcgtgactattg

SEQ ID NO: 433066 - DNA, 30 bp, Artificial Sequence
  Synthetic oligonucleotide
agtccgacagaacctcaggttgtactattg

SEQ ID NO: 433067 - DNA, 30 bp, Artificial Sequence
  Synthetic oligonucleotide
cgacgtgtgtcgacagccgccaccctattg

SEQ ID NO: 433068 - DNA, 30 bp, Artificial Sequence
  Synthetic oligonucleotide
cagtaggaggggcaacaatgacccctattg

SEQ ID NO: 433069 - DNA, 30 bp, Artificial Sequence
  Synthetic oligonucleotide
catactgtaaagtgaagcactttcctattg

SEQ ID NO: 433070 - DNA, 30 bp, Artificial Sequence
  Synthetic oligonucleotide
agttttttgggtccgtaacacatgctattg

SEQ ID NO: 433071 - DNA, 30 bp, Artificial Sequence
  Synthetic oligonucleotide
ctggagttcgactgttactagagtctattg

SEQ ID NO: 433072 - DNA, 30 bp, Artificial Sequence
  Synthetic oligonucleotide
ttcgtcgccaattatggaaaggttctattg

SEQ ID NO: 433073 - DNA, 30 bp, Artificial Sequence
  Synthetic oligonucleotide
gaaattatacaacttctcggacaagtattg

SEQ ID NO: 433074 - DNA, 30 bp, Artificial Sequence
  Synthetic oligonucleotide
ggcatcgacgcatcaacgatggaagtattg

SEQ ID NO: 433075 - DNA, 30 bp, Artificial Sequence
  Synthetic oligonucleotide
ttaatttttcctgcgctatctttcgtattg

SEQ ID NO: 433076 - DNA, 30 bp, Artificial Sequence
  Synthetic oligonucleotide
aaggacgtacggcaataccgggcggtattg

SEQ ID NO: 433077 - DNA, 29 bp, Artificial Sequence
  Synthetic oligonucleotide
acccgctccgggttacaaattatgtattg

SEQ ID NO: 433078 - DNA, 30 bp, Artificial Sequence
  Synthetic oligonucleotide
tgcctgtcaactcactcatgagcattattg

SEQ ID NO: 433079 - DNA, 30 bp, Artificial Sequence
  Synthetic oligonucleotide
gaataaaggttcatttataccgtattattg

SEQ ID NO: 433080 - DNA, 30 bp, Artificial Sequence
  Synthetic oligonucleotide
atcatctggcgactgatggaccgcttattg

SEQ ID NO: 433081 - DNA, 30 bp, Artificial Sequence
  Synthetic oligonucleotide
ttcgggacacggatactcagaatcttattg

SEQ ID NO: 433082 - DNA, 30 bp, Artificial Sequence
  Synthetic oligonucleotide
aaaattgattggttagtagacttgttattg

SEQ ID NO: 433083 - DNA, 30 bp, Artificial Sequence
  Synthetic oligonucleotide
ggttttgacgaaccctttggcaacaacttg

SEQ ID NO: 433084 - DNA, 30 bp, Artificial Sequence
  Synthetic oligonucleotide
gcaccccgacaatgggggtcaagcaacttg

SEQ ID NO: 433085 - DNA, 30 bp, Artificial Sequence
  Synthetic oligonucleotide
ttgtcgttccgggggggtgggcgcaacttg

SEQ ID NO: 433086 - DNA, 30 bp, Artificial Sequence
  Synthetic oligonucleotide
ttgggtggcagtccgataggtggcaacttg

SEQ ID NO: 433087 - DNA, 30 bp, Artificial Sequence
  Synthetic oligonucleotide
tcacatgggttttggcttcgcacgaacttg

SEQ ID NO: 433088 - DNA, 30 bp, Artificial Sequence
  Synthetic oligonucleotide
aagtacggaatataaaaacgccggaacttg

SEQ ID NO: 433089 - DNA, 30 bp, Artificial Sequence
  Synthetic oligonucleotide
aacagggccgttaaatgtagggtgaacttg

SEQ ID NO: 433090 - DNA, 30 bp, Artificial Sequence
  Synthetic oligonucleotide
ttaatagggcaatgcatccggcaacacttg

SEQ ID NO: 433091 - DNA, 30 bp, Artificial Sequence
  Synthetic oligonucleotide
catttttgttgtgacactgggttacacttg

SEQ ID NO: 433092 - DNA, 30 bp, Artificial Sequence
  Synthetic oligonucleotide
gtgtgacatgataagcaatgtcggcacttg

SEQ ID NO: 433093 - DNA, 30 bp, Artificial Sequence
  Synthetic oligonucleotide
ataggtttagatttatgtagggatcacttg

SEQ ID NO: 433094 - DNA, 30 bp, Artificial Sequence
  Synthetic oligonucleotide
ctggtgagccttacgtagctcggtcacttg

SEQ ID NO: 433095 - DNA, 30 bp, Artificial Sequence
  Synthetic oligonucleotide
gtctcatctattctccgccggcaagacttg

SEQ ID NO: 433096 - DNA, 30 bp, Artificial Sequence
  Synthetic oligonucleotide
atcagccgtacctgcttagaggtagacttg

SEQ ID NO: 433097 - DNA, 30 bp, Artificial Sequence
  Synthetic oligonucleotide
gttcaattaagcgctaatagtcgcgacttg

SEQ ID NO: 433098 - DNA, 30 bp, Artificial Sequence
  Synthetic oligonucleotide
gacaggtatacggcaaacgctgaggacttg

SEQ ID NO: 433099 - DNA, 30 bp, Artificial Sequence
  Synthetic oligonucleotide
atctgttaattctttgtttcttaggacttg

SEQ ID NO: 433100 - DNA, 30 bp, Artificial Sequence
  Synthetic oligonucleotide
aaaacttccgggatcggcaagccatacttg

SEQ ID NO: 433101 - DNA, 30 bp, Artificial Sequence
  Synthetic oligonucleotide
taatataacccgcggtgaagactatacttg

SEQ ID NO: 433102 - DNA, 30 bp, Artificial Sequence
  Synthetic oligonucleotide
ggtgaaaaacggaagacgccgctatacttg

SEQ ID NO: 433103 - DNA, 30 bp, Artificial Sequence
  Synthetic oligonucleotide
aaggtagaggcgcggcgggggctctacttg

SEQ ID NO: 433104 - DNA, 30 bp, Artificial Sequence
  Synthetic oligonucleotide
tcgcggcaagtggaacaaaactagtacttg

SEQ ID NO: 433105 - DNA, 30 bp, Artificial Sequence
  Synthetic oligonucleotide
accaaaaagacttcgacgaattggtacttg

SEQ ID NO: 433106 - DNA, 30 bp, Artificial Sequence
  Synthetic oligonucleotide
tagacacctatacgagtaattatttacttg

SEQ ID NO: 433107 - DNA, 30 bp, Artificial Sequence
  Synthetic oligonucleotide
ttttatctttgttattgaatggagaccttg

SEQ ID NO: 433108 - DNA, 30 bp, Artificial Sequence
  Synthetic oligonucleotide
agacttaccggacacgattgcaggaccttg

SEQ ID NO: 433109 - DNA, 30 bp, Artificial Sequence
  Synthetic oligonucleotide
aaattggattgatggaaggacactaccttg

SEQ ID NO: 433110 - DNA, 30 bp, Artificial Sequence
  Synthetic oligonucleotide
accacgtttaggtaggtattctcacccttg

SEQ ID NO: 433111 - DNA, 30 bp, Artificial Sequence
  Synthetic oligonucleotide
ctcagcgacagcgttttttagggacccttg

SEQ ID NO: 433112 - DNA, 30 bp, Artificial Sequence
  Synthetic oligonucleotide
cattacgtctgggtggggtgataccccttg

SEQ ID NO: 433113 - DNA, 30 bp, Artificial Sequence
  Synthetic oligonucleotide
ccggtgttcccaatccactggaaagccttg

SEQ ID NO: 433114 - DNA, 29 bp, Artificial Sequence
  Synthetic oligonucleotide
ctagtcaggtgtcatacgaaggagccttg

SEQ ID NO: 433115 - DNA, 30 bp, Artificial Sequence
  Synthetic oligonucleotide
tccgcagcaacagcccagtcacacgccttg

SEQ ID NO: 433116 - DNA, 30 bp, Artificial Sequence
  Synthetic oligonucleotide
tgtgaggtctaatctaacacggaggccttg

SEQ ID NO: 433117 - DNA, 30 bp, Artificial Sequence
  Synthetic oligonucleotide
ctaaagtggacagacacgcacagggccttg

SEQ ID NO: 433118 - DNA, 30 bp, Artificial Sequence
  Synthetic oligonucleotide
cggtcaggcaaatagaattaacgggccttg

SEQ ID NO: 433119 - DNA, 30 bp, Artificial Sequence
  Synthetic oligonucleotide
ggaagtgccgcttttatacgttgggccttg

SEQ ID NO: 433120 - DNA, 30 bp, Artificial Sequence
  Synthetic oligonucleotide
atattaaacattcaatagcgtaaatccttg

SEQ ID NO: 433121 - DNA, 30 bp, Artificial Sequence
  Synthetic oligonucleotide
gggatatgactgttagagcacgcatccttg

SEQ ID NO: 433122 - DNA, 30 bp, Artificial Sequence
  Synthetic oligonucleotide
ggccttgggtcatcattccacggatccttg

SEQ ID NO: 433123 - DNA, 30 bp, Artificial Sequence
  Synthetic oligonucleotide
gagtcccccactcctaggggactatccttg

SEQ ID NO: 433124 - DNA, 30 bp, Artificial Sequence
  Synthetic oligonucleotide
gaatacatacttgaacagccgcgttccttg

SEQ ID NO: 433125 - DNA, 30 bp, Artificial Sequence
  Synthetic oligonucleotide
ttgtttccccttcgccttgctgcaagcttg

SEQ ID NO: 433126 - DNA, 30 bp, Artificial Sequence
  Synthetic oligonucleotide
aagtgtgactcagctattaacgtaagcttg

SEQ ID NO: 433127 - DNA, 30 bp, Artificial Sequence
  Synthetic oligonucleotide
gagggttaagggttatttgttcacagcttg

SEQ ID NO: 433128 - DNA, 30 bp, Artificial Sequence
  Synthetic oligonucleotide
aggcaacttgcttccaatgaaggcagcttg

SEQ ID NO: 433129 - DNA, 30 bp, Artificial Sequence
  Synthetic oligonucleotide
cccgccagatgcgaacttggttgtagcttg

SEQ ID NO: 433130 - DNA, 30 bp, Artificial Sequence
  Synthetic oligonucleotide
agtccgggattactagggattcgacgcttg

SEQ ID NO: 433131 - DNA, 30 bp, Artificial Sequence
  Synthetic oligonucleotide
atcaccctcttaaactcctttttacgcttg

SEQ ID NO: 433132 - DNA, 30 bp, Artificial Sequence
  Synthetic oligonucleotide
agttatcgttgtcacttctgagagcgcttg

SEQ ID NO: 433133 - DNA, 30 bp, Artificial Sequence
  Synthetic oligonucleotide
tggaaaaacaataatcaatatgagcgcttg

SEQ ID NO: 433134 - DNA, 30 bp, Artificial Sequence
  Synthetic oligonucleotide
agctggaagtttagggtatattagcgcttg

SEQ ID NO: 433135 - DNA, 30 bp, Artificial Sequence
  Synthetic oligonucleotide
agtttaatacgttactgttatgcgcgcttg

SEQ ID NO: 433136 - DNA, 30 bp, Artificial Sequence
  Synthetic oligonucleotide
actttcagccatgacgctcgacatcgcttg

SEQ ID NO: 433137 - DNA, 30 bp, Artificial Sequence
  Synthetic oligonucleotide
tctcggaattgctgctagcgtcatcgcttg

SEQ ID NO: 433138 - DNA, 30 bp, Artificial Sequence
  Synthetic oligonucleotide
tgtactccgtggggtcaagtgcttcgcttg

SEQ ID NO: 433139 - DNA, 30 bp, Artificial Sequence
  Synthetic oligonucleotide
cttcaccaatgccgatgaccgggaggcttg

SEQ ID NO: 433140 - DNA, 30 bp, Artificial Sequence
  Synthetic oligonucleotide
gcgcaatttatatatatcacctcgggcttg

SEQ ID NO: 433141 - DNA, 30 bp, Artificial Sequence
  Synthetic oligonucleotide
ttgggcaatggtcacgcgcttcggggcttg

SEQ ID NO: 433142 - DNA, 30 bp, Artificial Sequence
  Synthetic oligonucleotide
gtcaaacacagcgttattatcctgggcttg

SEQ ID NO: 433143 - DNA, 30 bp, Artificial Sequence
  Synthetic oligonucleotide
ggcgggattctatctcgacgccatggcttg

SEQ ID NO: 433144 - DNA, 30 bp, Artificial Sequence
  Synthetic oligonucleotide
cggtggaatcggctagggtaccaatgcttg

SEQ ID NO: 433145 - DNA, 30 bp, Artificial Sequence
  Synthetic oligonucleotide
gtaggatcacggggtggcggtcaatgcttg

SEQ ID NO: 433146 - DNA, 30 bp, Artificial Sequence
  Synthetic oligonucleotide
atgagaacgagggtctgatggagatgcttg

SEQ ID NO: 433147 - DNA, 30 bp, Artificial Sequence
  Synthetic oligonucleotide
aaagtgcgatgatggctacacggctgcttg

SEQ ID NO: 433148 - DNA, 30 bp, Artificial Sequence
  Synthetic oligonucleotide
ggcacacaactgccaaggtctttctgcttg

SEQ ID NO: 433149 - DNA, 30 bp, Artificial Sequence
  Synthetic oligonucleotide
gacagatgataggtactggtcagttgcttg

SEQ ID NO: 433150 - DNA, 30 bp, Artificial Sequence
  Synthetic oligonucleotide
gacaagtactttccacgaaagcgaatcttg

SEQ ID NO: 433151 - DNA, 30 bp, Artificial Sequence
  Synthetic oligonucleotide
ttctgcgggttacgtgctttttacatcttg

SEQ ID NO: 433152 - DNA, 30 bp, Artificial Sequence
  Synthetic oligonucleotide
gccaaagtttaaatgactacagccatcttg

SEQ ID NO: 433153 - DNA, 31 bp, Artificial Sequence
  Synthetic oligonucleotide
taccttgatctattactacgagaggatcttg

SEQ ID NO: 433154 - DNA, 30 bp, Artificial Sequence
  Synthetic oligonucleotide
gaccaaggctatactgcgagtaggatcttg

SEQ ID NO: 433155 - DNA, 30 bp, Artificial Sequence
  Synthetic oligonucleotide
ttcgcccacttacccgctgaagggatcttg

SEQ ID NO: 433156 - DNA, 30 bp, Artificial Sequence
  Synthetic oligonucleotide
cagacacggtacagtgctgcttatatcttg

SEQ ID NO: 433157 - DNA, 30 bp, Artificial Sequence
  Synthetic oligonucleotide
tcgttaatgacgcaatctggcagtatcttg

SEQ ID NO: 433158 - DNA, 30 bp, Artificial Sequence
  Synthetic oligonucleotide
ccacgaaccctcagtgcgagtcagctcttg

SEQ ID NO: 433159 - DNA, 30 bp, Artificial Sequence
  Synthetic oligonucleotide
gcagttggtatagagggtaggtgtctcttg

SEQ ID NO: 433160 - DNA, 30 bp, Artificial Sequence
  Synthetic oligonucleotide
tattgtccataaacagccacttcagtcttg

SEQ ID NO: 433161 - DNA, 30 bp, Artificial Sequence
  Synthetic oligonucleotide
gatcggcatcaaagacttagcctagtcttg

SEQ ID NO: 433162 - DNA, 30 bp, Artificial Sequence
  Synthetic oligonucleotide
gagtaagcgctggctattcgcacattcttg

SEQ ID NO: 433163 - DNA, 30 bp, Artificial Sequence
  Synthetic oligonucleotide
actgatatgagacgcccactgccattcttg

SEQ ID NO: 433164 - DNA, 30 bp, Artificial Sequence
  Synthetic oligonucleotide
gctagccgggtcggtaaacaagagttcttg

SEQ ID NO: 433165 - DNA, 30 bp, Artificial Sequence
  Synthetic oligonucleotide
gggggggggctgctttaccgggacaagttg

SEQ ID NO: 433166 - DNA, 30 bp, Artificial Sequence
  Synthetic oligonucleotide
ccctcgcgactaacgcgcacttgcaagttg

SEQ ID NO: 433167 - DNA, 30 bp, Artificial Sequence
  Synthetic oligonucleotide
cggcgcgttattttgctcatagcgaagttg

SEQ ID NO: 433168 - DNA, 30 bp, Artificial Sequence
  Synthetic oligonucleotide
ggtctctgacaactaatcaatgataagttg

SEQ ID NO: 433169 - DNA, 30 bp, Artificial Sequence
  Synthetic oligonucleotide
gacaactttggttgtacatgaaaacagttg

SEQ ID NO: 433170 - DNA, 30 bp, Artificial Sequence
  Synthetic oligonucleotide
taaacttctttacaggaatcactccagttg

SEQ ID NO: 433171 - DNA, 30 bp, Artificial Sequence
  Synthetic oligonucleotide
gatttagtggtattccattcatcgcagttg

SEQ ID NO: 433172 - DNA, 30 bp, Artificial Sequence
  Synthetic oligonucleotide
aacctaggaggccccggtaaaactcagttg

SEQ ID NO: 433173 - DNA, 30 bp, Artificial Sequence
  Synthetic oligonucleotide
aatgagtcctgagatcatgccgctcagttg

SEQ ID NO: 433174 - DNA, 30 bp, Artificial Sequence
  Synthetic oligonucleotide
aattgtggaagggcctaaaacattcagttg

SEQ ID NO: 433175 - DNA, 30 bp, Artificial Sequence
  Synthetic oligonucleotide
ttaatacacatgaatattcaataagagttg

SEQ ID NO: 433176 - DNA, 30 bp, Artificial Sequence
  Synthetic oligonucleotide
ttccgatgcacgaggcagttctcatagttg

SEQ ID NO: 433177 - DNA, 30 bp, Artificial Sequence
  Synthetic oligonucleotide
gagtggctgagggcacgtgtgagatagttg

SEQ ID NO: 433178 - DNA, 30 bp, Artificial Sequence
  Synthetic oligonucleotide
gacggtcctatcagatcaactttctagttg

SEQ ID NO: 433179 - DNA, 30 bp, Artificial Sequence
  Synthetic oligonucleotide
ggagaggcgaggcggttttattggtagttg

SEQ ID NO: 433180 - DNA, 30 bp, Artificial Sequence
  Synthetic oligonucleotide
gccgtgtgtccaagagatttcccttagttg

SEQ ID NO: 433181 - DNA, 30 bp, Artificial Sequence
  Synthetic oligonucleotide
gacgtctcggacggtagtcttctaacgttg

SEQ ID NO: 433182 - DNA, 30 bp, Artificial Sequence
  Synthetic oligonucleotide
gtagtctattagtcagaatatttaacgttg

SEQ ID NO: 433183 - DNA, 30 bp, Artificial Sequence
  Synthetic oligonucleotide
tgagttgacgtggatactctgtacacgttg

SEQ ID NO: 433184 - DNA, 30 bp, Artificial Sequence
  Synthetic oligonucleotide
aaaatcacttgaaactgatacggcacgttg

SEQ ID NO: 433185 - DNA, 30 bp, Artificial Sequence
  Synthetic oligonucleotide
ttttgtattttcccgtttaagatcacgttg

SEQ ID NO: 433186 - DNA, 30 bp, Artificial Sequence
  Synthetic oligonucleotide
gtgaataaaccagcctaagtattgacgttg

SEQ ID NO: 433187 - DNA, 30 bp, Artificial Sequence
  Synthetic oligonucleotide
tacaacgatcagtgtgccgtcactacgttg

SEQ ID NO: 433188 - DNA, 30 bp, Artificial Sequence
  Synthetic oligonucleotide
aaacctcgggcttactccaatcccccgttg

SEQ ID NO: 433189 - DNA, 30 bp, Artificial Sequence
  Synthetic oligonucleotide
ctgcgtttctgtaatggaatgtgcccgttg

SEQ ID NO: 433190 - DNA, 30 bp, Artificial Sequence
  Synthetic oligonucleotide
aacacctcgtcacttgacgtacggccgttg

SEQ ID NO: 433191 - DNA, 30 bp, Artificial Sequence
  Synthetic oligonucleotide
ggaccgctcgcttggtctcgttgagcgttg

SEQ ID NO: 433192 - DNA, 30 bp, Artificial Sequence
  Synthetic oligonucleotide
accttgcgtaaagcgcagctcggtgcgttg

SEQ ID NO: 433193 - DNA, 30 bp, Artificial Sequence
  Synthetic oligonucleotide
acgaatggtaagttgattagcttatcgttg

SEQ ID NO: 433194 - DNA, 30 bp, Artificial Sequence
  Synthetic oligonucleotide
gcacgacacgtccgggcatatgtctcgttg

SEQ ID NO: 433195 - DNA, 30 bp, Artificial Sequence
  Synthetic oligonucleotide
ctgcacaacaaatctgtaaaggggtcgttg

SEQ ID NO: 433196 - DNA, 30 bp, Artificial Sequence
  Synthetic oligonucleotide
actgaatcctcgtccgatcgcggttcgttg

SEQ ID NO: 433197 - DNA, 30 bp, Artificial Sequence
  Synthetic oligonucleotide
aacacgtcgccttttcacacactttcgttg

SEQ ID NO: 433198 - DNA, 30 bp, Artificial Sequence
  Synthetic oligonucleotide
ctcatctactttgaagaaagtagacggttg

SEQ ID NO: 433199 - DNA, 30 bp, Artificial Sequence
  Synthetic oligonucleotide
aggtccatgggtaggtagtgcagccggttg

SEQ ID NO: 433200 - DNA, 30 bp, Artificial Sequence
  Synthetic oligonucleotide
taggcgcacccacggcgcctaggccggttg

SEQ ID NO: 433201 - DNA, 30 bp, Artificial Sequence
  Synthetic oligonucleotide
cgttcactaaaactttgtaagatccggttg

SEQ ID NO: 433202 - DNA, 30 bp, Artificial Sequence
  Synthetic oligonucleotide
ctttagcggctacatgcatgatttcggttg

SEQ ID NO: 433203 - DNA, 30 bp, Artificial Sequence
  Synthetic oligonucleotide
aagatgtatatctaactgaggacagggttg

SEQ ID NO: 433204 - DNA, 30 bp, Artificial Sequence
  Synthetic oligonucleotide
cctactttgggcaccccggatacagggttg

SEQ ID NO: 433205 - DNA, 30 bp, Artificial Sequence
  Synthetic oligonucleotide
agaagaactccttagactttttcagggttg

SEQ ID NO: 433206 - DNA, 30 bp, Artificial Sequence
  Synthetic oligonucleotide
cttcggttaaagagctaggttctagggttg

SEQ ID NO: 433207 - DNA, 30 bp, Artificial Sequence
  Synthetic oligonucleotide
attcacgcactttcagtcttaagcgggttg

SEQ ID NO: 433208 - DNA, 30 bp, Artificial Sequence
  Synthetic oligonucleotide
tggagcttgcacatgtgccaagaggggttg

SEQ ID NO: 433209 - DNA, 30 bp, Artificial Sequence
  Synthetic oligonucleotide
caggacgcatgggttcctcttccggggttg

SEQ ID NO: 433210 - DNA, 30 bp, Artificial Sequence
  Synthetic oligonucleotide
gctacgacggctagttgcaaagaatggttg

SEQ ID NO: 433211 - DNA, 30 bp, Artificial Sequence
  Synthetic oligonucleotide
gaagctagggtgttcaggacaatatggttg

SEQ ID NO: 433212 - DNA, 30 bp, Artificial Sequence
  Synthetic oligonucleotide
tttcgggcagaggtctatcctttatggttg

SEQ ID NO: 433213 - DNA, 30 bp, Artificial Sequence
  Synthetic oligonucleotide
gtatttctcggctgaaaacaccactggttg

SEQ ID NO: 433214 - DNA, 30 bp, Artificial Sequence
  Synthetic oligonucleotide
gtatatacctcatggggtcagacttggttg

SEQ ID NO: 433215 - DNA, 30 bp, Artificial Sequence
  Synthetic oligonucleotide
ggcccctccgataagactgttagttggttg

SEQ ID NO: 433216 - DNA, 30 bp, Artificial Sequence
  Synthetic oligonucleotide
gccagaatcccatccttaccgcggatgttg

SEQ ID NO: 433217 - DNA, 30 bp, Artificial Sequence
  Synthetic oligonucleotide
gcggatttcaaacggccgtctttgatgttg

SEQ ID NO: 433218 - DNA, 30 bp, Artificial Sequence
  Synthetic oligonucleotide
aatcctagctttccatggcgtcctatgttg

SEQ ID NO: 433219 - DNA, 30 bp, Artificial Sequence
  Synthetic oligonucleotide
atctgtaacgttgtgaataaaagtctgttg

SEQ ID NO: 433220 - DNA, 30 bp, Artificial Sequence
  Synthetic oligonucleotide
tgtggcagcgacaacgatatgaacgtgttg

SEQ ID NO: 433221 - DNA, 30 bp, Artificial Sequence
  Synthetic oligonucleotide
ctttacacgctagattccaaaattgtgttg

SEQ ID NO: 433222 - DNA, 30 bp, Artificial Sequence
  Synthetic oligonucleotide
ataaggcggaatcaacggtggtttgtgttg

SEQ ID NO: 433223 - DNA, 30 bp, Artificial Sequence
  Synthetic oligonucleotide
ggtgttgtgctacctgtgttacaattgttg

SEQ ID NO: 433224 - DNA, 30 bp, Artificial Sequence
  Synthetic oligonucleotide
gcagtattggttaataactttagcttgttg

SEQ ID NO: 433225 - DNA, 30 bp, Artificial Sequence
  Synthetic oligonucleotide
gggcccctttgtaatagtcgtaggttgttg

SEQ ID NO: 433226 - DNA, 30 bp, Artificial Sequence
  Synthetic oligonucleotide
aaacagtcagacattttcgatatgttgttg

SEQ ID NO: 433227 - DNA, 30 bp, Artificial Sequence
  Synthetic oligonucleotide
gcatatcacaacaataattaatatttgttg

SEQ ID NO: 433228 - DNA, 30 bp, Artificial Sequence
  Synthetic oligonucleotide
gcatttacgcatttaggactcgtaaatttg

SEQ ID NO: 433229 - DNA, 30 bp, Artificial Sequence
  Synthetic oligonucleotide
attctacttaagttgtactcacccaatttg

SEQ ID NO: 433230 - DNA, 30 bp, Artificial Sequence
  Synthetic oligonucleotide
atatgtaaatgttggctagggttcaatttg

SEQ ID NO: 433231 - DNA, 30 bp, Artificial Sequence
  Synthetic oligonucleotide
tggaccggtccgggccttttggctaatttg

SEQ ID NO: 433232 - DNA, 30 bp, Artificial Sequence
  Synthetic oligonucleotide
gtgcggaattcggtgagtctatcgcatttg

SEQ ID NO: 433233 - DNA, 30 bp, Artificial Sequence
  Synthetic oligonucleotide
atgcagcagcaggacttatcctggcatttg

SEQ ID NO: 433234 - DNA, 30 bp, Artificial Sequence
  Synthetic oligonucleotide
gactagttcctgtcgcttaacaatcatttg

SEQ ID NO: 433235 - DNA, 30 bp, Artificial Sequence
  Synthetic oligonucleotide
gagagtacgcatatcggtttttgtcatttg

SEQ ID NO: 433236 - DNA, 30 bp, Artificial Sequence
  Synthetic oligonucleotide
tcggacttatccactgtagccattcatttg

SEQ ID NO: 433237 - DNA, 30 bp, Artificial Sequence
  Synthetic oligonucleotide
gtttattcagtctggttaatacgagatttg

SEQ ID NO: 433238 - DNA, 30 bp, Artificial Sequence
  Synthetic oligonucleotide
ctcgttaaacatggctatagccacgatttg

SEQ ID NO: 433239 - DNA, 30 bp, Artificial Sequence
  Synthetic oligonucleotide
cgcgtttgaaccttgtatcaaaccgatttg

SEQ ID NO: 433240 - DNA, 30 bp, Artificial Sequence
  Synthetic oligonucleotide
atcagagccttcctggtttgggcggatttg

SEQ ID NO: 433241 - DNA, 30 bp, Artificial Sequence
  Synthetic oligonucleotide
ggggctgggctctatttaccgggggatttg

SEQ ID NO: 433242 - DNA, 30 bp, Artificial Sequence
  Synthetic oligonucleotide
ggcgctggcacagcggaccgcactgatttg

SEQ ID NO: 433243 - DNA, 30 bp, Artificial Sequence
  Synthetic oligonucleotide
atgcataccctcggcaaattttaatatttg

SEQ ID NO: 433244 - DNA, 30 bp, Artificial Sequence
  Synthetic oligonucleotide
agaagccgactcacagtctagtactatttg

SEQ ID NO: 433245 - DNA, 30 bp, Artificial Sequence
  Synthetic oligonucleotide
atgatgatcgcatctcaagaatgctatttg

SEQ ID NO: 433246 - DNA, 30 bp, Artificial Sequence
  Synthetic oligonucleotide
ggatttgcacgtttgagacaagcgtatttg

SEQ ID NO: 433247 - DNA, 30 bp, Artificial Sequence
  Synthetic oligonucleotide
ggcagcttcatacgccttgtactttatttg

SEQ ID NO: 433248 - DNA, 30 bp, Artificial Sequence
  Synthetic oligonucleotide
gtgatagtcgttgttacgtcaacaactttg

SEQ ID NO: 433249 - DNA, 30 bp, Artificial Sequence
  Synthetic oligonucleotide
gcgggaaattctgcgtggaatttaactttg

SEQ ID NO: 433250 - DNA, 30 bp, Artificial Sequence
  Synthetic oligonucleotide
gaagctcctctcgttcgtagctagactttg

SEQ ID NO: 433251 - DNA, 30 bp, Artificial Sequence
  Synthetic oligonucleotide
gttttactcgtagtcgggagtaggactttg

SEQ ID NO: 433252 - DNA, 30 bp, Artificial Sequence
  Synthetic oligonucleotide
ggaaagatgactccacgcaacgggactttg

SEQ ID NO: 433253 - DNA, 30 bp, Artificial Sequence
  Synthetic oligonucleotide
gggataccgtgtcattggacgcgtactttg

SEQ ID NO: 433254 - DNA, 30 bp, Artificial Sequence
  Synthetic oligonucleotide
ttagcccgtaatcgtgtcacgattactttg

SEQ ID NO: 433255 - DNA, 30 bp, Artificial Sequence
  Synthetic oligonucleotide
atccacaggtttcaaagacggagacctttg

SEQ ID NO: 433256 - DNA, 30 bp, Artificial Sequence
  Synthetic oligonucleotide
cgggctttctagccaatccaacgacctttg

SEQ ID NO: 433257 - DNA, 30 bp, Artificial Sequence
  Synthetic oligonucleotide
agtacactctccagtatagattggcctttg

SEQ ID NO: 433258 - DNA, 31 bp, Artificial Sequence
  Synthetic oligonucleotide
acttgatctggtgtctcttcatgttcctttg

SEQ ID NO: 433259 - DNA, 30 bp, Artificial Sequence
  Synthetic oligonucleotide
attcggtggcactgctgattttttcctttg

SEQ ID NO: 433260 - DNA, 30 bp, Artificial Sequence
  Synthetic oligonucleotide
gtggggaattatatcatcgcgtaagctttg

SEQ ID NO: 433261 - DNA, 30 bp, Artificial Sequence
  Synthetic oligonucleotide
tcacttgaacacacagcttccatagctttg

SEQ ID NO: 433262 - DNA, 30 bp, Artificial Sequence
  Synthetic oligonucleotide
tctaacagttatcatttaatcgccgctttg

SEQ ID NO: 433263 - DNA, 30 bp, Artificial Sequence
  Synthetic oligonucleotide
aatcaccgtccgatctaccagagcgctttg

SEQ ID NO: 433264 - DNA, 30 bp, Artificial Sequence
  Synthetic oligonucleotide
gtgccgccttatgtgttaagtgcggctttg

SEQ ID NO: 433265 - DNA, 30 bp, Artificial Sequence
  Synthetic oligonucleotide
acatggcagatagaattctaacgggctttg

SEQ ID NO: 433266 - DNA, 30 bp, Artificial Sequence
  Synthetic oligonucleotide
ttttaggaggattccttgcacactgctttg

SEQ ID NO: 433267 - DNA, 30 bp, Artificial Sequence
  Synthetic oligonucleotide
catgataacgcttacctcagcgctgctttg

SEQ ID NO: 433268 - DNA, 30 bp, Artificial Sequence
  Synthetic oligonucleotide
gtgttcgccaaatcacctcaacgtgctttg

SEQ ID NO: 433269 - DNA, 30 bp, Artificial Sequence
  Synthetic oligonucleotide
gtggtatttataggggaccaaacatctttg

SEQ ID NO: 433270 - DNA, 30 bp, Artificial Sequence
  Synthetic oligonucleotide
gagtgtcgtcgaaagagttcacgctctttg

SEQ ID NO: 433271 - DNA, 30 bp, Artificial Sequence
  Synthetic oligonucleotide
taaggtttggtgggtctctaagtgtctttg

SEQ ID NO: 433272 - DNA, 30 bp, Artificial Sequence
  Synthetic oligonucleotide
ccttctgcacttcccattagtgattctttg

SEQ ID NO: 433273 - DNA, 30 bp, Artificial Sequence
  Synthetic oligonucleotide
cttgtttctgttaaatcattttcttctttg

SEQ ID NO: 433274 - DNA, 30 bp, Artificial Sequence
  Synthetic oligonucleotide
cgtgttagaacttagcctctaagttctttg

SEQ ID NO: 433275 - DNA, 30 bp, Artificial Sequence
  Synthetic oligonucleotide
ctcttaataggggaagtttatgtaagtttg

SEQ ID NO: 433276 - DNA, 30 bp, Artificial Sequence
  Synthetic oligonucleotide
gtatgtgcgcatcacatggggcacagtttg

SEQ ID NO: 433277 - DNA, 30 bp, Artificial Sequence
  Synthetic oligonucleotide
gcttttgagcatgggaacaggaccagtttg

SEQ ID NO: 433278 - DNA, 30 bp, Artificial Sequence
  Synthetic oligonucleotide
gaggggtttccacaggcgcttgagagtttg

SEQ ID NO: 433279 - DNA, 30 bp, Artificial Sequence
  Synthetic oligonucleotide
tcgtgatgtatacggctgccaatgagtttg

SEQ ID NO: 433280 - DNA, 30 bp, Artificial Sequence
  Synthetic oligonucleotide
agctagctcaacagactaccgactagtttg

SEQ ID NO: 433281 - DNA, 30 bp, Artificial Sequence
  Synthetic oligonucleotide
tcatcgcctgcagtcaatagcgttagtttg

SEQ ID NO: 433282 - DNA, 30 bp, Artificial Sequence
  Synthetic oligonucleotide
cccgtgggaaaacgccatttcagacgtttg

SEQ ID NO: 433283 - DNA, 30 bp, Artificial Sequence
  Synthetic oligonucleotide
ttgctatcatgtacgctaaaacgacgtttg

SEQ ID NO: 433284 - DNA, 30 bp, Artificial Sequence
  Synthetic oligonucleotide
aaaacccttgacccaagagatccccgtttg

SEQ ID NO: 433285 - DNA, 30 bp, Artificial Sequence
  Synthetic oligonucleotide
ggcaaagcttgcagtaatggcctgcgtttg

SEQ ID NO: 433286 - DNA, 30 bp, Artificial Sequence
  Synthetic oligonucleotide
tagaccccgcaggagtggtcgcatcgtttg

SEQ ID NO: 433287 - DNA, 30 bp, Artificial Sequence
  Synthetic oligonucleotide
tatcattattcgaacatcgagattcgtttg

SEQ ID NO: 433288 - DNA, 30 bp, Artificial Sequence
  Synthetic oligonucleotide
acctgttagcactaaggttttacgggtttg

SEQ ID NO: 433289 - DNA, 30 bp, Artificial Sequence
  Synthetic oligonucleotide
atggtagttatttgatgtgtttcgggtttg

SEQ ID NO: 433290 - DNA, 30 bp, Artificial Sequence
  Synthetic oligonucleotide
ctgcccttcgatccggtcatggggggtttg

SEQ ID NO: 433291 - DNA, 30 bp, Artificial Sequence
  Synthetic oligonucleotide
gccgaagaaaattaagcggagctgggtttg

SEQ ID NO: 433292 - DNA, 30 bp, Artificial Sequence
  Synthetic oligonucleotide
ctcctcttgacaaggtgctgacatggtttg

SEQ ID NO: 433293 - DNA, 30 bp, Artificial Sequence
  Synthetic oligonucleotide
ttttaggtccgttttatcggctaatgtttg

SEQ ID NO: 433294 - DNA, 30 bp, Artificial Sequence
  Synthetic oligonucleotide
tgatactattttgctctggagtaatgtttg

SEQ ID NO: 433295 - DNA, 30 bp, Artificial Sequence
  Synthetic oligonucleotide
cattgttccgggttcttcccacagtgtttg

SEQ ID NO: 433296 - DNA, 30 bp, Artificial Sequence
  Synthetic oligonucleotide
ctctcggggacgctcgaaccgacgtgtttg

SEQ ID NO: 433297 - DNA, 30 bp, Artificial Sequence
  Synthetic oligonucleotide
agaattattggtctactctggacgtgtttg

SEQ ID NO: 433298 - DNA, 30 bp, Artificial Sequence
  Synthetic oligonucleotide
agctatgcagcttgttacgaaaggtgtttg

SEQ ID NO: 433299 - DNA, 30 bp, Artificial Sequence
  Synthetic oligonucleotide
gatggtcaaaggagtgcgcggttgtgtttg

SEQ ID NO: 433300 - DNA, 30 bp, Artificial Sequence
  Synthetic oligonucleotide
ctagataactcctcgccggaggattgtttg

SEQ ID NO: 433301 - DNA, 30 bp, Artificial Sequence
  Synthetic oligonucleotide
cggaagtggctgggtaagacttccattttg

SEQ ID NO: 433302 - DNA, 30 bp, Artificial Sequence
  Synthetic oligonucleotide
aaccggtgtgtcttttaggttcatattttg

SEQ ID NO: 433303 - DNA, 30 bp, Artificial Sequence
  Synthetic oligonucleotide
taggactactgacaagtgggtgttattttg

SEQ ID NO: 433304 - DNA, 30 bp, Artificial Sequence
  Synthetic oligonucleotide
ttgcgcagatagtaaactgcaggacttttg

SEQ ID NO: 433305 - DNA, 30 bp, Artificial Sequence
  Synthetic oligonucleotide
tctatgcacctagcgccgtggaaccttttg

SEQ ID NO: 433306 - DNA, 29 bp, Artificial Sequence
  Synthetic oligonucleotide
gccctattccctcgctttctccccttttg

SEQ ID NO: 433307 - DNA, 30 bp, Artificial Sequence
  Synthetic oligonucleotide
agtggttggttcttgttccacaatcttttg

SEQ ID NO: 433308 - DNA, 30 bp, Artificial Sequence
  Synthetic oligonucleotide
tacacgttccccgcagagtataaagttttg

SEQ ID NO: 433309 - DNA, 30 bp, Artificial Sequence
  Synthetic oligonucleotide
aatttcaaagaatggaaaagtccagttttg

SEQ ID NO: 433310 - DNA, 30 bp, Artificial Sequence
  Synthetic oligonucleotide
gtactgaataatgtcgatctggcagttttg

SEQ ID NO: 433311 - DNA, 30 bp, Artificial Sequence
  Synthetic oligonucleotide
ggacctacgccacctataggccccgttttg

SEQ ID NO: 433312 - DNA, 30 bp, Artificial Sequence
  Synthetic oligonucleotide
ggcgcgtgcgcccagtgcttgggcgttttg

SEQ ID NO: 433313 - DNA, 30 bp, Artificial Sequence
  Synthetic oligonucleotide
agaaaaattttaaatgaacggttcgttttg

SEQ ID NO: 433314 - DNA, 30 bp, Artificial Sequence
  Synthetic oligonucleotide
atagtttttgagggagtgtcacaggttttg

SEQ ID NO: 433315 - DNA, 30 bp, Artificial Sequence
  Synthetic oligonucleotide
gccaaccctcgataagctgtctaggttttg

SEQ ID NO: 433316 - DNA, 30 bp, Artificial Sequence
  Synthetic oligonucleotide
aataggcgcctttcggtatgcccggttttg

SEQ ID NO: 433317 - DNA, 30 bp, Artificial Sequence
  Synthetic oligonucleotide
gtatattctaaatgattcggacgggttttg

SEQ ID NO: 433318 - DNA, 30 bp, Artificial Sequence
  Synthetic oligonucleotide
tttgcgggtccttcatgagtaggggttttg

SEQ ID NO: 433319 - DNA, 30 bp, Artificial Sequence
  Synthetic oligonucleotide
tagtgttagtgggggacgcatgtggttttg

SEQ ID NO: 433320 - DNA, 30 bp, Artificial Sequence
  Synthetic oligonucleotide
atttgtcatctgaggtaaatcaaatttttg

SEQ ID NO: 433321 - DNA, 30 bp, Artificial Sequence
  Synthetic oligonucleotide
aataagaaaatttaggaatctcaatttttg

SEQ ID NO: 433322 - DNA, 30 bp, Artificial Sequence
  Synthetic oligonucleotide
cagatttctggacagcaatctccatttttg

SEQ ID NO: 433323 - DNA, 30 bp, Artificial Sequence
  Synthetic oligonucleotide
acttcataagaaaattgtttcagatttttg

SEQ ID NO: 433324 - DNA, 30 bp, Artificial Sequence
  Synthetic oligonucleotide
ggtagggcgggtggcttaatttgatttttg

SEQ ID NO: 433325 - DNA, 30 bp, Artificial Sequence
  Synthetic oligonucleotide
catcagctgccgggctgcagtgactttttg

SEQ ID NO: 433326 - DNA, 30 bp, Artificial Sequence
  Synthetic oligonucleotide
actatttgacccgtgcgtcgacagtttttg

SEQ ID NO: 433327 - DNA, 30 bp, Artificial Sequence
  Synthetic oligonucleotide
ggagcgttttacacggcttgtgagtttttg

SEQ ID NO: 433328 - DNA, 30 bp, Artificial Sequence
  Synthetic oligonucleotide
gaaggccctgcacattccgccgggtttttg

SEQ ID NO: 433329 - DNA, 30 bp, Artificial Sequence
  Synthetic oligonucleotide
cgctgcagaaagcaagaaaccggttttttg

SEQ ID NO: 433330 - DNA, 30 bp, Artificial Sequence
  Synthetic oligonucleotide
gacagataaaccattacgtggtaaaaaaat

SEQ ID NO: 433331 - DNA, 30 bp, Artificial Sequence
  Synthetic oligonucleotide
gctgtcgcgactagcgcatagagaaaaaat

SEQ ID NO: 433332 - DNA, 30 bp, Artificial Sequence
  Synthetic oligonucleotide
ccagctagctcagtctgtggtaacaaaaat

SEQ ID NO: 433333 - DNA, 30 bp, Artificial Sequence
  Synthetic oligonucleotide
catctgaaaaaacatactgtaaccaaaaat

SEQ ID NO: 433334 - DNA, 30 bp, Artificial Sequence
  Synthetic oligonucleotide
ataccgctgaaggggcagaaacgcaaaaat

SEQ ID NO: 433335 - DNA, 30 bp, Artificial Sequence
  Synthetic oligonucleotide
ggtttaccgtttaatcaagcaggcaaaaat

SEQ ID NO: 433336 - DNA, 30 bp, Artificial Sequence
  Synthetic oligonucleotide
agatggcggatgttttgcggcatcaaaaat

SEQ ID NO: 433337 - DNA, 30 bp, Artificial Sequence
  Synthetic oligonucleotide
tagagtaacggcggccgattgcagaaaaat

SEQ ID NO: 433338 - DNA, 30 bp, Artificial Sequence
  Synthetic oligonucleotide
agcttttggaataacgccatctcgaaaaat

SEQ ID NO: 433339 - DNA, 30 bp, Artificial Sequence
  Synthetic oligonucleotide
gagatctaatgccagacaatgtggaaaaat

SEQ ID NO: 433340 - DNA, 30 bp, Artificial Sequence
  Synthetic oligonucleotide
catagcacattctttagtataagtaaaaat

SEQ ID NO: 433341 - DNA, 30 bp, Artificial Sequence
  Synthetic oligonucleotide
attgctgcctctaccgaggatgttaaaaat

SEQ ID NO: 433342 - DNA, 30 bp, Artificial Sequence
  Synthetic oligonucleotide
ccttcttcgtcaatgtatgtgagacaaaat

SEQ ID NO: 433343 - DNA, 30 bp, Artificial Sequence
  Synthetic oligonucleotide
atcagcgttgccattctctttagacaaaat

SEQ ID NO: 433344 - DNA, 30 bp, Artificial Sequence
  Synthetic oligonucleotide
gcgctgagtgtcggttcgaaaatccaaaat

SEQ ID NO: 433345 - DNA, 30 bp, Artificial Sequence
  Synthetic oligonucleotide
tttcttacctaattacaaattcagcaaaat

SEQ ID NO: 433346 - DNA, 30 bp, Artificial Sequence
  Synthetic oligonucleotide
gcccaaacggtgattcggcaaatgcaaaat

SEQ ID NO: 433347 - DNA, 30 bp, Artificial Sequence
  Synthetic oligonucleotide
aatgttgtgcctctctacatccatcaaaat

SEQ ID NO: 433348 - DNA, 30 bp, Artificial Sequence
  Synthetic oligonucleotide
tctaacgatatcactcgcattgctcaaaat

SEQ ID NO: 433349 - DNA, 30 bp, Artificial Sequence
  Synthetic oligonucleotide
atgtccacataaatacacgcggaagaaaat

SEQ ID NO: 433350 - DNA, 30 bp, Artificial Sequence
  Synthetic oligonucleotide
tctatagcaaatttgggaatcgcagaaaat

SEQ ID NO: 433351 - DNA, 30 bp, Artificial Sequence
  Synthetic oligonucleotide
acacctttcctaggcgtaggggcagaaaat

SEQ ID NO: 433352 - DNA, 30 bp, Artificial Sequence
  Synthetic oligonucleotide
aatctgaggcgtatcagttcaaacgaaaat

SEQ ID NO: 433353 - DNA, 30 bp, Artificial Sequence
  Synthetic oligonucleotide
taggtcttcgcctagcagttaaccgaaaat

SEQ ID NO: 433354 - DNA, 30 bp, Artificial Sequence
  Synthetic oligonucleotide
gcattcgctcggcgggcccgcagcgaaaat

SEQ ID NO: 433355 - DNA, 30 bp, Artificial Sequence
  Synthetic oligonucleotide
acgtctctatgaataccgcgccctgaaaat

SEQ ID NO: 433356 - DNA, 30 bp, Artificial Sequence
  Synthetic oligonucleotide
cttaccgaaaccgcattggagattgaaaat

SEQ ID NO: 433357 - DNA, 30 bp, Artificial Sequence
  Synthetic oligonucleotide
tcattaatcaggtgtcgaggccaataaaat

SEQ ID NO: 433358 - DNA, 30 bp, Artificial Sequence
  Synthetic oligonucleotide
atcatgccatcatctctgacgacataaaat

SEQ ID NO: 433359 - DNA, 30 bp, Artificial Sequence
  Synthetic oligonucleotide
aatgcttgttgcgtatgcatcagataaaat

SEQ ID NO: 433360 - DNA, 30 bp, Artificial Sequence
  Synthetic oligonucleotide
tgtttgagagagttcaatctaccctaaaat

SEQ ID NO: 433361 - DNA, 30 bp, Artificial Sequence
  Synthetic oligonucleotide
tcgaattagtatatactgtgcttctaaaat

SEQ ID NO: 433362 - DNA, 30 bp, Artificial Sequence
  Synthetic oligonucleotide
gaagcgggtaaggtggtaaaatattaaaat

SEQ ID NO: 433363 - DNA, 30 bp, Artificial Sequence
  Synthetic oligonucleotide
ggtatcctcaattatagcactccaacaaat

SEQ ID NO: 433364 - DNA, 30 bp, Artificial Sequence
  Synthetic oligonucleotide
tatacatatgagtataacctaataacaaat

SEQ ID NO: 433365 - DNA, 30 bp, Artificial Sequence
  Synthetic oligonucleotide
aagtcgcgcttaaatagtgtgataacaaat

SEQ ID NO: 433366 - DNA, 30 bp, Artificial Sequence
  Synthetic oligonucleotide
aagtcgccaatgaaggactacctaacaaat

SEQ ID NO: 433367 - DNA, 30 bp, Artificial Sequence
  Synthetic oligonucleotide
tatatcataaaggcgtataatgtcacaaat

SEQ ID NO: 433368 - DNA, 30 bp, Artificial Sequence
  Synthetic oligonucleotide
gtgattcaacttgcaaagatgctcccaaat

SEQ ID NO: 433369 - DNA, 30 bp, Artificial Sequence
  Synthetic oligonucleotide
gtcgtatgcggtttaaagccccggccaaat

SEQ ID NO: 433370 - DNA, 30 bp, Artificial Sequence
  Synthetic oligonucleotide
tgtagtaatgcgctatgctcaatagcaaat

SEQ ID NO: 433371 - DNA, 30 bp, Artificial Sequence
  Synthetic oligonucleotide
attcattaagttaaaaaattgaacgcaaat

SEQ ID NO: 433372 - DNA, 30 bp, Artificial Sequence
  Synthetic oligonucleotide
aagtcaaacatatgggaaggcagcgcaaat

SEQ ID NO: 433373 - DNA, 30 bp, Artificial Sequence
  Synthetic oligonucleotide
gtggttaaagatgtacccttatgcgcaaat

SEQ ID NO: 433374 - DNA, 30 bp, Artificial Sequence
  Synthetic oligonucleotide
atgatacattgattagagaatgcggcaaat

SEQ ID NO: 433375 - DNA, 30 bp, Artificial Sequence
  Synthetic oligonucleotide
gtgtgaactaaaggtgcagcaagggcaaat

SEQ ID NO: 433376 - DNA, 30 bp, Artificial Sequence
  Synthetic oligonucleotide
ggcctatctgacagacccaccactgcaaat

SEQ ID NO: 433377 - DNA, 30 bp, Artificial Sequence
  Synthetic oligonucleotide
tattgtaatatagagaggacatttgcaaat

SEQ ID NO: 433378 - DNA, 30 bp, Artificial Sequence
  Synthetic oligonucleotide
tgtgaggaattacattgccataaatcaaat

SEQ ID NO: 433379 - DNA, 30 bp, Artificial Sequence
  Synthetic oligonucleotide
tggaccatacgtttgtctattagatcaaat

SEQ ID NO: 433380 - DNA, 30 bp, Artificial Sequence
  Synthetic oligonucleotide
taccccggggtcatcacggtgcgatcaaat

SEQ ID NO: 433381 - DNA, 30 bp, Artificial Sequence
  Synthetic oligonucleotide
cttcggtactgagcgaagaaatgatcaaat

SEQ ID NO: 433382 - DNA, 30 bp, Artificial Sequence
  Synthetic oligonucleotide
cgaaattataaggttgatagcgtatcaaat

SEQ ID NO: 433383 - DNA, 30 bp, Artificial Sequence
  Synthetic oligonucleotide
ctagttacgaccgacggatcactctcaaat

SEQ ID NO: 433384 - DNA, 30 bp, Artificial Sequence
  Synthetic oligonucleotide
caatattgtcatggtgaagaggggtcaaat

SEQ ID NO: 433385 - DNA, 30 bp, Artificial Sequence
  Synthetic oligonucleotide
ctcggcctcgagtgtcttgaggggtcaaat

SEQ ID NO: 433386 - DNA, 30 bp, Artificial Sequence
  Synthetic oligonucleotide
agttggtatgtcaatccaacatggtcaaat

SEQ ID NO: 433387 - DNA, 30 bp, Artificial Sequence
  Synthetic oligonucleotide
ataatagtactggtgctaggtgtgtcaaat

SEQ ID NO: 433388 - DNA, 30 bp, Artificial Sequence
  Synthetic oligonucleotide
tgtggagtgaaccgcttcaagaattcaaat

SEQ ID NO: 433389 - DNA, 30 bp, Artificial Sequence
  Synthetic oligonucleotide
caccaattcattcaataaggtaattcaaat

SEQ ID NO: 433390 - DNA, 30 bp, Artificial Sequence
  Synthetic oligonucleotide
tacgtggcttaggggtcgtctaaaagaaat

SEQ ID NO: 433391 - DNA, 30 bp, Artificial Sequence
  Synthetic oligonucleotide
agacgtaaacgctgcaaaccgccaagaaat

SEQ ID NO: 433392 - DNA, 30 bp, Artificial Sequence
  Synthetic oligonucleotide
aatattacccagacagcgactataagaaat

SEQ ID NO: 433393 - DNA, 30 bp, Artificial Sequence
  Synthetic oligonucleotide
attcttattaaagtgtggggacagagaaat

SEQ ID NO: 433394 - DNA, 30 bp, Artificial Sequence
  Synthetic oligonucleotide
gttccataaactggttggaccacgagaaat

SEQ ID NO: 433395 - DNA, 30 bp, Artificial Sequence
  Synthetic oligonucleotide
caaacttcgtcttgtttgtcattgagaaat

SEQ ID NO: 433396 - DNA, 30 bp, Artificial Sequence
  Synthetic oligonucleotide
cttccgaaatgaggtgtgaacaatagaaat

SEQ ID NO: 433397 - DNA, 30 bp, Artificial Sequence
  Synthetic oligonucleotide
gatccgagtaagagttatatgtatagaaat

SEQ ID NO: 433398 - DNA, 30 bp, Artificial Sequence
  Synthetic oligonucleotide
ccaaacgtgaattacgtcatttcacgaaat

SEQ ID NO: 433399 - DNA, 30 bp, Artificial Sequence
  Synthetic oligonucleotide
gatcttgtggcagactcagtcagccgaaat

SEQ ID NO: 433400 - DNA, 30 bp, Artificial Sequence
  Synthetic oligonucleotide
agaagcttgctgtaaacgtgaagaggaaat

SEQ ID NO: 433401 - DNA, 30 bp, Artificial Sequence
  Synthetic oligonucleotide
aagctatagcacatccataagaccggaaat

SEQ ID NO: 433402 - DNA, 30 bp, Artificial Sequence
  Synthetic oligonucleotide
tgtttaagaccaaaaaacccttgcggaaat

SEQ ID NO: 433403 - DNA, 30 bp, Artificial Sequence
  Synthetic oligonucleotide
ggatgctcacggcgggtacttatgggaaat

SEQ ID NO: 433404 - DNA, 30 bp, Artificial Sequence
  Synthetic oligonucleotide
agataaccgctactaatgtcattgggaaat

SEQ ID NO: 433405 - DNA, 30 bp, Artificial Sequence
  Synthetic oligonucleotide
actgcttaatgttcgtataagtatggaaat

SEQ ID NO: 433406 - DNA, 30 bp, Artificial Sequence
  Synthetic oligonucleotide
gtgatctaatccaaccataaggttggaaat

SEQ ID NO: 433407 - DNA, 30 bp, Artificial Sequence
  Synthetic oligonucleotide
gatctggctcgcgggcagaaccaatgaaat

SEQ ID NO: 433408 - DNA, 30 bp, Artificial Sequence
  Synthetic oligonucleotide
tgcttattgctaatttacaagatatgaaat

SEQ ID NO: 433409 - DNA, 30 bp, Artificial Sequence
  Synthetic oligonucleotide
atgggagcatgtggcgtcaagccctgaaat

SEQ ID NO: 433410 - DNA, 30 bp, Artificial Sequence
  Synthetic oligonucleotide
gagaatttagtatagtgcaaaggctgaaat

SEQ ID NO: 433411 - DNA, 30 bp, Artificial Sequence
  Synthetic oligonucleotide
aaatggtaaattggacgacacgtctgaaat

SEQ ID NO: 433412 - DNA, 30 bp, Artificial Sequence
  Synthetic oligonucleotide
gcaaaaggttcgagcctgtagacgtgaaat

SEQ ID NO: 433413 - DNA, 30 bp, Artificial Sequence
  Synthetic oligonucleotide
gaaattggtctacgttcattagcgtgaaat

SEQ ID NO: 433414 - DNA, 30 bp, Artificial Sequence
  Synthetic oligonucleotide
gagtgctcacctatcgcgatccggtgaaat

SEQ ID NO: 433415 - DNA, 30 bp, Artificial Sequence
  Synthetic oligonucleotide
tgccccatgagcatcttcttaatgtgaaat

SEQ ID NO: 433416 - DNA, 30 bp, Artificial Sequence
  Synthetic oligonucleotide
ttgccggctggcgacggttttagttgaaat

SEQ ID NO: 433417 - DNA, 30 bp, Artificial Sequence
  Synthetic oligonucleotide
ttagcccaacagtgtatctctaaaataaat

SEQ ID NO: 433418 - DNA, 30 bp, Artificial Sequence
  Synthetic oligonucleotide
gaatcgtgagagtccatgacaacaataaat

SEQ ID NO: 433419 - DNA, 30 bp, Artificial Sequence
  Synthetic oligonucleotide
attaagttctgctaacgaggtagaataaat

SEQ ID NO: 433420 - DNA, 29 bp, Artificial Sequence
  Synthetic oligonucleotide
gcatcgccgttggatagtaaataataaat

SEQ ID NO: 433421 - DNA, 30 bp, Artificial Sequence
  Synthetic oligonucleotide
cgtatcgcaatgcgtggccaacggataaat

SEQ ID NO: 433422 - DNA, 30 bp, Artificial Sequence
  Synthetic oligonucleotide
gctgtcgcaaacttgcaggtctatataaat

SEQ ID NO: 433423 - DNA, 30 bp, Artificial Sequence
  Synthetic oligonucleotide
tcttgggtataatgatagtatagtataaat

SEQ ID NO: 433424 - DNA, 30 bp, Artificial Sequence
  Synthetic oligonucleotide
ctcttggtcgtcaaggcggcgaaactaaat

SEQ ID NO: 433425 - DNA, 30 bp, Artificial Sequence
  Synthetic oligonucleotide
gtaagcatgagtcctacggtaacactaaat

SEQ ID NO: 433426 - DNA, 30 bp, Artificial Sequence
  Synthetic oligonucleotide
atcagagggacctggcaggagactctaaat

SEQ ID NO: 433427 - DNA, 30 bp, Artificial Sequence
  Synthetic oligonucleotide
taattcccagccaactgctctcttctaaat

SEQ ID NO: 433428 - DNA, 30 bp, Artificial Sequence
  Synthetic oligonucleotide
atttagggctatggccgaaggaaagtaaat

SEQ ID NO: 433429 - DNA, 30 bp, Artificial Sequence
  Synthetic oligonucleotide
aagcagttgctgtaaaagtttaaagtaaat

SEQ ID NO: 433430 - DNA, 30 bp, Artificial Sequence
  Synthetic oligonucleotide
gctctgctttatctttaactttcagtaaat

SEQ ID NO: 433431 - DNA, 30 bp, Artificial Sequence
  Synthetic oligonucleotide
taaggtaggcgttgcagggatgccgtaaat

SEQ ID NO: 433432 - DNA, 30 bp, Artificial Sequence
  Synthetic oligonucleotide
attttgattggcgtttgggggtaggtaaat

SEQ ID NO: 433433 - DNA, 30 bp, Artificial Sequence
  Synthetic oligonucleotide
gttattagtaagtacacgctcctggtaaat

SEQ ID NO: 433434 - DNA, 30 bp, Artificial Sequence
  Synthetic oligonucleotide
ggaattaaaactgttttccgtgatgtaaat

SEQ ID NO: 433435 - DNA, 30 bp, Artificial Sequence
  Synthetic oligonucleotide
aatattttggtgagggaacgtccattaaat

SEQ ID NO: 433436 - DNA, 30 bp, Artificial Sequence
  Synthetic oligonucleotide
aagcgaatcctccgaagagttagattaaat

SEQ ID NO: 433437 - DNA, 30 bp, Artificial Sequence
  Synthetic oligonucleotide
tctagaatatcaatcctataaagcttaaat

SEQ ID NO: 433438 - DNA, 30 bp, Artificial Sequence
  Synthetic oligonucleotide
ggaattctcgagttagcgactctcttaaat

SEQ ID NO: 433439 - DNA, 30 bp, Artificial Sequence
  Synthetic oligonucleotide
cagttctatctgtggggataattcttaaat

SEQ ID NO: 433440 - DNA, 30 bp, Artificial Sequence
  Synthetic oligonucleotide
ctgaaatgtgtgtgtttttatagtttaaat

SEQ ID NO: 433441 - DNA, 30 bp, Artificial Sequence
  Synthetic oligonucleotide
atcagttagtcctttcttcagtgtttaaat

SEQ ID NO: 433442 - DNA, 30 bp, Artificial Sequence
  Synthetic oligonucleotide
gacatctaccatgttaagcgtgttttaaat

SEQ ID NO: 433443 - DNA, 30 bp, Artificial Sequence
  Synthetic oligonucleotide
tttgtgaatgtagtttgtggggaaaacaat

SEQ ID NO: 433444 - DNA, 30 bp, Artificial Sequence
  Synthetic oligonucleotide
agtgaagttatgcttgatcaaggaaacaat

SEQ ID NO: 433445 - DNA, 30 bp, Artificial Sequence
  Synthetic oligonucleotide
tctcaatccttgctgctcaagtccaacaat

SEQ ID NO: 433446 - DNA, 30 bp, Artificial Sequence
  Synthetic oligonucleotide
ctgtgtagggaggccctgcgttagaacaat

SEQ ID NO: 433447 - DNA, 30 bp, Artificial Sequence
  Synthetic oligonucleotide
aaactttggacaggtttaaaaaggaacaat

SEQ ID NO: 433448 - DNA, 30 bp, Artificial Sequence
  Synthetic oligonucleotide
tagaaggccgggtaggggacggggaacaat

SEQ ID NO: 433449 - DNA, 30 bp, Artificial Sequence
  Synthetic oligonucleotide
agtgccacacggttactccaatggaacaat

SEQ ID NO: 433450 - DNA, 30 bp, Artificial Sequence
  Synthetic oligonucleotide
gcaatttcaggaaaaagtactctgaacaat

SEQ ID NO: 433451 - DNA, 30 bp, Artificial Sequence
  Synthetic oligonucleotide
catatcgtggatcgcaggatagcacacaat

SEQ ID NO: 433452 - DNA, 30 bp, Artificial Sequence
  Synthetic oligonucleotide
gttaaacgtgttgagccgcaataccacaat

SEQ ID NO: 433453 - DNA, 30 bp, Artificial Sequence
  Synthetic oligonucleotide
atggttattcccaagcatctgccccacaat

SEQ ID NO: 433454 - DNA, 30 bp, Artificial Sequence
  Synthetic oligonucleotide
ctttacgcttcctccgagtgagcccacaat

SEQ ID NO: 433455 - DNA, 30 bp, Artificial Sequence
  Synthetic oligonucleotide
tccggtggttctctgccgagggcccacaat

SEQ ID NO: 433456 - DNA, 30 bp, Artificial Sequence
  Synthetic oligonucleotide
tttaaaaggtcaacagtggttggccacaat

SEQ ID NO: 433457 - DNA, 30 bp, Artificial Sequence
  Synthetic oligonucleotide
cctgagggttacttgtacacgctccacaat

SEQ ID NO: 433458 - DNA, 30 bp, Artificial Sequence
  Synthetic oligonucleotide
gtgagttgaggcggcacgaatacgcacaat

SEQ ID NO: 433459 - DNA, 30 bp, Artificial Sequence
  Synthetic oligonucleotide
cactgggcgctatcacgaccagctcacaat

SEQ ID NO: 433460 - DNA, 30 bp, Artificial Sequence
  Synthetic oligonucleotide
ccgtcctagttgatgctcgccgttcacaat

SEQ ID NO: 433461 - DNA, 30 bp, Artificial Sequence
  Synthetic oligonucleotide
ggttacgacttgatttacgagcccgacaat

SEQ ID NO: 433462 - DNA, 30 bp, Artificial Sequence
  Synthetic oligonucleotide
tactgtatgatgaacaatcgcggggacaat

SEQ ID NO: 433463 - DNA, 30 bp, Artificial Sequence
  Synthetic oligonucleotide
tacccgccttgatttaaacttggtgacaat

SEQ ID NO: 433464 - DNA, 30 bp, Artificial Sequence
  Synthetic oligonucleotide
acagctataggcagcttgtgcattgacaat

SEQ ID NO: 433465 - DNA, 30 bp, Artificial Sequence
  Synthetic oligonucleotide
atttgtcgtggcccatcgtcgtcatacaat

SEQ ID NO: 433466 - DNA, 30 bp, Artificial Sequence
  Synthetic oligonucleotide
tttatggtcacaaccactttatagtacaat

SEQ ID NO: 433467 - DNA, 30 bp, Artificial Sequence
  Synthetic oligonucleotide
tttattatgaggaacacgatcacgtacaat

SEQ ID NO: 433468 - DNA, 30 bp, Artificial Sequence
  Synthetic oligonucleotide
aacaaatcacaggactctgtgtcgtacaat

SEQ ID NO: 433469 - DNA, 30 bp, Artificial Sequence
  Synthetic oligonucleotide
attggaccaaggtggtatcgttcgtacaat

SEQ ID NO: 433470 - DNA, 32 bp, Artificial Sequence
  Synthetic oligonucleotide
gcccctaaaccgtagctgcgacacgcaccaat

SEQ ID NO: 433471 - DNA, 30 bp, Artificial Sequence
  Synthetic oligonucleotide
gtaagttgtatcctgtgcttgcgcaccaat

SEQ ID NO: 433472 - DNA, 30 bp, Artificial Sequence
  Synthetic oligonucleotide
cagttggggacgcaatttgtcccgaccaat

SEQ ID NO: 433473 - DNA, 30 bp, Artificial Sequence
  Synthetic oligonucleotide
ggttgaacgtactggttttacaataccaat

SEQ ID NO: 433474 - DNA, 30 bp, Artificial Sequence
  Synthetic oligonucleotide
agaacctcataacgttggtaggataccaat

SEQ ID NO: 433475 - DNA, 30 bp, Artificial Sequence
  Synthetic oligonucleotide
gaaaagttgcttcatgccactgcccccaat

SEQ ID NO: 433476 - DNA, 30 bp, Artificial Sequence
  Synthetic oligonucleotide
cactacgttatctttgtctacctccccaat

SEQ ID NO: 433477 - DNA, 30 bp, Artificial Sequence
  Synthetic oligonucleotide
gactccatgatgcgaacgatatagcccaat

SEQ ID NO: 433478 - DNA, 30 bp, Artificial Sequence
  Synthetic oligonucleotide
attccatagtgaggctttggctagcccaat

SEQ ID NO: 433479 - DNA, 30 bp, Artificial Sequence
  Synthetic oligonucleotide
attctaacggtgtataggacaaggcccaat

SEQ ID NO: 433480 - DNA, 30 bp, Artificial Sequence
  Synthetic oligonucleotide
cgcgccatataagggtctagcgtgcccaat

SEQ ID NO: 433481 - DNA, 30 bp, Artificial Sequence
  Synthetic oligonucleotide
gcaggagtccaatctggacctcatcccaat

SEQ ID NO: 433482 - DNA, 30 bp, Artificial Sequence
  Synthetic oligonucleotide
ttgggtatatctacatgtgcatctcccaat

SEQ ID NO: 433483 - DNA, 29 bp, Artificial Sequence
  Synthetic oligonucleotide
gcatttatgcattaagattaggtcccaat

SEQ ID NO: 433484 - DNA, 30 bp, Artificial Sequence
  Synthetic oligonucleotide
gcccaccgggcctacaactactccgccaat

SEQ ID NO: 433485 - DNA, 30 bp, Artificial Sequence
  Synthetic oligonucleotide
atataagttctcagtgcgatactcgccaat

SEQ ID NO: 433486 - DNA, 30 bp, Artificial Sequence
  Synthetic oligonucleotide
cgaccttggtagtgtgcaggggaggccaat

SEQ ID NO: 433487 - DNA, 30 bp, Artificial Sequence
  Synthetic oligonucleotide
acaggttgaccgatttttcaatcggccaat

SEQ ID NO: 433488 - DNA, 30 bp, Artificial Sequence
  Synthetic oligonucleotide
atcataatgagattttgtttggtggccaat

SEQ ID NO: 433489 - DNA, 30 bp, Artificial Sequence
  Synthetic oligonucleotide
aagcatgagaaaggaggcaaccatgccaat

SEQ ID NO: 433490 - DNA, 30 bp, Artificial Sequence
  Synthetic oligonucleotide
atgacgatattccccaattgatatgccaat

SEQ ID NO: 433491 - DNA, 30 bp, Artificial Sequence
  Synthetic oligonucleotide
acgtacttttagaagatatgtaaatccaat

SEQ ID NO: 433492 - DNA, 30 bp, Artificial Sequence
  Synthetic oligonucleotide
tcatcgtggtttggatctagtctatccaat

SEQ ID NO: 433493 - DNA, 30 bp, Artificial Sequence
  Synthetic oligonucleotide
ctagtgtgcccgcacgcccgacactccaat

SEQ ID NO: 433494 - DNA, 30 bp, Artificial Sequence
  Synthetic oligonucleotide
ttgaatgactggtgattcatgctctccaat

SEQ ID NO: 433495 - DNA, 30 bp, Artificial Sequence
  Synthetic oligonucleotide
gcaacaagccgtttatacatgaagtccaat

SEQ ID NO: 433496 - DNA, 30 bp, Artificial Sequence
  Synthetic oligonucleotide
gtcttttcagggaccgagcgcaaaagcaat

SEQ ID NO: 433497 - DNA, 30 bp, Artificial Sequence
  Synthetic oligonucleotide
cacggcaccaattgttattcgaccagcaat

SEQ ID NO: 433498 - DNA, 30 bp, Artificial Sequence
  Synthetic oligonucleotide
gctaaggctgacaaacggtacgccagcaat

SEQ ID NO: 433499 - DNA, 30 bp, Artificial Sequence
  Synthetic oligonucleotide
gagtgctcgacagccacaaaatgtagcaat

SEQ ID NO: 433500 - DNA, 30 bp, Artificial Sequence
  Synthetic oligonucleotide
cgaccattctcaacgtaaattagacgcaat

SEQ ID NO: 433501 - DNA, 30 bp, Artificial Sequence
  Synthetic oligonucleotide
gtctaccttgggtgcttccatcgacgcaat

SEQ ID NO: 433502 - DNA, 30 bp, Artificial Sequence
  Synthetic oligonucleotide
gaacaactaggggtcattcgggtacgcaat

SEQ ID NO: 433503 - DNA, 30 bp, Artificial Sequence
  Synthetic oligonucleotide
aagctcttacgagggagttattaccgcaat

SEQ ID NO: 433504 - DNA, 30 bp, Artificial Sequence
  Synthetic oligonucleotide
atgagatgagattgcacagtgaagcgcaat

SEQ ID NO: 433505 - DNA, 30 bp, Artificial Sequence
  Synthetic oligonucleotide
gttattggatatcgtatgccagagcgcaat

SEQ ID NO: 433506 - DNA, 30 bp, Artificial Sequence
  Synthetic oligonucleotide
tggatctgttgattgaaatgtacgcgcaat

SEQ ID NO: 433507 - DNA, 31 bp, Artificial Sequence
  Synthetic oligonucleotide
agtgagtctttttcttgttgcgaaaggcaat

SEQ ID NO: 433508 - DNA, 30 bp, Artificial Sequence
  Synthetic oligonucleotide
gacggaggtttcatcggctgtaaaggcaat

SEQ ID NO: 433509 - DNA, 30 bp, Artificial Sequence
  Synthetic oligonucleotide
cgcccaaagttcaaggggttctcaggcaat

SEQ ID NO: 433510 - DNA, 30 bp, Artificial Sequence
  Synthetic oligonucleotide
catcttgtattcatccgaccggtaggcaat

SEQ ID NO: 433511 - DNA, 30 bp, Artificial Sequence
  Synthetic oligonucleotide
gtcagactagatacctcttcactcggcaat

SEQ ID NO: 433512 - DNA, 30 bp, Artificial Sequence
  Synthetic oligonucleotide
taatgctaaagatctcactaattcggcaat

SEQ ID NO: 433513 - DNA, 30 bp, Artificial Sequence
  Synthetic oligonucleotide
tttttgtggatccgtaaagagacgggcaat

SEQ ID NO: 433514 - DNA, 30 bp, Artificial Sequence
  Synthetic oligonucleotide
atcttgataagattatggacgctgggcaat

SEQ ID NO: 433515 - DNA, 30 bp, Artificial Sequence
  Synthetic oligonucleotide
tgtggggcggaaaatacttatctgggcaat

SEQ ID NO: 433516 - DNA, 30 bp, Artificial Sequence
  Synthetic oligonucleotide
atttcaaaatgtccaacggaggatggcaat

SEQ ID NO: 433517 - DNA, 30 bp, Artificial Sequence
  Synthetic oligonucleotide
tacttagttgtcacatggaagagatgcaat

SEQ ID NO: 433518 - DNA, 30 bp, Artificial Sequence
  Synthetic oligonucleotide
ggtcctttcgtagttctcccgcattgcaat

SEQ ID NO: 433519 - DNA, 30 bp, Artificial Sequence
  Synthetic oligonucleotide
ggcgacccggatcctgcgtgggattgcaat

SEQ ID NO: 433520 - DNA, 30 bp, Artificial Sequence
  Synthetic oligonucleotide
gaaatgagtcatgatgcaccaagttgcaat

SEQ ID NO: 433521 - DNA, 30 bp, Artificial Sequence
  Synthetic oligonucleotide
tttagcagtgactatggtgggaaaatcaat

SEQ ID NO: 433522 - DNA, 30 bp, Artificial Sequence
  Synthetic oligonucleotide
gactaagacgccaagccagttagaatcaat

SEQ ID NO: 433523 - DNA, 30 bp, Artificial Sequence
  Synthetic oligonucleotide
atggagtgcaactgctggttagccatcaat

SEQ ID NO: 433524 - DNA, 30 bp, Artificial Sequence
  Synthetic oligonucleotide
tccttgagactcacttatgtgggcatcaat

SEQ ID NO: 433525 - DNA, 30 bp, Artificial Sequence
  Synthetic oligonucleotide
tcgtaccaagcgtacggcaatcagatcaat

SEQ ID NO: 433526 - DNA, 30 bp, Artificial Sequence
  Synthetic oligonucleotide
atgaccttatggactggtttaatgatcaat

SEQ ID NO: 433527 - DNA, 30 bp, Artificial Sequence
  Synthetic oligonucleotide
acttggataacacttatcttcgtgatcaat

SEQ ID NO: 433528 - DNA, 30 bp, Artificial Sequence
  Synthetic oligonucleotide
tgactagcttgaactactagggttatcaat

SEQ ID NO: 433529 - DNA, 30 bp, Artificial Sequence
  Synthetic oligonucleotide
atgtacgcaggaccaatgtatgcactcaat

SEQ ID NO: 433530 - DNA, 30 bp, Artificial Sequence
  Synthetic oligonucleotide
gtcattcacatgtcgggtatacgactcaat

SEQ ID NO: 433531 - DNA, 30 bp, Artificial Sequence
  Synthetic oligonucleotide
ttttgctatcatacacgaaggctactcaat

SEQ ID NO: 433532 - DNA, 30 bp, Artificial Sequence
  Synthetic oligonucleotide
tagcagtagttccagcttagcgatctcaat

SEQ ID NO: 433533 - DNA, 30 bp, Artificial Sequence
  Synthetic oligonucleotide
ctagtagaactggttgtatcctttctcaat

SEQ ID NO: 433534 - DNA, 30 bp, Artificial Sequence
  Synthetic oligonucleotide
gcgtccacgccgtggtaacccggagtcaat

SEQ ID NO: 433535 - DNA, 30 bp, Artificial Sequence
  Synthetic oligonucleotide
acaaaatgaccatcgaatagaacggtcaat

SEQ ID NO: 433536 - DNA, 30 bp, Artificial Sequence
  Synthetic oligonucleotide
gtgagatgcaacgttatagccacggtcaat

SEQ ID NO: 433537 - DNA, 30 bp, Artificial Sequence
  Synthetic oligonucleotide
aacaagatcacccatcttacgggggtcaat

SEQ ID NO: 433538 - DNA, 30 bp, Artificial Sequence
  Synthetic oligonucleotide
tgtgggacgatccgcattgcgcttgtcaat

SEQ ID NO: 433539 - DNA, 30 bp, Artificial Sequence
  Synthetic oligonucleotide
cttctaagaatcgatccatgagttgtcaat

SEQ ID NO: 433540 - DNA, 30 bp, Artificial Sequence
  Synthetic oligonucleotide
tcttcgcggccatacagggttccattcaat

SEQ ID NO: 433541 - DNA, 30 bp, Artificial Sequence
  Synthetic oligonucleotide
aactgatggtgtcgatggcctgagttcaat

SEQ ID NO: 433542 - DNA, 30 bp, Artificial Sequence
  Synthetic oligonucleotide
cccaccacgtattgtgggggctcgttcaat

SEQ ID NO: 433543 - DNA, 30 bp, Artificial Sequence
  Synthetic oligonucleotide
gaggcgctgttcctctggtgtatgttcaat

SEQ ID NO: 433544 - DNA, 30 bp, Artificial Sequence
  Synthetic oligonucleotide
acccagcttagttaccagttcactttcaat

SEQ ID NO: 433545 - DNA, 30 bp, Artificial Sequence
  Synthetic oligonucleotide
ctttgtaaggtctaagtattgacaaagaat

SEQ ID NO: 433546 - DNA, 30 bp, Artificial Sequence
  Synthetic oligonucleotide
ctggttgcgatttgggatcagtcaaagaat

SEQ ID NO: 433547 - DNA, 30 bp, Artificial Sequence
  Synthetic oligonucleotide
gtaattttaatggaacgtcgatgaaagaat

SEQ ID NO: 433548 - DNA, 30 bp, Artificial Sequence
  Synthetic oligonucleotide
tttgagattgcgacctggtcgctaaagaat

SEQ ID NO: 433549 - DNA, 30 bp, Artificial Sequence
  Synthetic oligonucleotide
acttctgtcaatcatcaaatattaaagaat

SEQ ID NO: 433550 - DNA, 30 bp, Artificial Sequence
  Synthetic oligonucleotide
gactatcgagggaagttattgtccaagaat

SEQ ID NO: 433551 - DNA, 30 bp, Artificial Sequence
  Synthetic oligonucleotide
atcctggggccccaggctcttagcaagaat

SEQ ID NO: 433552 - DNA, 30 bp, Artificial Sequence
  Synthetic oligonucleotide
gcagtcaaaagtcagatctgcggcaagaat

SEQ ID NO: 433553 - DNA, 30 bp, Artificial Sequence
  Synthetic oligonucleotide
atcgggaatatgctttgttattgtaagaat

SEQ ID NO: 433554 - DNA, 30 bp, Artificial Sequence
  Synthetic oligonucleotide
ggaagatcccagccgtaccccgcacagaat

SEQ ID NO: 433555 - DNA, 30 bp, Artificial Sequence
  Synthetic oligonucleotide
tgaacgccaataagacacgtaatacagaat

SEQ ID NO: 433556 - DNA, 30 bp, Artificial Sequence
  Synthetic oligonucleotide
tatttaaatgacgctggagctatacagaat

SEQ ID NO: 433557 - DNA, 30 bp, Artificial Sequence
  Synthetic oligonucleotide
tgcggttcggttaaaatgttcctacagaat

SEQ ID NO: 433558 - DNA, 30 bp, Artificial Sequence
  Synthetic oligonucleotide
gcggggaaagcggcaccttgagggcagaat

SEQ ID NO: 433559 - DNA, 30 bp, Artificial Sequence
  Synthetic oligonucleotide
tagattaaccctcattattggtggcagaat

SEQ ID NO: 433560 - DNA, 30 bp, Artificial Sequence
  Synthetic oligonucleotide
ctggggaacatgtgaggcccgaatcagaat

SEQ ID NO: 433561 - DNA, 30 bp, Artificial Sequence
  Synthetic oligonucleotide
tataagggtccccaatgtgattttcagaat

SEQ ID NO: 433562 - DNA, 30 bp, Artificial Sequence
  Synthetic oligonucleotide
atcctatgcgttgtagtcggttttcagaat

SEQ ID NO: 433563 - DNA, 30 bp, Artificial Sequence
  Synthetic oligonucleotide
tcggggtcgtttataatctgaacagagaat

SEQ ID NO: 433564 - DNA, 30 bp, Artificial Sequence
  Synthetic oligonucleotide
tgatcgctcatcgcttccctcggagagaat

SEQ ID NO: 433565 - DNA, 30 bp, Artificial Sequence
  Synthetic oligonucleotide
acccaacgacatatttttcgcagcgagaat

SEQ ID NO: 433566 - DNA, 30 bp, Artificial Sequence
  Synthetic oligonucleotide
cgcctaccagagcgcgcaaggcgcgagaat

SEQ ID NO: 433567 - DNA, 30 bp, Artificial Sequence
  Synthetic oligonucleotide
cccgcttaacgttagcaccgggcggagaat

SEQ ID NO: 433568 - DNA, 30 bp, Artificial Sequence
  Synthetic oligonucleotide
tttacagctgagaaatttgttcgggagaat

SEQ ID NO: 433569 - DNA, 30 bp, Artificial Sequence
  Synthetic oligonucleotide
aaaacttaaattcctaaattggaatagaat

SEQ ID NO: 433570 - DNA, 30 bp, Artificial Sequence
  Synthetic oligonucleotide
caggtgggcgaggtccgaccgtactagaat

SEQ ID NO: 433571 - DNA, 30 bp, Artificial Sequence
  Synthetic oligonucleotide
gaatagcaactacaaaattcttcctagaat

SEQ ID NO: 433572 - DNA, 30 bp, Artificial Sequence
  Synthetic oligonucleotide
ttgcctaatcccttggcgcggaagtagaat

SEQ ID NO: 433573 - DNA, 30 bp, Artificial Sequence
  Synthetic oligonucleotide
gttcatgctagaatgccatgtttgtagaat

SEQ ID NO: 433574 - DNA, 30 bp, Artificial Sequence
  Synthetic oligonucleotide
aaagaggtggtgataatctgctgttagaat

SEQ ID NO: 433575 - DNA, 30 bp, Artificial Sequence
  Synthetic oligonucleotide
ttgaaggtctctattacattaaaaacgaat

SEQ ID NO: 433576 - DNA, 30 bp, Artificial Sequence
  Synthetic oligonucleotide
attgaaaaacttagtgctcaagaaacgaat

SEQ ID NO: 433577 - DNA, 30 bp, Artificial Sequence
  Synthetic oligonucleotide
atgatgcgcagtaaacgtcatctaacgaat

SEQ ID NO: 433578 - DNA, 30 bp, Artificial Sequence
  Synthetic oligonucleotide
cccatacacgtcaaaggccgcttcacgaat

SEQ ID NO: 433579 - DNA, 30 bp, Artificial Sequence
  Synthetic oligonucleotide
cctgggtctggacagctaattttcacgaat

SEQ ID NO: 433580 - DNA, 30 bp, Artificial Sequence
  Synthetic oligonucleotide
aaaactcgaaacccaattcggtagacgaat

SEQ ID NO: 433581 - DNA, 30 bp, Artificial Sequence
  Synthetic oligonucleotide
aatcgaggcagacactacgggtcgacgaat

SEQ ID NO: 433582 - DNA, 30 bp, Artificial Sequence
  Synthetic oligonucleotide
atctgtttggcggattcgtagatgacgaat

SEQ ID NO: 433583 - DNA, 30 bp, Artificial Sequence
  Synthetic oligonucleotide
gcggaaaggcttatgagggacgtgacgaat

SEQ ID NO: 433584 - DNA, 30 bp, Artificial Sequence
  Synthetic oligonucleotide
accgcagataaccgcaggactaatacgaat

SEQ ID NO: 433585 - DNA, 30 bp, Artificial Sequence
  Synthetic oligonucleotide
ttggactctacattcctcgtgactacgaat

SEQ ID NO: 433586 - DNA, 30 bp, Artificial Sequence
  Synthetic oligonucleotide
gtgtggttttaggacagaccgcacccgaat

SEQ ID NO: 433587 - DNA, 30 bp, Artificial Sequence
  Synthetic oligonucleotide
acagggttcagttctcagtggtacgcgaat

SEQ ID NO: 433588 - DNA, 30 bp, Artificial Sequence
  Synthetic oligonucleotide
acatgccatccgaatggtacgacggcgaat

SEQ ID NO: 433589 - DNA, 30 bp, Artificial Sequence
  Synthetic oligonucleotide
ggttccgtagaatggttaaagtcggcgaat

SEQ ID NO: 433590 - DNA, 30 bp, Artificial Sequence
  Synthetic oligonucleotide
caacaacctacgtgatttatatgggcgaat

SEQ ID NO: 433591 - DNA, 30 bp, Artificial Sequence
  Synthetic oligonucleotide
atgaatgtctggaccgagctctttgcgaat

SEQ ID NO: 433592 - DNA, 30 bp, Artificial Sequence
  Synthetic oligonucleotide
tggtattttagtaggaggtccaaatcgaat

SEQ ID NO: 433593 - DNA, 30 bp, Artificial Sequence
  Synthetic oligonucleotide
ctccgactctgtacgatgggagcatcgaat

SEQ ID NO: 433594 - DNA, 30 bp, Artificial Sequence
  Synthetic oligonucleotide
acagtagcataataaggcggttgatcgaat

SEQ ID NO: 433595 - DNA, 31 bp, Artificial Sequence
  Synthetic oligonucleotide
agggtccacggttttattggaaccctcgaat

SEQ ID NO: 433596 - DNA, 30 bp, Artificial Sequence
  Synthetic oligonucleotide
caatagtagtcaccttagtcggggtcgaat

SEQ ID NO: 433597 - DNA, 30 bp, Artificial Sequence
  Synthetic oligonucleotide
ttcaaatatcgccagacgccgacttcgaat

SEQ ID NO: 433598 - DNA, 30 bp, Artificial Sequence
  Synthetic oligonucleotide
gacgagaccggatcaatttaaagttcgaat

SEQ ID NO: 433599 - DNA, 30 bp, Artificial Sequence
  Synthetic oligonucleotide
gcgggtcttgacagctttatagtaaggaat

SEQ ID NO: 433600 - DNA, 30 bp, Artificial Sequence
  Synthetic oligonucleotide
ttattttggagtctaatgactaacaggaat

SEQ ID NO: 433601 - DNA, 30 bp, Artificial Sequence
  Synthetic oligonucleotide
gtaacatgtgattagcgttagcacaggaat

SEQ ID NO: 433602 - DNA, 30 bp, Artificial Sequence
  Synthetic oligonucleotide
caaaaaggtgttgctaaaacgcagaggaat

SEQ ID NO: 433603 - DNA, 30 bp, Artificial Sequence
  Synthetic oligonucleotide
cgttctcgcgaccaacttttaggtaggaat

SEQ ID NO: 433604 - DNA, 31 bp, Artificial Sequence
  Synthetic oligonucleotide
ttattaagggaaaccgccgaacaatcggaat

SEQ ID NO: 433605 - DNA, 30 bp, Artificial Sequence
  Synthetic oligonucleotide
accaagtattttcagctgtcatatcggaat

SEQ ID NO: 433606 - DNA, 30 bp, Artificial Sequence
  Synthetic oligonucleotide
gatatttgtacaaaggcgtagggtcggaat

SEQ ID NO: 433607 - DNA, 30 bp, Artificial Sequence
  Synthetic oligonucleotide
cttcttcagtttctagctgaagaagggaat

SEQ ID NO: 433608 - DNA, 30 bp, Artificial Sequence
  Synthetic oligonucleotide
gtgtggctcgcgttgcttttacgcgggaat

SEQ ID NO: 433609 - DNA, 30 bp, Artificial Sequence
  Synthetic oligonucleotide
gcagcgaataagtttgatacattcgggaat

SEQ ID NO: 433610 - DNA, 30 bp, Artificial Sequence
  Synthetic oligonucleotide
ttaataacacggacacgtaatcgggggaat

SEQ ID NO: 433611 - DNA, 30 bp, Artificial Sequence
  Synthetic oligonucleotide
gcgggggctttcgcaccatgggtggggaat

SEQ ID NO: 433612 - DNA, 30 bp, Artificial Sequence
  Synthetic oligonucleotide
tctagaatgttttcactgaagactgggaat

SEQ ID NO: 433613 - DNA, 30 bp, Artificial Sequence
  Synthetic oligonucleotide
tccaaatgggtccgtatcggcgctgggaat

SEQ ID NO: 433614 - DNA, 30 bp, Artificial Sequence
  Synthetic oligonucleotide
tccagggcctcactgcctgacccctggaat

SEQ ID NO: 433615 - DNA, 30 bp, Artificial Sequence
  Synthetic oligonucleotide
gataatgcctgccaaagggctagctggaat

SEQ ID NO: 433616 - DNA, 30 bp, Artificial Sequence
  Synthetic oligonucleotide
gttgctagtatctcttataagcgctggaat

SEQ ID NO: 433617 - DNA, 30 bp, Artificial Sequence
  Synthetic oligonucleotide
ggatctgggcctgaaaagtcaacgtggaat

SEQ ID NO: 433618 - DNA, 30 bp, Artificial Sequence
  Synthetic oligonucleotide
agtttaggaatccagatacttgcgtggaat

SEQ ID NO: 433619 - DNA, 30 bp, Artificial Sequence
  Synthetic oligonucleotide
cactttttcgataatcgagagaggtggaat

SEQ ID NO: 433620 - DNA, 30 bp, Artificial Sequence
  Synthetic oligonucleotide
tcacagacgcccccaactaaaaattggaat

SEQ ID NO: 433621 - DNA, 30 bp, Artificial Sequence
  Synthetic oligonucleotide
gccacgtaaagtcactaaggcgcttggaat

SEQ ID NO: 433622 - DNA, 30 bp, Artificial Sequence
  Synthetic oligonucleotide
gacaccgtaggtgaggataatgaaatgaat

SEQ ID NO: 433623 - DNA, 30 bp, Artificial Sequence
  Synthetic oligonucleotide
taggcgggtgatgcccaatggcgaatgaat

SEQ ID NO: 433624 - DNA, 30 bp, Artificial Sequence
  Synthetic oligonucleotide
tagaaagtacaacttgcgcgcggcatgaat

SEQ ID NO: 433625 - DNA, 30 bp, Artificial Sequence
  Synthetic oligonucleotide
aactcgatccttttctctcatgcgatgaat

SEQ ID NO: 433626 - DNA, 30 bp, Artificial Sequence
  Synthetic oligonucleotide
tgtttcaacgtaatccaaagatatatgaat

SEQ ID NO: 433627 - DNA, 30 bp, Artificial Sequence
  Synthetic oligonucleotide
atactcgaccgtcttttgttcgctatgaat

SEQ ID NO: 433628 - DNA, 30 bp, Artificial Sequence
  Synthetic oligonucleotide
tcctccctctgcctaggcatctttatgaat

SEQ ID NO: 433629 - DNA, 30 bp, Artificial Sequence
  Synthetic oligonucleotide
ttaagcagttgtatacatgcaaacctgaat

SEQ ID NO: 433630 - DNA, 30 bp, Artificial Sequence
  Synthetic oligonucleotide
aactgaggtaggtccccagtaaccctgaat

SEQ ID NO: 433631 - DNA, 30 bp, Artificial Sequence
  Synthetic oligonucleotide
attcttttgtaggttatcttgtagctgaat

SEQ ID NO: 433632 - DNA, 30 bp, Artificial Sequence
  Synthetic oligonucleotide
aaggtcgggaattattacgttacgctgaat

SEQ ID NO: 433633 - DNA, 30 bp, Artificial Sequence
  Synthetic oligonucleotide
ttaggaactcaagctgttgagtggctgaat

SEQ ID NO: 433634 - DNA, 30 bp, Artificial Sequence
  Synthetic oligonucleotide
gagggttcgtgcaaatccgatctgctgaat

SEQ ID NO: 433635 - DNA, 30 bp, Artificial Sequence
  Synthetic oligonucleotide
taacaatgcccggtacgatcggccgtgaat

SEQ ID NO: 433636 - DNA, 30 bp, Artificial Sequence
  Synthetic oligonucleotide
tcttatctgttgtgttttcctcttgtgaat

SEQ ID NO: 433637 - DNA, 30 bp, Artificial Sequence
  Synthetic oligonucleotide
actggtgatgtggttgtgctcgttgtgaat

SEQ ID NO: 433638 - DNA, 30 bp, Artificial Sequence
  Synthetic oligonucleotide
ttagggacacgtggatctacgagcttgaat

SEQ ID NO: 433639 - DNA, 30 bp, Artificial Sequence
  Synthetic oligonucleotide
tgttcaattcgcgaaccccagcgcttgaat

SEQ ID NO: 433640 - DNA, 30 bp, Artificial Sequence
  Synthetic oligonucleotide
acgatattgatattctcctgcttcttgaat

SEQ ID NO: 433641 - DNA, 30 bp, Artificial Sequence
  Synthetic oligonucleotide
ggaataatttctgggcacggagagttgaat

SEQ ID NO: 433642 - DNA, 30 bp, Artificial Sequence
  Synthetic oligonucleotide
taaggtcccaaagtaatatagtagttgaat

SEQ ID NO: 433643 - DNA, 30 bp, Artificial Sequence
  Synthetic oligonucleotide
tatcatcataatataatccgcttgttgaat

SEQ ID NO: 433644 - DNA, 30 bp, Artificial Sequence
  Synthetic oligonucleotide
aaaagcggcagagtcaacagcatcaataat

SEQ ID NO: 433645 - DNA, 30 bp, Artificial Sequence
  Synthetic oligonucleotide
gagcataacttcgctctgggcgagaataat

SEQ ID NO: 433646 - DNA, 30 bp, Artificial Sequence
  Synthetic oligonucleotide
ttcagcgacccagtgccccatgagaataat

SEQ ID NO: 433647 - DNA, 30 bp, Artificial Sequence
  Synthetic oligonucleotide
cgacgcttgagttagccatctgagaataat

SEQ ID NO: 433648 - DNA, 30 bp, Artificial Sequence
  Synthetic oligonucleotide
aagagcgctatcagattgtgggcgaataat

SEQ ID NO: 433649 - DNA, 30 bp, Artificial Sequence
  Synthetic oligonucleotide
tatccggagagtgccgcaaggctgaataat

SEQ ID NO: 433650 - DNA, 30 bp, Artificial Sequence
  Synthetic oligonucleotide
gggtagtgacgccggtataaggtgaataat

SEQ ID NO: 433651 - DNA, 30 bp, Artificial Sequence
  Synthetic oligonucleotide
agcttacaaggaggcggcctattgaataat

SEQ ID NO: 433652 - DNA, 30 bp, Artificial Sequence
  Synthetic oligonucleotide
gtgtttcacactgttatgtgcttgaataat

SEQ ID NO: 433653 - DNA, 30 bp, Artificial Sequence
  Synthetic oligonucleotide
ctgagtagatcttctatccgtgataataat

SEQ ID NO: 433654 - DNA, 30 bp, Artificial Sequence
  Synthetic oligonucleotide
atttagtgttagggatcattatttaataat

SEQ ID NO: 433655 - DNA, 30 bp, Artificial Sequence
  Synthetic oligonucleotide
aacaatttcatttgggtgccccaacataat

SEQ ID NO: 433656 - DNA, 30 bp, Artificial Sequence
  Synthetic oligonucleotide
aatttgatcgcaaaacagttccaacataat

SEQ ID NO: 433657 - DNA, 30 bp, Artificial Sequence
  Synthetic oligonucleotide
gttatcgcgcaaaccacaattgcacataat

SEQ ID NO: 433658 - DNA, 30 bp, Artificial Sequence
  Synthetic oligonucleotide
ggactcacctttgcttaattcagccataat

SEQ ID NO: 433659 - DNA, 30 bp, Artificial Sequence
  Synthetic oligonucleotide
cacccacacggtgcgtaaatcctgcataat

SEQ ID NO: 433660 - DNA, 30 bp, Artificial Sequence
  Synthetic oligonucleotide
tgaaacttctagggtctgaagcgtcataat

SEQ ID NO: 433661 - DNA, 30 bp, Artificial Sequence
  Synthetic oligonucleotide
aagacacccgatagacagcagcgtcataat

SEQ ID NO: 433662 - DNA, 30 bp, Artificial Sequence
  Synthetic oligonucleotide
cgtatactgtgcattgaatttggtcataat

SEQ ID NO: 433663 - DNA, 30 bp, Artificial Sequence
  Synthetic oligonucleotide
ttggtctaagttgacggtaaatcagataat

SEQ ID NO: 433664 - DNA, 30 bp, Artificial Sequence
  Synthetic oligonucleotide
acacctctattctatctcggtcacgataat

SEQ ID NO: 433665 - DNA, 30 bp, Artificial Sequence
  Synthetic oligonucleotide
tcgaggattccggttgccagggaggataat

SEQ ID NO: 433666 - DNA, 30 bp, Artificial Sequence
  Synthetic oligonucleotide
gggcatgcgatggaggtgctcatggataat

SEQ ID NO: 433667 - DNA, 30 bp, Artificial Sequence
  Synthetic oligonucleotide
atttttagaaacggtatttaatatgataat

SEQ ID NO: 433668 - DNA, 30 bp, Artificial Sequence
  Synthetic oligonucleotide
tagtctattagtttgtcgcgtgctgataat

SEQ ID NO: 433669 - DNA, 30 bp, Artificial Sequence
  Synthetic oligonucleotide
agcccaataccgcggtcgagaggtgataat

SEQ ID NO: 433670 - DNA, 30 bp, Artificial Sequence
  Synthetic oligonucleotide
gatacatagagtccgcttacgggtgataat

SEQ ID NO: 433671 - DNA, 31 bp, Artificial Sequence
  Synthetic oligonucleotide
taggtttgcgatgaattgttcacttgataat

SEQ ID NO: 433672 - DNA, 30 bp, Artificial Sequence
  Synthetic oligonucleotide
atcaataagattgggtggccctcatataat

SEQ ID NO: 433673 - DNA, 30 bp, Artificial Sequence
  Synthetic oligonucleotide
gcaagtaattcagctgcggtctcatataat

SEQ ID NO: 433674 - DNA, 30 bp, Artificial Sequence
  Synthetic oligonucleotide
acgttccaaggtcgggttgacatatataat

SEQ ID NO: 433675 - DNA, 30 bp, Artificial Sequence
  Synthetic oligonucleotide
tgccttccttacggccctctggtatataat

SEQ ID NO: 433676 - DNA, 30 bp, Artificial Sequence
  Synthetic oligonucleotide
tgataatctgtacgacacaggagctataat

SEQ ID NO: 433677 - DNA, 30 bp, Artificial Sequence
  Synthetic oligonucleotide
aggcctatccaagcgtgagttgtctataat

SEQ ID NO: 433678 - DNA, 30 bp, Artificial Sequence
  Synthetic oligonucleotide
gtcccaatcgtggctagcatcccaactaat

SEQ ID NO: 433679 - DNA, 30 bp, Artificial Sequence
  Synthetic oligonucleotide
gcctaatgtatgtgttactctgccactaat

SEQ ID NO: 433680 - DNA, 31 bp, Artificial Sequence
  Synthetic oligonucleotide
aagccggccaccggcacccatacgcactaat

SEQ ID NO: 433681 - DNA, 30 bp, Artificial Sequence
  Synthetic oligonucleotide
gacgttagtcccgattagttccagactaat

SEQ ID NO: 433682 - DNA, 30 bp, Artificial Sequence
  Synthetic oligonucleotide
tcagtgattatcgttcatatagcgactaat

SEQ ID NO: 433683 - DNA, 30 bp, Artificial Sequence
  Synthetic oligonucleotide
tgaacctttgtgggtctcccggcgactaat

SEQ ID NO: 433684 - DNA, 30 bp, Artificial Sequence
  Synthetic oligonucleotide
gaggtcttctgtatctacatcaatactaat

SEQ ID NO: 433685 - DNA, 30 bp, Artificial Sequence
  Synthetic oligonucleotide
aaggagggctttcccatggtacgtactaat

SEQ ID NO: 433686 - DNA, 30 bp, Artificial Sequence
  Synthetic oligonucleotide
gcggtggtccagtatgcagaacgacctaat

SEQ ID NO: 433687 - DNA, 30 bp, Artificial Sequence
  Synthetic oligonucleotide
tcctccgcgtcttatgaggggttacctaat

SEQ ID NO: 433688 - DNA, 30 bp, Artificial Sequence
  Synthetic oligonucleotide
gcatagacgtgcgggcttcatcggcctaat

SEQ ID NO: 433689 - DNA, 30 bp, Artificial Sequence
  Synthetic oligonucleotide
tgataatagcgtcatcattttatgcctaat

SEQ ID NO: 433690 - DNA, 30 bp, Artificial Sequence
  Synthetic oligonucleotide
gatttaaaatgcgttaattcacctcctaat

SEQ ID NO: 433691 - DNA, 30 bp, Artificial Sequence
  Synthetic oligonucleotide
tgactccaacatctttggatggcagctaat

SEQ ID NO: 433692 - DNA, 30 bp, Artificial Sequence
  Synthetic oligonucleotide
ttaaggaaatcgatttttaacctagctaat

SEQ ID NO: 433693 - DNA, 30 bp, Artificial Sequence
  Synthetic oligonucleotide
tggtgttgacttcacggcgtggacgctaat

SEQ ID NO: 433694 - DNA, 30 bp, Artificial Sequence
  Synthetic oligonucleotide
ttgtctgcagctgtagatgcccaggctaat

SEQ ID NO: 433695 - DNA, 30 bp, Artificial Sequence
  Synthetic oligonucleotide
ataaggctaggcaatatccattttgctaat

SEQ ID NO: 433696 - DNA, 30 bp, Artificial Sequence
  Synthetic oligonucleotide
ttgctagattgtaggttatgctactctaat

SEQ ID NO: 433697 - DNA, 30 bp, Artificial Sequence
  Synthetic oligonucleotide
caagtaactagagttgcacggttctctaat

SEQ ID NO: 433698 - DNA, 30 bp, Artificial Sequence
  Synthetic oligonucleotide
actcgctagaattctatcggatagtctaat

SEQ ID NO: 433699 - DNA, 30 bp, Artificial Sequence
  Synthetic oligonucleotide
gtgctccgaggtcctccttctacgtctaat

SEQ ID NO: 433700 - DNA, 30 bp, Artificial Sequence
  Synthetic oligonucleotide
caagcttaacttcacgtaccgatgtctaat

SEQ ID NO: 433701 - DNA, 30 bp, Artificial Sequence
  Synthetic oligonucleotide
caatttgcaaaaatatgatgtttgtctaat

SEQ ID NO: 433702 - DNA, 30 bp, Artificial Sequence
  Synthetic oligonucleotide
tgtagcaaaggcggcgcgaattattctaat

SEQ ID NO: 433703 - DNA, 30 bp, Artificial Sequence
  Synthetic oligonucleotide
tctctccgtgatgagtccaagtaaagtaat

SEQ ID NO: 433704 - DNA, 30 bp, Artificial Sequence
  Synthetic oligonucleotide
ggcccacataaccgtataccagcaagtaat

SEQ ID NO: 433705 - DNA, 30 bp, Artificial Sequence
  Synthetic oligonucleotide
ttttaggttaaggtgtctcggtcaagtaat

SEQ ID NO: 433706 - DNA, 30 bp, Artificial Sequence
  Synthetic oligonucleotide
atgtccaaaacacttactccttcaagtaat

SEQ ID NO: 433707 - DNA, 30 bp, Artificial Sequence
  Synthetic oligonucleotide
atcctacataatcagaaataatgaagtaat

SEQ ID NO: 433708 - DNA, 30 bp, Artificial Sequence
  Synthetic oligonucleotide
atgacgtgtgattttacgagattaagtaat

SEQ ID NO: 433709 - DNA, 30 bp, Artificial Sequence
  Synthetic oligonucleotide
tcggaagcgtggagcagcaaggggagtaat

SEQ ID NO: 433710 - DNA, 30 bp, Artificial Sequence
  Synthetic oligonucleotide
atatggacacatgggcgctcgtatagtaat

SEQ ID NO: 433711 - DNA, 30 bp, Artificial Sequence
  Synthetic oligonucleotide
gtgaattttagcgtgcggggtagacgtaat

SEQ ID NO: 433712 - DNA, 31 bp, Artificial Sequence
  Synthetic oligonucleotide
aggtcgattcattacagcgctgctacgtaat

SEQ ID NO: 433713 - DNA, 30 bp, Artificial Sequence
  Synthetic oligonucleotide
gcgataggtttctggtttagaaagcgtaat

SEQ ID NO: 433714 - DNA, 30 bp, Artificial Sequence
  Synthetic oligonucleotide
aactatcgtatatagaagtggacgcgtaat

SEQ ID NO: 433715 - DNA, 30 bp, Artificial Sequence
  Synthetic oligonucleotide
gcctgtccagcgcccggggtaaggcgtaat

SEQ ID NO: 433716 - DNA, 30 bp, Artificial Sequence
  Synthetic oligonucleotide
ttaactatatttggggtctgttctcgtaat

SEQ ID NO: 433717 - DNA, 30 bp, Artificial Sequence
  Synthetic oligonucleotide
tagtcccgtttgagtcaggtccttcgtaat

SEQ ID NO: 433718 - DNA, 30 bp, Artificial Sequence
  Synthetic oligonucleotide
tcatgttgggggaatatacacataggtaat

SEQ ID NO: 433719 - DNA, 30 bp, Artificial Sequence
  Synthetic oligonucleotide
aacaaccgggctgagagatacaacggtaat

SEQ ID NO: 433720 - DNA, 30 bp, Artificial Sequence
  Synthetic oligonucleotide
gtcagatgcagtcggtattaagccggtaat

SEQ ID NO: 433721 - DNA, 30 bp, Artificial Sequence
  Synthetic oligonucleotide
tctgctgacctttttgccggtatcggtaat

SEQ ID NO: 433722 - DNA, 30 bp, Artificial Sequence
  Synthetic oligonucleotide
gagctattactagcctatggccagggtaat

SEQ ID NO: 433723 - DNA, 30 bp, Artificial Sequence
  Synthetic oligonucleotide
ctggtagccactcccggaggtacgggtaat

SEQ ID NO: 433724 - DNA, 30 bp, Artificial Sequence
  Synthetic oligonucleotide
attggttgtcaaaaacgagggcggggtaat

SEQ ID NO: 433725 - DNA, 30 bp, Artificial Sequence
  Synthetic oligonucleotide
ggacgcatgtccaattttaaggggggtaat

SEQ ID NO: 433726 - DNA, 30 bp, Artificial Sequence
  Synthetic oligonucleotide
acactctatccttgatggataaatggtaat

SEQ ID NO: 433727 - DNA, 30 bp, Artificial Sequence
  Synthetic oligonucleotide
gacgttgcatggacagacccacatggtaat

SEQ ID NO: 433728 - DNA, 30 bp, Artificial Sequence
  Synthetic oligonucleotide
gaggctgcaccaagtcacaattctggtaat

SEQ ID NO: 433729 - DNA, 30 bp, Artificial Sequence
  Synthetic oligonucleotide
gtcactggcccataaactgcttgtggtaat

SEQ ID NO: 433730 - DNA, 30 bp, Artificial Sequence
  Synthetic oligonucleotide
aacggctattgatatgacccaaaatgtaat

SEQ ID NO: 433731 - DNA, 30 bp, Artificial Sequence
  Synthetic oligonucleotide
ggattttcagggttcggtgacgaatgtaat

SEQ ID NO: 433732 - DNA, 30 bp, Artificial Sequence
  Synthetic oligonucleotide
gtaaagctacatggacgtcagtaatgtaat

SEQ ID NO: 433733 - DNA, 30 bp, Artificial Sequence
  Synthetic oligonucleotide
accgcaaggacaattagtgcagcatgtaat

SEQ ID NO: 433734 - DNA, 30 bp, Artificial Sequence
  Synthetic oligonucleotide
accctcaaagttatttcgttagactgtaat

SEQ ID NO: 433735 - DNA, 30 bp, Artificial Sequence
  Synthetic oligonucleotide
catgttgatctggcccggtaagtctgtaat

SEQ ID NO: 433736 - DNA, 30 bp, Artificial Sequence
  Synthetic oligonucleotide
ttttataagacacattgcaaagagtgtaat

SEQ ID NO: 433737 - DNA, 30 bp, Artificial Sequence
  Synthetic oligonucleotide
gtttttttaatcaagatcgggatgtgtaat

SEQ ID NO: 433738 - DNA, 30 bp, Artificial Sequence
  Synthetic oligonucleotide
aacgcggcaactcaacactcagtgtgtaat

SEQ ID NO: 433739 - DNA, 30 bp, Artificial Sequence
  Synthetic oligonucleotide
aatcattgccagaagaatcaggattgtaat

SEQ ID NO: 433740 - DNA, 30 bp, Artificial Sequence
  Synthetic oligonucleotide
gaaaagggtcacttcgacgcactttgtaat

SEQ ID NO: 433741 - DNA, 30 bp, Artificial Sequence
  Synthetic oligonucleotide
tcgtctaaatgtatcctaaaagtttgtaat

SEQ ID NO: 433742 - DNA, 30 bp, Artificial Sequence
  Synthetic oligonucleotide
gcattgggtgccaatccacccttttgtaat

SEQ ID NO: 433743 - DNA, 30 bp, Artificial Sequence
  Synthetic oligonucleotide
ttgtaacggatcgccttgtactaaattaat

SEQ ID NO: 433744 - DNA, 30 bp, Artificial Sequence
  Synthetic oligonucleotide
gaaactgtatagctaaaaacctcaattaat

SEQ ID NO: 433745 - DNA, 30 bp, Artificial Sequence
  Synthetic oligonucleotide
gcaatgaattcgcaagaaatgaagattaat

SEQ ID NO: 433746 - DNA, 30 bp, Artificial Sequence
  Synthetic oligonucleotide
gtgtcaagtccctaatggctcatgattaat

SEQ ID NO: 433747 - DNA, 30 bp, Artificial Sequence
  Synthetic oligonucleotide
tacagcgacgctgtcaaactcgtgattaat

SEQ ID NO: 433748 - DNA, 30 bp, Artificial Sequence
  Synthetic oligonucleotide
tgtctgcaggtctatctatgatatattaat

SEQ ID NO: 433749 - DNA, 30 bp, Artificial Sequence
  Synthetic oligonucleotide
ctggtacgttggttagcggctattattaat

SEQ ID NO: 433750 - DNA, 30 bp, Artificial Sequence
  Synthetic oligonucleotide
catatgagattactgaatagtaaacttaat

SEQ ID NO: 433751 - DNA, 31 bp, Artificial Sequence
  Synthetic oligonucleotide
caccgtctctatgggagacttacaacttaat

SEQ ID NO: 433752 - DNA, 30 bp, Artificial Sequence
  Synthetic oligonucleotide
aaaccctgaagtaccttgagtgaacttaat

SEQ ID NO: 433753 - DNA, 30 bp, Artificial Sequence
  Synthetic oligonucleotide
gattggaacctcttatatagtgaacttaat

SEQ ID NO: 433754 - DNA, 30 bp, Artificial Sequence
  Synthetic oligonucleotide
tccccatcttcttactaagtcacacttaat

SEQ ID NO: 433755 - DNA, 30 bp, Artificial Sequence
  Synthetic oligonucleotide
cggaagtctctttacaataacggacttaat

SEQ ID NO: 433756 - DNA, 30 bp, Artificial Sequence
  Synthetic oligonucleotide
gcagcacctatagctaaaagcccccttaat

SEQ ID NO: 433757 - DNA, 30 bp, Artificial Sequence
  Synthetic oligonucleotide
gatagtgcataacccttacggcgccttaat

SEQ ID NO: 433758 - DNA, 30 bp, Artificial Sequence
  Synthetic oligonucleotide
tccatattctatgttctatatatccttaat

SEQ ID NO: 433759 - DNA, 30 bp, Artificial Sequence
  Synthetic oligonucleotide
tgtcttcccccgctaggcatgccgcttaat

SEQ ID NO: 433760 - DNA, 30 bp, Artificial Sequence
  Synthetic oligonucleotide
tacacatgcccatactatgaggcgcttaat

SEQ ID NO: 433761 - DNA, 30 bp, Artificial Sequence
  Synthetic oligonucleotide
ttcatgtctcagcggcaggagtggcttaat

SEQ ID NO: 433762 - DNA, 30 bp, Artificial Sequence
  Synthetic oligonucleotide
tttcctaagcacaatggaacgttgcttaat

SEQ ID NO: 433763 - DNA, 30 bp, Artificial Sequence
  Synthetic oligonucleotide
tgccccgggaagagcagcatccctcttaat

SEQ ID NO: 433764 - DNA, 30 bp, Artificial Sequence
  Synthetic oligonucleotide
cgctaaagtatgggcaataagcttcttaat

SEQ ID NO: 433765 - DNA, 30 bp, Artificial Sequence
  Synthetic oligonucleotide
gaggtgacgtgcatacacctctgagttaat

SEQ ID NO: 433766 - DNA, 30 bp, Artificial Sequence
  Synthetic oligonucleotide
gtgcaacccattaacgccgaaatagttaat

SEQ ID NO: 433767 - DNA, 30 bp, Artificial Sequence
  Synthetic oligonucleotide
cggcaagcggctgctgagtatttagttaat

SEQ ID NO: 433768 - DNA, 30 bp, Artificial Sequence
  Synthetic oligonucleotide
tcaaatagtatgcccaacgtctccgttaat

SEQ ID NO: 433769 - DNA, 30 bp, Artificial Sequence
  Synthetic oligonucleotide
gataaggacgctcagtatccgagcgttaat

SEQ ID NO: 433770 - DNA, 30 bp, Artificial Sequence
  Synthetic oligonucleotide
agaaatcttaagtatgtatcgggcgttaat

SEQ ID NO: 433771 - DNA, 30 bp, Artificial Sequence
  Synthetic oligonucleotide
ggttctctcacagcgcttctactcgttaat

SEQ ID NO: 433772 - DNA, 30 bp, Artificial Sequence
  Synthetic oligonucleotide
cggactcctagacaattagtccaggttaat

SEQ ID NO: 433773 - DNA, 30 bp, Artificial Sequence
  Synthetic oligonucleotide
tcggtaccgggtctcgtttaaggggttaat

SEQ ID NO: 433774 - DNA, 30 bp, Artificial Sequence
  Synthetic oligonucleotide
attaagtccgtttgctaatatgatgttaat

SEQ ID NO: 433775 - DNA, 30 bp, Artificial Sequence
  Synthetic oligonucleotide
gaaggggagcgattcggggcacctgttaat

SEQ ID NO: 433776 - DNA, 30 bp, Artificial Sequence
  Synthetic oligonucleotide
gacagggtggcatgcctgctttgtgttaat

SEQ ID NO: 433777 - DNA, 30 bp, Artificial Sequence
  Synthetic oligonucleotide
tgcaacattataaccggaaaggttgttaat

SEQ ID NO: 433778 - DNA, 30 bp, Artificial Sequence
  Synthetic oligonucleotide
tcatattatgtggaaccgttaaaatttaat

SEQ ID NO: 433779 - DNA, 30 bp, Artificial Sequence
  Synthetic oligonucleotide
ctcgacacgagggtcaaattataatttaat

SEQ ID NO: 433780 - DNA, 30 bp, Artificial Sequence
  Synthetic oligonucleotide
cacgtccgtgcccgccggcaaacatttaat

SEQ ID NO: 433781 - DNA, 30 bp, Artificial Sequence
  Synthetic oligonucleotide
aatgaacatggcaagaataacgtctttaat

SEQ ID NO: 433782 - DNA, 30 bp, Artificial Sequence
  Synthetic oligonucleotide
gccccaggtactaggaagttcccgtttaat

SEQ ID NO: 433783 - DNA, 30 bp, Artificial Sequence
  Synthetic oligonucleotide
cgtctaagatttgccagtggtgtgtttaat

SEQ ID NO: 433784 - DNA, 30 bp, Artificial Sequence
  Synthetic oligonucleotide
ctggcttgactcagacactagttgtttaat

SEQ ID NO: 433785 - DNA, 30 bp, Artificial Sequence
  Synthetic oligonucleotide
atgccccaagacctggatagcaattttaat

SEQ ID NO: 433786 - DNA, 30 bp, Artificial Sequence
  Synthetic oligonucleotide
gtaactcgatggtcgctggggacttttaat

SEQ ID NO: 433787 - DNA, 30 bp, Artificial Sequence
  Synthetic oligonucleotide
tgaggtttatatctctgggacagaaaacat

SEQ ID NO: 433788 - DNA, 30 bp, Artificial Sequence
  Synthetic oligonucleotide
gatttcctttacctcgggaaaaagaaacat

SEQ ID NO: 433789 - DNA, 30 bp, Artificial Sequence
  Synthetic oligonucleotide
aagacgctcctttaagtgggatggaaacat

SEQ ID NO: 433790 - DNA, 30 bp, Artificial Sequence
  Synthetic oligonucleotide
cccggatggtacttcgtagtcgtgaaacat

SEQ ID NO: 433791 - DNA, 30 bp, Artificial Sequence
  Synthetic oligonucleotide
aattgcagatttgattggcagcgtaaacat

SEQ ID NO: 433792 - DNA, 30 bp, Artificial Sequence
  Synthetic oligonucleotide
ttccaaagatttgaaaaggtatcacaacat

SEQ ID NO: 433793 - DNA, 30 bp, Artificial Sequence
  Synthetic oligonucleotide
tgatcgtcaaccgcgctagcgcgacaacat

SEQ ID NO: 433794 - DNA, 30 bp, Artificial Sequence
  Synthetic oligonucleotide
acgcaggagatgcggatatacacccaacat

SEQ ID NO: 433795 - DNA, 30 bp, Artificial Sequence
  Synthetic oligonucleotide
catggggtaccggcgctaagtctccaacat

SEQ ID NO: 433796 - DNA, 30 bp, Artificial Sequence
  Synthetic oligonucleotide
atctattttggtcatacttcattccaacat

SEQ ID NO: 433797 - DNA, 30 bp, Artificial Sequence
  Synthetic oligonucleotide
cagactgcgcacgccatttaacggcaacat

SEQ ID NO: 433798 - DNA, 30 bp, Artificial Sequence
  Synthetic oligonucleotide
ctttgtttggagctacatctcgtgcaacat

SEQ ID NO: 433799 - DNA, 30 bp, Artificial Sequence
  Synthetic oligonucleotide
ctacccgcgtgataaaagattggtcaacat

SEQ ID NO: 433800 - DNA, 30 bp, Artificial Sequence
  Synthetic oligonucleotide
cctttatagggtcgtaagccacttcaacat

SEQ ID NO: 433801 - DNA, 30 bp, Artificial Sequence
  Synthetic oligonucleotide
ctaggacgcggcctggtgagaaaagaacat

SEQ ID NO: 433802 - DNA, 30 bp, Artificial Sequence
  Synthetic oligonucleotide
caatagtgggttcgtttctctagagaacat

SEQ ID NO: 433803 - DNA, 30 bp, Artificial Sequence
  Synthetic oligonucleotide
cctttcgtcgctaacatgtgggccgaacat

SEQ ID NO: 433804 - DNA, 30 bp, Artificial Sequence
  Synthetic oligonucleotide
gttgccaccatgtcaactttatgggaacat

SEQ ID NO: 433805 - DNA, 30 bp, Artificial Sequence
  Synthetic oligonucleotide
cagatcttagacctctcgtctcgataacat

SEQ ID NO: 433806 - DNA, 30 bp, Artificial Sequence
  Synthetic oligonucleotide
ttagctcggttctaacgttatgtataacat

SEQ ID NO: 433807 - DNA, 30 bp, Artificial Sequence
  Synthetic oligonucleotide
atgcgatgtcgcgcaacattgagctaacat

SEQ ID NO: 433808 - DNA, 30 bp, Artificial Sequence
  Synthetic oligonucleotide
tattgttttcccgaaggtcttggctaacat

SEQ ID NO: 433809 - DNA, 30 bp, Artificial Sequence
  Synthetic oligonucleotide
tcctttcccgtcagggattaaatctaacat

SEQ ID NO: 433810 - DNA, 32 bp, Artificial Sequence
  Synthetic oligonucleotide
cttaccgattacctactctctgtaagtaacat

SEQ ID NO: 433811 - DNA, 30 bp, Artificial Sequence
  Synthetic oligonucleotide
ctacaccgagaaccggtcagagcgtaacat

SEQ ID NO: 433812 - DNA, 30 bp, Artificial Sequence
  Synthetic oligonucleotide
gtggggtttccctacaataccttgtaacat

SEQ ID NO: 433813 - DNA, 30 bp, Artificial Sequence
  Synthetic oligonucleotide
ctaagttttgggtgtacccgggattaacat

SEQ ID NO: 433814 - DNA, 30 bp, Artificial Sequence
  Synthetic oligonucleotide
tcataccgcccaatagtatgatattaacat

SEQ ID NO: 433815 - DNA, 30 bp, Artificial Sequence
  Synthetic oligonucleotide
aaagctgaacctcacggtcgagcaacacat

SEQ ID NO: 433816 - DNA, 30 bp, Artificial Sequence
  Synthetic oligonucleotide
ctttggtacgctggatattcgctaacacat

SEQ ID NO: 433817 - DNA, 30 bp, Artificial Sequence
  Synthetic oligonucleotide
agccgccgattataccatctggtaacacat

SEQ ID NO: 433818 - DNA, 30 bp, Artificial Sequence
  Synthetic oligonucleotide
ggggaagagcgtgtgcatccgcacacacat

SEQ ID NO: 433819 - DNA, 30 bp, Artificial Sequence
  Synthetic oligonucleotide
agcaaagggcgtgctgtaaattacacacat

SEQ ID NO: 433820 - DNA, 30 bp, Artificial Sequence
  Synthetic oligonucleotide
ggagatcgatcgtgacggtctatcacacat

SEQ ID NO: 433821 - DNA, 30 bp, Artificial Sequence
  Synthetic oligonucleotide
acttgtgctatctgatattgtatcacacat

SEQ ID NO: 433822 - DNA, 30 bp, Artificial Sequence
  Synthetic oligonucleotide
caactgtatatcgcgatagttatcacacat

SEQ ID NO: 433823 - DNA, 30 bp, Artificial Sequence
  Synthetic oligonucleotide
cgtagcgttggccttagagtgtggacacat

SEQ ID NO: 433824 - DNA, 30 bp, Artificial Sequence
  Synthetic oligonucleotide
attgcgcccggtatgtaaacggatacacat

SEQ ID NO: 433825 - DNA, 30 bp, Artificial Sequence
  Synthetic oligonucleotide
atttgtggacgtagacggagtagtacacat

SEQ ID NO: 433826 - DNA, 30 bp, Artificial Sequence
  Synthetic oligonucleotide
gtaaagaggaacggtcttgcatccccacat

SEQ ID NO: 433827 - DNA, 30 bp, Artificial Sequence
  Synthetic oligonucleotide
tcggtccgcatgtaggctcagccgccacat

SEQ ID NO: 433828 - DNA, 30 bp, Artificial Sequence
  Synthetic oligonucleotide
gtatttcgccgccttttaggatcgccacat

SEQ ID NO: 433829 - DNA, 30 bp, Artificial Sequence
  Synthetic oligonucleotide
taaaaacttggtgacccttagtatccacat

SEQ ID NO: 433830 - DNA, 30 bp, Artificial Sequence
  Synthetic oligonucleotide
ctcatattagcttaggcaagtggtccacat

SEQ ID NO: 433831 - DNA, 30 bp, Artificial Sequence
  Synthetic oligonucleotide
ctctctctggcgtggacctaacaagcacat

SEQ ID NO: 433832 - DNA, 30 bp, Artificial Sequence
  Synthetic oligonucleotide
ctcatatgttattaaaaggcgctagcacat

SEQ ID NO: 433833 - DNA, 30 bp, Artificial Sequence
  Synthetic oligonucleotide
ccctgtctacgtacgcggggggccgcacat

SEQ ID NO: 433834 - DNA, 30 bp, Artificial Sequence
  Synthetic oligonucleotide
ggaatcgtgtgcactcggaaaccggcacat

SEQ ID NO: 433835 - DNA, 30 bp, Artificial Sequence
  Synthetic oligonucleotide
tttgtattcaattcatcgcgggcggcacat

SEQ ID NO: 433836 - DNA, 30 bp, Artificial Sequence
  Synthetic oligonucleotide
cgtcgaacccgctaacgcccaatggcacat

SEQ ID NO: 433837 - DNA, 30 bp, Artificial Sequence
  Synthetic oligonucleotide
tttacgtgttgcagtaatcattgatcacat

SEQ ID NO: 433838 - DNA, 30 bp, Artificial Sequence
  Synthetic oligonucleotide
cgcactaatccatcgtctcctctatcacat

SEQ ID NO: 433839 - DNA, 29 bp, Artificial Sequence
  Synthetic oligonucleotide
atctgccgattatcgtatcggtatcacat

SEQ ID NO: 433840 - DNA, 30 bp, Artificial Sequence
  Synthetic oligonucleotide
tccgggtcgtttgcggtggtgcactcacat

SEQ ID NO: 433841 - DNA, 30 bp, Artificial Sequence
  Synthetic oligonucleotide
caggtttcaaactccaagctttcctcacat

SEQ ID NO: 433842 - DNA, 30 bp, Artificial Sequence
  Synthetic oligonucleotide
atttgtgagatcaccttgaggggctcacat

SEQ ID NO: 433843 - DNA, 30 bp, Artificial Sequence
  Synthetic oligonucleotide
tcacctggtacaagacttatattttcacat

SEQ ID NO: 433844 - DNA, 30 bp, Artificial Sequence
  Synthetic oligonucleotide
cgtctcggagcgggtcaaagagaaagacat

SEQ ID NO: 433845 - DNA, 30 bp, Artificial Sequence
  Synthetic oligonucleotide
ttcagtatatatagacaaagtgcaagacat

SEQ ID NO: 433846 - DNA, 30 bp, Artificial Sequence
  Synthetic oligonucleotide
aatcgcggtcgacgttatggcacgagacat

SEQ ID NO: 433847 - DNA, 30 bp, Artificial Sequence
  Synthetic oligonucleotide
ctatttgccacggaaccctaaatgagacat

SEQ ID NO: 433848 - DNA, 30 bp, Artificial Sequence
  Synthetic oligonucleotide
catattgcggacgaagcgttaatgagacat

SEQ ID NO: 433849 - DNA, 30 bp, Artificial Sequence
  Synthetic oligonucleotide
atgggcagtgatcctcactggatgagacat

SEQ ID NO: 433850 - DNA, 30 bp, Artificial Sequence
  Synthetic oligonucleotide
gccatctttatgtaactgggccatagacat

SEQ ID NO: 433851 - DNA, 30 bp, Artificial Sequence
  Synthetic oligonucleotide
atggtgttgtggacgccgatgcaacgacat

SEQ ID NO: 433852 - DNA, 30 bp, Artificial Sequence
  Synthetic oligonucleotide
atatactggcagatctaggccacccgacat

SEQ ID NO: 433853 - DNA, 30 bp, Artificial Sequence
  Synthetic oligonucleotide
ctggtgttgaataaggccaatggccgacat

SEQ ID NO: 433854 - DNA, 30 bp, Artificial Sequence
  Synthetic oligonucleotide
aataggcgtcggcctcttcgattccgacat

SEQ ID NO: 433855 - DNA, 30 bp, Artificial Sequence
  Synthetic oligonucleotide
atactgcctcgcaaaaggcgagagcgacat

SEQ ID NO: 433856 - DNA, 30 bp, Artificial Sequence
  Synthetic oligonucleotide
aacatataccacacccagacaatgcgacat

SEQ ID NO: 433857 - DNA, 30 bp, Artificial Sequence
  Synthetic oligonucleotide
aaatcgaaaccccaatcttgggctcgacat

SEQ ID NO: 433858 - DNA, 30 bp, Artificial Sequence
  Synthetic oligonucleotide
gccggtatgtacatcctatgatgtcgacat

SEQ ID NO: 433859 - DNA, 30 bp, Artificial Sequence
  Synthetic oligonucleotide
ggaactgtccatgttatacgccacggacat

SEQ ID NO: 433860 - DNA, 30 bp, Artificial Sequence
  Synthetic oligonucleotide
gggaatctagccacatctctagacggacat

SEQ ID NO: 433861 - DNA, 30 bp, Artificial Sequence
  Synthetic oligonucleotide
tccgcactggaaggctaacgcccgggacat

SEQ ID NO: 433862 - DNA, 30 bp, Artificial Sequence
  Synthetic oligonucleotide
tccaggcgctattagacatgttggggacat

SEQ ID NO: 433863 - DNA, 30 bp, Artificial Sequence
  Synthetic oligonucleotide
ttatacagtctaagtcaacggggtggacat

SEQ ID NO: 433864 - DNA, 30 bp, Artificial Sequence
  Synthetic oligonucleotide
ccggccataaagggagggattggtggacat

SEQ ID NO: 433865 - DNA, 30 bp, Artificial Sequence
  Synthetic oligonucleotide
aggccaaggcgaaaccctaattttggacat

SEQ ID NO: 433866 - DNA, 30 bp, Artificial Sequence
  Synthetic oligonucleotide
atgatccgcgctaaccggatcccatgacat

SEQ ID NO: 433867 - DNA, 30 bp, Artificial Sequence
  Synthetic oligonucleotide
taactacgcaagtccgtgtcactatgacat

SEQ ID NO: 433868 - DNA, 30 bp, Artificial Sequence
  Synthetic oligonucleotide
cctatagttaaatatgcatgcccgtgacat

SEQ ID NO: 433869 - DNA, 30 bp, Artificial Sequence
  Synthetic oligonucleotide
caagtggaaagaagttccatagggtgacat

SEQ ID NO: 433870 - DNA, 30 bp, Artificial Sequence
  Synthetic oligonucleotide
ttacttatatcgtttaagtcagtgtgacat

SEQ ID NO: 433871 - DNA, 30 bp, Artificial Sequence
  Synthetic oligonucleotide
tatataggagctttccgcgacccttgacat

SEQ ID NO: 433872 - DNA, 30 bp, Artificial Sequence
  Synthetic oligonucleotide
gtgtatctttaacgccgtgtcgcttgacat

SEQ ID NO: 433873 - DNA, 30 bp, Artificial Sequence
  Synthetic oligonucleotide
ggggattcatcatagcgttatagttgacat

SEQ ID NO: 433874 - DNA, 30 bp, Artificial Sequence
  Synthetic oligonucleotide
tcgaattttgcatattcggggcaaatacat

SEQ ID NO: 433875 - DNA, 30 bp, Artificial Sequence
  Synthetic oligonucleotide
tgtttcaggatgagacgtatagacatacat

SEQ ID NO: 433876 - DNA, 30 bp, Artificial Sequence
  Synthetic oligonucleotide
gcaaggttcttctcatatgaggacatacat

SEQ ID NO: 433877 - DNA, 30 bp, Artificial Sequence
  Synthetic oligonucleotide
acccgagggagccggtggcaatacatacat

SEQ ID NO: 433878 - DNA, 30 bp, Artificial Sequence
  Synthetic oligonucleotide
cggcgagttaatgcccgaggttcgatacat

SEQ ID NO: 433879 - DNA, 30 bp, Artificial Sequence
  Synthetic oligonucleotide
tcactaccgatcggctgttttcggatacat

SEQ ID NO: 433880 - DNA, 30 bp, Artificial Sequence
  Synthetic oligonucleotide
gcaccttctcgatgcggatcagtgatacat

SEQ ID NO: 433881 - DNA, 29 bp, Artificial Sequence
  Synthetic oligonucleotide
gtagttgggtggttgtgagcaatatacat

SEQ ID NO: 433882 - DNA, 30 bp, Artificial Sequence
  Synthetic oligonucleotide
ctgaacttcacccgtagggattttatacat

SEQ ID NO: 433883 - DNA, 30 bp, Artificial Sequence
  Synthetic oligonucleotide
cgttttatgccgccttaccataaactacat

SEQ ID NO: 433884 - DNA, 30 bp, Artificial Sequence
  Synthetic oligonucleotide
ctgttatgtcggggggtagctccactacat

SEQ ID NO: 433885 - DNA, 30 bp, Artificial Sequence
  Synthetic oligonucleotide
ctgtgcgttgcagcgaggtatttcctacat

SEQ ID NO: 433886 - DNA, 30 bp, Artificial Sequence
  Synthetic oligonucleotide
agtcccggggtgaagccccctatgctacat

SEQ ID NO: 433887 - DNA, 30 bp, Artificial Sequence
  Synthetic oligonucleotide
ggcacacaatactccatatggagtctacat

SEQ ID NO: 433888 - DNA, 30 bp, Artificial Sequence
  Synthetic oligonucleotide
ttggtccgtcgatatacattcgaagtacat

SEQ ID NO: 433889 - DNA, 30 bp, Artificial Sequence
  Synthetic oligonucleotide
ttaacgcaagcagatcaacaactagtacat

SEQ ID NO: 433890 - DNA, 30 bp, Artificial Sequence
  Synthetic oligonucleotide
gccctcacacgcaactcggttgccgtacat

SEQ ID NO: 433891 - DNA, 30 bp, Artificial Sequence
  Synthetic oligonucleotide
actaccaagtgagtatctgacgtggtacat

SEQ ID NO: 433892 - DNA, 30 bp, Artificial Sequence
  Synthetic oligonucleotide
gtcgctagcatcctattaacacatgtacat

SEQ ID NO: 433893 - DNA, 30 bp, Artificial Sequence
  Synthetic oligonucleotide
gcttgtttgtagtcaagagtgggtgtacat

SEQ ID NO: 433894 - DNA, 30 bp, Artificial Sequence
  Synthetic oligonucleotide
tatgatcgcacatatgtactcgcattacat

SEQ ID NO: 433895 - DNA, 30 bp, Artificial Sequence
  Synthetic oligonucleotide
tcgaaacctgcagtcccatatttattacat

SEQ ID NO: 433896 - DNA, 30 bp, Artificial Sequence
  Synthetic oligonucleotide
ccagcaccacggcaggatatatatttacat

SEQ ID NO: 433897 - DNA, 30 bp, Artificial Sequence
  Synthetic oligonucleotide
atggtcctgtaaaaggctatttatttacat

SEQ ID NO: 433898 - DNA, 30 bp, Artificial Sequence
  Synthetic oligonucleotide
atcggggtatagggaagaatcgttttacat

SEQ ID NO: 433899 - DNA, 30 bp, Artificial Sequence
  Synthetic oligonucleotide
gcctgctttggtctggcagtaggaaaccat

SEQ ID NO: 433900 - DNA, 30 bp, Artificial Sequence
  Synthetic oligonucleotide
gtaccgcaatggaaaacctattgaaaccat

SEQ ID NO: 433901 - DNA, 30 bp, Artificial Sequence
  Synthetic oligonucleotide
agaatggccaatatacgtgaaataaaccat

SEQ ID NO: 433902 - DNA, 30 bp, Artificial Sequence
  Synthetic oligonucleotide
agatcatcgctgttgggcgcgcccaaccat

SEQ ID NO: 433903 - DNA, 30 bp, Artificial Sequence
  Synthetic oligonucleotide
gtagtatttattagctaggggttcaaccat

SEQ ID NO: 433904 - DNA, 30 bp, Artificial Sequence
  Synthetic oligonucleotide
atgactgactgcaaggatctgtcgaaccat

SEQ ID NO: 433905 - DNA, 30 bp, Artificial Sequence
  Synthetic oligonucleotide
ttttatgggatcgtcaatggacgtaaccat

SEQ ID NO: 433906 - DNA, 30 bp, Artificial Sequence
  Synthetic oligonucleotide
tagtattgttaatactacagccgtaaccat

SEQ ID NO: 433907 - DNA, 30 bp, Artificial Sequence
  Synthetic oligonucleotide
gcgtacgcctgaggttcacacattaaccat

SEQ ID NO: 433908 - DNA, 30 bp, Artificial Sequence
  Synthetic oligonucleotide
ggttcggtgtgaagaacggttcgacaccat

SEQ ID NO: 433909 - DNA, 30 bp, Artificial Sequence
  Synthetic oligonucleotide
aaccacaatgcagcacttgcactccaccat

SEQ ID NO: 433910 - DNA, 30 bp, Artificial Sequence
  Synthetic oligonucleotide
attggcggcttggtacaggttaggcaccat

SEQ ID NO: 433911 - DNA, 30 bp, Artificial Sequence
  Synthetic oligonucleotide
ctctccaaccgatcgagcacatttcaccat

SEQ ID NO: 433912 - DNA, 30 bp, Artificial Sequence
  Synthetic oligonucleotide
ggattagtcactatgaggtcatgagaccat

SEQ ID NO: 433913 - DNA, 30 bp, Artificial Sequence
  Synthetic oligonucleotide
gcgatccatggtcacctctgggccgaccat

SEQ ID NO: 433914 - DNA, 30 bp, Artificial Sequence
  Synthetic oligonucleotide
tgtttgtcgagcttgaagcaccaggaccat

SEQ ID NO: 433915 - DNA, 30 bp, Artificial Sequence
  Synthetic oligonucleotide
gatagaccaagaaaggggccccgggaccat

SEQ ID NO: 433916 - DNA, 30 bp, Artificial Sequence
  Synthetic oligonucleotide
ttatcttgccaggctagagcggctgaccat

SEQ ID NO: 433917 - DNA, 30 bp, Artificial Sequence
  Synthetic oligonucleotide
cagttacggacacgaaacgccagctaccat

SEQ ID NO: 433918 - DNA, 30 bp, Artificial Sequence
  Synthetic oligonucleotide
ctagtagaccttgattagcatacgtaccat

SEQ ID NO: 433919 - DNA, 30 bp, Artificial Sequence
  Synthetic oligonucleotide
cttaagtaactaatttcgcagatgtaccat

SEQ ID NO: 433920 - DNA, 30 bp, Artificial Sequence
  Synthetic oligonucleotide
gagtggtcagctccaacagaaaattaccat

SEQ ID NO: 433921 - DNA, 30 bp, Artificial Sequence
  Synthetic oligonucleotide
gaccggatatcgatttctcgatgttaccat

SEQ ID NO: 433922 - DNA, 30 bp, Artificial Sequence
  Synthetic oligonucleotide
ataccagggcatcggggattaatttaccat

SEQ ID NO: 433923 - DNA, 30 bp, Artificial Sequence
  Synthetic oligonucleotide
gccttgcagtatgggcacaagcgcacccat

SEQ ID NO: 433924 - DNA, 30 bp, Artificial Sequence
  Synthetic oligonucleotide
ctcagacagaatggtacccatatcacccat

SEQ ID NO: 433925 - DNA, 30 bp, Artificial Sequence
  Synthetic oligonucleotide
tgatcgcctgcatgcccaagggcgacccat

SEQ ID NO: 433926 - DNA, 30 bp, Artificial Sequence
  Synthetic oligonucleotide
ccatcaccgtacaattttgtaagtacccat

SEQ ID NO: 433927 - DNA, 30 bp, Artificial Sequence
  Synthetic oligonucleotide
cacatataatctccctaatcgttaccccat

SEQ ID NO: 433928 - DNA, 30 bp, Artificial Sequence
  Synthetic oligonucleotide
cgttgattcagttttattatacagccccat

SEQ ID NO: 433929 - DNA, 30 bp, Artificial Sequence
  Synthetic oligonucleotide
cgtagttgaatccatcttctatacgcccat

SEQ ID NO: 433930 - DNA, 30 bp, Artificial Sequence
  Synthetic oligonucleotide
ctctggtccggcacatgaacttgcgcccat

SEQ ID NO: 433931 - DNA, 30 bp, Artificial Sequence
  Synthetic oligonucleotide
tgccccttcagagcaagacctaaggcccat

SEQ ID NO: 433932 - DNA, 30 bp, Artificial Sequence
  Synthetic oligonucleotide
atccgcgaaatacggctccggtgtgcccat

SEQ ID NO: 433933 - DNA, 30 bp, Artificial Sequence
  Synthetic oligonucleotide
tgattattgtttgttagagtgggatcccat

SEQ ID NO: 433934 - DNA, 30 bp, Artificial Sequence
  Synthetic oligonucleotide
catggttacgttactcgtgaacactcccat

SEQ ID NO: 433935 - DNA, 30 bp, Artificial Sequence
  Synthetic oligonucleotide
cgggcctcctttaccattttgcgctcccat

SEQ ID NO: 433936 - DNA, 30 bp, Artificial Sequence
  Synthetic oligonucleotide
cagccaaaaattaggtcgcagcggtcccat

SEQ ID NO: 433937 - DNA, 30 bp, Artificial Sequence
  Synthetic oligonucleotide
gcatagagctaacattgaggaatgtcccat

SEQ ID NO: 433938 - DNA, 30 bp, Artificial Sequence
  Synthetic oligonucleotide
tttagagttgttagtgtgtacaattcccat

SEQ ID NO: 433939 - DNA, 30 bp, Artificial Sequence
  Synthetic oligonucleotide
ttgttgtgttctctttttgtgttttcccat

SEQ ID NO: 433940 - DNA, 30 bp, Artificial Sequence
  Synthetic oligonucleotide
gcggacttgtccgacacaattataagccat

SEQ ID NO: 433941 - DNA, 30 bp, Artificial Sequence
  Synthetic oligonucleotide
tgaggccggctatgtgcctaatacagccat

SEQ ID NO: 433942 - DNA, 30 bp, Artificial Sequence
  Synthetic oligonucleotide
gcaaatggaaatactctacttgcgagccat

SEQ ID NO: 433943 - DNA, 30 bp, Artificial Sequence
  Synthetic oligonucleotide
cttgctctggaaaaccggacgtgtagccat

SEQ ID NO: 433944 - DNA, 30 bp, Artificial Sequence
  Synthetic oligonucleotide
tcccgtggctcgcttaaacaagttagccat

SEQ ID NO: 433945 - DNA, 30 bp, Artificial Sequence
  Synthetic oligonucleotide
ttgcgcttccgatgcgtgtaggttagccat

SEQ ID NO: 433946 - DNA, 30 bp, Artificial Sequence
  Synthetic oligonucleotide
aatcgaatcggcgcaatcaactttagccat

SEQ ID NO: 433947 - DNA, 30 bp, Artificial Sequence
  Synthetic oligonucleotide
gtgttagtgcatagccgccattttagccat

SEQ ID NO: 433948 - DNA, 31 bp, Artificial Sequence
  Synthetic oligonucleotide
tacaagggaagcattgtttaaaagacgccat

SEQ ID NO: 433949 - DNA, 30 bp, Artificial Sequence
  Synthetic oligonucleotide
gttattctaatccgagtgtatagacgccat

SEQ ID NO: 433950 - DNA, 30 bp, Artificial Sequence
  Synthetic oligonucleotide
ccctgtataccccccaaatgggtccgccat

SEQ ID NO: 433951 - DNA, 30 bp, Artificial Sequence
  Synthetic oligonucleotide
ctcctaggtaggagtttagcagccggccat

SEQ ID NO: 433952 - DNA, 30 bp, Artificial Sequence
  Synthetic oligonucleotide
atgccgcgttgatgttggacgtagggccat

SEQ ID NO: 433953 - DNA, 30 bp, Artificial Sequence
  Synthetic oligonucleotide
cagcatatggtagcacgaaatttgggccat

SEQ ID NO: 433954 - DNA, 30 bp, Artificial Sequence
  Synthetic oligonucleotide
ctcatcacttgaaccaggttcaatggccat

SEQ ID NO: 433955 - DNA, 30 bp, Artificial Sequence
  Synthetic oligonucleotide
aaagtagaatggtagtaatgatatggccat

SEQ ID NO: 433956 - DNA, 30 bp, Artificial Sequence
  Synthetic oligonucleotide
gatatttaagagcctcatagaatatgccat

SEQ ID NO: 433957 - DNA, 30 bp, Artificial Sequence
  Synthetic oligonucleotide
caggtttacttgatgttgaggagctgccat

SEQ ID NO: 433958 - DNA, 30 bp, Artificial Sequence
  Synthetic oligonucleotide
taagcttgtcatacgcgggactgctgccat

SEQ ID NO: 433959 - DNA, 30 bp, Artificial Sequence
  Synthetic oligonucleotide
gacagcaaactaccgtgtggttgctgccat

SEQ ID NO: 433960 - DNA, 30 bp, Artificial Sequence
  Synthetic oligonucleotide
attcggtactaaccacactacacgtgccat

SEQ ID NO: 433961 - DNA, 30 bp, Artificial Sequence
  Synthetic oligonucleotide
tcgctcctttcctaatcttcggggtgccat

SEQ ID NO: 433962 - DNA, 30 bp, Artificial Sequence
  Synthetic oligonucleotide
agttgtgttactattttcgattattgccat

SEQ ID NO: 433963 - DNA, 30 bp, Artificial Sequence
  Synthetic oligonucleotide
atatcaacgtctccccccttcgcaatccat

SEQ ID NO: 433964 - DNA, 30 bp, Artificial Sequence
  Synthetic oligonucleotide
gtcatatcctgaactgttctcagcatccat

SEQ ID NO: 433965 - DNA, 30 bp, Artificial Sequence
  Synthetic oligonucleotide
ttcttgtagataatcgatgttttcatccat

SEQ ID NO: 433966 - DNA, 30 bp, Artificial Sequence
  Synthetic oligonucleotide
taggttattctactgccgtgtaggatccat

SEQ ID NO: 433967 - DNA, 31 bp, Artificial Sequence
  Synthetic oligonucleotide
gtttctacagggtgcgcataaatatatccat

SEQ ID NO: 433968 - DNA, 30 bp, Artificial Sequence
  Synthetic oligonucleotide
ccgtcctcaggaaatggggattttatccat

SEQ ID NO: 433969 - DNA, 30 bp, Artificial Sequence
  Synthetic oligonucleotide
taccgtcgtcccgaggcattttgactccat

SEQ ID NO: 433970 - DNA, 30 bp, Artificial Sequence
  Synthetic oligonucleotide
atataaggacactctttcaggggcctccat

SEQ ID NO: 433971 - DNA, 30 bp, Artificial Sequence
  Synthetic oligonucleotide
ggcgggtcaagtatagtcgtgacgctccat

SEQ ID NO: 433972 - DNA, 30 bp, Artificial Sequence
  Synthetic oligonucleotide
tcaccgggagggacagacagggcgctccat

SEQ ID NO: 433973 - DNA, 30 bp, Artificial Sequence
  Synthetic oligonucleotide
agcatcaacggtcagcttttcggagtccat

SEQ ID NO: 433974 - DNA, 30 bp, Artificial Sequence
  Synthetic oligonucleotide
ctatatgcgaaggcctgtactaacgtccat

SEQ ID NO: 433975 - DNA, 30 bp, Artificial Sequence
  Synthetic oligonucleotide
gctaacgctgagttgggaatatccgtccat

SEQ ID NO: 433976 - DNA, 30 bp, Artificial Sequence
  Synthetic oligonucleotide
tggccgacatttgaatggatggcggtccat

SEQ ID NO: 433977 - DNA, 30 bp, Artificial Sequence
  Synthetic oligonucleotide
ggacgtagagtcgtcttacgacgggtccat

SEQ ID NO: 433978 - DNA, 30 bp, Artificial Sequence
  Synthetic oligonucleotide
gggtatccagcaatgtctatatgtgtccat

SEQ ID NO: 433979 - DNA, 30 bp, Artificial Sequence
  Synthetic oligonucleotide
attaactcgagtcagcggtaataattccat

SEQ ID NO: 433980 - DNA, 30 bp, Artificial Sequence
  Synthetic oligonucleotide
gccaagtggaagtcaagattctgcttccat

SEQ ID NO: 433981 - DNA, 30 bp, Artificial Sequence
  Synthetic oligonucleotide
gggcatgtcgcaatcttaaaaaagttccat

SEQ ID NO: 433982 - DNA, 30 bp, Artificial Sequence
  Synthetic oligonucleotide
gaattttgacgttggggagcgactttccat

SEQ ID NO: 433983 - DNA, 30 bp, Artificial Sequence
  Synthetic oligonucleotide
tcatacgctttgggtatagacgaaaagcat

SEQ ID NO: 433984 - DNA, 30 bp, Artificial Sequence
  Synthetic oligonucleotide
cgcgtactaaacaatgtatgctggaagcat

SEQ ID NO: 433985 - DNA, 30 bp, Artificial Sequence
  Synthetic oligonucleotide
gtcggcatgtttgggtaggttcgacagcat

SEQ ID NO: 433986 - DNA, 30 bp, Artificial Sequence
  Synthetic oligonucleotide
gaaaatgctgtccaggttcgcggccagcat

SEQ ID NO: 433987 - DNA, 30 bp, Artificial Sequence
  Synthetic oligonucleotide
tttaagaaccggtcagattctgtccagcat

SEQ ID NO: 433988 - DNA, 30 bp, Artificial Sequence
  Synthetic oligonucleotide
aggaggattcgaccgcaaccaacgcagcat

SEQ ID NO: 433989 - DNA, 30 bp, Artificial Sequence
  Synthetic oligonucleotide
gagtcgggaagcctgcagatatcagagcat

SEQ ID NO: 433990 - DNA, 30 bp, Artificial Sequence
  Synthetic oligonucleotide
caaacggcttaattcaaccgggacgagcat

SEQ ID NO: 433991 - DNA, 30 bp, Artificial Sequence
  Synthetic oligonucleotide
acggcagaggtcctgggaccccaggagcat

SEQ ID NO: 433992 - DNA, 30 bp, Artificial Sequence
  Synthetic oligonucleotide
ggcacagttccgatagcgggaagatagcat

SEQ ID NO: 433993 - DNA, 30 bp, Artificial Sequence
  Synthetic oligonucleotide
gatatcgaaattattttctgtgtatagcat

SEQ ID NO: 433994 - DNA, 30 bp, Artificial Sequence
  Synthetic oligonucleotide
tcgtcaacctgaagcaaatggttatagcat

SEQ ID NO: 433995 - DNA, 30 bp, Artificial Sequence
  Synthetic oligonucleotide
tttttggtatcgtaacgcctagactagcat

SEQ ID NO: 433996 - DNA, 30 bp, Artificial Sequence
  Synthetic oligonucleotide
gccagcgaactacccagtcgcgcgtagcat

SEQ ID NO: 433997 - DNA, 30 bp, Artificial Sequence
  Synthetic oligonucleotide
ctttcaatttttcaatagcattgttagcat

SEQ ID NO: 433998 - DNA, 30 bp, Artificial Sequence
  Synthetic oligonucleotide
tgccttgacccggcccggcacgcaacgcat

SEQ ID NO: 433999 - DNA, 30 bp, Artificial Sequence
  Synthetic oligonucleotide
tttagaaggggaaacaggttgtgaacgcat

SEQ ID NO: 434000 - DNA, 30 bp, Artificial Sequence
  Synthetic oligonucleotide
agtccatggtatcattggctctgcacgcat

SEQ ID NO: 434001 - DNA, 30 bp, Artificial Sequence
  Synthetic oligonucleotide
tgcaagttataaggttcgatggtcacgcat

SEQ ID NO: 434002 - DNA, 30 bp, Artificial Sequence
  Synthetic oligonucleotide
aattagcgtgtggagtccattgcgacgcat

SEQ ID NO: 434003 - DNA, 30 bp, Artificial Sequence
  Synthetic oligonucleotide
atctcacggttaagggcaccactgacgcat

SEQ ID NO: 434004 - DNA, 30 bp, Artificial Sequence
  Synthetic oligonucleotide
gtaagctagtatgacgtgagcagtacgcat

SEQ ID NO: 434005 - DNA, 30 bp, Artificial Sequence
  Synthetic oligonucleotide
cctgaaagtattaaggcccgctgtacgcat

SEQ ID NO: 434006 - DNA, 30 bp, Artificial Sequence
  Synthetic oligonucleotide
cctaacaggggccgcgagtcttgtacgcat

SEQ ID NO: 434007 - DNA, 30 bp, Artificial Sequence
  Synthetic oligonucleotide
gagaatagatcttactgtactattacgcat

SEQ ID NO: 434008 - DNA, 30 bp, Artificial Sequence
  Synthetic oligonucleotide
aaaggaggcctggggaattgtgttacgcat

SEQ ID NO: 434009 - DNA, 30 bp, Artificial Sequence
  Synthetic oligonucleotide
cgttacttggctgaattgttagacccgcat

SEQ ID NO: 434010 - DNA, 30 bp, Artificial Sequence
  Synthetic oligonucleotide
ggcttgtcctgtacacaatgtgccccgcat

SEQ ID NO: 434011 - DNA, 30 bp, Artificial Sequence
  Synthetic oligonucleotide
cgagccgggcatagtcttattctcccgcat

SEQ ID NO: 434012 - DNA, 30 bp, Artificial Sequence
  Synthetic oligonucleotide
tagcgttagtctggactgtctaagccgcat

SEQ ID NO: 434013 - DNA, 30 bp, Artificial Sequence
  Synthetic oligonucleotide
acgaccgtagcactttttagtaacgcgcat

SEQ ID NO: 434014 - DNA, 30 bp, Artificial Sequence
  Synthetic oligonucleotide
aagcaagaacccagctgtttcccggcgcat

SEQ ID NO: 434015 - DNA, 30 bp, Artificial Sequence
  Synthetic oligonucleotide
ctcggaccttgtgacgtcggttatgcgcat

SEQ ID NO: 434016 - DNA, 30 bp, Artificial Sequence
  Synthetic oligonucleotide
ccatggttggcatagcggacgttatcgcat

SEQ ID NO: 434017 - DNA, 30 bp, Artificial Sequence
  Synthetic oligonucleotide
gtgtactagccaattcgcactccgtcgcat

SEQ ID NO: 434018 - DNA, 30 bp, Artificial Sequence
  Synthetic oligonucleotide
cgggagtaccttattgcctgagtgtcgcat

SEQ ID NO: 434019 - DNA, 30 bp, Artificial Sequence
  Synthetic oligonucleotide
atacaacgcctggcaagtgaaacttcgcat

SEQ ID NO: 434020 - DNA, 30 bp, Artificial Sequence
  Synthetic oligonucleotide
ccccggagcatagcgaatagggcttcgcat

SEQ ID NO: 434021 - DNA, 30 bp, Artificial Sequence
  Synthetic oligonucleotide
gtttaggtagcgtgtaggctgggttcgcat

SEQ ID NO: 434022 - DNA, 30 bp, Artificial Sequence
  Synthetic oligonucleotide
cgggctcacaagtatcgcgggcaaaggcat

SEQ ID NO: 434023 - DNA, 30 bp, Artificial Sequence
  Synthetic oligonucleotide
atgacctcggttttgggatcccacaggcat

SEQ ID NO: 434024 - DNA, 30 bp, Artificial Sequence
  Synthetic oligonucleotide
gtcttgatgcatgatcacgccgccaggcat

SEQ ID NO: 434025 - DNA, 30 bp, Artificial Sequence
  Synthetic oligonucleotide
tctgccgacggccatggatccgtcaggcat

SEQ ID NO: 434026 - DNA, 30 bp, Artificial Sequence
  Synthetic oligonucleotide
ctgcaactagtcctctaggaggtcaggcat

SEQ ID NO: 434027 - DNA, 30 bp, Artificial Sequence
  Synthetic oligonucleotide
gacaatggcgtagcgaattgggtcaggcat

SEQ ID NO: 434028 - DNA, 30 bp, Artificial Sequence
  Synthetic oligonucleotide
ataaggctttactgtgctggtaagaggcat

SEQ ID NO: 434029 - DNA, 30 bp, Artificial Sequence
  Synthetic oligonucleotide
gtatgattattgagcgacgagacgaggcat

SEQ ID NO: 434030 - DNA, 30 bp, Artificial Sequence
  Synthetic oligonucleotide
tccggtagtcatgttgggcaacataggcat

SEQ ID NO: 434031 - DNA, 30 bp, Artificial Sequence
  Synthetic oligonucleotide
ggcatataaaaaggggctccaattaggcat

SEQ ID NO: 434032 - DNA, 30 bp, Artificial Sequence
  Synthetic oligonucleotide
ggatagggctggattgggcccggccggcat

SEQ ID NO: 434033 - DNA, 30 bp, Artificial Sequence
  Synthetic oligonucleotide
cccgtgtgtgcagcttatgagcttcggcat

SEQ ID NO: 434034 - DNA, 30 bp, Artificial Sequence
  Synthetic oligonucleotide
gcggccgagggttgtttgtagcttcggcat

SEQ ID NO: 434035 - DNA, 30 bp, Artificial Sequence
  Synthetic oligonucleotide
aatgagatacggcggtgtcgagttcggcat

SEQ ID NO: 434036 - DNA, 30 bp, Artificial Sequence
  Synthetic oligonucleotide
gattctatctgaggatcggcgcaagggcat

SEQ ID NO: 434037 - DNA, 30 bp, Artificial Sequence
  Synthetic oligonucleotide
gagtagacggcgaggatcgccagagggcat

SEQ ID NO: 434038 - DNA, 30 bp, Artificial Sequence
  Synthetic oligonucleotide
tctgattgggcgcttttggtcagagggcat

SEQ ID NO: 434039 - DNA, 30 bp, Artificial Sequence
  Synthetic oligonucleotide
agtacgcgctcacctcggttccgagggcat

SEQ ID NO: 434040 - DNA, 30 bp, Artificial Sequence
  Synthetic oligonucleotide
acattgaacagggagcaatagggagggcat

SEQ ID NO: 434041 - DNA, 30 bp, Artificial Sequence
  Synthetic oligonucleotide
tcttagttattcagatctatcaccgggcat

SEQ ID NO: 434042 - DNA, 30 bp, Artificial Sequence
  Synthetic oligonucleotide
gcttcgtcgaggcatataagctccgggcat

SEQ ID NO: 434043 - DNA, 30 bp, Artificial Sequence
  Synthetic oligonucleotide
atcgacccgattatcgaggacccggggcat

SEQ ID NO: 434044 - DNA, 30 bp, Artificial Sequence
  Synthetic oligonucleotide
gaaagtgaggaagggttctggagggggcat

SEQ ID NO: 434045 - DNA, 30 bp, Artificial Sequence
  Synthetic oligonucleotide
ggatataacttccaataaagtgatgggcat

SEQ ID NO: 434046 - DNA, 30 bp, Artificial Sequence
  Synthetic oligonucleotide
atgtatactagactattgcagtctgggcat

SEQ ID NO: 434047 - DNA, 30 bp, Artificial Sequence
  Synthetic oligonucleotide
tcatatatggtccccgcaagccgatggcat

SEQ ID NO: 434048 - DNA, 30 bp, Artificial Sequence
  Synthetic oligonucleotide
gtggggaaaaaacatcccggttgatggcat

SEQ ID NO: 434049 - DNA, 30 bp, Artificial Sequence
  Synthetic oligonucleotide
ctgtcagatgcggccaatacgttatggcat

SEQ ID NO: 434050 - DNA, 30 bp, Artificial Sequence
  Synthetic oligonucleotide
actgctgcaagcgtactgagtaactggcat

SEQ ID NO: 434051 - DNA, 30 bp, Artificial Sequence
  Synthetic oligonucleotide
caacagggaaggtgcgcgtgccactggcat

SEQ ID NO: 434052 - DNA, 30 bp, Artificial Sequence
  Synthetic oligonucleotide
atgccgcatgaatgcagagtgtgctggcat

SEQ ID NO: 434053 - DNA, 30 bp, Artificial Sequence
  Synthetic oligonucleotide
agtctccattgtaattattagtagtggcat

SEQ ID NO: 434054 - DNA, 30 bp, Artificial Sequence
  Synthetic oligonucleotide
ccgagataacgtgtagaccacgcgtggcat

SEQ ID NO: 434055 - DNA, 30 bp, Artificial Sequence
  Synthetic oligonucleotide
ctatgttgacccagcgcatacatttggcat

SEQ ID NO: 434056 - DNA, 30 bp, Artificial Sequence
  Synthetic oligonucleotide
cacggcagataccgaggataataaatgcat

SEQ ID NO: 434057 - DNA, 30 bp, Artificial Sequence
  Synthetic oligonucleotide
gcaccatcacaaaatttcgggcgaatgcat

SEQ ID NO: 434058 - DNA, 30 bp, Artificial Sequence
  Synthetic oligonucleotide
gtccggcggtccgatgcaaatataatgcat

SEQ ID NO: 434059 - DNA, 30 bp, Artificial Sequence
  Synthetic oligonucleotide
ttaataggccagagatgtattttaatgcat

SEQ ID NO: 434060 - DNA, 30 bp, Artificial Sequence
  Synthetic oligonucleotide
cgcaatatatagagcatttgcatcatgcat

SEQ ID NO: 434061 - DNA, 30 bp, Artificial Sequence
  Synthetic oligonucleotide
tattcacttattcagatatgtatgatgcat

SEQ ID NO: 434062 - DNA, 30 bp, Artificial Sequence
  Synthetic oligonucleotide
agccatttttaatttgctctcgtgatgcat

SEQ ID NO: 434063 - DNA, 30 bp, Artificial Sequence
  Synthetic oligonucleotide
ccaggactccataagcggccggcgctgcat

SEQ ID NO: 434064 - DNA, 30 bp, Artificial Sequence
  Synthetic oligonucleotide
gcctgtcactaagcattcaagatgctgcat

SEQ ID NO: 434065 - DNA, 30 bp, Artificial Sequence
  Synthetic oligonucleotide
aaccaacgacctaagctagtaaatctgcat

SEQ ID NO: 434066 - DNA, 31 bp, Artificial Sequence
  Synthetic oligonucleotide
gggggcaagagatagtggggacttagtgcat

SEQ ID NO: 434067 - DNA, 30 bp, Artificial Sequence
  Synthetic oligonucleotide
gtgtcttcggctacccaccacccggtgcat

SEQ ID NO: 434068 - DNA, 30 bp, Artificial Sequence
  Synthetic oligonucleotide
cctagtcttgtgactcatacctgggtgcat

SEQ ID NO: 434069 - DNA, 30 bp, Artificial Sequence
  Synthetic oligonucleotide
ctacggtatcaaaacacggtgttggtgcat

SEQ ID NO: 434070 - DNA, 30 bp, Artificial Sequence
  Synthetic oligonucleotide
gcattcactatctccctgtgaggtgtgcat

SEQ ID NO: 434071 - DNA, 30 bp, Artificial Sequence
  Synthetic oligonucleotide
acttattcttcaaataaagtacgattgcat

SEQ ID NO: 434072 - DNA, 30 bp, Artificial Sequence
  Synthetic oligonucleotide
actgttctacagaccggggctgacttgcat

SEQ ID NO: 434073 - DNA, 30 bp, Artificial Sequence
  Synthetic oligonucleotide
agccactccgatcagtcacagtacttgcat

SEQ ID NO: 434074 - DNA, 30 bp, Artificial Sequence
  Synthetic oligonucleotide
gactagtttgcttatatctatatcttgcat

SEQ ID NO: 434075 - DNA, 30 bp, Artificial Sequence
  Synthetic oligonucleotide
ctctcctgtgtattcccgaaaaagttgcat

SEQ ID NO: 434076 - DNA, 30 bp, Artificial Sequence
  Synthetic oligonucleotide
cacagggacgtcgcataatgcaatttgcat

SEQ ID NO: 434077 - DNA, 30 bp, Artificial Sequence
  Synthetic oligonucleotide
atccacacgaactttgaagcctatttgcat

SEQ ID NO: 434078 - DNA, 30 bp, Artificial Sequence
  Synthetic oligonucleotide
aactactatagggtccgagcggctttgcat

SEQ ID NO: 434079 - DNA, 30 bp, Artificial Sequence
  Synthetic oligonucleotide
actgtcatctgagtattggcaacaaatcat

SEQ ID NO: 434080 - DNA, 29 bp, Artificial Sequence
  Synthetic oligonucleotide
agattagagaacgcggcagttacaatcat

SEQ ID NO: 434081 - DNA, 30 bp, Artificial Sequence
  Synthetic oligonucleotide
aggtggttgtatatctcaatttgcaatcat

SEQ ID NO: 434082 - DNA, 30 bp, Artificial Sequence
  Synthetic oligonucleotide
tagaaggtcggtctaggccaggaacatcat

SEQ ID NO: 434083 - DNA, 30 bp, Artificial Sequence
  Synthetic oligonucleotide
tggaagttatcaaggtacttgggacatcat

SEQ ID NO: 434084 - DNA, 30 bp, Artificial Sequence
  Synthetic oligonucleotide
taagtatgaggggcaattaccctacatcat

SEQ ID NO: 434085 - DNA, 30 bp, Artificial Sequence
  Synthetic oligonucleotide
ggttatacccgtttctaagtcttacatcat

SEQ ID NO: 434086 - DNA, 30 bp, Artificial Sequence
  Synthetic oligonucleotide
gacgcggttcctggggagccagcgcatcat

SEQ ID NO: 434087 - DNA, 30 bp, Artificial Sequence
  Synthetic oligonucleotide
ggagctagtgattattgattccggcatcat

SEQ ID NO: 434088 - DNA, 30 bp, Artificial Sequence
  Synthetic oligonucleotide
ggataggttgaatcgacgtaggctcatcat

SEQ ID NO: 434089 - DNA, 30 bp, Artificial Sequence
  Synthetic oligonucleotide
agtgatctaaccagacattctgctcatcat

SEQ ID NO: 434090 - DNA, 30 bp, Artificial Sequence
  Synthetic oligonucleotide
actccggattgctcagcccggattcatcat

SEQ ID NO: 434091 - DNA, 30 bp, Artificial Sequence
  Synthetic oligonucleotide
ccgatcgacgcaatccttttggcagatcat

SEQ ID NO: 434092 - DNA, 30 bp, Artificial Sequence
  Synthetic oligonucleotide
agttatcagacgctatattaagtagatcat

SEQ ID NO: 434093 - DNA, 27 bp, Artificial Sequence
  Synthetic oligonucleotide
catcaccattagaaatgacgggatcat

SEQ ID NO: 434094 - DNA, 30 bp, Artificial Sequence
  Synthetic oligonucleotide
taagggctattggatgcctagcatgatcat

SEQ ID NO: 434095 - DNA, 30 bp, Artificial Sequence
  Synthetic oligonucleotide
tatcacctggccttcatcagttatgatcat

SEQ ID NO: 434096 - DNA, 30 bp, Artificial Sequence
  Synthetic oligonucleotide
tgatagatactgttgaaagcggctgatcat

SEQ ID NO: 434097 - DNA, 30 bp, Artificial Sequence
  Synthetic oligonucleotide
tggtacttgaaccttgggtcgattgatcat

SEQ ID NO: 434098 - DNA, 30 bp, Artificial Sequence
  Synthetic oligonucleotide
gagagcgcagtgacacagggtcttgatcat

SEQ ID NO: 434099 - DNA, 30 bp, Artificial Sequence
  Synthetic oligonucleotide
gtggaggcggccatgacgcttccatatcat

SEQ ID NO: 434100 - DNA, 30 bp, Artificial Sequence
  Synthetic oligonucleotide
atcttcatgacccagacggtatcgtatcat

SEQ ID NO: 434101 - DNA, 30 bp, Artificial Sequence
  Synthetic oligonucleotide
tatagagtatggaacgtacaagattatcat

SEQ ID NO: 434102 - DNA, 30 bp, Artificial Sequence
  Synthetic oligonucleotide
actcatcaaattgactgatattgttatcat

SEQ ID NO: 434103 - DNA, 30 bp, Artificial Sequence
  Synthetic oligonucleotide
tctgagatctagtgggacggatcaactcat

SEQ ID NO: 434104 - DNA, 30 bp, Artificial Sequence
  Synthetic oligonucleotide
tttagtaataggcatctgtagagaactcat

SEQ ID NO: 434105 - DNA, 30 bp, Artificial Sequence
  Synthetic oligonucleotide
caacagtacctgggcatacataggactcat

SEQ ID NO: 434106 - DNA, 30 bp, Artificial Sequence
  Synthetic oligonucleotide
ctcagttgtgtctatcgcatatatactcat

SEQ ID NO: 434107 - DNA, 30 bp, Artificial Sequence
  Synthetic oligonucleotide
tacggatatagtaagccttattatactcat

SEQ ID NO: 434108 - DNA, 30 bp, Artificial Sequence
  Synthetic oligonucleotide
agtagttatacagttttgtcggttactcat

SEQ ID NO: 434109 - DNA, 30 bp, Artificial Sequence
  Synthetic oligonucleotide
atacttttcatcacaattagtgaacctcat

SEQ ID NO: 434110 - DNA, 30 bp, Artificial Sequence
  Synthetic oligonucleotide
aacactctcgcgatggaggaggcacctcat

SEQ ID NO: 434111 - DNA, 30 bp, Artificial Sequence
  Synthetic oligonucleotide
cctgacttccggacactattctgccctcat

SEQ ID NO: 434112 - DNA, 30 bp, Artificial Sequence
  Synthetic oligonucleotide
atctgtctgtgagcggttaacgtccctcat

SEQ ID NO: 434113 - DNA, 30 bp, Artificial Sequence
  Synthetic oligonucleotide
acataccatttcaaaccgtccttccctcat

SEQ ID NO: 434114 - DNA, 30 bp, Artificial Sequence
  Synthetic oligonucleotide
acaatactggcgaggaattgtcaagctcat

SEQ ID NO: 434115 - DNA, 30 bp, Artificial Sequence
  Synthetic oligonucleotide
gtgatactgcggacgtgcagcgaagctcat

SEQ ID NO: 434116 - DNA, 30 bp, Artificial Sequence
  Synthetic oligonucleotide
taggacgtcgcatcgaccgtggaagctcat

SEQ ID NO: 434117 - DNA, 30 bp, Artificial Sequence
  Synthetic oligonucleotide
ctcgagctcttcgcactagtcagagctcat

SEQ ID NO: 434118 - DNA, 30 bp, Artificial Sequence
  Synthetic oligonucleotide
tgctgacgggaacagcgagttccggctcat

SEQ ID NO: 434119 - DNA, 30 bp, Artificial Sequence
  Synthetic oligonucleotide
gatggggagtggcttcccccttctgctcat

SEQ ID NO: 434120 - DNA, 30 bp, Artificial Sequence
  Synthetic oligonucleotide
gcccgctgttcaccgggcttcgttgctcat

SEQ ID NO: 434121 - DNA, 30 bp, Artificial Sequence
  Synthetic oligonucleotide
acagtaatggagatgcgctgctaatctcat

SEQ ID NO: 434122 - DNA, 30 bp, Artificial Sequence
  Synthetic oligonucleotide
aagtagcgggttcggaaaagagtatctcat

SEQ ID NO: 434123 - DNA, 30 bp, Artificial Sequence
  Synthetic oligonucleotide
ttcggtatgtaagccatgaatacctctcat

SEQ ID NO: 434124 - DNA, 30 bp, Artificial Sequence
  Synthetic oligonucleotide
tataattagcaagattgggagttctctcat

SEQ ID NO: 434125 - DNA, 30 bp, Artificial Sequence
  Synthetic oligonucleotide
agaaatagtcgttagactcataggtctcat

SEQ ID NO: 434126 - DNA, 30 bp, Artificial Sequence
  Synthetic oligonucleotide
tctgttcagtccggagactgccggtctcat

SEQ ID NO: 434127 - DNA, 30 bp, Artificial Sequence
  Synthetic oligonucleotide
actcatatcgttacaatagcatattctcat

SEQ ID NO: 434128 - DNA, 30 bp, Artificial Sequence
  Synthetic oligonucleotide
gagcaatatcttaaaagctatgcttctcat

SEQ ID NO: 434129 - DNA, 30 bp, Artificial Sequence
  Synthetic oligonucleotide
aagaacgcagcaacgatagtgctaagtcat

SEQ ID NO: 434130 - DNA, 30 bp, Artificial Sequence
  Synthetic oligonucleotide
gtacctccaatagtgttacgttgcagtcat

SEQ ID NO: 434131 - DNA, 30 bp, Artificial Sequence
  Synthetic oligonucleotide
gtgtatactaaaacaaatatgtagagtcat

SEQ ID NO: 434132 - DNA, 30 bp, Artificial Sequence
  Synthetic oligonucleotide
ttattcttagggaaggcgtgattgagtcat

SEQ ID NO: 434133 - DNA, 30 bp, Artificial Sequence
  Synthetic oligonucleotide
cagtagctaagaagccggggtcttagtcat

SEQ ID NO: 434134 - DNA, 30 bp, Artificial Sequence
  Synthetic oligonucleotide
caactaaaccgcgtggcctcgtttagtcat

SEQ ID NO: 434135 - DNA, 30 bp, Artificial Sequence
  Synthetic oligonucleotide
gagttcccttagatcacactaagacgtcat

SEQ ID NO: 434136 - DNA, 30 bp, Artificial Sequence
  Synthetic oligonucleotide
gttctcaaaggagtccaatgcggacgtcat

SEQ ID NO: 434137 - DNA, 30 bp, Artificial Sequence
  Synthetic oligonucleotide
tatgcgcatgtcatcacggttgaccgtcat

SEQ ID NO: 434138 - DNA, 30 bp, Artificial Sequence
  Synthetic oligonucleotide
tttcagattgtggggctacaaacccgtcat

SEQ ID NO: 434139 - DNA, 30 bp, Artificial Sequence
  Synthetic oligonucleotide
gcttcccgccatcaccttatcgagcgtcat

SEQ ID NO: 434140 - DNA, 30 bp, Artificial Sequence
  Synthetic oligonucleotide
cagggctaaagcttccttttgtcgcgtcat

SEQ ID NO: 434141 - DNA, 30 bp, Artificial Sequence
  Synthetic oligonucleotide
gccggagatagcgcctgtctcatgcgtcat

SEQ ID NO: 434142 - DNA, 30 bp, Artificial Sequence
  Synthetic oligonucleotide
cagcacaggcgtgtataggtaaatcgtcat

SEQ ID NO: 434143 - DNA, 30 bp, Artificial Sequence
  Synthetic oligonucleotide
cgtttggtgctacatgactagactcgtcat

SEQ ID NO: 434144 - DNA, 30 bp, Artificial Sequence
  Synthetic oligonucleotide
aatgcaacggcgagatacgacgttcgtcat

SEQ ID NO: 434145 - DNA, 30 bp, Artificial Sequence
  Synthetic oligonucleotide
aaaaccggtggtcaaggtgcggaaggtcat

SEQ ID NO: 434146 - DNA, 30 bp, Artificial Sequence
  Synthetic oligonucleotide
taatgcttgagacaggaccctttaggtcat

SEQ ID NO: 434147 - DNA, 30 bp, Artificial Sequence
  Synthetic oligonucleotide
aatcagataatgagagttatcgtcggtcat

SEQ ID NO: 434148 - DNA, 30 bp, Artificial Sequence
  Synthetic oligonucleotide
gggcctttgccggagcctcgcttcggtcat

SEQ ID NO: 434149 - DNA, 30 bp, Artificial Sequence
  Synthetic oligonucleotide
agaaggatcatccgtattggtgggggtcat

SEQ ID NO: 434150 - DNA, 30 bp, Artificial Sequence
  Synthetic oligonucleotide
gatggatagcgttgcggggcttgtggtcat

SEQ ID NO: 434151 - DNA, 30 bp, Artificial Sequence
  Synthetic oligonucleotide
cggcacatgtgactgattctgaaatgtcat

SEQ ID NO: 434152 - DNA, 30 bp, Artificial Sequence
  Synthetic oligonucleotide
gagaggcgctaagctagggtaatatgtcat

SEQ ID NO: 434153 - DNA, 29 bp, Artificial Sequence
  Synthetic oligonucleotide
gcatgggaagtgtacagctagactgtcat

SEQ ID NO: 434154 - DNA, 30 bp, Artificial Sequence
  Synthetic oligonucleotide
aatatgagcggttaagaatgcatctgtcat

SEQ ID NO: 434155 - DNA, 30 bp, Artificial Sequence
  Synthetic oligonucleotide
gaagggcccttgcgagttctaaagtgtcat

SEQ ID NO: 434156 - DNA, 30 bp, Artificial Sequence
  Synthetic oligonucleotide
agtatatatatgccgattcataagtgtcat

SEQ ID NO: 434157 - DNA, 30 bp, Artificial Sequence
  Synthetic oligonucleotide
ggtgattcgagttccagctgagtgtgtcat

SEQ ID NO: 434158 - DNA, 30 bp, Artificial Sequence
  Synthetic oligonucleotide
ggcgccgcggcaatttctacaaaaattcat

SEQ ID NO: 434159 - DNA, 30 bp, Artificial Sequence
  Synthetic oligonucleotide
tgtattagctatgaaaaacttagaattcat

SEQ ID NO: 434160 - DNA, 30 bp, Artificial Sequence
  Synthetic oligonucleotide
gtcagaccagcattgctccgtggaattcat

SEQ ID NO: 434161 - DNA, 30 bp, Artificial Sequence
  Synthetic oligonucleotide
taggcagttcgagtacagcttttaattcat

SEQ ID NO: 434162 - DNA, 30 bp, Artificial Sequence
  Synthetic oligonucleotide
ttacttgacgtgcttcgatgctacattcat

SEQ ID NO: 434163 - DNA, 30 bp, Artificial Sequence
  Synthetic oligonucleotide
gcgtaagcagcttgttagttcaccattcat

SEQ ID NO: 434164 - DNA, 30 bp, Artificial Sequence
  Synthetic oligonucleotide
ggccatcgtcgaagcaaccgcatcattcat

SEQ ID NO: 434165 - DNA, 30 bp, Artificial Sequence
  Synthetic oligonucleotide
tattgacttactcctcgcggggtcattcat

SEQ ID NO: 434166 - DNA, 30 bp, Artificial Sequence
  Synthetic oligonucleotide
tacgtacacgctacaacccggcggattcat

SEQ ID NO: 434167 - DNA, 30 bp, Artificial Sequence
  Synthetic oligonucleotide
ttacctaagagggtcgcttgtcatattcat

SEQ ID NO: 434168 - DNA, 30 bp, Artificial Sequence
  Synthetic oligonucleotide
gaagctaatggtgaatgcctatttattcat

SEQ ID NO: 434169 - DNA, 30 bp, Artificial Sequence
  Synthetic oligonucleotide
atgttgattctgtgaactgtggcacttcat

SEQ ID NO: 434170 - DNA, 30 bp, Artificial Sequence
  Synthetic oligonucleotide
cccggtcgtacacgatgcggtcggcttcat

SEQ ID NO: 434171 - DNA, 30 bp, Artificial Sequence
  Synthetic oligonucleotide
aagtatctatgctcagtatatcatcttcat

SEQ ID NO: 434172 - DNA, 30 bp, Artificial Sequence
  Synthetic oligonucleotide
ctggtaggaacggttaaatatcccgttcat

SEQ ID NO: 434173 - DNA, 30 bp, Artificial Sequence
  Synthetic oligonucleotide
ccggcgctgcaatctactaaaattgttcat

SEQ ID NO: 434174 - DNA, 30 bp, Artificial Sequence
  Synthetic oligonucleotide
ctctggttctacagggtctgaattgttcat

SEQ ID NO: 434175 - DNA, 30 bp, Artificial Sequence
  Synthetic oligonucleotide
tcgcatcattccttatcaatataatttcat

SEQ ID NO: 434176 - DNA, 30 bp, Artificial Sequence
  Synthetic oligonucleotide
gcccgttgatggacaacttattcatttcat

SEQ ID NO: 434177 - DNA, 30 bp, Artificial Sequence
  Synthetic oligonucleotide
tcattgagggttaatgccaaagcctttcat

SEQ ID NO: 434178 - DNA, 30 bp, Artificial Sequence
  Synthetic oligonucleotide
ctccttggacatattgatacggcctttcat

SEQ ID NO: 434179 - DNA, 30 bp, Artificial Sequence
  Synthetic oligonucleotide
tgagaagaagtatcttacggacgctttcat

SEQ ID NO: 434180 - DNA, 30 bp, Artificial Sequence
  Synthetic oligonucleotide
aagcattatccttggtacagtggctttcat

SEQ ID NO: 434181 - DNA, 30 bp, Artificial Sequence
  Synthetic oligonucleotide
agatgtatatgagcagtcctactctttcat

SEQ ID NO: 434182 - DNA, 30 bp, Artificial Sequence
  Synthetic oligonucleotide
tggtacattggttgcaacaaagtctttcat

SEQ ID NO: 434183 - DNA, 30 bp, Artificial Sequence
  Synthetic oligonucleotide
atgaactttcgagtgtcaggaaggtttcat

SEQ ID NO: 434184 - DNA, 30 bp, Artificial Sequence
  Synthetic oligonucleotide
tggacagaagcacacgtacaacgttttcat

SEQ ID NO: 434185 - DNA, 30 bp, Artificial Sequence
  Synthetic oligonucleotide
agggcctttagtgcctacttattttttcat

SEQ ID NO: 434186 - DNA, 30 bp, Artificial Sequence
  Synthetic oligonucleotide
gcgtctagatctttgtagtctttttttcat

SEQ ID NO: 434187 - DNA, 30 bp, Artificial Sequence
  Synthetic oligonucleotide
gtatccgggtgtcaacgtttcacaaaagat

SEQ ID NO: 434188 - DNA, 30 bp, Artificial Sequence
  Synthetic oligonucleotide
tgattataagctgcgaccattagaaaagat

SEQ ID NO: 434189 - DNA, 30 bp, Artificial Sequence
  Synthetic oligonucleotide
tgtgccatgaaatcgacctaacgaaaagat

SEQ ID NO: 434190 - DNA, 30 bp, Artificial Sequence
  Synthetic oligonucleotide
aatataattccgtctacgtcggtaaaagat

SEQ ID NO: 434191 - DNA, 30 bp, Artificial Sequence
  Synthetic oligonucleotide
gtcctcccacgcgaacggctcaccaaagat

SEQ ID NO: 434192 - DNA, 30 bp, Artificial Sequence
  Synthetic oligonucleotide
gatagtttattatatagcatacccaaagat

SEQ ID NO: 434193 - DNA, 30 bp, Artificial Sequence
  Synthetic oligonucleotide
gtcattatgacttcaataaggtccaaagat

SEQ ID NO: 434194 - DNA, 30 bp, Artificial Sequence
  Synthetic oligonucleotide
tcgctaatcgcgattcactacctgaaagat

SEQ ID NO: 434195 - DNA, 30 bp, Artificial Sequence
  Synthetic oligonucleotide
aaaaggacccacattaatcttgaacaagat

SEQ ID NO: 434196 - DNA, 30 bp, Artificial Sequence
  Synthetic oligonucleotide
cttctcgttaagtgtttgacagcacaagat

SEQ ID NO: 434197 - DNA, 30 bp, Artificial Sequence
  Synthetic oligonucleotide
gactctcaaaagtgtgaatgcttacaagat

SEQ ID NO: 434198 - DNA, 30 bp, Artificial Sequence
  Synthetic oligonucleotide
ctgtgggtcagtaggcctccgttacaagat

SEQ ID NO: 434199 - DNA, 30 bp, Artificial Sequence
  Synthetic oligonucleotide
ttcttcgtcggatattgagtcacgcaagat

SEQ ID NO: 434200 - DNA, 30 bp, Artificial Sequence
  Synthetic oligonucleotide
aatactatccgttacaggctggcgcaagat

SEQ ID NO: 434201 - DNA, 30 bp, Artificial Sequence
  Synthetic oligonucleotide
agagccgcaaccatattacggaatcaagat

SEQ ID NO: 434202 - DNA, 30 bp, Artificial Sequence
  Synthetic oligonucleotide
cagtagcattctaagcctccagatcaagat

SEQ ID NO: 434203 - DNA, 30 bp, Artificial Sequence
  Synthetic oligonucleotide
tgtatcactgtgaactcccagcaagaagat

SEQ ID NO: 434204 - DNA, 30 bp, Artificial Sequence
  Synthetic oligonucleotide
cactacctcagccgctcacaataagaagat

SEQ ID NO: 434205 - DNA, 30 bp, Artificial Sequence
  Synthetic oligonucleotide
ggattttcgtgctctccatactcagaagat

SEQ ID NO: 434206 - DNA, 30 bp, Artificial Sequence
  Synthetic oligonucleotide
accaagggcggttgcgacatactcgaagat

SEQ ID NO: 434207 - DNA, 30 bp, Artificial Sequence
  Synthetic oligonucleotide
tttcttcaaaaagtatgctccgaggaagat

SEQ ID NO: 434208 - DNA, 30 bp, Artificial Sequence
  Synthetic oligonucleotide
acaagcttaattggagcattcattgaagat

SEQ ID NO: 434209 - DNA, 30 bp, Artificial Sequence
  Synthetic oligonucleotide
tcagcaatagtatacgagcttcttgaagat

SEQ ID NO: 434210 - DNA, 30 bp, Artificial Sequence
  Synthetic oligonucleotide
ttcgttaagcgctcgagcggggcataagat

SEQ ID NO: 434211 - DNA, 30 bp, Artificial Sequence
  Synthetic oligonucleotide
gttcttcgacagttcttcgtacgataagat

SEQ ID NO: 434212 - DNA, 30 bp, Artificial Sequence
  Synthetic oligonucleotide
gaagtctataacttggtgttagtctaagat

SEQ ID NO: 434213 - DNA, 30 bp, Artificial Sequence
  Synthetic oligonucleotide
gtcccgagtggcgtacacaatgtgtaagat

SEQ ID NO: 434214 - DNA, 30 bp, Artificial Sequence
  Synthetic oligonucleotide
cggagtttcactctagctttcgattaagat

SEQ ID NO: 434215 - DNA, 30 bp, Artificial Sequence
  Synthetic oligonucleotide
ggtcattactgaaggtacctgggttaagat

SEQ ID NO: 434216 - DNA, 30 bp, Artificial Sequence
  Synthetic oligonucleotide
cgcggcactgcagggcctgggaaaacagat

SEQ ID NO: 434217 - DNA, 30 bp, Artificial Sequence
  Synthetic oligonucleotide
tcatataagtgggaatcaacctcaacagat

SEQ ID NO: 434218 - DNA, 30 bp, Artificial Sequence
  Synthetic oligonucleotide
caactacggacaattaggtgtctgacagat

SEQ ID NO: 434219 - DNA, 30 bp, Artificial Sequence
  Synthetic oligonucleotide
ttcatggactggggcaacggggtgacagat

SEQ ID NO: 434220 - DNA, 30 bp, Artificial Sequence
  Synthetic oligonucleotide
aatatgactaccagcctcaatcgtacagat

SEQ ID NO: 434221 - DNA, 30 bp, Artificial Sequence
  Synthetic oligonucleotide
ttaattggccttatcggttcataaccagat

SEQ ID NO: 434222 - DNA, 30 bp, Artificial Sequence
  Synthetic oligonucleotide
ttagattgttaatgcggcacggtaccagat

SEQ ID NO: 434223 - DNA, 30 bp, Artificial Sequence
  Synthetic oligonucleotide
taggacactattagacgcggcacgccagat

SEQ ID NO: 434224 - DNA, 30 bp, Artificial Sequence
  Synthetic oligonucleotide
tttttgcgaactctacgggctctgccagat

SEQ ID NO: 434225 - DNA, 30 bp, Artificial Sequence
  Synthetic oligonucleotide
aactagaagcccctcgatacccgtccagat

SEQ ID NO: 434226 - DNA, 30 bp, Artificial Sequence
  Synthetic oligonucleotide
tagcctttgtgtagcgacttttaagcagat

SEQ ID NO: 434227 - DNA, 30 bp, Artificial Sequence
  Synthetic oligonucleotide
gtagagtttggagcgacagcaagagcagat

SEQ ID NO: 434228 - DNA, 30 bp, Artificial Sequence
  Synthetic oligonucleotide
gcaaggaataaccaccgcgatgcggcagat

SEQ ID NO: 434229 - DNA, 30 bp, Artificial Sequence
  Synthetic oligonucleotide
tagtgactagttgtgcgtcatatggcagat

SEQ ID NO: 434230 - DNA, 30 bp, Artificial Sequence
  Synthetic oligonucleotide
cagaagaggtgtctctcggggcttgcagat

SEQ ID NO: 434231 - DNA, 30 bp, Artificial Sequence
  Synthetic oligonucleotide
ttggagaaaatacgggtaagagaatcagat

SEQ ID NO: 434232 - DNA, 30 bp, Artificial Sequence
  Synthetic oligonucleotide
taagtcttgtgcgcatgaactaactcagat

SEQ ID NO: 434233 - DNA, 30 bp, Artificial Sequence
  Synthetic oligonucleotide
aaagatgtcctttgccgcgacagctcagat

SEQ ID NO: 434234 - DNA, 30 bp, Artificial Sequence
  Synthetic oligonucleotide
tatgacgggtgtacagcgttccgctcagat

SEQ ID NO: 434235 - DNA, 30 bp, Artificial Sequence
  Synthetic oligonucleotide
gaaagccagccacgggaagccaggtcagat

SEQ ID NO: 434236 - DNA, 30 bp, Artificial Sequence
  Synthetic oligonucleotide
ttgttcaatcgcaggaatagccggtcagat

SEQ ID NO: 434237 - DNA, 30 bp, Artificial Sequence
  Synthetic oligonucleotide
tattttcaacaaccgatagaatggtcagat

SEQ ID NO: 434238 - DNA, 30 bp, Artificial Sequence
  Synthetic oligonucleotide
ttagcagtttatcctcgtaaaagttcagat

SEQ ID NO: 434239 - DNA, 30 bp, Artificial Sequence
  Synthetic oligonucleotide
ttgaacaggtgagaacgcaatatcagagat

SEQ ID NO: 434240 - DNA, 30 bp, Artificial Sequence
  Synthetic oligonucleotide
cgaggccaacctcccagccctgggagagat

SEQ ID NO: 434241 - DNA, 30 bp, Artificial Sequence
  Synthetic oligonucleotide
gcaacgttgacggcacatctcccacgagat

SEQ ID NO: 434242 - DNA, 30 bp, Artificial Sequence
  Synthetic oligonucleotide
agtgactttatactagacgacggacgagat

SEQ ID NO: 434243 - DNA, 30 bp, Artificial Sequence
  Synthetic oligonucleotide
attatatctcccacttcatgtcaccgagat

SEQ ID NO: 434244 - DNA, 30 bp, Artificial Sequence
  Synthetic oligonucleotide
acatatgtctaacactactggtagcgagat

SEQ ID NO: 434245 - DNA, 30 bp, Artificial Sequence
  Synthetic oligonucleotide
attagagcttgggtcccatgtctgcgagat

SEQ ID NO: 434246 - DNA, 31 bp, Artificial Sequence
  Synthetic oligonucleotide
ttactacagccgtgttgccatctatcgagat

SEQ ID NO: 434247 - DNA, 30 bp, Artificial Sequence
  Synthetic oligonucleotide
atcgaaccttgttcgatctacactcgagat

SEQ ID NO: 434248 - DNA, 30 bp, Artificial Sequence
  Synthetic oligonucleotide
taggatactcacaggggattttacggagat

SEQ ID NO: 434249 - DNA, 30 bp, Artificial Sequence
  Synthetic oligonucleotide
ccatatcgctaccccagtttatgcggagat

SEQ ID NO: 434250 - DNA, 30 bp, Artificial Sequence
  Synthetic oligonucleotide
attgtccgtgtagcccccctgtcgggagat

SEQ ID NO: 434251 - DNA, 30 bp, Artificial Sequence
  Synthetic oligonucleotide
atataaaatgttctatatggcagtggagat

SEQ ID NO: 434252 - DNA, 30 bp, Artificial Sequence
  Synthetic oligonucleotide
cgggttcattgattggttattcactgagat

SEQ ID NO: 434253 - DNA, 30 bp, Artificial Sequence
  Synthetic oligonucleotide
tttacaccacacgtatgaatagggtgagat

SEQ ID NO: 434254 - DNA, 30 bp, Artificial Sequence
  Synthetic oligonucleotide
gaaacagttttggacacggccaattgagat

SEQ ID NO: 434255 - DNA, 30 bp, Artificial Sequence
  Synthetic oligonucleotide
ggacacccatagatgcctgcaatttgagat

SEQ ID NO: 434256 - DNA, 30 bp, Artificial Sequence
  Synthetic oligonucleotide
tacgacgacacgaggttacatctttgagat

SEQ ID NO: 434257 - DNA, 30 bp, Artificial Sequence
  Synthetic oligonucleotide
ataactatcccactgaaaggcgtaatagat

SEQ ID NO: 434258 - DNA, 30 bp, Artificial Sequence
  Synthetic oligonucleotide
taatggagttacctaaggctcagcatagat

SEQ ID NO: 434259 - DNA, 30 bp, Artificial Sequence
  Synthetic oligonucleotide
aactgcgtacccgcgcgcggcctcatagat

SEQ ID NO: 434260 - DNA, 30 bp, Artificial Sequence
  Synthetic oligonucleotide
ccatagtcagtgggagcaattccgatagat

SEQ ID NO: 434261 - DNA, 30 bp, Artificial Sequence
  Synthetic oligonucleotide
aatgttccgccgctcagaggttcgatagat

SEQ ID NO: 434262 - DNA, 30 bp, Artificial Sequence
  Synthetic oligonucleotide
gcactgacttattcacaaaatagtatagat

SEQ ID NO: 434263 - DNA, 30 bp, Artificial Sequence
  Synthetic oligonucleotide
ttgtccagaattcattgaacggttatagat

SEQ ID NO: 434264 - DNA, 30 bp, Artificial Sequence
  Synthetic oligonucleotide
ggtgacgttcttttgaagccttttatagat

SEQ ID NO: 434265 - DNA, 30 bp, Artificial Sequence
  Synthetic oligonucleotide
gacagtcacgcatgaccaatataactagat

SEQ ID NO: 434266 - DNA, 30 bp, Artificial Sequence
  Synthetic oligonucleotide
cattgcacagcaaatgcttacccactagat

SEQ ID NO: 434267 - DNA, 30 bp, Artificial Sequence
  Synthetic oligonucleotide
gtcttgccctaatataatagatccctagat

SEQ ID NO: 434268 - DNA, 30 bp, Artificial Sequence
  Synthetic oligonucleotide
tgtagtcggctttcagagcgtcagctagat

SEQ ID NO: 434269 - DNA, 30 bp, Artificial Sequence
  Synthetic oligonucleotide
aaatcctatcgggtttagtattagctagat

SEQ ID NO: 434270 - DNA, 30 bp, Artificial Sequence
  Synthetic oligonucleotide
accaataacagtttcacgtcttgtctagat

SEQ ID NO: 434271 - DNA, 30 bp, Artificial Sequence
  Synthetic oligonucleotide
gttcggatgatgactaactcagttctagat

SEQ ID NO: 434272 - DNA, 30 bp, Artificial Sequence
  Synthetic oligonucleotide
ggagggtcagatgcagctgcgaaagtagat

SEQ ID NO: 434273 - DNA, 30 bp, Artificial Sequence
  Synthetic oligonucleotide
cggaggcattcttgatctcgctcagtagat

SEQ ID NO: 434274 - DNA, 30 bp, Artificial Sequence
  Synthetic oligonucleotide
gatttcgtctacggcgcggacctagtagat

SEQ ID NO: 434275 - DNA, 30 bp, Artificial Sequence
  Synthetic oligonucleotide
tgacgtgcgactaccgtcgactgcgtagat

SEQ ID NO: 434276 - DNA, 30 bp, Artificial Sequence
  Synthetic oligonucleotide
accaggtaaccagtgagccaactggtagat

SEQ ID NO: 434277 - DNA, 30 bp, Artificial Sequence
  Synthetic oligonucleotide
catgtcacatatgcgcctacggctgtagat

SEQ ID NO: 434278 - DNA, 30 bp, Artificial Sequence
  Synthetic oligonucleotide
aggagcatattgtaagacctttaattagat

SEQ ID NO: 434279 - DNA, 30 bp, Artificial Sequence
  Synthetic oligonucleotide
cttctacgtggcgaattcctgccattagat

SEQ ID NO: 434280 - DNA, 30 bp, Artificial Sequence
  Synthetic oligonucleotide
atcacatgtatttactgccgaagattagat

SEQ ID NO: 434281 - DNA, 30 bp, Artificial Sequence
  Synthetic oligonucleotide
gacttatagggatgcaatcctgccttagat

SEQ ID NO: 434282 - DNA, 30 bp, Artificial Sequence
  Synthetic oligonucleotide
ctttactcctgggtgcaaacgaatttagat

SEQ ID NO: 434283 - DNA, 30 bp, Artificial Sequence
  Synthetic oligonucleotide
tgttcacaaagcctcaggtcaattttagat

SEQ ID NO: 434284 - DNA, 30 bp, Artificial Sequence
  Synthetic oligonucleotide
aggtagatctgagtccgggaggtaaacgat

SEQ ID NO: 434285 - DNA, 30 bp, Artificial Sequence
  Synthetic oligonucleotide
aaaaccagtatgtgattattcggcaacgat

SEQ ID NO: 434286 - DNA, 30 bp, Artificial Sequence
  Synthetic oligonucleotide
ttttgtcactaaaccccacatttcaacgat

SEQ ID NO: 434287 - DNA, 30 bp, Artificial Sequence
  Synthetic oligonucleotide
cttcgtatttggactgttatttagaacgat

SEQ ID NO: 434288 - DNA, 30 bp, Artificial Sequence
  Synthetic oligonucleotide
ccgtcccgtagttagtctggcgaacacgat

SEQ ID NO: 434289 - DNA, 30 bp, Artificial Sequence
  Synthetic oligonucleotide
gcaacgctcgtcgatgattagagacacgat

SEQ ID NO: 434290 - DNA, 30 bp, Artificial Sequence
  Synthetic oligonucleotide
agtcccgcatacgcctggtgtgtccacgat

SEQ ID NO: 434291 - DNA, 30 bp, Artificial Sequence
  Synthetic oligonucleotide
cacaatttcaccgtactcaataggcacgat

SEQ ID NO: 434292 - DNA, 30 bp, Artificial Sequence
  Synthetic oligonucleotide
ctgaatactcgtatcacatgcgttcacgat

SEQ ID NO: 434293 - DNA, 30 bp, Artificial Sequence
  Synthetic oligonucleotide
gtactacgcgtccgtctaacacgagacgat

SEQ ID NO: 434294 - DNA, 30 bp, Artificial Sequence
  Synthetic oligonucleotide
aatgaacgcagaagagcaggggcggacgat

SEQ ID NO: 434295 - DNA, 30 bp, Artificial Sequence
  Synthetic oligonucleotide
acatcgtatcgctagtgtatatttgacgat

SEQ ID NO: 434296 - DNA, 30 bp, Artificial Sequence
  Synthetic oligonucleotide
aggcttgtccttacttagacaacctacgat

SEQ ID NO: 434297 - DNA, 30 bp, Artificial Sequence
  Synthetic oligonucleotide
gcatctcttgaggtcaggtcgccctacgat

SEQ ID NO: 434298 - DNA, 30 bp, Artificial Sequence
  Synthetic oligonucleotide
atgctaatagaccatgcgggggtctacgat

SEQ ID NO: 434299 - DNA, 30 bp, Artificial Sequence
  Synthetic oligonucleotide
gaactttagagagcgactgtaacgtacgat

SEQ ID NO: 434300 - DNA, 30 bp, Artificial Sequence
  Synthetic oligonucleotide
tgttatgttgtgtcccctagggattacgat

SEQ ID NO: 434301 - DNA, 30 bp, Artificial Sequence
  Synthetic oligonucleotide
actttatgtgaaacaacgcttccttacgat

SEQ ID NO: 434302 - DNA, 29 bp, Artificial Sequence
  Synthetic oligonucleotide
tacagacgtagacatctactgcttacgat

SEQ ID NO: 434303 - DNA, 30 bp, Artificial Sequence
  Synthetic oligonucleotide
ttcccgtaccggggtcgatttgcaaccgat

SEQ ID NO: 434304 - DNA, 30 bp, Artificial Sequence
  Synthetic oligonucleotide
ccaagcggtttttattgctcatacaccgat

SEQ ID NO: 434305 - DNA, 30 bp, Artificial Sequence
  Synthetic oligonucleotide
ttttgaggtaacggtgttccagccaccgat

SEQ ID NO: 434306 - DNA, 30 bp, Artificial Sequence
  Synthetic oligonucleotide
gtccataggtagtttttaattcgcaccgat

SEQ ID NO: 434307 - DNA, 30 bp, Artificial Sequence
  Synthetic oligonucleotide
ctgcaggatcgtcttatgtaaaagaccgat

SEQ ID NO: 434308 - DNA, 30 bp, Artificial Sequence
  Synthetic oligonucleotide
gcccgatacagcatgtcgatatataccgat

SEQ ID NO: 434309 - DNA, 30 bp, Artificial Sequence
  Synthetic oligonucleotide
ctagtttaggcccgctgcctttaacccgat

SEQ ID NO: 434310 - DNA, 30 bp, Artificial Sequence
  Synthetic oligonucleotide
ttaggtcattttgctgaagttaggcccgat

SEQ ID NO: 434311 - DNA, 30 bp, Artificial Sequence
  Synthetic oligonucleotide
aggcatccgagtttaataggtgtgcccgat

SEQ ID NO: 434312 - DNA, 29 bp, Artificial Sequence
  Synthetic oligonucleotide
gagggttgggtttccaggaaggtcccgat

SEQ ID NO: 434313 - DNA, 31 bp, Artificial Sequence
  Synthetic oligonucleotide
gaacacaggaagctcgccgggggcagccgat

SEQ ID NO: 434314 - DNA, 30 bp, Artificial Sequence
  Synthetic oligonucleotide
agggtcccataccatggggcctctgccgat

SEQ ID NO: 434315 - DNA, 30 bp, Artificial Sequence
  Synthetic oligonucleotide
gcatatcatttgggacttacccaatccgat

SEQ ID NO: 434316 - DNA, 30 bp, Artificial Sequence
  Synthetic oligonucleotide
atcatgtctttggtattctggcactccgat

SEQ ID NO: 434317 - DNA, 30 bp, Artificial Sequence
  Synthetic oligonucleotide
tttatctcagatcatccgcaattttccgat

SEQ ID NO: 434318 - DNA, 30 bp, Artificial Sequence
  Synthetic oligonucleotide
accgggggaagtgagattcaacgaagcgat

SEQ ID NO: 434319 - DNA, 30 bp, Artificial Sequence
  Synthetic oligonucleotide
gtactatcctacccgtagctcaccagcgat

SEQ ID NO: 434320 - DNA, 30 bp, Artificial Sequence
  Synthetic oligonucleotide
tgtatattcaaaggcgccctggcgagcgat

SEQ ID NO: 434321 - DNA, 30 bp, Artificial Sequence
  Synthetic oligonucleotide
atggaaggcgcagatttgacacggagcgat

SEQ ID NO: 434322 - DNA, 30 bp, Artificial Sequence
  Synthetic oligonucleotide
tccaacttatagttacgggatgtgagcgat

SEQ ID NO: 434323 - DNA, 30 bp, Artificial Sequence
  Synthetic oligonucleotide
catggcagcggcggtttatgcgatagcgat

SEQ ID NO: 434324 - DNA, 30 bp, Artificial Sequence
  Synthetic oligonucleotide
tgcaggaatacctcgaaggtctgtagcgat

SEQ ID NO: 434325 - DNA, 30 bp, Artificial Sequence
  Synthetic oligonucleotide
tattgtcatgtttgatgctagtaaggcgat

SEQ ID NO: 434326 - DNA, 30 bp, Artificial Sequence
  Synthetic oligonucleotide
gggctgctatctaaaataaaatcaggcgat

SEQ ID NO: 434327 - DNA, 30 bp, Artificial Sequence
  Synthetic oligonucleotide
gttaaggccggtcgggaccacgggggcgat

SEQ ID NO: 434328 - DNA, 30 bp, Artificial Sequence
  Synthetic oligonucleotide
atttgttggaggcgccactcatggggcgat

SEQ ID NO: 434329 - DNA, 30 bp, Artificial Sequence
  Synthetic oligonucleotide
ctgcagtcaaagagacgctctttgggcgat

SEQ ID NO: 434330 - DNA, 30 bp, Artificial Sequence
  Synthetic oligonucleotide
tcaggattgttttgtatggtcaatggcgat

SEQ ID NO: 434331 - DNA, 30 bp, Artificial Sequence
  Synthetic oligonucleotide
ttgctgtattgacattcgccgcttggcgat

SEQ ID NO: 434332 - DNA, 30 bp, Artificial Sequence
  Synthetic oligonucleotide
aaccgggactcatcctttattgaatgcgat

SEQ ID NO: 434333 - DNA, 30 bp, Artificial Sequence
  Synthetic oligonucleotide
gcatattgcatggcgtcatgctcatgcgat

SEQ ID NO: 434334 - DNA, 30 bp, Artificial Sequence
  Synthetic oligonucleotide
ttgttcgcaagcgtttatcgacgatgcgat

SEQ ID NO: 434335 - DNA, 30 bp, Artificial Sequence
  Synthetic oligonucleotide
gtacgtggcggctgatcgcaaatctgcgat

SEQ ID NO: 434336 - DNA, 30 bp, Artificial Sequence
  Synthetic oligonucleotide
acccatataggtatacgtagcacgtgcgat

SEQ ID NO: 434337 - DNA, 30 bp, Artificial Sequence
  Synthetic oligonucleotide
gattacctggcagtcccgcggaggtgcgat

SEQ ID NO: 434338 - DNA, 30 bp, Artificial Sequence
  Synthetic oligonucleotide
acggctactggagaaagaaaatcttgcgat

SEQ ID NO: 434339 - DNA, 30 bp, Artificial Sequence
  Synthetic oligonucleotide
aggtcagtataaaagtagaggatttgcgat

SEQ ID NO: 434340 - DNA, 30 bp, Artificial Sequence
  Synthetic oligonucleotide
ctatagtacatggatgttcgcgcaatcgat

SEQ ID NO: 434341 - DNA, 30 bp, Artificial Sequence
  Synthetic oligonucleotide
gaatgccttctccggaggcaccgcatcgat

SEQ ID NO: 434342 - DNA, 30 bp, Artificial Sequence
  Synthetic oligonucleotide
atgctcgaatggaacatatgcttcatcgat

SEQ ID NO: 434343 - DNA, 30 bp, Artificial Sequence
  Synthetic oligonucleotide
agtcaaaggctctctatatttaggatcgat

SEQ ID NO: 434344 - DNA, 30 bp, Artificial Sequence
  Synthetic oligonucleotide
gatactaaagggatcgagttttatatcgat

SEQ ID NO: 434345 - DNA, 30 bp, Artificial Sequence
  Synthetic oligonucleotide
caggatagtagtgatacttaccgtatcgat

SEQ ID NO: 434346 - DNA, 30 bp, Artificial Sequence
  Synthetic oligonucleotide
agaggggggaccccccatcgcatactcgat

SEQ ID NO: 434347 - DNA, 30 bp, Artificial Sequence
  Synthetic oligonucleotide
atcaataggcttcgctttagaccgctcgat

SEQ ID NO: 434348 - DNA, 30 bp, Artificial Sequence
  Synthetic oligonucleotide
tcattaggtccgcgccgctagcttctcgat

SEQ ID NO: 434349 - DNA, 30 bp, Artificial Sequence
  Synthetic oligonucleotide
ttcagaccagcactatgtcgtcttctcgat

SEQ ID NO: 434350 - DNA, 30 bp, Artificial Sequence
  Synthetic oligonucleotide
ttcgcgggttttagacgcctaatcgtcgat

SEQ ID NO: 434351 - DNA, 30 bp, Artificial Sequence
  Synthetic oligonucleotide
tcatctcagccttatggctgactcgtcgat

SEQ ID NO: 434352 - DNA, 30 bp, Artificial Sequence
  Synthetic oligonucleotide
agagagagacaccattctcgggaggtcgat

SEQ ID NO: 434353 - DNA, 30 bp, Artificial Sequence
  Synthetic oligonucleotide
ggtgtcaattcgacgagtttggaggtcgat

SEQ ID NO: 434354 - DNA, 30 bp, Artificial Sequence
  Synthetic oligonucleotide
gccagcctgagaactgttgcttctgtcgat

SEQ ID NO: 434355 - DNA, 30 bp, Artificial Sequence
  Synthetic oligonucleotide
tcaatctttcaacctgtcctccgtgtcgat

SEQ ID NO: 434356 - DNA, 30 bp, Artificial Sequence
  Synthetic oligonucleotide
aagcggctatcataattcttaggtgtcgat

SEQ ID NO: 434357 - DNA, 30 bp, Artificial Sequence
  Synthetic oligonucleotide
gtatctccacttgcgtacgcggttgtcgat

SEQ ID NO: 434358 - DNA, 30 bp, Artificial Sequence
  Synthetic oligonucleotide
ctttaacctttccgttattggagattcgat

SEQ ID NO: 434359 - DNA, 30 bp, Artificial Sequence
  Synthetic oligonucleotide
ttggacaatttgtatggcgcttgattcgat

SEQ ID NO: 434360 - DNA, 30 bp, Artificial Sequence
  Synthetic oligonucleotide
tgcgattacggtaacgcaaacaccttcgat

SEQ ID NO: 434361 - DNA, 30 bp, Artificial Sequence
  Synthetic oligonucleotide
gagtagaaccctagacagctttagttcgat

SEQ ID NO: 434362 - DNA, 30 bp, Artificial Sequence
  Synthetic oligonucleotide
actatgggttgcgcaggctggctgttcgat

SEQ ID NO: 434363 - DNA, 30 bp, Artificial Sequence
  Synthetic oligonucleotide
agcgcagcctacccacaccttgaaaaggat

SEQ ID NO: 434364 - DNA, 30 bp, Artificial Sequence
  Synthetic oligonucleotide
atcactggcacaaacggaatgtgcaaggat

SEQ ID NO: 434365 - DNA, 30 bp, Artificial Sequence
  Synthetic oligonucleotide
aggatgttgggacgttcagttttgaaggat

SEQ ID NO: 434366 - DNA, 30 bp, Artificial Sequence
  Synthetic oligonucleotide
tagaaatcttcagaagcgtgcaaacaggat

SEQ ID NO: 434367 - DNA, 30 bp, Artificial Sequence
  Synthetic oligonucleotide
gatgctgagttaacgcctctgtaacaggat

SEQ ID NO: 434368 - DNA, 30 bp, Artificial Sequence
  Synthetic oligonucleotide
ttcgtcactaagacctggctaagacaggat

SEQ ID NO: 434369 - DNA, 30 bp, Artificial Sequence
  Synthetic oligonucleotide
acttgtaaaggccaggaagggggacaggat

SEQ ID NO: 434370 - DNA, 30 bp, Artificial Sequence
  Synthetic oligonucleotide
tatgcataacgtgcactcttcctacaggat

SEQ ID NO: 434371 - DNA, 30 bp, Artificial Sequence
  Synthetic oligonucleotide
ggtagattaggcgccgggtgccgccaggat

SEQ ID NO: 434372 - DNA, 30 bp, Artificial Sequence
  Synthetic oligonucleotide
accccctatctataggagttcaagcaggat

SEQ ID NO: 434373 - DNA, 30 bp, Artificial Sequence
  Synthetic oligonucleotide
cacgcttgaggctgagaccgagcgcaggat

SEQ ID NO: 434374 - DNA, 30 bp, Artificial Sequence
  Synthetic oligonucleotide
aaggtctttgatctcagactccgtcaggat

SEQ ID NO: 434375 - DNA, 30 bp, Artificial Sequence
  Synthetic oligonucleotide
acaatgcacccatatatatattaagaggat

SEQ ID NO: 434376 - DNA, 30 bp, Artificial Sequence
  Synthetic oligonucleotide
ttctagcatatgacaactgctgtagaggat

SEQ ID NO: 434377 - DNA, 30 bp, Artificial Sequence
  Synthetic oligonucleotide
tcaacgcttgtaaacgcgttataggaggat

SEQ ID NO: 434378 - DNA, 30 bp, Artificial Sequence
  Synthetic oligonucleotide
tggggcgagtggacctccgggatggaggat

SEQ ID NO: 434379 - DNA, 30 bp, Artificial Sequence
  Synthetic oligonucleotide
aacggctggccaggagttccgttggaggat

SEQ ID NO: 434380 - DNA, 30 bp, Artificial Sequence
  Synthetic oligonucleotide
acagtacgggtttttctttagaatgaggat

SEQ ID NO: 434381 - DNA, 30 bp, Artificial Sequence
  Synthetic oligonucleotide
ggaagcacctgatcggtttgggatgaggat

SEQ ID NO: 434382 - DNA, 30 bp, Artificial Sequence
  Synthetic oligonucleotide
ctttgctacttcactagtgcgtatgaggat

SEQ ID NO: 434383 - DNA, 30 bp, Artificial Sequence
  Synthetic oligonucleotide
gaattccgtaatcaggattatcaataggat

SEQ ID NO: 434384 - DNA, 30 bp, Artificial Sequence
  Synthetic oligonucleotide
tgacaaattatctgttactgtggataggat

SEQ ID NO: 434385 - DNA, 30 bp, Artificial Sequence
  Synthetic oligonucleotide
ctcacattaggaatagcgtcagtataggat

SEQ ID NO: 434386 - DNA, 30 bp, Artificial Sequence
  Synthetic oligonucleotide
gatccctcgccagagtgggacttctaggat

SEQ ID NO: 434387 - DNA, 30 bp, Artificial Sequence
  Synthetic oligonucleotide
tagtttttatcgaaaacatagcggtaggat

SEQ ID NO: 434388 - DNA, 31 bp, Artificial Sequence
  Synthetic oligonucleotide
taccagtatagaacgtatagggccaacggat

SEQ ID NO: 434389 - DNA, 30 bp, Artificial Sequence
  Synthetic oligonucleotide
atttgcgagatggtttacgcatgaacggat

SEQ ID NO: 434390 - DNA, 30 bp, Artificial Sequence
  Synthetic oligonucleotide
gataaacggtgccattcttgatacacggat

SEQ ID NO: 434391 - DNA, 30 bp, Artificial Sequence
  Synthetic oligonucleotide
accggtcctactatctgccaaaccacggat

SEQ ID NO: 434392 - DNA, 30 bp, Artificial Sequence
  Synthetic oligonucleotide
tttctttgatggaaagaaggccccacggat

SEQ ID NO: 434393 - DNA, 30 bp, Artificial Sequence
  Synthetic oligonucleotide
gggcccatgtcgtcaatccgagccacggat

SEQ ID NO: 434394 - DNA, 30 bp, Artificial Sequence
  Synthetic oligonucleotide
caaacagacctgtcttctccccgcacggat

SEQ ID NO: 434395 - DNA, 30 bp, Artificial Sequence
  Synthetic oligonucleotide
atctcatacatagcttcctaaggcacggat

SEQ ID NO: 434396 - DNA, 30 bp, Artificial Sequence
  Synthetic oligonucleotide
tctagtcatggtgttaatccgttcacggat

SEQ ID NO: 434397 - DNA, 30 bp, Artificial Sequence
  Synthetic oligonucleotide
ataccatctcaccttgagtctacgacggat

SEQ ID NO: 434398 - DNA, 30 bp, Artificial Sequence
  Synthetic oligonucleotide
gcgtccatctgctcagtatggcgtacggat

SEQ ID NO: 434399 - DNA, 30 bp, Artificial Sequence
  Synthetic oligonucleotide
tacgtttacgtaggatcgtagtgtacggat

SEQ ID NO: 434400 - DNA, 30 bp, Artificial Sequence
  Synthetic oligonucleotide
gagtctaaatcccccatcaaaccaccggat

SEQ ID NO: 434401 - DNA, 30 bp, Artificial Sequence
  Synthetic oligonucleotide
gtagaaccgtcgttgtgaagtgacccggat

SEQ ID NO: 434402 - DNA, 30 bp, Artificial Sequence
  Synthetic oligonucleotide
ctcgatatggaaactcgggtttccccggat

SEQ ID NO: 434403 - DNA, 30 bp, Artificial Sequence
  Synthetic oligonucleotide
tggaggtgttccgcgaccaggggcccggat

SEQ ID NO: 434404 - DNA, 30 bp, Artificial Sequence
  Synthetic oligonucleotide
ttacttattctgaccacagactatccggat

SEQ ID NO: 434405 - DNA, 30 bp, Artificial Sequence
  Synthetic oligonucleotide
atccggaaaaggcacgacaggcgtccggat

SEQ ID NO: 434406 - DNA, 30 bp, Artificial Sequence
  Synthetic oligonucleotide
atcacaagcttgaaactttcctgtccggat

SEQ ID NO: 434407 - DNA, 30 bp, Artificial Sequence
  Synthetic oligonucleotide
ctaggtcacggctctgcggagcttccggat

SEQ ID NO: 434408 - DNA, 30 bp, Artificial Sequence
  Synthetic oligonucleotide
tgcagcaatggcgtagtgagctaagcggat

SEQ ID NO: 434409 - DNA, 30 bp, Artificial Sequence
  Synthetic oligonucleotide
gcataccagcgttagggctgtatcgcggat

SEQ ID NO: 434410 - DNA, 30 bp, Artificial Sequence
  Synthetic oligonucleotide
ggcgcaatataccgggttctgacatcggat

SEQ ID NO: 434411 - DNA, 30 bp, Artificial Sequence
  Synthetic oligonucleotide
tctgcacaattaattgtatataactcggat

SEQ ID NO: 434412 - DNA, 30 bp, Artificial Sequence
  Synthetic oligonucleotide
ggacgtccgacaaacgaggccgtctcggat

SEQ ID NO: 434413 - DNA, 30 bp, Artificial Sequence
  Synthetic oligonucleotide
ttctgaggcacctcgatcagggggtcggat

SEQ ID NO: 434414 - DNA, 30 bp, Artificial Sequence
  Synthetic oligonucleotide
ggaaggctttgccatcgttgataaagggat

SEQ ID NO: 434415 - DNA, 30 bp, Artificial Sequence
  Synthetic oligonucleotide
ttaaggtttaagagactgaggtaaagggat

SEQ ID NO: 434416 - DNA, 30 bp, Artificial Sequence
  Synthetic oligonucleotide
ttagaacttactgatggattttcaagggat

SEQ ID NO: 434417 - DNA, 30 bp, Artificial Sequence
  Synthetic oligonucleotide
ctatagcctaataacctcggtggaagggat

SEQ ID NO: 434418 - DNA, 30 bp, Artificial Sequence
  Synthetic oligonucleotide
gtactggacgactggagtacgggcagggat

SEQ ID NO: 434419 - DNA, 30 bp, Artificial Sequence
  Synthetic oligonucleotide
ctgcgaaatttatatgcccccacgagggat

SEQ ID NO: 434420 - DNA, 30 bp, Artificial Sequence
  Synthetic oligonucleotide
tgcggtttaggtcatcagacaaggagggat

SEQ ID NO: 434421 - DNA, 30 bp, Artificial Sequence
  Synthetic oligonucleotide
taatcaatcatatgcgccggtaggagggat

SEQ ID NO: 434422 - DNA, 30 bp, Artificial Sequence
  Synthetic oligonucleotide
ctatcattctcccgagctaacgggagggat

SEQ ID NO: 434423 - DNA, 30 bp, Artificial Sequence
  Synthetic oligonucleotide
ccgtagtaggtgacgatgctatttagggat

SEQ ID NO: 434424 - DNA, 30 bp, Artificial Sequence
  Synthetic oligonucleotide
gttcgttttagaacgtatgacacacgggat

SEQ ID NO: 434425 - DNA, 30 bp, Artificial Sequence
  Synthetic oligonucleotide
atccgagacggagtcaagttgtcacgggat

SEQ ID NO: 434426 - DNA, 30 bp, Artificial Sequence
  Synthetic oligonucleotide
cagattgcgggcgtgggcttaagacgggat

SEQ ID NO: 434427 - DNA, 30 bp, Artificial Sequence
  Synthetic oligonucleotide
ttttccagcgagtacacgtctagacgggat

SEQ ID NO: 434428 - DNA, 30 bp, Artificial Sequence
  Synthetic oligonucleotide
gaccatttagtatagttagctgtacgggat

SEQ ID NO: 434429 - DNA, 30 bp, Artificial Sequence
  Synthetic oligonucleotide
attatgattcagtagtgcgcattacgggat

SEQ ID NO: 434430 - DNA, 30 bp, Artificial Sequence
  Synthetic oligonucleotide
cagtcattattttgtttgctgcaccgggat

SEQ ID NO: 434431 - DNA, 30 bp, Artificial Sequence
  Synthetic oligonucleotide
ttaaattaagattggcccaggcagcgggat

SEQ ID NO: 434432 - DNA, 30 bp, Artificial Sequence
  Synthetic oligonucleotide
taattcggataaaataccccgtggcgggat

SEQ ID NO: 434433 - DNA, 30 bp, Artificial Sequence
  Synthetic oligonucleotide
aaaccatatttcagcccacggactcgggat

SEQ ID NO: 434434 - DNA, 30 bp, Artificial Sequence
  Synthetic oligonucleotide
ggagaacatggcgcggcccctgaaggggat

SEQ ID NO: 434435 - DNA, 30 bp, Artificial Sequence
  Synthetic oligonucleotide
caagtgtatgtggtcagaaggtcaggggat

SEQ ID NO: 434436 - DNA, 30 bp, Artificial Sequence
  Synthetic oligonucleotide
tagagtgcttgcattcctacctgaggggat

SEQ ID NO: 434437 - DNA, 30 bp, Artificial Sequence
  Synthetic oligonucleotide
taaaaaagacatgaataggggcgcggggat

SEQ ID NO: 434438 - DNA, 30 bp, Artificial Sequence
  Synthetic oligonucleotide
aattgacctgtagccgctatccagggggat

SEQ ID NO: 434439 - DNA, 30 bp, Artificial Sequence
  Synthetic oligonucleotide
ggttgggctattgtcgtatggacgggggat

SEQ ID NO: 434440 - DNA, 30 bp, Artificial Sequence
  Synthetic oligonucleotide
cagtttaaatggtgaaatttggcgggggat

SEQ ID NO: 434441 - DNA, 30 bp, Artificial Sequence
  Synthetic oligonucleotide
caagccacccaggtaaaataccatggggat

SEQ ID NO: 434442 - DNA, 30 bp, Artificial Sequence
  Synthetic oligonucleotide
cgtaggaacctgtcctcactaattggggat

SEQ ID NO: 434443 - DNA, 30 bp, Artificial Sequence
  Synthetic oligonucleotide
taaccgaacccccggaactgcattggggat

SEQ ID NO: 434444 - DNA, 30 bp, Artificial Sequence
  Synthetic oligonucleotide
gaaagtttggttgatttgggagttggggat

SEQ ID NO: 434445 - DNA, 30 bp, Artificial Sequence
  Synthetic oligonucleotide
tgttgacgtctagtgtctcatcgatgggat

SEQ ID NO: 434446 - DNA, 30 bp, Artificial Sequence
  Synthetic oligonucleotide
agtttctcaagcgtactgtagaactgggat

SEQ ID NO: 434447 - DNA, 30 bp, Artificial Sequence
  Synthetic oligonucleotide
gctctataatattcgacattggcctgggat

SEQ ID NO: 434448 - DNA, 31 bp, Artificial Sequence
  Synthetic oligonucleotide
aaggcacgcaaggcacgatctagcgtgggat

SEQ ID NO: 434449 - DNA, 30 bp, Artificial Sequence
  Synthetic oligonucleotide
ttagggtcaagggccacggggtcgtgggat

SEQ ID NO: 434450 - DNA, 30 bp, Artificial Sequence
  Synthetic oligonucleotide
tccgtgtgagtcgcgagccataggtgggat

SEQ ID NO: 434451 - DNA, 30 bp, Artificial Sequence
  Synthetic oligonucleotide
tgcgaaacatagagctctttgcgttgggat

SEQ ID NO: 434452 - DNA, 30 bp, Artificial Sequence
  Synthetic oligonucleotide
tcctacgacccaagcggctcaggttgggat

SEQ ID NO: 434453 - DNA, 30 bp, Artificial Sequence
  Synthetic oligonucleotide
tataagaagcgctcgacgtatcaaatggat

SEQ ID NO: 434454 - DNA, 30 bp, Artificial Sequence
  Synthetic oligonucleotide
acacgtgtgtttcaatggcaaaccatggat

SEQ ID NO: 434455 - DNA, 30 bp, Artificial Sequence
  Synthetic oligonucleotide
ggtgcggatggagtcagaggtgccatggat

SEQ ID NO: 434456 - DNA, 30 bp, Artificial Sequence
  Synthetic oligonucleotide
agcccaacccgtatggcctgcgagatggat

SEQ ID NO: 434457 - DNA, 30 bp, Artificial Sequence
  Synthetic oligonucleotide
aagattggaaattcaggcactacgatggat

SEQ ID NO: 434458 - DNA, 30 bp, Artificial Sequence
  Synthetic oligonucleotide
agcatcgacccaatgtaaaggtcgatggat

SEQ ID NO: 434459 - DNA, 30 bp, Artificial Sequence
  Synthetic oligonucleotide
tcaattggccaaaacacgcacaatatggat

SEQ ID NO: 434460 - DNA, 30 bp, Artificial Sequence
  Synthetic oligonucleotide
cagttcccaatccgtatattgaatatggat

SEQ ID NO: 434461 - DNA, 30 bp, Artificial Sequence
  Synthetic oligonucleotide
ataaatggtctgttaaacattaatatggat

SEQ ID NO: 434462 - DNA, 30 bp, Artificial Sequence
  Synthetic oligonucleotide
gtcctcggactactatccagccctatggat

SEQ ID NO: 434463 - DNA, 30 bp, Artificial Sequence
  Synthetic oligonucleotide
aaaaatggttagtgagtttagtctatggat

SEQ ID NO: 434464 - DNA, 30 bp, Artificial Sequence
  Synthetic oligonucleotide
gcatcggagaatagggttttttctatggat

SEQ ID NO: 434465 - DNA, 30 bp, Artificial Sequence
  Synthetic oligonucleotide
caatcggctttccttacacttggtatggat

SEQ ID NO: 434466 - DNA, 30 bp, Artificial Sequence
  Synthetic oligonucleotide
ctaccattcggtggaagcgtctcactggat

SEQ ID NO: 434467 - DNA, 30 bp, Artificial Sequence
  Synthetic oligonucleotide
tacggtgccccaaccggtgtccggctggat

SEQ ID NO: 434468 - DNA, 30 bp, Artificial Sequence
  Synthetic oligonucleotide
tagtccgcaagtggaacgatctggctggat

SEQ ID NO: 434469 - DNA, 30 bp, Artificial Sequence
  Synthetic oligonucleotide
taagaatcgtttgatcactataatctggat

SEQ ID NO: 434470 - DNA, 30 bp, Artificial Sequence
  Synthetic oligonucleotide
gtaatcgtattaccgcgtggttttctggat

SEQ ID NO: 434471 - DNA, 28 bp, Artificial Sequence
  Synthetic oligonucleotide
gccctttggtatacagaattaagtggat

SEQ ID NO: 434472 - DNA, 30 bp, Artificial Sequence
  Synthetic oligonucleotide
tctgcagataagaccgttcactcagtggat

SEQ ID NO: 434473 - DNA, 30 bp, Artificial Sequence
  Synthetic oligonucleotide
tctatgatatatacatgatatcgagtggat

SEQ ID NO: 434474 - DNA, 30 bp, Artificial Sequence
  Synthetic oligonucleotide
caaagagcattttgagttagtttagtggat

SEQ ID NO: 434475 - DNA, 30 bp, Artificial Sequence
  Synthetic oligonucleotide
ccttggtcgtgttgtcgcgtccttgtggat

SEQ ID NO: 434476 - DNA, 30 bp, Artificial Sequence
  Synthetic oligonucleotide
tcgcccgatttttttcgatgcgcattggat

SEQ ID NO: 434477 - DNA, 29 bp, Artificial Sequence
  Synthetic oligonucleotide
aggtcccggtaaaggaatgaaccttggat

SEQ ID NO: 434478 - DNA, 30 bp, Artificial Sequence
  Synthetic oligonucleotide
aatttggccaacgtattgacgccgttggat

SEQ ID NO: 434479 - DNA, 30 bp, Artificial Sequence
  Synthetic oligonucleotide
ttggccgtgtgctggcgtccgtatttggat

SEQ ID NO: 434480 - DNA, 30 bp, Artificial Sequence
  Synthetic oligonucleotide
ggttatcgtgctcgagctgtaggtttggat

SEQ ID NO: 434481 - DNA, 30 bp, Artificial Sequence
  Synthetic oligonucleotide
atttcgagagactaggtctcaccaaatgat

SEQ ID NO: 434482 - DNA, 30 bp, Artificial Sequence
  Synthetic oligonucleotide
agtccacgtgagctttgcgtgttaaatgat

SEQ ID NO: 434483 - DNA, 30 bp, Artificial Sequence
  Synthetic oligonucleotide
cgaatgtaacctaacttatgtagcaatgat

SEQ ID NO: 434484 - DNA, 30 bp, Artificial Sequence
  Synthetic oligonucleotide
tatagatgcacagaggtatctttcaatgat

SEQ ID NO: 434485 - DNA, 30 bp, Artificial Sequence
  Synthetic oligonucleotide
gtgaaaaatgacgtatattcccggaatgat

SEQ ID NO: 434486 - DNA, 30 bp, Artificial Sequence
  Synthetic oligonucleotide
cgaccggcggcaattctatgtgataatgat

SEQ ID NO: 434487 - DNA, 30 bp, Artificial Sequence
  Synthetic oligonucleotide
tcacttacttgccaaagggcaaaccatgat

SEQ ID NO: 434488 - DNA, 30 bp, Artificial Sequence
  Synthetic oligonucleotide
ctacgtggctaggcataaacgccgcatgat

SEQ ID NO: 434489 - DNA, 30 bp, Artificial Sequence
  Synthetic oligonucleotide
agttaggggcattatgttaagcggcatgat

SEQ ID NO: 434490 - DNA, 30 bp, Artificial Sequence
  Synthetic oligonucleotide
aactacgggatactctgatattatcatgat

SEQ ID NO: 434491 - DNA, 30 bp, Artificial Sequence
  Synthetic oligonucleotide
acgttttcttaagcattatggtctcatgat

SEQ ID NO: 434492 - DNA, 30 bp, Artificial Sequence
  Synthetic oligonucleotide
aatagacccgctgggtttatcagagatgat

SEQ ID NO: 434493 - DNA, 30 bp, Artificial Sequence
  Synthetic oligonucleotide
gtccttcaccccgatcctggataggatgat

SEQ ID NO: 434494 - DNA, 30 bp, Artificial Sequence
  Synthetic oligonucleotide
atgccacagcatctcggcagttctgatgat

SEQ ID NO: 434495 - DNA, 30 bp, Artificial Sequence
  Synthetic oligonucleotide
cccaatattttaatttttgtcaaatatgat

SEQ ID NO: 434496 - DNA, 30 bp, Artificial Sequence
  Synthetic oligonucleotide
cataatagcgggaccctctttcaatatgat

SEQ ID NO: 434497 - DNA, 30 bp, Artificial Sequence
  Synthetic oligonucleotide
ttcgctctaatacgtaagacataatatgat

SEQ ID NO: 434498 - DNA, 31 bp, Artificial Sequence
  Synthetic oligonucleotide
attgtctatggtcgaatatgcctaatatgat

SEQ ID NO: 434499 - DNA, 30 bp, Artificial Sequence
  Synthetic oligonucleotide
tgtgttacatgggtgatcaaagtatatgat

SEQ ID NO: 434500 - DNA, 30 bp, Artificial Sequence
  Synthetic oligonucleotide
gcttggtaccaatcaacaagtgagtatgat

SEQ ID NO: 434501 - DNA, 30 bp, Artificial Sequence
  Synthetic oligonucleotide
gtttataagatcattaagcttctgtatgat

SEQ ID NO: 434502 - DNA, 30 bp, Artificial Sequence
  Synthetic oligonucleotide
tcctccagcgtgcagcgttcgaattatgat

SEQ ID NO: 434503 - DNA, 30 bp, Artificial Sequence
  Synthetic oligonucleotide
aaagatacccgctagttgtttttttatgat

SEQ ID NO: 434504 - DNA, 30 bp, Artificial Sequence
  Synthetic oligonucleotide
gatgacagttcagcttagccaccaactgat

SEQ ID NO: 434505 - DNA, 30 bp, Artificial Sequence
  Synthetic oligonucleotide
ccatatgcagcgtacgggtctggaactgat

SEQ ID NO: 434506 - DNA, 30 bp, Artificial Sequence
  Synthetic oligonucleotide
aacaaaacaccagtttcagacagcactgat

SEQ ID NO: 434507 - DNA, 30 bp, Artificial Sequence
  Synthetic oligonucleotide
gtaatttagccccagctctcgagcactgat

SEQ ID NO: 434508 - DNA, 30 bp, Artificial Sequence
  Synthetic oligonucleotide
ggtgaattatggcaggagtactctactgat

SEQ ID NO: 434509 - DNA, 30 bp, Artificial Sequence
  Synthetic oligonucleotide
ttctcgcattacaaccgtctgcgtactgat

SEQ ID NO: 434510 - DNA, 30 bp, Artificial Sequence
  Synthetic oligonucleotide
agacaaggtaaacctctctgttttactgat

SEQ ID NO: 434511 - DNA, 30 bp, Artificial Sequence
  Synthetic oligonucleotide
tcaattggaatggtaaaactgtagcctgat

SEQ ID NO: 434512 - DNA, 30 bp, Artificial Sequence
  Synthetic oligonucleotide
acaaatctcttagcttgtgcaacgcctgat

SEQ ID NO: 434513 - DNA, 30 bp, Artificial Sequence
  Synthetic oligonucleotide
tcggggaatagtttccactcgactcctgat

SEQ ID NO: 434514 - DNA, 30 bp, Artificial Sequence
  Synthetic oligonucleotide
tgttctttgtaaatatgcctgtctcctgat

SEQ ID NO: 434515 - DNA, 30 bp, Artificial Sequence
  Synthetic oligonucleotide
gacggtgactattgacgagcgtaagctgat

SEQ ID NO: 434516 - DNA, 30 bp, Artificial Sequence
  Synthetic oligonucleotide
gtgtccagcctatgctcttgcagatctgat

SEQ ID NO: 434517 - DNA, 30 bp, Artificial Sequence
  Synthetic oligonucleotide
ttctagttgctcaaaatgggaatatctgat

SEQ ID NO: 434518 - DNA, 30 bp, Artificial Sequence
  Synthetic oligonucleotide
tgtctctagtacccccatacattatctgat

SEQ ID NO: 434519 - DNA, 30 bp, Artificial Sequence
  Synthetic oligonucleotide
tataaggttatggccgactaactctctgat

SEQ ID NO: 434520 - DNA, 30 bp, Artificial Sequence
  Synthetic oligonucleotide
agagctggtcctaggatccgagtctctgat

SEQ ID NO: 434521 - DNA, 30 bp, Artificial Sequence
  Synthetic oligonucleotide
gtgaaacacgctgccgcacttttctctgat

SEQ ID NO: 434522 - DNA, 30 bp, Artificial Sequence
  Synthetic oligonucleotide
tgtgtcgatttaatggtatagcagtctgat

SEQ ID NO: 434523 - DNA, 30 bp, Artificial Sequence
  Synthetic oligonucleotide
cttcaaggctttaagatagagacgtctgat

SEQ ID NO: 434524 - DNA, 30 bp, Artificial Sequence
  Synthetic oligonucleotide
gagttatgatgtggttgctcggggtctgat

SEQ ID NO: 434525 - DNA, 30 bp, Artificial Sequence
  Synthetic oligonucleotide
gtcttcaattacagagctctagattctgat

SEQ ID NO: 434526 - DNA, 30 bp, Artificial Sequence
  Synthetic oligonucleotide
cattccacgacaagtccctctcgaagtgat

SEQ ID NO: 434527 - DNA, 30 bp, Artificial Sequence
  Synthetic oligonucleotide
ggggcatttgatcgagtggttcgaagtgat

SEQ ID NO: 434528 - DNA, 30 bp, Artificial Sequence
  Synthetic oligonucleotide
tttcgtacacgtcttccgagaacgagtgat

SEQ ID NO: 434529 - DNA, 30 bp, Artificial Sequence
  Synthetic oligonucleotide
aaatatctcaacgacgacactttgagtgat

SEQ ID NO: 434530 - DNA, 30 bp, Artificial Sequence
  Synthetic oligonucleotide
ttcagtcgtgcaacttaaacggaacgtgat

SEQ ID NO: 434531 - DNA, 30 bp, Artificial Sequence
  Synthetic oligonucleotide
acagcccatcgtgttcaacatatacgtgat

SEQ ID NO: 434532 - DNA, 30 bp, Artificial Sequence
  Synthetic oligonucleotide
atcactcagatttgaaacagcaagcgtgat

SEQ ID NO: 434533 - DNA, 30 bp, Artificial Sequence
  Synthetic oligonucleotide
ctaagccaatatgagtatccatggcgtgat

SEQ ID NO: 434534 - DNA, 30 bp, Artificial Sequence
  Synthetic oligonucleotide
gtcgtaaccatcaggtctcctcgtcgtgat

SEQ ID NO: 434535 - DNA, 30 bp, Artificial Sequence
  Synthetic oligonucleotide
attaacctcaacttccaagttcaaggtgat

SEQ ID NO: 434536 - DNA, 30 bp, Artificial Sequence
  Synthetic oligonucleotide
tatgatggtgcgccgagacattagggtgat

SEQ ID NO: 434537 - DNA, 30 bp, Artificial Sequence
  Synthetic oligonucleotide
tgtaattttatcctactgtgaaaatgtgat

SEQ ID NO: 434538 - DNA, 29 bp, Artificial Sequence
  Synthetic oligonucleotide
gtgtgcttccgtagcgcggtaaatgtgat

SEQ ID NO: 434539 - DNA, 30 bp, Artificial Sequence
  Synthetic oligonucleotide
cattgcagattgtggtgcccgatctgtgat

SEQ ID NO: 434540 - DNA, 30 bp, Artificial Sequence
  Synthetic oligonucleotide
taccgtttatataatatgtttcggtgtgat

SEQ ID NO: 434541 - DNA, 30 bp, Artificial Sequence
  Synthetic oligonucleotide
ggttgggacttaagcaggagggtgtgtgat

SEQ ID NO: 434542 - DNA, 30 bp, Artificial Sequence
  Synthetic oligonucleotide
gaatgacgttactatgaagtgttgtgtgat

SEQ ID NO: 434543 - DNA, 30 bp, Artificial Sequence
  Synthetic oligonucleotide
ctcttttagctagggacggcgttttgtgat

SEQ ID NO: 434544 - DNA, 30 bp, Artificial Sequence
  Synthetic oligonucleotide
gcaataataccatagtaatattaaattgat

SEQ ID NO: 434545 - DNA, 30 bp, Artificial Sequence
  Synthetic oligonucleotide
attgttattcatctgggtcctcacattgat

SEQ ID NO: 434546 - DNA, 30 bp, Artificial Sequence
  Synthetic oligonucleotide
agaggtcacgacagcaatagcgccattgat

SEQ ID NO: 434547 - DNA, 30 bp, Artificial Sequence
  Synthetic oligonucleotide
gtcatctacagagaccccgttgccattgat

SEQ ID NO: 434548 - DNA, 30 bp, Artificial Sequence
  Synthetic oligonucleotide
ctggcctcctccacttacttccgcattgat

SEQ ID NO: 434549 - DNA, 30 bp, Artificial Sequence
  Synthetic oligonucleotide
gtatgtagtattaagtaatggcagattgat

SEQ ID NO: 434550 - DNA, 30 bp, Artificial Sequence
  Synthetic oligonucleotide
aatcgatcgggtggaaatccgcatattgat

SEQ ID NO: 434551 - DNA, 30 bp, Artificial Sequence
  Synthetic oligonucleotide
gccaggaccagcattacggttgttattgat

SEQ ID NO: 434552 - DNA, 30 bp, Artificial Sequence
  Synthetic oligonucleotide
gctatgtaacggacacctttgacccttgat

SEQ ID NO: 434553 - DNA, 30 bp, Artificial Sequence
  Synthetic oligonucleotide
ttattttcccgaaactagtggttccttgat

SEQ ID NO: 434554 - DNA, 30 bp, Artificial Sequence
  Synthetic oligonucleotide
gaatcatgttcagcttattcacagcttgat

SEQ ID NO: 434555 - DNA, 30 bp, Artificial Sequence
  Synthetic oligonucleotide
aggtggggcttctctatcggcaggcttgat

SEQ ID NO: 434556 - DNA, 31 bp, Artificial Sequence
  Synthetic oligonucleotide
cgttcgaagacaacctctgcactggcttgat

SEQ ID NO: 434557 - DNA, 30 bp, Artificial Sequence
  Synthetic oligonucleotide
gtctctttgaagtggcaaaagagtcttgat

SEQ ID NO: 434558 - DNA, 30 bp, Artificial Sequence
  Synthetic oligonucleotide
tgatttaatcctgaattgtggggtcttgat

SEQ ID NO: 434559 - DNA, 30 bp, Artificial Sequence
  Synthetic oligonucleotide
ggtgacacacccgcatcaagtcttcttgat

SEQ ID NO: 434560 - DNA, 30 bp, Artificial Sequence
  Synthetic oligonucleotide
tagactacactggtatggcagaaagttgat

SEQ ID NO: 434561 - DNA, 30 bp, Artificial Sequence
  Synthetic oligonucleotide
tgagcaatagcatactttacaggagttgat

SEQ ID NO: 434562 - DNA, 30 bp, Artificial Sequence
  Synthetic oligonucleotide
gtacttctcataaggataattgtagttgat

SEQ ID NO: 434563 - DNA, 30 bp, Artificial Sequence
  Synthetic oligonucleotide
tgagctataaaaattggtcaattagttgat

SEQ ID NO: 434564 - DNA, 30 bp, Artificial Sequence
  Synthetic oligonucleotide
gatgggggagttgacgacttcgtcgttgat

SEQ ID NO: 434565 - DNA, 30 bp, Artificial Sequence
  Synthetic oligonucleotide
gtgggactgaaacctcacgaccgtgttgat

SEQ ID NO: 434566 - DNA, 30 bp, Artificial Sequence
  Synthetic oligonucleotide
gagattcatgactggtcaactctatttgat

SEQ ID NO: 434567 - DNA, 30 bp, Artificial Sequence
  Synthetic oligonucleotide
gccatgtaccgtgacatggcccactttgat

SEQ ID NO: 434568 - DNA, 30 bp, Artificial Sequence
  Synthetic oligonucleotide
gtaacgcaccatgtccatggtcactttgat

SEQ ID NO: 434569 - DNA, 30 bp, Artificial Sequence
  Synthetic oligonucleotide
gcttaacatttaattcaacatacgtttgat

SEQ ID NO: 434570 - DNA, 30 bp, Artificial Sequence
  Synthetic oligonucleotide
gcaatcggataccttgaaagtgattttgat

SEQ ID NO: 434571 - DNA, 30 bp, Artificial Sequence
  Synthetic oligonucleotide
ttccatcagactgttcataatgtttttgat

SEQ ID NO: 434572 - DNA, 30 bp, Artificial Sequence
  Synthetic oligonucleotide
accattatatatctcaagttgtaaaaatat

SEQ ID NO: 434573 - DNA, 30 bp, Artificial Sequence
  Synthetic oligonucleotide
cgaccgttcctgcgactacagccaaaatat

SEQ ID NO: 434574 - DNA, 30 bp, Artificial Sequence
  Synthetic oligonucleotide
actctcgggcgccggtatgtcgtaaaatat

SEQ ID NO: 434575 - DNA, 30 bp, Artificial Sequence
  Synthetic oligonucleotide
agctggtagtacactaccgcgcgcaaatat

SEQ ID NO: 434576 - DNA, 30 bp, Artificial Sequence
  Synthetic oligonucleotide
gcaattgattgctattccgccttcaaatat

SEQ ID NO: 434577 - DNA, 30 bp, Artificial Sequence
  Synthetic oligonucleotide
aacaatcggggactcacgtacgagaaatat

SEQ ID NO: 434578 - DNA, 30 bp, Artificial Sequence
  Synthetic oligonucleotide
gcgacggctttcaagtctcaggagaaatat

SEQ ID NO: 434579 - DNA, 30 bp, Artificial Sequence
  Synthetic oligonucleotide
tcgtagccgctaacattggtgtggaaatat

SEQ ID NO: 434580 - DNA, 30 bp, Artificial Sequence
  Synthetic oligonucleotide
gcatataacagttcctcaaactctaaatat

SEQ ID NO: 434581 - DNA, 30 bp, Artificial Sequence
  Synthetic oligonucleotide
caagaacttacagtttgaaggattaaatat

SEQ ID NO: 434582 - DNA, 30 bp, Artificial Sequence
  Synthetic oligonucleotide
tgtcaacctacgtctaagaggcttaaatat

SEQ ID NO: 434583 - DNA, 30 bp, Artificial Sequence
  Synthetic oligonucleotide
ctcgtgctcaagacgcctgccacacaatat

SEQ ID NO: 434584 - DNA, 30 bp, Artificial Sequence
  Synthetic oligonucleotide
gggaaccagtgcgttttcgggcgacaatat

SEQ ID NO: 434585 - DNA, 30 bp, Artificial Sequence
  Synthetic oligonucleotide
cgagctgccgatgcctcttacggccaatat

SEQ ID NO: 434586 - DNA, 30 bp, Artificial Sequence
  Synthetic oligonucleotide
ctttcggagcgatacctcataatgcaatat

SEQ ID NO: 434587 - DNA, 30 bp, Artificial Sequence
  Synthetic oligonucleotide
cactacgggtcgaatgcagtagtgcaatat

SEQ ID NO: 434588 - DNA, 30 bp, Artificial Sequence
  Synthetic oligonucleotide
aattggagtgaaccgatagttaatcaatat

SEQ ID NO: 434589 - DNA, 30 bp, Artificial Sequence
  Synthetic oligonucleotide
atgtatagggatagtactggttttcaatat

SEQ ID NO: 434590 - DNA, 30 bp, Artificial Sequence
  Synthetic oligonucleotide
tgtccatccataagcagtaagggagaatat

SEQ ID NO: 434591 - DNA, 30 bp, Artificial Sequence
  Synthetic oligonucleotide
caagagccctatatcccggataacgaatat

SEQ ID NO: 434592 - DNA, 30 bp, Artificial Sequence
  Synthetic oligonucleotide
ttgccgctagccggtttcacgtccgaatat

SEQ ID NO: 434593 - DNA, 30 bp, Artificial Sequence
  Synthetic oligonucleotide
cattaacttgcgttgatacacagcgaatat

SEQ ID NO: 434594 - DNA, 30 bp, Artificial Sequence
  Synthetic oligonucleotide
aatctgctcacccggataaaaatcgaatat

SEQ ID NO: 434595 - DNA, 30 bp, Artificial Sequence
  Synthetic oligonucleotide
tggtcgcgttctccctcagggtaggaatat

SEQ ID NO: 434596 - DNA, 30 bp, Artificial Sequence
  Synthetic oligonucleotide
gtaaaagtctcgggcggggggtaggaatat

SEQ ID NO: 434597 - DNA, 30 bp, Artificial Sequence
  Synthetic oligonucleotide
gctacgattgactctattttaacggaatat

SEQ ID NO: 434598 - DNA, 30 bp, Artificial Sequence
  Synthetic oligonucleotide
aggaccttgactcagttgcacgtggaatat

SEQ ID NO: 434599 - DNA, 30 bp, Artificial Sequence
  Synthetic oligonucleotide
aagttctgacggaagaattcgttggaatat

SEQ ID NO: 434600 - DNA, 30 bp, Artificial Sequence
  Synthetic oligonucleotide
tataaatgacgcccggttcatagataatat

SEQ ID NO: 434601 - DNA, 30 bp, Artificial Sequence
  Synthetic oligonucleotide
taatagagttttcgacagttttactaatat

SEQ ID NO: 434602 - DNA, 30 bp, Artificial Sequence
  Synthetic oligonucleotide
gacccaatgccgtcggtaatgacctaatat

SEQ ID NO: 434603 - DNA, 30 bp, Artificial Sequence
  Synthetic oligonucleotide
cacctgcaaatgaaagggcgttgctaatat

SEQ ID NO: 434604 - DNA, 30 bp, Artificial Sequence
  Synthetic oligonucleotide
ctctgacgttcacgatagtatgtctaatat

SEQ ID NO: 434605 - DNA, 30 bp, Artificial Sequence
  Synthetic oligonucleotide
cctatgtcatttgagagacgcgagtaatat

SEQ ID NO: 434606 - DNA, 30 bp, Artificial Sequence
  Synthetic oligonucleotide
gctaggctatcttcatctgacgcttaatat

SEQ ID NO: 434607 - DNA, 30 bp, Artificial Sequence
  Synthetic oligonucleotide
gaggcccggccggactaccggcgttaatat

SEQ ID NO: 434608 - DNA, 30 bp, Artificial Sequence
  Synthetic oligonucleotide
tctgctatgctatcgagtcctttcacatat

SEQ ID NO: 434609 - DNA, 30 bp, Artificial Sequence
  Synthetic oligonucleotide
ttgtctcatgaagggcaatataggacatat

SEQ ID NO: 434610 - DNA, 30 bp, Artificial Sequence
  Synthetic oligonucleotide
gtttggatatatactagctgctgtacatat

SEQ ID NO: 434611 - DNA, 30 bp, Artificial Sequence
  Synthetic oligonucleotide
gacatcttcggtaaataatgcgcaccatat

SEQ ID NO: 434612 - DNA, 30 bp, Artificial Sequence
  Synthetic oligonucleotide
gaactgctactatgtgatgagaagccatat

SEQ ID NO: 434613 - DNA, 30 bp, Artificial Sequence
  Synthetic oligonucleotide
tggcgattattcgtgccgctctggccatat

SEQ ID NO: 434614 - DNA, 30 bp, Artificial Sequence
  Synthetic oligonucleotide
atctacgaatgaatgtaggcataagcatat

SEQ ID NO: 434615 - DNA, 40 bp, Artificial Sequence
  Synthetic oligonucleotide
ttttaaacttgccgattctggagctgatggttaagcatat

SEQ ID NO: 434616 - DNA, 30 bp, Artificial Sequence
  Synthetic oligonucleotide
aatcgactaaacgtcaaacttaccgcatat

SEQ ID NO: 434617 - DNA, 30 bp, Artificial Sequence
  Synthetic oligonucleotide
agggcctttatctctctcgtttccgcatat

SEQ ID NO: 434618 - DNA, 30 bp, Artificial Sequence
  Synthetic oligonucleotide
ccaagaaaggcgccggctcccccggcatat

SEQ ID NO: 434619 - DNA, 30 bp, Artificial Sequence
  Synthetic oligonucleotide
ctaacccaagctcatctgatcagggcatat

SEQ ID NO: 434620 - DNA, 30 bp, Artificial Sequence
  Synthetic oligonucleotide
acttagatagtaggcatttacatggcatat

SEQ ID NO: 434621 - DNA, 30 bp, Artificial Sequence
  Synthetic oligonucleotide
aagtgggttcgaatctactttgatgcatat

SEQ ID NO: 434622 - DNA, 30 bp, Artificial Sequence
  Synthetic oligonucleotide
aaataatctaggctgtaaggccttgcatat

SEQ ID NO: 434623 - DNA, 30 bp, Artificial Sequence
  Synthetic oligonucleotide
agttgccacgagtgcggttaaaaatcatat

SEQ ID NO: 434624 - DNA, 30 bp, Artificial Sequence
  Synthetic oligonucleotide
gaccatcaatgtgcgcctaaaggatcatat

SEQ ID NO: 434625 - DNA, 30 bp, Artificial Sequence
  Synthetic oligonucleotide
gattaactcttggaacactcagactcatat

SEQ ID NO: 434626 - DNA, 30 bp, Artificial Sequence
  Synthetic oligonucleotide
ctcatctatgcgtaacggaagtactcatat

SEQ ID NO: 434627 - DNA, 30 bp, Artificial Sequence
  Synthetic oligonucleotide
cgtacgcttgggttattttgtggctcatat

SEQ ID NO: 434628 - DNA, 30 bp, Artificial Sequence
  Synthetic oligonucleotide
gggtaacgcctaatgggtttactctcatat

SEQ ID NO: 434629 - DNA, 30 bp, Artificial Sequence
  Synthetic oligonucleotide
ctatgcgaaatcttttggctagagtcatat

SEQ ID NO: 434630 - DNA, 30 bp, Artificial Sequence
  Synthetic oligonucleotide
acgcgaaattttggatcttccgtgtcatat

SEQ ID NO: 434631 - DNA, 30 bp, Artificial Sequence
  Synthetic oligonucleotide
gcgctttacgtccttcgtataaattcatat

SEQ ID NO: 434632 - DNA, 30 bp, Artificial Sequence
  Synthetic oligonucleotide
agcaccgctagcgaatgtgctcgttcatat

SEQ ID NO: 434633 - DNA, 30 bp, Artificial Sequence
  Synthetic oligonucleotide
aaagtaatagccctgcatttgtgttcatat

SEQ ID NO: 434634 - DNA, 30 bp, Artificial Sequence
  Synthetic oligonucleotide
cgcaagaaagggccttctgcactttcatat

SEQ ID NO: 434635 - DNA, 30 bp, Artificial Sequence
  Synthetic oligonucleotide
gtcgtagtaccgtttggtcacgtttcatat

SEQ ID NO: 434636 - DNA, 30 bp, Artificial Sequence
  Synthetic oligonucleotide
gcgaaagtcaagtgttattgagtaagatat

SEQ ID NO: 434637 - DNA, 29 bp, Artificial Sequence
  Synthetic oligonucleotide
gtagaagatgacgcaaaccttacagatat

SEQ ID NO: 434638 - DNA, 30 bp, Artificial Sequence
  Synthetic oligonucleotide
tgacagtttttacaaaaatcaggcagatat

SEQ ID NO: 434639 - DNA, 30 bp, Artificial Sequence
  Synthetic oligonucleotide
agatctagctcttctattgggggcagatat

SEQ ID NO: 434640 - DNA, 30 bp, Artificial Sequence
  Synthetic oligonucleotide
gcacaaaaaaggctgttcttttgcagatat

SEQ ID NO: 434641 - DNA, 30 bp, Artificial Sequence
  Synthetic oligonucleotide
gcaccttttagcattctccacaggagatat

SEQ ID NO: 434642 - DNA, 30 bp, Artificial Sequence
  Synthetic oligonucleotide
ttggtatgataatgtgggttcaggagatat

SEQ ID NO: 434643 - DNA, 30 bp, Artificial Sequence
  Synthetic oligonucleotide
gccactcgattaagtcataagcggagatat

SEQ ID NO: 434644 - DNA, 30 bp, Artificial Sequence
  Synthetic oligonucleotide
tgtaaataaatgattctagggtatagatat

SEQ ID NO: 434645 - DNA, 30 bp, Artificial Sequence
  Synthetic oligonucleotide
gcaataacttagcacaagctcactagatat

SEQ ID NO: 434646 - DNA, 30 bp, Artificial Sequence
  Synthetic oligonucleotide
aaagctaagctacatttcgtatctagatat

SEQ ID NO: 434647 - DNA, 30 bp, Artificial Sequence
  Synthetic oligonucleotide
gctggtagttttcctttcaattaacgatat

SEQ ID NO: 434648 - DNA, 30 bp, Artificial Sequence
  Synthetic oligonucleotide
attatacctgctagcgtagtgtcacgatat

SEQ ID NO: 434649 - DNA, 30 bp, Artificial Sequence
  Synthetic oligonucleotide
gctccattcgtgtatcactaaagacgatat

SEQ ID NO: 434650 - DNA, 30 bp, Artificial Sequence
  Synthetic oligonucleotide
gagacatagctaagttgggctacccgatat

SEQ ID NO: 434651 - DNA, 30 bp, Artificial Sequence
  Synthetic oligonucleotide
gcacggactcgatgtcttaagacgcgatat

SEQ ID NO: 434652 - DNA, 30 bp, Artificial Sequence
  Synthetic oligonucleotide
ctcgcacctttcccgtctgggctgcgatat

SEQ ID NO: 434653 - DNA, 30 bp, Artificial Sequence
  Synthetic oligonucleotide
tttcatttacgggaggcccgttatcgatat

SEQ ID NO: 434654 - DNA, 30 bp, Artificial Sequence
  Synthetic oligonucleotide
gttgctgcacgccaagttagacgtcgatat

SEQ ID NO: 434655 - DNA, 30 bp, Artificial Sequence
  Synthetic oligonucleotide
ttccaccacagcctagatgatattcgatat

SEQ ID NO: 434656 - DNA, 30 bp, Artificial Sequence
  Synthetic oligonucleotide
gtacgaaccgcaattaatttattcggatat

SEQ ID NO: 434657 - DNA, 30 bp, Artificial Sequence
  Synthetic oligonucleotide
taggtccactcgccaggggaggagggatat

SEQ ID NO: 434658 - DNA, 30 bp, Artificial Sequence
  Synthetic oligonucleotide
tataggctttataagactcccaggggatat

SEQ ID NO: 434659 - DNA, 30 bp, Artificial Sequence
  Synthetic oligonucleotide
tgtgcctcattagcggcggatcggggatat

SEQ ID NO: 434660 - DNA, 30 bp, Artificial Sequence
  Synthetic oligonucleotide
gagttaaaattcatgagagggggtggatat

SEQ ID NO: 434661 - DNA, 30 bp, Artificial Sequence
  Synthetic oligonucleotide
gagatctatgccaagggagtgtttggatat

SEQ ID NO: 434662 - DNA, 30 bp, Artificial Sequence
  Synthetic oligonucleotide
aaagacctgtaattggtcatccaatgatat

SEQ ID NO: 434663 - DNA, 30 bp, Artificial Sequence
  Synthetic oligonucleotide
agttggcgcaggcatacaatcgaatgatat

SEQ ID NO: 434664 - DNA, 30 bp, Artificial Sequence
  Synthetic oligonucleotide
atgtatgtactttggtggttaacatgatat

SEQ ID NO: 434665 - DNA, 30 bp, Artificial Sequence
  Synthetic oligonucleotide
ggaccactctctagttgactcgcctgatat

SEQ ID NO: 434666 - DNA, 30 bp, Artificial Sequence
  Synthetic oligonucleotide
tggatttctatctagtggaaggtctgatat

SEQ ID NO: 434667 - DNA, 30 bp, Artificial Sequence
  Synthetic oligonucleotide
cccaaagctttattgggaatttcgtgatat

SEQ ID NO: 434668 - DNA, 30 bp, Artificial Sequence
  Synthetic oligonucleotide
atatcgtcggttcaagttgagtggtgatat

SEQ ID NO: 434669 - DNA, 30 bp, Artificial Sequence
  Synthetic oligonucleotide
gctgttctattacatagttactcttgatat

SEQ ID NO: 434670 - DNA, 30 bp, Artificial Sequence
  Synthetic oligonucleotide
acgctggaagtcctgcttgtacaaatatat

SEQ ID NO: 434671 - DNA, 30 bp, Artificial Sequence
  Synthetic oligonucleotide
attataaattcgggatggggtggaatatat

SEQ ID NO: 434672 - DNA, 30 bp, Artificial Sequence
  Synthetic oligonucleotide
gtatgatcgactgtgctcgatagcatatat

SEQ ID NO: 434673 - DNA, 30 bp, Artificial Sequence
  Synthetic oligonucleotide
cttatctcaagaaaggctgatggcatatat

SEQ ID NO: 434674 - DNA, 30 bp, Artificial Sequence
  Synthetic oligonucleotide
ggctcatttgctcggaccacattcatatat

SEQ ID NO: 434675 - DNA, 30 bp, Artificial Sequence
  Synthetic oligonucleotide
gaaaagatctacgaagccgtagatatatat

SEQ ID NO: 434676 - DNA, 30 bp, Artificial Sequence
  Synthetic oligonucleotide
cgctggttttggatcaaagcaagtatatat

SEQ ID NO: 434677 - DNA, 30 bp, Artificial Sequence
  Synthetic oligonucleotide
ctcctaggcttcccagcagggcaactatat

SEQ ID NO: 434678 - DNA, 30 bp, Artificial Sequence
  Synthetic oligonucleotide
cttgggaaactcggcgtaaacatactatat

SEQ ID NO: 434679 - DNA, 30 bp, Artificial Sequence
  Synthetic oligonucleotide
acctagctgcaacgcctttcctgcctatat

SEQ ID NO: 434680 - DNA, 30 bp, Artificial Sequence
  Synthetic oligonucleotide
gtcagcctttgtgggtcgaatatcctatat

SEQ ID NO: 434681 - DNA, 30 bp, Artificial Sequence
  Synthetic oligonucleotide
gcccgagcttaacattatagagagctatat

SEQ ID NO: 434682 - DNA, 30 bp, Artificial Sequence
  Synthetic oligonucleotide
accagagtattccgtcacgcaccgctatat

SEQ ID NO: 434683 - DNA, 30 bp, Artificial Sequence
  Synthetic oligonucleotide
ccgttaacgatcggttccgtagcgctatat

SEQ ID NO: 434684 - DNA, 30 bp, Artificial Sequence
  Synthetic oligonucleotide
cttctaaaattccagagggtttatctatat

SEQ ID NO: 434685 - DNA, 30 bp, Artificial Sequence
  Synthetic oligonucleotide
actccttacctcctattggtgcctctatat

SEQ ID NO: 434686 - DNA, 30 bp, Artificial Sequence
  Synthetic oligonucleotide
gttcgaagcctgcgtaacgtcagtctatat

SEQ ID NO: 434687 - DNA, 30 bp, Artificial Sequence
  Synthetic oligonucleotide
tggctcttaacatcggggggaagagtatat

SEQ ID NO: 434688 - DNA, 30 bp, Artificial Sequence
  Synthetic oligonucleotide
aagcttagactaccgatacttgccgtatat

SEQ ID NO: 434689 - DNA, 30 bp, Artificial Sequence
  Synthetic oligonucleotide
gatatacacatgggctacgcactcgtatat

SEQ ID NO: 434690 - DNA, 30 bp, Artificial Sequence
  Synthetic oligonucleotide
tgagtatcaataagtcatcggtgggtatat

SEQ ID NO: 434691 - DNA, 30 bp, Artificial Sequence
  Synthetic oligonucleotide
attttcaaaactagatttacaatggtatat

SEQ ID NO: 434692 - DNA, 30 bp, Artificial Sequence
  Synthetic oligonucleotide
taaattattccgtagcgggagtctgtatat

SEQ ID NO: 434693 - DNA, 30 bp, Artificial Sequence
  Synthetic oligonucleotide
acagctattctacatactaccgttgtatat

SEQ ID NO: 434694 - DNA, 30 bp, Artificial Sequence
  Synthetic oligonucleotide
cttgtatggaaattcactagggttgtatat

SEQ ID NO: 434695 - DNA, 30 bp, Artificial Sequence
  Synthetic oligonucleotide
tcgggttaataggcggttgcctaattatat

SEQ ID NO: 434696 - DNA, 30 bp, Artificial Sequence
  Synthetic oligonucleotide
agccccgcgacggcatcgggtcccttatat

SEQ ID NO: 434697 - DNA, 30 bp, Artificial Sequence
  Synthetic oligonucleotide
tgccatgttggtactgggtgtgccttatat

SEQ ID NO: 434698 - DNA, 30 bp, Artificial Sequence
  Synthetic oligonucleotide
ataacagtcataacgcctgggtgcttatat

SEQ ID NO: 434699 - DNA, 30 bp, Artificial Sequence
  Synthetic oligonucleotide
tctttaaatagcgctgatagactcttatat

SEQ ID NO: 434700 - DNA, 30 bp, Artificial Sequence
  Synthetic oligonucleotide
ctaacttgttatggattgagcacgttatat

SEQ ID NO: 434701 - DNA, 30 bp, Artificial Sequence
  Synthetic oligonucleotide
tcagaatcaattactcggaacgggttatat

SEQ ID NO: 434702 - DNA, 30 bp, Artificial Sequence
  Synthetic oligonucleotide
gggggagcctgcttaagtctatggttatat

SEQ ID NO: 434703 - DNA, 30 bp, Artificial Sequence
  Synthetic oligonucleotide
tactatagccgtatattcggacctttatat

SEQ ID NO: 434704 - DNA, 30 bp, Artificial Sequence
  Synthetic oligonucleotide
agcgcccaggggctcgccaaagttttatat

SEQ ID NO: 434705 - DNA, 30 bp, Artificial Sequence
  Synthetic oligonucleotide
taggattttgaaccctctgcacaaaactat

SEQ ID NO: 434706 - DNA, 30 bp, Artificial Sequence
  Synthetic oligonucleotide
gcaatatagcgtgctgtgtaaataaactat

SEQ ID NO: 434707 - DNA, 30 bp, Artificial Sequence
  Synthetic oligonucleotide
tgtgcgtattgattgttttgaagcaactat

SEQ ID NO: 434708 - DNA, 30 bp, Artificial Sequence
  Synthetic oligonucleotide
tttggcaacaagaaagttatcgtcaactat

SEQ ID NO: 434709 - DNA, 30 bp, Artificial Sequence
  Synthetic oligonucleotide
atatgacgttccacgtaatcgcggaactat

SEQ ID NO: 434710 - DNA, 30 bp, Artificial Sequence
  Synthetic oligonucleotide
atcggacgctgaaatggaccctggaactat

SEQ ID NO: 434711 - DNA, 30 bp, Artificial Sequence
  Synthetic oligonucleotide
atgtgcttcgataagcctcgcgtgaactat

SEQ ID NO: 434712 - DNA, 30 bp, Artificial Sequence
  Synthetic oligonucleotide
aggactgccggaccaaatcctgataactat

SEQ ID NO: 434713 - DNA, 30 bp, Artificial Sequence
  Synthetic oligonucleotide
cagcacgctttggcacaaatatataactat

SEQ ID NO: 434714 - DNA, 30 bp, Artificial Sequence
  Synthetic oligonucleotide
aaattgctggatggtaagcggcctaactat

SEQ ID NO: 434715 - DNA, 30 bp, Artificial Sequence
  Synthetic oligonucleotide
tcggttaactcagcgacaattcaacactat

SEQ ID NO: 434716 - DNA, 30 bp, Artificial Sequence
  Synthetic oligonucleotide
cgaacgttggtgagcagctaagaacactat

SEQ ID NO: 434717 - DNA, 30 bp, Artificial Sequence
  Synthetic oligonucleotide
aatttattatctattcgccattgccactat

SEQ ID NO: 434718 - DNA, 30 bp, Artificial Sequence
  Synthetic oligonucleotide
accctctttacctgtgcaggctggcactat

SEQ ID NO: 434719 - DNA, 30 bp, Artificial Sequence
  Synthetic oligonucleotide
gggtgggggtgcggaaacactcctcactat

SEQ ID NO: 434720 - DNA, 30 bp, Artificial Sequence
  Synthetic oligonucleotide
gtcctggtcgggtttgatgtttgtcactat

SEQ ID NO: 434721 - DNA, 30 bp, Artificial Sequence
  Synthetic oligonucleotide
actgtatcgttcacttcgcgaacagactat

SEQ ID NO: 434722 - DNA, 30 bp, Artificial Sequence
  Synthetic oligonucleotide
ttaaaaggggaagaatgaccggcagactat

SEQ ID NO: 434723 - DNA, 30 bp, Artificial Sequence
  Synthetic oligonucleotide
catttgcaagtgctcgcttggggagactat

SEQ ID NO: 434724 - DNA, 30 bp, Artificial Sequence
  Synthetic oligonucleotide
ccatgagttcgcagcgtgaaatccgactat

SEQ ID NO: 434725 - DNA, 30 bp, Artificial Sequence
  Synthetic oligonucleotide
tcagtggtaatggtataaggtatggactat

SEQ ID NO: 434726 - DNA, 30 bp, Artificial Sequence
  Synthetic oligonucleotide
ggtatcaggttgttgttgatatatgactat

SEQ ID NO: 434727 - DNA, 30 bp, Artificial Sequence
  Synthetic oligonucleotide
gcaatgagttgcgtatacgccgtatactat

SEQ ID NO: 434728 - DNA, 30 bp, Artificial Sequence
  Synthetic oligonucleotide
gcataaagtaaggacgcgtgggactactat

SEQ ID NO: 434729 - DNA, 30 bp, Artificial Sequence
  Synthetic oligonucleotide
cttcgttgcaaatccggttactgctactat

SEQ ID NO: 434730 - DNA, 30 bp, Artificial Sequence
  Synthetic oligonucleotide
agggacgcaactagttctcacaagtactat

SEQ ID NO: 434731 - DNA, 30 bp, Artificial Sequence
  Synthetic oligonucleotide
tccagtaagcaggtgataacgtcttactat

SEQ ID NO: 434732 - DNA, 30 bp, Artificial Sequence
  Synthetic oligonucleotide
gctaggcagcatgaacggtagtaaacctat

SEQ ID NO: 434733 - DNA, 30 bp, Artificial Sequence
  Synthetic oligonucleotide
tagcaccttcgcgggtccctcagaacctat

SEQ ID NO: 434734 - DNA, 30 bp, Artificial Sequence
  Synthetic oligonucleotide
tgtaatcgaacaaaaggtaccggaacctat

SEQ ID NO: 434735 - DNA, 30 bp, Artificial Sequence
  Synthetic oligonucleotide
gaaagtaacgttattggagcgcgcacctat

SEQ ID NO: 434736 - DNA, 30 bp, Artificial Sequence
  Synthetic oligonucleotide
ggttagcatgtatattcgatgacgacctat

SEQ ID NO: 434737 - DNA, 30 bp, Artificial Sequence
  Synthetic oligonucleotide
ctttctgcgtaactgattattgggacctat

SEQ ID NO: 434738 - DNA, 30 bp, Artificial Sequence
  Synthetic oligonucleotide
ttttcgtcgtatttctaacataatacctat

SEQ ID NO: 434739 - DNA, 30 bp, Artificial Sequence
  Synthetic oligonucleotide
tcataatatagacggtagttatctacctat

SEQ ID NO: 434740 - DNA, 30 bp, Artificial Sequence
  Synthetic oligonucleotide
cagcgccgaggccccttccggcgcccctat

SEQ ID NO: 434741 - DNA, 30 bp, Artificial Sequence
  Synthetic oligonucleotide
agtgaggcagctacgggagggaaagcctat

SEQ ID NO: 434742 - DNA, 30 bp, Artificial Sequence
  Synthetic oligonucleotide
attacactaatagagtagtctaaagcctat

SEQ ID NO: 434743 - DNA, 30 bp, Artificial Sequence
  Synthetic oligonucleotide
gatagtgcgtgatcaaaattaccagcctat

SEQ ID NO: 434744 - DNA, 30 bp, Artificial Sequence
  Synthetic oligonucleotide
acttcgttagttaaacggcgtctagcctat

SEQ ID NO: 434745 - DNA, 30 bp, Artificial Sequence
  Synthetic oligonucleotide
aactgaacggcgcttaaacggcacgcctat

SEQ ID NO: 434746 - DNA, 30 bp, Artificial Sequence
  Synthetic oligonucleotide
cagttgaaccgcccgtagaccttggcctat

SEQ ID NO: 434747 - DNA, 30 bp, Artificial Sequence
  Synthetic oligonucleotide
aattgccttaagttcgctaagggtgcctat

SEQ ID NO: 434748 - DNA, 30 bp, Artificial Sequence
  Synthetic oligonucleotide
ccgggctctccgcgccagcgagactcctat

SEQ ID NO: 434749 - DNA, 30 bp, Artificial Sequence
  Synthetic oligonucleotide
cttgggagctagactgtaaggacctcctat

SEQ ID NO: 434750 - DNA, 30 bp, Artificial Sequence
  Synthetic oligonucleotide
ttataaacctaggtttccccaccctcctat

SEQ ID NO: 434751 - DNA, 31 bp, Artificial Sequence
  Synthetic oligonucleotide
taatcgcagtcccagggaccctctctcctat

SEQ ID NO: 434752 - DNA, 30 bp, Artificial Sequence
  Synthetic oligonucleotide
atggacctcctgtatatggagaagtcctat

SEQ ID NO: 434753 - DNA, 30 bp, Artificial Sequence
  Synthetic oligonucleotide
gatctaggttcaggaaggcagacgtcctat

SEQ ID NO: 434754 - DNA, 30 bp, Artificial Sequence
  Synthetic oligonucleotide
aagagggtctatgttctgggtgcttcctat

SEQ ID NO: 434755 - DNA, 30 bp, Artificial Sequence
  Synthetic oligonucleotide
ttgttgtgttctctttttatgttttcctat

SEQ ID NO: 434756 - DNA, 30 bp, Artificial Sequence
  Synthetic oligonucleotide
ttgttgtgttctcttttcgtgttttcctat

SEQ ID NO: 434757 - DNA, 30 bp, Artificial Sequence
  Synthetic oligonucleotide
ttgttgcgttctctttttgtgttttcctat

SEQ ID NO: 434758 - DNA, 30 bp, Artificial Sequence
  Synthetic oligonucleotide
gcaattccagcattcgcgtgtttttcctat

SEQ ID NO: 434759 - DNA, 30 bp, Artificial Sequence
  Synthetic oligonucleotide
gggcaaagctggtgtgacacggcaagctat

SEQ ID NO: 434760 - DNA, 30 bp, Artificial Sequence
  Synthetic oligonucleotide
ggaaacttaatatagtgcgtccacagctat

SEQ ID NO: 434761 - DNA, 30 bp, Artificial Sequence
  Synthetic oligonucleotide
ccaatgcaggatacattagtatgcagctat

SEQ ID NO: 434762 - DNA, 30 bp, Artificial Sequence
  Synthetic oligonucleotide
gccactggctgggtagctctgtggagctat

SEQ ID NO: 434763 - DNA, 31 bp, Artificial Sequence
  Synthetic oligonucleotide
ttaatcgcccttaagagggttaatgagctat

SEQ ID NO: 434764 - DNA, 30 bp, Artificial Sequence
  Synthetic oligonucleotide
tgtaatagtatgtactaatacgtgagctat

SEQ ID NO: 434765 - DNA, 30 bp, Artificial Sequence
  Synthetic oligonucleotide
ataataaagatagctctgttgattagctat

SEQ ID NO: 434766 - DNA, 30 bp, Artificial Sequence
  Synthetic oligonucleotide
ggatacgacagcgccgctcgtgaacgctat

SEQ ID NO: 434767 - DNA, 30 bp, Artificial Sequence
  Synthetic oligonucleotide
ttatcttagatggtattcctgtaacgctat

SEQ ID NO: 434768 - DNA, 30 bp, Artificial Sequence
  Synthetic oligonucleotide
gcgtttacgcggatcctacgaatccgctat

SEQ ID NO: 434769 - DNA, 30 bp, Artificial Sequence
  Synthetic oligonucleotide
cgcagttagacttcggatagaacaggctat

SEQ ID NO: 434770 - DNA, 30 bp, Artificial Sequence
  Synthetic oligonucleotide
ggatatataataggagcatgcacaggctat

SEQ ID NO: 434771 - DNA, 30 bp, Artificial Sequence
  Synthetic oligonucleotide
gaagattgctccgatgttggggtaggctat

SEQ ID NO: 434772 - DNA, 30 bp, Artificial Sequence
  Synthetic oligonucleotide
actgttctgaggcaaatagtattcggctat

SEQ ID NO: 434773 - DNA, 30 bp, Artificial Sequence
  Synthetic oligonucleotide
gcggaggaaggtgcgatggcatctggctat

SEQ ID NO: 434774 - DNA, 30 bp, Artificial Sequence
  Synthetic oligonucleotide
aataatgattgtctgcttctttgtggctat

SEQ ID NO: 434775 - DNA, 30 bp, Artificial Sequence
  Synthetic oligonucleotide
cagcgcgtatgcagaaagcaagactgctat

SEQ ID NO: 434776 - DNA, 30 bp, Artificial Sequence
  Synthetic oligonucleotide
ggcgacagagaacggagtcttctctgctat

SEQ ID NO: 434777 - DNA, 30 bp, Artificial Sequence
  Synthetic oligonucleotide
ttgtttgccagcaaaaatattcagtgctat

SEQ ID NO: 434778 - DNA, 30 bp, Artificial Sequence
  Synthetic oligonucleotide
tagaaaagtgctattgtgtccccaatctat

SEQ ID NO: 434779 - DNA, 30 bp, Artificial Sequence
  Synthetic oligonucleotide
tgggataaatggcgcctcgtatcaatctat

SEQ ID NO: 434780 - DNA, 30 bp, Artificial Sequence
  Synthetic oligonucleotide
gataccttaggctgcaccgaaagaatctat

SEQ ID NO: 434781 - DNA, 30 bp, Artificial Sequence
  Synthetic oligonucleotide
taggaggagattgggtaggagtccatctat

SEQ ID NO: 434782 - DNA, 30 bp, Artificial Sequence
  Synthetic oligonucleotide
actcctaggacactgtagtgcgtcatctat

SEQ ID NO: 434783 - DNA, 30 bp, Artificial Sequence
  Synthetic oligonucleotide
aacaatatcctaagacgccgtccgatctat

SEQ ID NO: 434784 - DNA, 30 bp, Artificial Sequence
  Synthetic oligonucleotide
ggactaatccggatcaatttccggatctat

SEQ ID NO: 434785 - DNA, 30 bp, Artificial Sequence
  Synthetic oligonucleotide
agtagaatgaccttaggcggtaatatctat

SEQ ID NO: 434786 - DNA, 30 bp, Artificial Sequence
  Synthetic oligonucleotide
gtcctcaatagtagatttttctcactctat

SEQ ID NO: 434787 - DNA, 30 bp, Artificial Sequence
  Synthetic oligonucleotide
cggtgtattcagctgtaggagtcactctat

SEQ ID NO: 434788 - DNA, 30 bp, Artificial Sequence
  Synthetic oligonucleotide
gcaactggcgtcggtcgaactagactctat

SEQ ID NO: 434789 - DNA, 30 bp, Artificial Sequence
  Synthetic oligonucleotide
gtatcgcaatgccctttacagatcctctat

SEQ ID NO: 434790 - DNA, 30 bp, Artificial Sequence
  Synthetic oligonucleotide
catattgtgcagtgatgctgcgagctctat

SEQ ID NO: 434791 - DNA, 30 bp, Artificial Sequence
  Synthetic oligonucleotide
cctagagttggaacagctttgccgctctat

SEQ ID NO: 434792 - DNA, 30 bp, Artificial Sequence
  Synthetic oligonucleotide
catttgttccccaacggataaaaagtctat

SEQ ID NO: 434793 - DNA, 30 bp, Artificial Sequence
  Synthetic oligonucleotide
agttcaattaataggcgtcgtacagtctat

SEQ ID NO: 434794 - DNA, 30 bp, Artificial Sequence
  Synthetic oligonucleotide
tgatccgacggcacattctcggtagtctat

SEQ ID NO: 434795 - DNA, 30 bp, Artificial Sequence
  Synthetic oligonucleotide
tggttcgacggcggccggcagttagtctat

SEQ ID NO: 434796 - DNA, 30 bp, Artificial Sequence
  Synthetic oligonucleotide
attcactttagtggcttaagcaacgtctat

SEQ ID NO: 434797 - DNA, 30 bp, Artificial Sequence
  Synthetic oligonucleotide
accttacggcgacgagcctgactcgtctat

SEQ ID NO: 434798 - DNA, 30 bp, Artificial Sequence
  Synthetic oligonucleotide
atccgaatgcggtaatgcgagagggtctat

SEQ ID NO: 434799 - DNA, 30 bp, Artificial Sequence
  Synthetic oligonucleotide
gtactctcattcctaaacaagcgggtctat

SEQ ID NO: 434800 - DNA, 30 bp, Artificial Sequence
  Synthetic oligonucleotide
acagtgagtagcggtttctaatatgtctat

SEQ ID NO: 434801 - DNA, 30 bp, Artificial Sequence
  Synthetic oligonucleotide
attctagaacgattgttcgtgcgtgtctat

SEQ ID NO: 434802 - DNA, 30 bp, Artificial Sequence
  Synthetic oligonucleotide
atgaaacaattacagcgtcaggttgtctat

SEQ ID NO: 434803 - DNA, 30 bp, Artificial Sequence
  Synthetic oligonucleotide
aatgtataactgtagagtgtataattctat

SEQ ID NO: 434804 - DNA, 30 bp, Artificial Sequence
  Synthetic oligonucleotide
tgtgttaacccagttcacgagggtttctat

SEQ ID NO: 434805 - DNA, 30 bp, Artificial Sequence
  Synthetic oligonucleotide
ctgaccacattttttcccgcgattttctat

SEQ ID NO: 434806 - DNA, 30 bp, Artificial Sequence
  Synthetic oligonucleotide
tcttgagcttcgcatgccgactttttctat

SEQ ID NO: 434807 - DNA, 30 bp, Artificial Sequence
  Synthetic oligonucleotide
tttacctcgcacatggcaggctttttctat

SEQ ID NO: 434808 - DNA, 30 bp, Artificial Sequence
  Synthetic oligonucleotide
agcaaacttggcgcgaagctgtgaaagtat

SEQ ID NO: 434809 - DNA, 30 bp, Artificial Sequence
  Synthetic oligonucleotide
tctcgtttttcgtaagcctattacaagtat

SEQ ID NO: 434810 - DNA, 30 bp, Artificial Sequence
  Synthetic oligonucleotide
attacagggcttcttatgcatagcaagtat

SEQ ID NO: 434811 - DNA, 30 bp, Artificial Sequence
  Synthetic oligonucleotide
gctggtgtggaacccgcggaaggcaagtat

SEQ ID NO: 434812 - DNA, 30 bp, Artificial Sequence
  Synthetic oligonucleotide
actggccgacagctaaacacttgcaagtat

SEQ ID NO: 434813 - DNA, 30 bp, Artificial Sequence
  Synthetic oligonucleotide
aagttaatgcgatagcttaaacttaagtat

SEQ ID NO: 434814 - DNA, 30 bp, Artificial Sequence
  Synthetic oligonucleotide
agttctagactgatgtgctgagaacagtat

SEQ ID NO: 434815 - DNA, 30 bp, Artificial Sequence
  Synthetic oligonucleotide
aatgtgagagaggttggctctggacagtat

SEQ ID NO: 434816 - DNA, 30 bp, Artificial Sequence
  Synthetic oligonucleotide
ggaatatttgtgaaaacaatcctccagtat

SEQ ID NO: 434817 - DNA, 30 bp, Artificial Sequence
  Synthetic oligonucleotide
ataacgccatcacatgccccagtgcagtat

SEQ ID NO: 434818 - DNA, 30 bp, Artificial Sequence
  Synthetic oligonucleotide
ttcgtatataaaggtgattcgcatcagtat

SEQ ID NO: 434819 - DNA, 30 bp, Artificial Sequence
  Synthetic oligonucleotide
ggccagcgtagcaaactgcatggtcagtat

SEQ ID NO: 434820 - DNA, 30 bp, Artificial Sequence
  Synthetic oligonucleotide
gctcacggggtcatactctgaaagtagtat

SEQ ID NO: 434821 - DNA, 30 bp, Artificial Sequence
  Synthetic oligonucleotide
cctttgttgtaccgaagtctcgattagtat

SEQ ID NO: 434822 - DNA, 30 bp, Artificial Sequence
  Synthetic oligonucleotide
cagaagttggtgggcgtcctaacttagtat

SEQ ID NO: 434823 - DNA, 30 bp, Artificial Sequence
  Synthetic oligonucleotide
gccatatattgaaatgatattaaaacgtat

SEQ ID NO: 434824 - DNA, 30 bp, Artificial Sequence
  Synthetic oligonucleotide
tcaaagttcttatactgcctatgaacgtat

SEQ ID NO: 434825 - DNA, 30 bp, Artificial Sequence
  Synthetic oligonucleotide
acttatacttttttaagcaccctaacgtat

SEQ ID NO: 434826 - DNA, 30 bp, Artificial Sequence
  Synthetic oligonucleotide
gtacctgtgattttaatcattgccacgtat

SEQ ID NO: 434827 - DNA, 30 bp, Artificial Sequence
  Synthetic oligonucleotide
aagatgcaagcgcctatcacatccacgtat

SEQ ID NO: 434828 - DNA, 30 bp, Artificial Sequence
  Synthetic oligonucleotide
caatcagccacatggaggttctgcacgtat

SEQ ID NO: 434829 - DNA, 30 bp, Artificial Sequence
  Synthetic oligonucleotide
gtagtggcatgtttggttacggagacgtat

SEQ ID NO: 434830 - DNA, 30 bp, Artificial Sequence
  Synthetic oligonucleotide
ggcgccccgatgagccgagcgctgacgtat

SEQ ID NO: 434831 - DNA, 30 bp, Artificial Sequence
  Synthetic oligonucleotide
gtttaggtagtgctgggtcgcgtgacgtat

SEQ ID NO: 434832 - DNA, 30 bp, Artificial Sequence
  Synthetic oligonucleotide
agaggatcaccttgttgtccgtctacgtat

SEQ ID NO: 434833 - DNA, 30 bp, Artificial Sequence
  Synthetic oligonucleotide
gtttaggtagtgctgggtcgcgttacgtat

SEQ ID NO: 434834 - DNA, 30 bp, Artificial Sequence
  Synthetic oligonucleotide
agtgtctcttcccaggagggcacaccgtat

SEQ ID NO: 434835 - DNA, 30 bp, Artificial Sequence
  Synthetic oligonucleotide
cgcccgttagggtataaatagttcccgtat

SEQ ID NO: 434836 - DNA, 30 bp, Artificial Sequence
  Synthetic oligonucleotide
cgtttagagtcatgaatcatgaagccgtat

SEQ ID NO: 434837 - DNA, 30 bp, Artificial Sequence
  Synthetic oligonucleotide
ggttttcgcgcttatgcacggtcgccgtat

SEQ ID NO: 434838 - DNA, 30 bp, Artificial Sequence
  Synthetic oligonucleotide
tacagggctcagaattaaaaatggccgtat

SEQ ID NO: 434839 - DNA, 30 bp, Artificial Sequence
  Synthetic oligonucleotide
ttcgccatccctaagttttggtggccgtat

SEQ ID NO: 434840 - DNA, 30 bp, Artificial Sequence
  Synthetic oligonucleotide
tgaggttagcgcgtcatatcgcatccgtat

SEQ ID NO: 434841 - DNA, 30 bp, Artificial Sequence
  Synthetic oligonucleotide
agttgagatgcgtcctttaagtatccgtat

SEQ ID NO: 434842 - DNA, 30 bp, Artificial Sequence
  Synthetic oligonucleotide
tgaagaggcagagtatcagggtctccgtat

SEQ ID NO: 434843 - DNA, 30 bp, Artificial Sequence
  Synthetic oligonucleotide
ctatgctacgtctatcggggaggtccgtat

SEQ ID NO: 434844 - DNA, 30 bp, Artificial Sequence
  Synthetic oligonucleotide
gcaggatgcatagcggtagtcattccgtat

SEQ ID NO: 434845 - DNA, 30 bp, Artificial Sequence
  Synthetic oligonucleotide
gaacacggggcataggctcctagagcgtat

SEQ ID NO: 434846 - DNA, 30 bp, Artificial Sequence
  Synthetic oligonucleotide
ttgcgacataccttgatcgggatggcgtat

SEQ ID NO: 434847 - DNA, 30 bp, Artificial Sequence
  Synthetic oligonucleotide
acgtgtcaatacgagtataggcgtgcgtat

SEQ ID NO: 434848 - DNA, 30 bp, Artificial Sequence
  Synthetic oligonucleotide
gtacttcatctacggacttgccttgcgtat

SEQ ID NO: 434849 - DNA, 30 bp, Artificial Sequence
  Synthetic oligonucleotide
cctcaaacgatttctcggtagacatcgtat

SEQ ID NO: 434850 - DNA, 30 bp, Artificial Sequence
  Synthetic oligonucleotide
gaaactcatctggaagcgactggctcgtat

SEQ ID NO: 434851 - DNA, 30 bp, Artificial Sequence
  Synthetic oligonucleotide
ggcagacaccagccgcaacgcttttcgtat

SEQ ID NO: 434852 - DNA, 30 bp, Artificial Sequence
  Synthetic oligonucleotide
atgagctagttgtgcgatgtgtcaaggtat

SEQ ID NO: 434853 - DNA, 30 bp, Artificial Sequence
  Synthetic oligonucleotide
tttaggccagtcagtcagggagtaaggtat

SEQ ID NO: 434854 - DNA, 30 bp, Artificial Sequence
  Synthetic oligonucleotide
cgttcacaccaatcacgccgcggcaggtat

SEQ ID NO: 434855 - DNA, 30 bp, Artificial Sequence
  Synthetic oligonucleotide
cttgtgggttggacaggcacgttcaggtat

SEQ ID NO: 434856 - DNA, 30 bp, Artificial Sequence
  Synthetic oligonucleotide
cgcatgggtgatcgcgtggcgttcaggtat

SEQ ID NO: 434857 - DNA, 30 bp, Artificial Sequence
  Synthetic oligonucleotide
cgagcgttaatcttcattgcgtcgaggtat

SEQ ID NO: 434858 - DNA, 30 bp, Artificial Sequence
  Synthetic oligonucleotide
gcacttgacggtctagcataaatgaggtat

SEQ ID NO: 434859 - DNA, 30 bp, Artificial Sequence
  Synthetic oligonucleotide
tgcaatagggccattaactataataggtat

SEQ ID NO: 434860 - DNA, 30 bp, Artificial Sequence
  Synthetic oligonucleotide
tgcgggtcctctttcggaggagataggtat

SEQ ID NO: 434861 - DNA, 30 bp, Artificial Sequence
  Synthetic oligonucleotide
gcccctacggttaagacagggtataggtat

SEQ ID NO: 434862 - DNA, 30 bp, Artificial Sequence
  Synthetic oligonucleotide
cgttgtcataattgtgcaccagcacggtat

SEQ ID NO: 434863 - DNA, 30 bp, Artificial Sequence
  Synthetic oligonucleotide
aatggttgtctattatgcgtaatacggtat

SEQ ID NO: 434864 - DNA, 30 bp, Artificial Sequence
  Synthetic oligonucleotide
ctctaggaccgctcagtgaaatcccggtat

SEQ ID NO: 434865 - DNA, 30 bp, Artificial Sequence
  Synthetic oligonucleotide
ggactgagatacttaccaccaacgcggtat

SEQ ID NO: 434866 - DNA, 30 bp, Artificial Sequence
  Synthetic oligonucleotide
aataatatatgcgtataagtagcgcggtat

SEQ ID NO: 434867 - DNA, 30 bp, Artificial Sequence
  Synthetic oligonucleotide
cgcagatgctttacggttttattgcggtat

SEQ ID NO: 434868 - DNA, 30 bp, Artificial Sequence
  Synthetic oligonucleotide
agaacgatatgtaagacggcctctcggtat

SEQ ID NO: 434869 - DNA, 30 bp, Artificial Sequence
  Synthetic oligonucleotide
ttacctcgctttcggctttttcgtcggtat

SEQ ID NO: 434870 - DNA, 30 bp, Artificial Sequence
  Synthetic oligonucleotide
acttgtcacctccgcaacgtaggtcggtat

SEQ ID NO: 434871 - DNA, 30 bp, Artificial Sequence
  Synthetic oligonucleotide
gggggcaagctgacaatggccccagggtat

SEQ ID NO: 434872 - DNA, 30 bp, Artificial Sequence
  Synthetic oligonucleotide
tagcccgcaagtgcggcttatatcgggtat

SEQ ID NO: 434873 - DNA, 30 bp, Artificial Sequence
  Synthetic oligonucleotide
tgaaacctcaatataaacgcaacggggtat

SEQ ID NO: 434874 - DNA, 30 bp, Artificial Sequence
  Synthetic oligonucleotide
ttggtatcctgctggaattcctatgggtat

SEQ ID NO: 434875 - DNA, 30 bp, Artificial Sequence
  Synthetic oligonucleotide
agctttttcctagccggtattgttgggtat

SEQ ID NO: 434876 - DNA, 30 bp, Artificial Sequence
  Synthetic oligonucleotide
atgaacgggattttctcgagcagatggtat

SEQ ID NO: 434877 - DNA, 30 bp, Artificial Sequence
  Synthetic oligonucleotide
gaacacttgatgaggtaccggttatggtat

SEQ ID NO: 434878 - DNA, 30 bp, Artificial Sequence
  Synthetic oligonucleotide
cttcgttcagccggacgcaaggtctggtat

SEQ ID NO: 434879 - DNA, 30 bp, Artificial Sequence
  Synthetic oligonucleotide
aagtaaaatggatccccgtaatgttggtat

SEQ ID NO: 434880 - DNA, 30 bp, Artificial Sequence
  Synthetic oligonucleotide
acatagccggccaggtcgagtctttggtat

SEQ ID NO: 434881 - DNA, 30 bp, Artificial Sequence
  Synthetic oligonucleotide
gtaattagtgttagcagcgttaaaatgtat

SEQ ID NO: 434882 - DNA, 30 bp, Artificial Sequence
  Synthetic oligonucleotide
atcggtaagtggtattcgttgccaatgtat

SEQ ID NO: 434883 - DNA, 30 bp, Artificial Sequence
  Synthetic oligonucleotide
ggtgaagtagacgagtgttggcgcatgtat

SEQ ID NO: 434884 - DNA, 30 bp, Artificial Sequence
  Synthetic oligonucleotide
tacatgtgagacaaggattgaaagatgtat

SEQ ID NO: 434885 - DNA, 30 bp, Artificial Sequence
  Synthetic oligonucleotide
cactttatcactagcgattcaccgatgtat

SEQ ID NO: 434886 - DNA, 30 bp, Artificial Sequence
  Synthetic oligonucleotide
gcgaacccacttttcggggcagcactgtat

SEQ ID NO: 434887 - DNA, 30 bp, Artificial Sequence
  Synthetic oligonucleotide
tagattcaacaatcgtgcggctcactgtat

SEQ ID NO: 434888 - DNA, 30 bp, Artificial Sequence
  Synthetic oligonucleotide
attcactgttaggtaatcagttgcctgtat

SEQ ID NO: 434889 - DNA, 30 bp, Artificial Sequence
  Synthetic oligonucleotide
acccattagcttattattgaggtcctgtat

SEQ ID NO: 434890 - DNA, 30 bp, Artificial Sequence
  Synthetic oligonucleotide
agtggggactcaggtctaagtactctgtat

SEQ ID NO: 434891 - DNA, 30 bp, Artificial Sequence
  Synthetic oligonucleotide
gggtttggttcggcgtatttcggtctgtat

SEQ ID NO: 434892 - DNA, 30 bp, Artificial Sequence
  Synthetic oligonucleotide
atcctccgtgggggaatcgccgttctgtat

SEQ ID NO: 434893 - DNA, 30 bp, Artificial Sequence
  Synthetic oligonucleotide
ttaatactggatttacttaattaagtgtat

SEQ ID NO: 434894 - DNA, 30 bp, Artificial Sequence
  Synthetic oligonucleotide
aagaagcgatcgagcgatggcttagtgtat

SEQ ID NO: 434895 - DNA, 30 bp, Artificial Sequence
  Synthetic oligonucleotide
gaagccgcaggtaattgtcgaaaggtgtat

SEQ ID NO: 434896 - DNA, 30 bp, Artificial Sequence
  Synthetic oligonucleotide
ctagagaaggggcatgcgtgtgtggtgtat

SEQ ID NO: 434897 - DNA, 30 bp, Artificial Sequence
  Synthetic oligonucleotide
gaagcgcacgaaggacttaatttggtgtat

SEQ ID NO: 434898 - DNA, 30 bp, Artificial Sequence
  Synthetic oligonucleotide
tcttatctgttgtgttttcctcatgtgtat

SEQ ID NO: 434899 - DNA, 30 bp, Artificial Sequence
  Synthetic oligonucleotide
tcttatctgttgtgttctcctcttgtgtat

SEQ ID NO: 434900 - DNA, 30 bp, Artificial Sequence
  Synthetic oligonucleotide
tcttatctattgtgttttcctcttgtgtat

SEQ ID NO: 434901 - DNA, 30 bp, Artificial Sequence
  Synthetic oligonucleotide
tcttatccgttgtgttttcctcttgtgtat

SEQ ID NO: 434902 - DNA, 30 bp, Artificial Sequence
  Synthetic oligonucleotide
tcttaactgttgtgttttcctcttgtgtat

SEQ ID NO: 434903 - DNA, 30 bp, Artificial Sequence
  Synthetic oligonucleotide
tcttatctgttgtgttttccttttgtgtat

SEQ ID NO: 434904 - DNA, 30 bp, Artificial Sequence
  Synthetic oligonucleotide
tgcaaagggcggttctacgcccaattgtat

SEQ ID NO: 434905 - DNA, 30 bp, Artificial Sequence
  Synthetic oligonucleotide
tgcttttgtaagcagaaatgcatattgtat

SEQ ID NO: 434906 - DNA, 30 bp, Artificial Sequence
  Synthetic oligonucleotide
gtagctagtacggaggcatgtcagttgtat

SEQ ID NO: 434907 - DNA, 30 bp, Artificial Sequence
  Synthetic oligonucleotide
gccaacccagatacacgccacgggttgtat

SEQ ID NO: 434908 - DNA, 30 bp, Artificial Sequence
  Synthetic oligonucleotide
tattgggaatgcaggccttgctatttgtat

SEQ ID NO: 434909 - DNA, 30 bp, Artificial Sequence
  Synthetic oligonucleotide
tctgcggtttgttaataaggtactttgtat

SEQ ID NO: 434910 - DNA, 30 bp, Artificial Sequence
  Synthetic oligonucleotide
aaacctcctggacatactccttttttgtat

SEQ ID NO: 434911 - DNA, 30 bp, Artificial Sequence
  Synthetic oligonucleotide
ctatttgctggtatgttattcgcaaattat

SEQ ID NO: 434912 - DNA, 30 bp, Artificial Sequence
  Synthetic oligonucleotide
aaccatcgcctcaggccctgcttaaattat

SEQ ID NO: 434913 - DNA, 30 bp, Artificial Sequence
  Synthetic oligonucleotide
cctgagtgcctaggtccattacgcaattat

SEQ ID NO: 434914 - DNA, 30 bp, Artificial Sequence
  Synthetic oligonucleotide
cagtcgcgtttaagaacccaaatcaattat

SEQ ID NO: 434915 - DNA, 30 bp, Artificial Sequence
  Synthetic oligonucleotide
aactcttagtaaagtcgtccgtcgaattat

SEQ ID NO: 434916 - DNA, 30 bp, Artificial Sequence
  Synthetic oligonucleotide
tgtctatttccatctctataggtgaattat

SEQ ID NO: 434917 - DNA, 30 bp, Artificial Sequence
  Synthetic oligonucleotide
agatttgctcggagaatactaactaattat

SEQ ID NO: 434918 - DNA, 30 bp, Artificial Sequence
  Synthetic oligonucleotide
tcccttactgaatgttcgtcccgtaattat

SEQ ID NO: 434919 - DNA, 30 bp, Artificial Sequence
  Synthetic oligonucleotide
gctaaaaagcccggacgaagtattaattat

SEQ ID NO: 434920 - DNA, 30 bp, Artificial Sequence
  Synthetic oligonucleotide
tctaatggatctgtagcttaagttaattat

SEQ ID NO: 434921 - DNA, 30 bp, Artificial Sequence
  Synthetic oligonucleotide
catgaaaatatcgcacaaactaaacattat

SEQ ID NO: 434922 - DNA, 30 bp, Artificial Sequence
  Synthetic oligonucleotide
cattaacacatgagggcccttgaacattat

SEQ ID NO: 434923 - DNA, 30 bp, Artificial Sequence
  Synthetic oligonucleotide
ggtgacgggagcgacgctatctgacattat

SEQ ID NO: 434924 - DNA, 30 bp, Artificial Sequence
  Synthetic oligonucleotide
agtggtgtggaataaccctattgacattat

SEQ ID NO: 434925 - DNA, 30 bp, Artificial Sequence
  Synthetic oligonucleotide
gttgcggacgaatcatgggaaatacattat

SEQ ID NO: 434926 - DNA, 30 bp, Artificial Sequence
  Synthetic oligonucleotide
aaattgaaatagtgtcatcgtcgccattat

SEQ ID NO: 434927 - DNA, 30 bp, Artificial Sequence
  Synthetic oligonucleotide
ccccaccggacccggcttggtaggcattat

SEQ ID NO: 434928 - DNA, 30 bp, Artificial Sequence
  Synthetic oligonucleotide
gagacaaatcatgtacgaagcaatcattat

SEQ ID NO: 434929 - DNA, 30 bp, Artificial Sequence
  Synthetic oligonucleotide
cttcttgtatacttttggaagactcattat

SEQ ID NO: 434930 - DNA, 30 bp, Artificial Sequence
  Synthetic oligonucleotide
acggttccgcactatttctgttttcattat

SEQ ID NO: 434931 - DNA, 30 bp, Artificial Sequence
  Synthetic oligonucleotide
cggagaatccggtacgagcaacaagattat

SEQ ID NO: 434932 - DNA, 30 bp, Artificial Sequence
  Synthetic oligonucleotide
gtaaacaaaagtactgcttattaagattat

SEQ ID NO: 434933 - DNA, 30 bp, Artificial Sequence
  Synthetic oligonucleotide
gctctagctagccctattatggtagattat

SEQ ID NO: 434934 - DNA, 30 bp, Artificial Sequence
  Synthetic oligonucleotide
gtcgcccgttcggatcgaggcttagattat

SEQ ID NO: 434935 - DNA, 30 bp, Artificial Sequence
  Synthetic oligonucleotide
atcccactgaggactcacggttacgattat

SEQ ID NO: 434936 - DNA, 30 bp, Artificial Sequence
  Synthetic oligonucleotide
ggagtcgagcgctgaacagacgccgattat

SEQ ID NO: 434937 - DNA, 30 bp, Artificial Sequence
  Synthetic oligonucleotide
ggagctggttggagcgaacatacggattat

SEQ ID NO: 434938 - DNA, 30 bp, Artificial Sequence
  Synthetic oligonucleotide
tagatgtgatctaatgtacatccggattat

SEQ ID NO: 434939 - DNA, 30 bp, Artificial Sequence
  Synthetic oligonucleotide
atggttcggttttagtagtcgtgggattat

SEQ ID NO: 434940 - DNA, 30 bp, Artificial Sequence
  Synthetic oligonucleotide
gtggtgatgcaagagcaacttcctgattat

SEQ ID NO: 434941 - DNA, 30 bp, Artificial Sequence
  Synthetic oligonucleotide
cggccgcaggttggattatgggctgattat

SEQ ID NO: 434942 - DNA, 30 bp, Artificial Sequence
  Synthetic oligonucleotide
gccaacgatcatctagtactagttgattat

SEQ ID NO: 434943 - DNA, 30 bp, Artificial Sequence
  Synthetic oligonucleotide
tccgcgtgattccgtgttaaggaatattat

SEQ ID NO: 434944 - DNA, 30 bp, Artificial Sequence
  Synthetic oligonucleotide
ttatgatcgaaggcaagtttgggatattat

SEQ ID NO: 434945 - DNA, 30 bp, Artificial Sequence
  Synthetic oligonucleotide
caacttcattatctctataatctatattat

SEQ ID NO: 434946 - DNA, 30 bp, Artificial Sequence
  Synthetic oligonucleotide
tccttctacaggaatcatcttttatattat

SEQ ID NO: 434947 - DNA, 30 bp, Artificial Sequence
  Synthetic oligonucleotide
ttgtatatgttactttcgaggaactattat

SEQ ID NO: 434948 - DNA, 30 bp, Artificial Sequence
  Synthetic oligonucleotide
tacaatgaatgtgagacggaagcctattat

SEQ ID NO: 434949 - DNA, 30 bp, Artificial Sequence
  Synthetic oligonucleotide
ggactgatctgggtcggacacggctattat

SEQ ID NO: 434950 - DNA, 30 bp, Artificial Sequence
  Synthetic oligonucleotide
ttgggaattgaccgtataatatcgtattat

SEQ ID NO: 434951 - DNA, 30 bp, Artificial Sequence
  Synthetic oligonucleotide
ggagtagcgattatcggtgaccggtattat

SEQ ID NO: 434952 - DNA, 30 bp, Artificial Sequence
  Synthetic oligonucleotide
aggggatagcgaacgtcgcagctgtattat

SEQ ID NO: 434953 - DNA, 30 bp, Artificial Sequence
  Synthetic oligonucleotide
ttgttttgtgcgttcaagaacgattattat

SEQ ID NO: 434954 - DNA, 30 bp, Artificial Sequence
  Synthetic oligonucleotide
ttgaatcttggttctcagcgcacaacttat

SEQ ID NO: 434955 - DNA, 30 bp, Artificial Sequence
  Synthetic oligonucleotide
taaaacagatatagactaccagcgacttat

SEQ ID NO: 434956 - DNA, 30 bp, Artificial Sequence
  Synthetic oligonucleotide
cagcaaagaacctgtggccagtggacttat

SEQ ID NO: 434957 - DNA, 30 bp, Artificial Sequence
  Synthetic oligonucleotide
taagagctgttagatccctcagatacttat

SEQ ID NO: 434958 - DNA, 30 bp, Artificial Sequence
  Synthetic oligonucleotide
cgaaaggtcaaacgcacagtctaaccttat

SEQ ID NO: 434959 - DNA, 30 bp, Artificial Sequence
  Synthetic oligonucleotide
agtccactgtcacttgagaaaataccttat

SEQ ID NO: 434960 - DNA, 30 bp, Artificial Sequence
  Synthetic oligonucleotide
ataggggtagtgatagtcgcccacccttat

SEQ ID NO: 434961 - DNA, 30 bp, Artificial Sequence
  Synthetic oligonucleotide
cagaagtcgaggtttagccgatacccttat

SEQ ID NO: 434962 - DNA, 30 bp, Artificial Sequence
  Synthetic oligonucleotide
gtctggcaacaagatttgccaggcccttat

SEQ ID NO: 434963 - DNA, 30 bp, Artificial Sequence
  Synthetic oligonucleotide
aaatgggttacagcaggagccgcgccttat

SEQ ID NO: 434964 - DNA, 30 bp, Artificial Sequence
  Synthetic oligonucleotide
aaacatcggtttgcttcagcgccagcttat

SEQ ID NO: 434965 - DNA, 30 bp, Artificial Sequence
  Synthetic oligonucleotide
gtatgaggcgacgcataagagagagcttat

SEQ ID NO: 434966 - DNA, 30 bp, Artificial Sequence
  Synthetic oligonucleotide
tatagttttataggatgcaacggagcttat

SEQ ID NO: 434967 - DNA, 30 bp, Artificial Sequence
  Synthetic oligonucleotide
ctaatacttcatgccggtgcgatagcttat

SEQ ID NO: 434968 - DNA, 30 bp, Artificial Sequence
  Synthetic oligonucleotide
acgcctgcagtgctgcaaggattagcttat

SEQ ID NO: 434969 - DNA, 30 bp, Artificial Sequence
  Synthetic oligonucleotide
tacgcagtagataatcgacgtatcgcttat

SEQ ID NO: 434970 - DNA, 30 bp, Artificial Sequence
  Synthetic oligonucleotide
gaaactaggtccgtaataagcttcgcttat

SEQ ID NO: 434971 - DNA, 30 bp, Artificial Sequence
  Synthetic oligonucleotide
atccactggtttgtggacgcgtaggcttat

SEQ ID NO: 434972 - DNA, 30 bp, Artificial Sequence
  Synthetic oligonucleotide
gtgtagtagggtactcggggaacggcttat

SEQ ID NO: 434973 - DNA, 30 bp, Artificial Sequence
  Synthetic oligonucleotide
cgtgaattccctggactatcgccggcttat

SEQ ID NO: 434974 - DNA, 30 bp, Artificial Sequence
  Synthetic oligonucleotide
aaaggatgggacgattagcatattgcttat

SEQ ID NO: 434975 - DNA, 30 bp, Artificial Sequence
  Synthetic oligonucleotide
gagcaggcgctccagtcccgttaatcttat

SEQ ID NO: 434976 - DNA, 30 bp, Artificial Sequence
  Synthetic oligonucleotide
cggggtttcacaatttatcagcgatcttat

SEQ ID NO: 434977 - DNA, 30 bp, Artificial Sequence
  Synthetic oligonucleotide
aacaaaaggagtgaccctttgttatcttat

SEQ ID NO: 434978 - DNA, 30 bp, Artificial Sequence
  Synthetic oligonucleotide
aaatcgaccgggtatgtcgtcaagtcttat

SEQ ID NO: 434979 - DNA, 30 bp, Artificial Sequence
  Synthetic oligonucleotide
gctaccatagcccatgcggagaagtcttat

SEQ ID NO: 434980 - DNA, 30 bp, Artificial Sequence
  Synthetic oligonucleotide
cggttctgtttacccccatgaatttcttat

SEQ ID NO: 434981 - DNA, 30 bp, Artificial Sequence
  Synthetic oligonucleotide
gtccctagctatcgatggggaaaaagttat

SEQ ID NO: 434982 - DNA, 30 bp, Artificial Sequence
  Synthetic oligonucleotide
cccatcccagttacctgtaatcaaagttat

SEQ ID NO: 434983 - DNA, 30 bp, Artificial Sequence
  Synthetic oligonucleotide
gggcttcgaataacttatacaacaagttat

SEQ ID NO: 434984 - DNA, 30 bp, Artificial Sequence
  Synthetic oligonucleotide
gaccatgtagacgtttaaaatgccagttat

SEQ ID NO: 434985 - DNA, 30 bp, Artificial Sequence
  Synthetic oligonucleotide
tccttcatgctgtcctatggaaagagttat

SEQ ID NO: 434986 - DNA, 30 bp, Artificial Sequence
  Synthetic oligonucleotide
gggtcttcttagctaccgggcattagttat

SEQ ID NO: 434987 - DNA, 31 bp, Artificial Sequence
  Synthetic oligonucleotide
gtatcacgaatgaagttcctactttagttat

SEQ ID NO: 434988 - DNA, 30 bp, Artificial Sequence
  Synthetic oligonucleotide
cctaatgtcctcgtgtccctggcacgttat

SEQ ID NO: 434989 - DNA, 40 bp, Artificial Sequence
  Synthetic oligonucleotide
atctattcgtttaccccactaaataacgcgtagacgttat

SEQ ID NO: 434990 - DNA, 30 bp, Artificial Sequence
  Synthetic oligonucleotide
ttcttttaaccgtgccaaaatcgacgttat

SEQ ID NO: 434991 - DNA, 30 bp, Artificial Sequence
  Synthetic oligonucleotide
tactccgatgcggtgcataatctacgttat

SEQ ID NO: 434992 - DNA, 30 bp, Artificial Sequence
  Synthetic oligonucleotide
ctgttagcccaagcggttaggcgccgttat

SEQ ID NO: 434993 - DNA, 31 bp, Artificial Sequence
  Synthetic oligonucleotide
atcgatctgaagtgaatgccatttgcgttat

SEQ ID NO: 434994 - DNA, 30 bp, Artificial Sequence
  Synthetic oligonucleotide
cgggcctcagtcagctcccattatcgttat

SEQ ID NO: 434995 - DNA, 30 bp, Artificial Sequence
  Synthetic oligonucleotide
atcacgagacaaagtctataaagtcgttat

SEQ ID NO: 434996 - DNA, 30 bp, Artificial Sequence
  Synthetic oligonucleotide
agccccgagtaaggaagcccgtaaggttat

SEQ ID NO: 434997 - DNA, 30 bp, Artificial Sequence
  Synthetic oligonucleotide
acggccccacggatctgtgggttcggttat

SEQ ID NO: 434998 - DNA, 30 bp, Artificial Sequence
  Synthetic oligonucleotide
tccagcaagatgcagatcgcacggggttat

SEQ ID NO: 434999 - DNA, 30 bp, Artificial Sequence
  Synthetic oligonucleotide
tataacttaaggtcaaaattagggggttat

SEQ ID NO: 435000 - DNA, 30 bp, Artificial Sequence
  Synthetic oligonucleotide
cccacacgacggcgttgtgggctgggttat

SEQ ID NO: 435001 - DNA, 30 bp, Artificial Sequence
  Synthetic oligonucleotide
aaatctgatgtgccgtcgcgagatggttat

SEQ ID NO: 435002 - DNA, 30 bp, Artificial Sequence
  Synthetic oligonucleotide
cttcactgacggtgccaggtggatggttat

SEQ ID NO: 435003 - DNA, 30 bp, Artificial Sequence
  Synthetic oligonucleotide
atctagatataagaatcgtaccaatgttat

SEQ ID NO: 435004 - DNA, 30 bp, Artificial Sequence
  Synthetic oligonucleotide
cctactttaggtctcgtaggcctctgttat

SEQ ID NO: 435005 - DNA, 30 bp, Artificial Sequence
  Synthetic oligonucleotide
aatggaagtaggggctaattcgcgtgttat

SEQ ID NO: 435006 - DNA, 30 bp, Artificial Sequence
  Synthetic oligonucleotide
ttgcaagacccttccaccaaccggtgttat

SEQ ID NO: 435007 - DNA, 30 bp, Artificial Sequence
  Synthetic oligonucleotide
agcaggatattaagctaaacggggtgttat

SEQ ID NO: 435008 - DNA, 30 bp, Artificial Sequence
  Synthetic oligonucleotide
tttagttagattcggatgatgcattgttat

SEQ ID NO: 435009 - DNA, 30 bp, Artificial Sequence
  Synthetic oligonucleotide
agtgcgagctataacctcaagccttgttat

SEQ ID NO: 435010 - DNA, 30 bp, Artificial Sequence
  Synthetic oligonucleotide
agggtcgatcaggactctacagtaatttat

SEQ ID NO: 435011 - DNA, 30 bp, Artificial Sequence
  Synthetic oligonucleotide
cgtcaatgaacgcgcgctagttccatttat

SEQ ID NO: 435012 - DNA, 30 bp, Artificial Sequence
  Synthetic oligonucleotide
cggcatttcgaaaacgacgtccgcatttat

SEQ ID NO: 435013 - DNA, 30 bp, Artificial Sequence
  Synthetic oligonucleotide
tgatttcaagttaggagcagagtcatttat

SEQ ID NO: 435014 - DNA, 30 bp, Artificial Sequence
  Synthetic oligonucleotide
aatactagggtataggatagcaggatttat

SEQ ID NO: 435015 - DNA, 30 bp, Artificial Sequence
  Synthetic oligonucleotide
gaatctcttgtgggccacacacggatttat

SEQ ID NO: 435016 - DNA, 30 bp, Artificial Sequence
  Synthetic oligonucleotide
ttcgactcttgatgtctcaccggtatttat

SEQ ID NO: 435017 - DNA, 30 bp, Artificial Sequence
  Synthetic oligonucleotide
aagcgggatcgatcagatttccgactttat

SEQ ID NO: 435018 - DNA, 30 bp, Artificial Sequence
  Synthetic oligonucleotide
cactgtgtgcaagtctaagagctcctttat

SEQ ID NO: 435019 - DNA, 30 bp, Artificial Sequence
  Synthetic oligonucleotide
tccgtttggatgttcgggcacgtcctttat

SEQ ID NO: 435020 - DNA, 30 bp, Artificial Sequence
  Synthetic oligonucleotide
ggtttgtacatgagaaagctccagctttat

SEQ ID NO: 435021 - DNA, 30 bp, Artificial Sequence
  Synthetic oligonucleotide
aaatatagatccgtgttgacatcgctttat

SEQ ID NO: 435022 - DNA, 30 bp, Artificial Sequence
  Synthetic oligonucleotide
ttggtagtggaactcgaaaggttgctttat

SEQ ID NO: 435023 - DNA, 30 bp, Artificial Sequence
  Synthetic oligonucleotide
taagcaatttcttggaccaacgatctttat

SEQ ID NO: 435024 - DNA, 30 bp, Artificial Sequence
  Synthetic oligonucleotide
cattgcatggaagggagctgttctctttat

SEQ ID NO: 435025 - DNA, 30 bp, Artificial Sequence
  Synthetic oligonucleotide
atgacggtatcctgaggcttaattctttat

SEQ ID NO: 435026 - DNA, 30 bp, Artificial Sequence
  Synthetic oligonucleotide
ataaacataatttctaaattggttctttat

SEQ ID NO: 435027 - DNA, 30 bp, Artificial Sequence
  Synthetic oligonucleotide
gatgtcggtatcgtacgacgcgaagtttat

SEQ ID NO: 435028 - DNA, 30 bp, Artificial Sequence
  Synthetic oligonucleotide
acattacagccctcttcgtgatgagtttat

SEQ ID NO: 435029 - DNA, 30 bp, Artificial Sequence
  Synthetic oligonucleotide
gttgccaccatctgaaggtggttagtttat

SEQ ID NO: 435030 - DNA, 30 bp, Artificial Sequence
  Synthetic oligonucleotide
ccatagcgagacgctatgccgcccgtttat

SEQ ID NO: 435031 - DNA, 30 bp, Artificial Sequence
  Synthetic oligonucleotide
ggacgccttaccgctgaagatcccgtttat

SEQ ID NO: 435032 - DNA, 30 bp, Artificial Sequence
  Synthetic oligonucleotide
cctagtccaacgaagcttggtttcgtttat

SEQ ID NO: 435033 - DNA, 30 bp, Artificial Sequence
  Synthetic oligonucleotide
tagtttttgaaggatggacccgtggtttat

SEQ ID NO: 435034 - DNA, 30 bp, Artificial Sequence
  Synthetic oligonucleotide
gtaaataccgaaatatgcagggtggtttat

SEQ ID NO: 435035 - DNA, 30 bp, Artificial Sequence
  Synthetic oligonucleotide
ggatcgcggtttggctccatgcgattttat

SEQ ID NO: 435036 - DNA, 30 bp, Artificial Sequence
  Synthetic oligonucleotide
tgtcgaatcttatagctatccatattttat

SEQ ID NO: 435037 - DNA, 30 bp, Artificial Sequence
  Synthetic oligonucleotide
gccggactgtagctagttaaatacttttat

SEQ ID NO: 435038 - DNA, 30 bp, Artificial Sequence
  Synthetic oligonucleotide
tatctgctcaaatggtatcttgccttttat

SEQ ID NO: 435039 - DNA, 30 bp, Artificial Sequence
  Synthetic oligonucleotide
tgatacacaagtacggcacttatcttttat

SEQ ID NO: 435040 - DNA, 30 bp, Artificial Sequence
  Synthetic oligonucleotide
gttgagccgtaaagttgataagtcttttat

SEQ ID NO: 435041 - DNA, 30 bp, Artificial Sequence
  Synthetic oligonucleotide
agattcttatcttattgcagtaagttttat

SEQ ID NO: 435042 - DNA, 30 bp, Artificial Sequence
  Synthetic oligonucleotide
cgtggaaattgaaagcgccggacgttttat

SEQ ID NO: 435043 - DNA, 30 bp, Artificial Sequence
  Synthetic oligonucleotide
ggcaagcgcagctagaaagaccggttttat

SEQ ID NO: 435044 - DNA, 30 bp, Artificial Sequence
  Synthetic oligonucleotide
gtcgactcactctgtggcgaccggttttat

SEQ ID NO: 435045 - DNA, 30 bp, Artificial Sequence
  Synthetic oligonucleotide
actttcttcctcttcctcgaggggttttat

SEQ ID NO: 435046 - DNA, 30 bp, Artificial Sequence
  Synthetic oligonucleotide
cggtgaaattggtgggctactgtgttttat

SEQ ID NO: 435047 - DNA, 30 bp, Artificial Sequence
  Synthetic oligonucleotide
ccgaggttggatcgccttggccatttttat

SEQ ID NO: 435048 - DNA, 30 bp, Artificial Sequence
  Synthetic oligonucleotide
tctgttggcaatctcttttacgatttttat

SEQ ID NO: 435049 - DNA, 30 bp, Artificial Sequence
  Synthetic oligonucleotide
atcaactctggcctttcgtcatatttttat

SEQ ID NO: 435050 - DNA, 30 bp, Artificial Sequence
  Synthetic oligonucleotide
acccagcggaagcaatgaggtgctttttat

SEQ ID NO: 435051 - DNA, 30 bp, Artificial Sequence
  Synthetic oligonucleotide
ttatcacaccttacatgaccgaaaaaaact

SEQ ID NO: 435052 - DNA, 30 bp, Artificial Sequence
  Synthetic oligonucleotide
agggtgtgtgggggggggtttcgcaaaact

SEQ ID NO: 435053 - DNA, 30 bp, Artificial Sequence
  Synthetic oligonucleotide
cacctgtggtaaataagcatagtcaaaact

SEQ ID NO: 435054 - DNA, 30 bp, Artificial Sequence
  Synthetic oligonucleotide
accggtgttgcttccaatagagtgaaaact

SEQ ID NO: 435055 - DNA, 30 bp, Artificial Sequence
  Synthetic oligonucleotide
cccataactcagcgcttgtttcgtaaaact

SEQ ID NO: 435056 - DNA, 30 bp, Artificial Sequence
  Synthetic oligonucleotide
aagggtacctcttgtcggtattttaaaact

SEQ ID NO: 435057 - DNA, 30 bp, Artificial Sequence
  Synthetic oligonucleotide
ccaccattggtgtctcgttttgcacaaact

SEQ ID NO: 435058 - DNA, 30 bp, Artificial Sequence
  Synthetic oligonucleotide
tttgtgaccgcggccaaaacaatacaaact

SEQ ID NO: 435059 - DNA, 30 bp, Artificial Sequence
  Synthetic oligonucleotide
gaaccgtcgccttagcgccgagtacaaact

SEQ ID NO: 435060 - DNA, 30 bp, Artificial Sequence
  Synthetic oligonucleotide
ctgcaaccaccttatactaaattacaaact

SEQ ID NO: 435061 - DNA, 30 bp, Artificial Sequence
  Synthetic oligonucleotide
ggggaacttcccttccgtcttatccaaact

SEQ ID NO: 435062 - DNA, 30 bp, Artificial Sequence
  Synthetic oligonucleotide
tagtaggtgtatacatctggattccaaact

SEQ ID NO: 435063 - DNA, 30 bp, Artificial Sequence
  Synthetic oligonucleotide
gttgctcctaacatcggctacaagcaaact

SEQ ID NO: 435064 - DNA, 30 bp, Artificial Sequence
  Synthetic oligonucleotide
gaatgcctccgcggtaaatcctggcaaact

SEQ ID NO: 435065 - DNA, 30 bp, Artificial Sequence
  Synthetic oligonucleotide
ctgctgcagttattggggggtgcagaaact

SEQ ID NO: 435066 - DNA, 30 bp, Artificial Sequence
  Synthetic oligonucleotide
taaaccaagaaaacgccggtaggagaaact

SEQ ID NO: 435067 - DNA, 30 bp, Artificial Sequence
  Synthetic oligonucleotide
agcgaggtcttggctgtccgcggcgaaact

SEQ ID NO: 435068 - DNA, 30 bp, Artificial Sequence
  Synthetic oligonucleotide
ttatcaggtgagccgcacaatatcgaaact

SEQ ID NO: 435069 - DNA, 30 bp, Artificial Sequence
  Synthetic oligonucleotide
agtcttgaaaaattggaaattttggaaact

SEQ ID NO: 435070 - DNA, 30 bp, Artificial Sequence
  Synthetic oligonucleotide
ataccttgtaacttcggttatattgaaact

SEQ ID NO: 435071 - DNA, 30 bp, Artificial Sequence
  Synthetic oligonucleotide
gtggcgcaagttcatgtaagaggataaact

SEQ ID NO: 435072 - DNA, 30 bp, Artificial Sequence
  Synthetic oligonucleotide
gcgggcccggaaggggccgaatactaaact

SEQ ID NO: 435073 - DNA, 30 bp, Artificial Sequence
  Synthetic oligonucleotide
gcaaatgtagtggctgtataaagctaaact

SEQ ID NO: 435074 - DNA, 30 bp, Artificial Sequence
  Synthetic oligonucleotide
cccaaacagccgttcacggtggtctaaact

SEQ ID NO: 435075 - DNA, 30 bp, Artificial Sequence
  Synthetic oligonucleotide
gctgccccttaccgtgttggaccgtaaact

SEQ ID NO: 435076 - DNA, 30 bp, Artificial Sequence
  Synthetic oligonucleotide
gaactgttacatgtagggtacgggtaaact

SEQ ID NO: 435077 - DNA, 30 bp, Artificial Sequence
  Synthetic oligonucleotide
gtctacttgttttattttaaacattaaact

SEQ ID NO: 435078 - DNA, 30 bp, Artificial Sequence
  Synthetic oligonucleotide
tactccttaattatggaaaagtcttaaact

SEQ ID NO: 435079 - DNA, 30 bp, Artificial Sequence
  Synthetic oligonucleotide
ctctacgcaggttagctgagcagttaaact

SEQ ID NO: 435080 - DNA, 30 bp, Artificial Sequence
  Synthetic oligonucleotide
ggttgcaatcatttgcattccttaacaact

SEQ ID NO: 435081 - DNA, 30 bp, Artificial Sequence
  Synthetic oligonucleotide
aagagtccttcatgcttgatacagacaact

SEQ ID NO: 435082 - DNA, 30 bp, Artificial Sequence
  Synthetic oligonucleotide
attctgggtgcacactagggtacgacaact

SEQ ID NO: 435083 - DNA, 30 bp, Artificial Sequence
  Synthetic oligonucleotide
aagcgacggagaagtgtcaaggcgacaact

SEQ ID NO: 435084 - DNA, 30 bp, Artificial Sequence
  Synthetic oligonucleotide
ttataacatttagctacacgatatacaact

SEQ ID NO: 435085 - DNA, 30 bp, Artificial Sequence
  Synthetic oligonucleotide
catcaataccccgtctacgatggtacaact

SEQ ID NO: 435086 - DNA, 30 bp, Artificial Sequence
  Synthetic oligonucleotide
tgatattaagggcagctactggccccaact

SEQ ID NO: 435087 - DNA, 30 bp, Artificial Sequence
  Synthetic oligonucleotide
ttaggtgccgtgtttgttagaatcccaact

SEQ ID NO: 435088 - DNA, 30 bp, Artificial Sequence
  Synthetic oligonucleotide
gttcgggtccttattccactcttcccaact

SEQ ID NO: 435089 - DNA, 30 bp, Artificial Sequence
  Synthetic oligonucleotide
ggtacattcatggatgaaacggtgccaact

SEQ ID NO: 435090 - DNA, 30 bp, Artificial Sequence
  Synthetic oligonucleotide
taaagcagctaggagcacgaagctccaact

SEQ ID NO: 435091 - DNA, 30 bp, Artificial Sequence
  Synthetic oligonucleotide
ggaagtttcggacgggagttctacgcaact

SEQ ID NO: 435092 - DNA, 30 bp, Artificial Sequence
  Synthetic oligonucleotide
gtaaaagccctttacaggagtcatgcaact

SEQ ID NO: 435093 - DNA, 30 bp, Artificial Sequence
  Synthetic oligonucleotide
tatggttggtatcgacgcgtatctgcaact

SEQ ID NO: 435094 - DNA, 30 bp, Artificial Sequence
  Synthetic oligonucleotide
acgccccattccgtataatcctctgcaact

SEQ ID NO: 435095 - DNA, 30 bp, Artificial Sequence
  Synthetic oligonucleotide
gctattatttgtagatatcgatactcaact

SEQ ID NO: 435096 - DNA, 30 bp, Artificial Sequence
  Synthetic oligonucleotide
gcgtttgtactatgatgctccaagtcaact

SEQ ID NO: 435097 - DNA, 30 bp, Artificial Sequence
  Synthetic oligonucleotide
tgcttagggtgctcgatggaggcaagaact

SEQ ID NO: 435098 - DNA, 30 bp, Artificial Sequence
  Synthetic oligonucleotide
tctgactatgtggctgacggaagcagaact

SEQ ID NO: 435099 - DNA, 30 bp, Artificial Sequence
  Synthetic oligonucleotide
tgaatacgttggcgtctcgatatcagaact

SEQ ID NO: 435100 - DNA, 30 bp, Artificial Sequence
  Synthetic oligonucleotide
ttatgagaaaggggcatacctatcagaact

SEQ ID NO: 435101 - DNA, 30 bp, Artificial Sequence
  Synthetic oligonucleotide
gtctggtcataccgtagatttgtcagaact

SEQ ID NO: 435102 - DNA, 30 bp, Artificial Sequence
  Synthetic oligonucleotide
gggcaggactaccgccgctcacggagaact

SEQ ID NO: 435103 - DNA, 31 bp, Artificial Sequence
  Synthetic oligonucleotide
gcctatctgattcgcgtccagcgtgagaact

SEQ ID NO: 435104 - DNA, 30 bp, Artificial Sequence
  Synthetic oligonucleotide
gcaggtgtctactatagttcggtgagaact

SEQ ID NO: 435105 - DNA, 30 bp, Artificial Sequence
  Synthetic oligonucleotide
ttcgcgagtgtgaccccggaacgtagaact

SEQ ID NO: 435106 - DNA, 30 bp, Artificial Sequence
  Synthetic oligonucleotide
agaaccgcttaaccgttttgctgtagaact

SEQ ID NO: 435107 - DNA, 30 bp, Artificial Sequence
  Synthetic oligonucleotide
tgtttcgcatatcaggctatagttagaact

SEQ ID NO: 435108 - DNA, 30 bp, Artificial Sequence
  Synthetic oligonucleotide
aacactccaatctatctactctttagaact

SEQ ID NO: 435109 - DNA, 30 bp, Artificial Sequence
  Synthetic oligonucleotide
cggaaaacggacagtcatgttctacgaact

SEQ ID NO: 435110 - DNA, 30 bp, Artificial Sequence
  Synthetic oligonucleotide
agatagatttatttcatttgcgaccgaact

SEQ ID NO: 435111 - DNA, 30 bp, Artificial Sequence
  Synthetic oligonucleotide
gcagggcggagcaagcaggcacacggaact

SEQ ID NO: 435112 - DNA, 25 bp, Artificial Sequence
  Synthetic oligonucleotide
tctacaatagattttctacggaact

SEQ ID NO: 435113 - DNA, 31 bp, Artificial Sequence
  Synthetic oligonucleotide
catatcgcgtccgtcgcttaaaagcggaact

SEQ ID NO: 435114 - DNA, 30 bp, Artificial Sequence
  Synthetic oligonucleotide
gtaatacatccaatctagtaaaggggaact

SEQ ID NO: 435115 - DNA, 30 bp, Artificial Sequence
  Synthetic oligonucleotide
attctggcgcccgttatattgttgggaact

SEQ ID NO: 435116 - DNA, 30 bp, Artificial Sequence
  Synthetic oligonucleotide
gggcaaagagttcagtaggtagatggaact

SEQ ID NO: 435117 - DNA, 31 bp, Artificial Sequence
  Synthetic oligonucleotide
atggtttttaatgcagtcgagatatggaact

SEQ ID NO: 435118 - DNA, 30 bp, Artificial Sequence
  Synthetic oligonucleotide
aatccgggtaatcgtctggcttctggaact

SEQ ID NO: 435119 - DNA, 30 bp, Artificial Sequence
  Synthetic oligonucleotide
atttcaagatgtagttaacgaattggaact

SEQ ID NO: 435120 - DNA, 30 bp, Artificial Sequence
  Synthetic oligonucleotide
ggcggtctataggacacacgggttggaact

SEQ ID NO: 435121 - DNA, 30 bp, Artificial Sequence
  Synthetic oligonucleotide
aatgttaagccgtatcatttggtatgaact

SEQ ID NO: 435122 - DNA, 30 bp, Artificial Sequence
  Synthetic oligonucleotide
gtgtagctcgaaaatcgttatgcttgaact

SEQ ID NO: 435123 - DNA, 30 bp, Artificial Sequence
  Synthetic oligonucleotide
attatacgaaatcaccctggcgtttgaact

SEQ ID NO: 435124 - DNA, 30 bp, Artificial Sequence
  Synthetic oligonucleotide
agcaatgggctcgataggcccacaataact

SEQ ID NO: 435125 - DNA, 30 bp, Artificial Sequence
  Synthetic oligonucleotide
ctgtgcctgtcagacgatagattcataact

SEQ ID NO: 435126 - DNA, 30 bp, Artificial Sequence
  Synthetic oligonucleotide
gtcgcattacactactaggattggataact

SEQ ID NO: 435127 - DNA, 30 bp, Artificial Sequence
  Synthetic oligonucleotide
gaagtacgtcgccccatcgaggatataact

SEQ ID NO: 435128 - DNA, 30 bp, Artificial Sequence
  Synthetic oligonucleotide
tgcactgccggcagagatgtttatataact

SEQ ID NO: 435129 - DNA, 30 bp, Artificial Sequence
  Synthetic oligonucleotide
gaacaattccgctgatccccggttataact

SEQ ID NO: 435130 - DNA, 30 bp, Artificial Sequence
  Synthetic oligonucleotide
ggatgatgttagggtggttatccactaact

SEQ ID NO: 435131 - DNA, 30 bp, Artificial Sequence
  Synthetic oligonucleotide
cgtagattgtaaacagggtcctgactaact

SEQ ID NO: 435132 - DNA, 30 bp, Artificial Sequence
  Synthetic oligonucleotide
gccgctgggacaaatattgaactactaact

SEQ ID NO: 435133 - DNA, 30 bp, Artificial Sequence
  Synthetic oligonucleotide
cacgtttctgcagcgtcttatttactaact

SEQ ID NO: 435134 - DNA, 30 bp, Artificial Sequence
  Synthetic oligonucleotide
gacggactgcgcatccaaatcggcctaact

SEQ ID NO: 435135 - DNA, 30 bp, Artificial Sequence
  Synthetic oligonucleotide
ccagatgaaaccgagcagacacagctaact

SEQ ID NO: 435136 - DNA, 30 bp, Artificial Sequence
  Synthetic oligonucleotide
acgttctagattacaaatgtctcgctaact

SEQ ID NO: 435137 - DNA, 30 bp, Artificial Sequence
  Synthetic oligonucleotide
ttgaatgccgggcggcaacgttctctaact

SEQ ID NO: 435138 - DNA, 30 bp, Artificial Sequence
  Synthetic oligonucleotide
gctgtgcacattgtgccaaagcttctaact

SEQ ID NO: 435139 - DNA, 30 bp, Artificial Sequence
  Synthetic oligonucleotide
agtcatgggtctataagaaatacagtaact

SEQ ID NO: 435140 - DNA, 30 bp, Artificial Sequence
  Synthetic oligonucleotide
cacgtcggtgatcatacaacgaccgtaact

SEQ ID NO: 435141 - DNA, 30 bp, Artificial Sequence
  Synthetic oligonucleotide
actgttttccaatgggggggtagcgtaact

SEQ ID NO: 435142 - DNA, 30 bp, Artificial Sequence
  Synthetic oligonucleotide
tctccccgctatggcgcaattcgcgtaact

SEQ ID NO: 435143 - DNA, 30 bp, Artificial Sequence
  Synthetic oligonucleotide
attacgcaggtgtggccgagtaaggtaact

SEQ ID NO: 435144 - DNA, 30 bp, Artificial Sequence
  Synthetic oligonucleotide
aaagttaatcactgggcactctaggtaact

SEQ ID NO: 435145 - DNA, 30 bp, Artificial Sequence
  Synthetic oligonucleotide
cttggcacatcggaaagtgggccggtaact

SEQ ID NO: 435146 - DNA, 30 bp, Artificial Sequence
  Synthetic oligonucleotide
aaagttattcgatgagagacaggggtaact

SEQ ID NO: 435147 - DNA, 30 bp, Artificial Sequence
  Synthetic oligonucleotide
tttaaagacacaagatgttacctggtaact

SEQ ID NO: 435148 - DNA, 30 bp, Artificial Sequence
  Synthetic oligonucleotide
tatgttggaatgaagctaggtcgtgtaact

SEQ ID NO: 435149 - DNA, 30 bp, Artificial Sequence
  Synthetic oligonucleotide
agtcaggcgggaagtaacacaaccttaact

SEQ ID NO: 435150 - DNA, 30 bp, Artificial Sequence
  Synthetic oligonucleotide
agatatgcctaatttaaacgcagcttaact

SEQ ID NO: 435151 - DNA, 30 bp, Artificial Sequence
  Synthetic oligonucleotide
tctcgtttacgttttacaggagtcttaact

SEQ ID NO: 435152 - DNA, 30 bp, Artificial Sequence
  Synthetic oligonucleotide
tgtacaggggctagctgtcttgatttaact

SEQ ID NO: 435153 - DNA, 30 bp, Artificial Sequence
  Synthetic oligonucleotide
gtgacaccttacgaccccattactttaact

SEQ ID NO: 435154 - DNA, 30 bp, Artificial Sequence
  Synthetic oligonucleotide
ttgctccgtcatagcgatttggttttaact

SEQ ID NO: 435155 - DNA, 30 bp, Artificial Sequence
  Synthetic oligonucleotide
gcagctgtagcgtaaacgttgtttttaact

SEQ ID NO: 435156 - DNA, 30 bp, Artificial Sequence
  Synthetic oligonucleotide
gttccaagggtcatatgctaccaaaacact

SEQ ID NO: 435157 - DNA, 30 bp, Artificial Sequence
  Synthetic oligonucleotide
cttctgaagatagaactatatattaacact

SEQ ID NO: 435158 - DNA, 30 bp, Artificial Sequence
  Synthetic oligonucleotide
atatctcacagtgtgaagaaataacacact

SEQ ID NO: 435159 - DNA, 30 bp, Artificial Sequence
  Synthetic oligonucleotide
aaattaggagccggggggaagatacacact

SEQ ID NO: 435160 - DNA, 30 bp, Artificial Sequence
  Synthetic oligonucleotide
aaatccatgtgttctaactgagaccacact

SEQ ID NO: 435161 - DNA, 30 bp, Artificial Sequence
  Synthetic oligonucleotide
tccgaatattgtcatgttgtgagccacact

SEQ ID NO: 435162 - DNA, 30 bp, Artificial Sequence
  Synthetic oligonucleotide
ttatgaccaacatatgagctactccacact

SEQ ID NO: 435163 - DNA, 30 bp, Artificial Sequence
  Synthetic oligonucleotide
cgtctggggttttagactacccagcacact

SEQ ID NO: 435164 - DNA, 30 bp, Artificial Sequence
  Synthetic oligonucleotide
agttgacgacttaatttgcgcaatcacact

SEQ ID NO: 435165 - DNA, 30 bp, Artificial Sequence
  Synthetic oligonucleotide
cgccgacagaagatgcgtcattatcacact

SEQ ID NO: 435166 - DNA, 30 bp, Artificial Sequence
  Synthetic oligonucleotide
cgcctcgaacagtaggcgagaggtcacact

SEQ ID NO: 435167 - DNA, 30 bp, Artificial Sequence
  Synthetic oligonucleotide
cggcgccaggtgcgactaactgcagacact

SEQ ID NO: 435168 - DNA, 30 bp, Artificial Sequence
  Synthetic oligonucleotide
gattcagctactggatgaatctccgacact

SEQ ID NO: 435169 - DNA, 30 bp, Artificial Sequence
  Synthetic oligonucleotide
tgttagataactcctctaactccggacact

SEQ ID NO: 435170 - DNA, 30 bp, Artificial Sequence
  Synthetic oligonucleotide
ctccagaatacgtactgtaaagatgacact

SEQ ID NO: 435171 - DNA, 30 bp, Artificial Sequence
  Synthetic oligonucleotide
gcaagagttacgtttcggatgcgtgacact

SEQ ID NO: 435172 - DNA, 30 bp, Artificial Sequence
  Synthetic oligonucleotide
tattaacagtttcacgggagaccatacact

SEQ ID NO: 435173 - DNA, 30 bp, Artificial Sequence
  Synthetic oligonucleotide
cgcaccataagtgtcaagtactactacact

SEQ ID NO: 435174 - DNA, 30 bp, Artificial Sequence
  Synthetic oligonucleotide
gccgatttaagtatggaagtctactacact

SEQ ID NO: 435175 - DNA, 30 bp, Artificial Sequence
  Synthetic oligonucleotide
atgcgactggaatatactccttagtacact

SEQ ID NO: 435176 - DNA, 30 bp, Artificial Sequence
  Synthetic oligonucleotide
tgcgtacgatggtgccgcataaaaaccact

SEQ ID NO: 435177 - DNA, 30 bp, Artificial Sequence
  Synthetic oligonucleotide
gcgtgaaagctaggcaagctttacaccact

SEQ ID NO: 435178 - DNA, 30 bp, Artificial Sequence
  Synthetic oligonucleotide
ggtcaatgagctgcaatctcttagaccact

SEQ ID NO: 435179 - DNA, 30 bp, Artificial Sequence
  Synthetic oligonucleotide
ttattagtcgtcgatcgcctatataccact

SEQ ID NO: 435180 - DNA, 30 bp, Artificial Sequence
  Synthetic oligonucleotide
caaggacgctaatgattggtccaacccact

SEQ ID NO: 435181 - DNA, 30 bp, Artificial Sequence
  Synthetic oligonucleotide
cgccactcagccctcggctgggggcccact

SEQ ID NO: 435182 - DNA, 30 bp, Artificial Sequence
  Synthetic oligonucleotide
ggattttggaatttgtcttcactgcccact

SEQ ID NO: 435183 - DNA, 31 bp, Artificial Sequence
  Synthetic oligonucleotide
tgagtgtcaggcccgtagactggatcccact

SEQ ID NO: 435184 - DNA, 30 bp, Artificial Sequence
  Synthetic oligonucleotide
tttttctgagacggacgaggaaaagccact

SEQ ID NO: 435185 - DNA, 30 bp, Artificial Sequence
  Synthetic oligonucleotide
ctttgctatctgacgaatccggaagccact

SEQ ID NO: 435186 - DNA, 30 bp, Artificial Sequence
  Synthetic oligonucleotide
tctcagtttatccgctgaggataagccact

SEQ ID NO: 435187 - DNA, 30 bp, Artificial Sequence
  Synthetic oligonucleotide
tagcaagatctcttagcttaactcgccact

SEQ ID NO: 435188 - DNA, 30 bp, Artificial Sequence
  Synthetic oligonucleotide
cctgtggtgaggaccctttccccggccact

SEQ ID NO: 435189 - DNA, 30 bp, Artificial Sequence
  Synthetic oligonucleotide
caatcttggggtaccgtacgacgggccact

SEQ ID NO: 435190 - DNA, 30 bp, Artificial Sequence
  Synthetic oligonucleotide
ttgcgtgaccgtaggcatctccgggccact

SEQ ID NO: 435191 - DNA, 30 bp, Artificial Sequence
  Synthetic oligonucleotide
gatacagccggtcttagtgcagaatccact

SEQ ID NO: 435192 - DNA, 30 bp, Artificial Sequence
  Synthetic oligonucleotide
gatcttttagggacatagactggatccact

SEQ ID NO: 435193 - DNA, 30 bp, Artificial Sequence
  Synthetic oligonucleotide
tagtcgtccaagcttgccaccaactccact

SEQ ID NO: 435194 - DNA, 30 bp, Artificial Sequence
  Synthetic oligonucleotide
gtatgcatcctgatctgtttaatctccact

SEQ ID NO: 435195 - DNA, 30 bp, Artificial Sequence
  Synthetic oligonucleotide
taaccaagggatgatgagtacgcaagcact

SEQ ID NO: 435196 - DNA, 30 bp, Artificial Sequence
  Synthetic oligonucleotide
taaactgcagtgctatttctggcaagcact

SEQ ID NO: 435197 - DNA, 30 bp, Artificial Sequence
  Synthetic oligonucleotide
ggggttttgcacgttctaagtgcaagcact

SEQ ID NO: 435198 - DNA, 30 bp, Artificial Sequence
  Synthetic oligonucleotide
ggtgagtcaacccgtctgaaccgaagcact

SEQ ID NO: 435199 - DNA, 30 bp, Artificial Sequence
  Synthetic oligonucleotide
ggcctatccagtttcctaagcgacagcact

SEQ ID NO: 435200 - DNA, 30 bp, Artificial Sequence
  Synthetic oligonucleotide
ctgcgcccgacccggaggggaggcagcact

SEQ ID NO: 435201 - DNA, 30 bp, Artificial Sequence
  Synthetic oligonucleotide
tgcctttgtatacaagagggcgtcagcact

SEQ ID NO: 435202 - DNA, 30 bp, Artificial Sequence
  Synthetic oligonucleotide
gcggggtggtgactatcgctggtcagcact

SEQ ID NO: 435203 - DNA, 30 bp, Artificial Sequence
  Synthetic oligonucleotide
cccggcattttcgctgcctatcagagcact

SEQ ID NO: 435204 - DNA, 30 bp, Artificial Sequence
  Synthetic oligonucleotide
tgattgtactcgttttcacaaaggagcact

SEQ ID NO: 435205 - DNA, 30 bp, Artificial Sequence
  Synthetic oligonucleotide
ttcttagaaaatatatatgagaaccgcact

SEQ ID NO: 435206 - DNA, 30 bp, Artificial Sequence
  Synthetic oligonucleotide
tactgaccgttcacgattgtagcccgcact

SEQ ID NO: 435207 - DNA, 30 bp, Artificial Sequence
  Synthetic oligonucleotide
ccatatttagatgtccgtcattcgcgcact

SEQ ID NO: 435208 - DNA, 30 bp, Artificial Sequence
  Synthetic oligonucleotide
tgtaacacctccattcgggaaaatcgcact

SEQ ID NO: 435209 - DNA, 30 bp, Artificial Sequence
  Synthetic oligonucleotide
gtatggggccgccaaaggtcgagaggcact

SEQ ID NO: 435210 - DNA, 30 bp, Artificial Sequence
  Synthetic oligonucleotide
aaccacttgtgagatgattgactaggcact

SEQ ID NO: 435211 - DNA, 30 bp, Artificial Sequence
  Synthetic oligonucleotide
ggacgcatatttccactgtgtgtaggcact

SEQ ID NO: 435212 - DNA, 30 bp, Artificial Sequence
  Synthetic oligonucleotide
aaagccgcatcgagacccagacacggcact

SEQ ID NO: 435213 - DNA, 30 bp, Artificial Sequence
  Synthetic oligonucleotide
aactgaaagcgatcaattgcgggcggcact

SEQ ID NO: 435214 - DNA, 30 bp, Artificial Sequence
  Synthetic oligonucleotide
ctcattgatgtttcaccttgtcggggcact

SEQ ID NO: 435215 - DNA, 30 bp, Artificial Sequence
  Synthetic oligonucleotide
ggtctggtgattatggccgccctatgcact

SEQ ID NO: 435216 - DNA, 30 bp, Artificial Sequence
  Synthetic oligonucleotide
agcacagtacggccggcattcgcctgcact

SEQ ID NO: 435217 - DNA, 30 bp, Artificial Sequence
  Synthetic oligonucleotide
tgcgacactggggacagatttatctgcact

SEQ ID NO: 435218 - DNA, 30 bp, Artificial Sequence
  Synthetic oligonucleotide
gcagcgttccctgcctacattggttgcact

SEQ ID NO: 435219 - DNA, 30 bp, Artificial Sequence
  Synthetic oligonucleotide
tgcaggcagtacgcagtgccgttttgcact

SEQ ID NO: 435220 - DNA, 30 bp, Artificial Sequence
  Synthetic oligonucleotide
gctggcaacgtctggaatcccgaaatcact

SEQ ID NO: 435221 - DNA, 30 bp, Artificial Sequence
  Synthetic oligonucleotide
caatagagtatttcccaaacgtaaatcact

SEQ ID NO: 435222 - DNA, 30 bp, Artificial Sequence
  Synthetic oligonucleotide
ggtcttccggcggcaggtgcaacaatcact

SEQ ID NO: 435223 - DNA, 30 bp, Artificial Sequence
  Synthetic oligonucleotide
ggtagcgttcttcgtattcacacactcact

SEQ ID NO: 435224 - DNA, 30 bp, Artificial Sequence
  Synthetic oligonucleotide
gtgctattttgggaccggctcttcctcact

SEQ ID NO: 435225 - DNA, 30 bp, Artificial Sequence
  Synthetic oligonucleotide
cacaaagccaccatgtgaggacctctcact

SEQ ID NO: 435226 - DNA, 30 bp, Artificial Sequence
  Synthetic oligonucleotide
gcacggaccagtttcacggtacaagtcact

SEQ ID NO: 435227 - DNA, 30 bp, Artificial Sequence
  Synthetic oligonucleotide
aagcagctgcgcacctcgggtagagtcact

SEQ ID NO: 435228 - DNA, 30 bp, Artificial Sequence
  Synthetic oligonucleotide
gccagttatcatggagtctgtttagtcact

SEQ ID NO: 435229 - DNA, 30 bp, Artificial Sequence
  Synthetic oligonucleotide
ggactagagtcaaaaggggtgagcgtcact

SEQ ID NO: 435230 - DNA, 30 bp, Artificial Sequence
  Synthetic oligonucleotide
caccgatgtaattattacatgcgggtcact

SEQ ID NO: 435231 - DNA, 30 bp, Artificial Sequence
  Synthetic oligonucleotide
aataccagactacaaatgacacatgtcact

SEQ ID NO: 435232 - DNA, 31 bp, Artificial Sequence
  Synthetic oligonucleotide
atactgcattatctgtcgtagtagtgtcact

SEQ ID NO: 435233 - DNA, 30 bp, Artificial Sequence
  Synthetic oligonucleotide
tcccgtatccgacgaagtcaagtattcact

SEQ ID NO: 435234 - DNA, 30 bp, Artificial Sequence
  Synthetic oligonucleotide
tctaagtcaatttagcggttgaagttcact

SEQ ID NO: 435235 - DNA, 30 bp, Artificial Sequence
  Synthetic oligonucleotide
gtttgtccttagagtagctgagtgttcact

SEQ ID NO: 435236 - DNA, 30 bp, Artificial Sequence
  Synthetic oligonucleotide
cgaatatgctttacttttgacgtgttcact

SEQ ID NO: 435237 - DNA, 30 bp, Artificial Sequence
  Synthetic oligonucleotide
aatgtgaaatacgagtgggaaaatttcact

SEQ ID NO: 435238 - DNA, 30 bp, Artificial Sequence
  Synthetic oligonucleotide
gaataaatgactgagggacggcatttcact

SEQ ID NO: 435239 - DNA, 30 bp, Artificial Sequence
  Synthetic oligonucleotide
atgcgttcgtcgccattgggcacaaagact

SEQ ID NO: 435240 - DNA, 30 bp, Artificial Sequence
  Synthetic oligonucleotide
gagtcgcgttcgccatctttatgaaagact

SEQ ID NO: 435241 - DNA, 30 bp, Artificial Sequence
  Synthetic oligonucleotide
tatgaccctgtgtaaatcttgaacaagact

SEQ ID NO: 435242 - DNA, 30 bp, Artificial Sequence
  Synthetic oligonucleotide
ggccctgttctgcggtgccgatggaagact

SEQ ID NO: 435243 - DNA, 30 bp, Artificial Sequence
  Synthetic oligonucleotide
aatagtaggatgggttcacataataagact

SEQ ID NO: 435244 - DNA, 30 bp, Artificial Sequence
  Synthetic oligonucleotide
gtggaaggcttcatcattgaagaccagact

SEQ ID NO: 435245 - DNA, 30 bp, Artificial Sequence
  Synthetic oligonucleotide
gaaaaaatgagttaacgcgtttaccagact

SEQ ID NO: 435246 - DNA, 30 bp, Artificial Sequence
  Synthetic oligonucleotide
ggagtggttcttccgtgggtgtagcagact

SEQ ID NO: 435247 - DNA, 30 bp, Artificial Sequence
  Synthetic oligonucleotide
tacggcataaatagtcgtaacacgcagact

SEQ ID NO: 435248 - DNA, 30 bp, Artificial Sequence
  Synthetic oligonucleotide
ctctcggttggttgatataccccgcagact

SEQ ID NO: 435249 - DNA, 30 bp, Artificial Sequence
  Synthetic oligonucleotide
ttagaaggctgttgcttcactccgcagact

SEQ ID NO: 435250 - DNA, 30 bp, Artificial Sequence
  Synthetic oligonucleotide
gcgttttattgcgctggcagttctcagact

SEQ ID NO: 435251 - DNA, 30 bp, Artificial Sequence
  Synthetic oligonucleotide
tcacaattaggtcggggttagggtcagact

SEQ ID NO: 435252 - DNA, 30 bp, Artificial Sequence
  Synthetic oligonucleotide
atacgctcattgcaggtccgtggtcagact

SEQ ID NO: 435253 - DNA, 30 bp, Artificial Sequence
  Synthetic oligonucleotide
aaccgactaaaagctggacatctagagact

SEQ ID NO: 435254 - DNA, 30 bp, Artificial Sequence
  Synthetic oligonucleotide
tcatagtttatttcacgatatatcgagact

SEQ ID NO: 435255 - DNA, 30 bp, Artificial Sequence
  Synthetic oligonucleotide
catgtttggttactgcacgaaacggagact

SEQ ID NO: 435256 - DNA, 30 bp, Artificial Sequence
  Synthetic oligonucleotide
gcaagtgcaatcgcgggtaatcgggagact

SEQ ID NO: 435257 - DNA, 30 bp, Artificial Sequence
  Synthetic oligonucleotide
actccttgtgcccaattgggccgtgagact

SEQ ID NO: 435258 - DNA, 30 bp, Artificial Sequence
  Synthetic oligonucleotide
atactgagtccatgaccacgtacctagact

SEQ ID NO: 435259 - DNA, 30 bp, Artificial Sequence
  Synthetic oligonucleotide
gattgtagtttatcagcttgggcctagact

SEQ ID NO: 435260 - DNA, 30 bp, Artificial Sequence
  Synthetic oligonucleotide
atctttcactacatccaagcctagtagact

SEQ ID NO: 435261 - DNA, 30 bp, Artificial Sequence
  Synthetic oligonucleotide
tcttttggtacggtaaccattacttagact

SEQ ID NO: 435262 - DNA, 30 bp, Artificial Sequence
  Synthetic oligonucleotide
acagggagctgacactattatccttagact

SEQ ID NO: 435263 - DNA, 30 bp, Artificial Sequence
  Synthetic oligonucleotide
gacctgcgtgacttgcgagggcgttagact

SEQ ID NO: 435264 - DNA, 30 bp, Artificial Sequence
  Synthetic oligonucleotide
aacccagcactagttctctggatttagact

SEQ ID NO: 435265 - DNA, 30 bp, Artificial Sequence
  Synthetic oligonucleotide
gaaaactttcgtacttcataggcaacgact

SEQ ID NO: 435266 - DNA, 30 bp, Artificial Sequence
  Synthetic oligonucleotide
gacggcaaggctcgtggatccgtcacgact

SEQ ID NO: 435267 - DNA, 30 bp, Artificial Sequence
  Synthetic oligonucleotide
gtatgaacgcagaatcgattcgtgacgact

SEQ ID NO: 435268 - DNA, 30 bp, Artificial Sequence
  Synthetic oligonucleotide
gccaaccgttcgtcaaactggactacgact

SEQ ID NO: 435269 - DNA, 30 bp, Artificial Sequence
  Synthetic oligonucleotide
caatttaagtgaagcagggctagaccgact

SEQ ID NO: 435270 - DNA, 30 bp, Artificial Sequence
  Synthetic oligonucleotide
aaccgaggcctctctcctaatgtaccgact

SEQ ID NO: 435271 - DNA, 30 bp, Artificial Sequence
  Synthetic oligonucleotide
gcaagcacccgattaaagtttccgccgact

SEQ ID NO: 435272 - DNA, 30 bp, Artificial Sequence
  Synthetic oligonucleotide
ttcagttacataccactgccttactcgact

SEQ ID NO: 435273 - DNA, 30 bp, Artificial Sequence
  Synthetic oligonucleotide
ttacgcgacaaatccggccttggctcgact

SEQ ID NO: 435274 - DNA, 30 bp, Artificial Sequence
  Synthetic oligonucleotide
ttcaaaactagccttaggggtcattcgact

SEQ ID NO: 435275 - DNA, 30 bp, Artificial Sequence
  Synthetic oligonucleotide
tgttgaatagagctacgcaggaaaaggact

SEQ ID NO: 435276 - DNA, 30 bp, Artificial Sequence
  Synthetic oligonucleotide
ctggtccatgagaaagattaactcaggact

SEQ ID NO: 435277 - DNA, 30 bp, Artificial Sequence
  Synthetic oligonucleotide
attaggtagttagactttcctttgaggact

SEQ ID NO: 435278 - DNA, 30 bp, Artificial Sequence
  Synthetic oligonucleotide
ttgttgatggtaagaagccttaataggact

SEQ ID NO: 435279 - DNA, 30 bp, Artificial Sequence
  Synthetic oligonucleotide
tctgtccctgcggccagcattcataggact

SEQ ID NO: 435280 - DNA, 30 bp, Artificial Sequence
  Synthetic oligonucleotide
cggcgatcatgggccggcgaagttaggact

SEQ ID NO: 435281 - DNA, 30 bp, Artificial Sequence
  Synthetic oligonucleotide
gaccttagccgtaaaggtctaaaacggact

SEQ ID NO: 435282 - DNA, 30 bp, Artificial Sequence
  Synthetic oligonucleotide
gtttccttaaggtactaggaagaacggact

SEQ ID NO: 435283 - DNA, 30 bp, Artificial Sequence
  Synthetic oligonucleotide
aggacggcaagggatatcgacggacggact

SEQ ID NO: 435284 - DNA, 30 bp, Artificial Sequence
  Synthetic oligonucleotide
ccattagtagcgttcacgtaaatacggact

SEQ ID NO: 435285 - DNA, 30 bp, Artificial Sequence
  Synthetic oligonucleotide
ctgggatgctactgaggttccatacggact

SEQ ID NO: 435286 - DNA, 30 bp, Artificial Sequence
  Synthetic oligonucleotide
acatggaagaactagtgttgtatacggact

SEQ ID NO: 435287 - DNA, 30 bp, Artificial Sequence
  Synthetic oligonucleotide
gttgctcaatttttcagcagactacggact

SEQ ID NO: 435288 - DNA, 30 bp, Artificial Sequence
  Synthetic oligonucleotide
tcaacgcggtcggcccagctggtacggact

SEQ ID NO: 435289 - DNA, 30 bp, Artificial Sequence
  Synthetic oligonucleotide
tttgttggatgcttggataaagaccggact

SEQ ID NO: 435290 - DNA, 30 bp, Artificial Sequence
  Synthetic oligonucleotide
tttagtggacgtaccacatccacccggact

SEQ ID NO: 435291 - DNA, 30 bp, Artificial Sequence
  Synthetic oligonucleotide
tccatgttttctcacgacgcttagcggact

SEQ ID NO: 435292 - DNA, 30 bp, Artificial Sequence
  Synthetic oligonucleotide
ttgaggctttatgaaatgcccaggcggact

SEQ ID NO: 435293 - DNA, 30 bp, Artificial Sequence
  Synthetic oligonucleotide
atccagaatgcttttatgcgggttcggact

SEQ ID NO: 435294 - DNA, 30 bp, Artificial Sequence
  Synthetic oligonucleotide
gaatgaacgcgcggtgcccatgaagggact

SEQ ID NO: 435295 - DNA, 30 bp, Artificial Sequence
  Synthetic oligonucleotide
gattctaaggggacctacgtgatagggact

SEQ ID NO: 435296 - DNA, 30 bp, Artificial Sequence
  Synthetic oligonucleotide
tgaatagccccttgatcaattttagggact

SEQ ID NO: 435297 - DNA, 30 bp, Artificial Sequence
  Synthetic oligonucleotide
aacttgggtccggttgagcccaacgggact

SEQ ID NO: 435298 - DNA, 30 bp, Artificial Sequence
  Synthetic oligonucleotide
tgaggagcgacgatagcaatattcgggact

SEQ ID NO: 435299 - DNA, 30 bp, Artificial Sequence
  Synthetic oligonucleotide
ataattaagggatcccgatgataggggact

SEQ ID NO: 435300 - DNA, 30 bp, Artificial Sequence
  Synthetic oligonucleotide
cttgcctgacttcgccagtccccggggact

SEQ ID NO: 435301 - DNA, 30 bp, Artificial Sequence
  Synthetic oligonucleotide
tttaccctaggtgtaccgaaaactgggact

SEQ ID NO: 435302 - DNA, 30 bp, Artificial Sequence
  Synthetic oligonucleotide
tatcggacaaaggtgagatgcgctgggact

SEQ ID NO: 435303 - DNA, 30 bp, Artificial Sequence
  Synthetic oligonucleotide
acccgatttagtaccttttagaaatggact

SEQ ID NO: 435304 - DNA, 30 bp, Artificial Sequence
  Synthetic oligonucleotide
cgacccttctcgatgttccgcgtatggact

SEQ ID NO: 435305 - DNA, 30 bp, Artificial Sequence
  Synthetic oligonucleotide
atatagcgattgtcagttcgggactggact

SEQ ID NO: 435306 - DNA, 30 bp, Artificial Sequence
  Synthetic oligonucleotide
agcaggggtactgccccaggcttctggact

SEQ ID NO: 435307 - DNA, 30 bp, Artificial Sequence
  Synthetic oligonucleotide
aataattacgagaaaacgttctagatgact

SEQ ID NO: 435308 - DNA, 30 bp, Artificial Sequence
  Synthetic oligonucleotide
gacagtagttaaacatcattcgtgatgact

SEQ ID NO: 435309 - DNA, 30 bp, Artificial Sequence
  Synthetic oligonucleotide
gggggcatctaagatgcgcatgtgatgact

SEQ ID NO: 435310 - DNA, 30 bp, Artificial Sequence
  Synthetic oligonucleotide
gggaaataccaagctggttttgttatgact

SEQ ID NO: 435311 - DNA, 30 bp, Artificial Sequence
  Synthetic oligonucleotide
gttagggaaagcgtacatgtcactctgact

SEQ ID NO: 435312 - DNA, 30 bp, Artificial Sequence
  Synthetic oligonucleotide
aatgggggatatatgctgactcgtctgact

SEQ ID NO: 435313 - DNA, 30 bp, Artificial Sequence
  Synthetic oligonucleotide
gtctggcccgtttaaagtagtctagtgact

SEQ ID NO: 435314 - DNA, 30 bp, Artificial Sequence
  Synthetic oligonucleotide
acttaactttgcgttagtgctaaggtgact

SEQ ID NO: 435315 - DNA, 30 bp, Artificial Sequence
  Synthetic oligonucleotide
ccgttccgatcgcggaaacaaacggtgact

SEQ ID NO: 435316 - DNA, 31 bp, Artificial Sequence
  Synthetic oligonucleotide
ctatatgtcgggaggtgtgattcgggtgact

SEQ ID NO: 435317 - DNA, 30 bp, Artificial Sequence
  Synthetic oligonucleotide
ttttgagtgtgtatttagtttaaattgact

SEQ ID NO: 435318 - DNA, 30 bp, Artificial Sequence
  Synthetic oligonucleotide
aatgattgataatctaagtgggcattgact

SEQ ID NO: 435319 - DNA, 30 bp, Artificial Sequence
  Synthetic oligonucleotide
cttactcccgccgtgtatgacagattgact

SEQ ID NO: 435320 - DNA, 30 bp, Artificial Sequence
  Synthetic oligonucleotide
cctcagaaggcacattcagttgtattgact

SEQ ID NO: 435321 - DNA, 30 bp, Artificial Sequence
  Synthetic oligonucleotide
gacactctaattggcccttacttcttgact

SEQ ID NO: 435322 - DNA, 30 bp, Artificial Sequence
  Synthetic oligonucleotide
aaaggtaggagctaagacctccagttgact

SEQ ID NO: 435323 - DNA, 30 bp, Artificial Sequence
  Synthetic oligonucleotide
gggagcgtcgcggcctctagaacgttgact

SEQ ID NO: 435324 - DNA, 30 bp, Artificial Sequence
  Synthetic oligonucleotide
tgaataagtaagccggattccgggttgact

SEQ ID NO: 435325 - DNA, 30 bp, Artificial Sequence
  Synthetic oligonucleotide
ttgttacgtattggccggcgcgggttgact

SEQ ID NO: 435326 - DNA, 30 bp, Artificial Sequence
  Synthetic oligonucleotide
gtaaatcggactgattcggctgggttgact

SEQ ID NO: 435327 - DNA, 30 bp, Artificial Sequence
  Synthetic oligonucleotide
gtagtttagatctgaactagtatgttgact

SEQ ID NO: 435328 - DNA, 31 bp, Artificial Sequence
  Synthetic oligonucleotide
gacctaagaatttcgtgggattaatttgact

SEQ ID NO: 435329 - DNA, 30 bp, Artificial Sequence
  Synthetic oligonucleotide
ttccaaccttggatcatcgacagtttgact

SEQ ID NO: 435330 - DNA, 30 bp, Artificial Sequence
  Synthetic oligonucleotide
gctgctggagcggtcgcctcgagtttgact

SEQ ID NO: 435331 - DNA, 30 bp, Artificial Sequence
  Synthetic oligonucleotide
agctgaattttagtttgcctgtaaaatact

SEQ ID NO: 435332 - DNA, 30 bp, Artificial Sequence
  Synthetic oligonucleotide
tgtaaatacaggctcctggcctacaatact

SEQ ID NO: 435333 - DNA, 30 bp, Artificial Sequence
  Synthetic oligonucleotide
gaaggcacgtagcattgaatcgctaatact

SEQ ID NO: 435334 - DNA, 30 bp, Artificial Sequence
  Synthetic oligonucleotide
ggcgcgccaatcttttcggttattaatact

SEQ ID NO: 435335 - DNA, 30 bp, Artificial Sequence
  Synthetic oligonucleotide
tcactctttatctgatcttttattaatact

SEQ ID NO: 435336 - DNA, 30 bp, Artificial Sequence
  Synthetic oligonucleotide
ggaagtcacggtccgactactgcccatact

SEQ ID NO: 435337 - DNA, 30 bp, Artificial Sequence
  Synthetic oligonucleotide
agaattagagtgacggtgccgggccatact

SEQ ID NO: 435338 - DNA, 30 bp, Artificial Sequence
  Synthetic oligonucleotide
tggatatctgtataggcgataaagcatact

SEQ ID NO: 435339 - DNA, 30 bp, Artificial Sequence
  Synthetic oligonucleotide
ttcaaattgagaggatgtttccagcatact

SEQ ID NO: 435340 - DNA, 30 bp, Artificial Sequence
  Synthetic oligonucleotide
atccgcgctgtcgtccaatttcctcatact

SEQ ID NO: 435341 - DNA, 30 bp, Artificial Sequence
  Synthetic oligonucleotide
aactaggtttttattggatgatctcatact

SEQ ID NO: 435342 - DNA, 30 bp, Artificial Sequence
  Synthetic oligonucleotide
ccatttgtatagggcgattctcttcatact

SEQ ID NO: 435343 - DNA, 30 bp, Artificial Sequence
  Synthetic oligonucleotide
catcaagtctgcttcctcaagccagatact

SEQ ID NO: 435344 - DNA, 30 bp, Artificial Sequence
  Synthetic oligonucleotide
gggtgattactgtcaggaataaccgatact

SEQ ID NO: 435345 - DNA, 30 bp, Artificial Sequence
  Synthetic oligonucleotide
gcgcagcgatccttaagaaagaaggatact

SEQ ID NO: 435346 - DNA, 30 bp, Artificial Sequence
  Synthetic oligonucleotide
aaaatctactggtcaaacaacggggatact

SEQ ID NO: 435347 - DNA, 30 bp, Artificial Sequence
  Synthetic oligonucleotide
caaaggggtggttggctacgctgggatact

SEQ ID NO: 435348 - DNA, 30 bp, Artificial Sequence
  Synthetic oligonucleotide
aatatatgaggtcagtccatagtggatact

SEQ ID NO: 435349 - DNA, 30 bp, Artificial Sequence
  Synthetic oligonucleotide
ggagggctctccttgcatctttgtgatact

SEQ ID NO: 435350 - DNA, 30 bp, Artificial Sequence
  Synthetic oligonucleotide
cagggatggcagacgacctcttaatatact

SEQ ID NO: 435351 - DNA, 30 bp, Artificial Sequence
  Synthetic oligonucleotide
cgctatcggctatttgcccgcacatatact

SEQ ID NO: 435352 - DNA, 30 bp, Artificial Sequence
  Synthetic oligonucleotide
cggcgggtacatggccatattacatatact

SEQ ID NO: 435353 - DNA, 30 bp, Artificial Sequence
  Synthetic oligonucleotide
gcaacaacctccacatattagttatatact

SEQ ID NO: 435354 - DNA, 30 bp, Artificial Sequence
  Synthetic oligonucleotide
taaagaaaggctttacttaggggctatact

SEQ ID NO: 435355 - DNA, 30 bp, Artificial Sequence
  Synthetic oligonucleotide
ggttattaaatttatacatacaagtatact

SEQ ID NO: 435356 - DNA, 30 bp, Artificial Sequence
  Synthetic oligonucleotide
ggggaactataggagatttgaatgtatact

SEQ ID NO: 435357 - DNA, 30 bp, Artificial Sequence
  Synthetic oligonucleotide
gtaaaatcatgatggacgtgtcattatact

SEQ ID NO: 435358 - DNA, 30 bp, Artificial Sequence
  Synthetic oligonucleotide
atgtgtgataaacaatgaaggtcttatact

SEQ ID NO: 435359 - DNA, 30 bp, Artificial Sequence
  Synthetic oligonucleotide
gtaacaataataagaatgacgcaaactact

SEQ ID NO: 435360 - DNA, 30 bp, Artificial Sequence
  Synthetic oligonucleotide
gttagatgtcggtacggcagtacaactact

SEQ ID NO: 435361 - DNA, 30 bp, Artificial Sequence
  Synthetic oligonucleotide
ccactaccccgggcagtcagggtaactact

SEQ ID NO: 435362 - DNA, 30 bp, Artificial Sequence
  Synthetic oligonucleotide
atcatgctccataccgacggctcgactact

SEQ ID NO: 435363 - DNA, 30 bp, Artificial Sequence
  Synthetic oligonucleotide
ggttctgttgtaggaacccacgtgactact

SEQ ID NO: 435364 - DNA, 30 bp, Artificial Sequence
  Synthetic oligonucleotide
tgcgggtatagttctctatttcctactact

SEQ ID NO: 435365 - DNA, 30 bp, Artificial Sequence
  Synthetic oligonucleotide
cgaggactaactaggattggcggtactact

SEQ ID NO: 435366 - DNA, 30 bp, Artificial Sequence
  Synthetic oligonucleotide
ttgggattctggcacccctagagacctact

SEQ ID NO: 435367 - DNA, 30 bp, Artificial Sequence
  Synthetic oligonucleotide
catgattattcggaagattgtatacctact

SEQ ID NO: 435368 - DNA, 30 bp, Artificial Sequence
  Synthetic oligonucleotide
acatttgaacttcggacagcattacctact

SEQ ID NO: 435369 - DNA, 30 bp, Artificial Sequence
  Synthetic oligonucleotide
gttctaacgcaggggacacggaaccctact

SEQ ID NO: 435370 - DNA, 30 bp, Artificial Sequence
  Synthetic oligonucleotide
caatccgccttcggtgaactagcccctact

SEQ ID NO: 435371 - DNA, 30 bp, Artificial Sequence
  Synthetic oligonucleotide
ggcgttaaagtaatcttcctgggtcctact

SEQ ID NO: 435372 - DNA, 30 bp, Artificial Sequence
  Synthetic oligonucleotide
cagcttaaggattaggcctctcgagctact

SEQ ID NO: 435373 - DNA, 30 bp, Artificial Sequence
  Synthetic oligonucleotide
agacgaccgagcgacccagcgtccgctact

SEQ ID NO: 435374 - DNA, 31 bp, Artificial Sequence
  Synthetic oligonucleotide
gctccaaacaactcgtataggggaggctact

SEQ ID NO: 435375 - DNA, 30 bp, Artificial Sequence
  Synthetic oligonucleotide
aatctgtcatagctggcacaaatggctact

SEQ ID NO: 435376 - DNA, 30 bp, Artificial Sequence
  Synthetic oligonucleotide
ctcctggttccattgctggacctggctact

SEQ ID NO: 435377 - DNA, 30 bp, Artificial Sequence
  Synthetic oligonucleotide
atgtcttaaggcgcgttttaggtggctact

SEQ ID NO: 435378 - DNA, 30 bp, Artificial Sequence
  Synthetic oligonucleotide
gctacatcggcctgttgagttttctctact

SEQ ID NO: 435379 - DNA, 30 bp, Artificial Sequence
  Synthetic oligonucleotide
accggccgcgtttcaggtcccgtgtctact

SEQ ID NO: 435380 - DNA, 30 bp, Artificial Sequence
  Synthetic oligonucleotide
acaaggccgtaagaaatccctcaaagtact

SEQ ID NO: 435381 - DNA, 30 bp, Artificial Sequence
  Synthetic oligonucleotide
gaatgactttaacgagtgcaactaagtact

SEQ ID NO: 435382 - DNA, 30 bp, Artificial Sequence
  Synthetic oligonucleotide
taataaaagctgaactacggtgtaagtact

SEQ ID NO: 435383 - DNA, 29 bp, Artificial Sequence
  Synthetic oligonucleotide
ccgcagtcttagttgcaacaaccagtact

SEQ ID NO: 435384 - DNA, 30 bp, Artificial Sequence
  Synthetic oligonucleotide
caagacttatccgacgattacgcgagtact

SEQ ID NO: 435385 - DNA, 30 bp, Artificial Sequence
  Synthetic oligonucleotide
tcccctgtttcaactagtgccaggagtact

SEQ ID NO: 435386 - DNA, 30 bp, Artificial Sequence
  Synthetic oligonucleotide
atcaagaatctgttcaagcgctggagtact

SEQ ID NO: 435387 - DNA, 30 bp, Artificial Sequence
  Synthetic oligonucleotide
gatgaatgtaaattccgcttatctagtact

SEQ ID NO: 435388 - DNA, 30 bp, Artificial Sequence
  Synthetic oligonucleotide
gggcttcctcattattttgcgtttagtact

SEQ ID NO: 435389 - DNA, 30 bp, Artificial Sequence
  Synthetic oligonucleotide
tcatgctacaaccgcccattcttacgtact

SEQ ID NO: 435390 - DNA, 30 bp, Artificial Sequence
  Synthetic oligonucleotide
ataggattaaccaacattgatgtccgtact

SEQ ID NO: 435391 - DNA, 30 bp, Artificial Sequence
  Synthetic oligonucleotide
gccggggatcaaacgaaggttgagcgtact

SEQ ID NO: 435392 - DNA, 30 bp, Artificial Sequence
  Synthetic oligonucleotide
aattgaagtccgcatatccgcatgcgtact

SEQ ID NO: 435393 - DNA, 30 bp, Artificial Sequence
  Synthetic oligonucleotide
tatacgcagctttgagatacggtgcgtact

SEQ ID NO: 435394 - DNA, 30 bp, Artificial Sequence
  Synthetic oligonucleotide
gctggggtactaacctaaaaggctcgtact

SEQ ID NO: 435395 - DNA, 30 bp, Artificial Sequence
  Synthetic oligonucleotide
catgatctagtctaggcacaggttcgtact

SEQ ID NO: 435396 - DNA, 30 bp, Artificial Sequence
  Synthetic oligonucleotide
gggttgcagaaggcatctacttgaggtact

SEQ ID NO: 435397 - DNA, 30 bp, Artificial Sequence
  Synthetic oligonucleotide
aacagtacaatttaaaggatcttaggtact

SEQ ID NO: 435398 - DNA, 30 bp, Artificial Sequence
  Synthetic oligonucleotide
ctacggtggtctacaacagtcaccggtact

SEQ ID NO: 435399 - DNA, 30 bp, Artificial Sequence
  Synthetic oligonucleotide
agcaacctcggatgctcggctttcggtact

SEQ ID NO: 435400 - DNA, 31 bp, Artificial Sequence
  Synthetic oligonucleotide
tcttcttgaatgaaatgtcacctagggtact

SEQ ID NO: 435401 - DNA, 30 bp, Artificial Sequence
  Synthetic oligonucleotide
gaggcaaccgaacctcccgattcgggtact

SEQ ID NO: 435402 - DNA, 30 bp, Artificial Sequence
  Synthetic oligonucleotide
tacgcgcccctggagcatatgtatggtact

SEQ ID NO: 435403 - DNA, 30 bp, Artificial Sequence
  Synthetic oligonucleotide
cttgaggtttgaacgatgaaacgtggtact

SEQ ID NO: 435404 - DNA, 30 bp, Artificial Sequence
  Synthetic oligonucleotide
tgaactctttccgatgatgtatgtggtact

SEQ ID NO: 435405 - DNA, 30 bp, Artificial Sequence
  Synthetic oligonucleotide
ataattcattatgccatttgggttggtact

SEQ ID NO: 435406 - DNA, 30 bp, Artificial Sequence
  Synthetic oligonucleotide
tgacttgtccactgagggcatcagtgtact

SEQ ID NO: 435407 - DNA, 30 bp, Artificial Sequence
  Synthetic oligonucleotide
tgttatgccagtttaattcccaggtgtact

SEQ ID NO: 435408 - DNA, 30 bp, Artificial Sequence
  Synthetic oligonucleotide
gcgctcgcaccctaggtaggagggtgtact

SEQ ID NO: 435409 - DNA, 30 bp, Artificial Sequence
  Synthetic oligonucleotide
acccattcgtcagtctgtgaactgtgtact

SEQ ID NO: 435410 - DNA, 30 bp, Artificial Sequence
  Synthetic oligonucleotide
ttgattggaagggactgcgaaacttgtact

SEQ ID NO: 435411 - DNA, 30 bp, Artificial Sequence
  Synthetic oligonucleotide
acattctatacataacgaggcccttgtact

SEQ ID NO: 435412 - DNA, 30 bp, Artificial Sequence
  Synthetic oligonucleotide
ccttttaccctgacaggatcgccttgtact

SEQ ID NO: 435413 - DNA, 30 bp, Artificial Sequence
  Synthetic oligonucleotide
acccatagatgagccagcgtcagttgtact

SEQ ID NO: 435414 - DNA, 30 bp, Artificial Sequence
  Synthetic oligonucleotide
attcccatggatttgaggctgggttgtact

SEQ ID NO: 435415 - DNA, 31 bp, Artificial Sequence
  Synthetic oligonucleotide
caaaattaggtagacgacgctggtttgtact

SEQ ID NO: 435416 - DNA, 30 bp, Artificial Sequence
  Synthetic oligonucleotide
tgttctgatggggaccctcgtttaattact

SEQ ID NO: 435417 - DNA, 30 bp, Artificial Sequence
  Synthetic oligonucleotide
acctaagtagtatccatacttaagattact

SEQ ID NO: 435418 - DNA, 30 bp, Artificial Sequence
  Synthetic oligonucleotide
aactcctccctacgggaccgggagattact

SEQ ID NO: 435419 - DNA, 30 bp, Artificial Sequence
  Synthetic oligonucleotide
gtcgaatcattcacacgccgcacgattact

SEQ ID NO: 435420 - DNA, 30 bp, Artificial Sequence
  Synthetic oligonucleotide
ttacatattccatttaatatgtcgattact

SEQ ID NO: 435421 - DNA, 30 bp, Artificial Sequence
  Synthetic oligonucleotide
gttctgcaacggctgatcctggtgattact

SEQ ID NO: 435422 - DNA, 30 bp, Artificial Sequence
  Synthetic oligonucleotide
gggtgtaagttttgctgaagtttgattact

SEQ ID NO: 435423 - DNA, 30 bp, Artificial Sequence
  Synthetic oligonucleotide
agattacgtgatcggctagggcgtattact

SEQ ID NO: 435424 - DNA, 30 bp, Artificial Sequence
  Synthetic oligonucleotide
agatgcagaggattaagagtggaacttact

SEQ ID NO: 435425 - DNA, 30 bp, Artificial Sequence
  Synthetic oligonucleotide
taatttatttatagcgcggaccgccttact

SEQ ID NO: 435426 - DNA, 30 bp, Artificial Sequence
  Synthetic oligonucleotide
tgagaatgactctcactcatggtccttact

SEQ ID NO: 435427 - DNA, 30 bp, Artificial Sequence
  Synthetic oligonucleotide
gtggtcactcgtacgctttaacagcttact

SEQ ID NO: 435428 - DNA, 30 bp, Artificial Sequence
  Synthetic oligonucleotide
ctgaattagctgggaaacctcatgcttact

SEQ ID NO: 435429 - DNA, 30 bp, Artificial Sequence
  Synthetic oligonucleotide
gacatgctttttgcgccggcgtatcttact

SEQ ID NO: 435430 - DNA, 30 bp, Artificial Sequence
  Synthetic oligonucleotide
gtgagtaaatggcgtgaactgtttcttact

SEQ ID NO: 435431 - DNA, 30 bp, Artificial Sequence
  Synthetic oligonucleotide
acatgaggcaaaaggaaccgcctagttact

SEQ ID NO: 435432 - DNA, 30 bp, Artificial Sequence
  Synthetic oligonucleotide
gcttgaggaccgtgaagctcacgggttact

SEQ ID NO: 435433 - DNA, 30 bp, Artificial Sequence
  Synthetic oligonucleotide
ctagttcagcctagattaatagctgttact

SEQ ID NO: 435434 - DNA, 30 bp, Artificial Sequence
  Synthetic oligonucleotide
gtgtaagtgtagaagtttcacgctgttact

SEQ ID NO: 435435 - DNA, 30 bp, Artificial Sequence
  Synthetic oligonucleotide
taatacggtccgtaggatataaaatttact

SEQ ID NO: 435436 - DNA, 30 bp, Artificial Sequence
  Synthetic oligonucleotide
gcacctccgttggtgaatgctcaatttact

SEQ ID NO: 435437 - DNA, 30 bp, Artificial Sequence
  Synthetic oligonucleotide
aattcactctctcggcatataacatttact

SEQ ID NO: 435438 - DNA, 30 bp, Artificial Sequence
  Synthetic oligonucleotide
gtccacgctccagagtcttgtaactttact

SEQ ID NO: 435439 - DNA, 30 bp, Artificial Sequence
  Synthetic oligonucleotide
cttattcgtttatataataagtcgtttact

SEQ ID NO: 435440 - DNA, 30 bp, Artificial Sequence
  Synthetic oligonucleotide
gggaataatttttagcaaatcctgtttact

SEQ ID NO: 435441 - DNA, 30 bp, Artificial Sequence
  Synthetic oligonucleotide
attgttaagtagtttatctatgattttact

SEQ ID NO: 435442 - DNA, 30 bp, Artificial Sequence
  Synthetic oligonucleotide
gaaagcccttaacaccggtacgcttttact

SEQ ID NO: 435443 - DNA, 30 bp, Artificial Sequence
  Synthetic oligonucleotide
gatgccgttaccagttagagttcttttact

SEQ ID NO: 435444 - DNA, 30 bp, Artificial Sequence
  Synthetic oligonucleotide
ctgacaatctgaaatgactggatttttact

SEQ ID NO: 435445 - DNA, 30 bp, Artificial Sequence
  Synthetic oligonucleotide
ccaagccatatatgtacgttgtaaaaacct

SEQ ID NO: 435446 - DNA, 30 bp, Artificial Sequence
  Synthetic oligonucleotide
tttgggaacagcggggtctaatagaaacct

SEQ ID NO: 435447 - DNA, 30 bp, Artificial Sequence
  Synthetic oligonucleotide
gtgcagctgtttccatagaatccgaaacct

SEQ ID NO: 435448 - DNA, 30 bp, Artificial Sequence
  Synthetic oligonucleotide
ccaactatggaattatcgttctataaacct

SEQ ID NO: 435449 - DNA, 30 bp, Artificial Sequence
  Synthetic oligonucleotide
ggtccttagagtcctcggtgcagacaacct

SEQ ID NO: 435450 - DNA, 30 bp, Artificial Sequence
  Synthetic oligonucleotide
agttaactgggaggcagaatcgcccaacct

SEQ ID NO: 435451 - DNA, 30 bp, Artificial Sequence
  Synthetic oligonucleotide
ggtattccgggcgcatttggacgccaacct

SEQ ID NO: 435452 - DNA, 30 bp, Artificial Sequence
  Synthetic oligonucleotide
taagcttgctaataattgcggccgcaacct

SEQ ID NO: 435453 - DNA, 30 bp, Artificial Sequence
  Synthetic oligonucleotide
tgctcagaaaacacccatgataaagaacct

SEQ ID NO: 435454 - DNA, 30 bp, Artificial Sequence
  Synthetic oligonucleotide
caaggtaaggtcaccaccgctgaagaacct

SEQ ID NO: 435455 - DNA, 30 bp, Artificial Sequence
  Synthetic oligonucleotide
ccatcacagatatctgccgtgtcagaacct

SEQ ID NO: 435456 - DNA, 30 bp, Artificial Sequence
  Synthetic oligonucleotide
tcacaggtgattatgacgcggtacgaacct

SEQ ID NO: 435457 - DNA, 30 bp, Artificial Sequence
  Synthetic oligonucleotide
cagtaccaatgctgaccaccagccgaacct

SEQ ID NO: 435458 - DNA, 31 bp, Artificial Sequence
  Synthetic oligonucleotide
aggcttggataagtcttaagctttcgaacct

SEQ ID NO: 435459 - DNA, 30 bp, Artificial Sequence
  Synthetic oligonucleotide
ggattgtttcacttcgtcccgtctgaacct

SEQ ID NO: 435460 - DNA, 30 bp, Artificial Sequence
  Synthetic oligonucleotide
tccttcgacacgtgtttaggacgtgaacct

SEQ ID NO: 435461 - DNA, 30 bp, Artificial Sequence
  Synthetic oligonucleotide
gtattctcggaattgttcccacaataacct

SEQ ID NO: 435462 - DNA, 30 bp, Artificial Sequence
  Synthetic oligonucleotide
ctggtccgaattatccgatactcataacct

SEQ ID NO: 435463 - DNA, 30 bp, Artificial Sequence
  Synthetic oligonucleotide
acaggaaggccaagacactagtcataacct

SEQ ID NO: 435464 - DNA, 30 bp, Artificial Sequence
  Synthetic oligonucleotide
agcatctatgaatcatggtccagataacct

SEQ ID NO: 435465 - DNA, 30 bp, Artificial Sequence
  Synthetic oligonucleotide
tgcacaccgttcacacggatgaactaacct

SEQ ID NO: 435466 - DNA, 30 bp, Artificial Sequence
  Synthetic oligonucleotide
atagccacattctcctgtatgctgtaacct

SEQ ID NO: 435467 - DNA, 30 bp, Artificial Sequence
  Synthetic oligonucleotide
tcgttaagtgggagatagctgtcttaacct

SEQ ID NO: 435468 - DNA, 30 bp, Artificial Sequence
  Synthetic oligonucleotide
atataggcaggtatacttggcctaacacct

SEQ ID NO: 435469 - DNA, 30 bp, Artificial Sequence
  Synthetic oligonucleotide
aatgccaatatgaacgatcttttaacacct

SEQ ID NO: 435470 - DNA, 30 bp, Artificial Sequence
  Synthetic oligonucleotide
gcatgcggtggaacttcgttccccacacct

SEQ ID NO: 435471 - DNA, 30 bp, Artificial Sequence
  Synthetic oligonucleotide
ttcgtccaagtataggtcaaccagacacct

SEQ ID NO: 435472 - DNA, 30 bp, Artificial Sequence
  Synthetic oligonucleotide
ctactaagcgggatgttagattagacacct

SEQ ID NO: 435473 - DNA, 30 bp, Artificial Sequence
  Synthetic oligonucleotide
gcgtgactcagtgtagtgtcgtatacacct

SEQ ID NO: 435474 - DNA, 30 bp, Artificial Sequence
  Synthetic oligonucleotide
aaagatttcatctcaattagtactacacct

SEQ ID NO: 435475 - DNA, 30 bp, Artificial Sequence
  Synthetic oligonucleotide
tcattatggttctgcgggtcgggtacacct

SEQ ID NO: 435476 - DNA, 30 bp, Artificial Sequence
  Synthetic oligonucleotide
tgtgttgggacgtttgcttcttaaccacct

SEQ ID NO: 435477 - DNA, 30 bp, Artificial Sequence
  Synthetic oligonucleotide
gaagttacacagagttaggtcgtaccacct

SEQ ID NO: 435478 - DNA, 30 bp, Artificial Sequence
  Synthetic oligonucleotide
tgacagtaagcatgtcacgcacgcccacct

SEQ ID NO: 435479 - DNA, 30 bp, Artificial Sequence
  Synthetic oligonucleotide
tgtgtctaatgtctaggatccactccacct

SEQ ID NO: 435480 - DNA, 30 bp, Artificial Sequence
  Synthetic oligonucleotide
gggtccggtggagggacgaggtctccacct

SEQ ID NO: 435481 - DNA, 30 bp, Artificial Sequence
  Synthetic oligonucleotide
tcggcttagacacccttattgccagcacct

SEQ ID NO: 435482 - DNA, 30 bp, Artificial Sequence
  Synthetic oligonucleotide
aaagatgacgttttccgcgggtgagcacct

SEQ ID NO: 435483 - DNA, 30 bp, Artificial Sequence
  Synthetic oligonucleotide
gtctttgccaagtagtttgagcgcgcacct

SEQ ID NO: 435484 - DNA, 30 bp, Artificial Sequence
  Synthetic oligonucleotide
tggattaaatccggggattcactcgcacct

SEQ ID NO: 435485 - DNA, 30 bp, Artificial Sequence
  Synthetic oligonucleotide
ggtgtcaatacgtgcgtaccctaggcacct

SEQ ID NO: 435486 - DNA, 30 bp, Artificial Sequence
  Synthetic oligonucleotide
gtgtacgggccgatacatggcgcggcacct

SEQ ID NO: 435487 - DNA, 30 bp, Artificial Sequence
  Synthetic oligonucleotide
gaaataatgaagccgacaagtagtgcacct

SEQ ID NO: 435488 - DNA, 30 bp, Artificial Sequence
  Synthetic oligonucleotide
gtaagatacttatgtctatccggtgcacct

SEQ ID NO: 435489 - DNA, 30 bp, Artificial Sequence
  Synthetic oligonucleotide
tattgaccacgcagacttagacaatcacct

SEQ ID NO: 435490 - DNA, 30 bp, Artificial Sequence
  Synthetic oligonucleotide
ttctacctggtgattaaccttgaatcacct

SEQ ID NO: 435491 - DNA, 30 bp, Artificial Sequence
  Synthetic oligonucleotide
gcgcccaaaggtaaattaatcgtctcacct

SEQ ID NO: 435492 - DNA, 30 bp, Artificial Sequence
  Synthetic oligonucleotide
ttatatcgacgattaaaacgaatgtcacct

SEQ ID NO: 435493 - DNA, 30 bp, Artificial Sequence
  Synthetic oligonucleotide
agtttcggttcgccaagtcaaaattcacct

SEQ ID NO: 435494 - DNA, 30 bp, Artificial Sequence
  Synthetic oligonucleotide
aaaaaccctttccttggtccagaaagacct

SEQ ID NO: 435495 - DNA, 30 bp, Artificial Sequence
  Synthetic oligonucleotide
cccgcgtcgggcctgttagccggaagacct

SEQ ID NO: 435496 - DNA, 30 bp, Artificial Sequence
  Synthetic oligonucleotide
gctaacgcctatttccagcctataagacct

SEQ ID NO: 435497 - DNA, 30 bp, Artificial Sequence
  Synthetic oligonucleotide
gcaataggttccagaaaatcactcagacct

SEQ ID NO: 435498 - DNA, 30 bp, Artificial Sequence
  Synthetic oligonucleotide
tgacttcgacactttctccgactcagacct

SEQ ID NO: 435499 - DNA, 30 bp, Artificial Sequence
  Synthetic oligonucleotide
attctacgatattctgtcttgcagagacct

SEQ ID NO: 435500 - DNA, 30 bp, Artificial Sequence
  Synthetic oligonucleotide
atcgagtgaagttttcaacgatagagacct

SEQ ID NO: 435501 - DNA, 30 bp, Artificial Sequence
  Synthetic oligonucleotide
tcgccgatgggttagctggagaggagacct

SEQ ID NO: 435502 - DNA, 30 bp, Artificial Sequence
  Synthetic oligonucleotide
gctatgaatgagtcggattctatgagacct

SEQ ID NO: 435503 - DNA, 30 bp, Artificial Sequence
  Synthetic oligonucleotide
gtgggctatgcacaacagtcgtttagacct

SEQ ID NO: 435504 - DNA, 30 bp, Artificial Sequence
  Synthetic oligonucleotide
ggaaaatatggcccatgctggcgacgacct

SEQ ID NO: 435505 - DNA, 30 bp, Artificial Sequence
  Synthetic oligonucleotide
cgcggtacggaaatcagcttttgccgacct

SEQ ID NO: 435506 - DNA, 30 bp, Artificial Sequence
  Synthetic oligonucleotide
cccctctgagtccataatagtggtcgacct

SEQ ID NO: 435507 - DNA, 30 bp, Artificial Sequence
  Synthetic oligonucleotide
tgcgagtttcgtcctttaacctaaggacct

SEQ ID NO: 435508 - DNA, 29 bp, Artificial Sequence
  Synthetic oligonucleotide
tagcttatactccgctggcgcgaggacct

SEQ ID NO: 435509 - DNA, 30 bp, Artificial Sequence
  Synthetic oligonucleotide
ggtccgtgatatatctatgtctgaggacct

SEQ ID NO: 435510 - DNA, 30 bp, Artificial Sequence
  Synthetic oligonucleotide
catatgctactagcttatcctataggacct

SEQ ID NO: 435511 - DNA, 30 bp, Artificial Sequence
  Synthetic oligonucleotide
aaccgttttataacattcaaaggcggacct

SEQ ID NO: 435512 - DNA, 30 bp, Artificial Sequence
  Synthetic oligonucleotide
tataaatgcgggacgacagcccttggacct

SEQ ID NO: 435513 - DNA, 30 bp, Artificial Sequence
  Synthetic oligonucleotide
tgcccatttctagactgccgttaatgacct

SEQ ID NO: 435514 - DNA, 30 bp, Artificial Sequence
  Synthetic oligonucleotide
ggtccgctctcttctttctgtagatgacct

SEQ ID NO: 435515 - DNA, 30 bp, Artificial Sequence
  Synthetic oligonucleotide
gatggagccagacatttcaatcgatgacct

SEQ ID NO: 435516 - DNA, 30 bp, Artificial Sequence
  Synthetic oligonucleotide
gggaattagggcgagatgggacactgacct

SEQ ID NO: 435517 - DNA, 30 bp, Artificial Sequence
  Synthetic oligonucleotide
cgacgcttctatcgggtccatcattgacct

SEQ ID NO: 435518 - DNA, 30 bp, Artificial Sequence
  Synthetic oligonucleotide
aacctgcggatcagcattaaagccatacct

SEQ ID NO: 435519 - DNA, 30 bp, Artificial Sequence
  Synthetic oligonucleotide
taacaacgtgcgcgcgatggtatcatacct

SEQ ID NO: 435520 - DNA, 30 bp, Artificial Sequence
  Synthetic oligonucleotide
tggtgacaacgtcgagtcaaacgtatacct

SEQ ID NO: 435521 - DNA, 30 bp, Artificial Sequence
  Synthetic oligonucleotide
cgtccttgatgatctacgctgcgtatacct

SEQ ID NO: 435522 - DNA, 30 bp, Artificial Sequence
  Synthetic oligonucleotide
tgacttggcgtggcgacaatacttatacct

SEQ ID NO: 435523 - DNA, 30 bp, Artificial Sequence
  Synthetic oligonucleotide
tacgtcaaaaactccaaccgcggcctacct

SEQ ID NO: 435524 - DNA, 30 bp, Artificial Sequence
  Synthetic oligonucleotide
ccgtcttaaatgcacaacggctgtctacct

SEQ ID NO: 435525 - DNA, 30 bp, Artificial Sequence
  Synthetic oligonucleotide
ctcacgttgccagcaggggatgtcgtacct

SEQ ID NO: 435526 - DNA, 31 bp, Artificial Sequence
  Synthetic oligonucleotide
gatgtgcgcgaatggggtctacttcgtacct

SEQ ID NO: 435527 - DNA, 30 bp, Artificial Sequence
  Synthetic oligonucleotide
gtgtttgaaattgggcgaccaccggtacct

SEQ ID NO: 435528 - DNA, 29 bp, Artificial Sequence
  Synthetic oligonucleotide
agcagcacaatcatccctatggtgtacct

SEQ ID NO: 435529 - DNA, 30 bp, Artificial Sequence
  Synthetic oligonucleotide
caagggaatcccgggctctgccttgtacct

SEQ ID NO: 435530 - DNA, 30 bp, Artificial Sequence
  Synthetic oligonucleotide
cctttagcccttcgattcgcaaacttacct

SEQ ID NO: 435531 - DNA, 30 bp, Artificial Sequence
  Synthetic oligonucleotide
tacagcagttagtcgataggacacttacct

SEQ ID NO: 435532 - DNA, 30 bp, Artificial Sequence
  Synthetic oligonucleotide
caggcgtagactatatgtcatagaaaccct

SEQ ID NO: 435533 - DNA, 30 bp, Artificial Sequence
  Synthetic oligonucleotide
gtcgtatatggtttcatcccacgaaaccct

SEQ ID NO: 435534 - DNA, 30 bp, Artificial Sequence
  Synthetic oligonucleotide
gtagcggtctcggagcctggtagcaaccct

SEQ ID NO: 435535 - DNA, 30 bp, Artificial Sequence
  Synthetic oligonucleotide
atagcaggtcgctactaatggcagaaccct

SEQ ID NO: 435536 - DNA, 30 bp, Artificial Sequence
  Synthetic oligonucleotide
aggcattgttgccattagtatggtaaccct

SEQ ID NO: 435537 - DNA, 30 bp, Artificial Sequence
  Synthetic oligonucleotide
ccctgtttgaaaattagatgttcacaccct

SEQ ID NO: 435538 - DNA, 30 bp, Artificial Sequence
  Synthetic oligonucleotide
gaagtcatgcgtcagtttggggtccaccct

SEQ ID NO: 435539 - DNA, 30 bp, Artificial Sequence
  Synthetic oligonucleotide
ggtcgtgagatatattggccaaggcaccct

SEQ ID NO: 435540 - DNA, 30 bp, Artificial Sequence
  Synthetic oligonucleotide
gagtagtagtgacctatcatgaaagaccct

SEQ ID NO: 435541 - DNA, 30 bp, Artificial Sequence
  Synthetic oligonucleotide
atatgattgtaataacatgatggggaccct

SEQ ID NO: 435542 - DNA, 30 bp, Artificial Sequence
  Synthetic oligonucleotide
gatgtaagtgcggtcactcaatgtgaccct

SEQ ID NO: 435543 - DNA, 30 bp, Artificial Sequence
  Synthetic oligonucleotide
caaacaacttttggttgctgatcataccct

SEQ ID NO: 435544 - DNA, 30 bp, Artificial Sequence
  Synthetic oligonucleotide
ccgtatacagtcaatctggatatataccct

SEQ ID NO: 435545 - DNA, 30 bp, Artificial Sequence
  Synthetic oligonucleotide
cctgtggtttggtggcatacatcctaccct

SEQ ID NO: 435546 - DNA, 30 bp, Artificial Sequence
  Synthetic oligonucleotide
gctagggtgccacgtttgactaagtaccct

SEQ ID NO: 435547 - DNA, 30 bp, Artificial Sequence
  Synthetic oligonucleotide
cccctggacgaggtgaacgcgccgtaccct

SEQ ID NO: 435548 - DNA, 30 bp, Artificial Sequence
  Synthetic oligonucleotide
aattttacattcagctacggtatgtaccct

SEQ ID NO: 435549 - DNA, 30 bp, Artificial Sequence
  Synthetic oligonucleotide
tagcttagaatgtgtacgggggattaccct

SEQ ID NO: 435550 - DNA, 30 bp, Artificial Sequence
  Synthetic oligonucleotide
ttaatggtttcgatgaatgtttacacccct

SEQ ID NO: 435551 - DNA, 30 bp, Artificial Sequence
  Synthetic oligonucleotide
gcgagggtgactgaccgaacccgcacccct

SEQ ID NO: 435552 - DNA, 30 bp, Artificial Sequence
  Synthetic oligonucleotide
agctactggggtgccgggatatgcacccct

SEQ ID NO: 435553 - DNA, 30 bp, Artificial Sequence
  Synthetic oligonucleotide
gccaaggggaagcgtgaccgctctacccct

SEQ ID NO: 435554 - DNA, 30 bp, Artificial Sequence
  Synthetic oligonucleotide
gtctgcgattcgggattttagggtacccct

SEQ ID NO: 435555 - DNA, 30 bp, Artificial Sequence
  Synthetic oligonucleotide
tgaccgccgtcataagagctgaatccccct

SEQ ID NO: 435556 - DNA, 30 bp, Artificial Sequence
  Synthetic oligonucleotide
agtgccgggtgtcaagtcaggtctccccct

SEQ ID NO: 435557 - DNA, 30 bp, Artificial Sequence
  Synthetic oligonucleotide
agaggctccttgtatgccgctcttccccct

SEQ ID NO: 435558 - DNA, 30 bp, Artificial Sequence
  Synthetic oligonucleotide
gcggccattttgggcccgatatgatcccct

SEQ ID NO: 435559 - DNA, 30 bp, Artificial Sequence
  Synthetic oligonucleotide
attggatgtccagccacataggactcccct

SEQ ID NO: 435560 - DNA, 30 bp, Artificial Sequence
  Synthetic oligonucleotide
aacttcactggtcaatatcaggagtcccct

SEQ ID NO: 435561 - DNA, 30 bp, Artificial Sequence
  Synthetic oligonucleotide
gccgagctactgggacccgcttattcccct

SEQ ID NO: 435562 - DNA, 31 bp, Artificial Sequence
  Synthetic oligonucleotide
actgaaatttagtgctcaaagttattcccct

SEQ ID NO: 435563 - DNA, 30 bp, Artificial Sequence
  Synthetic oligonucleotide
ggctcccagtataaggagccgcgttcccct

SEQ ID NO: 435564 - DNA, 30 bp, Artificial Sequence
  Synthetic oligonucleotide
acaaagattcgactctaagtcgaaagccct

SEQ ID NO: 435565 - DNA, 30 bp, Artificial Sequence
  Synthetic oligonucleotide
ggcggcatggggtgtctaatggaaagccct

SEQ ID NO: 435566 - DNA, 29 bp, Artificial Sequence
  Synthetic oligonucleotide
agatgatcgctagctctagctaaagccct

SEQ ID NO: 435567 - DNA, 30 bp, Artificial Sequence
  Synthetic oligonucleotide
gtctactgaaactgatgcacaagcagccct

SEQ ID NO: 435568 - DNA, 30 bp, Artificial Sequence
  Synthetic oligonucleotide
gcagcttcaaccatgtctaatcggagccct

SEQ ID NO: 435569 - DNA, 30 bp, Artificial Sequence
  Synthetic oligonucleotide
agtcgttcctcggacccatcagtgagccct

SEQ ID NO: 435570 - DNA, 30 bp, Artificial Sequence
  Synthetic oligonucleotide
ggagaaaattatgtgttttctgctagccct

SEQ ID NO: 435571 - DNA, 30 bp, Artificial Sequence
  Synthetic oligonucleotide
attgtttgggcgactctcgtgccgcgccct

SEQ ID NO: 435572 - DNA, 30 bp, Artificial Sequence
  Synthetic oligonucleotide
ttttactaacggcttaaagtatggcgccct

SEQ ID NO: 435573 - DNA, 30 bp, Artificial Sequence
  Synthetic oligonucleotide
tggtcaataggcataggaatcctgcgccct

SEQ ID NO: 435574 - DNA, 30 bp, Artificial Sequence
  Synthetic oligonucleotide
aggagtatgaaatttaactgagtgcgccct

SEQ ID NO: 435575 - DNA, 30 bp, Artificial Sequence
  Synthetic oligonucleotide
ggtcgcgaacggatgcggtcggccggccct

SEQ ID NO: 435576 - DNA, 30 bp, Artificial Sequence
  Synthetic oligonucleotide
aaccccaagaaaagagctcattgcggccct

SEQ ID NO: 435577 - DNA, 30 bp, Artificial Sequence
  Synthetic oligonucleotide
tgttcaatcgcagagtcagtcaagggccct

SEQ ID NO: 435578 - DNA, 30 bp, Artificial Sequence
  Synthetic oligonucleotide
ataatggtgcagctcgagagtaagggccct

SEQ ID NO: 435579 - DNA, 30 bp, Artificial Sequence
  Synthetic oligonucleotide
tagtaggatagttcacgggtcattggccct

SEQ ID NO: 435580 - DNA, 30 bp, Artificial Sequence
  Synthetic oligonucleotide
gcctatagaaaacagctaatagttggccct

SEQ ID NO: 435581 - DNA, 30 bp, Artificial Sequence
  Synthetic oligonucleotide
aaagccattaacgtagaggccgttggccct

SEQ ID NO: 435582 - DNA, 30 bp, Artificial Sequence
  Synthetic oligonucleotide
cagtggtccacactcaacatatttggccct

SEQ ID NO: 435583 - DNA, 30 bp, Artificial Sequence
  Synthetic oligonucleotide
gtgtcgtgtgctgcgatgctaaaatgccct

SEQ ID NO: 435584 - DNA, 30 bp, Artificial Sequence
  Synthetic oligonucleotide
aatctcagctaaacaaggagtcagtgccct

SEQ ID NO: 435585 - DNA, 30 bp, Artificial Sequence
  Synthetic oligonucleotide
atggtcaaaagtatcgcagaacggtgccct

SEQ ID NO: 435586 - DNA, 28 bp, Artificial Sequence
  Synthetic oligonucleotide
cccctctcgctttctacctttgtgccct

SEQ ID NO: 435587 - DNA, 30 bp, Artificial Sequence
  Synthetic oligonucleotide
cccctcgcgctttctattcctttgtgccct

SEQ ID NO: 435588 - DNA, 30 bp, Artificial Sequence
  Synthetic oligonucleotide
agtggattgggagcaatggagcaaatccct

SEQ ID NO: 435589 - DNA, 30 bp, Artificial Sequence
  Synthetic oligonucleotide
gaccacacaagcccccgcgctggaatccct

SEQ ID NO: 435590 - DNA, 30 bp, Artificial Sequence
  Synthetic oligonucleotide
tatctgataaatcgttgggtccctatccct

SEQ ID NO: 435591 - DNA, 30 bp, Artificial Sequence
  Synthetic oligonucleotide
gagtataagcctccactatacgacctccct

SEQ ID NO: 435592 - DNA, 30 bp, Artificial Sequence
  Synthetic oligonucleotide
gggccccagaggggatcagacaccctccct

SEQ ID NO: 435593 - DNA, 30 bp, Artificial Sequence
  Synthetic oligonucleotide
taccatcgctcgggtaaggggaccctccct

SEQ ID NO: 435594 - DNA, 30 bp, Artificial Sequence
  Synthetic oligonucleotide
acccttgtggcggacaaattgatgctccct

SEQ ID NO: 435595 - DNA, 30 bp, Artificial Sequence
  Synthetic oligonucleotide
gtctgacgcaacttatctagcttgctccct

SEQ ID NO: 435596 - DNA, 30 bp, Artificial Sequence
  Synthetic oligonucleotide
tacgtagacccaagccccgatactctccct

SEQ ID NO: 435597 - DNA, 30 bp, Artificial Sequence
  Synthetic oligonucleotide
actgagtgccaattgagctactgtctccct

SEQ ID NO: 435598 - DNA, 31 bp, Artificial Sequence
  Synthetic oligonucleotide
ataaagtgatcgcgctgcggcatcagtccct

SEQ ID NO: 435599 - DNA, 30 bp, Artificial Sequence
  Synthetic oligonucleotide
actcatattcgccgcctactcgaggtccct

SEQ ID NO: 435600 - DNA, 30 bp, Artificial Sequence
  Synthetic oligonucleotide
atcaagacgctgctgccggtcagggtccct

SEQ ID NO: 435601 - DNA, 30 bp, Artificial Sequence
  Synthetic oligonucleotide
gctatagtacttgcgtaaaaataattccct

SEQ ID NO: 435602 - DNA, 30 bp, Artificial Sequence
  Synthetic oligonucleotide
ccactatttcgacatgctccaacgttccct

SEQ ID NO: 435603 - DNA, 30 bp, Artificial Sequence
  Synthetic oligonucleotide
tcgcacttgggaactcgcttttcgttccct

SEQ ID NO: 435604 - DNA, 30 bp, Artificial Sequence
  Synthetic oligonucleotide
gagcgaagagggaacatttgatggttccct

SEQ ID NO: 435605 - DNA, 30 bp, Artificial Sequence
  Synthetic oligonucleotide
gtcggaacacaactttataaagtgttccct

SEQ ID NO: 435606 - DNA, 30 bp, Artificial Sequence
  Synthetic oligonucleotide
agagggcctctcaagtaaccccctttccct

SEQ ID NO: 435607 - DNA, 30 bp, Artificial Sequence
  Synthetic oligonucleotide
atttaacgtagtgcgtcattgcaaaagcct

SEQ ID NO: 435608 - DNA, 30 bp, Artificial Sequence
  Synthetic oligonucleotide
aaggtcttgcggctgaagcagcccaagcct

SEQ ID NO: 435609 - DNA, 30 bp, Artificial Sequence
  Synthetic oligonucleotide
aggttgcgtagaggctagcgtggcaagcct

SEQ ID NO: 435610 - DNA, 30 bp, Artificial Sequence
  Synthetic oligonucleotide
ttcgatatagttggtgtaacatgcaagcct

SEQ ID NO: 435611 - DNA, 30 bp, Artificial Sequence
  Synthetic oligonucleotide
ctacgcccatgcatcattgggatcaagcct

SEQ ID NO: 435612 - DNA, 30 bp, Artificial Sequence
  Synthetic oligonucleotide
aataactattgatgcgagacgtagaagcct

SEQ ID NO: 435613 - DNA, 40 bp, Artificial Sequence
  Synthetic oligonucleotide
atttactaactgttcattgtcattatcttatatacagcct

SEQ ID NO: 435614 - DNA, 30 bp, Artificial Sequence
  Synthetic oligonucleotide
ccgcaaggaaggttgggacctttgcagcct

SEQ ID NO: 435615 - DNA, 30 bp, Artificial Sequence
  Synthetic oligonucleotide
agttatgccgggattgttactgacgagcct

SEQ ID NO: 435616 - DNA, 30 bp, Artificial Sequence
  Synthetic oligonucleotide
gtaccggactcgaagttaagacgcgagcct

SEQ ID NO: 435617 - DNA, 30 bp, Artificial Sequence
  Synthetic oligonucleotide
ccggtattcctcttctaatgtcaggagcct

SEQ ID NO: 435618 - DNA, 30 bp, Artificial Sequence
  Synthetic oligonucleotide
tggaggacgcctcgcccctggccggagcct

SEQ ID NO: 435619 - DNA, 30 bp, Artificial Sequence
  Synthetic oligonucleotide
ggccacttctgatgcccaatcgcggagcct

SEQ ID NO: 435620 - DNA, 30 bp, Artificial Sequence
  Synthetic oligonucleotide
agcttgtattaacgcgagcctagggagcct

SEQ ID NO: 435621 - DNA, 30 bp, Artificial Sequence
  Synthetic oligonucleotide
tcagaattcgggatggccagttgtgagcct

SEQ ID NO: 435622 - DNA, 30 bp, Artificial Sequence
  Synthetic oligonucleotide
gtcggttttcatggactctgcccatagcct

SEQ ID NO: 435623 - DNA, 30 bp, Artificial Sequence
  Synthetic oligonucleotide
cctttgccctgccttaagtttgcatagcct

SEQ ID NO: 435624 - DNA, 30 bp, Artificial Sequence
  Synthetic oligonucleotide
taatgtatatactctagagagatttagcct

SEQ ID NO: 435625 - DNA, 30 bp, Artificial Sequence
  Synthetic oligonucleotide
agcaatgaagaggtgaagacggtttagcct

SEQ ID NO: 435626 - DNA, 30 bp, Artificial Sequence
  Synthetic oligonucleotide
aacaattgcgtcacacgctaattaacgcct

SEQ ID NO: 435627 - DNA, 30 bp, Artificial Sequence
  Synthetic oligonucleotide
gtgcaaagcgtctcggcttacacgacgcct

SEQ ID NO: 435628 - DNA, 30 bp, Artificial Sequence
  Synthetic oligonucleotide
ctgtgggttgttcatacataagaaccgcct

SEQ ID NO: 435629 - DNA, 30 bp, Artificial Sequence
  Synthetic oligonucleotide
agtataccgttgaagtaatagtgaccgcct

SEQ ID NO: 435630 - DNA, 30 bp, Artificial Sequence
  Synthetic oligonucleotide
atcgctctagtcgtctaactgtgcccgcct

SEQ ID NO: 435631 - DNA, 30 bp, Artificial Sequence
  Synthetic oligonucleotide
atcaataacaatccgggcgcgaagccgcct

SEQ ID NO: 435632 - DNA, 30 bp, Artificial Sequence
  Synthetic oligonucleotide
accgatactgattctaaccgttttccgcct

SEQ ID NO: 435633 - DNA, 30 bp, Artificial Sequence
  Synthetic oligonucleotide
tccggtagattttatgtgtgtgaagcgcct

SEQ ID NO: 435634 - DNA, 30 bp, Artificial Sequence
  Synthetic oligonucleotide
ctcagaaccggcattttggattacgcgcct

SEQ ID NO: 435635 - DNA, 30 bp, Artificial Sequence
  Synthetic oligonucleotide
tgcggggatatttctgtgcccgccgcgcct

SEQ ID NO: 435636 - DNA, 30 bp, Artificial Sequence
  Synthetic oligonucleotide
ttatgagcgattacccaggccagcgcgcct

SEQ ID NO: 435637 - DNA, 30 bp, Artificial Sequence
  Synthetic oligonucleotide
cgcttatgggatggccgtacccgcgcgcct

SEQ ID NO: 435638 - DNA, 30 bp, Artificial Sequence
  Synthetic oligonucleotide
actgttgtagtcccggaccgtctcgcgcct

SEQ ID NO: 435639 - DNA, 30 bp, Artificial Sequence
  Synthetic oligonucleotide
agtgtcacggtcatggcaattgtcgcgcct

SEQ ID NO: 435640 - DNA, 30 bp, Artificial Sequence
  Synthetic oligonucleotide
cggacaagtagcgccaaaaggtaggcgcct

SEQ ID NO: 435641 - DNA, 30 bp, Artificial Sequence
  Synthetic oligonucleotide
tatgtacaggctctgatgggcccggcgcct

SEQ ID NO: 435642 - DNA, 30 bp, Artificial Sequence
  Synthetic oligonucleotide
ctcgcttttagccattcggctgcggcgcct

SEQ ID NO: 435643 - DNA, 30 bp, Artificial Sequence
  Synthetic oligonucleotide
aagagtttcgtagttggtgctcctgcgcct

SEQ ID NO: 435644 - DNA, 30 bp, Artificial Sequence
  Synthetic oligonucleotide
ctccgaccctaaggtttgcgccaatcgcct

SEQ ID NO: 435645 - DNA, 30 bp, Artificial Sequence
  Synthetic oligonucleotide
cataggaggtccccaggttatccatcgcct

SEQ ID NO: 435646 - DNA, 30 bp, Artificial Sequence
  Synthetic oligonucleotide
tcagttgtcccgatttcgaaactatcgcct

SEQ ID NO: 435647 - DNA, 30 bp, Artificial Sequence
  Synthetic oligonucleotide
attgttgctatcggatgagatggttcgcct

SEQ ID NO: 435648 - DNA, 30 bp, Artificial Sequence
  Synthetic oligonucleotide
gactgtccatatgctttaagaggaaggcct

SEQ ID NO: 435649 - DNA, 30 bp, Artificial Sequence
  Synthetic oligonucleotide
gatccctgagccagcccacacctcaggcct

SEQ ID NO: 435650 - DNA, 30 bp, Artificial Sequence
  Synthetic oligonucleotide
taattgtcataggtgaccgcaaagaggcct

SEQ ID NO: 435651 - DNA, 30 bp, Artificial Sequence
  Synthetic oligonucleotide
gcgagctaatcctatcatcgtcggaggcct

SEQ ID NO: 435652 - DNA, 30 bp, Artificial Sequence
  Synthetic oligonucleotide
gtagtgaagggcaagcccaatatgaggcct

SEQ ID NO: 435653 - DNA, 30 bp, Artificial Sequence
  Synthetic oligonucleotide
actagatttttcagtactttagaacggcct

SEQ ID NO: 435654 - DNA, 30 bp, Artificial Sequence
  Synthetic oligonucleotide
agagcaattttactgcgttaccgacggcct

SEQ ID NO: 435655 - DNA, 30 bp, Artificial Sequence
  Synthetic oligonucleotide
tgctagtactgtctgtacgcactccggcct

SEQ ID NO: 435656 - DNA, 30 bp, Artificial Sequence
  Synthetic oligonucleotide
cggagtacttacgggttggataagcggcct

SEQ ID NO: 435657 - DNA, 30 bp, Artificial Sequence
  Synthetic oligonucleotide
tcggttaggtaacgttttagccagcggcct

SEQ ID NO: 435658 - DNA, 30 bp, Artificial Sequence
  Synthetic oligonucleotide
cgcagcgagatagcaagtcaatcagggcct

SEQ ID NO: 435659 - DNA, 30 bp, Artificial Sequence
  Synthetic oligonucleotide
tataaaattatctattcagcaagagggcct

SEQ ID NO: 435660 - DNA, 30 bp, Artificial Sequence
  Synthetic oligonucleotide
tcagtaacttatcagggtatcttagggcct

SEQ ID NO: 435661 - DNA, 30 bp, Artificial Sequence
  Synthetic oligonucleotide
gtgtcgttcgtaaatcgtcattccgggcct

SEQ ID NO: 435662 - DNA, 30 bp, Artificial Sequence
  Synthetic oligonucleotide
gtgctcaagtagtgcaggctgatggggcct

SEQ ID NO: 435663 - DNA, 30 bp, Artificial Sequence
  Synthetic oligonucleotide
ccccgaggatggtagtcgatcctggggcct

SEQ ID NO: 435664 - DNA, 30 bp, Artificial Sequence
  Synthetic oligonucleotide
ttaggacggcaactagatgctaatgggcct

SEQ ID NO: 435665 - DNA, 30 bp, Artificial Sequence
  Synthetic oligonucleotide
tttagcgacgtagtttcgggtaatgggcct

SEQ ID NO: 435666 - DNA, 30 bp, Artificial Sequence
  Synthetic oligonucleotide
aggcttgttggacggtcagcgagatggcct

SEQ ID NO: 435667 - DNA, 30 bp, Artificial Sequence
  Synthetic oligonucleotide
gtgcagacgtgagggtacgatcgctggcct

SEQ ID NO: 435668 - DNA, 30 bp, Artificial Sequence
  Synthetic oligonucleotide
aacaaggtgccagcaaaactgaggtggcct

SEQ ID NO: 435669 - DNA, 30 bp, Artificial Sequence
  Synthetic oligonucleotide
catagttaactgtgtcacacttggtggcct

SEQ ID NO: 435670 - DNA, 30 bp, Artificial Sequence
  Synthetic oligonucleotide
aagtcactggaagagcacatttattggcct

SEQ ID NO: 435671 - DNA, 30 bp, Artificial Sequence
  Synthetic oligonucleotide
tctagatataggaataaatgcatttggcct

SEQ ID NO: 435672 - DNA, 30 bp, Artificial Sequence
  Synthetic oligonucleotide
cagtaattggtatcgtgttcaagaatgcct

SEQ ID NO: 435673 - DNA, 30 bp, Artificial Sequence
  Synthetic oligonucleotide
tgggcctacggcttccggggttgaatgcct

SEQ ID NO: 435674 - DNA, 30 bp, Artificial Sequence
  Synthetic oligonucleotide
tgtattgttatattagtctcgttaatgcct

SEQ ID NO: 435675 - DNA, 30 bp, Artificial Sequence
  Synthetic oligonucleotide
ctaatttgagagttactcctacccatgcct

SEQ ID NO: 435676 - DNA, 30 bp, Artificial Sequence
  Synthetic oligonucleotide
cagacaggtacaagggattttatcatgcct

SEQ ID NO: 435677 - DNA, 30 bp, Artificial Sequence
  Synthetic oligonucleotide
cgcatatccggaaaatacatccggatgcct

SEQ ID NO: 435678 - DNA, 30 bp, Artificial Sequence
  Synthetic oligonucleotide
ctgtatttattgttggaggtagtgatgcct

SEQ ID NO: 435679 - DNA, 30 bp, Artificial Sequence
  Synthetic oligonucleotide
ggccttgctctaatacactcggcactgcct

SEQ ID NO: 435680 - DNA, 30 bp, Artificial Sequence
  Synthetic oligonucleotide
cgttcggccgggtgatgggctggactgcct

SEQ ID NO: 435681 - DNA, 30 bp, Artificial Sequence
  Synthetic oligonucleotide
ggaagtgtagcaggcacaggtgtactgcct

SEQ ID NO: 435682 - DNA, 30 bp, Artificial Sequence
  Synthetic oligonucleotide
aaatggatcctactaaggtagtccctgcct

SEQ ID NO: 435683 - DNA, 30 bp, Artificial Sequence
  Synthetic oligonucleotide
ggggggaccgctgtgacagtcaatctgcct

SEQ ID NO: 435684 - DNA, 30 bp, Artificial Sequence
  Synthetic oligonucleotide
ctgacctacagtggaacgaagcttctgcct

SEQ ID NO: 435685 - DNA, 30 bp, Artificial Sequence
  Synthetic oligonucleotide
gttatacgagccactgaaaagtttctgcct

SEQ ID NO: 435686 - DNA, 30 bp, Artificial Sequence
  Synthetic oligonucleotide
tttgtcatagtccaaaacctaggagtgcct

SEQ ID NO: 435687 - DNA, 30 bp, Artificial Sequence
  Synthetic oligonucleotide
gacgcattttagcggcaaaatatagtgcct

SEQ ID NO: 435688 - DNA, 30 bp, Artificial Sequence
  Synthetic oligonucleotide
tatcgtatacatcttaccaccggggtgcct

SEQ ID NO: 435689 - DNA, 30 bp, Artificial Sequence
  Synthetic oligonucleotide
aagttagcgtttgtagtcgtctatgtgcct

SEQ ID NO: 435690 - DNA, 30 bp, Artificial Sequence
  Synthetic oligonucleotide
aggataactttaggtgcccgccctgtgcct

SEQ ID NO: 435691 - DNA, 30 bp, Artificial Sequence
  Synthetic oligonucleotide
gtgcagtgagcgcttccgcacggtgtgcct

SEQ ID NO: 435692 - DNA, 30 bp, Artificial Sequence
  Synthetic oligonucleotide
atctcacggccctaaatagatacattgcct

SEQ ID NO: 435693 - DNA, 30 bp, Artificial Sequence
  Synthetic oligonucleotide
tctactcgcacgccgcgggtatagttgcct

SEQ ID NO: 435694 - DNA, 30 bp, Artificial Sequence
  Synthetic oligonucleotide
aatggggcgggtcccatgaccctgttgcct

SEQ ID NO: 435695 - DNA, 30 bp, Artificial Sequence
  Synthetic oligonucleotide
aagtattttgatagctttcaagtgttgcct

SEQ ID NO: 435696 - DNA, 30 bp, Artificial Sequence
  Synthetic oligonucleotide
gtggtcgacacctgtttaagaaatttgcct

SEQ ID NO: 435697 - DNA, 30 bp, Artificial Sequence
  Synthetic oligonucleotide
tgggggtaaggttgaccggaaattttgcct

SEQ ID NO: 435698 - DNA, 30 bp, Artificial Sequence
  Synthetic oligonucleotide
cctctttcatctctgaaacccagaaatcct

SEQ ID NO: 435699 - DNA, 30 bp, Artificial Sequence
  Synthetic oligonucleotide
agtcctcgctggaccgcgaggcgaaatcct

SEQ ID NO: 435700 - DNA, 30 bp, Artificial Sequence
  Synthetic oligonucleotide
ggactagggtctgaacaaactatcaatcct

SEQ ID NO: 435701 - DNA, 30 bp, Artificial Sequence
  Synthetic oligonucleotide
acaattcatgctgtgatgtcgtagaatcct

SEQ ID NO: 435702 - DNA, 30 bp, Artificial Sequence
  Synthetic oligonucleotide
tacttttagcggtagccgcgcacacatcct

SEQ ID NO: 435703 - DNA, 30 bp, Artificial Sequence
  Synthetic oligonucleotide
caaaatggccatttggtaggcttccatcct

SEQ ID NO: 435704 - DNA, 30 bp, Artificial Sequence
  Synthetic oligonucleotide
aattgatctaggccttttcgggcgcatcct

SEQ ID NO: 435705 - DNA, 30 bp, Artificial Sequence
  Synthetic oligonucleotide
gggccccggattagggcgcgccttcatcct

SEQ ID NO: 435706 - DNA, 30 bp, Artificial Sequence
  Synthetic oligonucleotide
atgaactggggtgcatgacgataagatcct

SEQ ID NO: 435707 - DNA, 30 bp, Artificial Sequence
  Synthetic oligonucleotide
gacctcacccaagggttcattggggatcct

SEQ ID NO: 435708 - DNA, 30 bp, Artificial Sequence
  Synthetic oligonucleotide
ccagtcgcgaacggcctcagtaatgatcct

SEQ ID NO: 435709 - DNA, 30 bp, Artificial Sequence
  Synthetic oligonucleotide
attcattaatgccagcgttcgcatgatcct

SEQ ID NO: 435710 - DNA, 30 bp, Artificial Sequence
  Synthetic oligonucleotide
ggtagcaaactctaactctgccgatatcct

SEQ ID NO: 435711 - DNA, 30 bp, Artificial Sequence
  Synthetic oligonucleotide
gtgcgagtgttcgtatccgacatatatcct

SEQ ID NO: 435712 - DNA, 30 bp, Artificial Sequence
  Synthetic oligonucleotide
ttgcgagactcaccatgatgattctatcct

SEQ ID NO: 435713 - DNA, 30 bp, Artificial Sequence
  Synthetic oligonucleotide
atagtttcgctaagacatctcaagtatcct

SEQ ID NO: 435714 - DNA, 30 bp, Artificial Sequence
  Synthetic oligonucleotide
gtgttactaatatagaggtaactcactcct

SEQ ID NO: 435715 - DNA, 30 bp, Artificial Sequence
  Synthetic oligonucleotide
aggctcctatagatggggctagctactcct

SEQ ID NO: 435716 - DNA, 30 bp, Artificial Sequence
  Synthetic oligonucleotide
ctatgcccggatcgggaaggagttactcct

SEQ ID NO: 435717 - DNA, 30 bp, Artificial Sequence
  Synthetic oligonucleotide
tttttcgatcgtgccagcccttcacctcct

SEQ ID NO: 435718 - DNA, 30 bp, Artificial Sequence
  Synthetic oligonucleotide
gggtacaccttctcaagctattaagctcct

SEQ ID NO: 435719 - DNA, 30 bp, Artificial Sequence
  Synthetic oligonucleotide
gcctaagcgtcggaataggccaacgctcct

SEQ ID NO: 435720 - DNA, 30 bp, Artificial Sequence
  Synthetic oligonucleotide
tgtgtattgtatatacgcaccgaggctcct

SEQ ID NO: 435721 - DNA, 30 bp, Artificial Sequence
  Synthetic oligonucleotide
cggcggcaatgccaggaattgggctctcct

SEQ ID NO: 435722 - DNA, 30 bp, Artificial Sequence
  Synthetic oligonucleotide
cttgttttctcggtgatcagtgcgtctcct

SEQ ID NO: 435723 - DNA, 30 bp, Artificial Sequence
  Synthetic oligonucleotide
aataaatggaccctttctaatcattctcct

SEQ ID NO: 435724 - DNA, 30 bp, Artificial Sequence
  Synthetic oligonucleotide
gactcgataggagttgaccaaacttctcct

SEQ ID NO: 435725 - DNA, 30 bp, Artificial Sequence
  Synthetic oligonucleotide
aagttatttccgcatagatacagttctcct

SEQ ID NO: 435726 - DNA, 30 bp, Artificial Sequence
  Synthetic oligonucleotide
ctgcaggctgcgatcaatttctgttctcct

SEQ ID NO: 435727 - DNA, 30 bp, Artificial Sequence
  Synthetic oligonucleotide
attcatacgctgtctcggaaagtttctcct

SEQ ID NO: 435728 - DNA, 30 bp, Artificial Sequence
  Synthetic oligonucleotide
gactcctcgaagtatttccaaacgagtcct

SEQ ID NO: 435729 - DNA, 30 bp, Artificial Sequence
  Synthetic oligonucleotide
caaccgtctgcagtgtcatagtggagtcct

SEQ ID NO: 435730 - DNA, 30 bp, Artificial Sequence
  Synthetic oligonucleotide
atcacttgtagcccgcctggcattagtcct

SEQ ID NO: 435731 - DNA, 30 bp, Artificial Sequence
  Synthetic oligonucleotide
taagtaacgcccgcgtcaacgtaccgtcct

SEQ ID NO: 435732 - DNA, 30 bp, Artificial Sequence
  Synthetic oligonucleotide
gaatttgcagcgatagtgggcggccgtcct

SEQ ID NO: 435733 - DNA, 30 bp, Artificial Sequence
  Synthetic oligonucleotide
tgcgctgaattatgcgctggtaagcgtcct

SEQ ID NO: 435734 - DNA, 30 bp, Artificial Sequence
  Synthetic oligonucleotide
aaatcagaagatgtgggatgtcggcgtcct

SEQ ID NO: 435735 - DNA, 30 bp, Artificial Sequence
  Synthetic oligonucleotide
gggcgaaaatgcacgcctccactgcgtcct

SEQ ID NO: 435736 - DNA, 30 bp, Artificial Sequence
  Synthetic oligonucleotide
cttcgttcatccctttcacaattgcgtcct

SEQ ID NO: 435737 - DNA, 30 bp, Artificial Sequence
  Synthetic oligonucleotide
tgtgttgcggtacgattggagtatcgtcct

SEQ ID NO: 435738 - DNA, 30 bp, Artificial Sequence
  Synthetic oligonucleotide
cgcgcaagcactctctgcaagactcgtcct

SEQ ID NO: 435739 - DNA, 30 bp, Artificial Sequence
  Synthetic oligonucleotide
cgactctcccttctagtagatcttcgtcct

SEQ ID NO: 435740 - DNA, 30 bp, Artificial Sequence
  Synthetic oligonucleotide
tgtttgtagcaccaaccgaggtcaggtcct

SEQ ID NO: 435741 - DNA, 30 bp, Artificial Sequence
  Synthetic oligonucleotide
gtacaacttggtagatactcttcaggtcct

SEQ ID NO: 435742 - DNA, 30 bp, Artificial Sequence
  Synthetic oligonucleotide
ctcggctgagtttttatctgaataggtcct

SEQ ID NO: 435743 - DNA, 30 bp, Artificial Sequence
  Synthetic oligonucleotide
gaaagcaaggcatccctggttaacggtcct

SEQ ID NO: 435744 - DNA, 30 bp, Artificial Sequence
  Synthetic oligonucleotide
cattctattggaaacaataggatgggtcct

SEQ ID NO: 435745 - DNA, 30 bp, Artificial Sequence
  Synthetic oligonucleotide
aacagatattcaagacctgagctgggtcct

SEQ ID NO: 435746 - DNA, 30 bp, Artificial Sequence
  Synthetic oligonucleotide
gctccgatcactcaggctaatctgggtcct

SEQ ID NO: 435747 - DNA, 30 bp, Artificial Sequence
  Synthetic oligonucleotide
tttcataatgaaagggtagtgtagtgtcct

SEQ ID NO: 435748 - DNA, 30 bp, Artificial Sequence
  Synthetic oligonucleotide
ggtagctaccaccggcgcagttattgtcct

SEQ ID NO: 435749 - DNA, 30 bp, Artificial Sequence
  Synthetic oligonucleotide
ccgccgagttctcttcgaccctaaattcct

SEQ ID NO: 435750 - DNA, 30 bp, Artificial Sequence
  Synthetic oligonucleotide
agcgaatcagtggagcatgctgccattcct

SEQ ID NO: 435751 - DNA, 30 bp, Artificial Sequence
  Synthetic oligonucleotide
ctggtcagtgactctgcgctgggcattcct

SEQ ID NO: 435752 - DNA, 30 bp, Artificial Sequence
  Synthetic oligonucleotide
agtctatggtcattaggcttctgcattcct

SEQ ID NO: 435753 - DNA, 30 bp, Artificial Sequence
  Synthetic oligonucleotide
acaatacccttagccccacccttcattcct

SEQ ID NO: 435754 - DNA, 30 bp, Artificial Sequence
  Synthetic oligonucleotide
ttaatggaaccccaaaaataaattattcct

SEQ ID NO: 435755 - DNA, 30 bp, Artificial Sequence
  Synthetic oligonucleotide
taggttcagtaaaaaccggattttattcct

SEQ ID NO: 435756 - DNA, 30 bp, Artificial Sequence
  Synthetic oligonucleotide
tccggtcacagggtcatagggaaacttcct

SEQ ID NO: 435757 - DNA, 30 bp, Artificial Sequence
  Synthetic oligonucleotide
tcagtcatcgccgtcgacgaagatcttcct

SEQ ID NO: 435758 - DNA, 30 bp, Artificial Sequence
  Synthetic oligonucleotide
cgtattcataccccaccgtgataagttcct

SEQ ID NO: 435759 - DNA, 30 bp, Artificial Sequence
  Synthetic oligonucleotide
aatgagtagttaccgggtttccgagttcct

SEQ ID NO: 435760 - DNA, 30 bp, Artificial Sequence
  Synthetic oligonucleotide
cgtcccatccgcaactttggagtagttcct

SEQ ID NO: 435761 - DNA, 30 bp, Artificial Sequence
  Synthetic oligonucleotide
agtggactccagtgggtcaaatgggttcct

SEQ ID NO: 435762 - DNA, 30 bp, Artificial Sequence
  Synthetic oligonucleotide
ttccatccgtgcgtctgtataatggttcct

SEQ ID NO: 435763 - DNA, 30 bp, Artificial Sequence
  Synthetic oligonucleotide
agttttatttgatgctatcgatactttcct

SEQ ID NO: 435764 - DNA, 30 bp, Artificial Sequence
  Synthetic oligonucleotide
caagtacaaataagcaaggtggggtttcct

SEQ ID NO: 435765 - DNA, 30 bp, Artificial Sequence
  Synthetic oligonucleotide
gcggagcagaagtaaccagtttggtttcct

SEQ ID NO: 435766 - DNA, 30 bp, Artificial Sequence
  Synthetic oligonucleotide
gtgcgatgatcagtcgctaggtcttttcct

SEQ ID NO: 435767 - DNA, 30 bp, Artificial Sequence
  Synthetic oligonucleotide
aaatatgagtgtatttggctgggaaaagct

SEQ ID NO: 435768 - DNA, 30 bp, Artificial Sequence
  Synthetic oligonucleotide
taattccggatgaaaaggccgctaaaagct

SEQ ID NO: 435769 - DNA, 30 bp, Artificial Sequence
  Synthetic oligonucleotide
ctgggggacacagcaacctcaaacaaagct

SEQ ID NO: 435770 - DNA, 30 bp, Artificial Sequence
  Synthetic oligonucleotide
cgggggatacattgtagatggagcaaagct

SEQ ID NO: 435771 - DNA, 30 bp, Artificial Sequence
  Synthetic oligonucleotide
cagcttgagacgtagtccgtatttaaagct

SEQ ID NO: 435772 - DNA, 30 bp, Artificial Sequence
  Synthetic oligonucleotide
ggcagatctgcaacccctgctatacaagct

SEQ ID NO: 435773 - DNA, 30 bp, Artificial Sequence
  Synthetic oligonucleotide
acatgatactgtgcctttgttagccaagct

SEQ ID NO: 435774 - DNA, 30 bp, Artificial Sequence
  Synthetic oligonucleotide
ggtttcatttaactgaagcttggccaagct

SEQ ID NO: 435775 - DNA, 30 bp, Artificial Sequence
  Synthetic oligonucleotide
gcctatcgctttgagaaacgggctcaagct

SEQ ID NO: 435776 - DNA, 30 bp, Artificial Sequence
  Synthetic oligonucleotide
caggatcagttacggtgtcttacagaagct

SEQ ID NO: 435777 - DNA, 30 bp, Artificial Sequence
  Synthetic oligonucleotide
tagacgggtgatgattcacacgcagaagct

SEQ ID NO: 435778 - DNA, 30 bp, Artificial Sequence
  Synthetic oligonucleotide
cgcgatatcttaaccttagataatgaagct

SEQ ID NO: 435779 - DNA, 30 bp, Artificial Sequence
  Synthetic oligonucleotide
gtctatgctaaggctgagtcctctgaagct

SEQ ID NO: 435780 - DNA, 30 bp, Artificial Sequence
  Synthetic oligonucleotide
tgttagaccagtgctagaagaaactaagct

SEQ ID NO: 435781 - DNA, 30 bp, Artificial Sequence
  Synthetic oligonucleotide
agacaagctcaggtatggcctggctaagct

SEQ ID NO: 435782 - DNA, 30 bp, Artificial Sequence
  Synthetic oligonucleotide
cgagcaattcgcggccatactgtctaagct

SEQ ID NO: 435783 - DNA, 30 bp, Artificial Sequence
  Synthetic oligonucleotide
gtatttgagcctaaagaactctagtaagct

SEQ ID NO: 435784 - DNA, 30 bp, Artificial Sequence
  Synthetic oligonucleotide
agctttgtcagctaacatcactggtaagct

SEQ ID NO: 435785 - DNA, 30 bp, Artificial Sequence
  Synthetic oligonucleotide
gcggttaccagcacttttgtagtgtaagct

SEQ ID NO: 435786 - DNA, 30 bp, Artificial Sequence
  Synthetic oligonucleotide
acacctacccacagggcaaggtattaagct

SEQ ID NO: 435787 - DNA, 30 bp, Artificial Sequence
  Synthetic oligonucleotide
tatccctacaaagctccagtaacaacagct

SEQ ID NO: 435788 - DNA, 30 bp, Artificial Sequence
  Synthetic oligonucleotide
taggatcgcagcacaagtaacagaacagct

SEQ ID NO: 435789 - DNA, 30 bp, Artificial Sequence
  Synthetic oligonucleotide
ctattgaatgtaggagcgggatacacagct

SEQ ID NO: 435790 - DNA, 30 bp, Artificial Sequence
  Synthetic oligonucleotide
gagaccgggcggaggcacgggtctacagct

SEQ ID NO: 435791 - DNA, 30 bp, Artificial Sequence
  Synthetic oligonucleotide
tggccggcgccttttcgagggaaaccagct

SEQ ID NO: 435792 - DNA, 30 bp, Artificial Sequence
  Synthetic oligonucleotide
atagattcggtggatacccccgtaccagct

SEQ ID NO: 435793 - DNA, 30 bp, Artificial Sequence
  Synthetic oligonucleotide
aaaaaaaacgggaggctctaaaagccagct

SEQ ID NO: 435794 - DNA, 30 bp, Artificial Sequence
  Synthetic oligonucleotide
gaaaagccagtgatccggcacaagccagct

SEQ ID NO: 435795 - DNA, 30 bp, Artificial Sequence
  Synthetic oligonucleotide
tattgttgtatgatgtggatactgccagct

SEQ ID NO: 435796 - DNA, 30 bp, Artificial Sequence
  Synthetic oligonucleotide
ctttatctgaatgatcctacggcagcagct

SEQ ID NO: 435797 - DNA, 30 bp, Artificial Sequence
  Synthetic oligonucleotide
cattatgtccacggttcggcgtcagcagct

SEQ ID NO: 435798 - DNA, 30 bp, Artificial Sequence
  Synthetic oligonucleotide
acgaagtttttcagattcggatccgcagct

SEQ ID NO: 435799 - DNA, 30 bp, Artificial Sequence
  Synthetic oligonucleotide
ataccacggttgattcctaggggggcagct

SEQ ID NO: 435800 - DNA, 30 bp, Artificial Sequence
  Synthetic oligonucleotide
tggccctgaaaccagccctctggtgcagct

SEQ ID NO: 435801 - DNA, 30 bp, Artificial Sequence
  Synthetic oligonucleotide
acccatcccaccaaacagttttgtgcagct

SEQ ID NO: 435802 - DNA, 30 bp, Artificial Sequence
  Synthetic oligonucleotide
aggtacttttatttaaaccaggaatcagct

SEQ ID NO: 435803 - DNA, 30 bp, Artificial Sequence
  Synthetic oligonucleotide
tacccatcgactatattcgacgggtcagct

SEQ ID NO: 435804 - DNA, 30 bp, Artificial Sequence
  Synthetic oligonucleotide
gagcgataggcaaggcacaagcattcagct

SEQ ID NO: 435805 - DNA, 30 bp, Artificial Sequence
  Synthetic oligonucleotide
ggaaaacccgtcatctgtcaaacttcagct

SEQ ID NO: 435806 - DNA, 30 bp, Artificial Sequence
  Synthetic oligonucleotide
ctggggaaacatatttggcgccgttcagct

SEQ ID NO: 435807 - DNA, 30 bp, Artificial Sequence
  Synthetic oligonucleotide
ggaagctcaagcctgattttgtaaagagct

SEQ ID NO: 435808 - DNA, 30 bp, Artificial Sequence
  Synthetic oligonucleotide
ctgcaatgttttgtatagtcccgcagagct

SEQ ID NO: 435809 - DNA, 30 bp, Artificial Sequence
  Synthetic oligonucleotide
gttaaagatagtacaactttgacgagagct

SEQ ID NO: 435810 - DNA, 27 bp, Artificial Sequence
  Synthetic oligonucleotide
gtactgtgatccactgttgcccgagct

SEQ ID NO: 435811 - DNA, 30 bp, Artificial Sequence
  Synthetic oligonucleotide
tgattagtggcgtatttattttaaggagct

SEQ ID NO: 435812 - DNA, 30 bp, Artificial Sequence
  Synthetic oligonucleotide
acgcagcactaatgagtcacagcaggagct

SEQ ID NO: 435813 - DNA, 30 bp, Artificial Sequence
  Synthetic oligonucleotide
cgattccgtctagtagtattgttaggagct

SEQ ID NO: 435814 - DNA, 31 bp, Artificial Sequence
  Synthetic oligonucleotide
agaggcatggccgcgcaaggtcaacggagct

SEQ ID NO: 435815 - DNA, 30 bp, Artificial Sequence
  Synthetic oligonucleotide
ccattagtatgaatagcgggcatcggagct

SEQ ID NO: 435816 - DNA, 30 bp, Artificial Sequence
  Synthetic oligonucleotide
ttgcaacctaattaagttaattggggagct

SEQ ID NO: 435817 - DNA, 30 bp, Artificial Sequence
  Synthetic oligonucleotide
agttagtaccctgagtataaggatggagct

SEQ ID NO: 435818 - DNA, 30 bp, Artificial Sequence
  Synthetic oligonucleotide
cagcttattggtgttgtgttggctggagct

SEQ ID NO: 435819 - DNA, 30 bp, Artificial Sequence
  Synthetic oligonucleotide
tgccgtcaccagcctcgtacaaaatgagct

SEQ ID NO: 435820 - DNA, 30 bp, Artificial Sequence
  Synthetic oligonucleotide
cttacggatttttatgttcgcctatgagct

SEQ ID NO: 435821 - DNA, 30 bp, Artificial Sequence
  Synthetic oligonucleotide
gcaagtagttctgacgtgcaatagtgagct

SEQ ID NO: 435822 - DNA, 30 bp, Artificial Sequence
  Synthetic oligonucleotide
gctcgctcattttaaattgtcgcgtgagct

SEQ ID NO: 435823 - DNA, 30 bp, Artificial Sequence
  Synthetic oligonucleotide
aaggcaagactgggccggcactcttgagct

SEQ ID NO: 435824 - DNA, 30 bp, Artificial Sequence
  Synthetic oligonucleotide
agaagtggaagtgctcacagtagttgagct

SEQ ID NO: 435825 - DNA, 30 bp, Artificial Sequence
  Synthetic oligonucleotide
ttcgtagtctgatattttaatcgttgagct

SEQ ID NO: 435826 - DNA, 30 bp, Artificial Sequence
  Synthetic oligonucleotide
gaccagcagaggttgggtttcgcaatagct

SEQ ID NO: 435827 - DNA, 30 bp, Artificial Sequence
  Synthetic oligonucleotide
taccgacagtgcgcaatcattgtaatagct

SEQ ID NO: 435828 - DNA, 30 bp, Artificial Sequence
  Synthetic oligonucleotide
gaacgcttgctcagtttaatagacatagct

SEQ ID NO: 435829 - DNA, 30 bp, Artificial Sequence
  Synthetic oligonucleotide
tcaccgtcggtcagaagacaaagcatagct

SEQ ID NO: 435830 - DNA, 30 bp, Artificial Sequence
  Synthetic oligonucleotide
ggaaagccattatagcctagctagatagct

SEQ ID NO: 435831 - DNA, 30 bp, Artificial Sequence
  Synthetic oligonucleotide
gcgcaccattattctaaagttttgatagct

SEQ ID NO: 435832 - DNA, 30 bp, Artificial Sequence
  Synthetic oligonucleotide
cacgggtaagaataccgcggacgcctagct

SEQ ID NO: 435833 - DNA, 30 bp, Artificial Sequence
  Synthetic oligonucleotide
ttttcgatatagttttgcggttagctagct

SEQ ID NO: 435834 - DNA, 30 bp, Artificial Sequence
  Synthetic oligonucleotide
attcacttaggcgcgcggagtacgctagct

SEQ ID NO: 435835 - DNA, 30 bp, Artificial Sequence
  Synthetic oligonucleotide
tgcctctgtagtagcgttctgaggctagct

SEQ ID NO: 435836 - DNA, 30 bp, Artificial Sequence
  Synthetic oligonucleotide
tgatatgaagtcccggggtgcatgctagct

SEQ ID NO: 435837 - DNA, 30 bp, Artificial Sequence
  Synthetic oligonucleotide
gtatccacgtatgcctcgacgcgagtagct

SEQ ID NO: 435838 - DNA, 30 bp, Artificial Sequence
  Synthetic oligonucleotide
atttacgggtttaaggcgcaactagtagct

SEQ ID NO: 435839 - DNA, 30 bp, Artificial Sequence
  Synthetic oligonucleotide
agggccctaccgcggctgtggaacgtagct

SEQ ID NO: 435840 - DNA, 30 bp, Artificial Sequence
  Synthetic oligonucleotide
acgcggctgcctgtgcataaagacgtagct

SEQ ID NO: 435841 - DNA, 30 bp, Artificial Sequence
  Synthetic oligonucleotide
agggtacatgatagtaggccgagcgtagct

SEQ ID NO: 435842 - DNA, 30 bp, Artificial Sequence
  Synthetic oligonucleotide
tcggtcagttgttgggctgcgactgtagct

SEQ ID NO: 435843 - DNA, 30 bp, Artificial Sequence
  Synthetic oligonucleotide
cggaacttctcggggaagactcttgtagct

SEQ ID NO: 435844 - DNA, 30 bp, Artificial Sequence
  Synthetic oligonucleotide
ttttgtagagatcactgataataattagct

SEQ ID NO: 435845 - DNA, 30 bp, Artificial Sequence
  Synthetic oligonucleotide
aatgccttttgacggagtaggtaattagct

SEQ ID NO: 435846 - DNA, 30 bp, Artificial Sequence
  Synthetic oligonucleotide
gtagcaatacttctgtgaaccatattagct

SEQ ID NO: 435847 - DNA, 30 bp, Artificial Sequence
  Synthetic oligonucleotide
gtcagacctatagatactcaaatcttagct

SEQ ID NO: 435848 - DNA, 30 bp, Artificial Sequence
  Synthetic oligonucleotide
ttatttgcaataaacttgccaaatttagct

SEQ ID NO: 435849 - DNA, 30 bp, Artificial Sequence
  Synthetic oligonucleotide
catttctaccctgaactttcggttttagct

SEQ ID NO: 435850 - DNA, 30 bp, Artificial Sequence
  Synthetic oligonucleotide
aatgttttctatccgtatgaggaaaacgct

SEQ ID NO: 435851 - DNA, 30 bp, Artificial Sequence
  Synthetic oligonucleotide
catggccagttacatggggtttcaaacgct

SEQ ID NO: 435852 - DNA, 30 bp, Artificial Sequence
  Synthetic oligonucleotide
cgtttatatttccgaaagtagctaaacgct

SEQ ID NO: 435853 - DNA, 30 bp, Artificial Sequence
  Synthetic oligonucleotide
tacattggggaaaagcgatgtcacaacgct

SEQ ID NO: 435854 - DNA, 30 bp, Artificial Sequence
  Synthetic oligonucleotide
ggtggtcagtgaattctggttcccaacgct

SEQ ID NO: 435855 - DNA, 30 bp, Artificial Sequence
  Synthetic oligonucleotide
cagtgcggtaggacaggagcccgcaacgct

SEQ ID NO: 435856 - DNA, 30 bp, Artificial Sequence
  Synthetic oligonucleotide
tccgccgtagcgccggggttatcgaacgct

SEQ ID NO: 435857 - DNA, 30 bp, Artificial Sequence
  Synthetic oligonucleotide
ttggcagcatcgtatggctctcggaacgct

SEQ ID NO: 435858 - DNA, 30 bp, Artificial Sequence
  Synthetic oligonucleotide
tagggtgaagaaaacgattacatgaacgct

SEQ ID NO: 435859 - DNA, 30 bp, Artificial Sequence
  Synthetic oligonucleotide
cccgacggccccccaatgcataataacgct

SEQ ID NO: 435860 - DNA, 30 bp, Artificial Sequence
  Synthetic oligonucleotide
agtcattagcaccgagtctttgataacgct

SEQ ID NO: 435861 - DNA, 30 bp, Artificial Sequence
  Synthetic oligonucleotide
gcacatcacttgtcaacctgaaaacacgct

SEQ ID NO: 435862 - DNA, 30 bp, Artificial Sequence
  Synthetic oligonucleotide
ggagtggctttggggggatatagacacgct

SEQ ID NO: 435863 - DNA, 30 bp, Artificial Sequence
  Synthetic oligonucleotide
ggtgcttcgagttagtcggggtcccacgct

SEQ ID NO: 435864 - DNA, 30 bp, Artificial Sequence
  Synthetic oligonucleotide
acccctcgatccctaaacgcatcgcacgct

SEQ ID NO: 435865 - DNA, 30 bp, Artificial Sequence
  Synthetic oligonucleotide
gctgtgtctgtgcgttcagtgcggcacgct

SEQ ID NO: 435866 - DNA, 30 bp, Artificial Sequence
  Synthetic oligonucleotide
gggagttattaggtcctcgcaaatcacgct

SEQ ID NO: 435867 - DNA, 30 bp, Artificial Sequence
  Synthetic oligonucleotide
attgaaatataagaacgtactgttcacgct

SEQ ID NO: 435868 - DNA, 30 bp, Artificial Sequence
  Synthetic oligonucleotide
tcggtataaataacatctgcccaagacgct

SEQ ID NO: 435869 - DNA, 30 bp, Artificial Sequence
  Synthetic oligonucleotide
tcgacggcacgtacgggcaggtcagacgct

SEQ ID NO: 435870 - DNA, 30 bp, Artificial Sequence
  Synthetic oligonucleotide
attaaaaagtcggattcgccacgagacgct

SEQ ID NO: 435871 - DNA, 30 bp, Artificial Sequence
  Synthetic oligonucleotide
actcggggtgtaacagcaatcgtagacgct

SEQ ID NO: 435872 - DNA, 30 bp, Artificial Sequence
  Synthetic oligonucleotide
tcaagtttccgtgataggtactacgacgct

SEQ ID NO: 435873 - DNA, 30 bp, Artificial Sequence
  Synthetic oligonucleotide
gctgcacgtgtaattcttagccaggacgct

SEQ ID NO: 435874 - DNA, 31 bp, Artificial Sequence
  Synthetic oligonucleotide
cctacactatttttggcaatctagggacgct

SEQ ID NO: 435875 - DNA, 30 bp, Artificial Sequence
  Synthetic oligonucleotide
actgtcccggaataagggtagaatgacgct

SEQ ID NO: 435876 - DNA, 30 bp, Artificial Sequence
  Synthetic oligonucleotide
gctcaggttatacctacaaagtaatacgct

SEQ ID NO: 435877 - DNA, 30 bp, Artificial Sequence
  Synthetic oligonucleotide
ttccacaggtttcgaagaggcagctacgct

SEQ ID NO: 435878 - DNA, 30 bp, Artificial Sequence
  Synthetic oligonucleotide
gtagcagtatgggatgtacaccagtacgct

SEQ ID NO: 435879 - DNA, 30 bp, Artificial Sequence
  Synthetic oligonucleotide
cgggtagggtaagtgaagccatcgtacgct

SEQ ID NO: 435880 - DNA, 30 bp, Artificial Sequence
  Synthetic oligonucleotide
cagtgacacggtattgccaaattgtacgct

SEQ ID NO: 435881 - DNA, 30 bp, Artificial Sequence
  Synthetic oligonucleotide
cggttatccccctaacgctatctttacgct

SEQ ID NO: 435882 - DNA, 30 bp, Artificial Sequence
  Synthetic oligonucleotide
tcgatgaaatcgttcaataaagggaccgct

SEQ ID NO: 435883 - DNA, 30 bp, Artificial Sequence
  Synthetic oligonucleotide
agactactcctgctgaatagagggaccgct

SEQ ID NO: 435884 - DNA, 30 bp, Artificial Sequence
  Synthetic oligonucleotide
aagaagaagtactgtattaagtggaccgct

SEQ ID NO: 435885 - DNA, 30 bp, Artificial Sequence
  Synthetic oligonucleotide
cattaataggagagtcctagaagtaccgct

SEQ ID NO: 435886 - DNA, 30 bp, Artificial Sequence
  Synthetic oligonucleotide
gcataagcagtggttcgtaaacgacccgct

SEQ ID NO: 435887 - DNA, 30 bp, Artificial Sequence
  Synthetic oligonucleotide
tagggatactttcagatccataaccccgct

SEQ ID NO: 435888 - DNA, 30 bp, Artificial Sequence
  Synthetic oligonucleotide
agattagccttggttgttcgtcgccccgct

SEQ ID NO: 435889 - DNA, 30 bp, Artificial Sequence
  Synthetic oligonucleotide
atgttcattggaatggtgcaggggcccgct

SEQ ID NO: 435890 - DNA, 30 bp, Artificial Sequence
  Synthetic oligonucleotide
tcattgcggattgcaacttatctggccgct

SEQ ID NO: 435891 - DNA, 30 bp, Artificial Sequence
  Synthetic oligonucleotide
gcccgacggtgattaccttgcttggccgct

SEQ ID NO: 435892 - DNA, 30 bp, Artificial Sequence
  Synthetic oligonucleotide
atactacggcgccagactctaccctccgct

SEQ ID NO: 435893 - DNA, 30 bp, Artificial Sequence
  Synthetic oligonucleotide
ttgcatatctgatgagagtattagtccgct

SEQ ID NO: 435894 - DNA, 30 bp, Artificial Sequence
  Synthetic oligonucleotide
ctccctcgtggggaggtaatcggttccgct

SEQ ID NO: 435895 - DNA, 30 bp, Artificial Sequence
  Synthetic oligonucleotide
cattgttcgcaccgcggccacatttccgct

SEQ ID NO: 435896 - DNA, 30 bp, Artificial Sequence
  Synthetic oligonucleotide
catgcgtggtccactatatccgcaagcgct

SEQ ID NO: 435897 - DNA, 30 bp, Artificial Sequence
  Synthetic oligonucleotide
attttacgtcgtgaactatcgccgagcgct

SEQ ID NO: 435898 - DNA, 30 bp, Artificial Sequence
  Synthetic oligonucleotide
tcgacggaggactgttacgacgggagcgct

SEQ ID NO: 435899 - DNA, 30 bp, Artificial Sequence
  Synthetic oligonucleotide
tttgtaaggaaattgtttgataatagcgct

SEQ ID NO: 435900 - DNA, 30 bp, Artificial Sequence
  Synthetic oligonucleotide
acgtaaatacttagacgtctaagtagcgct

SEQ ID NO: 435901 - DNA, 30 bp, Artificial Sequence
  Synthetic oligonucleotide
gctaacgtaggtgtgcacggaacgcgcgct

SEQ ID NO: 435902 - DNA, 30 bp, Artificial Sequence
  Synthetic oligonucleotide
agtgcttgatatggctacttggtgcgcgct

SEQ ID NO: 435903 - DNA, 30 bp, Artificial Sequence
  Synthetic oligonucleotide
acatgtcccgaacgctatcggcttcgcgct

SEQ ID NO: 435904 - DNA, 30 bp, Artificial Sequence
  Synthetic oligonucleotide
aaccaaacgccagtcggggctagcggcgct

SEQ ID NO: 435905 - DNA, 30 bp, Artificial Sequence
  Synthetic oligonucleotide
ggcatttggagggttcatagcccgggcgct

SEQ ID NO: 435906 - DNA, 30 bp, Artificial Sequence
  Synthetic oligonucleotide
ttgtcattattgctgtgcggcgcgggcgct

SEQ ID NO: 435907 - DNA, 30 bp, Artificial Sequence
  Synthetic oligonucleotide
ggaaatcagattccacctgcaactggcgct

SEQ ID NO: 435908 - DNA, 30 bp, Artificial Sequence
  Synthetic oligonucleotide
aataataggtaactgactttcagtggcgct

SEQ ID NO: 435909 - DNA, 30 bp, Artificial Sequence
  Synthetic oligonucleotide
gccctggaccaagtaagtgaccaatgcgct

SEQ ID NO: 435910 - DNA, 30 bp, Artificial Sequence
  Synthetic oligonucleotide
cggagctttcgtagtaggattccatgcgct

SEQ ID NO: 435911 - DNA, 30 bp, Artificial Sequence
  Synthetic oligonucleotide
attgagccaccagttacagcatcatgcgct

SEQ ID NO: 435912 - DNA, 30 bp, Artificial Sequence
  Synthetic oligonucleotide
gcgagagcatcccatatagtttactgcgct

SEQ ID NO: 435913 - DNA, 30 bp, Artificial Sequence
  Synthetic oligonucleotide
agtttagtctggttcgttcatcgctgcgct

SEQ ID NO: 435914 - DNA, 30 bp, Artificial Sequence
  Synthetic oligonucleotide
cagaaacaacagcgacgcaccaagtgcgct

SEQ ID NO: 435915 - DNA, 30 bp, Artificial Sequence
  Synthetic oligonucleotide
ccacagagtgagatcacggaatagtgcgct

SEQ ID NO: 435916 - DNA, 30 bp, Artificial Sequence
  Synthetic oligonucleotide
cgaagtaggtttaatgataacacgtgcgct

SEQ ID NO: 435917 - DNA, 30 bp, Artificial Sequence
  Synthetic oligonucleotide
ctctatgtcgttatcacccttaattgcgct

SEQ ID NO: 435918 - DNA, 30 bp, Artificial Sequence
  Synthetic oligonucleotide
ccgccgccgtcgcttagaaagcgttgcgct

SEQ ID NO: 435919 - DNA, 30 bp, Artificial Sequence
  Synthetic oligonucleotide
agccctgtagacacggagcgggtcatcgct

SEQ ID NO: 435920 - DNA, 30 bp, Artificial Sequence
  Synthetic oligonucleotide
ttggttggtgatactacaggaccgatcgct

SEQ ID NO: 435921 - DNA, 30 bp, Artificial Sequence
  Synthetic oligonucleotide
tgccgcaactggcctgagccgccactcgct

SEQ ID NO: 435922 - DNA, 30 bp, Artificial Sequence
  Synthetic oligonucleotide
aggttgtatgcgtccgctggcagactcgct

SEQ ID NO: 435923 - DNA, 29 bp, Artificial Sequence
  Synthetic oligonucleotide
caagatgtcattatagctaatgactcgct

SEQ ID NO: 435924 - DNA, 30 bp, Artificial Sequence
  Synthetic oligonucleotide
gggtggaagacgatgcggcatctactcgct

SEQ ID NO: 435925 - DNA, 30 bp, Artificial Sequence
  Synthetic oligonucleotide
accctggccatggatgccaaaaggctcgct

SEQ ID NO: 435926 - DNA, 30 bp, Artificial Sequence
  Synthetic oligonucleotide
actatccttaaattagcgtatatgctcgct

SEQ ID NO: 435927 - DNA, 30 bp, Artificial Sequence
  Synthetic oligonucleotide
gcatatcagttagggtctgcctttctcgct

SEQ ID NO: 435928 - DNA, 30 bp, Artificial Sequence
  Synthetic oligonucleotide
gccatcgggttaaaaggctctgtagtcgct

SEQ ID NO: 435929 - DNA, 30 bp, Artificial Sequence
  Synthetic oligonucleotide
ccctgtgagtattaacacgtcaccgtcgct

SEQ ID NO: 435930 - DNA, 30 bp, Artificial Sequence
  Synthetic oligonucleotide
acctcaagttgggtcatgattatggtcgct

SEQ ID NO: 435931 - DNA, 30 bp, Artificial Sequence
  Synthetic oligonucleotide
attactttcttcagtggatatcatgtcgct

SEQ ID NO: 435932 - DNA, 30 bp, Artificial Sequence
  Synthetic oligonucleotide
cctagtacttgtggctaatgacttgtcgct

SEQ ID NO: 435933 - DNA, 30 bp, Artificial Sequence
  Synthetic oligonucleotide
acccctatttgtgaactccatacattcgct

SEQ ID NO: 435934 - DNA, 30 bp, Artificial Sequence
  Synthetic oligonucleotide
tgtagtagagctctgttgcatatattcgct

SEQ ID NO: 435935 - DNA, 30 bp, Artificial Sequence
  Synthetic oligonucleotide
caaatgctatggcccggagagctattcgct

SEQ ID NO: 435936 - DNA, 30 bp, Artificial Sequence
  Synthetic oligonucleotide
taggtatcatttagcgtcgcaagcttcgct

SEQ ID NO: 435937 - DNA, 30 bp, Artificial Sequence
  Synthetic oligonucleotide
ttcgtattttagcgtcagattcctttcgct

SEQ ID NO: 435938 - DNA, 30 bp, Artificial Sequence
  Synthetic oligonucleotide
ttcgtcactagggctgacaatgctttcgct

SEQ ID NO: 435939 - DNA, 30 bp, Artificial Sequence
  Synthetic oligonucleotide
gtagctgtcactcctagtaccagtttcgct

SEQ ID NO: 435940 - DNA, 30 bp, Artificial Sequence
  Synthetic oligonucleotide
ggtaacgatcttgcataaagatgtttcgct

SEQ ID NO: 435941 - DNA, 30 bp, Artificial Sequence
  Synthetic oligonucleotide
ccgcccgccgccattagtaggtgtttcgct

SEQ ID NO: 435942 - DNA, 30 bp, Artificial Sequence
  Synthetic oligonucleotide
ctggtgggggacctgggctcttgtttcgct

SEQ ID NO: 435943 - DNA, 30 bp, Artificial Sequence
  Synthetic oligonucleotide
agccccattggggtgaactatgccaaggct

SEQ ID NO: 435944 - DNA, 30 bp, Artificial Sequence
  Synthetic oligonucleotide
gcgtgagatgaggtgagcgttgtcaaggct

SEQ ID NO: 435945 - DNA, 30 bp, Artificial Sequence
  Synthetic oligonucleotide
gtcagtcagtacctacggtgctttaaggct

SEQ ID NO: 435946 - DNA, 30 bp, Artificial Sequence
  Synthetic oligonucleotide
atctttattaggattgcgagtccacaggct

SEQ ID NO: 435947 - DNA, 30 bp, Artificial Sequence
  Synthetic oligonucleotide
atcagtggtttaattacgtcaacccaggct

SEQ ID NO: 435948 - DNA, 30 bp, Artificial Sequence
  Synthetic oligonucleotide
tcatccgaggggttcgaagcaaggcaggct

SEQ ID NO: 435949 - DNA, 30 bp, Artificial Sequence
  Synthetic oligonucleotide
gccaacgcagggcctacttacgggcaggct

SEQ ID NO: 435950 - DNA, 30 bp, Artificial Sequence
  Synthetic oligonucleotide
ccggacgttagtcgtcacctcatgcaggct

SEQ ID NO: 435951 - DNA, 30 bp, Artificial Sequence
  Synthetic oligonucleotide
gtaataactgatataagagtatatcaggct

SEQ ID NO: 435952 - DNA, 30 bp, Artificial Sequence
  Synthetic oligonucleotide
gtagagcactacggtctggccagagaggct

SEQ ID NO: 435953 - DNA, 30 bp, Artificial Sequence
  Synthetic oligonucleotide
caccaaggtgtttctgtacgttctgaggct

SEQ ID NO: 435954 - DNA, 30 bp, Artificial Sequence
  Synthetic oligonucleotide
agcctgccctctacggagatcaactaggct

SEQ ID NO: 435955 - DNA, 30 bp, Artificial Sequence
  Synthetic oligonucleotide
ggggtgtttgacaacggataaagctaggct

SEQ ID NO: 435956 - DNA, 30 bp, Artificial Sequence
  Synthetic oligonucleotide
taaagctccgttctgactgatacgtaggct

SEQ ID NO: 435957 - DNA, 30 bp, Artificial Sequence
  Synthetic oligonucleotide
ctgtacaagttataagtattgaggtaggct

SEQ ID NO: 435958 - DNA, 30 bp, Artificial Sequence
  Synthetic oligonucleotide
atctgcataagttattgattacggtaggct

SEQ ID NO: 435959 - DNA, 30 bp, Artificial Sequence
  Synthetic oligonucleotide
aatctgtccacgcttcgtcatggaacggct

SEQ ID NO: 435960 - DNA, 30 bp, Artificial Sequence
  Synthetic oligonucleotide
ggttagttaatggtgtctggtctaacggct

SEQ ID NO: 435961 - DNA, 30 bp, Artificial Sequence
  Synthetic oligonucleotide
tgcctcagggcgtaaggttctaacacggct

SEQ ID NO: 435962 - DNA, 30 bp, Artificial Sequence
  Synthetic oligonucleotide
ctatagggcacatgtatagctgacacggct

SEQ ID NO: 435963 - DNA, 30 bp, Artificial Sequence
  Synthetic oligonucleotide
atcacgttacagggtcctcaatgcacggct

SEQ ID NO: 435964 - DNA, 30 bp, Artificial Sequence
  Synthetic oligonucleotide
gagtagtgttttgggccccgtcggacggct

SEQ ID NO: 435965 - DNA, 30 bp, Artificial Sequence
  Synthetic oligonucleotide
cagccatgtggcttgtttacggtgacggct

SEQ ID NO: 435966 - DNA, 30 bp, Artificial Sequence
  Synthetic oligonucleotide
aaggaccgtagtccaataaggcctacggct

SEQ ID NO: 435967 - DNA, 30 bp, Artificial Sequence
  Synthetic oligonucleotide
agctaaactcatattctctgctcaccggct

SEQ ID NO: 435968 - DNA, 30 bp, Artificial Sequence
  Synthetic oligonucleotide
gggtgtaataatggaaatcatggaccggct

SEQ ID NO: 435969 - DNA, 30 bp, Artificial Sequence
  Synthetic oligonucleotide
gactccgattaatggccatggacgccggct

SEQ ID NO: 435970 - DNA, 30 bp, Artificial Sequence
  Synthetic oligonucleotide
taattatagcatcaatttctatttccggct

SEQ ID NO: 435971 - DNA, 30 bp, Artificial Sequence
  Synthetic oligonucleotide
tcagggaacaatttcagttgcggagcggct

SEQ ID NO: 435972 - DNA, 30 bp, Artificial Sequence
  Synthetic oligonucleotide
attccaatccgaatttgtgctaccgcggct

SEQ ID NO: 435973 - DNA, 30 bp, Artificial Sequence
  Synthetic oligonucleotide
gcccccgaatacataaaattactcgcggct

SEQ ID NO: 435974 - DNA, 30 bp, Artificial Sequence
  Synthetic oligonucleotide
taggccctgtgctggttgaatgtcgcggct

SEQ ID NO: 435975 - DNA, 30 bp, Artificial Sequence
  Synthetic oligonucleotide
atccaggggtgggaccggtcgcaggcggct

SEQ ID NO: 435976 - DNA, 30 bp, Artificial Sequence
  Synthetic oligonucleotide
ccgtgtaggatacagccggggtaggcggct

SEQ ID NO: 435977 - DNA, 30 bp, Artificial Sequence
  Synthetic oligonucleotide
ggtgagaatgtatcgcagctcacggcggct

SEQ ID NO: 435978 - DNA, 30 bp, Artificial Sequence
  Synthetic oligonucleotide
acttggagggttacgtgtacgactgcggct

SEQ ID NO: 435979 - DNA, 30 bp, Artificial Sequence
  Synthetic oligonucleotide
cccagtcctcctttctagcggggtgcggct

SEQ ID NO: 435980 - DNA, 30 bp, Artificial Sequence
  Synthetic oligonucleotide
tagtcatcaagtcgaatagggttctcggct

SEQ ID NO: 435981 - DNA, 30 bp, Artificial Sequence
  Synthetic oligonucleotide
cttctcaccgacatggattcgaagtcggct

SEQ ID NO: 435982 - DNA, 30 bp, Artificial Sequence
  Synthetic oligonucleotide
gagaagcaactgtatcaggtcccgtcggct

SEQ ID NO: 435983 - DNA, 30 bp, Artificial Sequence
  Synthetic oligonucleotide
ttagttgagctgcatcggttcgcgtcggct

SEQ ID NO: 435984 - DNA, 30 bp, Artificial Sequence
  Synthetic oligonucleotide
taaaagtcgaaatatgcagctttgtcggct

SEQ ID NO: 435985 - DNA, 30 bp, Artificial Sequence
  Synthetic oligonucleotide
tccctctacctttgcgtacaccgttcggct

SEQ ID NO: 435986 - DNA, 30 bp, Artificial Sequence
  Synthetic oligonucleotide
ctacatcttgaacattgttccataagggct

SEQ ID NO: 435987 - DNA, 30 bp, Artificial Sequence
  Synthetic oligonucleotide
tgtcgtcttttgctgtagtcatggagggct

SEQ ID NO: 435988 - DNA, 30 bp, Artificial Sequence
  Synthetic oligonucleotide
atggttggagtaatgacttccagtagggct

SEQ ID NO: 435989 - DNA, 30 bp, Artificial Sequence
  Synthetic oligonucleotide
tttcgcgatatcactccatcatgacgggct

SEQ ID NO: 435990 - DNA, 30 bp, Artificial Sequence
  Synthetic oligonucleotide
ctcaggtccagttctgatgtataccgggct

SEQ ID NO: 435991 - DNA, 30 bp, Artificial Sequence
  Synthetic oligonucleotide
acatgtaccggccctttgaatggccgggct

SEQ ID NO: 435992 - DNA, 30 bp, Artificial Sequence
  Synthetic oligonucleotide
gcgccgcgtactggatgtgagtggcgggct

SEQ ID NO: 435993 - DNA, 30 bp, Artificial Sequence
  Synthetic oligonucleotide
cgcaatcaaggtaacctcttggtgcgggct

SEQ ID NO: 435994 - DNA, 30 bp, Artificial Sequence
  Synthetic oligonucleotide
acgccttacgtcgtactagactatcgggct

SEQ ID NO: 435995 - DNA, 30 bp, Artificial Sequence
  Synthetic oligonucleotide
cgcccgacctggggttttatagaaggggct

SEQ ID NO: 435996 - DNA, 30 bp, Artificial Sequence
  Synthetic oligonucleotide
gcggcggtacgtagggacagctgaggggct

SEQ ID NO: 435997 - DNA, 30 bp, Artificial Sequence
  Synthetic oligonucleotide
ttcagcggctagtgggtaatgttaggggct

SEQ ID NO: 435998 - DNA, 30 bp, Artificial Sequence
  Synthetic oligonucleotide
ccgagacgattcttgcgcataattggggct

SEQ ID NO: 435999 - DNA, 30 bp, Artificial Sequence
  Synthetic oligonucleotide
gtagacaccgggtagtcaggcacatgggct

SEQ ID NO: 436000 - DNA, 30 bp, Artificial Sequence
  Synthetic oligonucleotide
gctgcgagtttggggggcggcgcatgggct

SEQ ID NO: 436001 - DNA, 30 bp, Artificial Sequence
  Synthetic oligonucleotide
ggcccactagggtaatatgaattatgggct

SEQ ID NO: 436002 - DNA, 30 bp, Artificial Sequence
  Synthetic oligonucleotide
cgggttggcaataccccttaagcttgggct

SEQ ID NO: 436003 - DNA, 30 bp, Artificial Sequence
  Synthetic oligonucleotide
ctgacccgccaatcgagaaacgaaatggct

SEQ ID NO: 436004 - DNA, 30 bp, Artificial Sequence
  Synthetic oligonucleotide
gccatctcaacgttgtccgataccatggct

SEQ ID NO: 436005 - DNA, 30 bp, Artificial Sequence
  Synthetic oligonucleotide
ctactttcgggcagtgtgtcgggcctggct

SEQ ID NO: 436006 - DNA, 30 bp, Artificial Sequence
  Synthetic oligonucleotide
ttgattggtctgactcaacagtcgctggct

SEQ ID NO: 436007 - DNA, 30 bp, Artificial Sequence
  Synthetic oligonucleotide
ggggcgccctcggtacctggtggtctggct

SEQ ID NO: 436008 - DNA, 30 bp, Artificial Sequence
  Synthetic oligonucleotide
cggagttgtgatccagtttgatgtctggct

SEQ ID NO: 436009 - DNA, 30 bp, Artificial Sequence
  Synthetic oligonucleotide
aaattagtcccattcaggttttgtctggct

SEQ ID NO: 436010 - DNA, 30 bp, Artificial Sequence
  Synthetic oligonucleotide
ataactaatattgaagtcggcaccgtggct

SEQ ID NO: 436011 - DNA, 30 bp, Artificial Sequence
  Synthetic oligonucleotide
tagagggttgtataatcggccatcgtggct

SEQ ID NO: 436012 - DNA, 30 bp, Artificial Sequence
  Synthetic oligonucleotide
agcctttgacgagtacgcgtaaaggtggct

SEQ ID NO: 436013 - DNA, 30 bp, Artificial Sequence
  Synthetic oligonucleotide
ggatcctatacaacctagtaacaggtggct

SEQ ID NO: 436014 - DNA, 30 bp, Artificial Sequence
  Synthetic oligonucleotide
gacggcagtggtcccccattttttgtggct

SEQ ID NO: 436015 - DNA, 30 bp, Artificial Sequence
  Synthetic oligonucleotide
atgtagaccgtgtgttgtagccgattggct

SEQ ID NO: 436016 - DNA, 30 bp, Artificial Sequence
  Synthetic oligonucleotide
cctagtacaaaaagagattggctcttggct

SEQ ID NO: 436017 - DNA, 30 bp, Artificial Sequence
  Synthetic oligonucleotide
ggtttcttagagagaaatgggctgttggct

SEQ ID NO: 436018 - DNA, 30 bp, Artificial Sequence
  Synthetic oligonucleotide
ggaaattgacgagtctaattgattttggct

SEQ ID NO: 436019 - DNA, 30 bp, Artificial Sequence
  Synthetic oligonucleotide
ttggtgaggccagctatgaacttaaatgct

SEQ ID NO: 436020 - DNA, 30 bp, Artificial Sequence
  Synthetic oligonucleotide
tcccaataatcctgtaacagtcacaatgct

SEQ ID NO: 436021 - DNA, 30 bp, Artificial Sequence
  Synthetic oligonucleotide
tgatccaccgtaattgcaggggccaatgct

SEQ ID NO: 436022 - DNA, 30 bp, Artificial Sequence
  Synthetic oligonucleotide
tgcaccactataaagatacggcgcaatgct

SEQ ID NO: 436023 - DNA, 30 bp, Artificial Sequence
  Synthetic oligonucleotide
acgctggcagtgggatcccctcagaatgct

SEQ ID NO: 436024 - DNA, 29 bp, Artificial Sequence
  Synthetic oligonucleotide
cccgatgacctgagtccgtaccgaatgct

SEQ ID NO: 436025 - DNA, 30 bp, Artificial Sequence
  Synthetic oligonucleotide
gggtttcattagcccctcgtcgcgaatgct

SEQ ID NO: 436026 - DNA, 30 bp, Artificial Sequence
  Synthetic oligonucleotide
atcgggttctgtcctgtagtcctgaatgct

SEQ ID NO: 436027 - DNA, 30 bp, Artificial Sequence
  Synthetic oligonucleotide
tctatgcataacgacatcatgctgaatgct

SEQ ID NO: 436028 - DNA, 30 bp, Artificial Sequence
  Synthetic oligonucleotide
caatagtataataagctcggtacacatgct

SEQ ID NO: 436029 - DNA, 30 bp, Artificial Sequence
  Synthetic oligonucleotide
gacctgccgtagagactttatccacatgct

SEQ ID NO: 436030 - DNA, 30 bp, Artificial Sequence
  Synthetic oligonucleotide
atactgacctatctggactgaagacatgct

SEQ ID NO: 436031 - DNA, 30 bp, Artificial Sequence
  Synthetic oligonucleotide
tccgtccgaaatactgttgacgtccatgct

SEQ ID NO: 436032 - DNA, 30 bp, Artificial Sequence
  Synthetic oligonucleotide
tactcagtcaatgatgcagatccgcatgct

SEQ ID NO: 436033 - DNA, 30 bp, Artificial Sequence
  Synthetic oligonucleotide
ataatagggcattatccacgggtgcatgct

SEQ ID NO: 436034 - DNA, 30 bp, Artificial Sequence
  Synthetic oligonucleotide
atcatgccttagaccgggcgacgagatgct

SEQ ID NO: 436035 - DNA, 30 bp, Artificial Sequence
  Synthetic oligonucleotide
gaaagccgtattcctgtcttctacgatgct

SEQ ID NO: 436036 - DNA, 30 bp, Artificial Sequence
  Synthetic oligonucleotide
attcttgtacgtatacatttctacgatgct

SEQ ID NO: 436037 - DNA, 30 bp, Artificial Sequence
  Synthetic oligonucleotide
aggaccaattggtagttcctaagcgatgct

SEQ ID NO: 436038 - DNA, 30 bp, Artificial Sequence
  Synthetic oligonucleotide
gcatcttcgtattcgcccgcaggcgatgct

SEQ ID NO: 436039 - DNA, 30 bp, Artificial Sequence
  Synthetic oligonucleotide
atggacggacatttcgcctgcggggatgct

SEQ ID NO: 436040 - DNA, 30 bp, Artificial Sequence
  Synthetic oligonucleotide
ggcgcacacgtgggtctaatgtatgatgct

SEQ ID NO: 436041 - DNA, 30 bp, Artificial Sequence
  Synthetic oligonucleotide
acctcacccttagtagtcttgtatgatgct

SEQ ID NO: 436042 - DNA, 30 bp, Artificial Sequence
  Synthetic oligonucleotide
tacctaattaacaattagttcagtgatgct

SEQ ID NO: 436043 - DNA, 30 bp, Artificial Sequence
  Synthetic oligonucleotide
tttgaatatctatcacttagttgtgatgct

SEQ ID NO: 436044 - DNA, 30 bp, Artificial Sequence
  Synthetic oligonucleotide
gccgggagtggagcaaggacagtatatgct

SEQ ID NO: 436045 - DNA, 30 bp, Artificial Sequence
  Synthetic oligonucleotide
cgcgtcggggtttatcaacgatattatgct

SEQ ID NO: 436046 - DNA, 30 bp, Artificial Sequence
  Synthetic oligonucleotide
aagtctaggctttgagcccggcgttatgct

SEQ ID NO: 436047 - DNA, 30 bp, Artificial Sequence
  Synthetic oligonucleotide
ctgctagcgacacaggtataaatttatgct

SEQ ID NO: 436048 - DNA, 30 bp, Artificial Sequence
  Synthetic oligonucleotide
aacgtcggtacgtattcagacctaactgct

SEQ ID NO: 436049 - DNA, 30 bp, Artificial Sequence
  Synthetic oligonucleotide
gccccacgccttagcgatcagttcactgct

SEQ ID NO: 436050 - DNA, 30 bp, Artificial Sequence
  Synthetic oligonucleotide
tactataatgcgttagctactaatactgct

SEQ ID NO: 436051 - DNA, 30 bp, Artificial Sequence
  Synthetic oligonucleotide
attaacgagttcgcgggggccgcccctgct

SEQ ID NO: 436052 - DNA, 30 bp, Artificial Sequence
  Synthetic oligonucleotide
cattatagtttggggttcaccagccctgct

SEQ ID NO: 436053 - DNA, 30 bp, Artificial Sequence
  Synthetic oligonucleotide
tgtaaacgcttgacgggggagcagcctgct

SEQ ID NO: 436054 - DNA, 30 bp, Artificial Sequence
  Synthetic oligonucleotide
ctccggacgctgagcccgaggcggcctgct

SEQ ID NO: 436055 - DNA, 30 bp, Artificial Sequence
  Synthetic oligonucleotide
ataacagggaataggcaggagaatcctgct

SEQ ID NO: 436056 - DNA, 30 bp, Artificial Sequence
  Synthetic oligonucleotide
tggctgcttctacgcccttaacgagctgct

SEQ ID NO: 436057 - DNA, 30 bp, Artificial Sequence
  Synthetic oligonucleotide
ctaggttctttgattagtcagcgagctgct

SEQ ID NO: 436058 - DNA, 30 bp, Artificial Sequence
  Synthetic oligonucleotide
tataagccagtaaatagcgtgggagctgct

SEQ ID NO: 436059 - DNA, 30 bp, Artificial Sequence
  Synthetic oligonucleotide
catgggaatttccacttcggctacgctgct

SEQ ID NO: 436060 - DNA, 30 bp, Artificial Sequence
  Synthetic oligonucleotide
tcctgtacctagatatgcctagccgctgct

SEQ ID NO: 436061 - DNA, 30 bp, Artificial Sequence
  Synthetic oligonucleotide
gatggacctgatgcttgccgaccggctgct

SEQ ID NO: 436062 - DNA, 30 bp, Artificial Sequence
  Synthetic oligonucleotide
gaagctgtacgcggaactgcagcggctgct

SEQ ID NO: 436063 - DNA, 30 bp, Artificial Sequence
  Synthetic oligonucleotide
aatattggctttacagcgttttatgctgct

SEQ ID NO: 436064 - DNA, 30 bp, Artificial Sequence
  Synthetic oligonucleotide
tccggtagcggcccgtccggctactctgct

SEQ ID NO: 436065 - DNA, 30 bp, Artificial Sequence
  Synthetic oligonucleotide
ttatctgaatagttttgtcggtagtctgct

SEQ ID NO: 436066 - DNA, 30 bp, Artificial Sequence
  Synthetic oligonucleotide
tataagcttataactgcacgaaattctgct

SEQ ID NO: 436067 - DNA, 30 bp, Artificial Sequence
  Synthetic oligonucleotide
gatagatcgttaagcattcgtaaaagtgct

SEQ ID NO: 436068 - DNA, 30 bp, Artificial Sequence
  Synthetic oligonucleotide
gatgttttgctatccatcagtcgcagtgct

SEQ ID NO: 436069 - DNA, 30 bp, Artificial Sequence
  Synthetic oligonucleotide
atagtcggagtggcaacatgattgagtgct

SEQ ID NO: 436070 - DNA, 30 bp, Artificial Sequence
  Synthetic oligonucleotide
cgcgtacagaatatgtccctgcatagtgct

SEQ ID NO: 436071 - DNA, 30 bp, Artificial Sequence
  Synthetic oligonucleotide
tgcgaatgcacttctgtgttgggtagtgct

SEQ ID NO: 436072 - DNA, 30 bp, Artificial Sequence
  Synthetic oligonucleotide
gtagttccacccacaaactggcttagtgct

SEQ ID NO: 436073 - DNA, 30 bp, Artificial Sequence
  Synthetic oligonucleotide
gagcctcgaggatcttgcacgcgacgtgct

SEQ ID NO: 436074 - DNA, 30 bp, Artificial Sequence
  Synthetic oligonucleotide
cctcgtgtagtttctggtcgtgtgcgtgct

SEQ ID NO: 436075 - DNA, 30 bp, Artificial Sequence
  Synthetic oligonucleotide
aacaatggataatacgtcggatttcgtgct

SEQ ID NO: 436076 - DNA, 30 bp, Artificial Sequence
  Synthetic oligonucleotide
gggcccgtacaataggcagaagaaggtgct

SEQ ID NO: 436077 - DNA, 30 bp, Artificial Sequence
  Synthetic oligonucleotide
cgtaatgacgcaccacgggactgaggtgct

SEQ ID NO: 436078 - DNA, 30 bp, Artificial Sequence
  Synthetic oligonucleotide
ggaggtgcgccagctgccacctcgggtgct

SEQ ID NO: 436079 - DNA, 30 bp, Artificial Sequence
  Synthetic oligonucleotide
ctcctttaagtgggtcctgcgctgggtgct

SEQ ID NO: 436080 - DNA, 30 bp, Artificial Sequence
  Synthetic oligonucleotide
tttccggatctgtcaaacaatagtggtgct

SEQ ID NO: 436081 - DNA, 30 bp, Artificial Sequence
  Synthetic oligonucleotide
gtctggatgcctaggtttaagggtggtgct

SEQ ID NO: 436082 - DNA, 30 bp, Artificial Sequence
  Synthetic oligonucleotide
gcttgagtctggatcaatttttgtggtgct

SEQ ID NO: 436083 - DNA, 30 bp, Artificial Sequence
  Synthetic oligonucleotide
cttgttgggtttgtttaattgctatgtgct

SEQ ID NO: 436084 - DNA, 30 bp, Artificial Sequence
  Synthetic oligonucleotide
tattagagtctagaagttacctgctgtgct

SEQ ID NO: 436085 - DNA, 30 bp, Artificial Sequence
  Synthetic oligonucleotide
cgccgtctttcgcgtacacgcatgtgtgct

SEQ ID NO: 436086 - DNA, 30 bp, Artificial Sequence
  Synthetic oligonucleotide
ggttgggacctcctcgtagagcattgtgct

SEQ ID NO: 436087 - DNA, 30 bp, Artificial Sequence
  Synthetic oligonucleotide
caagtggcaatcctcttatagggttgtgct

SEQ ID NO: 436088 - DNA, 30 bp, Artificial Sequence
  Synthetic oligonucleotide
aactagatatcatattaataagtttgtgct

SEQ ID NO: 436089 - DNA, 30 bp, Artificial Sequence
  Synthetic oligonucleotide
atcgacacgtcgggttgtttgagaattgct

SEQ ID NO: 436090 - DNA, 30 bp, Artificial Sequence
  Synthetic oligonucleotide
gtgcacggcgtcggtacatggccgattgct

SEQ ID NO: 436091 - DNA, 30 bp, Artificial Sequence
  Synthetic oligonucleotide
tactgcatgtacagagtgacaagtattgct

SEQ ID NO: 436092 - DNA, 30 bp, Artificial Sequence
  Synthetic oligonucleotide
tgtgtctgaaccgtctcatcaggtattgct

SEQ ID NO: 436093 - DNA, 30 bp, Artificial Sequence
  Synthetic oligonucleotide
tcctcatgatcttaatttgagcgacttgct

SEQ ID NO: 436094 - DNA, 30 bp, Artificial Sequence
  Synthetic oligonucleotide
catagtgtcttccgtatattctcccttgct

SEQ ID NO: 436095 - DNA, 30 bp, Artificial Sequence
  Synthetic oligonucleotide
cagcatcactaagttagtcatcctcttgct

SEQ ID NO: 436096 - DNA, 30 bp, Artificial Sequence
  Synthetic oligonucleotide
ggacactccctataagacaactgcgttgct

SEQ ID NO: 436097 - DNA, 30 bp, Artificial Sequence
  Synthetic oligonucleotide
agcaaaacgccgtgattagaagtcgttgct

SEQ ID NO: 436098 - DNA, 30 bp, Artificial Sequence
  Synthetic oligonucleotide
gccaaagccccgcgcacgtaggcggttgct

SEQ ID NO: 436099 - DNA, 30 bp, Artificial Sequence
  Synthetic oligonucleotide
ttggtgggtcaggcagcactcggtgttgct

SEQ ID NO: 436100 - DNA, 30 bp, Artificial Sequence
  Synthetic oligonucleotide
cactggcaagcataataaaacattgttgct

SEQ ID NO: 436101 - DNA, 30 bp, Artificial Sequence
  Synthetic oligonucleotide
catatgcaagaccgtgaacgggaatttgct

SEQ ID NO: 436102 - DNA, 30 bp, Artificial Sequence
  Synthetic oligonucleotide
ctactggtgcgttactcggccgcatttgct

SEQ ID NO: 436103 - DNA, 30 bp, Artificial Sequence
  Synthetic oligonucleotide
gcagtgcgcagacaatgtcagcgatttgct

SEQ ID NO: 436104 - DNA, 30 bp, Artificial Sequence
  Synthetic oligonucleotide
agaaagtttttccaccaacaattatttgct

SEQ ID NO: 436105 - DNA, 30 bp, Artificial Sequence
  Synthetic oligonucleotide
cactcagtagagacctactgagactttgct

SEQ ID NO: 436106 - DNA, 30 bp, Artificial Sequence
  Synthetic oligonucleotide
ggcagatctaagctgatgcacagctttgct

SEQ ID NO: 436107 - DNA, 30 bp, Artificial Sequence
  Synthetic oligonucleotide
ttccatattgcagttgaggtcaagtttgct

SEQ ID NO: 436108 - DNA, 30 bp, Artificial Sequence
  Synthetic oligonucleotide
tttttaaaggtgatccgccgtgagtttgct

SEQ ID NO: 436109 - DNA, 30 bp, Artificial Sequence
  Synthetic oligonucleotide
tgattatcggtcggtgtgttagattttgct

SEQ ID NO: 436110 - DNA, 30 bp, Artificial Sequence
  Synthetic oligonucleotide
tgtcacccaggcaatatcggagcttttgct

SEQ ID NO: 436111 - DNA, 30 bp, Artificial Sequence
  Synthetic oligonucleotide
atgttgtgataaatacgctgtaaaaaatct

SEQ ID NO: 436112 - DNA, 30 bp, Artificial Sequence
  Synthetic oligonucleotide
ggtctaggctatgggggttggtgaaaatct

SEQ ID NO: 436113 - DNA, 30 bp, Artificial Sequence
  Synthetic oligonucleotide
ggtacctgacgtgctacggctcacaaatct

SEQ ID NO: 436114 - DNA, 30 bp, Artificial Sequence
  Synthetic oligonucleotide
aatcttttaaaacgaggagtccgcaaatct

SEQ ID NO: 436115 - DNA, 30 bp, Artificial Sequence
  Synthetic oligonucleotide
aactctttgtacactaatggactcaaatct

SEQ ID NO: 436116 - DNA, 30 bp, Artificial Sequence
  Synthetic oligonucleotide
tatgtagttatcacatgaaaggtcaaatct

SEQ ID NO: 436117 - DNA, 30 bp, Artificial Sequence
  Synthetic oligonucleotide
cgctgcgcgctacacgatgcgtcgaaatct

SEQ ID NO: 436118 - DNA, 30 bp, Artificial Sequence
  Synthetic oligonucleotide
attatgtgacgcatactgcttcggaaatct

SEQ ID NO: 436119 - DNA, 30 bp, Artificial Sequence
  Synthetic oligonucleotide
agtgttataaggggctcacaaaataaatct

SEQ ID NO: 436120 - DNA, 30 bp, Artificial Sequence
  Synthetic oligonucleotide
tagtaaccgcttggtattcgtagacaatct

SEQ ID NO: 436121 - DNA, 31 bp, Artificial Sequence
  Synthetic oligonucleotide
gaaaagggacggcagagagagtgaccaatct

SEQ ID NO: 436122 - DNA, 30 bp, Artificial Sequence
  Synthetic oligonucleotide
aatacacaggtgagtatattattccaatct

SEQ ID NO: 436123 - DNA, 30 bp, Artificial Sequence
  Synthetic oligonucleotide
cgcaccgcggccacacagctgccgcaatct

SEQ ID NO: 436124 - DNA, 30 bp, Artificial Sequence
  Synthetic oligonucleotide
gctatacaggggacgaaacacttagaatct

SEQ ID NO: 436125 - DNA, 30 bp, Artificial Sequence
  Synthetic oligonucleotide
atccggacgaaactggcagggtccgaatct

SEQ ID NO: 436126 - DNA, 30 bp, Artificial Sequence
  Synthetic oligonucleotide
gagacgcaagcagggagatgttgcgaatct

SEQ ID NO: 436127 - DNA, 30 bp, Artificial Sequence
  Synthetic oligonucleotide
tgcccagtttggtaaccctcctaggaatct

SEQ ID NO: 436128 - DNA, 30 bp, Artificial Sequence
  Synthetic oligonucleotide
ccacagcttttcgtagaacgttaggaatct

SEQ ID NO: 436129 - DNA, 30 bp, Artificial Sequence
  Synthetic oligonucleotide
actctcaacaggctttgacccacggaatct

SEQ ID NO: 436130 - DNA, 30 bp, Artificial Sequence
  Synthetic oligonucleotide
cctaagttgtagacagcgtacagggaatct

SEQ ID NO: 436131 - DNA, 30 bp, Artificial Sequence
  Synthetic oligonucleotide
ggaagtttctccctattatacggggaatct

SEQ ID NO: 436132 - DNA, 30 bp, Artificial Sequence
  Synthetic oligonucleotide
taagtcaagaggctgtaatgtgtggaatct

SEQ ID NO: 436133 - DNA, 30 bp, Artificial Sequence
  Synthetic oligonucleotide
atcctcacgcgttatattatcggtgaatct

SEQ ID NO: 436134 - DNA, 30 bp, Artificial Sequence
  Synthetic oligonucleotide
ggacagtccgccgagcagtatgttgaatct

SEQ ID NO: 436135 - DNA, 30 bp, Artificial Sequence
  Synthetic oligonucleotide
ctgtcagaagtcgggggctctgttgaatct

SEQ ID NO: 436136 - DNA, 30 bp, Artificial Sequence
  Synthetic oligonucleotide
cggggcacaggatccttgtgataataatct

SEQ ID NO: 436137 - DNA, 30 bp, Artificial Sequence
  Synthetic oligonucleotide
gcataaaacctccaaggctcttaataatct

SEQ ID NO: 436138 - DNA, 30 bp, Artificial Sequence
  Synthetic oligonucleotide
tggatgagtgctaagcgtcacgcataatct

SEQ ID NO: 436139 - DNA, 30 bp, Artificial Sequence
  Synthetic oligonucleotide
taacgaagacgcaagctgctgatataatct

SEQ ID NO: 436140 - DNA, 30 bp, Artificial Sequence
  Synthetic oligonucleotide
gccgggctcagctatatgctgaagtaatct

SEQ ID NO: 436141 - DNA, 30 bp, Artificial Sequence
  Synthetic oligonucleotide
gcactgtacgtccttattctcacgtaatct

SEQ ID NO: 436142 - DNA, 30 bp, Artificial Sequence
  Synthetic oligonucleotide
ggactaaatagaatacagccctgttaatct

SEQ ID NO: 436143 - DNA, 30 bp, Artificial Sequence
  Synthetic oligonucleotide
gcggaacttgctagccataggctttaatct

SEQ ID NO: 436144 - DNA, 30 bp, Artificial Sequence
  Synthetic oligonucleotide
ttagtactgattgcctacggtcaaacatct

SEQ ID NO: 436145 - DNA, 30 bp, Artificial Sequence
  Synthetic oligonucleotide
cattactatctatacattatgcgaacatct

SEQ ID NO: 436146 - DNA, 30 bp, Artificial Sequence
  Synthetic oligonucleotide
aataataggtgggtaataacactcacatct

SEQ ID NO: 436147 - DNA, 30 bp, Artificial Sequence
  Synthetic oligonucleotide
gaggtctcgtgagtaaacaccaggacatct

SEQ ID NO: 436148 - DNA, 30 bp, Artificial Sequence
  Synthetic oligonucleotide
tcgtagtgagcatgtttggtgatgacatct

SEQ ID NO: 436149 - DNA, 30 bp, Artificial Sequence
  Synthetic oligonucleotide
agagcaatcgacgctagaacgccaccatct

SEQ ID NO: 436150 - DNA, 30 bp, Artificial Sequence
  Synthetic oligonucleotide
atatacaccatcactcagtgtcgaccatct

SEQ ID NO: 436151 - DNA, 30 bp, Artificial Sequence
  Synthetic oligonucleotide
ggagcacaatgagacacagcaataccatct

SEQ ID NO: 436152 - DNA, 30 bp, Artificial Sequence
  Synthetic oligonucleotide
acgcgtcgttcccacatactagacccatct

SEQ ID NO: 436153 - DNA, 30 bp, Artificial Sequence
  Synthetic oligonucleotide
cacgctatgggttgtaaagccactccatct

SEQ ID NO: 436154 - DNA, 30 bp, Artificial Sequence
  Synthetic oligonucleotide
gttctacgtggtcagtcagagcccgcatct

SEQ ID NO: 436155 - DNA, 30 bp, Artificial Sequence
  Synthetic oligonucleotide
gcatatggtccattcctcatataggcatct

SEQ ID NO: 436156 - DNA, 29 bp, Artificial Sequence
  Synthetic oligonucleotide
tagagcgagacttcgcaatagcggcatct

SEQ ID NO: 436157 - DNA, 30 bp, Artificial Sequence
  Synthetic oligonucleotide
tttaccaatagtgagaacccgatggcatct

SEQ ID NO: 436158 - DNA, 30 bp, Artificial Sequence
  Synthetic oligonucleotide
ggttcgttacgcgaattaggtgatgcatct

SEQ ID NO: 436159 - DNA, 30 bp, Artificial Sequence
  Synthetic oligonucleotide
acattgtttattaatattacgtatgcatct

SEQ ID NO: 436160 - DNA, 30 bp, Artificial Sequence
  Synthetic oligonucleotide
gtacatgaatcttcggaggctactgcatct

SEQ ID NO: 436161 - DNA, 30 bp, Artificial Sequence
  Synthetic oligonucleotide
atgagcgctaccactaacgtggcatcatct

SEQ ID NO: 436162 - DNA, 30 bp, Artificial Sequence
  Synthetic oligonucleotide
ttcaccgacgcatcgcaaccctcctcatct

SEQ ID NO: 436163 - DNA, 30 bp, Artificial Sequence
  Synthetic oligonucleotide
aaatgcataaacgaggtaagaagttcatct

SEQ ID NO: 436164 - DNA, 30 bp, Artificial Sequence
  Synthetic oligonucleotide
agaaattatatggcggactgcctcagatct

SEQ ID NO: 436165 - DNA, 30 bp, Artificial Sequence
  Synthetic oligonucleotide
ttggtcctctttggtgtcctggcgagatct

SEQ ID NO: 436166 - DNA, 30 bp, Artificial Sequence
  Synthetic oligonucleotide
tgaggggcttcacatgttggtgcgagatct

SEQ ID NO: 436167 - DNA, 30 bp, Artificial Sequence
  Synthetic oligonucleotide
aggtaaagctgtcctggcagacggagatct

SEQ ID NO: 436168 - DNA, 30 bp, Artificial Sequence
  Synthetic oligonucleotide
gaataaagtgtacggtcactcatgagatct

SEQ ID NO: 436169 - DNA, 30 bp, Artificial Sequence
  Synthetic oligonucleotide
accgcgcgcgagtcaagggctcgacgatct

SEQ ID NO: 436170 - DNA, 30 bp, Artificial Sequence
  Synthetic oligonucleotide
ttgacggtgtccttatgattgtagcgatct

SEQ ID NO: 436171 - DNA, 30 bp, Artificial Sequence
  Synthetic oligonucleotide
gcagacgcagttctaatctggcggcgatct

SEQ ID NO: 436172 - DNA, 30 bp, Artificial Sequence
  Synthetic oligonucleotide
agtactctctaggaacgacggatgcgatct

SEQ ID NO: 436173 - DNA, 30 bp, Artificial Sequence
  Synthetic oligonucleotide
gcgattacgcaaaccgcgatgcgtcgatct

SEQ ID NO: 436174 - DNA, 30 bp, Artificial Sequence
  Synthetic oligonucleotide
agggcggcgacacgtggggttcttcgatct

SEQ ID NO: 436175 - DNA, 30 bp, Artificial Sequence
  Synthetic oligonucleotide
tataagttgaatctccgaaatatcggatct

SEQ ID NO: 436176 - DNA, 30 bp, Artificial Sequence
  Synthetic oligonucleotide
attatagacgcggcatacgtcgtcggatct

SEQ ID NO: 436177 - DNA, 30 bp, Artificial Sequence
  Synthetic oligonucleotide
ggcaggattgttatcaccgcctggggatct

SEQ ID NO: 436178 - DNA, 30 bp, Artificial Sequence
  Synthetic oligonucleotide
tggactatgatgggggcattttttggatct

SEQ ID NO: 436179 - DNA, 30 bp, Artificial Sequence
  Synthetic oligonucleotide
gcttacacactctttatgtttgtatgatct

SEQ ID NO: 436180 - DNA, 30 bp, Artificial Sequence
  Synthetic oligonucleotide
aatactgacggatggggaaaatcctgatct

SEQ ID NO: 436181 - DNA, 30 bp, Artificial Sequence
  Synthetic oligonucleotide
gattccaaataagtaataaggatctgatct

SEQ ID NO: 436182 - DNA, 30 bp, Artificial Sequence
  Synthetic oligonucleotide
ttcccgaaacacacggattctatctgatct

SEQ ID NO: 436183 - DNA, 30 bp, Artificial Sequence
  Synthetic oligonucleotide
tcaatataatatgggaccttaacgtgatct

SEQ ID NO: 436184 - DNA, 30 bp, Artificial Sequence
  Synthetic oligonucleotide
cttgtcgacataacggagcaaaggtgatct

SEQ ID NO: 436185 - DNA, 30 bp, Artificial Sequence
  Synthetic oligonucleotide
cagcagactcgttagccgtacctgtgatct

SEQ ID NO: 436186 - DNA, 30 bp, Artificial Sequence
  Synthetic oligonucleotide
ttatcatcctataccgcctaagaaatatct

SEQ ID NO: 436187 - DNA, 30 bp, Artificial Sequence
  Synthetic oligonucleotide
ggtcccctatcgggcgattattaaatatct

SEQ ID NO: 436188 - DNA, 30 bp, Artificial Sequence
  Synthetic oligonucleotide
aaagcaagcgctaaattaacttaaatatct

SEQ ID NO: 436189 - DNA, 30 bp, Artificial Sequence
  Synthetic oligonucleotide
cgtatcgtccagttctccgctacgatatct

SEQ ID NO: 436190 - DNA, 30 bp, Artificial Sequence
  Synthetic oligonucleotide
ggtaagcctgtagatttatgaatgatatct

SEQ ID NO: 436191 - DNA, 30 bp, Artificial Sequence
  Synthetic oligonucleotide
gattgaccttgggcgcaacgaagtatatct

SEQ ID NO: 436192 - DNA, 30 bp, Artificial Sequence
  Synthetic oligonucleotide
tatagaaccaatacgcactttattatatct

SEQ ID NO: 436193 - DNA, 30 bp, Artificial Sequence
  Synthetic oligonucleotide
ctggcattaggaaagttttcaagcctatct

SEQ ID NO: 436194 - DNA, 30 bp, Artificial Sequence
  Synthetic oligonucleotide
ggttaagcctagtaaacagccttcctatct

SEQ ID NO: 436195 - DNA, 30 bp, Artificial Sequence
  Synthetic oligonucleotide
ttatagtctacaagagcgatcactctatct

SEQ ID NO: 436196 - DNA, 30 bp, Artificial Sequence
  Synthetic oligonucleotide
gagccaaccactagtgcgctacgagtatct

SEQ ID NO: 436197 - DNA, 30 bp, Artificial Sequence
  Synthetic oligonucleotide
actttggagattacctagcaactagtatct

SEQ ID NO: 436198 - DNA, 30 bp, Artificial Sequence
  Synthetic oligonucleotide
ccgatacctatggtgcatggacccgtatct

SEQ ID NO: 436199 - DNA, 30 bp, Artificial Sequence
  Synthetic oligonucleotide
caccaattaaggcttaacgatgccgtatct

SEQ ID NO: 436200 - DNA, 30 bp, Artificial Sequence
  Synthetic oligonucleotide
tgagtggatctggcttttacttgcgtatct

SEQ ID NO: 436201 - DNA, 30 bp, Artificial Sequence
  Synthetic oligonucleotide
tctatgacggttcggtattaaaaggtatct

SEQ ID NO: 436202 - DNA, 30 bp, Artificial Sequence
  Synthetic oligonucleotide
gagcgacctatttagaaagtggaggtatct

SEQ ID NO: 436203 - DNA, 30 bp, Artificial Sequence
  Synthetic oligonucleotide
attgagattttggctacagtccgggtatct

SEQ ID NO: 436204 - DNA, 30 bp, Artificial Sequence
  Synthetic oligonucleotide
tggatgtagcctccgtatcgggatgtatct

SEQ ID NO: 436205 - DNA, 30 bp, Artificial Sequence
  Synthetic oligonucleotide
agtcactgacgttgcacggcctctgtatct

SEQ ID NO: 436206 - DNA, 30 bp, Artificial Sequence
  Synthetic oligonucleotide
agcgcgacttcagtatgtttcattgtatct

SEQ ID NO: 436207 - DNA, 30 bp, Artificial Sequence
  Synthetic oligonucleotide
cttgtcagtaatcgtgcggccccattatct

SEQ ID NO: 436208 - DNA, 30 bp, Artificial Sequence
  Synthetic oligonucleotide
ggactccctatgcacttcatacccttatct

SEQ ID NO: 436209 - DNA, 30 bp, Artificial Sequence
  Synthetic oligonucleotide
ggttgagtcaaagcgcactaccgcttatct

SEQ ID NO: 436210 - DNA, 30 bp, Artificial Sequence
  Synthetic oligonucleotide
cggtggggctggcctgtaggctggttatct

SEQ ID NO: 436211 - DNA, 30 bp, Artificial Sequence
  Synthetic oligonucleotide
gatattagagaacaactcttttatttatct

SEQ ID NO: 436212 - DNA, 30 bp, Artificial Sequence
  Synthetic oligonucleotide
aaggccatacggggaaagtaaactttatct

SEQ ID NO: 436213 - DNA, 30 bp, Artificial Sequence
  Synthetic oligonucleotide
gaccatctatgacaggctcgcggtttatct

SEQ ID NO: 436214 - DNA, 30 bp, Artificial Sequence
  Synthetic oligonucleotide
ggactcccgtggggagattatcaaaactct

SEQ ID NO: 436215 - DNA, 30 bp, Artificial Sequence
  Synthetic oligonucleotide
aacgagtgcatttcctttactcaaaactct

SEQ ID NO: 436216 - DNA, 30 bp, Artificial Sequence
  Synthetic oligonucleotide
atatctataggacgtcacagtcgaaactct

SEQ ID NO: 436217 - DNA, 30 bp, Artificial Sequence
  Synthetic oligonucleotide
tgagtggccggagcatggcgttgaaactct

SEQ ID NO: 436218 - DNA, 30 bp, Artificial Sequence
  Synthetic oligonucleotide
tccaagattattacgggaaccataaactct

SEQ ID NO: 436219 - DNA, 30 bp, Artificial Sequence
  Synthetic oligonucleotide
gtatttaggaagaacccggcactaaactct

SEQ ID NO: 436220 - DNA, 30 bp, Artificial Sequence
  Synthetic oligonucleotide
gccatctgggaagcgagagttcccaactct

SEQ ID NO: 436221 - DNA, 30 bp, Artificial Sequence
  Synthetic oligonucleotide
accttcgtgtaagatttagaatagaactct

SEQ ID NO: 436222 - DNA, 30 bp, Artificial Sequence
  Synthetic oligonucleotide
tggccaagcaatgttctcaattggaactct

SEQ ID NO: 436223 - DNA, 30 bp, Artificial Sequence
  Synthetic oligonucleotide
agtctcgggatgcgcggacaacctaactct

SEQ ID NO: 436224 - DNA, 30 bp, Artificial Sequence
  Synthetic oligonucleotide
tttaattgcgtatagctcacctgtaactct

SEQ ID NO: 436225 - DNA, 30 bp, Artificial Sequence
  Synthetic oligonucleotide
tagctcacagaatttaacacttttaactct

SEQ ID NO: 436226 - DNA, 30 bp, Artificial Sequence
  Synthetic oligonucleotide
cagagtgttttgggactaaagtcccactct

SEQ ID NO: 436227 - DNA, 30 bp, Artificial Sequence
  Synthetic oligonucleotide
gaatacattcttggcctaccaagccactct

SEQ ID NO: 436228 - DNA, 30 bp, Artificial Sequence
  Synthetic oligonucleotide
taacgccgtttacacaaacctggccactct

SEQ ID NO: 436229 - DNA, 30 bp, Artificial Sequence
  Synthetic oligonucleotide
gaaatttaccggattactatcctccactct

SEQ ID NO: 436230 - DNA, 30 bp, Artificial Sequence
  Synthetic oligonucleotide
cctattggtgtaagctttgtagtccactct

SEQ ID NO: 436231 - DNA, 30 bp, Artificial Sequence
  Synthetic oligonucleotide
tattgctggaccgagactgtattccactct

SEQ ID NO: 436232 - DNA, 30 bp, Artificial Sequence
  Synthetic oligonucleotide
atagggtagcgtttgcaacaaacgcactct

SEQ ID NO: 436233 - DNA, 30 bp, Artificial Sequence
  Synthetic oligonucleotide
accgataggggtccggttagggcgcactct

SEQ ID NO: 436234 - DNA, 30 bp, Artificial Sequence
  Synthetic oligonucleotide
tgttgtgaacaagtctgcctctggcactct

SEQ ID NO: 436235 - DNA, 30 bp, Artificial Sequence
  Synthetic oligonucleotide
aagagtctgacaaaacggtcgcatcactct

SEQ ID NO: 436236 - DNA, 30 bp, Artificial Sequence
  Synthetic oligonucleotide
tagggtgcttatggccctcccaaagactct

SEQ ID NO: 436237 - DNA, 30 bp, Artificial Sequence
  Synthetic oligonucleotide
gggtacgtttcgtcagtcagcgcagactct

SEQ ID NO: 436238 - DNA, 30 bp, Artificial Sequence
  Synthetic oligonucleotide
tgttctcgtcattaaagtataggcgactct

SEQ ID NO: 436239 - DNA, 30 bp, Artificial Sequence
  Synthetic oligonucleotide
atagtgtaatcagctaatcacctcgactct

SEQ ID NO: 436240 - DNA, 30 bp, Artificial Sequence
  Synthetic oligonucleotide
atggagcaatgtcgtaagttcttcgactct

SEQ ID NO: 436241 - DNA, 30 bp, Artificial Sequence
  Synthetic oligonucleotide
tccaattgctatttatacgaccaggactct

SEQ ID NO: 436242 - DNA, 30 bp, Artificial Sequence
  Synthetic oligonucleotide
gcaattgttaattaacttctaacatactct

SEQ ID NO: 436243 - DNA, 30 bp, Artificial Sequence
  Synthetic oligonucleotide
ctctactaggaatagagcatattctactct

SEQ ID NO: 436244 - DNA, 30 bp, Artificial Sequence
  Synthetic oligonucleotide
cgactggtgcgctcgtagaaccggtactct

SEQ ID NO: 436245 - DNA, 30 bp, Artificial Sequence
  Synthetic oligonucleotide
cgcgcgtgttttttggatctcccttactct

SEQ ID NO: 436246 - DNA, 30 bp, Artificial Sequence
  Synthetic oligonucleotide
gagctggatctagggcatacgccttactct

SEQ ID NO: 436247 - DNA, 30 bp, Artificial Sequence
  Synthetic oligonucleotide
tggcgcattgctattggtatttaaacctct

SEQ ID NO: 436248 - DNA, 30 bp, Artificial Sequence
  Synthetic oligonucleotide
gtcaagcaaagccgtaggtacgcaacctct

SEQ ID NO: 436249 - DNA, 30 bp, Artificial Sequence
  Synthetic oligonucleotide
gagatatatcgctgcccagtagtaacctct

SEQ ID NO: 436250 - DNA, 30 bp, Artificial Sequence
  Synthetic oligonucleotide
gccgtacacgtacggctattatacacctct

SEQ ID NO: 436251 - DNA, 30 bp, Artificial Sequence
  Synthetic oligonucleotide
ctattgcggaaaacacatccaagcacctct

SEQ ID NO: 436252 - DNA, 30 bp, Artificial Sequence
  Synthetic oligonucleotide
ggttcgccagttgggcggcccggcacctct

SEQ ID NO: 436253 - DNA, 30 bp, Artificial Sequence
  Synthetic oligonucleotide
cttactctgtattcccgacgtaggacctct

SEQ ID NO: 436254 - DNA, 30 bp, Artificial Sequence
  Synthetic oligonucleotide
gccaggttacgattatcgatcattacctct

SEQ ID NO: 436255 - DNA, 30 bp, Artificial Sequence
  Synthetic oligonucleotide
tcgcgagctgcacgcggcatagttacctct

SEQ ID NO: 436256 - DNA, 30 bp, Artificial Sequence
  Synthetic oligonucleotide
ctacacggcggttgccagaatagaccctct

SEQ ID NO: 436257 - DNA, 30 bp, Artificial Sequence
  Synthetic oligonucleotide
tctaagggccaccaactttcaggcccctct

SEQ ID NO: 436258 - DNA, 30 bp, Artificial Sequence
  Synthetic oligonucleotide
ggaggttctaggattctcaaaccgccctct

SEQ ID NO: 436259 - DNA, 30 bp, Artificial Sequence
  Synthetic oligonucleotide
gtgtgttacggcgaggcaatgtaagcctct

SEQ ID NO: 436260 - DNA, 30 bp, Artificial Sequence
  Synthetic oligonucleotide
acagttccgtagaatgacctgctagcctct

SEQ ID NO: 436261 - DNA, 30 bp, Artificial Sequence
  Synthetic oligonucleotide
gatgtgctaaaacgcacaggattagcctct

SEQ ID NO: 436262 - DNA, 30 bp, Artificial Sequence
  Synthetic oligonucleotide
aacgggcaccttaatcttccagccgcctct

SEQ ID NO: 436263 - DNA, 30 bp, Artificial Sequence
  Synthetic oligonucleotide
gttcacccaaggagcgctgctgccgcctct

SEQ ID NO: 436264 - DNA, 30 bp, Artificial Sequence
  Synthetic oligonucleotide
atctagggtcagaaggtttaacaatcctct

SEQ ID NO: 436265 - DNA, 30 bp, Artificial Sequence
  Synthetic oligonucleotide
tcttgtagtgagtggagacactaatcctct

SEQ ID NO: 436266 - DNA, 30 bp, Artificial Sequence
  Synthetic oligonucleotide
tagcctaccttgaatcactggcgatcctct

SEQ ID NO: 436267 - DNA, 30 bp, Artificial Sequence
  Synthetic oligonucleotide
aatgagtccagctagttgcatttatcctct

SEQ ID NO: 436268 - DNA, 30 bp, Artificial Sequence
  Synthetic oligonucleotide
cggcaggagaatactcagggcgggtcctct

SEQ ID NO: 436269 - DNA, 30 bp, Artificial Sequence
  Synthetic oligonucleotide
gggacttgtaacagatttccctattcctct

SEQ ID NO: 436270 - DNA, 30 bp, Artificial Sequence
  Synthetic oligonucleotide
ttcatctgatcaatctgatgaatttcctct

SEQ ID NO: 436271 - DNA, 30 bp, Artificial Sequence
  Synthetic oligonucleotide
tcacaagtatacaatagagtagtttcctct

SEQ ID NO: 436272 - DNA, 30 bp, Artificial Sequence
  Synthetic oligonucleotide
gtagaagtacggggcctctatccaagctct

SEQ ID NO: 436273 - DNA, 30 bp, Artificial Sequence
  Synthetic oligonucleotide
tctcagtaggacacaatagcaataagctct

SEQ ID NO: 436274 - DNA, 30 bp, Artificial Sequence
  Synthetic oligonucleotide
cctgtgccctgatggatggatagccgctct

SEQ ID NO: 436275 - DNA, 30 bp, Artificial Sequence
  Synthetic oligonucleotide
ctaagagcctgggtaacagtctagcgctct

SEQ ID NO: 436276 - DNA, 30 bp, Artificial Sequence
  Synthetic oligonucleotide
gccacgccaaggggctcttcttagcgctct

SEQ ID NO: 436277 - DNA, 30 bp, Artificial Sequence
  Synthetic oligonucleotide
gcaaaggcgcaacatttggaccggcgctct

SEQ ID NO: 436278 - DNA, 30 bp, Artificial Sequence
  Synthetic oligonucleotide
ggggtcgcaaaacttggactgacaggctct

SEQ ID NO: 436279 - DNA, 30 bp, Artificial Sequence
  Synthetic oligonucleotide
taaaacgcccagcgccaggatccaggctct

SEQ ID NO: 436280 - DNA, 30 bp, Artificial Sequence
  Synthetic oligonucleotide
gacgtgtactcagacgaattgtcaggctct

SEQ ID NO: 436281 - DNA, 30 bp, Artificial Sequence
  Synthetic oligonucleotide
atattactgggtcagagttacggaggctct

SEQ ID NO: 436282 - DNA, 30 bp, Artificial Sequence
  Synthetic oligonucleotide
aaattcaaactgggaacacacgccggctct

SEQ ID NO: 436283 - DNA, 30 bp, Artificial Sequence
  Synthetic oligonucleotide
gtgaggtctttggtcaaccaattcggctct

SEQ ID NO: 436284 - DNA, 30 bp, Artificial Sequence
  Synthetic oligonucleotide
gtaatgcccatttcccgtatatcgggctct

SEQ ID NO: 436285 - DNA, 30 bp, Artificial Sequence
  Synthetic oligonucleotide
tctaggtattcaagcccgaggttgggctct

SEQ ID NO: 436286 - DNA, 30 bp, Artificial Sequence
  Synthetic oligonucleotide
agtcacgtcctttgggtgtaacagtgctct

SEQ ID NO: 436287 - DNA, 30 bp, Artificial Sequence
  Synthetic oligonucleotide
atctcaatggaccccgcacatgcgtgctct

SEQ ID NO: 436288 - DNA, 30 bp, Artificial Sequence
  Synthetic oligonucleotide
ccgcgactgttaatacgggaacggtgctct

SEQ ID NO: 436289 - DNA, 30 bp, Artificial Sequence
  Synthetic oligonucleotide
atttgtttcgcaaagctggtaggttgctct

SEQ ID NO: 436290 - DNA, 30 bp, Artificial Sequence
  Synthetic oligonucleotide
cggagtaagcatattaggtacttttgctct

SEQ ID NO: 436291 - DNA, 30 bp, Artificial Sequence
  Synthetic oligonucleotide
tggtaagcggtgatgcggttaagaatctct

SEQ ID NO: 436292 - DNA, 30 bp, Artificial Sequence
  Synthetic oligonucleotide
cttagtgcggatctattccttataatctct

SEQ ID NO: 436293 - DNA, 30 bp, Artificial Sequence
  Synthetic oligonucleotide
cccgcattcggtaaatgtctacgcatctct

SEQ ID NO: 436294 - DNA, 30 bp, Artificial Sequence
  Synthetic oligonucleotide
tgcaatggctgcacgctgaatgtcatctct

SEQ ID NO: 436295 - DNA, 30 bp, Artificial Sequence
  Synthetic oligonucleotide
ctaattcataggtcacgaagagagatctct

SEQ ID NO: 436296 - DNA, 30 bp, Artificial Sequence
  Synthetic oligonucleotide
tacctacaacgacgacctgcggagatctct

SEQ ID NO: 436297 - DNA, 30 bp, Artificial Sequence
  Synthetic oligonucleotide
gatactctgcgattgttccattcgatctct

SEQ ID NO: 436298 - DNA, 30 bp, Artificial Sequence
  Synthetic oligonucleotide
caagcttacttgcgcgccaagtctatctct

SEQ ID NO: 436299 - DNA, 30 bp, Artificial Sequence
  Synthetic oligonucleotide
agcaagatagatttaaaggttcgtatctct

SEQ ID NO: 436300 - DNA, 30 bp, Artificial Sequence
  Synthetic oligonucleotide
aacacacaaagacggctcctacgactctct

SEQ ID NO: 436301 - DNA, 30 bp, Artificial Sequence
  Synthetic oligonucleotide
gtatcctatagtcgatcaaggcgactctct

SEQ ID NO: 436302 - DNA, 30 bp, Artificial Sequence
  Synthetic oligonucleotide
ttggatggaatttaccgagctcagctctct

SEQ ID NO: 436303 - DNA, 30 bp, Artificial Sequence
  Synthetic oligonucleotide
ctatatgagaatgcacaaggctaagtctct

SEQ ID NO: 436304 - DNA, 30 bp, Artificial Sequence
  Synthetic oligonucleotide
gtgtttttaccagtaccagaagtagtctct

SEQ ID NO: 436305 - DNA, 30 bp, Artificial Sequence
  Synthetic oligonucleotide
tctctgcagggaaacatgcaatgcgtctct

SEQ ID NO: 436306 - DNA, 30 bp, Artificial Sequence
  Synthetic oligonucleotide
ttggggtccacgttcagctgaggggtctct

SEQ ID NO: 436307 - DNA, 30 bp, Artificial Sequence
  Synthetic oligonucleotide
aacgtatcccgatagggtgtcatggtctct

SEQ ID NO: 436308 - DNA, 30 bp, Artificial Sequence
  Synthetic oligonucleotide
gtgtagcctatagctgttggagtggtctct

SEQ ID NO: 436309 - DNA, 30 bp, Artificial Sequence
  Synthetic oligonucleotide
taatttgcgatatcgtcccgcgctgtctct

SEQ ID NO: 436310 - DNA, 30 bp, Artificial Sequence
  Synthetic oligonucleotide
aatatggccaggctcgtgcgtgctgtctct

SEQ ID NO: 436311 - DNA, 30 bp, Artificial Sequence
  Synthetic oligonucleotide
tggtcgatacgcattcttatcattgtctct

SEQ ID NO: 436312 - DNA, 30 bp, Artificial Sequence
  Synthetic oligonucleotide
ggtcagaaattccagctagggaaattctct

SEQ ID NO: 436313 - DNA, 30 bp, Artificial Sequence
  Synthetic oligonucleotide
tagtaaacttatgcgctgtgagcattctct

SEQ ID NO: 436314 - DNA, 30 bp, Artificial Sequence
  Synthetic oligonucleotide
tggaagagactggtgtcccaacagttctct

SEQ ID NO: 436315 - DNA, 30 bp, Artificial Sequence
  Synthetic oligonucleotide
cttagtcaggcaacctgtaactttttctct

SEQ ID NO: 436316 - DNA, 30 bp, Artificial Sequence
  Synthetic oligonucleotide
ccaacacatactactaccattgaaaagtct

SEQ ID NO: 436317 - DNA, 30 bp, Artificial Sequence
  Synthetic oligonucleotide
tttcgccggagtcatcgcacataaaagtct

SEQ ID NO: 436318 - DNA, 30 bp, Artificial Sequence
  Synthetic oligonucleotide
tccttgtcgaagacgggcgggggaaagtct

SEQ ID NO: 436319 - DNA, 30 bp, Artificial Sequence
  Synthetic oligonucleotide
tcgagattaaggctaggtcctcccaagtct

SEQ ID NO: 436320 - DNA, 30 bp, Artificial Sequence
  Synthetic oligonucleotide
tgtatatagtagattgcccccgtcaagtct

SEQ ID NO: 436321 - DNA, 30 bp, Artificial Sequence
  Synthetic oligonucleotide
attaaagtcgtggttaccgcatgtaagtct

SEQ ID NO: 436322 - DNA, 30 bp, Artificial Sequence
  Synthetic oligonucleotide
tatgggaactaccgattgtaaattaagtct

SEQ ID NO: 436323 - DNA, 30 bp, Artificial Sequence
  Synthetic oligonucleotide
atgtgcatagtcgaaactattttgcagtct

SEQ ID NO: 436324 - DNA, 30 bp, Artificial Sequence
  Synthetic oligonucleotide
cgtagttgatcctaggattcgcatcagtct

SEQ ID NO: 436325 - DNA, 30 bp, Artificial Sequence
  Synthetic oligonucleotide
tgtttcgatacttgccctgatggtcagtct

SEQ ID NO: 436326 - DNA, 30 bp, Artificial Sequence
  Synthetic oligonucleotide
gaatcttcatacggtgcattaaaggagtct

SEQ ID NO: 436327 - DNA, 30 bp, Artificial Sequence
  Synthetic oligonucleotide
ggggatagggtaacgcgcctggcggagtct

SEQ ID NO: 436328 - DNA, 30 bp, Artificial Sequence
  Synthetic oligonucleotide
cagcaagggccgggacatcgactggagtct

SEQ ID NO: 436329 - DNA, 30 bp, Artificial Sequence
  Synthetic oligonucleotide
gtacgtttgaggtattttaggtatgagtct

SEQ ID NO: 436330 - DNA, 30 bp, Artificial Sequence
  Synthetic oligonucleotide
gaagctagaagccactaaatcctatagtct

SEQ ID NO: 436331 - DNA, 30 bp, Artificial Sequence
  Synthetic oligonucleotide
ggtttctggcaagacgaggaggcttagtct

SEQ ID NO: 436332 - DNA, 30 bp, Artificial Sequence
  Synthetic oligonucleotide
attttaacttctttaccgaggagaacgtct

SEQ ID NO: 436333 - DNA, 30 bp, Artificial Sequence
  Synthetic oligonucleotide
gcagcgttaggtacagtcgtactaacgtct

SEQ ID NO: 436334 - DNA, 30 bp, Artificial Sequence
  Synthetic oligonucleotide
tgtcggggggtttagtgaaactatacgtct

SEQ ID NO: 436335 - DNA, 30 bp, Artificial Sequence
  Synthetic oligonucleotide
tcgggcgcgtacagccccgggggcgcgtct

SEQ ID NO: 436336 - DNA, 30 bp, Artificial Sequence
  Synthetic oligonucleotide
gttgcacagcttgttgtaaacacggcgtct

SEQ ID NO: 436337 - DNA, 30 bp, Artificial Sequence
  Synthetic oligonucleotide
cagctaacctagtgatataggtcggcgtct

SEQ ID NO: 436338 - DNA, 30 bp, Artificial Sequence
  Synthetic oligonucleotide
atcacaaggagcaaagctccgttatcgtct

SEQ ID NO: 436339 - DNA, 30 bp, Artificial Sequence
  Synthetic oligonucleotide
tttcatatggttgccccgccttgctcgtct

SEQ ID NO: 436340 - DNA, 30 bp, Artificial Sequence
  Synthetic oligonucleotide
tcttacgtttatttatagttttattcgtct

SEQ ID NO: 436341 - DNA, 30 bp, Artificial Sequence
  Synthetic oligonucleotide
tcagtacaggccctagaagattcaaggtct

SEQ ID NO: 436342 - DNA, 30 bp, Artificial Sequence
  Synthetic oligonucleotide
cgcactcaatggggcacatcttacaggtct

SEQ ID NO: 436343 - DNA, 30 bp, Artificial Sequence
  Synthetic oligonucleotide
tcaaaggaacgcgggcctgtagccaggtct

SEQ ID NO: 436344 - DNA, 30 bp, Artificial Sequence
  Synthetic oligonucleotide
gacgtgctgattcacttgtgaaagaggtct

SEQ ID NO: 436345 - DNA, 30 bp, Artificial Sequence
  Synthetic oligonucleotide
ctctcatggttttaggataaggggaggtct

SEQ ID NO: 436346 - DNA, 30 bp, Artificial Sequence
  Synthetic oligonucleotide
tactacattagccttataaattggaggtct

SEQ ID NO: 436347 - DNA, 30 bp, Artificial Sequence
  Synthetic oligonucleotide
cggaataccgcactgccaagactgaggtct

SEQ ID NO: 436348 - DNA, 30 bp, Artificial Sequence
  Synthetic oligonucleotide
taacccccctggttctacctccaacggtct

SEQ ID NO: 436349 - DNA, 30 bp, Artificial Sequence
  Synthetic oligonucleotide
gtggctctgacggttaatactacacggtct

SEQ ID NO: 436350 - DNA, 30 bp, Artificial Sequence
  Synthetic oligonucleotide
tcctacgacgagatccggtaagtacggtct

SEQ ID NO: 436351 - DNA, 30 bp, Artificial Sequence
  Synthetic oligonucleotide
taaagggccgcaaagggatgtcaccggtct

SEQ ID NO: 436352 - DNA, 30 bp, Artificial Sequence
  Synthetic oligonucleotide
gacaaacctggacacacaatccggcggtct

SEQ ID NO: 436353 - DNA, 30 bp, Artificial Sequence
  Synthetic oligonucleotide
attcattaccgtttggggtatattcggtct

SEQ ID NO: 436354 - DNA, 30 bp, Artificial Sequence
  Synthetic oligonucleotide
gcaaaggggcagcctaaagacgttcggtct

SEQ ID NO: 436355 - DNA, 30 bp, Artificial Sequence
  Synthetic oligonucleotide
attagttttacaaccactgcatacgggtct

SEQ ID NO: 436356 - DNA, 30 bp, Artificial Sequence
  Synthetic oligonucleotide
aagcgagacaaatcacccttggtcgggtct

SEQ ID NO: 436357 - DNA, 30 bp, Artificial Sequence
  Synthetic oligonucleotide
ggaaccggatgattcatgtagccggggtct

SEQ ID NO: 436358 - DNA, 30 bp, Artificial Sequence
  Synthetic oligonucleotide
tgtgtaactttttcatccgctgcggggtct

SEQ ID NO: 436359 - DNA, 30 bp, Artificial Sequence
  Synthetic oligonucleotide
attaggagccgcgatcagaaattggggtct

SEQ ID NO: 436360 - DNA, 30 bp, Artificial Sequence
  Synthetic oligonucleotide
atgtttcaggggctagactgaccatggtct

SEQ ID NO: 436361 - DNA, 30 bp, Artificial Sequence
  Synthetic oligonucleotide
aaggccaagaacgcgcacaggatatggtct

SEQ ID NO: 436362 - DNA, 30 bp, Artificial Sequence
  Synthetic oligonucleotide
tgtgctatgcaagtcggaagatcgtggtct

SEQ ID NO: 436363 - DNA, 30 bp, Artificial Sequence
  Synthetic oligonucleotide
aaaatctcagggctagcggatgggtggtct

SEQ ID NO: 436364 - DNA, 30 bp, Artificial Sequence
  Synthetic oligonucleotide
ggcgagcacacgtacctagctttgtggtct

SEQ ID NO: 436365 - DNA, 30 bp, Artificial Sequence
  Synthetic oligonucleotide
gctctttaccttgttctcggccaaatgtct

SEQ ID NO: 436366 - DNA, 30 bp, Artificial Sequence
  Synthetic oligonucleotide
tagcgggagagtttaacggttacgatgtct

SEQ ID NO: 436367 - DNA, 30 bp, Artificial Sequence
  Synthetic oligonucleotide
tgctgcttcgaagttaagaccccgatgtct

SEQ ID NO: 436368 - DNA, 30 bp, Artificial Sequence
  Synthetic oligonucleotide
gcctcttgcaacaacagagtggcgatgtct

SEQ ID NO: 436369 - DNA, 30 bp, Artificial Sequence
  Synthetic oligonucleotide
atactcgacgcacgcatctaagtgatgtct

SEQ ID NO: 436370 - DNA, 30 bp, Artificial Sequence
  Synthetic oligonucleotide
gtccacttgataactacaccccatatgtct

SEQ ID NO: 436371 - DNA, 30 bp, Artificial Sequence
  Synthetic oligonucleotide
gtttaaattatattcgaaggttatatgtct

SEQ ID NO: 436372 - DNA, 30 bp, Artificial Sequence
  Synthetic oligonucleotide
gcttgcacgatatagatacggcacctgtct

SEQ ID NO: 436373 - DNA, 30 bp, Artificial Sequence
  Synthetic oligonucleotide
cccacagggcgctccgatcgtgtcctgtct

SEQ ID NO: 436374 - DNA, 30 bp, Artificial Sequence
  Synthetic oligonucleotide
tgcttggttgatgaattcgcagaggtgtct

SEQ ID NO: 436375 - DNA, 30 bp, Artificial Sequence
  Synthetic oligonucleotide
gccccaggagtgcaaatgcttagggtgtct

SEQ ID NO: 436376 - DNA, 30 bp, Artificial Sequence
  Synthetic oligonucleotide
gattgcaagcatcgtgattgaaatgtgtct

SEQ ID NO: 436377 - DNA, 30 bp, Artificial Sequence
  Synthetic oligonucleotide
aaaacggatgtcaagcgttctagattgtct

SEQ ID NO: 436378 - DNA, 30 bp, Artificial Sequence
  Synthetic oligonucleotide
gaactatctaccctaccggtgctattgtct

SEQ ID NO: 436379 - DNA, 30 bp, Artificial Sequence
  Synthetic oligonucleotide
aaaagcgtttgccagccttcagtattgtct

SEQ ID NO: 436380 - DNA, 30 bp, Artificial Sequence
  Synthetic oligonucleotide
aatccgccataaggatcatgtgtattgtct

SEQ ID NO: 436381 - DNA, 30 bp, Artificial Sequence
  Synthetic oligonucleotide
gcggtaggtaagtcgcttacgcgcttgtct

SEQ ID NO: 436382 - DNA, 30 bp, Artificial Sequence
  Synthetic oligonucleotide
aacccactctttctgattcgacatttgtct

SEQ ID NO: 436383 - DNA, 30 bp, Artificial Sequence
  Synthetic oligonucleotide
tcttccaacttattgggcacagatttgtct

SEQ ID NO: 436384 - DNA, 30 bp, Artificial Sequence
  Synthetic oligonucleotide
agttggggcgcggctttcaagtttttgtct

SEQ ID NO: 436385 - DNA, 30 bp, Artificial Sequence
  Synthetic oligonucleotide
cgcgactagtcagctcgaaattttttgtct

SEQ ID NO: 436386 - DNA, 30 bp, Artificial Sequence
  Synthetic oligonucleotide
gatgtgcacgtgcctcatagctcaaattct

SEQ ID NO: 436387 - DNA, 30 bp, Artificial Sequence
  Synthetic oligonucleotide
actatgctacgcggttcgaagcgaaattct

SEQ ID NO: 436388 - DNA, 30 bp, Artificial Sequence
  Synthetic oligonucleotide
aaaataaaaggcctaacggattgaaattct

SEQ ID NO: 436389 - DNA, 30 bp, Artificial Sequence
  Synthetic oligonucleotide
ccttctctaggatacttataggagaattct

SEQ ID NO: 436390 - DNA, 30 bp, Artificial Sequence
  Synthetic oligonucleotide
aatatccgtccctacaactcttagaattct

SEQ ID NO: 436391 - DNA, 30 bp, Artificial Sequence
  Synthetic oligonucleotide
gcgcaatttataccctggggtaggaattct

SEQ ID NO: 436392 - DNA, 30 bp, Artificial Sequence
  Synthetic oligonucleotide
tcctatctttcgggaaatacgatgaattct

SEQ ID NO: 436393 - DNA, 30 bp, Artificial Sequence
  Synthetic oligonucleotide
tttcagagtctttggtaacggctgaattct

SEQ ID NO: 436394 - DNA, 30 bp, Artificial Sequence
  Synthetic oligonucleotide
tttgcatgaactgcagggacacataattct

SEQ ID NO: 436395 - DNA, 30 bp, Artificial Sequence
  Synthetic oligonucleotide
agttggatgttggacgctgttactaattct

SEQ ID NO: 436396 - DNA, 30 bp, Artificial Sequence
  Synthetic oligonucleotide
cgttaaagctttagccagcgggttaattct

SEQ ID NO: 436397 - DNA, 30 bp, Artificial Sequence
  Synthetic oligonucleotide
aggcctgctggggtttgaaatagacattct

SEQ ID NO: 436398 - DNA, 30 bp, Artificial Sequence
  Synthetic oligonucleotide
gctatcgggatagattcgcttagacattct

SEQ ID NO: 436399 - DNA, 30 bp, Artificial Sequence
  Synthetic oligonucleotide
gttggtattagctagaatcggctacattct

SEQ ID NO: 436400 - DNA, 30 bp, Artificial Sequence
  Synthetic oligonucleotide
cagctgctcctctggcgtactgtacattct

SEQ ID NO: 436401 - DNA, 30 bp, Artificial Sequence
  Synthetic oligonucleotide
tcgtgtatctaatctagaagggtccattct

SEQ ID NO: 436402 - DNA, 30 bp, Artificial Sequence
  Synthetic oligonucleotide
tattacgggacgacaagggatatgcattct

SEQ ID NO: 436403 - DNA, 30 bp, Artificial Sequence
  Synthetic oligonucleotide
tcgctatcttttctagttcaagtgcattct

SEQ ID NO: 436404 - DNA, 30 bp, Artificial Sequence
  Synthetic oligonucleotide
ctttaaactaaggtgtaggcctaagattct

SEQ ID NO: 436405 - DNA, 30 bp, Artificial Sequence
  Synthetic oligonucleotide
attagaaggttcgaagtgataacagattct

SEQ ID NO: 436406 - DNA, 30 bp, Artificial Sequence
  Synthetic oligonucleotide
ctactattacatatttgaagttcagattct

SEQ ID NO: 436407 - DNA, 30 bp, Artificial Sequence
  Synthetic oligonucleotide
ttccaatgcacattgagtcaagaatattct

SEQ ID NO: 436408 - DNA, 30 bp, Artificial Sequence
  Synthetic oligonucleotide
atattcagccagtggggacatgaatattct

SEQ ID NO: 436409 - DNA, 30 bp, Artificial Sequence
  Synthetic oligonucleotide
ccccggcggcggcacgttctgagatattct

SEQ ID NO: 436410 - DNA, 30 bp, Artificial Sequence
  Synthetic oligonucleotide
ccggtttccaggtatcgaaatagatattct

SEQ ID NO: 436411 - DNA, 30 bp, Artificial Sequence
  Synthetic oligonucleotide
accacctgggaggcgagtgacggatattct

SEQ ID NO: 436412 - DNA, 30 bp, Artificial Sequence
  Synthetic oligonucleotide
aaaatcgctctcgcgataaagttatattct

SEQ ID NO: 436413 - DNA, 30 bp, Artificial Sequence
  Synthetic oligonucleotide
tactatccagtcaacgcatacagctattct

SEQ ID NO: 436414 - DNA, 30 bp, Artificial Sequence
  Synthetic oligonucleotide
tgtttttgttagaaccacacacagtattct

SEQ ID NO: 436415 - DNA, 30 bp, Artificial Sequence
  Synthetic oligonucleotide
gcatctgtcgcactggtgcgggtgtattct

SEQ ID NO: 436416 - DNA, 30 bp, Artificial Sequence
  Synthetic oligonucleotide
ctttctggtgagtaatggacagattattct

SEQ ID NO: 436417 - DNA, 30 bp, Artificial Sequence
  Synthetic oligonucleotide
actttagtcgatatcgggttgtaaacttct

SEQ ID NO: 436418 - DNA, 30 bp, Artificial Sequence
  Synthetic oligonucleotide
tgtgaaattaagatgccgcctagcacttct

SEQ ID NO: 436419 - DNA, 30 bp, Artificial Sequence
  Synthetic oligonucleotide
ggacagtatgtttggagggttagcacttct

SEQ ID NO: 436420 - DNA, 30 bp, Artificial Sequence
  Synthetic oligonucleotide
ttagaagactgttgtcatgctgctacttct

SEQ ID NO: 436421 - DNA, 30 bp, Artificial Sequence
  Synthetic oligonucleotide
tttagacgatctaccgaactagatccttct

SEQ ID NO: 436422 - DNA, 30 bp, Artificial Sequence
  Synthetic oligonucleotide
ctcagggtaacactttgctcagacgcttct

SEQ ID NO: 436423 - DNA, 30 bp, Artificial Sequence
  Synthetic oligonucleotide
ttcgactcgtcctatctgggccccgcttct

SEQ ID NO: 436424 - DNA, 30 bp, Artificial Sequence
  Synthetic oligonucleotide
gaggaattcacgcgccattaaaaggcttct

SEQ ID NO: 436425 - DNA, 30 bp, Artificial Sequence
  Synthetic oligonucleotide
gttcagtcgtagagtcgtattaaggcttct

SEQ ID NO: 436426 - DNA, 30 bp, Artificial Sequence
  Synthetic oligonucleotide
caccacaacacaacttagttcgaggcttct

SEQ ID NO: 436427 - DNA, 30 bp, Artificial Sequence
  Synthetic oligonucleotide
tgcaagcggcgctgggcggcttaggcttct

SEQ ID NO: 436428 - DNA, 30 bp, Artificial Sequence
  Synthetic oligonucleotide
agttaggttggcatggaattagcggcttct

SEQ ID NO: 436429 - DNA, 30 bp, Artificial Sequence
  Synthetic oligonucleotide
atattcgcgtagccaagtaagattgcttct

SEQ ID NO: 436430 - DNA, 30 bp, Artificial Sequence
  Synthetic oligonucleotide
agtttgcaaactagaggactcgcatcttct

SEQ ID NO: 436431 - DNA, 30 bp, Artificial Sequence
  Synthetic oligonucleotide
aacagggttcatgcccttctttcatcttct

SEQ ID NO: 436432 - DNA, 30 bp, Artificial Sequence
  Synthetic oligonucleotide
ttatctatctcctgaagttaactatcttct

SEQ ID NO: 436433 - DNA, 30 bp, Artificial Sequence
  Synthetic oligonucleotide
catcgtaaacggttggagtataagtcttct

SEQ ID NO: 436434 - DNA, 30 bp, Artificial Sequence
  Synthetic oligonucleotide
tcgggatcggcaattagccgaccttcttct

SEQ ID NO: 436435 - DNA, 30 bp, Artificial Sequence
  Synthetic oligonucleotide
atggcggttgccttgctgaagtaaagttct

SEQ ID NO: 436436 - DNA, 29 bp, Artificial Sequence
  Synthetic oligonucleotide
tgtgtttggcgctacattctggcagttct

SEQ ID NO: 436437 - DNA, 30 bp, Artificial Sequence
  Synthetic oligonucleotide
gctcggcttgagcgtacagatatcagttct

SEQ ID NO: 436438 - DNA, 30 bp, Artificial Sequence
  Synthetic oligonucleotide
gtcgagctacgatgacgagcaaggagttct

SEQ ID NO: 436439 - DNA, 30 bp, Artificial Sequence
  Synthetic oligonucleotide
cgctgaacctgaacatagccggaacgttct

SEQ ID NO: 436440 - DNA, 30 bp, Artificial Sequence
  Synthetic oligonucleotide
tgctaccgttagagtcttgccttgcgttct

SEQ ID NO: 436441 - DNA, 30 bp, Artificial Sequence
  Synthetic oligonucleotide
gtacattggattcgaaagttgcttcgttct

SEQ ID NO: 436442 - DNA, 30 bp, Artificial Sequence
  Synthetic oligonucleotide
catgttgtgttccgtttcgtcggaggttct

SEQ ID NO: 436443 - DNA, 30 bp, Artificial Sequence
  Synthetic oligonucleotide
agaactgcggtacatatgtgtttaggttct

SEQ ID NO: 436444 - DNA, 30 bp, Artificial Sequence
  Synthetic oligonucleotide
ttctgctcaccgtagtaaaccccgggttct

SEQ ID NO: 436445 - DNA, 30 bp, Artificial Sequence
  Synthetic oligonucleotide
ctgccacttcattacctagtaatgggttct

SEQ ID NO: 436446 - DNA, 30 bp, Artificial Sequence
  Synthetic oligonucleotide
tcaaagtgaatgggtagcactttgggttct

SEQ ID NO: 436447 - DNA, 30 bp, Artificial Sequence
  Synthetic oligonucleotide
aagaagggattctttttggctaatggttct

SEQ ID NO: 436448 - DNA, 30 bp, Artificial Sequence
  Synthetic oligonucleotide
tcagtgtaagtcaaaggcgtatgtggttct

SEQ ID NO: 436449 - DNA, 30 bp, Artificial Sequence
  Synthetic oligonucleotide
cccaagatcagaatcaacaaatttggttct

SEQ ID NO: 436450 - DNA, 30 bp, Artificial Sequence
  Synthetic oligonucleotide
gggtgttatctaatcgtcatagactgttct

SEQ ID NO: 436451 - DNA, 30 bp, Artificial Sequence
  Synthetic oligonucleotide
agtgcccaatcgatacacaggtcctgttct

SEQ ID NO: 436452 - DNA, 30 bp, Artificial Sequence
  Synthetic oligonucleotide
cgacttagcagtcaactgctaagctgttct

SEQ ID NO: 436453 - DNA, 30 bp, Artificial Sequence
  Synthetic oligonucleotide
tgagtgcacctatagcaagtcgtgtgttct

SEQ ID NO: 436454 - DNA, 30 bp, Artificial Sequence
  Synthetic oligonucleotide
cagcgcttttagaagagctcgcattgttct

SEQ ID NO: 436455 - DNA, 30 bp, Artificial Sequence
  Synthetic oligonucleotide
cagattacgcaataagggccatattgttct

SEQ ID NO: 436456 - DNA, 30 bp, Artificial Sequence
  Synthetic oligonucleotide
atacccttacgaagtttcgacctttgttct

SEQ ID NO: 436457 - DNA, 30 bp, Artificial Sequence
  Synthetic oligonucleotide
atataggtaatacctcaagaataaatttct

SEQ ID NO: 436458 - DNA, 30 bp, Artificial Sequence
  Synthetic oligonucleotide
actacactataacttgaggctccaatttct

SEQ ID NO: 436459 - DNA, 30 bp, Artificial Sequence
  Synthetic oligonucleotide
ttgagactatgcacctccacgagaatttct

SEQ ID NO: 436460 - DNA, 30 bp, Artificial Sequence
  Synthetic oligonucleotide
taatatagctgctagtagtatataatttct

SEQ ID NO: 436461 - DNA, 30 bp, Artificial Sequence
  Synthetic oligonucleotide
cgaggtgtgtcttaacggaacgtaatttct

SEQ ID NO: 436462 - DNA, 30 bp, Artificial Sequence
  Synthetic oligonucleotide
aaatacaacgcttttcagcccctcatttct

SEQ ID NO: 436463 - DNA, 30 bp, Artificial Sequence
  Synthetic oligonucleotide
gcccgtgtattctaggtagtcgtcatttct

SEQ ID NO: 436464 - DNA, 30 bp, Artificial Sequence
  Synthetic oligonucleotide
tcatagatggcggggtatccggtcatttct

SEQ ID NO: 436465 - DNA, 30 bp, Artificial Sequence
  Synthetic oligonucleotide
atatgagagtttcgctagttgttcatttct

SEQ ID NO: 436466 - DNA, 30 bp, Artificial Sequence
  Synthetic oligonucleotide
ctggatggtaatgtgcgttgaaagatttct

SEQ ID NO: 436467 - DNA, 30 bp, Artificial Sequence
  Synthetic oligonucleotide
tgtctaaacctaaaggccccgcgtatttct

SEQ ID NO: 436468 - DNA, 30 bp, Artificial Sequence
  Synthetic oligonucleotide
ttgctcattcaatgaaagttatgtatttct

SEQ ID NO: 436469 - DNA, 30 bp, Artificial Sequence
  Synthetic oligonucleotide
gtcagacagcgttcggccgcttgtatttct

SEQ ID NO: 436470 - DNA, 30 bp, Artificial Sequence
  Synthetic oligonucleotide
tagctcgagcaggtttacgcataactttct

SEQ ID NO: 436471 - DNA, 30 bp, Artificial Sequence
  Synthetic oligonucleotide
ggccctgcgacgggaccaacgtaactttct

SEQ ID NO: 436472 - DNA, 30 bp, Artificial Sequence
  Synthetic oligonucleotide
tgtcatgcaccaggggcttgtcgactttct

SEQ ID NO: 436473 - DNA, 30 bp, Artificial Sequence
  Synthetic oligonucleotide
tgttcgacatccttatgtaaatacctttct

SEQ ID NO: 436474 - DNA, 30 bp, Artificial Sequence
  Synthetic oligonucleotide
ataccagcgatgtggatctggtacctttct

SEQ ID NO: 436475 - DNA, 30 bp, Artificial Sequence
  Synthetic oligonucleotide
accactaagatatgccgaacacccctttct

SEQ ID NO: 436476 - DNA, 30 bp, Artificial Sequence
  Synthetic oligonucleotide
ttggcttagatggtatgagacggcctttct

SEQ ID NO: 436477 - DNA, 30 bp, Artificial Sequence
  Synthetic oligonucleotide
aaaaggggatctagatagtaaatcctttct

SEQ ID NO: 436478 - DNA, 30 bp, Artificial Sequence
  Synthetic oligonucleotide
aagacagggtagaacttgtcgcagctttct

SEQ ID NO: 436479 - DNA, 30 bp, Artificial Sequence
  Synthetic oligonucleotide
ctggcaaaacatactccgtattacgtttct

SEQ ID NO: 436480 - DNA, 30 bp, Artificial Sequence
  Synthetic oligonucleotide
gatcgggaactcccgggtatcaaggtttct

SEQ ID NO: 436481 - DNA, 30 bp, Artificial Sequence
  Synthetic oligonucleotide
gagcagcctgaggtgaattgctcggtttct

SEQ ID NO: 436482 - DNA, 30 bp, Artificial Sequence
  Synthetic oligonucleotide
agtcactatcggccaaatatgggggtttct

SEQ ID NO: 436483 - DNA, 30 bp, Artificial Sequence
  Synthetic oligonucleotide
agaagtcggagatgcaatttgtgggtttct

SEQ ID NO: 436484 - DNA, 30 bp, Artificial Sequence
  Synthetic oligonucleotide
tgtctgaagcgtcaggacggagctgtttct

SEQ ID NO: 436485 - DNA, 30 bp, Artificial Sequence
  Synthetic oligonucleotide
gtcacagaaacaggagaagtctgtgtttct

SEQ ID NO: 436486 - DNA, 30 bp, Artificial Sequence
  Synthetic oligonucleotide
aaactgaacgaaaccaccagaaaattttct

SEQ ID NO: 436487 - DNA, 30 bp, Artificial Sequence
  Synthetic oligonucleotide
gagaattcgagacgatcgcgaacgttttct

SEQ ID NO: 436488 - DNA, 30 bp, Artificial Sequence
  Synthetic oligonucleotide
tcaactggtgggtcattcgacccgttttct

SEQ ID NO: 436489 - DNA, 30 bp, Artificial Sequence
  Synthetic oligonucleotide
acatgattacgtggaaaaaccctgttttct

SEQ ID NO: 436490 - DNA, 30 bp, Artificial Sequence
  Synthetic oligonucleotide
ggcctacataacacgcatctgcttttttct

SEQ ID NO: 436491 - DNA, 30 bp, Artificial Sequence
  Synthetic oligonucleotide
ctgcttcagatataccaacattcaaaaagt

SEQ ID NO: 436492 - DNA, 30 bp, Artificial Sequence
  Synthetic oligonucleotide
cagttttctggaataggatcatgaaaaagt

SEQ ID NO: 436493 - DNA, 30 bp, Artificial Sequence
  Synthetic oligonucleotide
ttagatcggcctgggacgggcctaaaaagt

SEQ ID NO: 436494 - DNA, 30 bp, Artificial Sequence
  Synthetic oligonucleotide
cgaatgcaagatctttttcactgcaaaagt

SEQ ID NO: 436495 - DNA, 30 bp, Artificial Sequence
  Synthetic oligonucleotide
accccgttttacaggcttctctagaaaagt

SEQ ID NO: 436496 - DNA, 30 bp, Artificial Sequence
  Synthetic oligonucleotide
ttcgaagccctgacttcaggggcgaaaagt

SEQ ID NO: 436497 - DNA, 30 bp, Artificial Sequence
  Synthetic oligonucleotide
caccggaacatccggcacggggcgaaaagt

SEQ ID NO: 436498 - DNA, 30 bp, Artificial Sequence
  Synthetic oligonucleotide
aaggttctgatgaggttcgcaaggaaaagt

SEQ ID NO: 436499 - DNA, 30 bp, Artificial Sequence
  Synthetic oligonucleotide
agaacattgctcccttcttgagtgaaaagt

SEQ ID NO: 436500 - DNA, 30 bp, Artificial Sequence
  Synthetic oligonucleotide
ccttaaccagcactacgttacgtgaaaagt

SEQ ID NO: 436501 - DNA, 30 bp, Artificial Sequence
  Synthetic oligonucleotide
gatcggccctcacttgtgtataataaaagt

SEQ ID NO: 436502 - DNA, 30 bp, Artificial Sequence
  Synthetic oligonucleotide
ggatgcttcatgcccgtgtaagataaaagt

SEQ ID NO: 436503 - DNA, 30 bp, Artificial Sequence
  Synthetic oligonucleotide
attgcggcttattgctccctgcttaaaagt

SEQ ID NO: 436504 - DNA, 30 bp, Artificial Sequence
  Synthetic oligonucleotide
ctttgtatataaactcagaacccacaaagt

SEQ ID NO: 436505 - DNA, 30 bp, Artificial Sequence
  Synthetic oligonucleotide
ggagcagtcgccaacgggtttgtacaaagt

SEQ ID NO: 436506 - DNA, 30 bp, Artificial Sequence
  Synthetic oligonucleotide
cagccatcgtgtcctcatggcttacaaagt

SEQ ID NO: 436507 - DNA, 30 bp, Artificial Sequence
  Synthetic oligonucleotide
aaagtgagcggaatggcggctaaccaaagt

SEQ ID NO: 436508 - DNA, 30 bp, Artificial Sequence
  Synthetic oligonucleotide
gtagctagttagggcattctggaccaaagt

SEQ ID NO: 436509 - DNA, 30 bp, Artificial Sequence
  Synthetic oligonucleotide
gaaatatcaaggtgtcagtattaccaaagt

SEQ ID NO: 436510 - DNA, 30 bp, Artificial Sequence
  Synthetic oligonucleotide
ggcagggacgaggcaagaattgtccaaagt

SEQ ID NO: 436511 - DNA, 30 bp, Artificial Sequence
  Synthetic oligonucleotide
cggtgccaccgttgaggaaataagcaaagt

SEQ ID NO: 436512 - DNA, 30 bp, Artificial Sequence
  Synthetic oligonucleotide
agacatcgccgggatcttgtgcagcaaagt

SEQ ID NO: 436513 - DNA, 29 bp, Artificial Sequence
  Synthetic oligonucleotide
gccaatatcacactcaataaacgcaaagt

SEQ ID NO: 436514 - DNA, 30 bp, Artificial Sequence
  Synthetic oligonucleotide
agtcagaattggctctttcggtggcaaagt

SEQ ID NO: 436515 - DNA, 30 bp, Artificial Sequence
  Synthetic oligonucleotide
gaccagcgagtctcgcccagacatcaaagt

SEQ ID NO: 436516 - DNA, 30 bp, Artificial Sequence
  Synthetic oligonucleotide
actatagccatctctcgattatttcaaagt

SEQ ID NO: 436517 - DNA, 30 bp, Artificial Sequence
  Synthetic oligonucleotide
cagttgaacaaaagataactttaagaaagt

SEQ ID NO: 436518 - DNA, 30 bp, Artificial Sequence
  Synthetic oligonucleotide
cccagcatttgcgtgaaatggcacgaaagt

SEQ ID NO: 436519 - DNA, 30 bp, Artificial Sequence
  Synthetic oligonucleotide
cccacaagcgctattgtacgatacgaaagt

SEQ ID NO: 436520 - DNA, 30 bp, Artificial Sequence
  Synthetic oligonucleotide
taattgtctgcgttattaacagaggaaagt

SEQ ID NO: 436521 - DNA, 30 bp, Artificial Sequence
  Synthetic oligonucleotide
aaaaatacagatgcgtgtaccatggaaagt

SEQ ID NO: 436522 - DNA, 31 bp, Artificial Sequence
  Synthetic oligonucleotide
aaagaaattgttcaacaggcagtgtgaaagt

SEQ ID NO: 436523 - DNA, 30 bp, Artificial Sequence
  Synthetic oligonucleotide
ggtatgactgagaaatctactattgaaagt

SEQ ID NO: 436524 - DNA, 30 bp, Artificial Sequence
  Synthetic oligonucleotide
tggcgcgagcaggattttggtattgaaagt

SEQ ID NO: 436525 - DNA, 30 bp, Artificial Sequence
  Synthetic oligonucleotide
ttttccacatcatgattgcttattgaaagt

SEQ ID NO: 436526 - DNA, 30 bp, Artificial Sequence
  Synthetic oligonucleotide
tccctattctatcttcctcgtccctaaagt

SEQ ID NO: 436527 - DNA, 30 bp, Artificial Sequence
  Synthetic oligonucleotide
tgccactgtctactgaggcgtgcttaaagt

SEQ ID NO: 436528 - DNA, 30 bp, Artificial Sequence
  Synthetic oligonucleotide
attcatcctttatggaaagggcgttaaagt

SEQ ID NO: 436529 - DNA, 30 bp, Artificial Sequence
  Synthetic oligonucleotide
cccaagtcaatttacaagaacctttaaagt

SEQ ID NO: 436530 - DNA, 30 bp, Artificial Sequence
  Synthetic oligonucleotide
atcacaaataagggtctaattgtttaaagt

SEQ ID NO: 436531 - DNA, 30 bp, Artificial Sequence
  Synthetic oligonucleotide
tcaaccctgtagttgtaagggttttaaagt

SEQ ID NO: 436532 - DNA, 30 bp, Artificial Sequence
  Synthetic oligonucleotide
gaattaatttcgttagagctaaaaacaagt

SEQ ID NO: 436533 - DNA, 30 bp, Artificial Sequence
  Synthetic oligonucleotide
cccgatgcacatgaggtggagcaaacaagt

SEQ ID NO: 436534 - DNA, 30 bp, Artificial Sequence
  Synthetic oligonucleotide
tgcggtcgttcattgttgcgtccaacaagt

SEQ ID NO: 436535 - DNA, 30 bp, Artificial Sequence
  Synthetic oligonucleotide
aagcttatgtcgattgatattgacacaagt

SEQ ID NO: 436536 - DNA, 30 bp, Artificial Sequence
  Synthetic oligonucleotide
gaataaagcgtgggactcagctacacaagt

SEQ ID NO: 436537 - DNA, 30 bp, Artificial Sequence
  Synthetic oligonucleotide
cagtgttatagtgcaacatgtatcacaagt

SEQ ID NO: 436538 - DNA, 30 bp, Artificial Sequence
  Synthetic oligonucleotide
gttctcatgaacaccggtctcgagacaagt

SEQ ID NO: 436539 - DNA, 30 bp, Artificial Sequence
  Synthetic oligonucleotide
gctaatcgcctaattcggagtgggacaagt

SEQ ID NO: 436540 - DNA, 30 bp, Artificial Sequence
  Synthetic oligonucleotide
gagcatctggccgcgtgaagcgatacaagt

SEQ ID NO: 436541 - DNA, 30 bp, Artificial Sequence
  Synthetic oligonucleotide
tataaacggccaactccgggtgctacaagt

SEQ ID NO: 436542 - DNA, 30 bp, Artificial Sequence
  Synthetic oligonucleotide
cgaggccgttggatttgcccaagtacaagt

SEQ ID NO: 436543 - DNA, 30 bp, Artificial Sequence
  Synthetic oligonucleotide
gtatcagattttcaacataagggtacaagt

SEQ ID NO: 436544 - DNA, 30 bp, Artificial Sequence
  Synthetic oligonucleotide
gccctgcgctagctaacgagctgtacaagt

SEQ ID NO: 436545 - DNA, 30 bp, Artificial Sequence
  Synthetic oligonucleotide
ggtatgccattcaaggtagtattaccaagt

SEQ ID NO: 436546 - DNA, 30 bp, Artificial Sequence
  Synthetic oligonucleotide
ttagaaacgctctcgagggcccacccaagt

SEQ ID NO: 436547 - DNA, 30 bp, Artificial Sequence
  Synthetic oligonucleotide
gcataaaatcccggtcccagggacccaagt

SEQ ID NO: 436548 - DNA, 30 bp, Artificial Sequence
  Synthetic oligonucleotide
gacaaagcaacttttgcgccacagccaagt

SEQ ID NO: 436549 - DNA, 30 bp, Artificial Sequence
  Synthetic oligonucleotide
aatctacaagccatctgtacattgccaagt

SEQ ID NO: 436550 - DNA, 30 bp, Artificial Sequence
  Synthetic oligonucleotide
tgttaataggcgcttgtggtattagcaagt

SEQ ID NO: 436551 - DNA, 30 bp, Artificial Sequence
  Synthetic oligonucleotide
cttaaaggtatctgcttgtaacgggcaagt

SEQ ID NO: 436552 - DNA, 30 bp, Artificial Sequence
  Synthetic oligonucleotide
gcctttcctacccataagcgcttggcaagt

SEQ ID NO: 436553 - DNA, 30 bp, Artificial Sequence
  Synthetic oligonucleotide
agcccggcagagattccaagctagtcaagt

SEQ ID NO: 436554 - DNA, 30 bp, Artificial Sequence
  Synthetic oligonucleotide
cgcccgaagaaaagcctcattccgtcaagt

SEQ ID NO: 436555 - DNA, 30 bp, Artificial Sequence
  Synthetic oligonucleotide
atgttctacagataaaatgctgattcaagt

SEQ ID NO: 436556 - DNA, 30 bp, Artificial Sequence
  Synthetic oligonucleotide
gacaaaatagagacttaggctccttcaagt

SEQ ID NO: 436557 - DNA, 30 bp, Artificial Sequence
  Synthetic oligonucleotide
ttctgttaggaagagctgtgttgttcaagt

SEQ ID NO: 436558 - DNA, 30 bp, Artificial Sequence
  Synthetic oligonucleotide
aaggtgatgtctgtgatgaaaaggagaagt

SEQ ID NO: 436559 - DNA, 30 bp, Artificial Sequence
  Synthetic oligonucleotide
acttaagtcagctggatataatctagaagt

SEQ ID NO: 436560 - DNA, 30 bp, Artificial Sequence
  Synthetic oligonucleotide
gtgtcgttgtagcaggccacatctagaagt

SEQ ID NO: 436561 - DNA, 30 bp, Artificial Sequence
  Synthetic oligonucleotide
tatcccgccgggattgagacacgacgaagt

SEQ ID NO: 436562 - DNA, 30 bp, Artificial Sequence
  Synthetic oligonucleotide
aaacctgatctcgtcagcttaggacgaagt

SEQ ID NO: 436563 - DNA, 30 bp, Artificial Sequence
  Synthetic oligonucleotide
agtttagtttccgacctccggtgacgaagt

SEQ ID NO: 436564 - DNA, 30 bp, Artificial Sequence
  Synthetic oligonucleotide
gtcttaaaaacgtgtatgtccgaccgaagt

SEQ ID NO: 436565 - DNA, 30 bp, Artificial Sequence
  Synthetic oligonucleotide
ttcaagatctgcacctgagttcgccgaagt

SEQ ID NO: 436566 - DNA, 30 bp, Artificial Sequence
  Synthetic oligonucleotide
accactcttagaagctcaaccgggcgaagt

SEQ ID NO: 436567 - DNA, 30 bp, Artificial Sequence
  Synthetic oligonucleotide
cccgggtctttttatagcaaagatcgaagt

SEQ ID NO: 436568 - DNA, 30 bp, Artificial Sequence
  Synthetic oligonucleotide
atctaggcccggagcaacgtgaaaggaagt

SEQ ID NO: 436569 - DNA, 30 bp, Artificial Sequence
  Synthetic oligonucleotide
atgccataaaagggggtgcaacaaggaagt

SEQ ID NO: 436570 - DNA, 30 bp, Artificial Sequence
  Synthetic oligonucleotide
ctcgtgtgcgctttgcggcctgcaggaagt

SEQ ID NO: 436571 - DNA, 30 bp, Artificial Sequence
  Synthetic oligonucleotide
aaaagatcctgtctataacggtcaggaagt

SEQ ID NO: 436572 - DNA, 30 bp, Artificial Sequence
  Synthetic oligonucleotide
acccctctccacaaatctactgtcggaagt

SEQ ID NO: 436573 - DNA, 30 bp, Artificial Sequence
  Synthetic oligonucleotide
tggagggcgacacgggccagtttcggaagt

SEQ ID NO: 436574 - DNA, 30 bp, Artificial Sequence
  Synthetic oligonucleotide
gaatgcaactctgcaatagccctgggaagt

SEQ ID NO: 436575 - DNA, 30 bp, Artificial Sequence
  Synthetic oligonucleotide
acacccaggttggggctggactctggaagt

SEQ ID NO: 436576 - DNA, 30 bp, Artificial Sequence
  Synthetic oligonucleotide
cataccattgacaacagcatgtgtggaagt

SEQ ID NO: 436577 - DNA, 30 bp, Artificial Sequence
  Synthetic oligonucleotide
aagtggaattgcttaattatttttggaagt

SEQ ID NO: 436578 - DNA, 30 bp, Artificial Sequence
  Synthetic oligonucleotide
tgacgaagcctagtgcctctcgtctgaagt

SEQ ID NO: 436579 - DNA, 30 bp, Artificial Sequence
  Synthetic oligonucleotide
gataacgaccatacttacgcatcttgaagt

SEQ ID NO: 436580 - DNA, 30 bp, Artificial Sequence
  Synthetic oligonucleotide
aagtctcgaaattctgtcattagttgaagt

SEQ ID NO: 436581 - DNA, 30 bp, Artificial Sequence
  Synthetic oligonucleotide
ggtgggcaggacgcaaattgtttaataagt

SEQ ID NO: 436582 - DNA, 30 bp, Artificial Sequence
  Synthetic oligonucleotide
agcaaccaacgccattgtctctgcataagt

SEQ ID NO: 436583 - DNA, 30 bp, Artificial Sequence
  Synthetic oligonucleotide
cttgtgcattatcaaagttctatgataagt

SEQ ID NO: 436584 - DNA, 30 bp, Artificial Sequence
  Synthetic oligonucleotide
gccttgttaataaagaaattcttgataagt

SEQ ID NO: 436585 - DNA, 30 bp, Artificial Sequence
  Synthetic oligonucleotide
cggtggatgctttactgacactctataagt

SEQ ID NO: 436586 - DNA, 30 bp, Artificial Sequence
  Synthetic oligonucleotide
gaagctcgtcttatgttggcttctataagt

SEQ ID NO: 436587 - DNA, 30 bp, Artificial Sequence
  Synthetic oligonucleotide
aaaaaatttggtgaggggccatacctaagt

SEQ ID NO: 436588 - DNA, 30 bp, Artificial Sequence
  Synthetic oligonucleotide
gccagtaatttttgtcgaaagaggctaagt

SEQ ID NO: 436589 - DNA, 30 bp, Artificial Sequence
  Synthetic oligonucleotide
tgggagggttctggcgacgagcatctaagt

SEQ ID NO: 436590 - DNA, 30 bp, Artificial Sequence
  Synthetic oligonucleotide
aaaccctagattttgtggtgcggtctaagt

SEQ ID NO: 436591 - DNA, 30 bp, Artificial Sequence
  Synthetic oligonucleotide
cttacaaacgacttgcgttataaagtaagt

SEQ ID NO: 436592 - DNA, 30 bp, Artificial Sequence
  Synthetic oligonucleotide
tccctatgccgacgctttgttatagtaagt

SEQ ID NO: 436593 - DNA, 30 bp, Artificial Sequence
  Synthetic oligonucleotide
gcaccacttagaggagaaattgtagtaagt

SEQ ID NO: 436594 - DNA, 30 bp, Artificial Sequence
  Synthetic oligonucleotide
taagcttaggtgtttcgtaggaacgtaagt

SEQ ID NO: 436595 - DNA, 30 bp, Artificial Sequence
  Synthetic oligonucleotide
ctcgggcacagccatgctcgtcccgtaagt

SEQ ID NO: 436596 - DNA, 30 bp, Artificial Sequence
  Synthetic oligonucleotide
cgtagcagggtttatgtcttggatgtaagt

SEQ ID NO: 436597 - DNA, 30 bp, Artificial Sequence
  Synthetic oligonucleotide
gactatccaaattgaagcactcgtgtaagt

SEQ ID NO: 436598 - DNA, 30 bp, Artificial Sequence
  Synthetic oligonucleotide
tcaatatatatgatcaaacttaaattaagt

SEQ ID NO: 436599 - DNA, 30 bp, Artificial Sequence
  Synthetic oligonucleotide
ttattgtaaactattctctcagaattaagt

SEQ ID NO: 436600 - DNA, 30 bp, Artificial Sequence
  Synthetic oligonucleotide
aaatactgtagctccgaaagcggattaagt

SEQ ID NO: 436601 - DNA, 30 bp, Artificial Sequence
  Synthetic oligonucleotide
tagggagcccgggtggcagtctgcttaagt

SEQ ID NO: 436602 - DNA, 30 bp, Artificial Sequence
  Synthetic oligonucleotide
gagcttttgacttccctgcttgggttaagt

SEQ ID NO: 436603 - DNA, 30 bp, Artificial Sequence
  Synthetic oligonucleotide
gaggcgccctttggatccgcaatgttaagt

SEQ ID NO: 436604 - DNA, 30 bp, Artificial Sequence
  Synthetic oligonucleotide
tcgcacggtcgagagtggacgaatttaagt

SEQ ID NO: 436605 - DNA, 30 bp, Artificial Sequence
  Synthetic oligonucleotide
cagcaaagcggttaaggctaacctttaagt

SEQ ID NO: 436606 - DNA, 30 bp, Artificial Sequence
  Synthetic oligonucleotide
accggcgccagtattcagatgcctttaagt

SEQ ID NO: 436607 - DNA, 30 bp, Artificial Sequence
  Synthetic oligonucleotide
cgagctattaaatggccacgtcgtttaagt

SEQ ID NO: 436608 - DNA, 30 bp, Artificial Sequence
  Synthetic oligonucleotide
ctatgcgatggacgcttagcaataaacagt

SEQ ID NO: 436609 - DNA, 30 bp, Artificial Sequence
  Synthetic oligonucleotide
taatcggacgagatattgtaactaaacagt

SEQ ID NO: 436610 - DNA, 30 bp, Artificial Sequence
  Synthetic oligonucleotide
cttacctaaattcgcttgaccgacaacagt

SEQ ID NO: 436611 - DNA, 30 bp, Artificial Sequence
  Synthetic oligonucleotide
gcaatgtacggatgccgctgttggaacagt

SEQ ID NO: 436612 - DNA, 30 bp, Artificial Sequence
  Synthetic oligonucleotide
ggcttcataattgccaagtgtgataacagt

SEQ ID NO: 436613 - DNA, 30 bp, Artificial Sequence
  Synthetic oligonucleotide
gcaagtcaatctactcctcggtgtaacagt

SEQ ID NO: 436614 - DNA, 30 bp, Artificial Sequence
  Synthetic oligonucleotide
tagtaatcgacaacatcgtgatcacacagt

SEQ ID NO: 436615 - DNA, 30 bp, Artificial Sequence
  Synthetic oligonucleotide
tgagcagtggtcgggatcttttcacacagt

SEQ ID NO: 436616 - DNA, 30 bp, Artificial Sequence
  Synthetic oligonucleotide
tcggactggatttttctggcgggccacagt

SEQ ID NO: 436617 - DNA, 30 bp, Artificial Sequence
  Synthetic oligonucleotide
ttggaagtagtggcgtttcaagggcacagt

SEQ ID NO: 436618 - DNA, 30 bp, Artificial Sequence
  Synthetic oligonucleotide
acttcgtcaagatagggcctttggcacagt

SEQ ID NO: 436619 - DNA, 30 bp, Artificial Sequence
  Synthetic oligonucleotide
ttatctgattgtatcgtaagcatgcacagt

SEQ ID NO: 436620 - DNA, 30 bp, Artificial Sequence
  Synthetic oligonucleotide
tcggatgttcgcaaaccggctcatcacagt

SEQ ID NO: 436621 - DNA, 30 bp, Artificial Sequence
  Synthetic oligonucleotide
attatcaaatcagtgatctttcgagacagt

SEQ ID NO: 436622 - DNA, 30 bp, Artificial Sequence
  Synthetic oligonucleotide
ttataacgttaattcggctgatacgacagt

SEQ ID NO: 436623 - DNA, 30 bp, Artificial Sequence
  Synthetic oligonucleotide
tacagagtgacaatagctaggggggacagt

SEQ ID NO: 436624 - DNA, 30 bp, Artificial Sequence
  Synthetic oligonucleotide
gcctggacacatagtcaagccattgacagt

SEQ ID NO: 436625 - DNA, 30 bp, Artificial Sequence
  Synthetic oligonucleotide
gaggcttgatggcaagccatatttgacagt

SEQ ID NO: 436626 - DNA, 30 bp, Artificial Sequence
  Synthetic oligonucleotide
tatcacgtcgagcacggcatatttgacagt

SEQ ID NO: 436627 - DNA, 30 bp, Artificial Sequence
  Synthetic oligonucleotide
aactgttgaagcaaagtgattcaatacagt

SEQ ID NO: 436628 - DNA, 30 bp, Artificial Sequence
  Synthetic oligonucleotide
cgcaaactcgtattttacttgccatacagt

SEQ ID NO: 436629 - DNA, 30 bp, Artificial Sequence
  Synthetic oligonucleotide
atcagattcgcacgtgtgcgatcatacagt

SEQ ID NO: 436630 - DNA, 30 bp, Artificial Sequence
  Synthetic oligonucleotide
tccctcaatgcctaatctagttagtacagt

SEQ ID NO: 436631 - DNA, 30 bp, Artificial Sequence
  Synthetic oligonucleotide
atggcacacgtacgtgtaaagacgtacagt

SEQ ID NO: 436632 - DNA, 30 bp, Artificial Sequence
  Synthetic oligonucleotide
ctgacctcgactcacaaccaaaggtacagt

SEQ ID NO: 436633 - DNA, 30 bp, Artificial Sequence
  Synthetic oligonucleotide
gggaagccccgatttactaattgttacagt

SEQ ID NO: 436634 - DNA, 30 bp, Artificial Sequence
  Synthetic oligonucleotide
tatacaatacctgtagcttaggacaccagt

SEQ ID NO: 436635 - DNA, 30 bp, Artificial Sequence
  Synthetic oligonucleotide
ggaatcagtaaaggttctctaaggaccagt

SEQ ID NO: 436636 - DNA, 30 bp, Artificial Sequence
  Synthetic oligonucleotide
accaactgtccgattttcccagggaccagt

SEQ ID NO: 436637 - DNA, 30 bp, Artificial Sequence
  Synthetic oligonucleotide
gttagtgaccgtaggggaactgggaccagt

SEQ ID NO: 436638 - DNA, 30 bp, Artificial Sequence
  Synthetic oligonucleotide
atgtagagcactgggcgcggcaataccagt

SEQ ID NO: 436639 - DNA, 30 bp, Artificial Sequence
  Synthetic oligonucleotide
tccaccggaccgccgccctaaggccccagt

SEQ ID NO: 436640 - DNA, 30 bp, Artificial Sequence
  Synthetic oligonucleotide
accgttgctgtgcgtacacggtcgcccagt

SEQ ID NO: 436641 - DNA, 30 bp, Artificial Sequence
  Synthetic oligonucleotide
aggtatgatctcgcccagattatgcccagt

SEQ ID NO: 436642 - DNA, 30 bp, Artificial Sequence
  Synthetic oligonucleotide
tatggcggagtcagactgacgtatcccagt

SEQ ID NO: 436643 - DNA, 30 bp, Artificial Sequence
  Synthetic oligonucleotide
tggccgtagaatgcgggctagtctcccagt

SEQ ID NO: 436644 - DNA, 30 bp, Artificial Sequence
  Synthetic oligonucleotide
tctttcccattgtgaacactagaggccagt

SEQ ID NO: 436645 - DNA, 30 bp, Artificial Sequence
  Synthetic oligonucleotide
gcccgtgcacagggtaatgacacggccagt

SEQ ID NO: 436646 - DNA, 30 bp, Artificial Sequence
  Synthetic oligonucleotide
ctatccctggcgatcggattaccggccagt

SEQ ID NO: 436647 - DNA, 30 bp, Artificial Sequence
  Synthetic oligonucleotide
gttaggtcgggatcgccgggccgggccagt

SEQ ID NO: 436648 - DNA, 30 bp, Artificial Sequence
  Synthetic oligonucleotide
ctatttgaagcacgttgggaaactgccagt

SEQ ID NO: 436649 - DNA, 30 bp, Artificial Sequence
  Synthetic oligonucleotide
cagccctgcacgtgtgttatcagtgccagt

SEQ ID NO: 436650 - DNA, 30 bp, Artificial Sequence
  Synthetic oligonucleotide
gggggaaagtatttagctggcagatccagt

SEQ ID NO: 436651 - DNA, 30 bp, Artificial Sequence
  Synthetic oligonucleotide
atgtattcgacccttggaggcacctccagt

SEQ ID NO: 436652 - DNA, 30 bp, Artificial Sequence
  Synthetic oligonucleotide
tattgtgcttgcacgtcggctgagtccagt

SEQ ID NO: 436653 - DNA, 30 bp, Artificial Sequence
  Synthetic oligonucleotide
actttgtttactatctcggaatcgtccagt

SEQ ID NO: 436654 - DNA, 30 bp, Artificial Sequence
  Synthetic oligonucleotide
taccttaactgcccttatagcccaagcagt

SEQ ID NO: 436655 - DNA, 30 bp, Artificial Sequence
  Synthetic oligonucleotide
cctgctcgatgggaaacgagcctaagcagt

SEQ ID NO: 436656 - DNA, 30 bp, Artificial Sequence
  Synthetic oligonucleotide
taaggtctcctatgtactggcgtaagcagt

SEQ ID NO: 436657 - DNA, 30 bp, Artificial Sequence
  Synthetic oligonucleotide
caatagggttcgctgtttacgttaagcagt

SEQ ID NO: 436658 - DNA, 30 bp, Artificial Sequence
  Synthetic oligonucleotide
aaatatccacctggttgatagtacagcagt

SEQ ID NO: 436659 - DNA, 30 bp, Artificial Sequence
  Synthetic oligonucleotide
cgtccagcaacgccgccaaaaaagagcagt

SEQ ID NO: 436660 - DNA, 30 bp, Artificial Sequence
  Synthetic oligonucleotide
gccttccccggccctactatggtgagcagt

SEQ ID NO: 436661 - DNA, 30 bp, Artificial Sequence
  Synthetic oligonucleotide
gagaaatgatgcggcggtgccaatagcagt

SEQ ID NO: 436662 - DNA, 30 bp, Artificial Sequence
  Synthetic oligonucleotide
ggcattggcaagtagacggcaattagcagt

SEQ ID NO: 436663 - DNA, 30 bp, Artificial Sequence
  Synthetic oligonucleotide
ttgtgcgcagtgccgttaacttaacgcagt

SEQ ID NO: 436664 - DNA, 30 bp, Artificial Sequence
  Synthetic oligonucleotide
agcaggcctaaacaatcagtcgcacgcagt

SEQ ID NO: 436665 - DNA, 30 bp, Artificial Sequence
  Synthetic oligonucleotide
ctgtcagtcagagacgaaatgcagcgcagt

SEQ ID NO: 436666 - DNA, 30 bp, Artificial Sequence
  Synthetic oligonucleotide
acttaataaatagccatcagttctcgcagt

SEQ ID NO: 436667 - DNA, 30 bp, Artificial Sequence
  Synthetic oligonucleotide
atctagatttttatcgcgtctagtcgcagt

SEQ ID NO: 436668 - DNA, 30 bp, Artificial Sequence
  Synthetic oligonucleotide
atgggacccggagtcacgtcgttaggcagt

SEQ ID NO: 436669 - DNA, 30 bp, Artificial Sequence
  Synthetic oligonucleotide
ggccaagactgctcgcacacgtacggcagt

SEQ ID NO: 436670 - DNA, 30 bp, Artificial Sequence
  Synthetic oligonucleotide
gtcaacatgaggatccgtaaacgcggcagt

SEQ ID NO: 436671 - DNA, 30 bp, Artificial Sequence
  Synthetic oligonucleotide
aaagtatctaagaccattaaacggggcagt

SEQ ID NO: 436672 - DNA, 28 bp, Artificial Sequence
  Synthetic oligonucleotide
gattgatccttcggtgctagggggcagt

SEQ ID NO: 436673 - DNA, 30 bp, Artificial Sequence
  Synthetic oligonucleotide
gaatgggcacccgccgatgatttgggcagt

SEQ ID NO: 436674 - DNA, 30 bp, Artificial Sequence
  Synthetic oligonucleotide
gacacggctcacattaccttatatggcagt

SEQ ID NO: 436675 - DNA, 30 bp, Artificial Sequence
  Synthetic oligonucleotide
ggattacaacgacgtcccggaggtggcagt

SEQ ID NO: 436676 - DNA, 30 bp, Artificial Sequence
  Synthetic oligonucleotide
gtaaatttagagccttcgttagttggcagt

SEQ ID NO: 436677 - DNA, 30 bp, Artificial Sequence
  Synthetic oligonucleotide
atgggcgatcacgccgaatcgcactgcagt

SEQ ID NO: 436678 - DNA, 30 bp, Artificial Sequence
  Synthetic oligonucleotide
ggtgcggtctcccaattacacccgtgcagt

SEQ ID NO: 436679 - DNA, 30 bp, Artificial Sequence
  Synthetic oligonucleotide
accttttaagccccacctggtaattgcagt

SEQ ID NO: 436680 - DNA, 30 bp, Artificial Sequence
  Synthetic oligonucleotide
actggtttggttccggaacagttttgcagt

SEQ ID NO: 436681 - DNA, 30 bp, Artificial Sequence
  Synthetic oligonucleotide
caaccgctgggatctgagtgataaatcagt

SEQ ID NO: 436682 - DNA, 30 bp, Artificial Sequence
  Synthetic oligonucleotide
tatgtacctctttgtgcaactgcaatcagt

SEQ ID NO: 436683 - DNA, 30 bp, Artificial Sequence
  Synthetic oligonucleotide
caaccgcgtggccggcgcatagtaatcagt

SEQ ID NO: 436684 - DNA, 30 bp, Artificial Sequence
  Synthetic oligonucleotide
acctagttattcgggcaccgctacatcagt

SEQ ID NO: 436685 - DNA, 30 bp, Artificial Sequence
  Synthetic oligonucleotide
atacgctgtctgcacaataggtgcatcagt

SEQ ID NO: 436686 - DNA, 30 bp, Artificial Sequence
  Synthetic oligonucleotide
gctaattaagggagtcacttagtcatcagt

SEQ ID NO: 436687 - DNA, 30 bp, Artificial Sequence
  Synthetic oligonucleotide
accgcccccccagccgaccgtcagatcagt

SEQ ID NO: 436688 - DNA, 30 bp, Artificial Sequence
  Synthetic oligonucleotide
gggtagttctcgtagtattggaatatcagt

SEQ ID NO: 436689 - DNA, 30 bp, Artificial Sequence
  Synthetic oligonucleotide
tccaccttgagtctctggaactatatcagt

SEQ ID NO: 436690 - DNA, 30 bp, Artificial Sequence
  Synthetic oligonucleotide
ccacttattatcttttgttgtacactcagt

SEQ ID NO: 436691 - DNA, 30 bp, Artificial Sequence
  Synthetic oligonucleotide
tgggcacgggtttagacgctgcacctcagt

SEQ ID NO: 436692 - DNA, 30 bp, Artificial Sequence
  Synthetic oligonucleotide
gagatgaggtacctgtttacttcgctcagt

SEQ ID NO: 436693 - DNA, 30 bp, Artificial Sequence
  Synthetic oligonucleotide
aagctgatagaagctgtactttgtctcagt

SEQ ID NO: 436694 - DNA, 30 bp, Artificial Sequence
  Synthetic oligonucleotide
gcattcagcgtcaggcgccatattctcagt

SEQ ID NO: 436695 - DNA, 30 bp, Artificial Sequence
  Synthetic oligonucleotide
agtgaacaccatcgctcggctattctcagt

SEQ ID NO: 436696 - DNA, 30 bp, Artificial Sequence
  Synthetic oligonucleotide
gaaaggcctcgcattgttcgccaagtcagt

SEQ ID NO: 436697 - DNA, 30 bp, Artificial Sequence
  Synthetic oligonucleotide
gagggatcctggacttgatctccagtcagt

SEQ ID NO: 436698 - DNA, 30 bp, Artificial Sequence
  Synthetic oligonucleotide
ccttcttggtcgctgaggtagaacgtcagt

SEQ ID NO: 436699 - DNA, 30 bp, Artificial Sequence
  Synthetic oligonucleotide
gttgtcgttctagagcgaaatcccgtcagt

SEQ ID NO: 436700 - DNA, 30 bp, Artificial Sequence
  Synthetic oligonucleotide
catggatttaaggtatagttcaaggtcagt

SEQ ID NO: 436701 - DNA, 30 bp, Artificial Sequence
  Synthetic oligonucleotide
agggcttttacgggatcagtataggtcagt

SEQ ID NO: 436702 - DNA, 30 bp, Artificial Sequence
  Synthetic oligonucleotide
cactatgtcacaaggagcgcgccggtcagt

SEQ ID NO: 436703 - DNA, 30 bp, Artificial Sequence
  Synthetic oligonucleotide
taagccacggtcgcgcgggcccgggtcagt

SEQ ID NO: 436704 - DNA, 31 bp, Artificial Sequence
  Synthetic oligonucleotide
aaaaggttagcagttgcccaaagtggtcagt

SEQ ID NO: 436705 - DNA, 30 bp, Artificial Sequence
  Synthetic oligonucleotide
ggaactaaatcaggaaggcgcttattcagt

SEQ ID NO: 436706 - DNA, 30 bp, Artificial Sequence
  Synthetic oligonucleotide
ttggttacgcggtttttagggcacttcagt

SEQ ID NO: 436707 - DNA, 30 bp, Artificial Sequence
  Synthetic oligonucleotide
tcctgtgccaataattggcgcgacttcagt

SEQ ID NO: 436708 - DNA, 30 bp, Artificial Sequence
  Synthetic oligonucleotide
cctgttgcggggacagggtggaccttcagt

SEQ ID NO: 436709 - DNA, 30 bp, Artificial Sequence
  Synthetic oligonucleotide
ccaaacaattcgtaggcgctcaagttcagt

SEQ ID NO: 436710 - DNA, 29 bp, Artificial Sequence
  Synthetic oligonucleotide
tcgttttccagctctccgattcgttcagt

SEQ ID NO: 436711 - DNA, 30 bp, Artificial Sequence
  Synthetic oligonucleotide
ttcttgagggggccttaatttatgttcagt

SEQ ID NO: 436712 - DNA, 30 bp, Artificial Sequence
  Synthetic oligonucleotide
taatccaacacaaaggcgctcattttcagt

SEQ ID NO: 436713 - DNA, 30 bp, Artificial Sequence
  Synthetic oligonucleotide
ttacctcagggtgcagccaccggaaagagt

SEQ ID NO: 436714 - DNA, 30 bp, Artificial Sequence
  Synthetic oligonucleotide
cggcaacttatgagcgctcagctaaagagt

SEQ ID NO: 436715 - DNA, 30 bp, Artificial Sequence
  Synthetic oligonucleotide
cgaacggttaagattaaattgagcaagagt

SEQ ID NO: 436716 - DNA, 30 bp, Artificial Sequence
  Synthetic oligonucleotide
tgtgctcagtcagttctcttgattaagagt

SEQ ID NO: 436717 - DNA, 30 bp, Artificial Sequence
  Synthetic oligonucleotide
cgtggggaacccattgcacaatttaagagt

SEQ ID NO: 436718 - DNA, 30 bp, Artificial Sequence
  Synthetic oligonucleotide
tccaaatgagattgaaggtcctttaagagt

SEQ ID NO: 436719 - DNA, 30 bp, Artificial Sequence
  Synthetic oligonucleotide
atttacgtgcatcgcttgttggttcagagt

SEQ ID NO: 436720 - DNA, 30 bp, Artificial Sequence
  Synthetic oligonucleotide
tctacttgagtcccaataagagtagagagt

SEQ ID NO: 436721 - DNA, 30 bp, Artificial Sequence
  Synthetic oligonucleotide
cccggtcgcatcatcgtctaagtcgagagt

SEQ ID NO: 436722 - DNA, 30 bp, Artificial Sequence
  Synthetic oligonucleotide
cagatttatctgtcgatgtacttcgagagt

SEQ ID NO: 436723 - DNA, 30 bp, Artificial Sequence
  Synthetic oligonucleotide
gagtcttcttgacattgacagttggagagt

SEQ ID NO: 436724 - DNA, 30 bp, Artificial Sequence
  Synthetic oligonucleotide
gttaacaaataaattgttgtccatgagagt

SEQ ID NO: 436725 - DNA, 30 bp, Artificial Sequence
  Synthetic oligonucleotide
caccatgagtcgcgtaaagattctgagagt

SEQ ID NO: 436726 - DNA, 30 bp, Artificial Sequence
  Synthetic oligonucleotide
tagcgctctggtctctatataagtgagagt

SEQ ID NO: 436727 - DNA, 30 bp, Artificial Sequence
  Synthetic oligonucleotide
aagctctaagtacgccactaccgtgagagt

SEQ ID NO: 436728 - DNA, 30 bp, Artificial Sequence
  Synthetic oligonucleotide
gtaatgcgtctatatgtaattggtgagagt

SEQ ID NO: 436729 - DNA, 30 bp, Artificial Sequence
  Synthetic oligonucleotide
tgaggttttggcagtctggtgcggtagagt

SEQ ID NO: 436730 - DNA, 30 bp, Artificial Sequence
  Synthetic oligonucleotide
cgacagcaaatatgccagttccgttagagt

SEQ ID NO: 436731 - DNA, 30 bp, Artificial Sequence
  Synthetic oligonucleotide
gtctaagttcgctgagtgcgaaaaacgagt

SEQ ID NO: 436732 - DNA, 30 bp, Artificial Sequence
  Synthetic oligonucleotide
aggaaaagcgttggctctgttggaacgagt

SEQ ID NO: 436733 - DNA, 30 bp, Artificial Sequence
  Synthetic oligonucleotide
tggcttagccttgccgccccactaacgagt

SEQ ID NO: 436734 - DNA, 30 bp, Artificial Sequence
  Synthetic oligonucleotide
tgttccatggaacactgtcgagacacgagt

SEQ ID NO: 436735 - DNA, 30 bp, Artificial Sequence
  Synthetic oligonucleotide
acatagaagaggccagcctcttggacgagt

SEQ ID NO: 436736 - DNA, 30 bp, Artificial Sequence
  Synthetic oligonucleotide
gaatgggtcatgtaaaataaaatgacgagt

SEQ ID NO: 436737 - DNA, 30 bp, Artificial Sequence
  Synthetic oligonucleotide
gagcatcttgagacacagcatatgacgagt

SEQ ID NO: 436738 - DNA, 30 bp, Artificial Sequence
  Synthetic oligonucleotide
tagaaactctacgagctacacaatacgagt

SEQ ID NO: 436739 - DNA, 30 bp, Artificial Sequence
  Synthetic oligonucleotide
aattcaggaagctttggcgcaaacccgagt

SEQ ID NO: 436740 - DNA, 30 bp, Artificial Sequence
  Synthetic oligonucleotide
gccgaattgatccatcggttttccccgagt

SEQ ID NO: 436741 - DNA, 30 bp, Artificial Sequence
  Synthetic oligonucleotide
ccctagagtgtcccagattcgcgcccgagt

SEQ ID NO: 436742 - DNA, 30 bp, Artificial Sequence
  Synthetic oligonucleotide
agcacagctggggatctcttcccagcgagt

SEQ ID NO: 436743 - DNA, 30 bp, Artificial Sequence
  Synthetic oligonucleotide
acaatcctcaatttgtatagacatgcgagt

SEQ ID NO: 436744 - DNA, 30 bp, Artificial Sequence
  Synthetic oligonucleotide
ttccaagaatcacggcgcgttgaatcgagt

SEQ ID NO: 436745 - DNA, 30 bp, Artificial Sequence
  Synthetic oligonucleotide
tcaatttagtgtctattagtctgctcgagt

SEQ ID NO: 436746 - DNA, 30 bp, Artificial Sequence
  Synthetic oligonucleotide
ggcttgctacttcgtaggaaactctcgagt

SEQ ID NO: 436747 - DNA, 30 bp, Artificial Sequence
  Synthetic oligonucleotide
aaacttgtccgtgatgggtgctggtcgagt

SEQ ID NO: 436748 - DNA, 30 bp, Artificial Sequence
  Synthetic oligonucleotide
cgtcccacggcgcctgcttctctgtcgagt

SEQ ID NO: 436749 - DNA, 30 bp, Artificial Sequence
  Synthetic oligonucleotide
gattagtcaatgttcttgtgaagttcgagt

SEQ ID NO: 436750 - DNA, 30 bp, Artificial Sequence
  Synthetic oligonucleotide
tttaaaatgcgattggcaacaggttcgagt

SEQ ID NO: 436751 - DNA, 30 bp, Artificial Sequence
  Synthetic oligonucleotide
attagataacttgagctaccggcaaggagt

SEQ ID NO: 436752 - DNA, 30 bp, Artificial Sequence
  Synthetic oligonucleotide
tgagcgatagtggacggagccctaaggagt

SEQ ID NO: 436753 - DNA, 29 bp, Artificial Sequence
  Synthetic oligonucleotide
gtcctttacgtatggtaaattagaggagt

SEQ ID NO: 436754 - DNA, 30 bp, Artificial Sequence
  Synthetic oligonucleotide
gacagtggaacaccgccaaccgggaggagt

SEQ ID NO: 436755 - DNA, 30 bp, Artificial Sequence
  Synthetic oligonucleotide
gacatggtatcactagtggttaaccggagt

SEQ ID NO: 436756 - DNA, 30 bp, Artificial Sequence
  Synthetic oligonucleotide
aaacgatggacactccttccctgccggagt

SEQ ID NO: 436757 - DNA, 30 bp, Artificial Sequence
  Synthetic oligonucleotide
attaaccgccgagtcgcggcacaagggagt

SEQ ID NO: 436758 - DNA, 30 bp, Artificial Sequence
  Synthetic oligonucleotide
atttgggtgtcgggatgctacatagggagt

SEQ ID NO: 436759 - DNA, 30 bp, Artificial Sequence
  Synthetic oligonucleotide
ggacggaccggcttcccacactcgtggagt

SEQ ID NO: 436760 - DNA, 30 bp, Artificial Sequence
  Synthetic oligonucleotide
atttctgttcactcacatcagtggtggagt

SEQ ID NO: 436761 - DNA, 30 bp, Artificial Sequence
  Synthetic oligonucleotide
ctctctgcaccaaaatcccggcattggagt

SEQ ID NO: 436762 - DNA, 30 bp, Artificial Sequence
  Synthetic oligonucleotide
caatttacgattttgagaggtgtttggagt

SEQ ID NO: 436763 - DNA, 30 bp, Artificial Sequence
  Synthetic oligonucleotide
gaatatctgctcataaagttaaggatgagt

SEQ ID NO: 436764 - DNA, 30 bp, Artificial Sequence
  Synthetic oligonucleotide
acttagctcatggccagagcgctgatgagt

SEQ ID NO: 436765 - DNA, 30 bp, Artificial Sequence
  Synthetic oligonucleotide
gcgactccgttcccatctacagatatgagt

SEQ ID NO: 436766 - DNA, 30 bp, Artificial Sequence
  Synthetic oligonucleotide
accggcttatctgacatttaaactatgagt

SEQ ID NO: 436767 - DNA, 30 bp, Artificial Sequence
  Synthetic oligonucleotide
gcgcactatccgttcggctcgtttatgagt

SEQ ID NO: 436768 - DNA, 30 bp, Artificial Sequence
  Synthetic oligonucleotide
gggccgggggggctaaggtttttgctgagt

SEQ ID NO: 436769 - DNA, 30 bp, Artificial Sequence
  Synthetic oligonucleotide
accaggacgcgaacgcggtcttttctgagt

SEQ ID NO: 436770 - DNA, 30 bp, Artificial Sequence
  Synthetic oligonucleotide
cacaaatcacatgagcgatggtcagtgagt

SEQ ID NO: 436771 - DNA, 31 bp, Artificial Sequence
  Synthetic oligonucleotide
gggtgacccaggttgtcttttgttagtgagt

SEQ ID NO: 436772 - DNA, 30 bp, Artificial Sequence
  Synthetic oligonucleotide
tcttcggcataacagctgaggggcgtgagt

SEQ ID NO: 436773 - DNA, 30 bp, Artificial Sequence
  Synthetic oligonucleotide
ttcaatcagacgcactaaagtgatgtgagt

SEQ ID NO: 436774 - DNA, 30 bp, Artificial Sequence
  Synthetic oligonucleotide
agttttcatacatacggtggagcattgagt

SEQ ID NO: 436775 - DNA, 30 bp, Artificial Sequence
  Synthetic oligonucleotide
ggggggttagccacaatatgcgcattgagt

SEQ ID NO: 436776 - DNA, 30 bp, Artificial Sequence
  Synthetic oligonucleotide
aatcggcattctattcaatgatccttgagt

SEQ ID NO: 436777 - DNA, 30 bp, Artificial Sequence
  Synthetic oligonucleotide
aattggaggcaatacgtcccaaggttgagt

SEQ ID NO: 436778 - DNA, 30 bp, Artificial Sequence
  Synthetic oligonucleotide
tttacgcgtattcacgcaaacgggttgagt

SEQ ID NO: 436779 - DNA, 30 bp, Artificial Sequence
  Synthetic oligonucleotide
tatgctgcaaacgtgattacggtgttgagt

SEQ ID NO: 436780 - DNA, 30 bp, Artificial Sequence
  Synthetic oligonucleotide
ttgtccccgggcagtaatccgtggaatagt

SEQ ID NO: 436781 - DNA, 30 bp, Artificial Sequence
  Synthetic oligonucleotide
tttccgaggggtgtccagaaattgaatagt

SEQ ID NO: 436782 - DNA, 30 bp, Artificial Sequence
  Synthetic oligonucleotide
ggtcactgtggagtaatctgagctaatagt

SEQ ID NO: 436783 - DNA, 30 bp, Artificial Sequence
  Synthetic oligonucleotide
gacggcatgttcgtttcgctagaacatagt

SEQ ID NO: 436784 - DNA, 30 bp, Artificial Sequence
  Synthetic oligonucleotide
gaacgctgcctcatcatatatccacatagt

SEQ ID NO: 436785 - DNA, 30 bp, Artificial Sequence
  Synthetic oligonucleotide
agttcctgcttcgtcttgtaaagacatagt

SEQ ID NO: 436786 - DNA, 30 bp, Artificial Sequence
  Synthetic oligonucleotide
gaaacgcgagttcgcacctgtttacatagt

SEQ ID NO: 436787 - DNA, 30 bp, Artificial Sequence
  Synthetic oligonucleotide
tctctattgtgcacgagtaagttccatagt

SEQ ID NO: 436788 - DNA, 30 bp, Artificial Sequence
  Synthetic oligonucleotide
cttttctgttgtacatgttactagcatagt

SEQ ID NO: 436789 - DNA, 30 bp, Artificial Sequence
  Synthetic oligonucleotide
ccatgcgactctgccaatacaacgcatagt

SEQ ID NO: 436790 - DNA, 30 bp, Artificial Sequence
  Synthetic oligonucleotide
gtcgctgtatagtgtgtgctcttgcatagt

SEQ ID NO: 436791 - DNA, 30 bp, Artificial Sequence
  Synthetic oligonucleotide
aaacacaccccggttaataattatcatagt

SEQ ID NO: 436792 - DNA, 30 bp, Artificial Sequence
  Synthetic oligonucleotide
gctgtattttttggaggcgagggtcatagt

SEQ ID NO: 436793 - DNA, 30 bp, Artificial Sequence
  Synthetic oligonucleotide
cgcaacaggtctaagttcttatcagatagt

SEQ ID NO: 436794 - DNA, 30 bp, Artificial Sequence
  Synthetic oligonucleotide
ctttacagacggaggtaggtgcgagatagt

SEQ ID NO: 436795 - DNA, 30 bp, Artificial Sequence
  Synthetic oligonucleotide
gtgtgtccggggctataaaaatgagatagt

SEQ ID NO: 436796 - DNA, 30 bp, Artificial Sequence
  Synthetic oligonucleotide
gtctcgttggttttatctgttttcgatagt

SEQ ID NO: 436797 - DNA, 30 bp, Artificial Sequence
  Synthetic oligonucleotide
gccaccccagtgttaaaagtgtgggatagt

SEQ ID NO: 436798 - DNA, 30 bp, Artificial Sequence
  Synthetic oligonucleotide
actataacgattacatatctcctggatagt

SEQ ID NO: 436799 - DNA, 30 bp, Artificial Sequence
  Synthetic oligonucleotide
cctgcctactagatcgattggttggatagt

SEQ ID NO: 436800 - DNA, 30 bp, Artificial Sequence
  Synthetic oligonucleotide
catgtgcggacaccgggcccgattgatagt

SEQ ID NO: 436801 - DNA, 30 bp, Artificial Sequence
  Synthetic oligonucleotide
tgcccgggaactcttaggcatattgatagt

SEQ ID NO: 436802 - DNA, 30 bp, Artificial Sequence
  Synthetic oligonucleotide
gggacggctttagcagtccccgcatatagt

SEQ ID NO: 436803 - DNA, 30 bp, Artificial Sequence
  Synthetic oligonucleotide
gacgtggttcgattaggatatggatatagt

SEQ ID NO: 436804 - DNA, 30 bp, Artificial Sequence
  Synthetic oligonucleotide
ggcctagggcggaactgcggcatatatagt

SEQ ID NO: 436805 - DNA, 30 bp, Artificial Sequence
  Synthetic oligonucleotide
ctataggtaatcattgacagccgctatagt

SEQ ID NO: 436806 - DNA, 30 bp, Artificial Sequence
  Synthetic oligonucleotide
ggctggagtaaatatggcatcatctatagt

SEQ ID NO: 436807 - DNA, 30 bp, Artificial Sequence
  Synthetic oligonucleotide
taacagtgacggcggtcaaatatctatagt

SEQ ID NO: 436808 - DNA, 30 bp, Artificial Sequence
  Synthetic oligonucleotide
aataatcttacagggggatcttagtatagt

SEQ ID NO: 436809 - DNA, 30 bp, Artificial Sequence
  Synthetic oligonucleotide
acaacttcgtcaaccgctcctacttatagt

SEQ ID NO: 436810 - DNA, 30 bp, Artificial Sequence
  Synthetic oligonucleotide
ggggttattcaactggtcctacgttatagt

SEQ ID NO: 436811 - DNA, 30 bp, Artificial Sequence
  Synthetic oligonucleotide
gagccgcttgataagctacgaatttatagt

SEQ ID NO: 436812 - DNA, 30 bp, Artificial Sequence
  Synthetic oligonucleotide
cctgccagtcaactcgtggctgcaactagt

SEQ ID NO: 436813 - DNA, 30 bp, Artificial Sequence
  Synthetic oligonucleotide
atcatggatctggcccgccgaaccactagt

SEQ ID NO: 436814 - DNA, 30 bp, Artificial Sequence
  Synthetic oligonucleotide
cgattacgttgttgcttctttgcgactagt

SEQ ID NO: 436815 - DNA, 30 bp, Artificial Sequence
  Synthetic oligonucleotide
tactggtgtcacttcgtttacttgactagt

SEQ ID NO: 436816 - DNA, 30 bp, Artificial Sequence
  Synthetic oligonucleotide
tttcgccgcttactgaaatgacatactagt

SEQ ID NO: 436817 - DNA, 30 bp, Artificial Sequence
  Synthetic oligonucleotide
caacaacctataagacgctttcgtactagt

SEQ ID NO: 436818 - DNA, 30 bp, Artificial Sequence
  Synthetic oligonucleotide
ttcaaatagcagtgcaatattgcgcctagt

SEQ ID NO: 436819 - DNA, 30 bp, Artificial Sequence
  Synthetic oligonucleotide
gtaacacctgcactgagccgctggcctagt

SEQ ID NO: 436820 - DNA, 30 bp, Artificial Sequence
  Synthetic oligonucleotide
ctgaggcacataacttaggctatgcctagt

SEQ ID NO: 436821 - DNA, 30 bp, Artificial Sequence
  Synthetic oligonucleotide
gtaaaagcacttaaataaatttcagctagt

SEQ ID NO: 436822 - DNA, 30 bp, Artificial Sequence
  Synthetic oligonucleotide
actttaggtactacgcctacgcgagctagt

SEQ ID NO: 436823 - DNA, 30 bp, Artificial Sequence
  Synthetic oligonucleotide
attcacctgttctgggaggcgttagctagt

SEQ ID NO: 436824 - DNA, 30 bp, Artificial Sequence
  Synthetic oligonucleotide
tattaatattatagtaagaaaatcgctagt

SEQ ID NO: 436825 - DNA, 30 bp, Artificial Sequence
  Synthetic oligonucleotide
taatgtcggaactttgttgtactggctagt

SEQ ID NO: 436826 - DNA, 30 bp, Artificial Sequence
  Synthetic oligonucleotide
ggtccgtaagcaacacatgtaaatgctagt

SEQ ID NO: 436827 - DNA, 30 bp, Artificial Sequence
  Synthetic oligonucleotide
attagggcggcggacaggccgtgtgctagt

SEQ ID NO: 436828 - DNA, 30 bp, Artificial Sequence
  Synthetic oligonucleotide
gttctcggtactagctcacatcaatctagt

SEQ ID NO: 436829 - DNA, 30 bp, Artificial Sequence
  Synthetic oligonucleotide
gtatacaagggatcctaagctctatctagt

SEQ ID NO: 436830 - DNA, 30 bp, Artificial Sequence
  Synthetic oligonucleotide
acaacaggctgagacgtatgtcggtctagt

SEQ ID NO: 436831 - DNA, 30 bp, Artificial Sequence
  Synthetic oligonucleotide
tcagcaactagaaagaatcgctattctagt

SEQ ID NO: 436832 - DNA, 30 bp, Artificial Sequence
  Synthetic oligonucleotide
tggcgcttggacggactaaatgtttctagt

SEQ ID NO: 436833 - DNA, 30 bp, Artificial Sequence
  Synthetic oligonucleotide
cactgttggtattttggactattttctagt

SEQ ID NO: 436834 - DNA, 30 bp, Artificial Sequence
  Synthetic oligonucleotide
tagcatattgcgggtggcctttcaagtagt

SEQ ID NO: 436835 - DNA, 30 bp, Artificial Sequence
  Synthetic oligonucleotide
ttacggagaactgcgatgtcggacagtagt

SEQ ID NO: 436836 - DNA, 30 bp, Artificial Sequence
  Synthetic oligonucleotide
tgggccccggattcggtgtggtacagtagt

SEQ ID NO: 436837 - DNA, 30 bp, Artificial Sequence
  Synthetic oligonucleotide
cacaggctactttcattatgtaccagtagt

SEQ ID NO: 436838 - DNA, 30 bp, Artificial Sequence
  Synthetic oligonucleotide
attacgttattggttaaccatcatagtagt

SEQ ID NO: 436839 - DNA, 30 bp, Artificial Sequence
  Synthetic oligonucleotide
gttaggacccggacaagctcatctagtagt

SEQ ID NO: 436840 - DNA, 30 bp, Artificial Sequence
  Synthetic oligonucleotide
gaagtagcactttgtactcccgcccgtagt

SEQ ID NO: 436841 - DNA, 30 bp, Artificial Sequence
  Synthetic oligonucleotide
gagaaaccagcgtaatccaactcccgtagt

SEQ ID NO: 436842 - DNA, 30 bp, Artificial Sequence
  Synthetic oligonucleotide
cccttcaacggacggctctatggccgtagt

SEQ ID NO: 436843 - DNA, 30 bp, Artificial Sequence
  Synthetic oligonucleotide
gcaagtacggccatctttttggggcgtagt

SEQ ID NO: 436844 - DNA, 30 bp, Artificial Sequence
  Synthetic oligonucleotide
acaaagatttgacaccccttgatgcgtagt

SEQ ID NO: 436845 - DNA, 30 bp, Artificial Sequence
  Synthetic oligonucleotide
tgcacatagataccttactttttgcgtagt

SEQ ID NO: 436846 - DNA, 30 bp, Artificial Sequence
  Synthetic oligonucleotide
cagcaaaccactatataacatagaggtagt

SEQ ID NO: 436847 - DNA, 30 bp, Artificial Sequence
  Synthetic oligonucleotide
gttacggatcagcagacacagaacggtagt

SEQ ID NO: 436848 - DNA, 30 bp, Artificial Sequence
  Synthetic oligonucleotide
cagtatctgcggggactatattacggtagt

SEQ ID NO: 436849 - DNA, 30 bp, Artificial Sequence
  Synthetic oligonucleotide
gcctataaggtaggagttgctcagggtagt

SEQ ID NO: 436850 - DNA, 30 bp, Artificial Sequence
  Synthetic oligonucleotide
gacgggcattggaaaacgggaacatgtagt

SEQ ID NO: 436851 - DNA, 30 bp, Artificial Sequence
  Synthetic oligonucleotide
gtaggatgacgaacatagcccacctgtagt

SEQ ID NO: 436852 - DNA, 30 bp, Artificial Sequence
  Synthetic oligonucleotide
tgcgtgtataacgcggtgactgtctgtagt

SEQ ID NO: 436853 - DNA, 30 bp, Artificial Sequence
  Synthetic oligonucleotide
agtgcacttatagggagcgaacagtgtagt

SEQ ID NO: 436854 - DNA, 30 bp, Artificial Sequence
  Synthetic oligonucleotide
cagaggtattatcctgttatcccgtgtagt

SEQ ID NO: 436855 - DNA, 30 bp, Artificial Sequence
  Synthetic oligonucleotide
ttagcgcggttggttttaattgggtgtagt

SEQ ID NO: 436856 - DNA, 30 bp, Artificial Sequence
  Synthetic oligonucleotide
ggaatgctaactaggcggagcatgtgtagt

SEQ ID NO: 436857 - DNA, 29 bp, Artificial Sequence
  Synthetic oligonucleotide
gactgccaatcggccacattcgttgtagt

SEQ ID NO: 436858 - DNA, 30 bp, Artificial Sequence
  Synthetic oligonucleotide
tgcattcggccgtgttaacaactttgtagt

SEQ ID NO: 436859 - DNA, 30 bp, Artificial Sequence
  Synthetic oligonucleotide
cttggacagaagcaccaccgtttttgtagt

SEQ ID NO: 436860 - DNA, 30 bp, Artificial Sequence
  Synthetic oligonucleotide
tcaacgggttaattatatgtcacaattagt

SEQ ID NO: 436861 - DNA, 30 bp, Artificial Sequence
  Synthetic oligonucleotide
tcatccggtattgcattgcaacgaattagt

SEQ ID NO: 436862 - DNA, 30 bp, Artificial Sequence
  Synthetic oligonucleotide
ccctaacgagcagcacgtatttgaattagt

SEQ ID NO: 436863 - DNA, 30 bp, Artificial Sequence
  Synthetic oligonucleotide
cttaatctacagcaggccgctaacattagt

SEQ ID NO: 436864 - DNA, 29 bp, Artificial Sequence
  Synthetic oligonucleotide
gcagcacataacttagttctgacattagt

SEQ ID NO: 436865 - DNA, 30 bp, Artificial Sequence
  Synthetic oligonucleotide
acacctcgttgatggtccgcgtcgattagt

SEQ ID NO: 436866 - DNA, 30 bp, Artificial Sequence
  Synthetic oligonucleotide
gtatagtcttgcaagccatccaggattagt

SEQ ID NO: 436867 - DNA, 30 bp, Artificial Sequence
  Synthetic oligonucleotide
cttattaggagaattacgtaatgtattagt

SEQ ID NO: 436868 - DNA, 30 bp, Artificial Sequence
  Synthetic oligonucleotide
ccgtcgatgcgcgaagtaaggtagcttagt

SEQ ID NO: 436869 - DNA, 30 bp, Artificial Sequence
  Synthetic oligonucleotide
tgctagaaatataacctaatctggcttagt

SEQ ID NO: 436870 - DNA, 30 bp, Artificial Sequence
  Synthetic oligonucleotide
aacttttatagtacgactgtgtgtcttagt

SEQ ID NO: 436871 - DNA, 30 bp, Artificial Sequence
  Synthetic oligonucleotide
tttattggaagagcgtgggtcaaagttagt

SEQ ID NO: 436872 - DNA, 30 bp, Artificial Sequence
  Synthetic oligonucleotide
aatcttatacgccttaaccatgcagttagt

SEQ ID NO: 436873 - DNA, 30 bp, Artificial Sequence
  Synthetic oligonucleotide
gactcgatcacaacttataatgccgttagt

SEQ ID NO: 436874 - DNA, 30 bp, Artificial Sequence
  Synthetic oligonucleotide
gtttgactccggggattgacgagcgttagt

SEQ ID NO: 436875 - DNA, 30 bp, Artificial Sequence
  Synthetic oligonucleotide
gattcctcgccactctcggagcaggttagt

SEQ ID NO: 436876 - DNA, 30 bp, Artificial Sequence
  Synthetic oligonucleotide
ttctcctcacggggccggaggttggttagt

SEQ ID NO: 436877 - DNA, 30 bp, Artificial Sequence
  Synthetic oligonucleotide
cctgtgagacgagtccccggtcctgttagt

SEQ ID NO: 436878 - DNA, 30 bp, Artificial Sequence
  Synthetic oligonucleotide
gcaggaatgcggatgcgcaacccatttagt

SEQ ID NO: 436879 - DNA, 30 bp, Artificial Sequence
  Synthetic oligonucleotide
aggcagcatcggaggggcaggccatttagt

SEQ ID NO: 436880 - DNA, 30 bp, Artificial Sequence
  Synthetic oligonucleotide
agaccataaccagaacaagcgggatttagt

SEQ ID NO: 436881 - DNA, 30 bp, Artificial Sequence
  Synthetic oligonucleotide
aacgggcggtttttgagtttcgactttagt

SEQ ID NO: 436882 - DNA, 30 bp, Artificial Sequence
  Synthetic oligonucleotide
tacgcatatagatcgcgttgaagctttagt

SEQ ID NO: 436883 - DNA, 30 bp, Artificial Sequence
  Synthetic oligonucleotide
aagcgtccgcaaccggtattaaattttagt

SEQ ID NO: 436884 - DNA, 30 bp, Artificial Sequence
  Synthetic oligonucleotide
ttttcccaggcaaacaagacagattttagt

SEQ ID NO: 436885 - DNA, 30 bp, Artificial Sequence
  Synthetic oligonucleotide
acatttcttgggaggttagtgagttttagt

SEQ ID NO: 436886 - DNA, 30 bp, Artificial Sequence
  Synthetic oligonucleotide
gacggtttgtatataggtgcgcgttttagt

SEQ ID NO: 436887 - DNA, 30 bp, Artificial Sequence
  Synthetic oligonucleotide
aatgcagaaaaatacgggaagtcaaaacgt

SEQ ID NO: 436888 - DNA, 30 bp, Artificial Sequence
  Synthetic oligonucleotide
gtatcttcagattaaaggcggggaaaacgt

SEQ ID NO: 436889 - DNA, 30 bp, Artificial Sequence
  Synthetic oligonucleotide
ttggattagtactgtttcagaataaaacgt

SEQ ID NO: 436890 - DNA, 30 bp, Artificial Sequence
  Synthetic oligonucleotide
gtcactgcttcacccgtcaggaacaaacgt

SEQ ID NO: 436891 - DNA, 30 bp, Artificial Sequence
  Synthetic oligonucleotide
acagcagttagacgcaactcagacaaacgt

SEQ ID NO: 436892 - DNA, 30 bp, Artificial Sequence
  Synthetic oligonucleotide
ccttttagccacggaggttagaccaaacgt

SEQ ID NO: 436893 - DNA, 30 bp, Artificial Sequence
  Synthetic oligonucleotide
gggctatcacgcgttagtacatagaaacgt

SEQ ID NO: 436894 - DNA, 30 bp, Artificial Sequence
  Synthetic oligonucleotide
tccggagtccccgatccatactagaaacgt

SEQ ID NO: 436895 - DNA, 30 bp, Artificial Sequence
  Synthetic oligonucleotide
tggtaattctgtggagatagtatgaaacgt

SEQ ID NO: 436896 - DNA, 30 bp, Artificial Sequence
  Synthetic oligonucleotide
tctcgtcttgactactcatgccaacaacgt

SEQ ID NO: 436897 - DNA, 30 bp, Artificial Sequence
  Synthetic oligonucleotide
gttacactacacattatcccatgacaacgt

SEQ ID NO: 436898 - DNA, 30 bp, Artificial Sequence
  Synthetic oligonucleotide
acacccttctattcaaagggtatccaacgt

SEQ ID NO: 436899 - DNA, 30 bp, Artificial Sequence
  Synthetic oligonucleotide
tatagaaacctcgacgattgcaaagaacgt

SEQ ID NO: 436900 - DNA, 30 bp, Artificial Sequence
  Synthetic oligonucleotide
gtcgcaatttcctataggatacgagaacgt

SEQ ID NO: 436901 - DNA, 30 bp, Artificial Sequence
  Synthetic oligonucleotide
aaaaaggctgtgcgcacccgcgtagaacgt

SEQ ID NO: 436902 - DNA, 30 bp, Artificial Sequence
  Synthetic oligonucleotide
ctctgctaactgcattgtgacttagaacgt

SEQ ID NO: 436903 - DNA, 30 bp, Artificial Sequence
  Synthetic oligonucleotide
gcttctgatatatacgggagtctcgaacgt

SEQ ID NO: 436904 - DNA, 30 bp, Artificial Sequence
  Synthetic oligonucleotide
aaatacttcaggaatgaccacgtcgaacgt

SEQ ID NO: 436905 - DNA, 30 bp, Artificial Sequence
  Synthetic oligonucleotide
gataggtaaacttctgctgccgatgaacgt

SEQ ID NO: 436906 - DNA, 30 bp, Artificial Sequence
  Synthetic oligonucleotide
ctgatcaacctaagggaggtctctgaacgt

SEQ ID NO: 436907 - DNA, 30 bp, Artificial Sequence
  Synthetic oligonucleotide
ttccgcgaaaagatctaagggcttgaacgt

SEQ ID NO: 436908 - DNA, 30 bp, Artificial Sequence
  Synthetic oligonucleotide
aagggtaatactttcatgagggcataacgt

SEQ ID NO: 436909 - DNA, 30 bp, Artificial Sequence
  Synthetic oligonucleotide
cactagactaagatacgagcacgataacgt

SEQ ID NO: 436910 - DNA, 30 bp, Artificial Sequence
  Synthetic oligonucleotide
gaaagcacttgccacgcctaaaactaacgt

SEQ ID NO: 436911 - DNA, 30 bp, Artificial Sequence
  Synthetic oligonucleotide
cgtataacatctgagtcaacgtactaacgt

SEQ ID NO: 436912 - DNA, 30 bp, Artificial Sequence
  Synthetic oligonucleotide
aacgattgaatgtttgataattcctaacgt

SEQ ID NO: 436913 - DNA, 30 bp, Artificial Sequence
  Synthetic oligonucleotide
aatgtaatcgcacgcggcgggtagtaacgt

SEQ ID NO: 436914 - DNA, 30 bp, Artificial Sequence
  Synthetic oligonucleotide
ccgaggcccggcgtagtggccctgtaacgt

SEQ ID NO: 436915 - DNA, 30 bp, Artificial Sequence
  Synthetic oligonucleotide
ctgcaggcatgacttctgcacgattaacgt

SEQ ID NO: 436916 - DNA, 30 bp, Artificial Sequence
  Synthetic oligonucleotide
gagaaattatttggaagttggtaaacacgt

SEQ ID NO: 436917 - DNA, 30 bp, Artificial Sequence
  Synthetic oligonucleotide
cgtcgaaatgatatttcccgttgaacacgt

SEQ ID NO: 436918 - DNA, 30 bp, Artificial Sequence
  Synthetic oligonucleotide
atcagtgtggaattttagtaactaacacgt

SEQ ID NO: 436919 - DNA, 30 bp, Artificial Sequence
  Synthetic oligonucleotide
cgagagccgggaaaactgtccttaacacgt

SEQ ID NO: 436920 - DNA, 30 bp, Artificial Sequence
  Synthetic oligonucleotide
agcagattcgtgtttgaaggccacacacgt

SEQ ID NO: 436921 - DNA, 30 bp, Artificial Sequence
  Synthetic oligonucleotide
ggattccggccaccaacatcgtccacacgt

SEQ ID NO: 436922 - DNA, 30 bp, Artificial Sequence
  Synthetic oligonucleotide
ggattgaattttcactctggtatcacacgt

SEQ ID NO: 436923 - DNA, 30 bp, Artificial Sequence
  Synthetic oligonucleotide
catagtaagttgtatggccgtcagacacgt

SEQ ID NO: 436924 - DNA, 30 bp, Artificial Sequence
  Synthetic oligonucleotide
gatttatagtgcctaagcgatgagacacgt

SEQ ID NO: 436925 - DNA, 30 bp, Artificial Sequence
  Synthetic oligonucleotide
gtagtattgaggcacacgattccgacacgt

SEQ ID NO: 436926 - DNA, 30 bp, Artificial Sequence
  Synthetic oligonucleotide
ttcagaggtctgcgataggacgggacacgt

SEQ ID NO: 436927 - DNA, 30 bp, Artificial Sequence
  Synthetic oligonucleotide
agcagacgttcgcagtgaaatattacacgt

SEQ ID NO: 436928 - DNA, 30 bp, Artificial Sequence
  Synthetic oligonucleotide
ctaatcattgctgcaggaccacttacacgt

SEQ ID NO: 436929 - DNA, 30 bp, Artificial Sequence
  Synthetic oligonucleotide
ctaaaaggacagatacagcttcttacacgt

SEQ ID NO: 436930 - DNA, 30 bp, Artificial Sequence
  Synthetic oligonucleotide
tgtgggtggttcagagaaaaccaaccacgt

SEQ ID NO: 436931 - DNA, 30 bp, Artificial Sequence
  Synthetic oligonucleotide
gtgtaaggactattgctccgaaacccacgt

SEQ ID NO: 436932 - DNA, 31 bp, Artificial Sequence
  Synthetic oligonucleotide
gttttatgtagcttatagacaattgccacgt

SEQ ID NO: 436933 - DNA, 30 bp, Artificial Sequence
  Synthetic oligonucleotide
ggattacgcgtatagaagattcctccacgt

SEQ ID NO: 436934 - DNA, 30 bp, Artificial Sequence
  Synthetic oligonucleotide
gacaaagtgtctgtctgtctagctccacgt

SEQ ID NO: 436935 - DNA, 30 bp, Artificial Sequence
  Synthetic oligonucleotide
aatgaccggtaagcgctttacggtccacgt

SEQ ID NO: 436936 - DNA, 30 bp, Artificial Sequence
  Synthetic oligonucleotide
cgcggaaacttctgctctccttcagcacgt

SEQ ID NO: 436937 - DNA, 30 bp, Artificial Sequence
  Synthetic oligonucleotide
gtaccgtttggtagtcggagtacggcacgt

SEQ ID NO: 436938 - DNA, 30 bp, Artificial Sequence
  Synthetic oligonucleotide
gggccggcccgcaacctctaatcctcacgt

SEQ ID NO: 436939 - DNA, 30 bp, Artificial Sequence
  Synthetic oligonucleotide
ggcgggcgcataagcgatcgcggctcacgt

SEQ ID NO: 436940 - DNA, 30 bp, Artificial Sequence
  Synthetic oligonucleotide
gtggtcttcgtattaatgtgattctcacgt

SEQ ID NO: 436941 - DNA, 30 bp, Artificial Sequence
  Synthetic oligonucleotide
catttttacagcttcgaacctacttcacgt

SEQ ID NO: 436942 - DNA, 30 bp, Artificial Sequence
  Synthetic oligonucleotide
cttagaggacaggtttgagcatcttcacgt

SEQ ID NO: 436943 - DNA, 30 bp, Artificial Sequence
  Synthetic oligonucleotide
ggccggcctatcaggtttaatagttcacgt

SEQ ID NO: 436944 - DNA, 30 bp, Artificial Sequence
  Synthetic oligonucleotide
gcgcgtagacgtcgtgtctaaacaagacgt

SEQ ID NO: 436945 - DNA, 30 bp, Artificial Sequence
  Synthetic oligonucleotide
atgagcctcacgcagctgctgacaagacgt

SEQ ID NO: 436946 - DNA, 30 bp, Artificial Sequence
  Synthetic oligonucleotide
gccggggtgcacgtttcgcgccgcagacgt

SEQ ID NO: 436947 - DNA, 30 bp, Artificial Sequence
  Synthetic oligonucleotide
ggacctatggctgtgcagagattcagacgt

SEQ ID NO: 436948 - DNA, 30 bp, Artificial Sequence
  Synthetic oligonucleotide
gaatggtcaaaataccagggtttcagacgt

SEQ ID NO: 436949 - DNA, 30 bp, Artificial Sequence
  Synthetic oligonucleotide
tggtgtcccctttgaacaattaagagacgt

SEQ ID NO: 436950 - DNA, 30 bp, Artificial Sequence
  Synthetic oligonucleotide
cagtgccggccaacaggtcaacatagacgt

SEQ ID NO: 436951 - DNA, 30 bp, Artificial Sequence
  Synthetic oligonucleotide
tgcagatttattggcctcctacatagacgt

SEQ ID NO: 436952 - DNA, 30 bp, Artificial Sequence
  Synthetic oligonucleotide
tctttttacacccatcgttgttgtagacgt

SEQ ID NO: 436953 - DNA, 30 bp, Artificial Sequence
  Synthetic oligonucleotide
ctgtccagtggcgcaacagcacttagacgt

SEQ ID NO: 436954 - DNA, 31 bp, Artificial Sequence
  Synthetic oligonucleotide
gaaccggatcagcaactctagataacgacgt

SEQ ID NO: 436955 - DNA, 30 bp, Artificial Sequence
  Synthetic oligonucleotide
tcattagcacgatccgtcgcaccgcgacgt

SEQ ID NO: 436956 - DNA, 30 bp, Artificial Sequence
  Synthetic oligonucleotide
cgtagactgcagcgactgcccccgcgacgt

SEQ ID NO: 436957 - DNA, 30 bp, Artificial Sequence
  Synthetic oligonucleotide
tgcaatgattatgtttcatgatggcgacgt

SEQ ID NO: 436958 - DNA, 30 bp, Artificial Sequence
  Synthetic oligonucleotide
tgctgaggtatacgattgttacgtcgacgt

SEQ ID NO: 436959 - DNA, 30 bp, Artificial Sequence
  Synthetic oligonucleotide
gcaacttcgatagggcgttcactcggacgt

SEQ ID NO: 436960 - DNA, 30 bp, Artificial Sequence
  Synthetic oligonucleotide
aatttaactcaaacgttgtaaacgggacgt

SEQ ID NO: 436961 - DNA, 30 bp, Artificial Sequence
  Synthetic oligonucleotide
agctaaattaaaatccggaatgatggacgt

SEQ ID NO: 436962 - DNA, 30 bp, Artificial Sequence
  Synthetic oligonucleotide
atacagccatcgcctgctagtagtggacgt

SEQ ID NO: 436963 - DNA, 30 bp, Artificial Sequence
  Synthetic oligonucleotide
gtatgaattctaaattaccattgtggacgt

SEQ ID NO: 436964 - DNA, 30 bp, Artificial Sequence
  Synthetic oligonucleotide
caggaatcatattgagtattataatgacgt

SEQ ID NO: 436965 - DNA, 30 bp, Artificial Sequence
  Synthetic oligonucleotide
aacagcccctgaactgattcggcgtgacgt

SEQ ID NO: 436966 - DNA, 30 bp, Artificial Sequence
  Synthetic oligonucleotide
aacgcattaaccgtagcaaaaaaaatacgt

SEQ ID NO: 436967 - DNA, 30 bp, Artificial Sequence
  Synthetic oligonucleotide
ctgggtgccgtaagggtctttcaaatacgt

SEQ ID NO: 436968 - DNA, 30 bp, Artificial Sequence
  Synthetic oligonucleotide
tgtgtatgagccaatttccggccaatacgt

SEQ ID NO: 436969 - DNA, 30 bp, Artificial Sequence
  Synthetic oligonucleotide
gaatgactcagcagtccggcgctaatacgt

SEQ ID NO: 436970 - DNA, 30 bp, Artificial Sequence
  Synthetic oligonucleotide
tcatttggcccaaaatcgtggtccatacgt

SEQ ID NO: 436971 - DNA, 30 bp, Artificial Sequence
  Synthetic oligonucleotide
cctcttctggacaaccctcctggcatacgt

SEQ ID NO: 436972 - DNA, 30 bp, Artificial Sequence
  Synthetic oligonucleotide
ccgtattgattagaaggatccatcatacgt

SEQ ID NO: 436973 - DNA, 30 bp, Artificial Sequence
  Synthetic oligonucleotide
attcatggcaccgtggtgtttaagatacgt

SEQ ID NO: 436974 - DNA, 30 bp, Artificial Sequence
  Synthetic oligonucleotide
gactatgaaccgattactatgaggatacgt

SEQ ID NO: 436975 - DNA, 30 bp, Artificial Sequence
  Synthetic oligonucleotide
tatattttgctgtagggtcccgatatacgt

SEQ ID NO: 436976 - DNA, 30 bp, Artificial Sequence
  Synthetic oligonucleotide
tcagttaccgtctcggtgccgcgtatacgt

SEQ ID NO: 436977 - DNA, 30 bp, Artificial Sequence
  Synthetic oligonucleotide
attagatagtatacacattggccactacgt

SEQ ID NO: 436978 - DNA, 30 bp, Artificial Sequence
  Synthetic oligonucleotide
cacctggtgaagatggtttatacgctacgt

SEQ ID NO: 436979 - DNA, 30 bp, Artificial Sequence
  Synthetic oligonucleotide
aaagtttcccgcttacccgtttggctacgt

SEQ ID NO: 436980 - DNA, 30 bp, Artificial Sequence
  Synthetic oligonucleotide
cctcgggccagacctggtagttatctacgt

SEQ ID NO: 436981 - DNA, 30 bp, Artificial Sequence
  Synthetic oligonucleotide
ccttcaagtaggcgcattagacgtctacgt

SEQ ID NO: 436982 - DNA, 30 bp, Artificial Sequence
  Synthetic oligonucleotide
cttttactaaagtacgacttgatcgtacgt

SEQ ID NO: 436983 - DNA, 30 bp, Artificial Sequence
  Synthetic oligonucleotide
tgccatatattgggctcagtacaggtacgt

SEQ ID NO: 436984 - DNA, 30 bp, Artificial Sequence
  Synthetic oligonucleotide
atccgcgctttgctgggcgcgccggtacgt

SEQ ID NO: 436985 - DNA, 30 bp, Artificial Sequence
  Synthetic oligonucleotide
ttccttacccgtgtttggatcggggtacgt

SEQ ID NO: 436986 - DNA, 30 bp, Artificial Sequence
  Synthetic oligonucleotide
tagattgatgaagtaatcaatatggtacgt

SEQ ID NO: 436987 - DNA, 30 bp, Artificial Sequence
  Synthetic oligonucleotide
taggcgttgcgattacatgttctggtacgt

SEQ ID NO: 436988 - DNA, 30 bp, Artificial Sequence
  Synthetic oligonucleotide
ttaatgacgtccgtattgcaaagtgtacgt

SEQ ID NO: 436989 - DNA, 30 bp, Artificial Sequence
  Synthetic oligonucleotide
ttcttatagaattggggtaacggattacgt

SEQ ID NO: 436990 - DNA, 30 bp, Artificial Sequence
  Synthetic oligonucleotide
gcccttgggcgtcaggtccagcgcttacgt

SEQ ID NO: 436991 - DNA, 30 bp, Artificial Sequence
  Synthetic oligonucleotide
tattaacgagaaacgaaccttatcttacgt

SEQ ID NO: 436992 - DNA, 30 bp, Artificial Sequence
  Synthetic oligonucleotide
atcattagcttccatagccatcatttacgt

SEQ ID NO: 436993 - DNA, 30 bp, Artificial Sequence
  Synthetic oligonucleotide
tataggaagaacatatcagctataaaccgt

SEQ ID NO: 436994 - DNA, 30 bp, Artificial Sequence
  Synthetic oligonucleotide
tagatggctgagggaatatagaccaaccgt

SEQ ID NO: 436995 - DNA, 30 bp, Artificial Sequence
  Synthetic oligonucleotide
gggtgcgttggacggtgtctacccaaccgt

SEQ ID NO: 436996 - DNA, 30 bp, Artificial Sequence
  Synthetic oligonucleotide
ggcgggcggatatgtgcttactttaaccgt

SEQ ID NO: 436997 - DNA, 30 bp, Artificial Sequence
  Synthetic oligonucleotide
ttgccaatacgctcaaatgatctacaccgt

SEQ ID NO: 436998 - DNA, 30 bp, Artificial Sequence
  Synthetic oligonucleotide
aagcaagttctggctataatattacaccgt

SEQ ID NO: 436999 - DNA, 30 bp, Artificial Sequence
  Synthetic oligonucleotide
catgtaataacttaattctaactccaccgt

SEQ ID NO: 437000 - DNA, 30 bp, Artificial Sequence
  Synthetic oligonucleotide
gccagttcggttctaatgaggacgcaccgt

SEQ ID NO: 437001 - DNA, 30 bp, Artificial Sequence
  Synthetic oligonucleotide
ggactgatttttccctggaccgcgcaccgt

SEQ ID NO: 437002 - DNA, 30 bp, Artificial Sequence
  Synthetic oligonucleotide
cggtaaggagggtcaccgacgtcgcaccgt

SEQ ID NO: 437003 - DNA, 30 bp, Artificial Sequence
  Synthetic oligonucleotide
acgccttaattaacacaataaccagaccgt

SEQ ID NO: 437004 - DNA, 30 bp, Artificial Sequence
  Synthetic oligonucleotide
ttgcacgcacgggcaacatattgagaccgt

SEQ ID NO: 437005 - DNA, 30 bp, Artificial Sequence
  Synthetic oligonucleotide
gtgactaccaaagttgtcatcctagaccgt

SEQ ID NO: 437006 - DNA, 30 bp, Artificial Sequence
  Synthetic oligonucleotide
tacggatgtaatatccctcttgtagaccgt

SEQ ID NO: 437007 - DNA, 30 bp, Artificial Sequence
  Synthetic oligonucleotide
ttcgagttcgcgatgctacggcacgaccgt

SEQ ID NO: 437008 - DNA, 30 bp, Artificial Sequence
  Synthetic oligonucleotide
tcaggtaccaacggctatgcgacggaccgt

SEQ ID NO: 437009 - DNA, 30 bp, Artificial Sequence
  Synthetic oligonucleotide
aactatgtatgacatcacgttgtggaccgt

SEQ ID NO: 437010 - DNA, 30 bp, Artificial Sequence
  Synthetic oligonucleotide
gcgataaccggactgtccatgcttgaccgt

SEQ ID NO: 437011 - DNA, 30 bp, Artificial Sequence
  Synthetic oligonucleotide
gaggaagcagtcacttagtgaccataccgt

SEQ ID NO: 437012 - DNA, 30 bp, Artificial Sequence
  Synthetic oligonucleotide
tgacctgacctaaccggtatagcataccgt

SEQ ID NO: 437013 - DNA, 30 bp, Artificial Sequence
  Synthetic oligonucleotide
cccggcgttgggtcatttgcaaactaccgt

SEQ ID NO: 437014 - DNA, 30 bp, Artificial Sequence
  Synthetic oligonucleotide
aaaggttttcttcgggaacatagctaccgt

SEQ ID NO: 437015 - DNA, 30 bp, Artificial Sequence
  Synthetic oligonucleotide
acttggacagccccgccacaagtgtaccgt

SEQ ID NO: 437016 - DNA, 30 bp, Artificial Sequence
  Synthetic oligonucleotide
gttgcttcttaaaacaacaagtattaccgt

SEQ ID NO: 437017 - DNA, 30 bp, Artificial Sequence
  Synthetic oligonucleotide
aaaatctgtgatacctacgatgaaacccgt

SEQ ID NO: 437018 - DNA, 29 bp, Artificial Sequence
  Synthetic oligonucleotide
aagttactcgtgtgagtatttacacccgt

SEQ ID NO: 437019 - DNA, 30 bp, Artificial Sequence
  Synthetic oligonucleotide
tacaatatactccgagattacccgacccgt

SEQ ID NO: 437020 - DNA, 30 bp, Artificial Sequence
  Synthetic oligonucleotide
cttgacgaatccccgctcagagcgacccgt

SEQ ID NO: 437021 - DNA, 30 bp, Artificial Sequence
  Synthetic oligonucleotide
ggctaaggccggagaaccgccaggacccgt

SEQ ID NO: 437022 - DNA, 30 bp, Artificial Sequence
  Synthetic oligonucleotide
gatcaatctcatcccggtgccaggacccgt

SEQ ID NO: 437023 - DNA, 30 bp, Artificial Sequence
  Synthetic oligonucleotide
tgccagcatcggggagtcgggatgacccgt

SEQ ID NO: 437024 - DNA, 30 bp, Artificial Sequence
  Synthetic oligonucleotide
attgcagaatcctctgcatcattgacccgt

SEQ ID NO: 437025 - DNA, 30 bp, Artificial Sequence
  Synthetic oligonucleotide
tctaagtccttgcaggaccttgctacccgt

SEQ ID NO: 437026 - DNA, 30 bp, Artificial Sequence
  Synthetic oligonucleotide
tgcaacgccagatgtactctgtaaccccgt

SEQ ID NO: 437027 - DNA, 30 bp, Artificial Sequence
  Synthetic oligonucleotide
caaggcgcgtttacagcaccctccccccgt

SEQ ID NO: 437028 - DNA, 30 bp, Artificial Sequence
  Synthetic oligonucleotide
aatctaccgttcaaagcagaggatccccgt

SEQ ID NO: 437029 - DNA, 30 bp, Artificial Sequence
  Synthetic oligonucleotide
tagcgtgaattcatgaaccgggatccccgt

SEQ ID NO: 437030 - DNA, 30 bp, Artificial Sequence
  Synthetic oligonucleotide
ctgtcatacgactcttaatactatccccgt

SEQ ID NO: 437031 - DNA, 30 bp, Artificial Sequence
  Synthetic oligonucleotide
ctagagaagacggttttttgacgtccccgt

SEQ ID NO: 437032 - DNA, 30 bp, Artificial Sequence
  Synthetic oligonucleotide
ttccatagccagtcgagatagacagcccgt

SEQ ID NO: 437033 - DNA, 30 bp, Artificial Sequence
  Synthetic oligonucleotide
caacctagagtatgtcgatcttaggcccgt

SEQ ID NO: 437034 - DNA, 30 bp, Artificial Sequence
  Synthetic oligonucleotide
tagacgcactaacccgaatatggggcccgt

SEQ ID NO: 437035 - DNA, 30 bp, Artificial Sequence
  Synthetic oligonucleotide
tgctttccgtgggttcaatcaactgcccgt

SEQ ID NO: 437036 - DNA, 30 bp, Artificial Sequence
  Synthetic oligonucleotide
atagactttggtcccggctaacattcccgt

SEQ ID NO: 437037 - DNA, 30 bp, Artificial Sequence
  Synthetic oligonucleotide
attaacgcgagcatgtaccggcgttcccgt

SEQ ID NO: 437038 - DNA, 30 bp, Artificial Sequence
  Synthetic oligonucleotide
tataatgggcgaaccggccgtaaaagccgt

SEQ ID NO: 437039 - DNA, 30 bp, Artificial Sequence
  Synthetic oligonucleotide
cattattgatggcatatggcgtaccgccgt

SEQ ID NO: 437040 - DNA, 30 bp, Artificial Sequence
  Synthetic oligonucleotide
tcctgggatgtcaatagaccggagcgccgt

SEQ ID NO: 437041 - DNA, 30 bp, Artificial Sequence
  Synthetic oligonucleotide
ctaagccgtatttaagaggtctagcgccgt

SEQ ID NO: 437042 - DNA, 30 bp, Artificial Sequence
  Synthetic oligonucleotide
gcgggcgtgggttttcgtacgggtcgccgt

SEQ ID NO: 437043 - DNA, 30 bp, Artificial Sequence
  Synthetic oligonucleotide
gcaagcaatctccacgcagagattcgccgt

SEQ ID NO: 437044 - DNA, 29 bp, Artificial Sequence
  Synthetic oligonucleotide
cgtcgattcattaccttgagtttcgccgt

SEQ ID NO: 437045 - DNA, 30 bp, Artificial Sequence
  Synthetic oligonucleotide
tccattacatccgcaataccggcaggccgt

SEQ ID NO: 437046 - DNA, 30 bp, Artificial Sequence
  Synthetic oligonucleotide
aagccctcgtaattcgagtggacgggccgt

SEQ ID NO: 437047 - DNA, 30 bp, Artificial Sequence
  Synthetic oligonucleotide
ttataggggattcgttttagttcgggccgt

SEQ ID NO: 437048 - DNA, 30 bp, Artificial Sequence
  Synthetic oligonucleotide
cgcccgtgtggaacagatcatcctggccgt

SEQ ID NO: 437049 - DNA, 30 bp, Artificial Sequence
  Synthetic oligonucleotide
aggtcggttattaatcgttcataatgccgt

SEQ ID NO: 437050 - DNA, 30 bp, Artificial Sequence
  Synthetic oligonucleotide
gtctgcaggtaaaataccttactctgccgt

SEQ ID NO: 437051 - DNA, 30 bp, Artificial Sequence
  Synthetic oligonucleotide
tgttaaaacacttgcttagtgtcttgccgt

SEQ ID NO: 437052 - DNA, 30 bp, Artificial Sequence
  Synthetic oligonucleotide
aagtcttctgggcgagactcggtaatccgt

SEQ ID NO: 437053 - DNA, 30 bp, Artificial Sequence
  Synthetic oligonucleotide
aagttgctcccttagtgagtgttaatccgt

SEQ ID NO: 437054 - DNA, 30 bp, Artificial Sequence
  Synthetic oligonucleotide
aagtagtgtaggttggaagtacacatccgt

SEQ ID NO: 437055 - DNA, 30 bp, Artificial Sequence
  Synthetic oligonucleotide
gaaaaaatgtgactggatacggccatccgt

SEQ ID NO: 437056 - DNA, 30 bp, Artificial Sequence
  Synthetic oligonucleotide
agtgcggcagcggataaagacgtcatccgt

SEQ ID NO: 437057 - DNA, 30 bp, Artificial Sequence
  Synthetic oligonucleotide
gtgtattgggcctgtcggaagaagatccgt

SEQ ID NO: 437058 - DNA, 30 bp, Artificial Sequence
  Synthetic oligonucleotide
caatggtctggagatgagctacagatccgt

SEQ ID NO: 437059 - DNA, 30 bp, Artificial Sequence
  Synthetic oligonucleotide
tgccttagcacatcgtataacgggatccgt

SEQ ID NO: 437060 - DNA, 30 bp, Artificial Sequence
  Synthetic oligonucleotide
atccacagtcgcagtcgcggtgggatccgt

SEQ ID NO: 437061 - DNA, 30 bp, Artificial Sequence
  Synthetic oligonucleotide
caacggcttgctagtttcgactggatccgt

SEQ ID NO: 437062 - DNA, 30 bp, Artificial Sequence
  Synthetic oligonucleotide
caatcctcagcaagatgataccacgtccgt

SEQ ID NO: 437063 - DNA, 30 bp, Artificial Sequence
  Synthetic oligonucleotide
attataatttcgggagcagcgagcgtccgt

SEQ ID NO: 437064 - DNA, 30 bp, Artificial Sequence
  Synthetic oligonucleotide
ggcaagagattcgcactacgcacggtccgt

SEQ ID NO: 437065 - DNA, 30 bp, Artificial Sequence
  Synthetic oligonucleotide
gcgcgggagatccagtctctctgggtccgt

SEQ ID NO: 437066 - DNA, 30 bp, Artificial Sequence
  Synthetic oligonucleotide
gtcgtagactaatattacgataatttccgt

SEQ ID NO: 437067 - DNA, 30 bp, Artificial Sequence
  Synthetic oligonucleotide
acgcggtcattttacctccagtttttccgt

SEQ ID NO: 437068 - DNA, 30 bp, Artificial Sequence
  Synthetic oligonucleotide
tctcttagtggcttgggttagaaaaagcgt

SEQ ID NO: 437069 - DNA, 30 bp, Artificial Sequence
  Synthetic oligonucleotide
gtcaatacccacgcttaggccagaaagcgt

SEQ ID NO: 437070 - DNA, 30 bp, Artificial Sequence
  Synthetic oligonucleotide
ggatgtctgcgagtctctcgaataaagcgt

SEQ ID NO: 437071 - DNA, 30 bp, Artificial Sequence
  Synthetic oligonucleotide
ggcaatgcggtagatgattatctaaagcgt

SEQ ID NO: 437072 - DNA, 30 bp, Artificial Sequence
  Synthetic oligonucleotide
cattgtgttctaactcaagacaccaagcgt

SEQ ID NO: 437073 - DNA, 30 bp, Artificial Sequence
  Synthetic oligonucleotide
gcaaacaacagaggagctcacccgaagcgt

SEQ ID NO: 437074 - DNA, 30 bp, Artificial Sequence
  Synthetic oligonucleotide
tctattaagttggctgactttccgaagcgt

SEQ ID NO: 437075 - DNA, 30 bp, Artificial Sequence
  Synthetic oligonucleotide
agtatgggtgtgtagcccgtctcgaagcgt

SEQ ID NO: 437076 - DNA, 30 bp, Artificial Sequence
  Synthetic oligonucleotide
taggcttcgtcggatcatcctgggaagcgt

SEQ ID NO: 437077 - DNA, 30 bp, Artificial Sequence
  Synthetic oligonucleotide
cctatttttacctacctcctggtgaagcgt

SEQ ID NO: 437078 - DNA, 30 bp, Artificial Sequence
  Synthetic oligonucleotide
acgggaattagcctagacggcactaagcgt

SEQ ID NO: 437079 - DNA, 30 bp, Artificial Sequence
  Synthetic oligonucleotide
gttatcatttgctcaccgttaacccagcgt

SEQ ID NO: 437080 - DNA, 30 bp, Artificial Sequence
  Synthetic oligonucleotide
ggctatttttgttcagatacttgccagcgt

SEQ ID NO: 437081 - DNA, 30 bp, Artificial Sequence
  Synthetic oligonucleotide
acgtagttttatccaatatactggcagcgt

SEQ ID NO: 437082 - DNA, 30 bp, Artificial Sequence
  Synthetic oligonucleotide
gaccatctgtaagatctaatgttgcagcgt

SEQ ID NO: 437083 - DNA, 30 bp, Artificial Sequence
  Synthetic oligonucleotide
caacatgtttccctagactggcgtcagcgt

SEQ ID NO: 437084 - DNA, 30 bp, Artificial Sequence
  Synthetic oligonucleotide
gtgattacttatgttaggttttgagagcgt

SEQ ID NO: 437085 - DNA, 30 bp, Artificial Sequence
  Synthetic oligonucleotide
cacatgcggacaaccccgtcacgcgagcgt

SEQ ID NO: 437086 - DNA, 30 bp, Artificial Sequence
  Synthetic oligonucleotide
agcgacgccagtccagggaaacaggagcgt

SEQ ID NO: 437087 - DNA, 30 bp, Artificial Sequence
  Synthetic oligonucleotide
gttccctaaggcttctcgatctcggagcgt

SEQ ID NO: 437088 - DNA, 30 bp, Artificial Sequence
  Synthetic oligonucleotide
ttttggcaccgacgttaacatggtgagcgt

SEQ ID NO: 437089 - DNA, 30 bp, Artificial Sequence
  Synthetic oligonucleotide
gtacgatggttccgagcccggtgtgagcgt

SEQ ID NO: 437090 - DNA, 30 bp, Artificial Sequence
  Synthetic oligonucleotide
gcgtactacctccggttagtatttgagcgt

SEQ ID NO: 437091 - DNA, 30 bp, Artificial Sequence
  Synthetic oligonucleotide
tgatgcgtcagtgatttatcgcgctagcgt

SEQ ID NO: 437092 - DNA, 30 bp, Artificial Sequence
  Synthetic oligonucleotide
ggagcagacccttaacttaaatgctagcgt

SEQ ID NO: 437093 - DNA, 30 bp, Artificial Sequence
  Synthetic oligonucleotide
gaagtgtgactacgccgttcgctctagcgt

SEQ ID NO: 437094 - DNA, 30 bp, Artificial Sequence
  Synthetic oligonucleotide
cacttccgggaccccgtttcggtctagcgt

SEQ ID NO: 437095 - DNA, 30 bp, Artificial Sequence
  Synthetic oligonucleotide
tgttgctgtaagatcttagtttcgtagcgt

SEQ ID NO: 437096 - DNA, 30 bp, Artificial Sequence
  Synthetic oligonucleotide
gattgtagttaactgccggacatgtagcgt

SEQ ID NO: 437097 - DNA, 30 bp, Artificial Sequence
  Synthetic oligonucleotide
cgcaccggggaaattctcatcatgtagcgt

SEQ ID NO: 437098 - DNA, 30 bp, Artificial Sequence
  Synthetic oligonucleotide
aaactgtccccattaagagcgctttagcgt

SEQ ID NO: 437099 - DNA, 30 bp, Artificial Sequence
  Synthetic oligonucleotide
tgtgtgactaattatacactggaaacgcgt

SEQ ID NO: 437100 - DNA, 30 bp, Artificial Sequence
  Synthetic oligonucleotide
ggcgctgtaggacggtgtgccagcacgcgt

SEQ ID NO: 437101 - DNA, 30 bp, Artificial Sequence
  Synthetic oligonucleotide
aagtgccatgtctcaacaaatagcacgcgt

SEQ ID NO: 437102 - DNA, 30 bp, Artificial Sequence
  Synthetic oligonucleotide
gtagtccgctcaagatggttcgtcacgcgt

SEQ ID NO: 437103 - DNA, 30 bp, Artificial Sequence
  Synthetic oligonucleotide
tccctgctatgtccccccgaatggacgcgt

SEQ ID NO: 437104 - DNA, 30 bp, Artificial Sequence
  Synthetic oligonucleotide
aaaaagatcagctaatcggggtggacgcgt

SEQ ID NO: 437105 - DNA, 30 bp, Artificial Sequence
  Synthetic oligonucleotide
ttcacggtctaaactaaaactatgacgcgt

SEQ ID NO: 437106 - DNA, 30 bp, Artificial Sequence
  Synthetic oligonucleotide
ctcgtaataggtgaggagtctgctacgcgt

SEQ ID NO: 437107 - DNA, 30 bp, Artificial Sequence
  Synthetic oligonucleotide
agcaatgcggatgtaggaatcccaccgcgt

SEQ ID NO: 437108 - DNA, 30 bp, Artificial Sequence
  Synthetic oligonucleotide
tcgtaagtttcgggatgtgggtacccgcgt

SEQ ID NO: 437109 - DNA, 30 bp, Artificial Sequence
  Synthetic oligonucleotide
gacgcgtcaatacagttgtatccgccgcgt

SEQ ID NO: 437110 - DNA, 30 bp, Artificial Sequence
  Synthetic oligonucleotide
gtcatacgaccgtagcgctagctgccgcgt

SEQ ID NO: 437111 - DNA, 30 bp, Artificial Sequence
  Synthetic oligonucleotide
cggccacgcaatggtccagcatatccgcgt

SEQ ID NO: 437112 - DNA, 30 bp, Artificial Sequence
  Synthetic oligonucleotide
ctgcggcaaagcaccaattactgtccgcgt

SEQ ID NO: 437113 - DNA, 30 bp, Artificial Sequence
  Synthetic oligonucleotide
ggtgatggaattgggtgcccgcaggcgcgt

SEQ ID NO: 437114 - DNA, 30 bp, Artificial Sequence
  Synthetic oligonucleotide
tcagtgacgggacacgcaaaaccggcgcgt

SEQ ID NO: 437115 - DNA, 30 bp, Artificial Sequence
  Synthetic oligonucleotide
cgcggccaaagaaacggaagccgtgcgcgt

SEQ ID NO: 437116 - DNA, 30 bp, Artificial Sequence
  Synthetic oligonucleotide
tgcagctgtctaaactaggcccaatcgcgt

SEQ ID NO: 437117 - DNA, 30 bp, Artificial Sequence
  Synthetic oligonucleotide
ttgggtttcacccaggtcctgacatcgcgt

SEQ ID NO: 437118 - DNA, 30 bp, Artificial Sequence
  Synthetic oligonucleotide
attattgcgacatagggaacttcatcgcgt

SEQ ID NO: 437119 - DNA, 30 bp, Artificial Sequence
  Synthetic oligonucleotide
cgtaagtgactaccgacggtagcctcgcgt

SEQ ID NO: 437120 - DNA, 30 bp, Artificial Sequence
  Synthetic oligonucleotide
ctccaccctcaactttttcatctgtcgcgt

SEQ ID NO: 437121 - DNA, 30 bp, Artificial Sequence
  Synthetic oligonucleotide
ctactttgagtccatcggggtttgtcgcgt

SEQ ID NO: 437122 - DNA, 30 bp, Artificial Sequence
  Synthetic oligonucleotide
catcgactagcagagcacaagataaggcgt

SEQ ID NO: 437123 - DNA, 30 bp, Artificial Sequence
  Synthetic oligonucleotide
tgggaccaattggcggccatcaacaggcgt

SEQ ID NO: 437124 - DNA, 30 bp, Artificial Sequence
  Synthetic oligonucleotide
gagaccgaggccaaacgctaccacaggcgt

SEQ ID NO: 437125 - DNA, 30 bp, Artificial Sequence
  Synthetic oligonucleotide
taagggtttaatcggggatgaagcaggcgt

SEQ ID NO: 437126 - DNA, 30 bp, Artificial Sequence
  Synthetic oligonucleotide
ggcttcacatgcttgtatggagtcaggcgt

SEQ ID NO: 437127 - DNA, 30 bp, Artificial Sequence
  Synthetic oligonucleotide
tcgctggcacgcagtgattcggcgaggcgt

SEQ ID NO: 437128 - DNA, 30 bp, Artificial Sequence
  Synthetic oligonucleotide
taacgggcggcggcgacgctcgtgaggcgt

SEQ ID NO: 437129 - DNA, 30 bp, Artificial Sequence
  Synthetic oligonucleotide
aaatacgtttgacaccgcaaattgaggcgt

SEQ ID NO: 437130 - DNA, 30 bp, Artificial Sequence
  Synthetic oligonucleotide
ataattgtcttttcaaaaagatgacggcgt

SEQ ID NO: 437131 - DNA, 30 bp, Artificial Sequence
  Synthetic oligonucleotide
ctgcgtacgtcaaccatttaaatccggcgt

SEQ ID NO: 437132 - DNA, 30 bp, Artificial Sequence
  Synthetic oligonucleotide
aatccaccataggcggatcttgtccggcgt

SEQ ID NO: 437133 - DNA, 30 bp, Artificial Sequence
  Synthetic oligonucleotide
gatgggtgtttcacactcatcgaagggcgt

SEQ ID NO: 437134 - DNA, 30 bp, Artificial Sequence
  Synthetic oligonucleotide
aaaaaagtcacgcgtaattcaaaggggcgt

SEQ ID NO: 437135 - DNA, 30 bp, Artificial Sequence
  Synthetic oligonucleotide
agcaaggcacacagtccccgggcggggcgt

SEQ ID NO: 437136 - DNA, 30 bp, Artificial Sequence
  Synthetic oligonucleotide
agaggaagaaggatgtttgctatggggcgt

SEQ ID NO: 437137 - DNA, 30 bp, Artificial Sequence
  Synthetic oligonucleotide
gaaacccaatgggttttgtatgtggggcgt

SEQ ID NO: 437138 - DNA, 30 bp, Artificial Sequence
  Synthetic oligonucleotide
tgcttccgccatcccaagcgccggtggcgt

SEQ ID NO: 437139 - DNA, 31 bp, Artificial Sequence
  Synthetic oligonucleotide
atctataaggcccacctccgtaatgtggcgt

SEQ ID NO: 437140 - DNA, 30 bp, Artificial Sequence
  Synthetic oligonucleotide
gaaaaaatgtagacacgtgtccattggcgt

SEQ ID NO: 437141 - DNA, 30 bp, Artificial Sequence
  Synthetic oligonucleotide
cgcaacgttgtagcaaaagcgacttggcgt

SEQ ID NO: 437142 - DNA, 30 bp, Artificial Sequence
  Synthetic oligonucleotide
tcaccagacgcagtcgtacgagcttggcgt

SEQ ID NO: 437143 - DNA, 30 bp, Artificial Sequence
  Synthetic oligonucleotide
gcactcgggcgccttatactcgccatgcgt

SEQ ID NO: 437144 - DNA, 30 bp, Artificial Sequence
  Synthetic oligonucleotide
attcttcgaggattacatttagtgatgcgt

SEQ ID NO: 437145 - DNA, 30 bp, Artificial Sequence
  Synthetic oligonucleotide
cgcctacacccagctcatatgggtatgcgt

SEQ ID NO: 437146 - DNA, 30 bp, Artificial Sequence
  Synthetic oligonucleotide
tgtgtatataaaagagagatacaactgcgt

SEQ ID NO: 437147 - DNA, 30 bp, Artificial Sequence
  Synthetic oligonucleotide
acaatgatcggccccccgccgacactgcgt

SEQ ID NO: 437148 - DNA, 30 bp, Artificial Sequence
  Synthetic oligonucleotide
tttggtactctttcgtacccgggcctgcgt

SEQ ID NO: 437149 - DNA, 30 bp, Artificial Sequence
  Synthetic oligonucleotide
aacttaataccgccgctaaggtggctgcgt

SEQ ID NO: 437150 - DNA, 30 bp, Artificial Sequence
  Synthetic oligonucleotide
acaattctaatgggaaccgcagcagtgcgt

SEQ ID NO: 437151 - DNA, 30 bp, Artificial Sequence
  Synthetic oligonucleotide
aattcaagctgtgggtacttagcagtgcgt

SEQ ID NO: 437152 - DNA, 30 bp, Artificial Sequence
  Synthetic oligonucleotide
aatataaaagtgaataggagactagtgcgt

SEQ ID NO: 437153 - DNA, 30 bp, Artificial Sequence
  Synthetic oligonucleotide
catttgttttctgaaatgtatgacgtgcgt

SEQ ID NO: 437154 - DNA, 30 bp, Artificial Sequence
  Synthetic oligonucleotide
ttggactccagatgctaatcgcgggtgcgt

SEQ ID NO: 437155 - DNA, 30 bp, Artificial Sequence
  Synthetic oligonucleotide
ctgttaactgacgggagcacatatgtgcgt

SEQ ID NO: 437156 - DNA, 30 bp, Artificial Sequence
  Synthetic oligonucleotide
gggtcgtaaggcacttgtgtgcctgtgcgt

SEQ ID NO: 437157 - DNA, 30 bp, Artificial Sequence
  Synthetic oligonucleotide
gctgtcgactctgttacgcgccaattgcgt

SEQ ID NO: 437158 - DNA, 30 bp, Artificial Sequence
  Synthetic oligonucleotide
caactcagttacgtctaggaacgattgcgt

SEQ ID NO: 437159 - DNA, 30 bp, Artificial Sequence
  Synthetic oligonucleotide
cggacgagcactctctagatcggattgcgt

SEQ ID NO: 437160 - DNA, 30 bp, Artificial Sequence
  Synthetic oligonucleotide
aatactaagcacgcgtgcctctgattgcgt

SEQ ID NO: 437161 - DNA, 30 bp, Artificial Sequence
  Synthetic oligonucleotide
tacagttagcttgaacagcgattattgcgt

SEQ ID NO: 437162 - DNA, 30 bp, Artificial Sequence
  Synthetic oligonucleotide
tcagcttctatctagtatttaatcttgcgt

SEQ ID NO: 437163 - DNA, 30 bp, Artificial Sequence
  Synthetic oligonucleotide
tgccgcgtcttgacgaagaaagtcttgcgt

SEQ ID NO: 437164 - DNA, 30 bp, Artificial Sequence
  Synthetic oligonucleotide
gcgctggtcttcacaggcaagacgttgcgt

SEQ ID NO: 437165 - DNA, 30 bp, Artificial Sequence
  Synthetic oligonucleotide
ctgggaagatctggggggagtgtgttgcgt

SEQ ID NO: 437166 - DNA, 30 bp, Artificial Sequence
  Synthetic oligonucleotide
gaacgaattaacagcccgaatgaaaatcgt

SEQ ID NO: 437167 - DNA, 30 bp, Artificial Sequence
  Synthetic oligonucleotide
taagacattctaggggattggaacaatcgt

SEQ ID NO: 437168 - DNA, 30 bp, Artificial Sequence
  Synthetic oligonucleotide
aggactcacgctcctgataggtacaatcgt

SEQ ID NO: 437169 - DNA, 30 bp, Artificial Sequence
  Synthetic oligonucleotide
catcatagagttgtatgttcacgcaatcgt

SEQ ID NO: 437170 - DNA, 30 bp, Artificial Sequence
  Synthetic oligonucleotide
gtcggtatatgtactaacgaagtcaatcgt

SEQ ID NO: 437171 - DNA, 30 bp, Artificial Sequence
  Synthetic oligonucleotide
aggaacgcacatcacaagtttaataatcgt

SEQ ID NO: 437172 - DNA, 30 bp, Artificial Sequence
  Synthetic oligonucleotide
agttacaagaccacgtcgcatcataatcgt

SEQ ID NO: 437173 - DNA, 30 bp, Artificial Sequence
  Synthetic oligonucleotide
tggacaaattttgggttgtcggctaatcgt

SEQ ID NO: 437174 - DNA, 30 bp, Artificial Sequence
  Synthetic oligonucleotide
ccgcggccctgttaagaatcttctaatcgt

SEQ ID NO: 437175 - DNA, 30 bp, Artificial Sequence
  Synthetic oligonucleotide
tctgctttttgaacggatctacaacatcgt

SEQ ID NO: 437176 - DNA, 30 bp, Artificial Sequence
  Synthetic oligonucleotide
acctatcaggtcaaattaagaccacatcgt

SEQ ID NO: 437177 - DNA, 30 bp, Artificial Sequence
  Synthetic oligonucleotide
ggaataggacgcatgatgcaagggcatcgt

SEQ ID NO: 437178 - DNA, 30 bp, Artificial Sequence
  Synthetic oligonucleotide
ggttttagatcacgttgatacgaagatcgt

SEQ ID NO: 437179 - DNA, 30 bp, Artificial Sequence
  Synthetic oligonucleotide
catcgtgccaggattgattcggcagatcgt

SEQ ID NO: 437180 - DNA, 30 bp, Artificial Sequence
  Synthetic oligonucleotide
atcgtaggcactatcgggtctgtcgatcgt

SEQ ID NO: 437181 - DNA, 30 bp, Artificial Sequence
  Synthetic oligonucleotide
agtcagcaactgttagaaaccaatgatcgt

SEQ ID NO: 437182 - DNA, 30 bp, Artificial Sequence
  Synthetic oligonucleotide
ggccggccgacaggtgcctaacttgatcgt

SEQ ID NO: 437183 - DNA, 30 bp, Artificial Sequence
  Synthetic oligonucleotide
ctgcagtcgttatacccaatggttgatcgt

SEQ ID NO: 437184 - DNA, 30 bp, Artificial Sequence
  Synthetic oligonucleotide
agataaggctagtctgggttcgcatatcgt

SEQ ID NO: 437185 - DNA, 31 bp, Artificial Sequence
  Synthetic oligonucleotide
cacaggcccggggctttgaacaatatatcgt

SEQ ID NO: 437186 - DNA, 30 bp, Artificial Sequence
  Synthetic oligonucleotide
tattatcgcaattaaacaagagtatatcgt

SEQ ID NO: 437187 - DNA, 30 bp, Artificial Sequence
  Synthetic oligonucleotide
gtgtcaccacctcgtggtataacctatcgt

SEQ ID NO: 437188 - DNA, 30 bp, Artificial Sequence
  Synthetic oligonucleotide
tgagttaggtggggcaatcgaacgtatcgt

SEQ ID NO: 437189 - DNA, 30 bp, Artificial Sequence
  Synthetic oligonucleotide
tacgccatattctttcctggagcgtatcgt

SEQ ID NO: 437190 - DNA, 30 bp, Artificial Sequence
  Synthetic oligonucleotide
gagttcaaggggtggttcgtatattatcgt

SEQ ID NO: 437191 - DNA, 30 bp, Artificial Sequence
  Synthetic oligonucleotide
gtgtattggaagtatacggcatcttatcgt

SEQ ID NO: 437192 - DNA, 30 bp, Artificial Sequence
  Synthetic oligonucleotide
aaggctataagctctcggcgtagaactcgt

SEQ ID NO: 437193 - DNA, 30 bp, Artificial Sequence
  Synthetic oligonucleotide
ggctgaatggagcaccaattggccactcgt

SEQ ID NO: 437194 - DNA, 30 bp, Artificial Sequence
  Synthetic oligonucleotide
atgttgactgctgctaatttggtgactcgt

SEQ ID NO: 437195 - DNA, 30 bp, Artificial Sequence
  Synthetic oligonucleotide
ggaagccagtaattgattagtcgtactcgt

SEQ ID NO: 437196 - DNA, 30 bp, Artificial Sequence
  Synthetic oligonucleotide
tgacctcgctttgcaaaggggtaacctcgt

SEQ ID NO: 437197 - DNA, 30 bp, Artificial Sequence
  Synthetic oligonucleotide
aacatagtagggagcgcagtgagccctcgt

SEQ ID NO: 437198 - DNA, 30 bp, Artificial Sequence
  Synthetic oligonucleotide
aaaaccccgggggattctcgtcgccctcgt

SEQ ID NO: 437199 - DNA, 30 bp, Artificial Sequence
  Synthetic oligonucleotide
gaacaataggagggtaaaaggtgccctcgt

SEQ ID NO: 437200 - DNA, 30 bp, Artificial Sequence
  Synthetic oligonucleotide
gctggaaatcgagggattaaggctcctcgt

SEQ ID NO: 437201 - DNA, 30 bp, Artificial Sequence
  Synthetic oligonucleotide
cttaccaatggagcctttttcggcgctcgt

SEQ ID NO: 437202 - DNA, 30 bp, Artificial Sequence
  Synthetic oligonucleotide
gctattaggcgcagttatgagcatgctcgt

SEQ ID NO: 437203 - DNA, 30 bp, Artificial Sequence
  Synthetic oligonucleotide
ctattctctaggaatccggtagaatctcgt

SEQ ID NO: 437204 - DNA, 30 bp, Artificial Sequence
  Synthetic oligonucleotide
ttaacgtgggtcattctgggggggtctcgt

SEQ ID NO: 437205 - DNA, 30 bp, Artificial Sequence
  Synthetic oligonucleotide
atagattgaaattcgcgcgtgttaagtcgt

SEQ ID NO: 437206 - DNA, 30 bp, Artificial Sequence
  Synthetic oligonucleotide
taaggatagactcctatatcggtccgtcgt

SEQ ID NO: 437207 - DNA, 30 bp, Artificial Sequence
  Synthetic oligonucleotide
gttcggcatatgatgttggatcagcgtcgt

SEQ ID NO: 437208 - DNA, 30 bp, Artificial Sequence
  Synthetic oligonucleotide
gttgttcttatgcccggccatcggcgtcgt

SEQ ID NO: 437209 - DNA, 30 bp, Artificial Sequence
  Synthetic oligonucleotide
actcactgggcgacgtgtgcgtatcgtcgt

SEQ ID NO: 437210 - DNA, 30 bp, Artificial Sequence
  Synthetic oligonucleotide
cactccgtgtggggattattctctcgtcgt

SEQ ID NO: 437211 - DNA, 30 bp, Artificial Sequence
  Synthetic oligonucleotide
cgttcatttgcggggctcatgaaaggtcgt

SEQ ID NO: 437212 - DNA, 30 bp, Artificial Sequence
  Synthetic oligonucleotide
cgcctcgcgaaacgttccagcgaaggtcgt

SEQ ID NO: 437213 - DNA, 30 bp, Artificial Sequence
  Synthetic oligonucleotide
agcccgacccatatttcattaataggtcgt

SEQ ID NO: 437214 - DNA, 30 bp, Artificial Sequence
  Synthetic oligonucleotide
aatacgaaagtttttactttccacggtcgt

SEQ ID NO: 437215 - DNA, 30 bp, Artificial Sequence
  Synthetic oligonucleotide
ggccggaacaccacggactcatagggtcgt

SEQ ID NO: 437216 - DNA, 30 bp, Artificial Sequence
  Synthetic oligonucleotide
aagcctcagcttttccgttaagtgggtcgt

SEQ ID NO: 437217 - DNA, 30 bp, Artificial Sequence
  Synthetic oligonucleotide
aattatagcgctggtggcctattgggtcgt

SEQ ID NO: 437218 - DNA, 30 bp, Artificial Sequence
  Synthetic oligonucleotide
cggtgatcgctacgcgttcatcatggtcgt

SEQ ID NO: 437219 - DNA, 30 bp, Artificial Sequence
  Synthetic oligonucleotide
gattcgtctcaaaattgtccctactgtcgt

SEQ ID NO: 437220 - DNA, 30 bp, Artificial Sequence
  Synthetic oligonucleotide
agaggcgtagtttgcagttctggctgtcgt

SEQ ID NO: 437221 - DNA, 30 bp, Artificial Sequence
  Synthetic oligonucleotide
atgaatcgctgcataccgtggctctgtcgt

SEQ ID NO: 437222 - DNA, 30 bp, Artificial Sequence
  Synthetic oligonucleotide
tgattaaagcgccgtactgtgccaattcgt

SEQ ID NO: 437223 - DNA, 30 bp, Artificial Sequence
  Synthetic oligonucleotide
taacgggttaactttcgataaagaattcgt

SEQ ID NO: 437224 - DNA, 30 bp, Artificial Sequence
  Synthetic oligonucleotide
tactagaactagccctaaaatggaattcgt

SEQ ID NO: 437225 - DNA, 30 bp, Artificial Sequence
  Synthetic oligonucleotide
ggctgcggttggtcagggcgatacattcgt

SEQ ID NO: 437226 - DNA, 30 bp, Artificial Sequence
  Synthetic oligonucleotide
atatgtcattggggctaaatttacattcgt

SEQ ID NO: 437227 - DNA, 30 bp, Artificial Sequence
  Synthetic oligonucleotide
tgccgtatagcgttgcacttgttcattcgt

SEQ ID NO: 437228 - DNA, 30 bp, Artificial Sequence
  Synthetic oligonucleotide
ggtccagtgctgataattcttttcattcgt

SEQ ID NO: 437229 - DNA, 30 bp, Artificial Sequence
  Synthetic oligonucleotide
tgggcgcgtcttaattgttaaaagattcgt

SEQ ID NO: 437230 - DNA, 30 bp, Artificial Sequence
  Synthetic oligonucleotide
ttcaaccaatcggacgtatacgttattcgt

SEQ ID NO: 437231 - DNA, 30 bp, Artificial Sequence
  Synthetic oligonucleotide
ggcacgttaagatgatatccttaacttcgt

SEQ ID NO: 437232 - DNA, 30 bp, Artificial Sequence
  Synthetic oligonucleotide
tcaattactaggtcacttcaatggcttcgt

SEQ ID NO: 437233 - DNA, 30 bp, Artificial Sequence
  Synthetic oligonucleotide
ctcccaaccctaaagtagttttatcttcgt

SEQ ID NO: 437234 - DNA, 30 bp, Artificial Sequence
  Synthetic oligonucleotide
aatgacaatgcgactcacacgtgtcttcgt

SEQ ID NO: 437235 - DNA, 30 bp, Artificial Sequence
  Synthetic oligonucleotide
tctgcaggttattgtatacagctagttcgt

SEQ ID NO: 437236 - DNA, 30 bp, Artificial Sequence
  Synthetic oligonucleotide
gagagatacaagacacctcatctagttcgt

SEQ ID NO: 437237 - DNA, 30 bp, Artificial Sequence
  Synthetic oligonucleotide
tgagctgcgtaaggaccggtcttcgttcgt

SEQ ID NO: 437238 - DNA, 30 bp, Artificial Sequence
  Synthetic oligonucleotide
gtaattacaatctcccgggaataggttcgt

SEQ ID NO: 437239 - DNA, 30 bp, Artificial Sequence
  Synthetic oligonucleotide
ggcacagtcggccaccctcggggggttcgt

SEQ ID NO: 437240 - DNA, 30 bp, Artificial Sequence
  Synthetic oligonucleotide
ttgcttaaacgtttccacgacttggttcgt

SEQ ID NO: 437241 - DNA, 30 bp, Artificial Sequence
  Synthetic oligonucleotide
aagaaccggaccgtattagtcgatgttcgt

SEQ ID NO: 437242 - DNA, 30 bp, Artificial Sequence
  Synthetic oligonucleotide
atcctctcgactttacacgatattgttcgt

SEQ ID NO: 437243 - DNA, 30 bp, Artificial Sequence
  Synthetic oligonucleotide
cggcaaccacgataagcacgtgaatttcgt

SEQ ID NO: 437244 - DNA, 30 bp, Artificial Sequence
  Synthetic oligonucleotide
cttaggtaatcgatcttgacgtcatttcgt

SEQ ID NO: 437245 - DNA, 30 bp, Artificial Sequence
  Synthetic oligonucleotide
tgggtccacgtcgttagtgtaagatttcgt

SEQ ID NO: 437246 - DNA, 30 bp, Artificial Sequence
  Synthetic oligonucleotide
attgatctggagcttacgtaaacgtttcgt

SEQ ID NO: 437247 - DNA, 30 bp, Artificial Sequence
  Synthetic oligonucleotide
tcatcaagtcgcatgtggcggtggtttcgt

SEQ ID NO: 437248 - DNA, 30 bp, Artificial Sequence
  Synthetic oligonucleotide
ataattacgacataattataagcttttcgt

SEQ ID NO: 437249 - DNA, 30 bp, Artificial Sequence
  Synthetic oligonucleotide
accataggcaacgtatatggggcttttcgt

SEQ ID NO: 437250 - DNA, 30 bp, Artificial Sequence
  Synthetic oligonucleotide
tccctcattggttcgtccggcggaaaaggt

SEQ ID NO: 437251 - DNA, 30 bp, Artificial Sequence
  Synthetic oligonucleotide
gtgccctccgctgctggtatgtgaaaaggt

SEQ ID NO: 437252 - DNA, 30 bp, Artificial Sequence
  Synthetic oligonucleotide
tactattatcttaatccctgactcaaaggt

SEQ ID NO: 437253 - DNA, 30 bp, Artificial Sequence
  Synthetic oligonucleotide
acaccttatttactagtttataagaaaggt

SEQ ID NO: 437254 - DNA, 31 bp, Artificial Sequence
  Synthetic oligonucleotide
gaaagaattgtatccttcaccgaggaaaggt

SEQ ID NO: 437255 - DNA, 30 bp, Artificial Sequence
  Synthetic oligonucleotide
taactgtgtataatgggttcaactaaaggt

SEQ ID NO: 437256 - DNA, 30 bp, Artificial Sequence
  Synthetic oligonucleotide
tgttcgcgatggttggtttttgtacaaggt

SEQ ID NO: 437257 - DNA, 30 bp, Artificial Sequence
  Synthetic oligonucleotide
gatcattgaccgtcggtcatgtcgcaaggt

SEQ ID NO: 437258 - DNA, 30 bp, Artificial Sequence
  Synthetic oligonucleotide
aattggctacaccactcatgtatgcaaggt

SEQ ID NO: 437259 - DNA, 30 bp, Artificial Sequence
  Synthetic oligonucleotide
ccacactttttctgggtacatctgcaaggt

SEQ ID NO: 437260 - DNA, 30 bp, Artificial Sequence
  Synthetic oligonucleotide
cccatcagggtacgtatatacggtcaaggt

SEQ ID NO: 437261 - DNA, 30 bp, Artificial Sequence
  Synthetic oligonucleotide
tccctacgtgaacagctgttatgcgaaggt

SEQ ID NO: 437262 - DNA, 30 bp, Artificial Sequence
  Synthetic oligonucleotide
gaaagccgtactcctaaatttttcgaaggt

SEQ ID NO: 437263 - DNA, 30 bp, Artificial Sequence
  Synthetic oligonucleotide
tgggtgtgggtttaaccatgtcaggaaggt

SEQ ID NO: 437264 - DNA, 30 bp, Artificial Sequence
  Synthetic oligonucleotide
aaggctccatgctgaattcaccgggaaggt

SEQ ID NO: 437265 - DNA, 30 bp, Artificial Sequence
  Synthetic oligonucleotide
ttttaatgaagacgacggtatcatgaaggt

SEQ ID NO: 437266 - DNA, 30 bp, Artificial Sequence
  Synthetic oligonucleotide
gaggtctctccgtatgatcgaggtgaaggt

SEQ ID NO: 437267 - DNA, 30 bp, Artificial Sequence
  Synthetic oligonucleotide
gaggtctagcgataaacgccggttgaaggt

SEQ ID NO: 437268 - DNA, 30 bp, Artificial Sequence
  Synthetic oligonucleotide
gtcaggctccagtgtagcatctaataaggt

SEQ ID NO: 437269 - DNA, 30 bp, Artificial Sequence
  Synthetic oligonucleotide
gtgcttccgcgggcgcgtgaaaactaaggt

SEQ ID NO: 437270 - DNA, 30 bp, Artificial Sequence
  Synthetic oligonucleotide
tggcgatatattaaacttttgtactaaggt

SEQ ID NO: 437271 - DNA, 30 bp, Artificial Sequence
  Synthetic oligonucleotide
ccttggatggtttatgagttcgtctaaggt

SEQ ID NO: 437272 - DNA, 30 bp, Artificial Sequence
  Synthetic oligonucleotide
ggtggtgttcgggctctctagtagtaaggt

SEQ ID NO: 437273 - DNA, 30 bp, Artificial Sequence
  Synthetic oligonucleotide
gctagcatccactcttcaatggcttaaggt

SEQ ID NO: 437274 - DNA, 30 bp, Artificial Sequence
  Synthetic oligonucleotide
tttggcagtacgttacagctttgttaaggt

SEQ ID NO: 437275 - DNA, 30 bp, Artificial Sequence
  Synthetic oligonucleotide
gcgggtaaggacattcccggactttaaggt

SEQ ID NO: 437276 - DNA, 30 bp, Artificial Sequence
  Synthetic oligonucleotide
ttaaggaccaggggccgagggcaaacaggt

SEQ ID NO: 437277 - DNA, 30 bp, Artificial Sequence
  Synthetic oligonucleotide
tccgtcattcttaagcgtggacgaacaggt

SEQ ID NO: 437278 - DNA, 30 bp, Artificial Sequence
  Synthetic oligonucleotide
gaggtttccttactaccaccgtgaacaggt

SEQ ID NO: 437279 - DNA, 30 bp, Artificial Sequence
  Synthetic oligonucleotide
tagtcagatgttgaacagtgtttaacaggt

SEQ ID NO: 437280 - DNA, 30 bp, Artificial Sequence
  Synthetic oligonucleotide
attgcgtaatcggctcagcttaccacaggt

SEQ ID NO: 437281 - DNA, 30 bp, Artificial Sequence
  Synthetic oligonucleotide
catctagtggtttaaatcatccccacaggt

SEQ ID NO: 437282 - DNA, 30 bp, Artificial Sequence
  Synthetic oligonucleotide
tcaggaggtttaattgaaacgtccacaggt

SEQ ID NO: 437283 - DNA, 30 bp, Artificial Sequence
  Synthetic oligonucleotide
acccgcttctaacctgttagccatacaggt

SEQ ID NO: 437284 - DNA, 30 bp, Artificial Sequence
  Synthetic oligonucleotide
aacatccatatagaggcgtttggtacaggt

SEQ ID NO: 437285 - DNA, 31 bp, Artificial Sequence
  Synthetic oligonucleotide
ggacttaccgtcagatcaatactttacaggt

SEQ ID NO: 437286 - DNA, 30 bp, Artificial Sequence
  Synthetic oligonucleotide
ctattccacacggtgttagaggacccaggt

SEQ ID NO: 437287 - DNA, 30 bp, Artificial Sequence
  Synthetic oligonucleotide
ccgtcgaaagctacaggtgttgacccaggt

SEQ ID NO: 437288 - DNA, 30 bp, Artificial Sequence
  Synthetic oligonucleotide
ttcttcattcccagtcagatttggccaggt

SEQ ID NO: 437289 - DNA, 30 bp, Artificial Sequence
  Synthetic oligonucleotide
aattctgtagatggcaatacaaatccaggt

SEQ ID NO: 437290 - DNA, 30 bp, Artificial Sequence
  Synthetic oligonucleotide
gaataagtagttgtgcaatcacatccaggt

SEQ ID NO: 437291 - DNA, 30 bp, Artificial Sequence
  Synthetic oligonucleotide
ctcacgaccttggtatttatccctccaggt

SEQ ID NO: 437292 - DNA, 30 bp, Artificial Sequence
  Synthetic oligonucleotide
ttgattaacacgcctaaaacgtgcgcaggt

SEQ ID NO: 437293 - DNA, 30 bp, Artificial Sequence
  Synthetic oligonucleotide
aagctgatcccgttctggctctaggcaggt

SEQ ID NO: 437294 - DNA, 30 bp, Artificial Sequence
  Synthetic oligonucleotide
taaatcccgtttcttgaaatagcggcaggt

SEQ ID NO: 437295 - DNA, 30 bp, Artificial Sequence
  Synthetic oligonucleotide
cgtcttacggcacccggttatggggcaggt

SEQ ID NO: 437296 - DNA, 30 bp, Artificial Sequence
  Synthetic oligonucleotide
tgccccgaagggccttcttgaaatgcaggt

SEQ ID NO: 437297 - DNA, 30 bp, Artificial Sequence
  Synthetic oligonucleotide
cacggggttcgaacggtaatatatgcaggt

SEQ ID NO: 437298 - DNA, 30 bp, Artificial Sequence
  Synthetic oligonucleotide
tgcttaggatccaggcggtctcaatcaggt

SEQ ID NO: 437299 - DNA, 30 bp, Artificial Sequence
  Synthetic oligonucleotide
ggtcttaattagaccttttgccgatcaggt

SEQ ID NO: 437300 - DNA, 30 bp, Artificial Sequence
  Synthetic oligonucleotide
agcatgcattgacaaaggatgcagtcaggt

SEQ ID NO: 437301 - DNA, 30 bp, Artificial Sequence
  Synthetic oligonucleotide
gttctatttctacgctcggtttggtcaggt

SEQ ID NO: 437302 - DNA, 31 bp, Artificial Sequence
  Synthetic oligonucleotide
gtttccaatgttatgtatcgtattgtcaggt

SEQ ID NO: 437303 - DNA, 30 bp, Artificial Sequence
  Synthetic oligonucleotide
ctagtgcatggcctgtagcacttgtcaggt

SEQ ID NO: 437304 - DNA, 30 bp, Artificial Sequence
  Synthetic oligonucleotide
tttcaaaggagaagatcttattgttcaggt

SEQ ID NO: 437305 - DNA, 30 bp, Artificial Sequence
  Synthetic oligonucleotide
taaagatgagatagcaggatctcaagaggt

SEQ ID NO: 437306 - DNA, 30 bp, Artificial Sequence
  Synthetic oligonucleotide
attatacttttccaacaatatcgaagaggt

SEQ ID NO: 437307 - DNA, 30 bp, Artificial Sequence
  Synthetic oligonucleotide
taacactgaccctcttcgttgggaagaggt

SEQ ID NO: 437308 - DNA, 30 bp, Artificial Sequence
  Synthetic oligonucleotide
tgttgaggtccggacagcacagtcagaggt

SEQ ID NO: 437309 - DNA, 30 bp, Artificial Sequence
  Synthetic oligonucleotide
cctcgtaatcctgactgtttgttgagaggt

SEQ ID NO: 437310 - DNA, 30 bp, Artificial Sequence
  Synthetic oligonucleotide
tgatatctggcatgcttttttgaacgaggt

SEQ ID NO: 437311 - DNA, 30 bp, Artificial Sequence
  Synthetic oligonucleotide
acaggctaaggtgtacgtagcttacgaggt

SEQ ID NO: 437312 - DNA, 30 bp, Artificial Sequence
  Synthetic oligonucleotide
ttgaaacggcggccacatttcttacgaggt

SEQ ID NO: 437313 - DNA, 30 bp, Artificial Sequence
  Synthetic oligonucleotide
cataaaaaaagtactgccccgtctcgaggt

SEQ ID NO: 437314 - DNA, 30 bp, Artificial Sequence
  Synthetic oligonucleotide
actaactgactggataacttgcgtcgaggt

SEQ ID NO: 437315 - DNA, 30 bp, Artificial Sequence
  Synthetic oligonucleotide
aaaagtttgttaaacgaatagccaggaggt

SEQ ID NO: 437316 - DNA, 30 bp, Artificial Sequence
  Synthetic oligonucleotide
cgacccgtggcctacgtagtaggaggaggt

SEQ ID NO: 437317 - DNA, 30 bp, Artificial Sequence
  Synthetic oligonucleotide
tacaagggttattcgtttcggataggaggt

SEQ ID NO: 437318 - DNA, 30 bp, Artificial Sequence
  Synthetic oligonucleotide
ccgggttaatcttctggcttatccggaggt

SEQ ID NO: 437319 - DNA, 30 bp, Artificial Sequence
  Synthetic oligonucleotide
ctcgcggcacagcgaggtgaactcggaggt

SEQ ID NO: 437320 - DNA, 30 bp, Artificial Sequence
  Synthetic oligonucleotide
gtctgtgcgtccgcgatacttctgggaggt

SEQ ID NO: 437321 - DNA, 30 bp, Artificial Sequence
  Synthetic oligonucleotide
atgcttaggtaacgtgagcaccgtggaggt

SEQ ID NO: 437322 - DNA, 30 bp, Artificial Sequence
  Synthetic oligonucleotide
tgtcgtgataacgcctgtacacttggaggt

SEQ ID NO: 437323 - DNA, 30 bp, Artificial Sequence
  Synthetic oligonucleotide
aggattaaaggcggttgtttcgcatgaggt

SEQ ID NO: 437324 - DNA, 30 bp, Artificial Sequence
  Synthetic oligonucleotide
acatttttttaccttttggctgactgaggt

SEQ ID NO: 437325 - DNA, 30 bp, Artificial Sequence
  Synthetic oligonucleotide
ggggaagacaataaagtattatgctgaggt

SEQ ID NO: 437326 - DNA, 30 bp, Artificial Sequence
  Synthetic oligonucleotide
aatcacaaactgttttgaatgacgtgaggt

SEQ ID NO: 437327 - DNA, 30 bp, Artificial Sequence
  Synthetic oligonucleotide
tgggtgggttacagccatactaggtgaggt

SEQ ID NO: 437328 - DNA, 30 bp, Artificial Sequence
  Synthetic oligonucleotide
cccccttgaaccaaatttcgagtgtgaggt

SEQ ID NO: 437329 - DNA, 30 bp, Artificial Sequence
  Synthetic oligonucleotide
cattcccgggccttattcttgcattgaggt

SEQ ID NO: 437330 - DNA, 30 bp, Artificial Sequence
  Synthetic oligonucleotide
tgtaccgcctctgagactcagacttgaggt

SEQ ID NO: 437331 - DNA, 30 bp, Artificial Sequence
  Synthetic oligonucleotide
ccattccgttactattttcgtgtaataggt

SEQ ID NO: 437332 - DNA, 30 bp, Artificial Sequence
  Synthetic oligonucleotide
aattaggtggtagtacttccgtccataggt

SEQ ID NO: 437333 - DNA, 30 bp, Artificial Sequence
  Synthetic oligonucleotide
acaatctggcagcggtgcgccatgataggt

SEQ ID NO: 437334 - DNA, 30 bp, Artificial Sequence
  Synthetic oligonucleotide
gtattggagaagcgattccgcatgataggt

SEQ ID NO: 437335 - DNA, 30 bp, Artificial Sequence
  Synthetic oligonucleotide
gctgttggtgcgacgcgacgcgatataggt

SEQ ID NO: 437336 - DNA, 30 bp, Artificial Sequence
  Synthetic oligonucleotide
tattctttctagtgtatcctgcaactaggt

SEQ ID NO: 437337 - DNA, 30 bp, Artificial Sequence
  Synthetic oligonucleotide
atacctccgacagggacacgtgtactaggt

SEQ ID NO: 437338 - DNA, 30 bp, Artificial Sequence
  Synthetic oligonucleotide
ttccgactaacgtcgagcatattcctaggt

SEQ ID NO: 437339 - DNA, 30 bp, Artificial Sequence
  Synthetic oligonucleotide
caggcgatatttggcctggggcatctaggt

SEQ ID NO: 437340 - DNA, 30 bp, Artificial Sequence
  Synthetic oligonucleotide
ttaggggtttgggacagtccctctctaggt

SEQ ID NO: 437341 - DNA, 30 bp, Artificial Sequence
  Synthetic oligonucleotide
ggtcgcataattaacacttgttctctaggt

SEQ ID NO: 437342 - DNA, 31 bp, Artificial Sequence
  Synthetic oligonucleotide
ctcgggtatccgacgtgggcgcgaagtaggt

SEQ ID NO: 437343 - DNA, 30 bp, Artificial Sequence
  Synthetic oligonucleotide
ctgcatgtgcattcagtatgcccagtaggt

SEQ ID NO: 437344 - DNA, 30 bp, Artificial Sequence
  Synthetic oligonucleotide
gaccagggtcaaactcacaagtacgtaggt

SEQ ID NO: 437345 - DNA, 30 bp, Artificial Sequence
  Synthetic oligonucleotide
acttaagttggtgtaacgggcagcgtaggt

SEQ ID NO: 437346 - DNA, 30 bp, Artificial Sequence
  Synthetic oligonucleotide
aacgggggaacgcgcaaatggagcgtaggt

SEQ ID NO: 437347 - DNA, 30 bp, Artificial Sequence
  Synthetic oligonucleotide
caaaatccgccgcggtcataaatcgtaggt

SEQ ID NO: 437348 - DNA, 30 bp, Artificial Sequence
  Synthetic oligonucleotide
cctgatcccgctctggtctggcaggtaggt

SEQ ID NO: 437349 - DNA, 30 bp, Artificial Sequence
  Synthetic oligonucleotide
aaagttcgtcattaagagaagcgggtaggt

SEQ ID NO: 437350 - DNA, 30 bp, Artificial Sequence
  Synthetic oligonucleotide
aacctcccgatggctgacaagactgtaggt

SEQ ID NO: 437351 - DNA, 30 bp, Artificial Sequence
  Synthetic oligonucleotide
gattagagcagtttgtgtatccttgtaggt

SEQ ID NO: 437352 - DNA, 30 bp, Artificial Sequence
  Synthetic oligonucleotide
tagcacattctgtcttaacttcaattaggt

SEQ ID NO: 437353 - DNA, 30 bp, Artificial Sequence
  Synthetic oligonucleotide
atagatattacgcctgtaagtgaattaggt

SEQ ID NO: 437354 - DNA, 30 bp, Artificial Sequence
  Synthetic oligonucleotide
ggggttaagtgagaagtcctttacttaggt

SEQ ID NO: 437355 - DNA, 30 bp, Artificial Sequence
  Synthetic oligonucleotide
atcatgtgaggttgttgtaaaagcttaggt

SEQ ID NO: 437356 - DNA, 30 bp, Artificial Sequence
  Synthetic oligonucleotide
ggtgcttcttcaaacgcggccctcttaggt

SEQ ID NO: 437357 - DNA, 30 bp, Artificial Sequence
  Synthetic oligonucleotide
tgaaaaccaacgtcgctcccggtcttaggt

SEQ ID NO: 437358 - DNA, 30 bp, Artificial Sequence
  Synthetic oligonucleotide
agcgggagcattagaagcacctatttaggt

SEQ ID NO: 437359 - DNA, 30 bp, Artificial Sequence
  Synthetic oligonucleotide
agtcacctcacacacgcgcaggctttaggt

SEQ ID NO: 437360 - DNA, 30 bp, Artificial Sequence
  Synthetic oligonucleotide
gacctgacgaatagaaccgagagtttaggt

SEQ ID NO: 437361 - DNA, 30 bp, Artificial Sequence
  Synthetic oligonucleotide
aatatcactgtcgttacaggttttttaggt

SEQ ID NO: 437362 - DNA, 30 bp, Artificial Sequence
  Synthetic oligonucleotide
cccggaatctcggttaagttcacaaacggt

SEQ ID NO: 437363 - DNA, 30 bp, Artificial Sequence
  Synthetic oligonucleotide
gttaacagcgctagaaaacggaccaacggt

SEQ ID NO: 437364 - DNA, 30 bp, Artificial Sequence
  Synthetic oligonucleotide
ggtgctatggcacgcttgttcttcaacggt

SEQ ID NO: 437365 - DNA, 30 bp, Artificial Sequence
  Synthetic oligonucleotide
atgccttacaatgtgggttcgtagaacggt

SEQ ID NO: 437366 - DNA, 30 bp, Artificial Sequence
  Synthetic oligonucleotide
tccttaagtggatatacttctcggaacggt

SEQ ID NO: 437367 - DNA, 30 bp, Artificial Sequence
  Synthetic oligonucleotide
ccagctaaacacggcacgaatttacacggt

SEQ ID NO: 437368 - DNA, 30 bp, Artificial Sequence
  Synthetic oligonucleotide
aagcgtgttttcaacgacacccagcacggt

SEQ ID NO: 437369 - DNA, 30 bp, Artificial Sequence
  Synthetic oligonucleotide
cactgggtacgtccagatcctgagcacggt

SEQ ID NO: 437370 - DNA, 30 bp, Artificial Sequence
  Synthetic oligonucleotide
accgctgcatatgcgtgactaccgcacggt

SEQ ID NO: 437371 - DNA, 30 bp, Artificial Sequence
  Synthetic oligonucleotide
cctcagagtaattaggagtataggcacggt

SEQ ID NO: 437372 - DNA, 30 bp, Artificial Sequence
  Synthetic oligonucleotide
atggtcattgtatacctaaaatatcacggt

SEQ ID NO: 437373 - DNA, 30 bp, Artificial Sequence
  Synthetic oligonucleotide
tgcttctgggatggccactcatatcacggt

SEQ ID NO: 437374 - DNA, 30 bp, Artificial Sequence
  Synthetic oligonucleotide
cgcacaccggtagtcattctggtagacggt

SEQ ID NO: 437375 - DNA, 30 bp, Artificial Sequence
  Synthetic oligonucleotide
gtgcaccgatgtttaggggtattagacggt

SEQ ID NO: 437376 - DNA, 30 bp, Artificial Sequence
  Synthetic oligonucleotide
ccctttgctgtaaaagtaaaatacgacggt

SEQ ID NO: 437377 - DNA, 30 bp, Artificial Sequence
  Synthetic oligonucleotide
actatatacatccggcttaagagggacggt

SEQ ID NO: 437378 - DNA, 30 bp, Artificial Sequence
  Synthetic oligonucleotide
gaccgtgaatagggctttgtccgggacggt

SEQ ID NO: 437379 - DNA, 30 bp, Artificial Sequence
  Synthetic oligonucleotide
gaccagattaggtcaggtttattggacggt

SEQ ID NO: 437380 - DNA, 30 bp, Artificial Sequence
  Synthetic oligonucleotide
accatggcaagtgggatggaggctgacggt

SEQ ID NO: 437381 - DNA, 30 bp, Artificial Sequence
  Synthetic oligonucleotide
ctgttactaagggcaggcggccgtgacggt

SEQ ID NO: 437382 - DNA, 30 bp, Artificial Sequence
  Synthetic oligonucleotide
acgtatagggtacattctacgaaatacggt

SEQ ID NO: 437383 - DNA, 30 bp, Artificial Sequence
  Synthetic oligonucleotide
gaacatcttccagggaatttgctctacggt

SEQ ID NO: 437384 - DNA, 30 bp, Artificial Sequence
  Synthetic oligonucleotide
gggcggcacgtcctgtgataacagtacggt

SEQ ID NO: 437385 - DNA, 30 bp, Artificial Sequence
  Synthetic oligonucleotide
agttaaataaagaactttgtaatgtacggt

SEQ ID NO: 437386 - DNA, 30 bp, Artificial Sequence
  Synthetic oligonucleotide
acccctatccatgaaagtgcggattacggt

SEQ ID NO: 437387 - DNA, 30 bp, Artificial Sequence
  Synthetic oligonucleotide
gggcaggatcgccttccaatttattacggt

SEQ ID NO: 437388 - DNA, 30 bp, Artificial Sequence
  Synthetic oligonucleotide
tccgcatggtggtgggagaccgcttacggt

SEQ ID NO: 437389 - DNA, 30 bp, Artificial Sequence
  Synthetic oligonucleotide
tttaggctcaatctgccgaggtcttacggt

SEQ ID NO: 437390 - DNA, 30 bp, Artificial Sequence
  Synthetic oligonucleotide
tgactatgtcgatgattctaccgaaccggt

SEQ ID NO: 437391 - DNA, 30 bp, Artificial Sequence
  Synthetic oligonucleotide
tgtaccggtaacccgagttaatccaccggt

SEQ ID NO: 437392 - DNA, 30 bp, Artificial Sequence
  Synthetic oligonucleotide
acaattggcggctatcaagttacgaccggt

SEQ ID NO: 437393 - DNA, 30 bp, Artificial Sequence
  Synthetic oligonucleotide
taggccgcgtaacttcatcccactaccggt

SEQ ID NO: 437394 - DNA, 30 bp, Artificial Sequence
  Synthetic oligonucleotide
tagaggcttgcggctaaagcagctaccggt

SEQ ID NO: 437395 - DNA, 31 bp, Artificial Sequence
  Synthetic oligonucleotide
tagccacctgtggctgagaaccgctaccggt

SEQ ID NO: 437396 - DNA, 30 bp, Artificial Sequence
  Synthetic oligonucleotide
ccgcggcatagataatcacattaacccggt

SEQ ID NO: 437397 - DNA, 30 bp, Artificial Sequence
  Synthetic oligonucleotide
agtgttacatatgcgggaccagtacccggt

SEQ ID NO: 437398 - DNA, 30 bp, Artificial Sequence
  Synthetic oligonucleotide
tattgaatgataacgcacttcaaccccggt

SEQ ID NO: 437399 - DNA, 30 bp, Artificial Sequence
  Synthetic oligonucleotide
agcggccgttcccatgggtaaagccccggt

SEQ ID NO: 437400 - DNA, 30 bp, Artificial Sequence
  Synthetic oligonucleotide
ggcgtagatgaaccaaccgatttccccggt

SEQ ID NO: 437401 - DNA, 30 bp, Artificial Sequence
  Synthetic oligonucleotide
tcgtcaacctaatcgtttccgtggcccggt

SEQ ID NO: 437402 - DNA, 30 bp, Artificial Sequence
  Synthetic oligonucleotide
tccgggtatggacgcgcacatcttcccggt

SEQ ID NO: 437403 - DNA, 30 bp, Artificial Sequence
  Synthetic oligonucleotide
catcgaggtactcttttaaagagcgccggt

SEQ ID NO: 437404 - DNA, 30 bp, Artificial Sequence
  Synthetic oligonucleotide
tatatggtcacaggcgaccctaaggccggt

SEQ ID NO: 437405 - DNA, 30 bp, Artificial Sequence
  Synthetic oligonucleotide
gctgtagcttaagtgagtttcgtggccggt

SEQ ID NO: 437406 - DNA, 30 bp, Artificial Sequence
  Synthetic oligonucleotide
cactctaaggttatgtacccggaatccggt

SEQ ID NO: 437407 - DNA, 30 bp, Artificial Sequence
  Synthetic oligonucleotide
aagaacctgcgaacctcgctgatgtccggt

SEQ ID NO: 437408 - DNA, 30 bp, Artificial Sequence
  Synthetic oligonucleotide
tgggtgccacaacgtcccgtactgtccggt

SEQ ID NO: 437409 - DNA, 30 bp, Artificial Sequence
  Synthetic oligonucleotide
agggttcgtataaaccacggggtgtccggt

SEQ ID NO: 437410 - DNA, 30 bp, Artificial Sequence
  Synthetic oligonucleotide
gatccggatactagaggagatggttccggt

SEQ ID NO: 437411 - DNA, 30 bp, Artificial Sequence
  Synthetic oligonucleotide
gcctccatctgcaggtcaagtgtttccggt

SEQ ID NO: 437412 - DNA, 30 bp, Artificial Sequence
  Synthetic oligonucleotide
tatgacgtcaattatcacatggcaagcggt

SEQ ID NO: 437413 - DNA, 30 bp, Artificial Sequence
  Synthetic oligonucleotide
ccagagccactgggattgatctacagcggt

SEQ ID NO: 437414 - DNA, 30 bp, Artificial Sequence
  Synthetic oligonucleotide
taaggcttgaacgcgcgggcgcagagcggt

SEQ ID NO: 437415 - DNA, 30 bp, Artificial Sequence
  Synthetic oligonucleotide
gtcggacccgactttcaggataggagcggt

SEQ ID NO: 437416 - DNA, 30 bp, Artificial Sequence
  Synthetic oligonucleotide
aaatcgccacgacaaccgtaaaatagcggt

SEQ ID NO: 437417 - DNA, 30 bp, Artificial Sequence
  Synthetic oligonucleotide
attggtaatgtcactctcttatgtagcggt

SEQ ID NO: 437418 - DNA, 30 bp, Artificial Sequence
  Synthetic oligonucleotide
acactaagcgctcatggcttctaacgcggt

SEQ ID NO: 437419 - DNA, 30 bp, Artificial Sequence
  Synthetic oligonucleotide
gaaccctttcgccatgcatgcctacgcggt

SEQ ID NO: 437420 - DNA, 30 bp, Artificial Sequence
  Synthetic oligonucleotide
gcagtccagttaatcggctggtagcgcggt

SEQ ID NO: 437421 - DNA, 30 bp, Artificial Sequence
  Synthetic oligonucleotide
cacggaatggaaggtatacagaggcgcggt

SEQ ID NO: 437422 - DNA, 30 bp, Artificial Sequence
  Synthetic oligonucleotide
caccctatcggtgtgcaatgggatcgcggt

SEQ ID NO: 437423 - DNA, 30 bp, Artificial Sequence
  Synthetic oligonucleotide
accgcttacatgagtgaatgctctcgcggt

SEQ ID NO: 437424 - DNA, 30 bp, Artificial Sequence
  Synthetic oligonucleotide
gttaagtgatggatactttgtagaggcggt

SEQ ID NO: 437425 - DNA, 30 bp, Artificial Sequence
  Synthetic oligonucleotide
cttataacgctggtgtatgttataggcggt

SEQ ID NO: 437426 - DNA, 30 bp, Artificial Sequence
  Synthetic oligonucleotide
cgcggtcggtgggcgaagagatcgggcggt

SEQ ID NO: 437427 - DNA, 30 bp, Artificial Sequence
  Synthetic oligonucleotide
atgagttttgccaatcaatacgtgggcggt

SEQ ID NO: 437428 - DNA, 30 bp, Artificial Sequence
  Synthetic oligonucleotide
aattaacttgacctcgcaatgagatgcggt

SEQ ID NO: 437429 - DNA, 30 bp, Artificial Sequence
  Synthetic oligonucleotide
aagccattaattagagactgactatgcggt

SEQ ID NO: 437430 - DNA, 30 bp, Artificial Sequence
  Synthetic oligonucleotide
aatgtactccggagtggcaaggtatgcggt

SEQ ID NO: 437431 - DNA, 30 bp, Artificial Sequence
  Synthetic oligonucleotide
cacctgtaagtgtcgcggttaaggtgcggt

SEQ ID NO: 437432 - DNA, 30 bp, Artificial Sequence
  Synthetic oligonucleotide
ttgacattcgtgaaaccccgctggtgcggt

SEQ ID NO: 437433 - DNA, 30 bp, Artificial Sequence
  Synthetic oligonucleotide
taagaagctggatcatattagttgtgcggt

SEQ ID NO: 437434 - DNA, 30 bp, Artificial Sequence
  Synthetic oligonucleotide
ttaaatggggacaggacataccacatcggt

SEQ ID NO: 437435 - DNA, 30 bp, Artificial Sequence
  Synthetic oligonucleotide
ctttattggacaccataatgttccatcggt

SEQ ID NO: 437436 - DNA, 30 bp, Artificial Sequence
  Synthetic oligonucleotide
gtgccgtaaaaaattcttatttcgatcggt

SEQ ID NO: 437437 - DNA, 30 bp, Artificial Sequence
  Synthetic oligonucleotide
catgagcgctttgactaaatgtggatcggt

SEQ ID NO: 437438 - DNA, 30 bp, Artificial Sequence
  Synthetic oligonucleotide
actgattggggttagggcatttatatcggt

SEQ ID NO: 437439 - DNA, 30 bp, Artificial Sequence
  Synthetic oligonucleotide
cctatagttatcagaaggtagcctatcggt

SEQ ID NO: 437440 - DNA, 30 bp, Artificial Sequence
  Synthetic oligonucleotide
actatcgtcgagttgccgccaattatcggt

SEQ ID NO: 437441 - DNA, 30 bp, Artificial Sequence
  Synthetic oligonucleotide
ggatatttatgcgggaacgtctacctcggt

SEQ ID NO: 437442 - DNA, 30 bp, Artificial Sequence
  Synthetic oligonucleotide
aaaagtgagcaccttttttcgtggctcggt

SEQ ID NO: 437443 - DNA, 30 bp, Artificial Sequence
  Synthetic oligonucleotide
gtactctgcataatgagtgccttgctcggt

SEQ ID NO: 437444 - DNA, 30 bp, Artificial Sequence
  Synthetic oligonucleotide
ctgggcagcttcgagcctcgcactctcggt

SEQ ID NO: 437445 - DNA, 31 bp, Artificial Sequence
  Synthetic oligonucleotide
aagcatggataacattctccctacagtcggt

SEQ ID NO: 437446 - DNA, 30 bp, Artificial Sequence
  Synthetic oligonucleotide
cggagtactcgctcatggcaggtggtcggt

SEQ ID NO: 437447 - DNA, 30 bp, Artificial Sequence
  Synthetic oligonucleotide
catggcgcgccgagggcgggggtggtcggt

SEQ ID NO: 437448 - DNA, 30 bp, Artificial Sequence
  Synthetic oligonucleotide
gacgtgtgactgacctcggcgtatgtcggt

SEQ ID NO: 437449 - DNA, 30 bp, Artificial Sequence
  Synthetic oligonucleotide
aggtttatttcatgccaactacgtgtcggt

SEQ ID NO: 437450 - DNA, 30 bp, Artificial Sequence
  Synthetic oligonucleotide
ctatcgtatgtgttgtagtttattgtcggt

SEQ ID NO: 437451 - DNA, 30 bp, Artificial Sequence
  Synthetic oligonucleotide
aactggggttggctaacgacgtttgtcggt

SEQ ID NO: 437452 - DNA, 30 bp, Artificial Sequence
  Synthetic oligonucleotide
caattaaaagcggggatgcggcaattcggt

SEQ ID NO: 437453 - DNA, 30 bp, Artificial Sequence
  Synthetic oligonucleotide
caaggttggggttttcacgacgaattcggt

SEQ ID NO: 437454 - DNA, 30 bp, Artificial Sequence
  Synthetic oligonucleotide
aaatggtaagaaagtcagttgagattcggt

SEQ ID NO: 437455 - DNA, 30 bp, Artificial Sequence
  Synthetic oligonucleotide
ataactctgccaacgcattagatattcggt

SEQ ID NO: 437456 - DNA, 30 bp, Artificial Sequence
  Synthetic oligonucleotide
acacgtagttttaataactatcccttcggt

SEQ ID NO: 437457 - DNA, 30 bp, Artificial Sequence
  Synthetic oligonucleotide
ctttcagccttggagactggatccttcggt

SEQ ID NO: 437458 - DNA, 30 bp, Artificial Sequence
  Synthetic oligonucleotide
cttagtaccgcggagacagtgcgcttcggt

SEQ ID NO: 437459 - DNA, 30 bp, Artificial Sequence
  Synthetic oligonucleotide
ggtccctcggagagggcttgctgcttcggt

SEQ ID NO: 437460 - DNA, 30 bp, Artificial Sequence
  Synthetic oligonucleotide
aaggccctcttcataccctgtctgttcggt

SEQ ID NO: 437461 - DNA, 30 bp, Artificial Sequence
  Synthetic oligonucleotide
cgatacttacgcctaaaaaggcgtttcggt

SEQ ID NO: 437462 - DNA, 30 bp, Artificial Sequence
  Synthetic oligonucleotide
tttagcacaatgatgctatccattttcggt

SEQ ID NO: 437463 - DNA, 30 bp, Artificial Sequence
  Synthetic oligonucleotide
gtcccaactactctgcaggtccccaagggt

SEQ ID NO: 437464 - DNA, 30 bp, Artificial Sequence
  Synthetic oligonucleotide
tgttcgagagtcggtgcgaatcccaagggt

SEQ ID NO: 437465 - DNA, 30 bp, Artificial Sequence
  Synthetic oligonucleotide
ggaacggcggctggagtgcggggcaagggt

SEQ ID NO: 437466 - DNA, 30 bp, Artificial Sequence
  Synthetic oligonucleotide
gcttacagcatctttttaaatttcaagggt

SEQ ID NO: 437467 - DNA, 30 bp, Artificial Sequence
  Synthetic oligonucleotide
atcaggcttcacgtagtgttatggaagggt

SEQ ID NO: 437468 - DNA, 30 bp, Artificial Sequence
  Synthetic oligonucleotide
aactggttcttcgaaccgacttataagggt

SEQ ID NO: 437469 - DNA, 30 bp, Artificial Sequence
  Synthetic oligonucleotide
gtccgagccatccttaaggccacacagggt

SEQ ID NO: 437470 - DNA, 30 bp, Artificial Sequence
  Synthetic oligonucleotide
gtgctgaagccctatatatggcgacagggt

SEQ ID NO: 437471 - DNA, 30 bp, Artificial Sequence
  Synthetic oligonucleotide
agtagatagaggtcgtttgcatgacagggt

SEQ ID NO: 437472 - DNA, 30 bp, Artificial Sequence
  Synthetic oligonucleotide
taaattcttggttctatggaacaccagggt

SEQ ID NO: 437473 - DNA, 30 bp, Artificial Sequence
  Synthetic oligonucleotide
aatcctcgttcgacaacccttagccagggt

SEQ ID NO: 437474 - DNA, 30 bp, Artificial Sequence
  Synthetic oligonucleotide
ctagacctggacctgcaaacgggccagggt

SEQ ID NO: 437475 - DNA, 30 bp, Artificial Sequence
  Synthetic oligonucleotide
aaagggtcgatcaactacgagaggcagggt

SEQ ID NO: 437476 - DNA, 30 bp, Artificial Sequence
  Synthetic oligonucleotide
gtttaacgcagaagagtggatatgcagggt

SEQ ID NO: 437477 - DNA, 30 bp, Artificial Sequence
  Synthetic oligonucleotide
ctcttacgttgtactgaccgtcgcgagggt

SEQ ID NO: 437478 - DNA, 30 bp, Artificial Sequence
  Synthetic oligonucleotide
gaattgaaacaggaaaacatacatgagggt

SEQ ID NO: 437479 - DNA, 30 bp, Artificial Sequence
  Synthetic oligonucleotide
tctgatacacccgttctcccgtaatagggt

SEQ ID NO: 437480 - DNA, 30 bp, Artificial Sequence
  Synthetic oligonucleotide
gaacctttataataatatagggtatagggt

SEQ ID NO: 437481 - DNA, 30 bp, Artificial Sequence
  Synthetic oligonucleotide
ggaccttcatcaggatggccttactagggt

SEQ ID NO: 437482 - DNA, 30 bp, Artificial Sequence
  Synthetic oligonucleotide
gaataaccattagtaagtttggcctagggt

SEQ ID NO: 437483 - DNA, 30 bp, Artificial Sequence
  Synthetic oligonucleotide
cagtagttcttccacgggtttctctagggt

SEQ ID NO: 437484 - DNA, 30 bp, Artificial Sequence
  Synthetic oligonucleotide
gcgcagttcggtatgcaggccttctagggt

SEQ ID NO: 437485 - DNA, 30 bp, Artificial Sequence
  Synthetic oligonucleotide
caccggagattgcctaaaggctagtagggt

SEQ ID NO: 437486 - DNA, 30 bp, Artificial Sequence
  Synthetic oligonucleotide
cgggaggtgcatctggggggcgattagggt

SEQ ID NO: 437487 - DNA, 30 bp, Artificial Sequence
  Synthetic oligonucleotide
aattaatagtggtgggagagtgaaacgggt

SEQ ID NO: 437488 - DNA, 30 bp, Artificial Sequence
  Synthetic oligonucleotide
aatagggtcagggcgcggcttggaacgggt

SEQ ID NO: 437489 - DNA, 31 bp, Artificial Sequence
  Synthetic oligonucleotide
gcgatactcgtcacgtgagcaggccacgggt

SEQ ID NO: 437490 - DNA, 30 bp, Artificial Sequence
  Synthetic oligonucleotide
atttccagcgtgcaaaatagatgcacgggt

SEQ ID NO: 437491 - DNA, 30 bp, Artificial Sequence
  Synthetic oligonucleotide
atgattctcgagagccggttcgtcacgggt

SEQ ID NO: 437492 - DNA, 30 bp, Artificial Sequence
  Synthetic oligonucleotide
aaaaattaggggcactgagaaccgacgggt

SEQ ID NO: 437493 - DNA, 30 bp, Artificial Sequence
  Synthetic oligonucleotide
attgctaatttctgtggctgatggacgggt

SEQ ID NO: 437494 - DNA, 30 bp, Artificial Sequence
  Synthetic oligonucleotide
agccgaaattctgtgccagcagatacgggt

SEQ ID NO: 437495 - DNA, 30 bp, Artificial Sequence
  Synthetic oligonucleotide
gacaaagagattagggattcatgaccgggt

SEQ ID NO: 437496 - DNA, 30 bp, Artificial Sequence
  Synthetic oligonucleotide
tcgctccaggaagggctgcggagcccgggt

SEQ ID NO: 437497 - DNA, 30 bp, Artificial Sequence
  Synthetic oligonucleotide
gagcgatcgtaggggataggcctcccgggt

SEQ ID NO: 437498 - DNA, 30 bp, Artificial Sequence
  Synthetic oligonucleotide
atgtcacaccggcccgatggtggtccgggt

SEQ ID NO: 437499 - DNA, 31 bp, Artificial Sequence
  Synthetic oligonucleotide
tgccatgggctgcacgcaagcttacgcgggt

SEQ ID NO: 437500 - DNA, 30 bp, Artificial Sequence
  Synthetic oligonucleotide
aactccaagggtggtatgtctgaggcgggt

SEQ ID NO: 437501 - DNA, 30 bp, Artificial Sequence
  Synthetic oligonucleotide
catctattggcatactaggttgaggcgggt

SEQ ID NO: 437502 - DNA, 30 bp, Artificial Sequence
  Synthetic oligonucleotide
gaatccttaacgttgaagacagctgcgggt

SEQ ID NO: 437503 - DNA, 30 bp, Artificial Sequence
  Synthetic oligonucleotide
agacggctcattacttgtaatgctgcgggt

SEQ ID NO: 437504 - DNA, 30 bp, Artificial Sequence
  Synthetic oligonucleotide
ggaaccgtacttaatacgaatagtgcgggt

SEQ ID NO: 437505 - DNA, 30 bp, Artificial Sequence
  Synthetic oligonucleotide
tacctgttaacggttaggtcacgtgcgggt

SEQ ID NO: 437506 - DNA, 30 bp, Artificial Sequence
  Synthetic oligonucleotide
tgcgaactggcataattagacacaaggggt

SEQ ID NO: 437507 - DNA, 30 bp, Artificial Sequence
  Synthetic oligonucleotide
gcggctgatggcttttgggtaggaaggggt

SEQ ID NO: 437508 - DNA, 30 bp, Artificial Sequence
  Synthetic oligonucleotide
tatcttctcagccacgttaaatccaggggt

SEQ ID NO: 437509 - DNA, 30 bp, Artificial Sequence
  Synthetic oligonucleotide
ttataggggggttggtactgcgtcaggggt

SEQ ID NO: 437510 - DNA, 30 bp, Artificial Sequence
  Synthetic oligonucleotide
tgtaacgtcataaccacacgtgagaggggt

SEQ ID NO: 437511 - DNA, 30 bp, Artificial Sequence
  Synthetic oligonucleotide
ataaggaagtgtctccaagcattgaggggt

SEQ ID NO: 437512 - DNA, 30 bp, Artificial Sequence
  Synthetic oligonucleotide
taacttcggactgtagcacattgtaggggt

SEQ ID NO: 437513 - DNA, 30 bp, Artificial Sequence
  Synthetic oligonucleotide
ctcatctgagaggagatgcgggttaggggt

SEQ ID NO: 437514 - DNA, 30 bp, Artificial Sequence
  Synthetic oligonucleotide
gtctaactcttctgtagtattaaacggggt

SEQ ID NO: 437515 - DNA, 30 bp, Artificial Sequence
  Synthetic oligonucleotide
cggccctcggggacgtagaatcaacggggt

SEQ ID NO: 437516 - DNA, 30 bp, Artificial Sequence
  Synthetic oligonucleotide
gtatgaacgccaaaagtagacctacggggt

SEQ ID NO: 437517 - DNA, 30 bp, Artificial Sequence
  Synthetic oligonucleotide
cccactgagttgagagcaacgcagcggggt

SEQ ID NO: 437518 - DNA, 30 bp, Artificial Sequence
  Synthetic oligonucleotide
tctgacatgttatggcaactggcgcggggt

SEQ ID NO: 437519 - DNA, 30 bp, Artificial Sequence
  Synthetic oligonucleotide
ggtatttgaggagcgtgtactgggcggggt

SEQ ID NO: 437520 - DNA, 30 bp, Artificial Sequence
  Synthetic oligonucleotide
atgatgggcagccagcgggtggtgcggggt

SEQ ID NO: 437521 - DNA, 30 bp, Artificial Sequence
  Synthetic oligonucleotide
gtagccatgctcccggtagtctatcggggt

SEQ ID NO: 437522 - DNA, 30 bp, Artificial Sequence
  Synthetic oligonucleotide
tgtaaaaccgtctttaaggttcctcggggt

SEQ ID NO: 437523 - DNA, 30 bp, Artificial Sequence
  Synthetic oligonucleotide
acaaccgaggtttaacggagcggtcggggt

SEQ ID NO: 437524 - DNA, 30 bp, Artificial Sequence
  Synthetic oligonucleotide
atacctatgctttacatgaaatgtcggggt

SEQ ID NO: 437525 - DNA, 30 bp, Artificial Sequence
  Synthetic oligonucleotide
acctggccattgcaatggatcattcggggt

SEQ ID NO: 437526 - DNA, 30 bp, Artificial Sequence
  Synthetic oligonucleotide
ggtaggggcggcttggataaacaagggggt

SEQ ID NO: 437527 - DNA, 30 bp, Artificial Sequence
  Synthetic oligonucleotide
tctatgtgtatcaagagatttctagggggt

SEQ ID NO: 437528 - DNA, 30 bp, Artificial Sequence
  Synthetic oligonucleotide
ccttggaggttttttgtgcaattagggggt

SEQ ID NO: 437529 - DNA, 30 bp, Artificial Sequence
  Synthetic oligonucleotide
aaaacatgtagtgggcttgattacgggggt

SEQ ID NO: 437530 - DNA, 30 bp, Artificial Sequence
  Synthetic oligonucleotide
gctcctgtattccgtgtcaatctcgggggt

SEQ ID NO: 437531 - DNA, 30 bp, Artificial Sequence
  Synthetic oligonucleotide
ttggacccaatacgcatgtcattcgggggt

SEQ ID NO: 437532 - DNA, 30 bp, Artificial Sequence
  Synthetic oligonucleotide
gcaaaacctcccccgtatctttaggggggt

SEQ ID NO: 437533 - DNA, 30 bp, Artificial Sequence
  Synthetic oligonucleotide
atttcgctatagtcccaagtaggggggggt

SEQ ID NO: 437534 - DNA, 30 bp, Artificial Sequence
  Synthetic oligonucleotide
ctgccgatggctcgggtttcatgggggggt

SEQ ID NO: 437535 - DNA, 30 bp, Artificial Sequence
  Synthetic oligonucleotide
gcgagttcccattggtaaatttgggggggt

SEQ ID NO: 437536 - DNA, 30 bp, Artificial Sequence
  Synthetic oligonucleotide
atcttaacatgggtccgtgttaatgggggt

SEQ ID NO: 437537 - DNA, 30 bp, Artificial Sequence
  Synthetic oligonucleotide
ggcctgaaagtggcgttatggggatggggt

SEQ ID NO: 437538 - DNA, 30 bp, Artificial Sequence
  Synthetic oligonucleotide
gagttcggccagaatggagattagtggggt

SEQ ID NO: 437539 - DNA, 30 bp, Artificial Sequence
  Synthetic oligonucleotide
cccggggaattcatttatacagggtggggt

SEQ ID NO: 437540 - DNA, 29 bp, Artificial Sequence
  Synthetic oligonucleotide
tgccgggcatctcttaggataattggggt

SEQ ID NO: 437541 - DNA, 30 bp, Artificial Sequence
  Synthetic oligonucleotide
cagtaagacccagcgcccaagtattggggt

SEQ ID NO: 437542 - DNA, 30 bp, Artificial Sequence
  Synthetic oligonucleotide
ggcgccgtagggcgtcatgctatttggggt

SEQ ID NO: 437543 - DNA, 30 bp, Artificial Sequence
  Synthetic oligonucleotide
aaggaaccaggattgtaatgcagaatgggt

SEQ ID NO: 437544 - DNA, 30 bp, Artificial Sequence
  Synthetic oligonucleotide
tatgcaaatgcttccaggcagggcatgggt

SEQ ID NO: 437545 - DNA, 30 bp, Artificial Sequence
  Synthetic oligonucleotide
aaagggatgcctcttgtttcttgcatgggt

SEQ ID NO: 437546 - DNA, 30 bp, Artificial Sequence
  Synthetic oligonucleotide
atgtcagtcacgccgcaaggaaagatgggt

SEQ ID NO: 437547 - DNA, 30 bp, Artificial Sequence
  Synthetic oligonucleotide
tttcgtagacgtgtaggtagcacgatgggt

SEQ ID NO: 437548 - DNA, 30 bp, Artificial Sequence
  Synthetic oligonucleotide
caggccgctgcatgagcgcatacgatgggt

SEQ ID NO: 437549 - DNA, 30 bp, Artificial Sequence
  Synthetic oligonucleotide
ccgttgaattgtataaagcttactatgggt

SEQ ID NO: 437550 - DNA, 30 bp, Artificial Sequence
  Synthetic oligonucleotide
tatgcattcttccgtgatggcggactgggt

SEQ ID NO: 437551 - DNA, 30 bp, Artificial Sequence
  Synthetic oligonucleotide
cattcctaatgtgggggaccggccctgggt

SEQ ID NO: 437552 - DNA, 30 bp, Artificial Sequence
  Synthetic oligonucleotide
cccccgccttcaccgttggctctcctgggt

SEQ ID NO: 437553 - DNA, 30 bp, Artificial Sequence
  Synthetic oligonucleotide
ttactcgaggtacgcggtggtgtcctgggt

SEQ ID NO: 437554 - DNA, 30 bp, Artificial Sequence
  Synthetic oligonucleotide
aagtaccaattctgggtgggatggctgggt

SEQ ID NO: 437555 - DNA, 30 bp, Artificial Sequence
  Synthetic oligonucleotide
gttaagtctttacccgtaggttatctgggt

SEQ ID NO: 437556 - DNA, 30 bp, Artificial Sequence
  Synthetic oligonucleotide
gtaaagggggttgcaccctaaacagtgggt

SEQ ID NO: 437557 - DNA, 30 bp, Artificial Sequence
  Synthetic oligonucleotide
aataagctgtaggtgacgaaggtcgtgggt

SEQ ID NO: 437558 - DNA, 30 bp, Artificial Sequence
  Synthetic oligonucleotide
caaccatttgggcgcccaaacagtgtgggt

SEQ ID NO: 437559 - DNA, 30 bp, Artificial Sequence
  Synthetic oligonucleotide
ggattatacttggcgggcaacaaattgggt

SEQ ID NO: 437560 - DNA, 30 bp, Artificial Sequence
  Synthetic oligonucleotide
tagcggtggctgcatcactgttaattgggt

SEQ ID NO: 437561 - DNA, 30 bp, Artificial Sequence
  Synthetic oligonucleotide
gttcgtttccgagccgcgtccgcattgggt

SEQ ID NO: 437562 - DNA, 30 bp, Artificial Sequence
  Synthetic oligonucleotide
gtgcggcccgctgcgaacgtcgcattgggt

SEQ ID NO: 437563 - DNA, 30 bp, Artificial Sequence
  Synthetic oligonucleotide
ttacacagttctgcccagaatatattgggt

SEQ ID NO: 437564 - DNA, 30 bp, Artificial Sequence
  Synthetic oligonucleotide
ttcccgtgtaggttagagagtgtattgggt

SEQ ID NO: 437565 - DNA, 30 bp, Artificial Sequence
  Synthetic oligonucleotide
caggcaacggagtcacttaacagcttgggt

SEQ ID NO: 437566 - DNA, 30 bp, Artificial Sequence
  Synthetic oligonucleotide
caaagcttcggcgcggctaccagcttgggt

SEQ ID NO: 437567 - DNA, 30 bp, Artificial Sequence
  Synthetic oligonucleotide
agcaaccgcgctctaccaggaggtttgggt

SEQ ID NO: 437568 - DNA, 30 bp, Artificial Sequence
  Synthetic oligonucleotide
aagttcatcgacgatatactggttttgggt

SEQ ID NO: 437569 - DNA, 30 bp, Artificial Sequence
  Synthetic oligonucleotide
cttcgctcattctcattaaacaaaaatggt

SEQ ID NO: 437570 - DNA, 30 bp, Artificial Sequence
  Synthetic oligonucleotide
ctccggtcttctctccgcctcaaaaatggt

SEQ ID NO: 437571 - DNA, 30 bp, Artificial Sequence
  Synthetic oligonucleotide
tcgcggtggattcataattacgcaaatggt

SEQ ID NO: 437572 - DNA, 30 bp, Artificial Sequence
  Synthetic oligonucleotide
agatcctggcatccggggagcaccaatggt

SEQ ID NO: 437573 - DNA, 30 bp, Artificial Sequence
  Synthetic oligonucleotide
tatgtctctggtaagtggacgggcaatggt

SEQ ID NO: 437574 - DNA, 30 bp, Artificial Sequence
  Synthetic oligonucleotide
ggtgtttacggtgacacatattgcaatggt

SEQ ID NO: 437575 - DNA, 30 bp, Artificial Sequence
  Synthetic oligonucleotide
cccaatgtctcccgacgtttggtcaatggt

SEQ ID NO: 437576 - DNA, 30 bp, Artificial Sequence
  Synthetic oligonucleotide
tgttttgtagatccgtcattactgaatggt

SEQ ID NO: 437577 - DNA, 30 bp, Artificial Sequence
  Synthetic oligonucleotide
gtagtcaatcttcactagaagaaccatggt

SEQ ID NO: 437578 - DNA, 30 bp, Artificial Sequence
  Synthetic oligonucleotide
ttaagttgatcattgcttatacgccatggt

SEQ ID NO: 437579 - DNA, 30 bp, Artificial Sequence
  Synthetic oligonucleotide
agctattactgcagtatgtctgatcatggt

SEQ ID NO: 437580 - DNA, 30 bp, Artificial Sequence
  Synthetic oligonucleotide
aatcgcttacacttgttccatagagatggt

SEQ ID NO: 437581 - DNA, 30 bp, Artificial Sequence
  Synthetic oligonucleotide
tgcggccgcacattttaagcccacgatggt

SEQ ID NO: 437582 - DNA, 30 bp, Artificial Sequence
  Synthetic oligonucleotide
tacaatggaagcgggaaccatgaggatggt

SEQ ID NO: 437583 - DNA, 30 bp, Artificial Sequence
  Synthetic oligonucleotide
ggacaaaatttaggttcagaataggatggt

SEQ ID NO: 437584 - DNA, 30 bp, Artificial Sequence
  Synthetic oligonucleotide
ggggtgaataaacttcttatacaatatggt

SEQ ID NO: 437585 - DNA, 30 bp, Artificial Sequence
  Synthetic oligonucleotide
cccaaccgggttccgtaagggaactatggt

SEQ ID NO: 437586 - DNA, 30 bp, Artificial Sequence
  Synthetic oligonucleotide
cccagccgagcccctcggcgcgactatggt

SEQ ID NO: 437587 - DNA, 30 bp, Artificial Sequence
  Synthetic oligonucleotide
gctcaaagctatgaggtttactcctatggt

SEQ ID NO: 437588 - DNA, 30 bp, Artificial Sequence
  Synthetic oligonucleotide
caacagacaagtctttcaggacgctatggt

SEQ ID NO: 437589 - DNA, 30 bp, Artificial Sequence
  Synthetic oligonucleotide
cagtgttggggggatgtaccctgctatggt

SEQ ID NO: 437590 - DNA, 30 bp, Artificial Sequence
  Synthetic oligonucleotide
gtgcagtggaatgacagcggcttctatggt

SEQ ID NO: 437591 - DNA, 30 bp, Artificial Sequence
  Synthetic oligonucleotide
gaagtataccgggtgagcactttctatggt

SEQ ID NO: 437592 - DNA, 30 bp, Artificial Sequence
  Synthetic oligonucleotide
tcgccttcggattccgaattagggtatggt

SEQ ID NO: 437593 - DNA, 30 bp, Artificial Sequence
  Synthetic oligonucleotide
acaggtacgcgtgcgcaaccgtggtatggt

SEQ ID NO: 437594 - DNA, 30 bp, Artificial Sequence
  Synthetic oligonucleotide
atacctaaattcagctcagctgcttatggt

SEQ ID NO: 437595 - DNA, 30 bp, Artificial Sequence
  Synthetic oligonucleotide
atgtacagtaggaggtagccattttatggt

SEQ ID NO: 437596 - DNA, 30 bp, Artificial Sequence
  Synthetic oligonucleotide
gcgtataccggaggattctgaagaactggt

SEQ ID NO: 437597 - DNA, 30 bp, Artificial Sequence
  Synthetic oligonucleotide
aatttaaatatgcccaatcatcgaactggt

SEQ ID NO: 437598 - DNA, 30 bp, Artificial Sequence
  Synthetic oligonucleotide
aacatatcgagtacatccggtcccactggt

SEQ ID NO: 437599 - DNA, 30 bp, Artificial Sequence
  Synthetic oligonucleotide
tgcatgggcataccctggaccactactggt

SEQ ID NO: 437600 - DNA, 30 bp, Artificial Sequence
  Synthetic oligonucleotide
attcggagtccaatctgggcaagtactggt

SEQ ID NO: 437601 - DNA, 30 bp, Artificial Sequence
  Synthetic oligonucleotide
ggttagcaaactgacgcgatacggcctggt

SEQ ID NO: 437602 - DNA, 30 bp, Artificial Sequence
  Synthetic oligonucleotide
tcgggagctattaacgcccgatatcctggt

SEQ ID NO: 437603 - DNA, 30 bp, Artificial Sequence
  Synthetic oligonucleotide
gattcacttgtgtacatcttgacagctggt

SEQ ID NO: 437604 - DNA, 30 bp, Artificial Sequence
  Synthetic oligonucleotide
gtgcattaatacctggaacatccagctggt

SEQ ID NO: 437605 - DNA, 30 bp, Artificial Sequence
  Synthetic oligonucleotide
gcactggtcgcttacctacccgcagctggt

SEQ ID NO: 437606 - DNA, 30 bp, Artificial Sequence
  Synthetic oligonucleotide
tcggtcggttttcgggagcgttgagctggt

SEQ ID NO: 437607 - DNA, 30 bp, Artificial Sequence
  Synthetic oligonucleotide
ggaaattctgagaactgataagacgctggt

SEQ ID NO: 437608 - DNA, 30 bp, Artificial Sequence
  Synthetic oligonucleotide
gacttatggtgtggcgggatagatgctggt

SEQ ID NO: 437609 - DNA, 30 bp, Artificial Sequence
  Synthetic oligonucleotide
caggtctaaatccattcaaatacatctggt

SEQ ID NO: 437610 - DNA, 30 bp, Artificial Sequence
  Synthetic oligonucleotide
ctacaccattaagggcaccgccagtctggt

SEQ ID NO: 437611 - DNA, 30 bp, Artificial Sequence
  Synthetic oligonucleotide
gggctcaagcggttacctcgggtttctggt

SEQ ID NO: 437612 - DNA, 30 bp, Artificial Sequence
  Synthetic oligonucleotide
gaaggtaagaccacggggcaggaaagtggt

SEQ ID NO: 437613 - DNA, 30 bp, Artificial Sequence
  Synthetic oligonucleotide
aacggacgaccctccgcctatataagtggt

SEQ ID NO: 437614 - DNA, 30 bp, Artificial Sequence
  Synthetic oligonucleotide
tcgagtgattggatgtcattgtacagtggt

SEQ ID NO: 437615 - DNA, 30 bp, Artificial Sequence
  Synthetic oligonucleotide
aaatgcatttgatcgactacgggcagtggt

SEQ ID NO: 437616 - DNA, 30 bp, Artificial Sequence
  Synthetic oligonucleotide
caggccccgcagagtcagatgctgagtggt

SEQ ID NO: 437617 - DNA, 25 bp, Artificial Sequence
  Synthetic oligonucleotide
cgatgaaagtgtaattactagtggt

SEQ ID NO: 437618 - DNA, 30 bp, Artificial Sequence
  Synthetic oligonucleotide
cacgacgcgaacctcctcgactgtagtggt

SEQ ID NO: 437619 - DNA, 30 bp, Artificial Sequence
  Synthetic oligonucleotide
ttataactcttaatttagcgatttagtggt

SEQ ID NO: 437620 - DNA, 30 bp, Artificial Sequence
  Synthetic oligonucleotide
tttgtcatctccacagaattcacacgtggt

SEQ ID NO: 437621 - DNA, 30 bp, Artificial Sequence
  Synthetic oligonucleotide
ttgttaccctgatttttgagcgcacgtggt

SEQ ID NO: 437622 - DNA, 30 bp, Artificial Sequence
  Synthetic oligonucleotide
catacctgatgctttgtcgtacgccgtggt

SEQ ID NO: 437623 - DNA, 30 bp, Artificial Sequence
  Synthetic oligonucleotide
cctacccgcaatgcccgtggctagcgtggt

SEQ ID NO: 437624 - DNA, 31 bp, Artificial Sequence
  Synthetic oligonucleotide
gacttatcgcacacccgttcttgatcgtggt

SEQ ID NO: 437625 - DNA, 30 bp, Artificial Sequence
  Synthetic oligonucleotide
gccacgcttttaaatgtggcccttcgtggt

SEQ ID NO: 437626 - DNA, 30 bp, Artificial Sequence
  Synthetic oligonucleotide
gtctcgatgtcgggaggaatcgacggtggt

SEQ ID NO: 437627 - DNA, 30 bp, Artificial Sequence
  Synthetic oligonucleotide
gcattagatttgattcgtatatccggtggt

SEQ ID NO: 437628 - DNA, 30 bp, Artificial Sequence
  Synthetic oligonucleotide
catctctaactcgtcaacactagcggtggt

SEQ ID NO: 437629 - DNA, 30 bp, Artificial Sequence
  Synthetic oligonucleotide
tgctgggaaccattggactaatgcggtggt

SEQ ID NO: 437630 - DNA, 30 bp, Artificial Sequence
  Synthetic oligonucleotide
tggtgggggtccggatgcgcacggggtggt

SEQ ID NO: 437631 - DNA, 30 bp, Artificial Sequence
  Synthetic oligonucleotide
cgggcaacacggtccgcgctctggggtggt

SEQ ID NO: 437632 - DNA, 30 bp, Artificial Sequence
  Synthetic oligonucleotide
taatcagggacaggaaacaggatgggtggt

SEQ ID NO: 437633 - DNA, 29 bp, Artificial Sequence
  Synthetic oligonucleotide
atgcgtgtttcttctcgacgtatggtggt

SEQ ID NO: 437634 - DNA, 30 bp, Artificial Sequence
  Synthetic oligonucleotide
tagcacgtagaccgcatattcaaatgtggt

SEQ ID NO: 437635 - DNA, 30 bp, Artificial Sequence
  Synthetic oligonucleotide
aataattgctaggttctaagtcggtgtggt

SEQ ID NO: 437636 - DNA, 30 bp, Artificial Sequence
  Synthetic oligonucleotide
aaccatgcattggacctcagggattgtggt

SEQ ID NO: 437637 - DNA, 30 bp, Artificial Sequence
  Synthetic oligonucleotide
agacgattggtcatacccggagtttgtggt

SEQ ID NO: 437638 - DNA, 30 bp, Artificial Sequence
  Synthetic oligonucleotide
tgggcggaatcacggtgccgggtttgtggt

SEQ ID NO: 437639 - DNA, 30 bp, Artificial Sequence
  Synthetic oligonucleotide
agggcaatgatatttgatatgttttgtggt

SEQ ID NO: 437640 - DNA, 30 bp, Artificial Sequence
  Synthetic oligonucleotide
gcatctgccaccaagaacaccagaattggt

SEQ ID NO: 437641 - DNA, 30 bp, Artificial Sequence
  Synthetic oligonucleotide
aacagctcaggacggccaaccatcattggt

SEQ ID NO: 437642 - DNA, 30 bp, Artificial Sequence
  Synthetic oligonucleotide
cagatccgtagtatgaattggcagattggt

SEQ ID NO: 437643 - DNA, 30 bp, Artificial Sequence
  Synthetic oligonucleotide
taatgtaaggtgtataaaatggaacttggt

SEQ ID NO: 437644 - DNA, 30 bp, Artificial Sequence
  Synthetic oligonucleotide
tctaagagttttgtggtgatggaacttggt

SEQ ID NO: 437645 - DNA, 30 bp, Artificial Sequence
  Synthetic oligonucleotide
ttcgtaaccaaagcattccgatgacttggt

SEQ ID NO: 437646 - DNA, 30 bp, Artificial Sequence
  Synthetic oligonucleotide
tctccgcatcgcggtggaggggcccttggt

SEQ ID NO: 437647 - DNA, 30 bp, Artificial Sequence
  Synthetic oligonucleotide
taagttactatcttatacgcggcgcttggt

SEQ ID NO: 437648 - DNA, 30 bp, Artificial Sequence
  Synthetic oligonucleotide
tttccgtactacttacccggacgtcttggt

SEQ ID NO: 437649 - DNA, 30 bp, Artificial Sequence
  Synthetic oligonucleotide
ttacaaggattaagatacgcttttcttggt

SEQ ID NO: 437650 - DNA, 30 bp, Artificial Sequence
  Synthetic oligonucleotide
tattacggtagttaccgaaatacagttggt

SEQ ID NO: 437651 - DNA, 30 bp, Artificial Sequence
  Synthetic oligonucleotide
aaatgcatagtcggtctttagttagttggt

SEQ ID NO: 437652 - DNA, 30 bp, Artificial Sequence
  Synthetic oligonucleotide
atattggattttccatagtgaaacgttggt

SEQ ID NO: 437653 - DNA, 30 bp, Artificial Sequence
  Synthetic oligonucleotide
ggatatttcaaaggcctgggggcggttggt

SEQ ID NO: 437654 - DNA, 30 bp, Artificial Sequence
  Synthetic oligonucleotide
aatgggatggcccgaggctccgttgttggt

SEQ ID NO: 437655 - DNA, 30 bp, Artificial Sequence
  Synthetic oligonucleotide
ccggccccttacacgcacagttttgttggt

SEQ ID NO: 437656 - DNA, 30 bp, Artificial Sequence
  Synthetic oligonucleotide
cattcacggctcggttacaacaaatttggt

SEQ ID NO: 437657 - DNA, 30 bp, Artificial Sequence
  Synthetic oligonucleotide
ctccttgcgacctgaggtttgcgctttggt

SEQ ID NO: 437658 - DNA, 30 bp, Artificial Sequence
  Synthetic oligonucleotide
aacagactacattcccacagcacgtttggt

SEQ ID NO: 437659 - DNA, 30 bp, Artificial Sequence
  Synthetic oligonucleotide
gactcgttcttggcagtcggggcgtttggt

SEQ ID NO: 437660 - DNA, 30 bp, Artificial Sequence
  Synthetic oligonucleotide
acccgaaaaggataactaacgccttttggt

SEQ ID NO: 437661 - DNA, 30 bp, Artificial Sequence
  Synthetic oligonucleotide
ggttggttagtaacaatcgaaataaaatgt

SEQ ID NO: 437662 - DNA, 30 bp, Artificial Sequence
  Synthetic oligonucleotide
gaacatggaggagattttcttatgaaatgt

SEQ ID NO: 437663 - DNA, 30 bp, Artificial Sequence
  Synthetic oligonucleotide
gacacatttaaatatttgctcgctaaatgt

SEQ ID NO: 437664 - DNA, 30 bp, Artificial Sequence
  Synthetic oligonucleotide
atacgccggcccggaccccacggtaaatgt

SEQ ID NO: 437665 - DNA, 30 bp, Artificial Sequence
  Synthetic oligonucleotide
aattatggtcgtgttagttagcttaaatgt

SEQ ID NO: 437666 - DNA, 30 bp, Artificial Sequence
  Synthetic oligonucleotide
gcaactcatggtcagacttgcagacaatgt

SEQ ID NO: 437667 - DNA, 30 bp, Artificial Sequence
  Synthetic oligonucleotide
ttacttagtatcgaggtgggtggacaatgt

SEQ ID NO: 437668 - DNA, 30 bp, Artificial Sequence
  Synthetic oligonucleotide
gctacaatgggaaagctctgcttacaatgt

SEQ ID NO: 437669 - DNA, 30 bp, Artificial Sequence
  Synthetic oligonucleotide
ttaatctgtgggataaatctttagcaatgt

SEQ ID NO: 437670 - DNA, 30 bp, Artificial Sequence
  Synthetic oligonucleotide
tgagtgcacattttgccaaataggcaatgt

SEQ ID NO: 437671 - DNA, 30 bp, Artificial Sequence
  Synthetic oligonucleotide
ataaagtcgtaaacgatgcagcggcaatgt

SEQ ID NO: 437672 - DNA, 30 bp, Artificial Sequence
  Synthetic oligonucleotide
aatatgccaggggccattatgcgtcaatgt

SEQ ID NO: 437673 - DNA, 28 bp, Artificial Sequence
  Synthetic oligonucleotide
tgttatagaagtcgccactatagaatgt

SEQ ID NO: 437674 - DNA, 30 bp, Artificial Sequence
  Synthetic oligonucleotide
tatgtatggtcttgtaaaaagaacgaatgt

SEQ ID NO: 437675 - DNA, 30 bp, Artificial Sequence
  Synthetic oligonucleotide
ggctggacttatttgtaacgccacgaatgt

SEQ ID NO: 437676 - DNA, 30 bp, Artificial Sequence
  Synthetic oligonucleotide
attaggtcaccagagaagagtgacgaatgt

SEQ ID NO: 437677 - DNA, 30 bp, Artificial Sequence
  Synthetic oligonucleotide
acaaactttcatattatgtcagaggaatgt

SEQ ID NO: 437678 - DNA, 30 bp, Artificial Sequence
  Synthetic oligonucleotide
ttcgcaaagaacttcaggctagcggaatgt

SEQ ID NO: 437679 - DNA, 30 bp, Artificial Sequence
  Synthetic oligonucleotide
tgaagagtgctacgatactcttcggaatgt

SEQ ID NO: 437680 - DNA, 30 bp, Artificial Sequence
  Synthetic oligonucleotide
tgcggccaacctgacccggactactaatgt

SEQ ID NO: 437681 - DNA, 30 bp, Artificial Sequence
  Synthetic oligonucleotide
accgttctaagattatcaagatcctaatgt

SEQ ID NO: 437682 - DNA, 30 bp, Artificial Sequence
  Synthetic oligonucleotide
cactctcgtacccgttattaacgctaatgt

SEQ ID NO: 437683 - DNA, 30 bp, Artificial Sequence
  Synthetic oligonucleotide
ctgcactccgcgggcatcgacccgtaatgt

SEQ ID NO: 437684 - DNA, 30 bp, Artificial Sequence
  Synthetic oligonucleotide
aatcagtcgggctcctacacgaattaatgt

SEQ ID NO: 437685 - DNA, 30 bp, Artificial Sequence
  Synthetic oligonucleotide
tgtcacactctagcggagattttttaatgt

SEQ ID NO: 437686 - DNA, 30 bp, Artificial Sequence
  Synthetic oligonucleotide
gctataacgtgtgtaggtgtatacacatgt

SEQ ID NO: 437687 - DNA, 30 bp, Artificial Sequence
  Synthetic oligonucleotide
ggaatggatgtggattcacacacgacatgt

SEQ ID NO: 437688 - DNA, 30 bp, Artificial Sequence
  Synthetic oligonucleotide
gctggattagtttgtatattaaatacatgt

SEQ ID NO: 437689 - DNA, 30 bp, Artificial Sequence
  Synthetic oligonucleotide
cccgactgcaaggatccttggacaccatgt

SEQ ID NO: 437690 - DNA, 31 bp, Artificial Sequence
  Synthetic oligonucleotide
tcactggtaaccttttagcgtggcaccatgt

SEQ ID NO: 437691 - DNA, 30 bp, Artificial Sequence
  Synthetic oligonucleotide
gaaaccccctatgccagtagcttaccatgt

SEQ ID NO: 437692 - DNA, 30 bp, Artificial Sequence
  Synthetic oligonucleotide
ggtggccttaaagcgctggaacatccatgt

SEQ ID NO: 437693 - DNA, 30 bp, Artificial Sequence
  Synthetic oligonucleotide
aagaaccacaaacgggaaggccatccatgt

SEQ ID NO: 437694 - DNA, 30 bp, Artificial Sequence
  Synthetic oligonucleotide
ttatcatgtatcattgaacgatgtccatgt

SEQ ID NO: 437695 - DNA, 30 bp, Artificial Sequence
  Synthetic oligonucleotide
tgtacgcctctgtgacccaccgaagcatgt

SEQ ID NO: 437696 - DNA, 30 bp, Artificial Sequence
  Synthetic oligonucleotide
caaaccgtgcaggtaaccgccctagcatgt

SEQ ID NO: 437697 - DNA, 30 bp, Artificial Sequence
  Synthetic oligonucleotide
ccgcgctctttggtgaaacagaacgcatgt

SEQ ID NO: 437698 - DNA, 30 bp, Artificial Sequence
  Synthetic oligonucleotide
tacaatcacaacgatcttgacgaggcatgt

SEQ ID NO: 437699 - DNA, 30 bp, Artificial Sequence
  Synthetic oligonucleotide
gaacaggacgcccaccccgtcccggcatgt

SEQ ID NO: 437700 - DNA, 30 bp, Artificial Sequence
  Synthetic oligonucleotide
cagttatcatgacttattgaacatgcatgt

SEQ ID NO: 437701 - DNA, 30 bp, Artificial Sequence
  Synthetic oligonucleotide
gtgtctttcaggttttggatgtatgcatgt

SEQ ID NO: 437702 - DNA, 30 bp, Artificial Sequence
  Synthetic oligonucleotide
cataactgggtcccgcgggacggtgcatgt

SEQ ID NO: 437703 - DNA, 30 bp, Artificial Sequence
  Synthetic oligonucleotide
ctcggtactttgtcgtataggggtgcatgt

SEQ ID NO: 437704 - DNA, 30 bp, Artificial Sequence
  Synthetic oligonucleotide
gacaagagtatcaacccttctcgatcatgt

SEQ ID NO: 437705 - DNA, 30 bp, Artificial Sequence
  Synthetic oligonucleotide
ggtaatcagttgataagactgtgctcatgt

SEQ ID NO: 437706 - DNA, 30 bp, Artificial Sequence
  Synthetic oligonucleotide
taatattgatcttgccaactcaagtcatgt

SEQ ID NO: 437707 - DNA, 30 bp, Artificial Sequence
  Synthetic oligonucleotide
gatggaagctctaaatttagttcgtcatgt

SEQ ID NO: 437708 - DNA, 30 bp, Artificial Sequence
  Synthetic oligonucleotide
ccaaattgttataagatgaaaaggtcatgt

SEQ ID NO: 437709 - DNA, 30 bp, Artificial Sequence
  Synthetic oligonucleotide
gagattgtttttgctcaagggtcttcatgt

SEQ ID NO: 437710 - DNA, 30 bp, Artificial Sequence
  Synthetic oligonucleotide
atgccttggatgtcattgtccagttcatgt

SEQ ID NO: 437711 - DNA, 30 bp, Artificial Sequence
  Synthetic oligonucleotide
gcgctccagcaataaatggtattttcatgt

SEQ ID NO: 437712 - DNA, 30 bp, Artificial Sequence
  Synthetic oligonucleotide
gacaagtctggcaactatgccctaagatgt

SEQ ID NO: 437713 - DNA, 30 bp, Artificial Sequence
  Synthetic oligonucleotide
taaccgttgcgtgggtaacggttaagatgt

SEQ ID NO: 437714 - DNA, 30 bp, Artificial Sequence
  Synthetic oligonucleotide
agtatctgcttaattccgcacgccagatgt

SEQ ID NO: 437715 - DNA, 30 bp, Artificial Sequence
  Synthetic oligonucleotide
accgatacgagtttgaccaggaatagatgt

SEQ ID NO: 437716 - DNA, 30 bp, Artificial Sequence
  Synthetic oligonucleotide
gacagcaaaagacactccttgcatagatgt

SEQ ID NO: 437717 - DNA, 29 bp, Artificial Sequence
  Synthetic oligonucleotide
aaactgagctccgggactaaagtagatgt

SEQ ID NO: 437718 - DNA, 30 bp, Artificial Sequence
  Synthetic oligonucleotide
agaagcattccggatcatcgacttagatgt

SEQ ID NO: 437719 - DNA, 30 bp, Artificial Sequence
  Synthetic oligonucleotide
aacataccgagagataaaatgaaacgatgt

SEQ ID NO: 437720 - DNA, 30 bp, Artificial Sequence
  Synthetic oligonucleotide
gcgccttttacaccgaaatttagacgatgt

SEQ ID NO: 437721 - DNA, 30 bp, Artificial Sequence
  Synthetic oligonucleotide
gcacgccgcaggtgttgcgacaaccgatgt

SEQ ID NO: 437722 - DNA, 30 bp, Artificial Sequence
  Synthetic oligonucleotide
gaccaacatgtataaaattgttaccgatgt

SEQ ID NO: 437723 - DNA, 30 bp, Artificial Sequence
  Synthetic oligonucleotide
gctgccttaatctcgtctctttcgcgatgt

SEQ ID NO: 437724 - DNA, 30 bp, Artificial Sequence
  Synthetic oligonucleotide
cacggggcatattaatggcaacatcgatgt

SEQ ID NO: 437725 - DNA, 30 bp, Artificial Sequence
  Synthetic oligonucleotide
gtagccgcccgaatgcactcacatcgatgt

SEQ ID NO: 437726 - DNA, 30 bp, Artificial Sequence
  Synthetic oligonucleotide
cacgcggcgcgtagtaaaaccactcgatgt

SEQ ID NO: 437727 - DNA, 30 bp, Artificial Sequence
  Synthetic oligonucleotide
tgtatatatcttgagacatactgtcgatgt

SEQ ID NO: 437728 - DNA, 30 bp, Artificial Sequence
  Synthetic oligonucleotide
tactttcccataaggtcgtacaaaggatgt

SEQ ID NO: 437729 - DNA, 30 bp, Artificial Sequence
  Synthetic oligonucleotide
gaatacacttggcatgtatgcggcggatgt

SEQ ID NO: 437730 - DNA, 30 bp, Artificial Sequence
  Synthetic oligonucleotide
ccaattgacgtatttatctagatcggatgt

SEQ ID NO: 437731 - DNA, 30 bp, Artificial Sequence
  Synthetic oligonucleotide
tacttagagatgacgagatgttggggatgt

SEQ ID NO: 437732 - DNA, 30 bp, Artificial Sequence
  Synthetic oligonucleotide
gttctgggtcttactgtcggcttgggatgt

SEQ ID NO: 437733 - DNA, 30 bp, Artificial Sequence
  Synthetic oligonucleotide
tcctctttacgaaccgtcacgagtggatgt

SEQ ID NO: 437734 - DNA, 30 bp, Artificial Sequence
  Synthetic oligonucleotide
gatgcgttcaaaggtaaccattttggatgt

SEQ ID NO: 437735 - DNA, 30 bp, Artificial Sequence
  Synthetic oligonucleotide
ttgtgttcaaactgccattagtactgatgt

SEQ ID NO: 437736 - DNA, 30 bp, Artificial Sequence
  Synthetic oligonucleotide
gaaacgaacgcttgggcacgaatctgatgt

SEQ ID NO: 437737 - DNA, 30 bp, Artificial Sequence
  Synthetic oligonucleotide
atatgcgcttggcagggcatcaagtgatgt

SEQ ID NO: 437738 - DNA, 30 bp, Artificial Sequence
  Synthetic oligonucleotide
cttgtggccagcaaaagttctttgtgatgt

SEQ ID NO: 437739 - DNA, 30 bp, Artificial Sequence
  Synthetic oligonucleotide
aaacacgggatgtgagccctaaattgatgt

SEQ ID NO: 437740 - DNA, 30 bp, Artificial Sequence
  Synthetic oligonucleotide
cggctcacttgactggctatctattgatgt

SEQ ID NO: 437741 - DNA, 30 bp, Artificial Sequence
  Synthetic oligonucleotide
gaaatcgcgtgttattgggaatcttgatgt

SEQ ID NO: 437742 - DNA, 30 bp, Artificial Sequence
  Synthetic oligonucleotide
ttgccgaaacccctctaggagtgttgatgt

SEQ ID NO: 437743 - DNA, 30 bp, Artificial Sequence
  Synthetic oligonucleotide
ccatgcagccgacgcctatgcatttgatgt

SEQ ID NO: 437744 - DNA, 30 bp, Artificial Sequence
  Synthetic oligonucleotide
tcgtgttcgaatgccggcactttttgatgt

SEQ ID NO: 437745 - DNA, 30 bp, Artificial Sequence
  Synthetic oligonucleotide
gctctccggtgagtcgcgattttttgatgt

SEQ ID NO: 437746 - DNA, 30 bp, Artificial Sequence
  Synthetic oligonucleotide
actaatcttcgggcaattccaaaaatatgt

SEQ ID NO: 437747 - DNA, 30 bp, Artificial Sequence
  Synthetic oligonucleotide
ttcggctgacacgcatcagatcgaatatgt

SEQ ID NO: 437748 - DNA, 30 bp, Artificial Sequence
  Synthetic oligonucleotide
taactgggtgaactcttacctctaatatgt

SEQ ID NO: 437749 - DNA, 30 bp, Artificial Sequence
  Synthetic oligonucleotide
caaatggcctgtccggcacttttaatatgt

SEQ ID NO: 437750 - DNA, 30 bp, Artificial Sequence
  Synthetic oligonucleotide
aacatgcccgacaatgcgtctaccatatgt

SEQ ID NO: 437751 - DNA, 30 bp, Artificial Sequence
  Synthetic oligonucleotide
tatgggttatgattcgtcttaagcatatgt

SEQ ID NO: 437752 - DNA, 30 bp, Artificial Sequence
  Synthetic oligonucleotide
gaaacccatcttttatcagctagcatatgt

SEQ ID NO: 437753 - DNA, 30 bp, Artificial Sequence
  Synthetic oligonucleotide
tccccgttatataatagctccggcatatgt

SEQ ID NO: 437754 - DNA, 30 bp, Artificial Sequence
  Synthetic oligonucleotide
acgatggagttttagtttgggtgcatatgt

SEQ ID NO: 437755 - DNA, 30 bp, Artificial Sequence
  Synthetic oligonucleotide
gagcagggtgtcggaaccctgcagatatgt

SEQ ID NO: 437756 - DNA, 30 bp, Artificial Sequence
  Synthetic oligonucleotide
caatacttttcgcgcccctcgacgatatgt

SEQ ID NO: 437757 - DNA, 30 bp, Artificial Sequence
  Synthetic oligonucleotide
gcttgtgagttgcatattatagcgatatgt

SEQ ID NO: 437758 - DNA, 30 bp, Artificial Sequence
  Synthetic oligonucleotide
gcaccaggacccatcatgggttggatatgt

SEQ ID NO: 437759 - DNA, 30 bp, Artificial Sequence
  Synthetic oligonucleotide
tgttaccgagcatagatatctatgatatgt

SEQ ID NO: 437760 - DNA, 30 bp, Artificial Sequence
  Synthetic oligonucleotide
tatatacgtccatcgctcaaaaatatatgt

SEQ ID NO: 437761 - DNA, 30 bp, Artificial Sequence
  Synthetic oligonucleotide
actggaggtaagattattagttctatatgt

SEQ ID NO: 437762 - DNA, 30 bp, Artificial Sequence
  Synthetic oligonucleotide
ttgggtaagtctaagaatgtcattatatgt

SEQ ID NO: 437763 - DNA, 30 bp, Artificial Sequence
  Synthetic oligonucleotide
catggcgtggcacaatcagtccttatatgt

SEQ ID NO: 437764 - DNA, 30 bp, Artificial Sequence
  Synthetic oligonucleotide
gtgccggattaaaggccttggtaactatgt

SEQ ID NO: 437765 - DNA, 30 bp, Artificial Sequence
  Synthetic oligonucleotide
gcagggaacatatctttcattacactatgt

SEQ ID NO: 437766 - DNA, 30 bp, Artificial Sequence
  Synthetic oligonucleotide
tttcgcagcaaggagtcggcatcactatgt

SEQ ID NO: 437767 - DNA, 30 bp, Artificial Sequence
  Synthetic oligonucleotide
agccgtatacttccgttttcattactatgt

SEQ ID NO: 437768 - DNA, 30 bp, Artificial Sequence
  Synthetic oligonucleotide
aacgtacccctaaaacggggtcacctatgt

SEQ ID NO: 437769 - DNA, 30 bp, Artificial Sequence
  Synthetic oligonucleotide
gataggcaataatgcttctaggacctatgt

SEQ ID NO: 437770 - DNA, 30 bp, Artificial Sequence
  Synthetic oligonucleotide
gagaggaggatttggacccaagtcctatgt

SEQ ID NO: 437771 - DNA, 30 bp, Artificial Sequence
  Synthetic oligonucleotide
acaacatcatgccttccactgctgctatgt

SEQ ID NO: 437772 - DNA, 30 bp, Artificial Sequence
  Synthetic oligonucleotide
agcccctccggtttttcttaaaatctatgt

SEQ ID NO: 437773 - DNA, 30 bp, Artificial Sequence
  Synthetic oligonucleotide
tcttttactggcacggtctatcgtctatgt

SEQ ID NO: 437774 - DNA, 30 bp, Artificial Sequence
  Synthetic oligonucleotide
caacgatgcaaatatgcatcacgcgtatgt

SEQ ID NO: 437775 - DNA, 30 bp, Artificial Sequence
  Synthetic oligonucleotide
gtaaatttccttggtcaattccgcgtatgt

SEQ ID NO: 437776 - DNA, 30 bp, Artificial Sequence
  Synthetic oligonucleotide
cgtttaaataagcacggggccttcgtatgt

SEQ ID NO: 437777 - DNA, 30 bp, Artificial Sequence
  Synthetic oligonucleotide
ccaaggagaaagggtctgattggggtatgt

SEQ ID NO: 437778 - DNA, 30 bp, Artificial Sequence
  Synthetic oligonucleotide
aactctgggccatgatcttggtgggtatgt

SEQ ID NO: 437779 - DNA, 30 bp, Artificial Sequence
  Synthetic oligonucleotide
ccaccccttacgatatagcgacatgtatgt

SEQ ID NO: 437780 - DNA, 30 bp, Artificial Sequence
  Synthetic oligonucleotide
ataacctcggttggttgcctgcatgtatgt

SEQ ID NO: 437781 - DNA, 30 bp, Artificial Sequence
  Synthetic oligonucleotide
ggcggttaaaggcccttaattaaattatgt

SEQ ID NO: 437782 - DNA, 30 bp, Artificial Sequence
  Synthetic oligonucleotide
gaatggtctcagaattcgtaacagttatgt

SEQ ID NO: 437783 - DNA, 30 bp, Artificial Sequence
  Synthetic oligonucleotide
tcactcttgttatggatatgcacgttatgt

SEQ ID NO: 437784 - DNA, 30 bp, Artificial Sequence
  Synthetic oligonucleotide
ttctagtggtcgaagttcccggggttatgt

SEQ ID NO: 437785 - DNA, 30 bp, Artificial Sequence
  Synthetic oligonucleotide
aaccccgtcgggggctctaacgaaaactgt

SEQ ID NO: 437786 - DNA, 30 bp, Artificial Sequence
  Synthetic oligonucleotide
agacttcgatgtgcccagcccatcaactgt

SEQ ID NO: 437787 - DNA, 30 bp, Artificial Sequence
  Synthetic oligonucleotide
acccggttaatgtcgacgacgatcaactgt

SEQ ID NO: 437788 - DNA, 30 bp, Artificial Sequence
  Synthetic oligonucleotide
gaaaagtggcatccttccgggctgaactgt

SEQ ID NO: 437789 - DNA, 30 bp, Artificial Sequence
  Synthetic oligonucleotide
ttttgccatcggtatgagagagataactgt

SEQ ID NO: 437790 - DNA, 30 bp, Artificial Sequence
  Synthetic oligonucleotide
gcaagtcgccctcacccacgtcttaactgt

SEQ ID NO: 437791 - DNA, 30 bp, Artificial Sequence
  Synthetic oligonucleotide
gccgcgtgccgaccgaatagacggcactgt

SEQ ID NO: 437792 - DNA, 30 bp, Artificial Sequence
  Synthetic oligonucleotide
cgctcggatcagactgcagctgatcactgt

SEQ ID NO: 437793 - DNA, 30 bp, Artificial Sequence
  Synthetic oligonucleotide
tccccatacgcgtttgttagaactcactgt

SEQ ID NO: 437794 - DNA, 30 bp, Artificial Sequence
  Synthetic oligonucleotide
gcgagtgctttcatccaaaaagttcactgt

SEQ ID NO: 437795 - DNA, 30 bp, Artificial Sequence
  Synthetic oligonucleotide
agcctcagtaggtaagcaacgtgagactgt

SEQ ID NO: 437796 - DNA, 30 bp, Artificial Sequence
  Synthetic oligonucleotide
aataatccctagccaggccctgaggactgt

SEQ ID NO: 437797 - DNA, 30 bp, Artificial Sequence
  Synthetic oligonucleotide
ggaggtctagagctgtccctctaggactgt

SEQ ID NO: 437798 - DNA, 30 bp, Artificial Sequence
  Synthetic oligonucleotide
accttcatatttgtatcctctaatgactgt

SEQ ID NO: 437799 - DNA, 30 bp, Artificial Sequence
  Synthetic oligonucleotide
tccctctgatgccgaaaggtttgtgactgt

SEQ ID NO: 437800 - DNA, 30 bp, Artificial Sequence
  Synthetic oligonucleotide
cccgcggaagcattgcatcgattatactgt

SEQ ID NO: 437801 - DNA, 30 bp, Artificial Sequence
  Synthetic oligonucleotide
tcggtcactagccaaacaggcccctactgt

SEQ ID NO: 437802 - DNA, 30 bp, Artificial Sequence
  Synthetic oligonucleotide
cgacaacttcccgcgggatcgatctactgt

SEQ ID NO: 437803 - DNA, 30 bp, Artificial Sequence
  Synthetic oligonucleotide
gtcttcagtaggcccggaggtatctactgt

SEQ ID NO: 437804 - DNA, 30 bp, Artificial Sequence
  Synthetic oligonucleotide
gagttaacgggacagtccggggcgtactgt

SEQ ID NO: 437805 - DNA, 30 bp, Artificial Sequence
  Synthetic oligonucleotide
atgaagaaggcaacgttaggatcgtactgt

SEQ ID NO: 437806 - DNA, 30 bp, Artificial Sequence
  Synthetic oligonucleotide
aacagcagactcagactatcgtggtactgt

SEQ ID NO: 437807 - DNA, 30 bp, Artificial Sequence
  Synthetic oligonucleotide
agtaaatacatgccgcactattgaacctgt

SEQ ID NO: 437808 - DNA, 30 bp, Artificial Sequence
  Synthetic oligonucleotide
aggtttgactttggagcgctatacacctgt

SEQ ID NO: 437809 - DNA, 30 bp, Artificial Sequence
  Synthetic oligonucleotide
gcgaccatctgtcaagtcagtctcacctgt

SEQ ID NO: 437810 - DNA, 30 bp, Artificial Sequence
  Synthetic oligonucleotide
tcatgtgtggtcacgggtcttaaggcctgt

SEQ ID NO: 437811 - DNA, 30 bp, Artificial Sequence
  Synthetic oligonucleotide
aaggagcagtccccaggttacaatgcctgt

SEQ ID NO: 437812 - DNA, 30 bp, Artificial Sequence
  Synthetic oligonucleotide
aatgccatcaaataaaaggaaattgcctgt

SEQ ID NO: 437813 - DNA, 30 bp, Artificial Sequence
  Synthetic oligonucleotide
atacatcatgctcgtactcagacatcctgt

SEQ ID NO: 437814 - DNA, 30 bp, Artificial Sequence
  Synthetic oligonucleotide
aaagcttatctagcgtccttgccatcctgt

SEQ ID NO: 437815 - DNA, 30 bp, Artificial Sequence
  Synthetic oligonucleotide
tgagtcgtaatcgcttgtcggagatcctgt

SEQ ID NO: 437816 - DNA, 30 bp, Artificial Sequence
  Synthetic oligonucleotide
tttataagtcgtggtttaccggactcctgt

SEQ ID NO: 437817 - DNA, 30 bp, Artificial Sequence
  Synthetic oligonucleotide
cgcgggtacggcagatacccagtctcctgt

SEQ ID NO: 437818 - DNA, 31 bp, Artificial Sequence
  Synthetic oligonucleotide
ctctgagtgttaccgccgttttcattcctgt

SEQ ID NO: 437819 - DNA, 30 bp, Artificial Sequence
  Synthetic oligonucleotide
tcgggtccaagcttccgtgtcagttcctgt

SEQ ID NO: 437820 - DNA, 30 bp, Artificial Sequence
  Synthetic oligonucleotide
gaaagggtttacaacatgcgcatttcctgt

SEQ ID NO: 437821 - DNA, 30 bp, Artificial Sequence
  Synthetic oligonucleotide
ggcgtcgcttgcgtattcccgtcaagctgt

SEQ ID NO: 437822 - DNA, 30 bp, Artificial Sequence
  Synthetic oligonucleotide
aaagacggcttaccaggttcgtacagctgt

SEQ ID NO: 437823 - DNA, 30 bp, Artificial Sequence
  Synthetic oligonucleotide
accggtcagtgagtccttcatgtgcgctgt

SEQ ID NO: 437824 - DNA, 30 bp, Artificial Sequence
  Synthetic oligonucleotide
tttacgcacttttggatatgtcatcgctgt

SEQ ID NO: 437825 - DNA, 30 bp, Artificial Sequence
  Synthetic oligonucleotide
aaccgcctgggttaggggcaacttcgctgt

SEQ ID NO: 437826 - DNA, 30 bp, Artificial Sequence
  Synthetic oligonucleotide
gcctacgctgctgacctcctcaccggctgt

SEQ ID NO: 437827 - DNA, 30 bp, Artificial Sequence
  Synthetic oligonucleotide
cagggtcattcggactgtctggggggctgt

SEQ ID NO: 437828 - DNA, 30 bp, Artificial Sequence
  Synthetic oligonucleotide
atttggccacttagttttgctaactgctgt

SEQ ID NO: 437829 - DNA, 30 bp, Artificial Sequence
  Synthetic oligonucleotide
gcaactcgttactgccaataagactgctgt

SEQ ID NO: 437830 - DNA, 30 bp, Artificial Sequence
  Synthetic oligonucleotide
cagctaatcttacaacgaatgagttgctgt

SEQ ID NO: 437831 - DNA, 30 bp, Artificial Sequence
  Synthetic oligonucleotide
cgttcctcatcttctttgatgaaaatctgt

SEQ ID NO: 437832 - DNA, 30 bp, Artificial Sequence
  Synthetic oligonucleotide
aaaccccgaagggtcatacatgaaatctgt

SEQ ID NO: 437833 - DNA, 30 bp, Artificial Sequence
  Synthetic oligonucleotide
tgtttgaccgatggtgtgcttgcaatctgt

SEQ ID NO: 437834 - DNA, 30 bp, Artificial Sequence
  Synthetic oligonucleotide
tttctttatcgtgcgagtatagccatctgt

SEQ ID NO: 437835 - DNA, 30 bp, Artificial Sequence
  Synthetic oligonucleotide
gcacaacaaaaggataaaacctccatctgt

SEQ ID NO: 437836 - DNA, 30 bp, Artificial Sequence
  Synthetic oligonucleotide
tgtgacgctgaatgtcctagaattatctgt

SEQ ID NO: 437837 - DNA, 30 bp, Artificial Sequence
  Synthetic oligonucleotide
gcatacacctcagcaagtagaaaactctgt

SEQ ID NO: 437838 - DNA, 30 bp, Artificial Sequence
  Synthetic oligonucleotide
caagcgtgagtccggtaatcgtaactctgt

SEQ ID NO: 437839 - DNA, 30 bp, Artificial Sequence
  Synthetic oligonucleotide
acttttattggacacaaacccttactctgt

SEQ ID NO: 437840 - DNA, 30 bp, Artificial Sequence
  Synthetic oligonucleotide
cttatggcttaactgtgcggggacctctgt

SEQ ID NO: 437841 - DNA, 30 bp, Artificial Sequence
  Synthetic oligonucleotide
gcttagcacctagcaaaaactgacctctgt

SEQ ID NO: 437842 - DNA, 30 bp, Artificial Sequence
  Synthetic oligonucleotide
acctcatacccgcggagattgctcctctgt

SEQ ID NO: 437843 - DNA, 30 bp, Artificial Sequence
  Synthetic oligonucleotide
gattcgtttcgtgagccagagacgctctgt

SEQ ID NO: 437844 - DNA, 30 bp, Artificial Sequence
  Synthetic oligonucleotide
cggtggggtaccggcgctttacggctctgt

SEQ ID NO: 437845 - DNA, 30 bp, Artificial Sequence
  Synthetic oligonucleotide
aatgttggtttagggaaagctatagtctgt

SEQ ID NO: 437846 - DNA, 30 bp, Artificial Sequence
  Synthetic oligonucleotide
tgattgtcagaccctatcgaaacggtctgt

SEQ ID NO: 437847 - DNA, 30 bp, Artificial Sequence
  Synthetic oligonucleotide
gctgtaaggtttagatggacgcgggtctgt

SEQ ID NO: 437848 - DNA, 30 bp, Artificial Sequence
  Synthetic oligonucleotide
tttaagcaacaccaggaacgctgggtctgt

SEQ ID NO: 437849 - DNA, 30 bp, Artificial Sequence
  Synthetic oligonucleotide
gccagacaatttggattaaataatgtctgt

SEQ ID NO: 437850 - DNA, 30 bp, Artificial Sequence
  Synthetic oligonucleotide
ctgcttatgggtgtccggcggcgattctgt

SEQ ID NO: 437851 - DNA, 30 bp, Artificial Sequence
  Synthetic oligonucleotide
aacggcaatgtagatgattaacagttctgt

SEQ ID NO: 437852 - DNA, 30 bp, Artificial Sequence
  Synthetic oligonucleotide
agtgcactctaccgggccgtctcgttctgt

SEQ ID NO: 437853 - DNA, 30 bp, Artificial Sequence
  Synthetic oligonucleotide
tagtctcgctggtgctagtcgaatttctgt

SEQ ID NO: 437854 - DNA, 30 bp, Artificial Sequence
  Synthetic oligonucleotide
gtaccgattggggtataatttgctttctgt

SEQ ID NO: 437855 - DNA, 30 bp, Artificial Sequence
  Synthetic oligonucleotide
aattctccgaggactcaaacacgtttctgt

SEQ ID NO: 437856 - DNA, 30 bp, Artificial Sequence
  Synthetic oligonucleotide
gtttctgagtcagcagatacaagaaagtgt

SEQ ID NO: 437857 - DNA, 30 bp, Artificial Sequence
  Synthetic oligonucleotide
aatagacagaagactgagtgttccaagtgt

SEQ ID NO: 437858 - DNA, 30 bp, Artificial Sequence
  Synthetic oligonucleotide
aaagccccgatttggtccaagcgcaagtgt

SEQ ID NO: 437859 - DNA, 30 bp, Artificial Sequence
  Synthetic oligonucleotide
gatatcctctgggatatgtaagagaagtgt

SEQ ID NO: 437860 - DNA, 30 bp, Artificial Sequence
  Synthetic oligonucleotide
cgagcttcagtctacgcgtcaattaagtgt

SEQ ID NO: 437861 - DNA, 30 bp, Artificial Sequence
  Synthetic oligonucleotide
atcttcagtacattgctgctttttaagtgt

SEQ ID NO: 437862 - DNA, 30 bp, Artificial Sequence
  Synthetic oligonucleotide
atgctgttttaacgcgctgtgatacagtgt

SEQ ID NO: 437863 - DNA, 30 bp, Artificial Sequence
  Synthetic oligonucleotide
atgaattcgatacttagcaggtcagagtgt

SEQ ID NO: 437864 - DNA, 30 bp, Artificial Sequence
  Synthetic oligonucleotide
gcgcctataaagtgtacggcgcgcgagtgt

SEQ ID NO: 437865 - DNA, 30 bp, Artificial Sequence
  Synthetic oligonucleotide
tttttggggggtctagagatgtaggagtgt

SEQ ID NO: 437866 - DNA, 30 bp, Artificial Sequence
  Synthetic oligonucleotide
caaatgtccaacgttccgttatttgagtgt

SEQ ID NO: 437867 - DNA, 30 bp, Artificial Sequence
  Synthetic oligonucleotide
aaaatccatgaacaatatcgtgtatagtgt

SEQ ID NO: 437868 - DNA, 30 bp, Artificial Sequence
  Synthetic oligonucleotide
agaatagagcacggaggacaatcctagtgt

SEQ ID NO: 437869 - DNA, 30 bp, Artificial Sequence
  Synthetic oligonucleotide
tcaccagagtggtattaattatggtagtgt

SEQ ID NO: 437870 - DNA, 30 bp, Artificial Sequence
  Synthetic oligonucleotide
atttcaaactttaactaagctgtgtagtgt

SEQ ID NO: 437871 - DNA, 30 bp, Artificial Sequence
  Synthetic oligonucleotide
ggaacaatcttaaataccggggattagtgt

SEQ ID NO: 437872 - DNA, 30 bp, Artificial Sequence
  Synthetic oligonucleotide
atactacaatgcggttacggaataacgtgt

SEQ ID NO: 437873 - DNA, 30 bp, Artificial Sequence
  Synthetic oligonucleotide
cgccttagtcggcgtgattcgttgacgtgt

SEQ ID NO: 437874 - DNA, 30 bp, Artificial Sequence
  Synthetic oligonucleotide
aaaacctgcaacggtaagggggctacgtgt

SEQ ID NO: 437875 - DNA, 30 bp, Artificial Sequence
  Synthetic oligonucleotide
gtcattagattttaagggtgccaaccgtgt

SEQ ID NO: 437876 - DNA, 30 bp, Artificial Sequence
  Synthetic oligonucleotide
atgcgtccgggtttcgacgtccgaccgtgt

SEQ ID NO: 437877 - DNA, 30 bp, Artificial Sequence
  Synthetic oligonucleotide
tagggaaatttgctatattgtctcccgtgt

SEQ ID NO: 437878 - DNA, 30 bp, Artificial Sequence
  Synthetic oligonucleotide
tggagaaagtgccatgacttttctccgtgt

SEQ ID NO: 437879 - DNA, 30 bp, Artificial Sequence
  Synthetic oligonucleotide
tacctattatggacctgtaagggtccgtgt

SEQ ID NO: 437880 - DNA, 30 bp, Artificial Sequence
  Synthetic oligonucleotide
attattttacttcacaattattaagcgtgt

SEQ ID NO: 437881 - DNA, 30 bp, Artificial Sequence
  Synthetic oligonucleotide
gcccggggccgtggacgaagcgcagcgtgt

SEQ ID NO: 437882 - DNA, 28 bp, Artificial Sequence
  Synthetic oligonucleotide
tttttaagaagtcgatgcgtgagcgtgt

SEQ ID NO: 437883 - DNA, 30 bp, Artificial Sequence
  Synthetic oligonucleotide
gcgattattctaacgctgatatgcgcgtgt

SEQ ID NO: 437884 - DNA, 30 bp, Artificial Sequence
  Synthetic oligonucleotide
taataccaagctggtccgtttagggcgtgt

SEQ ID NO: 437885 - DNA, 30 bp, Artificial Sequence
  Synthetic oligonucleotide
ccgcagcacacagaattcgtggtggcgtgt

SEQ ID NO: 437886 - DNA, 30 bp, Artificial Sequence
  Synthetic oligonucleotide
atagttgccgatatgaatattcatgcgtgt

SEQ ID NO: 437887 - DNA, 30 bp, Artificial Sequence
  Synthetic oligonucleotide
tgtcttggaatgcgaaagcattatgcgtgt

SEQ ID NO: 437888 - DNA, 30 bp, Artificial Sequence
  Synthetic oligonucleotide
taagttctgatggggtctaacccctcgtgt

SEQ ID NO: 437889 - DNA, 30 bp, Artificial Sequence
  Synthetic oligonucleotide
taactgcaattgagtatcccaatctcgtgt

SEQ ID NO: 437890 - DNA, 30 bp, Artificial Sequence
  Synthetic oligonucleotide
ggtttattagctgtggtagtgatctcgtgt

SEQ ID NO: 437891 - DNA, 30 bp, Artificial Sequence
  Synthetic oligonucleotide
caggcacggcgcacacataggcagtcgtgt

SEQ ID NO: 437892 - DNA, 30 bp, Artificial Sequence
  Synthetic oligonucleotide
tgcgattggtctgtgcgggccgagtcgtgt

SEQ ID NO: 437893 - DNA, 30 bp, Artificial Sequence
  Synthetic oligonucleotide
cgcctggttatgagatgacgcacgtcgtgt

SEQ ID NO: 437894 - DNA, 30 bp, Artificial Sequence
  Synthetic oligonucleotide
gatttcagtactccgcaccgaaacaggtgt

SEQ ID NO: 437895 - DNA, 30 bp, Artificial Sequence
  Synthetic oligonucleotide
cggcataagcggctcgggcttcacaggtgt

SEQ ID NO: 437896 - DNA, 30 bp, Artificial Sequence
  Synthetic oligonucleotide
ctggcgggaagagtggcctttgataggtgt

SEQ ID NO: 437897 - DNA, 30 bp, Artificial Sequence
  Synthetic oligonucleotide
gatggctgtcatactctttcagttaggtgt

SEQ ID NO: 437898 - DNA, 30 bp, Artificial Sequence
  Synthetic oligonucleotide
gtcgcttaagtgagatgtagaaaacggtgt

SEQ ID NO: 437899 - DNA, 30 bp, Artificial Sequence
  Synthetic oligonucleotide
aatcaattcgaagttctagaataacggtgt

SEQ ID NO: 437900 - DNA, 30 bp, Artificial Sequence
  Synthetic oligonucleotide
gcatctgaagactacagcactagacggtgt

SEQ ID NO: 437901 - DNA, 30 bp, Artificial Sequence
  Synthetic oligonucleotide
tagttagtacttatgaggaaagtacggtgt

SEQ ID NO: 437902 - DNA, 30 bp, Artificial Sequence
  Synthetic oligonucleotide
atcaatagtgggagcatgaacgtacggtgt

SEQ ID NO: 437903 - DNA, 31 bp, Artificial Sequence
  Synthetic oligonucleotide
acgcttctacagcccggtgcgctcccggtgt

SEQ ID NO: 437904 - DNA, 30 bp, Artificial Sequence
  Synthetic oligonucleotide
tctatgacgcttgcgattttactccggtgt

SEQ ID NO: 437905 - DNA, 30 bp, Artificial Sequence
  Synthetic oligonucleotide
atttagaacggcccactatacaagcggtgt

SEQ ID NO: 437906 - DNA, 30 bp, Artificial Sequence
  Synthetic oligonucleotide
caggacaggaattcctgatggccgcggtgt

SEQ ID NO: 437907 - DNA, 30 bp, Artificial Sequence
  Synthetic oligonucleotide
acgttgtgggcgttggaacgttcgcggtgt

SEQ ID NO: 437908 - DNA, 30 bp, Artificial Sequence
  Synthetic oligonucleotide
caatgtatcatgatggaatcacaagggtgt

SEQ ID NO: 437909 - DNA, 30 bp, Artificial Sequence
  Synthetic oligonucleotide
cggccgtagataaaaatatgagcagggtgt

SEQ ID NO: 437910 - DNA, 30 bp, Artificial Sequence
  Synthetic oligonucleotide
attcaaatttattcagatctaggagggtgt

SEQ ID NO: 437911 - DNA, 30 bp, Artificial Sequence
  Synthetic oligonucleotide
ctgggcaatctggtcggcatactagggtgt

SEQ ID NO: 437912 - DNA, 30 bp, Artificial Sequence
  Synthetic oligonucleotide
cgcgtgcgggcctcatctaatcccgggtgt

SEQ ID NO: 437913 - DNA, 30 bp, Artificial Sequence
  Synthetic oligonucleotide
atagtcccgcgcccactgagcgaggggtgt

SEQ ID NO: 437914 - DNA, 30 bp, Artificial Sequence
  Synthetic oligonucleotide
cgctgggaatcgaaaccgtatcgtgggtgt

SEQ ID NO: 437915 - DNA, 30 bp, Artificial Sequence
  Synthetic oligonucleotide
gaacgtgtctctcatagacatggtgggtgt

SEQ ID NO: 437916 - DNA, 30 bp, Artificial Sequence
  Synthetic oligonucleotide
gaaaggtccgtagaggatgattttgggtgt

SEQ ID NO: 437917 - DNA, 30 bp, Artificial Sequence
  Synthetic oligonucleotide
ttgcaagcacgtacgttgttggaatggtgt

SEQ ID NO: 437918 - DNA, 30 bp, Artificial Sequence
  Synthetic oligonucleotide
caatctattaactgtggtggatgatggtgt

SEQ ID NO: 437919 - DNA, 30 bp, Artificial Sequence
  Synthetic oligonucleotide
caagtattctattggccttttctatggtgt

SEQ ID NO: 437920 - DNA, 30 bp, Artificial Sequence
  Synthetic oligonucleotide
ctttcagggggaagcaagcgcttctggtgt

SEQ ID NO: 437921 - DNA, 30 bp, Artificial Sequence
  Synthetic oligonucleotide
cccgaatacctacggaaatagaagtggtgt

SEQ ID NO: 437922 - DNA, 30 bp, Artificial Sequence
  Synthetic oligonucleotide
ttggagctctccggacgtgtctattggtgt

SEQ ID NO: 437923 - DNA, 30 bp, Artificial Sequence
  Synthetic oligonucleotide
tattaaaatccagggtacctagtttggtgt

SEQ ID NO: 437924 - DNA, 30 bp, Artificial Sequence
  Synthetic oligonucleotide
gatcattcggagcacatttagtaaatgtgt

SEQ ID NO: 437925 - DNA, 30 bp, Artificial Sequence
  Synthetic oligonucleotide
ctgggagggtacttcataatacccatgtgt

SEQ ID NO: 437926 - DNA, 30 bp, Artificial Sequence
  Synthetic oligonucleotide
gacaaagcgctcgttccatgagccatgtgt

SEQ ID NO: 437927 - DNA, 30 bp, Artificial Sequence
  Synthetic oligonucleotide
ttacgaaccaacgcaccaaggctcatgtgt

SEQ ID NO: 437928 - DNA, 30 bp, Artificial Sequence
  Synthetic oligonucleotide
aggattcatataaacaaaagcacgatgtgt

SEQ ID NO: 437929 - DNA, 30 bp, Artificial Sequence
  Synthetic oligonucleotide
taaaaaaaatgtaaaacagtctgtatgtgt

SEQ ID NO: 437930 - DNA, 30 bp, Artificial Sequence
  Synthetic oligonucleotide
atcggatggtgtctgcacgctgcactgtgt

SEQ ID NO: 437931 - DNA, 30 bp, Artificial Sequence
  Synthetic oligonucleotide
caataaattgtttatgaggtttacctgtgt

SEQ ID NO: 437932 - DNA, 30 bp, Artificial Sequence
  Synthetic oligonucleotide
cattattacaagaccgaggaacagctgtgt

SEQ ID NO: 437933 - DNA, 30 bp, Artificial Sequence
  Synthetic oligonucleotide
accctgacgaagtttgaatgtactctgtgt

SEQ ID NO: 437934 - DNA, 30 bp, Artificial Sequence
  Synthetic oligonucleotide
aatgcttagtactaaggggatcttctgtgt

SEQ ID NO: 437935 - DNA, 30 bp, Artificial Sequence
  Synthetic oligonucleotide
ttgaccgtataggcagtatcattggtgtgt

SEQ ID NO: 437936 - DNA, 30 bp, Artificial Sequence
  Synthetic oligonucleotide
tagttttgaaagacgtcacggtatgtgtgt

SEQ ID NO: 437937 - DNA, 30 bp, Artificial Sequence
  Synthetic oligonucleotide
agcggtcaagtaccgtgcacgcaattgtgt

SEQ ID NO: 437938 - DNA, 30 bp, Artificial Sequence
  Synthetic oligonucleotide
attgccgaagttgaaaaacatgaattgtgt

SEQ ID NO: 437939 - DNA, 30 bp, Artificial Sequence
  Synthetic oligonucleotide
tgtattctaactacgtaaggtacattgtgt

SEQ ID NO: 437940 - DNA, 30 bp, Artificial Sequence
  Synthetic oligonucleotide
ctccatgtatctgtgctatcagtattgtgt

SEQ ID NO: 437941 - DNA, 30 bp, Artificial Sequence
  Synthetic oligonucleotide
cgtttcacgttgttgtcgtggcgcttgtgt

SEQ ID NO: 437942 - DNA, 30 bp, Artificial Sequence
  Synthetic oligonucleotide
gaggcgccaaccattcggctgttcttgtgt

SEQ ID NO: 437943 - DNA, 30 bp, Artificial Sequence
  Synthetic oligonucleotide
atcgctttgctccacaggacccgtttgtgt

SEQ ID NO: 437944 - DNA, 30 bp, Artificial Sequence
  Synthetic oligonucleotide
actgggatgctcgcttttgcaggtttgtgt

SEQ ID NO: 437945 - DNA, 30 bp, Artificial Sequence
  Synthetic oligonucleotide
ctgtagagtagttgctcattccaaaattgt

SEQ ID NO: 437946 - DNA, 30 bp, Artificial Sequence
  Synthetic oligonucleotide
ctccccttaacagtgtggaactaaaattgt

SEQ ID NO: 437947 - DNA, 30 bp, Artificial Sequence
  Synthetic oligonucleotide
tctgtttccgtcgataaggctacaaattgt

SEQ ID NO: 437948 - DNA, 30 bp, Artificial Sequence
  Synthetic oligonucleotide
ttaggtggatcgagagcctagttaaattgt

SEQ ID NO: 437949 - DNA, 30 bp, Artificial Sequence
  Synthetic oligonucleotide
gtcgttctctggatagtcgtttacaattgt

SEQ ID NO: 437950 - DNA, 30 bp, Artificial Sequence
  Synthetic oligonucleotide
tgatgtttggcaacatagagagcgaattgt

SEQ ID NO: 437951 - DNA, 30 bp, Artificial Sequence
  Synthetic oligonucleotide
catactgaattatcatagagttgtaattgt

SEQ ID NO: 437952 - DNA, 30 bp, Artificial Sequence
  Synthetic oligonucleotide
tctggttctagcataccgggtccccattgt

SEQ ID NO: 437953 - DNA, 30 bp, Artificial Sequence
  Synthetic oligonucleotide
catatgctccttcaatgttaattgcattgt

SEQ ID NO: 437954 - DNA, 30 bp, Artificial Sequence
  Synthetic oligonucleotide
ataatagctatcagctagcctatcgattgt

SEQ ID NO: 437955 - DNA, 30 bp, Artificial Sequence
  Synthetic oligonucleotide
gcgcttgcgatttgagtataactcgattgt

SEQ ID NO: 437956 - DNA, 30 bp, Artificial Sequence
  Synthetic oligonucleotide
tcccctgtggctgaaggcgacgctgattgt

SEQ ID NO: 437957 - DNA, 30 bp, Artificial Sequence
  Synthetic oligonucleotide
tttatgagttaaacgacccgatctgattgt

SEQ ID NO: 437958 - DNA, 30 bp, Artificial Sequence
  Synthetic oligonucleotide
tttcatgttgcgagagcccatggatattgt

SEQ ID NO: 437959 - DNA, 30 bp, Artificial Sequence
  Synthetic oligonucleotide
gctcgattgctgcccgcgatgatatattgt

SEQ ID NO: 437960 - DNA, 30 bp, Artificial Sequence
  Synthetic oligonucleotide
caaactagctgaagtcgtcagctatattgt

SEQ ID NO: 437961 - DNA, 30 bp, Artificial Sequence
  Synthetic oligonucleotide
tggtggtgcaactaattcgccaactattgt

SEQ ID NO: 437962 - DNA, 30 bp, Artificial Sequence
  Synthetic oligonucleotide
gcggataaagtaatactcaattactattgt

SEQ ID NO: 437963 - DNA, 30 bp, Artificial Sequence
  Synthetic oligonucleotide
gatgtcaaatttttgggtaataattattgt

SEQ ID NO: 437964 - DNA, 30 bp, Artificial Sequence
  Synthetic oligonucleotide
ccaccgtgttatgcagctgttgtttattgt

SEQ ID NO: 437965 - DNA, 30 bp, Artificial Sequence
  Synthetic oligonucleotide
ttggtagttactgggtcatggttaacttgt

SEQ ID NO: 437966 - DNA, 30 bp, Artificial Sequence
  Synthetic oligonucleotide
tatctatcccgaaagctattgtacacttgt

SEQ ID NO: 437967 - DNA, 30 bp, Artificial Sequence
  Synthetic oligonucleotide
acataggcgtcttcaggtagacgcacttgt

SEQ ID NO: 437968 - DNA, 30 bp, Artificial Sequence
  Synthetic oligonucleotide
cagaagcgggcagctgccagcacgacttgt

SEQ ID NO: 437969 - DNA, 30 bp, Artificial Sequence
  Synthetic oligonucleotide
gtcctgttagcaaggagtcatttgacttgt

SEQ ID NO: 437970 - DNA, 30 bp, Artificial Sequence
  Synthetic oligonucleotide
ttcaggtgcaaagggagttttaatacttgt

SEQ ID NO: 437971 - DNA, 30 bp, Artificial Sequence
  Synthetic oligonucleotide
tacatactataacctgcacatcgtacttgt

SEQ ID NO: 437972 - DNA, 30 bp, Artificial Sequence
  Synthetic oligonucleotide
tggtttacctcgggtgtccgattaccttgt

SEQ ID NO: 437973 - DNA, 30 bp, Artificial Sequence
  Synthetic oligonucleotide
attcttggtatatagctacacaacccttgt

SEQ ID NO: 437974 - DNA, 30 bp, Artificial Sequence
  Synthetic oligonucleotide
tggagccacaagaggaagccatggccttgt

SEQ ID NO: 437975 - DNA, 30 bp, Artificial Sequence
  Synthetic oligonucleotide
gccccctgttgggcgagttcattgccttgt

SEQ ID NO: 437976 - DNA, 30 bp, Artificial Sequence
  Synthetic oligonucleotide
agatgtgtggtacaatccacctgtccttgt

SEQ ID NO: 437977 - DNA, 30 bp, Artificial Sequence
  Synthetic oligonucleotide
agccgcgaccgccggatttatgcagcttgt

SEQ ID NO: 437978 - DNA, 30 bp, Artificial Sequence
  Synthetic oligonucleotide
cgaagtttacacattcgatggcccgcttgt

SEQ ID NO: 437979 - DNA, 31 bp, Artificial Sequence
  Synthetic oligonucleotide
ggatttcccgtatccgtgtaaaggcgcttgt

SEQ ID NO: 437980 - DNA, 30 bp, Artificial Sequence
  Synthetic oligonucleotide
acccacgggtacggttaggtggcggcttgt

SEQ ID NO: 437981 - DNA, 30 bp, Artificial Sequence
  Synthetic oligonucleotide
aataccatagagagggtgatagctgcttgt

SEQ ID NO: 437982 - DNA, 30 bp, Artificial Sequence
  Synthetic oligonucleotide
atgtcatagataaataacgcctctgcttgt

SEQ ID NO: 437983 - DNA, 30 bp, Artificial Sequence
  Synthetic oligonucleotide
gtgtgcgccgtaagcgtagcgacatcttgt

SEQ ID NO: 437984 - DNA, 30 bp, Artificial Sequence
  Synthetic oligonucleotide
ctccgcctaaagtggtcagacacgtcttgt

SEQ ID NO: 437985 - DNA, 30 bp, Artificial Sequence
  Synthetic oligonucleotide
ggtagtacttgccaggttacttcttcttgt

SEQ ID NO: 437986 - DNA, 30 bp, Artificial Sequence
  Synthetic oligonucleotide
acctataggagttgagacatagtttcttgt

SEQ ID NO: 437987 - DNA, 30 bp, Artificial Sequence
  Synthetic oligonucleotide
ttgcgatagccccagtatctcttttcttgt

SEQ ID NO: 437988 - DNA, 30 bp, Artificial Sequence
  Synthetic oligonucleotide
tgaatctcgatctgcgatgaagaaagttgt

SEQ ID NO: 437989 - DNA, 30 bp, Artificial Sequence
  Synthetic oligonucleotide
aactccgtgcagcgcgaagtgtcaagttgt

SEQ ID NO: 437990 - DNA, 30 bp, Artificial Sequence
  Synthetic oligonucleotide
gcatgtaaactatctatcccatgaagttgt

SEQ ID NO: 437991 - DNA, 30 bp, Artificial Sequence
  Synthetic oligonucleotide
ttagctaaaagtcatattgaacgcagttgt

SEQ ID NO: 437992 - DNA, 30 bp, Artificial Sequence
  Synthetic oligonucleotide
gtaattttagccgctaatgtcggtagttgt

SEQ ID NO: 437993 - DNA, 30 bp, Artificial Sequence
  Synthetic oligonucleotide
ttttgctgttgtcaatcgggcccacgttgt

SEQ ID NO: 437994 - DNA, 30 bp, Artificial Sequence
  Synthetic oligonucleotide
aaatgtttattcctgatgtgtgcacgttgt

SEQ ID NO: 437995 - DNA, 30 bp, Artificial Sequence
  Synthetic oligonucleotide
ccacggtccacaggcgcattttgacgttgt

SEQ ID NO: 437996 - DNA, 30 bp, Artificial Sequence
  Synthetic oligonucleotide
gccataatccgaggtactaccctccgttgt

SEQ ID NO: 437997 - DNA, 30 bp, Artificial Sequence
  Synthetic oligonucleotide
taaaaacggtgctgctgttatctccgttgt

SEQ ID NO: 437998 - DNA, 30 bp, Artificial Sequence
  Synthetic oligonucleotide
gccgaatggtgcaagtgcgtcaagcgttgt

SEQ ID NO: 437999 - DNA, 30 bp, Artificial Sequence
  Synthetic oligonucleotide
ggcaaccgggaatcgatgctttgtcgttgt

SEQ ID NO: 438000 - DNA, 30 bp, Artificial Sequence
  Synthetic oligonucleotide
cctttgtgtacaaccattggaattcgttgt

SEQ ID NO: 438001 - DNA, 30 bp, Artificial Sequence
  Synthetic oligonucleotide
gcgtgaccaaaagtataactattaggttgt

SEQ ID NO: 438002 - DNA, 30 bp, Artificial Sequence
  Synthetic oligonucleotide
ctagtgccgtgttccttaatttccggttgt

SEQ ID NO: 438003 - DNA, 30 bp, Artificial Sequence
  Synthetic oligonucleotide
tatgagggtctatattcgaatacgggttgt

SEQ ID NO: 438004 - DNA, 30 bp, Artificial Sequence
  Synthetic oligonucleotide
aaagagggcaaggcctcatttaggggttgt

SEQ ID NO: 438005 - DNA, 30 bp, Artificial Sequence
  Synthetic oligonucleotide
gtaggttgtagagtaccgtcgctgggttgt

SEQ ID NO: 438006 - DNA, 30 bp, Artificial Sequence
  Synthetic oligonucleotide
attgtttagggattcaatgggtctggttgt

SEQ ID NO: 438007 - DNA, 30 bp, Artificial Sequence
  Synthetic oligonucleotide
taagtgccttagcacacccgcccatgttgt

SEQ ID NO: 438008 - DNA, 30 bp, Artificial Sequence
  Synthetic oligonucleotide
tacagaattgtgccaagtgttatctgttgt

SEQ ID NO: 438009 - DNA, 30 bp, Artificial Sequence
  Synthetic oligonucleotide
gcttacacgtctgatataggtaagtgttgt

SEQ ID NO: 438010 - DNA, 30 bp, Artificial Sequence
  Synthetic oligonucleotide
gtcaggggcggatagacacgctagtgttgt

SEQ ID NO: 438011 - DNA, 30 bp, Artificial Sequence
  Synthetic oligonucleotide
attcagcaggcggcacccattaggtgttgt

SEQ ID NO: 438012 - DNA, 30 bp, Artificial Sequence
  Synthetic oligonucleotide
taccatcagatatgtgccgtggggtgttgt

SEQ ID NO: 438013 - DNA, 30 bp, Artificial Sequence
  Synthetic oligonucleotide
ttgaacagtagctatgattatgtgtgttgt

SEQ ID NO: 438014 - DNA, 30 bp, Artificial Sequence
  Synthetic oligonucleotide
gtgttgggactttagcttgcgcaaatttgt

SEQ ID NO: 438015 - DNA, 30 bp, Artificial Sequence
  Synthetic oligonucleotide
gaagtcgagtggtgggtccgccgcatttgt

SEQ ID NO: 438016 - DNA, 30 bp, Artificial Sequence
  Synthetic oligonucleotide
agttgtgatcggcgttaggggggcatttgt

SEQ ID NO: 438017 - DNA, 30 bp, Artificial Sequence
  Synthetic oligonucleotide
tccccgcccaatctatcgcgaatcatttgt

SEQ ID NO: 438018 - DNA, 30 bp, Artificial Sequence
  Synthetic oligonucleotide
ggtacgaagtttctaatacctcgtatttgt

SEQ ID NO: 438019 - DNA, 30 bp, Artificial Sequence
  Synthetic oligonucleotide
ttagtgtataccggcttaaacattatttgt

SEQ ID NO: 438020 - DNA, 30 bp, Artificial Sequence
  Synthetic oligonucleotide
gtattaggttggcagctctctagactttgt

SEQ ID NO: 438021 - DNA, 30 bp, Artificial Sequence
  Synthetic oligonucleotide
agagttgttattctgagagcgctactttgt

SEQ ID NO: 438022 - DNA, 30 bp, Artificial Sequence
  Synthetic oligonucleotide
gaatcacatacagttttgaaatctctttgt

SEQ ID NO: 438023 - DNA, 30 bp, Artificial Sequence
  Synthetic oligonucleotide
tggggtcgggagcaccatatgctagtttgt

SEQ ID NO: 438024 - DNA, 30 bp, Artificial Sequence
  Synthetic oligonucleotide
cgggctccgctataacgcgtattcgtttgt

SEQ ID NO: 438025 - DNA, 30 bp, Artificial Sequence
  Synthetic oligonucleotide
gatcaatttttgcgacccccgagggtttgt

SEQ ID NO: 438026 - DNA, 30 bp, Artificial Sequence
  Synthetic oligonucleotide
gtcgggaacaaacgcaacagattggtttgt

SEQ ID NO: 438027 - DNA, 30 bp, Artificial Sequence
  Synthetic oligonucleotide
agcgcaatctgccccagagtttctgtttgt

SEQ ID NO: 438028 - DNA, 30 bp, Artificial Sequence
  Synthetic oligonucleotide
agttttgttgatagtatactgcgtgtttgt

SEQ ID NO: 438029 - DNA, 30 bp, Artificial Sequence
  Synthetic oligonucleotide
cgctattcggaatcgacgtgcggtgtttgt

SEQ ID NO: 438030 - DNA, 30 bp, Artificial Sequence
  Synthetic oligonucleotide
ataggcctgtacataggagtacttgtttgt

SEQ ID NO: 438031 - DNA, 30 bp, Artificial Sequence
  Synthetic oligonucleotide
ctatgatgcaggttggctagtaacttttgt

SEQ ID NO: 438032 - DNA, 30 bp, Artificial Sequence
  Synthetic oligonucleotide
acgcataggccagcaggcccccacttttgt

SEQ ID NO: 438033 - DNA, 30 bp, Artificial Sequence
  Synthetic oligonucleotide
gacctattccctcgctttctccccttttgt

SEQ ID NO: 438034 - DNA, 30 bp, Artificial Sequence
  Synthetic oligonucleotide
tccctattccctcgctttctccccttttgt

SEQ ID NO: 438035 - DNA, 30 bp, Artificial Sequence
  Synthetic oligonucleotide
ggatgatgctgtatcttatacagcttttgt

SEQ ID NO: 438036 - DNA, 30 bp, Artificial Sequence
  Synthetic oligonucleotide
gactgaacgtgccaagctggtccgttttgt

SEQ ID NO: 438037 - DNA, 30 bp, Artificial Sequence
  Synthetic oligonucleotide
cggtcgctcgggttaagaggcaggttttgt

SEQ ID NO: 438038 - DNA, 30 bp, Artificial Sequence
  Synthetic oligonucleotide
acaaacgcaggctccaaatccatgttttgt

SEQ ID NO: 438039 - DNA, 30 bp, Artificial Sequence
  Synthetic oligonucleotide
gtgtcgggaagcagcgatctcaatttttgt

SEQ ID NO: 438040 - DNA, 30 bp, Artificial Sequence
  Synthetic oligonucleotide
ctgcagagcaagcaatattctagtttttgt

SEQ ID NO: 438041 - DNA, 30 bp, Artificial Sequence
  Synthetic oligonucleotide
agggtttctattaccctaaagtgtttttgt

SEQ ID NO: 438042 - DNA, 30 bp, Artificial Sequence
  Synthetic oligonucleotide
tttatacttcctcaggggtaaaaaaaaatt

SEQ ID NO: 438043 - DNA, 30 bp, Artificial Sequence
  Synthetic oligonucleotide
gttcacgcatatgtccaatcctaaaaaatt

SEQ ID NO: 438044 - DNA, 30 bp, Artificial Sequence
  Synthetic oligonucleotide
taataaacaatcggtacgtagtacaaaatt

SEQ ID NO: 438045 - DNA, 30 bp, Artificial Sequence
  Synthetic oligonucleotide
taaactacatatcagcctcagcagaaaatt

SEQ ID NO: 438046 - DNA, 30 bp, Artificial Sequence
  Synthetic oligonucleotide
agtgtctaccaattccaatgcgggaaaatt

SEQ ID NO: 438047 - DNA, 30 bp, Artificial Sequence
  Synthetic oligonucleotide
ataataagtttgttgacaagctggaaaatt

SEQ ID NO: 438048 - DNA, 30 bp, Artificial Sequence
  Synthetic oligonucleotide
gcacttgccaaaatatagtacatgaaaatt

SEQ ID NO: 438049 - DNA, 30 bp, Artificial Sequence
  Synthetic oligonucleotide
taatgttgcttaagctccaaacgtaaaatt

SEQ ID NO: 438050 - DNA, 30 bp, Artificial Sequence
  Synthetic oligonucleotide
cgtattctcttcatcgaggtaaaacaaatt

SEQ ID NO: 438051 - DNA, 30 bp, Artificial Sequence
  Synthetic oligonucleotide
aaggatttagattacctcaggagacaaatt

SEQ ID NO: 438052 - DNA, 30 bp, Artificial Sequence
  Synthetic oligonucleotide
tttgacagaaacacactccaagtacaaatt

SEQ ID NO: 438053 - DNA, 30 bp, Artificial Sequence
  Synthetic oligonucleotide
tgaacgttctaaatcaacgtttaccaaatt

SEQ ID NO: 438054 - DNA, 30 bp, Artificial Sequence
  Synthetic oligonucleotide
ctagaaataaccgcccaattattccaaatt

SEQ ID NO: 438055 - DNA, 30 bp, Artificial Sequence
  Synthetic oligonucleotide
aataaatgcgccgagcggcaaaagcaaatt

SEQ ID NO: 438056 - DNA, 30 bp, Artificial Sequence
  Synthetic oligonucleotide
gtaccatacgtcctccgtatatagcaaatt

SEQ ID NO: 438057 - DNA, 30 bp, Artificial Sequence
  Synthetic oligonucleotide
cagactcgttatagtggtcagatgcaaatt

SEQ ID NO: 438058 - DNA, 30 bp, Artificial Sequence
  Synthetic oligonucleotide
gcaatggtggacttctgtccattgcaaatt

SEQ ID NO: 438059 - DNA, 30 bp, Artificial Sequence
  Synthetic oligonucleotide
atcctcgcccataaaatgggggatcaaatt

SEQ ID NO: 438060 - DNA, 30 bp, Artificial Sequence
  Synthetic oligonucleotide
acttcgtggcgtcgcagttggagtcaaatt

SEQ ID NO: 438061 - DNA, 30 bp, Artificial Sequence
  Synthetic oligonucleotide
atccggtagatctgtagcgaggtagaaatt

SEQ ID NO: 438062 - DNA, 30 bp, Artificial Sequence
  Synthetic oligonucleotide
gggaagctttggggtagatgttgcgaaatt

SEQ ID NO: 438063 - DNA, 30 bp, Artificial Sequence
  Synthetic oligonucleotide
taatgcgtactaaactccatcacggaaatt

SEQ ID NO: 438064 - DNA, 31 bp, Artificial Sequence
  Synthetic oligonucleotide
tgccgcatcgcatgcaaataggtcggaaatt

SEQ ID NO: 438065 - DNA, 30 bp, Artificial Sequence
  Synthetic oligonucleotide
ggctacgcctacgtatcgggaaatgaaatt

SEQ ID NO: 438066 - DNA, 30 bp, Artificial Sequence
  Synthetic oligonucleotide
actgccgcagtgccgattcttcaataaatt

SEQ ID NO: 438067 - DNA, 30 bp, Artificial Sequence
  Synthetic oligonucleotide
actacaccacggggacagcattcataaatt

SEQ ID NO: 438068 - DNA, 30 bp, Artificial Sequence
  Synthetic oligonucleotide
caagagggtctgtacactttagtataaatt

SEQ ID NO: 438069 - DNA, 30 bp, Artificial Sequence
  Synthetic oligonucleotide
actggcacctgcggctagagtttataaatt

SEQ ID NO: 438070 - DNA, 30 bp, Artificial Sequence
  Synthetic oligonucleotide
ccgtagatgggacgatgctgcaactaaatt

SEQ ID NO: 438071 - DNA, 31 bp, Artificial Sequence
  Synthetic oligonucleotide
tgccgaatcgttttcttgtttaagctaaatt

SEQ ID NO: 438072 - DNA, 30 bp, Artificial Sequence
  Synthetic oligonucleotide
ccgcggcacggggcaagactttgctaaatt

SEQ ID NO: 438073 - DNA, 30 bp, Artificial Sequence
  Synthetic oligonucleotide
tgcctaatatcgcttagtgaggtctaaatt

SEQ ID NO: 438074 - DNA, 29 bp, Artificial Sequence
  Synthetic oligonucleotide
agcttttcttcgcctaacgctagtaaatt

SEQ ID NO: 438075 - DNA, 30 bp, Artificial Sequence
  Synthetic oligonucleotide
gtcaatttctgggacgagactccgtaaatt

SEQ ID NO: 438076 - DNA, 30 bp, Artificial Sequence
  Synthetic oligonucleotide
atgagttctaccgttcggggtagttaaatt

SEQ ID NO: 438077 - DNA, 30 bp, Artificial Sequence
  Synthetic oligonucleotide
atacaggatgtccagattgtactttaaatt

SEQ ID NO: 438078 - DNA, 30 bp, Artificial Sequence
  Synthetic oligonucleotide
gcgaagtttcgtcctaaggacccaacaatt

SEQ ID NO: 438079 - DNA, 30 bp, Artificial Sequence
  Synthetic oligonucleotide
gggagtttccaactttcatatctaacaatt

SEQ ID NO: 438080 - DNA, 30 bp, Artificial Sequence
  Synthetic oligonucleotide
acaaaatgtgatctcggcgtggccacaatt

SEQ ID NO: 438081 - DNA, 30 bp, Artificial Sequence
  Synthetic oligonucleotide
acttgttgtcttggataacctcagacaatt

SEQ ID NO: 438082 - DNA, 30 bp, Artificial Sequence
  Synthetic oligonucleotide
aggctctttatgcgtttccgtgctacaatt

SEQ ID NO: 438083 - DNA, 30 bp, Artificial Sequence
  Synthetic oligonucleotide
tatctttaccgaatgcgtgccggtacaatt

SEQ ID NO: 438084 - DNA, 30 bp, Artificial Sequence
  Synthetic oligonucleotide
tctcttagccttgagcaactcgttacaatt

SEQ ID NO: 438085 - DNA, 30 bp, Artificial Sequence
  Synthetic oligonucleotide
tcacaggatagggcggtagccgtaccaatt

SEQ ID NO: 438086 - DNA, 30 bp, Artificial Sequence
  Synthetic oligonucleotide
ggaaggcggtatcaagtaccgcgcccaatt

SEQ ID NO: 438087 - DNA, 30 bp, Artificial Sequence
  Synthetic oligonucleotide
accttggcaggcaagacggcagcgccaatt

SEQ ID NO: 438088 - DNA, 30 bp, Artificial Sequence
  Synthetic oligonucleotide
accggttataatttttttcggtgtccaatt

SEQ ID NO: 438089 - DNA, 30 bp, Artificial Sequence
  Synthetic oligonucleotide
cctacgtgatctagtgatgattgtccaatt

SEQ ID NO: 438090 - DNA, 30 bp, Artificial Sequence
  Synthetic oligonucleotide
gctctacactggccagcaagagacgcaatt

SEQ ID NO: 438091 - DNA, 30 bp, Artificial Sequence
  Synthetic oligonucleotide
ggcctatcggtgcaccagcacctcgcaatt

SEQ ID NO: 438092 - DNA, 30 bp, Artificial Sequence
  Synthetic oligonucleotide
actcgattatttctccataccttcgcaatt

SEQ ID NO: 438093 - DNA, 30 bp, Artificial Sequence
  Synthetic oligonucleotide
gaaacattagatcccgaaatgggggcaatt

SEQ ID NO: 438094 - DNA, 30 bp, Artificial Sequence
  Synthetic oligonucleotide
gggataactaataaatcgtcaggatcaatt

SEQ ID NO: 438095 - DNA, 30 bp, Artificial Sequence
  Synthetic oligonucleotide
cggtccccggtaaccggcaaagtatcaatt

SEQ ID NO: 438096 - DNA, 30 bp, Artificial Sequence
  Synthetic oligonucleotide
agtctctcactgtcaaagcaattatcaatt

SEQ ID NO: 438097 - DNA, 30 bp, Artificial Sequence
  Synthetic oligonucleotide
gatactcaaggattcctatatcactcaatt

SEQ ID NO: 438098 - DNA, 30 bp, Artificial Sequence
  Synthetic oligonucleotide
tgcggcgtagccgaggtctaatcctcaatt

SEQ ID NO: 438099 - DNA, 28 bp, Artificial Sequence
  Synthetic oligonucleotide
gctaatgacgggtaccactatctcaatt

SEQ ID NO: 438100 - DNA, 30 bp, Artificial Sequence
  Synthetic oligonucleotide
gaagtccccatccctcatgtgcagtcaatt

SEQ ID NO: 438101 - DNA, 30 bp, Artificial Sequence
  Synthetic oligonucleotide
gggtatttggctggctcgtgcacgtcaatt

SEQ ID NO: 438102 - DNA, 30 bp, Artificial Sequence
  Synthetic oligonucleotide
tggccaacaaaaaccagtctctgttcaatt

SEQ ID NO: 438103 - DNA, 30 bp, Artificial Sequence
  Synthetic oligonucleotide
gacatcatgcatggtcggatcctttcaatt

SEQ ID NO: 438104 - DNA, 30 bp, Artificial Sequence
  Synthetic oligonucleotide
gagaaacgatgggaaagctccaaaagaatt

SEQ ID NO: 438105 - DNA, 30 bp, Artificial Sequence
  Synthetic oligonucleotide
aattgatcaccgaagaaaaagtaaagaatt

SEQ ID NO: 438106 - DNA, 30 bp, Artificial Sequence
  Synthetic oligonucleotide
ttgctagcccaagtaactcgtacaagaatt

SEQ ID NO: 438107 - DNA, 30 bp, Artificial Sequence
  Synthetic oligonucleotide
aaatgggaacattctatgtccataagaatt

SEQ ID NO: 438108 - DNA, 30 bp, Artificial Sequence
  Synthetic oligonucleotide
cgccaaatcaccgtatcaatggtaagaatt

SEQ ID NO: 438109 - DNA, 30 bp, Artificial Sequence
  Synthetic oligonucleotide
atacacttttgtcgtttttcgcccagaatt

SEQ ID NO: 438110 - DNA, 30 bp, Artificial Sequence
  Synthetic oligonucleotide
tgtattggaagccgagtgaatgggagaatt

SEQ ID NO: 438111 - DNA, 30 bp, Artificial Sequence
  Synthetic oligonucleotide
aatatgcgtgcggcaagacccaatagaatt

SEQ ID NO: 438112 - DNA, 30 bp, Artificial Sequence
  Synthetic oligonucleotide
ggtctgcacccacttaaatttcatagaatt

SEQ ID NO: 438113 - DNA, 30 bp, Artificial Sequence
  Synthetic oligonucleotide
ctgtaccatgcgaacgatcaacttagaatt

SEQ ID NO: 438114 - DNA, 30 bp, Artificial Sequence
  Synthetic oligonucleotide
cgcgcttaagcggtccactagcttagaatt

SEQ ID NO: 438115 - DNA, 30 bp, Artificial Sequence
  Synthetic oligonucleotide
cattgtgtcggcaattaggatccacgaatt

SEQ ID NO: 438116 - DNA, 30 bp, Artificial Sequence
  Synthetic oligonucleotide
ttccggagcttaagcgtcgtgagacgaatt

SEQ ID NO: 438117 - DNA, 30 bp, Artificial Sequence
  Synthetic oligonucleotide
ttaggtcaaattgcaagtggaggacgaatt

SEQ ID NO: 438118 - DNA, 30 bp, Artificial Sequence
  Synthetic oligonucleotide
atgtgccttatgcaggcgcgtttacgaatt

SEQ ID NO: 438119 - DNA, 30 bp, Artificial Sequence
  Synthetic oligonucleotide
cagacctatgtagcactttggtgccgaatt

SEQ ID NO: 438120 - DNA, 30 bp, Artificial Sequence
  Synthetic oligonucleotide
actgtatggtacattagacgtgtccgaatt

SEQ ID NO: 438121 - DNA, 30 bp, Artificial Sequence
  Synthetic oligonucleotide
taaaagaaaaagttcttttattagcgaatt

SEQ ID NO: 438122 - DNA, 30 bp, Artificial Sequence
  Synthetic oligonucleotide
aacaaattaatatacatgtttaggcgaatt

SEQ ID NO: 438123 - DNA, 30 bp, Artificial Sequence
  Synthetic oligonucleotide
cggaattctgctgtactcccgtggcgaatt

SEQ ID NO: 438124 - DNA, 30 bp, Artificial Sequence
  Synthetic oligonucleotide
ctcgacctgagacggcaagacactcgaatt

SEQ ID NO: 438125 - DNA, 30 bp, Artificial Sequence
  Synthetic oligonucleotide
acccactctcgtaagaaagtatgtcgaatt

SEQ ID NO: 438126 - DNA, 30 bp, Artificial Sequence
  Synthetic oligonucleotide
atgattagacgtgtcatgtacagtggaatt

SEQ ID NO: 438127 - DNA, 30 bp, Artificial Sequence
  Synthetic oligonucleotide
tatatcgtggccgtacccctacttggaatt

SEQ ID NO: 438128 - DNA, 30 bp, Artificial Sequence
  Synthetic oligonucleotide
cgaatttacgtcttagccatgttatgaatt

SEQ ID NO: 438129 - DNA, 30 bp, Artificial Sequence
  Synthetic oligonucleotide
tcgcattgggggcggagtctgcactgaatt

SEQ ID NO: 438130 - DNA, 30 bp, Artificial Sequence
  Synthetic oligonucleotide
gccttcttgaccacgggtttggactgaatt

SEQ ID NO: 438131 - DNA, 30 bp, Artificial Sequence
  Synthetic oligonucleotide
tgtcagctggggttctctctatggtgaatt

SEQ ID NO: 438132 - DNA, 30 bp, Artificial Sequence
  Synthetic oligonucleotide
cgcgactcggggagcgaggtctattgaatt

SEQ ID NO: 438133 - DNA, 30 bp, Artificial Sequence
  Synthetic oligonucleotide
caacaattgtcggatgcattcgtttgaatt

SEQ ID NO: 438134 - DNA, 30 bp, Artificial Sequence
  Synthetic oligonucleotide
agccaatgctaaatgttgaagaaaataatt

SEQ ID NO: 438135 - DNA, 30 bp, Artificial Sequence
  Synthetic oligonucleotide
atcacaaattcagaacttgccgaaataatt

SEQ ID NO: 438136 - DNA, 30 bp, Artificial Sequence
  Synthetic oligonucleotide
acagaggttggataaatacgtgaaataatt

SEQ ID NO: 438137 - DNA, 30 bp, Artificial Sequence
  Synthetic oligonucleotide
atattctgatgagggcgattgtcaataatt

SEQ ID NO: 438138 - DNA, 30 bp, Artificial Sequence
  Synthetic oligonucleotide
tttgtcatcgggaaacggttgagaataatt

SEQ ID NO: 438139 - DNA, 30 bp, Artificial Sequence
  Synthetic oligonucleotide
ggcttgatacaatttttcgggcgaataatt

SEQ ID NO: 438140 - DNA, 30 bp, Artificial Sequence
  Synthetic oligonucleotide
ccccggatgcactgaagtaatctaataatt

SEQ ID NO: 438141 - DNA, 30 bp, Artificial Sequence
  Synthetic oligonucleotide
taagcaagagaaattggaacctggataatt

SEQ ID NO: 438142 - DNA, 30 bp, Artificial Sequence
  Synthetic oligonucleotide
gtacaggtattatatatgtccggtataatt

SEQ ID NO: 438143 - DNA, 30 bp, Artificial Sequence
  Synthetic oligonucleotide
gtacgcttcttgggcgtatttgttataatt

SEQ ID NO: 438144 - DNA, 30 bp, Artificial Sequence
  Synthetic oligonucleotide
cccggacacaggtccggtcggttactaatt

SEQ ID NO: 438145 - DNA, 30 bp, Artificial Sequence
  Synthetic oligonucleotide
gttgagcgcctgcagaaagccaagctaatt

SEQ ID NO: 438146 - DNA, 30 bp, Artificial Sequence
  Synthetic oligonucleotide
gtgtagttaataattgcgatcacgctaatt

SEQ ID NO: 438147 - DNA, 30 bp, Artificial Sequence
  Synthetic oligonucleotide
tttcaactattctgccgtttatcgctaatt

SEQ ID NO: 438148 - DNA, 30 bp, Artificial Sequence
  Synthetic oligonucleotide
ctattattcatgtcctgcggtcctctaatt

SEQ ID NO: 438149 - DNA, 30 bp, Artificial Sequence
  Synthetic oligonucleotide
gaaacatttcatgtttgattacgtctaatt

SEQ ID NO: 438150 - DNA, 30 bp, Artificial Sequence
  Synthetic oligonucleotide
cacccaaaaatctatggttctcgtctaatt

SEQ ID NO: 438151 - DNA, 30 bp, Artificial Sequence
  Synthetic oligonucleotide
ttctacgtgatccggtatatcgaagtaatt

SEQ ID NO: 438152 - DNA, 30 bp, Artificial Sequence
  Synthetic oligonucleotide
atcgagcacttagacgcaagcacagtaatt

SEQ ID NO: 438153 - DNA, 30 bp, Artificial Sequence
  Synthetic oligonucleotide
gaagtgactctcagataccgcgcagtaatt

SEQ ID NO: 438154 - DNA, 30 bp, Artificial Sequence
  Synthetic oligonucleotide
atattcgcttatagccagacggtggtaatt

SEQ ID NO: 438155 - DNA, 30 bp, Artificial Sequence
  Synthetic oligonucleotide
tactgaaggtgaggtttaatcattgtaatt

SEQ ID NO: 438156 - DNA, 30 bp, Artificial Sequence
  Synthetic oligonucleotide
ggcctacattaccgtccgtatcgcttaatt

SEQ ID NO: 438157 - DNA, 30 bp, Artificial Sequence
  Synthetic oligonucleotide
atgtgagccggtcattttccagagttaatt

SEQ ID NO: 438158 - DNA, 30 bp, Artificial Sequence
  Synthetic oligonucleotide
cttgagtttgttacattaatcgagttaatt

SEQ ID NO: 438159 - DNA, 30 bp, Artificial Sequence
  Synthetic oligonucleotide
atcctcaagtaacgaatcctatggttaatt

SEQ ID NO: 438160 - DNA, 30 bp, Artificial Sequence
  Synthetic oligonucleotide
aaatatgctcgaagaagacgcctgttaatt

SEQ ID NO: 438161 - DNA, 30 bp, Artificial Sequence
  Synthetic oligonucleotide
taggtaattttcggatgacagtatttaatt

SEQ ID NO: 438162 - DNA, 30 bp, Artificial Sequence
  Synthetic oligonucleotide
gcttacggagtaaattaggctactttaatt

SEQ ID NO: 438163 - DNA, 30 bp, Artificial Sequence
  Synthetic oligonucleotide
gattcagcgagtagaaataaatctttaatt

SEQ ID NO: 438164 - DNA, 30 bp, Artificial Sequence
  Synthetic oligonucleotide
gttagcgctgtatacctagcgcaaaacatt

SEQ ID NO: 438165 - DNA, 30 bp, Artificial Sequence
  Synthetic oligonucleotide
ggttatgcagagccattcaggagaaacatt

SEQ ID NO: 438166 - DNA, 30 bp, Artificial Sequence
  Synthetic oligonucleotide
aaatagtcttagacagttcgtcgaaacatt

SEQ ID NO: 438167 - DNA, 30 bp, Artificial Sequence
  Synthetic oligonucleotide
tcgctgtgcccaactattggatgaaacatt

SEQ ID NO: 438168 - DNA, 30 bp, Artificial Sequence
  Synthetic oligonucleotide
tagaaagcggtatcatattagtgaaacatt

SEQ ID NO: 438169 - DNA, 30 bp, Artificial Sequence
  Synthetic oligonucleotide
tttcaatatgggcagcccgcaggcaacatt

SEQ ID NO: 438170 - DNA, 30 bp, Artificial Sequence
  Synthetic oligonucleotide
cgatttcaggcgctgtccgagttcaacatt

SEQ ID NO: 438171 - DNA, 30 bp, Artificial Sequence
  Synthetic oligonucleotide
gcgctacagcgtcctaacaatttgaacatt

SEQ ID NO: 438172 - DNA, 30 bp, Artificial Sequence
  Synthetic oligonucleotide
actctttacgagcctttgcggcataacatt

SEQ ID NO: 438173 - DNA, 30 bp, Artificial Sequence
  Synthetic oligonucleotide
tgtcattcagtatgttacccagaacacatt

SEQ ID NO: 438174 - DNA, 30 bp, Artificial Sequence
  Synthetic oligonucleotide
tcagtgtgtggattgtctaatgaacacatt

SEQ ID NO: 438175 - DNA, 30 bp, Artificial Sequence
  Synthetic oligonucleotide
gccttcgcaagacgccctaatacacacatt

SEQ ID NO: 438176 - DNA, 30 bp, Artificial Sequence
  Synthetic oligonucleotide
tggtactcaaagcttataaagccacacatt

SEQ ID NO: 438177 - DNA, 30 bp, Artificial Sequence
  Synthetic oligonucleotide
ggagccttaggggcggcaatgaagcacatt

SEQ ID NO: 438178 - DNA, 30 bp, Artificial Sequence
  Synthetic oligonucleotide
tcagtccgcccggcagtagatcagcacatt

SEQ ID NO: 438179 - DNA, 30 bp, Artificial Sequence
  Synthetic oligonucleotide
cgaacggtctttcgtgtattctcgcacatt

SEQ ID NO: 438180 - DNA, 30 bp, Artificial Sequence
  Synthetic oligonucleotide
cccttattgctggtagtgctaatgcacatt

SEQ ID NO: 438181 - DNA, 30 bp, Artificial Sequence
  Synthetic oligonucleotide
cccacaacggggcagaacacgctgcacatt

SEQ ID NO: 438182 - DNA, 30 bp, Artificial Sequence
  Synthetic oligonucleotide
agaatatccgaggttgagatttcagacatt

SEQ ID NO: 438183 - DNA, 28 bp, Artificial Sequence
  Synthetic oligonucleotide
gcgccccttgccacgtggatgagacatt

SEQ ID NO: 438184 - DNA, 30 bp, Artificial Sequence
  Synthetic oligonucleotide
ggtcagcagccgcccgcctgaagcgacatt

SEQ ID NO: 438185 - DNA, 30 bp, Artificial Sequence
  Synthetic oligonucleotide
ttttgcttaatcctctgatatctcgacatt

SEQ ID NO: 438186 - DNA, 30 bp, Artificial Sequence
  Synthetic oligonucleotide
gtgacgttcagcacactgatgcaggacatt

SEQ ID NO: 438187 - DNA, 30 bp, Artificial Sequence
  Synthetic oligonucleotide
taattgcccttttagatgggcatggacatt

SEQ ID NO: 438188 - DNA, 30 bp, Artificial Sequence
  Synthetic oligonucleotide
agcaacgaacttggaggtgcggatgacatt

SEQ ID NO: 438189 - DNA, 30 bp, Artificial Sequence
  Synthetic oligonucleotide
tagtaaagttcggaccgttaagttgacatt

SEQ ID NO: 438190 - DNA, 30 bp, Artificial Sequence
  Synthetic oligonucleotide
ctcgagttaagttgttctaataaatacatt

SEQ ID NO: 438191 - DNA, 30 bp, Artificial Sequence
  Synthetic oligonucleotide
ggagatctgtccacttgaaagcaatacatt

SEQ ID NO: 438192 - DNA, 30 bp, Artificial Sequence
  Synthetic oligonucleotide
cgaagtgtcatgttatttaaaatatacatt

SEQ ID NO: 438193 - DNA, 30 bp, Artificial Sequence
  Synthetic oligonucleotide
gccatacgggcttaccggtggatatacatt

SEQ ID NO: 438194 - DNA, 30 bp, Artificial Sequence
  Synthetic oligonucleotide
aatacacctccgtgctcgcctatatacatt

SEQ ID NO: 438195 - DNA, 30 bp, Artificial Sequence
  Synthetic oligonucleotide
ctaagtggtatatgaaacagtccctacatt

SEQ ID NO: 438196 - DNA, 30 bp, Artificial Sequence
  Synthetic oligonucleotide
taccttcttataagcatgaagctctacatt

SEQ ID NO: 438197 - DNA, 30 bp, Artificial Sequence
  Synthetic oligonucleotide
cctacctccgcaactaccacaaagtacatt

SEQ ID NO: 438198 - DNA, 30 bp, Artificial Sequence
  Synthetic oligonucleotide
aggccaactcttttgccagtagagtacatt

SEQ ID NO: 438199 - DNA, 30 bp, Artificial Sequence
  Synthetic oligonucleotide
ggaagccatgaaacgaatcggtagtacatt

SEQ ID NO: 438200 - DNA, 30 bp, Artificial Sequence
  Synthetic oligonucleotide
tagctacgctacgaaagccctcgttacatt

SEQ ID NO: 438201 - DNA, 30 bp, Artificial Sequence
  Synthetic oligonucleotide
gcagattatttcagaggatgcatttacatt

SEQ ID NO: 438202 - DNA, 30 bp, Artificial Sequence
  Synthetic oligonucleotide
ccaccacgcggattcacaggcttttacatt

SEQ ID NO: 438203 - DNA, 30 bp, Artificial Sequence
  Synthetic oligonucleotide
ctgcggtgactgtataaagaccacaccatt

SEQ ID NO: 438204 - DNA, 30 bp, Artificial Sequence
  Synthetic oligonucleotide
gccctctctaaaggatatggttacaccatt

SEQ ID NO: 438205 - DNA, 30 bp, Artificial Sequence
  Synthetic oligonucleotide
tttccatatggacgactctgatagaccatt

SEQ ID NO: 438206 - DNA, 30 bp, Artificial Sequence
  Synthetic oligonucleotide
agagaattagcaccgtacgtttataccatt

SEQ ID NO: 438207 - DNA, 30 bp, Artificial Sequence
  Synthetic oligonucleotide
caactcacccgaggttagtcaggtaccatt

SEQ ID NO: 438208 - DNA, 30 bp, Artificial Sequence
  Synthetic oligonucleotide
aagaggagcctttaaggcacgaaacccatt

SEQ ID NO: 438209 - DNA, 30 bp, Artificial Sequence
  Synthetic oligonucleotide
aagggctccacccggggggttacacccatt

SEQ ID NO: 438210 - DNA, 30 bp, Artificial Sequence
  Synthetic oligonucleotide
ttttaaaccttaatatattgagcacccatt

SEQ ID NO: 438211 - DNA, 30 bp, Artificial Sequence
  Synthetic oligonucleotide
ataatcttggtcgcgctcggggatcccatt

SEQ ID NO: 438212 - DNA, 30 bp, Artificial Sequence
  Synthetic oligonucleotide
gctgggccagggtgtaacgtttatcccatt

SEQ ID NO: 438213 - DNA, 30 bp, Artificial Sequence
  Synthetic oligonucleotide
ctttataaccgcaccccggtgactcccatt

SEQ ID NO: 438214 - DNA, 30 bp, Artificial Sequence
  Synthetic oligonucleotide
atcgccgacatctggtttcgataagccatt

SEQ ID NO: 438215 - DNA, 30 bp, Artificial Sequence
  Synthetic oligonucleotide
acgctttcgtattgaaagccttcagccatt

SEQ ID NO: 438216 - DNA, 30 bp, Artificial Sequence
  Synthetic oligonucleotide
gtatcgcggagggcctggagtaaggccatt

SEQ ID NO: 438217 - DNA, 30 bp, Artificial Sequence
  Synthetic oligonucleotide
tgatagggacttcaccataccgatgccatt

SEQ ID NO: 438218 - DNA, 30 bp, Artificial Sequence
  Synthetic oligonucleotide
gctggcagcagcgctcctactgatgccatt

SEQ ID NO: 438219 - DNA, 30 bp, Artificial Sequence
  Synthetic oligonucleotide
gggtcctattgacgctaaaaaaaatccatt

SEQ ID NO: 438220 - DNA, 30 bp, Artificial Sequence
  Synthetic oligonucleotide
ttgacaaaggtggggttaaggacatccatt

SEQ ID NO: 438221 - DNA, 30 bp, Artificial Sequence
  Synthetic oligonucleotide
gcataaagaaccgtctggtaatactccatt

SEQ ID NO: 438222 - DNA, 30 bp, Artificial Sequence
  Synthetic oligonucleotide
aactatataggctgtcaggataggtccatt

SEQ ID NO: 438223 - DNA, 30 bp, Artificial Sequence
  Synthetic oligonucleotide
gtcatgatcggttatctggaccggtccatt

SEQ ID NO: 438224 - DNA, 30 bp, Artificial Sequence
  Synthetic oligonucleotide
gcgtatctacgataacgtccgccttccatt

SEQ ID NO: 438225 - DNA, 30 bp, Artificial Sequence
  Synthetic oligonucleotide
attcataaatagtctaaaagtatttccatt

SEQ ID NO: 438226 - DNA, 30 bp, Artificial Sequence
  Synthetic oligonucleotide
cttttttcagtgggaacccctggaagcatt

SEQ ID NO: 438227 - DNA, 30 bp, Artificial Sequence
  Synthetic oligonucleotide
ctacgtggcgtcggccacattttcagcatt

SEQ ID NO: 438228 - DNA, 30 bp, Artificial Sequence
  Synthetic oligonucleotide
ggtcaaatccttatgcagttgcagagcatt

SEQ ID NO: 438229 - DNA, 30 bp, Artificial Sequence
  Synthetic oligonucleotide
tcttaccaccggccggcgcaagatagcatt

SEQ ID NO: 438230 - DNA, 30 bp, Artificial Sequence
  Synthetic oligonucleotide
tccgacggagtcgaacaccgacgtagcatt

SEQ ID NO: 438231 - DNA, 30 bp, Artificial Sequence
  Synthetic oligonucleotide
gaacagtcgattttcgtagtcctgcgcatt

SEQ ID NO: 438232 - DNA, 30 bp, Artificial Sequence
  Synthetic oligonucleotide
cttcagttttcaaacaacctgaatcgcatt

SEQ ID NO: 438233 - DNA, 30 bp, Artificial Sequence
  Synthetic oligonucleotide
ccgggcgtgtcaatggtatgggatcgcatt

SEQ ID NO: 438234 - DNA, 30 bp, Artificial Sequence
  Synthetic oligonucleotide
aaatcagacgattagtgagctcctcgcatt

SEQ ID NO: 438235 - DNA, 30 bp, Artificial Sequence
  Synthetic oligonucleotide
tccgattagcgttatttgttgtctcgcatt

SEQ ID NO: 438236 - DNA, 30 bp, Artificial Sequence
  Synthetic oligonucleotide
ggttgtagttcgagcaactaggttcgcatt

SEQ ID NO: 438237 - DNA, 30 bp, Artificial Sequence
  Synthetic oligonucleotide
caagtcattaatacgtgcagccccggcatt

SEQ ID NO: 438238 - DNA, 30 bp, Artificial Sequence
  Synthetic oligonucleotide
aaaaaagcgcgctatgtgagatgcggcatt

SEQ ID NO: 438239 - DNA, 30 bp, Artificial Sequence
  Synthetic oligonucleotide
tcaccgatctcgtaatgctttcggggcatt

SEQ ID NO: 438240 - DNA, 30 bp, Artificial Sequence
  Synthetic oligonucleotide
aagagaaatcattatcttccagctggcatt

SEQ ID NO: 438241 - DNA, 30 bp, Artificial Sequence
  Synthetic oligonucleotide
ttcagagacaaagtatagtagatatgcatt

SEQ ID NO: 438242 - DNA, 30 bp, Artificial Sequence
  Synthetic oligonucleotide
aaactgcctaaaaagtttagatcctgcatt

SEQ ID NO: 438243 - DNA, 30 bp, Artificial Sequence
  Synthetic oligonucleotide
tataactataaaagggcggttccttgcatt

SEQ ID NO: 438244 - DNA, 30 bp, Artificial Sequence
  Synthetic oligonucleotide
ctaactggatgaaagtgacaccgaatcatt

SEQ ID NO: 438245 - DNA, 31 bp, Artificial Sequence
  Synthetic oligonucleotide
gccccaaaaggcccttgcgccgttaatcatt

SEQ ID NO: 438246 - DNA, 30 bp, Artificial Sequence
  Synthetic oligonucleotide
taactaacctctcttagtgtccccatcatt

SEQ ID NO: 438247 - DNA, 30 bp, Artificial Sequence
  Synthetic oligonucleotide
ttaatttttgtttcccaacatttcatcatt

SEQ ID NO: 438248 - DNA, 30 bp, Artificial Sequence
  Synthetic oligonucleotide
gataatgtgtaagataattattcgatcatt

SEQ ID NO: 438249 - DNA, 30 bp, Artificial Sequence
  Synthetic oligonucleotide
ccgatcgcgcactgctgcactaggatcatt

SEQ ID NO: 438250 - DNA, 30 bp, Artificial Sequence
  Synthetic oligonucleotide
tcagtttactttcacagaatcgtgatcatt

SEQ ID NO: 438251 - DNA, 30 bp, Artificial Sequence
  Synthetic oligonucleotide
tattaggttgaaatgttactgcatatcatt

SEQ ID NO: 438252 - DNA, 30 bp, Artificial Sequence
  Synthetic oligonucleotide
ttaccccacattgccggctcatatatcatt

SEQ ID NO: 438253 - DNA, 30 bp, Artificial Sequence
  Synthetic oligonucleotide
ggctacgactaacgcaggaacaaactcatt

SEQ ID NO: 438254 - DNA, 30 bp, Artificial Sequence
  Synthetic oligonucleotide
agatctgaggctcgtgttctgccactcatt

SEQ ID NO: 438255 - DNA, 30 bp, Artificial Sequence
  Synthetic oligonucleotide
atagctagttgcgtttaaacggcactcatt

SEQ ID NO: 438256 - DNA, 30 bp, Artificial Sequence
  Synthetic oligonucleotide
ttatcggtttatttgcctggtctactcatt

SEQ ID NO: 438257 - DNA, 30 bp, Artificial Sequence
  Synthetic oligonucleotide
gattctacagtcttgtagagcaatctcatt

SEQ ID NO: 438258 - DNA, 30 bp, Artificial Sequence
  Synthetic oligonucleotide
ctgacatccgttcccactaccgcagtcatt

SEQ ID NO: 438259 - DNA, 30 bp, Artificial Sequence
  Synthetic oligonucleotide
accgtggaaaactactcgaactgagtcatt

SEQ ID NO: 438260 - DNA, 30 bp, Artificial Sequence
  Synthetic oligonucleotide
gatgggtaaattttagcaataagcgtcatt

SEQ ID NO: 438261 - DNA, 30 bp, Artificial Sequence
  Synthetic oligonucleotide
ctgacagaagcagcacctaagaaggtcatt

SEQ ID NO: 438262 - DNA, 30 bp, Artificial Sequence
  Synthetic oligonucleotide
cggtgtccgtcttggcgcatggctgtcatt

SEQ ID NO: 438263 - DNA, 30 bp, Artificial Sequence
  Synthetic oligonucleotide
atctttataaaacccaaaagctgtgtcatt

SEQ ID NO: 438264 - DNA, 28 bp, Artificial Sequence
  Synthetic oligonucleotide
tgttaacgtgatagatggtggattcatt

SEQ ID NO: 438265 - DNA, 30 bp, Artificial Sequence
  Synthetic oligonucleotide
gcaaacaagcgccggtaggtcgccttcatt

SEQ ID NO: 438266 - DNA, 30 bp, Artificial Sequence
  Synthetic oligonucleotide
cctccatgcccgagccagacagagttcatt

SEQ ID NO: 438267 - DNA, 30 bp, Artificial Sequence
  Synthetic oligonucleotide
gggcatacgttgaatgcgcttacgttcatt

SEQ ID NO: 438268 - DNA, 30 bp, Artificial Sequence
  Synthetic oligonucleotide
gacttcatggaaccgagatgcgtgttcatt

SEQ ID NO: 438269 - DNA, 30 bp, Artificial Sequence
  Synthetic oligonucleotide
ctggagctgagaggcaagcaagatttcatt

SEQ ID NO: 438270 - DNA, 30 bp, Artificial Sequence
  Synthetic oligonucleotide
tttgattaaagcgaaatcaggtctttcatt

SEQ ID NO: 438271 - DNA, 30 bp, Artificial Sequence
  Synthetic oligonucleotide
cggcttgtttgtgagtcttgaattttcatt

SEQ ID NO: 438272 - DNA, 30 bp, Artificial Sequence
  Synthetic oligonucleotide
aaatagaacctctatggaaatcaaaagatt

SEQ ID NO: 438273 - DNA, 30 bp, Artificial Sequence
  Synthetic oligonucleotide
agtgttcaactgagctgccaatgaaagatt

SEQ ID NO: 438274 - DNA, 30 bp, Artificial Sequence
  Synthetic oligonucleotide
aaagcgaataactattgtaggaagaagatt

SEQ ID NO: 438275 - DNA, 30 bp, Artificial Sequence
  Synthetic oligonucleotide
gcaaacaacgatcatgtatgacgtaagatt

SEQ ID NO: 438276 - DNA, 30 bp, Artificial Sequence
  Synthetic oligonucleotide
acggttcagccgtcctgagtacgacagatt

SEQ ID NO: 438277 - DNA, 30 bp, Artificial Sequence
  Synthetic oligonucleotide
gaaattcagtgttgcggctaaccccagatt

SEQ ID NO: 438278 - DNA, 29 bp, Artificial Sequence
  Synthetic oligonucleotide
taggtaattacacgacataggcgcagatt

SEQ ID NO: 438279 - DNA, 30 bp, Artificial Sequence
  Synthetic oligonucleotide
tgacgttagcgctgaaaactgctgcagatt

SEQ ID NO: 438280 - DNA, 30 bp, Artificial Sequence
  Synthetic oligonucleotide
actcgcggaaagattcacggctctcagatt

SEQ ID NO: 438281 - DNA, 30 bp, Artificial Sequence
  Synthetic oligonucleotide
tccccacgatattacgagctgaaagagatt

SEQ ID NO: 438282 - DNA, 30 bp, Artificial Sequence
  Synthetic oligonucleotide
cataacttaatttcggatgtgcaagagatt

SEQ ID NO: 438283 - DNA, 30 bp, Artificial Sequence
  Synthetic oligonucleotide
cagagtttgttgggtgccggagtcgagatt

SEQ ID NO: 438284 - DNA, 30 bp, Artificial Sequence
  Synthetic oligonucleotide
cttcgggttcaccgacgaatcctggagatt

SEQ ID NO: 438285 - DNA, 30 bp, Artificial Sequence
  Synthetic oligonucleotide
acaggtcacgctctttggcgcggtgagatt

SEQ ID NO: 438286 - DNA, 30 bp, Artificial Sequence
  Synthetic oligonucleotide
ggacttatctcacgggtggcgcttgagatt

SEQ ID NO: 438287 - DNA, 30 bp, Artificial Sequence
  Synthetic oligonucleotide
atctgatactaccgaactgttgaatagatt

SEQ ID NO: 438288 - DNA, 30 bp, Artificial Sequence
  Synthetic oligonucleotide
ccgtttttacgggtacaccgataatagatt

SEQ ID NO: 438289 - DNA, 30 bp, Artificial Sequence
  Synthetic oligonucleotide
agcggggaactctgaggagttctatagatt

SEQ ID NO: 438290 - DNA, 30 bp, Artificial Sequence
  Synthetic oligonucleotide
ccttgttacgtccatggtttttcctagatt

SEQ ID NO: 438291 - DNA, 30 bp, Artificial Sequence
  Synthetic oligonucleotide
aggacacgggcgtacggaccaagctagatt

SEQ ID NO: 438292 - DNA, 30 bp, Artificial Sequence
  Synthetic oligonucleotide
caaatgtaagagacgaagttagtctagatt

SEQ ID NO: 438293 - DNA, 30 bp, Artificial Sequence
  Synthetic oligonucleotide
gtaagtgtgtcatcatagtcagagtagatt

SEQ ID NO: 438294 - DNA, 30 bp, Artificial Sequence
  Synthetic oligonucleotide
caccagattctgtcgatccctacgtagatt

SEQ ID NO: 438295 - DNA, 30 bp, Artificial Sequence
  Synthetic oligonucleotide
gaagccctgtcagctgctagtgcttagatt

SEQ ID NO: 438296 - DNA, 30 bp, Artificial Sequence
  Synthetic oligonucleotide
tcttccgtatggtgagttggactttagatt

SEQ ID NO: 438297 - DNA, 30 bp, Artificial Sequence
  Synthetic oligonucleotide
tgggttttaggcaggtgattcaaaacgatt

SEQ ID NO: 438298 - DNA, 30 bp, Artificial Sequence
  Synthetic oligonucleotide
ggggactttcggtttctatgaatgacgatt

SEQ ID NO: 438299 - DNA, 30 bp, Artificial Sequence
  Synthetic oligonucleotide
tgtcttcctttctagggtgtatatacgatt

SEQ ID NO: 438300 - DNA, 30 bp, Artificial Sequence
  Synthetic oligonucleotide
cagcacgccgctgccgagccagttacgatt

SEQ ID NO: 438301 - DNA, 30 bp, Artificial Sequence
  Synthetic oligonucleotide
gagttcgctagtggactgatatttacgatt

SEQ ID NO: 438302 - DNA, 30 bp, Artificial Sequence
  Synthetic oligonucleotide
aaatgtgcggtcacccgcctgacaccgatt

SEQ ID NO: 438303 - DNA, 30 bp, Artificial Sequence
  Synthetic oligonucleotide
aaacgcattacggaaactttattaccgatt

SEQ ID NO: 438304 - DNA, 30 bp, Artificial Sequence
  Synthetic oligonucleotide
gcctaaggttataccgcggtttccccgatt

SEQ ID NO: 438305 - DNA, 30 bp, Artificial Sequence
  Synthetic oligonucleotide
caagccgtaacaccccaagtccgcccgatt

SEQ ID NO: 438306 - DNA, 30 bp, Artificial Sequence
  Synthetic oligonucleotide
actagactgcagagattggaaggcccgatt

SEQ ID NO: 438307 - DNA, 30 bp, Artificial Sequence
  Synthetic oligonucleotide
gtggtgtcaaatgcaagcgtattcccgatt

SEQ ID NO: 438308 - DNA, 30 bp, Artificial Sequence
  Synthetic oligonucleotide
caagatttttaagctgagcaccagccgatt

SEQ ID NO: 438309 - DNA, 30 bp, Artificial Sequence
  Synthetic oligonucleotide
cgcctttcactaggggtcccgtggccgatt

SEQ ID NO: 438310 - DNA, 30 bp, Artificial Sequence
  Synthetic oligonucleotide
gtgttagcggaatttgtacacaacgcgatt

SEQ ID NO: 438311 - DNA, 30 bp, Artificial Sequence
  Synthetic oligonucleotide
aggagcaataagcgtgagctaggcgcgatt

SEQ ID NO: 438312 - DNA, 30 bp, Artificial Sequence
  Synthetic oligonucleotide
agtatggctgacatctcatgtggggcgatt

SEQ ID NO: 438313 - DNA, 30 bp, Artificial Sequence
  Synthetic oligonucleotide
atacgctcagtcagcccggatcctgcgatt

SEQ ID NO: 438314 - DNA, 30 bp, Artificial Sequence
  Synthetic oligonucleotide
catcttattattagacggaacaaatcgatt

SEQ ID NO: 438315 - DNA, 30 bp, Artificial Sequence
  Synthetic oligonucleotide
ttcgagcacactacgcggtgaatctcgatt

SEQ ID NO: 438316 - DNA, 30 bp, Artificial Sequence
  Synthetic oligonucleotide
gtccacgctgccaaagcagcggagtcgatt

SEQ ID NO: 438317 - DNA, 30 bp, Artificial Sequence
  Synthetic oligonucleotide
gatacttattaagggacactcgattcgatt

SEQ ID NO: 438318 - DNA, 31 bp, Artificial Sequence
  Synthetic oligonucleotide
gatttgggtttcggcaagggtatattcgatt

SEQ ID NO: 438319 - DNA, 30 bp, Artificial Sequence
  Synthetic oligonucleotide
gtaaggatgatactcggggagggcaggatt

SEQ ID NO: 438320 - DNA, 30 bp, Artificial Sequence
  Synthetic oligonucleotide
gacgagcaggaaacctgcgggacgaggatt

SEQ ID NO: 438321 - DNA, 30 bp, Artificial Sequence
  Synthetic oligonucleotide
tctatttgggccgaaatgagcgctaggatt

SEQ ID NO: 438322 - DNA, 30 bp, Artificial Sequence
  Synthetic oligonucleotide
gtgggctcgttgtataaggctattaggatt

SEQ ID NO: 438323 - DNA, 30 bp, Artificial Sequence
  Synthetic oligonucleotide
catttgggaaaaaagaaagcatttaggatt

SEQ ID NO: 438324 - DNA, 30 bp, Artificial Sequence
  Synthetic oligonucleotide
gccggaaagcaaaaacgaaggccacggatt

SEQ ID NO: 438325 - DNA, 30 bp, Artificial Sequence
  Synthetic oligonucleotide
agttaggtacggcgcttatgatcacggatt

SEQ ID NO: 438326 - DNA, 30 bp, Artificial Sequence
  Synthetic oligonucleotide
ccaatgaagaattttatcgcgctccggatt

SEQ ID NO: 438327 - DNA, 30 bp, Artificial Sequence
  Synthetic oligonucleotide
aaacataacagagggatccgctagcggatt

SEQ ID NO: 438328 - DNA, 30 bp, Artificial Sequence
  Synthetic oligonucleotide
agcgggttaagaaatacggctacgcggatt

SEQ ID NO: 438329 - DNA, 30 bp, Artificial Sequence
  Synthetic oligonucleotide
agcacggtcgccttgaccgatgggcggatt

SEQ ID NO: 438330 - DNA, 30 bp, Artificial Sequence
  Synthetic oligonucleotide
tcccgccgctcaggtgaacggacagggatt

SEQ ID NO: 438331 - DNA, 30 bp, Artificial Sequence
  Synthetic oligonucleotide
ctcgtcatctacggggtcggacgagggatt

SEQ ID NO: 438332 - DNA, 30 bp, Artificial Sequence
  Synthetic oligonucleotide
ttagtcgggcgtttggaatattacgggatt

SEQ ID NO: 438333 - DNA, 30 bp, Artificial Sequence
  Synthetic oligonucleotide
gctggttatagctaccatacgaccgggatt

SEQ ID NO: 438334 - DNA, 30 bp, Artificial Sequence
  Synthetic oligonucleotide
cccatgatctgacgtcacaactgcgggatt

SEQ ID NO: 438335 - DNA, 30 bp, Artificial Sequence
  Synthetic oligonucleotide
tatctactacctttaaggacagaggggatt

SEQ ID NO: 438336 - DNA, 30 bp, Artificial Sequence
  Synthetic oligonucleotide
gtctggcggaattcatccctggcggggatt

SEQ ID NO: 438337 - DNA, 30 bp, Artificial Sequence
  Synthetic oligonucleotide
ggtctatggagcgcgccgtgaatggggatt

SEQ ID NO: 438338 - DNA, 30 bp, Artificial Sequence
  Synthetic oligonucleotide
aagtaaccgcggttgttctagcgtgggatt

SEQ ID NO: 438339 - DNA, 30 bp, Artificial Sequence
  Synthetic oligonucleotide
ggtatcccgatctgcctcgccattgggatt

SEQ ID NO: 438340 - DNA, 30 bp, Artificial Sequence
  Synthetic oligonucleotide
ctctaagtcagggactagcctattgggatt

SEQ ID NO: 438341 - DNA, 30 bp, Artificial Sequence
  Synthetic oligonucleotide
gggtttgggaggaacctcgccggatggatt

SEQ ID NO: 438342 - DNA, 30 bp, Artificial Sequence
  Synthetic oligonucleotide
atgattagtgcccataggaggtcctggatt

SEQ ID NO: 438343 - DNA, 30 bp, Artificial Sequence
  Synthetic oligonucleotide
ttccgggttagcttgcataaatagtggatt

SEQ ID NO: 438344 - DNA, 30 bp, Artificial Sequence
  Synthetic oligonucleotide
gatatgtgggcgcttcgcgagtagtggatt

SEQ ID NO: 438345 - DNA, 30 bp, Artificial Sequence
  Synthetic oligonucleotide
ataaattcatttcggggtgccccgtggatt

SEQ ID NO: 438346 - DNA, 30 bp, Artificial Sequence
  Synthetic oligonucleotide
tacctgttgtccctttgcttccggtggatt

SEQ ID NO: 438347 - DNA, 30 bp, Artificial Sequence
  Synthetic oligonucleotide
cttcaaaccgaggcatgctgcgggtggatt

SEQ ID NO: 438348 - DNA, 30 bp, Artificial Sequence
  Synthetic oligonucleotide
cgaggagcctaggcataatatttgtggatt

SEQ ID NO: 438349 - DNA, 30 bp, Artificial Sequence
  Synthetic oligonucleotide
gctgttttgcgtcgtggtattgcttggatt

SEQ ID NO: 438350 - DNA, 30 bp, Artificial Sequence
  Synthetic oligonucleotide
ataagtgaagtcccaggaccaggttggatt

SEQ ID NO: 438351 - DNA, 30 bp, Artificial Sequence
  Synthetic oligonucleotide
gttgcatgtgaagaagtgtttcacatgatt

SEQ ID NO: 438352 - DNA, 30 bp, Artificial Sequence
  Synthetic oligonucleotide
cacaacgcatctaactattcatacatgatt

SEQ ID NO: 438353 - DNA, 30 bp, Artificial Sequence
  Synthetic oligonucleotide
ggggttttatgaatagctttgcgcatgatt

SEQ ID NO: 438354 - DNA, 30 bp, Artificial Sequence
  Synthetic oligonucleotide
gttcgtgcgcggacatcgccggtcatgatt

SEQ ID NO: 438355 - DNA, 30 bp, Artificial Sequence
  Synthetic oligonucleotide
atccgagccctggaagatgctgtcatgatt

SEQ ID NO: 438356 - DNA, 30 bp, Artificial Sequence
  Synthetic oligonucleotide
gttgtacctatgtcgttacacttgatgatt

SEQ ID NO: 438357 - DNA, 30 bp, Artificial Sequence
  Synthetic oligonucleotide
accttacgcaaatccgtgcggccgctgatt

SEQ ID NO: 438358 - DNA, 30 bp, Artificial Sequence
  Synthetic oligonucleotide
gtatctcgacacagcgggcttcggctgatt

SEQ ID NO: 438359 - DNA, 30 bp, Artificial Sequence
  Synthetic oligonucleotide
gttgtcccggacaaggtagttaatctgatt

SEQ ID NO: 438360 - DNA, 30 bp, Artificial Sequence
  Synthetic oligonucleotide
tgacagaggcaaaacatctcgcctctgatt

SEQ ID NO: 438361 - DNA, 30 bp, Artificial Sequence
  Synthetic oligonucleotide
cgcaacctggcgctggcttcgagtctgatt

SEQ ID NO: 438362 - DNA, 30 bp, Artificial Sequence
  Synthetic oligonucleotide
tattggggcgtgtcttctgggtcagtgatt

SEQ ID NO: 438363 - DNA, 30 bp, Artificial Sequence
  Synthetic oligonucleotide
aacgccgttagcaaagactttatagtgatt

SEQ ID NO: 438364 - DNA, 30 bp, Artificial Sequence
  Synthetic oligonucleotide
atcggttcatatttctgctaacacgtgatt

SEQ ID NO: 438365 - DNA, 30 bp, Artificial Sequence
  Synthetic oligonucleotide
accctattacgattaaattttgacgtgatt

SEQ ID NO: 438366 - DNA, 30 bp, Artificial Sequence
  Synthetic oligonucleotide
cattcttgagtgcataaaattatcgtgatt

SEQ ID NO: 438367 - DNA, 30 bp, Artificial Sequence
  Synthetic oligonucleotide
cttcggggtattgattggcaggtcgtgatt

SEQ ID NO: 438368 - DNA, 30 bp, Artificial Sequence
  Synthetic oligonucleotide
ggaataatccgtggtttagaggtcgtgatt

SEQ ID NO: 438369 - DNA, 30 bp, Artificial Sequence
  Synthetic oligonucleotide
acttcgggtccgcttcagaattgcttgatt

SEQ ID NO: 438370 - DNA, 30 bp, Artificial Sequence
  Synthetic oligonucleotide
caagtgttgccgttcatagcactcttgatt

SEQ ID NO: 438371 - DNA, 30 bp, Artificial Sequence
  Synthetic oligonucleotide
ctgcctactccgtgaccctattagttgatt

SEQ ID NO: 438372 - DNA, 30 bp, Artificial Sequence
  Synthetic oligonucleotide
gcagtgtctgagccagtttggaggttgatt

SEQ ID NO: 438373 - DNA, 30 bp, Artificial Sequence
  Synthetic oligonucleotide
ccccgatcgaaccggacaatgtggttgatt

SEQ ID NO: 438374 - DNA, 30 bp, Artificial Sequence
  Synthetic oligonucleotide
cagactcgagatcgcagctgggaaaatatt

SEQ ID NO: 438375 - DNA, 30 bp, Artificial Sequence
  Synthetic oligonucleotide
gggcgtcaaataagttcgaaaggaaatatt

SEQ ID NO: 438376 - DNA, 30 bp, Artificial Sequence
  Synthetic oligonucleotide
tgttattcggttaactcattgatcaatatt

SEQ ID NO: 438377 - DNA, 30 bp, Artificial Sequence
  Synthetic oligonucleotide
agtagatccgttcagatgcgaactaatatt

SEQ ID NO: 438378 - DNA, 30 bp, Artificial Sequence
  Synthetic oligonucleotide
agtgtcttcaaggcaacgtccactaatatt

SEQ ID NO: 438379 - DNA, 30 bp, Artificial Sequence
  Synthetic oligonucleotide
cttcatataatctccgatgcgggccatatt

SEQ ID NO: 438380 - DNA, 30 bp, Artificial Sequence
  Synthetic oligonucleotide
gagcacaaggcggaggtcgttttccatatt

SEQ ID NO: 438381 - DNA, 30 bp, Artificial Sequence
  Synthetic oligonucleotide
ctgtgtatagtctcccagatccggcatatt

SEQ ID NO: 438382 - DNA, 30 bp, Artificial Sequence
  Synthetic oligonucleotide
cgcagtggaaacaccgatactgtgcatatt

SEQ ID NO: 438383 - DNA, 30 bp, Artificial Sequence
  Synthetic oligonucleotide
tgagaattcctgataggggcttatcatatt

SEQ ID NO: 438384 - DNA, 30 bp, Artificial Sequence
  Synthetic oligonucleotide
ctattcttggaaaccaatattcttcatatt

SEQ ID NO: 438385 - DNA, 30 bp, Artificial Sequence
  Synthetic oligonucleotide
ggcgcggaaatatcaggcctgtgagatatt

SEQ ID NO: 438386 - DNA, 30 bp, Artificial Sequence
  Synthetic oligonucleotide
ttgagaaaagcctttgctattaccgatatt

SEQ ID NO: 438387 - DNA, 30 bp, Artificial Sequence
  Synthetic oligonucleotide
ggctcaggacactggtatggcagcgatatt

SEQ ID NO: 438388 - DNA, 30 bp, Artificial Sequence
  Synthetic oligonucleotide
tagaacatatatagaaagtaggtcgatatt

SEQ ID NO: 438389 - DNA, 30 bp, Artificial Sequence
  Synthetic oligonucleotide
gtctgtcttgcgcgtccactgttcgatatt

SEQ ID NO: 438390 - DNA, 30 bp, Artificial Sequence
  Synthetic oligonucleotide
aatactctccgaggaatatcaacggatatt

SEQ ID NO: 438391 - DNA, 30 bp, Artificial Sequence
  Synthetic oligonucleotide
caaagggaccggctggaaggctcggatatt

SEQ ID NO: 438392 - DNA, 30 bp, Artificial Sequence
  Synthetic oligonucleotide
agacctaaatatcgagtagtaatggatatt

SEQ ID NO: 438393 - DNA, 30 bp, Artificial Sequence
  Synthetic oligonucleotide
cgcacccctcatataaaacgattggatatt

SEQ ID NO: 438394 - DNA, 30 bp, Artificial Sequence
  Synthetic oligonucleotide
acccgtacctacctcagtaaatatgatatt

SEQ ID NO: 438395 - DNA, 30 bp, Artificial Sequence
  Synthetic oligonucleotide
aagttaacgtgccccggattgcgtgatatt

SEQ ID NO: 438396 - DNA, 30 bp, Artificial Sequence
  Synthetic oligonucleotide
cttgactatgatcttggtactattgatatt

SEQ ID NO: 438397 - DNA, 30 bp, Artificial Sequence
  Synthetic oligonucleotide
taatggacctagcatgtactcaaatatatt

SEQ ID NO: 438398 - DNA, 30 bp, Artificial Sequence
  Synthetic oligonucleotide
acttggcgaacaatggaccgctaatatatt

SEQ ID NO: 438399 - DNA, 30 bp, Artificial Sequence
  Synthetic oligonucleotide
ccaacatttcgagaaaaccgttcatatatt

SEQ ID NO: 438400 - DNA, 30 bp, Artificial Sequence
  Synthetic oligonucleotide
gctgtgcacgcacctaaaagtcgatatatt

SEQ ID NO: 438401 - DNA, 30 bp, Artificial Sequence
  Synthetic oligonucleotide
cgatcttggcccacaagtctgggatatatt

SEQ ID NO: 438402 - DNA, 30 bp, Artificial Sequence
  Synthetic oligonucleotide
tcatggactgaagcctttggggcctatatt

SEQ ID NO: 438403 - DNA, 30 bp, Artificial Sequence
  Synthetic oligonucleotide
cacaagttaaagtatgtctcagtgtatatt

SEQ ID NO: 438404 - DNA, 30 bp, Artificial Sequence
  Synthetic oligonucleotide
gaatacatcatagcgccgaatgtgtatatt

SEQ ID NO: 438405 - DNA, 30 bp, Artificial Sequence
  Synthetic oligonucleotide
ggaaattcaacagatacggtcttgtatatt

SEQ ID NO: 438406 - DNA, 30 bp, Artificial Sequence
  Synthetic oligonucleotide
ttgggactcgatctgaatctgcattatatt

SEQ ID NO: 438407 - DNA, 30 bp, Artificial Sequence
  Synthetic oligonucleotide
tgctacgatccgattcctcgttattatatt

SEQ ID NO: 438408 - DNA, 30 bp, Artificial Sequence
  Synthetic oligonucleotide
ttcatgggtggtcgttcaggtagttatatt

SEQ ID NO: 438409 - DNA, 30 bp, Artificial Sequence
  Synthetic oligonucleotide
gggataacccgaggatgtgtgatttatatt

SEQ ID NO: 438410 - DNA, 30 bp, Artificial Sequence
  Synthetic oligonucleotide
atcgcaatatagtacgtggttaaaactatt

SEQ ID NO: 438411 - DNA, 30 bp, Artificial Sequence
  Synthetic oligonucleotide
tttcgctacgtaaggggaataccaactatt

SEQ ID NO: 438412 - DNA, 30 bp, Artificial Sequence
  Synthetic oligonucleotide
cgattatgcacgcaaaggctttcaactatt

SEQ ID NO: 438413 - DNA, 30 bp, Artificial Sequence
  Synthetic oligonucleotide
aacagcctactcacggcgatattcactatt

SEQ ID NO: 438414 - DNA, 30 bp, Artificial Sequence
  Synthetic oligonucleotide
cacacgtggtctgacgcttaggctactatt

SEQ ID NO: 438415 - DNA, 30 bp, Artificial Sequence
  Synthetic oligonucleotide
gataaaaaattccatgtaagtaaacctatt

SEQ ID NO: 438416 - DNA, 30 bp, Artificial Sequence
  Synthetic oligonucleotide
gttatatttaacatgcaatgacagcctatt

SEQ ID NO: 438417 - DNA, 30 bp, Artificial Sequence
  Synthetic oligonucleotide
agtagggtcagcaatagttaaatgcctatt

SEQ ID NO: 438418 - DNA, 30 bp, Artificial Sequence
  Synthetic oligonucleotide
ctctgacggatggtgaccacgactcctatt

SEQ ID NO: 438419 - DNA, 30 bp, Artificial Sequence
  Synthetic oligonucleotide
taaacagcctgttttgttgtcagtcctatt

SEQ ID NO: 438420 - DNA, 30 bp, Artificial Sequence
  Synthetic oligonucleotide
atgatgcaccctaggtcacgcccagctatt

SEQ ID NO: 438421 - DNA, 30 bp, Artificial Sequence
  Synthetic oligonucleotide
gcatctcgtgccattttcactatagctatt

SEQ ID NO: 438422 - DNA, 30 bp, Artificial Sequence
  Synthetic oligonucleotide
tgggcttgttcggttacgcttaacgctatt

SEQ ID NO: 438423 - DNA, 30 bp, Artificial Sequence
  Synthetic oligonucleotide
tagctattgttgttgtgaatcgccgctatt

SEQ ID NO: 438424 - DNA, 30 bp, Artificial Sequence
  Synthetic oligonucleotide
ccatggatgcacggtacgtgcagggctatt

SEQ ID NO: 438425 - DNA, 30 bp, Artificial Sequence
  Synthetic oligonucleotide
cgactatgctcagcgttgtcgtgtgctatt

SEQ ID NO: 438426 - DNA, 30 bp, Artificial Sequence
  Synthetic oligonucleotide
atatagcagattgaaagactatgatctatt

SEQ ID NO: 438427 - DNA, 30 bp, Artificial Sequence
  Synthetic oligonucleotide
gtcaaatcagcgccagcattgcgctctatt

SEQ ID NO: 438428 - DNA, 30 bp, Artificial Sequence
  Synthetic oligonucleotide
cttcgtcacatttcagcaccgtgctctatt

SEQ ID NO: 438429 - DNA, 30 bp, Artificial Sequence
  Synthetic oligonucleotide
atggatttgactgctcagctcttctctatt

SEQ ID NO: 438430 - DNA, 30 bp, Artificial Sequence
  Synthetic oligonucleotide
gagatcgaatgttcggtcagatagtctatt

SEQ ID NO: 438431 - DNA, 30 bp, Artificial Sequence
  Synthetic oligonucleotide
ttccttttttcccgtccgaatagttctatt

SEQ ID NO: 438432 - DNA, 30 bp, Artificial Sequence
  Synthetic oligonucleotide
gaggaaataatcagaccggttggttctatt

SEQ ID NO: 438433 - DNA, 30 bp, Artificial Sequence
  Synthetic oligonucleotide
tacagaacttgtcgctagctcacaagtatt

SEQ ID NO: 438434 - DNA, 30 bp, Artificial Sequence
  Synthetic oligonucleotide
ggcctccagcccgtccgtctactaagtatt

SEQ ID NO: 438435 - DNA, 30 bp, Artificial Sequence
  Synthetic oligonucleotide
gttctcagttgttcttattgtagcagtatt

SEQ ID NO: 438436 - DNA, 30 bp, Artificial Sequence
  Synthetic oligonucleotide
agctctgtctgatggcgatccaaacgtatt

SEQ ID NO: 438437 - DNA, 30 bp, Artificial Sequence
  Synthetic oligonucleotide
gaggagaccagtaactcaaagcaacgtatt

SEQ ID NO: 438438 - DNA, 30 bp, Artificial Sequence
  Synthetic oligonucleotide
tgtactactcagaaggattgtgcacgtatt

SEQ ID NO: 438439 - DNA, 30 bp, Artificial Sequence
  Synthetic oligonucleotide
tcacgcattaagttagtgcactcacgtatt

SEQ ID NO: 438440 - DNA, 30 bp, Artificial Sequence
  Synthetic oligonucleotide
taaagcgtcccactaaaactcgtccgtatt

SEQ ID NO: 438441 - DNA, 30 bp, Artificial Sequence
  Synthetic oligonucleotide
gcaagaggccggtatttgatttagcgtatt

SEQ ID NO: 438442 - DNA, 30 bp, Artificial Sequence
  Synthetic oligonucleotide
tagcaaaaaatgcccaatggcgctcgtatt

SEQ ID NO: 438443 - DNA, 30 bp, Artificial Sequence
  Synthetic oligonucleotide
ccggactcaatggcgtagggatgtcgtatt

SEQ ID NO: 438444 - DNA, 30 bp, Artificial Sequence
  Synthetic oligonucleotide
cagtcgatcgtcctttaaagggttcgtatt

SEQ ID NO: 438445 - DNA, 30 bp, Artificial Sequence
  Synthetic oligonucleotide
ctccactatgtactcgacggggttcgtatt

SEQ ID NO: 438446 - DNA, 30 bp, Artificial Sequence
  Synthetic oligonucleotide
agcaagatacccgtcagagtatcaggtatt

SEQ ID NO: 438447 - DNA, 30 bp, Artificial Sequence
  Synthetic oligonucleotide
aaagtactgaaaccagaaccaataggtatt

SEQ ID NO: 438448 - DNA, 30 bp, Artificial Sequence
  Synthetic oligonucleotide
tacccaacggccggtcagcggagcggtatt

SEQ ID NO: 438449 - DNA, 30 bp, Artificial Sequence
  Synthetic oligonucleotide
gatcgggggtaaggcgggccgatcggtatt

SEQ ID NO: 438450 - DNA, 30 bp, Artificial Sequence
  Synthetic oligonucleotide
agacctgtcgcatagagcctagagggtatt

SEQ ID NO: 438451 - DNA, 30 bp, Artificial Sequence
  Synthetic oligonucleotide
gcacccatttgagcccaacagcggggtatt

SEQ ID NO: 438452 - DNA, 30 bp, Artificial Sequence
  Synthetic oligonucleotide
actaagtgcacgggcctctatgggggtatt

SEQ ID NO: 438453 - DNA, 30 bp, Artificial Sequence
  Synthetic oligonucleotide
ggaagcatcccataccctgcaaatggtatt

SEQ ID NO: 438454 - DNA, 30 bp, Artificial Sequence
  Synthetic oligonucleotide
aatgtaaagccagctttactttatggtatt

SEQ ID NO: 438455 - DNA, 30 bp, Artificial Sequence
  Synthetic oligonucleotide
actagaggccaatgcgcggagcctggtatt

SEQ ID NO: 438456 - DNA, 30 bp, Artificial Sequence
  Synthetic oligonucleotide
gatgaaatgttgaagttcgctagtggtatt

SEQ ID NO: 438457 - DNA, 30 bp, Artificial Sequence
  Synthetic oligonucleotide
gaaggaatggatggttccaagagatgtatt

SEQ ID NO: 438458 - DNA, 30 bp, Artificial Sequence
  Synthetic oligonucleotide
atgaggcgatgaattgcgaaccgatgtatt

SEQ ID NO: 438459 - DNA, 30 bp, Artificial Sequence
  Synthetic oligonucleotide
gctcatacaaaactcacggatcgctgtatt

SEQ ID NO: 438460 - DNA, 30 bp, Artificial Sequence
  Synthetic oligonucleotide
ttcaatgagtgttatcgaaggctctgtatt

SEQ ID NO: 438461 - DNA, 30 bp, Artificial Sequence
  Synthetic oligonucleotide
tgctcgcgcattgacgtcttcttctgtatt

SEQ ID NO: 438462 - DNA, 30 bp, Artificial Sequence
  Synthetic oligonucleotide
tgaaggtcatttcgttccgtaaagtgtatt

SEQ ID NO: 438463 - DNA, 30 bp, Artificial Sequence
  Synthetic oligonucleotide
aagattgacgcaaaatgcattatttgtatt

SEQ ID NO: 438464 - DNA, 30 bp, Artificial Sequence
  Synthetic oligonucleotide
cctatgcaggtatgccggatggtaattatt

SEQ ID NO: 438465 - DNA, 30 bp, Artificial Sequence
  Synthetic oligonucleotide
acgctcgggatggcgacgctcagcattatt

SEQ ID NO: 438466 - DNA, 30 bp, Artificial Sequence
  Synthetic oligonucleotide
tatatgcgacagccaggtcgattcattatt

SEQ ID NO: 438467 - DNA, 30 bp, Artificial Sequence
  Synthetic oligonucleotide
tcgggtattctcgaggattcggtgattatt

SEQ ID NO: 438468 - DNA, 30 bp, Artificial Sequence
  Synthetic oligonucleotide
actttcacgatgggaggctatgtgattatt

SEQ ID NO: 438469 - DNA, 30 bp, Artificial Sequence
  Synthetic oligonucleotide
cccgaattaggccaattacctgctattatt

SEQ ID NO: 438470 - DNA, 30 bp, Artificial Sequence
  Synthetic oligonucleotide
tgaaacaggtaatctctgtcaggtattatt

SEQ ID NO: 438471 - DNA, 30 bp, Artificial Sequence
  Synthetic oligonucleotide
ataacgttactatggtactgggttattatt

SEQ ID NO: 438472 - DNA, 30 bp, Artificial Sequence
  Synthetic oligonucleotide
agctttcgtaattttgccatcagacttatt

SEQ ID NO: 438473 - DNA, 30 bp, Artificial Sequence
  Synthetic oligonucleotide
ttttggacgggattagtagtataccttatt

SEQ ID NO: 438474 - DNA, 30 bp, Artificial Sequence
  Synthetic oligonucleotide
ggttcactgtttatcacgattgcccttatt

SEQ ID NO: 438475 - DNA, 30 bp, Artificial Sequence
  Synthetic oligonucleotide
ttgctatatttcagcaacgaaatccttatt

SEQ ID NO: 438476 - DNA, 30 bp, Artificial Sequence
  Synthetic oligonucleotide
cttgccttcagattctagcggaggcttatt

SEQ ID NO: 438477 - DNA, 30 bp, Artificial Sequence
  Synthetic oligonucleotide
ggattattgctcgcatcaaccagagttatt

SEQ ID NO: 438478 - DNA, 30 bp, Artificial Sequence
  Synthetic oligonucleotide
tcctgcgtccaccgggaatgatgagttatt

SEQ ID NO: 438479 - DNA, 30 bp, Artificial Sequence
  Synthetic oligonucleotide
gcggtaatattacttcgcacaaacgttatt

SEQ ID NO: 438480 - DNA, 30 bp, Artificial Sequence
  Synthetic oligonucleotide
acgcctagttagttttgtggcttcgttatt

SEQ ID NO: 438481 - DNA, 30 bp, Artificial Sequence
  Synthetic oligonucleotide
tactggccccatgtatgctgatcggttatt

SEQ ID NO: 438482 - DNA, 30 bp, Artificial Sequence
  Synthetic oligonucleotide
gatagcgaatggtgtgtagccagggttatt

SEQ ID NO: 438483 - DNA, 30 bp, Artificial Sequence
  Synthetic oligonucleotide
caccacagggcggaatcagtactggttatt

SEQ ID NO: 438484 - DNA, 30 bp, Artificial Sequence
  Synthetic oligonucleotide
tttcaattgaaatacacacaatttgttatt

SEQ ID NO: 438485 - DNA, 30 bp, Artificial Sequence
  Synthetic oligonucleotide
aatggttcaatttggttagaaaactttatt

SEQ ID NO: 438486 - DNA, 30 bp, Artificial Sequence
  Synthetic oligonucleotide
ttcaccgcggtaatacaaagtgcctttatt

SEQ ID NO: 438487 - DNA, 30 bp, Artificial Sequence
  Synthetic oligonucleotide
gccaagtcttcatcgatactaacgtttatt

SEQ ID NO: 438488 - DNA, 30 bp, Artificial Sequence
  Synthetic oligonucleotide
acaacgccctaatacctccgtcgttttatt

SEQ ID NO: 438489 - DNA, 30 bp, Artificial Sequence
  Synthetic oligonucleotide
gtcgcagataaagccaagtaacaaaaactt

SEQ ID NO: 438490 - DNA, 30 bp, Artificial Sequence
  Synthetic oligonucleotide
ggctcgcttaggcagccataggcaaaactt

SEQ ID NO: 438491 - DNA, 30 bp, Artificial Sequence
  Synthetic oligonucleotide
actagtattaagcacaaactattaaaactt

SEQ ID NO: 438492 - DNA, 30 bp, Artificial Sequence
  Synthetic oligonucleotide
tgatattagtctgcaggaattcagaaactt

SEQ ID NO: 438493 - DNA, 30 bp, Artificial Sequence
  Synthetic oligonucleotide
ttccggtttgcaacaggttagtagaaactt

SEQ ID NO: 438494 - DNA, 30 bp, Artificial Sequence
  Synthetic oligonucleotide
aactattgggaaatcgctgaatgtaaactt

SEQ ID NO: 438495 - DNA, 31 bp, Artificial Sequence
  Synthetic oligonucleotide
tctgcctcatttgctgttatgtcaacaactt

SEQ ID NO: 438496 - DNA, 30 bp, Artificial Sequence
  Synthetic oligonucleotide
ttgatagtttagcattctatgacacaactt

SEQ ID NO: 438497 - DNA, 30 bp, Artificial Sequence
  Synthetic oligonucleotide
tatgcagtcgacttcagttcgggacaactt

SEQ ID NO: 438498 - DNA, 30 bp, Artificial Sequence
  Synthetic oligonucleotide
gctcccgttcgaggtgttattgtacaactt

SEQ ID NO: 438499 - DNA, 30 bp, Artificial Sequence
  Synthetic oligonucleotide
tagtgcccttctggtcgcaacttacaactt

SEQ ID NO: 438500 - DNA, 30 bp, Artificial Sequence
  Synthetic oligonucleotide
tgtctgtgcgtcggtagagcttcccaactt

SEQ ID NO: 438501 - DNA, 30 bp, Artificial Sequence
  Synthetic oligonucleotide
tatccccagtctaggtccgaattccaactt

SEQ ID NO: 438502 - DNA, 30 bp, Artificial Sequence
  Synthetic oligonucleotide
acgatgcttcaccgaggtctgaggcaactt

SEQ ID NO: 438503 - DNA, 30 bp, Artificial Sequence
  Synthetic oligonucleotide
taactataccagttcccttcaatgcaactt

SEQ ID NO: 438504 - DNA, 30 bp, Artificial Sequence
  Synthetic oligonucleotide
tgttaaggggggggtgggatcaatcaactt

SEQ ID NO: 438505 - DNA, 30 bp, Artificial Sequence
  Synthetic oligonucleotide
aaaagtcgatgaatccgactggatcaactt

SEQ ID NO: 438506 - DNA, 30 bp, Artificial Sequence
  Synthetic oligonucleotide
aggtacgtagagtgtgaagtccgtcaactt

SEQ ID NO: 438507 - DNA, 30 bp, Artificial Sequence
  Synthetic oligonucleotide
ttaagccctaaagcattggcagtagaactt

SEQ ID NO: 438508 - DNA, 30 bp, Artificial Sequence
  Synthetic oligonucleotide
ttcgtacgagttgagttaaaattagaactt

SEQ ID NO: 438509 - DNA, 30 bp, Artificial Sequence
  Synthetic oligonucleotide
gctgtcatcttatctctttccaacgaactt

SEQ ID NO: 438510 - DNA, 30 bp, Artificial Sequence
  Synthetic oligonucleotide
ttacaaggatctacaatggaccccgaactt

SEQ ID NO: 438511 - DNA, 30 bp, Artificial Sequence
  Synthetic oligonucleotide
gcaaacgcctttgaaagccgtgaggaactt

SEQ ID NO: 438512 - DNA, 30 bp, Artificial Sequence
  Synthetic oligonucleotide
accgttagcagttaccgtcgttaggaactt

SEQ ID NO: 438513 - DNA, 30 bp, Artificial Sequence
  Synthetic oligonucleotide
agcattaagcagcactcaccatctgaactt

SEQ ID NO: 438514 - DNA, 31 bp, Artificial Sequence
  Synthetic oligonucleotide
tttgtaaccaagctctgattgattataactt

SEQ ID NO: 438515 - DNA, 30 bp, Artificial Sequence
  Synthetic oligonucleotide
ctccagctgctactctgcatgcattaactt

SEQ ID NO: 438516 - DNA, 30 bp, Artificial Sequence
  Synthetic oligonucleotide
tggcgcgagcgttgcgtatagctaacactt

SEQ ID NO: 438517 - DNA, 30 bp, Artificial Sequence
  Synthetic oligonucleotide
gataacgggctaactttgtggtcgacactt

SEQ ID NO: 438518 - DNA, 30 bp, Artificial Sequence
  Synthetic oligonucleotide
actaccgttagtccaatcagaattacactt

SEQ ID NO: 438519 - DNA, 30 bp, Artificial Sequence
  Synthetic oligonucleotide
tgtttgtgattagaagtggaagttacactt

SEQ ID NO: 438520 - DNA, 30 bp, Artificial Sequence
  Synthetic oligonucleotide
aacacacaggtcggcgcagtaacaccactt

SEQ ID NO: 438521 - DNA, 30 bp, Artificial Sequence
  Synthetic oligonucleotide
gagaactgtcgcaagccctgtcctccactt

SEQ ID NO: 438522 - DNA, 30 bp, Artificial Sequence
  Synthetic oligonucleotide
tctactccagtcaatcacccggttccactt

SEQ ID NO: 438523 - DNA, 30 bp, Artificial Sequence
  Synthetic oligonucleotide
aatggaaacttcacattcagccaagcactt

SEQ ID NO: 438524 - DNA, 30 bp, Artificial Sequence
  Synthetic oligonucleotide
cccgggactcaaattatcggccgagcactt

SEQ ID NO: 438525 - DNA, 30 bp, Artificial Sequence
  Synthetic oligonucleotide
ggaacttattccgttgcgacccccgcactt

SEQ ID NO: 438526 - DNA, 30 bp, Artificial Sequence
  Synthetic oligonucleotide
tgaataaatccctccatagaagccgcactt

SEQ ID NO: 438527 - DNA, 30 bp, Artificial Sequence
  Synthetic oligonucleotide
acctaagctacgtattgaaagcgcgcactt

SEQ ID NO: 438528 - DNA, 30 bp, Artificial Sequence
  Synthetic oligonucleotide
tccgcacgtggttttttcggatgggcactt

SEQ ID NO: 438529 - DNA, 30 bp, Artificial Sequence
  Synthetic oligonucleotide
atgtaaactatcaacttgtacgtggcactt

SEQ ID NO: 438530 - DNA, 30 bp, Artificial Sequence
  Synthetic oligonucleotide
accgcccccaacaccctacaaaatgcactt

SEQ ID NO: 438531 - DNA, 30 bp, Artificial Sequence
  Synthetic oligonucleotide
caccatgacgttctagcgtcagatgcactt

SEQ ID NO: 438532 - DNA, 30 bp, Artificial Sequence
  Synthetic oligonucleotide
tcccgtgggtctcctcctggttatgcactt

SEQ ID NO: 438533 - DNA, 30 bp, Artificial Sequence
  Synthetic oligonucleotide
atctgtataaccgagacacatactgcactt

SEQ ID NO: 438534 - DNA, 30 bp, Artificial Sequence
  Synthetic oligonucleotide
ttaaagggtactttggtggtggtatcactt

SEQ ID NO: 438535 - DNA, 30 bp, Artificial Sequence
  Synthetic oligonucleotide
gtttaacgagactttagttctacctcactt

SEQ ID NO: 438536 - DNA, 30 bp, Artificial Sequence
  Synthetic oligonucleotide
tcctacttaacatacggagaggcctcactt

SEQ ID NO: 438537 - DNA, 30 bp, Artificial Sequence
  Synthetic oligonucleotide
ataatctgtgggacgggttctcgttcactt

SEQ ID NO: 438538 - DNA, 29 bp, Artificial Sequence
  Synthetic oligonucleotide
gaaggccgcagtcgctccgtcgttcactt

SEQ ID NO: 438539 - DNA, 30 bp, Artificial Sequence
  Synthetic oligonucleotide
gccaacccagttgctaaactcggaagactt

SEQ ID NO: 438540 - DNA, 30 bp, Artificial Sequence
  Synthetic oligonucleotide
cacacccccgtttcactaatgttaagactt

SEQ ID NO: 438541 - DNA, 30 bp, Artificial Sequence
  Synthetic oligonucleotide
taaaaagtgtcgttgggtacccccagactt

SEQ ID NO: 438542 - DNA, 30 bp, Artificial Sequence
  Synthetic oligonucleotide
aaaagtgtgtggcttgtttgttagagactt

SEQ ID NO: 438543 - DNA, 30 bp, Artificial Sequence
  Synthetic oligonucleotide
tctctctgctcaagattatgtctacgactt

SEQ ID NO: 438544 - DNA, 30 bp, Artificial Sequence
  Synthetic oligonucleotide
cgcaataccggtgcccttctcaggcgactt

SEQ ID NO: 438545 - DNA, 29 bp, Artificial Sequence
  Synthetic oligonucleotide
ctctgattttggggttgaggctgcgactt

SEQ ID NO: 438546 - DNA, 30 bp, Artificial Sequence
  Synthetic oligonucleotide
agtgctacagcacaggatccaaatcgactt

SEQ ID NO: 438547 - DNA, 30 bp, Artificial Sequence
  Synthetic oligonucleotide
atcccctcgcaggagactaggcatcgactt

SEQ ID NO: 438548 - DNA, 30 bp, Artificial Sequence
  Synthetic oligonucleotide
tggcgcgatggactggctcgatatcgactt

SEQ ID NO: 438549 - DNA, 30 bp, Artificial Sequence
  Synthetic oligonucleotide
acggcacctattagaacttcgtctcgactt

SEQ ID NO: 438550 - DNA, 30 bp, Artificial Sequence
  Synthetic oligonucleotide
ttaacgcaactgtctcaatcatttcgactt

SEQ ID NO: 438551 - DNA, 30 bp, Artificial Sequence
  Synthetic oligonucleotide
gttttcggcaagagcgtgcaactaggactt

SEQ ID NO: 438552 - DNA, 30 bp, Artificial Sequence
  Synthetic oligonucleotide
gcccagttgagaagctaggtactaggactt

SEQ ID NO: 438553 - DNA, 30 bp, Artificial Sequence
  Synthetic oligonucleotide
gccggacactgagtatcgcgggccggactt

SEQ ID NO: 438554 - DNA, 30 bp, Artificial Sequence
  Synthetic oligonucleotide
ttgcaatcacaatcttccagctggggactt

SEQ ID NO: 438555 - DNA, 30 bp, Artificial Sequence
  Synthetic oligonucleotide
cagcacctggagataataagtgatggactt

SEQ ID NO: 438556 - DNA, 30 bp, Artificial Sequence
  Synthetic oligonucleotide
tggtagcattctcgtaatatgcctggactt

SEQ ID NO: 438557 - DNA, 30 bp, Artificial Sequence
  Synthetic oligonucleotide
caagcttattcggagtatcattgtggactt

SEQ ID NO: 438558 - DNA, 30 bp, Artificial Sequence
  Synthetic oligonucleotide
ccaaaagattttcagacaaagattggactt

SEQ ID NO: 438559 - DNA, 30 bp, Artificial Sequence
  Synthetic oligonucleotide
gtgttactgtgccccgcatacagctgactt

SEQ ID NO: 438560 - DNA, 30 bp, Artificial Sequence
  Synthetic oligonucleotide
tgatggcggtgtaggcacaagtgctgactt

SEQ ID NO: 438561 - DNA, 30 bp, Artificial Sequence
  Synthetic oligonucleotide
ggaacattgcacgagcgccgctagtgactt

SEQ ID NO: 438562 - DNA, 30 bp, Artificial Sequence
  Synthetic oligonucleotide
agcctcctttgacatgattagtagtgactt

SEQ ID NO: 438563 - DNA, 30 bp, Artificial Sequence
  Synthetic oligonucleotide
tgaatcttagctccggtaaatatgtgactt

SEQ ID NO: 438564 - DNA, 30 bp, Artificial Sequence
  Synthetic oligonucleotide
aagctaaagttacgggttccgctaatactt

SEQ ID NO: 438565 - DNA, 30 bp, Artificial Sequence
  Synthetic oligonucleotide
gaaagtggttcacatgaatcagtaatactt

SEQ ID NO: 438566 - DNA, 30 bp, Artificial Sequence
  Synthetic oligonucleotide
aaaaatcggaggaatatctatgtaatactt

SEQ ID NO: 438567 - DNA, 30 bp, Artificial Sequence
  Synthetic oligonucleotide
gaatctgtgcaagcggtcttggacatactt

SEQ ID NO: 438568 - DNA, 30 bp, Artificial Sequence
  Synthetic oligonucleotide
cctatctgatgtttggtactgtgcatactt

SEQ ID NO: 438569 - DNA, 30 bp, Artificial Sequence
  Synthetic oligonucleotide
gctaatggcgctacattctggttcatactt

SEQ ID NO: 438570 - DNA, 30 bp, Artificial Sequence
  Synthetic oligonucleotide
tggtttctcaatacccctaccacgatactt

SEQ ID NO: 438571 - DNA, 30 bp, Artificial Sequence
  Synthetic oligonucleotide
gtacaatactttgacttagaagggatactt

SEQ ID NO: 438572 - DNA, 30 bp, Artificial Sequence
  Synthetic oligonucleotide
cgagtgcgctgaattgcaagcgggatactt

SEQ ID NO: 438573 - DNA, 30 bp, Artificial Sequence
  Synthetic oligonucleotide
aatatggtttcgaccaaagccttgatactt

SEQ ID NO: 438574 - DNA, 30 bp, Artificial Sequence
  Synthetic oligonucleotide
aaaccgcgtatgtcggtgcggtctatactt

SEQ ID NO: 438575 - DNA, 30 bp, Artificial Sequence
  Synthetic oligonucleotide
tttgtctggtgctcctagatccgtatactt

SEQ ID NO: 438576 - DNA, 30 bp, Artificial Sequence
  Synthetic oligonucleotide
tggctcatctatcgggatttcgtactactt

SEQ ID NO: 438577 - DNA, 29 bp, Artificial Sequence
  Synthetic oligonucleotide
aacgcaagagtcgcaagacggacctactt

SEQ ID NO: 438578 - DNA, 30 bp, Artificial Sequence
  Synthetic oligonucleotide
aacaagcgttgtattagggggaagctactt

SEQ ID NO: 438579 - DNA, 30 bp, Artificial Sequence
  Synthetic oligonucleotide
ccttactaaggcctaggtccggagctactt

SEQ ID NO: 438580 - DNA, 30 bp, Artificial Sequence
  Synthetic oligonucleotide
gcgggaaacttatatgcggttacgctactt

SEQ ID NO: 438581 - DNA, 30 bp, Artificial Sequence
  Synthetic oligonucleotide
accttcgggtataccacccgcccgctactt

SEQ ID NO: 438582 - DNA, 30 bp, Artificial Sequence
  Synthetic oligonucleotide
gttaagtagctgcggaattcgaggctactt

SEQ ID NO: 438583 - DNA, 31 bp, Artificial Sequence
  Synthetic oligonucleotide
catcggctcaaacagggtacgcagcgtactt

SEQ ID NO: 438584 - DNA, 30 bp, Artificial Sequence
  Synthetic oligonucleotide
ggcaaagcgggcgtagaccctagcgtactt

SEQ ID NO: 438585 - DNA, 30 bp, Artificial Sequence
  Synthetic oligonucleotide
ctggtgtaaaatggcggcccgatcgtactt

SEQ ID NO: 438586 - DNA, 30 bp, Artificial Sequence
  Synthetic oligonucleotide
tcaccgccggcggatctgttctaggtactt

SEQ ID NO: 438587 - DNA, 30 bp, Artificial Sequence
  Synthetic oligonucleotide
ttcatccacgtcgaaaaaagtacggtactt

SEQ ID NO: 438588 - DNA, 30 bp, Artificial Sequence
  Synthetic oligonucleotide
aaactatacttcacgtgtctggatgtactt

SEQ ID NO: 438589 - DNA, 30 bp, Artificial Sequence
  Synthetic oligonucleotide
ttcgtcccggtcggtaataatgttgtactt

SEQ ID NO: 438590 - DNA, 30 bp, Artificial Sequence
  Synthetic oligonucleotide
aacaggagatattgcgtcataatattactt

SEQ ID NO: 438591 - DNA, 30 bp, Artificial Sequence
  Synthetic oligonucleotide
gattagagccttgaatggcaacccttactt

SEQ ID NO: 438592 - DNA, 30 bp, Artificial Sequence
  Synthetic oligonucleotide
gtatgaagagaccatatggttatcttactt

SEQ ID NO: 438593 - DNA, 30 bp, Artificial Sequence
  Synthetic oligonucleotide
agaaactggaaagggcgcaaatgtttactt

SEQ ID NO: 438594 - DNA, 30 bp, Artificial Sequence
  Synthetic oligonucleotide
gcaactccccctcgctctttcccaaacctt

SEQ ID NO: 438595 - DNA, 30 bp, Artificial Sequence
  Synthetic oligonucleotide
ggcgctgccgagtcggttttcgcaaacctt

SEQ ID NO: 438596 - DNA, 30 bp, Artificial Sequence
  Synthetic oligonucleotide
tgttaaccttatgtgcatgtaagaaacctt

SEQ ID NO: 438597 - DNA, 30 bp, Artificial Sequence
  Synthetic oligonucleotide
aatggggagaattgccgcttatgaaacctt

SEQ ID NO: 438598 - DNA, 30 bp, Artificial Sequence
  Synthetic oligonucleotide
ccggccacgctctgacaccgaagcaacctt

SEQ ID NO: 438599 - DNA, 30 bp, Artificial Sequence
  Synthetic oligonucleotide
ccctcagtgcagtttttaggaagcaacctt

SEQ ID NO: 438600 - DNA, 30 bp, Artificial Sequence
  Synthetic oligonucleotide
gtaaataaatctggtcaaagcccgaacctt

SEQ ID NO: 438601 - DNA, 30 bp, Artificial Sequence
  Synthetic oligonucleotide
attagggtgttcgctgtgttgaggaacctt

SEQ ID NO: 438602 - DNA, 30 bp, Artificial Sequence
  Synthetic oligonucleotide
cccatttgataaaggtattttgggaacctt

SEQ ID NO: 438603 - DNA, 30 bp, Artificial Sequence
  Synthetic oligonucleotide
cgctgggcccccgcgtcttgcgctaacctt

SEQ ID NO: 438604 - DNA, 30 bp, Artificial Sequence
  Synthetic oligonucleotide
tatgataacgcccggttcacttttaacctt

SEQ ID NO: 438605 - DNA, 30 bp, Artificial Sequence
  Synthetic oligonucleotide
tagccactctaagcggtcgtaccgcacctt

SEQ ID NO: 438606 - DNA, 30 bp, Artificial Sequence
  Synthetic oligonucleotide
actttcaaatcactcctgtattgtcacctt

SEQ ID NO: 438607 - DNA, 30 bp, Artificial Sequence
  Synthetic oligonucleotide
taaaagttaccctcatagattcttcacctt

SEQ ID NO: 438608 - DNA, 30 bp, Artificial Sequence
  Synthetic oligonucleotide
gcggacgagtgttttgcgtcagaagacctt

SEQ ID NO: 438609 - DNA, 30 bp, Artificial Sequence
  Synthetic oligonucleotide
tagcttgacgccaagcaataattagacctt

SEQ ID NO: 438610 - DNA, 30 bp, Artificial Sequence
  Synthetic oligonucleotide
gttatatccctccacctcggtaacgacctt

SEQ ID NO: 438611 - DNA, 30 bp, Artificial Sequence
  Synthetic oligonucleotide
catctattttttctgagcaggatcgacctt

SEQ ID NO: 438612 - DNA, 31 bp, Artificial Sequence
  Synthetic oligonucleotide
cagctccggagctcgcagtggtcaggacctt

SEQ ID NO: 438613 - DNA, 30 bp, Artificial Sequence
  Synthetic oligonucleotide
cgagctgaattgtcagtagggcttgacctt

SEQ ID NO: 438614 - DNA, 30 bp, Artificial Sequence
  Synthetic oligonucleotide
cgatccctttctgtgtcactcgaatacctt

SEQ ID NO: 438615 - DNA, 30 bp, Artificial Sequence
  Synthetic oligonucleotide
cggtttaatgcatcgtacaaatcatacctt

SEQ ID NO: 438616 - DNA, 30 bp, Artificial Sequence
  Synthetic oligonucleotide
tttaagcatgacaagatcttttcctacctt

SEQ ID NO: 438617 - DNA, 30 bp, Artificial Sequence
  Synthetic oligonucleotide
tggacaagtacaacgtaataacagtacctt

SEQ ID NO: 438618 - DNA, 30 bp, Artificial Sequence
  Synthetic oligonucleotide
gcaaataattagagagttactatgtacctt

SEQ ID NO: 438619 - DNA, 30 bp, Artificial Sequence
  Synthetic oligonucleotide
tcgatggttcccatcggccacttgtacctt

SEQ ID NO: 438620 - DNA, 30 bp, Artificial Sequence
  Synthetic oligonucleotide
ccaaatactgggccgcccgaataaaccctt

SEQ ID NO: 438621 - DNA, 30 bp, Artificial Sequence
  Synthetic oligonucleotide
ggatatgtggctgaacaaggggccaccctt

SEQ ID NO: 438622 - DNA, 30 bp, Artificial Sequence
  Synthetic oligonucleotide
ccgtcgcctgatcgaagatgaaagaccctt

SEQ ID NO: 438623 - DNA, 30 bp, Artificial Sequence
  Synthetic oligonucleotide
ttaaccgacgacccggagatgtaacccctt

SEQ ID NO: 438624 - DNA, 30 bp, Artificial Sequence
  Synthetic oligonucleotide
tcttgtatcacataaatgcaccgacccctt

SEQ ID NO: 438625 - DNA, 30 bp, Artificial Sequence
  Synthetic oligonucleotide
actaagtgtatgtccgaccaaggacccctt

SEQ ID NO: 438626 - DNA, 30 bp, Artificial Sequence
  Synthetic oligonucleotide
tataaaatcctcgtcgatgacgggcccctt

SEQ ID NO: 438627 - DNA, 30 bp, Artificial Sequence
  Synthetic oligonucleotide
tatctgcctaaggagaagatataagccctt

SEQ ID NO: 438628 - DNA, 30 bp, Artificial Sequence
  Synthetic oligonucleotide
gcaaaacatggcgatcctgtctgagccctt

SEQ ID NO: 438629 - DNA, 30 bp, Artificial Sequence
  Synthetic oligonucleotide
cgattacccgcccgggtgcgatccgccctt

SEQ ID NO: 438630 - DNA, 30 bp, Artificial Sequence
  Synthetic oligonucleotide
gtcgctcgaaacttgcgcagcttggccctt

SEQ ID NO: 438631 - DNA, 30 bp, Artificial Sequence
  Synthetic oligonucleotide
gggacctagcccgtgcgctggtatgccctt

SEQ ID NO: 438632 - DNA, 30 bp, Artificial Sequence
  Synthetic oligonucleotide
attacttatggaatgcgcgttcgatccctt

SEQ ID NO: 438633 - DNA, 30 bp, Artificial Sequence
  Synthetic oligonucleotide
gaatcggtacgaagttagtctaagtccctt

SEQ ID NO: 438634 - DNA, 30 bp, Artificial Sequence
  Synthetic oligonucleotide
gctatgccaaatcgcaactgccagtccctt

SEQ ID NO: 438635 - DNA, 30 bp, Artificial Sequence
  Synthetic oligonucleotide
atttctgggaccgtcagcgcggtgtccctt

SEQ ID NO: 438636 - DNA, 30 bp, Artificial Sequence
  Synthetic oligonucleotide
tacgtatttagtacgggtttactttccctt

SEQ ID NO: 438637 - DNA, 30 bp, Artificial Sequence
  Synthetic oligonucleotide
tggactcctggtcttccagtttaaagcctt

SEQ ID NO: 438638 - DNA, 30 bp, Artificial Sequence
  Synthetic oligonucleotide
gtacgcaatcctcaacgcacactaagcctt

SEQ ID NO: 438639 - DNA, 30 bp, Artificial Sequence
  Synthetic oligonucleotide
atagtacttgactctgcctagcgcagcctt

SEQ ID NO: 438640 - DNA, 30 bp, Artificial Sequence
  Synthetic oligonucleotide
gagataaaattagaaataacccagagcctt

SEQ ID NO: 438641 - DNA, 30 bp, Artificial Sequence
  Synthetic oligonucleotide
actagaaaagacacccgccgggagagcctt

SEQ ID NO: 438642 - DNA, 30 bp, Artificial Sequence
  Synthetic oligonucleotide
gtattcgggatatatttgaatgcgagcctt

SEQ ID NO: 438643 - DNA, 30 bp, Artificial Sequence
  Synthetic oligonucleotide
ataagattacgggggctaggtgtgagcctt

SEQ ID NO: 438644 - DNA, 30 bp, Artificial Sequence
  Synthetic oligonucleotide
cgcgaacggggacccatgtgtttgagcctt

SEQ ID NO: 438645 - DNA, 30 bp, Artificial Sequence
  Synthetic oligonucleotide
gggaaggctgggtttttagcgattagcctt

SEQ ID NO: 438646 - DNA, 30 bp, Artificial Sequence
  Synthetic oligonucleotide
tacaagtaataaaaaggggttcttagcctt

SEQ ID NO: 438647 - DNA, 30 bp, Artificial Sequence
  Synthetic oligonucleotide
atacgcctcaacaagcttattaaacgcctt

SEQ ID NO: 438648 - DNA, 30 bp, Artificial Sequence
  Synthetic oligonucleotide
ataaaacataagtgtactatactacgcctt

SEQ ID NO: 438649 - DNA, 30 bp, Artificial Sequence
  Synthetic oligonucleotide
tagttcaaagccaaaagcggctcccgcctt

SEQ ID NO: 438650 - DNA, 30 bp, Artificial Sequence
  Synthetic oligonucleotide
ggtaaaatataaatcgtagactgccgcctt

SEQ ID NO: 438651 - DNA, 30 bp, Artificial Sequence
  Synthetic oligonucleotide
ggcataggtagtcgtacattttctcgcctt

SEQ ID NO: 438652 - DNA, 30 bp, Artificial Sequence
  Synthetic oligonucleotide
atatttaaccggttaaacatagaaggcctt

SEQ ID NO: 438653 - DNA, 30 bp, Artificial Sequence
  Synthetic oligonucleotide
cctattgtagcttggcgaacgtaaggcctt

SEQ ID NO: 438654 - DNA, 30 bp, Artificial Sequence
  Synthetic oligonucleotide
gatggatgtaccttttctgcattaggcctt

SEQ ID NO: 438655 - DNA, 30 bp, Artificial Sequence
  Synthetic oligonucleotide
gaacctaactgccgtgtgagggatggcctt

SEQ ID NO: 438656 - DNA, 30 bp, Artificial Sequence
  Synthetic oligonucleotide
tgctcctagacagcgaaggcacgtggcctt

SEQ ID NO: 438657 - DNA, 30 bp, Artificial Sequence
  Synthetic oligonucleotide
aaaccgttattggtggaaagttcatgcctt

SEQ ID NO: 438658 - DNA, 30 bp, Artificial Sequence
  Synthetic oligonucleotide
aaagcacatacgcgcccagcatcttgcctt

SEQ ID NO: 438659 - DNA, 30 bp, Artificial Sequence
  Synthetic oligonucleotide
atagaacgacgttgtaaatggctaatcctt

SEQ ID NO: 438660 - DNA, 30 bp, Artificial Sequence
  Synthetic oligonucleotide
cattatggtactgtcgtttgactcatcctt

SEQ ID NO: 438661 - DNA, 30 bp, Artificial Sequence
  Synthetic oligonucleotide
tcagcttccgccctacagctccgtatcctt

SEQ ID NO: 438662 - DNA, 30 bp, Artificial Sequence
  Synthetic oligonucleotide
ataccttcgagggcgctaccaaaactcctt

SEQ ID NO: 438663 - DNA, 30 bp, Artificial Sequence
  Synthetic oligonucleotide
gaacatagagataaattgttggtactcctt

SEQ ID NO: 438664 - DNA, 30 bp, Artificial Sequence
  Synthetic oligonucleotide
tcatcggcctctcctgtgcgaggcctcctt

SEQ ID NO: 438665 - DNA, 30 bp, Artificial Sequence
  Synthetic oligonucleotide
cgcacgagaaagtgtactttttgcctcctt

SEQ ID NO: 438666 - DNA, 30 bp, Artificial Sequence
  Synthetic oligonucleotide
tcgactgcaattacagggcatcagctcctt

SEQ ID NO: 438667 - DNA, 30 bp, Artificial Sequence
  Synthetic oligonucleotide
gtatattatccaacgtgccgggtgctcctt

SEQ ID NO: 438668 - DNA, 30 bp, Artificial Sequence
  Synthetic oligonucleotide
gggagtttcgcgaaggttcgaactctcctt

SEQ ID NO: 438669 - DNA, 30 bp, Artificial Sequence
  Synthetic oligonucleotide
ggaatagggtctaaaaagcactcagtcctt

SEQ ID NO: 438670 - DNA, 30 bp, Artificial Sequence
  Synthetic oligonucleotide
tgcgaagcctgtgagtgcttgaccgtcctt

SEQ ID NO: 438671 - DNA, 30 bp, Artificial Sequence
  Synthetic oligonucleotide
atcgccgcgaaactgagcataacggtcctt

SEQ ID NO: 438672 - DNA, 30 bp, Artificial Sequence
  Synthetic oligonucleotide
agatccggccccaagcaccatgcggtcctt

SEQ ID NO: 438673 - DNA, 30 bp, Artificial Sequence
  Synthetic oligonucleotide
cagttccgagtgacgtaatctcgggtcctt

SEQ ID NO: 438674 - DNA, 30 bp, Artificial Sequence
  Synthetic oligonucleotide
acagacggatgggtaacggctggggtcctt

SEQ ID NO: 438675 - DNA, 30 bp, Artificial Sequence
  Synthetic oligonucleotide
aataggataaatgggatatgatgtgtcctt

SEQ ID NO: 438676 - DNA, 30 bp, Artificial Sequence
  Synthetic oligonucleotide
tgcgagcccctactggtcttacgattcctt

SEQ ID NO: 438677 - DNA, 30 bp, Artificial Sequence
  Synthetic oligonucleotide
ttatcgcgggtgtcacggagggccttcctt

SEQ ID NO: 438678 - DNA, 30 bp, Artificial Sequence
  Synthetic oligonucleotide
gtcgggtttctacgagcctctctcttcctt

SEQ ID NO: 438679 - DNA, 30 bp, Artificial Sequence
  Synthetic oligonucleotide
tgcgtatcgagattcccgtgaaagttcctt

SEQ ID NO: 438680 - DNA, 30 bp, Artificial Sequence
  Synthetic oligonucleotide
ttggtcatgcccagcccaccagcgttcctt

SEQ ID NO: 438681 - DNA, 29 bp, Artificial Sequence
  Synthetic oligonucleotide
gtttgagcttattacgacccgatttcctt

SEQ ID NO: 438682 - DNA, 30 bp, Artificial Sequence
  Synthetic oligonucleotide
aggacaatctgatggcgagccgttttcctt

SEQ ID NO: 438683 - DNA, 30 bp, Artificial Sequence
  Synthetic oligonucleotide
gcgtttcttcgattgtcatgcacaaagctt

SEQ ID NO: 438684 - DNA, 30 bp, Artificial Sequence
  Synthetic oligonucleotide
gccggtaaaagactaggaacggacaagctt

SEQ ID NO: 438685 - DNA, 30 bp, Artificial Sequence
  Synthetic oligonucleotide
ttgtgagtgcgacaggcccgtacgaagctt

SEQ ID NO: 438686 - DNA, 30 bp, Artificial Sequence
  Synthetic oligonucleotide
aaacttttcgcccaatggttgtggaagctt

SEQ ID NO: 438687 - DNA, 30 bp, Artificial Sequence
  Synthetic oligonucleotide
gccggtcgctctcgtaagcagtctaagctt

SEQ ID NO: 438688 - DNA, 30 bp, Artificial Sequence
  Synthetic oligonucleotide
cgatgcagcgtatatgtataccttaagctt

SEQ ID NO: 438689 - DNA, 30 bp, Artificial Sequence
  Synthetic oligonucleotide
gtaattatgcggacgaggccgacacagctt

SEQ ID NO: 438690 - DNA, 30 bp, Artificial Sequence
  Synthetic oligonucleotide
aaccttttaacaataccccgactacagctt

SEQ ID NO: 438691 - DNA, 30 bp, Artificial Sequence
  Synthetic oligonucleotide
agcaattagacgatttttaaggagcagctt

SEQ ID NO: 438692 - DNA, 30 bp, Artificial Sequence
  Synthetic oligonucleotide
attggataatggcgacccggacggcagctt

SEQ ID NO: 438693 - DNA, 30 bp, Artificial Sequence
  Synthetic oligonucleotide
cattcccgatagagcttgtttcatcagctt

SEQ ID NO: 438694 - DNA, 30 bp, Artificial Sequence
  Synthetic oligonucleotide
atccgtaatccgtcacattttcatcagctt

SEQ ID NO: 438695 - DNA, 30 bp, Artificial Sequence
  Synthetic oligonucleotide
cacggtgtagccggcgacacgacagagctt

SEQ ID NO: 438696 - DNA, 30 bp, Artificial Sequence
  Synthetic oligonucleotide
cgcggcttgttggctcatgaatacgagctt

SEQ ID NO: 438697 - DNA, 30 bp, Artificial Sequence
  Synthetic oligonucleotide
ctaaagggcgctatttggcatcgcgagctt

SEQ ID NO: 438698 - DNA, 30 bp, Artificial Sequence
  Synthetic oligonucleotide
gcgaaggtggtctgaattcagggcgagctt

SEQ ID NO: 438699 - DNA, 30 bp, Artificial Sequence
  Synthetic oligonucleotide
cgaggggcaatactatacttggaggagctt

SEQ ID NO: 438700 - DNA, 30 bp, Artificial Sequence
  Synthetic oligonucleotide
tacatatcatcactattcctttaggagctt

SEQ ID NO: 438701 - DNA, 30 bp, Artificial Sequence
  Synthetic oligonucleotide
agtggtagtcgtcagggaagctgtgagctt

SEQ ID NO: 438702 - DNA, 30 bp, Artificial Sequence
  Synthetic oligonucleotide
taatcgtttgttagggaacagattgagctt

SEQ ID NO: 438703 - DNA, 30 bp, Artificial Sequence
  Synthetic oligonucleotide
ttattccgcgggttcggctgaatatagctt

SEQ ID NO: 438704 - DNA, 30 bp, Artificial Sequence
  Synthetic oligonucleotide
ttagggttggtctcttgcactatatagctt

SEQ ID NO: 438705 - DNA, 30 bp, Artificial Sequence
  Synthetic oligonucleotide
gggtgaaatactgcatctactctatagctt

SEQ ID NO: 438706 - DNA, 30 bp, Artificial Sequence
  Synthetic oligonucleotide
cgcacttttaactgctagctcgtctagctt

SEQ ID NO: 438707 - DNA, 30 bp, Artificial Sequence
  Synthetic oligonucleotide
aattgcgctacgttcgcggctaagtagctt

SEQ ID NO: 438708 - DNA, 30 bp, Artificial Sequence
  Synthetic oligonucleotide
aatcattttcgtaagagtttctggtagctt

SEQ ID NO: 438709 - DNA, 30 bp, Artificial Sequence
  Synthetic oligonucleotide
aggaactacatttcttatctgccttagctt

SEQ ID NO: 438710 - DNA, 30 bp, Artificial Sequence
  Synthetic oligonucleotide
tggtatctctcgctggacacgtgttagctt

SEQ ID NO: 438711 - DNA, 29 bp, Artificial Sequence
  Synthetic oligonucleotide
gtattaaaaatacaaatccacagacgctt

SEQ ID NO: 438712 - DNA, 30 bp, Artificial Sequence
  Synthetic oligonucleotide
gagatgtaataagattgcccaacgacgctt

SEQ ID NO: 438713 - DNA, 30 bp, Artificial Sequence
  Synthetic oligonucleotide
ggtgggcaaataattgctctatatacgctt

SEQ ID NO: 438714 - DNA, 30 bp, Artificial Sequence
  Synthetic oligonucleotide
acgtcccacagctcgatgagcgccccgctt

SEQ ID NO: 438715 - DNA, 30 bp, Artificial Sequence
  Synthetic oligonucleotide
attatgtgtaggtttggctacttcccgctt

SEQ ID NO: 438716 - DNA, 30 bp, Artificial Sequence
  Synthetic oligonucleotide
cgaccttaaatatgcaaatataagccgctt

SEQ ID NO: 438717 - DNA, 30 bp, Artificial Sequence
  Synthetic oligonucleotide
tgtcaaagggatttgtgatctccgccgctt

SEQ ID NO: 438718 - DNA, 30 bp, Artificial Sequence
  Synthetic oligonucleotide
ggagatttcatgtctaagaataggccgctt

SEQ ID NO: 438719 - DNA, 30 bp, Artificial Sequence
  Synthetic oligonucleotide
attaagtaggacccctgaggttggccgctt

SEQ ID NO: 438720 - DNA, 30 bp, Artificial Sequence
  Synthetic oligonucleotide
aacattttacacaggaataatcatccgctt

SEQ ID NO: 438721 - DNA, 30 bp, Artificial Sequence
  Synthetic oligonucleotide
gacttatagtctggattagcttctccgctt

SEQ ID NO: 438722 - DNA, 30 bp, Artificial Sequence
  Synthetic oligonucleotide
gtcgggtcatttcccgtgtccacagcgctt

SEQ ID NO: 438723 - DNA, 30 bp, Artificial Sequence
  Synthetic oligonucleotide
gttttggtcagtctaagagctacggcgctt

SEQ ID NO: 438724 - DNA, 30 bp, Artificial Sequence
  Synthetic oligonucleotide
aagcaggcgcacatagcgaattgtgcgctt

SEQ ID NO: 438725 - DNA, 29 bp, Artificial Sequence
  Synthetic oligonucleotide
tggcattcaagtcattagcctttgcgctt

SEQ ID NO: 438726 - DNA, 30 bp, Artificial Sequence
  Synthetic oligonucleotide
aggtttatcttgccggaggatatatcgctt

SEQ ID NO: 438727 - DNA, 30 bp, Artificial Sequence
  Synthetic oligonucleotide
agcagtattatgaatctgtttttatcgctt

SEQ ID NO: 438728 - DNA, 30 bp, Artificial Sequence
  Synthetic oligonucleotide
cttggtcctataatactccataggtcgctt

SEQ ID NO: 438729 - DNA, 30 bp, Artificial Sequence
  Synthetic oligonucleotide
acatagcgcggaaactaatatgcttcgctt

SEQ ID NO: 438730 - DNA, 30 bp, Artificial Sequence
  Synthetic oligonucleotide
gtgtgtatcagcacgtgaatattttcgctt

SEQ ID NO: 438731 - DNA, 30 bp, Artificial Sequence
  Synthetic oligonucleotide
tgggctttgcaaagctagatttaaaggctt

SEQ ID NO: 438732 - DNA, 31 bp, Artificial Sequence
  Synthetic oligonucleotide
taaggcggcagcagacggtcactagaggctt

SEQ ID NO: 438733 - DNA, 30 bp, Artificial Sequence
  Synthetic oligonucleotide
aatatcggtcatcgctatatcaggaggctt

SEQ ID NO: 438734 - DNA, 30 bp, Artificial Sequence
  Synthetic oligonucleotide
agtcttttcttcacgtgtaacgggaggctt

SEQ ID NO: 438735 - DNA, 30 bp, Artificial Sequence
  Synthetic oligonucleotide
aactcggctgctaacagctggtggaggctt

SEQ ID NO: 438736 - DNA, 30 bp, Artificial Sequence
  Synthetic oligonucleotide
atagcactgttcgcttgtgccctgaggctt

SEQ ID NO: 438737 - DNA, 30 bp, Artificial Sequence
  Synthetic oligonucleotide
gcaccactcacgtactaattaagtaggctt

SEQ ID NO: 438738 - DNA, 30 bp, Artificial Sequence
  Synthetic oligonucleotide
agaaggggcctgtttaaactgcgacggctt

SEQ ID NO: 438739 - DNA, 30 bp, Artificial Sequence
  Synthetic oligonucleotide
tgagtgatactattgctggatggacggctt

SEQ ID NO: 438740 - DNA, 30 bp, Artificial Sequence
  Synthetic oligonucleotide
tatggtctgaaaattgtgcacggtcggctt

SEQ ID NO: 438741 - DNA, 30 bp, Artificial Sequence
  Synthetic oligonucleotide
tggcctgacggctctcaggtaaaagggctt

SEQ ID NO: 438742 - DNA, 30 bp, Artificial Sequence
  Synthetic oligonucleotide
ctcagacggcttgttatgacgcaagggctt

SEQ ID NO: 438743 - DNA, 30 bp, Artificial Sequence
  Synthetic oligonucleotide
gataatgttgagccctaacgattcgggctt

SEQ ID NO: 438744 - DNA, 30 bp, Artificial Sequence
  Synthetic oligonucleotide
tcgagtgacagcttgcggcgagcggggctt

SEQ ID NO: 438745 - DNA, 30 bp, Artificial Sequence
  Synthetic oligonucleotide
tggttggatgacatgaaaagcgcggggctt

SEQ ID NO: 438746 - DNA, 30 bp, Artificial Sequence
  Synthetic oligonucleotide
agaatttactgatgcgtagatttggggctt

SEQ ID NO: 438747 - DNA, 30 bp, Artificial Sequence
  Synthetic oligonucleotide
cttgacgtggtcaagataagatatgggctt

SEQ ID NO: 438748 - DNA, 30 bp, Artificial Sequence
  Synthetic oligonucleotide
cgcaaatcgcccctacagtcacgtgggctt

SEQ ID NO: 438749 - DNA, 30 bp, Artificial Sequence
  Synthetic oligonucleotide
ctacctataggagagatagcaatatggctt

SEQ ID NO: 438750 - DNA, 30 bp, Artificial Sequence
  Synthetic oligonucleotide
atcgtacatggtggctatcaaacgtggctt

SEQ ID NO: 438751 - DNA, 30 bp, Artificial Sequence
  Synthetic oligonucleotide
agttaggcgggatccacgggaacgtggctt

SEQ ID NO: 438752 - DNA, 30 bp, Artificial Sequence
  Synthetic oligonucleotide
ctaggttcaaacgcatttgcaaggtggctt

SEQ ID NO: 438753 - DNA, 30 bp, Artificial Sequence
  Synthetic oligonucleotide
aatcggtaaaacacagttaaacggtggctt

SEQ ID NO: 438754 - DNA, 30 bp, Artificial Sequence
  Synthetic oligonucleotide
ggagaattccaacgatcggaactgtggctt

SEQ ID NO: 438755 - DNA, 30 bp, Artificial Sequence
  Synthetic oligonucleotide
agagcatgtggggctcttccgttgtggctt

SEQ ID NO: 438756 - DNA, 30 bp, Artificial Sequence
  Synthetic oligonucleotide
ggagtagtccttcttatatgaagttggctt

SEQ ID NO: 438757 - DNA, 29 bp, Artificial Sequence
  Synthetic oligonucleotide
tttatgagggacttatccgggcaatgctt

SEQ ID NO: 438758 - DNA, 30 bp, Artificial Sequence
  Synthetic oligonucleotide
gcttcgggggagcgacttcgtataatgctt

SEQ ID NO: 438759 - DNA, 30 bp, Artificial Sequence
  Synthetic oligonucleotide
taatgatccggtttatagacagtcatgctt

SEQ ID NO: 438760 - DNA, 30 bp, Artificial Sequence
  Synthetic oligonucleotide
cgtaacagtagatatggctcttggatgctt

SEQ ID NO: 438761 - DNA, 30 bp, Artificial Sequence
  Synthetic oligonucleotide
aacaaacgttcccgagtccgagtgatgctt

SEQ ID NO: 438762 - DNA, 30 bp, Artificial Sequence
  Synthetic oligonucleotide
cataccggcctagcggacatattgatgctt

SEQ ID NO: 438763 - DNA, 30 bp, Artificial Sequence
  Synthetic oligonucleotide
gataatgatgatgattcgatttgtatgctt

SEQ ID NO: 438764 - DNA, 30 bp, Artificial Sequence
  Synthetic oligonucleotide
agaactactactagggcttgattcctgctt

SEQ ID NO: 438765 - DNA, 30 bp, Artificial Sequence
  Synthetic oligonucleotide
cgattacatctttctctcgagtagctgctt

SEQ ID NO: 438766 - DNA, 30 bp, Artificial Sequence
  Synthetic oligonucleotide
acgtttgtcatacgatcgcttgtgctgctt

SEQ ID NO: 438767 - DNA, 30 bp, Artificial Sequence
  Synthetic oligonucleotide
tgctaacactgggctgaaatctctctgctt

SEQ ID NO: 438768 - DNA, 30 bp, Artificial Sequence
  Synthetic oligonucleotide
ctgaatgaacaggttctgaaagttctgctt

SEQ ID NO: 438769 - DNA, 30 bp, Artificial Sequence
  Synthetic oligonucleotide
gccgtgtctggaattcctctgcaagtgctt

SEQ ID NO: 438770 - DNA, 30 bp, Artificial Sequence
  Synthetic oligonucleotide
tgatatgtaaaaaaatttggacaggtgctt

SEQ ID NO: 438771 - DNA, 30 bp, Artificial Sequence
  Synthetic oligonucleotide
tccagacgatgtttttatgacgcggtgctt

SEQ ID NO: 438772 - DNA, 30 bp, Artificial Sequence
  Synthetic oligonucleotide
tgacattggtagcagggtgcgcatgtgctt

SEQ ID NO: 438773 - DNA, 30 bp, Artificial Sequence
  Synthetic oligonucleotide
gagttgagtaaagggtctaagaacttgctt

SEQ ID NO: 438774 - DNA, 30 bp, Artificial Sequence
  Synthetic oligonucleotide
atcaaagagtatcccccggtcaagttgctt

SEQ ID NO: 438775 - DNA, 30 bp, Artificial Sequence
  Synthetic oligonucleotide
gatatgcgccatcgcacgaggcggttgctt

SEQ ID NO: 438776 - DNA, 30 bp, Artificial Sequence
  Synthetic oligonucleotide
tcacctgtaagtacgtttaggtggttgctt

SEQ ID NO: 438777 - DNA, 30 bp, Artificial Sequence
  Synthetic oligonucleotide
agtgcactcaatgccccgaacgtgttgctt

SEQ ID NO: 438778 - DNA, 30 bp, Artificial Sequence
  Synthetic oligonucleotide
tcacgccgaaatccggtcctgtatttgctt

SEQ ID NO: 438779 - DNA, 30 bp, Artificial Sequence
  Synthetic oligonucleotide
aagacctaaatacttcatagcactttgctt

SEQ ID NO: 438780 - DNA, 30 bp, Artificial Sequence
  Synthetic oligonucleotide
gaataggagactgcagtaggtcctttgctt

SEQ ID NO: 438781 - DNA, 30 bp, Artificial Sequence
  Synthetic oligonucleotide
attcgaccacacctttgacaacgtttgctt

SEQ ID NO: 438782 - DNA, 30 bp, Artificial Sequence
  Synthetic oligonucleotide
ctactaaagcagacgtttttagttttgctt

SEQ ID NO: 438783 - DNA, 30 bp, Artificial Sequence
  Synthetic oligonucleotide
ctcgttccgagttgcgtgactgaaaatctt

SEQ ID NO: 438784 - DNA, 30 bp, Artificial Sequence
  Synthetic oligonucleotide
taagtggcgttttagcgcgctagaaatctt

SEQ ID NO: 438785 - DNA, 30 bp, Artificial Sequence
  Synthetic oligonucleotide
aaattagacgccaagccgcgacgaaatctt

SEQ ID NO: 438786 - DNA, 30 bp, Artificial Sequence
  Synthetic oligonucleotide
gacgcccattttaagcagattctaaatctt

SEQ ID NO: 438787 - DNA, 30 bp, Artificial Sequence
  Synthetic oligonucleotide
gtaaatataatgatgttttcattaaatctt

SEQ ID NO: 438788 - DNA, 30 bp, Artificial Sequence
  Synthetic oligonucleotide
ttgcgaggagtattgtcattttggaatctt

SEQ ID NO: 438789 - DNA, 30 bp, Artificial Sequence
  Synthetic oligonucleotide
tcactcttcgtatatatagggaataatctt

SEQ ID NO: 438790 - DNA, 30 bp, Artificial Sequence
  Synthetic oligonucleotide
tatacctggtgactgcttcacactaatctt

SEQ ID NO: 438791 - DNA, 30 bp, Artificial Sequence
  Synthetic oligonucleotide
gattgctgttcaactggtgcgtttaatctt

SEQ ID NO: 438792 - DNA, 30 bp, Artificial Sequence
  Synthetic oligonucleotide
cgggactgattaaacgtagaagtccatctt

SEQ ID NO: 438793 - DNA, 30 bp, Artificial Sequence
  Synthetic oligonucleotide
ccgtgttttggttcgggcggtaagcatctt

SEQ ID NO: 438794 - DNA, 30 bp, Artificial Sequence
  Synthetic oligonucleotide
tttgtgtctcgaggttatgggtagcatctt

SEQ ID NO: 438795 - DNA, 30 bp, Artificial Sequence
  Synthetic oligonucleotide
atcagggtgactgtgcgtcagcatcatctt

SEQ ID NO: 438796 - DNA, 30 bp, Artificial Sequence
  Synthetic oligonucleotide
gattaccggaggagtcctatgagtcatctt

SEQ ID NO: 438797 - DNA, 30 bp, Artificial Sequence
  Synthetic oligonucleotide
tcaggatcataccttgatgggatagatctt

SEQ ID NO: 438798 - DNA, 30 bp, Artificial Sequence
  Synthetic oligonucleotide
tattctagtagggccgggaatgccgatctt

SEQ ID NO: 438799 - DNA, 30 bp, Artificial Sequence
  Synthetic oligonucleotide
gttcactcaagcatttgagtggtcgatctt

SEQ ID NO: 438800 - DNA, 30 bp, Artificial Sequence
  Synthetic oligonucleotide
tgataggcgctggaggaggcataggatctt

SEQ ID NO: 438801 - DNA, 30 bp, Artificial Sequence
  Synthetic oligonucleotide
gtttcaaggatcgtggcacaagtggatctt

SEQ ID NO: 438802 - DNA, 30 bp, Artificial Sequence
  Synthetic oligonucleotide
ggcctaaaccggatgccttcaaatgatctt

SEQ ID NO: 438803 - DNA, 30 bp, Artificial Sequence
  Synthetic oligonucleotide
ttgcaacgtcctggaggatgtaaatatctt

SEQ ID NO: 438804 - DNA, 30 bp, Artificial Sequence
  Synthetic oligonucleotide
acccaagtaccggacgagtaaagctatctt

SEQ ID NO: 438805 - DNA, 30 bp, Artificial Sequence
  Synthetic oligonucleotide
acccatccagatcttgcgggctgctatctt

SEQ ID NO: 438806 - DNA, 30 bp, Artificial Sequence
  Synthetic oligonucleotide
ctaaagaaggggcgcaccaattgctatctt

SEQ ID NO: 438807 - DNA, 30 bp, Artificial Sequence
  Synthetic oligonucleotide
gcaatcaattagcactagtattgctatctt

SEQ ID NO: 438808 - DNA, 30 bp, Artificial Sequence
  Synthetic oligonucleotide
tttgaaagcccatcgtctagatggtatctt

SEQ ID NO: 438809 - DNA, 30 bp, Artificial Sequence
  Synthetic oligonucleotide
tataccaagtaatctgggaaatcaactctt

SEQ ID NO: 438810 - DNA, 30 bp, Artificial Sequence
  Synthetic oligonucleotide
cgcaacattcgctgatttgcatgaactctt

SEQ ID NO: 438811 - DNA, 30 bp, Artificial Sequence
  Synthetic oligonucleotide
gcgcagtataattaaggtatgcacactctt

SEQ ID NO: 438812 - DNA, 30 bp, Artificial Sequence
  Synthetic oligonucleotide
tcacgatttggctgggatgggcccactctt

SEQ ID NO: 438813 - DNA, 30 bp, Artificial Sequence
  Synthetic oligonucleotide
aacaacaagtgcccccgcagcggcactctt

SEQ ID NO: 438814 - DNA, 30 bp, Artificial Sequence
  Synthetic oligonucleotide
ttacgacgggcatactggaccccgactctt

SEQ ID NO: 438815 - DNA, 30 bp, Artificial Sequence
  Synthetic oligonucleotide
ttagtggcgcgaggtgcagtgctgactctt

SEQ ID NO: 438816 - DNA, 30 bp, Artificial Sequence
  Synthetic oligonucleotide
aagatccctcgtagaatcctacaacctctt

SEQ ID NO: 438817 - DNA, 30 bp, Artificial Sequence
  Synthetic oligonucleotide
gcaaacttccaaaggctggccccacctctt

SEQ ID NO: 438818 - DNA, 30 bp, Artificial Sequence
  Synthetic oligonucleotide
gatatttaaatgtgcgattagggacctctt

SEQ ID NO: 438819 - DNA, 30 bp, Artificial Sequence
  Synthetic oligonucleotide
attgaatgtatggtaaagttgtcgcctctt

SEQ ID NO: 438820 - DNA, 30 bp, Artificial Sequence
  Synthetic oligonucleotide
ccattcgttagcaaagcgccgtatcctctt

SEQ ID NO: 438821 - DNA, 30 bp, Artificial Sequence
  Synthetic oligonucleotide
gcacagatcaggtgcagccatgctcctctt

SEQ ID NO: 438822 - DNA, 30 bp, Artificial Sequence
  Synthetic oligonucleotide
ggacgtattttccgtcatgggtctcctctt

SEQ ID NO: 438823 - DNA, 30 bp, Artificial Sequence
  Synthetic oligonucleotide
tcctcaggatttggacgcgcgagagctctt

SEQ ID NO: 438824 - DNA, 30 bp, Artificial Sequence
  Synthetic oligonucleotide
gtgactagcgtttccagagccagcgctctt

SEQ ID NO: 438825 - DNA, 30 bp, Artificial Sequence
  Synthetic oligonucleotide
tcgaacggaccctaacagtcctatgctctt

SEQ ID NO: 438826 - DNA, 30 bp, Artificial Sequence
  Synthetic oligonucleotide
tattaagaaatgtttacacaaactgctctt

SEQ ID NO: 438827 - DNA, 30 bp, Artificial Sequence
  Synthetic oligonucleotide
gtttatcgtcgtatcatagaacttgctctt

SEQ ID NO: 438828 - DNA, 30 bp, Artificial Sequence
  Synthetic oligonucleotide
aacacataatatgtgtgtattcaatctctt

SEQ ID NO: 438829 - DNA, 30 bp, Artificial Sequence
  Synthetic oligonucleotide
aaaaagcaccatcacggtaaagaatctctt

SEQ ID NO: 438830 - DNA, 30 bp, Artificial Sequence
  Synthetic oligonucleotide
ggttagagtgtattccattgaacctctctt

SEQ ID NO: 438831 - DNA, 30 bp, Artificial Sequence
  Synthetic oligonucleotide
aaagccattcattcttattcggtctctctt

SEQ ID NO: 438832 - DNA, 30 bp, Artificial Sequence
  Synthetic oligonucleotide
gcgaacgcgtcagggatatcgcggtctctt

SEQ ID NO: 438833 - DNA, 30 bp, Artificial Sequence
  Synthetic oligonucleotide
catttcggctagggattagcttgttctctt

SEQ ID NO: 438834 - DNA, 30 bp, Artificial Sequence
  Synthetic oligonucleotide
aggttactgacgttttatcaccacagtctt

SEQ ID NO: 438835 - DNA, 30 bp, Artificial Sequence
  Synthetic oligonucleotide
gtgaatattgtctgtttacgtcacagtctt

SEQ ID NO: 438836 - DNA, 30 bp, Artificial Sequence
  Synthetic oligonucleotide
gaaaggactcatatatggtattgtagtctt

SEQ ID NO: 438837 - DNA, 30 bp, Artificial Sequence
  Synthetic oligonucleotide
gcctttaagtagtacaactgtgttagtctt

SEQ ID NO: 438838 - DNA, 30 bp, Artificial Sequence
  Synthetic oligonucleotide
gcttcctcgcttgattgtttagcacgtctt

SEQ ID NO: 438839 - DNA, 30 bp, Artificial Sequence
  Synthetic oligonucleotide
gccattggggtgcggagggaacggcgtctt

SEQ ID NO: 438840 - DNA, 30 bp, Artificial Sequence
  Synthetic oligonucleotide
aatagagacgtctgccatgacgggcgtctt

SEQ ID NO: 438841 - DNA, 30 bp, Artificial Sequence
  Synthetic oligonucleotide
gcattggcgagttcatcactttggcgtctt

SEQ ID NO: 438842 - DNA, 30 bp, Artificial Sequence
  Synthetic oligonucleotide
taggctgggaaaagactatcccgtcgtctt

SEQ ID NO: 438843 - DNA, 30 bp, Artificial Sequence
  Synthetic oligonucleotide
tataagaagttcaatctacctaaaggtctt

SEQ ID NO: 438844 - DNA, 30 bp, Artificial Sequence
  Synthetic oligonucleotide
atattgctctaagagcaggcatgaggtctt

SEQ ID NO: 438845 - DNA, 30 bp, Artificial Sequence
  Synthetic oligonucleotide
gaattagtagatttatacagcgttggtctt

SEQ ID NO: 438846 - DNA, 30 bp, Artificial Sequence
  Synthetic oligonucleotide
ctagatagcaaaaagacgtgtgaatgtctt

SEQ ID NO: 438847 - DNA, 30 bp, Artificial Sequence
  Synthetic oligonucleotide
tgcatcaaaaaacattaagataactgtctt

SEQ ID NO: 438848 - DNA, 30 bp, Artificial Sequence
  Synthetic oligonucleotide
agatagccttattctataaagtactgtctt

SEQ ID NO: 438849 - DNA, 30 bp, Artificial Sequence
  Synthetic oligonucleotide
agacccgtgccgctctgtaccatctgtctt

SEQ ID NO: 438850 - DNA, 30 bp, Artificial Sequence
  Synthetic oligonucleotide
acgtaatcagtctattctcttaggtgtctt

SEQ ID NO: 438851 - DNA, 30 bp, Artificial Sequence
  Synthetic oligonucleotide
agatggcttattgtaacgtgaggaattctt

SEQ ID NO: 438852 - DNA, 30 bp, Artificial Sequence
  Synthetic oligonucleotide
tcgttactgggtgtcaacccttccattctt

SEQ ID NO: 438853 - DNA, 30 bp, Artificial Sequence
  Synthetic oligonucleotide
gtgtagcccctgagggattggctcattctt

SEQ ID NO: 438854 - DNA, 30 bp, Artificial Sequence
  Synthetic oligonucleotide
ggcatctatgactgaaattgagtcattctt

SEQ ID NO: 438855 - DNA, 30 bp, Artificial Sequence
  Synthetic oligonucleotide
ttggaagaggtattagggatggggattctt

SEQ ID NO: 438856 - DNA, 30 bp, Artificial Sequence
  Synthetic oligonucleotide
tcagtgcgcacaagccgacgctcccttctt

SEQ ID NO: 438857 - DNA, 30 bp, Artificial Sequence
  Synthetic oligonucleotide
ggggtgtgtaacgttgttgtgtagcttctt

SEQ ID NO: 438858 - DNA, 30 bp, Artificial Sequence
  Synthetic oligonucleotide
acagtcgtcctaggctttatgactcttctt

SEQ ID NO: 438859 - DNA, 30 bp, Artificial Sequence
  Synthetic oligonucleotide
gcttctgggaaccgttactcggcagttctt

SEQ ID NO: 438860 - DNA, 30 bp, Artificial Sequence
  Synthetic oligonucleotide
atgcttaccaggcttcagtcctgagttctt

SEQ ID NO: 438861 - DNA, 30 bp, Artificial Sequence
  Synthetic oligonucleotide
tccggggcctttcagcactcttgcgttctt

SEQ ID NO: 438862 - DNA, 30 bp, Artificial Sequence
  Synthetic oligonucleotide
taataaggaaggggcataacccgggttctt

SEQ ID NO: 438863 - DNA, 30 bp, Artificial Sequence
  Synthetic oligonucleotide
tcacacaaagtatcaagaaatatggttctt

SEQ ID NO: 438864 - DNA, 30 bp, Artificial Sequence
  Synthetic oligonucleotide
atcattcttgatctcataaggtactttctt

SEQ ID NO: 438865 - DNA, 30 bp, Artificial Sequence
  Synthetic oligonucleotide
agtttcaaggattttagctggacctttctt

SEQ ID NO: 438866 - DNA, 30 bp, Artificial Sequence
  Synthetic oligonucleotide
gcaaagcgagtccgcgatgggatctttctt

SEQ ID NO: 438867 - DNA, 30 bp, Artificial Sequence
  Synthetic oligonucleotide
tgaggaacaccacatagcccgaagtttctt

SEQ ID NO: 438868 - DNA, 30 bp, Artificial Sequence
  Synthetic oligonucleotide
cccgtctcgcctggaggagctagttttctt

SEQ ID NO: 438869 - DNA, 30 bp, Artificial Sequence
  Synthetic oligonucleotide
gtgagctaagcaaaacagttttaaaaagtt

SEQ ID NO: 438870 - DNA, 30 bp, Artificial Sequence
  Synthetic oligonucleotide
tgagcacatacacttgggggcacaaaagtt

SEQ ID NO: 438871 - DNA, 30 bp, Artificial Sequence
  Synthetic oligonucleotide
gataaaccttattcagggagtcgaaaagtt

SEQ ID NO: 438872 - DNA, 30 bp, Artificial Sequence
  Synthetic oligonucleotide
ttgtgtgagaggacagcccacgccaaagtt

SEQ ID NO: 438873 - DNA, 30 bp, Artificial Sequence
  Synthetic oligonucleotide
gactcaaaacggctgttccaggagaaagtt

SEQ ID NO: 438874 - DNA, 30 bp, Artificial Sequence
  Synthetic oligonucleotide
gccgtaagcatcaggcgttagccgaaagtt

SEQ ID NO: 438875 - DNA, 30 bp, Artificial Sequence
  Synthetic oligonucleotide
ttatgagacgtgacccaacgtccgaaagtt

SEQ ID NO: 438876 - DNA, 30 bp, Artificial Sequence
  Synthetic oligonucleotide
gggtattcaaccaccgcaacggcgaaagtt

SEQ ID NO: 438877 - DNA, 30 bp, Artificial Sequence
  Synthetic oligonucleotide
ggtgatcggctatcataatcaaggaaagtt

SEQ ID NO: 438878 - DNA, 30 bp, Artificial Sequence
  Synthetic oligonucleotide
cgtaccttattttctggtcataggaaagtt

SEQ ID NO: 438879 - DNA, 30 bp, Artificial Sequence
  Synthetic oligonucleotide
gcttccattcttagtatcagacggaaagtt

SEQ ID NO: 438880 - DNA, 30 bp, Artificial Sequence
  Synthetic oligonucleotide
gatacagagtaaggccacggtcctaaagtt

SEQ ID NO: 438881 - DNA, 30 bp, Artificial Sequence
  Synthetic oligonucleotide
gttaatagatatggagacgcaagacaagtt

SEQ ID NO: 438882 - DNA, 30 bp, Artificial Sequence
  Synthetic oligonucleotide
tataagttatgcgttgataatttccaagtt

SEQ ID NO: 438883 - DNA, 30 bp, Artificial Sequence
  Synthetic oligonucleotide
cgcaaccgcgatatcctctcggtgcaagtt

SEQ ID NO: 438884 - DNA, 30 bp, Artificial Sequence
  Synthetic oligonucleotide
taggtgttaaggtattgcaatagtcaagtt

SEQ ID NO: 438885 - DNA, 30 bp, Artificial Sequence
  Synthetic oligonucleotide
aaaactgatggagcgcgcctacaagaagtt

SEQ ID NO: 438886 - DNA, 30 bp, Artificial Sequence
  Synthetic oligonucleotide
aatgatccctatcgttagaggggagaagtt

SEQ ID NO: 438887 - DNA, 30 bp, Artificial Sequence
  Synthetic oligonucleotide
gattgattgtgttttaagttgcaggaagtt

SEQ ID NO: 438888 - DNA, 30 bp, Artificial Sequence
  Synthetic oligonucleotide
tattctttacttgtttgagtgcgggaagtt

SEQ ID NO: 438889 - DNA, 30 bp, Artificial Sequence
  Synthetic oligonucleotide
ccaccaagattcagttactcttgggaagtt

SEQ ID NO: 438890 - DNA, 30 bp, Artificial Sequence
  Synthetic oligonucleotide
gggggacttgccatacgcttacctgaagtt

SEQ ID NO: 438891 - DNA, 30 bp, Artificial Sequence
  Synthetic oligonucleotide
tctgtctctgtgttgtttggctactaagtt

SEQ ID NO: 438892 - DNA, 30 bp, Artificial Sequence
  Synthetic oligonucleotide
gtgtttaggtaatcccttcgtgcgtaagtt

SEQ ID NO: 438893 - DNA, 30 bp, Artificial Sequence
  Synthetic oligonucleotide
tcgtcgtgaattcgcctttctccttaagtt

SEQ ID NO: 438894 - DNA, 30 bp, Artificial Sequence
  Synthetic oligonucleotide
acctccagtcgcacaggaaactgttaagtt

SEQ ID NO: 438895 - DNA, 30 bp, Artificial Sequence
  Synthetic oligonucleotide
ttccttactttctggtttgacgtttaagtt

SEQ ID NO: 438896 - DNA, 30 bp, Artificial Sequence
  Synthetic oligonucleotide
acgggcttctctgatggcctcgcaacagtt

SEQ ID NO: 438897 - DNA, 30 bp, Artificial Sequence
  Synthetic oligonucleotide
tgtggccgtttacgtacgtcaggaacagtt

SEQ ID NO: 438898 - DNA, 30 bp, Artificial Sequence
  Synthetic oligonucleotide
attaatgaattggattgctttgacacagtt

SEQ ID NO: 438899 - DNA, 30 bp, Artificial Sequence
  Synthetic oligonucleotide
gtctgatactctatgtgataatacacagtt

SEQ ID NO: 438900 - DNA, 30 bp, Artificial Sequence
  Synthetic oligonucleotide
cgctcttgcgcaaggcctacctgcacagtt

SEQ ID NO: 438901 - DNA, 30 bp, Artificial Sequence
  Synthetic oligonucleotide
atttaactgacggaaatatcactcacagtt

SEQ ID NO: 438902 - DNA, 30 bp, Artificial Sequence
  Synthetic oligonucleotide
agttccgctcgtactgcactattcacagtt

SEQ ID NO: 438903 - DNA, 30 bp, Artificial Sequence
  Synthetic oligonucleotide
aactcaaaggtattcgctccaccgacagtt

SEQ ID NO: 438904 - DNA, 30 bp, Artificial Sequence
  Synthetic oligonucleotide
accggaatcgagattcaaccctcgacagtt

SEQ ID NO: 438905 - DNA, 30 bp, Artificial Sequence
  Synthetic oligonucleotide
taccccgcgtttgagtcgctagatacagtt

SEQ ID NO: 438906 - DNA, 30 bp, Artificial Sequence
  Synthetic oligonucleotide
ccgatgtcatagcctactcagctaccagtt

SEQ ID NO: 438907 - DNA, 30 bp, Artificial Sequence
  Synthetic oligonucleotide
tggatcctttctgaggtgcaagtaccagtt

SEQ ID NO: 438908 - DNA, 30 bp, Artificial Sequence
  Synthetic oligonucleotide
aatagtaataattactcggttggtccagtt

SEQ ID NO: 438909 - DNA, 30 bp, Artificial Sequence
  Synthetic oligonucleotide
gggccagggtgaaccaggggtaaagcagtt

SEQ ID NO: 438910 - DNA, 30 bp, Artificial Sequence
  Synthetic oligonucleotide
cggccctatgcacctatccatgcagcagtt

SEQ ID NO: 438911 - DNA, 30 bp, Artificial Sequence
  Synthetic oligonucleotide
aagatgtcggttagagcgctattcgcagtt

SEQ ID NO: 438912 - DNA, 30 bp, Artificial Sequence
  Synthetic oligonucleotide
gcccgtgtgccatcgcccttacttgcagtt

SEQ ID NO: 438913 - DNA, 30 bp, Artificial Sequence
  Synthetic oligonucleotide
gcaccactaccagtgatttaggttgcagtt

SEQ ID NO: 438914 - DNA, 30 bp, Artificial Sequence
  Synthetic oligonucleotide
tccacgggttgccattccattcaatcagtt

SEQ ID NO: 438915 - DNA, 30 bp, Artificial Sequence
  Synthetic oligonucleotide
tatcattcagagcattttccaaactcagtt

SEQ ID NO: 438916 - DNA, 30 bp, Artificial Sequence
  Synthetic oligonucleotide
taggtcctctttgaccaccgcgcctcagtt

SEQ ID NO: 438917 - DNA, 30 bp, Artificial Sequence
  Synthetic oligonucleotide
tatgatatcatgtaatggaatgcctcagtt

SEQ ID NO: 438918 - DNA, 30 bp, Artificial Sequence
  Synthetic oligonucleotide
ggttcgcagagttccaaatttttctcagtt

SEQ ID NO: 438919 - DNA, 30 bp, Artificial Sequence
  Synthetic oligonucleotide
agtcggcgtcaggtcgactggacgtcagtt

SEQ ID NO: 438920 - DNA, 30 bp, Artificial Sequence
  Synthetic oligonucleotide
cagccgaaataatgtcaggggccttcagtt

SEQ ID NO: 438921 - DNA, 30 bp, Artificial Sequence
  Synthetic oligonucleotide
acttctccattggcacgttaattaagagtt

SEQ ID NO: 438922 - DNA, 30 bp, Artificial Sequence
  Synthetic oligonucleotide
attagttaacgtgaaatctacctcagagtt

SEQ ID NO: 438923 - DNA, 30 bp, Artificial Sequence
  Synthetic oligonucleotide
gtgatcacgtgcgtgctcgcctggagagtt

SEQ ID NO: 438924 - DNA, 30 bp, Artificial Sequence
  Synthetic oligonucleotide
aatgtgggctttactaggaacacacgagtt

SEQ ID NO: 438925 - DNA, 30 bp, Artificial Sequence
  Synthetic oligonucleotide
aacgacccggaggagcttctttgacgagtt

SEQ ID NO: 438926 - DNA, 30 bp, Artificial Sequence
  Synthetic oligonucleotide
atatgaacgcgacactggcccctacgagtt

SEQ ID NO: 438927 - DNA, 30 bp, Artificial Sequence
  Synthetic oligonucleotide
gtctaacccgtcagatccactaaccgagtt

SEQ ID NO: 438928 - DNA, 30 bp, Artificial Sequence
  Synthetic oligonucleotide
ggatatcatgcagcgcttctataccgagtt

SEQ ID NO: 438929 - DNA, 30 bp, Artificial Sequence
  Synthetic oligonucleotide
gatagaaggtaggaccttctcccgcgagtt

SEQ ID NO: 438930 - DNA, 30 bp, Artificial Sequence
  Synthetic oligonucleotide
gtttacaagaaactcatcgcagctcgagtt

SEQ ID NO: 438931 - DNA, 30 bp, Artificial Sequence
  Synthetic oligonucleotide
atgacggtcagcttgttgtcctgtcgagtt

SEQ ID NO: 438932 - DNA, 30 bp, Artificial Sequence
  Synthetic oligonucleotide
ttcatacttgtatcgtccttttagggagtt

SEQ ID NO: 438933 - DNA, 30 bp, Artificial Sequence
  Synthetic oligonucleotide
actttgtaagacagtaaggaatcgggagtt

SEQ ID NO: 438934 - DNA, 30 bp, Artificial Sequence
  Synthetic oligonucleotide
agattttaccacagtcgtccgttgggagtt

SEQ ID NO: 438935 - DNA, 30 bp, Artificial Sequence
  Synthetic oligonucleotide
tttctaggtattaatgtttaagctggagtt

SEQ ID NO: 438936 - DNA, 30 bp, Artificial Sequence
  Synthetic oligonucleotide
cggcgccggtatagagtacccgttggagtt

SEQ ID NO: 438937 - DNA, 30 bp, Artificial Sequence
  Synthetic oligonucleotide
gggttacagactctctgtacagcatgagtt

SEQ ID NO: 438938 - DNA, 30 bp, Artificial Sequence
  Synthetic oligonucleotide
taggacctaaagagatagctaagatgagtt

SEQ ID NO: 438939 - DNA, 30 bp, Artificial Sequence
  Synthetic oligonucleotide
gtattacaaggacaccttcatgcgtgagtt

SEQ ID NO: 438940 - DNA, 30 bp, Artificial Sequence
  Synthetic oligonucleotide
tgcgcggtctcggatcaccgaaggtgagtt

SEQ ID NO: 438941 - DNA, 30 bp, Artificial Sequence
  Synthetic oligonucleotide
aactttcgaaaattatgtcatagttgagtt

SEQ ID NO: 438942 - DNA, 30 bp, Artificial Sequence
  Synthetic oligonucleotide
cgctttttgagcactggtgcaaaaatagtt

SEQ ID NO: 438943 - DNA, 30 bp, Artificial Sequence
  Synthetic oligonucleotide
gacaaatgtatccctagctcggaaatagtt

SEQ ID NO: 438944 - DNA, 30 bp, Artificial Sequence
  Synthetic oligonucleotide
ggtacgccactgtttatccatccaatagtt

SEQ ID NO: 438945 - DNA, 30 bp, Artificial Sequence
  Synthetic oligonucleotide
tctccagctttagtgacgccgaccatagtt

SEQ ID NO: 438946 - DNA, 30 bp, Artificial Sequence
  Synthetic oligonucleotide
gtgaccgaacaatcgttgtaccgcatagtt

SEQ ID NO: 438947 - DNA, 30 bp, Artificial Sequence
  Synthetic oligonucleotide
gacgctaatgcttatatttgctcgatagtt

SEQ ID NO: 438948 - DNA, 30 bp, Artificial Sequence
  Synthetic oligonucleotide
gtgccattagagtctcaacgagatatagtt

SEQ ID NO: 438949 - DNA, 30 bp, Artificial Sequence
  Synthetic oligonucleotide
ggaaaacgtacgtgtacttgttatatagtt

SEQ ID NO: 438950 - DNA, 29 bp, Artificial Sequence
  Synthetic oligonucleotide
ggttgtctatgcgtgggatttatatagtt

SEQ ID NO: 438951 - DNA, 30 bp, Artificial Sequence
  Synthetic oligonucleotide
atttggagggaagattactgcagtatagtt

SEQ ID NO: 438952 - DNA, 30 bp, Artificial Sequence
  Synthetic oligonucleotide
gcaatccggtatctaacatagttactagtt

SEQ ID NO: 438953 - DNA, 30 bp, Artificial Sequence
  Synthetic oligonucleotide
aaaacgaaagttgctttcaatcacctagtt

SEQ ID NO: 438954 - DNA, 30 bp, Artificial Sequence
  Synthetic oligonucleotide
taatccgactattgcacgctttgcctagtt

SEQ ID NO: 438955 - DNA, 30 bp, Artificial Sequence
  Synthetic oligonucleotide
catcccagacttttacgaatgttgctagtt

SEQ ID NO: 438956 - DNA, 30 bp, Artificial Sequence
  Synthetic oligonucleotide
cccctgaccaataacgaatgttatctagtt

SEQ ID NO: 438957 - DNA, 30 bp, Artificial Sequence
  Synthetic oligonucleotide
ggctagtcgggccgattgtttgctctagtt

SEQ ID NO: 438958 - DNA, 30 bp, Artificial Sequence
  Synthetic oligonucleotide
aactgatcgtactgcacttgtggtctagtt

SEQ ID NO: 438959 - DNA, 30 bp, Artificial Sequence
  Synthetic oligonucleotide
cggcagttagctcatcgtgcctaagtagtt

SEQ ID NO: 438960 - DNA, 30 bp, Artificial Sequence
  Synthetic oligonucleotide
cgcactcaggtgctgtgtcccatagtagtt

SEQ ID NO: 438961 - DNA, 30 bp, Artificial Sequence
  Synthetic oligonucleotide
atcttactttttcgagcgcgatgcgtagtt

SEQ ID NO: 438962 - DNA, 30 bp, Artificial Sequence
  Synthetic oligonucleotide
ggtggttaactagttactaggatcgtagtt

SEQ ID NO: 438963 - DNA, 30 bp, Artificial Sequence
  Synthetic oligonucleotide
ttatctcaaaccctactgagtctggtagtt

SEQ ID NO: 438964 - DNA, 30 bp, Artificial Sequence
  Synthetic oligonucleotide
aatccttgtacgcaagtaccgtatgtagtt

SEQ ID NO: 438965 - DNA, 30 bp, Artificial Sequence
  Synthetic oligonucleotide
ttatgacctatagacaatgctcaattagtt

SEQ ID NO: 438966 - DNA, 30 bp, Artificial Sequence
  Synthetic oligonucleotide
gtgactccgggtcttttgagcacattagtt

SEQ ID NO: 438967 - DNA, 30 bp, Artificial Sequence
  Synthetic oligonucleotide
tgagcgaagcatactttccgccgattagtt

SEQ ID NO: 438968 - DNA, 30 bp, Artificial Sequence
  Synthetic oligonucleotide
cataagcattgttagccgcgtttcttagtt

SEQ ID NO: 438969 - DNA, 30 bp, Artificial Sequence
  Synthetic oligonucleotide
tttttgcgggatctgcgcttaaagttagtt

SEQ ID NO: 438970 - DNA, 30 bp, Artificial Sequence
  Synthetic oligonucleotide
agccagaaaaacttgagtttaacgttagtt

SEQ ID NO: 438971 - DNA, 30 bp, Artificial Sequence
  Synthetic oligonucleotide
aatcaaggcccaacgtgaatgaggttagtt

SEQ ID NO: 438972 - DNA, 30 bp, Artificial Sequence
  Synthetic oligonucleotide
gcaggaaaaaataattgattgaggttagtt

SEQ ID NO: 438973 - DNA, 30 bp, Artificial Sequence
  Synthetic oligonucleotide
cgtgcactcggggtcaatttccttttagtt

SEQ ID NO: 438974 - DNA, 30 bp, Artificial Sequence
  Synthetic oligonucleotide
gatcagacattgtaagacacgcttttagtt

SEQ ID NO: 438975 - DNA, 30 bp, Artificial Sequence
  Synthetic oligonucleotide
agtggtgcccatagatctgctagaaacgtt

SEQ ID NO: 438976 - DNA, 30 bp, Artificial Sequence
  Synthetic oligonucleotide
ggattgcttctattgaacgttctcaacgtt

SEQ ID NO: 438977 - DNA, 30 bp, Artificial Sequence
  Synthetic oligonucleotide
ttggataggagcatccctatggtgaacgtt

SEQ ID NO: 438978 - DNA, 30 bp, Artificial Sequence
  Synthetic oligonucleotide
acaagcatctgaacgtgcactgaacacgtt

SEQ ID NO: 438979 - DNA, 31 bp, Artificial Sequence
  Synthetic oligonucleotide
gtttggtggaatccaagcgaagatacacgtt

SEQ ID NO: 438980 - DNA, 30 bp, Artificial Sequence
  Synthetic oligonucleotide
ctcccacccgagtacggtatagtacacgtt

SEQ ID NO: 438981 - DNA, 30 bp, Artificial Sequence
  Synthetic oligonucleotide
atatacgcaacccgcgtttatcctcacgtt

SEQ ID NO: 438982 - DNA, 30 bp, Artificial Sequence
  Synthetic oligonucleotide
ctctgtcctacgtagaagatttgtcacgtt

SEQ ID NO: 438983 - DNA, 30 bp, Artificial Sequence
  Synthetic oligonucleotide
cttaacgagtgctgatgggctagagacgtt

SEQ ID NO: 438984 - DNA, 30 bp, Artificial Sequence
  Synthetic oligonucleotide
ttgtagagctgtttatggagtagcgacgtt

SEQ ID NO: 438985 - DNA, 30 bp, Artificial Sequence
  Synthetic oligonucleotide
actagcgctctggcgcaatggatcgacgtt

SEQ ID NO: 438986 - DNA, 30 bp, Artificial Sequence
  Synthetic oligonucleotide
aatataagtgcggggaatctaagggacgtt

SEQ ID NO: 438987 - DNA, 30 bp, Artificial Sequence
  Synthetic oligonucleotide
gctagcaatatcagaattcctgatgacgtt

SEQ ID NO: 438988 - DNA, 31 bp, Artificial Sequence
  Synthetic oligonucleotide
ctcggggttagtcactgtaaacaaatacgtt

SEQ ID NO: 438989 - DNA, 30 bp, Artificial Sequence
  Synthetic oligonucleotide
tatcaggtcaggacgtttaatgaatacgtt

SEQ ID NO: 438990 - DNA, 30 bp, Artificial Sequence
  Synthetic oligonucleotide
tcgataaaaatgctgacacgtgaatacgtt

SEQ ID NO: 438991 - DNA, 30 bp, Artificial Sequence
  Synthetic oligonucleotide
aaaagctgtcatgaatctagcacatacgtt

SEQ ID NO: 438992 - DNA, 30 bp, Artificial Sequence
  Synthetic oligonucleotide
tgaaccgcgttaagaggtctctcgtacgtt

SEQ ID NO: 438993 - DNA, 30 bp, Artificial Sequence
  Synthetic oligonucleotide
cggcttatcggcgaggatgaccattacgtt

SEQ ID NO: 438994 - DNA, 30 bp, Artificial Sequence
  Synthetic oligonucleotide
aaatcccttccagtaaatgaaagttacgtt

SEQ ID NO: 438995 - DNA, 30 bp, Artificial Sequence
  Synthetic oligonucleotide
ttgccgacgtcgtaagttcgtgtaaccgtt

SEQ ID NO: 438996 - DNA, 30 bp, Artificial Sequence
  Synthetic oligonucleotide
ttcggggaaaacgagacgcatttaaccgtt

SEQ ID NO: 438997 - DNA, 30 bp, Artificial Sequence
  Synthetic oligonucleotide
gaaacaaagcggtgtctcgttaacaccgtt

SEQ ID NO: 438998 - DNA, 30 bp, Artificial Sequence
  Synthetic oligonucleotide
ttgtttattcgtacagttattgacaccgtt

SEQ ID NO: 438999 - DNA, 30 bp, Artificial Sequence
  Synthetic oligonucleotide
ggctgttaggatgtggagcgcttcaccgtt

SEQ ID NO: 439000 - DNA, 30 bp, Artificial Sequence
  Synthetic oligonucleotide
acttagcgtttactctaggttgtgaccgtt

SEQ ID NO: 439001 - DNA, 30 bp, Artificial Sequence
  Synthetic oligonucleotide
ccttcaccgatataaacacttattaccgtt

SEQ ID NO: 439002 - DNA, 30 bp, Artificial Sequence
  Synthetic oligonucleotide
ttattctttcgttattaccgacgacccgtt

SEQ ID NO: 439003 - DNA, 30 bp, Artificial Sequence
  Synthetic oligonucleotide
tcaactcctccacagcactgcatccccgtt

SEQ ID NO: 439004 - DNA, 30 bp, Artificial Sequence
  Synthetic oligonucleotide
tgaattattgtctattgcggtcgtcccgtt

SEQ ID NO: 439005 - DNA, 30 bp, Artificial Sequence
  Synthetic oligonucleotide
gctattaagcagaaaccgtactgagccgtt

SEQ ID NO: 439006 - DNA, 30 bp, Artificial Sequence
  Synthetic oligonucleotide
ggttcggggtggaaatgcttaaaggccgtt

SEQ ID NO: 439007 - DNA, 30 bp, Artificial Sequence
  Synthetic oligonucleotide
gtatgaatggtacagttgaggactgccgtt

SEQ ID NO: 439008 - DNA, 30 bp, Artificial Sequence
  Synthetic oligonucleotide
tggaaaatatcctccttacctgttgccgtt

SEQ ID NO: 439009 - DNA, 30 bp, Artificial Sequence
  Synthetic oligonucleotide
tctccccggactcaagtacttgttgccgtt

SEQ ID NO: 439010 - DNA, 30 bp, Artificial Sequence
  Synthetic oligonucleotide
attacttaacttctactatgacactccgtt

SEQ ID NO: 439011 - DNA, 30 bp, Artificial Sequence
  Synthetic oligonucleotide
cggatccacggtgaactagtccactccgtt

SEQ ID NO: 439012 - DNA, 30 bp, Artificial Sequence
  Synthetic oligonucleotide
atttgagggatttggaaggcagagtccgtt

SEQ ID NO: 439013 - DNA, 30 bp, Artificial Sequence
  Synthetic oligonucleotide
agtgcctatcaacgcggcggtccgtccgtt

SEQ ID NO: 439014 - DNA, 30 bp, Artificial Sequence
  Synthetic oligonucleotide
aggtactataacggcctttatgaaagcgtt

SEQ ID NO: 439015 - DNA, 30 bp, Artificial Sequence
  Synthetic oligonucleotide
tttagtttaacgtgagccctcacaagcgtt

SEQ ID NO: 439016 - DNA, 30 bp, Artificial Sequence
  Synthetic oligonucleotide
gcggatcaaaaatcatctttgacaagcgtt

SEQ ID NO: 439017 - DNA, 30 bp, Artificial Sequence
  Synthetic oligonucleotide
aggccttcgtcggtctaattacgaagcgtt

SEQ ID NO: 439018 - DNA, 30 bp, Artificial Sequence
  Synthetic oligonucleotide
tatttcaatacgagggagagaaacagcgtt

SEQ ID NO: 439019 - DNA, 30 bp, Artificial Sequence
  Synthetic oligonucleotide
acgggaaccaaacgctccagcaccagcgtt

SEQ ID NO: 439020 - DNA, 30 bp, Artificial Sequence
  Synthetic oligonucleotide
gaggaaccgttattggacggcaccagcgtt

SEQ ID NO: 439021 - DNA, 30 bp, Artificial Sequence
  Synthetic oligonucleotide
gtacctctgaaacacgttgatagcagcgtt

SEQ ID NO: 439022 - DNA, 30 bp, Artificial Sequence
  Synthetic oligonucleotide
tgtgcatccgcgggtttatgacagagcgtt

SEQ ID NO: 439023 - DNA, 30 bp, Artificial Sequence
  Synthetic oligonucleotide
tacggcattttcaacgcattcaatagcgtt

SEQ ID NO: 439024 - DNA, 30 bp, Artificial Sequence
  Synthetic oligonucleotide
tgcctcccttacagtttagatcttagcgtt

SEQ ID NO: 439025 - DNA, 30 bp, Artificial Sequence
  Synthetic oligonucleotide
aattagtccgttattaggatgtaacgcgtt

SEQ ID NO: 439026 - DNA, 30 bp, Artificial Sequence
  Synthetic oligonucleotide
tttggcgctgtagttcttaccagacgcgtt

SEQ ID NO: 439027 - DNA, 30 bp, Artificial Sequence
  Synthetic oligonucleotide
aataagacaggtagtggctgccgacgcgtt

SEQ ID NO: 439028 - DNA, 30 bp, Artificial Sequence
  Synthetic oligonucleotide
ggtgcaaatccgatattcactttacgcgtt

SEQ ID NO: 439029 - DNA, 30 bp, Artificial Sequence
  Synthetic oligonucleotide
ctcatgaacgatttacactacgcgcgcgtt

SEQ ID NO: 439030 - DNA, 30 bp, Artificial Sequence
  Synthetic oligonucleotide
taacgttggccccgtcccctattgcgcgtt

SEQ ID NO: 439031 - DNA, 30 bp, Artificial Sequence
  Synthetic oligonucleotide
ctttcccgggatcagctgtaccaaggcgtt

SEQ ID NO: 439032 - DNA, 30 bp, Artificial Sequence
  Synthetic oligonucleotide
gcggtcagttacgtccaaacaataggcgtt

SEQ ID NO: 439033 - DNA, 30 bp, Artificial Sequence
  Synthetic oligonucleotide
ctgtgtatgcaacaggccagaaacggcgtt

SEQ ID NO: 439034 - DNA, 30 bp, Artificial Sequence
  Synthetic oligonucleotide
gtaacgcaacagtacattttctacggcgtt

SEQ ID NO: 439035 - DNA, 30 bp, Artificial Sequence
  Synthetic oligonucleotide
aggcaaggttttaacctacgcgccggcgtt

SEQ ID NO: 439036 - DNA, 30 bp, Artificial Sequence
  Synthetic oligonucleotide
ctcatgcaataggcacctgtacagggcgtt

SEQ ID NO: 439037 - DNA, 30 bp, Artificial Sequence
  Synthetic oligonucleotide
gaatccagtccggtatacagccagggcgtt

SEQ ID NO: 439038 - DNA, 30 bp, Artificial Sequence
  Synthetic oligonucleotide
aagggcgccagcggaattgtcccgggcgtt

SEQ ID NO: 439039 - DNA, 30 bp, Artificial Sequence
  Synthetic oligonucleotide
acctcacccgtgtctactagtcggggcgtt

SEQ ID NO: 439040 - DNA, 30 bp, Artificial Sequence
  Synthetic oligonucleotide
caaaagacccataataaatcttgtggcgtt

SEQ ID NO: 439041 - DNA, 30 bp, Artificial Sequence
  Synthetic oligonucleotide
catcacaggtcaatacggtaataatgcgtt

SEQ ID NO: 439042 - DNA, 30 bp, Artificial Sequence
  Synthetic oligonucleotide
agaaggggacggttgtgatggtaatgcgtt

SEQ ID NO: 439043 - DNA, 30 bp, Artificial Sequence
  Synthetic oligonucleotide
tgcccggtatgggtcatccgcctctgcgtt

SEQ ID NO: 439044 - DNA, 30 bp, Artificial Sequence
  Synthetic oligonucleotide
aggagttgtgttcaaaggcattcgtgcgtt

SEQ ID NO: 439045 - DNA, 30 bp, Artificial Sequence
  Synthetic oligonucleotide
ataacctacgtagcacacaccacttgcgtt

SEQ ID NO: 439046 - DNA, 30 bp, Artificial Sequence
  Synthetic oligonucleotide
gacgtatattgtacgaggttagcaatcgtt

SEQ ID NO: 439047 - DNA, 30 bp, Artificial Sequence
  Synthetic oligonucleotide
gacccgtcccctaacagtcccttaatcgtt

SEQ ID NO: 439048 - DNA, 30 bp, Artificial Sequence
  Synthetic oligonucleotide
gctccccgatgttcggcatcgcacatcgtt

SEQ ID NO: 439049 - DNA, 30 bp, Artificial Sequence
  Synthetic oligonucleotide
aacgcattagagtttataatcgtcatcgtt

SEQ ID NO: 439050 - DNA, 30 bp, Artificial Sequence
  Synthetic oligonucleotide
agcgaactacgacggcacagggatatcgtt

SEQ ID NO: 439051 - DNA, 30 bp, Artificial Sequence
  Synthetic oligonucleotide
cactttcttctgtattctcttattatcgtt

SEQ ID NO: 439052 - DNA, 30 bp, Artificial Sequence
  Synthetic oligonucleotide
gcgtagttcggctctgacacttagctcgtt

SEQ ID NO: 439053 - DNA, 30 bp, Artificial Sequence
  Synthetic oligonucleotide
taactttgtcggcgcgtctgggatctcgtt

SEQ ID NO: 439054 - DNA, 30 bp, Artificial Sequence
  Synthetic oligonucleotide
atggttggacaacaggcagtaggtctcgtt

SEQ ID NO: 439055 - DNA, 30 bp, Artificial Sequence
  Synthetic oligonucleotide
atatatatcgccggtagaatagttctcgtt

SEQ ID NO: 439056 - DNA, 30 bp, Artificial Sequence
  Synthetic oligonucleotide
gaacgtcaatccgaggtttaagaagtcgtt

SEQ ID NO: 439057 - DNA, 30 bp, Artificial Sequence
  Synthetic oligonucleotide
aaaggcttggcaccttcccacatagtcgtt

SEQ ID NO: 439058 - DNA, 30 bp, Artificial Sequence
  Synthetic oligonucleotide
tgacgaacacggggctccaaattagtcgtt

SEQ ID NO: 439059 - DNA, 30 bp, Artificial Sequence
  Synthetic oligonucleotide
cctaaacgacctctagtcaatccggtcgtt

SEQ ID NO: 439060 - DNA, 30 bp, Artificial Sequence
  Synthetic oligonucleotide
cctgggttgcaagtgtcccaggcggtcgtt

SEQ ID NO: 439061 - DNA, 30 bp, Artificial Sequence
  Synthetic oligonucleotide
aattcggagtagagcagtatatatgtcgtt

SEQ ID NO: 439062 - DNA, 30 bp, Artificial Sequence
  Synthetic oligonucleotide
ccctgtatacgtccggttgtccgtgtcgtt

SEQ ID NO: 439063 - DNA, 30 bp, Artificial Sequence
  Synthetic oligonucleotide
gtgaaacctttgcacatgctaatattcgtt

SEQ ID NO: 439064 - DNA, 30 bp, Artificial Sequence
  Synthetic oligonucleotide
ctcgatgttctgcaaagccttgcgttcgtt

SEQ ID NO: 439065 - DNA, 30 bp, Artificial Sequence
  Synthetic oligonucleotide
gatatctatcctcggtctagcggcaaggtt

SEQ ID NO: 439066 - DNA, 30 bp, Artificial Sequence
  Synthetic oligonucleotide
cattcccataggctggacgatggcaaggtt

SEQ ID NO: 439067 - DNA, 30 bp, Artificial Sequence
  Synthetic oligonucleotide
atagcctatccgggttgagctttcaaggtt

SEQ ID NO: 439068 - DNA, 30 bp, Artificial Sequence
  Synthetic oligonucleotide
ggttcccggtgcatagaaactccgaaggtt

SEQ ID NO: 439069 - DNA, 30 bp, Artificial Sequence
  Synthetic oligonucleotide
taagttacgccggactaaaggaataaggtt

SEQ ID NO: 439070 - DNA, 30 bp, Artificial Sequence
  Synthetic oligonucleotide
actgcaaagatattgcaccaatctaaggtt

SEQ ID NO: 439071 - DNA, 30 bp, Artificial Sequence
  Synthetic oligonucleotide
cgggttaattcgttataggcacgacaggtt

SEQ ID NO: 439072 - DNA, 30 bp, Artificial Sequence
  Synthetic oligonucleotide
tatgaaggcactccgggaacgtaccaggtt

SEQ ID NO: 439073 - DNA, 30 bp, Artificial Sequence
  Synthetic oligonucleotide
aatcgtattcgctcatttttttatcaggtt

SEQ ID NO: 439074 - DNA, 30 bp, Artificial Sequence
  Synthetic oligonucleotide
atgaaaggccatgcttcgggcactcaggtt

SEQ ID NO: 439075 - DNA, 30 bp, Artificial Sequence
  Synthetic oligonucleotide
cttatctgaagagtcgaatcaattcaggtt

SEQ ID NO: 439076 - DNA, 30 bp, Artificial Sequence
  Synthetic oligonucleotide
caggcattactggcgggtagctttcaggtt

SEQ ID NO: 439077 - DNA, 30 bp, Artificial Sequence
  Synthetic oligonucleotide
accgtcgctttgacgcgaccccgagaggtt

SEQ ID NO: 439078 - DNA, 30 bp, Artificial Sequence
  Synthetic oligonucleotide
gggcctccaaaatgtttgattatagaggtt

SEQ ID NO: 439079 - DNA, 30 bp, Artificial Sequence
  Synthetic oligonucleotide
cctccggggctttatttacttatagaggtt

SEQ ID NO: 439080 - DNA, 30 bp, Artificial Sequence
  Synthetic oligonucleotide
atttgttgaggccactcctgggtcgaggtt

SEQ ID NO: 439081 - DNA, 30 bp, Artificial Sequence
  Synthetic oligonucleotide
ggcaatgatgtttaggtttcttaggaggtt

SEQ ID NO: 439082 - DNA, 30 bp, Artificial Sequence
  Synthetic oligonucleotide
gtatgattttagtatcatactcgtgaggtt

SEQ ID NO: 439083 - DNA, 30 bp, Artificial Sequence
  Synthetic oligonucleotide
tccagaagatattagtataaatgtgaggtt

SEQ ID NO: 439084 - DNA, 30 bp, Artificial Sequence
  Synthetic oligonucleotide
ttcgcctcctcattcaaagggtaataggtt

SEQ ID NO: 439085 - DNA, 30 bp, Artificial Sequence
  Synthetic oligonucleotide
cgggctccaggcacctagatcccataggtt

SEQ ID NO: 439086 - DNA, 31 bp, Artificial Sequence
  Synthetic oligonucleotide
cccataattgggcgtttgcacttcataggtt

SEQ ID NO: 439087 - DNA, 30 bp, Artificial Sequence
  Synthetic oligonucleotide
cgtaaattctagtatttcatatactaggtt

SEQ ID NO: 439088 - DNA, 30 bp, Artificial Sequence
  Synthetic oligonucleotide
cggcacacagttatcaacaatgtctaggtt

SEQ ID NO: 439089 - DNA, 30 bp, Artificial Sequence
  Synthetic oligonucleotide
gttgatctcattatgtaggtgtagtaggtt

SEQ ID NO: 439090 - DNA, 30 bp, Artificial Sequence
  Synthetic oligonucleotide
tctagagcttacgcgtactcatcgtaggtt

SEQ ID NO: 439091 - DNA, 30 bp, Artificial Sequence
  Synthetic oligonucleotide
atgagtcacgggtaataccggaggtaggtt

SEQ ID NO: 439092 - DNA, 30 bp, Artificial Sequence
  Synthetic oligonucleotide
tcaaagttaccgttcgtggcccgttaggtt

SEQ ID NO: 439093 - DNA, 29 bp, Artificial Sequence
  Synthetic oligonucleotide
gcgtttgcacacttccatctggttaggtt

SEQ ID NO: 439094 - DNA, 30 bp, Artificial Sequence
  Synthetic oligonucleotide
acccaccacggaaatcttctatcaacggtt

SEQ ID NO: 439095 - DNA, 30 bp, Artificial Sequence
  Synthetic oligonucleotide
caagtgggcaggataagtaagggaacggtt

SEQ ID NO: 439096 - DNA, 30 bp, Artificial Sequence
  Synthetic oligonucleotide
atgtttgatacttcacgtggtataacggtt

SEQ ID NO: 439097 - DNA, 30 bp, Artificial Sequence
  Synthetic oligonucleotide
ttgagaccgacggtcttattcaacacggtt

SEQ ID NO: 439098 - DNA, 30 bp, Artificial Sequence
  Synthetic oligonucleotide
ctacctgcggggattcgccgacacacggtt

SEQ ID NO: 439099 - DNA, 30 bp, Artificial Sequence
  Synthetic oligonucleotide
atgattgacataccttgtagagtcacggtt

SEQ ID NO: 439100 - DNA, 30 bp, Artificial Sequence
  Synthetic oligonucleotide
gctatgacttgggggagcgcctagacggtt

SEQ ID NO: 439101 - DNA, 30 bp, Artificial Sequence
  Synthetic oligonucleotide
ggtaatgggggcctatgataaggtacggtt

SEQ ID NO: 439102 - DNA, 30 bp, Artificial Sequence
  Synthetic oligonucleotide
tactaatggtcttttgcaaactgtacggtt

SEQ ID NO: 439103 - DNA, 30 bp, Artificial Sequence
  Synthetic oligonucleotide
cagaatcttttgtccgtctcccttacggtt

SEQ ID NO: 439104 - DNA, 30 bp, Artificial Sequence
  Synthetic oligonucleotide
gcaaaccagctatagattggtcagccggtt

SEQ ID NO: 439105 - DNA, 31 bp, Artificial Sequence
  Synthetic oligonucleotide
aaccagctaaacccagttagaaccgccggtt

SEQ ID NO: 439106 - DNA, 30 bp, Artificial Sequence
  Synthetic oligonucleotide
acatatgtagatttcatctgagggccggtt

SEQ ID NO: 439107 - DNA, 30 bp, Artificial Sequence
  Synthetic oligonucleotide
cacgtcatattgacaggcggggacgcggtt

SEQ ID NO: 439108 - DNA, 30 bp, Artificial Sequence
  Synthetic oligonucleotide
tgatttttacagttccggaaagccgcggtt

SEQ ID NO: 439109 - DNA, 30 bp, Artificial Sequence
  Synthetic oligonucleotide
aaagaaaatttgacagtgccattcgcggtt

SEQ ID NO: 439110 - DNA, 30 bp, Artificial Sequence
  Synthetic oligonucleotide
gggccgcgcaagatgattgccccggcggtt

SEQ ID NO: 439111 - DNA, 30 bp, Artificial Sequence
  Synthetic oligonucleotide
catcctgtcattcgcagtctgatggcggtt

SEQ ID NO: 439112 - DNA, 30 bp, Artificial Sequence
  Synthetic oligonucleotide
aagttcatacgtgaagtacacttggcggtt

SEQ ID NO: 439113 - DNA, 30 bp, Artificial Sequence
  Synthetic oligonucleotide
caatctgggtgaggggaaattcttgcggtt

SEQ ID NO: 439114 - DNA, 30 bp, Artificial Sequence
  Synthetic oligonucleotide
ctcttaggtgttgcgaacgcaaaatcggtt

SEQ ID NO: 439115 - DNA, 30 bp, Artificial Sequence
  Synthetic oligonucleotide
gcaatctacctgtgtttgataaaatcggtt

SEQ ID NO: 439116 - DNA, 30 bp, Artificial Sequence
  Synthetic oligonucleotide
ctgcgagtagtaaatctgtgcgcctcggtt

SEQ ID NO: 439117 - DNA, 30 bp, Artificial Sequence
  Synthetic oligonucleotide
accctagcattgatgacgcacgagtcggtt

SEQ ID NO: 439118 - DNA, 30 bp, Artificial Sequence
  Synthetic oligonucleotide
ttagaaaaaactttaactcccatgtcggtt

SEQ ID NO: 439119 - DNA, 30 bp, Artificial Sequence
  Synthetic oligonucleotide
atgatcttggtcaaaggtctgggttcggtt

SEQ ID NO: 439120 - DNA, 30 bp, Artificial Sequence
  Synthetic oligonucleotide
taataagctttaccccgggttgtcagggtt

SEQ ID NO: 439121 - DNA, 30 bp, Artificial Sequence
  Synthetic oligonucleotide
cacaggggacgccgcttatagtagagggtt

SEQ ID NO: 439122 - DNA, 30 bp, Artificial Sequence
  Synthetic oligonucleotide
aaacgggcccacctgtactcctggagggtt

SEQ ID NO: 439123 - DNA, 30 bp, Artificial Sequence
  Synthetic oligonucleotide
attggtgaccgtgcgagccatcaacgggtt

SEQ ID NO: 439124 - DNA, 30 bp, Artificial Sequence
  Synthetic oligonucleotide
gtgcctgtaacctttctaaccggccgggtt

SEQ ID NO: 439125 - DNA, 30 bp, Artificial Sequence
  Synthetic oligonucleotide
gttttccgacctttagcatatgtccgggtt

SEQ ID NO: 439126 - DNA, 30 bp, Artificial Sequence
  Synthetic oligonucleotide
cctcggggtggcacgggttaatggcgggtt

SEQ ID NO: 439127 - DNA, 30 bp, Artificial Sequence
  Synthetic oligonucleotide
cttgagggttgaacgcagatcggtcgggtt

SEQ ID NO: 439128 - DNA, 30 bp, Artificial Sequence
  Synthetic oligonucleotide
gtctagatcagtagcgactatggtcgggtt

SEQ ID NO: 439129 - DNA, 30 bp, Artificial Sequence
  Synthetic oligonucleotide
aaacggccatttatatttcacgttcgggtt

SEQ ID NO: 439130 - DNA, 30 bp, Artificial Sequence
  Synthetic oligonucleotide
gggttttaaaagcatattgttgaaggggtt

SEQ ID NO: 439131 - DNA, 30 bp, Artificial Sequence
  Synthetic oligonucleotide
atcgggggtaggaaaacggaataaggggtt

SEQ ID NO: 439132 - DNA, 30 bp, Artificial Sequence
  Synthetic oligonucleotide
ggtaacgacgatatccggttcacaggggtt

SEQ ID NO: 439133 - DNA, 30 bp, Artificial Sequence
  Synthetic oligonucleotide
cataagccttatcctgtggccataggggtt

SEQ ID NO: 439134 - DNA, 30 bp, Artificial Sequence
  Synthetic oligonucleotide
cgaacgcgaatgctacgccgctccggggtt

SEQ ID NO: 439135 - DNA, 30 bp, Artificial Sequence
  Synthetic oligonucleotide
gaatatcactgttgcgaaacgtccggggtt

SEQ ID NO: 439136 - DNA, 30 bp, Artificial Sequence
  Synthetic oligonucleotide
tgctagtaatcttttggtcgtagcggggtt

SEQ ID NO: 439137 - DNA, 30 bp, Artificial Sequence
  Synthetic oligonucleotide
gtgagcccggaatgcggagcggcgggggtt

SEQ ID NO: 439138 - DNA, 30 bp, Artificial Sequence
  Synthetic oligonucleotide
gcgataagaggtatactccggtatggggtt

SEQ ID NO: 439139 - DNA, 30 bp, Artificial Sequence
  Synthetic oligonucleotide
cccaggtcatgattaaactcaactggggtt

SEQ ID NO: 439140 - DNA, 30 bp, Artificial Sequence
  Synthetic oligonucleotide
tgagcagtaaaccaaagccgaagtggggtt

SEQ ID NO: 439141 - DNA, 30 bp, Artificial Sequence
  Synthetic oligonucleotide
ggtcataagagacgtacgccgaaatgggtt

SEQ ID NO: 439142 - DNA, 31 bp, Artificial Sequence
  Synthetic oligonucleotide
gaactaggcaactcgtgtacccgaatgggtt

SEQ ID NO: 439143 - DNA, 30 bp, Artificial Sequence
  Synthetic oligonucleotide
aagcctgtagggagtaggcctagatgggtt

SEQ ID NO: 439144 - DNA, 30 bp, Artificial Sequence
  Synthetic oligonucleotide
tgcacgacaataactataccgtgatgggtt

SEQ ID NO: 439145 - DNA, 30 bp, Artificial Sequence
  Synthetic oligonucleotide
gagggaaggccgagtatttgcttctgggtt

SEQ ID NO: 439146 - DNA, 30 bp, Artificial Sequence
  Synthetic oligonucleotide
gataggaccgcatatccgggtttctgggtt

SEQ ID NO: 439147 - DNA, 30 bp, Artificial Sequence
  Synthetic oligonucleotide
aagggcttgataagtcaatccgggtgggtt

SEQ ID NO: 439148 - DNA, 30 bp, Artificial Sequence
  Synthetic oligonucleotide
tttgcaaggtcacatggccgcgggtgggtt

SEQ ID NO: 439149 - DNA, 30 bp, Artificial Sequence
  Synthetic oligonucleotide
actgtacttcctaggccctggaattgggtt

SEQ ID NO: 439150 - DNA, 30 bp, Artificial Sequence
  Synthetic oligonucleotide
ctcctacgaagccagtgcgctacttgggtt

SEQ ID NO: 439151 - DNA, 30 bp, Artificial Sequence
  Synthetic oligonucleotide
cgccatgccttgcccggagcaccttgggtt

SEQ ID NO: 439152 - DNA, 30 bp, Artificial Sequence
  Synthetic oligonucleotide
cgactatgcttatcaatcacccgttgggtt

SEQ ID NO: 439153 - DNA, 30 bp, Artificial Sequence
  Synthetic oligonucleotide
tgctggtaagagaaagttttcgtcatggtt

SEQ ID NO: 439154 - DNA, 30 bp, Artificial Sequence
  Synthetic oligonucleotide
atgaaccagtatcctcacggtgtcatggtt

SEQ ID NO: 439155 - DNA, 30 bp, Artificial Sequence
  Synthetic oligonucleotide
tctataatacttaaagttgttacgatggtt

SEQ ID NO: 439156 - DNA, 30 bp, Artificial Sequence
  Synthetic oligonucleotide
tagctactaggggttcaaatctcgatggtt

SEQ ID NO: 439157 - DNA, 30 bp, Artificial Sequence
  Synthetic oligonucleotide
gttcagcaccaggcgtgtggcgctatggtt

SEQ ID NO: 439158 - DNA, 30 bp, Artificial Sequence
  Synthetic oligonucleotide
tagaaatcaatagacgcgggtggtatggtt

SEQ ID NO: 439159 - DNA, 30 bp, Artificial Sequence
  Synthetic oligonucleotide
gactccgggtcttatcgaatttgtatggtt

SEQ ID NO: 439160 - DNA, 30 bp, Artificial Sequence
  Synthetic oligonucleotide
actcgaagtattcgcctctttcaactggtt

SEQ ID NO: 439161 - DNA, 30 bp, Artificial Sequence
  Synthetic oligonucleotide
ggctatgtggcaacgctcagtacactggtt

SEQ ID NO: 439162 - DNA, 30 bp, Artificial Sequence
  Synthetic oligonucleotide
taatagattctaataacggctagactggtt

SEQ ID NO: 439163 - DNA, 30 bp, Artificial Sequence
  Synthetic oligonucleotide
ggtcttctagtatagcaaaacggactggtt

SEQ ID NO: 439164 - DNA, 30 bp, Artificial Sequence
  Synthetic oligonucleotide
tgtttgctatttcaaagaaagttactggtt

SEQ ID NO: 439165 - DNA, 30 bp, Artificial Sequence
  Synthetic oligonucleotide
aataacctactggcgaccttgaacctggtt

SEQ ID NO: 439166 - DNA, 30 bp, Artificial Sequence
  Synthetic oligonucleotide
tagaccccgcccagcactgttcccctggtt

SEQ ID NO: 439167 - DNA, 30 bp, Artificial Sequence
  Synthetic oligonucleotide
ctgtgctataacatgttctcgcgcctggtt

SEQ ID NO: 439168 - DNA, 30 bp, Artificial Sequence
  Synthetic oligonucleotide
actagcgcagcgcgtacccagggtctggtt

SEQ ID NO: 439169 - DNA, 30 bp, Artificial Sequence
  Synthetic oligonucleotide
ggaagaagaccaccgttaaccaacgtggtt

SEQ ID NO: 439170 - DNA, 30 bp, Artificial Sequence
  Synthetic oligonucleotide
acctgtaggtagcgcctgatcatcgtggtt

SEQ ID NO: 439171 - DNA, 30 bp, Artificial Sequence
  Synthetic oligonucleotide
aatgtgtggtgaataaggcctatcgtggtt

SEQ ID NO: 439172 - DNA, 30 bp, Artificial Sequence
  Synthetic oligonucleotide
acctgatgcggatacaaaacggtcgtggtt

SEQ ID NO: 439173 - DNA, 30 bp, Artificial Sequence
  Synthetic oligonucleotide
cagtgcttctgtatttggggtactgtggtt

SEQ ID NO: 439174 - DNA, 30 bp, Artificial Sequence
  Synthetic oligonucleotide
tcaggataatagcaaatgtgtcgtgtggtt

SEQ ID NO: 439175 - DNA, 30 bp, Artificial Sequence
  Synthetic oligonucleotide
cgccacggtttgaggcctgattgtgtggtt

SEQ ID NO: 439176 - DNA, 30 bp, Artificial Sequence
  Synthetic oligonucleotide
ttctatggggttggatggcgacttgtggtt

SEQ ID NO: 439177 - DNA, 30 bp, Artificial Sequence
  Synthetic oligonucleotide
ttacgcacggtaagcttttttaaattggtt

SEQ ID NO: 439178 - DNA, 30 bp, Artificial Sequence
  Synthetic oligonucleotide
gatagttagtccgtaactaggcaattggtt

SEQ ID NO: 439179 - DNA, 30 bp, Artificial Sequence
  Synthetic oligonucleotide
gatacatgccacttattagtctaattggtt

SEQ ID NO: 439180 - DNA, 30 bp, Artificial Sequence
  Synthetic oligonucleotide
ttgagtctatcaacataccattgattggtt

SEQ ID NO: 439181 - DNA, 30 bp, Artificial Sequence
  Synthetic oligonucleotide
acttatgtctctaaccagtggctattggtt

SEQ ID NO: 439182 - DNA, 30 bp, Artificial Sequence
  Synthetic oligonucleotide
ttcctaactgtctagtcgcgggtattggtt

SEQ ID NO: 439183 - DNA, 30 bp, Artificial Sequence
  Synthetic oligonucleotide
atctgccctgagaagggagcaatcttggtt

SEQ ID NO: 439184 - DNA, 30 bp, Artificial Sequence
  Synthetic oligonucleotide
ctcattagcaacaggttgccatagttggtt

SEQ ID NO: 439185 - DNA, 30 bp, Artificial Sequence
  Synthetic oligonucleotide
gcaagcacctcgctaatacaagcgttggtt

SEQ ID NO: 439186 - DNA, 30 bp, Artificial Sequence
  Synthetic oligonucleotide
gttcggagaccagcggggaaaaggttggtt

SEQ ID NO: 439187 - DNA, 30 bp, Artificial Sequence
  Synthetic oligonucleotide
ccaacagttgcaggccggtcaaggttggtt

SEQ ID NO: 439188 - DNA, 30 bp, Artificial Sequence
  Synthetic oligonucleotide
ctaatatgccccggtcgaagaatgttggtt

SEQ ID NO: 439189 - DNA, 30 bp, Artificial Sequence
  Synthetic oligonucleotide
tgccgcacaagtgaagtcgagaatttggtt

SEQ ID NO: 439190 - DNA, 30 bp, Artificial Sequence
  Synthetic oligonucleotide
tgcgcatatggatcacctgggcatttggtt

SEQ ID NO: 439191 - DNA, 30 bp, Artificial Sequence
  Synthetic oligonucleotide
cgtcatgcttggtagacacggggtttggtt

SEQ ID NO: 439192 - DNA, 30 bp, Artificial Sequence
  Synthetic oligonucleotide
aagttttgtaacctcggacgtaaaaatgtt

SEQ ID NO: 439193 - DNA, 30 bp, Artificial Sequence
  Synthetic oligonucleotide
ccaaactacagttttcttgtccaaaatgtt

SEQ ID NO: 439194 - DNA, 30 bp, Artificial Sequence
  Synthetic oligonucleotide
tggatgtacgaggaaggcatttaaaatgtt

SEQ ID NO: 439195 - DNA, 30 bp, Artificial Sequence
  Synthetic oligonucleotide
gtgaaaatccacgcccgcgaaacaaatgtt

SEQ ID NO: 439196 - DNA, 30 bp, Artificial Sequence
  Synthetic oligonucleotide
ttgggaacacattggtgtaagtcaaatgtt

SEQ ID NO: 439197 - DNA, 30 bp, Artificial Sequence
  Synthetic oligonucleotide
aagcttttatcccggagtgggtgcaatgtt

SEQ ID NO: 439198 - DNA, 30 bp, Artificial Sequence
  Synthetic oligonucleotide
gcgtttgaaggtaggaagtgcctcaatgtt

SEQ ID NO: 439199 - DNA, 30 bp, Artificial Sequence
  Synthetic oligonucleotide
gttggtgtctctcagcagacattcaatgtt

SEQ ID NO: 439200 - DNA, 30 bp, Artificial Sequence
  Synthetic oligonucleotide
aaatttgcgttaatgcattcattgaatgtt

SEQ ID NO: 439201 - DNA, 30 bp, Artificial Sequence
  Synthetic oligonucleotide
tgtttaggtcacgctaggaattaacatgtt

SEQ ID NO: 439202 - DNA, 30 bp, Artificial Sequence
  Synthetic oligonucleotide
gtcgcacgcatggggccatcaggacatgtt

SEQ ID NO: 439203 - DNA, 30 bp, Artificial Sequence
  Synthetic oligonucleotide
atacaacctcctgctcttgaatgacatgtt

SEQ ID NO: 439204 - DNA, 30 bp, Artificial Sequence
  Synthetic oligonucleotide
gagccggcgtagcttccgtttgaccatgtt

SEQ ID NO: 439205 - DNA, 30 bp, Artificial Sequence
  Synthetic oligonucleotide
tcgccacgatagggtagtaaaagccatgtt

SEQ ID NO: 439206 - DNA, 30 bp, Artificial Sequence
  Synthetic oligonucleotide
ttatccggcccggattcgaggttccatgtt

SEQ ID NO: 439207 - DNA, 31 bp, Artificial Sequence
  Synthetic oligonucleotide
ctcctggagacgacttcataggttccatgtt

SEQ ID NO: 439208 - DNA, 30 bp, Artificial Sequence
  Synthetic oligonucleotide
aagacatacatatacctgtctgagcatgtt

SEQ ID NO: 439209 - DNA, 30 bp, Artificial Sequence
  Synthetic oligonucleotide
aaattagctcgtgaggaccaggggcatgtt

SEQ ID NO: 439210 - DNA, 30 bp, Artificial Sequence
  Synthetic oligonucleotide
tggggtcatgaagatcacggttatcatgtt

SEQ ID NO: 439211 - DNA, 30 bp, Artificial Sequence
  Synthetic oligonucleotide
ataggtcggataggcttcaaaattcatgtt

SEQ ID NO: 439212 - DNA, 30 bp, Artificial Sequence
  Synthetic oligonucleotide
tacgccgtttcttcggcttctcaagatgtt

SEQ ID NO: 439213 - DNA, 30 bp, Artificial Sequence
  Synthetic oligonucleotide
tcccagtgaggccacgttaacttagatgtt

SEQ ID NO: 439214 - DNA, 30 bp, Artificial Sequence
  Synthetic oligonucleotide
tggtcgtgtagctgatttgtaggcgatgtt

SEQ ID NO: 439215 - DNA, 30 bp, Artificial Sequence
  Synthetic oligonucleotide
gaaagttccctcagactcaggggtgatgtt

SEQ ID NO: 439216 - DNA, 30 bp, Artificial Sequence
  Synthetic oligonucleotide
taaactaatcattcctcaccccagtatgtt

SEQ ID NO: 439217 - DNA, 30 bp, Artificial Sequence
  Synthetic oligonucleotide
cctagcaaaggtaagcagcgtcagtatgtt

SEQ ID NO: 439218 - DNA, 30 bp, Artificial Sequence
  Synthetic oligonucleotide
tagtctagcccaggcggcgcaacttatgtt

SEQ ID NO: 439219 - DNA, 30 bp, Artificial Sequence
  Synthetic oligonucleotide
ttgcgtgaccaagccaagtatacttatgtt

SEQ ID NO: 439220 - DNA, 30 bp, Artificial Sequence
  Synthetic oligonucleotide
catatagataacagaacttggcgttatgtt

SEQ ID NO: 439221 - DNA, 30 bp, Artificial Sequence
  Synthetic oligonucleotide
agccgtctttttttaccaactaacactgtt

SEQ ID NO: 439222 - DNA, 30 bp, Artificial Sequence
  Synthetic oligonucleotide
tacatgagattctgcaaggcgttcactgtt

SEQ ID NO: 439223 - DNA, 30 bp, Artificial Sequence
  Synthetic oligonucleotide
gcacccatgaaccggcctccggggactgtt

SEQ ID NO: 439224 - DNA, 30 bp, Artificial Sequence
  Synthetic oligonucleotide
tgcaaagctcgattggagcaaggacctgtt

SEQ ID NO: 439225 - DNA, 30 bp, Artificial Sequence
  Synthetic oligonucleotide
tagtgcatccgatatgattatatacctgtt

SEQ ID NO: 439226 - DNA, 30 bp, Artificial Sequence
  Synthetic oligonucleotide
agggcctagcgggttgcccattaccctgtt

SEQ ID NO: 439227 - DNA, 30 bp, Artificial Sequence
  Synthetic oligonucleotide
agatttccaaggcgaatgttttcccctgtt

SEQ ID NO: 439228 - DNA, 30 bp, Artificial Sequence
  Synthetic oligonucleotide
cgccagtcaacggacttattggggcctgtt

SEQ ID NO: 439229 - DNA, 30 bp, Artificial Sequence
  Synthetic oligonucleotide
catagacatgtttttgaaggggttcctgtt

SEQ ID NO: 439230 - DNA, 30 bp, Artificial Sequence
  Synthetic oligonucleotide
cgatagcaacgcgggctgtggtttcctgtt

SEQ ID NO: 439231 - DNA, 30 bp, Artificial Sequence
  Synthetic oligonucleotide
ctaatcaacgcacaagagctcggcgctgtt

SEQ ID NO: 439232 - DNA, 30 bp, Artificial Sequence
  Synthetic oligonucleotide
ggctgtctagttaggaactaaggctctgtt

SEQ ID NO: 439233 - DNA, 30 bp, Artificial Sequence
  Synthetic oligonucleotide
cccgagtcatatagaaggacgccgtctgtt

SEQ ID NO: 439234 - DNA, 30 bp, Artificial Sequence
  Synthetic oligonucleotide
gtcccgtccgtattaaatttacattctgtt

SEQ ID NO: 439235 - DNA, 30 bp, Artificial Sequence
  Synthetic oligonucleotide
gcacttgtcgctacagacgattaaagtgtt

SEQ ID NO: 439236 - DNA, 30 bp, Artificial Sequence
  Synthetic oligonucleotide
ggttcttggtaggccgcccagcgaagtgtt

SEQ ID NO: 439237 - DNA, 30 bp, Artificial Sequence
  Synthetic oligonucleotide
aagagagtagttgggcgctaactaagtgtt

SEQ ID NO: 439238 - DNA, 30 bp, Artificial Sequence
  Synthetic oligonucleotide
gatagatactatggccggactgtcagtgtt

SEQ ID NO: 439239 - DNA, 30 bp, Artificial Sequence
  Synthetic oligonucleotide
cgccctcttgactctgccggtcatagtgtt

SEQ ID NO: 439240 - DNA, 30 bp, Artificial Sequence
  Synthetic oligonucleotide
gtaaccttctgcgaacgagggtatagtgtt

SEQ ID NO: 439241 - DNA, 30 bp, Artificial Sequence
  Synthetic oligonucleotide
gcgcataagcaacttggtccagcccgtgtt

SEQ ID NO: 439242 - DNA, 30 bp, Artificial Sequence
  Synthetic oligonucleotide
ttcgcagggacacacctcttctgccgtgtt

SEQ ID NO: 439243 - DNA, 30 bp, Artificial Sequence
  Synthetic oligonucleotide
gaattgcgaggctcatgatgtctccgtgtt

SEQ ID NO: 439244 - DNA, 30 bp, Artificial Sequence
  Synthetic oligonucleotide
atagcaaaactggttggatattcaggtgtt

SEQ ID NO: 439245 - DNA, 30 bp, Artificial Sequence
  Synthetic oligonucleotide
catcggcagctaccactgaacgtaggtgtt

SEQ ID NO: 439246 - DNA, 30 bp, Artificial Sequence
  Synthetic oligonucleotide
aacggaggtcattgtattcgcgtcggtgtt

SEQ ID NO: 439247 - DNA, 30 bp, Artificial Sequence
  Synthetic oligonucleotide
acttccttgtagcgggcccattagggtgtt

SEQ ID NO: 439248 - DNA, 30 bp, Artificial Sequence
  Synthetic oligonucleotide
accgtaccagtttttgcgatcgggggtgtt

SEQ ID NO: 439249 - DNA, 30 bp, Artificial Sequence
  Synthetic oligonucleotide
atggtacggtatgtctatactggtggtgtt

SEQ ID NO: 439250 - DNA, 30 bp, Artificial Sequence
  Synthetic oligonucleotide
ggaaagcttcgtttcaccggtcttggtgtt

SEQ ID NO: 439251 - DNA, 30 bp, Artificial Sequence
  Synthetic oligonucleotide
tacagtattaagcacagcgtaacatgtgtt

SEQ ID NO: 439252 - DNA, 30 bp, Artificial Sequence
  Synthetic oligonucleotide
tggttttatcgtcagacgctgggatgtgtt

SEQ ID NO: 439253 - DNA, 30 bp, Artificial Sequence
  Synthetic oligonucleotide
tctcgcccccttcgagcggaggcgtgtgtt

SEQ ID NO: 439254 - DNA, 30 bp, Artificial Sequence
  Synthetic oligonucleotide
catacaatactttgggagtatatgtgtgtt

SEQ ID NO: 439255 - DNA, 30 bp, Artificial Sequence
  Synthetic oligonucleotide
tgaggaacctactcaacgcagacttgtgtt

SEQ ID NO: 439256 - DNA, 30 bp, Artificial Sequence
  Synthetic oligonucleotide
accccgccggagattggtccaggaattgtt

SEQ ID NO: 439257 - DNA, 30 bp, Artificial Sequence
  Synthetic oligonucleotide
cctggatttcacaccagaccatgaattgtt

SEQ ID NO: 439258 - DNA, 30 bp, Artificial Sequence
  Synthetic oligonucleotide
agtacaatactaagtacttactgaattgtt

SEQ ID NO: 439259 - DNA, 30 bp, Artificial Sequence
  Synthetic oligonucleotide
attaaatatgtgagttagatagcgattgtt

SEQ ID NO: 439260 - DNA, 30 bp, Artificial Sequence
  Synthetic oligonucleotide
gctctcgcgtcgcgccatcgccggattgtt

SEQ ID NO: 439261 - DNA, 30 bp, Artificial Sequence
  Synthetic oligonucleotide
ttgcgacggaaccattcaacatggattgtt

SEQ ID NO: 439262 - DNA, 30 bp, Artificial Sequence
  Synthetic oligonucleotide
cggttgatacccttgggcatgaatattgtt

SEQ ID NO: 439263 - DNA, 30 bp, Artificial Sequence
  Synthetic oligonucleotide
aaaatctacgtatggacagataaacttgtt

SEQ ID NO: 439264 - DNA, 30 bp, Artificial Sequence
  Synthetic oligonucleotide
tccctgtactcgtgaatacaatcacttgtt

SEQ ID NO: 439265 - DNA, 30 bp, Artificial Sequence
  Synthetic oligonucleotide
cttaatataactgttaagggaagacttgtt

SEQ ID NO: 439266 - DNA, 30 bp, Artificial Sequence
  Synthetic oligonucleotide
gtataatgtctaacacctactggacttgtt

SEQ ID NO: 439267 - DNA, 30 bp, Artificial Sequence
  Synthetic oligonucleotide
gacctgtggactaagtaaaaagtacttgtt

SEQ ID NO: 439268 - DNA, 30 bp, Artificial Sequence
  Synthetic oligonucleotide
aacccgggaacacttctatcccatcttgtt

SEQ ID NO: 439269 - DNA, 30 bp, Artificial Sequence
  Synthetic oligonucleotide
aaatgaactagaagacacggaccagttgtt

SEQ ID NO: 439270 - DNA, 30 bp, Artificial Sequence
  Synthetic oligonucleotide
agtactaacggcataactggtggagttgtt

SEQ ID NO: 439271 - DNA, 30 bp, Artificial Sequence
  Synthetic oligonucleotide
gtttaaggcgagacctaactgttagttgtt

SEQ ID NO: 439272 - DNA, 30 bp, Artificial Sequence
  Synthetic oligonucleotide
gaatgttgcagtcgggcggaaaacgttgtt

SEQ ID NO: 439273 - DNA, 30 bp, Artificial Sequence
  Synthetic oligonucleotide
gactatggggggaagcaagtcgccgttgtt

SEQ ID NO: 439274 - DNA, 30 bp, Artificial Sequence
  Synthetic oligonucleotide
gtctttgcagtagatgctaagatcgttgtt

SEQ ID NO: 439275 - DNA, 30 bp, Artificial Sequence
  Synthetic oligonucleotide
cgtggagcccttcttagcaatggggttgtt

SEQ ID NO: 439276 - DNA, 30 bp, Artificial Sequence
  Synthetic oligonucleotide
ccaattcgtttttagtgtattttggttgtt

SEQ ID NO: 439277 - DNA, 30 bp, Artificial Sequence
  Synthetic oligonucleotide
taacaatgttaagatttacagtatgttgtt

SEQ ID NO: 439278 - DNA, 30 bp, Artificial Sequence
  Synthetic oligonucleotide
tagtcggcacggacccaacttagtgttgtt

SEQ ID NO: 439279 - DNA, 30 bp, Artificial Sequence
  Synthetic oligonucleotide
ttgctaatcaataactcttgtacatttgtt

SEQ ID NO: 439280 - DNA, 30 bp, Artificial Sequence
  Synthetic oligonucleotide
ctccaactgagtaatcaaccttcatttgtt

SEQ ID NO: 439281 - DNA, 30 bp, Artificial Sequence
  Synthetic oligonucleotide
agggcttgacagccatctgtgagatttgtt

SEQ ID NO: 439282 - DNA, 30 bp, Artificial Sequence
  Synthetic oligonucleotide
gccagtcaacctatggcggcgcgatttgtt

SEQ ID NO: 439283 - DNA, 30 bp, Artificial Sequence
  Synthetic oligonucleotide
ccgttgttgtcaacataacgatgatttgtt

SEQ ID NO: 439284 - DNA, 30 bp, Artificial Sequence
  Synthetic oligonucleotide
aggaagatattaatgactctaagctttgtt

SEQ ID NO: 439285 - DNA, 30 bp, Artificial Sequence
  Synthetic oligonucleotide
taaagaggctggctcgtaccgggctttgtt

SEQ ID NO: 439286 - DNA, 30 bp, Artificial Sequence
  Synthetic oligonucleotide
gatgtcagtgtaaggaaagtcatgtttgtt

SEQ ID NO: 439287 - DNA, 30 bp, Artificial Sequence
  Synthetic oligonucleotide
gtatacgctctggggttagaagattttgtt

SEQ ID NO: 439288 - DNA, 30 bp, Artificial Sequence
  Synthetic oligonucleotide
tgtccattcctaacatggccgacttttgtt

SEQ ID NO: 439289 - DNA, 30 bp, Artificial Sequence
  Synthetic oligonucleotide
ggcaaacatagctataattaaggttttgtt

SEQ ID NO: 439290 - DNA, 30 bp, Artificial Sequence
  Synthetic oligonucleotide
ctcacttccgaatgccggcttctttttgtt

SEQ ID NO: 439291 - DNA, 30 bp, Artificial Sequence
  Synthetic oligonucleotide
ggtccaaccggttcttaaatcaaaaaattt

SEQ ID NO: 439292 - DNA, 30 bp, Artificial Sequence
  Synthetic oligonucleotide
ttccggtgcgcctagaccaaagtaaaattt

SEQ ID NO: 439293 - DNA, 30 bp, Artificial Sequence
  Synthetic oligonucleotide
gcacccgcttgttatcaaacgagcaaattt

SEQ ID NO: 439294 - DNA, 30 bp, Artificial Sequence
  Synthetic oligonucleotide
gggctcgtttagaccccggccttcaaattt

SEQ ID NO: 439295 - DNA, 30 bp, Artificial Sequence
  Synthetic oligonucleotide
ttgatggggggtagagtaccccataaattt

SEQ ID NO: 439296 - DNA, 30 bp, Artificial Sequence
  Synthetic oligonucleotide
ccgtactaagcggccgtcgtatttaaattt

SEQ ID NO: 439297 - DNA, 30 bp, Artificial Sequence
  Synthetic oligonucleotide
tacctcacagaatcttactgttaccaattt

SEQ ID NO: 439298 - DNA, 30 bp, Artificial Sequence
  Synthetic oligonucleotide
gttcagtaattaactgactatgcgcaattt

SEQ ID NO: 439299 - DNA, 30 bp, Artificial Sequence
  Synthetic oligonucleotide
tagccggataggtagaaatcttggcaattt

SEQ ID NO: 439300 - DNA, 30 bp, Artificial Sequence
  Synthetic oligonucleotide
tatcacgggacgctcgggcttgtgcaattt

SEQ ID NO: 439301 - DNA, 30 bp, Artificial Sequence
  Synthetic oligonucleotide
tccagtgagtaggcttctctgtatcaattt

SEQ ID NO: 439302 - DNA, 30 bp, Artificial Sequence
  Synthetic oligonucleotide
aatgttggaaatttcaggccgattcaattt

SEQ ID NO: 439303 - DNA, 30 bp, Artificial Sequence
  Synthetic oligonucleotide
actttcaaatgggcatgacgttaagaattt

SEQ ID NO: 439304 - DNA, 30 bp, Artificial Sequence
  Synthetic oligonucleotide
gcggagtcgtaccccacggggcgagaattt

SEQ ID NO: 439305 - DNA, 30 bp, Artificial Sequence
  Synthetic oligonucleotide
tctatacagtctgcaccttcaatagaattt

SEQ ID NO: 439306 - DNA, 30 bp, Artificial Sequence
  Synthetic oligonucleotide
actgtatcagcttctcgctgtggcgaattt

SEQ ID NO: 439307 - DNA, 30 bp, Artificial Sequence
  Synthetic oligonucleotide
acttcactgtagaagcaggacctcgaattt

SEQ ID NO: 439308 - DNA, 30 bp, Artificial Sequence
  Synthetic oligonucleotide
ggaaagaaaagagtagtgttaccggaattt

SEQ ID NO: 439309 - DNA, 30 bp, Artificial Sequence
  Synthetic oligonucleotide
cctataagggttcgggagatgatggaattt

SEQ ID NO: 439310 - DNA, 30 bp, Artificial Sequence
  Synthetic oligonucleotide
gtttgggttcttttgggtaccattgaattt

SEQ ID NO: 439311 - DNA, 30 bp, Artificial Sequence
  Synthetic oligonucleotide
gggggatggcagtgtggtgaacttgaattt

SEQ ID NO: 439312 - DNA, 30 bp, Artificial Sequence
  Synthetic oligonucleotide
tggacaataaaaccatttgatcaataattt

SEQ ID NO: 439313 - DNA, 30 bp, Artificial Sequence
  Synthetic oligonucleotide
taacaattaacaggctagacataataattt

SEQ ID NO: 439314 - DNA, 30 bp, Artificial Sequence
  Synthetic oligonucleotide
tgtttgcgaagatggtcactctaataattt

SEQ ID NO: 439315 - DNA, 30 bp, Artificial Sequence
  Synthetic oligonucleotide
aaggactcagcaagggcaccaggataattt

SEQ ID NO: 439316 - DNA, 30 bp, Artificial Sequence
  Synthetic oligonucleotide
agttttaacgtagcgtgaggatcctaattt

SEQ ID NO: 439317 - DNA, 30 bp, Artificial Sequence
  Synthetic oligonucleotide
tgtaatagttactcataaagcgtctaattt

SEQ ID NO: 439318 - DNA, 30 bp, Artificial Sequence
  Synthetic oligonucleotide
aacctgaccgcaacccctgtcgtctaattt

SEQ ID NO: 439319 - DNA, 30 bp, Artificial Sequence
  Synthetic oligonucleotide
ttaccaatatgacataaagtgaattaattt

SEQ ID NO: 439320 - DNA, 30 bp, Artificial Sequence
  Synthetic oligonucleotide
ttagccgctatagaagatgagtattaattt

SEQ ID NO: 439321 - DNA, 30 bp, Artificial Sequence
  Synthetic oligonucleotide
aatctgtgatgctttatgtattcttaattt

SEQ ID NO: 439322 - DNA, 30 bp, Artificial Sequence
  Synthetic oligonucleotide
caaacagtgcctagtcttagtacaacattt

SEQ ID NO: 439323 - DNA, 31 bp, Artificial Sequence
  Synthetic oligonucleotide
attcgacgtgtatcaatgctacgcaacattt

SEQ ID NO: 439324 - DNA, 30 bp, Artificial Sequence
  Synthetic oligonucleotide
ttcagcggagtgaatatttgaagaacattt

SEQ ID NO: 439325 - DNA, 30 bp, Artificial Sequence
  Synthetic oligonucleotide
gtgttcggcgtggcaaaactcagaacattt

SEQ ID NO: 439326 - DNA, 30 bp, Artificial Sequence
  Synthetic oligonucleotide
ggcgtgtttttgataagaacactcacattt

SEQ ID NO: 439327 - DNA, 30 bp, Artificial Sequence
  Synthetic oligonucleotide
atgagccaatggatttaagtgtagacattt

SEQ ID NO: 439328 - DNA, 30 bp, Artificial Sequence
  Synthetic oligonucleotide
agcaggagcacatcgctttggtcgacattt

SEQ ID NO: 439329 - DNA, 30 bp, Artificial Sequence
  Synthetic oligonucleotide
gtgtgagatcgagccgggtgtaatacattt

SEQ ID NO: 439330 - DNA, 30 bp, Artificial Sequence
  Synthetic oligonucleotide
taatgaatgaatgacaatgggagtacattt

SEQ ID NO: 439331 - DNA, 30 bp, Artificial Sequence
  Synthetic oligonucleotide
gaaatgggtcacttccgggagcccccattt

SEQ ID NO: 439332 - DNA, 30 bp, Artificial Sequence
  Synthetic oligonucleotide
gctcagacgcaccgattgttctccccattt

SEQ ID NO: 439333 - DNA, 30 bp, Artificial Sequence
  Synthetic oligonucleotide
tgtactgtgcatcctctgtacgagccattt

SEQ ID NO: 439334 - DNA, 30 bp, Artificial Sequence
  Synthetic oligonucleotide
ccctagtttcaattttcagggtatccattt

SEQ ID NO: 439335 - DNA, 30 bp, Artificial Sequence
  Synthetic oligonucleotide
tgtcgcctctatcgcagtgcgggtccattt

SEQ ID NO: 439336 - DNA, 30 bp, Artificial Sequence
  Synthetic oligonucleotide
agtgacttcctggcaccgacgtgtccattt

SEQ ID NO: 439337 - DNA, 30 bp, Artificial Sequence
  Synthetic oligonucleotide
tatgaaagaaaatagttcttcattccattt

SEQ ID NO: 439338 - DNA, 30 bp, Artificial Sequence
  Synthetic oligonucleotide
gaccttaacagttcattaccgcttccattt

SEQ ID NO: 439339 - DNA, 30 bp, Artificial Sequence
  Synthetic oligonucleotide
tagtcacggactataattatagaagcattt

SEQ ID NO: 439340 - DNA, 30 bp, Artificial Sequence
  Synthetic oligonucleotide
gcaatcgcctttgggtatagaaaggcattt

SEQ ID NO: 439341 - DNA, 30 bp, Artificial Sequence
  Synthetic oligonucleotide
gacagcacaccgtaaagccaccaggcattt

SEQ ID NO: 439342 - DNA, 30 bp, Artificial Sequence
  Synthetic oligonucleotide
ggtattggctatcccaaccggagggcattt

SEQ ID NO: 439343 - DNA, 30 bp, Artificial Sequence
  Synthetic oligonucleotide
accctatagtatgcgaccattaatgcattt

SEQ ID NO: 439344 - DNA, 30 bp, Artificial Sequence
  Synthetic oligonucleotide
taaatcaccataacagtcctttcatcattt

SEQ ID NO: 439345 - DNA, 30 bp, Artificial Sequence
  Synthetic oligonucleotide
gtcgattttgccttccgcgaaagatcattt

SEQ ID NO: 439346 - DNA, 30 bp, Artificial Sequence
  Synthetic oligonucleotide
cgcatattgcaccgcaaccgtatctcattt

SEQ ID NO: 439347 - DNA, 30 bp, Artificial Sequence
  Synthetic oligonucleotide
gcatagggcgtgcaggccactttctcattt

SEQ ID NO: 439348 - DNA, 30 bp, Artificial Sequence
  Synthetic oligonucleotide
atgcagctctccaagagttcattgtcattt

SEQ ID NO: 439349 - DNA, 30 bp, Artificial Sequence
  Synthetic oligonucleotide
ccgattgcatttacttatagaacttcattt

SEQ ID NO: 439350 - DNA, 30 bp, Artificial Sequence
  Synthetic oligonucleotide
cctagaatagtatcagggtacgcttcattt

SEQ ID NO: 439351 - DNA, 30 bp, Artificial Sequence
  Synthetic oligonucleotide
aataaactgatgtaatgctatcgttcattt

SEQ ID NO: 439352 - DNA, 30 bp, Artificial Sequence
  Synthetic oligonucleotide
tcatgtttacatgggtgaataataagattt

SEQ ID NO: 439353 - DNA, 30 bp, Artificial Sequence
  Synthetic oligonucleotide
tggctgaaaacgggtttagagataagattt

SEQ ID NO: 439354 - DNA, 30 bp, Artificial Sequence
  Synthetic oligonucleotide
aaaaacctaagacaccacattgccagattt

SEQ ID NO: 439355 - DNA, 30 bp, Artificial Sequence
  Synthetic oligonucleotide
catagtaatgctctcggaggtagcagattt

SEQ ID NO: 439356 - DNA, 30 bp, Artificial Sequence
  Synthetic oligonucleotide
gcaccttacccgtgttaagggtgcagattt

SEQ ID NO: 439357 - DNA, 30 bp, Artificial Sequence
  Synthetic oligonucleotide
caggtgccagtgtttattgagtagagattt

SEQ ID NO: 439358 - DNA, 30 bp, Artificial Sequence
  Synthetic oligonucleotide
acagaggcacttcttgacttgactagattt

SEQ ID NO: 439359 - DNA, 30 bp, Artificial Sequence
  Synthetic oligonucleotide
tgccggaatcaacatctgccaatccgattt

SEQ ID NO: 439360 - DNA, 30 bp, Artificial Sequence
  Synthetic oligonucleotide
ttgtcatgtaaggtcccaatgcatcgattt

SEQ ID NO: 439361 - DNA, 30 bp, Artificial Sequence
  Synthetic oligonucleotide
tagggtaagtgttatcacttaattcgattt

SEQ ID NO: 439362 - DNA, 30 bp, Artificial Sequence
  Synthetic oligonucleotide
gacctgtggcttatgaggtatgcaggattt

SEQ ID NO: 439363 - DNA, 30 bp, Artificial Sequence
  Synthetic oligonucleotide
tagcctggacgttaggaaaagcagggattt

SEQ ID NO: 439364 - DNA, 30 bp, Artificial Sequence
  Synthetic oligonucleotide
aagatgctgagttatccgaccaggggattt

SEQ ID NO: 439365 - DNA, 30 bp, Artificial Sequence
  Synthetic oligonucleotide
taacaatagcaaatttgtatgaggggattt

SEQ ID NO: 439366 - DNA, 30 bp, Artificial Sequence
  Synthetic oligonucleotide
atgtatgaacggtgaacgtgctatggattt

SEQ ID NO: 439367 - DNA, 30 bp, Artificial Sequence
  Synthetic oligonucleotide
attatcggagcatttgagtagcgtggattt

SEQ ID NO: 439368 - DNA, 30 bp, Artificial Sequence
  Synthetic oligonucleotide
gggcccccgggtgtatataacgcatgattt

SEQ ID NO: 439369 - DNA, 30 bp, Artificial Sequence
  Synthetic oligonucleotide
cgatctaccgcaggcccgttaagatgattt

SEQ ID NO: 439370 - DNA, 30 bp, Artificial Sequence
  Synthetic oligonucleotide
atgcagagaacggaaatggacagatgattt

SEQ ID NO: 439371 - DNA, 30 bp, Artificial Sequence
  Synthetic oligonucleotide
gtgcagttgcttgtacctcataggtgattt

SEQ ID NO: 439372 - DNA, 30 bp, Artificial Sequence
  Synthetic oligonucleotide
ttttcagtaatgggaaggcgggtgtgattt

SEQ ID NO: 439373 - DNA, 30 bp, Artificial Sequence
  Synthetic oligonucleotide
agagaagggtattgaggtaggttttgattt

SEQ ID NO: 439374 - DNA, 30 bp, Artificial Sequence
  Synthetic oligonucleotide
attcagtagggcgatggcctgcaaatattt

SEQ ID NO: 439375 - DNA, 30 bp, Artificial Sequence
  Synthetic oligonucleotide
aaacggtaaccctggttcgtctaaatattt

SEQ ID NO: 439376 - DNA, 31 bp, Artificial Sequence
  Synthetic oligonucleotide
gcagcggtcacagccgtctgtagcaatattt

SEQ ID NO: 439377 - DNA, 30 bp, Artificial Sequence
  Synthetic oligonucleotide
caatagtggaaaagctcgtaaggaatattt

SEQ ID NO: 439378 - DNA, 30 bp, Artificial Sequence
  Synthetic oligonucleotide
gtcctccgcttttcagagggagtaatattt

SEQ ID NO: 439379 - DNA, 30 bp, Artificial Sequence
  Synthetic oligonucleotide
aagcggattcgacagcagatatacatattt

SEQ ID NO: 439380 - DNA, 30 bp, Artificial Sequence
  Synthetic oligonucleotide
gtgtcccataaattcacacttaccatattt

SEQ ID NO: 439381 - DNA, 30 bp, Artificial Sequence
  Synthetic oligonucleotide
gctgtcggcttcagatctgatttcatattt

SEQ ID NO: 439382 - DNA, 30 bp, Artificial Sequence
  Synthetic oligonucleotide
cttttcttacgtgtagcccctccgatattt

SEQ ID NO: 439383 - DNA, 30 bp, Artificial Sequence
  Synthetic oligonucleotide
ataaggattaatcggtgtcgaaatatattt

SEQ ID NO: 439384 - DNA, 30 bp, Artificial Sequence
  Synthetic oligonucleotide
agtacagttcaccattcaatccgtatattt

SEQ ID NO: 439385 - DNA, 30 bp, Artificial Sequence
  Synthetic oligonucleotide
ttatccaccgggccaatcgagaaactattt

SEQ ID NO: 439386 - DNA, 30 bp, Artificial Sequence
  Synthetic oligonucleotide
ccaagcgtcagccgggtccgccaactattt

SEQ ID NO: 439387 - DNA, 30 bp, Artificial Sequence
  Synthetic oligonucleotide
gcggtgggttacgtcagaaaatcactattt

SEQ ID NO: 439388 - DNA, 31 bp, Artificial Sequence
  Synthetic oligonucleotide
cgttatagggatctgtgtccgcggactattt

SEQ ID NO: 439389 - DNA, 30 bp, Artificial Sequence
  Synthetic oligonucleotide
caaggtgaaagatctcaactgtgactattt

SEQ ID NO: 439390 - DNA, 30 bp, Artificial Sequence
  Synthetic oligonucleotide
tgggctcggcgtttatgatcgttactattt

SEQ ID NO: 439391 - DNA, 30 bp, Artificial Sequence
  Synthetic oligonucleotide
tcataatagaattgtgatgtgaacctattt

SEQ ID NO: 439392 - DNA, 30 bp, Artificial Sequence
  Synthetic oligonucleotide
cttgcagtgagaacggccgacaggctattt

SEQ ID NO: 439393 - DNA, 30 bp, Artificial Sequence
  Synthetic oligonucleotide
aatactgaggccgaaaatccgaggctattt

SEQ ID NO: 439394 - DNA, 30 bp, Artificial Sequence
  Synthetic oligonucleotide
ctgaattgaaaagacgccaagcaagtattt

SEQ ID NO: 439395 - DNA, 30 bp, Artificial Sequence
  Synthetic oligonucleotide
gcacaacgtatgacattcagccgagtattt

SEQ ID NO: 439396 - DNA, 30 bp, Artificial Sequence
  Synthetic oligonucleotide
gcagtatcctcaaattcacgtcgagtattt

SEQ ID NO: 439397 - DNA, 30 bp, Artificial Sequence
  Synthetic oligonucleotide
cagttccacggtttgacgtcctgagtattt

SEQ ID NO: 439398 - DNA, 30 bp, Artificial Sequence
  Synthetic oligonucleotide
acattttgcctgagggtatagctagtattt

SEQ ID NO: 439399 - DNA, 30 bp, Artificial Sequence
  Synthetic oligonucleotide
acacctgaataagctccaatacaggtattt

SEQ ID NO: 439400 - DNA, 30 bp, Artificial Sequence
  Synthetic oligonucleotide
caaatacttgagggaggtttccaggtattt

SEQ ID NO: 439401 - DNA, 30 bp, Artificial Sequence
  Synthetic oligonucleotide
taaacatgacggggtgtaagctgggtattt

SEQ ID NO: 439402 - DNA, 30 bp, Artificial Sequence
  Synthetic oligonucleotide
aggtgtgcttatttcacgacgtgggtattt

SEQ ID NO: 439403 - DNA, 30 bp, Artificial Sequence
  Synthetic oligonucleotide
ggctggtaaaattgatcgcttctggtattt

SEQ ID NO: 439404 - DNA, 30 bp, Artificial Sequence
  Synthetic oligonucleotide
caaatagcttgaagctcggtgcatgtattt

SEQ ID NO: 439405 - DNA, 30 bp, Artificial Sequence
  Synthetic oligonucleotide
ttgacatctttagtcttatgaactgtattt

SEQ ID NO: 439406 - DNA, 30 bp, Artificial Sequence
  Synthetic oligonucleotide
gctgctcgcctgcttgtctttggtgtattt

SEQ ID NO: 439407 - DNA, 30 bp, Artificial Sequence
  Synthetic oligonucleotide
catgctacgtggggtcgtaccaaattattt

SEQ ID NO: 439408 - DNA, 30 bp, Artificial Sequence
  Synthetic oligonucleotide
gagatatagtaggagcgagttagcttattt

SEQ ID NO: 439409 - DNA, 30 bp, Artificial Sequence
  Synthetic oligonucleotide
cttactggagtgagatcaagtatcttattt

SEQ ID NO: 439410 - DNA, 30 bp, Artificial Sequence
  Synthetic oligonucleotide
cgtccctatgtcttgaacgaaacgttattt

SEQ ID NO: 439411 - DNA, 30 bp, Artificial Sequence
  Synthetic oligonucleotide
agttggaattgcgagcaattacggttattt

SEQ ID NO: 439412 - DNA, 30 bp, Artificial Sequence
  Synthetic oligonucleotide
atcaattaaggctcgagtgtagggttattt

SEQ ID NO: 439413 - DNA, 30 bp, Artificial Sequence
  Synthetic oligonucleotide
caccagaccgataacgtcaaggtgttattt

SEQ ID NO: 439414 - DNA, 30 bp, Artificial Sequence
  Synthetic oligonucleotide
gtccttggttagcatctcatgtatttattt

SEQ ID NO: 439415 - DNA, 30 bp, Artificial Sequence
  Synthetic oligonucleotide
gtgcattaccttgttttgtctgctttattt

SEQ ID NO: 439416 - DNA, 30 bp, Artificial Sequence
  Synthetic oligonucleotide
cctactggctgtttctttcgcagtttattt

SEQ ID NO: 439417 - DNA, 30 bp, Artificial Sequence
  Synthetic oligonucleotide
tgattaatggggttgtgtttagttttattt

SEQ ID NO: 439418 - DNA, 30 bp, Artificial Sequence
  Synthetic oligonucleotide
gggagcggggtaaaaaattcgaaaaacttt

SEQ ID NO: 439419 - DNA, 30 bp, Artificial Sequence
  Synthetic oligonucleotide
tagatagagcctttcagttgaccaaacttt

SEQ ID NO: 439420 - DNA, 30 bp, Artificial Sequence
  Synthetic oligonucleotide
tgattggcatgcagcacaatttcaaacttt

SEQ ID NO: 439421 - DNA, 29 bp, Artificial Sequence
  Synthetic oligonucleotide
aaaggccctcgattcacttaataaacttt

SEQ ID NO: 439422 - DNA, 30 bp, Artificial Sequence
  Synthetic oligonucleotide
gagaaacgtgggattacggggctaaacttt

SEQ ID NO: 439423 - DNA, 30 bp, Artificial Sequence
  Synthetic oligonucleotide
acaaccgatggtcatcggtaggtaaacttt

SEQ ID NO: 439424 - DNA, 30 bp, Artificial Sequence
  Synthetic oligonucleotide
ccgtctccaacgctgtatttgaacaacttt

SEQ ID NO: 439425 - DNA, 30 bp, Artificial Sequence
  Synthetic oligonucleotide
aacgactcgactgggagtaaaaccaacttt

SEQ ID NO: 439426 - DNA, 30 bp, Artificial Sequence
  Synthetic oligonucleotide
cgaaactactcagtacgtggggccaacttt

SEQ ID NO: 439427 - DNA, 30 bp, Artificial Sequence
  Synthetic oligonucleotide
acgcagattaagccaccctcctccaacttt

SEQ ID NO: 439428 - DNA, 30 bp, Artificial Sequence
  Synthetic oligonucleotide
gtattttaggttctagtcggaaggaacttt

SEQ ID NO: 439429 - DNA, 30 bp, Artificial Sequence
  Synthetic oligonucleotide
gctaaagggtggcgcttggcaattaacttt

SEQ ID NO: 439430 - DNA, 30 bp, Artificial Sequence
  Synthetic oligonucleotide
tccgtccattgtgtagctcagcgacacttt

SEQ ID NO: 439431 - DNA, 30 bp, Artificial Sequence
  Synthetic oligonucleotide
gctaccccgcgtactttcaggatacacttt

SEQ ID NO: 439432 - DNA, 30 bp, Artificial Sequence
  Synthetic oligonucleotide
tgggtcttgtagcgcttcctgcaccacttt

SEQ ID NO: 439433 - DNA, 30 bp, Artificial Sequence
  Synthetic oligonucleotide
aagcagactctcgcccgagttcaccacttt

SEQ ID NO: 439434 - DNA, 30 bp, Artificial Sequence
  Synthetic oligonucleotide
actatacccatcagccgctttacccacttt

SEQ ID NO: 439435 - DNA, 30 bp, Artificial Sequence
  Synthetic oligonucleotide
acatgtttaaatggcagttcgctccacttt

SEQ ID NO: 439436 - DNA, 30 bp, Artificial Sequence
  Synthetic oligonucleotide
attcgctcctcactgtgcttagtccacttt

SEQ ID NO: 439437 - DNA, 30 bp, Artificial Sequence
  Synthetic oligonucleotide
tggaaagattatagggaataccggcacttt

SEQ ID NO: 439438 - DNA, 30 bp, Artificial Sequence
  Synthetic oligonucleotide
aggatgatccttggcgcggaacctcacttt

SEQ ID NO: 439439 - DNA, 30 bp, Artificial Sequence
  Synthetic oligonucleotide
cgttcgttggcgcgcggggtaatagacttt

SEQ ID NO: 439440 - DNA, 30 bp, Artificial Sequence
  Synthetic oligonucleotide
gagaaaagcaccaatggtatagtagacttt

SEQ ID NO: 439441 - DNA, 30 bp, Artificial Sequence
  Synthetic oligonucleotide
atccggggccaatatccgacagcggacttt

SEQ ID NO: 439442 - DNA, 30 bp, Artificial Sequence
  Synthetic oligonucleotide
gccgaggcgcggaaaattgagcgggacttt

SEQ ID NO: 439443 - DNA, 30 bp, Artificial Sequence
  Synthetic oligonucleotide
gaggcagcgatacgaggtagattggacttt

SEQ ID NO: 439444 - DNA, 30 bp, Artificial Sequence
  Synthetic oligonucleotide
ctagcctttagggagaggacctgtgacttt

SEQ ID NO: 439445 - DNA, 30 bp, Artificial Sequence
  Synthetic oligonucleotide
tagatatcgtagttgtcagacgaatacttt

SEQ ID NO: 439446 - DNA, 30 bp, Artificial Sequence
  Synthetic oligonucleotide
gcggcggagattgcggttcttgagtacttt

SEQ ID NO: 439447 - DNA, 30 bp, Artificial Sequence
  Synthetic oligonucleotide
acatatacaatctagtcgtaggggtacttt

SEQ ID NO: 439448 - DNA, 30 bp, Artificial Sequence
  Synthetic oligonucleotide
gagggcgtgcagctgttcctagtgtacttt

SEQ ID NO: 439449 - DNA, 30 bp, Artificial Sequence
  Synthetic oligonucleotide
gttaattcggaccatttgaggagttacttt

SEQ ID NO: 439450 - DNA, 30 bp, Artificial Sequence
  Synthetic oligonucleotide
gtccgtccacatggcgaattcctttacttt

SEQ ID NO: 439451 - DNA, 30 bp, Artificial Sequence
  Synthetic oligonucleotide
ggatacttgtacctctatacattttacttt

SEQ ID NO: 439452 - DNA, 30 bp, Artificial Sequence
  Synthetic oligonucleotide
tgtaaaagcctcggactgactcaaaccttt

SEQ ID NO: 439453 - DNA, 30 bp, Artificial Sequence
  Synthetic oligonucleotide
acagatatgagcaatatatccgcaaccttt

SEQ ID NO: 439454 - DNA, 30 bp, Artificial Sequence
  Synthetic oligonucleotide
acgacggtagctaccgatcattcaaccttt

SEQ ID NO: 439455 - DNA, 30 bp, Artificial Sequence
  Synthetic oligonucleotide
ggtgcccgcttcctttaatttagaaccttt

SEQ ID NO: 439456 - DNA, 30 bp, Artificial Sequence
  Synthetic oligonucleotide
agaaatgatcggacattatgatccaccttt

SEQ ID NO: 439457 - DNA, 30 bp, Artificial Sequence
  Synthetic oligonucleotide
taaagcactaactgtacagaggtcaccttt

SEQ ID NO: 439458 - DNA, 30 bp, Artificial Sequence
  Synthetic oligonucleotide
gagatatgagtcgccaggtcaaaacccttt

SEQ ID NO: 439459 - DNA, 30 bp, Artificial Sequence
  Synthetic oligonucleotide
ttagttgctaggaacgttcattcacccttt

SEQ ID NO: 439460 - DNA, 30 bp, Artificial Sequence
  Synthetic oligonucleotide
tgcgtcataagcgggaatatacgccccttt

SEQ ID NO: 439461 - DNA, 30 bp, Artificial Sequence
  Synthetic oligonucleotide
gcctacccagtatccgtaccgttccccttt

SEQ ID NO: 439462 - DNA, 30 bp, Artificial Sequence
  Synthetic oligonucleotide
ggtagctctatcgtctatcgccggcccttt

SEQ ID NO: 439463 - DNA, 30 bp, Artificial Sequence
  Synthetic oligonucleotide
tgtgaatccaacagtggaatcggtcccttt

SEQ ID NO: 439464 - DNA, 30 bp, Artificial Sequence
  Synthetic oligonucleotide
tgcacttttcaagaggcacaccgagccttt

SEQ ID NO: 439465 - DNA, 30 bp, Artificial Sequence
  Synthetic oligonucleotide
tgcgcgttatattgcacccgaatcgccttt

SEQ ID NO: 439466 - DNA, 30 bp, Artificial Sequence
  Synthetic oligonucleotide
atgccactcccccgtcctgcctaggccttt

SEQ ID NO: 439467 - DNA, 30 bp, Artificial Sequence
  Synthetic oligonucleotide
gtaacatcaatgctgacggtcgcggccttt

SEQ ID NO: 439468 - DNA, 30 bp, Artificial Sequence
  Synthetic oligonucleotide
tcggcggtggcatctattgtatatgccttt

SEQ ID NO: 439469 - DNA, 30 bp, Artificial Sequence
  Synthetic oligonucleotide
acgctcccctaattgctaaattgtgccttt

SEQ ID NO: 439470 - DNA, 30 bp, Artificial Sequence
  Synthetic oligonucleotide
gaagcctatgactttaggcggtaatccttt

SEQ ID NO: 439471 - DNA, 30 bp, Artificial Sequence
  Synthetic oligonucleotide
tccgctagttatcccacactgttatccttt

SEQ ID NO: 439472 - DNA, 30 bp, Artificial Sequence
  Synthetic oligonucleotide
ttccactttcccgtcgttgtattctccttt

SEQ ID NO: 439473 - DNA, 30 bp, Artificial Sequence
  Synthetic oligonucleotide
aatgcttcttgagactcctcttagtccttt

SEQ ID NO: 439474 - DNA, 30 bp, Artificial Sequence
  Synthetic oligonucleotide
aatgacaaagaaccggttctgaattccttt

SEQ ID NO: 439475 - DNA, 30 bp, Artificial Sequence
  Synthetic oligonucleotide
gttaacgtggttatgtcatgtccaagcttt

SEQ ID NO: 439476 - DNA, 30 bp, Artificial Sequence
  Synthetic oligonucleotide
agtagaacaactatccgactcgcaagcttt

SEQ ID NO: 439477 - DNA, 30 bp, Artificial Sequence
  Synthetic oligonucleotide
gggggggttgcaggaaaacgatcaagcttt

SEQ ID NO: 439478 - DNA, 30 bp, Artificial Sequence
  Synthetic oligonucleotide
tgctgcacactgtttgaggctctaagcttt

SEQ ID NO: 439479 - DNA, 30 bp, Artificial Sequence
  Synthetic oligonucleotide
aggcttcgcaacgtcagcaggaacagcttt

SEQ ID NO: 439480 - DNA, 30 bp, Artificial Sequence
  Synthetic oligonucleotide
cccggagggcactatgtgggggacagcttt

SEQ ID NO: 439481 - DNA, 30 bp, Artificial Sequence
  Synthetic oligonucleotide
tatgctcgccacgcagggttgggcagcttt

SEQ ID NO: 439482 - DNA, 30 bp, Artificial Sequence
  Synthetic oligonucleotide
gattcagttggacatgctacgcggagcttt

SEQ ID NO: 439483 - DNA, 30 bp, Artificial Sequence
  Synthetic oligonucleotide
gcacctctctcatgatggttactgagcttt

SEQ ID NO: 439484 - DNA, 30 bp, Artificial Sequence
  Synthetic oligonucleotide
gaaaagggtgcacaaacgggcctgagcttt

SEQ ID NO: 439485 - DNA, 30 bp, Artificial Sequence
  Synthetic oligonucleotide
gcacaccaacgccaaccaacaagtagcttt

SEQ ID NO: 439486 - DNA, 30 bp, Artificial Sequence
  Synthetic oligonucleotide
ggtatgtttatcatattgatgagtagcttt

SEQ ID NO: 439487 - DNA, 30 bp, Artificial Sequence
  Synthetic oligonucleotide
cagactacttagagcttaaatgaacgcttt

SEQ ID NO: 439488 - DNA, 30 bp, Artificial Sequence
  Synthetic oligonucleotide
tgtactggatgcccatactgggcacgcttt

SEQ ID NO: 439489 - DNA, 30 bp, Artificial Sequence
  Synthetic oligonucleotide
ctttgccgagtgcgctgttctgtacgcttt

SEQ ID NO: 439490 - DNA, 30 bp, Artificial Sequence
  Synthetic oligonucleotide
ctgcagggtaaacggatcagaccccgcttt

SEQ ID NO: 439491 - DNA, 30 bp, Artificial Sequence
  Synthetic oligonucleotide
ctaggtgtatgctgcagtcgcgtccgcttt

SEQ ID NO: 439492 - DNA, 30 bp, Artificial Sequence
  Synthetic oligonucleotide
acaggctattcagccaccaaagtgcgcttt

SEQ ID NO: 439493 - DNA, 29 bp, Artificial Sequence
  Synthetic oligonucleotide
tagtgtcgtttttctgtgcctgtcgcttt

SEQ ID NO: 439494 - DNA, 30 bp, Artificial Sequence
  Synthetic oligonucleotide
gacttccgttcgcgtctgagtgcaggcttt

SEQ ID NO: 439495 - DNA, 30 bp, Artificial Sequence
  Synthetic oligonucleotide
tgattattcgcacagtgtttactaggcttt

SEQ ID NO: 439496 - DNA, 31 bp, Artificial Sequence
  Synthetic oligonucleotide
atcgcatgtctcaaaattgtcaaacggcttt

SEQ ID NO: 439497 - DNA, 30 bp, Artificial Sequence
  Synthetic oligonucleotide
accttaatgttactcgtagtcaacggcttt

SEQ ID NO: 439498 - DNA, 30 bp, Artificial Sequence
  Synthetic oligonucleotide
gaacatccgtttcgccaccgtcacggcttt

SEQ ID NO: 439499 - DNA, 30 bp, Artificial Sequence
  Synthetic oligonucleotide
ataaccccggaatgcactacgccgggcttt

SEQ ID NO: 439500 - DNA, 30 bp, Artificial Sequence
  Synthetic oligonucleotide
ggccgcgagatgaatatgttatcgggcttt

SEQ ID NO: 439501 - DNA, 30 bp, Artificial Sequence
  Synthetic oligonucleotide
cacgttcatgcagcccgacgtcggggcttt

SEQ ID NO: 439502 - DNA, 30 bp, Artificial Sequence
  Synthetic oligonucleotide
tcaatttaataaggccgccgtgatggcttt

SEQ ID NO: 439503 - DNA, 30 bp, Artificial Sequence
  Synthetic oligonucleotide
tcacacgatcaccggcgccaggcatgcttt

SEQ ID NO: 439504 - DNA, 30 bp, Artificial Sequence
  Synthetic oligonucleotide
tgattaagcggtgcggcctcatcatgcttt

SEQ ID NO: 439505 - DNA, 30 bp, Artificial Sequence
  Synthetic oligonucleotide
ctacaacttctttatttcctatactgcttt

SEQ ID NO: 439506 - DNA, 30 bp, Artificial Sequence
  Synthetic oligonucleotide
aagactcccggcgccagacacccctgcttt

SEQ ID NO: 439507 - DNA, 30 bp, Artificial Sequence
  Synthetic oligonucleotide
gcaactgtgctgatattaaaacagtgcttt

SEQ ID NO: 439508 - DNA, 30 bp, Artificial Sequence
  Synthetic oligonucleotide
gagcccgaatatgtaacagcttggtgcttt

SEQ ID NO: 439509 - DNA, 30 bp, Artificial Sequence
  Synthetic oligonucleotide
agaaattgcagccttcattagccttgcttt

SEQ ID NO: 439510 - DNA, 30 bp, Artificial Sequence
  Synthetic oligonucleotide
aggggagccgactggtgcgcagcttgcttt

SEQ ID NO: 439511 - DNA, 30 bp, Artificial Sequence
  Synthetic oligonucleotide
ggaaaaaggttcatggtcaccgcttgcttt

SEQ ID NO: 439512 - DNA, 30 bp, Artificial Sequence
  Synthetic oligonucleotide
acgactgtctcttcatacgattcttgcttt

SEQ ID NO: 439513 - DNA, 30 bp, Artificial Sequence
  Synthetic oligonucleotide
gactgttaagacagtgaccctagttgcttt

SEQ ID NO: 439514 - DNA, 30 bp, Artificial Sequence
  Synthetic oligonucleotide
tacggtcttcaactcccgcttatttgcttt

SEQ ID NO: 439515 - DNA, 30 bp, Artificial Sequence
  Synthetic oligonucleotide
gacgcaatatacgtcatgagggtttgcttt

SEQ ID NO: 439516 - DNA, 30 bp, Artificial Sequence
  Synthetic oligonucleotide
gagatatgagggatatcaagaaaaatcttt

SEQ ID NO: 439517 - DNA, 30 bp, Artificial Sequence
  Synthetic oligonucleotide
ttgtgagccggggtgttctcacaaatcttt

SEQ ID NO: 439518 - DNA, 30 bp, Artificial Sequence
  Synthetic oligonucleotide
gggcggctgtgctgataccttataatcttt

SEQ ID NO: 439519 - DNA, 30 bp, Artificial Sequence
  Synthetic oligonucleotide
cacattacctgggatttcgccaacatcttt

SEQ ID NO: 439520 - DNA, 30 bp, Artificial Sequence
  Synthetic oligonucleotide
cgttgggttatcaccgtggacagcatcttt

SEQ ID NO: 439521 - DNA, 30 bp, Artificial Sequence
  Synthetic oligonucleotide
gtgcgtcttagtatcctcctgtgcatcttt

SEQ ID NO: 439522 - DNA, 30 bp, Artificial Sequence
  Synthetic oligonucleotide
tgcccagcttttatcgctgtgaatatcttt

SEQ ID NO: 439523 - DNA, 30 bp, Artificial Sequence
  Synthetic oligonucleotide
agtgtaaaggcgtgctggacacgactcttt

SEQ ID NO: 439524 - DNA, 30 bp, Artificial Sequence
  Synthetic oligonucleotide
actactcctacatactgatatttactcttt

SEQ ID NO: 439525 - DNA, 30 bp, Artificial Sequence
  Synthetic oligonucleotide
tcacactgagcgggacatcaggtcctcttt

SEQ ID NO: 439526 - DNA, 30 bp, Artificial Sequence
  Synthetic oligonucleotide
gggaatgaggctgcgccgctatagctcttt

SEQ ID NO: 439527 - DNA, 30 bp, Artificial Sequence
  Synthetic oligonucleotide
catatattgagttgtggggaaaaagtcttt

SEQ ID NO: 439528 - DNA, 30 bp, Artificial Sequence
  Synthetic oligonucleotide
gaatcgtcgatctaatggcaccacgtcttt

SEQ ID NO: 439529 - DNA, 30 bp, Artificial Sequence
  Synthetic oligonucleotide
tccgagaatacggtttgttatgacgtcttt

SEQ ID NO: 439530 - DNA, 30 bp, Artificial Sequence
  Synthetic oligonucleotide
ttccgcgggtatccaccacgatacgtcttt

SEQ ID NO: 439531 - DNA, 30 bp, Artificial Sequence
  Synthetic oligonucleotide
ctactatacccgtgttcaatgctcgtcttt

SEQ ID NO: 439532 - DNA, 30 bp, Artificial Sequence
  Synthetic oligonucleotide
ctaatgattaaacaggatcccggggtcttt

SEQ ID NO: 439533 - DNA, 30 bp, Artificial Sequence
  Synthetic oligonucleotide
agtcgtgagatcgtcgttccagctgtcttt

SEQ ID NO: 439534 - DNA, 30 bp, Artificial Sequence
  Synthetic oligonucleotide
ggtgggtggggaatcggtcgtggattcttt

SEQ ID NO: 439535 - DNA, 30 bp, Artificial Sequence
  Synthetic oligonucleotide
taaaggatttgaacggaactcaagttcttt

SEQ ID NO: 439536 - DNA, 30 bp, Artificial Sequence
  Synthetic oligonucleotide
tgaccagaagaagtaaaggtcgtgttcttt

SEQ ID NO: 439537 - DNA, 30 bp, Artificial Sequence
  Synthetic oligonucleotide
gtcccggttttcggaaaacgaggtttcttt

SEQ ID NO: 439538 - DNA, 30 bp, Artificial Sequence
  Synthetic oligonucleotide
ttcgacttttagtcatcaattggtttcttt

SEQ ID NO: 439539 - DNA, 30 bp, Artificial Sequence
  Synthetic oligonucleotide
gatgtttgtccaagcaactaaacaaagttt

SEQ ID NO: 439540 - DNA, 30 bp, Artificial Sequence
  Synthetic oligonucleotide
tccggaggccggtacttctaacccaagttt

SEQ ID NO: 439541 - DNA, 30 bp, Artificial Sequence
  Synthetic oligonucleotide
tagacttgagcatcaccaaaagccaagttt

SEQ ID NO: 439542 - DNA, 30 bp, Artificial Sequence
  Synthetic oligonucleotide
tccatagcttatacgcgaaagaggaagttt

SEQ ID NO: 439543 - DNA, 30 bp, Artificial Sequence
  Synthetic oligonucleotide
gcagccttagatctgaatatatggaagttt

SEQ ID NO: 439544 - DNA, 30 bp, Artificial Sequence
  Synthetic oligonucleotide
aaagcaatcagctaatcatgactgaagttt

SEQ ID NO: 439545 - DNA, 30 bp, Artificial Sequence
  Synthetic oligonucleotide
taccttatggcggaggctacaaataagttt

SEQ ID NO: 439546 - DNA, 30 bp, Artificial Sequence
  Synthetic oligonucleotide
aatacttgacctgagctcaaggataagttt

SEQ ID NO: 439547 - DNA, 30 bp, Artificial Sequence
  Synthetic oligonucleotide
cttgttggtattaacccggggcctaagttt

SEQ ID NO: 439548 - DNA, 30 bp, Artificial Sequence
  Synthetic oligonucleotide
tccacttttgctactaacctcaaacagttt

SEQ ID NO: 439549 - DNA, 30 bp, Artificial Sequence
  Synthetic oligonucleotide
aactaatttatgcgaagtattcgacagttt

SEQ ID NO: 439550 - DNA, 30 bp, Artificial Sequence
  Synthetic oligonucleotide
tgggggagcgtgacggcacgagcccagttt

SEQ ID NO: 439551 - DNA, 30 bp, Artificial Sequence
  Synthetic oligonucleotide
tacattaaggtagaaaaacgtgcccagttt

SEQ ID NO: 439552 - DNA, 30 bp, Artificial Sequence
  Synthetic oligonucleotide
cttgcctgtatggcgcaaacgggccagttt

SEQ ID NO: 439553 - DNA, 30 bp, Artificial Sequence
  Synthetic oligonucleotide
agagaagtcggtctaattcggaggcagttt

SEQ ID NO: 439554 - DNA, 30 bp, Artificial Sequence
  Synthetic oligonucleotide
gctggttcggttgggctaggcaatcagttt

SEQ ID NO: 439555 - DNA, 30 bp, Artificial Sequence
  Synthetic oligonucleotide
taggcccattggcctaggacgcatcagttt

SEQ ID NO: 439556 - DNA, 30 bp, Artificial Sequence
  Synthetic oligonucleotide
cgggctagataacgcagccgatatcagttt

SEQ ID NO: 439557 - DNA, 30 bp, Artificial Sequence
  Synthetic oligonucleotide
tgcagttatcgctgattgacgggtcagttt

SEQ ID NO: 439558 - DNA, 30 bp, Artificial Sequence
  Synthetic oligonucleotide
gatccaaattaagcaatcagtgttcagttt

SEQ ID NO: 439559 - DNA, 30 bp, Artificial Sequence
  Synthetic oligonucleotide
gcgtcggtaattggttaatttaccgagttt

SEQ ID NO: 439560 - DNA, 30 bp, Artificial Sequence
  Synthetic oligonucleotide
caagagtgtgatagattatgaccggagttt

SEQ ID NO: 439561 - DNA, 29 bp, Artificial Sequence
  Synthetic oligonucleotide
tcttgcatgtctcacgtgtaagtgagttt

SEQ ID NO: 439562 - DNA, 30 bp, Artificial Sequence
  Synthetic oligonucleotide
tgtacctgtccatcctattttggtgagttt

SEQ ID NO: 439563 - DNA, 30 bp, Artificial Sequence
  Synthetic oligonucleotide
tagattgctaacgtctattgtgaatagttt

SEQ ID NO: 439564 - DNA, 30 bp, Artificial Sequence
  Synthetic oligonucleotide
gaatacaaatcgcggggtgtataatagttt

SEQ ID NO: 439565 - DNA, 30 bp, Artificial Sequence
  Synthetic oligonucleotide
gagttcgcccatcgtcagagaatgtagttt

SEQ ID NO: 439566 - DNA, 30 bp, Artificial Sequence
  Synthetic oligonucleotide
actaactcgctgttttaggatgtgtagttt

SEQ ID NO: 439567 - DNA, 30 bp, Artificial Sequence
  Synthetic oligonucleotide
tctcagtctacctggccattgttgtagttt

SEQ ID NO: 439568 - DNA, 30 bp, Artificial Sequence
  Synthetic oligonucleotide
cacttgatcagcagtcatagttattagttt

SEQ ID NO: 439569 - DNA, 30 bp, Artificial Sequence
  Synthetic oligonucleotide
tttgctgcatttccctctgaaatttagttt

SEQ ID NO: 439570 - DNA, 30 bp, Artificial Sequence
  Synthetic oligonucleotide
ctataggagatttgcttccgtttttagttt

SEQ ID NO: 439571 - DNA, 30 bp, Artificial Sequence
  Synthetic oligonucleotide
ggggacccgcataagacttggacaacgttt

SEQ ID NO: 439572 - DNA, 30 bp, Artificial Sequence
  Synthetic oligonucleotide
cacagggatcagtcagcccacgcaacgttt

SEQ ID NO: 439573 - DNA, 30 bp, Artificial Sequence
  Synthetic oligonucleotide
gccgcgtaatgcctgatatgcagcacgttt

SEQ ID NO: 439574 - DNA, 30 bp, Artificial Sequence
  Synthetic oligonucleotide
caccgtgacacttgtcaagatcggacgttt

SEQ ID NO: 439575 - DNA, 30 bp, Artificial Sequence
  Synthetic oligonucleotide
caattttactacacacgggataatacgttt

SEQ ID NO: 439576 - DNA, 30 bp, Artificial Sequence
  Synthetic oligonucleotide
ccgactattcgttacccaatggatacgttt

SEQ ID NO: 439577 - DNA, 30 bp, Artificial Sequence
  Synthetic oligonucleotide
gttcttttgcttacccgttactctacgttt

SEQ ID NO: 439578 - DNA, 30 bp, Artificial Sequence
  Synthetic oligonucleotide
ggaccctccgagatctacgccataccgttt

SEQ ID NO: 439579 - DNA, 30 bp, Artificial Sequence
  Synthetic oligonucleotide
cgtgtatcgttctgctgcactcacccgttt

SEQ ID NO: 439580 - DNA, 30 bp, Artificial Sequence
  Synthetic oligonucleotide
ccgagcaccggccaagactgacccccgttt

SEQ ID NO: 439581 - DNA, 30 bp, Artificial Sequence
  Synthetic oligonucleotide
cccaagaggcagctcgagcgacctccgttt

SEQ ID NO: 439582 - DNA, 30 bp, Artificial Sequence
  Synthetic oligonucleotide
aaactctggttgcttttagtgattccgttt

SEQ ID NO: 439583 - DNA, 30 bp, Artificial Sequence
  Synthetic oligonucleotide
gagcccagcatttagaaacaatcagcgttt

SEQ ID NO: 439584 - DNA, 30 bp, Artificial Sequence
  Synthetic oligonucleotide
cgtaccccattactcgtgcggggcgcgttt

SEQ ID NO: 439585 - DNA, 30 bp, Artificial Sequence
  Synthetic oligonucleotide
atctgccctctgaactagcggggggcgttt

SEQ ID NO: 439586 - DNA, 30 bp, Artificial Sequence
  Synthetic oligonucleotide
gctaaatccagccagttaggccatgcgttt

SEQ ID NO: 439587 - DNA, 31 bp, Artificial Sequence
  Synthetic oligonucleotide
ttccataaaatgtggtacggccattgcgttt

SEQ ID NO: 439588 - DNA, 30 bp, Artificial Sequence
  Synthetic oligonucleotide
ttccgctgacgagtgtcaagagaatcgttt

SEQ ID NO: 439589 - DNA, 30 bp, Artificial Sequence
  Synthetic oligonucleotide
actgccaagagctctcaacctacatcgttt

SEQ ID NO: 439590 - DNA, 30 bp, Artificial Sequence
  Synthetic oligonucleotide
agtgatagctggagctaacgaccatcgttt

SEQ ID NO: 439591 - DNA, 30 bp, Artificial Sequence
  Synthetic oligonucleotide
caagtcgacgaggcctgtaatatatcgttt

SEQ ID NO: 439592 - DNA, 30 bp, Artificial Sequence
  Synthetic oligonucleotide
gaagaaaaggcacggccttattcctcgttt

SEQ ID NO: 439593 - DNA, 30 bp, Artificial Sequence
  Synthetic oligonucleotide
ttggcatacttacatcagtatcgctcgttt

SEQ ID NO: 439594 - DNA, 30 bp, Artificial Sequence
  Synthetic oligonucleotide
cttcttcgcttatttgatcttctgtcgttt

SEQ ID NO: 439595 - DNA, 30 bp, Artificial Sequence
  Synthetic oligonucleotide
ccaggaacgcgagtacgatccgtgtcgttt

SEQ ID NO: 439596 - DNA, 30 bp, Artificial Sequence
  Synthetic oligonucleotide
atcagtccccgcacctctgatacttcgttt

SEQ ID NO: 439597 - DNA, 30 bp, Artificial Sequence
  Synthetic oligonucleotide
aacccgggtgtcctatgcagcgaaaggttt

SEQ ID NO: 439598 - DNA, 30 bp, Artificial Sequence
  Synthetic oligonucleotide
gggtctattgtaacttgcgtgtaaaggttt

SEQ ID NO: 439599 - DNA, 30 bp, Artificial Sequence
  Synthetic oligonucleotide
agattggggggatctcaggccacaaggttt

SEQ ID NO: 439600 - DNA, 30 bp, Artificial Sequence
  Synthetic oligonucleotide
gacaaatttatagaagttggtacaaggttt

SEQ ID NO: 439601 - DNA, 30 bp, Artificial Sequence
  Synthetic oligonucleotide
tttctaacgcagtaatatcgactaaggttt

SEQ ID NO: 439602 - DNA, 30 bp, Artificial Sequence
  Synthetic oligonucleotide
gaataacaccgcttttagaaccacaggttt

SEQ ID NO: 439603 - DNA, 30 bp, Artificial Sequence
  Synthetic oligonucleotide
gggctccttagtttcgaaaccgccaggttt

SEQ ID NO: 439604 - DNA, 30 bp, Artificial Sequence
  Synthetic oligonucleotide
ctctcaacaacattggggagactcaggttt

SEQ ID NO: 439605 - DNA, 30 bp, Artificial Sequence
  Synthetic oligonucleotide
gctttcctgtggtggataaacttcaggttt

SEQ ID NO: 439606 - DNA, 30 bp, Artificial Sequence
  Synthetic oligonucleotide
ctccaattcacgatcaactaattgaggttt

SEQ ID NO: 439607 - DNA, 30 bp, Artificial Sequence
  Synthetic oligonucleotide
tattgccttccatcttgttataataggttt

SEQ ID NO: 439608 - DNA, 30 bp, Artificial Sequence
  Synthetic oligonucleotide
cacccaccatctgttcaagcaagtaggttt

SEQ ID NO: 439609 - DNA, 30 bp, Artificial Sequence
  Synthetic oligonucleotide
gtgccccgcacacgtcagcaaggtaggttt

SEQ ID NO: 439610 - DNA, 30 bp, Artificial Sequence
  Synthetic oligonucleotide
aacaagtgatattgacgtattaaacggttt

SEQ ID NO: 439611 - DNA, 30 bp, Artificial Sequence
  Synthetic oligonucleotide
aatcaaggcagcactatcgcacgacggttt

SEQ ID NO: 439612 - DNA, 30 bp, Artificial Sequence
  Synthetic oligonucleotide
tctttccgcttgccaaattggggacggttt

SEQ ID NO: 439613 - DNA, 30 bp, Artificial Sequence
  Synthetic oligonucleotide
atccgagcagcaggtagacctggccggttt

SEQ ID NO: 439614 - DNA, 30 bp, Artificial Sequence
  Synthetic oligonucleotide
ggttatagcgacgcctcgtattgccggttt

SEQ ID NO: 439615 - DNA, 30 bp, Artificial Sequence
  Synthetic oligonucleotide
cgtgaatcatggctcaacatcgtccggttt

SEQ ID NO: 439616 - DNA, 30 bp, Artificial Sequence
  Synthetic oligonucleotide
cgcatggttaatagggcgcggggtcggttt

SEQ ID NO: 439617 - DNA, 30 bp, Artificial Sequence
  Synthetic oligonucleotide
gcagagctttacggccgtcaggtagggttt

SEQ ID NO: 439618 - DNA, 30 bp, Artificial Sequence
  Synthetic oligonucleotide
aatttgcacagacagaccagcaatgggttt

SEQ ID NO: 439619 - DNA, 30 bp, Artificial Sequence
  Synthetic oligonucleotide
cagttgggtacttttatactagatgggttt

SEQ ID NO: 439620 - DNA, 30 bp, Artificial Sequence
  Synthetic oligonucleotide
aattccgactgccactcggtagatgggttt

SEQ ID NO: 439621 - DNA, 30 bp, Artificial Sequence
  Synthetic oligonucleotide
atataccacacggtgtgggcttctgggttt

SEQ ID NO: 439622 - DNA, 30 bp, Artificial Sequence
  Synthetic oligonucleotide
taagctaacgcagtcatgcaacaatggttt

SEQ ID NO: 439623 - DNA, 30 bp, Artificial Sequence
  Synthetic oligonucleotide
gttggcatacacggtcgagatccatggttt

SEQ ID NO: 439624 - DNA, 30 bp, Artificial Sequence
  Synthetic oligonucleotide
tattccaactatcatcgcacgagatggttt

SEQ ID NO: 439625 - DNA, 30 bp, Artificial Sequence
  Synthetic oligonucleotide
gggatgacaaacaatcctgctagctggttt

SEQ ID NO: 439626 - DNA, 31 bp, Artificial Sequence
  Synthetic oligonucleotide
tgacgccgataacgtaggacataggtggttt

SEQ ID NO: 439627 - DNA, 30 bp, Artificial Sequence
  Synthetic oligonucleotide
cattgaggactgatggtggatcaaatgttt

SEQ ID NO: 439628 - DNA, 30 bp, Artificial Sequence
  Synthetic oligonucleotide
gatatgtgaatggcggcgtttgcaatgttt

SEQ ID NO: 439629 - DNA, 30 bp, Artificial Sequence
  Synthetic oligonucleotide
gaaccgctaagggccatccttggaatgttt

SEQ ID NO: 439630 - DNA, 30 bp, Artificial Sequence
  Synthetic oligonucleotide
cgtagataaacacaaatcttatgaatgttt

SEQ ID NO: 439631 - DNA, 31 bp, Artificial Sequence
  Synthetic oligonucleotide
caaagaacagttctatagctatttaatgttt

SEQ ID NO: 439632 - DNA, 30 bp, Artificial Sequence
  Synthetic oligonucleotide
ctgcggggtggagtgggaaaggccatgttt

SEQ ID NO: 439633 - DNA, 30 bp, Artificial Sequence
  Synthetic oligonucleotide
atccacataggctaacgctattccatgttt

SEQ ID NO: 439634 - DNA, 30 bp, Artificial Sequence
  Synthetic oligonucleotide
gcacgccaaatgagtacgagcggcatgttt

SEQ ID NO: 439635 - DNA, 30 bp, Artificial Sequence
  Synthetic oligonucleotide
tcttccagacatataactgtcatcatgttt

SEQ ID NO: 439636 - DNA, 30 bp, Artificial Sequence
  Synthetic oligonucleotide
gctgaaaagtaccatctaggtaagatgttt

SEQ ID NO: 439637 - DNA, 30 bp, Artificial Sequence
  Synthetic oligonucleotide
gatgccattgaaataatttgctcgatgttt

SEQ ID NO: 439638 - DNA, 30 bp, Artificial Sequence
  Synthetic oligonucleotide
ggagcttgactgcaattacggcggatgttt

SEQ ID NO: 439639 - DNA, 30 bp, Artificial Sequence
  Synthetic oligonucleotide
caatgcgggttagaagcacctcatatgttt

SEQ ID NO: 439640 - DNA, 30 bp, Artificial Sequence
  Synthetic oligonucleotide
gagcgcataggaatatcgtgctatatgttt

SEQ ID NO: 439641 - DNA, 30 bp, Artificial Sequence
  Synthetic oligonucleotide
gaacaaatgacatagacgtggggcctgttt

SEQ ID NO: 439642 - DNA, 30 bp, Artificial Sequence
  Synthetic oligonucleotide
attatttgtcgctttaggttatctctgttt

SEQ ID NO: 439643 - DNA, 30 bp, Artificial Sequence
  Synthetic oligonucleotide
aacataatctgtacttgtaaggttctgttt

SEQ ID NO: 439644 - DNA, 30 bp, Artificial Sequence
  Synthetic oligonucleotide
gttttgaccgattggagtagtcaagtgttt

SEQ ID NO: 439645 - DNA, 30 bp, Artificial Sequence
  Synthetic oligonucleotide
ggagtttccatacactgtcaacgagtgttt

SEQ ID NO: 439646 - DNA, 29 bp, Artificial Sequence
  Synthetic oligonucleotide
tctggcattggtccgctgcctgagtgttt

SEQ ID NO: 439647 - DNA, 30 bp, Artificial Sequence
  Synthetic oligonucleotide
tatggggcagttcatagcctacgggtgttt

SEQ ID NO: 439648 - DNA, 30 bp, Artificial Sequence
  Synthetic oligonucleotide
caggtcgcgcttctaagatccgtggtgttt

SEQ ID NO: 439649 - DNA, 30 bp, Artificial Sequence
  Synthetic oligonucleotide
taagatcaaacactctctacatgtgtgttt

SEQ ID NO: 439650 - DNA, 30 bp, Artificial Sequence
  Synthetic oligonucleotide
tatagggacccttatttgagctttgtgttt

SEQ ID NO: 439651 - DNA, 30 bp, Artificial Sequence
  Synthetic oligonucleotide
gaacccgttgtagggagacgccgattgttt

SEQ ID NO: 439652 - DNA, 30 bp, Artificial Sequence
  Synthetic oligonucleotide
tggatgacatatccaatcaatatattgttt

SEQ ID NO: 439653 - DNA, 30 bp, Artificial Sequence
  Synthetic oligonucleotide
caaactcttgagaaactataactcttgttt

SEQ ID NO: 439654 - DNA, 30 bp, Artificial Sequence
  Synthetic oligonucleotide
caagcgaacgcattgtaattagtcttgttt

SEQ ID NO: 439655 - DNA, 30 bp, Artificial Sequence
  Synthetic oligonucleotide
atgcagtctaacgtaggcccgcctttgttt

SEQ ID NO: 439656 - DNA, 30 bp, Artificial Sequence
  Synthetic oligonucleotide
ggcgtcggggagccgaaacgttttttgttt

SEQ ID NO: 439657 - DNA, 30 bp, Artificial Sequence
  Synthetic oligonucleotide
cacgatcttgggaaaattattagaaatttt

SEQ ID NO: 439658 - DNA, 30 bp, Artificial Sequence
  Synthetic oligonucleotide
agacgccagcgcaaaataactgccaatttt

SEQ ID NO: 439659 - DNA, 30 bp, Artificial Sequence
  Synthetic oligonucleotide
agttcgttcccacttggtaagtccaatttt

SEQ ID NO: 439660 - DNA, 31 bp, Artificial Sequence
  Synthetic oligonucleotide
tatcttgagcccactagcaaaggtcaatttt

SEQ ID NO: 439661 - DNA, 30 bp, Artificial Sequence
  Synthetic oligonucleotide
cgattcatgcccgttttttgcttcaatttt

SEQ ID NO: 439662 - DNA, 30 bp, Artificial Sequence
  Synthetic oligonucleotide
tctagtgggcgtagcccaatggcgaatttt

SEQ ID NO: 439663 - DNA, 30 bp, Artificial Sequence
  Synthetic oligonucleotide
gtgatcaaccgttttctcgtttcgaatttt

SEQ ID NO: 439664 - DNA, 30 bp, Artificial Sequence
  Synthetic oligonucleotide
gacttccaattgcggacagaaaggaatttt

SEQ ID NO: 439665 - DNA, 30 bp, Artificial Sequence
  Synthetic oligonucleotide
aatttgagttccgaaacagggctgaatttt

SEQ ID NO: 439666 - DNA, 30 bp, Artificial Sequence
  Synthetic oligonucleotide
gtagtgcagttgaatcagcaagctaatttt

SEQ ID NO: 439667 - DNA, 30 bp, Artificial Sequence
  Synthetic oligonucleotide
gcttaccaagaggtattatggattaatttt

SEQ ID NO: 439668 - DNA, 30 bp, Artificial Sequence
  Synthetic oligonucleotide
aagactcccatcacccggccaccacatttt

SEQ ID NO: 439669 - DNA, 30 bp, Artificial Sequence
  Synthetic oligonucleotide
tgactgcaattgatgtggtaaacccatttt

SEQ ID NO: 439670 - DNA, 30 bp, Artificial Sequence
  Synthetic oligonucleotide
acggcaaatcgcggtcgaacgacccatttt

SEQ ID NO: 439671 - DNA, 30 bp, Artificial Sequence
  Synthetic oligonucleotide
ttacatcctctttagtaggttgggcatttt

SEQ ID NO: 439672 - DNA, 30 bp, Artificial Sequence
  Synthetic oligonucleotide
cagtaaactgtactaggattaaatcatttt

SEQ ID NO: 439673 - DNA, 30 bp, Artificial Sequence
  Synthetic oligonucleotide
gtcggactgctttccggaatccatcatttt

SEQ ID NO: 439674 - DNA, 30 bp, Artificial Sequence
  Synthetic oligonucleotide
ggtgactcccttgcgcggatcagtcatttt

SEQ ID NO: 439675 - DNA, 30 bp, Artificial Sequence
  Synthetic oligonucleotide
ccgatacaagcagattccggaggtcatttt

SEQ ID NO: 439676 - DNA, 30 bp, Artificial Sequence
  Synthetic oligonucleotide
ggtgctgggctggtgagattatgtcatttt

SEQ ID NO: 439677 - DNA, 30 bp, Artificial Sequence
  Synthetic oligonucleotide
gctttgacaagcgttagtagagtagatttt

SEQ ID NO: 439678 - DNA, 30 bp, Artificial Sequence
  Synthetic oligonucleotide
acaacaaatgtgtcattacacgacgatttt

SEQ ID NO: 439679 - DNA, 30 bp, Artificial Sequence
  Synthetic oligonucleotide
gttgaaagcctgtgcattgtgatggatttt

SEQ ID NO: 439680 - DNA, 30 bp, Artificial Sequence
  Synthetic oligonucleotide
accacatacgcgggttttggtcttgatttt

SEQ ID NO: 439681 - DNA, 30 bp, Artificial Sequence
  Synthetic oligonucleotide
aggtttatctaattaataacggttgatttt

SEQ ID NO: 439682 - DNA, 30 bp, Artificial Sequence
  Synthetic oligonucleotide
agtaagtactgtccaagcgaaccatatttt

SEQ ID NO: 439683 - DNA, 30 bp, Artificial Sequence
  Synthetic oligonucleotide
ctgggccgagcatatatccaggcatatttt

SEQ ID NO: 439684 - DNA, 30 bp, Artificial Sequence
  Synthetic oligonucleotide
taaatcatgagtgcttagacgccctatttt

SEQ ID NO: 439685 - DNA, 30 bp, Artificial Sequence
  Synthetic oligonucleotide
tacacgtccacttgggtcctgaagtatttt

SEQ ID NO: 439686 - DNA, 30 bp, Artificial Sequence
  Synthetic oligonucleotide
cggtttggacactagaggtggtagtatttt

SEQ ID NO: 439687 - DNA, 30 bp, Artificial Sequence
  Synthetic oligonucleotide
ctcactaaccggcccttaaacgcgtatttt

SEQ ID NO: 439688 - DNA, 30 bp, Artificial Sequence
  Synthetic oligonucleotide
ccccttctgaacaggggtaataggtatttt

SEQ ID NO: 439689 - DNA, 30 bp, Artificial Sequence
  Synthetic oligonucleotide
ggaaaagtccatgcgggttgtcggtatttt

SEQ ID NO: 439690 - DNA, 30 bp, Artificial Sequence
  Synthetic oligonucleotide
ttcaacacagaaatctcatttcggtatttt

SEQ ID NO: 439691 - DNA, 30 bp, Artificial Sequence
  Synthetic oligonucleotide
aatgcaagggaatgcggcacaatgtatttt

SEQ ID NO: 439692 - DNA, 30 bp, Artificial Sequence
  Synthetic oligonucleotide
cgatcggcactttcaccgagaaattatttt

SEQ ID NO: 439693 - DNA, 30 bp, Artificial Sequence
  Synthetic oligonucleotide
tgcgtggtaattttgaagttatattatttt

SEQ ID NO: 439694 - DNA, 28 bp, Artificial Sequence
  Synthetic oligonucleotide
gcacgatgaaacggcactcagttatttt

SEQ ID NO: 439695 - DNA, 30 bp, Artificial Sequence
  Synthetic oligonucleotide
gaacctttggggagagctggtgtttatttt

SEQ ID NO: 439696 - DNA, 30 bp, Artificial Sequence
  Synthetic oligonucleotide
aacaagttgcgtctttaatttgtttatttt

SEQ ID NO: 439697 - DNA, 30 bp, Artificial Sequence
  Synthetic oligonucleotide
tgtcccgcgggagtcctcgtaatcactttt

SEQ ID NO: 439698 - DNA, 30 bp, Artificial Sequence
  Synthetic oligonucleotide
actgcggcccaatgactccataggactttt

SEQ ID NO: 439699 - DNA, 30 bp, Artificial Sequence
  Synthetic oligonucleotide
agtcgttgtttacccgggcaacatactttt

SEQ ID NO: 439700 - DNA, 30 bp, Artificial Sequence
  Synthetic oligonucleotide
gaaggttggctaaccatagcagctactttt

SEQ ID NO: 439701 - DNA, 30 bp, Artificial Sequence
  Synthetic oligonucleotide
acagtgaggacgccacagagttttactttt

SEQ ID NO: 439702 - DNA, 30 bp, Artificial Sequence
  Synthetic oligonucleotide
ggcgtgcattaataatcgttctcacctttt

SEQ ID NO: 439703 - DNA, 30 bp, Artificial Sequence
  Synthetic oligonucleotide
gcaaaagtagtaacatttattttacctttt

SEQ ID NO: 439704 - DNA, 30 bp, Artificial Sequence
  Synthetic oligonucleotide
agggaatccctttcccagggtgaccctttt

SEQ ID NO: 439705 - DNA, 30 bp, Artificial Sequence
  Synthetic oligonucleotide
gaacgaagctgatgggactggtaccctttt

SEQ ID NO: 439706 - DNA, 30 bp, Artificial Sequence
  Synthetic oligonucleotide
gtaagcgcgatgggggtcatctggcctttt

SEQ ID NO: 439707 - DNA, 30 bp, Artificial Sequence
  Synthetic oligonucleotide
cccgccgacaaagtaaaaaagcctcctttt

SEQ ID NO: 439708 - DNA, 30 bp, Artificial Sequence
  Synthetic oligonucleotide
aagggattatgcttcataagcattcctttt

SEQ ID NO: 439709 - DNA, 30 bp, Artificial Sequence
  Synthetic oligonucleotide
aacaacaaatctctgggtatagtagctttt

SEQ ID NO: 439710 - DNA, 30 bp, Artificial Sequence
  Synthetic oligonucleotide
aattaaactccaacatcatgggacgctttt

SEQ ID NO: 439711 - DNA, 30 bp, Artificial Sequence
  Synthetic oligonucleotide
ttatatcagccgagccctcacttcgctttt

SEQ ID NO: 439712 - DNA, 30 bp, Artificial Sequence
  Synthetic oligonucleotide
gatctaagccaaacgtccaagtaggctttt

SEQ ID NO: 439713 - DNA, 30 bp, Artificial Sequence
  Synthetic oligonucleotide
cgaccggtaagctaaagcatgccggctttt

SEQ ID NO: 439714 - DNA, 30 bp, Artificial Sequence
  Synthetic oligonucleotide
aaagtcaagccagtgatatcaatggctttt

SEQ ID NO: 439715 - DNA, 30 bp, Artificial Sequence
  Synthetic oligonucleotide
gcaagatcagagattatacgagatgctttt

SEQ ID NO: 439716 - DNA, 30 bp, Artificial Sequence
  Synthetic oligonucleotide
aatagcccgcaatgatgataaattgctttt

SEQ ID NO: 439717 - DNA, 30 bp, Artificial Sequence
  Synthetic oligonucleotide
gtgttgggtatgataggtgtttgatctttt

SEQ ID NO: 439718 - DNA, 30 bp, Artificial Sequence
  Synthetic oligonucleotide
cgtactggccgtcggttttaaatatctttt

SEQ ID NO: 439719 - DNA, 30 bp, Artificial Sequence
  Synthetic oligonucleotide
gttaggaggctgggcgcgcactactctttt

SEQ ID NO: 439720 - DNA, 30 bp, Artificial Sequence
  Synthetic oligonucleotide
gcgctagcagcttgtgcatgatgctctttt

SEQ ID NO: 439721 - DNA, 30 bp, Artificial Sequence
  Synthetic oligonucleotide
gcctgcaggtcgacaggacagccgtctttt

SEQ ID NO: 439722 - DNA, 31 bp, Artificial Sequence
  Synthetic oligonucleotide
ctctgcgtgtggtaattgttttgtgtctttt

SEQ ID NO: 439723 - DNA, 30 bp, Artificial Sequence
  Synthetic oligonucleotide
agaaaggtaataggattcgcattttctttt

SEQ ID NO: 439724 - DNA, 30 bp, Artificial Sequence
  Synthetic oligonucleotide
gatatgcctagtaccatcgaggcaagtttt

SEQ ID NO: 439725 - DNA, 30 bp, Artificial Sequence
  Synthetic oligonucleotide
accttctagtggaagcaggatgcaagtttt

SEQ ID NO: 439726 - DNA, 30 bp, Artificial Sequence
  Synthetic oligonucleotide
aatggtttactatgacgagaatcaagtttt

SEQ ID NO: 439727 - DNA, 30 bp, Artificial Sequence
  Synthetic oligonucleotide
cactagatgctgaaagcggggttaagtttt

SEQ ID NO: 439728 - DNA, 30 bp, Artificial Sequence
  Synthetic oligonucleotide
tacataggggatcggtatgtctacagtttt

SEQ ID NO: 439729 - DNA, 30 bp, Artificial Sequence
  Synthetic oligonucleotide
gtacgtcctttacttacgtcggccagtttt

SEQ ID NO: 439730 - DNA, 30 bp, Artificial Sequence
  Synthetic oligonucleotide
gttagatatttgtttggaaattccagtttt

SEQ ID NO: 439731 - DNA, 30 bp, Artificial Sequence
  Synthetic oligonucleotide
agaaaattatgaccctcaacttatagtttt

SEQ ID NO: 439732 - DNA, 30 bp, Artificial Sequence
  Synthetic oligonucleotide
ggcatgggttgaagagtcaaccttagtttt

SEQ ID NO: 439733 - DNA, 30 bp, Artificial Sequence
  Synthetic oligonucleotide
atatctctcagacttgtcactccccgtttt

SEQ ID NO: 439734 - DNA, 30 bp, Artificial Sequence
  Synthetic oligonucleotide
tgcggaccctcgatcaccgaaaagcgtttt

SEQ ID NO: 439735 - DNA, 30 bp, Artificial Sequence
  Synthetic oligonucleotide
gtaaattggcgaaccgtacagcagcgtttt

SEQ ID NO: 439736 - DNA, 30 bp, Artificial Sequence
  Synthetic oligonucleotide
gagccatcttattctcagtactagcgtttt

SEQ ID NO: 439737 - DNA, 30 bp, Artificial Sequence
  Synthetic oligonucleotide
cggacggcggaaaatattcctcgaggtttt

SEQ ID NO: 439738 - DNA, 30 bp, Artificial Sequence
  Synthetic oligonucleotide
ccgtctgtatattcaacatacttaggtttt

SEQ ID NO: 439739 - DNA, 30 bp, Artificial Sequence
  Synthetic oligonucleotide
aggatcgaaagttagctgagtttaggtttt

SEQ ID NO: 439740 - DNA, 30 bp, Artificial Sequence
  Synthetic oligonucleotide
caactcacgctcaggaagatacgcggtttt

SEQ ID NO: 439741 - DNA, 30 bp, Artificial Sequence
  Synthetic oligonucleotide
attttagaatggatgaaagaagagggtttt

SEQ ID NO: 439742 - DNA, 30 bp, Artificial Sequence
  Synthetic oligonucleotide
tgggtccgtccgcatggaacgtggggtttt

SEQ ID NO: 439743 - DNA, 30 bp, Artificial Sequence
  Synthetic oligonucleotide
gtgtcgttccaagcacgcctacgtggtttt

SEQ ID NO: 439744 - DNA, 30 bp, Artificial Sequence
  Synthetic oligonucleotide
ggaatcgttttcggcattcttgttggtttt

SEQ ID NO: 439745 - DNA, 30 bp, Artificial Sequence
  Synthetic oligonucleotide
tcaccgttgtgaagcttaccgcactgtttt

SEQ ID NO: 439746 - DNA, 30 bp, Artificial Sequence
  Synthetic oligonucleotide
tggtgaagtcgggaagattcctactgtttt

SEQ ID NO: 439747 - DNA, 30 bp, Artificial Sequence
  Synthetic oligonucleotide
tagatcgtgccctatggtgataggtgtttt

SEQ ID NO: 439748 - DNA, 30 bp, Artificial Sequence
  Synthetic oligonucleotide
ggtgtatccaatttcacaaggcggtgtttt

SEQ ID NO: 439749 - DNA, 30 bp, Artificial Sequence
  Synthetic oligonucleotide
aatcaatcaaaaaatgacacaaattgtttt

SEQ ID NO: 439750 - DNA, 30 bp, Artificial Sequence
  Synthetic oligonucleotide
gcttaactatgggatgcaagccattgtttt

SEQ ID NO: 439751 - DNA, 30 bp, Artificial Sequence
  Synthetic oligonucleotide
gccgtctctaattcataggtttattgtttt

SEQ ID NO: 439752 - DNA, 30 bp, Artificial Sequence
  Synthetic oligonucleotide
ccctcggttcagactttcgctacttgtttt

SEQ ID NO: 439753 - DNA, 30 bp, Artificial Sequence
  Synthetic oligonucleotide
tacttagctcgtcccccaacgtcttgtttt

SEQ ID NO: 439754 - DNA, 30 bp, Artificial Sequence
  Synthetic oligonucleotide
ataagcagccgaaactcaccaatttgtttt

SEQ ID NO: 439755 - DNA, 30 bp, Artificial Sequence
  Synthetic oligonucleotide
gctttgtaaaggactattgggtgaattttt

SEQ ID NO: 439756 - DNA, 30 bp, Artificial Sequence
  Synthetic oligonucleotide
acgtggcattgcgggtcgcagaacattttt

SEQ ID NO: 439757 - DNA, 30 bp, Artificial Sequence
  Synthetic oligonucleotide
gtcaaaataatcacatccacgacgattttt

SEQ ID NO: 439758 - DNA, 30 bp, Artificial Sequence
  Synthetic oligonucleotide
tcaaccgatcgcggggaacggacgattttt

SEQ ID NO: 439759 - DNA, 30 bp, Artificial Sequence
  Synthetic oligonucleotide
ggaatggtgaccggccgcagttcgattttt

SEQ ID NO: 439760 - DNA, 30 bp, Artificial Sequence
  Synthetic oligonucleotide
acgctaatctttgaaagaccccctattttt

SEQ ID NO: 439761 - DNA, 30 bp, Artificial Sequence
  Synthetic oligonucleotide
tggggctgatacacgatgagctctattttt

SEQ ID NO: 439762 - DNA, 31 bp, Artificial Sequence
  Synthetic oligonucleotide
ttgagcaatgcgtcttgtatcgaagcttttt

SEQ ID NO: 439763 - DNA, 30 bp, Artificial Sequence
  Synthetic oligonucleotide
acggatgcaccaaatcttcattggcttttt

SEQ ID NO: 439764 - DNA, 30 bp, Artificial Sequence
  Synthetic oligonucleotide
tatcaatgtatgcattcgatagctcttttt

SEQ ID NO: 439765 - DNA, 30 bp, Artificial Sequence
  Synthetic oligonucleotide
gcctggaagctttacgttttagctcttttt

SEQ ID NO: 439766 - DNA, 30 bp, Artificial Sequence
  Synthetic oligonucleotide
gaatctcatatgggatggagggctcttttt

SEQ ID NO: 439767 - DNA, 30 bp, Artificial Sequence
  Synthetic oligonucleotide
gatgccgtttacaaaaagtgtcgtcttttt

SEQ ID NO: 439768 - DNA, 30 bp, Artificial Sequence
  Synthetic oligonucleotide
aaccgctagaagtagatgggaaaagttttt

SEQ ID NO: 439769 - DNA, 30 bp, Artificial Sequence
  Synthetic oligonucleotide
caattcgcaaacatagtgggtgaagttttt

SEQ ID NO: 439770 - DNA, 30 bp, Artificial Sequence
  Synthetic oligonucleotide
ttcggcatgacgtgagaatactcagttttt

SEQ ID NO: 439771 - DNA, 30 bp, Artificial Sequence
  Synthetic oligonucleotide
ctggtaaataagcgccacggctcagttttt

SEQ ID NO: 439772 - DNA, 30 bp, Artificial Sequence
  Synthetic oligonucleotide
agggtcggttgaccaacaggaagagttttt

SEQ ID NO: 439773 - DNA, 30 bp, Artificial Sequence
  Synthetic oligonucleotide
tgtaggacgctaggggtcttacgagttttt

SEQ ID NO: 439774 - DNA, 30 bp, Artificial Sequence
  Synthetic oligonucleotide
aaccaaagttccagttaaagtggagttttt

SEQ ID NO: 439775 - DNA, 30 bp, Artificial Sequence
  Synthetic oligonucleotide
taaatatgagacccccacggagacgttttt

SEQ ID NO: 439776 - DNA, 30 bp, Artificial Sequence
  Synthetic oligonucleotide
ttcctggtttgcattacgcgcgacgttttt

SEQ ID NO: 439777 - DNA, 30 bp, Artificial Sequence
  Synthetic oligonucleotide
accgcatcctaggatctcgcacccgttttt

SEQ ID NO: 439778 - DNA, 30 bp, Artificial Sequence
  Synthetic oligonucleotide
attgtggtggtgtaagtaggacccgttttt

SEQ ID NO: 439779 - DNA, 29 bp, Artificial Sequence
  Synthetic oligonucleotide
attatccgatatgttatttacccgttttt

SEQ ID NO: 439780 - DNA, 30 bp, Artificial Sequence
  Synthetic oligonucleotide
acataagtagcttgtcgtatcagcgttttt

SEQ ID NO: 439781 - DNA, 30 bp, Artificial Sequence
  Synthetic oligonucleotide
acgagtgactctacgatctctatcgttttt

SEQ ID NO: 439782 - DNA, 30 bp, Artificial Sequence
  Synthetic oligonucleotide
tacgggaaaattttcgcccaattcgttttt

SEQ ID NO: 439783 - DNA, 30 bp, Artificial Sequence
  Synthetic oligonucleotide
cttcgcgggcgcccgacttgtttcgttttt

SEQ ID NO: 439784 - DNA, 30 bp, Artificial Sequence
  Synthetic oligonucleotide
tttcttggaagtttggtaagtgatgttttt

SEQ ID NO: 439785 - DNA, 30 bp, Artificial Sequence
  Synthetic oligonucleotide
tggcgttgagagcaggcactttctgttttt

SEQ ID NO: 439786 - DNA, 30 bp, Artificial Sequence
  Synthetic oligonucleotide
ggactgatagttgacctacagaaatttttt

SEQ ID NO: 439787 - DNA, 30 bp, Artificial Sequence
  Synthetic oligonucleotide
tgatatgtcgtggacgacgcgaaatttttt

SEQ ID NO: 439788 - DNA, 30 bp, Artificial Sequence
  Synthetic oligonucleotide
aaggtctctctaaatatctcggaatttttt

SEQ ID NO: 439789 - DNA, 30 bp, Artificial Sequence
  Synthetic oligonucleotide
aagactcacatctggccatacggatttttt

SEQ ID NO: 439790 - DNA, 30 bp, Artificial Sequence
  Synthetic oligonucleotide
ttgccagagctttgctatatggcctttttt

SEQ ID NO: 439791 - DNA, 30 bp, Artificial Sequence
  Synthetic oligonucleotide
cgtagtcacactcgcagttagggctttttt

SEQ ID NO: 439792 - DNA, 30 bp, Artificial Sequence
  Synthetic oligonucleotide
ctggttgaaatccacgaaggtgagtttttt

SEQ ID NO: 439793 - DNA, 30 bp, Artificial Sequence
  Synthetic oligonucleotide
gtccttgcgtatcagggtagtgcgtttttt

SEQ ID NO: 439794 - DNA, 30 bp, Artificial Sequence
  Synthetic oligonucleotide
ctgaaccggcactcaggatcttcgtttttt

SEQ ID NO: 439795 - DNA, 30 bp, Artificial Sequence
  Synthetic oligonucleotide
atctacttagatcacggggtcaggtttttt

SEQ ID NO: 439796 - DNA, 30 bp, Artificial Sequence
  Synthetic oligonucleotide
gatgacgccatgcacaccgtcatgtttttt

SEQ ID NO: 439797 - DNA, 30 bp, Artificial Sequence
  Synthetic oligonucleotide
gagcgtatacagtcatgcgaagattttttt

SEQ ID NO: 439798 - DNA, 30 bp, Artificial Sequence
  Synthetic oligonucleotide
gaatcggatacgacagcccttcaaaaaaaa

SEQ ID NO: 439799 - DNA, 30 bp, Artificial Sequence
  Synthetic oligonucleotide
taatatgtaaaccgactcccagaaaaaaaa

SEQ ID NO: 439800 - DNA, 30 bp, Artificial Sequence
  Synthetic oligonucleotide
taagagaatctttcccccacatcaaaaaaa

SEQ ID NO: 439801 - DNA, 30 bp, Artificial Sequence
  Synthetic oligonucleotide
gatttacgagggagcgcgattagaaaaaaa

SEQ ID NO: 439802 - DNA, 30 bp, Artificial Sequence
  Synthetic oligonucleotide
atatgacgttattgcatacttggaaaaaaa

SEQ ID NO: 439803 - DNA, 30 bp, Artificial Sequence
  Synthetic oligonucleotide
gatgaagcataacttatgattctaaaaaaa

SEQ ID NO: 439804 - DNA, 30 bp, Artificial Sequence
  Synthetic oligonucleotide
gtgcaaatacatggcctcctagtaaaaaaa

SEQ ID NO: 439805 - DNA, 30 bp, Artificial Sequence
  Synthetic oligonucleotide
agctgtagctcattgcttcacaacaaaaaa

SEQ ID NO: 439806 - DNA, 30 bp, Artificial Sequence
  Synthetic oligonucleotide
agactctgcagtcagaaagtaatcaaaaaa

SEQ ID NO: 439807 - DNA, 30 bp, Artificial Sequence
  Synthetic oligonucleotide
ggcgagatagatcaaagacaaaagaaaaaa

SEQ ID NO: 439808 - DNA, 30 bp, Artificial Sequence
  Synthetic oligonucleotide
ttaaactgaggcaaggaaagccagaaaaaa

SEQ ID NO: 439809 - DNA, 30 bp, Artificial Sequence
  Synthetic oligonucleotide
accaaaactcacctataaaacatgaaaaaa

SEQ ID NO: 439810 - DNA, 30 bp, Artificial Sequence
  Synthetic oligonucleotide
agacttcaggttatcggactccataaaaaa

SEQ ID NO: 439811 - DNA, 30 bp, Artificial Sequence
  Synthetic oligonucleotide
tgcgaacaggtatcttccgccggtaaaaaa

SEQ ID NO: 439812 - DNA, 30 bp, Artificial Sequence
  Synthetic oligonucleotide
tactaaactttggtcagcggaagacaaaaa

SEQ ID NO: 439813 - DNA, 30 bp, Artificial Sequence
  Synthetic oligonucleotide
gggactacatatgtaccgtaaccccaaaaa

SEQ ID NO: 439814 - DNA, 30 bp, Artificial Sequence
  Synthetic oligonucleotide
ggaatgtgggatgtaggcagtgtccaaaaa

SEQ ID NO: 439815 - DNA, 30 bp, Artificial Sequence
  Synthetic oligonucleotide
cggcctagataaggctgggacaggcaaaaa

SEQ ID NO: 439816 - DNA, 30 bp, Artificial Sequence
  Synthetic oligonucleotide
gcgacgcatgagtgtaaaaaatggcaaaaa

SEQ ID NO: 439817 - DNA, 30 bp, Artificial Sequence
  Synthetic oligonucleotide
acacagttatggtccttactggatcaaaaa

SEQ ID NO: 439818 - DNA, 30 bp, Artificial Sequence
  Synthetic oligonucleotide
gttattgtgaatgtattttctgctcaaaaa

SEQ ID NO: 439819 - DNA, 30 bp, Artificial Sequence
  Synthetic oligonucleotide
tatgatttaagtcaattaagatctcaaaaa

SEQ ID NO: 439820 - DNA, 30 bp, Artificial Sequence
  Synthetic oligonucleotide
aaaggattcttggacgccgttgaagaaaaa

SEQ ID NO: 439821 - DNA, 30 bp, Artificial Sequence
  Synthetic oligonucleotide
ctcgcagcagcatagcatatataagaaaaa

SEQ ID NO: 439822 - DNA, 30 bp, Artificial Sequence
  Synthetic oligonucleotide
tttgaataaaactcatgtaaaacagaaaaa

SEQ ID NO: 439823 - DNA, 30 bp, Artificial Sequence
  Synthetic oligonucleotide
ctgcacactctgccttttgctacagaaaaa

SEQ ID NO: 439824 - DNA, 30 bp, Artificial Sequence
  Synthetic oligonucleotide
tttcttcatataggtacttccccggaaaaa

SEQ ID NO: 439825 - DNA, 30 bp, Artificial Sequence
  Synthetic oligonucleotide
gtaacgtgttaggacccgcggcgggaaaaa

SEQ ID NO: 439826 - DNA, 30 bp, Artificial Sequence
  Synthetic oligonucleotide
ataaatcttgtagatgtgcccggggaaaaa

SEQ ID NO: 439827 - DNA, 30 bp, Artificial Sequence
  Synthetic oligonucleotide
tgacatatccgcggcctattaagtgaaaaa

SEQ ID NO: 439828 - DNA, 30 bp, Artificial Sequence
  Synthetic oligonucleotide
tcagggcttgtactaatcaaaatataaaaa

SEQ ID NO: 439829 - DNA, 30 bp, Artificial Sequence
  Synthetic oligonucleotide
gggagcggcggggttctctcgagctaaaaa

SEQ ID NO: 439830 - DNA, 30 bp, Artificial Sequence
  Synthetic oligonucleotide
ttaaatcgaagccctacgtagcggtaaaaa

SEQ ID NO: 439831 - DNA, 30 bp, Artificial Sequence
  Synthetic oligonucleotide
gcgagcccacagatcgggatctcttaaaaa

SEQ ID NO: 439832 - DNA, 30 bp, Artificial Sequence
  Synthetic oligonucleotide
tgagtttttcacgttatccggggttaaaaa

SEQ ID NO: 439833 - DNA, 30 bp, Artificial Sequence
  Synthetic oligonucleotide
tagaaatttataatcaaacggaagacaaaa

SEQ ID NO: 439834 - DNA, 30 bp, Artificial Sequence
  Synthetic oligonucleotide
tcactgaaaatgtctgtttccgtgacaaaa

SEQ ID NO: 439835 - DNA, 30 bp, Artificial Sequence
  Synthetic oligonucleotide
attcttccctgatagagaacgggtacaaaa

SEQ ID NO: 439836 - DNA, 30 bp, Artificial Sequence
  Synthetic oligonucleotide
caatcgtttttactacgggattcaccaaaa

SEQ ID NO: 439837 - DNA, 30 bp, Artificial Sequence
  Synthetic oligonucleotide
agggaccagtttcgggcgtagcgcccaaaa

SEQ ID NO: 439838 - DNA, 30 bp, Artificial Sequence
  Synthetic oligonucleotide
gtagctgacaggatatagctcggcccaaaa

SEQ ID NO: 439839 - DNA, 30 bp, Artificial Sequence
  Synthetic oligonucleotide
gccccccaactcaacaataaatagccaaaa

SEQ ID NO: 439840 - DNA, 30 bp, Artificial Sequence
  Synthetic oligonucleotide
tcgctccggggtctgaatacgctgccaaaa

SEQ ID NO: 439841 - DNA, 30 bp, Artificial Sequence
  Synthetic oligonucleotide
gaaaaacctttagcccttccaattccaaaa

SEQ ID NO: 439842 - DNA, 30 bp, Artificial Sequence
  Synthetic oligonucleotide
agtcattgattgaagaaccaggttccaaaa

SEQ ID NO: 439843 - DNA, 30 bp, Artificial Sequence
  Synthetic oligonucleotide
atcactgtggtctttgtcattaaagcaaaa

SEQ ID NO: 439844 - DNA, 30 bp, Artificial Sequence
  Synthetic oligonucleotide
ggctcgtctacgcacagcgtttcagcaaaa

SEQ ID NO: 439845 - DNA, 30 bp, Artificial Sequence
  Synthetic oligonucleotide
ggccttgactggtctgatccagtagcaaaa

SEQ ID NO: 439846 - DNA, 30 bp, Artificial Sequence
  Synthetic oligonucleotide
gcgctccacatcgtagaagagcgcgcaaaa

SEQ ID NO: 439847 - DNA, 30 bp, Artificial Sequence
  Synthetic oligonucleotide
tcccgggttctatcttataaagtcgcaaaa

SEQ ID NO: 439848 - DNA, 30 bp, Artificial Sequence
  Synthetic oligonucleotide
ccttacgattaactcccacagggggcaaaa

SEQ ID NO: 439849 - DNA, 30 bp, Artificial Sequence
  Synthetic oligonucleotide
cacttggggaatagttgcctttgggcaaaa

SEQ ID NO: 439850 - DNA, 30 bp, Artificial Sequence
  Synthetic oligonucleotide
acttatgtctagagatataacatggcaaaa

SEQ ID NO: 439851 - DNA, 30 bp, Artificial Sequence
  Synthetic oligonucleotide
ggctctgaaagtacaattgggtatgcaaaa

SEQ ID NO: 439852 - DNA, 30 bp, Artificial Sequence
  Synthetic oligonucleotide
gattttctgctttgactgggagctgcaaaa

SEQ ID NO: 439853 - DNA, 30 bp, Artificial Sequence
  Synthetic oligonucleotide
ctcccgtataccatcagatgtccatcaaaa

SEQ ID NO: 439854 - DNA, 30 bp, Artificial Sequence
  Synthetic oligonucleotide
tgccggaatccatcaacttttctatcaaaa

SEQ ID NO: 439855 - DNA, 30 bp, Artificial Sequence
  Synthetic oligonucleotide
cagagcattgttttagtggggggctcaaaa

SEQ ID NO: 439856 - DNA, 30 bp, Artificial Sequence
  Synthetic oligonucleotide
gtagttgacctaagttttcgatggtcaaaa

SEQ ID NO: 439857 - DNA, 30 bp, Artificial Sequence
  Synthetic oligonucleotide
aagtattaacacacctactcagattcaaaa

SEQ ID NO: 439858 - DNA, 30 bp, Artificial Sequence
  Synthetic oligonucleotide
ctctcctctctggctcgttagtattcaaaa

SEQ ID NO: 439859 - DNA, 30 bp, Artificial Sequence
  Synthetic oligonucleotide
atatggtttttgcctacaactaaaagaaaa

SEQ ID NO: 439860 - DNA, 30 bp, Artificial Sequence
  Synthetic oligonucleotide
atccggtcgtctgtcacagtgcccagaaaa

SEQ ID NO: 439861 - DNA, 30 bp, Artificial Sequence
  Synthetic oligonucleotide
gaaatctggcgagaccgcgcaagcagaaaa

SEQ ID NO: 439862 - DNA, 30 bp, Artificial Sequence
  Synthetic oligonucleotide
tacttgtctaagttccggctaaagagaaaa

SEQ ID NO: 439863 - DNA, 30 bp, Artificial Sequence
  Synthetic oligonucleotide
gtttagccggttgttgcacagtcgagaaaa

SEQ ID NO: 439864 - DNA, 30 bp, Artificial Sequence
  Synthetic oligonucleotide
caagaagagaaatgagcacgttcgagaaaa

SEQ ID NO: 439865 - DNA, 30 bp, Artificial Sequence
  Synthetic oligonucleotide
cctttggtgagtctcgcacgttatagaaaa

SEQ ID NO: 439866 - DNA, 30 bp, Artificial Sequence
  Synthetic oligonucleotide
tttctaattaaacctctaagacctagaaaa

SEQ ID NO: 439867 - DNA, 30 bp, Artificial Sequence
  Synthetic oligonucleotide
gttcttagtaggtaacaattctctagaaaa

SEQ ID NO: 439868 - DNA, 30 bp, Artificial Sequence
  Synthetic oligonucleotide
gaatccaagtacatcgtgcctggtagaaaa

SEQ ID NO: 439869 - DNA, 30 bp, Artificial Sequence
  Synthetic oligonucleotide
tttgagcagaccttggcacgcattagaaaa

SEQ ID NO: 439870 - DNA, 30 bp, Artificial Sequence
  Synthetic oligonucleotide
cgttgtttcgactcgtgtatataacgaaaa

SEQ ID NO: 439871 - DNA, 30 bp, Artificial Sequence
  Synthetic oligonucleotide
gggggtataaggacggacttcttccgaaaa

SEQ ID NO: 439872 - DNA, 30 bp, Artificial Sequence
  Synthetic oligonucleotide
ttaagtcggtgcctcgaactcgtgcgaaaa

SEQ ID NO: 439873 - DNA, 30 bp, Artificial Sequence
  Synthetic oligonucleotide
ctatctttgaattttcgtcgggttcgaaaa

SEQ ID NO: 439874 - DNA, 29 bp, Artificial Sequence
  Synthetic oligonucleotide
tcacctttagacacttgtactcaggaaaa

SEQ ID NO: 439875 - DNA, 30 bp, Artificial Sequence
  Synthetic oligonucleotide
ccgctcgatttcctcatcggcagaggaaaa

SEQ ID NO: 439876 - DNA, 30 bp, Artificial Sequence
  Synthetic oligonucleotide
gctaaagtttcccattatctgaagggaaaa

SEQ ID NO: 439877 - DNA, 30 bp, Artificial Sequence
  Synthetic oligonucleotide
ggcgtctccgcaaaatttttgtagggaaaa

SEQ ID NO: 439878 - DNA, 30 bp, Artificial Sequence
  Synthetic oligonucleotide
tctcctggccgtgactacaatctgggaaaa

SEQ ID NO: 439879 - DNA, 30 bp, Artificial Sequence
  Synthetic oligonucleotide
cccggccatccacgaaggttgtatggaaaa

SEQ ID NO: 439880 - DNA, 30 bp, Artificial Sequence
  Synthetic oligonucleotide
ttgccaccgaatatgacccatgaatgaaaa

SEQ ID NO: 439881 - DNA, 30 bp, Artificial Sequence
  Synthetic oligonucleotide
ggaaatgtccccatccacgctacatgaaaa

SEQ ID NO: 439882 - DNA, 30 bp, Artificial Sequence
  Synthetic oligonucleotide
caggttgggaagtctcatcagtcctgaaaa

SEQ ID NO: 439883 - DNA, 30 bp, Artificial Sequence
  Synthetic oligonucleotide
cacaggtggctagcgaaagtgtggtgaaaa

SEQ ID NO: 439884 - DNA, 30 bp, Artificial Sequence
  Synthetic oligonucleotide
tctattcaagtcattaaaatgagttgaaaa

SEQ ID NO: 439885 - DNA, 30 bp, Artificial Sequence
  Synthetic oligonucleotide
cccgaggtgcaattcttggaagtttgaaaa

SEQ ID NO: 439886 - DNA, 30 bp, Artificial Sequence
  Synthetic oligonucleotide
ggtgtacattggaaaccgcgggtttgaaaa

SEQ ID NO: 439887 - DNA, 30 bp, Artificial Sequence
  Synthetic oligonucleotide
gtctaatataactacataagctaaataaaa

SEQ ID NO: 439888 - DNA, 30 bp, Artificial Sequence
  Synthetic oligonucleotide
gtctactttcatccaagcttatcaataaaa

SEQ ID NO: 439889 - DNA, 30 bp, Artificial Sequence
  Synthetic oligonucleotide
acgccactagcgcttggccggcacataaaa

SEQ ID NO: 439890 - DNA, 30 bp, Artificial Sequence
  Synthetic oligonucleotide
tggtactattacgacgctgcctccataaaa

SEQ ID NO: 439891 - DNA, 30 bp, Artificial Sequence
  Synthetic oligonucleotide
tagaaagcggctgagttaggaaagataaaa

SEQ ID NO: 439892 - DNA, 30 bp, Artificial Sequence
  Synthetic oligonucleotide
gaagaattaaagatcgcaaggaagataaaa

SEQ ID NO: 439893 - DNA, 30 bp, Artificial Sequence
  Synthetic oligonucleotide
gaagttagcatcgggaacgctgggataaaa

SEQ ID NO: 439894 - DNA, 30 bp, Artificial Sequence
  Synthetic oligonucleotide
ccggtgttttgtgctcaaattaatataaaa

SEQ ID NO: 439895 - DNA, 30 bp, Artificial Sequence
  Synthetic oligonucleotide
agtggcgaaaatattagtctaaaactaaaa

SEQ ID NO: 439896 - DNA, 30 bp, Artificial Sequence
  Synthetic oligonucleotide
gtccttaggaggataatgtcctcactaaaa

SEQ ID NO: 439897 - DNA, 30 bp, Artificial Sequence
  Synthetic oligonucleotide
ggtaggggcatttgagtcgggggcctaaaa

SEQ ID NO: 439898 - DNA, 30 bp, Artificial Sequence
  Synthetic oligonucleotide
tggggtaaattttctgaattctagctaaaa

SEQ ID NO: 439899 - DNA, 30 bp, Artificial Sequence
  Synthetic oligonucleotide
caaattggcctactgtgactgcatctaaaa

SEQ ID NO: 439900 - DNA, 30 bp, Artificial Sequence
  Synthetic oligonucleotide
ctgagtattggaggatgatcgtatctaaaa

SEQ ID NO: 439901 - DNA, 30 bp, Artificial Sequence
  Synthetic oligonucleotide
ctcttcgggtcttacaaagacactctaaaa

SEQ ID NO: 439902 - DNA, 30 bp, Artificial Sequence
  Synthetic oligonucleotide
tcttgttattaaatcctggaacttctaaaa

SEQ ID NO: 439903 - DNA, 30 bp, Artificial Sequence
  Synthetic oligonucleotide
tgtaagtaagtcccaggcagcgaagtaaaa

SEQ ID NO: 439904 - DNA, 30 bp, Artificial Sequence
  Synthetic oligonucleotide
acttaccgaagactcaggtatgaagtaaaa

SEQ ID NO: 439905 - DNA, 30 bp, Artificial Sequence
  Synthetic oligonucleotide
tgtgcatttagcggcatcgcgggagtaaaa

SEQ ID NO: 439906 - DNA, 30 bp, Artificial Sequence
  Synthetic oligonucleotide
taactatggccttaaattgacgccgtaaaa

SEQ ID NO: 439907 - DNA, 30 bp, Artificial Sequence
  Synthetic oligonucleotide
ttcgatccgtttactttgaattaggtaaaa

SEQ ID NO: 439908 - DNA, 30 bp, Artificial Sequence
  Synthetic oligonucleotide
ttatccttgactgccattattgcggtaaaa

SEQ ID NO: 439909 - DNA, 30 bp, Artificial Sequence
  Synthetic oligonucleotide
tctactacgttaacacataggctggtaaaa

SEQ ID NO: 439910 - DNA, 30 bp, Artificial Sequence
  Synthetic oligonucleotide
tgtctatcggctccaagtactttggtaaaa

SEQ ID NO: 439911 - DNA, 30 bp, Artificial Sequence
  Synthetic oligonucleotide
tttgagttatctcatgctatcgatgtaaaa

SEQ ID NO: 439912 - DNA, 30 bp, Artificial Sequence
  Synthetic oligonucleotide
gtcttgacgacttttgagaggcttgtaaaa

SEQ ID NO: 439913 - DNA, 30 bp, Artificial Sequence
  Synthetic oligonucleotide
tcagctagtttgatttaaagcgttgtaaaa

SEQ ID NO: 439914 - DNA, 30 bp, Artificial Sequence
  Synthetic oligonucleotide
atatgacagtaaaattttgggaaattaaaa

SEQ ID NO: 439915 - DNA, 30 bp, Artificial Sequence
  Synthetic oligonucleotide
gaattggtgtgtggtaaagttccattaaaa

SEQ ID NO: 439916 - DNA, 30 bp, Artificial Sequence
  Synthetic oligonucleotide
ccagcatcgataaggcaataacccttaaaa

SEQ ID NO: 439917 - DNA, 30 bp, Artificial Sequence
  Synthetic oligonucleotide
aactgacgggtttgatccaagcgcttaaaa

SEQ ID NO: 439918 - DNA, 30 bp, Artificial Sequence
  Synthetic oligonucleotide
atagcaccctatcatatagggacgttaaaa

SEQ ID NO: 439919 - DNA, 30 bp, Artificial Sequence
  Synthetic oligonucleotide
agaagcctcatttcctaagaatggttaaaa

SEQ ID NO: 439920 - DNA, 30 bp, Artificial Sequence
  Synthetic oligonucleotide
ataatacgatgctgctgaggtttgttaaaa

SEQ ID NO: 439921 - DNA, 29 bp, Artificial Sequence
  Synthetic oligonucleotide
gatggggaaccctagaggtgggtttaaaa

SEQ ID NO: 439922 - DNA, 30 bp, Artificial Sequence
  Synthetic oligonucleotide
tatatggcgagctctaagtagcgaaacaaa

SEQ ID NO: 439923 - DNA, 30 bp, Artificial Sequence
  Synthetic oligonucleotide
cttatcagcagttacgctgttataaacaaa

SEQ ID NO: 439924 - DNA, 30 bp, Artificial Sequence
  Synthetic oligonucleotide
tcttcacatagaattcgaaagggcaacaaa

SEQ ID NO: 439925 - DNA, 30 bp, Artificial Sequence
  Synthetic oligonucleotide
gaattcacctggccctataaaacgaacaaa

SEQ ID NO: 439926 - DNA, 30 bp, Artificial Sequence
  Synthetic oligonucleotide
aatgagccacccgcctttgtgcctaacaaa

SEQ ID NO: 439927 - DNA, 30 bp, Artificial Sequence
  Synthetic oligonucleotide
tgcattgccagatgattcgtatcacacaaa

SEQ ID NO: 439928 - DNA, 30 bp, Artificial Sequence
  Synthetic oligonucleotide
tggggtaaacatgtgccataccgacacaaa

SEQ ID NO: 439929 - DNA, 30 bp, Artificial Sequence
  Synthetic oligonucleotide
ttcaagaacctctttccagctcaccacaaa

SEQ ID NO: 439930 - DNA, 30 bp, Artificial Sequence
  Synthetic oligonucleotide
agcccaatattcgttcgacacgcccacaaa

SEQ ID NO: 439931 - DNA, 30 bp, Artificial Sequence
  Synthetic oligonucleotide
gatctaagtgctctcaggtggttccacaaa

SEQ ID NO: 439932 - DNA, 30 bp, Artificial Sequence
  Synthetic oligonucleotide
tttttctattgtgaagtgccgccgcacaaa

SEQ ID NO: 439933 - DNA, 30 bp, Artificial Sequence
  Synthetic oligonucleotide
accgtcaaagcctgtgcggcgccgcacaaa

SEQ ID NO: 439934 - DNA, 30 bp, Artificial Sequence
  Synthetic oligonucleotide
cttctgccatatggccaccactggcacaaa

SEQ ID NO: 439935 - DNA, 26 bp, Artificial Sequence
  Synthetic oligonucleotide
gtcagtgttactctgccggtcacaaa

SEQ ID NO: 439936 - DNA, 30 bp, Artificial Sequence
  Synthetic oligonucleotide
gcgcttgcccctgaagggaattgtcacaaa

SEQ ID NO: 439937 - DNA, 30 bp, Artificial Sequence
  Synthetic oligonucleotide
cattttcgccattccaggacgtgcgacaaa

SEQ ID NO: 439938 - DNA, 30 bp, Artificial Sequence
  Synthetic oligonucleotide
ctgcgctaacatcatcgagaaatcgacaaa

SEQ ID NO: 439939 - DNA, 30 bp, Artificial Sequence
  Synthetic oligonucleotide
actatagtccgttcggcttatttcgacaaa

SEQ ID NO: 439940 - DNA, 30 bp, Artificial Sequence
  Synthetic oligonucleotide
ctcatatgttctatcaaacataatgacaaa

SEQ ID NO: 439941 - DNA, 30 bp, Artificial Sequence
  Synthetic oligonucleotide
cacaatcctgggagttacagtgatgacaaa

SEQ ID NO: 439942 - DNA, 30 bp, Artificial Sequence
  Synthetic oligonucleotide
cccccggggatttcccctctcggatacaaa

SEQ ID NO: 439943 - DNA, 30 bp, Artificial Sequence
  Synthetic oligonucleotide
ctttaacaggtgcttgggttttactacaaa

SEQ ID NO: 439944 - DNA, 30 bp, Artificial Sequence
  Synthetic oligonucleotide
ttggattactggcaaatcgatgcctacaaa

SEQ ID NO: 439945 - DNA, 30 bp, Artificial Sequence
  Synthetic oligonucleotide
gtgccgctgaatacccgtaaacggtacaaa

SEQ ID NO: 439946 - DNA, 30 bp, Artificial Sequence
  Synthetic oligonucleotide
aatctgtggagatactgttcgtggtacaaa

SEQ ID NO: 439947 - DNA, 30 bp, Artificial Sequence
  Synthetic oligonucleotide
ccgaatcttatcagatgatttgtttacaaa

SEQ ID NO: 439948 - DNA, 30 bp, Artificial Sequence
  Synthetic oligonucleotide
taccagaccattttgcagggtccaaccaaa

SEQ ID NO: 439949 - DNA, 30 bp, Artificial Sequence
  Synthetic oligonucleotide
gataagatgtaagttggttacgtcaccaaa

SEQ ID NO: 439950 - DNA, 30 bp, Artificial Sequence
  Synthetic oligonucleotide
cctacttatgctaggcgcgttcggaccaaa

SEQ ID NO: 439951 - DNA, 30 bp, Artificial Sequence
  Synthetic oligonucleotide
gctgcgaatcgtaaaagatggcctaccaaa

SEQ ID NO: 439952 - DNA, 30 bp, Artificial Sequence
  Synthetic oligonucleotide
ctcacgtacgtgcaactataaattaccaaa

SEQ ID NO: 439953 - DNA, 30 bp, Artificial Sequence
  Synthetic oligonucleotide
acatgattagtttagagcgcttcacccaaa

SEQ ID NO: 439954 - DNA, 29 bp, Artificial Sequence
  Synthetic oligonucleotide
cgtatagggggggggttccctggcccaaa

SEQ ID NO: 439955 - DNA, 30 bp, Artificial Sequence
  Synthetic oligonucleotide
attcccggcgcagaggtctccaatcccaaa

SEQ ID NO: 439956 - DNA, 30 bp, Artificial Sequence
  Synthetic oligonucleotide
gatggctatttgtcggtaatgtaagccaaa

SEQ ID NO: 439957 - DNA, 30 bp, Artificial Sequence
  Synthetic oligonucleotide
gtgatgctagcagtatggacagtagccaaa

SEQ ID NO: 439958 - DNA, 30 bp, Artificial Sequence
  Synthetic oligonucleotide
cgcccccatcgtgataggggttacgccaaa

SEQ ID NO: 439959 - DNA, 30 bp, Artificial Sequence
  Synthetic oligonucleotide
gctgacgacaattgagcgctaagcgccaaa

SEQ ID NO: 439960 - DNA, 30 bp, Artificial Sequence
  Synthetic oligonucleotide
acagaagccggctcgcttcgaggcgccaaa

SEQ ID NO: 439961 - DNA, 30 bp, Artificial Sequence
  Synthetic oligonucleotide
atattaccggccaagaagccttaggccaaa

SEQ ID NO: 439962 - DNA, 30 bp, Artificial Sequence
  Synthetic oligonucleotide
acaaagttaccgcgggctagtatggccaaa

SEQ ID NO: 439963 - DNA, 30 bp, Artificial Sequence
  Synthetic oligonucleotide
gtttggtaggctgactagttcctggccaaa

SEQ ID NO: 439964 - DNA, 30 bp, Artificial Sequence
  Synthetic oligonucleotide
gcatgttggtaattatgactgttggccaaa

SEQ ID NO: 439965 - DNA, 30 bp, Artificial Sequence
  Synthetic oligonucleotide
gactgctgatcttagggccaagtctccaaa

SEQ ID NO: 439966 - DNA, 30 bp, Artificial Sequence
  Synthetic oligonucleotide
ctactcaacagacgatctaatacgtccaaa

SEQ ID NO: 439967 - DNA, 30 bp, Artificial Sequence
  Synthetic oligonucleotide
ggcgcccgcggcaatttaaggccgtccaaa

SEQ ID NO: 439968 - DNA, 30 bp, Artificial Sequence
  Synthetic oligonucleotide
aattttcataagcaaagtaccaggtccaaa

SEQ ID NO: 439969 - DNA, 30 bp, Artificial Sequence
  Synthetic oligonucleotide
cacgggtacggccacggtatgttgtccaaa

SEQ ID NO: 439970 - DNA, 30 bp, Artificial Sequence
  Synthetic oligonucleotide
tggcctgtacgttatttggtcatttccaaa

SEQ ID NO: 439971 - DNA, 30 bp, Artificial Sequence
  Synthetic oligonucleotide
tactttcgtaaagtgcgaaatcgcagcaaa

SEQ ID NO: 439972 - DNA, 30 bp, Artificial Sequence
  Synthetic oligonucleotide
gccccgcgtcatcctggggtcggcagcaaa

SEQ ID NO: 439973 - DNA, 30 bp, Artificial Sequence
  Synthetic oligonucleotide
ccaaagtttgtttgggtgcctttcagcaaa

SEQ ID NO: 439974 - DNA, 30 bp, Artificial Sequence
  Synthetic oligonucleotide
cagtatgcatcgccacgtttcgcacgcaaa

SEQ ID NO: 439975 - DNA, 30 bp, Artificial Sequence
  Synthetic oligonucleotide
ggctgtaatgcctcgcatttgcgacgcaaa

SEQ ID NO: 439976 - DNA, 30 bp, Artificial Sequence
  Synthetic oligonucleotide
agagtatattaacgtatattcttacgcaaa

SEQ ID NO: 439977 - DNA, 30 bp, Artificial Sequence
  Synthetic oligonucleotide
catgccggaattctcttacgtaaccgcaaa

SEQ ID NO: 439978 - DNA, 30 bp, Artificial Sequence
  Synthetic oligonucleotide
tttcaagtacgttgggtgagaatccgcaaa

SEQ ID NO: 439979 - DNA, 30 bp, Artificial Sequence
  Synthetic oligonucleotide
ttgggtcctgcgaaactgcacaggcgcaaa

SEQ ID NO: 439980 - DNA, 30 bp, Artificial Sequence
  Synthetic oligonucleotide
tatcatttcgtttatacctagttgcgcaaa

SEQ ID NO: 439981 - DNA, 30 bp, Artificial Sequence
  Synthetic oligonucleotide
ttctgcgagttggttagaacgagtcgcaaa

SEQ ID NO: 439982 - DNA, 30 bp, Artificial Sequence
  Synthetic oligonucleotide
acggttattgtttaaggtttagttcgcaaa

SEQ ID NO: 439983 - DNA, 30 bp, Artificial Sequence
  Synthetic oligonucleotide
gtagttatccactgttgggatataggcaaa

SEQ ID NO: 439984 - DNA, 30 bp, Artificial Sequence
  Synthetic oligonucleotide
taaagcgcatctggcaatttagtaggcaaa

SEQ ID NO: 439985 - DNA, 30 bp, Artificial Sequence
  Synthetic oligonucleotide
gacgcgcaatttccagtgtccttaggcaaa

SEQ ID NO: 439986 - DNA, 30 bp, Artificial Sequence
  Synthetic oligonucleotide
ggtggggcgccttacgcggtcgacggcaaa

SEQ ID NO: 439987 - DNA, 30 bp, Artificial Sequence
  Synthetic oligonucleotide
aaagcttttcgtccttcttcttacggcaaa

SEQ ID NO: 439988 - DNA, 30 bp, Artificial Sequence
  Synthetic oligonucleotide
acttggacgccggtcgttcagcggggcaaa

SEQ ID NO: 439989 - DNA, 30 bp, Artificial Sequence
  Synthetic oligonucleotide
tggccttatggacgtacgactctgggcaaa

SEQ ID NO: 439990 - DNA, 30 bp, Artificial Sequence
  Synthetic oligonucleotide
ttctgcttatacgtaatcagaactggcaaa

SEQ ID NO: 439991 - DNA, 30 bp, Artificial Sequence
  Synthetic oligonucleotide
gggtgggggctacttacaagctgtggcaaa

SEQ ID NO: 439992 - DNA, 30 bp, Artificial Sequence
  Synthetic oligonucleotide
ctgacgtgcgtccgcaagcctccatgcaaa

SEQ ID NO: 439993 - DNA, 30 bp, Artificial Sequence
  Synthetic oligonucleotide
ggcgtcacatattatgcccgatattgcaaa

SEQ ID NO: 439994 - DNA, 30 bp, Artificial Sequence
  Synthetic oligonucleotide
aaccgaacacttccagtgtcggcttgcaaa

SEQ ID NO: 439995 - DNA, 30 bp, Artificial Sequence
  Synthetic oligonucleotide
cttaaaatcacctcataagtgcgttgcaaa

SEQ ID NO: 439996 - DNA, 30 bp, Artificial Sequence
  Synthetic oligonucleotide
ggttgttgcttctgattcagtaaaatcaaa

SEQ ID NO: 439997 - DNA, 30 bp, Artificial Sequence
  Synthetic oligonucleotide
agaaattatgtagtaacggtaaccatcaaa

SEQ ID NO: 439998 - DNA, 30 bp, Artificial Sequence
  Synthetic oligonucleotide
acgtcaacgagcgtatgcaggagcatcaaa

SEQ ID NO: 439999 - DNA, 30 bp, Artificial Sequence
  Synthetic oligonucleotide
attcgggtaatattagttattctcatcaaa

SEQ ID NO: 440000 - DNA, 30 bp, Artificial Sequence
  Synthetic oligonucleotide
gtcgccaaattttattgttcttcgatcaaa

SEQ ID NO: 440001 - DNA, 30 bp, Artificial Sequence
  Synthetic oligonucleotide
ggaattttcacggggttctgagtgatcaaa

SEQ ID NO: 440002 - DNA, 30 bp, Artificial Sequence
  Synthetic oligonucleotide
ttcgcttgtagagtgattacaaatatcaaa

SEQ ID NO: 440003 - DNA, 30 bp, Artificial Sequence
  Synthetic oligonucleotide
ggaattaactggttagcttccaccctcaaa

SEQ ID NO: 440004 - DNA, 30 bp, Artificial Sequence
  Synthetic oligonucleotide
gataccgtgaaacatggccttaggctcaaa

SEQ ID NO: 440005 - DNA, 30 bp, Artificial Sequence
  Synthetic oligonucleotide
acgcagcctaggtttgacaaacatctcaaa

SEQ ID NO: 440006 - DNA, 30 bp, Artificial Sequence
  Synthetic oligonucleotide
tctgcgatgtaaagtcattcggatctcaaa

SEQ ID NO: 440007 - DNA, 30 bp, Artificial Sequence
  Synthetic oligonucleotide
ttatacggtattcgttaggggcttctcaaa

SEQ ID NO: 440008 - DNA, 30 bp, Artificial Sequence
  Synthetic oligonucleotide
gtttaaatcgctgatcagatacaggtcaaa

SEQ ID NO: 440009 - DNA, 30 bp, Artificial Sequence
  Synthetic oligonucleotide
gtgtatcgtggacagtggagaccggtcaaa

SEQ ID NO: 440010 - DNA, 30 bp, Artificial Sequence
  Synthetic oligonucleotide
tgttaaatcctctaaacggacggggtcaaa

SEQ ID NO: 440011 - DNA, 30 bp, Artificial Sequence
  Synthetic oligonucleotide
tgttatttggctaccattgaacctgtcaaa

SEQ ID NO: 440012 - DNA, 30 bp, Artificial Sequence
  Synthetic oligonucleotide
cgggcggtattcccgtggcggcgtgtcaaa

SEQ ID NO: 440013 - DNA, 30 bp, Artificial Sequence
  Synthetic oligonucleotide
ctaaaagactccatcagggagtcattcaaa

SEQ ID NO: 440014 - DNA, 30 bp, Artificial Sequence
  Synthetic oligonucleotide
gctttatccacttctatcattcgattcaaa

SEQ ID NO: 440015 - DNA, 30 bp, Artificial Sequence
  Synthetic oligonucleotide
atatcaatcacagaacctcaagtcttcaaa

SEQ ID NO: 440016 - DNA, 30 bp, Artificial Sequence
  Synthetic oligonucleotide
tcgggtgagtcagcctcaccgttcttcaaa

SEQ ID NO: 440017 - DNA, 30 bp, Artificial Sequence
  Synthetic oligonucleotide
tggacggcattcgggagacagttgttcaaa

SEQ ID NO: 440018 - DNA, 30 bp, Artificial Sequence
  Synthetic oligonucleotide
tctacaccgctgattaccctcaatttcaaa

SEQ ID NO: 440019 - DNA, 29 bp, Artificial Sequence
  Synthetic oligonucleotide
accccacggagtaaaagaatggtttcaaa

SEQ ID NO: 440020 - DNA, 30 bp, Artificial Sequence
  Synthetic oligonucleotide
ttgtcacctatggcagccctttttttcaaa

SEQ ID NO: 440021 - DNA, 30 bp, Artificial Sequence
  Synthetic oligonucleotide
aatagaattttaagaaattacgcaaagaaa

SEQ ID NO: 440022 - DNA, 30 bp, Artificial Sequence
  Synthetic oligonucleotide
ggagacaacaagttcctttgtataaagaaa

SEQ ID NO: 440023 - DNA, 30 bp, Artificial Sequence
  Synthetic oligonucleotide
acgttttctgcgcatgtgagggtaaagaaa

SEQ ID NO: 440024 - DNA, 30 bp, Artificial Sequence
  Synthetic oligonucleotide
gtaacctctttgcgatcttcttacaagaaa

SEQ ID NO: 440025 - DNA, 30 bp, Artificial Sequence
  Synthetic oligonucleotide
acctcgtaatcttttgcttcgcgcaagaaa

SEQ ID NO: 440026 - DNA, 30 bp, Artificial Sequence
  Synthetic oligonucleotide
ttgatgatgcatgtatgataaggcaagaaa

SEQ ID NO: 440027 - DNA, 30 bp, Artificial Sequence
  Synthetic oligonucleotide
tcatattttaccactaccctcgataagaaa

SEQ ID NO: 440028 - DNA, 30 bp, Artificial Sequence
  Synthetic oligonucleotide
atgaaagctagacgtgcaacctttaagaaa

SEQ ID NO: 440029 - DNA, 30 bp, Artificial Sequence
  Synthetic oligonucleotide
acaccgtgtggttttaaggcatcacagaaa

SEQ ID NO: 440030 - DNA, 30 bp, Artificial Sequence
  Synthetic oligonucleotide
cagttcggcctgattcctcgccaccagaaa

SEQ ID NO: 440031 - DNA, 30 bp, Artificial Sequence
  Synthetic oligonucleotide
tgaccagttcttagcttgcggcaccagaaa

SEQ ID NO: 440032 - DNA, 30 bp, Artificial Sequence
  Synthetic oligonucleotide
atccgcgaggttctgcatcagacccagaaa

SEQ ID NO: 440033 - DNA, 30 bp, Artificial Sequence
  Synthetic oligonucleotide
atatcttgcacggggaacagtgagcagaaa

SEQ ID NO: 440034 - DNA, 30 bp, Artificial Sequence
  Synthetic oligonucleotide
tgcgccaccacttaacacccggcgcagaaa

SEQ ID NO: 440035 - DNA, 30 bp, Artificial Sequence
  Synthetic oligonucleotide
aattgtcgggatttgcagattcggcagaaa

SEQ ID NO: 440036 - DNA, 30 bp, Artificial Sequence
  Synthetic oligonucleotide
gcaccgtgtcatctgcctcgagggcagaaa

SEQ ID NO: 440037 - DNA, 30 bp, Artificial Sequence
  Synthetic oligonucleotide
tacatattaaagttaacagttattcagaaa

SEQ ID NO: 440038 - DNA, 30 bp, Artificial Sequence
  Synthetic oligonucleotide
gaacaaaattcgctccgtcgtttagagaaa

SEQ ID NO: 440039 - DNA, 30 bp, Artificial Sequence
  Synthetic oligonucleotide
gtgtgcgtttcgaggcacagggccgagaaa

SEQ ID NO: 440040 - DNA, 30 bp, Artificial Sequence
  Synthetic oligonucleotide
attggacaacatacgcgcacaggggagaaa

SEQ ID NO: 440041 - DNA, 30 bp, Artificial Sequence
  Synthetic oligonucleotide
gctctactggattcagatgccaatgagaaa

SEQ ID NO: 440042 - DNA, 30 bp, Artificial Sequence
  Synthetic oligonucleotide
taatttttggattgtagaaaagatgagaaa

SEQ ID NO: 440043 - DNA, 30 bp, Artificial Sequence
  Synthetic oligonucleotide
agaatcggcctgagaatagagattgagaaa

SEQ ID NO: 440044 - DNA, 30 bp, Artificial Sequence
  Synthetic oligonucleotide
cagtatcgaaatttaggaagcagatagaaa

SEQ ID NO: 440045 - DNA, 30 bp, Artificial Sequence
  Synthetic oligonucleotide
gacatacacgtaacacataacgtatagaaa

SEQ ID NO: 440046 - DNA, 30 bp, Artificial Sequence
  Synthetic oligonucleotide
acgactgaagtggtttgcaagggctagaaa

SEQ ID NO: 440047 - DNA, 30 bp, Artificial Sequence
  Synthetic oligonucleotide
tgtttaatgaagtcatattcatagtagaaa

SEQ ID NO: 440048 - DNA, 30 bp, Artificial Sequence
  Synthetic oligonucleotide
ataggaccccaatgacgaatcgcgtagaaa

SEQ ID NO: 440049 - DNA, 30 bp, Artificial Sequence
  Synthetic oligonucleotide
agacgtaccacgcaccctcaaaattagaaa

SEQ ID NO: 440050 - DNA, 30 bp, Artificial Sequence
  Synthetic oligonucleotide
tttctctataggtcatttcctcaaacgaaa

SEQ ID NO: 440051 - DNA, 30 bp, Artificial Sequence
  Synthetic oligonucleotide
gaagcttgagatagtatgtctcaaacgaaa

SEQ ID NO: 440052 - DNA, 30 bp, Artificial Sequence
  Synthetic oligonucleotide
cataatcgattgcagtgcgcgtaaacgaaa

SEQ ID NO: 440053 - DNA, 30 bp, Artificial Sequence
  Synthetic oligonucleotide
cgccggcgattcgcgctatccagaacgaaa

SEQ ID NO: 440054 - DNA, 30 bp, Artificial Sequence
  Synthetic oligonucleotide
ctctttactcgcgaaacttgtgtaacgaaa

SEQ ID NO: 440055 - DNA, 30 bp, Artificial Sequence
  Synthetic oligonucleotide
atagtactaactacctcggttttaacgaaa

SEQ ID NO: 440056 - DNA, 30 bp, Artificial Sequence
  Synthetic oligonucleotide
tcgcaatttcatacggtttgttacacgaaa

SEQ ID NO: 440057 - DNA, 30 bp, Artificial Sequence
  Synthetic oligonucleotide
cgtaactcaactcccatacgcatcacgaaa

SEQ ID NO: 440058 - DNA, 30 bp, Artificial Sequence
  Synthetic oligonucleotide
agcgatggagtcattatttataatacgaaa

SEQ ID NO: 440059 - DNA, 30 bp, Artificial Sequence
  Synthetic oligonucleotide
ttacgctccataactagaccttgtacgaaa

SEQ ID NO: 440060 - DNA, 30 bp, Artificial Sequence
  Synthetic oligonucleotide
ttctaaatctgcggactgatggttacgaaa

SEQ ID NO: 440061 - DNA, 30 bp, Artificial Sequence
  Synthetic oligonucleotide
gcaaattaggttctggctctaaaaccgaaa

SEQ ID NO: 440062 - DNA, 30 bp, Artificial Sequence
  Synthetic oligonucleotide
taggggtttggcacgcatcgtaacccgaaa

SEQ ID NO: 440063 - DNA, 30 bp, Artificial Sequence
  Synthetic oligonucleotide
tactccgaggtgtttgagttacacccgaaa

SEQ ID NO: 440064 - DNA, 30 bp, Artificial Sequence
  Synthetic oligonucleotide
gatgcagtgccataggccgggagcccgaaa

SEQ ID NO: 440065 - DNA, 30 bp, Artificial Sequence
  Synthetic oligonucleotide
tttgggtctacagttttcggttgcccgaaa

SEQ ID NO: 440066 - DNA, 30 bp, Artificial Sequence
  Synthetic oligonucleotide
tacttgcccgctctgtcaaagttcccgaaa

SEQ ID NO: 440067 - DNA, 30 bp, Artificial Sequence
  Synthetic oligonucleotide
cacggggtgaattattcgcacaagccgaaa

SEQ ID NO: 440068 - DNA, 30 bp, Artificial Sequence
  Synthetic oligonucleotide
gccggtgggtgttggtgttggtttccgaaa

SEQ ID NO: 440069 - DNA, 30 bp, Artificial Sequence
  Synthetic oligonucleotide
aacctttttatggaccggatgtaagcgaaa

SEQ ID NO: 440070 - DNA, 30 bp, Artificial Sequence
  Synthetic oligonucleotide
tatccgaataaggtagcaagagcagcgaaa

SEQ ID NO: 440071 - DNA, 30 bp, Artificial Sequence
  Synthetic oligonucleotide
attttgtgtgatacctctacaagagcgaaa

SEQ ID NO: 440072 - DNA, 30 bp, Artificial Sequence
  Synthetic oligonucleotide
ctggtaaggtcacgtgcagccatagcgaaa

SEQ ID NO: 440073 - DNA, 30 bp, Artificial Sequence
  Synthetic oligonucleotide
cttcgtagtgtcccgaaccaataggcgaaa

SEQ ID NO: 440074 - DNA, 30 bp, Artificial Sequence
  Synthetic oligonucleotide
agtcggattacgcccttcttgcgggcgaaa

SEQ ID NO: 440075 - DNA, 30 bp, Artificial Sequence
  Synthetic oligonucleotide
aatacatcccaggttcatgtgttggcgaaa

SEQ ID NO: 440076 - DNA, 30 bp, Artificial Sequence
  Synthetic oligonucleotide
acgaccattctttagaatattggatcgaaa

SEQ ID NO: 440077 - DNA, 30 bp, Artificial Sequence
  Synthetic oligonucleotide
aaaaacccacgtcaatgtattttatcgaaa

SEQ ID NO: 440078 - DNA, 30 bp, Artificial Sequence
  Synthetic oligonucleotide
aaatagagagtcgtgggtcgggtcaggaaa

SEQ ID NO: 440079 - DNA, 30 bp, Artificial Sequence
  Synthetic oligonucleotide
aatctcttgagggggtacgcgcagaggaaa

SEQ ID NO: 440080 - DNA, 30 bp, Artificial Sequence
  Synthetic oligonucleotide
cggacacatgtggcaatagtggcgaggaaa

SEQ ID NO: 440081 - DNA, 30 bp, Artificial Sequence
  Synthetic oligonucleotide
gttacaacatggccttctccttggaggaaa

SEQ ID NO: 440082 - DNA, 30 bp, Artificial Sequence
  Synthetic oligonucleotide
tgggccattccgtaaagagtcttgaggaaa

SEQ ID NO: 440083 - DNA, 30 bp, Artificial Sequence
  Synthetic oligonucleotide
ttgcagtcattcccacccacagataggaaa

SEQ ID NO: 440084 - DNA, 30 bp, Artificial Sequence
  Synthetic oligonucleotide
gaatgttgttccggagttacatttaggaaa

SEQ ID NO: 440085 - DNA, 30 bp, Artificial Sequence
  Synthetic oligonucleotide
cgccccctcgcggacgcagggccacggaaa

SEQ ID NO: 440086 - DNA, 30 bp, Artificial Sequence
  Synthetic oligonucleotide
tgtagaaccccgtttctatatcctcggaaa

SEQ ID NO: 440087 - DNA, 30 bp, Artificial Sequence
  Synthetic oligonucleotide
ctgatctattcatggatgtgtgctcggaaa

SEQ ID NO: 440088 - DNA, 30 bp, Artificial Sequence
  Synthetic oligonucleotide
acgcaggtttctattaacttctttcggaaa

SEQ ID NO: 440089 - DNA, 30 bp, Artificial Sequence
  Synthetic oligonucleotide
agattgaatagtcgcacctagtttcggaaa

SEQ ID NO: 440090 - DNA, 30 bp, Artificial Sequence
  Synthetic oligonucleotide
ctggagagtccggatctaatacaagggaaa

SEQ ID NO: 440091 - DNA, 30 bp, Artificial Sequence
  Synthetic oligonucleotide
gcttgttctagctcaggcggaacagggaaa

SEQ ID NO: 440092 - DNA, 30 bp, Artificial Sequence
  Synthetic oligonucleotide
taagcataaagccgtgcggcatgagggaaa

SEQ ID NO: 440093 - DNA, 30 bp, Artificial Sequence
  Synthetic oligonucleotide
attgtttacagatcactaagtatagggaaa

SEQ ID NO: 440094 - DNA, 30 bp, Artificial Sequence
  Synthetic oligonucleotide
caccccggagatacactacttccggggaaa

SEQ ID NO: 440095 - DNA, 30 bp, Artificial Sequence
  Synthetic oligonucleotide
taaaaccgcctggtccactgatctgggaaa

SEQ ID NO: 440096 - DNA, 30 bp, Artificial Sequence
  Synthetic oligonucleotide
gtaacccacgtgtccgcaatgtctgggaaa

SEQ ID NO: 440097 - DNA, 30 bp, Artificial Sequence
  Synthetic oligonucleotide
agggttaatgattaatgtggacttgggaaa

SEQ ID NO: 440098 - DNA, 30 bp, Artificial Sequence
  Synthetic oligonucleotide
attgtcccacgaaaaaaacattaatggaaa

SEQ ID NO: 440099 - DNA, 30 bp, Artificial Sequence
  Synthetic oligonucleotide
tgcaaatgcatacttccaaaactatggaaa

SEQ ID NO: 440100 - DNA, 30 bp, Artificial Sequence
  Synthetic oligonucleotide
ccggaggttacaatgacagcagtatggaaa

SEQ ID NO: 440101 - DNA, 30 bp, Artificial Sequence
  Synthetic oligonucleotide
aacaggatccgtatcggatcggtatggaaa

SEQ ID NO: 440102 - DNA, 30 bp, Artificial Sequence
  Synthetic oligonucleotide
aacatcagatttttcctataaatctggaaa

SEQ ID NO: 440103 - DNA, 30 bp, Artificial Sequence
  Synthetic oligonucleotide
acttccagcttttgaacggacgtctggaaa

SEQ ID NO: 440104 - DNA, 30 bp, Artificial Sequence
  Synthetic oligonucleotide
aaaaatgaattcgaggcgagtccgtggaaa

SEQ ID NO: 440105 - DNA, 30 bp, Artificial Sequence
  Synthetic oligonucleotide
ttcctagggaggcggtttgggccttggaaa

SEQ ID NO: 440106 - DNA, 30 bp, Artificial Sequence
  Synthetic oligonucleotide
ggggtctaacgctagcgtaagatcatgaaa

SEQ ID NO: 440107 - DNA, 30 bp, Artificial Sequence
  Synthetic oligonucleotide
tggacgttcgattatgatcgcgctatgaaa

SEQ ID NO: 440108 - DNA, 30 bp, Artificial Sequence
  Synthetic oligonucleotide
gccgctgatcttctttgcgtaggtatgaaa

SEQ ID NO: 440109 - DNA, 30 bp, Artificial Sequence
  Synthetic oligonucleotide
gttacacaattcgctatttggtgtatgaaa

SEQ ID NO: 440110 - DNA, 30 bp, Artificial Sequence
  Synthetic oligonucleotide
taatcacgacgggacatgacctttatgaaa

SEQ ID NO: 440111 - DNA, 40 bp, Artificial Sequence
  Synthetic oligonucleotide
ttgacggcaggttcgggagcgctgggtgccttgactgaaa

SEQ ID NO: 440112 - DNA, 30 bp, Artificial Sequence
  Synthetic oligonucleotide
gtcgggttgcctagggcgtccggcctgaaa

SEQ ID NO: 440113 - DNA, 30 bp, Artificial Sequence
  Synthetic oligonucleotide
atagcacgggaccttaggccgcagctgaaa

SEQ ID NO: 440114 - DNA, 30 bp, Artificial Sequence
  Synthetic oligonucleotide
aacatcggtacatttctattttggctgaaa

SEQ ID NO: 440115 - DNA, 30 bp, Artificial Sequence
  Synthetic oligonucleotide
gccgtaccggcgcccactcccggtctgaaa

SEQ ID NO: 440116 - DNA, 30 bp, Artificial Sequence
  Synthetic oligonucleotide
ttccggcattaatgagacatttgtctgaaa

SEQ ID NO: 440117 - DNA, 30 bp, Artificial Sequence
  Synthetic oligonucleotide
gccccattgcggttgcaacggggagtgaaa

SEQ ID NO: 440118 - DNA, 30 bp, Artificial Sequence
  Synthetic oligonucleotide
attagatgatgtacgctagccaccgtgaaa

SEQ ID NO: 440119 - DNA, 30 bp, Artificial Sequence
  Synthetic oligonucleotide
cgtcgtcgcacattatgctcgaccgtgaaa

SEQ ID NO: 440120 - DNA, 30 bp, Artificial Sequence
  Synthetic oligonucleotide
gtgtttcttaagaaggggtcaacggtgaaa

SEQ ID NO: 440121 - DNA, 30 bp, Artificial Sequence
  Synthetic oligonucleotide
taagcaagcgtgctcgaataaccggtgaaa

SEQ ID NO: 440122 - DNA, 30 bp, Artificial Sequence
  Synthetic oligonucleotide
aaaccttgggcacactttactactgtgaaa

SEQ ID NO: 440123 - DNA, 30 bp, Artificial Sequence
  Synthetic oligonucleotide
cgatatcttggcgatgagtagcgtgtgaaa

SEQ ID NO: 440124 - DNA, 30 bp, Artificial Sequence
  Synthetic oligonucleotide
ggggaaccaaccgtcgcagctaaattgaaa

SEQ ID NO: 440125 - DNA, 30 bp, Artificial Sequence
  Synthetic oligonucleotide
gcaatgcgtgagctagcatagctattgaaa

SEQ ID NO: 440126 - DNA, 30 bp, Artificial Sequence
  Synthetic oligonucleotide
gtgaaattttcctttgtagcagtattgaaa

SEQ ID NO: 440127 - DNA, 30 bp, Artificial Sequence
  Synthetic oligonucleotide
tacagtggcctaggacagcgcagcttgaaa

SEQ ID NO: 440128 - DNA, 30 bp, Artificial Sequence
  Synthetic oligonucleotide
gtgtccaatgattacgtattggtcttgaaa

SEQ ID NO: 440129 - DNA, 30 bp, Artificial Sequence
  Synthetic oligonucleotide
cccgatttaaaatcgacatagaagttgaaa

SEQ ID NO: 440130 - DNA, 30 bp, Artificial Sequence
  Synthetic oligonucleotide
caagctaagctcatctctcgtcagttgaaa

SEQ ID NO: 440131 - DNA, 30 bp, Artificial Sequence
  Synthetic oligonucleotide
ggaaagcataaccatttttataggttgaaa

SEQ ID NO: 440132 - DNA, 30 bp, Artificial Sequence
  Synthetic oligonucleotide
agtgtaaaaaaccatgaaataggtttgaaa

SEQ ID NO: 440133 - DNA, 30 bp, Artificial Sequence
  Synthetic oligonucleotide
actgttctgtttttatactcaattttgaaa

SEQ ID NO: 440134 - DNA, 30 bp, Artificial Sequence
  Synthetic oligonucleotide
ctttgttgtattcgacgtcgcgttttgaaa

SEQ ID NO: 440135 - DNA, 30 bp, Artificial Sequence
  Synthetic oligonucleotide
acccttaggctaagacaattcgttttgaaa

SEQ ID NO: 440136 - DNA, 30 bp, Artificial Sequence
  Synthetic oligonucleotide
acccaacaaatatctaagtgtaaaaataaa

SEQ ID NO: 440137 - DNA, 30 bp, Artificial Sequence
  Synthetic oligonucleotide
gacatgcaagggctggattttcaaaataaa

SEQ ID NO: 440138 - DNA, 30 bp, Artificial Sequence
  Synthetic oligonucleotide
ggggggatctggtagggctacgcaaataaa

SEQ ID NO: 440139 - DNA, 30 bp, Artificial Sequence
  Synthetic oligonucleotide
ttgtacccctcgttgggtaagcgaaataaa

SEQ ID NO: 440140 - DNA, 30 bp, Artificial Sequence
  Synthetic oligonucleotide
ctcagacacagatcaagtttatgaaataaa

SEQ ID NO: 440141 - DNA, 30 bp, Artificial Sequence
  Synthetic oligonucleotide
cagaaaagcgtgagcggggtggtaaataaa

SEQ ID NO: 440142 - DNA, 30 bp, Artificial Sequence
  Synthetic oligonucleotide
caaccgagctccttcgcagtccagaataaa

SEQ ID NO: 440143 - DNA, 30 bp, Artificial Sequence
  Synthetic oligonucleotide
gaactatatgtagattccgcggggaataaa

SEQ ID NO: 440144 - DNA, 30 bp, Artificial Sequence
  Synthetic oligonucleotide
gagtgtgccctctccccgaggaataataaa

SEQ ID NO: 440145 - DNA, 30 bp, Artificial Sequence
  Synthetic oligonucleotide
atgcaaaacaaggtagcggcagctaataaa

SEQ ID NO: 440146 - DNA, 30 bp, Artificial Sequence
  Synthetic oligonucleotide
aatatgtattcagtatcatcataacataaa

SEQ ID NO: 440147 - DNA, 30 bp, Artificial Sequence
  Synthetic oligonucleotide
ggaacagggacgcaacttttctcgcataaa

SEQ ID NO: 440148 - DNA, 30 bp, Artificial Sequence
  Synthetic oligonucleotide
agtccctcggcatatcataaagggcataaa

SEQ ID NO: 440149 - DNA, 30 bp, Artificial Sequence
  Synthetic oligonucleotide
gacataaaaaactaatgttgcagtcataaa

SEQ ID NO: 440150 - DNA, 30 bp, Artificial Sequence
  Synthetic oligonucleotide
ctggttctagtagaggagttataagataaa

SEQ ID NO: 440151 - DNA, 30 bp, Artificial Sequence
  Synthetic oligonucleotide
aatgctcccccttgatctcgctaagataaa

SEQ ID NO: 440152 - DNA, 30 bp, Artificial Sequence
  Synthetic oligonucleotide
attcgagtctttacattccgtgcagataaa

SEQ ID NO: 440153 - DNA, 30 bp, Artificial Sequence
  Synthetic oligonucleotide
agagtatacgcctgcataactgacgataaa

SEQ ID NO: 440154 - DNA, 30 bp, Artificial Sequence
  Synthetic oligonucleotide
cttccgcagtaatgaaaggcattcgataaa

SEQ ID NO: 440155 - DNA, 30 bp, Artificial Sequence
  Synthetic oligonucleotide
tggtatcggactggagtgggcgaggataaa

SEQ ID NO: 440156 - DNA, 30 bp, Artificial Sequence
  Synthetic oligonucleotide
ggtctacttgaaccaccactggtggataaa

SEQ ID NO: 440157 - DNA, 30 bp, Artificial Sequence
  Synthetic oligonucleotide
ggccgccctgggcgcgaccatattgataaa

SEQ ID NO: 440158 - DNA, 30 bp, Artificial Sequence
  Synthetic oligonucleotide
taaaaagctacggtgacttaagaatataaa

SEQ ID NO: 440159 - DNA, 30 bp, Artificial Sequence
  Synthetic oligonucleotide
gggttaagtcttgttagtatgtactataaa

SEQ ID NO: 440160 - DNA, 30 bp, Artificial Sequence
  Synthetic oligonucleotide
gtcaaatttttaagcgaaatctgctataaa

SEQ ID NO: 440161 - DNA, 30 bp, Artificial Sequence
  Synthetic oligonucleotide
tcaccttcggaactggttccgaagtataaa

SEQ ID NO: 440162 - DNA, 30 bp, Artificial Sequence
  Synthetic oligonucleotide
gtgcgcagctctatcatagcggagtataaa

SEQ ID NO: 440163 - DNA, 29 bp, Artificial Sequence
  Synthetic oligonucleotide
tttgttgtgtaggtttactaccgtataaa

SEQ ID NO: 440164 - DNA, 29 bp, Artificial Sequence
  Synthetic oligonucleotide
tttgtggtgtaggtttactcccgtataaa

SEQ ID NO: 440165 - DNA, 29 bp, Artificial Sequence
  Synthetic oligonucleotide
tttggtgtgtaggtttactcccgtataaa

SEQ ID NO: 440166 - DNA, 29 bp, Artificial Sequence
  Synthetic oligonucleotide
tttgttgtttaggtttactcccgtataaa

SEQ ID NO: 440167 - DNA, 30 bp, Artificial Sequence
  Synthetic oligonucleotide
tgtaaagagtgaaactctggatggtataaa

SEQ ID NO: 440168 - DNA, 30 bp, Artificial Sequence
  Synthetic oligonucleotide
attctgaacctgtaaacctcccattataaa

SEQ ID NO: 440169 - DNA, 30 bp, Artificial Sequence
  Synthetic oligonucleotide
ttgtttggataatagtccgtgcattataaa

SEQ ID NO: 440170 - DNA, 30 bp, Artificial Sequence
  Synthetic oligonucleotide
gctagccctcacctacttatcgcttataaa

SEQ ID NO: 440171 - DNA, 30 bp, Artificial Sequence
  Synthetic oligonucleotide
accgaaaggcccagcccttcgtcttataaa

SEQ ID NO: 440172 - DNA, 30 bp, Artificial Sequence
  Synthetic oligonucleotide
gttaacatttggacaagtcatttttataaa

SEQ ID NO: 440173 - DNA, 30 bp, Artificial Sequence
  Synthetic oligonucleotide
tcacctcttataaattcagtgaaaactaaa

SEQ ID NO: 440174 - DNA, 30 bp, Artificial Sequence
  Synthetic oligonucleotide
cgcaccacgatcgtttccttgaaaactaaa

SEQ ID NO: 440175 - DNA, 30 bp, Artificial Sequence
  Synthetic oligonucleotide
ttaaattgtggccttcatctgtaaactaaa

SEQ ID NO: 440176 - DNA, 30 bp, Artificial Sequence
  Synthetic oligonucleotide
atgtcaagtcgtttcacgcatgacactaaa

SEQ ID NO: 440177 - DNA, 30 bp, Artificial Sequence
  Synthetic oligonucleotide
tttagtgatttggcgattgggtacactaaa

SEQ ID NO: 440178 - DNA, 30 bp, Artificial Sequence
  Synthetic oligonucleotide
tcctggacggagcaagcgcacaccactaaa

SEQ ID NO: 440179 - DNA, 30 bp, Artificial Sequence
  Synthetic oligonucleotide
tactattctgacatgatgaatcgcactaaa

SEQ ID NO: 440180 - DNA, 30 bp, Artificial Sequence
  Synthetic oligonucleotide
gttggaatcgactgagggattttcactaaa

SEQ ID NO: 440181 - DNA, 30 bp, Artificial Sequence
  Synthetic oligonucleotide
aaatgtagcgttcctcgtcgaaagactaaa

SEQ ID NO: 440182 - DNA, 30 bp, Artificial Sequence
  Synthetic oligonucleotide
aatgttgagagattaatccgtgaacctaaa

SEQ ID NO: 440183 - DNA, 30 bp, Artificial Sequence
  Synthetic oligonucleotide
ttatggcgtatattagcttggccacctaaa

SEQ ID NO: 440184 - DNA, 30 bp, Artificial Sequence
  Synthetic oligonucleotide
acttcgcttcagggccaatccgcacctaaa

SEQ ID NO: 440185 - DNA, 30 bp, Artificial Sequence
  Synthetic oligonucleotide
gcggtgctggtggttgtttccgcacctaaa

SEQ ID NO: 440186 - DNA, 30 bp, Artificial Sequence
  Synthetic oligonucleotide
ttatttaaaacgcaaggcgtagaccctaaa

SEQ ID NO: 440187 - DNA, 30 bp, Artificial Sequence
  Synthetic oligonucleotide
tagagcgtgcgtcttgcgtcacagcctaaa

SEQ ID NO: 440188 - DNA, 30 bp, Artificial Sequence
  Synthetic oligonucleotide
cctcttgggttgttcttggtctagcctaaa

SEQ ID NO: 440189 - DNA, 30 bp, Artificial Sequence
  Synthetic oligonucleotide
ccgagctaccctgcctatcagaatcctaaa

SEQ ID NO: 440190 - DNA, 30 bp, Artificial Sequence
  Synthetic oligonucleotide
cgaacagtgtgaacgcctttgggtcctaaa

SEQ ID NO: 440191 - DNA, 30 bp, Artificial Sequence
  Synthetic oligonucleotide
tgaattaacttgaaacggcaatgtcctaaa

SEQ ID NO: 440192 - DNA, 30 bp, Artificial Sequence
  Synthetic oligonucleotide
ctttcctactgcaccaacccacaagctaaa

SEQ ID NO: 440193 - DNA, 30 bp, Artificial Sequence
  Synthetic oligonucleotide
gcgggtcgtgacagttttgtttgagctaaa

SEQ ID NO: 440194 - DNA, 30 bp, Artificial Sequence
  Synthetic oligonucleotide
aaagttcccggagcgacacacgacgctaaa

SEQ ID NO: 440195 - DNA, 30 bp, Artificial Sequence
  Synthetic oligonucleotide
tgcaacctcctgaataagcgtctcgctaaa

SEQ ID NO: 440196 - DNA, 30 bp, Artificial Sequence
  Synthetic oligonucleotide
agcgcagtatgctttctatgcacggctaaa

SEQ ID NO: 440197 - DNA, 30 bp, Artificial Sequence
  Synthetic oligonucleotide
tttaggaggggagacggggaagcggctaaa

SEQ ID NO: 440198 - DNA, 30 bp, Artificial Sequence
  Synthetic oligonucleotide
taactctagtgcatggactccttggctaaa

SEQ ID NO: 440199 - DNA, 30 bp, Artificial Sequence
  Synthetic oligonucleotide
aatagcgcggctaaaagtgaatatgctaaa

SEQ ID NO: 440200 - DNA, 30 bp, Artificial Sequence
  Synthetic oligonucleotide
cttctataaggctttgtgtccactgctaaa

SEQ ID NO: 440201 - DNA, 30 bp, Artificial Sequence
  Synthetic oligonucleotide
gaagaatatctaaagcctctcggtgctaaa

SEQ ID NO: 440202 - DNA, 30 bp, Artificial Sequence
  Synthetic oligonucleotide
ggccactaaatcatcagcttgggtgctaaa

SEQ ID NO: 440203 - DNA, 30 bp, Artificial Sequence
  Synthetic oligonucleotide
gtcaaaacatgggatctccttcttgctaaa

SEQ ID NO: 440204 - DNA, 30 bp, Artificial Sequence
  Synthetic oligonucleotide
cgtcgtatttaagacatgttcaaatctaaa

SEQ ID NO: 440205 - DNA, 30 bp, Artificial Sequence
  Synthetic oligonucleotide
agatattatacgcacattgcctcatctaaa

SEQ ID NO: 440206 - DNA, 30 bp, Artificial Sequence
  Synthetic oligonucleotide
gagggaccactgcatacatccagatctaaa

SEQ ID NO: 440207 - DNA, 30 bp, Artificial Sequence
  Synthetic oligonucleotide
ttgccgcgatttagggtggcgatatctaaa

SEQ ID NO: 440208 - DNA, 31 bp, Artificial Sequence
  Synthetic oligonucleotide
gcttagtgtagtacgtagacacttatctaaa

SEQ ID NO: 440209 - DNA, 30 bp, Artificial Sequence
  Synthetic oligonucleotide
atgtgtagttgaagatcccgcttatctaaa

SEQ ID NO: 440210 - DNA, 30 bp, Artificial Sequence
  Synthetic oligonucleotide
gatgtcatggttggtgcagaaacctctaaa

SEQ ID NO: 440211 - DNA, 30 bp, Artificial Sequence
  Synthetic oligonucleotide
gtttgggggtaatcgaaagctacctctaaa

SEQ ID NO: 440212 - DNA, 30 bp, Artificial Sequence
  Synthetic oligonucleotide
acccaatcatgggggaatgacccctctaaa

SEQ ID NO: 440213 - DNA, 30 bp, Artificial Sequence
  Synthetic oligonucleotide
ccgccatgctgaatgtcatttcagtctaaa

SEQ ID NO: 440214 - DNA, 30 bp, Artificial Sequence
  Synthetic oligonucleotide
attaggtgctatgtcgggtgtgtgtctaaa

SEQ ID NO: 440215 - DNA, 30 bp, Artificial Sequence
  Synthetic oligonucleotide
cattactttccttttgaatccatttctaaa

SEQ ID NO: 440216 - DNA, 30 bp, Artificial Sequence
  Synthetic oligonucleotide
tagctacggtagagaaccttcttaagtaaa

SEQ ID NO: 440217 - DNA, 30 bp, Artificial Sequence
  Synthetic oligonucleotide
aaatgaattattgaatgtcaatacagtaaa

SEQ ID NO: 440218 - DNA, 30 bp, Artificial Sequence
  Synthetic oligonucleotide
caaatccccttggggtcaaggtgcagtaaa

SEQ ID NO: 440219 - DNA, 30 bp, Artificial Sequence
  Synthetic oligonucleotide
gatgtagttaaaagtttgcacatcagtaaa

SEQ ID NO: 440220 - DNA, 30 bp, Artificial Sequence
  Synthetic oligonucleotide
ctctcgctcaagcagagaccagtgagtaaa

SEQ ID NO: 440221 - DNA, 30 bp, Artificial Sequence
  Synthetic oligonucleotide
attagacgtttctggtgctgccctagtaaa

SEQ ID NO: 440222 - DNA, 30 bp, Artificial Sequence
  Synthetic oligonucleotide
aatgactaagggcccgatcaatttagtaaa

SEQ ID NO: 440223 - DNA, 30 bp, Artificial Sequence
  Synthetic oligonucleotide
attcttatgcaccaggcatttaaacgtaaa

SEQ ID NO: 440224 - DNA, 30 bp, Artificial Sequence
  Synthetic oligonucleotide
gtgttttcagtggccatacctgaacgtaaa

SEQ ID NO: 440225 - DNA, 30 bp, Artificial Sequence
  Synthetic oligonucleotide
caggacgcgcccattcgtagctaacgtaaa

SEQ ID NO: 440226 - DNA, 30 bp, Artificial Sequence
  Synthetic oligonucleotide
gttttatctcgcggatcagctgtccgtaaa

SEQ ID NO: 440227 - DNA, 30 bp, Artificial Sequence
  Synthetic oligonucleotide
ctttagtgttctggacgcggagcgcgtaaa

SEQ ID NO: 440228 - DNA, 30 bp, Artificial Sequence
  Synthetic oligonucleotide
ggttttagaaaatcatataagagtcgtaaa

SEQ ID NO: 440229 - DNA, 30 bp, Artificial Sequence
  Synthetic oligonucleotide
tcttacctcgccggtcccgcatttcgtaaa

SEQ ID NO: 440230 - DNA, 29 bp, Artificial Sequence
  Synthetic oligonucleotide
gaatttggattaagttttcgtttcgtaaa

SEQ ID NO: 440231 - DNA, 30 bp, Artificial Sequence
  Synthetic oligonucleotide
aactacgctaattgatagtaggaaggtaaa

SEQ ID NO: 440232 - DNA, 30 bp, Artificial Sequence
  Synthetic oligonucleotide
aattcgaagcttgtgtctaattaaggtaaa

SEQ ID NO: 440233 - DNA, 30 bp, Artificial Sequence
  Synthetic oligonucleotide
ttttagcgatgcggccttcttccaggtaaa

SEQ ID NO: 440234 - DNA, 30 bp, Artificial Sequence
  Synthetic oligonucleotide
gcattactaaatgcatcgtatttaggtaaa

SEQ ID NO: 440235 - DNA, 30 bp, Artificial Sequence
  Synthetic oligonucleotide
gctattcgcgattgattacaaatcggtaaa

SEQ ID NO: 440236 - DNA, 30 bp, Artificial Sequence
  Synthetic oligonucleotide
aagcgcgcagtgaaaatatgttcgggtaaa

SEQ ID NO: 440237 - DNA, 30 bp, Artificial Sequence
  Synthetic oligonucleotide
tctagtatctcaatcgaacttgggggtaaa

SEQ ID NO: 440238 - DNA, 30 bp, Artificial Sequence
  Synthetic oligonucleotide
gcacataaatctgcctaacagcatggtaaa

SEQ ID NO: 440239 - DNA, 30 bp, Artificial Sequence
  Synthetic oligonucleotide
cccaccgctccgacaattgaggatggtaaa

SEQ ID NO: 440240 - DNA, 30 bp, Artificial Sequence
  Synthetic oligonucleotide
gccatcacagtgttgccggagcgtggtaaa

SEQ ID NO: 440241 - DNA, 30 bp, Artificial Sequence
  Synthetic oligonucleotide
gtaaactttggggatttgatacttggtaaa

SEQ ID NO: 440242 - DNA, 30 bp, Artificial Sequence
  Synthetic oligonucleotide
ctttgtcacgttcaatatgtagcatgtaaa

SEQ ID NO: 440243 - DNA, 30 bp, Artificial Sequence
  Synthetic oligonucleotide
atgatagtgtccttcctgacttgatgtaaa

SEQ ID NO: 440244 - DNA, 28 bp, Artificial Sequence
  Synthetic oligonucleotide
ttgttgtgtaggtttactcccgtgtaaa

SEQ ID NO: 440245 - DNA, 30 bp, Artificial Sequence
  Synthetic oligonucleotide
tagtcctttagcacgacgcgtcggtgtaaa

SEQ ID NO: 440246 - DNA, 30 bp, Artificial Sequence
  Synthetic oligonucleotide
aaggtctcatcctaatttcgcaattgtaaa

SEQ ID NO: 440247 - DNA, 30 bp, Artificial Sequence
  Synthetic oligonucleotide
atccgtgacagtgctggaggatcttgtaaa

SEQ ID NO: 440248 - DNA, 30 bp, Artificial Sequence
  Synthetic oligonucleotide
aaattcatgtcgaatgtcgatatttgtaaa

SEQ ID NO: 440249 - DNA, 30 bp, Artificial Sequence
  Synthetic oligonucleotide
ggaattcccaattggaatttacaaattaaa

SEQ ID NO: 440250 - DNA, 30 bp, Artificial Sequence
  Synthetic oligonucleotide
tccgatttcagacatatgaggccaattaaa

SEQ ID NO: 440251 - DNA, 30 bp, Artificial Sequence
  Synthetic oligonucleotide
gcgtcatttttaatgcataggagcattaaa

SEQ ID NO: 440252 - DNA, 30 bp, Artificial Sequence
  Synthetic oligonucleotide
atccacgctttttccatttgcgtgattaaa

SEQ ID NO: 440253 - DNA, 30 bp, Artificial Sequence
  Synthetic oligonucleotide
aagattcattagtatggatagttgattaaa

SEQ ID NO: 440254 - DNA, 30 bp, Artificial Sequence
  Synthetic oligonucleotide
cttaggatgttcagtgcttttgatattaaa

SEQ ID NO: 440255 - DNA, 30 bp, Artificial Sequence
  Synthetic oligonucleotide
ttagtattcctgacctacaagtatattaaa

SEQ ID NO: 440256 - DNA, 30 bp, Artificial Sequence
  Synthetic oligonucleotide
caccagcaaatagaatggatccctattaaa

SEQ ID NO: 440257 - DNA, 30 bp, Artificial Sequence
  Synthetic oligonucleotide
ccgttaccacctttagaaatcattattaaa

SEQ ID NO: 440258 - DNA, 30 bp, Artificial Sequence
  Synthetic oligonucleotide
atttggtgtgttgtttgctcctcacttaaa

SEQ ID NO: 440259 - DNA, 30 bp, Artificial Sequence
  Synthetic oligonucleotide
aaaattaatctctatggtccagtacttaaa

SEQ ID NO: 440260 - DNA, 30 bp, Artificial Sequence
  Synthetic oligonucleotide
aaacagaaattgctattggtagaccttaaa

SEQ ID NO: 440261 - DNA, 30 bp, Artificial Sequence
  Synthetic oligonucleotide
ctggattttctcaagcctggggagcttaaa

SEQ ID NO: 440262 - DNA, 30 bp, Artificial Sequence
  Synthetic oligonucleotide
gaccatcgactgatcgtgttctagcttaaa

SEQ ID NO: 440263 - DNA, 30 bp, Artificial Sequence
  Synthetic oligonucleotide
cccatggtattgccggcgcaagcgcttaaa

SEQ ID NO: 440264 - DNA, 30 bp, Artificial Sequence
  Synthetic oligonucleotide
cgctcattttaccagtttccatcgcttaaa

SEQ ID NO: 440265 - DNA, 30 bp, Artificial Sequence
  Synthetic oligonucleotide
cacagatcacttgagggggcgctgcttaaa

SEQ ID NO: 440266 - DNA, 30 bp, Artificial Sequence
  Synthetic oligonucleotide
tctcggtgccccaatccgtctgtgcttaaa

SEQ ID NO: 440267 - DNA, 30 bp, Artificial Sequence
  Synthetic oligonucleotide
aaagtgaacactgttatcgctaaagttaaa

SEQ ID NO: 440268 - DNA, 30 bp, Artificial Sequence
  Synthetic oligonucleotide
gatcagacttcttttaaattgccagttaaa

SEQ ID NO: 440269 - DNA, 30 bp, Artificial Sequence
  Synthetic oligonucleotide
tcaagagatggacggtgtggaaaggttaaa

SEQ ID NO: 440270 - DNA, 30 bp, Artificial Sequence
  Synthetic oligonucleotide
tattgtttcttggtacatggtaaggttaaa

SEQ ID NO: 440271 - DNA, 30 bp, Artificial Sequence
  Synthetic oligonucleotide
gtctagcgagcttctatctagctggttaaa

SEQ ID NO: 440272 - DNA, 30 bp, Artificial Sequence
  Synthetic oligonucleotide
taaccttgtcccaacgtgacgcatgttaaa

SEQ ID NO: 440273 - DNA, 30 bp, Artificial Sequence
  Synthetic oligonucleotide
tttaactaagtcaaggattaatctgttaaa

SEQ ID NO: 440274 - DNA, 30 bp, Artificial Sequence
  Synthetic oligonucleotide
ctctaagtattaatacgatgctctgttaaa

SEQ ID NO: 440275 - DNA, 30 bp, Artificial Sequence
  Synthetic oligonucleotide
ggatctcactgcgtacgtcatcaatttaaa

SEQ ID NO: 440276 - DNA, 30 bp, Artificial Sequence
  Synthetic oligonucleotide
ggttttttagcttgcacggatcaatttaaa

SEQ ID NO: 440277 - DNA, 30 bp, Artificial Sequence
  Synthetic oligonucleotide
tttagaatggaccaagtagggacatttaaa

SEQ ID NO: 440278 - DNA, 30 bp, Artificial Sequence
  Synthetic oligonucleotide
tgaacctgggcgctagtgtcggtatttaaa

SEQ ID NO: 440279 - DNA, 30 bp, Artificial Sequence
  Synthetic oligonucleotide
attggtgacgatacgacatccacctttaaa

SEQ ID NO: 440280 - DNA, 30 bp, Artificial Sequence
  Synthetic oligonucleotide
ggtcaggtattggttcgagtagtctttaaa

SEQ ID NO: 440281 - DNA, 30 bp, Artificial Sequence
  Synthetic oligonucleotide
gatcacttaatttaagatcacgtctttaaa

SEQ ID NO: 440282 - DNA, 30 bp, Artificial Sequence
  Synthetic oligonucleotide
tcgctcatctagatggatctcgtctttaaa

SEQ ID NO: 440283 - DNA, 30 bp, Artificial Sequence
  Synthetic oligonucleotide
ctgtcccccgcccaggggtataggtttaaa

SEQ ID NO: 440284 - DNA, 30 bp, Artificial Sequence
  Synthetic oligonucleotide
gtatgagatacctctgagtaagggtttaaa

SEQ ID NO: 440285 - DNA, 30 bp, Artificial Sequence
  Synthetic oligonucleotide
ggtatgtaggaagtgcctaccaattttaaa

SEQ ID NO: 440286 - DNA, 30 bp, Artificial Sequence
  Synthetic oligonucleotide
atctgggtgtgggtaatgtgatgttttaaa

SEQ ID NO: 440287 - DNA, 30 bp, Artificial Sequence
  Synthetic oligonucleotide
gtgtgtgtcttccaatgatgtgtttttaaa

SEQ ID NO: 440288 - DNA, 30 bp, Artificial Sequence
  Synthetic oligonucleotide
tttgaattgtcaggtggcaacaaaaaacaa

SEQ ID NO: 440289 - DNA, 30 bp, Artificial Sequence
  Synthetic oligonucleotide
cccggtgaattcactatcctataaaaacaa

SEQ ID NO: 440290 - DNA, 30 bp, Artificial Sequence
  Synthetic oligonucleotide
ataattcggcggcttgaggagtaaaaacaa

SEQ ID NO: 440291 - DNA, 30 bp, Artificial Sequence
  Synthetic oligonucleotide
gcatggtgacctttgccgaaaccaaaacaa

SEQ ID NO: 440292 - DNA, 30 bp, Artificial Sequence
  Synthetic oligonucleotide
ggctctatgttgcacgcagcgccgaaacaa

SEQ ID NO: 440293 - DNA, 30 bp, Artificial Sequence
  Synthetic oligonucleotide
gaagacattacgtctgatgaattgaaacaa

SEQ ID NO: 440294 - DNA, 30 bp, Artificial Sequence
  Synthetic oligonucleotide
cccgcgcttccaaactctcttttgaaacaa

SEQ ID NO: 440295 - DNA, 30 bp, Artificial Sequence
  Synthetic oligonucleotide
actaatcccgacgtgcgttatgaacaacaa

SEQ ID NO: 440296 - DNA, 30 bp, Artificial Sequence
  Synthetic oligonucleotide
cgagcgacctctagggtagtgaaccaacaa

SEQ ID NO: 440297 - DNA, 30 bp, Artificial Sequence
  Synthetic oligonucleotide
agtatcatggcctgttatggctgccaacaa

SEQ ID NO: 440298 - DNA, 30 bp, Artificial Sequence
  Synthetic oligonucleotide
ggactactgggttaccgctatcagcaacaa

SEQ ID NO: 440299 - DNA, 30 bp, Artificial Sequence
  Synthetic oligonucleotide
tagcctcggaacttgcgacctctgcaacaa

SEQ ID NO: 440300 - DNA, 30 bp, Artificial Sequence
  Synthetic oligonucleotide
cgcggccaatcgacaaactttgtgcaacaa

SEQ ID NO: 440301 - DNA, 31 bp, Artificial Sequence
  Synthetic oligonucleotide
gccttccctatatgaacttgtggaagaacaa

SEQ ID NO: 440302 - DNA, 30 bp, Artificial Sequence
  Synthetic oligonucleotide
aagtgattcacatcgggctagacagaacaa

SEQ ID NO: 440303 - DNA, 30 bp, Artificial Sequence
  Synthetic oligonucleotide
tactttaactcttcgatttaaagagaacaa

SEQ ID NO: 440304 - DNA, 30 bp, Artificial Sequence
  Synthetic oligonucleotide
aagagctgtacggcttacatgaccgaacaa

SEQ ID NO: 440305 - DNA, 30 bp, Artificial Sequence
  Synthetic oligonucleotide
gaagttggggtctcgcggttctccgaacaa

SEQ ID NO: 440306 - DNA, 30 bp, Artificial Sequence
  Synthetic oligonucleotide
ccagcggcgctgtaagcaccgcgggaacaa

SEQ ID NO: 440307 - DNA, 30 bp, Artificial Sequence
  Synthetic oligonucleotide
cgtccctcgctcagacggagctttgaacaa

SEQ ID NO: 440308 - DNA, 30 bp, Artificial Sequence
  Synthetic oligonucleotide
aatccgctttgtatgtggagcacataacaa

SEQ ID NO: 440309 - DNA, 30 bp, Artificial Sequence
  Synthetic oligonucleotide
agcgtttagagagaatactcatgataacaa

SEQ ID NO: 440310 - DNA, 30 bp, Artificial Sequence
  Synthetic oligonucleotide
caagaggatccagccccgctggtataacaa

SEQ ID NO: 440311 - DNA, 30 bp, Artificial Sequence
  Synthetic oligonucleotide
tatagtgttgattggccgttcgactaacaa

SEQ ID NO: 440312 - DNA, 30 bp, Artificial Sequence
  Synthetic oligonucleotide
gggggagtatgggtgaggcgctgctaacaa

SEQ ID NO: 440313 - DNA, 30 bp, Artificial Sequence
  Synthetic oligonucleotide
tcgcttacagaatgataaggtttctaacaa

SEQ ID NO: 440314 - DNA, 30 bp, Artificial Sequence
  Synthetic oligonucleotide
gcgccagtcgtcgtcaatcgacggtaacaa

SEQ ID NO: 440315 - DNA, 30 bp, Artificial Sequence
  Synthetic oligonucleotide
tgctagagcggtgttgacgtgtgttaacaa

SEQ ID NO: 440316 - DNA, 30 bp, Artificial Sequence
  Synthetic oligonucleotide
ccccataacggcttacgcggtatttaacaa

SEQ ID NO: 440317 - DNA, 30 bp, Artificial Sequence
  Synthetic oligonucleotide
atatagtcataggtcggatcccgcacacaa

SEQ ID NO: 440318 - DNA, 30 bp, Artificial Sequence
  Synthetic oligonucleotide
ataaacatccgattgactcaggagacacaa

SEQ ID NO: 440319 - DNA, 30 bp, Artificial Sequence
  Synthetic oligonucleotide
aagctatccagtagctcttgccggacacaa

SEQ ID NO: 440320 - DNA, 30 bp, Artificial Sequence
  Synthetic oligonucleotide
gagggcccggctgaagcaactgggacacaa

SEQ ID NO: 440321 - DNA, 30 bp, Artificial Sequence
  Synthetic oligonucleotide
tgcattgtgaactcactttcatggacacaa

SEQ ID NO: 440322 - DNA, 30 bp, Artificial Sequence
  Synthetic oligonucleotide
gataaaaagcaccacccctgcactacacaa

SEQ ID NO: 440323 - DNA, 30 bp, Artificial Sequence
  Synthetic oligonucleotide
agaatgtctgttcttctacgtgctacacaa

SEQ ID NO: 440324 - DNA, 30 bp, Artificial Sequence
  Synthetic oligonucleotide
gaacaacatatagcggatgcagccccacaa

SEQ ID NO: 440325 - DNA, 30 bp, Artificial Sequence
  Synthetic oligonucleotide
acattgtcttgtccagggcggcgcccacaa

SEQ ID NO: 440326 - DNA, 30 bp, Artificial Sequence
  Synthetic oligonucleotide
tattcaagtcgttgtagccgaaagccacaa

SEQ ID NO: 440327 - DNA, 30 bp, Artificial Sequence
  Synthetic oligonucleotide
aagggtttcgcatcacggccccgtccacaa

SEQ ID NO: 440328 - DNA, 30 bp, Artificial Sequence
  Synthetic oligonucleotide
cgattgcctcctggctggtgaccagcacaa

SEQ ID NO: 440329 - DNA, 30 bp, Artificial Sequence
  Synthetic oligonucleotide
cgtgaatctgtttaggatggcccagcacaa

SEQ ID NO: 440330 - DNA, 30 bp, Artificial Sequence
  Synthetic oligonucleotide
gcctgagttcttgtctcgcccaaggcacaa

SEQ ID NO: 440331 - DNA, 30 bp, Artificial Sequence
  Synthetic oligonucleotide
ggaatgaggcaagggttttaggatgcacaa

SEQ ID NO: 440332 - DNA, 30 bp, Artificial Sequence
  Synthetic oligonucleotide
gtcttgaccacatcatgtcccgctgcacaa

SEQ ID NO: 440333 - DNA, 30 bp, Artificial Sequence
  Synthetic oligonucleotide
ttgcccgtcctttgcaattgtggtgcacaa

SEQ ID NO: 440334 - DNA, 30 bp, Artificial Sequence
  Synthetic oligonucleotide
tgatatatttgtatgtcgctctttgcacaa

SEQ ID NO: 440335 - DNA, 30 bp, Artificial Sequence
  Synthetic oligonucleotide
tgcccgttctcttcacgcatcagatcacaa

SEQ ID NO: 440336 - DNA, 30 bp, Artificial Sequence
  Synthetic oligonucleotide
aatctctatgtgctcagagtctgatcacaa

SEQ ID NO: 440337 - DNA, 30 bp, Artificial Sequence
  Synthetic oligonucleotide
gggccagtacatgtggtgggtgtatcacaa

SEQ ID NO: 440338 - DNA, 30 bp, Artificial Sequence
  Synthetic oligonucleotide
tttcaatctggtcatcggtctgactcacaa

SEQ ID NO: 440339 - DNA, 30 bp, Artificial Sequence
  Synthetic oligonucleotide
aaggtttaactcggcgctcttttctcacaa

SEQ ID NO: 440340 - DNA, 30 bp, Artificial Sequence
  Synthetic oligonucleotide
atatgcaattctttgcgattacagtcacaa

SEQ ID NO: 440341 - DNA, 30 bp, Artificial Sequence
  Synthetic oligonucleotide
cgcgttagcgtaatgaccgttcagtcacaa

SEQ ID NO: 440342 - DNA, 30 bp, Artificial Sequence
  Synthetic oligonucleotide
tggtgtcgctgttggcggcggatgtcacaa

SEQ ID NO: 440343 - DNA, 30 bp, Artificial Sequence
  Synthetic oligonucleotide
gttacgatccttttatcgtatcgaagacaa

SEQ ID NO: 440344 - DNA, 30 bp, Artificial Sequence
  Synthetic oligonucleotide
cctcgttcagccccgtggcttatcagacaa

SEQ ID NO: 440345 - DNA, 30 bp, Artificial Sequence
  Synthetic oligonucleotide
atagtcgagactacgtccttaacgagacaa

SEQ ID NO: 440346 - DNA, 30 bp, Artificial Sequence
  Synthetic oligonucleotide
cttagaagattctttaatggtactagacaa

SEQ ID NO: 440347 - DNA, 30 bp, Artificial Sequence
  Synthetic oligonucleotide
ctaggtattgcgcacactggtaaacgacaa

SEQ ID NO: 440348 - DNA, 30 bp, Artificial Sequence
  Synthetic oligonucleotide
gaactgagcttgtatgtacatttgcgacaa

SEQ ID NO: 440349 - DNA, 30 bp, Artificial Sequence
  Synthetic oligonucleotide
ccctggacatgattgatgtgaaatcgacaa

SEQ ID NO: 440350 - DNA, 30 bp, Artificial Sequence
  Synthetic oligonucleotide
atcttgccgttgttaaattcagctcgacaa

SEQ ID NO: 440351 - DNA, 30 bp, Artificial Sequence
  Synthetic oligonucleotide
cgcgtgtgtcgagtccgagtcgctcgacaa

SEQ ID NO: 440352 - DNA, 30 bp, Artificial Sequence
  Synthetic oligonucleotide
gttgtttaacgaacggtctcatctcgacaa

SEQ ID NO: 440353 - DNA, 30 bp, Artificial Sequence
  Synthetic oligonucleotide
gtggtgccaactctaaattatcaaggacaa

SEQ ID NO: 440354 - DNA, 30 bp, Artificial Sequence
  Synthetic oligonucleotide
tttatctggctagctaattcagaaggacaa

SEQ ID NO: 440355 - DNA, 30 bp, Artificial Sequence
  Synthetic oligonucleotide
accatgatttggcgtcctttagccggacaa

SEQ ID NO: 440356 - DNA, 30 bp, Artificial Sequence
  Synthetic oligonucleotide
cagcgtcgctcctacattcccggcggacaa

SEQ ID NO: 440357 - DNA, 30 bp, Artificial Sequence
  Synthetic oligonucleotide
tattttacgtgcctcctgaggatcggacaa

SEQ ID NO: 440358 - DNA, 30 bp, Artificial Sequence
  Synthetic oligonucleotide
ccattgcacagaaggtgacatcatggacaa

SEQ ID NO: 440359 - DNA, 30 bp, Artificial Sequence
  Synthetic oligonucleotide
gtcgttcgcatccatacgttatatggacaa

SEQ ID NO: 440360 - DNA, 30 bp, Artificial Sequence
  Synthetic oligonucleotide
gtacaaagttttcgggacggaagtggacaa

SEQ ID NO: 440361 - DNA, 30 bp, Artificial Sequence
  Synthetic oligonucleotide
cgtctcgtgttgtgccctatgtaatgacaa

SEQ ID NO: 440362 - DNA, 30 bp, Artificial Sequence
  Synthetic oligonucleotide
ttcacgcccgttatgatggtcgcatgacaa

SEQ ID NO: 440363 - DNA, 30 bp, Artificial Sequence
  Synthetic oligonucleotide
aatataatcgaagcacaatatgtatgacaa

SEQ ID NO: 440364 - DNA, 30 bp, Artificial Sequence
  Synthetic oligonucleotide
ttgcagaagaattgtggtcatccctgacaa

SEQ ID NO: 440365 - DNA, 30 bp, Artificial Sequence
  Synthetic oligonucleotide
tctttgtgctttcatctcatgtcctgacaa

SEQ ID NO: 440366 - DNA, 30 bp, Artificial Sequence
  Synthetic oligonucleotide
agggatttagtctgcaacaattgctgacaa

SEQ ID NO: 440367 - DNA, 30 bp, Artificial Sequence
  Synthetic oligonucleotide
acgcacgattcagacttagaaatctgacaa

SEQ ID NO: 440368 - DNA, 30 bp, Artificial Sequence
  Synthetic oligonucleotide
agctcacgcaccgtaggctggctctgacaa

SEQ ID NO: 440369 - DNA, 30 bp, Artificial Sequence
  Synthetic oligonucleotide
atctgcaagagcccttggttattctgacaa

SEQ ID NO: 440370 - DNA, 30 bp, Artificial Sequence
  Synthetic oligonucleotide
gatctgagatgcgagagccggtcgtgacaa

SEQ ID NO: 440371 - DNA, 30 bp, Artificial Sequence
  Synthetic oligonucleotide
cctctagttaagaaagctggtcattgacaa

SEQ ID NO: 440372 - DNA, 30 bp, Artificial Sequence
  Synthetic oligonucleotide
aatcttatagattggggtggtaaaatacaa

SEQ ID NO: 440373 - DNA, 30 bp, Artificial Sequence
  Synthetic oligonucleotide
tgattatgtgggaggtagttatcaatacaa

SEQ ID NO: 440374 - DNA, 30 bp, Artificial Sequence
  Synthetic oligonucleotide
tcgggatgagatggggcagtttcaatacaa

SEQ ID NO: 440375 - DNA, 30 bp, Artificial Sequence
  Synthetic oligonucleotide
gctgcctacccatgttctgacgtaatacaa

SEQ ID NO: 440376 - DNA, 30 bp, Artificial Sequence
  Synthetic oligonucleotide
gcggttgtaagagcggactcgcccatacaa

SEQ ID NO: 440377 - DNA, 30 bp, Artificial Sequence
  Synthetic oligonucleotide
ccggtagtggaccggccggtacagatacaa

SEQ ID NO: 440378 - DNA, 30 bp, Artificial Sequence
  Synthetic oligonucleotide
aagcggttcatgctgggggtatctatacaa

SEQ ID NO: 440379 - DNA, 30 bp, Artificial Sequence
  Synthetic oligonucleotide
agctcggcggtctttctggaacgtatacaa

SEQ ID NO: 440380 - DNA, 30 bp, Artificial Sequence
  Synthetic oligonucleotide
tctgatcgcagtttggttatggttatacaa

SEQ ID NO: 440381 - DNA, 30 bp, Artificial Sequence
  Synthetic oligonucleotide
ccccttaagtcctgatatctacgactacaa

SEQ ID NO: 440382 - DNA, 30 bp, Artificial Sequence
  Synthetic oligonucleotide
atgccttcgccctgaatatccgtactacaa

SEQ ID NO: 440383 - DNA, 30 bp, Artificial Sequence
  Synthetic oligonucleotide
gttttcaagtttcgggtgcaaatcctacaa

SEQ ID NO: 440384 - DNA, 30 bp, Artificial Sequence
  Synthetic oligonucleotide
ggccttcatagtctaaaagtttatctacaa

SEQ ID NO: 440385 - DNA, 30 bp, Artificial Sequence
  Synthetic oligonucleotide
aatgaattcacaagaagctcgggtctacaa

SEQ ID NO: 440386 - DNA, 30 bp, Artificial Sequence
  Synthetic oligonucleotide
cagtgtacttgtagaaacgcagaagtacaa

SEQ ID NO: 440387 - DNA, 30 bp, Artificial Sequence
  Synthetic oligonucleotide
ccatctaccatgacccgactgtacgtacaa

SEQ ID NO: 440388 - DNA, 30 bp, Artificial Sequence
  Synthetic oligonucleotide
agcgattccttctccccagaatgggtacaa

SEQ ID NO: 440389 - DNA, 30 bp, Artificial Sequence
  Synthetic oligonucleotide
gattattaactcctcacctcgcgtgtacaa

SEQ ID NO: 440390 - DNA, 30 bp, Artificial Sequence
  Synthetic oligonucleotide
ctcattcacgcttgacaggaaccattacaa

SEQ ID NO: 440391 - DNA, 30 bp, Artificial Sequence
  Synthetic oligonucleotide
gtcaacaatgcttccgcgtagagattacaa

SEQ ID NO: 440392 - DNA, 30 bp, Artificial Sequence
  Synthetic oligonucleotide
aacgaaagctttcttagaaaggtattacaa

SEQ ID NO: 440393 - DNA, 30 bp, Artificial Sequence
  Synthetic oligonucleotide
ttagtgcaagatcgcgcaaagcccttacaa

SEQ ID NO: 440394 - DNA, 29 bp, Artificial Sequence
  Synthetic oligonucleotide
gatcaggcgggccgttacacagcttacaa

SEQ ID NO: 440395 - DNA, 30 bp, Artificial Sequence
  Synthetic oligonucleotide
gactttatgtaaatcaatgaaggcttacaa

SEQ ID NO: 440396 - DNA, 30 bp, Artificial Sequence
  Synthetic oligonucleotide
ctgacccttatctccttccggttcttacaa

SEQ ID NO: 440397 - DNA, 30 bp, Artificial Sequence
  Synthetic oligonucleotide
ttcatgcgcgtagctacttgtttgttacaa

SEQ ID NO: 440398 - DNA, 30 bp, Artificial Sequence
  Synthetic oligonucleotide
ttcaggttaagacggagctctattttacaa

SEQ ID NO: 440399 - DNA, 30 bp, Artificial Sequence
  Synthetic oligonucleotide
cctgacctgtcagtaaatatatttttacaa

SEQ ID NO: 440400 - DNA, 30 bp, Artificial Sequence
  Synthetic oligonucleotide
aggctcaatttgctacggtgtcgaaaccaa

SEQ ID NO: 440401 - DNA, 30 bp, Artificial Sequence
  Synthetic oligonucleotide
aaggatgcagcccattgtacccataaccaa

SEQ ID NO: 440402 - DNA, 30 bp, Artificial Sequence
  Synthetic oligonucleotide
ggttttaggcagctcagtcttcaacaccaa

SEQ ID NO: 440403 - DNA, 30 bp, Artificial Sequence
  Synthetic oligonucleotide
ctggtgacgtgacgagacgtcacacaccaa

SEQ ID NO: 440404 - DNA, 28 bp, Artificial Sequence
  Synthetic oligonucleotide
gcgaaatgatagttcagcatgacaccaa

SEQ ID NO: 440405 - DNA, 30 bp, Artificial Sequence
  Synthetic oligonucleotide
caaccattcctgttcagtgcggcgcaccaa

SEQ ID NO: 440406 - DNA, 30 bp, Artificial Sequence
  Synthetic oligonucleotide
gtattagaagtggaatttttatcgcaccaa

SEQ ID NO: 440407 - DNA, 30 bp, Artificial Sequence
  Synthetic oligonucleotide
gtgtagtaccacggggtgatcatgcaccaa

SEQ ID NO: 440408 - DNA, 30 bp, Artificial Sequence
  Synthetic oligonucleotide
gggaccggtatggtatggcggtctcaccaa

SEQ ID NO: 440409 - DNA, 30 bp, Artificial Sequence
  Synthetic oligonucleotide
gccatgtactatacactgggcggtcaccaa

SEQ ID NO: 440410 - DNA, 30 bp, Artificial Sequence
  Synthetic oligonucleotide
ggacgagtatttggcgggcttcacgaccaa

SEQ ID NO: 440411 - DNA, 30 bp, Artificial Sequence
  Synthetic oligonucleotide
aagcccttaacaggcttgttaagcgaccaa

SEQ ID NO: 440412 - DNA, 30 bp, Artificial Sequence
  Synthetic oligonucleotide
agaagctcactgaggagccgcctcgaccaa

SEQ ID NO: 440413 - DNA, 30 bp, Artificial Sequence
  Synthetic oligonucleotide
cagcgaggttggtccagcgtgctcgaccaa

SEQ ID NO: 440414 - DNA, 30 bp, Artificial Sequence
  Synthetic oligonucleotide
actgaaggaatattttgatttcgggaccaa

SEQ ID NO: 440415 - DNA, 30 bp, Artificial Sequence
  Synthetic oligonucleotide
gttgcttatttggattgtcttaatgaccaa

SEQ ID NO: 440416 - DNA, 30 bp, Artificial Sequence
  Synthetic oligonucleotide
gtcattggaatatttatcatctaataccaa

SEQ ID NO: 440417 - DNA, 30 bp, Artificial Sequence
  Synthetic oligonucleotide
cagtgcatatgtacaagtagcctataccaa

SEQ ID NO: 440418 - DNA, 30 bp, Artificial Sequence
  Synthetic oligonucleotide
atctctggtccagaggtcatgagctaccaa

SEQ ID NO: 440419 - DNA, 30 bp, Artificial Sequence
  Synthetic oligonucleotide
cctatttctaagttcgtcaacctttaccaa

SEQ ID NO: 440420 - DNA, 30 bp, Artificial Sequence
  Synthetic oligonucleotide
gtgccgcaatgtcttctatcgaaaacccaa

SEQ ID NO: 440421 - DNA, 30 bp, Artificial Sequence
  Synthetic oligonucleotide
atgcatactttcggagaaatggtaacccaa

SEQ ID NO: 440422 - DNA, 30 bp, Artificial Sequence
  Synthetic oligonucleotide
cagctctattcgaggtttatggtaacccaa

SEQ ID NO: 440423 - DNA, 30 bp, Artificial Sequence
  Synthetic oligonucleotide
acattcagtgatcgacgcccgtacacccaa

SEQ ID NO: 440424 - DNA, 30 bp, Artificial Sequence
  Synthetic oligonucleotide
ttcataatttccggagcatgaagtacccaa

SEQ ID NO: 440425 - DNA, 30 bp, Artificial Sequence
  Synthetic oligonucleotide
aaccctttatgtcggaaagatccaccccaa

SEQ ID NO: 440426 - DNA, 30 bp, Artificial Sequence
  Synthetic oligonucleotide
tgtccggccaggagcatcagggagccccaa

SEQ ID NO: 440427 - DNA, 30 bp, Artificial Sequence
  Synthetic oligonucleotide
ctccccgccgtttggtgatcggggccccaa

SEQ ID NO: 440428 - DNA, 30 bp, Artificial Sequence
  Synthetic oligonucleotide
gaccgagggagtcattatccactgccccaa

SEQ ID NO: 440429 - DNA, 30 bp, Artificial Sequence
  Synthetic oligonucleotide
ctcccacttattgtgacaaatactccccaa

SEQ ID NO: 440430 - DNA, 30 bp, Artificial Sequence
  Synthetic oligonucleotide
gccctgtttccgcattcggcagctccccaa

SEQ ID NO: 440431 - DNA, 30 bp, Artificial Sequence
  Synthetic oligonucleotide
cgccgtgccttggccgattgttgtccccaa

SEQ ID NO: 440432 - DNA, 30 bp, Artificial Sequence
  Synthetic oligonucleotide
gacgctcgtaaatccataggctttccccaa

SEQ ID NO: 440433 - DNA, 30 bp, Artificial Sequence
  Synthetic oligonucleotide
ataggcagttcggaccaggcaacagcccaa

SEQ ID NO: 440434 - DNA, 30 bp, Artificial Sequence
  Synthetic oligonucleotide
aaacttcttgtggattagatggtagcccaa

SEQ ID NO: 440435 - DNA, 30 bp, Artificial Sequence
  Synthetic oligonucleotide
gctagcttttagaccaagaatgacgcccaa

SEQ ID NO: 440436 - DNA, 30 bp, Artificial Sequence
  Synthetic oligonucleotide
ctacagacccgttccacaacgcatgcccaa

SEQ ID NO: 440437 - DNA, 30 bp, Artificial Sequence
  Synthetic oligonucleotide
ggccatagtataaatcattgccgtgcccaa

SEQ ID NO: 440438 - DNA, 30 bp, Artificial Sequence
  Synthetic oligonucleotide
gacgggccgggccaaaatctttttgcccaa

SEQ ID NO: 440439 - DNA, 30 bp, Artificial Sequence
  Synthetic oligonucleotide
agattttggtttcacgtagtacaatcccaa

SEQ ID NO: 440440 - DNA, 30 bp, Artificial Sequence
  Synthetic oligonucleotide
ctccggtgtaaagacttttaggaatcccaa

SEQ ID NO: 440441 - DNA, 30 bp, Artificial Sequence
  Synthetic oligonucleotide
ctgaggggaatcttgcagtactagtcccaa

SEQ ID NO: 440442 - DNA, 30 bp, Artificial Sequence
  Synthetic oligonucleotide
ctaggatcataatcgcggttggcgtcccaa

SEQ ID NO: 440443 - DNA, 30 bp, Artificial Sequence
  Synthetic oligonucleotide
gctgttgaggtccgtgtcctgacttcccaa

SEQ ID NO: 440444 - DNA, 30 bp, Artificial Sequence
  Synthetic oligonucleotide
gtttctgttcggaaattcgggaaaagccaa

SEQ ID NO: 440445 - DNA, 30 bp, Artificial Sequence
  Synthetic oligonucleotide
cttataatcgacattgtgttacaaagccaa

SEQ ID NO: 440446 - DNA, 30 bp, Artificial Sequence
  Synthetic oligonucleotide
tacggttcttgaaggttatgggtaagccaa

SEQ ID NO: 440447 - DNA, 30 bp, Artificial Sequence
  Synthetic oligonucleotide
taatggatcagactacgcagccacagccaa

SEQ ID NO: 440448 - DNA, 30 bp, Artificial Sequence
  Synthetic oligonucleotide
tcagaagccgtgtcgagttgcaccagccaa

SEQ ID NO: 440449 - DNA, 30 bp, Artificial Sequence
  Synthetic oligonucleotide
tgcccgatttgttcaagtccggccagccaa

SEQ ID NO: 440450 - DNA, 30 bp, Artificial Sequence
  Synthetic oligonucleotide
gccgggcatgcatgcgatgtcatcagccaa

SEQ ID NO: 440451 - DNA, 30 bp, Artificial Sequence
  Synthetic oligonucleotide
cgtggtggggacggagataggggtagccaa

SEQ ID NO: 440452 - DNA, 30 bp, Artificial Sequence
  Synthetic oligonucleotide
cgaatgacatggacgaccacacgacgccaa

SEQ ID NO: 440453 - DNA, 30 bp, Artificial Sequence
  Synthetic oligonucleotide
aacattgtcatatagttgctacgacgccaa

SEQ ID NO: 440454 - DNA, 30 bp, Artificial Sequence
  Synthetic oligonucleotide
ttcttgtttgatatgttgaaacgccgccaa

SEQ ID NO: 440455 - DNA, 30 bp, Artificial Sequence
  Synthetic oligonucleotide
accaatcggagcgttggagtttcgcgccaa

SEQ ID NO: 440456 - DNA, 30 bp, Artificial Sequence
  Synthetic oligonucleotide
ctgtcggcttagtagcacctagggcgccaa

SEQ ID NO: 440457 - DNA, 30 bp, Artificial Sequence
  Synthetic oligonucleotide
gtttaatgaggtgtccctcctcatcgccaa

SEQ ID NO: 440458 - DNA, 30 bp, Artificial Sequence
  Synthetic oligonucleotide
ggaacgaccattattaatgcaagtcgccaa

SEQ ID NO: 440459 - DNA, 30 bp, Artificial Sequence
  Synthetic oligonucleotide
acccatgaatatttaacgccacgtcgccaa

SEQ ID NO: 440460 - DNA, 30 bp, Artificial Sequence
  Synthetic oligonucleotide
gggaaactaggcccgtatagggcaggccaa

SEQ ID NO: 440461 - DNA, 30 bp, Artificial Sequence
  Synthetic oligonucleotide
gaaagcctgttgctacgtccctagggccaa

SEQ ID NO: 440462 - DNA, 30 bp, Artificial Sequence
  Synthetic oligonucleotide
ttggcacctaccgtggacaggatatgccaa

SEQ ID NO: 440463 - DNA, 30 bp, Artificial Sequence
  Synthetic oligonucleotide
ggtaagtttagttcaagacgagcctgccaa

SEQ ID NO: 440464 - DNA, 30 bp, Artificial Sequence
  Synthetic oligonucleotide
tacgagcggtcgcttaaggcttcctgccaa

SEQ ID NO: 440465 - DNA, 30 bp, Artificial Sequence
  Synthetic oligonucleotide
tgcgtaagacccacgcctcctcattgccaa

SEQ ID NO: 440466 - DNA, 30 bp, Artificial Sequence
  Synthetic oligonucleotide
tactaacgacgggagtcttgcacttgccaa

SEQ ID NO: 440467 - DNA, 30 bp, Artificial Sequence
  Synthetic oligonucleotide
ataaacattacacatttctgacaaatccaa

SEQ ID NO: 440468 - DNA, 30 bp, Artificial Sequence
  Synthetic oligonucleotide
atcagtgacgctgatgctgcggtcatccaa

SEQ ID NO: 440469 - DNA, 30 bp, Artificial Sequence
  Synthetic oligonucleotide
ccgcttttgattacgatttaatatatccaa

SEQ ID NO: 440470 - DNA, 30 bp, Artificial Sequence
  Synthetic oligonucleotide
tattgccaaagcggacattgaggtatccaa

SEQ ID NO: 440471 - DNA, 30 bp, Artificial Sequence
  Synthetic oligonucleotide
gaataaatgtacctaacaattagactccaa

SEQ ID NO: 440472 - DNA, 30 bp, Artificial Sequence
  Synthetic oligonucleotide
ggattatggcgaacgcccaccggactccaa

SEQ ID NO: 440473 - DNA, 29 bp, Artificial Sequence
  Synthetic oligonucleotide
aacaaaatttctgaacgaaatgactccaa

SEQ ID NO: 440474 - DNA, 30 bp, Artificial Sequence
  Synthetic oligonucleotide
gaggcgaatgacaatgtatcttgtctccaa

SEQ ID NO: 440475 - DNA, 30 bp, Artificial Sequence
  Synthetic oligonucleotide
caaacatcggacgtgcaattgcaagtccaa

SEQ ID NO: 440476 - DNA, 30 bp, Artificial Sequence
  Synthetic oligonucleotide
atccgtgttcactaattaacgccggtccaa

SEQ ID NO: 440477 - DNA, 30 bp, Artificial Sequence
  Synthetic oligonucleotide
aactgtctaggttactctcggggggtccaa

SEQ ID NO: 440478 - DNA, 30 bp, Artificial Sequence
  Synthetic oligonucleotide
aagttatcggcaaagggtcagagtgtccaa

SEQ ID NO: 440479 - DNA, 30 bp, Artificial Sequence
  Synthetic oligonucleotide
gaggtacgcggtcgaggcagccaattccaa

SEQ ID NO: 440480 - DNA, 30 bp, Artificial Sequence
  Synthetic oligonucleotide
taagaggcccgaggcgcattcttattccaa

SEQ ID NO: 440481 - DNA, 30 bp, Artificial Sequence
  Synthetic oligonucleotide
tatatagctgctagcgagaaggccttccaa

SEQ ID NO: 440482 - DNA, 30 bp, Artificial Sequence
  Synthetic oligonucleotide
aaggaccttcgatcccccagtcgcttccaa

SEQ ID NO: 440483 - DNA, 30 bp, Artificial Sequence
  Synthetic oligonucleotide
actattggggagtcgtcccgtctcttccaa

SEQ ID NO: 440484 - DNA, 30 bp, Artificial Sequence
  Synthetic oligonucleotide
ttgctaatgcagaaatttgacgagttccaa

SEQ ID NO: 440485 - DNA, 30 bp, Artificial Sequence
  Synthetic oligonucleotide
ttacatgcggtagagggaattgagttccaa

SEQ ID NO: 440486 - DNA, 30 bp, Artificial Sequence
  Synthetic oligonucleotide
ttgcaggctggtgcagtatgggcaaagcaa

SEQ ID NO: 440487 - DNA, 30 bp, Artificial Sequence
  Synthetic oligonucleotide
ttacactctggggacgccgcttcaaagcaa

SEQ ID NO: 440488 - DNA, 30 bp, Artificial Sequence
  Synthetic oligonucleotide
ttccgaccatatctatactggggaaagcaa

SEQ ID NO: 440489 - DNA, 30 bp, Artificial Sequence
  Synthetic oligonucleotide
cgaaagactcagaaccagggaaacaagcaa

SEQ ID NO: 440490 - DNA, 30 bp, Artificial Sequence
  Synthetic oligonucleotide
gaaaacttatttaccaagataacacagcaa

SEQ ID NO: 440491 - DNA, 30 bp, Artificial Sequence
  Synthetic oligonucleotide
accctcgcatcctatagcctgtcacagcaa

SEQ ID NO: 440492 - DNA, 30 bp, Artificial Sequence
  Synthetic oligonucleotide
tcagaccggtctagctatcaattacagcaa

SEQ ID NO: 440493 - DNA, 30 bp, Artificial Sequence
  Synthetic oligonucleotide
cccaagtcgctgatagtaagctaccagcaa

SEQ ID NO: 440494 - DNA, 30 bp, Artificial Sequence
  Synthetic oligonucleotide
gtccgtataaggaatgctgcatggcagcaa

SEQ ID NO: 440495 - DNA, 30 bp, Artificial Sequence
  Synthetic oligonucleotide
aaagggattcgatacgaagcaggtcagcaa

SEQ ID NO: 440496 - DNA, 30 bp, Artificial Sequence
  Synthetic oligonucleotide
atcatgttcgtccgtgggcgggacgagcaa

SEQ ID NO: 440497 - DNA, 30 bp, Artificial Sequence
  Synthetic oligonucleotide
aattctaatttcttttgcctgtgcgagcaa

SEQ ID NO: 440498 - DNA, 30 bp, Artificial Sequence
  Synthetic oligonucleotide
cccggtcgtagctatcgagccgtcgagcaa

SEQ ID NO: 440499 - DNA, 30 bp, Artificial Sequence
  Synthetic oligonucleotide
gggtacgcaagtggcggatggccatagcaa

SEQ ID NO: 440500 - DNA, 30 bp, Artificial Sequence
  Synthetic oligonucleotide
tctattgtgggtttaacttagaggtagcaa

SEQ ID NO: 440501 - DNA, 30 bp, Artificial Sequence
  Synthetic oligonucleotide
cgcaagcggggagattacattttttagcaa

SEQ ID NO: 440502 - DNA, 30 bp, Artificial Sequence
  Synthetic oligonucleotide
tatgttcgttcaaatgtgtttaaaacgcaa

SEQ ID NO: 440503 - DNA, 30 bp, Artificial Sequence
  Synthetic oligonucleotide
ggccgcctgctcattgtgtggacaacgcaa

SEQ ID NO: 440504 - DNA, 30 bp, Artificial Sequence
  Synthetic oligonucleotide
tagaggtcaggatgtagcagaaccacgcaa

SEQ ID NO: 440505 - DNA, 30 bp, Artificial Sequence
  Synthetic oligonucleotide
tgattcagaccacatcattacgagacgcaa

SEQ ID NO: 440506 - DNA, 30 bp, Artificial Sequence
  Synthetic oligonucleotide
tcatttatgtgttggtaggtggatacgcaa

SEQ ID NO: 440507 - DNA, 30 bp, Artificial Sequence
  Synthetic oligonucleotide
ccgttaagatgttttgccaagtaaccgcaa

SEQ ID NO: 440508 - DNA, 30 bp, Artificial Sequence
  Synthetic oligonucleotide
gcggggataaaacggttcccggacccgcaa

SEQ ID NO: 440509 - DNA, 30 bp, Artificial Sequence
  Synthetic oligonucleotide
ttgacgtaccttagacatctttctccgcaa

SEQ ID NO: 440510 - DNA, 30 bp, Artificial Sequence
  Synthetic oligonucleotide
ttgaggaggcaacgcggatcctgtccgcaa

SEQ ID NO: 440511 - DNA, 30 bp, Artificial Sequence
  Synthetic oligonucleotide
tctgcttgtgcaagacgtaactaagcgcaa

SEQ ID NO: 440512 - DNA, 30 bp, Artificial Sequence
  Synthetic oligonucleotide
atctttacttagcgacgtgttacagcgcaa

SEQ ID NO: 440513 - DNA, 30 bp, Artificial Sequence
  Synthetic oligonucleotide
gatatgagttattacccgtggggcgcgcaa

SEQ ID NO: 440514 - DNA, 30 bp, Artificial Sequence
  Synthetic oligonucleotide
gcctaatccttacgggcggcgggtgcgcaa

SEQ ID NO: 440515 - DNA, 30 bp, Artificial Sequence
  Synthetic oligonucleotide
atcggacggaaagcttaaacctttgcgcaa

SEQ ID NO: 440516 - DNA, 30 bp, Artificial Sequence
  Synthetic oligonucleotide
aatgctatcggctcaatagaagcatcgcaa

SEQ ID NO: 440517 - DNA, 30 bp, Artificial Sequence
  Synthetic oligonucleotide
tgatgcgcgtagaacgattgggcatcgcaa

SEQ ID NO: 440518 - DNA, 30 bp, Artificial Sequence
  Synthetic oligonucleotide
ttgggcgcagaaatccatggttcgtcgcaa

SEQ ID NO: 440519 - DNA, 30 bp, Artificial Sequence
  Synthetic oligonucleotide
tgcttcagtgctttatctagacggtcgcaa

SEQ ID NO: 440520 - DNA, 30 bp, Artificial Sequence
  Synthetic oligonucleotide
agtaaatttcacagctaccgtatgtcgcaa

SEQ ID NO: 440521 - DNA, 30 bp, Artificial Sequence
  Synthetic oligonucleotide
tatataagtgggtacggactaacttcgcaa

SEQ ID NO: 440522 - DNA, 30 bp, Artificial Sequence
  Synthetic oligonucleotide
tactctctttatgtttctcaactttcgcaa

SEQ ID NO: 440523 - DNA, 30 bp, Artificial Sequence
  Synthetic oligonucleotide
aacttggtatggtggggccgagcaaggcaa

SEQ ID NO: 440524 - DNA, 30 bp, Artificial Sequence
  Synthetic oligonucleotide
tgggcatttttgaatcgaatcgtaaggcaa

SEQ ID NO: 440525 - DNA, 29 bp, Artificial Sequence
  Synthetic oligonucleotide
gcgtaattactgcgagtttaatcaggcaa

SEQ ID NO: 440526 - DNA, 30 bp, Artificial Sequence
  Synthetic oligonucleotide
gatattactgataggactgattggaggcaa

SEQ ID NO: 440527 - DNA, 30 bp, Artificial Sequence
  Synthetic oligonucleotide
cgaaacgcagaaacctgttggatgaggcaa

SEQ ID NO: 440528 - DNA, 30 bp, Artificial Sequence
  Synthetic oligonucleotide
agttacatggagcccgatttttgtaggcaa

SEQ ID NO: 440529 - DNA, 30 bp, Artificial Sequence
  Synthetic oligonucleotide
taatcacagggcatttccatggttaggcaa

SEQ ID NO: 440530 - DNA, 30 bp, Artificial Sequence
  Synthetic oligonucleotide
tgtctttttgttgtaaccaacgcacggcaa

SEQ ID NO: 440531 - DNA, 30 bp, Artificial Sequence
  Synthetic oligonucleotide
gttgggtgtccctgttaatgcgcacggcaa

SEQ ID NO: 440532 - DNA, 30 bp, Artificial Sequence
  Synthetic oligonucleotide
acagctagcaaacgccttagcggccggcaa

SEQ ID NO: 440533 - DNA, 30 bp, Artificial Sequence
  Synthetic oligonucleotide
ttcgtcaaatttgaatctcgcgtccggcaa

SEQ ID NO: 440534 - DNA, 30 bp, Artificial Sequence
  Synthetic oligonucleotide
aaatatctagggaaagaacagttccggcaa

SEQ ID NO: 440535 - DNA, 30 bp, Artificial Sequence
  Synthetic oligonucleotide
tcgctgagattgagcctcgttacgcggcaa

SEQ ID NO: 440536 - DNA, 30 bp, Artificial Sequence
  Synthetic oligonucleotide
aacctgcgtggactagggtcacgtcggcaa

SEQ ID NO: 440537 - DNA, 30 bp, Artificial Sequence
  Synthetic oligonucleotide
ttcatgcctcctgcgagcaagtcagggcaa

SEQ ID NO: 440538 - DNA, 30 bp, Artificial Sequence
  Synthetic oligonucleotide
gtgtctgccgtgtcactctacttagggcaa

SEQ ID NO: 440539 - DNA, 30 bp, Artificial Sequence
  Synthetic oligonucleotide
ttatgctttgggtgctaactagccgggcaa

SEQ ID NO: 440540 - DNA, 30 bp, Artificial Sequence
  Synthetic oligonucleotide
aatacagggggccgctgctgggccgggcaa

SEQ ID NO: 440541 - DNA, 30 bp, Artificial Sequence
  Synthetic oligonucleotide
atgttatcacgcacaattgttaaggggcaa

SEQ ID NO: 440542 - DNA, 30 bp, Artificial Sequence
  Synthetic oligonucleotide
ggtggaccccggcagcacacatgggggcaa

SEQ ID NO: 440543 - DNA, 30 bp, Artificial Sequence
  Synthetic oligonucleotide
aatggttttcacggcggttgccatgggcaa

SEQ ID NO: 440544 - DNA, 30 bp, Artificial Sequence
  Synthetic oligonucleotide
tagcccaatgacgactctcagcatgggcaa

SEQ ID NO: 440545 - DNA, 30 bp, Artificial Sequence
  Synthetic oligonucleotide
attatgaatagccgagcaaagactgggcaa

SEQ ID NO: 440546 - DNA, 30 bp, Artificial Sequence
  Synthetic oligonucleotide
aagtcgtcggcacgggcatggcaatggcaa

SEQ ID NO: 440547 - DNA, 30 bp, Artificial Sequence
  Synthetic oligonucleotide
actcgaagttagaaccgccgagaatggcaa

SEQ ID NO: 440548 - DNA, 30 bp, Artificial Sequence
  Synthetic oligonucleotide
ttttaaatgtgggacaaacaactatggcaa

SEQ ID NO: 440549 - DNA, 30 bp, Artificial Sequence
  Synthetic oligonucleotide
tatctgggagttctttcgactgactggcaa

SEQ ID NO: 440550 - DNA, 30 bp, Artificial Sequence
  Synthetic oligonucleotide
tagatggcaagactgttcaattactggcaa

SEQ ID NO: 440551 - DNA, 30 bp, Artificial Sequence
  Synthetic oligonucleotide
cgagcgcagctacgaaatgggtcctggcaa

SEQ ID NO: 440552 - DNA, 30 bp, Artificial Sequence
  Synthetic oligonucleotide
gcgctctctatgacaggtggaatgtggcaa

SEQ ID NO: 440553 - DNA, 30 bp, Artificial Sequence
  Synthetic oligonucleotide
tgttgtttgtttcgctgatccatttggcaa

SEQ ID NO: 440554 - DNA, 30 bp, Artificial Sequence
  Synthetic oligonucleotide
agaaagttaactgggtactctatttggcaa

SEQ ID NO: 440555 - DNA, 30 bp, Artificial Sequence
  Synthetic oligonucleotide
ggggcactactgggccctgtatcaatgcaa

SEQ ID NO: 440556 - DNA, 30 bp, Artificial Sequence
  Synthetic oligonucleotide
cgccttgacaatcgctatcttcgaatgcaa

SEQ ID NO: 440557 - DNA, 30 bp, Artificial Sequence
  Synthetic oligonucleotide
ggcctagttcgaatccaatgcatcatgcaa

SEQ ID NO: 440558 - DNA, 30 bp, Artificial Sequence
  Synthetic oligonucleotide
tatgcgcgtgtaaattgtaaattcatgcaa

SEQ ID NO: 440559 - DNA, 30 bp, Artificial Sequence
  Synthetic oligonucleotide
gtcgatccttcccggccggttgagatgcaa

SEQ ID NO: 440560 - DNA, 30 bp, Artificial Sequence
  Synthetic oligonucleotide
tggggcagatttcggattatggggatgcaa

SEQ ID NO: 440561 - DNA, 30 bp, Artificial Sequence
  Synthetic oligonucleotide
ttgactttcgaccgacattcccctatgcaa

SEQ ID NO: 440562 - DNA, 30 bp, Artificial Sequence
  Synthetic oligonucleotide
tgccacccgacccagtgttcgcaactgcaa

SEQ ID NO: 440563 - DNA, 30 bp, Artificial Sequence
  Synthetic oligonucleotide
accatcaccctccgaagattgcggctgcaa

SEQ ID NO: 440564 - DNA, 30 bp, Artificial Sequence
  Synthetic oligonucleotide
gttgtcgcgttttgcaattatagagtgcaa

SEQ ID NO: 440565 - DNA, 30 bp, Artificial Sequence
  Synthetic oligonucleotide
aaacgacgcgtgacagttccacgcgtgcaa

SEQ ID NO: 440566 - DNA, 30 bp, Artificial Sequence
  Synthetic oligonucleotide
agtacactgcttttcaagctcaaggtgcaa

SEQ ID NO: 440567 - DNA, 30 bp, Artificial Sequence
  Synthetic oligonucleotide
taaaccacaaatcttgagaatagggtgcaa

SEQ ID NO: 440568 - DNA, 30 bp, Artificial Sequence
  Synthetic oligonucleotide
aaaacttttttgagaaaagtgtctgtgcaa

SEQ ID NO: 440569 - DNA, 30 bp, Artificial Sequence
  Synthetic oligonucleotide
tgcttcaggcacagttcaataagtgtgcaa

SEQ ID NO: 440570 - DNA, 30 bp, Artificial Sequence
  Synthetic oligonucleotide
gtctccccgtgtttatggttgtgattgcaa

SEQ ID NO: 440571 - DNA, 30 bp, Artificial Sequence
  Synthetic oligonucleotide
aacaataatccatggagctgaatattgcaa

SEQ ID NO: 440572 - DNA, 30 bp, Artificial Sequence
  Synthetic oligonucleotide
gtctctaaaataggtaaacctctattgcaa

SEQ ID NO: 440573 - DNA, 30 bp, Artificial Sequence
  Synthetic oligonucleotide
ttatcatttggttcgcatataagcttgcaa

SEQ ID NO: 440574 - DNA, 30 bp, Artificial Sequence
  Synthetic oligonucleotide
taacactatagccgaaggcggagcttgcaa

SEQ ID NO: 440575 - DNA, 30 bp, Artificial Sequence
  Synthetic oligonucleotide
taattgagggttttttgtatacatttgcaa

SEQ ID NO: 440576 - DNA, 30 bp, Artificial Sequence
  Synthetic oligonucleotide
gacatttaagacccgggagtttgtttgcaa

SEQ ID NO: 440577 - DNA, 30 bp, Artificial Sequence
  Synthetic oligonucleotide
aattccgctaaccggctctctaaaaatcaa

SEQ ID NO: 440578 - DNA, 30 bp, Artificial Sequence
  Synthetic oligonucleotide
atgcatcggggccgcgaggacacaaatcaa

SEQ ID NO: 440579 - DNA, 30 bp, Artificial Sequence
  Synthetic oligonucleotide
gaaaatttatggaatggacaaggaaatcaa

SEQ ID NO: 440580 - DNA, 30 bp, Artificial Sequence
  Synthetic oligonucleotide
agcggctgtggatattcctctttaaatcaa

SEQ ID NO: 440581 - DNA, 30 bp, Artificial Sequence
  Synthetic oligonucleotide
tctgtcggaaatcaggcccgtcacaatcaa

SEQ ID NO: 440582 - DNA, 30 bp, Artificial Sequence
  Synthetic oligonucleotide
actagggaagtatatatacattccaatcaa

SEQ ID NO: 440583 - DNA, 30 bp, Artificial Sequence
  Synthetic oligonucleotide
ttcggatcaattgctaaaaagttcaatcaa

SEQ ID NO: 440584 - DNA, 30 bp, Artificial Sequence
  Synthetic oligonucleotide
attattccacgaaggcggagtcaacatcaa

SEQ ID NO: 440585 - DNA, 30 bp, Artificial Sequence
  Synthetic oligonucleotide
acgtgattgtctctgcgtgggggacatcaa

SEQ ID NO: 440586 - DNA, 30 bp, Artificial Sequence
  Synthetic oligonucleotide
tcgcgacgctggtcgcaaatcttacatcaa

SEQ ID NO: 440587 - DNA, 30 bp, Artificial Sequence
  Synthetic oligonucleotide
attagattgtggggacgagccgtccatcaa

SEQ ID NO: 440588 - DNA, 30 bp, Artificial Sequence
  Synthetic oligonucleotide
catgtcgaatcgttgtcgattttccatcaa

SEQ ID NO: 440589 - DNA, 30 bp, Artificial Sequence
  Synthetic oligonucleotide
atgggttggtaaagcagacgtcagcatcaa

SEQ ID NO: 440590 - DNA, 30 bp, Artificial Sequence
  Synthetic oligonucleotide
gaatttaggaacggccggctgtgagatcaa

SEQ ID NO: 440591 - DNA, 31 bp, Artificial Sequence
  Synthetic oligonucleotide
gtgtttttacatcgactaaaaaagcgatcaa

SEQ ID NO: 440592 - DNA, 30 bp, Artificial Sequence
  Synthetic oligonucleotide
gacattattatgttatgagctccggatcaa

SEQ ID NO: 440593 - DNA, 30 bp, Artificial Sequence
  Synthetic oligonucleotide
atccatagacctagtcgttctgtggatcaa

SEQ ID NO: 440594 - DNA, 30 bp, Artificial Sequence
  Synthetic oligonucleotide
caccgcctttggtggaagctaggtgatcaa

SEQ ID NO: 440595 - DNA, 30 bp, Artificial Sequence
  Synthetic oligonucleotide
acaacctagaatagttgacggcactatcaa

SEQ ID NO: 440596 - DNA, 30 bp, Artificial Sequence
  Synthetic oligonucleotide
cgcagagtacaactcatcgttgcgtatcaa

SEQ ID NO: 440597 - DNA, 30 bp, Artificial Sequence
  Synthetic oligonucleotide
acggtattttattgagtgttaataactcaa

SEQ ID NO: 440598 - DNA, 30 bp, Artificial Sequence
  Synthetic oligonucleotide
ttgtgcttgctagtgaacgggcacactcaa

SEQ ID NO: 440599 - DNA, 30 bp, Artificial Sequence
  Synthetic oligonucleotide
atgaactaatttttgaacgggcgcactcaa

SEQ ID NO: 440600 - DNA, 30 bp, Artificial Sequence
  Synthetic oligonucleotide
tcttatacattattttggtccaatactcaa

SEQ ID NO: 440601 - DNA, 30 bp, Artificial Sequence
  Synthetic oligonucleotide
taacgtcctgaaaggaataggcctactcaa

SEQ ID NO: 440602 - DNA, 30 bp, Artificial Sequence
  Synthetic oligonucleotide
ccccttgttttgggtatagagacacctcaa

SEQ ID NO: 440603 - DNA, 30 bp, Artificial Sequence
  Synthetic oligonucleotide
ggttgttacgctttatgacaattacctcaa

SEQ ID NO: 440604 - DNA, 30 bp, Artificial Sequence
  Synthetic oligonucleotide
attatgctgcccagttgaggtcgccctcaa

SEQ ID NO: 440605 - DNA, 30 bp, Artificial Sequence
  Synthetic oligonucleotide
tacttattcctgctcttaatcttccctcaa

SEQ ID NO: 440606 - DNA, 30 bp, Artificial Sequence
  Synthetic oligonucleotide
aaatgccgggggtatgcaattacgcctcaa

SEQ ID NO: 440607 - DNA, 30 bp, Artificial Sequence
  Synthetic oligonucleotide
acctacagtggtcgccatcggagtcctcaa

SEQ ID NO: 440608 - DNA, 30 bp, Artificial Sequence
  Synthetic oligonucleotide
taattctctgggtccgatcaatgtcctcaa

SEQ ID NO: 440609 - DNA, 30 bp, Artificial Sequence
  Synthetic oligonucleotide
tctgggatttaggacggaatcccagctcaa

SEQ ID NO: 440610 - DNA, 30 bp, Artificial Sequence
  Synthetic oligonucleotide
ggtaaaccgcaaagttttaacggagctcaa

SEQ ID NO: 440611 - DNA, 30 bp, Artificial Sequence
  Synthetic oligonucleotide
tcgaactttgcccctgcaacatgggctcaa

SEQ ID NO: 440612 - DNA, 30 bp, Artificial Sequence
  Synthetic oligonucleotide
agactgcagtgttaagccttacatgctcaa

SEQ ID NO: 440613 - DNA, 30 bp, Artificial Sequence
  Synthetic oligonucleotide
gcccaattatctgttcttctcacgtctcaa

SEQ ID NO: 440614 - DNA, 30 bp, Artificial Sequence
  Synthetic oligonucleotide
tgcacatattcgagggctttatggtctcaa

SEQ ID NO: 440615 - DNA, 30 bp, Artificial Sequence
  Synthetic oligonucleotide
atcattagtatgccactcactcattctcaa

SEQ ID NO: 440616 - DNA, 30 bp, Artificial Sequence
  Synthetic oligonucleotide
gacacgggcttcctgattcgcacaagtcaa

SEQ ID NO: 440617 - DNA, 30 bp, Artificial Sequence
  Synthetic oligonucleotide
taattcgtcaatatttttttaaggagtcaa

SEQ ID NO: 440618 - DNA, 30 bp, Artificial Sequence
  Synthetic oligonucleotide
gctttgatgacgttcggcaagactagtcaa

SEQ ID NO: 440619 - DNA, 30 bp, Artificial Sequence
  Synthetic oligonucleotide
gggcgtcgcagggggcgggcccctagtcaa

SEQ ID NO: 440620 - DNA, 30 bp, Artificial Sequence
  Synthetic oligonucleotide
tctcttactgataatcccacaattagtcaa

SEQ ID NO: 440621 - DNA, 30 bp, Artificial Sequence
  Synthetic oligonucleotide
tttggctcggaaaatgtataatttagtcaa

SEQ ID NO: 440622 - DNA, 30 bp, Artificial Sequence
  Synthetic oligonucleotide
ggatacccaacccgcccttcccaacgtcaa

SEQ ID NO: 440623 - DNA, 30 bp, Artificial Sequence
  Synthetic oligonucleotide
ggcatttcggagattttgactgtacgtcaa

SEQ ID NO: 440624 - DNA, 30 bp, Artificial Sequence
  Synthetic oligonucleotide
gggcagaatgctcgagccataagccgtcaa

SEQ ID NO: 440625 - DNA, 30 bp, Artificial Sequence
  Synthetic oligonucleotide
caacatccgatactaacttatcggcgtcaa

SEQ ID NO: 440626 - DNA, 30 bp, Artificial Sequence
  Synthetic oligonucleotide
gcgcctggatgatgacagtatacaggtcaa

SEQ ID NO: 440627 - DNA, 30 bp, Artificial Sequence
  Synthetic oligonucleotide
atcgtacaataccctccttacagaggtcaa

SEQ ID NO: 440628 - DNA, 30 bp, Artificial Sequence
  Synthetic oligonucleotide
aagcgtttggtagtgtatgacaccggtcaa

SEQ ID NO: 440629 - DNA, 30 bp, Artificial Sequence
  Synthetic oligonucleotide
cattaccgacatcatattagtatcggtcaa

SEQ ID NO: 440630 - DNA, 30 bp, Artificial Sequence
  Synthetic oligonucleotide
acacctgagctttgcatcaagacgggtcaa

SEQ ID NO: 440631 - DNA, 30 bp, Artificial Sequence
  Synthetic oligonucleotide
atcttagatcatacagagtaaaatggtcaa

SEQ ID NO: 440632 - DNA, 30 bp, Artificial Sequence
  Synthetic oligonucleotide
cgaccagcgaatccgcaagaatatggtcaa

SEQ ID NO: 440633 - DNA, 30 bp, Artificial Sequence
  Synthetic oligonucleotide
tgtgcggagagatcagaccataaatgtcaa

SEQ ID NO: 440634 - DNA, 30 bp, Artificial Sequence
  Synthetic oligonucleotide
gccagggatgtcccgcgtcgctaatgtcaa

SEQ ID NO: 440635 - DNA, 30 bp, Artificial Sequence
  Synthetic oligonucleotide
aatgactttgcaacaccgggcatatgtcaa

SEQ ID NO: 440636 - DNA, 30 bp, Artificial Sequence
  Synthetic oligonucleotide
tgttaatatcgtcgtacgcgtggctgtcaa

SEQ ID NO: 440637 - DNA, 30 bp, Artificial Sequence
  Synthetic oligonucleotide
tagggagctcttattgggacgttctgtcaa

SEQ ID NO: 440638 - DNA, 30 bp, Artificial Sequence
  Synthetic oligonucleotide
ctctacccgaagcacggtggtcagtgtcaa

SEQ ID NO: 440639 - DNA, 30 bp, Artificial Sequence
  Synthetic oligonucleotide
taaactatcgacattttaagagattgtcaa

SEQ ID NO: 440640 - DNA, 30 bp, Artificial Sequence
  Synthetic oligonucleotide
gttcatctccatgtaacctccacttgtcaa

SEQ ID NO: 440641 - DNA, 30 bp, Artificial Sequence
  Synthetic oligonucleotide
tccagggctgcagactttgcgtgttgtcaa

SEQ ID NO: 440642 - DNA, 30 bp, Artificial Sequence
  Synthetic oligonucleotide
atgtatcccgcccaaggacctcaaattcaa

SEQ ID NO: 440643 - DNA, 30 bp, Artificial Sequence
  Synthetic oligonucleotide
aagtgacgtttttggaacacggcaattcaa

SEQ ID NO: 440644 - DNA, 30 bp, Artificial Sequence
  Synthetic oligonucleotide
tgcctgtcttcgctgccctgaggaattcaa

SEQ ID NO: 440645 - DNA, 30 bp, Artificial Sequence
  Synthetic oligonucleotide
cttgaatcttttcaatattcttgaattcaa

SEQ ID NO: 440646 - DNA, 30 bp, Artificial Sequence
  Synthetic oligonucleotide
ccagattagatgcacaatctcgtaattcaa

SEQ ID NO: 440647 - DNA, 30 bp, Artificial Sequence
  Synthetic oligonucleotide
ttctggcacacaagttgcggattaattcaa

SEQ ID NO: 440648 - DNA, 30 bp, Artificial Sequence
  Synthetic oligonucleotide
gttctcgaacggaactctccgaacattcaa

SEQ ID NO: 440649 - DNA, 30 bp, Artificial Sequence
  Synthetic oligonucleotide
tttacgctcatgaagggtagggtcattcaa

SEQ ID NO: 440650 - DNA, 29 bp, Artificial Sequence
  Synthetic oligonucleotide
gcattgatgcaatcgaacttgtgattcaa

SEQ ID NO: 440651 - DNA, 30 bp, Artificial Sequence
  Synthetic oligonucleotide
tattgtatgctttgggtcgacactattcaa

SEQ ID NO: 440652 - DNA, 30 bp, Artificial Sequence
  Synthetic oligonucleotide
attaaaagagctagaccatacattattcaa

SEQ ID NO: 440653 - DNA, 30 bp, Artificial Sequence
  Synthetic oligonucleotide
ctctgcagtcagtctggtccctttattcaa

SEQ ID NO: 440654 - DNA, 30 bp, Artificial Sequence
  Synthetic oligonucleotide
cagtctctaggcagatggagccaacttcaa

SEQ ID NO: 440655 - DNA, 30 bp, Artificial Sequence
  Synthetic oligonucleotide
cgtgataccctgagattacgttgacttcaa

SEQ ID NO: 440656 - DNA, 30 bp, Artificial Sequence
  Synthetic oligonucleotide
aaacatatcctttacaccggatagcttcaa

SEQ ID NO: 440657 - DNA, 30 bp, Artificial Sequence
  Synthetic oligonucleotide
agccaggcttcgcctcgtaacactcttcaa

SEQ ID NO: 440658 - DNA, 30 bp, Artificial Sequence
  Synthetic oligonucleotide
tgcgacgcgctgcggttcgggagtcttcaa

SEQ ID NO: 440659 - DNA, 30 bp, Artificial Sequence
  Synthetic oligonucleotide
gtgcattctagttgattcttaaaagttcaa

SEQ ID NO: 440660 - DNA, 30 bp, Artificial Sequence
  Synthetic oligonucleotide
gtacgtgctctagagctaaaattcgttcaa

SEQ ID NO: 440661 - DNA, 30 bp, Artificial Sequence
  Synthetic oligonucleotide
gctacacttattggtgcgtttaaggttcaa

SEQ ID NO: 440662 - DNA, 30 bp, Artificial Sequence
  Synthetic oligonucleotide
acattccgaagttcttcatcttcggttcaa

SEQ ID NO: 440663 - DNA, 30 bp, Artificial Sequence
  Synthetic oligonucleotide
gtgattcacgcttgaatgagcgctgttcaa

SEQ ID NO: 440664 - DNA, 30 bp, Artificial Sequence
  Synthetic oligonucleotide
gtttgacactaagacagcgggtgtgttcaa

SEQ ID NO: 440665 - DNA, 30 bp, Artificial Sequence
  Synthetic oligonucleotide
catcccaaactttagtattaaacctttcaa

SEQ ID NO: 440666 - DNA, 30 bp, Artificial Sequence
  Synthetic oligonucleotide
ggttacacttgtatagtgctaaattttcaa

SEQ ID NO: 440667 - DNA, 30 bp, Artificial Sequence
  Synthetic oligonucleotide
aggttcaaaaaaaggcttttctattttcaa

SEQ ID NO: 440668 - DNA, 30 bp, Artificial Sequence
  Synthetic oligonucleotide
actaatattatgtgaaccggggtttttcaa

SEQ ID NO: 440669 - DNA, 30 bp, Artificial Sequence
  Synthetic oligonucleotide
caaggcaaaatccgaccggtgggaaaagaa

SEQ ID NO: 440670 - DNA, 30 bp, Artificial Sequence
  Synthetic oligonucleotide
gttttacggagacatatcgtacgcaaagaa

SEQ ID NO: 440671 - DNA, 30 bp, Artificial Sequence
  Synthetic oligonucleotide
gaattctcaccccgatgatcccgcaaagaa

SEQ ID NO: 440672 - DNA, 30 bp, Artificial Sequence
  Synthetic oligonucleotide
cgagcttttaacctaatagttcgcaaagaa

SEQ ID NO: 440673 - DNA, 30 bp, Artificial Sequence
  Synthetic oligonucleotide
gatcaaggacgtgtgcattacatcaaagaa

SEQ ID NO: 440674 - DNA, 30 bp, Artificial Sequence
  Synthetic oligonucleotide
tttcgtaatcctggcgccgcagggaaagaa

SEQ ID NO: 440675 - DNA, 30 bp, Artificial Sequence
  Synthetic oligonucleotide
atttttaatgtttccacgatacataaagaa

SEQ ID NO: 440676 - DNA, 30 bp, Artificial Sequence
  Synthetic oligonucleotide
tctttcttcgattacgggatggataaagaa

SEQ ID NO: 440677 - DNA, 30 bp, Artificial Sequence
  Synthetic oligonucleotide
ttctgatctggcgctgttggtgataaagaa

SEQ ID NO: 440678 - DNA, 30 bp, Artificial Sequence
  Synthetic oligonucleotide
ttggtccagtgcgaaagcaatacacaagaa

SEQ ID NO: 440679 - DNA, 30 bp, Artificial Sequence
  Synthetic oligonucleotide
gtactgaatgagttaatacaattgcaagaa

SEQ ID NO: 440680 - DNA, 30 bp, Artificial Sequence
  Synthetic oligonucleotide
cgctagtgctggtcagtgttcgatcaagaa

SEQ ID NO: 440681 - DNA, 30 bp, Artificial Sequence
  Synthetic oligonucleotide
tcattgatttaagactggcgatttcaagaa

SEQ ID NO: 440682 - DNA, 30 bp, Artificial Sequence
  Synthetic oligonucleotide
gacatttgcagaatgatttatcgagaagaa

SEQ ID NO: 440683 - DNA, 30 bp, Artificial Sequence
  Synthetic oligonucleotide
agactcagtagagagagacgttacgaagaa

SEQ ID NO: 440684 - DNA, 30 bp, Artificial Sequence
  Synthetic oligonucleotide
aactccctaaaggctgtgtccccggaagaa

SEQ ID NO: 440685 - DNA, 30 bp, Artificial Sequence
  Synthetic oligonucleotide
aagttttctaagtgaagtacgtgtgaagaa

SEQ ID NO: 440686 - DNA, 30 bp, Artificial Sequence
  Synthetic oligonucleotide
actcttaaactgtaggttttggactaagaa

SEQ ID NO: 440687 - DNA, 30 bp, Artificial Sequence
  Synthetic oligonucleotide
ataccgcacgagtgggcgagtgcctaagaa

SEQ ID NO: 440688 - DNA, 30 bp, Artificial Sequence
  Synthetic oligonucleotide
ttaaaagaaaccacgacgaaattctaagaa

SEQ ID NO: 440689 - DNA, 30 bp, Artificial Sequence
  Synthetic oligonucleotide
gagaaggtccctaccttttcatcgtaagaa

SEQ ID NO: 440690 - DNA, 30 bp, Artificial Sequence
  Synthetic oligonucleotide
gcatttggtcaaaggcaaatgttgtaagaa

SEQ ID NO: 440691 - DNA, 30 bp, Artificial Sequence
  Synthetic oligonucleotide
ggcatattatcaacgttggttccaacagaa

SEQ ID NO: 440692 - DNA, 30 bp, Artificial Sequence
  Synthetic oligonucleotide
actggtcagacgcgccgttatcagacagaa

SEQ ID NO: 440693 - DNA, 30 bp, Artificial Sequence
  Synthetic oligonucleotide
gtcgtttaggcccactatcggggaccagaa

SEQ ID NO: 440694 - DNA, 30 bp, Artificial Sequence
  Synthetic oligonucleotide
tcgcaagcttgaagtggaaatatcccagaa

SEQ ID NO: 440695 - DNA, 30 bp, Artificial Sequence
  Synthetic oligonucleotide
gcaaagcagcactggctcaagctcccagaa

SEQ ID NO: 440696 - DNA, 30 bp, Artificial Sequence
  Synthetic oligonucleotide
aaaagtcgtttactttatagggtcccagaa

SEQ ID NO: 440697 - DNA, 30 bp, Artificial Sequence
  Synthetic oligonucleotide
attgggtatatccccacgatcaagccagaa

SEQ ID NO: 440698 - DNA, 30 bp, Artificial Sequence
  Synthetic oligonucleotide
cgcatagtagtctcaagcgctcggccagaa

SEQ ID NO: 440699 - DNA, 30 bp, Artificial Sequence
  Synthetic oligonucleotide
gcataacgaagctctggagggtatccagaa

SEQ ID NO: 440700 - DNA, 30 bp, Artificial Sequence
  Synthetic oligonucleotide
catctttcttgcatgtatacacaggcagaa

SEQ ID NO: 440701 - DNA, 30 bp, Artificial Sequence
  Synthetic oligonucleotide
gcgaacaaatgaagacccaatgcggcagaa

SEQ ID NO: 440702 - DNA, 30 bp, Artificial Sequence
  Synthetic oligonucleotide
aggatttaaccttgctggactaaatcagaa

SEQ ID NO: 440703 - DNA, 30 bp, Artificial Sequence
  Synthetic oligonucleotide
cccagagtggatactgattatagatcagaa

SEQ ID NO: 440704 - DNA, 29 bp, Artificial Sequence
  Synthetic oligonucleotide
ttcatagtctaggcggcacgcgatcagaa

SEQ ID NO: 440705 - DNA, 30 bp, Artificial Sequence
  Synthetic oligonucleotide
tttcaaacttcagacgggaacatgtcagaa

SEQ ID NO: 440706 - DNA, 30 bp, Artificial Sequence
  Synthetic oligonucleotide
tcgaattgtctatcggggtatctttcagaa

SEQ ID NO: 440707 - DNA, 30 bp, Artificial Sequence
  Synthetic oligonucleotide
tgaaagaaacagactttggctgtttcagaa

SEQ ID NO: 440708 - DNA, 30 bp, Artificial Sequence
  Synthetic oligonucleotide
gcttcggttctcctaggacagcaaagagaa

SEQ ID NO: 440709 - DNA, 30 bp, Artificial Sequence
  Synthetic oligonucleotide
cagcaataggattcagtttacgtaagagaa

SEQ ID NO: 440710 - DNA, 30 bp, Artificial Sequence
  Synthetic oligonucleotide
aaggggtagaaacgctggctgcgcagagaa

SEQ ID NO: 440711 - DNA, 30 bp, Artificial Sequence
  Synthetic oligonucleotide
atcatatataacagtgtttgtggcagagaa

SEQ ID NO: 440712 - DNA, 30 bp, Artificial Sequence
  Synthetic oligonucleotide
ggaagtaaatcgtctgaacacggacgagaa

SEQ ID NO: 440713 - DNA, 30 bp, Artificial Sequence
  Synthetic oligonucleotide
aaaatatagtgcagctgaatagaccgagaa

SEQ ID NO: 440714 - DNA, 30 bp, Artificial Sequence
  Synthetic oligonucleotide
agttgcttttgtttgcagcgtctccgagaa

SEQ ID NO: 440715 - DNA, 30 bp, Artificial Sequence
  Synthetic oligonucleotide
acccactggtcgggaacctatcagcgagaa

SEQ ID NO: 440716 - DNA, 30 bp, Artificial Sequence
  Synthetic oligonucleotide
ccaagctgcacctggcatgattttcgagaa

SEQ ID NO: 440717 - DNA, 30 bp, Artificial Sequence
  Synthetic oligonucleotide
tacagaggtgtttctcctcctggaggagaa

SEQ ID NO: 440718 - DNA, 30 bp, Artificial Sequence
  Synthetic oligonucleotide
cttaacgtatgttagtgtcctataggagaa

SEQ ID NO: 440719 - DNA, 30 bp, Artificial Sequence
  Synthetic oligonucleotide
gtcgcgcgtttgcaagttgtattaggagaa

SEQ ID NO: 440720 - DNA, 30 bp, Artificial Sequence
  Synthetic oligonucleotide
ccaggaagagtctagcaaagtgcgggagaa

SEQ ID NO: 440721 - DNA, 30 bp, Artificial Sequence
  Synthetic oligonucleotide
cggtactgtagatcgtgccgaaggggagaa

SEQ ID NO: 440722 - DNA, 30 bp, Artificial Sequence
  Synthetic oligonucleotide
gttccagcataataggcactatctggagaa

SEQ ID NO: 440723 - DNA, 30 bp, Artificial Sequence
  Synthetic oligonucleotide
tatcctcaacagagttttcctgaatgagaa

SEQ ID NO: 440724 - DNA, 30 bp, Artificial Sequence
  Synthetic oligonucleotide
ccataattcaggacgagtagtaactgagaa

SEQ ID NO: 440725 - DNA, 30 bp, Artificial Sequence
  Synthetic oligonucleotide
tcggtttttaggccaacaccattgtgagaa

SEQ ID NO: 440726 - DNA, 30 bp, Artificial Sequence
  Synthetic oligonucleotide
tgtcacttggaggtaccctctgtttgagaa

SEQ ID NO: 440727 - DNA, 30 bp, Artificial Sequence
  Synthetic oligonucleotide
cctggattgcttttagcggattaaatagaa

SEQ ID NO: 440728 - DNA, 30 bp, Artificial Sequence
  Synthetic oligonucleotide
aaatttttgtggccaatctcacgaatagaa

SEQ ID NO: 440729 - DNA, 30 bp, Artificial Sequence
  Synthetic oligonucleotide
actcccatgtacacggggtctctaatagaa

SEQ ID NO: 440730 - DNA, 30 bp, Artificial Sequence
  Synthetic oligonucleotide
atcgataggtgcaatggacgattcatagaa

SEQ ID NO: 440731 - DNA, 30 bp, Artificial Sequence
  Synthetic oligonucleotide
aagcatcgcgattcgtctgtggcgatagaa

SEQ ID NO: 440732 - DNA, 30 bp, Artificial Sequence
  Synthetic oligonucleotide
cttacaacctcacgcgggcatttgatagaa

SEQ ID NO: 440733 - DNA, 30 bp, Artificial Sequence
  Synthetic oligonucleotide
ccgaacactgacgtggggcacagtatagaa

SEQ ID NO: 440734 - DNA, 30 bp, Artificial Sequence
  Synthetic oligonucleotide
gctgttagctcgtggtattgtggtatagaa

SEQ ID NO: 440735 - DNA, 30 bp, Artificial Sequence
  Synthetic oligonucleotide
ggccgcccgggatttcatatcgttatagaa

SEQ ID NO: 440736 - DNA, 30 bp, Artificial Sequence
  Synthetic oligonucleotide
aaagacttctaacgggcttgggttatagaa

SEQ ID NO: 440737 - DNA, 30 bp, Artificial Sequence
  Synthetic oligonucleotide
ggaaatcccggtaggttagcataactagaa

SEQ ID NO: 440738 - DNA, 30 bp, Artificial Sequence
  Synthetic oligonucleotide
tgttgtggctcgtaattacgttcactagaa

SEQ ID NO: 440739 - DNA, 30 bp, Artificial Sequence
  Synthetic oligonucleotide
gcccatcctggtagattatggctactagaa

SEQ ID NO: 440740 - DNA, 30 bp, Artificial Sequence
  Synthetic oligonucleotide
ttgtagtggggccgcaatggctccctagaa

SEQ ID NO: 440741 - DNA, 30 bp, Artificial Sequence
  Synthetic oligonucleotide
agaaccgctgtattctagccaatgctagaa

SEQ ID NO: 440742 - DNA, 30 bp, Artificial Sequence
  Synthetic oligonucleotide
ccaacggagcgtacagttgcaagtctagaa

SEQ ID NO: 440743 - DNA, 30 bp, Artificial Sequence
  Synthetic oligonucleotide
acactgacatttccgtaaaagtcagtagaa

SEQ ID NO: 440744 - DNA, 30 bp, Artificial Sequence
  Synthetic oligonucleotide
taggtcattcttggccgcgctttagtagaa

SEQ ID NO: 440745 - DNA, 30 bp, Artificial Sequence
  Synthetic oligonucleotide
tgtctccttcctttaattggacccgtagaa

SEQ ID NO: 440746 - DNA, 30 bp, Artificial Sequence
  Synthetic oligonucleotide
ggagccaacgcgttcattggctccgtagaa

SEQ ID NO: 440747 - DNA, 30 bp, Artificial Sequence
  Synthetic oligonucleotide
aactaacgttttgcacggcaaaatgtagaa

SEQ ID NO: 440748 - DNA, 30 bp, Artificial Sequence
  Synthetic oligonucleotide
gtaacgcccgggtcgagttctctattagaa

SEQ ID NO: 440749 - DNA, 30 bp, Artificial Sequence
  Synthetic oligonucleotide
tcgttgggaaatgctgcgtggttattagaa

SEQ ID NO: 440750 - DNA, 30 bp, Artificial Sequence
  Synthetic oligonucleotide
ggcccgtggtctcacaccggccgcttagaa

SEQ ID NO: 440751 - DNA, 29 bp, Artificial Sequence
  Synthetic oligonucleotide
atgtggcgtttgcgtctttatcgttagaa

SEQ ID NO: 440752 - DNA, 30 bp, Artificial Sequence
  Synthetic oligonucleotide
tttgaacggggatgcgttaggtcgttagaa

SEQ ID NO: 440753 - DNA, 30 bp, Artificial Sequence
  Synthetic oligonucleotide
ttgaagccgtttaacagcctgctgttagaa

SEQ ID NO: 440754 - DNA, 30 bp, Artificial Sequence
  Synthetic oligonucleotide
taattttatagaaactagtgagtgttagaa

SEQ ID NO: 440755 - DNA, 30 bp, Artificial Sequence
  Synthetic oligonucleotide
ttgacgaagtgcggcggtcgggtgttagaa

SEQ ID NO: 440756 - DNA, 30 bp, Artificial Sequence
  Synthetic oligonucleotide
aagtactatgggtccggggttgtgttagaa

SEQ ID NO: 440757 - DNA, 30 bp, Artificial Sequence
  Synthetic oligonucleotide
tacgggtaggtgcctagagttaatttagaa

SEQ ID NO: 440758 - DNA, 30 bp, Artificial Sequence
  Synthetic oligonucleotide
gtttcgacccgggcccgagcgagtttagaa

SEQ ID NO: 440759 - DNA, 30 bp, Artificial Sequence
  Synthetic oligonucleotide
atgcgtattcggcgctagaatcttttagaa

SEQ ID NO: 440760 - DNA, 30 bp, Artificial Sequence
  Synthetic oligonucleotide
taaatgaagttccaccctagtgttttagaa

SEQ ID NO: 440761 - DNA, 31 bp, Artificial Sequence
  Synthetic oligonucleotide
cttgcgagagaatgatcggttgtcacacgaa

SEQ ID NO: 440762 - DNA, 30 bp, Artificial Sequence
  Synthetic oligonucleotide
acgacgctatagaatcgggaccgacacgaa

SEQ ID NO: 440763 - DNA, 30 bp, Artificial Sequence
  Synthetic oligonucleotide
tcaagcggcgctgcgctcatataccacgaa

SEQ ID NO: 440764 - DNA, 30 bp, Artificial Sequence
  Synthetic oligonucleotide
gcctcacatgtataggaggcagtccacgaa

SEQ ID NO: 440765 - DNA, 30 bp, Artificial Sequence
  Synthetic oligonucleotide
tatttcatatgccgaatattttcgcacgaa

SEQ ID NO: 440766 - DNA, 30 bp, Artificial Sequence
  Synthetic oligonucleotide
gcgttgtcacgcagaccgattactcacgaa

SEQ ID NO: 440767 - DNA, 30 bp, Artificial Sequence
  Synthetic oligonucleotide
taagattcgtgtcaacaccggcgtcacgaa

SEQ ID NO: 440768 - DNA, 30 bp, Artificial Sequence
  Synthetic oligonucleotide
cctgtggtttgatacggattgattcacgaa

SEQ ID NO: 440769 - DNA, 30 bp, Artificial Sequence
  Synthetic oligonucleotide
attattgagctctaacgccatgtagacgaa

SEQ ID NO: 440770 - DNA, 30 bp, Artificial Sequence
  Synthetic oligonucleotide
gggtatctagagcacccacacgtcgacgaa

SEQ ID NO: 440771 - DNA, 30 bp, Artificial Sequence
  Synthetic oligonucleotide
atttgtgggcaaagttttcccaaggacgaa

SEQ ID NO: 440772 - DNA, 30 bp, Artificial Sequence
  Synthetic oligonucleotide
aggataaattcatgtgcatccctggacgaa

SEQ ID NO: 440773 - DNA, 30 bp, Artificial Sequence
  Synthetic oligonucleotide
aaggttattaacttattcaagggtgacgaa

SEQ ID NO: 440774 - DNA, 30 bp, Artificial Sequence
  Synthetic oligonucleotide
tgcctgccggtcccttgttaccaatacgaa

SEQ ID NO: 440775 - DNA, 30 bp, Artificial Sequence
  Synthetic oligonucleotide
atgcatttggttgtgccgtattactacgaa

SEQ ID NO: 440776 - DNA, 30 bp, Artificial Sequence
  Synthetic oligonucleotide
ttgtagacctaagctctctgacggtacgaa

SEQ ID NO: 440777 - DNA, 30 bp, Artificial Sequence
  Synthetic oligonucleotide
gtcgccgaacccccagccgtaatttacgaa

SEQ ID NO: 440778 - DNA, 30 bp, Artificial Sequence
  Synthetic oligonucleotide
gaggaattctgaacaaggagaaaaaccgaa

SEQ ID NO: 440779 - DNA, 30 bp, Artificial Sequence
  Synthetic oligonucleotide
gtacattcgcggtatcgttctaacaccgaa

SEQ ID NO: 440780 - DNA, 30 bp, Artificial Sequence
  Synthetic oligonucleotide
ctcagctactactcggacgctgctaccgaa

SEQ ID NO: 440781 - DNA, 30 bp, Artificial Sequence
  Synthetic oligonucleotide
gctatgtataatcgtcaaaaatgtaccgaa

SEQ ID NO: 440782 - DNA, 30 bp, Artificial Sequence
  Synthetic oligonucleotide
tctgtcgggttcttattatgtattaccgaa

SEQ ID NO: 440783 - DNA, 30 bp, Artificial Sequence
  Synthetic oligonucleotide
cagagcatgcaccaattgttcgcccccgaa

SEQ ID NO: 440784 - DNA, 30 bp, Artificial Sequence
  Synthetic oligonucleotide
aacattatcagagtgtacataccgcccgaa

SEQ ID NO: 440785 - DNA, 30 bp, Artificial Sequence
  Synthetic oligonucleotide
cctagcgtaccttcgaaccgccggcccgaa

SEQ ID NO: 440786 - DNA, 30 bp, Artificial Sequence
  Synthetic oligonucleotide
tagcggcgtatttaatgtatattagccgaa

SEQ ID NO: 440787 - DNA, 30 bp, Artificial Sequence
  Synthetic oligonucleotide
tccccacgccctttgagacagcccgccgaa

SEQ ID NO: 440788 - DNA, 30 bp, Artificial Sequence
  Synthetic oligonucleotide
ttaaaacgaagcggcgaatccagggccgaa

SEQ ID NO: 440789 - DNA, 30 bp, Artificial Sequence
  Synthetic oligonucleotide
agacgttcgatgcgttattgatgctccgaa

SEQ ID NO: 440790 - DNA, 30 bp, Artificial Sequence
  Synthetic oligonucleotide
ctttttcgatctatgatagcggacagcgaa

SEQ ID NO: 440791 - DNA, 30 bp, Artificial Sequence
  Synthetic oligonucleotide
tctttcgcatatcggttttttttcagcgaa

SEQ ID NO: 440792 - DNA, 30 bp, Artificial Sequence
  Synthetic oligonucleotide
cttaaaactacctttgacaggtggagcgaa

SEQ ID NO: 440793 - DNA, 29 bp, Artificial Sequence
  Synthetic oligonucleotide
ctaaatgcgtgtatcctctccatagcgaa

SEQ ID NO: 440794 - DNA, 30 bp, Artificial Sequence
  Synthetic oligonucleotide
acttttcacccacgtattggaactagcgaa

SEQ ID NO: 440795 - DNA, 30 bp, Artificial Sequence
  Synthetic oligonucleotide
gcacccccaaacgattaagagtcacgcgaa

SEQ ID NO: 440796 - DNA, 30 bp, Artificial Sequence
  Synthetic oligonucleotide
ttatcctcgatgccctttgcggaccgcgaa

SEQ ID NO: 440797 - DNA, 30 bp, Artificial Sequence
  Synthetic oligonucleotide
aactatttaaaaattgatttatggcgcgaa

SEQ ID NO: 440798 - DNA, 30 bp, Artificial Sequence
  Synthetic oligonucleotide
gttcacttcggataagcttcactgcgcgaa

SEQ ID NO: 440799 - DNA, 30 bp, Artificial Sequence
  Synthetic oligonucleotide
gaaggtaaaacaaaaatactattgcgcgaa

SEQ ID NO: 440800 - DNA, 30 bp, Artificial Sequence
  Synthetic oligonucleotide
gcttatgcattggattattttgttcgcgaa

SEQ ID NO: 440801 - DNA, 30 bp, Artificial Sequence
  Synthetic oligonucleotide
cttttgcaactccccggagacaacggcgaa

SEQ ID NO: 440802 - DNA, 30 bp, Artificial Sequence
  Synthetic oligonucleotide
ttttaaggccagatccgcggcatcggcgaa

SEQ ID NO: 440803 - DNA, 30 bp, Artificial Sequence
  Synthetic oligonucleotide
gtgtatctacgctggacactcacgggcgaa

SEQ ID NO: 440804 - DNA, 30 bp, Artificial Sequence
  Synthetic oligonucleotide
gacagatttccttcggcgagatcgggcgaa

SEQ ID NO: 440805 - DNA, 30 bp, Artificial Sequence
  Synthetic oligonucleotide
gtgagcctgaagattattctttatggcgaa

SEQ ID NO: 440806 - DNA, 30 bp, Artificial Sequence
  Synthetic oligonucleotide
gaacccggaacacggggctttcctggcgaa

SEQ ID NO: 440807 - DNA, 30 bp, Artificial Sequence
  Synthetic oligonucleotide
tttatcatagctcccgtgatatctggcgaa

SEQ ID NO: 440808 - DNA, 30 bp, Artificial Sequence
  Synthetic oligonucleotide
gtgcactttgggaaacacttttctggcgaa

SEQ ID NO: 440809 - DNA, 30 bp, Artificial Sequence
  Synthetic oligonucleotide
gcatcacgcgcgcagccacttattggcgaa

SEQ ID NO: 440810 - DNA, 30 bp, Artificial Sequence
  Synthetic oligonucleotide
atattctgttggaagtccgcaggatgcgaa

SEQ ID NO: 440811 - DNA, 31 bp, Artificial Sequence
  Synthetic oligonucleotide
gtcctgaatctttatggtaactggctgcgaa

SEQ ID NO: 440812 - DNA, 30 bp, Artificial Sequence
  Synthetic oligonucleotide
gtgcgcaactcaacgctaagattgtgcgaa

SEQ ID NO: 440813 - DNA, 30 bp, Artificial Sequence
  Synthetic oligonucleotide
gcccggatactctgcagcgcaaaaatcgaa

SEQ ID NO: 440814 - DNA, 30 bp, Artificial Sequence
  Synthetic oligonucleotide
cccaccgagattgtggacggaacaatcgaa

SEQ ID NO: 440815 - DNA, 30 bp, Artificial Sequence
  Synthetic oligonucleotide
gcatgactgccgagcaccggaggcatcgaa

SEQ ID NO: 440816 - DNA, 31 bp, Artificial Sequence
  Synthetic oligonucleotide
taatcttacgggatcgcagtgcaagatcgaa

SEQ ID NO: 440817 - DNA, 30 bp, Artificial Sequence
  Synthetic oligonucleotide
tgatccgcacaaggccagcgcttgatcgaa

SEQ ID NO: 440818 - DNA, 30 bp, Artificial Sequence
  Synthetic oligonucleotide
gtggtcgggccattggtgttatatatcgaa

SEQ ID NO: 440819 - DNA, 30 bp, Artificial Sequence
  Synthetic oligonucleotide
tgcctttggcgaccggtatatagtatcgaa

SEQ ID NO: 440820 - DNA, 30 bp, Artificial Sequence
  Synthetic oligonucleotide
tcaacatgcacggctctgcaataactcgaa

SEQ ID NO: 440821 - DNA, 30 bp, Artificial Sequence
  Synthetic oligonucleotide
gatccgacggtattaagatacttactcgaa

SEQ ID NO: 440822 - DNA, 30 bp, Artificial Sequence
  Synthetic oligonucleotide
tttaggttagatgacttatgagccctcgaa

SEQ ID NO: 440823 - DNA, 30 bp, Artificial Sequence
  Synthetic oligonucleotide
agggttgaatttttagggtcacagctcgaa

SEQ ID NO: 440824 - DNA, 30 bp, Artificial Sequence
  Synthetic oligonucleotide
gttcctttcccgtaatatctgcatctcgaa

SEQ ID NO: 440825 - DNA, 30 bp, Artificial Sequence
  Synthetic oligonucleotide
ttggttgtatctgttgaatagtacgtcgaa

SEQ ID NO: 440826 - DNA, 30 bp, Artificial Sequence
  Synthetic oligonucleotide
gatatccgcggccacattcttcgcgtcgaa

SEQ ID NO: 440827 - DNA, 30 bp, Artificial Sequence
  Synthetic oligonucleotide
atgtttgatacatcccggcagctggtcgaa

SEQ ID NO: 440828 - DNA, 28 bp, Artificial Sequence
  Synthetic oligonucleotide
ggggtcgtctcgcattcatttggtcgaa

SEQ ID NO: 440829 - DNA, 30 bp, Artificial Sequence
  Synthetic oligonucleotide
tttgtgaaggatgaacagcgcgctgtcgaa

SEQ ID NO: 440830 - DNA, 30 bp, Artificial Sequence
  Synthetic oligonucleotide
tattatccacacttcataatcatattcgaa

SEQ ID NO: 440831 - DNA, 30 bp, Artificial Sequence
  Synthetic oligonucleotide
ttgcttctgtcatcccaaacattattcgaa

SEQ ID NO: 440832 - DNA, 30 bp, Artificial Sequence
  Synthetic oligonucleotide
ctaagtctactcgttcgttgaccgttcgaa

SEQ ID NO: 440833 - DNA, 30 bp, Artificial Sequence
  Synthetic oligonucleotide
gtcccaatggtttcaccaagtctgttcgaa

SEQ ID NO: 440834 - DNA, 30 bp, Artificial Sequence
  Synthetic oligonucleotide
gagtaccaatgagaagccagtgtgttcgaa

SEQ ID NO: 440835 - DNA, 30 bp, Artificial Sequence
  Synthetic oligonucleotide
ccccttaacgatgctataatgttgttcgaa

SEQ ID NO: 440836 - DNA, 30 bp, Artificial Sequence
  Synthetic oligonucleotide
acagtatccttgttattttaatatttcgaa

SEQ ID NO: 440837 - DNA, 30 bp, Artificial Sequence
  Synthetic oligonucleotide
tactctaatagatggagaatcggtttcgaa

SEQ ID NO: 440838 - DNA, 30 bp, Artificial Sequence
  Synthetic oligonucleotide
tacagctaatcggtacgagcgattttcgaa

SEQ ID NO: 440839 - DNA, 30 bp, Artificial Sequence
  Synthetic oligonucleotide
tgtagggttagagtagggctttcaaaggaa

SEQ ID NO: 440840 - DNA, 30 bp, Artificial Sequence
  Synthetic oligonucleotide
aagaattaagagtccgctcttataaaggaa

SEQ ID NO: 440841 - DNA, 30 bp, Artificial Sequence
  Synthetic oligonucleotide
cgggccatgatccacaaacgcgggaaggaa

SEQ ID NO: 440842 - DNA, 30 bp, Artificial Sequence
  Synthetic oligonucleotide
cccagatgacttggacacagccataaggaa

SEQ ID NO: 440843 - DNA, 30 bp, Artificial Sequence
  Synthetic oligonucleotide
tggtttccaagaggtctggctcataaggaa

SEQ ID NO: 440844 - DNA, 30 bp, Artificial Sequence
  Synthetic oligonucleotide
gacagtctatgccccaaacgatataaggaa

SEQ ID NO: 440845 - DNA, 30 bp, Artificial Sequence
  Synthetic oligonucleotide
atattgtcccgtcaatgcataggtaaggaa

SEQ ID NO: 440846 - DNA, 30 bp, Artificial Sequence
  Synthetic oligonucleotide
attggagactagattcttttaccacaggaa

SEQ ID NO: 440847 - DNA, 30 bp, Artificial Sequence
  Synthetic oligonucleotide
agttcttatgagggtccgggatgacaggaa

SEQ ID NO: 440848 - DNA, 30 bp, Artificial Sequence
  Synthetic oligonucleotide
ctagggctttttatagtctttctacaggaa

SEQ ID NO: 440849 - DNA, 30 bp, Artificial Sequence
  Synthetic oligonucleotide
tttattagatcacggaagtgaaaccaggaa

SEQ ID NO: 440850 - DNA, 30 bp, Artificial Sequence
  Synthetic oligonucleotide
atatattactctttgatgtgtaaccaggaa

SEQ ID NO: 440851 - DNA, 30 bp, Artificial Sequence
  Synthetic oligonucleotide
acccttggattgccggtttatcaccaggaa

SEQ ID NO: 440852 - DNA, 30 bp, Artificial Sequence
  Synthetic oligonucleotide
aattgcgtgtgcgacacgttggaccaggaa

SEQ ID NO: 440853 - DNA, 30 bp, Artificial Sequence
  Synthetic oligonucleotide
attgatgagatttagtttctgacccaggaa

SEQ ID NO: 440854 - DNA, 30 bp, Artificial Sequence
  Synthetic oligonucleotide
tgcaacatcccgacgcgctttgcccaggaa

SEQ ID NO: 440855 - DNA, 30 bp, Artificial Sequence
  Synthetic oligonucleotide
gggtattctacgaggggtaagtcgcaggaa

SEQ ID NO: 440856 - DNA, 30 bp, Artificial Sequence
  Synthetic oligonucleotide
atacctttgcagccagctaaagtgcaggaa

SEQ ID NO: 440857 - DNA, 30 bp, Artificial Sequence
  Synthetic oligonucleotide
ggtgtcccgccggtcataagacgtcaggaa

SEQ ID NO: 440858 - DNA, 30 bp, Artificial Sequence
  Synthetic oligonucleotide
aacctattctcgaaggaaaggtacgaggaa

SEQ ID NO: 440859 - DNA, 30 bp, Artificial Sequence
  Synthetic oligonucleotide
gagtcatttctcttccgggtcgccgaggaa

SEQ ID NO: 440860 - DNA, 30 bp, Artificial Sequence
  Synthetic oligonucleotide
tggaaagcataacacacaattcttgaggaa

SEQ ID NO: 440861 - DNA, 30 bp, Artificial Sequence
  Synthetic oligonucleotide
agagatgcagtcttccggtgcaagtaggaa

SEQ ID NO: 440862 - DNA, 30 bp, Artificial Sequence
  Synthetic oligonucleotide
cgcagcctctggtaaccctgctcgtaggaa

SEQ ID NO: 440863 - DNA, 30 bp, Artificial Sequence
  Synthetic oligonucleotide
tagaaattggtttagatgatatggtaggaa

SEQ ID NO: 440864 - DNA, 30 bp, Artificial Sequence
  Synthetic oligonucleotide
aaataaatggctgcggatttgagttaggaa

SEQ ID NO: 440865 - DNA, 30 bp, Artificial Sequence
  Synthetic oligonucleotide
aaaatttagcatccgtctagagtttaggaa

SEQ ID NO: 440866 - DNA, 30 bp, Artificial Sequence
  Synthetic oligonucleotide
aaaccaaccgcgaaggccattcaaacggaa

SEQ ID NO: 440867 - DNA, 30 bp, Artificial Sequence
  Synthetic oligonucleotide
aatctttcaataaagggtccattaacggaa

SEQ ID NO: 440868 - DNA, 30 bp, Artificial Sequence
  Synthetic oligonucleotide
ggaggccgtcagtcgtttatacgcacggaa

SEQ ID NO: 440869 - DNA, 30 bp, Artificial Sequence
  Synthetic oligonucleotide
aatgtggtccggttatttcccgtcacggaa

SEQ ID NO: 440870 - DNA, 30 bp, Artificial Sequence
  Synthetic oligonucleotide
ccccttgcctaaagccaaaaaacgacggaa

SEQ ID NO: 440871 - DNA, 30 bp, Artificial Sequence
  Synthetic oligonucleotide
ggtattccttcgctgtgaacctctacggaa

SEQ ID NO: 440872 - DNA, 30 bp, Artificial Sequence
  Synthetic oligonucleotide
ctagctcggcaaggaggttccggtacggaa

SEQ ID NO: 440873 - DNA, 30 bp, Artificial Sequence
  Synthetic oligonucleotide
atagcgcaacagattgttaactgtacggaa

SEQ ID NO: 440874 - DNA, 30 bp, Artificial Sequence
  Synthetic oligonucleotide
gaccagttgaccggccaccgggtcccggaa

SEQ ID NO: 440875 - DNA, 30 bp, Artificial Sequence
  Synthetic oligonucleotide
catagtgacatcgcgggcgattgtccggaa

SEQ ID NO: 440876 - DNA, 30 bp, Artificial Sequence
  Synthetic oligonucleotide
ttacatttctgaagagcagatatagcggaa

SEQ ID NO: 440877 - DNA, 30 bp, Artificial Sequence
  Synthetic oligonucleotide
aacgaaatgcggacagcttattcggcggaa

SEQ ID NO: 440878 - DNA, 30 bp, Artificial Sequence
  Synthetic oligonucleotide
taccccatagtatttttcttcatggcggaa

SEQ ID NO: 440879 - DNA, 30 bp, Artificial Sequence
  Synthetic oligonucleotide
acggtgggagtaatgggagtggctgcggaa

SEQ ID NO: 440880 - DNA, 30 bp, Artificial Sequence
  Synthetic oligonucleotide
ggattatacttcatgttattatgtgcggaa

SEQ ID NO: 440881 - DNA, 30 bp, Artificial Sequence
  Synthetic oligonucleotide
caaaccttccgtatccatcggattgcggaa

SEQ ID NO: 440882 - DNA, 30 bp, Artificial Sequence
  Synthetic oligonucleotide
acatttattgcttggtgactacttgcggaa

SEQ ID NO: 440883 - DNA, 30 bp, Artificial Sequence
  Synthetic oligonucleotide
accgtacgcgggcggttcatattatcggaa

SEQ ID NO: 440884 - DNA, 30 bp, Artificial Sequence
  Synthetic oligonucleotide
tatattggtaaacttattagctactcggaa

SEQ ID NO: 440885 - DNA, 30 bp, Artificial Sequence
  Synthetic oligonucleotide
ggatttgttcctttggaataagtctcggaa

SEQ ID NO: 440886 - DNA, 30 bp, Artificial Sequence
  Synthetic oligonucleotide
gtgtagctgttaccttacatattctcggaa

SEQ ID NO: 440887 - DNA, 30 bp, Artificial Sequence
  Synthetic oligonucleotide
gtgaatccgactgtaagttttctgtcggaa

SEQ ID NO: 440888 - DNA, 30 bp, Artificial Sequence
  Synthetic oligonucleotide
aattcggagaagtacatgttttcttcggaa

SEQ ID NO: 440889 - DNA, 30 bp, Artificial Sequence
  Synthetic oligonucleotide
atttcagacgcgccatcattacgttcggaa

SEQ ID NO: 440890 - DNA, 30 bp, Artificial Sequence
  Synthetic oligonucleotide
agactagtcgtctttcagcaaaaaagggaa

SEQ ID NO: 440891 - DNA, 30 bp, Artificial Sequence
  Synthetic oligonucleotide
agcgttctaggtgccatttatagaagggaa

SEQ ID NO: 440892 - DNA, 30 bp, Artificial Sequence
  Synthetic oligonucleotide
gaatcatgcataggccttcccgacagggaa

SEQ ID NO: 440893 - DNA, 30 bp, Artificial Sequence
  Synthetic oligonucleotide
tgctcttgtgacatcgagggtctcagggaa

SEQ ID NO: 440894 - DNA, 30 bp, Artificial Sequence
  Synthetic oligonucleotide
ctgtctattatcgctttaaagtagagggaa

SEQ ID NO: 440895 - DNA, 30 bp, Artificial Sequence
  Synthetic oligonucleotide
gaaattaccatcccacggttagcgagggaa

SEQ ID NO: 440896 - DNA, 30 bp, Artificial Sequence
  Synthetic oligonucleotide
tatattatggcacaaaaacgttatagggaa

SEQ ID NO: 440897 - DNA, 30 bp, Artificial Sequence
  Synthetic oligonucleotide
gcacccatggtagtacttgagacacgggaa

SEQ ID NO: 440898 - DNA, 30 bp, Artificial Sequence
  Synthetic oligonucleotide
ggctgtttttcgagaccattacgacgggaa

SEQ ID NO: 440899 - DNA, 30 bp, Artificial Sequence
  Synthetic oligonucleotide
tgatggggcccgctagcgtgctaccgggaa

SEQ ID NO: 440900 - DNA, 30 bp, Artificial Sequence
  Synthetic oligonucleotide
gtctggggacatcagttgggaacgcgggaa

SEQ ID NO: 440901 - DNA, 30 bp, Artificial Sequence
  Synthetic oligonucleotide
gtttgtttttatctgtagatttaaggggaa

SEQ ID NO: 440902 - DNA, 30 bp, Artificial Sequence
  Synthetic oligonucleotide
ttgggagcgcgaacatcggactcaggggaa

SEQ ID NO: 440903 - DNA, 30 bp, Artificial Sequence
  Synthetic oligonucleotide
ggatcctgtgaggccgatgcaatcggggaa

SEQ ID NO: 440904 - DNA, 30 bp, Artificial Sequence
  Synthetic oligonucleotide
tgttgtgttaataaaggactgacgggggaa

SEQ ID NO: 440905 - DNA, 30 bp, Artificial Sequence
  Synthetic oligonucleotide
agttcttctttcagtttcgtcgcgggggaa

SEQ ID NO: 440906 - DNA, 30 bp, Artificial Sequence
  Synthetic oligonucleotide
gtgtcttaaaccatcagaaacgctggggaa

SEQ ID NO: 440907 - DNA, 30 bp, Artificial Sequence
  Synthetic oligonucleotide
aagtcggagcgtgttcacttaaaatgggaa

SEQ ID NO: 440908 - DNA, 30 bp, Artificial Sequence
  Synthetic oligonucleotide
aatttgaaacagccttgaaacaactgggaa

SEQ ID NO: 440909 - DNA, 30 bp, Artificial Sequence
  Synthetic oligonucleotide
cgctgtcgttagcccatttcatgctgggaa

SEQ ID NO: 440910 - DNA, 30 bp, Artificial Sequence
  Synthetic oligonucleotide
tgcgcccctcgtatcttagtcaagtgggaa

SEQ ID NO: 440911 - DNA, 30 bp, Artificial Sequence
  Synthetic oligonucleotide
acccatggttgggacttaccactgtgggaa

SEQ ID NO: 440912 - DNA, 30 bp, Artificial Sequence
  Synthetic oligonucleotide
aaatcatacgtaattatatttacttgggaa

SEQ ID NO: 440913 - DNA, 30 bp, Artificial Sequence
  Synthetic oligonucleotide
ctacaaactcaatactcgaccagttgggaa

SEQ ID NO: 440914 - DNA, 30 bp, Artificial Sequence
  Synthetic oligonucleotide
tttggagagcgcatttccgctacaatggaa

SEQ ID NO: 440915 - DNA, 30 bp, Artificial Sequence
  Synthetic oligonucleotide
aatttcctaaagggagaactcggaatggaa

SEQ ID NO: 440916 - DNA, 30 bp, Artificial Sequence
  Synthetic oligonucleotide
gcgaataatcctgcaagtatgaccatggaa

SEQ ID NO: 440917 - DNA, 30 bp, Artificial Sequence
  Synthetic oligonucleotide
cgaccacgccatagcgttcagcccatggaa

SEQ ID NO: 440918 - DNA, 30 bp, Artificial Sequence
  Synthetic oligonucleotide
tcacgcaatggttaattacccgccatggaa

SEQ ID NO: 440919 - DNA, 30 bp, Artificial Sequence
  Synthetic oligonucleotide
tttgttacgcgaaagggatatgccatggaa

SEQ ID NO: 440920 - DNA, 30 bp, Artificial Sequence
  Synthetic oligonucleotide
ttccttgaatcatttaactcgatcatggaa

SEQ ID NO: 440921 - DNA, 30 bp, Artificial Sequence
  Synthetic oligonucleotide
tttatgacagttcctgttgggatcatggaa

SEQ ID NO: 440922 - DNA, 30 bp, Artificial Sequence
  Synthetic oligonucleotide
agcgcggatccgtcaatgcgatctatggaa

SEQ ID NO: 440923 - DNA, 30 bp, Artificial Sequence
  Synthetic oligonucleotide
cgcaagtcccgaggttggtccggtatggaa

SEQ ID NO: 440924 - DNA, 30 bp, Artificial Sequence
  Synthetic oligonucleotide
cactgggcaggaaatggaatcggtatggaa

SEQ ID NO: 440925 - DNA, 30 bp, Artificial Sequence
  Synthetic oligonucleotide
cacaagacgttcagtagtttcagactggaa

SEQ ID NO: 440926 - DNA, 30 bp, Artificial Sequence
  Synthetic oligonucleotide
caccggctaaggggaagcggtaccctggaa

SEQ ID NO: 440927 - DNA, 30 bp, Artificial Sequence
  Synthetic oligonucleotide
tcccggacacagatgtgcagtatcctggaa

SEQ ID NO: 440928 - DNA, 30 bp, Artificial Sequence
  Synthetic oligonucleotide
gagtgttcgcggtaaaacgacccgctggaa

SEQ ID NO: 440929 - DNA, 30 bp, Artificial Sequence
  Synthetic oligonucleotide
ctcgtctatgccgtgatcacggggctggaa

SEQ ID NO: 440930 - DNA, 30 bp, Artificial Sequence
  Synthetic oligonucleotide
tcctccggaaactttcgtaggtatctggaa

SEQ ID NO: 440931 - DNA, 30 bp, Artificial Sequence
  Synthetic oligonucleotide
gagtaaccgttgcgctttattcttctggaa

SEQ ID NO: 440932 - DNA, 30 bp, Artificial Sequence
  Synthetic oligonucleotide
gagaacacgcccaaaaggctgggcgtggaa

SEQ ID NO: 440933 - DNA, 30 bp, Artificial Sequence
  Synthetic oligonucleotide
tgcaaccaggcccgacgcgaggtcgtggaa

SEQ ID NO: 440934 - DNA, 30 bp, Artificial Sequence
  Synthetic oligonucleotide
ccatcgcgagctagcactctggtcgtggaa

SEQ ID NO: 440935 - DNA, 30 bp, Artificial Sequence
  Synthetic oligonucleotide
gtttgaacagggatttgcaccgtggtggaa

SEQ ID NO: 440936 - DNA, 30 bp, Artificial Sequence
  Synthetic oligonucleotide
gtagcttgtttagtgttcaaagcgttggaa

SEQ ID NO: 440937 - DNA, 30 bp, Artificial Sequence
  Synthetic oligonucleotide
gctgccgcatatatcgtatatgatttggaa

SEQ ID NO: 440938 - DNA, 30 bp, Artificial Sequence
  Synthetic oligonucleotide
atttttagagttgctacacgtactttggaa

SEQ ID NO: 440939 - DNA, 30 bp, Artificial Sequence
  Synthetic oligonucleotide
tacataataagtgcgtagactaaaaatgaa

SEQ ID NO: 440940 - DNA, 30 bp, Artificial Sequence
  Synthetic oligonucleotide
ggaacgcacaccaaggtaaaataaaatgaa

SEQ ID NO: 440941 - DNA, 30 bp, Artificial Sequence
  Synthetic oligonucleotide
aagttattttttattgaacgtcgaaatgaa

SEQ ID NO: 440942 - DNA, 30 bp, Artificial Sequence
  Synthetic oligonucleotide
gatacccgcagccactaacacgccaatgaa

SEQ ID NO: 440943 - DNA, 30 bp, Artificial Sequence
  Synthetic oligonucleotide
tatggtttatggtacgttaggcgcaatgaa

SEQ ID NO: 440944 - DNA, 30 bp, Artificial Sequence
  Synthetic oligonucleotide
cattgcgcttcgattctaatacagaatgaa

SEQ ID NO: 440945 - DNA, 30 bp, Artificial Sequence
  Synthetic oligonucleotide
ttaacgagccctgggcagggctcgaatgaa

SEQ ID NO: 440946 - DNA, 30 bp, Artificial Sequence
  Synthetic oligonucleotide
gtatgtgtaaaaataaccgggcataatgaa

SEQ ID NO: 440947 - DNA, 30 bp, Artificial Sequence
  Synthetic oligonucleotide
catttaatcacagtgcggtaatctaatgaa

SEQ ID NO: 440948 - DNA, 29 bp, Artificial Sequence
  Synthetic oligonucleotide
gtcttcttagggaatgcgcgattaatgaa

SEQ ID NO: 440949 - DNA, 30 bp, Artificial Sequence
  Synthetic oligonucleotide
agataccgtatggtgtctacataacatgaa

SEQ ID NO: 440950 - DNA, 30 bp, Artificial Sequence
  Synthetic oligonucleotide
gttgggtgtgttgcgggtaggccacatgaa

SEQ ID NO: 440951 - DNA, 30 bp, Artificial Sequence
  Synthetic oligonucleotide
ggcagcgatgcacattacgaactacatgaa

SEQ ID NO: 440952 - DNA, 30 bp, Artificial Sequence
  Synthetic oligonucleotide
gacggaccatttgtgaattaatgccatgaa

SEQ ID NO: 440953 - DNA, 30 bp, Artificial Sequence
  Synthetic oligonucleotide
ataagctcttatagttgcttctagcatgaa

SEQ ID NO: 440954 - DNA, 30 bp, Artificial Sequence
  Synthetic oligonucleotide
ttttaggtacattttgctccatccgatgaa

SEQ ID NO: 440955 - DNA, 30 bp, Artificial Sequence
  Synthetic oligonucleotide
caccaggcagttttcggtcgttgggatgaa

SEQ ID NO: 440956 - DNA, 30 bp, Artificial Sequence
  Synthetic oligonucleotide
atacttagcgcggccgacaccactgatgaa

SEQ ID NO: 440957 - DNA, 30 bp, Artificial Sequence
  Synthetic oligonucleotide
atcggaaaccttaatgctggggctgatgaa

SEQ ID NO: 440958 - DNA, 30 bp, Artificial Sequence
  Synthetic oligonucleotide
atcagatgtgagctaaaaagcagtgatgaa

SEQ ID NO: 440959 - DNA, 30 bp, Artificial Sequence
  Synthetic oligonucleotide
taactggccaatggggtcctttgtgatgaa

SEQ ID NO: 440960 - DNA, 30 bp, Artificial Sequence
  Synthetic oligonucleotide
agcgcctttcgtgcgtaacgtttatatgaa

SEQ ID NO: 440961 - DNA, 30 bp, Artificial Sequence
  Synthetic oligonucleotide
tgctacgtttacaaaatacgttgctatgaa

SEQ ID NO: 440962 - DNA, 30 bp, Artificial Sequence
  Synthetic oligonucleotide
agtttcaccggattcgctggctcgtatgaa

SEQ ID NO: 440963 - DNA, 30 bp, Artificial Sequence
  Synthetic oligonucleotide
tcggttgaccgcctatagagaatgtatgaa

SEQ ID NO: 440964 - DNA, 30 bp, Artificial Sequence
  Synthetic oligonucleotide
ttaacttggtgacgtgtagaagtgtatgaa

SEQ ID NO: 440965 - DNA, 30 bp, Artificial Sequence
  Synthetic oligonucleotide
gtttggcgcttggcttaaataatttatgaa

SEQ ID NO: 440966 - DNA, 30 bp, Artificial Sequence
  Synthetic oligonucleotide
aaatatcagatggtgtgcctcgtttatgaa

SEQ ID NO: 440967 - DNA, 30 bp, Artificial Sequence
  Synthetic oligonucleotide
acctctgagctgtgcagtcttcaaactgaa

SEQ ID NO: 440968 - DNA, 30 bp, Artificial Sequence
  Synthetic oligonucleotide
taggggtgctaacgccgttagtaaactgaa

SEQ ID NO: 440969 - DNA, 30 bp, Artificial Sequence
  Synthetic oligonucleotide
tcatattctcacggaaaagccgcaactgaa

SEQ ID NO: 440970 - DNA, 30 bp, Artificial Sequence
  Synthetic oligonucleotide
gcgcgggctacaccagttgatgcaactgaa

SEQ ID NO: 440971 - DNA, 30 bp, Artificial Sequence
  Synthetic oligonucleotide
atattcatccgatgaccctttatcactgaa

SEQ ID NO: 440972 - DNA, 30 bp, Artificial Sequence
  Synthetic oligonucleotide
gtggaagctccagtgggtatgctcactgaa

SEQ ID NO: 440973 - DNA, 30 bp, Artificial Sequence
  Synthetic oligonucleotide
agactctcatgtgggcgtctctggactgaa

SEQ ID NO: 440974 - DNA, 30 bp, Artificial Sequence
  Synthetic oligonucleotide
gactgcagtatctcgaaagtaactactgaa

SEQ ID NO: 440975 - DNA, 30 bp, Artificial Sequence
  Synthetic oligonucleotide
gtacgatcggtcgtagcatggactactgaa

SEQ ID NO: 440976 - DNA, 30 bp, Artificial Sequence
  Synthetic oligonucleotide
agcacgagtagatgcgactgcattactgaa

SEQ ID NO: 440977 - DNA, 30 bp, Artificial Sequence
  Synthetic oligonucleotide
gtggttggatctagacgacagtaacctgaa

SEQ ID NO: 440978 - DNA, 30 bp, Artificial Sequence
  Synthetic oligonucleotide
aagaccgtgcaattggtaagaccacctgaa

SEQ ID NO: 440979 - DNA, 30 bp, Artificial Sequence
  Synthetic oligonucleotide
gccattacctctgcgagagtcctacctgaa

SEQ ID NO: 440980 - DNA, 31 bp, Artificial Sequence
  Synthetic oligonucleotide
aggccccggcagacatggcaggtaccctgaa

SEQ ID NO: 440981 - DNA, 30 bp, Artificial Sequence
  Synthetic oligonucleotide
ctacttgtctataaagtagtgatccctgaa

SEQ ID NO: 440982 - DNA, 30 bp, Artificial Sequence
  Synthetic oligonucleotide
gacgggcacgaagtctctatagagcctgaa

SEQ ID NO: 440983 - DNA, 30 bp, Artificial Sequence
  Synthetic oligonucleotide
ctagagcgcatcgcgccttatggtcctgaa

SEQ ID NO: 440984 - DNA, 30 bp, Artificial Sequence
  Synthetic oligonucleotide
cattcaccgtgggtagtggcttgtcctgaa

SEQ ID NO: 440985 - DNA, 30 bp, Artificial Sequence
  Synthetic oligonucleotide
cacagctcaaggcacttgttttttcctgaa

SEQ ID NO: 440986 - DNA, 30 bp, Artificial Sequence
  Synthetic oligonucleotide
agcagattaccttaggaggttgaagctgaa

SEQ ID NO: 440987 - DNA, 30 bp, Artificial Sequence
  Synthetic oligonucleotide
aatcatttacctaggttttgataagctgaa

SEQ ID NO: 440988 - DNA, 30 bp, Artificial Sequence
  Synthetic oligonucleotide
ttgcctggcagacgcagagagttagctgaa

SEQ ID NO: 440989 - DNA, 30 bp, Artificial Sequence
  Synthetic oligonucleotide
tgcattttataatttaaacttaacgctgaa

SEQ ID NO: 440990 - DNA, 30 bp, Artificial Sequence
  Synthetic oligonucleotide
accgtccgtgccagacatggacacgctgaa

SEQ ID NO: 440991 - DNA, 30 bp, Artificial Sequence
  Synthetic oligonucleotide
ttcttgactacgaaacgttaggacgctgaa

SEQ ID NO: 440992 - DNA, 30 bp, Artificial Sequence
  Synthetic oligonucleotide
cgaacagggcctaaaagacatgaggctgaa

SEQ ID NO: 440993 - DNA, 30 bp, Artificial Sequence
  Synthetic oligonucleotide
gcccaagaaaccggtggatatgcggctgaa

SEQ ID NO: 440994 - DNA, 30 bp, Artificial Sequence
  Synthetic oligonucleotide
tgctgttttaaatttactataagggctgaa

SEQ ID NO: 440995 - DNA, 30 bp, Artificial Sequence
  Synthetic oligonucleotide
cttttcatccacgatcatatcctggctgaa

SEQ ID NO: 440996 - DNA, 30 bp, Artificial Sequence
  Synthetic oligonucleotide
cggtctctgcatatggctctcgctgctgaa

SEQ ID NO: 440997 - DNA, 30 bp, Artificial Sequence
  Synthetic oligonucleotide
tgttagggtccaaaaggattagaatctgaa

SEQ ID NO: 440998 - DNA, 30 bp, Artificial Sequence
  Synthetic oligonucleotide
aaattaaaagatgaccctagttgcagtgaa

SEQ ID NO: 440999 - DNA, 30 bp, Artificial Sequence
  Synthetic oligonucleotide
cggatatacggcatctcgcataggagtgaa

SEQ ID NO: 441000 - DNA, 30 bp, Artificial Sequence
  Synthetic oligonucleotide
gtggtttgattttgggatcgctggagtgaa

SEQ ID NO: 441001 - DNA, 30 bp, Artificial Sequence
  Synthetic oligonucleotide
ataaaatatattgctcgcagtcatagtgaa

SEQ ID NO: 441002 - DNA, 30 bp, Artificial Sequence
  Synthetic oligonucleotide
gttcaaaacgtttccctcaacgctagtgaa

SEQ ID NO: 441003 - DNA, 30 bp, Artificial Sequence
  Synthetic oligonucleotide
ggagcgcgtctggtgtgataacgtagtgaa

SEQ ID NO: 441004 - DNA, 30 bp, Artificial Sequence
  Synthetic oligonucleotide
gcccggtatcgtctgccccacattagtgaa

SEQ ID NO: 441005 - DNA, 30 bp, Artificial Sequence
  Synthetic oligonucleotide
cgggatctctcgaccggccctatacgtgaa

SEQ ID NO: 441006 - DNA, 30 bp, Artificial Sequence
  Synthetic oligonucleotide
atagcttttgtgctagggatgatccgtgaa

SEQ ID NO: 441007 - DNA, 30 bp, Artificial Sequence
  Synthetic oligonucleotide
ttggcttcgaaacgcagatacgcgcgtgaa

SEQ ID NO: 441008 - DNA, 30 bp, Artificial Sequence
  Synthetic oligonucleotide
agacgtcaggcagtttggcaacatcgtgaa

SEQ ID NO: 441009 - DNA, 30 bp, Artificial Sequence
  Synthetic oligonucleotide
cgaccggttagcgggtcgtgaattcgtgaa

SEQ ID NO: 441010 - DNA, 30 bp, Artificial Sequence
  Synthetic oligonucleotide
ccccgtgaataacgatcgaagtttcgtgaa

SEQ ID NO: 441011 - DNA, 30 bp, Artificial Sequence
  Synthetic oligonucleotide
tagggaggctgggggacaggcgcaggtgaa

SEQ ID NO: 441012 - DNA, 30 bp, Artificial Sequence
  Synthetic oligonucleotide
ccgcgagtgtatttttcctggtcaggtgaa

SEQ ID NO: 441013 - DNA, 30 bp, Artificial Sequence
  Synthetic oligonucleotide
ctggcgcttaaaagcccgtagaagggtgaa

SEQ ID NO: 441014 - DNA, 30 bp, Artificial Sequence
  Synthetic oligonucleotide
atcggtcgctgcgtgaagcaatagggtgaa

SEQ ID NO: 441015 - DNA, 30 bp, Artificial Sequence
  Synthetic oligonucleotide
ttcccgaacatgggcatagctgcgggtgaa

SEQ ID NO: 441016 - DNA, 30 bp, Artificial Sequence
  Synthetic oligonucleotide
caatctcttattcatttaacgatgggtgaa

SEQ ID NO: 441017 - DNA, 30 bp, Artificial Sequence
  Synthetic oligonucleotide
tgcagtttacgtaggatgtaccatggtgaa

SEQ ID NO: 441018 - DNA, 30 bp, Artificial Sequence
  Synthetic oligonucleotide
gaatccaacggatgcatggatggtggtgaa

SEQ ID NO: 441019 - DNA, 30 bp, Artificial Sequence
  Synthetic oligonucleotide
agcggggcatctcacgtgttaccatgtgaa

SEQ ID NO: 441020 - DNA, 30 bp, Artificial Sequence
  Synthetic oligonucleotide
cactgctcaggagaagtcactctatgtgaa

SEQ ID NO: 441021 - DNA, 30 bp, Artificial Sequence
  Synthetic oligonucleotide
gatggagttctcgcttcggcggtatgtgaa

SEQ ID NO: 441022 - DNA, 30 bp, Artificial Sequence
  Synthetic oligonucleotide
agtgtacatgtgcacgtagttagaattgaa

SEQ ID NO: 441023 - DNA, 30 bp, Artificial Sequence
  Synthetic oligonucleotide
gccctgtgttcatatcgttaacacattgaa

SEQ ID NO: 441024 - DNA, 30 bp, Artificial Sequence
  Synthetic oligonucleotide
tgccgcgtctcagtgcattcactcattgaa

SEQ ID NO: 441025 - DNA, 30 bp, Artificial Sequence
  Synthetic oligonucleotide
atcactcaagtattggaataactgattgaa

SEQ ID NO: 441026 - DNA, 30 bp, Artificial Sequence
  Synthetic oligonucleotide
aaacagtcacgacagaatacgaatattgaa

SEQ ID NO: 441027 - DNA, 30 bp, Artificial Sequence
  Synthetic oligonucleotide
acggcactcagcgaccctgtttatattgaa

SEQ ID NO: 441028 - DNA, 30 bp, Artificial Sequence
  Synthetic oligonucleotide
gaatgtccgttggtgactctgccccttgaa

SEQ ID NO: 441029 - DNA, 30 bp, Artificial Sequence
  Synthetic oligonucleotide
tctaccagtgcaggcattgcgatccttgaa

SEQ ID NO: 441030 - DNA, 30 bp, Artificial Sequence
  Synthetic oligonucleotide
agtgcctgcaaagacgcaggaacgcttgaa

SEQ ID NO: 441031 - DNA, 30 bp, Artificial Sequence
  Synthetic oligonucleotide
ggagtgacatgcgcacgctcacatcttgaa

SEQ ID NO: 441032 - DNA, 30 bp, Artificial Sequence
  Synthetic oligonucleotide
agaatcgacacaattcgtttgtatcttgaa

SEQ ID NO: 441033 - DNA, 30 bp, Artificial Sequence
  Synthetic oligonucleotide
atcaacgcttacggtgagactggcgttgaa

SEQ ID NO: 441034 - DNA, 30 bp, Artificial Sequence
  Synthetic oligonucleotide
acccgctagctgaacgcacagaaggttgaa

SEQ ID NO: 441035 - DNA, 30 bp, Artificial Sequence
  Synthetic oligonucleotide
ggattatgtgggaaatttttctaggttgaa

SEQ ID NO: 441036 - DNA, 30 bp, Artificial Sequence
  Synthetic oligonucleotide
ataagtggtagacaagcaacataatttgaa

SEQ ID NO: 441037 - DNA, 30 bp, Artificial Sequence
  Synthetic oligonucleotide
tggataggtttagtctcgggctcatttgaa

SEQ ID NO: 441038 - DNA, 30 bp, Artificial Sequence
  Synthetic oligonucleotide
caaagaacgctctttaggagggtatttgaa

SEQ ID NO: 441039 - DNA, 30 bp, Artificial Sequence
  Synthetic oligonucleotide
tccgcttcaaaatgccgcgtcaactttgaa

SEQ ID NO: 441040 - DNA, 30 bp, Artificial Sequence
  Synthetic oligonucleotide
gtaataagaacatcgcgcaggtcctttgaa

SEQ ID NO: 441041 - DNA, 30 bp, Artificial Sequence
  Synthetic oligonucleotide
gccatcaaaatcgaattacgcgattttgaa

SEQ ID NO: 441042 - DNA, 30 bp, Artificial Sequence
  Synthetic oligonucleotide
gaatattgcatatccgtatacagttttgaa

SEQ ID NO: 441043 - DNA, 30 bp, Artificial Sequence
  Synthetic oligonucleotide
caggtgggggttgaggcaagcatttttgaa

SEQ ID NO: 441044 - DNA, 30 bp, Artificial Sequence
  Synthetic oligonucleotide
attcacccttcggttgttcggatttttgaa

SEQ ID NO: 441045 - DNA, 30 bp, Artificial Sequence
  Synthetic oligonucleotide
gccgatataacgttgagcaggaaaaaataa

SEQ ID NO: 441046 - DNA, 30 bp, Artificial Sequence
  Synthetic oligonucleotide
tatgctcagcgacagcacgcataaaaataa

SEQ ID NO: 441047 - DNA, 30 bp, Artificial Sequence
  Synthetic oligonucleotide
atgttaaatttatcttcgacgctaaaataa

SEQ ID NO: 441048 - DNA, 30 bp, Artificial Sequence
  Synthetic oligonucleotide
tttgcactctgacggctcagtaccaaataa

SEQ ID NO: 441049 - DNA, 30 bp, Artificial Sequence
  Synthetic oligonucleotide
gttctattgatgacgcacagccccaaataa

SEQ ID NO: 441050 - DNA, 30 bp, Artificial Sequence
  Synthetic oligonucleotide
ggtcctcccttagctgccagcgccaaataa

SEQ ID NO: 441051 - DNA, 30 bp, Artificial Sequence
  Synthetic oligonucleotide
tggcattgttcatcaacactagtgaaataa

SEQ ID NO: 441052 - DNA, 30 bp, Artificial Sequence
  Synthetic oligonucleotide
gcacattgaattcagatatccgtgaaataa

SEQ ID NO: 441053 - DNA, 30 bp, Artificial Sequence
  Synthetic oligonucleotide
actcaattagttacattcaataataaataa

SEQ ID NO: 441054 - DNA, 30 bp, Artificial Sequence
  Synthetic oligonucleotide
ataggaaatccaaccgaggggtcacaataa

SEQ ID NO: 441055 - DNA, 30 bp, Artificial Sequence
  Synthetic oligonucleotide
atgatggctctaggaaatggctaccaataa

SEQ ID NO: 441056 - DNA, 30 bp, Artificial Sequence
  Synthetic oligonucleotide
attggtagacgctctttttccacgcaataa

SEQ ID NO: 441057 - DNA, 30 bp, Artificial Sequence
  Synthetic oligonucleotide
gttctagcaggattggtaggatttcaataa

SEQ ID NO: 441058 - DNA, 30 bp, Artificial Sequence
  Synthetic oligonucleotide
acagttggtggcgaggccgccaaagaataa

SEQ ID NO: 441059 - DNA, 30 bp, Artificial Sequence
  Synthetic oligonucleotide
ctcgcattatgaactatcgtagaagaataa

SEQ ID NO: 441060 - DNA, 30 bp, Artificial Sequence
  Synthetic oligonucleotide
ggcgtcactccgtatagcgcagcagaataa

SEQ ID NO: 441061 - DNA, 30 bp, Artificial Sequence
  Synthetic oligonucleotide
atttccatacaattataggtattagaataa

SEQ ID NO: 441062 - DNA, 30 bp, Artificial Sequence
  Synthetic oligonucleotide
cagttcacatagcgggattggaacgaataa

SEQ ID NO: 441063 - DNA, 30 bp, Artificial Sequence
  Synthetic oligonucleotide
attcgtttagtgtctcctactaccgaataa

SEQ ID NO: 441064 - DNA, 30 bp, Artificial Sequence
  Synthetic oligonucleotide
ctatctgtaaagtaacttagggccgaataa

SEQ ID NO: 441065 - DNA, 30 bp, Artificial Sequence
  Synthetic oligonucleotide
gagacgttgttcatgacctagtctgaataa

SEQ ID NO: 441066 - DNA, 30 bp, Artificial Sequence
  Synthetic oligonucleotide
caaatgcgggcttcctcatttacataataa

SEQ ID NO: 441067 - DNA, 30 bp, Artificial Sequence
  Synthetic oligonucleotide
atggtgttccatagtgcgctcgcataataa

SEQ ID NO: 441068 - DNA, 30 bp, Artificial Sequence
  Synthetic oligonucleotide
gccttgcagaagtttacgcggttataataa

SEQ ID NO: 441069 - DNA, 30 bp, Artificial Sequence
  Synthetic oligonucleotide
agtcggtagatagccggagtcacctaataa

SEQ ID NO: 441070 - DNA, 30 bp, Artificial Sequence
  Synthetic oligonucleotide
actctacggcggacttaaagtgcctaataa

SEQ ID NO: 441071 - DNA, 30 bp, Artificial Sequence
  Synthetic oligonucleotide
gggtcccatattagacaccaagtctaataa

SEQ ID NO: 441072 - DNA, 30 bp, Artificial Sequence
  Synthetic oligonucleotide
taaccgaatgcggattatatatcgtaataa

SEQ ID NO: 441073 - DNA, 30 bp, Artificial Sequence
  Synthetic oligonucleotide
gtcgttatttacagtaggtaggtgtaataa

SEQ ID NO: 441074 - DNA, 30 bp, Artificial Sequence
  Synthetic oligonucleotide
atctagtttgtgtattggctattgtaataa

SEQ ID NO: 441075 - DNA, 30 bp, Artificial Sequence
  Synthetic oligonucleotide
actatcctgagctgttattagttgtaataa

SEQ ID NO: 441076 - DNA, 30 bp, Artificial Sequence
  Synthetic oligonucleotide
gtgatcgcagcgactggtgctgattaataa

SEQ ID NO: 441077 - DNA, 30 bp, Artificial Sequence
  Synthetic oligonucleotide
aatcattactccgcacaatggccgacataa

SEQ ID NO: 441078 - DNA, 30 bp, Artificial Sequence
  Synthetic oligonucleotide
aatcaacgtgggttgtattccatgacataa

SEQ ID NO: 441079 - DNA, 30 bp, Artificial Sequence
  Synthetic oligonucleotide
gataccaataccaatagcctatctacataa

SEQ ID NO: 441080 - DNA, 30 bp, Artificial Sequence
  Synthetic oligonucleotide
atgtatcgagccgttcctacgcgtacataa

SEQ ID NO: 441081 - DNA, 30 bp, Artificial Sequence
  Synthetic oligonucleotide
gtaacttagaggtagatctgctaaccataa

SEQ ID NO: 441082 - DNA, 30 bp, Artificial Sequence
  Synthetic oligonucleotide
tctgtggggtatggctccggaaacccataa

SEQ ID NO: 441083 - DNA, 30 bp, Artificial Sequence
  Synthetic oligonucleotide
gtgtcatgaggtatatctgcagacccataa

SEQ ID NO: 441084 - DNA, 30 bp, Artificial Sequence
  Synthetic oligonucleotide
gaccctgggcacgaggttaaagccccataa

SEQ ID NO: 441085 - DNA, 30 bp, Artificial Sequence
  Synthetic oligonucleotide
acccgggtgactacgaggcatgacgcataa

SEQ ID NO: 441086 - DNA, 30 bp, Artificial Sequence
  Synthetic oligonucleotide
gccagggtccatcttcactggttggcataa

SEQ ID NO: 441087 - DNA, 30 bp, Artificial Sequence
  Synthetic oligonucleotide
gaaagacggacaggtttaacacgtgcataa

SEQ ID NO: 441088 - DNA, 30 bp, Artificial Sequence
  Synthetic oligonucleotide
cggggggcgtagcggtgggcgatatcataa

SEQ ID NO: 441089 - DNA, 30 bp, Artificial Sequence
  Synthetic oligonucleotide
cccctcaattcacatgtgttttactcataa

SEQ ID NO: 441090 - DNA, 31 bp, Artificial Sequence
  Synthetic oligonucleotide
cacgtacactgactggatggtccagtcataa

SEQ ID NO: 441091 - DNA, 30 bp, Artificial Sequence
  Synthetic oligonucleotide
gtccgaagcgttacggccctgcggtcataa

SEQ ID NO: 441092 - DNA, 30 bp, Artificial Sequence
  Synthetic oligonucleotide
catgggagcagtataggagaggcttcataa

SEQ ID NO: 441093 - DNA, 30 bp, Artificial Sequence
  Synthetic oligonucleotide
agcctatacggtgcagttctcgaaagataa

SEQ ID NO: 441094 - DNA, 30 bp, Artificial Sequence
  Synthetic oligonucleotide
gaaacggctctgaagtccagcttaagataa

SEQ ID NO: 441095 - DNA, 31 bp, Artificial Sequence
  Synthetic oligonucleotide
gggtgaacccggatcgccgccgcacagataa

SEQ ID NO: 441096 - DNA, 30 bp, Artificial Sequence
  Synthetic oligonucleotide
gaaccgcatgtcgcgcccttttacagataa

SEQ ID NO: 441097 - DNA, 30 bp, Artificial Sequence
  Synthetic oligonucleotide
ggatattctttgcctcagatattcagataa

SEQ ID NO: 441098 - DNA, 30 bp, Artificial Sequence
  Synthetic oligonucleotide
gaaatgcgagtgcctgttgagttcagataa

SEQ ID NO: 441099 - DNA, 30 bp, Artificial Sequence
  Synthetic oligonucleotide
gagttagatcaacccatttaggggagataa

SEQ ID NO: 441100 - DNA, 30 bp, Artificial Sequence
  Synthetic oligonucleotide
gggcattacgggttgcacccggggagataa

SEQ ID NO: 441101 - DNA, 30 bp, Artificial Sequence
  Synthetic oligonucleotide
cgcctaggtgatacttcatttaatagataa

SEQ ID NO: 441102 - DNA, 30 bp, Artificial Sequence
  Synthetic oligonucleotide
ccggcaaatgtattatgctcatatagataa

SEQ ID NO: 441103 - DNA, 30 bp, Artificial Sequence
  Synthetic oligonucleotide
attttcacttagtccatagcgccacgataa

SEQ ID NO: 441104 - DNA, 30 bp, Artificial Sequence
  Synthetic oligonucleotide
cagcagtaatggatgggctaaggacgataa

SEQ ID NO: 441105 - DNA, 30 bp, Artificial Sequence
  Synthetic oligonucleotide
ggacgtagttagctcattcttgagcgataa

SEQ ID NO: 441106 - DNA, 30 bp, Artificial Sequence
  Synthetic oligonucleotide
tattgccattatctttagtcatggcgataa

SEQ ID NO: 441107 - DNA, 30 bp, Artificial Sequence
  Synthetic oligonucleotide
gtagggctctcgctcgacgaacgtcgataa

SEQ ID NO: 441108 - DNA, 30 bp, Artificial Sequence
  Synthetic oligonucleotide
gtctatgccataacgtgaaagcaaggataa

SEQ ID NO: 441109 - DNA, 30 bp, Artificial Sequence
  Synthetic oligonucleotide
cataagctatgcaacattgtttcaggataa

SEQ ID NO: 441110 - DNA, 30 bp, Artificial Sequence
  Synthetic oligonucleotide
aaatccgagtcacccgcctgtagaggataa

SEQ ID NO: 441111 - DNA, 30 bp, Artificial Sequence
  Synthetic oligonucleotide
agtgggccgtgggcagagcccgtcggataa

SEQ ID NO: 441112 - DNA, 30 bp, Artificial Sequence
  Synthetic oligonucleotide
ttcggtcctttttgtgggatgttcggataa

SEQ ID NO: 441113 - DNA, 30 bp, Artificial Sequence
  Synthetic oligonucleotide
ggcaccattgcaaaaagtactttcggataa

SEQ ID NO: 441114 - DNA, 30 bp, Artificial Sequence
  Synthetic oligonucleotide
tatttaatgtcctggtaggtatagggataa

SEQ ID NO: 441115 - DNA, 30 bp, Artificial Sequence
  Synthetic oligonucleotide
ctagcgaaggatgtatcatacacgggataa

SEQ ID NO: 441116 - DNA, 30 bp, Artificial Sequence
  Synthetic oligonucleotide
agtgttctgggagtcgggcgtttgggataa

SEQ ID NO: 441117 - DNA, 30 bp, Artificial Sequence
  Synthetic oligonucleotide
aaagcgcccgactgtaaccgtgcatgataa

SEQ ID NO: 441118 - DNA, 30 bp, Artificial Sequence
  Synthetic oligonucleotide
gggggctaggtggaaaggaatggatgataa

SEQ ID NO: 441119 - DNA, 30 bp, Artificial Sequence
  Synthetic oligonucleotide
ttcaagccggctctattttccatatgataa

SEQ ID NO: 441120 - DNA, 30 bp, Artificial Sequence
  Synthetic oligonucleotide
gtcgctacggacggtacgccgtactgataa

SEQ ID NO: 441121 - DNA, 30 bp, Artificial Sequence
  Synthetic oligonucleotide
cccggctaccaaatcctttgtcgctgataa

SEQ ID NO: 441122 - DNA, 30 bp, Artificial Sequence
  Synthetic oligonucleotide
ttcttaggtttgggtcgctggaagtgataa

SEQ ID NO: 441123 - DNA, 30 bp, Artificial Sequence
  Synthetic oligonucleotide
ttgtactaatgtgaagcatacctgtgataa

SEQ ID NO: 441124 - DNA, 30 bp, Artificial Sequence
  Synthetic oligonucleotide
gcgctcgtatgactgtattgtcattgataa

SEQ ID NO: 441125 - DNA, 30 bp, Artificial Sequence
  Synthetic oligonucleotide
ctcaattacaagtggtcctcggcttgataa

SEQ ID NO: 441126 - DNA, 30 bp, Artificial Sequence
  Synthetic oligonucleotide
ttgttagcaagaaagcgaaggtcttgataa

SEQ ID NO: 441127 - DNA, 30 bp, Artificial Sequence
  Synthetic oligonucleotide
ttaaattgagcgccgttttacagttgataa

SEQ ID NO: 441128 - DNA, 30 bp, Artificial Sequence
  Synthetic oligonucleotide
cgccggcatagtcggggcaaacgttgataa

SEQ ID NO: 441129 - DNA, 30 bp, Artificial Sequence
  Synthetic oligonucleotide
cacccccgtggggacacaatactttgataa

SEQ ID NO: 441130 - DNA, 30 bp, Artificial Sequence
  Synthetic oligonucleotide
atcatagtctgttggatctggctttgataa

SEQ ID NO: 441131 - DNA, 30 bp, Artificial Sequence
  Synthetic oligonucleotide
tcccggaaacttttagcgacattttgataa

SEQ ID NO: 441132 - DNA, 30 bp, Artificial Sequence
  Synthetic oligonucleotide
tagagactgtccacgggcggataaatataa

SEQ ID NO: 441133 - DNA, 30 bp, Artificial Sequence
  Synthetic oligonucleotide
tggtgggcgcctttcataagcgcaatataa

SEQ ID NO: 441134 - DNA, 30 bp, Artificial Sequence
  Synthetic oligonucleotide
taaataatgcggtccagatttaacatataa

SEQ ID NO: 441135 - DNA, 30 bp, Artificial Sequence
  Synthetic oligonucleotide
tgaatagttgcaaacggcatgtacatataa

SEQ ID NO: 441136 - DNA, 30 bp, Artificial Sequence
  Synthetic oligonucleotide
tgcgttatttgtgttaagaggcccatataa

SEQ ID NO: 441137 - DNA, 30 bp, Artificial Sequence
  Synthetic oligonucleotide
tctgtgagtccacccgagcagccgatataa

SEQ ID NO: 441138 - DNA, 30 bp, Artificial Sequence
  Synthetic oligonucleotide
ggctttgggtatgggtggtgtaggatataa

SEQ ID NO: 441139 - DNA, 30 bp, Artificial Sequence
  Synthetic oligonucleotide
ttcgaggtcatggaggccattactatataa

SEQ ID NO: 441140 - DNA, 30 bp, Artificial Sequence
  Synthetic oligonucleotide
gcttatatgagtggtaaggccgctatataa

SEQ ID NO: 441141 - DNA, 30 bp, Artificial Sequence
  Synthetic oligonucleotide
cttttacaagcgagtcctgaccgtatataa

SEQ ID NO: 441142 - DNA, 29 bp, Artificial Sequence
  Synthetic oligonucleotide
ccgcaactcataagggcggggcgctataa

SEQ ID NO: 441143 - DNA, 30 bp, Artificial Sequence
  Synthetic oligonucleotide
attggccagcatggggctcatgcgctataa

SEQ ID NO: 441144 - DNA, 30 bp, Artificial Sequence
  Synthetic oligonucleotide
tccgcctctgagcggacctgcaggctataa

SEQ ID NO: 441145 - DNA, 30 bp, Artificial Sequence
  Synthetic oligonucleotide
tgtggaactcacggcaggtttactctataa

SEQ ID NO: 441146 - DNA, 30 bp, Artificial Sequence
  Synthetic oligonucleotide
agtactacgacgtatcaattccgagtataa

SEQ ID NO: 441147 - DNA, 30 bp, Artificial Sequence
  Synthetic oligonucleotide
agacacccaggactaactaagcgagtataa

SEQ ID NO: 441148 - DNA, 30 bp, Artificial Sequence
  Synthetic oligonucleotide
gtttacggctccggcctgctacaggtataa

SEQ ID NO: 441149 - DNA, 30 bp, Artificial Sequence
  Synthetic oligonucleotide
caaagcaggcgtttattataaagggtataa

SEQ ID NO: 441150 - DNA, 30 bp, Artificial Sequence
  Synthetic oligonucleotide
caagtcgttgatcagcacttattggtataa

SEQ ID NO: 441151 - DNA, 30 bp, Artificial Sequence
  Synthetic oligonucleotide
tagggcccaaatgtcgcacatgctgtataa

SEQ ID NO: 441152 - DNA, 30 bp, Artificial Sequence
  Synthetic oligonucleotide
ctaaaggtactagcctgcctaggtgtataa

SEQ ID NO: 441153 - DNA, 30 bp, Artificial Sequence
  Synthetic oligonucleotide
tcatctttttcaattaaacttaacttataa

SEQ ID NO: 441154 - DNA, 31 bp, Artificial Sequence
  Synthetic oligonucleotide
caaacatgtgtacgcgcagaaagccttataa

SEQ ID NO: 441155 - DNA, 30 bp, Artificial Sequence
  Synthetic oligonucleotide
gccgctgtatgtcggaggttatgcttataa

SEQ ID NO: 441156 - DNA, 30 bp, Artificial Sequence
  Synthetic oligonucleotide
ggttcctatgcctaagcgacgctgttataa

SEQ ID NO: 441157 - DNA, 30 bp, Artificial Sequence
  Synthetic oligonucleotide
aaccggtactcactccgatttactttataa

SEQ ID NO: 441158 - DNA, 30 bp, Artificial Sequence
  Synthetic oligonucleotide
agggttgacgttgcagattgaataaactaa

SEQ ID NO: 441159 - DNA, 30 bp, Artificial Sequence
  Synthetic oligonucleotide
cggtgacgatggatttgatgtgtcaactaa

SEQ ID NO: 441160 - DNA, 30 bp, Artificial Sequence
  Synthetic oligonucleotide
cagctgacgctgtacattgaagagaactaa

SEQ ID NO: 441161 - DNA, 30 bp, Artificial Sequence
  Synthetic oligonucleotide
gttataggccgcccacccggagggaactaa

SEQ ID NO: 441162 - DNA, 30 bp, Artificial Sequence
  Synthetic oligonucleotide
ggccccagcgtctggatcgttaaacactaa

SEQ ID NO: 441163 - DNA, 30 bp, Artificial Sequence
  Synthetic oligonucleotide
tttttggtgtacagcattgaacgacactaa

SEQ ID NO: 441164 - DNA, 30 bp, Artificial Sequence
  Synthetic oligonucleotide
taacgtttccgtagaaagatcacagactaa

SEQ ID NO: 441165 - DNA, 30 bp, Artificial Sequence
  Synthetic oligonucleotide
cacagctcagtgcgatgttaatcagactaa

SEQ ID NO: 441166 - DNA, 30 bp, Artificial Sequence
  Synthetic oligonucleotide
gtcagtgtattgcggatagctatcgactaa

SEQ ID NO: 441167 - DNA, 30 bp, Artificial Sequence
  Synthetic oligonucleotide
ccgctagcagagttctacaagtaggactaa

SEQ ID NO: 441168 - DNA, 30 bp, Artificial Sequence
  Synthetic oligonucleotide
ttcgggtgccaagggtttcctgcctactaa

SEQ ID NO: 441169 - DNA, 27 bp, Artificial Sequence
  Synthetic oligonucleotide
aaagctaggttttcagccatctactaa

SEQ ID NO: 441170 - DNA, 30 bp, Artificial Sequence
  Synthetic oligonucleotide
cgagaattaaattaattataggcgtactaa

SEQ ID NO: 441171 - DNA, 30 bp, Artificial Sequence
  Synthetic oligonucleotide
aaataactacacagctatgtcaattactaa

SEQ ID NO: 441172 - DNA, 30 bp, Artificial Sequence
  Synthetic oligonucleotide
tgtatgctgggtgggttccgtcattactaa

SEQ ID NO: 441173 - DNA, 30 bp, Artificial Sequence
  Synthetic oligonucleotide
gactgggttttgttgatatgtcattactaa

SEQ ID NO: 441174 - DNA, 30 bp, Artificial Sequence
  Synthetic oligonucleotide
tcaccataggaacctccgaagccttactaa

SEQ ID NO: 441175 - DNA, 30 bp, Artificial Sequence
  Synthetic oligonucleotide
ctgagctgatgtatgtaagggtcttactaa

SEQ ID NO: 441176 - DNA, 30 bp, Artificial Sequence
  Synthetic oligonucleotide
gaacattatcaggtggcagtaatttactaa

SEQ ID NO: 441177 - DNA, 30 bp, Artificial Sequence
  Synthetic oligonucleotide
cccgttcggttagaccttaaatcaacctaa

SEQ ID NO: 441178 - DNA, 30 bp, Artificial Sequence
  Synthetic oligonucleotide
agccgtaataagacgctggaatatacctaa

SEQ ID NO: 441179 - DNA, 30 bp, Artificial Sequence
  Synthetic oligonucleotide
ccccagcagctttcattctaggctacctaa

SEQ ID NO: 441180 - DNA, 30 bp, Artificial Sequence
  Synthetic oligonucleotide
tgaaagtatgctaccgcagcttctacctaa

SEQ ID NO: 441181 - DNA, 30 bp, Artificial Sequence
  Synthetic oligonucleotide
tattgccttcgttacggtcaacgtacctaa

SEQ ID NO: 441182 - DNA, 30 bp, Artificial Sequence
  Synthetic oligonucleotide
gtcctcgccataacaattcgacaaccctaa

SEQ ID NO: 441183 - DNA, 30 bp, Artificial Sequence
  Synthetic oligonucleotide
tacgcgcgttatgggaacgattgaccctaa

SEQ ID NO: 441184 - DNA, 30 bp, Artificial Sequence
  Synthetic oligonucleotide
gaccaatcaccgtgtatgccgcacgcctaa

SEQ ID NO: 441185 - DNA, 30 bp, Artificial Sequence
  Synthetic oligonucleotide
tcccggggcatgtgtataataagggcctaa

SEQ ID NO: 441186 - DNA, 30 bp, Artificial Sequence
  Synthetic oligonucleotide
gcatgcgcacgtatcggaaatagtgcctaa

SEQ ID NO: 441187 - DNA, 30 bp, Artificial Sequence
  Synthetic oligonucleotide
aagcatattattcgtgttaatccatcctaa

SEQ ID NO: 441188 - DNA, 30 bp, Artificial Sequence
  Synthetic oligonucleotide
aatatgtcatatggcagtcgcgtctcctaa

SEQ ID NO: 441189 - DNA, 30 bp, Artificial Sequence
  Synthetic oligonucleotide
taagaatacggtatagcatttgtctcctaa

SEQ ID NO: 441190 - DNA, 30 bp, Artificial Sequence
  Synthetic oligonucleotide
gattagcctcgaatggattcgtggtcctaa

SEQ ID NO: 441191 - DNA, 30 bp, Artificial Sequence
  Synthetic oligonucleotide
ttagggaccactcacatcgtcatttcctaa

SEQ ID NO: 441192 - DNA, 30 bp, Artificial Sequence
  Synthetic oligonucleotide
gcaatttgcaggtagtagatcctttcctaa

SEQ ID NO: 441193 - DNA, 30 bp, Artificial Sequence
  Synthetic oligonucleotide
gatatccatcctcgttaggcagcaagctaa

SEQ ID NO: 441194 - DNA, 30 bp, Artificial Sequence
  Synthetic oligonucleotide
tcttttatgctgggccttattataagctaa

SEQ ID NO: 441195 - DNA, 30 bp, Artificial Sequence
  Synthetic oligonucleotide
taacggctatcggcatttgtacagagctaa

SEQ ID NO: 441196 - DNA, 30 bp, Artificial Sequence
  Synthetic oligonucleotide
tacacacctaagcgagttctcaggagctaa

SEQ ID NO: 441197 - DNA, 30 bp, Artificial Sequence
  Synthetic oligonucleotide
gtcgacaagtttgctggcgagacacgctaa

SEQ ID NO: 441198 - DNA, 30 bp, Artificial Sequence
  Synthetic oligonucleotide
gtattcgtctatatacgttagcgacgctaa

SEQ ID NO: 441199 - DNA, 30 bp, Artificial Sequence
  Synthetic oligonucleotide
atagctatctcttctgtagactgacgctaa

SEQ ID NO: 441200 - DNA, 30 bp, Artificial Sequence
  Synthetic oligonucleotide
acaaactcgcccgcttcatgtatacgctaa

SEQ ID NO: 441201 - DNA, 30 bp, Artificial Sequence
  Synthetic oligonucleotide
gaagatatctaagatatgaatttacgctaa

SEQ ID NO: 441202 - DNA, 30 bp, Artificial Sequence
  Synthetic oligonucleotide
agggttctaaaaaacttttaacaccgctaa

SEQ ID NO: 441203 - DNA, 30 bp, Artificial Sequence
  Synthetic oligonucleotide
catgtagagggcgggatttcagcccgctaa

SEQ ID NO: 441204 - DNA, 30 bp, Artificial Sequence
  Synthetic oligonucleotide
ctggtgtgtgttatgagcaccatccgctaa

SEQ ID NO: 441205 - DNA, 30 bp, Artificial Sequence
  Synthetic oligonucleotide
tgcttcgtcggaattttggccaagcgctaa

SEQ ID NO: 441206 - DNA, 30 bp, Artificial Sequence
  Synthetic oligonucleotide
ggtagtggtgacccccctagaatgcgctaa

SEQ ID NO: 441207 - DNA, 30 bp, Artificial Sequence
  Synthetic oligonucleotide
caacctactcgggtgaacacggatcgctaa

SEQ ID NO: 441208 - DNA, 30 bp, Artificial Sequence
  Synthetic oligonucleotide
ggcagtagttcagcgtgtatttatcgctaa

SEQ ID NO: 441209 - DNA, 30 bp, Artificial Sequence
  Synthetic oligonucleotide
tccagcctcatatggagctagcgtcgctaa

SEQ ID NO: 441210 - DNA, 30 bp, Artificial Sequence
  Synthetic oligonucleotide
gaccttactccgattcttctgcaaggctaa

SEQ ID NO: 441211 - DNA, 30 bp, Artificial Sequence
  Synthetic oligonucleotide
gatctttagatttttattcgggacggctaa

SEQ ID NO: 441212 - DNA, 30 bp, Artificial Sequence
  Synthetic oligonucleotide
atccgggcagaagacgcagaatccggctaa

SEQ ID NO: 441213 - DNA, 30 bp, Artificial Sequence
  Synthetic oligonucleotide
tattaagctcctaaagcggaatgcggctaa

SEQ ID NO: 441214 - DNA, 30 bp, Artificial Sequence
  Synthetic oligonucleotide
tgctagagtgtatccgcatttttcggctaa

SEQ ID NO: 441215 - DNA, 30 bp, Artificial Sequence
  Synthetic oligonucleotide
gctttaattgacatagttggcaagggctaa

SEQ ID NO: 441216 - DNA, 30 bp, Artificial Sequence
  Synthetic oligonucleotide
gtccgggctaggtaggagttggagggctaa

SEQ ID NO: 441217 - DNA, 30 bp, Artificial Sequence
  Synthetic oligonucleotide
cagcgattgccgccataataccatggctaa

SEQ ID NO: 441218 - DNA, 30 bp, Artificial Sequence
  Synthetic oligonucleotide
caaatgggggatcgggggtcccctggctaa

SEQ ID NO: 441219 - DNA, 31 bp, Artificial Sequence
  Synthetic oligonucleotide
taagttagcagagaccgtcggacgtggctaa

SEQ ID NO: 441220 - DNA, 30 bp, Artificial Sequence
  Synthetic oligonucleotide
gagaaggagtggatggtcgtaaaatgctaa

SEQ ID NO: 441221 - DNA, 30 bp, Artificial Sequence
  Synthetic oligonucleotide
cctcagattcactcatccgacatatgctaa

SEQ ID NO: 441222 - DNA, 30 bp, Artificial Sequence
  Synthetic oligonucleotide
gccaattaaagtagtagctttacctgctaa

SEQ ID NO: 441223 - DNA, 30 bp, Artificial Sequence
  Synthetic oligonucleotide
aaagggttcatcataatcgctaagtgctaa

SEQ ID NO: 441224 - DNA, 30 bp, Artificial Sequence
  Synthetic oligonucleotide
aattgcggtttccatataattaattgctaa

SEQ ID NO: 441225 - DNA, 30 bp, Artificial Sequence
  Synthetic oligonucleotide
aagttcattggatatgcgcacgaaatctaa

SEQ ID NO: 441226 - DNA, 30 bp, Artificial Sequence
  Synthetic oligonucleotide
gaactggtagtgggttttttgtcaatctaa

SEQ ID NO: 441227 - DNA, 30 bp, Artificial Sequence
  Synthetic oligonucleotide
gccccattggcctgatttcagggaatctaa

SEQ ID NO: 441228 - DNA, 30 bp, Artificial Sequence
  Synthetic oligonucleotide
taccgttatcaaagcacttaatgaatctaa

SEQ ID NO: 441229 - DNA, 30 bp, Artificial Sequence
  Synthetic oligonucleotide
taaatcttacctaaataaggacccatctaa

SEQ ID NO: 441230 - DNA, 30 bp, Artificial Sequence
  Synthetic oligonucleotide
gcttcgatgtgataccgtaacctcatctaa

SEQ ID NO: 441231 - DNA, 30 bp, Artificial Sequence
  Synthetic oligonucleotide
gaaatggggtagggtcattcagagatctaa

SEQ ID NO: 441232 - DNA, 30 bp, Artificial Sequence
  Synthetic oligonucleotide
tgattagatcatgatatacagaatatctaa

SEQ ID NO: 441233 - DNA, 30 bp, Artificial Sequence
  Synthetic oligonucleotide
tgtagtacactggaataggaacctatctaa

SEQ ID NO: 441234 - DNA, 30 bp, Artificial Sequence
  Synthetic oligonucleotide
gccttattgtagcgatttcattctatctaa

SEQ ID NO: 441235 - DNA, 30 bp, Artificial Sequence
  Synthetic oligonucleotide
ggttgctcacaaagcttaccgtttatctaa

SEQ ID NO: 441236 - DNA, 30 bp, Artificial Sequence
  Synthetic oligonucleotide
gcgggcacattgagagtctgtagactctaa

SEQ ID NO: 441237 - DNA, 30 bp, Artificial Sequence
  Synthetic oligonucleotide
aaagcgatgtgtattcagtgttatctctaa

SEQ ID NO: 441238 - DNA, 30 bp, Artificial Sequence
  Synthetic oligonucleotide
tgcattagcctataaaatacctctctctaa

SEQ ID NO: 441239 - DNA, 30 bp, Artificial Sequence
  Synthetic oligonucleotide
actctcgatacatgaatgccctctctctaa

SEQ ID NO: 441240 - DNA, 30 bp, Artificial Sequence
  Synthetic oligonucleotide
ccgtaatataagctatgtctgagtctctaa

SEQ ID NO: 441241 - DNA, 30 bp, Artificial Sequence
  Synthetic oligonucleotide
tcacccaaaggtagaactttcattctctaa

SEQ ID NO: 441242 - DNA, 30 bp, Artificial Sequence
  Synthetic oligonucleotide
gcttctttaatgccatataacgttctctaa

SEQ ID NO: 441243 - DNA, 30 bp, Artificial Sequence
  Synthetic oligonucleotide
gatcttaggtgaccgtagccctttctctaa

SEQ ID NO: 441244 - DNA, 30 bp, Artificial Sequence
  Synthetic oligonucleotide
attttcctggcggtccagatgacagtctaa

SEQ ID NO: 441245 - DNA, 30 bp, Artificial Sequence
  Synthetic oligonucleotide
tatcagtgcattctcgtgctttgagtctaa

SEQ ID NO: 441246 - DNA, 30 bp, Artificial Sequence
  Synthetic oligonucleotide
acgtacgctggtgagaacgcaagcgtctaa

SEQ ID NO: 441247 - DNA, 30 bp, Artificial Sequence
  Synthetic oligonucleotide
accgcctcccccgtttttcatccggtctaa

SEQ ID NO: 441248 - DNA, 30 bp, Artificial Sequence
  Synthetic oligonucleotide
tagtaagctcctcagtcccgtggggtctaa

SEQ ID NO: 441249 - DNA, 30 bp, Artificial Sequence
  Synthetic oligonucleotide
gattttaacgtacaaggctatatggtctaa

SEQ ID NO: 441250 - DNA, 30 bp, Artificial Sequence
  Synthetic oligonucleotide
ccgttaaatcagtatgatgggctggtctaa

SEQ ID NO: 441251 - DNA, 30 bp, Artificial Sequence
  Synthetic oligonucleotide
tttctcaggacccgtggtacatatgtctaa

SEQ ID NO: 441252 - DNA, 30 bp, Artificial Sequence
  Synthetic oligonucleotide
tgctagggcagtgatgggttctctgtctaa

SEQ ID NO: 441253 - DNA, 30 bp, Artificial Sequence
  Synthetic oligonucleotide
ggccatagttcattggtgaaagttgtctaa

SEQ ID NO: 441254 - DNA, 30 bp, Artificial Sequence
  Synthetic oligonucleotide
aaaagatctaaatggtgcaaggttgtctaa

SEQ ID NO: 441255 - DNA, 30 bp, Artificial Sequence
  Synthetic oligonucleotide
tttgaccacacccgtatcgatgcattctaa

SEQ ID NO: 441256 - DNA, 30 bp, Artificial Sequence
  Synthetic oligonucleotide
gagctaggtagcttatacttcgacttctaa

SEQ ID NO: 441257 - DNA, 30 bp, Artificial Sequence
  Synthetic oligonucleotide
tctgtttaagtcatggcgatattcttctaa

SEQ ID NO: 441258 - DNA, 30 bp, Artificial Sequence
  Synthetic oligonucleotide
ctggactgtcgtactatgtgtttcttctaa

SEQ ID NO: 441259 - DNA, 30 bp, Artificial Sequence
  Synthetic oligonucleotide
actgcgcaatgtcggttgacgtagttctaa

SEQ ID NO: 441260 - DNA, 30 bp, Artificial Sequence
  Synthetic oligonucleotide
aaccgattaacggaacgcacgcggttctaa

SEQ ID NO: 441261 - DNA, 30 bp, Artificial Sequence
  Synthetic oligonucleotide
gtatcatatgtgggttccctgcggttctaa

SEQ ID NO: 441262 - DNA, 30 bp, Artificial Sequence
  Synthetic oligonucleotide
atcttcaaccataggcaacatgttttctaa

SEQ ID NO: 441263 - DNA, 30 bp, Artificial Sequence
  Synthetic oligonucleotide
gcttggactctgagttcggtgataaagtaa

SEQ ID NO: 441264 - DNA, 30 bp, Artificial Sequence
  Synthetic oligonucleotide
tggcgggtccgcttggtaccgcccaagtaa

SEQ ID NO: 441265 - DNA, 30 bp, Artificial Sequence
  Synthetic oligonucleotide
gccagctgtgcccccatagctgtcaagtaa

SEQ ID NO: 441266 - DNA, 30 bp, Artificial Sequence
  Synthetic oligonucleotide
ttctcgtacattcgcagcgctgtcaagtaa

SEQ ID NO: 441267 - DNA, 30 bp, Artificial Sequence
  Synthetic oligonucleotide
cgtaggtccctctggatttcggagaagtaa

SEQ ID NO: 441268 - DNA, 30 bp, Artificial Sequence
  Synthetic oligonucleotide
ccccgtgagtgacttaggcgatagaagtaa

SEQ ID NO: 441269 - DNA, 30 bp, Artificial Sequence
  Synthetic oligonucleotide
cggatacgcccccggtgcgatttgaagtaa

SEQ ID NO: 441270 - DNA, 30 bp, Artificial Sequence
  Synthetic oligonucleotide
gttgttctcttggataatcagaataagtaa

SEQ ID NO: 441271 - DNA, 31 bp, Artificial Sequence
  Synthetic oligonucleotide
gcactttctcaataagggtcctgataagtaa

SEQ ID NO: 441272 - DNA, 30 bp, Artificial Sequence
  Synthetic oligonucleotide
gataagtaaaacgcaggcctctataagtaa

SEQ ID NO: 441273 - DNA, 30 bp, Artificial Sequence
  Synthetic oligonucleotide
ggcattctaccataaggtctagttaagtaa

SEQ ID NO: 441274 - DNA, 30 bp, Artificial Sequence
  Synthetic oligonucleotide
acccactcccattcccgggagagacagtaa

SEQ ID NO: 441275 - DNA, 30 bp, Artificial Sequence
  Synthetic oligonucleotide
agggttcactcacggcatttttgacagtaa

SEQ ID NO: 441276 - DNA, 30 bp, Artificial Sequence
  Synthetic oligonucleotide
gtctaactaagcgtttttttagaccagtaa

SEQ ID NO: 441277 - DNA, 30 bp, Artificial Sequence
  Synthetic oligonucleotide
ccctgtaggccaaatcgcagcctccagtaa

SEQ ID NO: 441278 - DNA, 30 bp, Artificial Sequence
  Synthetic oligonucleotide
agacatttttatcttgatgatatgcagtaa

SEQ ID NO: 441279 - DNA, 30 bp, Artificial Sequence
  Synthetic oligonucleotide
ctgagcgccggttacaacctatatcagtaa

SEQ ID NO: 441280 - DNA, 30 bp, Artificial Sequence
  Synthetic oligonucleotide
ctacagatgtgcaagccttttggtcagtaa

SEQ ID NO: 441281 - DNA, 30 bp, Artificial Sequence
  Synthetic oligonucleotide
tatccgattctttcacgagcggaagagtaa

SEQ ID NO: 441282 - DNA, 30 bp, Artificial Sequence
  Synthetic oligonucleotide
acggaatacaagattcgtcaaatcgagtaa

SEQ ID NO: 441283 - DNA, 30 bp, Artificial Sequence
  Synthetic oligonucleotide
caatctcatagtcgggcgatacaatagtaa

SEQ ID NO: 441284 - DNA, 30 bp, Artificial Sequence
  Synthetic oligonucleotide
ctaggcccccaagggctgcttttatagtaa

SEQ ID NO: 441285 - DNA, 30 bp, Artificial Sequence
  Synthetic oligonucleotide
agttagtgacgccatacaggtgcctagtaa

SEQ ID NO: 441286 - DNA, 30 bp, Artificial Sequence
  Synthetic oligonucleotide
tgtggaaatccgatgcatgctttgtagtaa

SEQ ID NO: 441287 - DNA, 30 bp, Artificial Sequence
  Synthetic oligonucleotide
gagaccccccttgcgggttacaattagtaa

SEQ ID NO: 441288 - DNA, 30 bp, Artificial Sequence
  Synthetic oligonucleotide
taaaggaggccgccttagtatccttagtaa

SEQ ID NO: 441289 - DNA, 30 bp, Artificial Sequence
  Synthetic oligonucleotide
gatttacgttcgttaacccatgtttagtaa

SEQ ID NO: 441290 - DNA, 30 bp, Artificial Sequence
  Synthetic oligonucleotide
atttcggtgaggtataggtcggtaacgtaa

SEQ ID NO: 441291 - DNA, 30 bp, Artificial Sequence
  Synthetic oligonucleotide
cagataatagtcgatgtacttgtcacgtaa

SEQ ID NO: 441292 - DNA, 30 bp, Artificial Sequence
  Synthetic oligonucleotide
ggcgcagggttggtgttagcatagacgtaa

SEQ ID NO: 441293 - DNA, 30 bp, Artificial Sequence
  Synthetic oligonucleotide
gaaattcggctaacatctaaccttacgtaa

SEQ ID NO: 441294 - DNA, 30 bp, Artificial Sequence
  Synthetic oligonucleotide
tatccagatggaggttgcctactcccgtaa

SEQ ID NO: 441295 - DNA, 30 bp, Artificial Sequence
  Synthetic oligonucleotide
atctggattcttttcaaaattacgccgtaa

SEQ ID NO: 441296 - DNA, 30 bp, Artificial Sequence
  Synthetic oligonucleotide
caaccaggcatcgacgtgcgtatgccgtaa

SEQ ID NO: 441297 - DNA, 30 bp, Artificial Sequence
  Synthetic oligonucleotide
gaagtcttcttgcgtattatcgatccgtaa

SEQ ID NO: 441298 - DNA, 30 bp, Artificial Sequence
  Synthetic oligonucleotide
ctgcccttaactcgccatagtggtccgtaa

SEQ ID NO: 441299 - DNA, 30 bp, Artificial Sequence
  Synthetic oligonucleotide
tgacggcgtcgttttgaggacggagcgtaa

SEQ ID NO: 441300 - DNA, 30 bp, Artificial Sequence
  Synthetic oligonucleotide
tcgtgcgcactagtacatctgtccgcgtaa

SEQ ID NO: 441301 - DNA, 30 bp, Artificial Sequence
  Synthetic oligonucleotide
cttcgctgaatgacttttggccgcgcgtaa

SEQ ID NO: 441302 - DNA, 30 bp, Artificial Sequence
  Synthetic oligonucleotide
tctggtatttattacgcactacttgcgtaa

SEQ ID NO: 441303 - DNA, 30 bp, Artificial Sequence
  Synthetic oligonucleotide
tcagtaaataattgccttggccaatcgtaa

SEQ ID NO: 441304 - DNA, 30 bp, Artificial Sequence
  Synthetic oligonucleotide
ttacgacggtattttttatcttaatcgtaa

SEQ ID NO: 441305 - DNA, 30 bp, Artificial Sequence
  Synthetic oligonucleotide
attcacgatgcagtgaacttcacatcgtaa

SEQ ID NO: 441306 - DNA, 30 bp, Artificial Sequence
  Synthetic oligonucleotide
ctagtgactcagtactctcgaggatcgtaa

SEQ ID NO: 441307 - DNA, 30 bp, Artificial Sequence
  Synthetic oligonucleotide
tcgacggtttcttgtgagactacgtcgtaa

SEQ ID NO: 441308 - DNA, 30 bp, Artificial Sequence
  Synthetic oligonucleotide
gactaggaccgttcgtctccttggtcgtaa

SEQ ID NO: 441309 - DNA, 30 bp, Artificial Sequence
  Synthetic oligonucleotide
cgttgggagcggcactactagtgttcgtaa

SEQ ID NO: 441310 - DNA, 30 bp, Artificial Sequence
  Synthetic oligonucleotide
agagctaatggtaatgtcagcctttcgtaa

SEQ ID NO: 441311 - DNA, 30 bp, Artificial Sequence
  Synthetic oligonucleotide
acatccacctgattgccgccctcaaggtaa

SEQ ID NO: 441312 - DNA, 30 bp, Artificial Sequence
  Synthetic oligonucleotide
ttttcctagccccgctaaaaccgaaggtaa

SEQ ID NO: 441313 - DNA, 30 bp, Artificial Sequence
  Synthetic oligonucleotide
agagatttgccatttagcgatataaggtaa

SEQ ID NO: 441314 - DNA, 30 bp, Artificial Sequence
  Synthetic oligonucleotide
tcctttccgtatcgccagatcaacaggtaa

SEQ ID NO: 441315 - DNA, 30 bp, Artificial Sequence
  Synthetic oligonucleotide
cccgtgcaagcgcactgcgaacacaggtaa

SEQ ID NO: 441316 - DNA, 30 bp, Artificial Sequence
  Synthetic oligonucleotide
ataatgatgcaacgtcattccgacaggtaa

SEQ ID NO: 441317 - DNA, 31 bp, Artificial Sequence
  Synthetic oligonucleotide
atgttgtccttgccgtttcagatacaggtaa

SEQ ID NO: 441318 - DNA, 30 bp, Artificial Sequence
  Synthetic oligonucleotide
ggcgcggtggtaatagttaggttgaggtaa

SEQ ID NO: 441319 - DNA, 30 bp, Artificial Sequence
  Synthetic oligonucleotide
tcgcaattgccactgggaaacgataggtaa

SEQ ID NO: 441320 - DNA, 30 bp, Artificial Sequence
  Synthetic oligonucleotide
gtgttgataggggcattaacaccacggtaa

SEQ ID NO: 441321 - DNA, 30 bp, Artificial Sequence
  Synthetic oligonucleotide
cagtatcttcccgtgtaaccaccacggtaa

SEQ ID NO: 441322 - DNA, 30 bp, Artificial Sequence
  Synthetic oligonucleotide
ggtgtttaaataggtattacattacggtaa

SEQ ID NO: 441323 - DNA, 30 bp, Artificial Sequence
  Synthetic oligonucleotide
tacgatcaatggaacaatgtacggcggtaa

SEQ ID NO: 441324 - DNA, 30 bp, Artificial Sequence
  Synthetic oligonucleotide
atcggaactcgacctacggacgctcggtaa

SEQ ID NO: 441325 - DNA, 30 bp, Artificial Sequence
  Synthetic oligonucleotide
gcatagacaggagcggcggaagaagggtaa

SEQ ID NO: 441326 - DNA, 30 bp, Artificial Sequence
  Synthetic oligonucleotide
tattgtccgcttaaactggctttagggtaa

SEQ ID NO: 441327 - DNA, 30 bp, Artificial Sequence
  Synthetic oligonucleotide
tggtgatacccgtacgacagtgccgggtaa

SEQ ID NO: 441328 - DNA, 30 bp, Artificial Sequence
  Synthetic oligonucleotide
attgagtcacataaaaattggctcgggtaa

SEQ ID NO: 441329 - DNA, 30 bp, Artificial Sequence
  Synthetic oligonucleotide
cgccaaaatgtcccccagaaaacggggtaa

SEQ ID NO: 441330 - DNA, 30 bp, Artificial Sequence
  Synthetic oligonucleotide
ggcgcgtacgccgtaggcgatacggggtaa

SEQ ID NO: 441331 - DNA, 30 bp, Artificial Sequence
  Synthetic oligonucleotide
tcgagagcttatcagtgtcgtaatgggtaa

SEQ ID NO: 441332 - DNA, 30 bp, Artificial Sequence
  Synthetic oligonucleotide
tgatatattaacacatcaagtgatgggtaa

SEQ ID NO: 441333 - DNA, 30 bp, Artificial Sequence
  Synthetic oligonucleotide
cctttctacgttcacgcggtcagtgggtaa

SEQ ID NO: 441334 - DNA, 30 bp, Artificial Sequence
  Synthetic oligonucleotide
tcagtctaatctgctggagacggtgggtaa

SEQ ID NO: 441335 - DNA, 30 bp, Artificial Sequence
  Synthetic oligonucleotide
gattaagaagcctgttgaattcttgggtaa

SEQ ID NO: 441336 - DNA, 30 bp, Artificial Sequence
  Synthetic oligonucleotide
attaaacatggagatagaggtacatggtaa

SEQ ID NO: 441337 - DNA, 30 bp, Artificial Sequence
  Synthetic oligonucleotide
ggcggcagcagttaacaagggtcctggtaa

SEQ ID NO: 441338 - DNA, 30 bp, Artificial Sequence
  Synthetic oligonucleotide
tctatgttgaagacttagtcgctctggtaa

SEQ ID NO: 441339 - DNA, 30 bp, Artificial Sequence
  Synthetic oligonucleotide
ttgagggtctaattaggacgcacttggtaa

SEQ ID NO: 441340 - DNA, 30 bp, Artificial Sequence
  Synthetic oligonucleotide
ctttataacacttatccgactctttggtaa

SEQ ID NO: 441341 - DNA, 30 bp, Artificial Sequence
  Synthetic oligonucleotide
cacgccgatccgtatattatgaaaatgtaa

SEQ ID NO: 441342 - DNA, 30 bp, Artificial Sequence
  Synthetic oligonucleotide
gtgtccacaatgggtcgattgggaatgtaa

SEQ ID NO: 441343 - DNA, 30 bp, Artificial Sequence
  Synthetic oligonucleotide
gtcccccgtcacccaatgactaacatgtaa

SEQ ID NO: 441344 - DNA, 30 bp, Artificial Sequence
  Synthetic oligonucleotide
gtggtacgttgtctccgcggagcgatgtaa

SEQ ID NO: 441345 - DNA, 30 bp, Artificial Sequence
  Synthetic oligonucleotide
tgtacagagacaggttacactctgatgtaa

SEQ ID NO: 441346 - DNA, 30 bp, Artificial Sequence
  Synthetic oligonucleotide
gtggcgctgtcaacgctgtgtaatatgtaa

SEQ ID NO: 441347 - DNA, 30 bp, Artificial Sequence
  Synthetic oligonucleotide
acctgtagttttacgccctggactatgtaa

SEQ ID NO: 441348 - DNA, 30 bp, Artificial Sequence
  Synthetic oligonucleotide
atcgctgagacctagtaattaggtatgtaa

SEQ ID NO: 441349 - DNA, 30 bp, Artificial Sequence
  Synthetic oligonucleotide
ttttacagcagggtgtcctaaaaactgtaa

SEQ ID NO: 441350 - DNA, 30 bp, Artificial Sequence
  Synthetic oligonucleotide
ctgaatacacgccaattattgaaactgtaa

SEQ ID NO: 441351 - DNA, 30 bp, Artificial Sequence
  Synthetic oligonucleotide
agtatcagttgcagcgactatgaactgtaa

SEQ ID NO: 441352 - DNA, 30 bp, Artificial Sequence
  Synthetic oligonucleotide
gctcccatcttgtattcatatagcctgtaa

SEQ ID NO: 441353 - DNA, 30 bp, Artificial Sequence
  Synthetic oligonucleotide
atttctactatgctatgactggtcctgtaa

SEQ ID NO: 441354 - DNA, 30 bp, Artificial Sequence
  Synthetic oligonucleotide
atggaagcagggggtggacagcagctgtaa

SEQ ID NO: 441355 - DNA, 30 bp, Artificial Sequence
  Synthetic oligonucleotide
gaagaccaggcacttggtgcttcgctgtaa

SEQ ID NO: 441356 - DNA, 30 bp, Artificial Sequence
  Synthetic oligonucleotide
gccgttggccattttagattctggctgtaa

SEQ ID NO: 441357 - DNA, 30 bp, Artificial Sequence
  Synthetic oligonucleotide
cttaagaagctcacctacgactatctgtaa

SEQ ID NO: 441358 - DNA, 30 bp, Artificial Sequence
  Synthetic oligonucleotide
ggaatcctcatcaatacacttgcagtgtaa

SEQ ID NO: 441359 - DNA, 30 bp, Artificial Sequence
  Synthetic oligonucleotide
gcagtctccggccagttccggagagtgtaa

SEQ ID NO: 441360 - DNA, 30 bp, Artificial Sequence
  Synthetic oligonucleotide
attgtccctttatgaagataaggagtgtaa

SEQ ID NO: 441361 - DNA, 30 bp, Artificial Sequence
  Synthetic oligonucleotide
atttcatgccattcttcttatggagtgtaa

SEQ ID NO: 441362 - DNA, 30 bp, Artificial Sequence
  Synthetic oligonucleotide
tttaatttcaacgtcaactggtgagtgtaa

SEQ ID NO: 441363 - DNA, 30 bp, Artificial Sequence
  Synthetic oligonucleotide
gactgtccaggtacttatgcaaaggtgtaa

SEQ ID NO: 441364 - DNA, 30 bp, Artificial Sequence
  Synthetic oligonucleotide
aggtgattctctttctgataccaggtgtaa

SEQ ID NO: 441365 - DNA, 29 bp, Artificial Sequence
  Synthetic oligonucleotide
ctcaaggtattggcaaaggccatgtgtaa

SEQ ID NO: 441366 - DNA, 30 bp, Artificial Sequence
  Synthetic oligonucleotide
cattagttcttgataaaatatcatgtgtaa

SEQ ID NO: 441367 - DNA, 30 bp, Artificial Sequence
  Synthetic oligonucleotide
ttgcacttacgttctgcgacacggttgtaa

SEQ ID NO: 441368 - DNA, 30 bp, Artificial Sequence
  Synthetic oligonucleotide
cacaatctcttttgcgatccgcttttgtaa

SEQ ID NO: 441369 - DNA, 29 bp, Artificial Sequence
  Synthetic oligonucleotide
ttatcaatatgaggccattgcttttgtaa

SEQ ID NO: 441370 - DNA, 30 bp, Artificial Sequence
  Synthetic oligonucleotide
ttcgacaacgcgctataactcaaaaattaa

SEQ ID NO: 441371 - DNA, 30 bp, Artificial Sequence
  Synthetic oligonucleotide
gaaaaggcactgaggagctgctaaaattaa

SEQ ID NO: 441372 - DNA, 30 bp, Artificial Sequence
  Synthetic oligonucleotide
caagttttagattggaaaagcacaaattaa

SEQ ID NO: 441373 - DNA, 30 bp, Artificial Sequence
  Synthetic oligonucleotide
ttgattctgaattataatccgaagaattaa

SEQ ID NO: 441374 - DNA, 30 bp, Artificial Sequence
  Synthetic oligonucleotide
tattccaggcgtgagattaaatagaattaa

SEQ ID NO: 441375 - DNA, 30 bp, Artificial Sequence
  Synthetic oligonucleotide
tactcaacctgcccaacgcgtaggaattaa

SEQ ID NO: 441376 - DNA, 30 bp, Artificial Sequence
  Synthetic oligonucleotide
ttgacgtttataggtggggtcttgaattaa

SEQ ID NO: 441377 - DNA, 30 bp, Artificial Sequence
  Synthetic oligonucleotide
ttaactagttattctgcggtttgtaattaa

SEQ ID NO: 441378 - DNA, 30 bp, Artificial Sequence
  Synthetic oligonucleotide
aaaataggaagtcctttctctacacattaa

SEQ ID NO: 441379 - DNA, 30 bp, Artificial Sequence
  Synthetic oligonucleotide
tgcatttagacatatgccacaccacattaa

SEQ ID NO: 441380 - DNA, 30 bp, Artificial Sequence
  Synthetic oligonucleotide
aataaaatgccacggaggtgcatacattaa

SEQ ID NO: 441381 - DNA, 30 bp, Artificial Sequence
  Synthetic oligonucleotide
cgccacatatagagaatggccaaccattaa

SEQ ID NO: 441382 - DNA, 30 bp, Artificial Sequence
  Synthetic oligonucleotide
tccgctacgtacggaggatcaatccattaa

SEQ ID NO: 441383 - DNA, 30 bp, Artificial Sequence
  Synthetic oligonucleotide
ggcaccggagtgaagtgacagaggcattaa

SEQ ID NO: 441384 - DNA, 30 bp, Artificial Sequence
  Synthetic oligonucleotide
cgagttacttagacgcaacggtatcattaa

SEQ ID NO: 441385 - DNA, 30 bp, Artificial Sequence
  Synthetic oligonucleotide
ccaatcaaagtttatctgatctttcattaa

SEQ ID NO: 441386 - DNA, 30 bp, Artificial Sequence
  Synthetic oligonucleotide
gcaccccctaactcacatgggtttcattaa

SEQ ID NO: 441387 - DNA, 30 bp, Artificial Sequence
  Synthetic oligonucleotide
gacgggcgttagcatatctacacagattaa

SEQ ID NO: 441388 - DNA, 30 bp, Artificial Sequence
  Synthetic oligonucleotide
tggggtagaatgtcgcaatcagcagattaa

SEQ ID NO: 441389 - DNA, 30 bp, Artificial Sequence
  Synthetic oligonucleotide
aattcgattgcatgaagtggcgacgattaa

SEQ ID NO: 441390 - DNA, 30 bp, Artificial Sequence
  Synthetic oligonucleotide
aataagctttttttccaatggatcgattaa

SEQ ID NO: 441391 - DNA, 30 bp, Artificial Sequence
  Synthetic oligonucleotide
tcttatttctttgtacggttctatgattaa

SEQ ID NO: 441392 - DNA, 30 bp, Artificial Sequence
  Synthetic oligonucleotide
acttatggagttctgaaccttccatattaa

SEQ ID NO: 441393 - DNA, 30 bp, Artificial Sequence
  Synthetic oligonucleotide
caacatccgtgccgtgcatggagatattaa

SEQ ID NO: 441394 - DNA, 30 bp, Artificial Sequence
  Synthetic oligonucleotide
ctagtttctataggatacgtaatatattaa

SEQ ID NO: 441395 - DNA, 30 bp, Artificial Sequence
  Synthetic oligonucleotide
aaaaactttgatcgaaaaatgtgctattaa

SEQ ID NO: 441396 - DNA, 30 bp, Artificial Sequence
  Synthetic oligonucleotide
catgttttcgacgcgaaacctacgtattaa

SEQ ID NO: 441397 - DNA, 30 bp, Artificial Sequence
  Synthetic oligonucleotide
ttccagtatgtaaaatatatagcgtattaa

SEQ ID NO: 441398 - DNA, 30 bp, Artificial Sequence
  Synthetic oligonucleotide
gtaatccacgaggagcgttccatgtattaa

SEQ ID NO: 441399 - DNA, 30 bp, Artificial Sequence
  Synthetic oligonucleotide
cgagatgagcattaaatctggacttattaa

SEQ ID NO: 441400 - DNA, 30 bp, Artificial Sequence
  Synthetic oligonucleotide
gtccaccaataggcattgtcgcacacttaa

SEQ ID NO: 441401 - DNA, 30 bp, Artificial Sequence
  Synthetic oligonucleotide
gcctataagagtgttcagaaatccacttaa

SEQ ID NO: 441402 - DNA, 30 bp, Artificial Sequence
  Synthetic oligonucleotide
tatacgttcgctaagcttacgaagacttaa

SEQ ID NO: 441403 - DNA, 30 bp, Artificial Sequence
  Synthetic oligonucleotide
taattttcccagaaaaaaaggtatacttaa

SEQ ID NO: 441404 - DNA, 30 bp, Artificial Sequence
  Synthetic oligonucleotide
taaacacgtccgttatcttctgctacttaa

SEQ ID NO: 441405 - DNA, 30 bp, Artificial Sequence
  Synthetic oligonucleotide
agcctgaattcttctctccactgtacttaa

SEQ ID NO: 441406 - DNA, 30 bp, Artificial Sequence
  Synthetic oligonucleotide
gactagagatccccttgcgggaaaccttaa

SEQ ID NO: 441407 - DNA, 30 bp, Artificial Sequence
  Synthetic oligonucleotide
actgttggatttttattgattaaaccttaa

SEQ ID NO: 441408 - DNA, 30 bp, Artificial Sequence
  Synthetic oligonucleotide
gtaatgagcactggtcgttacttaccttaa

SEQ ID NO: 441409 - DNA, 30 bp, Artificial Sequence
  Synthetic oligonucleotide
tatagtttatctagctccaccaacccttaa

SEQ ID NO: 441410 - DNA, 30 bp, Artificial Sequence
  Synthetic oligonucleotide
taccgaggtgctatatttaggagcccttaa

SEQ ID NO: 441411 - DNA, 30 bp, Artificial Sequence
  Synthetic oligonucleotide
attcggtgcctgtattatcactcgccttaa

SEQ ID NO: 441412 - DNA, 30 bp, Artificial Sequence
  Synthetic oligonucleotide
agacgcacttcaccgccatgggtgccttaa

SEQ ID NO: 441413 - DNA, 30 bp, Artificial Sequence
  Synthetic oligonucleotide
tgcctacacgcgttattacgcggtccttaa

SEQ ID NO: 441414 - DNA, 30 bp, Artificial Sequence
  Synthetic oligonucleotide
ataccgtaggttggcaaacaagttccttaa

SEQ ID NO: 441415 - DNA, 30 bp, Artificial Sequence
  Synthetic oligonucleotide
cgttggtaaaacccgtcctgttacgcttaa

SEQ ID NO: 441416 - DNA, 30 bp, Artificial Sequence
  Synthetic oligonucleotide
taaattacatatagtccgttcatcgcttaa

SEQ ID NO: 441417 - DNA, 30 bp, Artificial Sequence
  Synthetic oligonucleotide
aatatgtcttcatccagagcggtcgcttaa

SEQ ID NO: 441418 - DNA, 30 bp, Artificial Sequence
  Synthetic oligonucleotide
ggcgatcgctgcccgcaaccaaaggcttaa

SEQ ID NO: 441419 - DNA, 30 bp, Artificial Sequence
  Synthetic oligonucleotide
ataggggcggaacgtggtgtttaggcttaa

SEQ ID NO: 441420 - DNA, 30 bp, Artificial Sequence
  Synthetic oligonucleotide
tatagtaccggcggaacgtaaagggcttaa

SEQ ID NO: 441421 - DNA, 30 bp, Artificial Sequence
  Synthetic oligonucleotide
ggttgattccccccgactcttagggcttaa

SEQ ID NO: 441422 - DNA, 30 bp, Artificial Sequence
  Synthetic oligonucleotide
taagatatacgttgttagtgtctggcttaa

SEQ ID NO: 441423 - DNA, 30 bp, Artificial Sequence
  Synthetic oligonucleotide
cagggttgtaccaaagtcgttgctgcttaa

SEQ ID NO: 441424 - DNA, 30 bp, Artificial Sequence
  Synthetic oligonucleotide
accctctgttactcggattagtgatcttaa

SEQ ID NO: 441425 - DNA, 30 bp, Artificial Sequence
  Synthetic oligonucleotide
gagaacagtatgttgaaaaaagactcttaa

SEQ ID NO: 441426 - DNA, 30 bp, Artificial Sequence
  Synthetic oligonucleotide
atattatggcccctaagtcccggctcttaa

SEQ ID NO: 441427 - DNA, 30 bp, Artificial Sequence
  Synthetic oligonucleotide
gaggccgcagagggtccacagctctcttaa

SEQ ID NO: 441428 - DNA, 30 bp, Artificial Sequence
  Synthetic oligonucleotide
gaatcccggggtcgccccaagttctcttaa

SEQ ID NO: 441429 - DNA, 30 bp, Artificial Sequence
  Synthetic oligonucleotide
acactccaggtcctaattttagggtcttaa

SEQ ID NO: 441430 - DNA, 30 bp, Artificial Sequence
  Synthetic oligonucleotide
agaccttgttacttgtaggaaacttcttaa

SEQ ID NO: 441431 - DNA, 30 bp, Artificial Sequence
  Synthetic oligonucleotide
gagaatatagatcataacggcctttcttaa

SEQ ID NO: 441432 - DNA, 30 bp, Artificial Sequence
  Synthetic oligonucleotide
gttaaataaccatcgttgggattttcttaa

SEQ ID NO: 441433 - DNA, 30 bp, Artificial Sequence
  Synthetic oligonucleotide
taagtattttgataaagaatagcgagttaa

SEQ ID NO: 441434 - DNA, 30 bp, Artificial Sequence
  Synthetic oligonucleotide
tatgctgattttacaagtcttcggagttaa

SEQ ID NO: 441435 - DNA, 30 bp, Artificial Sequence
  Synthetic oligonucleotide
taggagttgtccaggttcttctctagttaa

SEQ ID NO: 441436 - DNA, 30 bp, Artificial Sequence
  Synthetic oligonucleotide
cgattttaacgctctccagtcaaacgttaa

SEQ ID NO: 441437 - DNA, 30 bp, Artificial Sequence
  Synthetic oligonucleotide
taaagcgctaacgggattcatgaacgttaa

SEQ ID NO: 441438 - DNA, 30 bp, Artificial Sequence
  Synthetic oligonucleotide
ggcatgcacgtagtgtgttcctaacgttaa

SEQ ID NO: 441439 - DNA, 30 bp, Artificial Sequence
  Synthetic oligonucleotide
tttcggaatcacgtccgtaaattacgttaa

SEQ ID NO: 441440 - DNA, 30 bp, Artificial Sequence
  Synthetic oligonucleotide
atcccatccctacgcacgacaatccgttaa

SEQ ID NO: 441441 - DNA, 30 bp, Artificial Sequence
  Synthetic oligonucleotide
catggatatagcaccaacggacggcgttaa

SEQ ID NO: 441442 - DNA, 30 bp, Artificial Sequence
  Synthetic oligonucleotide
tcacggcgccctgggggctctctgcgttaa

SEQ ID NO: 441443 - DNA, 30 bp, Artificial Sequence
  Synthetic oligonucleotide
gcattggggtaatttaaatttaatcgttaa

SEQ ID NO: 441444 - DNA, 30 bp, Artificial Sequence
  Synthetic oligonucleotide
agcgattgacgacctatagagacaggttaa

SEQ ID NO: 441445 - DNA, 30 bp, Artificial Sequence
  Synthetic oligonucleotide
tatggaagcggagcttcagatataggttaa

SEQ ID NO: 441446 - DNA, 30 bp, Artificial Sequence
  Synthetic oligonucleotide
gtattccttctactgacgatcttaggttaa

SEQ ID NO: 441447 - DNA, 30 bp, Artificial Sequence
  Synthetic oligonucleotide
ggcgacctatgcaccgctgggcacggttaa

SEQ ID NO: 441448 - DNA, 30 bp, Artificial Sequence
  Synthetic oligonucleotide
gttgcataaatttggacatggtacggttaa

SEQ ID NO: 441449 - DNA, 30 bp, Artificial Sequence
  Synthetic oligonucleotide
taaaatataggggggacgctctccggttaa

SEQ ID NO: 441450 - DNA, 30 bp, Artificial Sequence
  Synthetic oligonucleotide
gcattcgaacgttatcatcggttcggttaa

SEQ ID NO: 441451 - DNA, 30 bp, Artificial Sequence
  Synthetic oligonucleotide
tttttgcttagactggaactggagggttaa

SEQ ID NO: 441452 - DNA, 30 bp, Artificial Sequence
  Synthetic oligonucleotide
gccttcgtgagtagtaagtccacgggttaa

SEQ ID NO: 441453 - DNA, 30 bp, Artificial Sequence
  Synthetic oligonucleotide
ttatttctaaatgaatggttattgggttaa

SEQ ID NO: 441454 - DNA, 30 bp, Artificial Sequence
  Synthetic oligonucleotide
gtagctaatacgaggcaccaacatggttaa

SEQ ID NO: 441455 - DNA, 30 bp, Artificial Sequence
  Synthetic oligonucleotide
atataaagagttgtggctcctcctggttaa

SEQ ID NO: 441456 - DNA, 30 bp, Artificial Sequence
  Synthetic oligonucleotide
tgcattaagatcatcatgttagttggttaa

SEQ ID NO: 441457 - DNA, 30 bp, Artificial Sequence
  Synthetic oligonucleotide
tctccatggagcatgtctaacaaatgttaa

SEQ ID NO: 441458 - DNA, 30 bp, Artificial Sequence
  Synthetic oligonucleotide
ccttagagccatactggacggaaatgttaa

SEQ ID NO: 441459 - DNA, 30 bp, Artificial Sequence
  Synthetic oligonucleotide
tatgcttacgccaagaccccctaatgttaa

SEQ ID NO: 441460 - DNA, 30 bp, Artificial Sequence
  Synthetic oligonucleotide
cagttcaggcttagacttttctgatgttaa

SEQ ID NO: 441461 - DNA, 30 bp, Artificial Sequence
  Synthetic oligonucleotide
cgcacgaaacacgatttccgtgcctgttaa

SEQ ID NO: 441462 - DNA, 30 bp, Artificial Sequence
  Synthetic oligonucleotide
ccggtccgctgttaggcggctacgtgttaa

SEQ ID NO: 441463 - DNA, 30 bp, Artificial Sequence
  Synthetic oligonucleotide
gcattgacgtcactacccttcgtttgttaa

SEQ ID NO: 441464 - DNA, 30 bp, Artificial Sequence
  Synthetic oligonucleotide
acaagtatctagagttagtccgaaatttaa

SEQ ID NO: 441465 - DNA, 30 bp, Artificial Sequence
  Synthetic oligonucleotide
gcaaatacagagttccgacttccaatttaa

SEQ ID NO: 441466 - DNA, 30 bp, Artificial Sequence
  Synthetic oligonucleotide
taacctataactgtcgtgctagacatttaa

SEQ ID NO: 441467 - DNA, 30 bp, Artificial Sequence
  Synthetic oligonucleotide
aacttagatgtatgttcagggttcatttaa

SEQ ID NO: 441468 - DNA, 30 bp, Artificial Sequence
  Synthetic oligonucleotide
gtatgtgctgcttatcaaaatgctatttaa

SEQ ID NO: 441469 - DNA, 30 bp, Artificial Sequence
  Synthetic oligonucleotide
tgttctgtggtaggatgctgcattatttaa

SEQ ID NO: 441470 - DNA, 30 bp, Artificial Sequence
  Synthetic oligonucleotide
cttaattttaagcacgccttcgttatttaa

SEQ ID NO: 441471 - DNA, 30 bp, Artificial Sequence
  Synthetic oligonucleotide
atcactaggtggcctcttagcaaactttaa

SEQ ID NO: 441472 - DNA, 30 bp, Artificial Sequence
  Synthetic oligonucleotide
cgctgaccgtgctatgtgaacggactttaa

SEQ ID NO: 441473 - DNA, 30 bp, Artificial Sequence
  Synthetic oligonucleotide
agagacttcgagtcgggaacgtgactttaa

SEQ ID NO: 441474 - DNA, 30 bp, Artificial Sequence
  Synthetic oligonucleotide
gcattctaaggtattgtatatgtactttaa

SEQ ID NO: 441475 - DNA, 30 bp, Artificial Sequence
  Synthetic oligonucleotide
tctgaaacaaacccgtcggagcacctttaa

SEQ ID NO: 441476 - DNA, 30 bp, Artificial Sequence
  Synthetic oligonucleotide
ctcgcgggcgtttgccgagcatccctttaa

SEQ ID NO: 441477 - DNA, 30 bp, Artificial Sequence
  Synthetic oligonucleotide
ggccccgtgttttaatcgagcacgctttaa

SEQ ID NO: 441478 - DNA, 30 bp, Artificial Sequence
  Synthetic oligonucleotide
gtcggttgcaaagagattcggacgctttaa

SEQ ID NO: 441479 - DNA, 30 bp, Artificial Sequence
  Synthetic oligonucleotide
atcccttggccctaactaaaaccgctttaa

SEQ ID NO: 441480 - DNA, 30 bp, Artificial Sequence
  Synthetic oligonucleotide
gttaggggaaatgaggccctggggctttaa

SEQ ID NO: 441481 - DNA, 30 bp, Artificial Sequence
  Synthetic oligonucleotide
gtttggcatctcgagctcattttgctttaa

SEQ ID NO: 441482 - DNA, 30 bp, Artificial Sequence
  Synthetic oligonucleotide
tcatgggccgccagggggtggcctctttaa

SEQ ID NO: 441483 - DNA, 30 bp, Artificial Sequence
  Synthetic oligonucleotide
tggtcacgcttgtatcggaaaagtctttaa

SEQ ID NO: 441484 - DNA, 30 bp, Artificial Sequence
  Synthetic oligonucleotide
gaatagagtacgggccggtggaaagtttaa

SEQ ID NO: 441485 - DNA, 30 bp, Artificial Sequence
  Synthetic oligonucleotide
ggcttcaatattcctctctgagtagtttaa

SEQ ID NO: 441486 - DNA, 30 bp, Artificial Sequence
  Synthetic oligonucleotide
gtcaccactccttctattgtacacgtttaa

SEQ ID NO: 441487 - DNA, 30 bp, Artificial Sequence
  Synthetic oligonucleotide
atagtgtccttgctaggactcggcgtttaa

SEQ ID NO: 441488 - DNA, 30 bp, Artificial Sequence
  Synthetic oligonucleotide
tggatgccgcaacggaattaactcgtttaa

SEQ ID NO: 441489 - DNA, 30 bp, Artificial Sequence
  Synthetic oligonucleotide
tacaaaaacaaactataaggtctcgtttaa

SEQ ID NO: 441490 - DNA, 30 bp, Artificial Sequence
  Synthetic oligonucleotide
cgtattgccaactgtgccaacacggtttaa

SEQ ID NO: 441491 - DNA, 30 bp, Artificial Sequence
  Synthetic oligonucleotide
tcgcgccctggtccttataagcgtgtttaa

SEQ ID NO: 441492 - DNA, 30 bp, Artificial Sequence
  Synthetic oligonucleotide
atgaccggttaattgctgcgagcattttaa

SEQ ID NO: 441493 - DNA, 30 bp, Artificial Sequence
  Synthetic oligonucleotide
cgcgtaaacattctttctggtaacttttaa

SEQ ID NO: 441494 - DNA, 30 bp, Artificial Sequence
  Synthetic oligonucleotide
tattgatcaatagcggggatgcacttttaa

SEQ ID NO: 441495 - DNA, 30 bp, Artificial Sequence
  Synthetic oligonucleotide
atatgctagaaggctcggcgtagcttttaa

SEQ ID NO: 441496 - DNA, 30 bp, Artificial Sequence
  Synthetic oligonucleotide
aagctggcagtcgccaagcgtatcttttaa

SEQ ID NO: 441497 - DNA, 30 bp, Artificial Sequence
  Synthetic oligonucleotide
tcctttacgagcgctcacagagtcttttaa

SEQ ID NO: 441498 - DNA, 30 bp, Artificial Sequence
  Synthetic oligonucleotide
gattatgtctagtagagcctcacgaaaaca

SEQ ID NO: 441499 - DNA, 30 bp, Artificial Sequence
  Synthetic oligonucleotide
gaattcggaatcataaaacaacataaaaca

SEQ ID NO: 441500 - DNA, 30 bp, Artificial Sequence
  Synthetic oligonucleotide
aaatgtgagtgattctgcgacgataaaaca

SEQ ID NO: 441501 - DNA, 30 bp, Artificial Sequence
  Synthetic oligonucleotide
gccgcaagtacgtagggttacagtaaaaca

SEQ ID NO: 441502 - DNA, 30 bp, Artificial Sequence
  Synthetic oligonucleotide
gtttctcggggtatatgttagacacaaaca

SEQ ID NO: 441503 - DNA, 30 bp, Artificial Sequence
  Synthetic oligonucleotide
actgatctttatgcgtacgcggggcaaaca

SEQ ID NO: 441504 - DNA, 30 bp, Artificial Sequence
  Synthetic oligonucleotide
ccagcgtgtcttttctggggattgcaaaca

SEQ ID NO: 441505 - DNA, 30 bp, Artificial Sequence
  Synthetic oligonucleotide
tcttgtggggttatgagattcactcaaaca

SEQ ID NO: 441506 - DNA, 30 bp, Artificial Sequence
  Synthetic oligonucleotide
atcttgttacgcccacttttccctcaaaca

SEQ ID NO: 441507 - DNA, 30 bp, Artificial Sequence
  Synthetic oligonucleotide
cggtcaacggcgtataaatgttgagaaaca

SEQ ID NO: 441508 - DNA, 30 bp, Artificial Sequence
  Synthetic oligonucleotide
atttactaattttcagcgaacgtagaaaca

SEQ ID NO: 441509 - DNA, 30 bp, Artificial Sequence
  Synthetic oligonucleotide
gccccatacaagtcttataaaaacgaaaca

SEQ ID NO: 441510 - DNA, 30 bp, Artificial Sequence
  Synthetic oligonucleotide
accgtttagttagcacccaaagaggaaaca

SEQ ID NO: 441511 - DNA, 30 bp, Artificial Sequence
  Synthetic oligonucleotide
tatacttctagcagatgggaaagggaaaca

SEQ ID NO: 441512 - DNA, 30 bp, Artificial Sequence
  Synthetic oligonucleotide
taaccttcaggatcatttcttaatgaaaca

SEQ ID NO: 441513 - DNA, 30 bp, Artificial Sequence
  Synthetic oligonucleotide
tggttagatgcatccgaggagtctgaaaca

SEQ ID NO: 441514 - DNA, 30 bp, Artificial Sequence
  Synthetic oligonucleotide
tactcactaacgcgcagccgcatataaaca

SEQ ID NO: 441515 - DNA, 30 bp, Artificial Sequence
  Synthetic oligonucleotide
aactgattcaatgcatgctataactaaaca

SEQ ID NO: 441516 - DNA, 30 bp, Artificial Sequence
  Synthetic oligonucleotide
atgtagcttcagtctgggcgtctctaaaca

SEQ ID NO: 441517 - DNA, 30 bp, Artificial Sequence
  Synthetic oligonucleotide
gtttgttaaataaaactttacatgtaaaca

SEQ ID NO: 441518 - DNA, 30 bp, Artificial Sequence
  Synthetic oligonucleotide
attggcgccatggctgagccaaattaaaca

SEQ ID NO: 441519 - DNA, 30 bp, Artificial Sequence
  Synthetic oligonucleotide
tgatcccgccggtcattttgggattaaaca

SEQ ID NO: 441520 - DNA, 30 bp, Artificial Sequence
  Synthetic oligonucleotide
gcacgtttgagtatttctagaggaacaaca

SEQ ID NO: 441521 - DNA, 30 bp, Artificial Sequence
  Synthetic oligonucleotide
gtagttgtctcattcagcttttgaacaaca

SEQ ID NO: 441522 - DNA, 30 bp, Artificial Sequence
  Synthetic oligonucleotide
tttaagctactcattgttacgaacacaaca

SEQ ID NO: 441523 - DNA, 30 bp, Artificial Sequence
  Synthetic oligonucleotide
tcctagggattttcttaaggtaccacaaca

SEQ ID NO: 441524 - DNA, 30 bp, Artificial Sequence
  Synthetic oligonucleotide
acttcaaatagattttgccatcgcacaaca

SEQ ID NO: 441525 - DNA, 30 bp, Artificial Sequence
  Synthetic oligonucleotide
gagtgcgaatcggtgcgtagatggacaaca

SEQ ID NO: 441526 - DNA, 30 bp, Artificial Sequence
  Synthetic oligonucleotide
gttcccgaatcagaccgccagtgtacaaca

SEQ ID NO: 441527 - DNA, 30 bp, Artificial Sequence
  Synthetic oligonucleotide
gagtttagcatggctaagtaagttacaaca

SEQ ID NO: 441528 - DNA, 30 bp, Artificial Sequence
  Synthetic oligonucleotide
ccgtccggatcggtagcggcagtgccaaca

SEQ ID NO: 441529 - DNA, 30 bp, Artificial Sequence
  Synthetic oligonucleotide
gtctcagagcgctgtatggacgctccaaca

SEQ ID NO: 441530 - DNA, 30 bp, Artificial Sequence
  Synthetic oligonucleotide
cgcaagctctttctttggcatagtccaaca

SEQ ID NO: 441531 - DNA, 30 bp, Artificial Sequence
  Synthetic oligonucleotide
aaaggattgtcggacccgtggcgtccaaca

SEQ ID NO: 441532 - DNA, 30 bp, Artificial Sequence
  Synthetic oligonucleotide
cttttgataattgaagataatcgtccaaca

SEQ ID NO: 441533 - DNA, 30 bp, Artificial Sequence
  Synthetic oligonucleotide
gatgtactaacaacggaacttgacgcaaca

SEQ ID NO: 441534 - DNA, 30 bp, Artificial Sequence
  Synthetic oligonucleotide
aatcataaacagcatgactcgtacgcaaca

SEQ ID NO: 441535 - DNA, 30 bp, Artificial Sequence
  Synthetic oligonucleotide
atatcaacgttcaattcgggcttcgcaaca

SEQ ID NO: 441536 - DNA, 30 bp, Artificial Sequence
  Synthetic oligonucleotide
gataggccatgtttgggggaaacggcaaca

SEQ ID NO: 441537 - DNA, 30 bp, Artificial Sequence
  Synthetic oligonucleotide
cacttcatggcccatagttcatgggcaaca

SEQ ID NO: 441538 - DNA, 30 bp, Artificial Sequence
  Synthetic oligonucleotide
tggtcctaccctgaccggtcacgtgcaaca

SEQ ID NO: 441539 - DNA, 30 bp, Artificial Sequence
  Synthetic oligonucleotide
cctggttgtaacccggtgtattaatcaaca

SEQ ID NO: 441540 - DNA, 30 bp, Artificial Sequence
  Synthetic oligonucleotide
tttattgccacatatcgggatcactcaaca

SEQ ID NO: 441541 - DNA, 30 bp, Artificial Sequence
  Synthetic oligonucleotide
atggcgctatcgtatgtatgtaggtcaaca

SEQ ID NO: 441542 - DNA, 30 bp, Artificial Sequence
  Synthetic oligonucleotide
ctagactttgtgaacggagcggcttcaaca

SEQ ID NO: 441543 - DNA, 30 bp, Artificial Sequence
  Synthetic oligonucleotide
taccaaggctgttactgccggttttcaaca

SEQ ID NO: 441544 - DNA, 30 bp, Artificial Sequence
  Synthetic oligonucleotide
gatgatatcatactcagtacgtgcagaaca

SEQ ID NO: 441545 - DNA, 30 bp, Artificial Sequence
  Synthetic oligonucleotide
gaatctcagaccgcgtggggtatcagaaca

SEQ ID NO: 441546 - DNA, 30 bp, Artificial Sequence
  Synthetic oligonucleotide
cattctttaccggaaaggacggtgagaaca

SEQ ID NO: 441547 - DNA, 30 bp, Artificial Sequence
  Synthetic oligonucleotide
agttcatccgaatgtgttccggtgagaaca

SEQ ID NO: 441548 - DNA, 30 bp, Artificial Sequence
  Synthetic oligonucleotide
ttcttgaaagcgttctagcatcatagaaca

SEQ ID NO: 441549 - DNA, 30 bp, Artificial Sequence
  Synthetic oligonucleotide
cgtgtctttgagcgacggaatgctagaaca

SEQ ID NO: 441550 - DNA, 30 bp, Artificial Sequence
  Synthetic oligonucleotide
taaatctaaacagacacaatcagtagaaca

SEQ ID NO: 441551 - DNA, 30 bp, Artificial Sequence
  Synthetic oligonucleotide
ttggaatagtccacggttcggattagaaca

SEQ ID NO: 441552 - DNA, 30 bp, Artificial Sequence
  Synthetic oligonucleotide
atctgcgcacaggtatgttgacttagaaca

SEQ ID NO: 441553 - DNA, 30 bp, Artificial Sequence
  Synthetic oligonucleotide
atcttaataaactttgacggtacacgaaca

SEQ ID NO: 441554 - DNA, 29 bp, Artificial Sequence
  Synthetic oligonucleotide
ggataggatatcagcaccagctacgaaca

SEQ ID NO: 441555 - DNA, 30 bp, Artificial Sequence
  Synthetic oligonucleotide
aatcaacaaatacatatgaccgtacgaaca

SEQ ID NO: 441556 - DNA, 30 bp, Artificial Sequence
  Synthetic oligonucleotide
atatccgaccgtaatgatttttgccgaaca

SEQ ID NO: 441557 - DNA, 30 bp, Artificial Sequence
  Synthetic oligonucleotide
caatatcctgtattgtgtcttagtcgaaca

SEQ ID NO: 441558 - DNA, 30 bp, Artificial Sequence
  Synthetic oligonucleotide
tccttaattgggttatcaacgcttcgaaca

SEQ ID NO: 441559 - DNA, 30 bp, Artificial Sequence
  Synthetic oligonucleotide
agctcgccgggctagagcttcataggaaca

SEQ ID NO: 441560 - DNA, 30 bp, Artificial Sequence
  Synthetic oligonucleotide
actattccggggaccgtagatagcggaaca

SEQ ID NO: 441561 - DNA, 30 bp, Artificial Sequence
  Synthetic oligonucleotide
gtcggtccctctgtatcttcacagggaaca

SEQ ID NO: 441562 - DNA, 30 bp, Artificial Sequence
  Synthetic oligonucleotide
ggttacacccaggcctctatctagggaaca

SEQ ID NO: 441563 - DNA, 30 bp, Artificial Sequence
  Synthetic oligonucleotide
aactacatccaactctgtttcaggggaaca

SEQ ID NO: 441564 - DNA, 30 bp, Artificial Sequence
  Synthetic oligonucleotide
cgcggaaggggtcgttctaaggggggaaca

SEQ ID NO: 441565 - DNA, 30 bp, Artificial Sequence
  Synthetic oligonucleotide
cgctttagatcacggacaaaccatggaaca

SEQ ID NO: 441566 - DNA, 30 bp, Artificial Sequence
  Synthetic oligonucleotide
ggtcggatagcgtgttcaaattatggaaca

SEQ ID NO: 441567 - DNA, 30 bp, Artificial Sequence
  Synthetic oligonucleotide
gcttggtcggttcaaagttagcaatgaaca

SEQ ID NO: 441568 - DNA, 30 bp, Artificial Sequence
  Synthetic oligonucleotide
ttccaaataggcgttgggttacagtgaaca

SEQ ID NO: 441569 - DNA, 30 bp, Artificial Sequence
  Synthetic oligonucleotide
aattcaaatattaaccgcgggaggtgaaca

SEQ ID NO: 441570 - DNA, 30 bp, Artificial Sequence
  Synthetic oligonucleotide
gtggttattctatattattttctgtgaaca

SEQ ID NO: 441571 - DNA, 30 bp, Artificial Sequence
  Synthetic oligonucleotide
tagttgatacacttagtcctaagttgaaca

SEQ ID NO: 441572 - DNA, 30 bp, Artificial Sequence
  Synthetic oligonucleotide
tatcttaattgaaattttgcattttgaaca

SEQ ID NO: 441573 - DNA, 30 bp, Artificial Sequence
  Synthetic oligonucleotide
tcaagggaaacccggggttagaaaataaca

SEQ ID NO: 441574 - DNA, 30 bp, Artificial Sequence
  Synthetic oligonucleotide
tggatcgctagaaatttattacaaataaca

SEQ ID NO: 441575 - DNA, 30 bp, Artificial Sequence
  Synthetic oligonucleotide
gattcgtctagtcttaatttagcaataaca

SEQ ID NO: 441576 - DNA, 30 bp, Artificial Sequence
  Synthetic oligonucleotide
ttgcgcggagagtctgggtaaagaataaca

SEQ ID NO: 441577 - DNA, 30 bp, Artificial Sequence
  Synthetic oligonucleotide
gcttcgctgggaactacagggggaataaca

SEQ ID NO: 441578 - DNA, 30 bp, Artificial Sequence
  Synthetic oligonucleotide
gaaataaacgatatgtttaggaacataaca

SEQ ID NO: 441579 - DNA, 30 bp, Artificial Sequence
  Synthetic oligonucleotide
attggtcgtcgtggacgagtacacataaca

SEQ ID NO: 441580 - DNA, 30 bp, Artificial Sequence
  Synthetic oligonucleotide
tatacatgtcggtcgatattatgcataaca

SEQ ID NO: 441581 - DNA, 30 bp, Artificial Sequence
  Synthetic oligonucleotide
ctgcactcgggcggcctgtaacggataaca

SEQ ID NO: 441582 - DNA, 30 bp, Artificial Sequence
  Synthetic oligonucleotide
ggatcacattcatgttctcaagatataaca

SEQ ID NO: 441583 - DNA, 30 bp, Artificial Sequence
  Synthetic oligonucleotide
tatgatatttcaagccagtaaactataaca

SEQ ID NO: 441584 - DNA, 30 bp, Artificial Sequence
  Synthetic oligonucleotide
atagagcgacgcggtcggatatgtataaca

SEQ ID NO: 441585 - DNA, 30 bp, Artificial Sequence
  Synthetic oligonucleotide
acaaggcccgtgtggatcggagttataaca

SEQ ID NO: 441586 - DNA, 30 bp, Artificial Sequence
  Synthetic oligonucleotide
gatctcggccgcgcgctaagcatgctaaca

SEQ ID NO: 441587 - DNA, 30 bp, Artificial Sequence
  Synthetic oligonucleotide
agataaaggcatgaatagacgtatctaaca

SEQ ID NO: 441588 - DNA, 30 bp, Artificial Sequence
  Synthetic oligonucleotide
cggacacagtgcgttacgggaactctaaca

SEQ ID NO: 441589 - DNA, 30 bp, Artificial Sequence
  Synthetic oligonucleotide
tatcctgaaaagaaatcgagttctctaaca

SEQ ID NO: 441590 - DNA, 30 bp, Artificial Sequence
  Synthetic oligonucleotide
cttaaatacgtggtaaacaagcgagtaaca

SEQ ID NO: 441591 - DNA, 30 bp, Artificial Sequence
  Synthetic oligonucleotide
gaagcttcagttacgtttttgtgcgtaaca

SEQ ID NO: 441592 - DNA, 30 bp, Artificial Sequence
  Synthetic oligonucleotide
gtatccgcatggggtaccctattcgtaaca

SEQ ID NO: 441593 - DNA, 30 bp, Artificial Sequence
  Synthetic oligonucleotide
acctatggagctccgagacactaggtaaca

SEQ ID NO: 441594 - DNA, 30 bp, Artificial Sequence
  Synthetic oligonucleotide
gttagaccgctgattgtgacaacggtaaca

SEQ ID NO: 441595 - DNA, 30 bp, Artificial Sequence
  Synthetic oligonucleotide
ggcgggtctggggttaggctcgcggtaaca

SEQ ID NO: 441596 - DNA, 30 bp, Artificial Sequence
  Synthetic oligonucleotide
gatgtttatacataacgaaggatggtaaca

SEQ ID NO: 441597 - DNA, 30 bp, Artificial Sequence
  Synthetic oligonucleotide
catgttctcattggacaatcccatgtaaca

SEQ ID NO: 441598 - DNA, 30 bp, Artificial Sequence
  Synthetic oligonucleotide
ctctccgatagaaatgtgtcataattaaca

SEQ ID NO: 441599 - DNA, 30 bp, Artificial Sequence
  Synthetic oligonucleotide
gcagtatcaatgtgatgaacctcattaaca

SEQ ID NO: 441600 - DNA, 30 bp, Artificial Sequence
  Synthetic oligonucleotide
ttgccactcaatggtcaatagatattaaca

SEQ ID NO: 441601 - DNA, 30 bp, Artificial Sequence
  Synthetic oligonucleotide
tctccggttatctatcaggaaaagttaaca

SEQ ID NO: 441602 - DNA, 30 bp, Artificial Sequence
  Synthetic oligonucleotide
ataaatttgctagaggtatcgaagttaaca

SEQ ID NO: 441603 - DNA, 30 bp, Artificial Sequence
  Synthetic oligonucleotide
acgtagaactggacgacgtaggcaaacaca

SEQ ID NO: 441604 - DNA, 30 bp, Artificial Sequence
  Synthetic oligonucleotide
acttggagtgttggggtttggctcaacaca

SEQ ID NO: 441605 - DNA, 30 bp, Artificial Sequence
  Synthetic oligonucleotide
tcatttcatgcaaccgtgtcttagaacaca

SEQ ID NO: 441606 - DNA, 30 bp, Artificial Sequence
  Synthetic oligonucleotide
atctgaatgattagaccgcacacgaacaca

SEQ ID NO: 441607 - DNA, 30 bp, Artificial Sequence
  Synthetic oligonucleotide
tggcggcagcgtgtggagaaacataacaca

SEQ ID NO: 441608 - DNA, 30 bp, Artificial Sequence
  Synthetic oligonucleotide
aaactgggcgaaatttcatttggtaacaca

SEQ ID NO: 441609 - DNA, 30 bp, Artificial Sequence
  Synthetic oligonucleotide
tgaaataacctgaggggtggctgtaacaca

SEQ ID NO: 441610 - DNA, 30 bp, Artificial Sequence
  Synthetic oligonucleotide
cccaaggaacctagggcattgacacacaca

SEQ ID NO: 441611 - DNA, 30 bp, Artificial Sequence
  Synthetic oligonucleotide
aaccggctaaaggaccatacaggacacaca

SEQ ID NO: 441612 - DNA, 30 bp, Artificial Sequence
  Synthetic oligonucleotide
cttagaagagcgcacataataggacacaca

SEQ ID NO: 441613 - DNA, 30 bp, Artificial Sequence
  Synthetic oligonucleotide
tatatggtattaacccgagtggcccacaca

SEQ ID NO: 441614 - DNA, 30 bp, Artificial Sequence
  Synthetic oligonucleotide
cttctcctttgtgagtagtcttgccacaca

SEQ ID NO: 441615 - DNA, 30 bp, Artificial Sequence
  Synthetic oligonucleotide
tcgtttagcgcgtgagagcgtaagcacaca

SEQ ID NO: 441616 - DNA, 30 bp, Artificial Sequence
  Synthetic oligonucleotide
tgctgttgggtcgtacataattcgcacaca

SEQ ID NO: 441617 - DNA, 30 bp, Artificial Sequence
  Synthetic oligonucleotide
gcaatcttaccagtgcccattttgcacaca

SEQ ID NO: 441618 - DNA, 30 bp, Artificial Sequence
  Synthetic oligonucleotide
gtttggctccgtggggtacaagttcacaca

SEQ ID NO: 441619 - DNA, 30 bp, Artificial Sequence
  Synthetic oligonucleotide
tgcactagcgatttctttagaaacgacaca

SEQ ID NO: 441620 - DNA, 30 bp, Artificial Sequence
  Synthetic oligonucleotide
tctcggaggcttagcgaaatccacgacaca

SEQ ID NO: 441621 - DNA, 30 bp, Artificial Sequence
  Synthetic oligonucleotide
tatacttccgcatactgtcaaacggacaca

SEQ ID NO: 441622 - DNA, 30 bp, Artificial Sequence
  Synthetic oligonucleotide
acggacaatgagtcacgtgccacggacaca

SEQ ID NO: 441623 - DNA, 30 bp, Artificial Sequence
  Synthetic oligonucleotide
cacactcagcgtgttagtcacattgacaca

SEQ ID NO: 441624 - DNA, 30 bp, Artificial Sequence
  Synthetic oligonucleotide
agactatttgttacgcaacgcgcctacaca

SEQ ID NO: 441625 - DNA, 30 bp, Artificial Sequence
  Synthetic oligonucleotide
gttgtgcgtagaacttcctagggctacaca

SEQ ID NO: 441626 - DNA, 30 bp, Artificial Sequence
  Synthetic oligonucleotide
tcgcgtattctcatgatctgatgctacaca

SEQ ID NO: 441627 - DNA, 30 bp, Artificial Sequence
  Synthetic oligonucleotide
ttgagggggccatggtcatcaatgtacaca

SEQ ID NO: 441628 - DNA, 30 bp, Artificial Sequence
  Synthetic oligonucleotide
gaagacacgtgtcgcgatccggagaccaca

SEQ ID NO: 441629 - DNA, 30 bp, Artificial Sequence
  Synthetic oligonucleotide
agaggtgttagacacagaacgtttaccaca

SEQ ID NO: 441630 - DNA, 30 bp, Artificial Sequence
  Synthetic oligonucleotide
ttatgctaatatggttatatttaacccaca

SEQ ID NO: 441631 - DNA, 30 bp, Artificial Sequence
  Synthetic oligonucleotide
tgaaccggacctttaatacgtagccccaca

SEQ ID NO: 441632 - DNA, 30 bp, Artificial Sequence
  Synthetic oligonucleotide
atgcaagtcgtgcggtgctggctccccaca

SEQ ID NO: 441633 - DNA, 30 bp, Artificial Sequence
  Synthetic oligonucleotide
gactagccgcaattaggttggtagcccaca

SEQ ID NO: 441634 - DNA, 30 bp, Artificial Sequence
  Synthetic oligonucleotide
tttttagagcatccctggtattggcccaca

SEQ ID NO: 441635 - DNA, 30 bp, Artificial Sequence
  Synthetic oligonucleotide
tggagagaacagctcagtcagcaagccaca

SEQ ID NO: 441636 - DNA, 30 bp, Artificial Sequence
  Synthetic oligonucleotide
aatctcccgaagtatgaaaattgggccaca

SEQ ID NO: 441637 - DNA, 30 bp, Artificial Sequence
  Synthetic oligonucleotide
gcattgcacgtagacgggtaacgtgccaca

SEQ ID NO: 441638 - DNA, 30 bp, Artificial Sequence
  Synthetic oligonucleotide
aatatggatcggacttctcatggttccaca

SEQ ID NO: 441639 - DNA, 30 bp, Artificial Sequence
  Synthetic oligonucleotide
gagatatttggaatgagatttatttccaca

SEQ ID NO: 441640 - DNA, 30 bp, Artificial Sequence
  Synthetic oligonucleotide
aacctgattttaccgccccgtcacagcaca

SEQ ID NO: 441641 - DNA, 30 bp, Artificial Sequence
  Synthetic oligonucleotide
taagcctgggtagcgtgctcggacagcaca

SEQ ID NO: 441642 - DNA, 30 bp, Artificial Sequence
  Synthetic oligonucleotide
ttctaatagagggcctctacgggcagcaca

SEQ ID NO: 441643 - DNA, 30 bp, Artificial Sequence
  Synthetic oligonucleotide
tgctttgcgaggaaggctcgccatagcaca

SEQ ID NO: 441644 - DNA, 30 bp, Artificial Sequence
  Synthetic oligonucleotide
cggaaacctaatattactgtaactagcaca

SEQ ID NO: 441645 - DNA, 30 bp, Artificial Sequence
  Synthetic oligonucleotide
gagatgcccggggttaatggtagtagcaca

SEQ ID NO: 441646 - DNA, 30 bp, Artificial Sequence
  Synthetic oligonucleotide
ggttcaacccaacggcacctgaaacgcaca

SEQ ID NO: 441647 - DNA, 30 bp, Artificial Sequence
  Synthetic oligonucleotide
ccggtatacgtgcccccgttagaacgcaca

SEQ ID NO: 441648 - DNA, 30 bp, Artificial Sequence
  Synthetic oligonucleotide
gcgctccgacgtggcgtgtcataacgcaca

SEQ ID NO: 441649 - DNA, 30 bp, Artificial Sequence
  Synthetic oligonucleotide
agtacatcgctccgaacgtgtcgacgcaca

SEQ ID NO: 441650 - DNA, 30 bp, Artificial Sequence
  Synthetic oligonucleotide
acttatccatactaccacaccatacgcaca

SEQ ID NO: 441651 - DNA, 30 bp, Artificial Sequence
  Synthetic oligonucleotide
gtaagcgcgtttcactatgtgttccgcaca

SEQ ID NO: 441652 - DNA, 30 bp, Artificial Sequence
  Synthetic oligonucleotide
tgctcgcagcatttactagccgagcgcaca

SEQ ID NO: 441653 - DNA, 30 bp, Artificial Sequence
  Synthetic oligonucleotide
tcagcaaattgcgtgcatagggcgcgcaca

SEQ ID NO: 441654 - DNA, 30 bp, Artificial Sequence
  Synthetic oligonucleotide
ggacccggtaggtaggtgcttgcgcgcaca

SEQ ID NO: 441655 - DNA, 30 bp, Artificial Sequence
  Synthetic oligonucleotide
tcatgaggcagctatacggctctgcgcaca

SEQ ID NO: 441656 - DNA, 30 bp, Artificial Sequence
  Synthetic oligonucleotide
tgcaggtaatgcggctagcgcgtgcgcaca

SEQ ID NO: 441657 - DNA, 30 bp, Artificial Sequence
  Synthetic oligonucleotide
ggactgatgccagtttatgtgcctcgcaca

SEQ ID NO: 441658 - DNA, 30 bp, Artificial Sequence
  Synthetic oligonucleotide
atgacaacgagtagggttcatgttcgcaca

SEQ ID NO: 441659 - DNA, 30 bp, Artificial Sequence
  Synthetic oligonucleotide
ccacagtcgcaaaacgtcggttccggcaca

SEQ ID NO: 441660 - DNA, 30 bp, Artificial Sequence
  Synthetic oligonucleotide
taacagcaatatccggcgagctgcggcaca

SEQ ID NO: 441661 - DNA, 30 bp, Artificial Sequence
  Synthetic oligonucleotide
tgaaccgtatgtcccagcttcccgggcaca

SEQ ID NO: 441662 - DNA, 30 bp, Artificial Sequence
  Synthetic oligonucleotide
cttctgaatttggacattggtaatggcaca

SEQ ID NO: 441663 - DNA, 30 bp, Artificial Sequence
  Synthetic oligonucleotide
tcacggtggatggcagcaggagatggcaca

SEQ ID NO: 441664 - DNA, 30 bp, Artificial Sequence
  Synthetic oligonucleotide
taggtataccatatttctgttgttggcaca

SEQ ID NO: 441665 - DNA, 30 bp, Artificial Sequence
  Synthetic oligonucleotide
tggggttcggtcacgcttgacgcatgcaca

SEQ ID NO: 441666 - DNA, 30 bp, Artificial Sequence
  Synthetic oligonucleotide
gtataatgctaacgccccttgcgatgcaca

SEQ ID NO: 441667 - DNA, 30 bp, Artificial Sequence
  Synthetic oligonucleotide
cttgtcccgcttactcaataaatatgcaca

SEQ ID NO: 441668 - DNA, 30 bp, Artificial Sequence
  Synthetic oligonucleotide
aacgtcttttgggggatattactatgcaca

SEQ ID NO: 441669 - DNA, 30 bp, Artificial Sequence
  Synthetic oligonucleotide
gatttggtcgcgctgtttgcgttctgcaca

SEQ ID NO: 441670 - DNA, 30 bp, Artificial Sequence
  Synthetic oligonucleotide
tggatctcgttatgagcactgtagtgcaca

SEQ ID NO: 441671 - DNA, 30 bp, Artificial Sequence
  Synthetic oligonucleotide
tacgctcttacaagttcagtctggtgcaca

SEQ ID NO: 441672 - DNA, 30 bp, Artificial Sequence
  Synthetic oligonucleotide
ctttcgtgcggggcaaacatcacttgcaca

SEQ ID NO: 441673 - DNA, 30 bp, Artificial Sequence
  Synthetic oligonucleotide
ctaccatcgccggcccgtatgtccatcaca

SEQ ID NO: 441674 - DNA, 30 bp, Artificial Sequence
  Synthetic oligonucleotide
cgctggccgtgcggtctcgtcggcatcaca

SEQ ID NO: 441675 - DNA, 30 bp, Artificial Sequence
  Synthetic oligonucleotide
ggttagtgttacgcccaagggggcatcaca

SEQ ID NO: 441676 - DNA, 30 bp, Artificial Sequence
  Synthetic oligonucleotide
cttgtagttggacacatggcaaggatcaca

SEQ ID NO: 441677 - DNA, 30 bp, Artificial Sequence
  Synthetic oligonucleotide
caaatacggcaaggcgaggtctggatcaca

SEQ ID NO: 441678 - DNA, 30 bp, Artificial Sequence
  Synthetic oligonucleotide
agttttattagggtcagggctatgatcaca

SEQ ID NO: 441679 - DNA, 30 bp, Artificial Sequence
  Synthetic oligonucleotide
aaatgtacgtaggcttgtcatgctatcaca

SEQ ID NO: 441680 - DNA, 30 bp, Artificial Sequence
  Synthetic oligonucleotide
gagtgaagtaccataacagcgattatcaca

SEQ ID NO: 441681 - DNA, 30 bp, Artificial Sequence
  Synthetic oligonucleotide
ggcggcgatgaggcgtatgaaaggctcaca

SEQ ID NO: 441682 - DNA, 30 bp, Artificial Sequence
  Synthetic oligonucleotide
acggccgcgtacgcacccatagggctcaca

SEQ ID NO: 441683 - DNA, 30 bp, Artificial Sequence
  Synthetic oligonucleotide
gtgcatacgacgcgcattttatggctcaca

SEQ ID NO: 441684 - DNA, 30 bp, Artificial Sequence
  Synthetic oligonucleotide
aggttcaagttcagagaccgcctgctcaca

SEQ ID NO: 441685 - DNA, 30 bp, Artificial Sequence
  Synthetic oligonucleotide
acccccagattcggtgaaggtcatctcaca

SEQ ID NO: 441686 - DNA, 30 bp, Artificial Sequence
  Synthetic oligonucleotide
tgcattatgaccgttatagacggtctcaca

SEQ ID NO: 441687 - DNA, 30 bp, Artificial Sequence
  Synthetic oligonucleotide
attatttatattcgcattcgtattctcaca

SEQ ID NO: 441688 - DNA, 30 bp, Artificial Sequence
  Synthetic oligonucleotide
gaatggttaattttctatttgaacgtcaca

SEQ ID NO: 441689 - DNA, 30 bp, Artificial Sequence
  Synthetic oligonucleotide
gatgttctgatcggagaccgatccgtcaca

SEQ ID NO: 441690 - DNA, 30 bp, Artificial Sequence
  Synthetic oligonucleotide
ggccgtaagtcccaaaaactagatgtcaca

SEQ ID NO: 441691 - DNA, 30 bp, Artificial Sequence
  Synthetic oligonucleotide
ttgggagttcgggagaactagcaattcaca

SEQ ID NO: 441692 - DNA, 30 bp, Artificial Sequence
  Synthetic oligonucleotide
tctcgccgtgttctcggttattaattcaca

SEQ ID NO: 441693 - DNA, 30 bp, Artificial Sequence
  Synthetic oligonucleotide
aaatgcatatggtctgaatagacattcaca

SEQ ID NO: 441694 - DNA, 30 bp, Artificial Sequence
  Synthetic oligonucleotide
cctagttttgacgaccggaaatcattcaca

SEQ ID NO: 441695 - DNA, 30 bp, Artificial Sequence
  Synthetic oligonucleotide
aacaacgtggcctggatccagggattcaca

SEQ ID NO: 441696 - DNA, 30 bp, Artificial Sequence
  Synthetic oligonucleotide
gagtcaaggtcgtatctcttagtattcaca

SEQ ID NO: 441697 - DNA, 30 bp, Artificial Sequence
  Synthetic oligonucleotide
gggttctactgttgcatccccagcttcaca

SEQ ID NO: 441698 - DNA, 30 bp, Artificial Sequence
  Synthetic oligonucleotide
gcaatcctaccgctgtatatatgcttcaca

SEQ ID NO: 441699 - DNA, 30 bp, Artificial Sequence
  Synthetic oligonucleotide
tctgtcgacctggccgagttgcagttcaca

SEQ ID NO: 441700 - DNA, 30 bp, Artificial Sequence
  Synthetic oligonucleotide
tagttgaaattgttccgtagagtgttcaca

SEQ ID NO: 441701 - DNA, 30 bp, Artificial Sequence
  Synthetic oligonucleotide
actcattatcggtctgattgacaaaagaca

SEQ ID NO: 441702 - DNA, 30 bp, Artificial Sequence
  Synthetic oligonucleotide
gagaccaaaagtttctcgtcggagaagaca

SEQ ID NO: 441703 - DNA, 30 bp, Artificial Sequence
  Synthetic oligonucleotide
cagccacgcagtcacacgattttgaagaca

SEQ ID NO: 441704 - DNA, 30 bp, Artificial Sequence
  Synthetic oligonucleotide
gagtggaactgggcccgctctacgcagaca

SEQ ID NO: 441705 - DNA, 30 bp, Artificial Sequence
  Synthetic oligonucleotide
tactgtctgctctcttgggcatcgcagaca

SEQ ID NO: 441706 - DNA, 30 bp, Artificial Sequence
  Synthetic oligonucleotide
cccattggggtaatatggggtcgtcagaca

SEQ ID NO: 441707 - DNA, 30 bp, Artificial Sequence
  Synthetic oligonucleotide
ctcttcttaaaccttaggtaaggtcagaca

SEQ ID NO: 441708 - DNA, 30 bp, Artificial Sequence
  Synthetic oligonucleotide
gtccggtgtttttacctgaccatagagaca

SEQ ID NO: 441709 - DNA, 30 bp, Artificial Sequence
  Synthetic oligonucleotide
tggaggcccaaagaacaaacagccgagaca

SEQ ID NO: 441710 - DNA, 30 bp, Artificial Sequence
  Synthetic oligonucleotide
gtctactgcccttatcatggatcggagaca

SEQ ID NO: 441711 - DNA, 30 bp, Artificial Sequence
  Synthetic oligonucleotide
gtaccgctccggaacgcaggtcgggagaca

SEQ ID NO: 441712 - DNA, 30 bp, Artificial Sequence
  Synthetic oligonucleotide
caacccagacccggcaaggcgtatgagaca

SEQ ID NO: 441713 - DNA, 29 bp, Artificial Sequence
  Synthetic oligonucleotide
actttcagaagtgtggttaaacatagaca

SEQ ID NO: 441714 - DNA, 30 bp, Artificial Sequence
  Synthetic oligonucleotide
cctgttttagtcttgtagaaacgatagaca

SEQ ID NO: 441715 - DNA, 30 bp, Artificial Sequence
  Synthetic oligonucleotide
ttcaccactgtcgcacgcttgtgatagaca

SEQ ID NO: 441716 - DNA, 30 bp, Artificial Sequence
  Synthetic oligonucleotide
ataatgaacggggcctattggtactagaca

SEQ ID NO: 441717 - DNA, 30 bp, Artificial Sequence
  Synthetic oligonucleotide
ataattaggcgcagggcttcttattagaca

SEQ ID NO: 441718 - DNA, 30 bp, Artificial Sequence
  Synthetic oligonucleotide
ctgcccgaatacgtaaccgggagttagaca

SEQ ID NO: 441719 - DNA, 30 bp, Artificial Sequence
  Synthetic oligonucleotide
atggcaacatactcaagtttaggttagaca

SEQ ID NO: 441720 - DNA, 30 bp, Artificial Sequence
  Synthetic oligonucleotide
tcccgtgacaatcgatgggaggtttagaca

SEQ ID NO: 441721 - DNA, 30 bp, Artificial Sequence
  Synthetic oligonucleotide
aattcgacgtaaggcagcacgtgaacgaca

SEQ ID NO: 441722 - DNA, 30 bp, Artificial Sequence
  Synthetic oligonucleotide
acctatcgttccgcataagcgaccacgaca

SEQ ID NO: 441723 - DNA, 30 bp, Artificial Sequence
  Synthetic oligonucleotide
ggatatccacaaaccagttgaatgacgaca

SEQ ID NO: 441724 - DNA, 30 bp, Artificial Sequence
  Synthetic oligonucleotide
ataatatgctgaacaaaaggcctgacgaca

SEQ ID NO: 441725 - DNA, 30 bp, Artificial Sequence
  Synthetic oligonucleotide
agttcctgtcagcggaccaagcttacgaca

SEQ ID NO: 441726 - DNA, 30 bp, Artificial Sequence
  Synthetic oligonucleotide
cgccttccgttgctttaacggcacccgaca

SEQ ID NO: 441727 - DNA, 30 bp, Artificial Sequence
  Synthetic oligonucleotide
gttgggttgtgcttctctgacgacccgaca

SEQ ID NO: 441728 - DNA, 30 bp, Artificial Sequence
  Synthetic oligonucleotide
acctcacttcggatgggtttaagcccgaca

SEQ ID NO: 441729 - DNA, 30 bp, Artificial Sequence
  Synthetic oligonucleotide
tattggtaagcggtcgtacaatggccgaca

SEQ ID NO: 441730 - DNA, 30 bp, Artificial Sequence
  Synthetic oligonucleotide
cacggccgggatactctagtatggccgaca

SEQ ID NO: 441731 - DNA, 30 bp, Artificial Sequence
  Synthetic oligonucleotide
cacagctccgtaccgagcgctagagcgaca

SEQ ID NO: 441732 - DNA, 30 bp, Artificial Sequence
  Synthetic oligonucleotide
actccggtacgcgctgggagtaaggcgaca

SEQ ID NO: 441733 - DNA, 30 bp, Artificial Sequence
  Synthetic oligonucleotide
gccattttgtagttgacggcggtggcgaca

SEQ ID NO: 441734 - DNA, 30 bp, Artificial Sequence
  Synthetic oligonucleotide
tgacatatcggcccgtacaatgcctcgaca

SEQ ID NO: 441735 - DNA, 30 bp, Artificial Sequence
  Synthetic oligonucleotide
tagctgatcaccgcacaactggcgtcgaca

SEQ ID NO: 441736 - DNA, 30 bp, Artificial Sequence
  Synthetic oligonucleotide
ctgaactctttccttggccaagaaaggaca

SEQ ID NO: 441737 - DNA, 30 bp, Artificial Sequence
  Synthetic oligonucleotide
tgataatcgcggcacccgcgactaaggaca

SEQ ID NO: 441738 - DNA, 30 bp, Artificial Sequence
  Synthetic oligonucleotide
tatcatgaagtattccgacgtaacaggaca

SEQ ID NO: 441739 - DNA, 30 bp, Artificial Sequence
  Synthetic oligonucleotide
tatgccttacagtaaatcccaggcaggaca

SEQ ID NO: 441740 - DNA, 30 bp, Artificial Sequence
  Synthetic oligonucleotide
tcgaatattctagggagtagtctcaggaca

SEQ ID NO: 441741 - DNA, 30 bp, Artificial Sequence
  Synthetic oligonucleotide
catacgggatacttacttcaggctaggaca

SEQ ID NO: 441742 - DNA, 30 bp, Artificial Sequence
  Synthetic oligonucleotide
aactagtatgcgcgcttctctgttaggaca

SEQ ID NO: 441743 - DNA, 30 bp, Artificial Sequence
  Synthetic oligonucleotide
ggcggtgttttgggcccgttcagacggaca

SEQ ID NO: 441744 - DNA, 30 bp, Artificial Sequence
  Synthetic oligonucleotide
ttaacatggtaaaaatatgagtgacggaca

SEQ ID NO: 441745 - DNA, 30 bp, Artificial Sequence
  Synthetic oligonucleotide
ttcttccgtgtcttggggcattgacggaca

SEQ ID NO: 441746 - DNA, 30 bp, Artificial Sequence
  Synthetic oligonucleotide
ggttacagttgtaattctacaagccggaca

SEQ ID NO: 441747 - DNA, 30 bp, Artificial Sequence
  Synthetic oligonucleotide
aattcaagacatacggctcgaagccggaca

SEQ ID NO: 441748 - DNA, 30 bp, Artificial Sequence
  Synthetic oligonucleotide
attaaaaaaacgaggttgcaaggccggaca

SEQ ID NO: 441749 - DNA, 30 bp, Artificial Sequence
  Synthetic oligonucleotide
gttaggtcatatcactatgccatccggaca

SEQ ID NO: 441750 - DNA, 30 bp, Artificial Sequence
  Synthetic oligonucleotide
aatagaggtaagtcgcccctatagcggaca

SEQ ID NO: 441751 - DNA, 30 bp, Artificial Sequence
  Synthetic oligonucleotide
gtgtctatggccacccttgctgcgcggaca

SEQ ID NO: 441752 - DNA, 30 bp, Artificial Sequence
  Synthetic oligonucleotide
atattatagtcgcctgcgacagatcggaca

SEQ ID NO: 441753 - DNA, 30 bp, Artificial Sequence
  Synthetic oligonucleotide
gcaccgtcggacgttttttgccttcggaca

SEQ ID NO: 441754 - DNA, 30 bp, Artificial Sequence
  Synthetic oligonucleotide
tgtattacggaaacggttgaagttcggaca

SEQ ID NO: 441755 - DNA, 30 bp, Artificial Sequence
  Synthetic oligonucleotide
ttttctgcagggttattatgggaagggaca

SEQ ID NO: 441756 - DNA, 30 bp, Artificial Sequence
  Synthetic oligonucleotide
aaggttgcggagcataacggagcggggaca

SEQ ID NO: 441757 - DNA, 30 bp, Artificial Sequence
  Synthetic oligonucleotide
aacgggtaaagctattcctgtagggggaca

SEQ ID NO: 441758 - DNA, 30 bp, Artificial Sequence
  Synthetic oligonucleotide
tgagcgcacaccgcatcacgtcgggggaca

SEQ ID NO: 441759 - DNA, 30 bp, Artificial Sequence
  Synthetic oligonucleotide
agatcagcaatgcgacttattgatgggaca

SEQ ID NO: 441760 - DNA, 30 bp, Artificial Sequence
  Synthetic oligonucleotide
ccttttaagtgcagtggctcataatggaca

SEQ ID NO: 441761 - DNA, 30 bp, Artificial Sequence
  Synthetic oligonucleotide
aagatctaagctcagagtgagacctggaca

SEQ ID NO: 441762 - DNA, 30 bp, Artificial Sequence
  Synthetic oligonucleotide
tctacatttcttcagacgtttaagtggaca

SEQ ID NO: 441763 - DNA, 30 bp, Artificial Sequence
  Synthetic oligonucleotide
aaaagtctttcgagataggttggaatgaca

SEQ ID NO: 441764 - DNA, 30 bp, Artificial Sequence
  Synthetic oligonucleotide
tttagcgcaatatggcgcagatgaatgaca

SEQ ID NO: 441765 - DNA, 30 bp, Artificial Sequence
  Synthetic oligonucleotide
cacggatggtgcgttgaaattggcatgaca

SEQ ID NO: 441766 - DNA, 30 bp, Artificial Sequence
  Synthetic oligonucleotide
gtcagatagaaccgaaggtatttcatgaca

SEQ ID NO: 441767 - DNA, 30 bp, Artificial Sequence
  Synthetic oligonucleotide
agcagcaacccatccgcgcccgagatgaca

SEQ ID NO: 441768 - DNA, 30 bp, Artificial Sequence
  Synthetic oligonucleotide
tgaactttggcaaagcgttggtctatgaca

SEQ ID NO: 441769 - DNA, 30 bp, Artificial Sequence
  Synthetic oligonucleotide
aataaggagttacttcgtttacgtatgaca

SEQ ID NO: 441770 - DNA, 30 bp, Artificial Sequence
  Synthetic oligonucleotide
gttggcttaaagttatgttcgagactgaca

SEQ ID NO: 441771 - DNA, 30 bp, Artificial Sequence
  Synthetic oligonucleotide
gtttgtcctaagacgggagaaatgctgaca

SEQ ID NO: 441772 - DNA, 30 bp, Artificial Sequence
  Synthetic oligonucleotide
tatgcgttctacaagaaacttaatctgaca

SEQ ID NO: 441773 - DNA, 30 bp, Artificial Sequence
  Synthetic oligonucleotide
acgtagccgtaactcaatggcgctctgaca

SEQ ID NO: 441774 - DNA, 30 bp, Artificial Sequence
  Synthetic oligonucleotide
atcacagcatcgcctgttgtcagtctgaca

SEQ ID NO: 441775 - DNA, 30 bp, Artificial Sequence
  Synthetic oligonucleotide
aaaagggccctccgactttttattctgaca

SEQ ID NO: 441776 - DNA, 30 bp, Artificial Sequence
  Synthetic oligonucleotide
gtattcacgagtaccaagttacgagtgaca

SEQ ID NO: 441777 - DNA, 30 bp, Artificial Sequence
  Synthetic oligonucleotide
aataagtattatgtttatatcgccgtgaca

SEQ ID NO: 441778 - DNA, 30 bp, Artificial Sequence
  Synthetic oligonucleotide
gtaatcacgcgtaatagtcagggcgtgaca

SEQ ID NO: 441779 - DNA, 30 bp, Artificial Sequence
  Synthetic oligonucleotide
tccgccgcgctcttcactagagtcgtgaca

SEQ ID NO: 441780 - DNA, 30 bp, Artificial Sequence
  Synthetic oligonucleotide
ttcttgtaccgtgggctttttcatgtgaca

SEQ ID NO: 441781 - DNA, 30 bp, Artificial Sequence
  Synthetic oligonucleotide
caaattaaaagaacggtgtggtatgtgaca

SEQ ID NO: 441782 - DNA, 30 bp, Artificial Sequence
  Synthetic oligonucleotide
gacctgtgcagacgctgtacgcgtgtgaca

SEQ ID NO: 441783 - DNA, 30 bp, Artificial Sequence
  Synthetic oligonucleotide
agatacagtaacggtagatgcacattgaca

SEQ ID NO: 441784 - DNA, 30 bp, Artificial Sequence
  Synthetic oligonucleotide
tttgcaacggacgactgaatttagttgaca

SEQ ID NO: 441785 - DNA, 30 bp, Artificial Sequence
  Synthetic oligonucleotide
cccgcaatctacgggactttcaatttgaca

SEQ ID NO: 441786 - DNA, 30 bp, Artificial Sequence
  Synthetic oligonucleotide
tagcaactgagtgttaacttgcgaaataca

SEQ ID NO: 441787 - DNA, 30 bp, Artificial Sequence
  Synthetic oligonucleotide
gtaaatgtaatgtgcttagcgaacaataca

SEQ ID NO: 441788 - DNA, 30 bp, Artificial Sequence
  Synthetic oligonucleotide
gacagcgccatatcgacggagcacaataca

SEQ ID NO: 441789 - DNA, 30 bp, Artificial Sequence
  Synthetic oligonucleotide
cttccaccgtaagtgaaaagatacaataca

SEQ ID NO: 441790 - DNA, 30 bp, Artificial Sequence
  Synthetic oligonucleotide
gagccgcgtatcttctatattcccaataca

SEQ ID NO: 441791 - DNA, 30 bp, Artificial Sequence
  Synthetic oligonucleotide
ttagggaaactcaagaccacagccaataca

SEQ ID NO: 441792 - DNA, 30 bp, Artificial Sequence
  Synthetic oligonucleotide
aggactatggcgagtcaggcaggcaataca

SEQ ID NO: 441793 - DNA, 30 bp, Artificial Sequence
  Synthetic oligonucleotide
aatttcatatccaaaataggaccgaataca

SEQ ID NO: 441794 - DNA, 30 bp, Artificial Sequence
  Synthetic oligonucleotide
gtacggagcagtacaccgaagtcgaataca

SEQ ID NO: 441795 - DNA, 30 bp, Artificial Sequence
  Synthetic oligonucleotide
atgttgctgatcctcattggtaggaataca

SEQ ID NO: 441796 - DNA, 30 bp, Artificial Sequence
  Synthetic oligonucleotide
cactcgcgggatgatccagttgtgaataca

SEQ ID NO: 441797 - DNA, 30 bp, Artificial Sequence
  Synthetic oligonucleotide
gatcctcaaggaacccagcgtaataataca

SEQ ID NO: 441798 - DNA, 30 bp, Artificial Sequence
  Synthetic oligonucleotide
gagatagtatgtaggaccctatctaataca

SEQ ID NO: 441799 - DNA, 30 bp, Artificial Sequence
  Synthetic oligonucleotide
aatgcactaacgagactcgtactccataca

SEQ ID NO: 441800 - DNA, 30 bp, Artificial Sequence
  Synthetic oligonucleotide
catattggtaatgcatatatgaagcataca

SEQ ID NO: 441801 - DNA, 30 bp, Artificial Sequence
  Synthetic oligonucleotide
gcggtatgtcgcctaagacacacgcataca

SEQ ID NO: 441802 - DNA, 30 bp, Artificial Sequence
  Synthetic oligonucleotide
ggaataggataggtatattgcacgcataca

SEQ ID NO: 441803 - DNA, 30 bp, Artificial Sequence
  Synthetic oligonucleotide
tgcttgtcaagctacgctggatggcataca

SEQ ID NO: 441804 - DNA, 30 bp, Artificial Sequence
  Synthetic oligonucleotide
taaaatagatcttggctgccattgcataca

SEQ ID NO: 441805 - DNA, 30 bp, Artificial Sequence
  Synthetic oligonucleotide
gtttaaggcgtttcttagctcaatcataca

SEQ ID NO: 441806 - DNA, 30 bp, Artificial Sequence
  Synthetic oligonucleotide
ttggttcattgctcgataatttatcataca

SEQ ID NO: 441807 - DNA, 30 bp, Artificial Sequence
  Synthetic oligonucleotide
aatattttgcaagctaattctcctcataca

SEQ ID NO: 441808 - DNA, 30 bp, Artificial Sequence
  Synthetic oligonucleotide
ctccggggtttagctccctcgtgtcataca

SEQ ID NO: 441809 - DNA, 30 bp, Artificial Sequence
  Synthetic oligonucleotide
tctaatagacttagcgcataggtagataca

SEQ ID NO: 441810 - DNA, 30 bp, Artificial Sequence
  Synthetic oligonucleotide
agcacatgtatagaacgccgtagcgataca

SEQ ID NO: 441811 - DNA, 30 bp, Artificial Sequence
  Synthetic oligonucleotide
cggacggtaagctcctattcaggggataca

SEQ ID NO: 441812 - DNA, 30 bp, Artificial Sequence
  Synthetic oligonucleotide
gtgtatcgtatgaaacggtcttatgataca

SEQ ID NO: 441813 - DNA, 30 bp, Artificial Sequence
  Synthetic oligonucleotide
accgcttcgaagtaccggggcgctgataca

SEQ ID NO: 441814 - DNA, 30 bp, Artificial Sequence
  Synthetic oligonucleotide
cttacgttataaacggagcacaaatataca

SEQ ID NO: 441815 - DNA, 30 bp, Artificial Sequence
  Synthetic oligonucleotide
ttcagtatcaaagccttacttgaatataca

SEQ ID NO: 441816 - DNA, 30 bp, Artificial Sequence
  Synthetic oligonucleotide
ccgcctaatagcggatgatagctatataca

SEQ ID NO: 441817 - DNA, 30 bp, Artificial Sequence
  Synthetic oligonucleotide
agtcctatatccagtaccaatctatataca

SEQ ID NO: 441818 - DNA, 30 bp, Artificial Sequence
  Synthetic oligonucleotide
tcagtttgttgatatccgctgttatataca

SEQ ID NO: 441819 - DNA, 30 bp, Artificial Sequence
  Synthetic oligonucleotide
tccgaaatacaggtcggctgtatctataca

SEQ ID NO: 441820 - DNA, 30 bp, Artificial Sequence
  Synthetic oligonucleotide
tccagcatgacaagggatgtcccgtataca

SEQ ID NO: 441821 - DNA, 30 bp, Artificial Sequence
  Synthetic oligonucleotide
ataccagggcaacagttcggatggtataca

SEQ ID NO: 441822 - DNA, 30 bp, Artificial Sequence
  Synthetic oligonucleotide
taccagccctcgtccaactttgtgtataca

SEQ ID NO: 441823 - DNA, 30 bp, Artificial Sequence
  Synthetic oligonucleotide
ggtatatctttagtaattaggagttataca

SEQ ID NO: 441824 - DNA, 30 bp, Artificial Sequence
  Synthetic oligonucleotide
ccagccatgtcgttgattgggaaaactaca

SEQ ID NO: 441825 - DNA, 30 bp, Artificial Sequence
  Synthetic oligonucleotide
aacttgcagcttgcggtaaatgcaactaca

SEQ ID NO: 441826 - DNA, 30 bp, Artificial Sequence
  Synthetic oligonucleotide
ggagtatgtgcaccttagcacagcactaca

SEQ ID NO: 441827 - DNA, 30 bp, Artificial Sequence
  Synthetic oligonucleotide
cggcacgcgcgggcgcgtcctacgactaca

SEQ ID NO: 441828 - DNA, 30 bp, Artificial Sequence
  Synthetic oligonucleotide
gttgccgctcaggtctgtgagcgacctaca

SEQ ID NO: 441829 - DNA, 30 bp, Artificial Sequence
  Synthetic oligonucleotide
tgagacgaggctgttatgtccgagcctaca

SEQ ID NO: 441830 - DNA, 30 bp, Artificial Sequence
  Synthetic oligonucleotide
ccttagagcgctgacatgggctagcctaca

SEQ ID NO: 441831 - DNA, 30 bp, Artificial Sequence
  Synthetic oligonucleotide
cttcgtgcgggtcaaggacgcgggcctaca

SEQ ID NO: 441832 - DNA, 30 bp, Artificial Sequence
  Synthetic oligonucleotide
taagaacgttcgtttgttaatgtagctaca

SEQ ID NO: 441833 - DNA, 30 bp, Artificial Sequence
  Synthetic oligonucleotide
gggcgtgacagcacacaggatgtagctaca

SEQ ID NO: 441834 - DNA, 30 bp, Artificial Sequence
  Synthetic oligonucleotide
aattgcagtgggactttttcctacgctaca

SEQ ID NO: 441835 - DNA, 30 bp, Artificial Sequence
  Synthetic oligonucleotide
acacctcccgggacctcagcctccgctaca

SEQ ID NO: 441836 - DNA, 30 bp, Artificial Sequence
  Synthetic oligonucleotide
gacgcagttcttcaccggccaaaggctaca

SEQ ID NO: 441837 - DNA, 30 bp, Artificial Sequence
  Synthetic oligonucleotide
cggctacgtattggcagaccagcggctaca

SEQ ID NO: 441838 - DNA, 30 bp, Artificial Sequence
  Synthetic oligonucleotide
atcacttacaacagcccgtcaagggctaca

SEQ ID NO: 441839 - DNA, 30 bp, Artificial Sequence
  Synthetic oligonucleotide
ggaacagtataaagtcggttgggggctaca

SEQ ID NO: 441840 - DNA, 30 bp, Artificial Sequence
  Synthetic oligonucleotide
atatgtacatagattttctaagatgctaca

SEQ ID NO: 441841 - DNA, 30 bp, Artificial Sequence
  Synthetic oligonucleotide
cggtttgtgcttaatttatatggatctaca

SEQ ID NO: 441842 - DNA, 30 bp, Artificial Sequence
  Synthetic oligonucleotide
ttactcgagacgttggctattctatctaca

SEQ ID NO: 441843 - DNA, 30 bp, Artificial Sequence
  Synthetic oligonucleotide
actatctattgaactttccgtacctctaca

SEQ ID NO: 441844 - DNA, 30 bp, Artificial Sequence
  Synthetic oligonucleotide
cctttttttcttaggttgataagctctaca

SEQ ID NO: 441845 - DNA, 30 bp, Artificial Sequence
  Synthetic oligonucleotide
ttacgatttcaaagctatcggttctctaca

SEQ ID NO: 441846 - DNA, 30 bp, Artificial Sequence
  Synthetic oligonucleotide
ctgaagatatgcttcataacgtcgtctaca

SEQ ID NO: 441847 - DNA, 30 bp, Artificial Sequence
  Synthetic oligonucleotide
ggcaatatttccacaacgatggggtctaca

SEQ ID NO: 441848 - DNA, 30 bp, Artificial Sequence
  Synthetic oligonucleotide
cgttttaaaaattatcaaagctattctaca

SEQ ID NO: 441849 - DNA, 30 bp, Artificial Sequence
  Synthetic oligonucleotide
gacagcagtacactctaagtgtattctaca

SEQ ID NO: 441850 - DNA, 30 bp, Artificial Sequence
  Synthetic oligonucleotide
caaagttttaatctctcacggacttctaca

SEQ ID NO: 441851 - DNA, 30 bp, Artificial Sequence
  Synthetic oligonucleotide
caattatcttgtagtcgtttctcttctaca

SEQ ID NO: 441852 - DNA, 30 bp, Artificial Sequence
  Synthetic oligonucleotide
tttaacagatgcattaatgagcaaagtaca

SEQ ID NO: 441853 - DNA, 30 bp, Artificial Sequence
  Synthetic oligonucleotide
tgtaggtggatccggcgagagggaagtaca

SEQ ID NO: 441854 - DNA, 30 bp, Artificial Sequence
  Synthetic oligonucleotide
gaaccttagtggtgccaagttctaagtaca

SEQ ID NO: 441855 - DNA, 30 bp, Artificial Sequence
  Synthetic oligonucleotide
catcctcatatgatggtgcggtggagtaca

SEQ ID NO: 441856 - DNA, 30 bp, Artificial Sequence
  Synthetic oligonucleotide
tgattgccggagcacgccgataatagtaca

SEQ ID NO: 441857 - DNA, 30 bp, Artificial Sequence
  Synthetic oligonucleotide
atcactaccttaggccttcaagatagtaca

SEQ ID NO: 441858 - DNA, 30 bp, Artificial Sequence
  Synthetic oligonucleotide
tatctcatatcccgcgactgcggtagtaca

SEQ ID NO: 441859 - DNA, 30 bp, Artificial Sequence
  Synthetic oligonucleotide
aatgcaaggtgctgcgtggtgtttagtaca

SEQ ID NO: 441860 - DNA, 30 bp, Artificial Sequence
  Synthetic oligonucleotide
tgggtagacgtcacagctagagcacgtaca

SEQ ID NO: 441861 - DNA, 30 bp, Artificial Sequence
  Synthetic oligonucleotide
gccctatgcggagaaatatctgaccgtaca

SEQ ID NO: 441862 - DNA, 30 bp, Artificial Sequence
  Synthetic oligonucleotide
caaggccagcggtacgacaacgcccgtaca

SEQ ID NO: 441863 - DNA, 30 bp, Artificial Sequence
  Synthetic oligonucleotide
ctgcaaatgtccgcaccaggtaagcgtaca

SEQ ID NO: 441864 - DNA, 30 bp, Artificial Sequence
  Synthetic oligonucleotide
gcaaatgggatttcatttaatttgcgtaca

SEQ ID NO: 441865 - DNA, 30 bp, Artificial Sequence
  Synthetic oligonucleotide
taattcgtgcttcactcgttatatcgtaca

SEQ ID NO: 441866 - DNA, 30 bp, Artificial Sequence
  Synthetic oligonucleotide
ggaacccctggtaatccgggttttcgtaca

SEQ ID NO: 441867 - DNA, 30 bp, Artificial Sequence
  Synthetic oligonucleotide
aagcacatgcaccccgtgagaaaaggtaca

SEQ ID NO: 441868 - DNA, 30 bp, Artificial Sequence
  Synthetic oligonucleotide
taatgcgttatgcgctgtatgcgaggtaca

SEQ ID NO: 441869 - DNA, 30 bp, Artificial Sequence
  Synthetic oligonucleotide
gcttcacgacggaacaatcctggaggtaca

SEQ ID NO: 441870 - DNA, 30 bp, Artificial Sequence
  Synthetic oligonucleotide
tgccgtgcttgtcggatctgtataggtaca

SEQ ID NO: 441871 - DNA, 30 bp, Artificial Sequence
  Synthetic oligonucleotide
actagggatctttattgagggaccggtaca

SEQ ID NO: 441872 - DNA, 30 bp, Artificial Sequence
  Synthetic oligonucleotide
tcccactaatagaaatttcgtgtcggtaca

SEQ ID NO: 441873 - DNA, 30 bp, Artificial Sequence
  Synthetic oligonucleotide
atctgattatggatgcgcagcttcggtaca

SEQ ID NO: 441874 - DNA, 31 bp, Artificial Sequence
  Synthetic oligonucleotide
tctactttcacgagacggacgaagtggtaca

SEQ ID NO: 441875 - DNA, 30 bp, Artificial Sequence
  Synthetic oligonucleotide
gagtcgtttgtaacaagtgcgggtggtaca

SEQ ID NO: 441876 - DNA, 30 bp, Artificial Sequence
  Synthetic oligonucleotide
cggacggttttatgggcattctttggtaca

SEQ ID NO: 441877 - DNA, 30 bp, Artificial Sequence
  Synthetic oligonucleotide
cgaagccacggcccgtgtctgtttggtaca

SEQ ID NO: 441878 - DNA, 30 bp, Artificial Sequence
  Synthetic oligonucleotide
tgcaccgggctcacagacagggaatgtaca

SEQ ID NO: 441879 - DNA, 30 bp, Artificial Sequence
  Synthetic oligonucleotide
actactcctgtcttaccattaacatgtaca

SEQ ID NO: 441880 - DNA, 30 bp, Artificial Sequence
  Synthetic oligonucleotide
aggagacctctgttatgactcacatgtaca

SEQ ID NO: 441881 - DNA, 30 bp, Artificial Sequence
  Synthetic oligonucleotide
aaaccgcacccggacatcaggatatgtaca

SEQ ID NO: 441882 - DNA, 30 bp, Artificial Sequence
  Synthetic oligonucleotide
gctaatttgtgtagaaattacacctgtaca

SEQ ID NO: 441883 - DNA, 30 bp, Artificial Sequence
  Synthetic oligonucleotide
tgctggcctcgcgttctgctcacctgtaca

SEQ ID NO: 441884 - DNA, 30 bp, Artificial Sequence
  Synthetic oligonucleotide
cagcttatgactggacccacaggctgtaca

SEQ ID NO: 441885 - DNA, 30 bp, Artificial Sequence
  Synthetic oligonucleotide
ggtcttggactagtccctcgaggctgtaca

SEQ ID NO: 441886 - DNA, 30 bp, Artificial Sequence
  Synthetic oligonucleotide
gtgtctaactatgcccccaggggctgtaca

SEQ ID NO: 441887 - DNA, 30 bp, Artificial Sequence
  Synthetic oligonucleotide
tctttctacgaagtacgggagcagtgtaca

SEQ ID NO: 441888 - DNA, 30 bp, Artificial Sequence
  Synthetic oligonucleotide
cggctttcggacggttaggccgattgtaca

SEQ ID NO: 441889 - DNA, 30 bp, Artificial Sequence
  Synthetic oligonucleotide
tgatagttcaacttacgccccccttgtaca

SEQ ID NO: 441890 - DNA, 30 bp, Artificial Sequence
  Synthetic oligonucleotide
ggatttttgtttggtctgtacatttgtaca

SEQ ID NO: 441891 - DNA, 30 bp, Artificial Sequence
  Synthetic oligonucleotide
aaatatttggcgcatcaagcgctaattaca

SEQ ID NO: 441892 - DNA, 30 bp, Artificial Sequence
  Synthetic oligonucleotide
ttcgtatagatagtgagtggtaacattaca

SEQ ID NO: 441893 - DNA, 30 bp, Artificial Sequence
  Synthetic oligonucleotide
ttgatgtagctccttgcgtgctacattaca

SEQ ID NO: 441894 - DNA, 30 bp, Artificial Sequence
  Synthetic oligonucleotide
taactggtgagactaatacttcatattaca

SEQ ID NO: 441895 - DNA, 30 bp, Artificial Sequence
  Synthetic oligonucleotide
tctgttacggacgatctccagccacttaca

SEQ ID NO: 441896 - DNA, 30 bp, Artificial Sequence
  Synthetic oligonucleotide
ggttcagttttaacttgatttatacttaca

SEQ ID NO: 441897 - DNA, 30 bp, Artificial Sequence
  Synthetic oligonucleotide
gacaagagatcgttagtttaatctcttaca

SEQ ID NO: 441898 - DNA, 30 bp, Artificial Sequence
  Synthetic oligonucleotide
gtattaaagtgaacattcaaatttcttaca

SEQ ID NO: 441899 - DNA, 30 bp, Artificial Sequence
  Synthetic oligonucleotide
cgtttcttacgttttcctgcctttcttaca

SEQ ID NO: 441900 - DNA, 30 bp, Artificial Sequence
  Synthetic oligonucleotide
tattctgatcctatttaagtagtagttaca

SEQ ID NO: 441901 - DNA, 30 bp, Artificial Sequence
  Synthetic oligonucleotide
gtagtaaactgcgtatgtatattagttaca

SEQ ID NO: 441902 - DNA, 30 bp, Artificial Sequence
  Synthetic oligonucleotide
taagaaactcccctttcaggctccgttaca

SEQ ID NO: 441903 - DNA, 30 bp, Artificial Sequence
  Synthetic oligonucleotide
tttagcttcactaatttccgttcggttaca

SEQ ID NO: 441904 - DNA, 30 bp, Artificial Sequence
  Synthetic oligonucleotide
agccgtggaacatttaatattaatgttaca

SEQ ID NO: 441905 - DNA, 30 bp, Artificial Sequence
  Synthetic oligonucleotide
ccccgttaagtcatgcatcagggtgttaca

SEQ ID NO: 441906 - DNA, 30 bp, Artificial Sequence
  Synthetic oligonucleotide
gaaatccgtgtccaatttacccgatttaca

SEQ ID NO: 441907 - DNA, 30 bp, Artificial Sequence
  Synthetic oligonucleotide
atccccctagtagggaacttatcctttaca

SEQ ID NO: 441908 - DNA, 30 bp, Artificial Sequence
  Synthetic oligonucleotide
gttacgaccgttcataggtggggctttaca

SEQ ID NO: 441909 - DNA, 30 bp, Artificial Sequence
  Synthetic oligonucleotide
attcggctattgtttgattatctctttaca

SEQ ID NO: 441910 - DNA, 30 bp, Artificial Sequence
  Synthetic oligonucleotide
tattcactatgggcagcgagaaattttaca

SEQ ID NO: 441911 - DNA, 30 bp, Artificial Sequence
  Synthetic oligonucleotide
gtctttgcccaggtaaactaatattttaca

SEQ ID NO: 441912 - DNA, 30 bp, Artificial Sequence
  Synthetic oligonucleotide
cgtttgttaatccagggacgttcttttaca

SEQ ID NO: 441913 - DNA, 30 bp, Artificial Sequence
  Synthetic oligonucleotide
ggtagtctgaggattggctaatcaaaacca

SEQ ID NO: 441914 - DNA, 30 bp, Artificial Sequence
  Synthetic oligonucleotide
aataaagggccgacagggggttcaaaacca

SEQ ID NO: 441915 - DNA, 30 bp, Artificial Sequence
  Synthetic oligonucleotide
cgactcgtcattgcccgcatatccaaacca

SEQ ID NO: 441916 - DNA, 30 bp, Artificial Sequence
  Synthetic oligonucleotide
cgcatggggagaatatgcagacgcaaacca

SEQ ID NO: 441917 - DNA, 30 bp, Artificial Sequence
  Synthetic oligonucleotide
agtcaacgtagcattctgaagaataaacca

SEQ ID NO: 441918 - DNA, 30 bp, Artificial Sequence
  Synthetic oligonucleotide
gagcttctcacaatgggccagcgacaacca

SEQ ID NO: 441919 - DNA, 30 bp, Artificial Sequence
  Synthetic oligonucleotide
gggtcctctgtaatgtgtgtgggacaacca

SEQ ID NO: 441920 - DNA, 30 bp, Artificial Sequence
  Synthetic oligonucleotide
tgaaagaggaagattgtatatgcgcaacca

SEQ ID NO: 441921 - DNA, 30 bp, Artificial Sequence
  Synthetic oligonucleotide
gaaaacgaagcgtgcgggctcaatcaacca

SEQ ID NO: 441922 - DNA, 30 bp, Artificial Sequence
  Synthetic oligonucleotide
agcgaatacttcgacgacgcagaagaacca

SEQ ID NO: 441923 - DNA, 30 bp, Artificial Sequence
  Synthetic oligonucleotide
ataataagcagctctgtacggacagaacca

SEQ ID NO: 441924 - DNA, 30 bp, Artificial Sequence
  Synthetic oligonucleotide
agtacctcggataactctattagagaacca

SEQ ID NO: 441925 - DNA, 30 bp, Artificial Sequence
  Synthetic oligonucleotide
ttctgttatataagtacgagtactgaacca

SEQ ID NO: 441926 - DNA, 30 bp, Artificial Sequence
  Synthetic oligonucleotide
gtactgaagtcgatccaaagcgttgaacca

SEQ ID NO: 441927 - DNA, 30 bp, Artificial Sequence
  Synthetic oligonucleotide
catttgtaaaagcacatggagatataacca

SEQ ID NO: 441928 - DNA, 30 bp, Artificial Sequence
  Synthetic oligonucleotide
ttacatgcttgcgtagattagctataacca

SEQ ID NO: 441929 - DNA, 30 bp, Artificial Sequence
  Synthetic oligonucleotide
cgccgcagcatctgtacggacagctaacca

SEQ ID NO: 441930 - DNA, 30 bp, Artificial Sequence
  Synthetic oligonucleotide
agtatagatcaggcgagaattgtgtaacca

SEQ ID NO: 441931 - DNA, 30 bp, Artificial Sequence
  Synthetic oligonucleotide
tttcagctggtgtgcgaaacgaacacacca

SEQ ID NO: 441932 - DNA, 30 bp, Artificial Sequence
  Synthetic oligonucleotide
ggtcttcggtttgaagcatccgtcacacca

SEQ ID NO: 441933 - DNA, 30 bp, Artificial Sequence
  Synthetic oligonucleotide
aaaaacaggtagctttctgcaatgacacca

SEQ ID NO: 441934 - DNA, 30 bp, Artificial Sequence
  Synthetic oligonucleotide
ggcacgtttattcgttatatctaaccacca

SEQ ID NO: 441935 - DNA, 30 bp, Artificial Sequence
  Synthetic oligonucleotide
tcatggtaactaattttaaaaaggccacca

SEQ ID NO: 441936 - DNA, 30 bp, Artificial Sequence
  Synthetic oligonucleotide
atttgtctttaatcaaattccaatccacca

SEQ ID NO: 441937 - DNA, 30 bp, Artificial Sequence
  Synthetic oligonucleotide
ttcaagggttcctgcgggtaaagtccacca

SEQ ID NO: 441938 - DNA, 30 bp, Artificial Sequence
  Synthetic oligonucleotide
tcagggaggtcataaaggatcagtccacca

SEQ ID NO: 441939 - DNA, 30 bp, Artificial Sequence
  Synthetic oligonucleotide
gttgatttggtagttgcgatcggtccacca

SEQ ID NO: 441940 - DNA, 30 bp, Artificial Sequence
  Synthetic oligonucleotide
aacttctcgctagtgagtatggtagcacca

SEQ ID NO: 441941 - DNA, 30 bp, Artificial Sequence
  Synthetic oligonucleotide
gatccctacggaggcgcctgggacgcacca

SEQ ID NO: 441942 - DNA, 30 bp, Artificial Sequence
  Synthetic oligonucleotide
gaagcaaacccgccggggactcccgcacca

SEQ ID NO: 441943 - DNA, 30 bp, Artificial Sequence
  Synthetic oligonucleotide
gtgatgcagtgtgcgcttgaacgggcacca

SEQ ID NO: 441944 - DNA, 30 bp, Artificial Sequence
  Synthetic oligonucleotide
ctatcgcagtaaactctgttgtgggcacca

SEQ ID NO: 441945 - DNA, 30 bp, Artificial Sequence
  Synthetic oligonucleotide
aaccgtcatagtcgcccttaattggcacca

SEQ ID NO: 441946 - DNA, 30 bp, Artificial Sequence
  Synthetic oligonucleotide
ctttagtggtgtaaatggcaatcatcacca

SEQ ID NO: 441947 - DNA, 30 bp, Artificial Sequence
  Synthetic oligonucleotide
gctggtattcccgctgctataggatcacca

SEQ ID NO: 441948 - DNA, 30 bp, Artificial Sequence
  Synthetic oligonucleotide
cctttcgatccggggtctaaatgatcacca

SEQ ID NO: 441949 - DNA, 30 bp, Artificial Sequence
  Synthetic oligonucleotide
gttcgcgtatacgatggacctttatcacca

SEQ ID NO: 441950 - DNA, 30 bp, Artificial Sequence
  Synthetic oligonucleotide
gccggccttggccccatgttagtctcacca

SEQ ID NO: 441951 - DNA, 30 bp, Artificial Sequence
  Synthetic oligonucleotide
aaaagtgcctggtgctatgctgtctcacca

SEQ ID NO: 441952 - DNA, 30 bp, Artificial Sequence
  Synthetic oligonucleotide
tttgtgcggccatgtggggtcaggtcacca

SEQ ID NO: 441953 - DNA, 30 bp, Artificial Sequence
  Synthetic oligonucleotide
tcaatagtcaccgattagcggcattcacca

SEQ ID NO: 441954 - DNA, 30 bp, Artificial Sequence
  Synthetic oligonucleotide
gcgttatcaccaactcatgggataagacca

SEQ ID NO: 441955 - DNA, 30 bp, Artificial Sequence
  Synthetic oligonucleotide
gtcttagctcaaccatttgacttaagacca

SEQ ID NO: 441956 - DNA, 30 bp, Artificial Sequence
  Synthetic oligonucleotide
tttgacccaggacgatggaaggacagacca

SEQ ID NO: 441957 - DNA, 30 bp, Artificial Sequence
  Synthetic oligonucleotide
cttcgcacgctcaggaatcgatctagacca

SEQ ID NO: 441958 - DNA, 30 bp, Artificial Sequence
  Synthetic oligonucleotide
ggcagtaaacagggatgtttctctagacca

SEQ ID NO: 441959 - DNA, 30 bp, Artificial Sequence
  Synthetic oligonucleotide
atatagagccactggtaccgtagtagacca

SEQ ID NO: 441960 - DNA, 30 bp, Artificial Sequence
  Synthetic oligonucleotide
tatgttctgactgacgtaaaaccccgacca

SEQ ID NO: 441961 - DNA, 30 bp, Artificial Sequence
  Synthetic oligonucleotide
ctagataagtgtgacggctggactcgacca

SEQ ID NO: 441962 - DNA, 30 bp, Artificial Sequence
  Synthetic oligonucleotide
cagcggtgcagtctcattttatcaggacca

SEQ ID NO: 441963 - DNA, 30 bp, Artificial Sequence
  Synthetic oligonucleotide
acccgctgccttaaaggccagcgcggacca

SEQ ID NO: 441964 - DNA, 30 bp, Artificial Sequence
  Synthetic oligonucleotide
accaggttcagagcctctgatgctggacca

SEQ ID NO: 441965 - DNA, 30 bp, Artificial Sequence
  Synthetic oligonucleotide
ggcagttttataggcgccagggttggacca

SEQ ID NO: 441966 - DNA, 30 bp, Artificial Sequence
  Synthetic oligonucleotide
ggggactgcttggagggtgattaatgacca

SEQ ID NO: 441967 - DNA, 30 bp, Artificial Sequence
  Synthetic oligonucleotide
tgctcgtccctgactgggctgagctgacca

SEQ ID NO: 441968 - DNA, 30 bp, Artificial Sequence
  Synthetic oligonucleotide
tgcacattgaacagttgatttctttgacca

SEQ ID NO: 441969 - DNA, 30 bp, Artificial Sequence
  Synthetic oligonucleotide
gatgatgggccatcttctgttacaatacca

SEQ ID NO: 441970 - DNA, 30 bp, Artificial Sequence
  Synthetic oligonucleotide
tactgttttcctagttaaagcagaatacca

SEQ ID NO: 441971 - DNA, 30 bp, Artificial Sequence
  Synthetic oligonucleotide
aaagtttttatgaattctagacgaatacca

SEQ ID NO: 441972 - DNA, 29 bp, Artificial Sequence
  Synthetic oligonucleotide
accgcgacgcttggcaatgtggaatacca

SEQ ID NO: 441973 - DNA, 30 bp, Artificial Sequence
  Synthetic oligonucleotide
ttagtacccacatacctggcggacatacca

SEQ ID NO: 441974 - DNA, 30 bp, Artificial Sequence
  Synthetic oligonucleotide
cttccgaactcgcttaatagcaccatacca

SEQ ID NO: 441975 - DNA, 30 bp, Artificial Sequence
  Synthetic oligonucleotide
tgggagaacatctgtccaacgcgcatacca

SEQ ID NO: 441976 - DNA, 30 bp, Artificial Sequence
  Synthetic oligonucleotide
tagagtgtcccgggtacgtgcaatatacca

SEQ ID NO: 441977 - DNA, 30 bp, Artificial Sequence
  Synthetic oligonucleotide
actgccttgtagggaaatcataatatacca

SEQ ID NO: 441978 - DNA, 30 bp, Artificial Sequence
  Synthetic oligonucleotide
cccccaatgtctcggaagcgctatatacca

SEQ ID NO: 441979 - DNA, 30 bp, Artificial Sequence
  Synthetic oligonucleotide
ccatacacaatcgcacggaagtgtatacca

SEQ ID NO: 441980 - DNA, 30 bp, Artificial Sequence
  Synthetic oligonucleotide
tgcagaacgagcgtaccattatttatacca

SEQ ID NO: 441981 - DNA, 30 bp, Artificial Sequence
  Synthetic oligonucleotide
gcccaaacgaggggagcatagggactacca

SEQ ID NO: 441982 - DNA, 30 bp, Artificial Sequence
  Synthetic oligonucleotide
actcgagcttactttctttcgggactacca

SEQ ID NO: 441983 - DNA, 30 bp, Artificial Sequence
  Synthetic oligonucleotide
gcgtagatttttagaagatacgacctacca

SEQ ID NO: 441984 - DNA, 30 bp, Artificial Sequence
  Synthetic oligonucleotide
cgtagccggttgccgatggtgcgcctacca

SEQ ID NO: 441985 - DNA, 30 bp, Artificial Sequence
  Synthetic oligonucleotide
taggatactccatagatgcttactctacca

SEQ ID NO: 441986 - DNA, 30 bp, Artificial Sequence
  Synthetic oligonucleotide
gtctttgttaagtttattgggtgtctacca

SEQ ID NO: 441987 - DNA, 30 bp, Artificial Sequence
  Synthetic oligonucleotide
ggcagtttatggtgtttcatcattctacca

SEQ ID NO: 441988 - DNA, 30 bp, Artificial Sequence
  Synthetic oligonucleotide
ctttagtcattattcgagtcctaagtacca

SEQ ID NO: 441989 - DNA, 30 bp, Artificial Sequence
  Synthetic oligonucleotide
cgcaataccggtaggataaccggcgtacca

SEQ ID NO: 441990 - DNA, 30 bp, Artificial Sequence
  Synthetic oligonucleotide
atctacgctgctatcttgagcatcgtacca

SEQ ID NO: 441991 - DNA, 30 bp, Artificial Sequence
  Synthetic oligonucleotide
gttaaatagaggcgcggctatccggtacca

SEQ ID NO: 441992 - DNA, 30 bp, Artificial Sequence
  Synthetic oligonucleotide
gctggtacttacgttgaagctatggtacca

SEQ ID NO: 441993 - DNA, 30 bp, Artificial Sequence
  Synthetic oligonucleotide
gcgcttgtagccactaaccttatggtacca

SEQ ID NO: 441994 - DNA, 30 bp, Artificial Sequence
  Synthetic oligonucleotide
aagtacttcgtctggagcgggtctgtacca

SEQ ID NO: 441995 - DNA, 30 bp, Artificial Sequence
  Synthetic oligonucleotide
gaatgactctggcccggaatgccattacca

SEQ ID NO: 441996 - DNA, 30 bp, Artificial Sequence
  Synthetic oligonucleotide
gattgctgtcgccggtgatgttgattacca

SEQ ID NO: 441997 - DNA, 30 bp, Artificial Sequence
  Synthetic oligonucleotide
tagttgccgagcgatgcagtcgccttacca

SEQ ID NO: 441998 - DNA, 30 bp, Artificial Sequence
  Synthetic oligonucleotide
gacgtcttagtaagcgcaacaaggttacca

SEQ ID NO: 441999 - DNA, 30 bp, Artificial Sequence
  Synthetic oligonucleotide
tagcccccgaagcagctctacttgttacca

SEQ ID NO: 442000 - DNA, 30 bp, Artificial Sequence
  Synthetic oligonucleotide
cgacgcaatcctttggcttctaccaaccca

SEQ ID NO: 442001 - DNA, 30 bp, Artificial Sequence
  Synthetic oligonucleotide
gcatgggcgcctacgccccgtctgaaccca

SEQ ID NO: 442002 - DNA, 30 bp, Artificial Sequence
  Synthetic oligonucleotide
ccgcttctaagtcattaaggacgtaaccca

SEQ ID NO: 442003 - DNA, 30 bp, Artificial Sequence
  Synthetic oligonucleotide
accaaactttgcattgcgcaatgtaaccca

SEQ ID NO: 442004 - DNA, 30 bp, Artificial Sequence
  Synthetic oligonucleotide
gcccacgtgcgttttgatataatacaccca

SEQ ID NO: 442005 - DNA, 30 bp, Artificial Sequence
  Synthetic oligonucleotide
cagaaaactgaagagaagcaagtacaccca

SEQ ID NO: 442006 - DNA, 30 bp, Artificial Sequence
  Synthetic oligonucleotide
tcgtttcgcatcacattgtgacctcaccca

SEQ ID NO: 442007 - DNA, 30 bp, Artificial Sequence
  Synthetic oligonucleotide
tcgttggggactcgccgctagcacgaccca

SEQ ID NO: 442008 - DNA, 30 bp, Artificial Sequence
  Synthetic oligonucleotide
aacataggatattttgctgctcacgaccca

SEQ ID NO: 442009 - DNA, 30 bp, Artificial Sequence
  Synthetic oligonucleotide
gtatgaaggcgtcagacccgttacgaccca

SEQ ID NO: 442010 - DNA, 30 bp, Artificial Sequence
  Synthetic oligonucleotide
acagtattctgttcaataactgcggaccca

SEQ ID NO: 442011 - DNA, 30 bp, Artificial Sequence
  Synthetic oligonucleotide
attaacacttagaattccgttaatgaccca

SEQ ID NO: 442012 - DNA, 30 bp, Artificial Sequence
  Synthetic oligonucleotide
ccaatcgccgtgagcggcaaagctgaccca

SEQ ID NO: 442013 - DNA, 30 bp, Artificial Sequence
  Synthetic oligonucleotide
gagccgaccgtctgggcaatagctgaccca

SEQ ID NO: 442014 - DNA, 30 bp, Artificial Sequence
  Synthetic oligonucleotide
atatccgtatgtgctgggttccgtgaccca

SEQ ID NO: 442015 - DNA, 30 bp, Artificial Sequence
  Synthetic oligonucleotide
ttaaagtgacacagggaaggaggtgaccca

SEQ ID NO: 442016 - DNA, 30 bp, Artificial Sequence
  Synthetic oligonucleotide
ttgtaatttgagttgctgtccattgaccca

SEQ ID NO: 442017 - DNA, 30 bp, Artificial Sequence
  Synthetic oligonucleotide
gagtaacaaccccacagtcagtttgaccca

SEQ ID NO: 442018 - DNA, 30 bp, Artificial Sequence
  Synthetic oligonucleotide
agtatctacctggaaaggatcacataccca

SEQ ID NO: 442019 - DNA, 30 bp, Artificial Sequence
  Synthetic oligonucleotide
tgtcatgtggtaagtccgcaggcctaccca

SEQ ID NO: 442020 - DNA, 30 bp, Artificial Sequence
  Synthetic oligonucleotide
ccacttagtaaagtactgtaggtctaccca

SEQ ID NO: 442021 - DNA, 30 bp, Artificial Sequence
  Synthetic oligonucleotide
accagccgcgacgttatgagttcgtaccca

SEQ ID NO: 442022 - DNA, 30 bp, Artificial Sequence
  Synthetic oligonucleotide
ctattttagaagagcagtcagtcttaccca

SEQ ID NO: 442023 - DNA, 30 bp, Artificial Sequence
  Synthetic oligonucleotide
tagggatgggggtgtgttcaagacacccca

SEQ ID NO: 442024 - DNA, 30 bp, Artificial Sequence
  Synthetic oligonucleotide
ctaagaatactatgaagagctatcacccca

SEQ ID NO: 442025 - DNA, 30 bp, Artificial Sequence
  Synthetic oligonucleotide
ggctcctgttaatctgaacgtcatacccca

SEQ ID NO: 442026 - DNA, 30 bp, Artificial Sequence
  Synthetic oligonucleotide
gcatgacctacagcgtaagatgttccccca

SEQ ID NO: 442027 - DNA, 30 bp, Artificial Sequence
  Synthetic oligonucleotide
aagatgcatcagacacttcctctcgcccca

SEQ ID NO: 442028 - DNA, 30 bp, Artificial Sequence
  Synthetic oligonucleotide
gtctgcgcgctttgtccgttgtaggcccca

SEQ ID NO: 442029 - DNA, 30 bp, Artificial Sequence
  Synthetic oligonucleotide
gtgaccgttacgcctctaattggggcccca

SEQ ID NO: 442030 - DNA, 30 bp, Artificial Sequence
  Synthetic oligonucleotide
gtggtcactaccagtattacactggcccca

SEQ ID NO: 442031 - DNA, 30 bp, Artificial Sequence
  Synthetic oligonucleotide
atctggctaagtcctctcgcacatgcccca

SEQ ID NO: 442032 - DNA, 30 bp, Artificial Sequence
  Synthetic oligonucleotide
tttaattatggacaggattacacctcccca

SEQ ID NO: 442033 - DNA, 30 bp, Artificial Sequence
  Synthetic oligonucleotide
atttcccaaatatgggcaccttggtcccca

SEQ ID NO: 442034 - DNA, 30 bp, Artificial Sequence
  Synthetic oligonucleotide
acaacaaactcgcattgggtgtgttcccca

SEQ ID NO: 442035 - DNA, 30 bp, Artificial Sequence
  Synthetic oligonucleotide
agggatttaccaaagcataaagcaagccca

SEQ ID NO: 442036 - DNA, 30 bp, Artificial Sequence
  Synthetic oligonucleotide
gccatgtgcactgagcttgctaatagccca

SEQ ID NO: 442037 - DNA, 30 bp, Artificial Sequence
  Synthetic oligonucleotide
gcacttggcgcaatattaagccatagccca

SEQ ID NO: 442038 - DNA, 30 bp, Artificial Sequence
  Synthetic oligonucleotide
gttattccgccacgacgggtaagtagccca

SEQ ID NO: 442039 - DNA, 30 bp, Artificial Sequence
  Synthetic oligonucleotide
ttctacttgctcgtattaataatacgccca

SEQ ID NO: 442040 - DNA, 30 bp, Artificial Sequence
  Synthetic oligonucleotide
atgattgagaagcaagggttcatacgccca

SEQ ID NO: 442041 - DNA, 30 bp, Artificial Sequence
  Synthetic oligonucleotide
taatggacttatcacggatgcaaaggccca

SEQ ID NO: 442042 - DNA, 30 bp, Artificial Sequence
  Synthetic oligonucleotide
tagggcttggattcagacgccacaggccca

SEQ ID NO: 442043 - DNA, 30 bp, Artificial Sequence
  Synthetic oligonucleotide
ctgggggggtcgaatatgggacccggccca

SEQ ID NO: 442044 - DNA, 30 bp, Artificial Sequence
  Synthetic oligonucleotide
aagtgccaacgcttggctaccaagggccca

SEQ ID NO: 442045 - DNA, 30 bp, Artificial Sequence
  Synthetic oligonucleotide
tcataggaggatgtccttgtcaagggccca

SEQ ID NO: 442046 - DNA, 30 bp, Artificial Sequence
  Synthetic oligonucleotide
atcatctcctgcataacacggaagggccca

SEQ ID NO: 442047 - DNA, 30 bp, Artificial Sequence
  Synthetic oligonucleotide
tgattttctcatatctcgccggagggccca

SEQ ID NO: 442048 - DNA, 30 bp, Artificial Sequence
  Synthetic oligonucleotide
aggcggtgcacaaggcgccggcttggccca

SEQ ID NO: 442049 - DNA, 30 bp, Artificial Sequence
  Synthetic oligonucleotide
aactaatcgacgttgtgcgcatcctgccca

SEQ ID NO: 442050 - DNA, 30 bp, Artificial Sequence
  Synthetic oligonucleotide
ggacgtcggttcacagcatggacgtgccca

SEQ ID NO: 442051 - DNA, 30 bp, Artificial Sequence
  Synthetic oligonucleotide
gtaacgattcataggcagacgggttgccca

SEQ ID NO: 442052 - DNA, 30 bp, Artificial Sequence
  Synthetic oligonucleotide
gggaatagcatgatgcagacccaaatccca

SEQ ID NO: 442053 - DNA, 30 bp, Artificial Sequence
  Synthetic oligonucleotide
gggtgggagcggagccaaaagggaatccca

SEQ ID NO: 442054 - DNA, 30 bp, Artificial Sequence
  Synthetic oligonucleotide
cattagaaaagtcgggggcaagagatccca

SEQ ID NO: 442055 - DNA, 30 bp, Artificial Sequence
  Synthetic oligonucleotide
gaatatgggcgcggtacttaacgactccca

SEQ ID NO: 442056 - DNA, 30 bp, Artificial Sequence
  Synthetic oligonucleotide
atttttgttaagtcgagttccctgctccca

SEQ ID NO: 442057 - DNA, 30 bp, Artificial Sequence
  Synthetic oligonucleotide
cgctacaagagatggcttattgatctccca

SEQ ID NO: 442058 - DNA, 30 bp, Artificial Sequence
  Synthetic oligonucleotide
taattcgtacattttttagatgttctccca

SEQ ID NO: 442059 - DNA, 30 bp, Artificial Sequence
  Synthetic oligonucleotide
tttctcactcggtttagaccatttctccca

SEQ ID NO: 442060 - DNA, 30 bp, Artificial Sequence
  Synthetic oligonucleotide
gtcaacttacgcatggcaaagggcgtccca

SEQ ID NO: 442061 - DNA, 30 bp, Artificial Sequence
  Synthetic oligonucleotide
tataccgggaagtatcttaactcggtccca

SEQ ID NO: 442062 - DNA, 30 bp, Artificial Sequence
  Synthetic oligonucleotide
tggagaacaccctgggaatccggtgtccca

SEQ ID NO: 442063 - DNA, 30 bp, Artificial Sequence
  Synthetic oligonucleotide
gttgatatgattctgaatcgcggtgtccca

SEQ ID NO: 442064 - DNA, 30 bp, Artificial Sequence
  Synthetic oligonucleotide
cggagtggcatgtcgaacggtattgtccca

SEQ ID NO: 442065 - DNA, 30 bp, Artificial Sequence
  Synthetic oligonucleotide
ggttgaaatgtcgtactcgggcaattccca

SEQ ID NO: 442066 - DNA, 30 bp, Artificial Sequence
  Synthetic oligonucleotide
gagtggtacacgtattaggagagattccca

SEQ ID NO: 442067 - DNA, 30 bp, Artificial Sequence
  Synthetic oligonucleotide
tcgttgattaacgggaagatacgattccca

SEQ ID NO: 442068 - DNA, 30 bp, Artificial Sequence
  Synthetic oligonucleotide
actactgggaccgcatgcaccggcttccca

SEQ ID NO: 442069 - DNA, 30 bp, Artificial Sequence
  Synthetic oligonucleotide
caacttagactcaaggatttccggttccca

SEQ ID NO: 442070 - DNA, 30 bp, Artificial Sequence
  Synthetic oligonucleotide
atagtcgagacatgctgacatcggttccca

SEQ ID NO: 442071 - DNA, 30 bp, Artificial Sequence
  Synthetic oligonucleotide
aggcttcaaacagtacgcaactatttccca

SEQ ID NO: 442072 - DNA, 30 bp, Artificial Sequence
  Synthetic oligonucleotide
tccgcaagtgcatgggttccgaaaaagcca

SEQ ID NO: 442073 - DNA, 30 bp, Artificial Sequence
  Synthetic oligonucleotide
tcccccggaacttgtattttaccaaagcca

SEQ ID NO: 442074 - DNA, 30 bp, Artificial Sequence
  Synthetic oligonucleotide
ttatcgaggttgccagatggtatcaagcca

SEQ ID NO: 442075 - DNA, 30 bp, Artificial Sequence
  Synthetic oligonucleotide
ccctaaaaaatggttggctgagtcaagcca

SEQ ID NO: 442076 - DNA, 30 bp, Artificial Sequence
  Synthetic oligonucleotide
ttaccgttagtatcaattaaatggaagcca

SEQ ID NO: 442077 - DNA, 30 bp, Artificial Sequence
  Synthetic oligonucleotide
gtacagtcaatgcttacgatgcataagcca

SEQ ID NO: 442078 - DNA, 30 bp, Artificial Sequence
  Synthetic oligonucleotide
ataggctatttgcatacgaacgctaagcca

SEQ ID NO: 442079 - DNA, 30 bp, Artificial Sequence
  Synthetic oligonucleotide
ggtaaaggcatggttgttcggtttaagcca

SEQ ID NO: 442080 - DNA, 30 bp, Artificial Sequence
  Synthetic oligonucleotide
accaggggactaagtgattttacacagcca

SEQ ID NO: 442081 - DNA, 30 bp, Artificial Sequence
  Synthetic oligonucleotide
gctagtcatgccgggcggttagaccagcca

SEQ ID NO: 442082 - DNA, 30 bp, Artificial Sequence
  Synthetic oligonucleotide
gtgtgtcgtggttgtgagggctcccagcca

SEQ ID NO: 442083 - DNA, 30 bp, Artificial Sequence
  Synthetic oligonucleotide
ccatacaaaacacgtgtaaagggccagcca

SEQ ID NO: 442084 - DNA, 30 bp, Artificial Sequence
  Synthetic oligonucleotide
ctggtttgggcgcactcccgcacgcagcca

SEQ ID NO: 442085 - DNA, 30 bp, Artificial Sequence
  Synthetic oligonucleotide
aatataaaagccgcccaagcgtatcagcca

SEQ ID NO: 442086 - DNA, 30 bp, Artificial Sequence
  Synthetic oligonucleotide
cggaatatactgcagtgcatggctcagcca

SEQ ID NO: 442087 - DNA, 30 bp, Artificial Sequence
  Synthetic oligonucleotide
gatctatgttggtctatgcccatagagcca

SEQ ID NO: 442088 - DNA, 30 bp, Artificial Sequence
  Synthetic oligonucleotide
ctctagctcgtagctccaccgggggagcca

SEQ ID NO: 442089 - DNA, 30 bp, Artificial Sequence
  Synthetic oligonucleotide
gattcagccgcctcaccgtgttttgagcca

SEQ ID NO: 442090 - DNA, 30 bp, Artificial Sequence
  Synthetic oligonucleotide
gtacgacccggagccgatgagcactagcca

SEQ ID NO: 442091 - DNA, 30 bp, Artificial Sequence
  Synthetic oligonucleotide
tgacaataaccagcttctgtaagctagcca

SEQ ID NO: 442092 - DNA, 30 bp, Artificial Sequence
  Synthetic oligonucleotide
ggatatctgttccttggtttgatctagcca

SEQ ID NO: 442093 - DNA, 30 bp, Artificial Sequence
  Synthetic oligonucleotide
tgctttacgtaagttgtgcttatgtagcca

SEQ ID NO: 442094 - DNA, 30 bp, Artificial Sequence
  Synthetic oligonucleotide
gctctttgaggaccgtacgtcttgtagcca

SEQ ID NO: 442095 - DNA, 30 bp, Artificial Sequence
  Synthetic oligonucleotide
atagtaactcttagattagcgcattagcca

SEQ ID NO: 442096 - DNA, 30 bp, Artificial Sequence
  Synthetic oligonucleotide
tcaaatttttgaagtcaaaactattagcca

SEQ ID NO: 442097 - DNA, 30 bp, Artificial Sequence
  Synthetic oligonucleotide
ggctcatggtgtctggggtcgtattagcca

SEQ ID NO: 442098 - DNA, 30 bp, Artificial Sequence
  Synthetic oligonucleotide
gcatcagcaccccaaagacaagagacgcca

SEQ ID NO: 442099 - DNA, 30 bp, Artificial Sequence
  Synthetic oligonucleotide
aacaatatgttacagagagccctgacgcca

SEQ ID NO: 442100 - DNA, 30 bp, Artificial Sequence
  Synthetic oligonucleotide
ggattgaggaacggttctttacttacgcca

SEQ ID NO: 442101 - DNA, 30 bp, Artificial Sequence
  Synthetic oligonucleotide
gtgggtgtagtgctggttgctaaaccgcca

SEQ ID NO: 442102 - DNA, 30 bp, Artificial Sequence
  Synthetic oligonucleotide
gaagacggggcttacagcgggaacccgcca

SEQ ID NO: 442103 - DNA, 30 bp, Artificial Sequence
  Synthetic oligonucleotide
caggcccgcaagttttctgtgagcccgcca

SEQ ID NO: 442104 - DNA, 30 bp, Artificial Sequence
  Synthetic oligonucleotide
atctttggtatgcgaacgcgcgggccgcca

SEQ ID NO: 442105 - DNA, 30 bp, Artificial Sequence
  Synthetic oligonucleotide
gaactgaaattacagcgatgttggccgcca

SEQ ID NO: 442106 - DNA, 30 bp, Artificial Sequence
  Synthetic oligonucleotide
ccttagcgggttcaacggtttcttccgcca

SEQ ID NO: 442107 - DNA, 30 bp, Artificial Sequence
  Synthetic oligonucleotide
aattaatcaacacgacgataagaagcgcca

SEQ ID NO: 442108 - DNA, 30 bp, Artificial Sequence
  Synthetic oligonucleotide
caatggcgtagtgttcgcggatccgcgcca

SEQ ID NO: 442109 - DNA, 30 bp, Artificial Sequence
  Synthetic oligonucleotide
atatatagaaatcccgctgattgcgcgcca

SEQ ID NO: 442110 - DNA, 30 bp, Artificial Sequence
  Synthetic oligonucleotide
atacaacataacggcgtagtctctgcgcca

SEQ ID NO: 442111 - DNA, 30 bp, Artificial Sequence
  Synthetic oligonucleotide
ggcatacgtatctacgagcattgtgcgcca

SEQ ID NO: 442112 - DNA, 30 bp, Artificial Sequence
  Synthetic oligonucleotide
gttacggcgtacgactcttgatcgtcgcca

SEQ ID NO: 442113 - DNA, 30 bp, Artificial Sequence
  Synthetic oligonucleotide
ctccctttcatctgtcggaaaaaaaggcca

SEQ ID NO: 442114 - DNA, 30 bp, Artificial Sequence
  Synthetic oligonucleotide
gtcgcagtcttgcgtttttctccaaggcca

SEQ ID NO: 442115 - DNA, 30 bp, Artificial Sequence
  Synthetic oligonucleotide
attcatctaaacgatggggagataaggcca

SEQ ID NO: 442116 - DNA, 30 bp, Artificial Sequence
  Synthetic oligonucleotide
cgcttctatcaacaagtgcagcccaggcca

SEQ ID NO: 442117 - DNA, 30 bp, Artificial Sequence
  Synthetic oligonucleotide
tttataatctacatgtatgggagcaggcca

SEQ ID NO: 442118 - DNA, 30 bp, Artificial Sequence
  Synthetic oligonucleotide
atcagcgtagtggccttgatcgtcaggcca

SEQ ID NO: 442119 - DNA, 30 bp, Artificial Sequence
  Synthetic oligonucleotide
gctggccacgatgagacatcggctaggcca

SEQ ID NO: 442120 - DNA, 30 bp, Artificial Sequence
  Synthetic oligonucleotide
gccaggctggccgaaaggtgcccacggcca

SEQ ID NO: 442121 - DNA, 30 bp, Artificial Sequence
  Synthetic oligonucleotide
ggcaattataggttcgtggtgccacggcca

SEQ ID NO: 442122 - DNA, 30 bp, Artificial Sequence
  Synthetic oligonucleotide
agtaattttgggccggtggtcagacggcca

SEQ ID NO: 442123 - DNA, 30 bp, Artificial Sequence
  Synthetic oligonucleotide
tccgcagcacccacaccggactgacggcca

SEQ ID NO: 442124 - DNA, 28 bp, Artificial Sequence
  Synthetic oligonucleotide
cctttccgtgcactggttgtgacggcca

SEQ ID NO: 442125 - DNA, 30 bp, Artificial Sequence
  Synthetic oligonucleotide
cattggtttggagctattcggaaagggcca

SEQ ID NO: 442126 - DNA, 30 bp, Artificial Sequence
  Synthetic oligonucleotide
gccgcctgaggggaccccgcacaagggcca

SEQ ID NO: 442127 - DNA, 30 bp, Artificial Sequence
  Synthetic oligonucleotide
tccatttaatcctgccaaaatgtcgggcca

SEQ ID NO: 442128 - DNA, 30 bp, Artificial Sequence
  Synthetic oligonucleotide
cgactgttattcgaacacgcaacggggcca

SEQ ID NO: 442129 - DNA, 30 bp, Artificial Sequence
  Synthetic oligonucleotide
catccaaatatgttactcgccaatgggcca

SEQ ID NO: 442130 - DNA, 31 bp, Artificial Sequence
  Synthetic oligonucleotide
gaacttcaaagtgttaaggcccattgggcca

SEQ ID NO: 442131 - DNA, 30 bp, Artificial Sequence
  Synthetic oligonucleotide
gcacccggcatggttataatggcatggcca

SEQ ID NO: 442132 - DNA, 30 bp, Artificial Sequence
  Synthetic oligonucleotide
ctgtcatctttgatcggttaatactggcca

SEQ ID NO: 442133 - DNA, 30 bp, Artificial Sequence
  Synthetic oligonucleotide
tcgcaggcagccatgtcactatcctggcca

SEQ ID NO: 442134 - DNA, 30 bp, Artificial Sequence
  Synthetic oligonucleotide
ggagcaacgtgaggaagtacgtcctggcca

SEQ ID NO: 442135 - DNA, 30 bp, Artificial Sequence
  Synthetic oligonucleotide
ccctgcattaggtcgggaatttcctggcca

SEQ ID NO: 442136 - DNA, 30 bp, Artificial Sequence
  Synthetic oligonucleotide
ggagattagtgagttgtgagtctctggcca

SEQ ID NO: 442137 - DNA, 30 bp, Artificial Sequence
  Synthetic oligonucleotide
attggcccgggatatccacgggtctggcca

SEQ ID NO: 442138 - DNA, 30 bp, Artificial Sequence
  Synthetic oligonucleotide
cttggacctgagtggcccactgtctggcca

SEQ ID NO: 442139 - DNA, 30 bp, Artificial Sequence
  Synthetic oligonucleotide
gatcactatgcgtgaaacgcgaattggcca

SEQ ID NO: 442140 - DNA, 30 bp, Artificial Sequence
  Synthetic oligonucleotide
taaacgggatgggttgaggttacttggcca

SEQ ID NO: 442141 - DNA, 30 bp, Artificial Sequence
  Synthetic oligonucleotide
tcactcgaatatgatagacatggttggcca

SEQ ID NO: 442142 - DNA, 30 bp, Artificial Sequence
  Synthetic oligonucleotide
ggcatgccctacgaataccagctttggcca

SEQ ID NO: 442143 - DNA, 30 bp, Artificial Sequence
  Synthetic oligonucleotide
tcagattctttaactagtcgttaaatgcca

SEQ ID NO: 442144 - DNA, 30 bp, Artificial Sequence
  Synthetic oligonucleotide
gacttataaggtagttgtgtacagatgcca

SEQ ID NO: 442145 - DNA, 30 bp, Artificial Sequence
  Synthetic oligonucleotide
tcgcacgcaaggggacggcctaggatgcca

SEQ ID NO: 442146 - DNA, 30 bp, Artificial Sequence
  Synthetic oligonucleotide
ggttgtgccggaatcgtcaagtaactgcca

SEQ ID NO: 442147 - DNA, 30 bp, Artificial Sequence
  Synthetic oligonucleotide
aatactgcccctggttctgagacactgcca

SEQ ID NO: 442148 - DNA, 30 bp, Artificial Sequence
  Synthetic oligonucleotide
cagccaattgaagcgtagcgacgactgcca

SEQ ID NO: 442149 - DNA, 30 bp, Artificial Sequence
  Synthetic oligonucleotide
aactgcactcaacgtttgggacgcgtgcca

SEQ ID NO: 442150 - DNA, 30 bp, Artificial Sequence
  Synthetic oligonucleotide
gccacgtcctcggcgcccagcctcgtgcca

SEQ ID NO: 442151 - DNA, 30 bp, Artificial Sequence
  Synthetic oligonucleotide
atcaggctatgaattgcccatgtcgtgcca

SEQ ID NO: 442152 - DNA, 30 bp, Artificial Sequence
  Synthetic oligonucleotide
ctggcacataaaaatctgttacgggtgcca

SEQ ID NO: 442153 - DNA, 30 bp, Artificial Sequence
  Synthetic oligonucleotide
aggtatcatgacgacacaccgcgggtgcca

SEQ ID NO: 442154 - DNA, 30 bp, Artificial Sequence
  Synthetic oligonucleotide
gaaaggttcaatgggttcaatcatgtgcca

SEQ ID NO: 442155 - DNA, 30 bp, Artificial Sequence
  Synthetic oligonucleotide
tgatcgaggttctacgtcgattctgtgcca

SEQ ID NO: 442156 - DNA, 30 bp, Artificial Sequence
  Synthetic oligonucleotide
cacttccgctgacgggtatcgaccttgcca

SEQ ID NO: 442157 - DNA, 30 bp, Artificial Sequence
  Synthetic oligonucleotide
gacgtctcttgtaaaggacgtagtttgcca

SEQ ID NO: 442158 - DNA, 30 bp, Artificial Sequence
  Synthetic oligonucleotide
acgtggaatggtacggctttaccaaatcca

SEQ ID NO: 442159 - DNA, 30 bp, Artificial Sequence
  Synthetic oligonucleotide
atagagttcaattaggccacggcgaatcca

SEQ ID NO: 442160 - DNA, 30 bp, Artificial Sequence
  Synthetic oligonucleotide
cgtatgggaggatgcgagtcaaataatcca

SEQ ID NO: 442161 - DNA, 30 bp, Artificial Sequence
  Synthetic oligonucleotide
gtccgtcaagttgacgatcacgataatcca

SEQ ID NO: 442162 - DNA, 30 bp, Artificial Sequence
  Synthetic oligonucleotide
ataattattacattgttatttactaatcca

SEQ ID NO: 442163 - DNA, 30 bp, Artificial Sequence
  Synthetic oligonucleotide
cgtttgcgaaacaccgagttacgtaatcca

SEQ ID NO: 442164 - DNA, 30 bp, Artificial Sequence
  Synthetic oligonucleotide
agttagcgatacatattgtcttttaatcca

SEQ ID NO: 442165 - DNA, 30 bp, Artificial Sequence
  Synthetic oligonucleotide
ttccgtctcggtctgctatctaaacatcca

SEQ ID NO: 442166 - DNA, 30 bp, Artificial Sequence
  Synthetic oligonucleotide
gcattgtaaattgttaaccaatcccatcca

SEQ ID NO: 442167 - DNA, 30 bp, Artificial Sequence
  Synthetic oligonucleotide
attcgacaacctgtaccctcgaggcatcca

SEQ ID NO: 442168 - DNA, 30 bp, Artificial Sequence
  Synthetic oligonucleotide
aagatggtgggtcggacgctggggcatcca

SEQ ID NO: 442169 - DNA, 30 bp, Artificial Sequence
  Synthetic oligonucleotide
attgcgcatacttcattggcgagtcatcca

SEQ ID NO: 442170 - DNA, 30 bp, Artificial Sequence
  Synthetic oligonucleotide
aagcaactcatattgaaccgacgtcatcca

SEQ ID NO: 442171 - DNA, 30 bp, Artificial Sequence
  Synthetic oligonucleotide
gaacatcccttaccagctttcaaagatcca

SEQ ID NO: 442172 - DNA, 30 bp, Artificial Sequence
  Synthetic oligonucleotide
aaactgaatatagttcgcggctgcgatcca

SEQ ID NO: 442173 - DNA, 30 bp, Artificial Sequence
  Synthetic oligonucleotide
gtgagtatagtcgctaggatggtcgatcca

SEQ ID NO: 442174 - DNA, 30 bp, Artificial Sequence
  Synthetic oligonucleotide
ggatggaaagtcttcagaagttcggatcca

SEQ ID NO: 442175 - DNA, 29 bp, Artificial Sequence
  Synthetic oligonucleotide
aagttatcggcattggcctgatggatcca

SEQ ID NO: 442176 - DNA, 30 bp, Artificial Sequence
  Synthetic oligonucleotide
tttgactacggacatgctctaccatatcca

SEQ ID NO: 442177 - DNA, 30 bp, Artificial Sequence
  Synthetic oligonucleotide
acttcgaatcgcagtattctattatatcca

SEQ ID NO: 442178 - DNA, 30 bp, Artificial Sequence
  Synthetic oligonucleotide
agatcctgcttggagtgttagaattatcca

SEQ ID NO: 442179 - DNA, 30 bp, Artificial Sequence
  Synthetic oligonucleotide
gggtatctcaattgccgcctgcattatcca

SEQ ID NO: 442180 - DNA, 30 bp, Artificial Sequence
  Synthetic oligonucleotide
ataggcaattaactccgagaggcaactcca

SEQ ID NO: 442181 - DNA, 30 bp, Artificial Sequence
  Synthetic oligonucleotide
agctgtatttccaaggtcctggacactcca

SEQ ID NO: 442182 - DNA, 30 bp, Artificial Sequence
  Synthetic oligonucleotide
cgccatttaattccgggagcatacactcca

SEQ ID NO: 442183 - DNA, 30 bp, Artificial Sequence
  Synthetic oligonucleotide
gtatggagcccggtattgtctagcactcca

SEQ ID NO: 442184 - DNA, 30 bp, Artificial Sequence
  Synthetic oligonucleotide
atcctcaggagtggtcccacggcgactcca

SEQ ID NO: 442185 - DNA, 30 bp, Artificial Sequence
  Synthetic oligonucleotide
gtcatcagcgcttcgagatcatatactcca

SEQ ID NO: 442186 - DNA, 30 bp, Artificial Sequence
  Synthetic oligonucleotide
tccgcaaagcaacggaggcagtctactcca

SEQ ID NO: 442187 - DNA, 30 bp, Artificial Sequence
  Synthetic oligonucleotide
tttacttaagacgccgaagttcttactcca

SEQ ID NO: 442188 - DNA, 30 bp, Artificial Sequence
  Synthetic oligonucleotide
ccctcatcgatacaactttactttactcca

SEQ ID NO: 442189 - DNA, 30 bp, Artificial Sequence
  Synthetic oligonucleotide
ggccaaacccggaatggcgcctttactcca

SEQ ID NO: 442190 - DNA, 31 bp, Artificial Sequence
  Synthetic oligonucleotide
ggttagggaactggtctgaaggggacctcca

SEQ ID NO: 442191 - DNA, 30 bp, Artificial Sequence
  Synthetic oligonucleotide
attttggcccataaattgatgatccctcca

SEQ ID NO: 442192 - DNA, 30 bp, Artificial Sequence
  Synthetic oligonucleotide
taccgctaccttgctctttacagggctcca

SEQ ID NO: 442193 - DNA, 30 bp, Artificial Sequence
  Synthetic oligonucleotide
ctaacatcctgcatagcacggcctgctcca

SEQ ID NO: 442194 - DNA, 30 bp, Artificial Sequence
  Synthetic oligonucleotide
cacggcgtgctgacgctggatgctgctcca

SEQ ID NO: 442195 - DNA, 30 bp, Artificial Sequence
  Synthetic oligonucleotide
catccgaacagtacttggatgggctctcca

SEQ ID NO: 442196 - DNA, 30 bp, Artificial Sequence
  Synthetic oligonucleotide
aatcaatagtttctggtaaacatctctcca

SEQ ID NO: 442197 - DNA, 31 bp, Artificial Sequence
  Synthetic oligonucleotide
ggtggaaatgcagcatgaaacagcgtctcca

SEQ ID NO: 442198 - DNA, 30 bp, Artificial Sequence
  Synthetic oligonucleotide
caggtttttaagcgagggatcttgtctcca

SEQ ID NO: 442199 - DNA, 30 bp, Artificial Sequence
  Synthetic oligonucleotide
attgagaagcaggtcagagggtcttctcca

SEQ ID NO: 442200 - DNA, 30 bp, Artificial Sequence
  Synthetic oligonucleotide
gatgttgggacggagcccaatgccagtcca

SEQ ID NO: 442201 - DNA, 30 bp, Artificial Sequence
  Synthetic oligonucleotide
aacgccatgtaatcgcctgagaatagtcca

SEQ ID NO: 442202 - DNA, 30 bp, Artificial Sequence
  Synthetic oligonucleotide
atatacactattcggcgcgtgcatagtcca

SEQ ID NO: 442203 - DNA, 30 bp, Artificial Sequence
  Synthetic oligonucleotide
agttataaacgggggtgcggtacccgtcca

SEQ ID NO: 442204 - DNA, 30 bp, Artificial Sequence
  Synthetic oligonucleotide
atcgtggcgcggaatgaacgcctccgtcca

SEQ ID NO: 442205 - DNA, 30 bp, Artificial Sequence
  Synthetic oligonucleotide
ttagtacgctacgacccgtttgggcgtcca

SEQ ID NO: 442206 - DNA, 30 bp, Artificial Sequence
  Synthetic oligonucleotide
cgctaaaccatgacgtttaatcaaggtcca

SEQ ID NO: 442207 - DNA, 30 bp, Artificial Sequence
  Synthetic oligonucleotide
ctagtattatgaccgcacccacgcggtcca

SEQ ID NO: 442208 - DNA, 30 bp, Artificial Sequence
  Synthetic oligonucleotide
gatatctcaggactcacggttaagggtcca

SEQ ID NO: 442209 - DNA, 30 bp, Artificial Sequence
  Synthetic oligonucleotide
atcacacgaggcagatcaggcaggggtcca

SEQ ID NO: 442210 - DNA, 30 bp, Artificial Sequence
  Synthetic oligonucleotide
taatccctttatagcaccgggtggggtcca

SEQ ID NO: 442211 - DNA, 30 bp, Artificial Sequence
  Synthetic oligonucleotide
tggggtcgatcaacgagtagaaatggtcca

SEQ ID NO: 442212 - DNA, 30 bp, Artificial Sequence
  Synthetic oligonucleotide
gactatctgcgatgaggggagtctggtcca

SEQ ID NO: 442213 - DNA, 30 bp, Artificial Sequence
  Synthetic oligonucleotide
gatacggaggtttgctgcggtcttggtcca

SEQ ID NO: 442214 - DNA, 30 bp, Artificial Sequence
  Synthetic oligonucleotide
cactatttttagagcatggcgccatgtcca

SEQ ID NO: 442215 - DNA, 30 bp, Artificial Sequence
  Synthetic oligonucleotide
tactgttatctagtgagagtagcatgtcca

SEQ ID NO: 442216 - DNA, 30 bp, Artificial Sequence
  Synthetic oligonucleotide
attaccggcgacggtgtcttaatatgtcca

SEQ ID NO: 442217 - DNA, 30 bp, Artificial Sequence
  Synthetic oligonucleotide
tatacctgctgcaatccttggctatgtcca

SEQ ID NO: 442218 - DNA, 30 bp, Artificial Sequence
  Synthetic oligonucleotide
ttattgcagaatcgattgggctagtgtcca

SEQ ID NO: 442219 - DNA, 30 bp, Artificial Sequence
  Synthetic oligonucleotide
tagtcgcacctttggacaacgaacattcca

SEQ ID NO: 442220 - DNA, 30 bp, Artificial Sequence
  Synthetic oligonucleotide
acaagtagtaaacggtgctcttgcattcca

SEQ ID NO: 442221 - DNA, 30 bp, Artificial Sequence
  Synthetic oligonucleotide
tcggctttgtcaaacgagcaggttattcca

SEQ ID NO: 442222 - DNA, 30 bp, Artificial Sequence
  Synthetic oligonucleotide
aacgacgggtatggggacgttcaacttcca

SEQ ID NO: 442223 - DNA, 30 bp, Artificial Sequence
  Synthetic oligonucleotide
gagcatatgtggctcgctgtgagacttcca

SEQ ID NO: 442224 - DNA, 30 bp, Artificial Sequence
  Synthetic oligonucleotide
tagcgtgatcggagttttgaaaaccttcca

SEQ ID NO: 442225 - DNA, 30 bp, Artificial Sequence
  Synthetic oligonucleotide
aaaatccgaagggaacggttgatgcttcca

SEQ ID NO: 442226 - DNA, 30 bp, Artificial Sequence
  Synthetic oligonucleotide
gtatcgagccccgttatgaaacatcttcca

SEQ ID NO: 442227 - DNA, 30 bp, Artificial Sequence
  Synthetic oligonucleotide
gaggttaatggagggtgctaatatcttcca

SEQ ID NO: 442228 - DNA, 30 bp, Artificial Sequence
  Synthetic oligonucleotide
ttcagtaaccgacgcacacgaagtcttcca

SEQ ID NO: 442229 - DNA, 30 bp, Artificial Sequence
  Synthetic oligonucleotide
catttcaaacagcggcgggttaccgttcca

SEQ ID NO: 442230 - DNA, 30 bp, Artificial Sequence
  Synthetic oligonucleotide
atagacgtttgataagggttatccgttcca

SEQ ID NO: 442231 - DNA, 30 bp, Artificial Sequence
  Synthetic oligonucleotide
aggacgccaaagacttagcggagtgttcca

SEQ ID NO: 442232 - DNA, 30 bp, Artificial Sequence
  Synthetic oligonucleotide
ggtgatcaactatacgctcagtttgttcca

SEQ ID NO: 442233 - DNA, 30 bp, Artificial Sequence
  Synthetic oligonucleotide
caccgggcttcaaccatgagagaatttcca

SEQ ID NO: 442234 - DNA, 30 bp, Artificial Sequence
  Synthetic oligonucleotide
ttaagcgttccggagggtcagttatttcca

SEQ ID NO: 442235 - DNA, 30 bp, Artificial Sequence
  Synthetic oligonucleotide
gcataaacaggtctgtttcacacctttcca

SEQ ID NO: 442236 - DNA, 30 bp, Artificial Sequence
  Synthetic oligonucleotide
tcttaggaggctattgggctaagctttcca

SEQ ID NO: 442237 - DNA, 30 bp, Artificial Sequence
  Synthetic oligonucleotide
tatctaaggctctttcgacgcgtctttcca

SEQ ID NO: 442238 - DNA, 30 bp, Artificial Sequence
  Synthetic oligonucleotide
ctacgtagatgttaccacacatcgtttcca

SEQ ID NO: 442239 - DNA, 30 bp, Artificial Sequence
  Synthetic oligonucleotide
taggacacagtgtcagtggtaaggtttcca

SEQ ID NO: 442240 - DNA, 30 bp, Artificial Sequence
  Synthetic oligonucleotide
ctagtccctttctcatgaatatattttcca

SEQ ID NO: 442241 - DNA, 30 bp, Artificial Sequence
  Synthetic oligonucleotide
ggtacgggttggatccaatcggctaaagca

SEQ ID NO: 442242 - DNA, 30 bp, Artificial Sequence
  Synthetic oligonucleotide
cgagcagttagagaacatcggacgcaagca

SEQ ID NO: 442243 - DNA, 30 bp, Artificial Sequence
  Synthetic oligonucleotide
ctcggttgtagcaacttcattatagaagca

SEQ ID NO: 442244 - DNA, 30 bp, Artificial Sequence
  Synthetic oligonucleotide
ccgggcaggattacatttgaccacgaagca

SEQ ID NO: 442245 - DNA, 30 bp, Artificial Sequence
  Synthetic oligonucleotide
gcgcaaggagccaccgttgtcgacgaagca

SEQ ID NO: 442246 - DNA, 30 bp, Artificial Sequence
  Synthetic oligonucleotide
ttctctattctggagcttgtgtgcgaagca

SEQ ID NO: 442247 - DNA, 30 bp, Artificial Sequence
  Synthetic oligonucleotide
cagccctggcattattgatgcaaggaagca

SEQ ID NO: 442248 - DNA, 30 bp, Artificial Sequence
  Synthetic oligonucleotide
gtgtgcttgtaggagtccgcgcaggaagca

SEQ ID NO: 442249 - DNA, 30 bp, Artificial Sequence
  Synthetic oligonucleotide
gattaaccttaagtacaattataggaagca

SEQ ID NO: 442250 - DNA, 30 bp, Artificial Sequence
  Synthetic oligonucleotide
ggacaatggcttaggtggactccggaagca

SEQ ID NO: 442251 - DNA, 30 bp, Artificial Sequence
  Synthetic oligonucleotide
accctatatcctccacttcaaagggaagca

SEQ ID NO: 442252 - DNA, 30 bp, Artificial Sequence
  Synthetic oligonucleotide
ttacttgactccttatacgatatggaagca

SEQ ID NO: 442253 - DNA, 30 bp, Artificial Sequence
  Synthetic oligonucleotide
caaatcataaaggattcttaggttgaagca

SEQ ID NO: 442254 - DNA, 30 bp, Artificial Sequence
  Synthetic oligonucleotide
tcgtagacgatacacgaagtaacataagca

SEQ ID NO: 442255 - DNA, 30 bp, Artificial Sequence
  Synthetic oligonucleotide
gcctttttagagctaagacgccgctaagca

SEQ ID NO: 442256 - DNA, 30 bp, Artificial Sequence
  Synthetic oligonucleotide
actcctaaagtgctatttactatctaagca

SEQ ID NO: 442257 - DNA, 30 bp, Artificial Sequence
  Synthetic oligonucleotide
gccgttactagatgatcgacggcgtaagca

SEQ ID NO: 442258 - DNA, 30 bp, Artificial Sequence
  Synthetic oligonucleotide
ttttgatttttttacagtaacggttaagca

SEQ ID NO: 442259 - DNA, 30 bp, Artificial Sequence
  Synthetic oligonucleotide
tggtaatgcgtgcagcactcagtttaagca

SEQ ID NO: 442260 - DNA, 30 bp, Artificial Sequence
  Synthetic oligonucleotide
gatgcggcaccgggagtcctgggaacagca

SEQ ID NO: 442261 - DNA, 30 bp, Artificial Sequence
  Synthetic oligonucleotide
gactatagcacctgattagagtccacagca

SEQ ID NO: 442262 - DNA, 30 bp, Artificial Sequence
  Synthetic oligonucleotide
gacatacgtccgaacctggtgaggacagca

SEQ ID NO: 442263 - DNA, 30 bp, Artificial Sequence
  Synthetic oligonucleotide
tacgcaattcgtctctgtcattatacagca

SEQ ID NO: 442264 - DNA, 30 bp, Artificial Sequence
  Synthetic oligonucleotide
cattataatcctcctataggcgaaccagca

SEQ ID NO: 442265 - DNA, 30 bp, Artificial Sequence
  Synthetic oligonucleotide
catctcccaatgggttgcgctaaagcagca

SEQ ID NO: 442266 - DNA, 30 bp, Artificial Sequence
  Synthetic oligonucleotide
tttcgcaacataattcattcctcggcagca

SEQ ID NO: 442267 - DNA, 30 bp, Artificial Sequence
  Synthetic oligonucleotide
ctccgaattgaggcaaaatagtatgcagca

SEQ ID NO: 442268 - DNA, 30 bp, Artificial Sequence
  Synthetic oligonucleotide
caagaatccgcgatgcacgtgcgtgcagca

SEQ ID NO: 442269 - DNA, 30 bp, Artificial Sequence
  Synthetic oligonucleotide
gtaaattcgctgggcgtaaaagcatcagca

SEQ ID NO: 442270 - DNA, 30 bp, Artificial Sequence
  Synthetic oligonucleotide
gataagtgaacgtcccgctgaaggtcagca

SEQ ID NO: 442271 - DNA, 30 bp, Artificial Sequence
  Synthetic oligonucleotide
tgaaaaagatatcgttacaagtggtcagca

SEQ ID NO: 442272 - DNA, 30 bp, Artificial Sequence
  Synthetic oligonucleotide
cgatactttggtatcaacgaagattcagca

SEQ ID NO: 442273 - DNA, 30 bp, Artificial Sequence
  Synthetic oligonucleotide
gcaggattgcgctgcgctaggtattcagca

SEQ ID NO: 442274 - DNA, 30 bp, Artificial Sequence
  Synthetic oligonucleotide
atgtacggcctcaaatgtgtcccttcagca

SEQ ID NO: 442275 - DNA, 30 bp, Artificial Sequence
  Synthetic oligonucleotide
cctcttcactcgatctgttgcgtttcagca

SEQ ID NO: 442276 - DNA, 30 bp, Artificial Sequence
  Synthetic oligonucleotide
gtctcctagcttactgatcgcaaaagagca

SEQ ID NO: 442277 - DNA, 30 bp, Artificial Sequence
  Synthetic oligonucleotide
gttaagaacataaccaggagtaaaagagca

SEQ ID NO: 442278 - DNA, 30 bp, Artificial Sequence
  Synthetic oligonucleotide
tgctttctggggaagttatttcgaagagca

SEQ ID NO: 442279 - DNA, 30 bp, Artificial Sequence
  Synthetic oligonucleotide
ggctcgggactataggtctaggtcagagca

SEQ ID NO: 442280 - DNA, 30 bp, Artificial Sequence
  Synthetic oligonucleotide
ggcgagctgaataagggtcaatcgagagca

SEQ ID NO: 442281 - DNA, 30 bp, Artificial Sequence
  Synthetic oligonucleotide
aaggttcttttggaatggattcttagagca

SEQ ID NO: 442282 - DNA, 30 bp, Artificial Sequence
  Synthetic oligonucleotide
gctgatcgtggtcaccataattttagagca

SEQ ID NO: 442283 - DNA, 30 bp, Artificial Sequence
  Synthetic oligonucleotide
aaaagcaaagttctagactcgaaacgagca

SEQ ID NO: 442284 - DNA, 30 bp, Artificial Sequence
  Synthetic oligonucleotide
ggagttctcacgaaaaaaccaccccgagca

SEQ ID NO: 442285 - DNA, 30 bp, Artificial Sequence
  Synthetic oligonucleotide
gagagagataaatcgggtgaacggcgagca

SEQ ID NO: 442286 - DNA, 30 bp, Artificial Sequence
  Synthetic oligonucleotide
cttgccggtgctccttagggggggcgagca

SEQ ID NO: 442287 - DNA, 30 bp, Artificial Sequence
  Synthetic oligonucleotide
aatggataactttcgtaactgactcgagca

SEQ ID NO: 442288 - DNA, 30 bp, Artificial Sequence
  Synthetic oligonucleotide
agtctcagcgccacattaatagttcgagca

SEQ ID NO: 442289 - DNA, 30 bp, Artificial Sequence
  Synthetic oligonucleotide
gggttgggggttgaagcttctcaaggagca

SEQ ID NO: 442290 - DNA, 30 bp, Artificial Sequence
  Synthetic oligonucleotide
tagtttcgggtcagattatcgctaggagca

SEQ ID NO: 442291 - DNA, 30 bp, Artificial Sequence
  Synthetic oligonucleotide
gcagaatccccgcattcgacctccggagca

SEQ ID NO: 442292 - DNA, 30 bp, Artificial Sequence
  Synthetic oligonucleotide
tggcgacacggacgcagatatgatggagca

SEQ ID NO: 442293 - DNA, 30 bp, Artificial Sequence
  Synthetic oligonucleotide
aggcagaactgttatgaatatggtggagca

SEQ ID NO: 442294 - DNA, 30 bp, Artificial Sequence
  Synthetic oligonucleotide
tgcgcggcctttattaaggcgtgtggagca

SEQ ID NO: 442295 - DNA, 30 bp, Artificial Sequence
  Synthetic oligonucleotide
ccttcggtttaatggctgtatggctgagca

SEQ ID NO: 442296 - DNA, 30 bp, Artificial Sequence
  Synthetic oligonucleotide
gagagaacacccctccagttcccgtgagca

SEQ ID NO: 442297 - DNA, 30 bp, Artificial Sequence
  Synthetic oligonucleotide
gggttctcttcagtggaaaatggttgagca

SEQ ID NO: 442298 - DNA, 30 bp, Artificial Sequence
  Synthetic oligonucleotide
caaaaaatggatgttaagccgttttgagca

SEQ ID NO: 442299 - DNA, 30 bp, Artificial Sequence
  Synthetic oligonucleotide
tatgtgcataatatgccacagcagatagca

SEQ ID NO: 442300 - DNA, 30 bp, Artificial Sequence
  Synthetic oligonucleotide
cagagctttatttcatcggggaggatagca

SEQ ID NO: 442301 - DNA, 30 bp, Artificial Sequence
  Synthetic oligonucleotide
ccgtggggatattgatatgagacactagca

SEQ ID NO: 442302 - DNA, 30 bp, Artificial Sequence
  Synthetic oligonucleotide
cgcagctcacccgggagacggccgctagca

SEQ ID NO: 442303 - DNA, 30 bp, Artificial Sequence
  Synthetic oligonucleotide
cactagctacctgcagggacgtttctagca

SEQ ID NO: 442304 - DNA, 30 bp, Artificial Sequence
  Synthetic oligonucleotide
tattagctgtagtagaccacgcccgtagca

SEQ ID NO: 442305 - DNA, 30 bp, Artificial Sequence
  Synthetic oligonucleotide
atgttggtttgtgtgatagcaagcgtagca

SEQ ID NO: 442306 - DNA, 30 bp, Artificial Sequence
  Synthetic oligonucleotide
ggctcggtgaagaggtctggggtcgtagca

SEQ ID NO: 442307 - DNA, 30 bp, Artificial Sequence
  Synthetic oligonucleotide
gtgatgcacgggcgtaagttgacggtagca

SEQ ID NO: 442308 - DNA, 30 bp, Artificial Sequence
  Synthetic oligonucleotide
cccggggctgccggtcaaaggcgggtagca

SEQ ID NO: 442309 - DNA, 30 bp, Artificial Sequence
  Synthetic oligonucleotide
cacgtttcttagtaccggtaaggggtagca

SEQ ID NO: 442310 - DNA, 30 bp, Artificial Sequence
  Synthetic oligonucleotide
tcgtgttgctttgcagtgggttaattagca

SEQ ID NO: 442311 - DNA, 30 bp, Artificial Sequence
  Synthetic oligonucleotide
tttaggcgtctccaaaaatctccattagca

SEQ ID NO: 442312 - DNA, 30 bp, Artificial Sequence
  Synthetic oligonucleotide
cacttgcgaggacgacgatgaagcttagca

SEQ ID NO: 442313 - DNA, 30 bp, Artificial Sequence
  Synthetic oligonucleotide
actatgtttacaaccgcttcgaggttagca

SEQ ID NO: 442314 - DNA, 30 bp, Artificial Sequence
  Synthetic oligonucleotide
ctcatatttttagctagtttccatttagca

SEQ ID NO: 442315 - DNA, 30 bp, Artificial Sequence
  Synthetic oligonucleotide
tactactaagttgattactatgaaaacgca

SEQ ID NO: 442316 - DNA, 30 bp, Artificial Sequence
  Synthetic oligonucleotide
agctcaataccgagcgcgccttaaaacgca

SEQ ID NO: 442317 - DNA, 30 bp, Artificial Sequence
  Synthetic oligonucleotide
tattaacattacgctggacccctaaacgca

SEQ ID NO: 442318 - DNA, 30 bp, Artificial Sequence
  Synthetic oligonucleotide
gcatccaatccaggatgatcatccaacgca

SEQ ID NO: 442319 - DNA, 30 bp, Artificial Sequence
  Synthetic oligonucleotide
ttacggtcaagttacgattgcaggaacgca

SEQ ID NO: 442320 - DNA, 30 bp, Artificial Sequence
  Synthetic oligonucleotide
actcgcgtgcattatgcgcactataacgca

SEQ ID NO: 442321 - DNA, 30 bp, Artificial Sequence
  Synthetic oligonucleotide
gtagtagagcatttccgaaaatgacacgca

SEQ ID NO: 442322 - DNA, 30 bp, Artificial Sequence
  Synthetic oligonucleotide
tctttttgccctgtccaacgaccccacgca

SEQ ID NO: 442323 - DNA, 30 bp, Artificial Sequence
  Synthetic oligonucleotide
agaggcagaccaaatcgggagaagcacgca

SEQ ID NO: 442324 - DNA, 30 bp, Artificial Sequence
  Synthetic oligonucleotide
ggactgtgcggttcgtgcaaaccgcacgca

SEQ ID NO: 442325 - DNA, 30 bp, Artificial Sequence
  Synthetic oligonucleotide
ggcttacagcctgcgatcgcttcgcacgca

SEQ ID NO: 442326 - DNA, 30 bp, Artificial Sequence
  Synthetic oligonucleotide
gtctcaatgatggcgtatacgattcacgca

SEQ ID NO: 442327 - DNA, 30 bp, Artificial Sequence
  Synthetic oligonucleotide
tagctggatggctgcttgagccttcacgca

SEQ ID NO: 442328 - DNA, 30 bp, Artificial Sequence
  Synthetic oligonucleotide
aatggggactttagggggccggttcacgca

SEQ ID NO: 442329 - DNA, 30 bp, Artificial Sequence
  Synthetic oligonucleotide
ttcggagagagaattccggcataagacgca

SEQ ID NO: 442330 - DNA, 30 bp, Artificial Sequence
  Synthetic oligonucleotide
aattaccggagttacggtccaaaggacgca

SEQ ID NO: 442331 - DNA, 30 bp, Artificial Sequence
  Synthetic oligonucleotide
ggtacccattcccgagagctggaggacgca

SEQ ID NO: 442332 - DNA, 30 bp, Artificial Sequence
  Synthetic oligonucleotide
tggtgcgcgtgaattatgccaacggacgca

SEQ ID NO: 442333 - DNA, 30 bp, Artificial Sequence
  Synthetic oligonucleotide
tcatcgtccattcccagtaaccgggacgca

SEQ ID NO: 442334 - DNA, 30 bp, Artificial Sequence
  Synthetic oligonucleotide
cacattaagcgggatatttcccgggacgca

SEQ ID NO: 442335 - DNA, 30 bp, Artificial Sequence
  Synthetic oligonucleotide
gaagtagactacagtatctcgctggacgca

SEQ ID NO: 442336 - DNA, 30 bp, Artificial Sequence
  Synthetic oligonucleotide
tcgaatgaagggtaaatgtaccctgacgca

SEQ ID NO: 442337 - DNA, 30 bp, Artificial Sequence
  Synthetic oligonucleotide
cctgttcccatcggagaccgtttatacgca

SEQ ID NO: 442338 - DNA, 30 bp, Artificial Sequence
  Synthetic oligonucleotide
aaacattcctaaggcgctgctaactacgca

SEQ ID NO: 442339 - DNA, 30 bp, Artificial Sequence
  Synthetic oligonucleotide
gccaaacccccaggcattaaagtctacgca

SEQ ID NO: 442340 - DNA, 30 bp, Artificial Sequence
  Synthetic oligonucleotide
tccagacaaattaattacggtgcgtacgca

SEQ ID NO: 442341 - DNA, 30 bp, Artificial Sequence
  Synthetic oligonucleotide
gagcgtgtgtgtaacaatcgttggtacgca

SEQ ID NO: 442342 - DNA, 30 bp, Artificial Sequence
  Synthetic oligonucleotide
tatgatcgcgcacgcggagcaatttacgca

SEQ ID NO: 442343 - DNA, 30 bp, Artificial Sequence
  Synthetic oligonucleotide
cgaggcagtctgtccgtcgattcaaccgca

SEQ ID NO: 442344 - DNA, 30 bp, Artificial Sequence
  Synthetic oligonucleotide
gatatccgggtgtatactggaatcaccgca

SEQ ID NO: 442345 - DNA, 30 bp, Artificial Sequence
  Synthetic oligonucleotide
gcatgtgaaacggtacctaggaagaccgca

SEQ ID NO: 442346 - DNA, 30 bp, Artificial Sequence
  Synthetic oligonucleotide
ataaaattctgttattcgctcgagaccgca

SEQ ID NO: 442347 - DNA, 30 bp, Artificial Sequence
  Synthetic oligonucleotide
gtcggacactcgggcattgcggcgaccgca

SEQ ID NO: 442348 - DNA, 30 bp, Artificial Sequence
  Synthetic oligonucleotide
tataatcactcaaactctcagaaacccgca

SEQ ID NO: 442349 - DNA, 30 bp, Artificial Sequence
  Synthetic oligonucleotide
ctagtcagatggcccaaagtcccacccgca

SEQ ID NO: 442350 - DNA, 30 bp, Artificial Sequence
  Synthetic oligonucleotide
gtgaatgagatttaaggtctagggcccgca

SEQ ID NO: 442351 - DNA, 30 bp, Artificial Sequence
  Synthetic oligonucleotide
gtgacctggtagatgaactgtattcccgca

SEQ ID NO: 442352 - DNA, 30 bp, Artificial Sequence
  Synthetic oligonucleotide
tagaggttcctgcagtaattgagagccgca

SEQ ID NO: 442353 - DNA, 30 bp, Artificial Sequence
  Synthetic oligonucleotide
tgaaagatctctcacgtgactgtggccgca

SEQ ID NO: 442354 - DNA, 30 bp, Artificial Sequence
  Synthetic oligonucleotide
tgtgcatcccggagccggttgaaatccgca

SEQ ID NO: 442355 - DNA, 30 bp, Artificial Sequence
  Synthetic oligonucleotide
ttctcctcatttaagccgcaagtctccgca

SEQ ID NO: 442356 - DNA, 30 bp, Artificial Sequence
  Synthetic oligonucleotide
gtacgaagctccgcctgcacctagtccgca

SEQ ID NO: 442357 - DNA, 30 bp, Artificial Sequence
  Synthetic oligonucleotide
ccttctaaatcgacgaaggatacgtccgca

SEQ ID NO: 442358 - DNA, 30 bp, Artificial Sequence
  Synthetic oligonucleotide
tacttaggccttgaagggaaaatgtccgca

SEQ ID NO: 442359 - DNA, 30 bp, Artificial Sequence
  Synthetic oligonucleotide
attactacggttaaaagcactccttccgca

SEQ ID NO: 442360 - DNA, 30 bp, Artificial Sequence
  Synthetic oligonucleotide
gaggacatccaggagcacgggatttccgca

SEQ ID NO: 442361 - DNA, 30 bp, Artificial Sequence
  Synthetic oligonucleotide
tgcgctctgacgtagctgtatataagcgca

SEQ ID NO: 442362 - DNA, 30 bp, Artificial Sequence
  Synthetic oligonucleotide
gttttcttgcgcttcgagaatgtcagcgca

SEQ ID NO: 442363 - DNA, 30 bp, Artificial Sequence
  Synthetic oligonucleotide
acgccgcaacgtctctgggtgccgagcgca

SEQ ID NO: 442364 - DNA, 30 bp, Artificial Sequence
  Synthetic oligonucleotide
ttgtgatactcagcactcgtcccccgcgca

SEQ ID NO: 442365 - DNA, 30 bp, Artificial Sequence
  Synthetic oligonucleotide
cgtacagcgacgcaattgttggcccgcgca

SEQ ID NO: 442366 - DNA, 30 bp, Artificial Sequence
  Synthetic oligonucleotide
gcatagatggggtagctaggctcccgcgca

SEQ ID NO: 442367 - DNA, 30 bp, Artificial Sequence
  Synthetic oligonucleotide
ctaacactacgtataagccttctccgcgca

SEQ ID NO: 442368 - DNA, 30 bp, Artificial Sequence
  Synthetic oligonucleotide
tatttgccaacaagggcaaaatggcgcgca

SEQ ID NO: 442369 - DNA, 29 bp, Artificial Sequence
  Synthetic oligonucleotide
aagcaatgaaactgagagtggctcgcgca

SEQ ID NO: 442370 - DNA, 30 bp, Artificial Sequence
  Synthetic oligonucleotide
cgtggcgtttcgatgttaccaagaggcgca

SEQ ID NO: 442371 - DNA, 30 bp, Artificial Sequence
  Synthetic oligonucleotide
tatatgcaaataaataggataagcggcgca

SEQ ID NO: 442372 - DNA, 30 bp, Artificial Sequence
  Synthetic oligonucleotide
acgaaaaaattcgtatagtttaagggcgca

SEQ ID NO: 442373 - DNA, 30 bp, Artificial Sequence
  Synthetic oligonucleotide
tatagaggatgtaagtctactaatggcgca

SEQ ID NO: 442374 - DNA, 30 bp, Artificial Sequence
  Synthetic oligonucleotide
gatcttcgtacaataatagtcgtatgcgca

SEQ ID NO: 442375 - DNA, 30 bp, Artificial Sequence
  Synthetic oligonucleotide
tcttattgagaatttctgtgtatctgcgca

SEQ ID NO: 442376 - DNA, 30 bp, Artificial Sequence
  Synthetic oligonucleotide
gttctgaacgaatataggtctatgtgcgca

SEQ ID NO: 442377 - DNA, 30 bp, Artificial Sequence
  Synthetic oligonucleotide
ttcgagcgctattcgggattggtgtgcgca

SEQ ID NO: 442378 - DNA, 30 bp, Artificial Sequence
  Synthetic oligonucleotide
ggtcgatcgttgaatgtcctttattgcgca

SEQ ID NO: 442379 - DNA, 30 bp, Artificial Sequence
  Synthetic oligonucleotide
gacgaatcgatgcgattgtgcagttgcgca

SEQ ID NO: 442380 - DNA, 30 bp, Artificial Sequence
  Synthetic oligonucleotide
cggtgacggagccgtccttctacaatcgca

SEQ ID NO: 442381 - DNA, 30 bp, Artificial Sequence
  Synthetic oligonucleotide
taacggcagcttcttaacaaagtaatcgca

SEQ ID NO: 442382 - DNA, 30 bp, Artificial Sequence
  Synthetic oligonucleotide
gcagtgtttcagaggagttaactcatcgca

SEQ ID NO: 442383 - DNA, 30 bp, Artificial Sequence
  Synthetic oligonucleotide
gacagtatcgtcatccagtcctggatcgca

SEQ ID NO: 442384 - DNA, 30 bp, Artificial Sequence
  Synthetic oligonucleotide
tattggttacgcgcgtagccgtggatcgca

SEQ ID NO: 442385 - DNA, 30 bp, Artificial Sequence
  Synthetic oligonucleotide
ttatcaccccagacaagcacagcactcgca

SEQ ID NO: 442386 - DNA, 30 bp, Artificial Sequence
  Synthetic oligonucleotide
gaaacgattgaacgtgctcgtagactcgca

SEQ ID NO: 442387 - DNA, 30 bp, Artificial Sequence
  Synthetic oligonucleotide
gcagagtgtaagaggtctaccgccctcgca

SEQ ID NO: 442388 - DNA, 30 bp, Artificial Sequence
  Synthetic oligonucleotide
tgctccattacgtttacaacagtcctcgca

SEQ ID NO: 442389 - DNA, 30 bp, Artificial Sequence
  Synthetic oligonucleotide
caattaacgctgtttgccaactcgctcgca

SEQ ID NO: 442390 - DNA, 31 bp, Artificial Sequence
  Synthetic oligonucleotide
tggacgtaccctgcgatgaccaaatctcgca

SEQ ID NO: 442391 - DNA, 30 bp, Artificial Sequence
  Synthetic oligonucleotide
gcaattgggggctttaatatgggtctcgca

SEQ ID NO: 442392 - DNA, 30 bp, Artificial Sequence
  Synthetic oligonucleotide
gtcagccaaagacgcgttcaattcgtcgca

SEQ ID NO: 442393 - DNA, 30 bp, Artificial Sequence
  Synthetic oligonucleotide
ttagccgtttggggcagcaaagaattcgca

SEQ ID NO: 442394 - DNA, 30 bp, Artificial Sequence
  Synthetic oligonucleotide
ataatattttggaccaacaaggccttcgca

SEQ ID NO: 442395 - DNA, 30 bp, Artificial Sequence
  Synthetic oligonucleotide
acactgacggagaccagggccatgttcgca

SEQ ID NO: 442396 - DNA, 30 bp, Artificial Sequence
  Synthetic oligonucleotide
tatcaggtatccggtgtacgagtgttcgca

SEQ ID NO: 442397 - DNA, 30 bp, Artificial Sequence
  Synthetic oligonucleotide
atttagatcagcaagtacaccactttcgca

SEQ ID NO: 442398 - DNA, 30 bp, Artificial Sequence
  Synthetic oligonucleotide
cgtatagcatgcgtaaggaatactttcgca

SEQ ID NO: 442399 - DNA, 30 bp, Artificial Sequence
  Synthetic oligonucleotide
taaggtcaaacagtgcgtaacgttttcgca

SEQ ID NO: 442400 - DNA, 30 bp, Artificial Sequence
  Synthetic oligonucleotide
tttacatgggtatatggtctgtaaaaggca

SEQ ID NO: 442401 - DNA, 30 bp, Artificial Sequence
  Synthetic oligonucleotide
agtagtatgtacggaaagctgccaaaggca

SEQ ID NO: 442402 - DNA, 30 bp, Artificial Sequence
  Synthetic oligonucleotide
ctacaacgcttagtctttttaatcaaggca

SEQ ID NO: 442403 - DNA, 30 bp, Artificial Sequence
  Synthetic oligonucleotide
gccatgactcttgtcgcggacgcgaaggca

SEQ ID NO: 442404 - DNA, 30 bp, Artificial Sequence
  Synthetic oligonucleotide
tgtgggcaagtatgtgtaactactaaggca

SEQ ID NO: 442405 - DNA, 30 bp, Artificial Sequence
  Synthetic oligonucleotide
gtttgttggcaatgatcgccaccacaggca

SEQ ID NO: 442406 - DNA, 30 bp, Artificial Sequence
  Synthetic oligonucleotide
ttacggaaagccctgatcacttgccaggca

SEQ ID NO: 442407 - DNA, 30 bp, Artificial Sequence
  Synthetic oligonucleotide
gtgaaacgctgggcccgttatcacgaggca

SEQ ID NO: 442408 - DNA, 30 bp, Artificial Sequence
  Synthetic oligonucleotide
agccactttacttttaatatatgcgaggca

SEQ ID NO: 442409 - DNA, 30 bp, Artificial Sequence
  Synthetic oligonucleotide
accatccattaaagcgacttttgcgaggca

SEQ ID NO: 442410 - DNA, 30 bp, Artificial Sequence
  Synthetic oligonucleotide
accaatttcttctggcgtaagcaggaggca

SEQ ID NO: 442411 - DNA, 30 bp, Artificial Sequence
  Synthetic oligonucleotide
ttttattttgggtggcgtgacagggaggca

SEQ ID NO: 442412 - DNA, 30 bp, Artificial Sequence
  Synthetic oligonucleotide
cctgatattacgtgacttcttcctgaggca

SEQ ID NO: 442413 - DNA, 30 bp, Artificial Sequence
  Synthetic oligonucleotide
gtaataacttattagtgtcttagtgaggca

SEQ ID NO: 442414 - DNA, 30 bp, Artificial Sequence
  Synthetic oligonucleotide
tcctgctatctagccaggaaataataggca

SEQ ID NO: 442415 - DNA, 30 bp, Artificial Sequence
  Synthetic oligonucleotide
tcaccattaggtgccggggggttataggca

SEQ ID NO: 442416 - DNA, 30 bp, Artificial Sequence
  Synthetic oligonucleotide
aattgagcgcccttgtgttaatactaggca

SEQ ID NO: 442417 - DNA, 30 bp, Artificial Sequence
  Synthetic oligonucleotide
aaaaactgattcttggatcgcccttaggca

SEQ ID NO: 442418 - DNA, 30 bp, Artificial Sequence
  Synthetic oligonucleotide
gtatcacatctaagggaattgccttaggca

SEQ ID NO: 442419 - DNA, 30 bp, Artificial Sequence
  Synthetic oligonucleotide
gaagctccaagacgtacatgtagttaggca

SEQ ID NO: 442420 - DNA, 30 bp, Artificial Sequence
  Synthetic oligonucleotide
agtgtaagtgtaccggtagctttttaggca

SEQ ID NO: 442421 - DNA, 30 bp, Artificial Sequence
  Synthetic oligonucleotide
tccaatagttgcggttcgcgggcaacggca

SEQ ID NO: 442422 - DNA, 30 bp, Artificial Sequence
  Synthetic oligonucleotide
gtatagagaaagcttttggacccgacggca

SEQ ID NO: 442423 - DNA, 30 bp, Artificial Sequence
  Synthetic oligonucleotide
gtcgagggcttgcgtctcccattgacggca

SEQ ID NO: 442424 - DNA, 30 bp, Artificial Sequence
  Synthetic oligonucleotide
acaaaatatggaagatgtgatttgacggca

SEQ ID NO: 442425 - DNA, 30 bp, Artificial Sequence
  Synthetic oligonucleotide
aggggaatggttgttaagccaaatacggca

SEQ ID NO: 442426 - DNA, 30 bp, Artificial Sequence
  Synthetic oligonucleotide
atgaagtcgcggcgtggtcctggtacggca

SEQ ID NO: 442427 - DNA, 30 bp, Artificial Sequence
  Synthetic oligonucleotide
gtaattttcaagggtgagcgcattacggca

SEQ ID NO: 442428 - DNA, 30 bp, Artificial Sequence
  Synthetic oligonucleotide
ggtataataagtagcgaatcacaaccggca

SEQ ID NO: 442429 - DNA, 30 bp, Artificial Sequence
  Synthetic oligonucleotide
gaatacggacgcttagtcaggctcccggca

SEQ ID NO: 442430 - DNA, 30 bp, Artificial Sequence
  Synthetic oligonucleotide
tatacaaaccagaatgggttggagccggca

SEQ ID NO: 442431 - DNA, 30 bp, Artificial Sequence
  Synthetic oligonucleotide
ccctctggtctaatgtttcacgggccggca

SEQ ID NO: 442432 - DNA, 30 bp, Artificial Sequence
  Synthetic oligonucleotide
tatttccgggaaacgggagacgggccggca

SEQ ID NO: 442433 - DNA, 30 bp, Artificial Sequence
  Synthetic oligonucleotide
aaagggttaagggtgaggattagagcggca

SEQ ID NO: 442434 - DNA, 30 bp, Artificial Sequence
  Synthetic oligonucleotide
ctgtagacatatattgtggaccccgcggca

SEQ ID NO: 442435 - DNA, 30 bp, Artificial Sequence
  Synthetic oligonucleotide
acaactgtgcgcggctaggtatccgcggca

SEQ ID NO: 442436 - DNA, 30 bp, Artificial Sequence
  Synthetic oligonucleotide
gggacattaagtaggattacactcgcggca

SEQ ID NO: 442437 - DNA, 30 bp, Artificial Sequence
  Synthetic oligonucleotide
ctacaatggtattgttttatgtatgcggca

SEQ ID NO: 442438 - DNA, 30 bp, Artificial Sequence
  Synthetic oligonucleotide
ctcaataatgcgggttgtacgcaatcggca

SEQ ID NO: 442439 - DNA, 30 bp, Artificial Sequence
  Synthetic oligonucleotide
tattcaaacatcatgcggtcaaactcggca

SEQ ID NO: 442440 - DNA, 30 bp, Artificial Sequence
  Synthetic oligonucleotide
agccggtcgtcagagatcctgctttcggca

SEQ ID NO: 442441 - DNA, 30 bp, Artificial Sequence
  Synthetic oligonucleotide
taattatgggcactttcggtcttttcggca

SEQ ID NO: 442442 - DNA, 30 bp, Artificial Sequence
  Synthetic oligonucleotide
gtgagtagaggaacccctctaacaagggca

SEQ ID NO: 442443 - DNA, 30 bp, Artificial Sequence
  Synthetic oligonucleotide
cttgtttaaccagttcgacggttaagggca

SEQ ID NO: 442444 - DNA, 30 bp, Artificial Sequence
  Synthetic oligonucleotide
atcccggacgaattagcataccggagggca

SEQ ID NO: 442445 - DNA, 30 bp, Artificial Sequence
  Synthetic oligonucleotide
ttcgttgcctcccttgaagtggggagggca

SEQ ID NO: 442446 - DNA, 30 bp, Artificial Sequence
  Synthetic oligonucleotide
tcgtactgcctcctccaaggggatagggca

SEQ ID NO: 442447 - DNA, 30 bp, Artificial Sequence
  Synthetic oligonucleotide
gtgtgactctgactgcatttgtctagggca

SEQ ID NO: 442448 - DNA, 30 bp, Artificial Sequence
  Synthetic oligonucleotide
ttctagaatgtgtggaatgatacacgggca

SEQ ID NO: 442449 - DNA, 30 bp, Artificial Sequence
  Synthetic oligonucleotide
atgcgagactcgatggtcactattcgggca

SEQ ID NO: 442450 - DNA, 30 bp, Artificial Sequence
  Synthetic oligonucleotide
gatctcattaacatctatggcggaggggca

SEQ ID NO: 442451 - DNA, 31 bp, Artificial Sequence
  Synthetic oligonucleotide
gtgatttgtcgatacgactgatggcggggca

SEQ ID NO: 442452 - DNA, 30 bp, Artificial Sequence
  Synthetic oligonucleotide
ggaaccttccgtctcctaatacctggggca

SEQ ID NO: 442453 - DNA, 30 bp, Artificial Sequence
  Synthetic oligonucleotide
ttaacattttaactctcgttagcatgggca

SEQ ID NO: 442454 - DNA, 30 bp, Artificial Sequence
  Synthetic oligonucleotide
ctctggtttcccatattctcaggatgggca

SEQ ID NO: 442455 - DNA, 30 bp, Artificial Sequence
  Synthetic oligonucleotide
gtcagaatggattcgcactcgtgctgggca

SEQ ID NO: 442456 - DNA, 30 bp, Artificial Sequence
  Synthetic oligonucleotide
acaaggtccggaccgtggcgggtctgggca

SEQ ID NO: 442457 - DNA, 30 bp, Artificial Sequence
  Synthetic oligonucleotide
tttctcagggccgagctaaggagttgggca

SEQ ID NO: 442458 - DNA, 30 bp, Artificial Sequence
  Synthetic oligonucleotide
ggtgtgcagtatccagtactgctttgggca

SEQ ID NO: 442459 - DNA, 30 bp, Artificial Sequence
  Synthetic oligonucleotide
cgtaatcttagatcttctctgtaaatggca

SEQ ID NO: 442460 - DNA, 30 bp, Artificial Sequence
  Synthetic oligonucleotide
gaagcccattatcaatgagcacccatggca

SEQ ID NO: 442461 - DNA, 30 bp, Artificial Sequence
  Synthetic oligonucleotide
tcacagaaaggttattatacaatcatggca

SEQ ID NO: 442462 - DNA, 30 bp, Artificial Sequence
  Synthetic oligonucleotide
gagccgcctctaaagacgtcgacgatggca

SEQ ID NO: 442463 - DNA, 30 bp, Artificial Sequence
  Synthetic oligonucleotide
atgtgcccatcggtagagaaggctatggca

SEQ ID NO: 442464 - DNA, 30 bp, Artificial Sequence
  Synthetic oligonucleotide
aagctcgaacgctaggcatcacttatggca

SEQ ID NO: 442465 - DNA, 30 bp, Artificial Sequence
  Synthetic oligonucleotide
cacaatcccctccgcagggctatactggca

SEQ ID NO: 442466 - DNA, 30 bp, Artificial Sequence
  Synthetic oligonucleotide
ggaacacaggcttccgcgatgcccctggca

SEQ ID NO: 442467 - DNA, 30 bp, Artificial Sequence
  Synthetic oligonucleotide
attttgtttactgaacttcatgggctggca

SEQ ID NO: 442468 - DNA, 30 bp, Artificial Sequence
  Synthetic oligonucleotide
gggttactgttcataacgaggggtctggca

SEQ ID NO: 442469 - DNA, 30 bp, Artificial Sequence
  Synthetic oligonucleotide
tgtgtatgttactagcacggaattctggca

SEQ ID NO: 442470 - DNA, 30 bp, Artificial Sequence
  Synthetic oligonucleotide
cgtctccatattcggccacccggagtggca

SEQ ID NO: 442471 - DNA, 30 bp, Artificial Sequence
  Synthetic oligonucleotide
atccctacgtactgcagtggaaccgtggca

SEQ ID NO: 442472 - DNA, 30 bp, Artificial Sequence
  Synthetic oligonucleotide
gatatgcaaccttttcactgacccgtggca

SEQ ID NO: 442473 - DNA, 30 bp, Artificial Sequence
  Synthetic oligonucleotide
tagggtatgataggttccatatccgtggca

SEQ ID NO: 442474 - DNA, 30 bp, Artificial Sequence
  Synthetic oligonucleotide
tgctattagagcctgtacccattggtggca

SEQ ID NO: 442475 - DNA, 30 bp, Artificial Sequence
  Synthetic oligonucleotide
aggttaagatattgtgaacgttgtgtggca

SEQ ID NO: 442476 - DNA, 30 bp, Artificial Sequence
  Synthetic oligonucleotide
gtagttcgaaacccatcgaagcaattggca

SEQ ID NO: 442477 - DNA, 30 bp, Artificial Sequence
  Synthetic oligonucleotide
tgctcttacggaagctacgtgtcattggca

SEQ ID NO: 442478 - DNA, 30 bp, Artificial Sequence
  Synthetic oligonucleotide
gaccccgggtgccgaggatgggtcttggca

SEQ ID NO: 442479 - DNA, 30 bp, Artificial Sequence
  Synthetic oligonucleotide
ggaagtttttggctgctttccatgttggca

SEQ ID NO: 442480 - DNA, 30 bp, Artificial Sequence
  Synthetic oligonucleotide
ccagtatgacctcctttgttaggtttggca

SEQ ID NO: 442481 - DNA, 29 bp, Artificial Sequence
  Synthetic oligonucleotide
ccttattatattgcaatctttgtttggca

SEQ ID NO: 442482 - DNA, 30 bp, Artificial Sequence
  Synthetic oligonucleotide
ccgcagcagtcccttccgagctaaaatgca

SEQ ID NO: 442483 - DNA, 30 bp, Artificial Sequence
  Synthetic oligonucleotide
gacatcttttggatcggagaatcaaatgca

SEQ ID NO: 442484 - DNA, 30 bp, Artificial Sequence
  Synthetic oligonucleotide
agcagcgagaggcgcgacgacaagaatgca

SEQ ID NO: 442485 - DNA, 30 bp, Artificial Sequence
  Synthetic oligonucleotide
agtgttaattaccgccgttgcattaatgca

SEQ ID NO: 442486 - DNA, 30 bp, Artificial Sequence
  Synthetic oligonucleotide
taagatagtacatcgtgcccggttaatgca

SEQ ID NO: 442487 - DNA, 30 bp, Artificial Sequence
  Synthetic oligonucleotide
tatgtacatagttttttgggacaccatgca

SEQ ID NO: 442488 - DNA, 30 bp, Artificial Sequence
  Synthetic oligonucleotide
gggttgcatggacaacacttgacccatgca

SEQ ID NO: 442489 - DNA, 30 bp, Artificial Sequence
  Synthetic oligonucleotide
cgcgtcggtagctttgtcgaccagcatgca

SEQ ID NO: 442490 - DNA, 30 bp, Artificial Sequence
  Synthetic oligonucleotide
agttaatcccggtcaggataaaggcatgca

SEQ ID NO: 442491 - DNA, 30 bp, Artificial Sequence
  Synthetic oligonucleotide
tgccacgtcctaatcgataatgggcatgca

SEQ ID NO: 442492 - DNA, 30 bp, Artificial Sequence
  Synthetic oligonucleotide
gtccataaattcttactagtggaagatgca

SEQ ID NO: 442493 - DNA, 30 bp, Artificial Sequence
  Synthetic oligonucleotide
tctgaatatttgtgaacatggtcagatgca

SEQ ID NO: 442494 - DNA, 30 bp, Artificial Sequence
  Synthetic oligonucleotide
ctccataggtgtagaatctcgggcgatgca

SEQ ID NO: 442495 - DNA, 30 bp, Artificial Sequence
  Synthetic oligonucleotide
gctgagcaagacttgtaattgttcgatgca

SEQ ID NO: 442496 - DNA, 30 bp, Artificial Sequence
  Synthetic oligonucleotide
taagatatataggaaaggtagacggatgca

SEQ ID NO: 442497 - DNA, 30 bp, Artificial Sequence
  Synthetic oligonucleotide
atgcacgctactggaaactatgttgatgca

SEQ ID NO: 442498 - DNA, 30 bp, Artificial Sequence
  Synthetic oligonucleotide
tgacacccaaggcccggataaaaatatgca

SEQ ID NO: 442499 - DNA, 30 bp, Artificial Sequence
  Synthetic oligonucleotide
gtgtggagcagcagtctactgccatatgca

SEQ ID NO: 442500 - DNA, 30 bp, Artificial Sequence
  Synthetic oligonucleotide
agttcccgtgtatcctggaggtactatgca

SEQ ID NO: 442501 - DNA, 30 bp, Artificial Sequence
  Synthetic oligonucleotide
atctgacactaatccgatggtctctatgca

SEQ ID NO: 442502 - DNA, 30 bp, Artificial Sequence
  Synthetic oligonucleotide
gcctcccgagcaaatggctctatgtatgca

SEQ ID NO: 442503 - DNA, 30 bp, Artificial Sequence
  Synthetic oligonucleotide
aggactattatgcttatacaccattatgca

SEQ ID NO: 442504 - DNA, 30 bp, Artificial Sequence
  Synthetic oligonucleotide
gcgttatgttatcagatagagtattatgca

SEQ ID NO: 442505 - DNA, 30 bp, Artificial Sequence
  Synthetic oligonucleotide
attcaccgactagcgctgaaagacactgca

SEQ ID NO: 442506 - DNA, 30 bp, Artificial Sequence
  Synthetic oligonucleotide
ggaaaatcttatgtctgtcgcgtcactgca

SEQ ID NO: 442507 - DNA, 30 bp, Artificial Sequence
  Synthetic oligonucleotide
attgaacggtgaggaggctattatactgca

SEQ ID NO: 442508 - DNA, 30 bp, Artificial Sequence
  Synthetic oligonucleotide
tcaatgtttgccaactggaaagacgctgca

SEQ ID NO: 442509 - DNA, 30 bp, Artificial Sequence
  Synthetic oligonucleotide
gagtgcctcatttagccctctgtcgctgca

SEQ ID NO: 442510 - DNA, 30 bp, Artificial Sequence
  Synthetic oligonucleotide
ttaacgagtttaagctctactgaggctgca

SEQ ID NO: 442511 - DNA, 30 bp, Artificial Sequence
  Synthetic oligonucleotide
caggttcaacttactaaatgcgtggctgca

SEQ ID NO: 442512 - DNA, 30 bp, Artificial Sequence
  Synthetic oligonucleotide
accagatggacctggacacgagcctctgca

SEQ ID NO: 442513 - DNA, 30 bp, Artificial Sequence
  Synthetic oligonucleotide
ccagctaaaattttaatttacatttctgca

SEQ ID NO: 442514 - DNA, 30 bp, Artificial Sequence
  Synthetic oligonucleotide
cagctcggcagtcacaagacacaaagtgca

SEQ ID NO: 442515 - DNA, 30 bp, Artificial Sequence
  Synthetic oligonucleotide
ctacctcaggtaattctcttctcaagtgca

SEQ ID NO: 442516 - DNA, 30 bp, Artificial Sequence
  Synthetic oligonucleotide
gggactacgctggtttggatcgtcagtgca

SEQ ID NO: 442517 - DNA, 30 bp, Artificial Sequence
  Synthetic oligonucleotide
tcgcactttggctccctcagacatagtgca

SEQ ID NO: 442518 - DNA, 30 bp, Artificial Sequence
  Synthetic oligonucleotide
atagttccgagcaatgtcggtcatagtgca

SEQ ID NO: 442519 - DNA, 30 bp, Artificial Sequence
  Synthetic oligonucleotide
tttaaaagcacattcgtcattcaacgtgca

SEQ ID NO: 442520 - DNA, 30 bp, Artificial Sequence
  Synthetic oligonucleotide
cctaacgcagtcgctcagtgtcaccgtgca

SEQ ID NO: 442521 - DNA, 30 bp, Artificial Sequence
  Synthetic oligonucleotide
tgattttcgttagccactgcataaggtgca

SEQ ID NO: 442522 - DNA, 30 bp, Artificial Sequence
  Synthetic oligonucleotide
tttggtctccaaggactccgtacaggtgca

SEQ ID NO: 442523 - DNA, 30 bp, Artificial Sequence
  Synthetic oligonucleotide
gtaagaggtcggaatggtgtttccggtgca

SEQ ID NO: 442524 - DNA, 30 bp, Artificial Sequence
  Synthetic oligonucleotide
gacggcgggcagttactgaagatcggtgca

SEQ ID NO: 442525 - DNA, 30 bp, Artificial Sequence
  Synthetic oligonucleotide
atatctgtgtggaaaccttgatggggtgca

SEQ ID NO: 442526 - DNA, 30 bp, Artificial Sequence
  Synthetic oligonucleotide
tatatcagatgagtccgggcagatggtgca

SEQ ID NO: 442527 - DNA, 30 bp, Artificial Sequence
  Synthetic oligonucleotide
taataatgtgagtcaccatatgctggtgca

SEQ ID NO: 442528 - DNA, 30 bp, Artificial Sequence
  Synthetic oligonucleotide
ttcccctacagtgacagcgcatctggtgca

SEQ ID NO: 442529 - DNA, 30 bp, Artificial Sequence
  Synthetic oligonucleotide
gctcatgttggacctcagggtgcatgtgca

SEQ ID NO: 442530 - DNA, 30 bp, Artificial Sequence
  Synthetic oligonucleotide
tgctcaagggttatcctttttgactgtgca

SEQ ID NO: 442531 - DNA, 30 bp, Artificial Sequence
  Synthetic oligonucleotide
ggttgtagatcgcgctcaacaccttgtgca

SEQ ID NO: 442532 - DNA, 30 bp, Artificial Sequence
  Synthetic oligonucleotide
atttcaactcttgcgcaatgaaaaattgca

SEQ ID NO: 442533 - DNA, 30 bp, Artificial Sequence
  Synthetic oligonucleotide
ggcatgcttaactgcagtacaataattgca

SEQ ID NO: 442534 - DNA, 30 bp, Artificial Sequence
  Synthetic oligonucleotide
tcacctgccaaacaacgtactataattgca

SEQ ID NO: 442535 - DNA, 30 bp, Artificial Sequence
  Synthetic oligonucleotide
tgatttctatcgtgcaagtatcccattgca

SEQ ID NO: 442536 - DNA, 30 bp, Artificial Sequence
  Synthetic oligonucleotide
caaaaatacctgcataggatgcggattgca

SEQ ID NO: 442537 - DNA, 30 bp, Artificial Sequence
  Synthetic oligonucleotide
gttcagagagcggtctcccaattgattgca

SEQ ID NO: 442538 - DNA, 30 bp, Artificial Sequence
  Synthetic oligonucleotide
ttatcggggcctccaaatcatagtattgca

SEQ ID NO: 442539 - DNA, 30 bp, Artificial Sequence
  Synthetic oligonucleotide
aatcgctgcgaataagtggtgtcacttgca

SEQ ID NO: 442540 - DNA, 30 bp, Artificial Sequence
  Synthetic oligonucleotide
cattgagacatcgttagccgctaccttgca

SEQ ID NO: 442541 - DNA, 30 bp, Artificial Sequence
  Synthetic oligonucleotide
ccgcgcagattccttttccagggccttgca

SEQ ID NO: 442542 - DNA, 30 bp, Artificial Sequence
  Synthetic oligonucleotide
tttctaagttagttatatagtaagcttgca

SEQ ID NO: 442543 - DNA, 30 bp, Artificial Sequence
  Synthetic oligonucleotide
attctatttgcagggttgaagcagcttgca

SEQ ID NO: 442544 - DNA, 30 bp, Artificial Sequence
  Synthetic oligonucleotide
atagaccaaactgggaccatgtctcttgca

SEQ ID NO: 442545 - DNA, 30 bp, Artificial Sequence
  Synthetic oligonucleotide
aattctttggacaggtaggatcttcttgca

SEQ ID NO: 442546 - DNA, 30 bp, Artificial Sequence
  Synthetic oligonucleotide
cattccccacgctctagcttctaagttgca

SEQ ID NO: 442547 - DNA, 30 bp, Artificial Sequence
  Synthetic oligonucleotide
ttacccccttgctcgttgttgtaagttgca

SEQ ID NO: 442548 - DNA, 30 bp, Artificial Sequence
  Synthetic oligonucleotide
ttgaatcctgccaatcacatgtgagttgca

SEQ ID NO: 442549 - DNA, 30 bp, Artificial Sequence
  Synthetic oligonucleotide
tttggaggcgtacaagttttaatagttgca

SEQ ID NO: 442550 - DNA, 30 bp, Artificial Sequence
  Synthetic oligonucleotide
aacctcggaggtcaacctcataacgttgca

SEQ ID NO: 442551 - DNA, 28 bp, Artificial Sequence
  Synthetic oligonucleotide
tagatactgggtagcatttagggttgca

SEQ ID NO: 442552 - DNA, 30 bp, Artificial Sequence
  Synthetic oligonucleotide
ataactgtcagactcagaactggggttgca

SEQ ID NO: 442553 - DNA, 30 bp, Artificial Sequence
  Synthetic oligonucleotide
ggttttgaggacagaagaggtgatgttgca

SEQ ID NO: 442554 - DNA, 30 bp, Artificial Sequence
  Synthetic oligonucleotide
attaaatgtggtcccccctactatgttgca

SEQ ID NO: 442555 - DNA, 30 bp, Artificial Sequence
  Synthetic oligonucleotide
cgttttttcaatcggtgcgtcgttgttgca

SEQ ID NO: 442556 - DNA, 30 bp, Artificial Sequence
  Synthetic oligonucleotide
tatggttttacctttattcgtccatttgca

SEQ ID NO: 442557 - DNA, 30 bp, Artificial Sequence
  Synthetic oligonucleotide
cgattccaagatcttcaggttgtatttgca

SEQ ID NO: 442558 - DNA, 30 bp, Artificial Sequence
  Synthetic oligonucleotide
tactgttccactcacataggccagtttgca

SEQ ID NO: 442559 - DNA, 30 bp, Artificial Sequence
  Synthetic oligonucleotide
tacggaagcgttcaaactgtgcagtttgca

SEQ ID NO: 442560 - DNA, 30 bp, Artificial Sequence
  Synthetic oligonucleotide
ctggtaattcggggacgacctaattttgca

SEQ ID NO: 442561 - DNA, 30 bp, Artificial Sequence
  Synthetic oligonucleotide
aaaaactatctgtaaacaacagtttttgca

SEQ ID NO: 442562 - DNA, 30 bp, Artificial Sequence
  Synthetic oligonucleotide
tgggcgggacgaatattgttaataaaatca

SEQ ID NO: 442563 - DNA, 30 bp, Artificial Sequence
  Synthetic oligonucleotide
ccagagggaacgtcgcgaagcgacaaatca

SEQ ID NO: 442564 - DNA, 31 bp, Artificial Sequence
  Synthetic oligonucleotide
gcaggtggggtcctaatcgcctgacaaatca

SEQ ID NO: 442565 - DNA, 30 bp, Artificial Sequence
  Synthetic oligonucleotide
gtccatactctgagaaatattacgaaatca

SEQ ID NO: 442566 - DNA, 30 bp, Artificial Sequence
  Synthetic oligonucleotide
gaggaggagtgctctgtttttttgaaatca

SEQ ID NO: 442567 - DNA, 30 bp, Artificial Sequence
  Synthetic oligonucleotide
gaagacgggcagttcacccgttgtaaatca

SEQ ID NO: 442568 - DNA, 30 bp, Artificial Sequence
  Synthetic oligonucleotide
gagcaaattaatttaaggtcaacacaatca

SEQ ID NO: 442569 - DNA, 30 bp, Artificial Sequence
  Synthetic oligonucleotide
cagagtcgaacttgctggacaacgcaatca

SEQ ID NO: 442570 - DNA, 30 bp, Artificial Sequence
  Synthetic oligonucleotide
cggtgtgaaccccgtcgggtacttcaatca

SEQ ID NO: 442571 - DNA, 30 bp, Artificial Sequence
  Synthetic oligonucleotide
gttgcattaggttgcctttaataagaatca

SEQ ID NO: 442572 - DNA, 30 bp, Artificial Sequence
  Synthetic oligonucleotide
taatagaagttgaagtaggaagtagaatca

SEQ ID NO: 442573 - DNA, 30 bp, Artificial Sequence
  Synthetic oligonucleotide
atcatcgagggtagctctatattagaatca

SEQ ID NO: 442574 - DNA, 30 bp, Artificial Sequence
  Synthetic oligonucleotide
tgtattttccgtggcgaactaagcgaatca

SEQ ID NO: 442575 - DNA, 30 bp, Artificial Sequence
  Synthetic oligonucleotide
ttaggtagacagcatgatataacggaatca

SEQ ID NO: 442576 - DNA, 30 bp, Artificial Sequence
  Synthetic oligonucleotide
gtttttctaacggcacttttcatggaatca

SEQ ID NO: 442577 - DNA, 30 bp, Artificial Sequence
  Synthetic oligonucleotide
gatactagaccgggagagcaccgtgaatca

SEQ ID NO: 442578 - DNA, 30 bp, Artificial Sequence
  Synthetic oligonucleotide
ccaaacttcccgctccttggagttgaatca

SEQ ID NO: 442579 - DNA, 30 bp, Artificial Sequence
  Synthetic oligonucleotide
tagcgacgtaggattgccagcctataatca

SEQ ID NO: 442580 - DNA, 31 bp, Artificial Sequence
  Synthetic oligonucleotide
ccttcgtctctagactatgacctgctaatca

SEQ ID NO: 442581 - DNA, 30 bp, Artificial Sequence
  Synthetic oligonucleotide
ttctgtataactcgcgggaggaagtaatca

SEQ ID NO: 442582 - DNA, 30 bp, Artificial Sequence
  Synthetic oligonucleotide
aatccgcgtaaaatagtacgccagtaatca

SEQ ID NO: 442583 - DNA, 30 bp, Artificial Sequence
  Synthetic oligonucleotide
caattagatttcacttacggtacgtaatca

SEQ ID NO: 442584 - DNA, 30 bp, Artificial Sequence
  Synthetic oligonucleotide
gagattagaatcggtagggtagtgtaatca

SEQ ID NO: 442585 - DNA, 30 bp, Artificial Sequence
  Synthetic oligonucleotide
catggatggactccgcctgtgaacacatca

SEQ ID NO: 442586 - DNA, 30 bp, Artificial Sequence
  Synthetic oligonucleotide
ctttatcacgatcatagattagccacatca

SEQ ID NO: 442587 - DNA, 30 bp, Artificial Sequence
  Synthetic oligonucleotide
cgaatacttgtgcacctgttaagcacatca

SEQ ID NO: 442588 - DNA, 30 bp, Artificial Sequence
  Synthetic oligonucleotide
agagtttctggtctatgaccagtgacatca

SEQ ID NO: 442589 - DNA, 30 bp, Artificial Sequence
  Synthetic oligonucleotide
tttggcccgcggcatgggtaccatacatca

SEQ ID NO: 442590 - DNA, 30 bp, Artificial Sequence
  Synthetic oligonucleotide
gcaactataagttgtttaattactacatca

SEQ ID NO: 442591 - DNA, 30 bp, Artificial Sequence
  Synthetic oligonucleotide
gtgtcgaaaagacacaataaaaaaccatca

SEQ ID NO: 442592 - DNA, 30 bp, Artificial Sequence
  Synthetic oligonucleotide
tttgggagcccgacgaacatcgtaccatca

SEQ ID NO: 442593 - DNA, 30 bp, Artificial Sequence
  Synthetic oligonucleotide
gtatgatatagtgcatttatcgtaccatca

SEQ ID NO: 442594 - DNA, 30 bp, Artificial Sequence
  Synthetic oligonucleotide
tttcacacacccttttgcactgggccatca

SEQ ID NO: 442595 - DNA, 30 bp, Artificial Sequence
  Synthetic oligonucleotide
gcttcccgttcacatttacgtatgccatca

SEQ ID NO: 442596 - DNA, 30 bp, Artificial Sequence
  Synthetic oligonucleotide
agaactatgtattctggtgacccagcatca

SEQ ID NO: 442597 - DNA, 30 bp, Artificial Sequence
  Synthetic oligonucleotide
gcagtaatgcgctcgtgagatggagcatca

SEQ ID NO: 442598 - DNA, 30 bp, Artificial Sequence
  Synthetic oligonucleotide
tatatgcctgtacgtctaattttagcatca

SEQ ID NO: 442599 - DNA, 30 bp, Artificial Sequence
  Synthetic oligonucleotide
taatagggattgatgcaagaacgggcatca

SEQ ID NO: 442600 - DNA, 30 bp, Artificial Sequence
  Synthetic oligonucleotide
gttgtatgagtagaaacgcctggggcatca

SEQ ID NO: 442601 - DNA, 30 bp, Artificial Sequence
  Synthetic oligonucleotide
gggttagatccaaaggagcctacatcatca

SEQ ID NO: 442602 - DNA, 30 bp, Artificial Sequence
  Synthetic oligonucleotide
gtgacgagtaacataattgttatctcatca

SEQ ID NO: 442603 - DNA, 30 bp, Artificial Sequence
  Synthetic oligonucleotide
tgacatcagacgatgaggatactctcatca

SEQ ID NO: 442604 - DNA, 30 bp, Artificial Sequence
  Synthetic oligonucleotide
tcgagaccacgatccacggtcttgtcatca

SEQ ID NO: 442605 - DNA, 30 bp, Artificial Sequence
  Synthetic oligonucleotide
gattccctcaaagctttcatgcaaagatca

SEQ ID NO: 442606 - DNA, 30 bp, Artificial Sequence
  Synthetic oligonucleotide
gaaccttgttattaaagtctcggcagatca

SEQ ID NO: 442607 - DNA, 30 bp, Artificial Sequence
  Synthetic oligonucleotide
tacgccggcaaacccttcgttctcagatca

SEQ ID NO: 442608 - DNA, 30 bp, Artificial Sequence
  Synthetic oligonucleotide
cccggctcacgcacgaatcatcggagatca

SEQ ID NO: 442609 - DNA, 30 bp, Artificial Sequence
  Synthetic oligonucleotide
gttgctactttttttcctcatcggagatca

SEQ ID NO: 442610 - DNA, 30 bp, Artificial Sequence
  Synthetic oligonucleotide
tgtgtccgctgatgtactcccgggagatca

SEQ ID NO: 442611 - DNA, 30 bp, Artificial Sequence
  Synthetic oligonucleotide
gggtgtctcggacatcctcgactgagatca

SEQ ID NO: 442612 - DNA, 30 bp, Artificial Sequence
  Synthetic oligonucleotide
ttagatttcagcctagatctgttgagatca

SEQ ID NO: 442613 - DNA, 30 bp, Artificial Sequence
  Synthetic oligonucleotide
agtgagcggggcaacgggcacagtagatca

SEQ ID NO: 442614 - DNA, 30 bp, Artificial Sequence
  Synthetic oligonucleotide
cagtttcatctataccctctgattagatca

SEQ ID NO: 442615 - DNA, 30 bp, Artificial Sequence
  Synthetic oligonucleotide
ttccggcatcatcgccaggaaccacgatca

SEQ ID NO: 442616 - DNA, 30 bp, Artificial Sequence
  Synthetic oligonucleotide
tcgtatctacgtgtaggtcatccacgatca

SEQ ID NO: 442617 - DNA, 30 bp, Artificial Sequence
  Synthetic oligonucleotide
gcagatgttccgaagtaactaaggcgatca

SEQ ID NO: 442618 - DNA, 30 bp, Artificial Sequence
  Synthetic oligonucleotide
tagtatatccctcgcgagtgatcaggatca

SEQ ID NO: 442619 - DNA, 30 bp, Artificial Sequence
  Synthetic oligonucleotide
cccctgcgatatgtaccacggagaggatca

SEQ ID NO: 442620 - DNA, 30 bp, Artificial Sequence
  Synthetic oligonucleotide
ggttatattcatccatctgtagccggatca

SEQ ID NO: 442621 - DNA, 30 bp, Artificial Sequence
  Synthetic oligonucleotide
taatcaaggcttagaaggggacgcggatca

SEQ ID NO: 442622 - DNA, 30 bp, Artificial Sequence
  Synthetic oligonucleotide
tcgcctcttttctaattccaattcggatca

SEQ ID NO: 442623 - DNA, 29 bp, Artificial Sequence
  Synthetic oligonucleotide
ctagcctcgaacgacagggaaggggatca

SEQ ID NO: 442624 - DNA, 30 bp, Artificial Sequence
  Synthetic oligonucleotide
aaactcataggtctatacaaaaatggatca

SEQ ID NO: 442625 - DNA, 30 bp, Artificial Sequence
  Synthetic oligonucleotide
cagaaggcgacgctgggtgttaatggatca

SEQ ID NO: 442626 - DNA, 30 bp, Artificial Sequence
  Synthetic oligonucleotide
gtgctctcagacgccgcaaagggtggatca

SEQ ID NO: 442627 - DNA, 30 bp, Artificial Sequence
  Synthetic oligonucleotide
tgcccagatctgttatgcaggattggatca

SEQ ID NO: 442628 - DNA, 30 bp, Artificial Sequence
  Synthetic oligonucleotide
aagttggggcacgcgctgttcttatgatca

SEQ ID NO: 442629 - DNA, 30 bp, Artificial Sequence
  Synthetic oligonucleotide
gtgccatcaccttgagccaaagggtgatca

SEQ ID NO: 442630 - DNA, 30 bp, Artificial Sequence
  Synthetic oligonucleotide
gccaagcgttcgattgatacgacttgatca

SEQ ID NO: 442631 - DNA, 30 bp, Artificial Sequence
  Synthetic oligonucleotide
ctcctgattatcgcgcagggttgttgatca

SEQ ID NO: 442632 - DNA, 30 bp, Artificial Sequence
  Synthetic oligonucleotide
ctaggtaattttcataccgagtaaatatca

SEQ ID NO: 442633 - DNA, 30 bp, Artificial Sequence
  Synthetic oligonucleotide
gccttagtatctatagacgcaagaatatca

SEQ ID NO: 442634 - DNA, 30 bp, Artificial Sequence
  Synthetic oligonucleotide
gcccgatgcttctaggtatataccatatca

SEQ ID NO: 442635 - DNA, 30 bp, Artificial Sequence
  Synthetic oligonucleotide
atcaaatcgtgctgataagatctcatatca

SEQ ID NO: 442636 - DNA, 30 bp, Artificial Sequence
  Synthetic oligonucleotide
agcgctcatatgagtaatcacgtcatatca

SEQ ID NO: 442637 - DNA, 30 bp, Artificial Sequence
  Synthetic oligonucleotide
gtgcttcggttattcgcctcagagatatca

SEQ ID NO: 442638 - DNA, 30 bp, Artificial Sequence
  Synthetic oligonucleotide
tgtggttacttactgtatcagtggatatca

SEQ ID NO: 442639 - DNA, 30 bp, Artificial Sequence
  Synthetic oligonucleotide
ggtttggacaagctatagatgttgatatca

SEQ ID NO: 442640 - DNA, 30 bp, Artificial Sequence
  Synthetic oligonucleotide
aggcattataggttctacgaatctatatca

SEQ ID NO: 442641 - DNA, 30 bp, Artificial Sequence
  Synthetic oligonucleotide
gtagcttcgataagttcactcttactatca

SEQ ID NO: 442642 - DNA, 30 bp, Artificial Sequence
  Synthetic oligonucleotide
aattgtatttgttgtctgtcgagcctatca

SEQ ID NO: 442643 - DNA, 30 bp, Artificial Sequence
  Synthetic oligonucleotide
aggatgcgaaaaagattgcgtgatctatca

SEQ ID NO: 442644 - DNA, 30 bp, Artificial Sequence
  Synthetic oligonucleotide
agtgttcggtgactataccatgttctatca

SEQ ID NO: 442645 - DNA, 30 bp, Artificial Sequence
  Synthetic oligonucleotide
tatggtttgcaagttgttcgtcaagtatca

SEQ ID NO: 442646 - DNA, 30 bp, Artificial Sequence
  Synthetic oligonucleotide
acgatgaagctatagtggatcatagtatca

SEQ ID NO: 442647 - DNA, 30 bp, Artificial Sequence
  Synthetic oligonucleotide
gactccgcatatcgcggcctgatagtatca

SEQ ID NO: 442648 - DNA, 30 bp, Artificial Sequence
  Synthetic oligonucleotide
gactagtgaaatgttcatccaaacgtatca

SEQ ID NO: 442649 - DNA, 30 bp, Artificial Sequence
  Synthetic oligonucleotide
gttaggcgtgaacacacctgttacgtatca

SEQ ID NO: 442650 - DNA, 30 bp, Artificial Sequence
  Synthetic oligonucleotide
tgccttatttgactaaaagcggtcgtatca

SEQ ID NO: 442651 - DNA, 30 bp, Artificial Sequence
  Synthetic oligonucleotide
ttcttgatttcagcgaggcgaggattatca

SEQ ID NO: 442652 - DNA, 30 bp, Artificial Sequence
  Synthetic oligonucleotide
gcatgataacaatatgctatgatattatca

SEQ ID NO: 442653 - DNA, 30 bp, Artificial Sequence
  Synthetic oligonucleotide
gtgaatgacttaatctatgttcagttatca

SEQ ID NO: 442654 - DNA, 30 bp, Artificial Sequence
  Synthetic oligonucleotide
attccgcataggcatcttagattgttatca

SEQ ID NO: 442655 - DNA, 30 bp, Artificial Sequence
  Synthetic oligonucleotide
tatctcgctcacagaacaacgactttatca

SEQ ID NO: 442656 - DNA, 30 bp, Artificial Sequence
  Synthetic oligonucleotide
tttatgggaagttgatgtagcacaaactca

SEQ ID NO: 442657 - DNA, 30 bp, Artificial Sequence
  Synthetic oligonucleotide
gctctgacactcacattgacagcaaactca

SEQ ID NO: 442658 - DNA, 30 bp, Artificial Sequence
  Synthetic oligonucleotide
agtatccgagtcgggcgaaatgcaaactca

SEQ ID NO: 442659 - DNA, 30 bp, Artificial Sequence
  Synthetic oligonucleotide
agttagagacttgtagggatgagaaactca

SEQ ID NO: 442660 - DNA, 30 bp, Artificial Sequence
  Synthetic oligonucleotide
agcactttggcgtggcatgatgccaactca

SEQ ID NO: 442661 - DNA, 30 bp, Artificial Sequence
  Synthetic oligonucleotide
gaatactatagaattatggctttacactca

SEQ ID NO: 442662 - DNA, 30 bp, Artificial Sequence
  Synthetic oligonucleotide
gcggcatggtacagaaattatccccactca

SEQ ID NO: 442663 - DNA, 30 bp, Artificial Sequence
  Synthetic oligonucleotide
taaagaagtatacctcggtctcatcactca

SEQ ID NO: 442664 - DNA, 30 bp, Artificial Sequence
  Synthetic oligonucleotide
tcgcccgagtagttctataatgaggactca

SEQ ID NO: 442665 - DNA, 30 bp, Artificial Sequence
  Synthetic oligonucleotide
tatagaataggctacgtttccctggactca

SEQ ID NO: 442666 - DNA, 30 bp, Artificial Sequence
  Synthetic oligonucleotide
aatatggtccaataatttggagatgactca

SEQ ID NO: 442667 - DNA, 30 bp, Artificial Sequence
  Synthetic oligonucleotide
gttctatagggtaaacaatcagcatactca

SEQ ID NO: 442668 - DNA, 30 bp, Artificial Sequence
  Synthetic oligonucleotide
ctcacgccgccggagggtaaatactactca

SEQ ID NO: 442669 - DNA, 30 bp, Artificial Sequence
  Synthetic oligonucleotide
cagccgctggctggattctatagctactca

SEQ ID NO: 442670 - DNA, 30 bp, Artificial Sequence
  Synthetic oligonucleotide
ttacttctactgaaaaccaggcagtactca

SEQ ID NO: 442671 - DNA, 30 bp, Artificial Sequence
  Synthetic oligonucleotide
gataactccaaaatatcctacgtgtactca

SEQ ID NO: 442672 - DNA, 30 bp, Artificial Sequence
  Synthetic oligonucleotide
gagttattgtgtcatactgtaaattactca

SEQ ID NO: 442673 - DNA, 30 bp, Artificial Sequence
  Synthetic oligonucleotide
aatcgcggcatacaaggatcactttactca

SEQ ID NO: 442674 - DNA, 30 bp, Artificial Sequence
  Synthetic oligonucleotide
cgcgagcatttcttgacgattgtaacctca

SEQ ID NO: 442675 - DNA, 30 bp, Artificial Sequence
  Synthetic oligonucleotide
gtaaggttctcctatatgataggaccctca

SEQ ID NO: 442676 - DNA, 30 bp, Artificial Sequence
  Synthetic oligonucleotide
tgacttgtgaaggggtctgatggaccctca

SEQ ID NO: 442677 - DNA, 30 bp, Artificial Sequence
  Synthetic oligonucleotide
caccggacggcagggttccgagatccctca

SEQ ID NO: 442678 - DNA, 30 bp, Artificial Sequence
  Synthetic oligonucleotide
gcaactggtcctgccaacgccaatgcctca

SEQ ID NO: 442679 - DNA, 30 bp, Artificial Sequence
  Synthetic oligonucleotide
taggagagatggtgctaacgagaatcctca

SEQ ID NO: 442680 - DNA, 30 bp, Artificial Sequence
  Synthetic oligonucleotide
tgaacatgcgacggcattagcggatcctca

SEQ ID NO: 442681 - DNA, 30 bp, Artificial Sequence
  Synthetic oligonucleotide
agtcttacgcgcgttggcgcattcagctca

SEQ ID NO: 442682 - DNA, 30 bp, Artificial Sequence
  Synthetic oligonucleotide
cttcccgacttgcggacattacggagctca

SEQ ID NO: 442683 - DNA, 30 bp, Artificial Sequence
  Synthetic oligonucleotide
aaatctatcggggtacagcatctgagctca

SEQ ID NO: 442684 - DNA, 30 bp, Artificial Sequence
  Synthetic oligonucleotide
gaacacgtgctttaagtcagacatagctca

SEQ ID NO: 442685 - DNA, 30 bp, Artificial Sequence
  Synthetic oligonucleotide
gagtctgatacattaggcgtcgatagctca

SEQ ID NO: 442686 - DNA, 30 bp, Artificial Sequence
  Synthetic oligonucleotide
tgcattacctcttgaccgttcacacgctca

SEQ ID NO: 442687 - DNA, 30 bp, Artificial Sequence
  Synthetic oligonucleotide
ccaaatggcgggatctgggcagcacgctca

SEQ ID NO: 442688 - DNA, 30 bp, Artificial Sequence
  Synthetic oligonucleotide
atataggcgaatgatacggcagtccgctca

SEQ ID NO: 442689 - DNA, 30 bp, Artificial Sequence
  Synthetic oligonucleotide
tatatgattagcgactgatgtttgcgctca

SEQ ID NO: 442690 - DNA, 30 bp, Artificial Sequence
  Synthetic oligonucleotide
gatgcgcggaaatttctacgtcccggctca

SEQ ID NO: 442691 - DNA, 30 bp, Artificial Sequence
  Synthetic oligonucleotide
gtacgggttggcacggtacgacggggctca

SEQ ID NO: 442692 - DNA, 30 bp, Artificial Sequence
  Synthetic oligonucleotide
atacgcagtgtcacaatgcataaatgctca

SEQ ID NO: 442693 - DNA, 30 bp, Artificial Sequence
  Synthetic oligonucleotide
tgatatatgtatcaatgcacagaatgctca

SEQ ID NO: 442694 - DNA, 30 bp, Artificial Sequence
  Synthetic oligonucleotide
tatgtgtttcgttacagtctgtaatgctca

SEQ ID NO: 442695 - DNA, 30 bp, Artificial Sequence
  Synthetic oligonucleotide
cttttcgataaaagttgtagtaagtgctca

SEQ ID NO: 442696 - DNA, 30 bp, Artificial Sequence
  Synthetic oligonucleotide
ttgcagtcatcgatccctatatggtgctca

SEQ ID NO: 442697 - DNA, 30 bp, Artificial Sequence
  Synthetic oligonucleotide
atagcgtgataacgccttaacaattgctca

SEQ ID NO: 442698 - DNA, 30 bp, Artificial Sequence
  Synthetic oligonucleotide
agttcgctactccggcactgtgcttgctca

SEQ ID NO: 442699 - DNA, 30 bp, Artificial Sequence
  Synthetic oligonucleotide
aagatcggctactttgcacagcgttgctca

SEQ ID NO: 442700 - DNA, 30 bp, Artificial Sequence
  Synthetic oligonucleotide
gacagttgcggaggtaatgcatcaatctca

SEQ ID NO: 442701 - DNA, 30 bp, Artificial Sequence
  Synthetic oligonucleotide
tcacggaggtgccctgtgagggtaatctca

SEQ ID NO: 442702 - DNA, 30 bp, Artificial Sequence
  Synthetic oligonucleotide
cgcataccccttaatctgcctgagatctca

SEQ ID NO: 442703 - DNA, 30 bp, Artificial Sequence
  Synthetic oligonucleotide
aaacttgcatccaaaccagcccgtatctca

SEQ ID NO: 442704 - DNA, 30 bp, Artificial Sequence
  Synthetic oligonucleotide
aaagccccatctgagcgttaaggtatctca

SEQ ID NO: 442705 - DNA, 30 bp, Artificial Sequence
  Synthetic oligonucleotide
ggaactacgcagggtaaatccggtatctca

SEQ ID NO: 442706 - DNA, 30 bp, Artificial Sequence
  Synthetic oligonucleotide
tccttaaatatcattcgtagtattatctca

SEQ ID NO: 442707 - DNA, 30 bp, Artificial Sequence
  Synthetic oligonucleotide
aatgacctcaaactctagtttgcgctctca

SEQ ID NO: 442708 - DNA, 30 bp, Artificial Sequence
  Synthetic oligonucleotide
cctctcaatgtaaaaccatggaggctctca

SEQ ID NO: 442709 - DNA, 30 bp, Artificial Sequence
  Synthetic oligonucleotide
gccagcgaggggtgctggggagggctctca

SEQ ID NO: 442710 - DNA, 30 bp, Artificial Sequence
  Synthetic oligonucleotide
cgactctgtgttcaggtttttatgctctca

SEQ ID NO: 442711 - DNA, 30 bp, Artificial Sequence
  Synthetic oligonucleotide
aggcgcgcatgttataccgacagtctctca

SEQ ID NO: 442712 - DNA, 30 bp, Artificial Sequence
  Synthetic oligonucleotide
caggtcgcttaataatgcggcagtctctca

SEQ ID NO: 442713 - DNA, 30 bp, Artificial Sequence
  Synthetic oligonucleotide
cctgagacggatgcataccctagagtctca

SEQ ID NO: 442714 - DNA, 30 bp, Artificial Sequence
  Synthetic oligonucleotide
ctttcaggttagttaatccactgggtctca

SEQ ID NO: 442715 - DNA, 30 bp, Artificial Sequence
  Synthetic oligonucleotide
aattggatggcgctcatcataatggtctca

SEQ ID NO: 442716 - DNA, 30 bp, Artificial Sequence
  Synthetic oligonucleotide
tttgtaactatagccatacggtgtgtctca

SEQ ID NO: 442717 - DNA, 30 bp, Artificial Sequence
  Synthetic oligonucleotide
atattggagtctttgagtcgaccattctca

SEQ ID NO: 442718 - DNA, 30 bp, Artificial Sequence
  Synthetic oligonucleotide
aactcccctcaaactccgcttgcattctca

SEQ ID NO: 442719 - DNA, 30 bp, Artificial Sequence
  Synthetic oligonucleotide
aggtagtcagttaatgcgtgagagttctca

SEQ ID NO: 442720 - DNA, 30 bp, Artificial Sequence
  Synthetic oligonucleotide
taagctgtaaagccgtccgtaagtttctca

SEQ ID NO: 442721 - DNA, 30 bp, Artificial Sequence
  Synthetic oligonucleotide
ctcgcagttaccgccttgtcatccaagtca

SEQ ID NO: 442722 - DNA, 30 bp, Artificial Sequence
  Synthetic oligonucleotide
ggtctcttccttttcccaacgacacagtca

SEQ ID NO: 442723 - DNA, 30 bp, Artificial Sequence
  Synthetic oligonucleotide
ggtatatgcgcggggaatacctcacagtca

SEQ ID NO: 442724 - DNA, 30 bp, Artificial Sequence
  Synthetic oligonucleotide
atgtttggatcacctggaacgatacagtca

SEQ ID NO: 442725 - DNA, 30 bp, Artificial Sequence
  Synthetic oligonucleotide
tagtttttctgtcgcatggcttagcagtca

SEQ ID NO: 442726 - DNA, 30 bp, Artificial Sequence
  Synthetic oligonucleotide
aaaactcgggctccgtaggaatgtcagtca

SEQ ID NO: 442727 - DNA, 30 bp, Artificial Sequence
  Synthetic oligonucleotide
tagtttttggtttatattcttacagagtca

SEQ ID NO: 442728 - DNA, 30 bp, Artificial Sequence
  Synthetic oligonucleotide
accggaatcgtatccaggggaagagagtca

SEQ ID NO: 442729 - DNA, 30 bp, Artificial Sequence
  Synthetic oligonucleotide
gtcttctctgccccatggtcatgagagtca

SEQ ID NO: 442730 - DNA, 30 bp, Artificial Sequence
  Synthetic oligonucleotide
gggcctcaaccgcggctgatacccgagtca

SEQ ID NO: 442731 - DNA, 30 bp, Artificial Sequence
  Synthetic oligonucleotide
taaaatccgtcgatgcaaattgaggagtca

SEQ ID NO: 442732 - DNA, 30 bp, Artificial Sequence
  Synthetic oligonucleotide
gaagccagttcactccgatgatcggagtca

SEQ ID NO: 442733 - DNA, 30 bp, Artificial Sequence
  Synthetic oligonucleotide
cgacgaaaaacaaccgagcgcagggagtca

SEQ ID NO: 442734 - DNA, 30 bp, Artificial Sequence
  Synthetic oligonucleotide
agtatttggcatttcgcgcgtaaatagtca

SEQ ID NO: 442735 - DNA, 30 bp, Artificial Sequence
  Synthetic oligonucleotide
tgcgtctattgaccctatccggaatagtca

SEQ ID NO: 442736 - DNA, 30 bp, Artificial Sequence
  Synthetic oligonucleotide
acgcaccggactatgcaaataatatagtca

SEQ ID NO: 442737 - DNA, 30 bp, Artificial Sequence
  Synthetic oligonucleotide
tttgtcccactgtggcataagaactagtca

SEQ ID NO: 442738 - DNA, 30 bp, Artificial Sequence
  Synthetic oligonucleotide
agtcatacagaattgcaatagcactagtca

SEQ ID NO: 442739 - DNA, 30 bp, Artificial Sequence
  Synthetic oligonucleotide
cttgggacgcagtgcaccagaaagtagtca

SEQ ID NO: 442740 - DNA, 30 bp, Artificial Sequence
  Synthetic oligonucleotide
ttcaacacgaacccctatacggagtagtca

SEQ ID NO: 442741 - DNA, 30 bp, Artificial Sequence
  Synthetic oligonucleotide
gttacccaattcccattgaatgggtagtca

SEQ ID NO: 442742 - DNA, 30 bp, Artificial Sequence
  Synthetic oligonucleotide
ggtatgaattcggccgtttaagtttagtca

SEQ ID NO: 442743 - DNA, 30 bp, Artificial Sequence
  Synthetic oligonucleotide
tatacggtttcaccgtcatggccaacgtca

SEQ ID NO: 442744 - DNA, 30 bp, Artificial Sequence
  Synthetic oligonucleotide
tttttcgatttgaactctcatcagacgtca

SEQ ID NO: 442745 - DNA, 30 bp, Artificial Sequence
  Synthetic oligonucleotide
tcttcgatttcaccgaccccaatgacgtca

SEQ ID NO: 442746 - DNA, 30 bp, Artificial Sequence
  Synthetic oligonucleotide
caaaagatgattgctgttgcagctacgtca

SEQ ID NO: 442747 - DNA, 30 bp, Artificial Sequence
  Synthetic oligonucleotide
gtccggctcagagaggtagctgcgccgtca

SEQ ID NO: 442748 - DNA, 30 bp, Artificial Sequence
  Synthetic oligonucleotide
gggatgacgcaccgcgcgcccctgccgtca

SEQ ID NO: 442749 - DNA, 30 bp, Artificial Sequence
  Synthetic oligonucleotide
tttaatatggatcctatcggtgaagcgtca

SEQ ID NO: 442750 - DNA, 40 bp, Artificial Sequence
  Synthetic oligonucleotide
cggtaaggagggtcaccgacgtcgcgccgttgcagcgtca

SEQ ID NO: 442751 - DNA, 30 bp, Artificial Sequence
  Synthetic oligonucleotide
catcgggccgacggacactttgtagcgtca

SEQ ID NO: 442752 - DNA, 30 bp, Artificial Sequence
  Synthetic oligonucleotide
catcgggcctacggacactttgtagcgtca

SEQ ID NO: 442753 - DNA, 30 bp, Artificial Sequence
  Synthetic oligonucleotide
tctacgaaaagccccgtggtcagggcgtca

SEQ ID NO: 442754 - DNA, 30 bp, Artificial Sequence
  Synthetic oligonucleotide
gtgcggcgctttggagaatcccgggcgtca

SEQ ID NO: 442755 - DNA, 30 bp, Artificial Sequence
  Synthetic oligonucleotide
tatatatgaatcgactctcctttggcgtca

SEQ ID NO: 442756 - DNA, 30 bp, Artificial Sequence
  Synthetic oligonucleotide
gggtatctgaacattaaggacgctgcgtca

SEQ ID NO: 442757 - DNA, 40 bp, Artificial Sequence
  Synthetic oligonucleotide
cggtaaggagggtaaccgacgtcgcgccgttgctgcgtca

SEQ ID NO: 442758 - DNA, 30 bp, Artificial Sequence
  Synthetic oligonucleotide
cgttgggatccatgtagtcaacaatcgtca

SEQ ID NO: 442759 - DNA, 30 bp, Artificial Sequence
  Synthetic oligonucleotide
gccatggaggtcctagtcatggtatcgtca

SEQ ID NO: 442760 - DNA, 30 bp, Artificial Sequence
  Synthetic oligonucleotide
ccaccgatggatcgcgggacggattcgtca

SEQ ID NO: 442761 - DNA, 30 bp, Artificial Sequence
  Synthetic oligonucleotide
ccaatgacctctcctcgtaaggaaaggtca

SEQ ID NO: 442762 - DNA, 30 bp, Artificial Sequence
  Synthetic oligonucleotide
gttccagcgacgtcttcctactaaaggtca

SEQ ID NO: 442763 - DNA, 29 bp, Artificial Sequence
  Synthetic oligonucleotide
gacaaagcatttaactattggttaggtca

SEQ ID NO: 442764 - DNA, 30 bp, Artificial Sequence
  Synthetic oligonucleotide
agtatggtcaccggacattgcgcacggtca

SEQ ID NO: 442765 - DNA, 30 bp, Artificial Sequence
  Synthetic oligonucleotide
gaggttaacccactacgccgtggacggtca

SEQ ID NO: 442766 - DNA, 30 bp, Artificial Sequence
  Synthetic oligonucleotide
cgtctttatatagcctccttgctacggtca

SEQ ID NO: 442767 - DNA, 30 bp, Artificial Sequence
  Synthetic oligonucleotide
gcggaaacccgcctaatgacgttacggtca

SEQ ID NO: 442768 - DNA, 30 bp, Artificial Sequence
  Synthetic oligonucleotide
atacatctttgcctttatcacccgcggtca

SEQ ID NO: 442769 - DNA, 30 bp, Artificial Sequence
  Synthetic oligonucleotide
tcactaggccttaatgtggaatggcggtca

SEQ ID NO: 442770 - DNA, 30 bp, Artificial Sequence
  Synthetic oligonucleotide
tgcggccaggggggtaattaaggtcggtca

SEQ ID NO: 442771 - DNA, 30 bp, Artificial Sequence
  Synthetic oligonucleotide
gcctccactacgtggctagccccagggtca

SEQ ID NO: 442772 - DNA, 30 bp, Artificial Sequence
  Synthetic oligonucleotide
tctagcgcatcaaggcgttaaagagggtca

SEQ ID NO: 442773 - DNA, 30 bp, Artificial Sequence
  Synthetic oligonucleotide
ccccctctaccgcgactaagccacgggtca

SEQ ID NO: 442774 - DNA, 30 bp, Artificial Sequence
  Synthetic oligonucleotide
ctatgtattcagagcgttcctaaggggtca

SEQ ID NO: 442775 - DNA, 30 bp, Artificial Sequence
  Synthetic oligonucleotide
cacctgggagttgaactcgttggggggtca

SEQ ID NO: 442776 - DNA, 30 bp, Artificial Sequence
  Synthetic oligonucleotide
gttagagcttacggaatagccgtggggtca

SEQ ID NO: 442777 - DNA, 30 bp, Artificial Sequence
  Synthetic oligonucleotide
caaatcaaaccgccccgaagggttgggtca

SEQ ID NO: 442778 - DNA, 30 bp, Artificial Sequence
  Synthetic oligonucleotide
attgagagattacattgtaatatatggtca

SEQ ID NO: 442779 - DNA, 30 bp, Artificial Sequence
  Synthetic oligonucleotide
atgatacgttgatgtacccactcctggtca

SEQ ID NO: 442780 - DNA, 30 bp, Artificial Sequence
  Synthetic oligonucleotide
gactggtaacaggggcaagataagtggtca

SEQ ID NO: 442781 - DNA, 30 bp, Artificial Sequence
  Synthetic oligonucleotide
gctctatcgggaggggctcgcaaaatgtca

SEQ ID NO: 442782 - DNA, 30 bp, Artificial Sequence
  Synthetic oligonucleotide
cagctaataggattgtttgaatcgatgtca

SEQ ID NO: 442783 - DNA, 30 bp, Artificial Sequence
  Synthetic oligonucleotide
gtgatcactaatagtatagctactatgtca

SEQ ID NO: 442784 - DNA, 30 bp, Artificial Sequence
  Synthetic oligonucleotide
ccctccaagtgacggcgcgatggtatgtca

SEQ ID NO: 442785 - DNA, 30 bp, Artificial Sequence
  Synthetic oligonucleotide
actcgtcaacgtggtggtcaatgactgtca

SEQ ID NO: 442786 - DNA, 30 bp, Artificial Sequence
  Synthetic oligonucleotide
gggaggaggacagtagatccctgcctgtca

SEQ ID NO: 442787 - DNA, 30 bp, Artificial Sequence
  Synthetic oligonucleotide
gtacaggctcaggctgactggccgctgtca

SEQ ID NO: 442788 - DNA, 30 bp, Artificial Sequence
  Synthetic oligonucleotide
tatatcagtgggattgctactattctgtca

SEQ ID NO: 442789 - DNA, 30 bp, Artificial Sequence
  Synthetic oligonucleotide
tgttctggaaaatcctgacaataagtgtca

SEQ ID NO: 442790 - DNA, 30 bp, Artificial Sequence
  Synthetic oligonucleotide
tctgtccacgctgctcggtagggagtgtca

SEQ ID NO: 442791 - DNA, 29 bp, Artificial Sequence
  Synthetic oligonucleotide
agcttaatgtgtcgtccgcatccgtgtca

SEQ ID NO: 442792 - DNA, 30 bp, Artificial Sequence
  Synthetic oligonucleotide
tattcggtttggagtggtccgccggtgtca

SEQ ID NO: 442793 - DNA, 31 bp, Artificial Sequence
  Synthetic oligonucleotide
aattctaaatatcaggtcagaatgggtgtca

SEQ ID NO: 442794 - DNA, 30 bp, Artificial Sequence
  Synthetic oligonucleotide
ggatatagagatgggacaccatgggtgtca

SEQ ID NO: 442795 - DNA, 30 bp, Artificial Sequence
  Synthetic oligonucleotide
tgcgcagtcgatatcgctaaagtggtgtca

SEQ ID NO: 442796 - DNA, 30 bp, Artificial Sequence
  Synthetic oligonucleotide
agcattgatgatcaacggcaattggtgtca

SEQ ID NO: 442797 - DNA, 30 bp, Artificial Sequence
  Synthetic oligonucleotide
aatacactgtgtagaactgtattggtgtca

SEQ ID NO: 442798 - DNA, 30 bp, Artificial Sequence
  Synthetic oligonucleotide
ggctttgcgtcgctcaaccggtatgtgtca

SEQ ID NO: 442799 - DNA, 30 bp, Artificial Sequence
  Synthetic oligonucleotide
tatctctcaccgctaaggtaacgtgtgtca

SEQ ID NO: 442800 - DNA, 30 bp, Artificial Sequence
  Synthetic oligonucleotide
gatatcccgtacgtcgcatcgatcttgtca

SEQ ID NO: 442801 - DNA, 30 bp, Artificial Sequence
  Synthetic oligonucleotide
ttagcctgcctggcaagaatgttcttgtca

SEQ ID NO: 442802 - DNA, 30 bp, Artificial Sequence
  Synthetic oligonucleotide
cagctaaggcccattggggagccgttgtca

SEQ ID NO: 442803 - DNA, 30 bp, Artificial Sequence
  Synthetic oligonucleotide
ggtttgattttgggtgtggactggttgtca

SEQ ID NO: 442804 - DNA, 30 bp, Artificial Sequence
  Synthetic oligonucleotide
gtacgcggctataggaaaggctatttgtca

SEQ ID NO: 442805 - DNA, 30 bp, Artificial Sequence
  Synthetic oligonucleotide
tgcttataggggggaccgtcctgtttgtca

SEQ ID NO: 442806 - DNA, 30 bp, Artificial Sequence
  Synthetic oligonucleotide
tttacgccgctaggaagggtcaaaaattca

SEQ ID NO: 442807 - DNA, 30 bp, Artificial Sequence
  Synthetic oligonucleotide
tgttcgcgaactagttcttcaagaaattca

SEQ ID NO: 442808 - DNA, 30 bp, Artificial Sequence
  Synthetic oligonucleotide
acgtgccaacagcggcgttttacgaattca

SEQ ID NO: 442809 - DNA, 30 bp, Artificial Sequence
  Synthetic oligonucleotide
ggccttagcaccccgctttactcgaattca

SEQ ID NO: 442810 - DNA, 30 bp, Artificial Sequence
  Synthetic oligonucleotide
cctcagccgcaagaatagctaagtaattca

SEQ ID NO: 442811 - DNA, 30 bp, Artificial Sequence
  Synthetic oligonucleotide
taagctaagctaggccttttatgtaattca

SEQ ID NO: 442812 - DNA, 30 bp, Artificial Sequence
  Synthetic oligonucleotide
ttatgggtacttgcatcaagatttaattca

SEQ ID NO: 442813 - DNA, 30 bp, Artificial Sequence
  Synthetic oligonucleotide
cacccggtgacctgtttacccgtacattca

SEQ ID NO: 442814 - DNA, 30 bp, Artificial Sequence
  Synthetic oligonucleotide
gagtagtgtggaggtaagccaccccattca

SEQ ID NO: 442815 - DNA, 30 bp, Artificial Sequence
  Synthetic oligonucleotide
gattagtagcatgaaatatggaagcattca

SEQ ID NO: 442816 - DNA, 30 bp, Artificial Sequence
  Synthetic oligonucleotide
gtccggggtgcaattgcagcggcgcattca

SEQ ID NO: 442817 - DNA, 30 bp, Artificial Sequence
  Synthetic oligonucleotide
tcatacggggactgaaaaaaatgtcattca

SEQ ID NO: 442818 - DNA, 30 bp, Artificial Sequence
  Synthetic oligonucleotide
tgcaattgccacgtgcaggcaattcattca

SEQ ID NO: 442819 - DNA, 29 bp, Artificial Sequence
  Synthetic oligonucleotide
taaacccattgtcgaaggatgttcattca

SEQ ID NO: 442820 - DNA, 30 bp, Artificial Sequence
  Synthetic oligonucleotide
cacagagccttccgttatacgcgagattca

SEQ ID NO: 442821 - DNA, 30 bp, Artificial Sequence
  Synthetic oligonucleotide
atcggccctgtgcaggactttgtagattca

SEQ ID NO: 442822 - DNA, 30 bp, Artificial Sequence
  Synthetic oligonucleotide
tgttctaggatacccacgattgcggattca

SEQ ID NO: 442823 - DNA, 30 bp, Artificial Sequence
  Synthetic oligonucleotide
gggatatactggaagttctcatgggattca

SEQ ID NO: 442824 - DNA, 30 bp, Artificial Sequence
  Synthetic oligonucleotide
gaaacggcaccgaacttgttttatgattca

SEQ ID NO: 442825 - DNA, 30 bp, Artificial Sequence
  Synthetic oligonucleotide
ttgtagtaagccgcaaaatgcacatattca

SEQ ID NO: 442826 - DNA, 30 bp, Artificial Sequence
  Synthetic oligonucleotide
ctggttcgagtttcaagcatactatattca

SEQ ID NO: 442827 - DNA, 29 bp, Artificial Sequence
  Synthetic oligonucleotide
aaaaatgtggtcgatctgcgttatattca

SEQ ID NO: 442828 - DNA, 30 bp, Artificial Sequence
  Synthetic oligonucleotide
tgggccatgtatatcccacaggtctattca

SEQ ID NO: 442829 - DNA, 30 bp, Artificial Sequence
  Synthetic oligonucleotide
caattttctacgggctcgtcaacgtattca

SEQ ID NO: 442830 - DNA, 30 bp, Artificial Sequence
  Synthetic oligonucleotide
ccttcaccaccataattaggtgtttattca

SEQ ID NO: 442831 - DNA, 30 bp, Artificial Sequence
  Synthetic oligonucleotide
tatatactcagctcataagcacacacttca

SEQ ID NO: 442832 - DNA, 30 bp, Artificial Sequence
  Synthetic oligonucleotide
agcgagtagttcatcctgacgtgcacttca

SEQ ID NO: 442833 - DNA, 30 bp, Artificial Sequence
  Synthetic oligonucleotide
ttattatctattacatacctcgatacttca

SEQ ID NO: 442834 - DNA, 30 bp, Artificial Sequence
  Synthetic oligonucleotide
ttagggttctcgtccagcggatctccttca

SEQ ID NO: 442835 - DNA, 30 bp, Artificial Sequence
  Synthetic oligonucleotide
ctgctatattcgtatatacagtacgcttca

SEQ ID NO: 442836 - DNA, 30 bp, Artificial Sequence
  Synthetic oligonucleotide
cgaatggatattttgggatcatccgcttca

SEQ ID NO: 442837 - DNA, 30 bp, Artificial Sequence
  Synthetic oligonucleotide
tcccgcttggcttagccagttttggcttca

SEQ ID NO: 442838 - DNA, 30 bp, Artificial Sequence
  Synthetic oligonucleotide
cccggccgaatcacgcggcctcaatcttca

SEQ ID NO: 442839 - DNA, 30 bp, Artificial Sequence
  Synthetic oligonucleotide
aaggcacggggcgctcccagcgcatcttca

SEQ ID NO: 442840 - DNA, 30 bp, Artificial Sequence
  Synthetic oligonucleotide
gtgattaagggcgcttatgaatgatcttca

SEQ ID NO: 442841 - DNA, 30 bp, Artificial Sequence
  Synthetic oligonucleotide
atacgttttaggttgggtcaactctcttca

SEQ ID NO: 442842 - DNA, 30 bp, Artificial Sequence
  Synthetic oligonucleotide
tcgctagttagctcggtgcatgagtcttca

SEQ ID NO: 442843 - DNA, 30 bp, Artificial Sequence
  Synthetic oligonucleotide
aagaatccggggtgtcgagacgcgtcttca

SEQ ID NO: 442844 - DNA, 30 bp, Artificial Sequence
  Synthetic oligonucleotide
aggctgtaatcgcaggagagtccttcttca

SEQ ID NO: 442845 - DNA, 30 bp, Artificial Sequence
  Synthetic oligonucleotide
catatcgagtaggtgcacccagtttcttca

SEQ ID NO: 442846 - DNA, 30 bp, Artificial Sequence
  Synthetic oligonucleotide
gttttagatatctgttataatgtttcttca

SEQ ID NO: 442847 - DNA, 30 bp, Artificial Sequence
  Synthetic oligonucleotide
tggtattgaattacttgccgctgcagttca

SEQ ID NO: 442848 - DNA, 30 bp, Artificial Sequence
  Synthetic oligonucleotide
taaactataaacgatacggtaacgagttca

SEQ ID NO: 442849 - DNA, 30 bp, Artificial Sequence
  Synthetic oligonucleotide
tatgtgactataaggtcaattgggagttca

SEQ ID NO: 442850 - DNA, 30 bp, Artificial Sequence
  Synthetic oligonucleotide
ttataattcggccaatgggggttgagttca

SEQ ID NO: 442851 - DNA, 30 bp, Artificial Sequence
  Synthetic oligonucleotide
atgaagcttgaacaccaggtttgtagttca

SEQ ID NO: 442852 - DNA, 30 bp, Artificial Sequence
  Synthetic oligonucleotide
attcggacgcatccagagtcggttagttca

SEQ ID NO: 442853 - DNA, 30 bp, Artificial Sequence
  Synthetic oligonucleotide
atttaattaggattttatcgtatacgttca

SEQ ID NO: 442854 - DNA, 30 bp, Artificial Sequence
  Synthetic oligonucleotide
aatcccgcttagtcatatagtaagcgttca

SEQ ID NO: 442855 - DNA, 30 bp, Artificial Sequence
  Synthetic oligonucleotide
aattgtacttgagcggttcgagatcgttca

SEQ ID NO: 442856 - DNA, 30 bp, Artificial Sequence
  Synthetic oligonucleotide
ctaccctctagtaggctctagtatcgttca

SEQ ID NO: 442857 - DNA, 30 bp, Artificial Sequence
  Synthetic oligonucleotide
aaattagttctctcttggtccataggttca

SEQ ID NO: 442858 - DNA, 30 bp, Artificial Sequence
  Synthetic oligonucleotide
ctggctgcatgttacacaagtcacggttca

SEQ ID NO: 442859 - DNA, 30 bp, Artificial Sequence
  Synthetic oligonucleotide
ccctgttacgctgcccgttaatgcggttca

SEQ ID NO: 442860 - DNA, 30 bp, Artificial Sequence
  Synthetic oligonucleotide
atgtattcgattctcttctcactgggttca

SEQ ID NO: 442861 - DNA, 30 bp, Artificial Sequence
  Synthetic oligonucleotide
ggagtaacggatgtatgactgaaatgttca

SEQ ID NO: 442862 - DNA, 30 bp, Artificial Sequence
  Synthetic oligonucleotide
agaaacggaaaccgcggctgcacatgttca

SEQ ID NO: 442863 - DNA, 30 bp, Artificial Sequence
  Synthetic oligonucleotide
ttgggggatgcagaatctttgacatgttca

SEQ ID NO: 442864 - DNA, 30 bp, Artificial Sequence
  Synthetic oligonucleotide
aataacgtgcggacatttgtcccatgttca

SEQ ID NO: 442865 - DNA, 30 bp, Artificial Sequence
  Synthetic oligonucleotide
aatgtcctgacagtagatagaagatgttca

SEQ ID NO: 442866 - DNA, 30 bp, Artificial Sequence
  Synthetic oligonucleotide
gcgtgttttacaattacacagagatgttca

SEQ ID NO: 442867 - DNA, 30 bp, Artificial Sequence
  Synthetic oligonucleotide
taggtccgtttaggctgttatacgtgttca

SEQ ID NO: 442868 - DNA, 30 bp, Artificial Sequence
  Synthetic oligonucleotide
tgctcgcgcacgtgccgtagctcgtgttca

SEQ ID NO: 442869 - DNA, 30 bp, Artificial Sequence
  Synthetic oligonucleotide
gtctagtcaagtactatggctcggtgttca

SEQ ID NO: 442870 - DNA, 30 bp, Artificial Sequence
  Synthetic oligonucleotide
actccaaaaaagggtatgtttgggtgttca

SEQ ID NO: 442871 - DNA, 30 bp, Artificial Sequence
  Synthetic oligonucleotide
acgttacatgcccacccacccggttgttca

SEQ ID NO: 442872 - DNA, 30 bp, Artificial Sequence
  Synthetic oligonucleotide
aaaagatgtaacaatgacctattttgttca

SEQ ID NO: 442873 - DNA, 30 bp, Artificial Sequence
  Synthetic oligonucleotide
gcaatgggcccaaaagtgttgttaatttca

SEQ ID NO: 442874 - DNA, 30 bp, Artificial Sequence
  Synthetic oligonucleotide
atcagggaaaagtcaggtcacgacatttca

SEQ ID NO: 442875 - DNA, 30 bp, Artificial Sequence
  Synthetic oligonucleotide
tgacgggcttgaatacataagtagatttca

SEQ ID NO: 442876 - DNA, 30 bp, Artificial Sequence
  Synthetic oligonucleotide
tgaatacctatcagcattggaatgatttca

SEQ ID NO: 442877 - DNA, 30 bp, Artificial Sequence
  Synthetic oligonucleotide
atcccgcgtaggaccctctgtgctatttca

SEQ ID NO: 442878 - DNA, 30 bp, Artificial Sequence
  Synthetic oligonucleotide
aagcgctgtggtttaggctacagcctttca

SEQ ID NO: 442879 - DNA, 30 bp, Artificial Sequence
  Synthetic oligonucleotide
ctatgctgtcatgggtagccgccgctttca

SEQ ID NO: 442880 - DNA, 30 bp, Artificial Sequence
  Synthetic oligonucleotide
gcaaagtaacggataggagctcggctttca

SEQ ID NO: 442881 - DNA, 30 bp, Artificial Sequence
  Synthetic oligonucleotide
atgtataattctgatggatgagctctttca

SEQ ID NO: 442882 - DNA, 30 bp, Artificial Sequence
  Synthetic oligonucleotide
gaagttggattagggttgtatgctctttca

SEQ ID NO: 442883 - DNA, 30 bp, Artificial Sequence
  Synthetic oligonucleotide
aagcaagtttcttacgaggcgagtctttca

SEQ ID NO: 442884 - DNA, 29 bp, Artificial Sequence
  Synthetic oligonucleotide
atctacggttattgtagccgggagtttca

SEQ ID NO: 442885 - DNA, 30 bp, Artificial Sequence
  Synthetic oligonucleotide
tgcgctccgtttgatgacaaaggggtttca

SEQ ID NO: 442886 - DNA, 30 bp, Artificial Sequence
  Synthetic oligonucleotide
gcactacatactttcagcgaaggtgtttca

SEQ ID NO: 442887 - DNA, 30 bp, Artificial Sequence
  Synthetic oligonucleotide
gcgtttctggaaccgcgctatattgtttca

SEQ ID NO: 442888 - DNA, 29 bp, Artificial Sequence
  Synthetic oligonucleotide
ccgacaagcgttaacttgcgtttgtttca

SEQ ID NO: 442889 - DNA, 30 bp, Artificial Sequence
  Synthetic oligonucleotide
gttgaagattcctaggcttctgcattttca

SEQ ID NO: 442890 - DNA, 30 bp, Artificial Sequence
  Synthetic oligonucleotide
cgaggtggtcctccttgccgtatattttca

SEQ ID NO: 442891 - DNA, 30 bp, Artificial Sequence
  Synthetic oligonucleotide
aaagaagtgaatataaattactgcttttca

SEQ ID NO: 442892 - DNA, 30 bp, Artificial Sequence
  Synthetic oligonucleotide
tcatagttatgagattaataaatcttttca

SEQ ID NO: 442893 - DNA, 30 bp, Artificial Sequence
  Synthetic oligonucleotide
ggtgtcgcatagtcttactctatgttttca

SEQ ID NO: 442894 - DNA, 30 bp, Artificial Sequence
  Synthetic oligonucleotide
ttttaattctaaaatagaaaggtgttttca

SEQ ID NO: 442895 - DNA, 30 bp, Artificial Sequence
  Synthetic oligonucleotide
aaatatccagcaggttacaatcatttttca

SEQ ID NO: 442896 - DNA, 30 bp, Artificial Sequence
  Synthetic oligonucleotide
cgtagtcgcgttcgtgtaccctatttttca

SEQ ID NO: 442897 - DNA, 30 bp, Artificial Sequence
  Synthetic oligonucleotide
gctgaaagttttatccaatgaggtttttca

SEQ ID NO: 442898 - DNA, 30 bp, Artificial Sequence
  Synthetic oligonucleotide
cgggagaatcctagagtggactgtttttca

SEQ ID NO: 442899 - DNA, 30 bp, Artificial Sequence
  Synthetic oligonucleotide
gggaagattttccgtaatatctgtttttca

SEQ ID NO: 442900 - DNA, 30 bp, Artificial Sequence
  Synthetic oligonucleotide
gagtacggatctgaggagttaattttttca

SEQ ID NO: 442901 - DNA, 30 bp, Artificial Sequence
  Synthetic oligonucleotide
agttattaggactgcttttcacttttttca

SEQ ID NO: 442902 - DNA, 30 bp, Artificial Sequence
  Synthetic oligonucleotide
aatcagttagaaaaaagctcagttttttca

SEQ ID NO: 442903 - DNA, 30 bp, Artificial Sequence
  Synthetic oligonucleotide
ctcccgccgcgtacgccgacaaaaaaaaga

SEQ ID NO: 442904 - DNA, 30 bp, Artificial Sequence
  Synthetic oligonucleotide
tacaataaatcgcgtttggggaaaaaaaga

SEQ ID NO: 442905 - DNA, 30 bp, Artificial Sequence
  Synthetic oligonucleotide
atatacttcttgtactttctctcaaaaaga

SEQ ID NO: 442906 - DNA, 30 bp, Artificial Sequence
  Synthetic oligonucleotide
ggcctctttcctcgatcccgacgaaaaaga

SEQ ID NO: 442907 - DNA, 30 bp, Artificial Sequence
  Synthetic oligonucleotide
atatctttagcgcctgggtggggaaaaaga

SEQ ID NO: 442908 - DNA, 30 bp, Artificial Sequence
  Synthetic oligonucleotide
tagacttccgataacgcgggtataaaaaga

SEQ ID NO: 442909 - DNA, 30 bp, Artificial Sequence
  Synthetic oligonucleotide
catcccgattccccactttaacacaaaaga

SEQ ID NO: 442910 - DNA, 30 bp, Artificial Sequence
  Synthetic oligonucleotide
ttagaatagcggctctctgcatacaaaaga

SEQ ID NO: 442911 - DNA, 30 bp, Artificial Sequence
  Synthetic oligonucleotide
tcgcaccacgtcttcgtggtgcccaaaaga

SEQ ID NO: 442912 - DNA, 29 bp, Artificial Sequence
  Synthetic oligonucleotide
tttgcggcctactgagcgataagaaaaga

SEQ ID NO: 442913 - DNA, 30 bp, Artificial Sequence
  Synthetic oligonucleotide
ggggtgactgcttgcaggtggcagaaaaga

SEQ ID NO: 442914 - DNA, 30 bp, Artificial Sequence
  Synthetic oligonucleotide
cgcgtccgcattttttgacgagggaaaaga

SEQ ID NO: 442915 - DNA, 30 bp, Artificial Sequence
  Synthetic oligonucleotide
tttttaaaaacggttgatagaagtaaaaga

SEQ ID NO: 442916 - DNA, 30 bp, Artificial Sequence
  Synthetic oligonucleotide
tgtattgggtttagtatggaccaacaaaga

SEQ ID NO: 442917 - DNA, 30 bp, Artificial Sequence
  Synthetic oligonucleotide
tgcattaggaatccgttgcatggacaaaga

SEQ ID NO: 442918 - DNA, 30 bp, Artificial Sequence
  Synthetic oligonucleotide
acatttacatgttttaaccagctacaaaga

SEQ ID NO: 442919 - DNA, 30 bp, Artificial Sequence
  Synthetic oligonucleotide
tctattctgcccaatgcagataggcaaaga

SEQ ID NO: 442920 - DNA, 30 bp, Artificial Sequence
  Synthetic oligonucleotide
tggggaaggtagaggagaaacatgcaaaga

SEQ ID NO: 442921 - DNA, 30 bp, Artificial Sequence
  Synthetic oligonucleotide
tattggttgagccggtagtgtcgtcaaaga

SEQ ID NO: 442922 - DNA, 30 bp, Artificial Sequence
  Synthetic oligonucleotide
gatgatatgcggcgatcacctattcaaaga

SEQ ID NO: 442923 - DNA, 30 bp, Artificial Sequence
  Synthetic oligonucleotide
cttatactgtcgaatgtgatattcgaaaga

SEQ ID NO: 442924 - DNA, 30 bp, Artificial Sequence
  Synthetic oligonucleotide
agcctggttagttgccgtatctaggaaaga

SEQ ID NO: 442925 - DNA, 30 bp, Artificial Sequence
  Synthetic oligonucleotide
tatttcaactgggctcgtgcagcggaaaga

SEQ ID NO: 442926 - DNA, 30 bp, Artificial Sequence
  Synthetic oligonucleotide
ctgattagcatgttagcaaggcgtgaaaga

SEQ ID NO: 442927 - DNA, 30 bp, Artificial Sequence
  Synthetic oligonucleotide
gatttacatcatgggattagctttgaaaga

SEQ ID NO: 442928 - DNA, 30 bp, Artificial Sequence
  Synthetic oligonucleotide
cgacgcagttaagtaaatctcatataaaga

SEQ ID NO: 442929 - DNA, 30 bp, Artificial Sequence
  Synthetic oligonucleotide
ttaaggttgtgatttgtctaggtataaaga

SEQ ID NO: 442930 - DNA, 30 bp, Artificial Sequence
  Synthetic oligonucleotide
ctaccggctcaccaggaagctgtataaaga

SEQ ID NO: 442931 - DNA, 30 bp, Artificial Sequence
  Synthetic oligonucleotide
tgcctttaatgcagatatgtaaactaaaga

SEQ ID NO: 442932 - DNA, 30 bp, Artificial Sequence
  Synthetic oligonucleotide
gttagaatgctgcattaattctggtaaaga

SEQ ID NO: 442933 - DNA, 30 bp, Artificial Sequence
  Synthetic oligonucleotide
tctatagagtagtgtctataaaattaaaga

SEQ ID NO: 442934 - DNA, 30 bp, Artificial Sequence
  Synthetic oligonucleotide
gtagagtatctttagacggatcattaaaga

SEQ ID NO: 442935 - DNA, 30 bp, Artificial Sequence
  Synthetic oligonucleotide
tgttcagattgtgatactgcaggttaaaga

SEQ ID NO: 442936 - DNA, 30 bp, Artificial Sequence
  Synthetic oligonucleotide
atctccgttgaacaggggacttgttaaaga

SEQ ID NO: 442937 - DNA, 30 bp, Artificial Sequence
  Synthetic oligonucleotide
gtcagttgggcagacatcgtcagaacaaga

SEQ ID NO: 442938 - DNA, 30 bp, Artificial Sequence
  Synthetic oligonucleotide
gaatagacgcaattttgatctcgaacaaga

SEQ ID NO: 442939 - DNA, 30 bp, Artificial Sequence
  Synthetic oligonucleotide
aataccacatgctgcctgtcctgcacaaga

SEQ ID NO: 442940 - DNA, 30 bp, Artificial Sequence
  Synthetic oligonucleotide
tagcctgcgtacgctccagtcttcacaaga

SEQ ID NO: 442941 - DNA, 30 bp, Artificial Sequence
  Synthetic oligonucleotide
agacattgggcaggggaagggtggacaaga

SEQ ID NO: 442942 - DNA, 30 bp, Artificial Sequence
  Synthetic oligonucleotide
tatcatacgaacaatgtacatctgacaaga

SEQ ID NO: 442943 - DNA, 30 bp, Artificial Sequence
  Synthetic oligonucleotide
cttcagtaggattattaacttataccaaga

SEQ ID NO: 442944 - DNA, 30 bp, Artificial Sequence
  Synthetic oligonucleotide
tatctgttcatggatacgtcatggccaaga

SEQ ID NO: 442945 - DNA, 30 bp, Artificial Sequence
  Synthetic oligonucleotide
gatgtggcgcttaggttattgtctccaaga

SEQ ID NO: 442946 - DNA, 30 bp, Artificial Sequence
  Synthetic oligonucleotide
tcccgcatagacttgacaatatacgcaaga

SEQ ID NO: 442947 - DNA, 30 bp, Artificial Sequence
  Synthetic oligonucleotide
ggttcgcatggtacggccattctggcaaga

SEQ ID NO: 442948 - DNA, 30 bp, Artificial Sequence
  Synthetic oligonucleotide
aatccgaggcgtgttcgtgaggatgcaaga

SEQ ID NO: 442949 - DNA, 30 bp, Artificial Sequence
  Synthetic oligonucleotide
tatgatgtctcggaattgcattctgcaaga

SEQ ID NO: 442950 - DNA, 30 bp, Artificial Sequence
  Synthetic oligonucleotide
agctcccagtatgttaatgactgatcaaga

SEQ ID NO: 442951 - DNA, 30 bp, Artificial Sequence
  Synthetic oligonucleotide
catcagccttcgtctacccaggcctcaaga

SEQ ID NO: 442952 - DNA, 30 bp, Artificial Sequence
  Synthetic oligonucleotide
gttcatcctggcacatatagccagtcaaga

SEQ ID NO: 442953 - DNA, 30 bp, Artificial Sequence
  Synthetic oligonucleotide
ttctgcaatgaagttaacgtatcgtcaaga

SEQ ID NO: 442954 - DNA, 30 bp, Artificial Sequence
  Synthetic oligonucleotide
taacgtccatttgttgcgctcgcaagaaga

SEQ ID NO: 442955 - DNA, 31 bp, Artificial Sequence
  Synthetic oligonucleotide
gttccttccatgatttgtgacgctaagaaga

SEQ ID NO: 442956 - DNA, 30 bp, Artificial Sequence
  Synthetic oligonucleotide
gaggcgtatatatgctaacgcaacagaaga

SEQ ID NO: 442957 - DNA, 30 bp, Artificial Sequence
  Synthetic oligonucleotide
taggtattggagggtagcgaacgcagaaga

SEQ ID NO: 442958 - DNA, 30 bp, Artificial Sequence
  Synthetic oligonucleotide
cttcctgtttcagagtaagatcggagaaga

SEQ ID NO: 442959 - DNA, 30 bp, Artificial Sequence
  Synthetic oligonucleotide
gtacgacggtacatccgaagatggagaaga

SEQ ID NO: 442960 - DNA, 30 bp, Artificial Sequence
  Synthetic oligonucleotide
gattatactactatcatttttatgagaaga

SEQ ID NO: 442961 - DNA, 30 bp, Artificial Sequence
  Synthetic oligonucleotide
tgttgtagacgtaaaagctctactagaaga

SEQ ID NO: 442962 - DNA, 30 bp, Artificial Sequence
  Synthetic oligonucleotide
ttcctttgatgtggaaaagcgtgtagaaga

SEQ ID NO: 442963 - DNA, 30 bp, Artificial Sequence
  Synthetic oligonucleotide
ctcttggacgtggaagtctgcacacgaaga

SEQ ID NO: 442964 - DNA, 30 bp, Artificial Sequence
  Synthetic oligonucleotide
gtatgttggtatggtagtctctcacgaaga

SEQ ID NO: 442965 - DNA, 31 bp, Artificial Sequence
  Synthetic oligonucleotide
ccgcagtttctagcttctgaatgaccgaaga

SEQ ID NO: 442966 - DNA, 30 bp, Artificial Sequence
  Synthetic oligonucleotide
tccgcgccattcattgttcatgaccgaaga

SEQ ID NO: 442967 - DNA, 30 bp, Artificial Sequence
  Synthetic oligonucleotide
tgttgcatagccaagggcgtttcccgaaga

SEQ ID NO: 442968 - DNA, 30 bp, Artificial Sequence
  Synthetic oligonucleotide
agcgtccttaagagctcgactcgccgaaga

SEQ ID NO: 442969 - DNA, 30 bp, Artificial Sequence
  Synthetic oligonucleotide
tgagtaaattggtgtgttggcacaggaaga

SEQ ID NO: 442970 - DNA, 30 bp, Artificial Sequence
  Synthetic oligonucleotide
cttggcatccgcgatgaggatgtgggaaga

SEQ ID NO: 442971 - DNA, 30 bp, Artificial Sequence
  Synthetic oligonucleotide
aggtctttaagggtctcatggactggaaga

SEQ ID NO: 442972 - DNA, 30 bp, Artificial Sequence
  Synthetic oligonucleotide
attcatatagctttgggatcttctggaaga

SEQ ID NO: 442973 - DNA, 30 bp, Artificial Sequence
  Synthetic oligonucleotide
atttggtaatacgcgtgggggtcgtgaaga

SEQ ID NO: 442974 - DNA, 30 bp, Artificial Sequence
  Synthetic oligonucleotide
tcacacacggtcgaccgcaagttgtgaaga

SEQ ID NO: 442975 - DNA, 30 bp, Artificial Sequence
  Synthetic oligonucleotide
cttagcgcacaatcgggtagagtttgaaga

SEQ ID NO: 442976 - DNA, 30 bp, Artificial Sequence
  Synthetic oligonucleotide
gtcgcgcttcgctaagcgtctacaataaga

SEQ ID NO: 442977 - DNA, 30 bp, Artificial Sequence
  Synthetic oligonucleotide
actgctaagtctggacattatcgaataaga

SEQ ID NO: 442978 - DNA, 30 bp, Artificial Sequence
  Synthetic oligonucleotide
aatagaatccaggcaaagcgcggaataaga

SEQ ID NO: 442979 - DNA, 30 bp, Artificial Sequence
  Synthetic oligonucleotide
atggtggacagcttacctagtctaataaga

SEQ ID NO: 442980 - DNA, 30 bp, Artificial Sequence
  Synthetic oligonucleotide
gatcttgtccttttaggtatgtacataaga

SEQ ID NO: 442981 - DNA, 30 bp, Artificial Sequence
  Synthetic oligonucleotide
tagtggctgacgtgacgtggctccataaga

SEQ ID NO: 442982 - DNA, 30 bp, Artificial Sequence
  Synthetic oligonucleotide
aatggtcctttgctccaggagcagataaga

SEQ ID NO: 442983 - DNA, 30 bp, Artificial Sequence
  Synthetic oligonucleotide
aattactcgtagggttcttggatgataaga

SEQ ID NO: 442984 - DNA, 30 bp, Artificial Sequence
  Synthetic oligonucleotide
ggcttgattaaggtcgcacttctgataaga

SEQ ID NO: 442985 - DNA, 30 bp, Artificial Sequence
  Synthetic oligonucleotide
caaaaattaaatgtcacttaacatataaga

SEQ ID NO: 442986 - DNA, 30 bp, Artificial Sequence
  Synthetic oligonucleotide
tcttgcgaggagttagtttagcatataaga

SEQ ID NO: 442987 - DNA, 30 bp, Artificial Sequence
  Synthetic oligonucleotide
aggtaataactttgtgataactatataaga

SEQ ID NO: 442988 - DNA, 30 bp, Artificial Sequence
  Synthetic oligonucleotide
aattgcactgcggtcgcttcaaacctaaga

SEQ ID NO: 442989 - DNA, 30 bp, Artificial Sequence
  Synthetic oligonucleotide
ccactgtatttcactattaggctcctaaga

SEQ ID NO: 442990 - DNA, 30 bp, Artificial Sequence
  Synthetic oligonucleotide
gtatccctcatacattgccggcagctaaga

SEQ ID NO: 442991 - DNA, 30 bp, Artificial Sequence
  Synthetic oligonucleotide
tgcggtggtgcccggatatggtctctaaga

SEQ ID NO: 442992 - DNA, 30 bp, Artificial Sequence
  Synthetic oligonucleotide
gggggaccataccatagtttctgagtaaga

SEQ ID NO: 442993 - DNA, 30 bp, Artificial Sequence
  Synthetic oligonucleotide
tacgggttccgggggtcggggggggtaaga

SEQ ID NO: 442994 - DNA, 30 bp, Artificial Sequence
  Synthetic oligonucleotide
agctcgttgattagtcgcatcttggtaaga

SEQ ID NO: 442995 - DNA, 30 bp, Artificial Sequence
  Synthetic oligonucleotide
ccggctttttgacgcgaattcaatgtaaga

SEQ ID NO: 442996 - DNA, 30 bp, Artificial Sequence
  Synthetic oligonucleotide
agatgagggttccagaaaccgtcattaaga

SEQ ID NO: 442997 - DNA, 30 bp, Artificial Sequence
  Synthetic oligonucleotide
taagccttgagaacttccttgagattaaga

SEQ ID NO: 442998 - DNA, 30 bp, Artificial Sequence
  Synthetic oligonucleotide
tccttaagtgtatacactgtttgattaaga

SEQ ID NO: 442999 - DNA, 30 bp, Artificial Sequence
  Synthetic oligonucleotide
aacaggttaaaatgacatgtcatattaaga

SEQ ID NO: 443000 - DNA, 30 bp, Artificial Sequence
  Synthetic oligonucleotide
gttccgcggaaacgcctagtccgcttaaga

SEQ ID NO: 443001 - DNA, 30 bp, Artificial Sequence
  Synthetic oligonucleotide
tcggtatttactcgaggtcagggcttaaga

SEQ ID NO: 443002 - DNA, 30 bp, Artificial Sequence
  Synthetic oligonucleotide
tatcgaatacattaatagtatgggttaaga

SEQ ID NO: 443003 - DNA, 30 bp, Artificial Sequence
  Synthetic oligonucleotide
gttatgttggtataccagacttggttaaga

SEQ ID NO: 443004 - DNA, 30 bp, Artificial Sequence
  Synthetic oligonucleotide
tttgaataaacacaaccatgtgatttaaga

SEQ ID NO: 443005 - DNA, 30 bp, Artificial Sequence
  Synthetic oligonucleotide
acctgacttatatatctatataaaaacaga

SEQ ID NO: 443006 - DNA, 30 bp, Artificial Sequence
  Synthetic oligonucleotide
gtgcctgagtcgtcagccccatccaacaga

SEQ ID NO: 443007 - DNA, 30 bp, Artificial Sequence
  Synthetic oligonucleotide
atgaggtcaatggcgttcagaggcaacaga

SEQ ID NO: 443008 - DNA, 30 bp, Artificial Sequence
  Synthetic oligonucleotide
gatagaaggtcttgttctagacttaacaga

SEQ ID NO: 443009 - DNA, 30 bp, Artificial Sequence
  Synthetic oligonucleotide
aaagaaggcttgtgtccacgcagacacaga

SEQ ID NO: 443010 - DNA, 30 bp, Artificial Sequence
  Synthetic oligonucleotide
tcccacaatcttttcggcgcgtgacacaga

SEQ ID NO: 443011 - DNA, 30 bp, Artificial Sequence
  Synthetic oligonucleotide
gaccttcgtttttgcggcctggtacacaga

SEQ ID NO: 443012 - DNA, 30 bp, Artificial Sequence
  Synthetic oligonucleotide
aaaagctgctatgagttgagtccgcacaga

SEQ ID NO: 443013 - DNA, 30 bp, Artificial Sequence
  Synthetic oligonucleotide
catagggaccgcagaatacggtatcacaga

SEQ ID NO: 443014 - DNA, 30 bp, Artificial Sequence
  Synthetic oligonucleotide
tcgacccttgggtttagctacgcagacaga

SEQ ID NO: 443015 - DNA, 30 bp, Artificial Sequence
  Synthetic oligonucleotide
ccgtatgtcgatatgctgcgcagagacaga

SEQ ID NO: 443016 - DNA, 30 bp, Artificial Sequence
  Synthetic oligonucleotide
ggtctgtagagtcttttcgacctagacaga

SEQ ID NO: 443017 - DNA, 30 bp, Artificial Sequence
  Synthetic oligonucleotide
cattgtgttactcgtttatgggtcgacaga

SEQ ID NO: 443018 - DNA, 30 bp, Artificial Sequence
  Synthetic oligonucleotide
acttgatgctcaatgagaaacttcgacaga

SEQ ID NO: 443019 - DNA, 30 bp, Artificial Sequence
  Synthetic oligonucleotide
atcgcctttgggtcacagcattaatacaga

SEQ ID NO: 443020 - DNA, 30 bp, Artificial Sequence
  Synthetic oligonucleotide
ctgaacttgggatgtcaaattcactacaga

SEQ ID NO: 443021 - DNA, 30 bp, Artificial Sequence
  Synthetic oligonucleotide
cctaaaaggtggttagccgcagcctacaga

SEQ ID NO: 443022 - DNA, 30 bp, Artificial Sequence
  Synthetic oligonucleotide
tcaagtagcccataaggcacggtgtacaga

SEQ ID NO: 443023 - DNA, 30 bp, Artificial Sequence
  Synthetic oligonucleotide
ccgctggatatgcgcgttctgaattacaga

SEQ ID NO: 443024 - DNA, 30 bp, Artificial Sequence
  Synthetic oligonucleotide
tagcactttttttgatggccgtcttacaga

SEQ ID NO: 443025 - DNA, 30 bp, Artificial Sequence
  Synthetic oligonucleotide
gggccttctttagttctggctccgaccaga

SEQ ID NO: 443026 - DNA, 30 bp, Artificial Sequence
  Synthetic oligonucleotide
acagagagcaggctagagcgggcgaccaga

SEQ ID NO: 443027 - DNA, 30 bp, Artificial Sequence
  Synthetic oligonucleotide
tgatacatgactcgagccttgtcgaccaga

SEQ ID NO: 443028 - DNA, 30 bp, Artificial Sequence
  Synthetic oligonucleotide
gagtgagcctttaaagcataacaacccaga

SEQ ID NO: 443029 - DNA, 30 bp, Artificial Sequence
  Synthetic oligonucleotide
ctttaactcggttctaggggccgacccaga

SEQ ID NO: 443030 - DNA, 30 bp, Artificial Sequence
  Synthetic oligonucleotide
actctctgggtccttctacaagaccccaga

SEQ ID NO: 443031 - DNA, 30 bp, Artificial Sequence
  Synthetic oligonucleotide
gtttgcgtgttcgtctgcggaagccccaga

SEQ ID NO: 443032 - DNA, 30 bp, Artificial Sequence
  Synthetic oligonucleotide
ccgttattattcggtccgaattgctccaga

SEQ ID NO: 443033 - DNA, 30 bp, Artificial Sequence
  Synthetic oligonucleotide
cacacttccctgaagggtaagatgtccaga

SEQ ID NO: 443034 - DNA, 30 bp, Artificial Sequence
  Synthetic oligonucleotide
aatctaattacgagtggttcattgtccaga

SEQ ID NO: 443035 - DNA, 30 bp, Artificial Sequence
  Synthetic oligonucleotide
agagcctaccgtttgcagcgtgcaagcaga

SEQ ID NO: 443036 - DNA, 30 bp, Artificial Sequence
  Synthetic oligonucleotide
ggattcatgctacactaacgcaccagcaga

SEQ ID NO: 443037 - DNA, 30 bp, Artificial Sequence
  Synthetic oligonucleotide
gatgtaaactcatgcaggtttaccagcaga

SEQ ID NO: 443038 - DNA, 30 bp, Artificial Sequence
  Synthetic oligonucleotide
gcagcgtctggagtacgtaaacagagcaga

SEQ ID NO: 443039 - DNA, 30 bp, Artificial Sequence
  Synthetic oligonucleotide
agacttcgctggaaacgtatcaatagcaga

SEQ ID NO: 443040 - DNA, 30 bp, Artificial Sequence
  Synthetic oligonucleotide
gtagtatttgcgcgtgaaccgtcccgcaga

SEQ ID NO: 443041 - DNA, 30 bp, Artificial Sequence
  Synthetic oligonucleotide
agacgtggatcttggtttgaaaagcgcaga

SEQ ID NO: 443042 - DNA, 30 bp, Artificial Sequence
  Synthetic oligonucleotide
agtggtacagatgcaaatcatccgcgcaga

SEQ ID NO: 443043 - DNA, 30 bp, Artificial Sequence
  Synthetic oligonucleotide
gagccagctctaaagaaaatttggcgcaga

SEQ ID NO: 443044 - DNA, 30 bp, Artificial Sequence
  Synthetic oligonucleotide
gaaaaaactcccgggtatatctgcggcaga

SEQ ID NO: 443045 - DNA, 30 bp, Artificial Sequence
  Synthetic oligonucleotide
ggatcgcaaaactgcaatgagcagggcaga

SEQ ID NO: 443046 - DNA, 30 bp, Artificial Sequence
  Synthetic oligonucleotide
gggagtcgctcaagtacttttggtggcaga

SEQ ID NO: 443047 - DNA, 30 bp, Artificial Sequence
  Synthetic oligonucleotide
gagtcttgaaatttagggtgttactgcaga

SEQ ID NO: 443048 - DNA, 30 bp, Artificial Sequence
  Synthetic oligonucleotide
aactgcgatgcttcaggccattcctgcaga

SEQ ID NO: 443049 - DNA, 30 bp, Artificial Sequence
  Synthetic oligonucleotide
ttttgagcaaagtcgctatttatgtgcaga

SEQ ID NO: 443050 - DNA, 30 bp, Artificial Sequence
  Synthetic oligonucleotide
atcacagctacgacatcgacgtattgcaga

SEQ ID NO: 443051 - DNA, 30 bp, Artificial Sequence
  Synthetic oligonucleotide
ccgacgttagagtgtctatttttgatcaga

SEQ ID NO: 443052 - DNA, 30 bp, Artificial Sequence
  Synthetic oligonucleotide
tgttgacgaaggaccgtgatgtctatcaga

SEQ ID NO: 443053 - DNA, 30 bp, Artificial Sequence
  Synthetic oligonucleotide
aagaaccggcaccggaatttttgcctcaga

SEQ ID NO: 443054 - DNA, 30 bp, Artificial Sequence
  Synthetic oligonucleotide
gagtgccggtcaggaacggttgctctcaga

SEQ ID NO: 443055 - DNA, 30 bp, Artificial Sequence
  Synthetic oligonucleotide
ccgctttctacggttacggtgattctcaga

SEQ ID NO: 443056 - DNA, 30 bp, Artificial Sequence
  Synthetic oligonucleotide
aatcgtctagcatctgtggaagtagtcaga

SEQ ID NO: 443057 - DNA, 30 bp, Artificial Sequence
  Synthetic oligonucleotide
tccatctaggtcccctgtctacacgtcaga

SEQ ID NO: 443058 - DNA, 30 bp, Artificial Sequence
  Synthetic oligonucleotide
aacgcgttttagttgacttgtacggtcaga

SEQ ID NO: 443059 - DNA, 30 bp, Artificial Sequence
  Synthetic oligonucleotide
tgtatttgcgtacgagaacacgttgtcaga

SEQ ID NO: 443060 - DNA, 30 bp, Artificial Sequence
  Synthetic oligonucleotide
tgagtgctatcatgatgcgccgtattcaga

SEQ ID NO: 443061 - DNA, 30 bp, Artificial Sequence
  Synthetic oligonucleotide
ggtctcactgggaattctttctgcttcaga

SEQ ID NO: 443062 - DNA, 30 bp, Artificial Sequence
  Synthetic oligonucleotide
attgccagcagggtaattggggtcttcaga

SEQ ID NO: 443063 - DNA, 30 bp, Artificial Sequence
  Synthetic oligonucleotide
cgcagcagatataaagcccctaagttcaga

SEQ ID NO: 443064 - DNA, 30 bp, Artificial Sequence
  Synthetic oligonucleotide
atttatagacagggggcataacggttcaga

SEQ ID NO: 443065 - DNA, 30 bp, Artificial Sequence
  Synthetic oligonucleotide
gtggattgtaatttcattactatgttcaga

SEQ ID NO: 443066 - DNA, 30 bp, Artificial Sequence
  Synthetic oligonucleotide
accccccgagctatacgggttgtgttcaga

SEQ ID NO: 443067 - DNA, 30 bp, Artificial Sequence
  Synthetic oligonucleotide
ggaatctatgacgtgttagggttgttcaga

SEQ ID NO: 443068 - DNA, 30 bp, Artificial Sequence
  Synthetic oligonucleotide
ttctttatgaatgaggactggaatttcaga

SEQ ID NO: 443069 - DNA, 30 bp, Artificial Sequence
  Synthetic oligonucleotide
gggatggttctggcgttctctcaaaagaga

SEQ ID NO: 443070 - DNA, 30 bp, Artificial Sequence
  Synthetic oligonucleotide
tccagacggtgacgatacacagtaaagaga

SEQ ID NO: 443071 - DNA, 30 bp, Artificial Sequence
  Synthetic oligonucleotide
tatacatgcacctggtaacgccggaagaga

SEQ ID NO: 443072 - DNA, 30 bp, Artificial Sequence
  Synthetic oligonucleotide
atttagcttgatctattcggctgtaagaga

SEQ ID NO: 443073 - DNA, 30 bp, Artificial Sequence
  Synthetic oligonucleotide
gcgcttagctggcacggacaatttaagaga

SEQ ID NO: 443074 - DNA, 30 bp, Artificial Sequence
  Synthetic oligonucleotide
cggctgcctctgagcagtctgtaccagaga

SEQ ID NO: 443075 - DNA, 30 bp, Artificial Sequence
  Synthetic oligonucleotide
tacgttcttttgtatgacttgagtcagaga

SEQ ID NO: 443076 - DNA, 30 bp, Artificial Sequence
  Synthetic oligonucleotide
accagcatggcggttgctcactttcagaga

SEQ ID NO: 443077 - DNA, 30 bp, Artificial Sequence
  Synthetic oligonucleotide
agaaccggtctctgatagcgttttcagaga

SEQ ID NO: 443078 - DNA, 30 bp, Artificial Sequence
  Synthetic oligonucleotide
gaattggcttagaagttggacaacgagaga

SEQ ID NO: 443079 - DNA, 30 bp, Artificial Sequence
  Synthetic oligonucleotide
atatcagctaattaagggaaaggcgagaga

SEQ ID NO: 443080 - DNA, 30 bp, Artificial Sequence
  Synthetic oligonucleotide
gtatatctaacaagaaatttagttgagaga

SEQ ID NO: 443081 - DNA, 30 bp, Artificial Sequence
  Synthetic oligonucleotide
gtttgtggtgaggcgatgcaagcatagaga

SEQ ID NO: 443082 - DNA, 30 bp, Artificial Sequence
  Synthetic oligonucleotide
gagcaacgaatattttcgtagggctagaga

SEQ ID NO: 443083 - DNA, 30 bp, Artificial Sequence
  Synthetic oligonucleotide
cacaagtttgctagccttttcgggtagaga

SEQ ID NO: 443084 - DNA, 30 bp, Artificial Sequence
  Synthetic oligonucleotide
gggatcgctttgatctaccgttggtagaga

SEQ ID NO: 443085 - DNA, 30 bp, Artificial Sequence
  Synthetic oligonucleotide
ccggatgctggacaaggtgtagtgtagaga

SEQ ID NO: 443086 - DNA, 30 bp, Artificial Sequence
  Synthetic oligonucleotide
gtaaaggtgctgatgcaccgcgtgtagaga

SEQ ID NO: 443087 - DNA, 30 bp, Artificial Sequence
  Synthetic oligonucleotide
aacctcgtttacataatagcaacaacgaga

SEQ ID NO: 443088 - DNA, 30 bp, Artificial Sequence
  Synthetic oligonucleotide
cacaacaacgagtatggctttccaacgaga

SEQ ID NO: 443089 - DNA, 30 bp, Artificial Sequence
  Synthetic oligonucleotide
agtttcacactcagccatgggtacacgaga

SEQ ID NO: 443090 - DNA, 30 bp, Artificial Sequence
  Synthetic oligonucleotide
ccatcggctggttatacattaagcacgaga

SEQ ID NO: 443091 - DNA, 30 bp, Artificial Sequence
  Synthetic oligonucleotide
gcagctcctatggtgtcacgcgatacgaga

SEQ ID NO: 443092 - DNA, 30 bp, Artificial Sequence
  Synthetic oligonucleotide
tctagatgcagacgttacaaaggcccgaga

SEQ ID NO: 443093 - DNA, 30 bp, Artificial Sequence
  Synthetic oligonucleotide
atatcccgaatcatacacctgatgccgaga

SEQ ID NO: 443094 - DNA, 30 bp, Artificial Sequence
  Synthetic oligonucleotide
attttctagatcgtaaactccgctccgaga

SEQ ID NO: 443095 - DNA, 30 bp, Artificial Sequence
  Synthetic oligonucleotide
tttgggtggtcgactcggagttgtccgaga

SEQ ID NO: 443096 - DNA, 30 bp, Artificial Sequence
  Synthetic oligonucleotide
ttgctatccacttgaccatccggagcgaga

SEQ ID NO: 443097 - DNA, 30 bp, Artificial Sequence
  Synthetic oligonucleotide
cgcttataagagttgtagggactcgcgaga

SEQ ID NO: 443098 - DNA, 30 bp, Artificial Sequence
  Synthetic oligonucleotide
catatatctcgcggtacaatttaatcgaga

SEQ ID NO: 443099 - DNA, 30 bp, Artificial Sequence
  Synthetic oligonucleotide
cgctcgcagtatatcaccgtggcatcgaga

SEQ ID NO: 443100 - DNA, 30 bp, Artificial Sequence
  Synthetic oligonucleotide
gagagacgtacaaacagatatgcatcgaga

SEQ ID NO: 443101 - DNA, 30 bp, Artificial Sequence
  Synthetic oligonucleotide
gaacccttgctgtcttcactgacctcgaga

SEQ ID NO: 443102 - DNA, 27 bp, Artificial Sequence
  Synthetic oligonucleotide
atactgcccacgtatgaggcctcgaga

SEQ ID NO: 443103 - DNA, 30 bp, Artificial Sequence
  Synthetic oligonucleotide
cactccgttctaagctacttttgttcgaga

SEQ ID NO: 443104 - DNA, 30 bp, Artificial Sequence
  Synthetic oligonucleotide
tgggcccaggatcccgggatcgtgaggaga

SEQ ID NO: 443105 - DNA, 30 bp, Artificial Sequence
  Synthetic oligonucleotide
ctcagggccgcaagctacttgcataggaga

SEQ ID NO: 443106 - DNA, 30 bp, Artificial Sequence
  Synthetic oligonucleotide
ctattgtccacagcacccaactttaggaga

SEQ ID NO: 443107 - DNA, 30 bp, Artificial Sequence
  Synthetic oligonucleotide
ttgccatatcaacgatatgacgaacggaga

SEQ ID NO: 443108 - DNA, 30 bp, Artificial Sequence
  Synthetic oligonucleotide
tcataatgacgcgtaattcaataacggaga

SEQ ID NO: 443109 - DNA, 30 bp, Artificial Sequence
  Synthetic oligonucleotide
ggcatatagtctccggtgcgagcccggaga

SEQ ID NO: 443110 - DNA, 30 bp, Artificial Sequence
  Synthetic oligonucleotide
tataaattgagtgaccggacacggcggaga

SEQ ID NO: 443111 - DNA, 30 bp, Artificial Sequence
  Synthetic oligonucleotide
tggcctaaaggccctggtgggggtcggaga

SEQ ID NO: 443112 - DNA, 30 bp, Artificial Sequence
  Synthetic oligonucleotide
gttaatttgatccgtcacgccattcggaga

SEQ ID NO: 443113 - DNA, 30 bp, Artificial Sequence
  Synthetic oligonucleotide
accgcagacaatctccaatcgtgagggaga

SEQ ID NO: 443114 - DNA, 30 bp, Artificial Sequence
  Synthetic oligonucleotide
cccgtttagggcaatactgtattagggaga

SEQ ID NO: 443115 - DNA, 30 bp, Artificial Sequence
  Synthetic oligonucleotide
gctccgcccgagtaaaagtctcccgggaga

SEQ ID NO: 443116 - DNA, 30 bp, Artificial Sequence
  Synthetic oligonucleotide
gcatatacagtttattgctgcgccgggaga

SEQ ID NO: 443117 - DNA, 30 bp, Artificial Sequence
  Synthetic oligonucleotide
gagtttcaacgtcatctcgcgtccgggaga

SEQ ID NO: 443118 - DNA, 31 bp, Artificial Sequence
  Synthetic oligonucleotide
gcctaagcccataggcatgacacgggggaga

SEQ ID NO: 443119 - DNA, 30 bp, Artificial Sequence
  Synthetic oligonucleotide
ctccagatcttacaagtaaatgcatggaga

SEQ ID NO: 443120 - DNA, 30 bp, Artificial Sequence
  Synthetic oligonucleotide
ggtttcctatagtagttcatcgtatggaga

SEQ ID NO: 443121 - DNA, 30 bp, Artificial Sequence
  Synthetic oligonucleotide
gaaaattggcctgcggcttgatcctggaga

SEQ ID NO: 443122 - DNA, 30 bp, Artificial Sequence
  Synthetic oligonucleotide
agagtacctctgattgatgctcgctggaga

SEQ ID NO: 443123 - DNA, 30 bp, Artificial Sequence
  Synthetic oligonucleotide
ttccctctaagataatacgtgtgctggaga

SEQ ID NO: 443124 - DNA, 30 bp, Artificial Sequence
  Synthetic oligonucleotide
taagcagccttttttagttggttctggaga

SEQ ID NO: 443125 - DNA, 30 bp, Artificial Sequence
  Synthetic oligonucleotide
gatttcggcttcccgagatacgcgtggaga

SEQ ID NO: 443126 - DNA, 30 bp, Artificial Sequence
  Synthetic oligonucleotide
ttcagtgcagcgtattcttgcagttggaga

SEQ ID NO: 443127 - DNA, 30 bp, Artificial Sequence
  Synthetic oligonucleotide
tcgactcgggaacaaacaggaaaaatgaga

SEQ ID NO: 443128 - DNA, 30 bp, Artificial Sequence
  Synthetic oligonucleotide
atccaattggcgtccgtactgcgaatgaga

SEQ ID NO: 443129 - DNA, 30 bp, Artificial Sequence
  Synthetic oligonucleotide
gccggtggcacgctcgtctctgacatgaga

SEQ ID NO: 443130 - DNA, 30 bp, Artificial Sequence
  Synthetic oligonucleotide
acgtacgttgagatgatcctttccatgaga

SEQ ID NO: 443131 - DNA, 30 bp, Artificial Sequence
  Synthetic oligonucleotide
gagaccgtttgccctaagctgacgatgaga

SEQ ID NO: 443132 - DNA, 30 bp, Artificial Sequence
  Synthetic oligonucleotide
ttagagagtcggttggaatacccactgaga

SEQ ID NO: 443133 - DNA, 30 bp, Artificial Sequence
  Synthetic oligonucleotide
attctgatcagcagatatgtatacctgaga

SEQ ID NO: 443134 - DNA, 30 bp, Artificial Sequence
  Synthetic oligonucleotide
tcttggcccaatttgttgagggggctgaga

SEQ ID NO: 443135 - DNA, 30 bp, Artificial Sequence
  Synthetic oligonucleotide
tttgactatatacgtgaacggtatctgaga

SEQ ID NO: 443136 - DNA, 30 bp, Artificial Sequence
  Synthetic oligonucleotide
gaccgcatggcaaagagacaaccagtgaga

SEQ ID NO: 443137 - DNA, 30 bp, Artificial Sequence
  Synthetic oligonucleotide
ccaaaaggagctggcggtgggcacgtgaga

SEQ ID NO: 443138 - DNA, 30 bp, Artificial Sequence
  Synthetic oligonucleotide
aactcacctgcaggctttaaatatgtgaga

SEQ ID NO: 443139 - DNA, 30 bp, Artificial Sequence
  Synthetic oligonucleotide
tatattcaataggtatgtgtaattgtgaga

SEQ ID NO: 443140 - DNA, 30 bp, Artificial Sequence
  Synthetic oligonucleotide
gcgtcggtaagtacaggtcccacattgaga

SEQ ID NO: 443141 - DNA, 30 bp, Artificial Sequence
  Synthetic oligonucleotide
atgcatttatttcgatgggtgccattgaga

SEQ ID NO: 443142 - DNA, 30 bp, Artificial Sequence
  Synthetic oligonucleotide
cctcctcaagaggtaaccaggtacttgaga

SEQ ID NO: 443143 - DNA, 30 bp, Artificial Sequence
  Synthetic oligonucleotide
gccgctcacaacactggctcggccttgaga

SEQ ID NO: 443144 - DNA, 30 bp, Artificial Sequence
  Synthetic oligonucleotide
catttatctatatgttttacgttcttgaga

SEQ ID NO: 443145 - DNA, 30 bp, Artificial Sequence
  Synthetic oligonucleotide
tacctcgatgaggggcggctatggttgaga

SEQ ID NO: 443146 - DNA, 30 bp, Artificial Sequence
  Synthetic oligonucleotide
actgtttacaccctcggtaaactgttgaga

SEQ ID NO: 443147 - DNA, 30 bp, Artificial Sequence
  Synthetic oligonucleotide
atgtctagacaatgtcaagtgctgttgaga

SEQ ID NO: 443148 - DNA, 30 bp, Artificial Sequence
  Synthetic oligonucleotide
taggtcggtttttatttagtgtgcaataga

SEQ ID NO: 443149 - DNA, 30 bp, Artificial Sequence
  Synthetic oligonucleotide
atagggtaattcaagttatcacctaataga

SEQ ID NO: 443150 - DNA, 30 bp, Artificial Sequence
  Synthetic oligonucleotide
ggtcatgatcgtctattggagggtaataga

SEQ ID NO: 443151 - DNA, 30 bp, Artificial Sequence
  Synthetic oligonucleotide
aatacttgcttcggaggagaagcccataga

SEQ ID NO: 443152 - DNA, 30 bp, Artificial Sequence
  Synthetic oligonucleotide
aaaagtaccctcgtcgaggtcagtcataga

SEQ ID NO: 443153 - DNA, 30 bp, Artificial Sequence
  Synthetic oligonucleotide
tccgaccctgggcgctagcataaagataga

SEQ ID NO: 443154 - DNA, 30 bp, Artificial Sequence
  Synthetic oligonucleotide
actaactttccggtgtagtgcacagataga

SEQ ID NO: 443155 - DNA, 30 bp, Artificial Sequence
  Synthetic oligonucleotide
gtggtatagttatctttaggcgcagataga

SEQ ID NO: 443156 - DNA, 30 bp, Artificial Sequence
  Synthetic oligonucleotide
ttagcacgatggaacctacacagagataga

SEQ ID NO: 443157 - DNA, 30 bp, Artificial Sequence
  Synthetic oligonucleotide
gccgggaggctcacttggcaacgcgataga

SEQ ID NO: 443158 - DNA, 30 bp, Artificial Sequence
  Synthetic oligonucleotide
tccacattgtgatttagtttttgcgataga

SEQ ID NO: 443159 - DNA, 30 bp, Artificial Sequence
  Synthetic oligonucleotide
taatgttcgggtgtcttataaggtgataga

SEQ ID NO: 443160 - DNA, 30 bp, Artificial Sequence
  Synthetic oligonucleotide
taggcacctctctgaggagcggaatataga

SEQ ID NO: 443161 - DNA, 30 bp, Artificial Sequence
  Synthetic oligonucleotide
gcaaatacgctctactgggttggatataga

SEQ ID NO: 443162 - DNA, 30 bp, Artificial Sequence
  Synthetic oligonucleotide
attttggtgactcacctagcgtgatataga

SEQ ID NO: 443163 - DNA, 30 bp, Artificial Sequence
  Synthetic oligonucleotide
cgccatgaatttgctgctgctgactataga

SEQ ID NO: 443164 - DNA, 28 bp, Artificial Sequence
  Synthetic oligonucleotide
aagataatatacgagttgggcctataga

SEQ ID NO: 443165 - DNA, 30 bp, Artificial Sequence
  Synthetic oligonucleotide
gagtagaccgtcctcccgacacgctataga

SEQ ID NO: 443166 - DNA, 30 bp, Artificial Sequence
  Synthetic oligonucleotide
gcaccttcctcgcgcgatagggtctataga

SEQ ID NO: 443167 - DNA, 30 bp, Artificial Sequence
  Synthetic oligonucleotide
gaacgttacacggcgatcgctcggtataga

SEQ ID NO: 443168 - DNA, 30 bp, Artificial Sequence
  Synthetic oligonucleotide
gtgcttgatgatgatggtccactgtataga

SEQ ID NO: 443169 - DNA, 30 bp, Artificial Sequence
  Synthetic oligonucleotide
aagtacggtgtgatattagaggccactaga

SEQ ID NO: 443170 - DNA, 30 bp, Artificial Sequence
  Synthetic oligonucleotide
gacatatatctcgtatgattcaatactaga

SEQ ID NO: 443171 - DNA, 30 bp, Artificial Sequence
  Synthetic oligonucleotide
gctcacacttatcattatttgtctactaga

SEQ ID NO: 443172 - DNA, 30 bp, Artificial Sequence
  Synthetic oligonucleotide
tatacgttgtgcgtacacttctttactaga

SEQ ID NO: 443173 - DNA, 30 bp, Artificial Sequence
  Synthetic oligonucleotide
gtaccccgatagtgctgattggcacctaga

SEQ ID NO: 443174 - DNA, 30 bp, Artificial Sequence
  Synthetic oligonucleotide
tgatccattacccacccctgaccccctaga

SEQ ID NO: 443175 - DNA, 30 bp, Artificial Sequence
  Synthetic oligonucleotide
aagttcgattacgggttgagtatgcctaga

SEQ ID NO: 443176 - DNA, 30 bp, Artificial Sequence
  Synthetic oligonucleotide
gctaaatgttatactccggttaatcctaga

SEQ ID NO: 443177 - DNA, 30 bp, Artificial Sequence
  Synthetic oligonucleotide
tacagttcctggggagatgagatcgctaga

SEQ ID NO: 443178 - DNA, 30 bp, Artificial Sequence
  Synthetic oligonucleotide
gccggaacaggtcctagttagtctgctaga

SEQ ID NO: 443179 - DNA, 30 bp, Artificial Sequence
  Synthetic oligonucleotide
gctgcgcgactacgcggtatcattgctaga

SEQ ID NO: 443180 - DNA, 30 bp, Artificial Sequence
  Synthetic oligonucleotide
agccatttgtgtaccgcaacctttgctaga

SEQ ID NO: 443181 - DNA, 30 bp, Artificial Sequence
  Synthetic oligonucleotide
tgtctagtacatgggattttcttatctaga

SEQ ID NO: 443182 - DNA, 30 bp, Artificial Sequence
  Synthetic oligonucleotide
tggggtcactaggctctagccgcctctaga

SEQ ID NO: 443183 - DNA, 30 bp, Artificial Sequence
  Synthetic oligonucleotide
ttaccgtcctatcacattatcatctctaga

SEQ ID NO: 443184 - DNA, 30 bp, Artificial Sequence
  Synthetic oligonucleotide
tagttttcagccctaagtggtttctctaga

SEQ ID NO: 443185 - DNA, 30 bp, Artificial Sequence
  Synthetic oligonucleotide
gcatctcgatcgacaaaatcgaattctaga

SEQ ID NO: 443186 - DNA, 30 bp, Artificial Sequence
  Synthetic oligonucleotide
tattaatgtacaagccaggccggttctaga

SEQ ID NO: 443187 - DNA, 30 bp, Artificial Sequence
  Synthetic oligonucleotide
gcagacttcacctagaatcgcgtttctaga

SEQ ID NO: 443188 - DNA, 30 bp, Artificial Sequence
  Synthetic oligonucleotide
aatcggactggaggcatgccatacagtaga

SEQ ID NO: 443189 - DNA, 30 bp, Artificial Sequence
  Synthetic oligonucleotide
aatgtaaacgtgggcacttacttcagtaga

SEQ ID NO: 443190 - DNA, 30 bp, Artificial Sequence
  Synthetic oligonucleotide
gactctaccgtctttccacttgagagtaga

SEQ ID NO: 443191 - DNA, 30 bp, Artificial Sequence
  Synthetic oligonucleotide
aatttggtaacatacagtaaagatagtaga

SEQ ID NO: 443192 - DNA, 30 bp, Artificial Sequence
  Synthetic oligonucleotide
aaaggttttttagacgagggggctagtaga

SEQ ID NO: 443193 - DNA, 30 bp, Artificial Sequence
  Synthetic oligonucleotide
cgcacatttatgcggtccttctaccgtaga

SEQ ID NO: 443194 - DNA, 30 bp, Artificial Sequence
  Synthetic oligonucleotide
acttatttcggaggccagcgttcccgtaga

SEQ ID NO: 443195 - DNA, 30 bp, Artificial Sequence
  Synthetic oligonucleotide
aagcgtcatgtcagtatgaagcgccgtaga

SEQ ID NO: 443196 - DNA, 30 bp, Artificial Sequence
  Synthetic oligonucleotide
tttgtacgccgattcgccgtcaagcgtaga

SEQ ID NO: 443197 - DNA, 30 bp, Artificial Sequence
  Synthetic oligonucleotide
agatagggcgcctgcgggttgacgcgtaga

SEQ ID NO: 443198 - DNA, 30 bp, Artificial Sequence
  Synthetic oligonucleotide
agaaaatttcccgcatcggtattgcgtaga

SEQ ID NO: 443199 - DNA, 30 bp, Artificial Sequence
  Synthetic oligonucleotide
ttcgtcccgggcaccgcccccggaggtaga

SEQ ID NO: 443200 - DNA, 30 bp, Artificial Sequence
  Synthetic oligonucleotide
gggtcggattggtaccccgaactaggtaga

SEQ ID NO: 443201 - DNA, 30 bp, Artificial Sequence
  Synthetic oligonucleotide
atttacctgggtcttattgtctagggtaga

SEQ ID NO: 443202 - DNA, 30 bp, Artificial Sequence
  Synthetic oligonucleotide
tctttgctatgtctcttggtatggggtaga

SEQ ID NO: 443203 - DNA, 30 bp, Artificial Sequence
  Synthetic oligonucleotide
gtattatcgcactccaccgcgcatggtaga

SEQ ID NO: 443204 - DNA, 30 bp, Artificial Sequence
  Synthetic oligonucleotide
cctcttgtcgagcatgtcaggcatggtaga

SEQ ID NO: 443205 - DNA, 27 bp, Artificial Sequence
  Synthetic oligonucleotide
atcgtctcaagtgattcgtcatgtaga

SEQ ID NO: 443206 - DNA, 30 bp, Artificial Sequence
  Synthetic oligonucleotide
cagtttaagctggatgcgacaatctgtaga

SEQ ID NO: 443207 - DNA, 30 bp, Artificial Sequence
  Synthetic oligonucleotide
gtaagggatcgcgttttggctttctgtaga

SEQ ID NO: 443208 - DNA, 30 bp, Artificial Sequence
  Synthetic oligonucleotide
cgctcatacgtctagcctgactagtgtaga

SEQ ID NO: 443209 - DNA, 30 bp, Artificial Sequence
  Synthetic oligonucleotide
tatcttatcataatgctattcttgtgtaga

SEQ ID NO: 443210 - DNA, 30 bp, Artificial Sequence
  Synthetic oligonucleotide
tgccttatcggacgttaaggatgaattaga

SEQ ID NO: 443211 - DNA, 30 bp, Artificial Sequence
  Synthetic oligonucleotide
gaatgtttagaaggtattaggttaattaga

SEQ ID NO: 443212 - DNA, 30 bp, Artificial Sequence
  Synthetic oligonucleotide
ctggaatgggagccgacgatgggcattaga

SEQ ID NO: 443213 - DNA, 30 bp, Artificial Sequence
  Synthetic oligonucleotide
ccgcccttattaaagtcgtgtcagattaga

SEQ ID NO: 443214 - DNA, 30 bp, Artificial Sequence
  Synthetic oligonucleotide
gacggttcttgaatttatgagttgattaga

SEQ ID NO: 443215 - DNA, 30 bp, Artificial Sequence
  Synthetic oligonucleotide
taagtctcctaggccttggtacttattaga

SEQ ID NO: 443216 - DNA, 30 bp, Artificial Sequence
  Synthetic oligonucleotide
aaatttaatccatacatggcctttattaga

SEQ ID NO: 443217 - DNA, 30 bp, Artificial Sequence
  Synthetic oligonucleotide
taaatcgagtggagtttgagttttattaga

SEQ ID NO: 443218 - DNA, 30 bp, Artificial Sequence
  Synthetic oligonucleotide
ctatatgtacagctgtcatctacacttaga

SEQ ID NO: 443219 - DNA, 30 bp, Artificial Sequence
  Synthetic oligonucleotide
tcagatccattgcgcggtcgatgacttaga

SEQ ID NO: 443220 - DNA, 30 bp, Artificial Sequence
  Synthetic oligonucleotide
ctccgcatgatgggtctctaaaaccttaga

SEQ ID NO: 443221 - DNA, 30 bp, Artificial Sequence
  Synthetic oligonucleotide
gcgcatttaagggctaatgtcgcgcttaga

SEQ ID NO: 443222 - DNA, 30 bp, Artificial Sequence
  Synthetic oligonucleotide
tagcttatagaggtcttaaggatgcttaga

SEQ ID NO: 443223 - DNA, 30 bp, Artificial Sequence
  Synthetic oligonucleotide
caagatccgtgtatatattggccggttaga

SEQ ID NO: 443224 - DNA, 30 bp, Artificial Sequence
  Synthetic oligonucleotide
atcagaagagtcgacgcacggcgggttaga

SEQ ID NO: 443225 - DNA, 30 bp, Artificial Sequence
  Synthetic oligonucleotide
gtgctttaactgtagccacgtttggttaga

SEQ ID NO: 443226 - DNA, 30 bp, Artificial Sequence
  Synthetic oligonucleotide
tagagtccgtgatacgccctgcatgttaga

SEQ ID NO: 443227 - DNA, 30 bp, Artificial Sequence
  Synthetic oligonucleotide
aagaggtggccccagctttcttaatttaga

SEQ ID NO: 443228 - DNA, 30 bp, Artificial Sequence
  Synthetic oligonucleotide
gtccggtaggcgcgctcgggccgatttaga

SEQ ID NO: 443229 - DNA, 30 bp, Artificial Sequence
  Synthetic oligonucleotide
tttaacggctggtaaacgtgcgtatttaga

SEQ ID NO: 443230 - DNA, 30 bp, Artificial Sequence
  Synthetic oligonucleotide
gaagagagcaagacgcgtgccttatttaga

SEQ ID NO: 443231 - DNA, 30 bp, Artificial Sequence
  Synthetic oligonucleotide
cacttgccaaggtacgaagttttatttaga

SEQ ID NO: 443232 - DNA, 30 bp, Artificial Sequence
  Synthetic oligonucleotide
ttatatattagagcccatctaacctttaga

SEQ ID NO: 443233 - DNA, 30 bp, Artificial Sequence
  Synthetic oligonucleotide
agacaaatcaccaagctaagtacctttaga

SEQ ID NO: 443234 - DNA, 30 bp, Artificial Sequence
  Synthetic oligonucleotide
taattgaattgttaatatgctatctttaga

SEQ ID NO: 443235 - DNA, 30 bp, Artificial Sequence
  Synthetic oligonucleotide
tggacttcacatgctgtatcgcagtttaga

SEQ ID NO: 443236 - DNA, 30 bp, Artificial Sequence
  Synthetic oligonucleotide
gacaggtcaaattgtgctgggcagtttaga

SEQ ID NO: 443237 - DNA, 30 bp, Artificial Sequence
  Synthetic oligonucleotide
atcgagccccgatacgccgcctagtttaga

SEQ ID NO: 443238 - DNA, 30 bp, Artificial Sequence
  Synthetic oligonucleotide
ccatcttaccctcttactggaacgtttaga

SEQ ID NO: 443239 - DNA, 30 bp, Artificial Sequence
  Synthetic oligonucleotide
catttcttcccaagtaggtatgggtttaga

SEQ ID NO: 443240 - DNA, 30 bp, Artificial Sequence
  Synthetic oligonucleotide
tataaatgttcagcatcactcggttttaga

SEQ ID NO: 443241 - DNA, 30 bp, Artificial Sequence
  Synthetic oligonucleotide
tcgggatatattaggaagtaattttttaga

SEQ ID NO: 443242 - DNA, 30 bp, Artificial Sequence
  Synthetic oligonucleotide
tggtgatgattattcatcaggttcaaacga

SEQ ID NO: 443243 - DNA, 30 bp, Artificial Sequence
  Synthetic oligonucleotide
gactgcagttttacctctatcagtaaacga

SEQ ID NO: 443244 - DNA, 30 bp, Artificial Sequence
  Synthetic oligonucleotide
gatataatcatcattagggattaacaacga

SEQ ID NO: 443245 - DNA, 30 bp, Artificial Sequence
  Synthetic oligonucleotide
tcttttgtccggcacgcaccaccacaacga

SEQ ID NO: 443246 - DNA, 30 bp, Artificial Sequence
  Synthetic oligonucleotide
gtgcccttagagcgttctcgttgacaacga

SEQ ID NO: 443247 - DNA, 30 bp, Artificial Sequence
  Synthetic oligonucleotide
aagtgtttattcaactagtatatacaacga

SEQ ID NO: 443248 - DNA, 30 bp, Artificial Sequence
  Synthetic oligonucleotide
ctgccgatcgtgtcaatatcgtcccaacga

SEQ ID NO: 443249 - DNA, 29 bp, Artificial Sequence
  Synthetic oligonucleotide
ggatcccccgatggggtttcaggcaacga

SEQ ID NO: 443250 - DNA, 31 bp, Artificial Sequence
  Synthetic oligonucleotide
cgggccagcttcgatccgcagcatgcaacga

SEQ ID NO: 443251 - DNA, 30 bp, Artificial Sequence
  Synthetic oligonucleotide
taacatacgcgatgacataatggtcaacga

SEQ ID NO: 443252 - DNA, 30 bp, Artificial Sequence
  Synthetic oligonucleotide
tcagccatgagacggggtgcttttcaacga

SEQ ID NO: 443253 - DNA, 30 bp, Artificial Sequence
  Synthetic oligonucleotide
gggtaaagggggatgggagcatcagaacga

SEQ ID NO: 443254 - DNA, 30 bp, Artificial Sequence
  Synthetic oligonucleotide
tcatcattagtcgaaagtgtcgacgaacga

SEQ ID NO: 443255 - DNA, 30 bp, Artificial Sequence
  Synthetic oligonucleotide
cttcttagcacctgtgatcaattggaacga

SEQ ID NO: 443256 - DNA, 30 bp, Artificial Sequence
  Synthetic oligonucleotide
cgcaccgatccgagctaaacgaatgaacga

SEQ ID NO: 443257 - DNA, 30 bp, Artificial Sequence
  Synthetic oligonucleotide
aggtgttcctgggcgggttgatgtgaacga

SEQ ID NO: 443258 - DNA, 30 bp, Artificial Sequence
  Synthetic oligonucleotide
tacaacattgatggggcgagcgttgaacga

SEQ ID NO: 443259 - DNA, 30 bp, Artificial Sequence
  Synthetic oligonucleotide
gtatacgacgtcagcaggtagtaataacga

SEQ ID NO: 443260 - DNA, 30 bp, Artificial Sequence
  Synthetic oligonucleotide
gtacgagatgatcgtcacggatgctaacga

SEQ ID NO: 443261 - DNA, 30 bp, Artificial Sequence
  Synthetic oligonucleotide
agaaaaacaagccgcatagccatctaacga

SEQ ID NO: 443262 - DNA, 30 bp, Artificial Sequence
  Synthetic oligonucleotide
gggccccttatttcagccgcatggtaacga

SEQ ID NO: 443263 - DNA, 30 bp, Artificial Sequence
  Synthetic oligonucleotide
cttacctccggatgtttatttgattaacga

SEQ ID NO: 443264 - DNA, 30 bp, Artificial Sequence
  Synthetic oligonucleotide
atctcatttcttcgcaattaaccttaacga

SEQ ID NO: 443265 - DNA, 30 bp, Artificial Sequence
  Synthetic oligonucleotide
cgccgtagaaactcttagttttgttaacga

SEQ ID NO: 443266 - DNA, 30 bp, Artificial Sequence
  Synthetic oligonucleotide
taatcattggttcgttccgccaaaacacga

SEQ ID NO: 443267 - DNA, 30 bp, Artificial Sequence
  Synthetic oligonucleotide
attccctttctgccgtagcagccaacacga

SEQ ID NO: 443268 - DNA, 30 bp, Artificial Sequence
  Synthetic oligonucleotide
gttacttggcttatgtggaacggaacacga

SEQ ID NO: 443269 - DNA, 30 bp, Artificial Sequence
  Synthetic oligonucleotide
tcattaagtggcgtcggacttgacacacga

SEQ ID NO: 443270 - DNA, 30 bp, Artificial Sequence
  Synthetic oligonucleotide
tatactggacttttaaaattccgcacacga

SEQ ID NO: 443271 - DNA, 30 bp, Artificial Sequence
  Synthetic oligonucleotide
tcaaagcgaccgcacggacgatgcacacga

SEQ ID NO: 443272 - DNA, 30 bp, Artificial Sequence
  Synthetic oligonucleotide
ggattattatacatgggggtgcagacacga

SEQ ID NO: 443273 - DNA, 30 bp, Artificial Sequence
  Synthetic oligonucleotide
agtagccaggaactttaggatcagacacga

SEQ ID NO: 443274 - DNA, 30 bp, Artificial Sequence
  Synthetic oligonucleotide
tctggtcgcttgccagcctctaatacacga

SEQ ID NO: 443275 - DNA, 30 bp, Artificial Sequence
  Synthetic oligonucleotide
ggaggtctagtagcgtatggccttacacga

SEQ ID NO: 443276 - DNA, 30 bp, Artificial Sequence
  Synthetic oligonucleotide
ttgttgagacttgactaaagcttaccacga

SEQ ID NO: 443277 - DNA, 30 bp, Artificial Sequence
  Synthetic oligonucleotide
gatgcaacacctcggcgtccaaacgcacga

SEQ ID NO: 443278 - DNA, 30 bp, Artificial Sequence
  Synthetic oligonucleotide
atggagttgaaggaaattagagacgcacga

SEQ ID NO: 443279 - DNA, 30 bp, Artificial Sequence
  Synthetic oligonucleotide
agtaatgcgtatcgtagtacacccgcacga

SEQ ID NO: 443280 - DNA, 30 bp, Artificial Sequence
  Synthetic oligonucleotide
ctatgccggtcactataggggcctgcacga

SEQ ID NO: 443281 - DNA, 30 bp, Artificial Sequence
  Synthetic oligonucleotide
aagtaatcatttttataatgttcatcacga

SEQ ID NO: 443282 - DNA, 30 bp, Artificial Sequence
  Synthetic oligonucleotide
aagttatccaaggggattactcgctcacga

SEQ ID NO: 443283 - DNA, 30 bp, Artificial Sequence
  Synthetic oligonucleotide
taattaattccggaaggtaaaaagtcacga

SEQ ID NO: 443284 - DNA, 30 bp, Artificial Sequence
  Synthetic oligonucleotide
aatcctaagttctaggtccgcgggtcacga

SEQ ID NO: 443285 - DNA, 30 bp, Artificial Sequence
  Synthetic oligonucleotide
aatggcagcaccgcgtatgctcattcacga

SEQ ID NO: 443286 - DNA, 30 bp, Artificial Sequence
  Synthetic oligonucleotide
ccttgcaactctcgtatctaataaagacga

SEQ ID NO: 443287 - DNA, 30 bp, Artificial Sequence
  Synthetic oligonucleotide
aggattatatttttaggtttctagagacga

SEQ ID NO: 443288 - DNA, 30 bp, Artificial Sequence
  Synthetic oligonucleotide
gcatcatcggccgatgcccatactagacga

SEQ ID NO: 443289 - DNA, 30 bp, Artificial Sequence
  Synthetic oligonucleotide
taaaagattcggtcccgccatgcacgacga

SEQ ID NO: 443290 - DNA, 30 bp, Artificial Sequence
  Synthetic oligonucleotide
ttatcaggcgggctcgtgagaggacgacga

SEQ ID NO: 443291 - DNA, 30 bp, Artificial Sequence
  Synthetic oligonucleotide
atagctaggagtcctttacgcaaccgacga

SEQ ID NO: 443292 - DNA, 30 bp, Artificial Sequence
  Synthetic oligonucleotide
tgtacagctctgaacccgctatagcgacga

SEQ ID NO: 443293 - DNA, 30 bp, Artificial Sequence
  Synthetic oligonucleotide
caatcctggggaggtcgataaggtcgacga

SEQ ID NO: 443294 - DNA, 30 bp, Artificial Sequence
  Synthetic oligonucleotide
aagttttataggcatactatcaacggacga

SEQ ID NO: 443295 - DNA, 30 bp, Artificial Sequence
  Synthetic oligonucleotide
aggtggtaatccgaggccttgcgcggacga

SEQ ID NO: 443296 - DNA, 30 bp, Artificial Sequence
  Synthetic oligonucleotide
aaaccaatccgaagtccatgatagggacga

SEQ ID NO: 443297 - DNA, 30 bp, Artificial Sequence
  Synthetic oligonucleotide
gactgtagttaaacgcagacacctggacga

SEQ ID NO: 443298 - DNA, 30 bp, Artificial Sequence
  Synthetic oligonucleotide
caaacgtttagttgtgcgatacgatgacga

SEQ ID NO: 443299 - DNA, 30 bp, Artificial Sequence
  Synthetic oligonucleotide
tattctcggctggtttgtcgtcggtgacga

SEQ ID NO: 443300 - DNA, 30 bp, Artificial Sequence
  Synthetic oligonucleotide
atcgggtgtttgagatacctatattgacga

SEQ ID NO: 443301 - DNA, 30 bp, Artificial Sequence
  Synthetic oligonucleotide
agcctcagctcgaatatccggatttgacga

SEQ ID NO: 443302 - DNA, 30 bp, Artificial Sequence
  Synthetic oligonucleotide
ctggttgtctatggctgtcgctacatacga

SEQ ID NO: 443303 - DNA, 30 bp, Artificial Sequence
  Synthetic oligonucleotide
gatcgtacgttggcgctccgccagatacga

SEQ ID NO: 443304 - DNA, 30 bp, Artificial Sequence
  Synthetic oligonucleotide
tgtcaggggtgagtcagtttaatgatacga

SEQ ID NO: 443305 - DNA, 30 bp, Artificial Sequence
  Synthetic oligonucleotide
ggactagttttttaaattactaatatacga

SEQ ID NO: 443306 - DNA, 30 bp, Artificial Sequence
  Synthetic oligonucleotide
gtgaatttaatctggattctgtatatacga

SEQ ID NO: 443307 - DNA, 30 bp, Artificial Sequence
  Synthetic oligonucleotide
gatggtgggaagacaaccgcaagtatacga

SEQ ID NO: 443308 - DNA, 30 bp, Artificial Sequence
  Synthetic oligonucleotide
gctacaccggtgtcacagttggtactacga

SEQ ID NO: 443309 - DNA, 30 bp, Artificial Sequence
  Synthetic oligonucleotide
cctggatatttcaccgcgagcttcctacga

SEQ ID NO: 443310 - DNA, 30 bp, Artificial Sequence
  Synthetic oligonucleotide
atacacaggtgatgctagtaaaagctacga

SEQ ID NO: 443311 - DNA, 30 bp, Artificial Sequence
  Synthetic oligonucleotide
tatctcgaagctcggaagctttcgctacga

SEQ ID NO: 443312 - DNA, 30 bp, Artificial Sequence
  Synthetic oligonucleotide
atcgtagtcgccgaaccacttacagtacga

SEQ ID NO: 443313 - DNA, 30 bp, Artificial Sequence
  Synthetic oligonucleotide
ttagaacctacgcagataatcagagtacga

SEQ ID NO: 443314 - DNA, 30 bp, Artificial Sequence
  Synthetic oligonucleotide
tagatgtgcgttcttgccaattaggtacga

SEQ ID NO: 443315 - DNA, 30 bp, Artificial Sequence
  Synthetic oligonucleotide
atcaagctattggttgaatcacatgtacga

SEQ ID NO: 443316 - DNA, 30 bp, Artificial Sequence
  Synthetic oligonucleotide
tcccagccgaagcataccagccatgtacga

SEQ ID NO: 443317 - DNA, 30 bp, Artificial Sequence
  Synthetic oligonucleotide
cagcgttggcagatcgctttccatgtacga

SEQ ID NO: 443318 - DNA, 30 bp, Artificial Sequence
  Synthetic oligonucleotide
ctcgcttgggaagtagacgtgcatgtacga

SEQ ID NO: 443319 - DNA, 30 bp, Artificial Sequence
  Synthetic oligonucleotide
tgtcccagtaatccggactaggatgtacga

SEQ ID NO: 443320 - DNA, 30 bp, Artificial Sequence
  Synthetic oligonucleotide
aggacgccgcggagtaactgggatgtacga

SEQ ID NO: 443321 - DNA, 30 bp, Artificial Sequence
  Synthetic oligonucleotide
tggttgcacgcccctatagttctattacga

SEQ ID NO: 443322 - DNA, 30 bp, Artificial Sequence
  Synthetic oligonucleotide
atgagtttggtaaccgaatgccccttacga

SEQ ID NO: 443323 - DNA, 30 bp, Artificial Sequence
  Synthetic oligonucleotide
gggccggcataaccgagaccgcccttacga

SEQ ID NO: 443324 - DNA, 30 bp, Artificial Sequence
  Synthetic oligonucleotide
atttagataacaaaggcttctgtcttacga

SEQ ID NO: 443325 - DNA, 30 bp, Artificial Sequence
  Synthetic oligonucleotide
cactctccaacgcaaaagagaacgttacga

SEQ ID NO: 443326 - DNA, 30 bp, Artificial Sequence
  Synthetic oligonucleotide
cgctggcgaccatctacagttgcaaaccga

SEQ ID NO: 443327 - DNA, 30 bp, Artificial Sequence
  Synthetic oligonucleotide
gcctgcggtcggaatgtgaccagaaaccga

SEQ ID NO: 443328 - DNA, 30 bp, Artificial Sequence
  Synthetic oligonucleotide
ctttggattagaactcgcccgggaaaccga

SEQ ID NO: 443329 - DNA, 30 bp, Artificial Sequence
  Synthetic oligonucleotide
aacttagatggtcggtgcggagagaaccga

SEQ ID NO: 443330 - DNA, 30 bp, Artificial Sequence
  Synthetic oligonucleotide
ttaactcgatagccccgtttgatacaccga

SEQ ID NO: 443331 - DNA, 30 bp, Artificial Sequence
  Synthetic oligonucleotide
taaccgcctaaaggtggcacccaccaccga

SEQ ID NO: 443332 - DNA, 30 bp, Artificial Sequence
  Synthetic oligonucleotide
gctcgggtcctagaacttactcagcaccga

SEQ ID NO: 443333 - DNA, 30 bp, Artificial Sequence
  Synthetic oligonucleotide
atctctaatcgccgggtcagatagcaccga

SEQ ID NO: 443334 - DNA, 30 bp, Artificial Sequence
  Synthetic oligonucleotide
ttgtccccaatatactcagctggtcaccga

SEQ ID NO: 443335 - DNA, 30 bp, Artificial Sequence
  Synthetic oligonucleotide
gctcgtattatagacgtcatataagaccga

SEQ ID NO: 443336 - DNA, 30 bp, Artificial Sequence
  Synthetic oligonucleotide
gtcgtctcgggagcccggacagtcgaccga

SEQ ID NO: 443337 - DNA, 30 bp, Artificial Sequence
  Synthetic oligonucleotide
catacgccctcggggcaccccgtcgaccga

SEQ ID NO: 443338 - DNA, 30 bp, Artificial Sequence
  Synthetic oligonucleotide
gcgcctgtctgaatcaggcgcggggaccga

SEQ ID NO: 443339 - DNA, 30 bp, Artificial Sequence
  Synthetic oligonucleotide
gttaacatataggtggtctgctgctaccga

SEQ ID NO: 443340 - DNA, 30 bp, Artificial Sequence
  Synthetic oligonucleotide
tagtcggttgtaacctggtgttacacccga

SEQ ID NO: 443341 - DNA, 30 bp, Artificial Sequence
  Synthetic oligonucleotide
ttacctcgtatggcttcaccggccacccga

SEQ ID NO: 443342 - DNA, 30 bp, Artificial Sequence
  Synthetic oligonucleotide
gtgttttttggcctttacagaatcacccga

SEQ ID NO: 443343 - DNA, 30 bp, Artificial Sequence
  Synthetic oligonucleotide
cgcacagattttagccttagaaggacccga

SEQ ID NO: 443344 - DNA, 30 bp, Artificial Sequence
  Synthetic oligonucleotide
taattctctgcgacttacagtggtacccga

SEQ ID NO: 443345 - DNA, 30 bp, Artificial Sequence
  Synthetic oligonucleotide
catctggtgggaacgcccacgaaaccccga

SEQ ID NO: 443346 - DNA, 30 bp, Artificial Sequence
  Synthetic oligonucleotide
cagtcgtggggtctatgtcagaggccccga

SEQ ID NO: 443347 - DNA, 30 bp, Artificial Sequence
  Synthetic oligonucleotide
caataacttagctctaatgtgcttccccga

SEQ ID NO: 443348 - DNA, 30 bp, Artificial Sequence
  Synthetic oligonucleotide
gaagaaggttgatgtttggcagtcgcccga

SEQ ID NO: 443349 - DNA, 30 bp, Artificial Sequence
  Synthetic oligonucleotide
gagagtagtggcatctgtgctccggcccga

SEQ ID NO: 443350 - DNA, 30 bp, Artificial Sequence
  Synthetic oligonucleotide
gtccatcttgtcgcatacgacgctgcccga

SEQ ID NO: 443351 - DNA, 30 bp, Artificial Sequence
  Synthetic oligonucleotide
tacgtcaatacgtaccagagttttgcccga

SEQ ID NO: 443352 - DNA, 30 bp, Artificial Sequence
  Synthetic oligonucleotide
aggcatcataggtaatacacgcaatcccga

SEQ ID NO: 443353 - DNA, 30 bp, Artificial Sequence
  Synthetic oligonucleotide
gtggccatattccaatgcgaccgctcccga

SEQ ID NO: 443354 - DNA, 30 bp, Artificial Sequence
  Synthetic oligonucleotide
tcagtttggaaatatgtgaaaatttcccga

SEQ ID NO: 443355 - DNA, 30 bp, Artificial Sequence
  Synthetic oligonucleotide
gtcggcaatggcaattgccatgaaagccga

SEQ ID NO: 443356 - DNA, 30 bp, Artificial Sequence
  Synthetic oligonucleotide
gcgtcgagaaaatcggccctataaagccga

SEQ ID NO: 443357 - DNA, 30 bp, Artificial Sequence
  Synthetic oligonucleotide
tagagaattggtaaaatagcacgaagccga

SEQ ID NO: 443358 - DNA, 30 bp, Artificial Sequence
  Synthetic oligonucleotide
gggttcttcaaatgtggccaatcacgccga

SEQ ID NO: 443359 - DNA, 30 bp, Artificial Sequence
  Synthetic oligonucleotide
agatttaagcggtccgtcttcctccgccga

SEQ ID NO: 443360 - DNA, 30 bp, Artificial Sequence
  Synthetic oligonucleotide
gtctcgccttcaatcatccggtacggccga

SEQ ID NO: 443361 - DNA, 30 bp, Artificial Sequence
  Synthetic oligonucleotide
tgcgtccattgccctgatcgcatgggccga

SEQ ID NO: 443362 - DNA, 30 bp, Artificial Sequence
  Synthetic oligonucleotide
aacccttcggccggcacacgccgatgccga

SEQ ID NO: 443363 - DNA, 30 bp, Artificial Sequence
  Synthetic oligonucleotide
ctacccgggttccatgcgtaaatctgccga

SEQ ID NO: 443364 - DNA, 30 bp, Artificial Sequence
  Synthetic oligonucleotide
tgaccattttggagcaaagttctctgccga

SEQ ID NO: 443365 - DNA, 30 bp, Artificial Sequence
  Synthetic oligonucleotide
gagcacagcgatgtgacggttaaaatccga

SEQ ID NO: 443366 - DNA, 30 bp, Artificial Sequence
  Synthetic oligonucleotide
tctagtcgcaggaatatcctcctcatccga

SEQ ID NO: 443367 - DNA, 30 bp, Artificial Sequence
  Synthetic oligonucleotide
actggattgtcgttggcttcagcgatccga

SEQ ID NO: 443368 - DNA, 30 bp, Artificial Sequence
  Synthetic oligonucleotide
gtatgagtccgtctagttttatgactccga

SEQ ID NO: 443369 - DNA, 30 bp, Artificial Sequence
  Synthetic oligonucleotide
aaaagcggattttctccaatcatactccga

SEQ ID NO: 443370 - DNA, 30 bp, Artificial Sequence
  Synthetic oligonucleotide
tccattttgtatgggttaagctatctccga

SEQ ID NO: 443371 - DNA, 30 bp, Artificial Sequence
  Synthetic oligonucleotide
tgcaattcgagattgctccgccctctccga

SEQ ID NO: 443372 - DNA, 30 bp, Artificial Sequence
  Synthetic oligonucleotide
taaattgcacgaatcatcgagagtctccga

SEQ ID NO: 443373 - DNA, 30 bp, Artificial Sequence
  Synthetic oligonucleotide
cttttatcctaccaaggttgaggagtccga

SEQ ID NO: 443374 - DNA, 30 bp, Artificial Sequence
  Synthetic oligonucleotide
tgggtgtatgctactccctaatccgtccga

SEQ ID NO: 443375 - DNA, 30 bp, Artificial Sequence
  Synthetic oligonucleotide
ttatcgagcaatcctgtcgtaggcgtccga

SEQ ID NO: 443376 - DNA, 30 bp, Artificial Sequence
  Synthetic oligonucleotide
gttatattggttctcacgctgttggtccga

SEQ ID NO: 443377 - DNA, 30 bp, Artificial Sequence
  Synthetic oligonucleotide
aggtacgcagacgtgattctgtctgtccga

SEQ ID NO: 443378 - DNA, 30 bp, Artificial Sequence
  Synthetic oligonucleotide
cgccatttagaggaattgtgcaaattccga

SEQ ID NO: 443379 - DNA, 30 bp, Artificial Sequence
  Synthetic oligonucleotide
gtaattcgtatacaatcttgccgattccga

SEQ ID NO: 443380 - DNA, 30 bp, Artificial Sequence
  Synthetic oligonucleotide
gttcgccagcctggaaaatgaggattccga

SEQ ID NO: 443381 - DNA, 30 bp, Artificial Sequence
  Synthetic oligonucleotide
gcatcgagaatacatagagaagacttccga

SEQ ID NO: 443382 - DNA, 30 bp, Artificial Sequence
  Synthetic oligonucleotide
tggcttaatccaattcgtgtagagttccga

SEQ ID NO: 443383 - DNA, 30 bp, Artificial Sequence
  Synthetic oligonucleotide
tgtgtttattaattgaatataacgttccga

SEQ ID NO: 443384 - DNA, 30 bp, Artificial Sequence
  Synthetic oligonucleotide
tccgtattagactccggctggcggttccga

SEQ ID NO: 443385 - DNA, 30 bp, Artificial Sequence
  Synthetic oligonucleotide
caagcaacgccaggtttaaatcatttccga

SEQ ID NO: 443386 - DNA, 30 bp, Artificial Sequence
  Synthetic oligonucleotide
gctcaatttcatttacactttgacaagcga

SEQ ID NO: 443387 - DNA, 30 bp, Artificial Sequence
  Synthetic oligonucleotide
tccggtcgtgtcatttgtaagagacagcga

SEQ ID NO: 443388 - DNA, 31 bp, Artificial Sequence
  Synthetic oligonucleotide
gtcacgcaccttttacgcctaatgacagcga

SEQ ID NO: 443389 - DNA, 30 bp, Artificial Sequence
  Synthetic oligonucleotide
aagatttccagatctcgaaaatcgcagcga

SEQ ID NO: 443390 - DNA, 30 bp, Artificial Sequence
  Synthetic oligonucleotide
gaatcgcagggtaatctcgagttgcagcga

SEQ ID NO: 443391 - DNA, 30 bp, Artificial Sequence
  Synthetic oligonucleotide
tcagtccgcgacttcatgcggtaagagcga

SEQ ID NO: 443392 - DNA, 30 bp, Artificial Sequence
  Synthetic oligonucleotide
ctcccgctggtctacaccggttaagagcga

SEQ ID NO: 443393 - DNA, 30 bp, Artificial Sequence
  Synthetic oligonucleotide
gtacgctagaccttggatctgtcggagcga

SEQ ID NO: 443394 - DNA, 30 bp, Artificial Sequence
  Synthetic oligonucleotide
gcttcagcggtgtgagggcggcctgagcga

SEQ ID NO: 443395 - DNA, 30 bp, Artificial Sequence
  Synthetic oligonucleotide
tagtccgaggagcgcttgcagtgctagcga

SEQ ID NO: 443396 - DNA, 30 bp, Artificial Sequence
  Synthetic oligonucleotide
cactccacctacggttagagttgctagcga

SEQ ID NO: 443397 - DNA, 30 bp, Artificial Sequence
  Synthetic oligonucleotide
agaacgtccattaaacggcggatctagcga

SEQ ID NO: 443398 - DNA, 30 bp, Artificial Sequence
  Synthetic oligonucleotide
tatactagatgtgtgtggtgagcgtagcga

SEQ ID NO: 443399 - DNA, 30 bp, Artificial Sequence
  Synthetic oligonucleotide
tccggtgtaagtctgcaattggtttagcga

SEQ ID NO: 443400 - DNA, 29 bp, Artificial Sequence
  Synthetic oligonucleotide
gtgggaccacacatctacgtttttagcga

SEQ ID NO: 443401 - DNA, 30 bp, Artificial Sequence
  Synthetic oligonucleotide
acaatattacgtcgtaacatctcaacgcga

SEQ ID NO: 443402 - DNA, 30 bp, Artificial Sequence
  Synthetic oligonucleotide
aaccgagagctagtcgttagtcgaacgcga

SEQ ID NO: 443403 - DNA, 30 bp, Artificial Sequence
  Synthetic oligonucleotide
tggcaagactcgcgtctatcgataacgcga

SEQ ID NO: 443404 - DNA, 30 bp, Artificial Sequence
  Synthetic oligonucleotide
ctggtttcttgaaagcagggactaacgcga

SEQ ID NO: 443405 - DNA, 30 bp, Artificial Sequence
  Synthetic oligonucleotide
attaaaaccttttgtagcttcgtaacgcga

SEQ ID NO: 443406 - DNA, 30 bp, Artificial Sequence
  Synthetic oligonucleotide
gattgtctggcccttataaagtccacgcga

SEQ ID NO: 443407 - DNA, 30 bp, Artificial Sequence
  Synthetic oligonucleotide
ccgaggagtcagcgtcaggatcgcacgcga

SEQ ID NO: 443408 - DNA, 30 bp, Artificial Sequence
  Synthetic oligonucleotide
aaagtatcagtaagcttataggagacgcga

SEQ ID NO: 443409 - DNA, 30 bp, Artificial Sequence
  Synthetic oligonucleotide
tggtatttgtccgacgagttcatgacgcga

SEQ ID NO: 443410 - DNA, 30 bp, Artificial Sequence
  Synthetic oligonucleotide
tgattaacgctgcccaaccggatgacgcga

SEQ ID NO: 443411 - DNA, 30 bp, Artificial Sequence
  Synthetic oligonucleotide
gagaatatgctccatacaagatatacgcga

SEQ ID NO: 443412 - DNA, 30 bp, Artificial Sequence
  Synthetic oligonucleotide
ctccgttactcatcgataaaggctacgcga

SEQ ID NO: 443413 - DNA, 30 bp, Artificial Sequence
  Synthetic oligonucleotide
atgaacgtcccttctcatatgattacgcga

SEQ ID NO: 443414 - DNA, 30 bp, Artificial Sequence
  Synthetic oligonucleotide
ttaatttgcgtaagtaaataatttacgcga

SEQ ID NO: 443415 - DNA, 30 bp, Artificial Sequence
  Synthetic oligonucleotide
tctccgagcgatttggatttatacccgcga

SEQ ID NO: 443416 - DNA, 30 bp, Artificial Sequence
  Synthetic oligonucleotide
ttggttagaaatttccttctctacccgcga

SEQ ID NO: 443417 - DNA, 30 bp, Artificial Sequence
  Synthetic oligonucleotide
ctagttcataaagatgatggctttccgcga

SEQ ID NO: 443418 - DNA, 30 bp, Artificial Sequence
  Synthetic oligonucleotide
gtaaacggttttcatgataggaacgcgcga

SEQ ID NO: 443419 - DNA, 30 bp, Artificial Sequence
  Synthetic oligonucleotide
agcggtgcaacgactgtagcgctcgcgcga

SEQ ID NO: 443420 - DNA, 30 bp, Artificial Sequence
  Synthetic oligonucleotide
ggctcgcttccgttattgatttatgcgcga

SEQ ID NO: 443421 - DNA, 30 bp, Artificial Sequence
  Synthetic oligonucleotide
ctgtctcatctggcagttgatttatcgcga

SEQ ID NO: 443422 - DNA, 30 bp, Artificial Sequence
  Synthetic oligonucleotide
cattttcgattattgcgcctagactcgcga

SEQ ID NO: 443423 - DNA, 30 bp, Artificial Sequence
  Synthetic oligonucleotide
atttttaaggcggactggtgctcgtcgcga

SEQ ID NO: 443424 - DNA, 30 bp, Artificial Sequence
  Synthetic oligonucleotide
ccccagtgctcttatggacctgggtcgcga

SEQ ID NO: 443425 - DNA, 30 bp, Artificial Sequence
  Synthetic oligonucleotide
taacgtgcggtcataatcggactgtcgcga

SEQ ID NO: 443426 - DNA, 30 bp, Artificial Sequence
  Synthetic oligonucleotide
gatacacattgcgatataaagctttcgcga

SEQ ID NO: 443427 - DNA, 30 bp, Artificial Sequence
  Synthetic oligonucleotide
caagtattggagcgcctgacttcaaggcga

SEQ ID NO: 443428 - DNA, 30 bp, Artificial Sequence
  Synthetic oligonucleotide
agggcgatgtagtttggcgggttaaggcga

SEQ ID NO: 443429 - DNA, 30 bp, Artificial Sequence
  Synthetic oligonucleotide
aataggaaatttagtttcgagtagaggcga

SEQ ID NO: 443430 - DNA, 30 bp, Artificial Sequence
  Synthetic oligonucleotide
gttcagtacctatcattcgaaaataggcga

SEQ ID NO: 443431 - DNA, 30 bp, Artificial Sequence
  Synthetic oligonucleotide
agtgttgatcctgtattagattataggcga

SEQ ID NO: 443432 - DNA, 30 bp, Artificial Sequence
  Synthetic oligonucleotide
gtccccgtcaaaccccccgagcaccggcga

SEQ ID NO: 443433 - DNA, 30 bp, Artificial Sequence
  Synthetic oligonucleotide
tatgccggactccggatcgcgtaccggcga

SEQ ID NO: 443434 - DNA, 30 bp, Artificial Sequence
  Synthetic oligonucleotide
ggttcatagccacagccactttagcggcga

SEQ ID NO: 443435 - DNA, 30 bp, Artificial Sequence
  Synthetic oligonucleotide
gataggtgggtatctgggcgcttcgggcga

SEQ ID NO: 443436 - DNA, 30 bp, Artificial Sequence
  Synthetic oligonucleotide
caaactatgtttccgtggacgctggggcga

SEQ ID NO: 443437 - DNA, 30 bp, Artificial Sequence
  Synthetic oligonucleotide
cagtaccggcgtctatcaagaagatggcga

SEQ ID NO: 443438 - DNA, 30 bp, Artificial Sequence
  Synthetic oligonucleotide
agtccttcataagtgggcgccgagtggcga

SEQ ID NO: 443439 - DNA, 30 bp, Artificial Sequence
  Synthetic oligonucleotide
aaacctactggaaggtgttttgattggcga

SEQ ID NO: 443440 - DNA, 30 bp, Artificial Sequence
  Synthetic oligonucleotide
gcaacgtacttggtgatactgggttggcga

SEQ ID NO: 443441 - DNA, 30 bp, Artificial Sequence
  Synthetic oligonucleotide
tcgaagctcggcactgcttgaggaatgcga

SEQ ID NO: 443442 - DNA, 30 bp, Artificial Sequence
  Synthetic oligonucleotide
cggtcaggcggagaacagattaccatgcga

SEQ ID NO: 443443 - DNA, 30 bp, Artificial Sequence
  Synthetic oligonucleotide
tgcagggcatgccgcacgcagcccatgcga

SEQ ID NO: 443444 - DNA, 30 bp, Artificial Sequence
  Synthetic oligonucleotide
gattttcgctcgtacccgagatgcatgcga

SEQ ID NO: 443445 - DNA, 30 bp, Artificial Sequence
  Synthetic oligonucleotide
tactgaccgtacctgagcattactatgcga

SEQ ID NO: 443446 - DNA, 30 bp, Artificial Sequence
  Synthetic oligonucleotide
gggatcttatggctttcgggaggtatgcga

SEQ ID NO: 443447 - DNA, 30 bp, Artificial Sequence
  Synthetic oligonucleotide
gaggttttccatcccatcaggcaactgcga

SEQ ID NO: 443448 - DNA, 30 bp, Artificial Sequence
  Synthetic oligonucleotide
agtatctccaaggctggcacgggactgcga

SEQ ID NO: 443449 - DNA, 30 bp, Artificial Sequence
  Synthetic oligonucleotide
ttgaagtctgttggcgagcaaggcctgcga

SEQ ID NO: 443450 - DNA, 30 bp, Artificial Sequence
  Synthetic oligonucleotide
ttcctgcttaatgattccttgatgctgcga

SEQ ID NO: 443451 - DNA, 30 bp, Artificial Sequence
  Synthetic oligonucleotide
ataaagggcttctctttgtccaaattgcga

SEQ ID NO: 443452 - DNA, 30 bp, Artificial Sequence
  Synthetic oligonucleotide
aaaaccttaaggtgttgctgaagcttgcga

SEQ ID NO: 443453 - DNA, 30 bp, Artificial Sequence
  Synthetic oligonucleotide
ttggatggatccgcgggcaatatgttgcga

SEQ ID NO: 443454 - DNA, 30 bp, Artificial Sequence
  Synthetic oligonucleotide
ctgcttccaatgctatgcagaaatttgcga

SEQ ID NO: 443455 - DNA, 30 bp, Artificial Sequence
  Synthetic oligonucleotide
ggttatgtgatattctcgatggatttgcga

SEQ ID NO: 443456 - DNA, 30 bp, Artificial Sequence
  Synthetic oligonucleotide
gatagaatgatgggcgagatctgaaatcga

SEQ ID NO: 443457 - DNA, 30 bp, Artificial Sequence
  Synthetic oligonucleotide
tttaacgggatttcttccaaagtgaatcga

SEQ ID NO: 443458 - DNA, 30 bp, Artificial Sequence
  Synthetic oligonucleotide
gctcttattacaccagcaaaacgtaatcga

SEQ ID NO: 443459 - DNA, 30 bp, Artificial Sequence
  Synthetic oligonucleotide
actttaatcgaactgttcatatgtaatcga

SEQ ID NO: 443460 - DNA, 30 bp, Artificial Sequence
  Synthetic oligonucleotide
gcaagactctacactgtgtctaaacatcga

SEQ ID NO: 443461 - DNA, 30 bp, Artificial Sequence
  Synthetic oligonucleotide
gcctgaagtcctccatcagggtaccatcga

SEQ ID NO: 443462 - DNA, 30 bp, Artificial Sequence
  Synthetic oligonucleotide
aatgggactctattcaacgtcgcgcatcga

SEQ ID NO: 443463 - DNA, 30 bp, Artificial Sequence
  Synthetic oligonucleotide
cctgcatctggggcataagtccctcatcga

SEQ ID NO: 443464 - DNA, 30 bp, Artificial Sequence
  Synthetic oligonucleotide
agaatctacgcggattgaaccccagatcga

SEQ ID NO: 443465 - DNA, 30 bp, Artificial Sequence
  Synthetic oligonucleotide
ctggataagacaccgagggtctcagatcga

SEQ ID NO: 443466 - DNA, 30 bp, Artificial Sequence
  Synthetic oligonucleotide
cgtcagtccggagcgccgaacaccgatcga

SEQ ID NO: 443467 - DNA, 30 bp, Artificial Sequence
  Synthetic oligonucleotide
gacttgacagaatgatactcacgggatcga

SEQ ID NO: 443468 - DNA, 30 bp, Artificial Sequence
  Synthetic oligonucleotide
cttaacgctcaaaaattatcgatggatcga

SEQ ID NO: 443469 - DNA, 30 bp, Artificial Sequence
  Synthetic oligonucleotide
gaatgggcataagcgatacatcgtgatcga

SEQ ID NO: 443470 - DNA, 30 bp, Artificial Sequence
  Synthetic oligonucleotide
ttaccccctgtttcagcgtactgtgatcga

SEQ ID NO: 443471 - DNA, 30 bp, Artificial Sequence
  Synthetic oligonucleotide
ggaactttcatttttgcaaattcctatcga

SEQ ID NO: 443472 - DNA, 30 bp, Artificial Sequence
  Synthetic oligonucleotide
tcccgttttgtcggggatacaaggtatcga

SEQ ID NO: 443473 - DNA, 30 bp, Artificial Sequence
  Synthetic oligonucleotide
ttactagagcctgggaatctcaattatcga

SEQ ID NO: 443474 - DNA, 30 bp, Artificial Sequence
  Synthetic oligonucleotide
ccctctggactagcgataggatattatcga

SEQ ID NO: 443475 - DNA, 30 bp, Artificial Sequence
  Synthetic oligonucleotide
ggtcctcccagacagcaactatattatcga

SEQ ID NO: 443476 - DNA, 30 bp, Artificial Sequence
  Synthetic oligonucleotide
gctatggccgattgcggatcgtattatcga

SEQ ID NO: 443477 - DNA, 30 bp, Artificial Sequence
  Synthetic oligonucleotide
tagtttgaaagcgtttgcgaaatttatcga

SEQ ID NO: 443478 - DNA, 30 bp, Artificial Sequence
  Synthetic oligonucleotide
gccgctagcttgagtagtgactaaactcga

SEQ ID NO: 443479 - DNA, 30 bp, Artificial Sequence
  Synthetic oligonucleotide
gcgccgcgcggcaaccaccggtcaactcga

SEQ ID NO: 443480 - DNA, 30 bp, Artificial Sequence
  Synthetic oligonucleotide
ttactacatcgacgtcttcccggcactcga

SEQ ID NO: 443481 - DNA, 30 bp, Artificial Sequence
  Synthetic oligonucleotide
aaccagtgcacgatgtcgattttcactcga

SEQ ID NO: 443482 - DNA, 30 bp, Artificial Sequence
  Synthetic oligonucleotide
gaagtggaaggctttgctaacgagactcga

SEQ ID NO: 443483 - DNA, 30 bp, Artificial Sequence
  Synthetic oligonucleotide
atcacgtgaggggaccgccccgatactcga

SEQ ID NO: 443484 - DNA, 30 bp, Artificial Sequence
  Synthetic oligonucleotide
tcgaattctaattggaattcgcttactcga

SEQ ID NO: 443485 - DNA, 30 bp, Artificial Sequence
  Synthetic oligonucleotide
ttgttgggtgtcaggcgatggtcccctcga

SEQ ID NO: 443486 - DNA, 30 bp, Artificial Sequence
  Synthetic oligonucleotide
ggagaaagagtcaaacgtggtatccctcga

SEQ ID NO: 443487 - DNA, 30 bp, Artificial Sequence
  Synthetic oligonucleotide
tggggttttgatggcccggttacgcctcga

SEQ ID NO: 443488 - DNA, 30 bp, Artificial Sequence
  Synthetic oligonucleotide
tcgccgttagtgacggctcacctcgctcga

SEQ ID NO: 443489 - DNA, 30 bp, Artificial Sequence
  Synthetic oligonucleotide
agtacgttccaatgaacgcactcggctcga

SEQ ID NO: 443490 - DNA, 30 bp, Artificial Sequence
  Synthetic oligonucleotide
gtgcatcgcgaccgtcaacatatggctcga

SEQ ID NO: 443491 - DNA, 30 bp, Artificial Sequence
  Synthetic oligonucleotide
gaccagtgaaatcaaatacagacaagtcga

SEQ ID NO: 443492 - DNA, 30 bp, Artificial Sequence
  Synthetic oligonucleotide
ccgagggatccggccgctactgacagtcga

SEQ ID NO: 443493 - DNA, 30 bp, Artificial Sequence
  Synthetic oligonucleotide
ttccttacgctcccggattaagatagtcga

SEQ ID NO: 443494 - DNA, 30 bp, Artificial Sequence
  Synthetic oligonucleotide
aggtctcgcgcgacagcaacagtacgtcga

SEQ ID NO: 443495 - DNA, 30 bp, Artificial Sequence
  Synthetic oligonucleotide
cccaccgggcacaacccacataaccgtcga

SEQ ID NO: 443496 - DNA, 30 bp, Artificial Sequence
  Synthetic oligonucleotide
cgttagacgcaatgtaaggcagcccgtcga

SEQ ID NO: 443497 - DNA, 30 bp, Artificial Sequence
  Synthetic oligonucleotide
accccgtcagcaaacctgcaccgccgtcga

SEQ ID NO: 443498 - DNA, 30 bp, Artificial Sequence
  Synthetic oligonucleotide
cgatcgtaggccgacatgtagctccgtcga

SEQ ID NO: 443499 - DNA, 30 bp, Artificial Sequence
  Synthetic oligonucleotide
caatgctcagcggacgctccttttcgtcga

SEQ ID NO: 443500 - DNA, 30 bp, Artificial Sequence
  Synthetic oligonucleotide
ccccggtatatatgggcgaacaaaggtcga

SEQ ID NO: 443501 - DNA, 30 bp, Artificial Sequence
  Synthetic oligonucleotide
acacattcggctctacgctgtctaggtcga

SEQ ID NO: 443502 - DNA, 30 bp, Artificial Sequence
  Synthetic oligonucleotide
aaagatgttcgcggcaatccgttaggtcga

SEQ ID NO: 443503 - DNA, 30 bp, Artificial Sequence
  Synthetic oligonucleotide
tggtgcttaccagtgctgtggcacggtcga

SEQ ID NO: 443504 - DNA, 30 bp, Artificial Sequence
  Synthetic oligonucleotide
ttctgaagctaagcaatctttcacggtcga

SEQ ID NO: 443505 - DNA, 29 bp, Artificial Sequence
  Synthetic oligonucleotide
gacctccgatcgatcatccgtgcggtcga

SEQ ID NO: 443506 - DNA, 30 bp, Artificial Sequence
  Synthetic oligonucleotide
aaggtctcatacgcggcgcacggatgtcga

SEQ ID NO: 443507 - DNA, 30 bp, Artificial Sequence
  Synthetic oligonucleotide
ggatttatcgaacgtgcgttcggatgtcga

SEQ ID NO: 443508 - DNA, 30 bp, Artificial Sequence
  Synthetic oligonucleotide
ttaatacattgtcaccataggtgatgtcga

SEQ ID NO: 443509 - DNA, 30 bp, Artificial Sequence
  Synthetic oligonucleotide
tgttttactcagggctggaaagactgtcga

SEQ ID NO: 443510 - DNA, 30 bp, Artificial Sequence
  Synthetic oligonucleotide
tcagaaaacctacccattacgcacattcga

SEQ ID NO: 443511 - DNA, 30 bp, Artificial Sequence
  Synthetic oligonucleotide
ctattattgataacacgccaacgcattcga

SEQ ID NO: 443512 - DNA, 30 bp, Artificial Sequence
  Synthetic oligonucleotide
gtacacgccctctatcaaagtactattcga

SEQ ID NO: 443513 - DNA, 30 bp, Artificial Sequence
  Synthetic oligonucleotide
attccttttcgctcggacgtgatacttcga

SEQ ID NO: 443514 - DNA, 30 bp, Artificial Sequence
  Synthetic oligonucleotide
agcaaattttttgagccgcgacgagttcga

SEQ ID NO: 443515 - DNA, 30 bp, Artificial Sequence
  Synthetic oligonucleotide
acaggcaccctccttttattattagttcga

SEQ ID NO: 443516 - DNA, 30 bp, Artificial Sequence
  Synthetic oligonucleotide
atatgagtggtttacatagtcttagttcga

SEQ ID NO: 443517 - DNA, 30 bp, Artificial Sequence
  Synthetic oligonucleotide
tttggcgttccgcttacatgtagcgttcga

SEQ ID NO: 443518 - DNA, 30 bp, Artificial Sequence
  Synthetic oligonucleotide
gtgtatagtgggaccaggtcgggcgttcga

SEQ ID NO: 443519 - DNA, 30 bp, Artificial Sequence
  Synthetic oligonucleotide
tctggtgtagttatgacggggtgcgttcga

SEQ ID NO: 443520 - DNA, 30 bp, Artificial Sequence
  Synthetic oligonucleotide
agttgtgttacagctagtgtatgggttcga

SEQ ID NO: 443521 - DNA, 30 bp, Artificial Sequence
  Synthetic oligonucleotide
cttttgagcttgcgtggcaaaatggttcga

SEQ ID NO: 443522 - DNA, 30 bp, Artificial Sequence
  Synthetic oligonucleotide
agatttatcccattatgctctagtgttcga

SEQ ID NO: 443523 - DNA, 29 bp, Artificial Sequence
  Synthetic oligonucleotide
cttctttcgggtggtactgcggtgttcga

SEQ ID NO: 443524 - DNA, 30 bp, Artificial Sequence
  Synthetic oligonucleotide
cgatcgtagcaagaagaataacttgttcga

SEQ ID NO: 443525 - DNA, 30 bp, Artificial Sequence
  Synthetic oligonucleotide
gaaaccccgctaaggttcagcgttgttcga

SEQ ID NO: 443526 - DNA, 30 bp, Artificial Sequence
  Synthetic oligonucleotide
caataagaaggtctatccgggtaatttcga

SEQ ID NO: 443527 - DNA, 30 bp, Artificial Sequence
  Synthetic oligonucleotide
cggggcatctcttacctgcacgcatttcga

SEQ ID NO: 443528 - DNA, 30 bp, Artificial Sequence
  Synthetic oligonucleotide
agagtagagcgcgtatcggcaaattttcga

SEQ ID NO: 443529 - DNA, 30 bp, Artificial Sequence
  Synthetic oligonucleotide
tgaggggatccctttttgaaaacttttcga

SEQ ID NO: 443530 - DNA, 30 bp, Artificial Sequence
  Synthetic oligonucleotide
ttcaatgtgtcgccaattgctacttttcga

SEQ ID NO: 443531 - DNA, 30 bp, Artificial Sequence
  Synthetic oligonucleotide
gttaaggacgagtaaaactccacaaaagga

SEQ ID NO: 443532 - DNA, 30 bp, Artificial Sequence
  Synthetic oligonucleotide
gtatatacttcgcgcaaccatcacaaagga

SEQ ID NO: 443533 - DNA, 30 bp, Artificial Sequence
  Synthetic oligonucleotide
tgctctaacgttcgagaggtatataaagga

SEQ ID NO: 443534 - DNA, 27 bp, Artificial Sequence
  Synthetic oligonucleotide
gtatgcataagcgacttacctaaagga

SEQ ID NO: 443535 - DNA, 30 bp, Artificial Sequence
  Synthetic oligonucleotide
acaacttatatatgggtcttaatacaagga

SEQ ID NO: 443536 - DNA, 30 bp, Artificial Sequence
  Synthetic oligonucleotide
tcgtgggtctgacgtttgcacaggcaagga

SEQ ID NO: 443537 - DNA, 30 bp, Artificial Sequence
  Synthetic oligonucleotide
gcatatctgcacgcaatcgcgttgcaagga

SEQ ID NO: 443538 - DNA, 30 bp, Artificial Sequence
  Synthetic oligonucleotide
tggcaactcctagaaagagattctcaagga

SEQ ID NO: 443539 - DNA, 30 bp, Artificial Sequence
  Synthetic oligonucleotide
aaactcggcgtgcattaaccgacagaagga

SEQ ID NO: 443540 - DNA, 30 bp, Artificial Sequence
  Synthetic oligonucleotide
tattggatgactttgaattcacacgaagga

SEQ ID NO: 443541 - DNA, 30 bp, Artificial Sequence
  Synthetic oligonucleotide
gatcttacatcggccacgctttaggaagga

SEQ ID NO: 443542 - DNA, 30 bp, Artificial Sequence
  Synthetic oligonucleotide
tttgcaagtggactggccattagggaagga

SEQ ID NO: 443543 - DNA, 30 bp, Artificial Sequence
  Synthetic oligonucleotide
aggacgcatatataggggggttgggaagga

SEQ ID NO: 443544 - DNA, 30 bp, Artificial Sequence
  Synthetic oligonucleotide
cccctggtagactacggggctttggaagga

SEQ ID NO: 443545 - DNA, 30 bp, Artificial Sequence
  Synthetic oligonucleotide
tactggggacttataagtattgatgaagga

SEQ ID NO: 443546 - DNA, 30 bp, Artificial Sequence
  Synthetic oligonucleotide
ctgcatcccctcgtgtttcgtggtgaagga

SEQ ID NO: 443547 - DNA, 30 bp, Artificial Sequence
  Synthetic oligonucleotide
cttctacagtcggcgcgggccatataagga

SEQ ID NO: 443548 - DNA, 30 bp, Artificial Sequence
  Synthetic oligonucleotide
caagaacttgagggggtagccttataagga

SEQ ID NO: 443549 - DNA, 30 bp, Artificial Sequence
  Synthetic oligonucleotide
ctttttatcgccatggataaggcctaagga

SEQ ID NO: 443550 - DNA, 30 bp, Artificial Sequence
  Synthetic oligonucleotide
ttatctagggttaacgtcagtgcgtaagga

SEQ ID NO: 443551 - DNA, 30 bp, Artificial Sequence
  Synthetic oligonucleotide
aattaagatttgtaaccaaataggtaagga

SEQ ID NO: 443552 - DNA, 30 bp, Artificial Sequence
  Synthetic oligonucleotide
tgaatttacggctgtaacgattattaagga

SEQ ID NO: 443553 - DNA, 30 bp, Artificial Sequence
  Synthetic oligonucleotide
atcttaagggaatcatatgcggtttaagga

SEQ ID NO: 443554 - DNA, 30 bp, Artificial Sequence
  Synthetic oligonucleotide
gcctccttcgatggggtcatgtaaacagga

SEQ ID NO: 443555 - DNA, 30 bp, Artificial Sequence
  Synthetic oligonucleotide
gtttcgattttcggtgttgccaccacagga

SEQ ID NO: 443556 - DNA, 30 bp, Artificial Sequence
  Synthetic oligonucleotide
tataagtggttatcaaggcggtccacagga

SEQ ID NO: 443557 - DNA, 30 bp, Artificial Sequence
  Synthetic oligonucleotide
gttgtcaacttgtcctcatttcggacagga

SEQ ID NO: 443558 - DNA, 30 bp, Artificial Sequence
  Synthetic oligonucleotide
gttgacgggttctgggttccatatacagga

SEQ ID NO: 443559 - DNA, 30 bp, Artificial Sequence
  Synthetic oligonucleotide
gctgatccgcccatgctgacacgaccagga

SEQ ID NO: 443560 - DNA, 30 bp, Artificial Sequence
  Synthetic oligonucleotide
gtggcaggggttgtggatgtttgaccagga

SEQ ID NO: 443561 - DNA, 30 bp, Artificial Sequence
  Synthetic oligonucleotide
tcggaggggttacacggactctggccagga

SEQ ID NO: 443562 - DNA, 30 bp, Artificial Sequence
  Synthetic oligonucleotide
cagcatcacggtgggtactggagtccagga

SEQ ID NO: 443563 - DNA, 30 bp, Artificial Sequence
  Synthetic oligonucleotide
gcccagctggcctgtttgacaacagcagga

SEQ ID NO: 443564 - DNA, 30 bp, Artificial Sequence
  Synthetic oligonucleotide
gcacccgcggtttcggtacgtacggcagga

SEQ ID NO: 443565 - DNA, 30 bp, Artificial Sequence
  Synthetic oligonucleotide
cggttataccaggcggaagtggcggcagga

SEQ ID NO: 443566 - DNA, 31 bp, Artificial Sequence
  Synthetic oligonucleotide
caagaacgggattcctgcagtctcggcagga

SEQ ID NO: 443567 - DNA, 30 bp, Artificial Sequence
  Synthetic oligonucleotide
gaagatcaggcccgatcttattatgcagga

SEQ ID NO: 443568 - DNA, 30 bp, Artificial Sequence
  Synthetic oligonucleotide
tcggtggccacgtgggatgagtcatcagga

SEQ ID NO: 443569 - DNA, 30 bp, Artificial Sequence
  Synthetic oligonucleotide
attatcaggctgacagtattagcgtcagga

SEQ ID NO: 443570 - DNA, 30 bp, Artificial Sequence
  Synthetic oligonucleotide
gtctgtaacttacgcatgtgggggtcagga

SEQ ID NO: 443571 - DNA, 30 bp, Artificial Sequence
  Synthetic oligonucleotide
gcagctgatagtccgcgggagtattcagga

SEQ ID NO: 443572 - DNA, 30 bp, Artificial Sequence
  Synthetic oligonucleotide
aagctttctgtaaggttaggtatttcagga

SEQ ID NO: 443573 - DNA, 30 bp, Artificial Sequence
  Synthetic oligonucleotide
aaatcggtggggggtcgctcgtacagagga

SEQ ID NO: 443574 - DNA, 30 bp, Artificial Sequence
  Synthetic oligonucleotide
ttatggagcgctccggcatccacgagagga

SEQ ID NO: 443575 - DNA, 30 bp, Artificial Sequence
  Synthetic oligonucleotide
gccccatatgattgggcaacgcggagagga

SEQ ID NO: 443576 - DNA, 30 bp, Artificial Sequence
  Synthetic oligonucleotide
aaggctgcctttgaggctatatggagagga

SEQ ID NO: 443577 - DNA, 30 bp, Artificial Sequence
  Synthetic oligonucleotide
ttacagtaccctgagtattcctatagagga

SEQ ID NO: 443578 - DNA, 30 bp, Artificial Sequence
  Synthetic oligonucleotide
cccattgctgaaaacgtcagacctagagga

SEQ ID NO: 443579 - DNA, 30 bp, Artificial Sequence
  Synthetic oligonucleotide
agcaaacagtggtataaagatcgtagagga

SEQ ID NO: 443580 - DNA, 30 bp, Artificial Sequence
  Synthetic oligonucleotide
gtctctttttgttgcccgaaatagcgagga

SEQ ID NO: 443581 - DNA, 30 bp, Artificial Sequence
  Synthetic oligonucleotide
acggccacggccataattacccggcgagga

SEQ ID NO: 443582 - DNA, 30 bp, Artificial Sequence
  Synthetic oligonucleotide
ctttcccgcaaaatcatctacgatcgagga

SEQ ID NO: 443583 - DNA, 30 bp, Artificial Sequence
  Synthetic oligonucleotide
tgaccgaacctttaataggatggaggagga

SEQ ID NO: 443584 - DNA, 30 bp, Artificial Sequence
  Synthetic oligonucleotide
cttacgagtgtgaagagggggataggagga

SEQ ID NO: 443585 - DNA, 30 bp, Artificial Sequence
  Synthetic oligonucleotide
gcagcctcgatagtacttgtacacggagga

SEQ ID NO: 443586 - DNA, 30 bp, Artificial Sequence
  Synthetic oligonucleotide
tatatgtccggcttccggacgcagggagga

SEQ ID NO: 443587 - DNA, 30 bp, Artificial Sequence
  Synthetic oligonucleotide
aatttaaatacacgggatgactagggagga

SEQ ID NO: 443588 - DNA, 30 bp, Artificial Sequence
  Synthetic oligonucleotide
gaggatcctcttcactttccaagtggagga

SEQ ID NO: 443589 - DNA, 29 bp, Artificial Sequence
  Synthetic oligonucleotide
tctaaaaatcgaagagggccggtggagga

SEQ ID NO: 443590 - DNA, 30 bp, Artificial Sequence
  Synthetic oligonucleotide
gagggaggcatgctcaggtggaaatgagga

SEQ ID NO: 443591 - DNA, 31 bp, Artificial Sequence
  Synthetic oligonucleotide
ggactacagcaggtttgagaattcatgagga

SEQ ID NO: 443592 - DNA, 30 bp, Artificial Sequence
  Synthetic oligonucleotide
tcgtgcctatatagttttagaagatgagga

SEQ ID NO: 443593 - DNA, 30 bp, Artificial Sequence
  Synthetic oligonucleotide
ttaaatactcgcccgaccctgggatgagga

SEQ ID NO: 443594 - DNA, 30 bp, Artificial Sequence
  Synthetic oligonucleotide
gctcgatagtatccagactcgacgtgagga

SEQ ID NO: 443595 - DNA, 30 bp, Artificial Sequence
  Synthetic oligonucleotide
tgataccttggttcccatagcatgtgagga

SEQ ID NO: 443596 - DNA, 30 bp, Artificial Sequence
  Synthetic oligonucleotide
cctccgatggaatcatccgcggattgagga

SEQ ID NO: 443597 - DNA, 30 bp, Artificial Sequence
  Synthetic oligonucleotide
ttcataggctgcccgacctatgaaatagga

SEQ ID NO: 443598 - DNA, 30 bp, Artificial Sequence
  Synthetic oligonucleotide
gtgcactctttcctgtcgtcggcaatagga

SEQ ID NO: 443599 - DNA, 30 bp, Artificial Sequence
  Synthetic oligonucleotide
tagatgctgaattaatcagtggcaatagga

SEQ ID NO: 443600 - DNA, 30 bp, Artificial Sequence
  Synthetic oligonucleotide
gccgtacgtttgttaacgaatctaatagga

SEQ ID NO: 443601 - DNA, 30 bp, Artificial Sequence
  Synthetic oligonucleotide
ccaggaccgggacccggctcctacatagga

SEQ ID NO: 443602 - DNA, 30 bp, Artificial Sequence
  Synthetic oligonucleotide
acatcgctggttcttaaatattacatagga

SEQ ID NO: 443603 - DNA, 30 bp, Artificial Sequence
  Synthetic oligonucleotide
ggcatccctgagagcacctcacccatagga

SEQ ID NO: 443604 - DNA, 30 bp, Artificial Sequence
  Synthetic oligonucleotide
tgggcgttccggtgacacagtggcatagga

SEQ ID NO: 443605 - DNA, 30 bp, Artificial Sequence
  Synthetic oligonucleotide
ttttacgtgtacaagggcctgccgatagga

SEQ ID NO: 443606 - DNA, 30 bp, Artificial Sequence
  Synthetic oligonucleotide
ctttttctgagatgagagtcacatatagga

SEQ ID NO: 443607 - DNA, 30 bp, Artificial Sequence
  Synthetic oligonucleotide
cagctgtgaaagagctgtaagcatatagga

SEQ ID NO: 443608 - DNA, 30 bp, Artificial Sequence
  Synthetic oligonucleotide
ggaacgtgtatactcactggaattatagga

SEQ ID NO: 443609 - DNA, 30 bp, Artificial Sequence
  Synthetic oligonucleotide
tatccttgtttccgtaaggtctttatagga

SEQ ID NO: 443610 - DNA, 30 bp, Artificial Sequence
  Synthetic oligonucleotide
gaagtttttctgctacaaccgagactagga

SEQ ID NO: 443611 - DNA, 30 bp, Artificial Sequence
  Synthetic oligonucleotide
atttggtagcgtttggtgcgtcgactagga

SEQ ID NO: 443612 - DNA, 30 bp, Artificial Sequence
  Synthetic oligonucleotide
ttcactccggggggttgacctatcctagga

SEQ ID NO: 443613 - DNA, 30 bp, Artificial Sequence
  Synthetic oligonucleotide
aggtctatcaaaatttaggtagtcctagga

SEQ ID NO: 443614 - DNA, 30 bp, Artificial Sequence
  Synthetic oligonucleotide
ccaacatgcaggcatcgtttggtcctagga

SEQ ID NO: 443615 - DNA, 30 bp, Artificial Sequence
  Synthetic oligonucleotide
ttttggtttgatcacgtggttgtcctagga

SEQ ID NO: 443616 - DNA, 30 bp, Artificial Sequence
  Synthetic oligonucleotide
aaaactagatctcacagggggaggctagga

SEQ ID NO: 443617 - DNA, 30 bp, Artificial Sequence
  Synthetic oligonucleotide
ttacagtaataactttgaggcgctctagga

SEQ ID NO: 443618 - DNA, 30 bp, Artificial Sequence
  Synthetic oligonucleotide
aggtcggggttcaatcgcaactgagtagga

SEQ ID NO: 443619 - DNA, 30 bp, Artificial Sequence
  Synthetic oligonucleotide
attacatatttagcatcatataacgtagga

SEQ ID NO: 443620 - DNA, 30 bp, Artificial Sequence
  Synthetic oligonucleotide
aaaaatatcgaggtgcaatcaatcgtagga

SEQ ID NO: 443621 - DNA, 30 bp, Artificial Sequence
  Synthetic oligonucleotide
tgtacacccattaataactcggcggtagga

SEQ ID NO: 443622 - DNA, 30 bp, Artificial Sequence
  Synthetic oligonucleotide
agcaatttccggcccctcttctacttagga

SEQ ID NO: 443623 - DNA, 30 bp, Artificial Sequence
  Synthetic oligonucleotide
agaataatggtaaacacaagcatcttagga

SEQ ID NO: 443624 - DNA, 30 bp, Artificial Sequence
  Synthetic oligonucleotide
gagtgcctaacataaaatatattgttagga

SEQ ID NO: 443625 - DNA, 30 bp, Artificial Sequence
  Synthetic oligonucleotide
aaagaattgccttgttccgtacttttagga

SEQ ID NO: 443626 - DNA, 30 bp, Artificial Sequence
  Synthetic oligonucleotide
tctgactcggcaattctagaccacaacgga

SEQ ID NO: 443627 - DNA, 30 bp, Artificial Sequence
  Synthetic oligonucleotide
gcgaccccaaacaagacctctaagaacgga

SEQ ID NO: 443628 - DNA, 30 bp, Artificial Sequence
  Synthetic oligonucleotide
tttttaagggtaaactagattggtaacgga

SEQ ID NO: 443629 - DNA, 30 bp, Artificial Sequence
  Synthetic oligonucleotide
tgcccattctttattgtggaacaccacgga

SEQ ID NO: 443630 - DNA, 30 bp, Artificial Sequence
  Synthetic oligonucleotide
ttggtactcagtgggatccaagtccacgga

SEQ ID NO: 443631 - DNA, 30 bp, Artificial Sequence
  Synthetic oligonucleotide
gcagaacctcgtatggatgcaatgcacgga

SEQ ID NO: 443632 - DNA, 30 bp, Artificial Sequence
  Synthetic oligonucleotide
gatgtaacgttaaatatcatccttcacgga

SEQ ID NO: 443633 - DNA, 30 bp, Artificial Sequence
  Synthetic oligonucleotide
acagagctgcatgtgtactaggaagacgga

SEQ ID NO: 443634 - DNA, 30 bp, Artificial Sequence
  Synthetic oligonucleotide
ctttaccttacttgtagagaataagacgga

SEQ ID NO: 443635 - DNA, 30 bp, Artificial Sequence
  Synthetic oligonucleotide
ggttaggtcgctttacgtatggcagacgga

SEQ ID NO: 443636 - DNA, 30 bp, Artificial Sequence
  Synthetic oligonucleotide
cgcgggttcctagggagatcacgcgacgga

SEQ ID NO: 443637 - DNA, 30 bp, Artificial Sequence
  Synthetic oligonucleotide
ttgcccctgcttttcgtgacgttggacgga

SEQ ID NO: 443638 - DNA, 30 bp, Artificial Sequence
  Synthetic oligonucleotide
tttccacgagtggattgcacaaatgacgga

SEQ ID NO: 443639 - DNA, 30 bp, Artificial Sequence
  Synthetic oligonucleotide
ctcacataattcaaaggtaatggatacgga

SEQ ID NO: 443640 - DNA, 30 bp, Artificial Sequence
  Synthetic oligonucleotide
aggctaattgggtattgcggattgtacgga

SEQ ID NO: 443641 - DNA, 30 bp, Artificial Sequence
  Synthetic oligonucleotide
caaacggattttataaacacaccttacgga

SEQ ID NO: 443642 - DNA, 30 bp, Artificial Sequence
  Synthetic oligonucleotide
gtcctaagggaggtttagcggccttacgga

SEQ ID NO: 443643 - DNA, 30 bp, Artificial Sequence
  Synthetic oligonucleotide
ttggcgcagtaatggtggatctaaaccgga

SEQ ID NO: 443644 - DNA, 30 bp, Artificial Sequence
  Synthetic oligonucleotide
atgccccatatgagacactatgtaaccgga

SEQ ID NO: 443645 - DNA, 30 bp, Artificial Sequence
  Synthetic oligonucleotide
atctagccttgtaaacaaagcctcaccgga

SEQ ID NO: 443646 - DNA, 30 bp, Artificial Sequence
  Synthetic oligonucleotide
caatgtgcgggggtgttactttataccgga

SEQ ID NO: 443647 - DNA, 30 bp, Artificial Sequence
  Synthetic oligonucleotide
gagcctcaaccgtgggaccctgctaccgga

SEQ ID NO: 443648 - DNA, 30 bp, Artificial Sequence
  Synthetic oligonucleotide
ggttcctcgatttgcgaataggaacccgga

SEQ ID NO: 443649 - DNA, 30 bp, Artificial Sequence
  Synthetic oligonucleotide
ggaatgcattcaaaatgtcaaagccccgga

SEQ ID NO: 443650 - DNA, 30 bp, Artificial Sequence
  Synthetic oligonucleotide
gggggacacacgagataacgggtccccgga

SEQ ID NO: 443651 - DNA, 30 bp, Artificial Sequence
  Synthetic oligonucleotide
caccagaggaatagtctcgacccgcccgga

SEQ ID NO: 443652 - DNA, 30 bp, Artificial Sequence
  Synthetic oligonucleotide
aaaatgaacgatgcatactgtgggcccgga

SEQ ID NO: 443653 - DNA, 30 bp, Artificial Sequence
  Synthetic oligonucleotide
acggcttagccttttgaacggcaagccgga

SEQ ID NO: 443654 - DNA, 30 bp, Artificial Sequence
  Synthetic oligonucleotide
gcgcagcacttatccggaaaggaagccgga

SEQ ID NO: 443655 - DNA, 30 bp, Artificial Sequence
  Synthetic oligonucleotide
ccggagagtctctcacgagactccgccgga

SEQ ID NO: 443656 - DNA, 30 bp, Artificial Sequence
  Synthetic oligonucleotide
gaagcatcggctaacttccggtcggccgga

SEQ ID NO: 443657 - DNA, 30 bp, Artificial Sequence
  Synthetic oligonucleotide
ccggcgttttcttgtgaaagttatgccgga

SEQ ID NO: 443658 - DNA, 30 bp, Artificial Sequence
  Synthetic oligonucleotide
gtacgatgtgagagtacgtgcgtctccgga

SEQ ID NO: 443659 - DNA, 30 bp, Artificial Sequence
  Synthetic oligonucleotide
atcttaacgtgcttctcgcgacggtccgga

SEQ ID NO: 443660 - DNA, 30 bp, Artificial Sequence
  Synthetic oligonucleotide
accattattcaatcgctcgggtgttccgga

SEQ ID NO: 443661 - DNA, 30 bp, Artificial Sequence
  Synthetic oligonucleotide
cgcaggtacgtggcagtaccgatttccgga

SEQ ID NO: 443662 - DNA, 30 bp, Artificial Sequence
  Synthetic oligonucleotide
gtccatattattcacaaaggtgcaagcgga

SEQ ID NO: 443663 - DNA, 30 bp, Artificial Sequence
  Synthetic oligonucleotide
atatactctacccaggggaattggagcgga

SEQ ID NO: 443664 - DNA, 30 bp, Artificial Sequence
  Synthetic oligonucleotide
tgatagagttttttgtgcttggtgagcgga

SEQ ID NO: 443665 - DNA, 30 bp, Artificial Sequence
  Synthetic oligonucleotide
cggcaacctaacctcggtaagtctagcgga

SEQ ID NO: 443666 - DNA, 30 bp, Artificial Sequence
  Synthetic oligonucleotide
tgtaatgcccggcatattacgcaacgcgga

SEQ ID NO: 443667 - DNA, 30 bp, Artificial Sequence
  Synthetic oligonucleotide
tgtgggagattttacgttctagagcgcgga

SEQ ID NO: 443668 - DNA, 30 bp, Artificial Sequence
  Synthetic oligonucleotide
tggatggggtatcctgggttatagcgcgga

SEQ ID NO: 443669 - DNA, 30 bp, Artificial Sequence
  Synthetic oligonucleotide
ataatggttttaagtaatccttagcgcgga

SEQ ID NO: 443670 - DNA, 30 bp, Artificial Sequence
  Synthetic oligonucleotide
ttgaacattggagtggtctttgatcgcgga

SEQ ID NO: 443671 - DNA, 30 bp, Artificial Sequence
  Synthetic oligonucleotide
tagttttatggcgctgcaaggagcggcgga

SEQ ID NO: 443672 - DNA, 31 bp, Artificial Sequence
  Synthetic oligonucleotide
gattacaggcgttgttcgaggatggggcgga

SEQ ID NO: 443673 - DNA, 30 bp, Artificial Sequence
  Synthetic oligonucleotide
gtcagtgtgcgcccctcgttctctggcgga

SEQ ID NO: 443674 - DNA, 30 bp, Artificial Sequence
  Synthetic oligonucleotide
ggggccatatatcccccccctgactgcgga

SEQ ID NO: 443675 - DNA, 30 bp, Artificial Sequence
  Synthetic oligonucleotide
gaatatctattcactacaatcacctgcgga

SEQ ID NO: 443676 - DNA, 30 bp, Artificial Sequence
  Synthetic oligonucleotide
aacggagcgcggtacgcggactcgtgcgga

SEQ ID NO: 443677 - DNA, 30 bp, Artificial Sequence
  Synthetic oligonucleotide
tgcttagtttcactaggcatatattgcgga

SEQ ID NO: 443678 - DNA, 30 bp, Artificial Sequence
  Synthetic oligonucleotide
tcatgattatttttcgcacattattgcgga

SEQ ID NO: 443679 - DNA, 30 bp, Artificial Sequence
  Synthetic oligonucleotide
aacagtgtatgtacgttcacacgttgcgga

SEQ ID NO: 443680 - DNA, 30 bp, Artificial Sequence
  Synthetic oligonucleotide
atagaagtctggcatccgcctgtaatcgga

SEQ ID NO: 443681 - DNA, 30 bp, Artificial Sequence
  Synthetic oligonucleotide
ttactaatggtcgttctgtatcagatcgga

SEQ ID NO: 443682 - DNA, 30 bp, Artificial Sequence
  Synthetic oligonucleotide
atcaaagtcctagctatcactctgatcgga

SEQ ID NO: 443683 - DNA, 30 bp, Artificial Sequence
  Synthetic oligonucleotide
agtgtttacgttcaagattagcctatcgga

SEQ ID NO: 443684 - DNA, 30 bp, Artificial Sequence
  Synthetic oligonucleotide
gaacacctctgaaggcgaccatgcctcgga

SEQ ID NO: 443685 - DNA, 30 bp, Artificial Sequence
  Synthetic oligonucleotide
ctttataagccggtattattcgagctcgga

SEQ ID NO: 443686 - DNA, 30 bp, Artificial Sequence
  Synthetic oligonucleotide
cagttagaatggagaccgtacaggctcgga

SEQ ID NO: 443687 - DNA, 30 bp, Artificial Sequence
  Synthetic oligonucleotide
tgccgccgttgtaagttcaacgggctcgga

SEQ ID NO: 443688 - DNA, 30 bp, Artificial Sequence
  Synthetic oligonucleotide
cacgcctgcccgcggcggacgtatctcgga

SEQ ID NO: 443689 - DNA, 30 bp, Artificial Sequence
  Synthetic oligonucleotide
ctccaggagaagaagtgcctaattctcgga

SEQ ID NO: 443690 - DNA, 30 bp, Artificial Sequence
  Synthetic oligonucleotide
ctcctgacaggagggacatgcattctcgga

SEQ ID NO: 443691 - DNA, 30 bp, Artificial Sequence
  Synthetic oligonucleotide
tgttcgtgacagggggccacggttctcgga

SEQ ID NO: 443692 - DNA, 30 bp, Artificial Sequence
  Synthetic oligonucleotide
ctatcacatttaggatagccgtttctcgga

SEQ ID NO: 443693 - DNA, 29 bp, Artificial Sequence
  Synthetic oligonucleotide
cgtctgctcctttcaaaggagccgtcgga

SEQ ID NO: 443694 - DNA, 30 bp, Artificial Sequence
  Synthetic oligonucleotide
catcaatgactatttaaacctatggtcgga

SEQ ID NO: 443695 - DNA, 30 bp, Artificial Sequence
  Synthetic oligonucleotide
gagtggagtgcctcatatagcgatgtcgga

SEQ ID NO: 443696 - DNA, 30 bp, Artificial Sequence
  Synthetic oligonucleotide
cgacatcgtcattgcagctcgctcttcgga

SEQ ID NO: 443697 - DNA, 30 bp, Artificial Sequence
  Synthetic oligonucleotide
gtcactaacccttagtaatcagcgttcgga

SEQ ID NO: 443698 - DNA, 30 bp, Artificial Sequence
  Synthetic oligonucleotide
tcacttggcgtatgcattgtgctgttcgga

SEQ ID NO: 443699 - DNA, 30 bp, Artificial Sequence
  Synthetic oligonucleotide
aaatatctgacttatctaggttatttcgga

SEQ ID NO: 443700 - DNA, 30 bp, Artificial Sequence
  Synthetic oligonucleotide
ctgatcccataagtgccatagagtttcgga

SEQ ID NO: 443701 - DNA, 30 bp, Artificial Sequence
  Synthetic oligonucleotide
acttccccttgcaagacgtgttacaaggga

SEQ ID NO: 443702 - DNA, 30 bp, Artificial Sequence
  Synthetic oligonucleotide
gaccgaccgccttttccgtggcgcaaggga

SEQ ID NO: 443703 - DNA, 30 bp, Artificial Sequence
  Synthetic oligonucleotide
cagtcattgcgggtgaatactcagaaggga

SEQ ID NO: 443704 - DNA, 30 bp, Artificial Sequence
  Synthetic oligonucleotide
tattgacattgtatggtctctggacaggga

SEQ ID NO: 443705 - DNA, 30 bp, Artificial Sequence
  Synthetic oligonucleotide
aaccttgctggtggtctgcttttacaggga

SEQ ID NO: 443706 - DNA, 30 bp, Artificial Sequence
  Synthetic oligonucleotide
tttgaaactgctctgccgctcgctcaggga

SEQ ID NO: 443707 - DNA, 30 bp, Artificial Sequence
  Synthetic oligonucleotide
agtggttgccaatccctgcttggtcaggga

SEQ ID NO: 443708 - DNA, 30 bp, Artificial Sequence
  Synthetic oligonucleotide
tgacttcacgtatgctgaagatgtcaggga

SEQ ID NO: 443709 - DNA, 30 bp, Artificial Sequence
  Synthetic oligonucleotide
gaaatctttaggatattaattgttcaggga

SEQ ID NO: 443710 - DNA, 30 bp, Artificial Sequence
  Synthetic oligonucleotide
gaatccataagaaagaactagtttcaggga

SEQ ID NO: 443711 - DNA, 30 bp, Artificial Sequence
  Synthetic oligonucleotide
agtcgggtttactgactcgttcgagaggga

SEQ ID NO: 443712 - DNA, 30 bp, Artificial Sequence
  Synthetic oligonucleotide
ccactatttatttagttccccgacgaggga

SEQ ID NO: 443713 - DNA, 30 bp, Artificial Sequence
  Synthetic oligonucleotide
aacgggaaatgggtatcacagtccgaggga

SEQ ID NO: 443714 - DNA, 30 bp, Artificial Sequence
  Synthetic oligonucleotide
aagggtatcttgcgcagcactcgcgaggga

SEQ ID NO: 443715 - DNA, 30 bp, Artificial Sequence
  Synthetic oligonucleotide
gtccattgcgcctgatttacgctcgaggga

SEQ ID NO: 443716 - DNA, 30 bp, Artificial Sequence
  Synthetic oligonucleotide
actcctcgggtttatgatcagcgggaggga

SEQ ID NO: 443717 - DNA, 30 bp, Artificial Sequence
  Synthetic oligonucleotide
tctattatcttcctgagacctcaataggga

SEQ ID NO: 443718 - DNA, 30 bp, Artificial Sequence
  Synthetic oligonucleotide
gagtgagatcaagacgctatcgaataggga

SEQ ID NO: 443719 - DNA, 30 bp, Artificial Sequence
  Synthetic oligonucleotide
tgtataaccttcggccttccgctataggga

SEQ ID NO: 443720 - DNA, 30 bp, Artificial Sequence
  Synthetic oligonucleotide
gagctgcatgatgccagttgaaagtaggga

SEQ ID NO: 443721 - DNA, 30 bp, Artificial Sequence
  Synthetic oligonucleotide
ttttggggattgccagtgacatagtaggga

SEQ ID NO: 443722 - DNA, 30 bp, Artificial Sequence
  Synthetic oligonucleotide
acgcaccttgatatgatgatcggttaggga

SEQ ID NO: 443723 - DNA, 30 bp, Artificial Sequence
  Synthetic oligonucleotide
tccctgtataataaattctcgggaacggga

SEQ ID NO: 443724 - DNA, 30 bp, Artificial Sequence
  Synthetic oligonucleotide
gtcacccacggtttgcaggatcagacggga

SEQ ID NO: 443725 - DNA, 30 bp, Artificial Sequence
  Synthetic oligonucleotide
taatatctatctaacttcaggcctacggga

SEQ ID NO: 443726 - DNA, 30 bp, Artificial Sequence
  Synthetic oligonucleotide
accgggaccttcttaagctgaagtacggga

SEQ ID NO: 443727 - DNA, 30 bp, Artificial Sequence
  Synthetic oligonucleotide
tagtcggtgtaatggagttatcttacggga

SEQ ID NO: 443728 - DNA, 30 bp, Artificial Sequence
  Synthetic oligonucleotide
cctgaaagggtacataggcctgccccggga

SEQ ID NO: 443729 - DNA, 30 bp, Artificial Sequence
  Synthetic oligonucleotide
tcgttcgcacactcgtccgcacgcccggga

SEQ ID NO: 443730 - DNA, 30 bp, Artificial Sequence
  Synthetic oligonucleotide
acggtccgaatcagtatatgggagccggga

SEQ ID NO: 443731 - DNA, 30 bp, Artificial Sequence
  Synthetic oligonucleotide
agagttataataccagtaatgtacgcggga

SEQ ID NO: 443732 - DNA, 30 bp, Artificial Sequence
  Synthetic oligonucleotide
cagcctgcgctagcggagcctaccgcggga

SEQ ID NO: 443733 - DNA, 30 bp, Artificial Sequence
  Synthetic oligonucleotide
tggaaaatgcccactgagcatgccgcggga

SEQ ID NO: 443734 - DNA, 30 bp, Artificial Sequence
  Synthetic oligonucleotide
ctgtacttgtgtaggtacaatttcgcggga

SEQ ID NO: 443735 - DNA, 30 bp, Artificial Sequence
  Synthetic oligonucleotide
cggcgtgggagtacagtatgcggggcggga

SEQ ID NO: 443736 - DNA, 30 bp, Artificial Sequence
  Synthetic oligonucleotide
tcgcggaaaagtcaatattttgatgcggga

SEQ ID NO: 443737 - DNA, 30 bp, Artificial Sequence
  Synthetic oligonucleotide
aaatcgcaagtgccacttcgacttgcggga

SEQ ID NO: 443738 - DNA, 30 bp, Artificial Sequence
  Synthetic oligonucleotide
gcttacgtagatttcagctgtcttgcggga

SEQ ID NO: 443739 - DNA, 30 bp, Artificial Sequence
  Synthetic oligonucleotide
tgacctcagcatgtctcactaaagtcggga

SEQ ID NO: 443740 - DNA, 30 bp, Artificial Sequence
  Synthetic oligonucleotide
ccagtcttcctaactctcgatgcttcggga

SEQ ID NO: 443741 - DNA, 30 bp, Artificial Sequence
  Synthetic oligonucleotide
ttattgagggctatcacgtgttcaagggga

SEQ ID NO: 443742 - DNA, 30 bp, Artificial Sequence
  Synthetic oligonucleotide
tacgcaatatcggttaatctttcaagggga

SEQ ID NO: 443743 - DNA, 30 bp, Artificial Sequence
  Synthetic oligonucleotide
gatcgcgtcgcctgaactcagttaagggga

SEQ ID NO: 443744 - DNA, 30 bp, Artificial Sequence
  Synthetic oligonucleotide
cccagctatgtattttccgcactcagggga

SEQ ID NO: 443745 - DNA, 30 bp, Artificial Sequence
  Synthetic oligonucleotide
tggagtacaccgtcagaggcaactagggga

SEQ ID NO: 443746 - DNA, 30 bp, Artificial Sequence
  Synthetic oligonucleotide
agttaagatcccgtggtatcccaacgggga

SEQ ID NO: 443747 - DNA, 30 bp, Artificial Sequence
  Synthetic oligonucleotide
cccaggttaaagagtgccagtcgacgggga

SEQ ID NO: 443748 - DNA, 30 bp, Artificial Sequence
  Synthetic oligonucleotide
gaaatatccagtgtaactttgacgcgggga

SEQ ID NO: 443749 - DNA, 30 bp, Artificial Sequence
  Synthetic oligonucleotide
ccccgtgtactctatggcgtcttgcgggga

SEQ ID NO: 443750 - DNA, 30 bp, Artificial Sequence
  Synthetic oligonucleotide
gtacgatgatcgccacgcaggtgaggggga

SEQ ID NO: 443751 - DNA, 40 bp, Artificial Sequence
  Synthetic oligonucleotide
aagataatacattcatggtatggtcggggatccgggggga

SEQ ID NO: 443752 - DNA, 30 bp, Artificial Sequence
  Synthetic oligonucleotide
acccgaaaggtcgtctcggtttcgggggga

SEQ ID NO: 443753 - DNA, 40 bp, Artificial Sequence
  Synthetic oligonucleotide
aagataatacattcatggcatggtcggggatcggggggga

SEQ ID NO: 443754 - DNA, 40 bp, Artificial Sequence
  Synthetic oligonucleotide
aagataatacattgatggtatggtcggggatcggggggga

SEQ ID NO: 443755 - DNA, 40 bp, Artificial Sequence
  Synthetic oligonucleotide
aagataatacatttatggtatggtcggggatcggggggga

SEQ ID NO: 443756 - DNA, 30 bp, Artificial Sequence
  Synthetic oligonucleotide
tacgaaagctttagactcaacgttggggga

SEQ ID NO: 443757 - DNA, 30 bp, Artificial Sequence
  Synthetic oligonucleotide
tggctgaaagcgacatctttatttggggga

SEQ ID NO: 443758 - DNA, 30 bp, Artificial Sequence
  Synthetic oligonucleotide
ggtgagccctagaaccacagccaatgggga

SEQ ID NO: 443759 - DNA, 30 bp, Artificial Sequence
  Synthetic oligonucleotide
gtcggttacaagaactatgtaggatgggga

SEQ ID NO: 443760 - DNA, 30 bp, Artificial Sequence
  Synthetic oligonucleotide
aataccacaataaaacatggaatatgggga

SEQ ID NO: 443761 - DNA, 30 bp, Artificial Sequence
  Synthetic oligonucleotide
gggtcggggcggcaaaggggcatatgggga

SEQ ID NO: 443762 - DNA, 30 bp, Artificial Sequence
  Synthetic oligonucleotide
agtaattgtggatatcgtatgatctgggga

SEQ ID NO: 443763 - DNA, 30 bp, Artificial Sequence
  Synthetic oligonucleotide
gttggcggataaggggtagttgcgtgggga

SEQ ID NO: 443764 - DNA, 30 bp, Artificial Sequence
  Synthetic oligonucleotide
cagatagggagggacccacgtaggtgggga

SEQ ID NO: 443765 - DNA, 30 bp, Artificial Sequence
  Synthetic oligonucleotide
gttttactcaagtttaggacgatttgggga

SEQ ID NO: 443766 - DNA, 30 bp, Artificial Sequence
  Synthetic oligonucleotide
gtactccggttcagaatttcataaatggga

SEQ ID NO: 443767 - DNA, 30 bp, Artificial Sequence
  Synthetic oligonucleotide
gctactttgaggctgcgaagtagaatggga

SEQ ID NO: 443768 - DNA, 30 bp, Artificial Sequence
  Synthetic oligonucleotide
cgggagttttttcagaaacctgtaatggga

SEQ ID NO: 443769 - DNA, 30 bp, Artificial Sequence
  Synthetic oligonucleotide
cgcatcttttgtcccacaccttcgatggga

SEQ ID NO: 443770 - DNA, 30 bp, Artificial Sequence
  Synthetic oligonucleotide
tagtagcgcgtcaggactcgacgtatggga

SEQ ID NO: 443771 - DNA, 30 bp, Artificial Sequence
  Synthetic oligonucleotide
ctgagccctcagtgggtccccggtatggga

SEQ ID NO: 443772 - DNA, 30 bp, Artificial Sequence
  Synthetic oligonucleotide
gcgactgctaatcacagggacacactggga

SEQ ID NO: 443773 - DNA, 30 bp, Artificial Sequence
  Synthetic oligonucleotide
agttctaatagtctatgcaggacactggga

SEQ ID NO: 443774 - DNA, 30 bp, Artificial Sequence
  Synthetic oligonucleotide
acttattaaaggagctaaaatacactggga

SEQ ID NO: 443775 - DNA, 30 bp, Artificial Sequence
  Synthetic oligonucleotide
aatagtctatattgaacgtacgccctggga

SEQ ID NO: 443776 - DNA, 30 bp, Artificial Sequence
  Synthetic oligonucleotide
tcgccgcgatctcattaggattcgctggga

SEQ ID NO: 443777 - DNA, 30 bp, Artificial Sequence
  Synthetic oligonucleotide
gctttcatgcgagatagcgagcatctggga

SEQ ID NO: 443778 - DNA, 30 bp, Artificial Sequence
  Synthetic oligonucleotide
tatcgggccggtcatagcataattctggga

SEQ ID NO: 443779 - DNA, 30 bp, Artificial Sequence
  Synthetic oligonucleotide
gaatcatgagcagcgggtagcctagtggga

SEQ ID NO: 443780 - DNA, 30 bp, Artificial Sequence
  Synthetic oligonucleotide
taagatgccgggggcggggtggtagtggga

SEQ ID NO: 443781 - DNA, 30 bp, Artificial Sequence
  Synthetic oligonucleotide
agatgggatatgtccactagccacgtggga

SEQ ID NO: 443782 - DNA, 30 bp, Artificial Sequence
  Synthetic oligonucleotide
gtggccgggactgggcccgccctcgtggga

SEQ ID NO: 443783 - DNA, 30 bp, Artificial Sequence
  Synthetic oligonucleotide
ttggtatattagcgcatacccgttgtggga

SEQ ID NO: 443784 - DNA, 30 bp, Artificial Sequence
  Synthetic oligonucleotide
actgatgattctatgacgttaaaattggga

SEQ ID NO: 443785 - DNA, 30 bp, Artificial Sequence
  Synthetic oligonucleotide
attgggagctttaattgtgagcaattggga

SEQ ID NO: 443786 - DNA, 30 bp, Artificial Sequence
  Synthetic oligonucleotide
agctagaggcaagaggcttttggattggga

SEQ ID NO: 443787 - DNA, 30 bp, Artificial Sequence
  Synthetic oligonucleotide
cgctttatgccgggctattcgctattggga

SEQ ID NO: 443788 - DNA, 30 bp, Artificial Sequence
  Synthetic oligonucleotide
cgccagggtatcagtgtggttgtattggga

SEQ ID NO: 443789 - DNA, 30 bp, Artificial Sequence
  Synthetic oligonucleotide
atctcacctaacgcagtgtcattattggga

SEQ ID NO: 443790 - DNA, 31 bp, Artificial Sequence
  Synthetic oligonucleotide
atggggagcgcagtaggtgccccccttggga

SEQ ID NO: 443791 - DNA, 30 bp, Artificial Sequence
  Synthetic oligonucleotide
acgtatctaaagccacagatgggcttggga

SEQ ID NO: 443792 - DNA, 30 bp, Artificial Sequence
  Synthetic oligonucleotide
acggtgccaccctatccaacgcagttggga

SEQ ID NO: 443793 - DNA, 30 bp, Artificial Sequence
  Synthetic oligonucleotide
ggatattctcgtccaagcctatcgttggga

SEQ ID NO: 443794 - DNA, 30 bp, Artificial Sequence
  Synthetic oligonucleotide
tttggaacttgagcggtggcatggttggga

SEQ ID NO: 443795 - DNA, 30 bp, Artificial Sequence
  Synthetic oligonucleotide
cccggaacgagatttccatgggttttggga

SEQ ID NO: 443796 - DNA, 30 bp, Artificial Sequence
  Synthetic oligonucleotide
tattaagatggtgcggttacctttttggga

SEQ ID NO: 443797 - DNA, 30 bp, Artificial Sequence
  Synthetic oligonucleotide
accatcgggtagagcccggcgggaaatgga

SEQ ID NO: 443798 - DNA, 30 bp, Artificial Sequence
  Synthetic oligonucleotide
ggccgcagcaaaacagtcgatgtaaatgga

SEQ ID NO: 443799 - DNA, 30 bp, Artificial Sequence
  Synthetic oligonucleotide
tctctacgtgacgccgccaaggagaatgga

SEQ ID NO: 443800 - DNA, 30 bp, Artificial Sequence
  Synthetic oligonucleotide
accagtctatttaatgtaagctggaatgga

SEQ ID NO: 443801 - DNA, 30 bp, Artificial Sequence
  Synthetic oligonucleotide
ttataggtggttaaatatggctataatgga

SEQ ID NO: 443802 - DNA, 30 bp, Artificial Sequence
  Synthetic oligonucleotide
ggacacttgatccatacggtctctaatgga

SEQ ID NO: 443803 - DNA, 30 bp, Artificial Sequence
  Synthetic oligonucleotide
atcaggccagaacctataacgtttaatgga

SEQ ID NO: 443804 - DNA, 30 bp, Artificial Sequence
  Synthetic oligonucleotide
ggtattgtagttagccctgatgcacatgga

SEQ ID NO: 443805 - DNA, 30 bp, Artificial Sequence
  Synthetic oligonucleotide
gttggatttgcttcaaccgtgcgacatgga

SEQ ID NO: 443806 - DNA, 30 bp, Artificial Sequence
  Synthetic oligonucleotide
tccttatacgagcatcctgtgttacatgga

SEQ ID NO: 443807 - DNA, 30 bp, Artificial Sequence
  Synthetic oligonucleotide
cgagagcgtgattggacatatacccatgga

SEQ ID NO: 443808 - DNA, 30 bp, Artificial Sequence
  Synthetic oligonucleotide
aagagcgcgcgggacccttggtagcatgga

SEQ ID NO: 443809 - DNA, 30 bp, Artificial Sequence
  Synthetic oligonucleotide
tttagaatatagcttgcagattagcatgga

SEQ ID NO: 443810 - DNA, 30 bp, Artificial Sequence
  Synthetic oligonucleotide
actggctagtcataaaaggcaacgcatgga

SEQ ID NO: 443811 - DNA, 30 bp, Artificial Sequence
  Synthetic oligonucleotide
gtggctccgtctgacgttcgcatgcatgga

SEQ ID NO: 443812 - DNA, 30 bp, Artificial Sequence
  Synthetic oligonucleotide
gatcaactcgtgtgtggtaggctgcatgga

SEQ ID NO: 443813 - DNA, 30 bp, Artificial Sequence
  Synthetic oligonucleotide
tgtcaacgcaaatccaactatcatcatgga

SEQ ID NO: 443814 - DNA, 30 bp, Artificial Sequence
  Synthetic oligonucleotide
gactgtgtactattctgttgtggtcatgga

SEQ ID NO: 443815 - DNA, 30 bp, Artificial Sequence
  Synthetic oligonucleotide
catgccccgcaggcgcatcgatttcatgga

SEQ ID NO: 443816 - DNA, 30 bp, Artificial Sequence
  Synthetic oligonucleotide
catctgcagctcacggccaggccagatgga

SEQ ID NO: 443817 - DNA, 30 bp, Artificial Sequence
  Synthetic oligonucleotide
gattacggtctaagtaaagccggcgatgga

SEQ ID NO: 443818 - DNA, 30 bp, Artificial Sequence
  Synthetic oligonucleotide
cctgactagtgaggacgttaagtcgatgga

SEQ ID NO: 443819 - DNA, 30 bp, Artificial Sequence
  Synthetic oligonucleotide
ctcgacccccgcttttttgtggaggatgga

SEQ ID NO: 443820 - DNA, 30 bp, Artificial Sequence
  Synthetic oligonucleotide
ggtagatatgacttgggtttagcatatgga

SEQ ID NO: 443821 - DNA, 30 bp, Artificial Sequence
  Synthetic oligonucleotide
cttctactgctctggaagctgatatatgga

SEQ ID NO: 443822 - DNA, 30 bp, Artificial Sequence
  Synthetic oligonucleotide
actatacgatttagtaataatgactatgga

SEQ ID NO: 443823 - DNA, 30 bp, Artificial Sequence
  Synthetic oligonucleotide
ctataaacccagccttacttagcgtatgga

SEQ ID NO: 443824 - DNA, 30 bp, Artificial Sequence
  Synthetic oligonucleotide
tacaataaccgaaggtctgtattttatgga

SEQ ID NO: 443825 - DNA, 30 bp, Artificial Sequence
  Synthetic oligonucleotide
tctgaacggacgtcagcacgccaaactgga

SEQ ID NO: 443826 - DNA, 30 bp, Artificial Sequence
  Synthetic oligonucleotide
gccgctcccatggtctttggggcaactgga

SEQ ID NO: 443827 - DNA, 30 bp, Artificial Sequence
  Synthetic oligonucleotide
cccttaatggcgttaagaatccgaactgga

SEQ ID NO: 443828 - DNA, 30 bp, Artificial Sequence
  Synthetic oligonucleotide
atttcgcaagaaccccttctttgaactgga

SEQ ID NO: 443829 - DNA, 30 bp, Artificial Sequence
  Synthetic oligonucleotide
aagcaatccatgaatgtattaataactgga

SEQ ID NO: 443830 - DNA, 30 bp, Artificial Sequence
  Synthetic oligonucleotide
gattagagaacatattagatcgctactgga

SEQ ID NO: 443831 - DNA, 30 bp, Artificial Sequence
  Synthetic oligonucleotide
tccagacttgacggtggtcacagtactgga

SEQ ID NO: 443832 - DNA, 30 bp, Artificial Sequence
  Synthetic oligonucleotide
gaaacgttcaaatggaccgcctaacctgga

SEQ ID NO: 443833 - DNA, 30 bp, Artificial Sequence
  Synthetic oligonucleotide
tacccaacgtgtggcgtccatgcacctgga

SEQ ID NO: 443834 - DNA, 30 bp, Artificial Sequence
  Synthetic oligonucleotide
aacaaggatggtagggaacgttaagctgga

SEQ ID NO: 443835 - DNA, 31 bp, Artificial Sequence
  Synthetic oligonucleotide
caagatattccctcgaggctataaggctgga

SEQ ID NO: 443836 - DNA, 30 bp, Artificial Sequence
  Synthetic oligonucleotide
tcatactcatattacaaaaacggggctgga

SEQ ID NO: 443837 - DNA, 30 bp, Artificial Sequence
  Synthetic oligonucleotide
ggatgcaggtcgatgctgtgtcatgctgga

SEQ ID NO: 443838 - DNA, 30 bp, Artificial Sequence
  Synthetic oligonucleotide
tcacgcatcattcacatgccggtatctgga

SEQ ID NO: 443839 - DNA, 30 bp, Artificial Sequence
  Synthetic oligonucleotide
ttcgcatgcaggcccatccggttatctgga

SEQ ID NO: 443840 - DNA, 30 bp, Artificial Sequence
  Synthetic oligonucleotide
acccttgcaggtcccacgctgtggtctgga

SEQ ID NO: 443841 - DNA, 30 bp, Artificial Sequence
  Synthetic oligonucleotide
atccgggtaccaacccggcttgtgtctgga

SEQ ID NO: 443842 - DNA, 30 bp, Artificial Sequence
  Synthetic oligonucleotide
cggaaggccccggcggtcttacattctgga

SEQ ID NO: 443843 - DNA, 30 bp, Artificial Sequence
  Synthetic oligonucleotide
gacgaccttgggtataaaaagagttctgga

SEQ ID NO: 443844 - DNA, 30 bp, Artificial Sequence
  Synthetic oligonucleotide
tttcatggttaatatatcgtgcgttctgga

SEQ ID NO: 443845 - DNA, 30 bp, Artificial Sequence
  Synthetic oligonucleotide
gatcggtctctatgaacgcatcgttctgga

SEQ ID NO: 443846 - DNA, 30 bp, Artificial Sequence
  Synthetic oligonucleotide
tgcgtcagaccctgagctaccttttctgga

SEQ ID NO: 443847 - DNA, 30 bp, Artificial Sequence
  Synthetic oligonucleotide
caacgttaattataccattaaaaaagtgga

SEQ ID NO: 443848 - DNA, 30 bp, Artificial Sequence
  Synthetic oligonucleotide
actgatcacgacgacccagacggaagtgga

SEQ ID NO: 443849 - DNA, 30 bp, Artificial Sequence
  Synthetic oligonucleotide
gatatcattgagcactggccacgcagtgga

SEQ ID NO: 443850 - DNA, 30 bp, Artificial Sequence
  Synthetic oligonucleotide
tgttttgagaatagatccgatcgcagtgga

SEQ ID NO: 443851 - DNA, 30 bp, Artificial Sequence
  Synthetic oligonucleotide
ggttgggttagattatccgcagcgagtgga

SEQ ID NO: 443852 - DNA, 30 bp, Artificial Sequence
  Synthetic oligonucleotide
atatacatcctttggaaatgactgagtgga

SEQ ID NO: 443853 - DNA, 30 bp, Artificial Sequence
  Synthetic oligonucleotide
cggtttcaggctatttctcgtttgagtgga

SEQ ID NO: 443854 - DNA, 30 bp, Artificial Sequence
  Synthetic oligonucleotide
tatcaatcccgggcgtgccatcgtagtgga

SEQ ID NO: 443855 - DNA, 30 bp, Artificial Sequence
  Synthetic oligonucleotide
cgttagcgaaacgccgtttgaagacgtgga

SEQ ID NO: 443856 - DNA, 30 bp, Artificial Sequence
  Synthetic oligonucleotide
aaagcctggccctttttggtaagacgtgga

SEQ ID NO: 443857 - DNA, 30 bp, Artificial Sequence
  Synthetic oligonucleotide
tcttggcattatcaggggccgttacgtgga

SEQ ID NO: 443858 - DNA, 30 bp, Artificial Sequence
  Synthetic oligonucleotide
gtctatacctggggacattgatgccgtgga

SEQ ID NO: 443859 - DNA, 30 bp, Artificial Sequence
  Synthetic oligonucleotide
ctgtctaaatatctggaaagctgccgtgga

SEQ ID NO: 443860 - DNA, 30 bp, Artificial Sequence
  Synthetic oligonucleotide
gagtttctaccaagaaatttacctcgtgga

SEQ ID NO: 443861 - DNA, 30 bp, Artificial Sequence
  Synthetic oligonucleotide
catgtgtggctgggacgtctggttcgtgga

SEQ ID NO: 443862 - DNA, 27 bp, Artificial Sequence
  Synthetic oligonucleotide
gattggacaggggcacgtgaaggtgga

SEQ ID NO: 443863 - DNA, 30 bp, Artificial Sequence
  Synthetic oligonucleotide
aatactggttatatgctgaggtcaggtgga

SEQ ID NO: 443864 - DNA, 30 bp, Artificial Sequence
  Synthetic oligonucleotide
cgagcctcaaccgctgcgctaataggtgga

SEQ ID NO: 443865 - DNA, 30 bp, Artificial Sequence
  Synthetic oligonucleotide
gccacctcgacagaccagctacccggtgga

SEQ ID NO: 443866 - DNA, 30 bp, Artificial Sequence
  Synthetic oligonucleotide
ccctcatgctaatccatatacccgggtgga

SEQ ID NO: 443867 - DNA, 30 bp, Artificial Sequence
  Synthetic oligonucleotide
tcgttggcagcagggtacgggtcgggtgga

SEQ ID NO: 443868 - DNA, 30 bp, Artificial Sequence
  Synthetic oligonucleotide
tttctcggggcttggactgaagtgggtgga

SEQ ID NO: 443869 - DNA, 30 bp, Artificial Sequence
  Synthetic oligonucleotide
cgtaacgagctctactctgacgatggtgga

SEQ ID NO: 443870 - DNA, 30 bp, Artificial Sequence
  Synthetic oligonucleotide
cgaatttacatcttttgcaacgtatgtgga

SEQ ID NO: 443871 - DNA, 30 bp, Artificial Sequence
  Synthetic oligonucleotide
aaattgtttgcttgctatgagcactgtgga

SEQ ID NO: 443872 - DNA, 30 bp, Artificial Sequence
  Synthetic oligonucleotide
tgtctacggattttgttcctcgactgtgga

SEQ ID NO: 443873 - DNA, 30 bp, Artificial Sequence
  Synthetic oligonucleotide
ttctttactaaatttcaaggggactgtgga

SEQ ID NO: 443874 - DNA, 30 bp, Artificial Sequence
  Synthetic oligonucleotide
agttacgaccgggacctcactaagtgtgga

SEQ ID NO: 443875 - DNA, 30 bp, Artificial Sequence
  Synthetic oligonucleotide
aggcacttgcatcactttatatagtgtgga

SEQ ID NO: 443876 - DNA, 30 bp, Artificial Sequence
  Synthetic oligonucleotide
ccgtgggacttgaatcacttgtagtgtgga

SEQ ID NO: 443877 - DNA, 30 bp, Artificial Sequence
  Synthetic oligonucleotide
agactggatcctctgtgatgcacgtgtgga

SEQ ID NO: 443878 - DNA, 30 bp, Artificial Sequence
  Synthetic oligonucleotide
tagtggcccagataaagtagtatgtgtgga

SEQ ID NO: 443879 - DNA, 30 bp, Artificial Sequence
  Synthetic oligonucleotide
cgtagaggacacagaccaccgggttgtgga

SEQ ID NO: 443880 - DNA, 30 bp, Artificial Sequence
  Synthetic oligonucleotide
tgtttcactatgtaccagaatatttgtgga

SEQ ID NO: 443881 - DNA, 30 bp, Artificial Sequence
  Synthetic oligonucleotide
aaatagcttgttattgaccagcaaattgga

SEQ ID NO: 443882 - DNA, 30 bp, Artificial Sequence
  Synthetic oligonucleotide
ctggggacggccgggggtataacaattgga

SEQ ID NO: 443883 - DNA, 30 bp, Artificial Sequence
  Synthetic oligonucleotide
tcgaccatttagcgcccgaggcgaattgga

SEQ ID NO: 443884 - DNA, 30 bp, Artificial Sequence
  Synthetic oligonucleotide
gaactcgcatctgttgggatatgaattgga

SEQ ID NO: 443885 - DNA, 30 bp, Artificial Sequence
  Synthetic oligonucleotide
agtcgacgcgactgatcgtgaataattgga

SEQ ID NO: 443886 - DNA, 30 bp, Artificial Sequence
  Synthetic oligonucleotide
taatggggcctgttggagaatctcattgga

SEQ ID NO: 443887 - DNA, 30 bp, Artificial Sequence
  Synthetic oligonucleotide
acttcggggcgcggctacgggccgattgga

SEQ ID NO: 443888 - DNA, 30 bp, Artificial Sequence
  Synthetic oligonucleotide
gtacaatccatacacatacgagtgattgga

SEQ ID NO: 443889 - DNA, 30 bp, Artificial Sequence
  Synthetic oligonucleotide
caccttacacagattgcacccattattgga

SEQ ID NO: 443890 - DNA, 30 bp, Artificial Sequence
  Synthetic oligonucleotide
tgcagataatgcttcggcgtaagccttgga

SEQ ID NO: 443891 - DNA, 30 bp, Artificial Sequence
  Synthetic oligonucleotide
ttcaggtgtgacacctcacacggccttgga

SEQ ID NO: 443892 - DNA, 30 bp, Artificial Sequence
  Synthetic oligonucleotide
cgcaggatcggaatacatgctcagcttgga

SEQ ID NO: 443893 - DNA, 30 bp, Artificial Sequence
  Synthetic oligonucleotide
ggtcatgtcaacacgcagtgcgctcttgga

SEQ ID NO: 443894 - DNA, 30 bp, Artificial Sequence
  Synthetic oligonucleotide
aaagacttatcttgatgaacaggtcttgga

SEQ ID NO: 443895 - DNA, 30 bp, Artificial Sequence
  Synthetic oligonucleotide
tcggttagccggcagcgacggtttcttgga

SEQ ID NO: 443896 - DNA, 30 bp, Artificial Sequence
  Synthetic oligonucleotide
atttcacggggagagaatttacgagttgga

SEQ ID NO: 443897 - DNA, 30 bp, Artificial Sequence
  Synthetic oligonucleotide
aaactcccacggtgcatcagcgacgttgga

SEQ ID NO: 443898 - DNA, 30 bp, Artificial Sequence
  Synthetic oligonucleotide
ccgttccgatcgattagtttaccggttgga

SEQ ID NO: 443899 - DNA, 30 bp, Artificial Sequence
  Synthetic oligonucleotide
attacaagtcattaggtatctagggttgga

SEQ ID NO: 443900 - DNA, 30 bp, Artificial Sequence
  Synthetic oligonucleotide
gtcgggtgtaactacaagcctggggttgga

SEQ ID NO: 443901 - DNA, 30 bp, Artificial Sequence
  Synthetic oligonucleotide
agtggagtcttgtgcttgtgggtatttgga

SEQ ID NO: 443902 - DNA, 30 bp, Artificial Sequence
  Synthetic oligonucleotide
gcgccttgtgactacgagttcacctttgga

SEQ ID NO: 443903 - DNA, 30 bp, Artificial Sequence
  Synthetic oligonucleotide
aagcccgaatccgagccaggtcgctttgga

SEQ ID NO: 443904 - DNA, 30 bp, Artificial Sequence
  Synthetic oligonucleotide
taagttattacatgcaccttgcagtttgga

SEQ ID NO: 443905 - DNA, 30 bp, Artificial Sequence
  Synthetic oligonucleotide
acaggccaggtcaaagggcttctttttgga

SEQ ID NO: 443906 - DNA, 30 bp, Artificial Sequence
  Synthetic oligonucleotide
taccctaacgcacataggagacaaaaatga

SEQ ID NO: 443907 - DNA, 30 bp, Artificial Sequence
  Synthetic oligonucleotide
acttgcctgcgattattagcggcaaaatga

SEQ ID NO: 443908 - DNA, 30 bp, Artificial Sequence
  Synthetic oligonucleotide
aatttatcattgtgaccgcgacacaaatga

SEQ ID NO: 443909 - DNA, 30 bp, Artificial Sequence
  Synthetic oligonucleotide
gggccggacgcgacgcgcgcattcaaatga

SEQ ID NO: 443910 - DNA, 30 bp, Artificial Sequence
  Synthetic oligonucleotide
gccctggggcgcaacatcttgggtaaatga

SEQ ID NO: 443911 - DNA, 30 bp, Artificial Sequence
  Synthetic oligonucleotide
cactcattcaatatggctgaatttaaatga

SEQ ID NO: 443912 - DNA, 30 bp, Artificial Sequence
  Synthetic oligonucleotide
ctcaccatttgagaggctaccaaccaatga

SEQ ID NO: 443913 - DNA, 30 bp, Artificial Sequence
  Synthetic oligonucleotide
acattgatgagcgcttcgtaagcgcaatga

SEQ ID NO: 443914 - DNA, 30 bp, Artificial Sequence
  Synthetic oligonucleotide
agttttgtaacggtcttaactgcgcaatga

SEQ ID NO: 443915 - DNA, 30 bp, Artificial Sequence
  Synthetic oligonucleotide
tgggctctcgggactggaggatcgcaatga

SEQ ID NO: 443916 - DNA, 30 bp, Artificial Sequence
  Synthetic oligonucleotide
taccgctgcatatataagtacgtgcaatga

SEQ ID NO: 443917 - DNA, 30 bp, Artificial Sequence
  Synthetic oligonucleotide
tgctgccgctagttcacactgtgtcaatga

SEQ ID NO: 443918 - DNA, 30 bp, Artificial Sequence
  Synthetic oligonucleotide
gctcttggtggttacgcacattaagaatga

SEQ ID NO: 443919 - DNA, 30 bp, Artificial Sequence
  Synthetic oligonucleotide
cttgactgagagatttcatacgcagaatga

SEQ ID NO: 443920 - DNA, 30 bp, Artificial Sequence
  Synthetic oligonucleotide
gagggtatgttgcgggcaatgggagaatga

SEQ ID NO: 443921 - DNA, 30 bp, Artificial Sequence
  Synthetic oligonucleotide
ctttctgtagaaatcaagttacaggaatga

SEQ ID NO: 443922 - DNA, 30 bp, Artificial Sequence
  Synthetic oligonucleotide
tattcaaggcatatcccccggagggaatga

SEQ ID NO: 443923 - DNA, 30 bp, Artificial Sequence
  Synthetic oligonucleotide
tattagtaagggcagtggtgtgttgaatga

SEQ ID NO: 443924 - DNA, 30 bp, Artificial Sequence
  Synthetic oligonucleotide
ggacgctcctctgaatcctgcgtataatga

SEQ ID NO: 443925 - DNA, 30 bp, Artificial Sequence
  Synthetic oligonucleotide
atacagttattcccaccgtagacttaatga

SEQ ID NO: 443926 - DNA, 30 bp, Artificial Sequence
  Synthetic oligonucleotide
acgttcactgtttacagtagtttttaatga

SEQ ID NO: 443927 - DNA, 30 bp, Artificial Sequence
  Synthetic oligonucleotide
ttggaactacaattacgcggcccaacatga

SEQ ID NO: 443928 - DNA, 30 bp, Artificial Sequence
  Synthetic oligonucleotide
ggctaatgctaacctcggcacctaacatga

SEQ ID NO: 443929 - DNA, 30 bp, Artificial Sequence
  Synthetic oligonucleotide
acaggaccggtgaaccgcagcttaacatga

SEQ ID NO: 443930 - DNA, 30 bp, Artificial Sequence
  Synthetic oligonucleotide
agtaatcctttagatgaaaccggcacatga

SEQ ID NO: 443931 - DNA, 30 bp, Artificial Sequence
  Synthetic oligonucleotide
gtaccattcctgacatgtaatggcacatga

SEQ ID NO: 443932 - DNA, 30 bp, Artificial Sequence
  Synthetic oligonucleotide
gtatttgatggggtttcttaaatgacatga

SEQ ID NO: 443933 - DNA, 30 bp, Artificial Sequence
  Synthetic oligonucleotide
taaataatgcatatgaaatgtcatacatga

SEQ ID NO: 443934 - DNA, 30 bp, Artificial Sequence
  Synthetic oligonucleotide
gattaataccttgggctttacgaaccatga

SEQ ID NO: 443935 - DNA, 30 bp, Artificial Sequence
  Synthetic oligonucleotide
gctataatatcatgtccgccgtaaccatga

SEQ ID NO: 443936 - DNA, 30 bp, Artificial Sequence
  Synthetic oligonucleotide
gtgttcagagcatggggatagtacccatga

SEQ ID NO: 443937 - DNA, 30 bp, Artificial Sequence
  Synthetic oligonucleotide
ggaagctcgggatgggatcacacgccatga

SEQ ID NO: 443938 - DNA, 30 bp, Artificial Sequence
  Synthetic oligonucleotide
gtgggagcctgtatcacatgtgcgccatga

SEQ ID NO: 443939 - DNA, 30 bp, Artificial Sequence
  Synthetic oligonucleotide
attcgcccattttcgtggtaaaggccatga

SEQ ID NO: 443940 - DNA, 30 bp, Artificial Sequence
  Synthetic oligonucleotide
gacgttgcataattgttgatgaatccatga

SEQ ID NO: 443941 - DNA, 30 bp, Artificial Sequence
  Synthetic oligonucleotide
ctcattgctgaggttttagataatccatga

SEQ ID NO: 443942 - DNA, 30 bp, Artificial Sequence
  Synthetic oligonucleotide
cagtccgatcctcaattggcccatccatga

SEQ ID NO: 443943 - DNA, 30 bp, Artificial Sequence
  Synthetic oligonucleotide
gccgagcggaattacccagcttatccatga

SEQ ID NO: 443944 - DNA, 30 bp, Artificial Sequence
  Synthetic oligonucleotide
ggtatcatcggaaagttggcttatccatga

SEQ ID NO: 443945 - DNA, 30 bp, Artificial Sequence
  Synthetic oligonucleotide
actctcttaactgaggcctatcgtccatga

SEQ ID NO: 443946 - DNA, 30 bp, Artificial Sequence
  Synthetic oligonucleotide
aatgttaggactgtgtccgttaaagcatga

SEQ ID NO: 443947 - DNA, 30 bp, Artificial Sequence
  Synthetic oligonucleotide
ccttgcaagtgtaccagtcacggagcatga

SEQ ID NO: 443948 - DNA, 30 bp, Artificial Sequence
  Synthetic oligonucleotide
cagcgatcatcctacagacgcttagcatga

SEQ ID NO: 443949 - DNA, 30 bp, Artificial Sequence
  Synthetic oligonucleotide
tattcttcgtgcggcaggcacgacgcatga

SEQ ID NO: 443950 - DNA, 30 bp, Artificial Sequence
  Synthetic oligonucleotide
cgtattcctggaatgaacgggtgcgcatga

SEQ ID NO: 443951 - DNA, 30 bp, Artificial Sequence
  Synthetic oligonucleotide
tggcaatcagcaggcacttttttcgcatga

SEQ ID NO: 443952 - DNA, 30 bp, Artificial Sequence
  Synthetic oligonucleotide
acttgcgatacattgcggtatgtggcatga

SEQ ID NO: 443953 - DNA, 30 bp, Artificial Sequence
  Synthetic oligonucleotide
gccagtgtttcacattgaaagactgcatga

SEQ ID NO: 443954 - DNA, 30 bp, Artificial Sequence
  Synthetic oligonucleotide
gcatcttgattgctgcatggccttgcatga

SEQ ID NO: 443955 - DNA, 30 bp, Artificial Sequence
  Synthetic oligonucleotide
ttgggagttttttgaagtctggttgcatga

SEQ ID NO: 443956 - DNA, 30 bp, Artificial Sequence
  Synthetic oligonucleotide
aattaggacggtcacatcattgtatcatga

SEQ ID NO: 443957 - DNA, 30 bp, Artificial Sequence
  Synthetic oligonucleotide
cgcgtcctactgtcccgatctaactcatga

SEQ ID NO: 443958 - DNA, 30 bp, Artificial Sequence
  Synthetic oligonucleotide
caggctgggataaaccataggccctcatga

SEQ ID NO: 443959 - DNA, 30 bp, Artificial Sequence
  Synthetic oligonucleotide
acaagttcatcgcattaggacggctcatga

SEQ ID NO: 443960 - DNA, 30 bp, Artificial Sequence
  Synthetic oligonucleotide
aggtagcgcggcgtgttggtagagtcatga

SEQ ID NO: 443961 - DNA, 30 bp, Artificial Sequence
  Synthetic oligonucleotide
acacacatttagctcggggcagcttcatga

SEQ ID NO: 443962 - DNA, 30 bp, Artificial Sequence
  Synthetic oligonucleotide
attcaagcgcccgtgttttccgcttcatga

SEQ ID NO: 443963 - DNA, 30 bp, Artificial Sequence
  Synthetic oligonucleotide
gccgaaagatagattcggccggtttcatga

SEQ ID NO: 443964 - DNA, 30 bp, Artificial Sequence
  Synthetic oligonucleotide
cgtgttaaatgatatgttcctcaaagatga

SEQ ID NO: 443965 - DNA, 30 bp, Artificial Sequence
  Synthetic oligonucleotide
ggttgtccgcactcaaaccttggaagatga

SEQ ID NO: 443966 - DNA, 30 bp, Artificial Sequence
  Synthetic oligonucleotide
tatttcaacctgtgccttacggatagatga

SEQ ID NO: 443967 - DNA, 30 bp, Artificial Sequence
  Synthetic oligonucleotide
tgttaggcggaggacaatggaatccgatga

SEQ ID NO: 443968 - DNA, 30 bp, Artificial Sequence
  Synthetic oligonucleotide
aaggcgcagttgtcaaccatgtagcgatga

SEQ ID NO: 443969 - DNA, 30 bp, Artificial Sequence
  Synthetic oligonucleotide
agcagattggtatgcgcggtgctgcgatga

SEQ ID NO: 443970 - DNA, 31 bp, Artificial Sequence
  Synthetic oligonucleotide
gatctagtatcagtaacatgagtctcgatga

SEQ ID NO: 443971 - DNA, 30 bp, Artificial Sequence
  Synthetic oligonucleotide
gtggttgtaatacaggtccgcattcgatga

SEQ ID NO: 443972 - DNA, 30 bp, Artificial Sequence
  Synthetic oligonucleotide
gtcataacccttgtgtctcgtggaggatga

SEQ ID NO: 443973 - DNA, 30 bp, Artificial Sequence
  Synthetic oligonucleotide
tccgccagagccctcttctccgacggatga

SEQ ID NO: 443974 - DNA, 30 bp, Artificial Sequence
  Synthetic oligonucleotide
ggattttcatctcatattaaatccggatga

SEQ ID NO: 443975 - DNA, 30 bp, Artificial Sequence
  Synthetic oligonucleotide
gatcacctcttcgtttgcggtacgggatga

SEQ ID NO: 443976 - DNA, 30 bp, Artificial Sequence
  Synthetic oligonucleotide
taaatgtaggataattcgtcgttgggatga

SEQ ID NO: 443977 - DNA, 30 bp, Artificial Sequence
  Synthetic oligonucleotide
aattggagtatacattgcaagggtggatga

SEQ ID NO: 443978 - DNA, 30 bp, Artificial Sequence
  Synthetic oligonucleotide
tatctaaacattaatatttgccttggatga

SEQ ID NO: 443979 - DNA, 30 bp, Artificial Sequence
  Synthetic oligonucleotide
taagtaacctcataaagttagctatgatga

SEQ ID NO: 443980 - DNA, 30 bp, Artificial Sequence
  Synthetic oligonucleotide
gtgtagactattgggtggagtctatgatga

SEQ ID NO: 443981 - DNA, 30 bp, Artificial Sequence
  Synthetic oligonucleotide
tcatctcaccgtaaatgttttgtatgatga

SEQ ID NO: 443982 - DNA, 30 bp, Artificial Sequence
  Synthetic oligonucleotide
gacttagtccattggttcgaattatgatga

SEQ ID NO: 443983 - DNA, 30 bp, Artificial Sequence
  Synthetic oligonucleotide
tcgtatggctcaaatcttagtttatgatga

SEQ ID NO: 443984 - DNA, 30 bp, Artificial Sequence
  Synthetic oligonucleotide
ttccgggtcaaatcataataggcttgatga

SEQ ID NO: 443985 - DNA, 30 bp, Artificial Sequence
  Synthetic oligonucleotide
aatatggaggaactcctcaaattaatatga

SEQ ID NO: 443986 - DNA, 30 bp, Artificial Sequence
  Synthetic oligonucleotide
catatatgaggtctcggacggtgcatatga

SEQ ID NO: 443987 - DNA, 30 bp, Artificial Sequence
  Synthetic oligonucleotide
tcgagctatttaggtattaaggtcatatga

SEQ ID NO: 443988 - DNA, 30 bp, Artificial Sequence
  Synthetic oligonucleotide
catctagttgtacgaaggatacagatatga

SEQ ID NO: 443989 - DNA, 30 bp, Artificial Sequence
  Synthetic oligonucleotide
aaaatctgggactgagcgcgtcatatatga

SEQ ID NO: 443990 - DNA, 30 bp, Artificial Sequence
  Synthetic oligonucleotide
ttccccataatcgattcaaagtttatatga

SEQ ID NO: 443991 - DNA, 30 bp, Artificial Sequence
  Synthetic oligonucleotide
tgtatctgtggaagtcttatacaactatga

SEQ ID NO: 443992 - DNA, 30 bp, Artificial Sequence
  Synthetic oligonucleotide
tgtaaacgcgtaactatacctggactatga

SEQ ID NO: 443993 - DNA, 30 bp, Artificial Sequence
  Synthetic oligonucleotide
gccatgatttacgtaggagcagccctatga

SEQ ID NO: 443994 - DNA, 30 bp, Artificial Sequence
  Synthetic oligonucleotide
acttggcgtctacccacgttgtggctatga

SEQ ID NO: 443995 - DNA, 30 bp, Artificial Sequence
  Synthetic oligonucleotide
aatagtcctttttgatacgtgaatctatga

SEQ ID NO: 443996 - DNA, 30 bp, Artificial Sequence
  Synthetic oligonucleotide
attttatacagaaagattgtacgtctatga

SEQ ID NO: 443997 - DNA, 30 bp, Artificial Sequence
  Synthetic oligonucleotide
atagtttctaataataagaggcacgtatga

SEQ ID NO: 443998 - DNA, 30 bp, Artificial Sequence
  Synthetic oligonucleotide
gggatgtagctcactgcttattacgtatga

SEQ ID NO: 443999 - DNA, 30 bp, Artificial Sequence
  Synthetic oligonucleotide
aaaagcgtgctagcgtcttaattcgtatga

SEQ ID NO: 444000 - DNA, 30 bp, Artificial Sequence
  Synthetic oligonucleotide
gtgcactatcgtgaagaaggccaggtatga

SEQ ID NO: 444001 - DNA, 30 bp, Artificial Sequence
  Synthetic oligonucleotide
agatacctcggggatgcggcgtgggtatga

SEQ ID NO: 444002 - DNA, 30 bp, Artificial Sequence
  Synthetic oligonucleotide
tatcgaaaagtgatatattaggtggtatga

SEQ ID NO: 444003 - DNA, 30 bp, Artificial Sequence
  Synthetic oligonucleotide
ttcagacttgtatagaactgggtggtatga

SEQ ID NO: 444004 - DNA, 30 bp, Artificial Sequence
  Synthetic oligonucleotide
gtgtcccaaagctaaactttagctgtatga

SEQ ID NO: 444005 - DNA, 30 bp, Artificial Sequence
  Synthetic oligonucleotide
gagtagtcccgtttacatggaattgtatga

SEQ ID NO: 444006 - DNA, 30 bp, Artificial Sequence
  Synthetic oligonucleotide
tcatttacagggtcgttttgatacttatga

SEQ ID NO: 444007 - DNA, 30 bp, Artificial Sequence
  Synthetic oligonucleotide
aaacccttggatttgatcttttacttatga

SEQ ID NO: 444008 - DNA, 30 bp, Artificial Sequence
  Synthetic oligonucleotide
gtcgcacatcgagcacttagaggcttatga

SEQ ID NO: 444009 - DNA, 30 bp, Artificial Sequence
  Synthetic oligonucleotide
agcatgatttgacctcgaggccagttatga

SEQ ID NO: 444010 - DNA, 30 bp, Artificial Sequence
  Synthetic oligonucleotide
agcgacagttatctttttggggtgttatga

SEQ ID NO: 444011 - DNA, 30 bp, Artificial Sequence
  Synthetic oligonucleotide
tgtattcacgataatcccggtcgtttatga

SEQ ID NO: 444012 - DNA, 30 bp, Artificial Sequence
  Synthetic oligonucleotide
aaacggctttcaatcccgggagttttatga

SEQ ID NO: 444013 - DNA, 30 bp, Artificial Sequence
  Synthetic oligonucleotide
gtatcatgggcacgcgagtagtttttatga

SEQ ID NO: 444014 - DNA, 30 bp, Artificial Sequence
  Synthetic oligonucleotide
ttggggttaaggcatcgatcaggaaactga

SEQ ID NO: 444015 - DNA, 30 bp, Artificial Sequence
  Synthetic oligonucleotide
tgaggaagcttggtgtctcgatcgaactga

SEQ ID NO: 444016 - DNA, 30 bp, Artificial Sequence
  Synthetic oligonucleotide
attcggttagtatggccaccggggaactga

SEQ ID NO: 444017 - DNA, 30 bp, Artificial Sequence
  Synthetic oligonucleotide
ctacccacatactagatttctgtgaactga

SEQ ID NO: 444018 - DNA, 30 bp, Artificial Sequence
  Synthetic oligonucleotide
tgtgtttaaagggtacatagtcataactga

SEQ ID NO: 444019 - DNA, 30 bp, Artificial Sequence
  Synthetic oligonucleotide
aatgatttctcggtttgtaccgctaactga

SEQ ID NO: 444020 - DNA, 30 bp, Artificial Sequence
  Synthetic oligonucleotide
gaatagtctcgtctcagactgtgacactga

SEQ ID NO: 444021 - DNA, 30 bp, Artificial Sequence
  Synthetic oligonucleotide
gtagtggacccccgaatggcggaccactga

SEQ ID NO: 444022 - DNA, 30 bp, Artificial Sequence
  Synthetic oligonucleotide
taccgtctagatccatgtcgattccactga

SEQ ID NO: 444023 - DNA, 30 bp, Artificial Sequence
  Synthetic oligonucleotide
gcatacaatactgccctgttggagcactga

SEQ ID NO: 444024 - DNA, 30 bp, Artificial Sequence
  Synthetic oligonucleotide
gacacaatagttgcagatagactgcactga

SEQ ID NO: 444025 - DNA, 30 bp, Artificial Sequence
  Synthetic oligonucleotide
tctggggcgaaatctggagccaatcactga

SEQ ID NO: 444026 - DNA, 30 bp, Artificial Sequence
  Synthetic oligonucleotide
taattgtggtggttgggtgggatagactga

SEQ ID NO: 444027 - DNA, 30 bp, Artificial Sequence
  Synthetic oligonucleotide
atattcgaactttaatggcgcaccgactga

SEQ ID NO: 444028 - DNA, 30 bp, Artificial Sequence
  Synthetic oligonucleotide
cgcaaatgctccgcagaaacagtcgactga

SEQ ID NO: 444029 - DNA, 30 bp, Artificial Sequence
  Synthetic oligonucleotide
gctggagcatccgcccggcagttcgactga

SEQ ID NO: 444030 - DNA, 30 bp, Artificial Sequence
  Synthetic oligonucleotide
ggcccgatcataagtcctgcccaggactga

SEQ ID NO: 444031 - DNA, 30 bp, Artificial Sequence
  Synthetic oligonucleotide
gaggcgattggtacaatttgtcgtgactga

SEQ ID NO: 444032 - DNA, 30 bp, Artificial Sequence
  Synthetic oligonucleotide
ccttttatttcatactttatatgtgactga

SEQ ID NO: 444033 - DNA, 30 bp, Artificial Sequence
  Synthetic oligonucleotide
ttgtatggtccaagtgaaaaatttgactga

SEQ ID NO: 444034 - DNA, 30 bp, Artificial Sequence
  Synthetic oligonucleotide
tttatgtgaatcctctctcctaactactga

SEQ ID NO: 444035 - DNA, 30 bp, Artificial Sequence
  Synthetic oligonucleotide
acctccttaatgccagatttccggtactga

SEQ ID NO: 444036 - DNA, 30 bp, Artificial Sequence
  Synthetic oligonucleotide
tactgaatggcggcgactaggttgtactga

SEQ ID NO: 444037 - DNA, 30 bp, Artificial Sequence
  Synthetic oligonucleotide
ggtatataccggccagtgccatgttactga

SEQ ID NO: 444038 - DNA, 30 bp, Artificial Sequence
  Synthetic oligonucleotide
tgggaccaacatagagttgacaaaacctga

SEQ ID NO: 444039 - DNA, 30 bp, Artificial Sequence
  Synthetic oligonucleotide
tatatacgagacttcgagatgaggacctga

SEQ ID NO: 444040 - DNA, 30 bp, Artificial Sequence
  Synthetic oligonucleotide
gggtgtcgctactttcgactttctacctga

SEQ ID NO: 444041 - DNA, 30 bp, Artificial Sequence
  Synthetic oligonucleotide
tcttcgggaggggcctaccgcctaccctga

SEQ ID NO: 444042 - DNA, 30 bp, Artificial Sequence
  Synthetic oligonucleotide
tgacttacactcccgccgtactccccctga

SEQ ID NO: 444043 - DNA, 30 bp, Artificial Sequence
  Synthetic oligonucleotide
ctctcagtgtctagcagcccattcccctga

SEQ ID NO: 444044 - DNA, 30 bp, Artificial Sequence
  Synthetic oligonucleotide
ttaaagactttacatgcccccgggccctga

SEQ ID NO: 444045 - DNA, 30 bp, Artificial Sequence
  Synthetic oligonucleotide
cctttgaaacaccgtgtaacggatccctga

SEQ ID NO: 444046 - DNA, 30 bp, Artificial Sequence
  Synthetic oligonucleotide
ttgtttctcgggtcttcgacacctccctga

SEQ ID NO: 444047 - DNA, 30 bp, Artificial Sequence
  Synthetic oligonucleotide
aaattaatcggcgaacgaacatgtccctga

SEQ ID NO: 444048 - DNA, 30 bp, Artificial Sequence
  Synthetic oligonucleotide
tggcattagcggaagggggcctcggcctga

SEQ ID NO: 444049 - DNA, 30 bp, Artificial Sequence
  Synthetic oligonucleotide
gatccgcttaaaagggggaagttggcctga

SEQ ID NO: 444050 - DNA, 30 bp, Artificial Sequence
  Synthetic oligonucleotide
agacgcgcgcaactgcgcttggttgcctga

SEQ ID NO: 444051 - DNA, 30 bp, Artificial Sequence
  Synthetic oligonucleotide
ctctccgtgaaatctcagcactttgcctga

SEQ ID NO: 444052 - DNA, 30 bp, Artificial Sequence
  Synthetic oligonucleotide
gaagtcgcagacctcagagtggaatcctga

SEQ ID NO: 444053 - DNA, 30 bp, Artificial Sequence
  Synthetic oligonucleotide
agctgctccgggttttcgtcttcatcctga

SEQ ID NO: 444054 - DNA, 30 bp, Artificial Sequence
  Synthetic oligonucleotide
cgttggagctcggcaacggcagactcctga

SEQ ID NO: 444055 - DNA, 30 bp, Artificial Sequence
  Synthetic oligonucleotide
ggagtacctcgatttatgggttactcctga

SEQ ID NO: 444056 - DNA, 30 bp, Artificial Sequence
  Synthetic oligonucleotide
agggtaacaaaccaggtgcatacctcctga

SEQ ID NO: 444057 - DNA, 30 bp, Artificial Sequence
  Synthetic oligonucleotide
cgcagtcaatgattaggatttgcctcctga

SEQ ID NO: 444058 - DNA, 30 bp, Artificial Sequence
  Synthetic oligonucleotide
gttagttatgcagcttaacctaagtcctga

SEQ ID NO: 444059 - DNA, 30 bp, Artificial Sequence
  Synthetic oligonucleotide
aatgagttcatcgctattcctgacagctga

SEQ ID NO: 444060 - DNA, 30 bp, Artificial Sequence
  Synthetic oligonucleotide
gcttttacgaccgtagaacactgcagctga

SEQ ID NO: 444061 - DNA, 30 bp, Artificial Sequence
  Synthetic oligonucleotide
gggttgtttcttaaaaacacctgtagctga

SEQ ID NO: 444062 - DNA, 30 bp, Artificial Sequence
  Synthetic oligonucleotide
cgtactgaagcaccctcagactaacgctga

SEQ ID NO: 444063 - DNA, 30 bp, Artificial Sequence
  Synthetic oligonucleotide
cattagcggcgactaggtacttaacgctga

SEQ ID NO: 444064 - DNA, 30 bp, Artificial Sequence
  Synthetic oligonucleotide
ggtattggtagatggctctgcacacgctga

SEQ ID NO: 444065 - DNA, 30 bp, Artificial Sequence
  Synthetic oligonucleotide
gatattggttattatatctgagcgcgctga

SEQ ID NO: 444066 - DNA, 30 bp, Artificial Sequence
  Synthetic oligonucleotide
cacggttctacgcggtgattctcgcgctga

SEQ ID NO: 444067 - DNA, 30 bp, Artificial Sequence
  Synthetic oligonucleotide
atgcgcctcgtcctgtttatttggcgctga

SEQ ID NO: 444068 - DNA, 30 bp, Artificial Sequence
  Synthetic oligonucleotide
gatattctcgaatagggttgcgccggctga

SEQ ID NO: 444069 - DNA, 30 bp, Artificial Sequence
  Synthetic oligonucleotide
ctccggtattatggcgcatataagggctga

SEQ ID NO: 444070 - DNA, 30 bp, Artificial Sequence
  Synthetic oligonucleotide
ggccggcggcctcggttcgtaaggggctga

SEQ ID NO: 444071 - DNA, 30 bp, Artificial Sequence
  Synthetic oligonucleotide
ccgatctgccgatcgggtttagtgggctga

SEQ ID NO: 444072 - DNA, 30 bp, Artificial Sequence
  Synthetic oligonucleotide
gacccgaaccaatctagccgtactggctga

SEQ ID NO: 444073 - DNA, 30 bp, Artificial Sequence
  Synthetic oligonucleotide
gaaaaaaagagagtaactaacacatgctga

SEQ ID NO: 444074 - DNA, 30 bp, Artificial Sequence
  Synthetic oligonucleotide
gtttgatcggtgcaatgaggcatatgctga

SEQ ID NO: 444075 - DNA, 30 bp, Artificial Sequence
  Synthetic oligonucleotide
acaaatggtgcggcttcttcccactgctga

SEQ ID NO: 444076 - DNA, 30 bp, Artificial Sequence
  Synthetic oligonucleotide
cgtcaggtggccttttcgggctactgctga

SEQ ID NO: 444077 - DNA, 30 bp, Artificial Sequence
  Synthetic oligonucleotide
gcccggcttgatagtttgaggccaatctga

SEQ ID NO: 444078 - DNA, 30 bp, Artificial Sequence
  Synthetic oligonucleotide
ggtttgatattcagttattggcccatctga

SEQ ID NO: 444079 - DNA, 30 bp, Artificial Sequence
  Synthetic oligonucleotide
gacccagatcgcacttggtaacatatctga

SEQ ID NO: 444080 - DNA, 30 bp, Artificial Sequence
  Synthetic oligonucleotide
aaggcatcaatagcgttatctggtatctga

SEQ ID NO: 444081 - DNA, 30 bp, Artificial Sequence
  Synthetic oligonucleotide
tgggtgtttaattgccagttaatgctctga

SEQ ID NO: 444082 - DNA, 30 bp, Artificial Sequence
  Synthetic oligonucleotide
taccttggaacggattcagggtttctctga

SEQ ID NO: 444083 - DNA, 30 bp, Artificial Sequence
  Synthetic oligonucleotide
agagtattttatgagagttctccagtctga

SEQ ID NO: 444084 - DNA, 30 bp, Artificial Sequence
  Synthetic oligonucleotide
gtgacagcgttgtataaagtgctagtctga

SEQ ID NO: 444085 - DNA, 30 bp, Artificial Sequence
  Synthetic oligonucleotide
gggggacgctctctaatgataagcgtctga

SEQ ID NO: 444086 - DNA, 30 bp, Artificial Sequence
  Synthetic oligonucleotide
tgtactaccgcctggcggaggtgcgtctga

SEQ ID NO: 444087 - DNA, 30 bp, Artificial Sequence
  Synthetic oligonucleotide
gcccgattagattggtcgagccaggtctga

SEQ ID NO: 444088 - DNA, 30 bp, Artificial Sequence
  Synthetic oligonucleotide
gagtctatagcctgacctccaccggtctga

SEQ ID NO: 444089 - DNA, 30 bp, Artificial Sequence
  Synthetic oligonucleotide
aatcttgtatcggaagaagacgtggtctga

SEQ ID NO: 444090 - DNA, 30 bp, Artificial Sequence
  Synthetic oligonucleotide
cctactcgagcttttcactggtatgtctga

SEQ ID NO: 444091 - DNA, 30 bp, Artificial Sequence
  Synthetic oligonucleotide
ttttatagcccatatagaggcattgtctga

SEQ ID NO: 444092 - DNA, 30 bp, Artificial Sequence
  Synthetic oligonucleotide
tctcttatcgaaggggattccggattctga

SEQ ID NO: 444093 - DNA, 30 bp, Artificial Sequence
  Synthetic oligonucleotide
cgctgtttggccaatcagggccacttctga

SEQ ID NO: 444094 - DNA, 30 bp, Artificial Sequence
  Synthetic oligonucleotide
atttagcgactgcgtggctaatacttctga

SEQ ID NO: 444095 - DNA, 30 bp, Artificial Sequence
  Synthetic oligonucleotide
cctatcattaagctgcccacgcggttctga

SEQ ID NO: 444096 - DNA, 30 bp, Artificial Sequence
  Synthetic oligonucleotide
tagtgggatttaattcaggaatggttctga

SEQ ID NO: 444097 - DNA, 30 bp, Artificial Sequence
  Synthetic oligonucleotide
tgatccttgttggctgtctggcaaaagtga

SEQ ID NO: 444098 - DNA, 30 bp, Artificial Sequence
  Synthetic oligonucleotide
agggccttgatagcgggcaaggcaaagtga

SEQ ID NO: 444099 - DNA, 30 bp, Artificial Sequence
  Synthetic oligonucleotide
ctctataattcgcggcgactcagaaagtga

SEQ ID NO: 444100 - DNA, 30 bp, Artificial Sequence
  Synthetic oligonucleotide
ctcgcatattttcctctggcggtaaagtga

SEQ ID NO: 444101 - DNA, 30 bp, Artificial Sequence
  Synthetic oligonucleotide
gtaatctatataacggtgggttccaagtga

SEQ ID NO: 444102 - DNA, 30 bp, Artificial Sequence
  Synthetic oligonucleotide
taagcgttgggggcagactcaagcaagtga

SEQ ID NO: 444103 - DNA, 30 bp, Artificial Sequence
  Synthetic oligonucleotide
tatcgacctaactgaaataatgggaagtga

SEQ ID NO: 444104 - DNA, 30 bp, Artificial Sequence
  Synthetic oligonucleotide
ctcgcacaatcgcttaccgacctgaagtga

SEQ ID NO: 444105 - DNA, 30 bp, Artificial Sequence
  Synthetic oligonucleotide
ttgcaacttaaactctttcgtggacagtga

SEQ ID NO: 444106 - DNA, 30 bp, Artificial Sequence
  Synthetic oligonucleotide
ataggggagtgattgttggttatgcagtga

SEQ ID NO: 444107 - DNA, 30 bp, Artificial Sequence
  Synthetic oligonucleotide
gatcatgagctatagtgtcacctgcagtga

SEQ ID NO: 444108 - DNA, 30 bp, Artificial Sequence
  Synthetic oligonucleotide
gttcagagcaggcacgctcaacgtcagtga

SEQ ID NO: 444109 - DNA, 30 bp, Artificial Sequence
  Synthetic oligonucleotide
taggtcaaatatggtgaagtatgtcagtga

SEQ ID NO: 444110 - DNA, 30 bp, Artificial Sequence
  Synthetic oligonucleotide
tactctggtgcgtcattgcgctgtcagtga

SEQ ID NO: 444111 - DNA, 29 bp, Artificial Sequence
  Synthetic oligonucleotide
agaactcgcttaggtagatctttcagtga

SEQ ID NO: 444112 - DNA, 30 bp, Artificial Sequence
  Synthetic oligonucleotide
tgatgattcgttcgatggtttggcgagtga

SEQ ID NO: 444113 - DNA, 30 bp, Artificial Sequence
  Synthetic oligonucleotide
aagtgcaccggtgaactcgacttggagtga

SEQ ID NO: 444114 - DNA, 30 bp, Artificial Sequence
  Synthetic oligonucleotide
gcgcaaaccaatccaggaatctctgagtga

SEQ ID NO: 444115 - DNA, 30 bp, Artificial Sequence
  Synthetic oligonucleotide
ggggtctcgtacaaatgttcgtaatagtga

SEQ ID NO: 444116 - DNA, 30 bp, Artificial Sequence
  Synthetic oligonucleotide
gtgaggtggtattaaacggaacgatagtga

SEQ ID NO: 444117 - DNA, 30 bp, Artificial Sequence
  Synthetic oligonucleotide
aagttctaattacaggttaccggatagtga

SEQ ID NO: 444118 - DNA, 31 bp, Artificial Sequence
  Synthetic oligonucleotide
caattgagccggcgcccacgtatgatagtga

SEQ ID NO: 444119 - DNA, 30 bp, Artificial Sequence
  Synthetic oligonucleotide
tcggttgaggtctttacacccaactagtga

SEQ ID NO: 444120 - DNA, 30 bp, Artificial Sequence
  Synthetic oligonucleotide
cacctattggcggcagagctcaggtagtga

SEQ ID NO: 444121 - DNA, 30 bp, Artificial Sequence
  Synthetic oligonucleotide
tcttttctcaggtgaaaaagggggtagtga

SEQ ID NO: 444122 - DNA, 30 bp, Artificial Sequence
  Synthetic oligonucleotide
taacccgctttgaacagtggatcttagtga

SEQ ID NO: 444123 - DNA, 30 bp, Artificial Sequence
  Synthetic oligonucleotide
atacttttgatttccgtcccctcttagtga

SEQ ID NO: 444124 - DNA, 30 bp, Artificial Sequence
  Synthetic oligonucleotide
tgaaagcttttaacctacccgggttagtga

SEQ ID NO: 444125 - DNA, 30 bp, Artificial Sequence
  Synthetic oligonucleotide
ttattaggcctttgaatggctctttagtga

SEQ ID NO: 444126 - DNA, 30 bp, Artificial Sequence
  Synthetic oligonucleotide
gtaaacatcaacttgttccaaataacgtga

SEQ ID NO: 444127 - DNA, 30 bp, Artificial Sequence
  Synthetic oligonucleotide
atcgggcctgatggctcttttaacacgtga

SEQ ID NO: 444128 - DNA, 30 bp, Artificial Sequence
  Synthetic oligonucleotide
ggaatctgtagttaccgaatcatcacgtga

SEQ ID NO: 444129 - DNA, 30 bp, Artificial Sequence
  Synthetic oligonucleotide
gacagtacttgttttagttcagagacgtga

SEQ ID NO: 444130 - DNA, 30 bp, Artificial Sequence
  Synthetic oligonucleotide
gtaaattactactctaagcccgcgacgtga

SEQ ID NO: 444131 - DNA, 30 bp, Artificial Sequence
  Synthetic oligonucleotide
gcttcatccatatctggcactggtacgtga

SEQ ID NO: 444132 - DNA, 30 bp, Artificial Sequence
  Synthetic oligonucleotide
ttattgggaaaccataggaccattacgtga

SEQ ID NO: 444133 - DNA, 30 bp, Artificial Sequence
  Synthetic oligonucleotide
cccgggcgcacccggggcataaggccgtga

SEQ ID NO: 444134 - DNA, 30 bp, Artificial Sequence
  Synthetic oligonucleotide
gagtaggctttaaaaggtcagcttccgtga

SEQ ID NO: 444135 - DNA, 30 bp, Artificial Sequence
  Synthetic oligonucleotide
cgtgattcattaccggtggggactgcgtga

SEQ ID NO: 444136 - DNA, 30 bp, Artificial Sequence
  Synthetic oligonucleotide
acatcacgtttttgcgtcattcgtgcgtga

SEQ ID NO: 444137 - DNA, 30 bp, Artificial Sequence
  Synthetic oligonucleotide
cccgagattttcaccaggcgaattgcgtga

SEQ ID NO: 444138 - DNA, 30 bp, Artificial Sequence
  Synthetic oligonucleotide
cgaacacatataaatggttcatgaaggtga

SEQ ID NO: 444139 - DNA, 30 bp, Artificial Sequence
  Synthetic oligonucleotide
gcagctattgaccacatacataccaggtga

SEQ ID NO: 444140 - DNA, 30 bp, Artificial Sequence
  Synthetic oligonucleotide
aaaaataagcttgtcgaaacccggaggtga

SEQ ID NO: 444141 - DNA, 30 bp, Artificial Sequence
  Synthetic oligonucleotide
ctctattggtactctgggtccaataggtga

SEQ ID NO: 444142 - DNA, 30 bp, Artificial Sequence
  Synthetic oligonucleotide
aagaatcttgacgaatacgtaagtaggtga

SEQ ID NO: 444143 - DNA, 30 bp, Artificial Sequence
  Synthetic oligonucleotide
aaagtttatggccttgaatatcaacggtga

SEQ ID NO: 444144 - DNA, 30 bp, Artificial Sequence
  Synthetic oligonucleotide
gttaccctagaaccatgagtactacggtga

SEQ ID NO: 444145 - DNA, 30 bp, Artificial Sequence
  Synthetic oligonucleotide
gacattctccttgcaatttagaggcggtga

SEQ ID NO: 444146 - DNA, 30 bp, Artificial Sequence
  Synthetic oligonucleotide
tatattggatcctaatcggactatcggtga

SEQ ID NO: 444147 - DNA, 30 bp, Artificial Sequence
  Synthetic oligonucleotide
catctggccggtcataatctaagagggtga

SEQ ID NO: 444148 - DNA, 30 bp, Artificial Sequence
  Synthetic oligonucleotide
aacaaagacccacttatatatagcgggtga

SEQ ID NO: 444149 - DNA, 30 bp, Artificial Sequence
  Synthetic oligonucleotide
gctttgttataaattggtatctttgggtga

SEQ ID NO: 444150 - DNA, 30 bp, Artificial Sequence
  Synthetic oligonucleotide
aaccgcgcctacacagcttgacgatggtga

SEQ ID NO: 444151 - DNA, 30 bp, Artificial Sequence
  Synthetic oligonucleotide
atcaccttgctgcgtctgggaccctggtga

SEQ ID NO: 444152 - DNA, 30 bp, Artificial Sequence
  Synthetic oligonucleotide
tgttggtactattcaagtcaatattggtga

SEQ ID NO: 444153 - DNA, 30 bp, Artificial Sequence
  Synthetic oligonucleotide
cgcatatatgaggacgcggtcccttggtga

SEQ ID NO: 444154 - DNA, 30 bp, Artificial Sequence
  Synthetic oligonucleotide
gttagtaagaatttagcgcttgcttggtga

SEQ ID NO: 444155 - DNA, 30 bp, Artificial Sequence
  Synthetic oligonucleotide
gatgttaaactacttcgtaagagttggtga

SEQ ID NO: 444156 - DNA, 30 bp, Artificial Sequence
  Synthetic oligonucleotide
gtccagctccatgcgttttatcgaatgtga

SEQ ID NO: 444157 - DNA, 30 bp, Artificial Sequence
  Synthetic oligonucleotide
ctggggaaccatcacctatttttaatgtga

SEQ ID NO: 444158 - DNA, 30 bp, Artificial Sequence
  Synthetic oligonucleotide
tctgtgtcggaagtgaactaaaacatgtga

SEQ ID NO: 444159 - DNA, 30 bp, Artificial Sequence
  Synthetic oligonucleotide
gcactaatgggagcataagaccccatgtga

SEQ ID NO: 444160 - DNA, 30 bp, Artificial Sequence
  Synthetic oligonucleotide
acctactcctaggaagtccatggcatgtga

SEQ ID NO: 444161 - DNA, 30 bp, Artificial Sequence
  Synthetic oligonucleotide
acccgcgtggtagagcgagtattcatgtga

SEQ ID NO: 444162 - DNA, 30 bp, Artificial Sequence
  Synthetic oligonucleotide
gtcgcaccggtcgacgcttgtaggatgtga

SEQ ID NO: 444163 - DNA, 30 bp, Artificial Sequence
  Synthetic oligonucleotide
gatttccgtctgctggttctaagcctgtga

SEQ ID NO: 444164 - DNA, 30 bp, Artificial Sequence
  Synthetic oligonucleotide
gattatttgggcataaaaagcgtcctgtga

SEQ ID NO: 444165 - DNA, 30 bp, Artificial Sequence
  Synthetic oligonucleotide
gaaggatcacgtatactactggcgctgtga

SEQ ID NO: 444166 - DNA, 30 bp, Artificial Sequence
  Synthetic oligonucleotide
attgattgcgactggcagtcatggctgtga

SEQ ID NO: 444167 - DNA, 30 bp, Artificial Sequence
  Synthetic oligonucleotide
gagcttgtgtgcccgtatcgcctgctgtga

SEQ ID NO: 444168 - DNA, 30 bp, Artificial Sequence
  Synthetic oligonucleotide
agtgatgcggttcggcttcaaaatctgtga

SEQ ID NO: 444169 - DNA, 30 bp, Artificial Sequence
  Synthetic oligonucleotide
agaattggtgtccactccgtatttctgtga

SEQ ID NO: 444170 - DNA, 30 bp, Artificial Sequence
  Synthetic oligonucleotide
tcattaaatgggtgttattggtccgtgtga

SEQ ID NO: 444171 - DNA, 30 bp, Artificial Sequence
  Synthetic oligonucleotide
ggcctaaattttcaacaatacttcgtgtga

SEQ ID NO: 444172 - DNA, 30 bp, Artificial Sequence
  Synthetic oligonucleotide
ttactttaattgaactgttgagatgtgtga

SEQ ID NO: 444173 - DNA, 30 bp, Artificial Sequence
  Synthetic oligonucleotide
tctatcttatgggaggtggtatttgtgtga

SEQ ID NO: 444174 - DNA, 30 bp, Artificial Sequence
  Synthetic oligonucleotide
tcgtatcgccacaagcaatggccattgtga

SEQ ID NO: 444175 - DNA, 30 bp, Artificial Sequence
  Synthetic oligonucleotide
agccgtaaaagtagatagcgcgccttgtga

SEQ ID NO: 444176 - DNA, 30 bp, Artificial Sequence
  Synthetic oligonucleotide
gtttggttgatccatagtagaatgttgtga

SEQ ID NO: 444177 - DNA, 30 bp, Artificial Sequence
  Synthetic oligonucleotide
caagtctgcgtaccagttttaaaaaattga

SEQ ID NO: 444178 - DNA, 30 bp, Artificial Sequence
  Synthetic oligonucleotide
tatgcttgggtaatgtccaaatataattga

SEQ ID NO: 444179 - DNA, 30 bp, Artificial Sequence
  Synthetic oligonucleotide
ttagctcgtgtcattcacttgcgtaattga

SEQ ID NO: 444180 - DNA, 30 bp, Artificial Sequence
  Synthetic oligonucleotide
cctcgcgttaagcagcaacaggtacattga

SEQ ID NO: 444181 - DNA, 30 bp, Artificial Sequence
  Synthetic oligonucleotide
gcgatgagtccgcccgtatgattacattga

SEQ ID NO: 444182 - DNA, 30 bp, Artificial Sequence
  Synthetic oligonucleotide
tttgccctttgcgagcatagataccattga

SEQ ID NO: 444183 - DNA, 30 bp, Artificial Sequence
  Synthetic oligonucleotide
atacgaaagcaaactgctgattaccattga

SEQ ID NO: 444184 - DNA, 30 bp, Artificial Sequence
  Synthetic oligonucleotide
tcatccccattcgtatcatcgcctcattga

SEQ ID NO: 444185 - DNA, 30 bp, Artificial Sequence
  Synthetic oligonucleotide
cacttacagttaccagtcgtgcaagattga

SEQ ID NO: 444186 - DNA, 30 bp, Artificial Sequence
  Synthetic oligonucleotide
ttttggtggtactcacaaaacgtagattga

SEQ ID NO: 444187 - DNA, 30 bp, Artificial Sequence
  Synthetic oligonucleotide
gggtttaagcatacaattaagcccgattga

SEQ ID NO: 444188 - DNA, 30 bp, Artificial Sequence
  Synthetic oligonucleotide
atactgcacatgaccgtctgatgcgattga

SEQ ID NO: 444189 - DNA, 30 bp, Artificial Sequence
  Synthetic oligonucleotide
agaatacgtttggcggcagccctcgattga

SEQ ID NO: 444190 - DNA, 30 bp, Artificial Sequence
  Synthetic oligonucleotide
ctctacaagtctctgctcacgctggattga

SEQ ID NO: 444191 - DNA, 30 bp, Artificial Sequence
  Synthetic oligonucleotide
atttataagggacgttaaacctctgattga

SEQ ID NO: 444192 - DNA, 30 bp, Artificial Sequence
  Synthetic oligonucleotide
ttgcgttgatggctttacgcggttgattga

SEQ ID NO: 444193 - DNA, 30 bp, Artificial Sequence
  Synthetic oligonucleotide
aactgcgcgggagcatacgtatcctattga

SEQ ID NO: 444194 - DNA, 30 bp, Artificial Sequence
  Synthetic oligonucleotide
tatacgtgcgattttgcactaagctattga

SEQ ID NO: 444195 - DNA, 30 bp, Artificial Sequence
  Synthetic oligonucleotide
acatagctttcttcgcgtccacggtattga

SEQ ID NO: 444196 - DNA, 30 bp, Artificial Sequence
  Synthetic oligonucleotide
gagcctgtggcaaatcttatcatgtattga

SEQ ID NO: 444197 - DNA, 30 bp, Artificial Sequence
  Synthetic oligonucleotide
tcatatctacactagaagttagtgtattga

SEQ ID NO: 444198 - DNA, 30 bp, Artificial Sequence
  Synthetic oligonucleotide
ggccgagcacagctcttaagcttgtattga

SEQ ID NO: 444199 - DNA, 30 bp, Artificial Sequence
  Synthetic oligonucleotide
actgctgtagcaagaggttcgaattattga

SEQ ID NO: 444200 - DNA, 30 bp, Artificial Sequence
  Synthetic oligonucleotide
tgtcagggcggccgctatttcatgacttga

SEQ ID NO: 444201 - DNA, 30 bp, Artificial Sequence
  Synthetic oligonucleotide
cttgttaggtgaaggaaactcctgacttga

SEQ ID NO: 444202 - DNA, 30 bp, Artificial Sequence
  Synthetic oligonucleotide
taggggatatctaattcgcgattcccttga

SEQ ID NO: 444203 - DNA, 30 bp, Artificial Sequence
  Synthetic oligonucleotide
aattattgtcggagagtagagcagccttga

SEQ ID NO: 444204 - DNA, 30 bp, Artificial Sequence
  Synthetic oligonucleotide
ctcacgtagacccaattatgagagccttga

SEQ ID NO: 444205 - DNA, 30 bp, Artificial Sequence
  Synthetic oligonucleotide
tccgaaccactactttcagaattgccttga

SEQ ID NO: 444206 - DNA, 30 bp, Artificial Sequence
  Synthetic oligonucleotide
gacttcagtggaccgttcctaggtccttga

SEQ ID NO: 444207 - DNA, 30 bp, Artificial Sequence
  Synthetic oligonucleotide
cgtagcataataaatttagcccgagcttga

SEQ ID NO: 444208 - DNA, 30 bp, Artificial Sequence
  Synthetic oligonucleotide
aagaggcgtgagtttcgccgggtcgcttga

SEQ ID NO: 444209 - DNA, 30 bp, Artificial Sequence
  Synthetic oligonucleotide
gcactcacaggtactcaaacggtggcttga

SEQ ID NO: 444210 - DNA, 30 bp, Artificial Sequence
  Synthetic oligonucleotide
gcatcacacctctattaatctgttgcttga

SEQ ID NO: 444211 - DNA, 30 bp, Artificial Sequence
  Synthetic oligonucleotide
ggcttagaaatcaagaggtccttatcttga

SEQ ID NO: 444212 - DNA, 30 bp, Artificial Sequence
  Synthetic oligonucleotide
atccatagtcattgtcagccggactcttga

SEQ ID NO: 444213 - DNA, 30 bp, Artificial Sequence
  Synthetic oligonucleotide
tgtttcacggtagggttgtcggcgtcttga

SEQ ID NO: 444214 - DNA, 30 bp, Artificial Sequence
  Synthetic oligonucleotide
taacacaacgttctcctcgcggcttcttga

SEQ ID NO: 444215 - DNA, 30 bp, Artificial Sequence
  Synthetic oligonucleotide
gggtgttgtcgtagcgaatctatttcttga

SEQ ID NO: 444216 - DNA, 30 bp, Artificial Sequence
  Synthetic oligonucleotide
gggtgaaaagcagttatagcagtaagttga

SEQ ID NO: 444217 - DNA, 30 bp, Artificial Sequence
  Synthetic oligonucleotide
aataccggcacttcttccagagacagttga

SEQ ID NO: 444218 - DNA, 30 bp, Artificial Sequence
  Synthetic oligonucleotide
ggtctccggatattttactattagagttga

SEQ ID NO: 444219 - DNA, 30 bp, Artificial Sequence
  Synthetic oligonucleotide
agatcctcgtttggacatcataggagttga

SEQ ID NO: 444220 - DNA, 30 bp, Artificial Sequence
  Synthetic oligonucleotide
gtcagattgaggcataaccggggtagttga

SEQ ID NO: 444221 - DNA, 30 bp, Artificial Sequence
  Synthetic oligonucleotide
ttatgcaatgcggtcatcctctaacgttga

SEQ ID NO: 444222 - DNA, 30 bp, Artificial Sequence
  Synthetic oligonucleotide
gctgtactttgggtccggcttcaccgttga

SEQ ID NO: 444223 - DNA, 30 bp, Artificial Sequence
  Synthetic oligonucleotide
gtactacatgcgttgggcagtccccgttga

SEQ ID NO: 444224 - DNA, 30 bp, Artificial Sequence
  Synthetic oligonucleotide
atttctgatctatcgtattttgtccgttga

SEQ ID NO: 444225 - DNA, 30 bp, Artificial Sequence
  Synthetic oligonucleotide
atggtatggccatctgcttcacagcgttga

SEQ ID NO: 444226 - DNA, 30 bp, Artificial Sequence
  Synthetic oligonucleotide
gggagtctagaccccatcacccggcgttga

SEQ ID NO: 444227 - DNA, 29 bp, Artificial Sequence
  Synthetic oligonucleotide
attgtacggtggagaatacacgtcgttga

SEQ ID NO: 444228 - DNA, 30 bp, Artificial Sequence
  Synthetic oligonucleotide
tcggaccgagtccttggactttttcgttga

SEQ ID NO: 444229 - DNA, 30 bp, Artificial Sequence
  Synthetic oligonucleotide
tagctcaacccttgcctcgatcaaggttga

SEQ ID NO: 444230 - DNA, 30 bp, Artificial Sequence
  Synthetic oligonucleotide
actcaactgtcttaaatatgctaaggttga

SEQ ID NO: 444231 - DNA, 30 bp, Artificial Sequence
  Synthetic oligonucleotide
tctttgtataatcattactaaaacggttga

SEQ ID NO: 444232 - DNA, 30 bp, Artificial Sequence
  Synthetic oligonucleotide
ccccatacgcaaatacatacccacggttga

SEQ ID NO: 444233 - DNA, 30 bp, Artificial Sequence
  Synthetic oligonucleotide
ctggcgtaatggccaccgccagtcggttga

SEQ ID NO: 444234 - DNA, 30 bp, Artificial Sequence
  Synthetic oligonucleotide
cggacctattgcacccgtaaattcggttga

SEQ ID NO: 444235 - DNA, 30 bp, Artificial Sequence
  Synthetic oligonucleotide
taacagctagtttggtatgcgttcggttga

SEQ ID NO: 444236 - DNA, 30 bp, Artificial Sequence
  Synthetic oligonucleotide
atgcactttatccgacttcataagggttga

SEQ ID NO: 444237 - DNA, 30 bp, Artificial Sequence
  Synthetic oligonucleotide
ttaatgcaagagggcgaggcctagggttga

SEQ ID NO: 444238 - DNA, 30 bp, Artificial Sequence
  Synthetic oligonucleotide
tcctctttgaattggcaaactacgggttga

SEQ ID NO: 444239 - DNA, 30 bp, Artificial Sequence
  Synthetic oligonucleotide
tatcggagtaaaggcgtacaagggggttga

SEQ ID NO: 444240 - DNA, 30 bp, Artificial Sequence
  Synthetic oligonucleotide
atagtacatccaagaatcgtccatggttga

SEQ ID NO: 444241 - DNA, 30 bp, Artificial Sequence
  Synthetic oligonucleotide
attctttagggggtgggtagatcatgttga

SEQ ID NO: 444242 - DNA, 30 bp, Artificial Sequence
  Synthetic oligonucleotide
cgttcattctcagttcatttaatatgttga

SEQ ID NO: 444243 - DNA, 30 bp, Artificial Sequence
  Synthetic oligonucleotide
aaactgcgtcgagcgcctatcatatgttga

SEQ ID NO: 444244 - DNA, 30 bp, Artificial Sequence
  Synthetic oligonucleotide
cgggaccactcattcgatcgcaactgttga

SEQ ID NO: 444245 - DNA, 30 bp, Artificial Sequence
  Synthetic oligonucleotide
atgcggtactcagtatctggcaactgttga

SEQ ID NO: 444246 - DNA, 30 bp, Artificial Sequence
  Synthetic oligonucleotide
cgcaccgatctaaggtacgtgacctgttga

SEQ ID NO: 444247 - DNA, 30 bp, Artificial Sequence
  Synthetic oligonucleotide
agaggaacagtctcaggttatcagtgttga

SEQ ID NO: 444248 - DNA, 30 bp, Artificial Sequence
  Synthetic oligonucleotide
gcatgccttattacagctgtagattgttga

SEQ ID NO: 444249 - DNA, 30 bp, Artificial Sequence
  Synthetic oligonucleotide
ataagcggtccggataggcgggcaatttga

SEQ ID NO: 444250 - DNA, 30 bp, Artificial Sequence
  Synthetic oligonucleotide
tagattttgagtcgagaattcttaatttga

SEQ ID NO: 444251 - DNA, 30 bp, Artificial Sequence
  Synthetic oligonucleotide
atagtctgcagctatggggataacatttga

SEQ ID NO: 444252 - DNA, 30 bp, Artificial Sequence
  Synthetic oligonucleotide
cggagtatcgggtgatacggggccatttga

SEQ ID NO: 444253 - DNA, 30 bp, Artificial Sequence
  Synthetic oligonucleotide
tgaaaggcgcgtctaccatttgcgatttga

SEQ ID NO: 444254 - DNA, 30 bp, Artificial Sequence
  Synthetic oligonucleotide
ggactattgtttgtgaaggtgtaactttga

SEQ ID NO: 444255 - DNA, 30 bp, Artificial Sequence
  Synthetic oligonucleotide
gtcagggattcgcaaagtggtaccctttga

SEQ ID NO: 444256 - DNA, 30 bp, Artificial Sequence
  Synthetic oligonucleotide
gacctttgcaagcataaacatacgctttga

SEQ ID NO: 444257 - DNA, 30 bp, Artificial Sequence
  Synthetic oligonucleotide
caacttaccagctgagccgggccgctttga

SEQ ID NO: 444258 - DNA, 30 bp, Artificial Sequence
  Synthetic oligonucleotide
tagtatcatcctaaaaaaggcatgctttga

SEQ ID NO: 444259 - DNA, 30 bp, Artificial Sequence
  Synthetic oligonucleotide
gtagatgagagttcattagaaaatctttga

SEQ ID NO: 444260 - DNA, 30 bp, Artificial Sequence
  Synthetic oligonucleotide
ctatcatccctattatgagactatctttga

SEQ ID NO: 444261 - DNA, 30 bp, Artificial Sequence
  Synthetic oligonucleotide
agcttttgtcaatctggcgacagtctttga

SEQ ID NO: 444262 - DNA, 30 bp, Artificial Sequence
  Synthetic oligonucleotide
tccgaggtcatttggacagtaagagtttga

SEQ ID NO: 444263 - DNA, 30 bp, Artificial Sequence
  Synthetic oligonucleotide
gggagggtctaatggtaccccatagtttga

SEQ ID NO: 444264 - DNA, 30 bp, Artificial Sequence
  Synthetic oligonucleotide
aatctgttaagttggttctcttacgtttga

SEQ ID NO: 444265 - DNA, 30 bp, Artificial Sequence
  Synthetic oligonucleotide
aaggcctttccatgagctggattggtttga

SEQ ID NO: 444266 - DNA, 30 bp, Artificial Sequence
  Synthetic oligonucleotide
gtaatttcgtatggccattagcatgtttga

SEQ ID NO: 444267 - DNA, 31 bp, Artificial Sequence
  Synthetic oligonucleotide
taacatgggtcgatcaacgtatactgtttga

SEQ ID NO: 444268 - DNA, 30 bp, Artificial Sequence
  Synthetic oligonucleotide
gatgcagttcttaatagcaaataattttga

SEQ ID NO: 444269 - DNA, 30 bp, Artificial Sequence
  Synthetic oligonucleotide
caggttctgcgaatgggtattcgattttga

SEQ ID NO: 444270 - DNA, 30 bp, Artificial Sequence
  Synthetic oligonucleotide
tatcaggacaagctcattagtggattttga

SEQ ID NO: 444271 - DNA, 30 bp, Artificial Sequence
  Synthetic oligonucleotide
gcatcgtttggggttaatacccacttttga

SEQ ID NO: 444272 - DNA, 30 bp, Artificial Sequence
  Synthetic oligonucleotide
agttactcctgactgaaaacgagcttttga

SEQ ID NO: 444273 - DNA, 30 bp, Artificial Sequence
  Synthetic oligonucleotide
ggtgtcataattagactgtgacgcttttga

SEQ ID NO: 444274 - DNA, 30 bp, Artificial Sequence
  Synthetic oligonucleotide
aaccaaaattaatagcctctcccgttttga

SEQ ID NO: 444275 - DNA, 30 bp, Artificial Sequence
  Synthetic oligonucleotide
gtctcggccttttgtttgattaggttttga

SEQ ID NO: 444276 - DNA, 30 bp, Artificial Sequence
  Synthetic oligonucleotide
cccgggtagggatcaattctatggttttga

SEQ ID NO: 444277 - DNA, 30 bp, Artificial Sequence
  Synthetic oligonucleotide
ttgggttgcctttgttgcatgaatttttga

SEQ ID NO: 444278 - DNA, 30 bp, Artificial Sequence
  Synthetic oligonucleotide
aaagtgaattcatcactaccagatttttga

SEQ ID NO: 444279 - DNA, 30 bp, Artificial Sequence
  Synthetic oligonucleotide
actatgtatggcatgctatgctatttttga

SEQ ID NO: 444280 - DNA, 30 bp, Artificial Sequence
  Synthetic oligonucleotide
ccacacctgaaacccatactatgtttttga

SEQ ID NO: 444281 - DNA, 30 bp, Artificial Sequence
  Synthetic oligonucleotide
ggcgtggcctaatattccggactaaaaata

SEQ ID NO: 444282 - DNA, 30 bp, Artificial Sequence
  Synthetic oligonucleotide
ttcgctccttaggattgcttccgcaaaata

SEQ ID NO: 444283 - DNA, 30 bp, Artificial Sequence
  Synthetic oligonucleotide
ttgtcagctttcaaattaataccgaaaata

SEQ ID NO: 444284 - DNA, 30 bp, Artificial Sequence
  Synthetic oligonucleotide
acgcccgtcttaatattacccaataaaata

SEQ ID NO: 444285 - DNA, 30 bp, Artificial Sequence
  Synthetic oligonucleotide
agctgacaccactacccaagcaataaaata

SEQ ID NO: 444286 - DNA, 30 bp, Artificial Sequence
  Synthetic oligonucleotide
aaaagaataagctggtggttgcctaaaata

SEQ ID NO: 444287 - DNA, 30 bp, Artificial Sequence
  Synthetic oligonucleotide
ttacggacggatgaggtacgcagacaaata

SEQ ID NO: 444288 - DNA, 30 bp, Artificial Sequence
  Synthetic oligonucleotide
agcatataataccagtaagcctgacaaata

SEQ ID NO: 444289 - DNA, 30 bp, Artificial Sequence
  Synthetic oligonucleotide
gatcaggaggccagttgagagccccaaata

SEQ ID NO: 444290 - DNA, 30 bp, Artificial Sequence
  Synthetic oligonucleotide
aaacgccgtgttttactgtatggccaaata

SEQ ID NO: 444291 - DNA, 30 bp, Artificial Sequence
  Synthetic oligonucleotide
ggagtctgtgaacaccaggacgtccaaata

SEQ ID NO: 444292 - DNA, 30 bp, Artificial Sequence
  Synthetic oligonucleotide
accagctatattgaaagcagcgcgcaaata

SEQ ID NO: 444293 - DNA, 30 bp, Artificial Sequence
  Synthetic oligonucleotide
cgtaagtgtgtggctggtcaggggcaaata

SEQ ID NO: 444294 - DNA, 30 bp, Artificial Sequence
  Synthetic oligonucleotide
ccagttttaatggcaacgatgttgcaaata

SEQ ID NO: 444295 - DNA, 30 bp, Artificial Sequence
  Synthetic oligonucleotide
caatatgcgctatactagagcaatcaaata

SEQ ID NO: 444296 - DNA, 30 bp, Artificial Sequence
  Synthetic oligonucleotide
ggcatgaagtgatggatgaatcatcaaata

SEQ ID NO: 444297 - DNA, 30 bp, Artificial Sequence
  Synthetic oligonucleotide
gggaagatacggagtcataggggtcaaata

SEQ ID NO: 444298 - DNA, 30 bp, Artificial Sequence
  Synthetic oligonucleotide
aataactagtgcctgttagatcttcaaata

SEQ ID NO: 444299 - DNA, 30 bp, Artificial Sequence
  Synthetic oligonucleotide
aaactcgcatccaatcaacctatagaaata

SEQ ID NO: 444300 - DNA, 30 bp, Artificial Sequence
  Synthetic oligonucleotide
gcgctaaaccttatatgtcgtgacgaaata

SEQ ID NO: 444301 - DNA, 30 bp, Artificial Sequence
  Synthetic oligonucleotide
gacgcggcttccgttgagaggaaggaaata

SEQ ID NO: 444302 - DNA, 30 bp, Artificial Sequence
  Synthetic oligonucleotide
ttcgaatctacatgatatgttgcggaaata

SEQ ID NO: 444303 - DNA, 30 bp, Artificial Sequence
  Synthetic oligonucleotide
ataagcagtagtggtcttttgcatgaaata

SEQ ID NO: 444304 - DNA, 30 bp, Artificial Sequence
  Synthetic oligonucleotide
tctgataggcgtttggcgttatttgaaata

SEQ ID NO: 444305 - DNA, 30 bp, Artificial Sequence
  Synthetic oligonucleotide
tttcgcatgtataaggcgctcagataaata

SEQ ID NO: 444306 - DNA, 30 bp, Artificial Sequence
  Synthetic oligonucleotide
actaagttatggatcaatatcatataaata

SEQ ID NO: 444307 - DNA, 30 bp, Artificial Sequence
  Synthetic oligonucleotide
aacaattcgtcggatgaccgtgactaaata

SEQ ID NO: 444308 - DNA, 30 bp, Artificial Sequence
  Synthetic oligonucleotide
gccagatcaccgattacatgcttctaaata

SEQ ID NO: 444309 - DNA, 30 bp, Artificial Sequence
  Synthetic oligonucleotide
tttgcaaaaatgtatcgataactgtaaata

SEQ ID NO: 444310 - DNA, 30 bp, Artificial Sequence
  Synthetic oligonucleotide
ggtatatatccattaatgtgactgtaaata

SEQ ID NO: 444311 - DNA, 30 bp, Artificial Sequence
  Synthetic oligonucleotide
gtaaatctaacctttcatgggctgtaaata

SEQ ID NO: 444312 - DNA, 30 bp, Artificial Sequence
  Synthetic oligonucleotide
gcatgtggctactgcgtcccgacttaaata

SEQ ID NO: 444313 - DNA, 30 bp, Artificial Sequence
  Synthetic oligonucleotide
aataggaatctatgaaatattcgttaaata

SEQ ID NO: 444314 - DNA, 30 bp, Artificial Sequence
  Synthetic oligonucleotide
atgcgctatcgatactgataaatttaaata

SEQ ID NO: 444315 - DNA, 30 bp, Artificial Sequence
  Synthetic oligonucleotide
atgatcgaggaagacggtcagctttaaata

SEQ ID NO: 444316 - DNA, 30 bp, Artificial Sequence
  Synthetic oligonucleotide
cagttttgtagtggcatgcccctcacaata

SEQ ID NO: 444317 - DNA, 30 bp, Artificial Sequence
  Synthetic oligonucleotide
tagacgtttgatgttcggtaatagacaata

SEQ ID NO: 444318 - DNA, 30 bp, Artificial Sequence
  Synthetic oligonucleotide
gttactgtgtctctgctcgtgccgacaata

SEQ ID NO: 444319 - DNA, 30 bp, Artificial Sequence
  Synthetic oligonucleotide
attgacagcaagcaaagttgatatacaata

SEQ ID NO: 444320 - DNA, 30 bp, Artificial Sequence
  Synthetic oligonucleotide
gccggcgaaggtcacggggttcgaccaata

SEQ ID NO: 444321 - DNA, 30 bp, Artificial Sequence
  Synthetic oligonucleotide
atataatgaaggtaggttggccagccaata

SEQ ID NO: 444322 - DNA, 30 bp, Artificial Sequence
  Synthetic oligonucleotide
cggacattaaagttttattaaatgccaata

SEQ ID NO: 444323 - DNA, 30 bp, Artificial Sequence
  Synthetic oligonucleotide
attgggttagcatgccaaatcggtccaata

SEQ ID NO: 444324 - DNA, 30 bp, Artificial Sequence
  Synthetic oligonucleotide
cgccagtgccttgcacggtggaaagcaata

SEQ ID NO: 444325 - DNA, 30 bp, Artificial Sequence
  Synthetic oligonucleotide
ttaccgatagtacgtccaaaagaagcaata

SEQ ID NO: 444326 - DNA, 31 bp, Artificial Sequence
  Synthetic oligonucleotide
agtaagggtgccactacgccccttagcaata

SEQ ID NO: 444327 - DNA, 30 bp, Artificial Sequence
  Synthetic oligonucleotide
ggttggatcaccaggttataagacgcaata

SEQ ID NO: 444328 - DNA, 30 bp, Artificial Sequence
  Synthetic oligonucleotide
caagtgtcttttcgtaggtgttccgcaata

SEQ ID NO: 444329 - DNA, 30 bp, Artificial Sequence
  Synthetic oligonucleotide
actgacgtacgtttggcggatgaggcaata

SEQ ID NO: 444330 - DNA, 30 bp, Artificial Sequence
  Synthetic oligonucleotide
tgaatcggaaatttgtgtttaatggcaata

SEQ ID NO: 444331 - DNA, 30 bp, Artificial Sequence
  Synthetic oligonucleotide
ttaacggctagtacagttgagaatgcaata

SEQ ID NO: 444332 - DNA, 30 bp, Artificial Sequence
  Synthetic oligonucleotide
tttctagtaaacagttgtggtactgcaata

SEQ ID NO: 444333 - DNA, 30 bp, Artificial Sequence
  Synthetic oligonucleotide
cattctagctcctatcagtttgctgcaata

SEQ ID NO: 444334 - DNA, 30 bp, Artificial Sequence
  Synthetic oligonucleotide
gagaatattaggagcattactggatcaata

SEQ ID NO: 444335 - DNA, 30 bp, Artificial Sequence
  Synthetic oligonucleotide
atttagcctttaagaccaattctatcaata

SEQ ID NO: 444336 - DNA, 30 bp, Artificial Sequence
  Synthetic oligonucleotide
acccgggggtcacagtagaagttctcaata

SEQ ID NO: 444337 - DNA, 30 bp, Artificial Sequence
  Synthetic oligonucleotide
agaattatagtcgttcacgatacgtcaata

SEQ ID NO: 444338 - DNA, 30 bp, Artificial Sequence
  Synthetic oligonucleotide
aaatccgtcccggcgataaacttgtcaata

SEQ ID NO: 444339 - DNA, 30 bp, Artificial Sequence
  Synthetic oligonucleotide
tagtatttaccatgatcacgcaattcaata

SEQ ID NO: 444340 - DNA, 30 bp, Artificial Sequence
  Synthetic oligonucleotide
atagtgaatcgaatctgtttcatttcaata

SEQ ID NO: 444341 - DNA, 30 bp, Artificial Sequence
  Synthetic oligonucleotide
gggaccatgatggattctgcaaaaagaata

SEQ ID NO: 444342 - DNA, 30 bp, Artificial Sequence
  Synthetic oligonucleotide
atacatgtgcaactcggatccctaagaata

SEQ ID NO: 444343 - DNA, 30 bp, Artificial Sequence
  Synthetic oligonucleotide
cggtcctccggatcgagacttgtaagaata

SEQ ID NO: 444344 - DNA, 30 bp, Artificial Sequence
  Synthetic oligonucleotide
aagaacgcccattggcaatttaccagaata

SEQ ID NO: 444345 - DNA, 30 bp, Artificial Sequence
  Synthetic oligonucleotide
ctgacgtagaccgcgcaacacctcagaata

SEQ ID NO: 444346 - DNA, 30 bp, Artificial Sequence
  Synthetic oligonucleotide
ttcggcctggcttgagccggtgtcagaata

SEQ ID NO: 444347 - DNA, 30 bp, Artificial Sequence
  Synthetic oligonucleotide
atcgagctatactccggttctgcgagaata

SEQ ID NO: 444348 - DNA, 30 bp, Artificial Sequence
  Synthetic oligonucleotide
attcgattcagatacgccccgtatagaata

SEQ ID NO: 444349 - DNA, 30 bp, Artificial Sequence
  Synthetic oligonucleotide
ggttcaaggtaagtgctatcttgtagaata

SEQ ID NO: 444350 - DNA, 30 bp, Artificial Sequence
  Synthetic oligonucleotide
ggtgggtttgtatccgttttataacgaata

SEQ ID NO: 444351 - DNA, 30 bp, Artificial Sequence
  Synthetic oligonucleotide
aaatcgctcttttgacagttaacacgaata

SEQ ID NO: 444352 - DNA, 30 bp, Artificial Sequence
  Synthetic oligonucleotide
aactgtaaaccgccatttttactacgaata

SEQ ID NO: 444353 - DNA, 30 bp, Artificial Sequence
  Synthetic oligonucleotide
ccgctagacggaataacctcaccccgaata

SEQ ID NO: 444354 - DNA, 30 bp, Artificial Sequence
  Synthetic oligonucleotide
tatagtcgagacggcggattaagccgaata

SEQ ID NO: 444355 - DNA, 30 bp, Artificial Sequence
  Synthetic oligonucleotide
agaacttggccctccggtgagagccgaata

SEQ ID NO: 444356 - DNA, 30 bp, Artificial Sequence
  Synthetic oligonucleotide
atttagggtagcatactatattttcgaata

SEQ ID NO: 444357 - DNA, 30 bp, Artificial Sequence
  Synthetic oligonucleotide
ctgcatatcggagtaaactagccaggaata

SEQ ID NO: 444358 - DNA, 30 bp, Artificial Sequence
  Synthetic oligonucleotide
tgtgtctgatgggagaagcgattaggaata

SEQ ID NO: 444359 - DNA, 30 bp, Artificial Sequence
  Synthetic oligonucleotide
ccggtcttccacgattaagtcccgggaata

SEQ ID NO: 444360 - DNA, 30 bp, Artificial Sequence
  Synthetic oligonucleotide
gagctattcttcaaattcataaaatgaata

SEQ ID NO: 444361 - DNA, 30 bp, Artificial Sequence
  Synthetic oligonucleotide
ctctcgccgaccactcatatataatgaata

SEQ ID NO: 444362 - DNA, 30 bp, Artificial Sequence
  Synthetic oligonucleotide
tctgtggatctaggccacgaaatatgaata

SEQ ID NO: 444363 - DNA, 30 bp, Artificial Sequence
  Synthetic oligonucleotide
tggcctggccctgtctttatagcgtgaata

SEQ ID NO: 444364 - DNA, 30 bp, Artificial Sequence
  Synthetic oligonucleotide
atatcaaactatcagtgtcgggattgaata

SEQ ID NO: 444365 - DNA, 30 bp, Artificial Sequence
  Synthetic oligonucleotide
ctgggttgaatcaggcacagatattgaata

SEQ ID NO: 444366 - DNA, 30 bp, Artificial Sequence
  Synthetic oligonucleotide
gcacatactccatggggccaccacataata

SEQ ID NO: 444367 - DNA, 30 bp, Artificial Sequence
  Synthetic oligonucleotide
tgcagattcagttattctatcggcataata

SEQ ID NO: 444368 - DNA, 30 bp, Artificial Sequence
  Synthetic oligonucleotide
cgggtgtgtacgacggcaaacgtcataata

SEQ ID NO: 444369 - DNA, 30 bp, Artificial Sequence
  Synthetic oligonucleotide
atttacaggtgaagcctcaagttcataata

SEQ ID NO: 444370 - DNA, 30 bp, Artificial Sequence
  Synthetic oligonucleotide
acgaacggtatacatacgaagtatataata

SEQ ID NO: 444371 - DNA, 30 bp, Artificial Sequence
  Synthetic oligonucleotide
aatggtttggaaaagtggcattatataata

SEQ ID NO: 444372 - DNA, 30 bp, Artificial Sequence
  Synthetic oligonucleotide
ttcggtggttagaagcgatacattataata

SEQ ID NO: 444373 - DNA, 30 bp, Artificial Sequence
  Synthetic oligonucleotide
cgggccgcgcagtttagcaagatactaata

SEQ ID NO: 444374 - DNA, 30 bp, Artificial Sequence
  Synthetic oligonucleotide
ggactatgatcactagaaatgtccctaata

SEQ ID NO: 444375 - DNA, 30 bp, Artificial Sequence
  Synthetic oligonucleotide
gattgggtcccccctagagctatcctaata

SEQ ID NO: 444376 - DNA, 30 bp, Artificial Sequence
  Synthetic oligonucleotide
gattgtctgcgagttcgtccatagctaata

SEQ ID NO: 444377 - DNA, 30 bp, Artificial Sequence
  Synthetic oligonucleotide
aattaataataagtaaaattcgcgctaata

SEQ ID NO: 444378 - DNA, 30 bp, Artificial Sequence
  Synthetic oligonucleotide
tttacgagtcacgatcagcgttggctaata

SEQ ID NO: 444379 - DNA, 30 bp, Artificial Sequence
  Synthetic oligonucleotide
cggcggacgcatatagcctgatatctaata

SEQ ID NO: 444380 - DNA, 30 bp, Artificial Sequence
  Synthetic oligonucleotide
tcatgatactcgagctttctgggagtaata

SEQ ID NO: 444381 - DNA, 30 bp, Artificial Sequence
  Synthetic oligonucleotide
ctactagaggctacatagcgcgtagtaata

SEQ ID NO: 444382 - DNA, 30 bp, Artificial Sequence
  Synthetic oligonucleotide
tcaaaatacctgaggtcgaacttagtaata

SEQ ID NO: 444383 - DNA, 30 bp, Artificial Sequence
  Synthetic oligonucleotide
agacaaagtaggtacctgccgcacgtaata

SEQ ID NO: 444384 - DNA, 30 bp, Artificial Sequence
  Synthetic oligonucleotide
tttgaatctctgccagaagcacaggtaata

SEQ ID NO: 444385 - DNA, 30 bp, Artificial Sequence
  Synthetic oligonucleotide
gcggttacggagcaataaacgtcggtaata

SEQ ID NO: 444386 - DNA, 30 bp, Artificial Sequence
  Synthetic oligonucleotide
atgctgcatgcaattaacgtttgggtaata

SEQ ID NO: 444387 - DNA, 30 bp, Artificial Sequence
  Synthetic oligonucleotide
gttgagacactgttacatgtggatgtaata

SEQ ID NO: 444388 - DNA, 30 bp, Artificial Sequence
  Synthetic oligonucleotide
ccctttatgggagcgtggacccgtgtaata

SEQ ID NO: 444389 - DNA, 30 bp, Artificial Sequence
  Synthetic oligonucleotide
gtttagtaagagtaattgagatttgtaata

SEQ ID NO: 444390 - DNA, 30 bp, Artificial Sequence
  Synthetic oligonucleotide
ttgggaatctcttcgtaatttaaattaata

SEQ ID NO: 444391 - DNA, 30 bp, Artificial Sequence
  Synthetic oligonucleotide
aacccctgtacgttcttgcctggattaata

SEQ ID NO: 444392 - DNA, 30 bp, Artificial Sequence
  Synthetic oligonucleotide
agtataattcgcatatgaagggtattaata

SEQ ID NO: 444393 - DNA, 30 bp, Artificial Sequence
  Synthetic oligonucleotide
gccatttgggtacaccgcggattattaata

SEQ ID NO: 444394 - DNA, 30 bp, Artificial Sequence
  Synthetic oligonucleotide
cactcccttgaagacggcaatagcttaata

SEQ ID NO: 444395 - DNA, 30 bp, Artificial Sequence
  Synthetic oligonucleotide
attacaaaacgatccatcttattgttaata

SEQ ID NO: 444396 - DNA, 30 bp, Artificial Sequence
  Synthetic oligonucleotide
ttcttagtataggaaggtatccatttaata

SEQ ID NO: 444397 - DNA, 30 bp, Artificial Sequence
  Synthetic oligonucleotide
tacaagaagttaagcctttattatttaata

SEQ ID NO: 444398 - DNA, 30 bp, Artificial Sequence
  Synthetic oligonucleotide
catccaggcccactagagcaatttttaata

SEQ ID NO: 444399 - DNA, 30 bp, Artificial Sequence
  Synthetic oligonucleotide
aaatgacgggaacaattactccaaaacata

SEQ ID NO: 444400 - DNA, 30 bp, Artificial Sequence
  Synthetic oligonucleotide
agggcgatggatttcggatgggcaaacata

SEQ ID NO: 444401 - DNA, 30 bp, Artificial Sequence
  Synthetic oligonucleotide
ggcttctcactcttaggggttataaacata

SEQ ID NO: 444402 - DNA, 30 bp, Artificial Sequence
  Synthetic oligonucleotide
ggtgtacatcgggttcttttgaagaacata

SEQ ID NO: 444403 - DNA, 30 bp, Artificial Sequence
  Synthetic oligonucleotide
taccagtcgcgtctcaataacgtgaacata

SEQ ID NO: 444404 - DNA, 30 bp, Artificial Sequence
  Synthetic oligonucleotide
cggttcagaacgttttcacataataacata

SEQ ID NO: 444405 - DNA, 30 bp, Artificial Sequence
  Synthetic oligonucleotide
gtctgcaatagttcacgccacgttaacata

SEQ ID NO: 444406 - DNA, 30 bp, Artificial Sequence
  Synthetic oligonucleotide
ttgtatctccttggaaccggaacacacata

SEQ ID NO: 444407 - DNA, 30 bp, Artificial Sequence
  Synthetic oligonucleotide
gtggtccgtgcattttacttaccccacata

SEQ ID NO: 444408 - DNA, 30 bp, Artificial Sequence
  Synthetic oligonucleotide
gggtgaatcaccctgcggcgtttccacata

SEQ ID NO: 444409 - DNA, 30 bp, Artificial Sequence
  Synthetic oligonucleotide
gtgtctgaagctgttatttaggtgcacata

SEQ ID NO: 444410 - DNA, 30 bp, Artificial Sequence
  Synthetic oligonucleotide
tctgccctttcaccggatcggcgtcacata

SEQ ID NO: 444411 - DNA, 30 bp, Artificial Sequence
  Synthetic oligonucleotide
acttcgccccttaacctcaggattcacata

SEQ ID NO: 444412 - DNA, 30 bp, Artificial Sequence
  Synthetic oligonucleotide
gcggcattcagaggctaagccgttcacata

SEQ ID NO: 444413 - DNA, 30 bp, Artificial Sequence
  Synthetic oligonucleotide
gacttgcggtgtttgaacagtaaagacata

SEQ ID NO: 444414 - DNA, 30 bp, Artificial Sequence
  Synthetic oligonucleotide
cccttcaataaagggccttagggagacata

SEQ ID NO: 444415 - DNA, 30 bp, Artificial Sequence
  Synthetic oligonucleotide
caaacctagcggggcgccgttttagacata

SEQ ID NO: 444416 - DNA, 30 bp, Artificial Sequence
  Synthetic oligonucleotide
ctgcgcattatgatgatcgataacgacata

SEQ ID NO: 444417 - DNA, 30 bp, Artificial Sequence
  Synthetic oligonucleotide
ccggcctaatacgccactttttcggacata

SEQ ID NO: 444418 - DNA, 30 bp, Artificial Sequence
  Synthetic oligonucleotide
gggtcgctgacgcctgccctcggggacata

SEQ ID NO: 444419 - DNA, 30 bp, Artificial Sequence
  Synthetic oligonucleotide
atcccaagtttcggaagaccctgggacata

SEQ ID NO: 444420 - DNA, 30 bp, Artificial Sequence
  Synthetic oligonucleotide
gtcgctcagagctactggacttgggacata

SEQ ID NO: 444421 - DNA, 30 bp, Artificial Sequence
  Synthetic oligonucleotide
aaacgtaggaaaattgtcactctggacata

SEQ ID NO: 444422 - DNA, 30 bp, Artificial Sequence
  Synthetic oligonucleotide
gcagtagaggacgtcaagattttggacata

SEQ ID NO: 444423 - DNA, 30 bp, Artificial Sequence
  Synthetic oligonucleotide
ggtcttacaatcactgtcaattatgacata

SEQ ID NO: 444424 - DNA, 30 bp, Artificial Sequence
  Synthetic oligonucleotide
gaattatgcttcatgtttgacattgacata

SEQ ID NO: 444425 - DNA, 30 bp, Artificial Sequence
  Synthetic oligonucleotide
tacaggagcatctctacttgcattgacata

SEQ ID NO: 444426 - DNA, 30 bp, Artificial Sequence
  Synthetic oligonucleotide
tccccctatctggaaagtatctgctacata

SEQ ID NO: 444427 - DNA, 30 bp, Artificial Sequence
  Synthetic oligonucleotide
ttcacaactccggcggaggtgatctacata

SEQ ID NO: 444428 - DNA, 30 bp, Artificial Sequence
  Synthetic oligonucleotide
cacttctggtttggctcggatacgtacata

SEQ ID NO: 444429 - DNA, 30 bp, Artificial Sequence
  Synthetic oligonucleotide
actactctagacgtacctcgcctttacata

SEQ ID NO: 444430 - DNA, 30 bp, Artificial Sequence
  Synthetic oligonucleotide
attagttgcagcgtcctaagataaaccata

SEQ ID NO: 444431 - DNA, 30 bp, Artificial Sequence
  Synthetic oligonucleotide
gccggacctggaccgatgacagcaaccata

SEQ ID NO: 444432 - DNA, 30 bp, Artificial Sequence
  Synthetic oligonucleotide
cttctttgcctgaatagatgacgaaccata

SEQ ID NO: 444433 - DNA, 30 bp, Artificial Sequence
  Synthetic oligonucleotide
aaaggcatcggtcacggtagcatcaccata

SEQ ID NO: 444434 - DNA, 30 bp, Artificial Sequence
  Synthetic oligonucleotide
ctgaggaactcgcattcgcgaaggaccata

SEQ ID NO: 444435 - DNA, 30 bp, Artificial Sequence
  Synthetic oligonucleotide
tttgaaggctgtggagacaaccggaccata

SEQ ID NO: 444436 - DNA, 30 bp, Artificial Sequence
  Synthetic oligonucleotide
ggtgactccactggttagcagattaccata

SEQ ID NO: 444437 - DNA, 30 bp, Artificial Sequence
  Synthetic oligonucleotide
aatcgcacgggatatcccagccaacccata

SEQ ID NO: 444438 - DNA, 30 bp, Artificial Sequence
  Synthetic oligonucleotide
gacttggcttattggggtggtagacccata

SEQ ID NO: 444439 - DNA, 30 bp, Artificial Sequence
  Synthetic oligonucleotide
aacatgtaaatagcggcagcaggccccata

SEQ ID NO: 444440 - DNA, 30 bp, Artificial Sequence
  Synthetic oligonucleotide
gcgatatatttggtttgggtcttccccata

SEQ ID NO: 444441 - DNA, 30 bp, Artificial Sequence
  Synthetic oligonucleotide
tgttgagggcttttacttgcttagcccata

SEQ ID NO: 444442 - DNA, 30 bp, Artificial Sequence
  Synthetic oligonucleotide
cgcatcatgtacgtctcgtttcctcccata

SEQ ID NO: 444443 - DNA, 30 bp, Artificial Sequence
  Synthetic oligonucleotide
ttcttaaaagcgggttctgaaagcgccata

SEQ ID NO: 444444 - DNA, 30 bp, Artificial Sequence
  Synthetic oligonucleotide
gaagcatgcagtaagtttgtagaggccata

SEQ ID NO: 444445 - DNA, 30 bp, Artificial Sequence
  Synthetic oligonucleotide
aacgtagccctggcagtatcaacggccata

SEQ ID NO: 444446 - DNA, 30 bp, Artificial Sequence
  Synthetic oligonucleotide
gggtataaggagaggtagttccgggccata

SEQ ID NO: 444447 - DNA, 30 bp, Artificial Sequence
  Synthetic oligonucleotide
cagcttcggatcggggcgacccgtgccata

SEQ ID NO: 444448 - DNA, 30 bp, Artificial Sequence
  Synthetic oligonucleotide
aatagccattagctaataggttgtgccata

SEQ ID NO: 444449 - DNA, 30 bp, Artificial Sequence
  Synthetic oligonucleotide
ctttagtccctccatcattaaaattccata

SEQ ID NO: 444450 - DNA, 30 bp, Artificial Sequence
  Synthetic oligonucleotide
cttttggatctgagttagcccgattccata

SEQ ID NO: 444451 - DNA, 30 bp, Artificial Sequence
  Synthetic oligonucleotide
gttaactcatatacgcattcagcttccata

SEQ ID NO: 444452 - DNA, 30 bp, Artificial Sequence
  Synthetic oligonucleotide
gattagtgtttgaatttcgggagttccata

SEQ ID NO: 444453 - DNA, 30 bp, Artificial Sequence
  Synthetic oligonucleotide
ttgcgggtcgtcaggcagttgtgttccata

SEQ ID NO: 444454 - DNA, 30 bp, Artificial Sequence
  Synthetic oligonucleotide
atatggtaagcattggctcacatttccata

SEQ ID NO: 444455 - DNA, 30 bp, Artificial Sequence
  Synthetic oligonucleotide
tttgatactcttgtgtcaacatccagcata

SEQ ID NO: 444456 - DNA, 30 bp, Artificial Sequence
  Synthetic oligonucleotide
actcgcctctgagtacgccgtcgcagcata

SEQ ID NO: 444457 - DNA, 30 bp, Artificial Sequence
  Synthetic oligonucleotide
atgctcattacaattcgggctgtcagcata

SEQ ID NO: 444458 - DNA, 30 bp, Artificial Sequence
  Synthetic oligonucleotide
gggatacctgtgtgtacgatgcatagcata

SEQ ID NO: 444459 - DNA, 30 bp, Artificial Sequence
  Synthetic oligonucleotide
gcattgctcagacatggctagtctagcata

SEQ ID NO: 444460 - DNA, 30 bp, Artificial Sequence
  Synthetic oligonucleotide
cgcaaggactcactagtagtccttagcata

SEQ ID NO: 444461 - DNA, 30 bp, Artificial Sequence
  Synthetic oligonucleotide
ctctatgtgggtcgatcggggcttagcata

SEQ ID NO: 444462 - DNA, 30 bp, Artificial Sequence
  Synthetic oligonucleotide
ctcggctctcgtggggtcgcaccacgcata

SEQ ID NO: 444463 - DNA, 30 bp, Artificial Sequence
  Synthetic oligonucleotide
gtgagtgagatcgtacgttaccgacgcata

SEQ ID NO: 444464 - DNA, 30 bp, Artificial Sequence
  Synthetic oligonucleotide
caacgctcacgagcctcatggggacgcata

SEQ ID NO: 444465 - DNA, 30 bp, Artificial Sequence
  Synthetic oligonucleotide
tcgttcccgtatagaaggcatggacgcata

SEQ ID NO: 444466 - DNA, 30 bp, Artificial Sequence
  Synthetic oligonucleotide
cgatggagaatttccgcggcctgacgcata

SEQ ID NO: 444467 - DNA, 30 bp, Artificial Sequence
  Synthetic oligonucleotide
atgtttaggcgttcactggtaaaccgcata

SEQ ID NO: 444468 - DNA, 30 bp, Artificial Sequence
  Synthetic oligonucleotide
atctgaggtttattgctttggccgcgcata

SEQ ID NO: 444469 - DNA, 30 bp, Artificial Sequence
  Synthetic oligonucleotide
gtatgtatagaagatttgcaatgtcgcata

SEQ ID NO: 444470 - DNA, 30 bp, Artificial Sequence
  Synthetic oligonucleotide
tgacgttgaccaatcctgaacaacggcata

SEQ ID NO: 444471 - DNA, 30 bp, Artificial Sequence
  Synthetic oligonucleotide
ttacctgactaggattaagtcagcggcata

SEQ ID NO: 444472 - DNA, 30 bp, Artificial Sequence
  Synthetic oligonucleotide
atcgatgtagcaaacagctccctcggcata

SEQ ID NO: 444473 - DNA, 30 bp, Artificial Sequence
  Synthetic oligonucleotide
gagaaatgtgatctgtcacatctgggcata

SEQ ID NO: 444474 - DNA, 30 bp, Artificial Sequence
  Synthetic oligonucleotide
tatgttaaattaaagctcggctgtggcata

SEQ ID NO: 444475 - DNA, 30 bp, Artificial Sequence
  Synthetic oligonucleotide
gtgacgataacaacgacacgacactgcata

SEQ ID NO: 444476 - DNA, 30 bp, Artificial Sequence
  Synthetic oligonucleotide
caaagcccgactaatggaaccgactgcata

SEQ ID NO: 444477 - DNA, 30 bp, Artificial Sequence
  Synthetic oligonucleotide
acctcccgcggttaaaagattgactgcata

SEQ ID NO: 444478 - DNA, 30 bp, Artificial Sequence
  Synthetic oligonucleotide
gatgaagcgggttggctgtagacgtgcata

SEQ ID NO: 444479 - DNA, 30 bp, Artificial Sequence
  Synthetic oligonucleotide
actagcccttctttctaaacaaggtgcata

SEQ ID NO: 444480 - DNA, 30 bp, Artificial Sequence
  Synthetic oligonucleotide
acgctcatagttaatgaggtcagttgcata

SEQ ID NO: 444481 - DNA, 30 bp, Artificial Sequence
  Synthetic oligonucleotide
gtgtctgtgataccagcgagaggttgcata

SEQ ID NO: 444482 - DNA, 30 bp, Artificial Sequence
  Synthetic oligonucleotide
aggtttgggtcaaccaagcggcaaatcata

SEQ ID NO: 444483 - DNA, 30 bp, Artificial Sequence
  Synthetic oligonucleotide
cctcacctactgcctgtgtaaccaatcata

SEQ ID NO: 444484 - DNA, 30 bp, Artificial Sequence
  Synthetic oligonucleotide
tacagccattagggtttccaagcaatcata

SEQ ID NO: 444485 - DNA, 30 bp, Artificial Sequence
  Synthetic oligonucleotide
aataggttgagcacatggttagtaatcata

SEQ ID NO: 444486 - DNA, 30 bp, Artificial Sequence
  Synthetic oligonucleotide
atcttctcgtaagacgcgattcgcatcata

SEQ ID NO: 444487 - DNA, 30 bp, Artificial Sequence
  Synthetic oligonucleotide
atcctggcactaacgtcgcagtgcatcata

SEQ ID NO: 444488 - DNA, 30 bp, Artificial Sequence
  Synthetic oligonucleotide
ccccgtgcggcatgtatactcaagatcata

SEQ ID NO: 444489 - DNA, 30 bp, Artificial Sequence
  Synthetic oligonucleotide
aagccgctaatgagcagctcgaagatcata

SEQ ID NO: 444490 - DNA, 30 bp, Artificial Sequence
  Synthetic oligonucleotide
tcgttgatttcggagcgtacaccgatcata

SEQ ID NO: 444491 - DNA, 30 bp, Artificial Sequence
  Synthetic oligonucleotide
gatatggtagatatgctagattcgatcata

SEQ ID NO: 444492 - DNA, 30 bp, Artificial Sequence
  Synthetic oligonucleotide
ctcataccgaggtaatttgctcgtatcata

SEQ ID NO: 444493 - DNA, 30 bp, Artificial Sequence
  Synthetic oligonucleotide
ctagtctttggagcatagcatcgactcata

SEQ ID NO: 444494 - DNA, 30 bp, Artificial Sequence
  Synthetic oligonucleotide
tagccctctttacgggaatgcggactcata

SEQ ID NO: 444495 - DNA, 30 bp, Artificial Sequence
  Synthetic oligonucleotide
tctaataccaggtcccggacgctactcata

SEQ ID NO: 444496 - DNA, 30 bp, Artificial Sequence
  Synthetic oligonucleotide
tccgttgatactgcgcctgcaaacctcata

SEQ ID NO: 444497 - DNA, 30 bp, Artificial Sequence
  Synthetic oligonucleotide
gggttaaagtgacaatattataacctcata

SEQ ID NO: 444498 - DNA, 30 bp, Artificial Sequence
  Synthetic oligonucleotide
tgcagctttcacagcgaagttgcgctcata

SEQ ID NO: 444499 - DNA, 30 bp, Artificial Sequence
  Synthetic oligonucleotide
gcttagaggttcaggcctacggggctcata

SEQ ID NO: 444500 - DNA, 30 bp, Artificial Sequence
  Synthetic oligonucleotide
tgctgcatctgataacgtatgttgctcata

SEQ ID NO: 444501 - DNA, 30 bp, Artificial Sequence
  Synthetic oligonucleotide
gagagctatgtatagttagcacctctcata

SEQ ID NO: 444502 - DNA, 30 bp, Artificial Sequence
  Synthetic oligonucleotide
gtattgagataaccgtaggagcgtctcata

SEQ ID NO: 444503 - DNA, 30 bp, Artificial Sequence
  Synthetic oligonucleotide
ttgcattatgttaaggcatgccaagtcata

SEQ ID NO: 444504 - DNA, 30 bp, Artificial Sequence
  Synthetic oligonucleotide
cccatttgggggactcatagtgtagtcata

SEQ ID NO: 444505 - DNA, 30 bp, Artificial Sequence
  Synthetic oligonucleotide
ggtgctcacgaggtttgcgcgcacgtcata

SEQ ID NO: 444506 - DNA, 30 bp, Artificial Sequence
  Synthetic oligonucleotide
gtgattagcgagacgcggtgggtcgtcata

SEQ ID NO: 444507 - DNA, 30 bp, Artificial Sequence
  Synthetic oligonucleotide
ggccattggagcacatgcaccgaggtcata

SEQ ID NO: 444508 - DNA, 30 bp, Artificial Sequence
  Synthetic oligonucleotide
agcggaacgcaggcttatgctcgggtcata

SEQ ID NO: 444509 - DNA, 30 bp, Artificial Sequence
  Synthetic oligonucleotide
tgattcgggtaaatacacaccatggtcata

SEQ ID NO: 444510 - DNA, 30 bp, Artificial Sequence
  Synthetic oligonucleotide
ggaggtaggccgaccgcacccgtggtcata

SEQ ID NO: 444511 - DNA, 30 bp, Artificial Sequence
  Synthetic oligonucleotide
tgggcagtgtcaatgcgtggatatgtcata

SEQ ID NO: 444512 - DNA, 30 bp, Artificial Sequence
  Synthetic oligonucleotide
tcggtttgggcggagatttgatgattcata

SEQ ID NO: 444513 - DNA, 30 bp, Artificial Sequence
  Synthetic oligonucleotide
ttgtcgtgactgagctgtgggctattcata

SEQ ID NO: 444514 - DNA, 30 bp, Artificial Sequence
  Synthetic oligonucleotide
ccgttatatatttttttccatctcttcata

SEQ ID NO: 444515 - DNA, 30 bp, Artificial Sequence
  Synthetic oligonucleotide
tccattagagacatcttactggcgttcata

SEQ ID NO: 444516 - DNA, 30 bp, Artificial Sequence
  Synthetic oligonucleotide
tagacaaattggtgtcctctgtcgttcata

SEQ ID NO: 444517 - DNA, 30 bp, Artificial Sequence
  Synthetic oligonucleotide
cgggcaaagccgcgggcactcctgttcata

SEQ ID NO: 444518 - DNA, 30 bp, Artificial Sequence
  Synthetic oligonucleotide
cagaatagaaattgaattgcgcgtttcata

SEQ ID NO: 444519 - DNA, 30 bp, Artificial Sequence
  Synthetic oligonucleotide
tgtgggcagactgcttgaagaggtttcata

SEQ ID NO: 444520 - DNA, 30 bp, Artificial Sequence
  Synthetic oligonucleotide
ttttaccaccccgccaccctgtcaaagata

SEQ ID NO: 444521 - DNA, 30 bp, Artificial Sequence
  Synthetic oligonucleotide
gagcgctttataagggtgtataccaagata

SEQ ID NO: 444522 - DNA, 30 bp, Artificial Sequence
  Synthetic oligonucleotide
tccttgaagcgttcataaaactccaagata

SEQ ID NO: 444523 - DNA, 30 bp, Artificial Sequence
  Synthetic oligonucleotide
tatactgtatgacgtgctcaacgcaagata

SEQ ID NO: 444524 - DNA, 30 bp, Artificial Sequence
  Synthetic oligonucleotide
atttttaaagcctgacaatgacgcaagata

SEQ ID NO: 444525 - DNA, 30 bp, Artificial Sequence
  Synthetic oligonucleotide
gcattgtcttgccagagtccgtagaagata

SEQ ID NO: 444526 - DNA, 30 bp, Artificial Sequence
  Synthetic oligonucleotide
gaagtgctgccacgtactttctcgaagata

SEQ ID NO: 444527 - DNA, 30 bp, Artificial Sequence
  Synthetic oligonucleotide
ggttggttcgcatactaattttgtaagata

SEQ ID NO: 444528 - DNA, 30 bp, Artificial Sequence
  Synthetic oligonucleotide
ttcattaatttatttgggctggaacagata

SEQ ID NO: 444529 - DNA, 30 bp, Artificial Sequence
  Synthetic oligonucleotide
tttcaagtacttcgtatatcaagacagata

SEQ ID NO: 444530 - DNA, 30 bp, Artificial Sequence
  Synthetic oligonucleotide
ctgtaataagttaatccgcacttacagata

SEQ ID NO: 444531 - DNA, 30 bp, Artificial Sequence
  Synthetic oligonucleotide
cttgattgcatgtgatcttacgaccagata

SEQ ID NO: 444532 - DNA, 30 bp, Artificial Sequence
  Synthetic oligonucleotide
gggagacgtgctacattgttggagcagata

SEQ ID NO: 444533 - DNA, 30 bp, Artificial Sequence
  Synthetic oligonucleotide
gctatcactccgcagaaactaacgcagata

SEQ ID NO: 444534 - DNA, 30 bp, Artificial Sequence
  Synthetic oligonucleotide
ttataaaagtccttgatcgacaggcagata

SEQ ID NO: 444535 - DNA, 30 bp, Artificial Sequence
  Synthetic oligonucleotide
ctaactcatccacacatttggcttcagata

SEQ ID NO: 444536 - DNA, 30 bp, Artificial Sequence
  Synthetic oligonucleotide
gccgcgccctgccactttccttaagagata

SEQ ID NO: 444537 - DNA, 30 bp, Artificial Sequence
  Synthetic oligonucleotide
caaaacctgcatgcggtgcctctagagata

SEQ ID NO: 444538 - DNA, 30 bp, Artificial Sequence
  Synthetic oligonucleotide
ctttcttgctagcaaggagtcttagagata

SEQ ID NO: 444539 - DNA, 30 bp, Artificial Sequence
  Synthetic oligonucleotide
gtgggaacaacttccactggtcacgagata

SEQ ID NO: 444540 - DNA, 30 bp, Artificial Sequence
  Synthetic oligonucleotide
ctggatagaggattctctcctaaggagata

SEQ ID NO: 444541 - DNA, 30 bp, Artificial Sequence
  Synthetic oligonucleotide
aagctttgggattgaattcaataggagata

SEQ ID NO: 444542 - DNA, 30 bp, Artificial Sequence
  Synthetic oligonucleotide
tacacgcagtcccgtccttggtaggagata

SEQ ID NO: 444543 - DNA, 30 bp, Artificial Sequence
  Synthetic oligonucleotide
caacaacagcgtagttctcccacggagata

SEQ ID NO: 444544 - DNA, 30 bp, Artificial Sequence
  Synthetic oligonucleotide
agtaggaaagaatctgatcgaccggagata

SEQ ID NO: 444545 - DNA, 30 bp, Artificial Sequence
  Synthetic oligonucleotide
tatattaccagattctctacttcggagata

SEQ ID NO: 444546 - DNA, 30 bp, Artificial Sequence
  Synthetic oligonucleotide
agaggttgttgagggctgaggtgggagata

SEQ ID NO: 444547 - DNA, 30 bp, Artificial Sequence
  Synthetic oligonucleotide
atggctccaactgggtcatctttggagata

SEQ ID NO: 444548 - DNA, 30 bp, Artificial Sequence
  Synthetic oligonucleotide
aaataagcaatgcgtggttcacatgagata

SEQ ID NO: 444549 - DNA, 30 bp, Artificial Sequence
  Synthetic oligonucleotide
aaggagttctgggcatcggcggttgagata

SEQ ID NO: 444550 - DNA, 30 bp, Artificial Sequence
  Synthetic oligonucleotide
gtattcgcggtgataatccttgttgagata

SEQ ID NO: 444551 - DNA, 30 bp, Artificial Sequence
  Synthetic oligonucleotide
cagactttcgtgcagcagggtaactagata

SEQ ID NO: 444552 - DNA, 30 bp, Artificial Sequence
  Synthetic oligonucleotide
gcataaaagcgcgtttaagagcgctagata

SEQ ID NO: 444553 - DNA, 30 bp, Artificial Sequence
  Synthetic oligonucleotide
tcgatattagggcgtcaggcagcgtagata

SEQ ID NO: 444554 - DNA, 30 bp, Artificial Sequence
  Synthetic oligonucleotide
ccagggatatttagaccgcgatattagata

SEQ ID NO: 444555 - DNA, 30 bp, Artificial Sequence
  Synthetic oligonucleotide
aatattcccggcgaaaaagaaccttagata

SEQ ID NO: 444556 - DNA, 30 bp, Artificial Sequence
  Synthetic oligonucleotide
cggttgtctttaaaactacagtgttagata

SEQ ID NO: 444557 - DNA, 30 bp, Artificial Sequence
  Synthetic oligonucleotide
gaagctgcatgggtttcatcttcaacgata

SEQ ID NO: 444558 - DNA, 30 bp, Artificial Sequence
  Synthetic oligonucleotide
catagttcgccttgttaagggagaacgata

SEQ ID NO: 444559 - DNA, 30 bp, Artificial Sequence
  Synthetic oligonucleotide
cgtaagtaaattttgattagtataacgata

SEQ ID NO: 444560 - DNA, 30 bp, Artificial Sequence
  Synthetic oligonucleotide
taccctacatatgctttctgggaaccgata

SEQ ID NO: 444561 - DNA, 30 bp, Artificial Sequence
  Synthetic oligonucleotide
accggaagggttggttgcgggggaccgata

SEQ ID NO: 444562 - DNA, 30 bp, Artificial Sequence
  Synthetic oligonucleotide
gaccctgacggcaagtacgcaaacccgata

SEQ ID NO: 444563 - DNA, 30 bp, Artificial Sequence
  Synthetic oligonucleotide
gttccggtatgcagcccagcgggcccgata

SEQ ID NO: 444564 - DNA, 30 bp, Artificial Sequence
  Synthetic oligonucleotide
ggtgtttaacgggctatccccaggccgata

SEQ ID NO: 444565 - DNA, 30 bp, Artificial Sequence
  Synthetic oligonucleotide
ttatttgcccgatggtctgttgtgccgata

SEQ ID NO: 444566 - DNA, 30 bp, Artificial Sequence
  Synthetic oligonucleotide
cgagcattcgacgatcgcttaaatccgata

SEQ ID NO: 444567 - DNA, 30 bp, Artificial Sequence
  Synthetic oligonucleotide
ccgcagataacggaaactatttgtccgata

SEQ ID NO: 444568 - DNA, 30 bp, Artificial Sequence
  Synthetic oligonucleotide
tggcatttataacatcgtcaccaagcgata

SEQ ID NO: 444569 - DNA, 30 bp, Artificial Sequence
  Synthetic oligonucleotide
cgccattcatcaaaacttgccccagcgata

SEQ ID NO: 444570 - DNA, 30 bp, Artificial Sequence
  Synthetic oligonucleotide
aggtagaaagctacgctcgtagtagcgata

SEQ ID NO: 444571 - DNA, 30 bp, Artificial Sequence
  Synthetic oligonucleotide
aaaggtacggcgaaccactgacgcgcgata

SEQ ID NO: 444572 - DNA, 30 bp, Artificial Sequence
  Synthetic oligonucleotide
ttgacggagaacctcaacaaacgggcgata

SEQ ID NO: 444573 - DNA, 30 bp, Artificial Sequence
  Synthetic oligonucleotide
tctagtgccaaacgtcatcactgggcgata

SEQ ID NO: 444574 - DNA, 30 bp, Artificial Sequence
  Synthetic oligonucleotide
gcgcctatcgcatttgttagcttggcgata

SEQ ID NO: 444575 - DNA, 30 bp, Artificial Sequence
  Synthetic oligonucleotide
cccactttcatattgtaatgatctgcgata

SEQ ID NO: 444576 - DNA, 30 bp, Artificial Sequence
  Synthetic oligonucleotide
agaccttttagtagcatcgagcaatcgata

SEQ ID NO: 444577 - DNA, 30 bp, Artificial Sequence
  Synthetic oligonucleotide
ggactttgagcaaattccctataatcgata

SEQ ID NO: 444578 - DNA, 30 bp, Artificial Sequence
  Synthetic oligonucleotide
cgcatacacagtgctgcaacatcatcgata

SEQ ID NO: 444579 - DNA, 30 bp, Artificial Sequence
  Synthetic oligonucleotide
gctagagttacatttataagtatatcgata

SEQ ID NO: 444580 - DNA, 30 bp, Artificial Sequence
  Synthetic oligonucleotide
gctagttaatggtttctacaaacctcgata

SEQ ID NO: 444581 - DNA, 30 bp, Artificial Sequence
  Synthetic oligonucleotide
cgcagtatgtgcatgacggttgggtcgata

SEQ ID NO: 444582 - DNA, 30 bp, Artificial Sequence
  Synthetic oligonucleotide
ttttcaatgtgccgtcactcgcattcgata

SEQ ID NO: 444583 - DNA, 31 bp, Artificial Sequence
  Synthetic oligonucleotide
gtctgggggaagcggcgacaaccgaaggata

SEQ ID NO: 444584 - DNA, 30 bp, Artificial Sequence
  Synthetic oligonucleotide
gcgagtgatcatccatgaaatggaaggata

SEQ ID NO: 444585 - DNA, 30 bp, Artificial Sequence
  Synthetic oligonucleotide
ctttttcgattcccgggaaatgtaaggata

SEQ ID NO: 444586 - DNA, 30 bp, Artificial Sequence
  Synthetic oligonucleotide
tgggttagactggaagatgcaagcaggata

SEQ ID NO: 444587 - DNA, 30 bp, Artificial Sequence
  Synthetic oligonucleotide
attaccattcggccaacggcgaataggata

SEQ ID NO: 444588 - DNA, 30 bp, Artificial Sequence
  Synthetic oligonucleotide
tgaaatgtcgcgcgtcgcatttctaggata

SEQ ID NO: 444589 - DNA, 30 bp, Artificial Sequence
  Synthetic oligonucleotide
cctaccagtcgtcttacataggcacggata

SEQ ID NO: 444590 - DNA, 30 bp, Artificial Sequence
  Synthetic oligonucleotide
aatccctattcgtaggcgtcggcacggata

SEQ ID NO: 444591 - DNA, 30 bp, Artificial Sequence
  Synthetic oligonucleotide
agccccttactaagatatcggatccggata

SEQ ID NO: 444592 - DNA, 30 bp, Artificial Sequence
  Synthetic oligonucleotide
tccggacgtaggatcgggaacctccggata

SEQ ID NO: 444593 - DNA, 30 bp, Artificial Sequence
  Synthetic oligonucleotide
ttcatttatatttttacatccctccggata

SEQ ID NO: 444594 - DNA, 30 bp, Artificial Sequence
  Synthetic oligonucleotide
aaactcaagacgtagctctaagagcggata

SEQ ID NO: 444595 - DNA, 30 bp, Artificial Sequence
  Synthetic oligonucleotide
atcttcagacagcggcctatgacgcggata

SEQ ID NO: 444596 - DNA, 30 bp, Artificial Sequence
  Synthetic oligonucleotide
tgacaaacggtgttgtcgcgtccgcggata

SEQ ID NO: 444597 - DNA, 30 bp, Artificial Sequence
  Synthetic oligonucleotide
gagtacttccgcatggaaagtgcgcggata

SEQ ID NO: 444598 - DNA, 30 bp, Artificial Sequence
  Synthetic oligonucleotide
gcattttgaccgttgaaccatcatcggata

SEQ ID NO: 444599 - DNA, 30 bp, Artificial Sequence
  Synthetic oligonucleotide
ggtgggcgttgcctgggcttttaagggata

SEQ ID NO: 444600 - DNA, 30 bp, Artificial Sequence
  Synthetic oligonucleotide
cattatattcaagaaccaaccatagggata

SEQ ID NO: 444601 - DNA, 30 bp, Artificial Sequence
  Synthetic oligonucleotide
gcctgcatggtttaattgcagatagggata

SEQ ID NO: 444602 - DNA, 30 bp, Artificial Sequence
  Synthetic oligonucleotide
taattctagccgaccctgcgtctagggata

SEQ ID NO: 444603 - DNA, 30 bp, Artificial Sequence
  Synthetic oligonucleotide
taatgacaaattgaagaccgtcgcgggata

SEQ ID NO: 444604 - DNA, 30 bp, Artificial Sequence
  Synthetic oligonucleotide
gtgtgagcgcttggggcatatggcgggata

SEQ ID NO: 444605 - DNA, 30 bp, Artificial Sequence
  Synthetic oligonucleotide
cgacaggacgttcgttgacttatcgggata

SEQ ID NO: 444606 - DNA, 30 bp, Artificial Sequence
  Synthetic oligonucleotide
tcaatagattgatgcgtggtattcgggata

SEQ ID NO: 444607 - DNA, 30 bp, Artificial Sequence
  Synthetic oligonucleotide
cattaggatacgggtttcgttgtggggata

SEQ ID NO: 444608 - DNA, 30 bp, Artificial Sequence
  Synthetic oligonucleotide
agatttggtttgtgccgtataaatgggata

SEQ ID NO: 444609 - DNA, 30 bp, Artificial Sequence
  Synthetic oligonucleotide
cgctcatgtaaggcgataaaacaatggata

SEQ ID NO: 444610 - DNA, 30 bp, Artificial Sequence
  Synthetic oligonucleotide
caattgtagcgatttacatggcaatggata

SEQ ID NO: 444611 - DNA, 30 bp, Artificial Sequence
  Synthetic oligonucleotide
ttctcaagtatttgctaagtcgaatggata

SEQ ID NO: 444612 - DNA, 30 bp, Artificial Sequence
  Synthetic oligonucleotide
aggttaaagcgattttatgctttatggata

SEQ ID NO: 444613 - DNA, 30 bp, Artificial Sequence
  Synthetic oligonucleotide
ttcgtggtaacggctaggggtacctggata

SEQ ID NO: 444614 - DNA, 30 bp, Artificial Sequence
  Synthetic oligonucleotide
attcttgcgtttacacatttctcctggata

SEQ ID NO: 444615 - DNA, 30 bp, Artificial Sequence
  Synthetic oligonucleotide
gatattcacctacggtattaaccgtggata

SEQ ID NO: 444616 - DNA, 30 bp, Artificial Sequence
  Synthetic oligonucleotide
atctgtatagacaagatcatggtgtggata

SEQ ID NO: 444617 - DNA, 30 bp, Artificial Sequence
  Synthetic oligonucleotide
gcactatagtgagctgtaagtatttggata

SEQ ID NO: 444618 - DNA, 30 bp, Artificial Sequence
  Synthetic oligonucleotide
gatagcaacattcgtacttgctgaatgata

SEQ ID NO: 444619 - DNA, 30 bp, Artificial Sequence
  Synthetic oligonucleotide
catagccttatttatcataaagtaatgata

SEQ ID NO: 444620 - DNA, 30 bp, Artificial Sequence
  Synthetic oligonucleotide
ctactatccgtttcggtgtcaaacatgata

SEQ ID NO: 444621 - DNA, 30 bp, Artificial Sequence
  Synthetic oligonucleotide
gatatagctgccctcaagggggacatgata

SEQ ID NO: 444622 - DNA, 30 bp, Artificial Sequence
  Synthetic oligonucleotide
acagtgcaagcacatcattaatacatgata

SEQ ID NO: 444623 - DNA, 30 bp, Artificial Sequence
  Synthetic oligonucleotide
gattccatggcaggcaccccaggcatgata

SEQ ID NO: 444624 - DNA, 30 bp, Artificial Sequence
  Synthetic oligonucleotide
atgcgtcgttttcaggatagcatcatgata

SEQ ID NO: 444625 - DNA, 30 bp, Artificial Sequence
  Synthetic oligonucleotide
agtcaggaaggagcctgagatttcatgata

SEQ ID NO: 444626 - DNA, 30 bp, Artificial Sequence
  Synthetic oligonucleotide
gtaatacttactgacgctcacgggatgata

SEQ ID NO: 444627 - DNA, 30 bp, Artificial Sequence
  Synthetic oligonucleotide
aattaggccgttaacgagcagtggatgata

SEQ ID NO: 444628 - DNA, 30 bp, Artificial Sequence
  Synthetic oligonucleotide
tctttagttcgagctgtagatatgatgata

SEQ ID NO: 444629 - DNA, 30 bp, Artificial Sequence
  Synthetic oligonucleotide
tctttcatagcactgggcccaagtatgata

SEQ ID NO: 444630 - DNA, 30 bp, Artificial Sequence
  Synthetic oligonucleotide
aaccttccaacgttccgcagagcactgata

SEQ ID NO: 444631 - DNA, 30 bp, Artificial Sequence
  Synthetic oligonucleotide
cttgggtcgaagctgttcgagcgactgata

SEQ ID NO: 444632 - DNA, 31 bp, Artificial Sequence
  Synthetic oligonucleotide
cacctcagacagagattatatcgtactgata

SEQ ID NO: 444633 - DNA, 30 bp, Artificial Sequence
  Synthetic oligonucleotide
cccaacagtggctcagacgttttactgata

SEQ ID NO: 444634 - DNA, 30 bp, Artificial Sequence
  Synthetic oligonucleotide
cggggttacatggttgtggcaaccctgata

SEQ ID NO: 444635 - DNA, 30 bp, Artificial Sequence
  Synthetic oligonucleotide
tgtcaagtcatgcgaaatcacaccctgata

SEQ ID NO: 444636 - DNA, 30 bp, Artificial Sequence
  Synthetic oligonucleotide
ctatttcagcagcagccttacgcgctgata

SEQ ID NO: 444637 - DNA, 30 bp, Artificial Sequence
  Synthetic oligonucleotide
tatcttgactaccttttaagtgcgctgata

SEQ ID NO: 444638 - DNA, 30 bp, Artificial Sequence
  Synthetic oligonucleotide
atgaggcagttgttaatatgatcgctgata

SEQ ID NO: 444639 - DNA, 30 bp, Artificial Sequence
  Synthetic oligonucleotide
cttggttttgacagagttgattggctgata

SEQ ID NO: 444640 - DNA, 30 bp, Artificial Sequence
  Synthetic oligonucleotide
caccgtaacggaggcttacatgatctgata

SEQ ID NO: 444641 - DNA, 30 bp, Artificial Sequence
  Synthetic oligonucleotide
gctctaagagatcacagtcgtggtctgata

SEQ ID NO: 444642 - DNA, 30 bp, Artificial Sequence
  Synthetic oligonucleotide
agccgctttgtgcgatattcgacagtgata

SEQ ID NO: 444643 - DNA, 30 bp, Artificial Sequence
  Synthetic oligonucleotide
tctcggcatatgaccaatttatcagtgata

SEQ ID NO: 444644 - DNA, 30 bp, Artificial Sequence
  Synthetic oligonucleotide
tgtttaagaccatgcatcaggagcgtgata

SEQ ID NO: 444645 - DNA, 30 bp, Artificial Sequence
  Synthetic oligonucleotide
gccgccagtacataatttagaggggtgata

SEQ ID NO: 444646 - DNA, 30 bp, Artificial Sequence
  Synthetic oligonucleotide
tatgcgaaggtcactacttagggggtgata

SEQ ID NO: 444647 - DNA, 30 bp, Artificial Sequence
  Synthetic oligonucleotide
gatccaaaatatatgcctcggctggtgata

SEQ ID NO: 444648 - DNA, 30 bp, Artificial Sequence
  Synthetic oligonucleotide
cttctctccagtcccgattaagatgtgata

SEQ ID NO: 444649 - DNA, 30 bp, Artificial Sequence
  Synthetic oligonucleotide
gttgggggtaatattccggttaaattgata

SEQ ID NO: 444650 - DNA, 30 bp, Artificial Sequence
  Synthetic oligonucleotide
ggattcctagtgttaaaaccctaattgata

SEQ ID NO: 444651 - DNA, 30 bp, Artificial Sequence
  Synthetic oligonucleotide
atgtctgaatgtcctgggggagtattgata

SEQ ID NO: 444652 - DNA, 30 bp, Artificial Sequence
  Synthetic oligonucleotide
gctcccgggtaaggataaccgcagttgata

SEQ ID NO: 444653 - DNA, 30 bp, Artificial Sequence
  Synthetic oligonucleotide
gttgaaatctcttatgaggtattgttgata

SEQ ID NO: 444654 - DNA, 30 bp, Artificial Sequence
  Synthetic oligonucleotide
atcgagtctacgtcaacgggagatttgata

SEQ ID NO: 444655 - DNA, 30 bp, Artificial Sequence
  Synthetic oligonucleotide
agacggggcgataacattgaactaaatata

SEQ ID NO: 444656 - DNA, 30 bp, Artificial Sequence
  Synthetic oligonucleotide
ttcaatggtggtaagtaactagtaaatata

SEQ ID NO: 444657 - DNA, 30 bp, Artificial Sequence
  Synthetic oligonucleotide
tagttaatgggagctcccctgttaaatata

SEQ ID NO: 444658 - DNA, 29 bp, Artificial Sequence
  Synthetic oligonucleotide
cgattaagttgactatcgctaagaatata

SEQ ID NO: 444659 - DNA, 30 bp, Artificial Sequence
  Synthetic oligonucleotide
tgtgtcagctacattggcttcgagaatata

SEQ ID NO: 444660 - DNA, 30 bp, Artificial Sequence
  Synthetic oligonucleotide
aagtcttataatcgtcagaggccgaatata

SEQ ID NO: 444661 - DNA, 30 bp, Artificial Sequence
  Synthetic oligonucleotide
tgccggcacgtgatcctattgccgaatata

SEQ ID NO: 444662 - DNA, 30 bp, Artificial Sequence
  Synthetic oligonucleotide
tatcttactaacctctaatatgtgaatata

SEQ ID NO: 444663 - DNA, 30 bp, Artificial Sequence
  Synthetic oligonucleotide
gcatttgttgacgttaaaagaaataatata

SEQ ID NO: 444664 - DNA, 30 bp, Artificial Sequence
  Synthetic oligonucleotide
ccagtcgcccaaaatcctggtcgtaatata

SEQ ID NO: 444665 - DNA, 30 bp, Artificial Sequence
  Synthetic oligonucleotide
ttcgtcggccgactttgagccggtaatata

SEQ ID NO: 444666 - DNA, 30 bp, Artificial Sequence
  Synthetic oligonucleotide
gctggtcatgctagctcaaaggttaatata

SEQ ID NO: 444667 - DNA, 30 bp, Artificial Sequence
  Synthetic oligonucleotide
gtcgccttatttcagcgataggaccatata

SEQ ID NO: 444668 - DNA, 30 bp, Artificial Sequence
  Synthetic oligonucleotide
ctctttcactaagtcgggtggttccatata

SEQ ID NO: 444669 - DNA, 30 bp, Artificial Sequence
  Synthetic oligonucleotide
caccgtgtgtggccattttgtaagcatata

SEQ ID NO: 444670 - DNA, 30 bp, Artificial Sequence
  Synthetic oligonucleotide
cgactttggacaggaattcgaaggcatata

SEQ ID NO: 444671 - DNA, 30 bp, Artificial Sequence
  Synthetic oligonucleotide
ttgaccaacaaattgttaacaactcatata

SEQ ID NO: 444672 - DNA, 30 bp, Artificial Sequence
  Synthetic oligonucleotide
ataccctgggccagggccttttaagatata

SEQ ID NO: 444673 - DNA, 30 bp, Artificial Sequence
  Synthetic oligonucleotide
gaattagtaatacagttcggatgagatata

SEQ ID NO: 444674 - DNA, 30 bp, Artificial Sequence
  Synthetic oligonucleotide
atgtattgtagattgggatctttagatata

SEQ ID NO: 444675 - DNA, 30 bp, Artificial Sequence
  Synthetic oligonucleotide
tgcgtttatttctatacactaaacgatata

SEQ ID NO: 444676 - DNA, 30 bp, Artificial Sequence
  Synthetic oligonucleotide
aaggccgtctgatttctatttgccgatata

SEQ ID NO: 444677 - DNA, 30 bp, Artificial Sequence
  Synthetic oligonucleotide
cagccaaggcacatgacataatgcgatata

SEQ ID NO: 444678 - DNA, 30 bp, Artificial Sequence
  Synthetic oligonucleotide
ttaaggctaccgcgcacaacaatcgatata

SEQ ID NO: 444679 - DNA, 30 bp, Artificial Sequence
  Synthetic oligonucleotide
tgcattgctggtattccggcagaggatata

SEQ ID NO: 444680 - DNA, 30 bp, Artificial Sequence
  Synthetic oligonucleotide
ggcccagtcataagacttgaaagggatata

SEQ ID NO: 444681 - DNA, 30 bp, Artificial Sequence
  Synthetic oligonucleotide
agcgtactccgcaggtcattccgggatata

SEQ ID NO: 444682 - DNA, 30 bp, Artificial Sequence
  Synthetic oligonucleotide
taatctcacacacgcataatcgtggatata

SEQ ID NO: 444683 - DNA, 30 bp, Artificial Sequence
  Synthetic oligonucleotide
gtatatagttcatccattccgcgtgatata

SEQ ID NO: 444684 - DNA, 30 bp, Artificial Sequence
  Synthetic oligonucleotide
agttgtagcttttagcgagctggtgatata

SEQ ID NO: 444685 - DNA, 30 bp, Artificial Sequence
  Synthetic oligonucleotide
cctctcccatggaatgggacaaaatatata

SEQ ID NO: 444686 - DNA, 30 bp, Artificial Sequence
  Synthetic oligonucleotide
caaggaggtacgtaactacacgaatatata

SEQ ID NO: 444687 - DNA, 30 bp, Artificial Sequence
  Synthetic oligonucleotide
taactggggagaagtgtcttactatatata

SEQ ID NO: 444688 - DNA, 30 bp, Artificial Sequence
  Synthetic oligonucleotide
gtgacgccccgtcgacaatcgctatatata

SEQ ID NO: 444689 - DNA, 30 bp, Artificial Sequence
  Synthetic oligonucleotide
tgtaaaacgctaccggcgcaaccctatata

SEQ ID NO: 444690 - DNA, 30 bp, Artificial Sequence
  Synthetic oligonucleotide
gggggcattgcattgtatgaattctatata

SEQ ID NO: 444691 - DNA, 30 bp, Artificial Sequence
  Synthetic oligonucleotide
tattggtattgctgtgtctgaacgtatata

SEQ ID NO: 444692 - DNA, 30 bp, Artificial Sequence
  Synthetic oligonucleotide
gtaggatgtacctggtggaccgggtatata

SEQ ID NO: 444693 - DNA, 30 bp, Artificial Sequence
  Synthetic oligonucleotide
gatgataaaaacagaacggagccttatata

SEQ ID NO: 444694 - DNA, 30 bp, Artificial Sequence
  Synthetic oligonucleotide
aaaagtatcaaggcctatttacgaactata

SEQ ID NO: 444695 - DNA, 30 bp, Artificial Sequence
  Synthetic oligonucleotide
gctagtctgtgctcagacgccttaactata

SEQ ID NO: 444696 - DNA, 29 bp, Artificial Sequence
  Synthetic oligonucleotide
tgcagtgatttccaccaagaagcactata

SEQ ID NO: 444697 - DNA, 30 bp, Artificial Sequence
  Synthetic oligonucleotide
atatttgcgtggtcgtcagtatgcactata

SEQ ID NO: 444698 - DNA, 30 bp, Artificial Sequence
  Synthetic oligonucleotide
attcgtgatctaagccaatagctcactata

SEQ ID NO: 444699 - DNA, 30 bp, Artificial Sequence
  Synthetic oligonucleotide
ttcagtatacgccatcgtcaattcactata

SEQ ID NO: 444700 - DNA, 30 bp, Artificial Sequence
  Synthetic oligonucleotide
gtctccacgcattaggcatcaaagactata

SEQ ID NO: 444701 - DNA, 30 bp, Artificial Sequence
  Synthetic oligonucleotide
cctgcggatcaatgtggtgcctagactata

SEQ ID NO: 444702 - DNA, 30 bp, Artificial Sequence
  Synthetic oligonucleotide
gatatggcgactaaggctacttcgactata

SEQ ID NO: 444703 - DNA, 30 bp, Artificial Sequence
  Synthetic oligonucleotide
tcactgagtagtttattaagtaaacctata

SEQ ID NO: 444704 - DNA, 30 bp, Artificial Sequence
  Synthetic oligonucleotide
cgcataaccggaaaccaccgtgggcctata

SEQ ID NO: 444705 - DNA, 30 bp, Artificial Sequence
  Synthetic oligonucleotide
catataactggtcatctcttagtgcctata

SEQ ID NO: 444706 - DNA, 30 bp, Artificial Sequence
  Synthetic oligonucleotide
ggagattagctcgatatcattactcctata

SEQ ID NO: 444707 - DNA, 30 bp, Artificial Sequence
  Synthetic oligonucleotide
acgctaggctagttgtgacaccgtcctata

SEQ ID NO: 444708 - DNA, 30 bp, Artificial Sequence
  Synthetic oligonucleotide
tgaggattcctcacagcaacttgtcctata

SEQ ID NO: 444709 - DNA, 30 bp, Artificial Sequence
  Synthetic oligonucleotide
tgtcctttggtcgccaggtactttcctata

SEQ ID NO: 444710 - DNA, 30 bp, Artificial Sequence
  Synthetic oligonucleotide
caatccccggatattgggcgtgcagctata

SEQ ID NO: 444711 - DNA, 30 bp, Artificial Sequence
  Synthetic oligonucleotide
attaaaacagtcagggggtagaacgctata

SEQ ID NO: 444712 - DNA, 30 bp, Artificial Sequence
  Synthetic oligonucleotide
gtttcgtatacggcggtgttgtgggctata

SEQ ID NO: 444713 - DNA, 31 bp, Artificial Sequence
  Synthetic oligonucleotide
tctccggcatacagactactcttgggctata

SEQ ID NO: 444714 - DNA, 30 bp, Artificial Sequence
  Synthetic oligonucleotide
gcgctttcgatataccttcacagatctata

SEQ ID NO: 444715 - DNA, 30 bp, Artificial Sequence
  Synthetic oligonucleotide
actggctttgactattcagttgcctctata

SEQ ID NO: 444716 - DNA, 30 bp, Artificial Sequence
  Synthetic oligonucleotide
ctatgttgctatcgttggtggcgctctata

SEQ ID NO: 444717 - DNA, 30 bp, Artificial Sequence
  Synthetic oligonucleotide
ttctgagatagttcgttgagcttctctata

SEQ ID NO: 444718 - DNA, 30 bp, Artificial Sequence
  Synthetic oligonucleotide
agggtatcacactgatatacagcgtctata

SEQ ID NO: 444719 - DNA, 30 bp, Artificial Sequence
  Synthetic oligonucleotide
gaccgaggctaataaggtgatcggtctata

SEQ ID NO: 444720 - DNA, 30 bp, Artificial Sequence
  Synthetic oligonucleotide
ttctatagacatagcgaccctgtgtctata

SEQ ID NO: 444721 - DNA, 30 bp, Artificial Sequence
  Synthetic oligonucleotide
aacctttcctagcgttgttgagattctata

SEQ ID NO: 444722 - DNA, 30 bp, Artificial Sequence
  Synthetic oligonucleotide
tgttgatcatctgacggtagtagttctata

SEQ ID NO: 444723 - DNA, 30 bp, Artificial Sequence
  Synthetic oligonucleotide
agcccctcactttgttggcattaaagtata

SEQ ID NO: 444724 - DNA, 30 bp, Artificial Sequence
  Synthetic oligonucleotide
tgatactgtcccctcaggtcttgaagtata

SEQ ID NO: 444725 - DNA, 30 bp, Artificial Sequence
  Synthetic oligonucleotide
ctcgttggaaagattagacggttaagtata

SEQ ID NO: 444726 - DNA, 30 bp, Artificial Sequence
  Synthetic oligonucleotide
atcccgatttggacgggatagcacagtata

SEQ ID NO: 444727 - DNA, 30 bp, Artificial Sequence
  Synthetic oligonucleotide
ctgtatcagcgtacggcctaggacagtata

SEQ ID NO: 444728 - DNA, 30 bp, Artificial Sequence
  Synthetic oligonucleotide
cctcttcaatcgtccttagacatcagtata

SEQ ID NO: 444729 - DNA, 30 bp, Artificial Sequence
  Synthetic oligonucleotide
cattcggtcgccatcggcgcctggagtata

SEQ ID NO: 444730 - DNA, 30 bp, Artificial Sequence
  Synthetic oligonucleotide
gatatcatggcgcacgtcgcaatgagtata

SEQ ID NO: 444731 - DNA, 30 bp, Artificial Sequence
  Synthetic oligonucleotide
ggaagcgttggtttgctgcattatagtata

SEQ ID NO: 444732 - DNA, 30 bp, Artificial Sequence
  Synthetic oligonucleotide
ccctacgggtccttaacaaatcctagtata

SEQ ID NO: 444733 - DNA, 30 bp, Artificial Sequence
  Synthetic oligonucleotide
ctgtgtagaactcatattactcaacgtata

SEQ ID NO: 444734 - DNA, 30 bp, Artificial Sequence
  Synthetic oligonucleotide
ttcgtgttgtaataggtaacctgacgtata

SEQ ID NO: 444735 - DNA, 30 bp, Artificial Sequence
  Synthetic oligonucleotide
aaagactttgcccacctgcaccgccgtata

SEQ ID NO: 444736 - DNA, 30 bp, Artificial Sequence
  Synthetic oligonucleotide
agccatgggctgatcacgggggagcgtata

SEQ ID NO: 444737 - DNA, 30 bp, Artificial Sequence
  Synthetic oligonucleotide
gccgcagtttcgctcacatacgcgcgtata

SEQ ID NO: 444738 - DNA, 30 bp, Artificial Sequence
  Synthetic oligonucleotide
aatgaaaaatgcttgcctccaaatcgtata

SEQ ID NO: 444739 - DNA, 30 bp, Artificial Sequence
  Synthetic oligonucleotide
tccaagtaacaaagtacccgggttcgtata

SEQ ID NO: 444740 - DNA, 30 bp, Artificial Sequence
  Synthetic oligonucleotide
tatggtctttgtattctctagccaggtata

SEQ ID NO: 444741 - DNA, 30 bp, Artificial Sequence
  Synthetic oligonucleotide
gtatagctgcagaattatggttgaggtata

SEQ ID NO: 444742 - DNA, 30 bp, Artificial Sequence
  Synthetic oligonucleotide
tgaaccgaaatagggggagctaacggtata

SEQ ID NO: 444743 - DNA, 30 bp, Artificial Sequence
  Synthetic oligonucleotide
gactggcatggaatacctaagtggggtata

SEQ ID NO: 444744 - DNA, 30 bp, Artificial Sequence
  Synthetic oligonucleotide
ccctctcatggtccccggcaacctggtata

SEQ ID NO: 444745 - DNA, 30 bp, Artificial Sequence
  Synthetic oligonucleotide
aagactcttatgatctacgggcctggtata

SEQ ID NO: 444746 - DNA, 30 bp, Artificial Sequence
  Synthetic oligonucleotide
cctctttcgcgttctactttttttggtata

SEQ ID NO: 444747 - DNA, 30 bp, Artificial Sequence
  Synthetic oligonucleotide
tttagatggtctgctgctccagtatgtata

SEQ ID NO: 444748 - DNA, 30 bp, Artificial Sequence
  Synthetic oligonucleotide
gaaatagcacattgtgtaacccactgtata

SEQ ID NO: 444749 - DNA, 30 bp, Artificial Sequence
  Synthetic oligonucleotide
gcttcacagtctcaaattccggactgtata

SEQ ID NO: 444750 - DNA, 30 bp, Artificial Sequence
  Synthetic oligonucleotide
gttggctatgccatgccgggagcctgtata

SEQ ID NO: 444751 - DNA, 30 bp, Artificial Sequence
  Synthetic oligonucleotide
cgcatgattataacacccttgctctgtata

SEQ ID NO: 444752 - DNA, 30 bp, Artificial Sequence
  Synthetic oligonucleotide
aaatcgactgtatagacctaccagtgtata

SEQ ID NO: 444753 - DNA, 30 bp, Artificial Sequence
  Synthetic oligonucleotide
tgggccaggtaagagagaatggcgtgtata

SEQ ID NO: 444754 - DNA, 30 bp, Artificial Sequence
  Synthetic oligonucleotide
gctcattttccctaaaaccttgggtgtata

SEQ ID NO: 444755 - DNA, 30 bp, Artificial Sequence
  Synthetic oligonucleotide
tgaggttacacatgcaaccgggaaattata

SEQ ID NO: 444756 - DNA, 30 bp, Artificial Sequence
  Synthetic oligonucleotide
tccatgtcaagtgtcattttaagaattata

SEQ ID NO: 444757 - DNA, 30 bp, Artificial Sequence
  Synthetic oligonucleotide
ggtccatgcattgatgcgaagcgaattata

SEQ ID NO: 444758 - DNA, 30 bp, Artificial Sequence
  Synthetic oligonucleotide
tcctactaatttagagtccgggacattata

SEQ ID NO: 444759 - DNA, 30 bp, Artificial Sequence
  Synthetic oligonucleotide
cgcgatgtatgtgccggtcggtacattata

SEQ ID NO: 444760 - DNA, 30 bp, Artificial Sequence
  Synthetic oligonucleotide
acttttgtcaaacatgataaaaccattata

SEQ ID NO: 444761 - DNA, 29 bp, Artificial Sequence
  Synthetic oligonucleotide
cccatgaagcctatgaagcgggcattata

SEQ ID NO: 444762 - DNA, 30 bp, Artificial Sequence
  Synthetic oligonucleotide
caaaattgaaaaccgatacttgagattata

SEQ ID NO: 444763 - DNA, 30 bp, Artificial Sequence
  Synthetic oligonucleotide
tggcatcccagacccacggacgttattata

SEQ ID NO: 444764 - DNA, 30 bp, Artificial Sequence
  Synthetic oligonucleotide
caatagaagaatacatcgagttttattata

SEQ ID NO: 444765 - DNA, 30 bp, Artificial Sequence
  Synthetic oligonucleotide
gcttgtagcatcaagcgctagacacttata

SEQ ID NO: 444766 - DNA, 30 bp, Artificial Sequence
  Synthetic oligonucleotide
tgtactgttgtgacgcgatcatgacttata

SEQ ID NO: 444767 - DNA, 30 bp, Artificial Sequence
  Synthetic oligonucleotide
ggtacctggccatggaatttataccttata

SEQ ID NO: 444768 - DNA, 30 bp, Artificial Sequence
  Synthetic oligonucleotide
aacccgtagataaggtttagcactcttata

SEQ ID NO: 444769 - DNA, 30 bp, Artificial Sequence
  Synthetic oligonucleotide
aataatacgtgccgtggaataggtcttata

SEQ ID NO: 444770 - DNA, 30 bp, Artificial Sequence
  Synthetic oligonucleotide
acttcgtttcacaccaggtcgggagttata

SEQ ID NO: 444771 - DNA, 31 bp, Artificial Sequence
  Synthetic oligonucleotide
taccaagcgaaaaactatgctagtagttata

SEQ ID NO: 444772 - DNA, 30 bp, Artificial Sequence
  Synthetic oligonucleotide
atctgtacgtgaaattggactttcgttata

SEQ ID NO: 444773 - DNA, 30 bp, Artificial Sequence
  Synthetic oligonucleotide
tatgtatattttctaaagcccccggttata

SEQ ID NO: 444774 - DNA, 30 bp, Artificial Sequence
  Synthetic oligonucleotide
tctatgttgctcccatcgtgttcggttata

SEQ ID NO: 444775 - DNA, 30 bp, Artificial Sequence
  Synthetic oligonucleotide
ggattctagagatgaagatgtagggttata

SEQ ID NO: 444776 - DNA, 30 bp, Artificial Sequence
  Synthetic oligonucleotide
ttatcgatatatcagtgatggggtgttata

SEQ ID NO: 444777 - DNA, 30 bp, Artificial Sequence
  Synthetic oligonucleotide
tattattgaatataatgcggtgaatttata

SEQ ID NO: 444778 - DNA, 30 bp, Artificial Sequence
  Synthetic oligonucleotide
atcagaaggtattagacacgagcatttata

SEQ ID NO: 444779 - DNA, 30 bp, Artificial Sequence
  Synthetic oligonucleotide
agggtgcggcataagagaacaaagtttata

SEQ ID NO: 444780 - DNA, 30 bp, Artificial Sequence
  Synthetic oligonucleotide
cactgaggcagctcaagattgaagtttata

SEQ ID NO: 444781 - DNA, 30 bp, Artificial Sequence
  Synthetic oligonucleotide
ggtatcaaaattcatgaaaatgcgtttata

SEQ ID NO: 444782 - DNA, 30 bp, Artificial Sequence
  Synthetic oligonucleotide
agcattctgaaagtggtactccggtttata

SEQ ID NO: 444783 - DNA, 30 bp, Artificial Sequence
  Synthetic oligonucleotide
atgcatgtgtatgtataagatttttttata

SEQ ID NO: 444784 - DNA, 30 bp, Artificial Sequence
  Synthetic oligonucleotide
taggtggatcgcttcaaataggaaaaacta

SEQ ID NO: 444785 - DNA, 30 bp, Artificial Sequence
  Synthetic oligonucleotide
tcgggttttttggctttgtccataaaacta

SEQ ID NO: 444786 - DNA, 30 bp, Artificial Sequence
  Synthetic oligonucleotide
acatgtatcctatcaccgtgggtaaaacta

SEQ ID NO: 444787 - DNA, 30 bp, Artificial Sequence
  Synthetic oligonucleotide
ttccgtacccagcagtgtagcctcaaacta

SEQ ID NO: 444788 - DNA, 30 bp, Artificial Sequence
  Synthetic oligonucleotide
actattgcatagaatagaccggggaaacta

SEQ ID NO: 444789 - DNA, 30 bp, Artificial Sequence
  Synthetic oligonucleotide
aattatacggcagcttttgacactaaacta

SEQ ID NO: 444790 - DNA, 30 bp, Artificial Sequence
  Synthetic oligonucleotide
cgcgaggccggtgtcttaacgatgcaacta

SEQ ID NO: 444791 - DNA, 30 bp, Artificial Sequence
  Synthetic oligonucleotide
taagtcatatacaataataggctgcaacta

SEQ ID NO: 444792 - DNA, 30 bp, Artificial Sequence
  Synthetic oligonucleotide
atctactctttctgcgtaatccgcgaacta

SEQ ID NO: 444793 - DNA, 30 bp, Artificial Sequence
  Synthetic oligonucleotide
ggccacgcatttttttctgattgcgaacta

SEQ ID NO: 444794 - DNA, 30 bp, Artificial Sequence
  Synthetic oligonucleotide
agcatggtaaagcgtcacctcgcggaacta

SEQ ID NO: 444795 - DNA, 30 bp, Artificial Sequence
  Synthetic oligonucleotide
tagtccatagccctctacagacgggaacta

SEQ ID NO: 444796 - DNA, 30 bp, Artificial Sequence
  Synthetic oligonucleotide
ctttaaaaactgttagacttattggaacta

SEQ ID NO: 444797 - DNA, 30 bp, Artificial Sequence
  Synthetic oligonucleotide
gaataagagatgctctttcactatgaacta

SEQ ID NO: 444798 - DNA, 30 bp, Artificial Sequence
  Synthetic oligonucleotide
ggaactagatctgagcacttgtgtgaacta

SEQ ID NO: 444799 - DNA, 30 bp, Artificial Sequence
  Synthetic oligonucleotide
ttgttatggactgaagaaggtcttgaacta

SEQ ID NO: 444800 - DNA, 30 bp, Artificial Sequence
  Synthetic oligonucleotide
taaaattttatgcatgtatcatcctaacta

SEQ ID NO: 444801 - DNA, 30 bp, Artificial Sequence
  Synthetic oligonucleotide
cttgccggtcgtgttgaggtaacgtaacta

SEQ ID NO: 444802 - DNA, 30 bp, Artificial Sequence
  Synthetic oligonucleotide
agattatttctgattggtggagaaacacta

SEQ ID NO: 444803 - DNA, 30 bp, Artificial Sequence
  Synthetic oligonucleotide
cctattttttcgtaggagcgattcacacta

SEQ ID NO: 444804 - DNA, 30 bp, Artificial Sequence
  Synthetic oligonucleotide
cagtaggtggtcttgcgtggttagacacta

SEQ ID NO: 444805 - DNA, 30 bp, Artificial Sequence
  Synthetic oligonucleotide
taatggtagagcggaacacccgggacacta

SEQ ID NO: 444806 - DNA, 30 bp, Artificial Sequence
  Synthetic oligonucleotide
ttgtcggcacgcgcacggcgtagtacacta

SEQ ID NO: 444807 - DNA, 30 bp, Artificial Sequence
  Synthetic oligonucleotide
cccacctctctcacccaacttgcaccacta

SEQ ID NO: 444808 - DNA, 30 bp, Artificial Sequence
  Synthetic oligonucleotide
atatgtagccaatgcagctccatcccacta

SEQ ID NO: 444809 - DNA, 30 bp, Artificial Sequence
  Synthetic oligonucleotide
gttctgtcttagccgcaatatacgccacta

SEQ ID NO: 444810 - DNA, 30 bp, Artificial Sequence
  Synthetic oligonucleotide
tttcgcacttcgtaaggctggtttccacta

SEQ ID NO: 444811 - DNA, 30 bp, Artificial Sequence
  Synthetic oligonucleotide
gctagcctaatgtttttttaaggagcacta

SEQ ID NO: 444812 - DNA, 30 bp, Artificial Sequence
  Synthetic oligonucleotide
ctcgtctaggaggacgtgtgggccgcacta

SEQ ID NO: 444813 - DNA, 30 bp, Artificial Sequence
  Synthetic oligonucleotide
gtaacgccgcgtctaaaaggcggggcacta

SEQ ID NO: 444814 - DNA, 30 bp, Artificial Sequence
  Synthetic oligonucleotide
gtacaggtcctcgcccctaatttggcacta

SEQ ID NO: 444815 - DNA, 30 bp, Artificial Sequence
  Synthetic oligonucleotide
cttagtatgtgtcaacaggacggtgcacta

SEQ ID NO: 444816 - DNA, 30 bp, Artificial Sequence
  Synthetic oligonucleotide
gttcgaaagatagcgctatatggtgcacta

SEQ ID NO: 444817 - DNA, 30 bp, Artificial Sequence
  Synthetic oligonucleotide
caaagttgacgccctggggcatttgcacta

SEQ ID NO: 444818 - DNA, 30 bp, Artificial Sequence
  Synthetic oligonucleotide
atgtgttttatcttattcggggagtcacta

SEQ ID NO: 444819 - DNA, 30 bp, Artificial Sequence
  Synthetic oligonucleotide
tctacggcattggaaaactactcgtcacta

SEQ ID NO: 444820 - DNA, 30 bp, Artificial Sequence
  Synthetic oligonucleotide
gcaagaaattgccggtgttattcgtcacta

SEQ ID NO: 444821 - DNA, 30 bp, Artificial Sequence
  Synthetic oligonucleotide
cagtgtaaaaccgggtcacggtgttcacta

SEQ ID NO: 444822 - DNA, 30 bp, Artificial Sequence
  Synthetic oligonucleotide
ttgagccttttattttgagacataagacta

SEQ ID NO: 444823 - DNA, 30 bp, Artificial Sequence
  Synthetic oligonucleotide
acgcagatggctgccacgggcataagacta

SEQ ID NO: 444824 - DNA, 30 bp, Artificial Sequence
  Synthetic oligonucleotide
tgtacagcgggatgcagcccgctaagacta

SEQ ID NO: 444825 - DNA, 30 bp, Artificial Sequence
  Synthetic oligonucleotide
atttgtcctataaataggagcttaagacta

SEQ ID NO: 444826 - DNA, 30 bp, Artificial Sequence
  Synthetic oligonucleotide
accccaagacaactgggcattttaagacta

SEQ ID NO: 444827 - DNA, 30 bp, Artificial Sequence
  Synthetic oligonucleotide
ccgggattccgcactaagtgctacagacta

SEQ ID NO: 444828 - DNA, 30 bp, Artificial Sequence
  Synthetic oligonucleotide
ataattgtagcgacggggttgtccagacta

SEQ ID NO: 444829 - DNA, 30 bp, Artificial Sequence
  Synthetic oligonucleotide
ttggtacccgatgtacaatagacgagacta

SEQ ID NO: 444830 - DNA, 30 bp, Artificial Sequence
  Synthetic oligonucleotide
tgtaaccttggcgctgaagaagctagacta

SEQ ID NO: 444831 - DNA, 30 bp, Artificial Sequence
  Synthetic oligonucleotide
attattagtcagtagattaactctagacta

SEQ ID NO: 444832 - DNA, 30 bp, Artificial Sequence
  Synthetic oligonucleotide
ataattgtgtccgccatcccctttagacta

SEQ ID NO: 444833 - DNA, 30 bp, Artificial Sequence
  Synthetic oligonucleotide
gaatacctgaatatgccttatagacgacta

SEQ ID NO: 444834 - DNA, 30 bp, Artificial Sequence
  Synthetic oligonucleotide
cttggtacgccaggtttacacctacgacta

SEQ ID NO: 444835 - DNA, 25 bp, Artificial Sequence
  Synthetic oligonucleotide
gccctatctatgtaactaccgacta

SEQ ID NO: 444836 - DNA, 30 bp, Artificial Sequence
  Synthetic oligonucleotide
ggcgttgacagtgcgggcccacggcgacta

SEQ ID NO: 444837 - DNA, 30 bp, Artificial Sequence
  Synthetic oligonucleotide
gtttccgttggacaaggccgcctaggacta

SEQ ID NO: 444838 - DNA, 30 bp, Artificial Sequence
  Synthetic oligonucleotide
ccaaagcggctaaggctcttagctggacta

SEQ ID NO: 444839 - DNA, 30 bp, Artificial Sequence
  Synthetic oligonucleotide
taagtagtcctaactacgtgatctggacta

SEQ ID NO: 444840 - DNA, 30 bp, Artificial Sequence
  Synthetic oligonucleotide
tcgaattgttcacgtggcaatggtggacta

SEQ ID NO: 444841 - DNA, 30 bp, Artificial Sequence
  Synthetic oligonucleotide
gggtcaattcgcttggaaagtatatgacta

SEQ ID NO: 444842 - DNA, 30 bp, Artificial Sequence
  Synthetic oligonucleotide
cagtcctcaacacatcgctagtggtgacta

SEQ ID NO: 444843 - DNA, 30 bp, Artificial Sequence
  Synthetic oligonucleotide
gagtggttaaggctacgcctaaattgacta

SEQ ID NO: 444844 - DNA, 30 bp, Artificial Sequence
  Synthetic oligonucleotide
tcccttgggatgatactaagtgcttgacta

SEQ ID NO: 444845 - DNA, 30 bp, Artificial Sequence
  Synthetic oligonucleotide
ggcacttgcccccacatccgtgaaatacta

SEQ ID NO: 444846 - DNA, 30 bp, Artificial Sequence
  Synthetic oligonucleotide
caaatgattggactcgccttaagaatacta

SEQ ID NO: 444847 - DNA, 30 bp, Artificial Sequence
  Synthetic oligonucleotide
tttttcacccgtgtcagtgttgtaatacta

SEQ ID NO: 444848 - DNA, 30 bp, Artificial Sequence
  Synthetic oligonucleotide
ggtaggaactagcataagtaattaatacta

SEQ ID NO: 444849 - DNA, 30 bp, Artificial Sequence
  Synthetic oligonucleotide
aatgtgccttaactgtgctgacacatacta

SEQ ID NO: 444850 - DNA, 30 bp, Artificial Sequence
  Synthetic oligonucleotide
tctcgagggagtaacctgacgatcatacta

SEQ ID NO: 444851 - DNA, 30 bp, Artificial Sequence
  Synthetic oligonucleotide
attcggactccaggttgcagccagatacta

SEQ ID NO: 444852 - DNA, 30 bp, Artificial Sequence
  Synthetic oligonucleotide
acttgtgtttggaataagtggtctatacta

SEQ ID NO: 444853 - DNA, 30 bp, Artificial Sequence
  Synthetic oligonucleotide
ctgttacactggtgtcgatccccactacta

SEQ ID NO: 444854 - DNA, 30 bp, Artificial Sequence
  Synthetic oligonucleotide
tcttcagcaacacacagttgcgcactacta

SEQ ID NO: 444855 - DNA, 30 bp, Artificial Sequence
  Synthetic oligonucleotide
gtaggttaaatgtgtctattggcactacta

SEQ ID NO: 444856 - DNA, 30 bp, Artificial Sequence
  Synthetic oligonucleotide
tatgttgacttgcatataaaacgcctacta

SEQ ID NO: 444857 - DNA, 30 bp, Artificial Sequence
  Synthetic oligonucleotide
gtcggcacgaagcactgttaatgcctacta

SEQ ID NO: 444858 - DNA, 30 bp, Artificial Sequence
  Synthetic oligonucleotide
ttatcaaccagttaatttttgcagctacta

SEQ ID NO: 444859 - DNA, 30 bp, Artificial Sequence
  Synthetic oligonucleotide
gtatacaatgtctataaactgtatctacta

SEQ ID NO: 444860 - DNA, 30 bp, Artificial Sequence
  Synthetic oligonucleotide
gcatatcagccggttaaaatggctctacta

SEQ ID NO: 444861 - DNA, 30 bp, Artificial Sequence
  Synthetic oligonucleotide
ggtagattaaggtaacattagagtctacta

SEQ ID NO: 444862 - DNA, 30 bp, Artificial Sequence
  Synthetic oligonucleotide
ataaatctgccagacacggagggagtacta

SEQ ID NO: 444863 - DNA, 30 bp, Artificial Sequence
  Synthetic oligonucleotide
ttggtttagagaggaaactcatgagtacta

SEQ ID NO: 444864 - DNA, 30 bp, Artificial Sequence
  Synthetic oligonucleotide
gtttaaatcaccaaatcttatgccgtacta

SEQ ID NO: 444865 - DNA, 30 bp, Artificial Sequence
  Synthetic oligonucleotide
ctaataattagaaaccgccattaggtacta

SEQ ID NO: 444866 - DNA, 30 bp, Artificial Sequence
  Synthetic oligonucleotide
tcgccctatcgctgcgatttagcggtacta

SEQ ID NO: 444867 - DNA, 30 bp, Artificial Sequence
  Synthetic oligonucleotide
agtaggtaagaggttgtatctggtgtacta

SEQ ID NO: 444868 - DNA, 30 bp, Artificial Sequence
  Synthetic oligonucleotide
ttctccgagagcgtttcagcacgattacta

SEQ ID NO: 444869 - DNA, 30 bp, Artificial Sequence
  Synthetic oligonucleotide
atggcccccaaatcgctttcttagttacta

SEQ ID NO: 444870 - DNA, 30 bp, Artificial Sequence
  Synthetic oligonucleotide
ataataacttggtgagtagtagcgttacta

SEQ ID NO: 444871 - DNA, 30 bp, Artificial Sequence
  Synthetic oligonucleotide
aaacacaggcttgcggtgtctaatttacta

SEQ ID NO: 444872 - DNA, 30 bp, Artificial Sequence
  Synthetic oligonucleotide
cgctgggcaaattcgatatttcctttacta

SEQ ID NO: 444873 - DNA, 30 bp, Artificial Sequence
  Synthetic oligonucleotide
cggatgctcttttatgtggcttgaaaccta

SEQ ID NO: 444874 - DNA, 30 bp, Artificial Sequence
  Synthetic oligonucleotide
tagctatttcgtgtacatcttgacaaccta

SEQ ID NO: 444875 - DNA, 30 bp, Artificial Sequence
  Synthetic oligonucleotide
agatagctacatgtggtgtgtactaaccta

SEQ ID NO: 444876 - DNA, 30 bp, Artificial Sequence
  Synthetic oligonucleotide
cacccctgcggccgcgtgcacatacaccta

SEQ ID NO: 444877 - DNA, 30 bp, Artificial Sequence
  Synthetic oligonucleotide
gattactagataacctctattctgcaccta

SEQ ID NO: 444878 - DNA, 30 bp, Artificial Sequence
  Synthetic oligonucleotide
gagctacctactaaacgacccgacgaccta

SEQ ID NO: 444879 - DNA, 30 bp, Artificial Sequence
  Synthetic oligonucleotide
atacgtggtttaccaggtagccctgaccta

SEQ ID NO: 444880 - DNA, 30 bp, Artificial Sequence
  Synthetic oligonucleotide
gttctcgaatcagagtataaaagtgaccta

SEQ ID NO: 444881 - DNA, 30 bp, Artificial Sequence
  Synthetic oligonucleotide
tctcgtctatgcggtgcaccgcttgaccta

SEQ ID NO: 444882 - DNA, 30 bp, Artificial Sequence
  Synthetic oligonucleotide
ttttgagtgaatcgctttttccaataccta

SEQ ID NO: 444883 - DNA, 30 bp, Artificial Sequence
  Synthetic oligonucleotide
tcatgtatcgcgaccatagaaatctaccta

SEQ ID NO: 444884 - DNA, 30 bp, Artificial Sequence
  Synthetic oligonucleotide
gaactgccagtagcgaagcaggagtaccta

SEQ ID NO: 444885 - DNA, 30 bp, Artificial Sequence
  Synthetic oligonucleotide
taccacggtaccctccgtatttcgtaccta

SEQ ID NO: 444886 - DNA, 30 bp, Artificial Sequence
  Synthetic oligonucleotide
gtaccaggcacccgtgatggcttcacccta

SEQ ID NO: 444887 - DNA, 30 bp, Artificial Sequence
  Synthetic oligonucleotide
gccggcgttcagctaatagtatagacccta

SEQ ID NO: 444888 - DNA, 30 bp, Artificial Sequence
  Synthetic oligonucleotide
tcgcccgtacggtaacggctctcgacccta

SEQ ID NO: 444889 - DNA, 30 bp, Artificial Sequence
  Synthetic oligonucleotide
tccacttctcggccatgcaacaggacccta

SEQ ID NO: 444890 - DNA, 30 bp, Artificial Sequence
  Synthetic oligonucleotide
tgatatagtaaagctatttaagggacccta

SEQ ID NO: 444891 - DNA, 30 bp, Artificial Sequence
  Synthetic oligonucleotide
cgctgcggattataaggtggggatacccta

SEQ ID NO: 444892 - DNA, 30 bp, Artificial Sequence
  Synthetic oligonucleotide
gtattttttatgaccatcacccctacccta

SEQ ID NO: 444893 - DNA, 30 bp, Artificial Sequence
  Synthetic oligonucleotide
cagaagagttggggcctatacccaccccta

SEQ ID NO: 444894 - DNA, 30 bp, Artificial Sequence
  Synthetic oligonucleotide
caatacaggcgctcccggtttagaccccta

SEQ ID NO: 444895 - DNA, 30 bp, Artificial Sequence
  Synthetic oligonucleotide
acccgcccagcttcgcaccaacgaccccta

SEQ ID NO: 444896 - DNA, 30 bp, Artificial Sequence
  Synthetic oligonucleotide
tacatagggagggccgatagctacccccta

SEQ ID NO: 444897 - DNA, 30 bp, Artificial Sequence
  Synthetic oligonucleotide
aaattaatacggtctgaagccacgccccta

SEQ ID NO: 444898 - DNA, 30 bp, Artificial Sequence
  Synthetic oligonucleotide
cgacgacgggttctcctcttaccgccccta

SEQ ID NO: 444899 - DNA, 30 bp, Artificial Sequence
  Synthetic oligonucleotide
aagaagcctaaaaagccgcctagagcccta

SEQ ID NO: 444900 - DNA, 30 bp, Artificial Sequence
  Synthetic oligonucleotide
aaatcgacgaggttacgggctggagcccta

SEQ ID NO: 444901 - DNA, 30 bp, Artificial Sequence
  Synthetic oligonucleotide
tttaaatctggcggtacaggcaacgcccta

SEQ ID NO: 444902 - DNA, 30 bp, Artificial Sequence
  Synthetic oligonucleotide
gctcactctgcagttgccccggtcgcccta

SEQ ID NO: 444903 - DNA, 30 bp, Artificial Sequence
  Synthetic oligonucleotide
cacgtccacccattgaggtggttcgcccta

SEQ ID NO: 444904 - DNA, 30 bp, Artificial Sequence
  Synthetic oligonucleotide
aacacgttatagttactcttatcatcccta

SEQ ID NO: 444905 - DNA, 30 bp, Artificial Sequence
  Synthetic oligonucleotide
ttgaagcgaagacgcgaccgctcatcccta

SEQ ID NO: 444906 - DNA, 30 bp, Artificial Sequence
  Synthetic oligonucleotide
acggcgctgacatcgggcctgttatcccta

SEQ ID NO: 444907 - DNA, 30 bp, Artificial Sequence
  Synthetic oligonucleotide
taatactgttgactaaacacccagtcccta

SEQ ID NO: 444908 - DNA, 30 bp, Artificial Sequence
  Synthetic oligonucleotide
cttagatgagtgagagctttgacgtcccta

SEQ ID NO: 444909 - DNA, 30 bp, Artificial Sequence
  Synthetic oligonucleotide
tactctgtctaagacaggacctggtcccta

SEQ ID NO: 444910 - DNA, 30 bp, Artificial Sequence
  Synthetic oligonucleotide
tttctccatacctgtgacgcgacttcccta

SEQ ID NO: 444911 - DNA, 30 bp, Artificial Sequence
  Synthetic oligonucleotide
ctgggaatttactgtttcctatgttcccta

SEQ ID NO: 444912 - DNA, 31 bp, Artificial Sequence
  Synthetic oligonucleotide
agttccttcatccagatcatgtccaagccta

SEQ ID NO: 444913 - DNA, 30 bp, Artificial Sequence
  Synthetic oligonucleotide
gaacatttgttgagctggcggaccagccta

SEQ ID NO: 444914 - DNA, 30 bp, Artificial Sequence
  Synthetic oligonucleotide
tcagacctgtagtattacctgaccagccta

SEQ ID NO: 444915 - DNA, 30 bp, Artificial Sequence
  Synthetic oligonucleotide
agtatcaaactaatggagcttcgcagccta

SEQ ID NO: 444916 - DNA, 30 bp, Artificial Sequence
  Synthetic oligonucleotide
ggcccggtcgtcaaaggccacaatagccta

SEQ ID NO: 444917 - DNA, 30 bp, Artificial Sequence
  Synthetic oligonucleotide
aacgagcctgtacgcgatgcaactagccta

SEQ ID NO: 444918 - DNA, 30 bp, Artificial Sequence
  Synthetic oligonucleotide
accgacacaggattttttgagagtagccta

SEQ ID NO: 444919 - DNA, 30 bp, Artificial Sequence
  Synthetic oligonucleotide
tgtagaattgtttagtcaaaaccacgccta

SEQ ID NO: 444920 - DNA, 30 bp, Artificial Sequence
  Synthetic oligonucleotide
cactatgctaaattccatacttcccgccta

SEQ ID NO: 444921 - DNA, 30 bp, Artificial Sequence
  Synthetic oligonucleotide
ttgacgcacgacggttaatcactccgccta

SEQ ID NO: 444922 - DNA, 30 bp, Artificial Sequence
  Synthetic oligonucleotide
taccgtgggcccacgagcgacggaggccta

SEQ ID NO: 444923 - DNA, 30 bp, Artificial Sequence
  Synthetic oligonucleotide
gggccaaaagcccgcctgaccggaggccta

SEQ ID NO: 444924 - DNA, 30 bp, Artificial Sequence
  Synthetic oligonucleotide
tgatggcaattggttcagctctacggccta

SEQ ID NO: 444925 - DNA, 30 bp, Artificial Sequence
  Synthetic oligonucleotide
ccagtctcggcagccagaggctccggccta

SEQ ID NO: 444926 - DNA, 30 bp, Artificial Sequence
  Synthetic oligonucleotide
tatggatgtgttgaagcaggttgcggccta

SEQ ID NO: 444927 - DNA, 30 bp, Artificial Sequence
  Synthetic oligonucleotide
ccgaacagcttcgggataatacttggccta

SEQ ID NO: 444928 - DNA, 30 bp, Artificial Sequence
  Synthetic oligonucleotide
tcattctgcgggaaagacgccgcgtgccta

SEQ ID NO: 444929 - DNA, 30 bp, Artificial Sequence
  Synthetic oligonucleotide
atcctgtgccatagtacaacaatgtgccta

SEQ ID NO: 444930 - DNA, 30 bp, Artificial Sequence
  Synthetic oligonucleotide
ggggaagcatctttttcgtgtttttgccta

SEQ ID NO: 444931 - DNA, 30 bp, Artificial Sequence
  Synthetic oligonucleotide
cgcatcgctgagctaacgagaggaatccta

SEQ ID NO: 444932 - DNA, 30 bp, Artificial Sequence
  Synthetic oligonucleotide
atttgaatcggtactagccgctacatccta

SEQ ID NO: 444933 - DNA, 30 bp, Artificial Sequence
  Synthetic oligonucleotide
ttggcacgtcgtcgttcgtgcagcatccta

SEQ ID NO: 444934 - DNA, 29 bp, Artificial Sequence
  Synthetic oligonucleotide
taatagtccctatgacataaatgatccta

SEQ ID NO: 444935 - DNA, 31 bp, Artificial Sequence
  Synthetic oligonucleotide
cttcggattagcgccggcgagaactatccta

SEQ ID NO: 444936 - DNA, 30 bp, Artificial Sequence
  Synthetic oligonucleotide
tactccatagaaaattaaatccgactccta

SEQ ID NO: 444937 - DNA, 30 bp, Artificial Sequence
  Synthetic oligonucleotide
acccagatgcggagtggtgagaacctccta

SEQ ID NO: 444938 - DNA, 30 bp, Artificial Sequence
  Synthetic oligonucleotide
aggatttatttggacactatcagcctccta

SEQ ID NO: 444939 - DNA, 30 bp, Artificial Sequence
  Synthetic oligonucleotide
gtggtgagttgcacatgtggcgtcctccta

SEQ ID NO: 444940 - DNA, 30 bp, Artificial Sequence
  Synthetic oligonucleotide
tagtagtttgctctggacgagtcagtccta

SEQ ID NO: 444941 - DNA, 30 bp, Artificial Sequence
  Synthetic oligonucleotide
ctgacacggtattgcataccatgcgtccta

SEQ ID NO: 444942 - DNA, 30 bp, Artificial Sequence
  Synthetic oligonucleotide
aaacctagggggagagtaacaaaggtccta

SEQ ID NO: 444943 - DNA, 30 bp, Artificial Sequence
  Synthetic oligonucleotide
aggacttaatcttaagaatatggggtccta

SEQ ID NO: 444944 - DNA, 30 bp, Artificial Sequence
  Synthetic oligonucleotide
gttaagctcgaaggtggatatggggtccta

SEQ ID NO: 444945 - DNA, 30 bp, Artificial Sequence
  Synthetic oligonucleotide
gcattataggactgccaaggcaaattccta

SEQ ID NO: 444946 - DNA, 30 bp, Artificial Sequence
  Synthetic oligonucleotide
agatctgtcaaatcgcagttcacgttccta

SEQ ID NO: 444947 - DNA, 30 bp, Artificial Sequence
  Synthetic oligonucleotide
caccaggtcttggaacttaacaggttccta

SEQ ID NO: 444948 - DNA, 30 bp, Artificial Sequence
  Synthetic oligonucleotide
gtattaggggtgtggatcggacatttccta

SEQ ID NO: 444949 - DNA, 30 bp, Artificial Sequence
  Synthetic oligonucleotide
ggacccagggctgagcacgtgtatttccta

SEQ ID NO: 444950 - DNA, 30 bp, Artificial Sequence
  Synthetic oligonucleotide
cgtattgaaccacctttactgtttttccta

SEQ ID NO: 444951 - DNA, 30 bp, Artificial Sequence
  Synthetic oligonucleotide
aattgcttccattataacacgtgaaagcta

SEQ ID NO: 444952 - DNA, 29 bp, Artificial Sequence
  Synthetic oligonucleotide
aaggttgtcgacgcaatcgggtcaagcta

SEQ ID NO: 444953 - DNA, 30 bp, Artificial Sequence
  Synthetic oligonucleotide
gtgaaccggcacttggcgggacttaagcta

SEQ ID NO: 444954 - DNA, 30 bp, Artificial Sequence
  Synthetic oligonucleotide
tcttgctgtggcacaggttatgttaagcta

SEQ ID NO: 444955 - DNA, 30 bp, Artificial Sequence
  Synthetic oligonucleotide
tggttatggtggcagcgggagacacagcta

SEQ ID NO: 444956 - DNA, 30 bp, Artificial Sequence
  Synthetic oligonucleotide
tgtccacacaattcctaggggacacagcta

SEQ ID NO: 444957 - DNA, 30 bp, Artificial Sequence
  Synthetic oligonucleotide
attagataataagacggttttatccagcta

SEQ ID NO: 444958 - DNA, 30 bp, Artificial Sequence
  Synthetic oligonucleotide
ttaattaggggagctggcaaggggcagcta

SEQ ID NO: 444959 - DNA, 30 bp, Artificial Sequence
  Synthetic oligonucleotide
atcatcgtcatgacggtatcatggcagcta

SEQ ID NO: 444960 - DNA, 30 bp, Artificial Sequence
  Synthetic oligonucleotide
cccaccccaatcataattgggcgcgagcta

SEQ ID NO: 444961 - DNA, 30 bp, Artificial Sequence
  Synthetic oligonucleotide
gcaatataatcccgttccagcatcgagcta

SEQ ID NO: 444962 - DNA, 30 bp, Artificial Sequence
  Synthetic oligonucleotide
cgcggatagttgatgtcaaatttcgagcta

SEQ ID NO: 444963 - DNA, 30 bp, Artificial Sequence
  Synthetic oligonucleotide
aaaaagacgttagtatcgcattgggagcta

SEQ ID NO: 444964 - DNA, 30 bp, Artificial Sequence
  Synthetic oligonucleotide
gcaatagatttgagcaagcctcttgagcta

SEQ ID NO: 444965 - DNA, 30 bp, Artificial Sequence
  Synthetic oligonucleotide
ccgggcaaaccacactgtcgcatatagcta

SEQ ID NO: 444966 - DNA, 30 bp, Artificial Sequence
  Synthetic oligonucleotide
tgcattttgttatcgttaattgtatagcta

SEQ ID NO: 444967 - DNA, 30 bp, Artificial Sequence
  Synthetic oligonucleotide
ttcgatgtataggtgcgttctctctagcta

SEQ ID NO: 444968 - DNA, 30 bp, Artificial Sequence
  Synthetic oligonucleotide
ggcacgcggtcactagccacatggtagcta

SEQ ID NO: 444969 - DNA, 30 bp, Artificial Sequence
  Synthetic oligonucleotide
aaaggactggcggttccagtttcttagcta

SEQ ID NO: 444970 - DNA, 30 bp, Artificial Sequence
  Synthetic oligonucleotide
gaaagtcgttcccacagagcaacaacgcta

SEQ ID NO: 444971 - DNA, 30 bp, Artificial Sequence
  Synthetic oligonucleotide
cctaccgcgtgattagggcgcagaacgcta

SEQ ID NO: 444972 - DNA, 30 bp, Artificial Sequence
  Synthetic oligonucleotide
ttacgctgagggccgatatgcacgacgcta

SEQ ID NO: 444973 - DNA, 30 bp, Artificial Sequence
  Synthetic oligonucleotide
atctcccgagttaaattaggcgcgacgcta

SEQ ID NO: 444974 - DNA, 30 bp, Artificial Sequence
  Synthetic oligonucleotide
acacgacgcgactgcgcaggtactacgcta

SEQ ID NO: 444975 - DNA, 30 bp, Artificial Sequence
  Synthetic oligonucleotide
gggataaggtttgggctaagccaaccgcta

SEQ ID NO: 444976 - DNA, 30 bp, Artificial Sequence
  Synthetic oligonucleotide
attcactgggcgctaaaagatggaccgcta

SEQ ID NO: 444977 - DNA, 30 bp, Artificial Sequence
  Synthetic oligonucleotide
gcgtatggtgctacccttatcttaccgcta

SEQ ID NO: 444978 - DNA, 30 bp, Artificial Sequence
  Synthetic oligonucleotide
tacaaccctaggttgcgacacggcccgcta

SEQ ID NO: 444979 - DNA, 30 bp, Artificial Sequence
  Synthetic oligonucleotide
taataaagccgctttaatggaaatccgcta

SEQ ID NO: 444980 - DNA, 30 bp, Artificial Sequence
  Synthetic oligonucleotide
atctgctagactggccaacggcttccgcta

SEQ ID NO: 444981 - DNA, 30 bp, Artificial Sequence
  Synthetic oligonucleotide
aatggtctccagctacggatggttccgcta

SEQ ID NO: 444982 - DNA, 30 bp, Artificial Sequence
  Synthetic oligonucleotide
caattaacgttacttacttgtaaagcgcta

SEQ ID NO: 444983 - DNA, 30 bp, Artificial Sequence
  Synthetic oligonucleotide
aacgtgtggtcctcagtacagtcagcgcta

SEQ ID NO: 444984 - DNA, 31 bp, Artificial Sequence
  Synthetic oligonucleotide
ctcgttgctgggaaggacgcagagagcgcta

SEQ ID NO: 444985 - DNA, 30 bp, Artificial Sequence
  Synthetic oligonucleotide
aacagtaagcgaagactaacgctagcgcta

SEQ ID NO: 444986 - DNA, 30 bp, Artificial Sequence
  Synthetic oligonucleotide
tgcaccgccaggctccgaagagccgcgcta

SEQ ID NO: 444987 - DNA, 30 bp, Artificial Sequence
  Synthetic oligonucleotide
ataccgggaccccaagggtgcagcgcgcta

SEQ ID NO: 444988 - DNA, 30 bp, Artificial Sequence
  Synthetic oligonucleotide
gtcgatctgttcttggtcaatagcgcgcta

SEQ ID NO: 444989 - DNA, 30 bp, Artificial Sequence
  Synthetic oligonucleotide
ataccaatcgtagcaggacggtatgcgcta

SEQ ID NO: 444990 - DNA, 30 bp, Artificial Sequence
  Synthetic oligonucleotide
ggttaatggggttataatgttaactcgcta

SEQ ID NO: 444991 - DNA, 30 bp, Artificial Sequence
  Synthetic oligonucleotide
tgttccctaaatattagggctacctcgcta

SEQ ID NO: 444992 - DNA, 30 bp, Artificial Sequence
  Synthetic oligonucleotide
gttctataatttggcataggaatctcgcta

SEQ ID NO: 444993 - DNA, 30 bp, Artificial Sequence
  Synthetic oligonucleotide
tatctcacgtgctcactacagacgtcgcta

SEQ ID NO: 444994 - DNA, 30 bp, Artificial Sequence
  Synthetic oligonucleotide
aagaagcagttatccgatctctattcgcta

SEQ ID NO: 444995 - DNA, 30 bp, Artificial Sequence
  Synthetic oligonucleotide
ggatttgacctatagcaatggacttcgcta

SEQ ID NO: 444996 - DNA, 30 bp, Artificial Sequence
  Synthetic oligonucleotide
gtgattggtccgtgagactttacttcgcta

SEQ ID NO: 444997 - DNA, 30 bp, Artificial Sequence
  Synthetic oligonucleotide
gtaaatgcgcaccgtgacctcatttcgcta

SEQ ID NO: 444998 - DNA, 30 bp, Artificial Sequence
  Synthetic oligonucleotide
tgacccgtatttgtcatccggcaaaggcta

SEQ ID NO: 444999 - DNA, 30 bp, Artificial Sequence
  Synthetic oligonucleotide
actcgtaacaaagatttatctgcaaggcta

SEQ ID NO: 445000 - DNA, 30 bp, Artificial Sequence
  Synthetic oligonucleotide
gtcgcaacggtcccgacctggagaaggcta

SEQ ID NO: 445001 - DNA, 30 bp, Artificial Sequence
  Synthetic oligonucleotide
caacagttgtcgaggctgtagaagaggcta

SEQ ID NO: 445002 - DNA, 30 bp, Artificial Sequence
  Synthetic oligonucleotide
attcgtgtatggtcccgggaacagaggcta

SEQ ID NO: 445003 - DNA, 30 bp, Artificial Sequence
  Synthetic oligonucleotide
gtgtccactctgtataaaacgtagaggcta

SEQ ID NO: 445004 - DNA, 30 bp, Artificial Sequence
  Synthetic oligonucleotide
caacatcgcggccactcttccgtgaggcta

SEQ ID NO: 445005 - DNA, 30 bp, Artificial Sequence
  Synthetic oligonucleotide
attatccttgtttataactcgtttaggcta

SEQ ID NO: 445006 - DNA, 30 bp, Artificial Sequence
  Synthetic oligonucleotide
cacagtaatttagctattcggatacggcta

SEQ ID NO: 445007 - DNA, 30 bp, Artificial Sequence
  Synthetic oligonucleotide
acagcaaagtcgttgcggtcagtacggcta

SEQ ID NO: 445008 - DNA, 30 bp, Artificial Sequence
  Synthetic oligonucleotide
tttcgccgtcatgcaaacggctggcggcta

SEQ ID NO: 445009 - DNA, 30 bp, Artificial Sequence
  Synthetic oligonucleotide
aatagtccgttttgtttaaatgatcggcta

SEQ ID NO: 445010 - DNA, 30 bp, Artificial Sequence
  Synthetic oligonucleotide
acagggggttcctttggcaaccctcggcta

SEQ ID NO: 445011 - DNA, 30 bp, Artificial Sequence
  Synthetic oligonucleotide
gtatttggggcgctcagaaggagtcggcta

SEQ ID NO: 445012 - DNA, 30 bp, Artificial Sequence
  Synthetic oligonucleotide
ttgtaattccccttatttcggcgtcggcta

SEQ ID NO: 445013 - DNA, 30 bp, Artificial Sequence
  Synthetic oligonucleotide
cacggttattattgacattcctgtcggcta

SEQ ID NO: 445014 - DNA, 30 bp, Artificial Sequence
  Synthetic oligonucleotide
actcagaagggcccatgcaggcttcggcta

SEQ ID NO: 445015 - DNA, 30 bp, Artificial Sequence
  Synthetic oligonucleotide
cttcctgccctcgttctttaccacgggcta

SEQ ID NO: 445016 - DNA, 30 bp, Artificial Sequence
  Synthetic oligonucleotide
tagcgcgcaagctctgtattatgcgggcta

SEQ ID NO: 445017 - DNA, 30 bp, Artificial Sequence
  Synthetic oligonucleotide
gagtaattttttgtgatgaatacggggcta

SEQ ID NO: 445018 - DNA, 30 bp, Artificial Sequence
  Synthetic oligonucleotide
ataactccgtctaagatcagaagggggcta

SEQ ID NO: 445019 - DNA, 30 bp, Artificial Sequence
  Synthetic oligonucleotide
ggggcatgcctacatagggccggtgggcta

SEQ ID NO: 445020 - DNA, 30 bp, Artificial Sequence
  Synthetic oligonucleotide
ttaggtctgaagcattttgtgattgggcta

SEQ ID NO: 445021 - DNA, 30 bp, Artificial Sequence
  Synthetic oligonucleotide
gcgcggtactgcagcattcggacatggcta

SEQ ID NO: 445022 - DNA, 30 bp, Artificial Sequence
  Synthetic oligonucleotide
aattgtggacggtgtccgccagcatggcta

SEQ ID NO: 445023 - DNA, 30 bp, Artificial Sequence
  Synthetic oligonucleotide
aatgatcctcacaaaagcggctcctggcta

SEQ ID NO: 445024 - DNA, 30 bp, Artificial Sequence
  Synthetic oligonucleotide
gagcggatgccccgggctggttcctggcta

SEQ ID NO: 445025 - DNA, 30 bp, Artificial Sequence
  Synthetic oligonucleotide
aggggtcgtctccccccccatcattggcta

SEQ ID NO: 445026 - DNA, 30 bp, Artificial Sequence
  Synthetic oligonucleotide
gtcgtacccgtacccgggctatattggcta

SEQ ID NO: 445027 - DNA, 30 bp, Artificial Sequence
  Synthetic oligonucleotide
ttttgtataggcgatgcactcacttggcta

SEQ ID NO: 445028 - DNA, 27 bp, Artificial Sequence
  Synthetic oligonucleotide
gaccgagcataatagtcaggttggcta

SEQ ID NO: 445029 - DNA, 30 bp, Artificial Sequence
  Synthetic oligonucleotide
aaatctatatatatgatattcggttggcta

SEQ ID NO: 445030 - DNA, 30 bp, Artificial Sequence
  Synthetic oligonucleotide
attttagagaaagccataatttgttggcta

SEQ ID NO: 445031 - DNA, 30 bp, Artificial Sequence
  Synthetic oligonucleotide
cccggtatcctaccgtactgggtttggcta

SEQ ID NO: 445032 - DNA, 30 bp, Artificial Sequence
  Synthetic oligonucleotide
cttcctctatggtttcaagttttttggcta

SEQ ID NO: 445033 - DNA, 30 bp, Artificial Sequence
  Synthetic oligonucleotide
ttcacgtatggatacagagcatcaatgcta

SEQ ID NO: 445034 - DNA, 30 bp, Artificial Sequence
  Synthetic oligonucleotide
gtgatagctatatgcaatgctcacatgcta

SEQ ID NO: 445035 - DNA, 30 bp, Artificial Sequence
  Synthetic oligonucleotide
tggcctcttgccactgccggttacatgcta

SEQ ID NO: 445036 - DNA, 30 bp, Artificial Sequence
  Synthetic oligonucleotide
cagaggaaattgtggccctaattcatgcta

SEQ ID NO: 445037 - DNA, 30 bp, Artificial Sequence
  Synthetic oligonucleotide
cccccgcccgcccgacgatctcggatgcta

SEQ ID NO: 445038 - DNA, 30 bp, Artificial Sequence
  Synthetic oligonucleotide
attttcctccacgagacttggattatgcta

SEQ ID NO: 445039 - DNA, 30 bp, Artificial Sequence
  Synthetic oligonucleotide
tactttgtattccccttccgaatcctgcta

SEQ ID NO: 445040 - DNA, 30 bp, Artificial Sequence
  Synthetic oligonucleotide
gtcggttagagcctacggggtacgctgcta

SEQ ID NO: 445041 - DNA, 30 bp, Artificial Sequence
  Synthetic oligonucleotide
atatgtggggtccagatagtagcgctgcta

SEQ ID NO: 445042 - DNA, 30 bp, Artificial Sequence
  Synthetic oligonucleotide
atgggatctccgggtgctttatctctgcta

SEQ ID NO: 445043 - DNA, 30 bp, Artificial Sequence
  Synthetic oligonucleotide
cgcgataacgatctttttttgattctgcta

SEQ ID NO: 445044 - DNA, 30 bp, Artificial Sequence
  Synthetic oligonucleotide
gacgggtactgacgccctactattctgcta

SEQ ID NO: 445045 - DNA, 30 bp, Artificial Sequence
  Synthetic oligonucleotide
ttcacgttagggcagcacgatccagtgcta

SEQ ID NO: 445046 - DNA, 30 bp, Artificial Sequence
  Synthetic oligonucleotide
gtctggattaatcttccttagggcgtgcta

SEQ ID NO: 445047 - DNA, 30 bp, Artificial Sequence
  Synthetic oligonucleotide
gacccaccaacttgctggtaagtggtgcta

SEQ ID NO: 445048 - DNA, 30 bp, Artificial Sequence
  Synthetic oligonucleotide
tacttagactcaataatacgttgtgtgcta

SEQ ID NO: 445049 - DNA, 30 bp, Artificial Sequence
  Synthetic oligonucleotide
ataaaaggagaaattattctcgaattgcta

SEQ ID NO: 445050 - DNA, 30 bp, Artificial Sequence
  Synthetic oligonucleotide
ctctccttggctagagacccgtcattgcta

SEQ ID NO: 445051 - DNA, 30 bp, Artificial Sequence
  Synthetic oligonucleotide
gcgccatttcggacttttagacacttgcta

SEQ ID NO: 445052 - DNA, 30 bp, Artificial Sequence
  Synthetic oligonucleotide
ataggttccgaaggcctgttgtatttgcta

SEQ ID NO: 445053 - DNA, 30 bp, Artificial Sequence
  Synthetic oligonucleotide
agtactttttcgggtgctttaccaaatcta

SEQ ID NO: 445054 - DNA, 30 bp, Artificial Sequence
  Synthetic oligonucleotide
tgtctccgaacgcaggcggagataaatcta

SEQ ID NO: 445055 - DNA, 30 bp, Artificial Sequence
  Synthetic oligonucleotide
gcagaaaccgtgatgctccggttcaatcta

SEQ ID NO: 445056 - DNA, 26 bp, Artificial Sequence
  Synthetic oligonucleotide
tgtggccgcgagaaataaagaatcta

SEQ ID NO: 445057 - DNA, 30 bp, Artificial Sequence
  Synthetic oligonucleotide
gcaggttttcttgaactgctatagaatcta

SEQ ID NO: 445058 - DNA, 30 bp, Artificial Sequence
  Synthetic oligonucleotide
aaaaagtcgatctttcagtcacggaatcta

SEQ ID NO: 445059 - DNA, 30 bp, Artificial Sequence
  Synthetic oligonucleotide
ttgcactattctgcgcactacctgaatcta

SEQ ID NO: 445060 - DNA, 30 bp, Artificial Sequence
  Synthetic oligonucleotide
ggattatttgtttctacaagctataatcta

SEQ ID NO: 445061 - DNA, 30 bp, Artificial Sequence
  Synthetic oligonucleotide
cgcacgcgggctttagcctattgtaatcta

SEQ ID NO: 445062 - DNA, 30 bp, Artificial Sequence
  Synthetic oligonucleotide
agacagcgggagcaagcatagattaatcta

SEQ ID NO: 445063 - DNA, 30 bp, Artificial Sequence
  Synthetic oligonucleotide
gcagtatctttaaatgattaccgacatcta

SEQ ID NO: 445064 - DNA, 30 bp, Artificial Sequence
  Synthetic oligonucleotide
ttgttggtctccgtgagcgtgggccatcta

SEQ ID NO: 445065 - DNA, 30 bp, Artificial Sequence
  Synthetic oligonucleotide
acgatcttaacttcattagggccgcatcta

SEQ ID NO: 445066 - DNA, 40 bp, Artificial Sequence
  Synthetic oligonucleotide
gatactatatttaatttatttgtgggaaatgctgcatcta

SEQ ID NO: 445067 - DNA, 30 bp, Artificial Sequence
  Synthetic oligonucleotide
aacttggagcagtctactgcgcaagatcta

SEQ ID NO: 445068 - DNA, 30 bp, Artificial Sequence
  Synthetic oligonucleotide
ggcgcttgatcctggtacggaagagatcta

SEQ ID NO: 445069 - DNA, 30 bp, Artificial Sequence
  Synthetic oligonucleotide
atcaccccgttaagcgaagatgacgatcta

SEQ ID NO: 445070 - DNA, 30 bp, Artificial Sequence
  Synthetic oligonucleotide
cccgaatgccatcgcggtgcgcgcgatcta

SEQ ID NO: 445071 - DNA, 30 bp, Artificial Sequence
  Synthetic oligonucleotide
aacggtggttgaggacccggattcgatcta

SEQ ID NO: 445072 - DNA, 30 bp, Artificial Sequence
  Synthetic oligonucleotide
attcattccggacaccagcaaaaggatcta

SEQ ID NO: 445073 - DNA, 30 bp, Artificial Sequence
  Synthetic oligonucleotide
tgcttagtctcatataaagtaaaggatcta

SEQ ID NO: 445074 - DNA, 30 bp, Artificial Sequence
  Synthetic oligonucleotide
atattagcagatgcgcgaatgcaggatcta

SEQ ID NO: 445075 - DNA, 30 bp, Artificial Sequence
  Synthetic oligonucleotide
taacgggatcggtctgattctgaggatcta

SEQ ID NO: 445076 - DNA, 30 bp, Artificial Sequence
  Synthetic oligonucleotide
cgtttgtagtgggccagcagcccggatcta

SEQ ID NO: 445077 - DNA, 30 bp, Artificial Sequence
  Synthetic oligonucleotide
ttaagtatagtgctcccccgatctgatcta

SEQ ID NO: 445078 - DNA, 30 bp, Artificial Sequence
  Synthetic oligonucleotide
tctgccgacgagctcccgcgcaaatatcta

SEQ ID NO: 445079 - DNA, 30 bp, Artificial Sequence
  Synthetic oligonucleotide
tgctacatcagataagtgcatctatatcta

SEQ ID NO: 445080 - DNA, 30 bp, Artificial Sequence
  Synthetic oligonucleotide
gccagatagcgactagaagtgtactatcta

SEQ ID NO: 445081 - DNA, 30 bp, Artificial Sequence
  Synthetic oligonucleotide
cactggggcgccaaaccttacaagtatcta

SEQ ID NO: 445082 - DNA, 30 bp, Artificial Sequence
  Synthetic oligonucleotide
tgaattacttagtagtcttatggttatcta

SEQ ID NO: 445083 - DNA, 30 bp, Artificial Sequence
  Synthetic oligonucleotide
gcataattgattatgagacattagactcta

SEQ ID NO: 445084 - DNA, 30 bp, Artificial Sequence
  Synthetic oligonucleotide
tcccacacggtcagatgctaagaacctcta

SEQ ID NO: 445085 - DNA, 30 bp, Artificial Sequence
  Synthetic oligonucleotide
gactggactttgtgcgacccttcacctcta

SEQ ID NO: 445086 - DNA, 30 bp, Artificial Sequence
  Synthetic oligonucleotide
cccatagacagggcacgacacgaccctcta

SEQ ID NO: 445087 - DNA, 30 bp, Artificial Sequence
  Synthetic oligonucleotide
aaataaattcccggaaggcagtaccctcta

SEQ ID NO: 445088 - DNA, 30 bp, Artificial Sequence
  Synthetic oligonucleotide
acgtttctctcagataatccttgccctcta

SEQ ID NO: 445089 - DNA, 30 bp, Artificial Sequence
  Synthetic oligonucleotide
tgtttgataactgtgcaagaccggcctcta

SEQ ID NO: 445090 - DNA, 30 bp, Artificial Sequence
  Synthetic oligonucleotide
aagtcccgatctggtgttgtgattcctcta

SEQ ID NO: 445091 - DNA, 30 bp, Artificial Sequence
  Synthetic oligonucleotide
tctatctagaaattgtggacaaaagctcta

SEQ ID NO: 445092 - DNA, 30 bp, Artificial Sequence
  Synthetic oligonucleotide
tcccgggaagctcggtcttggaacgctcta

SEQ ID NO: 445093 - DNA, 30 bp, Artificial Sequence
  Synthetic oligonucleotide
gagttagagctgcgacgtcctctcgctcta

SEQ ID NO: 445094 - DNA, 30 bp, Artificial Sequence
  Synthetic oligonucleotide
gttaatgacctgcgggcagtagaggctcta

SEQ ID NO: 445095 - DNA, 30 bp, Artificial Sequence
  Synthetic oligonucleotide
taagtgaccaacccccaggttgaggctcta

SEQ ID NO: 445096 - DNA, 30 bp, Artificial Sequence
  Synthetic oligonucleotide
aagttacatacttaggaacacagtgctcta

SEQ ID NO: 445097 - DNA, 30 bp, Artificial Sequence
  Synthetic oligonucleotide
gttagctataagcataagatgagtgctcta

SEQ ID NO: 445098 - DNA, 30 bp, Artificial Sequence
  Synthetic oligonucleotide
gaatctaacttgatggcataagaatctcta

SEQ ID NO: 445099 - DNA, 29 bp, Artificial Sequence
  Synthetic oligonucleotide
tgctaatgtatttatcggccccatctcta

SEQ ID NO: 445100 - DNA, 30 bp, Artificial Sequence
  Synthetic oligonucleotide
cgcgtttcatcatgaggcattgcatctcta

SEQ ID NO: 445101 - DNA, 30 bp, Artificial Sequence
  Synthetic oligonucleotide
gccgttttgatggcgatgcatatatctcta

SEQ ID NO: 445102 - DNA, 30 bp, Artificial Sequence
  Synthetic oligonucleotide
cccattcgggtggagatcgatatatctcta

SEQ ID NO: 445103 - DNA, 31 bp, Artificial Sequence
  Synthetic oligonucleotide
gttcgtgacggggatacgcgcatagtctcta

SEQ ID NO: 445104 - DNA, 30 bp, Artificial Sequence
  Synthetic oligonucleotide
taggcatgacaagtggatcgggtgtctcta

SEQ ID NO: 445105 - DNA, 30 bp, Artificial Sequence
  Synthetic oligonucleotide
agcgttcaaccccaatgtggcatttctcta

SEQ ID NO: 445106 - DNA, 30 bp, Artificial Sequence
  Synthetic oligonucleotide
ggagtactatatgaggccggcttttctcta

SEQ ID NO: 445107 - DNA, 30 bp, Artificial Sequence
  Synthetic oligonucleotide
ttgtgagtatgggcttcaattaaaagtcta

SEQ ID NO: 445108 - DNA, 30 bp, Artificial Sequence
  Synthetic oligonucleotide
gggaagtctgcgcgacattgtgcaagtcta

SEQ ID NO: 445109 - DNA, 30 bp, Artificial Sequence
  Synthetic oligonucleotide
tgctcctcgttatacgcgagaataagtcta

SEQ ID NO: 445110 - DNA, 30 bp, Artificial Sequence
  Synthetic oligonucleotide
ttttagaaagacatgatgccgaacagtcta

SEQ ID NO: 445111 - DNA, 30 bp, Artificial Sequence
  Synthetic oligonucleotide
ctattatcctggcctccagaggtcagtcta

SEQ ID NO: 445112 - DNA, 30 bp, Artificial Sequence
  Synthetic oligonucleotide
tcacaatagggtatgatagaggcgagtcta

SEQ ID NO: 445113 - DNA, 30 bp, Artificial Sequence
  Synthetic oligonucleotide
tgatctgttttgatcatatacatgagtcta

SEQ ID NO: 445114 - DNA, 30 bp, Artificial Sequence
  Synthetic oligonucleotide
attagtgaagcgttagaacttgctagtcta

SEQ ID NO: 445115 - DNA, 30 bp, Artificial Sequence
  Synthetic oligonucleotide
cgaccaaaatacacgtgctggtcacgtcta

SEQ ID NO: 445116 - DNA, 30 bp, Artificial Sequence
  Synthetic oligonucleotide
gcagagtatgaccggatgaccgcccgtcta

SEQ ID NO: 445117 - DNA, 30 bp, Artificial Sequence
  Synthetic oligonucleotide
aaagggcgcggacggggtaagtggcgtcta

SEQ ID NO: 445118 - DNA, 30 bp, Artificial Sequence
  Synthetic oligonucleotide
ggtagatagttatattgtctgtcaggtcta

SEQ ID NO: 445119 - DNA, 30 bp, Artificial Sequence
  Synthetic oligonucleotide
ggagagtagtatatctgtctgtggggtcta

SEQ ID NO: 445120 - DNA, 30 bp, Artificial Sequence
  Synthetic oligonucleotide
tactcgggcgcaagccaaatcaatggtcta

SEQ ID NO: 445121 - DNA, 30 bp, Artificial Sequence
  Synthetic oligonucleotide
tcaagaaatagatgtaaaagatatggtcta

SEQ ID NO: 445122 - DNA, 30 bp, Artificial Sequence
  Synthetic oligonucleotide
tccagtaaaatctgctggtcatttggtcta

SEQ ID NO: 445123 - DNA, 30 bp, Artificial Sequence
  Synthetic oligonucleotide
gaatttggcacgatgcttatggggtgtcta

SEQ ID NO: 445124 - DNA, 30 bp, Artificial Sequence
  Synthetic oligonucleotide
taataccttaccgggttcgtaatgtgtcta

SEQ ID NO: 445125 - DNA, 30 bp, Artificial Sequence
  Synthetic oligonucleotide
aagaaactagttgggctgatcatttgtcta

SEQ ID NO: 445126 - DNA, 30 bp, Artificial Sequence
  Synthetic oligonucleotide
catcgacaaggaaccggctaaaaaattcta

SEQ ID NO: 445127 - DNA, 30 bp, Artificial Sequence
  Synthetic oligonucleotide
ttaccccaactaatacacatttaaattcta

SEQ ID NO: 445128 - DNA, 30 bp, Artificial Sequence
  Synthetic oligonucleotide
tttatagttatgggaacgatagtaattcta

SEQ ID NO: 445129 - DNA, 30 bp, Artificial Sequence
  Synthetic oligonucleotide
agaattctggcgctatggacacgcattcta

SEQ ID NO: 445130 - DNA, 30 bp, Artificial Sequence
  Synthetic oligonucleotide
gactcggtccacgtggcagtagtcattcta

SEQ ID NO: 445131 - DNA, 30 bp, Artificial Sequence
  Synthetic oligonucleotide
cgggcacacttatagtcacgcttcattcta

SEQ ID NO: 445132 - DNA, 30 bp, Artificial Sequence
  Synthetic oligonucleotide
taatcctgtgtactatcgagcaggattcta

SEQ ID NO: 445133 - DNA, 30 bp, Artificial Sequence
  Synthetic oligonucleotide
cgagggcgcctatagagcataattattcta

SEQ ID NO: 445134 - DNA, 30 bp, Artificial Sequence
  Synthetic oligonucleotide
tgcgtaggtccgatgcaggatgtacttcta

SEQ ID NO: 445135 - DNA, 30 bp, Artificial Sequence
  Synthetic oligonucleotide
ccttaggagacgtcgatgtcggctcttcta

SEQ ID NO: 445136 - DNA, 30 bp, Artificial Sequence
  Synthetic oligonucleotide
tttatcgaccgaacgagaagacgtcttcta

SEQ ID NO: 445137 - DNA, 30 bp, Artificial Sequence
  Synthetic oligonucleotide
tgatacctcacccatagaatggttcttcta

SEQ ID NO: 445138 - DNA, 30 bp, Artificial Sequence
  Synthetic oligonucleotide
cagtgggattagatcccctgtacagttcta

SEQ ID NO: 445139 - DNA, 30 bp, Artificial Sequence
  Synthetic oligonucleotide
tatagtctcaggccgccgtacagagttcta

SEQ ID NO: 445140 - DNA, 30 bp, Artificial Sequence
  Synthetic oligonucleotide
tagcttccttgtcacgtgctttgagttcta

SEQ ID NO: 445141 - DNA, 30 bp, Artificial Sequence
  Synthetic oligonucleotide
aggcatgatttccacttgtactccgttcta

SEQ ID NO: 445142 - DNA, 30 bp, Artificial Sequence
  Synthetic oligonucleotide
ttttactttaacctggtgccaagcgttcta

SEQ ID NO: 445143 - DNA, 30 bp, Artificial Sequence
  Synthetic oligonucleotide
gacccgcggttccaatctgggtaggttcta

SEQ ID NO: 445144 - DNA, 30 bp, Artificial Sequence
  Synthetic oligonucleotide
ctaggacctaccctatggttgtcggttcta

SEQ ID NO: 445145 - DNA, 30 bp, Artificial Sequence
  Synthetic oligonucleotide
gattgcgccgctttcagagaaggtgttcta

SEQ ID NO: 445146 - DNA, 30 bp, Artificial Sequence
  Synthetic oligonucleotide
cagtcgcttctcaaacacttataatttcta

SEQ ID NO: 445147 - DNA, 30 bp, Artificial Sequence
  Synthetic oligonucleotide
cccgattgtgaatgtttagagccatttcta

SEQ ID NO: 445148 - DNA, 30 bp, Artificial Sequence
  Synthetic oligonucleotide
tttccaatgcgaggcgtccgtagatttcta

SEQ ID NO: 445149 - DNA, 30 bp, Artificial Sequence
  Synthetic oligonucleotide
cctcttaactacacgcgaaccctatttcta

SEQ ID NO: 445150 - DNA, 30 bp, Artificial Sequence
  Synthetic oligonucleotide
gacattcgtgttggatagatattatttcta

SEQ ID NO: 445151 - DNA, 30 bp, Artificial Sequence
  Synthetic oligonucleotide
gattgagggcatagggcttatcggtttcta

SEQ ID NO: 445152 - DNA, 30 bp, Artificial Sequence
  Synthetic oligonucleotide
acatggatagttcccgcgatcatttttcta

SEQ ID NO: 445153 - DNA, 30 bp, Artificial Sequence
  Synthetic oligonucleotide
cgtttcaccggctcccatgattaaaaagta

SEQ ID NO: 445154 - DNA, 30 bp, Artificial Sequence
  Synthetic oligonucleotide
gcatttgtccctttggcacgcggaaaagta

SEQ ID NO: 445155 - DNA, 30 bp, Artificial Sequence
  Synthetic oligonucleotide
gccctgggtgcccaatccaatctaaaagta

SEQ ID NO: 445156 - DNA, 30 bp, Artificial Sequence
  Synthetic oligonucleotide
aatcacttaagtcagctgtcgcacaaagta

SEQ ID NO: 445157 - DNA, 30 bp, Artificial Sequence
  Synthetic oligonucleotide
agtatgggcttctggtttcggcgcaaagta

SEQ ID NO: 445158 - DNA, 30 bp, Artificial Sequence
  Synthetic oligonucleotide
tcttagcatcttcaactgctactcaaagta

SEQ ID NO: 445159 - DNA, 30 bp, Artificial Sequence
  Synthetic oligonucleotide
gatttcgcgacgttggcgacccagaaagta

SEQ ID NO: 445160 - DNA, 30 bp, Artificial Sequence
  Synthetic oligonucleotide
gctaatttaaacggcgataatccgaaagta

SEQ ID NO: 445161 - DNA, 30 bp, Artificial Sequence
  Synthetic oligonucleotide
acaacgccttcggcgtctaaacggaaagta

SEQ ID NO: 445162 - DNA, 30 bp, Artificial Sequence
  Synthetic oligonucleotide
tcagatacccagaggtagattagtaaagta

SEQ ID NO: 445163 - DNA, 30 bp, Artificial Sequence
  Synthetic oligonucleotide
tcatcagcgcaggtgctattaccccaagta

SEQ ID NO: 445164 - DNA, 30 bp, Artificial Sequence
  Synthetic oligonucleotide
aaaccaaacacaggggctacaaggcaagta

SEQ ID NO: 445165 - DNA, 30 bp, Artificial Sequence
  Synthetic oligonucleotide
ccgccttatcttattcaggattggcaagta

SEQ ID NO: 445166 - DNA, 30 bp, Artificial Sequence
  Synthetic oligonucleotide
agggtccgcacatgaacgcctagcgaagta

SEQ ID NO: 445167 - DNA, 30 bp, Artificial Sequence
  Synthetic oligonucleotide
ttcttgcattcacggccctccggcgaagta

SEQ ID NO: 445168 - DNA, 30 bp, Artificial Sequence
  Synthetic oligonucleotide
tcccatacagcgaggccaacgcaggaagta

SEQ ID NO: 445169 - DNA, 30 bp, Artificial Sequence
  Synthetic oligonucleotide
gtaatactagccgaaagtaattgataagta

SEQ ID NO: 445170 - DNA, 30 bp, Artificial Sequence
  Synthetic oligonucleotide
attacgtttggtaagtacgtctgctaagta

SEQ ID NO: 445171 - DNA, 30 bp, Artificial Sequence
  Synthetic oligonucleotide
acaaatcatatattattttcctggtaagta

SEQ ID NO: 445172 - DNA, 30 bp, Artificial Sequence
  Synthetic oligonucleotide
aattaggatctgaagtgttgctggtaagta

SEQ ID NO: 445173 - DNA, 30 bp, Artificial Sequence
  Synthetic oligonucleotide
tttatgaatgtcccggctgctttgtaagta

SEQ ID NO: 445174 - DNA, 30 bp, Artificial Sequence
  Synthetic oligonucleotide
atcgttctgcgcgtcgcagtgccttaagta

SEQ ID NO: 445175 - DNA, 30 bp, Artificial Sequence
  Synthetic oligonucleotide
gctccgccacaagcggtaaattcttaagta

SEQ ID NO: 445176 - DNA, 30 bp, Artificial Sequence
  Synthetic oligonucleotide
tgcggtttttttcggataaaataaacagta

SEQ ID NO: 445177 - DNA, 30 bp, Artificial Sequence
  Synthetic oligonucleotide
agagacccttcggaagacgttgtaacagta

SEQ ID NO: 445178 - DNA, 30 bp, Artificial Sequence
  Synthetic oligonucleotide
gacgcagtgttaagtactgtagtcacagta

SEQ ID NO: 445179 - DNA, 30 bp, Artificial Sequence
  Synthetic oligonucleotide
tcttcatcaagttatgatttatagacagta

SEQ ID NO: 445180 - DNA, 30 bp, Artificial Sequence
  Synthetic oligonucleotide
gccagcgtatgatacacgtctgcgacagta

SEQ ID NO: 445181 - DNA, 30 bp, Artificial Sequence
  Synthetic oligonucleotide
tgtgacacaatagggcgtgtaaagccagta

SEQ ID NO: 445182 - DNA, 30 bp, Artificial Sequence
  Synthetic oligonucleotide
tagggacacggggaatgtcttaggccagta

SEQ ID NO: 445183 - DNA, 30 bp, Artificial Sequence
  Synthetic oligonucleotide
aaatatccgaccgtatctaggatgccagta

SEQ ID NO: 445184 - DNA, 30 bp, Artificial Sequence
  Synthetic oligonucleotide
cttattgtgactatggcttgccttccagta

SEQ ID NO: 445185 - DNA, 30 bp, Artificial Sequence
  Synthetic oligonucleotide
aataactctattgagaggcgtcttccagta

SEQ ID NO: 445186 - DNA, 30 bp, Artificial Sequence
  Synthetic oligonucleotide
gtagtgtctagatacgttcgttttccagta

SEQ ID NO: 445187 - DNA, 30 bp, Artificial Sequence
  Synthetic oligonucleotide
gcgtcggataatggtcagttgaaagcagta

SEQ ID NO: 445188 - DNA, 30 bp, Artificial Sequence
  Synthetic oligonucleotide
caatgtggatcatacctcagtaaagcagta

SEQ ID NO: 445189 - DNA, 30 bp, Artificial Sequence
  Synthetic oligonucleotide
gtgattcgaagtcctttatacctagcagta

SEQ ID NO: 445190 - DNA, 30 bp, Artificial Sequence
  Synthetic oligonucleotide
gagtatccacacatgcatgcgcccgcagta

SEQ ID NO: 445191 - DNA, 30 bp, Artificial Sequence
  Synthetic oligonucleotide
ttgggatcggccatagattcgcgcgcagta

SEQ ID NO: 445192 - DNA, 30 bp, Artificial Sequence
  Synthetic oligonucleotide
tatctgacggaatgtgactgattcgcagta

SEQ ID NO: 445193 - DNA, 30 bp, Artificial Sequence
  Synthetic oligonucleotide
cggctggctttgctgccctatcgggcagta

SEQ ID NO: 445194 - DNA, 30 bp, Artificial Sequence
  Synthetic oligonucleotide
atgagtttttccttggttcccatggcagta

SEQ ID NO: 445195 - DNA, 30 bp, Artificial Sequence
  Synthetic oligonucleotide
tcgatcggggattgccaccgggtggcagta

SEQ ID NO: 445196 - DNA, 30 bp, Artificial Sequence
  Synthetic oligonucleotide
atctgatacaatagttgtagtcatgcagta

SEQ ID NO: 445197 - DNA, 30 bp, Artificial Sequence
  Synthetic oligonucleotide
ggttttttagcgacctaatacgttgcagta

SEQ ID NO: 445198 - DNA, 30 bp, Artificial Sequence
  Synthetic oligonucleotide
ggcataccagggctgatatagcaatcagta

SEQ ID NO: 445199 - DNA, 30 bp, Artificial Sequence
  Synthetic oligonucleotide
gcaattccaatgtacgatgggtactcagta

SEQ ID NO: 445200 - DNA, 30 bp, Artificial Sequence
  Synthetic oligonucleotide
agaatgtgcagcacggggacagcgtcagta

SEQ ID NO: 445201 - DNA, 30 bp, Artificial Sequence
  Synthetic oligonucleotide
gaacatccgtttgctgaccacgtgtcagta

SEQ ID NO: 445202 - DNA, 30 bp, Artificial Sequence
  Synthetic oligonucleotide
taatcaatctgtccgcgttttaattcagta

SEQ ID NO: 445203 - DNA, 30 bp, Artificial Sequence
  Synthetic oligonucleotide
tattcaggttacaggcctgtatgttcagta

SEQ ID NO: 445204 - DNA, 30 bp, Artificial Sequence
  Synthetic oligonucleotide
tagctcttacccagatcacagaaaagagta

SEQ ID NO: 445205 - DNA, 30 bp, Artificial Sequence
  Synthetic oligonucleotide
gtgcacgcggtaacccgcattccgagagta

SEQ ID NO: 445206 - DNA, 30 bp, Artificial Sequence
  Synthetic oligonucleotide
ctgtcacagccacgcttgataaggagagta

SEQ ID NO: 445207 - DNA, 30 bp, Artificial Sequence
  Synthetic oligonucleotide
tgctatctagaatcaattggcatgagagta

SEQ ID NO: 445208 - DNA, 30 bp, Artificial Sequence
  Synthetic oligonucleotide
taagctgcaactgcatatgttgatagagta

SEQ ID NO: 445209 - DNA, 30 bp, Artificial Sequence
  Synthetic oligonucleotide
taaaagcgtataaacatgggactacgagta

SEQ ID NO: 445210 - DNA, 30 bp, Artificial Sequence
  Synthetic oligonucleotide
gtcgtccttctctgtcgtaatcgccgagta

SEQ ID NO: 445211 - DNA, 30 bp, Artificial Sequence
  Synthetic oligonucleotide
tatgttatcgggtaacaactcggccgagta

SEQ ID NO: 445212 - DNA, 30 bp, Artificial Sequence
  Synthetic oligonucleotide
gtgctggacacgtgaacttgcgtccgagta

SEQ ID NO: 445213 - DNA, 30 bp, Artificial Sequence
  Synthetic oligonucleotide
atcgcagtttataccgtatgaaagcgagta

SEQ ID NO: 445214 - DNA, 30 bp, Artificial Sequence
  Synthetic oligonucleotide
tcggattcgcctgcatcatcggcgcgagta

SEQ ID NO: 445215 - DNA, 30 bp, Artificial Sequence
  Synthetic oligonucleotide
tctcttggagcgataaagatggccggagta

SEQ ID NO: 445216 - DNA, 30 bp, Artificial Sequence
  Synthetic oligonucleotide
ttgagaagcctccagcctctgtccggagta

SEQ ID NO: 445217 - DNA, 30 bp, Artificial Sequence
  Synthetic oligonucleotide
tttagcagtcgcgtaacctcctgcggagta

SEQ ID NO: 445218 - DNA, 30 bp, Artificial Sequence
  Synthetic oligonucleotide
tgtagcactcgagtcatcagtcgtggagta

SEQ ID NO: 445219 - DNA, 30 bp, Artificial Sequence
  Synthetic oligonucleotide
ggtgagtcgcattcgcaagactgtggagta

SEQ ID NO: 445220 - DNA, 30 bp, Artificial Sequence
  Synthetic oligonucleotide
tcccaagactaacgcaacagaccatgagta

SEQ ID NO: 445221 - DNA, 30 bp, Artificial Sequence
  Synthetic oligonucleotide
gagtcgattttctcaatctatgcatgagta

SEQ ID NO: 445222 - DNA, 28 bp, Artificial Sequence
  Synthetic oligonucleotide
gccgagatgccaagagttatgctgagta

SEQ ID NO: 445223 - DNA, 30 bp, Artificial Sequence
  Synthetic oligonucleotide
tggtttcggaatcttctccgagtctgagta

SEQ ID NO: 445224 - DNA, 30 bp, Artificial Sequence
  Synthetic oligonucleotide
cggcctgaactgtacgggcgagagtgagta

SEQ ID NO: 445225 - DNA, 30 bp, Artificial Sequence
  Synthetic oligonucleotide
ctccgaagtttcagacgctcatagtgagta

SEQ ID NO: 445226 - DNA, 30 bp, Artificial Sequence
  Synthetic oligonucleotide
tcagtttagacaattttaaattattgagta

SEQ ID NO: 445227 - DNA, 30 bp, Artificial Sequence
  Synthetic oligonucleotide
atacatcgacaccgattgcacagaatagta

SEQ ID NO: 445228 - DNA, 30 bp, Artificial Sequence
  Synthetic oligonucleotide
atattggtgttggtaagtagattaatagta

SEQ ID NO: 445229 - DNA, 30 bp, Artificial Sequence
  Synthetic oligonucleotide
gtttcctgctaaattcaaggcctcatagta

SEQ ID NO: 445230 - DNA, 30 bp, Artificial Sequence
  Synthetic oligonucleotide
ccgtaaaagcggcgcaaaactcagatagta

SEQ ID NO: 445231 - DNA, 29 bp, Artificial Sequence
  Synthetic oligonucleotide
gcactactgttaaacaatgaccgatagta

SEQ ID NO: 445232 - DNA, 30 bp, Artificial Sequence
  Synthetic oligonucleotide
gcaaagtctacaagaaacgcttgtatagta

SEQ ID NO: 445233 - DNA, 30 bp, Artificial Sequence
  Synthetic oligonucleotide
ttcattatcgttaagaatcgaattatagta

SEQ ID NO: 445234 - DNA, 30 bp, Artificial Sequence
  Synthetic oligonucleotide
aactcaaatattcgacgggttattatagta

SEQ ID NO: 445235 - DNA, 30 bp, Artificial Sequence
  Synthetic oligonucleotide
gatatttgaacaatcggtggacttatagta

SEQ ID NO: 445236 - DNA, 30 bp, Artificial Sequence
  Synthetic oligonucleotide
ctgagccacccccgcgcgagaccactagta

SEQ ID NO: 445237 - DNA, 30 bp, Artificial Sequence
  Synthetic oligonucleotide
gtttagacgtggcgggcgtttgtcctagta

SEQ ID NO: 445238 - DNA, 30 bp, Artificial Sequence
  Synthetic oligonucleotide
acacgtcaggcgttagcagacttgctagta

SEQ ID NO: 445239 - DNA, 30 bp, Artificial Sequence
  Synthetic oligonucleotide
atgacgatcaggtactcgcgggccgtagta

SEQ ID NO: 445240 - DNA, 30 bp, Artificial Sequence
  Synthetic oligonucleotide
atctatcgcgagcgatcgtatcaggtagta

SEQ ID NO: 445241 - DNA, 30 bp, Artificial Sequence
  Synthetic oligonucleotide
cttaagggcaactgtatatggacggtagta

SEQ ID NO: 445242 - DNA, 30 bp, Artificial Sequence
  Synthetic oligonucleotide
tttgatgtgtaccttaaccaaattgtagta

SEQ ID NO: 445243 - DNA, 30 bp, Artificial Sequence
  Synthetic oligonucleotide
tcgaagcagcagctacctgcacttgtagta

SEQ ID NO: 445244 - DNA, 30 bp, Artificial Sequence
  Synthetic oligonucleotide
gaagtgataaccgtcgaagaccagttagta

SEQ ID NO: 445245 - DNA, 30 bp, Artificial Sequence
  Synthetic oligonucleotide
ggaaatttgcaaagaacgtagccgttagta

SEQ ID NO: 445246 - DNA, 30 bp, Artificial Sequence
  Synthetic oligonucleotide
gtgggtacaaccccgtgcatctcgttagta

SEQ ID NO: 445247 - DNA, 30 bp, Artificial Sequence
  Synthetic oligonucleotide
agattcaaagtcatcttttggcgtttagta

SEQ ID NO: 445248 - DNA, 30 bp, Artificial Sequence
  Synthetic oligonucleotide
ttaacagcagcgaaatcccggtgtttagta

SEQ ID NO: 445249 - DNA, 30 bp, Artificial Sequence
  Synthetic oligonucleotide
agaacgagcgtgaccgacgcagttttagta

SEQ ID NO: 445250 - DNA, 30 bp, Artificial Sequence
  Synthetic oligonucleotide
ttgctaaaatacacgagtttttaaaacgta

SEQ ID NO: 445251 - DNA, 30 bp, Artificial Sequence
  Synthetic oligonucleotide
ttaaacctgcggctggagggcgagaacgta

SEQ ID NO: 445252 - DNA, 30 bp, Artificial Sequence
  Synthetic oligonucleotide
tatacgtcgccaagtctcggaacgaacgta

SEQ ID NO: 445253 - DNA, 30 bp, Artificial Sequence
  Synthetic oligonucleotide
agtgcgtgcatcgttttcacaccgaacgta

SEQ ID NO: 445254 - DNA, 30 bp, Artificial Sequence
  Synthetic oligonucleotide
gagaatatacggaggcgcagcttgaacgta

SEQ ID NO: 445255 - DNA, 30 bp, Artificial Sequence
  Synthetic oligonucleotide
aaagatgtgttatagttctgtaataacgta

SEQ ID NO: 445256 - DNA, 30 bp, Artificial Sequence
  Synthetic oligonucleotide
gcccaacgatctctaggcctaactaacgta

SEQ ID NO: 445257 - DNA, 30 bp, Artificial Sequence
  Synthetic oligonucleotide
tgattgagtccatgtacgtcgcttaacgta

SEQ ID NO: 445258 - DNA, 30 bp, Artificial Sequence
  Synthetic oligonucleotide
aagtaggtcgtcgctgcagccgaacacgta

SEQ ID NO: 445259 - DNA, 30 bp, Artificial Sequence
  Synthetic oligonucleotide
acgctgtttcgtagcgaaacttcccacgta

SEQ ID NO: 445260 - DNA, 30 bp, Artificial Sequence
  Synthetic oligonucleotide
tccagatttaagattggggaaagccacgta

SEQ ID NO: 445261 - DNA, 30 bp, Artificial Sequence
  Synthetic oligonucleotide
gagatgcgagctgaaagtgttgcgcacgta

SEQ ID NO: 445262 - DNA, 30 bp, Artificial Sequence
  Synthetic oligonucleotide
gaataatgcggtagcatttactcgcacgta

SEQ ID NO: 445263 - DNA, 30 bp, Artificial Sequence
  Synthetic oligonucleotide
cgatcacgtttcagtctgtgctggcacgta

SEQ ID NO: 445264 - DNA, 30 bp, Artificial Sequence
  Synthetic oligonucleotide
gaaacatgaggacctcttacccctcacgta

SEQ ID NO: 445265 - DNA, 30 bp, Artificial Sequence
  Synthetic oligonucleotide
tgtctacctctttcagattcgtaagacgta

SEQ ID NO: 445266 - DNA, 30 bp, Artificial Sequence
  Synthetic oligonucleotide
aggttcatgtccaatattttaagcgacgta

SEQ ID NO: 445267 - DNA, 30 bp, Artificial Sequence
  Synthetic oligonucleotide
atataaggcccccatttacttcgcgacgta

SEQ ID NO: 445268 - DNA, 30 bp, Artificial Sequence
  Synthetic oligonucleotide
ggtagtggtgctatcggtacactggacgta

SEQ ID NO: 445269 - DNA, 30 bp, Artificial Sequence
  Synthetic oligonucleotide
gttgtaagtactattcagtatgatgacgta

SEQ ID NO: 445270 - DNA, 30 bp, Artificial Sequence
  Synthetic oligonucleotide
actgtagggtcgtatggtgaatcatacgta

SEQ ID NO: 445271 - DNA, 30 bp, Artificial Sequence
  Synthetic oligonucleotide
tgctagcatagaggcttgagtgcctacgta

SEQ ID NO: 445272 - DNA, 30 bp, Artificial Sequence
  Synthetic oligonucleotide
catcgagcggtcgcggtcccatcaaccgta

SEQ ID NO: 445273 - DNA, 30 bp, Artificial Sequence
  Synthetic oligonucleotide
atccacggttcgctaggggtttgaaccgta

SEQ ID NO: 445274 - DNA, 30 bp, Artificial Sequence
  Synthetic oligonucleotide
gagaatttcaacgtcgtttctgtaaccgta

SEQ ID NO: 445275 - DNA, 30 bp, Artificial Sequence
  Synthetic oligonucleotide
cggtacttctactgattaaaaagtaccgta

SEQ ID NO: 445276 - DNA, 30 bp, Artificial Sequence
  Synthetic oligonucleotide
aacagtagtacttccacacctaggcccgta

SEQ ID NO: 445277 - DNA, 30 bp, Artificial Sequence
  Synthetic oligonucleotide
gaagaaaccgccgaggcttcaaaagccgta

SEQ ID NO: 445278 - DNA, 30 bp, Artificial Sequence
  Synthetic oligonucleotide
ttccccccaggtatatctgcaaccgccgta

SEQ ID NO: 445279 - DNA, 31 bp, Artificial Sequence
  Synthetic oligonucleotide
aggctcattgaaaattagcatggtcgccgta

SEQ ID NO: 445280 - DNA, 30 bp, Artificial Sequence
  Synthetic oligonucleotide
ctccagtaacgggcttaccgtacggccgta

SEQ ID NO: 445281 - DNA, 30 bp, Artificial Sequence
  Synthetic oligonucleotide
ttatagggcaatagagcttgggtggccgta

SEQ ID NO: 445282 - DNA, 30 bp, Artificial Sequence
  Synthetic oligonucleotide
cttgggggcgcaccagggcccacatccgta

SEQ ID NO: 445283 - DNA, 30 bp, Artificial Sequence
  Synthetic oligonucleotide
ccccgacaggaatacctactggcatccgta

SEQ ID NO: 445284 - DNA, 30 bp, Artificial Sequence
  Synthetic oligonucleotide
tcgtccgacgcgtcccgcgatgcttccgta

SEQ ID NO: 445285 - DNA, 30 bp, Artificial Sequence
  Synthetic oligonucleotide
caatgagccgaatagtataccttttccgta

SEQ ID NO: 445286 - DNA, 30 bp, Artificial Sequence
  Synthetic oligonucleotide
tagcaatacgtcgggctctcctaaagcgta

SEQ ID NO: 445287 - DNA, 30 bp, Artificial Sequence
  Synthetic oligonucleotide
ctgcgcaaggagcactaatgttccagcgta

SEQ ID NO: 445288 - DNA, 30 bp, Artificial Sequence
  Synthetic oligonucleotide
gtgcatcggtataccgttttatgcagcgta

SEQ ID NO: 445289 - DNA, 30 bp, Artificial Sequence
  Synthetic oligonucleotide
gtgtgtctcggaggggaaggcttgagcgta

SEQ ID NO: 445290 - DNA, 30 bp, Artificial Sequence
  Synthetic oligonucleotide
aaagtagaggtaaggttgcctactagcgta

SEQ ID NO: 445291 - DNA, 30 bp, Artificial Sequence
  Synthetic oligonucleotide
tccagtcttcagcttcgcatatcacgcgta

SEQ ID NO: 445292 - DNA, 30 bp, Artificial Sequence
  Synthetic oligonucleotide
atttacggcagctggatccacatacgcgta

SEQ ID NO: 445293 - DNA, 30 bp, Artificial Sequence
  Synthetic oligonucleotide
gatacgcctttgcagggattattccgcgta

SEQ ID NO: 445294 - DNA, 30 bp, Artificial Sequence
  Synthetic oligonucleotide
gtcattaaatctccgtggggtttccgcgta

SEQ ID NO: 445295 - DNA, 30 bp, Artificial Sequence
  Synthetic oligonucleotide
tttcacgtagcacacgtttttcggcgcgta

SEQ ID NO: 445296 - DNA, 30 bp, Artificial Sequence
  Synthetic oligonucleotide
actacgcggctccgcactgctaatcgcgta

SEQ ID NO: 445297 - DNA, 30 bp, Artificial Sequence
  Synthetic oligonucleotide
gacactaattggagccactagactcgcgta

SEQ ID NO: 445298 - DNA, 30 bp, Artificial Sequence
  Synthetic oligonucleotide
tctactcgccttgactagcacctaggcgta

SEQ ID NO: 445299 - DNA, 29 bp, Artificial Sequence
  Synthetic oligonucleotide
ccgctattggccggaaatgatgcggcgta

SEQ ID NO: 445300 - DNA, 30 bp, Artificial Sequence
  Synthetic oligonucleotide
gtataggagtggcaaaactcttgcggcgta

SEQ ID NO: 445301 - DNA, 30 bp, Artificial Sequence
  Synthetic oligonucleotide
ccaacccatcccgccgctcacgggggcgta

SEQ ID NO: 445302 - DNA, 29 bp, Artificial Sequence
  Synthetic oligonucleotide
ttgaatgtgccggaaaagcgaatggcgta

SEQ ID NO: 445303 - DNA, 30 bp, Artificial Sequence
  Synthetic oligonucleotide
actactttttttattcacattagtggcgta

SEQ ID NO: 445304 - DNA, 30 bp, Artificial Sequence
  Synthetic oligonucleotide
tgggattcgcacgaaaacgcaaaatgcgta

SEQ ID NO: 445305 - DNA, 30 bp, Artificial Sequence
  Synthetic oligonucleotide
gaccaatgccggtacactacgctgtgcgta

SEQ ID NO: 445306 - DNA, 30 bp, Artificial Sequence
  Synthetic oligonucleotide
gtttacttcacctaaggtttgcgttgcgta

SEQ ID NO: 445307 - DNA, 30 bp, Artificial Sequence
  Synthetic oligonucleotide
tgcataggttttgttggctttttaatcgta

SEQ ID NO: 445308 - DNA, 30 bp, Artificial Sequence
  Synthetic oligonucleotide
cagccatccgataggttacagcgcatcgta

SEQ ID NO: 445309 - DNA, 30 bp, Artificial Sequence
  Synthetic oligonucleotide
aaaatagcttgccgacatgcgcgcatcgta

SEQ ID NO: 445310 - DNA, 30 bp, Artificial Sequence
  Synthetic oligonucleotide
attcgtcaggccaagccttaggatatcgta

SEQ ID NO: 445311 - DNA, 30 bp, Artificial Sequence
  Synthetic oligonucleotide
agctcgacgtgaatagttttaggtatcgta

SEQ ID NO: 445312 - DNA, 30 bp, Artificial Sequence
  Synthetic oligonucleotide
cgactctggccagcaagtctccttatcgta

SEQ ID NO: 445313 - DNA, 30 bp, Artificial Sequence
  Synthetic oligonucleotide
agactgcgagtgtcgatacgaacactcgta

SEQ ID NO: 445314 - DNA, 30 bp, Artificial Sequence
  Synthetic oligonucleotide
tggcttcgttcgtagtttgaggcactcgta

SEQ ID NO: 445315 - DNA, 30 bp, Artificial Sequence
  Synthetic oligonucleotide
cagtgagcggcagcgctactagggctcgta

SEQ ID NO: 445316 - DNA, 30 bp, Artificial Sequence
  Synthetic oligonucleotide
ctagatgtttcgttcgcgtaggatctcgta

SEQ ID NO: 445317 - DNA, 30 bp, Artificial Sequence
  Synthetic oligonucleotide
attggtaaaacataagaacaaaccgtcgta

SEQ ID NO: 445318 - DNA, 30 bp, Artificial Sequence
  Synthetic oligonucleotide
caacagacctgcgtacggctctcggtcgta

SEQ ID NO: 445319 - DNA, 30 bp, Artificial Sequence
  Synthetic oligonucleotide
aaattgggccaaataaattggcctgtcgta

SEQ ID NO: 445320 - DNA, 30 bp, Artificial Sequence
  Synthetic oligonucleotide
tttgccacctagtagtccattgcattcgta

SEQ ID NO: 445321 - DNA, 30 bp, Artificial Sequence
  Synthetic oligonucleotide
actccgccgggttttacttcaatattcgta

SEQ ID NO: 445322 - DNA, 30 bp, Artificial Sequence
  Synthetic oligonucleotide
gagaccggatactgtttgtatacgttcgta

SEQ ID NO: 445323 - DNA, 30 bp, Artificial Sequence
  Synthetic oligonucleotide
aaactggaggattttaggtgtgttttcgta

SEQ ID NO: 445324 - DNA, 30 bp, Artificial Sequence
  Synthetic oligonucleotide
ggtgaattaggtggcggatagataaaggta

SEQ ID NO: 445325 - DNA, 30 bp, Artificial Sequence
  Synthetic oligonucleotide
agccggtggaacggaccattggtaaaggta

SEQ ID NO: 445326 - DNA, 30 bp, Artificial Sequence
  Synthetic oligonucleotide
tcgcgccatacggacctaccgcagaaggta

SEQ ID NO: 445327 - DNA, 30 bp, Artificial Sequence
  Synthetic oligonucleotide
ggcctgtatagtggactacccatgaaggta

SEQ ID NO: 445328 - DNA, 30 bp, Artificial Sequence
  Synthetic oligonucleotide
attcaatgactttttgtcgctactaaggta

SEQ ID NO: 445329 - DNA, 30 bp, Artificial Sequence
  Synthetic oligonucleotide
tcaggcgtaccccatgcttttggtaaggta

SEQ ID NO: 445330 - DNA, 30 bp, Artificial Sequence
  Synthetic oligonucleotide
ataaagttcacgcagttgtagttacaggta

SEQ ID NO: 445331 - DNA, 30 bp, Artificial Sequence
  Synthetic oligonucleotide
accccttatccccagggctcaacccaggta

SEQ ID NO: 445332 - DNA, 30 bp, Artificial Sequence
  Synthetic oligonucleotide
ctccaattaccgtccaaccagtagcaggta

SEQ ID NO: 445333 - DNA, 30 bp, Artificial Sequence
  Synthetic oligonucleotide
tgacaacctaccgctcgcgctacgcaggta

SEQ ID NO: 445334 - DNA, 30 bp, Artificial Sequence
  Synthetic oligonucleotide
cgcatataccattaacgtaagaggcaggta

SEQ ID NO: 445335 - DNA, 30 bp, Artificial Sequence
  Synthetic oligonucleotide
cggaatatcatttcccggttaatgcaggta

SEQ ID NO: 445336 - DNA, 30 bp, Artificial Sequence
  Synthetic oligonucleotide
gtcactctgcagttgtcacctgtgcaggta

SEQ ID NO: 445337 - DNA, 30 bp, Artificial Sequence
  Synthetic oligonucleotide
gcccgtatacttcgagcgtagcatcaggta

SEQ ID NO: 445338 - DNA, 30 bp, Artificial Sequence
  Synthetic oligonucleotide
tgatcgtttggaacgatatcatgtcaggta

SEQ ID NO: 445339 - DNA, 30 bp, Artificial Sequence
  Synthetic oligonucleotide
tcgattacattgcatcgtatctttcaggta

SEQ ID NO: 445340 - DNA, 30 bp, Artificial Sequence
  Synthetic oligonucleotide
gtataatgcttgtcatgtctttttcaggta

SEQ ID NO: 445341 - DNA, 30 bp, Artificial Sequence
  Synthetic oligonucleotide
tgcgatatatcttagtcgtggttagaggta

SEQ ID NO: 445342 - DNA, 30 bp, Artificial Sequence
  Synthetic oligonucleotide
gaaatcaatgcgatgtggtggtaggaggta

SEQ ID NO: 445343 - DNA, 30 bp, Artificial Sequence
  Synthetic oligonucleotide
gggcggctggatattactctccatgaggta

SEQ ID NO: 445344 - DNA, 30 bp, Artificial Sequence
  Synthetic oligonucleotide
ggtttcggtttgtttagattccatgaggta

SEQ ID NO: 445345 - DNA, 30 bp, Artificial Sequence
  Synthetic oligonucleotide
aatggtttgccctgtctcgaggctgaggta

SEQ ID NO: 445346 - DNA, 30 bp, Artificial Sequence
  Synthetic oligonucleotide
tgtatagtatttatatcgagggttgaggta

SEQ ID NO: 445347 - DNA, 30 bp, Artificial Sequence
  Synthetic oligonucleotide
ggagctgagcctggtttacatgaataggta

SEQ ID NO: 445348 - DNA, 30 bp, Artificial Sequence
  Synthetic oligonucleotide
cggcctgacgttgagacatagtgataggta

SEQ ID NO: 445349 - DNA, 30 bp, Artificial Sequence
  Synthetic oligonucleotide
gtctttcagatccgatgcgtgctataggta

SEQ ID NO: 445350 - DNA, 30 bp, Artificial Sequence
  Synthetic oligonucleotide
ccccggtttctgaagaaaggagtataggta

SEQ ID NO: 445351 - DNA, 30 bp, Artificial Sequence
  Synthetic oligonucleotide
tatctaggtccgtacctatccaactaggta

SEQ ID NO: 445352 - DNA, 30 bp, Artificial Sequence
  Synthetic oligonucleotide
ttaatagtcgtatgcctagttctctaggta

SEQ ID NO: 445353 - DNA, 30 bp, Artificial Sequence
  Synthetic oligonucleotide
gggatttttgtggcaaggtaccggtaggta

SEQ ID NO: 445354 - DNA, 30 bp, Artificial Sequence
  Synthetic oligonucleotide
agcggtcacgtctgcttgggcgggtaggta

SEQ ID NO: 445355 - DNA, 30 bp, Artificial Sequence
  Synthetic oligonucleotide
tttatttggaagttcgattgtatttaggta

SEQ ID NO: 445356 - DNA, 30 bp, Artificial Sequence
  Synthetic oligonucleotide
gataagtccggataggccagtgaaacggta

SEQ ID NO: 445357 - DNA, 30 bp, Artificial Sequence
  Synthetic oligonucleotide
ggtaaccgactcctggagtgtgaaacggta

SEQ ID NO: 445358 - DNA, 30 bp, Artificial Sequence
  Synthetic oligonucleotide
gattattcaggggattgcgccgtaacggta

SEQ ID NO: 445359 - DNA, 30 bp, Artificial Sequence
  Synthetic oligonucleotide
tcgcaacagccgtgtggagtaagcacggta

SEQ ID NO: 445360 - DNA, 30 bp, Artificial Sequence
  Synthetic oligonucleotide
gccgtggttaggggcaggaagggcacggta

SEQ ID NO: 445361 - DNA, 30 bp, Artificial Sequence
  Synthetic oligonucleotide
tcgagcctgctctgtcgaggtatcacggta

SEQ ID NO: 445362 - DNA, 30 bp, Artificial Sequence
  Synthetic oligonucleotide
cgcgtgaaaccggacagggagcggccggta

SEQ ID NO: 445363 - DNA, 30 bp, Artificial Sequence
  Synthetic oligonucleotide
gcgatccgaattcttcaaagcactccggta

SEQ ID NO: 445364 - DNA, 30 bp, Artificial Sequence
  Synthetic oligonucleotide
acccacatattactagcccttattccggta

SEQ ID NO: 445365 - DNA, 30 bp, Artificial Sequence
  Synthetic oligonucleotide
gttttaggccaacttgagttacccgcggta

SEQ ID NO: 445366 - DNA, 30 bp, Artificial Sequence
  Synthetic oligonucleotide
taattcatttgaggcacctggttggcggta

SEQ ID NO: 445367 - DNA, 30 bp, Artificial Sequence
  Synthetic oligonucleotide
tattttcgttcctggtacagtgatgcggta

SEQ ID NO: 445368 - DNA, 30 bp, Artificial Sequence
  Synthetic oligonucleotide
cgcgggcgtcaattccgcctgggtgcggta

SEQ ID NO: 445369 - DNA, 30 bp, Artificial Sequence
  Synthetic oligonucleotide
tgcaggtagtactagaggctagtatcggta

SEQ ID NO: 445370 - DNA, 30 bp, Artificial Sequence
  Synthetic oligonucleotide
cttgcaatcatcatttagtacaactcggta

SEQ ID NO: 445371 - DNA, 30 bp, Artificial Sequence
  Synthetic oligonucleotide
ttttgttgttgaatgtagtttacctcggta

SEQ ID NO: 445372 - DNA, 30 bp, Artificial Sequence
  Synthetic oligonucleotide
ttttcattttagcgtcgcatgctctcggta

SEQ ID NO: 445373 - DNA, 30 bp, Artificial Sequence
  Synthetic oligonucleotide
agttatgcacaatgggcctcgttctcggta

SEQ ID NO: 445374 - DNA, 30 bp, Artificial Sequence
  Synthetic oligonucleotide
attgcgccccaaactgattctgggtcggta

SEQ ID NO: 445375 - DNA, 30 bp, Artificial Sequence
  Synthetic oligonucleotide
ttccaggaaacgacaacggggggttcggta

SEQ ID NO: 445376 - DNA, 30 bp, Artificial Sequence
  Synthetic oligonucleotide
aattatacgttttggtgggtaccaagggta

SEQ ID NO: 445377 - DNA, 30 bp, Artificial Sequence
  Synthetic oligonucleotide
ccgttcagacttttcaaaagtccaagggta

SEQ ID NO: 445378 - DNA, 30 bp, Artificial Sequence
  Synthetic oligonucleotide
tttaaccagcaagttcatcgtctaagggta

SEQ ID NO: 445379 - DNA, 30 bp, Artificial Sequence
  Synthetic oligonucleotide
cttcgatttgtagggcaaactgccagggta

SEQ ID NO: 445380 - DNA, 30 bp, Artificial Sequence
  Synthetic oligonucleotide
caataggccactcgttcgactatcagggta

SEQ ID NO: 445381 - DNA, 30 bp, Artificial Sequence
  Synthetic oligonucleotide
catcgttcggttttgttgatagtcagggta

SEQ ID NO: 445382 - DNA, 30 bp, Artificial Sequence
  Synthetic oligonucleotide
tacttcccttgcactcggcataatagggta

SEQ ID NO: 445383 - DNA, 30 bp, Artificial Sequence
  Synthetic oligonucleotide
tagattcccgggttagactaatctagggta

SEQ ID NO: 445384 - DNA, 30 bp, Artificial Sequence
  Synthetic oligonucleotide
ctgtatggggtgtggaagtcctcacgggta

SEQ ID NO: 445385 - DNA, 30 bp, Artificial Sequence
  Synthetic oligonucleotide
acacacaagactcgcaaggattcccgggta

SEQ ID NO: 445386 - DNA, 30 bp, Artificial Sequence
  Synthetic oligonucleotide
caataccggcgacttttgtagcagcgggta

SEQ ID NO: 445387 - DNA, 30 bp, Artificial Sequence
  Synthetic oligonucleotide
ctatagacgactaaccctaacgagcgggta

SEQ ID NO: 445388 - DNA, 30 bp, Artificial Sequence
  Synthetic oligonucleotide
ggagcaccggctctaagcagccatcgggta

SEQ ID NO: 445389 - DNA, 30 bp, Artificial Sequence
  Synthetic oligonucleotide
gattctagttgcagatgcggatctcgggta

SEQ ID NO: 445390 - DNA, 30 bp, Artificial Sequence
  Synthetic oligonucleotide
ctaccaatgccactcagtatcgttcgggta

SEQ ID NO: 445391 - DNA, 30 bp, Artificial Sequence
  Synthetic oligonucleotide
agtcttaagtatttagtcatattaggggta

SEQ ID NO: 445392 - DNA, 30 bp, Artificial Sequence
  Synthetic oligonucleotide
ggaggggcagcggtgcaaagtttaggggta

SEQ ID NO: 445393 - DNA, 30 bp, Artificial Sequence
  Synthetic oligonucleotide
cgcggctgtgcgtcaatgatcgacggggta

SEQ ID NO: 445394 - DNA, 30 bp, Artificial Sequence
  Synthetic oligonucleotide
cttggttttaatgcaagtgggagcggggta

SEQ ID NO: 445395 - DNA, 30 bp, Artificial Sequence
  Synthetic oligonucleotide
taacggagccaaacgctcatgcagggggta

SEQ ID NO: 445396 - DNA, 30 bp, Artificial Sequence
  Synthetic oligonucleotide
cccgcaacatactccttgtggaatggggta

SEQ ID NO: 445397 - DNA, 30 bp, Artificial Sequence
  Synthetic oligonucleotide
ttaaatgtgttaccaggcttgtctggggta

SEQ ID NO: 445398 - DNA, 30 bp, Artificial Sequence
  Synthetic oligonucleotide
cacccttccacggtattgcgacttggggta

SEQ ID NO: 445399 - DNA, 30 bp, Artificial Sequence
  Synthetic oligonucleotide
tgttatgggcgcaccagacagtaatgggta

SEQ ID NO: 445400 - DNA, 30 bp, Artificial Sequence
  Synthetic oligonucleotide
gttccaatctcatgtccgcgggcctgggta

SEQ ID NO: 445401 - DNA, 30 bp, Artificial Sequence
  Synthetic oligonucleotide
atcactactgtggagtgattcatttgggta

SEQ ID NO: 445402 - DNA, 30 bp, Artificial Sequence
  Synthetic oligonucleotide
aaaaccgactgttagccgagtgaaatggta

SEQ ID NO: 445403 - DNA, 30 bp, Artificial Sequence
  Synthetic oligonucleotide
ggagtaaatttttttggcgcgtgaatggta

SEQ ID NO: 445404 - DNA, 30 bp, Artificial Sequence
  Synthetic oligonucleotide
ttggaagagatttactcgatatccatggta

SEQ ID NO: 445405 - DNA, 30 bp, Artificial Sequence
  Synthetic oligonucleotide
attatgcggtgaaagggagacttcatggta

SEQ ID NO: 445406 - DNA, 30 bp, Artificial Sequence
  Synthetic oligonucleotide
aggctgcggaacaggaaatgattgatggta

SEQ ID NO: 445407 - DNA, 30 bp, Artificial Sequence
  Synthetic oligonucleotide
acgacgaaggctccagagccatatatggta

SEQ ID NO: 445408 - DNA, 30 bp, Artificial Sequence
  Synthetic oligonucleotide
tccgacacggttacaataagtatcctggta

SEQ ID NO: 445409 - DNA, 30 bp, Artificial Sequence
  Synthetic oligonucleotide
ggttcttaggacagagattgcctcctggta

SEQ ID NO: 445410 - DNA, 30 bp, Artificial Sequence
  Synthetic oligonucleotide
ataatctgggcgtttatactgccgctggta

SEQ ID NO: 445411 - DNA, 30 bp, Artificial Sequence
  Synthetic oligonucleotide
gtcatactgctcattagttaatcgctggta

SEQ ID NO: 445412 - DNA, 30 bp, Artificial Sequence
  Synthetic oligonucleotide
tcggtgggaccctgggatcgttgagtggta

SEQ ID NO: 445413 - DNA, 30 bp, Artificial Sequence
  Synthetic oligonucleotide
gcaatagttactcgtgtcttcagcgtggta

SEQ ID NO: 445414 - DNA, 30 bp, Artificial Sequence
  Synthetic oligonucleotide
atggttttacaccggctcatcatcgtggta

SEQ ID NO: 445415 - DNA, 30 bp, Artificial Sequence
  Synthetic oligonucleotide
aatcttactactaaatcaccggaggtggta

SEQ ID NO: 445416 - DNA, 30 bp, Artificial Sequence
  Synthetic oligonucleotide
ggctaccgcggtgtcggtttaacggtggta

SEQ ID NO: 445417 - DNA, 30 bp, Artificial Sequence
  Synthetic oligonucleotide
tttaatcgtgagaaccaatttctggtggta

SEQ ID NO: 445418 - DNA, 30 bp, Artificial Sequence
  Synthetic oligonucleotide
tcctgattttacttttaggttaatgtggta

SEQ ID NO: 445419 - DNA, 30 bp, Artificial Sequence
  Synthetic oligonucleotide
tcagatttaggacaggaggactctgtggta

SEQ ID NO: 445420 - DNA, 30 bp, Artificial Sequence
  Synthetic oligonucleotide
tcaaatgcatatcatcgtcttggtgtggta

SEQ ID NO: 445421 - DNA, 30 bp, Artificial Sequence
  Synthetic oligonucleotide
tgactagtgctaataacagtgaaattggta

SEQ ID NO: 445422 - DNA, 30 bp, Artificial Sequence
  Synthetic oligonucleotide
ggttctctacgggtgtcgccccaattggta

SEQ ID NO: 445423 - DNA, 30 bp, Artificial Sequence
  Synthetic oligonucleotide
ctcatttcctgtcaccgtaaagaattggta

SEQ ID NO: 445424 - DNA, 30 bp, Artificial Sequence
  Synthetic oligonucleotide
gagtcctattccagtggagcgcgattggta

SEQ ID NO: 445425 - DNA, 30 bp, Artificial Sequence
  Synthetic oligonucleotide
ttataagctgaggcaccagcaaacttggta

SEQ ID NO: 445426 - DNA, 30 bp, Artificial Sequence
  Synthetic oligonucleotide
ttccgagaccaacgcagggtatagttggta

SEQ ID NO: 445427 - DNA, 30 bp, Artificial Sequence
  Synthetic oligonucleotide
tcaaggaatgggcaaccttaccggttggta

SEQ ID NO: 445428 - DNA, 30 bp, Artificial Sequence
  Synthetic oligonucleotide
acagatactcttagaaaattccggttggta

SEQ ID NO: 445429 - DNA, 30 bp, Artificial Sequence
  Synthetic oligonucleotide
gcgcgtgcgacacggcaggtagtgttggta

SEQ ID NO: 445430 - DNA, 30 bp, Artificial Sequence
  Synthetic oligonucleotide
tcaatgagttcgacggccccgtatttggta

SEQ ID NO: 445431 - DNA, 30 bp, Artificial Sequence
  Synthetic oligonucleotide
ccctaagggcaagacgtacccggtttggta

SEQ ID NO: 445432 - DNA, 30 bp, Artificial Sequence
  Synthetic oligonucleotide
gcagcagcaagaattcatcgttcaaatgta

SEQ ID NO: 445433 - DNA, 30 bp, Artificial Sequence
  Synthetic oligonucleotide
ggtgagtcagtgacgcttgtcggaaatgta

SEQ ID NO: 445434 - DNA, 30 bp, Artificial Sequence
  Synthetic oligonucleotide
atgttgtacttgtaaggtaagttaaatgta

SEQ ID NO: 445435 - DNA, 30 bp, Artificial Sequence
  Synthetic oligonucleotide
gattagaaagtttccagatggcgcaatgta

SEQ ID NO: 445436 - DNA, 30 bp, Artificial Sequence
  Synthetic oligonucleotide
aattcgtacggcggatacagttcgaatgta

SEQ ID NO: 445437 - DNA, 30 bp, Artificial Sequence
  Synthetic oligonucleotide
ttgaaggtgtatgagttctttcggaatgta

SEQ ID NO: 445438 - DNA, 30 bp, Artificial Sequence
  Synthetic oligonucleotide
acgtggttcattggaatgactatgaatgta

SEQ ID NO: 445439 - DNA, 30 bp, Artificial Sequence
  Synthetic oligonucleotide
aagggcaacaatactagatctggtaatgta

SEQ ID NO: 445440 - DNA, 30 bp, Artificial Sequence
  Synthetic oligonucleotide
tcagcgcacgatcgcaaaggacttaatgta

SEQ ID NO: 445441 - DNA, 30 bp, Artificial Sequence
  Synthetic oligonucleotide
gagcggcctcgtttaggctcgtgacatgta

SEQ ID NO: 445442 - DNA, 30 bp, Artificial Sequence
  Synthetic oligonucleotide
ccctgttgcttacttaaaggtgtacatgta

SEQ ID NO: 445443 - DNA, 30 bp, Artificial Sequence
  Synthetic oligonucleotide
ccctatccagataataatttccttcatgta

SEQ ID NO: 445444 - DNA, 31 bp, Artificial Sequence
  Synthetic oligonucleotide
agtgggactacagatgagcgcagttcatgta

SEQ ID NO: 445445 - DNA, 30 bp, Artificial Sequence
  Synthetic oligonucleotide
tgttttcagcttgattcgaactttcatgta

SEQ ID NO: 445446 - DNA, 30 bp, Artificial Sequence
  Synthetic oligonucleotide
tcgatctttgcatagtcctataaagatgta

SEQ ID NO: 445447 - DNA, 30 bp, Artificial Sequence
  Synthetic oligonucleotide
gttaatggggctaacgccagtacagatgta

SEQ ID NO: 445448 - DNA, 30 bp, Artificial Sequence
  Synthetic oligonucleotide
cactttgtgccatgctgctccctagatgta

SEQ ID NO: 445449 - DNA, 30 bp, Artificial Sequence
  Synthetic oligonucleotide
cagttagcaatctccgtttatttcgatgta

SEQ ID NO: 445450 - DNA, 30 bp, Artificial Sequence
  Synthetic oligonucleotide
caactaatacccgaacctagtggtgatgta

SEQ ID NO: 445451 - DNA, 30 bp, Artificial Sequence
  Synthetic oligonucleotide
gatataccaatctacaccgactcatatgta

SEQ ID NO: 445452 - DNA, 30 bp, Artificial Sequence
  Synthetic oligonucleotide
actaagatcatattctatgaaagatatgta

SEQ ID NO: 445453 - DNA, 30 bp, Artificial Sequence
  Synthetic oligonucleotide
cataacctaaacggaggtattatatatgta

SEQ ID NO: 445454 - DNA, 30 bp, Artificial Sequence
  Synthetic oligonucleotide
atgtctagtatgtcgcctccgctctatgta

SEQ ID NO: 445455 - DNA, 30 bp, Artificial Sequence
  Synthetic oligonucleotide
tataaagtgcttgtggaccaattctatgta

SEQ ID NO: 445456 - DNA, 30 bp, Artificial Sequence
  Synthetic oligonucleotide
attaattcttgccgtcttgtcaagtatgta

SEQ ID NO: 445457 - DNA, 30 bp, Artificial Sequence
  Synthetic oligonucleotide
atctgcatagtccgcaaaaatgcgtatgta

SEQ ID NO: 445458 - DNA, 30 bp, Artificial Sequence
  Synthetic oligonucleotide
tgcaaaatttgccgaccccttctgtatgta

SEQ ID NO: 445459 - DNA, 30 bp, Artificial Sequence
  Synthetic oligonucleotide
taccttagaaacgacgcctttttgtatgta

SEQ ID NO: 445460 - DNA, 30 bp, Artificial Sequence
  Synthetic oligonucleotide
atatataaagaggagcttaactcttatgta

SEQ ID NO: 445461 - DNA, 30 bp, Artificial Sequence
  Synthetic oligonucleotide
tgatattccgcctttcatggaatttatgta

SEQ ID NO: 445462 - DNA, 30 bp, Artificial Sequence
  Synthetic oligonucleotide
atgatgataaaactctgagctatttatgta

SEQ ID NO: 445463 - DNA, 30 bp, Artificial Sequence
  Synthetic oligonucleotide
gcgttaggcctagaaagaagaagaactgta

SEQ ID NO: 445464 - DNA, 30 bp, Artificial Sequence
  Synthetic oligonucleotide
aatagtcatggcaccagtgccaggactgta

SEQ ID NO: 445465 - DNA, 30 bp, Artificial Sequence
  Synthetic oligonucleotide
gccggtgacacgatgaggctcgtgactgta

SEQ ID NO: 445466 - DNA, 30 bp, Artificial Sequence
  Synthetic oligonucleotide
aaaaatgctagtgaagcctccgatactgta

SEQ ID NO: 445467 - DNA, 30 bp, Artificial Sequence
  Synthetic oligonucleotide
gtggattgctggctagctcagcaacctgta

SEQ ID NO: 445468 - DNA, 30 bp, Artificial Sequence
  Synthetic oligonucleotide
atatttggatatttacaatccgcacctgta

SEQ ID NO: 445469 - DNA, 30 bp, Artificial Sequence
  Synthetic oligonucleotide
gaccactgcgtggggacgaagtaccctgta

SEQ ID NO: 445470 - DNA, 30 bp, Artificial Sequence
  Synthetic oligonucleotide
gctgggtttgtatccaccagaagccctgta

SEQ ID NO: 445471 - DNA, 30 bp, Artificial Sequence
  Synthetic oligonucleotide
cgtttcccacacggttgctcttagcctgta

SEQ ID NO: 445472 - DNA, 30 bp, Artificial Sequence
  Synthetic oligonucleotide
gaaacgatctgattctacaaagggcctgta

SEQ ID NO: 445473 - DNA, 30 bp, Artificial Sequence
  Synthetic oligonucleotide
ggtcaatcaaacgctctaagtgggcctgta

SEQ ID NO: 445474 - DNA, 30 bp, Artificial Sequence
  Synthetic oligonucleotide
ctgacggctcagcagcagtgcactcctgta

SEQ ID NO: 445475 - DNA, 30 bp, Artificial Sequence
  Synthetic oligonucleotide
tcgttcggatttcatatcgctgctcctgta

SEQ ID NO: 445476 - DNA, 30 bp, Artificial Sequence
  Synthetic oligonucleotide
acaggtataaaactctcagcccgtcctgta

SEQ ID NO: 445477 - DNA, 30 bp, Artificial Sequence
  Synthetic oligonucleotide
ccatagcatacatgtgatgtttcagctgta

SEQ ID NO: 445478 - DNA, 30 bp, Artificial Sequence
  Synthetic oligonucleotide
aaacaagctatacgctgctacgccgctgta

SEQ ID NO: 445479 - DNA, 30 bp, Artificial Sequence
  Synthetic oligonucleotide
ctgcctcttaaactatattgtaaggctgta

SEQ ID NO: 445480 - DNA, 30 bp, Artificial Sequence
  Synthetic oligonucleotide
aagtcatataggctaccgatgtatgctgta

SEQ ID NO: 445481 - DNA, 30 bp, Artificial Sequence
  Synthetic oligonucleotide
cttcatggcatcttaccaagcagtgctgta

SEQ ID NO: 445482 - DNA, 30 bp, Artificial Sequence
  Synthetic oligonucleotide
tattagattgattgctgttctcttgctgta

SEQ ID NO: 445483 - DNA, 30 bp, Artificial Sequence
  Synthetic oligonucleotide
cttgctgtacctggctcctggtaatctgta

SEQ ID NO: 445484 - DNA, 30 bp, Artificial Sequence
  Synthetic oligonucleotide
ctttgctgcgggtatacggatgtatctgta

SEQ ID NO: 445485 - DNA, 30 bp, Artificial Sequence
  Synthetic oligonucleotide
gaagaacttaaattcgaatattcttctgta

SEQ ID NO: 445486 - DNA, 30 bp, Artificial Sequence
  Synthetic oligonucleotide
cctttccgtgagttaatcgaactttctgta

SEQ ID NO: 445487 - DNA, 30 bp, Artificial Sequence
  Synthetic oligonucleotide
tgtatgggtctcatcagatggctttctgta

SEQ ID NO: 445488 - DNA, 30 bp, Artificial Sequence
  Synthetic oligonucleotide
tgggtgttgacgtccggacgcacaagtgta

SEQ ID NO: 445489 - DNA, 30 bp, Artificial Sequence
  Synthetic oligonucleotide
gcaccgcgttcgcgctgcatctcaagtgta

SEQ ID NO: 445490 - DNA, 30 bp, Artificial Sequence
  Synthetic oligonucleotide
acagtgcttcggtgctcgtgtggaagtgta

SEQ ID NO: 445491 - DNA, 30 bp, Artificial Sequence
  Synthetic oligonucleotide
gtatacaacaaggttggtcggtgaagtgta

SEQ ID NO: 445492 - DNA, 30 bp, Artificial Sequence
  Synthetic oligonucleotide
gacttgtgctcacaacgacaaatcagtgta

SEQ ID NO: 445493 - DNA, 30 bp, Artificial Sequence
  Synthetic oligonucleotide
ggtagaggatgagcagcgatatggagtgta

SEQ ID NO: 445494 - DNA, 30 bp, Artificial Sequence
  Synthetic oligonucleotide
tccccgcttcaacatggtggtactagtgta

SEQ ID NO: 445495 - DNA, 30 bp, Artificial Sequence
  Synthetic oligonucleotide
tggacatgtcgaattacatagcgacgtgta

SEQ ID NO: 445496 - DNA, 30 bp, Artificial Sequence
  Synthetic oligonucleotide
tgggaaggttatggttgatttggccgtgta

SEQ ID NO: 445497 - DNA, 30 bp, Artificial Sequence
  Synthetic oligonucleotide
ttgtggcttcgtatatatattctccgtgta

SEQ ID NO: 445498 - DNA, 30 bp, Artificial Sequence
  Synthetic oligonucleotide
gatagcagtctgcaatagacgatgcgtgta

SEQ ID NO: 445499 - DNA, 30 bp, Artificial Sequence
  Synthetic oligonucleotide
ggatatgatacggcccggtgcgatcgtgta

SEQ ID NO: 445500 - DNA, 30 bp, Artificial Sequence
  Synthetic oligonucleotide
ctttgtccatatgctagattaccaggtgta

SEQ ID NO: 445501 - DNA, 30 bp, Artificial Sequence
  Synthetic oligonucleotide
gacttaaggatcgtagagcacacgggtgta

SEQ ID NO: 445502 - DNA, 30 bp, Artificial Sequence
  Synthetic oligonucleotide
gctctgggggcggaatgaggttctggtgta

SEQ ID NO: 445503 - DNA, 30 bp, Artificial Sequence
  Synthetic oligonucleotide
gtccagatatggagagctcttaaatgtgta

SEQ ID NO: 445504 - DNA, 30 bp, Artificial Sequence
  Synthetic oligonucleotide
ggccgggaccaatgaccgagctcatgtgta

SEQ ID NO: 445505 - DNA, 30 bp, Artificial Sequence
  Synthetic oligonucleotide
ttgtctgtagggggtcaccacgtatgtgta

SEQ ID NO: 445506 - DNA, 30 bp, Artificial Sequence
  Synthetic oligonucleotide
catgagcgtgggatgatagcattctgtgta

SEQ ID NO: 445507 - DNA, 30 bp, Artificial Sequence
  Synthetic oligonucleotide
tgtaagaatcttaagtaaatcgtgtgtgta

SEQ ID NO: 445508 - DNA, 30 bp, Artificial Sequence
  Synthetic oligonucleotide
tattatactcctggaagactagattgtgta

SEQ ID NO: 445509 - DNA, 30 bp, Artificial Sequence
  Synthetic oligonucleotide
ggacaagctaacttatatggtacttgtgta

SEQ ID NO: 445510 - DNA, 30 bp, Artificial Sequence
  Synthetic oligonucleotide
caatgtattcacggagcgccacgttgtgta

SEQ ID NO: 445511 - DNA, 30 bp, Artificial Sequence
  Synthetic oligonucleotide
aatcaaattgataggtgtagggaaattgta

SEQ ID NO: 445512 - DNA, 30 bp, Artificial Sequence
  Synthetic oligonucleotide
gcggttcccagtattatggagtacattgta

SEQ ID NO: 445513 - DNA, 30 bp, Artificial Sequence
  Synthetic oligonucleotide
cccgttgttgcataggtgtagcagattgta

SEQ ID NO: 445514 - DNA, 30 bp, Artificial Sequence
  Synthetic oligonucleotide
tctgatatttgatatccaacggggattgta

SEQ ID NO: 445515 - DNA, 30 bp, Artificial Sequence
  Synthetic oligonucleotide
cttacagtccagatatacacccctattgta

SEQ ID NO: 445516 - DNA, 30 bp, Artificial Sequence
  Synthetic oligonucleotide
gtgcaaccggtagttgtaggctctattgta

SEQ ID NO: 445517 - DNA, 30 bp, Artificial Sequence
  Synthetic oligonucleotide
aagttcgaataactattggcttcgcttgta

SEQ ID NO: 445518 - DNA, 30 bp, Artificial Sequence
  Synthetic oligonucleotide
gtaagcctattgacgcacccacatcttgta

SEQ ID NO: 445519 - DNA, 30 bp, Artificial Sequence
  Synthetic oligonucleotide
tactattgaagaacggcgttggctcttgta

SEQ ID NO: 445520 - DNA, 30 bp, Artificial Sequence
  Synthetic oligonucleotide
ttggtttgaataaagcctgtgttcgttgta

SEQ ID NO: 445521 - DNA, 30 bp, Artificial Sequence
  Synthetic oligonucleotide
aatctccggaataccggacctttggttgta

SEQ ID NO: 445522 - DNA, 30 bp, Artificial Sequence
  Synthetic oligonucleotide
tatgaattggcaggttgcgtgggtgttgta

SEQ ID NO: 445523 - DNA, 30 bp, Artificial Sequence
  Synthetic oligonucleotide
ccctacctttaaggcacctttaaatttgta

SEQ ID NO: 445524 - DNA, 30 bp, Artificial Sequence
  Synthetic oligonucleotide
aaaaggctcagcctatccctagtatttgta

SEQ ID NO: 445525 - DNA, 30 bp, Artificial Sequence
  Synthetic oligonucleotide
cttcataggcatttaattattaactttgta

SEQ ID NO: 445526 - DNA, 30 bp, Artificial Sequence
  Synthetic oligonucleotide
aagatggaagcatcccgtaattactttgta

SEQ ID NO: 445527 - DNA, 30 bp, Artificial Sequence
  Synthetic oligonucleotide
ttcaggcacgcggctaacagtacgtttgta

SEQ ID NO: 445528 - DNA, 30 bp, Artificial Sequence
  Synthetic oligonucleotide
ctgtcgcgcacggcgtgtagttggtttgta

SEQ ID NO: 445529 - DNA, 30 bp, Artificial Sequence
  Synthetic oligonucleotide
accccggcttcatatgggaacgtgtttgta

SEQ ID NO: 445530 - DNA, 30 bp, Artificial Sequence
  Synthetic oligonucleotide
atttggtttgcgctcatcattgcttttgta

SEQ ID NO: 445531 - DNA, 30 bp, Artificial Sequence
  Synthetic oligonucleotide
cctagctatacaaactaaatgtcttttgta

SEQ ID NO: 445532 - DNA, 30 bp, Artificial Sequence
  Synthetic oligonucleotide
ggattccagcgcattgggtagctttttgta

SEQ ID NO: 445533 - DNA, 30 bp, Artificial Sequence
  Synthetic oligonucleotide
cgctaaatcagcacgggacccaaaaaatta

SEQ ID NO: 445534 - DNA, 30 bp, Artificial Sequence
  Synthetic oligonucleotide
gccgatgtggctgatcaccgacaaaaatta

SEQ ID NO: 445535 - DNA, 30 bp, Artificial Sequence
  Synthetic oligonucleotide
gcgtgactatagttctcactgtcaaaatta

SEQ ID NO: 445536 - DNA, 30 bp, Artificial Sequence
  Synthetic oligonucleotide
ctaagatatcgagtctattaacgaaaatta

SEQ ID NO: 445537 - DNA, 30 bp, Artificial Sequence
  Synthetic oligonucleotide
gtctctagcacttggcgattattcaaatta

SEQ ID NO: 445538 - DNA, 30 bp, Artificial Sequence
  Synthetic oligonucleotide
ccgcggccgtttgatccaggtcataaatta

SEQ ID NO: 445539 - DNA, 30 bp, Artificial Sequence
  Synthetic oligonucleotide
cagcataattgtttgtaagtgactaaatta

SEQ ID NO: 445540 - DNA, 30 bp, Artificial Sequence
  Synthetic oligonucleotide
gccgaccgcacatcaggaaaaattaaatta

SEQ ID NO: 445541 - DNA, 30 bp, Artificial Sequence
  Synthetic oligonucleotide
ggatggatgccccggttggagccacaatta

SEQ ID NO: 445542 - DNA, 30 bp, Artificial Sequence
  Synthetic oligonucleotide
agcaggattcttttgccaccacgacaatta

SEQ ID NO: 445543 - DNA, 30 bp, Artificial Sequence
  Synthetic oligonucleotide
actcttattcatcacagtagtccgcaatta

SEQ ID NO: 445544 - DNA, 30 bp, Artificial Sequence
  Synthetic oligonucleotide
ctcatacgatgaccctatctagatcaatta

SEQ ID NO: 445545 - DNA, 30 bp, Artificial Sequence
  Synthetic oligonucleotide
aaagttcagccacttgctctcgatcaatta

SEQ ID NO: 445546 - DNA, 30 bp, Artificial Sequence
  Synthetic oligonucleotide
aagaggatctcatttttaggacctcaatta

SEQ ID NO: 445547 - DNA, 30 bp, Artificial Sequence
  Synthetic oligonucleotide
taactctctctagtaatagcaagtcaatta

SEQ ID NO: 445548 - DNA, 30 bp, Artificial Sequence
  Synthetic oligonucleotide
cgacgtatcgcttccgcgctgcgtcaatta

SEQ ID NO: 445549 - DNA, 30 bp, Artificial Sequence
  Synthetic oligonucleotide
ggaccgagcctaagctgtcggtgtcaatta

SEQ ID NO: 445550 - DNA, 30 bp, Artificial Sequence
  Synthetic oligonucleotide
tcaaatatgtacaggtcttgaaccgaatta

SEQ ID NO: 445551 - DNA, 30 bp, Artificial Sequence
  Synthetic oligonucleotide
ccctgaggggtccacgaattacgggaatta

SEQ ID NO: 445552 - DNA, 30 bp, Artificial Sequence
  Synthetic oligonucleotide
ataatggtttttgagctacttatggaatta

SEQ ID NO: 445553 - DNA, 29 bp, Artificial Sequence
  Synthetic oligonucleotide
cacttgcacttttctgcatattggaatta

SEQ ID NO: 445554 - DNA, 30 bp, Artificial Sequence
  Synthetic oligonucleotide
agcaattctccggaccggatcggtgaatta

SEQ ID NO: 445555 - DNA, 30 bp, Artificial Sequence
  Synthetic oligonucleotide
gcttaaatagcgcctaggccttaataatta

SEQ ID NO: 445556 - DNA, 30 bp, Artificial Sequence
  Synthetic oligonucleotide
ctcccgcgggatgattgagccttctaatta

SEQ ID NO: 445557 - DNA, 30 bp, Artificial Sequence
  Synthetic oligonucleotide
gagaaccatcattacaatttcatgtaatta

SEQ ID NO: 445558 - DNA, 30 bp, Artificial Sequence
  Synthetic oligonucleotide
tccgaagtggtgaggtagtcactgtaatta

SEQ ID NO: 445559 - DNA, 30 bp, Artificial Sequence
  Synthetic oligonucleotide
gttaactttggctacttcttggcttaatta

SEQ ID NO: 445560 - DNA, 30 bp, Artificial Sequence
  Synthetic oligonucleotide
gagtgcaagctctgtttggtgaaaacatta

SEQ ID NO: 445561 - DNA, 30 bp, Artificial Sequence
  Synthetic oligonucleotide
ttaatagtgatgctggtctaccaaacatta

SEQ ID NO: 445562 - DNA, 29 bp, Artificial Sequence
  Synthetic oligonucleotide
tcgactgcagaaatggacttgcaacatta

SEQ ID NO: 445563 - DNA, 30 bp, Artificial Sequence
  Synthetic oligonucleotide
tacgtctcagttgccgaagctcgaacatta

SEQ ID NO: 445564 - DNA, 30 bp, Artificial Sequence
  Synthetic oligonucleotide
gagttaatgtatttttcccgtataacatta

SEQ ID NO: 445565 - DNA, 30 bp, Artificial Sequence
  Synthetic oligonucleotide
gagatggtatttcctttccgaggcacatta

SEQ ID NO: 445566 - DNA, 30 bp, Artificial Sequence
  Synthetic oligonucleotide
aagacgccgggagggatggacgtgacatta

SEQ ID NO: 445567 - DNA, 30 bp, Artificial Sequence
  Synthetic oligonucleotide
cttcaacccgaccggaacgtctctacatta

SEQ ID NO: 445568 - DNA, 30 bp, Artificial Sequence
  Synthetic oligonucleotide
aatagcatggtgtccttggacggtacatta

SEQ ID NO: 445569 - DNA, 30 bp, Artificial Sequence
  Synthetic oligonucleotide
gacgataggtacgtacggcgcaaaccatta

SEQ ID NO: 445570 - DNA, 30 bp, Artificial Sequence
  Synthetic oligonucleotide
tatactaattctaaacgtaggcaaccatta

SEQ ID NO: 445571 - DNA, 30 bp, Artificial Sequence
  Synthetic oligonucleotide
ctcattacgatgaaggttagggacccatta

SEQ ID NO: 445572 - DNA, 30 bp, Artificial Sequence
  Synthetic oligonucleotide
tcaaggatgaggccgcctttcttgccatta

SEQ ID NO: 445573 - DNA, 30 bp, Artificial Sequence
  Synthetic oligonucleotide
cagtcttagctcagccctatatatccatta

SEQ ID NO: 445574 - DNA, 30 bp, Artificial Sequence
  Synthetic oligonucleotide
accggagtattggctggacgcccagcatta

SEQ ID NO: 445575 - DNA, 30 bp, Artificial Sequence
  Synthetic oligonucleotide
ggtgcttccgttgcgtctacatcagcatta

SEQ ID NO: 445576 - DNA, 31 bp, Artificial Sequence
  Synthetic oligonucleotide
atacagttaacgagaaaatgccagagcatta

SEQ ID NO: 445577 - DNA, 30 bp, Artificial Sequence
  Synthetic oligonucleotide
gcagttgacaggcagcgactcggagcatta

SEQ ID NO: 445578 - DNA, 30 bp, Artificial Sequence
  Synthetic oligonucleotide
ccgtgttaaggtcgttacgaatccgcatta

SEQ ID NO: 445579 - DNA, 30 bp, Artificial Sequence
  Synthetic oligonucleotide
aggcacactatgtgagtatcaaaggcatta

SEQ ID NO: 445580 - DNA, 30 bp, Artificial Sequence
  Synthetic oligonucleotide
tatgaggtctgacgatgaacggatgcatta

SEQ ID NO: 445581 - DNA, 30 bp, Artificial Sequence
  Synthetic oligonucleotide
ccgcgcaacgctgcaagcagtactgcatta

SEQ ID NO: 445582 - DNA, 30 bp, Artificial Sequence
  Synthetic oligonucleotide
tgccactgccgcccgaatcttgctgcatta

SEQ ID NO: 445583 - DNA, 30 bp, Artificial Sequence
  Synthetic oligonucleotide
atagaccacaggccctttgctcactcatta

SEQ ID NO: 445584 - DNA, 30 bp, Artificial Sequence
  Synthetic oligonucleotide
aaatatttgctgccgtcccttgggtcatta

SEQ ID NO: 445585 - DNA, 30 bp, Artificial Sequence
  Synthetic oligonucleotide
catcttgtcagcgtgttagatcattcatta

SEQ ID NO: 445586 - DNA, 30 bp, Artificial Sequence
  Synthetic oligonucleotide
tactcctatccacatggccagtgttcatta

SEQ ID NO: 445587 - DNA, 30 bp, Artificial Sequence
  Synthetic oligonucleotide
gcacccgccggcgttgtctcacaaagatta

SEQ ID NO: 445588 - DNA, 30 bp, Artificial Sequence
  Synthetic oligonucleotide
tgacaccgggttctgttccaatgaagatta

SEQ ID NO: 445589 - DNA, 30 bp, Artificial Sequence
  Synthetic oligonucleotide
gtattcttgaatagtcagcatcacagatta

SEQ ID NO: 445590 - DNA, 30 bp, Artificial Sequence
  Synthetic oligonucleotide
ctccatataggcgacgtccctcccagatta

SEQ ID NO: 445591 - DNA, 30 bp, Artificial Sequence
  Synthetic oligonucleotide
atagttgcacttgtgccaaatgccagatta

SEQ ID NO: 445592 - DNA, 30 bp, Artificial Sequence
  Synthetic oligonucleotide
gtcctaaggccttttccaggttccagatta

SEQ ID NO: 445593 - DNA, 30 bp, Artificial Sequence
  Synthetic oligonucleotide
cggactttcgccgaacttagatgcagatta

SEQ ID NO: 445594 - DNA, 30 bp, Artificial Sequence
  Synthetic oligonucleotide
gtaaagttaacgacggtgtgtactagatta

SEQ ID NO: 445595 - DNA, 30 bp, Artificial Sequence
  Synthetic oligonucleotide
atctgtggtgctcctagggagcaacgatta

SEQ ID NO: 445596 - DNA, 30 bp, Artificial Sequence
  Synthetic oligonucleotide
ccaagaggttgtgtacactttgaacgatta

SEQ ID NO: 445597 - DNA, 30 bp, Artificial Sequence
  Synthetic oligonucleotide
tttttcttgtggaaaatctagagacgatta

SEQ ID NO: 445598 - DNA, 30 bp, Artificial Sequence
  Synthetic oligonucleotide
tgcgatgacgcgtgcgaggcagtacgatta

SEQ ID NO: 445599 - DNA, 29 bp, Artificial Sequence
  Synthetic oligonucleotide
ttcacacggttaccttgactttacgatta

SEQ ID NO: 445600 - DNA, 30 bp, Artificial Sequence
  Synthetic oligonucleotide
tattacgctgtcagtgctaaacaccgatta

SEQ ID NO: 445601 - DNA, 30 bp, Artificial Sequence
  Synthetic oligonucleotide
tacaatatcgggatgcgagctaggcgatta

SEQ ID NO: 445602 - DNA, 30 bp, Artificial Sequence
  Synthetic oligonucleotide
aacaacgcaggagatagtttagtgcgatta

SEQ ID NO: 445603 - DNA, 30 bp, Artificial Sequence
  Synthetic oligonucleotide
gaacattttgacgcaaccgtgagtcgatta

SEQ ID NO: 445604 - DNA, 30 bp, Artificial Sequence
  Synthetic oligonucleotide
tatttacatatatgctgtttttttcgatta

SEQ ID NO: 445605 - DNA, 30 bp, Artificial Sequence
  Synthetic oligonucleotide
ataggcggcctgtgatactatataggatta

SEQ ID NO: 445606 - DNA, 30 bp, Artificial Sequence
  Synthetic oligonucleotide
ggccgctgcacctcgcttattctaggatta

SEQ ID NO: 445607 - DNA, 30 bp, Artificial Sequence
  Synthetic oligonucleotide
tatttcctaatgcctgatgtcaccggatta

SEQ ID NO: 445608 - DNA, 30 bp, Artificial Sequence
  Synthetic oligonucleotide
gcgtgcaccttcgcgatacgcacgggatta

SEQ ID NO: 445609 - DNA, 30 bp, Artificial Sequence
  Synthetic oligonucleotide
acgcttcatgatgctggcaagacgggatta

SEQ ID NO: 445610 - DNA, 30 bp, Artificial Sequence
  Synthetic oligonucleotide
tacccaacctgttcgtccaagctgggatta

SEQ ID NO: 445611 - DNA, 30 bp, Artificial Sequence
  Synthetic oligonucleotide
cgtatcctaccgtgttaactgctgggatta

SEQ ID NO: 445612 - DNA, 30 bp, Artificial Sequence
  Synthetic oligonucleotide
ctgattctacgggaacactttcctggatta

SEQ ID NO: 445613 - DNA, 30 bp, Artificial Sequence
  Synthetic oligonucleotide
agtcactgatccctagagagtggtggatta

SEQ ID NO: 445614 - DNA, 30 bp, Artificial Sequence
  Synthetic oligonucleotide
gtacgtagtgggaaattcgcatgtggatta

SEQ ID NO: 445615 - DNA, 30 bp, Artificial Sequence
  Synthetic oligonucleotide
accagcgtatgtctaatgcttaaatgatta

SEQ ID NO: 445616 - DNA, 30 bp, Artificial Sequence
  Synthetic oligonucleotide
agtagccgtgcgaatattcgctgatgatta

SEQ ID NO: 445617 - DNA, 30 bp, Artificial Sequence
  Synthetic oligonucleotide
aaagaagcagctccgactaatgattgatta

SEQ ID NO: 445618 - DNA, 30 bp, Artificial Sequence
  Synthetic oligonucleotide
gtcttatataacttctgacgaaaaatatta

SEQ ID NO: 445619 - DNA, 30 bp, Artificial Sequence
  Synthetic oligonucleotide
cgcaggttaagtccggtttacgaaatatta

SEQ ID NO: 445620 - DNA, 30 bp, Artificial Sequence
  Synthetic oligonucleotide
tgctagcctcatccgaacaagctaatatta

SEQ ID NO: 445621 - DNA, 30 bp, Artificial Sequence
  Synthetic oligonucleotide
gtcttgggtaagggtccggataagatatta

SEQ ID NO: 445622 - DNA, 30 bp, Artificial Sequence
  Synthetic oligonucleotide
actataaaatgaggttgtccagggatatta

SEQ ID NO: 445623 - DNA, 30 bp, Artificial Sequence
  Synthetic oligonucleotide
gacgacagcagtcgggcctccctgatatta

SEQ ID NO: 445624 - DNA, 30 bp, Artificial Sequence
  Synthetic oligonucleotide
tgtgccagggaattctctaaagtgatatta

SEQ ID NO: 445625 - DNA, 30 bp, Artificial Sequence
  Synthetic oligonucleotide
ctggggacgtgtttgcagcaggatatatta

SEQ ID NO: 445626 - DNA, 30 bp, Artificial Sequence
  Synthetic oligonucleotide
gtgaggccggttcttcgcacgagtatatta

SEQ ID NO: 445627 - DNA, 30 bp, Artificial Sequence
  Synthetic oligonucleotide
gacaggttctgtggcaattcgagtatatta

SEQ ID NO: 445628 - DNA, 30 bp, Artificial Sequence
  Synthetic oligonucleotide
gatgagcactaatgatttagacgtatatta

SEQ ID NO: 445629 - DNA, 30 bp, Artificial Sequence
  Synthetic oligonucleotide
agcgttggtcatagtttgtattgtatatta

SEQ ID NO: 445630 - DNA, 30 bp, Artificial Sequence
  Synthetic oligonucleotide
aagtaaacgtagtatcgggcatttatatta

SEQ ID NO: 445631 - DNA, 26 bp, Artificial Sequence
  Synthetic oligonucleotide
atacatgtacgtcctcgcaactatta

SEQ ID NO: 445632 - DNA, 30 bp, Artificial Sequence
  Synthetic oligonucleotide
agtcttgcggtagtaactccgtaactatta

SEQ ID NO: 445633 - DNA, 30 bp, Artificial Sequence
  Synthetic oligonucleotide
catttaggtgcaccgtacgtaagactatta

SEQ ID NO: 445634 - DNA, 30 bp, Artificial Sequence
  Synthetic oligonucleotide
aacggtgtctgaactcgacgtctactatta

SEQ ID NO: 445635 - DNA, 30 bp, Artificial Sequence
  Synthetic oligonucleotide
ctttaacatccgatgcgggtgtgcctatta

SEQ ID NO: 445636 - DNA, 30 bp, Artificial Sequence
  Synthetic oligonucleotide
gagttgaatctgggtgtttacacgctatta

SEQ ID NO: 445637 - DNA, 30 bp, Artificial Sequence
  Synthetic oligonucleotide
ccatggttacggccggagtggccgctatta

SEQ ID NO: 445638 - DNA, 30 bp, Artificial Sequence
  Synthetic oligonucleotide
tgctaggtgacgcgattgtttgcgctatta

SEQ ID NO: 445639 - DNA, 30 bp, Artificial Sequence
  Synthetic oligonucleotide
gcggagaccgggggtacggcgcggctatta

SEQ ID NO: 445640 - DNA, 30 bp, Artificial Sequence
  Synthetic oligonucleotide
cctttatatagtaatcatcttactctatta

SEQ ID NO: 445641 - DNA, 30 bp, Artificial Sequence
  Synthetic oligonucleotide
agagcactaaagtagatttgttctctatta

SEQ ID NO: 445642 - DNA, 30 bp, Artificial Sequence
  Synthetic oligonucleotide
taattgttgaggggggtactaaaagtatta

SEQ ID NO: 445643 - DNA, 30 bp, Artificial Sequence
  Synthetic oligonucleotide
aaggtcttctaatccaagcaccaagtatta

SEQ ID NO: 445644 - DNA, 30 bp, Artificial Sequence
  Synthetic oligonucleotide
tatgccatgctaagaggtccacacgtatta

SEQ ID NO: 445645 - DNA, 30 bp, Artificial Sequence
  Synthetic oligonucleotide
ataactaactttgaataggcgaaggtatta

SEQ ID NO: 445646 - DNA, 30 bp, Artificial Sequence
  Synthetic oligonucleotide
catctccaacggacggggctataggtatta

SEQ ID NO: 445647 - DNA, 30 bp, Artificial Sequence
  Synthetic oligonucleotide
atagggtacatggttagcaaagcggtatta

SEQ ID NO: 445648 - DNA, 30 bp, Artificial Sequence
  Synthetic oligonucleotide
ccagttaatctaagggtttgcggggtatta

SEQ ID NO: 445649 - DNA, 30 bp, Artificial Sequence
  Synthetic oligonucleotide
aaaaatccgatttaaggcctaactgtatta

SEQ ID NO: 445650 - DNA, 30 bp, Artificial Sequence
  Synthetic oligonucleotide
tgtagaaaagtcccgacttcgtttgtatta

SEQ ID NO: 445651 - DNA, 30 bp, Artificial Sequence
  Synthetic oligonucleotide
aaaacagcttcggatactctgctattatta

SEQ ID NO: 445652 - DNA, 30 bp, Artificial Sequence
  Synthetic oligonucleotide
atgcgctgcaaattctcgggcgtattatta

SEQ ID NO: 445653 - DNA, 30 bp, Artificial Sequence
  Synthetic oligonucleotide
atttgacgtaagcgaattgagaacttatta

SEQ ID NO: 445654 - DNA, 30 bp, Artificial Sequence
  Synthetic oligonucleotide
ctgcgtggaagacgcatagtgcccttatta

SEQ ID NO: 445655 - DNA, 30 bp, Artificial Sequence
  Synthetic oligonucleotide
tcactaagtccaagtaacgactccttatta

SEQ ID NO: 445656 - DNA, 30 bp, Artificial Sequence
  Synthetic oligonucleotide
acgcaatcttttatcgtgcgtcagttatta

SEQ ID NO: 445657 - DNA, 30 bp, Artificial Sequence
  Synthetic oligonucleotide
cacgcggacacacgcccacgagcgttatta

SEQ ID NO: 445658 - DNA, 30 bp, Artificial Sequence
  Synthetic oligonucleotide
gcaaaattgactgtggcaacacatttatta

SEQ ID NO: 445659 - DNA, 30 bp, Artificial Sequence
  Synthetic oligonucleotide
aatctatctttcgtattctcgtctttatta

SEQ ID NO: 445660 - DNA, 30 bp, Artificial Sequence
  Synthetic oligonucleotide
aattatgaatgagattcaaaaggtttatta

SEQ ID NO: 445661 - DNA, 30 bp, Artificial Sequence
  Synthetic oligonucleotide
taagatgctttgttcatgagatgtttatta

SEQ ID NO: 445662 - DNA, 30 bp, Artificial Sequence
  Synthetic oligonucleotide
aactctctagcacctccggacattttatta

SEQ ID NO: 445663 - DNA, 30 bp, Artificial Sequence
  Synthetic oligonucleotide
ggcttgcggcttatgtcatgttttttatta

SEQ ID NO: 445664 - DNA, 30 bp, Artificial Sequence
  Synthetic oligonucleotide
taccttaagcccataaaacttgcaaactta

SEQ ID NO: 445665 - DNA, 30 bp, Artificial Sequence
  Synthetic oligonucleotide
taaatgctttggttgtgtctgctaaactta

SEQ ID NO: 445666 - DNA, 30 bp, Artificial Sequence
  Synthetic oligonucleotide
ccacctttctaaatatcattttccaactta

SEQ ID NO: 445667 - DNA, 30 bp, Artificial Sequence
  Synthetic oligonucleotide
agtcccgacaaatatttgcaacgcaactta

SEQ ID NO: 445668 - DNA, 30 bp, Artificial Sequence
  Synthetic oligonucleotide
ttgccgacctggattttgcaagcgaactta

SEQ ID NO: 445669 - DNA, 30 bp, Artificial Sequence
  Synthetic oligonucleotide
ccctacttattagtattgggcgggaactta

SEQ ID NO: 445670 - DNA, 30 bp, Artificial Sequence
  Synthetic oligonucleotide
aggagcttgttcctctacgcggggaactta

SEQ ID NO: 445671 - DNA, 30 bp, Artificial Sequence
  Synthetic oligonucleotide
tagctgatgcatagcggatcgttgaactta

SEQ ID NO: 445672 - DNA, 30 bp, Artificial Sequence
  Synthetic oligonucleotide
aaggctccaaagaagacgtagcataactta

SEQ ID NO: 445673 - DNA, 30 bp, Artificial Sequence
  Synthetic oligonucleotide
ccaacccccgcaggtttaactcctaactta

SEQ ID NO: 445674 - DNA, 30 bp, Artificial Sequence
  Synthetic oligonucleotide
acggactcaagaatcccggacacacactta

SEQ ID NO: 445675 - DNA, 30 bp, Artificial Sequence
  Synthetic oligonucleotide
ggtatgcgctcgggcgaagagcgccactta

SEQ ID NO: 445676 - DNA, 30 bp, Artificial Sequence
  Synthetic oligonucleotide
atataatacctgccgatactaggccactta

SEQ ID NO: 445677 - DNA, 30 bp, Artificial Sequence
  Synthetic oligonucleotide
ttgtttattactctcttttccaatcactta

SEQ ID NO: 445678 - DNA, 30 bp, Artificial Sequence
  Synthetic oligonucleotide
aatagatcgggcatcttgccgagtcactta

SEQ ID NO: 445679 - DNA, 30 bp, Artificial Sequence
  Synthetic oligonucleotide
ttattggccgatggaagaacccttcactta

SEQ ID NO: 445680 - DNA, 30 bp, Artificial Sequence
  Synthetic oligonucleotide
ctagacacgcaaacatctaatcaagactta

SEQ ID NO: 445681 - DNA, 30 bp, Artificial Sequence
  Synthetic oligonucleotide
catagcgaacaatatatgttcccagactta

SEQ ID NO: 445682 - DNA, 30 bp, Artificial Sequence
  Synthetic oligonucleotide
tcaagggctgttacgtatgtttcagactta

SEQ ID NO: 445683 - DNA, 30 bp, Artificial Sequence
  Synthetic oligonucleotide
ctgttttgttggtatcaggtggacgactta

SEQ ID NO: 445684 - DNA, 30 bp, Artificial Sequence
  Synthetic oligonucleotide
ggtgacccggaactatccaagatggactta

SEQ ID NO: 445685 - DNA, 30 bp, Artificial Sequence
  Synthetic oligonucleotide
ggaagctagtttctcacatttccatactta

SEQ ID NO: 445686 - DNA, 30 bp, Artificial Sequence
  Synthetic oligonucleotide
gcccataattcatacactcctctatactta

SEQ ID NO: 445687 - DNA, 30 bp, Artificial Sequence
  Synthetic oligonucleotide
tccgtttaggtgtgttggtaacactactta

SEQ ID NO: 445688 - DNA, 30 bp, Artificial Sequence
  Synthetic oligonucleotide
tcaagtttttgtgatttctggtactactta

SEQ ID NO: 445689 - DNA, 30 bp, Artificial Sequence
  Synthetic oligonucleotide
gccaaagtgtcgggtgtccgtagctactta

SEQ ID NO: 445690 - DNA, 30 bp, Artificial Sequence
  Synthetic oligonucleotide
gtatcgggttgtagaaatacgcgctactta

SEQ ID NO: 445691 - DNA, 30 bp, Artificial Sequence
  Synthetic oligonucleotide
ttataacacctatatttgtcttgcacctta

SEQ ID NO: 445692 - DNA, 30 bp, Artificial Sequence
  Synthetic oligonucleotide
ggaggcagtcttaagcaggcccagacctta

SEQ ID NO: 445693 - DNA, 30 bp, Artificial Sequence
  Synthetic oligonucleotide
tggacgttcgagactccgtcatcgacctta

SEQ ID NO: 445694 - DNA, 30 bp, Artificial Sequence
  Synthetic oligonucleotide
acaccttaagccagtaaggcgttaccctta

SEQ ID NO: 445695 - DNA, 30 bp, Artificial Sequence
  Synthetic oligonucleotide
cctctaacttattaaaagttaactccctta

SEQ ID NO: 445696 - DNA, 30 bp, Artificial Sequence
  Synthetic oligonucleotide
caaaattgccccaagtggtctagtccctta

SEQ ID NO: 445697 - DNA, 30 bp, Artificial Sequence
  Synthetic oligonucleotide
acagcgatcataccaaggccgggtccctta

SEQ ID NO: 445698 - DNA, 30 bp, Artificial Sequence
  Synthetic oligonucleotide
agaggaagtggtcgtccctgatgagcctta

SEQ ID NO: 445699 - DNA, 30 bp, Artificial Sequence
  Synthetic oligonucleotide
tgctctatggaactacattacatagcctta

SEQ ID NO: 445700 - DNA, 30 bp, Artificial Sequence
  Synthetic oligonucleotide
ataacagagtgcgtgcatagcctggcctta

SEQ ID NO: 445701 - DNA, 30 bp, Artificial Sequence
  Synthetic oligonucleotide
tgattgaaagtcggttcaattttggcctta

SEQ ID NO: 445702 - DNA, 30 bp, Artificial Sequence
  Synthetic oligonucleotide
tagtttgtacaaaaatgtagacgtgcctta

SEQ ID NO: 445703 - DNA, 30 bp, Artificial Sequence
  Synthetic oligonucleotide
atccgggaaagtctcgtgtggaaatcctta

SEQ ID NO: 445704 - DNA, 30 bp, Artificial Sequence
  Synthetic oligonucleotide
ttttaggcccatgatttatcgaactcctta

SEQ ID NO: 445705 - DNA, 30 bp, Artificial Sequence
  Synthetic oligonucleotide
ctccatccgtttctataggggcgctcctta

SEQ ID NO: 445706 - DNA, 30 bp, Artificial Sequence
  Synthetic oligonucleotide
tcgcacgaaggacggtcaaaagagtcctta

SEQ ID NO: 445707 - DNA, 30 bp, Artificial Sequence
  Synthetic oligonucleotide
gtgcaaagagtgttttcttgctagtcctta

SEQ ID NO: 445708 - DNA, 30 bp, Artificial Sequence
  Synthetic oligonucleotide
gtcaaaattagttagggcgattagtcctta

SEQ ID NO: 445709 - DNA, 30 bp, Artificial Sequence
  Synthetic oligonucleotide
gagccggtgtcccaagctataccgtcctta

SEQ ID NO: 445710 - DNA, 30 bp, Artificial Sequence
  Synthetic oligonucleotide
ttgcatattttggttcagtcaacttcctta

SEQ ID NO: 445711 - DNA, 30 bp, Artificial Sequence
  Synthetic oligonucleotide
gaaccggagggcatagggttaggttcctta

SEQ ID NO: 445712 - DNA, 30 bp, Artificial Sequence
  Synthetic oligonucleotide
taaaggagaattcgcctagtcggttcctta

SEQ ID NO: 445713 - DNA, 30 bp, Artificial Sequence
  Synthetic oligonucleotide
tctacctcgtttcatttttccgtttcctta

SEQ ID NO: 445714 - DNA, 30 bp, Artificial Sequence
  Synthetic oligonucleotide
cacaatgctgcacgcatttctttttcctta

SEQ ID NO: 445715 - DNA, 30 bp, Artificial Sequence
  Synthetic oligonucleotide
aaatgacaggcctggtgacattgcagctta

SEQ ID NO: 445716 - DNA, 30 bp, Artificial Sequence
  Synthetic oligonucleotide
aattacgtatactggttttttcatagctta

SEQ ID NO: 445717 - DNA, 30 bp, Artificial Sequence
  Synthetic oligonucleotide
tacgtataaactagtttcaaataacgctta

SEQ ID NO: 445718 - DNA, 30 bp, Artificial Sequence
  Synthetic oligonucleotide
agttgatctggatccagggcataacgctta

SEQ ID NO: 445719 - DNA, 30 bp, Artificial Sequence
  Synthetic oligonucleotide
gtgcatatcgcaaaaaatttgctacgctta

SEQ ID NO: 445720 - DNA, 30 bp, Artificial Sequence
  Synthetic oligonucleotide
ggactacctatataggcccatcagcgctta

SEQ ID NO: 445721 - DNA, 30 bp, Artificial Sequence
  Synthetic oligonucleotide
atgctgtttcgcattaatcgcgggcgctta

SEQ ID NO: 445722 - DNA, 30 bp, Artificial Sequence
  Synthetic oligonucleotide
atacacctgtaattttcgattgatcgctta

SEQ ID NO: 445723 - DNA, 30 bp, Artificial Sequence
  Synthetic oligonucleotide
gcgtatggagcacactacgagtctcgctta

SEQ ID NO: 445724 - DNA, 30 bp, Artificial Sequence
  Synthetic oligonucleotide
tttcaccctaccgctatatttgttcgctta

SEQ ID NO: 445725 - DNA, 30 bp, Artificial Sequence
  Synthetic oligonucleotide
ccatgtaacccagcgtggtgacaaggctta

SEQ ID NO: 445726 - DNA, 30 bp, Artificial Sequence
  Synthetic oligonucleotide
cgagtccaccctgggatcccgccaggctta

SEQ ID NO: 445727 - DNA, 30 bp, Artificial Sequence
  Synthetic oligonucleotide
gaagcgaggagtgccattgaaataggctta

SEQ ID NO: 445728 - DNA, 30 bp, Artificial Sequence
  Synthetic oligonucleotide
gcagcacagggaacctgttagaacggctta

SEQ ID NO: 445729 - DNA, 30 bp, Artificial Sequence
  Synthetic oligonucleotide
gcagaagatggttaccggatccacggctta

SEQ ID NO: 445730 - DNA, 30 bp, Artificial Sequence
  Synthetic oligonucleotide
gcctccggttcactgcgcccgaggggctta

SEQ ID NO: 445731 - DNA, 30 bp, Artificial Sequence
  Synthetic oligonucleotide
ctcggacgatcgtcagcccattggggctta

SEQ ID NO: 445732 - DNA, 30 bp, Artificial Sequence
  Synthetic oligonucleotide
ggtgcttggagctatgttcgcaatggctta

SEQ ID NO: 445733 - DNA, 30 bp, Artificial Sequence
  Synthetic oligonucleotide
agagcctgcactaaaacctttcttggctta

SEQ ID NO: 445734 - DNA, 30 bp, Artificial Sequence
  Synthetic oligonucleotide
aaccctggatctcctactgataaatgctta

SEQ ID NO: 445735 - DNA, 30 bp, Artificial Sequence
  Synthetic oligonucleotide
aataacgctcggcagtgtacgtgatgctta

SEQ ID NO: 445736 - DNA, 30 bp, Artificial Sequence
  Synthetic oligonucleotide
cttcaggaagctatatcctatcgctgctta

SEQ ID NO: 445737 - DNA, 30 bp, Artificial Sequence
  Synthetic oligonucleotide
ccgacccgtataattcgaataatttgctta

SEQ ID NO: 445738 - DNA, 30 bp, Artificial Sequence
  Synthetic oligonucleotide
gcgtgacgctaacgacacaaaaaaatctta

SEQ ID NO: 445739 - DNA, 30 bp, Artificial Sequence
  Synthetic oligonucleotide
caagcatattcgacgtattctgggatctta

SEQ ID NO: 445740 - DNA, 29 bp, Artificial Sequence
  Synthetic oligonucleotide
tactatcggccactaatgagtctatctta

SEQ ID NO: 445741 - DNA, 30 bp, Artificial Sequence
  Synthetic oligonucleotide
acatgtgccgcgagccgctactggctctta

SEQ ID NO: 445742 - DNA, 30 bp, Artificial Sequence
  Synthetic oligonucleotide
gagagccagcttcgcagaaaacctctctta

SEQ ID NO: 445743 - DNA, 30 bp, Artificial Sequence
  Synthetic oligonucleotide
ggattgcgtcgcgtcagtttggctctctta

SEQ ID NO: 445744 - DNA, 30 bp, Artificial Sequence
  Synthetic oligonucleotide
aaagtatggtttatcaatgggtgtctctta

SEQ ID NO: 445745 - DNA, 30 bp, Artificial Sequence
  Synthetic oligonucleotide
gagtgagggagatgctagtatcaagtctta

SEQ ID NO: 445746 - DNA, 30 bp, Artificial Sequence
  Synthetic oligonucleotide
tgaacttatagagtaccctcagaagtctta

SEQ ID NO: 445747 - DNA, 30 bp, Artificial Sequence
  Synthetic oligonucleotide
aaagaattttccttaaggcaaacagtctta

SEQ ID NO: 445748 - DNA, 30 bp, Artificial Sequence
  Synthetic oligonucleotide
ggttcattgtcactgggtcgggcagtctta

SEQ ID NO: 445749 - DNA, 30 bp, Artificial Sequence
  Synthetic oligonucleotide
ctcgcaggtgagtatacgcgagacgtctta

SEQ ID NO: 445750 - DNA, 30 bp, Artificial Sequence
  Synthetic oligonucleotide
accagcatccaggcagggctaaaggtctta

SEQ ID NO: 445751 - DNA, 30 bp, Artificial Sequence
  Synthetic oligonucleotide
gggccactttcatggtttgtggcggtctta

SEQ ID NO: 445752 - DNA, 30 bp, Artificial Sequence
  Synthetic oligonucleotide
ccctcgcctttgatagtgccaatggtctta

SEQ ID NO: 445753 - DNA, 30 bp, Artificial Sequence
  Synthetic oligonucleotide
gagcgaaaagtcccgggtgcagtggtctta

SEQ ID NO: 445754 - DNA, 30 bp, Artificial Sequence
  Synthetic oligonucleotide
aacagactttctgaaggagcggatgtctta

SEQ ID NO: 445755 - DNA, 30 bp, Artificial Sequence
  Synthetic oligonucleotide
caagaagtcccgattactatctatgtctta

SEQ ID NO: 445756 - DNA, 30 bp, Artificial Sequence
  Synthetic oligonucleotide
catacatccaatgtaagtgtaggattctta

SEQ ID NO: 445757 - DNA, 30 bp, Artificial Sequence
  Synthetic oligonucleotide
aggaaccagcactctaatcgttgattctta

SEQ ID NO: 445758 - DNA, 30 bp, Artificial Sequence
  Synthetic oligonucleotide
attgtcataattattgcccgtacgttctta

SEQ ID NO: 445759 - DNA, 30 bp, Artificial Sequence
  Synthetic oligonucleotide
taggtgccgaggaccgtcgaacggttctta

SEQ ID NO: 445760 - DNA, 30 bp, Artificial Sequence
  Synthetic oligonucleotide
tctataaggacccataagactcctttctta

SEQ ID NO: 445761 - DNA, 30 bp, Artificial Sequence
  Synthetic oligonucleotide
tagccaatgaagtcgagtatacaaaagtta

SEQ ID NO: 445762 - DNA, 30 bp, Artificial Sequence
  Synthetic oligonucleotide
agtcccggcctaggttaggtgccaaagtta

SEQ ID NO: 445763 - DNA, 30 bp, Artificial Sequence
  Synthetic oligonucleotide
ttcggtataagggctgtgttgtgaaagtta

SEQ ID NO: 445764 - DNA, 30 bp, Artificial Sequence
  Synthetic oligonucleotide
ctcatgcggccaatcatgagaataaagtta

SEQ ID NO: 445765 - DNA, 30 bp, Artificial Sequence
  Synthetic oligonucleotide
gtactcacctctgacctgtatataaagtta

SEQ ID NO: 445766 - DNA, 30 bp, Artificial Sequence
  Synthetic oligonucleotide
ggtgaggagatgctcacacattacaagtta

SEQ ID NO: 445767 - DNA, 30 bp, Artificial Sequence
  Synthetic oligonucleotide
agaataagtatagaatgtgacagcaagtta

SEQ ID NO: 445768 - DNA, 30 bp, Artificial Sequence
  Synthetic oligonucleotide
agtgaatgaatctttgctgggaggaagtta

SEQ ID NO: 445769 - DNA, 30 bp, Artificial Sequence
  Synthetic oligonucleotide
tcctgggatgtagtagcttctcataagtta

SEQ ID NO: 445770 - DNA, 30 bp, Artificial Sequence
  Synthetic oligonucleotide
ttcttacctgacaggataactattaagtta

SEQ ID NO: 445771 - DNA, 30 bp, Artificial Sequence
  Synthetic oligonucleotide
attgctgagcaacccgaacttgttaagtta

SEQ ID NO: 445772 - DNA, 30 bp, Artificial Sequence
  Synthetic oligonucleotide
aaatcctcaccttagggtttagaacagtta

SEQ ID NO: 445773 - DNA, 30 bp, Artificial Sequence
  Synthetic oligonucleotide
agaagaagagacgcgtgacgcacacagtta

SEQ ID NO: 445774 - DNA, 30 bp, Artificial Sequence
  Synthetic oligonucleotide
ccctactgacaagcggtgcggcaccagtta

SEQ ID NO: 445775 - DNA, 30 bp, Artificial Sequence
  Synthetic oligonucleotide
caaaatcgcagttattcaactgcccagtta

SEQ ID NO: 445776 - DNA, 30 bp, Artificial Sequence
  Synthetic oligonucleotide
ttgcccaatagtttgcacactcggcagtta

SEQ ID NO: 445777 - DNA, 30 bp, Artificial Sequence
  Synthetic oligonucleotide
ctttaggagcgtgtgcggtattatcagtta

SEQ ID NO: 445778 - DNA, 30 bp, Artificial Sequence
  Synthetic oligonucleotide
gcctgatagatgctggaccgggctcagtta

SEQ ID NO: 445779 - DNA, 30 bp, Artificial Sequence
  Synthetic oligonucleotide
ggtgtgcctttctttcgtgggtctcagtta

SEQ ID NO: 445780 - DNA, 30 bp, Artificial Sequence
  Synthetic oligonucleotide
attcgggactgtcataaatacagtcagtta

SEQ ID NO: 445781 - DNA, 30 bp, Artificial Sequence
  Synthetic oligonucleotide
tgcatcatatactctctcggctgtcagtta

SEQ ID NO: 445782 - DNA, 30 bp, Artificial Sequence
  Synthetic oligonucleotide
cgcgctggcccattagcagctcaagagtta

SEQ ID NO: 445783 - DNA, 30 bp, Artificial Sequence
  Synthetic oligonucleotide
gttgcaatactagactaacagtcagagtta

SEQ ID NO: 445784 - DNA, 30 bp, Artificial Sequence
  Synthetic oligonucleotide
tgagatatggttttccaagatcgatagtta

SEQ ID NO: 445785 - DNA, 30 bp, Artificial Sequence
  Synthetic oligonucleotide
gagaaaatcgttaagtattaatgatagtta

SEQ ID NO: 445786 - DNA, 30 bp, Artificial Sequence
  Synthetic oligonucleotide
cagccccacgcccctgggggtatatagtta

SEQ ID NO: 445787 - DNA, 30 bp, Artificial Sequence
  Synthetic oligonucleotide
taaatgacacgcatagtgtgcttatagtta

SEQ ID NO: 445788 - DNA, 30 bp, Artificial Sequence
  Synthetic oligonucleotide
tatcacttgcataggcccattagctagtta

SEQ ID NO: 445789 - DNA, 30 bp, Artificial Sequence
  Synthetic oligonucleotide
cactctcgcgctacccggcagccgtagtta

SEQ ID NO: 445790 - DNA, 30 bp, Artificial Sequence
  Synthetic oligonucleotide
cctctcccaccctagcaatgctcgtagtta

SEQ ID NO: 445791 - DNA, 30 bp, Artificial Sequence
  Synthetic oligonucleotide
ctcgctacacttgggtcggcagggtagtta

SEQ ID NO: 445792 - DNA, 30 bp, Artificial Sequence
  Synthetic oligonucleotide
tgctaacactctacttaagataattagtta

SEQ ID NO: 445793 - DNA, 30 bp, Artificial Sequence
  Synthetic oligonucleotide
atgccaccgcatgataaagcgtcttagtta

SEQ ID NO: 445794 - DNA, 30 bp, Artificial Sequence
  Synthetic oligonucleotide
gggtttgagaccggcagctccgtttagtta

SEQ ID NO: 445795 - DNA, 30 bp, Artificial Sequence
  Synthetic oligonucleotide
ccccctagtgcgtgtcatagtgaaacgtta

SEQ ID NO: 445796 - DNA, 30 bp, Artificial Sequence
  Synthetic oligonucleotide
ttctttgtgttatatcccgaaggaacgtta

SEQ ID NO: 445797 - DNA, 30 bp, Artificial Sequence
  Synthetic oligonucleotide
agatcgtggaacttttttctagccacgtta

SEQ ID NO: 445798 - DNA, 30 bp, Artificial Sequence
  Synthetic oligonucleotide
cttttgagggagtccctcaaccagacgtta

SEQ ID NO: 445799 - DNA, 30 bp, Artificial Sequence
  Synthetic oligonucleotide
tcaaagcaggtcagatccctcgcgacgtta

SEQ ID NO: 445800 - DNA, 30 bp, Artificial Sequence
  Synthetic oligonucleotide
acttgggttgtccatataggccggacgtta

SEQ ID NO: 445801 - DNA, 30 bp, Artificial Sequence
  Synthetic oligonucleotide
attacggcgatgtagctaacccgtacgtta

SEQ ID NO: 445802 - DNA, 30 bp, Artificial Sequence
  Synthetic oligonucleotide
gcggaaacgtggtctggacactttacgtta

SEQ ID NO: 445803 - DNA, 30 bp, Artificial Sequence
  Synthetic oligonucleotide
tcaagagaagtgcgcagcgattttacgtta

SEQ ID NO: 445804 - DNA, 30 bp, Artificial Sequence
  Synthetic oligonucleotide
ccttccattctggccgtcatccgaccgtta

SEQ ID NO: 445805 - DNA, 30 bp, Artificial Sequence
  Synthetic oligonucleotide
tatagggtcaaaattgaccaatggccgtta

SEQ ID NO: 445806 - DNA, 30 bp, Artificial Sequence
  Synthetic oligonucleotide
cctcttacgaaggcaacgcggcctccgtta

SEQ ID NO: 445807 - DNA, 30 bp, Artificial Sequence
  Synthetic oligonucleotide
ggtaccagttcgtaaagaacgtgtccgtta

SEQ ID NO: 445808 - DNA, 30 bp, Artificial Sequence
  Synthetic oligonucleotide
ggactagattagaggttaggctaagcgtta

SEQ ID NO: 445809 - DNA, 30 bp, Artificial Sequence
  Synthetic oligonucleotide
gagttaacgagtcgcgggtgatgagcgtta

SEQ ID NO: 445810 - DNA, 30 bp, Artificial Sequence
  Synthetic oligonucleotide
cagggctattccatttctactctagcgtta

SEQ ID NO: 445811 - DNA, 30 bp, Artificial Sequence
  Synthetic oligonucleotide
gtttgaatctaagaaattctagtagcgtta

SEQ ID NO: 445812 - DNA, 30 bp, Artificial Sequence
  Synthetic oligonucleotide
gggactttcccgaatcgctcagacgcgtta

SEQ ID NO: 445813 - DNA, 30 bp, Artificial Sequence
  Synthetic oligonucleotide
tactctatgttcaaagttccgcccgcgtta

SEQ ID NO: 445814 - DNA, 30 bp, Artificial Sequence
  Synthetic oligonucleotide
gccagtgttacggcggaaaaaacggcgtta

SEQ ID NO: 445815 - DNA, 30 bp, Artificial Sequence
  Synthetic oligonucleotide
acatgtgaaggctgtacaattccggcgtta

SEQ ID NO: 445816 - DNA, 30 bp, Artificial Sequence
  Synthetic oligonucleotide
ttctaatggttcgtgggtcgtggggcgtta

SEQ ID NO: 445817 - DNA, 30 bp, Artificial Sequence
  Synthetic oligonucleotide
accgaccgaagaggtcggcagtctgcgtta

SEQ ID NO: 445818 - DNA, 30 bp, Artificial Sequence
  Synthetic oligonucleotide
cttaatcctttcaccctcaagcaatcgtta

SEQ ID NO: 445819 - DNA, 30 bp, Artificial Sequence
  Synthetic oligonucleotide
attaagtgatgggctttatacgaatcgtta

SEQ ID NO: 445820 - DNA, 30 bp, Artificial Sequence
  Synthetic oligonucleotide
ttatgatgtcaggtaatggtctactcgtta

SEQ ID NO: 445821 - DNA, 30 bp, Artificial Sequence
  Synthetic oligonucleotide
ggaaaccctatgcgctcttccatctcgtta

SEQ ID NO: 445822 - DNA, 30 bp, Artificial Sequence
  Synthetic oligonucleotide
gaacaccatctgttttgaaaagattcgtta

SEQ ID NO: 445823 - DNA, 30 bp, Artificial Sequence
  Synthetic oligonucleotide
tgttctgggccctcgcccgaagcttcgtta

SEQ ID NO: 445824 - DNA, 30 bp, Artificial Sequence
  Synthetic oligonucleotide
atatggctagcgggcttacatgtttcgtta

SEQ ID NO: 445825 - DNA, 30 bp, Artificial Sequence
  Synthetic oligonucleotide
attctctgcgggcaactatgggacaggtta

SEQ ID NO: 445826 - DNA, 30 bp, Artificial Sequence
  Synthetic oligonucleotide
tgaaaaggggtctcgacggtttacaggtta

SEQ ID NO: 445827 - DNA, 30 bp, Artificial Sequence
  Synthetic oligonucleotide
agctttatagggcactacggttccaggtta

SEQ ID NO: 445828 - DNA, 30 bp, Artificial Sequence
  Synthetic oligonucleotide
ccatacaaccccagcaacggacgcaggtta

SEQ ID NO: 445829 - DNA, 30 bp, Artificial Sequence
  Synthetic oligonucleotide
tctgcgcctagaccctatggtaagaggtta

SEQ ID NO: 445830 - DNA, 30 bp, Artificial Sequence
  Synthetic oligonucleotide
ctctgcgactcaagtcaccatttgaggtta

SEQ ID NO: 445831 - DNA, 30 bp, Artificial Sequence
  Synthetic oligonucleotide
gttttctactgcacataggcaaagcggtta

SEQ ID NO: 445832 - DNA, 30 bp, Artificial Sequence
  Synthetic oligonucleotide
ccccgtgtgcattatagaattctgcggtta

SEQ ID NO: 445833 - DNA, 30 bp, Artificial Sequence
  Synthetic oligonucleotide
aaatactcttgagttgatgatttgcggtta

SEQ ID NO: 445834 - DNA, 30 bp, Artificial Sequence
  Synthetic oligonucleotide
cttcataatcaatcaagtcttaatcggtta

SEQ ID NO: 445835 - DNA, 30 bp, Artificial Sequence
  Synthetic oligonucleotide
tactgtcgcgcatcgcacactaaagggtta

SEQ ID NO: 445836 - DNA, 30 bp, Artificial Sequence
  Synthetic oligonucleotide
gaaatatatttagaaggatagtgagggtta

SEQ ID NO: 445837 - DNA, 30 bp, Artificial Sequence
  Synthetic oligonucleotide
taaggaagcacgcaccccatgcgggggtta

SEQ ID NO: 445838 - DNA, 30 bp, Artificial Sequence
  Synthetic oligonucleotide
acataggactttggcccgccaatggggtta

SEQ ID NO: 445839 - DNA, 30 bp, Artificial Sequence
  Synthetic oligonucleotide
atctggtacacaggcgttggaaatgggtta

SEQ ID NO: 445840 - DNA, 30 bp, Artificial Sequence
  Synthetic oligonucleotide
gcataacaagagcatgatgcgagtgggtta

SEQ ID NO: 445841 - DNA, 30 bp, Artificial Sequence
  Synthetic oligonucleotide
gtagtctgcaaccgggataatatatggtta

SEQ ID NO: 445842 - DNA, 30 bp, Artificial Sequence
  Synthetic oligonucleotide
ttaaggtgtaatacttagtcccgctggtta

SEQ ID NO: 445843 - DNA, 30 bp, Artificial Sequence
  Synthetic oligonucleotide
ttaatgcaaaaattatgtaacgggtggtta

SEQ ID NO: 445844 - DNA, 30 bp, Artificial Sequence
  Synthetic oligonucleotide
atgagtccctgggtaatgacaggttggtta

SEQ ID NO: 445845 - DNA, 30 bp, Artificial Sequence
  Synthetic oligonucleotide
tggtaacagcagatctacgataaaatgtta

SEQ ID NO: 445846 - DNA, 30 bp, Artificial Sequence
  Synthetic oligonucleotide
ctctagcatacgggtttatgcgggatgtta

SEQ ID NO: 445847 - DNA, 30 bp, Artificial Sequence
  Synthetic oligonucleotide
ctaccttcacttcgggcctgttggatgtta

SEQ ID NO: 445848 - DNA, 30 bp, Artificial Sequence
  Synthetic oligonucleotide
ctagcacgcatatttataagttatatgtta

SEQ ID NO: 445849 - DNA, 30 bp, Artificial Sequence
  Synthetic oligonucleotide
tttagcgctatactacggacggctatgtta

SEQ ID NO: 445850 - DNA, 30 bp, Artificial Sequence
  Synthetic oligonucleotide
gattgcaattactcaacaatctgcctgtta

SEQ ID NO: 445851 - DNA, 30 bp, Artificial Sequence
  Synthetic oligonucleotide
cgcaactaacccaaccgcaacccgctgtta

SEQ ID NO: 445852 - DNA, 30 bp, Artificial Sequence
  Synthetic oligonucleotide
ctcgccatttcaacacccctttggctgtta

SEQ ID NO: 445853 - DNA, 29 bp, Artificial Sequence
  Synthetic oligonucleotide
cgcaggctaacgcgtggatccctctgtta

SEQ ID NO: 445854 - DNA, 30 bp, Artificial Sequence
  Synthetic oligonucleotide
gggattcgggaagatcgcgttcttctgtta

SEQ ID NO: 445855 - DNA, 30 bp, Artificial Sequence
  Synthetic oligonucleotide
tccaaacacttgagaatttggatagtgtta

SEQ ID NO: 445856 - DNA, 30 bp, Artificial Sequence
  Synthetic oligonucleotide
aacccttgtcggtatggatctacggtgtta

SEQ ID NO: 445857 - DNA, 30 bp, Artificial Sequence
  Synthetic oligonucleotide
gggccacgtgtcaaattttctttggtgtta

SEQ ID NO: 445858 - DNA, 30 bp, Artificial Sequence
  Synthetic oligonucleotide
caattggccctacaacagggctaattgtta

SEQ ID NO: 445859 - DNA, 30 bp, Artificial Sequence
  Synthetic oligonucleotide
ggagttagaatggttctcatgaacttgtta

SEQ ID NO: 445860 - DNA, 30 bp, Artificial Sequence
  Synthetic oligonucleotide
ctccggcaaaaaactcatagggacttgtta

SEQ ID NO: 445861 - DNA, 30 bp, Artificial Sequence
  Synthetic oligonucleotide
aattcgccacggatgtgcctggtcttgtta

SEQ ID NO: 445862 - DNA, 30 bp, Artificial Sequence
  Synthetic oligonucleotide
gttggaacctttgactaatcgaagttgtta

SEQ ID NO: 445863 - DNA, 30 bp, Artificial Sequence
  Synthetic oligonucleotide
tgatttgagcgatttctgtcgaagttgtta

SEQ ID NO: 445864 - DNA, 30 bp, Artificial Sequence
  Synthetic oligonucleotide
acaaccctacgaggcacaggttagttgtta

SEQ ID NO: 445865 - DNA, 30 bp, Artificial Sequence
  Synthetic oligonucleotide
acactacctcgcgaggtaaacccgttgtta

SEQ ID NO: 445866 - DNA, 30 bp, Artificial Sequence
  Synthetic oligonucleotide
tttactaaagaatagctggtcaggttgtta

SEQ ID NO: 445867 - DNA, 30 bp, Artificial Sequence
  Synthetic oligonucleotide
gttatgacaaaatattattactggttgtta

SEQ ID NO: 445868 - DNA, 30 bp, Artificial Sequence
  Synthetic oligonucleotide
caatttggagacctttaatctgctttgtta

SEQ ID NO: 445869 - DNA, 30 bp, Artificial Sequence
  Synthetic oligonucleotide
cgtagctatctcaagacccgtgctttgtta

SEQ ID NO: 445870 - DNA, 30 bp, Artificial Sequence
  Synthetic oligonucleotide
acgcgcgccgctgcatcctggtaaaattta

SEQ ID NO: 445871 - DNA, 30 bp, Artificial Sequence
  Synthetic oligonucleotide
atctaggacttcttccattgttaaaattta

SEQ ID NO: 445872 - DNA, 30 bp, Artificial Sequence
  Synthetic oligonucleotide
tatatggggggacggaacatggcaaattta

SEQ ID NO: 445873 - DNA, 30 bp, Artificial Sequence
  Synthetic oligonucleotide
gccagagtgcttatcataaatggaaattta

SEQ ID NO: 445874 - DNA, 30 bp, Artificial Sequence
  Synthetic oligonucleotide
gacctggctttattcaactatgtaaattta

SEQ ID NO: 445875 - DNA, 30 bp, Artificial Sequence
  Synthetic oligonucleotide
aaacaagtgcctagctgcattttaaattta

SEQ ID NO: 445876 - DNA, 30 bp, Artificial Sequence
  Synthetic oligonucleotide
actttcattcgcctaatacgacacaattta

SEQ ID NO: 445877 - DNA, 30 bp, Artificial Sequence
  Synthetic oligonucleotide
gcaatcgtaggtgaatcggagagcaattta

SEQ ID NO: 445878 - DNA, 29 bp, Artificial Sequence
  Synthetic oligonucleotide
ccatgtgcactctcgtatcgcagaattta

SEQ ID NO: 445879 - DNA, 30 bp, Artificial Sequence
  Synthetic oligonucleotide
caatatgcatgagaggcgttagagaattta

SEQ ID NO: 445880 - DNA, 30 bp, Artificial Sequence
  Synthetic oligonucleotide
tctattcctgagcggcaagttattaattta

SEQ ID NO: 445881 - DNA, 30 bp, Artificial Sequence
  Synthetic oligonucleotide
catcctgtggccgcactgtcccaacattta

SEQ ID NO: 445882 - DNA, 30 bp, Artificial Sequence
  Synthetic oligonucleotide
caggatagccccacaaaccggttacattta

SEQ ID NO: 445883 - DNA, 30 bp, Artificial Sequence
  Synthetic oligonucleotide
aggtcttagtgtactttcgaaaaccattta

SEQ ID NO: 445884 - DNA, 30 bp, Artificial Sequence
  Synthetic oligonucleotide
agatggaacggctgcagcacgaaccattta

SEQ ID NO: 445885 - DNA, 30 bp, Artificial Sequence
  Synthetic oligonucleotide
atctgcatctccgcctaatacctccattta

SEQ ID NO: 445886 - DNA, 30 bp, Artificial Sequence
  Synthetic oligonucleotide
agatgtagtacgcattctcacttccattta

SEQ ID NO: 445887 - DNA, 30 bp, Artificial Sequence
  Synthetic oligonucleotide
tagtctggctcgtagtgtaaaaagcattta

SEQ ID NO: 445888 - DNA, 30 bp, Artificial Sequence
  Synthetic oligonucleotide
tgtgtattgttttcctagggacagcattta

SEQ ID NO: 445889 - DNA, 30 bp, Artificial Sequence
  Synthetic oligonucleotide
cagatcccacacctcacgcaaaggcattta

SEQ ID NO: 445890 - DNA, 30 bp, Artificial Sequence
  Synthetic oligonucleotide
ctatggcggcgtgggatagctcggcattta

SEQ ID NO: 445891 - DNA, 30 bp, Artificial Sequence
  Synthetic oligonucleotide
gtcaggttgtgtcagcagatagggcattta

SEQ ID NO: 445892 - DNA, 30 bp, Artificial Sequence
  Synthetic oligonucleotide
gcgtattagggagtagaacatgggcattta

SEQ ID NO: 445893 - DNA, 30 bp, Artificial Sequence
  Synthetic oligonucleotide
gcccccggccttcttgtggttgggcattta

SEQ ID NO: 445894 - DNA, 30 bp, Artificial Sequence
  Synthetic oligonucleotide
actgaacggactgatcattggaatcattta

SEQ ID NO: 445895 - DNA, 30 bp, Artificial Sequence
  Synthetic oligonucleotide
atccctggatgggatcatcgtattcattta

SEQ ID NO: 445896 - DNA, 30 bp, Artificial Sequence
  Synthetic oligonucleotide
tacttgcacagggcgtggcattcagattta

SEQ ID NO: 445897 - DNA, 30 bp, Artificial Sequence
  Synthetic oligonucleotide
tgaagtagtctggacggcagattagattta

SEQ ID NO: 445898 - DNA, 30 bp, Artificial Sequence
  Synthetic oligonucleotide
tatcatgaagtccagctgccatacgattta

SEQ ID NO: 445899 - DNA, 30 bp, Artificial Sequence
  Synthetic oligonucleotide
atcccagacgcatattcggagagcgattta

SEQ ID NO: 445900 - DNA, 30 bp, Artificial Sequence
  Synthetic oligonucleotide
gatccttagggaggatcgacgagcgattta

SEQ ID NO: 445901 - DNA, 30 bp, Artificial Sequence
  Synthetic oligonucleotide
aagtgctcctagtatggtaagccggattta

SEQ ID NO: 445902 - DNA, 30 bp, Artificial Sequence
  Synthetic oligonucleotide
gacactcatcaagccgagggtcatgattta

SEQ ID NO: 445903 - DNA, 30 bp, Artificial Sequence
  Synthetic oligonucleotide
gtagagggcggaatcttgcccgatgattta

SEQ ID NO: 445904 - DNA, 30 bp, Artificial Sequence
  Synthetic oligonucleotide
ttctgtcgacactcataagcgtttgattta

SEQ ID NO: 445905 - DNA, 30 bp, Artificial Sequence
  Synthetic oligonucleotide
tgtcaaccaatgtgacgcaataaatattta

SEQ ID NO: 445906 - DNA, 30 bp, Artificial Sequence
  Synthetic oligonucleotide
agcctttggtttaggagtgccacatattta

SEQ ID NO: 445907 - DNA, 30 bp, Artificial Sequence
  Synthetic oligonucleotide
atatgtcgcttatgtcacgcgtcatattta

SEQ ID NO: 445908 - DNA, 30 bp, Artificial Sequence
  Synthetic oligonucleotide
cagccttttaaatattcttccggatattta

SEQ ID NO: 445909 - DNA, 30 bp, Artificial Sequence
  Synthetic oligonucleotide
aacgtttgtttcggacactcaatatattta

SEQ ID NO: 445910 - DNA, 30 bp, Artificial Sequence
  Synthetic oligonucleotide
cgcctagtaatgtataacatcacctattta

SEQ ID NO: 445911 - DNA, 30 bp, Artificial Sequence
  Synthetic oligonucleotide
ggggtatatcataagatccccttctattta

SEQ ID NO: 445912 - DNA, 30 bp, Artificial Sequence
  Synthetic oligonucleotide
cacgcttctcaaatcccgctgacgtattta

SEQ ID NO: 445913 - DNA, 30 bp, Artificial Sequence
  Synthetic oligonucleotide
acttttcctcaccgtgttacagcgtattta

SEQ ID NO: 445914 - DNA, 30 bp, Artificial Sequence
  Synthetic oligonucleotide
gtacctaaccacctcctgtctgcgtattta

SEQ ID NO: 445915 - DNA, 30 bp, Artificial Sequence
  Synthetic oligonucleotide
cctcgtccaatgcgttagttttcgtattta

SEQ ID NO: 445916 - DNA, 30 bp, Artificial Sequence
  Synthetic oligonucleotide
tggttccatgctcggtaaaggaggtattta

SEQ ID NO: 445917 - DNA, 30 bp, Artificial Sequence
  Synthetic oligonucleotide
ggccgggtgttagtttcgttaggttattta

SEQ ID NO: 445918 - DNA, 30 bp, Artificial Sequence
  Synthetic oligonucleotide
gcttagaattagggcgacctaaaaacttta

SEQ ID NO: 445919 - DNA, 30 bp, Artificial Sequence
  Synthetic oligonucleotide
gagcaccaatcgcgcttagggacaacttta

SEQ ID NO: 445920 - DNA, 30 bp, Artificial Sequence
  Synthetic oligonucleotide
tcaagacggagttaggtcatctagacttta

SEQ ID NO: 445921 - DNA, 30 bp, Artificial Sequence
  Synthetic oligonucleotide
tttcagggaaattgaaaaaggtcgacttta

SEQ ID NO: 445922 - DNA, 30 bp, Artificial Sequence
  Synthetic oligonucleotide
aatcaatatatttggagggagctgacttta

SEQ ID NO: 445923 - DNA, 30 bp, Artificial Sequence
  Synthetic oligonucleotide
tcagcccactcgggccggtctctgacttta

SEQ ID NO: 445924 - DNA, 30 bp, Artificial Sequence
  Synthetic oligonucleotide
gactaaagatcgagaatgtcggatacttta

SEQ ID NO: 445925 - DNA, 30 bp, Artificial Sequence
  Synthetic oligonucleotide
agtcttctgacatcaaaagcggctacttta

SEQ ID NO: 445926 - DNA, 30 bp, Artificial Sequence
  Synthetic oligonucleotide
caacgcaatttaccgcacttggctacttta

SEQ ID NO: 445927 - DNA, 30 bp, Artificial Sequence
  Synthetic oligonucleotide
tctacccagaaatgttaagcaagtacttta

SEQ ID NO: 445928 - DNA, 35 bp, Artificial Sequence
  Synthetic oligonucleotide
ggcatggattatgtataccgtaatatcgtacttta

SEQ ID NO: 445929 - DNA, 30 bp, Artificial Sequence
  Synthetic oligonucleotide
tcgccatatccgcgccaccagtgtacttta

SEQ ID NO: 445930 - DNA, 30 bp, Artificial Sequence
  Synthetic oligonucleotide
cgttctggaatactgacacggattacttta

SEQ ID NO: 445931 - DNA, 30 bp, Artificial Sequence
  Synthetic oligonucleotide
ggtagacttgggcgatgttccgcaccttta

SEQ ID NO: 445932 - DNA, 30 bp, Artificial Sequence
  Synthetic oligonucleotide
gagcaaatcttgatttcggggttaccttta

SEQ ID NO: 445933 - DNA, 30 bp, Artificial Sequence
  Synthetic oligonucleotide
ttgcgggctctagcgaaatggcacccttta

SEQ ID NO: 445934 - DNA, 30 bp, Artificial Sequence
  Synthetic oligonucleotide
atagtcgcttagcagtgtagcatcccttta

SEQ ID NO: 445935 - DNA, 30 bp, Artificial Sequence
  Synthetic oligonucleotide
tgtcagtccgactacactgtgtagccttta

SEQ ID NO: 445936 - DNA, 30 bp, Artificial Sequence
  Synthetic oligonucleotide
tcaggctgaaagaaatcaggaccgccttta

SEQ ID NO: 445937 - DNA, 30 bp, Artificial Sequence
  Synthetic oligonucleotide
ggcctaggcggaccgccgaacttgccttta

SEQ ID NO: 445938 - DNA, 30 bp, Artificial Sequence
  Synthetic oligonucleotide
ggtactcgcgaatagtaggcgcctccttta

SEQ ID NO: 445939 - DNA, 30 bp, Artificial Sequence
  Synthetic oligonucleotide
cgatgactttggggaatcatgaaagcttta

SEQ ID NO: 445940 - DNA, 30 bp, Artificial Sequence
  Synthetic oligonucleotide
agactaatagtagtattgttggaagcttta

SEQ ID NO: 445941 - DNA, 30 bp, Artificial Sequence
  Synthetic oligonucleotide
gaagtatgtatacgtgggtatagtgcttta

SEQ ID NO: 445942 - DNA, 30 bp, Artificial Sequence
  Synthetic oligonucleotide
cattgagggtagcaacccggtcaatcttta

SEQ ID NO: 445943 - DNA, 30 bp, Artificial Sequence
  Synthetic oligonucleotide
gcgtgataaacggcagcagttgaatcttta

SEQ ID NO: 445944 - DNA, 30 bp, Artificial Sequence
  Synthetic oligonucleotide
tcacgtttaatattcagtttaagatcttta

SEQ ID NO: 445945 - DNA, 30 bp, Artificial Sequence
  Synthetic oligonucleotide
aagttctattagaataatccgtgatcttta

SEQ ID NO: 445946 - DNA, 30 bp, Artificial Sequence
  Synthetic oligonucleotide
gcatgcacctaacacaagatcttatcttta

SEQ ID NO: 445947 - DNA, 30 bp, Artificial Sequence
  Synthetic oligonucleotide
gacggcttaatcttcacggcaggctcttta

SEQ ID NO: 445948 - DNA, 30 bp, Artificial Sequence
  Synthetic oligonucleotide
tcagcttagcgacgctgttgtaagtcttta

SEQ ID NO: 445949 - DNA, 30 bp, Artificial Sequence
  Synthetic oligonucleotide
ttcaacaatagagttaatcgggattcttta

SEQ ID NO: 445950 - DNA, 30 bp, Artificial Sequence
  Synthetic oligonucleotide
aacaggattcaccttggtatatattcttta

SEQ ID NO: 445951 - DNA, 30 bp, Artificial Sequence
  Synthetic oligonucleotide
agagaggttatttgttagcgcccttcttta

SEQ ID NO: 445952 - DNA, 30 bp, Artificial Sequence
  Synthetic oligonucleotide
cggggtggtcgtatcagaccttcttcttta

SEQ ID NO: 445953 - DNA, 30 bp, Artificial Sequence
  Synthetic oligonucleotide
ctatgatttactgcttctttctgttcttta

SEQ ID NO: 445954 - DNA, 30 bp, Artificial Sequence
  Synthetic oligonucleotide
tagtaaccgatagtcgggtactcaagttta

SEQ ID NO: 445955 - DNA, 30 bp, Artificial Sequence
  Synthetic oligonucleotide
agcgacgcgagacccatatgacgaagttta

SEQ ID NO: 445956 - DNA, 30 bp, Artificial Sequence
  Synthetic oligonucleotide
gctatttatttattccaactatgaagttta

SEQ ID NO: 445957 - DNA, 30 bp, Artificial Sequence
  Synthetic oligonucleotide
cgtgatggataagggcgatacataagttta

SEQ ID NO: 445958 - DNA, 30 bp, Artificial Sequence
  Synthetic oligonucleotide
cttgtattattaactcgtctctacagttta

SEQ ID NO: 445959 - DNA, 30 bp, Artificial Sequence
  Synthetic oligonucleotide
gcctaatatgtggactttcaagccagttta

SEQ ID NO: 445960 - DNA, 30 bp, Artificial Sequence
  Synthetic oligonucleotide
aacaattgcggtgtcggcaccgccagttta

SEQ ID NO: 445961 - DNA, 30 bp, Artificial Sequence
  Synthetic oligonucleotide
tctccaattgtgcaggtaaacggcagttta

SEQ ID NO: 445962 - DNA, 30 bp, Artificial Sequence
  Synthetic oligonucleotide
gtttcgtgggaccagcggcggaagagttta

SEQ ID NO: 445963 - DNA, 30 bp, Artificial Sequence
  Synthetic oligonucleotide
tcagggtttctctgccattctcagagttta

SEQ ID NO: 445964 - DNA, 30 bp, Artificial Sequence
  Synthetic oligonucleotide
acaccggtaggggaattctaagttagttta

SEQ ID NO: 445965 - DNA, 30 bp, Artificial Sequence
  Synthetic oligonucleotide
tctaagggtcatataattgttaaacgttta

SEQ ID NO: 445966 - DNA, 30 bp, Artificial Sequence
  Synthetic oligonucleotide
tcaattatgcggcatcgagaataacgttta

SEQ ID NO: 445967 - DNA, 30 bp, Artificial Sequence
  Synthetic oligonucleotide
gatgcgttcattcagatccacccacgttta

SEQ ID NO: 445968 - DNA, 30 bp, Artificial Sequence
  Synthetic oligonucleotide
ggggttggttgtgaagaagtctgacgttta

SEQ ID NO: 445969 - DNA, 30 bp, Artificial Sequence
  Synthetic oligonucleotide
gaaccaagtgtcgtacggcaccgccgttta

SEQ ID NO: 445970 - DNA, 30 bp, Artificial Sequence
  Synthetic oligonucleotide
ttcgggcctactcgatatattggccgttta

SEQ ID NO: 445971 - DNA, 31 bp, Artificial Sequence
  Synthetic oligonucleotide
gtctcggtacaaaagcgacaaactccgttta

SEQ ID NO: 445972 - DNA, 30 bp, Artificial Sequence
  Synthetic oligonucleotide
gaattctgcctgcaaagagcggaaggttta

SEQ ID NO: 445973 - DNA, 30 bp, Artificial Sequence
  Synthetic oligonucleotide
acctcataatgttgatgcttaccaggttta

SEQ ID NO: 445974 - DNA, 30 bp, Artificial Sequence
  Synthetic oligonucleotide
gtaagttacatcgtactaatagtaggttta

SEQ ID NO: 445975 - DNA, 30 bp, Artificial Sequence
  Synthetic oligonucleotide
ggcgtaatgacgcagggttggatcggttta

SEQ ID NO: 445976 - DNA, 30 bp, Artificial Sequence
  Synthetic oligonucleotide
ccaatcgggttatactgcgaacagggttta

SEQ ID NO: 445977 - DNA, 30 bp, Artificial Sequence
  Synthetic oligonucleotide
atgtcggctaaaccacgttgctagggttta

SEQ ID NO: 445978 - DNA, 30 bp, Artificial Sequence
  Synthetic oligonucleotide
accccactaggaataaaccattcgggttta

SEQ ID NO: 445979 - DNA, 30 bp, Artificial Sequence
  Synthetic oligonucleotide
ccattcgtcttgcaccggtacctgggttta

SEQ ID NO: 445980 - DNA, 30 bp, Artificial Sequence
  Synthetic oligonucleotide
atcttacattagcgcgtcggcaatggttta

SEQ ID NO: 445981 - DNA, 30 bp, Artificial Sequence
  Synthetic oligonucleotide
gccgcatgaagaggctcgtttcctggttta

SEQ ID NO: 445982 - DNA, 30 bp, Artificial Sequence
  Synthetic oligonucleotide
atatgtcggcgagtgatccgacaatgttta

SEQ ID NO: 445983 - DNA, 30 bp, Artificial Sequence
  Synthetic oligonucleotide
tcgcggatttgcactggcagttcatgttta

SEQ ID NO: 445984 - DNA, 30 bp, Artificial Sequence
  Synthetic oligonucleotide
tacatggggcacctaagtcattgatgttta

SEQ ID NO: 445985 - DNA, 30 bp, Artificial Sequence
  Synthetic oligonucleotide
ctcttatcggttaatagctttatatgttta

SEQ ID NO: 445986 - DNA, 30 bp, Artificial Sequence
  Synthetic oligonucleotide
gcagaaacttcctataacagtgactgttta

SEQ ID NO: 445987 - DNA, 30 bp, Artificial Sequence
  Synthetic oligonucleotide
gaattaaagcattctgggagttactgttta

SEQ ID NO: 445988 - DNA, 30 bp, Artificial Sequence
  Synthetic oligonucleotide
cgtgcggacgaacggacagcaagctgttta

SEQ ID NO: 445989 - DNA, 30 bp, Artificial Sequence
  Synthetic oligonucleotide
gcttcttgcaggaagcggacgtcgtgttta

SEQ ID NO: 445990 - DNA, 30 bp, Artificial Sequence
  Synthetic oligonucleotide
gaatctatagtgcaacccacagtgtgttta

SEQ ID NO: 445991 - DNA, 30 bp, Artificial Sequence
  Synthetic oligonucleotide
actcttccaagaaacagcgaattgtgttta

SEQ ID NO: 445992 - DNA, 30 bp, Artificial Sequence
  Synthetic oligonucleotide
tgccgtgcaacttacatggcatcttgttta

SEQ ID NO: 445993 - DNA, 30 bp, Artificial Sequence
  Synthetic oligonucleotide
cggagcatcctactgcagttcggttgttta

SEQ ID NO: 445994 - DNA, 30 bp, Artificial Sequence
  Synthetic oligonucleotide
taatgtgtagtacatgttttcatttgttta

SEQ ID NO: 445995 - DNA, 30 bp, Artificial Sequence
  Synthetic oligonucleotide
gatccgagtgcgaaatctataaaaatttta

SEQ ID NO: 445996 - DNA, 30 bp, Artificial Sequence
  Synthetic oligonucleotide
ggggcgttcatatcttgggcggcaatttta

SEQ ID NO: 445997 - DNA, 30 bp, Artificial Sequence
  Synthetic oligonucleotide
acgccgaaattgaacttttagctaatttta

SEQ ID NO: 445998 - DNA, 30 bp, Artificial Sequence
  Synthetic oligonucleotide
tgacaggcaattcgccaaatacgcatttta

SEQ ID NO: 445999 - DNA, 30 bp, Artificial Sequence
  Synthetic oligonucleotide
gcatcgcacaataatctatccaagatttta

SEQ ID NO: 446000 - DNA, 30 bp, Artificial Sequence
  Synthetic oligonucleotide
ccgaggcaaattcacgcgtggtggatttta

SEQ ID NO: 446001 - DNA, 30 bp, Artificial Sequence
  Synthetic oligonucleotide
ttgggcctcgggttgtatgccctgatttta

SEQ ID NO: 446002 - DNA, 30 bp, Artificial Sequence
  Synthetic oligonucleotide
gagtcgtgtgcattccatggctatatttta

SEQ ID NO: 446003 - DNA, 31 bp, Artificial Sequence
  Synthetic oligonucleotide
atacggtcgtccacgcccaccacgtatttta

SEQ ID NO: 446004 - DNA, 30 bp, Artificial Sequence
  Synthetic oligonucleotide
tggttacatttaatccatgggattatttta

SEQ ID NO: 446005 - DNA, 30 bp, Artificial Sequence
  Synthetic oligonucleotide
gcttgtagtgcacttcaggcagttatttta

SEQ ID NO: 446006 - DNA, 30 bp, Artificial Sequence
  Synthetic oligonucleotide
gagccggataagtgcaactcacgactttta

SEQ ID NO: 446007 - DNA, 30 bp, Artificial Sequence
  Synthetic oligonucleotide
gccgcaagagacgcgaagctttgactttta

SEQ ID NO: 446008 - DNA, 30 bp, Artificial Sequence
  Synthetic oligonucleotide
gtcccctaatgtagtctttaagacctttta

SEQ ID NO: 446009 - DNA, 30 bp, Artificial Sequence
  Synthetic oligonucleotide
gagaaactttactgaacattttacctttta

SEQ ID NO: 446010 - DNA, 30 bp, Artificial Sequence
  Synthetic oligonucleotide
gggaaaaagaatcagttgggaatcctttta

SEQ ID NO: 446011 - DNA, 30 bp, Artificial Sequence
  Synthetic oligonucleotide
ccagttttcacccgccttgacatcctttta

SEQ ID NO: 446012 - DNA, 30 bp, Artificial Sequence
  Synthetic oligonucleotide
atcggcttccccatccgctgacggctttta

SEQ ID NO: 446013 - DNA, 30 bp, Artificial Sequence
  Synthetic oligonucleotide
gtccatccggaaccagggtggtatctttta

SEQ ID NO: 446014 - DNA, 30 bp, Artificial Sequence
  Synthetic oligonucleotide
ggcccaagtatcctgtaagaggctctttta

SEQ ID NO: 446015 - DNA, 30 bp, Artificial Sequence
  Synthetic oligonucleotide
gataggtagagcgcaatgacacaagtttta

SEQ ID NO: 446016 - DNA, 30 bp, Artificial Sequence
  Synthetic oligonucleotide
taaggtgctcttgtcttgaaataagtttta

SEQ ID NO: 446017 - DNA, 30 bp, Artificial Sequence
  Synthetic oligonucleotide
tgccatagtagaggtgtactataagtttta

SEQ ID NO: 446018 - DNA, 30 bp, Artificial Sequence
  Synthetic oligonucleotide
gtatcacggccggaagcggctacagtttta

SEQ ID NO: 446019 - DNA, 30 bp, Artificial Sequence
  Synthetic oligonucleotide
tagagtccattgcctcgtatgctagtttta

SEQ ID NO: 446020 - DNA, 30 bp, Artificial Sequence
  Synthetic oligonucleotide
ctggggttgtcataagcttcggtagtttta

SEQ ID NO: 446021 - DNA, 30 bp, Artificial Sequence
  Synthetic oligonucleotide
ttcgcatcccaggggacaatattcgtttta

SEQ ID NO: 446022 - DNA, 28 bp, Artificial Sequence
  Synthetic oligonucleotide
acagaaaagactaggttatccggtttta

SEQ ID NO: 446023 - DNA, 30 bp, Artificial Sequence
  Synthetic oligonucleotide
ggagagttgttgtctgcatagcgggtttta

SEQ ID NO: 446024 - DNA, 30 bp, Artificial Sequence
  Synthetic oligonucleotide
ctctttgcgtggggtgttgcgttggtttta

SEQ ID NO: 446025 - DNA, 30 bp, Artificial Sequence
  Synthetic oligonucleotide
aggtgcaggcatcatcctatgcatgtttta

SEQ ID NO: 446026 - DNA, 30 bp, Artificial Sequence
  Synthetic oligonucleotide
cctcggtgaatagccaagcagactgtttta

SEQ ID NO: 446027 - DNA, 30 bp, Artificial Sequence
  Synthetic oligonucleotide
atgaaaaaacctacattacttagtgtttta

SEQ ID NO: 446028 - DNA, 30 bp, Artificial Sequence
  Synthetic oligonucleotide
acatgcctcgttaagacatcctgtgtttta

SEQ ID NO: 446029 - DNA, 30 bp, Artificial Sequence
  Synthetic oligonucleotide
gagggcagagcattctaaccttgtgtttta

SEQ ID NO: 446030 - DNA, 30 bp, Artificial Sequence
  Synthetic oligonucleotide
atgtaaagtggaagtgaattgctattttta

SEQ ID NO: 446031 - DNA, 30 bp, Artificial Sequence
  Synthetic oligonucleotide
gtgtctttaggaagggagagctgcttttta

SEQ ID NO: 446032 - DNA, 30 bp, Artificial Sequence
  Synthetic oligonucleotide
cggtccagacgacccgggtgtatcttttta

SEQ ID NO: 446033 - DNA, 30 bp, Artificial Sequence
  Synthetic oligonucleotide
gttgactcaagtgttagtttaccgttttta

SEQ ID NO: 446034 - DNA, 30 bp, Artificial Sequence
  Synthetic oligonucleotide
ctgcatgatatagttgaccaagcgttttta

SEQ ID NO: 446035 - DNA, 30 bp, Artificial Sequence
  Synthetic oligonucleotide
tgttagaagtggctttgactgtcgttttta

SEQ ID NO: 446036 - DNA, 30 bp, Artificial Sequence
  Synthetic oligonucleotide
tgttacgccggatttgcgagattgttttta

SEQ ID NO: 446037 - DNA, 30 bp, Artificial Sequence
  Synthetic oligonucleotide
gcgaagcttgcataacataacttgttttta

SEQ ID NO: 446038 - DNA, 30 bp, Artificial Sequence
  Synthetic oligonucleotide
ttaatgtggccgatttgaagcttgttttta

SEQ ID NO: 446039 - DNA, 30 bp, Artificial Sequence
  Synthetic oligonucleotide
cgatatgcacctgttgaaatacatttttta

SEQ ID NO: 446040 - DNA, 30 bp, Artificial Sequence
  Synthetic oligonucleotide
gacatatgttgactattgcgtgatttttta

SEQ ID NO: 446041 - DNA, 31 bp, Artificial Sequence
  Synthetic oligonucleotide
tcatttatatcattcgtccctcccaaaaaac

SEQ ID NO: 446042 - DNA, 30 bp, Artificial Sequence
  Synthetic oligonucleotide
tcggcgttcgaagggcttagtttgaaaaac

SEQ ID NO: 446043 - DNA, 30 bp, Artificial Sequence
  Synthetic oligonucleotide
ggtttagaatcaacggaatattctaaaaac

SEQ ID NO: 446044 - DNA, 30 bp, Artificial Sequence
  Synthetic oligonucleotide
gtaaaacagttttggaaattcagacaaaac

SEQ ID NO: 446045 - DNA, 30 bp, Artificial Sequence
  Synthetic oligonucleotide
ataatggccagcgcacatttatcccaaaac

SEQ ID NO: 446046 - DNA, 30 bp, Artificial Sequence
  Synthetic oligonucleotide
acgagactctactcttattagagccaaaac

SEQ ID NO: 446047 - DNA, 30 bp, Artificial Sequence
  Synthetic oligonucleotide
tgttttctaatttcgtctgcactccaaaac

SEQ ID NO: 446048 - DNA, 30 bp, Artificial Sequence
  Synthetic oligonucleotide
atgtgcgtagatgccagtttacggcaaaac

SEQ ID NO: 446049 - DNA, 30 bp, Artificial Sequence
  Synthetic oligonucleotide
catttcgcgacttgggtttttctgcaaaac

SEQ ID NO: 446050 - DNA, 30 bp, Artificial Sequence
  Synthetic oligonucleotide
gtccgatattagatcccgggaaatcaaaac

SEQ ID NO: 446051 - DNA, 30 bp, Artificial Sequence
  Synthetic oligonucleotide
tattatttgtgtcagctggcaactcaaaac

SEQ ID NO: 446052 - DNA, 30 bp, Artificial Sequence
  Synthetic oligonucleotide
cgatctcccgagtatcgcacagaagaaaac

SEQ ID NO: 446053 - DNA, 30 bp, Artificial Sequence
  Synthetic oligonucleotide
gcctgggtatatatcagtttgacagaaaac

SEQ ID NO: 446054 - DNA, 30 bp, Artificial Sequence
  Synthetic oligonucleotide
gactgcaagtcacggtctattacagaaaac

SEQ ID NO: 446055 - DNA, 30 bp, Artificial Sequence
  Synthetic oligonucleotide
catacataataaacgggtggaatagaaaac

SEQ ID NO: 446056 - DNA, 30 bp, Artificial Sequence
  Synthetic oligonucleotide
cacccatcgcaacagctgttcaacgaaaac

SEQ ID NO: 446057 - DNA, 30 bp, Artificial Sequence
  Synthetic oligonucleotide
gtaagcttaagatcgagaataaccgaaaac

SEQ ID NO: 446058 - DNA, 30 bp, Artificial Sequence
  Synthetic oligonucleotide
gaaattcatggaagtgataaaggcgaaaac

SEQ ID NO: 446059 - DNA, 30 bp, Artificial Sequence
  Synthetic oligonucleotide
tacctctccgggagatctttattcgaaaac

SEQ ID NO: 446060 - DNA, 29 bp, Artificial Sequence
  Synthetic oligonucleotide
gagtaggtacgatgtttccggcggaaaac

SEQ ID NO: 446061 - DNA, 31 bp, Artificial Sequence
  Synthetic oligonucleotide
cgcgggtagggtgaacgggtatgcggaaaac

SEQ ID NO: 446062 - DNA, 30 bp, Artificial Sequence
  Synthetic oligonucleotide
agcgacgcgacagcactgtcctcggaaaac

SEQ ID NO: 446063 - DNA, 30 bp, Artificial Sequence
  Synthetic oligonucleotide
tgagttgccccagaggcatggtatgaaaac

SEQ ID NO: 446064 - DNA, 30 bp, Artificial Sequence
  Synthetic oligonucleotide
cagtattgtatcgatcctgcacctgaaaac

SEQ ID NO: 446065 - DNA, 30 bp, Artificial Sequence
  Synthetic oligonucleotide
tagcaactctagactgctaaagaataaaac

SEQ ID NO: 446066 - DNA, 30 bp, Artificial Sequence
  Synthetic oligonucleotide
tccaaatatacgtcaagtaacgcataaaac

SEQ ID NO: 446067 - DNA, 30 bp, Artificial Sequence
  Synthetic oligonucleotide
tgcttggaacatgagggtttggcataaaac

SEQ ID NO: 446068 - DNA, 30 bp, Artificial Sequence
  Synthetic oligonucleotide
ctcagttaagcctgggatcgctcataaaac

SEQ ID NO: 446069 - DNA, 30 bp, Artificial Sequence
  Synthetic oligonucleotide
actccgactcaagacagtctttcataaaac

SEQ ID NO: 446070 - DNA, 30 bp, Artificial Sequence
  Synthetic oligonucleotide
catatactcaccttgtggttcagataaaac

SEQ ID NO: 446071 - DNA, 30 bp, Artificial Sequence
  Synthetic oligonucleotide
tacgtctacatacgtaagcagcgataaaac

SEQ ID NO: 446072 - DNA, 30 bp, Artificial Sequence
  Synthetic oligonucleotide
gtcggacgttcctcccaatgaccctaaaac

SEQ ID NO: 446073 - DNA, 30 bp, Artificial Sequence
  Synthetic oligonucleotide
ggcgcgctctagaccagttggtgctaaaac

SEQ ID NO: 446074 - DNA, 30 bp, Artificial Sequence
  Synthetic oligonucleotide
gggtaacacttcatgcataggcagtaaaac

SEQ ID NO: 446075 - DNA, 30 bp, Artificial Sequence
  Synthetic oligonucleotide
tgaagatcatttctcatattccggtaaaac

SEQ ID NO: 446076 - DNA, 30 bp, Artificial Sequence
  Synthetic oligonucleotide
tcggccaagaagctgcgtggatggtaaaac

SEQ ID NO: 446077 - DNA, 30 bp, Artificial Sequence
  Synthetic oligonucleotide
ttgtagattcagaaaccacccttttaaaac

SEQ ID NO: 446078 - DNA, 30 bp, Artificial Sequence
  Synthetic oligonucleotide
tcctttcaatagaatcataaaggaacaaac

SEQ ID NO: 446079 - DNA, 30 bp, Artificial Sequence
  Synthetic oligonucleotide
cgaaggacgatcatgtaggagcacacaaac

SEQ ID NO: 446080 - DNA, 30 bp, Artificial Sequence
  Synthetic oligonucleotide
agtctagtccggccttaaacatctacaaac

SEQ ID NO: 446081 - DNA, 30 bp, Artificial Sequence
  Synthetic oligonucleotide
gaacagtcgcatgactttagacaaccaaac

SEQ ID NO: 446082 - DNA, 30 bp, Artificial Sequence
  Synthetic oligonucleotide
tcgtttaccagttagcttgtatcaccaaac

SEQ ID NO: 446083 - DNA, 30 bp, Artificial Sequence
  Synthetic oligonucleotide
atgcctcttttatgctgcgttggaccaaac

SEQ ID NO: 446084 - DNA, 30 bp, Artificial Sequence
  Synthetic oligonucleotide
gtgaaccactaccacacagcattaccaaac

SEQ ID NO: 446085 - DNA, 30 bp, Artificial Sequence
  Synthetic oligonucleotide
aaatttagacataatctcggccacccaaac

SEQ ID NO: 446086 - DNA, 30 bp, Artificial Sequence
  Synthetic oligonucleotide
cagaactagaatccaagagcgtagccaaac

SEQ ID NO: 446087 - DNA, 30 bp, Artificial Sequence
  Synthetic oligonucleotide
tttattttcgacaatgtgtggaggccaaac

SEQ ID NO: 446088 - DNA, 30 bp, Artificial Sequence
  Synthetic oligonucleotide
cagggcgaagtttcgctgagcgttccaaac

SEQ ID NO: 446089 - DNA, 30 bp, Artificial Sequence
  Synthetic oligonucleotide
catcatcagaaacgctcattggttccaaac

SEQ ID NO: 446090 - DNA, 30 bp, Artificial Sequence
  Synthetic oligonucleotide
acttaagcgatggaacactccgaagcaaac

SEQ ID NO: 446091 - DNA, 30 bp, Artificial Sequence
  Synthetic oligonucleotide
gggccttgaatcatatccctgaccgcaaac

SEQ ID NO: 446092 - DNA, 30 bp, Artificial Sequence
  Synthetic oligonucleotide
gcgacgcaccactctgtcaacgtatcaaac

SEQ ID NO: 446093 - DNA, 30 bp, Artificial Sequence
  Synthetic oligonucleotide
caatattatactagtctaatgaactcaaac

SEQ ID NO: 446094 - DNA, 30 bp, Artificial Sequence
  Synthetic oligonucleotide
ggaatttttgatgtgcgtcgaacctcaaac

SEQ ID NO: 446095 - DNA, 30 bp, Artificial Sequence
  Synthetic oligonucleotide
aatttggttccgtgtcaccagaattcaaac

SEQ ID NO: 446096 - DNA, 30 bp, Artificial Sequence
  Synthetic oligonucleotide
actctgtatagttgacaagaataaagaaac

SEQ ID NO: 446097 - DNA, 30 bp, Artificial Sequence
  Synthetic oligonucleotide
ctcggtgggggcttagatgttctaagaaac

SEQ ID NO: 446098 - DNA, 30 bp, Artificial Sequence
  Synthetic oligonucleotide
acacgtattgagttaccacatttaagaaac

SEQ ID NO: 446099 - DNA, 30 bp, Artificial Sequence
  Synthetic oligonucleotide
actgtttctgcgatgggctagggcagaaac

SEQ ID NO: 446100 - DNA, 30 bp, Artificial Sequence
  Synthetic oligonucleotide
aataccacccacttaagttggaagagaaac

SEQ ID NO: 446101 - DNA, 30 bp, Artificial Sequence
  Synthetic oligonucleotide
atacctcatgcattgaaaaactagagaaac

SEQ ID NO: 446102 - DNA, 30 bp, Artificial Sequence
  Synthetic oligonucleotide
ggtttgattcaacgctctattacgagaaac

SEQ ID NO: 446103 - DNA, 30 bp, Artificial Sequence
  Synthetic oligonucleotide
tcagcatcgtctccgcgggtaactagaaac

SEQ ID NO: 446104 - DNA, 30 bp, Artificial Sequence
  Synthetic oligonucleotide
cgtatagtcggaactctgaggactagaaac

SEQ ID NO: 446105 - DNA, 30 bp, Artificial Sequence
  Synthetic oligonucleotide
gttacagaattttttaacccctctagaaac

SEQ ID NO: 446106 - DNA, 30 bp, Artificial Sequence
  Synthetic oligonucleotide
atctcaggataaggcttgggattacgaaac

SEQ ID NO: 446107 - DNA, 30 bp, Artificial Sequence
  Synthetic oligonucleotide
atatttcgcacgattttactcaaccgaaac

SEQ ID NO: 446108 - DNA, 30 bp, Artificial Sequence
  Synthetic oligonucleotide
gcccgacgctatcagcgtgtcggccgaaac

SEQ ID NO: 446109 - DNA, 30 bp, Artificial Sequence
  Synthetic oligonucleotide
gctagatctataccggtaccacagcgaaac

SEQ ID NO: 446110 - DNA, 30 bp, Artificial Sequence
  Synthetic oligonucleotide
gtaattaccaacagcattgcggggcgaaac

SEQ ID NO: 446111 - DNA, 30 bp, Artificial Sequence
  Synthetic oligonucleotide
ttttttgccgaaaaggataatcgtcgaaac

SEQ ID NO: 446112 - DNA, 30 bp, Artificial Sequence
  Synthetic oligonucleotide
gtaatcgagagtgtactgcaatttcgaaac

SEQ ID NO: 446113 - DNA, 30 bp, Artificial Sequence
  Synthetic oligonucleotide
cattgctccagtatatcggataaaggaaac

SEQ ID NO: 446114 - DNA, 30 bp, Artificial Sequence
  Synthetic oligonucleotide
acgacgtaagcagctgacttcagaggaaac

SEQ ID NO: 446115 - DNA, 30 bp, Artificial Sequence
  Synthetic oligonucleotide
tatcaacggacactaactcctataggaaac

SEQ ID NO: 446116 - DNA, 30 bp, Artificial Sequence
  Synthetic oligonucleotide
actgtgacgatggagtaaggacacggaaac

SEQ ID NO: 446117 - DNA, 30 bp, Artificial Sequence
  Synthetic oligonucleotide
atgtctgaatcctagaaacacggcggaaac

SEQ ID NO: 446118 - DNA, 30 bp, Artificial Sequence
  Synthetic oligonucleotide
ctcattgtaccaacctaagacgagggaaac

SEQ ID NO: 446119 - DNA, 30 bp, Artificial Sequence
  Synthetic oligonucleotide
tgaatcataggcggcggctggacgggaaac

SEQ ID NO: 446120 - DNA, 30 bp, Artificial Sequence
  Synthetic oligonucleotide
cttacgggcgataagttccgcaggggaaac

SEQ ID NO: 446121 - DNA, 30 bp, Artificial Sequence
  Synthetic oligonucleotide
atgctttcatagtgtacagctaggggaaac

SEQ ID NO: 446122 - DNA, 30 bp, Artificial Sequence
  Synthetic oligonucleotide
tttcagcaaaaatgatcaacgatgggaaac

SEQ ID NO: 446123 - DNA, 30 bp, Artificial Sequence
  Synthetic oligonucleotide
taggctccgcgcacgcataacggtggaaac

SEQ ID NO: 446124 - DNA, 30 bp, Artificial Sequence
  Synthetic oligonucleotide
atcgggaaaacgctacctacaaaatgaaac

SEQ ID NO: 446125 - DNA, 30 bp, Artificial Sequence
  Synthetic oligonucleotide
gatttcaataacgtggccaccacatgaaac

SEQ ID NO: 446126 - DNA, 30 bp, Artificial Sequence
  Synthetic oligonucleotide
ttcgtatatgcatgttactggagctgaaac

SEQ ID NO: 446127 - DNA, 30 bp, Artificial Sequence
  Synthetic oligonucleotide
tatgattgcgtcttccagtcgagttgaaac

SEQ ID NO: 446128 - DNA, 30 bp, Artificial Sequence
  Synthetic oligonucleotide
gacggcactcgccgtcctttccaaataaac

SEQ ID NO: 446129 - DNA, 31 bp, Artificial Sequence
  Synthetic oligonucleotide
gagagaggcgaggcccaaaggcagcataaac

SEQ ID NO: 446130 - DNA, 30 bp, Artificial Sequence
  Synthetic oligonucleotide
attgagccctgacgtggtttgccgataaac

SEQ ID NO: 446131 - DNA, 30 bp, Artificial Sequence
  Synthetic oligonucleotide
ccaattaaaaattcccaccgcatgataaac

SEQ ID NO: 446132 - DNA, 30 bp, Artificial Sequence
  Synthetic oligonucleotide
gataataaggcgacctacatatatataaac

SEQ ID NO: 446133 - DNA, 30 bp, Artificial Sequence
  Synthetic oligonucleotide
gaattatctgcacagccataggttataaac

SEQ ID NO: 446134 - DNA, 30 bp, Artificial Sequence
  Synthetic oligonucleotide
ggtctaacttgatcgctataggcactaaac

SEQ ID NO: 446135 - DNA, 30 bp, Artificial Sequence
  Synthetic oligonucleotide
ataattggacatttcgtccgcttactaaac

SEQ ID NO: 446136 - DNA, 30 bp, Artificial Sequence
  Synthetic oligonucleotide
ctctggtataggtctggctgtaccctaaac

SEQ ID NO: 446137 - DNA, 30 bp, Artificial Sequence
  Synthetic oligonucleotide
cgatccgttgagtcgagggcggcgctaaac

SEQ ID NO: 446138 - DNA, 30 bp, Artificial Sequence
  Synthetic oligonucleotide
gctgtgtggaggccagggatgaggctaaac

SEQ ID NO: 446139 - DNA, 30 bp, Artificial Sequence
  Synthetic oligonucleotide
cttaagcgctctccagtcagctcagtaaac

SEQ ID NO: 446140 - DNA, 30 bp, Artificial Sequence
  Synthetic oligonucleotide
gcattaatacggacatgacttttagtaaac

SEQ ID NO: 446141 - DNA, 30 bp, Artificial Sequence
  Synthetic oligonucleotide
agtcggtaggactttgttcgaagcgtaaac

SEQ ID NO: 446142 - DNA, 30 bp, Artificial Sequence
  Synthetic oligonucleotide
aaagcgagttctggaattttaggcgtaaac

SEQ ID NO: 446143 - DNA, 30 bp, Artificial Sequence
  Synthetic oligonucleotide
gtgacttctctgcgatctctgatcgtaaac

SEQ ID NO: 446144 - DNA, 30 bp, Artificial Sequence
  Synthetic oligonucleotide
acgggaggtaaacctttttttgtcgtaaac

SEQ ID NO: 446145 - DNA, 30 bp, Artificial Sequence
  Synthetic oligonucleotide
atttggcacgaagcccacgttgaggtaaac

SEQ ID NO: 446146 - DNA, 30 bp, Artificial Sequence
  Synthetic oligonucleotide
ttcctaacggcattttccgatgcggtaaac

SEQ ID NO: 446147 - DNA, 30 bp, Artificial Sequence
  Synthetic oligonucleotide
tattgtcatccatgggtgctcagggtaaac

SEQ ID NO: 446148 - DNA, 30 bp, Artificial Sequence
  Synthetic oligonucleotide
ttgtcggctgttctggcccagaatgtaaac

SEQ ID NO: 446149 - DNA, 30 bp, Artificial Sequence
  Synthetic oligonucleotide
atcacggcttgactttttttgacattaaac

SEQ ID NO: 446150 - DNA, 30 bp, Artificial Sequence
  Synthetic oligonucleotide
ggggttacaaccgcattaagcgtattaaac

SEQ ID NO: 446151 - DNA, 30 bp, Artificial Sequence
  Synthetic oligonucleotide
caaatgtttcagtgccgactagcgttaaac

SEQ ID NO: 446152 - DNA, 30 bp, Artificial Sequence
  Synthetic oligonucleotide
acgtaaaaaaccgatcaggggctgttaaac

SEQ ID NO: 446153 - DNA, 30 bp, Artificial Sequence
  Synthetic oligonucleotide
tcatcgcggagtggtaccctatgtttaaac

SEQ ID NO: 446154 - DNA, 30 bp, Artificial Sequence
  Synthetic oligonucleotide
aatacctctggagagaattatgacaacaac

SEQ ID NO: 446155 - DNA, 30 bp, Artificial Sequence
  Synthetic oligonucleotide
tatccagaagatatgcacggtcgcaacaac

SEQ ID NO: 446156 - DNA, 30 bp, Artificial Sequence
  Synthetic oligonucleotide
gagctagaatctttaatgtatctcaacaac

SEQ ID NO: 446157 - DNA, 30 bp, Artificial Sequence
  Synthetic oligonucleotide
ggccaataggactctgtgccggataacaac

SEQ ID NO: 446158 - DNA, 30 bp, Artificial Sequence
  Synthetic oligonucleotide
tcccaagagccacactcctgtactaacaac

SEQ ID NO: 446159 - DNA, 30 bp, Artificial Sequence
  Synthetic oligonucleotide
atacgcagacgaaaagctgatggtaacaac

SEQ ID NO: 446160 - DNA, 30 bp, Artificial Sequence
  Synthetic oligonucleotide
taaagctgctctaagccttcgttacacaac

SEQ ID NO: 446161 - DNA, 30 bp, Artificial Sequence
  Synthetic oligonucleotide
atcgtcgtttaatacactccgatccacaac

SEQ ID NO: 446162 - DNA, 30 bp, Artificial Sequence
  Synthetic oligonucleotide
aggactaaatcaactgttcttttccacaac

SEQ ID NO: 446163 - DNA, 31 bp, Artificial Sequence
  Synthetic oligonucleotide
ctgagaatatcgccactgtaatgggcacaac

SEQ ID NO: 446164 - DNA, 30 bp, Artificial Sequence
  Synthetic oligonucleotide
ctcggctcaacccctagtcaagacgacaac

SEQ ID NO: 446165 - DNA, 30 bp, Artificial Sequence
  Synthetic oligonucleotide
taattcaaggcatgatgcgcgctcgacaac

SEQ ID NO: 446166 - DNA, 30 bp, Artificial Sequence
  Synthetic oligonucleotide
tacaggcctcagagatgctcgtgggacaac

SEQ ID NO: 446167 - DNA, 30 bp, Artificial Sequence
  Synthetic oligonucleotide
gtcgactagtgttctactatcccatacaac

SEQ ID NO: 446168 - DNA, 30 bp, Artificial Sequence
  Synthetic oligonucleotide
cgagcctgattaatgtaattaaactacaac

SEQ ID NO: 446169 - DNA, 30 bp, Artificial Sequence
  Synthetic oligonucleotide
gtaaagttgcgcgcctataataagtacaac

SEQ ID NO: 446170 - DNA, 30 bp, Artificial Sequence
  Synthetic oligonucleotide
gacacctggggctatatcatttagtacaac

SEQ ID NO: 446171 - DNA, 30 bp, Artificial Sequence
  Synthetic oligonucleotide
gtatgattggcgccatcgtatcgttacaac

SEQ ID NO: 446172 - DNA, 30 bp, Artificial Sequence
  Synthetic oligonucleotide
atgtgcggagagtagcgtgaatgttacaac

SEQ ID NO: 446173 - DNA, 30 bp, Artificial Sequence
  Synthetic oligonucleotide
cggcagttctcccttttgaaaagaaccaac

SEQ ID NO: 446174 - DNA, 30 bp, Artificial Sequence
  Synthetic oligonucleotide
ggctcgtcgccagattgtgcgagaaccaac

SEQ ID NO: 446175 - DNA, 30 bp, Artificial Sequence
  Synthetic oligonucleotide
ggtccgtttaaagtactcccaggaaccaac

SEQ ID NO: 446176 - DNA, 30 bp, Artificial Sequence
  Synthetic oligonucleotide
ttgctaaatcatgacggtgcggctaccaac

SEQ ID NO: 446177 - DNA, 30 bp, Artificial Sequence
  Synthetic oligonucleotide
cttgagtaggttgtctatattagtaccaac

SEQ ID NO: 446178 - DNA, 30 bp, Artificial Sequence
  Synthetic oligonucleotide
atgtgcccgtgagtaacgcatccacccaac

SEQ ID NO: 446179 - DNA, 30 bp, Artificial Sequence
  Synthetic oligonucleotide
atccttgggaaaatttggaaacgccccaac

SEQ ID NO: 446180 - DNA, 30 bp, Artificial Sequence
  Synthetic oligonucleotide
cctcctccgttatattgcgggatccccaac

SEQ ID NO: 446181 - DNA, 30 bp, Artificial Sequence
  Synthetic oligonucleotide
agtgggggggttacctatcgtatccccaac

SEQ ID NO: 446182 - DNA, 30 bp, Artificial Sequence
  Synthetic oligonucleotide
gcggcatgccttctgctagaagggcccaac

SEQ ID NO: 446183 - DNA, 30 bp, Artificial Sequence
  Synthetic oligonucleotide
agaagaattgtggtatgtaaatggcccaac

SEQ ID NO: 446184 - DNA, 30 bp, Artificial Sequence
  Synthetic oligonucleotide
ataatggcagttagatggcatagagccaac

SEQ ID NO: 446185 - DNA, 30 bp, Artificial Sequence
  Synthetic oligonucleotide
ataccggttgggcgcagtgacggcgccaac

SEQ ID NO: 446186 - DNA, 30 bp, Artificial Sequence
  Synthetic oligonucleotide
cttgtctcctgcacttgctttggggccaac

SEQ ID NO: 446187 - DNA, 30 bp, Artificial Sequence
  Synthetic oligonucleotide
tacttgtcgctgttctaaaactttgccaac

SEQ ID NO: 446188 - DNA, 30 bp, Artificial Sequence
  Synthetic oligonucleotide
agaggttattgagaagtccacttatccaac

SEQ ID NO: 446189 - DNA, 30 bp, Artificial Sequence
  Synthetic oligonucleotide
cgacagtcagtggttttaaagttatccaac

SEQ ID NO: 446190 - DNA, 30 bp, Artificial Sequence
  Synthetic oligonucleotide
atcgaatcttagctaattcgaggctccaac

SEQ ID NO: 446191 - DNA, 30 bp, Artificial Sequence
  Synthetic oligonucleotide
gagattgtaatttagtccgttgagtccaac

SEQ ID NO: 446192 - DNA, 30 bp, Artificial Sequence
  Synthetic oligonucleotide
gttggaatcggaaaagatagcaattccaac

SEQ ID NO: 446193 - DNA, 30 bp, Artificial Sequence
  Synthetic oligonucleotide
ttggtactaagtgttacctaatccagcaac

SEQ ID NO: 446194 - DNA, 30 bp, Artificial Sequence
  Synthetic oligonucleotide
ccactgattaggtatagccaatgcagcaac

SEQ ID NO: 446195 - DNA, 30 bp, Artificial Sequence
  Synthetic oligonucleotide
aattggggtgggcagacagcgctcagcaac

SEQ ID NO: 446196 - DNA, 30 bp, Artificial Sequence
  Synthetic oligonucleotide
catcactcaatgttttctgtcttcagcaac

SEQ ID NO: 446197 - DNA, 30 bp, Artificial Sequence
  Synthetic oligonucleotide
ttgggtgcagttttccgcggacagagcaac

SEQ ID NO: 446198 - DNA, 30 bp, Artificial Sequence
  Synthetic oligonucleotide
aatctggacgaagccgagatgtaccgcaac

SEQ ID NO: 446199 - DNA, 30 bp, Artificial Sequence
  Synthetic oligonucleotide
agatagcatcctctagattcgggccgcaac

SEQ ID NO: 446200 - DNA, 30 bp, Artificial Sequence
  Synthetic oligonucleotide
tgtccccccattatgtctgaaaagcgcaac

SEQ ID NO: 446201 - DNA, 30 bp, Artificial Sequence
  Synthetic oligonucleotide
acttttatgagggaatacgcaaggcgcaac

SEQ ID NO: 446202 - DNA, 30 bp, Artificial Sequence
  Synthetic oligonucleotide
catcacgtttggtgataattatatcgcaac

SEQ ID NO: 446203 - DNA, 30 bp, Artificial Sequence
  Synthetic oligonucleotide
catttacatagttctgtacaggttcgcaac

SEQ ID NO: 446204 - DNA, 30 bp, Artificial Sequence
  Synthetic oligonucleotide
aggcagggcagacgttaaaacaccggcaac

SEQ ID NO: 446205 - DNA, 30 bp, Artificial Sequence
  Synthetic oligonucleotide
gggtagctgcggcgtcccttcaagggcaac

SEQ ID NO: 446206 - DNA, 30 bp, Artificial Sequence
  Synthetic oligonucleotide
tgcattcgctggtcgtgcctatagggcaac

SEQ ID NO: 446207 - DNA, 30 bp, Artificial Sequence
  Synthetic oligonucleotide
cgtttcgaaacgtagcctcaccctggcaac

SEQ ID NO: 446208 - DNA, 30 bp, Artificial Sequence
  Synthetic oligonucleotide
aagaaattaagtgctcacagtagtggcaac

SEQ ID NO: 446209 - DNA, 30 bp, Artificial Sequence
  Synthetic oligonucleotide
tgtcccggtgcaggtggtgtgcaatgcaac

SEQ ID NO: 446210 - DNA, 30 bp, Artificial Sequence
  Synthetic oligonucleotide
caatatatattgcgcagattcgcgtgcaac

SEQ ID NO: 446211 - DNA, 30 bp, Artificial Sequence
  Synthetic oligonucleotide
ttaagcattatccaaatgtcttcgtgcaac

SEQ ID NO: 446212 - DNA, 30 bp, Artificial Sequence
  Synthetic oligonucleotide
aggcttccagcatgtttgcaggggtgcaac

SEQ ID NO: 446213 - DNA, 30 bp, Artificial Sequence
  Synthetic oligonucleotide
gcaatccgaatcatgcctgttgattgcaac

SEQ ID NO: 446214 - DNA, 30 bp, Artificial Sequence
  Synthetic oligonucleotide
gccctttgtcagtgtttacaaagttgcaac

SEQ ID NO: 446215 - DNA, 30 bp, Artificial Sequence
  Synthetic oligonucleotide
tactatattagtgtcagggtcatttgcaac

SEQ ID NO: 446216 - DNA, 30 bp, Artificial Sequence
  Synthetic oligonucleotide
gaaatcaaacacgaagtctcctacatcaac

SEQ ID NO: 446217 - DNA, 30 bp, Artificial Sequence
  Synthetic oligonucleotide
cttactcgcccacaggataggagcatcaac

SEQ ID NO: 446218 - DNA, 30 bp, Artificial Sequence
  Synthetic oligonucleotide
gtctgttttaaagaatggagatgcatcaac

SEQ ID NO: 446219 - DNA, 30 bp, Artificial Sequence
  Synthetic oligonucleotide
tgtttatatgggaataagtgggatatcaac

SEQ ID NO: 446220 - DNA, 30 bp, Artificial Sequence
  Synthetic oligonucleotide
tgtaccgagaacaccacccggtttatcaac

SEQ ID NO: 446221 - DNA, 30 bp, Artificial Sequence
  Synthetic oligonucleotide
gcaacagtgtaagatgtgtagctcctcaac

SEQ ID NO: 446222 - DNA, 30 bp, Artificial Sequence
  Synthetic oligonucleotide
actagagcaccgggtgtctatcatctcaac

SEQ ID NO: 446223 - DNA, 30 bp, Artificial Sequence
  Synthetic oligonucleotide
ggcggtgcccacgttccatggcaggtcaac

SEQ ID NO: 446224 - DNA, 30 bp, Artificial Sequence
  Synthetic oligonucleotide
caacgggtatcctcttataattaggtcaac

SEQ ID NO: 446225 - DNA, 30 bp, Artificial Sequence
  Synthetic oligonucleotide
agtttcgtactggggatcacttaattcaac

SEQ ID NO: 446226 - DNA, 30 bp, Artificial Sequence
  Synthetic oligonucleotide
aagttcacaggtctatagtcctcattcaac

SEQ ID NO: 446227 - DNA, 30 bp, Artificial Sequence
  Synthetic oligonucleotide
taactatgctttgcaagtcgtatattcaac

SEQ ID NO: 446228 - DNA, 30 bp, Artificial Sequence
  Synthetic oligonucleotide
tgtccacataaccaattgttccacttcaac

SEQ ID NO: 446229 - DNA, 30 bp, Artificial Sequence
  Synthetic oligonucleotide
aatttgagaaaacggtgagggactttcaac

SEQ ID NO: 446230 - DNA, 30 bp, Artificial Sequence
  Synthetic oligonucleotide
tcaggggtgtatattggagggtttttcaac

SEQ ID NO: 446231 - DNA, 30 bp, Artificial Sequence
  Synthetic oligonucleotide
agttattgcaagcccaagttcaaaaagaac

SEQ ID NO: 446232 - DNA, 30 bp, Artificial Sequence
  Synthetic oligonucleotide
aatttctgtaagagagagcggaaaaagaac

SEQ ID NO: 446233 - DNA, 30 bp, Artificial Sequence
  Synthetic oligonucleotide
ttgaattaagccacgggggattcaaagaac

SEQ ID NO: 446234 - DNA, 30 bp, Artificial Sequence
  Synthetic oligonucleotide
gacaaggtctttatcaattccagaaagaac

SEQ ID NO: 446235 - DNA, 30 bp, Artificial Sequence
  Synthetic oligonucleotide
ctagtcaagggtgcatcgtaacccaagaac

SEQ ID NO: 446236 - DNA, 30 bp, Artificial Sequence
  Synthetic oligonucleotide
tactccgtgtggtagaaaagctagaagaac

SEQ ID NO: 446237 - DNA, 30 bp, Artificial Sequence
  Synthetic oligonucleotide
cacttatatcttacaattccaacgaagaac

SEQ ID NO: 446238 - DNA, 30 bp, Artificial Sequence
  Synthetic oligonucleotide
ccaaacaaccctcgccttcggctgaagaac

SEQ ID NO: 446239 - DNA, 30 bp, Artificial Sequence
  Synthetic oligonucleotide
tccatggctccttaataatagattaagaac

SEQ ID NO: 446240 - DNA, 30 bp, Artificial Sequence
  Synthetic oligonucleotide
tcttttggtgccgtcttacttcttaagaac

SEQ ID NO: 446241 - DNA, 30 bp, Artificial Sequence
  Synthetic oligonucleotide
ccctccataccggaaagtgatgaccagaac

SEQ ID NO: 446242 - DNA, 30 bp, Artificial Sequence
  Synthetic oligonucleotide
caaagccatattatgcagccgccgcagaac

SEQ ID NO: 446243 - DNA, 30 bp, Artificial Sequence
  Synthetic oligonucleotide
gaggagtactgagggtaatgatcgcagaac

SEQ ID NO: 446244 - DNA, 30 bp, Artificial Sequence
  Synthetic oligonucleotide
aactatcagatccatctgagtcatcagaac

SEQ ID NO: 446245 - DNA, 30 bp, Artificial Sequence
  Synthetic oligonucleotide
ttgaaagtaaaactcataccggctcagaac

SEQ ID NO: 446246 - DNA, 30 bp, Artificial Sequence
  Synthetic oligonucleotide
taccctactacgtcggggggaattcagaac

SEQ ID NO: 446247 - DNA, 30 bp, Artificial Sequence
  Synthetic oligonucleotide
taatatagttggaaatgtgtaggagagaac

SEQ ID NO: 446248 - DNA, 30 bp, Artificial Sequence
  Synthetic oligonucleotide
ggagggccgaatatggcccgaagggagaac

SEQ ID NO: 446249 - DNA, 30 bp, Artificial Sequence
  Synthetic oligonucleotide
gagttcgggtccagttactggcgggagaac

SEQ ID NO: 446250 - DNA, 30 bp, Artificial Sequence
  Synthetic oligonucleotide
tgacgcaagcacgtacatcgttgggagaac

SEQ ID NO: 446251 - DNA, 30 bp, Artificial Sequence
  Synthetic oligonucleotide
acgggtgtgtcactcgaacagcttgagaac

SEQ ID NO: 446252 - DNA, 30 bp, Artificial Sequence
  Synthetic oligonucleotide
caaggctttatattatcgccggtatagaac

SEQ ID NO: 446253 - DNA, 30 bp, Artificial Sequence
  Synthetic oligonucleotide
aggtggtcctaagcgtttcgccagtagaac

SEQ ID NO: 446254 - DNA, 30 bp, Artificial Sequence
  Synthetic oligonucleotide
tcgtatgcttagttcagcggtatgtagaac

SEQ ID NO: 446255 - DNA, 30 bp, Artificial Sequence
  Synthetic oligonucleotide
acctacaaatgcgttattgtagattagaac

SEQ ID NO: 446256 - DNA, 30 bp, Artificial Sequence
  Synthetic oligonucleotide
gttctctaataggcaacggagtattagaac

SEQ ID NO: 446257 - DNA, 30 bp, Artificial Sequence
  Synthetic oligonucleotide
gctcttccagtaggtgcagaaacttagaac

SEQ ID NO: 446258 - DNA, 30 bp, Artificial Sequence
  Synthetic oligonucleotide
gtgcttatgcgatccgtgatgtcttagaac

SEQ ID NO: 446259 - DNA, 30 bp, Artificial Sequence
  Synthetic oligonucleotide
cagctgctatcagtatatgttctaacgaac

SEQ ID NO: 446260 - DNA, 30 bp, Artificial Sequence
  Synthetic oligonucleotide
gcgctcggggccttgtctcgcttcacgaac

SEQ ID NO: 446261 - DNA, 30 bp, Artificial Sequence
  Synthetic oligonucleotide
ttctgtttaatactcgtggcagagacgaac

SEQ ID NO: 446262 - DNA, 30 bp, Artificial Sequence
  Synthetic oligonucleotide
aagcgcattagctcctatatgtcgacgaac

SEQ ID NO: 446263 - DNA, 30 bp, Artificial Sequence
  Synthetic oligonucleotide
aataacaaatccgcgatataaaaaccgaac

SEQ ID NO: 446264 - DNA, 30 bp, Artificial Sequence
  Synthetic oligonucleotide
acaacactctgagcgactttgcagccgaac

SEQ ID NO: 446265 - DNA, 30 bp, Artificial Sequence
  Synthetic oligonucleotide
gtgttcggggagggttaagtcgcgccgaac

SEQ ID NO: 446266 - DNA, 30 bp, Artificial Sequence
  Synthetic oligonucleotide
caaccaccgcacctgatgtggatgccgaac

SEQ ID NO: 446267 - DNA, 30 bp, Artificial Sequence
  Synthetic oligonucleotide
atacgcagaagaggtctctcactgccgaac

SEQ ID NO: 446268 - DNA, 30 bp, Artificial Sequence
  Synthetic oligonucleotide
cccagtgttcgtacctggcgcgtgccgaac

SEQ ID NO: 446269 - DNA, 30 bp, Artificial Sequence
  Synthetic oligonucleotide
tttactctacggagcgagtggcgtccgaac

SEQ ID NO: 446270 - DNA, 30 bp, Artificial Sequence
  Synthetic oligonucleotide
ccgtgcgttccgaacacggcaggtccgaac

SEQ ID NO: 446271 - DNA, 30 bp, Artificial Sequence
  Synthetic oligonucleotide
atcacgtagagccaaatattcgcagcgaac

SEQ ID NO: 446272 - DNA, 30 bp, Artificial Sequence
  Synthetic oligonucleotide
cccgatgttgggttggttggcccggcgaac

SEQ ID NO: 446273 - DNA, 30 bp, Artificial Sequence
  Synthetic oligonucleotide
gttagcctaagtcattgtactagggcgaac

SEQ ID NO: 446274 - DNA, 30 bp, Artificial Sequence
  Synthetic oligonucleotide
tttcaccgcaagttcgattatcatgcgaac

SEQ ID NO: 446275 - DNA, 30 bp, Artificial Sequence
  Synthetic oligonucleotide
atgctcgtcaactgtacgggctctgcgaac

SEQ ID NO: 446276 - DNA, 30 bp, Artificial Sequence
  Synthetic oligonucleotide
attgatatcgtcgctcccatttgatcgaac

SEQ ID NO: 446277 - DNA, 30 bp, Artificial Sequence
  Synthetic oligonucleotide
ttctaaaggctgattatactcgtatcgaac

SEQ ID NO: 446278 - DNA, 30 bp, Artificial Sequence
  Synthetic oligonucleotide
acccggaggttctggttagcggcctcgaac

SEQ ID NO: 446279 - DNA, 30 bp, Artificial Sequence
  Synthetic oligonucleotide
cacccatggaaacggaggcctctctcgaac

SEQ ID NO: 446280 - DNA, 30 bp, Artificial Sequence
  Synthetic oligonucleotide
tccgggctatggtttgtcgaggtctcgaac

SEQ ID NO: 446281 - DNA, 29 bp, Artificial Sequence
  Synthetic oligonucleotide
gagtttgtacggatcgtggcaagtcgaac

SEQ ID NO: 446282 - DNA, 30 bp, Artificial Sequence
  Synthetic oligonucleotide
ttgagattgattcagcaataatgttcgaac

SEQ ID NO: 446283 - DNA, 30 bp, Artificial Sequence
  Synthetic oligonucleotide
aactatagtaaggcggtagcaacaaggaac

SEQ ID NO: 446284 - DNA, 30 bp, Artificial Sequence
  Synthetic oligonucleotide
aaagttccgtaattacttttcaacaggaac

SEQ ID NO: 446285 - DNA, 30 bp, Artificial Sequence
  Synthetic oligonucleotide
gagcttaagctgtttggcgcccgcaggaac

SEQ ID NO: 446286 - DNA, 30 bp, Artificial Sequence
  Synthetic oligonucleotide
gttactcgctacccaggatcaccgaggaac

SEQ ID NO: 446287 - DNA, 30 bp, Artificial Sequence
  Synthetic oligonucleotide
actattacgcgcatcgtttggtggaggaac

SEQ ID NO: 446288 - DNA, 30 bp, Artificial Sequence
  Synthetic oligonucleotide
ggttgttatcgcaaccgtaagcataggaac

SEQ ID NO: 446289 - DNA, 30 bp, Artificial Sequence
  Synthetic oligonucleotide
gagttagaaacagtgcctgcacgtaggaac

SEQ ID NO: 446290 - DNA, 30 bp, Artificial Sequence
  Synthetic oligonucleotide
tttggctgattagaaggtgaatatcggaac

SEQ ID NO: 446291 - DNA, 30 bp, Artificial Sequence
  Synthetic oligonucleotide
taagggtttctatactatgacacagggaac

SEQ ID NO: 446292 - DNA, 30 bp, Artificial Sequence
  Synthetic oligonucleotide
tatctttaggttagtctcgaagacgggaac

SEQ ID NO: 446293 - DNA, 30 bp, Artificial Sequence
  Synthetic oligonucleotide
ggccgtcctctgatccggggggtcgggaac

SEQ ID NO: 446294 - DNA, 30 bp, Artificial Sequence
  Synthetic oligonucleotide
gtttgtgtgcactactatacataggggaac

SEQ ID NO: 446295 - DNA, 30 bp, Artificial Sequence
  Synthetic oligonucleotide
gcaaaatgagtcatcgcttgatcggggaac

SEQ ID NO: 446296 - DNA, 30 bp, Artificial Sequence
  Synthetic oligonucleotide
cttttgccctcagcaagggaacgtgggaac

SEQ ID NO: 446297 - DNA, 30 bp, Artificial Sequence
  Synthetic oligonucleotide
aaacgacctttccgcattacctgtgggaac

SEQ ID NO: 446298 - DNA, 30 bp, Artificial Sequence
  Synthetic oligonucleotide
aaagttactaattcgaactaatactggaac

SEQ ID NO: 446299 - DNA, 30 bp, Artificial Sequence
  Synthetic oligonucleotide
gactttgatctgtgcctcaagccctggaac

SEQ ID NO: 446300 - DNA, 30 bp, Artificial Sequence
  Synthetic oligonucleotide
tttatcagagtcccttgctggccctggaac

SEQ ID NO: 446301 - DNA, 30 bp, Artificial Sequence
  Synthetic oligonucleotide
ggttgtgaatcgtaaccgcggctctggaac

SEQ ID NO: 446302 - DNA, 30 bp, Artificial Sequence
  Synthetic oligonucleotide
gctgatgttcacctatgtaaatcttggaac

SEQ ID NO: 446303 - DNA, 30 bp, Artificial Sequence
  Synthetic oligonucleotide
tggctctcggagtattttctgcgttggaac

SEQ ID NO: 446304 - DNA, 30 bp, Artificial Sequence
  Synthetic oligonucleotide
ctcaacaccatcattacatccttttggaac

SEQ ID NO: 446305 - DNA, 30 bp, Artificial Sequence
  Synthetic oligonucleotide
tgacccccccagcaaagatgtttttggaac

SEQ ID NO: 446306 - DNA, 29 bp, Artificial Sequence
  Synthetic oligonucleotide
acctagcatagttgctagaagaaatgaac

SEQ ID NO: 446307 - DNA, 30 bp, Artificial Sequence
  Synthetic oligonucleotide
ggggtggataagttttacgggtcaatgaac

SEQ ID NO: 446308 - DNA, 30 bp, Artificial Sequence
  Synthetic oligonucleotide
acaattctaagagtccaatcgtgaatgaac

SEQ ID NO: 446309 - DNA, 30 bp, Artificial Sequence
  Synthetic oligonucleotide
aaagttctcacctatgaagtcgccatgaac

SEQ ID NO: 446310 - DNA, 30 bp, Artificial Sequence
  Synthetic oligonucleotide
gagggacagtttcgcgcacccgagatgaac

SEQ ID NO: 446311 - DNA, 30 bp, Artificial Sequence
  Synthetic oligonucleotide
acggaacacactggggagcggtagatgaac

SEQ ID NO: 446312 - DNA, 30 bp, Artificial Sequence
  Synthetic oligonucleotide
tccacatatgcagaatcatatgcgatgaac

SEQ ID NO: 446313 - DNA, 30 bp, Artificial Sequence
  Synthetic oligonucleotide
attgtcagattaatgtccgatatgatgaac

SEQ ID NO: 446314 - DNA, 30 bp, Artificial Sequence
  Synthetic oligonucleotide
acctttgagcattttggcatatctatgaac

SEQ ID NO: 446315 - DNA, 30 bp, Artificial Sequence
  Synthetic oligonucleotide
gaatccatccccttacttcggccactgaac

SEQ ID NO: 446316 - DNA, 30 bp, Artificial Sequence
  Synthetic oligonucleotide
gtatgtgacgctgaattgttgttactgaac

SEQ ID NO: 446317 - DNA, 30 bp, Artificial Sequence
  Synthetic oligonucleotide
tagcttgactcgagtgaccagattctgaac

SEQ ID NO: 446318 - DNA, 30 bp, Artificial Sequence
  Synthetic oligonucleotide
agcgcgggagaacgtgtgggaagagtgaac

SEQ ID NO: 446319 - DNA, 30 bp, Artificial Sequence
  Synthetic oligonucleotide
tgggtatcgaacataggactcagagtgaac

SEQ ID NO: 446320 - DNA, 30 bp, Artificial Sequence
  Synthetic oligonucleotide
aaaactatggtccaatagttaggagtgaac

SEQ ID NO: 446321 - DNA, 30 bp, Artificial Sequence
  Synthetic oligonucleotide
ttatagcgagcttaagatcattaggtgaac

SEQ ID NO: 446322 - DNA, 30 bp, Artificial Sequence
  Synthetic oligonucleotide
ccacctcataacctaacgactactgtgaac

SEQ ID NO: 446323 - DNA, 30 bp, Artificial Sequence
  Synthetic oligonucleotide
atatatcagactctgtaagcgggtgtgaac

SEQ ID NO: 446324 - DNA, 30 bp, Artificial Sequence
  Synthetic oligonucleotide
taattctcattcctgtaaacaattgtgaac

SEQ ID NO: 446325 - DNA, 30 bp, Artificial Sequence
  Synthetic oligonucleotide
cacaaagatgaaactgttctccaattgaac

SEQ ID NO: 446326 - DNA, 30 bp, Artificial Sequence
  Synthetic oligonucleotide
tatccgccggtcagagccggtacattgaac

SEQ ID NO: 446327 - DNA, 30 bp, Artificial Sequence
  Synthetic oligonucleotide
aacaacgatcgtgcgtgcagtctattgaac

SEQ ID NO: 446328 - DNA, 30 bp, Artificial Sequence
  Synthetic oligonucleotide
gagcgcttgcgctaagactaacacttgaac

SEQ ID NO: 446329 - DNA, 30 bp, Artificial Sequence
  Synthetic oligonucleotide
gctgtattccaagtgaggggtcccttgaac

SEQ ID NO: 446330 - DNA, 30 bp, Artificial Sequence
  Synthetic oligonucleotide
gcgcaccagcagctctcactgatcttgaac

SEQ ID NO: 446331 - DNA, 30 bp, Artificial Sequence
  Synthetic oligonucleotide
aagaccgagttgtagactcatgtcttgaac

SEQ ID NO: 446332 - DNA, 30 bp, Artificial Sequence
  Synthetic oligonucleotide
ggtgaacagaatcccgtgcgggagttgaac

SEQ ID NO: 446333 - DNA, 30 bp, Artificial Sequence
  Synthetic oligonucleotide
ataaaaatgctacataagctttatttgaac

SEQ ID NO: 446334 - DNA, 30 bp, Artificial Sequence
  Synthetic oligonucleotide
ttgattcacccttttttaggccgtttgaac

SEQ ID NO: 446335 - DNA, 30 bp, Artificial Sequence
  Synthetic oligonucleotide
agggtgtagcaatcgtaattttttttgaac

SEQ ID NO: 446336 - DNA, 30 bp, Artificial Sequence
  Synthetic oligonucleotide
tttccgacgggtaggggtaaccaaaataac

SEQ ID NO: 446337 - DNA, 30 bp, Artificial Sequence
  Synthetic oligonucleotide
ctaaggacttcacccttatttataaataac

SEQ ID NO: 446338 - DNA, 30 bp, Artificial Sequence
  Synthetic oligonucleotide
aacctctatatccactttgagtcgaataac

SEQ ID NO: 446339 - DNA, 30 bp, Artificial Sequence
  Synthetic oligonucleotide
cagtcgtttctacatgtggtctggaataac

SEQ ID NO: 446340 - DNA, 30 bp, Artificial Sequence
  Synthetic oligonucleotide
acattacagtataagtatgtgtggaataac

SEQ ID NO: 446341 - DNA, 30 bp, Artificial Sequence
  Synthetic oligonucleotide
gggttgtcgaagcacgcacggcttaataac

SEQ ID NO: 446342 - DNA, 30 bp, Artificial Sequence
  Synthetic oligonucleotide
acaattataagccgcaaacgatttaataac

SEQ ID NO: 446343 - DNA, 30 bp, Artificial Sequence
  Synthetic oligonucleotide
tgacgcctttacagttgcgtctcacataac

SEQ ID NO: 446344 - DNA, 30 bp, Artificial Sequence
  Synthetic oligonucleotide
acttagacccggtacacacacttacataac

SEQ ID NO: 446345 - DNA, 30 bp, Artificial Sequence
  Synthetic oligonucleotide
atctgtggacatgtgatatacttacataac

SEQ ID NO: 446346 - DNA, 30 bp, Artificial Sequence
  Synthetic oligonucleotide
atatatgcgtacaaagacagccccgataac

SEQ ID NO: 446347 - DNA, 30 bp, Artificial Sequence
  Synthetic oligonucleotide
gaggccgaacgctttccagttcaggataac

SEQ ID NO: 446348 - DNA, 30 bp, Artificial Sequence
  Synthetic oligonucleotide
taatgaagctgagtatgttaaccggataac

SEQ ID NO: 446349 - DNA, 30 bp, Artificial Sequence
  Synthetic oligonucleotide
ttttttgggttgatgaaacgatcggataac

SEQ ID NO: 446350 - DNA, 30 bp, Artificial Sequence
  Synthetic oligonucleotide
gttccggtcaggacacagacacgggataac

SEQ ID NO: 446351 - DNA, 30 bp, Artificial Sequence
  Synthetic oligonucleotide
tacagtcctttatcgggtattgtggataac

SEQ ID NO: 446352 - DNA, 30 bp, Artificial Sequence
  Synthetic oligonucleotide
cggtgttctgaatcttcaaaacaatataac

SEQ ID NO: 446353 - DNA, 30 bp, Artificial Sequence
  Synthetic oligonucleotide
gagagaagggtttgccgttagcaatataac

SEQ ID NO: 446354 - DNA, 30 bp, Artificial Sequence
  Synthetic oligonucleotide
ttaagcgatgagatgggatggccatataac

SEQ ID NO: 446355 - DNA, 31 bp, Artificial Sequence
  Synthetic oligonucleotide
gtagccgtccatccagcatctggcatataac

SEQ ID NO: 446356 - DNA, 30 bp, Artificial Sequence
  Synthetic oligonucleotide
tactcctccgttgaaatcccgggctataac

SEQ ID NO: 446357 - DNA, 30 bp, Artificial Sequence
  Synthetic oligonucleotide
tattccgtattcggattcttttgctataac

SEQ ID NO: 446358 - DNA, 30 bp, Artificial Sequence
  Synthetic oligonucleotide
agatcttcttaaattcgcatccagtataac

SEQ ID NO: 446359 - DNA, 30 bp, Artificial Sequence
  Synthetic oligonucleotide
gttatcagttcggccaagccggcgtataac

SEQ ID NO: 446360 - DNA, 30 bp, Artificial Sequence
  Synthetic oligonucleotide
tgggaaactagtggctgcgcggcgtataac

SEQ ID NO: 446361 - DNA, 30 bp, Artificial Sequence
  Synthetic oligonucleotide
ccctttttcggcaggtttatggcgtataac

SEQ ID NO: 446362 - DNA, 30 bp, Artificial Sequence
  Synthetic oligonucleotide
acgttagtattggtcttaacgctgtataac

SEQ ID NO: 446363 - DNA, 30 bp, Artificial Sequence
  Synthetic oligonucleotide
tattataccagatgcctttgagattataac

SEQ ID NO: 446364 - DNA, 30 bp, Artificial Sequence
  Synthetic oligonucleotide
aaaaacatagttcggaaccagtattataac

SEQ ID NO: 446365 - DNA, 30 bp, Artificial Sequence
  Synthetic oligonucleotide
aggtacatgtgagatcttgtagcttataac

SEQ ID NO: 446366 - DNA, 30 bp, Artificial Sequence
  Synthetic oligonucleotide
gctgcatgttattctgcccaatcttataac

SEQ ID NO: 446367 - DNA, 30 bp, Artificial Sequence
  Synthetic oligonucleotide
ttgcttccatatttattccgatgttataac

SEQ ID NO: 446368 - DNA, 30 bp, Artificial Sequence
  Synthetic oligonucleotide
gccgatcgtagcgtccatttttgttataac

SEQ ID NO: 446369 - DNA, 30 bp, Artificial Sequence
  Synthetic oligonucleotide
attagacagccctaatagacactttataac

SEQ ID NO: 446370 - DNA, 30 bp, Artificial Sequence
  Synthetic oligonucleotide
aagaatctacgacagcaagatcgaactaac

SEQ ID NO: 446371 - DNA, 30 bp, Artificial Sequence
  Synthetic oligonucleotide
gttcttcatcaaaggctgaccttaactaac

SEQ ID NO: 446372 - DNA, 30 bp, Artificial Sequence
  Synthetic oligonucleotide
gggcgctcgtgccgccagcggactactaac

SEQ ID NO: 446373 - DNA, 30 bp, Artificial Sequence
  Synthetic oligonucleotide
gagttcaccggctccggttgttgacctaac

SEQ ID NO: 446374 - DNA, 30 bp, Artificial Sequence
  Synthetic oligonucleotide
agtatcttcagagagttataactacctaac

SEQ ID NO: 446375 - DNA, 30 bp, Artificial Sequence
  Synthetic oligonucleotide
gcacggatccgcatcgttagaaagcctaac

SEQ ID NO: 446376 - DNA, 30 bp, Artificial Sequence
  Synthetic oligonucleotide
ggactaacgtacacctcaagagagcctaac

SEQ ID NO: 446377 - DNA, 30 bp, Artificial Sequence
  Synthetic oligonucleotide
ggctatgagctttggtgcgcctagcctaac

SEQ ID NO: 446378 - DNA, 30 bp, Artificial Sequence
  Synthetic oligonucleotide
gggggacagtattgtacttcgtagcctaac

SEQ ID NO: 446379 - DNA, 30 bp, Artificial Sequence
  Synthetic oligonucleotide
cgcacagtgggttcaaccaacgtgcctaac

SEQ ID NO: 446380 - DNA, 30 bp, Artificial Sequence
  Synthetic oligonucleotide
ggtgccgagatctttcatcaccctcctaac

SEQ ID NO: 446381 - DNA, 30 bp, Artificial Sequence
  Synthetic oligonucleotide
atttccattttcctggaaagtggtcctaac

SEQ ID NO: 446382 - DNA, 30 bp, Artificial Sequence
  Synthetic oligonucleotide
gtcttgtctctgattgaagcgaaagctaac

SEQ ID NO: 446383 - DNA, 30 bp, Artificial Sequence
  Synthetic oligonucleotide
gactagttagtaaggtactctcccgctaac

SEQ ID NO: 446384 - DNA, 30 bp, Artificial Sequence
  Synthetic oligonucleotide
agctgaacaggtatcttgccccaatctaac

SEQ ID NO: 446385 - DNA, 30 bp, Artificial Sequence
  Synthetic oligonucleotide
gtcaatgcaagttctgacttagagtctaac

SEQ ID NO: 446386 - DNA, 30 bp, Artificial Sequence
  Synthetic oligonucleotide
cctaatgcgtttggcagcacacgttctaac

SEQ ID NO: 446387 - DNA, 30 bp, Artificial Sequence
  Synthetic oligonucleotide
gctggtacacgctaccaagggatttctaac

SEQ ID NO: 446388 - DNA, 30 bp, Artificial Sequence
  Synthetic oligonucleotide
cacaggagcggcatagtcacagtttctaac

SEQ ID NO: 446389 - DNA, 30 bp, Artificial Sequence
  Synthetic oligonucleotide
tcctgacacagtcgcaacgaaaaaagtaac

SEQ ID NO: 446390 - DNA, 30 bp, Artificial Sequence
  Synthetic oligonucleotide
agctatatgcatcgacatggataaagtaac

SEQ ID NO: 446391 - DNA, 30 bp, Artificial Sequence
  Synthetic oligonucleotide
ataagtcgacactaaccccaggacagtaac

SEQ ID NO: 446392 - DNA, 30 bp, Artificial Sequence
  Synthetic oligonucleotide
gtgatataactctaagcgggtcgcagtaac

SEQ ID NO: 446393 - DNA, 30 bp, Artificial Sequence
  Synthetic oligonucleotide
cgatgttaacgcaggattgagcagagtaac

SEQ ID NO: 446394 - DNA, 30 bp, Artificial Sequence
  Synthetic oligonucleotide
agggtccgtcacaccctggcagcgagtaac

SEQ ID NO: 446395 - DNA, 30 bp, Artificial Sequence
  Synthetic oligonucleotide
gtgggtttggcttacctcaagggtagtaac

SEQ ID NO: 446396 - DNA, 30 bp, Artificial Sequence
  Synthetic oligonucleotide
tagagctgtctagtgtacttacaccgtaac

SEQ ID NO: 446397 - DNA, 30 bp, Artificial Sequence
  Synthetic oligonucleotide
gagtgcgacttttggtgaagctagcgtaac

SEQ ID NO: 446398 - DNA, 30 bp, Artificial Sequence
  Synthetic oligonucleotide
cacctcttaatgaagcggcctgcgcgtaac

SEQ ID NO: 446399 - DNA, 30 bp, Artificial Sequence
  Synthetic oligonucleotide
tcgtatggagcagataggaccgatcgtaac

SEQ ID NO: 446400 - DNA, 30 bp, Artificial Sequence
  Synthetic oligonucleotide
gtatggcatcatatgcgatgtcgtcgtaac

SEQ ID NO: 446401 - DNA, 30 bp, Artificial Sequence
  Synthetic oligonucleotide
accgcacgccagacgttcgttggaggtaac

SEQ ID NO: 446402 - DNA, 30 bp, Artificial Sequence
  Synthetic oligonucleotide
tccggttccagagtaagaagagtaggtaac

SEQ ID NO: 446403 - DNA, 30 bp, Artificial Sequence
  Synthetic oligonucleotide
gagttatgcacacgaagggccaacggtaac

SEQ ID NO: 446404 - DNA, 30 bp, Artificial Sequence
  Synthetic oligonucleotide
tcctgccttagatgttcggacaccggtaac

SEQ ID NO: 446405 - DNA, 30 bp, Artificial Sequence
  Synthetic oligonucleotide
tggatcggaagctctccatgactcggtaac

SEQ ID NO: 446406 - DNA, 30 bp, Artificial Sequence
  Synthetic oligonucleotide
tagtagaaaagttaggggtgcttgggtaac

SEQ ID NO: 446407 - DNA, 30 bp, Artificial Sequence
  Synthetic oligonucleotide
tatacagtggttctctcccatgatggtaac

SEQ ID NO: 446408 - DNA, 30 bp, Artificial Sequence
  Synthetic oligonucleotide
aaacaatgatacagacgggtgattggtaac

SEQ ID NO: 446409 - DNA, 30 bp, Artificial Sequence
  Synthetic oligonucleotide
catcattacatcgtcaggctgcactgtaac

SEQ ID NO: 446410 - DNA, 30 bp, Artificial Sequence
  Synthetic oligonucleotide
cctggttcggatactgggcgtggctgtaac

SEQ ID NO: 446411 - DNA, 30 bp, Artificial Sequence
  Synthetic oligonucleotide
ggccaccgccctgtcaggtcagtctgtaac

SEQ ID NO: 446412 - DNA, 30 bp, Artificial Sequence
  Synthetic oligonucleotide
ttctaggccgcccattatacttcgtgtaac

SEQ ID NO: 446413 - DNA, 30 bp, Artificial Sequence
  Synthetic oligonucleotide
tggaagatctggttgctaccgggttgtaac

SEQ ID NO: 446414 - DNA, 30 bp, Artificial Sequence
  Synthetic oligonucleotide
accctaacattcgtcttttcctcaattaac

SEQ ID NO: 446415 - DNA, 30 bp, Artificial Sequence
  Synthetic oligonucleotide
ccgctatgttctgtaaattccataattaac

SEQ ID NO: 446416 - DNA, 30 bp, Artificial Sequence
  Synthetic oligonucleotide
atcattccattgcgtgactaggtaattaac

SEQ ID NO: 446417 - DNA, 30 bp, Artificial Sequence
  Synthetic oligonucleotide
tttagttgtattccggtaatgaacattaac

SEQ ID NO: 446418 - DNA, 30 bp, Artificial Sequence
  Synthetic oligonucleotide
tgcgaacccaaaagcgtatgaagcattaac

SEQ ID NO: 446419 - DNA, 30 bp, Artificial Sequence
  Synthetic oligonucleotide
tatccggtaaatctctcttctaagattaac

SEQ ID NO: 446420 - DNA, 30 bp, Artificial Sequence
  Synthetic oligonucleotide
tttatcatggcttctcgacgggggattaac

SEQ ID NO: 446421 - DNA, 30 bp, Artificial Sequence
  Synthetic oligonucleotide
acactatttgtagcataccctcatattaac

SEQ ID NO: 446422 - DNA, 30 bp, Artificial Sequence
  Synthetic oligonucleotide
atagatgacgcatattctagagaacttaac

SEQ ID NO: 446423 - DNA, 30 bp, Artificial Sequence
  Synthetic oligonucleotide
gaagcaataatggctaaaacttcacttaac

SEQ ID NO: 446424 - DNA, 30 bp, Artificial Sequence
  Synthetic oligonucleotide
tttggggtgtgcgttggctgttcacttaac

SEQ ID NO: 446425 - DNA, 30 bp, Artificial Sequence
  Synthetic oligonucleotide
gtaacttggcagccgttcgggagacttaac

SEQ ID NO: 446426 - DNA, 30 bp, Artificial Sequence
  Synthetic oligonucleotide
gccaactgtcgatatggacccacccttaac

SEQ ID NO: 446427 - DNA, 30 bp, Artificial Sequence
  Synthetic oligonucleotide
atggacgatctaacttctagacgccttaac

SEQ ID NO: 446428 - DNA, 30 bp, Artificial Sequence
  Synthetic oligonucleotide
ctgctcctaagaccggaggaatgtcttaac

SEQ ID NO: 446429 - DNA, 30 bp, Artificial Sequence
  Synthetic oligonucleotide
agatttgtttaggttaaagttagagttaac

SEQ ID NO: 446430 - DNA, 30 bp, Artificial Sequence
  Synthetic oligonucleotide
acggctcgtaggcagctctgtatagttaac

SEQ ID NO: 446431 - DNA, 30 bp, Artificial Sequence
  Synthetic oligonucleotide
tatcacgacggggtggcttgtaacgttaac

SEQ ID NO: 446432 - DNA, 30 bp, Artificial Sequence
  Synthetic oligonucleotide
ataagaggagtagatttctcctgcgttaac

SEQ ID NO: 446433 - DNA, 30 bp, Artificial Sequence
  Synthetic oligonucleotide
tatagtcgactagatgttacgccggttaac

SEQ ID NO: 446434 - DNA, 30 bp, Artificial Sequence
  Synthetic oligonucleotide
agtctgaagcgttcttttactgatgttaac

SEQ ID NO: 446435 - DNA, 30 bp, Artificial Sequence
  Synthetic oligonucleotide
cggctgggagccttctagccacttgttaac

SEQ ID NO: 446436 - DNA, 30 bp, Artificial Sequence
  Synthetic oligonucleotide
gcgcggataactgcgacttgtcttgttaac

SEQ ID NO: 446437 - DNA, 31 bp, Artificial Sequence
  Synthetic oligonucleotide
agaatataccggcgcagatgaacgatttaac

SEQ ID NO: 446438 - DNA, 30 bp, Artificial Sequence
  Synthetic oligonucleotide
ctacgggaattgcgttatgacctatttaac

SEQ ID NO: 446439 - DNA, 30 bp, Artificial Sequence
  Synthetic oligonucleotide
tttaagtgtagaagtgctccacactttaac

SEQ ID NO: 446440 - DNA, 30 bp, Artificial Sequence
  Synthetic oligonucleotide
gggtatgtacctgtgaagaactactttaac

SEQ ID NO: 446441 - DNA, 30 bp, Artificial Sequence
  Synthetic oligonucleotide
ctcttaatgacagaactctactactttaac

SEQ ID NO: 446442 - DNA, 30 bp, Artificial Sequence
  Synthetic oligonucleotide
gataatgacccttgttggggctactttaac

SEQ ID NO: 446443 - DNA, 30 bp, Artificial Sequence
  Synthetic oligonucleotide
ggccgcacatccagactagctctctttaac

SEQ ID NO: 446444 - DNA, 30 bp, Artificial Sequence
  Synthetic oligonucleotide
ataactatgtgtactctgggaacgtttaac

SEQ ID NO: 446445 - DNA, 30 bp, Artificial Sequence
  Synthetic oligonucleotide
tcacaaatacagatccgcggaatttttaac

SEQ ID NO: 446446 - DNA, 30 bp, Artificial Sequence
  Synthetic oligonucleotide
ccgtcaaccgcgcgggcagcaaaaaaacac

SEQ ID NO: 446447 - DNA, 30 bp, Artificial Sequence
  Synthetic oligonucleotide
ctaagcttgtcacggcccttgcaaaaacac

SEQ ID NO: 446448 - DNA, 30 bp, Artificial Sequence
  Synthetic oligonucleotide
gactctcatatatcggacagaagaaaacac

SEQ ID NO: 446449 - DNA, 30 bp, Artificial Sequence
  Synthetic oligonucleotide
gaaaagacgaggagttaccttctaaaacac

SEQ ID NO: 446450 - DNA, 30 bp, Artificial Sequence
  Synthetic oligonucleotide
cgtgatacgcaggaggggtaagtgaaacac

SEQ ID NO: 446451 - DNA, 30 bp, Artificial Sequence
  Synthetic oligonucleotide
aatcctcaaatatccgtatagccccaacac

SEQ ID NO: 446452 - DNA, 30 bp, Artificial Sequence
  Synthetic oligonucleotide
gcggcatgctagggtttctatagccaacac

SEQ ID NO: 446453 - DNA, 30 bp, Artificial Sequence
  Synthetic oligonucleotide
ctagcaatacttgtgaggatcttccaacac

SEQ ID NO: 446454 - DNA, 31 bp, Artificial Sequence
  Synthetic oligonucleotide
aagtcagccagtgttgactcatgggcaacac

SEQ ID NO: 446455 - DNA, 30 bp, Artificial Sequence
  Synthetic oligonucleotide
aatcggtagaaagtaactgagtatcaacac

SEQ ID NO: 446456 - DNA, 30 bp, Artificial Sequence
  Synthetic oligonucleotide
cagtcttagcttgatctggccagtcaacac

SEQ ID NO: 446457 - DNA, 30 bp, Artificial Sequence
  Synthetic oligonucleotide
ttagatatatagcagtagagcggtcaacac

SEQ ID NO: 446458 - DNA, 30 bp, Artificial Sequence
  Synthetic oligonucleotide
gtcgtttgtcttccaagaaatggagaacac

SEQ ID NO: 446459 - DNA, 30 bp, Artificial Sequence
  Synthetic oligonucleotide
tgaacgcgtggagactctctttgagaacac

SEQ ID NO: 446460 - DNA, 30 bp, Artificial Sequence
  Synthetic oligonucleotide
gcaggttagtggatgttacacgcggaacac

SEQ ID NO: 446461 - DNA, 30 bp, Artificial Sequence
  Synthetic oligonucleotide
aagcgagtcaccgtgctcgccagggaacac

SEQ ID NO: 446462 - DNA, 30 bp, Artificial Sequence
  Synthetic oligonucleotide
cctgccaagcatggaggacggttggaacac

SEQ ID NO: 446463 - DNA, 30 bp, Artificial Sequence
  Synthetic oligonucleotide
acctctttggagtcgccggtcattgaacac

SEQ ID NO: 446464 - DNA, 30 bp, Artificial Sequence
  Synthetic oligonucleotide
ggtgactcaagacgcccttatatataacac

SEQ ID NO: 446465 - DNA, 30 bp, Artificial Sequence
  Synthetic oligonucleotide
aattatgaacgttaaatagcggactaacac

SEQ ID NO: 446466 - DNA, 30 bp, Artificial Sequence
  Synthetic oligonucleotide
atagtgagttcttagaataacatctaacac

SEQ ID NO: 446467 - DNA, 30 bp, Artificial Sequence
  Synthetic oligonucleotide
cgggttcacgctcgctttggagtctaacac

SEQ ID NO: 446468 - DNA, 30 bp, Artificial Sequence
  Synthetic oligonucleotide
gaagacgcttattattactgcatttaacac

SEQ ID NO: 446469 - DNA, 30 bp, Artificial Sequence
  Synthetic oligonucleotide
ggggcgtttcgggtgttcttcctttaacac

SEQ ID NO: 446470 - DNA, 30 bp, Artificial Sequence
  Synthetic oligonucleotide
tagttcttgtgtcgcgaaattgtcacacac

SEQ ID NO: 446471 - DNA, 30 bp, Artificial Sequence
  Synthetic oligonucleotide
aaatacacattaacttccggacagacacac

SEQ ID NO: 446472 - DNA, 30 bp, Artificial Sequence
  Synthetic oligonucleotide
gcagtgctgctgctcctatttccgacacac

SEQ ID NO: 446473 - DNA, 30 bp, Artificial Sequence
  Synthetic oligonucleotide
ataatttaagagggacttcacatgacacac

SEQ ID NO: 446474 - DNA, 30 bp, Artificial Sequence
  Synthetic oligonucleotide
atgataactcgtgcacagtggaatacacac

SEQ ID NO: 446475 - DNA, 30 bp, Artificial Sequence
  Synthetic oligonucleotide
ctatcagaatgcagagaacttgttacacac

SEQ ID NO: 446476 - DNA, 30 bp, Artificial Sequence
  Synthetic oligonucleotide
ctcgggttatcttgtacccatacaccacac

SEQ ID NO: 446477 - DNA, 30 bp, Artificial Sequence
  Synthetic oligonucleotide
gtgaaagagtgatcctaagtgttaccacac

SEQ ID NO: 446478 - DNA, 30 bp, Artificial Sequence
  Synthetic oligonucleotide
gaggtttcgccatcatgcttagacccacac

SEQ ID NO: 446479 - DNA, 30 bp, Artificial Sequence
  Synthetic oligonucleotide
gctttgaaactggccaaaggcgggccacac

SEQ ID NO: 446480 - DNA, 30 bp, Artificial Sequence
  Synthetic oligonucleotide
actatgcataagacaagattgggtccacac

SEQ ID NO: 446481 - DNA, 30 bp, Artificial Sequence
  Synthetic oligonucleotide
actgttaatctcttccgttgccgggcacac

SEQ ID NO: 446482 - DNA, 30 bp, Artificial Sequence
  Synthetic oligonucleotide
gctaaccacgacgcgcgtcagttggcacac

SEQ ID NO: 446483 - DNA, 30 bp, Artificial Sequence
  Synthetic oligonucleotide
aagataggatcgttattttgtgttgcacac

SEQ ID NO: 446484 - DNA, 30 bp, Artificial Sequence
  Synthetic oligonucleotide
gtaactttataagaagcatttgaatcacac

SEQ ID NO: 446485 - DNA, 30 bp, Artificial Sequence
  Synthetic oligonucleotide
tgcggccttgtcttgccaggttgctcacac

SEQ ID NO: 446486 - DNA, 30 bp, Artificial Sequence
  Synthetic oligonucleotide
aagtctttctcagtaacaataaggtcacac

SEQ ID NO: 446487 - DNA, 30 bp, Artificial Sequence
  Synthetic oligonucleotide
tctatatagaaagggtgttctaggtcacac

SEQ ID NO: 446488 - DNA, 30 bp, Artificial Sequence
  Synthetic oligonucleotide
aaaacatatttcgttgtaggggggtcacac

SEQ ID NO: 446489 - DNA, 30 bp, Artificial Sequence
  Synthetic oligonucleotide
gagggaggtcctataagcccccgcagacac

SEQ ID NO: 446490 - DNA, 30 bp, Artificial Sequence
  Synthetic oligonucleotide
tagggatgagagccgggatggcgcagacac

SEQ ID NO: 446491 - DNA, 30 bp, Artificial Sequence
  Synthetic oligonucleotide
gccaatctgttaactttttgctgcagacac

SEQ ID NO: 446492 - DNA, 30 bp, Artificial Sequence
  Synthetic oligonucleotide
agacgcagtcggtccgtagacaggagacac

SEQ ID NO: 446493 - DNA, 30 bp, Artificial Sequence
  Synthetic oligonucleotide
atacacggagagaccttacaataccgacac

SEQ ID NO: 446494 - DNA, 30 bp, Artificial Sequence
  Synthetic oligonucleotide
gactttgcgagatacaagctataccgacac

SEQ ID NO: 446495 - DNA, 30 bp, Artificial Sequence
  Synthetic oligonucleotide
ggacctgccaaaagggtcggttaccgacac

SEQ ID NO: 446496 - DNA, 30 bp, Artificial Sequence
  Synthetic oligonucleotide
gactttttcgtagtatgtatgacccgacac

SEQ ID NO: 446497 - DNA, 30 bp, Artificial Sequence
  Synthetic oligonucleotide
ggttcagggctggtaaactatgcccgacac

SEQ ID NO: 446498 - DNA, 31 bp, Artificial Sequence
  Synthetic oligonucleotide
gcgtacctcgaatgattcgcccatccgacac

SEQ ID NO: 446499 - DNA, 30 bp, Artificial Sequence
  Synthetic oligonucleotide
atttgccgcacgatcatttgtaagcgacac

SEQ ID NO: 446500 - DNA, 30 bp, Artificial Sequence
  Synthetic oligonucleotide
agatatgactgcgaggaacgacagcgacac

SEQ ID NO: 446501 - DNA, 30 bp, Artificial Sequence
  Synthetic oligonucleotide
gggtatttacagcacatatatgcgcgacac

SEQ ID NO: 446502 - DNA, 30 bp, Artificial Sequence
  Synthetic oligonucleotide
gaataacctatacgtccgtacgggcgacac

SEQ ID NO: 446503 - DNA, 30 bp, Artificial Sequence
  Synthetic oligonucleotide
gcttagccataaatatctttcgtgcgacac

SEQ ID NO: 446504 - DNA, 30 bp, Artificial Sequence
  Synthetic oligonucleotide
gactccataggggttacggtgagtcgacac

SEQ ID NO: 446505 - DNA, 30 bp, Artificial Sequence
  Synthetic oligonucleotide
tcaggtctttacgcagcgagcgttcgacac

SEQ ID NO: 446506 - DNA, 30 bp, Artificial Sequence
  Synthetic oligonucleotide
ttatttcacggggactgtaagcccggacac

SEQ ID NO: 446507 - DNA, 30 bp, Artificial Sequence
  Synthetic oligonucleotide
agcctaagtctcataaccgcatgcggacac

SEQ ID NO: 446508 - DNA, 30 bp, Artificial Sequence
  Synthetic oligonucleotide
gacgcagtgtactgccctgaactcggacac

SEQ ID NO: 446509 - DNA, 30 bp, Artificial Sequence
  Synthetic oligonucleotide
tttagggggcccatccatccttagggacac

SEQ ID NO: 446510 - DNA, 30 bp, Artificial Sequence
  Synthetic oligonucleotide
taacagacccccaggtgaaggtatggacac

SEQ ID NO: 446511 - DNA, 30 bp, Artificial Sequence
  Synthetic oligonucleotide
cacaagatacatcccgaatattatggacac

SEQ ID NO: 446512 - DNA, 30 bp, Artificial Sequence
  Synthetic oligonucleotide
gtgacttagaagaactctacacttggacac

SEQ ID NO: 446513 - DNA, 30 bp, Artificial Sequence
  Synthetic oligonucleotide
agcggccggtcttacacgtgttactgacac

SEQ ID NO: 446514 - DNA, 30 bp, Artificial Sequence
  Synthetic oligonucleotide
gttaattaccatagtatctctagctgacac

SEQ ID NO: 446515 - DNA, 30 bp, Artificial Sequence
  Synthetic oligonucleotide
gtaattgtctccgatggctttggctgacac

SEQ ID NO: 446516 - DNA, 30 bp, Artificial Sequence
  Synthetic oligonucleotide
aatgtaacgggttataatttaacaatacac

SEQ ID NO: 446517 - DNA, 30 bp, Artificial Sequence
  Synthetic oligonucleotide
aagtccgctaatcacttaaacgtaatacac

SEQ ID NO: 446518 - DNA, 30 bp, Artificial Sequence
  Synthetic oligonucleotide
aggggacggtcagagtgcccagacatacac

SEQ ID NO: 446519 - DNA, 30 bp, Artificial Sequence
  Synthetic oligonucleotide
tgcaggaccatggtagttgtcatcatacac

SEQ ID NO: 446520 - DNA, 30 bp, Artificial Sequence
  Synthetic oligonucleotide
gcgattcgattcctagaactatcgatacac

SEQ ID NO: 446521 - DNA, 30 bp, Artificial Sequence
  Synthetic oligonucleotide
gatttgtatttagtttgtcctctgatacac

SEQ ID NO: 446522 - DNA, 30 bp, Artificial Sequence
  Synthetic oligonucleotide
cggactccttatcaacggagctaactacac

SEQ ID NO: 446523 - DNA, 30 bp, Artificial Sequence
  Synthetic oligonucleotide
gctccgggtcttgatggagttagactacac

SEQ ID NO: 446524 - DNA, 30 bp, Artificial Sequence
  Synthetic oligonucleotide
accctgcggggtagacctctgggactacac

SEQ ID NO: 446525 - DNA, 30 bp, Artificial Sequence
  Synthetic oligonucleotide
aggagtcgtcgtcgacggtttcccctacac

SEQ ID NO: 446526 - DNA, 30 bp, Artificial Sequence
  Synthetic oligonucleotide
cccgctggagtgtacaatgtaagcctacac

SEQ ID NO: 446527 - DNA, 30 bp, Artificial Sequence
  Synthetic oligonucleotide
gagaaggccccgaagcgtcattctctacac

SEQ ID NO: 446528 - DNA, 30 bp, Artificial Sequence
  Synthetic oligonucleotide
tacacttttcatagttacttttgagtacac

SEQ ID NO: 446529 - DNA, 30 bp, Artificial Sequence
  Synthetic oligonucleotide
acgccgggccatttgcaaaggtccgtacac

SEQ ID NO: 446530 - DNA, 30 bp, Artificial Sequence
  Synthetic oligonucleotide
ccagcttggaggccgcttaataaggtacac

SEQ ID NO: 446531 - DNA, 30 bp, Artificial Sequence
  Synthetic oligonucleotide
aaacgccctttgaggcgactcacggtacac

SEQ ID NO: 446532 - DNA, 30 bp, Artificial Sequence
  Synthetic oligonucleotide
cctgacaaggttactgggatactggtacac

SEQ ID NO: 446533 - DNA, 30 bp, Artificial Sequence
  Synthetic oligonucleotide
actacacacccgatggatactgatgtacac

SEQ ID NO: 446534 - DNA, 30 bp, Artificial Sequence
  Synthetic oligonucleotide
cagtaagtcggccaggtataaactgtacac

SEQ ID NO: 446535 - DNA, 30 bp, Artificial Sequence
  Synthetic oligonucleotide
aagccatcgtactcctacgttcttgtacac

SEQ ID NO: 446536 - DNA, 30 bp, Artificial Sequence
  Synthetic oligonucleotide
gggtcaggcgacgcactggtaaaattacac

SEQ ID NO: 446537 - DNA, 30 bp, Artificial Sequence
  Synthetic oligonucleotide
acctgtctctggctgagtagaatattacac

SEQ ID NO: 446538 - DNA, 30 bp, Artificial Sequence
  Synthetic oligonucleotide
ccagtgtgttggcaacgtcttcacttacac

SEQ ID NO: 446539 - DNA, 30 bp, Artificial Sequence
  Synthetic oligonucleotide
catcgtagcgggtgccttgagtccttacac

SEQ ID NO: 446540 - DNA, 30 bp, Artificial Sequence
  Synthetic oligonucleotide
cccggtttgggtataccgtgagcgttacac

SEQ ID NO: 446541 - DNA, 30 bp, Artificial Sequence
  Synthetic oligonucleotide
ttatgtaaattgcattcccgacggttacac

SEQ ID NO: 446542 - DNA, 30 bp, Artificial Sequence
  Synthetic oligonucleotide
tattaagacagagtgcttagtcctttacac

SEQ ID NO: 446543 - DNA, 30 bp, Artificial Sequence
  Synthetic oligonucleotide
gtagaagatgagccgggccgttctttacac

SEQ ID NO: 446544 - DNA, 30 bp, Artificial Sequence
  Synthetic oligonucleotide
cggattgttgggtaagcttccccaaaccac

SEQ ID NO: 446545 - DNA, 30 bp, Artificial Sequence
  Synthetic oligonucleotide
cgcacagggtgcatagttgaagcaaaccac

SEQ ID NO: 446546 - DNA, 30 bp, Artificial Sequence
  Synthetic oligonucleotide
agcttgctattcagatgctgcctaaaccac

SEQ ID NO: 446547 - DNA, 30 bp, Artificial Sequence
  Synthetic oligonucleotide
aaaattgttgatcacgagtgcgccaaccac

SEQ ID NO: 446548 - DNA, 30 bp, Artificial Sequence
  Synthetic oligonucleotide
ttttgcctggggctttaggatcgcaaccac

SEQ ID NO: 446549 - DNA, 30 bp, Artificial Sequence
  Synthetic oligonucleotide
gccttggccttgacaggacaacagaaccac

SEQ ID NO: 446550 - DNA, 30 bp, Artificial Sequence
  Synthetic oligonucleotide
ctataacgggtggttgggcatatgaaccac

SEQ ID NO: 446551 - DNA, 30 bp, Artificial Sequence
  Synthetic oligonucleotide
tatataaccttcacgttcatgtataaccac

SEQ ID NO: 446552 - DNA, 30 bp, Artificial Sequence
  Synthetic oligonucleotide
aggtctatggtttgatgcacgacacaccac

SEQ ID NO: 446553 - DNA, 30 bp, Artificial Sequence
  Synthetic oligonucleotide
ggccgtgggcaggaaacgacgtggcaccac

SEQ ID NO: 446554 - DNA, 30 bp, Artificial Sequence
  Synthetic oligonucleotide
aacgagttcgcgcggtatgcacgtcaccac

SEQ ID NO: 446555 - DNA, 30 bp, Artificial Sequence
  Synthetic oligonucleotide
ctgttacccgtggggggttctgaagaccac

SEQ ID NO: 446556 - DNA, 30 bp, Artificial Sequence
  Synthetic oligonucleotide
gcacagtcccttgatggtgctatagaccac

SEQ ID NO: 446557 - DNA, 30 bp, Artificial Sequence
  Synthetic oligonucleotide
ggttaataggagagttggtatgacgaccac

SEQ ID NO: 446558 - DNA, 30 bp, Artificial Sequence
  Synthetic oligonucleotide
cgactggaatttcacccttttagcgaccac

SEQ ID NO: 446559 - DNA, 30 bp, Artificial Sequence
  Synthetic oligonucleotide
accattgcggcggtagtcaccttcgaccac

SEQ ID NO: 446560 - DNA, 30 bp, Artificial Sequence
  Synthetic oligonucleotide
gagacttttagtccggggttaattgaccac

SEQ ID NO: 446561 - DNA, 30 bp, Artificial Sequence
  Synthetic oligonucleotide
atttcctcccaacttgagtttattgaccac

SEQ ID NO: 446562 - DNA, 30 bp, Artificial Sequence
  Synthetic oligonucleotide
cagtccagatccgtgacttcaatataccac

SEQ ID NO: 446563 - DNA, 30 bp, Artificial Sequence
  Synthetic oligonucleotide
tcttgagatcgagcagacggcatataccac

SEQ ID NO: 446564 - DNA, 30 bp, Artificial Sequence
  Synthetic oligonucleotide
gtcgtcatgtgggccgaagggaggtaccac

SEQ ID NO: 446565 - DNA, 30 bp, Artificial Sequence
  Synthetic oligonucleotide
ttctagcacgctagcatagtagggtaccac

SEQ ID NO: 446566 - DNA, 30 bp, Artificial Sequence
  Synthetic oligonucleotide
gtttgtcgagactctactacgacttaccac

SEQ ID NO: 446567 - DNA, 30 bp, Artificial Sequence
  Synthetic oligonucleotide
ttcgccgtaactattgacgtgttttaccac

SEQ ID NO: 446568 - DNA, 30 bp, Artificial Sequence
  Synthetic oligonucleotide
gcgctgttaagagtataggtcgcaacccac

SEQ ID NO: 446569 - DNA, 30 bp, Artificial Sequence
  Synthetic oligonucleotide
tgcgttagatgtacagtttttataacccac

SEQ ID NO: 446570 - DNA, 30 bp, Artificial Sequence
  Synthetic oligonucleotide
gacaacctgttgaatacgctaatgacccac

SEQ ID NO: 446571 - DNA, 30 bp, Artificial Sequence
  Synthetic oligonucleotide
ctgttcggacgtgtgtccagtttgacccac

SEQ ID NO: 446572 - DNA, 30 bp, Artificial Sequence
  Synthetic oligonucleotide
ctgtcgcctattgtcctcacatatacccac

SEQ ID NO: 446573 - DNA, 30 bp, Artificial Sequence
  Synthetic oligonucleotide
ctgcagtggcacaatgtacgtataccccac

SEQ ID NO: 446574 - DNA, 30 bp, Artificial Sequence
  Synthetic oligonucleotide
cgggtcagatcgtggactcgccagccccac

SEQ ID NO: 446575 - DNA, 30 bp, Artificial Sequence
  Synthetic oligonucleotide
ttcattacgagcgttagccagctagcccac

SEQ ID NO: 446576 - DNA, 30 bp, Artificial Sequence
  Synthetic oligonucleotide
ttctgttcggaaagcgccgcgagcgcccac

SEQ ID NO: 446577 - DNA, 28 bp, Artificial Sequence
  Synthetic oligonucleotide
gcccgggcatcgttggcaaaaggcccac

SEQ ID NO: 446578 - DNA, 30 bp, Artificial Sequence
  Synthetic oligonucleotide
ctggccctccccgtgtatggcatatcccac

SEQ ID NO: 446579 - DNA, 30 bp, Artificial Sequence
  Synthetic oligonucleotide
cccgcttgacagagtggctcattatcccac

SEQ ID NO: 446580 - DNA, 30 bp, Artificial Sequence
  Synthetic oligonucleotide
ggtgatagatgcaggtcaatcttatcccac

SEQ ID NO: 446581 - DNA, 30 bp, Artificial Sequence
  Synthetic oligonucleotide
gctctaataaccggaccggggcgctcccac

SEQ ID NO: 446582 - DNA, 30 bp, Artificial Sequence
  Synthetic oligonucleotide
gacctaattaatggtcaaaatatctcccac

SEQ ID NO: 446583 - DNA, 30 bp, Artificial Sequence
  Synthetic oligonucleotide
caaaaagctttcaatggcaattcaagccac

SEQ ID NO: 446584 - DNA, 30 bp, Artificial Sequence
  Synthetic oligonucleotide
cccggatggcgacggccatgcaccagccac

SEQ ID NO: 446585 - DNA, 30 bp, Artificial Sequence
  Synthetic oligonucleotide
agccggtagcagggcgtaatagccagccac

SEQ ID NO: 446586 - DNA, 30 bp, Artificial Sequence
  Synthetic oligonucleotide
gacgggttctgatactaagtactgagccac

SEQ ID NO: 446587 - DNA, 30 bp, Artificial Sequence
  Synthetic oligonucleotide
aacttacaccgggtggccggccgtagccac

SEQ ID NO: 446588 - DNA, 30 bp, Artificial Sequence
  Synthetic oligonucleotide
cggtagaatgttatctgttcccgccgccac

SEQ ID NO: 446589 - DNA, 30 bp, Artificial Sequence
  Synthetic oligonucleotide
tcgacgctgtcagtgacacgtatgcgccac

SEQ ID NO: 446590 - DNA, 30 bp, Artificial Sequence
  Synthetic oligonucleotide
gaattattcagagccgacacgtcaggccac

SEQ ID NO: 446591 - DNA, 30 bp, Artificial Sequence
  Synthetic oligonucleotide
ttgcgtcgtacagcacatggctgaggccac

SEQ ID NO: 446592 - DNA, 30 bp, Artificial Sequence
  Synthetic oligonucleotide
ttcggtaacggctccggggttctaggccac

SEQ ID NO: 446593 - DNA, 30 bp, Artificial Sequence
  Synthetic oligonucleotide
agcacaggaaacgtttcatgcccgggccac

SEQ ID NO: 446594 - DNA, 30 bp, Artificial Sequence
  Synthetic oligonucleotide
gggaccgatagaaccggtatcaggggccac

SEQ ID NO: 446595 - DNA, 30 bp, Artificial Sequence
  Synthetic oligonucleotide
tcaagtcgaaacacctgtaggttgggccac

SEQ ID NO: 446596 - DNA, 30 bp, Artificial Sequence
  Synthetic oligonucleotide
ggccacctgccgtttcacgcccctggccac

SEQ ID NO: 446597 - DNA, 30 bp, Artificial Sequence
  Synthetic oligonucleotide
gcagtgatacgccggttcgctgaatgccac

SEQ ID NO: 446598 - DNA, 30 bp, Artificial Sequence
  Synthetic oligonucleotide
tttaacttgtaaaccgttctgacatgccac

SEQ ID NO: 446599 - DNA, 30 bp, Artificial Sequence
  Synthetic oligonucleotide
tactcatattaaagccagcactagtgccac

SEQ ID NO: 446600 - DNA, 30 bp, Artificial Sequence
  Synthetic oligonucleotide
agcattgccccatgcgcagcttggtgccac

SEQ ID NO: 446601 - DNA, 30 bp, Artificial Sequence
  Synthetic oligonucleotide
cagtagacgtttacgttggacaaaatccac

SEQ ID NO: 446602 - DNA, 30 bp, Artificial Sequence
  Synthetic oligonucleotide
cgactcatttctagattttaacaaatccac

SEQ ID NO: 446603 - DNA, 30 bp, Artificial Sequence
  Synthetic oligonucleotide
gcgcaccgccgtacacggtcatagatccac

SEQ ID NO: 446604 - DNA, 30 bp, Artificial Sequence
  Synthetic oligonucleotide
ggcagtcgatcaacctcgacgtggatccac

SEQ ID NO: 446605 - DNA, 30 bp, Artificial Sequence
  Synthetic oligonucleotide
gtcgagtgcttgttgttgagagctatccac

SEQ ID NO: 446606 - DNA, 30 bp, Artificial Sequence
  Synthetic oligonucleotide
accagggtctgacatggagccgttatccac

SEQ ID NO: 446607 - DNA, 30 bp, Artificial Sequence
  Synthetic oligonucleotide
tcatgcttagcgcgcgttgtataactccac

SEQ ID NO: 446608 - DNA, 30 bp, Artificial Sequence
  Synthetic oligonucleotide
tttggggaccgggtttccaaaaagctccac

SEQ ID NO: 446609 - DNA, 30 bp, Artificial Sequence
  Synthetic oligonucleotide
ctgtctaacggtttattagcgctgctccac

SEQ ID NO: 446610 - DNA, 30 bp, Artificial Sequence
  Synthetic oligonucleotide
gcgctggcaggtcccccagccttgctccac

SEQ ID NO: 446611 - DNA, 30 bp, Artificial Sequence
  Synthetic oligonucleotide
gtaccttgggctcgaagtggatctgtccac

SEQ ID NO: 446612 - DNA, 30 bp, Artificial Sequence
  Synthetic oligonucleotide
aaggttcctagcgggacgacttttgtccac

SEQ ID NO: 446613 - DNA, 30 bp, Artificial Sequence
  Synthetic oligonucleotide
caggtgggtataattctggatcagttccac

SEQ ID NO: 446614 - DNA, 30 bp, Artificial Sequence
  Synthetic oligonucleotide
tgtccgtcaatcggggatacctagttccac

SEQ ID NO: 446615 - DNA, 30 bp, Artificial Sequence
  Synthetic oligonucleotide
catcagctggggaggcgccgtaggttccac

SEQ ID NO: 446616 - DNA, 30 bp, Artificial Sequence
  Synthetic oligonucleotide
ctggtcctgagagccacgaagttgttccac

SEQ ID NO: 446617 - DNA, 30 bp, Artificial Sequence
  Synthetic oligonucleotide
agtacctaggtagcctccgggaatttccac

SEQ ID NO: 446618 - DNA, 30 bp, Artificial Sequence
  Synthetic oligonucleotide
ctgtgtcccaactatcggctctatttccac

SEQ ID NO: 446619 - DNA, 30 bp, Artificial Sequence
  Synthetic oligonucleotide
gtttaacgcagtaataaacgttttttccac

SEQ ID NO: 446620 - DNA, 30 bp, Artificial Sequence
  Synthetic oligonucleotide
tatcgcgaaatattgaggcggcaaaagcac

SEQ ID NO: 446621 - DNA, 30 bp, Artificial Sequence
  Synthetic oligonucleotide
gttacgtcgtcgcttttttccgaaaagcac

SEQ ID NO: 446622 - DNA, 30 bp, Artificial Sequence
  Synthetic oligonucleotide
gagcgacccgtctggatgccatgcaagcac

SEQ ID NO: 446623 - DNA, 30 bp, Artificial Sequence
  Synthetic oligonucleotide
gcagctgagtatcgcctctagttcaagcac

SEQ ID NO: 446624 - DNA, 30 bp, Artificial Sequence
  Synthetic oligonucleotide
cataccgactggttttttaaccagaagcac

SEQ ID NO: 446625 - DNA, 30 bp, Artificial Sequence
  Synthetic oligonucleotide
gatcttgtatatttagtgaacgggaagcac

SEQ ID NO: 446626 - DNA, 30 bp, Artificial Sequence
  Synthetic oligonucleotide
gtttctaatactttcctattgcataagcac

SEQ ID NO: 446627 - DNA, 30 bp, Artificial Sequence
  Synthetic oligonucleotide
gagaactgttcatgcagttgttctaagcac

SEQ ID NO: 446628 - DNA, 30 bp, Artificial Sequence
  Synthetic oligonucleotide
gtttttaagtattcacagctctttaagcac

SEQ ID NO: 446629 - DNA, 30 bp, Artificial Sequence
  Synthetic oligonucleotide
ttatgtgcggaggctttatacggacagcac

SEQ ID NO: 446630 - DNA, 30 bp, Artificial Sequence
  Synthetic oligonucleotide
attgatatgcgaaccgtgtaacaccagcac

SEQ ID NO: 446631 - DNA, 30 bp, Artificial Sequence
  Synthetic oligonucleotide
taagagattatgaaatgtgttaagcagcac

SEQ ID NO: 446632 - DNA, 30 bp, Artificial Sequence
  Synthetic oligonucleotide
tggttcggctgatggctacagcggcagcac

SEQ ID NO: 446633 - DNA, 30 bp, Artificial Sequence
  Synthetic oligonucleotide
ttgactgcgtgtccatgtgagtggcagcac

SEQ ID NO: 446634 - DNA, 30 bp, Artificial Sequence
  Synthetic oligonucleotide
atttacgtcatagtggactttatgcagcac

SEQ ID NO: 446635 - DNA, 30 bp, Artificial Sequence
  Synthetic oligonucleotide
agaccatctgggtgtaggtctcctcagcac

SEQ ID NO: 446636 - DNA, 30 bp, Artificial Sequence
  Synthetic oligonucleotide
gggcagacctaacatgccgtgcaagagcac

SEQ ID NO: 446637 - DNA, 30 bp, Artificial Sequence
  Synthetic oligonucleotide
atgcccaacgacgagtgcagggcggagcac

SEQ ID NO: 446638 - DNA, 30 bp, Artificial Sequence
  Synthetic oligonucleotide
gggtataggggttctaatactgcggagcac

SEQ ID NO: 446639 - DNA, 30 bp, Artificial Sequence
  Synthetic oligonucleotide
gtgaatatgcacagctatatctatgagcac

SEQ ID NO: 446640 - DNA, 30 bp, Artificial Sequence
  Synthetic oligonucleotide
acccgatatgttcaggagttccactagcac

SEQ ID NO: 446641 - DNA, 30 bp, Artificial Sequence
  Synthetic oligonucleotide
ccggacacgcaagttactgatttctagcac

SEQ ID NO: 446642 - DNA, 30 bp, Artificial Sequence
  Synthetic oligonucleotide
cgggtatagccccaatctcattggtagcac

SEQ ID NO: 446643 - DNA, 30 bp, Artificial Sequence
  Synthetic oligonucleotide
cttggtaacctagcagaatcgatgtagcac

SEQ ID NO: 446644 - DNA, 30 bp, Artificial Sequence
  Synthetic oligonucleotide
cggcttgacataagcgtccggtaaacgcac

SEQ ID NO: 446645 - DNA, 30 bp, Artificial Sequence
  Synthetic oligonucleotide
acatcagtgcggagggcattttcaacgcac

SEQ ID NO: 446646 - DNA, 30 bp, Artificial Sequence
  Synthetic oligonucleotide
cgcggaagtagtctaagcaccataacgcac

SEQ ID NO: 446647 - DNA, 30 bp, Artificial Sequence
  Synthetic oligonucleotide
cgggcggcatatctcgcatgtataacgcac

SEQ ID NO: 446648 - DNA, 30 bp, Artificial Sequence
  Synthetic oligonucleotide
taaaaatttacaaagcagcttataacgcac

SEQ ID NO: 446649 - DNA, 30 bp, Artificial Sequence
  Synthetic oligonucleotide
gccagaccgcagtcaccataatagacgcac

SEQ ID NO: 446650 - DNA, 30 bp, Artificial Sequence
  Synthetic oligonucleotide
agactccatacgacatttggatagacgcac

SEQ ID NO: 446651 - DNA, 30 bp, Artificial Sequence
  Synthetic oligonucleotide
aggatctggccttaatggggaatgacgcac

SEQ ID NO: 446652 - DNA, 30 bp, Artificial Sequence
  Synthetic oligonucleotide
tgacctggaccaaccgtatggagaccgcac

SEQ ID NO: 446653 - DNA, 30 bp, Artificial Sequence
  Synthetic oligonucleotide
aaggagagtacataatgaggcggaccgcac

SEQ ID NO: 446654 - DNA, 30 bp, Artificial Sequence
  Synthetic oligonucleotide
tttattcacgttgggatctcgtgaccgcac

SEQ ID NO: 446655 - DNA, 30 bp, Artificial Sequence
  Synthetic oligonucleotide
tcaacctcagatgttcagaattggccgcac

SEQ ID NO: 446656 - DNA, 30 bp, Artificial Sequence
  Synthetic oligonucleotide
tggggcatgtcgtctgaagttatgccgcac

SEQ ID NO: 446657 - DNA, 30 bp, Artificial Sequence
  Synthetic oligonucleotide
gcaagccgtaaattccgagggccagcgcac

SEQ ID NO: 446658 - DNA, 30 bp, Artificial Sequence
  Synthetic oligonucleotide
cgtcttggatctcagctgatgggagcgcac

SEQ ID NO: 446659 - DNA, 30 bp, Artificial Sequence
  Synthetic oligonucleotide
caatccacgtgaacaatgtacgacgcgcac

SEQ ID NO: 446660 - DNA, 30 bp, Artificial Sequence
  Synthetic oligonucleotide
accacatgccaggcacttatcgcggcgcac

SEQ ID NO: 446661 - DNA, 30 bp, Artificial Sequence
  Synthetic oligonucleotide
atggctgcttttccactagtggttgcgcac

SEQ ID NO: 446662 - DNA, 30 bp, Artificial Sequence
  Synthetic oligonucleotide
ttgcgtgctgccctgttggaagaatcgcac

SEQ ID NO: 446663 - DNA, 30 bp, Artificial Sequence
  Synthetic oligonucleotide
gcccgcaacacgcaacgtacgacatcgcac

SEQ ID NO: 446664 - DNA, 30 bp, Artificial Sequence
  Synthetic oligonucleotide
ccgctcctgacagtcacccgaccgtcgcac

SEQ ID NO: 446665 - DNA, 30 bp, Artificial Sequence
  Synthetic oligonucleotide
ccctaagctgttcgatgatagaattcgcac

SEQ ID NO: 446666 - DNA, 30 bp, Artificial Sequence
  Synthetic oligonucleotide
accgattaaggcagcactggacgttcgcac

SEQ ID NO: 446667 - DNA, 30 bp, Artificial Sequence
  Synthetic oligonucleotide
cttacttccggttgccactgcgtttcgcac

SEQ ID NO: 446668 - DNA, 30 bp, Artificial Sequence
  Synthetic oligonucleotide
attgcagtttgtgtcatctctgaaaggcac

SEQ ID NO: 446669 - DNA, 30 bp, Artificial Sequence
  Synthetic oligonucleotide
aggcattatgattgaagggacggaaggcac

SEQ ID NO: 446670 - DNA, 30 bp, Artificial Sequence
  Synthetic oligonucleotide
ttggttatatcgtatcgaatgctaaggcac

SEQ ID NO: 446671 - DNA, 30 bp, Artificial Sequence
  Synthetic oligonucleotide
gacctttgtaaatcaaaatgctgcaggcac

SEQ ID NO: 446672 - DNA, 30 bp, Artificial Sequence
  Synthetic oligonucleotide
cacgccgtccttccccacgttatcaggcac

SEQ ID NO: 446673 - DNA, 30 bp, Artificial Sequence
  Synthetic oligonucleotide
tcgtgcttttatgagtagaggttcaggcac

SEQ ID NO: 446674 - DNA, 30 bp, Artificial Sequence
  Synthetic oligonucleotide
aggccagtttcacatgatagacagaggcac

SEQ ID NO: 446675 - DNA, 30 bp, Artificial Sequence
  Synthetic oligonucleotide
gcttccaaaccatggatgcctacgaggcac

SEQ ID NO: 446676 - DNA, 30 bp, Artificial Sequence
  Synthetic oligonucleotide
gaacctaataaaatactcatgtataggcac

SEQ ID NO: 446677 - DNA, 30 bp, Artificial Sequence
  Synthetic oligonucleotide
gcaatgcgactgatcacaggagaacggcac

SEQ ID NO: 446678 - DNA, 30 bp, Artificial Sequence
  Synthetic oligonucleotide
cagtgcaactcaatattttagtaacggcac

SEQ ID NO: 446679 - DNA, 30 bp, Artificial Sequence
  Synthetic oligonucleotide
aagtagcacttagactcagcaattcggcac

SEQ ID NO: 446680 - DNA, 30 bp, Artificial Sequence
  Synthetic oligonucleotide
ggcgcagtatgggccaagaccgttcggcac

SEQ ID NO: 446681 - DNA, 30 bp, Artificial Sequence
  Synthetic oligonucleotide
ttcggtatccagtctcctgttgacgggcac

SEQ ID NO: 446682 - DNA, 30 bp, Artificial Sequence
  Synthetic oligonucleotide
tttagtttagagcacagacaccgcgggcac

SEQ ID NO: 446683 - DNA, 30 bp, Artificial Sequence
  Synthetic oligonucleotide
ggctgccgtttaaatatggccggcgggcac

SEQ ID NO: 446684 - DNA, 30 bp, Artificial Sequence
  Synthetic oligonucleotide
aatttctattttagacggtgctttgggcac

SEQ ID NO: 446685 - DNA, 30 bp, Artificial Sequence
  Synthetic oligonucleotide
aattgacaatggaggaaccgggtatggcac

SEQ ID NO: 446686 - DNA, 30 bp, Artificial Sequence
  Synthetic oligonucleotide
ttcatcctagaactgtaataattatggcac

SEQ ID NO: 446687 - DNA, 30 bp, Artificial Sequence
  Synthetic oligonucleotide
taatgggccggtaccgggagcttatggcac

SEQ ID NO: 446688 - DNA, 30 bp, Artificial Sequence
  Synthetic oligonucleotide
ccagctacccaccctggtacagactggcac

SEQ ID NO: 446689 - DNA, 30 bp, Artificial Sequence
  Synthetic oligonucleotide
tttcaggatcgggtattaggaaagtggcac

SEQ ID NO: 446690 - DNA, 30 bp, Artificial Sequence
  Synthetic oligonucleotide
cctgactgttctaagaggagtcagtggcac

SEQ ID NO: 446691 - DNA, 30 bp, Artificial Sequence
  Synthetic oligonucleotide
actcagggactatggatagagccttggcac

SEQ ID NO: 446692 - DNA, 30 bp, Artificial Sequence
  Synthetic oligonucleotide
acctcagaacacgcttgcagcggcatgcac

SEQ ID NO: 446693 - DNA, 30 bp, Artificial Sequence
  Synthetic oligonucleotide
gtaggcatggttatcatctcgtgcatgcac

SEQ ID NO: 446694 - DNA, 30 bp, Artificial Sequence
  Synthetic oligonucleotide
gcatatagaacgtaaaggcaatccgtgcac

SEQ ID NO: 446695 - DNA, 30 bp, Artificial Sequence
  Synthetic oligonucleotide
agctggtagaacaatgttttatgcgtgcac

SEQ ID NO: 446696 - DNA, 30 bp, Artificial Sequence
  Synthetic oligonucleotide
ccatcgaactcgcaggcgttgaaggtgcac

SEQ ID NO: 446697 - DNA, 30 bp, Artificial Sequence
  Synthetic oligonucleotide
taagcgataataagctactcaccggtgcac

SEQ ID NO: 446698 - DNA, 30 bp, Artificial Sequence
  Synthetic oligonucleotide
ccggtcatgtcttggacccacggtgtgcac

SEQ ID NO: 446699 - DNA, 30 bp, Artificial Sequence
  Synthetic oligonucleotide
agttggagttctgaaggtgggggtgtgcac

SEQ ID NO: 446700 - DNA, 30 bp, Artificial Sequence
  Synthetic oligonucleotide
gaaatcctcctattctagtgcgaattgcac

SEQ ID NO: 446701 - DNA, 29 bp, Artificial Sequence
  Synthetic oligonucleotide
ttcacgggaaagggcgtttctgattgcac

SEQ ID NO: 446702 - DNA, 30 bp, Artificial Sequence
  Synthetic oligonucleotide
ttgctgggctatacacctccttgattgcac

SEQ ID NO: 446703 - DNA, 30 bp, Artificial Sequence
  Synthetic oligonucleotide
cggtttaatatatagttcaacctattgcac

SEQ ID NO: 446704 - DNA, 30 bp, Artificial Sequence
  Synthetic oligonucleotide
atttcccatgtgagtccttctggcttgcac

SEQ ID NO: 446705 - DNA, 30 bp, Artificial Sequence
  Synthetic oligonucleotide
accccttcactcggcgtggggcagttgcac

SEQ ID NO: 446706 - DNA, 30 bp, Artificial Sequence
  Synthetic oligonucleotide
ccaacacgttgcttgcgatgccggttgcac

SEQ ID NO: 446707 - DNA, 30 bp, Artificial Sequence
  Synthetic oligonucleotide
aacgtctcataatattggcgatggttgcac

SEQ ID NO: 446708 - DNA, 30 bp, Artificial Sequence
  Synthetic oligonucleotide
ttgtgcacctctagggactaggtgttgcac

SEQ ID NO: 446709 - DNA, 30 bp, Artificial Sequence
  Synthetic oligonucleotide
tgtattacttggtagcgagccagaaatcac

SEQ ID NO: 446710 - DNA, 30 bp, Artificial Sequence
  Synthetic oligonucleotide
tcccgcacgcggtatgttacgtccaatcac

SEQ ID NO: 446711 - DNA, 30 bp, Artificial Sequence
  Synthetic oligonucleotide
caattatctgactctgtaggtcggaatcac

SEQ ID NO: 446712 - DNA, 30 bp, Artificial Sequence
  Synthetic oligonucleotide
gaccggcttatcgaccagcctattaatcac

SEQ ID NO: 446713 - DNA, 30 bp, Artificial Sequence
  Synthetic oligonucleotide
gaaccgagcgtactctcgcagtgacatcac

SEQ ID NO: 446714 - DNA, 30 bp, Artificial Sequence
  Synthetic oligonucleotide
ttagtgacggtcaatctggagtgacatcac

SEQ ID NO: 446715 - DNA, 30 bp, Artificial Sequence
  Synthetic oligonucleotide
tccgactacttttcgaattcacaccatcac

SEQ ID NO: 446716 - DNA, 30 bp, Artificial Sequence
  Synthetic oligonucleotide
aatttactaatcagggcgtctaagcatcac

SEQ ID NO: 446717 - DNA, 30 bp, Artificial Sequence
  Synthetic oligonucleotide
gaccggattactttctagggggctcatcac

SEQ ID NO: 446718 - DNA, 30 bp, Artificial Sequence
  Synthetic oligonucleotide
ccgcagatagtgcaggaaaagagtcatcac

SEQ ID NO: 446719 - DNA, 30 bp, Artificial Sequence
  Synthetic oligonucleotide
tagactagtagacgcgagattggagatcac

SEQ ID NO: 446720 - DNA, 30 bp, Artificial Sequence
  Synthetic oligonucleotide
gcgggggtctgtcatatataactagatcac

SEQ ID NO: 446721 - DNA, 30 bp, Artificial Sequence
  Synthetic oligonucleotide
cgaaacgccttgtactgaaaaagcgatcac

SEQ ID NO: 446722 - DNA, 30 bp, Artificial Sequence
  Synthetic oligonucleotide
tccaaggaatccggccgggaaccggatcac

SEQ ID NO: 446723 - DNA, 30 bp, Artificial Sequence
  Synthetic oligonucleotide
ttcagtttttgtaaagggcggtcggatcac

SEQ ID NO: 446724 - DNA, 30 bp, Artificial Sequence
  Synthetic oligonucleotide
taagatattcatggagactatcctgatcac

SEQ ID NO: 446725 - DNA, 30 bp, Artificial Sequence
  Synthetic oligonucleotide
gggtttgtccacagtgaatgatttgatcac

SEQ ID NO: 446726 - DNA, 30 bp, Artificial Sequence
  Synthetic oligonucleotide
cataatataattcccgactgggcatatcac

SEQ ID NO: 446727 - DNA, 30 bp, Artificial Sequence
  Synthetic oligonucleotide
gatagtcttttcccgctcacaacgtatcac

SEQ ID NO: 446728 - DNA, 30 bp, Artificial Sequence
  Synthetic oligonucleotide
tatgccttgccggaggacggaacgtatcac

SEQ ID NO: 446729 - DNA, 30 bp, Artificial Sequence
  Synthetic oligonucleotide
tatcgttagagatatgtccacaggtatcac

SEQ ID NO: 446730 - DNA, 30 bp, Artificial Sequence
  Synthetic oligonucleotide
aggtaagtccgttgtggaggattgtatcac

SEQ ID NO: 446731 - DNA, 30 bp, Artificial Sequence
  Synthetic oligonucleotide
ttctgagcttcggcgcggagctgcactcac

SEQ ID NO: 446732 - DNA, 30 bp, Artificial Sequence
  Synthetic oligonucleotide
gtttcaacagccatctgcagaatcactcac

SEQ ID NO: 446733 - DNA, 30 bp, Artificial Sequence
  Synthetic oligonucleotide
gctggtacggtaataaagtcgtagactcac

SEQ ID NO: 446734 - DNA, 30 bp, Artificial Sequence
  Synthetic oligonucleotide
cttggtacgaaggcagccggcccgactcac

SEQ ID NO: 446735 - DNA, 30 bp, Artificial Sequence
  Synthetic oligonucleotide
tccctttccggcccgcctctgaggactcac

SEQ ID NO: 446736 - DNA, 30 bp, Artificial Sequence
  Synthetic oligonucleotide
tggcgtcgggcacgcagacaatggactcac

SEQ ID NO: 446737 - DNA, 30 bp, Artificial Sequence
  Synthetic oligonucleotide
agtgagagtcccggcacacgacggcctcac

SEQ ID NO: 446738 - DNA, 30 bp, Artificial Sequence
  Synthetic oligonucleotide
acacgcaacgcggagagggtaatgcctcac

SEQ ID NO: 446739 - DNA, 30 bp, Artificial Sequence
  Synthetic oligonucleotide
tgcacagttatcctgaggaagattcctcac

SEQ ID NO: 446740 - DNA, 31 bp, Artificial Sequence
  Synthetic oligonucleotide
atatggcctacgcatgtatttgcacgctcac

SEQ ID NO: 446741 - DNA, 30 bp, Artificial Sequence
  Synthetic oligonucleotide
ggacatacaattgctcgccaatacgctcac

SEQ ID NO: 446742 - DNA, 30 bp, Artificial Sequence
  Synthetic oligonucleotide
tatccagacctctacaccccttacgctcac

SEQ ID NO: 446743 - DNA, 30 bp, Artificial Sequence
  Synthetic oligonucleotide
tcgcttttgcgtctaaatgctagcgctcac

SEQ ID NO: 446744 - DNA, 30 bp, Artificial Sequence
  Synthetic oligonucleotide
gcagtcatgtctgttggctaacaggctcac

SEQ ID NO: 446745 - DNA, 30 bp, Artificial Sequence
  Synthetic oligonucleotide
catctttcccacgtatcgcaggtggctcac

SEQ ID NO: 446746 - DNA, 30 bp, Artificial Sequence
  Synthetic oligonucleotide
agtcaatggaatccgttgacggtggctcac

SEQ ID NO: 446747 - DNA, 30 bp, Artificial Sequence
  Synthetic oligonucleotide
tgatgggacagaaggagcaggagatctcac

SEQ ID NO: 446748 - DNA, 30 bp, Artificial Sequence
  Synthetic oligonucleotide
tttgtacgcgaaggagtattcatatctcac

SEQ ID NO: 446749 - DNA, 30 bp, Artificial Sequence
  Synthetic oligonucleotide
gcagacgagaataaggggttgcgctctcac

SEQ ID NO: 446750 - DNA, 30 bp, Artificial Sequence
  Synthetic oligonucleotide
aattaaccctccctaaatccgtcgtctcac

SEQ ID NO: 446751 - DNA, 30 bp, Artificial Sequence
  Synthetic oligonucleotide
catttgcaggcatgaagttccgggtctcac

SEQ ID NO: 446752 - DNA, 30 bp, Artificial Sequence
  Synthetic oligonucleotide
acacatatcaccgggataacaatgtctcac

SEQ ID NO: 446753 - DNA, 30 bp, Artificial Sequence
  Synthetic oligonucleotide
ttaagttgacgcttgacgaaaggttctcac

SEQ ID NO: 446754 - DNA, 30 bp, Artificial Sequence
  Synthetic oligonucleotide
aaagaccgggagacagatcgtcccagtcac

SEQ ID NO: 446755 - DNA, 30 bp, Artificial Sequence
  Synthetic oligonucleotide
gcattatgcggtcgtagtttaggtagtcac

SEQ ID NO: 446756 - DNA, 30 bp, Artificial Sequence
  Synthetic oligonucleotide
caaaatatcactaccctttgtctccgtcac

SEQ ID NO: 446757 - DNA, 30 bp, Artificial Sequence
  Synthetic oligonucleotide
atggagttgtgaagggaagcattccgtcac

SEQ ID NO: 446758 - DNA, 30 bp, Artificial Sequence
  Synthetic oligonucleotide
actaggatctgttagcttaagtatcgtcac

SEQ ID NO: 446759 - DNA, 30 bp, Artificial Sequence
  Synthetic oligonucleotide
aatagacggacacgtgatagttgtcgtcac

SEQ ID NO: 446760 - DNA, 30 bp, Artificial Sequence
  Synthetic oligonucleotide
tctttaatacgtcggcggtacgaaggtcac

SEQ ID NO: 446761 - DNA, 30 bp, Artificial Sequence
  Synthetic oligonucleotide
cgacctagggtgcagttggatcgaggtcac

SEQ ID NO: 446762 - DNA, 30 bp, Artificial Sequence
  Synthetic oligonucleotide
cttttaactccgtttctagtaaacggtcac

SEQ ID NO: 446763 - DNA, 30 bp, Artificial Sequence
  Synthetic oligonucleotide
cgaagttaaaaagcgtttcagcgcggtcac

SEQ ID NO: 446764 - DNA, 30 bp, Artificial Sequence
  Synthetic oligonucleotide
tttagtgccccgccgttcaggttcggtcac

SEQ ID NO: 446765 - DNA, 30 bp, Artificial Sequence
  Synthetic oligonucleotide
gaccgaattagggccacgtactcgggtcac

SEQ ID NO: 446766 - DNA, 30 bp, Artificial Sequence
  Synthetic oligonucleotide
gtaagtttgcgtcagattaggaggggtcac

SEQ ID NO: 446767 - DNA, 30 bp, Artificial Sequence
  Synthetic oligonucleotide
ttatcttcgtgggttccgcctgctggtcac

SEQ ID NO: 446768 - DNA, 30 bp, Artificial Sequence
  Synthetic oligonucleotide
tttttatgccataacagcggaattggtcac

SEQ ID NO: 446769 - DNA, 30 bp, Artificial Sequence
  Synthetic oligonucleotide
aacctttcaatcgaggttcgatttggtcac

SEQ ID NO: 446770 - DNA, 30 bp, Artificial Sequence
  Synthetic oligonucleotide
tgtggcacaggctctcttggccgatgtcac

SEQ ID NO: 446771 - DNA, 30 bp, Artificial Sequence
  Synthetic oligonucleotide
ttcggtcgcataaccggcaagggatgtcac

SEQ ID NO: 446772 - DNA, 31 bp, Artificial Sequence
  Synthetic oligonucleotide
ttgcatcgagaagttagtgataatatgtcac

SEQ ID NO: 446773 - DNA, 30 bp, Artificial Sequence
  Synthetic oligonucleotide
tttccgcagggctaggcgtttttatgtcac

SEQ ID NO: 446774 - DNA, 30 bp, Artificial Sequence
  Synthetic oligonucleotide
acttttcactgcgtcattcacagctgtcac

SEQ ID NO: 446775 - DNA, 30 bp, Artificial Sequence
  Synthetic oligonucleotide
gtccctacgtggtgggagacatcgtgtcac

SEQ ID NO: 446776 - DNA, 30 bp, Artificial Sequence
  Synthetic oligonucleotide
cagcgataattgacagtgtacaggtgtcac

SEQ ID NO: 446777 - DNA, 30 bp, Artificial Sequence
  Synthetic oligonucleotide
gcgagggttagattgatacgaatgtgtcac

SEQ ID NO: 446778 - DNA, 30 bp, Artificial Sequence
  Synthetic oligonucleotide
caggtccacgcttggcgcgctgtgtgtcac

SEQ ID NO: 446779 - DNA, 30 bp, Artificial Sequence
  Synthetic oligonucleotide
aacccaaacgtgcctacaattacttgtcac

SEQ ID NO: 446780 - DNA, 30 bp, Artificial Sequence
  Synthetic oligonucleotide
tccattgaggcggtaagagacgtttgtcac

SEQ ID NO: 446781 - DNA, 30 bp, Artificial Sequence
  Synthetic oligonucleotide
attccacctcggcaacattacttaattcac

SEQ ID NO: 446782 - DNA, 30 bp, Artificial Sequence
  Synthetic oligonucleotide
ctgttggtgagtttagctcatttaattcac

SEQ ID NO: 446783 - DNA, 30 bp, Artificial Sequence
  Synthetic oligonucleotide
tcaagcattccaccaattaagtccattcac

SEQ ID NO: 446784 - DNA, 30 bp, Artificial Sequence
  Synthetic oligonucleotide
ttttgcggggcagacctcaggtccattcac

SEQ ID NO: 446785 - DNA, 30 bp, Artificial Sequence
  Synthetic oligonucleotide
aagtcagtatggcatgttgtcaagattcac

SEQ ID NO: 446786 - DNA, 30 bp, Artificial Sequence
  Synthetic oligonucleotide
gttcgtggcggtatccttttacagattcac

SEQ ID NO: 446787 - DNA, 30 bp, Artificial Sequence
  Synthetic oligonucleotide
cagttcaaacgtacttgaaagtatattcac

SEQ ID NO: 446788 - DNA, 30 bp, Artificial Sequence
  Synthetic oligonucleotide
gagagaagttcattgtttaaagttattcac

SEQ ID NO: 446789 - DNA, 30 bp, Artificial Sequence
  Synthetic oligonucleotide
tttgtgcgctatcccggtcattgccttcac

SEQ ID NO: 446790 - DNA, 30 bp, Artificial Sequence
  Synthetic oligonucleotide
gcgcagggctctgtcaaaagagagcttcac

SEQ ID NO: 446791 - DNA, 30 bp, Artificial Sequence
  Synthetic oligonucleotide
cgtcgattcgggacccttctagggcttcac

SEQ ID NO: 446792 - DNA, 30 bp, Artificial Sequence
  Synthetic oligonucleotide
tcaaaggaaatggcagttcgcagtcttcac

SEQ ID NO: 446793 - DNA, 30 bp, Artificial Sequence
  Synthetic oligonucleotide
atctctccttttgattagtcattagttcac

SEQ ID NO: 446794 - DNA, 30 bp, Artificial Sequence
  Synthetic oligonucleotide
gcgcttgggagcttggtaacccgggttcac

SEQ ID NO: 446795 - DNA, 30 bp, Artificial Sequence
  Synthetic oligonucleotide
ttggattggcgcgtatggctgcgggttcac

SEQ ID NO: 446796 - DNA, 30 bp, Artificial Sequence
  Synthetic oligonucleotide
gctggcgcgaagcacaggcttcgtgttcac

SEQ ID NO: 446797 - DNA, 30 bp, Artificial Sequence
  Synthetic oligonucleotide
acgcgagctatggaatatggaggtgttcac

SEQ ID NO: 446798 - DNA, 30 bp, Artificial Sequence
  Synthetic oligonucleotide
taaaagggcaattgcaaacctattgttcac

SEQ ID NO: 446799 - DNA, 30 bp, Artificial Sequence
  Synthetic oligonucleotide
cacgtagcagacctgtcaataacatttcac

SEQ ID NO: 446800 - DNA, 30 bp, Artificial Sequence
  Synthetic oligonucleotide
ttctactctcttcgaaccgcccagtttcac

SEQ ID NO: 446801 - DNA, 30 bp, Artificial Sequence
  Synthetic oligonucleotide
cctcccatagatggaaatgaaaattttcac

SEQ ID NO: 446802 - DNA, 30 bp, Artificial Sequence
  Synthetic oligonucleotide
ctctggtggctccagaggatatgttttcac

SEQ ID NO: 446803 - DNA, 30 bp, Artificial Sequence
  Synthetic oligonucleotide
aacaggaattggatacacacgatttttcac

SEQ ID NO: 446804 - DNA, 30 bp, Artificial Sequence
  Synthetic oligonucleotide
ctcccaatgcggagtcttcgctcaaaagac

SEQ ID NO: 446805 - DNA, 34 bp, Artificial Sequence
  Synthetic oligonucleotide
gatactagaccaccacgtgtccaacagaaaagac

SEQ ID NO: 446806 - DNA, 34 bp, Artificial Sequence
  Synthetic oligonucleotide
gatactagaccaccacgtgaccatcagaaaagac

SEQ ID NO: 446807 - DNA, 30 bp, Artificial Sequence
  Synthetic oligonucleotide
gagtctaggattaacttccacgtcaaagac

SEQ ID NO: 446808 - DNA, 30 bp, Artificial Sequence
  Synthetic oligonucleotide
aaaggacccccgcacgacttcgtcaaagac

SEQ ID NO: 446809 - DNA, 30 bp, Artificial Sequence
  Synthetic oligonucleotide
gggttcgctggcggaatggtaaagaaagac

SEQ ID NO: 446810 - DNA, 30 bp, Artificial Sequence
  Synthetic oligonucleotide
ttgcgctctgtgaagcaataatagaaagac

SEQ ID NO: 446811 - DNA, 30 bp, Artificial Sequence
  Synthetic oligonucleotide
aacttaaggtaggcggccggcgggcaagac

SEQ ID NO: 446812 - DNA, 30 bp, Artificial Sequence
  Synthetic oligonucleotide
ctacgggtattccctgactaaagtcaagac

SEQ ID NO: 446813 - DNA, 30 bp, Artificial Sequence
  Synthetic oligonucleotide
agctgttatgggatccgcagaaaagaagac

SEQ ID NO: 446814 - DNA, 30 bp, Artificial Sequence
  Synthetic oligonucleotide
cgcaggaatcgtcatgtactgtaagaagac

SEQ ID NO: 446815 - DNA, 30 bp, Artificial Sequence
  Synthetic oligonucleotide
gtaatgcctcccttatttttaggagaagac

SEQ ID NO: 446816 - DNA, 30 bp, Artificial Sequence
  Synthetic oligonucleotide
gatgtaacatgtcttactccattcgaagac

SEQ ID NO: 446817 - DNA, 30 bp, Artificial Sequence
  Synthetic oligonucleotide
atttgtctaatagaccatcatggggaagac

SEQ ID NO: 446818 - DNA, 30 bp, Artificial Sequence
  Synthetic oligonucleotide
atctcatgattcctccatcacggtgaagac

SEQ ID NO: 446819 - DNA, 30 bp, Artificial Sequence
  Synthetic oligonucleotide
ggcaacggtaatgaccgaagaggataagac

SEQ ID NO: 446820 - DNA, 30 bp, Artificial Sequence
  Synthetic oligonucleotide
ttctggtctaggacgaagcgttgctaagac

SEQ ID NO: 446821 - DNA, 30 bp, Artificial Sequence
  Synthetic oligonucleotide
aactttcaagcgggtattggggggtaagac

SEQ ID NO: 446822 - DNA, 30 bp, Artificial Sequence
  Synthetic oligonucleotide
gacgggttggctcgctcatttgccacagac

SEQ ID NO: 446823 - DNA, 30 bp, Artificial Sequence
  Synthetic oligonucleotide
cggctggggaacactaaaaaagagacagac

SEQ ID NO: 446824 - DNA, 30 bp, Artificial Sequence
  Synthetic oligonucleotide
tccggttattcatggctaacttgtacagac

SEQ ID NO: 446825 - DNA, 30 bp, Artificial Sequence
  Synthetic oligonucleotide
ggactgttaaatccagcggcagaaccagac

SEQ ID NO: 446826 - DNA, 30 bp, Artificial Sequence
  Synthetic oligonucleotide
cccgaaaagtgtgaagcagttgtcccagac

SEQ ID NO: 446827 - DNA, 30 bp, Artificial Sequence
  Synthetic oligonucleotide
gattaatcctcggctttcttgtaagcagac

SEQ ID NO: 446828 - DNA, 30 bp, Artificial Sequence
  Synthetic oligonucleotide
gggacccgttgatggggtatacgcgcagac

SEQ ID NO: 446829 - DNA, 30 bp, Artificial Sequence
  Synthetic oligonucleotide
aggaaattagaaggcatcattggcgcagac

SEQ ID NO: 446830 - DNA, 30 bp, Artificial Sequence
  Synthetic oligonucleotide
agcagtctgattggtgaagcactcgcagac

SEQ ID NO: 446831 - DNA, 30 bp, Artificial Sequence
  Synthetic oligonucleotide
agacaaagagctgatgaggctgcggcagac

SEQ ID NO: 446832 - DNA, 30 bp, Artificial Sequence
  Synthetic oligonucleotide
atttaacgctttccaatggagaatgcagac

SEQ ID NO: 446833 - DNA, 30 bp, Artificial Sequence
  Synthetic oligonucleotide
tgcttatttgtgtgtgaattatatgcagac

SEQ ID NO: 446834 - DNA, 30 bp, Artificial Sequence
  Synthetic oligonucleotide
gacatgttttactggatacgctatgcagac

SEQ ID NO: 446835 - DNA, 30 bp, Artificial Sequence
  Synthetic oligonucleotide
attgtcttagcccacgagcaacgtgcagac

SEQ ID NO: 446836 - DNA, 30 bp, Artificial Sequence
  Synthetic oligonucleotide
gtgtcaacggtttttccgggaccgtcagac

SEQ ID NO: 446837 - DNA, 30 bp, Artificial Sequence
  Synthetic oligonucleotide
taaggatgcacagacatgaggggttcagac

SEQ ID NO: 446838 - DNA, 30 bp, Artificial Sequence
  Synthetic oligonucleotide
attcaacttggggactaggcagcaagagac

SEQ ID NO: 446839 - DNA, 30 bp, Artificial Sequence
  Synthetic oligonucleotide
agatgaattcactcacgctcgctaagagac

SEQ ID NO: 446840 - DNA, 30 bp, Artificial Sequence
  Synthetic oligonucleotide
gcagcaactctacggtctcatcgcagagac

SEQ ID NO: 446841 - DNA, 30 bp, Artificial Sequence
  Synthetic oligonucleotide
tttaattttaggtacagatcccggagagac

SEQ ID NO: 446842 - DNA, 30 bp, Artificial Sequence
  Synthetic oligonucleotide
acaggacgcgccgtccgcatatctagagac

SEQ ID NO: 446843 - DNA, 30 bp, Artificial Sequence
  Synthetic oligonucleotide
ggtgacgccttactgcggcgttttagagac

SEQ ID NO: 446844 - DNA, 30 bp, Artificial Sequence
  Synthetic oligonucleotide
tactttgacatcaatccatgtgtacgagac

SEQ ID NO: 446845 - DNA, 30 bp, Artificial Sequence
  Synthetic oligonucleotide
gttgttgccgtgatttgggccggccgagac

SEQ ID NO: 446846 - DNA, 30 bp, Artificial Sequence
  Synthetic oligonucleotide
gttcagtgtataccctttgctttgcgagac

SEQ ID NO: 446847 - DNA, 30 bp, Artificial Sequence
  Synthetic oligonucleotide
tccttaccatagggttcgcttactcgagac

SEQ ID NO: 446848 - DNA, 30 bp, Artificial Sequence
  Synthetic oligonucleotide
aaactgcttacgggcgaaagggcaggagac

SEQ ID NO: 446849 - DNA, 30 bp, Artificial Sequence
  Synthetic oligonucleotide
gtcaaaggattattggatggtcacggagac

SEQ ID NO: 446850 - DNA, 30 bp, Artificial Sequence
  Synthetic oligonucleotide
attgtttccgatatgccagagatcggagac

SEQ ID NO: 446851 - DNA, 30 bp, Artificial Sequence
  Synthetic oligonucleotide
gccgactgatcgtcgtgttatgatggagac

SEQ ID NO: 446852 - DNA, 30 bp, Artificial Sequence
  Synthetic oligonucleotide
tcatattacccatcgagcgctggatgagac

SEQ ID NO: 446853 - DNA, 30 bp, Artificial Sequence
  Synthetic oligonucleotide
aaagtgcacggtgtttgtgagcgctgagac

SEQ ID NO: 446854 - DNA, 30 bp, Artificial Sequence
  Synthetic oligonucleotide
caaccaaccacgtgtcaagtggtctgagac

SEQ ID NO: 446855 - DNA, 30 bp, Artificial Sequence
  Synthetic oligonucleotide
gcgcagtctggctccgggcaaacgtgagac

SEQ ID NO: 446856 - DNA, 30 bp, Artificial Sequence
  Synthetic oligonucleotide
gcttttatattagagtaagtcacgtgagac

SEQ ID NO: 446857 - DNA, 30 bp, Artificial Sequence
  Synthetic oligonucleotide
taaataatttcagttcccgattggtgagac

SEQ ID NO: 446858 - DNA, 30 bp, Artificial Sequence
  Synthetic oligonucleotide
gcatattactgatcaccggcttggtgagac

SEQ ID NO: 446859 - DNA, 30 bp, Artificial Sequence
  Synthetic oligonucleotide
gagggttaagcgccagtactattgtgagac

SEQ ID NO: 446860 - DNA, 30 bp, Artificial Sequence
  Synthetic oligonucleotide
gacgccgccgccaggctgcggtgaatagac

SEQ ID NO: 446861 - DNA, 30 bp, Artificial Sequence
  Synthetic oligonucleotide
agaatacttttgttcaacgggttaatagac

SEQ ID NO: 446862 - DNA, 30 bp, Artificial Sequence
  Synthetic oligonucleotide
caaactctatatacaggcaagaccatagac

SEQ ID NO: 446863 - DNA, 28 bp, Artificial Sequence
  Synthetic oligonucleotide
gatactagaccaccacgtgtccatagac

SEQ ID NO: 446864 - DNA, 30 bp, Artificial Sequence
  Synthetic oligonucleotide
cttatgctcggcagagacgtaatcatagac

SEQ ID NO: 446865 - DNA, 30 bp, Artificial Sequence
  Synthetic oligonucleotide
cattgagcttgtgtgccttgtttcatagac

SEQ ID NO: 446866 - DNA, 30 bp, Artificial Sequence
  Synthetic oligonucleotide
ggtagcaggttcaattggtccgagatagac

SEQ ID NO: 446867 - DNA, 30 bp, Artificial Sequence
  Synthetic oligonucleotide
aaacctatgggggcttagggtgagatagac

SEQ ID NO: 446868 - DNA, 30 bp, Artificial Sequence
  Synthetic oligonucleotide
agcgaccagatacccaggggggttatagac

SEQ ID NO: 446869 - DNA, 30 bp, Artificial Sequence
  Synthetic oligonucleotide
tggtaacttgtctcaaagggacgactagac

SEQ ID NO: 446870 - DNA, 30 bp, Artificial Sequence
  Synthetic oligonucleotide
aagctggtatttggtctttcctacctagac

SEQ ID NO: 446871 - DNA, 30 bp, Artificial Sequence
  Synthetic oligonucleotide
gtatgtccgtagtatgaagaaccgctagac

SEQ ID NO: 446872 - DNA, 30 bp, Artificial Sequence
  Synthetic oligonucleotide
gcgcggcaatatcgcaggttctctctagac

SEQ ID NO: 446873 - DNA, 31 bp, Artificial Sequence
  Synthetic oligonucleotide
gcaataacaggtggactcgtccagtctagac

SEQ ID NO: 446874 - DNA, 30 bp, Artificial Sequence
  Synthetic oligonucleotide
agtatctggacaaaagtcgtcagagtagac

SEQ ID NO: 446875 - DNA, 30 bp, Artificial Sequence
  Synthetic oligonucleotide
taaaaggctttacacgcggttccggtagac

SEQ ID NO: 446876 - DNA, 30 bp, Artificial Sequence
  Synthetic oligonucleotide
agttgtggggctctaagttctgtggtagac

SEQ ID NO: 446877 - DNA, 30 bp, Artificial Sequence
  Synthetic oligonucleotide
ggctgacacttattgttgtcttatgtagac

SEQ ID NO: 446878 - DNA, 30 bp, Artificial Sequence
  Synthetic oligonucleotide
ccctgtaaagtaaacacgaaccgtgtagac

SEQ ID NO: 446879 - DNA, 30 bp, Artificial Sequence
  Synthetic oligonucleotide
aaagatatttacccattttgtaaattagac

SEQ ID NO: 446880 - DNA, 30 bp, Artificial Sequence
  Synthetic oligonucleotide
ctatcggacttctttgtcgcgagcttagac

SEQ ID NO: 446881 - DNA, 30 bp, Artificial Sequence
  Synthetic oligonucleotide
gtgaatgggtgggtgtgcggtgggttagac

SEQ ID NO: 446882 - DNA, 30 bp, Artificial Sequence
  Synthetic oligonucleotide
gctaatgtacgccgctgaaccgtgttagac

SEQ ID NO: 446883 - DNA, 30 bp, Artificial Sequence
  Synthetic oligonucleotide
gtcttcgatacgagtcaaaggtatttagac

SEQ ID NO: 446884 - DNA, 30 bp, Artificial Sequence
  Synthetic oligonucleotide
gactcagcaatgggttatccagctttagac

SEQ ID NO: 446885 - DNA, 30 bp, Artificial Sequence
  Synthetic oligonucleotide
tgcagcatgggggtagagatttttttagac

SEQ ID NO: 446886 - DNA, 30 bp, Artificial Sequence
  Synthetic oligonucleotide
catactgcctctgagtgcatatcaaacgac

SEQ ID NO: 446887 - DNA, 30 bp, Artificial Sequence
  Synthetic oligonucleotide
ttggtgcgtgccccgccagatctcaacgac

SEQ ID NO: 446888 - DNA, 30 bp, Artificial Sequence
  Synthetic oligonucleotide
cattgtcgacgaataagttagaagaacgac

SEQ ID NO: 446889 - DNA, 30 bp, Artificial Sequence
  Synthetic oligonucleotide
cacgtcagtcctgtggtccctgcgaacgac

SEQ ID NO: 446890 - DNA, 30 bp, Artificial Sequence
  Synthetic oligonucleotide
ccctgttcagagtatttaatgtctaacgac

SEQ ID NO: 446891 - DNA, 30 bp, Artificial Sequence
  Synthetic oligonucleotide
gtcccgtgcggacgagcattttgtaacgac

SEQ ID NO: 446892 - DNA, 30 bp, Artificial Sequence
  Synthetic oligonucleotide
ccgtgagtagtagtactgccatcacacgac

SEQ ID NO: 446893 - DNA, 30 bp, Artificial Sequence
  Synthetic oligonucleotide
acatctcgtgattttttcgtgtcacacgac

SEQ ID NO: 446894 - DNA, 30 bp, Artificial Sequence
  Synthetic oligonucleotide
ttcaaatcgcctagtatagtaagacacgac

SEQ ID NO: 446895 - DNA, 30 bp, Artificial Sequence
  Synthetic oligonucleotide
caaatctgttccagagaggagaagcacgac

SEQ ID NO: 446896 - DNA, 30 bp, Artificial Sequence
  Synthetic oligonucleotide
aagtgcacaaacgtctgttttgggcacgac

SEQ ID NO: 446897 - DNA, 30 bp, Artificial Sequence
  Synthetic oligonucleotide
atgtgcgggctaacgcctaagggtcacgac

SEQ ID NO: 446898 - DNA, 30 bp, Artificial Sequence
  Synthetic oligonucleotide
atatcagggctccggtttttcgttcacgac

SEQ ID NO: 446899 - DNA, 30 bp, Artificial Sequence
  Synthetic oligonucleotide
ccgtactctgttacggtgttttttcacgac

SEQ ID NO: 446900 - DNA, 30 bp, Artificial Sequence
  Synthetic oligonucleotide
tagggaggggggtctagttgggaagacgac

SEQ ID NO: 446901 - DNA, 30 bp, Artificial Sequence
  Synthetic oligonucleotide
taaatcgtagtacacgtcaactaagacgac

SEQ ID NO: 446902 - DNA, 30 bp, Artificial Sequence
  Synthetic oligonucleotide
aaatgacttaaaaaatcgatctccgacgac

SEQ ID NO: 446903 - DNA, 30 bp, Artificial Sequence
  Synthetic oligonucleotide
aaccactcatagtcagcaaattccgacgac

SEQ ID NO: 446904 - DNA, 30 bp, Artificial Sequence
  Synthetic oligonucleotide
gtggacagtttagggaggacgcatgacgac

SEQ ID NO: 446905 - DNA, 30 bp, Artificial Sequence
  Synthetic oligonucleotide
gaaaaacctggtcaacgccttcatgacgac

SEQ ID NO: 446906 - DNA, 30 bp, Artificial Sequence
  Synthetic oligonucleotide
aacacccacttagagcagtcagctgacgac

SEQ ID NO: 446907 - DNA, 30 bp, Artificial Sequence
  Synthetic oligonucleotide
cctcgagttcgagtcagtctttttgacgac

SEQ ID NO: 446908 - DNA, 30 bp, Artificial Sequence
  Synthetic oligonucleotide
ggacacggtaggttgaaagtgtcctacgac

SEQ ID NO: 446909 - DNA, 30 bp, Artificial Sequence
  Synthetic oligonucleotide
gtctgtctcgtatattgcactgattacgac

SEQ ID NO: 446910 - DNA, 30 bp, Artificial Sequence
  Synthetic oligonucleotide
accctataggttcagtgcctctcttacgac

SEQ ID NO: 446911 - DNA, 30 bp, Artificial Sequence
  Synthetic oligonucleotide
tgcattaccttggccctaaaggaaaccgac

SEQ ID NO: 446912 - DNA, 30 bp, Artificial Sequence
  Synthetic oligonucleotide
agtttgtacggcaatgtcctggtaaccgac

SEQ ID NO: 446913 - DNA, 30 bp, Artificial Sequence
  Synthetic oligonucleotide
aaagctatggataggaagcacaacaccgac

SEQ ID NO: 446914 - DNA, 30 bp, Artificial Sequence
  Synthetic oligonucleotide
agttggggtctcggcgtgttgaacaccgac

SEQ ID NO: 446915 - DNA, 30 bp, Artificial Sequence
  Synthetic oligonucleotide
atggcgaccctcgggcgctaggacaccgac

SEQ ID NO: 446916 - DNA, 30 bp, Artificial Sequence
  Synthetic oligonucleotide
cgcctataatagagtggaacagtgaccgac

SEQ ID NO: 446917 - DNA, 30 bp, Artificial Sequence
  Synthetic oligonucleotide
ttcatgaggcgagtcggcgttgataccgac

SEQ ID NO: 446918 - DNA, 30 bp, Artificial Sequence
  Synthetic oligonucleotide
ccgcaggtaggcgcagaccggagacccgac

SEQ ID NO: 446919 - DNA, 30 bp, Artificial Sequence
  Synthetic oligonucleotide
cagatggccgtgtaaagtcctattcccgac

SEQ ID NO: 446920 - DNA, 30 bp, Artificial Sequence
  Synthetic oligonucleotide
ctggccgaaagatcgcgtacagttcccgac

SEQ ID NO: 446921 - DNA, 30 bp, Artificial Sequence
  Synthetic oligonucleotide
aatatttattggaaccgggggtacgccgac

SEQ ID NO: 446922 - DNA, 30 bp, Artificial Sequence
  Synthetic oligonucleotide
gccggtctaaatctgagcttattatccgac

SEQ ID NO: 446923 - DNA, 30 bp, Artificial Sequence
  Synthetic oligonucleotide
acaacgtcgccgtcctagacacattccgac

SEQ ID NO: 446924 - DNA, 30 bp, Artificial Sequence
  Synthetic oligonucleotide
ccaggaatcttccgccgtttgtattccgac

SEQ ID NO: 446925 - DNA, 30 bp, Artificial Sequence
  Synthetic oligonucleotide
catatcacactgccagctgtcacttccgac

SEQ ID NO: 446926 - DNA, 30 bp, Artificial Sequence
  Synthetic oligonucleotide
taatctgactaccggactgccaaaagcgac

SEQ ID NO: 446927 - DNA, 30 bp, Artificial Sequence
  Synthetic oligonucleotide
ggacctcgcgggtctcagcggacaagcgac

SEQ ID NO: 446928 - DNA, 30 bp, Artificial Sequence
  Synthetic oligonucleotide
gaccgggtttaatcttcgtgatcaagcgac

SEQ ID NO: 446929 - DNA, 30 bp, Artificial Sequence
  Synthetic oligonucleotide
gcataggggtttgccatatagttaagcgac

SEQ ID NO: 446930 - DNA, 30 bp, Artificial Sequence
  Synthetic oligonucleotide
cgtctaaccctagatacataaacgagcgac

SEQ ID NO: 446931 - DNA, 30 bp, Artificial Sequence
  Synthetic oligonucleotide
cggaaaggttgcagcattctaccgagcgac

SEQ ID NO: 446932 - DNA, 30 bp, Artificial Sequence
  Synthetic oligonucleotide
aaaaggaccttcaagacccccgctagcgac

SEQ ID NO: 446933 - DNA, 30 bp, Artificial Sequence
  Synthetic oligonucleotide
gtggtagcagtgatgagcgatagtagcgac

SEQ ID NO: 446934 - DNA, 30 bp, Artificial Sequence
  Synthetic oligonucleotide
aatcgagactcaacggtcattccacgcgac

SEQ ID NO: 446935 - DNA, 30 bp, Artificial Sequence
  Synthetic oligonucleotide
gtgcacctcgatatagtatccatgcgcgac

SEQ ID NO: 446936 - DNA, 30 bp, Artificial Sequence
  Synthetic oligonucleotide
gcaagtgcttagtaataagccagtcgcgac

SEQ ID NO: 446937 - DNA, 30 bp, Artificial Sequence
  Synthetic oligonucleotide
caaggggaactgtcctctgtttgaggcgac

SEQ ID NO: 446938 - DNA, 30 bp, Artificial Sequence
  Synthetic oligonucleotide
gagtaatatgattggcatacgagcggcgac

SEQ ID NO: 446939 - DNA, 30 bp, Artificial Sequence
  Synthetic oligonucleotide
aaagattttttgcaagcaatgtctggcgac

SEQ ID NO: 446940 - DNA, 30 bp, Artificial Sequence
  Synthetic oligonucleotide
ctaatccctagtgacttgtgtggtggcgac

SEQ ID NO: 446941 - DNA, 30 bp, Artificial Sequence
  Synthetic oligonucleotide
ctacgatcgcgcaagaaccaccagtgcgac

SEQ ID NO: 446942 - DNA, 30 bp, Artificial Sequence
  Synthetic oligonucleotide
ctaaatgggctctcgttgtcttagtgcgac

SEQ ID NO: 446943 - DNA, 30 bp, Artificial Sequence
  Synthetic oligonucleotide
ttgtttgagtggccgatgctactcatcgac

SEQ ID NO: 446944 - DNA, 30 bp, Artificial Sequence
  Synthetic oligonucleotide
ctttatccttatgtcgaccggcggatcgac

SEQ ID NO: 446945 - DNA, 30 bp, Artificial Sequence
  Synthetic oligonucleotide
aatggcggccacaaagacctctggatcgac

SEQ ID NO: 446946 - DNA, 30 bp, Artificial Sequence
  Synthetic oligonucleotide
ttaaacctcatactctaactcttgatcgac

SEQ ID NO: 446947 - DNA, 30 bp, Artificial Sequence
  Synthetic oligonucleotide
ccgaggctacctgggttgggtactatcgac

SEQ ID NO: 446948 - DNA, 30 bp, Artificial Sequence
  Synthetic oligonucleotide
acgccatgagcgtttttaccgtgtatcgac

SEQ ID NO: 446949 - DNA, 30 bp, Artificial Sequence
  Synthetic oligonucleotide
tctcctaaggtcggtcctcattagctcgac

SEQ ID NO: 446950 - DNA, 30 bp, Artificial Sequence
  Synthetic oligonucleotide
gttgtgtacacgctcatatacgctctcgac

SEQ ID NO: 446951 - DNA, 30 bp, Artificial Sequence
  Synthetic oligonucleotide
gtaaactcgtaggtttctaaggaagtcgac

SEQ ID NO: 446952 - DNA, 30 bp, Artificial Sequence
  Synthetic oligonucleotide
ggcatgcatcgtcattgggtatacgtcgac

SEQ ID NO: 446953 - DNA, 30 bp, Artificial Sequence
  Synthetic oligonucleotide
attcagccatcgcgcgcaatgaccgtcgac

SEQ ID NO: 446954 - DNA, 30 bp, Artificial Sequence
  Synthetic oligonucleotide
cttcgccgggcatacgatgttacggtcgac

SEQ ID NO: 446955 - DNA, 30 bp, Artificial Sequence
  Synthetic oligonucleotide
gagccaccgttgaactttagggcggtcgac

SEQ ID NO: 446956 - DNA, 30 bp, Artificial Sequence
  Synthetic oligonucleotide
gaaccggaatgtttagctttagtggtcgac

SEQ ID NO: 446957 - DNA, 30 bp, Artificial Sequence
  Synthetic oligonucleotide
tccctttgacctgaagctagcaatgtcgac

SEQ ID NO: 446958 - DNA, 30 bp, Artificial Sequence
  Synthetic oligonucleotide
tgcgctggggtgcccccaagctgtgtcgac

SEQ ID NO: 446959 - DNA, 30 bp, Artificial Sequence
  Synthetic oligonucleotide
catggatggtcaatggtaggttgattcgac

SEQ ID NO: 446960 - DNA, 30 bp, Artificial Sequence
  Synthetic oligonucleotide
agtttgcgatcttttgtattttgattcgac

SEQ ID NO: 446961 - DNA, 30 bp, Artificial Sequence
  Synthetic oligonucleotide
tcgctatcgaaggttcaaccgtccttcgac

SEQ ID NO: 446962 - DNA, 30 bp, Artificial Sequence
  Synthetic oligonucleotide
aaatgtgacatggccctcgcgccgttcgac

SEQ ID NO: 446963 - DNA, 30 bp, Artificial Sequence
  Synthetic oligonucleotide
gtgaggggatagggcccgccagggttcgac

SEQ ID NO: 446964 - DNA, 30 bp, Artificial Sequence
  Synthetic oligonucleotide
cctgtaaacgtgacgccgacgttgttcgac

SEQ ID NO: 446965 - DNA, 30 bp, Artificial Sequence
  Synthetic oligonucleotide
agtttaaaatactagcagttgcaaaaggac

SEQ ID NO: 446966 - DNA, 30 bp, Artificial Sequence
  Synthetic oligonucleotide
gccataagcccttctcgaaattagaaggac

SEQ ID NO: 446967 - DNA, 30 bp, Artificial Sequence
  Synthetic oligonucleotide
aaagtgccgccgtttcaccatttgaaggac

SEQ ID NO: 446968 - DNA, 30 bp, Artificial Sequence
  Synthetic oligonucleotide
tcttgtctttgtaaagacgccagtaaggac

SEQ ID NO: 446969 - DNA, 30 bp, Artificial Sequence
  Synthetic oligonucleotide
ccctggcgcacatagcgaggcagtaaggac

SEQ ID NO: 446970 - DNA, 30 bp, Artificial Sequence
  Synthetic oligonucleotide
agacagtggcaagtgagatattttaaggac

SEQ ID NO: 446971 - DNA, 30 bp, Artificial Sequence
  Synthetic oligonucleotide
taccttcaagaaatctttttttaacaggac

SEQ ID NO: 446972 - DNA, 30 bp, Artificial Sequence
  Synthetic oligonucleotide
gtctatccggggtctcctacctagcaggac

SEQ ID NO: 446973 - DNA, 30 bp, Artificial Sequence
  Synthetic oligonucleotide
cactactgtaaatggcgtagatggcaggac

SEQ ID NO: 446974 - DNA, 30 bp, Artificial Sequence
  Synthetic oligonucleotide
ggtgcgttcgcgctttcaatcatgcaggac

SEQ ID NO: 446975 - DNA, 30 bp, Artificial Sequence
  Synthetic oligonucleotide
tcggcgctcatgaacacttcgcatcaggac

SEQ ID NO: 446976 - DNA, 30 bp, Artificial Sequence
  Synthetic oligonucleotide
cccgacggccgtgagcatcacgcggaggac

SEQ ID NO: 446977 - DNA, 30 bp, Artificial Sequence
  Synthetic oligonucleotide
ccgaactaccttctcttgggatcggaggac

SEQ ID NO: 446978 - DNA, 30 bp, Artificial Sequence
  Synthetic oligonucleotide
tctatcaggccgcgcaacaggaatgaggac

SEQ ID NO: 446979 - DNA, 30 bp, Artificial Sequence
  Synthetic oligonucleotide
gacggtcacgccgctcccgtttaataggac

SEQ ID NO: 446980 - DNA, 30 bp, Artificial Sequence
  Synthetic oligonucleotide
gcgcattcaggccagccctatcgataggac

SEQ ID NO: 446981 - DNA, 30 bp, Artificial Sequence
  Synthetic oligonucleotide
atgttttctaggatttgtgatatataggac

SEQ ID NO: 446982 - DNA, 30 bp, Artificial Sequence
  Synthetic oligonucleotide
gtccgaggttatataggttttctataggac

SEQ ID NO: 446983 - DNA, 30 bp, Artificial Sequence
  Synthetic oligonucleotide
cgtttctgcggagtagttcctgggtaggac

SEQ ID NO: 446984 - DNA, 30 bp, Artificial Sequence
  Synthetic oligonucleotide
gggaaccccgtcccttctttccattaggac

SEQ ID NO: 446985 - DNA, 30 bp, Artificial Sequence
  Synthetic oligonucleotide
ttattcttgtatgtacggattacttaggac

SEQ ID NO: 446986 - DNA, 30 bp, Artificial Sequence
  Synthetic oligonucleotide
cctctgcaccaacgaagttcctgttaggac

SEQ ID NO: 446987 - DNA, 30 bp, Artificial Sequence
  Synthetic oligonucleotide
gaaccttctaaaggtacggaaaaaacggac

SEQ ID NO: 446988 - DNA, 30 bp, Artificial Sequence
  Synthetic oligonucleotide
acttctaagaacgttaatacaggaacggac

SEQ ID NO: 446989 - DNA, 30 bp, Artificial Sequence
  Synthetic oligonucleotide
ctaacagcttcccaagctgtgggaacggac

SEQ ID NO: 446990 - DNA, 30 bp, Artificial Sequence
  Synthetic oligonucleotide
ggagccgcagttgcgcgtagtggaacggac

SEQ ID NO: 446991 - DNA, 30 bp, Artificial Sequence
  Synthetic oligonucleotide
tggtttttcgctgcatggtcgaccacggac

SEQ ID NO: 446992 - DNA, 30 bp, Artificial Sequence
  Synthetic oligonucleotide
cctctagtcgaaacgggagatgccacggac

SEQ ID NO: 446993 - DNA, 30 bp, Artificial Sequence
  Synthetic oligonucleotide
ccattacgctatcaccaaaatgagacggac

SEQ ID NO: 446994 - DNA, 30 bp, Artificial Sequence
  Synthetic oligonucleotide
ttcttcgtaatcgtattattgaggacggac

SEQ ID NO: 446995 - DNA, 30 bp, Artificial Sequence
  Synthetic oligonucleotide
gtccgtttccgtaacgttggttggacggac

SEQ ID NO: 446996 - DNA, 30 bp, Artificial Sequence
  Synthetic oligonucleotide
aggcgttcagttattatgcgcttgacggac

SEQ ID NO: 446997 - DNA, 30 bp, Artificial Sequence
  Synthetic oligonucleotide
ccggggcaagcgtactttttctatacggac

SEQ ID NO: 446998 - DNA, 30 bp, Artificial Sequence
  Synthetic oligonucleotide
cctcttctcgacgagcttgtttctacggac

SEQ ID NO: 446999 - DNA, 30 bp, Artificial Sequence
  Synthetic oligonucleotide
aggaatttgatcgggttgtcttgtacggac

SEQ ID NO: 447000 - DNA, 30 bp, Artificial Sequence
  Synthetic oligonucleotide
gatcagttgttccattgtagacttacggac

SEQ ID NO: 447001 - DNA, 30 bp, Artificial Sequence
  Synthetic oligonucleotide
ccactaaggtctaaatgggctgtaccggac

SEQ ID NO: 447002 - DNA, 30 bp, Artificial Sequence
  Synthetic oligonucleotide
ttgacgactccgctaattaggtgcccggac

SEQ ID NO: 447003 - DNA, 30 bp, Artificial Sequence
  Synthetic oligonucleotide
tagaggagatgcgtgagaggcaatccggac

SEQ ID NO: 447004 - DNA, 30 bp, Artificial Sequence
  Synthetic oligonucleotide
cacaaatattgttcggtcagagcggcggac

SEQ ID NO: 447005 - DNA, 30 bp, Artificial Sequence
  Synthetic oligonucleotide
tttgtgcgggggcttcaataatcggcggac

SEQ ID NO: 447006 - DNA, 30 bp, Artificial Sequence
  Synthetic oligonucleotide
tgtgcaactagtgatatgtgaagtgcggac

SEQ ID NO: 447007 - DNA, 30 bp, Artificial Sequence
  Synthetic oligonucleotide
tctttccagatagaacgccactttgcggac

SEQ ID NO: 447008 - DNA, 30 bp, Artificial Sequence
  Synthetic oligonucleotide
aatgaatgatgtacacacttatcatcggac

SEQ ID NO: 447009 - DNA, 30 bp, Artificial Sequence
  Synthetic oligonucleotide
aacaaacatagtagtttatgctcatcggac

SEQ ID NO: 447010 - DNA, 30 bp, Artificial Sequence
  Synthetic oligonucleotide
ccctgaagccgaaagtccaagttttcggac

SEQ ID NO: 447011 - DNA, 30 bp, Artificial Sequence
  Synthetic oligonucleotide
gagtaggaccggtcagaccggcaaagggac

SEQ ID NO: 447012 - DNA, 30 bp, Artificial Sequence
  Synthetic oligonucleotide
cggtaccttcttttccttctaggaagggac

SEQ ID NO: 447013 - DNA, 30 bp, Artificial Sequence
  Synthetic oligonucleotide
tttgcacggtgtacagttattgtaagggac

SEQ ID NO: 447014 - DNA, 30 bp, Artificial Sequence
  Synthetic oligonucleotide
attctattgtacatcgtgacggggagggac

SEQ ID NO: 447015 - DNA, 30 bp, Artificial Sequence
  Synthetic oligonucleotide
tgtccacctcgttatttaattctgagggac

SEQ ID NO: 447016 - DNA, 30 bp, Artificial Sequence
  Synthetic oligonucleotide
ttaggccgctggtccattacacatagggac

SEQ ID NO: 447017 - DNA, 30 bp, Artificial Sequence
  Synthetic oligonucleotide
acggctcatccggagtaggagtctagggac

SEQ ID NO: 447018 - DNA, 30 bp, Artificial Sequence
  Synthetic oligonucleotide
gggtccagtattacgataagccgtagggac

SEQ ID NO: 447019 - DNA, 30 bp, Artificial Sequence
  Synthetic oligonucleotide
gcatgccagctggaagcagtgcttagggac

SEQ ID NO: 447020 - DNA, 30 bp, Artificial Sequence
  Synthetic oligonucleotide
gattcacggataagttatcttcttagggac

SEQ ID NO: 447021 - DNA, 30 bp, Artificial Sequence
  Synthetic oligonucleotide
ttgtattgggcttgcggtcatcaacgggac

SEQ ID NO: 447022 - DNA, 30 bp, Artificial Sequence
  Synthetic oligonucleotide
ttttgcggatcgaccacgtaagaacgggac

SEQ ID NO: 447023 - DNA, 30 bp, Artificial Sequence
  Synthetic oligonucleotide
cagggtaaggcacattgatggacacgggac

SEQ ID NO: 447024 - DNA, 30 bp, Artificial Sequence
  Synthetic oligonucleotide
taaccagcctagatttgtcccttacgggac

SEQ ID NO: 447025 - DNA, 30 bp, Artificial Sequence
  Synthetic oligonucleotide
gcgtcccgatagaatacccggtcccgggac

SEQ ID NO: 447026 - DNA, 30 bp, Artificial Sequence
  Synthetic oligonucleotide
ctccttatcgctacggagttggagcgggac

SEQ ID NO: 447027 - DNA, 30 bp, Artificial Sequence
  Synthetic oligonucleotide
cctaattagggtattaaacgatggcgggac

SEQ ID NO: 447028 - DNA, 30 bp, Artificial Sequence
  Synthetic oligonucleotide
aggaagtccttacagtgtatcttgcgggac

SEQ ID NO: 447029 - DNA, 30 bp, Artificial Sequence
  Synthetic oligonucleotide
ggagcgggtaggagtgcgcgtcatcgggac

SEQ ID NO: 447030 - DNA, 30 bp, Artificial Sequence
  Synthetic oligonucleotide
acattcggacttaagtctcagcgtcgggac

SEQ ID NO: 447031 - DNA, 30 bp, Artificial Sequence
  Synthetic oligonucleotide
ttccttttagtacgtgagttcataggggac

SEQ ID NO: 447032 - DNA, 30 bp, Artificial Sequence
  Synthetic oligonucleotide
cggcgctctccatcaagctttgccggggac

SEQ ID NO: 447033 - DNA, 30 bp, Artificial Sequence
  Synthetic oligonucleotide
aaattggacgccgaacggaccgagggggac

SEQ ID NO: 447034 - DNA, 30 bp, Artificial Sequence
  Synthetic oligonucleotide
tttgcaccttagctgattccaaggggggac

SEQ ID NO: 447035 - DNA, 30 bp, Artificial Sequence
  Synthetic oligonucleotide
ggttgggggaaatggccgaggatgggggac

SEQ ID NO: 447036 - DNA, 30 bp, Artificial Sequence
  Synthetic oligonucleotide
tgttacgtagcaagaagtatggatggggac

SEQ ID NO: 447037 - DNA, 30 bp, Artificial Sequence
  Synthetic oligonucleotide
gatgctaatcacattcgtagacgatgggac

SEQ ID NO: 447038 - DNA, 30 bp, Artificial Sequence
  Synthetic oligonucleotide
atgggggtggctacgtcacttaactgggac

SEQ ID NO: 447039 - DNA, 30 bp, Artificial Sequence
  Synthetic oligonucleotide
taacaaaatgttctctaatttgtctgggac

SEQ ID NO: 447040 - DNA, 31 bp, Artificial Sequence
  Synthetic oligonucleotide
gtttgcttttttactcgtaagaaagtgggac

SEQ ID NO: 447041 - DNA, 30 bp, Artificial Sequence
  Synthetic oligonucleotide
acgtaccaccggaaaaccccgacgtgggac

SEQ ID NO: 447042 - DNA, 30 bp, Artificial Sequence
  Synthetic oligonucleotide
cagtttagggccctccggcagacttgggac

SEQ ID NO: 447043 - DNA, 30 bp, Artificial Sequence
  Synthetic oligonucleotide
cgcgtgtcgggactgcttcggccaatggac

SEQ ID NO: 447044 - DNA, 30 bp, Artificial Sequence
  Synthetic oligonucleotide
attaatggaagacccagtgcacatatggac

SEQ ID NO: 447045 - DNA, 30 bp, Artificial Sequence
  Synthetic oligonucleotide
gtgctccacacttaaactccttaactggac

SEQ ID NO: 447046 - DNA, 30 bp, Artificial Sequence
  Synthetic oligonucleotide
gcgaaattttgtcccaggtcgggactggac

SEQ ID NO: 447047 - DNA, 30 bp, Artificial Sequence
  Synthetic oligonucleotide
caccacactcatcactgtatatccctggac

SEQ ID NO: 447048 - DNA, 30 bp, Artificial Sequence
  Synthetic oligonucleotide
gctcgggctttcgttgcttcgcagctggac

SEQ ID NO: 447049 - DNA, 30 bp, Artificial Sequence
  Synthetic oligonucleotide
gcgaggcgttgcagtgaggcgatgctggac

SEQ ID NO: 447050 - DNA, 30 bp, Artificial Sequence
  Synthetic oligonucleotide
cagcttgcaggacagcttttcgtgctggac

SEQ ID NO: 447051 - DNA, 30 bp, Artificial Sequence
  Synthetic oligonucleotide
taagtttcaacagtatcactgagtctggac

SEQ ID NO: 447052 - DNA, 30 bp, Artificial Sequence
  Synthetic oligonucleotide
tcatgtattccgcggcacgtgggtctggac

SEQ ID NO: 447053 - DNA, 26 bp, Artificial Sequence
  Synthetic oligonucleotide
atcagttccggattggaagagtggac

SEQ ID NO: 447054 - DNA, 30 bp, Artificial Sequence
  Synthetic oligonucleotide
cagattgacaactgcgttataatagtggac

SEQ ID NO: 447055 - DNA, 30 bp, Artificial Sequence
  Synthetic oligonucleotide
cgacctgatgagtcagggggttccgtggac

SEQ ID NO: 447056 - DNA, 30 bp, Artificial Sequence
  Synthetic oligonucleotide
tggagcccgtccggattcagcagggtggac

SEQ ID NO: 447057 - DNA, 30 bp, Artificial Sequence
  Synthetic oligonucleotide
aacataagatgggagctaaccgtggtggac

SEQ ID NO: 447058 - DNA, 30 bp, Artificial Sequence
  Synthetic oligonucleotide
gagaaccccctgccgagccttcaattggac

SEQ ID NO: 447059 - DNA, 30 bp, Artificial Sequence
  Synthetic oligonucleotide
actaatgatttttggagctcttgattggac

SEQ ID NO: 447060 - DNA, 30 bp, Artificial Sequence
  Synthetic oligonucleotide
gagaggcagggtacgactagaatattggac

SEQ ID NO: 447061 - DNA, 30 bp, Artificial Sequence
  Synthetic oligonucleotide
tttaacgttttggctggccatcgcttggac

SEQ ID NO: 447062 - DNA, 30 bp, Artificial Sequence
  Synthetic oligonucleotide
gtgatggccaaattctaattaggcttggac

SEQ ID NO: 447063 - DNA, 30 bp, Artificial Sequence
  Synthetic oligonucleotide
caattgtgaaaaccgtctactggcttggac

SEQ ID NO: 447064 - DNA, 30 bp, Artificial Sequence
  Synthetic oligonucleotide
accttaatcacaggccttaaggcgttggac

SEQ ID NO: 447065 - DNA, 30 bp, Artificial Sequence
  Synthetic oligonucleotide
gttccaggtcgctattgccaagtgttggac

SEQ ID NO: 447066 - DNA, 30 bp, Artificial Sequence
  Synthetic oligonucleotide
taattatacatacgttttttattgttggac

SEQ ID NO: 447067 - DNA, 30 bp, Artificial Sequence
  Synthetic oligonucleotide
taagttatcaattccatggggcgtttggac

SEQ ID NO: 447068 - DNA, 30 bp, Artificial Sequence
  Synthetic oligonucleotide
ttatcgtgcgcgacaaatccacgaaatgac

SEQ ID NO: 447069 - DNA, 30 bp, Artificial Sequence
  Synthetic oligonucleotide
atcattttctaatggtgtgccggaaatgac

SEQ ID NO: 447070 - DNA, 30 bp, Artificial Sequence
  Synthetic oligonucleotide
aagttgcggctttgggacccgttaaatgac

SEQ ID NO: 447071 - DNA, 30 bp, Artificial Sequence
  Synthetic oligonucleotide
ttgagcttgtcacgccatgtgaacaatgac

SEQ ID NO: 447072 - DNA, 30 bp, Artificial Sequence
  Synthetic oligonucleotide
ccagacacttcaaggagcctatgcaatgac

SEQ ID NO: 447073 - DNA, 30 bp, Artificial Sequence
  Synthetic oligonucleotide
gctatggagggttttttccacgtgaatgac

SEQ ID NO: 447074 - DNA, 31 bp, Artificial Sequence
  Synthetic oligonucleotide
ctgatgcagtacccttcgcggggtgaatgac

SEQ ID NO: 447075 - DNA, 30 bp, Artificial Sequence
  Synthetic oligonucleotide
aataggagggaggtccagatctataatgac

SEQ ID NO: 447076 - DNA, 30 bp, Artificial Sequence
  Synthetic oligonucleotide
tcgtatcattaattcgttatagttaatgac

SEQ ID NO: 447077 - DNA, 30 bp, Artificial Sequence
  Synthetic oligonucleotide
ggaggtagtcaaagttatactcaacatgac

SEQ ID NO: 447078 - DNA, 30 bp, Artificial Sequence
  Synthetic oligonucleotide
attgcacgtaaagtcgaggaagaacatgac

SEQ ID NO: 447079 - DNA, 30 bp, Artificial Sequence
  Synthetic oligonucleotide
atgagtaagtcctcgataatcccacatgac

SEQ ID NO: 447080 - DNA, 30 bp, Artificial Sequence
  Synthetic oligonucleotide
attcaaccaatcgccgagtccgcacatgac

SEQ ID NO: 447081 - DNA, 30 bp, Artificial Sequence
  Synthetic oligonucleotide
cctttatatcaatcagtttgattacatgac

SEQ ID NO: 447082 - DNA, 30 bp, Artificial Sequence
  Synthetic oligonucleotide
aaaatcgacttactctgcctatgccatgac

SEQ ID NO: 447083 - DNA, 30 bp, Artificial Sequence
  Synthetic oligonucleotide
gtccaatagtcacaggggtttccgcatgac

SEQ ID NO: 447084 - DNA, 30 bp, Artificial Sequence
  Synthetic oligonucleotide
ggatctagaactattcattgctatcatgac

SEQ ID NO: 447085 - DNA, 30 bp, Artificial Sequence
  Synthetic oligonucleotide
actatgttctacgcgcgaggtagtcatgac

SEQ ID NO: 447086 - DNA, 30 bp, Artificial Sequence
  Synthetic oligonucleotide
tgcttgctgagctacagatatttagatgac

SEQ ID NO: 447087 - DNA, 30 bp, Artificial Sequence
  Synthetic oligonucleotide
tacgtccgctttgcgtcaaacaaggatgac

SEQ ID NO: 447088 - DNA, 30 bp, Artificial Sequence
  Synthetic oligonucleotide
acggttttaccttatgtatagccggatgac

SEQ ID NO: 447089 - DNA, 30 bp, Artificial Sequence
  Synthetic oligonucleotide
agctaccttattcacaacattgatgatgac

SEQ ID NO: 447090 - DNA, 30 bp, Artificial Sequence
  Synthetic oligonucleotide
ttttggattcatcatgactctagtgatgac

SEQ ID NO: 447091 - DNA, 30 bp, Artificial Sequence
  Synthetic oligonucleotide
agctgatgtttaaggcgtgcctttgatgac

SEQ ID NO: 447092 - DNA, 30 bp, Artificial Sequence
  Synthetic oligonucleotide
atatacgggacaagcctcaggtttgatgac

SEQ ID NO: 447093 - DNA, 30 bp, Artificial Sequence
  Synthetic oligonucleotide
tcattaatcgctcattttcccgaatatgac

SEQ ID NO: 447094 - DNA, 30 bp, Artificial Sequence
  Synthetic oligonucleotide
ttaacgtggacgcagattcagcgatatgac

SEQ ID NO: 447095 - DNA, 30 bp, Artificial Sequence
  Synthetic oligonucleotide
ctgccatccttcggtcgtagccgctatgac

SEQ ID NO: 447096 - DNA, 30 bp, Artificial Sequence
  Synthetic oligonucleotide
cgacccgcgttctatattcgcaggtatgac

SEQ ID NO: 447097 - DNA, 30 bp, Artificial Sequence
  Synthetic oligonucleotide
gtagtcggcccctgcacggcgtcttatgac

SEQ ID NO: 447098 - DNA, 30 bp, Artificial Sequence
  Synthetic oligonucleotide
ccggggcatgtaggttaatctttttatgac

SEQ ID NO: 447099 - DNA, 30 bp, Artificial Sequence
  Synthetic oligonucleotide
ctatctacagggcgctctgtccgaactgac

SEQ ID NO: 447100 - DNA, 30 bp, Artificial Sequence
  Synthetic oligonucleotide
gtcatcaagacatggggggggggaactgac

SEQ ID NO: 447101 - DNA, 30 bp, Artificial Sequence
  Synthetic oligonucleotide
gtaggccgtaataaccggggtattactgac

SEQ ID NO: 447102 - DNA, 30 bp, Artificial Sequence
  Synthetic oligonucleotide
caatggtatatggacaagataatacctgac

SEQ ID NO: 447103 - DNA, 30 bp, Artificial Sequence
  Synthetic oligonucleotide
tggggcccggtgcagcgggctcaccctgac

SEQ ID NO: 447104 - DNA, 30 bp, Artificial Sequence
  Synthetic oligonucleotide
gcggtctttatgtcatctggtatccctgac

SEQ ID NO: 447105 - DNA, 30 bp, Artificial Sequence
  Synthetic oligonucleotide
ctgcgttggcattacactggccctcctgac

SEQ ID NO: 447106 - DNA, 30 bp, Artificial Sequence
  Synthetic oligonucleotide
taaattatttgctcaaccattcaagctgac

SEQ ID NO: 447107 - DNA, 30 bp, Artificial Sequence
  Synthetic oligonucleotide
tacctggctctgcaaagtggcgaagctgac

SEQ ID NO: 447108 - DNA, 30 bp, Artificial Sequence
  Synthetic oligonucleotide
cagtcattcagcaacgctgaggaagctgac

SEQ ID NO: 447109 - DNA, 30 bp, Artificial Sequence
  Synthetic oligonucleotide
gaggttgctctggtgtacaccttggctgac

SEQ ID NO: 447110 - DNA, 30 bp, Artificial Sequence
  Synthetic oligonucleotide
ggcgtgacagaactccacgtgggtgctgac

SEQ ID NO: 447111 - DNA, 30 bp, Artificial Sequence
  Synthetic oligonucleotide
agaattaccagcatgggaacgcggtctgac

SEQ ID NO: 447112 - DNA, 30 bp, Artificial Sequence
  Synthetic oligonucleotide
acctcaagatccggggcggacgggtctgac

SEQ ID NO: 447113 - DNA, 30 bp, Artificial Sequence
  Synthetic oligonucleotide
taactagagaatctccgacttctgtctgac

SEQ ID NO: 447114 - DNA, 30 bp, Artificial Sequence
  Synthetic oligonucleotide
taccggttaggtttaccgtgacattctgac

SEQ ID NO: 447115 - DNA, 30 bp, Artificial Sequence
  Synthetic oligonucleotide
cttgacgccgtcattagagagtattctgac

SEQ ID NO: 447116 - DNA, 30 bp, Artificial Sequence
  Synthetic oligonucleotide
caccgtggattgaggcagtggccttctgac

SEQ ID NO: 447117 - DNA, 30 bp, Artificial Sequence
  Synthetic oligonucleotide
gacttgatgttagaggccgtatgttctgac

SEQ ID NO: 447118 - DNA, 30 bp, Artificial Sequence
  Synthetic oligonucleotide
ccttcttaaggatatttttaaagaagtgac

SEQ ID NO: 447119 - DNA, 30 bp, Artificial Sequence
  Synthetic oligonucleotide
caatgatcgttacggagatagtagagtgac

SEQ ID NO: 447120 - DNA, 30 bp, Artificial Sequence
  Synthetic oligonucleotide
tttcaagatttggcttcaagacggagtgac

SEQ ID NO: 447121 - DNA, 30 bp, Artificial Sequence
  Synthetic oligonucleotide
ttccttggtgacctcagcgggtggagtgac

SEQ ID NO: 447122 - DNA, 30 bp, Artificial Sequence
  Synthetic oligonucleotide
accggcggcagcagcagaggcttgagtgac

SEQ ID NO: 447123 - DNA, 30 bp, Artificial Sequence
  Synthetic oligonucleotide
atttgtgctagccttctaattatacgtgac

SEQ ID NO: 447124 - DNA, 30 bp, Artificial Sequence
  Synthetic oligonucleotide
accgctacatcacggtcgcactgccgtgac

SEQ ID NO: 447125 - DNA, 30 bp, Artificial Sequence
  Synthetic oligonucleotide
tcaccatacttaattaggcaaaagcgtgac

SEQ ID NO: 447126 - DNA, 30 bp, Artificial Sequence
  Synthetic oligonucleotide
atgaaagatttccagtaacggccgcgtgac

SEQ ID NO: 447127 - DNA, 30 bp, Artificial Sequence
  Synthetic oligonucleotide
ttagttcgacgataaatgaatcaaggtgac

SEQ ID NO: 447128 - DNA, 30 bp, Artificial Sequence
  Synthetic oligonucleotide
cctaacacggctgttttttaaataggtgac

SEQ ID NO: 447129 - DNA, 30 bp, Artificial Sequence
  Synthetic oligonucleotide
atcgatgcaccgggcagctcacatggtgac

SEQ ID NO: 447130 - DNA, 30 bp, Artificial Sequence
  Synthetic oligonucleotide
agtagatattcgccaacgtaccttggtgac

SEQ ID NO: 447131 - DNA, 30 bp, Artificial Sequence
  Synthetic oligonucleotide
atatcacgaagatcggccggcaaatgtgac

SEQ ID NO: 447132 - DNA, 30 bp, Artificial Sequence
  Synthetic oligonucleotide
ggtcgcaccggtcgcttcgtcagatgtgac

SEQ ID NO: 447133 - DNA, 30 bp, Artificial Sequence
  Synthetic oligonucleotide
tataacatcttcggcactggtacctgtgac

SEQ ID NO: 447134 - DNA, 30 bp, Artificial Sequence
  Synthetic oligonucleotide
atagcaaggatatggcccgaccgctgtgac

SEQ ID NO: 447135 - DNA, 30 bp, Artificial Sequence
  Synthetic oligonucleotide
gtcacatatctctttttctggcagtgtgac

SEQ ID NO: 447136 - DNA, 30 bp, Artificial Sequence
  Synthetic oligonucleotide
taatcacttcttccagtaggtccaattgac

SEQ ID NO: 447137 - DNA, 30 bp, Artificial Sequence
  Synthetic oligonucleotide
ggacgttcgggcgattgggatggaattgac

SEQ ID NO: 447138 - DNA, 30 bp, Artificial Sequence
  Synthetic oligonucleotide
aatctaattgcgaaagggaatgccattgac

SEQ ID NO: 447139 - DNA, 31 bp, Artificial Sequence
  Synthetic oligonucleotide
aacaggtaacagtcagagacggtccattgac

SEQ ID NO: 447140 - DNA, 30 bp, Artificial Sequence
  Synthetic oligonucleotide
aagatgacccggccgcgggaactcattgac

SEQ ID NO: 447141 - DNA, 30 bp, Artificial Sequence
  Synthetic oligonucleotide
aactttagtcgggcatcttgtctcattgac

SEQ ID NO: 447142 - DNA, 30 bp, Artificial Sequence
  Synthetic oligonucleotide
tccgtatcgttctcatatgcacggattgac

SEQ ID NO: 447143 - DNA, 30 bp, Artificial Sequence
  Synthetic oligonucleotide
gacaggctgctgtagtgggacggtattgac

SEQ ID NO: 447144 - DNA, 30 bp, Artificial Sequence
  Synthetic oligonucleotide
taaatcttttaggtgcgctaaattattgac

SEQ ID NO: 447145 - DNA, 30 bp, Artificial Sequence
  Synthetic oligonucleotide
cagcctcaagtcaccgtctagcaacttgac

SEQ ID NO: 447146 - DNA, 30 bp, Artificial Sequence
  Synthetic oligonucleotide
tttaaccccctaaaataaatgccacttgac

SEQ ID NO: 447147 - DNA, 30 bp, Artificial Sequence
  Synthetic oligonucleotide
tgagccaactatattgaatggccgcttgac

SEQ ID NO: 447148 - DNA, 30 bp, Artificial Sequence
  Synthetic oligonucleotide
atcaagctatgtaagtttcgcgatcttgac

SEQ ID NO: 447149 - DNA, 30 bp, Artificial Sequence
  Synthetic oligonucleotide
cgccaatccccacagcacgacgctcttgac

SEQ ID NO: 447150 - DNA, 30 bp, Artificial Sequence
  Synthetic oligonucleotide
tacgcgtcttcaaggtagcatggtcttgac

SEQ ID NO: 447151 - DNA, 30 bp, Artificial Sequence
  Synthetic oligonucleotide
aaaagtgtcgcccacatttccttcgttgac

SEQ ID NO: 447152 - DNA, 30 bp, Artificial Sequence
  Synthetic oligonucleotide
ccatagtcttattgcgcgttgtcggttgac

SEQ ID NO: 447153 - DNA, 30 bp, Artificial Sequence
  Synthetic oligonucleotide
acattggctcgtctgcataatgtctttgac

SEQ ID NO: 447154 - DNA, 30 bp, Artificial Sequence
  Synthetic oligonucleotide
atagtttgctatgaccagcctccgtttgac

SEQ ID NO: 447155 - DNA, 30 bp, Artificial Sequence
  Synthetic oligonucleotide
gtttccacccaacagaagaccgattttgac

SEQ ID NO: 447156 - DNA, 30 bp, Artificial Sequence
  Synthetic oligonucleotide
accagcctgtctggatacttgacttttgac

SEQ ID NO: 447157 - DNA, 30 bp, Artificial Sequence
  Synthetic oligonucleotide
ggaagtggtacggcgtctcacatttttgac

SEQ ID NO: 447158 - DNA, 30 bp, Artificial Sequence
  Synthetic oligonucleotide
cagcaagcaagttggcctcctaaaaaatac

SEQ ID NO: 447159 - DNA, 30 bp, Artificial Sequence
  Synthetic oligonucleotide
ccattgaggctcaggctacgtcaaaaatac

SEQ ID NO: 447160 - DNA, 30 bp, Artificial Sequence
  Synthetic oligonucleotide
gatacagtaccttccaaagcttcaaaatac

SEQ ID NO: 447161 - DNA, 30 bp, Artificial Sequence
  Synthetic oligonucleotide
gttccggcgggagctttcctgtgaaaatac

SEQ ID NO: 447162 - DNA, 30 bp, Artificial Sequence
  Synthetic oligonucleotide
gcggtatgctcaattcctgctgacaaatac

SEQ ID NO: 447163 - DNA, 30 bp, Artificial Sequence
  Synthetic oligonucleotide
aattccccgagggtgccggttcggaaatac

SEQ ID NO: 447164 - DNA, 30 bp, Artificial Sequence
  Synthetic oligonucleotide
gaatagtagtgggctaatacaatgaaatac

SEQ ID NO: 447165 - DNA, 30 bp, Artificial Sequence
  Synthetic oligonucleotide
tgtttgcggaccgttgcgccatataaatac

SEQ ID NO: 447166 - DNA, 30 bp, Artificial Sequence
  Synthetic oligonucleotide
gacagtcacagaagtcactgtggtaaatac

SEQ ID NO: 447167 - DNA, 30 bp, Artificial Sequence
  Synthetic oligonucleotide
tttcaccgctagttctgctcgtgtaaatac

SEQ ID NO: 447168 - DNA, 30 bp, Artificial Sequence
  Synthetic oligonucleotide
agccaacatatattaaacgtacaacaatac

SEQ ID NO: 447169 - DNA, 30 bp, Artificial Sequence
  Synthetic oligonucleotide
gtctctggtgttcggaagcatggacaatac

SEQ ID NO: 447170 - DNA, 30 bp, Artificial Sequence
  Synthetic oligonucleotide
ggtatgatttaagtcgcccatttccaatac

SEQ ID NO: 447171 - DNA, 30 bp, Artificial Sequence
  Synthetic oligonucleotide
gctgtcccaagattaaatcttgacgaatac

SEQ ID NO: 447172 - DNA, 30 bp, Artificial Sequence
  Synthetic oligonucleotide
aaattcgaactaatgtctctctacgaatac

SEQ ID NO: 447173 - DNA, 30 bp, Artificial Sequence
  Synthetic oligonucleotide
ttaatagcctacgcctgcccgtgggaatac

SEQ ID NO: 447174 - DNA, 30 bp, Artificial Sequence
  Synthetic oligonucleotide
tttaggctgcaaccagtgaaaaaataatac

SEQ ID NO: 447175 - DNA, 30 bp, Artificial Sequence
  Synthetic oligonucleotide
tatatcgatgcgcatagttatatataatac

SEQ ID NO: 447176 - DNA, 30 bp, Artificial Sequence
  Synthetic oligonucleotide
gggaactcgtttagttggtttatctaatac

SEQ ID NO: 447177 - DNA, 30 bp, Artificial Sequence
  Synthetic oligonucleotide
taattatgatatgcgtgtccaaggtaatac

SEQ ID NO: 447178 - DNA, 30 bp, Artificial Sequence
  Synthetic oligonucleotide
tcatggtttgcatcgatgctgatgtaatac

SEQ ID NO: 447179 - DNA, 30 bp, Artificial Sequence
  Synthetic oligonucleotide
gttagtcgcataactcggggaagttaatac

SEQ ID NO: 447180 - DNA, 30 bp, Artificial Sequence
  Synthetic oligonucleotide
tatccacggtattggaagtccacaacatac

SEQ ID NO: 447181 - DNA, 30 bp, Artificial Sequence
  Synthetic oligonucleotide
ctagacaagaggtgtcccagcgcaacatac

SEQ ID NO: 447182 - DNA, 30 bp, Artificial Sequence
  Synthetic oligonucleotide
cctttaaaaggcattgtgacgcgaacatac

SEQ ID NO: 447183 - DNA, 30 bp, Artificial Sequence
  Synthetic oligonucleotide
gaaatcagttgcccaggataaccgacatac

SEQ ID NO: 447184 - DNA, 30 bp, Artificial Sequence
  Synthetic oligonucleotide
ccgtttctattcatatccaaatggacatac

SEQ ID NO: 447185 - DNA, 30 bp, Artificial Sequence
  Synthetic oligonucleotide
ctagttttttacttcaaggtctcgccatac

SEQ ID NO: 447186 - DNA, 30 bp, Artificial Sequence
  Synthetic oligonucleotide
ttggtttagtctacaatactagggccatac

SEQ ID NO: 447187 - DNA, 30 bp, Artificial Sequence
  Synthetic oligonucleotide
agatcgctcggtcgcatagtcttagcatac

SEQ ID NO: 447188 - DNA, 30 bp, Artificial Sequence
  Synthetic oligonucleotide
caggcctgaggcagccgtagcaacgcatac

SEQ ID NO: 447189 - DNA, 30 bp, Artificial Sequence
  Synthetic oligonucleotide
gacattaccaggcactggtttaccgcatac

SEQ ID NO: 447190 - DNA, 30 bp, Artificial Sequence
  Synthetic oligonucleotide
aattgagcctatcggcactaaaaggcatac

SEQ ID NO: 447191 - DNA, 30 bp, Artificial Sequence
  Synthetic oligonucleotide
gtattatgttcagttcttggcgatgcatac

SEQ ID NO: 447192 - DNA, 30 bp, Artificial Sequence
  Synthetic oligonucleotide
gcggattggtcattttctgctcttgcatac

SEQ ID NO: 447193 - DNA, 30 bp, Artificial Sequence
  Synthetic oligonucleotide
gggcatgggcacgtaggctcatttgcatac

SEQ ID NO: 447194 - DNA, 30 bp, Artificial Sequence
  Synthetic oligonucleotide
atatgcgtataaagactattgaaatcatac

SEQ ID NO: 447195 - DNA, 30 bp, Artificial Sequence
  Synthetic oligonucleotide
tcgtatctttacaggattggctcatcatac

SEQ ID NO: 447196 - DNA, 30 bp, Artificial Sequence
  Synthetic oligonucleotide
gacttatttgggtgggccgagttatcatac

SEQ ID NO: 447197 - DNA, 30 bp, Artificial Sequence
  Synthetic oligonucleotide
gcgatcagtggagcttacacagcctcatac

SEQ ID NO: 447198 - DNA, 30 bp, Artificial Sequence
  Synthetic oligonucleotide
gggtcagcgcccggggacgctacttcatac

SEQ ID NO: 447199 - DNA, 30 bp, Artificial Sequence
  Synthetic oligonucleotide
tatctaccgtttgaagaaggaccttcatac

SEQ ID NO: 447200 - DNA, 30 bp, Artificial Sequence
  Synthetic oligonucleotide
atgatgcacttactacgtttcaaaagatac

SEQ ID NO: 447201 - DNA, 30 bp, Artificial Sequence
  Synthetic oligonucleotide
aaagtggctcatcgagacaaataaagatac

SEQ ID NO: 447202 - DNA, 30 bp, Artificial Sequence
  Synthetic oligonucleotide
atcccttctggaaatacgctatcaagatac

SEQ ID NO: 447203 - DNA, 30 bp, Artificial Sequence
  Synthetic oligonucleotide
tgtctttaatctggggttgactacagatac

SEQ ID NO: 447204 - DNA, 30 bp, Artificial Sequence
  Synthetic oligonucleotide
cgatgtgagacgcacccagactccagatac

SEQ ID NO: 447205 - DNA, 30 bp, Artificial Sequence
  Synthetic oligonucleotide
gtaacgaggctgcaggtttgttcgagatac

SEQ ID NO: 447206 - DNA, 30 bp, Artificial Sequence
  Synthetic oligonucleotide
gtctgtatgacatagtccaactggagatac

SEQ ID NO: 447207 - DNA, 30 bp, Artificial Sequence
  Synthetic oligonucleotide
tttcgctggttggcctattaagctagatac

SEQ ID NO: 447208 - DNA, 30 bp, Artificial Sequence
  Synthetic oligonucleotide
atatgacctatgaggccaacccgtagatac

SEQ ID NO: 447209 - DNA, 30 bp, Artificial Sequence
  Synthetic oligonucleotide
gtatagaatattccgacggacgaccgatac

SEQ ID NO: 447210 - DNA, 30 bp, Artificial Sequence
  Synthetic oligonucleotide
ataccacagaagctactgtattaccgatac

SEQ ID NO: 447211 - DNA, 30 bp, Artificial Sequence
  Synthetic oligonucleotide
aaaatgccttgtctatgccccgggcgatac

SEQ ID NO: 447212 - DNA, 30 bp, Artificial Sequence
  Synthetic oligonucleotide
cttctaacacacgcgtataccccaggatac

SEQ ID NO: 447213 - DNA, 30 bp, Artificial Sequence
  Synthetic oligonucleotide
gattactcacataaaattcctccaggatac

SEQ ID NO: 447214 - DNA, 30 bp, Artificial Sequence
  Synthetic oligonucleotide
ttgcttcggacgttaggagatcgaggatac

SEQ ID NO: 447215 - DNA, 30 bp, Artificial Sequence
  Synthetic oligonucleotide
cagggcgcttatctgttggggggaggatac

SEQ ID NO: 447216 - DNA, 30 bp, Artificial Sequence
  Synthetic oligonucleotide
tccgcagacactccatgttggttaggatac

SEQ ID NO: 447217 - DNA, 30 bp, Artificial Sequence
  Synthetic oligonucleotide
tgggatctgctggacttcctccagggatac

SEQ ID NO: 447218 - DNA, 30 bp, Artificial Sequence
  Synthetic oligonucleotide
tagatgtggcaggttccgtctaggggatac

SEQ ID NO: 447219 - DNA, 30 bp, Artificial Sequence
  Synthetic oligonucleotide
aaacccctaggtaaccgtaatgtgggatac

SEQ ID NO: 447220 - DNA, 30 bp, Artificial Sequence
  Synthetic oligonucleotide
atactactaatgatgccgttaaatggatac

SEQ ID NO: 447221 - DNA, 30 bp, Artificial Sequence
  Synthetic oligonucleotide
ggaatttcgacttgacagtatagtggatac

SEQ ID NO: 447222 - DNA, 30 bp, Artificial Sequence
  Synthetic oligonucleotide
gggaggttagggtctaccgtccgtggatac

SEQ ID NO: 447223 - DNA, 30 bp, Artificial Sequence
  Synthetic oligonucleotide
gagacgctgatcaaataacagtgtggatac

SEQ ID NO: 447224 - DNA, 30 bp, Artificial Sequence
  Synthetic oligonucleotide
agatatagtgtctggcactgccttggatac

SEQ ID NO: 447225 - DNA, 30 bp, Artificial Sequence
  Synthetic oligonucleotide
cctggaggatcgcacgggtgccttggatac

SEQ ID NO: 447226 - DNA, 30 bp, Artificial Sequence
  Synthetic oligonucleotide
acttgaaatcctttgtgtatagttggatac

SEQ ID NO: 447227 - DNA, 30 bp, Artificial Sequence
  Synthetic oligonucleotide
aaaagtcgtctaatgcccaaataatgatac

SEQ ID NO: 447228 - DNA, 30 bp, Artificial Sequence
  Synthetic oligonucleotide
aagactcagtcgtacgagtgcatctgatac

SEQ ID NO: 447229 - DNA, 30 bp, Artificial Sequence
  Synthetic oligonucleotide
agcaccagtcggacagtccctgtctgatac

SEQ ID NO: 447230 - DNA, 30 bp, Artificial Sequence
  Synthetic oligonucleotide
cccgaataagttgcaatatgacagtgatac

SEQ ID NO: 447231 - DNA, 30 bp, Artificial Sequence
  Synthetic oligonucleotide
aaaccacaatagtctctcactcaaatatac

SEQ ID NO: 447232 - DNA, 30 bp, Artificial Sequence
  Synthetic oligonucleotide
cattatccactgtctcgctcccgaatatac

SEQ ID NO: 447233 - DNA, 30 bp, Artificial Sequence
  Synthetic oligonucleotide
aacccagggttgcagcgggcaaccatatac

SEQ ID NO: 447234 - DNA, 30 bp, Artificial Sequence
  Synthetic oligonucleotide
ttctggggtgcatgcctgtacgtcatatac

SEQ ID NO: 447235 - DNA, 30 bp, Artificial Sequence
  Synthetic oligonucleotide
ttgtgccacgaactgacagcaaagatatac

SEQ ID NO: 447236 - DNA, 30 bp, Artificial Sequence
  Synthetic oligonucleotide
cagtatatattggtgtagccttagatatac

SEQ ID NO: 447237 - DNA, 30 bp, Artificial Sequence
  Synthetic oligonucleotide
taattgtttattttgacggacgggatatac

SEQ ID NO: 447238 - DNA, 30 bp, Artificial Sequence
  Synthetic oligonucleotide
tgcaaccaaggactgttatattctatatac

SEQ ID NO: 447239 - DNA, 30 bp, Artificial Sequence
  Synthetic oligonucleotide
atccgctcttgcgagcaagaagttatatac

SEQ ID NO: 447240 - DNA, 30 bp, Artificial Sequence
  Synthetic oligonucleotide
aatattgatagtgagtccgagtaactatac

SEQ ID NO: 447241 - DNA, 30 bp, Artificial Sequence
  Synthetic oligonucleotide
ataatgctcttacaaccttgtttactatac

SEQ ID NO: 447242 - DNA, 30 bp, Artificial Sequence
  Synthetic oligonucleotide
caaggggtttttacatacataggcctatac

SEQ ID NO: 447243 - DNA, 30 bp, Artificial Sequence
  Synthetic oligonucleotide
gtttgccaatggatcaatcgtccgctatac

SEQ ID NO: 447244 - DNA, 30 bp, Artificial Sequence
  Synthetic oligonucleotide
atcgtgatcacagtcgtctgactgctatac

SEQ ID NO: 447245 - DNA, 30 bp, Artificial Sequence
  Synthetic oligonucleotide
tagggagcgaaagaagatagacatctatac

SEQ ID NO: 447246 - DNA, 30 bp, Artificial Sequence
  Synthetic oligonucleotide
gaccagtgtgttagaatccactatctatac

SEQ ID NO: 447247 - DNA, 30 bp, Artificial Sequence
  Synthetic oligonucleotide
tgcgggggaaacgagcttaggtttctatac

SEQ ID NO: 447248 - DNA, 30 bp, Artificial Sequence
  Synthetic oligonucleotide
cgttcttatcgctccgtcagaggagtatac

SEQ ID NO: 447249 - DNA, 30 bp, Artificial Sequence
  Synthetic oligonucleotide
acgcgtgttccgtagcaaatgtgagtatac

SEQ ID NO: 447250 - DNA, 30 bp, Artificial Sequence
  Synthetic oligonucleotide
tatcttcgtcctccctctcgagaggtatac

SEQ ID NO: 447251 - DNA, 30 bp, Artificial Sequence
  Synthetic oligonucleotide
cactgccgcttgaaatctgagctggtatac

SEQ ID NO: 447252 - DNA, 30 bp, Artificial Sequence
  Synthetic oligonucleotide
atagaatagttttatgcttcgcgtgtatac

SEQ ID NO: 447253 - DNA, 30 bp, Artificial Sequence
  Synthetic oligonucleotide
tcgtaatgcgtagataatacctttgtatac

SEQ ID NO: 447254 - DNA, 30 bp, Artificial Sequence
  Synthetic oligonucleotide
tgttctcattggatataacggaaattatac

SEQ ID NO: 447255 - DNA, 30 bp, Artificial Sequence
  Synthetic oligonucleotide
acatcaccctccttaaacgtttgattatac

SEQ ID NO: 447256 - DNA, 30 bp, Artificial Sequence
  Synthetic oligonucleotide
agcagcatgacgtagagtacaatattatac

SEQ ID NO: 447257 - DNA, 30 bp, Artificial Sequence
  Synthetic oligonucleotide
tggcagagaagtaagtatttcagcttatac

SEQ ID NO: 447258 - DNA, 30 bp, Artificial Sequence
  Synthetic oligonucleotide
cctgccaaacaggcagtggaccgcttatac

SEQ ID NO: 447259 - DNA, 30 bp, Artificial Sequence
  Synthetic oligonucleotide
ttccttatcgaaaattgtccaatcttatac

SEQ ID NO: 447260 - DNA, 30 bp, Artificial Sequence
  Synthetic oligonucleotide
caatataagagatatcctatgatcttatac

SEQ ID NO: 447261 - DNA, 30 bp, Artificial Sequence
  Synthetic oligonucleotide
acagtgtgagatgcaggtatcttcttatac

SEQ ID NO: 447262 - DNA, 30 bp, Artificial Sequence
  Synthetic oligonucleotide
tctttaatcaccgtttggcggtagttatac

SEQ ID NO: 447263 - DNA, 30 bp, Artificial Sequence
  Synthetic oligonucleotide
tcactccacggggcacttgtatggttatac

SEQ ID NO: 447264 - DNA, 30 bp, Artificial Sequence
  Synthetic oligonucleotide
agtgcttccgaaaattaatgcaatttatac

SEQ ID NO: 447265 - DNA, 30 bp, Artificial Sequence
  Synthetic oligonucleotide
cggtgaaccgcacctcgagcttctttatac

SEQ ID NO: 447266 - DNA, 30 bp, Artificial Sequence
  Synthetic oligonucleotide
gcaaaggaagccctcctggtttctttatac

SEQ ID NO: 447267 - DNA, 30 bp, Artificial Sequence
  Synthetic oligonucleotide
tagaatttgtgattagtcagtcttttatac

SEQ ID NO: 447268 - DNA, 30 bp, Artificial Sequence
  Synthetic oligonucleotide
cccccggtgatcaacgcctcatttttatac

SEQ ID NO: 447269 - DNA, 30 bp, Artificial Sequence
  Synthetic oligonucleotide
gatacgtatttggcccgctcgtcaaactac

SEQ ID NO: 447270 - DNA, 30 bp, Artificial Sequence
  Synthetic oligonucleotide
attgacacgaattgtgggaggctgaactac

SEQ ID NO: 447271 - DNA, 30 bp, Artificial Sequence
  Synthetic oligonucleotide
gcgaagcaattgccttagacttttaactac

SEQ ID NO: 447272 - DNA, 30 bp, Artificial Sequence
  Synthetic oligonucleotide
cagcgtcgtgcgttgatcgagagacactac

SEQ ID NO: 447273 - DNA, 30 bp, Artificial Sequence
  Synthetic oligonucleotide
tcaagatgcgtcccgtgcgggttacactac

SEQ ID NO: 447274 - DNA, 30 bp, Artificial Sequence
  Synthetic oligonucleotide
gactcccgtaactagtaaatgacgcactac

SEQ ID NO: 447275 - DNA, 30 bp, Artificial Sequence
  Synthetic oligonucleotide
acaagcgccctttgggctagaccgcactac

SEQ ID NO: 447276 - DNA, 30 bp, Artificial Sequence
  Synthetic oligonucleotide
aaactgtcgtacgggaatgtaatgcactac

SEQ ID NO: 447277 - DNA, 30 bp, Artificial Sequence
  Synthetic oligonucleotide
aggttaacaaccgctgtggttagagactac

SEQ ID NO: 447278 - DNA, 30 bp, Artificial Sequence
  Synthetic oligonucleotide
tccagagctgtttcgttcactggagactac

SEQ ID NO: 447279 - DNA, 30 bp, Artificial Sequence
  Synthetic oligonucleotide
tcctagatcgtcgaatctaagagcgactac

SEQ ID NO: 447280 - DNA, 30 bp, Artificial Sequence
  Synthetic oligonucleotide
acgtccctgggatctactagacgcgactac

SEQ ID NO: 447281 - DNA, 30 bp, Artificial Sequence
  Synthetic oligonucleotide
atgccttttcaatccgtcatcatcgactac

SEQ ID NO: 447282 - DNA, 30 bp, Artificial Sequence
  Synthetic oligonucleotide
cccccgtccggacaagtgatgtaatactac

SEQ ID NO: 447283 - DNA, 30 bp, Artificial Sequence
  Synthetic oligonucleotide
atagattgcagaggtttaaactcatactac

SEQ ID NO: 447284 - DNA, 30 bp, Artificial Sequence
  Synthetic oligonucleotide
ccgaagataaattctgggacgcgatactac

SEQ ID NO: 447285 - DNA, 30 bp, Artificial Sequence
  Synthetic oligonucleotide
gatagaacacaggctccaggcttatactac

SEQ ID NO: 447286 - DNA, 30 bp, Artificial Sequence
  Synthetic oligonucleotide
agctatcgacgctgacagaaacactactac

SEQ ID NO: 447287 - DNA, 30 bp, Artificial Sequence
  Synthetic oligonucleotide
gaaacgcctttcgcatagcatcagtactac

SEQ ID NO: 447288 - DNA, 30 bp, Artificial Sequence
  Synthetic oligonucleotide
cttcaacactttgatccctgtcagtactac

SEQ ID NO: 447289 - DNA, 30 bp, Artificial Sequence
  Synthetic oligonucleotide
gtaaccagcttaagcgatcatcgttactac

SEQ ID NO: 447290 - DNA, 30 bp, Artificial Sequence
  Synthetic oligonucleotide
gatggcggtcggctggacctctgttactac

SEQ ID NO: 447291 - DNA, 30 bp, Artificial Sequence
  Synthetic oligonucleotide
agtgtatgaccacgcgctgtgcaaacctac

SEQ ID NO: 447292 - DNA, 30 bp, Artificial Sequence
  Synthetic oligonucleotide
gcagttacgtgacgaatagtctcaacctac

SEQ ID NO: 447293 - DNA, 30 bp, Artificial Sequence
  Synthetic oligonucleotide
caaatatcccccatcgtagttggaacctac

SEQ ID NO: 447294 - DNA, 30 bp, Artificial Sequence
  Synthetic oligonucleotide
ttcggcagcccgggcctgcttataacctac

SEQ ID NO: 447295 - DNA, 30 bp, Artificial Sequence
  Synthetic oligonucleotide
gctcagtgttactagagtgtcatcacctac

SEQ ID NO: 447296 - DNA, 30 bp, Artificial Sequence
  Synthetic oligonucleotide
aggccaaagcggggttatgggttcacctac

SEQ ID NO: 447297 - DNA, 30 bp, Artificial Sequence
  Synthetic oligonucleotide
atagggtcgggctatgtagtgttcacctac

SEQ ID NO: 447298 - DNA, 30 bp, Artificial Sequence
  Synthetic oligonucleotide
agcccaattctaagacgtttagggacctac

SEQ ID NO: 447299 - DNA, 30 bp, Artificial Sequence
  Synthetic oligonucleotide
aacgctcttgtgtatcccggggatacctac

SEQ ID NO: 447300 - DNA, 30 bp, Artificial Sequence
  Synthetic oligonucleotide
ttctgtacggctgcggaagaagctacctac

SEQ ID NO: 447301 - DNA, 30 bp, Artificial Sequence
  Synthetic oligonucleotide
atgttcgagggaggagtcgaacttacctac

SEQ ID NO: 447302 - DNA, 30 bp, Artificial Sequence
  Synthetic oligonucleotide
gtgtacgcggctagagacacaaagccctac

SEQ ID NO: 447303 - DNA, 30 bp, Artificial Sequence
  Synthetic oligonucleotide
actttaaacggagaagttacacggccctac

SEQ ID NO: 447304 - DNA, 30 bp, Artificial Sequence
  Synthetic oligonucleotide
tgcagatagaagctatttcgttggccctac

SEQ ID NO: 447305 - DNA, 30 bp, Artificial Sequence
  Synthetic oligonucleotide
tcgattgcgcacagatgagtcatagcctac

SEQ ID NO: 447306 - DNA, 30 bp, Artificial Sequence
  Synthetic oligonucleotide
acaacaatttcgcacaggcgattcgcctac

SEQ ID NO: 447307 - DNA, 30 bp, Artificial Sequence
  Synthetic oligonucleotide
cccggactaagttccatgcaacgggcctac

SEQ ID NO: 447308 - DNA, 30 bp, Artificial Sequence
  Synthetic oligonucleotide
tcccgagaacagctctcgagcggtgcctac

SEQ ID NO: 447309 - DNA, 31 bp, Artificial Sequence
  Synthetic oligonucleotide
tatgagagttttgaaaactttaccatcctac

SEQ ID NO: 447310 - DNA, 30 bp, Artificial Sequence
  Synthetic oligonucleotide
atggcactgtggagatgtagacgatcctac

SEQ ID NO: 447311 - DNA, 30 bp, Artificial Sequence
  Synthetic oligonucleotide
gacgtctagtgacaaccctgcccttcctac

SEQ ID NO: 447312 - DNA, 30 bp, Artificial Sequence
  Synthetic oligonucleotide
acgcagatgtagcagatagcttgttcctac

SEQ ID NO: 447313 - DNA, 30 bp, Artificial Sequence
  Synthetic oligonucleotide
gcgagtcgcattgaggtcaatgcaagctac

SEQ ID NO: 447314 - DNA, 30 bp, Artificial Sequence
  Synthetic oligonucleotide
tgccttgacctgaaggactctcacagctac

SEQ ID NO: 447315 - DNA, 30 bp, Artificial Sequence
  Synthetic oligonucleotide
aactctggacgtgttatgttgttgagctac

SEQ ID NO: 447316 - DNA, 30 bp, Artificial Sequence
  Synthetic oligonucleotide
agatactcggaagctgaatgctaccgctac

SEQ ID NO: 447317 - DNA, 30 bp, Artificial Sequence
  Synthetic oligonucleotide
agaggctcatagacgcgcataccgcgctac

SEQ ID NO: 447318 - DNA, 30 bp, Artificial Sequence
  Synthetic oligonucleotide
agaacgtagtaggcgagttcttctcgctac

SEQ ID NO: 447319 - DNA, 30 bp, Artificial Sequence
  Synthetic oligonucleotide
gtgtctccactcattgcactagaaggctac

SEQ ID NO: 447320 - DNA, 30 bp, Artificial Sequence
  Synthetic oligonucleotide
taccagacgtctggtttatcggacggctac

SEQ ID NO: 447321 - DNA, 30 bp, Artificial Sequence
  Synthetic oligonucleotide
agactatcgggttatgcgagcagcggctac

SEQ ID NO: 447322 - DNA, 30 bp, Artificial Sequence
  Synthetic oligonucleotide
atttcatgggcaacacgtgcatgcggctac

SEQ ID NO: 447323 - DNA, 30 bp, Artificial Sequence
  Synthetic oligonucleotide
caatccgaatgatcttgtgccctcggctac

SEQ ID NO: 447324 - DNA, 30 bp, Artificial Sequence
  Synthetic oligonucleotide
gatagcagtagacgggtatgcttgggctac

SEQ ID NO: 447325 - DNA, 30 bp, Artificial Sequence
  Synthetic oligonucleotide
aattatagacgtgaggcctgatatggctac

SEQ ID NO: 447326 - DNA, 30 bp, Artificial Sequence
  Synthetic oligonucleotide
tggtatgaattggatattaagatatgctac

SEQ ID NO: 447327 - DNA, 30 bp, Artificial Sequence
  Synthetic oligonucleotide
ggacgtttacagcgtctgaacacgtgctac

SEQ ID NO: 447328 - DNA, 30 bp, Artificial Sequence
  Synthetic oligonucleotide
gaactatgccgtgagacgccgtcgtgctac

SEQ ID NO: 447329 - DNA, 30 bp, Artificial Sequence
  Synthetic oligonucleotide
caaatacgggcactgaagcaccattgctac

SEQ ID NO: 447330 - DNA, 30 bp, Artificial Sequence
  Synthetic oligonucleotide
tagcttgtatatagagcaatggtttgctac

SEQ ID NO: 447331 - DNA, 30 bp, Artificial Sequence
  Synthetic oligonucleotide
ttttgtagcatcgccatcaattaaatctac

SEQ ID NO: 447332 - DNA, 30 bp, Artificial Sequence
  Synthetic oligonucleotide
cagtaaaaaggaccgccgcgggcaatctac

SEQ ID NO: 447333 - DNA, 30 bp, Artificial Sequence
  Synthetic oligonucleotide
acccgtaccctataaccggatagcatctac

SEQ ID NO: 447334 - DNA, 30 bp, Artificial Sequence
  Synthetic oligonucleotide
cgcacaggcataagattagtcaatatctac

SEQ ID NO: 447335 - DNA, 30 bp, Artificial Sequence
  Synthetic oligonucleotide
aatcgcagaggttaagaggaaccactctac

SEQ ID NO: 447336 - DNA, 30 bp, Artificial Sequence
  Synthetic oligonucleotide
agctcgacaaatcacagccaacacctctac

SEQ ID NO: 447337 - DNA, 30 bp, Artificial Sequence
  Synthetic oligonucleotide
gtcgtcagagatttgtgcaggcagctctac

SEQ ID NO: 447338 - DNA, 30 bp, Artificial Sequence
  Synthetic oligonucleotide
gagcattgttcatctcctcaaccgctctac

SEQ ID NO: 447339 - DNA, 30 bp, Artificial Sequence
  Synthetic oligonucleotide
agacgttgtatgaagaagtatgggctctac

SEQ ID NO: 447340 - DNA, 30 bp, Artificial Sequence
  Synthetic oligonucleotide
tcacgctgcatcgcagcagggtctctctac

SEQ ID NO: 447341 - DNA, 30 bp, Artificial Sequence
  Synthetic oligonucleotide
tcagccgttggcgtcccagcgtacgtctac

SEQ ID NO: 447342 - DNA, 30 bp, Artificial Sequence
  Synthetic oligonucleotide
ggtcatttataccgatcccttaccgtctac

SEQ ID NO: 447343 - DNA, 30 bp, Artificial Sequence
  Synthetic oligonucleotide
aaggagtgcagatgggacttataggtctac

SEQ ID NO: 447344 - DNA, 30 bp, Artificial Sequence
  Synthetic oligonucleotide
gcttctaggtgtgcagaatgtgctgtctac

SEQ ID NO: 447345 - DNA, 30 bp, Artificial Sequence
  Synthetic oligonucleotide
aggggatttagccccaggggctgtgtctac

SEQ ID NO: 447346 - DNA, 30 bp, Artificial Sequence
  Synthetic oligonucleotide
cattgcctatgacatgtttccctattctac

SEQ ID NO: 447347 - DNA, 30 bp, Artificial Sequence
  Synthetic oligonucleotide
ggtaggcagctactaacgggagtattctac

SEQ ID NO: 447348 - DNA, 30 bp, Artificial Sequence
  Synthetic oligonucleotide
tgcctgcagtacaatcgaatgttattctac

SEQ ID NO: 447349 - DNA, 30 bp, Artificial Sequence
  Synthetic oligonucleotide
tgtcatgtgtttcccgtgggggggttctac

SEQ ID NO: 447350 - DNA, 30 bp, Artificial Sequence
  Synthetic oligonucleotide
taccgtaagatcctttgcccccgtttctac

SEQ ID NO: 447351 - DNA, 30 bp, Artificial Sequence
  Synthetic oligonucleotide
actatactggatctggatccaggtttctac

SEQ ID NO: 447352 - DNA, 30 bp, Artificial Sequence
  Synthetic oligonucleotide
tcctagtagccatgagttgtaggcaagtac

SEQ ID NO: 447353 - DNA, 30 bp, Artificial Sequence
  Synthetic oligonucleotide
gtgtgagcagcctacgaccctggcaagtac

SEQ ID NO: 447354 - DNA, 30 bp, Artificial Sequence
  Synthetic oligonucleotide
aaagtcacatctaatccaaatctcaagtac

SEQ ID NO: 447355 - DNA, 30 bp, Artificial Sequence
  Synthetic oligonucleotide
gtgatttagcctgatccaaggaggaagtac

SEQ ID NO: 447356 - DNA, 30 bp, Artificial Sequence
  Synthetic oligonucleotide
cttgcttgtggtcgtcggtagcttaagtac

SEQ ID NO: 447357 - DNA, 30 bp, Artificial Sequence
  Synthetic oligonucleotide
agggtgttcggtccctggtctcttaagtac

SEQ ID NO: 447358 - DNA, 30 bp, Artificial Sequence
  Synthetic oligonucleotide
agtatctggatcatcagaaaggtacagtac

SEQ ID NO: 447359 - DNA, 30 bp, Artificial Sequence
  Synthetic oligonucleotide
tatgatagctatgtgatagtatcccagtac

SEQ ID NO: 447360 - DNA, 30 bp, Artificial Sequence
  Synthetic oligonucleotide
gcgccgcccgccacaaaacgctggcagtac

SEQ ID NO: 447361 - DNA, 30 bp, Artificial Sequence
  Synthetic oligonucleotide
tcagttacgattgaaccatcacatcagtac

SEQ ID NO: 447362 - DNA, 30 bp, Artificial Sequence
  Synthetic oligonucleotide
tcgctgaaacgccgtgctgcaattcagtac

SEQ ID NO: 447363 - DNA, 30 bp, Artificial Sequence
  Synthetic oligonucleotide
acggtttgacttcgccgggactttcagtac

SEQ ID NO: 447364 - DNA, 30 bp, Artificial Sequence
  Synthetic oligonucleotide
ttcactgcttttaatgaattgaccgagtac

SEQ ID NO: 447365 - DNA, 30 bp, Artificial Sequence
  Synthetic oligonucleotide
cacggtgatgtactgaagtagttcgagtac

SEQ ID NO: 447366 - DNA, 30 bp, Artificial Sequence
  Synthetic oligonucleotide
ttttcggtctcatgtgcggttcaggagtac

SEQ ID NO: 447367 - DNA, 30 bp, Artificial Sequence
  Synthetic oligonucleotide
gtgatcatgctagatgaggccgctgagtac

SEQ ID NO: 447368 - DNA, 30 bp, Artificial Sequence
  Synthetic oligonucleotide
ccctcgatgacaacgggagacccctagtac

SEQ ID NO: 447369 - DNA, 30 bp, Artificial Sequence
  Synthetic oligonucleotide
ggaattggttaaggaggcgccctctagtac

SEQ ID NO: 447370 - DNA, 30 bp, Artificial Sequence
  Synthetic oligonucleotide
gctcggggtataatccacatcctctagtac

SEQ ID NO: 447371 - DNA, 31 bp, Artificial Sequence
  Synthetic oligonucleotide
gtcctgaccagatgagaattacatgtagtac

SEQ ID NO: 447372 - DNA, 30 bp, Artificial Sequence
  Synthetic oligonucleotide
tgcggtgtgcctacgtttgattgttagtac

SEQ ID NO: 447373 - DNA, 30 bp, Artificial Sequence
  Synthetic oligonucleotide
tgtactatacaggtaacgcaaatttagtac

SEQ ID NO: 447374 - DNA, 30 bp, Artificial Sequence
  Synthetic oligonucleotide
taccagattttaatagatttgttttagtac

SEQ ID NO: 447375 - DNA, 30 bp, Artificial Sequence
  Synthetic oligonucleotide
cagaaactaagttgcccaagccgaacgtac

SEQ ID NO: 447376 - DNA, 30 bp, Artificial Sequence
  Synthetic oligonucleotide
ttgtcaaagatgctcagttagaacacgtac

SEQ ID NO: 447377 - DNA, 30 bp, Artificial Sequence
  Synthetic oligonucleotide
tagccaaggcccccaggtggaatcacgtac

SEQ ID NO: 447378 - DNA, 30 bp, Artificial Sequence
  Synthetic oligonucleotide
acgaaataggcgaagggtctagtcacgtac

SEQ ID NO: 447379 - DNA, 30 bp, Artificial Sequence
  Synthetic oligonucleotide
acgcagccaattcaaccatcatagacgtac

SEQ ID NO: 447380 - DNA, 30 bp, Artificial Sequence
  Synthetic oligonucleotide
aacgtacgcggtagggttgtaaggacgtac

SEQ ID NO: 447381 - DNA, 30 bp, Artificial Sequence
  Synthetic oligonucleotide
agctacggacgttgcagttagaggacgtac

SEQ ID NO: 447382 - DNA, 30 bp, Artificial Sequence
  Synthetic oligonucleotide
ctaatacatacgcatggcctgtggacgtac

SEQ ID NO: 447383 - DNA, 30 bp, Artificial Sequence
  Synthetic oligonucleotide
ctaccccgggggacgaaaagagcaccgtac

SEQ ID NO: 447384 - DNA, 30 bp, Artificial Sequence
  Synthetic oligonucleotide
cttcagctatccgtggctcgtgggccgtac

SEQ ID NO: 447385 - DNA, 30 bp, Artificial Sequence
  Synthetic oligonucleotide
actcatgacattcggagctaattcgcgtac

SEQ ID NO: 447386 - DNA, 30 bp, Artificial Sequence
  Synthetic oligonucleotide
gcttctaccatcaatttctgggaggcgtac

SEQ ID NO: 447387 - DNA, 30 bp, Artificial Sequence
  Synthetic oligonucleotide
gctaaaagctcgcttatagttccatcgtac

SEQ ID NO: 447388 - DNA, 30 bp, Artificial Sequence
  Synthetic oligonucleotide
ataataggacaaacagtttagtcatcgtac

SEQ ID NO: 447389 - DNA, 30 bp, Artificial Sequence
  Synthetic oligonucleotide
cgcactgatggtatcattattgactcgtac

SEQ ID NO: 447390 - DNA, 30 bp, Artificial Sequence
  Synthetic oligonucleotide
agcagtccgcttgcgacgggacagtcgtac

SEQ ID NO: 447391 - DNA, 30 bp, Artificial Sequence
  Synthetic oligonucleotide
tgcctaaagatgtcatgaccgcagtcgtac

SEQ ID NO: 447392 - DNA, 30 bp, Artificial Sequence
  Synthetic oligonucleotide
ccgttacggatgcacagaggtaggtcgtac

SEQ ID NO: 447393 - DNA, 30 bp, Artificial Sequence
  Synthetic oligonucleotide
caatccttaggatttctccaatgttcgtac

SEQ ID NO: 447394 - DNA, 30 bp, Artificial Sequence
  Synthetic oligonucleotide
tgctcctcggcgtggatgatgggaaggtac

SEQ ID NO: 447395 - DNA, 30 bp, Artificial Sequence
  Synthetic oligonucleotide
tatcctgcacacgttcatactggaaggtac

SEQ ID NO: 447396 - DNA, 30 bp, Artificial Sequence
  Synthetic oligonucleotide
attccagttatctccctggaaataaggtac

SEQ ID NO: 447397 - DNA, 30 bp, Artificial Sequence
  Synthetic oligonucleotide
gtgttcgggagggaaatgatccggaggtac

SEQ ID NO: 447398 - DNA, 30 bp, Artificial Sequence
  Synthetic oligonucleotide
tttgcttggctcataattgggatgaggtac

SEQ ID NO: 447399 - DNA, 30 bp, Artificial Sequence
  Synthetic oligonucleotide
ggcgtccgtacctgtagacgtaataggtac

SEQ ID NO: 447400 - DNA, 30 bp, Artificial Sequence
  Synthetic oligonucleotide
ggtacgaattccggtttgggctctaggtac

SEQ ID NO: 447401 - DNA, 30 bp, Artificial Sequence
  Synthetic oligonucleotide
cggccatctatggtattccgcaaacggtac

SEQ ID NO: 447402 - DNA, 30 bp, Artificial Sequence
  Synthetic oligonucleotide
cgcaggcgaacaagattaaggatacggtac

SEQ ID NO: 447403 - DNA, 30 bp, Artificial Sequence
  Synthetic oligonucleotide
tgtctcgctggcaccaaattggaccggtac

SEQ ID NO: 447404 - DNA, 30 bp, Artificial Sequence
  Synthetic oligonucleotide
gacaataacggtagacaatatttgcggtac

SEQ ID NO: 447405 - DNA, 30 bp, Artificial Sequence
  Synthetic oligonucleotide
tctaggtttatcccctcgatgggtcggtac

SEQ ID NO: 447406 - DNA, 30 bp, Artificial Sequence
  Synthetic oligonucleotide
caatggtggtagggagcaggtccagggtac

SEQ ID NO: 447407 - DNA, 30 bp, Artificial Sequence
  Synthetic oligonucleotide
aggtcctcacccgacgcgtagtcagggtac

SEQ ID NO: 447408 - DNA, 30 bp, Artificial Sequence
  Synthetic oligonucleotide
cacgtttgacagcgtacctggatcgggtac

SEQ ID NO: 447409 - DNA, 30 bp, Artificial Sequence
  Synthetic oligonucleotide
taccagacatggtatctttacccggggtac

SEQ ID NO: 447410 - DNA, 30 bp, Artificial Sequence
  Synthetic oligonucleotide
gaaagtcgacaaattttagtcgtggggtac

SEQ ID NO: 447411 - DNA, 30 bp, Artificial Sequence
  Synthetic oligonucleotide
caaatcgttgccactggaccggatgggtac

SEQ ID NO: 447412 - DNA, 30 bp, Artificial Sequence
  Synthetic oligonucleotide
acttttcacatcttagatagatctgggtac

SEQ ID NO: 447413 - DNA, 30 bp, Artificial Sequence
  Synthetic oligonucleotide
gaacctatagcatccaggggagcatggtac

SEQ ID NO: 447414 - DNA, 30 bp, Artificial Sequence
  Synthetic oligonucleotide
tattcggggcttgacgagttgcgctggtac

SEQ ID NO: 447415 - DNA, 30 bp, Artificial Sequence
  Synthetic oligonucleotide
tatcccctggacagagtgggaatctggtac

SEQ ID NO: 447416 - DNA, 30 bp, Artificial Sequence
  Synthetic oligonucleotide
gtactcgtcccaataactgcactctggtac

SEQ ID NO: 447417 - DNA, 30 bp, Artificial Sequence
  Synthetic oligonucleotide
ggccccaataagctatgtatggagtggtac

SEQ ID NO: 447418 - DNA, 30 bp, Artificial Sequence
  Synthetic oligonucleotide
cggagagaagggtatcaaatctgttggtac

SEQ ID NO: 447419 - DNA, 30 bp, Artificial Sequence
  Synthetic oligonucleotide
tagtaatgaaatgctcgaaaagtttggtac

SEQ ID NO: 447420 - DNA, 30 bp, Artificial Sequence
  Synthetic oligonucleotide
ggtttcacgctctctaaacgcaaaatgtac

SEQ ID NO: 447421 - DNA, 30 bp, Artificial Sequence
  Synthetic oligonucleotide
tttaaacgccaggcctaacattaaatgtac

SEQ ID NO: 447422 - DNA, 30 bp, Artificial Sequence
  Synthetic oligonucleotide
ggtatgattttctacggtgtttaaatgtac

SEQ ID NO: 447423 - DNA, 30 bp, Artificial Sequence
  Synthetic oligonucleotide
tgtgtcgtaagccggtgaactcttatgtac

SEQ ID NO: 447424 - DNA, 30 bp, Artificial Sequence
  Synthetic oligonucleotide
tattgtttcttggcgtatctacgactgtac

SEQ ID NO: 447425 - DNA, 30 bp, Artificial Sequence
  Synthetic oligonucleotide
taatcgcaaactctgcacacattactgtac

SEQ ID NO: 447426 - DNA, 30 bp, Artificial Sequence
  Synthetic oligonucleotide
cctccgaggtcctgagttagaaccctgtac

SEQ ID NO: 447427 - DNA, 30 bp, Artificial Sequence
  Synthetic oligonucleotide
gctagtaccgaggatagttggtccctgtac

SEQ ID NO: 447428 - DNA, 30 bp, Artificial Sequence
  Synthetic oligonucleotide
agcgcagtctgcagaggtatccatctgtac

SEQ ID NO: 447429 - DNA, 30 bp, Artificial Sequence
  Synthetic oligonucleotide
acaaatgtacaagtaactttgtaagtgtac

SEQ ID NO: 447430 - DNA, 30 bp, Artificial Sequence
  Synthetic oligonucleotide
gtttttcacttcaccgcttcggacgtgtac

SEQ ID NO: 447431 - DNA, 30 bp, Artificial Sequence
  Synthetic oligonucleotide
aactgtgtaatacaagtggtacgcgtgtac

SEQ ID NO: 447432 - DNA, 30 bp, Artificial Sequence
  Synthetic oligonucleotide
aatccaaacacgggttctaacggggtgtac

SEQ ID NO: 447433 - DNA, 30 bp, Artificial Sequence
  Synthetic oligonucleotide
aatgaacgtctgtcgaggctctgtgtgtac

SEQ ID NO: 447434 - DNA, 31 bp, Artificial Sequence
  Synthetic oligonucleotide
gaaatgccatattagatcgctgtgtgtgtac

SEQ ID NO: 447435 - DNA, 30 bp, Artificial Sequence
  Synthetic oligonucleotide
tcttatctgttgtgttttcctcttgtgtac

SEQ ID NO: 447436 - DNA, 30 bp, Artificial Sequence
  Synthetic oligonucleotide
tgcactctggcgacagaacctaagttgtac

SEQ ID NO: 447437 - DNA, 30 bp, Artificial Sequence
  Synthetic oligonucleotide
tggtgacgcttacaagggtcgacgttgtac

SEQ ID NO: 447438 - DNA, 30 bp, Artificial Sequence
  Synthetic oligonucleotide
gtaggcaaatcaacttgaggctcgttgtac

SEQ ID NO: 447439 - DNA, 30 bp, Artificial Sequence
  Synthetic oligonucleotide
gggtaattggaatcaatataaatgttgtac

SEQ ID NO: 447440 - DNA, 30 bp, Artificial Sequence
  Synthetic oligonucleotide
agttatttagaaaccggggaccatttgtac

SEQ ID NO: 447441 - DNA, 30 bp, Artificial Sequence
  Synthetic oligonucleotide
tacacatcggccgatcccataggaaattac

SEQ ID NO: 447442 - DNA, 30 bp, Artificial Sequence
  Synthetic oligonucleotide
tccaaatttcttttacttacacagaattac

SEQ ID NO: 447443 - DNA, 30 bp, Artificial Sequence
  Synthetic oligonucleotide
agtggtacttgatgtaccctggctaattac

SEQ ID NO: 447444 - DNA, 30 bp, Artificial Sequence
  Synthetic oligonucleotide
ttccgccagatatgtatcggatctaattac

SEQ ID NO: 447445 - DNA, 30 bp, Artificial Sequence
  Synthetic oligonucleotide
cgcgcaggtcctgccaagtgatctaattac

SEQ ID NO: 447446 - DNA, 30 bp, Artificial Sequence
  Synthetic oligonucleotide
agtttcctccagcaccgcgggaaacattac

SEQ ID NO: 447447 - DNA, 30 bp, Artificial Sequence
  Synthetic oligonucleotide
tgtaaaattcctgatcctgggttacattac

SEQ ID NO: 447448 - DNA, 30 bp, Artificial Sequence
  Synthetic oligonucleotide
taaacttgagtttagtaccgaccgcattac

SEQ ID NO: 447449 - DNA, 30 bp, Artificial Sequence
  Synthetic oligonucleotide
ttagaacagtttgctaagactcggcattac

SEQ ID NO: 447450 - DNA, 30 bp, Artificial Sequence
  Synthetic oligonucleotide
atatcattcttagcttcacctcggcattac

SEQ ID NO: 447451 - DNA, 30 bp, Artificial Sequence
  Synthetic oligonucleotide
gcaattaattctgatgacaactggcattac

SEQ ID NO: 447452 - DNA, 30 bp, Artificial Sequence
  Synthetic oligonucleotide
gaaaggataccgttggcagctcctcattac

SEQ ID NO: 447453 - DNA, 30 bp, Artificial Sequence
  Synthetic oligonucleotide
ggttacagggcatttaaaatgaaagattac

SEQ ID NO: 447454 - DNA, 30 bp, Artificial Sequence
  Synthetic oligonucleotide
tagctactttcgcacacttataaagattac

SEQ ID NO: 447455 - DNA, 30 bp, Artificial Sequence
  Synthetic oligonucleotide
ggctttgttgggaatctggaccgagattac

SEQ ID NO: 447456 - DNA, 30 bp, Artificial Sequence
  Synthetic oligonucleotide
ctccgtagtgcttcgttgtggcgagattac

SEQ ID NO: 447457 - DNA, 30 bp, Artificial Sequence
  Synthetic oligonucleotide
aatactagggcctgaaccggttccgattac

SEQ ID NO: 447458 - DNA, 30 bp, Artificial Sequence
  Synthetic oligonucleotide
ggcaatccgcctgggcaggagggggattac

SEQ ID NO: 447459 - DNA, 30 bp, Artificial Sequence
  Synthetic oligonucleotide
tcggtcacgctgagcgatcgatctgattac

SEQ ID NO: 447460 - DNA, 30 bp, Artificial Sequence
  Synthetic oligonucleotide
gtatgctgacgaatatttgcgtcatattac

SEQ ID NO: 447461 - DNA, 30 bp, Artificial Sequence
  Synthetic oligonucleotide
tacgaaagtctcttgggtccttactattac

SEQ ID NO: 447462 - DNA, 30 bp, Artificial Sequence
  Synthetic oligonucleotide
cgctgccaggaggaattcgagaaaacttac

SEQ ID NO: 447463 - DNA, 30 bp, Artificial Sequence
  Synthetic oligonucleotide
gtgtagaactgagcggtaagaacaacttac

SEQ ID NO: 447464 - DNA, 30 bp, Artificial Sequence
  Synthetic oligonucleotide
cagcagcccaaacaagcatatgcaacttac

SEQ ID NO: 447465 - DNA, 30 bp, Artificial Sequence
  Synthetic oligonucleotide
acagtgtgcggaactcctctggagacttac

SEQ ID NO: 447466 - DNA, 30 bp, Artificial Sequence
  Synthetic oligonucleotide
aggtgtgtctcagatcgcaatatgacttac

SEQ ID NO: 447467 - DNA, 30 bp, Artificial Sequence
  Synthetic oligonucleotide
gtcgcctctgattacctgatatatacttac

SEQ ID NO: 447468 - DNA, 30 bp, Artificial Sequence
  Synthetic oligonucleotide
tactgtcattgttagcattccggtacttac

SEQ ID NO: 447469 - DNA, 30 bp, Artificial Sequence
  Synthetic oligonucleotide
gctaatataatggtgttctatattacttac

SEQ ID NO: 447470 - DNA, 30 bp, Artificial Sequence
  Synthetic oligonucleotide
tggttgtcagcataactaaggtttacttac

SEQ ID NO: 447471 - DNA, 30 bp, Artificial Sequence
  Synthetic oligonucleotide
cgcaatcaatatcgctaccccgcaccttac

SEQ ID NO: 447472 - DNA, 40 bp, Artificial Sequence
  Synthetic oligonucleotide
tgccttataaataagcctttttgttttagtttgaccttac

SEQ ID NO: 447473 - DNA, 30 bp, Artificial Sequence
  Synthetic oligonucleotide
tgagtcaactcgaggtgctcagtcccttac

SEQ ID NO: 447474 - DNA, 30 bp, Artificial Sequence
  Synthetic oligonucleotide
atcgtttggtcgaaacacacatatccttac

SEQ ID NO: 447475 - DNA, 30 bp, Artificial Sequence
  Synthetic oligonucleotide
ccgctatcgacatcaacgcgatgtgcttac

SEQ ID NO: 447476 - DNA, 30 bp, Artificial Sequence
  Synthetic oligonucleotide
ttcagtaaatacctggcacaaattgcttac

SEQ ID NO: 447477 - DNA, 30 bp, Artificial Sequence
  Synthetic oligonucleotide
ttccgcatgcgcggggccatcctatcttac

SEQ ID NO: 447478 - DNA, 30 bp, Artificial Sequence
  Synthetic oligonucleotide
tccaagttccatatctgcgtagactcttac

SEQ ID NO: 447479 - DNA, 30 bp, Artificial Sequence
  Synthetic oligonucleotide
tacctacttctaatgattatcgcctcttac

SEQ ID NO: 447480 - DNA, 30 bp, Artificial Sequence
  Synthetic oligonucleotide
gaggaaataattcagggttcgttctcttac

SEQ ID NO: 447481 - DNA, 30 bp, Artificial Sequence
  Synthetic oligonucleotide
gccgcccccgatggcctgaggaagtcttac

SEQ ID NO: 447482 - DNA, 30 bp, Artificial Sequence
  Synthetic oligonucleotide
actataagccagggtcctgatccgtcttac

SEQ ID NO: 447483 - DNA, 30 bp, Artificial Sequence
  Synthetic oligonucleotide
tgcgccacgaatgcagacgttttgtcttac

SEQ ID NO: 447484 - DNA, 30 bp, Artificial Sequence
  Synthetic oligonucleotide
gggtgatgcatgacatggggatgttcttac

SEQ ID NO: 447485 - DNA, 30 bp, Artificial Sequence
  Synthetic oligonucleotide
attgtggtcttattctacgaagcaagttac

SEQ ID NO: 447486 - DNA, 30 bp, Artificial Sequence
  Synthetic oligonucleotide
agatgaactttttgatgcataagcagttac

SEQ ID NO: 447487 - DNA, 30 bp, Artificial Sequence
  Synthetic oligonucleotide
tccggaccggaggattactttggcagttac

SEQ ID NO: 447488 - DNA, 30 bp, Artificial Sequence
  Synthetic oligonucleotide
gttttgaccatcgtggttggcaggagttac

SEQ ID NO: 447489 - DNA, 30 bp, Artificial Sequence
  Synthetic oligonucleotide
aagtctcaaagcatcgttcaagggagttac

SEQ ID NO: 447490 - DNA, 30 bp, Artificial Sequence
  Synthetic oligonucleotide
tatgaaagtgataatactgggagtagttac

SEQ ID NO: 447491 - DNA, 30 bp, Artificial Sequence
  Synthetic oligonucleotide
tggaaaccctcgatgaaggagtcacgttac

SEQ ID NO: 447492 - DNA, 30 bp, Artificial Sequence
  Synthetic oligonucleotide
taagtttaaccgatccggaaatcccgttac

SEQ ID NO: 447493 - DNA, 30 bp, Artificial Sequence
  Synthetic oligonucleotide
tagctaaagtatcacagtatcctgcgttac

SEQ ID NO: 447494 - DNA, 30 bp, Artificial Sequence
  Synthetic oligonucleotide
ggaagcactgtgatgacgtaccctcgttac

SEQ ID NO: 447495 - DNA, 30 bp, Artificial Sequence
  Synthetic oligonucleotide
agtacgaccgagcaattgacatctcgttac

SEQ ID NO: 447496 - DNA, 30 bp, Artificial Sequence
  Synthetic oligonucleotide
caccaggcactgagcggttcgtttcgttac

SEQ ID NO: 447497 - DNA, 30 bp, Artificial Sequence
  Synthetic oligonucleotide
tattgaagcatcaaaacccacaaaggttac

SEQ ID NO: 447498 - DNA, 30 bp, Artificial Sequence
  Synthetic oligonucleotide
gcggtaggcctagtatatctcgacggttac

SEQ ID NO: 447499 - DNA, 30 bp, Artificial Sequence
  Synthetic oligonucleotide
tatcactctagatgcgcctctgtcggttac

SEQ ID NO: 447500 - DNA, 30 bp, Artificial Sequence
  Synthetic oligonucleotide
tttctatgatcccgtgggagtcggggttac

SEQ ID NO: 447501 - DNA, 30 bp, Artificial Sequence
  Synthetic oligonucleotide
ccccaggtcgaaatccctgtcattggttac

SEQ ID NO: 447502 - DNA, 30 bp, Artificial Sequence
  Synthetic oligonucleotide
taattgcagctctgcacgtcgaaatgttac

SEQ ID NO: 447503 - DNA, 30 bp, Artificial Sequence
  Synthetic oligonucleotide
gagtagaaagcggcatagcgagaatgttac

SEQ ID NO: 447504 - DNA, 30 bp, Artificial Sequence
  Synthetic oligonucleotide
aactaggaaactttacgcgtaagctgttac

SEQ ID NO: 447505 - DNA, 30 bp, Artificial Sequence
  Synthetic oligonucleotide
ctgttatgtagggcaagactctgctgttac

SEQ ID NO: 447506 - DNA, 30 bp, Artificial Sequence
  Synthetic oligonucleotide
cagtcaagactggctgtttatgagtgttac

SEQ ID NO: 447507 - DNA, 30 bp, Artificial Sequence
  Synthetic oligonucleotide
gagacgcgacgagccctgcattggtgttac

SEQ ID NO: 447508 - DNA, 30 bp, Artificial Sequence
  Synthetic oligonucleotide
aacacattttgtaaacgatagcaaatttac

SEQ ID NO: 447509 - DNA, 30 bp, Artificial Sequence
  Synthetic oligonucleotide
agatggtgaagtctatcttaataaatttac

SEQ ID NO: 447510 - DNA, 30 bp, Artificial Sequence
  Synthetic oligonucleotide
aatgcgcttctactcaaagtttaaatttac

SEQ ID NO: 447511 - DNA, 30 bp, Artificial Sequence
  Synthetic oligonucleotide
gagtaaacattacggcagtgtgccatttac

SEQ ID NO: 447512 - DNA, 30 bp, Artificial Sequence
  Synthetic oligonucleotide
ggtagacccatacccgctgctccgatttac

SEQ ID NO: 447513 - DNA, 30 bp, Artificial Sequence
  Synthetic oligonucleotide
tacgctaaatatagcggcaaagcgatttac

SEQ ID NO: 447514 - DNA, 30 bp, Artificial Sequence
  Synthetic oligonucleotide
gcttggtcgctactgtgagcagatatttac

SEQ ID NO: 447515 - DNA, 30 bp, Artificial Sequence
  Synthetic oligonucleotide
gttggtaaacccgagagtatgactatttac

SEQ ID NO: 447516 - DNA, 30 bp, Artificial Sequence
  Synthetic oligonucleotide
agattattttcagtgctagtatgtatttac

SEQ ID NO: 447517 - DNA, 30 bp, Artificial Sequence
  Synthetic oligonucleotide
cattaagtaggctccctatggacactttac

SEQ ID NO: 447518 - DNA, 30 bp, Artificial Sequence
  Synthetic oligonucleotide
tcacgtgcgaaagggtgccaagacctttac

SEQ ID NO: 447519 - DNA, 30 bp, Artificial Sequence
  Synthetic oligonucleotide
aaccgtttgctactccacggcagcctttac

SEQ ID NO: 447520 - DNA, 30 bp, Artificial Sequence
  Synthetic oligonucleotide
taattatctaaaggtcttatgcagctttac

SEQ ID NO: 447521 - DNA, 30 bp, Artificial Sequence
  Synthetic oligonucleotide
cggtacaaggttggagtaacggagctttac

SEQ ID NO: 447522 - DNA, 30 bp, Artificial Sequence
  Synthetic oligonucleotide
aactgttgtgaaaatgagggaacgctttac

SEQ ID NO: 447523 - DNA, 30 bp, Artificial Sequence
  Synthetic oligonucleotide
atgtctcaggacgcaaagttaatgctttac

SEQ ID NO: 447524 - DNA, 30 bp, Artificial Sequence
  Synthetic oligonucleotide
gcccgatgtgcagaaaattctcttctttac

SEQ ID NO: 447525 - DNA, 30 bp, Artificial Sequence
  Synthetic oligonucleotide
cttctgcttccgctagcgtggggcgtttac

SEQ ID NO: 447526 - DNA, 30 bp, Artificial Sequence
  Synthetic oligonucleotide
aacttggcatcaccggctaaagtcgtttac

SEQ ID NO: 447527 - DNA, 30 bp, Artificial Sequence
  Synthetic oligonucleotide
aggcaattgtttgtcgacaatcgggtttac

SEQ ID NO: 447528 - DNA, 30 bp, Artificial Sequence
  Synthetic oligonucleotide
attgtggtgggtcgaggctactgggtttac

SEQ ID NO: 447529 - DNA, 30 bp, Artificial Sequence
  Synthetic oligonucleotide
gtgtgttctcgccacggcccgatggtttac

SEQ ID NO: 447530 - DNA, 30 bp, Artificial Sequence
  Synthetic oligonucleotide
gggtttaagcttctggcaaggcgtgtttac

SEQ ID NO: 447531 - DNA, 30 bp, Artificial Sequence
  Synthetic oligonucleotide
ccgcactatcacttatgcggtccattttac

SEQ ID NO: 447532 - DNA, 30 bp, Artificial Sequence
  Synthetic oligonucleotide
aatacgctatatcggaggcgattattttac

SEQ ID NO: 447533 - DNA, 30 bp, Artificial Sequence
  Synthetic oligonucleotide
gttactgatctccatactgaactcttttac

SEQ ID NO: 447534 - DNA, 30 bp, Artificial Sequence
  Synthetic oligonucleotide
accggttgggggggggggtgaaagttttac

SEQ ID NO: 447535 - DNA, 30 bp, Artificial Sequence
  Synthetic oligonucleotide
atacctattcgcattttttcttagttttac

SEQ ID NO: 447536 - DNA, 30 bp, Artificial Sequence
  Synthetic oligonucleotide
attgctgtgtataaccgacctgcgttttac

SEQ ID NO: 447537 - DNA, 30 bp, Artificial Sequence
  Synthetic oligonucleotide
tagtgaccggtggaggctccagtgttttac

SEQ ID NO: 447538 - DNA, 30 bp, Artificial Sequence
  Synthetic oligonucleotide
ataatgtcgaaacacgtgtacaatttttac

SEQ ID NO: 447539 - DNA, 30 bp, Artificial Sequence
  Synthetic oligonucleotide
atcaacaaatctcgacattgtcatttttac

SEQ ID NO: 447540 - DNA, 30 bp, Artificial Sequence
  Synthetic oligonucleotide
gacagatactgaccaaatataagtttttac

SEQ ID NO: 447541 - DNA, 30 bp, Artificial Sequence
  Synthetic oligonucleotide
ggggtattctagataaaatgatcaaaaacc

SEQ ID NO: 447542 - DNA, 30 bp, Artificial Sequence
  Synthetic oligonucleotide
ctggttttaggaattggcaagagaaaaacc

SEQ ID NO: 447543 - DNA, 30 bp, Artificial Sequence
  Synthetic oligonucleotide
atacgccaccaattaggtattacgaaaacc

SEQ ID NO: 447544 - DNA, 30 bp, Artificial Sequence
  Synthetic oligonucleotide
aagtggtttaagtttaacagggcgaaaacc

SEQ ID NO: 447545 - DNA, 30 bp, Artificial Sequence
  Synthetic oligonucleotide
acttattaccagggtgtccgggataaaacc

SEQ ID NO: 447546 - DNA, 30 bp, Artificial Sequence
  Synthetic oligonucleotide
gatataggcgacccttcttacgcacaaacc

SEQ ID NO: 447547 - DNA, 30 bp, Artificial Sequence
  Synthetic oligonucleotide
gctggcaagtagctccataagcgacaaacc

SEQ ID NO: 447548 - DNA, 30 bp, Artificial Sequence
  Synthetic oligonucleotide
tccgattggagtatttcccgtacccaaacc

SEQ ID NO: 447549 - DNA, 30 bp, Artificial Sequence
  Synthetic oligonucleotide
tatgtagtaagtcgaagagttaatcaaacc

SEQ ID NO: 447550 - DNA, 29 bp, Artificial Sequence
  Synthetic oligonucleotide
atgacactgctctagttggagtcgaaacc

SEQ ID NO: 447551 - DNA, 30 bp, Artificial Sequence
  Synthetic oligonucleotide
taacatcgtatagttggttttcgggaaacc

SEQ ID NO: 447552 - DNA, 30 bp, Artificial Sequence
  Synthetic oligonucleotide
tatggcttgcttcctatatttttggaaacc

SEQ ID NO: 447553 - DNA, 30 bp, Artificial Sequence
  Synthetic oligonucleotide
aaaatcctgccaacggacatcaatgaaacc

SEQ ID NO: 447554 - DNA, 30 bp, Artificial Sequence
  Synthetic oligonucleotide
atagccgagttccaatagagtgaataaacc

SEQ ID NO: 447555 - DNA, 30 bp, Artificial Sequence
  Synthetic oligonucleotide
tcgctgggacgcgtgtaagggacctaaacc

SEQ ID NO: 447556 - DNA, 30 bp, Artificial Sequence
  Synthetic oligonucleotide
gaaagagttggattcgagtacttctaaacc

SEQ ID NO: 447557 - DNA, 30 bp, Artificial Sequence
  Synthetic oligonucleotide
gtcgacaaaggcatgcctatatggtaaacc

SEQ ID NO: 447558 - DNA, 30 bp, Artificial Sequence
  Synthetic oligonucleotide
ggaagggtgagggtgtggtcaatgtaaacc

SEQ ID NO: 447559 - DNA, 30 bp, Artificial Sequence
  Synthetic oligonucleotide
aggcgtaacagccatttatgggtgtaaacc

SEQ ID NO: 447560 - DNA, 30 bp, Artificial Sequence
  Synthetic oligonucleotide
aaaagtttgcgaagtatttcgaattaaacc

SEQ ID NO: 447561 - DNA, 30 bp, Artificial Sequence
  Synthetic oligonucleotide
ttctcggttaaagactgtatgggttaaacc

SEQ ID NO: 447562 - DNA, 30 bp, Artificial Sequence
  Synthetic oligonucleotide
aatttgttggatctcgatatcgaaacaacc

SEQ ID NO: 447563 - DNA, 30 bp, Artificial Sequence
  Synthetic oligonucleotide
attcgtcaagccgcaacctccttaacaacc

SEQ ID NO: 447564 - DNA, 30 bp, Artificial Sequence
  Synthetic oligonucleotide
gcatcgagtccgaacaaagctcggacaacc

SEQ ID NO: 447565 - DNA, 30 bp, Artificial Sequence
  Synthetic oligonucleotide
aatgtttccgagttggtagggatgacaacc

SEQ ID NO: 447566 - DNA, 30 bp, Artificial Sequence
  Synthetic oligonucleotide
gatctgcttgctagcctcacgctgacaacc

SEQ ID NO: 447567 - DNA, 30 bp, Artificial Sequence
  Synthetic oligonucleotide
ggtcaagtattcgagtttaatacaccaacc

SEQ ID NO: 447568 - DNA, 30 bp, Artificial Sequence
  Synthetic oligonucleotide
gaccgtagtaggggagcgggtagaccaacc

SEQ ID NO: 447569 - DNA, 30 bp, Artificial Sequence
  Synthetic oligonucleotide
agcgactatgacaggagaagtcgaccaacc

SEQ ID NO: 447570 - DNA, 30 bp, Artificial Sequence
  Synthetic oligonucleotide
ggtgagatgcgcaaatcagttcacccaacc

SEQ ID NO: 447571 - DNA, 30 bp, Artificial Sequence
  Synthetic oligonucleotide
cgacttcaaacgcgtccactttttccaacc

SEQ ID NO: 447572 - DNA, 30 bp, Artificial Sequence
  Synthetic oligonucleotide
taagaattgtgatcgttgcgatcagcaacc

SEQ ID NO: 447573 - DNA, 30 bp, Artificial Sequence
  Synthetic oligonucleotide
aaatttgcaacgatgcggttacgagcaacc

SEQ ID NO: 447574 - DNA, 30 bp, Artificial Sequence
  Synthetic oligonucleotide
ataatgcacagtgtccgaatataggcaacc

SEQ ID NO: 447575 - DNA, 30 bp, Artificial Sequence
  Synthetic oligonucleotide
ggatgacgttgttgggttaaagcggcaacc

SEQ ID NO: 447576 - DNA, 30 bp, Artificial Sequence
  Synthetic oligonucleotide
tatccttgtggaagtttagaaatggcaacc

SEQ ID NO: 447577 - DNA, 30 bp, Artificial Sequence
  Synthetic oligonucleotide
gcagcttcaacccgtcgatagacatcaacc

SEQ ID NO: 447578 - DNA, 30 bp, Artificial Sequence
  Synthetic oligonucleotide
cagcatcaggtcatatcagcaccatcaacc

SEQ ID NO: 447579 - DNA, 30 bp, Artificial Sequence
  Synthetic oligonucleotide
aatgtagatgtccagcctcagagatcaacc

SEQ ID NO: 447580 - DNA, 30 bp, Artificial Sequence
  Synthetic oligonucleotide
tgcaacgtcagccaggcggaggtctcaacc

SEQ ID NO: 447581 - DNA, 30 bp, Artificial Sequence
  Synthetic oligonucleotide
ctgcaggtatagcgggaaagaacgtcaacc

SEQ ID NO: 447582 - DNA, 30 bp, Artificial Sequence
  Synthetic oligonucleotide
aattggacctcgtaattcattgggtcaacc

SEQ ID NO: 447583 - DNA, 30 bp, Artificial Sequence
  Synthetic oligonucleotide
tccagcctattcttattagactgttcaacc

SEQ ID NO: 447584 - DNA, 30 bp, Artificial Sequence
  Synthetic oligonucleotide
gggtatttcagaatcagatgggaaagaacc

SEQ ID NO: 447585 - DNA, 30 bp, Artificial Sequence
  Synthetic oligonucleotide
gagatccgtccgggctgtatccgaagaacc

SEQ ID NO: 447586 - DNA, 30 bp, Artificial Sequence
  Synthetic oligonucleotide
ggaatctcggggcactaggtccccagaacc

SEQ ID NO: 447587 - DNA, 30 bp, Artificial Sequence
  Synthetic oligonucleotide
ggaattgctagtttactggccggcagaacc

SEQ ID NO: 447588 - DNA, 30 bp, Artificial Sequence
  Synthetic oligonucleotide
tattccagctgcaatccatccgcgagaacc

SEQ ID NO: 447589 - DNA, 31 bp, Artificial Sequence
  Synthetic oligonucleotide
attaaatattcgttatgatcatcgtagaacc

SEQ ID NO: 447590 - DNA, 30 bp, Artificial Sequence
  Synthetic oligonucleotide
atcccccaggtattgataacacggcgaacc

SEQ ID NO: 447591 - DNA, 30 bp, Artificial Sequence
  Synthetic oligonucleotide
agggttggaaagccaatctggcaaggaacc

SEQ ID NO: 447592 - DNA, 30 bp, Artificial Sequence
  Synthetic oligonucleotide
aggaccaccagttaaatgctagaaggaacc

SEQ ID NO: 447593 - DNA, 30 bp, Artificial Sequence
  Synthetic oligonucleotide
ggaaaatatcctttaatggccacaggaacc

SEQ ID NO: 447594 - DNA, 30 bp, Artificial Sequence
  Synthetic oligonucleotide
tttttcccatcatacgggaatggaggaacc

SEQ ID NO: 447595 - DNA, 30 bp, Artificial Sequence
  Synthetic oligonucleotide
ctcccggtaccggagttagcgttaggaacc

SEQ ID NO: 447596 - DNA, 30 bp, Artificial Sequence
  Synthetic oligonucleotide
cagtcccgcattacttactaaagcggaacc

SEQ ID NO: 447597 - DNA, 30 bp, Artificial Sequence
  Synthetic oligonucleotide
ctctagggaactaatctagtgttcggaacc

SEQ ID NO: 447598 - DNA, 30 bp, Artificial Sequence
  Synthetic oligonucleotide
aaactaagactttaactagggatgggaacc

SEQ ID NO: 447599 - DNA, 30 bp, Artificial Sequence
  Synthetic oligonucleotide
gcaatatgttagcctcggattctgggaacc

SEQ ID NO: 447600 - DNA, 30 bp, Artificial Sequence
  Synthetic oligonucleotide
gttatgcggttatggaacccccctggaacc

SEQ ID NO: 447601 - DNA, 30 bp, Artificial Sequence
  Synthetic oligonucleotide
atattggattcaccatcatcgcctggaacc

SEQ ID NO: 447602 - DNA, 30 bp, Artificial Sequence
  Synthetic oligonucleotide
ggccacatatcgggtctttcagtctgaacc

SEQ ID NO: 447603 - DNA, 30 bp, Artificial Sequence
  Synthetic oligonucleotide
cgctgcagaggtaaatctcttacgtgaacc

SEQ ID NO: 447604 - DNA, 30 bp, Artificial Sequence
  Synthetic oligonucleotide
atgtatctttgactcacggttgtgtgaacc

SEQ ID NO: 447605 - DNA, 31 bp, Artificial Sequence
  Synthetic oligonucleotide
atattaatcggccttcagcggtacttgaacc

SEQ ID NO: 447606 - DNA, 30 bp, Artificial Sequence
  Synthetic oligonucleotide
ttctaaggatgtgttattcgggtttgaacc

SEQ ID NO: 447607 - DNA, 30 bp, Artificial Sequence
  Synthetic oligonucleotide
ttacagtatgtgtaaaggtagcacataacc

SEQ ID NO: 447608 - DNA, 30 bp, Artificial Sequence
  Synthetic oligonucleotide
gcgggtttgcaacacccgatggtgataacc

SEQ ID NO: 447609 - DNA, 30 bp, Artificial Sequence
  Synthetic oligonucleotide
tgcagaaaaggtctctcattcattataacc

SEQ ID NO: 447610 - DNA, 30 bp, Artificial Sequence
  Synthetic oligonucleotide
ggtattcttagggagattacagaactaacc

SEQ ID NO: 447611 - DNA, 30 bp, Artificial Sequence
  Synthetic oligonucleotide
gggtcctgtacccaaaagttaccactaacc

SEQ ID NO: 447612 - DNA, 30 bp, Artificial Sequence
  Synthetic oligonucleotide
ttaatgtagcttaagcgacgaggactaacc

SEQ ID NO: 447613 - DNA, 30 bp, Artificial Sequence
  Synthetic oligonucleotide
atgtcgttaccgtgaataagtttactaacc

SEQ ID NO: 447614 - DNA, 30 bp, Artificial Sequence
  Synthetic oligonucleotide
gtcaggtttaaagtgtagccttcgctaacc

SEQ ID NO: 447615 - DNA, 30 bp, Artificial Sequence
  Synthetic oligonucleotide
atgcaggttagtcaataccatatgctaacc

SEQ ID NO: 447616 - DNA, 30 bp, Artificial Sequence
  Synthetic oligonucleotide
ttcccgtataaatttactccgcttctaacc

SEQ ID NO: 447617 - DNA, 30 bp, Artificial Sequence
  Synthetic oligonucleotide
actccccttgctttccaattttttctaacc

SEQ ID NO: 447618 - DNA, 30 bp, Artificial Sequence
  Synthetic oligonucleotide
ttggtcgtgcgccagggtcgacacgtaacc

SEQ ID NO: 447619 - DNA, 30 bp, Artificial Sequence
  Synthetic oligonucleotide
gcactccacctcgtttgcacggatgtaacc

SEQ ID NO: 447620 - DNA, 30 bp, Artificial Sequence
  Synthetic oligonucleotide
tatagatccagcttccaggttactgtaacc

SEQ ID NO: 447621 - DNA, 30 bp, Artificial Sequence
  Synthetic oligonucleotide
tgggtgttattgcaaggattaccattaacc

SEQ ID NO: 447622 - DNA, 30 bp, Artificial Sequence
  Synthetic oligonucleotide
ctgtgtatatgacaaggcaggatattaacc

SEQ ID NO: 447623 - DNA, 30 bp, Artificial Sequence
  Synthetic oligonucleotide
tatggtacgatttaatagacggtattaacc

SEQ ID NO: 447624 - DNA, 30 bp, Artificial Sequence
  Synthetic oligonucleotide
ataagtgaaaggtttctcagaaggttaacc

SEQ ID NO: 447625 - DNA, 30 bp, Artificial Sequence
  Synthetic oligonucleotide
gccttcgcaggggcacccatcaggttaacc

SEQ ID NO: 447626 - DNA, 30 bp, Artificial Sequence
  Synthetic oligonucleotide
gggtgggaacaccttgcacaaaatttaacc

SEQ ID NO: 447627 - DNA, 30 bp, Artificial Sequence
  Synthetic oligonucleotide
ttaaacgcgcggctcatgcaccatttaacc

SEQ ID NO: 447628 - DNA, 30 bp, Artificial Sequence
  Synthetic oligonucleotide
ctctaatcatttagcatggcaactttaacc

SEQ ID NO: 447629 - DNA, 30 bp, Artificial Sequence
  Synthetic oligonucleotide
agaggtaattgtaaatgctattctttaacc

SEQ ID NO: 447630 - DNA, 30 bp, Artificial Sequence
  Synthetic oligonucleotide
taaggaggtgagttggaacgaaacaacacc

SEQ ID NO: 447631 - DNA, 30 bp, Artificial Sequence
  Synthetic oligonucleotide
gataatctccaatgtatatacaacaacacc

SEQ ID NO: 447632 - DNA, 30 bp, Artificial Sequence
  Synthetic oligonucleotide
attatttgtttcccaattgagcagaacacc

SEQ ID NO: 447633 - DNA, 30 bp, Artificial Sequence
  Synthetic oligonucleotide
atatacgccctgcactgatcaggtaacacc

SEQ ID NO: 447634 - DNA, 30 bp, Artificial Sequence
  Synthetic oligonucleotide
cttgaaaatttacttctatgccttaacacc

SEQ ID NO: 447635 - DNA, 30 bp, Artificial Sequence
  Synthetic oligonucleotide
agattgcgctgtgtggggaatcaacacacc

SEQ ID NO: 447636 - DNA, 30 bp, Artificial Sequence
  Synthetic oligonucleotide
tatatgccatgagatcgccagacacacacc

SEQ ID NO: 447637 - DNA, 30 bp, Artificial Sequence
  Synthetic oligonucleotide
gttgacaatacgataattcactgacacacc

SEQ ID NO: 447638 - DNA, 30 bp, Artificial Sequence
  Synthetic oligonucleotide
gttaaggatccttagtaataccaccacacc

SEQ ID NO: 447639 - DNA, 30 bp, Artificial Sequence
  Synthetic oligonucleotide
tttgtagcaaatcacgttcaagtccacacc

SEQ ID NO: 447640 - DNA, 30 bp, Artificial Sequence
  Synthetic oligonucleotide
cgcgaagttggacaaaccacgcagcacacc

SEQ ID NO: 447641 - DNA, 30 bp, Artificial Sequence
  Synthetic oligonucleotide
gtattttgacggcaaggacatagagacacc

SEQ ID NO: 447642 - DNA, 30 bp, Artificial Sequence
  Synthetic oligonucleotide
agtatgctcaatgaccagcgagaggacacc

SEQ ID NO: 447643 - DNA, 30 bp, Artificial Sequence
  Synthetic oligonucleotide
ttctcttaatgatcgacaaactaggacacc

SEQ ID NO: 447644 - DNA, 30 bp, Artificial Sequence
  Synthetic oligonucleotide
gcagcgttcggtcaaaggcttacggacacc

SEQ ID NO: 447645 - DNA, 30 bp, Artificial Sequence
  Synthetic oligonucleotide
tctgggtttctataagaagggccggacacc

SEQ ID NO: 447646 - DNA, 30 bp, Artificial Sequence
  Synthetic oligonucleotide
ctgtgagactacgtcactcccgtctacacc

SEQ ID NO: 447647 - DNA, 25 bp, Artificial Sequence
  Synthetic oligonucleotide
tagtttcagaataaacatttacacc

SEQ ID NO: 447648 - DNA, 30 bp, Artificial Sequence
  Synthetic oligonucleotide
tttttgtgagctaatgacgcattaaccacc

SEQ ID NO: 447649 - DNA, 30 bp, Artificial Sequence
  Synthetic oligonucleotide
ggtcaggggcagtaggccggcggcaccacc

SEQ ID NO: 447650 - DNA, 30 bp, Artificial Sequence
  Synthetic oligonucleotide
gggcttttcttaaggtacaaaagacccacc

SEQ ID NO: 447651 - DNA, 30 bp, Artificial Sequence
  Synthetic oligonucleotide
gaatggtctactgaccagcgacggcccacc

SEQ ID NO: 447652 - DNA, 30 bp, Artificial Sequence
  Synthetic oligonucleotide
aatttaccgttctgcgtcctcaatcccacc

SEQ ID NO: 447653 - DNA, 30 bp, Artificial Sequence
  Synthetic oligonucleotide
ccctgggatagcgcccttgactgtcccacc

SEQ ID NO: 447654 - DNA, 30 bp, Artificial Sequence
  Synthetic oligonucleotide
tagaggcataccctttggggaccagccacc

SEQ ID NO: 447655 - DNA, 30 bp, Artificial Sequence
  Synthetic oligonucleotide
acccgaggttaccgttgacatagagccacc

SEQ ID NO: 447656 - DNA, 30 bp, Artificial Sequence
  Synthetic oligonucleotide
agaagctcaaatcactaaaacttagccacc

SEQ ID NO: 447657 - DNA, 30 bp, Artificial Sequence
  Synthetic oligonucleotide
ttccagtgacccagaacggggtacgccacc

SEQ ID NO: 447658 - DNA, 29 bp, Artificial Sequence
  Synthetic oligonucleotide
acgacgagcttaataacctcgaggccacc

SEQ ID NO: 447659 - DNA, 30 bp, Artificial Sequence
  Synthetic oligonucleotide
gcgctgtggggctacacgtccgtggccacc

SEQ ID NO: 447660 - DNA, 30 bp, Artificial Sequence
  Synthetic oligonucleotide
gtgtccaagatttatatgtcgtttgccacc

SEQ ID NO: 447661 - DNA, 30 bp, Artificial Sequence
  Synthetic oligonucleotide
gcggcgcagcgggacgcagtccgatccacc

SEQ ID NO: 447662 - DNA, 30 bp, Artificial Sequence
  Synthetic oligonucleotide
cctgtaacctcgaacaggtctttatccacc

SEQ ID NO: 447663 - DNA, 30 bp, Artificial Sequence
  Synthetic oligonucleotide
taaacttgatcatcatcatatgtctccacc

SEQ ID NO: 447664 - DNA, 30 bp, Artificial Sequence
  Synthetic oligonucleotide
ctacttcccactgagcagccgaggtccacc

SEQ ID NO: 447665 - DNA, 30 bp, Artificial Sequence
  Synthetic oligonucleotide
ccccaaccgatggccctatgatggtccacc

SEQ ID NO: 447666 - DNA, 30 bp, Artificial Sequence
  Synthetic oligonucleotide
ctgcagtgaggtgctcgcaatgaaagcacc

SEQ ID NO: 447667 - DNA, 30 bp, Artificial Sequence
  Synthetic oligonucleotide
ttcgcaattggatagcccccttaaagcacc

SEQ ID NO: 447668 - DNA, 30 bp, Artificial Sequence
  Synthetic oligonucleotide
gtataaaagcagtttgagtgtccgagcacc

SEQ ID NO: 447669 - DNA, 32 bp, Artificial Sequence
  Synthetic oligonucleotide
aggatgggtattccaagaatacccaacgcacc

SEQ ID NO: 447670 - DNA, 30 bp, Artificial Sequence
  Synthetic oligonucleotide
catggtcaaaaattccggtatcaacgcacc

SEQ ID NO: 447671 - DNA, 30 bp, Artificial Sequence
  Synthetic oligonucleotide
catgacgggttatcctagctccgacgcacc

SEQ ID NO: 447672 - DNA, 30 bp, Artificial Sequence
  Synthetic oligonucleotide
aattatctcattgagggggtagtacgcacc

SEQ ID NO: 447673 - DNA, 30 bp, Artificial Sequence
  Synthetic oligonucleotide
ccacgcccgttccgcttgtaccaccgcacc

SEQ ID NO: 447674 - DNA, 30 bp, Artificial Sequence
  Synthetic oligonucleotide
gggtcgtttgggacctggtgcgcccgcacc

SEQ ID NO: 447675 - DNA, 30 bp, Artificial Sequence
  Synthetic oligonucleotide
ttgatacttggccagtccaaaagccgcacc

SEQ ID NO: 447676 - DNA, 30 bp, Artificial Sequence
  Synthetic oligonucleotide
gaaaaaaaatctcgccagcacaagcgcacc

SEQ ID NO: 447677 - DNA, 30 bp, Artificial Sequence
  Synthetic oligonucleotide
acgagtgaactcctagactgtaaaggcacc

SEQ ID NO: 447678 - DNA, 30 bp, Artificial Sequence
  Synthetic oligonucleotide
ctgggtacggctcgtataacggcaggcacc

SEQ ID NO: 447679 - DNA, 30 bp, Artificial Sequence
  Synthetic oligonucleotide
ataagtactcacgagttatcgtgaggcacc

SEQ ID NO: 447680 - DNA, 30 bp, Artificial Sequence
  Synthetic oligonucleotide
tacgtagctaggaaggattgcctaggcacc

SEQ ID NO: 447681 - DNA, 30 bp, Artificial Sequence
  Synthetic oligonucleotide
ttcaaagagtcctgctggtagttcggcacc

SEQ ID NO: 447682 - DNA, 30 bp, Artificial Sequence
  Synthetic oligonucleotide
agatagcgtgaactctaatccggatgcacc

SEQ ID NO: 447683 - DNA, 30 bp, Artificial Sequence
  Synthetic oligonucleotide
tccaggggcgacattctccgtgtatgcacc

SEQ ID NO: 447684 - DNA, 30 bp, Artificial Sequence
  Synthetic oligonucleotide
gtcagggacgaacgaccgagatattgcacc

SEQ ID NO: 447685 - DNA, 30 bp, Artificial Sequence
  Synthetic oligonucleotide
taagacccgcgtctactttttctttgcacc

SEQ ID NO: 447686 - DNA, 30 bp, Artificial Sequence
  Synthetic oligonucleotide
tagttctctgtagttacaatacaaatcacc

SEQ ID NO: 447687 - DNA, 30 bp, Artificial Sequence
  Synthetic oligonucleotide
gccggagatacaattataagtataatcacc

SEQ ID NO: 447688 - DNA, 30 bp, Artificial Sequence
  Synthetic oligonucleotide
actgtccaggacagcccgcaccccatcacc

SEQ ID NO: 447689 - DNA, 30 bp, Artificial Sequence
  Synthetic oligonucleotide
attaatacacgcgggctttgagccatcacc

SEQ ID NO: 447690 - DNA, 30 bp, Artificial Sequence
  Synthetic oligonucleotide
cgggttgtatgctaggttgaaatgatcacc

SEQ ID NO: 447691 - DNA, 30 bp, Artificial Sequence
  Synthetic oligonucleotide
aatctacgcaaaaattgagtcaagctcacc

SEQ ID NO: 447692 - DNA, 30 bp, Artificial Sequence
  Synthetic oligonucleotide
tatgcgtgggttgataggatcaatctcacc

SEQ ID NO: 447693 - DNA, 30 bp, Artificial Sequence
  Synthetic oligonucleotide
attgatagacctatagtctttgttctcacc

SEQ ID NO: 447694 - DNA, 30 bp, Artificial Sequence
  Synthetic oligonucleotide
ttataaatatatgatattcgttttctcacc

SEQ ID NO: 447695 - DNA, 30 bp, Artificial Sequence
  Synthetic oligonucleotide
cactgtttgccaagttgcgttccagtcacc

SEQ ID NO: 447696 - DNA, 30 bp, Artificial Sequence
  Synthetic oligonucleotide
ttcagcactgagcaacgtagacacgtcacc

SEQ ID NO: 447697 - DNA, 30 bp, Artificial Sequence
  Synthetic oligonucleotide
gaacgtaagcatttgggacagttcgtcacc

SEQ ID NO: 447698 - DNA, 30 bp, Artificial Sequence
  Synthetic oligonucleotide
ggaagcgacacaggaggtcaggatgtcacc

SEQ ID NO: 447699 - DNA, 30 bp, Artificial Sequence
  Synthetic oligonucleotide
taccacagctggaaccacacgtctgtcacc

SEQ ID NO: 447700 - DNA, 30 bp, Artificial Sequence
  Synthetic oligonucleotide
cggggcttgatgtcagtaaaaatattcacc

SEQ ID NO: 447701 - DNA, 30 bp, Artificial Sequence
  Synthetic oligonucleotide
agtttcccgacgtattttagagagttcacc

SEQ ID NO: 447702 - DNA, 30 bp, Artificial Sequence
  Synthetic oligonucleotide
ccgccgtctttagcggccagtgggttcacc

SEQ ID NO: 447703 - DNA, 30 bp, Artificial Sequence
  Synthetic oligonucleotide
ataatattggaagggggagtgtatttcacc

SEQ ID NO: 447704 - DNA, 30 bp, Artificial Sequence
  Synthetic oligonucleotide
tgatgaaaaagggcagtgatcattttcacc

SEQ ID NO: 447705 - DNA, 30 bp, Artificial Sequence
  Synthetic oligonucleotide
tatatacgctattgttatgatgttttcacc

SEQ ID NO: 447706 - DNA, 30 bp, Artificial Sequence
  Synthetic oligonucleotide
ttgcacgcgatcgagtgttttggaaagacc

SEQ ID NO: 447707 - DNA, 30 bp, Artificial Sequence
  Synthetic oligonucleotide
tttgaaccttgtaagctgcataccaagacc

SEQ ID NO: 447708 - DNA, 30 bp, Artificial Sequence
  Synthetic oligonucleotide
ttatcgcaatttaccatgaaatggaagacc

SEQ ID NO: 447709 - DNA, 30 bp, Artificial Sequence
  Synthetic oligonucleotide
taatgaaccgcagccaatacagtgaagacc

SEQ ID NO: 447710 - DNA, 30 bp, Artificial Sequence
  Synthetic oligonucleotide
gaggcttcggcctaggatcctaataagacc

SEQ ID NO: 447711 - DNA, 30 bp, Artificial Sequence
  Synthetic oligonucleotide
ttagttacgagttttgctactggtaagacc

SEQ ID NO: 447712 - DNA, 30 bp, Artificial Sequence
  Synthetic oligonucleotide
taccgcagcttctagcggacgattaagacc

SEQ ID NO: 447713 - DNA, 30 bp, Artificial Sequence
  Synthetic oligonucleotide
ttagcactggtggccggaattaaccagacc

SEQ ID NO: 447714 - DNA, 30 bp, Artificial Sequence
  Synthetic oligonucleotide
agattggggcgagtcttgagttgccagacc

SEQ ID NO: 447715 - DNA, 30 bp, Artificial Sequence
  Synthetic oligonucleotide
cgtctgtgttatactggcgttttgcagacc

SEQ ID NO: 447716 - DNA, 30 bp, Artificial Sequence
  Synthetic oligonucleotide
caattataggttcgcgaactgcatcagacc

SEQ ID NO: 447717 - DNA, 30 bp, Artificial Sequence
  Synthetic oligonucleotide
ggtttctaataggcgatggcttatcagacc

SEQ ID NO: 447718 - DNA, 30 bp, Artificial Sequence
  Synthetic oligonucleotide
gagtaggagcaacctgatgtgtttcagacc

SEQ ID NO: 447719 - DNA, 30 bp, Artificial Sequence
  Synthetic oligonucleotide
tttatgatgctgtcaatcacgcacgagacc

SEQ ID NO: 447720 - DNA, 30 bp, Artificial Sequence
  Synthetic oligonucleotide
cggttcccatgtacggggttgtacgagacc

SEQ ID NO: 447721 - DNA, 30 bp, Artificial Sequence
  Synthetic oligonucleotide
cagagcctcagacccggtagcgtcgagacc

SEQ ID NO: 447722 - DNA, 30 bp, Artificial Sequence
  Synthetic oligonucleotide
gaagagatacgtccgacgaggtaggagacc

SEQ ID NO: 447723 - DNA, 30 bp, Artificial Sequence
  Synthetic oligonucleotide
gcgaataagattatggctaggacggagacc

SEQ ID NO: 447724 - DNA, 30 bp, Artificial Sequence
  Synthetic oligonucleotide
gcatggtctccgtcaatggagtgggagacc

SEQ ID NO: 447725 - DNA, 30 bp, Artificial Sequence
  Synthetic oligonucleotide
tagttccctcctatagagttatatgagacc

SEQ ID NO: 447726 - DNA, 30 bp, Artificial Sequence
  Synthetic oligonucleotide
taacttcgagatctacgggcaggtgagacc

SEQ ID NO: 447727 - DNA, 30 bp, Artificial Sequence
  Synthetic oligonucleotide
gcctaggactagcaatgggaaggctagacc

SEQ ID NO: 447728 - DNA, 30 bp, Artificial Sequence
  Synthetic oligonucleotide
cctacaggcgtaagacgttggaagtagacc

SEQ ID NO: 447729 - DNA, 30 bp, Artificial Sequence
  Synthetic oligonucleotide
ctagtgctcattagtaagccgcggtagacc

SEQ ID NO: 447730 - DNA, 30 bp, Artificial Sequence
  Synthetic oligonucleotide
atgctcttatattgtgtcttttgttagacc

SEQ ID NO: 447731 - DNA, 30 bp, Artificial Sequence
  Synthetic oligonucleotide
tgaaagccactgttctaatggcccacgacc

SEQ ID NO: 447732 - DNA, 30 bp, Artificial Sequence
  Synthetic oligonucleotide
ccacttagcgtaggtagtatgagcacgacc

SEQ ID NO: 447733 - DNA, 30 bp, Artificial Sequence
  Synthetic oligonucleotide
cgcacgaccgtagccaaaggttagacgacc

SEQ ID NO: 447734 - DNA, 30 bp, Artificial Sequence
  Synthetic oligonucleotide
aagtgtgctctttatgaccaccctacgacc

SEQ ID NO: 447735 - DNA, 30 bp, Artificial Sequence
  Synthetic oligonucleotide
tttaaccattaacatagggcggctacgacc

SEQ ID NO: 447736 - DNA, 30 bp, Artificial Sequence
  Synthetic oligonucleotide
catcaggaacatcacggatcaggaccgacc

SEQ ID NO: 447737 - DNA, 30 bp, Artificial Sequence
  Synthetic oligonucleotide
taaatgtaactggtcgcggtaacgccgacc

SEQ ID NO: 447738 - DNA, 30 bp, Artificial Sequence
  Synthetic oligonucleotide
gttcacggatcttttaataaagctccgacc

SEQ ID NO: 447739 - DNA, 30 bp, Artificial Sequence
  Synthetic oligonucleotide
tagtagtaaatcttgctgtaacgtccgacc

SEQ ID NO: 447740 - DNA, 30 bp, Artificial Sequence
  Synthetic oligonucleotide
ttcatttgtaggctctatatatttccgacc

SEQ ID NO: 447741 - DNA, 30 bp, Artificial Sequence
  Synthetic oligonucleotide
ggagattggacgtagtcgcgggtagcgacc

SEQ ID NO: 447742 - DNA, 30 bp, Artificial Sequence
  Synthetic oligonucleotide
tctttaggttgtgtggcgggggacgcgacc

SEQ ID NO: 447743 - DNA, 30 bp, Artificial Sequence
  Synthetic oligonucleotide
tcttttcatagtcaaacggaaaccgcgacc

SEQ ID NO: 447744 - DNA, 30 bp, Artificial Sequence
  Synthetic oligonucleotide
aggttttcaagatgtatgggtcccgcgacc

SEQ ID NO: 447745 - DNA, 30 bp, Artificial Sequence
  Synthetic oligonucleotide
tatgtaggttggaggtaacaccgtgcgacc

SEQ ID NO: 447746 - DNA, 30 bp, Artificial Sequence
  Synthetic oligonucleotide
ctctcgggggtattttacggtacctcgacc

SEQ ID NO: 447747 - DNA, 30 bp, Artificial Sequence
  Synthetic oligonucleotide
gactcacgtccaggcttaagggtgtcgacc

SEQ ID NO: 447748 - DNA, 30 bp, Artificial Sequence
  Synthetic oligonucleotide
gactgtgccgtacgtttctaattgtcgacc

SEQ ID NO: 447749 - DNA, 30 bp, Artificial Sequence
  Synthetic oligonucleotide
ttatgcagtggggctcctggacattcgacc

SEQ ID NO: 447750 - DNA, 30 bp, Artificial Sequence
  Synthetic oligonucleotide
gcagcgaccttagtgctctccgcttcgacc

SEQ ID NO: 447751 - DNA, 30 bp, Artificial Sequence
  Synthetic oligonucleotide
taggctgaagtcaggcctatcaacaggacc

SEQ ID NO: 447752 - DNA, 30 bp, Artificial Sequence
  Synthetic oligonucleotide
cctggtcgatctaattcgcataccaggacc

SEQ ID NO: 447753 - DNA, 30 bp, Artificial Sequence
  Synthetic oligonucleotide
aaaagggtcatcatttaatcaccgaggacc

SEQ ID NO: 447754 - DNA, 30 bp, Artificial Sequence
  Synthetic oligonucleotide
ctacttttctaaacaatgtattcgaggacc

SEQ ID NO: 447755 - DNA, 30 bp, Artificial Sequence
  Synthetic oligonucleotide
tgtcctcggtttttacttgagatgaggacc

SEQ ID NO: 447756 - DNA, 30 bp, Artificial Sequence
  Synthetic oligonucleotide
ttatagaacataagaatttaacataggacc

SEQ ID NO: 447757 - DNA, 30 bp, Artificial Sequence
  Synthetic oligonucleotide
gtcgtacgttccgactctcgtagtaggacc

SEQ ID NO: 447758 - DNA, 30 bp, Artificial Sequence
  Synthetic oligonucleotide
aagatacctctgcttcgggccgaacggacc

SEQ ID NO: 447759 - DNA, 30 bp, Artificial Sequence
  Synthetic oligonucleotide
atatatctactaagtcatgggttacggacc

SEQ ID NO: 447760 - DNA, 30 bp, Artificial Sequence
  Synthetic oligonucleotide
cggtgctaaatgccaggtattcaccggacc

SEQ ID NO: 447761 - DNA, 30 bp, Artificial Sequence
  Synthetic oligonucleotide
tagactatggtatgcctatatctccggacc

SEQ ID NO: 447762 - DNA, 30 bp, Artificial Sequence
  Synthetic oligonucleotide
aactcttttttcgtaagcttcgagcggacc

SEQ ID NO: 447763 - DNA, 30 bp, Artificial Sequence
  Synthetic oligonucleotide
attgacgtaaggttgctccatctgcggacc

SEQ ID NO: 447764 - DNA, 30 bp, Artificial Sequence
  Synthetic oligonucleotide
ggaaagcgcgtctggtccgcatgtcggacc

SEQ ID NO: 447765 - DNA, 30 bp, Artificial Sequence
  Synthetic oligonucleotide
ttttagccggcgcctcaagaaattcggacc

SEQ ID NO: 447766 - DNA, 30 bp, Artificial Sequence
  Synthetic oligonucleotide
tcccgacccgggcaggacaattttcggacc

SEQ ID NO: 447767 - DNA, 30 bp, Artificial Sequence
  Synthetic oligonucleotide
gagaccgcacgataaaaaatttttcggacc

SEQ ID NO: 447768 - DNA, 30 bp, Artificial Sequence
  Synthetic oligonucleotide
ctgatactgaatggctttcgcagagggacc

SEQ ID NO: 447769 - DNA, 30 bp, Artificial Sequence
  Synthetic oligonucleotide
catgattcccatatattaggcgccgggacc

SEQ ID NO: 447770 - DNA, 30 bp, Artificial Sequence
  Synthetic oligonucleotide
gtcccccgttcgaaacgatgtgaggggacc

SEQ ID NO: 447771 - DNA, 30 bp, Artificial Sequence
  Synthetic oligonucleotide
aactacggttacataatctcataggggacc

SEQ ID NO: 447772 - DNA, 30 bp, Artificial Sequence
  Synthetic oligonucleotide
agcttgccctcggtaattttgttggggacc

SEQ ID NO: 447773 - DNA, 30 bp, Artificial Sequence
  Synthetic oligonucleotide
ttccctcgggcaactattggaaatgggacc

SEQ ID NO: 447774 - DNA, 30 bp, Artificial Sequence
  Synthetic oligonucleotide
attgcaagtaacgcggatactcttgggacc

SEQ ID NO: 447775 - DNA, 30 bp, Artificial Sequence
  Synthetic oligonucleotide
aaataatacagacagtcgtataaatggacc

SEQ ID NO: 447776 - DNA, 30 bp, Artificial Sequence
  Synthetic oligonucleotide
aaggaacttttctctctctccacatggacc

SEQ ID NO: 447777 - DNA, 30 bp, Artificial Sequence
  Synthetic oligonucleotide
gctgggatacaaagtgctaacgcatggacc

SEQ ID NO: 447778 - DNA, 30 bp, Artificial Sequence
  Synthetic oligonucleotide
gtgttcatactcatactaagagtaatgacc

SEQ ID NO: 447779 - DNA, 30 bp, Artificial Sequence
  Synthetic oligonucleotide
cattatcggagtaggctttaaaacatgacc

SEQ ID NO: 447780 - DNA, 30 bp, Artificial Sequence
  Synthetic oligonucleotide
tttcagattatgaccgtccttcccatgacc

SEQ ID NO: 447781 - DNA, 30 bp, Artificial Sequence
  Synthetic oligonucleotide
cgttttgcatatgcttgtagtcgcatgacc

SEQ ID NO: 447782 - DNA, 30 bp, Artificial Sequence
  Synthetic oligonucleotide
atatctgcactgacctttagttgcatgacc

SEQ ID NO: 447783 - DNA, 30 bp, Artificial Sequence
  Synthetic oligonucleotide
tagactcaataatctgtgtcgatcatgacc

SEQ ID NO: 447784 - DNA, 30 bp, Artificial Sequence
  Synthetic oligonucleotide
cgggtgcataccggtacacctatcatgacc

SEQ ID NO: 447785 - DNA, 30 bp, Artificial Sequence
  Synthetic oligonucleotide
ggttctgatatgtgttagtccgcgatgacc

SEQ ID NO: 447786 - DNA, 30 bp, Artificial Sequence
  Synthetic oligonucleotide
ccttcatgaacatccagaaaatttatgacc

SEQ ID NO: 447787 - DNA, 30 bp, Artificial Sequence
  Synthetic oligonucleotide
tttgattatgtaaattatccgccactgacc

SEQ ID NO: 447788 - DNA, 30 bp, Artificial Sequence
  Synthetic oligonucleotide
gcaggttgcaaatacctatgtgtactgacc

SEQ ID NO: 447789 - DNA, 30 bp, Artificial Sequence
  Synthetic oligonucleotide
gtgttgacggcctggcgttcaggcctgacc

SEQ ID NO: 447790 - DNA, 30 bp, Artificial Sequence
  Synthetic oligonucleotide
gaccaaattcccaggcacgctgggctgacc

SEQ ID NO: 447791 - DNA, 30 bp, Artificial Sequence
  Synthetic oligonucleotide
cattcgatcgacaagtcaaaaaatctgacc

SEQ ID NO: 447792 - DNA, 30 bp, Artificial Sequence
  Synthetic oligonucleotide
acggacgactcaggacaagtgcaggtgacc

SEQ ID NO: 447793 - DNA, 30 bp, Artificial Sequence
  Synthetic oligonucleotide
tttccacaatttgcacatcagactgtgacc

SEQ ID NO: 447794 - DNA, 30 bp, Artificial Sequence
  Synthetic oligonucleotide
agaccttcacaggatgcaatcaacttgacc

SEQ ID NO: 447795 - DNA, 30 bp, Artificial Sequence
  Synthetic oligonucleotide
gacctcagatattagcgtagcgcgttgacc

SEQ ID NO: 447796 - DNA, 30 bp, Artificial Sequence
  Synthetic oligonucleotide
acttgtcctgtttgtctattgctgttgacc

SEQ ID NO: 447797 - DNA, 30 bp, Artificial Sequence
  Synthetic oligonucleotide
ttttacgagattctaactagattgttgacc

SEQ ID NO: 447798 - DNA, 30 bp, Artificial Sequence
  Synthetic oligonucleotide
gctgacgtagaaaggtgtgcaggtttgacc

SEQ ID NO: 447799 - DNA, 30 bp, Artificial Sequence
  Synthetic oligonucleotide
ttcggacagggtttatggaatggaaatacc

SEQ ID NO: 447800 - DNA, 30 bp, Artificial Sequence
  Synthetic oligonucleotide
gaaccagtgaacgctgtgagcctcaatacc

SEQ ID NO: 447801 - DNA, 30 bp, Artificial Sequence
  Synthetic oligonucleotide
agtttttaggtcctgtctgtcgcgaatacc

SEQ ID NO: 447802 - DNA, 31 bp, Artificial Sequence
  Synthetic oligonucleotide
ctgtgggtatgcgtctctgtaactacatacc

SEQ ID NO: 447803 - DNA, 30 bp, Artificial Sequence
  Synthetic oligonucleotide
tgtatgtgtcgcatccgtaaaacccatacc

SEQ ID NO: 447804 - DNA, 30 bp, Artificial Sequence
  Synthetic oligonucleotide
agcctcggtcgtttgtatcctcatcatacc

SEQ ID NO: 447805 - DNA, 30 bp, Artificial Sequence
  Synthetic oligonucleotide
tgccagatcattctcaggctccaagatacc

SEQ ID NO: 447806 - DNA, 30 bp, Artificial Sequence
  Synthetic oligonucleotide
ctttatcgggttgttgctgaccgagatacc

SEQ ID NO: 447807 - DNA, 30 bp, Artificial Sequence
  Synthetic oligonucleotide
ggttgttagctagtggagttcaaatatacc

SEQ ID NO: 447808 - DNA, 30 bp, Artificial Sequence
  Synthetic oligonucleotide
tatgcgatgctcctgttggcagaatatacc

SEQ ID NO: 447809 - DNA, 30 bp, Artificial Sequence
  Synthetic oligonucleotide
aaaatggtatgcatacgcggacgatatacc

SEQ ID NO: 447810 - DNA, 30 bp, Artificial Sequence
  Synthetic oligonucleotide
taacccatgaggtcggggtatgagtatacc

SEQ ID NO: 447811 - DNA, 30 bp, Artificial Sequence
  Synthetic oligonucleotide
ataacgcgccggagcctcacatagtatacc

SEQ ID NO: 447812 - DNA, 30 bp, Artificial Sequence
  Synthetic oligonucleotide
tatttaacaatgtaggttgcaacgtatacc

SEQ ID NO: 447813 - DNA, 30 bp, Artificial Sequence
  Synthetic oligonucleotide
ctccgcttggcatgtatctggccttatacc

SEQ ID NO: 447814 - DNA, 30 bp, Artificial Sequence
  Synthetic oligonucleotide
ccttatatcttgtggccactcgtttatacc

SEQ ID NO: 447815 - DNA, 30 bp, Artificial Sequence
  Synthetic oligonucleotide
ggtcaacggcgggtcaggataaaaactacc

SEQ ID NO: 447816 - DNA, 30 bp, Artificial Sequence
  Synthetic oligonucleotide
atttggattcgcggtcgatcggtaactacc

SEQ ID NO: 447817 - DNA, 30 bp, Artificial Sequence
  Synthetic oligonucleotide
gtaaggatccagtcctggggtttaactacc

SEQ ID NO: 447818 - DNA, 30 bp, Artificial Sequence
  Synthetic oligonucleotide
ccattgttggtttagtcttttgtcactacc

SEQ ID NO: 447819 - DNA, 30 bp, Artificial Sequence
  Synthetic oligonucleotide
tcaaggctcgcgtgacacagcattactacc

SEQ ID NO: 447820 - DNA, 30 bp, Artificial Sequence
  Synthetic oligonucleotide
gtggaattaactccaccattgtttactacc

SEQ ID NO: 447821 - DNA, 30 bp, Artificial Sequence
  Synthetic oligonucleotide
cagcctaggttactggagctcacccctacc

SEQ ID NO: 447822 - DNA, 30 bp, Artificial Sequence
  Synthetic oligonucleotide
acagtaatgggagccagttggacccctacc

SEQ ID NO: 447823 - DNA, 30 bp, Artificial Sequence
  Synthetic oligonucleotide
acccgtatcgattcatgactcagccctacc

SEQ ID NO: 447824 - DNA, 30 bp, Artificial Sequence
  Synthetic oligonucleotide
atggagagttatctatagaccgcgcctacc

SEQ ID NO: 447825 - DNA, 30 bp, Artificial Sequence
  Synthetic oligonucleotide
cgacttaaagcatggcgtgttctgcctacc

SEQ ID NO: 447826 - DNA, 30 bp, Artificial Sequence
  Synthetic oligonucleotide
gcaaacgtggtccccgtacctccagctacc

SEQ ID NO: 447827 - DNA, 30 bp, Artificial Sequence
  Synthetic oligonucleotide
ttctatttctagtgtggtgcgagagctacc

SEQ ID NO: 447828 - DNA, 30 bp, Artificial Sequence
  Synthetic oligonucleotide
attgaaatttaatgcgctacgttcgctacc

SEQ ID NO: 447829 - DNA, 30 bp, Artificial Sequence
  Synthetic oligonucleotide
tacgcaacaacaattagccctcaggctacc

SEQ ID NO: 447830 - DNA, 30 bp, Artificial Sequence
  Synthetic oligonucleotide
gcaaaaggtcacatcgcgacacttgctacc

SEQ ID NO: 447831 - DNA, 30 bp, Artificial Sequence
  Synthetic oligonucleotide
agctcacaaccatcacagttacaatctacc

SEQ ID NO: 447832 - DNA, 30 bp, Artificial Sequence
  Synthetic oligonucleotide
atgcctgtcattaggccccgtacatctacc

SEQ ID NO: 447833 - DNA, 30 bp, Artificial Sequence
  Synthetic oligonucleotide
ttttagccgtccggagaccggcgatctacc

SEQ ID NO: 447834 - DNA, 30 bp, Artificial Sequence
  Synthetic oligonucleotide
atgagaggttcggttttgcacatatctacc

SEQ ID NO: 447835 - DNA, 30 bp, Artificial Sequence
  Synthetic oligonucleotide
ttgagcaattttcgtggggggatctctacc

SEQ ID NO: 447836 - DNA, 30 bp, Artificial Sequence
  Synthetic oligonucleotide
cattgacttctctagacgtctttttctacc

SEQ ID NO: 447837 - DNA, 30 bp, Artificial Sequence
  Synthetic oligonucleotide
ggtcgtgtggtacggaccggataaagtacc

SEQ ID NO: 447838 - DNA, 30 bp, Artificial Sequence
  Synthetic oligonucleotide
ctggtaggttaataacctttcccaagtacc

SEQ ID NO: 447839 - DNA, 30 bp, Artificial Sequence
  Synthetic oligonucleotide
taattggacaggtaggcttggctaagtacc

SEQ ID NO: 447840 - DNA, 30 bp, Artificial Sequence
  Synthetic oligonucleotide
ggccttttcggaactcctaccttaagtacc

SEQ ID NO: 447841 - DNA, 30 bp, Artificial Sequence
  Synthetic oligonucleotide
taacttacggaacgctgtactaacagtacc

SEQ ID NO: 447842 - DNA, 30 bp, Artificial Sequence
  Synthetic oligonucleotide
acttcgctcatgtgtttatgccacagtacc

SEQ ID NO: 447843 - DNA, 30 bp, Artificial Sequence
  Synthetic oligonucleotide
atctggtcaggtttcgcgtccggcagtacc

SEQ ID NO: 447844 - DNA, 30 bp, Artificial Sequence
  Synthetic oligonucleotide
cgtataatagtccgatgggcgatcagtacc

SEQ ID NO: 447845 - DNA, 30 bp, Artificial Sequence
  Synthetic oligonucleotide
aaaactacacatttttattatctcagtacc

SEQ ID NO: 447846 - DNA, 30 bp, Artificial Sequence
  Synthetic oligonucleotide
gcaatttagtatcgactaaccccgagtacc

SEQ ID NO: 447847 - DNA, 30 bp, Artificial Sequence
  Synthetic oligonucleotide
ttgagtattgtaccttaatatctgagtacc

SEQ ID NO: 447848 - DNA, 30 bp, Artificial Sequence
  Synthetic oligonucleotide
atacatccggcctcggatgtatttagtacc

SEQ ID NO: 447849 - DNA, 30 bp, Artificial Sequence
  Synthetic oligonucleotide
tcccataattccgtgtaatcgcaacgtacc

SEQ ID NO: 447850 - DNA, 30 bp, Artificial Sequence
  Synthetic oligonucleotide
aggaaggcgacttagtaggtgttacgtacc

SEQ ID NO: 447851 - DNA, 30 bp, Artificial Sequence
  Synthetic oligonucleotide
gggttacataatcattgataggctcgtacc

SEQ ID NO: 447852 - DNA, 30 bp, Artificial Sequence
  Synthetic oligonucleotide
gtcagggcccctcggcttactagtcgtacc

SEQ ID NO: 447853 - DNA, 30 bp, Artificial Sequence
  Synthetic oligonucleotide
tagtcaagagctgagtatctcaagggtacc

SEQ ID NO: 447854 - DNA, 30 bp, Artificial Sequence
  Synthetic oligonucleotide
agaggtgctgggatacgaacgtggggtacc

SEQ ID NO: 447855 - DNA, 30 bp, Artificial Sequence
  Synthetic oligonucleotide
aatacgggtaccgtacagcacgctggtacc

SEQ ID NO: 447856 - DNA, 30 bp, Artificial Sequence
  Synthetic oligonucleotide
ggggactgataagacgtttaggctggtacc

SEQ ID NO: 447857 - DNA, 30 bp, Artificial Sequence
  Synthetic oligonucleotide
aaaccgggggatatcgtacagaaatgtacc

SEQ ID NO: 447858 - DNA, 30 bp, Artificial Sequence
  Synthetic oligonucleotide
cctattattatcccacgactactatgtacc

SEQ ID NO: 447859 - DNA, 30 bp, Artificial Sequence
  Synthetic oligonucleotide
atacggaggagtatgacagagcactgtacc

SEQ ID NO: 447860 - DNA, 30 bp, Artificial Sequence
  Synthetic oligonucleotide
tcgatgtttgatgctagtgggtcctgtacc

SEQ ID NO: 447861 - DNA, 30 bp, Artificial Sequence
  Synthetic oligonucleotide
cgaatgtttttcgacatccgggcttgtacc

SEQ ID NO: 447862 - DNA, 30 bp, Artificial Sequence
  Synthetic oligonucleotide
gggacgcggcttaaaggccgaaaaattacc

SEQ ID NO: 447863 - DNA, 30 bp, Artificial Sequence
  Synthetic oligonucleotide
taccccctattgaggcggcatgcaattacc

SEQ ID NO: 447864 - DNA, 30 bp, Artificial Sequence
  Synthetic oligonucleotide
ggacagcgggtgcgtgctctgtagattacc

SEQ ID NO: 447865 - DNA, 30 bp, Artificial Sequence
  Synthetic oligonucleotide
aactacctgcttctgtcgggttatattacc

SEQ ID NO: 447866 - DNA, 30 bp, Artificial Sequence
  Synthetic oligonucleotide
ttctgagacccgcgacatggatgtattacc

SEQ ID NO: 447867 - DNA, 30 bp, Artificial Sequence
  Synthetic oligonucleotide
ggcaggatgttgaccgcgattattattacc

SEQ ID NO: 447868 - DNA, 30 bp, Artificial Sequence
  Synthetic oligonucleotide
ctagcagcggagcgtagtagtaaacttacc

SEQ ID NO: 447869 - DNA, 30 bp, Artificial Sequence
  Synthetic oligonucleotide
aacgtttacgtttggtgtcgtatacttacc

SEQ ID NO: 447870 - DNA, 30 bp, Artificial Sequence
  Synthetic oligonucleotide
accgtacccatctacagactcgtacttacc

SEQ ID NO: 447871 - DNA, 30 bp, Artificial Sequence
  Synthetic oligonucleotide
tctggtgttctctcgtgggggagccttacc

SEQ ID NO: 447872 - DNA, 30 bp, Artificial Sequence
  Synthetic oligonucleotide
gaggagcaatattggtgagtggcgcttacc

SEQ ID NO: 447873 - DNA, 30 bp, Artificial Sequence
  Synthetic oligonucleotide
ctgtggaggagccggttcataaggcttacc

SEQ ID NO: 447874 - DNA, 30 bp, Artificial Sequence
  Synthetic oligonucleotide
caaagacgttatcgcgtaaggtggcttacc

SEQ ID NO: 447875 - DNA, 30 bp, Artificial Sequence
  Synthetic oligonucleotide
ggccttatcgtggaaagggattatcttacc

SEQ ID NO: 447876 - DNA, 30 bp, Artificial Sequence
  Synthetic oligonucleotide
tacaatgcggcccactatttagaagttacc

SEQ ID NO: 447877 - DNA, 30 bp, Artificial Sequence
  Synthetic oligonucleotide
ctactgtcatttaacaaccgtacagttacc

SEQ ID NO: 447878 - DNA, 30 bp, Artificial Sequence
  Synthetic oligonucleotide
aaagatgttactggacggcgttcagttacc

SEQ ID NO: 447879 - DNA, 30 bp, Artificial Sequence
  Synthetic oligonucleotide
tgaggcgcatggtcgaacagtttagttacc

SEQ ID NO: 447880 - DNA, 30 bp, Artificial Sequence
  Synthetic oligonucleotide
accaggtaactagtaatctcagcggttacc

SEQ ID NO: 447881 - DNA, 30 bp, Artificial Sequence
  Synthetic oligonucleotide
tcaaccggccatgtacgccgaagtgttacc

SEQ ID NO: 447882 - DNA, 30 bp, Artificial Sequence
  Synthetic oligonucleotide
agctttcctggcgtcagccttgcatttacc

SEQ ID NO: 447883 - DNA, 30 bp, Artificial Sequence
  Synthetic oligonucleotide
gacttgaagatgatagtatacctatttacc

SEQ ID NO: 447884 - DNA, 30 bp, Artificial Sequence
  Synthetic oligonucleotide
gtaaatcgtttagtatcttcctgctttacc

SEQ ID NO: 447885 - DNA, 30 bp, Artificial Sequence
  Synthetic oligonucleotide
acatgtatcaccaaaatatagctgtttacc

SEQ ID NO: 447886 - DNA, 30 bp, Artificial Sequence
  Synthetic oligonucleotide
acgggatggacgcatacaggtcaaaaaccc

SEQ ID NO: 447887 - DNA, 30 bp, Artificial Sequence
  Synthetic oligonucleotide
gactcagaggatgcacgccgcccaaaaccc

SEQ ID NO: 447888 - DNA, 30 bp, Artificial Sequence
  Synthetic oligonucleotide
aagctcaaactctacacaggtcgaaaaccc

SEQ ID NO: 447889 - DNA, 30 bp, Artificial Sequence
  Synthetic oligonucleotide
cggaacagggctcgctggcgagataaaccc

SEQ ID NO: 447890 - DNA, 30 bp, Artificial Sequence
  Synthetic oligonucleotide
gtacatcatgcccgttaggcgtataaaccc

SEQ ID NO: 447891 - DNA, 30 bp, Artificial Sequence
  Synthetic oligonucleotide
gctgaggatttaagatttctgtataaaccc

SEQ ID NO: 447892 - DNA, 30 bp, Artificial Sequence
  Synthetic oligonucleotide
gcaaggttctaggattgaactactaaaccc

SEQ ID NO: 447893 - DNA, 30 bp, Artificial Sequence
  Synthetic oligonucleotide
ttagcgcagttgcataaagattgtaaaccc

SEQ ID NO: 447894 - DNA, 30 bp, Artificial Sequence
  Synthetic oligonucleotide
gaaactcagttcatcggatttcttaaaccc

SEQ ID NO: 447895 - DNA, 30 bp, Artificial Sequence
  Synthetic oligonucleotide
gccgcatgatcatcacacagctgacaaccc

SEQ ID NO: 447896 - DNA, 30 bp, Artificial Sequence
  Synthetic oligonucleotide
tatctttagaaatacgtttatgtacaaccc

SEQ ID NO: 447897 - DNA, 30 bp, Artificial Sequence
  Synthetic oligonucleotide
gaagcgaagcttttatatctctaccaaccc

SEQ ID NO: 447898 - DNA, 30 bp, Artificial Sequence
  Synthetic oligonucleotide
aagtgcgggtttcggttggagatgcaaccc

SEQ ID NO: 447899 - DNA, 30 bp, Artificial Sequence
  Synthetic oligonucleotide
tcaaccgatcttaggaattatgtgcaaccc

SEQ ID NO: 447900 - DNA, 30 bp, Artificial Sequence
  Synthetic oligonucleotide
gcctttgtagcgctgtatccatttcaaccc

SEQ ID NO: 447901 - DNA, 30 bp, Artificial Sequence
  Synthetic oligonucleotide
ccgtatttctcttatcgaatgtttcaaccc

SEQ ID NO: 447902 - DNA, 30 bp, Artificial Sequence
  Synthetic oligonucleotide
caggtacatatttaatacaaaatagaaccc

SEQ ID NO: 447903 - DNA, 30 bp, Artificial Sequence
  Synthetic oligonucleotide
ggtagggtacgggtccgcaaggccgaaccc

SEQ ID NO: 447904 - DNA, 30 bp, Artificial Sequence
  Synthetic oligonucleotide
caagggcagggtgaaatcggaagcgaaccc

SEQ ID NO: 447905 - DNA, 30 bp, Artificial Sequence
  Synthetic oligonucleotide
aatcatgagtgcagttcgtcgggggaaccc

SEQ ID NO: 447906 - DNA, 30 bp, Artificial Sequence
  Synthetic oligonucleotide
tcgcttaataggctacctggctgggaaccc

SEQ ID NO: 447907 - DNA, 30 bp, Artificial Sequence
  Synthetic oligonucleotide
caagccctttataccggacacagtgaaccc

SEQ ID NO: 447908 - DNA, 30 bp, Artificial Sequence
  Synthetic oligonucleotide
cactccggagaaatgatcttcgtataaccc

SEQ ID NO: 447909 - DNA, 30 bp, Artificial Sequence
  Synthetic oligonucleotide
cagagattttatgaaataaattagtaaccc

SEQ ID NO: 447910 - DNA, 30 bp, Artificial Sequence
  Synthetic oligonucleotide
ccgtacgcacaggacaacttgatgtaaccc

SEQ ID NO: 447911 - DNA, 30 bp, Artificial Sequence
  Synthetic oligonucleotide
aatgtctttagtttagctgtttattaaccc

SEQ ID NO: 447912 - DNA, 30 bp, Artificial Sequence
  Synthetic oligonucleotide
gaggcagagtattttctcagtatcacaccc

SEQ ID NO: 447913 - DNA, 30 bp, Artificial Sequence
  Synthetic oligonucleotide
tgtgtgaaaactttgctgtttatcacaccc

SEQ ID NO: 447914 - DNA, 30 bp, Artificial Sequence
  Synthetic oligonucleotide
gacggactcggacaaaaaattctcacaccc

SEQ ID NO: 447915 - DNA, 30 bp, Artificial Sequence
  Synthetic oligonucleotide
atttgatgaattgaggttatatatacaccc

SEQ ID NO: 447916 - DNA, 30 bp, Artificial Sequence
  Synthetic oligonucleotide
tctatggtcttccgtgcagctactacaccc

SEQ ID NO: 447917 - DNA, 30 bp, Artificial Sequence
  Synthetic oligonucleotide
tagggtcgatgaagcgcaggtagtacaccc

SEQ ID NO: 447918 - DNA, 30 bp, Artificial Sequence
  Synthetic oligonucleotide
ttacatttagggcctcagtgccaaccaccc

SEQ ID NO: 447919 - DNA, 30 bp, Artificial Sequence
  Synthetic oligonucleotide
ttttgatcgagatgtgtcctgttaccaccc

SEQ ID NO: 447920 - DNA, 30 bp, Artificial Sequence
  Synthetic oligonucleotide
tttactccctcttcggaaatgcgcccaccc

SEQ ID NO: 447921 - DNA, 30 bp, Artificial Sequence
  Synthetic oligonucleotide
accccgtcgcagtatgcatagactccaccc

SEQ ID NO: 447922 - DNA, 30 bp, Artificial Sequence
  Synthetic oligonucleotide
ggcgtggggaccgctggggtcacagcaccc

SEQ ID NO: 447923 - DNA, 30 bp, Artificial Sequence
  Synthetic oligonucleotide
ccctccgagtgctaataccggatagcaccc

SEQ ID NO: 447924 - DNA, 30 bp, Artificial Sequence
  Synthetic oligonucleotide
tctggcactcatgcggcgatgaatgcaccc

SEQ ID NO: 447925 - DNA, 30 bp, Artificial Sequence
  Synthetic oligonucleotide
acgtcgagtagtttacgtattgatgcaccc

SEQ ID NO: 447926 - DNA, 30 bp, Artificial Sequence
  Synthetic oligonucleotide
gtttcggttgtttttaaggaaagtgcaccc

SEQ ID NO: 447927 - DNA, 30 bp, Artificial Sequence
  Synthetic oligonucleotide
acagcttcaaattttgaggacagtgcaccc

SEQ ID NO: 447928 - DNA, 30 bp, Artificial Sequence
  Synthetic oligonucleotide
gaaattatgaaacctgaccagagctcaccc

SEQ ID NO: 447929 - DNA, 30 bp, Artificial Sequence
  Synthetic oligonucleotide
tgagtcagaacggacccaaatgggtcaccc

SEQ ID NO: 447930 - DNA, 30 bp, Artificial Sequence
  Synthetic oligonucleotide
caaacctgcatcggtaaattgatgtcaccc

SEQ ID NO: 447931 - DNA, 30 bp, Artificial Sequence
  Synthetic oligonucleotide
ggattgggggtatgtcccccgcattcaccc

SEQ ID NO: 447932 - DNA, 30 bp, Artificial Sequence
  Synthetic oligonucleotide
atttcattttcctggctaaaggattcaccc

SEQ ID NO: 447933 - DNA, 30 bp, Artificial Sequence
  Synthetic oligonucleotide
ggaaggaataggccggttagtgcaagaccc

SEQ ID NO: 447934 - DNA, 30 bp, Artificial Sequence
  Synthetic oligonucleotide
agcgtagaaaaatgcctacgccgcagaccc

SEQ ID NO: 447935 - DNA, 30 bp, Artificial Sequence
  Synthetic oligonucleotide
ctgggctagagtcctctcgcttcgagaccc

SEQ ID NO: 447936 - DNA, 30 bp, Artificial Sequence
  Synthetic oligonucleotide
tagtcggtgattataatccacgttagaccc

SEQ ID NO: 447937 - DNA, 30 bp, Artificial Sequence
  Synthetic oligonucleotide
cagggcttcaacattggacggcagcgaccc

SEQ ID NO: 447938 - DNA, 30 bp, Artificial Sequence
  Synthetic oligonucleotide
gtcttgatcgcttacgcgatggcgcgaccc

SEQ ID NO: 447939 - DNA, 30 bp, Artificial Sequence
  Synthetic oligonucleotide
tacatttgtgcccggcacgacatgcgaccc

SEQ ID NO: 447940 - DNA, 30 bp, Artificial Sequence
  Synthetic oligonucleotide
ctctggtaacgagatatcttacgtcgaccc

SEQ ID NO: 447941 - DNA, 30 bp, Artificial Sequence
  Synthetic oligonucleotide
gatacccgctgaaacgacaggcgtcgaccc

SEQ ID NO: 447942 - DNA, 30 bp, Artificial Sequence
  Synthetic oligonucleotide
caaaatatgtggaacctgtgtcgaggaccc

SEQ ID NO: 447943 - DNA, 30 bp, Artificial Sequence
  Synthetic oligonucleotide
ctctgatgccattttaattcgcggggaccc

SEQ ID NO: 447944 - DNA, 30 bp, Artificial Sequence
  Synthetic oligonucleotide
attacatcagggtcatctaaacatggaccc

SEQ ID NO: 447945 - DNA, 30 bp, Artificial Sequence
  Synthetic oligonucleotide
gggtctcatcccagacgcgtctttggaccc

SEQ ID NO: 447946 - DNA, 30 bp, Artificial Sequence
  Synthetic oligonucleotide
ttacgtttactggagctccaaccatgaccc

SEQ ID NO: 447947 - DNA, 30 bp, Artificial Sequence
  Synthetic oligonucleotide
gatgccaacctcgacagactattatgaccc

SEQ ID NO: 447948 - DNA, 30 bp, Artificial Sequence
  Synthetic oligonucleotide
ggcctccaacaagctcgtacccgttgaccc

SEQ ID NO: 447949 - DNA, 30 bp, Artificial Sequence
  Synthetic oligonucleotide
tttggatttctagaaaacttattttgaccc

SEQ ID NO: 447950 - DNA, 30 bp, Artificial Sequence
  Synthetic oligonucleotide
ctatggctgagctctttaatataaataccc

SEQ ID NO: 447951 - DNA, 30 bp, Artificial Sequence
  Synthetic oligonucleotide
taactcagtcttaacatgaagtaaataccc

SEQ ID NO: 447952 - DNA, 30 bp, Artificial Sequence
  Synthetic oligonucleotide
tgtctctaaaagcatagctagtaaataccc

SEQ ID NO: 447953 - DNA, 30 bp, Artificial Sequence
  Synthetic oligonucleotide
ctgcgatacggtatcttgacaggaataccc

SEQ ID NO: 447954 - DNA, 30 bp, Artificial Sequence
  Synthetic oligonucleotide
caaatttgcaacggaggttaattaataccc

SEQ ID NO: 447955 - DNA, 30 bp, Artificial Sequence
  Synthetic oligonucleotide
actaaattagatcttgggcgccgcataccc

SEQ ID NO: 447956 - DNA, 30 bp, Artificial Sequence
  Synthetic oligonucleotide
ttacctgggggacgcctagagacgataccc

SEQ ID NO: 447957 - DNA, 29 bp, Artificial Sequence
  Synthetic oligonucleotide
ggtacgtgtcaacccagtgggtgataccc

SEQ ID NO: 447958 - DNA, 30 bp, Artificial Sequence
  Synthetic oligonucleotide
tattggattacagggtctacactcctaccc

SEQ ID NO: 447959 - DNA, 30 bp, Artificial Sequence
  Synthetic oligonucleotide
ttgcatactcaatttcccttaaatctaccc

SEQ ID NO: 447960 - DNA, 30 bp, Artificial Sequence
  Synthetic oligonucleotide
aagtttcaacagacgtactattgtctaccc

SEQ ID NO: 447961 - DNA, 30 bp, Artificial Sequence
  Synthetic oligonucleotide
atgttaggtacccattggccccttctaccc

SEQ ID NO: 447962 - DNA, 30 bp, Artificial Sequence
  Synthetic oligonucleotide
attatagcactagacttgatatttctaccc

SEQ ID NO: 447963 - DNA, 30 bp, Artificial Sequence
  Synthetic oligonucleotide
atcttaggggatgtcggctggttagtaccc

SEQ ID NO: 447964 - DNA, 30 bp, Artificial Sequence
  Synthetic oligonucleotide
gaggcatcaggcagtcgatcttccgtaccc

SEQ ID NO: 447965 - DNA, 30 bp, Artificial Sequence
  Synthetic oligonucleotide
gcaggtctcatagttttgttcatcgtaccc

SEQ ID NO: 447966 - DNA, 30 bp, Artificial Sequence
  Synthetic oligonucleotide
tgacaggctcagggaacaaatttcgtaccc

SEQ ID NO: 447967 - DNA, 30 bp, Artificial Sequence
  Synthetic oligonucleotide
gttggtcagaccacgaatgccatggtaccc

SEQ ID NO: 447968 - DNA, 30 bp, Artificial Sequence
  Synthetic oligonucleotide
gcccattagttattcgaggaagctgtaccc

SEQ ID NO: 447969 - DNA, 30 bp, Artificial Sequence
  Synthetic oligonucleotide
aaaggtacaatggttatgactacattaccc

SEQ ID NO: 447970 - DNA, 30 bp, Artificial Sequence
  Synthetic oligonucleotide
atccgacgtcacggggtactattattaccc

SEQ ID NO: 447971 - DNA, 30 bp, Artificial Sequence
  Synthetic oligonucleotide
gcaattctcaagtttctagattacttaccc

SEQ ID NO: 447972 - DNA, 30 bp, Artificial Sequence
  Synthetic oligonucleotide
taaaaacggcaggtggaaatggggttaccc

SEQ ID NO: 447973 - DNA, 30 bp, Artificial Sequence
  Synthetic oligonucleotide
ttcactccacgtactataacttggttaccc

SEQ ID NO: 447974 - DNA, 30 bp, Artificial Sequence
  Synthetic oligonucleotide
tgactcgggtgcttatatttagtaaacccc

SEQ ID NO: 447975 - DNA, 30 bp, Artificial Sequence
  Synthetic oligonucleotide
agccatattcggggtgtactcgtaaacccc

SEQ ID NO: 447976 - DNA, 30 bp, Artificial Sequence
  Synthetic oligonucleotide
ttgagagtggtcgtaaattccgagaacccc

SEQ ID NO: 447977 - DNA, 30 bp, Artificial Sequence
  Synthetic oligonucleotide
ctcctgcctcagacagaagccgtgaacccc

SEQ ID NO: 447978 - DNA, 30 bp, Artificial Sequence
  Synthetic oligonucleotide
ctgtatagatcccgcgtgcgcttgaacccc

SEQ ID NO: 447979 - DNA, 30 bp, Artificial Sequence
  Synthetic oligonucleotide
atacgctcactgtataaaaattaacacccc

SEQ ID NO: 447980 - DNA, 30 bp, Artificial Sequence
  Synthetic oligonucleotide
gccctagaccccgttaacgagacgcacccc

SEQ ID NO: 447981 - DNA, 30 bp, Artificial Sequence
  Synthetic oligonucleotide
tttgatggggcgcatggttgacatcacccc

SEQ ID NO: 447982 - DNA, 30 bp, Artificial Sequence
  Synthetic oligonucleotide
agtatcccaggttgggtctgatgagacccc

SEQ ID NO: 447983 - DNA, 30 bp, Artificial Sequence
  Synthetic oligonucleotide
cccaggatccacctggggggtcgcgacccc

SEQ ID NO: 447984 - DNA, 30 bp, Artificial Sequence
  Synthetic oligonucleotide
ccccggaccaagacacagtggttcgacccc

SEQ ID NO: 447985 - DNA, 30 bp, Artificial Sequence
  Synthetic oligonucleotide
tgcggtccaattatattggtttaggacccc

SEQ ID NO: 447986 - DNA, 30 bp, Artificial Sequence
  Synthetic oligonucleotide
aatccttggaaggtctccgcaaatgacccc

SEQ ID NO: 447987 - DNA, 30 bp, Artificial Sequence
  Synthetic oligonucleotide
ctactgatggaaaccttatgacatgacccc

SEQ ID NO: 447988 - DNA, 30 bp, Artificial Sequence
  Synthetic oligonucleotide
gggtcactccgcaccataaatgaatacccc

SEQ ID NO: 447989 - DNA, 30 bp, Artificial Sequence
  Synthetic oligonucleotide
acagcacattggtgattatataactacccc

SEQ ID NO: 447990 - DNA, 30 bp, Artificial Sequence
  Synthetic oligonucleotide
gtagggaaacgttggctcgctaagtacccc

SEQ ID NO: 447991 - DNA, 30 bp, Artificial Sequence
  Synthetic oligonucleotide
taccgttagccgtacgtttatgcgtacccc

SEQ ID NO: 447992 - DNA, 30 bp, Artificial Sequence
  Synthetic oligonucleotide
aacatacaacgtaacgcattggattacccc

SEQ ID NO: 447993 - DNA, 30 bp, Artificial Sequence
  Synthetic oligonucleotide
taggaactcccagttccacaggtttacccc

SEQ ID NO: 447994 - DNA, 30 bp, Artificial Sequence
  Synthetic oligonucleotide
tacagacgtttcgggggatggcaaaccccc

SEQ ID NO: 447995 - DNA, 30 bp, Artificial Sequence
  Synthetic oligonucleotide
cagtctggtggtgtgctagccctaaccccc

SEQ ID NO: 447996 - DNA, 31 bp, Artificial Sequence
  Synthetic oligonucleotide
gccgaaatctgagggtgaaattcgcaccccc

SEQ ID NO: 447997 - DNA, 30 bp, Artificial Sequence
  Synthetic oligonucleotide
actgtaacgcatcagaggaacggcaccccc

SEQ ID NO: 447998 - DNA, 30 bp, Artificial Sequence
  Synthetic oligonucleotide
gctggccaacagcgcgttaccttcaccccc

SEQ ID NO: 447999 - DNA, 30 bp, Artificial Sequence
  Synthetic oligonucleotide
cacagtaataggtttaaccaaccgaccccc

SEQ ID NO: 448000 - DNA, 30 bp, Artificial Sequence
  Synthetic oligonucleotide
agctcgatatctttaaatattcataccccc

SEQ ID NO: 448001 - DNA, 30 bp, Artificial Sequence
  Synthetic oligonucleotide
ggttaaacctgtataatttctcaacccccc

SEQ ID NO: 448002 - DNA, 30 bp, Artificial Sequence
  Synthetic oligonucleotide
gcggttccactgtaggattatccacccccc

SEQ ID NO: 448003 - DNA, 30 bp, Artificial Sequence
  Synthetic oligonucleotide
acgtgcaacctatttactccgcagcccccc

SEQ ID NO: 448004 - DNA, 30 bp, Artificial Sequence
  Synthetic oligonucleotide
ctacctctaaaggcggtaggggcgcccccc

SEQ ID NO: 448005 - DNA, 30 bp, Artificial Sequence
  Synthetic oligonucleotide
tttgagtacctttcgaagtactctcccccc

SEQ ID NO: 448006 - DNA, 30 bp, Artificial Sequence
  Synthetic oligonucleotide
tcactggattctggtagacaatttcccccc

SEQ ID NO: 448007 - DNA, 30 bp, Artificial Sequence
  Synthetic oligonucleotide
tgggaggccgtcagtagagacgaagccccc

SEQ ID NO: 448008 - DNA, 30 bp, Artificial Sequence
  Synthetic oligonucleotide
tgcaatattcaatggccgtcctcggccccc

SEQ ID NO: 448009 - DNA, 30 bp, Artificial Sequence
  Synthetic oligonucleotide
gtgaggggacattctatagtaatggccccc

SEQ ID NO: 448010 - DNA, 30 bp, Artificial Sequence
  Synthetic oligonucleotide
aagtgagcatacttagtggtagctgccccc

SEQ ID NO: 448011 - DNA, 29 bp, Artificial Sequence
  Synthetic oligonucleotide
agcgttaaacaggtgttggcatatccccc

SEQ ID NO: 448012 - DNA, 30 bp, Artificial Sequence
  Synthetic oligonucleotide
tccctaatcagtcatttatgggtatccccc

SEQ ID NO: 448013 - DNA, 30 bp, Artificial Sequence
  Synthetic oligonucleotide
agtcattttaaaagacctacccgctccccc

SEQ ID NO: 448014 - DNA, 30 bp, Artificial Sequence
  Synthetic oligonucleotide
ggtcggagcaaaggacgatatgcgtccccc

SEQ ID NO: 448015 - DNA, 30 bp, Artificial Sequence
  Synthetic oligonucleotide
ccacgcgttttctatcatgttcgttccccc

SEQ ID NO: 448016 - DNA, 30 bp, Artificial Sequence
  Synthetic oligonucleotide
agagtctagtgggtgcaccactggagcccc

SEQ ID NO: 448017 - DNA, 30 bp, Artificial Sequence
  Synthetic oligonucleotide
gacacattactgacgccctgctttagcccc

SEQ ID NO: 448018 - DNA, 30 bp, Artificial Sequence
  Synthetic oligonucleotide
gagtggggatgagctacggctgaacgcccc

SEQ ID NO: 448019 - DNA, 30 bp, Artificial Sequence
  Synthetic oligonucleotide
aggggggccgtaatgagggcgtaacgcccc

SEQ ID NO: 448020 - DNA, 30 bp, Artificial Sequence
  Synthetic oligonucleotide
cgtcaagccgggctgttttcgcaccgcccc

SEQ ID NO: 448021 - DNA, 30 bp, Artificial Sequence
  Synthetic oligonucleotide
ggtaggaaagctgctagcggcatccgcccc

SEQ ID NO: 448022 - DNA, 30 bp, Artificial Sequence
  Synthetic oligonucleotide
catgggctcagggaacccaaactgcgcccc

SEQ ID NO: 448023 - DNA, 30 bp, Artificial Sequence
  Synthetic oligonucleotide
cctggtggatcggtatctactccaggcccc

SEQ ID NO: 448024 - DNA, 30 bp, Artificial Sequence
  Synthetic oligonucleotide
gctaatgattattccataagtttaggcccc

SEQ ID NO: 448025 - DNA, 30 bp, Artificial Sequence
  Synthetic oligonucleotide
tttcaatattgtgcatgcacgtccggcccc

SEQ ID NO: 448026 - DNA, 30 bp, Artificial Sequence
  Synthetic oligonucleotide
ttctaccttatggtaataagccggggcccc

SEQ ID NO: 448027 - DNA, 30 bp, Artificial Sequence
  Synthetic oligonucleotide
gcccgcaacgtatgacggccccagtgcccc

SEQ ID NO: 448028 - DNA, 30 bp, Artificial Sequence
  Synthetic oligonucleotide
ctcgtggcctacggggcttggttgtgcccc

SEQ ID NO: 448029 - DNA, 30 bp, Artificial Sequence
  Synthetic oligonucleotide
ttgtgggacggtataagagtgtcaatcccc

SEQ ID NO: 448030 - DNA, 30 bp, Artificial Sequence
  Synthetic oligonucleotide
aaagtgcgtctcctcctaaggggaatcccc

SEQ ID NO: 448031 - DNA, 30 bp, Artificial Sequence
  Synthetic oligonucleotide
aaatggagatatgcgctcgtcgtaatcccc

SEQ ID NO: 448032 - DNA, 30 bp, Artificial Sequence
  Synthetic oligonucleotide
ttttgaccgaactctcgagctcacatcccc

SEQ ID NO: 448033 - DNA, 30 bp, Artificial Sequence
  Synthetic oligonucleotide
gagagccgccagcggatgaggtccatcccc

SEQ ID NO: 448034 - DNA, 30 bp, Artificial Sequence
  Synthetic oligonucleotide
attattccgatcaagaatattcgcatcccc

SEQ ID NO: 448035 - DNA, 30 bp, Artificial Sequence
  Synthetic oligonucleotide
tagtcgcgccctttccaatctgggatcccc

SEQ ID NO: 448036 - DNA, 30 bp, Artificial Sequence
  Synthetic oligonucleotide
tggtatataagtaggtccgcgtaactcccc

SEQ ID NO: 448037 - DNA, 30 bp, Artificial Sequence
  Synthetic oligonucleotide
gggtgcccggcttatcgacagcgtctcccc

SEQ ID NO: 448038 - DNA, 30 bp, Artificial Sequence
  Synthetic oligonucleotide
ccagcgggacctcatccattctgcgtcccc

SEQ ID NO: 448039 - DNA, 30 bp, Artificial Sequence
  Synthetic oligonucleotide
gtggacgtcgtaagcaattctcgggtcccc

SEQ ID NO: 448040 - DNA, 30 bp, Artificial Sequence
  Synthetic oligonucleotide
aaagggccaatataaagtatcctggtcccc

SEQ ID NO: 448041 - DNA, 30 bp, Artificial Sequence
  Synthetic oligonucleotide
atgcggtgcgtttatcgcagaagtgtcccc

SEQ ID NO: 448042 - DNA, 30 bp, Artificial Sequence
  Synthetic oligonucleotide
ttcgtggaacggaagattaccgaattcccc

SEQ ID NO: 448043 - DNA, 30 bp, Artificial Sequence
  Synthetic oligonucleotide
aagggcttccaggttagggcggaattcccc

SEQ ID NO: 448044 - DNA, 30 bp, Artificial Sequence
  Synthetic oligonucleotide
aaatacatcgcccactccaaagtattcccc

SEQ ID NO: 448045 - DNA, 30 bp, Artificial Sequence
  Synthetic oligonucleotide
cgaaagccgcccgattgtacgcagttcccc

SEQ ID NO: 448046 - DNA, 30 bp, Artificial Sequence
  Synthetic oligonucleotide
tgatccgtcagtatacgccgctccaagccc

SEQ ID NO: 448047 - DNA, 30 bp, Artificial Sequence
  Synthetic oligonucleotide
cgagtcgcattctgcgtagaaacgaagccc

SEQ ID NO: 448048 - DNA, 30 bp, Artificial Sequence
  Synthetic oligonucleotide
atttcttctggacagggagactataagccc

SEQ ID NO: 448049 - DNA, 30 bp, Artificial Sequence
  Synthetic oligonucleotide
aagtcgaggagagaacatgggtataagccc

SEQ ID NO: 448050 - DNA, 30 bp, Artificial Sequence
  Synthetic oligonucleotide
ttaggtccgttccgatagcggactaagccc

SEQ ID NO: 448051 - DNA, 30 bp, Artificial Sequence
  Synthetic oligonucleotide
taatctaggacgagctgttgggaacagccc

SEQ ID NO: 448052 - DNA, 30 bp, Artificial Sequence
  Synthetic oligonucleotide
gaggtgcggcgtagctcgccgagacagccc

SEQ ID NO: 448053 - DNA, 30 bp, Artificial Sequence
  Synthetic oligonucleotide
ggctcgtgcccccgtttgtgctggcagccc

SEQ ID NO: 448054 - DNA, 30 bp, Artificial Sequence
  Synthetic oligonucleotide
gcgccgcgatcttcagttcgatgtcagccc

SEQ ID NO: 448055 - DNA, 30 bp, Artificial Sequence
  Synthetic oligonucleotide
aagacagtagtgctgcagtcgcgagagccc

SEQ ID NO: 448056 - DNA, 30 bp, Artificial Sequence
  Synthetic oligonucleotide
aaactactccatgggttggcttccgagccc

SEQ ID NO: 448057 - DNA, 30 bp, Artificial Sequence
  Synthetic oligonucleotide
gcctttaacactggtccaccatgcgagccc

SEQ ID NO: 448058 - DNA, 30 bp, Artificial Sequence
  Synthetic oligonucleotide
ttaactggtagttgttattaaatggagccc

SEQ ID NO: 448059 - DNA, 30 bp, Artificial Sequence
  Synthetic oligonucleotide
atatacttccctgccgatagtttggagccc

SEQ ID NO: 448060 - DNA, 25 bp, Artificial Sequence
  Synthetic oligonucleotide
tgtaataaatcccctgagtgagccc

SEQ ID NO: 448061 - DNA, 30 bp, Artificial Sequence
  Synthetic oligonucleotide
aacaaaacgaaggatacagtttgtgagccc

SEQ ID NO: 448062 - DNA, 30 bp, Artificial Sequence
  Synthetic oligonucleotide
tgcgcgttacggtagtatattatctagccc

SEQ ID NO: 448063 - DNA, 30 bp, Artificial Sequence
  Synthetic oligonucleotide
gtcaacgcagctgaatccaagagttagccc

SEQ ID NO: 448064 - DNA, 30 bp, Artificial Sequence
  Synthetic oligonucleotide
ttcaggtatgtacgttggaagatttagccc

SEQ ID NO: 448065 - DNA, 30 bp, Artificial Sequence
  Synthetic oligonucleotide
actaagcgactctcactgtgttaaacgccc

SEQ ID NO: 448066 - DNA, 30 bp, Artificial Sequence
  Synthetic oligonucleotide
atccagcgcccaggcatatagtccacgccc

SEQ ID NO: 448067 - DNA, 30 bp, Artificial Sequence
  Synthetic oligonucleotide
cgattcctctaggacgacgctttgacgccc

SEQ ID NO: 448068 - DNA, 30 bp, Artificial Sequence
  Synthetic oligonucleotide
tccccaagacacgcagcctgaaatacgccc

SEQ ID NO: 448069 - DNA, 30 bp, Artificial Sequence
  Synthetic oligonucleotide
ggcgctccagccacgggtacgtgtacgccc

SEQ ID NO: 448070 - DNA, 30 bp, Artificial Sequence
  Synthetic oligonucleotide
aatcttagtgtgtgctaaaggtgtacgccc

SEQ ID NO: 448071 - DNA, 30 bp, Artificial Sequence
  Synthetic oligonucleotide
atcgtgcagagcgaccgaaacacgccgccc

SEQ ID NO: 448072 - DNA, 30 bp, Artificial Sequence
  Synthetic oligonucleotide
aacgcaccgcataggtttaggcggccgccc

SEQ ID NO: 448073 - DNA, 30 bp, Artificial Sequence
  Synthetic oligonucleotide
ttcgagacatgtggcccgcatttgccgccc

SEQ ID NO: 448074 - DNA, 30 bp, Artificial Sequence
  Synthetic oligonucleotide
cgtgtgcttgggtccggcatctgtccgccc

SEQ ID NO: 448075 - DNA, 30 bp, Artificial Sequence
  Synthetic oligonucleotide
ttgatattactcgaaagacacctggcgccc

SEQ ID NO: 448076 - DNA, 30 bp, Artificial Sequence
  Synthetic oligonucleotide
ttatcggcatgctttagttaggctgcgccc

SEQ ID NO: 448077 - DNA, 30 bp, Artificial Sequence
  Synthetic oligonucleotide
aaattcggtaaattgtcaagacgatcgccc

SEQ ID NO: 448078 - DNA, 30 bp, Artificial Sequence
  Synthetic oligonucleotide
ccgacggagatttttggaagttgttcgccc

SEQ ID NO: 448079 - DNA, 30 bp, Artificial Sequence
  Synthetic oligonucleotide
ggcccggccctatcagcaagtagaaggccc

SEQ ID NO: 448080 - DNA, 30 bp, Artificial Sequence
  Synthetic oligonucleotide
gcagtacccgcttagagaccaataaggccc

SEQ ID NO: 448081 - DNA, 30 bp, Artificial Sequence
  Synthetic oligonucleotide
aaagataggtaccttttggtttacaggccc

SEQ ID NO: 448082 - DNA, 30 bp, Artificial Sequence
  Synthetic oligonucleotide
ctaatgtaccacggggctggtccgaggccc

SEQ ID NO: 448083 - DNA, 30 bp, Artificial Sequence
  Synthetic oligonucleotide
ctgtaagaaatgattcgacacgtgaggccc

SEQ ID NO: 448084 - DNA, 30 bp, Artificial Sequence
  Synthetic oligonucleotide
tcggtcctagacatttttatcagtaggccc

SEQ ID NO: 448085 - DNA, 30 bp, Artificial Sequence
  Synthetic oligonucleotide
aattgggtgagtgttttggttaaacggccc

SEQ ID NO: 448086 - DNA, 30 bp, Artificial Sequence
  Synthetic oligonucleotide
aactgctcacgtccggcagttacacggccc

SEQ ID NO: 448087 - DNA, 30 bp, Artificial Sequence
  Synthetic oligonucleotide
caggtccagtcataagacgcatgacggccc

SEQ ID NO: 448088 - DNA, 30 bp, Artificial Sequence
  Synthetic oligonucleotide
aaattcatccgcgcttaccatgtacggccc

SEQ ID NO: 448089 - DNA, 30 bp, Artificial Sequence
  Synthetic oligonucleotide
accgcatatcctcgtcagccggcccggccc

SEQ ID NO: 448090 - DNA, 30 bp, Artificial Sequence
  Synthetic oligonucleotide
ttattggcaaggataattttgaagcggccc

SEQ ID NO: 448091 - DNA, 30 bp, Artificial Sequence
  Synthetic oligonucleotide
ctgctgtggcctacatcgcatgcgcggccc

SEQ ID NO: 448092 - DNA, 30 bp, Artificial Sequence
  Synthetic oligonucleotide
accacatcttaacggaaccattcgcggccc

SEQ ID NO: 448093 - DNA, 30 bp, Artificial Sequence
  Synthetic oligonucleotide
tccgcactccacaccccccgcaatcggccc

SEQ ID NO: 448094 - DNA, 30 bp, Artificial Sequence
  Synthetic oligonucleotide
atccacagcctactccgcactcaagggccc

SEQ ID NO: 448095 - DNA, 30 bp, Artificial Sequence
  Synthetic oligonucleotide
gtggcaaatatcctttttcgatccgggccc

SEQ ID NO: 448096 - DNA, 30 bp, Artificial Sequence
  Synthetic oligonucleotide
accatcacttatgtcttgacatgggggccc

SEQ ID NO: 448097 - DNA, 30 bp, Artificial Sequence
  Synthetic oligonucleotide
gaaggtccacatactgttagtttggggccc

SEQ ID NO: 448098 - DNA, 30 bp, Artificial Sequence
  Synthetic oligonucleotide
gtattaagtggatctcccatcagtgggccc

SEQ ID NO: 448099 - DNA, 30 bp, Artificial Sequence
  Synthetic oligonucleotide
catgtcgcggtctatctgaagattgggccc

SEQ ID NO: 448100 - DNA, 30 bp, Artificial Sequence
  Synthetic oligonucleotide
aaaccagtaaaactctgccaggttgggccc

SEQ ID NO: 448101 - DNA, 30 bp, Artificial Sequence
  Synthetic oligonucleotide
gaagctggaagatagataggttttgggccc

SEQ ID NO: 448102 - DNA, 30 bp, Artificial Sequence
  Synthetic oligonucleotide
ggtagggcttatcccgggccgagctggccc

SEQ ID NO: 448103 - DNA, 30 bp, Artificial Sequence
  Synthetic oligonucleotide
ttgatattggccattgtgcctcggtggccc

SEQ ID NO: 448104 - DNA, 30 bp, Artificial Sequence
  Synthetic oligonucleotide
gtatctcggagcgtccgggctaattggccc

SEQ ID NO: 448105 - DNA, 30 bp, Artificial Sequence
  Synthetic oligonucleotide
gtagttaaagacgtatatatgcattggccc

SEQ ID NO: 448106 - DNA, 30 bp, Artificial Sequence
  Synthetic oligonucleotide
attcctgcttaagtaagttctacttggccc

SEQ ID NO: 448107 - DNA, 30 bp, Artificial Sequence
  Synthetic oligonucleotide
ggcgtggtattcagggacttaccgatgccc

SEQ ID NO: 448108 - DNA, 30 bp, Artificial Sequence
  Synthetic oligonucleotide
gccgtgtctcaactgaagtatatgatgccc

SEQ ID NO: 448109 - DNA, 30 bp, Artificial Sequence
  Synthetic oligonucleotide
ccaatttgatacggtgtatagctgatgccc

SEQ ID NO: 448110 - DNA, 30 bp, Artificial Sequence
  Synthetic oligonucleotide
tgaaccttatgatctatgagggaagtgccc

SEQ ID NO: 448111 - DNA, 30 bp, Artificial Sequence
  Synthetic oligonucleotide
gatcctttatccttgcccacacacgtgccc

SEQ ID NO: 448112 - DNA, 30 bp, Artificial Sequence
  Synthetic oligonucleotide
gcataagcggccttatgtagcccggtgccc

SEQ ID NO: 448113 - DNA, 30 bp, Artificial Sequence
  Synthetic oligonucleotide
atttccggaaatggtttcggaagggtgccc

SEQ ID NO: 448114 - DNA, 30 bp, Artificial Sequence
  Synthetic oligonucleotide
tcgctctgagcccctgttaggttggtgccc

SEQ ID NO: 448115 - DNA, 30 bp, Artificial Sequence
  Synthetic oligonucleotide
catgcatctggtagctattgtcatgtgccc

SEQ ID NO: 448116 - DNA, 30 bp, Artificial Sequence
  Synthetic oligonucleotide
cctttcgtgcagccggacagacttgtgccc

SEQ ID NO: 448117 - DNA, 30 bp, Artificial Sequence
  Synthetic oligonucleotide
aattactccagtcgagtagaataattgccc

SEQ ID NO: 448118 - DNA, 30 bp, Artificial Sequence
  Synthetic oligonucleotide
gctggtatatacagttcactttaattgccc

SEQ ID NO: 448119 - DNA, 30 bp, Artificial Sequence
  Synthetic oligonucleotide
acatagtgcgttatagatgtgacgttgccc

SEQ ID NO: 448120 - DNA, 30 bp, Artificial Sequence
  Synthetic oligonucleotide
gccgatcagatccgcctgacctcgttgccc

SEQ ID NO: 448121 - DNA, 30 bp, Artificial Sequence
  Synthetic oligonucleotide
tagtgtgtggtattgaaatcacacaatccc

SEQ ID NO: 448122 - DNA, 30 bp, Artificial Sequence
  Synthetic oligonucleotide
acagggatcatcctactcactcgcaatccc

SEQ ID NO: 448123 - DNA, 30 bp, Artificial Sequence
  Synthetic oligonucleotide
aatatgtgctaacattcatataataatccc

SEQ ID NO: 448124 - DNA, 30 bp, Artificial Sequence
  Synthetic oligonucleotide
gggatgagagcttgcacagcggaacatccc

SEQ ID NO: 448125 - DNA, 30 bp, Artificial Sequence
  Synthetic oligonucleotide
taaagtagacccgcaggctgaacacatccc

SEQ ID NO: 448126 - DNA, 30 bp, Artificial Sequence
  Synthetic oligonucleotide
ctatacgtcaggctaggtgcatagcatccc

SEQ ID NO: 448127 - DNA, 30 bp, Artificial Sequence
  Synthetic oligonucleotide
tttgtacatgagaaaccaattcctcatccc

SEQ ID NO: 448128 - DNA, 30 bp, Artificial Sequence
  Synthetic oligonucleotide
ttgccctgaacaagaagggacaaggatccc

SEQ ID NO: 448129 - DNA, 30 bp, Artificial Sequence
  Synthetic oligonucleotide
agtatattctcgcaattacacacggatccc

SEQ ID NO: 448130 - DNA, 30 bp, Artificial Sequence
  Synthetic oligonucleotide
tgggcggcaggaaagaggaagggggatccc

SEQ ID NO: 448131 - DNA, 30 bp, Artificial Sequence
  Synthetic oligonucleotide
agcaacagccgtcattgtatatgggatccc

SEQ ID NO: 448132 - DNA, 30 bp, Artificial Sequence
  Synthetic oligonucleotide
gtttattaagtggtgttcgagtgggatccc

SEQ ID NO: 448133 - DNA, 30 bp, Artificial Sequence
  Synthetic oligonucleotide
ggagtctactggcaaaagccttgggatccc

SEQ ID NO: 448134 - DNA, 30 bp, Artificial Sequence
  Synthetic oligonucleotide
agaatgtctgattgaggcctcgaatatccc

SEQ ID NO: 448135 - DNA, 30 bp, Artificial Sequence
  Synthetic oligonucleotide
cggccgggcaccttcacctcaagatatccc

SEQ ID NO: 448136 - DNA, 30 bp, Artificial Sequence
  Synthetic oligonucleotide
cagaggccactcactcattcgagatatccc

SEQ ID NO: 448137 - DNA, 30 bp, Artificial Sequence
  Synthetic oligonucleotide
gagttctagatcgacgatcatatatatccc

SEQ ID NO: 448138 - DNA, 30 bp, Artificial Sequence
  Synthetic oligonucleotide
accagcgttgacccgcacacaggctatccc

SEQ ID NO: 448139 - DNA, 30 bp, Artificial Sequence
  Synthetic oligonucleotide
gattgcacccgggtacttggaaagtatccc

SEQ ID NO: 448140 - DNA, 30 bp, Artificial Sequence
  Synthetic oligonucleotide
ggtctgaatacgtatttggcgtattatccc

SEQ ID NO: 448141 - DNA, 30 bp, Artificial Sequence
  Synthetic oligonucleotide
tttgccagcacggcggagcactcttatccc

SEQ ID NO: 448142 - DNA, 30 bp, Artificial Sequence
  Synthetic oligonucleotide
gcatagatccatttcgaccgggtttatccc

SEQ ID NO: 448143 - DNA, 30 bp, Artificial Sequence
  Synthetic oligonucleotide
caccctggggcgtttagtatggtttatccc

SEQ ID NO: 448144 - DNA, 30 bp, Artificial Sequence
  Synthetic oligonucleotide
agggtaccgatgctaccacggtctactccc

SEQ ID NO: 448145 - DNA, 30 bp, Artificial Sequence
  Synthetic oligonucleotide
gcaagcagcataataaaatgttttactccc

SEQ ID NO: 448146 - DNA, 30 bp, Artificial Sequence
  Synthetic oligonucleotide
tgtggatgatctggtctagatcaacctccc

SEQ ID NO: 448147 - DNA, 30 bp, Artificial Sequence
  Synthetic oligonucleotide
catatagggcccgccagtactgaacctccc

SEQ ID NO: 448148 - DNA, 30 bp, Artificial Sequence
  Synthetic oligonucleotide
ggcaatccaatagatacccatagccctccc

SEQ ID NO: 448149 - DNA, 30 bp, Artificial Sequence
  Synthetic oligonucleotide
gccccgaaagggcacaacgttaggcctccc

SEQ ID NO: 448150 - DNA, 30 bp, Artificial Sequence
  Synthetic oligonucleotide
ccacggagtatcttgtgtaatcaagctccc

SEQ ID NO: 448151 - DNA, 30 bp, Artificial Sequence
  Synthetic oligonucleotide
agtgacagtagaccaaggaaggcagctccc

SEQ ID NO: 448152 - DNA, 30 bp, Artificial Sequence
  Synthetic oligonucleotide
ttaacagtcgtgtatggagcatcagctccc

SEQ ID NO: 448153 - DNA, 30 bp, Artificial Sequence
  Synthetic oligonucleotide
ttccgcgactatactagtgtcatagctccc

SEQ ID NO: 448154 - DNA, 30 bp, Artificial Sequence
  Synthetic oligonucleotide
agaccttaatggtacgtagccatggctccc

SEQ ID NO: 448155 - DNA, 30 bp, Artificial Sequence
  Synthetic oligonucleotide
acatgcgatcggttttatcagggtgctccc

SEQ ID NO: 448156 - DNA, 30 bp, Artificial Sequence
  Synthetic oligonucleotide
atcacccctgatcgttgctgacttgctccc

SEQ ID NO: 448157 - DNA, 30 bp, Artificial Sequence
  Synthetic oligonucleotide
tcgtcatctcatcgtgcgggatgatctccc

SEQ ID NO: 448158 - DNA, 30 bp, Artificial Sequence
  Synthetic oligonucleotide
atagtaacaataggcggagccgcctctccc

SEQ ID NO: 448159 - DNA, 30 bp, Artificial Sequence
  Synthetic oligonucleotide
aattcgcacgcattagtatttcgaagtccc

SEQ ID NO: 448160 - DNA, 30 bp, Artificial Sequence
  Synthetic oligonucleotide
gtgatatcgtatgtaaggaatggcagtccc

SEQ ID NO: 448161 - DNA, 30 bp, Artificial Sequence
  Synthetic oligonucleotide
tagttatgccccaggcgccactgtagtccc

SEQ ID NO: 448162 - DNA, 30 bp, Artificial Sequence
  Synthetic oligonucleotide
tttcctttgcagtggttaacccaacgtccc

SEQ ID NO: 448163 - DNA, 30 bp, Artificial Sequence
  Synthetic oligonucleotide
caatgtgtgcccgaagcacacgcccgtccc

SEQ ID NO: 448164 - DNA, 30 bp, Artificial Sequence
  Synthetic oligonucleotide
ccttgatagggtctgataatacagggtccc

SEQ ID NO: 448165 - DNA, 30 bp, Artificial Sequence
  Synthetic oligonucleotide
tccagattgctaaatactctttctggtccc

SEQ ID NO: 448166 - DNA, 30 bp, Artificial Sequence
  Synthetic oligonucleotide
taaacgcactcgcccagagggacatgtccc

SEQ ID NO: 448167 - DNA, 30 bp, Artificial Sequence
  Synthetic oligonucleotide
tggccttcggacgcacggtcatgatgtccc

SEQ ID NO: 448168 - DNA, 30 bp, Artificial Sequence
  Synthetic oligonucleotide
cgcttcaaagtgagtggcgttctatgtccc

SEQ ID NO: 448169 - DNA, 30 bp, Artificial Sequence
  Synthetic oligonucleotide
aacacgcaggccgtccactaaacgtgtccc

SEQ ID NO: 448170 - DNA, 30 bp, Artificial Sequence
  Synthetic oligonucleotide
aatactcccgaatttaccgtgtattgtccc

SEQ ID NO: 448171 - DNA, 30 bp, Artificial Sequence
  Synthetic oligonucleotide
ttccaatccaacgtggggaacggttgtccc

SEQ ID NO: 448172 - DNA, 30 bp, Artificial Sequence
  Synthetic oligonucleotide
aataagcgctaatgttaaatgctttgtccc

SEQ ID NO: 448173 - DNA, 30 bp, Artificial Sequence
  Synthetic oligonucleotide
gtgcggggcgccgagctccccggaattccc

SEQ ID NO: 448174 - DNA, 30 bp, Artificial Sequence
  Synthetic oligonucleotide
tgaatggtcaatcagtctgccatcattccc

SEQ ID NO: 448175 - DNA, 30 bp, Artificial Sequence
  Synthetic oligonucleotide
cagaagttcagagttctgaggagtattccc

SEQ ID NO: 448176 - DNA, 30 bp, Artificial Sequence
  Synthetic oligonucleotide
ggtattaaaggtgggtccagggcacttccc

SEQ ID NO: 448177 - DNA, 30 bp, Artificial Sequence
  Synthetic oligonucleotide
tccgcatcaggctctggcccggaccttccc

SEQ ID NO: 448178 - DNA, 30 bp, Artificial Sequence
  Synthetic oligonucleotide
taatgcgtagggtacaccgtccgccttccc

SEQ ID NO: 448179 - DNA, 30 bp, Artificial Sequence
  Synthetic oligonucleotide
gtcgtaaggatatcaatatataggcttccc

SEQ ID NO: 448180 - DNA, 30 bp, Artificial Sequence
  Synthetic oligonucleotide
ctctggccaggaagccaaagtatgcttccc

SEQ ID NO: 448181 - DNA, 30 bp, Artificial Sequence
  Synthetic oligonucleotide
accccgtcaaactcgcattgctttcttccc

SEQ ID NO: 448182 - DNA, 30 bp, Artificial Sequence
  Synthetic oligonucleotide
gtagatttttccccgcctggcacggttccc

SEQ ID NO: 448183 - DNA, 30 bp, Artificial Sequence
  Synthetic oligonucleotide
tagttaaaaagagtagcgatttcggttccc

SEQ ID NO: 448184 - DNA, 30 bp, Artificial Sequence
  Synthetic oligonucleotide
actcccgagtggcgcctttctttggttccc

SEQ ID NO: 448185 - DNA, 30 bp, Artificial Sequence
  Synthetic oligonucleotide
cacagagcgaacatgaacgcaggtgttccc

SEQ ID NO: 448186 - DNA, 30 bp, Artificial Sequence
  Synthetic oligonucleotide
gttctagaatggttatccggcgttgttccc

SEQ ID NO: 448187 - DNA, 30 bp, Artificial Sequence
  Synthetic oligonucleotide
agctcatccgggaaaccaaggaaatttccc

SEQ ID NO: 448188 - DNA, 30 bp, Artificial Sequence
  Synthetic oligonucleotide
cactcataggagctggttgccccgtttccc

SEQ ID NO: 448189 - DNA, 30 bp, Artificial Sequence
  Synthetic oligonucleotide
tcattcaggtaaacgcatgtgttgtttccc

SEQ ID NO: 448190 - DNA, 29 bp, Artificial Sequence
  Synthetic oligonucleotide
caagccgaatctgacccaattattttccc

SEQ ID NO: 448191 - DNA, 30 bp, Artificial Sequence
  Synthetic oligonucleotide
aaccgttatctggcacacatcccttttccc

SEQ ID NO: 448192 - DNA, 30 bp, Artificial Sequence
  Synthetic oligonucleotide
cgagcagcggttgtaggggttccaaaagcc

SEQ ID NO: 448193 - DNA, 30 bp, Artificial Sequence
  Synthetic oligonucleotide
aatataggaaggatcataatggacaaagcc

SEQ ID NO: 448194 - DNA, 30 bp, Artificial Sequence
  Synthetic oligonucleotide
gtgctaatttacgctgccacgggcaaagcc

SEQ ID NO: 448195 - DNA, 30 bp, Artificial Sequence
  Synthetic oligonucleotide
ggtactgaattggatgcagtactcaaagcc

SEQ ID NO: 448196 - DNA, 30 bp, Artificial Sequence
  Synthetic oligonucleotide
ttccagtaacgtattacctcgtataaagcc

SEQ ID NO: 448197 - DNA, 30 bp, Artificial Sequence
  Synthetic oligonucleotide
gtaaaggtgatcttcgctagacgccaagcc

SEQ ID NO: 448198 - DNA, 30 bp, Artificial Sequence
  Synthetic oligonucleotide
cactactggtctaggtacctgggccaagcc

SEQ ID NO: 448199 - DNA, 30 bp, Artificial Sequence
  Synthetic oligonucleotide
gtcaaaatttactgggaatagttgcaagcc

SEQ ID NO: 448200 - DNA, 30 bp, Artificial Sequence
  Synthetic oligonucleotide
aaaaatcttggggattcataacctcaagcc

SEQ ID NO: 448201 - DNA, 30 bp, Artificial Sequence
  Synthetic oligonucleotide
caagctaacaattagggcttggttcaagcc

SEQ ID NO: 448202 - DNA, 30 bp, Artificial Sequence
  Synthetic oligonucleotide
tttattaagaaacggtggaggatagaagcc

SEQ ID NO: 448203 - DNA, 30 bp, Artificial Sequence
  Synthetic oligonucleotide
ttcggatggtctgcacaggctgaggaagcc

SEQ ID NO: 448204 - DNA, 30 bp, Artificial Sequence
  Synthetic oligonucleotide
gcgttttttcaagcggatttaagataagcc

SEQ ID NO: 448205 - DNA, 30 bp, Artificial Sequence
  Synthetic oligonucleotide
taggacatataagcgatcgcagcctaagcc

SEQ ID NO: 448206 - DNA, 30 bp, Artificial Sequence
  Synthetic oligonucleotide
actgtaatagtcgctcggcgggtctaagcc

SEQ ID NO: 448207 - DNA, 30 bp, Artificial Sequence
  Synthetic oligonucleotide
cagcctgataggaagacgcgggattaagcc

SEQ ID NO: 448208 - DNA, 30 bp, Artificial Sequence
  Synthetic oligonucleotide
cccccgtctctgcatttgcgcgagacagcc

SEQ ID NO: 448209 - DNA, 30 bp, Artificial Sequence
  Synthetic oligonucleotide
taccagtaggctttattatttgagacagcc

SEQ ID NO: 448210 - DNA, 30 bp, Artificial Sequence
  Synthetic oligonucleotide
tccataattcttttttaggaaatgacagcc

SEQ ID NO: 448211 - DNA, 30 bp, Artificial Sequence
  Synthetic oligonucleotide
cgcagttagacggtgaagatatatacagcc

SEQ ID NO: 448212 - DNA, 30 bp, Artificial Sequence
  Synthetic oligonucleotide
cacagcttcatcaggcatgattgtacagcc

SEQ ID NO: 448213 - DNA, 30 bp, Artificial Sequence
  Synthetic oligonucleotide
cacccgttgaatttaacgattattacagcc

SEQ ID NO: 448214 - DNA, 30 bp, Artificial Sequence
  Synthetic oligonucleotide
tttggcaacatttactttctataaccagcc

SEQ ID NO: 448215 - DNA, 30 bp, Artificial Sequence
  Synthetic oligonucleotide
tccgattgggcttaacacctccagccagcc

SEQ ID NO: 448216 - DNA, 30 bp, Artificial Sequence
  Synthetic oligonucleotide
gctgattagcaactgtgaatgagtccagcc

SEQ ID NO: 448217 - DNA, 30 bp, Artificial Sequence
  Synthetic oligonucleotide
aaaggttaataaatgaactgcaaagcagcc

SEQ ID NO: 448218 - DNA, 30 bp, Artificial Sequence
  Synthetic oligonucleotide
gaaatggcgtgtcgactaatggatgcagcc

SEQ ID NO: 448219 - DNA, 31 bp, Artificial Sequence
  Synthetic oligonucleotide
tcgactccacgaataatttctaccctcagcc

SEQ ID NO: 448220 - DNA, 30 bp, Artificial Sequence
  Synthetic oligonucleotide
ttggacactgctggagagctgaagtcagcc

SEQ ID NO: 448221 - DNA, 30 bp, Artificial Sequence
  Synthetic oligonucleotide
tcatgtcgcataaggctatggtggtcagcc

SEQ ID NO: 448222 - DNA, 30 bp, Artificial Sequence
  Synthetic oligonucleotide
ttcatcactgtccattgttcaggttcagcc

SEQ ID NO: 448223 - DNA, 30 bp, Artificial Sequence
  Synthetic oligonucleotide
tgggttccatgtggaatattgtgaagagcc

SEQ ID NO: 448224 - DNA, 30 bp, Artificial Sequence
  Synthetic oligonucleotide
ggaacaactctgtcgtgttagttaagagcc

SEQ ID NO: 448225 - DNA, 30 bp, Artificial Sequence
  Synthetic oligonucleotide
aaaaggttctagatggcatataccagagcc

SEQ ID NO: 448226 - DNA, 30 bp, Artificial Sequence
  Synthetic oligonucleotide
gaatcgtaccgggccttgacgtcgagagcc

SEQ ID NO: 448227 - DNA, 30 bp, Artificial Sequence
  Synthetic oligonucleotide
ttcattattataaacccgaacgctagagcc

SEQ ID NO: 448228 - DNA, 30 bp, Artificial Sequence
  Synthetic oligonucleotide
gaaatacccactgtcaggcgccaacgagcc

SEQ ID NO: 448229 - DNA, 30 bp, Artificial Sequence
  Synthetic oligonucleotide
gcgcttcctattcactacatgtaacgagcc

SEQ ID NO: 448230 - DNA, 30 bp, Artificial Sequence
  Synthetic oligonucleotide
gtggagtaccagatcggtcaccgccgagcc

SEQ ID NO: 448231 - DNA, 30 bp, Artificial Sequence
  Synthetic oligonucleotide
tggttccgcgaggcagtttgcaatcgagcc

SEQ ID NO: 448232 - DNA, 30 bp, Artificial Sequence
  Synthetic oligonucleotide
ccggagctcatacgggtcatccttcgagcc

SEQ ID NO: 448233 - DNA, 30 bp, Artificial Sequence
  Synthetic oligonucleotide
gatgaggggcaccttgatcctcaaggagcc

SEQ ID NO: 448234 - DNA, 30 bp, Artificial Sequence
  Synthetic oligonucleotide
gatataggatgggcttacgtgggaggagcc

SEQ ID NO: 448235 - DNA, 30 bp, Artificial Sequence
  Synthetic oligonucleotide
cgcggcgctaatcttttgagcgtaggagcc

SEQ ID NO: 448236 - DNA, 30 bp, Artificial Sequence
  Synthetic oligonucleotide
atgagaaaggtttttgccactaatggagcc

SEQ ID NO: 448237 - DNA, 30 bp, Artificial Sequence
  Synthetic oligonucleotide
atgttggtagcgattctgaaggaatgagcc

SEQ ID NO: 448238 - DNA, 30 bp, Artificial Sequence
  Synthetic oligonucleotide
gataaccgcagacatcgacgacgatgagcc

SEQ ID NO: 448239 - DNA, 30 bp, Artificial Sequence
  Synthetic oligonucleotide
tctcaccgcttggctcgtactcgctgagcc

SEQ ID NO: 448240 - DNA, 30 bp, Artificial Sequence
  Synthetic oligonucleotide
gtggcttgttttccggaccttgtctgagcc

SEQ ID NO: 448241 - DNA, 30 bp, Artificial Sequence
  Synthetic oligonucleotide
ttcatttgcctcccgaaatattggtgagcc

SEQ ID NO: 448242 - DNA, 30 bp, Artificial Sequence
  Synthetic oligonucleotide
tattggccaatactggagtcggattgagcc

SEQ ID NO: 448243 - DNA, 30 bp, Artificial Sequence
  Synthetic oligonucleotide
tatgagtccacgttccatcgatattgagcc

SEQ ID NO: 448244 - DNA, 30 bp, Artificial Sequence
  Synthetic oligonucleotide
ttaaaatgatcacgctaatttaaaatagcc

SEQ ID NO: 448245 - DNA, 30 bp, Artificial Sequence
  Synthetic oligonucleotide
gcattatcccactcgatttaagaaatagcc

SEQ ID NO: 448246 - DNA, 30 bp, Artificial Sequence
  Synthetic oligonucleotide
taccagatacttacgaaccgctcaatagcc

SEQ ID NO: 448247 - DNA, 30 bp, Artificial Sequence
  Synthetic oligonucleotide
ggttggaggtaccaagttgttaacatagcc

SEQ ID NO: 448248 - DNA, 30 bp, Artificial Sequence
  Synthetic oligonucleotide
gagcgagaacttgtagatacacgcatagcc

SEQ ID NO: 448249 - DNA, 30 bp, Artificial Sequence
  Synthetic oligonucleotide
gatgcttcgtgcagccgggaggtcatagcc

SEQ ID NO: 448250 - DNA, 30 bp, Artificial Sequence
  Synthetic oligonucleotide
aaaactcgcaaaagtgtagtatatatagcc

SEQ ID NO: 448251 - DNA, 30 bp, Artificial Sequence
  Synthetic oligonucleotide
tgaatattgtataaagaatagactatagcc

SEQ ID NO: 448252 - DNA, 30 bp, Artificial Sequence
  Synthetic oligonucleotide
ccgccatgatcgctctggccatctatagcc

SEQ ID NO: 448253 - DNA, 30 bp, Artificial Sequence
  Synthetic oligonucleotide
ctgtgggtaagtattttcccgtctgtagcc

SEQ ID NO: 448254 - DNA, 30 bp, Artificial Sequence
  Synthetic oligonucleotide
aaaactgagtaccaggccattagtgtagcc

SEQ ID NO: 448255 - DNA, 30 bp, Artificial Sequence
  Synthetic oligonucleotide
aacacgccaggttctcaagtccgtgtagcc

SEQ ID NO: 448256 - DNA, 30 bp, Artificial Sequence
  Synthetic oligonucleotide
aatatctcccaatcctcatcgagattagcc

SEQ ID NO: 448257 - DNA, 30 bp, Artificial Sequence
  Synthetic oligonucleotide
ctcctgttgaggatccatatcaacttagcc

SEQ ID NO: 448258 - DNA, 30 bp, Artificial Sequence
  Synthetic oligonucleotide
tggccccttacattcggatacgacttagcc

SEQ ID NO: 448259 - DNA, 30 bp, Artificial Sequence
  Synthetic oligonucleotide
tttcctgtcgcgtgcgctcattccttagcc

SEQ ID NO: 448260 - DNA, 30 bp, Artificial Sequence
  Synthetic oligonucleotide
agcgggtagatagagctctcttagttagcc

SEQ ID NO: 448261 - DNA, 30 bp, Artificial Sequence
  Synthetic oligonucleotide
tggtttccgcaggtagacctagatttagcc

SEQ ID NO: 448262 - DNA, 30 bp, Artificial Sequence
  Synthetic oligonucleotide
gctcaatcctgtcgattcagcgctttagcc

SEQ ID NO: 448263 - DNA, 30 bp, Artificial Sequence
  Synthetic oligonucleotide
cctattgctaaagattgttcgagaaacgcc

SEQ ID NO: 448264 - DNA, 30 bp, Artificial Sequence
  Synthetic oligonucleotide
gcactctcaagcccattaatgcgaaacgcc

SEQ ID NO: 448265 - DNA, 30 bp, Artificial Sequence
  Synthetic oligonucleotide
attttgagttggggcggaggcgggaacgcc

SEQ ID NO: 448266 - DNA, 30 bp, Artificial Sequence
  Synthetic oligonucleotide
tcggccccattctatgtttgtgggaacgcc

SEQ ID NO: 448267 - DNA, 30 bp, Artificial Sequence
  Synthetic oligonucleotide
tgcgacataggccgggtatctttgaacgcc

SEQ ID NO: 448268 - DNA, 30 bp, Artificial Sequence
  Synthetic oligonucleotide
caagcctcgtaagggattttttataacgcc

SEQ ID NO: 448269 - DNA, 30 bp, Artificial Sequence
  Synthetic oligonucleotide
agccctctcgaactcgcagtaactaacgcc

SEQ ID NO: 448270 - DNA, 30 bp, Artificial Sequence
  Synthetic oligonucleotide
gttccttaaccaccacaatttaaacacgcc

SEQ ID NO: 448271 - DNA, 30 bp, Artificial Sequence
  Synthetic oligonucleotide
ctggggccggtgcggttagctggacacgcc

SEQ ID NO: 448272 - DNA, 31 bp, Artificial Sequence
  Synthetic oligonucleotide
gagcgcgaggcggaagctgacccgccacgcc

SEQ ID NO: 448273 - DNA, 30 bp, Artificial Sequence
  Synthetic oligonucleotide
gtctagatggcgttgttattagtccacgcc

SEQ ID NO: 448274 - DNA, 30 bp, Artificial Sequence
  Synthetic oligonucleotide
agcatcatttcgcaacatgctgggcacgcc

SEQ ID NO: 448275 - DNA, 30 bp, Artificial Sequence
  Synthetic oligonucleotide
gctgacgtgcctgcagtcgatttagacgcc

SEQ ID NO: 448276 - DNA, 30 bp, Artificial Sequence
  Synthetic oligonucleotide
aatgcgtgcaactgggctttcgacgacgcc

SEQ ID NO: 448277 - DNA, 30 bp, Artificial Sequence
  Synthetic oligonucleotide
ctagtatcaccagataatttggacgacgcc

SEQ ID NO: 448278 - DNA, 30 bp, Artificial Sequence
  Synthetic oligonucleotide
gaccagaatcccgggcgcaagcgggacgcc

SEQ ID NO: 448279 - DNA, 30 bp, Artificial Sequence
  Synthetic oligonucleotide
gatgaccttgggaagagcgaaatggacgcc

SEQ ID NO: 448280 - DNA, 30 bp, Artificial Sequence
  Synthetic oligonucleotide
gggtctcccgagagttacaaggtggacgcc

SEQ ID NO: 448281 - DNA, 30 bp, Artificial Sequence
  Synthetic oligonucleotide
ctgcacgcctaaacgttgtccttggacgcc

SEQ ID NO: 448282 - DNA, 30 bp, Artificial Sequence
  Synthetic oligonucleotide
ttagcccgctttgagtaggtcgtatacgcc

SEQ ID NO: 448283 - DNA, 30 bp, Artificial Sequence
  Synthetic oligonucleotide
ttggggtttagtccccggttgggctacgcc

SEQ ID NO: 448284 - DNA, 30 bp, Artificial Sequence
  Synthetic oligonucleotide
ataaagtgtgcgtcgatgacctgctacgcc

SEQ ID NO: 448285 - DNA, 30 bp, Artificial Sequence
  Synthetic oligonucleotide
taaaaattgatctgtacgacggggtacgcc

SEQ ID NO: 448286 - DNA, 30 bp, Artificial Sequence
  Synthetic oligonucleotide
gttcccaaccagggctttaataattacgcc

SEQ ID NO: 448287 - DNA, 30 bp, Artificial Sequence
  Synthetic oligonucleotide
ggttggccgagcatacgccccacttacgcc

SEQ ID NO: 448288 - DNA, 30 bp, Artificial Sequence
  Synthetic oligonucleotide
gttcacccagcaggaagaacgccttacgcc

SEQ ID NO: 448289 - DNA, 30 bp, Artificial Sequence
  Synthetic oligonucleotide
taacagccatttccacacagcgaaaccgcc

SEQ ID NO: 448290 - DNA, 30 bp, Artificial Sequence
  Synthetic oligonucleotide
atatttcaaactcacttggggctaaccgcc

SEQ ID NO: 448291 - DNA, 30 bp, Artificial Sequence
  Synthetic oligonucleotide
cacgagatcagccaggcgtaggccaccgcc

SEQ ID NO: 448292 - DNA, 30 bp, Artificial Sequence
  Synthetic oligonucleotide
ccccacagcccttatatgtctacgaccgcc

SEQ ID NO: 448293 - DNA, 28 bp, Artificial Sequence
  Synthetic oligonucleotide
gcggggtacgctcgcaagcccgaccgcc

SEQ ID NO: 448294 - DNA, 30 bp, Artificial Sequence
  Synthetic oligonucleotide
atcaataacatcggtgaccgttctaccgcc

SEQ ID NO: 448295 - DNA, 30 bp, Artificial Sequence
  Synthetic oligonucleotide
gcggtgcaagcgcactcgcgcgttaccgcc

SEQ ID NO: 448296 - DNA, 30 bp, Artificial Sequence
  Synthetic oligonucleotide
agaaccttcattgtgtctttttgacccgcc

SEQ ID NO: 448297 - DNA, 30 bp, Artificial Sequence
  Synthetic oligonucleotide
agcaggcccgagtactgtaatctacccgcc

SEQ ID NO: 448298 - DNA, 30 bp, Artificial Sequence
  Synthetic oligonucleotide
gaggcgtgcgcaatctgtttcgggcccgcc

SEQ ID NO: 448299 - DNA, 31 bp, Artificial Sequence
  Synthetic oligonucleotide
ggagtggatttgcaatagaagggctcccgcc

SEQ ID NO: 448300 - DNA, 30 bp, Artificial Sequence
  Synthetic oligonucleotide
gccgcgcaatatcggcagcgtgttcccgcc

SEQ ID NO: 448301 - DNA, 30 bp, Artificial Sequence
  Synthetic oligonucleotide
agtctagaaacggctttcgtattagccgcc

SEQ ID NO: 448302 - DNA, 30 bp, Artificial Sequence
  Synthetic oligonucleotide
ggcagcggtctagtataatgcgatgccgcc

SEQ ID NO: 448303 - DNA, 30 bp, Artificial Sequence
  Synthetic oligonucleotide
agtttttagagatccagaacgtgatccgcc

SEQ ID NO: 448304 - DNA, 30 bp, Artificial Sequence
  Synthetic oligonucleotide
attgaatgtcacttcgacgaccaaagcgcc

SEQ ID NO: 448305 - DNA, 30 bp, Artificial Sequence
  Synthetic oligonucleotide
ttactagaatcgccgtttaagcgaagcgcc

SEQ ID NO: 448306 - DNA, 30 bp, Artificial Sequence
  Synthetic oligonucleotide
gcctaattcctctgagacagcggaagcgcc

SEQ ID NO: 448307 - DNA, 30 bp, Artificial Sequence
  Synthetic oligonucleotide
cgacggagccgaggtttgcgtctcagcgcc

SEQ ID NO: 448308 - DNA, 28 bp, Artificial Sequence
  Synthetic oligonucleotide
ctagtatccctacgggatatggagcgcc

SEQ ID NO: 448309 - DNA, 30 bp, Artificial Sequence
  Synthetic oligonucleotide
cgtctctgacagtctaacggttgacgcgcc

SEQ ID NO: 448310 - DNA, 30 bp, Artificial Sequence
  Synthetic oligonucleotide
tggtggcatgaaactgcagaggtacgcgcc

SEQ ID NO: 448311 - DNA, 30 bp, Artificial Sequence
  Synthetic oligonucleotide
tgcacaagcgacacagcaagggggcgcgcc

SEQ ID NO: 448312 - DNA, 30 bp, Artificial Sequence
  Synthetic oligonucleotide
gcctatccctaccatacgcactatcgcgcc

SEQ ID NO: 448313 - DNA, 30 bp, Artificial Sequence
  Synthetic oligonucleotide
acggaagcccggggctcgtgacgtcgcgcc

SEQ ID NO: 448314 - DNA, 30 bp, Artificial Sequence
  Synthetic oligonucleotide
gcgctgcaggaacctaagcagtacggcgcc

SEQ ID NO: 448315 - DNA, 30 bp, Artificial Sequence
  Synthetic oligonucleotide
aggatttgcgccagtctacagagcggcgcc

SEQ ID NO: 448316 - DNA, 30 bp, Artificial Sequence
  Synthetic oligonucleotide
aaggcgcacttagctcacaggcgcggcgcc

SEQ ID NO: 448317 - DNA, 30 bp, Artificial Sequence
  Synthetic oligonucleotide
gcccgcagcaatcaagtcggtcagggcgcc

SEQ ID NO: 448318 - DNA, 30 bp, Artificial Sequence
  Synthetic oligonucleotide
ctactgttcccttttctcacgctgggcgcc

SEQ ID NO: 448319 - DNA, 30 bp, Artificial Sequence
  Synthetic oligonucleotide
ctgagcgtgatgttattgttaaatggcgcc

SEQ ID NO: 448320 - DNA, 30 bp, Artificial Sequence
  Synthetic oligonucleotide
agcgaaacccacgaattttgttctggcgcc

SEQ ID NO: 448321 - DNA, 30 bp, Artificial Sequence
  Synthetic oligonucleotide
cgtggcccgagacgcgggtaacgtggcgcc

SEQ ID NO: 448322 - DNA, 30 bp, Artificial Sequence
  Synthetic oligonucleotide
gattacggtatttccaccggttactgcgcc

SEQ ID NO: 448323 - DNA, 30 bp, Artificial Sequence
  Synthetic oligonucleotide
gaagacgagtttaggcccgctgtgtgcgcc

SEQ ID NO: 448324 - DNA, 30 bp, Artificial Sequence
  Synthetic oligonucleotide
aacagcaacccgaatggaagagcttgcgcc

SEQ ID NO: 448325 - DNA, 30 bp, Artificial Sequence
  Synthetic oligonucleotide
ggatgtcaccaggcgagctacggaatcgcc

SEQ ID NO: 448326 - DNA, 30 bp, Artificial Sequence
  Synthetic oligonucleotide
agatttgtcaaatagtctggtggaatcgcc

SEQ ID NO: 448327 - DNA, 30 bp, Artificial Sequence
  Synthetic oligonucleotide
tgttcgccggttaacaggcactgaatcgcc

SEQ ID NO: 448328 - DNA, 30 bp, Artificial Sequence
  Synthetic oligonucleotide
gtacttaaggacttaggcccaggcatcgcc

SEQ ID NO: 448329 - DNA, 29 bp, Artificial Sequence
  Synthetic oligonucleotide
cactgaggatcggcagataggctctcgcc

SEQ ID NO: 448330 - DNA, 30 bp, Artificial Sequence
  Synthetic oligonucleotide
aatgtccttcaagaaagttcatgtctcgcc

SEQ ID NO: 448331 - DNA, 30 bp, Artificial Sequence
  Synthetic oligonucleotide
tatctggcctagtggtatgccgttctcgcc

SEQ ID NO: 448332 - DNA, 30 bp, Artificial Sequence
  Synthetic oligonucleotide
tatgaggggatatataagaactcagtcgcc

SEQ ID NO: 448333 - DNA, 30 bp, Artificial Sequence
  Synthetic oligonucleotide
cttcaggtattttgacagagaatagtcgcc

SEQ ID NO: 448334 - DNA, 30 bp, Artificial Sequence
  Synthetic oligonucleotide
aggccgtatgacgctcacagcatagtcgcc

SEQ ID NO: 448335 - DNA, 30 bp, Artificial Sequence
  Synthetic oligonucleotide
aaaggcacccacgtttgtaatagggtcgcc

SEQ ID NO: 448336 - DNA, 30 bp, Artificial Sequence
  Synthetic oligonucleotide
atcatgggccctccgttcatacatgtcgcc

SEQ ID NO: 448337 - DNA, 30 bp, Artificial Sequence
  Synthetic oligonucleotide
gaataatagttagggcttccaaaattcgcc

SEQ ID NO: 448338 - DNA, 30 bp, Artificial Sequence
  Synthetic oligonucleotide
acctggatgggacttaagctggccttcgcc

SEQ ID NO: 448339 - DNA, 30 bp, Artificial Sequence
  Synthetic oligonucleotide
aactgccttggtgtcgcggaacgcttcgcc

SEQ ID NO: 448340 - DNA, 30 bp, Artificial Sequence
  Synthetic oligonucleotide
gtatgtgttacgggattatatagtttcgcc

SEQ ID NO: 448341 - DNA, 30 bp, Artificial Sequence
  Synthetic oligonucleotide
ttcagccctaccgtatcaacgaaaaaggcc

SEQ ID NO: 448342 - DNA, 30 bp, Artificial Sequence
  Synthetic oligonucleotide
tgaatttcgttatatttattaggcaaggcc

SEQ ID NO: 448343 - DNA, 30 bp, Artificial Sequence
  Synthetic oligonucleotide
ctccggaggctctttcagatttgcaaggcc

SEQ ID NO: 448344 - DNA, 30 bp, Artificial Sequence
  Synthetic oligonucleotide
gtcttaagtcctgttggtggaatcaaggcc

SEQ ID NO: 448345 - DNA, 30 bp, Artificial Sequence
  Synthetic oligonucleotide
ccccgtacgtgtttccaaacaaagaaggcc

SEQ ID NO: 448346 - DNA, 30 bp, Artificial Sequence
  Synthetic oligonucleotide
aaaaggtcggcgccggggcggtcgaaggcc

SEQ ID NO: 448347 - DNA, 30 bp, Artificial Sequence
  Synthetic oligonucleotide
tgtggcagcctagatatattgtcgaaggcc

SEQ ID NO: 448348 - DNA, 30 bp, Artificial Sequence
  Synthetic oligonucleotide
gttgaactgcccactgacggtttgaaggcc

SEQ ID NO: 448349 - DNA, 30 bp, Artificial Sequence
  Synthetic oligonucleotide
ccgatagtttgacagggtcgttaacaggcc

SEQ ID NO: 448350 - DNA, 30 bp, Artificial Sequence
  Synthetic oligonucleotide
gagtatgggggatcttcaggttcgcaggcc

SEQ ID NO: 448351 - DNA, 30 bp, Artificial Sequence
  Synthetic oligonucleotide
gtgaaagtccggacttggttcgggcaggcc

SEQ ID NO: 448352 - DNA, 30 bp, Artificial Sequence
  Synthetic oligonucleotide
ccaaccggagtattagacctttgtcaggcc

SEQ ID NO: 448353 - DNA, 30 bp, Artificial Sequence
  Synthetic oligonucleotide
taagatgttatgcgaacgggcacagaggcc

SEQ ID NO: 448354 - DNA, 30 bp, Artificial Sequence
  Synthetic oligonucleotide
ctctcacaggctgtacttcacaccgaggcc

SEQ ID NO: 448355 - DNA, 30 bp, Artificial Sequence
  Synthetic oligonucleotide
ctttacggcaattaagccggattcgaggcc

SEQ ID NO: 448356 - DNA, 30 bp, Artificial Sequence
  Synthetic oligonucleotide
acattgttgacgcattccgctctataggcc

SEQ ID NO: 448357 - DNA, 30 bp, Artificial Sequence
  Synthetic oligonucleotide
ctttctagacaccccgggggagtataggcc

SEQ ID NO: 448358 - DNA, 30 bp, Artificial Sequence
  Synthetic oligonucleotide
ttgcccaactccactaggcgggacacggcc

SEQ ID NO: 448359 - DNA, 30 bp, Artificial Sequence
  Synthetic oligonucleotide
atttgactggccagcacacatagcacggcc

SEQ ID NO: 448360 - DNA, 30 bp, Artificial Sequence
  Synthetic oligonucleotide
gtgtgtactgagctacacctctagacggcc

SEQ ID NO: 448361 - DNA, 30 bp, Artificial Sequence
  Synthetic oligonucleotide
attcgcttcgtgaactacgaatggacggcc

SEQ ID NO: 448362 - DNA, 30 bp, Artificial Sequence
  Synthetic oligonucleotide
aatggtttcgcattccctttaggtacggcc

SEQ ID NO: 448363 - DNA, 30 bp, Artificial Sequence
  Synthetic oligonucleotide
tagcaggggtcgaaacttattacaccggcc

SEQ ID NO: 448364 - DNA, 30 bp, Artificial Sequence
  Synthetic oligonucleotide
tgaattctacggtgggctcattgaccggcc

SEQ ID NO: 448365 - DNA, 30 bp, Artificial Sequence
  Synthetic oligonucleotide
gactcaacagatcgaaaaacggtcccggcc

SEQ ID NO: 448366 - DNA, 30 bp, Artificial Sequence
  Synthetic oligonucleotide
gtccaacgttttcgaggaccgcatccggcc

SEQ ID NO: 448367 - DNA, 30 bp, Artificial Sequence
  Synthetic oligonucleotide
atgcaagggaccttcaggcgttaagcggcc

SEQ ID NO: 448368 - DNA, 30 bp, Artificial Sequence
  Synthetic oligonucleotide
gtatttgttgcgtagtcacgtagagcggcc

SEQ ID NO: 448369 - DNA, 30 bp, Artificial Sequence
  Synthetic oligonucleotide
tttatggggatgggttttctctgcgcggcc

SEQ ID NO: 448370 - DNA, 30 bp, Artificial Sequence
  Synthetic oligonucleotide
gctatatcgttcgtacggatcatcgcggcc

SEQ ID NO: 448371 - DNA, 30 bp, Artificial Sequence
  Synthetic oligonucleotide
ataaagcgctttttattggttatcgcggcc

SEQ ID NO: 448372 - DNA, 30 bp, Artificial Sequence
  Synthetic oligonucleotide
ctcccatgaatttccgcacggaaggcggcc

SEQ ID NO: 448373 - DNA, 30 bp, Artificial Sequence
  Synthetic oligonucleotide
cctcaaccgtacatgtgacgcacatcggcc

SEQ ID NO: 448374 - DNA, 30 bp, Artificial Sequence
  Synthetic oligonucleotide
gcaacactattatctaacatgacatcggcc

SEQ ID NO: 448375 - DNA, 30 bp, Artificial Sequence
  Synthetic oligonucleotide
ctgggaggccagccgaatgaaatatcggcc

SEQ ID NO: 448376 - DNA, 30 bp, Artificial Sequence
  Synthetic oligonucleotide
cattacccggaatcgggtcgacactcggcc

SEQ ID NO: 448377 - DNA, 30 bp, Artificial Sequence
  Synthetic oligonucleotide
ctgcgaggtaagaaccggagctcgtcggcc

SEQ ID NO: 448378 - DNA, 30 bp, Artificial Sequence
  Synthetic oligonucleotide
atggttatgatattacattcagattcggcc

SEQ ID NO: 448379 - DNA, 30 bp, Artificial Sequence
  Synthetic oligonucleotide
aggctaaagggacggcagcgtagttcggcc

SEQ ID NO: 448380 - DNA, 30 bp, Artificial Sequence
  Synthetic oligonucleotide
ttgccacgtattccgtgcgccatttcggcc

SEQ ID NO: 448381 - DNA, 30 bp, Artificial Sequence
  Synthetic oligonucleotide
tgagtaagaatactaaaaaatgtaagggcc

SEQ ID NO: 448382 - DNA, 30 bp, Artificial Sequence
  Synthetic oligonucleotide
tatttcccccagagcgttaccagcagggcc

SEQ ID NO: 448383 - DNA, 30 bp, Artificial Sequence
  Synthetic oligonucleotide
cgaaaacgggatcggagtactggcagggcc

SEQ ID NO: 448384 - DNA, 30 bp, Artificial Sequence
  Synthetic oligonucleotide
gtagatacccagatcgtttgcgtcagggcc

SEQ ID NO: 448385 - DNA, 30 bp, Artificial Sequence
  Synthetic oligonucleotide
gtgtgtgatcgtagttctcgaaggagggcc

SEQ ID NO: 448386 - DNA, 30 bp, Artificial Sequence
  Synthetic oligonucleotide
cgaagataacccgactttgtattgagggcc

SEQ ID NO: 448387 - DNA, 30 bp, Artificial Sequence
  Synthetic oligonucleotide
tacggtagtggacaacgtagctctagggcc

SEQ ID NO: 448388 - DNA, 30 bp, Artificial Sequence
  Synthetic oligonucleotide
agcccgtccgacgagcttataacgcgggcc

SEQ ID NO: 448389 - DNA, 30 bp, Artificial Sequence
  Synthetic oligonucleotide
caatgctctacgttcacatatgatcgggcc

SEQ ID NO: 448390 - DNA, 30 bp, Artificial Sequence
  Synthetic oligonucleotide
gctacctgcgggctcgcttaggaaggggcc

SEQ ID NO: 448391 - DNA, 30 bp, Artificial Sequence
  Synthetic oligonucleotide
tacaaaagctatcttgcccctgtaggggcc

SEQ ID NO: 448392 - DNA, 30 bp, Artificial Sequence
  Synthetic oligonucleotide
atcataaagattcgacctcagcacggggcc

SEQ ID NO: 448393 - DNA, 30 bp, Artificial Sequence
  Synthetic oligonucleotide
atggccacggaccaattgaagccgggggcc

SEQ ID NO: 448394 - DNA, 30 bp, Artificial Sequence
  Synthetic oligonucleotide
gtgctggctgtccaatctggttggggggcc

SEQ ID NO: 448395 - DNA, 30 bp, Artificial Sequence
  Synthetic oligonucleotide
ccgatttcataacatgcgagcgtgggggcc

SEQ ID NO: 448396 - DNA, 30 bp, Artificial Sequence
  Synthetic oligonucleotide
tatacctcaaatattcatttaaatggggcc

SEQ ID NO: 448397 - DNA, 30 bp, Artificial Sequence
  Synthetic oligonucleotide
gaacataaatatccacgaggatcatgggcc

SEQ ID NO: 448398 - DNA, 30 bp, Artificial Sequence
  Synthetic oligonucleotide
ggactttcaaccatgggttgaccctgggcc

SEQ ID NO: 448399 - DNA, 30 bp, Artificial Sequence
  Synthetic oligonucleotide
atctcgatgcctctcggatggagctgggcc

SEQ ID NO: 448400 - DNA, 30 bp, Artificial Sequence
  Synthetic oligonucleotide
cgttggggagctggcagcactagctgggcc

SEQ ID NO: 448401 - DNA, 30 bp, Artificial Sequence
  Synthetic oligonucleotide
tacacgggggcagcggtgtcatagtgggcc

SEQ ID NO: 448402 - DNA, 30 bp, Artificial Sequence
  Synthetic oligonucleotide
agggcgagacacagtgggtggatgtgggcc

SEQ ID NO: 448403 - DNA, 30 bp, Artificial Sequence
  Synthetic oligonucleotide
tacctccggcaggggatggggttgtgggcc

SEQ ID NO: 448404 - DNA, 30 bp, Artificial Sequence
  Synthetic oligonucleotide
agccttatgtccctagcaacaatttgggcc

SEQ ID NO: 448405 - DNA, 25 bp, Artificial Sequence
  Synthetic oligonucleotide
cacttccaggccgttgagaatggcc

SEQ ID NO: 448406 - DNA, 30 bp, Artificial Sequence
  Synthetic oligonucleotide
gttagcgtgagagccactgacggaatggcc

SEQ ID NO: 448407 - DNA, 30 bp, Artificial Sequence
  Synthetic oligonucleotide
acagcctgaggcttttcaaatatcatggcc

SEQ ID NO: 448408 - DNA, 30 bp, Artificial Sequence
  Synthetic oligonucleotide
agagtgaaatggccagcccgtaagatggcc

SEQ ID NO: 448409 - DNA, 30 bp, Artificial Sequence
  Synthetic oligonucleotide
gaagtccatgccatctgatacgctatggcc

SEQ ID NO: 448410 - DNA, 30 bp, Artificial Sequence
  Synthetic oligonucleotide
gtatgctcatattcagagtccaaactggcc

SEQ ID NO: 448411 - DNA, 29 bp, Artificial Sequence
  Synthetic oligonucleotide
cggtcggggggggggtaaggtgcctggcc

SEQ ID NO: 448412 - DNA, 30 bp, Artificial Sequence
  Synthetic oligonucleotide
tgttttcattagtagagttaggagctggcc

SEQ ID NO: 448413 - DNA, 30 bp, Artificial Sequence
  Synthetic oligonucleotide
acacaaagaaccgccgttgtacggctggcc

SEQ ID NO: 448414 - DNA, 30 bp, Artificial Sequence
  Synthetic oligonucleotide
atagcgacgggactggcacttgaagtggcc

SEQ ID NO: 448415 - DNA, 30 bp, Artificial Sequence
  Synthetic oligonucleotide
cttgggacctatgccgataccctcgtggcc

SEQ ID NO: 448416 - DNA, 30 bp, Artificial Sequence
  Synthetic oligonucleotide
gttgattcactccaccctacgcgggtggcc

SEQ ID NO: 448417 - DNA, 30 bp, Artificial Sequence
  Synthetic oligonucleotide
gtaatgtcgggttctcactgcttggtggcc

SEQ ID NO: 448418 - DNA, 30 bp, Artificial Sequence
  Synthetic oligonucleotide
gtgcaatatcaagatcacgttagtgtggcc

SEQ ID NO: 448419 - DNA, 30 bp, Artificial Sequence
  Synthetic oligonucleotide
gggaagcaccgcgcaggtaagaaattggcc

SEQ ID NO: 448420 - DNA, 30 bp, Artificial Sequence
  Synthetic oligonucleotide
cgtcatcttggacggcagtaaccattggcc

SEQ ID NO: 448421 - DNA, 30 bp, Artificial Sequence
  Synthetic oligonucleotide
ttcaggcatccattgtgtgtcatattggcc

SEQ ID NO: 448422 - DNA, 30 bp, Artificial Sequence
  Synthetic oligonucleotide
tgcgggttcacacggtgagcggtattggcc

SEQ ID NO: 448423 - DNA, 30 bp, Artificial Sequence
  Synthetic oligonucleotide
tcgaggcatagatatgtgggatacttggcc

SEQ ID NO: 448424 - DNA, 30 bp, Artificial Sequence
  Synthetic oligonucleotide
gttactaagtcagaaatagtcggcttggcc

SEQ ID NO: 448425 - DNA, 30 bp, Artificial Sequence
  Synthetic oligonucleotide
catcatacgggataaggccgaccgttggcc

SEQ ID NO: 448426 - DNA, 30 bp, Artificial Sequence
  Synthetic oligonucleotide
cgccatctggttggtctgcggcggttggcc

SEQ ID NO: 448427 - DNA, 30 bp, Artificial Sequence
  Synthetic oligonucleotide
aaatgtatgggcagtgagtgtgtgaatgcc

SEQ ID NO: 448428 - DNA, 30 bp, Artificial Sequence
  Synthetic oligonucleotide
tttaatagagcggaggacgccatacatgcc

SEQ ID NO: 448429 - DNA, 30 bp, Artificial Sequence
  Synthetic oligonucleotide
gagtacttggttctctgggacaaccatgcc

SEQ ID NO: 448430 - DNA, 30 bp, Artificial Sequence
  Synthetic oligonucleotide
tccgctgagaggtgcttactgaaccatgcc

SEQ ID NO: 448431 - DNA, 30 bp, Artificial Sequence
  Synthetic oligonucleotide
tcatgagccgtacaacgatgtccccatgcc

SEQ ID NO: 448432 - DNA, 30 bp, Artificial Sequence
  Synthetic oligonucleotide
ttggtatcagaaggtcatgcttgccatgcc

SEQ ID NO: 448433 - DNA, 30 bp, Artificial Sequence
  Synthetic oligonucleotide
tccttttggagacacgaataggagcatgcc

SEQ ID NO: 448434 - DNA, 30 bp, Artificial Sequence
  Synthetic oligonucleotide
gcccatccccgtaacgccgatacgcatgcc

SEQ ID NO: 448435 - DNA, 30 bp, Artificial Sequence
  Synthetic oligonucleotide
ttttcgctgtacccccaagtggatcatgcc

SEQ ID NO: 448436 - DNA, 31 bp, Artificial Sequence
  Synthetic oligonucleotide
gttctacggaaccggactcggacaggatgcc

SEQ ID NO: 448437 - DNA, 30 bp, Artificial Sequence
  Synthetic oligonucleotide
gtcaaaacacattcgggtgtgctggatgcc

SEQ ID NO: 448438 - DNA, 30 bp, Artificial Sequence
  Synthetic oligonucleotide
tgaccggattcttgctctgcgagtgatgcc

SEQ ID NO: 448439 - DNA, 30 bp, Artificial Sequence
  Synthetic oligonucleotide
cttcatatgggtgtatgtatacgtgatgcc

SEQ ID NO: 448440 - DNA, 30 bp, Artificial Sequence
  Synthetic oligonucleotide
ggtaatctgtcctggacatagtaatatgcc

SEQ ID NO: 448441 - DNA, 30 bp, Artificial Sequence
  Synthetic oligonucleotide
ccttaaacttgagagaaactctcatatgcc

SEQ ID NO: 448442 - DNA, 30 bp, Artificial Sequence
  Synthetic oligonucleotide
ggggccgtgcgtattgataagttatatgcc

SEQ ID NO: 448443 - DNA, 30 bp, Artificial Sequence
  Synthetic oligonucleotide
acatctttgttctccagggtcgtctatgcc

SEQ ID NO: 448444 - DNA, 30 bp, Artificial Sequence
  Synthetic oligonucleotide
ctgcacaggctacgtgggatggaaactgcc

SEQ ID NO: 448445 - DNA, 30 bp, Artificial Sequence
  Synthetic oligonucleotide
tatgagagaatgactataattataactgcc

SEQ ID NO: 448446 - DNA, 29 bp, Artificial Sequence
  Synthetic oligonucleotide
ggtctcagcatatttgggccctcactgcc

SEQ ID NO: 448447 - DNA, 30 bp, Artificial Sequence
  Synthetic oligonucleotide
gttattaatagtttccattcaaagactgcc

SEQ ID NO: 448448 - DNA, 30 bp, Artificial Sequence
  Synthetic oligonucleotide
acgtcagtacacgtttgttaagttactgcc

SEQ ID NO: 448449 - DNA, 30 bp, Artificial Sequence
  Synthetic oligonucleotide
aaaagaccatagaatctccttttacctgcc

SEQ ID NO: 448450 - DNA, 30 bp, Artificial Sequence
  Synthetic oligonucleotide
cgggtagttcagggcctccactctcctgcc

SEQ ID NO: 448451 - DNA, 30 bp, Artificial Sequence
  Synthetic oligonucleotide
gccaatgttacaggggtttgaagagctgcc

SEQ ID NO: 448452 - DNA, 30 bp, Artificial Sequence
  Synthetic oligonucleotide
gaactacccctataagccaacgacgctgcc

SEQ ID NO: 448453 - DNA, 30 bp, Artificial Sequence
  Synthetic oligonucleotide
cctttacggtgatagtgaacatccgctgcc

SEQ ID NO: 448454 - DNA, 30 bp, Artificial Sequence
  Synthetic oligonucleotide
ttatagggcagtgtaagtgttaaggctgcc

SEQ ID NO: 448455 - DNA, 30 bp, Artificial Sequence
  Synthetic oligonucleotide
caagcgtcggtgcagttgagttaatctgcc

SEQ ID NO: 448456 - DNA, 30 bp, Artificial Sequence
  Synthetic oligonucleotide
agctttgcaggtggctttgatcagtctgcc

SEQ ID NO: 448457 - DNA, 30 bp, Artificial Sequence
  Synthetic oligonucleotide
gaaggatcgcagtagcaacgactgtctgcc

SEQ ID NO: 448458 - DNA, 30 bp, Artificial Sequence
  Synthetic oligonucleotide
cgcttgacaacggggtataccctgtctgcc

SEQ ID NO: 448459 - DNA, 30 bp, Artificial Sequence
  Synthetic oligonucleotide
gccagacaccattccaccacccgttctgcc

SEQ ID NO: 448460 - DNA, 30 bp, Artificial Sequence
  Synthetic oligonucleotide
agtgcccctctatggacgcatgcaagtgcc

SEQ ID NO: 448461 - DNA, 30 bp, Artificial Sequence
  Synthetic oligonucleotide
gaggtcattatgaggcccgcttgaagtgcc

SEQ ID NO: 448462 - DNA, 30 bp, Artificial Sequence
  Synthetic oligonucleotide
ttgggactcccggcaggttgggcgagtgcc

SEQ ID NO: 448463 - DNA, 30 bp, Artificial Sequence
  Synthetic oligonucleotide
atgagtccctcctcctactttaggagtgcc

SEQ ID NO: 448464 - DNA, 30 bp, Artificial Sequence
  Synthetic oligonucleotide
gtattagctcactgcttgaccgtgagtgcc

SEQ ID NO: 448465 - DNA, 30 bp, Artificial Sequence
  Synthetic oligonucleotide
ggcgacgttcgtaggctcaggcctagtgcc

SEQ ID NO: 448466 - DNA, 30 bp, Artificial Sequence
  Synthetic oligonucleotide
aaacggatggcctttacataataacgtgcc

SEQ ID NO: 448467 - DNA, 30 bp, Artificial Sequence
  Synthetic oligonucleotide
agagtaattttgcgttctcagaagcgtgcc

SEQ ID NO: 448468 - DNA, 30 bp, Artificial Sequence
  Synthetic oligonucleotide
cagtaagttccgttgggtttcgatcgtgcc

SEQ ID NO: 448469 - DNA, 30 bp, Artificial Sequence
  Synthetic oligonucleotide
aaagcacctgttccaacctcaactcgtgcc

SEQ ID NO: 448470 - DNA, 30 bp, Artificial Sequence
  Synthetic oligonucleotide
aaattattgtttggcatatatactcgtgcc

SEQ ID NO: 448471 - DNA, 30 bp, Artificial Sequence
  Synthetic oligonucleotide
atatggcccggcgaagccgcgtttcgtgcc

SEQ ID NO: 448472 - DNA, 30 bp, Artificial Sequence
  Synthetic oligonucleotide
accaagtgagggcataattttctaggtgcc

SEQ ID NO: 448473 - DNA, 30 bp, Artificial Sequence
  Synthetic oligonucleotide
aggaatccatagccacctacatacggtgcc

SEQ ID NO: 448474 - DNA, 30 bp, Artificial Sequence
  Synthetic oligonucleotide
tgtcctctggcacgcacgaaacgcggtgcc

SEQ ID NO: 448475 - DNA, 30 bp, Artificial Sequence
  Synthetic oligonucleotide
catgttcaaatactgcctgtgcgcggtgcc

SEQ ID NO: 448476 - DNA, 30 bp, Artificial Sequence
  Synthetic oligonucleotide
acttttgacacccgacggcgactgggtgcc

SEQ ID NO: 448477 - DNA, 30 bp, Artificial Sequence
  Synthetic oligonucleotide
gtcatctgaaactgaccacggagtggtgcc

SEQ ID NO: 448478 - DNA, 30 bp, Artificial Sequence
  Synthetic oligonucleotide
tcggacccgggtatggtcgctttatgtgcc

SEQ ID NO: 448479 - DNA, 30 bp, Artificial Sequence
  Synthetic oligonucleotide
tttgtgaactttgatctggcttcctgtgcc

SEQ ID NO: 448480 - DNA, 30 bp, Artificial Sequence
  Synthetic oligonucleotide
tatatagactcgacagctctcggctgtgcc

SEQ ID NO: 448481 - DNA, 30 bp, Artificial Sequence
  Synthetic oligonucleotide
ttaatcctcactccggtaaatttgtgtgcc

SEQ ID NO: 448482 - DNA, 30 bp, Artificial Sequence
  Synthetic oligonucleotide
gtgcctttaaaggtgtctggactttgtgcc

SEQ ID NO: 448483 - DNA, 30 bp, Artificial Sequence
  Synthetic oligonucleotide
cagagtatgtgaggatcgtcccaaattgcc

SEQ ID NO: 448484 - DNA, 30 bp, Artificial Sequence
  Synthetic oligonucleotide
ctggttcagtaggtaactgggaacattgcc

SEQ ID NO: 448485 - DNA, 30 bp, Artificial Sequence
  Synthetic oligonucleotide
attttggttgaaaggcgaacggtcattgcc

SEQ ID NO: 448486 - DNA, 30 bp, Artificial Sequence
  Synthetic oligonucleotide
gcagtacgcagtatggtccgggcgattgcc

SEQ ID NO: 448487 - DNA, 30 bp, Artificial Sequence
  Synthetic oligonucleotide
gttaggtgccgcactgctcaagtgattgcc

SEQ ID NO: 448488 - DNA, 30 bp, Artificial Sequence
  Synthetic oligonucleotide
aacccgcgggaaatacgcaagtctattgcc

SEQ ID NO: 448489 - DNA, 30 bp, Artificial Sequence
  Synthetic oligonucleotide
cttgtcaagttcgccatggagctgcttgcc

SEQ ID NO: 448490 - DNA, 30 bp, Artificial Sequence
  Synthetic oligonucleotide
gagcaaacatggaacctgtcagttcttgcc

SEQ ID NO: 448491 - DNA, 30 bp, Artificial Sequence
  Synthetic oligonucleotide
cttgtcactcacccgcacaataacgttgcc

SEQ ID NO: 448492 - DNA, 30 bp, Artificial Sequence
  Synthetic oligonucleotide
gtagggacttggccggtatctgacgttgcc

SEQ ID NO: 448493 - DNA, 30 bp, Artificial Sequence
  Synthetic oligonucleotide
gcagcaagcacttagtgattagtcgttgcc

SEQ ID NO: 448494 - DNA, 30 bp, Artificial Sequence
  Synthetic oligonucleotide
atacagctcattacctaggttttggttgcc

SEQ ID NO: 448495 - DNA, 30 bp, Artificial Sequence
  Synthetic oligonucleotide
aggtttagacctcgtcattggtatgttgcc

SEQ ID NO: 448496 - DNA, 30 bp, Artificial Sequence
  Synthetic oligonucleotide
tacgctgaacacggatttacatgtgttgcc

SEQ ID NO: 448497 - DNA, 30 bp, Artificial Sequence
  Synthetic oligonucleotide
taccgatcatacgggggacgaaaatttgcc

SEQ ID NO: 448498 - DNA, 30 bp, Artificial Sequence
  Synthetic oligonucleotide
gatttcaagatcagagttctgccctttgcc

SEQ ID NO: 448499 - DNA, 30 bp, Artificial Sequence
  Synthetic oligonucleotide
actgaacgcgcttcgcgttttcattttgcc

SEQ ID NO: 448500 - DNA, 30 bp, Artificial Sequence
  Synthetic oligonucleotide
gcatctgccatagtccagattacttttgcc

SEQ ID NO: 448501 - DNA, 30 bp, Artificial Sequence
  Synthetic oligonucleotide
gctcggtccctttattaatctagttttgcc

SEQ ID NO: 448502 - DNA, 30 bp, Artificial Sequence
  Synthetic oligonucleotide
gtcaggggcgatgagtatgaacgcaaatcc

SEQ ID NO: 448503 - DNA, 30 bp, Artificial Sequence
  Synthetic oligonucleotide
ggcgcagagtcacatctttgtaagaaatcc

SEQ ID NO: 448504 - DNA, 30 bp, Artificial Sequence
  Synthetic oligonucleotide
ggcaatccggtaccgccgaattagaaatcc

SEQ ID NO: 448505 - DNA, 30 bp, Artificial Sequence
  Synthetic oligonucleotide
ggagtcagatcgtcacgtgggacgaaatcc

SEQ ID NO: 448506 - DNA, 30 bp, Artificial Sequence
  Synthetic oligonucleotide
gtccaatcctgtgtcctaggcgcgaaatcc

SEQ ID NO: 448507 - DNA, 30 bp, Artificial Sequence
  Synthetic oligonucleotide
aagtatttgccactttttaggtggaaatcc

SEQ ID NO: 448508 - DNA, 30 bp, Artificial Sequence
  Synthetic oligonucleotide
tagcatgagaacctccgtggtgtgaaatcc

SEQ ID NO: 448509 - DNA, 30 bp, Artificial Sequence
  Synthetic oligonucleotide
atcgatgcgccttccatgggtaataaatcc

SEQ ID NO: 448510 - DNA, 29 bp, Artificial Sequence
  Synthetic oligonucleotide
tattacagcacacacgagtttgtaaatcc

SEQ ID NO: 448511 - DNA, 30 bp, Artificial Sequence
  Synthetic oligonucleotide
gctggatggataataatcctgccacaatcc

SEQ ID NO: 448512 - DNA, 30 bp, Artificial Sequence
  Synthetic oligonucleotide
gtgttaatatagaatctatagtggcaatcc

SEQ ID NO: 448513 - DNA, 30 bp, Artificial Sequence
  Synthetic oligonucleotide
gctacgtctaagattttggtgagtcaatcc

SEQ ID NO: 448514 - DNA, 30 bp, Artificial Sequence
  Synthetic oligonucleotide
caccatacttccaattttatgcgtcaatcc

SEQ ID NO: 448515 - DNA, 30 bp, Artificial Sequence
  Synthetic oligonucleotide
gtattacttggtttcaatacgcacgaatcc

SEQ ID NO: 448516 - DNA, 30 bp, Artificial Sequence
  Synthetic oligonucleotide
aacttattgaggacctgtacacccgaatcc

SEQ ID NO: 448517 - DNA, 30 bp, Artificial Sequence
  Synthetic oligonucleotide
ttccctgcgggcctgaaaattcccgaatcc

SEQ ID NO: 448518 - DNA, 30 bp, Artificial Sequence
  Synthetic oligonucleotide
cgtgctcgcagtagcccgtatctcgaatcc

SEQ ID NO: 448519 - DNA, 30 bp, Artificial Sequence
  Synthetic oligonucleotide
aaccggactggaaccagacaccaggaatcc

SEQ ID NO: 448520 - DNA, 30 bp, Artificial Sequence
  Synthetic oligonucleotide
tgtatcgcgtttcgggtttgcgaggaatcc

SEQ ID NO: 448521 - DNA, 30 bp, Artificial Sequence
  Synthetic oligonucleotide
acatcatgtggtccgtgacccacggaatcc

SEQ ID NO: 448522 - DNA, 30 bp, Artificial Sequence
  Synthetic oligonucleotide
atgtggtatttccactccacattggaatcc

SEQ ID NO: 448523 - DNA, 30 bp, Artificial Sequence
  Synthetic oligonucleotide
gcggggttgagtttacaaaataatgaatcc

SEQ ID NO: 448524 - DNA, 30 bp, Artificial Sequence
  Synthetic oligonucleotide
ggttggacggtgcagctactacatgaatcc

SEQ ID NO: 448525 - DNA, 30 bp, Artificial Sequence
  Synthetic oligonucleotide
acagttgacaggagcagtggaagtgaatcc

SEQ ID NO: 448526 - DNA, 30 bp, Artificial Sequence
  Synthetic oligonucleotide
ctcgccaacctgtgcagacttcgtgaatcc

SEQ ID NO: 448527 - DNA, 30 bp, Artificial Sequence
  Synthetic oligonucleotide
gctacagagattttagtcctcgaataatcc

SEQ ID NO: 448528 - DNA, 30 bp, Artificial Sequence
  Synthetic oligonucleotide
ggttaccacttagcgtgtttaagataatcc

SEQ ID NO: 448529 - DNA, 30 bp, Artificial Sequence
  Synthetic oligonucleotide
tatgattcggagatattattgagataatcc

SEQ ID NO: 448530 - DNA, 30 bp, Artificial Sequence
  Synthetic oligonucleotide
tcaacccaacttttggggtgagtataatcc

SEQ ID NO: 448531 - DNA, 30 bp, Artificial Sequence
  Synthetic oligonucleotide
attatggtaaacagtgtgttcgggtaatcc

SEQ ID NO: 448532 - DNA, 30 bp, Artificial Sequence
  Synthetic oligonucleotide
ttcttttggttcgcgatataccattaatcc

SEQ ID NO: 448533 - DNA, 30 bp, Artificial Sequence
  Synthetic oligonucleotide
tgtatcatgcctggataattgacttaatcc

SEQ ID NO: 448534 - DNA, 30 bp, Artificial Sequence
  Synthetic oligonucleotide
aaagaaatattccacagacttggttaatcc

SEQ ID NO: 448535 - DNA, 30 bp, Artificial Sequence
  Synthetic oligonucleotide
tcatcatggtcaccgtgatcattttaatcc

SEQ ID NO: 448536 - DNA, 30 bp, Artificial Sequence
  Synthetic oligonucleotide
tctctgtatagatcggcaccccacacatcc

SEQ ID NO: 448537 - DNA, 30 bp, Artificial Sequence
  Synthetic oligonucleotide
gacataatgtttcagtattcgcacacatcc

SEQ ID NO: 448538 - DNA, 30 bp, Artificial Sequence
  Synthetic oligonucleotide
gggaccctgagggtgaatgttaccacatcc

SEQ ID NO: 448539 - DNA, 30 bp, Artificial Sequence
  Synthetic oligonucleotide
ccactatgtgtctttttttcccagacatcc

SEQ ID NO: 448540 - DNA, 30 bp, Artificial Sequence
  Synthetic oligonucleotide
ccctgggtgtgaatgtgtcttaatacatcc

SEQ ID NO: 448541 - DNA, 30 bp, Artificial Sequence
  Synthetic oligonucleotide
gaatggccagccaatgttgggtgaccatcc

SEQ ID NO: 448542 - DNA, 30 bp, Artificial Sequence
  Synthetic oligonucleotide
cgcaggggctgaatactttcgaccccatcc

SEQ ID NO: 448543 - DNA, 29 bp, Artificial Sequence
  Synthetic oligonucleotide
tgcattttggcagcggccccagcccatcc

SEQ ID NO: 448544 - DNA, 30 bp, Artificial Sequence
  Synthetic oligonucleotide
atacggttagctatacctgaaaagccatcc

SEQ ID NO: 448545 - DNA, 30 bp, Artificial Sequence
  Synthetic oligonucleotide
ctaataagagtgagcgggagtacgccatcc

SEQ ID NO: 448546 - DNA, 30 bp, Artificial Sequence
  Synthetic oligonucleotide
aaagtgggaggctttagtttacggccatcc

SEQ ID NO: 448547 - DNA, 30 bp, Artificial Sequence
  Synthetic oligonucleotide
aacctgcgggtttacagggccttgccatcc

SEQ ID NO: 448548 - DNA, 30 bp, Artificial Sequence
  Synthetic oligonucleotide
gaacgcttaattggctagagactagcatcc

SEQ ID NO: 448549 - DNA, 30 bp, Artificial Sequence
  Synthetic oligonucleotide
cactttggcgtttggagctggtgggcatcc

SEQ ID NO: 448550 - DNA, 30 bp, Artificial Sequence
  Synthetic oligonucleotide
ctctggcgcggtccgtatagaatggcatcc

SEQ ID NO: 448551 - DNA, 30 bp, Artificial Sequence
  Synthetic oligonucleotide
aacctgtaagcgatacatcatgctgcatcc

SEQ ID NO: 448552 - DNA, 30 bp, Artificial Sequence
  Synthetic oligonucleotide
gcaatttcgtagtcagtaccgtaatcatcc

SEQ ID NO: 448553 - DNA, 30 bp, Artificial Sequence
  Synthetic oligonucleotide
ggtttatgctttactgacaggctatcatcc

SEQ ID NO: 448554 - DNA, 30 bp, Artificial Sequence
  Synthetic oligonucleotide
tgctcggtactttgatattacagctcatcc

SEQ ID NO: 448555 - DNA, 30 bp, Artificial Sequence
  Synthetic oligonucleotide
ccatatcgcatgtgagtaagactctcatcc

SEQ ID NO: 448556 - DNA, 30 bp, Artificial Sequence
  Synthetic oligonucleotide
ggcagcaccttgtgcaatcacgtctcatcc

SEQ ID NO: 448557 - DNA, 30 bp, Artificial Sequence
  Synthetic oligonucleotide
aggggttacttctctaaatggcagtcatcc

SEQ ID NO: 448558 - DNA, 30 bp, Artificial Sequence
  Synthetic oligonucleotide
ttaatggggacatagctgagttattcatcc

SEQ ID NO: 448559 - DNA, 30 bp, Artificial Sequence
  Synthetic oligonucleotide
taaggttttatactactcactggttcatcc

SEQ ID NO: 448560 - DNA, 30 bp, Artificial Sequence
  Synthetic oligonucleotide
acaccgacaagtactacgcagaccagatcc

SEQ ID NO: 448561 - DNA, 30 bp, Artificial Sequence
  Synthetic oligonucleotide
ggttgtgaccgggaaagcaggggcagatcc

SEQ ID NO: 448562 - DNA, 30 bp, Artificial Sequence
  Synthetic oligonucleotide
ggtcattctgccatccgtcgagggagatcc

SEQ ID NO: 448563 - DNA, 30 bp, Artificial Sequence
  Synthetic oligonucleotide
aaggtgcatcttcgtctcacgcgtagatcc

SEQ ID NO: 448564 - DNA, 30 bp, Artificial Sequence
  Synthetic oligonucleotide
ttggtttaggtgcagccagttctacgatcc

SEQ ID NO: 448565 - DNA, 30 bp, Artificial Sequence
  Synthetic oligonucleotide
gttacaaggccattggttcactcgcgatcc

SEQ ID NO: 448566 - DNA, 30 bp, Artificial Sequence
  Synthetic oligonucleotide
cctaaccgattttggtaggcggcaggatcc

SEQ ID NO: 448567 - DNA, 30 bp, Artificial Sequence
  Synthetic oligonucleotide
gtccgcggtcagagggaagactgcggatcc

SEQ ID NO: 448568 - DNA, 30 bp, Artificial Sequence
  Synthetic oligonucleotide
tcactccccgggaagggaaatctcggatcc

SEQ ID NO: 448569 - DNA, 30 bp, Artificial Sequence
  Synthetic oligonucleotide
gccagaaatcatttaggatcttttggatcc

SEQ ID NO: 448570 - DNA, 30 bp, Artificial Sequence
  Synthetic oligonucleotide
ccctttttatgcactctgccgctatgatcc

SEQ ID NO: 448571 - DNA, 30 bp, Artificial Sequence
  Synthetic oligonucleotide
ctgaatttagtcgtgtgtgattactgatcc

SEQ ID NO: 448572 - DNA, 30 bp, Artificial Sequence
  Synthetic oligonucleotide
tataccctttaacgactatgtgaaatatcc

SEQ ID NO: 448573 - DNA, 30 bp, Artificial Sequence
  Synthetic oligonucleotide
cggtcaaggggtccctctttagcaatatcc

SEQ ID NO: 448574 - DNA, 30 bp, Artificial Sequence
  Synthetic oligonucleotide
gagcaatggaccatggccgcacccatatcc

SEQ ID NO: 448575 - DNA, 30 bp, Artificial Sequence
  Synthetic oligonucleotide
gagtgcagggacgctatctgtggcatatcc

SEQ ID NO: 448576 - DNA, 30 bp, Artificial Sequence
  Synthetic oligonucleotide
tctcttctttgtcattcgtctatcatatcc

SEQ ID NO: 448577 - DNA, 30 bp, Artificial Sequence
  Synthetic oligonucleotide
cagtctccttttacccggataaagatatcc

SEQ ID NO: 448578 - DNA, 30 bp, Artificial Sequence
  Synthetic oligonucleotide
aagtttccagaggagtaactacagatatcc

SEQ ID NO: 448579 - DNA, 30 bp, Artificial Sequence
  Synthetic oligonucleotide
agtgtagccctcgagaaggtgtagatatcc

SEQ ID NO: 448580 - DNA, 30 bp, Artificial Sequence
  Synthetic oligonucleotide
tagtatggtgatccattcttaccgatatcc

SEQ ID NO: 448581 - DNA, 30 bp, Artificial Sequence
  Synthetic oligonucleotide
gaaaggtccacttccaggccgatgatatcc

SEQ ID NO: 448582 - DNA, 30 bp, Artificial Sequence
  Synthetic oligonucleotide
gaccgttatagagattagtgaatactatcc

SEQ ID NO: 448583 - DNA, 30 bp, Artificial Sequence
  Synthetic oligonucleotide
aaaagatatggtggggccgtgcacctatcc

SEQ ID NO: 448584 - DNA, 30 bp, Artificial Sequence
  Synthetic oligonucleotide
caggttccttcccggctcagtgaagtatcc

SEQ ID NO: 448585 - DNA, 30 bp, Artificial Sequence
  Synthetic oligonucleotide
cgccggatctaccgtaaagtcatagtatcc

SEQ ID NO: 448586 - DNA, 30 bp, Artificial Sequence
  Synthetic oligonucleotide
cacattgatcagacaggaagtctagtatcc

SEQ ID NO: 448587 - DNA, 30 bp, Artificial Sequence
  Synthetic oligonucleotide
tggggtcaccactctcaggattccgtatcc

SEQ ID NO: 448588 - DNA, 30 bp, Artificial Sequence
  Synthetic oligonucleotide
tgcccctgggggcagctgtgaagcgtatcc

SEQ ID NO: 448589 - DNA, 30 bp, Artificial Sequence
  Synthetic oligonucleotide
acgtcgtttgatgtcgttaaagaggtatcc

SEQ ID NO: 448590 - DNA, 30 bp, Artificial Sequence
  Synthetic oligonucleotide
tgcatatcgtacttgtcgctcggggtatcc

SEQ ID NO: 448591 - DNA, 30 bp, Artificial Sequence
  Synthetic oligonucleotide
cctcgatatcatgggattataaatgtatcc

SEQ ID NO: 448592 - DNA, 30 bp, Artificial Sequence
  Synthetic oligonucleotide
aggttgttattggcagcggaggctgtatcc

SEQ ID NO: 448593 - DNA, 30 bp, Artificial Sequence
  Synthetic oligonucleotide
ggtgacctgtattacatgtaagttgtatcc

SEQ ID NO: 448594 - DNA, 30 bp, Artificial Sequence
  Synthetic oligonucleotide
ggcaaaccggttttaattgaatttgtatcc

SEQ ID NO: 448595 - DNA, 30 bp, Artificial Sequence
  Synthetic oligonucleotide
ttcaatcgtgattcacagtacagattatcc

SEQ ID NO: 448596 - DNA, 30 bp, Artificial Sequence
  Synthetic oligonucleotide
ccccgtcccgatttggtattgagattatcc

SEQ ID NO: 448597 - DNA, 30 bp, Artificial Sequence
  Synthetic oligonucleotide
ctgggtatgaagaattcgcagtgattatcc

SEQ ID NO: 448598 - DNA, 30 bp, Artificial Sequence
  Synthetic oligonucleotide
cacgttcgtggcagtccagactacttatcc

SEQ ID NO: 448599 - DNA, 30 bp, Artificial Sequence
  Synthetic oligonucleotide
gatctccgctggaccaatacgtcgttatcc

SEQ ID NO: 448600 - DNA, 30 bp, Artificial Sequence
  Synthetic oligonucleotide
atgttcaatactataagaggtaatttatcc

SEQ ID NO: 448601 - DNA, 30 bp, Artificial Sequence
  Synthetic oligonucleotide
gtaattactaatgtgtcggatgctttatcc

SEQ ID NO: 448602 - DNA, 30 bp, Artificial Sequence
  Synthetic oligonucleotide
cgtttggcatttgcagatacaggaaactcc

SEQ ID NO: 448603 - DNA, 30 bp, Artificial Sequence
  Synthetic oligonucleotide
caacgataatagtgaaacttcgtaaactcc

SEQ ID NO: 448604 - DNA, 30 bp, Artificial Sequence
  Synthetic oligonucleotide
aaaatccgattttttcacgccaacaactcc

SEQ ID NO: 448605 - DNA, 30 bp, Artificial Sequence
  Synthetic oligonucleotide
ttgcatgcagccgggttctgtgagaactcc

SEQ ID NO: 448606 - DNA, 30 bp, Artificial Sequence
  Synthetic oligonucleotide
tctcaaaaaccgaaagacggaattaactcc

SEQ ID NO: 448607 - DNA, 30 bp, Artificial Sequence
  Synthetic oligonucleotide
acccgtgtcacaggattttacgcacactcc

SEQ ID NO: 448608 - DNA, 30 bp, Artificial Sequence
  Synthetic oligonucleotide
actttaccggacatatactcctcacactcc

SEQ ID NO: 448609 - DNA, 30 bp, Artificial Sequence
  Synthetic oligonucleotide
gacactgcagggttagttgttggacactcc

SEQ ID NO: 448610 - DNA, 30 bp, Artificial Sequence
  Synthetic oligonucleotide
agatgttcaccggacgagattctacactcc

SEQ ID NO: 448611 - DNA, 30 bp, Artificial Sequence
  Synthetic oligonucleotide
atacttcgtatcgcgcaccgagagcactcc

SEQ ID NO: 448612 - DNA, 30 bp, Artificial Sequence
  Synthetic oligonucleotide
ttaacgagttctcaaattgtcctgcactcc

SEQ ID NO: 448613 - DNA, 30 bp, Artificial Sequence
  Synthetic oligonucleotide
tgatacggatggtcctcattcgaagactcc

SEQ ID NO: 448614 - DNA, 30 bp, Artificial Sequence
  Synthetic oligonucleotide
atttcgatgatatgaatttcgccagactcc

SEQ ID NO: 448615 - DNA, 30 bp, Artificial Sequence
  Synthetic oligonucleotide
attccgagtgtaatctctggaatggactcc

SEQ ID NO: 448616 - DNA, 30 bp, Artificial Sequence
  Synthetic oligonucleotide
aaatattgctacatgggaagatatgactcc

SEQ ID NO: 448617 - DNA, 30 bp, Artificial Sequence
  Synthetic oligonucleotide
gtattgttaatggtgcaaccctatgactcc

SEQ ID NO: 448618 - DNA, 30 bp, Artificial Sequence
  Synthetic oligonucleotide
gaacggcagacgtctagccgaaaatactcc

SEQ ID NO: 448619 - DNA, 30 bp, Artificial Sequence
  Synthetic oligonucleotide
tcatctactagacgtaacggctgatactcc

SEQ ID NO: 448620 - DNA, 30 bp, Artificial Sequence
  Synthetic oligonucleotide
aggcttctatgttgttgatgacactactcc

SEQ ID NO: 448621 - DNA, 30 bp, Artificial Sequence
  Synthetic oligonucleotide
cggttcgatcgatgtttaatctagtactcc

SEQ ID NO: 448622 - DNA, 30 bp, Artificial Sequence
  Synthetic oligonucleotide
tcaaagtttagtcagcgcgtttattactcc

SEQ ID NO: 448623 - DNA, 30 bp, Artificial Sequence
  Synthetic oligonucleotide
tggccatatgagaatgggccggtttactcc

SEQ ID NO: 448624 - DNA, 30 bp, Artificial Sequence
  Synthetic oligonucleotide
gcgcaggcatctcacgggtctataacctcc

SEQ ID NO: 448625 - DNA, 30 bp, Artificial Sequence
  Synthetic oligonucleotide
tcttaattaagtttacttacgtacacctcc

SEQ ID NO: 448626 - DNA, 30 bp, Artificial Sequence
  Synthetic oligonucleotide
gcttttgtgggacaatacatataaccctcc

SEQ ID NO: 448627 - DNA, 30 bp, Artificial Sequence
  Synthetic oligonucleotide
gagctaggagacgagctataggcagcctcc

SEQ ID NO: 448628 - DNA, 30 bp, Artificial Sequence
  Synthetic oligonucleotide
catctgagagcgtaaagggttgacgcctcc

SEQ ID NO: 448629 - DNA, 30 bp, Artificial Sequence
  Synthetic oligonucleotide
ataatcactgtgatgacccagttcgcctcc

SEQ ID NO: 448630 - DNA, 30 bp, Artificial Sequence
  Synthetic oligonucleotide
gcatgaggcatgaaatttttccaggcctcc

SEQ ID NO: 448631 - DNA, 30 bp, Artificial Sequence
  Synthetic oligonucleotide
gtacaccactttcacgcagtcgctgcctcc

SEQ ID NO: 448632 - DNA, 30 bp, Artificial Sequence
  Synthetic oligonucleotide
taagcgaaagccaaaccttgacttgcctcc

SEQ ID NO: 448633 - DNA, 30 bp, Artificial Sequence
  Synthetic oligonucleotide
acccgtgatgtattggatagagtctcctcc

SEQ ID NO: 448634 - DNA, 30 bp, Artificial Sequence
  Synthetic oligonucleotide
ttacctgatggacaaaggagctagtcctcc

SEQ ID NO: 448635 - DNA, 30 bp, Artificial Sequence
  Synthetic oligonucleotide
tttttgggacgtgggtagacgcattcctcc

SEQ ID NO: 448636 - DNA, 30 bp, Artificial Sequence
  Synthetic oligonucleotide
gctacgatcctggagggctggacaagctcc

SEQ ID NO: 448637 - DNA, 30 bp, Artificial Sequence
  Synthetic oligonucleotide
aaggcgacttccgctagcgatataagctcc

SEQ ID NO: 448638 - DNA, 30 bp, Artificial Sequence
  Synthetic oligonucleotide
cgcgttatacctgcggtggcactaagctcc

SEQ ID NO: 448639 - DNA, 30 bp, Artificial Sequence
  Synthetic oligonucleotide
acaatatttggtgctacgggacagagctcc

SEQ ID NO: 448640 - DNA, 30 bp, Artificial Sequence
  Synthetic oligonucleotide
tcatctggccgggtttaattttcgagctcc

SEQ ID NO: 448641 - DNA, 30 bp, Artificial Sequence
  Synthetic oligonucleotide
ggaggacgtatgcgtgatggcaatagctcc

SEQ ID NO: 448642 - DNA, 30 bp, Artificial Sequence
  Synthetic oligonucleotide
gtggtacagccgcattgattctgccgctcc

SEQ ID NO: 448643 - DNA, 30 bp, Artificial Sequence
  Synthetic oligonucleotide
ggtcgggcatactctctacacgagcgctcc

SEQ ID NO: 448644 - DNA, 30 bp, Artificial Sequence
  Synthetic oligonucleotide
cagaacgatagtctgagcgttgtgcgctcc

SEQ ID NO: 448645 - DNA, 30 bp, Artificial Sequence
  Synthetic oligonucleotide
gttctcactttggatgttggggttcgctcc

SEQ ID NO: 448646 - DNA, 30 bp, Artificial Sequence
  Synthetic oligonucleotide
tacgaagggaatctcctcgaaataggctcc

SEQ ID NO: 448647 - DNA, 30 bp, Artificial Sequence
  Synthetic oligonucleotide
acatagggcctatatttgccgctaggctcc

SEQ ID NO: 448648 - DNA, 30 bp, Artificial Sequence
  Synthetic oligonucleotide
aatttgacggtactatccatcacgggctcc

SEQ ID NO: 448649 - DNA, 29 bp, Artificial Sequence
  Synthetic oligonucleotide
actgttaaaatcgcggcagtctgggctcc

SEQ ID NO: 448650 - DNA, 30 bp, Artificial Sequence
  Synthetic oligonucleotide
gtcttcgaaacgaaactcaactaatgctcc

SEQ ID NO: 448651 - DNA, 30 bp, Artificial Sequence
  Synthetic oligonucleotide
tgcagtctttacggcagaccgccgtgctcc

SEQ ID NO: 448652 - DNA, 30 bp, Artificial Sequence
  Synthetic oligonucleotide
gattagtgtctgatgaaataagggtgctcc

SEQ ID NO: 448653 - DNA, 30 bp, Artificial Sequence
  Synthetic oligonucleotide
tctaggtataagacaggagttgggtgctcc

SEQ ID NO: 448654 - DNA, 30 bp, Artificial Sequence
  Synthetic oligonucleotide
aaatgacagcccttagttgaccgaatctcc

SEQ ID NO: 448655 - DNA, 30 bp, Artificial Sequence
  Synthetic oligonucleotide
gaaatcagacattgtattgaagtaatctcc

SEQ ID NO: 448656 - DNA, 30 bp, Artificial Sequence
  Synthetic oligonucleotide
ctataccagcgtacttctacacccatctcc

SEQ ID NO: 448657 - DNA, 30 bp, Artificial Sequence
  Synthetic oligonucleotide
tacaaggagactaaaatttttttcatctcc

SEQ ID NO: 448658 - DNA, 30 bp, Artificial Sequence
  Synthetic oligonucleotide
ggaacaacggggtcggtggctgagatctcc

SEQ ID NO: 448659 - DNA, 30 bp, Artificial Sequence
  Synthetic oligonucleotide
ccatttgggtacacaaccgcagcgatctcc

SEQ ID NO: 448660 - DNA, 30 bp, Artificial Sequence
  Synthetic oligonucleotide
ctgtctcggcatccctacgtacggatctcc

SEQ ID NO: 448661 - DNA, 30 bp, Artificial Sequence
  Synthetic oligonucleotide
gtaagtatcactagtgcttgttgactctcc

SEQ ID NO: 448662 - DNA, 30 bp, Artificial Sequence
  Synthetic oligonucleotide
gttgcagtttgaatagcaatggtactctcc

SEQ ID NO: 448663 - DNA, 30 bp, Artificial Sequence
  Synthetic oligonucleotide
ggcaccatgggaatcgtatggcgcctctcc

SEQ ID NO: 448664 - DNA, 30 bp, Artificial Sequence
  Synthetic oligonucleotide
ggggacttatgttttagggaccggctctcc

SEQ ID NO: 448665 - DNA, 30 bp, Artificial Sequence
  Synthetic oligonucleotide
aaccggcgaagtgacatcgaattagtctcc

SEQ ID NO: 448666 - DNA, 30 bp, Artificial Sequence
  Synthetic oligonucleotide
agtatgacgtagcggtttacactggtctcc

SEQ ID NO: 448667 - DNA, 30 bp, Artificial Sequence
  Synthetic oligonucleotide
gaggttccacaggtaacccccgtggtctcc

SEQ ID NO: 448668 - DNA, 30 bp, Artificial Sequence
  Synthetic oligonucleotide
aaattgggatcatttttgcgacatgtctcc

SEQ ID NO: 448669 - DNA, 30 bp, Artificial Sequence
  Synthetic oligonucleotide
cgacggccggattttttgatggatgtctcc

SEQ ID NO: 448670 - DNA, 30 bp, Artificial Sequence
  Synthetic oligonucleotide
gagtacagtcacggcagtggggcattctcc

SEQ ID NO: 448671 - DNA, 30 bp, Artificial Sequence
  Synthetic oligonucleotide
ctagcacgcaggaaatcgcacctcttctcc

SEQ ID NO: 448672 - DNA, 30 bp, Artificial Sequence
  Synthetic oligonucleotide
cggagggtctgtgtgacagtaaagttctcc

SEQ ID NO: 448673 - DNA, 30 bp, Artificial Sequence
  Synthetic oligonucleotide
taggttcccaatgggctaaagtttttctcc

SEQ ID NO: 448674 - DNA, 30 bp, Artificial Sequence
  Synthetic oligonucleotide
acccggcctacttgtaacaccgaaaagtcc

SEQ ID NO: 448675 - DNA, 30 bp, Artificial Sequence
  Synthetic oligonucleotide
cttcctgtgggaccttgtcacttaaagtcc

SEQ ID NO: 448676 - DNA, 30 bp, Artificial Sequence
  Synthetic oligonucleotide
cctggcaggagatcttagggaaacaagtcc

SEQ ID NO: 448677 - DNA, 30 bp, Artificial Sequence
  Synthetic oligonucleotide
tgtgttgttcctcgatctctgaacaagtcc

SEQ ID NO: 448678 - DNA, 30 bp, Artificial Sequence
  Synthetic oligonucleotide
tgatcccctcgtataccgccagtcaagtcc

SEQ ID NO: 448679 - DNA, 30 bp, Artificial Sequence
  Synthetic oligonucleotide
gcatgtgtaagtccctgtttcgtcaagtcc

SEQ ID NO: 448680 - DNA, 30 bp, Artificial Sequence
  Synthetic oligonucleotide
cattccctcgcaccatcatcgttgaagtcc

SEQ ID NO: 448681 - DNA, 30 bp, Artificial Sequence
  Synthetic oligonucleotide
ttgggattacctctttctcatttgaagtcc

SEQ ID NO: 448682 - DNA, 30 bp, Artificial Sequence
  Synthetic oligonucleotide
tttttgacacattggtgttatctccagtcc

SEQ ID NO: 448683 - DNA, 30 bp, Artificial Sequence
  Synthetic oligonucleotide
cttcaatgctagtaaggaccctagcagtcc

SEQ ID NO: 448684 - DNA, 30 bp, Artificial Sequence
  Synthetic oligonucleotide
gttaggaacaatccgctttgattgcagtcc

SEQ ID NO: 448685 - DNA, 30 bp, Artificial Sequence
  Synthetic oligonucleotide
aggacatttgtgtgcgatagctatcagtcc

SEQ ID NO: 448686 - DNA, 30 bp, Artificial Sequence
  Synthetic oligonucleotide
ggcatagggtcggggagcggggcagagtcc

SEQ ID NO: 448687 - DNA, 30 bp, Artificial Sequence
  Synthetic oligonucleotide
tggatccgcagtcgcgtgtcaatagagtcc

SEQ ID NO: 448688 - DNA, 30 bp, Artificial Sequence
  Synthetic oligonucleotide
tagttttgagtagcctttagcagcgagtcc

SEQ ID NO: 448689 - DNA, 30 bp, Artificial Sequence
  Synthetic oligonucleotide
cggatcaccaccacccggccgcaggagtcc

SEQ ID NO: 448690 - DNA, 30 bp, Artificial Sequence
  Synthetic oligonucleotide
cccacagacccacataacagtggggagtcc

SEQ ID NO: 448691 - DNA, 30 bp, Artificial Sequence
  Synthetic oligonucleotide
acctcaacgacttcaaagggatcatagtcc

SEQ ID NO: 448692 - DNA, 30 bp, Artificial Sequence
  Synthetic oligonucleotide
ggcagctatgacccggacgttatctagtcc

SEQ ID NO: 448693 - DNA, 30 bp, Artificial Sequence
  Synthetic oligonucleotide
gggtggctgagttacatgaacatgtagtcc

SEQ ID NO: 448694 - DNA, 30 bp, Artificial Sequence
  Synthetic oligonucleotide
gggtctcggcggtatgacgatcggacgtcc

SEQ ID NO: 448695 - DNA, 30 bp, Artificial Sequence
  Synthetic oligonucleotide
gcaaagagggcgccttttgcttggacgtcc

SEQ ID NO: 448696 - DNA, 30 bp, Artificial Sequence
  Synthetic oligonucleotide
agcctgtaggtggtgtttgcagatacgtcc

SEQ ID NO: 448697 - DNA, 30 bp, Artificial Sequence
  Synthetic oligonucleotide
aagccgcacctcgttccaaaacctacgtcc

SEQ ID NO: 448698 - DNA, 30 bp, Artificial Sequence
  Synthetic oligonucleotide
cctcgttatgacaggagcacggctacgtcc

SEQ ID NO: 448699 - DNA, 30 bp, Artificial Sequence
  Synthetic oligonucleotide
ctgaagcagacagggttggcaccaccgtcc

SEQ ID NO: 448700 - DNA, 30 bp, Artificial Sequence
  Synthetic oligonucleotide
gccagacgtatgctatttatagacccgtcc

SEQ ID NO: 448701 - DNA, 30 bp, Artificial Sequence
  Synthetic oligonucleotide
cattcgattccaacatactaatctccgtcc

SEQ ID NO: 448702 - DNA, 30 bp, Artificial Sequence
  Synthetic oligonucleotide
ccctcatgtattcggcgaatgattccgtcc

SEQ ID NO: 448703 - DNA, 30 bp, Artificial Sequence
  Synthetic oligonucleotide
ggggccgatgagatccttatcacagcgtcc

SEQ ID NO: 448704 - DNA, 29 bp, Artificial Sequence
  Synthetic oligonucleotide
gacggaattgatcggacgctcacgcgtcc

SEQ ID NO: 448705 - DNA, 30 bp, Artificial Sequence
  Synthetic oligonucleotide
agtttccttagaaagtacttcaaggcgtcc

SEQ ID NO: 448706 - DNA, 30 bp, Artificial Sequence
  Synthetic oligonucleotide
cccattatgggtaacggtctagactcgtcc

SEQ ID NO: 448707 - DNA, 30 bp, Artificial Sequence
  Synthetic oligonucleotide
ccccaggatatgaatgacaaatactcgtcc

SEQ ID NO: 448708 - DNA, 30 bp, Artificial Sequence
  Synthetic oligonucleotide
taacgtatgaggagcaatacctaaaggtcc

SEQ ID NO: 448709 - DNA, 30 bp, Artificial Sequence
  Synthetic oligonucleotide
tcaataaaacccgggtcctcacgaaggtcc

SEQ ID NO: 448710 - DNA, 30 bp, Artificial Sequence
  Synthetic oligonucleotide
aatagcgtaagaaggtagaaggtaaggtcc

SEQ ID NO: 448711 - DNA, 30 bp, Artificial Sequence
  Synthetic oligonucleotide
gcaagcagtcgatcgggctagcgacggtcc

SEQ ID NO: 448712 - DNA, 30 bp, Artificial Sequence
  Synthetic oligonucleotide
atcgctacgcggctacaaatacttcggtcc

SEQ ID NO: 448713 - DNA, 30 bp, Artificial Sequence
  Synthetic oligonucleotide
aagtacttcggatcacgaaggttagggtcc

SEQ ID NO: 448714 - DNA, 30 bp, Artificial Sequence
  Synthetic oligonucleotide
tcgttttagccacgtgaaagacccgggtcc

SEQ ID NO: 448715 - DNA, 30 bp, Artificial Sequence
  Synthetic oligonucleotide
attacggttcaaacccgcacttgcgggtcc

SEQ ID NO: 448716 - DNA, 30 bp, Artificial Sequence
  Synthetic oligonucleotide
ctaacagggccacacttttgtcaggggtcc

SEQ ID NO: 448717 - DNA, 30 bp, Artificial Sequence
  Synthetic oligonucleotide
agagttcagctgcttcctatggcggggtcc

SEQ ID NO: 448718 - DNA, 30 bp, Artificial Sequence
  Synthetic oligonucleotide
cggttgcttacagtttcgcataaatggtcc

SEQ ID NO: 448719 - DNA, 30 bp, Artificial Sequence
  Synthetic oligonucleotide
ctcgcctcaatatctctgtcgctatggtcc

SEQ ID NO: 448720 - DNA, 30 bp, Artificial Sequence
  Synthetic oligonucleotide
ggggcccttatgttataaactgactggtcc

SEQ ID NO: 448721 - DNA, 30 bp, Artificial Sequence
  Synthetic oligonucleotide
gccggttatatcgtgatgtgtacctggtcc

SEQ ID NO: 448722 - DNA, 30 bp, Artificial Sequence
  Synthetic oligonucleotide
tgggcctggtagggtcacggtttctggtcc

SEQ ID NO: 448723 - DNA, 30 bp, Artificial Sequence
  Synthetic oligonucleotide
aagggattaggcggttgagggatgtggtcc

SEQ ID NO: 448724 - DNA, 30 bp, Artificial Sequence
  Synthetic oligonucleotide
tgtggtgctaaaggtaccttgtgttggtcc

SEQ ID NO: 448725 - DNA, 30 bp, Artificial Sequence
  Synthetic oligonucleotide
tggatctcttcatgcgttctgagaatgtcc

SEQ ID NO: 448726 - DNA, 30 bp, Artificial Sequence
  Synthetic oligonucleotide
ttgtatgacgcttacgattgttacatgtcc

SEQ ID NO: 448727 - DNA, 30 bp, Artificial Sequence
  Synthetic oligonucleotide
aatcataggttactccccttgtccatgtcc

SEQ ID NO: 448728 - DNA, 30 bp, Artificial Sequence
  Synthetic oligonucleotide
cgagaaacgaccgcgaaggttagcatgtcc

SEQ ID NO: 448729 - DNA, 30 bp, Artificial Sequence
  Synthetic oligonucleotide
gaccttccccgggcctatcattgcatgtcc

SEQ ID NO: 448730 - DNA, 30 bp, Artificial Sequence
  Synthetic oligonucleotide
ctttcgagcctagttacagatccgatgtcc

SEQ ID NO: 448731 - DNA, 30 bp, Artificial Sequence
  Synthetic oligonucleotide
tacctaggggcttttctaaagatcctgtcc

SEQ ID NO: 448732 - DNA, 30 bp, Artificial Sequence
  Synthetic oligonucleotide
gttccgagctcgagttatcttaaggtgtcc

SEQ ID NO: 448733 - DNA, 30 bp, Artificial Sequence
  Synthetic oligonucleotide
ctgagtagcgtcgagacgacactggtgtcc

SEQ ID NO: 448734 - DNA, 30 bp, Artificial Sequence
  Synthetic oligonucleotide
caacgcattatgaggtacggagcattgtcc

SEQ ID NO: 448735 - DNA, 30 bp, Artificial Sequence
  Synthetic oligonucleotide
agttacgcttccgtaacattatacttgtcc

SEQ ID NO: 448736 - DNA, 30 bp, Artificial Sequence
  Synthetic oligonucleotide
tcgggtctgtaattacgctggtacttgtcc

SEQ ID NO: 448737 - DNA, 30 bp, Artificial Sequence
  Synthetic oligonucleotide
cgatcctcacagccgcctacatcgttgtcc

SEQ ID NO: 448738 - DNA, 30 bp, Artificial Sequence
  Synthetic oligonucleotide
accctgaggatgcaattgcctaatttgtcc

SEQ ID NO: 448739 - DNA, 30 bp, Artificial Sequence
  Synthetic oligonucleotide
ttacagcgcagtagtgaaaaactaaattcc

SEQ ID NO: 448740 - DNA, 30 bp, Artificial Sequence
  Synthetic oligonucleotide
atagtttaggaggcgtgtataaacaattcc

SEQ ID NO: 448741 - DNA, 30 bp, Artificial Sequence
  Synthetic oligonucleotide
caagtatagattttcgcggctaacaattcc

SEQ ID NO: 448742 - DNA, 30 bp, Artificial Sequence
  Synthetic oligonucleotide
tgtatcggctatctacgtatgcccaattcc

SEQ ID NO: 448743 - DNA, 30 bp, Artificial Sequence
  Synthetic oligonucleotide
ggcctgcgacgcccccatccaagcaattcc

SEQ ID NO: 448744 - DNA, 30 bp, Artificial Sequence
  Synthetic oligonucleotide
gcaagttgtcaaatatgatgacgcaattcc

SEQ ID NO: 448745 - DNA, 30 bp, Artificial Sequence
  Synthetic oligonucleotide
gatggtaccttcggatcagcctagaattcc

SEQ ID NO: 448746 - DNA, 30 bp, Artificial Sequence
  Synthetic oligonucleotide
ccataattggacctctttgatgttaattcc

SEQ ID NO: 448747 - DNA, 30 bp, Artificial Sequence
  Synthetic oligonucleotide
cactcatctccaggaagggagaaacattcc

SEQ ID NO: 448748 - DNA, 30 bp, Artificial Sequence
  Synthetic oligonucleotide
aagtatggctgtatacggcaaatacattcc

SEQ ID NO: 448749 - DNA, 30 bp, Artificial Sequence
  Synthetic oligonucleotide
gcaggtacatagatagtaccattccattcc

SEQ ID NO: 448750 - DNA, 30 bp, Artificial Sequence
  Synthetic oligonucleotide
gggcctgcaaaatcgctgtcactgcattcc

SEQ ID NO: 448751 - DNA, 30 bp, Artificial Sequence
  Synthetic oligonucleotide
aaactaattggaccgcacaaacaagattcc

SEQ ID NO: 448752 - DNA, 30 bp, Artificial Sequence
  Synthetic oligonucleotide
taaagccggatctcgtaacctagagattcc

SEQ ID NO: 448753 - DNA, 30 bp, Artificial Sequence
  Synthetic oligonucleotide
gttgggaaagccagcctgtttcgggattcc

SEQ ID NO: 448754 - DNA, 30 bp, Artificial Sequence
  Synthetic oligonucleotide
ctcaagttatgtgttagtacttgggattcc

SEQ ID NO: 448755 - DNA, 29 bp, Artificial Sequence
  Synthetic oligonucleotide
gagaaaatagcgtggtacgtcttgattcc

SEQ ID NO: 448756 - DNA, 30 bp, Artificial Sequence
  Synthetic oligonucleotide
tcaacaccgaacaccactgctgttgattcc

SEQ ID NO: 448757 - DNA, 30 bp, Artificial Sequence
  Synthetic oligonucleotide
ctcccagccagctgcacttgctttgattcc

SEQ ID NO: 448758 - DNA, 30 bp, Artificial Sequence
  Synthetic oligonucleotide
tgtcttaaacagctaggtgaactatattcc

SEQ ID NO: 448759 - DNA, 30 bp, Artificial Sequence
  Synthetic oligonucleotide
atgaattgagaacttgctaaatactattcc

SEQ ID NO: 448760 - DNA, 30 bp, Artificial Sequence
  Synthetic oligonucleotide
gcaagctaacactacctctattcctattcc

SEQ ID NO: 448761 - DNA, 30 bp, Artificial Sequence
  Synthetic oligonucleotide
gacggctggatgttatacccttgctattcc

SEQ ID NO: 448762 - DNA, 30 bp, Artificial Sequence
  Synthetic oligonucleotide
aagtgatccgttcagggagcgcagtattcc

SEQ ID NO: 448763 - DNA, 30 bp, Artificial Sequence
  Synthetic oligonucleotide
cccacggctgagccttacgaagtgtattcc

SEQ ID NO: 448764 - DNA, 30 bp, Artificial Sequence
  Synthetic oligonucleotide
taagcgtcgcacacgtagtttcattattcc

SEQ ID NO: 448765 - DNA, 30 bp, Artificial Sequence
  Synthetic oligonucleotide
cgcagcccgttctactttttgaaaacttcc

SEQ ID NO: 448766 - DNA, 30 bp, Artificial Sequence
  Synthetic oligonucleotide
tgtttaaactctcaagtatataggacttcc

SEQ ID NO: 448767 - DNA, 30 bp, Artificial Sequence
  Synthetic oligonucleotide
actgaccaatcacgggtgtttcggacttcc

SEQ ID NO: 448768 - DNA, 30 bp, Artificial Sequence
  Synthetic oligonucleotide
cattaactctcaagtgcgtggtttacttcc

SEQ ID NO: 448769 - DNA, 30 bp, Artificial Sequence
  Synthetic oligonucleotide
aaattctaggataattcgcactgaccttcc

SEQ ID NO: 448770 - DNA, 30 bp, Artificial Sequence
  Synthetic oligonucleotide
tcgctttcaggggggctcctcgtaccttcc

SEQ ID NO: 448771 - DNA, 30 bp, Artificial Sequence
  Synthetic oligonucleotide
ttataaccacgggcaggtgtgcccccttcc

SEQ ID NO: 448772 - DNA, 30 bp, Artificial Sequence
  Synthetic oligonucleotide
acctcagcggcatataggcaaaatccttcc

SEQ ID NO: 448773 - DNA, 30 bp, Artificial Sequence
  Synthetic oligonucleotide
aatcgcgcagtgacaatttgtgccgcttcc

SEQ ID NO: 448774 - DNA, 30 bp, Artificial Sequence
  Synthetic oligonucleotide
gtttgaattgaacgtaactggagggcttcc

SEQ ID NO: 448775 - DNA, 30 bp, Artificial Sequence
  Synthetic oligonucleotide
gttcggagcggctatggcagacatgcttcc

SEQ ID NO: 448776 - DNA, 30 bp, Artificial Sequence
  Synthetic oligonucleotide
cccagcgccaggacgcagactcatgcttcc

SEQ ID NO: 448777 - DNA, 30 bp, Artificial Sequence
  Synthetic oligonucleotide
acccggactaagggggccattgttgcttcc

SEQ ID NO: 448778 - DNA, 30 bp, Artificial Sequence
  Synthetic oligonucleotide
gctgaagtcgtatgggacccacaatcttcc

SEQ ID NO: 448779 - DNA, 30 bp, Artificial Sequence
  Synthetic oligonucleotide
agtttcgtgtcaacccagcgctcctcttcc

SEQ ID NO: 448780 - DNA, 30 bp, Artificial Sequence
  Synthetic oligonucleotide
gtggtctgatattaattgattcgctcttcc

SEQ ID NO: 448781 - DNA, 30 bp, Artificial Sequence
  Synthetic oligonucleotide
ggattatttgggcttacgccttagtcttcc

SEQ ID NO: 448782 - DNA, 30 bp, Artificial Sequence
  Synthetic oligonucleotide
gcccacttcactgcggttgcattaagttcc

SEQ ID NO: 448783 - DNA, 30 bp, Artificial Sequence
  Synthetic oligonucleotide
atctagaacgcacatcctcaaaccagttcc

SEQ ID NO: 448784 - DNA, 30 bp, Artificial Sequence
  Synthetic oligonucleotide
gtagtcctagaaaggttaccgcgcagttcc

SEQ ID NO: 448785 - DNA, 30 bp, Artificial Sequence
  Synthetic oligonucleotide
gggaagcggggggcaaccagggaacgttcc

SEQ ID NO: 448786 - DNA, 30 bp, Artificial Sequence
  Synthetic oligonucleotide
aattaatcgtggcaggaggccccacgttcc

SEQ ID NO: 448787 - DNA, 30 bp, Artificial Sequence
  Synthetic oligonucleotide
ctctgatgccaaaatcccttctaccgttcc

SEQ ID NO: 448788 - DNA, 30 bp, Artificial Sequence
  Synthetic oligonucleotide
ttggccaggcgtaacttatttgaaggttcc

SEQ ID NO: 448789 - DNA, 30 bp, Artificial Sequence
  Synthetic oligonucleotide
tagtggaataaagtgtcggaaggcggttcc

SEQ ID NO: 448790 - DNA, 30 bp, Artificial Sequence
  Synthetic oligonucleotide
gcaggagaacttattgaaagaactggttcc

SEQ ID NO: 448791 - DNA, 30 bp, Artificial Sequence
  Synthetic oligonucleotide
tcaattaatccgccggtcggccaatgttcc

SEQ ID NO: 448792 - DNA, 30 bp, Artificial Sequence
  Synthetic oligonucleotide
ccaaagacataatgttctgccccatgttcc

SEQ ID NO: 448793 - DNA, 30 bp, Artificial Sequence
  Synthetic oligonucleotide
gtgttagcgttaaagcgtgttatatgttcc

SEQ ID NO: 448794 - DNA, 30 bp, Artificial Sequence
  Synthetic oligonucleotide
tgttaactcgcaagaatatcgcgctgttcc

SEQ ID NO: 448795 - DNA, 30 bp, Artificial Sequence
  Synthetic oligonucleotide
tatttctgtgtgctcctattcttctgttcc

SEQ ID NO: 448796 - DNA, 30 bp, Artificial Sequence
  Synthetic oligonucleotide
aattttatgcgaggcctgagtaagtgttcc

SEQ ID NO: 448797 - DNA, 30 bp, Artificial Sequence
  Synthetic oligonucleotide
ttgtactggtcaagtacgaggatttgttcc

SEQ ID NO: 448798 - DNA, 30 bp, Artificial Sequence
  Synthetic oligonucleotide
tatgggagctaagattattgggtaatttcc

SEQ ID NO: 448799 - DNA, 30 bp, Artificial Sequence
  Synthetic oligonucleotide
gtctagctggggcggaaatccaacatttcc

SEQ ID NO: 448800 - DNA, 30 bp, Artificial Sequence
  Synthetic oligonucleotide
ctttcgcgaaatactgcctctagcatttcc

SEQ ID NO: 448801 - DNA, 30 bp, Artificial Sequence
  Synthetic oligonucleotide
ttgcagctacgttctttccttgagatttcc

SEQ ID NO: 448802 - DNA, 30 bp, Artificial Sequence
  Synthetic oligonucleotide
caatgtgagcagtcaagttcaaatatttcc

SEQ ID NO: 448803 - DNA, 30 bp, Artificial Sequence
  Synthetic oligonucleotide
caagaatatcggagcacggggcgtatttcc

SEQ ID NO: 448804 - DNA, 30 bp, Artificial Sequence
  Synthetic oligonucleotide
gatagcgccagttatgggccaattatttcc

SEQ ID NO: 448805 - DNA, 30 bp, Artificial Sequence
  Synthetic oligonucleotide
aagactccacgcatgtatatttccctttcc

SEQ ID NO: 448806 - DNA, 30 bp, Artificial Sequence
  Synthetic oligonucleotide
tgagtgatactgcaaaagtataagctttcc

SEQ ID NO: 448807 - DNA, 30 bp, Artificial Sequence
  Synthetic oligonucleotide
taaagtcctaaagctgtgaactcagtttcc

SEQ ID NO: 448808 - DNA, 30 bp, Artificial Sequence
  Synthetic oligonucleotide
accgttcccggaccatgacactcagtttcc

SEQ ID NO: 448809 - DNA, 30 bp, Artificial Sequence
  Synthetic oligonucleotide
aatgcggctcgcggcgacgatggagtttcc

SEQ ID NO: 448810 - DNA, 30 bp, Artificial Sequence
  Synthetic oligonucleotide
aatgattgattgtgtcgccgaggggtttcc

SEQ ID NO: 448811 - DNA, 30 bp, Artificial Sequence
  Synthetic oligonucleotide
tcggtttctttaggggctatggaattttcc

SEQ ID NO: 448812 - DNA, 30 bp, Artificial Sequence
  Synthetic oligonucleotide
gttaattcgttaccatgtcccctattttcc

SEQ ID NO: 448813 - DNA, 30 bp, Artificial Sequence
  Synthetic oligonucleotide
ctaccttttaggaagtaacgctacttttcc

SEQ ID NO: 448814 - DNA, 30 bp, Artificial Sequence
  Synthetic oligonucleotide
gtgattggtcggtagacggctcgcttttcc

SEQ ID NO: 448815 - DNA, 30 bp, Artificial Sequence
  Synthetic oligonucleotide
gtgtgaaatcggggtagtgtaccgttttcc

SEQ ID NO: 448816 - DNA, 30 bp, Artificial Sequence
  Synthetic oligonucleotide
acatgctaggtaaaaaaagtttcgttttcc

SEQ ID NO: 448817 - DNA, 30 bp, Artificial Sequence
  Synthetic oligonucleotide
gaaccctgctaatggcgctcgactttttcc

SEQ ID NO: 448818 - DNA, 30 bp, Artificial Sequence
  Synthetic oligonucleotide
gccataaagaggttcgtttacgctttttcc

SEQ ID NO: 448819 - DNA, 30 bp, Artificial Sequence
  Synthetic oligonucleotide
gagatgagacatgaggcagtcgaaaaaagc

SEQ ID NO: 448820 - DNA, 30 bp, Artificial Sequence
  Synthetic oligonucleotide
agcatcaatgatcttgatcatgtaaaaagc

SEQ ID NO: 448821 - DNA, 30 bp, Artificial Sequence
  Synthetic oligonucleotide
gcataaccgcgttctggacgcttaaaaagc

SEQ ID NO: 448822 - DNA, 30 bp, Artificial Sequence
  Synthetic oligonucleotide
ggagcttgatactggacctctcccaaaagc

SEQ ID NO: 448823 - DNA, 30 bp, Artificial Sequence
  Synthetic oligonucleotide
tgctatcccccaagtgaatttccgaaaagc

SEQ ID NO: 448824 - DNA, 30 bp, Artificial Sequence
  Synthetic oligonucleotide
cgattacggactagtgctttagggaaaagc

SEQ ID NO: 448825 - DNA, 30 bp, Artificial Sequence
  Synthetic oligonucleotide
ggatggctagcttatttgtaactgaaaagc

SEQ ID NO: 448826 - DNA, 30 bp, Artificial Sequence
  Synthetic oligonucleotide
ttcttggcggggcgacgcaaaaaacaaagc

SEQ ID NO: 448827 - DNA, 30 bp, Artificial Sequence
  Synthetic oligonucleotide
acgactatatatggcgtttttctacaaagc

SEQ ID NO: 448828 - DNA, 30 bp, Artificial Sequence
  Synthetic oligonucleotide
taacaattcttcattttagccggccaaagc

SEQ ID NO: 448829 - DNA, 30 bp, Artificial Sequence
  Synthetic oligonucleotide
agccatatactctgcaaccgcctgcaaagc

SEQ ID NO: 448830 - DNA, 30 bp, Artificial Sequence
  Synthetic oligonucleotide
ttgttattatttcgtccactgaatcaaagc

SEQ ID NO: 448831 - DNA, 30 bp, Artificial Sequence
  Synthetic oligonucleotide
gcctatacggactagcgtaggtctcaaagc

SEQ ID NO: 448832 - DNA, 30 bp, Artificial Sequence
  Synthetic oligonucleotide
ggtatgatacaggacgttaattctcaaagc

SEQ ID NO: 448833 - DNA, 30 bp, Artificial Sequence
  Synthetic oligonucleotide
gggcctaaggcctggaaggataaagaaagc

SEQ ID NO: 448834 - DNA, 30 bp, Artificial Sequence
  Synthetic oligonucleotide
tagactgatactggccttgcacaagaaagc

SEQ ID NO: 448835 - DNA, 30 bp, Artificial Sequence
  Synthetic oligonucleotide
taatgtttttctgatgggcttggagaaagc

SEQ ID NO: 448836 - DNA, 30 bp, Artificial Sequence
  Synthetic oligonucleotide
cgcatcaggtatagttacatacgcgaaagc

SEQ ID NO: 448837 - DNA, 30 bp, Artificial Sequence
  Synthetic oligonucleotide
cttatgatcgccgtggagccacaggaaagc

SEQ ID NO: 448838 - DNA, 30 bp, Artificial Sequence
  Synthetic oligonucleotide
agctggcgcctaaagtaaggggaggaaagc

SEQ ID NO: 448839 - DNA, 30 bp, Artificial Sequence
  Synthetic oligonucleotide
tttccggagtggacgatggggacggaaagc

SEQ ID NO: 448840 - DNA, 30 bp, Artificial Sequence
  Synthetic oligonucleotide
gggcagcaggtttcgaaggctcatgaaagc

SEQ ID NO: 448841 - DNA, 30 bp, Artificial Sequence
  Synthetic oligonucleotide
gcttcatatacgtgtacaggtcctgaaagc

SEQ ID NO: 448842 - DNA, 30 bp, Artificial Sequence
  Synthetic oligonucleotide
ggtttacagtacctcattcgggctgaaagc

SEQ ID NO: 448843 - DNA, 30 bp, Artificial Sequence
  Synthetic oligonucleotide
caggagacctttcacggggcaggtgaaagc

SEQ ID NO: 448844 - DNA, 30 bp, Artificial Sequence
  Synthetic oligonucleotide
accctgcgctgcaactggtcaatctaaagc

SEQ ID NO: 448845 - DNA, 30 bp, Artificial Sequence
  Synthetic oligonucleotide
ggtaacatctttttattgatattctaaagc

SEQ ID NO: 448846 - DNA, 30 bp, Artificial Sequence
  Synthetic oligonucleotide
actgccgctaaacgcttgcccgtgtaaagc

SEQ ID NO: 448847 - DNA, 30 bp, Artificial Sequence
  Synthetic oligonucleotide
ccaagctgctgcaccccatcgtattaaagc

SEQ ID NO: 448848 - DNA, 30 bp, Artificial Sequence
  Synthetic oligonucleotide
tgcgagcgaaccccccggcaaagttaaagc

SEQ ID NO: 448849 - DNA, 30 bp, Artificial Sequence
  Synthetic oligonucleotide
ttgccaactgtacttagttcatgttaaagc

SEQ ID NO: 448850 - DNA, 30 bp, Artificial Sequence
  Synthetic oligonucleotide
tgaatatctggcattgtacgcctttaaagc

SEQ ID NO: 448851 - DNA, 30 bp, Artificial Sequence
  Synthetic oligonucleotide
atagtcgcagccaattcaaagtggacaagc

SEQ ID NO: 448852 - DNA, 30 bp, Artificial Sequence
  Synthetic oligonucleotide
catgcagtttcctgttcatatagtacaagc

SEQ ID NO: 448853 - DNA, 30 bp, Artificial Sequence
  Synthetic oligonucleotide
cacgtttcgcggtagctgcagtgtacaagc

SEQ ID NO: 448854 - DNA, 30 bp, Artificial Sequence
  Synthetic oligonucleotide
gattctgaccttgtcccttgaattacaagc

SEQ ID NO: 448855 - DNA, 30 bp, Artificial Sequence
  Synthetic oligonucleotide
ggcggggggtcgcaattgcttgttacaagc

SEQ ID NO: 448856 - DNA, 30 bp, Artificial Sequence
  Synthetic oligonucleotide
tatttcatgtgaactcaaggtaagccaagc

SEQ ID NO: 448857 - DNA, 30 bp, Artificial Sequence
  Synthetic oligonucleotide
gatcacatcattattggacccccgccaagc

SEQ ID NO: 448858 - DNA, 30 bp, Artificial Sequence
  Synthetic oligonucleotide
agttttcctagggatctacttatgccaagc

SEQ ID NO: 448859 - DNA, 30 bp, Artificial Sequence
  Synthetic oligonucleotide
agtaaggagacgctttgggggcgcgcaagc

SEQ ID NO: 448860 - DNA, 30 bp, Artificial Sequence
  Synthetic oligonucleotide
gcgttttacgatacttcgcagggggcaagc

SEQ ID NO: 448861 - DNA, 30 bp, Artificial Sequence
  Synthetic oligonucleotide
gggatcgcgtccagctgggtagatgcaagc

SEQ ID NO: 448862 - DNA, 30 bp, Artificial Sequence
  Synthetic oligonucleotide
gtgcgtttagcagactatcttgttgcaagc

SEQ ID NO: 448863 - DNA, 30 bp, Artificial Sequence
  Synthetic oligonucleotide
gtaaatgtcgtctgcgaagcgtcgtcaagc

SEQ ID NO: 448864 - DNA, 30 bp, Artificial Sequence
  Synthetic oligonucleotide
ctcatggtactgatcaacgtttattcaagc

SEQ ID NO: 448865 - DNA, 30 bp, Artificial Sequence
  Synthetic oligonucleotide
aggcccggctggacatgcgcgccttcaagc

SEQ ID NO: 448866 - DNA, 30 bp, Artificial Sequence
  Synthetic oligonucleotide
gccgacttttattggttccaatgttcaagc

SEQ ID NO: 448867 - DNA, 29 bp, Artificial Sequence
  Synthetic oligonucleotide
tagaatttagttcgtctcaagtttcaagc

SEQ ID NO: 448868 - DNA, 30 bp, Artificial Sequence
  Synthetic oligonucleotide
cctgtaagtcatgctaatttattttcaagc

SEQ ID NO: 448869 - DNA, 30 bp, Artificial Sequence
  Synthetic oligonucleotide
aaagacactcgcttttgtttccaaagaagc

SEQ ID NO: 448870 - DNA, 30 bp, Artificial Sequence
  Synthetic oligonucleotide
tacagagacgtttgaacgtaagaaagaagc

SEQ ID NO: 448871 - DNA, 30 bp, Artificial Sequence
  Synthetic oligonucleotide
tgccgcggcagtaaccaaaaaccaagaagc

SEQ ID NO: 448872 - DNA, 30 bp, Artificial Sequence
  Synthetic oligonucleotide
gatttctatcagtaaagtggcttaagaagc

SEQ ID NO: 448873 - DNA, 30 bp, Artificial Sequence
  Synthetic oligonucleotide
gacattgaatagctgctccttcgcagaagc

SEQ ID NO: 448874 - DNA, 30 bp, Artificial Sequence
  Synthetic oligonucleotide
ttatacaccaaaggtgacacttgtagaagc

SEQ ID NO: 448875 - DNA, 30 bp, Artificial Sequence
  Synthetic oligonucleotide
ttaactaaatcgtatgggttgaaccgaagc

SEQ ID NO: 448876 - DNA, 30 bp, Artificial Sequence
  Synthetic oligonucleotide
tgcacctaagaagcatatatccaccgaagc

SEQ ID NO: 448877 - DNA, 30 bp, Artificial Sequence
  Synthetic oligonucleotide
ccttgtttctagggagtcgcaagccgaagc

SEQ ID NO: 448878 - DNA, 30 bp, Artificial Sequence
  Synthetic oligonucleotide
gtcgctgttcgtcgggcattgggccgaagc

SEQ ID NO: 448879 - DNA, 30 bp, Artificial Sequence
  Synthetic oligonucleotide
tcagccgcggcgatctttgggctccgaagc

SEQ ID NO: 448880 - DNA, 30 bp, Artificial Sequence
  Synthetic oligonucleotide
atagaaccgtagacgtgccgatatcgaagc

SEQ ID NO: 448881 - DNA, 30 bp, Artificial Sequence
  Synthetic oligonucleotide
cccgctgtcttgctaagtgttacaggaagc

SEQ ID NO: 448882 - DNA, 30 bp, Artificial Sequence
  Synthetic oligonucleotide
ctccgagatatacggtaagcacgaggaagc

SEQ ID NO: 448883 - DNA, 30 bp, Artificial Sequence
  Synthetic oligonucleotide
tgagcagaggactcccgttaatacggaagc

SEQ ID NO: 448884 - DNA, 30 bp, Artificial Sequence
  Synthetic oligonucleotide
gtcatttttacgagaatgaccttcggaagc

SEQ ID NO: 448885 - DNA, 30 bp, Artificial Sequence
  Synthetic oligonucleotide
agacgccccgaagcgtaagagctgggaagc

SEQ ID NO: 448886 - DNA, 30 bp, Artificial Sequence
  Synthetic oligonucleotide
aatgaaattttatattgaatatatggaagc

SEQ ID NO: 448887 - DNA, 30 bp, Artificial Sequence
  Synthetic oligonucleotide
gagaccaggttgttcaaaagtgctggaagc

SEQ ID NO: 448888 - DNA, 30 bp, Artificial Sequence
  Synthetic oligonucleotide
cctctgctctattgctgcgtcgaatgaagc

SEQ ID NO: 448889 - DNA, 30 bp, Artificial Sequence
  Synthetic oligonucleotide
tttttgtaaaaatcgaggtgctactgaagc

SEQ ID NO: 448890 - DNA, 30 bp, Artificial Sequence
  Synthetic oligonucleotide
tatcagcgtctttcgtgaaacgagtgaagc

SEQ ID NO: 448891 - DNA, 30 bp, Artificial Sequence
  Synthetic oligonucleotide
gttgggtcttgagcaagcgaacggtgaagc

SEQ ID NO: 448892 - DNA, 30 bp, Artificial Sequence
  Synthetic oligonucleotide
acagatgccagccccacacttgggtgaagc

SEQ ID NO: 448893 - DNA, 30 bp, Artificial Sequence
  Synthetic oligonucleotide
attggatccagactttattcttcaataagc

SEQ ID NO: 448894 - DNA, 30 bp, Artificial Sequence
  Synthetic oligonucleotide
cttaggtgtgctgcacataccgtaataagc

SEQ ID NO: 448895 - DNA, 30 bp, Artificial Sequence
  Synthetic oligonucleotide
ggctccgccttattgcgtactaacataagc

SEQ ID NO: 448896 - DNA, 30 bp, Artificial Sequence
  Synthetic oligonucleotide
gactgcctccccgcagtcaaaaccataagc

SEQ ID NO: 448897 - DNA, 30 bp, Artificial Sequence
  Synthetic oligonucleotide
catatccctcgacgcaagatcacgataagc

SEQ ID NO: 448898 - DNA, 30 bp, Artificial Sequence
  Synthetic oligonucleotide
cctgttcgcctatatgggctcccgataagc

SEQ ID NO: 448899 - DNA, 30 bp, Artificial Sequence
  Synthetic oligonucleotide
tcagatactgaattgatgtgtcggataagc

SEQ ID NO: 448900 - DNA, 30 bp, Artificial Sequence
  Synthetic oligonucleotide
aggcaggtaacgctccgtaatcccctaagc

SEQ ID NO: 448901 - DNA, 30 bp, Artificial Sequence
  Synthetic oligonucleotide
ctcctagcaccattatagtgggctctaagc

SEQ ID NO: 448902 - DNA, 30 bp, Artificial Sequence
  Synthetic oligonucleotide
gcaaatccgcgattttcaacttacgtaagc

SEQ ID NO: 448903 - DNA, 30 bp, Artificial Sequence
  Synthetic oligonucleotide
acaactttaattccattggaatatgtaagc

SEQ ID NO: 448904 - DNA, 30 bp, Artificial Sequence
  Synthetic oligonucleotide
tctgattttaatagaaatctgtatgtaagc

SEQ ID NO: 448905 - DNA, 30 bp, Artificial Sequence
  Synthetic oligonucleotide
ggaatggttaaagcgtgggaggaattaagc

SEQ ID NO: 448906 - DNA, 30 bp, Artificial Sequence
  Synthetic oligonucleotide
catagcactttgagcattccactattaagc

SEQ ID NO: 448907 - DNA, 30 bp, Artificial Sequence
  Synthetic oligonucleotide
ctaggtatctacagatacccccccttaagc

SEQ ID NO: 448908 - DNA, 30 bp, Artificial Sequence
  Synthetic oligonucleotide
aagaaagtcatgttgcgagctacgttaagc

SEQ ID NO: 448909 - DNA, 30 bp, Artificial Sequence
  Synthetic oligonucleotide
ttgtcatctaaagcttgtgcgcggttaagc

SEQ ID NO: 448910 - DNA, 30 bp, Artificial Sequence
  Synthetic oligonucleotide
gtcgcgtatgcacgggcgtgtctaaacagc

SEQ ID NO: 448911 - DNA, 30 bp, Artificial Sequence
  Synthetic oligonucleotide
gtcggattactgtgatagcttctaaacagc

SEQ ID NO: 448912 - DNA, 30 bp, Artificial Sequence
  Synthetic oligonucleotide
ttacttcgctcgagggctgaacagaacagc

SEQ ID NO: 448913 - DNA, 30 bp, Artificial Sequence
  Synthetic oligonucleotide
gttctcacaatacgcaccccttggaacagc

SEQ ID NO: 448914 - DNA, 30 bp, Artificial Sequence
  Synthetic oligonucleotide
cacgatcatagggtaccgagattacacagc

SEQ ID NO: 448915 - DNA, 30 bp, Artificial Sequence
  Synthetic oligonucleotide
attaacatagagtgctgacgatgtcacagc

SEQ ID NO: 448916 - DNA, 30 bp, Artificial Sequence
  Synthetic oligonucleotide
aatcgggacaaaaccctgacattagacagc

SEQ ID NO: 448917 - DNA, 30 bp, Artificial Sequence
  Synthetic oligonucleotide
aggtttgtgtagtttatgtggcgcgacagc

SEQ ID NO: 448918 - DNA, 30 bp, Artificial Sequence
  Synthetic oligonucleotide
gtttcacggaggagcgggttacgggacagc

SEQ ID NO: 448919 - DNA, 30 bp, Artificial Sequence
  Synthetic oligonucleotide
tgtcgcgcgtatttagcaagtattgacagc

SEQ ID NO: 448920 - DNA, 30 bp, Artificial Sequence
  Synthetic oligonucleotide
cacgtacgcatgcatgcgttgccatacagc

SEQ ID NO: 448921 - DNA, 30 bp, Artificial Sequence
  Synthetic oligonucleotide
gtttgtaccgcgtaacgtccgggatacagc

SEQ ID NO: 448922 - DNA, 30 bp, Artificial Sequence
  Synthetic oligonucleotide
aagtctagtgacgggagctagttatacagc

SEQ ID NO: 448923 - DNA, 30 bp, Artificial Sequence
  Synthetic oligonucleotide
cttgtgtctagccactttcggttatacagc

SEQ ID NO: 448924 - DNA, 30 bp, Artificial Sequence
  Synthetic oligonucleotide
atgtactgtagggatgtcctgggctacagc

SEQ ID NO: 448925 - DNA, 30 bp, Artificial Sequence
  Synthetic oligonucleotide
agcgtaggtcgagcacccttgggctacagc

SEQ ID NO: 448926 - DNA, 30 bp, Artificial Sequence
  Synthetic oligonucleotide
atatattccgttaatccatttgagtacagc

SEQ ID NO: 448927 - DNA, 30 bp, Artificial Sequence
  Synthetic oligonucleotide
tttgacagctgggtcactagcccttacagc

SEQ ID NO: 448928 - DNA, 30 bp, Artificial Sequence
  Synthetic oligonucleotide
ggcggcgtggtggttataaagggcaccagc

SEQ ID NO: 448929 - DNA, 30 bp, Artificial Sequence
  Synthetic oligonucleotide
caattggtcaaacccatcattacgaccagc

SEQ ID NO: 448930 - DNA, 30 bp, Artificial Sequence
  Synthetic oligonucleotide
gtacgtgtttatcttggtgacgcgaccagc

SEQ ID NO: 448931 - DNA, 30 bp, Artificial Sequence
  Synthetic oligonucleotide
gccaatttgggccctaacgctatgaccagc

SEQ ID NO: 448932 - DNA, 30 bp, Artificial Sequence
  Synthetic oligonucleotide
gccggttgccgttgtttcagacctaccagc

SEQ ID NO: 448933 - DNA, 30 bp, Artificial Sequence
  Synthetic oligonucleotide
tatctgggtgcaatacaaaagcggcccagc

SEQ ID NO: 448934 - DNA, 30 bp, Artificial Sequence
  Synthetic oligonucleotide
gaatgattagatctatctacagggcccagc

SEQ ID NO: 448935 - DNA, 30 bp, Artificial Sequence
  Synthetic oligonucleotide
cagtgctggaaaccgcaatgagggcccagc

SEQ ID NO: 448936 - DNA, 30 bp, Artificial Sequence
  Synthetic oligonucleotide
tcccgtttaatgacacgttcatggcccagc

SEQ ID NO: 448937 - DNA, 30 bp, Artificial Sequence
  Synthetic oligonucleotide
aggggataactgatcccggtcgtgcccagc

SEQ ID NO: 448938 - DNA, 30 bp, Artificial Sequence
  Synthetic oligonucleotide
tacgcggctgggtgcgtatgctaagccagc

SEQ ID NO: 448939 - DNA, 30 bp, Artificial Sequence
  Synthetic oligonucleotide
ggaagtcaaaccgcgcgtctggtagccagc

SEQ ID NO: 448940 - DNA, 30 bp, Artificial Sequence
  Synthetic oligonucleotide
tagaatctgttcctatcgattgtagccagc

SEQ ID NO: 448941 - DNA, 30 bp, Artificial Sequence
  Synthetic oligonucleotide
accgcctcgcggaatgtttgacacgccagc

SEQ ID NO: 448942 - DNA, 30 bp, Artificial Sequence
  Synthetic oligonucleotide
gtaaacacctcgtcagctgctacggccagc

SEQ ID NO: 448943 - DNA, 30 bp, Artificial Sequence
  Synthetic oligonucleotide
gtctttgtaagtgtgagcatcgctgccagc

SEQ ID NO: 448944 - DNA, 30 bp, Artificial Sequence
  Synthetic oligonucleotide
tattgacctggatttaaagcaaggtccagc

SEQ ID NO: 448945 - DNA, 30 bp, Artificial Sequence
  Synthetic oligonucleotide
tcttattaactatttcgacggctttccagc

SEQ ID NO: 448946 - DNA, 30 bp, Artificial Sequence
  Synthetic oligonucleotide
tgggtttaccaaaccataaagttttccagc

SEQ ID NO: 448947 - DNA, 30 bp, Artificial Sequence
  Synthetic oligonucleotide
tatagtttaatggcgtttctccgaagcagc

SEQ ID NO: 448948 - DNA, 30 bp, Artificial Sequence
  Synthetic oligonucleotide
gacgtttacgtgtaacagtcaggcagcagc

SEQ ID NO: 448949 - DNA, 30 bp, Artificial Sequence
  Synthetic oligonucleotide
gtatgtcggacgactagcagtgtcagcagc

SEQ ID NO: 448950 - DNA, 30 bp, Artificial Sequence
  Synthetic oligonucleotide
tttgactatggtctgagtctagctagcagc

SEQ ID NO: 448951 - DNA, 30 bp, Artificial Sequence
  Synthetic oligonucleotide
cattgcaggcctggtgcctccgcgcgcagc

SEQ ID NO: 448952 - DNA, 30 bp, Artificial Sequence
  Synthetic oligonucleotide
tatgatcccacttcatcgtactatcgcagc

SEQ ID NO: 448953 - DNA, 30 bp, Artificial Sequence
  Synthetic oligonucleotide
tatcgcacacctccggtcccatttcgcagc

SEQ ID NO: 448954 - DNA, 30 bp, Artificial Sequence
  Synthetic oligonucleotide
ggttaagtcacgcgctttcatttcggcagc

SEQ ID NO: 448955 - DNA, 30 bp, Artificial Sequence
  Synthetic oligonucleotide
ctttgactttattagttctccccgggcagc

SEQ ID NO: 448956 - DNA, 30 bp, Artificial Sequence
  Synthetic oligonucleotide
ccgccccgagtaatagtttacctatgcagc

SEQ ID NO: 448957 - DNA, 30 bp, Artificial Sequence
  Synthetic oligonucleotide
atgtatgtccctaatataatggtctgcagc

SEQ ID NO: 448958 - DNA, 30 bp, Artificial Sequence
  Synthetic oligonucleotide
acagcccccgcaacggatatcacgtgcagc

SEQ ID NO: 448959 - DNA, 30 bp, Artificial Sequence
  Synthetic oligonucleotide
gcgggtgggaactaagtcgacgcttgcagc

SEQ ID NO: 448960 - DNA, 30 bp, Artificial Sequence
  Synthetic oligonucleotide
agttggtccaacacgagcgctggaatcagc

SEQ ID NO: 448961 - DNA, 30 bp, Artificial Sequence
  Synthetic oligonucleotide
aagcaactgatgagatgccacacgatcagc

SEQ ID NO: 448962 - DNA, 30 bp, Artificial Sequence
  Synthetic oligonucleotide
tgcagaggtaaatcatgattcatgatcagc

SEQ ID NO: 448963 - DNA, 30 bp, Artificial Sequence
  Synthetic oligonucleotide
ccgtttagagtccaaattgatatgatcagc

SEQ ID NO: 448964 - DNA, 30 bp, Artificial Sequence
  Synthetic oligonucleotide
acgaatccagctggaatctgaaatatcagc

SEQ ID NO: 448965 - DNA, 30 bp, Artificial Sequence
  Synthetic oligonucleotide
ttcacgttactcctttggagggatatcagc

SEQ ID NO: 448966 - DNA, 30 bp, Artificial Sequence
  Synthetic oligonucleotide
attcaaacgcattatgggtggcttatcagc

SEQ ID NO: 448967 - DNA, 30 bp, Artificial Sequence
  Synthetic oligonucleotide
gcgcactgaattatgcctatcgaactcagc

SEQ ID NO: 448968 - DNA, 30 bp, Artificial Sequence
  Synthetic oligonucleotide
gaattaaagcacgcgcatgcaatactcagc

SEQ ID NO: 448969 - DNA, 30 bp, Artificial Sequence
  Synthetic oligonucleotide
gctagagtcgagggaatagtcgtactcagc

SEQ ID NO: 448970 - DNA, 30 bp, Artificial Sequence
  Synthetic oligonucleotide
gtaatacttaaccctcgcaataagctcagc

SEQ ID NO: 448971 - DNA, 30 bp, Artificial Sequence
  Synthetic oligonucleotide
ccagtaaatgggtggcccccatatctcagc

SEQ ID NO: 448972 - DNA, 30 bp, Artificial Sequence
  Synthetic oligonucleotide
tggagctagactcgaaactgctgcgtcagc

SEQ ID NO: 448973 - DNA, 30 bp, Artificial Sequence
  Synthetic oligonucleotide
ctacgttgttaacgttacagttaggtcagc

SEQ ID NO: 448974 - DNA, 30 bp, Artificial Sequence
  Synthetic oligonucleotide
tagcagccggattaaaagtgatcggtcagc

SEQ ID NO: 448975 - DNA, 30 bp, Artificial Sequence
  Synthetic oligonucleotide
tgcgtcgcagagaattgaacattggtcagc

SEQ ID NO: 448976 - DNA, 30 bp, Artificial Sequence
  Synthetic oligonucleotide
ctagcctctgaggatgtgcggtgtgtcagc

SEQ ID NO: 448977 - DNA, 30 bp, Artificial Sequence
  Synthetic oligonucleotide
gcacagaagttgccaagattaggcttcagc

SEQ ID NO: 448978 - DNA, 30 bp, Artificial Sequence
  Synthetic oligonucleotide
attgatattcctagaccggtgtgtttcagc

SEQ ID NO: 448979 - DNA, 30 bp, Artificial Sequence
  Synthetic oligonucleotide
gtcaccccaccaacggtggcgtaaaagagc

SEQ ID NO: 448980 - DNA, 30 bp, Artificial Sequence
  Synthetic oligonucleotide
gctcttcacccaaatgtagggtaaaagagc

SEQ ID NO: 448981 - DNA, 30 bp, Artificial Sequence
  Synthetic oligonucleotide
tcccacggcgatgcgctgcattgaaagagc

SEQ ID NO: 448982 - DNA, 30 bp, Artificial Sequence
  Synthetic oligonucleotide
tagaatatcccagcatagcggaacaagagc

SEQ ID NO: 448983 - DNA, 30 bp, Artificial Sequence
  Synthetic oligonucleotide
atcgcggcactaggggtaacagccaagagc

SEQ ID NO: 448984 - DNA, 30 bp, Artificial Sequence
  Synthetic oligonucleotide
tatatactctatggaaggcaggccaagagc

SEQ ID NO: 448985 - DNA, 30 bp, Artificial Sequence
  Synthetic oligonucleotide
agcatgcacagcacgctcagacctaagagc

SEQ ID NO: 448986 - DNA, 30 bp, Artificial Sequence
  Synthetic oligonucleotide
gctagagtcctagtgtgtatgattaagagc

SEQ ID NO: 448987 - DNA, 30 bp, Artificial Sequence
  Synthetic oligonucleotide
ttaggttagagtggggtcgtatcacagagc

SEQ ID NO: 448988 - DNA, 30 bp, Artificial Sequence
  Synthetic oligonucleotide
tctaagatcattcgatcgtggtcacagagc

SEQ ID NO: 448989 - DNA, 30 bp, Artificial Sequence
  Synthetic oligonucleotide
gcgtccgctctgctctcggtcggccagagc

SEQ ID NO: 448990 - DNA, 30 bp, Artificial Sequence
  Synthetic oligonucleotide
gagtggggctatcaattcgtgggccagagc

SEQ ID NO: 448991 - DNA, 30 bp, Artificial Sequence
  Synthetic oligonucleotide
taagcgagtttgatgacacggttgcagagc

SEQ ID NO: 448992 - DNA, 30 bp, Artificial Sequence
  Synthetic oligonucleotide
atgtagcttgtccacttgtccttggagagc

SEQ ID NO: 448993 - DNA, 30 bp, Artificial Sequence
  Synthetic oligonucleotide
tttccgcctagctgtgtttagtatgagagc

SEQ ID NO: 448994 - DNA, 30 bp, Artificial Sequence
  Synthetic oligonucleotide
caccatcggggggtggtcagctgtgagagc

SEQ ID NO: 448995 - DNA, 30 bp, Artificial Sequence
  Synthetic oligonucleotide
ggcttcagtggtacgtccagtaaatagagc

SEQ ID NO: 448996 - DNA, 30 bp, Artificial Sequence
  Synthetic oligonucleotide
aagtcatagtgggcgaataccatttagagc

SEQ ID NO: 448997 - DNA, 30 bp, Artificial Sequence
  Synthetic oligonucleotide
gactaaatatccaaccggacttcgacgagc

SEQ ID NO: 448998 - DNA, 30 bp, Artificial Sequence
  Synthetic oligonucleotide
ggggccttaaggaacccggcaataccgagc

SEQ ID NO: 448999 - DNA, 30 bp, Artificial Sequence
  Synthetic oligonucleotide
atgagctctcttatgtatacgaacccgagc

SEQ ID NO: 449000 - DNA, 30 bp, Artificial Sequence
  Synthetic oligonucleotide
gattggagcaggaattcaggacctccgagc

SEQ ID NO: 449001 - DNA, 30 bp, Artificial Sequence
  Synthetic oligonucleotide
gttcggttctaaacctctgcccgcgcgagc

SEQ ID NO: 449002 - DNA, 30 bp, Artificial Sequence
  Synthetic oligonucleotide
tgtttggtcgcgcgtcatctgcgggcgagc

SEQ ID NO: 449003 - DNA, 30 bp, Artificial Sequence
  Synthetic oligonucleotide
cacatcgagaggtcacatgtcacgtcgagc

SEQ ID NO: 449004 - DNA, 30 bp, Artificial Sequence
  Synthetic oligonucleotide
ctgcctccctttgtgtactacaaaaggagc

SEQ ID NO: 449005 - DNA, 30 bp, Artificial Sequence
  Synthetic oligonucleotide
gtctcaacattgatggaacttggcaggagc

SEQ ID NO: 449006 - DNA, 30 bp, Artificial Sequence
  Synthetic oligonucleotide
gtgatctggtgacactggccttggaggagc

SEQ ID NO: 449007 - DNA, 30 bp, Artificial Sequence
  Synthetic oligonucleotide
tatcggagataagccgtttataataggagc

SEQ ID NO: 449008 - DNA, 30 bp, Artificial Sequence
  Synthetic oligonucleotide
gctagctagagaattgttatttttaggagc

SEQ ID NO: 449009 - DNA, 30 bp, Artificial Sequence
  Synthetic oligonucleotide
agccgcctacggatgcgtatcggacggagc

SEQ ID NO: 449010 - DNA, 30 bp, Artificial Sequence
  Synthetic oligonucleotide
actctattggtatggagattggcccggagc

SEQ ID NO: 449011 - DNA, 30 bp, Artificial Sequence
  Synthetic oligonucleotide
gtttgttcaggaaaacagcctgaagggagc

SEQ ID NO: 449012 - DNA, 30 bp, Artificial Sequence
  Synthetic oligonucleotide
ttgccacttgtgggcacagagtaagggagc

SEQ ID NO: 449013 - DNA, 30 bp, Artificial Sequence
  Synthetic oligonucleotide
cgagtgtgccctttgtggtaggcagggagc

SEQ ID NO: 449014 - DNA, 30 bp, Artificial Sequence
  Synthetic oligonucleotide
ttaagcacataaaagccacgctcagggagc

SEQ ID NO: 449015 - DNA, 30 bp, Artificial Sequence
  Synthetic oligonucleotide
actataagttcaatcgtaaagcgagggagc

SEQ ID NO: 449016 - DNA, 30 bp, Artificial Sequence
  Synthetic oligonucleotide
tctttttatcgtggaatggctcccgggagc

SEQ ID NO: 449017 - DNA, 30 bp, Artificial Sequence
  Synthetic oligonucleotide
cccggcacattgccggtcttcggcgggagc

SEQ ID NO: 449018 - DNA, 31 bp, Artificial Sequence
  Synthetic oligonucleotide
gcacgatccacccgcagtttgagtcgggagc

SEQ ID NO: 449019 - DNA, 30 bp, Artificial Sequence
  Synthetic oligonucleotide
gcgccagtgagatttcttaaagcctggagc

SEQ ID NO: 449020 - DNA, 30 bp, Artificial Sequence
  Synthetic oligonucleotide
tccgcggatagcctggtccaaagttggagc

SEQ ID NO: 449021 - DNA, 30 bp, Artificial Sequence
  Synthetic oligonucleotide
gtgtccacgacgatgcagactccaatgagc

SEQ ID NO: 449022 - DNA, 30 bp, Artificial Sequence
  Synthetic oligonucleotide
gaaatcgcactcagcgggacagtaatgagc

SEQ ID NO: 449023 - DNA, 30 bp, Artificial Sequence
  Synthetic oligonucleotide
aatgaggcagtttttactgtcaccatgagc

SEQ ID NO: 449024 - DNA, 30 bp, Artificial Sequence
  Synthetic oligonucleotide
gaaagtgtcatgatcataggaatcatgagc

SEQ ID NO: 449025 - DNA, 30 bp, Artificial Sequence
  Synthetic oligonucleotide
gtagcgcatgatagagaaagtttcatgagc

SEQ ID NO: 449026 - DNA, 30 bp, Artificial Sequence
  Synthetic oligonucleotide
cggggagccaacaaaacaagtcagatgagc

SEQ ID NO: 449027 - DNA, 30 bp, Artificial Sequence
  Synthetic oligonucleotide
atcgttggccaacgattggaattcctgagc

SEQ ID NO: 449028 - DNA, 30 bp, Artificial Sequence
  Synthetic oligonucleotide
ttttcaaaggcccttgagtcacatctgagc

SEQ ID NO: 449029 - DNA, 30 bp, Artificial Sequence
  Synthetic oligonucleotide
aacttgggggtattccaggggagagtgagc

SEQ ID NO: 449030 - DNA, 30 bp, Artificial Sequence
  Synthetic oligonucleotide
agtctcacccaatttataggagccgtgagc

SEQ ID NO: 449031 - DNA, 30 bp, Artificial Sequence
  Synthetic oligonucleotide
atatattctcatgctcaagtgtgggtgagc

SEQ ID NO: 449032 - DNA, 30 bp, Artificial Sequence
  Synthetic oligonucleotide
ttgcaaggcagctgacgtgcccctgtgagc

SEQ ID NO: 449033 - DNA, 30 bp, Artificial Sequence
  Synthetic oligonucleotide
ctagcgcgcagaaggttttttcagttgagc

SEQ ID NO: 449034 - DNA, 30 bp, Artificial Sequence
  Synthetic oligonucleotide
tatgttatttcgggcacctgttggttgagc

SEQ ID NO: 449035 - DNA, 29 bp, Artificial Sequence
  Synthetic oligonucleotide
gaggattgcagtgcagggtccttttgagc

SEQ ID NO: 449036 - DNA, 30 bp, Artificial Sequence
  Synthetic oligonucleotide
gcctcattctcccctataaatggaaatagc

SEQ ID NO: 449037 - DNA, 30 bp, Artificial Sequence
  Synthetic oligonucleotide
tcttccagtttgtgttaggctggaaatagc

SEQ ID NO: 449038 - DNA, 30 bp, Artificial Sequence
  Synthetic oligonucleotide
aaaaaagcgtagggtgcatgactaaatagc

SEQ ID NO: 449039 - DNA, 30 bp, Artificial Sequence
  Synthetic oligonucleotide
tatgttaccgttgagccgagagccaatagc

SEQ ID NO: 449040 - DNA, 30 bp, Artificial Sequence
  Synthetic oligonucleotide
gaagggatgaggtgataggagagcaatagc

SEQ ID NO: 449041 - DNA, 30 bp, Artificial Sequence
  Synthetic oligonucleotide
tgtagcgcaaagcgtcgcaggtgcaatagc

SEQ ID NO: 449042 - DNA, 30 bp, Artificial Sequence
  Synthetic oligonucleotide
ggagctttgagcggctgatccctcaatagc

SEQ ID NO: 449043 - DNA, 30 bp, Artificial Sequence
  Synthetic oligonucleotide
gaggtttgcgaggtttatcagctgaatagc

SEQ ID NO: 449044 - DNA, 30 bp, Artificial Sequence
  Synthetic oligonucleotide
taaaaatgaacacgatcgatattgaatagc

SEQ ID NO: 449045 - DNA, 30 bp, Artificial Sequence
  Synthetic oligonucleotide
atatactcggactccgccatccgccatagc

SEQ ID NO: 449046 - DNA, 30 bp, Artificial Sequence
  Synthetic oligonucleotide
ttgtgtggtagtcgccctggctggcatagc

SEQ ID NO: 449047 - DNA, 30 bp, Artificial Sequence
  Synthetic oligonucleotide
gtgagcttacttaaccgttaaggtcatagc

SEQ ID NO: 449048 - DNA, 30 bp, Artificial Sequence
  Synthetic oligonucleotide
gccgctcttggcgaggtcataggtcatagc

SEQ ID NO: 449049 - DNA, 30 bp, Artificial Sequence
  Synthetic oligonucleotide
ccaaagagccattgcaaaggtggagatagc

SEQ ID NO: 449050 - DNA, 30 bp, Artificial Sequence
  Synthetic oligonucleotide
gagcaggctaactaaagctatggcgatagc

SEQ ID NO: 449051 - DNA, 30 bp, Artificial Sequence
  Synthetic oligonucleotide
gtagctatcaatatgactcatgtcgatagc

SEQ ID NO: 449052 - DNA, 30 bp, Artificial Sequence
  Synthetic oligonucleotide
acccggtcgtgggacagggataaggatagc

SEQ ID NO: 449053 - DNA, 30 bp, Artificial Sequence
  Synthetic oligonucleotide
cttgtttctcatcccgcactccaggatagc

SEQ ID NO: 449054 - DNA, 30 bp, Artificial Sequence
  Synthetic oligonucleotide
ggggacacgggcattgagcacgaggatagc

SEQ ID NO: 449055 - DNA, 30 bp, Artificial Sequence
  Synthetic oligonucleotide
agggttcactaatacaacgaaagggatagc

SEQ ID NO: 449056 - DNA, 30 bp, Artificial Sequence
  Synthetic oligonucleotide
aattgtagctctcagtggtgattggatagc

SEQ ID NO: 449057 - DNA, 30 bp, Artificial Sequence
  Synthetic oligonucleotide
gatttgttgagggcgctcgtatcatatagc

SEQ ID NO: 449058 - DNA, 30 bp, Artificial Sequence
  Synthetic oligonucleotide
aactcgacggggagctcttactgatatagc

SEQ ID NO: 449059 - DNA, 30 bp, Artificial Sequence
  Synthetic oligonucleotide
cggtggttgtctgggtaaacagaaactagc

SEQ ID NO: 449060 - DNA, 30 bp, Artificial Sequence
  Synthetic oligonucleotide
ggtctcacgctaaagcgaaaggagactagc

SEQ ID NO: 449061 - DNA, 30 bp, Artificial Sequence
  Synthetic oligonucleotide
tgcccgatgcctgttaatccaacgactagc

SEQ ID NO: 449062 - DNA, 30 bp, Artificial Sequence
  Synthetic oligonucleotide
ggttgtatcactcatggtttgccgactagc

SEQ ID NO: 449063 - DNA, 30 bp, Artificial Sequence
  Synthetic oligonucleotide
atatcaaaacgcaaatggttaatgactagc

SEQ ID NO: 449064 - DNA, 30 bp, Artificial Sequence
  Synthetic oligonucleotide
gagaacaggcccggtactggattgactagc

SEQ ID NO: 449065 - DNA, 30 bp, Artificial Sequence
  Synthetic oligonucleotide
cttactacatagccggatatgacagctagc

SEQ ID NO: 449066 - DNA, 30 bp, Artificial Sequence
  Synthetic oligonucleotide
cacggctcaatttagctgccggcagctagc

SEQ ID NO: 449067 - DNA, 30 bp, Artificial Sequence
  Synthetic oligonucleotide
tccaacagtctcgacgcatgttgagctagc

SEQ ID NO: 449068 - DNA, 30 bp, Artificial Sequence
  Synthetic oligonucleotide
aagaacactaacctcggaatgccggctagc

SEQ ID NO: 449069 - DNA, 30 bp, Artificial Sequence
  Synthetic oligonucleotide
cacgtgtaggcacgtgacgcgagggctagc

SEQ ID NO: 449070 - DNA, 30 bp, Artificial Sequence
  Synthetic oligonucleotide
ttacacagggtaggtggtaacgcatctagc

SEQ ID NO: 449071 - DNA, 30 bp, Artificial Sequence
  Synthetic oligonucleotide
ataaactggttacttaatttcatatctagc

SEQ ID NO: 449072 - DNA, 30 bp, Artificial Sequence
  Synthetic oligonucleotide
acgccttgccccgtataaatggtatctagc

SEQ ID NO: 449073 - DNA, 30 bp, Artificial Sequence
  Synthetic oligonucleotide
ttttcggatatcggattgggcagctctagc

SEQ ID NO: 449074 - DNA, 30 bp, Artificial Sequence
  Synthetic oligonucleotide
ttcctacatcagtgacaaaaaagcagtagc

SEQ ID NO: 449075 - DNA, 30 bp, Artificial Sequence
  Synthetic oligonucleotide
tcattcgtttatcaaatactcatacgtagc

SEQ ID NO: 449076 - DNA, 30 bp, Artificial Sequence
  Synthetic oligonucleotide
aactgcgctcctttcgcattagcccgtagc

SEQ ID NO: 449077 - DNA, 30 bp, Artificial Sequence
  Synthetic oligonucleotide
atctgccagcatattcgggcccgccgtagc

SEQ ID NO: 449078 - DNA, 30 bp, Artificial Sequence
  Synthetic oligonucleotide
tgccttctgtatatagactgcatccgtagc

SEQ ID NO: 449079 - DNA, 30 bp, Artificial Sequence
  Synthetic oligonucleotide
gcaggtgggaccgtaaacggaaaaggtagc

SEQ ID NO: 449080 - DNA, 30 bp, Artificial Sequence
  Synthetic oligonucleotide
ggatttggtactgtcttaaaaccaggtagc

SEQ ID NO: 449081 - DNA, 30 bp, Artificial Sequence
  Synthetic oligonucleotide
gttgggccggtgttgctgggaaccggtagc

SEQ ID NO: 449082 - DNA, 30 bp, Artificial Sequence
  Synthetic oligonucleotide
tacaggaggagtggtaatgtcgggggtagc

SEQ ID NO: 449083 - DNA, 30 bp, Artificial Sequence
  Synthetic oligonucleotide
agatggttcgattcttttttggttggtagc

SEQ ID NO: 449084 - DNA, 30 bp, Artificial Sequence
  Synthetic oligonucleotide
gttaggttaattacgtgtgataaatgtagc

SEQ ID NO: 449085 - DNA, 30 bp, Artificial Sequence
  Synthetic oligonucleotide
taaagcacaacagtcatagctgcctgtagc

SEQ ID NO: 449086 - DNA, 30 bp, Artificial Sequence
  Synthetic oligonucleotide
atagcaatacacttagcgttaatgtgtagc

SEQ ID NO: 449087 - DNA, 30 bp, Artificial Sequence
  Synthetic oligonucleotide
ttaacacgtgggcgcaccgctcgttgtagc

SEQ ID NO: 449088 - DNA, 30 bp, Artificial Sequence
  Synthetic oligonucleotide
cattctccccgtgatgtgatgagaattagc

SEQ ID NO: 449089 - DNA, 30 bp, Artificial Sequence
  Synthetic oligonucleotide
ctagccagttaaccggcagtgttaattagc

SEQ ID NO: 449090 - DNA, 30 bp, Artificial Sequence
  Synthetic oligonucleotide
atagcgtcagagtaatattaggacattagc

SEQ ID NO: 449091 - DNA, 30 bp, Artificial Sequence
  Synthetic oligonucleotide
gctaactagtcatttcaatactggattagc

SEQ ID NO: 449092 - DNA, 30 bp, Artificial Sequence
  Synthetic oligonucleotide
aactttatatcctcgagtcgtgctattagc

SEQ ID NO: 449093 - DNA, 30 bp, Artificial Sequence
  Synthetic oligonucleotide
cctacgaagtccttcgggacaagtattagc

SEQ ID NO: 449094 - DNA, 30 bp, Artificial Sequence
  Synthetic oligonucleotide
actgtgcaatacataggcactcgtattagc

SEQ ID NO: 449095 - DNA, 30 bp, Artificial Sequence
  Synthetic oligonucleotide
actcagaggccacggaatattattattagc

SEQ ID NO: 449096 - DNA, 30 bp, Artificial Sequence
  Synthetic oligonucleotide
tctcccgcggcagagtttgttcgacttagc

SEQ ID NO: 449097 - DNA, 30 bp, Artificial Sequence
  Synthetic oligonucleotide
gatgggtaacggcgcgcagccaaccttagc

SEQ ID NO: 449098 - DNA, 30 bp, Artificial Sequence
  Synthetic oligonucleotide
cactattgcagttacatagcacgccttagc

SEQ ID NO: 449099 - DNA, 30 bp, Artificial Sequence
  Synthetic oligonucleotide
agtgtatctgcttccgagccatttcttagc

SEQ ID NO: 449100 - DNA, 30 bp, Artificial Sequence
  Synthetic oligonucleotide
ctccgcggcagagttctgcacggagttagc

SEQ ID NO: 449101 - DNA, 30 bp, Artificial Sequence
  Synthetic oligonucleotide
ccaggttatttcaaccagcttatagttagc

SEQ ID NO: 449102 - DNA, 30 bp, Artificial Sequence
  Synthetic oligonucleotide
tcgaaacgtcacggctgctacgccgttagc

SEQ ID NO: 449103 - DNA, 30 bp, Artificial Sequence
  Synthetic oligonucleotide
gcagtcggtatcaggcgcaccgccgttagc

SEQ ID NO: 449104 - DNA, 30 bp, Artificial Sequence
  Synthetic oligonucleotide
taatcttgctgatcaggctattccgttagc

SEQ ID NO: 449105 - DNA, 30 bp, Artificial Sequence
  Synthetic oligonucleotide
ttctggatgcggtacctttagacggttagc

SEQ ID NO: 449106 - DNA, 30 bp, Artificial Sequence
  Synthetic oligonucleotide
gtagctgctgaagctacaaaaacatttagc

SEQ ID NO: 449107 - DNA, 30 bp, Artificial Sequence
  Synthetic oligonucleotide
tgtcatcccgcgtacagccaccgatttagc

SEQ ID NO: 449108 - DNA, 30 bp, Artificial Sequence
  Synthetic oligonucleotide
aactaaccgcatgggcaactgtgatttagc

SEQ ID NO: 449109 - DNA, 30 bp, Artificial Sequence
  Synthetic oligonucleotide
gcgcttcaggatcagccgcgtgagtttagc

SEQ ID NO: 449110 - DNA, 30 bp, Artificial Sequence
  Synthetic oligonucleotide
gagtgtcgggacatcggaagcagttttagc

SEQ ID NO: 449111 - DNA, 30 bp, Artificial Sequence
  Synthetic oligonucleotide
tatggtcaattaggcgacgctcgttttagc

SEQ ID NO: 449112 - DNA, 30 bp, Artificial Sequence
  Synthetic oligonucleotide
cgggacacgcccgaaggtcgaggttttagc

SEQ ID NO: 449113 - DNA, 30 bp, Artificial Sequence
  Synthetic oligonucleotide
agttcctatacggagatttgagtttttagc

SEQ ID NO: 449114 - DNA, 30 bp, Artificial Sequence
  Synthetic oligonucleotide
ttccgatactgagtgaactttttttttagc

SEQ ID NO: 449115 - DNA, 30 bp, Artificial Sequence
  Synthetic oligonucleotide
tttccagccgcaatgaaaataaaaaaacgc

SEQ ID NO: 449116 - DNA, 30 bp, Artificial Sequence
  Synthetic oligonucleotide
aattctgtctactctctcgttaaaaaacgc

SEQ ID NO: 449117 - DNA, 30 bp, Artificial Sequence
  Synthetic oligonucleotide
acctgggtaacagtgctcgattaaaaacgc

SEQ ID NO: 449118 - DNA, 30 bp, Artificial Sequence
  Synthetic oligonucleotide
ctactcctctcttcggaatatttcaaacgc

SEQ ID NO: 449119 - DNA, 30 bp, Artificial Sequence
  Synthetic oligonucleotide
gactagacgctgggctcgggatggaaacgc

SEQ ID NO: 449120 - DNA, 30 bp, Artificial Sequence
  Synthetic oligonucleotide
gataattaatgtctgtacatccataaacgc

SEQ ID NO: 449121 - DNA, 30 bp, Artificial Sequence
  Synthetic oligonucleotide
gggccagggcattatagacacgcacaacgc

SEQ ID NO: 449122 - DNA, 30 bp, Artificial Sequence
  Synthetic oligonucleotide
ccgcttcggacaaacgaagcctgacaacgc

SEQ ID NO: 449123 - DNA, 30 bp, Artificial Sequence
  Synthetic oligonucleotide
gcagttacttcccagcaatgcttacaacgc

SEQ ID NO: 449124 - DNA, 30 bp, Artificial Sequence
  Synthetic oligonucleotide
ttcctgataaacatttgagaccgccaacgc

SEQ ID NO: 449125 - DNA, 29 bp, Artificial Sequence
  Synthetic oligonucleotide
gcgtacactgctcactactgaagcaacgc

SEQ ID NO: 449126 - DNA, 30 bp, Artificial Sequence
  Synthetic oligonucleotide
ctttttactgagaagggtaccccgcaacgc

SEQ ID NO: 449127 - DNA, 30 bp, Artificial Sequence
  Synthetic oligonucleotide
gcggtatggggtggtttggctgggcaacgc

SEQ ID NO: 449128 - DNA, 30 bp, Artificial Sequence
  Synthetic oligonucleotide
aaattcatgattgttttgctcatgcaacgc

SEQ ID NO: 449129 - DNA, 30 bp, Artificial Sequence
  Synthetic oligonucleotide
acagtttcttgagaattgcctcaagaacgc

SEQ ID NO: 449130 - DNA, 30 bp, Artificial Sequence
  Synthetic oligonucleotide
tagtcgcagcaggaaataagaggcgaacgc

SEQ ID NO: 449131 - DNA, 30 bp, Artificial Sequence
  Synthetic oligonucleotide
acaatgcgggccgggactttgccggaacgc

SEQ ID NO: 449132 - DNA, 30 bp, Artificial Sequence
  Synthetic oligonucleotide
agctcttggtaccttgaagttccggaacgc

SEQ ID NO: 449133 - DNA, 30 bp, Artificial Sequence
  Synthetic oligonucleotide
tattcatgcatgccgcgaaccgcggaacgc

SEQ ID NO: 449134 - DNA, 30 bp, Artificial Sequence
  Synthetic oligonucleotide
atcccgctgttatttggtaaccgggaacgc

SEQ ID NO: 449135 - DNA, 30 bp, Artificial Sequence
  Synthetic oligonucleotide
ccgggaggttgtaggtatatgcatgaacgc

SEQ ID NO: 449136 - DNA, 30 bp, Artificial Sequence
  Synthetic oligonucleotide
tatccagtgggcttggattagagtgaacgc

SEQ ID NO: 449137 - DNA, 30 bp, Artificial Sequence
  Synthetic oligonucleotide
cttcttcaacggccagataataaataacgc

SEQ ID NO: 449138 - DNA, 30 bp, Artificial Sequence
  Synthetic oligonucleotide
atggtggagtacatttatccgtaataacgc

SEQ ID NO: 449139 - DNA, 30 bp, Artificial Sequence
  Synthetic oligonucleotide
ttaagtgagcctagcagttctgcctaacgc

SEQ ID NO: 449140 - DNA, 30 bp, Artificial Sequence
  Synthetic oligonucleotide
gtatttgcgccaatgtttcggacgtaacgc

SEQ ID NO: 449141 - DNA, 30 bp, Artificial Sequence
  Synthetic oligonucleotide
atttgttgggagatttcaagtgattaacgc

SEQ ID NO: 449142 - DNA, 30 bp, Artificial Sequence
  Synthetic oligonucleotide
ctgaaagcgcacttgcgccttgattaacgc

SEQ ID NO: 449143 - DNA, 30 bp, Artificial Sequence
  Synthetic oligonucleotide
tgcgggatacaatcacagccaaaaacacgc

SEQ ID NO: 449144 - DNA, 30 bp, Artificial Sequence
  Synthetic oligonucleotide
atataagacatgttaggcgactcaacacgc

SEQ ID NO: 449145 - DNA, 30 bp, Artificial Sequence
  Synthetic oligonucleotide
tgccgtccacgttatttcgtaagcacacgc

SEQ ID NO: 449146 - DNA, 30 bp, Artificial Sequence
  Synthetic oligonucleotide
tcaagtcttgggaccccgattcgcacacgc

SEQ ID NO: 449147 - DNA, 30 bp, Artificial Sequence
  Synthetic oligonucleotide
tgaccgtatagtaccacgcggcggacacgc

SEQ ID NO: 449148 - DNA, 30 bp, Artificial Sequence
  Synthetic oligonucleotide
gaaagggaaaataattaatgctggacacgc

SEQ ID NO: 449149 - DNA, 30 bp, Artificial Sequence
  Synthetic oligonucleotide
gtcttatccgcgcgtctggggatgacacgc

SEQ ID NO: 449150 - DNA, 30 bp, Artificial Sequence
  Synthetic oligonucleotide
tacatggtgagggctatcttgcatacacgc

SEQ ID NO: 449151 - DNA, 30 bp, Artificial Sequence
  Synthetic oligonucleotide
gtgtagtctgtcgtcgctttgcgtacacgc

SEQ ID NO: 449152 - DNA, 30 bp, Artificial Sequence
  Synthetic oligonucleotide
cagccgtcgctaagtagtagtcttacacgc

SEQ ID NO: 449153 - DNA, 30 bp, Artificial Sequence
  Synthetic oligonucleotide
gcgatttatgtatattgcctgtaaccacgc

SEQ ID NO: 449154 - DNA, 30 bp, Artificial Sequence
  Synthetic oligonucleotide
caggtcttctatttggtcttccatccacgc

SEQ ID NO: 449155 - DNA, 30 bp, Artificial Sequence
  Synthetic oligonucleotide
attttggctatactatgtgcttgagcacgc

SEQ ID NO: 449156 - DNA, 30 bp, Artificial Sequence
  Synthetic oligonucleotide
cagcgataacagtagccatgccctgcacgc

SEQ ID NO: 449157 - DNA, 30 bp, Artificial Sequence
  Synthetic oligonucleotide
agcgggcgtcgcctgctttgtattgcacgc

SEQ ID NO: 449158 - DNA, 30 bp, Artificial Sequence
  Synthetic oligonucleotide
gcatataggggtacagacctctttgcacgc

SEQ ID NO: 449159 - DNA, 30 bp, Artificial Sequence
  Synthetic oligonucleotide
caaccgtggagagcgagatctgaatcacgc

SEQ ID NO: 449160 - DNA, 30 bp, Artificial Sequence
  Synthetic oligonucleotide
ttaatctacggtgagccttcaacatcacgc

SEQ ID NO: 449161 - DNA, 30 bp, Artificial Sequence
  Synthetic oligonucleotide
ttctactaactataggcaattgcatcacgc

SEQ ID NO: 449162 - DNA, 30 bp, Artificial Sequence
  Synthetic oligonucleotide
acctaatgtcagtatcttcgaatatcacgc

SEQ ID NO: 449163 - DNA, 30 bp, Artificial Sequence
  Synthetic oligonucleotide
cgtcagcactgctgtacgacacggtcacgc

SEQ ID NO: 449164 - DNA, 30 bp, Artificial Sequence
  Synthetic oligonucleotide
accggcctttccgcaactagtcggtcacgc

SEQ ID NO: 449165 - DNA, 30 bp, Artificial Sequence
  Synthetic oligonucleotide
gtcagatcacacatattacttgggtcacgc

SEQ ID NO: 449166 - DNA, 30 bp, Artificial Sequence
  Synthetic oligonucleotide
attggaattaagcattaattatggtcacgc

SEQ ID NO: 449167 - DNA, 30 bp, Artificial Sequence
  Synthetic oligonucleotide
atctatgggcggggtatttcgttttcacgc

SEQ ID NO: 449168 - DNA, 30 bp, Artificial Sequence
  Synthetic oligonucleotide
atgcggaaaataatggtagctaaaagacgc

SEQ ID NO: 449169 - DNA, 30 bp, Artificial Sequence
  Synthetic oligonucleotide
cggttgcacagggagtcatgggaaagacgc

SEQ ID NO: 449170 - DNA, 30 bp, Artificial Sequence
  Synthetic oligonucleotide
acgccaatggatttgatgtccgcaagacgc

SEQ ID NO: 449171 - DNA, 30 bp, Artificial Sequence
  Synthetic oligonucleotide
gttgacagtagtgctgcggaaaacagacgc

SEQ ID NO: 449172 - DNA, 30 bp, Artificial Sequence
  Synthetic oligonucleotide
ataaatgaaggctacttaaacgccagacgc

SEQ ID NO: 449173 - DNA, 30 bp, Artificial Sequence
  Synthetic oligonucleotide
tagcggatttcaattgaacagttcagacgc

SEQ ID NO: 449174 - DNA, 30 bp, Artificial Sequence
  Synthetic oligonucleotide
atcgtacgtctccacagtataatgagacgc

SEQ ID NO: 449175 - DNA, 30 bp, Artificial Sequence
  Synthetic oligonucleotide
cgagttttaatgcctacaggaaatagacgc

SEQ ID NO: 449176 - DNA, 30 bp, Artificial Sequence
  Synthetic oligonucleotide
gctcgctgatactcccgatgacatagacgc

SEQ ID NO: 449177 - DNA, 30 bp, Artificial Sequence
  Synthetic oligonucleotide
aaaagtgggagagggtgcgtatttagacgc

SEQ ID NO: 449178 - DNA, 30 bp, Artificial Sequence
  Synthetic oligonucleotide
actaaatttcggtttaggggcacacgacgc

SEQ ID NO: 449179 - DNA, 30 bp, Artificial Sequence
  Synthetic oligonucleotide
ccactaagtcccgagttctcgccacgacgc

SEQ ID NO: 449180 - DNA, 30 bp, Artificial Sequence
  Synthetic oligonucleotide
tgcgcaggcatttccattatccgacgacgc

SEQ ID NO: 449181 - DNA, 30 bp, Artificial Sequence
  Synthetic oligonucleotide
ataggcgttgtgaattccacagtgcgacgc

SEQ ID NO: 449182 - DNA, 30 bp, Artificial Sequence
  Synthetic oligonucleotide
cggtctgcatacttcgcattacgtcgacgc

SEQ ID NO: 449183 - DNA, 30 bp, Artificial Sequence
  Synthetic oligonucleotide
caaaaatgttggtggcgtcctgttcgacgc

SEQ ID NO: 449184 - DNA, 30 bp, Artificial Sequence
  Synthetic oligonucleotide
ccgtgcagtcgttggcgctaatttcgacgc

SEQ ID NO: 449185 - DNA, 30 bp, Artificial Sequence
  Synthetic oligonucleotide
gacgagcaaacgatattcaaccaaggacgc

SEQ ID NO: 449186 - DNA, 30 bp, Artificial Sequence
  Synthetic oligonucleotide
attaagtagactaaatgtgaatcaggacgc

SEQ ID NO: 449187 - DNA, 30 bp, Artificial Sequence
  Synthetic oligonucleotide
cggggaccttatataacatcattaggacgc

SEQ ID NO: 449188 - DNA, 30 bp, Artificial Sequence
  Synthetic oligonucleotide
gagtgcaaccatatcggaatgaacggacgc

SEQ ID NO: 449189 - DNA, 30 bp, Artificial Sequence
  Synthetic oligonucleotide
tgccttgagcatggtcggagcgtgggacgc

SEQ ID NO: 449190 - DNA, 30 bp, Artificial Sequence
  Synthetic oligonucleotide
ctctacgagttaaagtatccaagtggacgc

SEQ ID NO: 449191 - DNA, 30 bp, Artificial Sequence
  Synthetic oligonucleotide
ttgcagtagtgaaggaaaggtagtggacgc

SEQ ID NO: 449192 - DNA, 30 bp, Artificial Sequence
  Synthetic oligonucleotide
tgcgggaactgcaagaatggaatatgacgc

SEQ ID NO: 449193 - DNA, 30 bp, Artificial Sequence
  Synthetic oligonucleotide
acgagagctacctcgtaacgtatatgacgc

SEQ ID NO: 449194 - DNA, 30 bp, Artificial Sequence
  Synthetic oligonucleotide
attttgatgatgataaaaattgactgacgc

SEQ ID NO: 449195 - DNA, 30 bp, Artificial Sequence
  Synthetic oligonucleotide
gtaaacggcgcaagttgtcaaagctgacgc

SEQ ID NO: 449196 - DNA, 30 bp, Artificial Sequence
  Synthetic oligonucleotide
gccgttggtcttagtacagtggattgacgc

SEQ ID NO: 449197 - DNA, 30 bp, Artificial Sequence
  Synthetic oligonucleotide
ggatacatagatatattccaatcttgacgc

SEQ ID NO: 449198 - DNA, 30 bp, Artificial Sequence
  Synthetic oligonucleotide
aaattcaagagcgctctcgggagaatacgc

SEQ ID NO: 449199 - DNA, 30 bp, Artificial Sequence
  Synthetic oligonucleotide
ctgtactggagactctgctatgacatacgc

SEQ ID NO: 449200 - DNA, 30 bp, Artificial Sequence
  Synthetic oligonucleotide
gtcccatagcctggctacaggttcatacgc

SEQ ID NO: 449201 - DNA, 30 bp, Artificial Sequence
  Synthetic oligonucleotide
ttatgaggatacatggactatgttatacgc

SEQ ID NO: 449202 - DNA, 30 bp, Artificial Sequence
  Synthetic oligonucleotide
tctcaggcccagcatgactgtgttatacgc

SEQ ID NO: 449203 - DNA, 30 bp, Artificial Sequence
  Synthetic oligonucleotide
cctacttgttaattgactttacgactacgc

SEQ ID NO: 449204 - DNA, 30 bp, Artificial Sequence
  Synthetic oligonucleotide
cgggtccgcatcagccaagggcacctacgc

SEQ ID NO: 449205 - DNA, 30 bp, Artificial Sequence
  Synthetic oligonucleotide
ctgtgaagacgaccccgatcggacctacgc

SEQ ID NO: 449206 - DNA, 30 bp, Artificial Sequence
  Synthetic oligonucleotide
aattactaagcaagtttctacagcctacgc

SEQ ID NO: 449207 - DNA, 30 bp, Artificial Sequence
  Synthetic oligonucleotide
gagagacgaacgtaggtagtgctgctacgc

SEQ ID NO: 449208 - DNA, 30 bp, Artificial Sequence
  Synthetic oligonucleotide
taggacggggaacccctgtagcgtctacgc

SEQ ID NO: 449209 - DNA, 30 bp, Artificial Sequence
  Synthetic oligonucleotide
ctgatcgcaagagtagtacaagttctacgc

SEQ ID NO: 449210 - DNA, 30 bp, Artificial Sequence
  Synthetic oligonucleotide
ctcgttgttggcgtaattgatttagtacgc

SEQ ID NO: 449211 - DNA, 30 bp, Artificial Sequence
  Synthetic oligonucleotide
gaagaagtctttacgtcaccacgcgtacgc

SEQ ID NO: 449212 - DNA, 30 bp, Artificial Sequence
  Synthetic oligonucleotide
gcagatcgtagcatgctaatcacggtacgc

SEQ ID NO: 449213 - DNA, 30 bp, Artificial Sequence
  Synthetic oligonucleotide
ttcgctatatatttctgctacgcggtacgc

SEQ ID NO: 449214 - DNA, 30 bp, Artificial Sequence
  Synthetic oligonucleotide
tctcacagtccttcggattgtgatgtacgc

SEQ ID NO: 449215 - DNA, 30 bp, Artificial Sequence
  Synthetic oligonucleotide
ttcgcgtagcaaaggtcagctactgtacgc

SEQ ID NO: 449216 - DNA, 30 bp, Artificial Sequence
  Synthetic oligonucleotide
gaaagaccgtcgggataaacagctgtacgc

SEQ ID NO: 449217 - DNA, 30 bp, Artificial Sequence
  Synthetic oligonucleotide
gtgtaatgagaacctgtgaagtctgtacgc

SEQ ID NO: 449218 - DNA, 30 bp, Artificial Sequence
  Synthetic oligonucleotide
gcaatctcacgagttctgcaatgtgtacgc

SEQ ID NO: 449219 - DNA, 30 bp, Artificial Sequence
  Synthetic oligonucleotide
tgtgatgtttactggattttatcattacgc

SEQ ID NO: 449220 - DNA, 30 bp, Artificial Sequence
  Synthetic oligonucleotide
ccccacgtccaatcgaccgcttcattacgc

SEQ ID NO: 449221 - DNA, 30 bp, Artificial Sequence
  Synthetic oligonucleotide
tatgtcagaccctctcggttatacttacgc

SEQ ID NO: 449222 - DNA, 30 bp, Artificial Sequence
  Synthetic oligonucleotide
atgtggaagagcgaatcagagcccttacgc

SEQ ID NO: 449223 - DNA, 30 bp, Artificial Sequence
  Synthetic oligonucleotide
ttgtcatgatcgcagcgggttacgttacgc

SEQ ID NO: 449224 - DNA, 30 bp, Artificial Sequence
  Synthetic oligonucleotide
cttacccgagtggcgttcgtgccgttacgc

SEQ ID NO: 449225 - DNA, 30 bp, Artificial Sequence
  Synthetic oligonucleotide
agccatcctcttggttctcgcaatttacgc

SEQ ID NO: 449226 - DNA, 30 bp, Artificial Sequence
  Synthetic oligonucleotide
ggtggattggggtgtttgaaaagtttacgc

SEQ ID NO: 449227 - DNA, 30 bp, Artificial Sequence
  Synthetic oligonucleotide
gtgttgacgtatggttacttaggtttacgc

SEQ ID NO: 449228 - DNA, 30 bp, Artificial Sequence
  Synthetic oligonucleotide
aatcatcatacctaagttaatgttttacgc

SEQ ID NO: 449229 - DNA, 30 bp, Artificial Sequence
  Synthetic oligonucleotide
gcgcgtttgcatgtcctgatgtgaaaccgc

SEQ ID NO: 449230 - DNA, 30 bp, Artificial Sequence
  Synthetic oligonucleotide
taatgttcgcgcgtcgtagtgtacaaccgc

SEQ ID NO: 449231 - DNA, 30 bp, Artificial Sequence
  Synthetic oligonucleotide
ctaatctgcaagcgcggactcgccaaccgc

SEQ ID NO: 449232 - DNA, 30 bp, Artificial Sequence
  Synthetic oligonucleotide
aaatatagactggctcgaacgcgcaaccgc

SEQ ID NO: 449233 - DNA, 30 bp, Artificial Sequence
  Synthetic oligonucleotide
atctctcccatctgccgaccggtcaaccgc

SEQ ID NO: 449234 - DNA, 30 bp, Artificial Sequence
  Synthetic oligonucleotide
actattttaccccagtgcgctcataaccgc

SEQ ID NO: 449235 - DNA, 30 bp, Artificial Sequence
  Synthetic oligonucleotide
tgactacagcggtacagaaagcaacaccgc

SEQ ID NO: 449236 - DNA, 30 bp, Artificial Sequence
  Synthetic oligonucleotide
gctggtttgaatgtctaaaaaggacaccgc

SEQ ID NO: 449237 - DNA, 30 bp, Artificial Sequence
  Synthetic oligonucleotide
ctaccagtgcatctacacctaggacaccgc

SEQ ID NO: 449238 - DNA, 30 bp, Artificial Sequence
  Synthetic oligonucleotide
ggtcgggaccatctatgattgacccaccgc

SEQ ID NO: 449239 - DNA, 30 bp, Artificial Sequence
  Synthetic oligonucleotide
aaggtatgaatcgggttgtcaagccaccgc

SEQ ID NO: 449240 - DNA, 30 bp, Artificial Sequence
  Synthetic oligonucleotide
aaacgccctatatcctggctattccaccgc

SEQ ID NO: 449241 - DNA, 30 bp, Artificial Sequence
  Synthetic oligonucleotide
gagttaactgccagcaaatacttgcaccgc

SEQ ID NO: 449242 - DNA, 30 bp, Artificial Sequence
  Synthetic oligonucleotide
ggttcgctctgagtaagaagataagaccgc

SEQ ID NO: 449243 - DNA, 30 bp, Artificial Sequence
  Synthetic oligonucleotide
acgtctccgtatatattaggacacgaccgc

SEQ ID NO: 449244 - DNA, 30 bp, Artificial Sequence
  Synthetic oligonucleotide
ggcggagttagcggttataaaacggaccgc

SEQ ID NO: 449245 - DNA, 30 bp, Artificial Sequence
  Synthetic oligonucleotide
cgtatgggccgcatttcgcaaccggaccgc

SEQ ID NO: 449246 - DNA, 30 bp, Artificial Sequence
  Synthetic oligonucleotide
atatcgtcggtagaaattgatgcggaccgc

SEQ ID NO: 449247 - DNA, 30 bp, Artificial Sequence
  Synthetic oligonucleotide
tttattgtatcttgggaaggtagggaccgc

SEQ ID NO: 449248 - DNA, 30 bp, Artificial Sequence
  Synthetic oligonucleotide
gtagttacaccgcagagaagtaaataccgc

SEQ ID NO: 449249 - DNA, 30 bp, Artificial Sequence
  Synthetic oligonucleotide
aaacgaacgcaaaagggctcgtggtaccgc

SEQ ID NO: 449250 - DNA, 30 bp, Artificial Sequence
  Synthetic oligonucleotide
agcgcttccacgtctgtacgtctgtaccgc

SEQ ID NO: 449251 - DNA, 30 bp, Artificial Sequence
  Synthetic oligonucleotide
aatgaaatctcatttccagcagcaacccgc

SEQ ID NO: 449252 - DNA, 30 bp, Artificial Sequence
  Synthetic oligonucleotide
acgttattctcattcgccctcatcacccgc

SEQ ID NO: 449253 - DNA, 30 bp, Artificial Sequence
  Synthetic oligonucleotide
ctatagagtcattcctccgagaagacccgc

SEQ ID NO: 449254 - DNA, 30 bp, Artificial Sequence
  Synthetic oligonucleotide
tggtatccctggacatacctcgtgacccgc

SEQ ID NO: 449255 - DNA, 30 bp, Artificial Sequence
  Synthetic oligonucleotide
cgacgcgctgctgttcgcttaagtacccgc

SEQ ID NO: 449256 - DNA, 30 bp, Artificial Sequence
  Synthetic oligonucleotide
tgctttcaagtgtgggaacgcgcaccccgc

SEQ ID NO: 449257 - DNA, 30 bp, Artificial Sequence
  Synthetic oligonucleotide
taacacgcttggaaggttggtatcccccgc

SEQ ID NO: 449258 - DNA, 30 bp, Artificial Sequence
  Synthetic oligonucleotide
taacatgtaagcgcaccttcggtagcccgc

SEQ ID NO: 449259 - DNA, 30 bp, Artificial Sequence
  Synthetic oligonucleotide
ttgaacggagcgcggggatcttacgcccgc

SEQ ID NO: 449260 - DNA, 30 bp, Artificial Sequence
  Synthetic oligonucleotide
attatccagggtcagtggtcggaatcccgc

SEQ ID NO: 449261 - DNA, 30 bp, Artificial Sequence
  Synthetic oligonucleotide
gatccagctcataattctccattatcccgc

SEQ ID NO: 449262 - DNA, 30 bp, Artificial Sequence
  Synthetic oligonucleotide
gagtagagcaagaatcatcttcgaagccgc

SEQ ID NO: 449263 - DNA, 30 bp, Artificial Sequence
  Synthetic oligonucleotide
tgcgtccgtctgcatgagtgcggaagccgc

SEQ ID NO: 449264 - DNA, 30 bp, Artificial Sequence
  Synthetic oligonucleotide
tgtaagcggggagctttccttcgcagccgc

SEQ ID NO: 449265 - DNA, 30 bp, Artificial Sequence
  Synthetic oligonucleotide
gtaccctgttgcctgaatggaatcagccgc

SEQ ID NO: 449266 - DNA, 30 bp, Artificial Sequence
  Synthetic oligonucleotide
gtgtgtgcgagctgatgtttacggagccgc

SEQ ID NO: 449267 - DNA, 30 bp, Artificial Sequence
  Synthetic oligonucleotide
tccctttacgaaatatcttctagtagccgc

SEQ ID NO: 449268 - DNA, 30 bp, Artificial Sequence
  Synthetic oligonucleotide
gttacgaatcatcgggtctgtgaccgccgc

SEQ ID NO: 449269 - DNA, 30 bp, Artificial Sequence
  Synthetic oligonucleotide
gagcctcaagctgcctgtgccaaaggccgc

SEQ ID NO: 449270 - DNA, 30 bp, Artificial Sequence
  Synthetic oligonucleotide
ggcaaaggcaaatttcctctagtaggccgc

SEQ ID NO: 449271 - DNA, 30 bp, Artificial Sequence
  Synthetic oligonucleotide
aaggtccagcgcggggttcgctagggccgc

SEQ ID NO: 449272 - DNA, 30 bp, Artificial Sequence
  Synthetic oligonucleotide
gcctggaagtgggtatgggagtggggccgc

SEQ ID NO: 449273 - DNA, 30 bp, Artificial Sequence
  Synthetic oligonucleotide
gtcgctgtgagttaaggttcatttggccgc

SEQ ID NO: 449274 - DNA, 30 bp, Artificial Sequence
  Synthetic oligonucleotide
tgtattaagttcaagtgccgtacctgccgc

SEQ ID NO: 449275 - DNA, 30 bp, Artificial Sequence
  Synthetic oligonucleotide
aactatagatataaaagcgccatgtgccgc

SEQ ID NO: 449276 - DNA, 30 bp, Artificial Sequence
  Synthetic oligonucleotide
tactctgtaaactctggatgttgaatccgc

SEQ ID NO: 449277 - DNA, 30 bp, Artificial Sequence
  Synthetic oligonucleotide
agctagtgtgggtcgcagtgtttaatccgc

SEQ ID NO: 449278 - DNA, 30 bp, Artificial Sequence
  Synthetic oligonucleotide
gcgatattggatctatgtaacaatatccgc

SEQ ID NO: 449279 - DNA, 30 bp, Artificial Sequence
  Synthetic oligonucleotide
gtaatcgtaggtgcaggtcgcggtatccgc

SEQ ID NO: 449280 - DNA, 30 bp, Artificial Sequence
  Synthetic oligonucleotide
ccgatggttcgctccaaaatttccctccgc

SEQ ID NO: 449281 - DNA, 30 bp, Artificial Sequence
  Synthetic oligonucleotide
acccgcgtgtgatgttgcggtacgctccgc

SEQ ID NO: 449282 - DNA, 30 bp, Artificial Sequence
  Synthetic oligonucleotide
gcgggacccatctggcatgcagatctccgc

SEQ ID NO: 449283 - DNA, 30 bp, Artificial Sequence
  Synthetic oligonucleotide
ctaggacattacccttggataaaagtccgc

SEQ ID NO: 449284 - DNA, 30 bp, Artificial Sequence
  Synthetic oligonucleotide
tgcacatagcgtgacaattatttagtccgc

SEQ ID NO: 449285 - DNA, 30 bp, Artificial Sequence
  Synthetic oligonucleotide
gaactttgtatgattacaaaaaaggtccgc

SEQ ID NO: 449286 - DNA, 30 bp, Artificial Sequence
  Synthetic oligonucleotide
tgggattgggttctccctagggccttccgc

SEQ ID NO: 449287 - DNA, 30 bp, Artificial Sequence
  Synthetic oligonucleotide
cgtacttatgcactccgcccgctcttccgc

SEQ ID NO: 449288 - DNA, 30 bp, Artificial Sequence
  Synthetic oligonucleotide
gacgtactcacactatacgctgcgttccgc

SEQ ID NO: 449289 - DNA, 30 bp, Artificial Sequence
  Synthetic oligonucleotide
cgtacgctgcgcgggattcgatgtttccgc

SEQ ID NO: 449290 - DNA, 30 bp, Artificial Sequence
  Synthetic oligonucleotide
ttgaggtttatctggacgttgcataagcgc

SEQ ID NO: 449291 - DNA, 30 bp, Artificial Sequence
  Synthetic oligonucleotide
gaaccctctagtcgcggatgctaacagcgc
